United States Patent Application Publication US 2006/0107345 A1 - sequence listing, part 6

SEQ ID NO: 21230 - DNA, 1478 bp, Glycine max
aacgaatccaaagcacagatattgaatgttcacattctactcggtcattggtaaggaaagtcctagaggaaagtttactgaaattgaaggaagaaaccactagacacagtaagtctatcagatgggagcttggggcatgttgggtacaacatttacaaaatcaagctactgggaaaactgagccgaaaaaggcagaagagggtaaagttgaaccagctgttaaaggtcttgggaagcaaggtggattactaaaggaattaaagaaaaagattgatatcagaaactccaaagctgaagtaggaaaggatatttccccatgtaatggcaatgacataaacaagccagaagccactaaacaggaattagagagacaagatgaagaaaaggcaactatatggaaaaaactgctatctgatgctgcatatacacgccttaaagaatctaaaactgatcttcatctgaagtcacctgatgaattgatggaaatggcacataaatattatgttgaaactgcacttccaaagctggtggcagattttgggtcccttgaactctcacctgttgatggaaggacgttgactgatttcatgcataccaggggcttgcaaatgtcttccttaggacgagtggttgagcttgcagataaacttcctcatgtgcaatctctatgtatacatgagatggttgttcgagcctacaagcatatcttgcaagcagttgttgcagcagttgataatgtttctgagttggcttcaactatagcatcatgcttaaatatattattgggaatgccatcacctgaaactaatgatgaagatattactagttgtgacgaactgaaatggagatgggtagaaaacttccttctgaagaggtttgggtgtcagtggaaggatgaaaatggtcaagatttaagaaagtttgccattcttcgtggactctgtcataaggtggggcttgagctggttcctagggactatgaaatggatacagcatctccttttagaaagacagatattgtaagcatggtccccatatataagcatgtagcttgttcatctgctgatggccgcacacttttggaatcatctaagacttccttggataaaggtaaattggaggatgctgtcaactatggcacaaaggcactctcaaaattagtgtcagtttgtgggccttaccatagaatgacagcaggagcatatagtctcttggctgtagtgttgtaccatactggagatttcaaccaggcaactatctatcagcaaaaggcactagacattaatgaaagagagcttggactggaccatcctgatacgatgaaaagttatggggatcttgctgttttctattatcgactccaacatacagagttggctttaaagtatgttaatcgtgctttgtatcttctgcacttaacctgtggaccttcacatccaaacactgctgccacctatattaatgttgcaatgatggaa

SEQ ID NO: 21231 - protein, 492 aa, Glycine max
RIQSTDIECSHSTRSLVRKVLEESLLKLKEETTRHSKSIRWELGACWVQHLQNQATGKTEPKKAEEGKVEPAVKGLGKQGGLLKELKKKIDIRNSKAEVGKDISPCNGNDINKPEATKQELERQDEEKATIWKKLLSDAAYTRLKESKTDLHLKSPDELMEMAHKYYVETALPKLVADFGSLELSPVDGRTLTDFMHTRGLQMSSLGRVVELADKLPHVQSLCIHEMVVRAYKHILQAVVAAVDNVSELASTIASCLNILLGMPSPETNDEDITSCDELKWRWVENFLLKRFGCQWKDENGQDLRKFAILRGLCHKVGLELVPRDYEMDTASPFRKTDIVSMVPIYKHVACSSADGRTLLESSKTSLDKGKLEDAVNYGTKALSKLVSVCGPYHRMTAGAYSLLAVVLYHTGDFNQATIYQQKALDINERELGLDHPDTMKSYGDLAVFYYRLQHTELALKYVNRALYLLHLTCGPSHPNTAATYINVAMME

SEQ ID NO: 21232 - protein, 333 aa, Glycine max
MEMAHKYYVETALPKLVADFGSLELSPVDGRTLTDFMHTRGLQMSSLGRVVELADKLPHVQSLCIHEMVVRAYKHILQAVVAAVDNVSELASTIASCLNILLGMPSPETNDEDITSCDELKWRWVENFLLKRFGCQWKDENGQDLRKFAILRGLCHKVGLELVPRDYEMDTASPFRKTDIVSMVPIYKHVACSSADGRTLLESSKTSLDKGKLEDAVNYGTKALSKLVSVCGPYHRMTAGAYSLLAVVLYHTGDFNQATIYQQKALDINERELGLDHPDTMKSYGDLAVFYYRLQHTELALKYVNRALYLLHLTCGPSHPNTAATYINVAMME

SEQ ID NO: 21233 - protein, 331 aa, Glycine max
MAHKYYVETALPKLVADFGSLELSPVDGRTLTDFMHTRGLQMSSLGRVVELADKLPHVQSLCIHEMVVRAYKHILQAVVAAVDNVSELASTIASCLNILLGMPSPETNDEDITSCDELKWRWVENFLLKRFGCQWKDENGQDLRKFAILRGLCHKVGLELVPRDYEMDTASPFRKTDIVSMVPIYKHVACSSADGRTLLESSKTSLDKGKLEDAVNYGTKALSKLVSVCGPYHRMTAGAYSLLAVVLYHTGDFNQATIYQQKALDINERELGLDHPDTMKSYGDLAVFYYRLQHTELALKYVNRALYLLHLTCGPSHPNTAATYINVAMME

SEQ ID NO: 21234 - DNA, 1683 bp, Glycine max
gaacaatccatccttgaacgtgcctttagatctgcaaacttcagcttagagcaaaacaataaataaaaaatccaccttttctatcaacctctagctatatccatttttatccaaatgacagaaaaactttccaacaatccatccttgaacgtgcctttactatccgagtggaatcaccatgatgaggagaaagccatagcctctcatccttctaccaaaaatactgtgtccttctttcgcacatgccttaatggactcaatgcaatatcaggtgttggaatactgtcagttccatatgctcttgcatctggagggtggttaagcttggttcttctatttgctattgccgctgcagcattttacacaggcacgttgattaaaagatgtatggacaagaattcgaacattaaaacctacccagatataggtgagcttgcatttggaaagataggaaggctaataatatcagtgtccatgtacacggagctctacttggtttcaatagggttcttgattctggaaggcgataacttgaataacttgtgccccattgaagaggttcagatagctggcttcgtaattggtgggaagcaactgtttgtgatattggttgcccttatcatcttgcccacagtttggttggacaacttgagtatgctttcttatgtatctgcaagtggagtgtttgcttctgctgtaatcatcctatcaatatcatggactggaacatttgatggagttggttttcatcaaaagggaactcttgttaattggcgcggaatccccacagctgttagcttgtatgccttttgctattgtgcacatcccgtcttccccaccttgtacaattccatgactaacaaacatcagttctctaatgtcctattagtatgctttctgttaaccactgtgggttatgcatccatggctataattggttatctaatgtttggtgctgacgttgaatcacaagtaacattaaacctgccactgaacaaagtaagctcaaaattagcaatatatacaaccttggtcaatcccatatccaagttcgctttgatggcaacaccaattaccaatgcgttgaaagatttacttccaagggcgtacaagaatagagcgaccaacatcttagtcagcactgtcttggtaataagcgctaccattgttgccctcagtgttcctttctttggggatctcatgtctctggttggagcgtttttaagtgtcacagcttctattctgcttccatgcttgtgttacttgaagatttcaggcacttacaatgaatttgggtgtgagaccatagccatagtgacaataatagtagcagctatagcaatgggaatatctggaacatatacctctgtcatggaaatagtacatcatttgtaatagacaatgcagtggtccattctattgactgtaaatttcctcaaaaaaggatttttttttttctttcactcatgtgactgtatgtcttacgaggaaaaggagaggtaaatactgatgaagaagtaagatatggttggtgaaaaagaggaaaaggaaaatatatgatacagatcatatatgctatcctatatctagagagagaaagaaaaagagagaaagaaaaagagagaaaaatataaatattataaaatttatgatgtaataaaaaaatattgatgatgtgtttat

SEQ ID NO: 21235 - protein, 426 aa, Glycine max
MTEKLSNNPSLNVPLLSEWNHHDEEKAIASHPSTKNTVSFFRTCLNGLNAISGVGILSVPYALASGGWLSLVLLFAIAAAAFYTGTLIKRCMDKNSNIKTYPDIGELAFGKIGRLIISVSMYTELYLVSIGFLILEGDNLNNLCPIEEVQIAGFVIGGKQLFVILVALIILPTVWLDNLSMLSYVSASGVFASAVIILSISWTGTFDGVGFHQKGTLVNWRGIPTAVSLYAFCYCAHPVFPTLYNSMTNKHQFSNVLLVCFLLTTVGYASMAIIGYLMFGADVESQVTLNLPLNKVSSKLAIYTTLVNPISKFALMATPITNALKDLLPRAYKNRATNILVSTVLVISATIVALSVPFFGDLMSLVGAFLSVTASILLPCLCYLKISGTYNEFGCETIAIVTIIVAAIAMGISGTYTSVMEIVHHL

SEQ ID NO: 21236 - protein, 335 aa, Glycine max
MDKNSNIKTYPDIGELAFGKIGRLIISVSMYTELYLVSIGFLILEGDNLNNLCPIEEVQIAGFVIGGKQLFVILVALIILPTVWLDNLSMLSYVSASGVFASAVIILSISWTGTFDGVGFHQKGTLVNWRGIPTAVSLYAFCYCAHPVFPTLYNSMTNKHQFSNVLLVCFLLTTVGYASMAIIGYLMFGADVESQVTLNLPLNKVSSKLAIYTTLVNPISKFALMATPITNALKDLLPRAYKNRATNILVSTVLVISATIVALSVPFFGDLMSLVGAFLSVTASILLPCLCYLKISGTYNEFGCETIAIVTIIVAAIAMGISGTYTSVMEIVHHL

SEQ ID NO: 21237 - protein, 306 aa, Glycine max
MYTELYLVSIGFLILEGDNLNNLCPIEEVQIAGFVIGGKQLFVILVALIILPTVWLDNLSMLSYVSASGVFASAVIILSISWTGTFDGVGFHQKGTLVNWRGIPTAVSLYAFCYCAHPVFPTLYNSMTNKHQFSNVLLVCFLLTTVGYASMAIIGYLMFGADVESQVTLNLPLNKVSSKLAIYTTLVNPISKFALMATPITNALKDLLPRAYKNRATNILVSTVLVISATIVALSVPFFGDLMSLVGAFLSVTASILLPCLCYLKISGTYNEFGCETIAIVTIIVAAIAMGISGTYTSVMEIVHHL

SEQ ID NO: 21238 - DNA, 1812 bp, Glycine max
agttacatcaaaatcaaattctgatatttatagtgctaatataggtgggattgaggcaggatgcactaattactctaaattgctttccaaaggacttgatactaaatggaaaggaataccttttgcaaatgtctttggttcattcaacaaaacttcttccttcaatactgagaagcttgttgagtacaacccagttcacattttatcatttcgagagctggagcgccagacaggtgctagattgcttcttccagccagcactaatgataccatagtgcctgtctacgatgatgaacccactagtgttatagcgtatgtgcttgtgtcaatggattatcatatgcagatgttagaatatgatagacctaaagagagtggagacagttcaatttcattgccactctttgattcaacaagtctactttctctcaactcttttgatgagacaattactaatacctacagaagtcttggctcttttgatgagaatgtgttacccacttctgggtctcggagtttgccggctggggatccattctcatacacaaaggatttgcatgcaagggtttcttttactgatgatggctcccttggaaaagtgaaatatactgtaacttgctactatgcaaaaagatttgaggctttaagaagaacttgttgcccttctgagttagattttgtgcggtcccttagtcgttgtaagaagtggggagctcagggaggaaagagcaatgttttctttgcaaaaaccctggacgatagatttatcatcaaacaggttacaaaaacagagcttgagtcgtttactaagtttgcaccagcttattttaagtatttatctgagtcaatcagtacaggaagtccaacttgtcttgcgaagatcttggggatttatcaggtaacatcaaagcacctcaaaggagggaaggaaacaaagatggatgttttggttatggaaaatcttctttacaggcgtaacattagacggctttatgatctcaaaggttcttctcgttcacggtacaatccagatacaagtgggagcaataaagtgctgctggatcagaatctcattgaagctatgccaacctctccaatatttgttgggaacaaggcaaaacggttgctcgagagggctgtgtggaatgatactgccttccttgcatcaatatatgtgatggactactcattgctggttggcgtggatgaggaaaagcatgagttggttttaggtatcattgattttatgaggcagtatacatgggacaaacaccttgaaacttgggtgaagacctcaggcatccttggtggacccaagaacacttctccaactgtgatatcaccacagcagtacaagaaacggtttaggaaagccatgagcttatattttcttatggtgccagatcaatggtcccctccagagttacaccccagtgggtcccaatctgacatttgtgacgaaaatgcgtgaggcatgggactcatttcattgatgtggtcaaagtttgaatcttgtaaatgttaccattccagcatacatcattgacacgggtctctccttccttatgcccttaatatttgtctcctgcataatgcagctgctgttgatttgtgtcccttaagcaatggaggtgcacctcctgttaccagagattgttgaaagggtaactaagtgtacagcgattctcctcctctttcttttttatacatttttttatatcatgtatttaatctcttgctttcataatctgtcgtaaatttgatttaaagttcacaacctattattgaattgcacaccgcgtttctttttcc

SEQ ID NO: 21239 - protein, 489 aa, Glycine max
VTSKSNSDIYSANIGGIEAGCTNYSKLLSKGLDTKWKGIPFANVFGSFNKTSSFNTEKLVEYNPVHILSFRELERQTGARLLLPASTNDTIVPVYDDEPTSVIAYVLVSMDYHMQMLEYDRPKESGDSSISLPLFDSTSLLSLNSFDETITNTYRSLGSFDENVLPTSGSRSLPAGDPFSYTKDLHARVSFTDDGSLGKVKYTVTCYYAKRFEALRRTCCPSELDFVRSLSRCKKWGAQGGKSNVFFAKTLDDRFIIKQVTKTELESFTKFAPAYFKYLSESISTGSPTCLAKILGIYQVTSKHLKGGKETKMDVLVMENLLYRRNIRRLYDLKGSSRSRYNPDTSGSNKVLLDQNLIEAMPTSPIFVGNKAKRLLERAVWNDTAFLASIYVMDYSLLVGVDEEKHELVLGIIDFMRQYTWDKHLETWVKTSGILGGPKNTSPTVISPQQYKKRFRKAMSLYFLMVPDQWSPPELHPSGSQSDICDENA

SEQ ID NO: 21240 - protein, 380 aa, Glycine max
MDYHMQMLEYDRPKESGDSSISLPLFDSTSLLSLNSFDETITNTYRSLGSFDENVLPTSGSRSLPAGDPFSYTKDLHARVSFTDDGSLGKVKYTVTCYYAKRFEALRRTCCPSELDFVRSLSRCKKWGAQGGKSNVFFAKTLDDRFIIKQVTKTELESFTKFAPAYFKYLSESISTGSPTCLAKILGIYQVTSKHLKGGKETKMDVLVMENLLYRRNIRRLYDLKGSSRSRYNPDTSGSNKVLLDQNLIEAMPTSPIFVGNKAKRLLERAVWNDTAFLASIYVMDYSLLVGVDEEKHELVLGIIDFMRQYTWDKHLETWVKTSGILGGPKNTSPTVISPQQYKKRFRKAMSLYFLMVPDQWSPPELHPSGSQSDICDENA

SEQ ID NO: 21241 - protein, 376 aa, Glycine max
MQMLEYDRPKESGDSSISLPLFDSTSLLSLNSFDETITNTYRSLGSFDENVLPTSGSRSLPAGDPFSYTKDLHARVSFTDDGSLGKVKYTVTCYYAKRFEALRRTCCPSELDFVRSLSRCKKWGAQGGKSNVFFAKTLDDRFIIKQVTKTELESFTKFAPAYFKYLSESISTGSPTCLAKILGIYQVTSKHLKGGKETKMDVLVMENLLYRRNIRRLYDLKGSSRSRYNPDTSGSNKVLLDQNLIEAMPTSPIFVGNKAKRLLERAVWNDTAFLASIYVMDYSLLVGVDEEKHELVLGIIDFMRQYTWDKHLETWVKTSGILGGPKNTSPTVISPQQYKKRFRKAMSLYFLMVPDQWSPPELHPSGSQSDICDENA

SEQ ID NO: 21242 - DNA, 1697 bp, Glycine max
agagaattcagacttgctggagaaaaaattgaaggaaatgagaatactagaaaatgttgaattgcctgcagaatttgcagatatagtggttaagtccaaagaggccattgatattcctagtgaggagctgcaaagttctgaacaagcagaagtagaagaaagaaaagatgatgaagtggaagcagttgctaaaaagaatggaacagatgaaagttccattgaggatgagaaagaagagttgcctgagccagtaccagaaccaccaaaattggttcgtatggcaaatctgtgtgttgtaggtggtcatgcagtgaatggggttgcagagatacatagtgaaattgtaaaagatgaagttttcaatgcgttttataagttgtggcctgagaagttccaaaacaaaacaaatggtgtgacaccaaggagatggatcaggttctgcaatccagatctgagtaaaataataaccgagtggataggcactgaggattgggtcctaaatactggaaaattggcggagctacggaagtttgtagacaatgaggatctacaagtgcagtggagggaagcaaagaggagtaacaaagttaaagtggcagcattcatcagagaaaaaacagggtattctgtcagtcctgatgcaatgtttgacatccaggtgaagagaatccatgaatataagcgacaattattgaacatatttggaattgtttaccgatacaagaagatgaaagaaatgagtgctgcagaaaggaaagcaaattttgttcctagagtttgtatatttgggggaaaagcatttgctacatatgtgcaagccaagagaattgtgaaatttattacagatgttggggcaacagtaaatcatgatcctgaaataggagatctacttaaggttgtttttgtccctgattacaatgtcagtgttgctgagatgcttattccagcaagtgaattgtcacaacatatcagtactgctggaatggaggcaagtggaactagcaacatgaaatttgccatgaatggctgcatattgattggaactttagatggggccaatgttgaaataagggaagaggttggtgctgacaactttttcctctttggtgccaaggctcatgaaattgctgggctgaggaaagaacgagcagagggaaagtttgtccctgatccaagatttgaagaagttaaagaatttgtcagaagtggtgttttcggatcttacaactatgacgaattgatggggtccttagaaggaaatgaaggttttggtcgagcagattatttccttgtgggcaaggacttccccagctacatagaatgccaagagaaggttgatgaagcataccggaaccaaactaaatggacaagaatgtcgatattgaacacagcaggctcatacaagtttagcagtgaccgcacgattcatgaatatgcccgagagatatggaacattgaaccagttcaattgccgtagaaaaagtatatataataatgaatgaatagcagagaattggtgccacgtggttgtgatgatgatcactgcttagcttaattcctcgaagcagagaataaaatataacttttgcatagagacgcgcttcatgggggtgcgctcttggtcaaaataagcttgcagttctgtcggtgtaaatcaaacctctgtcttataataaatatcaaattgttttagcttc

SEQ ID NO: 21243 - protein, 491 aa, Glycine max
ENSDLLEKKLKEMRILENVELPAEFADIVVKSKEAIDIPSEELQSSEQAEVEERKDDEVEAVAKKNGTDESSIEDEKEELPEPVPEPPKLVRMANLCVVGGHAVNGVAEIHSEIVKDEVFNAFYKLWPEKFQNKTNGVTPRRWIRFCNPDLSKIITEWIGTEDWVLNTGKLAELRKFVDNEDLQVQWREAKRSNKVKVAAFIREKTGYSVSPDAMFDIQVKRIHEYKRQLLNIFGIVYRYKKMKEMSAAERKANFVPRVCIFGGKAFATYVQAKRIVKFITDVGATVNHDPEIGDLLKVVFVPDYNVSVAEMLIPASELSQHISTAGMEASGTSNMKFAMNGCILIGTLDGANVEIREEVGADNFFLFGAKAHEIAGLRKERAEGKFVPDPRFEEVKEFVRSGVFGSYNYDELMGSLEGNEGFGRADYFLVGKDFPSYIECQEKVDEAYRNQTKWTRMSILNTAGSYKFSSDRTIHEYAREIWNIEPVQLP

SEQ ID NO: 21244 - protein, 479 aa, Glycine max
MRILENVELPAEFADIVVKSKEAIDIPSEELQSSEQAEVEERKDDEVEAVAKKNGTDESSIEDEKEELPEPVPEPPKLVRMANLCVVGGHAVNGVAEIHSEIVKDEVFNAFYKLWPEKFQNKTNGVTPRRWIRFCNPDLSKIITEWIGTEDWVLNTGKLAELRKFVDNEDLQVQWREAKRSNKVKVAAFIREKTGYSVSPDAMFDIQVKRIHEYKRQLLNIFGIVYRYKKMKEMSAAERKANFVPRVCIFGGKAFATYVQAKRIVKFITDVGATVNHDPEIGDLLKVVFVPDYNVSVAEMLIPASELSQHISTAGMEASGTSNMKFAMNGCILIGTLDGANVEIREEVGADNFFLFGAKAHEIAGLRKERAEGKFVPDPRFEEVKEFVRSGVFGSYNYDELMGSLEGNEGFGRADYFLVGKDFPSYIECQEKVDEAYRNQTKWTRMSILNTAGSYKFSSDRTIHEYAREIWNIEPVQLP

SEQ ID NO: 21245 - protein, 399 aa, Glycine max
MANLCVVGGHAVNGVAEIHSEIVKDEVFNAFYKLWPEKFQNKTNGVTPRRWIRFCNPDLSKIITEWIGTEDWVLNTGKLAELRKFVDNEDLQVQWREAKRSNKVKVAAFIREKTGYSVSPDAMFDIQVKRIHEYKRQLLNIFGIVYRYKKMKEMSAAERKANFVPRVCIFGGKAFATYVQAKRIVKFITDVGATVNHDPEIGDLLKVVFVPDYNVSVAEMLIPASELSQHISTAGMEASGTSNMKFAMNGCILIGTLDGANVEIREEVGADNFFLFGAKAHEIAGLRKERAEGKFVPDPRFEEVKEFVRSGVFGSYNYDELMGSLEGNEGFGRADYFLVGKDFPSYIECQEKVDEAYRNQTKWTRMSILNTAGSYKFSSDRTIHEYAREIWNIEPVQLP

SEQ ID NO: 21246 - DNA, 1738 bp, Glycine max
tttttttaaatgaaatggaggcattgaatgaaagatctcttgcgagaatggtttcgcatagagtccttcaaatgggaatctcattcccatgtcagatttgtgttgtggggtttctttgtgaagtctgtcttgcctctttcatcttggctgctctcacttcctttggcactttacagcttgatcgattttcattctcaaccatgtcaatgcttaatttgtcttggaactctgatctcaataacaacatcaactgcaattttaaacccaaggaaacagagagattgacagatttgaagagcagggaagagagagagtatttgctttattcagcttggagttgtgtgttgactaaatctgaaagtgagtgcttgctgaaacttggaattagcaagtccagtttgcctaaagcccctcatttggaaaactgcaaggtgaaaacgcagctatatgattgtcttgataagcgcacaggaaatcatagcttccccccatggacaagttggaaaggattgttggacacacaccctgctgctgcaaccactgagcagattaagatattaaggcgtcaagctgtacttgagagtgcttatccaccttggattgcaggatctgatgaagagaactatcctttaactagaaaagttcaacgtgacatatggatccatcagcatccattaaactgtaacaacccgaatgtcaagtttcttctagctgattgggagagattacctggctttggcattggtgctcagattgctggaatgtgtgggcttcttgctattgcaatcaatgaaagaagagtccttgtcactaacttctacaatagagctgaccatgatggatgcaaaggatcttcccggtctagttggaattgttacttctttctagaaacttcactagaatgtcgtcaacgagcgttggaactcatgagaagtgaagatgcatggagtaaaggaattgtgactacaaaagaaaattatacatcaaggcatatatgggcaggaccaactccaaggatatggggcgagccatggaactatttgcaaccaacaaccgatataaatggaagtctggtggcttctcatagaaaactggatagacgatggtggagagcacaggctgtacgttacttaatgaggtttccaactgagtacacatgcaatttattgaatgaagcccggcatgctgcctttggaaaaatagctgcggaaatggttcttgaaagtccggctgaagaatggcctgaggaaaataggaacaagtcagggtctggcattgaagaatatgtgtggtccaatcacaagccatggatccctaggcctcttctaagcatccatgtaaggatgggagacaaagcgtgtgaaatgaaagtggttgagttcgaagaatacatgcaacttgcagaccggatcaggaggcatttcccaaaccttaatagcatatggctgtccacagagatgcaggaagtcatagacaaaatcaaagaatattctggttggaactttcactataataaggtaagacgccaaggtaggactaatgtgtcaatggcgaagtatgaagctagcttggggagggagagcagcactaattacccactggttaatttcatgatggctgctgactctgattttttcgttggagcgttgggatctacttggtgcttcctcatagatggaatgagaaatactgggggaaaggttatggctggctatttaagcgttaacaaggacagatt

SEQ ID NO: 21247 - protein, 578 aa, Glycine max
FLNEMEALNERSLARMVSHRVLQMGISFPCQICVVGFLCEVCLASFILAALTSFGTLQLDRFSFSTMSMLNLSWNSDLNNNINCNFKPKETERLTDLKSREEREYLLYSAWSCVLTKSESECLLKLGISKSSLPKAPHLENCKVKTQLYDCLDKRTGNHSFPPWTSWKGLLDTHPAAATTEQIKILRRQAVLESAYPPWIAGSDEENYPLTRKVQRDIWIHQHPLNCNNPNVKFLLADWERLPGFGIGAQIAGMCGLLAIAINERRVLVTNFYNRADHDGCKGSSRSSWNCYFFLETSLECRQRALELMRSEDAWSKGIVTTKENYTSRHIWAGPTPRIWGEPWNYLQPTTDINGSLVASHRKLDRRWWRAQAVRYLMRFPTEYTCNLLNEARHAAFGKIAAEMVLESPAEEWPEENRNKSGSGIEEYVWSNHKPWIPRPLLSIHVRMGDKACEMKVVEFEEYMQLADRIRRHFPNLNSIWLSTEMQEVIDKIKEYSGWNFHYNKVRRQGRTNVSMAKYEASLGRESSTNYPLVNFMMAADSDFFVGALGSTWCFLIDGMRNTGGKVMAGYLSVNKDR

SEQ ID NO: 21248 - protein, 574 aa, Glycine max
MEALNERSLARMVSHRVLQMGISFPCQICVVGFLCEVCLASFILAALTSFGTLQLDRFSFSTMSMLNLSWNSDLNNNINCNFKPKETERLTDLKSREEREYLLYSAWSCVLTKSESECLLKLGISKSSLPKAPHLENCKVKTQLYDCLDKRTGNHSFPPWTSWKGLLDTHPAAATTEQIKILRRQAVLESAYPPWIAGSDEENYPLTRKVQRDIWIHQHPLNCNNPNVKFLLADWERLPGFGIGAQIAGMCGLLAIAINERRVLVTNFYNRADHDGCKGSSRSSWNCYFFLETSLECRQRALELMRSEDAWSKGIVTTKENYTSRHIWAGPTPRIWGEPWNYLQPTTDINGSLVASHRKLDRRWWRAQAVRYLMRFPTEYTCNLLNEARHAAFGKIAAEMVLESPAEEWPEENRNKSGSGIEEYVWSNHKPWIPRPLLSIHVRMGDKACEMKVVEFEEYMQLADRIRRHFPNLNSIWLSTEMQEVIDKIKEYSGWNFHYNKVRRQGRTNVSMAKYEASLGRESSTNYPLVNFMMAADSDFFVGALGSTWCFLIDGMRNTGGKVMAGYLSVNKDR

SEQ ID NO: 21249 - protein, 563 aa, Glycine max
MVSHRVLQMGISFPCQICVVGFLCEVCLASFILAALTSFGTLQLDRFSFSTMSMLNLSWNSDLNNNINCNFKPKETERLTDLKSREEREYLLYSAWSCVLTKSESECLLKLGISKSSLPKAPHLENCKVKTQLYDCLDKRTGNHSFPPWTSWKGLLDTHPAAATTEQIKILRRQAVLESAYPPWIAGSDEENYPLTRKVQRDIWIHQHPLNCNNPNVKFLLADWERLPGFGIGAQIAGMCGLLAIAINERRVLVTNFYNRADHDGCKGSSRSSWNCYFFLETSLECRQRALELMRSEDAWSKGIVTTKENYTSRHIWAGPTPRIWGEPWNYLQPTTDINGSLVASHRKLDRRWWRAQAVRYLMRFPTEYTCNLLNEARHAAFGKIAAEMVLESPAEEWPEENRNKSGSGIEEYVWSNHKPWIPRPLLSIHVRMGDKACEMKVVEFEEYMQLADRIRRHFPNLNSIWLSTEMQEVIDKIKEYSGWNFHYNKVRRQGRTNVSMAKYEASLGRESSTNYPLVNFMMAADSDFFVGALGSTWCFLIDGMRNTGGKVMAGYLSVNKDR

SEQ ID NO: 21250 - DNA, 1393 bp, Glycine max
aaggttgacatgaataaagaaggatatgctgaacccaatgaatcagatatacgaaactggtttaaaggcatcagagacagtggatataatgtattgggtttgtcaacaaccgttggggattcttttttcaaatatttggatgtgcactctgttgctgttgcactaatggagaatatacagtcaatggagttcaggcatataaggcagcttgttcattccactttgattcctttggttaaaaattgtcctttggatatgtgggagatttggctggaaaagcttctacacccattgtttgtccatgctcagcaggcacttagctgttcatggtctagtcttctacaagatggtagagcaaaggttccagatgttcatgacattcttagtggatcagacttgaaagtggaagtgatggaggaaacaattctgagggatctcacacgtgagatgtgttcactcctctctgtcattgcttctcctccccttaatactggaatcccttctttggaacaatctgggcatgttagtcgattagatatgtcttctctaaaaaacttggatacagttgcatcatgctccatggttggtttccttctaaagcatgaaggtctggcccttccaacactacgaatgtgtttggaagcttttacatggacagacggtgaagctgtgactaaaatttcttcatattgctctgcattggtagttcttgcgatagtaacaaatcacgcagaactcattgaatatgtttctagagatctttttacatccattattaaaggtttagcccttgaatcaaatgcaataatcagtgctgatctagttggcatttgtcgtgaaatatttgtttacctttgtgatagacacccagctcccaggcaggttttgatgtctctccccaatattaccactcatgatttagttgcctttgaggaatctttaacgaaaacattcagtccaaaggaacaaaagcagcttacgagaagcttgtttcaattagcaactggtaacaaattgaaagcacttgcagcacagaaaaccgtgaatatcattacaaatgtttcaacaagaccgcgcccagccaatgctcctgagtccaaagttgatgatggtgatgttgtggggttggcagccatcatgtgatatttgttttgagctcacggaaggttttgtgtacaggagtgagctcgtattgagaagattttggcttttcattatttactaacaaagggtgagaaaacatttccttccccttcacaacattaacaagcaaatttggtgggagtacaaaaattttatgcccttcctctttattcatagcaacttgtgaatcaggtttacactatgcacaatttacttgatttgcagtatatctcttcagcataacagaacc

SEQ ID NO: 21251 - protein, 380 aa, Glycine max
KVDMNKEGYAEPNESDIRNWFKGIRDSGYNVLGLSTTVGDSFFKYLDVHSVAVALMENIQSMEFRHIRQLVHSTLIPLVKNCPLDMWEIWLEKLLHPLFVHAQQALSCSWSSLLQDGRAKVPDVHDILSGSDLKVEVMEETILRDLTREMCSLLSVIASPPLNTGIPSLEQSGHVSRLDMSSLKNLDTVASCSMVGFLLKHEGLALPTLRMCLEAFTWTDGEAVTKISSYCSALVVLAIVTNHAELIEYVSRDLFTSIIKGLALESNAIISADLVGICREIFVYLCDRHPAPRQVLMSLPNITTHDLVAFEESLTKTFSPKEQKQLTRSLFQLATGNKLKALAAQKTVNIITNVSTRPRPANAPESKVDDGDVVGLAAIM

SEQ ID NO: 21252 - protein, 377 aa, Glycine max
MNKEGYAEPNESDIRNWFKGIRDSGYNVLGLSTTVGDSFFKYLDVHSVAVALMENIQSMEFRHIRQLVHSTLIPLVKNCPLDMWEIWLEKLLHPLFVHAQQALSCSWSSLLQDGRAKVPDVHDILSGSDLKVEVMEETILRDLTREMCSLLSVIASPPLNTGIPSLEQSGHVSRLDMSSLKNLDTVASCSMVGFLLKHEGLALPTLRMCLEAFTWTDGEAVTKISSYCSALVVLAIVTNHAELIEYVSRDLFTSIIKGLALESNAIISADLVGICREIFVYLCDRHPAPRQVLMSLPNITTHDLVAFEESLTKTFSPKEQKQLTRSLFQLATGNKLKALAAQKTVNIITNVSTRPRPANAPESKVDDGDVVGLAAIM

SEQ ID NO: 21253 - protein, 325 aa, Glycine max
MENIQSMEFRHIRQLVHSTLIPLVKNCPLDMWEIWLEKLLHPLFVHAQQALSCSWSSLLQDGRAKVPDVHDILSGSDLKVEVMEETILRDLTREMCSLLSVIASPPLNTGIPSLEQSGHVSRLDMSSLKNLDTVASCSMVGFLLKHEGLALPTLRMCLEAFTWTDGEAVTKISSYCSALVVLAIVTNHAELIEYVSRDLFTSIIKGLALESNAIISADLVGICREIFVYLCDRHPAPRQVLMSLPNITTHDLVAFEESLTKTFSPKEQKQLTRSLFQLATGNKLKALAAQKTVNIITNVSTRPRPANAPESKVDDGDVVGLAAIM

SEQ ID NO: 21254 - DNA, 1359 bp, Glycine max
atctgttcgcacttggactcagtctactatgcttcagtttgacaaagcatctgctgatgctgctgtaagacaagctaattggggtgcttcaaaagtgcgagacaaacttcaccgtgatattgattcacatacttcatccatgcgcagtacaaaactgtcggagataacagctaattttgagaaaaaattggccaaggcgttgacagagcctgtggagtctctctttgaagcaggtggaaaggacacctggctttcaataagagagctacttaaacgtgagactgaaattgctgtatcagaattttctgcttctgttgctggttttgagctggatgaagaaacagttgaaagaatgcaacaaagcttaagggactatgcaagaaaagtggtggaaaataaagcaagagatgaagctggaaagattctgatacgcatgaaagataggttctctactgttttcaatcatgataatgattcactacctagagtttggactgggaaggaagatgtcagagctattacaagggatgctcgctctgcgtcgctgaagcttctatcagatatggctgctatacgcttggatgagaagccagatcgcattgaaagtgcacttcattcatctctcatagataaaactagtgctgcaacatcttctcaatatctaactagggaagcttctgtagatccattggcttcaagcacatgggaggaggtttccccagaagatgtgcttatcactccagtgcagtgcaaagctttgtggagacaatttcagggagaaactgagtatacagttactcaagctatttcagctcaggaggcctacaagcggagtaacaattggttacctcctccatgggcaataatggcaatggtcatacttggttttaatgaatttatgttgctactaaaaaatcctctctacctgatgtttatatttgttgcctatctactcggaaaggccatctgggtacaaatggacatagctggagagtttcgacatggcactctgcctggactactatccatttcatcaaagtttcttcccacatttatgaaccttattaaacgtcttgctgaagaagctcaggggaatcaaacccctcaagaatcacaagggtcagcttctcagacacagatcttcagaaatcaagtgcacaaaccagattcagtatcaacctcaatttccaatgtatcgagtgttggcttgtctgttgatgataacgaatactcaaccacaaacttgtctcagaggcgaagaacaaacgctcccgaagctgaattttcatgacaaaattcatgacaatttgatttgaagacggttggcatcagattagacatgcaccagttagcctgcag

SEQ ID NO: 21255 - protein, 429 aa, Glycine max
SVRTWTQSTMLQFDKASADAAVRQANWGASKVRDKLHRDIDSHTSSMRSTKLSEITANFEKKLAKALTEPVESLFEAGGKDTWLSIRELLKRETEIAVSEFSASVAGFELDEETVERMQQSLRDYARKVVENKARDEAGKILIRMKDRFSTVFNHDNDSLPRVWTGKEDVRAITRDARSASLKLLSDMAAIRLDEKPDRIESALHSSLIDKTSAATSSQYLTREASVDPLASSTWEEVSPEDVLITPVQCKALWRQFQGETEYTVTQAISAQEAYKRSNNWLPPPWAIMAMVILGFNEFMLLLKNPLYLMFIFVAYLLGKAIWVQMDIAGEFRHGTLPGLLSISSKFLPTFMNLIKRLAEEAQGNQTPQESQGSASQTQIFRNQVHKPDSVSTSISNVSSVGLSVDDNEYSTTNLSQRRRTNAPEAEFS

SEQ ID NO: 21256 - protein, 420 aa, Glycine max
MLQFDKASADAAVRQANWGASKVRDKLHRDIDSHTSSMRSTKLSEITANFEKKLAKALTEPVESLFEAGGKDTWLSIRELLKRETEIAVSEFSASVAGFELDEETVERMQQSLRDYARKVVENKARDEAGKILIRMKDRFSTVFNHDNDSLPRVWTGKEDVRAITRDARSASLKLLSDMAAIRLDEKPDRIESALHSSLIDKTSAATSSQYLTREASVDPLASSTWEEVSPEDVLITPVQCKALWRQFQGETEYTVTQAISAQEAYKRSNNWLPPPWAIMAMVILGFNEFMLLLKNPLYLMFIFVAYLLGKAIWVQMDIAGEFRHGTLPGLLSISSKFLPTFMNLIKRLAEEAQGNQTPQESQGSASQTQIFRNQVHKPDSVSTSISNVSSVGLSVDDNEYSTTNLSQRRRTNAPEAEFS

SEQ ID NO: 21257 - protein, 383 aa, Glycine max
MRSTKLSEITANFEKKLAKALTEPVESLFEAGGKDTWLSIRELLKRETEIAVSEFSASVAGFELDEETVERMQQSLRDYARKVVENKARDEAGKILIRMKDRFSTVFNHDNDSLPRVWTGKEDVRAITRDARSASLKLLSDMAAIRLDEKPDRIESALHSSLIDKTSAATSSQYLTREASVDPLASSTWEEVSPEDVLITPVQCKALWRQFQGETEYTVTQAISAQEAYKRSNNWLPPPWAIMAMVILGFNEFMLLLKNPLYLMFIFVAYLLGKAIWVQMDIAGEFRHGTLPGLLSISSKFLPTFMNLIKRLAEEAQGNQTPQESQGSASQTQIFRNQVHKPDSVSTSISNVSSVGLSVDDNEYSTTNLSQRRRTNAPEAEFS

SEQ ID NO: 21258 - DNA, 1198 bp, Glycine max
tctgaaagctgttggtggaagtttaacggctattcctggaatctcagatatgattgatgatactgtgaactcaattgttactgacatgctccaatggcctcataggattgtggttccacttggtggcattcctgttgataccagtgaactggagcttaaaccccagggaaaacttgcactgactgtagtgaaagcgactgctttaaagaatatggaaatgattggaaagtcagatccttatgtagttgtgcatattcgaccattatttaagtataaaaccaaggttattgataacaacttgaatcctacctggaatgagaaatttgaattgattgcagaagacaaggagacccaatcactaattcttgaggttcttgataaagacattggacaagataagcgattgggaatagcacagttaccccttattgatctagaaatacaaactgaaaaggagattgaattgaggctgctgccctcacttgatacactgaaggtgaaagataagaaggatcgaggaaccttaacagtaaaggtcatgtattatcagtttaacaaggaagagcagctggttgcactagaggcagaaaagaagatactagaagaaaggaagaaactgaaagaagctggaatgataggaagcacgatggatgcactagatggagcagtatcagtggtaggctctggtgttggactggttggtactggtgttgttgctggtgccggtcttgtgggaagtggtattggtgctggagccgggcttgttggaagcggcatcggtgctggagttggtattgttgggagtggtcttggagccgttggtagtggactgagcaaggcagggaagttcatgggaaggacaatcactggtcatagtggctccagaaagagtggttcttcaacaccagtcaacaatgcactggagaatggtggtggtgcaaagcctctttgattccttcctttgtattgtaagactaatgaatggacctttgcaggttcaagctttgctaatagatagatttcctgtgtatgtgttgctttctttttttaccataatgttttctccaaggctgtgttaatctactagattggcaaaatggtagcagaaatatcaagttagttctgttgcatcatctttgtaattatgcttaacctcaagttgtgataaaactcatcaaattgtaaacattccttattt

SEQ ID NO: 21259 - protein, 316 aa, Glycine max
LKAVGGSLTAIPGISDMIDDTVNSIVTDMLQWPHRIVVPLGGIPVDTSELELKPQGKLALTVVKATALKNMEMIGKSDPYVVVHIRPLFKYKTKVIDNNLNPTWNEKFELIAEDKETQSLILEVLDKDIGQDKRLGIAQLPLIDLEIQTEKEIELRLLPSLDTLKVKDKKDRGTLTVKVMYYQFNKEEQLVALEAEKKILEERKKLKEAGMIGSTMDALDGAVSVVGSGVGLVGTGVVAGAGLVGSGIGAGAGLVGSGIGAGVGIVGSGLGAVGSGLSKAGKFMGRTITGHSGSRKSGSSTPVNNALENGGGAKPL

SEQ ID NO: 21260 - protein, 300 aa, Glycine max
MIDDTVNSIVTDMLQWPHRIVVPLGGIPVDTSELELKPQGKLALTVVKATALKNMEMIGKSDPYVVVHIRPLFKYKTKVIDNNLNPTWNEKFELIAEDKETQSLILEVLDKDIGQDKRLGIAQLPLIDLEIQTEKEIELRLLPSLDTLKVKDKKDRGTLTVKVMYYQFNKEEQLVALEAEKKILEERKKLKEAGMIGSTMDALDGAVSVVGSGVGLVGTGVVAGAGLVGSGIGAGAGLVGSGIGAGVGIVGSGLGAVGSGLSKAGKFMGRTITGHSGSRKSGSSTPVNNALENGGGAKPL

SEQ ID NO: 21261 - protein, 288 aa, Glycine max
MLQWPHRIVVPLGGIPVDTSELELKPQGKLALTVVKATALKNMEMIGKSDPYVVVHIRPLFKYKTKVIDNNLNPTWNEKFELIAEDKETQSLILEVLDKDIGQDKRLGIAQLPLIDLEIQTEKEIELRLLPSLDTLKVKDKKDRGTLTVKVMYYQFNKEEQLVALEAEKKILEERKKLKEAGMIGSTMDALDGAVSVVGSGVGLVGTGVVAGAGLVGSGIGAGAGLVGSGIGAGVGIVGSGLGAVGSGLSKAGKFMGRTITGHSGSRKSGSSTPVNNALENGGGAKPL

SEQ ID NO: 21262 - DNA, 1710 bp, Glycine max
tgtttttgggtcggccctacttttcagaaccttaggcccactttggcaactacttattctatgctatgctctattattttttttttaatttacgctatatttggctcacttattactctataaaaaatattcgggtactaaaatgttaaatgatacatgacacatagtgagagataaaagaaaaacaatataaatattattagagtatgatgtgattaaaattgaaaaaaaattatcaatgttaattaagataactttcacctaacaactcttgttaaaaataattttatattatttctcagattttcttatgatgtcacatcaagattactgagacgaaaagaatgagagtgagtgtttcgtggttttttttttttacttcacaattgatgcatgaatgatgctcaccaatgatattttttttttcaccttttgttgagtttcatgaataattgagaatcgaccgggtttggttcgaacaaaaccaagtcatgtcaattcagattgaaatttggaaggaagaaaagaaaaatgagccgacttgaccgagctctccttcatccaatttggtttaggttcatgcttgaatctaacccaaataggtccatttctttgtcatatcactattgatgttgtgttctctaaaaattaccgtcaaaagtaccaactgaagagaaaccttcattgttgaaaaaaaaaggcaacttccaatgaagaatggaagttgcccttaggtatttgtaaaaataggttattagaaaaccgttgctattaattaaattatatacatcaccgaaacttaatcttattgtacgttatgcatgctttcagctgtggttggagacggattcatagcaaagggtataacctttgaaaattctgctgggccaagcaaacaccaagccgtggccctaaggagtggttctgatttctcagccttctataaatgcagcttcgttgcctaccaagatactctctatgtccactccctgcgccaattctaccgcgattgtgacgtttatggcacagtcgacttcatcttcggcaatgcagcaacagtgctccagaactgcaacttgtacgcacgcaagcccaatgaaaaccaaaggaacttgttcactgcacaaggaagagaagaccctaaccaaaacaccggcatttccatcttgaactgcaaggttgcagcagctgctgatttaatcccggtcaaatctcagttcaagaactacttgggtcgtccttggaagaagtattcgagaactgtttatcttaattcttacatggaggatctgatagaccccaaagggtggttggagtggaatggcacgtttgcattggatacgttgtattatggagagtacaacaataggggtcccggttcaaacacaagtgcaagagttacgtggcctggttatagggttatcaagaacgccactgaggcaaaccagttcacagttcgcaatttcattcaagggaatgaatggttgagttccaccgacattccattcttctctgatttcagttgaatacgttatggttattagtggcttcatgctcttttggtatccccatttaataaagtattagatgtttgttgtggaaatagaattcaaggaatgttattgttccttgcgacaaaagcactaactaaaataaaaaagtattttatattaattttttatcgataaatattaatttattaattttatt

SEQ ID NO: 21263 - protein, 234 aa, Glycine max
MLSAVVGDGFIAKGITFENSAGPSKHQAVALRSGSDFSAFYKCSFVAYQDTLYVHSLRQFYRDCDVYGTVDFIFGNAATVLQNCNLYARKPNENQRNLFTAQGREDPNQNTGISILNCKVAAAADLIPVKSQFKNYLGRPWKKYSRTVYLNSYMEDLIDPKGWLEWNGTFALDTLYYGEYNNRGPGSNTSARVTWPGYRVIKNATEANQFTVRNFIQGNEWLSSTDIPFFSDFS

SEQ ID NO: 21264 - DNA, 784 bp, Glycine max
taaaacttggccaaccaaacccagatgatcttggatatgtagattctgtttcagttcaggaaattggtggtgtcagggtgaccattgtgaaaaatgaagagggtggaaattctgtggctactgttgttttacgaggaagtactgatagtatactagatgatcttgaaagagcagtggatgatggagtgaacacttacaaggccatgtgcagggatagccactttgtacctggagctgcagcaactgaaattgagttagctaaaagggtgaaagacttctccttcaaggagacagggttggatcagtatgctatagcaaaatttgctgaaagttttgaaatgattcctagaactttggctgagaatgctgggttgaatgcaatggagatcatatcttctctgtatgcagaacatgcatctggaaatgccaaagttggcattgatttggaagaaggcatatgtaaggatgtctcaaccttgagcatttgggatctccatgtgactaagttatttgctcttaaatatgctgcagatgctgcatgcactgtactacgtgtggaccagattattatggcaaaaccagctggtggtccaaggagagagcaacctgctggtggcatggatgaagactaaaattaatggtttgctttggccatgtttgtatctcaacatgatggcttgaatttgccttaggcatgttttctttatttagactttagtattggtggcgatcttacaaattttgaattttgttttgccatgaaatacaaagagatgtggtctgt

SEQ ID NO: 21265 - protein, 209 aa, Glycine max
KLGQPNPDDLGYVDSVSVQEIGGVRVTIVKNEEGGNSVATVVLRGSTDSILDDLERAVDDGVNTYKAMCRDSHFVPGAAATEIELAKRVKDFSFKETGLDQYAIAKFAESFEMIPRTLAENAGLNAMEIISSLYAEHASGNAKVGIDLEEGICKDVSTLSIWDLHVTKLFALKYAADAACTVLRVDQIIMAKPAGGPRREQPAGGMDED

SEQ ID NO: 21266 - protein, 142 aa, Glycine max
MCRDSHFVPGAAATEIELAKRVKDFSFKETGLDQYAIAKFAESFEMIPRTLAENAGLNAMEIISSLYAEHASGNAKVGIDLEEGICKDVSTLSIWDLHVTKLFALKYAADAACTVLRVDQIIMAKPAGGPRREQPAGGMDED

SEQ ID NO: 21267 - DNA, 1605 bp, Glycine max
ataaaactttgcccaaaaagaggatgttaaagctgggcctgaaataataatactactccaatattctcttctcaaacctactcttctatctttcgctctccccctctgcgtttctgacagtgttactgtgtgtgttttccgcggaaaatcaaaatgggtatcattgaaaagatcaaagaaattgaagccgagatggctcggacacagaaaaataaagccacagagtatcatcttgggcagctcaaggctaaaatagcaaaattaaggacacaattattggagcctccaaaaggttctagtggaggtggagaaggatttgaagttacaaaattcggtcatggacgtgttgcactgattggatttccaagtgtggggaagtctactcttttgacaatgttaacgggcacacattctgaagctgcatcttatgagtttactactttgacctgtattcctgggattatacactataatgatactaaaattcagttactcgatcttcctggaattattgaaggtgcatctgaaggcaagggacgtggaagacaggttattgctgttgctaaatcttcagacatagtattgatggttcttgatgcttccaaaagtgagggtcataggcaaatattgaccaaagagctcgaagctgtgggcttgcggttaaacaagagaccacctcagatatattttaaaaagaaaaagacggggggcatttcattcaacagcactttgcctttgactcatgtggatgagaagctttgttatcagattctgcacgagtacaagattcacaatgcagagatccttttccgtgaggatgctacagtggatgatctcatagatgtcattgaaggaaaccgaaaatacatgaagtgtgtatatgtctacaacaagatagatgttattggtattgatgatgtggacagattagcccgtcaaccaaattctgttgtcattagctgcaatttgaagctgaacttagacagactgcttgcaaggatgtgggatgaaatgggtctggttagagtttacacaaaaccacaaggccagcagcctgattttggtgatcctgtggttctttctgctgatagaggtggctgcactgtagaagacttctgcaaccatatacacagaagtttggtgaaggatgtgaagtatgttctggtctggggtactagtgcaaggcactacccgcagcactgtggtcttagtcacaatcttcatgacgaggatgttgttcagattgtgaagaaaaaggaaaaggaagagggaggaaggggacgatttaaatcacattccaatgctcctgccaggatatctgacagagagaagaaggcaccactgaagacataattatatgacacagcctgtgatttcatcattgatttttgcctagtggatgggaaaaatgactataggtgatgatacatccaaaggcaaaggttcttatcttgattgctcatgcaacataggattgaaaattcctcctgagcactaagtggggcacctatatttttttgtcacccaagtgttgtaacatcccctccccctcttttgaataatagtttttatcagttatgaagtgtgcatctatgatttgaagag

SEQ ID NO: 21268 - protein, 399 aa, Glycine max
MGIIEKIKEIEAEMARTQKNKATEYHLGQLKAKIAKLRTQLLEPPKGSSGGGEGFEVTKFGHGRVALIGFPSVGKSTLLTMLTGTHSEAASYEFTTLTCIPGIIHYNDTKIQLLDLPGIIEGASEGKGRGRQVIAVAKSSDIVLMVLDASKSEGHRQILTKELEAVGLRLNKRPPQIYFKKKKTGGISFNSTLPLTHVDEKLCYQILHEYKIHNAEILFREDATVDDLIDVIEGNRKYMKCVYVYNKIDVIGIDDVDRLARQPNSVVISCNLKLNLDRLLARMWDEMGLVRVYTKPQGQQPDFGDPVVLSADRGGCTVEDFCNHIHRSLVKDVKYVLVWGTSARHYPQHCGLSHNLHDEDVVQIVKKKEKEEGGRGRFKSHSNAPARISDREKKAPLKT

SEQ ID NO: 21269 - protein, 386 aa, Glycine max
MARTQKNKATEYHLGQLKAKIAKLRTQLLEPPKGSSGGGEGFEVTKFGHGRVALIGFPSVGKSTLLTMLTGTHSEAASYEFTTLTCIPGIIHYNDTKIQLLDLPGIIEGASEGKGRGRQVIAVAKSSDIVLMVLDASKSEGHRQILTKELEAVGLRLNKRPPQIYFKKKKTGGISFNSTLPLTHVDEKLCYQILHEYKIHNAEILFREDATVDDLIDVIEGNRKYMKCVYVYNKIDVIGIDDVDRLARQPNSVVISCNLKLNLDRLLARMWDEMGLVRVYTKPQGQQPDFGDPVVLSADRGGCTVEDFCNHIHRSLVKDVKYVLVWGTSARHYPQHCGLSHNLHDEDVVQIVKKKEKEEGGRGRFKSHSNAPARISDREKKAPLKT

SEQ ID NO: 21270 - protein, 319 aa, Glycine max
MLTGTHSEAASYEFTTLTCIPGIIHYNDTKIQLLDLPGIIEGASEGKGRGRQVIAVAKSSDIVLMVLDASKSEGHRQILTKELEAVGLRLNKRPPQIYFKKKKTGGISFNSTLPLTHVDEKLCYQILHEYKIHNAEILFREDATVDDLIDVIEGNRKYMKCVYVYNKIDVIGIDDVDRLARQPNSVVISCNLKLNLDRLLARMWDEMGLVRVYTKPQGQQPDFGDPVVLSADRGGCTVEDFCNHIHRSLVKDVKYVLVWGTSARHYPQHCGLSHNLHDEDVVQIVKKKEKEEGGRGRFKSHSNAPARISDREKKAPLKT

SEQ ID NO: 21271 - DNA, 1347 bp, Glycine max
actcgtcaagaggcatatgctaagttactggctttgaaaaaacaattgcatgagaagagcaaaaatttctgggaatacagagatgctgcaactaaagcacaggaactagcagcaggagggaaaaaagaggagctgcaatgcttctgtgttgatgaggttgagagaatcatggagctatggaacaaaaatgatgagttcagaagggactatgtccgatgcaacactaggagtacgctgaggcgactgcaaaccctggatggccgatcacttggtcctgatgaagagcctcttgtaatgcctaatgcaataactgaaagggcttccaaaaatattcccatggtctcgaacacaactatggaacaagaaaagaaatctccaagagaatctgttaatgtaaaggatgaacctgattcgaaggttgtggcacaaagaactgaaacaagtcagacaactaaagctaaaaagcctaccaagcctgctcccttagagaagcatgtggctcgttggggtgatgagtctgatgaagatgaagataaagataaaaatgaagaagaacctgtgagaacaaaggaggaagaggagctgatactgaaggctgagaaggcaaggaaggaggaagaggaggcaaagttgaaggaaaagcggaggctagaggagattgaaaaagctaaggaggcactgcagagaaaaaagcgtaatgcagagaaggcccaacaaagggctgccttaaaggcacaaaaagaagctgaactgaaagagaaggaaagggagaagagagcaaagaagaaggaaagaagaaagacatcttctgctgtcactgctgagaatacagaacaagaatctgctcataccacagaaactctaacaagtgtggaagaaagtgacctgactgagaaaccagctgaggtaacaaaaaagccacagaaaccatctcaattcacaaggcagaccaaggtaaaatctgtacctgcagctcttcgcaaccgggctaagagaagaattcaaccatggatgtgggttctaattgcagttgtggttgttgttgccttgttttatgtgggcaatagcagctctttgagatcttcgcttgaaggctttggttactgaggacactcggaagcaatcacaaggcgtttgtcggggaagagttaccgttacatatttatattttacacaaatacatatagacgcaattctttcttgcccttgcaattttttcctgctagcttttggtcatagccattattttcttcatattgagatttgttagtttgggatgtgatgtgactgctgaatgcttctgcaccaattatgagaataataaattattgtgattgtgccttcttt

SEQ ID NO: 21272 - protein, 368 aa, Glycine max
TRQEAYAKLLALKKQLHEKSKNFWEYRDAATKAQELAAGGKKEELQCFCVDEVERIMELWNKNDEFRRDYVRCNTRSTLRRLQTLDGRSLGPDEEPLVMPNAITERASKNIPMVSNTTMEQEKKSPRESVNVKDEPDSKVVAQRTETSQTTKAKKPTKPAPLEKHVARWGDESDEDEDKDKNEEEPVRTKEEEELILKAEKARKEEEEAKLKEKRRLEEIEKAKEALQRKKRNAEKAQQRAALKAQKEAELKEKEREKRAKKKERRKTSSAVTAENTEQESAHTTETLTSVEESDLTEKPAEVTKKPQKPSQFTRQTKVKSVPAALRNRAKRRIQPWMWVLIAVVVVVALFYVGNSSSLRSSLEGFGY

SEQ ID NO: 21273 - protein, 312 aa, Glycine max
MELWNKNDEFRRDYVRCNTRSTLRRLQTLDGRSLGPDEEPLVMPNAITERASKNIPMVSNTTMEQEKKSPRESVNVKDEPDSKVVAQRTETSQTTKAKKPTKPAPLEKHVARWGDESDEDEDKDKNEEEPVRTKEEEELILKAEKARKEEEEAKLKEKRRLEEIEKAKEALQRKKRNAEKAQQRAALKAQKEAELKEKEREKRAKKKERRKTSSAVTAENTEQESAHTTETLTSVEESDLTEKPAEVTKKPQKPSQFTRQTKVKSVPAALRNRAKRRIQPWMWVLIAVVVVVALFYVGNSSSLRSSLEGFGY

SEQ ID NO: 21274 - protein, 270 aa, Glycine max
MPNAITERASKNIPMVSNTTMEQEKKSPRESVNVKDEPDSKVVAQRTETSQTTKAKKPTKPAPLEKHVARWGDESDEDEDKDKNEEEPVRTKEEEELILKAEKARKEEEEAKLKEKRRLEEIEKAKEALQRKKRNAEKAQQRAALKAQKEAELKEKEREKRAKKKERRKTSSAVTAENTEQESAHTTETLTSVEESDLTEKPAEVTKKPQKPSQFTRQTKVKSVPAALRNRAKRRIQPWMWVLIAVVVVVALFYVGNSSSLRSSLEGFGY

SEQ ID NO: 21275 - DNA, 1576 bp, Glycine max
ttttattcttaaaccagcaacttctatatggaagggtcacaagattcaggatgatagaagttctcaatggtcaaggatgaaacatagaaataaaacatcaaaactaagactcaacagacggaagactgctttaattaatgaccagtattcaattttggtttcatgtcgatgcaattatactgcatcaaggttgttctttaagcaaccaaccagttggcgaccacgtagctcaagggatattatgatctcggttgtgtcagagatgtcaggacagtctcttgctgcttatggaaaaacttgccaacttcccatacagatattaactcttcaagcttcaaatttgacctctgaggatctaactttgactgtgcttgctccagcctcatttacttcacccctttcagtagtctccttgaattcaccaacgactccaatgagtccttttttaggtttctcagagttattagtaagagtaaatggtgaaagaggaattggtgccacccagcgacaaagtttcactcttggtgtaaaagataatgagaaacaaagttatgatggcaaagcccaggctgtttctacgagtgatgatgtcattcctggttctgatcttagttgtacacatctatggctgcagagtagaattccacttggatgtattccatctcaatccattgccactataaagcttgagctacttccattgactgatggcataattgttctggacactttgcaaattgatgtcaaggaaaaaggtatagattgctgtacttttggaccatttttttcctcttaattccatgtttaagcatctatatagagaatatttggtcaatacaaattaatgagaagatgaactgctggtttaagatctgttacttgtatgattgtcattgttattttgaagtatcgcccattcacataacaataaggtcttctgttggcttcccttagctgtgagtgtgacattctgtaacaagtgcccatttttgtcttgatccatttcatattaatagttttgctgcctagatctagtcatttgtttcacttgagaagagaagtgaatattattgagtgttttgcaatacaagcactaatccctatttataagctaaacgggatgagataaggaaaggctaaccattaggcctgaaagaagagtcagcggctacttgctatgtgctggcgagtggttggcacaggaatggtatgtggctttcacgtgttgggaagaagcatgtgtagtggtggtggtggaaggcaacgtgaatttggggacaagccaatctggagatgacaccccatccggtatggtcacactggtcaaattggcaactgagtggtgacaggcagtggtggacggcagcaagagcggagcccttgaaattgagagttctgatacctacttgaaatttgaaaagagaaaaaactgaatattatcgagtgtgttttgcaatacaagcactaatgtctatttataggctagacatattatgagaaagagggaaaataggaaaacaaaactatcctaaaaattacaaatatattcttaatatatacagggagattctattgg

SEQ ID NO: 21276 - protein, 264 aa, Glycine max
FILKPATSIWKGHKIQDDRSSQWSRMKHRNKTSKLRLNRRKTALINDQYSILVSCRCNYTASRLFFKQPTSWRPRSSRDIMISVVSEMSGQSLAAYGKTCQLPIQILTLQASNLTSEDLTLTVLAPASFTSPLSVVSLNSPTTPMSPFLGFSELLVRVNGERGIGATQRQSFTLGVKDNEKQSYDGKAQAVSTSDDVIPGSDLSCTHLWLQSRIPLGCIPSQSIATIKLELLPLTDGIIVLDTLQIDVKEKGIDCCTFGPFFSS

SEQ ID NO: 21277 - protein, 239 aa, Glycine max
MKHRNKTSKLRLNRRKTALINDQYSILVSCRCNYTASRLFFKQPTSWRPRSSRDIMISVVSEMSGQSLAAYGKTCQLPIQILTLQASNLTSEDLTLTVLAPASFTSPLSVVSLNSPTTPMSPFLGFSELLVRVNGERGIGATQRQSFTLGVKDNEKQSYDGKAQAVSTSDDVIPGSDLSCTHLWLQSRIPLGCIPSQSIATIKLELLPLTDGIIVLDTLQIDVKEKGIDCCTFGPFFSS

SEQ ID NO: 21278 - protein, 184 aa, Glycine max
MISVVSEMSGQSLAAYGKTCQLPIQILTLQASNLTSEDLTLTVLAPASFTSPLSVVSLNSPTTPMSPFLGFSELLVRVNGERGIGATQRQSFTLGVKDNEKQSYDGKAQAVSTSDDVIPGSDLSCTHLWLQSRIPLGCIPSQSIATIKLELLPLTDGIIVLDTLQIDVKEKGIDCCTFGPFFSS

SEQ ID NO: 21279 - DNA, 1404 bp, Glycine max
tatctacttatcgtctaagctcagtgatcacaacctacgccgagtgaaaccccaatcccaatacactcccaactcacaaagccatgtctccaggtcctgttgtcgacgcttcccctgaggttgaagcagagcaacaacttccctccgtcgatgacgcaacccagttgaagaaatcccaaccgcaggaggatgatgctcccgttgtcgaggacgtgagggatgatgacaaggacgacgacgatgaggacgacgacgacgatgatgaagatgacaaggaagacgatgctctaggtcctcttctctttcactaagtttcctcttaacctaatagaatccttatttggtacttttcatgttatcgttagtaaaccctatggttctaattgattatttggtttccacgtgcttgtgcataattctagggtttgggttgagttctgtatttacccgtgagacctaactcacgttagattggattttattctaattatcatattatcatacttgagcgatcttaacaaggtctctaatcatagagaaatggtagttgtttgctaacagtaacgtgtaatgttcaactgcttcatctttttgctgttatttgtatgtatttatttgtgcattggctgttattctttgattattgttgttatttgtttaagtataaaaaaattgttttcatgtggggctagaggtaacctttagaccttaattaacaatggctgtcctggagatgccttgattctgtgcggggcatagtaggaaacaaaaggaattataaaggggcttggcataacccttaattagttgtcacttgattgattggaatttatgtgttggtgtttgaaaagcaaatctgagctatgctcaacttttatctgttgctaatgtccaaactttcggaatgcatatgattggttacataaccattcaatgtttatctgagaattttaacaaaggtgacttgggcataatgtgtgtcttgctaaaaaatgatgttacattagaaaaagaagaaattagtaacatatttgattagtttgcattaattttcatggtaaatattaacccaagcataacattttggacaacgtaaaatagatgttctatcttactatatcctaagttggtccctgctctgagtcccaaagattgactgctagttttttttaacattctgacaattttatccccttcagcttcacatttatgagtagatggttcgatctttgttttatctttagtttacaatacttatcaacacatcaactaggtgagcacctcatcaaatctgcagcacctcaatttgaagagggatggccctttttagagatctgcagagcactgcttctgatcactgagctcttataccaccattataatttttgtgattatttttcttga

SEQ ID NO: 21280 - protein, 75 aa, Glycine max
MSPGPVVDASPEVEAEQQLPSVDDATQLKKSQPQEDDAPVVEDVRDDDKDDDDEDDDDDDEDDKEDDALGPLLFH

SEQ ID NO: 21281 - protein, 64 aa, Glycine max
MSRWFDLCFIFSLQYLSTHQLGEHLIKSAAPQFEEGWPFLEICRALLLITELLYHHYNFCDYFS

SEQ ID NO: 21282 - protein, 44 aa, Glycine max
MHMIGYITIQCLSENFNKGDLGIMCVLLKNDVTLEKEEISNIFD

SEQ ID NO: 21283 - DNA, 1654 bp, Glycine max
aattcagaacacagagagacctcgtcaaggctaaatacgagaaaatgcagaaaaatatcgagaaatttggttcagaccctaaaagtcgtcgtattgtgagtgacagacaacctcgtattgagattataaatgaccaaccgggaatgccacttattgtttatgtgtctcgcgaaagaaggccatcccttcctcacaaattcaaaggaggagccgtcaacacattgctcagagtctcaggtttaatcagtaatggaccttatgttctagtaatggactgtgatatgtatagcaatgatccaacctctgccaaacaagccatgtgcttctttcttgatcctgaaacgtccaaatatattgcatttgttcaattccctcaaatgtttcacaaccttagcaaaaaggacatttatgatagtcaagctagaactgcttttaagacaatgtggcaaggcatggatggactaagaggtccaggtctttctggcagcggcaattacttaagtagaagtgctttactatttggaagtccaaaccaaaaagatgactatctgcaagatgcacaaaagtacttcggcaagtctaccgcctacattgaatcactgaaggccatccgtggacagaaaagtagcaaaaagaatatttcaagagatgaaatgttaagagaagctcaagtagtggcctcttgttcctacgaaaataacacaaattggggcacagaggtgggattctcatatggcatattactagagagttctattactggctatattcttcacagcagaggatggaaatcagcatatctttacccgaaaacaccatgtttcttaggttgtgctcccactgacatcaaggaaggcatgcttcagttggttaagtggttgtctgaacttttgttgcttggtgtctcctccaaatacagcccattcacttatggattttcaagaatgtccatacttcacacattcacttattgcttcatcacaatgtcatccctttatgctgttgtcttcatcctctacggcattgtacctcaagtatgcctcctcaaaggaatccctgtgtttccaaaggccacagacccttggtttgccgtgtttgcatttgtgtatgtatctactcagattcaacatttgattgaggttctctctggggatggatctgtgacaatgtggtgggatgaacaaagaatttggattctgaagtcagttaccagcatatttgcaattatagatggaatcaagaagtggttggggttgagcaaggtgaaattcaacttgtcaaacaaagccattgacaaagagaagctcaagaaatatgagcaaggtagattcgatttccaaggtgcagctgtgttcatggctccattggttctattactcacagccaacattgttagcttcttagttggtatatggagactatttaatttcaatgtgaaggattttgaagaaatgtttggtcaacttttcctagttacctatgtaatggttcttagttatccacttcttgaggccatggtaacaatgaaaagcaagagtggatagtgaaatttggtcacaaataattaggctcattcaagagtctaaattgattatgtatcttgagatgaaattgcttaatgcaatcttgttcgttcagtttagattaatctaat

SEQ ID NO: 21284 - protein, 513 aa, Glycine max
FRTQRDLVKAKYEKMQKNIEKFGSDPKSRRIVSDRQPRIEIINDQPGMPLIVYVSRERRPSLPHKFKGGAVNTLLRVSGLISNGPYVLVMDCDMYSNDPTSAKQAMCFFLDPETSKYIAFVQFPQMFHNLSKKDIYDSQARTAFKTMWQGMDGLRGPGLSGSGNYLSRSALLFGSPNQKDDYLQDAQKYFGKSTAYIESLKAIRGQKSSKKNISRDEMLREAQVVASCSYENNTNWGTEVGFSYGILLESSITGYILHSRGWKSAYLYPKTPCFLGCAPTDIKEGMLQLVKWLSELLLLGVSSKYSPFTYGFSRMSILHTFTYCFITMSSLYAVVFILYGIVPQVCLLKGIPVFPKATDPWFAVFAFVYVSTQIQHLIEVLSGDGSVTMWWDEQRIWILKSVTSIFAIIDGIKKWLGLSKVKFNLSNKAIDKEKLKKYEQGRFDFQGAAVFMAPLVLLLTANIVSFLVGIWRLFNFNVKDFEEMFGQLFLVTYVMVLSYPLLEAMVTMKSKSG

SEQ ID NO: 21285 - protein, 499 aa, Glycine max
MQKNIEKFGSDPKSRRIVSDRQPRIEIINDQPGMPLIVYVSRERRPSLPHKFKGGAVNTLLRVSGLISNGPYVLVMDCDMYSNDPTSAKQAMCFFLDPETSKYIAFVQFPQMFHNLSKKDIYDSQARTAFKTMWQGMDGLRGPGLSGSGNYLSRSALLFGSPNQKDDYLQDAQKYFGKSTAYIESLKAIRGQKSSKKNISRDEMLREAQVVASCSYENNTNWGTEVGFSYGILLESSITGYILHSRGWKSAYLYPKTPCFLGCAPTDIKEGMLQLVKWLSELLLLGVSSKYSPFTYGFSRMSILHTFTYCFITMSSLYAVVFILYGIVPQVCLLKGIPVFPKATDPWFAVFAFVYVSTQIQHLIEVLSGDGSVTMWWDEQRIWILKSVTSIFAIIDGIKKWLGLSKVKFNLSNKAIDKEKLKKYEQGRFDFQGAAVFMAPLVLLLTANIVSFLVGIWRLFNFNVKDFEEMFGQLFLVTYVMVLSYPLLEAMVTMKSKSG

SEQ ID NO: 21286 - protein, 466 aa, Glycine max
MPLIVYVSRERRPSLPHKFKGGAVNTLLRVSGLISNGPYVLVMDCDMYSNDPTSAKQAMCFFLDPETSKYIAFVQFPQMFHNLSKKDIYDSQARTAFKTMWQGMDGLRGPGLSGSGNYLSRSALLFGSPNQKDDYLQDAQKYFGKSTAYIESLKAIRGQKSSKKNISRDEMLREAQVVASCSYENNTNWGTEVGFSYGILLESSITGYILHSRGWKSAYLYPKTPCFLGCAPTDIKEGMLQLVKWLSELLLLGVSSKYSPFTYGFSRMSILHTFTYCFITMSSLYAVVFILYGIVPQVCLLKGIPVFPKATDPWFAVFAFVYVSTQIQHLIEVLSGDGSVTMWWDEQRIWILKSVTSIFAIIDGIKKWLGLSKVKFNLSNKAIDKEKLKKYEQGRFDFQGAAVFMAPLVLLLTANIVSFLVGIWRLFNFNVKDFEEMFGQLFLVTYVMVLSYPLLEAMVTMKSKSG

SEQ ID NO: 21287 - DNA, 954 bp, Glycine max
atccatcgagagacgttcgcagcagcaaagagcacgcagcagctagctttgagttgtttcatccatcatgccgggcctcaccatcggcgacaccgtccccaacctggagctggactccacccatggcaagatctggatccacgactacgtcggcaacggctacgtcatcctcttctcacacccaggtgatttcaccccggtgtgcacgacggagttagcggcgatggccaactacgccaaggagttcgagaagcggggcgtgaagctgctgggcatctcctgcgacgacgtgcagtcccacaaggaatggaccaaggacatcgaggcctacaaggctgggagcaaggtgacgtacccgatcatggcggacccggaccggtcggccatcaagcaactgaacatggtcgaccccgacgagaaggacgcggaggggcagctgccgtcccgcaccttgcacatcgtggggccggacaagaaggtgaagctgagcttcctgtacccgtcgtgcacggggcggaacatggacgaggtggtgcgcgccgtggactcgctgctgacggcggccaagcacaaggtggccaccccggccaactggaagcccggggagtgcgtggtgatcgcgcccggcgtctccgacgacgaggccaagaagatgttcccgcaggggttcgagaccgccgacctgccctccaagaaggggtacctccgcttcaccaaggtctaggcgtgcgtccgtgctagctcgtcggcgcctgctcggttactcgtggcggtctgtgtcgttgtggtccgtgcgtacttttgtggtggtatgtgtcgtttcttctgtaaatctaccagcgtctccgagctatgtatgtgtactgtgactttgtctctttcatgtgttttttttttttgcgggggtctcatctgttcgatcgccggtatatccatgtgttggtcgcttgctgc

SEQ ID NO: 21288 - protein, 218 aa, Glycine max
MPGLTIGDTVPNLELDSTHGKIWIHDYVGNGYVILFSHPGDFTPVCTTELAAMANYAKEFEKRGVKLLGISCDDVQSHKEWTKDIEAYKAGSKVTYPIMADPDRSAIKQLNMVDPDEKDAEGQLPSRTLHIVGPDKKVKLSFLYPSCTGRNMDEVVRAVDSLLTAAKHKVATPANWKPGECVVIAPGVSDDEAKKMFPQGFETADLPSKKGYLRFTKV

SEQ ID NO: 21289 - protein, 166 aa, Glycine max
MANYAKEFEKRGVKLLGISCDDVQSHKEWTKDIEAYKAGSKVTYPIMADPDRSAIKQLNMVDPDEKDAEGQLPSRTLHIVGPDKKVKLSFLYPSCTGRNMDEVVRAVDSLLTAAKHKVATPANWKPGECVVIAPGVSDDEAKKMFPQGFETADLPSKKGYLRFTKV

SEQ ID NO: 21290 - protein, 144 aa, Glycine max
MDQGHRGLQGWEQGDVPDHGGPGPVGHQATEHGRPRREGRGGAAAVPHLAHRGAGQEGEAELPVPVVHGAEHGRGGARRGLAADGGQAQGGHPGQLEARGVRGDRARRLRRRGQEDVPAGVRDRRPALQEGVPPLHQGLGVRPC

SEQ ID NO: 21291 - DNA, 1575 bp, Glycine max
gatgaacaatcaaccaagaaaacagtgagcacagttcagttgcacaccttctctgtgcttcttcttcgatgttcaattacaataacaccaactcgcttcatgaaacaccccactccaatttcgccctgtcacaatcgcatcactcatgcattggccactgtcacataaccgcgatcgctggatacgacaccctttcgttctagggtttcccctccaccactatggccatcagaggcgtcaatttcaaatggttcgatggctttttcttgtccatgctcgccaccagcatagctattgtggcaattaattggaagcggtatcaatcttgtactcaccctttgcacatatggactgtggttgactacgctgctgttttcactttccggcttttgatgtttgttgataacgggcttgcttcgggaatgggtttagattttgggtggccgcagagatatgctcgcttctgtggaagagtagttgtactttcaattcttgcattgcttctctatccatttctttgggcttggacaataattggtaccctgtggttcagcaacactaaaatctgcttgcctggagggggccagaaatggggcttccttatctggttactttttagctactgtggactcctctgtattgcttgcttggcaatgcggaagtggttaaaacgaagacaagcacgcatgttaggtgctcaagagggtatccctgtatccgcatttggggttctagttgaaatgatccgagtacctgattgggcatttgaagctgcaggtcaagaaacaaggagtatggcccaagatgctgcatatcatcctggactttacctaactccagcccagagagaagcagttgaagctttaattcaggaactcccatcgttcaggttaactgctgttcctactaattgcagtgaatgcctcatctgcttagaagaattccatgtaggaaatcaggtccgtggcctgccctgtgctcacaattttcatgttgaatgcattgatgagtggcttcggcttaatgtgaattgtcctcggtgccgttgctcagtatttcctaatcttgatctcagtgctctgtccaatatccgttctgagtctgaacagtcttctgccactgctgtgacaagcagagatatgacaggacaaacttctagtcagagttaccttctgagattacaggggcctctccacccagtttgtgttgactttgcagggccagctggtgagacagacaatgctttggaaaatgctgaaaatggtgttgtacctgttgtgactcaaaatatgtcaactagagatcaggccacttctggtgaacacatgcctgttggtctttcctcttcccaaaattagattgcttctcaactctgttatattcctaacccattcgtgagaagttgcaggttacatatcagtatccagccattgcctgaagctttatatatgatgtactttctaacatgaaaatttctggactgattcataaagaaatggatcagcttcctttttttctgagggatcttgtagaaataaagacttgaagggtgaaaatataccttttttttacttc

SEQ ID NO: 21292 - protein, 378 aa, Glycine max
MAIRGVNFKWFDGFFLSMLATSIAIVAINWKRYQSCTHPLHIWTVVDYAAVFTFRLLMFVDNGLASGMGLDFGWPQRYARFCGRVVVLSILALLLYPFLWAWTIIGTLWFSNTKICLPGGGQKWGFLIWLLFSYCGLLCIACLAMRKWLKRRQARMLGAQEGIPVSAFGVLVEMIRVPDWAFEAAGQETRSMAQDAAYHPGLYLTPAQREAVEALIQELPSFRLTAVPTNCSECLICLEEFHVGNQVRGLPCAHNFHVECIDEWLRLNVNCPRCRCSVFPNLDLSALSNIRSESEQSSATAVTSRDMTGQTSSQSYLLRLQGPLHPVCVDFAGPAGETDNALENAENGVVPVVTQNMSTRDQATSGEHMPVGLSSSQN

SEQ ID NO: 21293 - protein, 361 aa, Glycine max
MLATSIAIVAINWKRYQSCTHPLHIWTVVDYAAVFTFRLLMFVDNGLASGMGLDFGWPQRYARFCGRVVVLSILALLLYPFLWAWTIIGTLWFSNTKICLPGGGQKWGFLIWLLFSYCGLLCIACLAMRKWLKRRQARMLGAQEGIPVSAFGVLVEMIRVPDWAFEAAGQETRSMAQDAAYHPGLYLTPAQREAVEALIQELPSFRLTAVPTNCSECLICLEEFHVGNQVRGLPCAHNFHVECIDEWLRLNVNCPRCRCSVFPNLDLSALSNIRSESEQSSATAVTSRDMTGQTSSQSYLLRLQGPLHPVCVDFAGPAGETDNALENAENGVVPVVTQNMSTRDQATSGEHMPVGLSSSQN

SEQ ID NO: 21294 - protein, 321 aa, Glycine max
MFVDNGLASGMGLDFGWPQRYARFCGRVVVLSILALLLYPFLWAWTIIGTLWFSNTKICLPGGGQKWGFLIWLLFSYCGLLCIACLAMRKWLKRRQARMLGAQEGIPVSAFGVLVEMIRVPDWAFEAAGQETRSMAQDAAYHPGLYLTPAQREAVEALIQELPSFRLTAVPTNCSECLICLEEFHVGNQVRGLPCAHNFHVECIDEWLRLNVNCPRCRCSVFPNLDLSALSNIRSESEQSSATAVTSRDMTGQTSSQSYLLRLQGPLHPVCVDFAGPAGETDNALENAENGVVPVVTQNMSTRDQATSGEHMPVGLSSSQN

SEQ ID NO: 21295 - DNA, 1721 bp, Glycine max
aatatcaaattctttgtcccacaaaagatggggttcactcccacaagtactgcaacatgctttctcataatagcacctctggttgtgctatggtgttggaagctactaaagtgggtgtggctgaggccaaagagattggagagagcattaagggcacagggccttcaggggaatccctacagcctcttgattggggacactaaggaaatgtacacagtgctcatgcaagctgccagatctcaacaatctacaagttcttttctctctaaggataaggatgcagcaccacatatcacaacctttaaccatcacattgtcaacaaattcggcaagaattcatttttttgggaaggtaccaaaccaaaagtggtaatcactgaccctgagcaaatcaaagaagtcttcaacaagatccaagactttgagaaacccaagttgagtcctattgtcaagttgttgggctctggacttgcaaatttagaaggcgagaaatggcgtacacatcgaaagattattaaccctgctttccatttagaaaaattgaaggttatgttaccaatatttcttgaatgttgtgacgatatggtttccaaatgggaaaggttgttgtcttcaaatgacaaatccgaaattgatgtgtggcctttccttcaaaatttaacatgtgatattatatctagaacagcatttggaagcagttatgaagatgggaaacgtatatttgaacttctgaaagagcaaactggacttatgatgaaattgcagaacgcttacattccaggatggtggttgctgccaacaactacaaataagaggatgaaaaaaattgatactgagatacgagcattacttaaaggtgtcatcaacaaacgagagaatgcaatgaaggctggtgaagtcttgaacaatgacttgttgggcatgcttttggaatcaaaccgtatggaaatacaagatcatggaaagaataacattattgcaatgactagcctagaggtaattgaggaatgcaatgcattctacatagcaggacaagaaaccacatcggttttactagtttggacaatggtgttattgagtagatatcctcattggcaagaacgtgcaagggaggaagtattgcatgtttttggtaaccaaaagccagactataatgggctaagtcaccttaaaattgtgaccatgattttatacgaggttcttaggttatacccacctttaatttattttgctcgagcgatcaagaatgatgtgaaacttggaaacctttccctacctgcgggagtgcaagtttccttaccaatactattgattcaccaggatcgtgatatttggggtgatgatgctacagagttcaacccagaaagatttgctgaaggagtagcaaaggcaacaaaaggccaagttgtgtttttcccatttggatggggtcctagagtgtgcttaggccaaaattttgctttattagaagcgaagttggttttgtcattactcttacaacgcttctcatttgagctttctcctacctatgcacatgctccagtcactgtgctcactcttaatccaaaatttggtgctcatatcatcttacataagttgtagtgtcatctattaatttgtatcctgcacacctaattatctccattcctttcttatgttctaatctcttgtatttatagagggaaacctctttattatattgaatgctatttttatttcct

SEQ ID NO: 21296 - protein, 533 aa, Glycine max
NIKFFVPQKMGFTPTSTATCFLIIAPLVVLWCWKLLKWVWLRPKRLERALRAQGLQGNPYSLLIGDTKEMYTVLMQAARSQQSTSSFLSKDKDAAPHITTFNHHIVNKFGKNSFFWEGTKPKVVITDPEQIKEVFNKIQDFEKPKLSPIVKLLGSGLANLEGEKWRTHRKIINPAFHLEKLKVMLPIFLECCDDMVSKWERLLSSNDKSEIDVWPFLQNLTCDIISRTAFGSSYEDGKRIFELLKEQTGLMMKLQNAYIPGWWLLPTTTNKRMKKIDTEIRALLKGVINKRENAMKAGEVLNNDLLGMLLESNRMEIQDHGKNNIIAMTSLEVIEECNAFYIAGQETTSVLLVWTMVLLSRYPHWQERAREEVLHVFGNQKPDYNGLSHLKIVTMILYEVLRLYPPLIYFARAIKNDVKLGNLSLPAGVQVSLPILLIHQDRDIWGDDATEFNPERFAEGVAKATKGQVVFFPFGWGPRVCLGQNFALLEAKLVLSLLLQRFSFELSPTYAHAPVTVLTLNPKFGAHIILHKL

SEQ ID NO: 21297 - protein, 524 aa, Glycine max
MGFTPTSTATCFLIIAPLVVLWCWKLLKWVWLRPKRLERALRAQGLQGNPYSLLIGDTKEMYTVLMQAARSQQSTSSFLSKDKDAAPHITTFNHHIVNKFGKNSFFWEGTKPKVVITDPEQIKEVFNKIQDFEKPKLSPIVKLLGSGLANLEGEKWRTHRKIINPAFHLEKLKVMLPIFLECCDDMVSKWERLLSSNDKSEIDVWPFLQNLTCDIISRTAFGSSYEDGKRIFELLKEQTGLMMKLQNAYIPGWWLLPTTTNKRMKKIDTEIRALLKGVINKRENAMKAGEVLNNDLLGMLLESNRMEIQDHGKNNIIAMTSLEVIEECNAFYIAGQETTSVLLVWTMVLLSRYPHWQERAREEVLHVFGNQKPDYNGLSHLKIVTMILYEVLRLYPPLIYFARAIKNDVKLGNLSLPAGVQVSLPILLIHQDRDIWGDDATEFNPERFAEGVAKATKGQVVFFPFGWGPRVCLGQNFALLEAKLVLSLLLQRFSFELSPTYAHAPVTVLTLNPKFGAHIILHKL

SEQ ID NO: 21298 - protein, 464 aa, Glycine max
MYTVLMQAARSQQSTSSFLSKDKDAAPHITTFNHHIVNKFGKNSFFWEGTKPKVVITDPEQIKEVFNKIQDFEKPKLSPIVKLLGSGLANLEGEKWRTHRKIINPAFHLEKLKVMLPIFLECCDDMVSKWERLLSSNDKSEIDVWPFLQNLTCDIISRTAFGSSYEDGKRIFELLKEQTGLMMKLQNAYIPGWWLLPTTTNKRMKKIDTEIRALLKGVINKRENAMKAGEVLNNDLLGMLLESNRMEIQDHGKNNIIAMTSLEVIEECNAFYIAGQETTSVLLVWTMVLLSRYPHWQERAREEVLHVFGNQKPDYNGLSHLKIVTMILYEVLRLYPPLIYFARAIKNDVKLGNLSLPAGVQVSLPILLIHQDRDIWGDDATEFNPERFAEGVAKATKGQVVFFPFGWGPRVCLGQNFALLEAKLVLSLLLQRFSFELSPTYAHAPVTVLTLNPKFGAHIILHKL

SEQ ID NO: 21299 - DNA, 1785 bp, Glycine max
aataaaccatctcattccctctctccctaaaatggccactcttccctcctacgaccacctcatcttcactgccttagctttcttcttatctggccttattttcttcctcaaacacaaatccaaatccaaatccaaaaaattcaacctccctccaggaccccctggatggcctattgttggaaacctcttccaagttgctcgttccgggaaacctttctttgaatacgtgaacgatgtgagactcaaatatggctcaatcttcaccctcaagatggggacaaggaccatgatcatcctcaccgactcaaaactggtccacgaggccatgatacaaaagggtgcaacctacgccaccaggcctccagagaatcccaccagaaccatcttcagcgaaaacaagttcaccgtgaatgctgccacctatggccccgtgtggaagtctctcaggaggaacatggtgcagaacatgctcagctcaacaagacttaaggagtttcgcagcgttcgcgacaatgcgatggacaagctcatcaacaggctcaaggacgaagccgagaataataatggtgcggtttgggttctcaaagatgctaggtttgctgttttttgcatacttgtggctatgtgttttggtcttgagatggatgaggagacagttgagagaatcgatcaggttatgaagagtgttctcatcaccttggatccgagaattgatgactatcttccaattctaagtccgtttttctcaaagcaaagaaagaaagccttggaggttcgtagagaacaagttgagttcttagttccaattatagaacaaagaagaagagcaatccaaaacccgggttcagatcacaccgccacaacgttttcctacctagacacactttttgatctcaaagttgaagggaagaaatcagcaccttctgatgcagaattggtttcactgtgctcagagtttctcaacggtggcacagacacaacagcaacagcggttgagtggggcatagcacagctcatagcaaaccctcacgttcagaaaaagctctatgaagaaataaagaggacggtgggagagaagaaagtggatgaaaaggatgttgagaaaatgccatacctacacgctgtggtgaaggagcttcttagaaagcaccctccaacacactttgtgctaacacatgctgtgactgaacccaccactttgggtggttatgacataccaattgatgcaagtgttgaggtgtacacaccagccattgctggtgacccgaaaaattggtcaaaccctgagaagtttgaccccgagaggttcatctctgggggtgaggaagcagacataaccggggtaactggggtgaagatgatgccttttggtgttgggagaaggatttgccctggcttggctatggccacagtgcatattcacctcatgatggctaggatggtgcaggagtttgagtgggatgcttacccaccagagaagaagttggatttcactggcaagtgggagttcactgtggtcatgaaagagtctctaagagcaaccatcaaaccaagaggaggaggaggagaaaaagtgcacttgtaaaattttgttgctcctcctcctttctggtttttaatttcacagataacataaatattattgttgctattgttattattatatatggatacatcatcgtggtttgtggtggatttgcatacagagtactgcaagtttcatcacatcattatattgccttcttaattggtccggtttgttggagaaatatttgttttgatgac

SEQ ID NO: 21300 - protein, 527 aa, Glycine max
INHLIPSLPKMATLPSYDHLIFTALAFFLSGLIFFLKHKSKSKSKKFNLPPGPPGWPIVGNLFQVARSGKPFFEYVNDVRLKYGSIFTLKMGTRTMIILTDSKLVHEAMIQKGATYATRPPENPTRTIFSENKFTVNAATYGPVWKSLRRNMVQNMLSSTRLKEFRSVRDNAMDKLINRLKDEAENNNGAVWVLKDARFAVFCILVAMCFGLEMDEETVERIDQVMKSVLITLDPRIDDYLPILSPFFSKQRKKALEVRREQVEFLVPIIEQRRRAIQNPGSDHTATTFSYLDTLFDLKVEGKKSAPSDAELVSLCSEFLNGGTDTTATAVEWGIAQLIANPHVQKKLYEEIKRTVGEKKVDEKDVEKMPYLHAVVKELLRKHPPTHFVLTHAVTEPTTLGGYDIPIDASVEVYTPAIAGDPKNWSNPEKFDPERFISGGEEADITGVTGVKMMPFGVGRRICPGLAMATVHIHLMMARMVQEFEWDAYPPEKKLDFTGKWEFTVVMKESLRATIKPRGGGGEKVHL

SEQ ID NO: 21301 - protein, 517 aa, Glycine max
MATLPSYDHLIFTALAFFLSGLIFFLKHKSKSKSKKFNLPPGPPGWPIVGNLFQVARSGKPFFEYVNDVRLKYGSIFTLKMGTRTMIILTDSKLVHEAMIQKGATYATRPPENPTRTIFSENKFTVNAATYGPVWKSLRRNMVQNMLSSTRLKEFRSVRDNAMDKLINRLKDEAENNNGAVWVLKDARFAVFCILVAMCFGLEMDEETVERIDQVMKSVLITLDPRIDDYLPILSPFFSKQRKKALEVRREQVEFLVPIIEQRRRAIQNPGSDHTATTFSYLDTLFDLKVEGKKSAPSDAELVSLCSEFLNGGTDTTATAVEWGIAQLIANPHVQKKLYEEIKRTVGEKKVDEKDVEKMPYLHAVVKELLRKHPPTHFVLTHAVTEPTTLGGYDIPIDASVEVYTPAIAGDPKNWSNPEKFDPERFISGGEEADITGVTGVKMMPFGVGRRICPGLAMATVHIHLMMARMVQEFEWDAYPPEKKLDFTGKWEFTVVMKESLRATIKPRGGGGEKVHL

SEQ ID NO: 21302 - protein, 437 aa, Glycine max
MGTRTMIILTDSKLVHEAMIQKGATYATRPPENPTRTIFSENKFTVNAATYGPVWKSLRRNMVQNMLSSTRLKEFRSVRDNAMDKLINRLKDEAENNNGAVWVLKDARFAVFCILVAMCFGLEMDEETVERIDQVMKSVLITLDPRIDDYLPILSPFFSKQRKKALEVRREQVEFLVPIIEQRRRAIQNPGSDHTATTFSYLDTLFDLKVEGKKSAPSDAELVSLCSEFLNGGTDTTATAVEWGIAQLIANPHVQKKLYEEIKRTVGEKKVDEKDVEKMPYLHAVVKELLRKHPPTHFVLTHAVTEPTTLGGYDIPIDASVEVYTPAIAGDPKNWSNPEKFDPERFISGGEEADITGVTGVKMMPFGVGRRICPGLAMATVHIHLMMARMVQEFEWDAYPPEKKLDFTGKWEFTVVMKESLRATIKPRGGGGEKVHL

SEQ ID NO: 21303 - DNA, 1732 bp, Glycine max
gtccttattaatggcttgatttttctgtttccaaaacattggttcctttctcacatgcttggtgtggtcttgtctgggtttcgatttgagtacaactttttgataagcaaaggggatatttgtcctccttgtttgacattggcctgtttgcattgagtacttgtagggagtagtaaataagaaggaaaatggatcagaagatttgtcatgggacacacttcattatgtgtacgagcttgtgaagaatgggaatgcggcatttcgagagaacagaatgcaagaggcaatcaacttatactcgagagccaataacatcaaatcaggattagcgaatatttcatgcgcagaacatcatcatcttcagaacgtaggccattgagtgggcttgaacccacaacaattgctgaactgggtttgaaggatgctgagaagcttgttgaactccaaagtaattcagcaaaatcatatcttttaaaggccagtgctcttttactgttagagaaatatgaaaaagcccgggatgttattctttcaggtcttcaagttgatccttttagtaattctcttcgggcttctcttcaaaatttggaaagagtttcatctagttcaacagggatgagtacacatggacatccagaacgtaatgatgattttgattgcactctctgcctgaagttactgtatgaacctgtcacaaccccttgtggacattctttttgccgatcgtgtctatttcagtcaatggatcgtggaaacagatgcccattgtgtaggacagttctgtttattagtcccagaacatgttccatcagtgtgacattgaagaacattatacaaaagaacttcccagaggaatatgcagaaaggaagcaagagcatgacggtttaatcaatgctggtgtagatttactccctctttttgtcatggatgttgtcataccatgtcagaggtttgcactcaatatatttgaacctcggtatagactcatggtaagaagaataatggaaggcaatcatcggatgggaatggctatacttgattcaacaggttccttagctgagtttgcctgtgaagtggaaataacagagtgtgaaccacttccagatggtcgtttttatatagagattgaaagtcgtaggagatttcgtatcatccgttctagggatcaagatgggtatcgtgttgcagaggttgaatggatacaagatattatgccaccagaaggaacaagtgaaagagagactttacaacaacaaacatataatgcagctgaagatgctcgatcgtggatagcaagagctaaaaaagcagcaaaacatgatccaagaaaacttgagagactcgccagtgttgaagtaatgatgccctcaccaaaagaccctgagcgctttagtttttggctggctactctctccaatcggaggcctgcggaaagattggatctcctacgcataagagacactgctgagaggattagacggggcctgatatttctccgacaagaagaacaaggctgcagaattcagtaagacaagctgaggactagcattattattgcaattgaatatttgtttaatgtaaatgaatatttgtttactgcaaattcatttacaagtcacataatatttttcggcctcgtaaataactgttgatgaggtcatttttgttgtaacattgggttgatcccacttttcatatatatatatatatatataacaacatatttagtgg

SEQ ID NO: 21304 - protein, 396 aa, Glycine max
MRRTSSSSERRPLSGLEPTTIAELGLKDAEKLVELQSNSAKSYLLKASALLLLEKYEKARDVILSGLQVDPFSNSLRASLQNLERVSSSSTGMSTHGHPERNDDFDCTLCLKLLYEPVTTPCGHSFCRSCLFQSMDRGNRCPLCRTVLFISPRTCSISVTLKNIIQKNFPEEYAERKQEHDGLINAGVDLLPLFVMDVVIPCQRFALNIFEPRYRLMVRRIMEGNHRMGMAILDSTGSLAEFACEVEITECEPLPDGRFYIEIESRRRFRIIRSRDQDGYRVAEVEWIQDIMPPEGTSERETLQQQTYNAAEDARSWIARAKKAAKHDPRKLERLASVEVMMPSPKDPERFSFWLATLSNRRPAERLDLLRIRDTAERIRRGLIFLRQEEQGCRIQ

SEQ ID NO: 21305 - protein, 304 aa, Glycine max
MSTHGHPERNDDFDCTLCLKLLYEPVTTPCGHSFCRSCLFQSMDRGNRCPLCRTVLFISPRTCSISVTLKNIIQKNFPEEYAERKQEHDGLINAGVDLLPLFVMDVVIPCQRFALNIFEPRYRLMVRRIMEGNHRMGMAILDSTGSLAEFACEVEITECEPLPDGRFYIEIESRRRFRIIRSRDQDGYRVAEVEWIQDIMPPEGTSERETLQQQTYNAAEDARSWIARAKKAAKHDPRKLERLASVEVMMPSPKDPERFSFWLATLSNRRPAERLDLLRIRDTAERIRRGLIFLRQEEQGCRIQ

SEQ ID NO: 21306 - protein, 262 aa, Glycine max
MDRGNRCPLCRTVLFISPRTCSISVTLKNIIQKNFPEEYAERKQEHDGLINAGVDLLPLFVMDVVIPCQRFALNIFEPRYRLMVRRIMEGNHRMGMAILDSTGSLAEFACEVEITECEPLPDGRFYIEIESRRRFRIIRSRDQDGYRVAEVEWIQDIMPPEGTSERETLQQQTYNAAEDARSWIARAKKAAKHDPRKLERLASVEVMMPSPKDPERFSFWLATLSNRRPAERLDLLRIRDTAERIRRGLIFLRQEEQGCRIQ

SEQ ID NO: 21307 - DNA, 1657 bp, Glycine max
gagaaatggaagcaccatgggccacaacaagttcaagcatagtttttgtgatagtgatacttgctctaacatcatgggcatggaggatgttgaattggctatggataaggccaaagaggctagagaggctcctaagggaacaaggccttcaaggaaacccctacaggatattggttggggacttaaaggagattgtgaagttgcaaatggaagcaagatccaaacccatgaatctctcccatgatattgtgccacgtgtgtttgcacatctgcatcagagtgtcctcaaacatggcaagaattcttttatttggtttggaccaaaaccaagggtgaccctcacagatcctgagctgatcaaagatgtacttaacaagatcagtgatttccgaaagcctgaagcaaatccacttgccaaattactagctactggtcttgtaaactatgatggagaaaaatggaacaagcacagaagattaattaatcctgcattcagtttagaaaaattgaagattatgttaccaatattcttcaaaagttgcaatgatctaattatcaagtgggagggaatgttgtcttatgatggatcatgtgaaatggatgtttggcctttccttcaaaatttagctagtgatgttattgcgagaacagcatttggaagtagttttgaagaaggaaaaagaatatttcaacttcaaaaagagctagcggaacttacaatgaaagttatcatgaaagtttacatccctggatggagatttgtacctactgcaaccaatcggagaatgaaggaaattgatagatatataaaagcttcacttacagacatgattaagaagagagagaaagcaccaaagacaggtgaagctactagggatgacttgttaggtatacttctggagtcaaatcacaaggaaatacaagaacacagaaacaatgagaatgttggaatgaatctcaatgatgtaatcgaggaatgcaagttattctactttgcagggcaagagaccacttcagttttacttgtttggacaatggtgttgttaagtaggtaccctgattggcaatcacgtgcaagggaggaagtcttacaagtctttggcaaacaagcaccaaattttgatgggctaagtcaccttaagattgtcaccatgattttgtatgaggttcttagattatacccaccaggaattggccttactagaagtgttcacagagatatgaaactgggaaacctaacattacctgctggagtgcaagtttccttaccaataattatggttcaccatgaccgtgaactctggggtgatgatgcaaaagagttcaatcctgagagattttcagaaggggtttcaaaagcgacaaatggcagagtttcattttttccatttggatggggtcctagaatatgcatcggacaaaacttttccttgttggaggcaaagatggctttgtcgatgatcttacagcatttctcatttgaactttctccagcttatactcatgctccgtttacagtgattactcttcagccccaatatggcgctcatgtcattttacgtaaagttgaaatgtaaaatataataataacccttattttgatttgcatttcgcactgcaaagtttataatgcaataatagtagaagactaattgtc

SEQ ID NO: 21308 - protein, 524 aa, Glycine max
EMEAPWATTSSSIVFVIVILALTSWAWRMLNWLWIRPKRLERLLREQGLQGNPYRILVGDLKEIVKLQMEARSKPMNLSHDIVPRVFAHLHQSVLKHGKNSFIWFGPKPRVTLTDPELIKDVLNKISDFRKPEANPLAKLLATGLVNYDGEKWNKHRRLINPAFSLEKLKIMLPIFFKSCNDLIIKWEGMLSYDGSCEMDVWPFLQNLASDVIARTAFGSSFEEGKRIFQLQKELAELTMKVIMKVYIPGWRFVPTATNRRMKEIDRYIKASLTDMIKKREKAPKTGEATRDDLLGILLESNHKEIQEHRNNENVGMNLNDVIEECKLFYFAGQETTSVLLVWTMVLLSRYPDWQSRAREEVLQVFGKQAPNFDGLSHLKIVTMILYEVLRLYPPGIGLTRSVHRDMKLGNLTLPAGVQVSLPIIMVHHDRELWGDDAKEFNPERFSEGVSKATNGRVSFFPFGWGPRICIGQNFSLLEAKMALSMILQHFSFELSPAYTHAPFTVITLQPQYGAHVILRKVEM

SEQ ID NO: 21309 - protein, 523 aa, Glycine max
MEAPWATTSSSIVFVIVILALTSWAWRMLNWLWIRPKRLERLLREQGLQGNPYRILVGDLKEIVKLQMEARSKPMNLSHDIVPRVFAHLHQSVLKHGKNSFIWFGPKPRVTLTDPELIKDVLNKISDFRKPEANPLAKLLATGLVNYDGEKWNKHRRLINPAFSLEKLKIMLPIFFKSCNDLIIKWEGMLSYDGSCEMDVWPFLQNLASDVIARTAFGSSFEEGKRIFQLQKELAELTMKVIMKVYIPGWRFVPTATNRRMKEIDRYIKASLTDMIKKREKAPKTGEATRDDLLGILLESNHKEIQEHRNNENVGMNLNDVIEECKLFYFAGQETTSVLLVWTMVLLSRYPDWQSRAREEVLQVFGKQAPNFDGLSHLKIVTMILYEVLRLYPPGIGLTRSVHRDMKLGNLTLPAGVQVSLPIIMVHHDRELWGDDAKEFNPERFSEGVSKATNGRVSFFPFGWGPRICIGQNFSLLEAKMALSMILQHFSFELSPAYTHAPFTVITLQPQYGAHVILRKVEM

SEQ ID NO: 21310 - protein, 496 aa, Glycine max
MLNWLWIRPKRLERLLREQGLQGNPYRILVGDLKEIVKLQMEARSKPMNLSHDIVPRVFAHLHQSVLKHGKNSFIWFGPKPRVTLTDPELIKDVLNKISDFRKPEANPLAKLLATGLVNYDGEKWNKHRRLINPAFSLEKLKIMLPIFFKSCNDLIIKWEGMLSYDGSCEMDVWPFLQNLASDVIARTAFGSSFEEGKRIFQLQKELAELTMKVIMKVYIPGWRFVPTATNRRMKEIDRYIKASLTDMIKKREKAPKTGEATRDDLLGILLESNHKEIQEHRNNENVGMNLNDVIEECKLFYFAGQETTSVLLVWTMVLLSRYPDWQSRAREEVLQVFGKQAPNFDGLSHLKIVTMILYEVLRLYPPGIGLTRSVHRDMKLGNLTLPAGVQVSLPIIMVHHDRELWGDDAKEFNPERFSEGVSKATNGRVSFFPFGWGPRICIGQNFSLLEAKMALSMILQHFSFELSPAYTHAPFTVITLQPQYGAHVILRKVEM

SEQ ID NO: 21311 - DNA, 1237 bp, Glycine max
gaaattctccaaggaatctctctctctctctctctttctttccctttttcactttctcattcattcttattagtatttctatttcacttcaccaacccactccaccgtttcccctttccttccatgctattatggcttcatcttccatcaaacacactcaccaccttaaccgcacaaaactcttcatgaaagaagaaacccttttgaaaaagaagcatcactatcccaaaatcatacgaatacgtgtcaccgacgccgacgctaccgactcctccagcgacgacgacgagccctccatgtcctccacgcgccgcagagtaaaaaacttcgtcaacgaaattaccatccaaggcggcggcggtggtggtggcgacgttaacgttgtttctaagaaaagaagattcaagtccggtgccggagctccgttatgtcggcggaagacgggggcgaagaagttccggggagtgaggcagcggccatgggggaagtgggcggcggagataagagacccgtcgcgccgcgtccggctgtggctgggaacctacgacaccgccgaggaagctgccattgtgtacgacaacgcggccattcagctgcgtggcgccgacgcgctcaccaatttcataacgccgccgccggagaacagaaaaaccggttactgctccggcgaggagtctcgcaacaacgacgacttgcgttcccccacttcggttcttgggcgctgttcggtgtccgaggaagctgtaactgcaaacgacgtatttggaggctctagtgagtgcgagtattcatgcgtttcggagtcagtgtttcctattcctaacgaggtggtgtttgactttgaaagcacgttagatatgtttgatgaagggattaataatgttgtggcagagactagtatattcttggcggaggatttagatttgggttttacgagttggcatagagagtgtgataatttccaagacattgggggggatttgtttgtttgggatcctcttgtcgctctttgattgagacacagacaccattctctcgtctttgtaattctattgccaacgaaaatgggttgctatcagttttgtttcttttgggggtttaggcaaaaaccttgtgtctaaggagaggttttctaattttttattctagcagtatatgtttattaaccactagttgtaaaaccgtgcttcccacggtgttgccgtctttttgtttcttatataaaattatgtctcat

SEQ ID NO: 21312 - protein, 336 aa, Glycine max
NSPRNLSLSLSFFPFFTFSFILISISISLHQPTPPFPLSFHAIMASSSIKHTHHLNRTKLFMKEETLLKKKHHYPKIIRIRVTDADATDSSSDDDEPSMSSTRRRVKNFVNEITIQGGGGGGGDVNVVSKKRRFKSGAGAPLCRRKTGAKKFRGVRQRPWGKWAAEIRDPSRRVRLWLGTYDTAEEAAIVYDNAAIQLRGADALTNFITPPPENRKTGYCSGEESRNNDDLRSPTSVLGRCSVSEEAVTANDVFGGSSECEYSCVSESVFPIPNEVVFDFESTLDMFDEGINNVVAETSIFLAEDLDLGFTSWHRECDNFQDIGGDLFVWDPLVAL

SEQ ID NO: 21313 - protein, 293 aa, Glycine max
MASSSIKHTHHLNRTKLFMKEETLLKKKHHYPKIIRIRVTDADATDSSSDDDEPSMSSTRRRVKNFVNEITIQGGGGGGGDVNVVSKKRRFKSGAGAPLCRRKTGAKKFRGVRQRPWGKWAAEIRDPSRRVRLWLGTYDTAEEAAIVYDNAAIQLRGADALTNFITPPPENRKTGYCSGEESRNNDDLRSPTSVLGRCSVSEEAVTANDVFGGSSECEYSCVSESVFPIPNEVVFDFESTLDMFDEGINNVVAETSIFLAEDLDLGFTSWHRECDNFQDIGGDLFVWDPLVAL

SEQ ID NO: 21314 - protein, 275 aa, Glycine max
MKEETLLKKKHHYPKIIRIRVTDADATDSSSDDDEPSMSSTRRRVKNFVNEITIQGGGGGGGDVNVVSKKRRFKSGAGAPLCRRKTGAKKFRGVRQRPWGKWAAEIRDPSRRVRLWLGTYDTAEEAAIVYDNAAIQLRGADALTNFITPPPENRKTGYCSGEESRNNDDLRSPTSVLGRCSVSEEAVTANDVFGGSSECEYSCVSESVFPIPNEVVFDFESTLDMFDEGINNVVAETSIFLAEDLDLGFTSWHRECDNFQDIGGDLFVWDPLVAL

SEQ ID NO: 21315 - DNA, 1180 bp, Glycine max
agaaacgcaaacatatacccataacctgatagagaaagagagagaacagaagaaaagaaaagaaaagaagcagagtggtaaacaaagagaaacaacaaaacccagaatctagagactaataacggctcttgctttgtgaatagcataccatagcaacaacaacaacacagaacacacaaagaaaaaataagaggcttatggaggaatattaaagctggaaatgaatgcggtgacatggtgcatggacaggagcatagttgctggttcgttccctttctggaacagggctactggaaactaattcaagcactctcaaatttagaagaattttacactaggcgtatttggattttgtgcaatgtcgcgttgttttccatttccaccaccaggatatggaaagaaggctataacagatgaagtggacttattagaaaaggaaaagcagaaagaaaaaaaacataagaaagataagaaggacaaagagaagagggaaagcaaggaaaagagagagaaagaaggaagagatgggaagcataaggaaaagaaggacaaaaaggaaaaacacagagagaaaaagaaagataaggataaagacaaggacaagagcaaagatagagataaaagtaaaagcagtactgcagatgacaaagggttcccaagacaagctgagggtctcaacgcaggtaaaccccatcaaaaggaaattaagcaagacaataagaagggtatcttgtttgagaacagactcaccaaacagtatgctggcaacaatggggagaaggctagagagaaaaatcatctggctgaagagaacaaggattcaaagttcctcctggagttggatcggaggattaaggatgatgatggaggagctaaccatcaattggttcataaatttacaaatacaaaccatagaaaagatgaggggactgttaggttggtggctaaaggtggtggcaccaggtctgatggtaatgaaaaactcaaggatatgggtcttgatgttaagaagattgatgggcgaggaatacaggatgaggtccggccaattggaaatgcagcaccagttcagaatcatgttggaaattttcatcctagagttgatggaatacccaaactattgggaaagtattttgaaaggaatttggaagcaacagttgaaggtaaagaaaaggttaag

SEQ ID NO: 21316 - protein, 274 aa, Glycine max
MSRCFPFPPPGYGKKAITDEVDLLEKEKQKEKKHKKDKKDKEKRESKEKREKEGRDGKHKEKKDKKEKHREKKKDKDKDKDKSKDRDKSKSSTADDKGFPRQAEGLNAGKPHQKEIKQDNKKGILFENRLTKQYAGNNGEKAREKNHLAEENKDSKFLLELDRRIKDDDGGANHQLVHKFTNTNHRKDEGTVRLVAKGGGTRSDGNEKLKDMGLDVKKIDGRGIQDEVRPIGNAAPVQNHVGNFHPRVDGIPKLLGKYFERNLEATVEGKEKVK

SEQ ID NO: 21317 - protein, 218 aa, Glycine max
MGSIRKRRTKRKNTERKRKIRIKTRTRAKIEIKVKAVLQMTKGSQDKLRVSTQVNPIKRKLSKTIRRVSCLRTDSPNSMLATMGRRLERKIIWLKRTRIQSSSWSWIGGLRMMMEELTINWFINLQIQTIEKMRGLLGWWLKVVAPGLMVMKNSRIWVLMLRRLMGEEYRMRSGQLEMQHQFRIMLEIFILELMEYPNYWESILKGIWKQQLKVKKRL

SEQ ID NO: 21318 - protein, 179 aa, Glycine max
MTKGSQDKLRVSTQVNPIKRKLSKTIRRVSCLRTDSPNSMLATMGRRLERKIIWLKRTRIQSSSWSWIGGLRMMMEELTINWFINLQIQTIEKMRGLLGWWLKVVAPGLMVMKNSRIWVLMLRRLMGEEYRMRSGQLEMQHQFRIMLEIFILELMEYPNYWESILKGIWKQQLKVKKRL

SEQ ID NO: 21319 - DNA, 1719 bp, Glycine max
acaaaacacaactcgtcacatcacatcacatcacatctattttcattacttcatcattttcactgcaattttcacaccacacacacaccacaatcatggaagttgatagtaggtttctgaacactggcctcctccttgtggccacaatccttgtggtcaagctcatctcagccttcatagtgcccaaatccagaaagagggtacccccaattgtgaaggggtggcccttaattggaggactcatccgtttcctcaaaggtccaatctttatgctccgtgacgagtaccctaagcttggaagtgtcttcactctcaaactcttccacaagaacatcaccttcctcattggccctgaggtttctgcacacttcttcaaggcctcagagactgatctcagccagcaagaggtgtatcagttcaatgtgccaacttttggacctggggtggtctttgatgttgattactctgtgaggcaagaacagttcaggttcttcactgaggctcttagggccaacaagctcaagggttatgtcaatcagatggttgcagaagctgaggactatttctcaaagtggggaccaagtggtgaggttgatttgaagtatgagcttgagcatctgatcatcttgacagccagtagatgtctcttggggcgtgaagttcgtgacaagctctttgatgatgtctctgcattgttccacgaccttgataatgggatgcttccaatcagtgttctcttcccatacctgccaatcccagctcacaagcgccgtgaccaggcacgcaagaagcttgctgaaatctttgcaagcatcataacatctcgcaaaagtgcaagcaaatcagaagaagacatgctgcagtgcttcattgactcaaaatacaaagatggtcgctcaacaacagaagctgaagtgactgggcttctcattgctgcactttttgccggtcaacacacaagctcgattacctccacttggactggggcatatctgctgtctaacaaccagtacctttcagctgtgcaggaggagcagaagatgttgatagaaaagcatggggacagagttgatcatgatgttttggctgaaatggatgtgctgtataggtgcatcaaagaagctttgagactccatcctcctctaatcatgctgatgagaagctcacacactgattttagtgtcacaacacgagaggggaaagagtatgacattcccaagggtcatataattgccacatcacctgcttttgcaaacaggctaggtcatgttttcaaagaccctgataggtatgatcccgatcgatttgctgtggggagggaagaggacaaggtggcaggtgcattctcatacatttcatttggagggggcagacatggatgccttggggagccatttgcatatctgcagataaaagcaatatggactcatctgcttaggaattttgagctggagttggtgtcaccttttccagagatcgattggaatgccatggttgtgggagtgaaggggaaagtgatggtccgatataagcggaaggagctttcagttaatcaataggaccacataattcagtgtctggcatgattttattttaagcagttattgttagtcttttctggttcagcttctgtcaaagttcgttgtttatttggcaatgaatatctagaatcttgattttgatttttttttcttctaattctattaagtgattttaact

SEQ ID NO: 21320 - protein, 518 aa, Glycine max
KTQLVTSHHITSIFITSSFSLQFSHHTHTTIMEVDSRFLNTGLLLVATILVVKLISAFIVPKSRKRVPPIVKGWPLIGGLIRFLKGPIFMLRDEYPKLGSVFTLKLFHKNITFLIGPEVSAHFFKASETDLSQQEVYQFNVPTFGPGVVFDVDYSVRQEQFRFFTEALRANKLKGYVNQMVAEAEDYFSKWGPSGEVDLKYELEHLIILTASRCLLGREVRDKLFDDVSALFHDLDNGMLPISVLFPYLPIPAHKRRDQARKKLAEIFASIITSRKSASKSEEDMLQCFIDSKYKDGRSTTEAEVTGLLIAALFAGQHTSSITSTWTGAYLLSNNQYLSAVQEEQKMLIEKHGDRVDHDVLAEMDVLYRCIKEALRLHPPLIMLMRSSHTDFSVTTREGKEYDIPKGHIIATSPAFANRLGHVFKDPDRYDPDRFAVGREEDKVAGAFSYISFGGGRHGCLGEPFAYLQIKAIWTHLLRNFELELVSPFPEIDWNAMVVGVKGKVMVRYKRKELSVNQ

SEQ ID NO: 21321 - protein, 487 aa, Glycine max
MEVDSRFLNTGLLLVATILVVKLISAFIVPKSRKRVPPIVKGWPLIGGLIRFLKGPIFMLRDEYPKLGSVFTLKLFHKNITFLIGPEVSAHFFKASETDLSQQEVYQFNVPTFGPGVVFDVDYSVRQEQFRFFTEALRANKLKGYVNQMVAEAEDYFSKWGPSGEVDLKYELEHLIILTASRCLLGREVRDKLFDDVSALFHDLDNGMLPISVLFPYLPIPAHKRRDQARKKLAEIFASIITSRKSASKSEEDMLQCFIDSKYKDGRSTTEAEVTGLLIAALFAGQHTSSITSTWTGAYLLSNNQYLSAVQEEQKMLIEKHGDRVDHDVLAEMDVLYRCIKEALRLHPPLIMLMRSSHTDFSVTTREGKEYDIPKGHIIATSPAFANRLGHVFKDPDRYDPDRFAVGREEDKVAGAFSYISFGGGRHGCLGEPFAYLQIKAIWTHLLRNFELELVSPFPEIDWNAMVVGVKGKVMVRYKRKELSVNQ

SEQ ID NO: 21322 - protein, 429 aa, Glycine max
MLRDEYPKLGSVFTLKLFHKNITFLIGPEVSAHFFKASETDLSQQEVYQFNVPTFGPGVVFDVDYSVRQEQFRFFTEALRANKLKGYVNQMVAEAEDYFSKWGPSGEVDLKYELEHLIILTASRCLLGREVRDKLFDDVSALFHDLDNGMLPISVLFPYLPIPAHKRRDQARKKLAEIFASIITSRKSASKSEEDMLQCFIDSKYKDGRSTTEAEVTGLLIAALFAGQHTSSITSTWTGAYLLSNNQYLSAVQEEQKMLIEKHGDRVDHDVLAEMDVLYRCIKEALRLHPPLIMLMRSSHTDFSVTTREGKEYDIPKGHIIATSPAFANRLGHVFKDPDRYDPDRFAVGREEDKVAGAFSYISFGGGRHGCLGEPFAYLQIKAIWTHLLRNFELELVSPFPEIDWNAMVVGVKGKVMVRYKRKELSVNQ

SEQ ID NO: 21323 - DNA, 1660 bp, Glycine max
ataatgggtatccttgttcttctttctctattgtctatagtcatctccattgttctcttcattacccacacacacaaaagaaacaacactccaagaggaccaccaggtcctccacctcttcctctcatcggcaaccttcaccaactccacaactcatccccacatctctgcctatggcaactcgccaaactccacggtcctctcatgtcgtttcgcctcggcgccgtgcaaaccgtcgtggtttcatcggccagaatcgccgaacaaatcttgaaaacccacgacctcaacttcgcttccaggcctctcttcgtgggcccgagaaagctctcttacgacgggttggacatgggcttcgcaccgtacggcccgtactggagagaaatgaagaaactctgcatcgttcacctcttcagcgcgcaacgcgttcggtcctttcgaccaattcgagagaacgaggttgcaaaaatggttcggaaactgtcggaacacgaagcttcgggtactgtcgtgaacttgaccgaaactttgatgtctttcacgaactctttgatatgcagaatcgcgttggggaaaagttacggttgtgagtacgaggaagtagttgttgatgaggtactgggaaaccggaggagcaggttgcaggttctgctcaacgaggctcaagcgttgctttcggagtttttcttttcggattattttccgcctataggaaagtgggttgatagagtgacgggaattctatcgcggcttgataaaacgttcaaggagttggacgcgtgctacgaacgattcatctatgatcacatggattcggcaaagagtggtaaaaaagataatgacaacaaagaagtcaaagatattattgatattcttctccagctacttgatgatcgttccttcacctttgatctcactctcgaccacataaaagccgtgctcatgaacatctttatagcaggaacagacccgagttccgcgacaatagtttgggcaatgaatgcactgttgaagaatcccaatgtgatgagcaaggttcaaggagaagtgagaaatctattcggtgacaaagatttcataaacgaagatgatgtcgaaagccttccttatctcaaagcagtggtgaaggagacattaagattattcccaccttcaccactacttttgccaagggtaacaatggaaacatgcaacatagaagggtacgaaattcaagccaaaactatagtgcatgttaatgcatgggccatagcaagggaccctgagaattgggaagagcctgagaaatttttccccgaaaggttccttgagagttcgatggagttaaaggggaatgatgagtttaaggtgatcccgtttggttctggaaggagaatgtgtcctgcgaagcacatgggaattatgaatgttagctttctcttgctaatctcattcacacgtttgattgggaagtggctaaagggttcgacaaggaagaaatgttggacacgcaaatgaaaccaggaataacgatgcacaagaaaagtgatctttacctagtggcaaagaaaccgacaacgtagcacacgttggtacattcactataacacacaagaaagttgataatgacttgtgtatgcaactatgctctatgcactatgcactatgtttattgaccatt

SEQ ID NO: 21324 - protein, 498 aa, Glycine max
IMGILVLLSLLSIVISIVLFITHTHKRNNTPRGPPGPPPLPLIGNLHQLHNSSPHLCLWQLAKLHGPLMSFRLGAVQTVVVSSARIAEQILKTHDLNFASRPLFVGPRKLSYDGLDMGFAPYGPYWREMKKLCIVHLFSAQRVRSFRPIRENEVAKMVRKLSEHEASGTVVNLTETLMSFTNSLICRIALGKSYGCEYEEVVVDEVLGNRRSRLQVLLNEAQALLSEFFFSDYFPPIGKWVDRVTGILSRLDKTFKELDACYERFIYDHMDSAKSGKKDNDNKEVKDIIDILLQLLDDRSFTFDLTLDHIKAVLMNIFIAGTDPSSATIVWAMNALLKNPNVMSKVQGEVRNLFGDKDFINEDDVESLPYLKAVVKETLRLFPPSPLLLPRVTMETCNIEGYEIQAKTIVHVNAWAIARDPENWEEPEKFFPERFLESSMELKGNDEFKVIPFGSGRRMCPAKHMGIMNVSFLLLISFTRLIGKWLKGSTRKKCWTRK

SEQ ID NO: 21325 - protein, 497 aa, Glycine max
MGILVLLSLLSIVISIVLFITHTHKRNNTPRGPPGPPPLPLIGNLHQLHNSSPHLCLWQLAKLHGPLMSFRLGAVQTVVVSSARIAEQILKTHDLNFASRPLFVGPRKLSYDGLDMGFAPYGPYWREMKKLCIVHLFSAQRVRSFRPIRENEVAKMVRKLSEHEASGTVVNLTETLMSFTNSLICRIALGKSYGCEYEEVVVDEVLGNRRSRLQVLLNEAQALLSEFFFSDYFPPIGKWVDRVTGILSRLDKTFKELDACYERFIYDHMDSAKSGKKDNDNKEVKDIIDILLQLLDDRSFTFDLTLDHIKAVLMNIFIAGTDPSSATIVWAMNALLKNPNVMSKVQGEVRNLFGDKDFINEDDVESLPYLKAVVKETLRLFPPSPLLLPRVTMETCNIEGYEIQAKTIVHVNAWAIARDPENWEEPEKFFPERFLESSMELKGNDEFKVIPFGSGRRMCPAKHMGIMNVSFLLLISFTRLIGKWLKGSTRKKCWTRK

SEQ ID NO: 21326 - protein, 430 aa, Glycine max
MSFRLGAVQTVVVSSARIAEQILKTHDLNFASRPLFVGPRKLSYDGLDMGFAPYGPYWREMKKLCIVHLFSAQRVRSFRPIRENEVAKMVRKLSEHEASGTVVNLTETLMSFTNSLICRIALGKSYGCEYEEVVVDEVLGNRRSRLQVLLNEAQALLSEFFFSDYFPPIGKWVDRVTGILSRLDKTFKELDACYERFIYDHMDSAKSGKKDNDNKEVKDIIDILLQLLDDRSFTFDLTLDHIKAVLMNIFIAGTDPSSATIVWAMNALLKNPNVMSKVQGEVRNLFGDKDFINEDDVESLPYLKAVVKETLRLFPPSPLLLPRVTMETCNIEGYEIQAKTIVHVNAWAIARDPENWEEPEKFFPERFLESSMELKGNDEFKVIPFGSGRRMCPAKHMGIMNVSFLLLISFTRLIGKWLKGSTRKKCWTRK

SEQ ID NO: 21327 - DNA, 1266 bp, Glycine max
accatttctcttccctcaactaaactcatattccaaaacgcagagccaaaccatgtcgttccccttcaaccactctcacgccacccacacccaccaccgcagggacgacgacgacgacgaacgacccaccgtttaccctccgccgggaaactccttcagcaacccgccacctccgttctacggcgtccctcaaccaccaccccctcagccggagacccacgtgttccattccgctcacgtgacaccaggacacgtgtcccatgacttcaacaactactccgctcccccgcctccacccccttcccaccatcatcatgatcgtcatcatgactccttcacccacgcttacccacctgctcccgctgcagctgattaccccgctcacggaggcagcagtaccaccgtgcaccacgtggctcacgagtctcaccaccacaccccccattccgctttctcctcccacaacaacgcaccccccaccactgttcatcacgtgagccaccaggttaacaccggtggtctctcgaccaaacccactgtcagggttttcaccaaagctaatcccaatttctctctcaccattcgtcgcggccaagtcattctcgctccctccgatcccaccaatgagtaccagcattggtataaggatgagaagtacagcacgagggtgaaggatgaagaggggtgccctgctttctctttgatcaacaaggccactggtgaggccttgaagcactccatcggtgctactcatccagttcggctgataccttacaagccagactatcttgatgagtctattctttggactgaaagccgtgacttaggagatggccacagagctataaggatggtcaacaatgttcatcttaatgtggatgcttttcatggcgataagaattctggaggtgtgcgtgatggcactacaatagtcctctgggactggaacaaaggtgataaccaacggtggaagatcttaccttactgagtaaaattgacgggatttgtgagtggctttgaagatgcattaagttgagaggactattggcccttctatttgagtagtttggtgttgtctagagtatgaatggtgtgtattgcatttactggtaccaagcaatcggcttttttcaatagaataagtgtgtttatctaatatttattgcatacatgtggcactggttaatgtgctgattgccatatatatattggtatacagttcatgtatcttcttactagtatatcttaatgtgattcagtgtgaac

SEQ ID NO: 21328 - protein, 328 aa, Glycine max
PFLFPQLNSYSKTQSQTMSFPFNHSHATHTHHRRDDDDDERPTVYPPPGNSFSNPPPPFYGVPQPPPPQPETHVFHSAHVTPGHVSHDFNNYSAPPPPPPSHHHHDRHHDSFTHAYPPAPAAADYPAHGGSSTTVHHVAHESHHHTPHSAFSSHNNAPPTTVHHVSHQVNTGGLSTKPTVRVFTKANPNFSLTIRRGQVILAPSDPTNEYQHWYKDEKYSTRVKDEEGCPAFSLINKATGEALKHSIGATHPVRLIPYKPDYLDESILWTESRDLGDGHRAIRMVNNVHLNVDAFHGDKNSGGVRDGTTIVLWDWNKGDNQRWKILPY

SEQ ID NO: 21329 - protein, 311 aa, Glycine max
MSFPFNHSHATHTHHRRDDDDDERPTVYPPPGNSFSNPPPPFYGVPQPPPPQPETHVFHSAHVTPGHVSHDFNNYSAPPPPPPSHHHHDRHHDSFTHAYPPAPAAADYPAHGGSSTTVHHVAHESHHHTPHSAFSSHNNAPPTTVHHVSHQVNTGGLSTKPTVRVFTKANPNFSLTIRRGQVILAPSDPTNEYQHWYKDEKYSTRVKDEEGCPAFSLINKATGEALKHSIGATHPVRLIPYKPDYLDESILWTESRDLGDGHRAIRMVNNVHLNVDAFHGDKNSGGVRDGTTIVLWDWNKGDNQRWKILPY

SEQ ID NO: 21330 - DNA, 1184 bp, Glycine max
agtgcagaaggaatcaaaatttgaattcagatacttaaaatttgaagaactgctatgaaagaacatcccaccatttagatttttgagagtatttatttgggtgggtcccgtgagatgtatgtgcaattgtccctgttttgataacagaaaaaaaggggaaaggggtaagaatatgtaattaggatacattctgcaagaaatttttttcttaaaatgtcatgaacattagtgttttggatttcatgaaaatttgttgcatcatttataaattaggactaaatgtgacataagaattgcaacaaaagatagatagacatttcttgattgcttttatattaacattgtttgacaattgacctaggtatggagaatctggcctttgggacacccaataaatcaatttatgaatgcattcaccgaccaccgtgactctgatcttctcattgtcagccatttctcactcttactgggatgtgcgcttcctatttggatgtctactgggtacaatgatcgacctcttgctccttttgcgggaatattgagtctaggaattggagacacaatggcatcaatggttggacacaagtatggtgttctgaggtggagtaaaacaggcaagaaaactgttgaaggtactgcagctggtataacttctgtattggctgcttgttctttactccttccactcttagcatcgactggatacattctcactcagcattggttctctcttcttctagctgtgactgtaagtggtttgttggaggcttacacaacacaacttgacaatgcatttataccactttttttctatagtcttctctgtttgtagacacagcttagttaatcttggacgagcgacgaggctctgcaaatatatgttgtctctgggcacattgtttatgcagaggtcagataactattaaccaatgcaattgtactttaccagtttagggttgtggtatacatagtagatagtagttaggattgtatctatacagaaatgatagatatacgagtgttcatttaaagggtttatacccaacacgcataacacaatgtatgcagagtgacagtttcccatttttgttggaacctatgtgaggccatgacaagaggagagttgttgaacatctagtggacaatggtaaagaaattgttaatatctcatttttcattcgtag

SEQ ID NO: 21331 - protein, 142 aa, Glycine max
MNAFTDHRDSDLLIVSHFSLLLGCALPIWMSTGYNDRPLAPFAGILSLGIGDTMASMVGHKYGVLRWSKTGKKTVEGTAAGITSVLAACSLLLPLLASTGYILTQHWFSLLLAVTVSGLLEAYTTQLDNAFIPLFFYSLLCL

SEQ ID NO: 21332 - protein, 113 aa, Glycine max
MSTGYNDRPLAPFAGILSLGIGDTMASMVGHKYGVLRWSKTGKKTVEGTAAGITSVLAACSLLLPLLASTGYILTQHWFSLLLAVTVSGLLEAYTTQLDNAFIPLFFYSLLCL

SEQ ID NO: 21333 - protein, 89 aa, Glycine max
MASMVGHKYGVLRWSKTGKKTVEGTAAGITSVLAACSLLLPLLASTGYILTQHWFSLLLAVTVSGLLEAYTTQLDNAFIPLFFYSLLCL

SEQ ID NO: 21334 - DNA, 1168 bp, Glycine max
agtttaaggagagagttcatcgttcagcaaatgctctgcgaggatattttcagcctgaacgccaacaccgtcgccgccggcgaagatttctccgtcgacgacctatttgacttctctaacggctctcttcacaacgaacaacaacaagaatacgacgaagggaaacaaagtttatcggcttcagaggaccgcggagaagacgattgcaactccaattccaccggcgtttcctatgattcacttttctccaccgaattagccgttccggccggtgatttggaggacctagaatgggtttcacactttgtggacgattcactcccggagctgtcacttctatacccggttcgttcggaggaagcaaaccggtttgttgaaccggaaccctcagcgaagaaaacgccttgttttccgtgggaaatgaaaataacgaccaaggcgagaaccgtacggaataggaagcccagcaacagtcgcatgtggtcgttgggtagcccgttgctctcgctgccgtcttcgccgtcttcgccgtcgtcgtgttcttcttcggtgagggagccgccggctaagaagcagaagaagcaagcccaggcccagcccgttggggcccagattcagcggcggtgcagtcactgccatgtgcagaagacgccgcagtggaggaccggcccactgggcgcgaagaccctctgcaacgcgtgcggggttcggtacaagtcgggtcggttattttcggagtatagaccggcgtgtagccccaccttctgcagcgatattcactccaatagtcaccgtaaagtgttagagattcggaagaggaaagaggtggctcaaccggataccggcttggcccaggcccagactcaaatggttcccacctgctgatatcttacttagattagggaaaatttgcagtttaggtttagggtatacaaacccggtttgaaccggttcggtttttgtatgatatttagtgggttttttagttttagttagtgctaggcagtagtcaccagtcaggtaaccaaccataatattaggaattagtagtaattaggcattgattgtttgtaaggttgtatcgtatcccattttcctagcgttgttgattttatttaatgtaatacaaatagtttaagttaactggaggaagagcggtttaattatg

SEQ ID NO: 21335 - protein, 294 aa, Glycine max
SLRREFIVQQMLCEDIFSLNANTVAAGEDFSVDDLFDFSNGSLHNEQQQEYDEGKQSLSASEDRGEDDCNSNSTGVSYDSLFSTELAVPAGDLEDLEWVSHFVDDSLPELSLLYPVRSEEANRFVEPEPSAKKTPCFPWEMKITTKARTVRNRKPSNSRMWSLGSPLLSLPSSPSSPSSCSSSVREPPAKKQKKQAQAQPVGAQIQRRCSHCHVQKTPQWRTGPLGAKTLCNACGVRYKSGRLFSEYRPACSPTFCSDIHSNSHRKVLEIRKRKEVAQPDTGLAQAQTQMVPTC

SEQ ID NO: 21336 - protein, 284 aa, Glycine max
MLCEDIFSLNANTVAAGEDFSVDDLFDFSNGSLHNEQQQEYDEGKQSLSASEDRGEDDCNSNSTGVSYDSLFSTELAVPAGDLEDLEWVSHFVDDSLPELSLLYPVRSEEANRFVEPEPSAKKTPCFPWEMKITTKARTVRNRKPSNSRMWSLGSPLLSLPSSPSSPSSCSSSVREPPAKKQKKQAQAQPVGAQIQRRCSHCHVQKTPQWRTGPLGAKTLCNACGVRYKSGRLFSEYRPACSPTFCSDIHSNSHRKVLEIRKRKEVAQPDTGLAQAQTQMVPTC

SEQ ID NO: 21337 - protein, 154 aa, Glycine max
MKITTKARTVRNRKPSNSRMWSLGSPLLSLPSSPSSPSSCSSSVREPPAKKQKKQAQAQPVGAQIQRRCSHCHVQKTPQWRTGPLGAKTLCNACGVRYKSGRLFSEYRPACSPTFCSDIHSNSHRKVLEIRKRKEVAQPDTGLAQAQTQMVPTC

SEQ ID NO: 21338 - DNA, 1184 bp, Glycine max
agagtaattttgcatcgtcgtcacacatggagatctccggcaccgttctccgtcaggtcagctacgtctccggctatgggacccacacgcggtcccgcggcctggctcctcgttttggggtgaggatggggatgggttctggtttctgtgacgaggggcatttgcggtattaccaggacaccaaaaaggttctcaccccaaagaagaagttgaagctgctcaagggtttctccaaattagggcttgcatcggatcccgagaaactcgccatgttctatgatcttcaacaaaacctcacctcggatgctggagatgtattactgagagagttagaagcagcaagagcaaaggagaaggaagtgaagaagaaaaggaaacaagagaagaaggccaaactcaaagctgccaagatgaattgtgaatcttcttcatcttcatcgtccgaatcaagtgacagcgattgtggttgtgatcaagtggttgacatgaacaccttcagagctggtgttggtgttggtgttggtgttggtgttggtgttgttgcccctgcacctgtcgaggaatccccactgcccaagaccgcccccattgttgaggatgcgaatgcgcattgcgttgccatggaactgtgttctaagaatgatatatatgttagcagtgctagtaatggttttaagaacgagagtgctgtagttacctctgctcctcagaagaggattgaggtatgcatggggaacaagtgcaaaagatcaggggctgctgcattgatgcaagagtttgagaaagtggtgggtgttgaaggtgtagctgttgttgcatgcaagtgcatgggcaagtgcaaaactgctcctaatgttaaagttcagaattctgttgatcataatagcctggctcagggacttgatgattctgttaagattcctgctaaccctctatgcattggggttggcttggaggatgtggatgccatcgtggctagatatttttgggagagtcacacagatataggcatggcaggtgcaggtgcagctacagctacttgatgttgtgggaatggctagtgtgttatttgtaattatatatatacgtagccaggatgccgaggaaacattattgacaatggttttttttagttgttcatattgtataatataaattagttatgaagtttcttttccttgttt

SEQ ID NO: 21339 - protein, 346 aa, Glycine max
SNFASSSHMEISGTVLRQVSYVSGYGTHTRSRGLAPRFGVRMGMGSGFCDEGHLRYYQDTKKVLTPKKKLKLLKGFSKLGLASDPEKLAMFYDLQQNLTSDAGDVLLRELEAARAKEKEVKKKRKQEKKAKLKAAKMNCESSSSSSSESSDSDCGCDQVVDMNTFRAGVGVGVGVGVGVVAPAPVEESPLPKTAPIVEDANAHCVAMELCSKNDIYVSSASNGFKNESAVVTSAPQKRIEVCMGNKCKRSGAAALMQEFEKVVGVEGVAVVACKCMGKCKTAPNVKVQNSVDHNSLAQGLDDSVKIPANPLCIGVGLEDVDAIVARYFWESHTDIGMAGAGAATAT

SEQ ID NO: 21340 - protein, 338 aa, Glycine max
MEISGTVLRQVSYVSGYGTHTRSRGLAPRFGVRMGMGSGFCDEGHLRYYQDTKKVLTPKKKLKLLKGFSKLGLASDPEKLAMFYDLQQNLTSDAGDVLLRELEAARAKEKEVKKKRKQEKKAKLKAAKMNCESSSSSSSESSDSDCGCDQVVDMNTFRAGVGVGVGVGVGVVAPAPVEESPLPKTAPIVEDANAHCVAMELCSKNDIYVSSASNGFKNESAVVTSAPQKRIEVCMGNKCKRSGAAALMQEFEKVVGVEGVAVVACKCMGKCKTAPNVKVQNSVDHNSLAQGLDDSVKIPANPLCIGVGLEDVDAIVARYFWESHTDIGMAGAGAATAT

SEQ ID NO: 21341 - protein, 305 aa, Glycine max
MGMGSGFCDEGHLRYYQDTKKVLTPKKKLKLLKGFSKLGLASDPEKLAMFYDLQQNLTSDAGDVLLRELEAARAKEKEVKKKRKQEKKAKLKAAKMNCESSSSSSSESSDSDCGCDQVVDMNTFRAGVGVGVGVGVGVVAPAPVEESPLPKTAPIVEDANAHCVAMELCSKNDIYVSSASNGFKNESAVVTSAPQKRIEVCMGNKCKRSGAAALMQEFEKVVGVEGVAVVACKCMGKCKTAPNVKVQNSVDHNSLAQGLDDSVKIPANPLCIGVGLEDVDAIVARYFWESHTDIGMAGAGAATAT

SEQ ID NO: 21342 - DNA, 1148 bp, Glycine max
acttgttccccgaagcttctcgtcccctcccctcccctcccctcctctcgcaccgccgggccggagggaggcgcctcgccgtctcctcgccgccgctcgtcgttggtggttcctggcgcgtgagtgacgcccagccggcatggcggccaacgtgggggagtccacgagcgggagcagcagcgtggccggcgacggcgggggcagcttcgagtgcaacatatgcttcgagctgccgcaggagcccatcgtcacgctctgcggccacctcttctgctggccctgcctctacaagtggctgcacatccactcgcactcccccgagtgccccgtctgcaaggccgtcgtcgaggaggacaagctcgtcccgctctatggccgcggcaaggaccgcgtcgaccccaggtccaagggcgtgccgtccggggccgagatccccaaccggccgaccgggcagcggcctgccaccgccccgcaggccgaccccaacaaccacttccccaacgccaaccctaacccctggttcatgggtggagggggcgtccctttggccaacgcgcggtgggggaactacaccttctcggccgcgtttggcggcctgttcccgctgctgagcttccaggtacatggattcccggacgcgaccgcgtacgggcagcctgccgggtttccctatgggtacggacatggacatggccacggccacgggcatgctttccatggtgggaacgcccacgccgccgccccccggcacgcgccgccagggcagcagcagcagcaggcggacgtgtacctcaaggcgctgctcatcctggtcggcttcctcgtgatcgcaagcctcatcacattctaggtttgtcggctcccactattgtcatttgtcaccgtcataataagagaaacgattgtcgtgatacttgtcagatgttgtgtgcattaccttggccccccatacaaagccctggtctagatctgagtggtgcgttttgagcgaaagcgttcatagaactgctgtatatatgtgctatttagacgcggtcctgtggggggcgcctgtgtaccgtagtggtttcgcgctgattcgcgagtgatttggaaacctctcttcggggtggatgtaccagaccaattatatatcatgtgtaattttg

SEQ ID NO: 21343 - protein, 236 aa, Glycine max
MAANVGESTSGSSSVAGDGGGSFECNICFELPQEPIVTLCGHLFCWPCLYKWLHIHSHSPECPVCKAVVEEDKLVPLYGRGKDRVDPRSKGVPSGAEIPNRPTGQRPATAPQADPNNHFPNANPNPWFMGGGGVPLANARWGNYTFSAAFGGLFPLLSFQVHGFPDATAYGQPAGFPYGYGHGHGHGHGHAFHGGNAHAAAPRHAPPGQQQQQADVYLKALLILVGFLVIASLITF

SEQ ID NO: 21344 - protein, 202 aa, Glycine max
LFPEASRPLPSPPLLSHRRAGGRRLAVSSPPLVVGGSWRVSDAQPAWRPTWGSPRAGAAAWPATAGAASSATYASSCRRSPSSRSAATSSAGPASTSGCTSTRTPPSAPSARPSSRRTSSSRSMAAARTASTPGPRACRPGPRSPTGRPGSGLPPPRRPTPTTTSPTPTLTPGSWVEGASLWPTRGGGTTPSRPRLAACSRC

SEQ ID NO: 21345 - DNA, 1111 bp, Glycine max
ataagaagataattggaagattgaagaaggagtgattgtaatctggaaggatgaggagtactattgttttacgattgggaagacgtgcgcgtattccattccaacgagcattagcaacgcagagtaacaataataacactctggtgtttatccctctccctcgctgcctcagcgcaacgcggtcgtttcactttcagcgcaattcaccgtttggattctccagcgggcatgggcaacgcaggagcatgttcatccaaacgcagcccacgccaaatccctcgtctctcatgttttatcccggcaagcccgtcatggaagttggaagctccgacttcccaaaccctcgttctgcaatgaactctcccctcgccaaatcgctcttcgcaatcgacggcgttactcgcgttttctttggatctgatttcgttaccgttacgaaatcggaagaggctgcgtgggaattcctcaagcctgaagtcttcgccgccattatggatttctactcctccgctcagcctctctttttagattctcaagccgccgcggccatggatacagctattcaccaagatgattctgaaacagttgcaatgatcaaggaattgttagagactcgaattcgacctgcagtgcaagatgatggcggggacattgaatatagaggttttgacctagatactggaatagtaaaacttagaatgcaaggggcatgcagtggctgcccaagttcatcagtgactctgaaatcaggcattgaaaatatgctgatgcattatgttcctgaggtcaaaggtgtggaacaagaattggatgctgaggatgatggagcagcattaagtggagaaattaaatagttgaacttttttttgttttttctcaaaattgctacttgcatttagtctcttcatgcatgcattttcgcactcaacagagacttagaagtacaacagcagtacatgatggaaacaaaaaaaggtgtgagtctacacaaaaaatatattgaataagtcgtgagttggatacattatagtatggcatgaaatcatcgttccatgctagttggatcttcctgacatagatgaaagtaatttatgacacgatgccattacat

SEQ ID NO: 21346 - protein, 267 aa, Glycine max
MRSTIVLRLGRRARIPFQRALATQSNNNNTLVFIPLPRCLSATRSFHFQRNSPFGFSSGHGQRRSMFIQTQPTPNPSSLMFYPGKPVMEVGSSDFPNPRSAMNSPLAKSLFAIDGVTRVFFGSDFVTVTKSEEAAWEFLKPEVFAAIMDFYSSAQPLFLDSQAAAAMDTAIHQDDSETVAMIKELLETRIRPAVQDDGGDIEYRGFDLDTGIVKLRMQGACSGCPSSSVTLKSGIENMLMHYVPEVKGVEQELDAEDDGAALSGEIK

SEQ ID NO: 21347 - protein, 202 aa, Glycine max
MFIQTQPTPNPSSLMFYPGKPVMEVGSSDFPNPRSAMNSPLAKSLFAIDGVTRVFFGSDFVTVTKSEEAAWEFLKPEVFAAIMDFYSSAQPLFLDSQAAAAMDTAIHQDDSETVAMIKELLETRIRPAVQDDGGDIEYRGFDLDTGIVKLRMQGACSGCPSSSVTLKSGIENMLMHYVPEVKGVEQELDAEDDGAALSGEIK

SEQ ID NO: 21348 - protein, 188 aa, Glycine max
MFYPGKPVMEVGSSDFPNPRSAMNSPLAKSLFAIDGVTRVFFGSDFVTVTKSEEAAWEFLKPEVFAAIMDFYSSAQPLFLDSQAAAAMDTAIHQDDSETVAMIKELLETRIRPAVQDDGGDIEYRGFDLDTGIVKLRMQGACSGCPSSSVTLKSGIENMLMHYVPEVKGVEQELDAEDDGAALSGEIK

SEQ ID NO: 21349 - DNA, 1636 bp, Glycine max
aacaacaacacttacttgtagttgcgaaatcatccaaacacattccatctattaagattttagagagtgaaaatggattggcaaagcatgatgggcaacctggacccattccaaagaacaatcttaatcctcgtcccactaacactactcctgctgctgttactatctcgtacccgtccaagaccgccctatccaccaggccctaagggcttcccaatcataggaaacatgtttatgatggaccagctaacccaccgcggtctcgccaacctggccaaacactacggcggaatcttccaccttcgcatgggcttcctccacatggtcgccatctccgaccccgatgccgcgcgacaggttctccaagtccaagacaacatcttttccaaccgccccgccaccatcgccatcagctacctcacctacgaccgcgccgacatggccttcgcccactacggccccttctggcgccagatgaggaaactctgcgtcatgaagctcttcagccgcaagcgcgccgagtcctggcagtccgttcgcgacgaggtcgactccgccgtccgcgccgtcgccaacagcgtcggaaaacccgtcaacatcggagaattagtgtttaacctcaccaagaacatcatctaccgcgccgcgttcgggtcgagttcgcaggaaggtcaagacgatttcattaaaatattgcaggagttctctaagctctttggcgcgtttaatattgcggattttataccctacctcgggcgcgtagatccacaaggtttgaactccagactcgctagggcacgtggcgcgctcgatagcttcattgataagatcatcgacgagcacgtgcagaagaagaataattatcagagcagtgaaattggtgatggtgaaacggacatggtggatgagttgctggcgttctacggcgaggaggcgaagttgaacaatgaatcggacgataatttgcagaactctatcagactcactaaggataacatcaaggctatcattatggacgtgatgttcggaggctcggaaacggtggcgtcagcaatcgagtgggtcatgtcggagctgatgagaagcccagaagaccaaaagcgggtccaacaagagctggcggatgtagtgggcctggaccgtcgggtcgaagagtccgatttcgagaaactcacttatctcaaatgtgccctcaaagagaccctccgcctccaccctccgataccgctcctcctccacgagacggcggaggacgccaccgtcggcggctacttcgtccccaggaaggcgcgtgttatgatcaacgcgtgggccattgggagggacaagaattcctgggaggaacccgaaacttttaagcccgcccggttccttaaaccgggcgtgcccgatttcaaggggagcaacttcgagttcattccattcgggtcgggtcgaagatcctgccccggaatggtgttggggctctacgcgcttgaattggcggtggctcatcttcttcactgcttcacgtgggaattgccagatggaatgaaaccaagtgagatggacatgggtgacgtgttcggactcaccgctccaaggtccacgcgactcattgctgtaccaaccaagcgcgtggtgtgccctctctttt

SEQ ID NO: 21350 - protein, 521 aa, Glycine max
MDWQSMMGNLDPFQRTILILVPLTLLLLLLLSRTRPRPPYPPGPKGFPIIGNMFMMDQLTHRGLANLAKHYGGIFHLRMGFLHMVAISDPDAARQVLQVQDNIFSNRPATIAISYLTYDRADMAFAHYGPFWRQMRKLCVMKLFSRKRAESWQSVRDEVDSAVRAVANSVGKPVNIGELVFNLTKNIIYRAAFGSSSQEGQDDFIKILQEFSKLFGAFNIADFIPYLGRVDPQGLNSRLARARGALDSFIDKIIDEHVQKKNNYQSSEIGDGETDMVDELLAFYGEEAKLNNESDDNLQNSIRLTKDNIKAIIMDVMFGGSETVASAIEWVMSELMRSPEDQKRVQQELADVVGLDRRVEESDFEKLTYLKCALKETLRLHPPIPLLLHETAEDATVGGYFVPRKARVMINAWAIGRDKNSWEEPETFKPARFLKPGVPDFKGSNFEFIPFGSGRRSCPGMVLGLYALELAVAHLLHCFTWELPDGMKPSEMDMGDVFGLTAPRSTRLIAVPTKRVVCPLF

SEQ ID NO: 21351 - protein, 516 aa, Glycine max
MMGNLDPFQRTILILVPLTLLLLLLLSRTRPRPPYPPGPKGFPIIGNMFMMDQLTHRGLANLAKHYGGIFHLRMGFLHMVAISDPDAARQVLQVQDNIFSNRPATIAISYLTYDRADMAFAHYGPFWRQMRKLCVMKLFSRKRAESWQSVRDEVDSAVRAVANSVGKPVNIGELVFNLTKNIIYRAAFGSSSQEGQDDFIKILQEFSKLFGAFNIADFIPYLGRVDPQGLNSRLARARGALDSFIDKIIDEHVQKKNNYQSSEIGDGETDMVDELLAFYGEEAKLNNESDDNLQNSIRLTKDNIKAIIMDVMFGGSETVASAIEWVMSELMRSPEDQKRVQQELADVVGLDRRVEESDFEKLTYLKCALKETLRLHPPIPLLLHETAEDATVGGYFVPRKARVMINAWAIGRDKNSWEEPETFKPARFLKPGVPDFKGSNFEFIPFGSGRRSCPGMVLGLYALELAVAHLLHCFTWELPDGMKPSEMDMGDVFGLTAPRSTRLIAVPTKRVVCPLF

SEQ ID NO: 21352 - protein, 515 aa, Glycine max
MGNLDPFQRTILILVPLTLLLLLLLSRTRPRPPYPPGPKGFPIIGNMFMMDQLTHRGLANLAKHYGGIFHLRMGFLHMVAISDPDAARQVLQVQDNIFSNRPATIAISYLTYDRADMAFAHYGPFWRQMRKLCVMKLFSRKRAESWQSVRDEVDSAVRAVANSVGKPVNIGELVFNLTKNIIYRAAFGSSSQEGQDDFIKILQEFSKLFGAFNIADFIPYLGRVDPQGLNSRLARARGALDSFIDKIIDEHVQKKNNYQSSEIGDGETDMVDELLAFYGEEAKLNNESDDNLQNSIRLTKDNIKAIIMDVMFGGSETVASAIEWVMSELMRSPEDQKRVQQELADVVGLDRRVEESDFEKLTYLKCALKETLRLHPPIPLLLHETAEDATVGGYFVPRKARVMINAWAIGRDKNSWEEPETFKPARFLKPGVPDFKGSNFEFIPFGSGRRSCPGMVLGLYALELAVAHLLHCFTWELPDGMKPSEMDMGDVFGLTAPRSTRLIAVPTKRVVCPLF

SEQ ID NO: 21353 - DNA, 1575 bp, Glycine max
attaaagcattggttggtctaaagaaatcagaaaagccagagaaggatggaaatgttggcaagtttcaccatcagagaaggcatgatgtcgaatttaataatggtaaacttccaaacgaattggataatgatgctactacacctgttgaagatgttaatggccatgcaaaccttgatgcccactattcatcttcttcttcacaacaagcacatgatgctgcacataatcaacaaatgagggaggaatgggctgcaatacacattcaaacagcatttagaggatttctggccagaagagcactacgggctttgaaaggtgtggtaaggcttcaggcccttgtaagaggccatgcagtgagaaaacaagccgcaataacactccgttgtatgcaagctttagtgagggttcaagctcgtgttcgagctaggcgtgtttgcatggcattggaaactcaagcatcacaacagaagcatcagcaaaaccttgcaaatgaagctcgagttcgagaaatagaagaaggatggtgtgatagtgtaggatctgttgaagaaattcaggctaaattattgaagagacaggaggctgcagcaaaacgtgagagagccatggcatatgctctatctcatcagtggcaggcaggatcaagacagcagcctgtttcctctggtggatttgaaccggataaaaacagctggggttggaattggttggaaaggtggatggctgtccgtccttgggagaaccgctttgttgacataaatatgaaggatggagtaacagtacatgaagatggaactaaggatgataaaaatgaaaccccacctcagttgagctctgcttacaagaaaccattctcatcaaacactcatccaaacctgacaagtcaaggaactggtcccactatttctgatggctgtgattcttcatctagtatgcctgcaggtttgccagaatcatcaaacacacatcctgttaagccgacttctaaggcaaatgctgaaaatactgttggagaatttaactcaaaacctagaattgggtcaagatctcttagtaatccaaaggagagaacatcacaggcagataagcaggccaaaaaacgattatctctgcctaacaatagggctggtgctggatctcaaatagtcaaacaccctgttagcattactaatgtgaaagggacgctaagcacgcaaaagtctactagggataaacctaagctcaatggaagaagggaggagaatacaaagtagctgaatggaagaaaggatgcgaacataaacacaaggatatgtattttcgagaatctcaaataagggaaatcactctcttctctgttgatatatgggcatttgtcgttctgtgcatataatgtgaagcggtgagggctttgtattgtacatagtccatgaagagttgaagacgatgaatgtggttttacagttttgagattggcttgggttgtgataggaataagatttgcctggttgatacaagtttgcttttatttatgcaatgcaatgcttgttgtggtcagaatgtcagttatgtgatagcatgatgcatttatgtac

SEQ ID NO: 21354 - protein, 417 aa, Glycine max
IKALVGLKKSEKPEKDGNVGKFHHQRRHDVEFNNGKLPNELDNDATTPVEDVNGHANLDAHYSSSSSQQAHDAAHNQQMREEWAAIHIQTAFRGFLARRALRALKGVVRLQALVRGHAVRKQAAITLRCMQALVRVQARVRARRVCMALETQASQQKHQQNLANEARVREIEEGWCDSVGSVEEIQAKLLKRQEAAAKRERAMAYALSHQWQAGSRQQPVSSGGFEPDKNSWGWNWLERWMAVRPWENRFVDINMKDGVTVHEDGTKDDKNETPPQLSSAYKKPFSSNTHPNLTSQGTGPTISDGCDSSSSMPAGLPESSNTHPVKPTSKANAENTVGEFNSKPRIGSRSLSNPKERTSQADKQAKKRLSLPNNRAGAGSQIVKHPVSITNVKGTLSTQKSTRDKPKLNGRREENTK

SEQ ID NO: 21355 - protein, 339 aa, Glycine max
MREEWAAIHIQTAFRGFLARRALRALKGVVRLQALVRGHAVRKQAAITLRCMQALVRVQARVRARRVCMALETQASQQKHQQNLANEARVREIEEGWCDSVGSVEEIQAKLLKRQEAAAKRERAMAYALSHQWQAGSRQQPVSSGGFEPDKNSWGWNWLERWMAVRPWENRFVDINMKDGVTVHEDGTKDDKNETPPQLSSAYKKPFSSNTHPNLTSQGTGPTISDGCDSSSSMPAGLPESSNTHPVKPTSKANAENTVGEFNSKPRIGSRSLSNPKERTSQADKQAKKRLSLPNNRAGAGSQIVKHPVSITNVKGTLSTQKSTRDKPKLNGRREENTK

SEQ ID NO: 21356 - protein, 288 aa, Glycine max
MQALVRVQARVRARRVCMALETQASQQKHQQNLANEARVREIEEGWCDSVGSVEEIQAKLLKRQEAAAKRERAMAYALSHQWQAGSRQQPVSSGGFEPDKNSWGWNWLERWMAVRPWENRFVDINMKDGVTVHEDGTKDDKNETPPQLSSAYKKPFSSNTHPNLTSQGTGPTISDGCDSSSSMPAGLPESSNTHPVKPTSKANAENTVGEFNSKPRIGSRSLSNPKERTSQADKQAKKRLSLPNNRAGAGSQIVKHPVSITNVKGTLSTQKSTRDKPKLNGRREENTK

SEQ ID NO: 21357 - DNA, 1383 bp, Glycine max
gttgatgatgtcaatggtggaagattgatcttttatgattttggaatgatgggaagtatcagtcaaaatatccgagaaggtttacttgaagctttttatggaatttatgagaagaatccagataaggtccttcaatcaatgattcaaatgggtgttcttgtcccaactggagatatgactgctgttaaacgaacagcacagttcttcctcaacagttttgaagagcgtttggctgcacaaaggagagagagagagatggcaacagctgaacttggattcaaacaaccattaagcaaagaggaaaaagtaatgaagaagaaagaacgtctggctgctattggtgaggatttattagccattgcagcagaccagccctttcggtttcctgctacattcacatttgttgtgagggccttctcagtgttggatggcattggaaagggccttgatcctcgttttgatattactgagattgccaaaccttatgctctggagttgctaagattccgtgaggcaggagttgaagttatcctaaaggacttcagaaagagatgggacagacaatctcaagcattttacaatttatttagacaggctgatagggttgaaaagcttgctgaaatcatccaaagattggagcaaggcgatctaaagctccgagtccgaactctggaatctgagagggcattccagcgtattgccactgtccagaagacaataggaaatgcaatagcttctgggagcctaataaatcttgcaacaattctgtatcttaactcaattagggtgcctgccactatagcatatgttttctgtgcaatatttggttttcaagtgctctttggcattgtgaagatcaaaaagctagatgaacgggaaaggttgattacagggactgcataagcaactacttgatttaggatggacatgctgctcatgttaatgtcatggttacaagtcaaccttcggggcatcaaaatgactaggagctcagagtaagagctaacatcttggaatatatcagcatgtgctaaatctttatactggcaggcatgctggaggcttctgttctcatttacttccctaaaatgattgagctgaggtagccaattggcgagccacatttttgtcattaacacgatcccccatgcgttttcattgctaaattttattatcaaataacatgtattagtgttttattttatttttttacctcatccatattgtaaatttaataggcattggtgtagattgtagcgtttattgttgtaatcaccatatggtatggtgcagcttccaatatagtttgacagcgggaagctttgcttgtaactgacgtacataaatttatccaatgaaaatgcaaatataagtattttctat

SEQ ID NO: 21358 - protein, 300 aa, Glycine max
VDDVNGGRLIFYDFGMMGSISQNIREGLLEAFYGIYEKNPDKVLQSMIQMGVLVPTGDMTAVKRTAQFFLNSFEERLAAQRREREMATAELGFKQPLSKEEKVMKKKERLAAIGEDLLAIAADQPFRFPATFTFVVRAFSVLDGIGKGLDPRFDITEIAKPYALELLRFREAGVEVILKDFRKRWDRQSQAFYNLFRQADRVEKLAEIIQRLEQGDLKLRVRTLESERAFQRIATVQKTIGNAIASGSLINLATILYLNSIRVPATIAYVFCAIFGFQVLFGIVKIKKLDERERLITGTA

SEQ ID NO: 21359 - protein, 285 aa, Glycine max
MMGSISQNIREGLLEAFYGIYEKNPDKVLQSMIQMGVLVPTGDMTAVKRTAQFFLNSFEERLAAQRREREMATAELGFKQPLSKEEKVMKKKERLAAIGEDLLAIAADQPFRFPATFTFVVRAFSVLDGIGKGLDPRFDITEIAKPYALELLRFREAGVEVILKDFRKRWDRQSQAFYNLFRQADRVEKLAEIIQRLEQGDLKLRVRTLESERAFQRIATVQKTIGNAIASGSLINLATILYLNSIRVPATIAYVFCAIFGFQVLFGIVKIKKLDERERLITGTA

SEQ ID NO: 21360 - protein, 284 aa, Glycine max
MGSISQNIREGLLEAFYGIYEKNPDKVLQSMIQMGVLVPTGDMTAVKRTAQFFLNSFEERLAAQRREREMATAELGFKQPLSKEEKVMKKKERLAAIGEDLLAIAADQPFRFPATFTFVVRAFSVLDGIGKGLDPRFDITEIAKPYALELLRFREAGVEVILKDFRKRWDRQSQAFYNLFRQADRVEKLAEIIQRLEQGDLKLRVRTLESERAFQRIATVQKTIGNAIASGSLINLATILYLNSIRVPATIAYVFCAIFGFQVLFGIVKIKKLDERERLITGTA

SEQ ID NO: 21361 - DNA, 1562 bp, Glycine max
tatgccttctgatctttacaacttgaattcatcctatggttctgtggaagagcttaaatactgtatagaggaaatgcattctcaagatctgctggccttgggagatgttgtacttaaccatcgatgtgcacagaaacagagtccaaatggtgtttggaacatttttggtggcaagcttgcatggggacctgaagccattgtatgtgatgatccaaattttcaggggcgcgggaatccttccagtggtgatatcttccatgctgcacccaatgttgatcattctcaggactttgtaaggaaagatatcaaggagtggttgaactggctgcgcaatgatataggttttgatggatggcgtcttgactttgttagaggtttctctggtacatatgtaaaagaatatattgaagcatcaactcctgtatttgccattggagaatattgggacagcttgggctatgaacatggaagtttgtgttacaaccaagatgctcatcggcaacggataattaattggatcaatgcaactggtggtacttcatctgcatttgatatgacgacaaaggggatacttcattctgctctgcataatgaatattggagactgatagatcctcaagggaaaccaacaggagtgatgggatggtgggcttctcgtgctgttacattcctagagaaccatgataccgggtccacacaagcctgaagagtatcaccttgtataagatcatgctctgggtactgtgagagataaatttttggcgaacgaaaacttaaaaatccaccagtcttagtctttggtatcatatagatgtacaagggaaatattgcattgaacttagctacatttgaggttttggtttctactcctgtggttggttctcgttgatttggttcatagcaccataaatttggcctatgtaattgatcagggccactggccattcccacgggataagctcatgcagggatatgcatatattttgactcatcctggaactcctacaatattttatgaccatttctatgattttggcatccacgatgtattaaccgagttgattgacgctcggagacgagctgggatccattgtcggagctctatcaagatataccatgcaaacaatgaaggttatgtagctcaggttggtgatgcgctggtaatgaagcttgggcagtttgattggaatccctccaaggaaaaccaattggaagggagctggcagaagtttgttgacaaaggaccagactaccaagtgtggttgagacaatagtttaataccaatctatagacattgctctattctgtaatggaaattgaaaatagcttcaataaagcacacatatcataggaaaaaaaaatttgtttgtaacatgtaacgaacaaacagataaggtatttcttatctgcttcgtatgagcttgagtcaaatgcctccataaaaaaacaataaatttcatctgcattttgagttacatttgtttaaatgtagccgtgtgtattaaaactatgttgctttgtgagagcccataaagaatgcacttgcaactttgtttcctct

SEQ ID NO: 21362 - protein, 234 aa, Glycine max
MPSDLYNLNSSYGSVEELKYCIEEMHSQDLLALGDVVLNHRCAQKQSPNGVWNIFGGKLAWGPEAIVCDDPNFQGRGNPSSGDIFHAAPNVDHSQDFVRKDIKEWLNWLRNDIGFDGWRLDFVRGFSGTYVKEYIEASTPVFAIGEYWDSLGYEHGSLCYNQDAHRQRIINWINATGGTSSAFDMTTKGILHSALHNEYWRLIDPQGKPTGVMGWWASRAVTFLENHDTGSTQA

SEQ ID NO: 21363 - protein, 210 aa, Glycine max
MHSQDLLALGDVVLNHRCAQKQSPNGVWNIFGGKLAWGPEAIVCDDPNFQGRGNPSSGDIFHAAPNVDHSQDFVRKDIKEWLNWLRNDIGFDGWRLDFVRGFSGTYVKEYIEASTPVFAIGEYWDSLGYEHGSLCYNQDAHRQRIINWINATGGTSSAFDMTTKGILHSALHNEYWRLIDPQGKPTGVMGWWASRAVTFLENHDTGSTQA

SEQ ID NO: 21364 - DNA, 1335 bp, Glycine max
acaattttctctttctctttctctccttcaaaatcgttgtcaatttcgcctctttctttctcaactcccttagattctctcaatcgggtcttcaaaaatgcggatgagctgcaatggatgtcgagttctcagaaaaggttgcagtgaaaattgcagcatcagaccctgtttacaatggatcaaaagcccagaatctcaagccaatgctactgtgtttcttgccaagttctacggccgtgctggtctaatgaacctggttaacgcaggccccgaacatcttcgtccaggtttgtgccattttcttgcactttcttttaagtcccacatctgtcagatatgagcttatgtaaacatggaagatgatactaagtggcagtattttgttttcactttgcagcgatctttcgttcgttgttgtacgaggcatgcggtcggatattgaacccgatttacgggtctgtcgggttgttatggtccgggagctggcagctatgtcaagccgccgtggaaaacgtcttgaaaggcgcaccgattacgccgatcacgtccgaagtcgcggctagcgggcggggcccaccgctcaaggcttacgacatacgccacgtgtccaaagacgagaactccgccgccgcgtccaacgaaactcagcaccaacgagtcaagactcggtctcgagtgaagcgacccctcgccaacaacaacgccaagcccaaatccaccaccaacgaaaacaacaacaataagggaaccgaattgggttcagctgaaccgagtttggtggcatgcgagtggaccgaagaggtgttgaaccggtctggaagtcacgattcgacgctgagccaccagtcggaggcggcgaatgcggtggagagcgagagcatgttgtcggcggagacgccggagacttcgattctcttccgagaagaaccggaaacgaacccgaagcgtgtgagcgatgatgttggtttagagcttacgcttgggttcgaaccggtttcacgtgcgcggcccgtggttccggtgaagaaaagaaggattgagttgaaaaattttagtggctcggctgagagtggctcgtgcaagatggagctggggcttgaatgttcggcttgaggaactcgtgcctcggctcagttttgactccatcatcggctttctgtgtttgatacttattacaagagatcagaaccgttttgttgttttttaattacttttttttttcttttttggtaatttgggttattgttaacccttcctttatttttttcgtcggttgtgaatgcggtgctgtacaaactcaaacatgaatggtaagtagatgaagaggtgcatttc

SEQ ID NO: 21365 - protein, 80 aa, Glycine max
MRMSCNGCRVLRKGCSENCSIRPCLQWIKSPESQANATVFLAKFYGRAGLMNLVNAGPEHLRPGLCHFLALSFKSHICQI

SEQ ID NO: 21366 - protein, 78 aa, Glycine max
MSCNGCRVLRKGCSENCSIRPCLQWIKSPESQANATVFLAKFYGRAGLMNLVNAGPEHLRPGLCHFLALSFKSHICQI

SEQ ID NO: 21367 - protein, 77 aa, Glycine max
MLSAETPETSILFREEPETNPKRVSDDVGLELTLGFEPVSRARPVVPVKKRRIELKNFSGSAESGSCKMELGLECSA

SEQ ID NO: 21368 - DNA, 432 bp, Glycine max
gagaggttgaaaaaatcaatgcgaggtcgacaggaaatcctcgcctccctcgcatgatgttcctgagtttcaacatgattagcggcggcaacacactccaaaggtttgaccctgtcgcttgcgtttcttctgtccctcttctcctcgcacccaccacacgacctactttccattttccttccccttttctctccaaacccaaacccacttacctcttcacttctttttcttcttcttcttcttcttcttcttcctttttctcttccaccacgccaccgcgatccaccatgctgcaccacgaccctcttgtctctgacgtctacgccaccgccatttccggcgtcgttgccctgtccttcctcagattgttccaagaaactgcaaaacgagacctcttcgaccagaaattaaataggaaacttgtacatataa

SEQ ID NO: 21369 - protein, 143 aa, Glycine max
EVEKINARSTGNPRLPRMMFLSFNMISGGNTLQRFDPVACVSSVPLLLAPTTRPTFHFPSPFLSKPKPTYLFTSFSSSSSSSSSFFSSTTPPRSTMLHHDPLVSDVYATAISGVVALSFLRLFQETAKRDLFDQKLNRKLVHI

SEQ ID NO: 21370 - protein, 126 aa, Glycine max
MMFLSFNMISGGNTLQRFDPVACVSSVPLLLAPTTRPTFHFPSPFLSKPKPTYLFTSFSSSSSSSSSFFSSTTPPRSTMLHHDPLVSDVYATAISGVVALSFLRLFQETAKRDLFDQKLNRKLVHI

SEQ ID NO: 21371 - protein, 125 aa, Glycine max
MFLSFNMISGGNTLQRFDPVACVSSVPLLLAPTTRPTFHFPSPFLSKPKPTYLFTSFSSSSSSSSSFFSSTTPPRSTMLHHDPLVSDVYATAISGVVALSFLRLFQETAKRDLFDQKLNRKLVHI

SEQ ID NO: 21372 - DNA, 1625 bp, Glycine max
ttttctgttcacaggcatgagtttgggagtttttatccagctaatgatgatggattttataccatgattggagaaggagcaggtgctggatataatataaatgtcccctgggagaatgggcgatgtggtgatgcagattactttgcagtgtgggaccacatcttgcttcctgttgctaaagaatttaatccagatataattatagtttctgctggatttgatgcagctgttggtgaccctctgggaggatgccttgtcacaccatttggttattctgttctgttggaaaagttgatgaattttgctgaaggtaggattgtattgattctagaaggtggatataatcttgattccatctcaaaatcaatgcatgcctgcttggaagttttgctagcagaccagcctgttattggatctgcagaggcctatccatttgaatctacatggcgtgtgattcaagcggttcgccaggttttaagtcccttttggcctacacttgcacgtgaattaccgcacaagttaatctcaccaatggcaccacctccgtatactcttatctcgagctctgacactgaggctgaggatgataagggtgcactaagttcagaaaatcttgttgaacttcttgaggatgtcataaaaccactttctgaactgaaagttgatgctgataaagagactgatgtttctagtacttggcgatcggaattgtcaaatgtttatatatggtatgcctcatatggatcaaatatgtggaaagcaatattaaattgccacctagcaggtggacaggtggaaggcatgaagaaggactgttctggttcagtgaatagaactctgccaaaagcgatcctgtggaaaactttcccttgtcatatatttttcggttgtgattcatcacattcatggggtgtgggaggtgttgcatttcttaatcctgagaaaaactttcagcacaacacctacatgtgcctgtacaaaatttcgctagagcagttcaatgatattttgtttcaggaaaatgctttaagccttgatgcaggctctcctttatttgatataactaccgtgaatgctatctctaacaaggagttcaactctctggaggttgtcaagggtgcttggtatggcaatgttgtctacttaggaaaggagcaggatattccagtagttaccatgacgtgttcacttcttgatattggaaatttcaaatctgggaagctacccttacgtgcccctaataaagcatatgccaacaccttaataaaagggttggttgatggagaacagctttcagaggtggaagccatcgcttacatagaaggtgctgctaaatcattgtaatttgcataggcgtgccatttattttaggtgtaaaatcttctagaataacttactcgtacaaaaaaagattctacttgtagatattgggtaactaaacctcatagtattgctacgagattctgcatatttctcctagttttggatgtgccgtgcgcagctacactttcatttgctacaatgctggtgcagcgctgcatgtatattttgagtgctaacatttagttttaactagaatatttagggaaattgtctaaaaaaaaaaaaaaaaaaaaaaaaaaaat

SEQ ID NO: 21373 - protein, 447 aa, Glycine max
FSVHRHEFGSFYPANDDGFYTMIGEGAGAGYNINVPWENGRCGDADYFAVWDHILLPVAKEFNPDIIIVSAGFDAAVGDPLGGCLVTPFGYSVLLEKLMNFAEGRIVLILEGGYNLDSISKSMHACLEVLLADQPVIGSAEAYPFESTWRVIQAVRQVLSPFWPTLARELPHKLISPMAPPPYTLISSSDTEAEDDKGALSSENLVELLEDVIKPLSELKVDADKETDVSSTWRSELSNVYIWYASYGSNMWKAILNCHLAGGQVEGMKKDCSGSVNRTLPKAILWKTFPCHIFFGCDSSHSWGVGGVAFLNPEKNFQHNTYMCLYKISLEQFNDILFQENALSLDAGSPLFDITTVNAISNKEFNSLEVVKGAWYGNVVYLGKEQDIPVVTMTCSLLDIGNFKSGKLPLRAPNKAYANTLIKGLVDGEQLSEVEAIAYIEGAAKSL

SEQ ID NO: 21374 - protein, 426 aa, Glycine max
MIGEGAGAGYNINVPWENGRCGDADYFAVWDHILLPVAKEFNPDIIIVSAGFDAAVGDPLGGCLVTPFGYSVLLEKLMNFAEGRIVLILEGGYNLDSISKSMHACLEVLLADQPVIGSAEAYPFESTWRVIQAVRQVLSPFWPTLARELPHKLISPMAPPPYTLISSSDTEAEDDKGALSSENLVELLEDVIKPLSELKVDADKETDVSSTWRSELSNVYIWYASYGSNMWKAILNCHLAGGQVEGMKKDCSGSVNRTLPKAILWKTFPCHIFFGCDSSHSWGVGGVAFLNPEKNFQHNTYMCLYKISLEQFNDILFQENALSLDAGSPLFDITTVNAISNKEFNSLEVVKGAWYGNVVYLGKEQDIPVVTMTCSLLDIGNFKSGKLPLRAPNKAYANTLIKGLVDGEQLSEVEAIAYIEGAAKSL

SEQ ID NO: 21375 - protein, 349 aa, Glycine max
MNFAEGRIVLILEGGYNLDSISKSMHACLEVLLADQPVIGSAEAYPFESTWRVIQAVRQVLSPFWPTLARELPHKLISPMAPPPYTLISSSDTEAEDDKGALSSENLVELLEDVIKPLSELKVDADKETDVSSTWRSELSNVYIWYASYGSNMWKAILNCHLAGGQVEGMKKDCSGSVNRTLPKAILWKTFPCHIFFGCDSSHSWGVGGVAFLNPEKNFQHNTYMCLYKISLEQFNDILFQENALSLDAGSPLFDITTVNAISNKEFNSLEVVKGAWYGNVVYLGKEQDIPVVTMTCSLLDIGNFKSGKLPLRAPNKAYANTLIKGLVDGEQLSEVEAIAYIEGAAKSL

SEQ ID NO: 21376 - DNA, 1490 bp, Glycine max
ggatgcatttatacttacaccgaatcacgaggcgacaacatcgacatggagggtctcatcaacggcttcatcaacgttgctctcggagctgatggtggcgatcgggaagaacaacaacacgggagagacgaccgtagtagaagctcctgggctgaagtcgtctcccaggatcaacaagatcaccctcttcctcatcaccaacacaaggaacaatatcgtcctcagtacgaggagccccaatctcaaagttcctacaaaccccagaaggtggatgaaggtgaagatggatggcagactgttggtagaaagccttcaaggcatccacataaggttcaaaaggacaactggaacagctataaacgacctgctgatgagcaagaatactctaatgaggttgaagttggtgctgatgtggagccctcagaagatgaacttgctgatctgtcaagagcttgtgaaaaactctgggctcttgatttaaatcgtttggtacctggcttacactatgaaattgactgtggagaagggaaaaaggtataccaaaaggaagatatggcacaggggagcttgtttacttgggttagcgatgatgtattcagaaagcctacatttgcccgttttctttcacttttagataattacaatccacatcaaggatgtaaggaagtagtcacatctgaagagagacaagagcaagcttctttcatagaagaaatcagtagaacagcaccaattaagtatcttcacaagtatcttgcatccaagcaaattgtatcagggaattaccaagatttcaaaagaatgattaccagtctgtggtttgacctttatggccgtggtggcacttctggttcctcttctgcttttgaacatgtttttgttggagaaaccaaacaatgtggtgaagtttctggctttcataactggctgcagttttaccttgaagaagcaaaggggagagttgattatcaaggatatatttttccccgtcgacggggagaaactcctgactctgaagctcagcttctgactattcagtttgaatggaatggtgtcctaaaatctgtatccagcactttggttggagtgagccctgaatttgaaattgctttgtataccctgtgtttctatgttggtagggaggataaccacattcagcttggtccatatggggttaatatcaagtgctatcgattgggtgatcgaattggatctgttttccccattgcagattcttgaattttcagtttccagcattggtagtagttgttccctatgaaatcgtttgttatgcatacttgagaacttgtaactcatgggtgtaaaggcaacaataccaattagatcaagtagtacaaggtagcacaatatttactgaattacatacatttggtggttcttttgtcttgtatgaagacagaaattcttgtggaactagtttacttaatttcttcattaagtccttaatgatatgctagtatgttgttatt

SEQ ID NO: 21377 - protein, 412 aa, Glycine max
GCIYTYTESRGDNIDMEGLINGFINVALGADGGDREEQQHGRDDRSRSSWAEVVSQDQQDHPLPHHQHKEQYRPQYEEPQSQSSYKPQKVDEGEDGWQTVGRKPSRHPHKVQKDNWNSYKRPADEQEYSNEVEVGADVEPSEDELADLSRACEKLWALDLNRLVPGLHYEIDCGEGKKVYQKEDMAQGSLFTWVSDDVFRKPTFARFLSLLDNYNPHQGCKEVVTSEERQEQASFIEEISRTAPIKYLHKYLASKQIVSGNYQDFKRMITSLWFDLYGRGGTSGSSSAFEHVFVGETKQCGEVSGFHNWLQFYLEEAKGRVDYQGYIFPRRRGETPDSEAQLLTIQFEWNGVLKSVSSTLVGVSPEFEIALYTLCFYVGREDNHIQLGPYGVNIKCYRLGDRIGSVFPIADS

SEQ ID NO: 21378 - protein, 397 aa, Glycine max
MEGLINGFINVALGADGGDREEQQHGRDDRSRSSWAEVVSQDQQDHPLPHHQHKEQYRPQYEEPQSQSSYKPQKVDEGEDGWQTVGRKPSRHPHKVQKDNWNSYKRPADEQEYSNEVEVGADVEPSEDELADLSRACEKLWALDLNRLVPGLHYEIDCGEGKKVYQKEDMAQGSLFTWVSDDVFRKPTFARFLSLLDNYNPHQGCKEVVTSEERQEQASFIEEISRTAPIKYLHKYLASKQIVSGNYQDFKRMITSLWFDLYGRGGTSGSSSAFEHVFVGETKQCGEVSGFHNWLQFYLEEAKGRVDYQGYIFPRRRGETPDSEAQLLTIQFEWNGVLKSVSSTLVGVSPEFEIALYTLCFYVGREDNHIQLGPYGVNIKCYRLGDRIGSVFPIADS

SEQ ID NO: 21379 - protein, 228 aa, Glycine max
MAQGSLFTWVSDDVFRKPTFARFLSLLDNYNPHQGCKEVVTSEERQEQASFIEEISRTAPIKYLHKYLASKQIVSGNYQDFKRMITSLWFDLYGRGGTSGSSSAFEHVFVGETKQCGEVSGFHNWLQFYLEEAKGRVDYQGYIFPRRRGETPDSEAQLLTIQFEWNGVLKSVSSTLVGVSPEFEIALYTLCFYVGREDNHIQLGPYGVNIKCYRLGDRIGSVFPIADS

SEQ ID NO: 21380 - DNA, 1679 bp, Glycine max
tattataattttattttcaatcacatgagttacaaatgtatctgcgtgcaaaaaagattgaatgttccttgaagatactaaataatacaattttatcaagcagaaccaagttatatttttaagtgtatcgttacctatcattgcattctattacaaatattctatcattgcattctattacatgggattataagtgttctgatttgtctttagttatatttttaattacttaatgttctaattaattgaaaaaaccattttttaaataaagttgctttctgattagtatttgttagagatgcaatataaagtcattcatgtatcgttacctagcagcttgagctttttggatagtttgttaatgacatggtatgaaattctctgactatgtggtctagagttcaatcctttatactcttattcttctaataaaacgttaaatttcaaccaaggtagatcatatgtggacttgtgcattatccacacttaatgtccaaaaggctcttgcatgagaggcatgttaaagatgtaaaataaaatcattcatgtatcttcacctatgaacttaagctttttggataatttgttcttgatagtaataattagtaaaatcaaatctgttatttaaatgtatcaaaatttacatgtgaaaatttaaattggtctaagttcattatagtttgtctttgactattatagtcctttatacctttctttaaatgggtatgtactaagttgtggggatgttatcgcatcatcactttccttttttatgaaatttcattaacattaagtttaaaaacttccagccactaggtcacttgatttttcctgctcaatttataggttactcaaatgaagcaggagcatgacaagaggcaagcaagcctcatagctgaacacaacgaacagctaaagcgtacccaactgcaagctgaaaatgaattgagagagaaaacaatgtttatgaggaatgatcatgaagctcagatcaaagcattgaggtgtgaacttgaagatgagtgtcggaagctggaagaggagttgcatcttcaaaaaatccaaagaagacaggcaaagggctttgttgcagttgcagtggaaagtgatgagtgacaagcctaaagaggaccaagaagtgaattcaaaacaggccacgaggttgtaacatatgaaagtccgcgaccgatgatggggattcatcgtttagtgtttgtgttatttcgtcaactgggtagggaaacagtgtatgcaccaggatggcgccagaatttcaacactagagaatttgctgaactctacaaccttggattgccagttgctgctgtctatttcaacattcagagggaatctggctctggtggaagaaggttataccattgagggttctagaaatatttctcccacactctttagtagtaaatgagtgcttttcaacttaatattaaactgagcatatagtgaaataaattgcttgctagatcagttggtagcaacaagtcctctacatatacacataaatgaaatcgaagcatctcggttcatttttcttatttctattatcagctgcagaatgttatagatatattatatatgtaaagtggaaaacaacttgagcccaagttaaattatggggtacttatacttttgctaaaaaaaaaaaaaaaaaaaaaaaaaag

SEQ ID NO: 21381 - protein, 86 aa, Glycine max; identical to SEQ ID NO: 19197

SEQ ID NO: 21382 - protein, 64 aa, Glycine max
MMGIHRLVFVLFRQLGRETVYAPGWRQNFNTREFAELYNLGLPVAAVYFNIQRESGSGGRRLYH

SEQ ID NO: 21383 - protein, 63 aa, Glycine max
MGIHRLVFVLFRQLGRETVYAPGWRQNFNTREFAELYNLGLPVAAVYFNIQRESGSGGRRLYH

SEQ ID NO: 21384 - DNA, 1041 bp, Glycine max
tatcaatatggaatggcttatgcttcactttctatggcggttggagctgtttatatatggacttatgtctacaacataatgagagtttccgcaagtgtagtcccaaaagatgattatagaactagctccttcagactggaggcttcaggagagttcctagaattcataccagaggaagaatcctcagaacctgaaaatccaccaaaggacaacatggatgattacactcttctgctttcttcaattgaatctgaggagaatgtgaagttaccaatctcagctaaaatcaaacaacaatttggaaaccttttagtcaactccaatttcagagccatattttcaccagcaactcttggagcgattgttggctttattgtaggagtggttccccagatacgtaaattgatgattggcggcgatgcttcacttcatgtgattcaagactctgttaccatggttggtgaagccgccgttccaattataacccttataatgggagcaaacctccttaaaggcttgaagggagcaaatacttctatttggacagttataggaattatagtagttcgatatattttcctgccaattttgggtattctagttattaaaggagcaacacaattgggtttggtgcaaccagatcccttgtatcagtttgtgcttctccttcaatatgcacttccacctgcaatggctataggcaccatcgcgcagttgtttggagctggtgaaggtgaatgttctgttatcatgctatggacatatgttttggcctcagttgcagtcactttttggacaacctacttcatgtggcttgtggcttaattttgtatccattgctatggttattatttatttatttatttttagtttttgccttataagttatctcttttcagccaggagtataggaactgcatacactatctttggttttatacaagcttcctcaaaaggatgaattatagaatatatgtggtttggtaaccctttaaaaaaaaaaaaaaaaaaaaaaaaaaaaaaaaaaaaaaaaaaaaaaag

SEQ ID NO: 21385 - protein, 274 aa, Glycine max
YQYGMAYASLSMAVGAVYIWTYVYNIMRVSASVVPKDDYRTSSFRLEASGEFLEFIPEEESSEPENPPKDNMDDYTLLLSSIESEENVKLPISAKIKQQFGNLLVNSNFRAIFSPATLGAIVGFIVGVVPQIRKLMIGGDASLHVIQDSVTMVGEAAVPIITLIMGANLLKGLKGANTSIWTVIGIIVVRYIFLPILGILVIKGATQLGLVQPDPLYQFVLLLQYALPPAMAIGTIAQLFGAGEGECSVIMLWTYVLASVAVTFWTTYFMWLVA

SEQ ID NO: 21386 - protein, 270 aa, Glycine max
MAYASLSMAVGAVYIWTYVYNIMRVSASVVPKDDYRTSSFRLEASGEFLEFIPEEESSEPENPPKDNMDDYTLLLSSIESEENVKLPISAKIKQQFGNLLVNSNFRAIFSPATLGAIVGFIVGVVPQIRKLMIGGDASLHVIQDSVTMVGEAAVPIITLIMGANLLKGLKGANTSIWTVIGIIVVRYIFLPILGILVIKGATQLGLVQPDPLYQFVLLLQYALPPAMAIGTIAQLFGAGEGECSVIMLWTYVLASVAVTFWTTYFMWLVA

SEQ ID NO: 21387 - protein, 263 aa, Glycine max
MAVGAVYIWTYVYNIMRVSASVVPKDDYRTSSFRLEASGEFLEFIPEEESSEPENPPKDNMDDYTLLLSSIESEENVKLPISAKIKQQFGNLLVNSNFRAIFSPATLGAIVGFIVGVVPQIRKLMIGGDASLHVIQDSVTMVGEAAVPIITLIMGANLLKGLKGANTSIWTVIGIIVVRYIFLPILGILVIKGATQLGLVQPDPLYQFVLLLQYALPPAMAIGTIAQLFGAGEGECSVIMLWTYVLASVAVTFWTTYFMWLVA

SEQ ID NO: 21388 - DNA, 1366 bp, Glycine max
gtaaaaccagatatcatagataatggagatggaacatacgatgtgaaatatgtggcaaaaggcaatggcaaacacacaatcctcgttaatgtgcgtggcaaacccattcagaacagccctttcactgttgaagctgtgagattaggagtggatgttacaaagacagaagcgtatggcccaggattggagggagcagtgaccaaagagcctacccacttcacaattgcaaccaaaaacaagaatggggatcctattcccaccggtggagagaagtttgacatcaagattgctggtccttacaactctgatgtcagaccagagttggttgacaacaaaaacggaacttacacagtcaactacaagccattagacaaaggaaaccacaccattaccatcttacacgagaaccaacacgtagccaacagcccatatcacatagtggtgaatgctaataaagatgccgctgatgcgggcttcagtttggcatttggacctggaattgaggaaattgtcagcaatgatcccacttccttcaccatccaggcatacaacagcaatggtgagaaggtccatcatggtggcgacccgtttgatactgaggttactggccctgatggtgcacccatcaaaaccaaggttactgataacaaggatggatcatacacagtggcatactcccctggagaggcaggcaagcacaccattgaggtgctccttcgctccgcaaacccactctactacgaccacatcaagaatagccctgttgtacttgaagccaaagttggcactgatgcaagcaaatcgcttgtttatggacctggtgtggagaacacattacttaacacaaagcctggcaagttcacaattgaggctcgcgacaaggatggaaagaagatgaccaagggaggagatgacttcgatgtcaaagtcacagacgccaatggccagcagcttgatgcaccaattgttgacaacggagatggcacctactctgtggagtacaaaccaaagggaacaggaaagcacaaggttgatgtaaggttgaaggacaagcctgtgggcaacacccctgtgactgttaatgtgaaagagggtgcatcatatgacaacacacacatcgacagcttctcgtttgtgatcaggacaaagacacaagccaatgaggacaagaaggagggaggtgaaagcttcaacgtgaagattgtaaattcaggctcacacgaagaggttaagaaagttaacattaaggatatcggtgatggcacatatgtggtctcttacagcctaccagaccccggcaactatgagatcagcgtccttcttaatgaccatcacattaagggcagcccatggaagcaacacatgc

SEQ ID NO: 21389 - protein, 455 aa, Glycine max
VKPDIIDNGDGTYDVKYVAKGNGKHTILVNVRGKPIQNSPFTVEAVRLGVDVTKTEAYGPGLEGAVTKEPTHFTIATKNKNGDPIPTGGEKFDIKIAGPYNSDVRPELVDNKNGTYTVNYKPLDKGNHTITILHENQHVANSPYHIVVNANKDAADAGFSLAFGPGIEEIVSNDPTSFTIQAYNSNGEKVHHGGDPFDTEVTGPDGAPIKTKVTDNKDGSYTVAYSPGEAGKHTIEVLLRSANPLYYDHIKNSPVVLEAKVGTDASKSLVYGPGVENTLLNTKPGKFTIEARDKDGKKMTKGGDDFDVKVTDANGQQLDAPIVDNGDGTYSVEYKPKGTGKHKVDVRLKDKPVGNTPVTVNVKEGASYDNTHIDSFSFVIRTKTQANEDKKEGGESFNVKIVNSGSHEEVKKVNIKDIGDGTYVVSYSLPDPGNYEISVLLNDHHIKGSPWKQHM

SEQ ID NO: 21390 - DNA, 1518 bp, Glycine max
agttcatctgagtctttgagagatgttagattaaactacaatgatttggcacctgccagcttccccaatgtggaatttttagtgctaactggcagtgctttcaaagtccttccccaatgcatcagccaatgtcgctttctcaagaatctagttttggacaattgcaaggagcttcaagaaatcagaggggttcctccaaagataaaatatctctcagcaataaactgcacatcattgtctcatgagtctcaaagcatgttattgaatcagagattacacgagggtggtggcacagatttttcccttccaggaacaaggataccggaatggttcgaccattgtactacaggaccattgctgtctttctggtttcgtaacaaatttccaaggatggctctagctgttgttggagttttggacaagcagggaagctttcccatgtcaagattccacttgctcattaatggcattcaaaagctgcattgccttttcaccgcacaatcaaaactaaccacgtatcatatattcctgtccgatgtgcagctgaaatcctacaatggcgaattgcaaagtgtgtatggggaggatgggtggaaccatgttgagatttcatatgtgagaccaagtgcctttccacattcatgcagagccaagagaggaaccatcaaattgatgggggttcatgtttacaagcaaaaaacaagcatggagggtgtccggttcacgaatccttggtctccaaagagatcatacagcgaagtttccaagcctagtttgaaagaaaattttcagtcactggccaaaagaagccgtggatcacaaggcatggaaatttgtgaggcaccacgcatgaagcagcatgaagtgaatagtggttatcacagtgtatcacagagactatggttagaaatttgcagcattgtagctcctgcagatgttaaagtcctaatgtggagcatttgccaaaatgctttgccaacttttgaatatcttttcaggaggaagcttgtaaatagtccactctgccccatttgtggaacagaacctgaaaccgtcgaacacgcgttcctgttttgtccgtggacacgacccctttggtttggaagtgatttccagtggtgcattgatgccaaaacagttcaaagctttcaactttggctttggcagaaactagtggagattcaaagggtatatcaagaaaatgccaaccaagtatctgctcaggtgggaagtatttgttgggctatttggaaaggaaggaatgaatttattcttgaaggaaaacctgtcaatccattgattttaaggtaaggcatctctgtgtgtatatgatgagaatgagggctatatttcttttaacgagatttgtagcttaaaaaattggggtgtaaaaagatgatatcacccttgattttttatttatttgaatgacttttctctaatggtaaagtgggattgtttttaaaagatactcaaaataatgccgtgcaatatgagattatgggccatggataaatc

SEQ ID NO: 21391 - protein, 436 aa, Glycine max
SSSESLRDVRLNYNDLAPASFPNVEFLVLTGSAFKVLPQCISQCRFLKNLVLDNCKELQEIRGVPPKIKYLSAINCTSLSHESQSMLLNQRLHEGGGTDFSLPGTRIPEWFDHCTTGPLLSFWFRNKFPRMALAVVGVLDKQGSFPMSRFHLLINGIQKLHCLFTAQSKLTTYHIFLSDVQLKSYNGELQSVYGEDGWNHVEISYVRPSAFPHSCRAKRGTIKLMGVHVYKQKTSMEGVRFTNPWSPKRSYSEVSKPSLKENFQSLAKRSRGSQGMEICEAPRMKQHEVNSGYHSVSQRLWLEICSIVAPADVKVLMWSICQNALPTFEYLFRRKLVNSPLCPICGTEPETVEHAFLFCPWTRPLWFGSDFQWCIDAKTVQSFQLWLWQKLVEIQRVYQENANQVSAQVGSICWAIWKGRNEFILEGKPVNPLILR

SEQ ID NO: 21392 - protein, 351 aa, Glycine max
MLLNQRLHEGGGTDFSLPGTRIPEWFDHCTTGPLLSFWFRNKFPRMALAVVGVLDKQGSFPMSRFHLLINGIQKLHCLFTAQSKLTTYHIFLSDVQLKSYNGELQSVYGEDGWNHVEISYVRPSAFPHSCRAKRGTIKLMGVHVYKQKTSMEGVRFTNPWSPKRSYSEVSKPSLKENFQSLAKRSRGSQGMEICEAPRMKQHEVNSGYHSVSQRLWLEICSIVAPADVKVLMWSICQNALPTFEYLFRRKLVNSPLCPICGTEPETVEHAFLFCPWTRPLWFGSDFQWCIDAKTVQSFQLWLWQKLVEIQRVYQENANQVSAQVGSICWAIWKGRNEFILEGKPVNPLILR

SEQ ID NO: 21393 - protein, 306 aa, Glycine max
MALAVVGVLDKQGSFPMSRFHLLINGIQKLHCLFTAQSKLTTYHIFLSDVQLKSYNGELQSVYGEDGWNHVEISYVRPSAFPHSCRAKRGTIKLMGVHVYKQKTSMEGVRFTNPWSPKRSYSEVSKPSLKENFQSLAKRSRGSQGMEICEAPRMKQHEVNSGYHSVSQRLWLEICSIVAPADVKVLMWSICQNALPTFEYLFRRKLVNSPLCPICGTEPETVEHAFLFCPWTRPLWFGSDFQWCIDAKTVQSFQLWLWQKLVEIQRVYQENANQVSAQVGSICWAIWKGRNEFILEGKPVNPLILR

SEQ ID NO: 21394 - DNA, 1867 bp, Glycine max
aactgttttgagtttccaaccttaaaagactctcttttctctctctgaactctgaagcaaaacaacattaccagagtggttcttgtaattcagtgctgctagaagatggaaactagtgaatggcatatcgagcgaagatctagcttcggctctgaatcccccttagcaagagaggcaggaaatgtgcctgaaactgggtcactctctattgtggtgcttggtgcttctggtgatcttgctaagaagaagacatttcctgcacttttccacctatacctgcagggattcttaccaccagatgaagttcatatttttggctatgcaaggacaaaaatctctgatgatgaattgagaaaccggttgcgcggctatcttgttccaaagaaaggtgcttccccccaacagttggaggatgtagagaagtttttacagctgatcaaatatgtaagcggctcttatgattctgaggatggcttccgcctgttggataaagagatttcagagcatgaatatttgaaaaacagtgttgagggtttatctcggaggcttttctatcttgctcttccaccttcagtatatccatcagtttgcaagatgatcaagacttgttgcatgaataaatctgatcttggtggatggacacgtgttgttgttgagaaaccttttggtaaggatctagaatctgcagaggaactcagtactgagattggaaagttgtttgaggaaccacagatttatcgtattgatcactacttgggaaaggaactagtgcagaacttgttggtacttcgctttgcaaatcggtttttcttgccactttggaaccgcgacaacattgacaacgtacagatagttttcagagaggattttggaactgatggccgtggtggatattttgaccagtatggaattattcgagatattattcaaaaccatctgctgcaggttctttgcttggttgctatggaaaaaccagtttctctcaggcctgagcacattcgggatgagaaagtgaaggttcttgaatcagtgctccctattaatgatgatgaggttgttcttggacaatatgaaggctataaagatgacccaaccgtacctgatgagtctaacaccccaacatttgcaactgttgttctgcgaatacacaatgaaagatgggaaggtgttcctttcatactaaaagcagggaaggcactaaattctagaaaggcagagataagggttcaattcaaggatgtccctggtgatattttcaagtgtaaaaagcaggggagaaatgagtgtgttatccgcctacagccttcagaagctatttacatgaagcttacggtcaagcaacctggactggagatgtctacggttcaaagtgagcttgacttgtcatatggacaacggtatcaaggagtaaccattcctgaggcttatgaacgcctaattcttgacacaattagaggtgatcagcaacattttgttcgcagagatgagttgaaggcatcctggcagatcttcaccccacttctgcacagaattgatgaaggggaattcaagccactcccctacaaaccaggaagcagaggtcctgcagaagcagatcagttacttgaaaaagctggctatgttcaaacacacggctacatatggatccctcctaccttgtagagtgatctaatgtaataagatgaggaatttttagctgctaatgaatacacaataagcttgtgaggcttcttccctttgaagcactcccacggatgtgtatcaagcatttggaacaatataagagactaagagtgtttggcacggtttgtgtaactgatttgcctttaaatgcaaaataaatggaaaatgaagtccatttactagc

SEQ ID NO: 21395 - protein, 518 aa, Glycine max
METSEWHIERRSSFGSESPLAREAGNVPETGSLSIVVLGASGDLAKKKTFPALFHLYLQGFLPPDEVHIFGYARTKISDDELRNRLRGYLVPKKGASPQQLEDVEKFLQLIKYVSGSYDSEDGFRLLDKEISEHEYLKNSVEGLSRRLFYLALPPSVYPSVCKMIKTCCMNKSDLGGWTRVVVEKPFGKDLESAEELSTEIGKLFEEPQIYRIDHYLGKELVQNLLVLRFANRFFLPLWNRDNIDNVQIVFREDFGTDGRGGYFDQYGIIRDIIQNHLLQVLCLVAMEKPVSLRPEHIRDEKVKVLESVLPINDDEVVLGQYEGYKDDPTVPDESNTPTFATVVLRIHNERWEGVPFILKAGKALNSRKAEIRVQFKDVPGDIFKCKKQGRNECVIRLQPSEAIYMKLTVKQPGLEMSTVQSELDLSYGQRYQGVTIPEAYERLILDTIRGDQQHFVRRDELKASWQIFTPLLHRIDEGEFKPLPYKPGSRGPAEADQLLEKAGYVQTHGYIWIPPTL

SEQ ID NO: 21396 - protein, 355 aa, Glycine max
MIKTCCMNKSDLGGWTRVVVEKPFGKDLESAEELSTEIGKLFEEPQIYRIDHYLGKELVQNLLVLRFANRFFLPLWNRDNIDNVQIVFREDFGTDGRGGYFDQYGIIRDIIQNHLLQVLCLVAMEKPVSLRPEHIRDEKVKVLESVLPINDDEVVLGQYEGYKDDPTVPDESNTPTFATVVLRIHNERWEGVPFILKAGKALNSRKAEIRVQFKDVPGDIFKCKKQGRNECVIRLQPSEAIYMKLTVKQPGLEMSTVQSELDLSYGQRYQGVTIPEAYERLILDTIRGDQQHFVRRDELKASWQIFTPLLHRIDEGEFKPLPYKPGSRGPAEADQLLEKAGYVQTHGYIWIPPTL

SEQ ID NO: 21397 - protein, 349 aa, Glycine max
MNKSDLGGWTRVVVEKPFGKDLESAEELSTEIGKLFEEPQIYRIDHYLGKELVQNLLVLRFANRFFLPLWNRDNIDNVQIVFREDFGTDGRGGYFDQYGIIRDIIQNHLLQVLCLVAMEKPVSLRPEHIRDEKVKVLESVLPINDDEVVLGQYEGYKDDPTVPDESNTPTFATVVLRIHNERWEGVPFILKAGKALNSRKAEIRVQFKDVPGDIFKCKKQGRNECVIRLQPSEAIYMKLTVKQPGLEMSTVQSELDLSYGQRYQGVTIPEAYERLILDTIRGDQQHFVRRDELKASWQIFTPLLHRIDEGEFKPLPYKPGSRGPAEADQLLEKAGYVQTHGYIWIPPTL

SEQ ID NO: 21398 - DNA, 1599 bp, Glycine max
agactttagtcatttgaatctgttaccccaggaaacttcaacggctgtgaaagaacctgttagggttgtgtatactgaggaggattcaactaacaaaaggaatttgcctcaaggcttgcaattggtgaaatcaagggagcatgtgtttgccaggatgttgtcaactacaactgaggaagatctggctaaaaaggagaaccccattaaactggtgactgatggaattaagcaaggaaatcaaggtgatgcatctggtgaaaatgtaaatggggaagatgctattgatgttgatgacaatgatgggaaacttgctaaatcaattagtgcttctactcaagagcctgaaattaaggagcaacaactagccacagaaacttctagcaaaataaaccaaaaaggttctgaattgtctgaaaccaataagcagaatgatcgaacaccatctgatgcccgggtgaagcagataaaagatcagcttatccaagctaaggtctatctttcccttccagttgtaaaatccaacccacatctcactcgggagcttcgattacgggtaaaagaagtttcacgaacacttggggaagcaatcaaagattctgatttacctaggaatgcaaatgagagaatgagggcgatggagcagacactgatgaaaggaaagcaagctcaagatgattgtgctgctgttgtgaagaagcttagggctatgctccactcatcggaggagcagcttcatgttctcaagaagcagactttgttcttaacacaattgacagcaaaaacactgcccaaaggtcttcattgtcttccattgcgccttactactgagtatcataatatgaattcttctcaccaacaattcccccatcaagagaatttagaagacccccatttataccattatgccatattttcagacaacatattagcaacagctgttgttgtgaactcaactgtttccaatactaaggatgcctcaaaacatgttttccacattgtcactgatagactcaattacgcagcgatgaggatgtggtttttggtgaatccacctggcaaggcaaccattcaagttcaaaacattgaagactttacatggttgaatgcaagttacagtcctgttcttaaacagttgggttcccaatccatgattgattattacttcaaggctcatcgagtaacttctgattcaaatcttaagtttcggaatccaaagtatttgtctatcttgaaccacctccggttctatctgcctgagatctttccaaagctcaacaaagtgctgtttttggatgatgatattgttgtgcagaaggatctgactgatctgtggtcaattgatttgaaaggcaacgtaaatggtgctgtagaaacttgtggagaaagttttcaccgatttgatcgctatctcaacttctcaaatcctcttattgcgaagaattttgacccacatgcttgtgggtgggcatatggtatgaatgtctttgatttagcagaatggaagaggcaaaacatcacagaggtttaccacaactggcagaatctgaatcatgatagacaactatggaagttaggaacactgccaccaggtctcataac

SEQ ID NO: 21399 - protein, 532 aa, Glycine max
DFSHLNLLPQETSTAVKEPVRVVYTEEDSTNKRNLPQGLQLVKSREHVFARMLSTTTEEDLAKKENPIKLVTDGIKQGNQGDASGENVNGEDAIDVDDNDGKLAKSISASTQEPEIKEQQLATETSSKINQKGSELSETNKQNDRTPSDARVKQIKDQLIQAKVYLSLPVVKSNPHLTRELRLRVKEVSRTLGEAIKDSDLPRNANERMRAMEQTLMKGKQAQDDCAAVVKKLRAMLHSSEEQLHVLKKQTLFLTQLTAKTLPKGLHCLPLRLTTEYHNMNSSHQQFPHQENLEDPHLYHYAIFSDNILATAVVVNSTVSNTKDASKHVFHIVTDRLNYAAMRMWFLVNPPGKATIQVQNIEDFTWLNASYSPVLKQLGSQSMIDYYFKAHRVTSDSNLKFRNPKYLSILNHLRFYLPEIFPKLNKVLFLDDDIVVQKDLTDLWSIDLKGNVNGAVETCGESFHRFDRYLNFSNPLIAKNFDPHACGWAYGMNVFDLAEWKRQNITEVYHNWQNLNHDRQLWKLGTLPPGLI

SEQ ID NO: 21400 - protein, 481 aa, Glycine max
MLSTTTEEDLAKKENPIKLVTDGIKQGNQGDASGENVNGEDAIDVDDNDGKLAKSISASTQEPEIKEQQLATETSSKINQKGSELSETNKQNDRTPSDARVKQIKDQLIQAKVYLSLPVVKSNPHLTRELRLRVKEVSRTLGEAIKDSDLPRNANERMRAMEQTLMKGKQAQDDCAAVVKKLRAMLHSSEEQLHVLKKQTLFLTQLTAKTLPKGLHCLPLRLTTEYHNMNSSHQQFPHQENLEDPHLYHYAIFSDNILATAVVVNSTVSNTKDASKHVFHIVTDRLNYAAMRMWFLVNPPGKATIQVQNIEDFTWLNASYSPVLKQLGSQSMIDYYFKAHRVTSDSNLKFRNPKYLSILNHLRFYLPEIFPKLNKVLFLDDDIVVQKDLTDLWSIDLKGNVNGAVETCGESFHRFDRYLNFSNPLIAKNFDPHACGWAYGMNVFDLAEWKRQNITEVYHNWQNLNHDRQLWKLGTLPPGLI

SEQ ID NO: 21401 - protein, 324 aa, Glycine max
MRAMEQTLMKGKQAQDDCAAVVKKLRAMLHSSEEQLHVLKKQTLFLTQLTAKTLPKGLHCLPLRLTTEYHNMNSSHQQFPHQENLEDPHLYHYAIFSDNILATAVVVNSTVSNTKDASKHVFHIVTDRLNYAAMRMWFLVNPPGKATIQVQNIEDFTWLNASYSPVLKQLGSQSMIDYYFKAHRVTSDSNLKFRNPKYLSILNHLRFYLPEIFPKLNKVLFLDDDIVVQKDLTDLWSIDLKGNVNGAVETCGESFHRFDRYLNFSNPLIAKNFDPHACGWAYGMNVFDLAEWKRQNITEVYHNWQNLNHDRQLWKLGTLPPGLI

SEQ ID NO: 21402 - DNA, 1875 bp, Glycine max
gtgaaacttcccaaaaaatatacagcactatggaacaccaaaaagaggagcaactagaaccagtgagtcctgtgggacaatacttcaacagctctgtgctatgcatatacatcattggagttttagaattcgaagttccaatagatgacttgcaaacatatgctcttcttaaagatgttttccttcccatcaatccacgcttctcctccatcatggtccaagataaagatggagagaaaagatggaagcaagttgatgtaaacttgacggaccatgtcaacatccccacattccccgaaggaaaaacagcggaatcttatgataaatattttcatgattatttatcaagcatagcaatggagcaattaccacaaagcagaccattatgggatattcacataatcaattaccttacaagtgatgcatccagcactataatatttaagcttcaccatgcacttggagatggctattctctcatgggtgctcttctttcttgtcttcaacgagccgatgacccttctcttcccttgtcctttccttctctcaaacaatctaaacaagaaccttcttccactaaaagcttttgcagaaaattttcttggatgtgttcctctgccttcaacactgtctcagattttggatggagtgtattgaagagtagcatcattagtgatgataaaacaccgataaggtttggagacgaaggagccgactatcaaccaatttccatatcaagcatgacattctccattgaccacatcagggacatcaaatcaaggctcggagtgacaataaatgatgtggtcactggaattgtcttctatggaactagattatatatgcaagatatggactccaaatcaaagaccgcacactccacagcattggtattactgaatacgagaaacgttgaaggttaccaatcgatcaatgatatgctaaatactaaagccacgggtccatgggggaacagaattaccttcttgcatgttccaataccgaaattaaatgaaacaagaactacaaaccctcttgaatttatttgggacacacataacataatcaagaggaagaaacaatctctaggagttgtactcaccgggacacttttgaagatagagggcaaattgaggggacaagaggcagtagctaaacgcattcgtggcacattgacaaaatcaagtgcagtgatttcaaacttggctggaccaatacaacaaatggctttagctaaccatcctgtgaaaggcttgtatttcacattggccggtggacctgaaagtctagtcatttcagttatgagctatatgggagtcctaagtgttaccctcaaaacggaaaaagacttcatagacgaacataaattgaagttgtgcatgcaaagtgcatttgagataattctccaagcagctatggaaattcctcaggaaaccaaaccttagtatttggtttggatgattggaacagcttattacgaaaattagagagagagagagatatggagaatttaccatattatttctccggatttatcaacgccttaagtaattgcttgtctatagtatatttgtcgtatgtttggaaagatcaatacacgaggcccaccttattttggatctgtttaggcctattcttgtttggaagaatcttattgtctgatctcacttggtaatcatttcttgtttgtttcacaaactaaaaagtgtacaagagttgttatatttttaattatgtagtcttttgtaaaaattttgtacatcacatttcttatcctcttgtctccaacactccaacattaattaacaacaatattaaaaatttagctcaaatctcacaatgtagggggctaattcaatagaaggttttcaatcc

SEQ ID NO: 21403 - protein, 480 aa, Glycine max
ETSQKIYSTMEHQKEEQLEPVSPVGQYFNSSVLCIYIIGVLEFEVPIDDLQTYALLKDVFLPINPRFSSIMVQDKDGEKRWKQVDVNLTDHVNIPTFPEGKTAESYDKYFHDYLSSIAMEQLPQSRPLWDIHIINYLTSDASSTIIFKLHHALGDGYSLMGALLSCLQRADDPSLPLSFPSLKQSKQEPSSTKSFCRKFSWMCSSAFNTVSDFGWSVLKSSIISDDKTPIRFGDEGADYQPISISSMTFSIDHIRDIKSRLGVTINDVVTGIVFYGTRLYMQDMDSKSKTAHSTALVLLNTRNVEGYQSINDMLNTKATGPWGNRITFLHVPIPKLNETRTTNPLEFIWDTHNIIKRKKQSLGVVLTGTLLKIEGKLRGQEAVAKRIRGTLTKSSAVISNLAGPIQQMALANHPVKGLYFTLAGGPESLVISVMSYMGVLSVTLKTEKDFIDEHKLKLCMQSAFEIILQAAMEIPQETKP

SEQ ID NO: 21404 - protein, 471 aa, Glycine max
MEHQKEEQLEPVSPVGQYFNSSVLCIYIIGVLEFEVPIDDLQTYALLKDVFLPINPRFSSIMVQDKDGEKRWKQVDVNLTDHVNIPTFPEGKTAESYDKYFHDYLSSIAMEQLPQSRPLWDIHIINYLTSDASSTIIFKLHHALGDGYSLMGALLSCLQRADDPSLPLSFPSLKQSKQEPSSTKSFCRKFSWMCSSAFNTVSDFGWSVLKSSIISDDKTPIRFGDEGADYQPISISSMTFSIDHIRDIKSRLGVTINDVVTGIVFYGTRLYMQDMDSKSKTAHSTALVLLNTRNVEGYQSINDMLNTKATGPWGNRITFLHVPIPKLNETRTTNPLEFIWDTHNIIKRKKQSLGVVLTGTLLKIEGKLRGQEAVAKRIRGTLTKSSAVISNLAGPIQQMALANHPVKGLYFTLAGGPESLVISVMSYMGVLSVTLKTEKDFIDEHKLKLCMQSAFEIILQAAMEIPQETKP

SEQ ID NO: 21405 - protein, 410 aa, Glycine max
MVQDKDGEKRWKQVDVNLTDHVNIPTFPEGKTAESYDKYFHDYLSSIAMEQLPQSRPLWDIHIINYLTSDASSTIIFKLHHALGDGYSLMGALLSCLQRADDPSLPLSFPSLKQSKQEPSSTKSFCRKFSWMCSSAFNTVSDFGWSVLKSSIISDDKTPIRFGDEGADYQPISISSMTFSIDHIRDIKSRLGVTINDVVTGIVFYGTRLYMQDMDSKSKTAHSTALVLLNTRNVEGYQSINDMLNTKATGPWGNRITFLHVPIPKLNETRTTNPLEFIWDTHNIIKRKKQSLGVVLTGTLLKIEGKLRGQEAVAKRIRGTLTKSSAVISNLAGPIQQMALANHPVKGLYFTLAGGPESLVISVMSYMGVLSVTLKTEKDFIDEHKLKLCMQSAFEIILQAAMEIPQETKP

SEQ ID NO: 21406 - DNA, 1229 bp, Glycine max
ggtccaactccctcttgatgatgctgagaatgatgcccgccactatgatgatgaccgccctgacattggtggctttggctgtgccaatggcaaggtccagatcatccagcagatcaaccatgagggtgaggttaacagggctcgctacatgccccagaaccccttcatcattgccaccaagaccgttagtgctgaggtttatgtcttcgattatagcaagcatccctctaagccccctcttgatggtgcctgtaaccctgatttaaggcttaggggtcataacactgaaggctatggtttgtcctggagtaagttcaagcagggccacttgcttagtggttctgatgatgctcagatttgcttgtgggatattaatggcactcccaagaataagagcctagaggcaatgcagatttttaaggtacatgaaggtgtcgtggaagatgtggcttggcatttgaggcatgagtacttgtttggctctgttggcgatgatcaatacttacttatatgggaccttcgaacgcccgctgccagcaagcctgtccaatctgttgttgctcatcaaagtgaggttaactgcttggctttcaatccctttaacgaatgggttgttgctactggttctacagataaaactgtgaagttgtttgatctgcggaagatcaatactccactgcacatctttgattctcacaaggaggaggttttccaggttggctggaatccaaagaatgagactatcttggcttcttgttgtctgggtaggagactcatggtgtgggatcttagcaggattgatgaagagcagtcaccagaagatgccgaagatggtccaccagaattgctctttattcatggaggtcatacaagcaaaatatctgacttttcctggaatccatgtgaagattgggttgttgctagtgtcgccgaagacaacatacttcaaatatggcagatggcagagaacatataccacgacgaagatgatctgccagaagagtcaacgaaggcagcggcatcctaatgtaattgacggacatgataattagtgtagtgttgaatacaggttcagtgttgtggactcggggagctttttccatatttaaattcgtgctgctacttcgttttgcaccttagttgtagctgtgttttgtgaggtatgaactatgattgccttcaacagtagcatgctgaacaaccgagacctaggtgtatctttcgatggt

SEQ ID NO: 21407 - protein, 341 aa, Glycine max
VQLPLDDAENDARHYDDDRPDIGGFGCANGKVQIIQQINHEGEVNRARYMPQNPFIIATKTVSAEVYVFDYSKHPSKPPLDGACNPDLRLRGHNTEGYGLSWSKFKQGHLLSGSDDAQICLWDINGTPKNKSLEAMQIFKVHEGVVEDVAWHLRHEYLFGSVGDDQYLLIWDLRTPAASKPVQSVVAHQSEVNCLAFNPFNEWVVATGSTDKTVKLFDLRKINTPLHIFDSHKEEVFQVGWNPKNETILASCCLGRRLMVWDLSRIDEEQSPEDAEDGPPELLFIHGGHTSKISDFSWNPCEDWVVASVAEDNILQIWQMAENIYHDEDDLPEESTKAAAS

SEQ ID NO: 21408 - protein, 292 aa, Glycine max
MPQNPFIIATKTVSAEVYVFDYSKHPSKPPLDGACNPDLRLRGHNTEGYGLSWSKFKQGHLLSGSDDAQICLWDINGTPKNKSLEAMQIFKVHEGVVEDVAWHLRHEYLFGSVGDDQYLLIWDLRTPAASKPVQSVVAHQSEVNCLAFNPFNEWVVATGSTDKTVKLFDLRKINTPLHIFDSHKEEVFQVGWNPKNETILASCCLGRRLMVWDLSRIDEEQSPEDAEDGPPELLFIHGGHTSKISDFSWNPCEDWVVASVAEDNILQIWQMAENIYHDEDDLPEESTKAAAS

SEQ ID NO: 21409 - protein, 206 aa, Glycine max
MQIFKVHEGVVEDVAWHLRHEYLFGSVGDDQYLLIWDLRTPAASKPVQSVVAHQSEVNCLAFNPFNEWVVATGSTDKTVKLFDLRKINTPLHIFDSHKEEVFQVGWNPKNETILASCCLGRRLMVWDLSRIDEEQSPEDAEDGPPELLFIHGGHTSKISDFSWNPCEDWVVASVAEDNILQIWQMAENIYHDEDDLPEESTKAAAS

SEQ ID NO: 21410 - DNA, 767 bp, Glycine max
atctttatgttagggtccaaagataagattaatgaggtgatgagattttgggttgatcagttaggttgggaccctttggccctcgccaaaatgccgaagatttttggatatagtttgaagggaaggatcattccgaggggtttggttgtccgatatttgatcgggaaaggtttgagaaagaagagtgccagcttgttaaccccattttctgcttctgaaaggttgtttcttgaaaattatgtgatgcgttttaaggaggaaacacatcaactatcaaaggtttatgtggaaaaatgagtttccaagaaaacagggaggatggtgtagcatctggcagttagcaaaacggaagagtacaattttcttagatgtaaaggagagatagatgaagatacaaatcaaagttccttaatcattgtggaatttagaaaaaatcaaggtccatgtttcatttattcattgctgctggaggttcaattgaagacaaagtttgagtgattgaacagttgtttctcagatgtttagctgggaatatattaagtgatagcttctggttacagcattatacattaggtagaactattcacttttgtagtttgacgaggaacacaaatgaatatttaagtgttgcattatgatagatgcatcaaacgataagaatttacttttaactttatatggttgagatgttgagttgagttataatttaagcttttagatgtaggagctcataaactgagttatatgccagggttaattctagcttt

SEQ ID NO: 21411 - protein, 98 aa, Glycine max
IFMLGSKDKINEVMRFWVDQLGWDPLALAKMPKIFGYSLKGRIIPRGLVVRYLIGKGLRKKSASLLTPFSASERLFLENYVMRFKEETHQLSKVYVEK

SEQ ID NO: 21412 - protein, 96 aa, Glycine max
MLGSKDKINEVMRFWVDQLGWDPLALAKMPKIFGYSLKGRIIPRGLVVRYLIGKGLRKKSASLLTPFSASERLFLENYVMRFKEETHQLSKVYVEK

SEQ ID NO: 21413 - protein, 85 aa, Glycine max
MRFWVDQLGWDPLALAKMPKIFGYSLKGRIIPRGLVVRYLIGKGLRKKSASLLTPFSASERLFLENYVMRFKEETHQLSKVYVEK

SEQ ID NO: 21414 - DNA, 1439 bp, Glycine max
  misc_feature (846)..(846): n is a, c, g, or t
gatcagactggagcaaagaagctgttgggatgatggcccttcatgagaccctcagaagagtctgtctcaactcagaatggacttactctgtcttctggaccattcgtcctcgcccgagagtccgaggtggcaatggctgcaagattggagatgataatggcagcttgatgttgatgtgggaagatgggttttgccgaggaagaggttcaggatgtctggaagatattgatggagaggatcctgtcagaaaggccttcagcaaaatgtccattcagttgtataattatggagaagggttgatggggaaagttgcatctgataagtgccacaagtgggtctttaaagagcccacagaatgtgaaccaaatatctccaactactggcagagctcctttgatgctcttcctcctgaatggacagaccagtttgagtcaggcattcagaccatagctgttattcaagctggacatggccttctccaacttggttcttgcaagattattcctgaagacctccattttgtgcttagaatgcgacacacttttgaatcccttggctaccaatctggtttctacctctctcaactcttctcttcaacaaggaatacttcctcatcaacttctgttccttcaaaaccatccaccaatattccaattaggccacctcttccactcttcaactggggtcagagaccacttacttcagccacttccatgctatcctcacccaattttcaacatgcagctaggcttgggtttccaaaagatgaggcacacatgttcctcatgcctcatgcatcacctgagggtgcaagaatcgaggacatgatgggggagcatgaggggnacataaaatggcccaatggattgtctttcttcaatgctctcactggaagaacggatgatgctaagctcttgttcaatcctgagagcttggggaacaaacctggtgatcagaatcagcatcacacaattggccaaaaccgcaactcagaaggctccaacatgcaaaatgctagtggtggagccaacccaaatgagttcttgagcttggatagccaccaagatgatgtaaggaaaatggacaagtttaagaggagcttcactcttcctgcaagagtggcctcatcatcttcatccacttcaatggatcaacaccaccaccaccaccaccaccaccaccaaggtgtggagtataggaattcagaaggaggtatgtacccggatgtcatggaaacctttttggagtgaattgaggtggagaaaaaggtgagtttttagtaggggaaataatgaaaaatgaaagatgagaatttgtatctaggaaaaagttactatttgtgttcctttttcatgtgttggcttttcactttctaccttgtgtttcttctgtcttccacttaatgagacttgattaatgatcatttgtttgtttcttcc

SEQ ID NO: 21415 - protein, 415 aa, Glycine max
  misc_feature (282)..(282): Xaa can be any naturally occurring amino acid
SDWSKEAVGMMALHETLRRVCLNSEWTYSVFWTIRPRPRVRGGNGCKIGDDNGSLMLMWEDGFCRGRGSGCLEDIDGEDPVRKAFSKMSIQLYNYGEGLMGKVASDKCHKWVFKEPTECEPNISNYWQSSFDALPPEWTDQFESGIQTIAVIQAGHGLLQLGSCKIIPEDLHFVLRMRHTFESLGYQSGFYLSQLFSSTRNTSSSTSVPSKPSTNIPIRPPLPLFNWGQRPLTSATSMLSSPNFQHAARLGFPKDEAHMFLMPHASPEGARIEDMMGEHEGXIKWPNGLSFFNALTGRTDDAKLLFNPESLGNKPGDQNQHHTIGQNRNSEGSNMQNASGGANPNEFLSLDSHQDDVRKMDKFKRSFTLPARVASSSSSTSMDQHHHHHHHHHQGVEYRNSEGGMYPDVMETFLE

SEQ ID NO: 21416 - protein, 406 aa, Glycine max
  misc_feature (273)..(273): Xaa can be any naturally occurring amino acid
MMALHETLRRVCLNSEWTYSVFWTIRPRPRVRGGNGCKIGDDNGSLMLMWEDGFCRGRGSGCLEDIDGEDPVRKAFSKMSIQLYNYGEGLMGKVASDKCHKWVFKEPTECEPNISNYWQSSFDALPPEWTDQFESGIQTIAVIQAGHGLLQLGSCKIIPEDLHFVLRMRHTFESLGYQSGFYLSQLFSSTRNTSSSTSVPSKPSTNIPIRPPLPLFNWGQRPLTSATSMLSSPNFQHAARLGFPKDEAHMFLMPHASPEGARIEDMMGEHEGXIKWPNGLSFFNALTGRTDDAKLLFNPESLGNKPGDQNQHHTIGQNRNSEGSNMQNASGGANPNEFLSLDSHQDDVRKMDKFKRSFTLPARVASSSSSTSMDQHHHHHHHHHQGVEYRNSEGGMYPDVMETFLE

SEQ ID NO: 21417 - protein, 405 aa, Glycine max
  misc_feature (272)..(272): Xaa can be any naturally occurring amino acid
MALHETLRRVCLNSEWTYSVFWTIRPRPRVRGGNGCKIGDDNGSLMLMWEDGFCRGRGSGCLEDIDGEDPVRKAFSKMSIQLYNYGEGLMGKVASDKCHKWVFKEPTECEPNISNYWQSSFDALPPEWTDQFESGIQTIAVIQAGHGLLQLGSCKIIPEDLHFVLRMRHTFESLGYQSGFYLSQLFSSTRNTSSSTSVPSKPSTNIPIRPPLPLFNWGQRPLTSATSMLSSPNFQHAARLGFPKDEAHMFLMPHASPEGARIEDMMGEHEGXIKWPNGLSFFNALTGRTDDAKLLFNPESLGNKPGDQNQHHTIGQNRNSEGSNMQNASGGANPNEFLSLDSHQDDVRKMDKFKRSFTLPARVASSSSSTSMDQHHHHHHHHHQGVEYRNSEGGMYPDVMETFLE

SEQ ID NO: 21418 - protein, 360 aa, Glycine max
  misc_feature (227)..(227): Xaa can be any naturally occurring amino acid
MLMWEDGFCRGRGSGCLEDIDGEDPVRKAFSKMSIQLYNYGEGLMGKVASDKCHKWVFKEPTECEPNISNYWQSSFDALPPEWTDQFESGIQTIAVIQAGHGLLQLGSCKIIPEDLHFVLRMRHTFESLGYQSGFYLSQLFSSTRNTSSSTSVPSKPSTNIPIRPPLPLFNWGQRPLTSATSMLSSPNFQHAARLGFPKDEAHMFLMPHASPEGARIEDMMGEHEGXIKWPNGLSFFNALTGRTDDAKLLFNPESLGNKPGDQNQHHTIGQNRNSEGSNMQNASGGANPNEFLSLDSHQDDVRKMDKFKRSFTLPARVASSSSSTSMDQHHHHHHHHHQGVEYRNSEGGMYPDVMETFLE

SEQ ID NO: 21419 - DNA, 1349 bp, Glycine max
aagatcaggaaagtggaaccttgccttttatgaagttaatgtcttgctttcattgctttcacagtgaatgtatcattagatggtggaaatggcttcaaaattctaacaaagtagactcttctaatacagatagtgcagctgcacatcgtaaccaagataatcctaagaaaacggaagagagtgttggaaactgcccagtctgtcgcaagccttttcttgccaaggatttggaccatgtgcttgctctagttggttcatattcttcccaattgagttcagataatgaagaactcaacgaagaggaaaagctccttcaatcagaggatgagatcaataggagacagaaatatgaagccatcttaaatttacagaaggagaacagtggtttgattgaacccaaaaaagagatggtaatattgcccggtatgtatcttccacaaccagtagcaatgcccagctccacaccaaccaaggaatctgatgagccgcaacaaaaagatccacctgcagttgtgccagaaaaacatgcaggtgggacatccaacagcagcatacctagttctagcaggcagaggaattttggagcaaggagacagaaagcaagaagtgataaccactctagttcaaccgcaagaaatccaagaaaaccagcccaacagcagtgggtaagaagagataatcctagcaataagccatagaagtgatgtctttcactgctataggtcttattatcacatcaatgtttaaaagttgcgaagtaaagtatagatagtagaaaaagacagaaataggtgcctctcgtgtgccccatttctgttaaaggggtgttggagaagcagaagaagcgaagacaagcacatggtgcttccttgcgcaatttgctgtgttttttgtttttccttttttgattccgtgagcaagttttgacttgacatactgccttttttcgtgatagtgttttcttaatcacgaaattttcaatatgaagttatgaatgctacttttaagtagttatgcaatctgcatgctacacaaatgcaagccttcagagtgtaaagtatattcaattcgtggaatgagcattgagcatagttgattttaagcctcatgtttcagttcttgcagaatgaatctgcatgcaactgcagtctgaagcactatgctctctcccttgttcaagttgtgggtgttttgtctttcaatcttgtatctcatggttttctagtgacagtccttttgagccaataattgatgaaagtatctttagtagattattggggatggaattatattcagtgacatcattcgaccaatgaaatgctccttaaatgtaatcacacatttattat

SEQ ID NO: 21420 - protein, 231 aa, Glycine max
DQESGTLPFMKLMSCFHCFHSECIIRWWKWLQNSNKVDSSNTDSAAAHRNQDNPKKTEESVGNCPVCRKPFLAKDLDHVLALVGSYSSQLSSDNEELNEEEKLLQSEDEINRRQKYEAILNLQKENSGLIEPKKEMVILPGMYLPQPVAMPSSTPTKESDEPQQKDPPAVVPEKHAGGTSNSSIPSSSRQRNFGARRQKARSDNHSSSTARNPRKPAQQQWVRRDNPSNKP

SEQ ID NO: 21421 - protein, 222 aa, Glycine max
MKLMSCFHCFHSECIIRWWKWLQNSNKVDSSNTDSAAAHRNQDNPKKTEESVGNCPVCRKPFLAKDLDHVLALVGSYSSQLSSDNEELNEEEKLLQSEDEINRRQKYEAILNLQKENSGLIEPKKEMVILPGMYLPQPVAMPSSTPTKESDEPQQKDPPAVVPEKHAGGTSNSSIPSSSRQRNFGARRQKARSDNHSSSTARNPRKPAQQQWVRRDNPSNKP

SEQ ID NO: 21422 - protein, 219 aa, Glycine max
MSCFHCFHSECIIRWWKWLQNSNKVDSSNTDSAAAHRNQDNPKKTEESVGNCPVCRKPFLAKDLDHVLALVGSYSSQLSSDNEELNEEEKLLQSEDEINRRQKYEAILNLQKENSGLIEPKKEMVILPGMYLPQPVAMPSSTPTKESDEPQQKDPPAVVPEKHAGGTSNSSIPSSSRQRNFGARRQKARSDNHSSSTARNPRKPAQQQWVRRDNPSNKP

SEQ ID NO: 21423 - DNA, 1545 bp, Glycine max
acatagctttttcttttgcgcacctgagcttcgtttcgacggagaacaaataacgcaacccacccaaggttcgcatcgcatcgcatcgcatcatggcccaagacaaaaaggagcgtaaaaggagcatgaagaagaagcagaaccaatctctgacaactctgcctcaggaattgatcagagaaattcttctgagattaccggtgaaatctcttctgcgtttcaagtgcgtctgtaagtcgtttctgtctctgatttcggatccccaatttgtgatttcccattatgccctagctgcctcgcccacccatagattaattcttatatcacatgatttttatgctcaatccatcgccacggaatcagtgttcaaaacctgtagccgagacgtggtttatttccctctccctcttccatcaattccatgccttcgccttgacgattttggcattcgacccaagattttgggttcatgcagaggccttgtacttctatactatgacgacagcgcaaatctcattctgtggaatccgtcccttggccgtcacaaacgattgccaaactacagggatgacataacttcattcccatatggttttggctatgacgaatcaaaagatgagtacttgctgattctaattggattgcccaagtttggacctgaaactggagctgacatctactccttcaaaaccgagtcttggaaaacagacactattgtttatgatccattagttaggtataaggctgaggatagaatagccagagcagggtcgctcctcaatggggctcttcattggtttgttttctcggagagcaaagaggatcatgtgattatcgcctttgatctcgtggaaaggactctatcggagattcctcttcctctcgctgatcgttctactgtgcaaaaagatgcagtttatggtctgagaataatgggagggtgtctcagtgtgtgttgctccagctgtggaatgactgagatatgggtgatgaaggaatataaagtgcggtcatcttggactatgacctttcttatccatacttctaatcggatttccccaatatgcacaatcaaagatggtgagattttaggatcaaattgcgcgggaactggaagattagagaaacgcaatgacaaaggagagctgcttgagcatttcatggacaccaaaggtcaacggttcagctgtgccaatctacaggctgctatgtatacagagagtctactgccactcccaacgtcattttgggaaacaagtgaagaggactaactgtaatagacaacaaaaatcagggccatgaaatatgcaaaataatgtagacagtatcttgatgtcactttcctataaatggtgaagctgttggtagaaggcattgcacttgggagagaatggcatatatatgatattaaattatctattgttggggtagaactagtggagctaacttcacctagtggaataaggctttattgctgttgttgcagtgtagaactagtgtcagttttaatgctatttcaataaagttggagtttgaagaaacttt

SEQ ID NO: 21424 - protein, 392 aa, Glycine max
MAQDKKERKRSMKKKQNQSLTTLPQELIREILLRLPVKSLLRFKCVCKSFLSLISDPQFVISHYALAASPTHRLILISHDFYAQSIATESVFKTCSRDVVYFPLPLPSIPCLRLDDFGIRPKILGSCRGLVLLYYDDSANLILWNPSLGRHKRLPNYRDDITSFPYGFGYDESKDEYLLILIGLPKFGPETGADIYSFKTESWKTDTIVYDPLVRYKAEDRIARAGSLLNGALHWFVFSESKEDHVIIAFDLVERTLSEIPLPLADRSTVQKDAVYGLRIMGGCLSVCCSSCGMTEIWVMKEYKVRSSWTMTFLIHTSNRISPICTIKDGEILGSNCAGTGRLEKRNDKGELLEHFMDTKGQRFSCANLQAAMYTESLLPLPTSFWETSEED

SEQ ID NO: 21425 - protein, 381 aa, Glycine max
MKKKQNQSLTTLPQELIREILLRLPVKSLLRFKCVCKSFLSLISDPQFVISHYALAASPTHRLILISHDFYAQSIATESVFKTCSRDVVYFPLPLPSIPCLRLDDFGIRPKILGSCRGLVLLYYDDSANLILWNPSLGRHKRLPNYRDDITSFPYGFGYDESKDEYLLILIGLPKFGPETGADIYSFKTESWKTDTIVYDPLVRYKAEDRIARAGSLLNGALHWFVFSESKEDHVIIAFDLVERTLSEIPLPLADRSTVQKDAVYGLRIMGGCLSVCCSSCGMTEIWVMKEYKVRSSWTMTFLIHTSNRISPICTIKDGEILGSNCAGTGRLEKRNDKGELLEHFMDTKGQRFSCANLQAAMYTESLLPLPTSFWETSEED

SEQ ID NO: 21426 - DNA, 1469 bp, Glycine max
gatttaggcctataattcattctttgtggccaatgaagtttcggacccacatgtgtgtctctagataaacaaaaaattacttgagaaaacgggcccttttcaaaagaagatacgagtgcttaaataaagaaaagaggaacagctaaatgagaagaccaaggcaatgttaaagctaattgaagaagatgcagattcctttgcccaacgtgcagagatgtattacaagaagagaccacagcttgtgagcatggttgaagatttctataggacacaccgctcattagccgagcggtatgatcaagtcactggaattcgccagcagaagacaggatcacctttttctccaatcaagaatcatcaatcagagaagttgatgagttttacacatgacagttatgatagctattctgagtgttttgatgtagaggagtctgtggaatctgaagttgatgatcctgagcaagaagaggaagaggttaccaaatttgataactgtatagaagaggaggaagttaagattgtggctgcaaatgatgaagtgatggggctgaggaaagaaatcaacagacttggtgaagagaacaaggatcataaagatcaaattaaggagaaatataacgtttatgatgaagttatggtgttgagggaagaagtagaaggactcagaaaagagaatagagtgcagaaggatgagctcaaccagaaaagtatcatttgtggtgaagtaatgatattgagggaagaaatagaacgactcaaagaagagaatagagagcagaaggatgaactcaaccagaaagatatcatttgtggtgaagtaatgatgttgagggaagaaattgaaggactcagaaaagagaatagagagcagaagggtgaactcaaccagaaaagtatcatttgtagtgacgtaatgatgttgagggaagaaatagaacgactcagaaaagagaatagagagcaaaatgatgaactcaagcagaaaggtaccatttatggtgaagtaatgatgttaaggaaggagatagaaagagtcagcgaagagaatatggtacagaaggaccatctcatgcaaaaagacctagagaaaatagaggtgattagacacctgagtttagctatagatgtgctgaagcaggagaatgtaaagatgagaagcttcattgctaaggaatttaccaacaaatggaacaacccatttgagtttaaaaaactcatgggatcattatcgatgaagttgtttaatggaaagaatcaacctagtattgtagctctatagatatggttcagaaagtaaatagcgtagttctgtagagcaatcttataaaaatgtctacgtaaatattttggggacttatcaagtaacccacaattcttgtaaacagtacattcctaatcagagaatcctagtagactttcctatacaactaattaatatttttatacatccttcgttagcgaaaaaaaag

SEQ ID NO: 21427 - protein, 371 aa, Glycine max
MLKLIEEDADSFAQRAEMYYKKRPQLVSMVEDFYRTHRSLAERYDQVTGIRQQKTGSPFSPIKNHQSEKLMSFTHDSYDSYSECFDVEESVESEVDDPEQEEEEVTKFDNCIEEEEVKIVAANDEVMGLRKEINRLGEENKDHKDQIKEKYNVYDEVMVLREEVEGLRKENRVQKDELNQKSIICGEVMILREEIERLKEENREQKDELNQKDIICGEVMMLREEIEGLRKENREQKGELNQKSIICSDVMMLREEIERLRKENREQNDELKQKGTIYGEVMMLRKEIERVSEENMVQKDHLMQKDLEKIEVIRHLSLAIDVLKQENVKMRSFIAKEFTNKWNNPFEFKKLMGSLSMKLFNGKNQPSIVAL

SEQ ID NO: 21428 - protein, 354 aa, Glycine max
MYYKKRPQLVSMVEDFYRTHRSLAERYDQVTGIRQQKTGSPFSPIKNHQSEKLMSFTHDSYDSYSECFDVEESVESEVDDPEQEEEEVTKFDNCIEEEEVKIVAANDEVMGLRKEINRLGEENKDHKDQIKEKYNVYDEVMVLREEVEGLRKENRVQKDELNQKSIICGEVMILREEIERLKEENREQKDELNQKDIICGEVMMLREEIEGLRKENREQKGELNQKSIICSDVMMLREEIERLRKENREQNDELKQKGTIYGEVMMLRKEIERVSEENMVQKDHLMQKDLEKIEVIRHLSLAIDVLKQENVKMRSFIAKEFTNKWNNPFEFKKLMGSLSMKLFNGKNQPSIVAL

SEQ ID NO: 21429 - protein, 343 aa, Glycine max
MVEDFYRTHRSLAERYDQVTGIRQQKTGSPFSPIKNHQSEKLMSFTHDSYDSYSECFDVEESVESEVDDPEQEEEEVTKFDNCIEEEEVKIVAANDEVMGLRKEINRLGEENKDHKDQIKEKYNVYDEVMVLREEVEGLRKENRVQKDELNQKSIICGEVMILREEIERLKEENREQKDELNQKDIICGEVMMLREEIEGLRKENREQKGELNQKSIICSDVMMLREEIERLRKENREQNDELKQKGTIYGEVMMLRKEIERVSEENMVQKDHLMQKDLEKIEVIRHLSLAIDVLKQENVKMRSFIAKEFTNKWNNPFEFKKLMGSLSMKLFNGKNQPSIVAL

SEQ ID NO: 21430 - DNA, 1270 bp, Glycine max
ggactcagacccgttatcttcattctactcaatcgatcctcactttttcttgtcaaagcagggcatggcaaaagatgaaaagctgagccaatcgcatgaaacatggaagcaagagattgcaagaagccaatcccaagtggatgtattgcaaaaagaacttacagagttaaaggcttgcaatcagggttcagatggaaatgcaaaaaaggatttggaggttcttcggcgaagagtcaagactgcttctacattgttgacttacctgaagtcaaaagctaggctcatggctgttcctcatctagcccatacatcttgtggcatcaaacaattagagggggtatgctttgttgacaaaaatgggataccattatcaggttggtccagcaatgttgatttttcttcatttgatgacgcagatgaagaatcttggaatggaattagccaccagcatggttccttagatgaacaagatgcagcttacataggtgaaatgctcaagtctgtacagatggtcacagatgtgatggaagcccttgtcaaaagggttttactggctgagtcagaaactgcaatagaaaaggaaaaagtaagtataagtaaggaagaaattaagcggaagtctacccagttagagaacatgtctatgaaattacaggagatggagcattttgctttgaatacaaatagtatcctaactgagatgcggcagagagttgaggacttggtggaagaaacaaccagacagagagaacgggctgctgaaaatgaggaagaactttctagagtgaagcaggaatttgagtctctgaaatcatatgttagcggtctaataacagtaagagaaaccttgctttcttcagagaagcaatttcgaactattgagaggctgtttgaaaagctagttgcaaagactactcaattagagggtgagaaaatgcagaaagaggctgaagttcagaaacttatggaagagaatgttaggttgagtgcactgcttgacaagaaagaggctcaacttcttgcattgaatgaacaatgcaaggtaatggccttgaacgcttcaaacatgtaaatgccaaagttttatgctgaccactggaggcactaaaaagaaggtttatccataaacatcgttaatgccttaagttttattttctggtgccatttgttgttaaaattgaacgcagaaaatacttgtgcttggaatgtaaacttggagtgctctttcatggggaagaaaaaaaatgaggatggggtgtctctttgctgt

SEQ ID NO: 21431 - protein, 356 aa, Glycine max
DSDPLSSFYSIDPHFFLSKQGMAKDEKLSQSHETWKQEIARSQSQVDVLQKELTELKACNQGSDGNAKKDLEVLRRRVKTASTLLTYLKSKARLMAVPHLAHTSCGIKQLEGVCFVDKNGIPLSGWSSNVDFSSFDDADEESWNGISHQHGSLDEQDAAYIGEMLKSVQMVTDVMEALVKRVLLAESETAIEKEKVSISKEEIKRKSTQLENMSMKLQEMEHFALNTNSILTEMRQRVEDLVEETTRQRERAAENEEELSRVKQEFESLKSYVSGLITVRETLLSSEKQFRTIERLFEKLVAKTTQLEGEKMQKEAEVQKLMEENVRLSALLDKKEAQLLALNEQCKVMALNASNM

SEQ ID NO: 21432 - protein, 335 aa, Glycine max
MAKDEKLSQSHETWKQEIARSQSQVDVLQKELTELKACNQGSDGNAKKDLEVLRRRVKTASTLLTYLKSKARLMAVPHLAHTSCGIKQLEGVCFVDKNGIPLSGWSSNVDFSSFDDADEESWNGISHQHGSLDEQDAAYIGEMLKSVQMVTDVMEALVKRVLLAESETAIEKEKVSISKEEIKRKSTQLENMSMKLQEMEHFALNTNSILTEMRQRVEDLVEETTRQRERAAENEEELSRVKQEFESLKSYVSGLITVRETLLSSEKQFRTIERLFEKLVAKTTQLEGEKMQKEAEVQKLMEENVRLSALLDKKEAQLLALNEQCKVMALNASNM

SEQ ID NO: 21433 - protein, 262 aa, Glycine max
MAVPHLAHTSCGIKQLEGVCFVDKNGIPLSGWSSNVDFSSFDDADEESWNGISHQHGSLDEQDAAYIGEMLKSVQMVTDVMEALVKRVLLAESETAIEKEKVSISKEEIKRKSTQLENMSMKLQEMEHFALNTNSILTEMRQRVEDLVEETTRQRERAAENEEELSRVKQEFESLKSYVSGLITVRETLLSSEKQFRTIERLFEKLVAKTTQLEGEKMQKEAEVQKLMEENVRLSALLDKKEAQLLALNEQCKVMALNASNM

SEQ ID NO: 21434 - DNA, 1440 bp, Glycine max
aaattattcaaacagctcctgaagatgctcacagcaatggatcagaatctgagaaaaaaggtcaaaataatgatgacgacgatgaagatggtggtggtgttgaagacactgaagggtatgaagatcttggatcagatgcacaaaagagaaaactacaaggtactgatgaggttgattatgaggatggtcctgaagaggaaacacatgatggtgagctgtcagaggaaattgaaggtgatgaggatggcagtgatgttgatgccaatgagaattataacaatgtgacagatgctaataattctgaaggacttgaaaaaccctccaagtccaagactattgatgaaaaacaaaatttgaaacgagaaaagaaaaaatctgaaccaacaacaaaaaaatatgacagggcaatttttgtggaagccaaagggaagcattttgagatccactttagatttactggtgaacctcacattttgttaactcagattgctcagaggacagccaagaaggtttgcatccaaaattttggaaaggttggtgaatgtaaagctattacatgcaaagaaagtggagtaatctactatggtaaagatggcagaaaaaggattgagatttcagcctcagagaaagaacaaataccagcacttcagacatcaggggtacattttaaaacattttgggagttggaagatgatctggatgttaggtacatttattcaaacaacgtgcatgctatgctaaatgcttatggggtggaagcagccagggaaaccatcatcagggaagtgcagaatgttttcaagtcttatggtatatcagtaaatatccgacacttgacactcattgctgactttatgacgcacactggtagctatcgcccgatgaacagaacggggagcatagcagactctacatcccctttcatcaaaatgtgttttgagacggctggcaattttattgttgaagcagcttatcatgggcaagtggacaacttggagacaccatctgctagaatttgtcttggtttgccagtgaagatgggaactgggtgccatgacttgatacagaagctggagatatgatctggctggcttgttccttcagctttagacttttggccctcacatgcctggaggtcatgccaaattttgataccataattattgtgttgtgcgactaaatgccaaaatttcatggccatttttatctggcttcaaagtaattttgtttggatgtagtagtagcatagtttgaaatgccattcctcgtcccatatctatacataggtggttttcatggggccttgattttcccatttggtctgaagtgtatgttttcacctaatttaaatatttttgctccaaaataatggctcctatcccatcaagtgtggttggttatatcaatcacatgatgctattgggttttctttaaaaaaag

SEQ ID NO: 21435 - protein, 359 aa, Glycine max
IIQTAPEDAHSNGSESEKKGQNNDDDDEDGGGVEDTEGYEDLGSDAQKRKLQGTDEVDYEDGPEEETHDGELSEEIEGDEDGSDVDANENYNNVTDANNSEGLEKPSKSKTIDEKQNLKREKKKSEPTTKKYDRAIFVEAKGKHFEIHFRFTGEPHILLTQIAQRTAKKVCIQNFGKVGECKAITCKESGVIYYGKDGRKRIEISASEKEQIPALQTSGVHFKTFWELEDDLDVRYIYSNNVHAMLNAYGVEAARETIIREVQNVFKSYGISVNIRHLTLIADFMTHTGSYRPMNRTGSIADSTSPFIKMCFETAGNFIVEAAYHGQVDNLETPSARICLGLPVKMGTGCHDLIQKLEI

SEQ ID NO: 21436 - DNA, 1160 bp, Glycine max
agatcctaaaaaaactgacaacgcatctgatgcaaacaaccagcagttggctcttgccctgcctcatcaaatagctcctcagccgcagcctgccgcaccctcagctcaggctgctgcatcaaatgtgactcaagcccctcaacagcctccttattacattccacccacccctatgccgaattcagccttgccccagcacccccagaatcagtacttaccatccgatcaacaatatcgaacaccccaacttgtggctccacaaccaacaccgtctcaagtaaccccatccccacctgtgcaacaattttctcactatcagcagccacaacaacagcagcagccgccgcagcagcagcaacagcaatggtcacagcaggtgcagccttcacagccacccccaatgcaatctcaagtaagaccctcctctccaaatgtgtaccctccgtaccagccaaatcaagcaacaaacccatcacctgcagaaacactgccaaacagcatggccatgcaaatgccatactcgggagttccaccacagggatctaaccgtgccgatgccataccttatggatatggaggagctggaagaacagttccacagcagcctccaccccagcagatgaagagctcttttcctgcaccaccaggtgaaatgtatggacctaccgggtccctcccggcgcttcctccaccgagtagtgcatacatgatgtatgatggtgagggaggaagatcacatcatccaccccaacctcctcattttgctcaacctggatatcccccaacaagtgcttcccttcagaaccccccacaagggcataacctcatggtccgaaatccgaaccagtcacaattcgtccgcaaccatccctacaatgagttgattgagaaactggtgagcatgggattcaggggtgaccatgttgcaagtgtgatccagaggatggaggagagtggacaggccgttgatttcaactcagtacttgacaggttgagctctgtgggtcctcagagaggaggatggtcagggtgatgaagaacttttctgaacagttactttgtctaccaaactaaatactctgttcaaaccctcaaaatcattgcgtgttttattatgcatggaataaaagtttttatgtaatgtgacggtttaccatcgt

SEQ ID NO: 21437 - protein, 343 aa, Glycine max
DPKKTDNASDANNQQLALALPHQIAPQPQPAAPSAQAAASNVTQAPQQPPYYIPPTPMPNSALPQHPQNQYLPSDQQYRTPQLVAPQPTPSQVTPSPPVQQFSHYQQPQQQQQPPQQQQQQWSQQVQPSQPPPMQSQVRPSSPNVYPPYQPNQATNPSPAETLPNSMAMQMPYSGVPPQGSNRADAIPYGYGGAGRTVPQQPPPQQMKSSFPAPPGEMYGPTGSLPALPPPSSAYMMYDGEGGRSHHPPQPPHFAQPGYPPTSASLQNPPQGHNLMVRNPNQSQFVRNHPYNELIEKLVSMGFRGDHVASVIQRMEESGQAVDFNSVLDRLSSVGPQRGGWSG

SEQ ID NO: 21438 - protein, 286 aa, Glycine max
MPNSALPQHPQNQYLPSDQQYRTPQLVAPQPTPSQVTPSPPVQQFSHYQQPQQQQQPPQQQQQQWSQQVQPSQPPPMQSQVRPSSPNVYPPYQPNQATNPSPAETLPNSMAMQMPYSGVPPQGSNRADAIPYGYGGAGRTVPQQPPPQQMKSSFPAPPGEMYGPTGSLPALPPPSSAYMMYDGEGGRSHHPPQPPHFAQPGYPPTSASLQNPPQGHNLMVRNPNQSQFVRNHPYNELIEKLVSMGFRGDHVASVIQRMEESGQAVDFNSVLDRLSSVGPQRGGWSG

SEQ ID NO: 21439 - protein, 210 aa, Glycine max
MQSQVRPSSPNVYPPYQPNQATNPSPAETLPNSMAMQMPYSGVPPQGSNRADAIPYGYGGAGRTVPQQPPPQQMKSSFPAPPGEMYGPTGSLPALPPPSSAYMMYDGEGGRSHHPPQPPHFAQPGYPPTSASLQNPPQGHNLMVRNPNQSQFVRNHPYNELIEKLVSMGFRGDHVASVIQRMEESGQAVDFNSVLDRLSSVGPQRGGWSG

SEQ ID NO: 21440 - DNA, 1417 bp, Glycine max
aggattatgtttattgacttgttctttctttatttgtattttcaatgaatcagttattcatcaatttcatagactgttgtgtagaactggaatatcacctgtgcactgaaaatcttataccagattcttttgttaccgcagtggaggttgagattgatggctctgttactgtcgaaacagtaggaaatactgctataggtgaggttagtagcatagcggatgacaacagagaaggtggaagttctgttgaaccaaatgacaaccaagatcaacatgataatgggactcaagattcctctggagggatcactatcccatctgcaattcccacagtatcggttgtttcagttgaagagccctacgttggtcaggagtttgggtcagaagcagcagcacatgcattttataatgcttatgccacagaagttggatttatcgtacgtgtgagtaaactctcgcggtcaaggcgtgatggaactgctattggacgtactcttgtttgcaacaaagagggattcagaatggctgacaaacgtgaaaagattgtgaggcaaagggccgagaccagggttggttgcagggcaatgattatggtgaggaaacttagttctggcaaatgggttgttgcaaagtttgtgaaggaacacacacatcctttgacccctggcaaaggtagaagggatttctactatgaacaatatccggtcagtttcttttctttcactactgaacaactgtacatattatgttgtgtcaagtgttacttgtgcttaatagatcagttatgaaatctgagtgagatcatgatgctctcatattgtgctaaatattagagaatttcaggctatttcagaacgaagttttcaggataacattggttctcttaacattttccatctctattataatccataatccagagaatttttttcttctgcattacctcacatcatttgaaatttgctcaaattggtcttattacccttgcccttgtacaaattcctttactcataatgtaatgcaacttagaaagtgccacgtaagtaaagagcaacttgtgagattagtaaatattatattcctcactctttttcagttcctttttatgctattttcagactgaacaggataaaattcgggaactatctcaacagttggcaactgagaaaaagcgatctgcggcctataaaagacatcttgaattgatatttgagcaaattgaagagcagaatgataacctttcaaagaaaatacagcacatagtagactgcgtgaaggagatggaagccaaagaagaacatagtagacagtgtgaaggagatggaagccaaagaacaacagagtagactcagatagattcaacttacaacgtgatacttttagttggtagaggaaactagttcagtcaatgtagagg

SEQ ID NO: 21441 - protein, 247 aa, Glycine max
MNQLFINFIDCCVELEYHLCTENLIPDSFVTAVEVEIDGSVTVETVGNTAIGEVSSIADDNREGGSSVEPNDNQDQHDNGTQDSSGGITIPSAIPTVSVVSVEEPYVGQEFGSEAAAHAFYNAYATEVGFIVRVSKLSRSRRDGTAIGRTLVCNKEGFRMADKREKIVRQRAETRVGCRAMIMVRKLSSGKWVVAKFVKEHTHPLTPGKGRRDFYYEQYPVSFFSFTTEQLYILCCVKCYLCLIDQL

SEQ ID NO: 21442 - DNA, 1845 bp, Glycine max
aacaacccactggaagcctttctagtggaagatttacatccaacaatctcccagttgcattgtctcagctatctcatggaagctcccttggacattcaggagtcaccaatagaggaggtataagtgttgtaggaaaccctggatttagtagtagcacaaatggagttggtggttctattccggggattcttcctacatctgctgcagttggtaaccgaaatgctgttccaggattgggagtaaacccaattttgggaaatgcaggtcctcgaatcacaagttctgtgggaaacatggttggaggagggaatattggaaggactggtggaggattgtctgtgcctggtctctcgtctcgtctaaatttgggtgcaaacagtggatccggtggtttaggtatgcaaggacagaatcgattaatgagtggtgtgcttccacaagggtctccgcaggtaatttcaatgctaggaaattcttatcctagtgggggtccactttcccaaagccatgttcaagcagtgagtaacttgaactctatggggatgttgaatgatatgaattctaatgacagttcaccttttgacatcaatgacttccctcaactgacaactcgtcctagttctgctggagggcctcaaggacagttgggttctttacgaaaacagggtcttggtgttagtcccattgttcaacaaaaccaagagtttagcattcaaaatgaagatttcccagctttaccaggattcaaaggtggtaatgcagattatgctatggatatgcaccagaaagaacaacttcatgacaatactgtgccaatgatgcaatctcagcatttctctatgggaaggtcagctggtttcagcttagggggtacatattcatcacatcgagcacaacagcaacagcatgctccttcagtcagtagtggcaatgtctctttttcatctgttaacaaccaggatattctccatctacatggatcagatattttcccatcttcacattcgacctatcattcacagaccagtggacctcctggcattggattaaggccgctaaattctccaaatacagtttctggtatgggttcatatgaccagctcatccagcaatatcaacagcaccaaaatcagtcccagttccgccttcaaatgtcagctgtaaatcagtcttttagggatcagggcatgaagtctattcaaactgcacaaccagcaccagatccatttggtttgcttggcctgttaagtgtgatcaggatgagtgatcctgacctgacatctcttgctcttggaattgatcttactacactggggttaaatttgaattcatcagaaaatcttcacaagacctttgggtctccatggactgatgaatcagctaagggagatccagagtttacagtgccacaatgttattttgccaaacagccacctgctctacatcaaggttatttttccaagttttcggtggaaacattgttttacatattttatagcatgcccaaagatgaagcccaattatatgccgccagtgagctttacaacagaggttggttttatcacaaagaacatcgtttatggttaataagagttcccaacatggagccgctggttaaaacaaacacatatgagagaggatcttatcactgtttcgatccaagcatatttgaaaccgtccgcaaggataattttgttctacattatgaaatgttggaaaagagaccacatctgcctcaactttgaggaggaaacaaaaacctttttactgtaaagtttcgattatggatttaatgccttggagtcattttgcagtattagtattcttcaatttggcgtttcttcc

SEQ ID NO: 21443 - protein, 580 aa, Glycine max
QPTGSLSSGRFTSNNLPVALSQLSHGSSLGHSGVTNRGGISVVGNPGFSSSTNGVGGSIPGILPTSAAVGNRNAVPGLGVNPILGNAGPRITSSVGNMVGGGNIGRTGGGLSVPGLSSRLNLGANSGSGGLGMQGQNRLMSGVLPQGSPQVISMLGNSYPSGGPLSQSHVQAVSNLNSMGMLNDMNSNDSSPFDINDFPQLTTRPSSAGGPQGQLGSLRKQGLGVSPIVQQNQEFSIQNEDFPALPGFKGGNADYAMDMHQKEQLHDNTVPMMQSQHFSMGRSAGFSLGGTYSSHRAQQQQHAPSVSSGNVSFSSVNNQDILHLHGSDIFPSSHSTYHSQTSGPPGIGLRPLNSPNTVSGMGSYDQLIQQYQQHQNQSQFRLQMSAVNQSFRDQGMKSIQTAQPAPDPFGLLGLLSVIRMSDPDLTSLALGIDLTTLGLNLNSSENLHKTFGSPWTDESAKGDPEFTVPQCYFAKQPPALHQGYFSKFSVETLFYIFYSMPKDEAQLYAASELYNRGWFYHKEHRLWLIRVPNMEPLVKTNTYERGSYHCFDPSIFETVRKDNFVLHYEMLEKRPHLPQL

SEQ ID NO: 21444 - protein, 483 aa, Glycine max
MVGGGNIGRTGGGLSVPGLSSRLNLGANSGSGGLGMQGQNRLMSGVLPQGSPQVISMLGNSYPSGGPLSQSHVQAVSNLNSMGMLNDMNSNDSSPFDINDFPQLTTRPSSAGGPQGQLGSLRKQGLGVSPIVQQNQEFSIQNEDFPALPGFKGGNADYAMDMHQKEQLHDNTVPMMQSQHFSMGRSAGFSLGGTYSSHRAQQQQHAPSVSSGNVSFSSVNNQDILHLHGSDIFPSSHSTYHSQTSGPPGIGLRPLNSPNTVSGMGSYDQLIQQYQQHQNQSQFRLQMSAVNQSFRDQGMKSIQTAQPAPDPFGLLGLLSVIRMSDPDLTSLALGIDLTTLGLNLNSSENLHKTFGSPWTDESAKGDPEFTVPQCYFAKQPPALHQGYFSKFSVETLFYIFYSMPKDEAQLYAASELYNRGWFYHKEHRLWLIRVPNMEPLVKTNTYERGSYHCFDPSIFETVRKDNFVLHYEMLEKRPHLPQL

SEQ ID NO: 21445 - protein, 448 aa, Glycine max
MQGQNRLMSGVLPQGSPQVISMLGNSYPSGGPLSQSHVQAVSNLNSMGMLNDMNSNDSSPFDINDFPQLTTRPSSAGGPQGQLGSLRKQGLGVSPIVQQNQEFSIQNEDFPALPGFKGGNADYAMDMHQKEQLHDNTVPMMQSQHFSMGRSAGFSLGGTYSSHRAQQQQHAPSVSSGNVSFSSVNNQDILHLHGSDIFPSSHSTYHSQTSGPPGIGLRPLNSPNTVSGMGSYDQLIQQYQQHQNQSQFRLQMSAVNQSFRDQGMKSIQTAQPAPDPFGLLGLLSVIRMSDPDLTSLALGIDLTTLGLNLNSSENLHKTFGSPWTDESAKGDPEFTVPQCYFAKQPPALHQGYFSKFSVETLFYIFYSMPKDEAQLYAASELYNRGWFYHKEHRLWLIRVPNMEPLVKTNTYERGSYHCFDPSIFETVRKDNFVLHYEMLEKRPHLPQL

SEQ ID NO: 21446 - DNA, 2168 bp, Glycine max
gatcagttttcaaatcttggattcgattccatcactgatatttctcttctctctctctttctctgccgaatatggcgccgcctgcgccagcagttgaaggcggccaggcgccgcaagggcggcagcaacagccgcaaggagggtttggcctctccggaatcatacgcatggcagttttctggtacttcgcctccaaattcttttcccccaaaaaacctaccgaaccttccgctctcatctccaatctctatcagaaggcacagcctctggatatgtggctttatctttccgagtacgagaagttcaatgactttggtagtgaaagttctcttgtatggcatgaaaccaatattccgtatgccgtttggggacctgagagtaccaggactctaactttgaagtatcatccgtctgagtctttgaagcataatgggagtctatatgctcatgttttctttgcacactctggcttttcgcctgacccaagtgatccagaataccagcctcaagcagcatttggaaggacgcatcctgttgtgatgtacttgcccaagtcacaagcagataaaaagaaaagtctgttgggaggttcaccagattctagtgaggctcaagtgacatccaaggtggttgatgaatctgaagatgatgattctaatgatgatggtcctgtggagtgggcttcatattggaaaccaaatataacaataaacttggttgctgacttcactcagtacccaaaaacaggtgtagcaccaaacattgctccatacttgaacatcgatccttttactgggaactactatccaattgtttatttcaatgagttctggttactcagggataagctgatacctttaaacgagacagtgactgaattatcacttaacctggaagttggtcccattagtatgacaaagtggcagttattcctgcagattgaccagtccttccagattcaccgtagttattgaagcatgcttgaaggcgaggctgatgaactcaagagggtattcttggaagggaatccttacctcctggcaattaccatggttgtttctcttcttcattcagtctttgacttcttggctttcaagaatgacatccaattttggaacaaaaataaatctatggaaggactctctgcaaagaccgttgttgtgagctttgcttgtcagcttatcatcttcctttatctacttgacaatgacacctcttggatgattcttgcaagctctggaattggttgtgttattgagttttggaaaattggtaaagccatgcgcatagagattgataggacaggaaggatacctatgttgaagctccgcgatcgagaatcatacgtacggaataagacaaaggaatatgatgatattgctatgaagtatttgttctatgttttatttctccttgttgctggcttttctgtttactcactgatgtatgagcgtcacaagagctggtattcttggattttgtcttcgctcacaagttgtgtatacatgtttggttttattatgatgtgccctcaattgttcatcaactacaagctcaaatctgttgctcatctaccttggaggcaaatgacttacaagtttctcaacaccataattgatgacctttttgcctttgtcattaaaatgccaacactccatcggctttctgtcttccgtgatgatcttatctttgtcatatacttataccagaggtggatttataaagtggacaagaaacgtgttaacgaatttggttttggaggtgaggatgatcaggctgtggcagagacagacgctgcaaaggaagaagagaagaaaactaattgatttggttttctctcaacaatttgagaaaattttacagtagatacttaatactgtagaattcaacggggattgatttgtttttctccccttttgttacacatttgcaattagatttttgttgaaagaaagctctagtttggccctttctactggaatttttactagtaccgaaggatggagggaatttaactactgagaccttcatggttgactgtaagggtcataacagctttttagttgcccttctgtagtttttctttaatctcaaatgtcttttagtttgtgacagataacccttttatgtattattttcttccactcatgtatttttcactaatttat

SEQ ID NO: 21447 - protein, 300 aa, Glycine max
MAPPAPAVEGGQAPQGRQQQPQGGFGLSGIIRMAVFWYFASKFFSPKKPTEPSALISNLYQKAQPLDMWLYLSEYEKFNDFGSESSLVWHETNIPYAVWGPESTRTLTLKYHPSESLKHNGSLYAHVFFAHSGFSPDPSDPEYQPQAAFGRTHPVVMYLPKSQADKKKSLLGGSPDSSEAQVTSKVVDESEDDDSNDDGPVEWASYWKPNITINLVADFTQYPKTGVAPNIAPYLNIDPFTGNYYPIVYFNEFWLLRDKLIPLNETVTELSLNLEVGPISMTKWQLFLQIDQSFQIHRSY

SEQ ID NO: 21448 - protein, 282 aa, Glycine max
MLEGEADELKRVFLEGNPYLLAITMVVSLLHSVFDFLAFKNDIQFWNKNKSMEGLSAKTVVVSFACQLIIFLYLLDNDTSWMILASSGIGCVIEFWKIGKAMRIEIDRTGRIPMLKLRDRESYVRNKTKEYDDIAMKYLFYVLFLLVAGFSVYSLMYERHKSWYSWILSSLTSCVYMFGFIMMCPQLFINYKLKSVAHLPWRQMTYKFLNTIIDDLFAFVIKMPTLHRLSVFRDDLIFVIYLYQRWIYKVDKKRVNEFGFGGEDDQAVAETDAAKEEEKKTN

SEQ ID NO: 21449 - protein, 268 aa, Glycine max
MAVFWYFASKFFSPKKPTEPSALISNLYQKAQPLDMWLYLSEYEKFNDFGSESSLVWHETNIPYAVWGPESTRTLTLKYHPSESLKHNGSLYAHVFFAHSGFSPDPSDPEYQPQAAFGRTHPVVMYLPKSQADKKKSLLGGSPDSSEAQVTSKVVDESEDDDSNDDGPVEWASYWKPNITINLVADFTQYPKTGVAPNIAPYLNIDPFTGNYYPIVYFNEFWLLRDKLIPLNETVTELSLNLEVGPISMTKWQLFLQIDQSFQIHRSY

SEQ ID NO: 21450 - DNA, 1757 bp, Glycine max
tattttcatcattcattcaaattctgcttccaatcatatttaaatagaaacacacactcctcatcccaaaccctacattttcttcaagcgctgcggtggatcagattccccattaaggatggaggatggtgagaaacccagccatggcattgctgatatggatgttgttgatgccactttgcaaagccatcgtgtggcttctgatcaagtaatggtcctacagggtcatgatatcaaaaacggcgattctgatcctgctcacgtgccagcaaccagtgcaattagcaataatcagtttgaacttgaagatgctaagactgtttcgcatcaggaactgatcactccaaagcctaaagaaaagaatgtcagagaaatgaagaatgtgctaaatgataccgagatgactgattatgatgagtatggcacgcctctggatcgagaaacatttatgaaagagcttgagactttctacagagagcggtccttggaatttaagcctcctaagttttatggagagccactcaattgtcttaagttgtggagagctgttatcagactaggcggctatgatgtggtaactggatccaagttgtggcggcaagtaggagagtctttccaccccccaaagacctgcactacagtctcatggacatttagaattttttatgagaaggcacttttagagtatgaaaagcacaagagagagattggggagctacagctccctgttggaccattccatcaatcttcaaatgtggaaaaagagcctgctgtttaccagactccaggctcaggtagagcaagaagggatgcagcagcacgtgcaatgcaaggttggcatgctcagcgccttcttggatacggtgaggttgctgagccagttattaaggacaagaacttcagttccacgccaaagcgtgaaaagaacctaaaaagtattggtatgaataataaacagaggacactgtctggtctggagcatgctgaaaaatctgcaaatattgaaggagatcggcaattggtcacagcagtagtggatgttggacccccagctgactgggtgaagatcaatgtgcgtgaaagtaaggattgttttgaggtatatgccctagttcctgggctccttcgtgaggaggtgcgagtccaatcagatccagttggacgtcttgttataactggtgtgccagaacatatagacaatccatggggaattacccccttcaaaaaggttgtgaacttacctgcaagaattgattcgcttcagacatctgctgttgttagtttgcatggtcgactatttgtacgcgttccttttgagcaaggagctgtgtgagatgtgaatgttcctcccttgaatcattgatttatgaaatctccccttcatattattagtcgaaactaccaccaactttaacatttttttagggaaaaatacccaatttaactaatacaatatgcttgaattttcccatcaaacgcctttttatccatatgcgaaagaaatggacttggtgttctggtgcatcattaacaagcaagagtccgagaagtggagtggtggaggactcgttcaaaagctcgttgctttcgaaaatgctaaatgaagatgttagtctggcaaaaaaaaaaaaacactattgtacatcgtcttccaattaagtgtggatgtgaacagaaaatattttaatcattactccaatccaaatgtgaacagaaaatattttaatcgtatatatgattttggttccctttccagt

SEQ ID NO: 21451 - protein, 404 aa, Glycine max
MEDGEKPSHGIADMDVVDATLQSHRVASDQVMVLQGHDIKNGDSDPAHVPATSAISNNQFELEDAKTVSHQELITPKPKEKNVREMKNVLNDTEMTDYDEYGTPLDRETFMKELETFYRERSLEFKPPKFYGEPLNCLKLWRAVIRLGGYDVVTGSKLWRQVGESFHPPKTCTTVSWTFRIFYEKALLEYEKHKREIGELQLPVGPFHQSSNVEKEPAVYQTPGSGRARRDAAARAMQGWHAQRLLGYGEVAEPVIKDKNFSSTPKREKNLKSIGMNNKQRTLSGLEHAEKSANIEGDRQLVTAVVDVGPPADWVKINVRESKDCFEVYALVPGLLREEVRVQSDPVGRLVITGVPEHIDNPWGITPFKKVVNLPARIDSLQTSAVVSLHGRLFVRVPFEQGAV

SEQ ID NO: 21452 - protein, 391 aa, Glycine max
MDVVDATLQSHRVASDQVMVLQGHDIKNGDSDPAHVPATSAISNNQFELEDAKTVSHQELITPKPKEKNVREMKNVLNDTEMTDYDEYGTPLDRETFMKELETFYRERSLEFKPPKFYGEPLNCLKLWRAVIRLGGYDVVTGSKLWRQVGESFHPPKTCTTVSWTFRIFYEKALLEYEKHKREIGELQLPVGPFHQSSNVEKEPAVYQTPGSGRARRDAAARAMQGWHAQRLLGYGEVAEPVIKDKNFSSTPKREKNLKSIGMNNKQRTLSGLEHAEKSANIEGDRQLVTAVVDVGPPADWVKINVRESKDCFEVYALVPGLLREEVRVQSDPVGRLVITGVPEHIDNPWGITPFKKVVNLPARIDSLQTSAVVSLHGRLFVRVPFEQGAV

SEQ ID NO: 21453 - protein, 373 aa, Glycine max
MVLQGHDIKNGDSDPAHVPATSAISNNQFELEDAKTVSHQELITPKPKEKNVREMKNVLNDTEMTDYDEYGTPLDRETFMKELETFYRERSLEFKPPKFYGEPLNCLKLWRAVIRLGGYDVVTGSKLWRQVGESFHPPKTCTTVSWTFRIFYEKALLEYEKHKREIGELQLPVGPFHQSSNVEKEPAVYQTPGSGRARRDAAARAMQGWHAQRLLGYGEVAEPVIKDKNFSSTPKREKNLKSIGMNNKQRTLSGLEHAEKSANIEGDRQLVTAVVDVGPPADWVKINVRESKDCFEVYALVPGLLREEVRVQSDPVGRLVITGVPEHIDNPWGITPFKKVVNLPARIDSLQTSAVVSLHGRLFVRVPFEQGAV

SEQ ID NO: 21454 - DNA, 1701 bp, Glycine max
atgataagtggtatggaacagaccagttttctatttcagcaagcttctaaggttggtttttctcatacaaacatccttagaagcattattcaccatgcttgcttgcgatttccaaatcttgcatcagttagtggtatatcaggtcagcttccaagcaggtcaaaatccttacaacgtaacaagtctttttctcgccgtgaaggaactcgaaaagtgtttgtcatttttggaggtaacacatcagaacggcaagtatctcttatgagtggtacgaatgtctggctcaatttgctagccttccatgatcttgaggtaactccatgtttgctttcccctacaagtgagtgtgcatctagcattgatatgggaaaaaaggctgatgatgtaatgaatagaacagtttggtcattgccttattctcttgtgctaagacatactactgaggaggtactagatgcatgcatggaagcaattgagccggaacatgctgcaataacatctgaactccggaagaaagtaatgaatgatcttatggagggtttgaaggaccacaattggtttaccgggtttgatattgctgatgatctgcctgtgaaattttcattaaggcagtggatcaagctagccaaggaagtccaagcaacagtttttattgcagtgcatggaggcattggagaagatggtacacttcaatctttgctggatgctgaaggagtgccctacacaggtcctggtgcaatggcatcaaagatttgtatggacaaagttgcaacctctgtggctttaaaacatcttgcaaattcgggagttcttaccataaataaggatgtcaggcaaaaagatgatctctctaataagcccataaatgatacatggcatgacctcaccagaaagctacagtgccaaacattatgtgtcaaaccagcaaaagatggatgctcaactggggtagcaagactatgctgtcccgaggaccttgcaatatatgtcaaagctctggaggactgtctactaagaattcctccaaattgcttatcaaaggcacatggtatgattgagatgccaaaccctcctccagaacacttaatcttcgaacctttcatagagacggatgaaataattgtgacatccaaatttgaggatgcaactggtcatggcctcacttggaaaggacacagcagatgggtggaaataactgttggcgtcataggaaaacgtggatcaatgcactcgctaagtcctagtgtaactgtcaaggaatctggtgatattttgtcacttgaggagaagttccaaggtgggactggcatcaatctgactccgcctcccttgtcaattatgagtgagaatgctttgaagagatgtaaacagcatattgaactgattgcaaacactcttcaattggaaggattttcacgcattgatgcatttgtaaatgttgacagtggagaggttttgattatagaggtaaatactgtgcctggaatgacaccttccactgttctgattcatcaggcactagtagagcaaccaccgttgtatcctcatcaattcttccgtaagcttcttgatttggcatctgaaaggtccatgtaaatctatttaatagaatgtttacattgtctatcaaatgttgttaccacttgaagttattgtgaaactttaatttcctatctggaacttgcgtccctttataatgtg

SEQ ID NO: 21455 - protein, 531 aa, Glycine max
MISGMEQTSFLFQQASKVGFSHTNILRSIIHHACLRFPNLASVSGISGQLPSRSKSLQRNKSFSRREGTRKVFVIFGGNTSERQVSLMSGTNVWLNLLAFHDLEVTPCLLSPTSECASSIDMGKKADDVMNRTVWSLPYSLVLRHTTEEVLDACMEAIEPEHAAITSELRKKVMNDLMEGLKDHNWFTGFDIADDLPVKFSLRQWIKLAKEVQATVFIAVHGGIGEDGTLQSLLDAEGVPYTGPGAMASKICMDKVATSVALKHLANSGVLTINKDVRQKDDLSNKPINDTWHDLTRKLQCQTLCVKPAKDGCSTGVARLCCPEDLAIYVKALEDCLLRIPPNCLSKAHGMIEMPNPPPEHLIFEPFIETDEIIVTSKFEDATGHGLTWKGHSRWVEITVGVIGKRGSMHSLSPSVTVKESGDILSLEEKFQGGTGINLTPPPLSIMSENALKRCKQHIELIANTLQLEGFSRIDAFVNVDSGEVLIIEVNTVPGMTPSTVLIHQALVEQPPLYPHQFFRKLLDLASERSM

SEQ ID NO: 21456 - protein, 527 aa, Glycine max
MEQTSFLFQQASKVGFSHTNILRSIIHHACLRFPNLASVSGISGQLPSRSKSLQRNKSFSRREGTRKVFVIFGGNTSERQVSLMSGTNVWLNLLAFHDLEVTPCLLSPTSECASSIDMGKKADDVMNRTVWSLPYSLVLRHTTEEVLDACMEAIEPEHAAITSELRKKVMNDLMEGLKDHNWFTGFDIADDLPVKFSLRQWIKLAKEVQATVFIAVHGGIGEDGTLQSLLDAEGVPYTGPGAMASKICMDKVATSVALKHLANSGVLTINKDVRQKDDLSNKPINDTWHDLTRKLQCQTLCVKPAKDGCSTGVARLCCPEDLAIYVKALEDCLLRIPPNCLSKAHGMIEMPNPPPEHLIFEPFIETDEIIVTSKFEDATGHGLTWKGHSRWVEITVGVIGKRGSMHSLSPSVTVKESGDILSLEEKFQGGTGINLTPPPLSIMSENALKRCKQHIELIANTLQLEGFSRIDAFVNVDSGEVLIIEVNTVPGMTPSTVLIHQALVEQPPLYPHQFFRKLLDLASERSM

SEQ ID NO: 21457 - protein, 444 aa, Glycine max
MSGTNVWLNLLAFHDLEVTPCLLSPTSECASSIDMGKKADDVMNRTVWSLPYSLVLRHTTEEVLDACMEAIEPEHAAITSELRKKVMNDLMEGLKDHNWFTGFDIADDLPVKFSLRQWIKLAKEVQATVFIAVHGGIGEDGTLQSLLDAEGVPYTGPGAMASKICMDKVATSVALKHLANSGVLTINKDVRQKDDLSNKPINDTWHDLTRKLQCQTLCVKPAKDGCSTGVARLCCPEDLAIYVKALEDCLLRIPPNCLSKAHGMIEMPNPPPEHLIFEPFIETDEIIVTSKFEDATGHGLTWKGHSRWVEITVGVIGKRGSMHSLSPSVTVKESGDILSLEEKFQGGTGINLTPPPLSIMSENALKRCKQHIELIANTLQLEGFSRIDAFVNVDSGEVLIIEVNTVPGMTPSTVLIHQALVEQPPLYPHQFFRKLLDLASERSM

SEQ ID NO: 21458 - DNA, 1372 bp, Glycine max
ttattgaatcttttcagtccccttttgaagagataaagtctgctgcctcatacgctcttggtaacattgctattggtaatcttccaaaatacttgccatttatcttggatcagattgataatcagcagaagaaacaatatctcttgcttcattctttgaaagaggtaattgtcagacaatctgtggataaagcagagtttcaagagtccagtgtggagaaaatacttaatttactcttcaaccactgtgaaagtgaggaagagggagtgcgcaatgtagtggcggagtgtttgggcaaaattgctcttattgagcctgtaaaactcatccctgcactcaaggtaagaacaaccagcccagctgcatttactcgagctactgttgttattgctgtgaagtactctatagttgagcgtcaagagaagatagatgagattatataccctgaaatatcttcatttctgatgcttatcaaggataatgataggcatgttaggcgagctgctgttttggctctcagcacatttgcacacaataagccaaatctcatcaaggggcttcttcctgatctgctgcctcttctatatgatcaaactattgttaagcaagagctcataaggacagttgatcttggtcctttcaagcatattgtggatgatggacttgaattgaggaaggcggcttttgaatgtgtagacacattactggatagttgccttgatcaagtgaacccgtcatcattcattgttccttatcttaaatctggtttggatgatcattatgatgttaaaatgccatgccacctgatactctcgaaactagctgacaagtgtccttctgcagtcttggcagtgttagattcattggttgatcctctccagaagactattaattttaagccaaagcaagatgctgttaagcaagaagtagatcgtaatgaagacatgattcgaagcgcactccgagctattgcatccttgaatcgcataagtggaggagattgcagtgtcaagttcaagaatcttatgaacgaaatatcaaaatcacaaactctctgggataaatattattcaatccgcaatgaatgattcacatacagtcttaatttttctctctatcatagttctggaatgagtgttcaaatattacttgccgagacatctccgctagttgatgcaaggggtctggaaaactagttaatttcattataacataggagatttagattcaagcaatcggaatactagtggtgatttcttgtataggatgaaagattttgcctttttctgtagctacattatctcattggtggccccctatcgtccagggaaaaaattggaaccaaaaaagaaaagaaattaagatactaagc

SEQ ID NO: 21459 - protein, 361 aa, Glycine max
IESFQSPFEEIKSAASYALGNIAIGNLPKYLPFILDQIDNQQKKQYLLLHSLKEVIVRQSVDKAEFQESSVEKILNLLFNHCESEEEGVRNVVAECLGKIALIEPVKLIPALKVRTTSPAAFTRATVVIAVKYSIVERQEKIDEIIYPEISSFLMLIKDNDRHVRRAAVLALSTFAHNKPNLIKGLLPDLLPLLYDQTIVKQELIRTVDLGPFKHIVDDGLELRKAAFECVDTLLDSCLDQVNPSSFIVPYLKSGLDDHYDVKMPCHLILSKLADKCPSAVLAVLDSLVDPLQKTINFKPKQDAVKQEVDRNEDMIRSALRAIASLNRISGGDCSVKFKNLMNEISKSQTLWDKYYSIRNE

SEQ ID NO: 21460 - protein, 207 aa, Glycine max
MLIKDNDRHVRRAAVLALSTFAHNKPNLIKGLLPDLLPLLYDQTIVKQELIRTVDLGPFKHIVDDGLELRKAAFECVDTLLDSCLDQVNPSSFIVPYLKSGLDDHYDVKMPCHLILSKLADKCPSAVLAVLDSLVDPLQKTINFKPKQDAVKQEVDRNEDMIRSALRAIASLNRISGGDCSVKFKNLMNEISKSQTLWDKYYSIRNE

SEQ ID NO: 21461 - DNA, 1033 bp, Glycine max
aaaaatcattcattcattgaatcccccaaaccgccatttcctttgggtttatggagtgagcgtggaagaggaaagagcaagcagcaacagctcgtggcggttccgattatttattaagatcaatgttgcatgcagtatctgcccctagcttttgtttaagctatcccgggaaccttcattatcctccttcttcatttcaaaaaacatgtttttctgttcgttgttcggtttcacagacaaaaaatggagctaaagtggaatatactccttggctcattgttggcttgggcaatcctggtaacaaataccatggcaccaggcacaatgttggatttgaaataattgatagcctttctcgagcagaagggattcagatgaacacaatacagtcaaaggccctcattggaataggttctattggtgaagtaccgattttgctggcaaagccccaaacatacatgaatttcagtggggaatcggttgggccacttgctgcatattatcaagtacccttgcgtcatattctactagtttttgatgagacaagccttccaaatggtgttttaaggcttcaacctaaaggcggacatggacatcacaatggattgaaaaatgtaatgggccatttggatggttgcagtgcttttcctcgacttgcagtcggaattggaaatcctcctggaactatggatttaagagcttatcttctacaaaaattcagtgtagaggaacgaaagcagattgacgcttcattggagcaagcagttgcagcagtaaggaccgtagtactcaatggttttgaccagcatgtcaatagattcaatttaggacaaaaatacaagtaccataaagtttaaaatgaaccgccaagatgaaattggtggttacattgttgtgtatgttagcagatagcagttatacttcacaaacttgtcatgactagtgcatttttttgtaaagcacaccagtggtcatattctagctctggcagatagttgtttcattgtgagaaatactagttgttgaattgttg

SEQ ID NO: 21462 - protein, 244 aa, Glycine max
MLHAVSAPSFCLSYPGNLHYPPSSFQKTCFSVRCSVSQTKNGAKVEYTPWLIVGLGNPGNKYHGTRHNVGFEIIDSLSRAEGIQMNTIQSKALIGIGSIGEVPILLAKPQTYMNFSGESVGPLAAYYQVPLRHILLVFDETSLPNGVLRLQPKGGHGHHNGLKNVMGHLDGCSAFPRLAVGIGNPPGTMDLRAYLLQKFSVEERKQIDASLEQAVAAVRTVVLNGFDQHVNRFNLGQKYKYHKV

SEQ ID NO: 21463 - protein, 160 aa, Glycine max
MNTIQSKALIGIGSIGEVPILLAKPQTYMNFSGESVGPLAAYYQVPLRHILLVFDETSLPNGVLRLQPKGGHGHHNGLKNVMGHLDGCSAFPRLAVGIGNPPGTMDLRAYLLQKFSVEERKQIDASLEQAVAAVRTVVLNGFDQHVNRFNLGQKYKYHKV

SEQ ID NO: 21464 - protein, 132 aa, Glycine max
MNFSGESVGPLAAYYQVPLRHILLVFDETSLPNGVLRLQPKGGHGHHNGLKNVMGHLDGCSAFPRLAVGIGNPPGTMDLRAYLLQKFSVEERKQIDASLEQAVAAVRTVVLNGFDQHVNRFNLGQKYKYHKV

SEQ ID NO: 21465 - DNA, 1521 bp, Glycine max
aagtgataacaaccttgagcctccattaccaaaatttcataatgacccgaaggttgtcactgtgggtaaccctcttcttcctaaccaaactggaggaagtcctagtcctatgcctattaacaacccaccttcaccacagaatccatcacatcctccatcctctcatgagtcacctgttccagatcagagttcaagatcaaatcaatccaaaccaaatgacttgaaaatattcaaagcagtaggaattgtggctggagttgctgtgtttgcagttgtagctcttttggttgtttatcccttcttatgttgcaggaagaacaaaaaagcctccttggatgctccaagttccatcatggttcacccacgcgatccatctgattcggataacatggttaaaattacggtttcaaacgccactggaagtttgtcaacaaagactgggacaagttctcagagtaacattagtggtgaaactcaaaactctcacataattgaggatggaaaccttgtcatttctatacaagtactacgcaaggttaccaatgattttgcttcagaaaatgaactaggccgtggagggtttgggactgtttacaagggagaactagaagatgggacaaaaatagcagtgaagagaatggagcatggggttattagcagtaaggcattggaggagtttcaagctgaaatagctgttctttccaaggtccggcaccggcatctggtatccttgttggggtattccattgatggcaatgaaagacttttggtttatgaatatatgtctcttggagctctaagccagcatctttttcattggaaaagcttgaagttggagcctttgtcttggtcacagaggcttgcaatagcactagatgttgctagagggatggagtaccttcacagtcttgcccgtcagacctttattcatcgagatcttaaatcttctaatatcttattgggtgatgattttcgggctaaaatttcagactttggtttggtgaagcatgccccagatagtgagaagtctgtagcaaccaagcttgctgggacatttggataccttgcccctgaatatgcagtgatggggaaaatcaccacaaaagttgatgtgttcagctacggtgtggtgttgatggaacttctgactggacttgtggcacttgacgagagtcggccagaggaaagccggtacttggccgaatggttttggcgaattaaatcaagcaaggagaagcttatggctgctattgatccagttctggaagcatctgaagaaacttttgagagcataaccattgtagctgaacttgctggacactgtactgcaagggaagcacatcataggccagatatgggtcatgcagtcaatgtcttggcagcattagtggaaaaatggaaaccagttgatgatgaattagattgctactctggcattgactacacaagaccacttcctcaaatgttgaagatttggaaggaagcagaaagtggagagtttagctatgcttcttgtctcga

SEQ ID NO: 21466 - protein, 506 aa, Glycine max
SDNNLEPPLPKFHNDPKVVTVGNPLLPNQTGGSPSPMPINNPPSPQNPSHPPSSHESPVPDQSSRSNQSKPNDLKIFKAVGIVAGVAVFAVVALLVVYPFLCCRKNKKASLDAPSSIMVHPRDPSDSDNMVKITVSNATGSLSTKTGTSSQSNISGETQNSHIIEDGNLVISIQVLRKVTNDFASENELGRGGFGTVYKGELEDGTKIAVKRMEHGVISSKALEEFQAEIAVLSKVRHRHLVSLLGYSIDGNERLLVYEYMSLGALSQHLFHWKSLKLEPLSWSQRLAIALDVARGMEYLHSLARQTFIHRDLKSSNILLGDDFRAKISDFGLVKHAPDSEKSVATKLAGTFGYLAPEYAVMGKITTKVDVFSYGVVLMELLTGLVALDESRPEESRYLAEWFWRIKSSKEKLMAAIDPVLEASEETFESITIVAELAGHCTAREAHHRPDMGHAVNVLAALVEKWKPVDDELDCYSGIDYTRPLPQMLKIWKEAESGEFSYASCL

SEQ ID NO: 21467 - protein, 470 aa, Glycine max
MPINNPPSPQNPSHPPSSHESPVPDQSSRSNQSKPNDLKIFKAVGIVAGVAVFAVVALLVVYPFLCCRKNKKASLDAPSSIMVHPRDPSDSDNMVKITVSNATGSLSTKTGTSSQSNISGETQNSHIIEDGNLVISIQVLRKVTNDFASENELGRGGFGTVYKGELEDGTKIAVKRMEHGVISSKALEEFQAEIAVLSKVRHRHLVSLLGYSIDGNERLLVYEYMSLGALSQHLFHWKSLKLEPLSWSQRLAIALDVARGMEYLHSLARQTFIHRDLKSSNILLGDDFRAKISDFGLVKHAPDSEKSVATKLAGTFGYLAPEYAVMGKITTKVDVFSYGVVLMELLTGLVALDESRPEESRYLAEWFWRIKSSKEKLMAAIDPVLEASEETFESITIVAELAGHCTAREAHHRPDMGHAVNVLAALVEKWKPVDDELDCYSGIDYTRPLPQMLKIWKEAESGEFSYASCL

SEQ ID NO: 21468 - protein, 389 aa, Glycine max
MVHPRDPSDSDNMVKITVSNATGSLSTKTGTSSQSNISGETQNSHIIEDGNLVISIQVLRKVTNDFASENELGRGGFGTVYKGELEDGTKIAVKRMEHGVISSKALEEFQAEIAVLSKVRHRHLVSLLGYSIDGNERLLVYEYMSLGALSQHLFHWKSLKLEPLSWSQRLAIALDVARGMEYLHSLARQTFIHRDLKSSNILLGDDFRAKISDFGLVKHAPDSEKSVATKLAGTFGYLAPEYAVMGKITTKVDVFSYGVVLMELLTGLVALDESRPEESRYLAEWFWRIKSSKEKLMAAIDPVLEASEETFESITIVAELAGHCTAREAHHRPDMGHAVNVLAALVEKWKPVDDELDCYSGIDYTRPLPQMLKIWKEAESGEFSYASCL

SEQ ID NO: 21469 - DNA, 1549 bp, Glycine max
atggaaatgcgcaacatatgaagtctcacaggaggcaggcttctctggcggggagtgtggccatggggttgttgttttccctcttttgcgtctttggtttgatcattattgccattgagaccaggaagaggaggaagaagaaggaggctgctcttgaagcctatggtgatggtaattcccattcgggtccggccaatgtgagctggaagcacaccagtactcgggaagctcttagcataaaccttgcaacatttgagaagccgctccggaagcttacttttgcggaccttcttgacgctaccaatggttttcacaacgacagtctcattggctctggcgggtttggggatgtgtacaaggctcagttgaaggatggaagtgttgtggctatcaagaagctgattcatgttagcggacaaggggacagggaattcaccgctgaaatggagactattgggaaaatcaagcacaggaaccttgttcccctgttgggatactgcaaggtaggggaagagaggctcttggtttatgagtacatgaaatatggaagtttagaggatgttctacatgatcagaagaaagctgggatcaagctgaactgggccattaggcggaaaattgctattggagctgctaggggattggcttttcttcaccacaattgtatcccccacatcattcatagagatatgaagtcgagcaatgtgttacttgatgaaaacctggaagccagagtctctgattttggaatggctaggcttatgagtgctatggatacacatttgagtgtgagcacattggctggcacaccggggtatgttcctcccgagtactatcagagcttcagatgctccacaaaaggtgatgtctacagttatggtgtggttttgttggagctgctaactgggaaaaggccaacggactcggctgattttggagataataatcttgttggatgggttaaacaacatgccaagctgaaaatcagtgatatttttgacccggagctcatgaaggaagaccccaatctggagatggagcttttgcagcacttgaagattgcggtttcctgtttggatgatcgaccgtggaggcgtccgacgatgattcaagtgatggcaatgttcaaggagattcaggcgggatccgggattgattctcagtcaaccatagccaatgacgaggaaggtttcaatgcagttgaaatggtggagatgagcattaaagaagcccctgaattgagcaagcattaggcattaaagtgtcgtgtggattctttgggaaacagacaagaagagaggaggagatgacggattcagctcccctcagttttttccttctttgccgcttcaaattatttcagacataagggaaaacggttaaaaggggaatgaatgcttttgatgtatgtattcttgttattttatacataaaaaaaagttgtttaacttgtatataaacagcttcagttgttaccatctgtgttttcctagaattttcaaagtacttttctcattcaaatataatcctgaaaaggttctctgttcag

SEQ ID NO: 21470 - protein, 416 aa, Glycine max
GNAQHMKSHRRQASLAGSVAMGLLFSLFCVFGLIIIAIETRKRRKKKEAALEAYGDGNSHSGPANVSWKHTSTREALSINLATFEKPLRKLTFADLLDATNGFHNDSLIGSGGFGDVYKAQLKDGSVVAIKKLIHVSGQGDREFTAEMETIGKIKHRNLVPLLGYCKVGEERLLVYEYMKYGSLEDVLHDQKKAGIKLNWAIRRKIAIGAARGLAFLHHNCIPHIIHRDMKSSNVLLDENLEARVSDFGMARLMSAMDTHLSVSTLAGTPGYVPPEYYQSFRCSTKGDVYSYGVVLLELLTGKRPTDSADFGDNNLVGWVKQHAKLKISDIFDPELMKEDPNLEMELLQHLKIAVSCLDDRPWRRPTMIQVMAMFKEIQAGSGIDSQSTIANDEEGFNAVEMVEMSIKEAPELSKH

SEQ ID NO: 21471 - protein, 411 aa, Glycine max
MKSHRRQASLAGSVAMGLLFSLFCVFGLIIIAIETRKRRKKKEAALEAYGDGNSHSGPANVSWKHTSTREALSINLATFEKPLRKLTFADLLDATNGFHNDSLIGSGGFGDVYKAQLKDGSVVAIKKLIHVSGQGDREFTAEMETIGKIKHRNLVPLLGYCKVGEERLLVYEYMKYGSLEDVLHDQKKAGIKLNWAIRRKIAIGAARGLAFLHHNCIPHIIHRDMKSSNVLLDENLEARVSDFGMARLMSAMDTHLSVSTLAGTPGYVPPEYYQSFRCSTKGDVYSYGVVLLELLTGKRPTDSADFGDNNLVGWVKQHAKLKISDIFDPELMKEDPNLEMELLQHLKIAVSCLDDRPWRRPTMIQVMAMFKEIQAGSGIDSQSTIANDEEGFNAVEMVEMSIKEAPELSKH

SEQ ID NO: 21472 - protein, 396 aa, Glycine max
MGLLFSLFCVFGLIIIAIETRKRRKKKEAALEAYGDGNSHSGPANVSWKHTSTREALSINLATFEKPLRKLTFADLLDATNGFHNDSLIGSGGFGDVYKAQLKDGSVVAIKKLIHVSGQGDREFTAEMETIGKIKHRNLVPLLGYCKVGEERLLVYEYMKYGSLEDVLHDQKKAGIKLNWAIRRKIAIGAARGLAFLHHNCIPHIIHRDMKSSNVLLDENLEARVSDFGMARLMSAMDTHLSVSTLAGTPGYVPPEYYQSFRCSTKGDVYSYGVVLLELLTGKRPTDSADFGDNNLVGWVKQHAKLKISDIFDPELMKEDPNLEMELLQHLKIAVSCLDDRPWRRPTMIQVMAMFKEIQAGSGIDSQSTIANDEEGFNAVEMVEMSIKEAPELSKH

SEQ ID NO: 21473 - DNA, 1380 bp, Glycine max
gatgtccttcttcttaaccctttctttcaagtttcatctcttttcctcatttcattcttctaactttctctccgtttacttcacttcatgacggattcttctcctcttatccctcccttaccggtcacagtcaccgagatcgacctcgaagagggaccctccgaacaaattcaatgccggatttgtcttgaaactgatggtagaaatttcatagttccttgtaagtgcaaaggtacgtcaaagtacgtacatagagagtgtttagatcattggcgagccgtgaaggaagggtttgcatttgcccattgcactacttgcaaggctccataccatttgcgtgttcatggtgcttatagacaatggcgtactttcaaatttcggttttttgtaacccgagacattttgcttatatttctggctgttcagcttgtcattgcttcacttgcttatttggtttaccaaatagatggttacgagaagtattggcttcgtcttgtttggggttttggtagtgagctgagcttttactatatatgtggagcactggtgttttttgtgttgcttggcctgtctgggtgctttattacttgttctgatccaagaattcgcagtgatttgggtcagccttgtcgagaaatatgtctttgttgctgtcaacctggagtttgtgctgatcgtcatttgcatggtactccttatatgtacggtactccttatatgtcgactgattgcaatgcatgctgtgagaattgtggaactgaatgctgtggttgcacttgcatgagaggttctgaggacgaagcagggctaccattattattcataatggttttgttttttctggtactctttgctgtacttgggatattttacagtgtattagtggctacaatgataggacaacggatatggcagcgtcattatcacatacttgcgaaaaggatgctaacaaaggagtatgtcgttgagaacattgatggagagatagcagggcctaattggactcctccacccctcccccaggagcatgtacggcagctgaaaacattgggcctcctatgagtttgaaggagtcatctacctgctgaggagaatgacagtggcggtaaactgacaccttgcttcgtagtttggcccttgtcagggagatatgcagttaactgataaaattatgagtcacttaagtgactcagatcacttaggtttgacttggataattgttctagattgtggaaatttatgaatttctgttttgtctgcaaatgtaaagaaatggaagggaattctaagaatatatctaattacaaatgtacagttcaggatcttgatatgttttatattagcattaaatcaaccttgctatgtacggattttctctct

SEQ ID NO: 21474 - protein, 324 aa, Glycine max
MTDSSPLIPPLPVTVTEIDLEEGPSEQIQCRICLETDGRNFIVPCKCKGTSKYVHRECLDHWRAVKEGFAFAHCTTCKAPYHLRVHGAYRQWRTFKFRFFVTRDILLIFLAVQLVIASLAYLVYQIDGYEKYWLRLVWGFGSELSFYYICGALVFFVLLGLSGCFITCSDPRIRSDLGQPCREICLCCCQPGVCADRHLHGTPYMYGTPYMSTDCNACCENCGTECCGCTCMRGSEDEAGLPLLFIMVLFFLVLFAVLGIFYSVLVATMIGQRIWQRHYHILAKRMLTKEYVVENIDGEIAGPNWTPPPLPQEHVRQLKTLGLL

SEQ ID NO: 21475 - DNA, 1161 bp, Glycine max
atattctacttgctgataaagaacagaaaggtaaaaagagaaccagaaagtcagtccctagcaaatctcctggggaagcatctacagagacacctgccaagaagcaaaaacaaacttcccaatctgggaaaaagcaaaaaccgtcttctgatgatgaggaggatgataaagctgaactttcagatgcaaaagatgtttctcaggaagatgaagatgttgcagtaccgaacaatgaaagtgatgatgaaagaagtaaatcagaggaacagaaagagaaatcaaagtctcacaagcgtacttccaaaaaatctgttaaagagaattcagttagcaaagctgatagaacctcatctgccaagaagacccctgttaaagatgccaagagcattgaaaaaattaaaaaaaagacaacttcaaaaaagagtgttgctgagcatgacagtgcttctgcctccgttaagtcaaagcaacctgcatccaagaaacagaaaactgttagtgaaaagcaggacactaaggggaaaactgcaagcaaaaaacaaactgacaaatcttcaaaggctttggttaaggatcaagggaaaagtaaaagtaataagaaggccaaggcagaacccactaagcaggacatgcatgctgtagttgttgatattctgaaggaagtagatttcaatactgcaactttatccgatatcctcaggcaacttggtacccactttggtctggatttaatgcatagaaaagcagaggtgaaggatataattacagatgtaattaataacatgtctgatgaggaagatgaagaagctgagaatgatggtgatgcagataaagatgatgatggtgatgatgatgatgatgatgcatgattttagttgggcaaataatatttgacctgtgcagaaattaggggcatgtgggcatctcatagctaggttttatcttcattattctccggataagttaaggtagatatttggtttgagttgtgaccttcattatagatgctctaaattaggtttgtattttgtaccatattagatttaacccgttcccctgtattactgatgtgaccttttatttgtcatatttaatagtttgtttttttagcctgcttgtaaacattattgccttcgaatttagatcaatgttctttctttt

SEQ ID NO: 21476 - protein, 288 aa, Glycine max
ILLADKEQKGKKRTRKSVPSKSPGEASTETPAKKQKQTSQSGKKQKPSSDDEEDDKAELSDAKDVSQEDEDVAVPNNESDDERSKSEEQKEKSKSHKRTSKKSVKENSVSKADRTSSAKKTPVKDAKSIEKIKKKTTSKKSVAEHDSASASVKSKQPASKKQKTVSEKQDTKGKTASKKQTDKSSKALVKDQGKSKSNKKAKAEPTKQDMHAVVVDILKEVDFNTATLSDILRQLGTHFGLDLMHRKAEVKDIITDVINNMSDEEDEEAENDGDADKDDDGDDDDDDA

SEQ ID NO: 21477 - protein, 213 aa, Glycine max
IFYLLIKNRKVKREPESQSLANLLGKHLQRHLPRSKNKLPNLGKSKNRLLMMRRMIKLNFQMQKMFLRKMKMLQYRTMKVMMKEVNQRNRKRNQSLTSVLPKNLLKRIQLAKLIEPHLPRRPLLKMPRALKKLKKRQLQKRVLLSMTVLLPPLSQSNLHPRNRKLLVKSRTLRGKLQAKNKLTNLQRLWLRIKGKVKVIRRPRQNPLSRTCML

SEQ ID NO: 21478 - protein, 163 aa, Glycine max
MMRRMIKLNFQMQKMFLRKMKMLQYRTMKVMMKEVNQRNRKRNQSLTSVLPKNLLKRIQLAKLIEPHLPRRPLLKMPRALKKLKKRQLQKRVLLSMTVLLPPLSQSNLHPRNRKLLVKSRTLRGKLQAKNKLTNLQRLWLRIKGKVKVIRRPRQNPLSRTCML

SEQ ID NO: 21479 - DNA, 1641 bp, Glycine max
ttctgatgcccaccatatttcttctaatggttcacctatggctgccccacgggatttagagctctcacctgcagcagggccatcaccagtggttcatcctgattcaccttctgaagaaactgaacatatagaaaaattttcatcaaataatgatgacatatttcagattcagcaaggtaaaaccaacatccaccaagatttggataagaatacggttgctttcacttcgggcagtcaacatgaaattgatgtgaagtctccctctaacttggagaatgatctgtcaagctctgataaatcagttgttgcacaatcttctagtgatcatgatgaaattcagagttctaatgctatccaggttgaatctgcacactgttttggcacttccaatgatgaagttggagaattgcatgatgcagttgacaaatttcctccaagcatttcttctgtgacctctgaaaaatttgagacccctaaattcaggtcacccactggtgaagcagatttggaagttgataggcacggggaagttgaaaatgaagaccaaaatgaagtgctagaaactgcgcttcattcagaagagagcatgtctcaggttactgaagaaaatagcaatgaagaatttgatgatatgaaggaaattgatgaagaattcttgtcagaattggacactgttggagactttagtgtcaatgatgctggtgtatcacttcatactggcattgaacatgagaaaattagagatgctcaacttagttcactccctaaggatgtaaagacagaagagtttgagcaggacatcccagttcttgaagcaagatcacttgaagatattaacttggcttttaagcaacttcaagaaggcgtggatgtcgaagaggtcatcaatcgaagtactattaaggatcagaatgtcggtggagaatctaaagatcatctggaaattaattcagaccttcaagttgttgaagccagatctctagaagatattaacattgctttaaaccaagtctctgaaggtaataaaggggagctgccaaattctttggattcgaaagacacttcagtcaaagtagaagaaaatgaggatggctcagccaaggtgaatgaattctttaacgtagcaaccagttctgaggaaatgagcagaactacagtggataaatcagaagatgtacctaatagcagctccggtatcgaggagaaatctcacagtaggaaatctagttccagctcgagctcaagtgattctgattgataccgaaaggccactttgagcaagaagaaagagttgtaagtttctcatttatgttttttatttaattttttcttcagtgatgggagtttgggtatctagccttggcaccaatcatgtcttggctaatggtagtcacaagtcaggtttctcaaattttgttggattggtttcttcaagaatgagtttttggttttatttcttgaagcgtgaagttttttgttcagttttatcccgcgagtgtgagtaatttgacagatataggttgagtgtttatttccaacaggtgcacattgtgtagtccaaaaagaacaaaagaaaaagaaattgaattattgtacattatactttgattgtagaaatggtgattggactttgtttgtgtg

SEQ ID NO: 21480 - protein, 418 aa, Glycine max
SDAHHISSNGSPMAAPRDLELSPAAGPSPVVHPDSPSEETEHIEKFSSNNDDIFQIQQGKTNIHQDLDKNTVAFTSGSQHEIDVKSPSNLENDLSSSDKSVVAQSSSDHDEIQSSNAIQVESAHCFGTSNDEVGELHDAVDKFPPSISSVTSEKFETPKFRSPTGEADLEVDRHGEVENEDQNEVLETALHSEESMSQVTEENSNEEFDDMKEIDEEFLSELDTVGDFSVNDAGVSLHTGIEHEKIRDAQLSSLPKDVKTEEFEQDIPVLEARSLEDINLAFKQLQEGVDVEEVINRSTIKDQNVGGESKDHLEINSDLQVVEARSLEDINIALNQVSEGNKGELPNSLDSKDTSVKVEENEDGSAKVNEFFNVATSSEEMSRTTVDKSEDVPNSSSGIEEKSHSRKSSSSSSSSDSD

SEQ ID NO: 21481 - protein, 406 aa, Glycine max
MAAPRDLELSPAAGPSPVVHPDSPSEETEHIEKFSSNNDDIFQIQQGKTNIHQDLDKNTVAFTSGSQHEIDVKSPSNLENDLSSSDKSVVAQSSSDHDEIQSSNAIQVESAHCFGTSNDEVGELHDAVDKFPPSISSVTSEKFETPKFRSPTGEADLEVDRHGEVENEDQNEVLETALHSEESMSQVTEENSNEEFDDMKEIDEEFLSELDTVGDFSVNDAGVSLHTGIEHEKIRDAQLSSLPKDVKTEEFEQDIPVLEARSLEDINLAFKQLQEGVDVEEVINRSTIKDQNVGGESKDHLEINSDLQVVEARSLEDINIALNQVSEGNKGELPNSLDSKDTSVKVEENEDGSAKVNEFFNVATSSEEMSRTTVDKSEDVPNSSSGIEEKSHSRKSSSSSSSSDSD

SEQ ID NO: 21482 - protein, 223 aa, Glycine max
MSQVTEENSNEEFDDMKEIDEEFLSELDTVGDFSVNDAGVSLHTGIEHEKIRDAQLSSLPKDVKTEEFEQDIPVLEARSLEDINLAFKQLQEGVDVEEVINRSTIKDQNVGGESKDHLEINSDLQVVEARSLEDINIALNQVSEGNKGELPNSLDSKDTSVKVEENEDGSAKVNEFFNVATSSEEMSRTTVDKSEDVPNSSSGIEEKSHSRKSSSSSSSSDSD

SEQ ID NO: 21483 - DNA, 583 bp, Glycine max
aaagccgcaagaatgagggacaaattgctccgtttcgccgcatagccgagaggaagcaggcggcggcgagaatccagtagaacgcgagcagacggcggcgatggcatggcgggcgagcctgtctcggagtgtaaaggagatacgcgtcctcttctgccagtcctcccccgctagcgcccccgcccgggagttcgtgaagaagaactatggtgacatcaaggcccgcaacccctccctccccttccttgtccgcgagtgctccggtgtccagccccagctctgggcgcgctacgatatgggtgtggagagatgcgtgaacttggatggtctgacggaagcacagattgataagaagctggaggaacttgcaatggccggggagtctcttaaaaccaaatagttttggaactcgtatcatgtcttgtttaatgttccaaaataatagatactcctaccatattggtggacaattgctactctgtcattatctgtagttgtgcgtggtacgaagccttcgattagcaaaacttaatgtgtaataattactattgttttatatgctatgcattttctagattacatg

SEQ ID NO: 21484 - protein, 99 aa, Glycine max
MAWRASLSRSVKEIRVLFCQSSPASAPAREFVKKNYGDIKARNPSLPFLVRECSGVQPQLWARYDMGVERCVNLDGLTEAQIDKKLEELAMAGESLKTK

SEQ ID NO: 21485 - DNA, 1221 bp, Glycine max
agcagatggcactggcagagaaatatcggaataaaggaaatgattctaagggtcatccaatgaaacaatgtactacacgtccagtgccgatgacttcacaaattccaccatgcgcttcatcacatgctatatctcgtcccaccgatccatttgctaggacatctgatgtgagagatccaccttctatacagggagtgcactcaccatgtacttcacaaccaacaaatttagatgcaggacatacccttagatcatttgttgcattagagacacaaaacaacgatggcaagccaattatataccttagtggacaaggattcttaccttcacgccctgttgctaatgagattggggatatcctcaagagtcattatactgatccctggtcatcatggaagaagataccaattatcacaagagacttgtggctcggagagtttttgagaaagttttctatttgtccaccggattacaattgggcaaaaaagaattttgaaatacaaggtgcagcaatgatgaaaaatattctaaatgaggctcgaaccacaatgaataaaccaaattgggtcaaagacgatgtttgggagagattatgtgagcattggaaatctgaagaattaaaaaagaagagcacccaagctaatatgagtaaagagactggcacccttcctactccattggacttgtttcgtctcaagcatcaactttcagacaacacatgggtggatatacaggaggaatttgcacgaacattggaacaattgaccaaaagtgcatttgcgcaaggaaatcctccaccaagtgagtcagatgtctggcatgctatagttagaaagaaggggcttggaatggtaggaaggccttgctatcatggctcatcttcatcaatggagtgggtaaaaagacaagattttgatgaattaagaaaaaaaatgaaagaaattagaaatgaaagagataggcttcaaagtagagttgcaaacattgagaggcttgccgagcataacaatgcattgattcgagaattgatggaaagtatgaacaagccatctacaatagatgaaagtcaagatgaggatgggagtaactgagtgaaccataatgactcattgatgctgatttacctttaatgtgattatgtctaaaggcaaatgtcctgtactttggatattaatgtattcatagttaaaaaattgctaatttaaaaaaaaaaaaaaaaag

SEQ ID NO: 21486 - protein, 362 aa, Glycine max
QMALAEKYRNKGNDSKGHPMKQCTTRPVPMTSQIPPCASSHAISRPTDPFARTSDVRDPPSIQGVHSPCTSQPTNLDAGHTLRSFVALETQNNDGKPIIYLSGQGFLPSRPVANEIGDILKSHYTDPWSSWKKIPIITRDLWLGEFLRKFSICPPDYNWAKKNFEIQGAAMMKNILNEARTTMNKPNWVKDDVWERLCEHWKSEELKKKSTQANMSKETGTLPTPLDLFRLKHQLSDNTWVDIQEEFARTLEQLTKSAFAQGNPPPSESDVWHAIVRKKGLGMVGRPCYHGSSSSMEWVKRQDFDELRKKMKEIRNERDRLQSRVANIERLAEHNNALIRELMESMNKPSTIDESQDEDGSN

SEQ ID NO: 21487 - protein, 361 aa, Glycine max
MALAEKYRNKGNDSKGHPMKQCTTRPVPMTSQIPPCASSHAISRPTDPFARTSDVRDPPSIQGVHSPCTSQPTNLDAGHTLRSFVALETQNNDGKPIIYLSGQGFLPSRPVANEIGDILKSHYTDPWSSWKKIPIITRDLWLGEFLRKFSICPPDYNWAKKNFEIQGAAMMKNILNEARTTMNKPNWVKDDVWERLCEHWKSEELKKKSTQANMSKETGTLPTPLDLFRLKHQLSDNTWVDIQEEFARTLEQLTKSAFAQGNPPPSESDVWHAIVRKKGLGMVGRPCYHGSSSSMEWVKRQDFDELRKKMKEIRNERDRLQSRVANIERLAEHNNALIRELMESMNKPSTIDESQDEDGSN

SEQ ID NO: 21488 - protein, 343 aa, Glycine max
MKQCTTRPVPMTSQIPPCASSHAISRPTDPFARTSDVRDPPSIQGVHSPCTSQPTNLDAGHTLRSFVALETQNNDGKPIIYLSGQGFLPSRPVANEIGDILKSHYTDPWSSWKKIPIITRDLWLGEFLRKFSICPPDYNWAKKNFEIQGAAMMKNILNEARTTMNKPNWVKDDVWERLCEHWKSEELKKKSTQANMSKETGTLPTPLDLFRLKHQLSDNTWVDIQEEFARTLEQLTKSAFAQGNPPPSESDVWHAIVRKKGLGMVGRPCYHGSSSSMEWVKRQDFDELRKKMKEIRNERDRLQSRVANIERLAEHNNALIRELMESMNKPSTIDESQDEDGSN

SEQ ID NO: 21489 - DNA, 1426 bp, Glycine max
aatatgacaatggttcttcaattctatcttttcctcaccttttcccccctggatacagaatctgtgctggatgcaagactgagattggccaaggaagatttttaagttgcatggggggtgtctggcatccagaatgcttctgctgccatgcatgccatcttccaatcactgattatgagttttccatgtctagcaatcgcccttaccataaatcatgctatagggagaagcatcacccaagatgtgatgtttgcaagaactttatcccaactaattcatctggcctcattgagtatagagctcatcctttctggctacaaaaatactgcccatcacatgagcttgatggcacttctcgttgttgtagttgcgaaagaatggagccaagggatacaaaatatcttttgcttgatgatggtcgaaagctatgtttagagtgtctagactcatcaattatggatactcatgaatgccaacctctttaccttgaaatacaagaattttatgaaggtttaaatatgaaattggagcaacaaattcctatgctcttggttgagagacaagcgctgaatgaggctatggagggagaaaagaatggtcatcaccacttacccgaaactagaggactatgcttgtcagaagagcaaactgtcaccactatttcaaggaggccaaggattgcagcaggctaccgagccatagacatgataactgaaccttataggctgatccgttgttgtgaagtgacagccattcttgttttgtatggccttcctaggttgttaacaggatcaatcctagctcatgagatgatgcatgcatggcttaggcttaaaggttatcctaacctcagtccagaagttgaagaaggaatctgccaagttttggctcatatgtggttagaatcagagctctattctggatttgggaatgatggtgcatcatcctcaacatcatctttgtcttcgtcatcaccttcctcctcttctgtctcaacaaagaagggtaaacggtccgactttgagaagaaacttggtgatttttttaaacaccagattgagtcagatacctcctcagcttatggagatggattcagattgggtaaccaagcaatggtcaagtatgggcttaaaaggacccttgaccatatccatatgacaggaagttttccatattaaaaattgaaaatttgaaagatatgattctctgacctatacaatggccattaccacagcttggttaataaattatatagttcaaagtttccaagatcatatagtttaacattagagaaaataaggaataaaattgctcctcttacgttgcggtcccttaatttcgtgtcaaatgtggcaccgcatgccttatatgtataattaaatactactcaggaactgaagcaatgaaagtatagaattaattttgt

SEQ ID NO: 21490 - protein, 391 aa, Glycine max
YDNGSSILSFPHLFPPGYRICAGCKTEIGQGRFLSCMGGVWHPECFCCHACHLPITDYEFSMSSNRPYHKSCYREKHHPRCDVCKNFIPTNSSGLIEYRAHPFWLQKYCPSHELDGTSRCCSCERMEPRDTKYLLLDDGRKLCLECLDSSIMDTHECQPLYLEIQEFYEGLNMKLEQQIPMLLVERQALNEAMEGEKNGHHHLPETRGLCLSEEQTVTTISRRPRIAAGYRAIDMITEPYRLIRCCEVTAILVLYGLPRLLTGSILAHEMMHAWLRLKGYPNLSPEVEEGICQVLAHMWLESELYSGFGNDGASSSTSSLSSSSPSSSSVSTKKGKRSDFEKKLGDFFKHQIESDTSSAYGDGFRLGNQAMVKYGLKRTLDHIHMTGSFPY

SEQ ID NO: 21491 - protein, 355 aa, Glycine max
MGGVWHPECFCCHACHLPITDYEFSMSSNRPYHKSCYREKHHPRCDVCKNFIPTNSSGLIEYRAHPFWLQKYCPSHELDGTSRCCSCERMEPRDTKYLLLDDGRKLCLECLDSSIMDTHECQPLYLEIQEFYEGLNMKLEQQIPMLLVERQALNEAMEGEKNGHHHLPETRGLCLSEEQTVTTISRRPRIAAGYRAIDMITEPYRLIRCCEVTAILVLYGLPRLLTGSILAHEMMHAWLRLKGYPNLSPEVEEGICQVLAHMWLESELYSGFGNDGASSSTSSLSSSSPSSSSVSTKKGKRSDFEKKLGDFFKHQIESDTSSAYGDGFRLGNQAMVKYGLKRTLDHIHMTGSFPY

SEQ ID NO: 21492 - protein, 330 aa, Glycine max
MSSNRPYHKSCYREKHHPRCDVCKNFIPTNSSGLIEYRAHPFWLQKYCPSHELDGTSRCCSCERMEPRDTKYLLLDDGRKLCLECLDSSIMDTHECQPLYLEIQEFYEGLNMKLEQQIPMLLVERQALNEAMEGEKNGHHHLPETRGLCLSEEQTVTTISRRPRIAAGYRAIDMITEPYRLIRCCEVTAILVLYGLPRLLTGSILAHEMMHAWLRLKGYPNLSPEVEEGICQVLAHMWLESELYSGFGNDGASSSTSSLSSSSPSSSSVSTKKGKRSDFEKKLGDFFKHQIESDTSSAYGDGFRLGNQAMVKYGLKRTLDHIHMTGSFPY

SEQ ID NO: 21493 - DNA, 1331 bp, Glycine max
gtagccatccgcgccgttatgcgaaaaccccaaacttcctttaatgagccctcaaataaaaaccacaattcatcctcttctctatcgataactgtaatggttacgatgattgattgagtagtagtgaaaaaaatttggaaaatttcttttgggattaaggtcttgagattttagaagacacgcttcatcgtgttggcttgcttgaaattagtccaagatttgaggttcaaaaagagtggaggaggtgttggaaggaagctgatattgtgaattttgtcgagtcttgacattgaccagagcaatttagagctggagtcaataaaggtcatcaatatatcactgccaaagtgaacaatatggcttcgcacaaagagctgcctagaactgcccaaattcaccttgtgagttcacaccaggaagtttatgaaccatgtgatgattcttttgcactggttgatgctcttctagccgaccgcaataacctgttggaacatcatccaacattgtgcatggagattggctgtggtagtggatatgtcattacttcccttgctcttattcttgggcaggaagtttgtggcatcaactacattgcaactgatatcaacccacatgcagtgagagtgacccatgagacattggaagcacatggggttggtgctgagttgatagtaacagatattgcatccggactagaggaccggctagcagggttggttgatgttatggttgtgaaccctccttacgtgcctacccctgaagatgaagtgggtgttgaaggtattacgtcatcttgggctggtggggagaacggccggagtgtaatcaataaaattttgcctgttgcagaccgtcttttgtcagaaaagggatggctatacatggtcaccctcacagaaaacaatccttctgagatatgccatcaaatgagaaagaaaggatatgcttctaagattgttgtccaaagatccacagaggaagaaagtctccatatcatcaagttctggcgggatttcgatactgaagcaaatgaaacagaccaatctgcttctgggttcataggcttgcttacacaaatccctctactttcatattggagaggcaccaatagcgacaataataagtgttgaacgaaaaagtaattgatttcctgatactgggatatctttcttatcttgaccacctgaatgttttgctaagccctgtcattcagaatgcttataaatataacaaccaattctttcctcattagctgggagctcagctatatggatcaattgacgccgttgaactttatgaaaaactcaatattcaataaaaaccacttatag

SEQ ID NO: 21494 - protein, 257 aa, Glycine max
MASHKELPRTAQIHLVSSHQEVYEPCDDSFALVDALLADRNNLLEHHPTLCMEIGCGSGYVITSLALILGQEVCGINYIATDINPHAVRVTHETLEAHGVGAELIVTDIASGLEDRLAGLVDVMVVNPPYVPTPEDEVGVEGITSSWAGGENGRSVINKILPVADRLLSEKGWLYMVTLTENNPSEICHQMRKKGYASKIVVQRSTEEESLHIIKFWRDFDTEANETDQSASGFIGLLTQIPLLSYWRGTNSDNNKC

SEQ ID NO: 21495 - protein, 206 aa, Glycine max
MEIGCGSGYVITSLALILGQEVCGINYIATDINPHAVRVTHETLEAHGVGAELIVTDIASGLEDRLAGLVDVMVVNPPYVPTPEDEVGVEGITSSWAGGENGRSVINKILPVADRLLSEKGWLYMVTLTENNPSEICHQMRKKGYASKIVVQRSTEEESLHIIKFWRDFDTEANETDQSASGFIGLLTQIPLLSYWRGTNSDNNKC

SEQ ID NO: 21496 - protein, 134 aa, Glycine max
MVVNPPYVPTPEDEVGVEGITSSWAGGENGRSVINKILPVADRLLSEKGWLYMVTLTENNPSEICHQMRKKGYASKIVVQRSTEEESLHIIKFWRDFDTEANETDQSASGFIGLLTQIPLLSYWRGTNSDNNKC

SEQ ID NO: 21497 - DNA, 1395 bp, Glycine max
tgtcgtccatggaggcagcgaaggaatttacgcttctgcccccaacctcaccgacgcttatccgccgccaaatcccgactcttacatacggtttgaaaggattacatttcggagaaacaaggagttgtctaactttagctcgtggccgattcaagctgttgtttttgaagttgaagatagagagacaattggtggttcggcctatgggggtcaaagggctgtctgctgcactggtgatctagcgaaacttggtgtgtgtgctgaaggacaggtcatttaccgcccttctgtggagaatcctgattggcctcaagtttttggtgtctcttttgaaatggacgatgaagtagcagtgctgccgttgaaatctatacaaatcacaaaaactgggatgtataacttgtatttcatccattgcgatacgaggcttaaagaattggttgttgaagggaaaactgtatggaaaaatccctctggttatctacctggtagaatggcgcctatgaaagttttctaccaattcatgtcttttgcgtatgtactgcttgggatcttttggttctctcaatatgctagattttggaaggaagtatttcccctgcagaactgcattaccgcagtgataaccctaggcatgtttgagatggctctgtggtactttgactatgctgaattcagtgagactggaatcaggccaactgggacaaccatatgggcagtcacctttggtactgttaagcggacattcgcacgtttggtcattttattggtttcaatgggctatggtgttgtgagacctacccttggtgggctcacgtcaaaggtggttatgcttggaggaaccttctttattgcatctgaagttcttgaattggtagaaaatgttggtgcagtaagtgatctttctggaaaggcaaaactgttcttggttcttcctgctgcagtattggatgtgttcttcattctttggattttcacttcactctctgcaactttaactaagcttcagaccagaaggatgatgataaaattggatatttacaggaagttcactaatgctttggctgcagctgtgcttgtatcagtgggctggatatgttatgagctttatttcaaatcaaatgatgtatacaacgagcagtggcagaacgcgtggatcattccagccttttggcaagttctgtcttactctctcctgtgtgttatctgcattctttgggcaccatctcaaagtgcaacacgatatgcctaccgtgatgatggcagtgatgagtttgatagggatgagactactttaacactcataaaaccatcacctatttcttcaaaagatgttcgaagtgtgccagatgctagaccagtgcaaagcagtaacgggaattcaaatgatgattt

SEQ ID NO: 21498 - protein, 464 aa, Glycine max
VVHGGSEGIYASAPNLTDAYPPPNPDSYIRFERITFRRNKELSNFSSWPIQAVVFEVEDRETIGGSAYGGQRAVCCTGDLAKLGVCAEGQVIYRPSVENPDWPQVFGVSFEMDDEVAVLPLKSIQITKTGMYNLYFIHCDTRLKELVVEGKTVWKNPSGYLPGRMAPMKVFYQFMSFAYVLLGIFWFSQYARFWKEVFPLQNCITAVITLGMFEMALWYFDYAEFSETGIRPTGTTIWAVTFGTVKRTFARLVILLVSMGYGVVRPTLGGLTSKVVMLGGTFFIASEVLELVENVGAVSDLSGKAKLFLVLPAAVLDVFFILWIFTSLSATLTKLQTRRMMIKLDIYRKFTNALAAAVLVSVGWICYELYFKSNDVYNEQWQNAWIIPAFWQVLSYSLLCVICILWAPSQSATRYAYRDDGSDEFDRDETTLTLIKPSPISSKDVRSVPDARPVQSSNGNSNDD

SEQ ID NO: 21499 - protein, 353 aa, Glycine max
MDDEVAVLPLKSIQITKTGMYNLYFIHCDTRLKELVVEGKTVWKNPSGYLPGRMAPMKVFYQFMSFAYVLLGIFWFSQYARFWKEVFPLQNCITAVITLGMFEMALWYFDYAEFSETGIRPTGTTIWAVTFGTVKRTFARLVILLVSMGYGVVRPTLGGLTSKVVMLGGTFFIASEVLELVENVGAVSDLSGKAKLFLVLPAAVLDVFFILWIFTSLSATLTKLQTRRMMIKLDIYRKFTNALAAAVLVSVGWICYELYFKSNDVYNEQWQNAWIIPAFWQVLSYSLLCVICILWAPSQSATRYAYRDDGSDEFDRDETTLTLIKPSPISSKDVRSVPDARPVQSSNGNSNDD

SEQ ID NO: 21500 - protein, 334 aa, Glycine max
MYNLYFIHCDTRLKELVVEGKTVWKNPSGYLPGRMAPMKVFYQFMSFAYVLLGIFWFSQYARFWKEVFPLQNCITAVITLGMFEMALWYFDYAEFSETGIRPTGTTIWAVTFGTVKRTFARLVILLVSMGYGVVRPTLGGLTSKVVMLGGTFFIASEVLELVENVGAVSDLSGKAKLFLVLPAAVLDVFFILWIFTSLSATLTKLQTRRMMIKLDIYRKFTNALAAAVLVSVGWICYELYFKSNDVYNEQWQNAWIIPAFWQVLSYSLLCVICILWAPSQSATRYAYRDDGSDEFDRDETTLTLIKPSPISSKDVRSVPDARPVQSSNGNSNDD

SEQ ID NO: 21501 - DNA, 1435 bp, Glycine max
tatctaaaaatattttaaccatgtcttttgctccaagagattcacataaagctcaaatacaatttgccttggaaagaggaataccagcttttgttgctatgcttggcactcgcagactcccatttcctgcgtttggatttgacttagttcattgctctaggtgcttgatcccatttacagcctacaatgcctcttatttcattgaagtggacagattacttcgccctggtggatatttagtcatctccggtccccctgttcagtggcctaaacaagataaagaatggtctgatctccaagcggtggcaagagccttgtgttatgaactgattgctgtagatggtaacactgtgatctggaagaagcctgtgggagaatcatgtcttcccaatgaaaatgaatttggtcttgagttatgtgatgattcagattacccaagtcaagcttggtacttcaaattgaagaaatgtgtcagtaggacatctgttaaaggtgattatgctattgggataattcccaagtggccagagaggctaactgcaatacctccaagatccacactcctgaaaaatggtgttgatgtgtatgaggctgacactaagcggtgggcaaggagggtggcacactataagaattctctaaaaatcaagttgggcactcgatttgtgcgcaatgtcatggacatgaatgcattatttggaggttttgcggcagccttaaaatctgatcctgtgtgggtgatcaatgtagttcctgcactaaagccacccactcttgatgttatctttgacagaggccttattggagtctatcatgactggtgcgaaccattttcaacatatcctcgtagctatgatctaatccatgtggccagcattgaatcccttataaaagatccagcatctggtcaaaacagatgtactcttgttgatttgatggtggaaattgatcgaatgttgcgtcctgagggaactgtggtggtaagggatgcccctgaagtaattgacagagtagctcgcattgccagtgcagtgaggtggaagcctaccgtttatgataaagaacccgaatcacacggcagagaaaagattctagttgcgaccaagacactctggaagctctaattcctattccatggatgcacgcaactgtgtaatttaggtaaactcccttttccattctgtggggttggaggtgtcaaagatatcttctctatgcatcaaacgggtgcgattttctaattttgttcaacattctctcatataaagaagatagtgaggttaagatttgaaaaagattggaagacccttgtgcagttttaggtggaaagcggaagccagtgttgattttattttctctcaacttaaagaatgggttgtaattcaaaaatatatatttattaaaaaagaataatcgttgattctaattcagctac

SEQ ID NO: 21502 - protein, 373 aa, Glycine max
SKNILTMSFAPRDSHKAQIQFALERGIPAFVAMLGTRRLPFPAFGFDLVHCSRCLIPFTAYNASYFIEVDRLLRPGGYLVISGPPVQWPKQDKEWSDLQAVARALCYELIAVDGNTVIWKKPVGESCLPNENEFGLELCDDSDYPSQAWYFKLKKCVSRTSVKGDYAIGIIPKWPERLTAIPPRSTLLKNGVDVYEADTKRWARRVAHYKNSLKIKLGTRFVRNVMDMNALFGGFAAALKSDPVWVINVVPALKPPTLDVIFDRGLIGVYHDWCEPFSTYPRSYDLIHVASIESLIKDPASGQNRCTLVDLMVEIDRMLRPEGTVVVRDAPEVIDRVARIASAVRWKPTVYDKEPESHGREKILVATKTLWKL

SEQ ID NO: 21503 - protein, 367 aa, Glycine max
MSFAPRDSHKAQIQFALERGIPAFVAMLGTRRLPFPAFGFDLVHCSRCLIPFTAYNASYFIEVDRLLRPGGYLVISGPPVQWPKQDKEWSDLQAVARALCYELIAVDGNTVIWKKPVGESCLPNENEFGLELCDDSDYPSQAWYFKLKKCVSRTSVKGDYAIGIIPKWPERLTAIPPRSTLLKNGVDVYEADTKRWARRVAHYKNSLKIKLGTRFVRNVMDMNALFGGFAAALKSDPVWVINVVPALKPPTLDVIFDRGLIGVYHDWCEPFSTYPRSYDLIHVASIESLIKDPASGQNRCTLVDLMVEIDRMLRPEGTVVVRDAPEVIDRVARIASAVRWKPTVYDKEPESHGREKILVATKTLWKL

SEQ ID NO: 21504 - protein, 341 aa, Glycine max
MLGTRRLPFPAFGFDLVHCSRCLIPFTAYNASYFIEVDRLLRPGGYLVISGPPVQWPKQDKEWSDLQAVARALCYELIAVDGNTVIWKKPVGESCLPNENEFGLELCDDSDYPSQAWYFKLKKCVSRTSVKGDYAIGIIPKWPERLTAIPPRSTLLKNGVDVYEADTKRWARRVAHYKNSLKIKLGTRFVRNVMDMNALFGGFAAALKSDPVWVINVVPALKPPTLDVIFDRGLIGVYHDWCEPFSTYPRSYDLIHVASIESLIKDPASGQNRCTLVDLMVEIDRMLRPEGTVVVRDAPEVIDRVARIASAVRWKPTVYDKEPESHGREKILVATKTLWKL

SEQ ID NO: 21505 - DNA, 1350 bp, Glycine max
agcttctaaggttttgaacaactggtttgaggcagatgttctgaaggcaacccttgcaactgatgctgtgataggcagtacagccagtgtccacaccccaggaagtggctatgtgctgctacatcatgtgatgggagaaactgacggggaacgtggaatttggtcatatgttgaaggtggaatgggctcaatatccaaggctattggtaatgctgctattgaagctggagcacatgttgtaaccaatgctgaggtgtctcggttgttgattgaaaactctagcactgtctgtggggtggctttggctgatggtactgaagtgcattcttcaattgttttgtctaatgcaactccatataaaactttcatggaattagtgtccaacgatgtccttcctgatgattttgttcgtgccattaagcacactgactacagttctgctactacaaaaataaatgtagcagttgataaattgcccgaatttcattgttgcaagttagaacaccctcatgctggcccacagcatgtcgccacaattcatataggttcagaaagcatggaggagattcactctgcatgtcaagatgcagtaaatggagtaccgtcgagaagaccggttattgagatgtcaattccctccatactggacaaaactatttctccacctggtaagcatgtgatcaacctgtttgtgcagtatacaccctacaaaccattggatggtgactggcaagatcatgactacagagaatcgtttgcacaaaaatgtttcacattgattgatgaatatgctcctggcttcagcacatcagtcattggttatgatatgctgactccaccagatcttgaaagggaaatcggtttgacgggagggaatatattccatggtgctatggggttggattcccttttcctcatgcgacctgcaaagggatggtcaaactacaagactccgcttaaagggttatacttatgcggaagtggggcacatcctggtggtggtgttatgggagcacctggacgtaatgctgctcgtttagttcttcaagaggttggagaaagaacttaagtggtgatatactgagttatgattctcgcccaaattattactgcttgcaaactggcttggaaagatggctctttcattggaattttatgcagtaactaatgtaaatttgcaatgcgtaagatagaagaatgaagaatcgtgacaatgattcatcaaattggatgagcttcataacaaagatacagaagctgtaatgtggatttcagaaaactagaacttgtaatccttttttataatttaacagctgttcaatgcattgattccagtacttactggtcgac

SEQ ID NO: 21506 - protein, 355 aa, Glycine max
ASKVLNNWFEADVLKATLATDAVIGSTASVHTPGSGYVLLHHVMGETDGERGIWSYVEGGMGSISKAIGNAAIEAGAHVVTNAEVSRLLIENSSTVCGVALADGTEVHSSIVLSNATPYKTFMELVSNDVLPDDFVRAIKHTDYSSATTKINVAVDKLPEFHCCKLEHPHAGPQHVATIHIGSESMEEIHSACQDAVNGVPSRRPVIEMSIPSILDKTISPPGKHVINLFVQYTPYKPLDGDWQDHDYRESFAQKCFTLIDEYAPGFSTSVIGYDMLTPPDLEREIGLTGGNIFHGAMGLDSLFLMRPAKGWSNYKTPLKGLYLCGSGAHPGGGVMGAPGRNAARLVLQEVGERT

SEQ ID NO: 21507 - protein, 312 aa, Glycine max
MGETDGERGIWSYVEGGMGSISKAIGNAAIEAGAHVVTNAEVSRLLIENSSTVCGVALADGTEVHSSIVLSNATPYKTFMELVSNDVLPDDFVRAIKHTDYSSATTKINVAVDKLPEFHCCKLEHPHAGPQHVATIHIGSESMEEIHSACQDAVNGVPSRRPVIEMSIPSILDKTISPPGKHVINLFVQYTPYKPLDGDWQDHDYRESFAQKCFTLIDEYAPGFSTSVIGYDMLTPPDLEREIGLTGGNIFHGAMGLDSLFLMRPAKGWSNYKTPLKGLYLCGSGAHPGGGVMGAPGRNAARLVLQEVGERT

SEQ ID NO: 21508 - protein, 295 aa, Glycine max
MGSISKAIGNAAIEAGAHVVTNAEVSRLLIENSSTVCGVALADGTEVHSSIVLSNATPYKTFMELVSNDVLPDDFVRAIKHTDYSSATTKINVAVDKLPEFHCCKLEHPHAGPQHVATIHIGSESMEEIHSACQDAVNGVPSRRPVIEMSIPSILDKTISPPGKHVINLFVQYTPYKPLDGDWQDHDYRESFAQKCFTLIDEYAPGFSTSVIGYDMLTPPDLEREIGLTGGNIFHGAMGLDSLFLMRPAKGWSNYKTPLKGLYLCGSGAHPGGGVMGAPGRNAARLVLQEVGERT

SEQ ID NO: 21509 - DNA, 1764 bp, Glycine max
ggtgaaatcaaagctttaaggtcaactgaagctctaaaggataaggccatagaagagttgagaaatggagtcagtaaactggacgaaagacttagaattacagaggatcatcttaaacaaaagaatctagaaatcaagaaactgacagatgaaaaggaaaatgcattggcttcgcaatatgctgcagaagcaacacttagaagggtacatgcaaatcaaaaggatgaagattttgttccaattgagagagccattgctcctcttgaagctgagatcaaaatgtataagaatgagatcactgcacttcaagaagataagaaagctttggaacgactcacaaaattgaaagagtcagcattgctagaagcagagaggattctgagaagtgctctagatagggctctagttgttgaggaggttcgaaatcagaacattgacttgaagagacagattgagatctgccaggaggagaacaaactcttagagaaaaaccatcgtcaaaagattttggaagttgaaaagcttagtcaaaccattcaagaacttgaggaagtcatcttagctagtggagctactgctaatgctgttcgtgattatcagcaacagatttctgaattgcaagaagagaagaggacattagagagggagctagcaagggtaaaagtttcaaccaacagaattgcaaatgccgtggctaatgagtggaaggacgaaaatcataaggtcatgcctgtcaggcaatggctggaagaaagaaggattatgcaggcagagattcaacggttgaaagacaagcaagctatatcagagagaacagctaaggcagagtcccaattgaaggataaactgaagctgaggcttaaaacactggaggaaggcttaaagcatttctccaataacccaatcacttcgaatgtgtcttatgcatctcaaaaagcagaaaagtctaacatactaggtttcctaacaaccagtgctggactgagaaagagatccacatcacaaccaagggcatgtacggttggaagctcattgttccagacaccaaatataaaaaacaacagaggagacatcgtagctgggaatttgaagctggggagccctacaaaaaaatatggttctacagaaaatatgttaacgaaagggatatgggcatcaagaagtaaagttgctgataatggtgaaaaggaaaatgaaatgcaggtgaacagagacatgactttaaacagatgcaatgatgaaagtgaagcaacagaaattaaaaccattgttgatgtggaagaagaccctcctgaaagcaagaaaccaaaaggttcaagcagggatgatgtggtctcaggttttctatatgataagctgcaaaaagaggtcatcaatttgaggaagtcttgtgaaattaaagacagtagtttacaagctaaagatgaagaaattaagatgcttataaagaaagtcggtgtactgacaaaggccatggaagtagagtggaagaaaatgaaaagagaggcagctgctagagagaaggaggcttcatcaacaaagtcagatgataacaggaaaaacagaagcgcaaactcctctaaaagggcgatataaatttattacatggcggtgaaagagcgctgtgaattctttatttggagatagttgaagacaatttatttatcaatggcatcttgtgtgatttttctttgtaaatacaaaacatttggtgaggtaatatcctgaaataaatttccattggggaaaggaagtttgagaatc

SEQ ID NO: 21510 - protein, 531 aa, Glycine max
GEIKALRSTEALKDKAIEELRNGVSKLDERLRITEDHLKQKNLEIKKLTDEKENALASQYAAEATLRRVHANQKDEDFVPIERAIAPLEAEIKMYKNEITALQEDKKALERLTKLKESALLEAERILRSALDRALVVEEVRNQNIDLKRQIEICQEENKLLEKNHRQKILEVEKLSQTIQELEEVILASGATANAVRDYQQQISELQEEKRTLERELARVKVSTNRIANAVANEWKDENHKVMPVRQWLEERRIMQAEIQRLKDKQAISERTAKAESQLKDKLKLRLKTLEEGLKHFSNNPITSNVSYASQKAEKSNILGFLTTSAGLRKRSTSQPRACTVGSSLFQTPNIKNNRGDIVAGNLKLGSPTKKYGSTENMLTKGIWASRSKVADNGEKENEMQVNRDMTLNRCNDESEATEIKTIVDVEEDPPESKKPKGSSRDDVVSGFLYDKLQKEVINLRKSCEIKDSSLQAKDEEIKMLIKKVGVLTKAMEVEWKKMKREAAAREKEASSTKSDDNRKNRSANSSKRAI

SEQ ID NO: 21511 - protein, 438 aa, Glycine max
MYKNEITALQEDKKALERLTKLKESALLEAERILRSALDRALVVEEVRNQNIDLKRQIEICQEENKLLEKNHRQKILEVEKLSQTIQELEEVILASGATANAVRDYQQQISELQEEKRTLERELARVKVSTNRIANAVANEWKDENHKVMPVRQWLEERRIMQAEIQRLKDKQAISERTAKAESQLKDKLKLRLKTLEEGLKHFSNNPITSNVSYASQKAEKSNILGFLTTSAGLRKRSTSQPRACTVGSSLFQTPNIKNNRGDIVAGNLKLGSPTKKYGSTENMLTKGIWASRSKVADNGEKENEMQVNRDMTLNRCNDESEATEIKTIVDVEEDPPESKKPKGSSRDDVVSGFLYDKLQKEVINLRKSCEIKDSSLQAKDEEIKMLIKKVGVLTKAMEVEWKKMKREAAAREKEASSTKSDDNRKNRSANSSKRAI

SEQ ID NO: 21512 - protein, 289 aa, Glycine max
MPVRQWLEERRIMQAEIQRLKDKQAISERTAKAESQLKDKLKLRLKTLEEGLKHFSNNPITSNVSYASQKAEKSNILGFLTTSAGLRKRSTSQPRACTVGSSLFQTPNIKNNRGDIVAGNLKLGSPTKKYGSTENMLTKGIWASRSKVADNGEKENEMQVNRDMTLNRCNDESEATEIKTIVDVEEDPPESKKPKGSSRDDVVSGFLYDKLQKEVINLRKSCEIKDSSLQAKDEEIKMLIKKVGVLTKAMEVEWKKMKREAAAREKEASSTKSDDNRKNRSANSSKRAI

SEQ ID NO: 21513 - DNA, 1564 bp, Glycine max
gaagtgctgtcaactggagaaactataagatacgatggtgcctgccaagtgatgtcagctgagtttcaggttccttcaccccttgttcctactcgtgacaactatttcatcaggttctgtaagaagcaccaaggacaatcgtgggcggtggttgatttttcaatggatcatctgcgacctggtgcaatcacaaaaattcgaagacgaccctctggttgcataattcaagaattgccaaatggttactcaaaggtcatatgggttgaacatgtagaggtggacgacagcgaggtgcataatctttacaaaaatttggttgattctacccttgcgtttggagctaaacgttgggttgcagcaattgataggacatgcgaacgtcttgctagtgcaatggccaccaacataccccaaggggcactttgtgtgataacaagtcacgagagtcggaaaagcatgatgaagctggctgaaagaatggtattgagcttttgtactggcgttggtgcttcaactgcaaatgcctggacaccactaccaagtggtcttgaagatgttagggtcatgaccagaaagagcgttgatgatccaggcagacctcctggtatagtgctcagtgctgcaacttctctctggctcccagttcctgcaaggagagtttttgagtttcttagatcagaaaacacaagaaatcagtgggacattctgtcaaccggggctcaagtgaacgaacttgcacatattgctaacgggagagaccatggaaattgtgtctctcttcttcgagtgaatactcagaatgtgggccagaacaatatgctgatacttcaagagagtttcattgatgctacaggctcatttgtgatttatgctcctattgatgtagctgccataaatgttgtgttgggaggtggtaatccagattatgtggccctgctcccttcgggctttgctgttcttcctgatgggcctggactgaacggagggcccgggcccatatgtgaggctggatccggaggaggctgtcttctcacagttgcgtttcagatactggtggattcagctccgacttcgaaaatctctgttggttccgtgacaactgttaacagtttgataaagagaacagttgaaaagatcagagatgcagtgtcgcttgatggcaactaaagtgctaattaagctctctcaataattaaataacaaagagaaagatgaaagatgagcatggaaggtggttcaaactttagtgttcagaacaagggaaccaagtcaattaacgcaccttagagagtgtcctatatgtaatgttagaatttcttaggcgccgaagtagctagaaaagtacttcaccatataggaaggatgttaggttcgggcattgactatccctaatgaaggcgaaagtagttccatctgaccttgtttgactataaacataataataactctggatttctctttatctatctcaatttttgcgtagacatttaactatatattgtgctgaaaacttggagaaactttcttcaagtgttttctaatgttgacttctaggcttgtattg

SEQ ID NO: 21514 - protein, 388 aa, Glycine max
EVLSTGETIRYDGACQVMSAEFQVPSPLVPTRDNYFIRFCKKHQGQSWAVVDFSMDHLRPGAITKIRRRPSGCIIQELPNGYSKVIWVEHVEVDDSEVHNLYKNLVDSTLAFGAKRWVAAIDRTCERLASAMATNIPQGALCVITSHESRKSMMKLAERMVLSFCTGVGASTANAWTPLPSGLEDVRVMTRKSVDDPGRPPGIVLSAATSLWLPVPARRVFEFLRSENTRNQWDILSTGAQVNELAHIANGRDHGNCVSLLRVNTQNVGQNNMLILQESFIDATGSFVIYAPIDVAAINVVLGGGNPDYVALLPSGFAVLPDGPGLNGGPGPICEAGSGGGCLLTVAFQILVDSAPTSKISVGSVTTVNSLIKRTVEKIRDAVSLDGN

SEQ ID NO: 21515 - protein, 371 aa, Glycine max
MSAEFQVPSPLVPTRDNYFIRFCKKHQGQSWAVVDFSMDHLRPGAITKIRRRPSGCIIQELPNGYSKVIWVEHVEVDDSEVHNLYKNLVDSTLAFGAKRWVAAIDRTCERLASAMATNIPQGALCVITSHESRKSMMKLAERMVLSFCTGVGASTANAWTPLPSGLEDVRVMTRKSVDDPGRPPGIVLSAATSLWLPVPARRVFEFLRSENTRNQWDILSTGAQVNELAHIANGRDHGNCVSLLRVNTQNVGQNNMLILQESFIDATGSFVIYAPIDVAAINVVLGGGNPDYVALLPSGFAVLPDGPGLNGGPGPICEAGSGGGCLLTVAFQILVDSAPTSKISVGSVTTVNSLIKRTVEKIRDAVSLDGN

SEQ ID NO: 21516 - protein, 334 aa, Glycine max
MDHLRPGAITKIRRRPSGCIIQELPNGYSKVIWVEHVEVDDSEVHNLYKNLVDSTLAFGAKRWVAAIDRTCERLASAMATNIPQGALCVITSHESRKSMMKLAERMVLSFCTGVGASTANAWTPLPSGLEDVRVMTRKSVDDPGRPPGIVLSAATSLWLPVPARRVFEFLRSENTRNQWDILSTGAQVNELAHIANGRDHGNCVSLLRVNTQNVGQNNMLILQESFIDATGSFVIYAPIDVAAINVVLGGGNPDYVALLPSGFAVLPDGPGLNGGPGPICEAGSGGGCLLTVAFQILVDSAPTSKISVGSVTTVNSLIKRTVEKIRDAVSLDGN

SEQ ID NO: 21517 - DNA, 1467 bp, Glycine max
tcagcactaggccccccccccaaggaaatctagcttccctgcaggcaagcatggaatcaatgatgagaaatcgagaactaagtgaaacaaggatgatgcaggctctaagagaggagctagcatctgctgagcgaagagcagaagaggagcgtgctgcacataatgctaccaaaatggctgctatggaaagagaagtggaattggagcacagagcagttgagtcatccactgcacttgcaaggatacagagagtagcggacgagaggacagcaaaagccacagaacttgagcagaaagtggcacttctcgaggttgaatgcgcatctttaaatcaagaactacaagatatggaagcccgtgtgcgccgggaacaaaaaaaggcaccagaagaggcaaatcaagtaattcagatgcaggcatggcaggaagaattggagcgtgcacgtcaaggtcagagggaagctgaaaacaagctatcatccttggaggctgaaatgcaaaaaatgagagttgaaatggctgccatgaagagggatgctgagcattactcacgtcaggagcatatggagttagagaaacgctatcgggaactgactgaccttttgtactacaaacaaactcaattagaaaccatggtcagtgaaaaagctgctgcagagtttcaattggaaaaggaaattaagcgtcttcaggaagcaaaggcagaggcagaaagaagtagagtttctcgtcgagcatcatcatcttgggaagatgagactgaaataaaatcccttgagccgcttcctttgcatcaccgtcatttggtcggtgcaagtattcagttgcaaaaggcagtgaaactattagattctggggctgtcagggccacaagatttctctggcagtatccaacagctcgagttattttatttttctacttggtgtttgtacatctcttcttgatgtatctcttgcatcgccttcaggtacaagctgacacattggccgctagagaagttgcagaatctatgggactttctaaccagaatttaccgtgactcttcaaaaatattccatctagggcatgtgtcaggtgttaataatatcttcctgactacatatattttcaagtgtacatttccaatgccgctgcttagggtggcttgataatggttttcagcaaattactcgtgcattgcaaaccaaaagaggaacttaggtacaggcatcttatgtctcaagttgatcttttgagaaactgttgcaagatggagttgggaaaattggaatttgctttagccgtatgattattgaatgggtggcacagcttctctttcttgtgtaggctgtcctgaaaattgaattggttgattatatgtttattcgttttttcttctccgaaaatgtattttgagtggaacgatgtagatacaaatatattttgtgatatcatttttcttcgttccaagggcaattgccaaaact

SEQ ID NO: 21518 - protein, 345 aa, Glycine max
STRPPPQGNLASLQASMESMMRNRELSETRMMQALREELASAERRAEEERAAHNATKMAAMEREVELEHRAVESSTALARIQRVADERTAKATELEQKVALLEVECASLNQELQDMEARVRREQKKAPEEANQVIQMQAWQEELERARQGQREAENKLSSLEAEMQKMRVEMAAMKRDAEHYSRQEHMELEKRYRELTDLLYYKQTQLETMVSEKAAAEFQLEKEIKRLQEAKAEAERSRVSRRASSSWEDETEIKSLEPLPLHHRHLVGASIQLQKAVKLLDSGAVRATRFLWQYPTARVILFFYLVFVHLFLMYLLHRLQVQADTLAAREVAESMGLSNQNLP

SEQ ID NO: 21519 - protein, 329 aa, Glycine max
MESMMRNRELSETRMMQALREELASAERRAEEERAAHNATKMAAMEREVELEHRAVESSTALARIQRVADERTAKATELEQKVALLEVECASLNQELQDMEARVRREQKKAPEEANQVIQMQAWQEELERARQGQREAENKLSSLEAEMQKMRVEMAAMKRDAEHYSRQEHMELEKRYRELTDLLYYKQTQLETMVSEKAAAEFQLEKEIKRLQEAKAEAERSRVSRRASSSWEDETEIKSLEPLPLHHRHLVGASIQLQKAVKLLDSGAVRATRFLWQYPTARVILFFYLVFVHLFLMYLLHRLQVQADTLAAREVAESMGLSNQNLP

SEQ ID NO: 21520 - protein, 326 aa, Glycine max
MMRNRELSETRMMQALREELASAERRAEEERAAHNATKMAAMEREVELEHRAVESSTALARIQRVADERTAKATELEQKVALLEVECASLNQELQDMEARVRREQKKAPEEANQVIQMQAWQEELERARQGQREAENKLSSLEAEMQKMRVEMAAMKRDAEHYSRQEHMELEKRYRELTDLLYYKQTQLETMVSEKAAAEFQLEKEIKRLQEAKAEAERSRVSRRASSSWEDETEIKSLEPLPLHHRHLVGASIQLQKAVKLLDSGAVRATRFLWQYPTARVILFFYLVFVHLFLMYLLHRLQVQADTLAAREVAESMGLSNQNLP

SEQ ID NO: 21521 - DNA, 1064 bp, Glycine max
gattcctatattgcagggaaagcgctgcattcttgctggtgatcaatgccaacttgctcctgtcatattatctagaaaggccttagaagttggtctaggaatatctctactggagagagctgcaactttgcatgaagggattctcaccactaggttaacaacacaataccgtatgaatgatgcaattgctagttgggcttcaaaggagatgtacggaggattattgaagtcctctgagactgtcttttctcatcttctagtagactctccttttgttaagcctacttggataacacaatgcccgctgctattgctagatactagaatgccatatggaagtctgtcagttggttgtgaagagcatctagacccggctggaacaggctcactttataatgaaggagaagctgagatagttttgcagcatgtattttccttaatctatgccggtgttagcccaacagctattgcagtgcaatccccttatgttgctcaagtacaacttttgagggacaagcttgatgaatttccagaagcagcaggtactgaggttgcaaccattgacagttttcaaggtcgggaagctgatgcagtaattttatccatggtacgatcaaacacattgggagctgttggattccttggggatagcagaagaatcaatgttgccatcacaagagcacgcaaacatttagctttggtctgtgacagctcgactatatgccacaataccttcttagcaaggcttctgcgtcatattagacactttggtagggtgaagcatgcagaaccaggtagttttggaggatatggacttgggatgaatccaatattaccttccattaattagtgtgcaacagtagcacgaaacaagttcctatttaatccaatattacttggaggatatggacttgggatggataggttttttctttaaacttgtatagttgtatagcaattcataaattcaaaattgtgtagcgtatcaagtacgtacagaaaagttcattgaaaccccaagattggtatatgacgtgatacatttaatgcatgtttggtttccc

SEQ ID NO: 21522 - protein, 282 aa, Glycine max
IPILQGKRCILAGDQCQLAPVILSRKALEVGLGISLLERAATLHEGILTTRLTTQYRMNDAIASWASKEMYGGLLKSSETVFSHLLVDSPFVKPTWITQCPLLLLDTRMPYGSLSVGCEEHLDPAGTGSLYNEGEAEIVLQHVFSLIYAGVSPTAIAVQSPYVAQVQLLRDKLDEFPEAAGTEVATIDSFQGREADAVILSMVRSNTLGAVGFLGDSRRINVAITRARKHLALVCDSSTICHNTFLARLLRHIRHFGRVKHAEPGSFGGYGLGMNPILPSIN

SEQ ID NO: 21523 - protein, 225 aa, Glycine max
MNDAIASWASKEMYGGLLKSSETVFSHLLVDSPFVKPTWITQCPLLLLDTRMPYGSLSVGCEEHLDPAGTGSLYNEGEAEIVLQHVFSLIYAGVSPTAIAVQSPYVAQVQLLRDKLDEFPEAAGTEVATIDSFQGREADAVILSMVRSNTLGAVGFLGDSRRINVAITRARKHLALVCDSSTICHNTFLARLLRHIRHFGRVKHAEPGSFGGYGLGMNPILPSIN

SEQ ID NO: 21524 - protein, 213 aa, Glycine max
MYGGLLKSSETVFSHLLVDSPFVKPTWITQCPLLLLDTRMPYGSLSVGCEEHLDPAGTGSLYNEGEAEIVLQHVFSLIYAGVSPTAIAVQSPYVAQVQLLRDKLDEFPEAAGTEVATIDSFQGREADAVILSMVRSNTLGAVGFLGDSRRINVAITRARKHLALVCDSSTICHNTFLARLLRHIRHFGRVKHAEPGSFGGYGLGMNPILPSIN

SEQ ID NO: 21525 - DNA, 1637 bp, Glycine max
ggctttccttccttcctttgtcaggcatccatgttgtgaagagcagaggatggataacataccagagcacatagtatgggagatattgagtaggataaagaaaacaagtgatagaaatgctgtttctcttgtttgtaaacggctttattatttggacaatgcagaaaggaattgtataagggttgggtgtggaatggatcctgcagatgaagctttgagctgtctatgcataaggtttgagaacttgtccaaagtggagattacatactctggatggatgtccaaattgggaaaacaattggatgacaagggccttctcattcttgcgaatcactgccctctactctgtgatctctccttgagctactgcacattcatcactgatgttggtctccgttacttggcttcttcttccaagctctcatctttaaggttgaatttcacaccaaggatcactggctgtggcattctgtctcttgttgtgggctgcaagaacctctccagccttcaccttatcagatgccttaatgtcagcagtgtggagtggcttgaatatcttggcaagctcggaacgcttgaggatctctccatcaacaattgcagggccattggtgaaggggacttgattaagcttggccctggttggcagaaactcacaaggttgcagtttgaagtggatgctaattaccgatacatgaaggtttatgaccggttgtctgtggataggtggcaaaagcagtatgtcccttgtgggaacatgcttgaacttagcctggtcaattgcatcatcagtcccgggagagggcttgcttgcgtgttgagtaagtgcaagaacttgcagaaaattcacctagacatgtgtgttggggtgagggactttgacattatttgtttgtcccaaagatcaagtgaacttaaatcggtttcacttagagttccatccgatttttcactcccctccttggtgaataatccgttgagattgacggatgagagtctcaaggccttggctcaaaactgctccaaacttgaatcagtgaggatatctttttctgatggggagttcccttcatcctcctcattcacattaagtggaatactttgtttgattcaaaggtgcctggttcgacagcttgctcttgatcatgtttattccttcaatgatgttggaatggaagctctttgctccgctgagtatcttgaatcacttgaacttgtgaaatgccaagagattagcgatgaagggctacagcttgtgagtcagtttcccagattgtgcattttacggttaagcaagtgtttggggatctctgatgatggattaaagccgcttgttggatcattgaagttagatttcttggccattgaagattgtcctcaaatttctgaaagaggtgtccaaggagctgcaaagtctgtgtctttcaggcaagacttatcttggatgtactgaacctgttgggttttagggacatgaagtccgttgtttttttttatggccatcttcaatgcttctatatatctatagtgtatcacacacacgtaagattattctgttgtattttttatttttatgtcaaattctgttcttgtatttgttttgtaaatcttttaataaaataaatggcttctctggc

SEQ ID NO: 21526 - protein, 483 aa, Glycine max
AFLPSFVRHPCCEEQRMDNIPEHIVWEILSRIKKTSDRNAVSLVCKRLYYLDNAERNCIRVGCGMDPADEALSCLCIRFENLSKVEITYSGWMSKLGKQLDDKGLLILANHCPLLCDLSLSYCTFITDVGLRYLASSSKLSSLRLNFTPRITGCGILSLVVGCKNLSSLHLIRCLNVSSVEWLEYLGKLGTLEDLSINNCRAIGEGDLIKLGPGWQKLTRLQFEVDANYRYMKVYDRLSVDRWQKQYVPCGNMLELSLVNCIISPGRGLACVLSKCKNLQKIHLDMCVGVRDFDIICLSQRSSELKSVSLRVPSDFSLPSLVNNPLRLTDESLKALAQNCSKLESVRISFSDGEFPSSSSFTLSGILCLIQRCLVRQLALDHVYSFNDVGMEALCSAEYLESLELVKCQEISDEGLQLVSQFPRLCILRLSKCLGISDDGLKPLVGSLKLDFLAIEDCPQISERGVQGAAKSVSFRQDLSWMY

SEQ ID NO: 21527 - protein, 467 aa, Glycine max
MDNIPEHIVWEILSRIKKTSDRNAVSLVCKRLYYLDNAERNCIRVGCGMDPADEALSCLCIRFENLSKVEITYSGWMSKLGKQLDDKGLLILANHCPLLCDLSLSYCTFITDVGLRYLASSSKLSSLRLNFTPRITGCGILSLVVGCKNLSSLHLIRCLNVSSVEWLEYLGKLGTLEDLSINNCRAIGEGDLIKLGPGWQKLTRLQFEVDANYRYMKVYDRLSVDRWQKQYVPCGNMLELSLVNCIISPGRGLACVLSKCKNLQKIHLDMCVGVRDFDIICLSQRSSELKSVSLRVPSDFSLPSLVNNPLRLTDESLKALAQNCSKLESVRISFSDGEFPSSSSFTLSGILCLIQRCLVRQLALDHVYSFNDVGMEALCSAEYLESLELVKCQEISDEGLQLVSQFPRLCILRLSKCLGISDDGLKPLVGSLKLDFLAIEDCPQISERGVQGAAKSVSFRQDLSWMY

SEQ ID NO: 21528 - protein, 419 aa, Glycine max
MDPADEALSCLCIRFENLSKVEITYSGWMSKLGKQLDDKGLLILANHCPLLCDLSLSYCTFITDVGLRYLASSSKLSSLRLNFTPRITGCGILSLVVGCKNLSSLHLIRCLNVSSVEWLEYLGKLGTLEDLSINNCRAIGEGDLIKLGPGWQKLTRLQFEVDANYRYMKVYDRLSVDRWQKQYVPCGNMLELSLVNCIISPGRGLACVLSKCKNLQKIHLDMCVGVRDFDIICLSQRSSELKSVSLRVPSDFSLPSLVNNPLRLTDESLKALAQNCSKLESVRISFSDGEFPSSSSFTLSGILCLIQRCLVRQLALDHVYSFNDVGMEALCSAEYLESLELVKCQEISDEGLQLVSQFPRLCILRLSKCLGISDDGLKPLVGSLKLDFLAIEDCPQISERGVQGAAKSVSFRQDLSWMY

SEQ ID NO: 21529 - DNA, 1161 bp, Glycine max
atcccactttgttaaaaatttcacgaaaaaaaataaaataaaaattggaaaaattccaattccgctctcgattttcgatttcggagtttgatagcaacgttggaaggaaaggtgagagcaaaatcgttggaagaatctggtttttgggtcgtggttgttgttttcgccatcaaaacaatgtcttcgccggacattgtctcgatattggagaactcgaaggagttcgatcgggtgaggaaagaacaagaggatattctgtcggagatcaacaaacttcacaagaagcttcaagcaactcctgaagtagttgagaagcctggggataactcattggctaggctgaaatttttgtacactcaagcaaaagatctttcagaaagtgaagcaagtatttccaacttactgataaaccaaattgatgccctactgcctacgggtccacaagggcaaacacgaagaagaatagaaggtaatgagcagaaaaggaaacgagtgaagactgagtcagacatttcaaggctaactcctaatatgcgaagtcaacttgaggcttgtgccagtcttaaaggcgaacaggtagcggctagggtcacaccacgaaatgctgataaggacgagtggtttgtcgtaaaagtgattcattttgataaggaatcaaaggaatttgaagtactggatgaggaaccaggcgatgatgaagaaagcagtggccaaagacaatacaagcttcccatggcaaatatcattcctttccccaagagtaatgatccttctagcgctcttgatttccctcctggaaaacatgttttggcggtctatccaggaactactgcactttataaagcaacagttgttcaaggccctcgcagaaggaagaccgaggattatgtgttggaatttgatgatgatgaggaagatggatctttacctcaaaggacagtgccattccgcaaagtggttcctcttccagaaggacatcgccaatgagtttgagtataagctatttattatagttgtgtataaagcagaaactagaccattgcatatgtgccacttgtgtaatatgctccgtgtgatgtggtttgtaagaatgacattgcaacccaatttcgaacatgtaagaatgacacgaagttcaatttcacgttacctagaaatgat

SEQ ID NO: 21530 - protein, 269 aa, Glycine max
MSSPDIVSILENSKEFDRVRKEQEDILSEINKLHKKLQATPEVVEKPGDNSLARLKFLYTQAKDLSESEASISNLLINQIDALLPTGPQGQTRRRIEGNEQKRKRVKTESDISRLTPNMRSQLEACASLKGEQVAARVTPRNADKDEWFVVKVIHFDKESKEFEVLDEEPGDDEESSGQRQYKLPMANIIPFPKSNDPSSALDFPPGKHVLAVYPGTTALYKATVVQGPRRRKTEDYVLEFDDDEEDGSLPQRTVPFRKVVPLPEGHRQ

SEQ ID NO: 21531 - protein, 161 aa, Glycine max
MRNQAMMKKAVAKDNTSFPWQISFLSPRVMILLALLISLLENMFWRSIQELLHFIKQQLFKALAEGRPRIMCWNLMMMRKMDLYLKGQCHSAKWFLFQKDIANEFEYKLFIIVVYKAETRPLHMCHLCNMLRVMWFVRMTLQPNFEHVRMTRSSISRYLEM

SEQ ID NO: 21532 - protein, 156 aa, Glycine max
MMKKAVAKDNTSFPWQISFLSPRVMILLALLISLLENMFWRSIQELLHFIKQQLFKALAEGRPRIMCWNLMMMRKMDLYLKGQCHSAKWFLFQKDIANEFEYKLFIIVVYKAETRPLHMCHLCNMLRVMWFVRMTLQPNFEHVRMTRSSISRYLEM

SEQ ID NO: 21533 - DNA, 910 bp, Glycine max
ctttgctctagcttccctaatcgtccttccctgtacgcgctcgatcttgccgaccgaggcgatggcggcggtacccgcggtgaggttcccgttgttcggcctcgtacggctgcttggcgtggccgcggcagcggtcatcctcgtctgggccgtccacttccgcggcggtatggcgctctccgccgagaaagacaagctcctcatcttcaacgtacaccctgtgctaatgctgattggattggtagtcctgaatgctgaagctcttttggcgtacaagacagtgccaggaaccaagaaactgaagaagttagtacacattacgttgcagttccttgccatgtttttgagtctagttggcctctgggctgtctggaagttccacgatgaaaaagaaattgaccacttgtacacactccactcctggttgggcctttcttgcatcatcatcttcagcttgcagtgggctgctggatttttgaccttctggtaccctggaggatctagaagcgacagagcgtccctgctcccctggcatgtgttcttgggtgtatttctctatgttcttgccatcgccacaagcgtgactggacttctggagaagtcaatcttcatgcagagtgcaaaaatgatcgggcgcttctccacagaagcgatgctgatgaactcactggggatgatgctgatactactaggagctcttgttattcttgctatttttaaccctggagctggcaagatcaacacgtaccgaggttcttcagagtgagagggattggaagggatatgtgagtatgttgtttggctgcagctagtcataaactacacctttcttgcttcaacctaggaaattttatatgtatgtgtcattgccctctgggctgttattttttaatctgcgaattgaacggtc

SEQ ID NO: 21534 - protein, 254 aa, Glycine max
FALASLIVLPCTRSILPTEAMAAVPAVRFPLFGLVRLLGVAAAAVILVWAVHFRGGMALSAEKDKLLIFNVHPVLMLIGLVVLNAEALLAYKTVPGTKKLKKLVHITLQFLAMFLSLVGLWAVWKFHDEKEIDHLYTLHSWLGLSCIIIFSLQWAAGFLTFWYPGGSRSDRASLLPWHVFLGVFLYVLAIATSVTGLLEKSIFMQSAKMIGRFSTEAMLMNSLGMMLILLGALVILAIFNPGAGKINTYRGSSE

SEQ ID NO: 21535 - protein, 234 aa, Glycine max
MAAVPAVRFPLFGLVRLLGVAAAAVILVWAVHFRGGMALSAEKDKLLIFNVHPVLMLIGLVVLNAEALLAYKTVPGTKKLKKLVHITLQFLAMFLSLVGLWAVWKFHDEKEIDHLYTLHSWLGLSCIIIFSLQWAAGFLTFWYPGGSRSDRASLLPWHVFLGVFLYVLAIATSVTGLLEKSIFMQSAKMIGRFSTEAMLMNSLGMMLILLGALVILAIFNPGAGKINTYRGSSE

SEQ ID NO: 21536 - protein, 198 aa, Glycine max
MALSAEKDKLLIFNVHPVLMLIGLVVLNAEALLAYKTVPGTKKLKKLVHITLQFLAMFLSLVGLWAVWKFHDEKEIDHLYTLHSWLGLSCIIIFSLQWAAGFLTFWYPGGSRSDRASLLPWHVFLGVFLYVLAIATSVTGLLEKSIFMQSAKMIGRFSTEAMLMNSLGMMLILLGALVILAIFNPGAGKINTYRGSSE

SEQ ID NO: 21537 - DNA, 1322 bp, Glycine max
aactcacacacccttctcttctctctttcaattccttcccagctcttcattgaagaagctatggactttctaaacttcttgcttaacttgttggtccctccaggcagtatgatcaccttggctttctcatggcctgcactttgcttcctcaatttttgtgagtggctttataatagtatatatggtgaggatatggataataaagtggtcataatcaccggcgcatcttcaggcattggagagcaaattgcatatgagtatgctttgaggagagcaaatttaacgttggtggcccgcagagagcacaggctaagagggatcgctgagaatgcaaagagattgggtgcaagacatgtgatgattatggcagcagatgttgtgaaggaagatgattgtaggagatttgttaacgaaaccataaatgtctttggccgtgtagatcatcttgtaaatacagtgagtttgggacatacattctgctttgaagaagctacagacacatcagttttccctgttctcctggatattaatttttgggggaatgtttatccaacatttgtggctcttccttaccttcatcaaagcaatggtcgtattattatcaatgcatcagttgaaagttggttgcctatgccaaggatgagtttatatgctgctgcaaaggcagcattagtgaacttttatgagacactgagatttgagttgaaagatgaggttggaataacaatagccacacatggttggattggaagcgaaatgacgaggggcaagttcatgctggaggagggtgctgagatgcaatggaaggaagaaagagaagtgcaggtgacgggtggaccagtagaggagttcgcaaggttgatagtatcaggggcatgtagaggagatgcatatgtgaagtttcctagctggtatgatgtattcctactatacagggtgtttgctccaagagttcttaactgggcattcaggcttcttatttcgccacaagggacaagaagagcttcttcttatgtagggactggcaaacacatcgaagctgtgggtatggtgagacctatggctatgctggagggaacctcacctacacacaatgccattggtcctcttaccttctctggccagctgatcagccagcacaagctcgattaattccaacatcatatcctccagaaaattatgaagccatctactttttctatacatatatatgcttttatcatttattgcattcttgctatcaccatgcttcgtgaaactatgtcatgttgttggactttgttgtcaaaaatgaaaataaacttgtcttgattgccaaatcc

SEQ ID NO: 21538 - protein, 383 aa, Glycine max
NSHTLLFSLSIPSQLFIEEAMDFLNFLLNLLVPPGSMITLAFSWPALCFLNFCEWLYNSIYGEDMDNKVVIITGASSGIGEQIAYEYALRRANLTLVARREHRLRGIAENAKRLGARHVMIMAADVVKEDDCRRFVNETINVFGRVDHLVNTVSLGHTFCFEEATDTSVFPVLLDINFWGNVYPTFVALPYLHQSNGRIIINASVESWLPMPRMSLYAAAKAALVNFYETLRFELKDEVGITIATHGWIGSEMTRGKFMLEEGAEMQWKEEREVQVTGGPVEEFARLIVSGACRGDAYVKFPSWYDVFLLYRVFAPRVLNWAFRLLISPQGTRRASSYVGTGKHIEAVGMVRPMAMLEGTSPTHNAIGPLTFSGQLISQHKLD

SEQ ID NO: 21539 - protein, 363 aa, Glycine max
MDFLNFLLNLLVPPGSMITLAFSWPALCFLNFCEWLYNSIYGEDMDNKVVIITGASSGIGEQIAYEYALRRANLTLVARREHRLRGIAENAKRLGARHVMIMAADVVKEDDCRRFVNETINVFGRVDHLVNTVSLGHTFCFEEATDTSVFPVLLDINFWGNVYPTFVALPYLHQSNGRIIINASVESWLPMPRMSLYAAAKAALVNFYETLRFELKDEVGITIATHGWIGSEMTRGKFMLEEGAEMQWKEEREVQVTGGPVEEFARLIVSGACRGDAYVKFPSWYDVFLLYRVFAPRVLNWAFRLLISPQGTRRASSYVGTGKHIEAVGMVRPMAMLEGTSPTHNAIGPLTFSGQLISQHKLD

SEQ ID NO: 21540 - protein, 347 aa, Glycine max
MITLAFSWPALCFLNFCEWLYNSIYGEDMDNKVVIITGASSGIGEQIAYEYALRRANLTLVARREHRLRGIAENAKRLGARHVMIMAADVVKEDDCRRFVNETINVFGRVDHLVNTVSLGHTFCFEEATDTSVFPVLLDINFWGNVYPTFVALPYLHQSNGRIIINASVESWLPMPRMSLYAAAKAALVNFYETLRFELKDEVGITIATHGWIGSEMTRGKFMLEEGAEMQWKEEREVQVTGGPVEEFARLIVSGACRGDAYVKFPSWYDVFLLYRVFAPRVLNWAFRLLISPQGTRRASSYVGTGKHIEAVGMVRPMAMLEGTSPTHNAIGPLTFSGQLISQHKLD

SEQ ID NO: 21541 - DNA, 1273 bp, Glycine max
gacgttttggaatgagtaattactatagttgtacgatgtaagccatttattttaagaccttatccttatactctatataatatggactagggggttcattccaaggaagagcaaaagctagcacacacgtacaagaagagctatctttagtcctcacttaaaattcctatgatgtcgtcaagaacaagtttttccgtggtgcatggtgagcctgaactggtggtgccagcaggaccaactccgcgagaattaaagaacctctctgacatagatgatcaagaagggttacgttttcagcatcaggtaataatgttctaccaaaagagtcatgttatggaaggaaaacaccctgctacggttataaaatatggtttggctgaagcacttgtacactattacccactagctggtaggttgagagaatggcctaatagaaagttaacagtggattgcagtggtgagggcattttgttcgttgaagctgaggctcatgtttcactcaaggagctaggaaattccattctgccaccatgcccccacatgaaggaactcctccttgatgttcctggatcacaaggcattctcggatgccctctgctgttgtttcaggtaacccgtctaacatgtggaggatttgctttcgccgcacgcatgaaccacacaatctgcgactcactcgggctagttcaatttctcaccatggttggtgagattgcaagaggtgtttctatatcacagttccctgtgtggcaaagagaactattcagtgcaagagacccaccaagaatcacttatgcacaccacgaatatgatcaaaccaaacattgcagcaacaaagatacaatggactttgaccaaatggcccacgagtcatttttcttcggcccaaaagagattgcaacccttaggagtcaccttcctcagcacctaagaaaatgttcaacttttgagatactatctgcttgcttatggaaatgtcgcaccaaagcacttgggctggagcccaatgagatagtgggcttatctccctttattactgctcgtggcaaagtgggcctacatgtgcccaatgggtactatggcaatgcctttgcctttccaatggcactttctaaggctggacttttgtgccaaagcccattggaatatgcattgggtttgataaaaaaggcaaaggcccaaatgggtctagaatatgtgaaatcagtggcggatcttatggttctcaaggatcggcccaaatacaaaacaaaagaaaattaccttattgggg

SEQ ID NO: 21542 - protein, 368 aa, Glycine max
MMSSRTSFSVVHGEPELVVPAGPTPRELKNLSDIDDQEGLRFQHQVIMFYQKSHVMEGKHPATVIKYGLAEALVHYYPLAGRLREWPNRKLTVDCSGEGILFVEAEAHVSLKELGNSILPPCPHMKELLLDVPGSQGILGCPLLLFQVTRLTCGGFAFAARMNHTICDSLGLVQFLTMVGEIARGVSISQFPVWQRELFSARDPPRITYAHHEYDQTKHCSNKDTMDFDQMAHESFFFGPKEIATLRSHLPQHLRKCSTFEILSACLWKCRTKALGLEPNEIVGLSPFITARGKVGLHVPNGYYGNAFAFPMALSKAGLLCQSPLEYALGLIKKAKAQMGLEYVKSVADLMVLKDRPKYKTKENYLIG

SEQ ID NO: 21543 - protein, 367 aa, Glycine max
MSSRTSFSVVHGEPELVVPAGPTPRELKNLSDIDDQEGLRFQHQVIMFYQKSHVMEGKHPATVIKYGLAEALVHYYPLAGRLREWPNRKLTVDCSGEGILFVEAEAHVSLKELGNSILPPCPHMKELLLDVPGSQGILGCPLLLFQVTRLTCGGFAFAARMNHTICDSLGLVQFLTMVGEIARGVSISQFPVWQRELFSARDPPRITYAHHEYDQTKHCSNKDTMDFDQMAHESFFFGPKEIATLRSHLPQHLRKCSTFEILSACLWKCRTKALGLEPNEIVGLSPFITARGKVGLHVPNGYYGNAFAFPMALSKAGLLCQSPLEYALGLIKKAKAQMGLEYVKSVADLMVLKDRPKYKTKENYLIG

SEQ ID NO: 21544 - protein, 321 aa, Glycine max
MFYQKSHVMEGKHPATVIKYGLAEALVHYYPLAGRLREWPNRKLTVDCSGEGILFVEAEAHVSLKELGNSILPPCPHMKELLLDVPGSQGILGCPLLLFQVTRLTCGGFAFAARMNHTICDSLGLVQFLTMVGEIARGVSISQFPVWQRELFSARDPPRITYAHHEYDQTKHCSNKDTMDFDQMAHESFFFGPKEIATLRSHLPQHLRKCSTFEILSACLWKCRTKALGLEPNEIVGLSPFITARGKVGLHVPNGYYGNAFAFPMALSKAGLLCQSPLEYALGLIKKAKAQMGLEYVKSVADLMVLKDRPKYKTKENYLIG

SEQ ID NO: 21545 - DNA, 1478 bp, Glycine max
aagatttggtggagccacgactctcgtcacattctcataagcggaaagagagggagcacagtgaggacagggactacgaggataagaaaattaggatttccgaggagaggaaggaagggagaagggaacggaggaaatttggggataaagtcaagaaggaggaagaagaagaagaagaagaagaagaagaagaagaagaagatggtaatgataatattagaggcattcatgaggccaaggtcaaggaggaagtcactgatggtgcccatggctcagcttcttccaatggcactgtgtttatccaaaacggtgccctgggatcacctgctgtggcccccatgagtgtgcctgaaacatctttggctcctcctccttctgttcctatcaaggtatcttcgaattctaccacaaatgaaaataagggcattagtattaccaggtctcatgaggttactggaaaatctagtacagatgggtcatcttcaactgctagaaaaactgggagcctctctattgatgccctagctaaggctaagaaagctttacaaatgcagaaagagttgtcagaaaagctaaagaaaattcctcagttgaataagagttctacccaaaattcacaaggaagctctaacttgggctcaatgaatgaatctgcagtaccctcttctgctgctggagtggcatcaaaaagttccacgtcagcttctttggtccatgctgcaaatatgtcaattttcccctcaactgcttttgctgcttctgctaatactccagtaattggcactagtgctgctggtattccaaatgcaactctgcccaactgggaagctgtcaggcgtgctcaagagcttgctgccaggatgggatttcgtcaagatccacaatttgctcctctgataaacatgtttcctggtcagatggtaacagatgttactctcctgcagaaacccatgaaggcccctgttcttcgtcttgatgctcagggacgggaaatagatgagcatggaaatgttattaatgtgactaagcccatcaaccttagcacattaaaggtcaacattaacaaacaaaagaaagaagcatttgaaatactacaacctgtattagatgtcgatcctgaatctaatcctcattttgatgcaagcatgggtatcaacaaaacaaagctcctgcggcccaagaggatgaatttccaatttgttgaggaaggaaaatggtcaaaagatgctgaaacaataaaattgaagagtaaatttggagaagctcaagcaaaagagcacaaggccaaactggcacagttggcaaaggcaaaggctgctcctgatataaatcctaacttaatagaaataacagagagagttgtaattaaagaaaagcccaaggaccaaattccagacattgagtggtgggatgtgccacttctgcattgtcgaaattatggtgacattgataatggaaccattggcgaagataaactg

SEQ ID NO: 21546 - protein, 492 aa, Glycine max
DLVEPRLSSHSHKRKEREHSEDRDYEDKKIRISEERKEGRRERRKFGDKVKKEEEEEEEEEEEEEEDGNDNIRGIHEAKVKEEVTDGAHGSASSNGTVFIQNGALGSPAVAPMSVPETSLAPPPSVPIKVSSNSTTNENKGISITRSHEVTGKSSTDGSSSTARKTGSLSIDALAKAKKALQMQKELSEKLKKIPQLNKSSTQNSQGSSNLGSMNESAVPSSAAGVASKSSTSASLVHAANMSIFPSTAFAASANTPVIGTSAAGIPNATLPNWEAVRRAQELAARMGFRQDPQFAPLINMFPGQMVTDVTLLQKPMKAPVLRLDAQGREIDEHGNVINVTKPINLSTLKVNINKQKKEAFEILQPVLDVDPESNPHFDASMGINKTKLLRPKRMNFQFVEEGKWSKDAETIKLKSKFGEAQAKEHKAKLAQLAKAKAAPDINPNLIEITERVVIKEKPKDQIPDIEWWDVPLLHCRNYGDIDNGTIGEDKL

SEQ ID NO: 21547 - protein, 380 aa, Glycine max
MSVPETSLAPPPSVPIKVSSNSTTNENKGISITRSHEVTGKSSTDGSSSTARKTGSLSIDALAKAKKALQMQKELSEKLKKIPQLNKSSTQNSQGSSNLGSMNESAVPSSAAGVASKSSTSASLVHAANMSIFPSTAFAASANTPVIGTSAAGIPNATLPNWEAVRRAQELAARMGFRQDPQFAPLINMFPGQMVTDVTLLQKPMKAPVLRLDAQGREIDEHGNVINVTKPINLSTLKVNINKQKKEAFEILQPVLDVDPESNPHFDASMGINKTKLLRPKRMNFQFVEEGKWSKDAETIKLKSKFGEAQAKEHKAKLAQLAKAKAAPDINPNLIEITERVVIKEKPKDQIPDIEWWDVPLLHCRNYGDIDNGTIGEDKL

SEQ ID NO: 21548 - protein, 310 aa, Glycine max
MQKELSEKLKKIPQLNKSSTQNSQGSSNLGSMNESAVPSSAAGVASKSSTSASLVHAANMSIFPSTAFAASANTPVIGTSAAGIPNATLPNWEAVRRAQELAARMGFRQDPQFAPLINMFPGQMVTDVTLLQKPMKAPVLRLDAQGREIDEHGNVINVTKPINLSTLKVNINKQKKEAFEILQPVLDVDPESNPHFDASMGINKTKLLRPKRMNFQFVEEGKWSKDAETIKLKSKFGEAQAKEHKAKLAQLAKAKAAPDINPNLIEITERVVIKEKPKDQIPDIEWWDVPLLHCRNYGDIDNGTIGEDKL

SEQ ID NO: 21549 - DNA, 1375 bp, Glycine max
gagtatcttccattctatttcacttatagttcaaagaaacaaaatgacgaagcagttaacatgagttcctatccagcgatgtcggggtaaaatgtacaaaatcgaaagaggaacaaggtgcttcgctgctattgctttctgcaatgcaccttttttcatttccataactctttacagttacaccacgcctcctcctcctcctttagccattcccctatccacaacagctattccaattagatctagggtttcctcttcctcactattcaccatccctcgccggagaacaacaccgattttccggcgccggcttcacggatctcgcatcagcgtctgatacattggcaaaatgcacaccaaatcggcgcagtcatcgtttcgggatcggacgcacgaattccagagcattgcggagaggttgaagaaaacagggccagcgccgaatggacaaagcagcagttcatccagatcggaggaacagcgatccgcgattgcaaatcaatcggagttcaatagaagagcttccaagatcggcttcgggattcaccaaacctctcagaaactcgccaagctcgccaagttggctaagaggacttcggttttcgatgaccctaccatggaaattcaagagcttacgggggttattaagcaagacatcactgctctaaactctgcggttgtggatcttcagttactcagcaactctcggaacgagagtgggaacgcttctaccgacacgactagccattcgaccacggtggttgatgacctgaagacacggttgatgagcgccaccaaagagtttaaagatgttctcaccatgcgaactgagaacttgaaagtgcatgagaataggaggcagctgttttcggccactgcttctaaggactctgcgaatccttttgtccggcaacggccgttggctacgaggtcggctgctagtacttctaatgcccccgctgcaccttgggctactgggtcatcttcatctcagttgtttcctaagaagcaggtggatggggagagtcaaccattgctgcaacagcagcagcagcagcaagaggtagttccattgcaagacagttacatgcaaaacagagctgaagctcttcagaatgttgagtccactattcatgagctcagcaacatctttaatcaactagcaactcttgtttctcaacaaggagagattgccatcaggattgatgaaaacatggatgatacattggcaaatgtagagggggcgcaaggggctttgttgaagtatctgaacaacatatcttctaataggtggctgatgatcaagattttctttatattaatattttttcttatggttttcttattttttgtggcatagtcattctaatgacag

SEQ ID NO: 21550 - protein, 336 aa, Glycine max
MHTKSAQSSFRDRTHEFQSIAERLKKTGPAPNGQSSSSSRSEEQRSAIANQSEFNRRASKIGFGIHQTSQKLAKLAKLAKRTSVFDDPTMEIQELTGVIKQDITALNSAVVDLQLLSNSRNESGNASTDTTSHSTTVVDDLKTRLMSATKEFKDVLTMRTENLKVHENRRQLFSATASKDSANPFVRQRPLATRSAASTSNAPAAPWATGSSSSQLFPKKQVDGESQPLLQQQQQQQEVVPLQDSYMQNRAEALQNVESTIHELSNIFNQLATLVSQQGEIAIRIDENMDDTLANVEGAQGALLKYLNNISSNRWLMIKIFFILIFFLMVFLFFVA

SEQ ID NO: 21551 - protein, 247 aa, Glycine max
MEIQELTGVIKQDITALNSAVVDLQLLSNSRNESGNASTDTTSHSTTVVDDLKTRLMSATKEFKDVLTMRTENLKVHENRRQLFSATASKDSANPFVRQRPLATRSAASTSNAPAAPWATGSSSSQLFPKKQVDGESQPLLQQQQQQQEVVPLQDSYMQNRAEALQNVESTIHELSNIFNQLATLVSQQGEIAIRIDENMDDTLANVEGAQGALLKYLNNISSNRWLMIKIFFILIFFLMVFLFFVA

SEQ ID NO: 21552 - protein, 191 aa, Glycine max
MSATKEFKDVLTMRTENLKVHENRRQLFSATASKDSANPFVRQRPLATRSAASTSNAPAAPWATGSSSSQLFPKKQVDGESQPLLQQQQQQQEVVPLQDSYMQNRAEALQNVESTIHELSNIFNQLATLVSQQGEIAIRIDENMDDTLANVEGAQGALLKYLNNISSNRWLMIKIFFILIFFLMVFLFFVA

SEQ ID NO: 21553 - DNA, 1189 bp, Glycine max
attcttttcactttttgggtcctcttcttctctctctcaatttaaatatcactctcctctcccctccaccacgactagtaaataaatggatccctcgtccgtgaacggcttctactcgttcctgacgctgggaatcgacgatctagagagagtgttcctgagcacaaacttcatgtcaatccaattcctccaaagagtggtctctgttctaagatcgttccacacccaattgaccctcctggtccagaaactccagctcccagtgggcgacaagtggctggacgagtacatggacgaaagctccaaactctgggacgcctgccacctcatcaagtccggcatttcggccatggatagctactactctgccgccctcaacatcacctcctccctcgactcccatcgccacatcaccccccaagtctctcgccaggtaataagggccattgccgggtgccgtcgggaggcggtggggctggaggaggagaacagggcgctgatggaggcgcggattgaggccttgtcgcttcggttccaagagaggctgtccatcgagtccaagctgaacggcttcaacggcttcagaggggtgctgtacgcaatgaggaacgtgagttcgttgctgctcatggtacttctgtacggactcgtgtactgctatggggactcctcggacttcgtgttgggcggttgcgggtacgaggggtgcctgttcctgggatcggcgttcatgatgtcgacggccaggttgcagcagcgggtggcggcggagatcgggcacatgggcggctcgccggggatgcttctgcacgagtttcggaggtcgaaggtggccatggaggagctgagaggggagttagagagaagagggtcagggtctcagggagtggagtgggagagtgaggttgctattagagagagagtggagaatctcagaacgtgttttggggttctcagatctggggcagacaacattgttgctcagcttgatgatttctttgacgagattgtggaagggaggaagaggcttttggacttttgcagtcataggtgactcagccaattcaaaatgaaataggtgtcttggctgcctacaaaaaatagaaacaaagacaaggtagaagaatagttgatggggttgttgtaccttttattaaccctttctttaattattattattgttattatc

SEQ ID NO: 21554 - protein, 322 aa, Glycine max
MDPSSVNGFYSFLTLGIDDLERVFLSTNFMSIQFLQRVVSVLRSFHTQLTLLVQKLQLPVGDKWLDEYMDESSKLWDACHLIKSGISAMDSYYSAALNITSSLDSHRHITPQVSRQVIRAIAGCRREAVGLEEENRALMEARIEALSLRFQERLSIESKLNGFNGFRGVLYAMRNVSSLLLMVLLYGLVYCYGDSSDFVLGGCGYEGCLFLGSAFMMSTARLQQRVAAEIGHMGGSPGMLLHEFRRSKVAMEELRGELERRGSGSQGVEWESEVAIRERVENLRTCFGVLRSGADNIVAQLDDFFDEIVEGRKRLLDFCSHR

SEQ ID NO: 21555 - protein, 293 aa, Glycine max
MSIQFLQRVVSVLRSFHTQLTLLVQKLQLPVGDKWLDEYMDESSKLWDACHLIKSGISAMDSYYSAALNITSSLDSHRHITPQVSRQVIRAIAGCRREAVGLEEENRALMEARIEALSLRFQERLSIESKLNGFNGFRGVLYAMRNVSSLLLMVLLYGLVYCYGDSSDFVLGGCGYEGCLFLGSAFMMSTARLQQRVAAEIGHMGGSPGMLLHEFRRSKVAMEELRGELERRGSGSQGVEWESEVAIRERVENLRTCFGVLRSGADNIVAQLDDFFDEIVEGRKRLLDFCSHR

SEQ ID NO: 21556 - protein, 254 aa, Glycine max
MDESSKLWDACHLIKSGISAMDSYYSAALNITSSLDSHRHITPQVSRQVIRAIAGCRREAVGLEEENRALMEARIEALSLRFQERLSIESKLNGFNGFRGVLYAMRNVSSLLLMVLLYGLVYCYGDSSDFVLGGCGYEGCLFLGSAFMMSTARLQQRVAAEIGHMGGSPGMLLHEFRRSKVAMEELRGELERRGSGSQGVEWESEVAIRERVENLRTCFGVLRSGADNIVAQLDDFFDEIVEGRKRLLDFCSHR

SEQ ID NO: 21557 - DNA, 1592 bp, Glycine max
attattattattattattattattattattcgtttcttcggttcatctattatcttttggtttcctgaatccatttctttctacggttatcttatcttattggctaccatcttccctatcttcctcaactgggttctgcgtattgttttaagtttaggcttgtttcattttagtatttgattgctaattttatatttctgtattcatttgtttatttatttatttattactttgtttcattcacgattctagatgagctctaaggttagtgagggggttatttcctttatgttagatttaatccccttcccctttatcatgctaatgtataaatggttgttgccttttttgtcctccatatgtccagattttcttctgtgaatttgaactgaattgaattcgcttggttgctgctggcttctgtgcttcctgtttaacttatttccagtggattattgttggcacaagttattggtctaattgaaatgaaagaatttgagtgaagaggagaattagactgtctgatctggctatggagaattcttataaggctaatggaaatggaccaactgagaatggatactctgttgcaaggcattcttatcaaccctccttgaaggggtcattaccttggctggacataagggtgttttatgtaagagtgtgcaagtgtgagcttgatgattccactcctggatttcttacactgaatcatgttcctttgaatcctgacactcttcttgaaattaatggtgttcgtactagtatatattctgatgggatgtcaacccttctcaagagagacagggtagatagaaaatcagaagaagtgacatttgtaagcactgacagcataaggatgagtggtagtgtcaagttcgaggtgtttgataaagatgttctgctgctttccggtgctttagaattgtgtaataccaatggtgttgttggggaatcaagttataatggacaaaggtggagtatgaactgcgagtcatatataattccaggcaccagcttctttaaggggaaacaattgctgttgccagactcaagtctcccaacaattgaggtctacattgcgggctccttcttgagtactccaattatcttgacaaaaacctttgcagctttctcagaaaaagcatgcaaagaagggggtgttggatgcaattccagagcatgaggccagtgaaaatgggaaagatacttcttcaaccctttcctttgcaggccccagattacctttacgacaaacatgaagatgaagattataacagcgtctacccaggaacagcatatgctgatggagaagatggagaactctcatggttcaatgctggtgttagggtcggtgttggtattggacttagtgtttgtcttggcattggcattggtgttggcttgcttgttaaaacctaccaaggcaccactagccactttagaagacggctgttctgattggtgcttctatttaagcttaaaatactctgctttttgtccatctccctcttaatccaaagacagctaaccttattttttgtccatctccctcttgatccatagacaacaggttaaatatcttgtccaag

SEQ ID NO: 21558 - protein, 217 aa, Glycine max
MENSYKANGNGPTENGYSVARHSYQPSLKGSLPWLDIRVFYVRVCKCELDDSTPGFLTLNHVPLNPDTLLEINGVRTSIYSDGMSTLLKRDRVDRKSEEVTFVSTDSIRMSGSVKFEVFDKDVLLLSGALELCNTNGVVGESSYNGQRWSMNCESYIIPGTSFFKGKQLLLPDSSLPTIEVYIAGSFLSTPIILTKTFAAFSEKACKEGGVGCNSRA

SEQ ID NO: 21559 - protein, 134 aa, Glycine max
MSTLLKRDRVDRKSEEVTFVSTDSIRMSGSVKFEVFDKDVLLLSGALELCNTNGVVGESSYNGQRWSMNCESYIIPGTSFFKGKQLLLPDSSLPTIEVYIAGSFLSTPIILTKTFAAFSEKACKEGGVGCNSRA

SEQ ID NO: 21560 - protein, 108 aa, Glycine max
MSGSVKFEVFDKDVLLLSGALELCNTNGVVGESSYNGQRWSMNCESYIIPGTSFFKGKQLLLPDSSLPTIEVYIAGSFLSTPIILTKTFAAFSEKACKEGGVGCNSRA

SEQ ID NO: 21561 - DNA, 1319 bp, Glycine max
actctcctcgtaagtcctgcgtttccagacccagtggaagtagcgaaatgtatcgaacggcggcgaagcggttgttgtgcggtgcaagatactactataatggcaacgttggactccgattccggcctcctcagatatttataccctcttctcgcttttccacatccgagactcaacctttacccattccacacgctacggatcgtaccattccagtcgtcgtcaccaccgaaaccgaaaaccctaactcttcagattcgtccgcttcttcttcaccttcatcttcctcaacagctgatgatgccacaaaacccagggccaagtatgaggaccaacacactcgcgtgcttcaggcctcgctctcttacgtcttaaagttggggtggacagaagctgcgctagttgcaggagccagggatgtcggtctttcgccatctattgttggatcttttcccaggaaggaagcagcactggtcgagtatttcatggatggctgcttacaaagacttgctgataaaattgactcagatgagagtttacaaaatttgacaccaagtgactgcatctctaagcttatcagatttcgtttagaaatgcaagctccatatatatcaacatggcctcaagctcttagcatccaggcacaacctgttaatgttcctacaagttttaagcagagggcagtgcttgtggatgagatctggcatgctgctggtgataatgcctctgacattgattggtatgccaagcgcactatccttggaggaatatactcaacaactgagatttatatgctgacagatacctctcctgatttccgtgatacatgggctttcttggatgctcgagttaaagatgcctttgatttaaagaaaaccattcaagaggcacagtatttggcagaagctgtcagtaccgggctgggaaactcctttcaagggtttgtcgggaaagttttccagagatgagtcgtggtgggaatttatgctgacaatgtttctccgagacattgattgttaccttgaaggagatgctatattatacacgcctagtaattactagttatctttcatttatttcaaatttgctgtcttcggcccttcactcaaatttgctctttcatttaataataattttaagcttgtaaataattctattgccattttattatgatacaaaaaactagctcttttttcccttcccccaaatagcttttgtttattcatgtctcttactccttggtatattgtaatttctctcttttcaaaagcgacgtgtttgctgaattaaatatttttttatagaaaattgttgactat

SEQ ID NO: 21562 - protein, 321 aa, Glycine max
SPRKSCVSRPSGSSEMYRTAAKRLLCGARYYYNGNVGLRFRPPQIFIPSSRFSTSETQPLPIPHATDRTIPVVVTTETENPNSSDSSASSSPSSSSTADDATKPRAKYEDQHTRVLQASLSYVLKLGWTEAALVAGARDVGLSPSIVGSFPRKEAALVEYFMDGCLQRLADKIDSDESLQNLTPSDCISKLIRFRLEMQAPYISTWPQALSIQAQPVNVPTSFKQRAVLVDEIWHAAGDNASDIDWYAKRTILGGIYSTTEIYMLTDTSPDFRDTWAFLDARVKDAFDLKKTIQEAQYLAEAVSTGLGNSFQGFVGKVFQR

SEQ ID NO: 21563 - protein, 306 aa, Glycine max
MYRTAAKRLLCGARYYYNGNVGLRFRPPQIFIPSSRFSTSETQPLPIPHATDRTIPVVVTTETENPNSSDSSASSSPSSSSTADDATKPRAKYEDQHTRVLQASLSYVLKLGWTEAALVAGARDVGLSPSIVGSFPRKEAALVEYFMDGCLQRLADKIDSDESLQNLTPSDCISKLIRFRLEMQAPYISTWPQALSIQAQPVNVPTSFKQRAVLVDEIWHAAGDNASDIDWYAKRTILGGIYSTTEIYMLTDTSPDFRDTWAFLDARVKDAFDLKKTIQEAQYLAEAVSTGLGNSFQGFVGKVFQR

SEQ ID NO: 21564 - protein, 160 aa, Glycine max
MDGCLQRLADKIDSDESLQNLTPSDCISKLIRFRLEMQAPYISTWPQALSIQAQPVNVPTSFKQRAVLVDEIWHAAGDNASDIDWYAKRTILGGIYSTTEIYMLTDTSPDFRDTWAFLDARVKDAFDLKKTIQEAQYLAEAVSTGLGNSFQGFVGKVFQR

SEQ ID NO: 21565 - DNA, 1401 bp, Glycine max
atcggttataccctttgccccctctctctctctctctctccttctcagtgcaaacagtttagaaaaccaaattaatctagttcaatcatacatagagaatacagtgtaaagaatagattttctcccctaccaaaaacaagagggagctgagatattgtaaggtggtgtgaaaggaattaacaaggatctgttttgggatatatgggcataagagaaagagatgacatggtgcaatgactcagatgaggagaggggaattgatcaactggttgcaccaacaattactcctacttcaactaataacactactgttcttactgatcatcgcacaaaagcaagcgaaattcgcaccttaacttgcccctcatgtggccaaaacattgaattccaagaccagactggaatcaatgacttgccggggttaccagctggggtgaagtttgatccgaatgaccaagagatattagagcatttggaagcaaaggtactgtctgacgtgccaaagcttcatccacttattgatgagttcataccaacgcttgaaggagagaatgggatctgttatacgcatccagaaaagcttccaggtgtaagaaaagatgggcaaatccgccacttctttcacaggccatctaaagcatacacaacaggaacaaggaaaagaagaaaggttcacaccgacgaagaaggaagcgagacaaggtggcacaaaacaggaaaaactagacccgtttttgttggtggtgctgtgaaggggttcaagaaaatcctagtcctctacaccaactatggaaggcaaaagaagcctgagaagaccaattgggtgatgcatcaataccaccttggcactagcgaagaagagaaagatggagaattggtggtttcaaaggttttctaccaaacacaacctcgacaatgtggtaattccattataaagcaggatctttatgatgaagaaagattgatgactaaccaaagtgtccataatgatgatgacaacaatataatacctagaaataataatgcaagtgctcttatggactactacaatccttctttcataaattatgaccaattgggtggtcgtagtaatagggaaaattcacctcaacttattccaaatttggtcatgcaaggtgatagctcttctttcattcgattagcaatggatgcaaccaaagccaagatggacagaaaatagctccttactggaagaactttcttggtagaacatatagtagtgacaatgaccatatattgatgttgatgttttttttttatattactattatatatataacatgtatttattctatatatgggacgataagttggaagaaagacaaggcttccattattattattatatatatatgtgtgtcgaggattacccatttgacg

SEQ ID NO: 21566 - protein, 326 aa, Glycine max
MTWCNDSDEERGIDQLVAPTITPTSTNNTTVLTDHRTKASEIRTLTCPSCGQNIEFQDQTGINDLPGLPAGVKFDPNDQEILEHLEAKVLSDVPKLHPLIDEFIPTLEGENGICYTHPEKLPGVRKDGQIRHFFHRPSKAYTTGTRKRRKVHTDEEGSETRWHKTGKTRPVFVGGAVKGFKKILVLYTNYGRQKKPEKTNWVMHQYHLGTSEEEKDGELVVSKVFYQTQPRQCGNSIIKQDLYDEERLMTNQSVHNDDDNNIIPRNNNASALMDYYNPSFINYDQLGGRSNRENSPQLIPNLVMQGDSSSFIRLAMDATKAKMDRK

SEQ ID NO: 21567 - DNA, 1178 bp, Glycine max
actctacttttactcggggcatagcagatgctgatacatgaaagcgaaacctagctatcatcatcatcacagaagaacaacaacagaggaaaaaagaaaaagaaaaatgttagaggtgaagagaatcggtgtggtggggagtggccaaatgggatcgggaatagcccaagtcgctgccatgcacggcatcgacgtttggcttcacgacctcgaccctcaagctctctccaaagcctcctcttccatctcttcctccatcaaccgtttcgtttccaaaaaccacatctctcaggttgcgggtgctgatgctttgaaacgactgcgtctcacgacggatttggaggatttacagctagcggatttgatcattgaggcgattgtggaatccgaagatgtgaaaaagagtttgtttgcgcaactcgataggattgccaagagttctgcgattttggcgtccaacaccagttccatttccgtcacgcgtctagccacctctaccagcaggccacgtcaggtgataggaatgcattttatgaacccacctcctgtgatgaaattgattgagattgtacgaggtgcagacacttctgaggagacattcgttgctacgaaagcattgtcagagaggcttggcaaggtagtgataacctcccatgattattcaggcttcatagtgaatcgaatccttatgcctatgataaatgaagcattttttgctctctacactggtgttgcaaccaaagaggatattgacacaggaatgaagctgggtactaaccatccaatgggtcctttagagcttgcagacttcattggattggatgtgtgcttgtcaataatgagagttcttcatgctggccttggtgacaacaaatatgcaccttgccctctacttgtgcagtatgttgatgctggaagacttggaagaaaacgaggtattggtgtgtatgaatatagtaaagatccaaggtctacaaaatcatcttcccgtctctaaaatgtttgtttcacttggaagaacaagttttcaacacccccattttaattaccttgtgtctgaccgtgggggtggtgcacacggctgaagttgaatacttgaatgtgtcttctatttcttttatgcatacaagcaaaaagaaaattgcaggaactaatagtaaaacatgcatagttaaaac

SEQ ID NO: 21568 - protein, 319 aa, Glycine max
MKAKPSYHHHHRRTTTEEKRKRKMLEVKRIGVVGSGQMGSGIAQVAAMHGIDVWLHDLDPQALSKASSSISSSINRFVSKNHISQVAGADALKRLRLTTDLEDLQLADLIIEAIVESEDVKKSLFAQLDRIAKSSAILASNTSSISVTRLATSTSRPRQVIGMHFMNPPPVMKLIEIVRGADTSEETFVATKALSERLGKVVITSHDYSGFIVNRILMPMINEAFFALYTGVATKEDIDTGMKLGTNHPMGPLELADFIGLDVCLSIMRVLHAGLGDNKYAPCPLLVQYVDAGRLGRKRGIGVYEYSKDPRSTKSSSRL

SEQ ID NO: 21569 - protein, 296 aa, Glycine max
MLEVKRIGVVGSGQMGSGIAQVAAMHGIDVWLHDLDPQALSKASSSISSSINRFVSKNHISQVAGADALKRLRLTTDLEDLQLADLIIEAIVESEDVKKSLFAQLDRIAKSSAILASNTSSISVTRLATSTSRPRQVIGMHFMNPPPVMKLIEIVRGADTSEETFVATKALSERLGKVVITSHDYSGFIVNRILMPMINEAFFALYTGVATKEDIDTGMKLGTNHPMGPLELADFIGLDVCLSIMRVLHAGLGDNKYAPCPLLVQYVDAGRLGRKRGIGVYEYSKDPRSTKSSSRL

SEQ ID NO: 21570 - protein, 282 aa, Glycine max
MGSGIAQVAAMHGIDVWLHDLDPQALSKASSSISSSINRFVSKNHISQVAGADALKRLRLTTDLEDLQLADLIIEAIVESEDVKKSLFAQLDRIAKSSAILASNTSSISVTRLATSTSRPRQVIGMHFMNPPPVMKLIEIVRGADTSEETFVATKALSERLGKVVITSHDYSGFIVNRILMPMINEAFFALYTGVATKEDIDTGMKLGTNHPMGPLELADFIGLDVCLSIMRVLHAGLGDNKYAPCPLLVQYVDAGRLGRKRGIGVYEYSKDPRSTKSSSRL

SEQ ID NO: 21571 - DNA, 1282 bp, Glycine max
acaataaactatctattttccaacttcaatattcactgttgttgagtattctaattctaatgaggaacaggggtgtgtgggaagatgcaagcacagcaacagtgcttgtacttgtgctatgttcatcgtatggaattgcagaagtaaagtcacagtcacagaaggtatctggtttgtttgtttttggagattcattggttgaagtaggcaacaataacttcctaaacaccatagcaagggcaaattactttccttacggcatcgacttcggcaggggttccactggccgattttctaatggcaaatccctcattgacttcattggagacttgctgggcattccttctcctccaccttttgcagatccctccactgttggaaccagaatactttatggtgtcaattatgcatcagcttctgccggcattctggatgagtcagggagacactatggtgatcggtatagcctgagccagcaagtcctgaactttgagaacacactgaatcagtataggacaatgatgaatggaagtgcattgaatcagttcttagccaagtctatagcagttgtggtaactggaagcaatgactacatcaacaactacctcctgcctggcttatatggctccagtcgaaattatactgcccaagactttggcaatctacttgttaatagctatgtgcgacaaattttggcactacatagcgtaggattaaggaagttcttcctagcaggaattgggccactgggttgcatccctagtcttcgagccgctgctttagccccaacaggaagatgcgtggacttggttaatcagatggttggaacttttaatgaagggcttagatcaatggtggaccaactcaacagaaaccatcctaatgctatctttgtatacggtaacacttaccgtgtctttggtgatatcctaaataaccccgcggccttcgcgtttaatgttgtggatagagcatgttgtggaataggaaggaaccgaggtcaactaacatgcctcccattacaatttccatgcacaagcagaaaccagtatgtgttttgggatgccttccacccaacagaatctgcaacttatgtcttcgcatggagagttgttaatggagcgcccgatgatagttatccaattaatatgcaacaaatggctaccatttaatccactctatcttcctgtattctcctttcatttataaaccaaaaaagtgtaccaaaagtgaagccaaattctacatctattgttgggtataaaataattacttttgggct

SEQ ID NO: 21572 - protein, 389 aa, Glycine max
NKLSIFQLQYSLLLSILILMRNRGVWEDASTATVLVLVLCSSYGIAEVKSQSQKVSGLFVFGDSLVEVGNNNFLNTIARANYFPYGIDFGRGSTGRFSNGKSLIDFIGDLLGIPSPPPFADPSTVGTRILYGVNYASASAGILDESGRHYGDRYSLSQQVLNFENTLNQYRTMMNGSALNQFLAKSIAVVVTGSNDYINNYLLPGLYGSSRNYTAQDFGNLLVNSYVRQILALHSVGLRKFFLAGIGPLGCIPSLRAAALAPTGRCVDLVNQMVGTFNEGLRSMVDQLNRNHPNAIFVYGNTYRVFGDILNNPAAFAFNVVDRACCGIGRNRGQLTCLPLQFPCTSRNQYVFWDAFHPTESATYVFAWRVVNGAPDDSYPINMQQMATI

SEQ ID NO: 21573 - protein, 370 aa, Glycine max
MRNRGVWEDASTATVLVLVLCSSYGIAEVKSQSQKVSGLFVFGDSLVEVGNNNFLNTIARANYFPYGIDFGRGSTGRFSNGKSLIDFIGDLLGIPSPPPFADPSTVGTRILYGVNYASASAGILDESGRHYGDRYSLSQQVLNFENTLNQYRTMMNGSALNQFLAKSIAVVVTGSNDYINNYLLPGLYGSSRNYTAQDFGNLLVNSYVRQILALHSVGLRKFFLAGIGPLGCIPSLRAAALAPTGRCVDLVNQMVGTFNEGLRSMVDQLNRNHPNAIFVYGNTYRVFGDILNNPAAFAFNVVDRACCGIGRNRGQLTCLPLQFPCTSRNQYVFWDAFHPTESATYVFAWRVVNGAPDDSYPINMQQMATI

SEQ ID NO: 21574 - protein, 217 aa, Glycine max
MMNGSALNQFLAKSIAVVVTGSNDYINNYLLPGLYGSSRNYTAQDFGNLLVNSYVRQILALHSVGLRKFFLAGIGPLGCIPSLRAAALAPTGRCVDLVNQMVGTFNEGLRSMVDQLNRNHPNAIFVYGNTYRVFGDILNNPAAFAFNVVDRACCGIGRNRGQLTCLPLQFPCTSRNQYVFWDAFHPTESATYVFAWRVVNGAPDDSYPINMQQMATI

SEQ ID NO: 21575 - DNA, 1249 bp, Glycine max
ctcctctctcctctctcgaaaacagtgttccaaaatccaaacacactctctctccccatggcgttgaacaatggcgtccccgccaccggcaccggcctcatcgtcagcttcggtgagatgctcatcgacttcgtccccaccgtctctggcgtgtccctggccgaggcccctggcttcctcaaggcccccggcggcgcccccgctaacgtcgccatcgccgtgtcgcgcctcggcggcaaagccgccttcgtcggcaagctcggcgacgacgagttcggccacatgctcgccggaatcctcaaggaaaacggcgttcgcgccgacggcatcaactttgaccagggcgcacgcaccgccctggccttcgtgaccctacgcgccgacggggagcgtgagttcatgttctacagaaaccccagcgccgacatgctcctcaagcccgaagaactcaatctcgaactcatcagatctgcaaaagttttccattacggatcaatcagtttgatcgtggagccatgcagatcagcacacttgaaggcaatggaagtagccaaggaatctgggtgcttgctctcctatgaccccaaccttcgtctacctttgtggccttcggctgaggaagctcgtaagcaaatactgagcatttgggagaaggctgatttgatcaaggtcagtgatgcggagcttgagttcctcacaggaagtgacaagattgatgatgaatctgctttgtcattgtggcaccccaatttgaagttgctccttgtcactcttggggaacatggttccagatactacaccaagagtttcaaaggatcggtagatgctttccatgtcaatacagttgatacaactggtgccggtgattcctttgttggtgctttattggccaagattgtcgatgatcagtccatacttgaagatgaaccaaggttaagagaagtactaaagtttgcaaatgcatgtggagctattacaactacccaaaagggagcaattccggcccttcccaaagaggaggctgcactgaaactgatcaaaggggggtcatagaatcttttggcaaaatgcaaaagtgctagcatgatttcgttttcttcccctaatgtttaaattttccgttggatttgcttgctataagtttaggagggaacttttgttttttctcctatgcactgttttcaggttttgccaaataacgctttctttcaaattttgagattagcgattgaatgaaaatttgaatcat

SEQ ID NO: 21576 - protein, 350 aa, Glycine max
LLSPLSKTVFQNPNTLSLPMALNNGVPATGTGLIVSFGEMLIDFVPTVSGVSLAEAPGFLKAPGGAPANVAIAVSRLGGKAAFVGKLGDDEFGHMLAGILKENGVRADGINFDQGARTALAFVTLRADGEREFMFYRNPSADMLLKPEELNLELIRSAKVFHYGSISLIVEPCRSAHLKAMEVAKESGCLLSYDPNLRLPLWPSAEEARKQILSIWEKADLIKVSDAELEFLTGSDKIDDESALSLWHPNLKLLLVTLGEHGSRYYTKSFKGSVDAFHVNTVDTTGAGDSFVGALLAKIVDDQSILEDEPRLREVLKFANACGAITTTQKGAIPALPKEEAALKLIKGGS

SEQ ID NO: 21577 - protein, 331 aa, Glycine max
MALNNGVPATGTGLIVSFGEMLIDFVPTVSGVSLAEAPGFLKAPGGAPANVAIAVSRLGGKAAFVGKLGDDEFGHMLAGILKENGVRADGINFDQGARTALAFVTLRADGEREFMFYRNPSADMLLKPEELNLELIRSAKVFHYGSISLIVEPCRSAHLKAMEVAKESGCLLSYDPNLRLPLWPSAEEARKQILSIWEKADLIKVSDAELEFLTGSDKIDDESALSLWHPNLKLLLVTLGEHGSRYYTKSFKGSVDAFHVNTVDTTGAGDSFVGALLAKIVDDQSILEDEPRLREVLKFANACGAITTTQKGAIPALPKEEAALKLIKGGS

SEQ ID NO: 21578 - protein, 311 aa, Glycine max
MLIDFVPTVSGVSLAEAPGFLKAPGGAPANVAIAVSRLGGKAAFVGKLGDDEFGHMLAGILKENGVRADGINFDQGARTALAFVTLRADGEREFMFYRNPSADMLLKPEELNLELIRSAKVFHYGSISLIVEPCRSAHLKAMEVAKESGCLLSYDPNLRLPLWPSAEEARKQILSIWEKADLIKVSDAELEFLTGSDKIDDESALSLWHPNLKLLLVTLGEHGSRYYTKSFKGSVDAFHVNTVDTTGAGDSFVGALLAKIVDDQSILEDEPRLREVLKFANACGAITTTQKGAIPALPKEEAALKLIKGGS

SEQ ID NO: 21579 - DNA, 1266 bp, Glycine max
taacaatggataaccaaaaagcaatggaactctttgagggccaatctcttttgtacatgcagctatatgggcacctaagacctatgtgtcttaagtgggctgttcaactaggtattccagacataatacagaaccatgccaaacccattactctttctgatttggtctctactcttcaaattccaccatctaaggctggttttgtgcagcagttcatgcgctttttggcacacgatggaatctttgatatccgtgagagccaagatgatcatgaattagcatatgctctaacccctgcttcaaagcttctagttagttgcagtgaccactgtttatctccaatggttcggatgaatactgatccacttctgatgactacataccatcactttggggaatggattcgtggggaagaccccacagtacatgagacagccttcggaacaagcttttggggacttcttgagaaaaaccctacacaaatgagtctcttcaatgaggctatggcaagtgattcccgaatggtagacttggcactcaaaaattgcacttcagtttttgaagggctagattccatggtggatgttggtggtggaactggaaccacagccagaattatctgtgaggcatttccgaagttgaaatgtgttgtgcttgaccttcctcatgttgtagaaaacttgacaggaaccaataatttgagttttgtcggtggtgacatgttcaactctttccctcaaactgatgcagttctactaaagtgggttttacataattggaatgacgaaaattgcataaagatcctgaaaaagtgtaaagattctatttcaagcaaaggcaacagaggaaaagtgattatcatagatataataataaatgagaagctagatgacccggatatgactcgaacaaagcttagtttggatatagttatgtcgactatgaatggaagagagcgaagtgaaaaagaatggaaacaaatgttcattgaagcgggattccaacactgcaaaatatttcccatctttggtttcagatctctaattgagctctatccttagacatatatcctagcttgttatgcattttatagtttgcgcatgttgtgatgagctgaataaagctatgatggcatagcattgtcaacttctggtggaattacaatatgttccttaccactagctataggtggttaaatgttcagtgtacggatttctcattcctatttggccaaaataaattgaatgaacatgtaatggatttagc

SEQ ID NO: 21580 - protein, 352 aa, Glycine max
TMDNQKAMELFEGQSLLYMQLYGHLRPMCLKWAVQLGIPDIIQNHAKPITLSDLVSTLQIPPSKAGFVQQFMRFLAHDGIFDIRESQDDHELAYALTPASKLLVSCSDHCLSPMVRMNTDPLLMTTYHHFGEWIRGEDPTVHETAFGTSFWGLLEKNPTQMSLFNEAMASDSRMVDLALKNCTSVFEGLDSMVDVGGGTGTTARIICEAFPKLKCVVLDLPHVVENLTGTNNLSFVGGDMFNSFPQTDAVLLKWVLHNWNDENCIKILKKCKDSISSKGNRGKVIIIDIIINEKLDDPDMTRTKLSLDIVMSTMNGRERSEKEWKQMFIEAGFQHCKIFPIFGFRSLIELYP

SEQ ID NO: 21581 - protein, 351 aa, Glycine max
MDNQKAMELFEGQSLLYMQLYGHLRPMCLKWAVQLGIPDIIQNHAKPITLSDLVSTLQIPPSKAGFVQQFMRFLAHDGIFDIRESQDDHELAYALTPASKLLVSCSDHCLSPMVRMNTDPLLMTTYHHFGEWIRGEDPTVHETAFGTSFWGLLEKNPTQMSLFNEAMASDSRMVDLALKNCTSVFEGLDSMVDVGGGTGTTARIICEAFPKLKCVVLDLPHVVENLTGTNNLSFVGGDMFNSFPQTDAVLLKWVLHNWNDENCIKILKKCKDSISSKGNRGKVIIIDIIINEKLDDPDMTRTKLSLDIVMSTMNGRERSEKEWKQMFIEAGFQHCKIFPIFGFRSLIELYP

SEQ ID NO: 21582 - protein, 345 aa, Glycine max
MELFEGQSLLYMQLYGHLRPMCLKWAVQLGIPDIIQNHAKPITLSDLVSTLQIPPSKAGFVQQFMRFLAHDGIFDIRESQDDHELAYALTPASKLLVSCSDHCLSPMVRMNTDPLLMTTYHHFGEWIRGEDPTVHETAFGTSFWGLLEKNPTQMSLFNEAMASDSRMVDLALKNCTSVFEGLDSMVDVGGGTGTTARIICEAFPKLKCVVLDLPHVVENLTGTNNLSFVGGDMFNSFPQTDAVLLKWVLHNWNDENCIKILKKCKDSISSKGNRGKVIIIDIIINEKLDDPDMTRTKLSLDIVMSTMNGRERSEKEWKQMFIEAGFQHCKIFPIFGFRSLIELYP

SEQ ID NO: 21583 - DNA, 1591 bp, Glycine max
atcgcccccactcttgaagtagaagagtgttgtcatttctcaattgttcttagttgcgaagcagtttgcagcatagcactatctcgaaattgttcattttcctctaatctatggatcccgaaacagcgttagaacttgtcaagcacggtgtcactctcctcttactcgatgttcctcagtacacccttgtcgccgtcgatactcagattggcaacgcgacattgtttttcttctctgtttggttttgtagatgttctctgtggggcctgcttttaagggtattaagatgattcctccaggcgttcattttgtgtattatagttcatcaagcagggatgggaaggagttctcatcaattattggattttttattgatgctggcccttcagaggtaattgttcgtaaatgggatcaacaagaggaaaggttaatcaaattatctgaggaagaggaagaaagatatagtcaagctgttaaaaatttggaatttgacagacaacttggaccttacaatctcagccattatgaagattggaaacaattatctaattttatcacaaagagcgtcattgaacggcttgagcccattggaggtgaaattactgttgaatgtgaaaatgagatagttagaaatgctactaaaatgccaatggaggacgcactaggcaagcagctgaaggttggtaattctgcaacatctgttggcaagtctcagaggaaaggatgttattatacctcaattccacatgttgtgaaatgcaaggggattagtgggcaggaacttacttctttgaatctcgacaagacacaattgttagaaactctactggcaaaagattatggaggttctgaagacttgcttcttggagaactgcaatttgcatttgttgcctttttgatggggcaatcacttgaagcatttctccaatggaagtcattagttagccttttgtttggctgcactgaagcacctttccgcacacgaactcatctattcacaaagttcataaaagtcatctataatcaactaaaatacggactacagaaagatcacatgggtgaaacaggatcagcattattggacgattcttggatttctgctgatagctttttgcaccatctttgcaaggacttcttttcatcattgcttgatgggtcggttgttgatggagatcttttaaaatggacaaggaaatttaaggagctgttggagagaaatctagggtgggagtttcagcagagcagtgctgttgatggaatatattttgaggagaatgatgagtacgctcctgtagttgagatgttggatgatgaagctccagttgtttaaaaatgtggattatgtcatcacttggccataacaggtttttctgaggaactaaaccatgactgtcacgccactttgcatggcctttggccaacttacactcacaagcatacccttccctcacaatgtacagtaaaagcaaactataggaagatcatttgcaatatatcaaatttcaattgtgttaaagtcaaatgttgtacttaaagtagaagttcagtaactttcaataactttgatggagattgatattgtttaaaaaag

SEQ ID NO: 21584 - protein, 359 aa, Glycine max
MFSVGPAFKGIKMIPPGVHFVYYSSSSRDGKEFSSIIGFFIDAGPSEVIVRKWDQQEERLIKLSEEEEERYSQAVKNLEFDRQLGPYNLSHYEDWKQLSNFITKSVIERLEPIGGEITVECENEIVRNATKMPMEDALGKQLKVGNSATSVGKSQRKGCYYTSIPHVVKCKGISGQELTSLNLDKTQLLETLLAKDYGGSEDLLLGELQFAFVAFLMGQSLEAFLQWKSLVSLLFGCTEAPFRTRTHLFTKFIKVIYNQLKYGLQKDHMGETGSALLDDSWISADSFLHHLCKDFFSSLLDGSVVDGDLLKWTRKFKELLERNLGWEFQQSSAVDGIYFEENDEYAPVVEMLDDEAPVV

SEQ ID NO: 21585 - protein, 347 aa, Glycine max
MIPPGVHFVYYSSSSRDGKEFSSIIGFFIDAGPSEVIVRKWDQQEERLIKLSEEEEERYSQAVKNLEFDRQLGPYNLSHYEDWKQLSNFITKSVIERLEPIGGEITVECENEIVRNATKMPMEDALGKQLKVGNSATSVGKSQRKGCYYTSIPHVVKCKGISGQELTSLNLDKTQLLETLLAKDYGGSEDLLLGELQFAFVAFLMGQSLEAFLQWKSLVSLLFGCTEAPFRTRTHLFTKFIKVIYNQLKYGLQKDHMGETGSALLDDSWISADSFLHHLCKDFFSSLLDGSVVDGDLLKWTRKFKELLERNLGWEFQQSSAVDGIYFEENDEYAPVVEMLDDEAPVV

SEQ ID NO: 21586 - protein, 228 aa, Glycine max
MPMEDALGKQLKVGNSATSVGKSQRKGCYYTSIPHVVKCKGISGQELTSLNLDKTQLLETLLAKDYGGSEDLLLGELQFAFVAFLMGQSLEAFLQWKSLVSLLFGCTEAPFRTRTHLFTKFIKVIYNQLKYGLQKDHMGETGSALLDDSWISADSFLHHLCKDFFSSLLDGSVVDGDLLKWTRKFKELLERNLGWEFQQSSAVDGIYFEENDEYAPVVEMLDDEAPVV

SEQ ID NO: 21587 - DNA, 1254 bp, Glycine max
ctttcataaatatttctttcgtataactcggtcccacttgccttcttctgtaacgtgtaaaaaacaaacactaaatctcccgcacccccgagcccggaaagagatctagtgtgtctgtgactgtcagaaacaaacattatttggttttctgaattgtttggattgcgagaaaaaaaaaaaaaggaaaaatggcaaaggatattcgattcttcgacctcaacacgggcgccaagatcccttcagtcggcttgggaacttggcagtccgatcctggccttgttgctgaagccgtcgcggcggccatcaaggttggttaccgccacattgattgtgctcaaatctatggcaatgagaaggagattggctctttgttgaagaatctgtttgaggagggtgtattgaagcgcgaggatttgtggattacatctaaactctggaatactgatcatgctccagaagatgtaccactggcactggaccggaccttgaaagatttgcagctggattatgtagatttgtatcttatccactggcctgctccgatgaagaaaggatcagctggctttaagcctgaaaatcttgtgcaaccaaacatacctaacacctggaaggcgatggaagcactctatgactctggcaaggctcggaccatcggtgtaagcaatttttccaccaagaagctctcggatttgctgctaattgctcgtgttcctcccgctgtcaaccaggtggagtgtcatccttcctggcagcaggacaagctgcaggctttctgcaattccaaaggtgtccacctctctggatattcacctttgggttcccctggaacaacctggcttaaaagtgatgtcctcaagcatcaagttataaatatgattgcggagaaactaggcaagacgcctgcacaagtagctcttcgctggggacttcaaatgggccatagtgttcttcccaagagtacaaacgaaactagaataaaggaaaattttgatgtttttggctggtctatacctgaggacctgctcgccaaattttctgagattcaacaggcaagattactcaggggtaccacatttgcccatgaaacttatggtgcctacagatcccttgaggaactttgggatggtgaaatctgagaaatctatctgtaaatttgataagtgaatggatcgaggagtgagagttctgtgaaactgtgaatcagtatactcctttgttgacttgagcaaattttattttattcctggtttgacg

SEQ ID NO: 21588 - protein, 315 aa, Glycine max
MAKDIRFFDLNTGAKIPSVGLGTWQSDPGLVAEAVAAAIKVGYRHIDCAQIYGNEKEIGSLLKNLFEEGVLKREDLWITSKLWNTDHAPEDVPLALDRTLKDLQLDYVDLYLIHWPAPMKKGSAGFKPENLVQPNIPNTWKAMEALYDSGKARTIGVSNFSTKKLSDLLLIARVPPAVNQVECHPSWQQDKLQAFCNSKGVHLSGYSPLGSPGTTWLKSDVLKHQVINMIAEKLGKTPAQVALRWGLQMGHSVLPKSTNETRIKENFDVFGWSIPEDLLAKFSEIQQARLLRGTTFAHETYGAYRSLEELWDGEI

SEQ ID NO: 21589 - protein, 197 aa, Glycine max
MKKGSAGFKPENLVQPNIPNTWKAMEALYDSGKARTIGVSNFSTKKLSDLLLIARVPPAVNQVECHPSWQQDKLQAFCNSKGVHLSGYSPLGSPGTTWLKSDVLKHQVINMIAEKLGKTPAQVALRWGLQMGHSVLPKSTNETRIKENFDVFGWSIPEDLLAKFSEIQQARLLRGTTFAHETYGAYRSLEELWDGEI

SEQ ID NO: 21590 - protein, 173 aa, Glycine max
MEALYDSGKARTIGVSNFSTKKLSDLLLIARVPPAVNQVECHPSWQQDKLQAFCNSKGVHLSGYSPLGSPGTTWLKSDVLKHQVINMIAEKLGKTPAQVALRWGLQMGHSVLPKSTNETRIKENFDVFGWSIPEDLLAKFSEIQQARLLRGTTFAHETYGAYRSLEELWDGEI

SEQ ID NO: 21591 - DNA, 1745 bp, Glycine max
atcatcatcactctcatcttcttcttcttttcaagataacatctctgaagtgatctttcatggagagagagattgaacattgtgacaaggtgatgagccaaagcagcatggatgcttgtcccaaatcagggcctggttatgcttcaccactagcagccatttctggtcccagagagactctcctttatgtcactgctatctactcaggaacaggaagggataagcctgactttctggccacagtggatgtggatccaagctctccaacgtattcaaaagttatccataggctacctgtaccttatttaggtgatgaactgcaccattttgggtggaattcatgcagctcttgctatggagatccaacagcagttcggcgatatctgattttgccttcactggtatcaggccgcatttatgtggttgacacaaaagcaaatccaaggtctccatctttgcacaaagttgttgagccagaagacattataagtaagactggattagcttatgcacacacatctcattgccttgcttctggtgacgtgttgatctcatttcttggagacaaagatggaaatgcagaaggaagtggatttcttctccttgatcatgaatttaatttgaaaggaaggtgggagaaacctgggcacagtccatcatttgggtatgacttctggtaccaaccacagcataagactatgattagctcatcatggggtgctcctgctgctttcaccaaaggttttaatttacagcatgtctctgatggtctttatgggaggcatctacatgtatacagctggcctgggggtgaactgagacaaacattggaccttggtgagtcagggcttctacccttggaggtaagatttctgcatgatccttctaaagatacaggtttcgttgggtgtgcattgtcaagtaacatggtacgctttttcaagactgaagatgaatcatggagtcatgaggttgcaatatcagtgaaaccattgaaagtgcaaaactggattcttccagaaatgccagggcttataactgattttctgatatctctcgatgatcggtttctgtactttgtgaattggcttcatggtgatataagacaatataacattgaggaccctaaaaatcctgtacggactggccaagtatgggttgggggactgctacagaaaggaagccctatagtagctataactgaagatggtaatacttggcattctgatgttccagacatcctgggaaataagttgagagctggccctcagatgattcagttgagtttggatggtaagcggctatatgttacaaactcactcttcagtgcatgggataaacaattttatccagagcttgtagagaaaggatcccacatgttacagattgatgttgatactgaaaatggtggtctgaaaattaaccctaacttttttgttgactttggagctgagcctggaggttcctgccttgcacatgagatgagatatcctggtggtgactgcacttcagatatatggatttgatagctatgccacttgaggccaggctacaagcaatatccatgtgaataaattccttagtcctagaatgaatagaggtgggctaatgttataaataaataatagatgcatatgcatgatggtttcattgtaataaagttatattttcatgtagttttcagtacttcctcatttacatcttcctaaacagagttctctgtaaaataaatcttgctcacctcc

SEQ ID NO: 21592 - protein, 488 aa, Glycine max
MEREIEHCDKVMSQSSMDACPKSGPGYASPLAAISGPRETLLYVTAIYSGTGRDKPDFLATVDVDPSSPTYSKVIHRLPVPYLGDELHHFGWNSCSSCYGDPTAVRRYLILPSLVSGRIYVVDTKANPRSPSLHKVVEPEDIISKTGLAYAHTSHCLASGDVLISFLGDKDGNAEGSGFLLLDHEFNLKGRWEKPGHSPSFGYDFWYQPQHKTMISSSWGAPAAFTKGFNLQHVSDGLYGRHLHVYSWPGGELRQTLDLGESGLLPLEVRFLHDPSKDTGFVGCALSSNMVRFFKTEDESWSHEVAISVKPLKVQNWILPEMPGLITDFLISLDDRFLYFVNWLHGDIRQYNIEDPKNPVRTGQVWVGGLLQKGSPIVAITEDGNTWHSDVPDILGNKLRAGPQMIQLSLDGKRLYVTNSLFSAWDKQFYPELVEKGSHMLQIDVDTENGGLKINPNFFVDFGAEPGGSCLAHEMRYPGGDCTSDIWI

SEQ ID NO: 21593 - protein, 477 aa, Glycine max
MSQSSMDACPKSGPGYASPLAAISGPRETLLYVTAIYSGTGRDKPDFLATVDVDPSSPTYSKVIHRLPVPYLGDELHHFGWNSCSSCYGDPTAVRRYLILPSLVSGRIYVVDTKANPRSPSLHKVVEPEDIISKTGLAYAHTSHCLASGDVLISFLGDKDGNAEGSGFLLLDHEFNLKGRWEKPGHSPSFGYDFWYQPQHKTMISSSWGAPAAFTKGFNLQHVSDGLYGRHLHVYSWPGGELRQTLDLGESGLLPLEVRFLHDPSKDTGFVGCALSSNMVRFFKTEDESWSHEVAISVKPLKVQNWILPEMPGLITDFLISLDDRFLYFVNWLHGDIRQYNIEDPKNPVRTGQVWVGGLLQKGSPIVAITEDGNTWHSDVPDILGNKLRAGPQMIQLSLDGKRLYVTNSLFSAWDKQFYPELVEKGSHMLQIDVDTENGGLKINPNFFVDFGAEPGGSCLAHEMRYPGGDCTSDIWI

SEQ ID NO: 21594 - protein, 472 aa, Glycine max
MDACPKSGPGYASPLAAISGPRETLLYVTAIYSGTGRDKPDFLATVDVDPSSPTYSKVIHRLPVPYLGDELHHFGWNSCSSCYGDPTAVRRYLILPSLVSGRIYVVDTKANPRSPSLHKVVEPEDIISKTGLAYAHTSHCLASGDVLISFLGDKDGNAEGSGFLLLDHEFNLKGRWEKPGHSPSFGYDFWYQPQHKTMISSSWGAPAAFTKGFNLQHVSDGLYGRHLHVYSWPGGELRQTLDLGESGLLPLEVRFLHDPSKDTGFVGCALSSNMVRFFKTEDESWSHEVAISVKPLKVQNWILPEMPGLITDFLISLDDRFLYFVNWLHGDIRQYNIEDPKNPVRTGQVWVGGLLQKGSPIVAITEDGNTWHSDVPDILGNKLRAGPQMIQLSLDGKRLYVTNSLFSAWDKQFYPELVEKGSHMLQIDVDTENGGLKINPNFFVDFGAEPGGSCLAHEMRYPGGDCTSDIWI

SEQ ID NO: 21595 - DNA, 1300 bp, Glycine max
acttttcattttctaggttacatggttttagttgatgtgacaatgcttggatcgttgtaaggggcaactgaattattttagtaatgtatgataaactatccctttataaatgtgcagccaatctcttgcaattagctaaagaaagtggggctaatattaaacatattttatacaatgatgagaaatataaatttatgaatataaaagcattatatgcccttgtatgtgaggcattgaaacattggagtatcattgaacttctaattaacgaatcaaaaatattgatcaatgaacaagaattagacatttggcttgtcagaatattaattacagagcacatttttggaaagaagaaaattgatagtcttaatgaatttgggcgtacaattcttcaatatgaatccaagtttagagaactgctctccaaacaagattcttataacacagaccatgtaaataagaatatagaaattaaaggtaagttctactactttcagcgttttatatagtttaatttggttttgttgcagacagtctaagcattggcggattgagtggacatctaacgtgagaagtgcagtcagtcaagaacttgaccttttagttaccaattaaaattccttaaaataaattaaaacttatttgtaaagtgaaaactcaacattcttctaaaatcttatgacatctgcaacaatgtcctatgttggtgtattagcatatttatttctctacagtacagctatgtttacctttcctttcatagcttactttgggacccattacattttgaaagacgtttttaatgttagtgatttctcaaatattgtatggtcagttattgctagtgtactagctgtcaacataattattggactgtatgcgtacaaagcgtattatgagcctgaaccagatagtgaccagcccccgcctgttccaccacgcatgaaaaggagtgacctcaacctgaaacaagaataacggtttagttacaaagacttagttttagttaattttttagaaatatctcgcttatcataattgatgtacatattatgcctgcttatataatcattgtttggtcaaagttgatgtaaataaatgtgattttatgtactacatgtatagcaaaaatagagccaaatattgttattattttatcacaattttataatattattgtaaagcaataattcagtattatgaaaatattaataatatttttagtgttataaaataataataataaaacatgcatatatatattaataaatatttcattaataaatcgctattgaatttg

SEQ ID NO: 21596 - protein, 141 aa, Glycine max
MYDKLSLYKCAANLLQLAKESGANIKHILYNDEKYKFMNIKALYALVCEALKHWSIIELLINESKILINEQELDIWLVRILITEHIFGKKKIDSLNEFGRTILQYESKFRELLSKQDSYNTDHVNKNIEIKGKFYYFQRFI

SEQ ID NO: 21597 - protein, 104 aa, Glycine max
MNIKALYALVCEALKHWSIIELLINESKILINEQELDIWLVRILITEHIFGKKKIDSLNEFGRTILQYESKFRELLSKQDSYNTDHVNKNIEIKGKFYYFQRFI

SEQ ID NO: 21598 - protein, 99 aa, Glycine max
MTSATMSYVGVLAYLFLYSTAMFTFPFIAYFGTHYILKDVFNVSDFSNIVWSVIASVLAVNIIIGLYAYKAYYEPEPDSDQPPPVPPRMKRSDLNLKQE

SEQ ID NO: 21599 - DNA, 1427 bp, Glycine max
aaccctctttggcgtggctaacaaaacgacgttttgagtaacgcggcagcgtgtgccgggagtgtcgtttaatcgcccgccaagacattttcctttttcatttcatcgctgagtccctaaagtgcagtgaaatggtccttcttcacctcccaaggttccctctctacctcgttaccttatctccctccctcactccccgagcctactccaaaaccaccctcttacggccacccaaatccactctcaccgcctcagaacccgtaggtgttaacccttccccaacagagctatccctcgagaagctcttcgttccgccggagaccaccgtgtccctcgaaagttccagagtcttgaacggttccaacattctgttgagtaactacgccaatgatgctctggtattgcaggccgagtttgtgaaaagcagcgtgaagaccgaggattgtccctccgatggacttgctgagttcgctctcgttggccgctccaacgtcggaaaatcctcgctcctcaactccctcgtgcgccgcaagaagctcgccttaacttcgaagaaacctggcaaaacgcaatgtataaaccattttcggattaataatagctggtacctggttgatttgcctggatatgggtatgcatctgcaccgcatgaacttaggatggattgggaaaaattcaccaaaaactatttccttaaccgctcaacgttagtttcagtattccttctaatagatgctagcattcctgctaaacaaattgatcttgactatgccagttggttgggtcagaatcagatcccaatgacattaatcttcaccaaatgtgacaagcggaaaaagaaaaagaatggaggcaaaagaccagaagaaaatgttaatgattttcaggatttgattcgaggtttcttccaatcagtgcctccatggatcatgaccagtagtgttaccaatcagggtcgtgatgagatactcctccatatggcccagctacggaactactggctcaagcactagttctgagaaacatgatatcgttagagcagatacgcatttccagatagacttgcttgattaccagctaatatggttatcaatttatctattttcctggtgtgccttctctgtattgcccaagtacctacaaggcctaaagctagtgacatgaaagctggataaagaaaactatttagaacaaagcttgatactgtactgtacaacaccatgcctgcgtgaggttctctactcccagccctgtacgattgttctaatgaagtttgttttggatgttcacaaatggttattatcacctgtaaattagtaatgatattttcattcaaataattggatacttccaaagtactattgtcgttgattttaaagaacttatatgtgagatttttgccactcccccgaagtgacacttcatag

SEQ ID NO: 21600 - protein, 293 aa, Glycine max
MVLLHLPRFPLYLVTLSPSLTPRAYSKTTLLRPPKSTLTASEPVGVNPSPTELSLEKLFVPPETTVSLESSRVLNGSNILLSNYANDALVLQAEFVKSSVKTEDCPSDGLAEFALVGRSNVGKSSLLNSLVRRKKLALTSKKPGKTQCINHFRINNSWYLVDLPGYGYASAPHELRMDWEKFTKNYFLNRSTLVSVFLLIDASIPAKQIDLDYASWLGQNQIPMTLIFTKCDKRKKKKNGGKRPEENVNDFQDLIRGFFQSVPPWIMTSSVTNQGRDEILLHMAQLRNYWLKH

SEQ ID NO: 21601 - DNA, 919 bp, Glycine max
gcattagtattttaagtagtacatattcacttgaaaaaaaaatattatcgtgcaaagaacaagcttggaaaagaaaaatcttttaaaacgagttattcattttccaaaatcttttaactagtactttattaaaactcaattatctaattttgtttttgttgggttgcggtgtttctccgagttgcttcaattgaatggctcttcagcttccaccacttcctggccgtgccatgcgcttcaactcaagcgtgtgctcccttcctgcacgaaaatctagcacctttgccactctgtcacaaccccgaagcgactgggttgaagccactaacagtttcttcgaccaagacaaacgacccatcatgttatttgacggagtatgcaacttgtgcaacgggggtgtgaagttcgttcgtgataacgatcgaaataagacaattagatatgaacctcttcagagtgaaacgggtaaaatcttactcaggagatcaggaagagctcctgatgatatctcaagtgttgtacttgttgaaaaggaaagatcctatattaagtcagaagccgtgctgaagataatggaatatatagacttaccctttccacagctagcaattcttcttcaatttgtgcctctgtttatcagagattttgtttatgacaatgttgcaaacaatcgttacctgatttttggtcgttcggaatcatgtgaaatatagcatcatcctggcatgagtactggaggtaacagtaatgtgctaagttcaaaaactgggcttctttatagtccaagtcatatcctgttctcaaatattttgaagattctgtgtactactgtatagaagctttacttgtcgttttatttgataagctcatagaagcagaggacatcatcaattcgtaataatattttctgtcccaaatg

SEQ ID NO: 21602 - protein, 172 aa, Glycine max
MALQLPPLPGRAMRFNSSVCSLPARKSSTFATLSQPRSDWVEATNSFFDQDKRPIMLFDGVCNLCNGGVKFVRDNDRNKTIRYEPLQSETGKILLRRSGRAPDDISSVVLVEKERSYIKSEAVLKIMEYIDLPFPQLAILLQFVPLFIRDFVYDNVANNRYLIFGRSESCEI

SEQ ID NO: 21603 - protein, 160 aa, Glycine max
MRFNSSVCSLPARKSSTFATLSQPRSDWVEATNSFFDQDKRPIMLFDGVCNLCNGGVKFVRDNDRNKTIRYEPLQSETGKILLRRSGRAPDDISSVVLVEKERSYIKSEAVLKIMEYIDLPFPQLAILLQFVPLFIRDFVYDNVANNRYLIFGRSESCEI

SEQ ID NO: 21604 - protein, 117 aa, Glycine max
MLFDGVCNLCNGGVKFVRDNDRNKTIRYEPLQSETGKILLRRSGRAPDDISSVVLVEKERSYIKSEAVLKIMEYIDLPFPQLAILLQFVPLFIRDFVYDNVANNRYLIFGRSESCEI

SEQ ID NO: 21605 - DNA, 1541 bp, Glycine max
aacttgttgagctgcatccacattttcatgtcacatgcatcgttccctcacttggttctctcccaagtgcctcaaaagccatcctagaaactcttccaccaaattacatcaacaccattttgcttccaccggtgaaccctaatgaccaattatcacaagaagacattcccgtactagtcaaaattcatctcacaatgagtcactccatgccatctatacacaaagccttgaagtccttaacttctaaggctacccttgtggccatggtagttgattctttcgcctttgaagcactagactttgctcaagagttcaacatgttgtcctatgtttattttccagcagcagctacaacactgtcaacactcttgcatttgcccaagttggacgaggaaatatcctgtgagtatagagatttctcagatcctatcaaagtaccaggttgtgtaccatttcgtggtggagatttctatggtccagctcaagatagaactagtccagtttacaaattcttgcttcaacgtgttaaccgaatccgtcatgttgatgggatcttcattaatagcttcttggaaatggaaacaagtcctataagagcattgaaagatgaggataaagggtaccctcctgtgtaccctgttggaccaattgtccaaagtggtgatgatgatgcaaaagggttggacttggagtgtttaacatggttggacaaacaacaagttggttcagttttgtatgtttcttttgggagtggtggaacactttcgcaagagcaaataactgagcttgcttttggtttggaattgagtaatcacaagttcttatgggttttgagagcaccgaataatgcaacatctgatgctgcttatcttggtgcacaaaatgatgttgaccctttgaaattcttgcctagtgggtttttggagagaaccaaagagaaaggtatggttgttccttcatgggcaccccaaattcaagtccttagtcacagttcggttggtggattcttgacccactgtggttggaattcaatccttgagagtgtgctaaagggtgtgccgttcatcacatggccactatttgcggagcagaaaatgaatgcggttttgctaagtgagggtctcaaagtgggagtgaggccaagagttagtgaaaatggcttggtggaaagggtggaaattgttgacgtgataaagtgtctaatggaaggggaagaaggtgcgaaaatgcgtgaaagaatgaatgaattaaaagaagatgctactaatgcactcaaagaagatggatcttctacaaaggccctttctcagttgccattatattggaaaattttggcatgaggaaacaagttttattaaatgctttggtaggatctttgctttcttacttttcctggtttttctgcttttgtgagacacctaataattcactagattccttgcattagtgagcattgaatataattgcttggtctagaacgactgagctaatcacattgtagcatgcttatgcagcatttcattagacagttatcttgtgtt

SEQ ID NO: 21606 - protein, 445 aa, Glycine max
LVELHPHFHVTCIVPSLGSLPSASKAILETLPPNYINTILLPPVNPNDQLSQEDIPVLVKIHLTMSHSMPSIHKALKSLTSKATLVAMVVDSFAFEALDFAQEFNMLSYVYFPAAATTLSTLLHLPKLDEEISCEYRDFSDPIKVPGCVPFRGGDFYGPAQDRTSPVYKFLLQRVNRIRHVDGIFINSFLEMETSPIRALKDEDKGYPPVYPVGPIVQSGDDDAKGLDLECLTWLDKQQVGSVLYVSFGSGGTLSQEQITELAFGLELSNHKFLWVLRAPNNATSDAAYLGAQNDVDPLKFLPSGFLERTKEKGMVVPSWAPQIQVLSHSSVGGFLTHCGWNSILESVLKGVPFITWPLFAEQKMNAVLLSEGLKVGVRPRVSENGLVERVEIVDVIKCLMEGEEGAKMRERMNELKEDATNALKEDGSSTKALSQLPLYWKILA

SEQ ID NO: 21607 - protein, 381 aa, Glycine max
MSHSMPSIHKALKSLTSKATLVAMVVDSFAFEALDFAQEFNMLSYVYFPAAATTLSTLLHLPKLDEEISCEYRDFSDPIKVPGCVPFRGGDFYGPAQDRTSPVYKFLLQRVNRIRHVDGIFINSFLEMETSPIRALKDEDKGYPPVYPVGPIVQSGDDDAKGLDLECLTWLDKQQVGSVLYVSFGSGGTLSQEQITELAFGLELSNHKFLWVLRAPNNATSDAAYLGAQNDVDPLKFLPSGFLERTKEKGMVVPSWAPQIQVLSHSSVGGFLTHCGWNSILESVLKGVPFITWPLFAEQKMNAVLLSEGLKVGVRPRVSENGLVERVEIVDVIKCLMEGEEGAKMRERMNELKEDATNALKEDGSSTKALSQLPLYWKILA

SEQ ID NO: 21608 - protein, 377 aa, Glycine max
MPSIHKALKSLTSKATLVAMVVDSFAFEALDFAQEFNMLSYVYFPAAATTLSTLLHLPKLDEEISCEYRDFSDPIKVPGCVPFRGGDFYGPAQDRTSPVYKFLLQRVNRIRHVDGIFINSFLEMETSPIRALKDEDKGYPPVYPVGPIVQSGDDDAKGLDLECLTWLDKQQVGSVLYVSFGSGGTLSQEQITELAFGLELSNHKFLWVLRAPNNATSDAAYLGAQNDVDPLKFLPSGFLERTKEKGMVVPSWAPQIQVLSHSSVGGFLTHCGWNSILESVLKGVPFITWPLFAEQKMNAVLLSEGLKVGVRPRVSENGLVERVEIVDVIKCLMEGEEGAKMRERMNELKEDATNALKEDGSSTKALSQLPLYWKILA

SEQ ID NO: 21609 - DNA, 1647 bp, Glycine max
aatttaccattcattttggtattttctatattggtctatgagtagcttagttttaaaattcagcagcaactcacaattaccaccacccttttgtttttgttcatgagtgtggcggcttcttatttatgacttcaagctaatcatcttttcttcttgttgtttgctatttttttagttataaactggcttgtgctgtatgttaggcttcttatttcatgttaatatgttatttaccttggcgatttcaacttgtactttatcttaagaataagcttcaaggctaaaccaatgtacacaccttgtgcaggacagacaaagctgattcacttaggagcctcaagagctatgtctacatcttctcgtgctcttcccactcccttggaaaacaagtatatgaaacccccagattcttttcagctttcacccgtcagatctgactgcaaattctgcctcatcaaattcaatcagaagtgctgggaagatgttgtcttcaccttctgaatgtcccgatgatatccctttttcctttgtttctcagacatcaggtgacaatgtgtcttccgaaattcattcaacagcattgatttctcaccctcaagataatgaagatctttcctggggaccagatccatttcaggatattcttggctttcctgaaaatgtttctgtccagcatgatcaggtgcaaaacaatggttgttacataaatgatgataatgtcaaaagatctgattttggggagtgggttgatcagttaatgtcaattgatgattctcttcacccgaactggagtcaacttcttggtgatgacaatgtagcagaaccaaaaccaaaggcatctcatgttcctcagcagcagcatatagcatctgtagaagttgttggcaattcagcatcaactgcaccgcagactaagcctagaatgcgttggactccagaacttcacgaggcctttgtggaagcagttaatcagcttggtggtagtgataaggctactccaaagggtgtgttgaatctaatgaaagttgagggccttactatctatcatgtaaaaagccacttgcagaagtatagaactgccagatataaaccagagccgtcagaaggaaattctgagaaaaaggtgactccaatggaagaaatgaaatctctagatttgaaaacgagtaaggggatcactgaagcattacgtttacagatggaactccagaagcgacttcacgaacaacttgagatccaaagaaagttgcagattcaaattgaagaccaagggaaacgtcttcagatgatgtttgagaaacagggagagatgggtgacaacaaggttaatggctcctcggacacaaacgaggaaggcgacaaatttgaaagcattccaaaagccatgcctgaagagaaggattcaagcacaagaaaacaaatagcaggtgaagctgaagaagtgatcaatgaagatgaagctgcaccacccacaaaacgggtgaaaagttcataacagcaagatcgttttatggttctagatttgtttaatattcttagactggtttggactgcatggaacttgtaaaaatattattggatccaaggatgtttcgacttgctcatttatcactgccagaagtaaaatcttgttttatatttgttatc

SEQ ID NO: 21610 - protein, 337 aa, Glycine max
MLSSPSECPDDIPFSFVSQTSGDNVSSEIHSTALISHPQDNEDLSWGPDPFQDILGFPENVSVQHDQVQNNGCYINDDNVKRSDFGEWVDQLMSIDDSLHPNWSQLLGDDNVAEPKPKASHVPQQQHIASVEVVGNSASTAPQTKPRMRWTPELHEAFVEAVNQLGGSDKATPKGVLNLMKVEGLTIYHVKSHLQKYRTARYKPEPSEGNSEKKVTPMEEMKSLDLKTSKGITEALRLQMELQKRLHEQLEIQRKLQIQIEDQGKRLQMMFEKQGEMGDNKVNGSSDTNEEGDKFESIPKAMPEEKDSSTRKQIAGEAEEVINEDEAAPPTKRVKSS

SEQ ID NO: 21611 - protein, 245 aa, Glycine max
MSIDDSLHPNWSQLLGDDNVAEPKPKASHVPQQQHIASVEVVGNSASTAPQTKPRMRWTPELHEAFVEAVNQLGGSDKATPKGVLNLMKVEGLTIYHVKSHLQKYRTARYKPEPSEGNSEKKVTPMEEMKSLDLKTSKGITEALRLQMELQKRLHEQLEIQRKLQIQIEDQGKRLQMMFEKQGEMGDNKVNGSSDTNEEGDKFESIPKAMPEEKDSSTRKQIAGEAEEVINEDEAAPPTKRVKSS

SEQ ID NO: 21612 - protein, 190 aa, Glycine max
MRWTPELHEAFVEAVNQLGGSDKATPKGVLNLMKVEGLTIYHVKSHLQKYRTARYKPEPSEGNSEKKVTPMEEMKSLDLKTSKGITEALRLQMELQKRLHEQLEIQRKLQIQIEDQGKRLQMMFEKQGEMGDNKVNGSSDTNEEGDKFESIPKAMPEEKDSSTRKQIAGEAEEVINEDEAAPPTKRVKSS

SEQ ID NO: 21613 - DNA, 1556 bp, Glycine max
aaaataaaacacaagaacgagctcaccaaagcgatttacaccgcagaaagacacgaaatattactaataatttaatagagttagttgcgacgaggattagtattgaagtggagtgttgagtaacagtaattttacagactcagcgatgcaaatgaaatggcaacaagtcgcaaagatgagtgatatcttctgctgcagataggaccaacaattcttttgttcttttctttctgttttccccaaattaagcataagattgcgtgccatagttatttccagcatcatcatcatcatcatcatggcattgggaagagtaatatacgttgctcacaccgtatgtatcagatcagagcttcaacccatggcacctgaccgcattggttcttcctcttcttctcgccaaagggacctcgttttcgtcgtcaaccctctaggtgctaatgggaggacaggtaaagaatggaggaagttagttccatatctacggtctcgtcttggtaaagagtgcaatatatgtgaatccataacgtcgggtccttgtcatgctattgacataacaagagaggctataagggagggggctgatgctgtcattgctgttggaggagatggaactcttcatgaggttgttaatgggtttttctgggctggaaaacctgttgttagtcaagtgaaagagtctacacactcaactgctcttagtctcatccccttgggaactggttctgattttgcaagaacatttgggtggaaaaatgatccccatgaggccattgaacgtgttgctagagggttgagatcaatgatagatgtcggtgttatcactggagagagttgcgaccatcattacttcataaatgtcgctgacattcatttgagtgcaaaggcgggtttttatgcttctagatacaagagatttggcaacctgtgctatgtcattggtgcattgcaagccttcattgggcatcaaaaccaggacatgagaatcaggttcaatgatggtccatgggagacatgtcctcaagtgacagccctttgcattggaaatgcaaaatactttggtggtggcatgaaaattacaccaaatgctgatcctttcagtagaaatttagaggttgtaactcttcagaacttcaagtggtatgattttgtcttcaaattacataagctatacagtgggacacatctctcagtaaaaaatgtatctgatagaagtgtactttctattgaggtggaggacatatcaggcatgggtggtggtatttatattcaatctgatggggagcatttggggttccttccaaaaaagattagtgttgtgcctgctgctattgagatgatattgtgatttaactggagaaggacagaatctgtgaaatagagatgatgctgttcatgccttgtaatttgccagatttagtagaagaaataattttttgttttaaagtgtgtaggcatcggagtaggcttcttactatcttttgctgtggcctgagggagagtaattgtaattttgaatcaccaatgtgttgtcatataatttattttccaactgt

SEQ ID NO: 21614 - protein, 349 aa, Glycine max
MALGRVIYVAHTVCIRSELQPMAPDRIGSSSSSRQRDLVFVVNPLGANGRTGKEWRKLVPYLRSRLGKECNICESITSGPCHAIDITREAIREGADAVIAVGGDGTLHEVVNGFFWAGKPVVSQVKESTHSTALSLIPLGTGSDFARTFGWKNDPHEAIERVARGLRSMIDVGVITGESCDHHYFINVADIHLSAKAGFYASRYKRFGNLCYVIGALQAFIGHQNQDMRIRFNDGPWETCPQVTALCIGNAKYFGGGMKITPNADPFSRNLEVVTLQNFKWYDFVFKLHKLYSGTHLSVKNVSDRSVLSIEVEDISGMGGGIYIQSDGEHLGFLPKKISVVPAAIEMIL

SEQ ID NO: 21615 - protein, 328 aa, Glycine max
MAPDRIGSSSSSRQRDLVFVVNPLGANGRTGKEWRKLVPYLRSRLGKECNICESITSGPCHAIDITREAIREGADAVIAVGGDGTLHEVVNGFFWAGKPVVSQVKESTHSTALSLIPLGTGSDFARTFGWKNDPHEAIERVARGLRSMIDVGVITGESCDHHYFINVADIHLSAKAGFYASRYKRFGNLCYVIGALQAFIGHQNQDMRIRFNDGPWETCPQVTALCIGNAKYFGGGMKITPNADPFSRNLEVVTLQNFKWYDFVFKLHKLYSGTHLSVKNVSDRSVLSIEVEDISGMGGGIYIQSDGEHLGFLPKKISVVPAAIEMIL

SEQ ID NO: 21616 - protein, 181 aa, Glycine max
MIDVGVITGESCDHHYFINVADIHLSAKAGFYASRYKRFGNLCYVIGALQAFIGHQNQDMRIRFNDGPWETCPQVTALCIGNAKYFGGGMKITPNADPFSRNLEVVTLQNFKWYDFVFKLHKLYSGTHLSVKNVSDRSVLSIEVEDISGMGGGIYIQSDGEHLGFLPKKISVVPAAIEMIL

SEQ ID NO: 21617 - DNA, 1320 bp, Glycine max
tttacttaaatttgtctactgctagagggcataaaagcaactccacctagtggggggataagactagattattgttctaactcccattattgcaatttcctttggttcttggttttattatgagaatgggtaatagttataccagaatcttgcatatttcttttgcttgacagtttttttggggggtagagaagtggatttagcctgagaacttgagtggctgaacgactgataacgtaccaattcaggaagggtttttccttagaggcctatggaatatggaatgttgcttttgttaccattcttaataatcttagcaatacattcttatgtaattaatatatttctattcccttttactgttagataattactttttcctttctaaaacatatatgtttgggatttgaggccatatacatatttgtttggtcaattatggctgctgacattttattcatgactgtatctactactccaccggtgtccctagaaaaaaaattattgactggattttctttattacaatattatctgctcctagcgttgaaattgatggctcgttgggggattctgacagtctcaaagagtctggctcaaagaaaagggttaggtctgagtcatgtgctgcttctggctccaaggcatgtcgggagaagttgagaagggataggcttaatgacaagtttgttgaattgggcgccattttggagcctggaaggcctgccaaaacagacaaggctgctatcctgattgatgctgtccgaatggtgacccagttacggggtgaagcccagaagttgaaagacactaatcagggtcttcaagaaaagattaaagagttaaaggctgagaagaacgaacttcgcgatgagaaacagaggctcaaggcagagaaggagaaactggagcagcagctgaaatctttgaatgcacagcctagtttcatgcctccccctgctgcaatgcctgctgcatttgcggcacaaggccaagcccatggcaacaagttggtaccttttattagttatcccggagttgcaatgtggcaattcatgccacctgctgcagtggatacctcacaggatcatgttctccgtccaccagttgcctaagctggcactgtacaattctctgggccagcattttggctcaaggttgtatccattttaccaataccttcttggctttgttagttctcttctaagtattctaactggactcagtggtgacttctgactatatctggcatatgatactattatgattaatgctggtagttgcatgtaaatcagtcaatgttaaataagcttgtctggc

SEQ ID NO: 21618 - protein, 115 aa, Glycine max
MVTQLRGEAQKLKDTNQGLQEKIKELKAEKNELRDEKQRLKAEKEKLEQQLKSLNAQPSFMPPPAAMPAAFAAQGQAHGNKLVPFISYPGVAMWQFMPPAAVDTSQDHVLRPPVA

SEQ ID NO: 21619 - protein, 102 aa, Glycine max
MHSLVSCLPLLQCLLHLRHKAKPMATSWYLLLVIPELQCGNSCHLLQWIPHRIMFSVHQLPKLALYNSLGQHFGSRLYPFYQYLLGFVSSLLSILTGLSGDF

SEQ ID NO: 21620 - protein, 79 aa, Glycine max
MATSWYLLLVIPELQCGNSCHLLQWIPHRIMFSVHQLPKLALYNSLGQHFGSRLYPFYQYLLGFVSSLLSILTGLSGDF

SEQ ID NO: 21621 - DNA, 1179 bp, Glycine max
atcgatccaaaaccttctaagccttcactatgacagatcctaagtccaatttatacactgaaaccttcaacttcatgcccctctattctcacctctcttcttttagtacttctcaatcaaacttattctcttcttactcaaacaacaacactttcgccattcaatctgaaacctcttcctcttatgctcctccttctcctcctctcagagaagcccttcctctcataaacaacataagcctcagaaaacaaaaggaaaaaaatgaaccatcaaagagtggtggtggtatggttgaagaggaaggaggaaagaaaagggacatggatgagacgacccttttgatgactagtactactactgaagagggtgatgctgaaactgtgacagtagcactgcaaatagggcttcctagcgtggctgcttctgatgatcttaatgggtcaaggaagatccctgcagcttgtgcacaaatgaatgaaaaggaggatgcgaggagtgtgatttctggacacccttttgatagattgaacaaggttcagtattggattcccaccccttctcagattctcattggtcctactcagtttttgtgtcatgtgtgctctaagagtttcaacagatataataatcttcagatgcatatgtggggacatggatctcaatatagaaagggccctgattctctaaaaggaacacaaccatcagcaatgctacggcttccatgcttttgttgtgcaccaggttgcaagcacaacatagaccacccaagagcaaggcctctgaaggacttcagaacccttcaaacacactacaagagaaaacacggcattaaaccctacatgtgcagaaaatgtgacaaaacgtttgcggtgaaaggtgattggaggacacacgagaagaactgtggcaaaatatggtactgtttatgtgggtctgatttcaaacacaaaagatctctaaaggatcacataaaggcctttggccatggccacggtgctgttgacattgattgcatgcaagaagatgaagcggcctccgaaattgaacatgatggggatatctcaatgtgaaaattaataagtttggaaaatcaaaattgaagtgacttttcatgtaattaattaattaatttcacatacatgcttaattgtaatagattgtataaggtgtattttatat

SEQ ID NO: 21622 - protein, 346 aa, Glycine max
MTDPKSNLYTETFNFMPLYSHLSSFSTSQSNLFSSYSNNNTFAIQSETSSSYAPPSPPLREALPLINNISLRKQKEKNEPSKSGGGMVEEEGGKKRDMDETTLLMTSTTTEEGDAETVTVALQIGLPSVAASDDLNGSRKIPAACAQMNEKEDARSVISGHPFDRLNKVQYWIPTPSQILIGPTQFLCHVCSKSFNRYNNLQMHMWGHGSQYRKGPDSLKGTQPSAMLRLPCFCCAPGCKHNIDHPRARPLKDFRTLQTHYKRKHGIKPYMCRKCDKTFAVKGDWRTHEKNCGKIWYCLCGSDFKHKRSLKDHIKAFGHGHGAVDIDCMQEDEAASEIEHDGDISM

SEQ ID NO: 21623 - protein, 331 aa, Glycine max
MPLYSHLSSFSTSQSNLFSSYSNNNTFAIQSETSSSYAPPSPPLREALPLINNISLRKQKEKNEPSKSGGGMVEEEGGKKRDMDETTLLMTSTTTEEGDAETVTVALQIGLPSVAASDDLNGSRKIPAACAQMNEKEDARSVISGHPFDRLNKVQYWIPTPSQILIGPTQFLCHVCSKSFNRYNNLQMHMWGHGSQYRKGPDSLKGTQPSAMLRLPCFCCAPGCKHNIDHPRARPLKDFRTLQTHYKRKHGIKPYMCRKCDKTFAVKGDWRTHEKNCGKIWYCLCGSDFKHKRSLKDHIKAFGHGHGAVDIDCMQEDEAASEIEHDGDISM

SEQ ID NO: 21624 - protein, 260 aa, Glycine max
MVEEEGGKKRDMDETTLLMTSTTTEEGDAETVTVALQIGLPSVAASDDLNGSRKIPAACAQMNEKEDARSVISGHPFDRLNKVQYWIPTPSQILIGPTQFLCHVCSKSFNRYNNLQMHMWGHGSQYRKGPDSLKGTQPSAMLRLPCFCCAPGCKHNIDHPRARPLKDFRTLQTHYKRKHGIKPYMCRKCDKTFAVKGDWRTHEKNCGKIWYCLCGSDFKHKRSLKDHIKAFGHGHGAVDIDCMQEDEAASEIEHDGDISM

SEQ ID NO: 21625 - DNA, 1381 bp, Glycine max
agagaactctattctcctccatcaacgcaaccaccaccatcgtgtttaggtcattcttctctctttccgtaccctaaaaccgaaaaaattgttccttttacttttctcctctcacacacattcccacttcccccttttcttccaccgttatgtcgggtagaaaccgcggacaaccccttcctccgccgcacgcggcgggaatatcgccgccgctccacgatccgctgtacggcccgcgggcccaccaccaccaccatcatcatcatcatctagtgggccccgtcccgccccacccccaccaccttctagaagacttccgcgactcgcagctagggctgggcccaacgcgcggcgggtccatcccattgcacccggcggcggcgatcatcgaggagcgccttgccgcccagcatcaggacatccagggtctgctgggcgacaaccagcgcctcgccgccacccacgttgccctcaagcaggagctcgaggccgcccgccacgagctccagcgcgtggcgcacttccgcgagtcgctccgggccgataccgaggcccgcatgcgcgagctctacgacaaggcggcccagctcgaggccgagcttcgtggcgctgaggccgcccgcaccgagctcctccaggtccgctccgacgtcaaggagctcaccgccgtccgccaggacctgtccggacaggtgcaggccatgacgcaggacttggcccgcatgaccgcagacgcgaaacgggttccggcgctgagggctgatgttgaggccatgaaacaagagttgcagtgtgcaagggctgccattgagtatgagaagaagggatttgcagaaaactatgaacatggtcaagtgatggagaagaaattggttgcgatggctcgggagatggagaagcttcgtgcggagattgccaatgcagagaaaagagcacgggctgctgcagcggctgggaatccaggtcaagggtataatgcaaattatggcactgctgatgttggatatgctggaaatccttaccctggcatttatggcatgaatccagtacagcctggagtggagaattttcctcagtatggacctgggcctgctgcttggggcgcatatgacatgcagcgagttcaaggacaccgataaattcctgttgaggaatcttataactggtatcttgggttgcaactatctagatgattgattcagggttttaagagttatctactcatgaacgtcatggaatttgtctattagatggtccttgaagttgtacttatattaaaaagctcatatgtaggttgatggtgcagtagatgatgtttatctacggtgtcaaataaaggacattttgctttatattatctttttattgtgatgtggctgtc

SEQ ID NO: 21626 - protein, 329 aa, Glycine max
MSGRNRGQPLPPPHAAGISPPLHDPLYGPRAHHHHHHHHHLVGPVPPHPHHLLEDFRDSQLGLGPTRGGSIPLHPAAAIIEERLAAQHQDIQGLLGDNQRLAATHVALKQELEAARHELQRVAHFRESLRADTEARMRELYDKAAQLEAELRGAEAARTELLQVRSDVKELTAVRQDLSGQVQAMTQDLARMTADAKRVPALRADVEAMKQELQCARAAIEYEKKGFAENYEHGQVMEKKLVAMAREMEKLRAEIANAEKRARAAAAAGNPGQGYNANYGTADVGYAGNPYPGIYGMNPVQPGVENFPQYGPGPAAWGAYDMQRVQGHR

SEQ ID NO: 21627 - protein, 193 aa, Glycine max
MRELYDKAAQLEAELRGAEAARTELLQVRSDVKELTAVRQDLSGQVQAMTQDLARMTADAKRVPALRADVEAMKQELQCARAAIEYEKKGFAENYEHGQVMEKKLVAMAREMEKLRAEIANAEKRARAAAAAGNPGQGYNANYGTADVGYAGNPYPGIYGMNPVQPGVENFPQYGPGPAAWGAYDMQRVQGHR

SEQ ID NO: 21628 - DNA, 1365 bp, Glycine max
ccttaatcttaacagaaacacacacttgttctgttcctacggttttgttatggctcttccttcactatcctttctcttcatcttcacttccttcatcgtctccgtctcacactcaataccctttattgttattcatggaattggggatcagtgctctaatcgtggagtgaaaaaattcacacagcaattgagcagcttctctggtgctgaaggatattgtgtcgaggttggaaatggatcatgggattcatggtttgagcctttgaaagagcaggctgagattgtttgtgaaaaggtgaagcaaatgaaagaattgaaggaaggatacaacattgttggactttcccagggaaatttaattggtcgaggcgttgtggaattttgtgaaggaggacctcctgttaaaaactttatctctttagcaggccctcacgctggtactgcttcagttcccctatgtggttcaggtatcttctgcgttcttgcagacaccctcatcaagggagaggtttacagtagctatattcaagaacacttggctcctagtggatatcttaaattaccgaatgccatacctgattatttggagaactgtagatttcttccagtgcttaacaatgaaataccagataagagaaattctacttacaaggaaagatttagtagcttgcagaatttggtacttatcatgtttgagcacgacactgttttaataccaaaggaaacttcctggtttggatattacccagatggctacttcaagccagttttaccaccacaatcaacagaactctacattgaggattggataggcttaagaactctagatgaagctggaaaagttcacttcattagtgttccaggaaatcatcttggaatctcccaagaggatatgaaaaagcatgtagtgccatatttgaaggatcacatattcgtacaagatagtatcaataaggctaggttcaggttgcgaggagttaatcagaaagttattcaaagtaatatgatggaacaatctcaaaaggaggaggtggaaccatcatcctccccattacttgatggatcattgccatactggtggcctacaccattcaagactttccttggtgaattgattggcattaatgaagaggaatctatacaaaggaaataatcacattacacgttattgtgaaactaaatctattaaattgaacaaaatgtgtttggactgatcaaaagatttatcagatagatatagaaaaatagtattatatgttgatattagtttagttgataaatatcaaaatgcttcacttggaagtcttaggttctattttctttggtgaatacttatgaacacctaattttgtttgacttctctct

SEQ ID NO: 21629 - protein, 383 aa, Glycine max
LNLNRNTHLFCSYGFVMALPSLSFLFIFTSFIVSVSHSIPFIVIHGIGDQCSNRGVKKFTQQLSSFSGAEGYCVEVGNGSWDSWFEPLKEQAEIVCEKVKQMKELKEGYNIVGLSQGNLIGRGVVEFCEGGPPVKNFISLAGPHAGTASVPLCGSGIFCVLADTLIKGEVYSSYIQEHLAPSGYLKLPNAIPDYLENCRFLPVLNNEIPDKRNSTYKERFSSLQNLVLIMFEHDTVLIPKETSWFGYYPDGYFKPVLPPQSTELYIEDWIGLRTLDEAGKVHFISVPGNHLGISQEDMKKHVVPYLKDHIFVQDSINKARFRLRGVNQKVIQSNMMEQSQKEEVEPSSSPLLDGSLPYWWPTPFKTFLGELIGINEEESIQRK

SEQ ID NO: 21630 - protein, 367 aa, Glycine max
MALPSLSFLFIFTSFIVSVSHSIPFIVIHGIGDQCSNRGVKKFTQQLSSFSGAEGYCVEVGNGSWDSWFEPLKEQAEIVCEKVKQMKELKEGYNIVGLSQGNLIGRGVVEFCEGGPPVKNFISLAGPHAGTASVPLCGSGIFCVLADTLIKGEVYSSYIQEHLAPSGYLKLPNAIPDYLENCRFLPVLNNEIPDKRNSTYKERFSSLQNLVLIMFEHDTVLIPKETSWFGYYPDGYFKPVLPPQSTELYIEDWIGLRTLDEAGKVHFISVPGNHLGISQEDMKKHVVPYLKDHIFVQDSINKARFRLRGVNQKVIQSNMMEQSQKEEVEPSSSPLLDGSLPYWWPTPFKTFLGELIGINEEESIQRK

SEQ ID NO: 21631 - protein, 282 aa, Glycine max
MKELKEGYNIVGLSQGNLIGRGVVEFCEGGPPVKNFISLAGPHAGTASVPLCGSGIFCVLADTLIKGEVYSSYIQEHLAPSGYLKLPNAIPDYLENCRFLPVLNNEIPDKRNSTYKERFSSLQNLVLIMFEHDTVLIPKETSWFGYYPDGYFKPVLPPQSTELYIEDWIGLRTLDEAGKVHFISVPGNHLGISQEDMKKHVVPYLKDHIFVQDSINKARFRLRGVNQKVIQSNMMEQSQKEEVEPSSSPLLDGSLPYWWPTPFKTFLGELIGINEEESIQRK

SEQ ID NO: 21632 - DNA, 1055 bp, Glycine max
ctccttctacccaatacttcaattcaattcaatccctttctctctcctctctttctctctctacaccctacccccctccacctctctctcacaattaaattaagccttaaatcactcccttcgttttccttatataaaatggccctgaacctccaccaattctcgcaacaacaacaacaaagatcaccaacactttgctggtgccactctttctgacttctcttccaaaaacacttcctccaccaaccttaaaaaaacagaggaaagccatgagtcgcagaaacgaaagtggtccaaagcttgacttgaagctgaacctgtccccaccgagggctgatcggagactggagtcaccgacacgatcggcgacggcgtcgccgacgtcaccgccgagctcgtgcgtgtcgtcggagctgaaccaagaggacaaaagttactctaacagccctgaagccacttccatggttcttgtgggttgccctcgctgcctcatgtatgtgatgctctctgaggatgatccaaagtgccccaaatgcaaaagcactgttttgcttgattttctccatgacaccaaaaaccccaccataaggaggagttagactgatagagttatgatcctctgtttctagctctgttttcctctgttcctagctccgttttcatctattcctaatagtaggacatattatattagcttgtaatgcttaggaattaatctccttttacttttttttactgttttaactattccccccttttatgagtagtgctatgtgcgctccacttttaccctctttcccaacaattttgtcaaagcaggggatgcagagattgcagagacagaaagagacagagtggagcgtgaatagcactattttcaatcacccatagaaagaaagttactgagaaattcgggaatgttaggtatctattatataggagctgggcgctctttagcggttaaaaaaagtgtaataggggcttataatctcaggtgccctcttagtttgcttgttgaaatttaaggtgaaatcatcaaaccttagtttcccttg

SEQ ID NO: 21633 - protein, 109 aa, Glycine max
MSRRNESGPKLDLKLNLSPPRADRRLESPTRSATASPTSPPSSCVSSELNQEDKSYSNSPEATSMVLVGCPRCLMYVMLSEDDPKCPKCKSTVLLDFLHDTKNPTIRRS

SEQ ID NO: 21634 - protein, 71 aa, Glycine max
LLLPNTSIQFNPFLSPLFLSLHPTPLHLSLTIKLSLKSLPSFSLYKMALNLHQFSQQQQQRSPTLCWCHSF

SEQ ID NO: 21635 - DNA, 1442 bp, Glycine max
ataaattagaaccgattgaaagtaatcaatccgtggattctctgaacttatcgcttcttcccggtaggtccatttcgcttttgtttctgtttcccatatcctgcctgtgttatcttattagggtttcgttcccaattgcaattcaattcaaattcgcacactatttactaggtttgaatttgggtgtttccgtttcaatggatgacggcgagcttgatttctccaaccatgaagtgttttcgagtcccaacatgggtgagcttcccagcagcggttcaatggacagtttcttcgacgagcttctcaaggacacgcacgcctgcacccacacccacacctgtaaccctcccggccccgatttctcccacactcacacgtgctaccatgtccacaccaaaatcgtccccgcccctgaggaggaccatgtcgccaccgatgacaccgccgagtccgccgagaagaagtcgtcgtcgtcgaagaagcggtctctggggaacaaagaggccgtccggaagtaccgcgagaagaagaaggcgcgtgcggcgtcgctggaggacgaggttgtgaagttgagggctctgaaccagcacttgatgaagaagctgaaggggcaggcggctctcgaggccgaaatcgcgaggctcaagtgtttgttggttgacataagggggaggattgaaggggaaattgggtcgtttccctatcagaaaccaacgccgaatgcgaaccctccggtggctaacttgcctggttcttatgtgatgaacccttgtaacttgcaatgtgatgatcgggtgtattgccatcacccctatgggaaaattggggagagtgcggctttgaatggggaagagtttgatggttgtgaatttgagaacctgcagtgtctggcaagccagaatttggggctcaaggatcttcgtgcctgtggggttggacaggcaaggtctaatgtaaattcttctgcatcaaataaaagaaaagggggatctcatgctgtgacagctggttgaagaattaataaattggtggttttcatctttgccatgaacttagggaagatgggggtgtgtttcatctttcagtacttagtgctgtggacagcatttttgctggacaagggtagaaggaactgttcctttaactgaagattttgcatatgggcatgtcttctacaagttaagacagacaagtgatttgttttgtatttgagaacgcaaagtaactgtttcgatgatgggaaaagcatatctgcctgtctgcccttagagaacaagtcttgaatagatttcggtaaattaaaaatgctcttgctgatcctcttttggaatgattaataaaacattacattattgtatcttctacttcgaccgccgttgtggacaaaatttgtaataattttactttgcgttagagtctctatagtaaataattgcttaaat

SEQ ID NO: 21636 - protein, 336 aa, Glycine max
KLEPIESNQSVDSLNLSLLPGRSISLLFLFPISCLCYLIRVSFPIAIQFKFAHYLLGLNLGVSVSMDDGELDFSNHEVFSSPNMGELPSSGSMDSFFDELLKDTHACTHTHTCNPPGPDFSHTHTCYHVHTKIVPAPEEDHVATDDTAESAEKKSSSSKKRSLGNKEAVRKYREKKKARAASLEDEVVKLRALNQHLMKKLKGQAALEAEIARLKCLLVDIRGRIEGEIGSFPYQKPTPNANPPVANLPGSYVMNPCNLQCDDRVYCHHPYGKIGESAALNGEEFDGCEFENLQCLASQNLGLKDLRACGVGQARSNVNSSASNKRKGGSHAVTAG

SEQ ID NO: 21637 - protein, 271 aa, Glycine max
MDDGELDFSNHEVFSSPNMGELPSSGSMDSFFDELLKDTHACTHTHTCNPPGPDFSHTHTCYHVHTKIVPAPEEDHVATDDTAESAEKKSSSSKKRSLGNKEAVRKYREKKKARAASLEDEVVKLRALNQHLMKKLKGQAALEAEIARLKCLLVDIRGRIEGEIGSFPYQKPTPNANPPVANLPGSYVMNPCNLQCDDRVYCHHPYGKIGESAALNGEEFDGCEFENLQCLASQNLGLKDLRACGVGQARSNVNSSASNKRKGGSHAVTAG

SEQ ID NO: 21638 - protein, 253 aa, Glycine max
MGELPSSGSMDSFFDELLKDTHACTHTHTCNPPGPDFSHTHTCYHVHTKIVPAPEEDHVATDDTAESAEKKSSSSKKRSLGNKEAVRKYREKKKARAASLEDEVVKLRALNQHLMKKLKGQAALEAEIARLKCLLVDIRGRIEGEIGSFPYQKPTPNANPPVANLPGSYVMNPCNLQCDDRVYCHHPYGKIGESAALNGEEFDGCEFENLQCLASQNLGLKDLRACGVGQARSNVNSSASNKRKGGSHAVTAG

SEQ ID NO: 21639 - DNA, 1371 bp, Glycine max
attgtcacattatactttgatagccattctggcatgctttctttgctccacagcggagtacaccaccactgtccactggtacactcttggcattttccctttcttttttcatttttatttttaaatcccactctcattttcccttccacttttccaattccttcacttcacactctcacactcacagacacagtctctctaatctaatggatgcaaagtctgctgaagctgttgttcccttagaaccattgaagtatcagacatggttcttgaaagtttcgatccactgtgaaggttgcaggaggaaagttaagaaggttctacagagcattgatggtgtttttaccacaacggttgacccgcaacagcaaaaagtaaccgtcactggaagcgttggagttgagacgctcataaggaaactggtcaaagccggaaaacacgccgagatttggccggagaatctcgccgccgggaagggaaagaactccggcaaagacaagaagcagcagcagcagcagaagaagaagaagaacgaacaaggagaaccagaaagcgcggtaaacaactctactacaacaaatgcagaacaaaacactaactctggcacaaaaaagggaattgaaaaaaatgctggcgaaaacaagagcaccggaaactcaaagtccggcggcggagaaagtgaggcagcgaaaccggagaacaagggtggtcaaagtgaagggggttctgggaagaaaaagaaaaagaaaggtcaaagcggtggagtgagtgcagcatgtggtgatgcacctgcgcacactggatcggaggtgcagtgttctgggcagatgaatctgagccctacacgtcagcaatcatacgtgtatcctgaaacatactgttatcctcaccaagtggtgtatctagcaactcacaacaacaacaggttatgtcccatgcccatgggaacaatgggtggtccttcttactatgtttcatcattgccctacatgtgtgcaggcttcgaccatgactctccttattatcgctttcaatctccacccttcgaaatcttcagtgatgagaatgccaacggttgttctattgtgtgaccaaagataaatcaaataaacatagtgctttttgtttctttgatggtcccaggtagaggtagtttttttttttttttgttttgttatgtttttgtattttgaggagggaaaaatcgagcttatggcatatacgttgtgctctgtccttggattttctaggggctcactttgctgcatttactactccaacactgaaatatgcccaaccttaccttattttgatcttttggaccaagctgtaaataatattctaatatggacccttttaatatttcatgtc

SEQ ID NO: 21640 - protein, 294 aa, Glycine max
MDAKSAEAVVPLEPLKYQTWFLKVSIHCEGCRRKVKKVLQSIDGVFTTTVDPQQQKVTVTGSVGVETLIRKLVKAGKHAEIWPENLAAGKGKNSGKDKKQQQQQKKKKNEQGEPESAVNNSTTTNAEQNTNSGTKKGIEKNAGENKSTGNSKSGGGESEAAKPENKGGQSEGGSGKKKKKKGQSGGVSAACGDAPAHTGSEVQCSGQMNLSPTRQQSYVYPETYCYPHQVVYLATHNNNRLCPMPMGTMGGPSYYVSSLPYMCAGFDHDSPYYRFQSPPFEIFSDENANGCSIV

SEQ ID NO: 21641 - DNA, 1157 bp, Glycine max
atcctaatttgttattgttatctcgtcctagcacactccagactctgcgaacagctaccactgtcgaccatcaccatgcagtccagctccaaggccggcggcaatggcgacgaggagcacctggtttgcgtgacgggggcggggagcttcatcgggtcgtgggtggtcaaggagctcctcctccgtggctaccatgtccggggaaccgccagagatcccgctgaccgcaagaacgcgcatctgctggcgctggacggcgccgaggagaggctcaccctgtgccgcgccgacgtcatggacggcgacagcctcggcgccgcattccatggctgccgcggcgtgttccatgtcgcctccccggtctccaatgaccctgagctcatgcctgaggccgtggaggggacgaggaacgtgatcaacgcggcagcagacgcgggcgtgcggcgtgtggtgttcacttcctcctacggtgccgtgcacatggacccaaagcggagcccggacaccgtcgtcgatgagtcgtgctggagcgactacgactactgcaaacaaaccggcaatctgtactgctgcgccaagatgatggcggaggtcgccgcgaaggaggaggcgaccaagagggggctggagctggcggtggtggtgccggcgacgaccatcggtcctgccctgcagcagacgctcaacttcagcagtgaccacgtcgcccgctacctcacaggcgccaagccggcctaccagaacgtcgtcaccgcctacatcgatgtccgagacgtcgcccgcgcgcacgccctcgtctacgagcaccctgacgcgcgcggcgatcgctacctctgcgtcagcgccgtgatgcaccgcgctcacttcgtccggctcctcaaggacctctacccgcagtaccccgtcaccgccaagcgcgaagacgacggcaagccgatggcgagggagtacaggttctcgaatcagaagctcggggatttgggcttggagttcactgacatgaggacaagtttgtacgacacggtgatttgcctgcagcacaggggccatgtccctgtcatcgtgccacgtcatcgtgcatgtttgtgaaaattataatgtgtacacaaattgaactcgattataagcaaataaatgaggataagtactctgttttc

SEQ ID NO: 21642 - protein, 362 aa, Glycine max
ILICYCYLVLAHSRLCEQLPLSTITMQSSSKAGGNGDEEHLVCVTGAGSFIGSWVVKELLLRGYHVRGTARDPADRKNAHLLALDGAEERLTLCRADVMDGDSLGAAFHGCRGVFHVASPVSNDPELMPEAVEGTRNVINAAADAGVRRVVFTSSYGAVHMDPKRSPDTVVDESCWSDYDYCKQTGNLYCCAKMMAEVAAKEEATKRGLELAVVVPATTIGPALQQTLNFSSDHVARYLTGAKPAYQNVVTAYIDVRDVARAHALVYEHPDARGDRYLCVSAVMHRAHFVRLLKDLYPQYPVTAKREDDGKPMAREYRFSNQKLGDLGLEFTDMRTSLYDTVICLQHRGHVPVIVPRHRACL

SEQ ID NO: 21643 - protein, 337 aa, Glycine max
MQSSSKAGGNGDEEHLVCVTGAGSFIGSWVVKELLLRGYHVRGTARDPADRKNAHLLALDGAEERLTLCRADVMDGDSLGAAFHGCRGVFHVASPVSNDPELMPEAVEGTRNVINAAADAGVRRVVFTSSYGAVHMDPKRSPDTVVDESCWSDYDYCKQTGNLYCCAKMMAEVAAKEEATKRGLELAVVVPATTIGPALQQTLNFSSDHVARYLTGAKPAYQNVVTAYIDVRDVARAHALVYEHPDARGDRYLCVSAVMHRAHFVRLLKDLYPQYPVTAKREDDGKPMAREYRFSNQKLGDLGLEFTDMRTSLYDTVICLQHRGHVPVIVPRHRACL

SEQ ID NO: 21644 - protein, 264 aa, Glycine max
MDGDSLGAAFHGCRGVFHVASPVSNDPELMPEAVEGTRNVINAAADAGVRRVVFTSSYGAVHMDPKRSPDTVVDESCWSDYDYCKQTGNLYCCAKMMAEVAAKEEATKRGLELAVVVPATTIGPALQQTLNFSSDHVARYLTGAKPAYQNVVTAYIDVRDVARAHALVYEHPDARGDRYLCVSAVMHRAHFVRLLKDLYPQYPVTAKREDDGKPMAREYRFSNQKLGDLGLEFTDMRTSLYDTVICLQHRGHVPVIVPRHRACL

SEQ ID NO: 21645 - DNA, 684 bp, Glycine max
agtcagagtcctcgcaccgcacgcaacaagtacgcaggcagcgcagcctcgagccgtcgccatggcgagcaagcacctcgtcctcgccgcatgcctcctcctcctgcccaccgcctcggtcgccaccgacgtcgactactgcagtaagaaggactacccggtgaaggtgagcggggtgcagatcgtgcccgatccggtcgaacccggcaagcccgccactttcaagatctccgcttctactgataaaaccatcgagaaggggaagctggttatcgacgtcaagtatttcttcttctacgtgcactcggagacccgcgacatctgcggagagacttcctgcccagcgaccggcgacttcgtgctgtcccaccagcagacgctgccaggcttcactccgccgggctcctacacgatctacatgaagattgtcggggacgacaacgaggagctgagctgcatctcgttcgggttcagcatcggcttcgtcgcgtccagctgaacgcgtccgagcctgggcacgagaggcagccagcccatggatgtaaattacgtggagcacactctgtatcctatgactttcaagtatctaggtccatgtaagctttttgtgggtgtctgtgttcaactgagacgtttttatccggagttgaacatcacaataaagcaaagtcactgataccatgc

SEQ ID NO: 21646 - protein, 165 aa, Glycine max
VRVLAPHATSTQAAQPRAVAMASKHLVLAACLLLLPTASVATDVDYCSKKDYPVKVSGVQIVPDPVEPGKPATFKISASTDKTIEKGKLVIDVKYFFFYVHSETRDICGETSCPATGDFVLSHQQTLPGFTPPGSYTIYMKIVGDDNEELSCISFGFSIGFVASS

SEQ ID NO: 21647 - protein, 145 aa, Glycine max
MASKHLVLAACLLLLPTASVATDVDYCSKKDYPVKVSGVQIVPDPVEPGKPATFKISASTDKTIEKGKLVIDVKYFFFYVHSETRDICGETSCPATGDFVLSHQQTLPGFTPPGSYTIYMKIVGDDNEELSCISFGFSIGFVASS

SEQ ID NO: 21648 - DNA, 1337 bp, Glycine max
atttctgcagggggaaaccacagcctgcttttgatcaggtaaagcctgcacttcctgctcttgccagtcttatccagtcaactgatgaagaagtattgactgacgcttgttgggcactttcatatctttctgacggtacaaatgacaaaattcaaggtgtaattgaagctggtgtttgtagccggcttgttgagcttctattgcacccttccccttcagtgcttattcctgctcttcgtaccgttggaaatattgttactggagatgatttgcagacagaggttatcatcaaccatcaagctctttcacgtcttctgaatctcttgactaataattataaaaaaagcataaagaaggaagcatgctggaccatatcaaacatcacagctgggaacaaaaagcagattcaggatgtaattgaggctagtataattgctcctttagtccatttgcttcaaaatgctgagtttgatatcaagaaagaggctgcttgggcaatctcaaatgctacttcgggtggatctcatgaacaaatcaagttcctggtaagtcaagggtgtattaagcccttgtgtgatcttctcatatgtcctgatcctaggattgtgacagtttgtttggaagggcttgaaaacatcttgaaggtaggtgaagctgagaaaaatgttagcaatactgatggtgtgaatctatatgctcaaatgattgatgatgctgaggggttggagaaaatcgagaacctccagagtcatgataacactgagatttatgaaaaggcagtgaaaattcttgagacatactggatggaggaagacgatgagactatgccgccaggggatgcttctcaatcagggttcaactttggtggcgctcaacctcctgctgtgccttctggtggattcaacttcaattagaaggagctttggctggtctatcagtaaagtgactaaagtcctccagtttgacagtccaacagttgggggtcaagtcaatgtccttgggtcctacaaggtccagccttggtaaatagagggtggctggaccggcttgggtttttgaaatggctggttttacgtacatcacggggacagatgggttgtggcttgattttcttggccacataaagagttatatttatatatactagagtttgctttctgccaagtgatcattccgagtgatttggcttttataaaattgttgttgagttttgtgattttttctgtcatagattggaatcaggaagtaccatttgtgattctggatgttttgggcgaaataccaaatgctactatctttgcttcatattaatagttacaaggtggaatttttctttt

SEQ ID NO: 21649 - protein, 303 aa, Glycine max
FCRGKPQPAFDQVKPALPALASLIQSTDEEVLTDACWALSYLSDGTNDKIQGVIEAGVCSRLVELLLHPSPSVLIPALRTVGNIVTGDDLQTEVIINHQALSRLLNLLTNNYKKSIKKEACWTISNITAGNKKQIQDVIEASIIAPLVHLLQNAEFDIKKEAAWAISNATSGGSHEQIKFLVSQGCIKPLCDLLICPDPRIVTVCLEGLENILKVGEAEKNVSNTDGVNLYAQMIDDAEGLEKIENLQSHDNTEIYEKAVKILETYWMEEDDETMPPGDASQSGFNFGGAQPPAVPSGGFNFN

SEQ ID NO: 21650 - DNA, 1808 bp, Glycine max
gactgaggttcaaagaatttgtgtcactgttcatcgtcaatggccacactatactaccactgattgtgttttaattctcatcttccatatacaaaggtcttgcataattcctctgtcttttcttggtggcaagttcctgcttcaaccactacttatattaatgccactcactgaaacaccattccactgatacaaagaactgtgttttttttttgttgctcttgtgttgtttttcttgtgtcattctttgatcaattttctctctttcgagactccattttcagcataggaaccatgaaacaagagccactggcatcaccaacgacatcgtcactaccacaaccaacaataacaacaaaaaatgtgatcaagattcagaacagtttgactccatcacggttaagacttccttccaagtacagagagcctccaaagactccaccagaggttgtcaacaatgggatggtgtcaacgccattgaggagagccaagtccgtaactccagagttgaagcacaattcaaggatcaaaaagggtcttgtgctgaacaaggccaaacccaatgaagaggttttgggaacaacgcaaaggggtagggaagttgaagaggctaaggttgtttctcgtttcgttaggcctcatgctgtggaacagttttcaaggccaagaagtggagttggagattttgcttttaagagggataaggaggaccctgatgggaagagtaagaaggaattgatggagaagctcgaggcgagtgagagtttgataaagaatctgcagtctgaagtgctggctctgaaggctgaattggagaaagttaagggcttgaatgtggagcttgagtctaacaacaggaaactcactgaggatcttgctgctgctgaagcaaaggtggtgtctttgagtggcaatgagaaggagccaaatggagaacatcagagccccaagtttaaactcattcagaaactcattgctgacaaattagaaaggtccatagtgaaaaaggaatccattactaatggaggctttgttaaagcatcaattccagcacaaactgcaattcctgaggtcacaactacgaggacaggaagaaaacctacatgcaactcgtgcctgccaccacctccaccaccgatgccaccatcaatcccttctaggcctatagcaaaagcgaataacactcaaagggccccagcatttgtgaaattatttcacacattaaagaatcaagaagggatgaaaagcacaacggggtcaggtaaacagcagagaccagtatctgtcaatgtacacagcagcattgttggagaaattcaaaaccgttctgctcatcttttagcaataagggcagacattgaaactaaaggagagtttattaatgaccttataaaaaaggtggtagaagcggcctacacagatatcgaagatgtcttaaattttgttaattggcttgatggtgaactctcatcattggctgatgagcgtgcagtcttgaagcattttaattggcccgagaggaaagctgatgccatacgtgaagctgcagttgagtatcgcgaacttaaatcattagagcaagagatttcctccttcaaggatgacccagaaattccatgtggagcttccttgagaaagatggctagcctattagacaagtctgagagcagcatacagaggctaatcaagttgcgaaattctgcaatgcgttcataccaagagtacaaaattccaactgcttggatgcttgattcaggaatcatgaccaagataaagcaggcttctatgactctggtcaagatgtatac

SEQ ID NO: 21651 - protein, 504 aa, Glycine max
MKQEPLASPTTSSLPQPTITTKNVIKIQNSLTPSRLRLPSKYREPPKTPPEVVNNGMVSTPLRRAKSVTPELKHNSRIKKGLVLNKAKPNEEVLGTTQRGREVEEAKVVSRFVRPHAVEQFSRPRSGVGDFAFKRDKEDPDGKSKKELMEKLEASESLIKNLQSEVLALKAELEKVKGLNVELESNNRKLTEDLAAAEAKVVSLSGNEKEPNGEHQSPKFKLIQKLIADKLERSIVKKESITNGGFVKASIPAQTAIPEVTTTRTGRKPTCNSCLPPPPPPMPPSIPSRPIAKANNTQRAPAFVKLFHTLKNQEGMKSTTGSGKQQRPVSVNVHSSIVGEIQNRSAHLLAIRADIETKGEFINDLIKKVVEAAYTDIEDVLNFVNWLDGELSSLADERAVLKHFNWPERKADAIREAAVEYRELKSLEQEISSFKDDPEIPCGASLRKMASLLDKSESSIQRLIKLRNSAMRSYQEYKIPTAWMLDSGIMTKIKQASMTLVKMY

SEQ ID NO: 21652 - protein, 448 aa, Glycine max
MVSTPLRRAKSVTPELKHNSRIKKGLVLNKAKPNEEVLGTTQRGREVEEAKVVSRFVRPHAVEQFSRPRSGVGDFAFKRDKEDPDGKSKKELMEKLEASESLIKNLQSEVLALKAELEKVKGLNVELESNNRKLTEDLAAAEAKVVSLSGNEKEPNGEHQSPKFKLIQKLIADKLERSIVKKESITNGGFVKASIPAQTAIPEVTTTRTGRKPTCNSCLPPPPPPMPPSIPSRPIAKANNTQRAPAFVKLFHTLKNQEGMKSTTGSGKQQRPVSVNVHSSIVGEIQNRSAHLLAIRADIETKGEFINDLIKKVVEAAYTDIEDVLNFVNWLDGELSSLADERAVLKHFNWPERKADAIREAAVEYRELKSLEQEISSFKDDPEIPCGASLRKMASLLDKSESSIQRLIKLRNSAMRSYQEYKIPTAWMLDSGIMTKIKQASMTLVKMY

SEQ ID NO: 21653 - protein, 356 aa, Glycine max
MEKLEASESLIKNLQSEVLALKAELEKVKGLNVELESNNRKLTEDLAAAEAKVVSLSGNEKEPNGEHQSPKFKLIQKLIADKLERSIVKKESITNGGFVKASIPAQTAIPEVTTTRTGRKPTCNSCLPPPPPPMPPSIPSRPIAKANNTQRAPAFVKLFHTLKNQEGMKSTTGSGKQQRPVSVNVHSSIVGEIQNRSAHLLAIRADIETKGEFINDLIKKVVEAAYTDIEDVLNFVNWLDGELSSLADERAVLKHFNWPERKADAIREAAVEYRELKSLEQEISSFKDDPEIPCGASLRKMASLLDKSESSIQRLIKLRNSAMRSYQEYKIPTAWMLDSGIMTKIKQASMTLVKMY

SEQ ID NO: 21654 - DNA, 1506 bp, Glycine max
acatgctcataatttagaccaagtctatatcatgagcttaatttggaccactttacttgttgatgcttgtgttgattctatttggacagtaaccaatgtggcttttacccttttgcattcaagatgcagttaaataggtagaataacggatgacaagtgaataatttctaaaattgattgcctttttttgctacagatttgaacctgatatgcttgcattttctggatgtgattatggtggaggggagaaggagcagaaggaactgggtgcaataagaaggaggtggaagacattacatagaagcaatcctgatagggcaaggaggcaggggagatgcccattaacccccgaagaagttggtctcatgctaagagcattgggatatggttctgacattcatatttacgttgcatcaggggaggtatatggaggggaaagaacattggcacctctcaaagcattatttcctaatttccattcaaaagagaccattgctaccaaggaagaattagaaccgttttcttcattttcttctcgcatggctgcactcgacttcattgtttgtgatgaaagtgatgtttttgtaaccaataataatggaaatatggcaaaaatattggctggacgaaggagatactttggccataaaccaaccattcgtccaaatgctaaaaaactttatcgattgttcttgaatagaagtaattcgacttgggaagcttttgcttctagtgtccgaactttccagaaaggcttcatgggagagccaaaggaggttagaccaggtagaggcgggtttcatgagaatccatcatcatgcatatgtgaagattctgcagcagccaaagtggacaaaaattcacaatctagaaaatatgggaaggataatacaacgaagaaaaatgtagcaaatgatgaactggatgttgacaatgtgtctgagtggccagacatggatgatgatgatgatgatcagaatgatctagcagagaagggtacattcaatgaaacaattttggattatgatgctctgaacttcgaggatcccgagttggaggaaattatatcagattagtgaaggtgctttattcagtgctgtacctgttgacttattatggttctttgccagctccatttgacagctgcttataaagctcaaaaacaggaacagaaaaggcacgactttctcgatactggccgaactatagtaaaaagacatctcaaaaatttaatcatacgttcatcttttctgcatttctaaggacataatggtctcagtttgatgctgaatttttggagtgtttagacttgtacgaatctgtaaagaggttatcagaagcgagcaatggaagtagagttagaggacatccatccgaatatagctgcacacaaaattgagtttgctaggaagtaggaaaatctgtatatcttttgcagttgatagactgtacacctttgttcctgtctttcattgacattgatgcagtcaacttctcttttagaac

SEQ ID NO: 21655 - protein, 288 aa, Glycine max
MLAFSGCDYGGGEKEQKELGAIRRRWKTLHRSNPDRARRQGRCPLTPEEVGLMLRALGYGSDIHIYVASGEVYGGERTLAPLKALFPNFHSKETIATKEELEPFSSFSSRMAALDFIVCDESDVFVTNNNGNMAKILAGRRRYFGHKPTIRPNAKKLYRLFLNRSNSTWEAFASSVRTFQKGFMGEPKEVRPGRGGFHENPSSCICEDSAAAKVDKNSQSRKYGKDNTTKKNVANDELDVDNVSEWPDMDDDDDDQNDLAEKGTFNETILDYDALNFEDPELEEIISD

SEQ ID NO: 21656 - protein, 236 aa, Glycine max
MLRALGYGSDIHIYVASGEVYGGERTLAPLKALFPNFHSKETIATKEELEPFSSFSSRMAALDFIVCDESDVFVTNNNGNMAKILAGRRRYFGHKPTIRPNAKKLYRLFLNRSNSTWEAFASSVRTFQKGFMGEPKEVRPGRGGFHENPSSCICEDSAAAKVDKNSQSRKYGKDNTTKKNVANDELDVDNVSEWPDMDDDDDDQNDLAEKGTFNETILDYDALNFEDPELEEIISD

SEQ ID NO: 21657 - protein, 178 aa, Glycine max
MAALDFIVCDESDVFVTNNNGNMAKILAGRRRYFGHKPTIRPNAKKLYRLFLNRSNSTWEAFASSVRTFQKGFMGEPKEVRPGRGGFHENPSSCICEDSAAAKVDKNSQSRKYGKDNTTKKNVANDELDVDNVSEWPDMDDDDDDQNDLAEKGTFNETILDYDALNFEDPELEEIISD

SEQ ID NO: 21658 - DNA, 1190 bp, Glycine max
aggaaaacttcagtccaaatacccttcaattgcggcttctgaaaaagaaaggcaaggtagaagaaattaaacactccaagtcacaaaggtcacccctttcaaagggtacatttaatcctgacatgtataagaatgaaagcataggcccctctttatgcaaaataaaccagaaggatatcataaacaaaacactctcaaaggatcttctctctaatttggatggggaagaagaggaagaagagatcttctctccagataaggaaaacttcagtccaaatacccttcgattgcggcttttgaaaaagaaggataatttttgtcccaacttatatccagatgaaaacatgagccacacctcaaccaaagagaatcaaactctaaaaggagtccagggtcaaaaattgaaaagaaagccattcagcagccatatcaaattcgcacaggagcaagattataaggacagagtggaaagggtacccttccaatcactgaagatctcaggagacaagagaagatcaggcactttttgtcctgtttctgcttccaaaagccttcatttcagtaattgtggacaaattttagatcagcgtattaacccttctgatattagtggggtgccaaagaagagcagctgggacatgattgtggatactacttctcttgtaaacaaggaatcaaggaaagctatgcagcttttacaaggtctcaaagggactcggttaatcattccaagattggtcataggggaacttgaacgtatgaagaagcagttcacaattttcagaagaatttcagaggcttctttggcattggaatggattgaagaatgtatggtgaagtcaaaccggtggattcatatccagagctcagtggatgaaggaaggctaattgctccaaccccacctgcttctcctcaggctcagtttagtgaagagagttggacttctctttcaccccagaagttctcaacggaaattgcttcaccaacagtagaagatcatatccttgattttgctcttctatacagaagaaacaaaaatgatggacaacttgtcctgcttagtgaggatgtcactttgaaaatcaaatgcatggcagaggggttgctatgtgagccagtgcaagagtttcgtgagagtctagtaaatccattctctgagaggttcttgtgggataacagcgttcctcga

SEQ ID NO: 21659 - protein, 396 aa, Glycine max
ENFSPNTLQLRLLKKKGKVEEIKHSKSQRSPLSKGTFNPDMYKNESIGPSLCKINQKDIINKTLSKDLLSNLDGEEEEEEIFSPDKENFSPNTLRLRLLKKKDNFCPNLYPDENMSHTSTKENQTLKGVQGQKLKRKPFSSHIKFAQEQDYKDRVERVPFQSLKISGDKRRSGTFCPVSASKSLHFSNCGQILDQRINPSDISGVPKKSSWDMIVDTTSLVNKESRKAMQLLQGLKGTRLIIPRLVIGELERMKKQFTIFRRISEASLALEWIEECMVKSNRWIHIQSSVDEGRLIAPTPPASPQAQFSEESWTSLSPQKFSTEIASPTVEDHILDFALLYRRNKNDGQLVLLSEDVTLKIKCMAEGLLCEPVQEFRESLVNPFSERFLWDNSVPR

SEQ ID NO: 21660 - protein, 356 aa, Glycine max
MYKNESIGPSLCKINQKDIINKTLSKDLLSNLDGEEEEEEIFSPDKENFSPNTLRLRLLKKKDNFCPNLYPDENMSHTSTKENQTLKGVQGQKLKRKPFSSHIKFAQEQDYKDRVERVPFQSLKISGDKRRSGTFCPVSASKSLHFSNCGQILDQRINPSDISGVPKKSSWDMIVDTTSLVNKESRKAMQLLQGLKGTRLIIPRLVIGELERMKKQFTIFRRISEASLALEWIEECMVKSNRWIHIQSSVDEGRLIAPTPPASPQAQFSEESWTSLSPQKFSTEIASPTVEDHILDFALLYRRNKNDGQLVLLSEDVTLKIKCMAEGLLCEPVQEFRESLVNPFSERFLWDNSVPR

SEQ ID NO: 21661 - protein, 282 aa, Glycine max
MSHTSTKENQTLKGVQGQKLKRKPFSSHIKFAQEQDYKDRVERVPFQSLKISGDKRRSGTFCPVSASKSLHFSNCGQILDQRINPSDISGVPKKSSWDMIVDTTSLVNKESRKAMQLLQGLKGTRLIIPRLVIGELERMKKQFTIFRRISEASLALEWIEECMVKSNRWIHIQSSVDEGRLIAPTPPASPQAQFSEESWTSLSPQKFSTEIASPTVEDHILDFALLYRRNKNDGQLVLLSEDVTLKIKCMAEGLLCEPVQEFRESLVNPFSERFLWDNSVPR

SEQ ID NO: 21662 - DNA, 1312 bp, Glycine max
agtttcttctttctggagatcgtgtgattgttacctctcgcagccccgagtctgtgcaagcaactatcaaagagcttgaggaaaatctaaaggaaggcattgccaatgcagttggctcttctctgacaaagctttcacatgcaaaagttgtaggcattgcttgtgatgtttgtgaacctcatgatgtgcagagactggctaacttcgctgtcaaagaacttggtcatattgacatttggataaacaatgccggaacaaataaaggttttagaccattgcttcagtttagtgacgaagatattaaacagattgtctcaacaaatttggttggatctatcctcttcactcgagaagccatgcgtgttatgagaaaccaagccattgcaggtcacatatttaatatggatggtgcaggttctggaggctctagcacacctttgactgctgtatatggttctacaaagtgtggccttaggcaacttcaaggatcactattaaaggagtgcaagcgatccaaagtaggtgtccatactgcatctccaggcatggttcttacagatctgcttttaagtggctcaactgtccaaaacaggcagatgtttaacatcatctgtgagcttcccgaaactgttgctagaacactagttccacgcatgcgggttgttaagggaacaggcaaagctatcaattacttgacccctcccagaatcttacttgctttggtcaccgcttggttacggcgaggtcgctggtttgatgatcagggaagagcattatatgcagctgaagcagaccgacttcgtaattgggctgaagatcgagcccgattttctttcaccgatgcaatggaaatgtacacagagaacacctggttatctgtcttctcactttcagttgtctgtgccttcataattctttccagcacaggcagcaatttgcctggaacatgatgatgtcttgctgccaatgcaaaagtgcatttgcttttgtggacagataagtggtgcctgaaatcatcatcaagacaatagaatgaatctaaagtctaaattataaacaaagtggatctgtttttttcccaccatgtccacctaaacaattatcatttgacacacttagttgtctgtgacctttagctcagacatttggctccccatgtactatataggcagccctgcaatcagcattcttcattgagatgcttatagtcatagtatgttactatgtatagcctttcattaaattgtagactagtgaaatctcatattttctacccaatatatttatttgaatgtatatttatcagtgtgct

SEQ ID NO: 21663 - protein, 315 aa, Glycine max
FLLSGDRVIVTSRSPESVQATIKELEENLKEGIANAVGSSLTKLSHAKVVGIACDVCEPHDVQRLANFAVKELGHIDIWINNAGTNKGFRPLLQFSDEDIKQIVSTNLVGSILFTREAMRVMRNQAIAGHIFNMDGAGSGGSSTPLTAVYGSTKCGLRQLQGSLLKECKRSKVGVHTASPGMVLTDLLLSGSTVQNRQMFNIICELPETVARTLVPRMRVVKGTGKAINYLTPPRILLALVTAWLRRGRWFDDQGRALYAAEADRLRNWAEDRARFSFTDAMEMYTENTWLSVFSLSVVCAFIILSSTGSNLPGT

SEQ ID NO: 21664 - protein, 197 aa, Glycine max
MRVMRNQAIAGHIFNMDGAGSGGSSTPLTAVYGSTKCGLRQLQGSLLKECKRSKVGVHTASPGMVLTDLLLSGSTVQNRQMFNIICELPETVARTLVPRMRVVKGTGKAINYLTPPRILLALVTAWLRRGRWFDDQGRALYAAEADRLRNWAEDRARFSFTDAMEMYTENTWLSVFSLSVVCAFIILSSTGSNLPGT

SEQ ID NO: 21665 - protein, 194 aa, Glycine max
MRNQAIAGHIFNMDGAGSGGSSTPLTAVYGSTKCGLRQLQGSLLKECKRSKVGVHTASPGMVLTDLLLSGSTVQNRQMFNIICELPETVARTLVPRMRVVKGTGKAINYLTPPRILLALVTAWLRRGRWFDDQGRALYAAEADRLRNWAEDRARFSFTDAMEMYTENTWLSVFSLSVVCAFIILSSTGSNLPGT

SEQ ID NO: 21666 - DNA, 1373 bp, Glycine max
atccaacttgttcttatatgatgaataccttgatgagtacatgtccacaatagctgtggaacatttaccacaaaataggccactatgggaacttcacattataaaatacccaacaagcaatgctaagggtaccttggtgttcaaactccaccatgcccttggggatggtttttctctcatgggtgcccttctttcatgcatgcaaagagctgacaacacctctcttcccttcacactcccatcaagccaaaggcccaaagcatcatcaatttccaacaccaaagggtttttcaagaaattgccctccattttcttccaaactatatccgaatttggatggagtttcttgaaaagtaagttgattgaagatgatcaaacaccaataaggtcttgtgcggaagacttcaagactcgccaaatgaccatctcagatgtcaccttctcattggatcttatcaaagacgtgaaatccaaacttggagtgagcataaatgatgtgcttgctggagtaattttttttggcattcggctatacatgcaagaaattaatctgaaatcaagccaaacccaatccacagcattggtgttgctgaacacaagaaacattgaaggttacaagtctgttaaggagatgattgagaagaccaatagtcgttctgcatgggggaatcaatatgcctttttgcatgtttcaattccagagcttagtgactccaaatatgcaaacccacttgagtttataagggaagcccataaggatatgaccaaaaagaaaaattctttggccactcctctcactggcatgcttctagatatgctcagaaaactcaggggtcctgaggctgcagctagctacttacgcagtactttgagaaactcaagcacaacaatctcaaacatcattggaccagtggagcaaatggctgtggctaatcatccaattaaagggttttacttcatggtagctggttcacctgagagtctcaccatgacgatcatgagctacatgggaaagataagaattgcatttggagtagagaagaacttcatcgacaagcaattattcaagtcgtgtttggagaattctcttgagatgataaaggaagcagcaaaaaagatttccgcataaaatcaaatatggaagatatgtactttttttgttgttgttgtggaagatatgtactaccactatattctatctatattcttgttaatatttaattattttatttaaatatatgtgatgtggtgattctgtaatagaaatttgtttctgagtggaatgtattttattgaactggaacagtatcattacggccgggcatggctgtttttagttgggaagtccctacattacatcaaaaagtagaatt

SEQ ID NO: 21667 - protein, 375 aa, Glycine max
SNLFLYDEYLDEYMSTIAVEHLPQNRPLWELHIIKYPTSNAKGTLVFKLHHALGDGFSLMGALLSCMQRADNTSLPFTLPSSQRPKASSISNTKGFFKKLPSIFFQTISEFGWSFLKSKLIEDDQTPIRSCAEDFKTRQMTISDVTFSLDLIKDVKSKLGVSINDVLAGVIFFGIRLYMQEINLKSSQTQSTALVLLNTRNIEGYKSVKEMIEKTNSRSAWGNQYAFLHVSIPELSDSKYANPLEFIREAHKDMTKKKNSLATPLTGMLLDMLRKLRGPEAAASYLRSTLRNSSTTISNIIGPVEQMAVANHPIKGFYFMVAGSPESLTMTIMSYMGKIRIAFGVEKNFIDKQLFKSCLENSLEMIKEAAKKISA

SEQ ID NO: 21668 - protein, 362 aa, Glycine max
MSTIAVEHLPQNRPLWELHIIKYPTSNAKGTLVFKLHHALGDGFSLMGALLSCMQRADNTSLPFTLPSSQRPKASSISNTKGFFKKLPSIFFQTISEFGWSFLKSKLIEDDQTPIRSCAEDFKTRQMTISDVTFSLDLIKDVKSKLGVSINDVLAGVIFFGIRLYMQEINLKSSQTQSTALVLLNTRNIEGYKSVKEMIEKTNSRSAWGNQYAFLHVSIPELSDSKYANPLEFIREAHKDMTKKKNSLATPLTGMLLDMLRKLRGPEAAASYLRSTLRNSSTTISNIIGPVEQMAVANHPIKGFYFMVAGSPESLTMTIMSYMGKIRIAFGVEKNFIDKQLFKSCLENSLEMIKEAAKKISA

SEQ ID NO: 21669 - protein, 316 aa, Glycine max
MGALLSCMQRADNTSLPFTLPSSQRPKASSISNTKGFFKKLPSIFFQTISEFGWSFLKSKLIEDDQTPIRSCAEDFKTRQMTISDVTFSLDLIKDVKSKLGVSINDVLAGVIFFGIRLYMQEINLKSSQTQSTALVLLNTRNIEGYKSVKEMIEKTNSRSAWGNQYAFLHVSIPELSDSKYANPLEFIREAHKDMTKKKNSLATPLTGMLLDMLRKLRGPEAAASYLRSTLRNSSTTISNIIGPVEQMAVANHPIKGFYFMVAGSPESLTMTIMSYMGKIRIAFGVEKNFIDKQLFKSCLENSLEMIKEAAKKISA

SEQ ID NO: 21670 - DNA, 1705 bp, Glycine max
gaaaaggatccccagaaagttgaaactgatgagaaggtagaagaaaaagaagaaacaaaggatccaaagaatgctggatacaagataagtgcaactgctgcttataatattgctgcctctgctgccacttatctgcattctcagactagtagcatatttccattcaaatcctcaaatgctgtgactggtgaaggttcacttgaaggaagcaatgaaagccttgacactgttaacatgctaaacacagaggtggcatctttgatggcaactactgattcagtgacagcagtggttgcagcaaaggaggaagtaaagcaggctgttgcagatgatctgaactctgcacattcaacaccctgtgaatggtttgtctgtgatgatgaccagagtgctacaaggtttttcgttattcagggttctgagacgttggcttcatggcaagcaaacctactctttgagccaattaaatttgagggtttagatgtacttgtgcacagaggtatatatgaggctgctaaagggatatatcaacagatgttgccagaagtacgtgctcacctaaaatctcgaggttctcgtgcaacttttcgtttcacaggccattctcttggtggaagcttggcattacttgtgaatctcatgctattgataaggaatgaagtgccggtctcctctctacttcctgtgataacatttggttccccatccatcatgtgtggaggtgatagtctgctaaaaaaattaggtttgcctaggagccatgttcaagcaatcacaatgcacagagacatagtaccacgagcattttcttgcaattaccctaatcatgttgcagaactattgaaggctgtcaatgggaacttccgtagtcatccttgtctcaataaacagaagctactatatgcaccaatgggtaatctgctgattctgcagccagatgagaaattttcaccaagccatcatctcctaccatctggcagtggtctatatcttttgtgttgtccattatcagaatccgatgacacagagaagcggctccgagctgctcagatggtcttcttaaactcacctcatccacttgagatattaagtgaccgatctgcttatggatctggaggaagtatacaacgagatcatgacatgaactcttacttaaagtctttgagaactgtgattcgcaaagaacttaaccagatccgtaaagctaagagggagcaacggcgtaaggtgtggtggcctcttctgttatctcgtggagctgataccagcattgttgctgggaggtccatgatatcaatcaatgtgggtcaacgccagtcacccttctccagcgtgatacaaacagggagagagtccctgaaaaggttcagtaggattgttacatcccaacatatgcatttgtttgtgttgcttttgttccctgctcggttgttgctcttgggaacatatagcgtaattaacctcaaatgaatttataagatgattcattattaagcatgggggacacaattgtatagggcgagggcacatgctttgtaggacattacacatttagacgattctttattcattgatttcaaaattgaaatattgcgttcttacgagtccttgcttgcagaggaatattactctaaaatagtaattaatatttaaaaatttaattgtattttaattcaagttatatgcttatattggtccaaaaaag

SEQ ID NO: 21671 - protein, 489 aa, Glycine max
EKDPQKVETDEKVEEKEETKDPKNAGYKISATAAYNIAASAATYLHSQTSSIFPFKSSNAVTGEGSLEGSNESLDTVNMLNTEVASLMATTDSVTAVVAAKEEVKQAVADDLNSAHSTPCEWFVCDDDQSATRFFVIQGSETLASWQANLLFEPIKFEGLDVLVHRGIYEAAKGIYQQMLPEVRAHLKSRGSRATFRFTGHSLGGSLALLVNLMLLIRNEVPVSSLLPVITFGSPSIMCGGDSLLKKLGLPRSHVQAITMHRDIVPRAFSCNYPNHVAELLKAVNGNFRSHPCLNKQKLLYAPMGNLLILQPDEKFSPSHHLLPSGSGLYLLCCPLSESDDTEKRLRAAQMVFLNSPHPLEILSDRSAYGSGGSIQRDHDMNSYLKSLRTVIRKELNQIRKAKREQRRKVWWPLLLSRGADTSIVAGRSMISINVGQRQSPFSSVIQTGRESLKRFSRIVTSQHMHLFVLLLFPARLLLLGTYSVINLK

SEQ ID NO: 21672 - protein, 411 aa, Glycine max
MLNTEVASLMATTDSVTAVVAAKEEVKQAVADDLNSAHSTPCEWFVCDDDQSATRFFVIQGSETLASWQANLLFEPIKFEGLDVLVHRGIYEAAKGIYQQMLPEVRAHLKSRGSRATFRFTGHSLGGSLALLVNLMLLIRNEVPVSSLLPVITFGSPSIMCGGDSLLKKLGLPRSHVQAITMHRDIVPRAFSCNYPNHVAELLKAVNGNFRSHPCLNKQKLLYAPMGNLLILQPDEKFSPSHHLLPSGSGLYLLCCPLSESDDTEKRLRAAQMVFLNSPHPLEILSDRSAYGSGGSIQRDHDMNSYLKSLRTVIRKELNQIRKAKREQRRKVWWPLLLSRGADTSIVAGRSMISINVGQRQSPFSSVIQTGRESLKRFSRIVTSQHMHLFVLLLFPARLLLLGTYSVINLK

SEQ ID NO: 21673 - protein, 402 aa, Glycine max
MATTDSVTAVVAAKEEVKQAVADDLNSAHSTPCEWFVCDDDQSATRFFVIQGSETLASWQANLLFEPIKFEGLDVLVHRGIYEAAKGIYQQMLPEVRAHLKSRGSRATFRFTGHSLGGSLALLVNLMLLIRNEVPVSSLLPVITFGSPSIMCGGDSLLKKLGLPRSHVQAITMHRDIVPRAFSCNYPNHVAELLKAVNGNFRSHPCLNKQKLLYAPMGNLLILQPDEKFSPSHHLLPSGSGLYLLCCPLSESDDTEKRLRAAQMVFLNSPHPLEILSDRSAYGSGGSIQRDHDMNSYLKSLRTVIRKELNQIRKAKREQRRKVWWPLLLSRGADTSIVAGRSMISINVGQRQSPFSSVIQTGRESLKRFSRIVTSQHMHLFVLLLFPARLLLLGTYSVINLK

SEQ ID NO: 21674 - DNA, 1620 bp, Glycine max
agaagataacacacgttcgcgtctacgatgcgaaccaggacatcctcaaagccctgtcggggaccaagattcgcgtcatcatcagcgtcccaaacaaccagctcctggcgattggttcctccaactccaccgcggcctcctggatcgaccgaaacgtcgtcgcttactacccccaaaccctcgtcagcggaatctccgtcggcgacgaggttctgaccagcgtcccctcctccgcccccctcattctccctgccctcgagtccctctacaacgccctcgtcgcctccaacctccaccaacaaatcaaggtctcaacccctcacgctgcttccatcattctcgaccctttccctccctctcaggcttacttcaaccaatccctcgtttccgttattctccctctccttcagttcctttcacgaaccggttcccctctcatgatgaacctttacccctactacgtcttcatgcagaacaaaggtgtggttcctctcgacaatgctctcttcaaacccctcactcctaataaggaaatggtcgaccccaacaccttgcttcactacaccaacgtcctcgacgctatggtcgacgccgcttatttctccatgaagaaccttaatatcaccgatgttgttgttcttgtcaccgaaactggctggcctgccaagggtgattctaaggaaccttatgctaccaaggacaatgctgatacttataactccaatttgattaggcatgtctttgatcgcagtggaacccctttgcatcctgagactacttccagtgtgtttatatatgaattgtttaatgaggacttaaggtctccgccgctgtcggaggcgaattggggtttgttttatgggaacactacgccggcttatctgcttcatgtgtctggaattgggacttttttggccaatgataccaccaatcagacatactgcattgccatggatgggtttgattctaagacgttgcaggccgcgctggattgggcgtgtggaccaggccgagccaattgttccgagattcagcctggagagagttgtttccagcctaataatgtgaagaaccatgcttcttatgcgtttgatagctattaccagaaagaaggcaaggctcaggggtcttgtgacttcaaaggagtggctatgatcaccaccactgatcccagtcacgggagctgtatatttcctggaagcaagaaagtgagcaacaagacaaaggaagtggtgaactctactatatcaagcaatgcaggggagaagttgaggttcaaaacctttaacagcatcaaaataagtgcaattggcaacattttgcacattttattggctgcatatctccctactttgttgttagtccttttatgaggtgctaataattcaattttttgttctttttggaattttgaatttcatagagttaaggatgaggtcataagagaaaaggaatcgagcatgatatgtaggtctaaacttagggcttatgtagatgcttccttttgttttaagaaagtagtgttaataatttttcgtggggctcttgtaattaacgtatgtattacttgaaattgtatttgttagttaatttgtttagaatgtgtatcaacatgtcacc

SEQ ID NO: 21675 - protein, 456 aa, Glycine max
KITHVRVYDANQDILKALSGTKIRVIISVPNNQLLAIGSSNSTAASWIDRNVVAYYPQTLVSGISVGDEVLTSVPSSAPLILPALESLYNALVASNLHQQIKVSTPHAASIILDPFPPSQAYFNQSLVSVILPLLQFLSRTGSPLMMNLYPYYVFMQNKGVVPLDNALFKPLTPNKEMVDPNTLLHYTNVLDAMVDAAYFSMKNLNITDVVVLVTETGWPAKGDSKEPYATKDNADTYNSNLIRHVFDRSGTPLHPETTSSVFIYELFNEDLRSPPLSEANWGLFYGNTTPAYLLHVSGIGTFLANDTTNQTYCIAMDGFDSKTLQAALDWACGPGRANCSEIQPGESCFQPNNVKNHASYAFDSYYQKEGKAQGSCDFKGVAMITTTDPSHGSCIFPGSKKVSNKTKEVVNSTISSNAGEKLRFKTFNSIKISAIGNILHILLAAYLPTLLLVLL

SEQ ID NO: 21676 - protein, 311 aa, Glycine max
MMNLYPYYVFMQNKGVVPLDNALFKPLTPNKEMVDPNTLLHYTNVLDAMVDAAYFSMKNLNITDVVVLVTETGWPAKGDSKEPYATKDNADTYNSNLIRHVFDRSGTPLHPETTSSVFIYELFNEDLRSPPLSEANWGLFYGNTTPAYLLHVSGIGTFLANDTTNQTYCIAMDGFDSKTLQAALDWACGPGRANCSEIQPGESCFQPNNVKNHASYAFDSYYQKEGKAQGSCDFKGVAMITTTDPSHGSCIFPGSKKVSNKTKEVVNSTISSNAGEKLRFKTFNSIKISAIGNILHILLAAYLPTLLLVLL

SEQ ID NO: 21677 - protein, 310 aa, Glycine max
MNLYPYYVFMQNKGVVPLDNALFKPLTPNKEMVDPNTLLHYTNVLDAMVDAAYFSMKNLNITDVVVLVTETGWPAKGDSKEPYATKDNADTYNSNLIRHVFDRSGTPLHPETTSSVFIYELFNEDLRSPPLSEANWGLFYGNTTPAYLLHVSGIGTFLANDTTNQTYCIAMDGFDSKTLQAALDWACGPGRANCSEIQPGESCFQPNNVKNHASYAFDSYYQKEGKAQGSCDFKGVAMITTTDPSHGSCIFPGSKKVSNKTKEVVNSTISSNAGEKLRFKTFNSIKISAIGNILHILLAAYLPTLLLVLL

SEQ ID NO: 21678 - DNA, 1348 bp, Glycine max
gatgcatgggagaagaaattgtataaggaagttaaggatgaagagaggttacgagctatttatgagaaaaagttcaagagactgaaaacattggataatctaggagctgaatctagtaaaattgatgctactagggcatcaataaggaagctgcaaacaaaaatcaatatttgcatcagaactgctgaaactataatgggaagaatacataaattgagggataatgaattgcagcctcaacttgcagcattgattaacggattcataagaatgtggaaattcatgctcaaatgccaccagaaacagttccaagctatcatggagagtaaaagtcagtctcttaagattaacgtgggtctgcaaggagatgaaggtttgaaggccattgtagaacttgaaaaggagcttttgaattggtgcagtcagttcaaccattgggttaagactcaaaaatcttatgtcaagaatttgaatgagtggctcataaggtgccttcctaatgaacctgaagaaacagctgatggtattgcccctttctctccaagtcagcttgatgccccaccagtttttataatttgcaatgattggaatcatgcaatgagtagaatatcagaaactggggtggcagaggccatgcatgaatttgctctaaaactacatgagttatgggaaaagcaagatgaagcgcaacgccagagaatcaaagcagagtatcttagaaaggactttgagaaacagcttagaactttgcacacagaaatgggaggctcagaacatgaccatgataaagttttgggaaagattgcattgtcaaagcttgcttctgatagtggtgtttcaccactagatgatcttaaagtggatttagattctatgaagaagaaattgcatgaagagagggtcaggcataaagaagccatcaaacttgttcgtgatgcagctaataatagtttacaagctggtttgattcccattttcaagacattagagagtttcacttcagaggtggtgaaagctcatgaacaagtcaggcttcaaagtgccggggacaagtagatattccagctatttggtttcttttgagatcatgtgattgcatttactagtgtggattaattgggggagtctagagattacatggaagatttagaactaacccaccagttttgcagctagagttagtgttattatataggaaagcacctcttgaattaccctatagaggtttgctcggaacatgtttcagcgatgaaaggtttgggcgcctaaaatgtcaggagtggtcatcgtgaattcagctccggtaacatccaatctatagttaggggaaaattgtacagacaaaaac

SEQ ID NO: 21679 - protein, 351 aa, Glycine max
DAWEKKLYKEVKDEERLRAIYEKKFKRLKTLDNLGAESSKIDATRASIRKLQTKINICIRTAETIMGRIHKLRDNELQPQLAALINGFIRMWKFMLKCHQKQFQAIMESKSQSLKINVGLQGDEGLKAIVELEKELLNWCSQFNHWVKTQKSYVKNLNEWLIRCLPNEPEETADGIAPFSPSQLDAPPVFIICNDWNHAMSRISETGVAEAMHEFALKLHELWEKQDEAQRQRIKAEYLRKDFEKQLRTLHTEMGGSEHDHDKVLGKIALSKLASDSGVSPLDDLKVDLDSMKKKLHEERVRHKEAIKLVRDAANNSLQAGLIPIFKTLESFTSEVVKAHEQVRLQSAGDK

SEQ ID NO: 21680 - protein, 286 aa, Glycine max
MGRIHKLRDNELQPQLAALINGFIRMWKFMLKCHQKQFQAIMESKSQSLKINVGLQGDEGLKAIVELEKELLNWCSQFNHWVKTQKSYVKNLNEWLIRCLPNEPEETADGIAPFSPSQLDAPPVFIICNDWNHAMSRISETGVAEAMHEFALKLHELWEKQDEAQRQRIKAEYLRKDFEKQLRTLHTEMGGSEHDHDKVLGKIALSKLASDSGVSPLDDLKVDLDSMKKKLHEERVRHKEAIKLVRDAANNSLQAGLIPIFKTLESFTSEVVKAHEQVRLQSAGDK

SEQ ID NO: 21681 - protein, 261 aa, Glycine max
MWKFMLKCHQKQFQAIMESKSQSLKINVGLQGDEGLKAIVELEKELLNWCSQFNHWVKTQKSYVKNLNEWLIRCLPNEPEETADGIAPFSPSQLDAPPVFIICNDWNHAMSRISETGVAEAMHEFALKLHELWEKQDEAQRQRIKAEYLRKDFEKQLRTLHTEMGGSEHDHDKVLGKIALSKLASDSGVSPLDDLKVDLDSMKKKLHEERVRHKEAIKLVRDAANNSLQAGLIPIFKTLESFTSEVVKAHEQVRLQSAGDK

SEQ ID NO: 21682 - DNA, 880 bp, Glycine max
ttcgtccaccagtccgccatcaagtccgacggctaccgcagcctcaacgagaacgacaccgtcgagttcgaggtcatcaccggcgacgacggtcgcaccaaggcctccgacgtcaccgcaccaggaggaggagcgctctccggcggctcccgccctggcgatggcggtggtgaccgtgggggccgcggcggctacggtggcggtggctacggcggtggcggtggcggtggcggctacggaggcggtggtggcggttacggcggtggcggtggcggctacggtggtggcggcggcggccgtggatgctacaagtgcggcgaggagggccacatctccagggactgcccccagggcggcggcggtggcggcgtatacggcggtggtggctatggaggaggcggcggcggcggccgcgagtgctacaagtgcggcgaggagggccacatctccagggactgcccccagggcggtggtggtggcggcggcggcggcggctacggaggcggtggtggccgtggcggcggcggcggcggtggcggctgcttctcctgcggcgagtccggccacttctcccgcgagtgccccaacaaggcccactaggcggcacagctcttcagatctgagtgccccgtttaccctcgctcctttacctacctcctgattctgcagcaagtcataccctatacctatcagtactagtattagtcgccgtagcgtttccccctgctgctcgatccgagcttggttccagaagaattgctggtggtgtgttcgtcgttaagatccaagttattttgttgtctctctgtgatgaggacacagatctatctatgtgttggatggactaagttatcgaagtcaagtttggtttcttgagatt

SEQ ID NO: 21683 - protein, 219 aa, Glycine max
SSTSPPSSPTATAASTRTTPSSSRSSPATTVAPRPPTSPHQEEERSPAAPALAMAVVTVGAAAATVAVATAVAVAVAATEAVVAVTAVAVAATVVAAAAVDATSAARRATSPGTAPRAAAVAAYTAVVAMEEAAAAAASATSAARRATSPGTAPRAVVVAAAAAATEAVVAVAAAAAVAAASPAASPATSPASAPTRPTRRHSSSDLSAPFTLAPLPTS

SEQ ID NO: 21684 - protein, 199 aa, Glycine max
FVHQSAIKSDGYRSLNENDTVEFEVITGDDGRTKASDVTAPGGGALSGGSRPGDGGGDRGGRGGYGGGGYGGGGGGGGYGGGGGGYGGGGGGYGGGGGGRGCYKCGEEGHISRDCPQGGGGGGVYGGGGYGGGGGGGRECYKCGEEGHISRDCPQGGGGGGGGGGYGGGGGRGGGGGGGGCFSCGESGHFSRECPNKAH

SEQ ID NO: 21685 - protein, 166 aa, Glycine max
MAVVTVGAAAATVAVATAVAVAVAATEAVVAVTAVAVAATVVAAAAVDATSAARRATSPGTAPRAAAVAAYTAVVAMEEAAAAAASATSAARRATSPGTAPRAVVVAAAAAATEAVVAVAAAAAVAAASPAASPATSPASAPTRPTRRHSSSDLSAPFTLAPLPTS

SEQ ID NO: 21686 - DNA, 548 bp, Glycine max
cacacacatccgttgactcctggcaaaggtagaagggatttctactatgaacaatatccgactgaacaagataaaattcgggaactatctcagcagttggcaactgagaaaaagcgatctgcggcctataaaaggcatcttgaattgatatttgagcaaattgaagagcagaacgagaacctttcaaagaaaatacagcacatagtagacagtgtgaaggagatggaagccaaagaagaacatagtagacagtgggaaggagatggaagccaaagaagaacatattagacagtgtgaaggagatggaaaccaaagaacaacagtgtagactctgatagattcaactttgaacgcgatacttttagttggtagaagaaactagttcagtcaaatgtagaggtcctttgagtccactattgtcaagttgtgccaacaatgtaataactcataacagacattcaaacgccctgatagagtttcattcttccatcatttttctagtatttcctttgtgtatagaatgagactgccgttgagaatgctgtggc

SEQ ID NO: 21687 - protein, 95 aa, Glycine max
HTHPLTPGKGRRDFYYEQYPTEQDKIRELSQQLATEKKRSAAYKRHLELIFEQIEEQNENLSKKIQHIVDSVKEMEAKEEHSRQWEGDGSQRRTY

SEQ ID NO: 21688 - DNA, 1281 bp, Glycine max
atgccgttcttctctgttatttgagtcaaaggattatccccatgtcagttgcaccagttgacggtattccctcattaaacagtgatctcttctatgatatatttcgtcgacttgatggtgcaacattggctagtgcagcatgtacttgtgcagcgctgtgttccatctcaaaagaagagagtttatgggagaacgtatgttcctctatgtggccttcaaccaatagagaggatgtcaaaagtttaatatcttctgttggtggattcagaaaattctatgcagattgtttcccacttattgtaaacaaggaggttgtagggtatcaaccaaacaactatctcgagtacccggacaattggactgaagctgaatattatggggacatgaatgaatctgaaagcatctctccatcagattttgtttctatagtagatattaggttcaaggggaaaccaatctgttccaaagttctgtggggaattccaaatgcaaatggctatgatggttggttctataactgccctttccggattgatattctcacttatgcagatagagatgataacaatgatggagcggttcacctttctgtatctgatggtctgccaccaattacatccttggagagggaaaggaaagatgggaagctgtggcgggaactccgtgaagggctccagcttagttggattatagtaaacaggaaaataaagcaagctgcaaatcttgctagctggagccctcttggtggtcaaagacactggccaaccgataaggattttgttatccgctttggatcagttctacccgccagggacattcttccttgtcaggtagcagagtgtatccttattatgaagtttagagtgattcacactgaagaagatgggtttcaaacaactcttaaattaacagagctgagcatgcagttggaagacatggaaggtgctcatgttaatggaagaaacagtttgcttatacttaaggaagcacttagcagccgaaggagcaaaaattatggtgaagtactcgagtcttgtcatatgtattcaaaagtacagaatgagttgaaagaggagaagatgagaaacgaaagtcggttggacagactttgtattttaagtggcattgcagcatttatgacgttctggtactgtgttttatgaaatggtagcgcatagtcatttagtggaatatgctaatgtagctctaacaaatgctggaccttggcactcctgtgtaagatgtggttttgcttaccataataaacaaatcaataaacag

SEQ ID NO: 21689 - protein, 386 aa, Glycine max
AVLLCYLSQRIIPMSVAPVDGIPSLNSDLFYDIFRRLDGATLASAACTCAALCSISKEESLWENVCSSMWPSTNREDVKSLISSVGGFRKFYADCFPLIVNKEVVGYQPNNYLEYPDNWTEAEYYGDMNESESISPSDFVSIVDIRFKGKPICSKVLWGIPNANGYDGWFYNCPFRIDILTYADRDDNNDGAVHLSVSDGLPPITSLERERKDGKLWRELREGLQLSWIIVNRKIKQAANLASWSPLGGQRHWPTDKDFVIRFGSVLPARDILPCQVAECILIMKFRVIHTEEDGFQTTLKLTELSMQLEDMEGAHVNGRNSLLILKEALSSRRSKNYGEVLESCHMYSKVQNELKEEKMRNESRLDRLCILSGIAAFMTFWYCVL

SEQ ID NO: 21690 - protein, 373 aa, Glycine max
MSVAPVDGIPSLNSDLFYDIFRRLDGATLASAACTCAALCSISKEESLWENVCSSMWPSTNREDVKSLISSVGGFRKFYADCFPLIVNKEVVGYQPNNYLEYPDNWTEAEYYGDMNESESISPSDFVSIVDIRFKGKPICSKVLWGIPNANGYDGWFYNCPFRIDILTYADRDDNNDGAVHLSVSDGLPPITSLERERKDGKLWRELREGLQLSWIIVNRKIKQAANLASWSPLGGQRHWPTDKDFVIRFGSVLPARDILPCQVAECILIMKFRVIHTEEDGFQTTLKLTELSMQLEDMEGAHVNGRNSLLILKEALSSRRSKNYGEVLESCHMYSKVQNELKEEKMRNESRLDRLCILSGIAAFMTFWYCVL

SEQ ID NO: 21691 - protein, 318 aa, Glycine max
MWPSTNREDVKSLISSVGGFRKFYADCFPLIVNKEVVGYQPNNYLEYPDNWTEAEYYGDMNESESISPSDFVSIVDIRFKGKPICSKVLWGIPNANGYDGWFYNCPFRIDILTYADRDDNNDGAVHLSVSDGLPPITSLERERKDGKLWRELREGLQLSWIIVNRKIKQAANLASWSPLGGQRHWPTDKDFVIRFGSVLPARDILPCQVAECILIMKFRVIHTEEDGFQTTLKLTELSMQLEDMEGAHVNGRNSLLILKEALSSRRSKNYGEVLESCHMYSKVQNELKEEKMRNESRLDRLCILSGIAAFMTFWYCVL

SEQ ID NO: 21692 - DNA, 1082 bp, Glycine max
cacgagaccattattataaatgcactgtctgtatactatttggtgccttttcgatcgtactcatgtgtctattcccttcacagcaagataaacatggcctatttaccacatttttcatcggtcatggatttctgaaaaattatgtcttgtgactaaatttctggttaggttgactgggttcatctggatttgagagggtggtactaattatcttagtgaagttattagaaaaggagttggtagacctatcatgtttgtcctggtggcacttctgcttgttttctgatcagcatcctaagctgctaaaggataaaagattcctaaatgtgaattgcattcctcattgtacactgcacatcagttgtgtggtccatttggtaagattgatgaatggctgtgaggtcaatagtccatgcatgtaatgtggccaactggccgtgtcttgaaagttgaaactttgaactctttgcttctttggtccatttggcataatcttggtttatttttgctgataaatttggtgtcaccggatatcctatagcgttcatcagctaatttatatcctttatatctttcacatttggccctgtttcagatgttttgtatatgatgtttctgaaaaactggagtcgatatacccaagcaaagcatcagtatctttagagaaaacgccaggatagctgatgtggttatcttgcaactgccctgttcactcaatttaacactcagcattaacctgtttctacagtgatatcatggctctggcggagaatgatgtttacgcttgcattgaacttgagcaattgaccgtggagaatgctttggagctgcaatatcaggtgaatgggcggagacagtgtcatacctgtttgagcacgagtacgttgctcgaggtgttggatcaattgtctgttccaggggtgcggcggcttgtcgttattgaaccgatgactagatttgtgcaaggaattatctcattgagagacacaataacatttctcgttggataacatttgtgtagccatttcatacatgaaagcctgttgtatttgattgggacaaaataaaaatgttgctttggc

SEQ ID NO: 21693 - protein, 84 aa, Glycine max
MALAENDVYACIELEQLTVENALELQYQVNGRRQCHTCLSTSTLLEVLDQLSVPGVRRLVVIEPMTRFVQGIISLRDTITFLVG

SEQ ID NO: 21694 - protein, 49 aa, Glycine max
RDHYYKCTVCILFGAFSIVLMCLFPSQQDKHGLFTTFFIGHGFLKNYVL

SEQ ID NO: 21695 - protein, 44 aa, Glycine max
HETIIINALSVYYLVPFRSYSCVYSLHSKINMAYLPHFSSVMDF

SEQ ID NO: 21696 - DNA, 1144 bp, Glycine max
tatctgcggtggactgaaaccaaactacagcaatgttgccccaaaggttatgtattactctgccagaggaccagatccagaggacagtcttcctcacgaagctgacattttgaaacctaacctgttagctccgggaaattttatatgggctgcttggagttctgttggcactgattcagttgaattcctaggtgagaattttgcattgatgtctggcacaagcatggctgcaccacatgttgctggtcttgctgcactaattaggcaaaagttccccaatttcagtcctgcagctattggatctgctctttctactacagcctctctgtatgacaagagtggtgggccaataatggctcagcgatcatatgcctctccagatcaaaaccagtctccggcaactccttttgacatgggaagtggttttgtgaatgcaagtggagcactgaatccgggtttggtttttgattctggttatgatgattacatgtcatttctatgtggaatcaacggttcagctcccgtggtgctaaactacacgggccaaaattgcgcgctctataacttgactgtctatggtcctgatctgaacctgccctcaatcactatatcaaagctgaaccaatccagaatagtgcagaggacagtccaaaacattgctcaaaatgaatcttacagtgttggttggactgctcctaatggggtttcagtgaaagtgtctccaactcacttctgtattggcagtggtgagaggcaggtcttgtctgtgctcttgaatgcaacccttagcagctctgtggccagctttgggagaattgggctgtttgggaatcaaggtcatgtggtcaacattccactttcagtcatggttaaaatctcatctaacactactactagctaactggggatgtcacgtattcttgttaaaagtaaattcattttgggacaaaatttggatgaagttttttaggtgcttttagtgtttttgaatcagagttagagtttcatctcgataatttgcctaataaagtatttgcattaaatgttaatatagattattgaggtgaaattctaatttggattggagaacaatactaaaatcatctaatgaattgcattttagttttgttcaaaaaaaaaaatg

SEQ ID NO: 21697 - protein, 299 aa, Glycine max
ICGGLKPNYSNVAPKVMYYSARGPDPEDSLPHEADILKPNLLAPGNFIWAAWSSVGTDSVEFLGENFALMSGTSMAAPHVAGLAALIRQKFPNFSPAAIGSALSTTASLYDKSGGPIMAQRSYASPDQNQSPATPFDMGSGFVNASGALNPGLVFDSGYDDYMSFLCGINGSAPVVLNYTGQNCALYNLTVYGPDLNLPSITISKLNQSRIVQRTVQNIAQNESYSVGWTAPNGVSVKVSPTHFCIGSGERQVLSVLLNATLSSSVASFGRIGLFGNQGHVVNIPLSVMVKISSNTTTS

SEQ ID NO: 21698 - protein, 283 aa, Glycine max
MYYSARGPDPEDSLPHEADILKPNLLAPGNFIWAAWSSVGTDSVEFLGENFALMSGTSMAAPHVAGLAALIRQKFPNFSPAAIGSALSTTASLYDKSGGPIMAQRSYASPDQNQSPATPFDMGSGFVNASGALNPGLVFDSGYDDYMSFLCGINGSAPVVLNYTGQNCALYNLTVYGPDLNLPSITISKLNQSRIVQRTVQNIAQNESYSVGWTAPNGVSVKVSPTHFCIGSGERQVLSVLLNATLSSSVASFGRIGLFGNQGHVVNIPLSVMVKISSNTTTS

SEQ ID NO: 21699 - protein, 230 aa, Glycine max
MSGTSMAAPHVAGLAALIRQKFPNFSPAAIGSALSTTASLYDKSGGPIMAQRSYASPDQNQSPATPFDMGSGFVNASGALNPGLVFDSGYDDYMSFLCGINGSAPVVLNYTGQNCALYNLTVYGPDLNLPSITISKLNQSRIVQRTVQNIAQNESYSVGWTAPNGVSVKVSPTHFCIGSGERQVLSVLLNATLSSSVASFGRIGLFGNQGHVVNIPLSVMVKISSNTTTS

SEQ ID NO: 21700 - DNA, 1175 bp, Glycine max
ctctcaaccacgagtgggatcgatcctcccgcgtaccaagccaccgactaacatggcagcgtctctccaagccgcggccacgctgatgccggccaagatcggcggccgggcctcctccgcgcggccgtcgtcgcacgtcgcccgggcgttcggcgttgacgctggcgccaggatcacctgctccctgcagtccgacatcagggaggtcgcaagcaagtgcgccgacgccgccaagatggccggcttcgccctcgccacctctgccctcctcgtctccggcgcgagcgcggagggggcgcccaagaggctgaccttcgacgagatccagagcaagacctacatggaggtgaagggtaccggcaccgcgaaccagtgcccgaccatcgacggcggcgtcgactccttccccttcaaggccggcaagtacgagatgaagaagttctgcctggagcccacctccttcaccgtcaaggccgagggcatccagaagaacgagccgccggccttccagaaaaccaagctcatgacccgtctcacctacacccttgacgagatggaaggcccgctcgaggtcggcgccgacggcaccctcaagttcgaggagaaggacggcatcgactacgcggccgtcaccgtgcagctccccggaggcgagcgagtgcccttcctcttcaccgtcaagcagctcgtcgctaccggcaagcccgagagcttcagcgggcccttcctcgtgcccagctacaggggttcgtctttcctcgacccaaagggccgtggtggctctactggctacgacaacgccgtggcgctacccgccggaggcagaggagacgaggaggagttggctaaggagaacgtgaagaacgcgtcctcgtccacgggcaacatcacgctcagcgtgaccaagagcaagccggagaccggcgaggtgatcggtgtcttcgagagcgtgcagccgtcagacaccgacctcggcgccaaggcgcccaaggatgtcaagatccagggtgtgtggtacgcgcagctcgagtctaactagagcagagcagaagtgaagatactcatcttgtgtgcatgcgtacgtgggttgatcggtggagaggaaacaatcgaggcaacaaatgtgtttgtgtgtgtatctagtaatctaaacccagggtgtcggtttatatttt

SEQ ID NO: 21701 - protein, 345 aa, Glycine max
SQPRVGSILPRTKPPTNMAASLQAAATLMPAKIGGRASSARPSSHVARAFGVDAGARITCSLQSDIREVASKCADAAKMAGFALATSALLVSGASAEGAPKRLTFDEIQSKTYMEVKGTGTANQCPTIDGGVDSFPFKAGKYEMKKFCLEPTSFTVKAEGIQKNEPPAFQKTKLMTRLTYTLDEMEGPLEVGADGTLKFEEKDGIDYAAVTVQLPGGERVPFLFTVKQLVATGKPESFSGPFLVPSYRGSSFLDPKGRGGSTGYDNAVALPAGGRGDEEELAKENVKNASSSTGNITLSVTKSKPETGEVIGVFESVQPSDTDLGAKAPKDVKIQGVWYAQLESN

SEQ ID NO: 21702 - protein, 328 aa, Glycine max
MAASLQAAATLMPAKIGGRASSARPSSHVARAFGVDAGARITCSLQSDIREVASKCADAAKMAGFALATSALLVSGASAEGAPKRLTFDEIQSKTYMEVKGTGTANQCPTIDGGVDSFPFKAGKYEMKKFCLEPTSFTVKAEGIQKNEPPAFQKTKLMTRLTYTLDEMEGPLEVGADGTLKFEEKDGIDYAAVTVQLPGGERVPFLFTVKQLVATGKPESFSGPFLVPSYRGSSFLDPKGRGGSTGYDNAVALPAGGRGDEEELAKENVKNASSSTGNITLSVTKSKPETGEVIGVFESVQPSDTDLGAKAPKDVKIQGVWYAQLESN

SEQ ID NO: 21703 - protein, 317 aa, Glycine max
MPAKIGGRASSARPSSHVARAFGVDAGARITCSLQSDIREVASKCADAAKMAGFALATSALLVSGASAEGAPKRLTFDEIQSKTYMEVKGTGTANQCPTIDGGVDSFPFKAGKYEMKKFCLEPTSFTVKAEGIQKNEPPAFQKTKLMTRLTYTLDEMEGPLEVGADGTLKFEEKDGIDYAAVTVQLPGGERVPFLFTVKQLVATGKPESFSGPFLVPSYRGSSFLDPKGRGGSTGYDNAVALPAGGRGDEEELAKENVKNASSSTGNITLSVTKSKPETGEVIGVFESVQPSDTDLGAKAPKDVKIQGVWYAQLESN

SEQ ID NO: 21704 - DNA, 1410 bp, Glycine max
atctctcccgttgtcgtcgcctcctcctaaaccactctccctatccccgtgtccagaatctaccccccggctccaatggcggcgaaggaaccgatgcgcgtgctcgtcaccggcgccgcaggacaaatcggatatgctcttgttcccatgattgccaggggagttatgcttggtgcagaccagcctgttattctgcatatgctggatattgaatttgctgctgaagctcttaaaggcgtcaagatggagttgatcgatgccgcatttccacttctcaagggtaagctgatttgttcaatttgtttctttttagacagcattacctctttttttttggacaatcatctttgctgatgcttgaaccttctgttggtacactataggagttgttgcaacaactgatgttgttgaggcttgcactggtgtgaatgttgcggttatggttggtggattccccaggaaggaaggaatggaaaggaaggatgttatgacgaaaaatgtttcaatctacaaagctcaagcatctgctcttgaagctcatgcagcccccaattgcaaggttttggttgttgccaacccagcaaacaccaatgctctcatcctgaaggagtttgctccatctatccctgagaagaacatcagttgtttgacccgcctagaccacaacagggcactcggtcagatttctgagagacttggtgtccaagtttctgacgttaagaatgctattatctggggtaatcactcgtccagtcagtatcctgatgttaaccatgccactgtgaagactcccagtggagagaagcctgttcgtgaacttgttcaagatgatgaatggctaaatggggagttcattgccactgtccagcagcgtggtgctgcaatcatcaaagcgaggaagctctccagtgctctctctgctgccagctcagcttgtgatcacatccgtgactgggttctgggaaccgctgagggaacatttgtttccatgggtgtgtactctgatggttcatacggtgtgcctgctggtcttatctactccttcccagtaacgtgcagtggtggtgaatggacaattgttcaagggctcccgatcgatgagttctcgaggaagaagatggatgcgaccgcccaggagctgtcagaggagaaggcgttggcctactcatgcctggcgtaaatccacattcgaagggcagctgctcctctggatgttttgaataaatgaaaccttccgctctttagaaactctcgtctccacccagaacagccgcacatcgcgatgcatgctccttttcgctggttttctaagtgtgtatgaatgaggcttgtagctccccttttgcctgatgatttacaggacagtacatttgctgcaagagtgaaacaatttgacacctgattagaagc

SEQ ID NO: 21705 - protein, 246 aa, Glycine max
MVGGFPRKEGMERKDVMTKNVSIYKAQASALEAHAAPNCKVLVVANPANTNALILKEFAPSIPEKNISCLTRLDHNRALGQISERLGVQVSDVKNAIIWGNHSSSQYPDVNHATVKTPSGEKPVRELVQDDEWLNGEFIATVQQRGAAIIKARKLSSALSAASSACDHIRDWVLGTAEGTFVSMGVYSDGSYGVPAGLIYSFPVTCSGGEWTIVQGLPIDEFSRKKMDATAQELSEEKALAYSCLA

SEQ ID NO: 21706 - protein, 236 aa, Glycine max
MERKDVMTKNVSIYKAQASALEAHAAPNCKVLVVANPANTNALILKEFAPSIPEKNISCLTRLDHNRALGQISERLGVQVSDVKNAIIWGNHSSSQYPDVNHATVKTPSGEKPVRELVQDDEWLNGEFIATVQQRGAAIIKARKLSSALSAASSACDHIRDWVLGTAEGTFVSMGVYSDGSYGVPAGLIYSFPVTCSGGEWTIVQGLPIDEFSRKKMDATAQELSEEKALAYSCLA

SEQ ID NO: 21707 - protein, 230 aa, Glycine max
MTKNVSIYKAQASALEAHAAPNCKVLVVANPANTNALILKEFAPSIPEKNISCLTRLDHNRALGQISERLGVQVSDVKNAIIWGNHSSSQYPDVNHATVKTPSGEKPVRELVQDDEWLNGEFIATVQQRGAAIIKARKLSSALSAASSACDHIRDWVLGTAEGTFVSMGVYSDGSYGVPAGLIYSFPVTCSGGEWTIVQGLPIDEFSRKKMDATAQELSEEKALAYSCLA

SEQ ID NO: 21708 - DNA, 1798 bp, Glycine max
atcttgttggtccattcgtgcggtaacggaaggagacaataagcgtctccatcgcttaaattgccgagaacttcattacccattatctgttacagttctacgctctcgctccaaaccccacttcagatttggtttactggaaggaaagtgcttgaaggacccaatctacacgagagatgcaatggcaataaacacacacatgttagcttcaatgtgttattattgctgccactgtgattaatgagtaagtcactgtgtcaaaggatatagagctgttttcttccagtgcatctttggtttgagatttatgtagttttctctgaaaagtgattactagtttccctcaaacaataatggaggcagcaaaggttctttcacactgcaaaactgccccttttggtttctctatcgtgagcaacaaagtatctctgagacctttcgacaaacattttcatgctgatgtacttgctaacagacccaagagcattagttttcaattgaattgttcctatggaaaccctttttcctctgtgctgaaacctgcaagaaaaagggctaattttttaccttctcccagatgctcaatttccagtagtgccagcactgaatctcaaaatccagtcctagagttctttagaaatgtgccatttgattcaataaaagctacacttctgcagttgactccaattgatgttgtgaagtggtctgggatattatgcatcatagctgcagccacaaaatggactatgaatatgcttttcagtcccttcttttggatgtattttagctggacgtggttgttctggccttggatggtggccatagggcttgcagtctatgggttatattgctttcggaaacatctgcacagtgaggcaaacatatttgagcaattggctattgttacatcagtttttacgtggctcactcttgttccacctggtcatttcaatggctaccttgaaggctggccttatgttttcttttttgtgtatcattatttctttttcttcaatgttagtgttagaaagcggttatatggagattattttgctcagccccatgacccaaagtgggacgtgaacttgccaatgtggtctcgcctattgttcagcacaggagtcatggttggccattggcttgcagcatttgaagggcctgagcttcacctcataccgggtgggtggagcaatcttggaatctgggctttaatcattacaactctgctaatgcagtataatgctacattgtatctcgctaagtattcagaaaatgtggtggagccaacttctgtagtgcaatttggaccttatcgttgggtccgtcatccaatatattcatcaacaatgcttttgtttgtaacatactgcattgcgcttcgagcacctctgagtctgctatttattgtggcagtatgcttgttgtattataagcagaaggcagagaaggaagaggatttgatggttgagacttttggccagagttacacagaatatgcaagcaaagttaagtacaagcttattccttttatctattagttgatctccagaagtttagtcagtcatcaaaatctgattgtactgtcaggtttaggcaaaagatagtgttaattctcaaaatccaagtgtatctctttgtttactctttactctgttatctttagtgtagccttaaattatggtatcatgtgcacttgtggtgattagatttttgaagattttggttttcaatgatgttttgtttcatagaacatgcaaaatttgactatataaatcttgtctatattaagctgtgtgcc

SEQ ID NO: 21709 - protein, 394 aa, Glycine max
MEAAKVLSHCKTAPFGFSIVSNKVSLRPFDKHFHADVLANRPKSISFQLNCSYGNPFSSVLKPARKRANFLPSPRCSISSSASTESQNPVLEFFRNVPFDSIKATLLQLTPIDVVKWSGILCIIAAATKWTMNMLFSPFFWMYFSWTWLFWPWMVAIGLAVYGLYCFRKHLHSEANIFEQLAIVTSVFTWLTLVPPGHFNGYLEGWPYVFFFVYHYFFFFNVSVRKRLYGDYFAQPHDPKWDVNLPMWSRLLFSTGVMVGHWLAAFEGPELHLIPGGWSNLGIWALIITTLLMQYNATLYLAKYSENVVEPTSVVQFGPYRWVRHPIYSSTMLLFVTYCIALRAPLSLLFIVAVCLLYYKQKAEKEEDLMVETFGQSYTEYASKVKYKLIPFIY

SEQ ID NO: 21710 - protein, 263 aa, Glycine max
MNMLFSPFFWMYFSWTWLFWPWMVAIGLAVYGLYCFRKHLHSEANIFEQLAIVTSVFTWLTLVPPGHFNGYLEGWPYVFFFVYHYFFFFNVSVRKRLYGDYFAQPHDPKWDVNLPMWSRLLFSTGVMVGHWLAAFEGPELHLIPGGWSNLGIWALIITTLLMQYNATLYLAKYSENVVEPTSVVQFGPYRWVRHPIYSSTMLLFVTYCIALRAPLSLLFIVAVCLLYYKQKAEKEEDLMVETFGQSYTEYASKVKYKLIPFIY

SEQ ID NO: 21711 - protein, 261 aa, Glycine max
MLFSPFFWMYFSWTWLFWPWMVAIGLAVYGLYCFRKHLHSEANIFEQLAIVTSVFTWLTLVPPGHFNGYLEGWPYVFFFVYHYFFFFNVSVRKRLYGDYFAQPHDPKWDVNLPMWSRLLFSTGVMVGHWLAAFEGPELHLIPGGWSNLGIWALIITTLLMQYNATLYLAKYSENVVEPTSVVQFGPYRWVRHPIYSSTMLLFVTYCIALRAPLSLLFIVAVCLLYYKQKAEKEEDLMVETFGQSYTEYASKVKYKLIPFIY

SEQ ID NO: 21712 - DNA, 1207 bp, Glycine max
acacaaacacaagcttccatcgggctttctcctcctcatcaaccttcttctactactagttgttcctagctagctggttgagtgagcttgctttcgggagcaagaaacgcatggcggtgtcctcggtgctggcgatcctgctcgacgcctcgtgtgcccttgcgtcggcgaccttcgacaaggagttcgacatcacctggggtgacggccgagggaagatcatgaacaatggccagctcctcacgctggggctggacaaggtctccggctccggattccagtccaagcacgagtacctctacggcaagatcgacatgcagctcaagctcgtccccggcaactccgccggcaccgtcaccgcatactacctgtcgtcgcaggggccgacgcacgacgagatcgactttgagttcctgggcaatgtcaccggcgagccgtacactctgcacaccaacgtgttcacgcaggggcaggggcagcgggagcagcagttccgcctctggttcgatcccaccaacgacttccacacctactccatcctctggaacccaaagcacatcatcttcatggtggacgacatgccgatcagggacttcaggaacctggagggaaaggggatcgccttccccaagaaccagccgatgcgcctctactccagcctctggaacgccgacgactgggccacgcaaggaggccgcgtcaagacggactggtcccacgcgccgttctctgcctcctaccgcggcttcaaggccgacgcgtgcgtggtgaccgcggccggccggccgcgctgcggcgccagcgtgggcacggaggtcgcccccggcacgggcgcggcgggcgagtggtacaaccaggagctcgacctgacgcggcagcagcggatgcggtgggtgcagagcaactacatgatctacaactactgcaccgaccccaagcgcttcgcccagggcgttcccgccgagtgctccatgtagtccatgcctgtcgatcgccggagaaagacggccggagatagggaagatggggtgtctgtataatccgatatcaataaggattggtgactgggagatgtgtaaagtagccggtggtagattcttctttggcatttacgcccagttcttctaatcgtgatcacgatcatttcgtgtgtaatctattgcctcgtcgtacatacgttcatcacctgtatgctgctctcggctct

SEQ ID NO: 21713 - protein, 288 aa, Glycine max
MAVSSVLAILLDASCALASATFDKEFDITWGDGRGKIMNNGQLLTLGLDKVSGSGFQSKHEYLYGKIDMQLKLVPGNSAGTVTAYYLSSQGPTHDEIDFEFLGNVTGEPYTLHTNVFTQGQGQREQQFRLWFDPTNDFHTYSILWNPKHIIFMVDDMPIRDFRNLEGKGIAFPKNQPMRLYSSLWNADDWATQGGRVKTDWSHAPFSASYRGFKADACVVTAAGRPRCGASVGTEVAPGTGAAGEWYNQELDLTRQQRMRWVQSNYMIYNYCTDPKRFAQGVPAECSM

SEQ ID NO: 21714 - protein, 251 aa, Glycine max
MNNGQLLTLGLDKVSGSGFQSKHEYLYGKIDMQLKLVPGNSAGTVTAYYLSSQGPTHDEIDFEFLGNVTGEPYTLHTNVFTQGQGQREQQFRLWFDPTNDFHTYSILWNPKHIIFMVDDMPIRDFRNLEGKGIAFPKNQPMRLYSSLWNADDWATQGGRVKTDWSHAPFSASYRGFKADACVVTAAGRPRCGASVGTEVAPGTGAAGEWYNQELDLTRQQRMRWVQSNYMIYNYCTDPKRFAQGVPAECSM

SEQ ID NO: 21715 - protein, 220 aa, Glycine max
MQLKLVPGNSAGTVTAYYLSSQGPTHDEIDFEFLGNVTGEPYTLHTNVFTQGQGQREQQFRLWFDPTNDFHTYSILWNPKHIIFMVDDMPIRDFRNLEGKGIAFPKNQPMRLYSSLWNADDWATQGGRVKTDWSHAPFSASYRGFKADACVVTAAGRPRCGASVGTEVAPGTGAAGEWYNQELDLTRQQRMRWVQSNYMIYNYCTDPKRFAQGVPAECSM

SEQ ID NO: 21716 - DNA, 1283 bp, Glycine max
gttgtgtgtaagtgtgaagagaagagaatggtagtaggattgaatgtgcctcagccatttctgtcaccagtttgcaagacggcaccttacccacttgatctcatcgccaccgccgcgtccctccacttcggccaccttctccgccgccgcgcgacccaccatctccgccttggggttcttcttcactcctgtttcaagaaactcgctcctttaactcacatttttagattgaacgataagtggtgtcaaagatgctttcaactcaatgggttgaactatcttcaactgtcagccggtgatttgacttcctcatggtcaactagtttctctttctttaatgggggaggagatggaggccgccgctatggaaaggctgggatgtccaactccaagatgtctggaaaagatccatttaatggaaggaaatggacagaaattctccttgctgccaatgttttattttatattgcacaacttgcaacccaaggcaagctattattgtggggagcaaagataaatagtctaattgacaaaggacaactttggagacttgccacgtcttcctttttgcatgccaacatcggacaccttttggtaaattgttattccttgaactcagttggtcctactgtggagagcttcagtggccctcggagatttcttgcagtttactttatctctgcaattgcaagttctgctacgagttattggttctgcagaatgcctgctgtaggtgcatcaggagcaatttttggactagttggatcagttgccgtatttgtattaaggcacaaagaccttgtgggaggtggtaaaaaagatttacaacacatagcccaagtaattgccctcaatatggttattgggctattatccactgggattgacaactggggacatttaggagggttggttggtggagttgctgcatcatggtttattggaccggcatggaaacatgaatccacatcaagtgatggaagaagacttttcattgacactgcaccaatgtataaactcttcaagattaaaagagtacctaagcaatggaaatagaaacatttcattatgtatggaatggaactcataactaatcattgctcgttgtttattggtaaaatgattcactgctgtgagcttctcttaaaatacttaatattgtggggttgtagtacaagtacctgacacgtctgaattattttgtatactttaataaccttcacactgggacattgtatttataaattgtatttgtgtaattggtatccttcattttccctctt

SEQ ID NO: 21717 - protein, 351 aa, Glycine max
VVCKCEEKRMVVGLNVPQPFLSPVCKTAPYPLDLIATAASLHFGHLLRRRATHHLRLGVLLHSCFKKLAPLTHIFRLNDKWCQRCFQLNGLNYLQLSAGDLTSSWSTSFSFFNGGGDGGRRYGKAGMSNSKMSGKDPFNGRKWTEILLAANVLFYIAQLATQGKLLLWGAKINSLIDKGQLWRLATSSFLHANIGHLLVNCYSLNSVGPTVESFSGPRRFLAVYFISAIASSATSYWFCRMPAVGASGAIFGLVGSVAVFVLRHKDLVGGGKKDLQHIAQVIALNMVIGLLSTGIDNWGHLGGLVGGVAASWFIGPAWKHESTSSDGRRLFIDTAPMYKLFKIKRVPKQWK

SEQ ID NO: 21718 - protein, 342 aa, Glycine max
MVVGLNVPQPFLSPVCKTAPYPLDLIATAASLHFGHLLRRRATHHLRLGVLLHSCFKKLAPLTHIFRLNDKWCQRCFQLNGLNYLQLSAGDLTSSWSTSFSFFNGGGDGGRRYGKAGMSNSKMSGKDPFNGRKWTEILLAANVLFYIAQLATQGKLLLWGAKINSLIDKGQLWRLATSSFLHANIGHLLVNCYSLNSVGPTVESFSGPRRFLAVYFISAIASSATSYWFCRMPAVGASGAIFGLVGSVAVFVLRHKDLVGGGKKDLQHIAQVIALNMVIGLLSTGIDNWGHLGGLVGGVAASWFIGPAWKHESTSSDGRRLFIDTAPMYKLFKIKRVPKQWK

SEQ ID NO: 21719 - protein, 225 aa, Glycine max
MSNSKMSGKDPFNGRKWTEILLAANVLFYIAQLATQGKLLLWGAKINSLIDKGQLWRLATSSFLHANIGHLLVNCYSLNSVGPTVESFSGPRRFLAVYFISAIASSATSYWFCRMPAVGASGAIFGLVGSVAVFVLRHKDLVGGGKKDLQHIAQVIALNMVIGLLSTGIDNWGHLGGLVGGVAASWFIGPAWKHESTSSDGRRLFIDTAPMYKLFKIKRVPKQWK

SEQ ID NO: 21720 - DNA, 1459 bp, Glycine max
caaaatattctccaatgtccggcctgacgcctttcacctggtggccaccccttcggtaaaaagctcttcggccaacacaacctcatctacatgactggccaagtccacaaagatctccgccgtcggatcgcccccaactttacacctaaagccctctccacctacaccgcgctccagcagattatcatcctcaaccacctcaagtcatggctcaatcagtcccaagccccagactcccattccattcctctccgcatcctggctcgtgacatgaacctccagacatcccagaccgtcttcgtgggcccctacttgggccccaaagcccgagagcgtttcgagagggattactttctattcaacgtcggcctaatgaagctgccgtttgacttccccggcaccgcctttcgaaacgccaggctcgccgtggaccgcctcattgcagcactgggcacgtgcaccgagatgagcaaagcacggatgaaggcagggggagagccttcgtgccttgtcgattactggatgcaggacacgctcagggaaatcgaggaggccaagctcgccggagagatgccgccgccgttctccactgacgtcgagatcggaggttatctctttgacttcctcttcgccgcccaggacgcgtccacgtcgtcgctgctttgggcggtggcgctacttgactcgcacccggaggtgctcgccaaggtgagaaccgaagtcgctggaatctggtcgccggagtccgacgagcttattactgccgacatgctgagggagatgaagtatactctggcggtggcgcgtgaggtgttgaggttccggccaccggcgacgctggtgccgcacatcgcggcggagagctttccgttgacggaatcgtacacgatacccaaaggagcgatagtgttcccgtcggtcttcgaatcgtcgtttcaggggttcactgaaccggaccgcttcgaccctaaccggttctccgaggaaagacaagaggaccaaatatttaaaagaaactttctggcgttcggggctgggccccatcagtgtgttggtcaaaggtacgcatttaatcatcttgttctcttcatcgccttgttcacgacgttgatcgatttcaagagggacgaatccgacggctgtgatgatatcgtttacgtgcccaccatttgccccaaagacgactgcagagtatttctgtccaaacggtgcgcacggtatccttcttttccttcggtggaggacttcgtcaaatgaaatgcaatactattgttttaaaaatgttttaataattatgaaaattaaaatttatcccagtgaaatgtaataggtggagatgttttgtttacattttagttattgaaattttcataataaattaaatttgaagttgtaatgttatgctgtgttgtttcacgacaatgtgttcgtgcttgttatttgatgattttatttgtct

SEQ ID NO: 21721 - protein, 388 aa, Glycine max
MTGQVHKDLRRRIAPNFTPKALSTYTALQQIIILNHLKSWLNQSQAPDSHSIPLRILARDMNLQTSQTVFVGPYLGPKARERFERDYFLFNVGLMKLPFDFPGTAFRNARLAVDRLIAALGTCTEMSKARMKAGGEPSCLVDYWMQDTLREIEEAKLAGEMPPPFSTDVEIGGYLFDFLFAAQDASTSSLLWAVALLDSHPEVLAKVRTEVAGIWSPESDELITADMLREMKYTLAVAREVLRFRPPATLVPHIAAESFPLTESYTIPKGAIVFPSVFESSFQGFTEPDRFDPNRFSEERQEDQIFKRNFLAFGAGPHQCVGQRYAFNHLVLFIALFTTLIDFKRDESDGCDDIVYVPTICPKDDCRVFLSKRCARYPSFPSVEDFVK

SEQ ID NO: 21722 - protein, 328 aa, Glycine max
MNLQTSQTVFVGPYLGPKARERFERDYFLFNVGLMKLPFDFPGTAFRNARLAVDRLIAALGTCTEMSKARMKAGGEPSCLVDYWMQDTLREIEEAKLAGEMPPPFSTDVEIGGYLFDFLFAAQDASTSSLLWAVALLDSHPEVLAKVRTEVAGIWSPESDELITADMLREMKYTLAVAREVLRFRPPATLVPHIAAESFPLTESYTIPKGAIVFPSVFESSFQGFTEPDRFDPNRFSEERQEDQIFKRNFLAFGAGPHQCVGQRYAFNHLVLFIALFTTLIDFKRDESDGCDDIVYVPTICPKDDCRVFLSKRCARYPSFPSVEDFVK

SEQ ID NO: 21723 - protein, 294 aa, Glycine max
MKLPFDFPGTAFRNARLAVDRLIAALGTCTEMSKARMKAGGEPSCLVDYWMQDTLREIEEAKLAGEMPPPFSTDVEIGGYLFDFLFAAQDASTSSLLWAVALLDSHPEVLAKVRTEVAGIWSPESDELITADMLREMKYTLAVAREVLRFRPPATLVPHIAAESFPLTESYTIPKGAIVFPSVFESSFQGFTEPDRFDPNRFSEERQEDQIFKRNFLAFGAGPHQCVGQRYAFNHLVLFIALFTTLIDFKRDESDGCDDIVYVPTICPKDDCRVFLSKRCARYPSFPSVEDFVK

SEQ ID NO: 21724 - DNA, 1178 bp, Glycine max
ctcaagctcaaatcccttcccctcctcgcgtgcccccccttatccccttcaccatggccacctccgccatgacactcgccatggtcgcggccacggacgcctccctcttccaccccacgttccccgcccaacacaagctcgccccggcatccgcctccctcccactcattttctctcgcgcgccgctcctccgctccacccgcccccgcgtcccccttacgcccctcgtcgcctcctccgacgccgccgaggcgggcctcgactgggccgacgcggaggaagccgaagagacggtgacggaggaggagcccgcggtggcggcctccggtggggacgcggggtacgcagccgagccgcccgaggaggccaaggtgtacgtcgggaacctgccgtatgatgtcgacagcgagcggctcgctcagctcttcgaccaggccggcgtcgtcgaggtcgccgaggtcatttacaacagagagtcaggccagagccgtggatttggatttgttaccatgagtactattgaggaagctgacaaagccatcgagacgttcaatcgctacgacatcagtggaaggcttctgaacgtaaacagggcagctcaaaggggctcccgtgttgagagacctcctcgacagtttgcatcttctttcagggcttatgttggtaacctgccatggcaagcggaagactctaggttggtgcaattgttcagcgagcatggggaagtagttaacgctacagttgtgtacgacagagaaactggtcgttcacgaggatttggttttgtaactatggcttcaaaggaggatcttgacagtgctatttcagcgcttgatggacaggagatggatggccgcccactccgagtgaacgttgccgcggagcgaccacagcgagggttctgatgcagaggagagcgggtgcttcttttggacacacgagagcaacactgctgaaatgttactgcagaagactgaagcatgtcaccacttaaaaatcctgcactagcctcctgatgctgggctatctcctcccatcccatgttcttttttcatgcttccgtttgctgctgatgtcatcatgttaatttcttgtcaacaccatgagttcaacttttcaagtaggctactgtaatgatgtcttagtgttctcatgataatcgaagaaggttttgttgg

SEQ ID NO: 21725 - protein, 300 aa, Glycine max
QAQIPSPPRVPPLIPFTMATSAMTLAMVAATDASLFHPTFPAQHKLAPASASLPLIFSRAPLLRSTRPRVPLTPLVASSDAAEAGLDWADAEEAEETVTEEEPAVAASGGDAGYAAEPPEEAKVYVGNLPYDVDSERLAQLFDQAGVVEVAEVIYNRESGQSRGFGFVTMSTIEEADKAIETFNRYDISGRLLNVNRAAQRGSRVERPPRQFASSFRAYVGNLPWQAEDSRLVQLFSEHGEVVNATVVYDRETGRSRGFGFVTMASKEDLDSAISALDGQEMDGRPLRVNVAAERPQRGF

SEQ ID NO: 21726 - protein, 283 aa, Glycine max
MATSAMTLAMVAATDASLFHPTFPAQHKLAPASASLPLIFSRAPLLRSTRPRVPLTPLVASSDAAEAGLDWADAEEAEETVTEEEPAVAASGGDAGYAAEPPEEAKVYVGNLPYDVDSERLAQLFDQAGVVEVAEVIYNRESGQSRGFGFVTMSTIEEADKAIETFNRYDISGRLLNVNRAAQRGSRVERPPRQFASSFRAYVGNLPWQAEDSRLVQLFSEHGEVVNATVVYDRETGRSRGFGFVTMASKEDLDSAISALDGQEMDGRPLRVNVAAERPQRGF

SEQ ID NO: 21727 - protein, 278 aa, Glycine max
MTLAMVAATDASLFHPTFPAQHKLAPASASLPLIFSRAPLLRSTRPRVPLTPLVASSDAAEAGLDWADAEEAEETVTEEEPAVAASGGDAGYAAEPPEEAKVYVGNLPYDVDSERLAQLFDQAGVVEVAEVIYNRESGQSRGFGFVTMSTIEEADKAIETFNRYDISGRLLNVNRAAQRGSRVERPPRQFASSFRAYVGNLPWQAEDSRLVQLFSEHGEVVNATVVYDRETGRSRGFGFVTMASKEDLDSAISALDGQEMDGRPLRVNVAAERPQRGF

SEQ ID NO: 21728 - DNA, 1348 bp, Glycine max
aagatcccattctcgaagtcaccggagcaggagttctcctagagcaccatcaggaaaaattatcagcaaaagccctgtaagagtattgagaaagagtataagccgcagtccagttagatcacctgcaagaagtttaagccgaagctctggcagggttccttcaaagaaaagcatcagccgaagcccggtcagagcacctagtagaagcaatcgccgcagtttttctaggagtcctagccctgttcataggacaaggactcctcgtgggaggagtgtgtcaaggagtgtatcacctgatgcttcaccaaagcgtatcagaaggggaagaggtttcagtgaaagatactcttatgcaagaaggtatagaaccccctctcggtctcctgtgaggtcataccgctacaatggaagaaatgacctggacagatattctacttacagaaggttttcccctaggcgtttcaggagcccaccaccacgtggaagaactcccccaaggttttgttttcctggcatcataatatttgctttttataagttatattactgtatcttattttatttgtatctttcttaattcttatcatgaattttttcattggagatttttaatgccattttagttctctgtcattgtgttctctataatgttagcagcatgattatttgaaaacctgtatgtaggtatcgaagcaggaggagcaggacgccatctgtttcacgcagtccacgatatcgagcccgacgatatagccgaagtaggagcccggttcgcagtcgttccctagttgatagatcccgcccctctcgtgtggagaggcatgcatcttcttctcggagcaggagtccatcaaaatcccggtctaggtccaggtcatccgtggagtctccgccaagagcaagtagagacagcaggtccaggtcatcgtccagaagccctgatggaaagcaaggcttggtctcatatggcgatggttctccatactaacgtgaaaggtgaaatatgtggtgcggagggctttgggttactgtaatcttcaatgagctgcaggcttcaatttttgaacttcaccacctgcattgcttgatggaattcgtgaatgacaatcgttttcccccctttatagacagcaatggcatgttgaaaacttgaaatattctagtcctagaataagttaagacaatagacggtacttatgacattaggatgcagccttggttgtgaagttgttgcggtatttgttggaatcggagactcggatgctgttgctctacttatgcttggttggttacgaccagcatttgagtttgaatttataaaatcaggtcgcttcgctagaccattttc

SEQ ID NO: 21729 - protein, 191 aa, Glycine max
RSHSRSHRSRSSPRAPSGKIISKSPVRVLRKSISRSPVRSPARSLSRSSGRVPSKKSISRSPVRAPSRSNRRSFSRSPSPVHRTRTPRGRSVSRSVSPDASPKRIRRGRGFSERYSYARRYRTPSRSPVRSYRYNGRNDLDRYSTYRRFSPRRFRSPPPRGRTPPRFCFPGIIIFAFYKLYYCILFYLYLS

SEQ ID NO: 21730 - DNA, 875 bp, Glycine max
acagcgtcaccggcgaactcaaagcaatggacaccgctcccgctccccttaagccgtccttgtccaagaagccctcgccgtcgttccgcctccgcaacggcagcctcaatgccctgcgcctgcgccgcgttttcgacctcttcgaccgcaacggcgacggcgagatcaccctcgacgagatggcggccgcgctcgacaccctcggcctcggcgccgaccgcgccagcctggaggccaccgtcggcgcctacatccctgctggcgccgccgggctcggcttcgaggacttcgagggcctccaccgcgctctcggcgacgcgctctttggccccatcaccgaggaggagcccggcaaggaaggcgagggcgaggacgaggacatgaaggaggcgttccgggtcttcgacgagaacggcgacgggttcatctcggcgtccgagctgcaggccgtgctcaagaagctgggcctggcggaggcgcggaacctggcggcggtgcaggagatgatctgcaacgtcgaccgcgaccgcgacggccaggtcgacttcggcgagttcaagtgcatgatgcaggggatcaccgtgtggggagcttgaaggcggcgcgcccggcctcttcctctcgtccctctcctgtttctcatatgagtatgtatcattcctagacatttttgtttagggtgttttttttttcatgatcgagctttccaccgttgactcgatctggcggtaggtcttcaggattttgcttgacaaccatggtcacatcacagcaagcagtaattagttccttcatttattttacaagttcttgttaattcggaaactgtactatcaaagaccttgaccagcctcccctaaaaatattctctcctc

SEQ ID NO: 21731 - protein, 197 aa, Glycine max
SVTGELKAMDTAPAPLKPSLSKKPSPSFRLRNGSLNALRLRRVFDLFDRNGDGEITLDEMAAALDTLGLGADRASLEATVGAYIPAGAAGLGFEDFEGLHRALGDALFGPITEEEPGKEGEGEDEDMKEAFRVFDENGDGFISASELQAVLKKLGLAEARNLAAVQEMICNVDRDRDGQVDFGEFKCMMQGITVWGA

SEQ ID NO: 21732 - protein, 189 aa, Glycine max
MDTAPAPLKPSLSKKPSPSFRLRNGSLNALRLRRVFDLFDRNGDGEITLDEMAAALDTLGLGADRASLEATVGAYIPAGAAGLGFEDFEGLHRALGDALFGPITEEEPGKEGEGEDEDMKEAFRVFDENGDGFISASELQAVLKKLGLAEARNLAAVQEMICNVDRDRDGQVDFGEFKCMMQGITVWGA

SEQ ID NO: 21733 - protein, 138 aa, Glycine max
MAAALDTLGLGADRASLEATVGAYIPAGAAGLGFEDFEGLHRALGDALFGPITEEEPGKEGEGEDEDMKEAFRVFDENGDGFISASELQAVLKKLGLAEARNLAAVQEMICNVDRDRDGQVDFGEFKCMMQGITVWGA

SEQ ID NO: 21734 - DNA, 466 bp, Glycine max
acgaatagttgatcaaaacatcataattctgaaaaagagttgtttactaattcaagaatgggggagaagaaaattttgtctcttgtcatgtttgtcatcatggcttatggtttggcagtaacaccattcactgcatgtgatcaatttcatattcctaaaacttgctatgggtatgaagcattactttctatctgtgggacttatttcgctgttatcaagtacaatccaagttccttttgttgtgatgcagcaactattgcgtttcctaaagccagtcgtagcagtgaaagtagaaggggtttttgtaattgtttgcgggttattggaccacaattagattttgtgaaatcaaagcttacaagccttcctggtgcttgtgggattaaaccttctttttctatgcagtcatgtatatatggagcctaatatccctctcccagaccaaaaataaatttgatttatgaat

SEQ ID NO: 21735 - protein, 122 aa, Glycine max
MGEKKILSLVMFVIMAYGLAVTPFTACDQFHIPKTCYGYEALLSICGTYFAVIKYNPSSFCCDAATIAFPKASRSSESRRGFCNCLRVIGPQLDFVKSKLTSLPGACGIKPSFSMQSCIYGA

SEQ ID NO: 21736 - protein, 112 aa, Glycine max
MFVIMAYGLAVTPFTACDQFHIPKTCYGYEALLSICGTYFAVIKYNPSSFCCDAATIAFPKASRSSESRRGFCNCLRVIGPQLDFVKSKLTSLPGACGIKPSFSMQSCIYGA

SEQ ID NO: 21737 - protein, 108 aa, Glycine max
MAYGLAVTPFTACDQFHIPKTCYGYEALLSICGTYFAVIKYNPSSFCCDAATIAFPKASRSSESRRGFCNCLRVIGPQLDFVKSKLTSLPGACGIKPSFSMQSCIYGA

SEQ ID NO: 21738 - DNA, 1098 bp, Glycine max
aaaacaaaatctgaaagccccaatgagatagtagcaatagataggccaagataagaaccccaaccacttgaagcccatataaataaacccccacacaacttcactgaatcactcacaactccataacacaaggcagaaagcaagctcatcctagagttttaaaaatggcagcagcctcctccatggctctctcttccccatccttggctggcaaggccgtgaagctgggcccatcagcccccgaagtcgggagggtcagcatgaggaagaccgtcaccaagcaggcctcctccggaagcccatggtacggcccagaccgcgtcaagtacttgggcccattctctggcgagcccccgtcctacctcactggcgagttcccaggtgactacggctgggacactgctgggctttcggccgacccagaaaccttcgccagaaaccgtgagctcgaagtgatccactccaggtgggccatgctcggggccttgggctgcgtcttccccgaactattgtcccgcaacggggtcaagtttggagaagctgtgtggttcaaggccgggtcccagatcttcagcgagggtgggctggactacttgggcaacccaagccttgtccacgcccagagcatcctcgccatctgggccacccaagttatcctaatgggtgctgttgagggttatcgtattgctggtgggcccctcggtgaggtcactgacccaatctaccctggtggcagctttgacccattgggccttgctgatgacccagaggcttttgctgagcttaaggtgaaggaactcaagaacgggagattggccatgttctctatgtttgggttctttgttcaggccattgtcaccggtaagggtccattggagaaccttgctgatcaccttgcggacccagtcaacaacaatgcctgggcctacgccaccaacttcgtccccggcaagtgagcatgaaagaaaaggatgacttgtggacttttgagagtttttagatttgtgtttggtgaagtatatgttattgcaatgtacttcagataatgtgaattatcttgtgtatccgaatccaacttaatgttacttgctttttacg

SEQ ID NO: 21739 - protein, 263 aa, Glycine max
MAAASSMALSSPSLAGKAVKLGPSAPEVGRVSMRKTVTKQASSGSPWYGPDRVKYLGPFSGEPPSYLTGEFPGDYGWDTAGLSADPETFARNRELEVIHSRWAMLGALGCVFPELLSRNGVKFGEAVWFKAGSQIFSEGGLDYLGNPSLVHAQSILAIWATQVILMGAVEGYRIAGGPLGEVTDPIYPGGSFDPLGLADDPEAFAELKVKELKNGRLAMFSMFGFFVQAIVTGKGPLENLADHLADPVNNNAWAYATNFVPGK

SEQ ID NO: 21740 - protein, 257 aa, Glycine max
MALSSPSLAGKAVKLGPSAPEVGRVSMRKTVTKQASSGSPWYGPDRVKYLGPFSGEPPSYLTGEFPGDYGWDTAGLSADPETFARNRELEVIHSRWAMLGALGCVFPELLSRNGVKFGEAVWFKAGSQIFSEGGLDYLGNPSLVHAQSILAIWATQVILMGAVEGYRIAGGPLGEVTDPIYPGGSFDPLGLADDPEAFAELKVKELKNGRLAMFSMFGFFVQAIVTGKGPLENLADHLADPVNNNAWAYATNFVPGK

SEQ ID NO: 21741 - protein, 231 aa, Glycine max
MRKTVTKQASSGSPWYGPDRVKYLGPFSGEPPSYLTGEFPGDYGWDTAGLSADPETFARNRELEVIHSRWAMLGALGCVFPELLSRNGVKFGEAVWFKAGSQIFSEGGLDYLGNPSLVHAQSILAIWATQVILMGAVEGYRIAGGPLGEVTDPIYPGGSFDPLGLADDPEAFAELKVKELKNGRLAMFSMFGFFVQAIVTGKGPLENLADHLADPVNNNAWAYATNFVPGK

SEQ ID NO: 21742 - DNA, 957 bp, Glycine max
ctgcttctcattcgtcccttcctctccgctccgtccctttctctccgctgcgtcccttttcgccagatccgacgcccttccggcttgtcgttgcctcgccgccgtgacaaagttgggagaagggggttggccgtcgtcttgcggttgggccggagcagcggtgggctggacgccgcttcctgctgtcttcgagcgatgggagagggttagggtctgtcgtttgccgttcgattggtgactgttgcgggttggcagcgcgccgtgtagctgcgagacaacttccttgttgatctgccgtcctgctgcagtgttatatactgtcgaattccaaaaacgaggtctgccacacgcgcatatcctcatctggcgtaaaggagacaaagatggtgatcactgccctagctgctcttgtcccaggaaacaagaagttgactattcgtgtgtatgtctcaaggctgtggcagcatcgtggaactactgataatggtcctatcattcatactgacatggtgcttgtggatgctgagggttctcatatctatgctgagatctctaaagactgggtaagcaagtttatggagaagctcagggaaggctgtgcttatgagatttgtcagtttctggtgttcccaaataagcgttactttaaggccgtcgatgcagcaaacatgatctgtttcaatagattcactacggtcaatcctaataccgacctggaggtcgcgttcccgttttgcactatgcacctgtccaaccttagtgtagattatttgtaatcagtactatgccccagtatacctgcataagactactaccctttgctattgtaattgtaatcagtactatctagatggatgatagcaggcaatgtatacctgcataagactactaccccttagctctctgatttatgaacctgtccggtgtttagtttggtattacgtatgtacctcttcc

SEQ ID NO: 21743 - protein, 130 aa, Glycine max
MVITALAALVPGNKKLTIRVYVSRLWQHRGTTDNGPIIHTDMVLVDAEGSHIYAEISKDWVSKFMEKLREGCAYEICQFLVFPNKRYFKAVDAANMICFNRFTTVNPNTDLEVAFPFCTMHLSNLSVDYL

SEQ ID NO: 21744 - protein, 89 aa, Glycine max
MVLVDAEGSHIYAEISKDWVSKFMEKLREGCAYEICQFLVFPNKRYFKAVDAANMICFNRFTTVNPNTDLEVAFPFCTMHLSNLSVDYL

SEQ ID NO: 21745 - protein, 78 aa, Glycine max
CFSFVPSSPLRPFLSAASLFARSDALPACRCLAAVTKLGEGGWPSSCGWAGAAVGWTPLPAVFERWERVRVCRLPFDW

SEQ ID NO: 21746 - DNA, 1416 bp, Glycine max
aggttaggttacttagcttaaggaggggagaataccaagaagctccgcttcctttttcaagtgcaattcttggtgatttccaatttttttcttgagtaggcaaaaaattgaaaaaaaaaaactatagtttcatgttaatgggtatccatcaatcatgcagaaattcataaacaaatgattgtgaaaaagatattttgttttacaaacttaggttattctttcttgttttcagtaatattcttctgtggttgctttattttctggccactttccacaagcatagattctcatagagagtccagagagagccctctctcctagctgtgcagcagaggaatggatgattgtgctctgctctgctttgattctctctgctcataaagaacctcttcatactcattgcagttgcagtacgtggggggtgctttcaacactttcttcaatcagcaaaatgagtcatgcacattctcatatgggctctggtagtagaaccactcgaagagcttttgagtttgggaagacacatgtagtgaggccaaaaggaaaacaccaagccactatagtttggctgcatggtcttggtgataatggtttgagctcatctcagctcctggaatcccttccacttccaaatataaaatggatttgcccaactgctcctacccgtcctgtggcgatactggtgggttttccctgcactgcatggtttgatgtgggagaactttcagaagatggtccagatgattgggagggtttagatgcctcagcagcacacattgctaacttgttgtccacagagccagctgatgtgaaagttggtattggaggcttcagcatgggtgcagcaatagctctgtactcttcaacttgttttgccatgggaaggtatggaaatggcattccataccctctcaacttaagaacagtggttggactaagtggttggcttcccggatcaaggagcttaaggaacaagatagaagtgtcacatgaagcaagaaggcgagcagcttcattacccattttgctgtgccatggaatcagtgatgatgtagtcctttgcaaatacggagaaaaatctgctcaatccttatgttcagcagggtttcgatatgttgcattcaaatcttatgatgggcttggtcattacacagttcctagagaaatggatgaggtttgcacttggcttagttcaaggctgggacttgaaggtatataggaggatttattttcttggtccctttttgtcatgttcctcgggcaataaagatctgcatatgttttttaagaattttcctagggactggattagttgtattattgaagagatttttagttattattattattattctaacatagcacggaccttgacctccttatttctcaatttcaaagaagatatggttaaaaaat

SEQ ID NO: 21747 - protein, 292 aa, Glycine max
MIVLCSALILSAHKEPLHTHCSCSTWGVLSTLSSISKMSHAHSHMGSGSRTTRRAFEFGKTHVVRPKGKHQATIVWLHGLGDNGLSSSQLLESLPLPNIKWICPTAPTRPVAILVGFPCTAWFDVGELSEDGPDDWEGLDASAAHIANLLSTEPADVKVGIGGFSMGAAIALYSSTCFAMGRYGNGIPYPLNLRTVVGLSGWLPGSRSLRNKIEVSHEARRRAASLPILLCHGISDDVVLCKYGEKSAQSLCSAGFRYVAFKSYDGLGHYTVPREMDEVCTWLSSRLGLEGI

SEQ ID NO: 21748 - protein, 255 aa, Glycine max
MSHAHSHMGSGSRTTRRAFEFGKTHVVRPKGKHQATIVWLHGLGDNGLSSSQLLESLPLPNIKWICPTAPTRPVAILVGFPCTAWFDVGELSEDGPDDWEGLDASAAHIANLLSTEPADVKVGIGGFSMGAAIALYSSTCFAMGRYGNGIPYPLNLRTVVGLSGWLPGSRSLRNKIEVSHEARRRAASLPILLCHGISDDVVLCKYGEKSAQSLCSAGFRYVAFKSYDGLGHYTVPREMDEVCTWLSSRLGLEGI

SEQ ID NO: 21749 - protein, 248 aa, Glycine max
MGSGSRTTRRAFEFGKTHVVRPKGKHQATIVWLHGLGDNGLSSSQLLESLPLPNIKWICPTAPTRPVAILVGFPCTAWFDVGELSEDGPDDWEGLDASAAHIANLLSTEPADVKVGIGGFSMGAAIALYSSTCFAMGRYGNGIPYPLNLRTVVGLSGWLPGSRSLRNKIEVSHEARRRAASLPILLCHGISDDVVLCKYGEKSAQSLCSAGFRYVAFKSYDGLGHYTVPREMDEVCTWLSSRLGLEGI

SEQ ID NO: 21750 - DNA, 1361 bp, Glycine max
gaggaaatccctaataacccccggtcgcctttccacggcgaaaggtatcccggcggcgatggcggcggctgcggcaaggtccggatcccggcgcttgttctccatatccgccctggtgccaccgaagccaccgagccctcccccgaaggcagatcccttcgccagcctctttgttcccgggttaagcaagcgaacagtagctgatggacttaggggagcttttgcaaagtctggtgaagtcgtgcatggttctcttttgacaaaccttccagcatcatctgtaaaaaaatcaaggtggtatatgatcaatgcaaaccgttcaggtcctttgacagtgcgtaaagaataccgcaaagtacttccttctttcataaggccatctgcatcttactccacacaagcttcagaaaaaagaccaaaacaggagagaacagacttgacgactgttgaagatccctttaatgcgcctacctacaatatacctgagaagccagtgacatttgtcgagggcgcctcttacagtgttgtaatacttgctgggcttggagttgctgcattggctggatacgctgttttcaaagagcttatatttgaaccaaaagagtacaagatttttgggaaagctctagcaagagttcagagtgatagccaggttacagccaaaattggttaccctataactggttatggtacggaatccagaaaccgtgcagctcggcagcgcatccaaaacagggtttggacagatgaggatggtgttgaacatgtggaggtaggctttcatatccgagggccgcatggagctggaaaggtgtttgcggagatgttcaaagacagctccgacaggacatggaagttcacgtttcttctcgtcgagattacgtcaccgcgacccgcacaaatcatgttagaatcttacctaccagcatagggatgcaagagacaacatcagccagcagcggcacatctatgcgacacttcattttacatcctatctccaatggcctgcatctgatgttaaatacccgtcctcggattaaagaagttgtgaattttgaactttcccgaaagcataagtaggaggaagatgaaccatcagagctgctgaccatctctagtatcttagacatggtgtaccgtgcaaggaccttgatgttgttgctttgtttagctgaaaggcgcgcaggcacatgtatacaagccatctttcctgatgctcctcaaacaacatggaacggagcgagtgatccttcatctatcgagttgtggtctcgtttcaggcagttttaatgatgcctatggatttcatgcaaacctccaatgatgtccaaatagcaataatatctggttacattacggcc

SEQ ID NO: 21751 - protein, 309 aa, Glycine max
RKSLITPGRLSTAKGIPAAMAAAAARSGSRRLFSISALVPPKPPSPPPKADPFASLFVPGLSKRTVADGLRGAFAKSGEVVHGSLLTNLPASSVKKSRWYMINANRSGPLTVRKEYRKVLPSFIRPSASYSTQASEKRPKQERTDLTTVEDPFNAPTYNIPEKPVTFVEGASYSVVILAGLGVAALAGYAVFKELIFEPKEYKIFGKALARVQSDSQVTAKIGYPITGYGTESRNRAARQRIQNRVWTDEDGVEHVEVGFHIRGPHGAGKVFAEMFKDSSDRTWKFTFLLVEITSPRPAQIMLESYLPA

SEQ ID NO: 21752 - protein, 290 aa, Glycine max
MAAAAARSGSRRLFSISALVPPKPPSPPPKADPFASLFVPGLSKRTVADGLRGAFAKSGEVVHGSLLTNLPASSVKKSRWYMINANRSGPLTVRKEYRKVLPSFIRPSASYSTQASEKRPKQERTDLTTVEDPFNAPTYNIPEKPVTFVEGASYSVVILAGLGVAALAGYAVFKELIFEPKEYKIFGKALARVQSDSQVTAKIGYPITGYGTESRNRAARQRIQNRVWTDEDGVEHVEVGFHIRGPHGAGKVFAEMFKDSSDRTWKFTFLLVEITSPRPAQIMLESYLPA

SEQ ID NO: 21753 - protein, 209 aa, Glycine max
MINANRSGPLTVRKEYRKVLPSFIRPSASYSTQASEKRPKQERTDLTTVEDPFNAPTYNIPEKPVTFVEGASYSVVILAGLGVAALAGYAVFKELIFEPKEYKIFGKALARVQSDSQVTAKIGYPITGYGTESRNRAARQRIQNRVWTDEDGVEHVEVGFHIRGPHGAGKVFAEMFKDSSDRTWKFTFLLVEITSPRPAQIMLESYLPA

SEQ ID NO: 21754 - DNA, 1355 bp, Glycine max
actatactagtgagaaaagaaagggaagtcctccgcgccgccactcctcccatctctctgctctaaacgacaccgttttagtcttctcctcaagtcatggccacactcaagagcctctgcttcagaggaactgcctttcccgtttgcccctccaatgtcaccaacaatagaaactccaggagctcatattggaggcctgcacaagcagccgtgaagcccaatttccatctcccaatgcgcagttttgagttaaaaaataggacttctccagaggacataaaggctctgagattgataactgccattaaaactccatacctacctgatggtcgatttgatcttgaagcatatgatgacttggtgaatatgcagattggacaaggggccgaaggtattattgttggtgggacaactggtgaaggccaattaatgagctgggaagagcacataatgcttattgctcacacagtcaactgttttggtgggaaaattaaggttattggaaatactggaagcaactccaccagggaagcaattcatgccaccgagcaaggttttgctgttggaatgcatgctgcccttcacataaacccttactatggcaaaacctccttggatggtatgcttgctcactttcaaagtgtgctttccatgggtcccacaataatctacaatgtgcctgcacggactggtcaagacattcccccgcatgtaattcaaaccttagctgaaagtgctaacctggctggtgtcaaggagtgtgtgggaaatgaccggatcaagcagtatacagatgatggaattgttgtgtggagtgggaatgatgatcaatgccatgatgctagatggggttatggggctactggtgtgatatctgttgtaagcaacctggttcctggtttaatgcgagaactcatgtttggcggcgtaaaccctacactaaattctaagcttttgcctctgattgactggcttttccacatgccaaaccccattggtttgaacactgctcttgctcaacttggagttgtcagacccgtttttaggctaccgtttgtacctctccctgtggacaaaaggatagagtttgccaatttggtgaaggaaattggtcgagagcattttgttggaaataaagatgttgaggttcttgatgacgatgactttttcttggttagtcgttattaagttaccatgtaggttcgttgtatcctttcttggggtttgccaaatttaaaatccagatgagagtctattgtagtgaactagttaatgatcatctagtttctttttactggctactttgtagttgcaaactggttcaaatttattctggatttttttcttttggtaat

SEQ ID NO: 21755 - protein, 363 aa, Glycine max
MATLKSLCFRGTAFPVCPSNVTNNRNSRSSYWRPAQAAVKPNFHLPMRSFELKNRTSPEDIKALRLITAIKTPYLPDGRFDLEAYDDLVNMQIGQGAEGIIVGGTTGEGQLMSWEEHIMLIAHTVNCFGGKIKVIGNTGSNSTREAIHATEQGFAVGMHAALHINPYYGKTSLDGMLAHFQSVLSMGPTIIYNVPARTGQDIPPHVIQTLAESANLAGVKECVGNDRIKQYTDDGIVVWSGNDDQCHDARWGYGATGVISVVSNLVPGLMRELMFGGVNPTLNSKLLPLIDWLFHMPNPIGLNTALAQLGVVRPVFRLPFVPLPVDKRIEFANLVKEIGREHFVGNKDVEVLDDDDFFLVSRY

SEQ ID NO: 21756 - protein, 317 aa, Glycine max
MRSFELKNRTSPEDIKALRLITAIKTPYLPDGRFDLEAYDDLVNMQIGQGAEGIIVGGTTGEGQLMSWEEHIMLIAHTVNCFGGKIKVIGNTGSNSTREAIHATEQGFAVGMHAALHINPYYGKTSLDGMLAHFQSVLSMGPTIIYNVPARTGQDIPPHVIQTLAESANLAGVKECVGNDRIKQYTDDGIVVWSGNDDQCHDARWGYGATGVISVVSNLVPGLMRELMFGGVNPTLNSKLLPLIDWLFHMPNPIGLNTALAQLGVVRPVFRLPFVPLPVDKRIEFANLVKEIGREHFVGNKDVEVLDDDDFFLVSRY

SEQ ID NO: 21757 - protein, 273 aa, Glycine max
MQIGQGAEGIIVGGTTGEGQLMSWEEHIMLIAHTVNCFGGKIKVIGNTGSNSTREAIHATEQGFAVGMHAALHINPYYGKTSLDGMLAHFQSVLSMGPTIIYNVPARTGQDIPPHVIQTLAESANLAGVKECVGNDRIKQYTDDGIVVWSGNDDQCHDARWGYGATGVISVVSNLVPGLMRELMFGGVNPTLNSKLLPLIDWLFHMPNPIGLNTALAQLGVVRPVFRLPFVPLPVDKRIEFANLVKEIGREHFVGNKDVEVLDDDDFFLVSRY

SEQ ID NO: 21758 - DNA, 1233 bp, Glycine max
aacaaaatagaaaagtagcagcaccctgctcatttgttgggatcccattcttccacaacagttcaaagtttgctctctcattcctcacccctccgcctcctctctcacgtacgcacactgttttcacctaaaaagctgctacccaatactccgtacaccgtatacctaaaccaccccaactacaacggacactaacaaatcattattattactgttactattacatcacattcttcacacactaatcaaaatcatcattttccatatatatcgccagcaagatacaagaagaaagaaagatgcttccgtttcggagattctatgggttcgagagctggctagaccacgacgctggccatgctcagagttcgctgatcaaaaaggcggtggagttggacggcgccagatcgaaaacggagcggaaatcaacggaagcgtgcaagagtcacagggaagctgagaggagacgcaggcagagaatcaactctcacctctccaccttacgtaccctccttcctaacgccgccaagtcggacaaggcgtcgttgctgggggaagtggtggagcacgtgaagcggctgaggaagcaagccgatgacgtgacgtgcggggactcgtactcctcgcgcagcggcgaaccgggttcggtccggtcggaggcatggccgtttccgggggagtgcgatgaggtgacggtgagttactgtgacggcgaggacggggaaccgaagcgggtgaaggcgacggtgtgctgcggggaccggaccggtctgaaccgggacgtgtcccaagcgatccggtcggttcgggccaaagcggttcgcgcggagatgatgacggttgggggaaggacgaagagtgttgtggtggtggagtgggaaaaggaagaagaggaggttggggcgctggaacgggctttgaaggctgtggtggagaatcgggctttggtgggctttggaatgggcccagtcattctgggccagaaacggggtagggattgctgtgcttcgcctagtagtgaggttgactctgacttcttgctgaggaatgggagcttttgctaattcgtaattagtttctttttttggtaaaagaaataattagatgcttagttagctttcgggttggtaatcttggagatgcctttttttttatttatataggcatgatgctttagtctataccatagtctaaaatctaaaatttataataatatataattgtggtaatttt

SEQ ID NO: 21759 - protein, 254 aa, Glycine max
MLPFRRFYGFESWLDHDAGHAQSSLIKKAVELDGARSKTERKSTEACKSHREAERRRRQRINSHLSTLRTLLPNAAKSDKASLLGEVVEHVKRLRKQADDVTCGDSYSSRSGEPGSVRSEAWPFPGECDEVTVSYCDGEDGEPKRVKATVCCGDRTGLNRDVSQAIRSVRAKAVRAEMMTVGGRTKSVVVVEWEKEEEEVGALERALKAVVENRALVGFGMGPVILGQKRGRDCCASPSSEVDSDFLLRNGSFC

SEQ ID NO: 21760 - DNA, 1197 bp, Glycine max
gttatttagagagattcagagagaaatggcttcatattcttcgtcctctctttctagaatctcaactctccagaatcatatctcccctcttgaagccaacaacaagctacggagtctggtcaagatatctccacaagtgtctgaagccatagccagtggacgtgctgtggtcgctcttgagtcaaccattatctcacatgggatgccttaccctcaaaacctgcaaacagcaaaagaggtggagtcaattgtgagagagaatggagcagtccctgcaacaatagctatattaaacggagtaccttgcataggtctgaacgaagaagaactagaacgtcttgcatctctgggcaaaagtgtccaaaagactgcaggcagggacataccacatgttgtggcgacaagaggagatggtgcaactacagtctctgcaacgttgttttttgcttcaatggttggcatccaagtctttgtaaccggcgggataggaggtgtgcatagacatgccaaccatactatggacatatcatctgatcttactgcactaggaaggactcctatagctgtgatatcagcaggcgttaaatcaatacttgatatcccaaagactcttgaatatttggaaactcaagaagtgtatgttgctgcatacaagagcgatgagtttccagcatttttcacagagaaaagcggctgtaaggcaccttcccgagttgatagccctgaagactgtgctcgagtaatagatgcaaacatgaagttaaaccgtaaggcggggattctattcgctgttccaatcccaaaacagcattcagctgccggaaatcttatcgaatcagcaacacagcgtgctcttacagaagcaagggaacaaaacgttactggaaatgccgaaactccattcttactctcacgtgtaaatgagttaactgaaggcacctcacttgcagcaaatattgcgcttgtgaaaaacaatgcccttatcggttctcaaattgcagtagcgctttctcagctggtatgagcttccttatcaacctcagactcaggctcaggttcatgattcaggactggtcaaagatcttttagattggtagtaatctagtgttttaatgttgcttatgaaatattgtttcttgcccaaaaaaaaactcttttttaacaaactttcacatattatatgaatatttttatatc

SEQ ID NO: 21761 - protein, 340 aa, Glycine max
LFREIQREMASYSSSSLSRISTLQNHISPLEANNKLRSLVKISPQVSEAIASGRAVVALESTIISHGMPYPQNLQTAKEVESIVRENGAVPATIAILNGVPCIGLNEEELERLASLGKSVQKTAGRDIPHVVATRGDGATTVSATLFFASMVGIQVFVTGGIGGVHRHANHTMDISSDLTALGRTPIAVISAGVKSILDIPKTLEYLETQEVYVAAYKSDEFPAFFTEKSGCKAPSRVDSPEDCARVIDANMKLNRKAGILFAVPIPKQHSAAGNLIESATQRALTEAREQNVTGNAETPFLLSRVNELTEGTSLAANIALVKNNALIGSQIAVALSQLV

SEQ ID NO: 21762 - protein, 332 aa, Glycine max
MASYSSSSLSRISTLQNHISPLEANNKLRSLVKISPQVSEAIASGRAVVALESTIISHGMPYPQNLQTAKEVESIVRENGAVPATIAILNGVPCIGLNEEELERLASLGKSVQKTAGRDIPHVVATRGDGATTVSATLFFASMVGIQVFVTGGIGGVHRHANHTMDISSDLTALGRTPIAVISAGVKSILDIPKTLEYLETQEVYVAAYKSDEFPAFFTEKSGCKAPSRVDSPEDCARVIDANMKLNRKAGILFAVPIPKQHSAAGNLIESATQRALTEAREQNVTGNAETPFLLSRVNELTEGTSLAANIALVKNNALIGSQIAVALSQLV

SEQ ID NO: 21763 - protein, 273 aa, Glycine max
MPYPQNLQTAKEVESIVRENGAVPATIAILNGVPCIGLNEEELERLASLGKSVQKTAGRDIPHVVATRGDGATTVSATLFFASMVGIQVFVTGGIGGVHRHANHTMDISSDLTALGRTPIAVISAGVKSILDIPKTLEYLETQEVYVAAYKSDEFPAFFTEKSGCKAPSRVDSPEDCARVIDANMKLNRKAGILFAVPIPKQHSAAGNLIESATQRALTEAREQNVTGNAETPFLLSRVNELTEGTSLAANIALVKNNALIGSQIAVALSQLV

SEQ ID NO: 21764 - DNA, 1547 bp, Glycine max
gttgcccgttactcctcctatctatcgtgcgtatctctttctctctccatttttatttatatatttctctccattatttggtgtgcatgctctagacacacacacaccccaccaccaccaacactgagttttagcagaaggatagagagcagaatgattcaaagaactgtgtcctttcccagtttaaggaaattgcttcttcgggctggttgttctaaatctgcttcgtccaagatcggaacttacaattgctttgcttctcagtcctcccctctaccgagccacaaccctagttaccgtgatgacgagtatgctgatgtggactgggacagtcttggatttggactgatgcccactgattatatgtatattactaaatgttgtgagggccaaaattttggacaaggacaactcagtcgttatgggaacattgaactcagtccatcagctggtgtcctaaattatggtcagggtttattcgaaggcacgaaagcatacagaaaagaaaatgggggcttgctactcttccgtccagaagaaaatgccattcgcatgaagactggtgcccaaagaatgtgcatggcatcgccttccattgatcattttgttgatgctttgaagcaaactgtcttggctaataagcgttgggttcctccaccgggcaaaggatccttgtaccttaggcctctgctcctaggaactggtccggttttgggtttggctcctgcacctgaatacacattcctcatatttgcttcccctgttcgcaactatttcaaggagggctctgctccactcaacttgtacgtggaggaaaactttgaccgtgcttctagccgcggcactggaaacgttaaaaccatttccaattatgcaccggtcttgatggcacaaattcaagccaagaaaagaggattttcggatgtgctataccttgattcagacaccaagaaaaatctcgaggaggtctcttcttgtaacatttttattgccaagggcaaatgcatctcaacacctgctactaatggaactattctttccggaattacccgaaaaagtgtcattgaaattgctcgcgatcatggctatcaggtagaagagcgtgctgttgccgtggatgaattgattgaggctgatgaagttttctgcacaggaactgcggtcggtgttgctccagtagggagtatcacataccaggataaaaggatggaatatataacaggttctggaaccatttgtcaagagctgaacaataccatttcaggaattcaaacgggtactattgaagataagaagggatggattgtcgaagttgattaacaacgagtgtttataatttataattgtttattccaatgttattaaaccaattttaaactgtaataatgattgcccatacgaaaaatggcgcatatactgttgttcgttatctaaaagcatgttatatgtgtaaaatgttttttttggatacatatatatgtaaaatgatgtgcacattataaattataatgattatataaagtaaaggacttgcaaatcatattccg

SEQ ID NO: 21765 - protein, 439 aa, Glycine max
VARYSSYLSCVSLSLSIFIYIFLSIIWCACSRHTHTPPPPTLSFSRRIESRMIQRTVSFPSLRKLLLRAGCSKSASSKIGTYNCFASQSSPLPSHNPSYRDDEYADVDWDSLGFGLMPTDYMYITKCCEGQNFGQGQLSRYGNIELSPSAGVLNYGQGLFEGTKAYRKENGGLLLFRPEENAIRMKTGAQRMCMASPSIDHFVDALKQTVLANKRWVPPPGKGSLYLRPLLLGTGPVLGLAPAPEYTFLIFASPVRNYFKEGSAPLNLYVEENFDRASSRGTGNVKTISNYAPVLMAQIQAKKRGFSDVLYLDSDTKKNLEEVSSCNIFIAKGKCISTPATNGTILSGITRKSVIEIARDHGYQVEERAVAVDELIEADEVFCTGTAVGVAPVGSITYQDKRMEYITGSGTICQELNNTISGIQTGTIEDKKGWIVEVD

SEQ ID NO: 21766 - protein, 388 aa, Glycine max
MIQRTVSFPSLRKLLLRAGCSKSASSKIGTYNCFASQSSPLPSHNPSYRDDEYADVDWDSLGFGLMPTDYMYITKCCEGQNFGQGQLSRYGNIELSPSAGVLNYGQGLFEGTKAYRKENGGLLLFRPEENAIRMKTGAQRMCMASPSIDHFVDALKQTVLANKRWVPPPGKGSLYLRPLLLGTGPVLGLAPAPEYTFLIFASPVRNYFKEGSAPLNLYVEENFDRASSRGTGNVKTISNYAPVLMAQIQAKKRGFSDVLYLDSDTKKNLEEVSSCNIFIAKGKCISTPATNGTILSGITRKSVIEIARDHGYQVEERAVAVDELIEADEVFCTGTAVGVAPVGSITYQDKRMEYITGSGTICQELNNTISGIQTGTIEDKKGWIVEVD

SEQ ID NO: 21767 - protein, 323 aa, Glycine max
MPTDYMYITKCCEGQNFGQGQLSRYGNIELSPSAGVLNYGQGLFEGTKAYRKENGGLLLFRPEENAIRMKTGAQRMCMASPSIDHFVDALKQTVLANKRWVPPPGKGSLYLRPLLLGTGPVLGLAPAPEYTFLIFASPVRNYFKEGSAPLNLYVEENFDRASSRGTGNVKTISNYAPVLMAQIQAKKRGFSDVLYLDSDTKKNLEEVSSCNIFIAKGKCISTPATNGTILSGITRKSVIEIARDHGYQVEERAVAVDELIEADEVFCTGTAVGVAPVGSITYQDKRMEYITGSGTICQELNNTISGIQTGTIEDKKGWIVEVD

SEQ ID NO: 21768 - DNA, 1480 bp, Glycine max
atgaaatcagaatctggatgaagaaacatccatgcagtgcagatgtagttacaaaatagctgattttccaactctgcgttgactggtctcccacaaacagcttccaggaaatgacaatgagactttccctcccattttgttttctactccactctacccttccttaatcattccactctctctaaattcaatcaatcaattatctctctaaacccatggaacacgccttcctagccatcgtcgccgccaccgccagcttcttcgtggtcatgctcctccttgccgccgccatcctcctctgccagcaccaccgcaactccaccaaagccccaacccgcagcacctcccagatccgaacccgctccgccccccaccgtgacgcctcctcccgctccgtcctggaaaactggtcctccgaccccaacctgatcaagatctcctgggaggagctcgcccgcgccaccgacaacttctcccctcacctcatcgtcggcgatggcagcttcggcctcgtctacaaggcccgtctctccaacggcgccaccgtcgccgtcaaaaaactctcccccgacgccttccagggcttccgcgagttcaccgccgagatggagaccctaagccgcctccgccacccaaacatcgtcaaaatcctcggctactgggcctcaggcccggaacgcctcctcgtctacgagttcatcgaaaagggaaacctcgaccagtggctccacgaacccgatctctctcgctcccctctcccctggcccacacgcgtcaacatcatccgcggcgtggcccatgggctttcctacctccacggcctcgacaagcccgtcatccaccgcgacataaaggccagcaacatcttactggactctaacttccaggcccatatcgctgactttgggctggcccgtaggatcgacaacactcggacccacgtgtccacgcagttcgcgggaacaatgggctacatgccgccggagtacatagaagggtccaatgtggccaacacgaaggtggatgtgtatagttttgggattttgatgattgagaccgcgtcgagccacaggcccaatttgcccatgaaattgggcacggacgacattgggatggtccagtgggccaggaagatgaaggagaataatgcggagatggagatggtggatgtgaatattgggttgaggggggaggaggagagtgttaaggagtacgtgcgcatcgcttgtgagtgcacccgtgagatgcagaaggaaaggcccgaaatgccccaagttgttcaatggttggactcaatgtcactttcaaccaaaccttttcatctcgtgtaaatacctttacttctatatatatatataagtctataataacattaattagtttacatgttcttaataaatgtgatcaaatcatcgcattttgtttttgctgccaattcagttgtgtaatgaactccgatataagggttttacaaggttct

SEQ ID NO: 21769 - protein, 371 aa, Glycine max
MEHAFLAIVAATASFFVVMLLLAAAILLCQHHRNSTKAPTRSTSQIRTRSAPHRDASSRSVLENWSSDPNLIKISWEELARATDNFSPHLIVGDGSFGLVYKARLSNGATVAVKKLSPDAFQGFREFTAEMETLSRLRHPNIVKILGYWASGPERLLVYEFIEKGNLDQWLHEPDLSRSPLPWPTRVNIIRGVAHGLSYLHGLDKPVIHRDIKASNILLDSNFQAHIADFGLARRIDNTRTHVSTQFAGTMGYMPPEYIEGSNVANTKVDVYSFGILMIETASSHRPNLPMKLGTDDIGMVQWARKMKENNAEMEMVDVNIGLRGEEESVKEYVRIACECTREMQKERPEMPQVVQWLDSMSLSTKPFHLV

SEQ ID NO: 21770 - protein, 353 aa, Glycine max
MLLLAAAILLCQHHRNSTKAPTRSTSQIRTRSAPHRDASSRSVLENWSSDPNLIKISWEELARATDNFSPHLIVGDGSFGLVYKARLSNGATVAVKKLSPDAFQGFREFTAEMETLSRLRHPNIVKILGYWASGPERLLVYEFIEKGNLDQWLHEPDLSRSPLPWPTRVNIIRGVAHGLSYLHGLDKPVIHRDIKASNILLDSNFQAHIADFGLARRIDNTRTHVSTQFAGTMGYMPPEYIEGSNVANTKVDVYSFGILMIETASSHRPNLPMKLGTDDIGMVQWARKMKENNAEMEMVDVNIGLRGEEESVKEYVRIACECTREMQKERPEMPQVVQWLDSMSLSTKPFHLV

SEQ ID NO: 21771 - protein, 241 aa, Glycine max
METLSRLRHPNIVKILGYWASGPERLLVYEFIEKGNLDQWLHEPDLSRSPLPWPTRVNIIRGVAHGLSYLHGLDKPVIHRDIKASNILLDSNFQAHIADFGLARRIDNTRTHVSTQFAGTMGYMPPEYIEGSNVANTKVDVYSFGILMIETASSHRPNLPMKLGTDDIGMVQWARKMKENNAEMEMVDVNIGLRGEEESVKEYVRIACECTREMQKERPEMPQVVQWLDSMSLSTKPFHLV

SEQ ID NO: 21772 - DNA, 1258 bp, Glycine max
gtgctagtcagaacaatttgattgcaacagagaaaatattcaacaaaatgaaggacttggatttaccacttacagcatttgcttgtaaccagttgctgcttttgtataagaagctggacaagaagaaaatagctgatgttttactgctgatggaaaaagagaatgtcaaaccttctctttttacttacagaatcttaatagactcaaagggccagtccaatgatattgctggaatggagcaagtgtttgagacaatgaaggaagaaggctttgaaccagacatccaaatacaggcactcttggctaggcattacacctcatctgggcttaaagaaaaagctgaagctatgttgaaggagatggaaggtgaaaacttgaaagagaatcagtgggtatgtgcaactttgctccgcctttatgcaaacctgggaaaggctgatgaagtggagagaatttggaaggtctgtgaatcaaaacctcgagttgaggactgcctggctgcagttgaagcctggggaaagttaaataaaattgaagaagcagaggcagtttttgagatggtgtcaaagaaaatggaaacttaattccaagaattactcagttcttctgaagatttatgcaaataataagatgctaacgaagggtaaggaacttgtcaagctaatggctgatagtggggtgaggataggcccattaacatgggatgcacttgtgaaactgtatatccaagctggggaagttgagaaggcagactctattttgcataaggcaatccaacagaatcagctgcagccaatgtttaccacctatttggctattttagagcagtatgcaaagaggggtgacgtccataactcggagaagattttccttaaaatgagacaagcaggttatacgtcccgaataagtcagttccaagttctaatacaggcatatgtaaacgccaaggttccagcgtatggaatcagagagaggattaaagctgataacctatttcccaacaaaacgttggctaaccagttggctctagttgatgcatttaggaaaaatgcagtttccgatttgcttgattgaggcatatttagtattctgcaagggttgtttcctacgctttccatgcaactattattattagttgaatagtagattgcacatttagtttgaatgaatgttgtcttgcactgctatctataagttagatacacttttgccttttaagcgcattatattaatgcttaaatactgcttttatgatttt

SEQ ID NO: 21773 - protein, 193 aa, Glycine max
ASQNNLIATEKIFNKMKDLDLPLTAFACNQLLLLYKKLDKKKIADVLLLMEKENVKPSLFTYRILIDSKGQSNDIAGMEQVFETMKEEGFEPDIQIQALLARHYTSSGLKEKAEAMLKEMEGENLKENQWVCATLLRLYANLGKADEVERIWKVCESKPRVEDCLAAVEAWGKLNKIEEAEAVFEMVSKKMET

SEQ ID NO: 21774 - protein, 178 aa, Glycine max
MKDLDLPLTAFACNQLLLLYKKLDKKKIADVLLLMEKENVKPSLFTYRILIDSKGQSNDIAGMEQVFETMKEEGFEPDIQIQALLARHYTSSGLKEKAEAMLKEMEGENLKENQWVCATLLRLYANLGKADEVERIWKVCESKPRVEDCLAAVEAWGKLNKIEEAEAVFEMVSKKMET

SEQ ID NO: 21775 - protein, 147 aa, Glycine max
MLTKGKELVKLMADSGVRIGPLTWDALVKLYIQAGEVEKADSILHKAIQQNQLQPMFTTYLAILEQYAKRGDVHNSEKIFLKMRQAGYTSRISQFQVLIQAYVNAKVPAYGIRERIKADNLFPNKTLANQLALVDAFRKNAVSDLLD

SEQ ID NO: 21776 - DNA, 1224 bp, Glycine max
agtttctttgctgataaactttctgagcaatctggtttatcatgtctccaagttgatgactgtgaggatgttgaaatatatgttgagactgttggacttatgtactgcaaagaaatgaaacagcggctaatgaagcaaagtgtttctcgcattcttcgaatactcaaggtcacagaattccttggcttcagctcatgtatccaatcatgtttggagtacttggaggcagtcccttggaatggagaggaagaagaagaaaaggtgatctcaaccatcctacgactccaaggagaaggaattggggtaaatccggtgctaaaacgagtttctcctgatttttctaatgccccaaaagataccctctcccacattgttgaacttgttctcaaaagcaatgaggagagaggtcgccgagagatgaaatccatagttctaaagctccttagggagaataacagtcttccaagttcttcaggctcagctgacctctgtaatgacatgattaataagtcatgcagaaattgcatggattctttattgtgtctgttcaaccaggtggcagagccaagctttagtgataacaaagaacctgtagtaaaacatatagctcttgaagctgataacttgtcatggttgcttgagattttagttgacaaacaagctgctgaagattttgcgctgatgtgggcaaaccagcaggaattggcagccctccatggaaagcttccgattgcatttcgttatcatgtcagttgcatttcaggaagactatatgttggcattggaagaggggaggttttgccatcaaagaacacgcgccagctgttgttgcagacatggctacagcctctaatcaatgactataactggttgcagcacgggtgcaggtcatttgataggaaacttgtggaggaaggaattggaaggacaattctcaccttgcctttggaggatcagcagagtattttgctttcatgggttggaagtttcttgaaaactggtgatggctgtcccaatcttcagagagcttttgaggtgtggtggcggaggactttcattaggccatatgtggaaggccaaagtaatgccatgccagatagttgaatgttgtcaaagcaccatgtgatgatatgttcttgaatatatcttagaatggttttggaattagaatttctcttttgaggtgactattctaagcaattataaatgatatgttgatttgcc

SEQ ID NO: 21777 - protein, 367 aa, Glycine max
SFFADKLSEQSGLSCLQVDDCEDVEIYVETVGLMYCKEMKQRLMKQSVSRILRILKVTEFLGFSSCIQSCLEYLEAVPWNGEEEEEKVISTILRLQGEGIGVNPVLKRVSPDFSNAPKDTLSHIVELVLKSNEERGRREMKSIVLKLLRENNSLPSSSGSADLCNDMINKSCRNCMDSLLCLFNQVAEPSFSDNKEPVVKHIALEADNLSWLLEILVDKQAAEDFALMWANQQELAALHGKLPIAFRYHVSCISGRLYVGIGRGEVLPSKNTRQLLLQTWLQPLINDYNWLQHGCRSFDRKLVEEGIGRTILTLPLEDQQSILLSWVGSFLKTGDGCPNLQRAFEVWWRRTFIRPYVEGQSNAMPDS

SEQ ID NO: 21778 - protein, 334 aa, Glycine max
MYCKEMKQRLMKQSVSRILRILKVTEFLGFSSCIQSCLEYLEAVPWNGEEEEEKVISTILRLQGEGIGVNPVLKRVSPDFSNAPKDTLSHIVELVLKSNEERGRREMKSIVLKLLRENNSLPSSSGSADLCNDMINKSCRNCMDSLLCLFNQVAEPSFSDNKEPVVKHIALEADNLSWLLEILVDKQAAEDFALMWANQQELAALHGKLPIAFRYHVSCISGRLYVGIGRGEVLPSKNTRQLLLQTWLQPLINDYNWLQHGCRSFDRKLVEEGIGRTILTLPLEDQQSILLSWVGSFLKTGDGCPNLQRAFEVWWRRTFIRPYVEGQSNAMPDS

SEQ ID NO: 21779 - protein, 329 aa, Glycine max
MKQRLMKQSVSRILRILKVTEFLGFSSCIQSCLEYLEAVPWNGEEEEEKVISTILRLQGEGIGVNPVLKRVSPDFSNAPKDTLSHIVELVLKSNEERGRREMKSIVLKLLRENNSLPSSSGSADLCNDMINKSCRNCMDSLLCLFNQVAEPSFSDNKEPVVKHIALEADNLSWLLEILVDKQAAEDFALMWANQQELAALHGKLPIAFRYHVSCISGRLYVGIGRGEVLPSKNTRQLLLQTWLQPLINDYNWLQHGCRSFDRKLVEEGIGRTILTLPLEDQQSILLSWVGSFLKTGDGCPNLQRAFEVWWRRTFIRPYVEGQSNAMPDS

SEQ ID NO: 21780 - DNA, 1358 bp, Glycine max
tgctctttttgaggagcactattacatcaagcaattgggtaactgtgacctatctggaatgagtgatcctcacgatgaattcaagggaaagaatgtcctgattgagagaaaggaaccttcagaactggcatcaaaatatggcatgtcagttgagacatatcaagaaattcttggagaatgcaggcataagttgtttgaagtaaggtcaaggcgtccaaagccacatttggatgataaggttattgtatcgtggaatggactggcaatctcatcttttgccagggcttctaagattctcaagggtgaagctgaagggaccaaattctactttcctgtcattggcactgaaccaaaggagtacatgggaattgcagaaaaagcagcatcctttattaggaagcaactttacaatgtagaaactcacaggctacaccatagtttcagacattcgccatctaaagctcctgctttcttggatgattatgcttttctgatttctggattgctggatctctatgagtttggtggtggaattagctggcttctatgggccattgaattgcaggaaacccaggatgctttgtttcttgataagacaggaggaggatatttcaataatacaggagaagatgcttccgttctcctccgtgtaaaggaagaccatgatggggcagaaccctcaggaaactcagtttctgctataaatcttataagattggcttccatggttgctggaagtaaggctgagcattataagcgaaatgcagaacatctattggcagtttttgagaaaaggttgaaagatatggctatggcagtgcctctaatgtgttgtgcagcagatatgttgcgtgtactttctcggaagcaagtggtcgtggttggtgaaaggacgtctgaggactttgaaaacatgcttgctgcagctcatgcagtatatgatcccaacagaacagttattcatatagatcccaacaacaaagacgagatggaattttgggaagtaaataacagtaatgttgctctcatggcaaaaaataactttgcagtcaacaaggttgtagctcttgtatgccaaaacttcacttgtagcccctctgtgactgaccattcgtcacttaaagctttgctctccaaaaaaccttcctcttcgttcacgtaagctattggttctgatgagtaggaaaatagttaacgtcggcgaaagctccctcttagagatccccctttcaatctacagaactagttggttctgacttctctgtcaaaataaagataggtaacattctctgttgacttgaggaattgatgcatgtccttttcgtatgcctgtgctcaacaagccatgatttttcttc

SEQ ID NO: 21781 - protein, 386 aa, Glycine max
ALFEEHYYIKQLGNCDLSGMSDPHDEFKGKNVLIERKEPSELASKYGMSVETYQEILGECRHKLFEVRSRRPKPHLDDKVIVSWNGLAISSFARASKILKGEAEGTKFYFPVIGTEPKEYMGIAEKAASFIRKQLYNVETHRLHHSFRHSPSKAPAFLDDYAFLISGLLDLYEFGGGISWLLWAIELQETQDALFLDKTGGGYFNNTGEDASVLLRVKEDHDGAEPSGNSVSAINLIRLASMVAGSKAEHYKRNAEHLLAVFEKRLKDMAMAVPLMCCAADMLRVLSRKQVVVVGERTSEDFENMLAAAHAVYDPNRTVIHIDPNNKDEMEFWEVNNSNVALMAKNNFAVNKVVALVCQNFTCSPSVTDHSSLKALLSKKPSSSFT

SEQ ID NO: 21782 - protein, 367 aa, Glycine max
MSDPHDEFKGKNVLIERKEPSELASKYGMSVETYQEILGECRHKLFEVRSRRPKPHLDDKVIVSWNGLAISSFARASKILKGEAEGTKFYFPVIGTEPKEYMGIAEKAASFIRKQLYNVETHRLHHSFRHSPSKAPAFLDDYAFLISGLLDLYEFGGGISWLLWAIELQETQDALFLDKTGGGYFNNTGEDASVLLRVKEDHDGAEPSGNSVSAINLIRLASMVAGSKAEHYKRNAEHLLAVFEKRLKDMAMAVPLMCCAADMLRVLSRKQVVVVGERTSEDFENMLAAAHAVYDPNRTVIHIDPNNKDEMEFWEVNNSNVALMAKNNFAVNKVVALVCQNFTCSPSVTDHSSLKALLSKKPSSSFT

SEQ ID NO: 21783 - protein, 339 aa, Glycine max
MSVETYQEILGECRHKLFEVRSRRPKPHLDDKVIVSWNGLAISSFARASKILKGEAEGTKFYFPVIGTEPKEYMGIAEKAASFIRKQLYNVETHRLHHSFRHSPSKAPAFLDDYAFLISGLLDLYEFGGGISWLLWAIELQETQDALFLDKTGGGYFNNTGEDASVLLRVKEDHDGAEPSGNSVSAINLIRLASMVAGSKAEHYKRNAEHLLAVFEKRLKDMAMAVPLMCCAADMLRVLSRKQVVVVGERTSEDFENMLAAAHAVYDPNRTVIHIDPNNKDEMEFWEVNNSNVALMAKNNFAVNKVVALVCQNFTCSPSVTDHSSLKALLSKKPSSSFT

SEQ ID NO: 21784 - DNA, 1260 bp, Glycine max
tattccagctctgatgatagcaggcttatactttttcgatcacagcgtagcttcgcagatggcgcaacagaaagaatttaaccttcaaaagccatctgcctaccactatgatgttttgctgcttggaataatgactttgatttgcgggatccttggccttcctccttcaaatggagtccttccacagtcccccatgcatacaaagagtttagcagttcttaggaggcggatgatccgaaagaaggtggtgaagagcgccaaggaatgtattaagcaacgaaggaccaactctgaattatatggaaagatgcaagaggtgattgtagaaatggatacagaccctacggttaaagaattggagaatttgaaggaggctgtaatgcaatctgatagcaaggatggagcaaaggaaaaatttgatcctgagaaacacatagatgaatatctaccagtgcgggttaatgagcaaagaatgaccaacttattgcagtctctcctggttgctgtatcaatcttagccatgtcagttatcaaaaggataccaacctcagttctatggggatattttgcttacatggcaattgatagtctcccagggaatcagttctgggaaaggatattgcttctcttcgtcacctcaagccggcgttacaaaattttggaaggttctcatgcctcttttgtggagacagtaccattcaagaccatagctgcatttacagccttacagttagtatattttgcgttatgtttcggggtgacttggatacctataggtggaatattgttccccgtaccattcttccttctcataattataagagaacacttgcttccaaagatgttcaagcctaaccatcttcaagaactagatgcttctggttatgaggaaattattggtgctccacatggttcactgagggataaggagccagatactgatactgatggaagctcggaagacttttacgatgcagagatattggatgagatgacaaccaacaggggagagttgaaacttagaactgtaagcagcttcaatgatagaaaccacagcttcagtgaagacagacacactcaggtttatcctggaaatgctgtctgaatatggtgaaatctcactgcaccaaccattttttaggatgcagaaaggatttgggataatagtatgttcctctgtaaaggagtgctcataattttttgtgtggtccgttaaggttgaagatgatcttctgtggaacaagaaaggattcaatcggc

SEQ ID NO: 21785 - protein, 367 aa, Glycine max
IPALMIAGLYFFDHSVASQMAQQKEFNLQKPSAYHYDVLLLGIMTLICGILGLPPSNGVLPQSPMHTKSLAVLRRRMIRKKVVKSAKECIKQRRTNSELYGKMQEVIVEMDTDPTVKELENLKEAVMQSDSKDGAKEKFDPEKHIDEYLPVRVNEQRMTNLLQSLLVAVSILAMSVIKRIPTSVLWGYFAYMAIDSLPGNQFWERILLLFVTSSRRYKILEGSHASFVETVPFKTIAAFTALQLVYFALCFGVTWIPIGGILFPVPFFLLIIIREHLLPKMFKPNHLQELDASGYEEIIGAPHGSLRDKEPDTDTDGSSEDFYDAEILDEMTTNRGELKLRTVSSFNDRNHSFSEDRHTQVYPGNAV

SEQ ID NO: 21786 - protein, 363 aa, Glycine max
MIAGLYFFDHSVASQMAQQKEFNLQKPSAYHYDVLLLGIMTLICGILGLPPSNGVLPQSPMHTKSLAVLRRRMIRKKVVKSAKECIKQRRTNSELYGKMQEVIVEMDTDPTVKELENLKEAVMQSDSKDGAKEKFDPEKHIDEYLPVRVNEQRMTNLLQSLLVAVSILAMSVIKRIPTSVLWGYFAYMAIDSLPGNQFWERILLLFVTSSRRYKILEGSHASFVETVPFKTIAAFTALQLVYFALCFGVTWIPIGGILFPVPFFLLIIIREHLLPKMFKPNHLQELDASGYEEIIGAPHGSLRDKEPDTDTDGSSEDFYDAEILDEMTTNRGELKLRTVSSFNDRNHSFSEDRHTQVYPGNAV

SEQ ID NO: 21787 - protein, 348 aa, Glycine max
MAQQKEFNLQKPSAYHYDVLLLGIMTLICGILGLPPSNGVLPQSPMHTKSLAVLRRRMIRKKVVKSAKECIKQRRTNSELYGKMQEVIVEMDTDPTVKELENLKEAVMQSDSKDGAKEKFDPEKHIDEYLPVRVNEQRMTNLLQSLLVAVSILAMSVIKRIPTSVLWGYFAYMAIDSLPGNQFWERILLLFVTSSRRYKILEGSHASFVETVPFKTIAAFTALQLVYFALCFGVTWIPIGGILFPVPFFLLIIIREHLLPKMFKPNHLQELDASGYEEIIGAPHGSLRDKEPDTDTDGSSEDFYDAEILDEMTTNRGELKLRTVSSFNDRNHSFSEDRHTQVYPGNAV

SEQ ID NO: 21788 - DNA, 1700 bp, Glycine max
gtaaagtatcttccatttgaaaacaacccccattcattcattcactcactcaccaacaccaccaaacaaagccttgctggtggcggacactccgaggggcctctctctcctctccctctccacaataaaacccaaaaaactcacacaacccgacccacaacacaagagaaaaagcgcactgctcgctcgtgttctgtttctctctgtttctccgttctctgtttttttttcagatctcgaaaaatgcagagcgcggctttcactttctctccctctctccctctccgcaacccttcccctaactcttggaggagaccctctctttctctccgtctccacgccaaacacagcaacaacaacaacaacagtaacagcaccgaaggcgttaactccaatggcgtctcttccacttccttcactcgccgatcttggactcttcttccttcttcttctttcaaattcaggcctcttccttcttcacctcctcgcgccgccgaaaacgccgttcccgaaagcgcagcagcacccgtcgaaaacccgctcttcaaaactctcgaactcggcgccttgtttggcttatggtacctcttcaacatctacttcaacatctacaacaaacaggtgttgaaggcgtttcattatccggtaactgtgactgttgttcagtttgccgttgggactgtgctagtggcatttatgtggggtttgaatctctataagaggccgaaactcagtggtgctatgcttggagcgattttgccgctggctgcagtgcatactttggggaaccttttcactaatatgagtcttgggaaggtggccgtgtctttcactcacactatcaaagccatggagcctttcttttcagtcatcctttctgccatgttccttggagagtttcctacaccgtgggtggttggttcccttgtgcctattgttggtggagttgcactggcgtctgttaccgaggcctctttcaattgggctggattttggagtgcaatggcatctaatgtgacaaatcaatctcgtaatgttcttagcaaaaaggccatggttaagaaagaggattctatggacaacattactctcttctctataataactgtaatgtccttcttcttgttagcacctgtggctatcttcatggagggtgtcaaatttacccctgcttacttgcaatctgctggggtgaatgttagacaactttacatcagatctcttcttgctgctctctgtttccatgcgtatcaacaagtttcgtatatgatattgcaaagggtatcacctgttacccactctgtgggtaattgtgtgaagcgggttgtggtcattgtgagctctgtcatcttcttccaaacacctgtctcacctgtgaatgcttttgggactgctatagctcttgctggagttttcctctattcaagggtgaagcgtattaaggcaaagccaaaaacagcttaattttcaatggtaaaattttgttagttccattgaggaagccaaatagttgcaatctgcaattctgaatttctttgtaggtgagatagggaatgaggattatctttattgatcctcagtcctcacatttcctttttatttcttctccttaagttaccttgtggatttcattatttatgtttgagtaagtgcctaatggttctgctccatgaaaaaattatcctcttctgaattttgct

SEQ ID NO: 21789 - protein, 487 aa, Glycine max
VKYLPFENNPHSFIHSLTNTTKQSLAGGGHSEGPLSPLPLHNKTQKTHTTRPTTQEKKRTARSCSVSLCFSVLCFFFRSRKMQSAAFTFSPSLPLRNPSPNSWRRPSLSLRLHAKHSNNNNNSNSTEGVNSNGVSSTSFTRRSWTLLPSSSFKFRPLPSSPPRAAENAVPESAAAPVENPLFKTLELGALFGLWYLFNIYFNIYNKQVLKAFHYPVTVTVVQFAVGTVLVAFMWGLNLYKRPKLSGAMLGAILPLAAVHTLGNLFTNMSLGKVAVSFTHTIKAMEPFFSVILSAMFLGEFPTPWVVGSLVPIVGGVALASVTEASFNWAGFWSAMASNVTNQSRNVLSKKAMVKKEDSMDNITLFSIITVMSFFLLAPVAIFMEGVKFTPAYLQSAGVNVRQLYIRSLLAALCFHAYQQVSYMILQRVSPVTHSVGNCVKRVVVIVSSVIFFQTPVSPVNAFGTAIALAGVFLYSRVKRIKAKPKTA

SEQ ID NO: 21790 - protein, 406 aa, Glycine max
MQSAAFTFSPSLPLRNPSPNSWRRPSLSLRLHAKHSNNNNNSNSTEGVNSNGVSSTSFTRRSWTLLPSSSFKFRPLPSSPPRAAENAVPESAAAPVENPLFKTLELGALFGLWYLFNIYFNIYNKQVLKAFHYPVTVTVVQFAVGTVLVAFMWGLNLYKRPKLSGAMLGAILPLAAVHTLGNLFTNMSLGKVAVSFTHTIKAMEPFFSVILSAMFLGEFPTPWVVGSLVPIVGGVALASVTEASFNWAGFWSAMASNVTNQSRNVLSKKAMVKKEDSMDNITLFSIITVMSFFLLAPVAIFMEGVKFTPAYLQSAGVNVRQLYIRSLLAALCFHAYQQVSYMILQRVSPVTHSVGNCVKRVVVIVSSVIFFQTPVSPVNAFGTAIALAGVFLYSRVKRIKAKPKTA

SEQ ID NO: 21791 - protein, 255 aa, Glycine max
MWGLNLYKRPKLSGAMLGAILPLAAVHTLGNLFTNMSLGKVAVSFTHTIKAMEPFFSVILSAMFLGEFPTPWVVGSLVPIVGGVALASVTEASFNWAGFWSAMASNVTNQSRNVLSKKAMVKKEDSMDNITLFSIITVMSFFLLAPVAIFMEGVKFTPAYLQSAGVNVRQLYIRSLLAALCFHAYQQVSYMILQRVSPVTHSVGNCVKRVVVIVSSVIFFQTPVSPVNAFGTAIALAGVFLYSRVKRIKAKPKTA

SEQ ID NO: 21792 - DNA, 1224 bp, Glycine max
aaccaacatcacctccactgtcgaaattcccaccagaaccccagcacacccgccactctattcgacctcaccattgtccccattaccttgttgactacgagtgcaacgcgtgtcctcgtgttcccatccatggctcaacgcaatcaaaccaatcttctccaaagacatcatatcttgtctaatttgttgttaattacccatgtatatctccttctcacaatcattttttatagtctctcttctgagcaagaatccacaacttttcgcgaagccacaaagcatcgttgttggcaggaggccatgaaatttgagattcaagctctggttcgtaatcagacatgggacattgttcagacgccgctgcatgtgagacctattggttgtaagtgggtgtataaaatcaagcgtggttcggatgggtcagttgaatgctataaggcgtgtttggtagctaaaggctattcccagattgatggcattgactacctcgatatcttctctcccgtagtcaagatgagaacaattcgggtttttctggccatagcttccatttctcattggcacttgcacaacttgatgttagtaacgcttttctatatggggatctcaacgaggaggtgtatatgactatccctcagggtgtctctggatatcaaccatctcaatgttgcaaactgaagcggtctctttatggcttaaagcaggccagccaccaatggtttgccaagctatccagtctactacaacattatggtttcacgaaggctcatgctgatcacaaccttttcacaaaggaaccaatgtcgatttcatcagggtctaattggatgcacagttcaatgtgacttggttttgtactaaaatttgtcgatgattttaccattgaggatatggtggtatgctttgaagatcaagaaacagggagatgcttgaaagagattccaactaaaggatgataaaaatggtttcttactgtagcttcgcgaatcaactggcaaacatatgagagtgttcttctttaattgatctgaatcctttagttttttatttgatagatatttcaagatacaattgttgttgaggttgatgatcaactctactaatgtattttggctctcctcaattcagctatgactagatatgctttctctttgaatattcttacatgtatgcatattcactaatgtttccatgtggtttagttttatgcaaatatttattttc

SEQ ID NO: 21793 - protein, 208 aa, Glycine max
NQHHLHCRNSHQNPSTPATLFDLTIVPITLLTTSATRVLVFPSMAQRNQTNLLQRHHILSNLLLITHVYLLLTIIFYSLSSEQESTTFREATKHRCWQEAMKFEIQALVRNQTWDIVQTPLHVRPIGCKWVYKIKRGSDGSVECYKACLVAKGYSQIDGIDYLDIFSPVVKMRTIRVFLAIASISHWHLHNLMLVTLFYMGISTRRCI

SEQ ID NO: 21794 - protein, 165 aa, Glycine max
MAQRNQTNLLQRHHILSNLLLITHVYLLLTIIFYSLSSEQESTTFREATKHRCWQEAMKFEIQALVRNQTWDIVQTPLHVRPIGCKWVYKIKRGSDGSVECYKACLVAKGYSQIDGIDYLDIFSPVVKMRTIRVFLAIASISHWHLHNLMLVTLFYMGISTRRCI

SEQ ID NO: 21795 - protein, 108 aa, Glycine max
MKFEIQALVRNQTWDIVQTPLHVRPIGCKWVYKIKRGSDGSVECYKACLVAKGYSQIDGIDYLDIFSPVVKMRTIRVFLAIASISHWHLHNLMLVTLFYMGISTRRCI

SEQ ID NO: 21796 - DNA, 1343 bp, Glycine max
gatctgaagcagatgcgaagagacgttgctaagctacttgaggctggtcaagaagccaaggctagccttaaggtggagcatgttatgagagaggagaacatcatggctgctcaagacatcattcaactcttttgtgaacttattgctgcacgcattgcatttgttcaatcacaaaggaaatgtccccttgatttgaaggaagcaatatctagtgtatgttttgctgcaccaagatgtgcggatctgccagagttattgcaggttcagtcgctatttgcttccaaatacggaaaggattttgtatctgcagcaactgatctcacccctgactgcagtgttaatggccagttaatagagctgttgtcagttcaagcaccttcacaggaaaagaaactgaaacttctaaaagaaattgctgttgagcataagttagactgggatccaactgcctcagaaaccaagtcctttaaaaaacatgaggacttactgaatgaccccattcaattttgtagtcaatgtgtgtcaaaattgcctcttcctgaagaaaaacacactgaagttgatcttcaatcatcaagccaatctggatcacttggatcagacaaacataaacctaatacttcatttgataaaaaggacagtgaacagtctatgtcattcatctcaactccccttgataataagcttaccaagaaaaatggtgcacatgtgtcagatagcagctttgagaatccattctttgtaagtgttggtaataaatctgaaacagaaagggaacatttcactgaacaaaatgctgcaaatgactatgatgatggtggcataaataatgtggagtttgagcctgccttctcattctctcattcatcaagttttccttcatttgatatacccaaggaagattttggttcttccctacacaatcattctgcattggatgacaaatcctctcatcaccagcttaagagattgccttcactagatgattattcgggtttctcatacccaaacttattcaccccaaaaaactcaaataattggtctcatacattcagataataggaatttcagtcatgattgtgacaagcaattttaaaacaactacacatttttccatgtgactttcaagtcttgctcatgagtgggtattatgctgctgcataagttatttggactattgctcgaggtagtacgtattatggctggctttgcagtgtttaattgctatataaggagcctcttgttcatgaattattttgtggtaagcaagtgactatgcttgcaatgaatgtagaaatccaatattttatttgtatatattggaaacaaaagtagtcaacttc

SEQ ID NO: 21797 - protein, 352 aa, Glycine max
DLKQMRRDVAKLLEAGQEAKASLKVEHVMREENIMAAQDIIQLFCELIAARIAFVQSQRKCPLDLKEAISSVCFAAPRCADLPELLQVQSLFASKYGKDFVSAATDLTPDCSVNGQLIELLSVQAPSQEKKLKLLKEIAVEHKLDWDPTASETKSFKKHEDLLNDPIQFCSQCVSKLPLPEEKHTEVDLQSSSQSGSLGSDKHKPNTSFDKKDSEQSMSFISTPLDNKLTKKNGAHVSDSSFENPFFVSVGNKSETEREHFTEQNAANDYDDGGINNVEFEPAFSFSHSSSFPSFDIPKEDFGSSLHNHSALDDKSSHHQLKRLPSLDDYSGFSYPNLFTPKNSNNWSHTFR

SEQ ID NO: 21798 - protein, 348 aa, Glycine max
MRRDVAKLLEAGQEAKASLKVEHVMREENIMAAQDIIQLFCELIAARIAFVQSQRKCPLDLKEAISSVCFAAPRCADLPELLQVQSLFASKYGKDFVSAATDLTPDCSVNGQLIELLSVQAPSQEKKLKLLKEIAVEHKLDWDPTASETKSFKKHEDLLNDPIQFCSQCVSKLPLPEEKHTEVDLQSSSQSGSLGSDKHKPNTSFDKKDSEQSMSFISTPLDNKLTKKNGAHVSDSSFENPFFVSVGNKSETEREHFTEQNAANDYDDGGINNVEFEPAFSFSHSSSFPSFDIPKEDFGSSLHNHSALDDKSSHHQLKRLPSLDDYSGFSYPNLFTPKNSNNWSHTFR

SEQ ID NO: 21799 - protein, 324 aa, Glycine max
MREENIMAAQDIIQLFCELIAARIAFVQSQRKCPLDLKEAISSVCFAAPRCADLPELLQVQSLFASKYGKDFVSAATDLTPDCSVNGQLIELLSVQAPSQEKKLKLLKEIAVEHKLDWDPTASETKSFKKHEDLLNDPIQFCSQCVSKLPLPEEKHTEVDLQSSSQSGSLGSDKHKPNTSFDKKDSEQSMSFISTPLDNKLTKKNGAHVSDSSFENPFFVSVGNKSETEREHFTEQNAANDYDDGGINNVEFEPAFSFSHSSSFPSFDIPKEDFGSSLHNHSALDDKSSHHQLKRLPSLDDYSGFSYPNLFTPKNSNNWSHTFR

SEQ ID NO: 21800 - DNA, 1207 bp, Glycine max
attgaattgataaataatattgacaaaatacggcatgcaaatgttgttgagcttgttggatactgttcagagcatgatcaaaggcttctaatctatgagtactgcagtaatggatcactgtatgatgcactccactcagatgatgacttcaaaacaagactctcatggaattctcgtattcggatctcacttggggcagctagagccttagaatatctgcatgagcaatgtcagccacctgtagtacatagaaatttgaagtctgccaatattctccttgatgatgatctatccgtgcgggtctctgactgtggtctagctccattaatagcttcgggatcagtcagtcagctctcggggaacctgttaactgcctatggctatggagcaccagaatttgagtctggaatttacacataccaaagtgatgtgtacagctttggagtgatcatgttagaacttttgactggccgtcaatcgcacgatagggcacgagcacgaggggagcaatttctggtcagatgggcagttccccaacttcatgatatcgatgcattatcaaggatggttgatccttcattaaatggaaattacccagcaaaatcattgtcaaattttgcagacattatctctagatgccttcagtctgagccagaatttaggccagcaatgtccgaggtcgtcctatacttactaaatatgatgaggaaggagtctcagcaaagtgaatcaaatgaaaaatgagaaaggtagtgatatttgtatgtgaatttatcataatgtgcagagatgagagatccacttgctgaatatcaacttgtagagatatcatgttatctgaggggagcccaattagttgtctccatgcttcattatttcctactaacctattcaacattcacatgccaagttctaccaagagttttgtgcaatcaaacttaagagaatggtagtgaccaaccatcatatttgtagtcttatgatatctgataatttcatagtggactaaaatatgccatattagtattgtagcggcgtgctaactaacccatttgtttggtaatagtttccaaattcttgatagcaatgtaattccgtattggcatccttgtgctttttaggttcatccttcgtaataaaagtttgttgatcatttgtattctatcacagacaagcattgtaatttattgattgttctttgtacacc

SEQ ID NO: 21801 - protein, 247 aa, Glycine max
IELINNIDKIRHANVVELVGYCSEHDQRLLIYEYCSNGSLYDALHSDDDFKTRLSWNSRIRISLGAARALEYLHEQCQPPVVHRNLKSANILLDDDLSVRVSDCGLAPLIASGSVSQLSGNLLTAYGYGAPEFESGIYTYQSDVYSFGVIMLELLTGRQSHDRARARGEQFLVRWAVPQLHDIDALSRMVDPSLNGNYPAKSLSNFADIISRCLQSEPEFRPAMSEVVLYLLNMMRKESQQSESNEK

SEQ ID NO: 21802 - DNA, 1311 bp, Glycine max
ctaaaatcaaatgcaaaaagaagctagatggttttcaaatgagcatgacacgttccccttctaccactgatactttgccaagtgtaacgtttggccacgtagtctctcttcccacctccattaaaagttccagctcttcatcgagcgagctacacccaacttccattacaaaaccaaaacactcaagttaacttcaacacctttaattttctgaacgaaattcagccacagaatatcaaagggagcgaagatgagtcaggagcagccaaggcgcccccaaggccaagaccccatcaaatacggcgacgtttttgacgtctacggtgaccttgcacagatgcccattgcaccggaagatgctgccatgatgcaaagcgcggaagctcgagtactcggaaaaacccaacccggcggagcttcttccgtcatgcaatccgccgccacaaggaatgaacaggctggtcttgtcggtcaccaggacgtcaccgacatcaccggcgaccatggcgtcacagtcacagaaactacattccatggaagacgcataataaccgaggctgttggtggccaggtagtggaacagtatgtggagccaaatccagttgaggctggacgaaccagtgcaattaaggagagtgctataacaataggagaggcattggaggccacggcacagacggtgggtcacaagccggtggatcagagtgatgcctcagcgattcaggcggcggaggttagagcaacgggaagtaacgttataacgccgggaggacttgcggctatggctcaatcagctgctgcttataatgctgactgcaagcatgaccaggacaaggtcaagcttgccgacgttctgaccggagcaaccgccaaattgcccgcggacaaggccgcgacgctgcaagatgctgaaggggtggcgagtgctgaggccaggaacaaccccgatgccaccgccactcccggtggggtagccgcttctgttgcggctgctgctaggctcaatgaaaatgttaagtaaaaagtagtgttatgtatgttgataatcatacctgtgtttcatgatgtgtgaggagtggcctgttgatatatgtgttgtataactgtaagtggtgctgcaacatgttgtttctttcttttaagcttgtgagatatgttactacttttctggtatcttttaaggactctacttaaaggtgatgtatactatgctatggatgatgtctgtgccaccttatcagttagttgttaataatgtgtgttctagctaatcttgtaatttcttatttgcaatcattccagttagaaccc

SEQ ID NO: 21803 - protein, 256 aa, Glycine max
MSQEQPRRPQGQDPIKYGDVFDVYGDLAQMPIAPEDAAMMQSAEARVLGKTQPGGASSVMQSAATRNEQAGLVGHQDVTDITGDHGVTVTETTFHGRRIITEAVGGQVVEQYVEPNPVEAGRTSAIKESAITIGEALEATAQTVGHKPVDQSDASAIQAAEVRATGSNVITPGGLAAMAQSAAAYNADCKHDQDKVKLADVLTGATAKLPADKAATLQDAEGVASAEARNNPDATATPGGVAASVAAAARLNENVK

SEQ ID NO: 21804 - protein, 227 aa, Glycine max
MPIAPEDAAMMQSAEARVLGKTQPGGASSVMQSAATRNEQAGLVGHQDVTDITGDHGVTVTETTFHGRRIITEAVGGQVVEQYVEPNPVEAGRTSAIKESAITIGEALEATAQTVGHKPVDQSDASAIQAAEVRATGSNVITPGGLAAMAQSAAAYNADCKHDQDKVKLADVLTGATAKLPADKAATLQDAEGVASAEARNNPDATATPGGVAASVAAAARLNENVK

SEQ ID NO: 21805 - protein, 218 aa, Glycine max
MMQSAEARVLGKTQPGGASSVMQSAATRNEQAGLVGHQDVTDITGDHGVTVTETTFHGRRIITEAVGGQVVEQYVEPNPVEAGRTSAIKESAITIGEALEATAQTVGHKPVDQSDASAIQAAEVRATGSNVITPGGLAAMAQSAAAYNADCKHDQDKVKLADVLTGATAKLPADKAATLQDAEGVASAEARNNPDATATPGGVAASVAAAARLNENVK

SEQ ID NO: 21806 - DNA, 1245 bp, Glycine max
tcccgagcaacgaaagctaggtcacgggttcgaaaccatttttcgtgaaaataggtgtttttttgagttcgtcgttttgctcttcgtgttgttgaagtgcaacgccatggacccagatcagggcacttcaaaagcctggaagcccaagttcaaacccaggaatctcaaagcagtccgagctcccaaaaccgaagcggatgataagcgaaacgaagatagcgaagtgcctcgagctctctcgcgtcgacgacatgaaaatcctgcaaaacgcgagcctaaagtcgaaagaaaatctagcgtggaagttgcatttagtcttggaagttcatcatcacattccctcaggacatatggcacaagcaaatctatagatagtggcacaagcagtggttcaccatctaaatattttgccaatgaacaaattcgttcaattgctactgaggatcaaaatgatgcttctaatgcatctgccaggaaaatcaaaagagagtacaaggaaccatgggattatgaaaactcttactatccgactactcttcctttgaggaagccaaattctggagatccagaaattcttgatgagaaagaatttggtgaagctgctactagtgtggagtatgatgagaatactgttaattctgctgcagaactcgagatcttggagagtgaggaacaaaggatgtttttctttcagattcctactcctctgcctatggacaagcagagtaataaggggaaggagaaaattggtacatcaacagtatcgggagaggccacaaagtcaaagaatgccttggaagagttgccgaggggatatatgggcaaaatgctggtgtacaagagtggagcaattttatcttagagtgtattcccctgcaaattcatggagagatgagtacccaattccaagcaatgctattcggtgtggcaaggctgtgggacactactaatgccaccaccaaaccaacattgggatttttatttgaacagtgtcattcatttccattcatggcttaactcaagcctcttctcttgttctcttgtaccattattcatgttatgatgccatagattattatagagttattgatttctcctgtcctcttcctcctctcatcttcgtgttatgtccaaattcagctatatataagatcatctgtgtttggattatgatattcttcttatttaaactatttatttatttaaataggttcaagggacctgatgttaatgtgccatggaaac

SEQ ID NO: 21807 - protein, 286 aa, Glycine max
PEQRKLGHGFETIFRENRCFFEFVVLLFVLLKCNAMDPDQGTSKAWKPKFKPRNLKAVRAPKTEADDKRNEDSEVPRALSRRRHENPAKREPKVERKSSVEVAFSLGSSSSHSLRTYGTSKSIDSGTSSGSPSKYFANEQIRSIATEDQNDASNASARKIKREYKEPWDYENSYYPTTLPLRKPNSGDPEILDEKEFGEAATSVEYDENTVNSAAELEILESEEQRMFFFQIPTPLPMDKQSNKGKEKIGTSTVSGEATKSKNALEELPRGYMGKMLVYKSGAILS

SEQ ID NO: 21808 - protein, 251 aa, Glycine max
MDPDQGTSKAWKPKFKPRNLKAVRAPKTEADDKRNEDSEVPRALSRRRHENPAKREPKVERKSSVEVAFSLGSSSSHSLRTYGTSKSIDSGTSSGSPSKYFANEQIRSIATEDQNDASNASARKIKREYKEPWDYENSYYPTTLPLRKPNSGDPEILDEKEFGEAATSVEYDENTVNSAAELEILESEEQRMFFFQIPTPLPMDKQSNKGKEKIGTSTVSGEATKSKNALEELPRGYMGKMLVYKSGAILS

SEQ ID NO: 21809 - DNA, 1186 bp, Glycine max
gtgaccagtagctattttctcttttttctaaaaaaaaaaaacggacggctcctggaaaataacggaccaacccatccgtggggttgtaagttttgtcttttatttgcagaaacggaccaacgcttagggtttggtgttttccgaattagggtttgtgattggatcttcatcttcaccaatcaatcaccataaccataacttgttcttctctctcgccatgacggacggctcctggaatcggcagcagcagccgtttctcccttcttccgccatacttaaacgacctcgtactgaatacgatatttcaccttctggtctgacttcagggggcaatgagatgcataattatattggtcgaaatgatgaccatactggtcaccgaattctaaaggacactaaaacacttggatctgcttttgaccgctaccttcaaagcgctgggcttacttcgtttaactcgggggaagccagcgcaattggcagtgttggtttggaaaggggtgttggtggattgccacgccattcactaactgatcctgctgtcatggggcatcctggtggtggtcatgatcttgcacgaggtggacggaatgtcaattatggtgaccagttaccagtagatgcagcttccatgcctggacctgagactgtacctctacccccagatgcttcaagtactttatatgttgaaggtcttccatctgacagtacgagacgggaagtggctcatatttttcgcccttttgttggatatagagaagtaagacttgtgagcaaagaatccaaacatcgtggtggagatcctctaatcctttgttttgtggattttgcaaatccggcctgtgcagcaactgctctgagtgcattgcaaggttataaagttgatgaactcaatcctgagtctagtcacttgcggcttcagttttctcggtttcctggtcccagatctggacctggacctcgtggcaagaggtgaagtcgttcacccaagacatttaggttttatgcttgtcacaatgacttgaattcctttatccataccattctgggatgagaatattcacgaatcaatgttctccacaagcaaatataagtcaatttattgtgttgtataaatattgatatttttttaatgatcctagttagcatttgttttttgttggccaaataaaggtataattattac

SEQ ID NO: 21810 - protein, 252 aa, Glycine max
MTDGSWNRQQQPFLPSSAILKRPRTEYDISPSGLTSGGNEMHNYIGRNDDHTGHRILKDTKTLGSAFDRYLQSAGLTSFNSGEASAIGSVGLERGVGGLPRHSLTDPAVMGHPGGGHDLARGGRNVNYGDQLPVDAASMPGPETVPLPPDASSTLYVEGLPSDSTRREVAHIFRPFVGYREVRLVSKESKHRGGDPLILCFVDFANPACAATALSALQGYKVDELNPESSHLRLQFSRFPGPRSGPGPRGKR

SEQ ID NO: 21811 - protein, 212 aa, Glycine max
MHNYIGRNDDHTGHRILKDTKTLGSAFDRYLQSAGLTSFNSGEASAIGSVGLERGVGGLPRHSLTDPAVMGHPGGGHDLARGGRNVNYGDQLPVDAASMPGPETVPLPPDASSTLYVEGLPSDSTRREVAHIFRPFVGYREVRLVSKESKHRGGDPLILCFVDFANPACAATALSALQGYKVDELNPESSHLRLQFSRFPGPRSGPGPRGKR

SEQ ID NO: 21812 - protein, 143 aa, Glycine max
MGHPGGGHDLARGGRNVNYGDQLPVDAASMPGPETVPLPPDASSTLYVEGLPSDSTRREVAHIFRPFVGYREVRLVSKESKHRGGDPLILCFVDFANPACAATALSALQGYKVDELNPESSHLRLQFSRFPGPRSGPGPRGKR

SEQ ID NO: 21813 - DNA, 1396 bp, Glycine max
gaaatggtattgaagcagcagaatatgcagcagaattacagaggttggtgcggtatttgggagtgagcaatggcaatatgcaagaaggttctcttcgttgtgatgtaaatgtatcaatacgacctattgggcaatcaaagtttgggacaaaggttgaaataaaaaatttgaactcattttcatcagtgagcagagctattgattttgaaatttctaggcaggtgcaactccatagtcaaggccaggaagatcagatagtacaagaaactcgtttatgggaagaaggctctcagagaacaattacaatgaggaaaaaggaagggcttgctgattatcgatattttccagaaccagaccttccagcagtaatcctttctcaagaatatgttgatggtataaaaaattctttaccagagcttccagaaattaagcggagaagatatgagcagatgggcttaagcatgcaagatgttcttttcctggctaatgataaaaatattgcagaattttttgatgcaactcttgcaaaaggtgctgactcaaagctggttgccaactggataatgagtgatattgctgccttcatgaaaaatgaaaagttgaccataaatgagataaagcttacacctgaagagttgtctgagttgatagcttccattaaaggtggaaccattagtggcaagattgggaaggagatactatttgagctattagccaagggtggaactgtgaaggaactcatacaaaaaaaggacttggttcagatagcagatcctgttgagattgaaaaaatggtggacaaagttattgtggagaatccaaaacaggtagagcaatatcgaggaggcaaaactaaactacaaggttttttcgctggccaggtaatgaaattatctaaaggcaaggcaaatccaggtctccttaacaagatcctcttggagaaattgaattcaaagagctgatgataatatactgccaattggataagtgctgatccttgatagacaaattggaaatgaaaagtaagagttaaaggctcatttctagccaaagtgatttttgaaataaaacatatacgtacattgtgctaaaggatttctgcttcaacggttgagatttgagactgcagtgctctgtcctattttcttctgtaggggatacaagcattaaaaggataagctttccaaaccttgtgatttatatttacattcccaataaagttatggcttaaaagtttctttctatttggattatgtaacgacctcacaagagcacaaatgtatttggctgcatgcctgttattctgtacgatccatagattggtttgtgactttgtgtattacaaatatacgttgatttgttatggttaataaagccctttctatttttaagcttg

SEQ ID NO: 21814 - protein, 319 aa, Glycine max
NGIEAAEYAAELQRLVRYLGVSNGNMQEGSLRCDVNVSIRPIGQSKFGTKVEIKNLNSFSSVSRAIDFEISRQVQLHSQGQEDQIVQETRLWEEGSQRTITMRKKEGLADYRYFPEPDLPAVILSQEYVDGIKNSLPELPEIKRRRYEQMGLSMQDVLFLANDKNIAEFFDATLAKGADSKLVANWIMSDIAAFMKNEKLTINEIKLTPEELSELIASIKGGTISGKIGKEILFELLAKGGTVKELIQKKDLVQIADPVEIEKMVDKVIVENPKQVEQYRGGKTKLQGFFAGQVMKLSKGKANPGLLNKILLEKLNSKS

SEQ ID NO: 21815 - protein, 294 aa, Glycine max
MQEGSLRCDVNVSIRPIGQSKFGTKVEIKNLNSFSSVSRAIDFEISRQVQLHSQGQEDQIVQETRLWEEGSQRTITMRKKEGLADYRYFPEPDLPAVILSQEYVDGIKNSLPELPEIKRRRYEQMGLSMQDVLFLANDKNIAEFFDATLAKGADSKLVANWIMSDIAAFMKNEKLTINEIKLTPEELSELIASIKGGTISGKIGKEILFELLAKGGTVKELIQKKDLVQIADPVEIEKMVDKVIVENPKQVEQYRGGKTKLQGFFAGQVMKLSKGKANPGLLNKILLEKLNSKS

SEQ ID NO: 21816 - protein, 218 aa, Glycine max
MRKKEGLADYRYFPEPDLPAVILSQEYVDGIKNSLPELPEIKRRRYEQMGLSMQDVLFLANDKNIAEFFDATLAKGADSKLVANWIMSDIAAFMKNEKLTINEIKLTPEELSELIASIKGGTISGKIGKEILFELLAKGGTVKELIQKKDLVQIADPVEIEKMVDKVIVENPKQVEQYRGGKTKLQGFFAGQVMKLSKGKANPGLLNKILLEKLNSKS

SEQ ID NO: 21817 - DNA, 1355 bp, Glycine max
aaaacattgtaccctcatattgtgatgcagtttgaaactgattatgttgttgaaagtgaattggcaataaatgaagatctttataacacaaagtacaaggacaagttggatctgtcttataaggggcttattcatgaagtgttcaccacaatattacgtggtttgtctggtgccaaagtgaccaagcccggaaaatttaggagttgtcaagatggctatgcagtgaaatcatctttgaaagctgaagatggaattctgtatccccttgagaagagcttcttctttctacctaaacctcccactcttattcttcatgaagagattgactatgtggaatttgagcgacatgctgctggtgggtccaatatgcattattttgaccttcttatcagactaaaatctgaacaagagcatctcttccgtaatattcagagaaatgagtaccacaatttgtatgaatttatcagttcaaagggcttgaaaattttgaacttaggagatgcacaacctactgttggtataaagaaggttcttgagaatgatgatgatgatgctgttgatccacatcttgaacgcatcaaaaatgaagctggtggagatgaaagtgatgaggaggattccgattttgttgctgacaaggatgatgaaggttctcctactgatgattctggggcagacgattctgatgccactgatagtggtgatgagaaagagaagcctgccaaaaaggaatcaaagaaggatctgccttctaaggcatctacttctaaaaagaaatcaaaagatgatgaagatggaaagaagagaaaacagaagaagagaaaggacccaaatgcacccaagagggcaatgtctggtttcatgttcttttctaaattggaaagagagaatctaaagaaaactaatcctggaatttcatttacggatgtgtcaagagtacttggagagaaatggaaaaagttgtcagtggaagagaaggaaccatacgaggcaaaggcacgtgaagataaaaaacgttacaaggatgagattagtggctacaagaatccgcaacccatgaatattgattcaggaaatgaatccgacagtgcctaagctccgtatatttcttactggagtggtgatgacatctactctcatgctccgtaagttggcacatttatgctcttggaaatggcttgataacttgtgaacatgctcaagagttttgtgctctgttggtttgcatggctatagggaaggcagggacggtagagcttgatgtgttgagtaggttcctatgcttaattgaattagtggtctttgtgaattgtgacccaattttcgctaaatgacagtgcctctttttagagttc

SEQ ID NO: 21818 - protein, 364 aa, Glycine max
KTLYPHIVMQFETDYVVESELAINEDLYNTKYKDKLDLSYKGLIHEVFTTILRGLSGAKVTKPGKFRSCQDGYAVKSSLKAEDGILYPLEKSFFFLPKPPTLILHEEIDYVEFERHAAGGSNMHYFDLLIRLKSEQEHLFRNIQRNEYHNLYEFISSKGLKILNLGDAQPTVGIKKVLENDDDDAVDPHLERIKNEAGGDESDEEDSDFVADKDDEGSPTDDSGADDSDATDSGDEKEKPAKKESKKDLPSKASTSKKKSKDDEDGKKRKQKKRKDPNAPKRAMSGFMFFSKLERENLKKTNPGISFTDVSRVLGEKWKKLSVEEKEPYEAKAREDKKRYKDEISGYKNPQPMNIDSGNESDSA

SEQ ID NO: 21819 - protein, 356 aa, Glycine max
MQFETDYVVESELAINEDLYNTKYKDKLDLSYKGLIHEVFTTILRGLSGAKVTKPGKFRSCQDGYAVKSSLKAEDGILYPLEKSFFFLPKPPTLILHEEIDYVEFERHAAGGSNMHYFDLLIRLKSEQEHLFRNIQRNEYHNLYEFISSKGLKILNLGDAQPTVGIKKVLENDDDDAVDPHLERIKNEAGGDESDEEDSDFVADKDDEGSPTDDSGADDSDATDSGDEKEKPAKKESKKDLPSKASTSKKKSKDDEDGKKRKQKKRKDPNAPKRAMSGFMFFSKLERENLKKTNPGISFTDVSRVLGEKWKKLSVEEKEPYEAKAREDKKRYKDEISGYKNPQPMNIDSGNESDSA

SEQ ID NO: 21820 - protein, 242 aa, Glycine max
MHYFDLLIRLKSEQEHLFRNIQRNEYHNLYEFISSKGLKILNLGDAQPTVGIKKVLENDDDDAVDPHLERIKNEAGGDESDEEDSDFVADKDDEGSPTDDSGADDSDATDSGDEKEKPAKKESKKDLPSKASTSKKKSKDDEDGKKRKQKKRKDPNAPKRAMSGFMFFSKLERENLKKTNPGISFTDVSRVLGEKWKKLSVEEKEPYEAKAREDKKRYKDEISGYKNPQPMNIDSGNESDSA

SEQ ID NO: 21821 - DNA, 1867 bp, Glycine max
actgccccaacctattcttggagactgttagactgccaatgttaacagttctgaagcttcacagttgtgatggcatcactgcagcctcaatggctgcaatatctcacagttatatgttggaggttttggagcttgataattgtagcctattgacatcagtgtctttagaccttccccgcttgcagaatattagattggtacactgtcgcaaatttgctgatttgaacttgatgaccctaacgttgtcgtctatcttggtgtccaattgccctgtgctccatcgtatcaacatcacttcaaattcacttcaaaaattaacaataccaaagcaggacagtttaaccacattagctctgcaatgccaatctttacaagaagtggatctctctgagtgtgaatctttgaataactctgtatgcaatgtttttaatgatggtggaggttgcccaatgttgaaatcgttagttcttggtaattgtgagagtttgacatcagttcagttcatcagtacctctctaatcagtctttcccttggtggttgccgtgcaataactaatcttgaactcacatgccctaatctagagaaagttattttggatggctgtgatcatttggaaagagcatcattttgtccagttggtcttttatctctcaatttaggaatatgtccaaaattgaacacactcagcattgaagcaccgtttatggtttcacttgagttgaaaggatgtggtgtactatctgaagcattcattaattgtccactcttagcatctctcgatgcttccttttgcagccaactaacggatggctgcttgtctgcaacaactgtctcatgcccactgattgaatcattgatattaatgtcatgctcatcaattggttcagagggtcttcgatctctgtattgtcttccaaatttgactgttcttgacttatcatacactttcttggtgaacatgcagcctgtctttgattcttgtttgcaactaaaggttttaaagctgcaagcatgcaaatatctcactgaaacatcacttgaacctctttacaaaggaggtgctttgccagcacttcaggagttggacttgtcttatggaactctctgtcaatcagccatagatgagcttcttgcttgctgcacaaacctaactcatgtgagtttgaatggctgtgtgaatatgcatgatttgaattggggaagcagtcgtgggcaaagtgacaatttccctgctgtaaacaccccatcctgggcaagttctaatgagattatctctgaatcaagtgagcactctgctcgcttactacaaaacctctactgtgttggatgtccaaatattaggaaggttgtcattccattgagggaaaattgttttcatttgttatttttaaacctttcgctctcggcaaatttgaaagtggttgatgtcacatgtctcaacctatgctttcttaatttaagcaattgttcctctttggaaattttgaagttagagtgtccaaaattgaccagtctattccttcagtcttgcaatattgacgatgaagctgttgaagctgctatatcaaaatgcactatgctggagactcttgacgttcgcttttgtccaaagataagctcaataagcatgggaagattacgcacaatttgttcaagtttgaagcgaatatttagcagttagtcaactctgactatgatcaaggatataaaaaaaatttcctagtgcttcacttggatcgaaagcgcgcttggtaataaatttgattatttcttcgtgtattgtaaatggctaaattttaaatttgtttttttgtttggcatatggaaatccgttgtgtatttgcaataatttatctttgttgttgc

SEQ ID NO: 21822 - protein, 559 aa, Glycine max
CPNLFLETVRLPMLTVLKLHSCDGITAASMAAISHSYMLEVLELDNCSLLTSVSLDLPRLQNIRLVHCRKFADLNLMTLTLSSILVSNCPVLHRINITSNSLQKLTIPKQDSLTTLALQCQSLQEVDLSECESLNNSVCNVFNDGGGCPMLKSLVLGNCESLTSVQFISTSLISLSLGGCRAITNLELTCPNLEKVILDGCDHLERASFCPVGLLSLNLGICPKLNTLSIEAPFMVSLELKGCGVLSEAFINCPLLASLDASFCSQLTDGCLSATTVSCPLIESLILMSCSSIGSEGLRSLYCLPNLTVLDLSYTFLVNMQPVFDSCLQLKVLKLQACKYLTETSLEPLYKGGALPALQELDLSYGTLCQSAIDELLACCTNLTHVSLNGCVNMHDLNWGSSRGQSDNFPAVNTPSWASSNEIISESSEHSARLLQNLYCVGCPNIRKVVIPLRENCFHLLFLNLSLSANLKVVDVTCLNLCFLNLSNCSSLEILKLECPKLTSLFLQSCNIDDEAVEAAISKCTMLETLDVRFCPKISSISMGRLRTICSSLKRIFSS

SEQ ID NO: 21823 - protein, 547 aa, Glycine max
MLTVLKLHSCDGITAASMAAISHSYMLEVLELDNCSLLTSVSLDLPRLQNIRLVHCRKFADLNLMTLTLSSILVSNCPVLHRINITSNSLQKLTIPKQDSLTTLALQCQSLQEVDLSECESLNNSVCNVFNDGGGCPMLKSLVLGNCESLTSVQFISTSLISLSLGGCRAITNLELTCPNLEKVILDGCDHLERASFCPVGLLSLNLGICPKLNTLSIEAPFMVSLELKGCGVLSEAFINCPLLASLDASFCSQLTDGCLSATTVSCPLIESLILMSCSSIGSEGLRSLYCLPNLTVLDLSYTFLVNMQPVFDSCLQLKVLKLQACKYLTETSLEPLYKGGALPALQELDLSYGTLCQSAIDELLACCTNLTHVSLNGCVNMHDLNWGSSRGQSDNFPAVNTPSWASSNEIISESSEHSARLLQNLYCVGCPNIRKVVIPLRENCFHLLFLNLSLSANLKVVDVTCLNLCFLNLSNCSSLEILKLECPKLTSLFLQSCNIDDEAVEAAISKCTMLETLDVRFCPKISSISMGRLRTICSSLKRIFSS

SEQ ID NO: 21824 - protein, 530 aa, Glycine max
MAAISHSYMLEVLELDNCSLLTSVSLDLPRLQNIRLVHCRKFADLNLMTLTLSSILVSNCPVLHRINITSNSLQKLTIPKQDSLTTLALQCQSLQEVDLSECESLNNSVCNVFNDGGGCPMLKSLVLGNCESLTSVQFISTSLISLSLGGCRAITNLELTCPNLEKVILDGCDHLERASFCPVGLLSLNLGICPKLNTLSIEAPFMVSLELKGCGVLSEAFINCPLLASLDASFCSQLTDGCLSATTVSCPLIESLILMSCSSIGSEGLRSLYCLPNLTVLDLSYTFLVNMQPVFDSCLQLKVLKLQACKYLTETSLEPLYKGGALPALQELDLSYGTLCQSAIDELLACCTNLTHVSLNGCVNMHDLNWGSSRGQSDNFPAVNTPSWASSNEIISESSEHSARLLQNLYCVGCPNIRKVVIPLRENCFHLLFLNLSLSANLKVVDVTCLNLCFLNLSNCSSLEILKLECPKLTSLFLQSCNIDDEAVEAAISKCTMLETLDVRFCPKISSISMGRLRTICSSLKRIFSS

SEQ ID NO: 21825 - DNA, 1325 bp, Glycine max
atatgcaaaacagctcggtgataacagctggaatcacaacaaaagtcaacaacagacaccagagacacaatttgcttcatgctcaaatcttctttcatttgttaatacgaattacacaagtgaattgggactagtgaagcctaaggtggagatggcgtgtcctaaaattgacaacaatgctcttgcagacatgttgatctctcaaggaaccttaggaaatcaaaactatattttcaaggctagccaagagaccaaaaagattaaaacacgtcctaaactttctcaacctcaagaccacataatagctgaaaggaagcgaagagagaagctcagccaacggttcattgctctatctgctcttgttccgggcctaaagaagatggacaaagcttcggttcttggagaagctataaagtatttgaagcaaatgcaagagaaagtgagtgctcttgaggaggaacagaacaggaagagaactgtggaatctgtggtaattgtgaagaaatctcagctatctagtgatgccgaagactcttcttcagagactggtggtacatttgtcgaggcactacctgaaattgaagcaagattttgggaaagaaatgtcctcataagaatacattgtgagaagaataaaggagtcatagagaaaacaatcagcgaaattgagaaactccatctaaaagtcatcaatagcagtgccttgacatttgggagtttcatcctggatataaccattattgctcagatggatatggaattttgcatgacagtgaaggatcttgtgagaagtttacgctcagctttttcatatttcgtgtgaagagttatgcatttttcggtcgtccccgaaaggtacatgaagaataggagtgcaatcaatttatatatagcagttcatatatcaactatattatcaagtttaagttcttcaataataattctgtttccaaggccggtctgcaatgtctgccatccacaccatgtttgctctgaggttcatttttgcagaagggttttttgtagcgatattttcttcttgcatggtcaacttgttgacagtgttatattgtcacactcacaccctactgtttcaagagtgaacgtagagcttgttaggcattttttggcaggaagttggaaagttcaactacctgttttccatctatttcttacctaaatcctgacagacaggcctttgttgagtgacttattatcttctttttttttttcaagtgttctcgagttacttttttatttgaaacaaaatatgcttgtaaaagtttggttgaaattggtagtgatggaataatcgtactttttat

SEQ ID NO: 21826 - protein, 273 aa, Glycine max
YAKQLGDNSWNHNKSQQQTPETQFASCSNLLSFVNTNYTSELGLVKPKVEMACPKIDNNALADMLISQGTLGNQNYIFKASQETKKIKTRPKLSQPQDHIIAERKRREKLSQRFIALSALVPGLKKMDKASVLGEAIKYLKQMQEKVSALEEEQNRKRTVESVVIVKKSQLSSDAEDSSSETGGTFVEALPEIEARFWERNVLIRIHCEKNKGVIEKTISEIEKLHLKVINSSALTFGSFILDITIIAQMDMEFCMTVKDLVRSLRSAFSYFV

SEQ ID NO: 21827 - protein, 223 aa, Glycine max
MACPKIDNNALADMLISQGTLGNQNYIFKASQETKKIKTRPKLSQPQDHIIAERKRREKLSQRFIALSALVPGLKKMDKASVLGEAIKYLKQMQEKVSALEEEQNRKRTVESVVIVKKSQLSSDAEDSSSETGGTFVEALPEIEARFWERNVLIRIHCEKNKGVIEKTISEIEKLHLKVINSSALTFGSFILDITIIAQMDMEFCMTVKDLVRSLRSAFSYFV

SEQ ID NO: 21828 - protein, 210 aa, Glycine max
MLISQGTLGNQNYIFKASQETKKIKTRPKLSQPQDHIIAERKRREKLSQRFIALSALVPGLKKMDKASVLGEAIKYLKQMQEKVSALEEEQNRKRTVESVVIVKKSQLSSDAEDSSSETGGTFVEALPEIEARFWERNVLIRIHCEKNKGVIEKTISEIEKLHLKVINSSALTFGSFILDITIIAQMDMEFCMTVKDLVRSLRSAFSYFV

SEQ ID NO: 21829 - DNA, 1247 bp, Glycine max
acaacacaaacattctctccattggtccttaaacactcatcagtcatcaccatggccaagctagttttttccctttgttttctgcttttcagtggctgctgcttcgctttcagttccagagagcagcctcagcaaaacgagtgccagatccaaaaactcaatgccctcaaaccggataaccgtatagagtcagaaggtgggttcattgagacatggaaccctaacaacaagccattccagtgtgccggtgttgccctctctcgctgcaccctcaaccgcaacgcccttcgtagaccttcctacaccaacggtccccaggaaatctacatccaacaaggtaagggtatttttggcatgatatacccgggttgtcctagcacatttgaagagcctcaacaacctcaacaaagaggacaaagcagcagaccacaagaccgtcaccagaagatctataacttcagagagggtgatttgatcgcagtgcctactggtgttgcatggtggatgtacaacaatgaagacactcctgttgttgccgtttctattattgacaccaacagcttggagaaccagctcgaccagatgcctaggagattctatcttgctgggaaccaagagcaagagtttctaaaatatcagcagcagcagcaaggaggttcccaaagccagaaaggaaagcatcagcaagaagaagaaaacgaaggaggcagcatattgagtggcttcaccctggaattcttggaacatgcattcagcgtggacaaggcagatagcgaaaaacctacaaggagagaacgaagggggaagacaagggaggccattgtgacagtgaaaggaggtctgagcgtgataaaaccacccacggacgagcagcaacaaagaccccaggaagaggaagaagaagaagaggatgagaagccacagtgcaagggtaaagacaaacactgccaacgcccccgaggaagccaaagcaaaagcagaagaaatggcattgacgagaccatatgcaccatgagacttcgccacaacattggccagacttcatcacctgacatctacaaccctcaagccggtagcgtcacaaccgccaccagccttgacttcccagccctctcgtggctcagactcagtgctgagtttggatctctccgcaagaatgcaatgttcgtgccacactacaacctgaacgcgaacagcataatatacgcattgaatggacgggcattgatacaagtggtgaattgcaa

SEQ ID NO: 21830 - protein, 415 aa, Glycine max
TTQTFSPLVLKHSSVITMAKLVFSLCFLLFSGCCFAFSSREQPQQNECQIQKLNALKPDNRIESEGGFIETWNPNNKPFQCAGVALSRCTLNRNALRRPSYTNGPQEIYIQQGKGIFGMIYPGCPSTFEEPQQPQQRGQSSRPQDRHQKIYNFREGDLIAVPTGVAWWMYNNEDTPVVAVSIIDTNSLENQLDQMPRRFYLAGNQEQEFLKYQQQQQGGSQSQKGKHQQEEENEGGSILSGFTLEFLEHAFSVDKADSEKPTRRERRGKTREAIVTVKGGLSVIKPPTDEQQQRPQEEEEEEEDEKPQCKGKDKHCQRPRGSQSKSRRNGIDETICTMRLRHNIGQTSSPDIYNPQAGSVTTATSLDFPALSWLRLSAEFGSLRKNAMFVPHYNLNANSIIYALNGRALIQVVNC

SEQ ID NO: 21831 - protein, 398 aa, Glycine max
MAKLVFSLCFLLFSGCCFAFSSREQPQQNECQIQKLNALKPDNRIESEGGFIETWNPNNKPFQCAGVALSRCTLNRNALRRPSYTNGPQEIYIQQGKGIFGMIYPGCPSTFEEPQQPQQRGQSSRPQDRHQKIYNFREGDLIAVPTGVAWWMYNNEDTPVVAVSIIDTNSLENQLDQMPRRFYLAGNQEQEFLKYQQQQQGGSQSQKGKHQQEEENEGGSILSGFTLEFLEHAFSVDKADSEKPTRRERRGKTREAIVTVKGGLSVIKPPTDEQQQRPQEEEEEEEDEKPQCKGKDKHCQRPRGSQSKSRRNGIDETICTMRLRHNIGQTSSPDIYNPQAGSVTTATSLDFPALSWLRLSAEFGSLRKNAMFVPHYNLNANSIIYALNGRALIQVVNC

SEQ ID NO: 21832 - protein, 297 aa, Glycine max
MIYPGCPSTFEEPQQPQQRGQSSRPQDRHQKIYNFREGDLIAVPTGVAWWMYNNEDTPVVAVSIIDTNSLENQLDQMPRRFYLAGNQEQEFLKYQQQQQGGSQSQKGKHQQEEENEGGSILSGFTLEFLEHAFSVDKADSEKPTRRERRGKTREAIVTVKGGLSVIKPPTDEQQQRPQEEEEEEEDEKPQCKGKDKHCQRPRGSQSKSRRNGIDETICTMRLRHNIGQTSSPDIYNPQAGSVTTATSLDFPALSWLRLSAEFGSLRKNAMFVPHYNLNANSIIYALNGRALIQVVNC

SEQ ID NO: 21833 - DNA, 1576 bp, Glycine max
aagataaattgggccgatttggacacacaccccgtcatcttcttcttgttctgtgccgcactctcgctcgcagttacagaaaccatgacgacggtggtgcccacctccgaagaagacgctgccctctctgttgtccgattcgcctctgaactcgcctgggccgatgccggtcccgaggttgctgagcctcaagttagtagactctgcatggaggctgaagagtttatcgttatgggaaaatggttggaactagcatcattgatgattacctctgctgaattggttttctcaaaggtttctgaaacagatatagagtccatcttcactatcatctgcaatcttgtgaccaagactgagaatccagatgaagtgatggagattgtaaaagttataactgcaaaaataattcagcagccaaacgaaaagcctgctgtgcgattgaagactttgatcaatctgtacaatcttttggagactccatactgccagttttatgtctacatgaaggcattgaatttagctgttaatgggaaagtcacagaatacattataccttcattcaaaaagatagatagcttcttgaaagagtggaaaattgggatacctgaacagagagagctctttctcactatctctaatattttgaaggaaaataaaagcatgtcaaaggatgcttttaagttcctgagcaattatctgtcgaccttttcgggagaagatgcacatgttttgagtgaagccaaggaggaggccgcacgtgcaattgaggaatttgtcagagctcctgacatatatcagtgtgatttgcttgacttgcctgctgttgggcaactggagaaggatgccaaatatgctctgttatatcagcttcttaagatttttcttacccagaggctagatgcatacttagaatatcaagctgcaaattccaccttgttgaaaaactatggccttgtgcctgaagaatgcatttccaaaatgaggctgatgtcattgatggatcttacctctgatggttctggccaaattccatatgaacttattagggacacacttcagatcaatgatgatgaagtggaactatgggtggttagagcaataactgccaagttaattgactgtaagatggaccaaatgcatcaatcagtagttgttagtcatcctactgatcgtgtgtttggtcagcaccaatggcaagcactgagaacaaagctagcgacatggagaggaaacattgcaaatgttatcagtaccattcaggccaacaaaataacggaggatgggtctcaggcagcccaaggtttggtagttaggtgagaggacgttttcaactgaagcaattctctgaagcatctagattttatcccggtgaagttttttttaatcttaaaacagagaaggaaaaaattttactccccaactttgtgacagaaccattttgttttaagcttttccattttgatgttatgtttgaccagcctcacgatagcgttgagtatattatacctgtggactgttgtcctagtagctcctaggaatcaatatacagctatttaacttttagtgttttctgaac

SEQ ID NO: 21834 - protein, 438 aa, Glycine max
KINWADLDTHPVIFFLFCAALSLAVTETMTTVVPTSEEDAALSVVRFASELAWADAGPEVAEPQVSRLCMEAEEFIVMGKWLELASLMITSAELVFSKVSETDIESIFTIICNLVTKTENPDEVMEIVKVITAKIIQQPNEKPAVRLKTLINLYNLLETPYCQFYVYMKALNLAVNGKVTEYIIPSFKKIDSFLKEWKIGIPEQRELFLTISNILKENKSMSKDAFKFLSNYLSTFSGEDAHVLSEAKEEAARAIEEFVRAPDIYQCDLLDLPAVGQLEKDAKYALLYQLLKIFLTQRLDAYLEYQAANSTLLKNYGLVPEECISKMRLMSLMDLTSDGSGQIPYELIRDTLQINDDEVELWVVRAITAKLIDCKMDQMHQSVVVSHPTDRVFGQHQWQALRTKLATWRGNIANVISTIQANKITEDGSQAAQGLVVR

SEQ ID NO: 21835 - protein, 410 aa, Glycine max
MTTVVPTSEEDAALSVVRFASELAWADAGPEVAEPQVSRLCMEAEEFIVMGKWLELASLMITSAELVFSKVSETDIESIFTIICNLVTKTENPDEVMEIVKVITAKIIQQPNEKPAVRLKTLINLYNLLETPYCQFYVYMKALNLAVNGKVTEYIIPSFKKIDSFLKEWKIGIPEQRELFLTISNILKENKSMSKDAFKFLSNYLSTFSGEDAHVLSEAKEEAARAIEEFVRAPDIYQCDLLDLPAVGQLEKDAKYALLYQLLKIFLTQRLDAYLEYQAANSTLLKNYGLVPEECISKMRLMSLMDLTSDGSGQIPYELIRDTLQINDDEVELWVVRAITAKLIDCKMDQMHQSVVVSHPTDRVFGQHQWQALRTKLATWRGNIANVISTIQANKITEDGSQAAQGLVVR

SEQ ID NO: 21836 - protein, 369 aa, Glycine max
MEAEEFIVMGKWLELASLMITSAELVFSKVSETDIESIFTIICNLVTKTENPDEVMEIVKVITAKIIQQPNEKPAVRLKTLINLYNLLETPYCQFYVYMKALNLAVNGKVTEYIIPSFKKIDSFLKEWKIGIPEQRELFLTISNILKENKSMSKDAFKFLSNYLSTFSGEDAHVLSEAKEEAARAIEEFVRAPDIYQCDLLDLPAVGQLEKDAKYALLYQLLKIFLTQRLDAYLEYQAANSTLLKNYGLVPEECISKMRLMSLMDLTSDGSGQIPYELIRDTLQINDDEVELWVVRAITAKLIDCKMDQMHQSVVVSHPTDRVFGQHQWQALRTKLATWRGNIANVISTIQANKITEDGSQAAQGLVVR

SEQ ID NO: 21837 - DNA, 1722 bp, Glycine max
atcccggaaatggagggtggtggtgacgttaagggttgggcgttggagtttcttctccgggctcagaacccagtcgttcccagtaacctaattaagaaagtcattctaatagtccccctttcagacttttattccaggctcaagaagacgcttcttctccgagcccttcaagatcacttgttcgctgtctctgtccctgagtccgttctcgaaaccctcgagcaagtcgaggaactccaccgcctcggcgatgacgacgacggagctctggtcaccacctcatccgccatgagcgccgcctactgtgccgtcgcggtggagtgcactctcaagcacctgctgctggagctacacaacaaccctgcttatctcggcgcggtgaacaggatatggcgcggtagggttcggctcatgagcggttccggggaggggagcctcctgctctcgccagagctggagcggtggagaaccgacattgaagcttcccttctggattcgtcggtgagggagaggttggcctccattgatacaagaagggatgccgtcttcaagctccgggattatttgaaggaagcttggaccgatttggggccttcatttcttgagcgagcggcgttggcgcatataaacaacaatgccctagccgcgaatcactctgaggattctcaacagccggagagagaaattgagaagtgcactgctgctcctgctgaggaagtgcatccctcaacagatgttgagatccaaaaggttggggagtgcggttctgtggagttgcaaaagttggctgaggattctctacttgatttgttggaagtgaatgaggaggcatcgatggaagaacaaagtagagatgtagatgtaccttgcccacatgctattaatgacaatgaggctgatctgatggaaaaggatcaaacttctgccgaggaagtgcttccctcaacaactgttgaggtccaaaaggttagggaatgtggttccgtggagttgcaaaagttggctaaggattctctacttaattcgttggaagtgaatgaggaggcacatattgaaagtagagatgcagatgtaccttgcccacttgttattagtaacaatgaggctgatctgatggaaaaggatcaaacttctatccctcataatcatgaccataagccaagtttaatggaaagaaatagttctgctcgtatttatgagtgggatgattcaatagatggcttggaggatggaacatcagatcatgcaactagatttaatttgcctagtcccaaggggagaaaagtttctccattgaataagtacaaacctgcaaacattacaaagaggagaaaagtgaaaaaatggagtcagttggaagaggagactctaaggactgctgtagacaagtttggcaggggaaattggaagttaatcctagattctcacaaagatatatttgaagagagaactgaagttgatttgaaggacaagtggagaaatatgacgtaatatgggtgcaaatgaatcacaatgtggaatattgcagagggcggtagatcgtgtggatatctttttggcttaagcagagtctacttcctaaatttctttaatttagctcttcaaactattgtctcctaatttgatgtctgtggttgtattttggattaagtaatattcatactattttcatgtttgtacttttaatgacactaacgatggtaaaatgacaggagtttatat

SEQ ID NO: 21838 - protein, 496 aa, Glycine max
IPEMEGGGDVKGWALEFLLRAQNPVVPSNLIKKVILIVPLSDFYSRLKKTLLLRALQDHLFAVSVPESVLETLEQVEELHRLGDDDDGALVTTSSAMSAAYCAVAVECTLKHLLLELHNNPAYLGAVNRIWRGRVRLMSGSGEGSLLLSPELERWRTDIEASLLDSSVRERLASIDTRRDAVFKLRDYLKEAWTDLGPSFLERAALAHINNNALAANHSEDSQQPEREIEKCTAAPAEEVHPSTDVEIQKVGECGSVELQKLAEDSLLDLLEVNEEASMEEQSRDVDVPCPHAINDNEADLMEKDQTSAEEVLPSTTVEVQKVRECGSVELQKLAKDSLLNSLEVNEEAHIESRDADVPCPLVISNNEADLMEKDQTSIPHNHDHKPSLMERNSSARIYEWDDSIDGLEDGTSDHATRFNLPSPKGRKVSPLNKYKPANITKRRKVKKWSQLEEETLRTAVDKFGRGNWKLILDSHKDIFEERTEVDLKDKWRNMT

SEQ ID NO: 21839 - protein, 493 aa, Glycine max
MEGGGDVKGWALEFLLRAQNPVVPSNLIKKVILIVPLSDFYSRLKKTLLLRALQDHLFAVSVPESVLETLEQVEELHRLGDDDDGALVTTSSAMSAAYCAVAVECTLKHLLLELHNNPAYLGAVNRIWRGRVRLMSGSGEGSLLLSPELERWRTDIEASLLDSSVRERLASIDTRRDAVFKLRDYLKEAWTDLGPSFLERAALAHINNNALAANHSEDSQQPEREIEKCTAAPAEEVHPSTDVEIQKVGECGSVELQKLAEDSLLDLLEVNEEASMEEQSRDVDVPCPHAINDNEADLMEKDQTSAEEVLPSTTVEVQKVRECGSVELQKLAKDSLLNSLEVNEEAHIESRDADVPCPLVISNNEADLMEKDQTSIPHNHDHKPSLMERNSSARIYEWDDSIDGLEDGTSDHATRFNLPSPKGRKVSPLNKYKPANITKRRKVKKWSQLEEETLRTAVDKFGRGNWKLILDSHKDIFEERTEVDLKDKWRNMT

SEQ ID NO: 21840 - protein, 400 aa, Glycine max
MSAAYCAVAVECTLKHLLLELHNNPAYLGAVNRIWRGRVRLMSGSGEGSLLLSPELERWRTDIEASLLDSSVRERLASIDTRRDAVFKLRDYLKEAWTDLGPSFLERAALAHINNNALAANHSEDSQQPEREIEKCTAAPAEEVHPSTDVEIQKVGECGSVELQKLAEDSLLDLLEVNEEASMEEQSRDVDVPCPHAINDNEADLMEKDQTSAEEVLPSTTVEVQKVRECGSVELQKLAKDSLLNSLEVNEEAHIESRDADVPCPLVISNNEADLMEKDQTSIPHNHDHKPSLMERNSSARIYEWDDSIDGLEDGTSDHATRFNLPSPKGRKVSPLNKYKPANITKRRKVKKWSQLEEETLRTAVDKFGRGNWKLILDSHKDIFEERTEVDLKDKWRNMT

SEQ ID NO: 21841 - DNA, 1181 bp, Glycine max
ttttttctctctccttctactctccccctctttctcattttccggtgacatggagtccaagtggggtggcgcccccgccagcatcatggcggcgaatttcgacgacttcaagtggatcgcctccatgttcgatcccggaaacgacgacgtcaagcccttctccgacgcagctttccaaaaccaggatgcagtaactgcattttcaacttgtggtggagtaacagatgatacccttgttcgttcccaaaacctcactcccattcaatccaccatttctgcaactattgattctcagtcttccttttgtggtaccgttgggagcccagtgtctgctaacaaaccaaacgtgagagataatcaagtaaaaggggtcgccaccactacaagtggttcctcacgtgagccatctgatgaggatgatgaagcaggtccttgtgaacaaagcacaaacgctattgatatgaagcgccttagaaggaaggtttctaatagagagtctgcaaggaggtccaggagaagaaaacaagcccatttggctgacctggagtggcaagttgaacggctgagactggaaaatgcaaacctatttaagcagcttacagatgccagccaacaatttcgtgacgctgatacgaataaccgagtcctaaaatcagatgtcgaagctttgagagctaaggtgaaattagctgaggatatggtcactcgtggcacactcacccctatcaacaaccagattcttcaaaatcagagttcactaaacaccccacctcaactcaacacaaataatctacaccgcatgacacatgtttcgccaaccatcaccgtccgtgggaatgatgatgcttcatatggaggtggaattacagttagtggacaaaattcacctcttggtgggcttggaaacttggataatattccttgcagcgatttcaatagtggaatcaatagtaataatgctgtgagctctatgactagcatgtggccttaacgttattcttattgcaccacatgacttgtgttgtagtagtactgtccggttagatccaactttatgcatgtcttggttttattagatttgtggttatattgtggaaaatattatataggtaacaaaaatgtggtatctacgtgtaagaatccatctagaatatttagcatggtgtgtgttaaatggtttc

SEQ ID NO: 21842 - protein, 329 aa, Glycine max
FFSLLLLSPSFSFSGDMESKWGGAPASIMAANFDDFKWIASMFDPGNDDVKPFSDAAFQNQDAVTAFSTCGGVTDDTLVRSQNLTPIQSTISATIDSQSSFCGTVGSPVSANKPNVRDNQVKGVATTTSGSSREPSDEDDEAGPCEQSTNAIDMKRLRRKVSNRESARRSRRRKQAHLADLEWQVERLRLENANLFKQLTDASQQFRDADTNNRVLKSDVEALRAKVKLAEDMVTRGTLTPINNQILQNQSSLNTPPQLNTNNLHRMTHVSPTITVRGNDDASYGGGITVSGQNSPLGGLGNLDNIPCSDFNSGINSNNAVSSMTSMWP

SEQ ID NO: 21843 - protein, 313 aa, Glycine max
MESKWGGAPASIMAANFDDFKWIASMFDPGNDDVKPFSDAAFQNQDAVTAFSTCGGVTDDTLVRSQNLTPIQSTISATIDSQSSFCGTVGSPVSANKPNVRDNQVKGVATTTSGSSREPSDEDDEAGPCEQSTNAIDMKRLRRKVSNRESARRSRRRKQAHLADLEWQVERLRLENANLFKQLTDASQQFRDADTNNRVLKSDVEALRAKVKLAEDMVTRGTLTPINNQILQNQSSLNTPPQLNTNNLHRMTHVSPTITVRGNDDASYGGGITVSGQNSPLGGLGNLDNIPCSDFNSGINSNNAVSSMTSMWP

SEQ ID NO: 21844 - protein, 301 aa, Glycine max
MAANFDDFKWIASMFDPGNDDVKPFSDAAFQNQDAVTAFSTCGGVTDDTLVRSQNLTPIQSTISATIDSQSSFCGTVGSPVSANKPNVRDNQVKGVATTTSGSSREPSDEDDEAGPCEQSTNAIDMKRLRRKVSNRESARRSRRRKQAHLADLEWQVERLRLENANLFKQLTDASQQFRDADTNNRVLKSDVEALRAKVKLAEDMVTRGTLTPINNQILQNQSSLNTPPQLNTNNLHRMTHVSPTITVRGNDDASYGGGITVSGQNSPLGGLGNLDNIPCSDFNSGINSNNAVSSMTSMWP

SEQ ID NO: 21845 - DNA, 1261 bp, Glycine max
tgtttcttgggtagcaaaatctgttacctctggtttggatgcgttatacctgactagatttgaatcccaagctgctgaacattggcaggctttatattcttctgttaattttggagctccatttctcattttatgttctgagaatgatgaccttgtacgataccgaagtatctatgattttgcccaacaactacgcaatctcaatggtgatgtcaaccttgtaaatttcagtagctcctcccaccttggtcattacaaacaccatccaattcaatatagagctgctgtgaaccaattattagagaaggcttcttcaatatattcacaaaaaatgttgcttgaacgagaaagaactggtatggatggtacacaggatgagatatctgagttaatctgtgacctgcagaaggtggcaatcaattcaaataagagccttagaagagttgcagtcgggccaacagaccacttctttttgcctagttcagcagggcattacggtgatagagaatctgggactccacaagatgaacaaaaagaaaaatctgtttgtgtacctagcttcccaagcatcagtgctcatagtgtccttggccaatttctttttgatgtttgtgttccgaagaatgttgagggttgggatgtgaaatcttctgggaatctaaataggaagtcatgtgcttcagctccaaggcattcactattcagaggtactaagcgcatcggtcggtccaaattatgaagttgttcccatatctaacttgaggagatactttatgataaacctgtttgaaatatcagcaatttccctagacaatacaggaagatatgatagattttggtgcaataattggctgttctgtctgcagtggacatgtaatggttgcaatggttcaacaattaattccttggcacttatgagaaagtgatgggctgaagtggataatgtttacttgagttccatcccttctgattgccctcaggaaaaatcacacgactgttgtatcagaaaggagagcttctgatagttcaaactggttgatgcctggctatggtaactactcatttggtaattgcatttgcatgaaatgggataaactgtactgacttatttgtagttagagaaagtaaatagctgtacataatatatttttgagggaataaaacgtctcttgtttgagggtggaagaaacttgtaaatttggcatgcctagcaatgtacagaggaggaaaaggagggatatcatcccacttttgttgtttt

SEQ ID NO: 21846 - protein, 245 aa, Glycine max
VSWVAKSVTSGLDALYLTRFESQAAEHWQALYSSVNFGAPFLILCSENDDLVRYRSIYDFAQQLRNLNGDVNLVNFSSSSHLGHYKHHPIQYRAAVNQLLEKASSIYSQKMLLERERTGMDGTQDEISELICDLQKVAINSNKSLRRVAVGPTDHFFLPSSAGHYGDRESGTPQDEQKEKSVCVPSFPSISAHSVLGQFLFDVCVPKNVEGWDVKSSGNLNRKSCASAPRHSLFRGTKRIGRSKL

SEQ ID NO: 21847 - protein, 135 aa, Glycine max
MLLERERTGMDGTQDEISELICDLQKVAINSNKSLRRVAVGPTDHFFLPSSAGHYGDRESGTPQDEQKEKSVCVPSFPSISAHSVLGQFLFDVCVPKNVEGWDVKSSGNLNRKSCASAPRHSLFRGTKRIGRSKL

SEQ ID NO: 21848 - protein, 126 aa, Glycine max
MDGTQDEISELICDLQKVAINSNKSLRRVAVGPTDHFFLPSSAGHYGDRESGTPQDEQKEKSVCVPSFPSISAHSVLGQFLFDVCVPKNVEGWDVKSSGNLNRKSCASAPRHSLFRGTKRIGRSKL

SEQ ID NO: 21849 - DNA, 1299 bp, Glycine max
gatcttaaacaaggggatcttttgcagtcttccaacctggtatgctcactcagctttgatcgcgatgcagaattttttgctactgcgggagtaaataagaagattaaagtttttgaatgtaacacaaccataaatgagtatcgtgatatccactatccagtagtggagatggttagccggtcaacattgagtagtacatgttggaatacttacatcaagagtcaaattgcttcgagtaactttgaaggtgttgtacagttatgggatgtgacaagaagtcaagtgcagtctgaaatgaaggagcatgaacgaagggtatggtctattgatttctcatcagcagacccaacattgttagcaagtgggagtgatgacggttctgtcaagctatggaatatcaatcaggcaatcagaccgaacattctttagcttgttttatgtgtttaatctagatgcatgatggattgtttccctcacatgtgcttttactgcagggagttagtgttggtaccatcaaaacaaaggcaaatgtgtgttgtgttcagtttccccttgattttgctcatttccttgcatttggttcagcagatcaccagatatattactatgatcttcgcaacctgaaagtgcctctttgtgcaatggttggacatgataagacagtgagctacatcaagtttgtagacaccatgagcctagtctctgcatccacagataacacattgaagctttgggatttgtccatgtgtgcttctcgagttatagactcaccaattcaatcattcactggtcataagaatgttaagaacttcgtggggttgtctgtatctgatggttacattgctactggttcagagacaaacgaggtgttcatataccacaaggcttttcccatgccagcattatctttcaaattttacagtagtgaccctctttctgggaatgaagaggatgattcggcacagttcatcacttctgtttgttggcgcggtcagtcatccaccttagtggctgcaaattccacaggaaatgtcaaaattctgcagatgacttaagtaggtctttagttgggaataattttctacattaggttacagaataattgttcatgcatggttagctttgtgttgccggaaaaggctatagagaagcgtatacaaattccatgattagggtgtctaaggtgtgaaagttaaagaacttacgcactatgtggaagcttataagaatggggcaagaatcatgtgtaccatcagatttagcaataaaaaaaggaatggataggatttgttgatgtcg

SEQ ID NO: 21850 - protein, 200 aa, Glycine max
MHDGLFPSHVLLLQGVSVGTIKTKANVCCVQFPLDFAHFLAFGSADHQIYYYDLRNLKVPLCAMVGHDKTVSYIKFVDTMSLVSASTDNTLKLWDLSMCASRVIDSPIQSFTGHKNVKNFVGLSVSDGYIATGSETNEVFIYHKAFPMPALSFKFYSSDPLSGNEEDDSAQFITSVCWRGQSSTLVAANSTGNVKILQMT

SEQ ID NO: 21851 - protein, 142 aa, Glycine max
DLKQGDLLQSSNLVCSLSFDRDAEFFATAGVNKKIKVFECNTTINEYRDIHYPVVEMVSRSTLSSTCWNTYIKSQIASSNFEGVVQLWDVTRSQVQSEMKEHERRVWSIDFSSADPTLLASGSDDGSVKLWNINQAIRPNIL

SEQ ID NO: 21852 - protein, 137 aa, Glycine max
MVGHDKTVSYIKFVDTMSLVSASTDNTLKLWDLSMCASRVIDSPIQSFTGHKNVKNFVGLSVSDGYIATGSETNEVFIYHKAFPMPALSFKFYSSDPLSGNEEDDSAQFITSVCWRGQSSTLVAANSTGNVKILQMT

SEQ ID NO: 21853 - DNA, 1220 bp, Glycine max
atgcaagttaaacaaacaactgcaagggaaataggggcctaactttatatatctgcgtgagtgagtgcgtcatttctttctttctctgcttccctaaccaactgaaccagcagcaacatttgcgcaaatcgaaattgattctctgccacttaacctaaaatggaaatctttccgattcccgccgaatcctacactctcggcttcatcggcgccggaaaaatggccgagtccattgcccgaggcgccgtccgctccggcgtcctgccgccttctcgcattcggaccgccgtccacttcaacctcgcccgccgtggcgccttcgagtccttcggcgtcaccgttctcccttcaaacgacgacgtcgttcgcgaaagcgacgtcgtcgttttgtcggtcaaacctcaattagtgaaagacgtggtgtcgaaattgacgccgcttttgacgaagaacaagcttttggtttcggtcgctgctggtaccaaattgaaagatcttcaggaatgggctgggaacgacagatttataagagtgatgcctaataccccagcagctgttggccaggcagcatctgtaatgagcttggggggatctgcaacggaagaagatggaaatattatagcccaattatttgggtcaattggcaaaatatggaaagctgaggaaaagtattttgatgcaataactggcctgagtggcagtggtcctgcttatgtttatttagcaatagaggctttggctgatggaggagtagcagctggtttaccacgtgatctttcattaagtctagcttctcaaactgtattaggggcagcatcaatggtctcccagactgggaagcacccgggacagctcaaagatgacgttacttctccaggtgggacaacaattacgggcattcatgagttagaaaatggtgggttccgtggaacactgatgaatgctgttgttgctgctgctaagcgcagccgagagctttcctgaatcaagagattaggattctactttttttttagaccaaaatctgatttcggtcgaattttcagtcactattatgagaacttggggctcttctttgagaggagtaaacaagaatgtttggccataacagtcttttcgagctagcatcatgaatgcatccgagtctatatgagaacttgaagtttccttgcaaaagaagagtactagcagtaaaaataaaataaaaccacttggccact

SEQ ID NO: 21854 - protein, 274 aa, Glycine max
MEIFPIPAESYTLGFIGAGKMAESIARGAVRSGVLPPSRIRTAVHFNLARRGAFESFGVTVLPSNDDVVRESDVVVLSVKPQLVKDVVSKLTPLLTKNKLLVSVAAGTKLKDLQEWAGNDRFIRVMPNTPAAVGQAASVMSLGGSATEEDGNIIAQLFGSIGKIWKAEEKYFDAITGLSGSGPAYVYLAIEALADGGVAAGLPRDLSLSLASQTVLGAASMVSQTGKHPGQLKDDVTSPGGTTITGIHELENGGFRGTLMNAVVAAAKRSRELS

SEQ ID NO: 21855 - protein, 254 aa, Glycine max
MAESIARGAVRSGVLPPSRIRTAVHFNLARRGAFESFGVTVLPSNDDVVRESDVVVLSVKPQLVKDVVSKLTPLLTKNKLLVSVAAGTKLKDLQEWAGNDRFIRVMPNTPAAVGQAASVMSLGGSATEEDGNIIAQLFGSIGKIWKAEEKYFDAITGLSGSGPAYVYLAIEALADGGVAAGLPRDLSLSLASQTVLGAASMVSQTGKHPGQLKDDVTSPGGTTITGIHELENGGFRGTLMNAVVAAAKRSRELS

SEQ ID NO: 21856 - protein, 149 aa, Glycine max
MPNTPAAVGQAASVMSLGGSATEEDGNIIAQLFGSIGKIWKAEEKYFDAITGLSGSGPAYVYLAIEALADGGVAAGLPRDLSLSLASQTVLGAASMVSQTGKHPGQLKDDVTSPGGTTITGIHELENGGFRGTLMNAVVAAAKRSRELS

SEQ ID NO: 21857 - DNA, 1263 bp, Glycine max
actggattgcaccgtctcttttctttcccctttgttaggaacaacaccacgccacctttgtttacgaactcgtcgacttgatgactcatcacaacgccaccaccaccgcctaacgacctagagcaccttctctctcctctaattggccattgcttaagttgacttgctgcgaaggttgctttgatcatttgaagcgcctgaaaatcgttgtgcgaattttgagggttctgttcttgtaatccgaaaatggccgcgattcggaggcgggtgtggcagttatcttcaatcgcaggtttcggggcttcgagatcggaagtgtcgtcgtcattgtcgtcgtcccaaagagcaattttcgatccattttctgtttcggggaccagacacttttcccaagtggtgaaatccaaccgcaagcacttgttcctcgttgacaccttggcccttgttaggagactggaaggggaaggagtgccctcgaagcaagccgaggcgataaccgctgccataactgaggttttgaatgacagtctcgaaaatgtgtctcagtcgttggtatcaaaggcgcagatgcagaaaattgaaatgatgcaagaatccaacctgtctaagtttaaagcggaggtgcagagctcacagggacaccatttttctctcttacaacacgagactgagaagcttaggaatgatatagagaagatgcgtaatgagttgaggtatgagatagacaaagtcactgctgggcagcgattagatttgaaccttgaaagggggagaataagggaggaattgtctaatcagaatgctgaaactaacaacctgacaaacaaacttgatagagagatccattctttaagagcacaactggaagcagccaaatatgatgtcataaaatattgcataggaacacttgtttcgatttctgctgttggtcttgctgttttacgcatattgatgtaaatggattgtattccgattaacatccacaaagatgaggtgaaaaagaatcaagggtagctccgtagctgcattgaagatttatcttctgtcagagaaacaattgcattacaatactagtacaacttttttttttggtccatactagtggagctgaaaggaacgagctccaatcaggcacgaattgggcctgttttttaagccccattctatattcttttgttaatttatttgacatgccctttgggatatttgtgcaatttatgcgtggctgtatggtatgagtacaatacaagcaccttggattat

SEQ ID NO: 21858 - protein, 236 aa, Glycine max
MAAIRRRVWQLSSIAGFGASRSEVSSSLSSSQRAIFDPFSVSGTRHFSQVVKSNRKHLFLVDTLALVRRLEGEGVPSKQAEAITAAITEVLNDSLENVSQSLVSKAQMQKIEMMQESNLSKFKAEVQSSQGHHFSLLQHETEKLRNDIEKMRNELRYEIDKVTAGQRLDLNLERGRIREELSNQNAETNNLTNKLDREIHSLRAQLEAAKYDVIKYCIGTLVSISAVGLAVLRILM

SEQ ID NO: 21859 - protein, 129 aa, Glycine max
MQKIEMMQESNLSKFKAEVQSSQGHHFSLLQHETEKLRNDIEKMRNELRYEIDKVTAGQRLDLNLERGRIREELSNQNAETNNLTNKLDREIHSLRAQLEAAKYDVIKYCIGTLVSISAVGLAVLRILM

SEQ ID NO: 21860 - protein, 124 aa, Glycine max
MMQESNLSKFKAEVQSSQGHHFSLLQHETEKLRNDIEKMRNELRYEIDKVTAGQRLDLNLERGRIREELSNQNAETNNLTNKLDREIHSLRAQLEAAKYDVIKYCIGTLVSISAVGLAVLRILM

SEQ ID NO: 21861 - DNA, 1637 bp, Glycine max
cctccacgaagcaagctagatagccaagtctatggtgatcatactagtcaaataaccaaagaacacctagagcccaacttagaagggctcactgtagatgaggcaattcaaaacaagagattgttcctactagatcatcatgacccaatcatgccatatttgaggcgaataaatgcaacctccacaaaggcttatgctaccagaaccatccttttcctgaaaaatgacggaactttaagaccacttgccatagagttgagtttgccacatcctcagggagatcaatctggtgcttttagtcaaatttttctgcctgcagatgaaggtgttgaaagttctatttggctgctagcaaaggcttatgtagttgtgaatgactcgtgctatcatcaacttgtcagccattggttaaacactcatgcagttgttgagccattcatcatagcaacaaacaggcatctcagtgttgttcaccctatttataaactccttcaccctcactatcgtgacaccatgaacataaatggccttgctcggttatcactggtcaacgacggtggcgttatagaacaaacatttttgtggggaaggtattctgtggaaatgtctgctgtagtttacaaggattgggtttttacagatcaagcattgcctgctgatcttataaaaagaggaatggcaattgaggatccatcgtgccctcatggcattcgccttgtgatagaggactacccttatgctgttgatggacttgagatatgggatgctatcaagacatgggtccatgaatacgttttcttgtactacaaatcagatgacacacttagagaagatcctgaactccaagcctgctggaaagaactcgtagaggtgggtcatggagacaagaaaaatgagccatggtggcctaagatgcaaactcgtgaagagctagttgaagcttgcgctatcatcatatggactgcttcagcacttcatgcagctgttaattttggacagtatccctatggaggtttaatcttaaaccgtccaactcttagtaggcgattcatgcctgagaaaggttctgctgagtatgaggagctgaggaagaatccccagaaggcttacttgaagactattacaccaaagtttcagacccttattgacctttctgttatagaaatcttgtcaaggcatgcatctgatgaggtgtaccttggggagagggacaatccaaattggacatctgatacaagagcgttagaggcttttaaaaggtttggaaataaactggcacaaattgagaataaactctcagagagaaacaacgatgagaaactgagaaaccgttgtggaccagttcaaatgccttatactctgcttttgccttctagtaaggaaggattaactttcagaggaattcccaacagtatctctatctgaagaggtttgtggttccttaagttttgtggctttgaataaaagatagaagagaaggaatctgaatttcttcatccaacctgcacatggtaatctagtgtgtttgagtgctttcatgtttggctttaataaaataaaagcagttgttttgtaaaatgttcagaatcaataaaagcatttactgctttgctttgtgcgctaaaaaaaaaaaaatt

SEQ ID NO: 21862 - protein, 474 aa, Glycine max
PPRSKLDSQVYGDHTSQITKEHLEPNLEGLTVDEAIQNKRLFLLDHHDPIMPYLRRINATSTKAYATRTILFLKNDGTLRPLAIELSLPHPQGDQSGAFSQIFLPADEGVESSIWLLAKAYVVVNDSCYHQLVSHWLNTHAVVEPFIIATNRHLSVVHPIYKLLHPHYRDTMNINGLARLSLVNDGGVIEQTFLWGRYSVEMSAVVYKDWVFTDQALPADLIKRGMAIEDPSCPHGIRLVIEDYPYAVDGLEIWDAIKTWVHEYVFLYYKSDDTLREDPELQACWKELVEVGHGDKKNEPWWPKMQTREELVEACAIIIWTASALHAAVNFGQYPYGGLILNRPTLSRRFMPEKGSAEYEELRKNPQKAYLKTITPKFQTLIDLSVIEILSRHASDEVYLGERDNPNWTSDTRALEAFKRFGNKLAQIENKLSERNNDEKLRNRCGPVQMPYTLLLPSSKEGLTFRGIPNSISI

SEQ ID NO: 21863 - protein, 424 aa, Glycine max
MPYLRRINATSTKAYATRTILFLKNDGTLRPLAIELSLPHPQGDQSGAFSQIFLPADEGVESSIWLLAKAYVVVNDSCYHQLVSHWLNTHAVVEPFIIATNRHLSVVHPIYKLLHPHYRDTMNINGLARLSLVNDGGVIEQTFLWGRYSVEMSAVVYKDWVFTDQALPADLIKRGMAIEDPSCPHGIRLVIEDYPYAVDGLEIWDAIKTWVHEYVFLYYKSDDTLREDPELQACWKELVEVGHGDKKNEPWWPKMQTREELVEACAIIIWTASALHAAVNFGQYPYGGLILNRPTLSRRFMPEKGSAEYEELRKNPQKAYLKTITPKFQTLIDLSVIEILSRHASDEVYLGERDNPNWTSDTRALEAFKRFGNKLAQIENKLSERNNDEKLRNRCGPVQMPYTLLLPSSKEGLTFRGIPNSISI

SEQ ID NO: 21864 - protein, 303 aa, Glycine max
MNINGLARLSLVNDGGVIEQTFLWGRYSVEMSAVVYKDWVFTDQALPADLIKRGMAIEDPSCPHGIRLVIEDYPYAVDGLEIWDAIKTWVHEYVFLYYKSDDTLREDPELQACWKELVEVGHGDKKNEPWWPKMQTREELVEACAIIIWTASALHAAVNFGQYPYGGLILNRPTLSRRFMPEKGSAEYEELRKNPQKAYLKTITPKFQTLIDLSVIEILSRHASDEVYLGERDNPNWTSDTRALEAFKRFGNKLAQIENKLSERNNDEKLRNRCGPVQMPYTLLLPSSKEGLTFRGIPNSISI

SEQ ID NO: 21865 - DNA, 1521 bp, Glycine max
atcgaagaatatcagggcaggacgtagctcaatgcaatactttatcatcagatggatctattattggtcaagctgttgctcccagaagctcaactgagcagatagacccaagcagtaatataaagaagtcacacaggaatcaacagaggtggcttttatttttatttcacgctcgtcactgttctgccccagaaggacattgcctagaacgccattgttctactgcacaaaagttatgtaatcacatagatggatgcactataccttattgtccatatcctcgttgtcatcataccaggagattgcttcttcatttcataaaatgcaataatccacattgccctgtttgtgttttggtaagaaagtatcggcatgcatttcaacttaagcccaaaatttggtcagatcctgaatcatgtttggcaaatgctttaaatggatcctgcgaatcctataatgtggtaggcccatcacctagattgatctcgaagtctccactagtggttgaaacttcagaagacctaccatctctaaagcgtatgaaaactgagcagtgcacccagtccattaatcctgaatatgacaattcttcttcatctgttctaaattgtgactcacgggattcaaaggatactcagtgccaagtctatctcagtggtgaaatgtctatatcaactaaatctgagcctactgaagttaaagaagaagttctggtgcattcaattcatgaaaatcttagtgagacaaaaatggatgaggatagtgcacatgataaaatgcccactggtaagcctgtcacacatactgagcctgctaatatagctaggccagaaaatattaaaactgagaaacaaaatggacaagataagcaagaaaatgtggaccagccatctgatcatggggctggaaccaagtctggtaagccaaaaataaagggggtctcattgactgagttgtttactcctgagcaagtcagggaacatatcactggcctcaggcgatgggttggccaaagcaaatcaaaagcagagaagaatcaagcaatggagcattcaatgagtgagaactcctgtcaattgtgtgctgtagaaaaactaacttttgaaccatcccctatttattgcacaacatgtggtgttcggattaaacgaaataatatgtattataccatgggtactggtgatacacggcattatttttgtattccatgctataatgagcctcgtggagacaccattgttgttgatggaactccttttcctaagtcaaggttagaaaagaagaaaaatgacgaggaaacagaggaatggtgggttcaatgtgataaatgtgaggcatggcaacatcaaatttgtgccttatttaatggtcgaagaaatgatggtggacaagctgattacacttgccctaactgctatattcaagaagtagaaagaagtgagcgcaagcccttaccgcaaagtgctgttcttggagccaaggatttaccaagaacaattctcagtgatcacatagaacaac

SEQ ID NO: 21866 - protein, 506 aa, Glycine max
RRISGQDVAQCNTLSSDGSIIGQAVAPRSSTEQIDPSSNIKKSHRNQQRWLLFLFHARHCSAPEGHCLERHCSTAQKLCNHIDGCTIPYCPYPRCHHTRRLLLHFIKCNNPHCPVCVLVRKYRHAFQLKPKIWSDPESCLANALNGSCESYNVVGPSPRLISKSPLVVETSEDLPSLKRMKTEQCTQSINPEYDNSSSSVLNCDSRDSKDTQCQVYLSGEMSISTKSEPTEVKEEVLVHSIHENLSETKMDEDSAHDKMPTGKPVTHTEPANIARPENIKTEKQNGQDKQENVDQPSDHGAGTKSGKPKIKGVSLTELFTPEQVREHITGLRRWVGQSKSKAEKNQAMEHSMSENSCQLCAVEKLTFEPSPIYCTTCGVRIKRNNMYYTMGTGDTRHYFCIPCYNEPRGDTIVVDGTPFPKSRLEKKKNDEETEEWWVQCDKCEAWQHQICALFNGRRNDGGQADYTCPNCYIQEVERSERKPLPQSAVLGAKDLPRTILSDHIEQ

SEQ ID NO: 21867 - protein, 327 aa, Glycine max
MKTEQCTQSINPEYDNSSSSVLNCDSRDSKDTQCQVYLSGEMSISTKSEPTEVKEEVLVHSIHENLSETKMDEDSAHDKMPTGKPVTHTEPANIARPENIKTEKQNGQDKQENVDQPSDHGAGTKSGKPKIKGVSLTELFTPEQVREHITGLRRWVGQSKSKAEKNQAMEHSMSENSCQLCAVEKLTFEPSPIYCTTCGVRIKRNNMYYTMGTGDTRHYFCIPCYNEPRGDTIVVDGTPFPKSRLEKKKNDEETEEWWVQCDKCEAWQHQICALFNGRRNDGGQADYTCPNCYIQEVERSERKPLPQSAVLGAKDLPRTILSDHIEQ

SEQ ID NO: 21868 - protein, 286 aa, Glycine max
MSISTKSEPTEVKEEVLVHSIHENLSETKMDEDSAHDKMPTGKPVTHTEPANIARPENIKTEKQNGQDKQENVDQPSDHGAGTKSGKPKIKGVSLTELFTPEQVREHITGLRRWVGQSKSKAEKNQAMEHSMSENSCQLCAVEKLTFEPSPIYCTTCGVRIKRNNMYYTMGTGDTRHYFCIPCYNEPRGDTIVVDGTPFPKSRLEKKKNDEETEEWWVQCDKCEAWQHQICALFNGRRNDGGQADYTCPNCYIQEVERSERKPLPQSAVLGAKDLPRTILSDHIEQ

SEQ ID NO: 21869 - DNA, 1754 bp, Glycine max
atataccaattccataaccatgttaatggtgagaagaaccccttcgtattctttagtaaccttttatgtccgccgaagcattgcccaatttcgaaacctcacctcagagaccaaaaatggggatcatgaacatcccaccaaagccctagatgctaaagactgcaactttgtctatgaaatttgtaggattacccgaacaaagccccgttgggaggacacccttctttcccagtacccatctttcaactttaaagacccctctttcttcctcctttatctcaagcaccagaacaatgccttcctttcccttcgtttctttcactggctgtgctcttcttgtggtttctcccccgaccagtcttcttgtaacgtgcttttccaagtgcttgtggatgctggggccggcaaactagcaaaatccttgcttgatagcccgggtttcactcctgagcctgcttccttggagggttacattcagtgtctcagcggtgctgggatggttgaagatgcagttgatatgctgaaaagggttgtgttttgcccctcggtggcaacttggaatgcatctctgttgggttgtttgagggctcgaaggactgatctgaatacaaagtcctcaaagggtatgaacttcttaaggaacttctggaaaatggcttatgtcccgacaatgttgttttcaatgaacttataagaggattttgtaaggagggacaatatgatagagtttctgagatccttcatattatgattgccaagcaatgtaatccggatgtctctacttatcaagaaatcatatatggactcttgaagatgaagaattctgagggtttccaggtttttaatgatctcaaggacagaggatatttcccagacagggttatgtacacaacggtgatcaagggtctatgtgagatgcaacggctcggggaggccaggaagctgtggtttgagatgattaaaaaaggatttcagccaaatgaatacacctataatgtaatgatgcatgggtattgtaagattggtgatcttgcggaggcaaggaagatctttgaggatatgcgtgatagaggttatgcagaaaccacagttagctatggcacaatgatttcaggtttgtgtttgcatggaaggacagatgaagcacagagcttgtttgaagaaatgtttcaaaagggaatcgttcctgatttgattacgtacaactgtcttattaaggccctttgcaaggaagtgaagatagttaaggcaagaaaactattaaatttacttctggcacagggtttagagctatcggttttctcttttagtcctcttataaaacaactttgtatagtcggaaacacaaagggtgcaataacattgtggaaagatatgcatgataggcttttggaacctaccgccagtatatttggaattgaatggttgctaaacatgctgagttggaagcagaaaccccagaagcagacttttgagtacctgattaacagtctatcacaagaaaataggttggatgatattttggttgttttagatttcatgtttagaataggatatatactcgaaaaagggacaatttattccttggtgagtaaatttagcagggataattttcattttcctgacttatgtttggagaagatcttagaaagaaattgatagtagattgtgttgtttgtatcttccatctaccatctatgaccaataagtgaagaattttttgagtttcttttgtaaacgtgaatttatattct

SEQ ID NO: 21870 - protein, 303 aa, Glycine max
MIAKQCNPDVSTYQEIIYGLLKMKNSEGFQVFNDLKDRGYFPDRVMYTTVIKGLCEMQRLGEARKLWFEMIKKGFQPNEYTYNVMMHGYCKIGDLAEARKIFEDMRDRGYAETTVSYGTMISGLCLHGRTDEAQSLFEEMFQKGIVPDLITYNCLIKALCKEVKIVKARKLLNLLLAQGLELSVFSFSPLIKQLCIVGNTKGAITLWKDMHDRLLEPTASIFGIEWLLNMLSWKQKPQKQTFEYLINSLSQENRLDDILVVLDFMFRIGYILEKGTIYSLVSKFSRDNFHFPDLCLEKILERN

SEQ ID NO: 21871 - protein, 281 aa, Glycine max
MKNSEGFQVFNDLKDRGYFPDRVMYTTVIKGLCEMQRLGEARKLWFEMIKKGFQPNEYTYNVMMHGYCKIGDLAEARKIFEDMRDRGYAETTVSYGTMISGLCLHGRTDEAQSLFEEMFQKGIVPDLITYNCLIKALCKEVKIVKARKLLNLLLAQGLELSVFSFSPLIKQLCIVGNTKGAITLWKDMHDRLLEPTASIFGIEWLLNMLSWKQKPQKQTFEYLINSLSQENRLDDILVVLDFMFRIGYILEKGTIYSLVSKFSRDNFHFPDLCLEKILERN

SEQ ID NO: 21872 - protein, 258 aa, Glycine max
MYTTVIKGLCEMQRLGEARKLWFEMIKKGFQPNEYTYNVMMHGYCKIGDLAEARKIFEDMRDRGYAETTVSYGTMISGLCLHGRTDEAQSLFEEMFQKGIVPDLITYNCLIKALCKEVKIVKARKLLNLLLAQGLELSVFSFSPLIKQLCIVGNTKGAITLWKDMHDRLLEPTASIFGIEWLLNMLSWKQKPQKQTFEYLINSLSQENRLDDILVVLDFMFRIGYILEKGTIYSLVSKFSRDNFHFPDLCLEKILERN

SEQ ID NO: 21873 - DNA, 1625 bp, Glycine max
aagcaatggtacacttttgcaaacaggtggatttgaaaaaggtgccaaaagggtcagattctataggccttgtgggaatcaccaatgtgattggattcaatcaaagaaaacactatctgatgagaggtggtatgcttcaagtcagatactaccagagcataacagggtggtggttgttggtggaagaagagttttcacatatgaatttgtaccaaaaactagtcctggtgaaaaatcctttgaccttccattcttgcaccaaaccaatgacagggatggaggagggaacaacctctatcccttcctccacctctcatctgacggaaacttgttcgttttcgccaaccgtgattcgatcttactcaacctgagaaggaacagagtgatcaagaccttccctcggattccgggggaagggtcaagaaactacccaagctcaggttcatctgtgatgctcccattagaccacagagataacttccaaaaagtggaagttatggtgtgtggaggctcatccattggagcacttgaagctgctagaaaaggccgattcttagaaggtttaagatcatgtggaagaatggtgatcacagggaacaacaacaagtgggaaatggagtacatgcctaagccgcgtcttcttcatgacatgttgattctccctactggtaacattcttatcataaatggggctaaacatggttgtgcagggtatgaaaatgctagaaacgcttcacttgagccttacctttatagccccaacaaaaagctaggaaaaaggttcacaatgcttaaatccactaagatagctagaatgtatcactcatcggcaactcttctttctgatgggagggttttggttgcgggtggtaaccctcatgggaggtacatttttcacaatgtggcatacccaactgaattgagacttcaagcatttgttccacactacatggaaagtaggtaccataattggaggccaagtaacatgacgatatatggcggtggtagaagacatgcaattgggtatgggaaagagtttagagttgagttcttccttgagaagaggatgcaaaacaatgaggtggggttcagcgcctatgcgccgccgttcaccacgcattcgttcgccatgaatcagaggatgctgaagctgaggtgcaagagcttggatagaaaaggtggtgggtgggttgttgcagtgttggaagcaccaccatcgcccaatgttgcaccttctggttattacttgctcactgttgtgaatggtgggattccaagcatgtctcaatgggttcagtttgcacacgcctaggattgtctttgttcaatacttcagttccaacatactaaatactatcttactataatttgtttcttataataaggaacataggaggtagtactagttaatgaagaaattttcttataggaagaaacatgactggaacgctaatttatgtaggagcaaaatgatatagttaattctgcatgaattagaaactcaaattgtaagccaacaaaataatttgaagtgtattcagagtgggtatggtagtttctttttttcacacattgtttgagaaggttatacatagatttctacttgaatgaaacttgttttaaac

SEQ ID NO: 21874 - protein, 436 aa, Glycine max
SNGTLLQTGGFEKGAKRVRFYRPCGNHQCDWIQSKKTLSDERWYASSQILPEHNRVVVVGGRRVFTYEFVPKTSPGEKSFDLPFLHQTNDRDGGGNNLYPFLHLSSDGNLFVFANRDSILLNLRRNRVIKTFPRIPGEGSRNYPSSGSSVMLPLDHRDNFQKVEVMVCGGSSIGALEAARKGRFLEGLRSCGRMVITGNNNKWEMEYMPKPRLLHDMLILPTGNILIINGAKHGCAGYENARNASLEPYLYSPNKKLGKRFTMLKSTKIARMYHSSATLLSDGRVLVAGGNPHGRYIFHNVAYPTELRLQAFVPHYMESRYHNWRPSNMTIYGGGRRHAIGYGKEFRVEFFLEKRMQNNEVGFSAYAPPFTTHSFAMNQRMLKLRCKSLDRKGGGWVVAVLEAPPSPNVAPSGYYLLTVVNGGIPSMSQWVQFAHA

SEQ ID NO: 21875 - protein, 286 aa, Glycine max
MLPLDHRDNFQKVEVMVCGGSSIGALEAARKGRFLEGLRSCGRMVITGNNNKWEMEYMPKPRLLHDMLILPTGNILIINGAKHGCAGYENARNASLEPYLYSPNKKLGKRFTMLKSTKIARMYHSSATLLSDGRVLVAGGNPHGRYIFHNVAYPTELRLQAFVPHYMESRYHNWRPSNMTIYGGGRRHAIGYGKEFRVEFFLEKRMQNNEVGFSAYAPPFTTHSFAMNQRMLKLRCKSLDRKGGGWVVAVLEAPPSPNVAPSGYYLLTVVNGGIPSMSQWVQFAHA

SEQ ID NO: 21876 - protein, 271 aa, Glycine max
MVCGGSSIGALEAARKGRFLEGLRSCGRMVITGNNNKWEMEYMPKPRLLHDMLILPTGNILIINGAKHGCAGYENARNASLEPYLYSPNKKLGKRFTMLKSTKIARMYHSSATLLSDGRVLVAGGNPHGRYIFHNVAYPTELRLQAFVPHYMESRYHNWRPSNMTIYGGGRRHAIGYGKEFRVEFFLEKRMQNNEVGFSAYAPPFTTHSFAMNQRMLKLRCKSLDRKGGGWVVAVLEAPPSPNVAPSGYYLLTVVNGGIPSMSQWVQFAHA

SEQ ID NO: 21877 - DNA, 1438 bp, Glycine max
taagcacagacctcatagagctgatcctgtccctcctcccaatccccatcctaatcagagcctccacagtgtgcaagctatggcactccataatctcctcatcttccttctccaccctctccaaccacctcaaccaaccatggttcttcctccatggcatccacaacatctcctcaaagaacaaccaatcctttgcctttgaccctgcctccaacacctggttcctcctcccaaccccccaacaccagcaccagcaccagtaccaataccaatccaacacctccttcattggcaccaactccttcttcttcatcactgcccccaacttcctctacaccccaattcttcacccctcatggcaccccacccctcccctccacttcccaagaatcaaccctcttctgggtgtcttccatgatgctaaagatcacacctttagccaccccaagttcattgttgttggtggggtcaagttcattgggaaccttgttgacatagaggaccgtttggatgttgaaatctatgaccctcttctggggtcttgggaccttggccctcctctccctcctgatttcagatcaggaaactcttcctcttccctctcctctgctctcttccgagagaaattctatgtctttgggatatactcttgctttgtttcgtcctttgacttgcataaaagggtttggagtgaggtccacacccttaggcctcatcatgggattgtgttctccttcttggtggcttgtaaggagatgcttgtgcttgctggggtgtgcaatttccctcatggatcttcttcctttgtgctgtggaaggttgatgagaggaccatggggtttagccagattgctgtgatgccacatgatttgctctgtagcctttttgatggggatgaggatgataaatttgctagcttgaagtgtgttgggttgggggatttgatatatgttttcaatgaggattaccacaggatgtaccctgcttgtgtgtgtgagattgatggggagagtgggaggtgtgtgtggaggagagtgccccagttgccatcactgatgaacaggtttcacaaagttgttagcttctgttcaactgtttcactgcatagtattctcggtgaacgtcaaccttgtggtcttcagtactagaaaacgaagggaatactcaatcgctaaaagaagaaagttcagttagaagaatcatttgctgcagacagtagtatctagatgctgctgtaccaaaagtatgtgcatcattcacatcaggcaaaagcagaagctggcataaagtatgtaatagataataatcctatgtgttgtatgtctagtttagctgtcctaaagcttggaaattgacaatttttcccagcgacattggcaaactgtatgtggtattagtttttttttttcttttctgtaaatttaagtaataattatgc

SEQ ID NO: 21878 - protein, 381 aa, Glycine max
STDLIELILSLLPIPILIRASTVCKLWHSIISSSSFSTLSNHLNQPWFFLHGIHNISSKNNQSFAFDPASNTWFLLPTPQHQHQHQYQYQSNTSFIGTNSFFFITAPNFLYTPILHPSWHPTPPLHFPRINPLLGVFHDAKDHTFSHPKFIVVGGVKFIGNLVDIEDRLDVEIYDPLLGSWDLGPPLPPDFRSGNSSSSLSSALFREKFYVFGIYSCFVSSFDLHKRVWSEVHTLRPHHGIVFSFLVACKEMLVLAGVCNFPHGSSSFVLWKVDERTMGFSQIAVMPHDLLCSLFDGDEDDKFASLKCVGLGDLIYVFNEDYHRMYPACVCEIDGESGRCVWRRVPQLPSLMNRFHKVVSFCSTVSLHSILGERQPCGLQY

SEQ ID NO: 21879 - DNA, 1408 bp, Glycine max
agattagtagtatatgctttcaacaatggaagattagaaagcgccagtgtgcgcacgttagcacccaaccccatggattcctctcccccaattcgtaagggaaggaaactataacggaggagggggcaataaacaataagaaaatgttgcggataacgagattctcggggtttttctccgccgcaatgttcgtgactgttcttgttattctctccccctccttccaatccgaagccattcgatcctcccaccgattttccttccggaaagcccctcctttccgcaatgccgccgaatgcgcttctgtttccggccaaaccaccaccgtctgcgacccttccttggtccacgtggccataaccctcgacgtcgactacctccgcggctcaatcgccgccgtgcactccatcctccacaactccctctgtccggagaacatcttcttccatttcctcgtctccgacaccaacctccaaaccctagttgagtccacgttcccaaacctgaaattcaacgtctatttcttcgatccgaacatcgtcgctcacttgatctcctcctccgtgcggcaggcgctggagcagcctctcaattacgcgagaaattacctcgttgaccttctggagagttgcgtggagagggtgatttacttggactccgatctggtggtagtggatgacgtggcgaaactgtggagcgcgagtctggactcgcgtgccatcggcgcgccggagtactgccacgcgaacttcaccaagtatttcacggcggggttctggtctgagtcgaggttgtcggggacgttcgcgcagcggagggcgtgctacttcaacacgggggtgatggtgatggatctggtgaagtggaggaaggaaggatacacgaagagaattgagcgttggatggagattcagaagagtgataggatctatgagcttggttctctgccgccgtttttgctggtgttcgcgggacacgtggcacccattgagcaccggtggaaccagcacggtttgggcggggataacgtgaagggtagttgccgtgacttgcaccctggtccggttagtttgttgcattggtccggtagcggtaagccatggctccgtttaagctccaaacggccttgccctctggattctctatgggctccttttgacttgtatacacacccatcgtcttaactaattcttgctgcatgctacatacatacattcattagtcattcctgatttgaaaataaattgttgaattttattaagttaagtttgtttattataataaatactaattgttagaagaaaaaataaatatttaaagaacactagctggttatatatgttgaagccgtcgtaattagattcaggtgtctagtttgtaaaagttattgttagtactgttctggctg

SEQ ID NO: 21880 - protein, 346 aa, Glycine max
MLRITRFSGFFSAAMFVTVLVILSPSFQSEAIRSSHRFSFRKAPPFRNAAECASVSGQTTTVCDPSLVHVAITLDVDYLRGSIAAVHSILHNSLCPENIFFHFLVSDTNLQTLVESTFPNLKFNVYFFDPNIVAHLISSSVRQALEQPLNYARNYLVDLLESCVERVIYLDSDLVVVDDVAKLWSASLDSRAIGAPEYCHANFTKYFTAGFWSESRLSGTFAQRRACYFNTGVMVMDLVKWRKEGYTKRIERWMEIQKSDRIYELGSLPPFLLVFAGHVAPIEHRWNQHGLGGDNVKGSCRDLHPGPVSLLHWSGSGKPWLRLSSKRPCPLDSLWAPFDLYTHPSS

SEQ ID NO: 21881 - protein, 332 aa, Glycine max
MFVTVLVILSPSFQSEAIRSSHRFSFRKAPPFRNAAECASVSGQTTTVCDPSLVHVAITLDVDYLRGSIAAVHSILHNSLCPENIFFHFLVSDTNLQTLVESTFPNLKFNVYFFDPNIVAHLISSSVRQALEQPLNYARNYLVDLLESCVERVIYLDSDLVVVDDVAKLWSASLDSRAIGAPEYCHANFTKYFTAGFWSESRLSGTFAQRRACYFNTGVMVMDLVKWRKEGYTKRIERWMEIQKSDRIYELGSLPPFLLVFAGHVAPIEHRWNQHGLGGDNVKGSCRDLHPGPVSLLHWSGSGKPWLRLSSKRPCPLDSLWAPFDLYTHPSS

SEQ ID NO: 21882 - DNA, 1832 bp, Glycine max
attttcgttatcttcttcgtttcgttataaccctagctgggaacaaataccatctctcgtccattgtctgcgtctcactcatcctctcccttctcttacattgttcatttctcaactctttctctcttttcttccaaaccctaatctggattagcctctcatcggatttcaattctcacggtcttcaccgaccgccagatctcttagcaccgctcttcttttcatcgattaaataacaaaaaattggcttaattttattctaacatcctaagcaaaaactaacgttttcacccgattttaacattcgagagaagagttagtttattttattgtatttttttattaagttactgtttctatttaaatcgataaacggcgaggtcgagcgttagaattcgaaatccggagaaaaaaaattacaggtattattatcaggggaatcgcgtggaagcgttgttgaggagagtgttgtgtttgatctgaggaagaagaaagaaaaaaaataatggtgggaggtggaagcaggagggatgaagggtcgttggtgttgaacaacacgaacgtgtttgcagcgctggatactctgaagaagaagaagaagtccgataaggagaagaagagcaagggctcgtcgacgaaatcgcaggcccagtccgcgaaggctgaggccccagtgttttgggccccggcgccgctgaacgccaagtcctgggccgacgtcgacgacgaggacgacgacgattactacgccaccacggcgccgccccaatcggtgtggggcgtttctgaacctcatcacagtaaggaggacaaacatgggaattttgaggaaagtgagagtgaggaagatattttggatgaaggggatgatgaggttgaggaagagcatgatcatgaaccagaagaatctttgaaacctgaacatgaggttaagaaggatactgaagtccctttgccgccaccaaaggagacagaaaggcagctctctaaaaaggaaaggaagaagaaggaacttgcagaacttgaggctcttctagctgattttggagtggcgccaaaacaaagtaacgatggtcaagatgagtctcaaggtgctcaggataagaaaggtgttgagactgatggagatggagaaaagaaagaaaatgtccctgcagaatccaaaacttccaagaagaagaagaagaaggataaagcttccaaggaggtgaaagaatctcaagatcaacccaacagttcagacacaaacaatgggcctgatttggccacaggcgctgaaaatgtggaggatacatctactgttgatgtgaaagagcgtctcaagaaagttgcttctacaaagaagaagaagtccagtaaagaaatggatgctgctgcaagagctgctgctcaagaggctgctgcaaggagtgcaaggcttgctgctgcaaaaaaaaaagagaagaaccattataaccagcaacccgtccggtaaaagaaccctgctccttaacatcaatacaggaatttgtatttcttgttcatatgttgatgccgaataaacagtggtctttaggttctggtgagaatggtgatgattctggtcgtattactgtggacctgggaaatttttcatgtagtttttttttgggaattagacaattagtgttgttcaattgttctggacttgctattttggcagagaaaattttagctttaaacattaccggaactacatagttgtgtattgtagttcttatatctctttgtggctgatcagtgatcaattagttctgactgagagtgtttatatttaactatagaaagtgctgtgttgctttaaatgttattat

SEQ ID NO: 21883 - protein, 322 aa, Glycine max
MVGGGSRRDEGSLVLNNTNVFAALDTLKKKKKSDKEKKSKGSSTKSQAQSAKAEAPVFWAPAPLNAKSWADVDDEDDDDYYATTAPPQSVWGVSEPHHSKEDKHGNFEESESEEDILDEGDDEVEEEHDHEPEESLKPEHEVKKDTEVPLPPPKETERQLSKKERKKKELAELEALLADFGVAPKQSNDGQDESQGAQDKKGVETDGDGEKKENVPAESKTSKKKKKKDKASKEVKESQDQPNSSDTNNGPDLATGAENVEDTSTVDVKERLKKVASTKKKKSSKEMDAAARAAAQEAAARSARLAAAKKKEKNHYNQQPVR

SEQ ID NO: 21884 - DNA, 1217 bp, Glycine max
gttgtgttgttaggcttgtttgtattgtgttagtaccattttctaatctcatcatctaacccttccatcgtagtttccacatttctcctaccgaaaagtcaaaactacccactcacccaggtaggcacaggcagcgatggacgtaggagccggcgacgatcattccccggaagccgtcatatcgcggtggaaattcgcggtgtcgcagcagtaccagcacatgctggacaaaacgacgccgcacgttctccggcggtggatcgggtgcctggtggttgccgccgtgtacgtgctccgcgtgtacttggtccaaggcttctacatcgtctcctacgccctcggcatttacatcctcaacctcctcatcggcttcctctcccctcaggtcgatcccgagattagcgacggccccaccctccccacccgaggatccgacgagttccgccctttcgttcgacgcctccccgagttcaagttctggtactcgatcacaaaggctttttgcattgcatttgtgatgactttctttagtgcatttgatgttccagtattctggccaatactccttttctactgggtggttctattcacacttacaatgaggagacaaatatcacacatgatcaaatacaaatatgtaccattctcatttgggaaactgcgctatgatggaaagagagcagcagaaggcacaagcccgaccatggactgaaattttcagcttaattgaactttatttgccacattttttaagtcacaaccccgcatgtggcttgatatcattggctgaagaagattctttgaggtctagtatgggcgtatacatctggatgttcaattcccaattgagcaactgtttggacatcatcattgtttctatgccctggtagtggtagaagctttagctttggggagatgttgagggctctctctttacatcccccttctagtaaaatcatttttctttattttcttttttctaaataggtgggcaaatgccaaactcttattgttaaattcatagttaaataacgagaattttaagaagcctgtgcagaaggaatccccttcattatttgcaatgggggtattaacgatctgtcttttccattgtattttttttttcttcattttaatcatgtgattctcatgaacttaatttttttttatatagatttgcccatataatactattacctccttgaggttttcttggt

SEQ ID NO: 21885 - protein, 191 aa, Glycine max
MDVGAGDDHSPEAVISRWKFAVSQQYQHMLDKTTPHVLRRWIGCLVVAAVYVLRVYLVQGFYIVSYALGIYILNLLIGFLSPQVDPEISDGPTLPTRGSDEFRPFVRRLPEFKFWYSITKAFCIAFVMTFFSAFDVPVFWPILLFYWVVLFTLTMRRQISHMIKYKYVPFSFGKLRYDGKRAAEGTSPTMD

SEQ ID NO: 21886 - protein, 163 aa, Glycine max
MLDKTTPHVLRRWIGCLVVAAVYVLRVYLVQGFYIVSYALGIYILNLLIGFLSPQVDPEISDGPTLPTRGSDEFRPFVRRLPEFKFWYSITKAFCIAFVMTFFSAFDVPVFWPILLFYWVVLFTLTMRRQISHMIKYKYVPFSFGKLRYDGKRAAEGTSPTMD

SEQ ID NO: 21887 - DNA, 1259 bp, Glycine max
acaaatattgaaaaacgatttgctttgttaatttgatggcgttgattctccttttatttcttggtatgagcatatcatactacgaagttgatgcaaggagcaaaaatctaccagatatgcaacagagttttaccagatcactaaatttgaagagcattcttcctacaatgaacagtgactttgagtgcatcggtatatacaagcaaccagcttttaaacatcgtttgttgaaaaaccacaaaatccagcttaatccgactttctcaaggtacacgatgcaaaccagactgccgttcatggaaaaaacttttcaaattcataattccaacaaaggatgcccttcaggaaaagtgcctattcgcatgctaaaactgaggcaagaaatcaactataatttttcagaatcacaacctgaaaattttcgtcaatattcccggaacccctatcaacattttgctacccttgagacaactccaagtacaacctatcacggagcaagtgcatggatcagcgccagtgataatctattggtgcaagggacccaatatagcctttcccagatttggcttcaaaatggtcctctttcagaacttaacagtattcaagtcggagtcggtgttaatcccagagtatatggagacgataagccacatctcgctagcttttggacaggggataattttaaaaaaaccggatgttttgatgctatctgcccaggttttgtgcaagtgcatcctcgtattaccttaggacaaaccattgaaccctcatttacaggtggattagatggcaaagactatattgctatcaaagtgacacaggattcagtatcaggccattggtggttgcatgtagaaggaagtgatggaagtgaagatgttgggtattggccaaaggaaatattcactcacttacgcaaaggatcatctttgattaaatttggaggtgaagcttatggaccccctaatattggaagtcctccaatgggtactggaaaattgccaaagacttcatttcctaactcaggtttctttgcaagacttcaaattgtggattcaaaatttagggaacttgatgtgaatcctatagacatgaagtcatattgtgacaccagttcagattgctatgatttgttgtatcatggagatcaaggggctcaatttaggcaagcttttctctttggtggtcctggcggccaatgtggtgtataactaaatttataattacatccattttcaataaatgttcagtttattatc

SEQ ID NO: 21888 - protein, 391 aa, Glycine max
MALILLLFLGMSISYYEVDARSKNLPDMQQSFTRSLNLKSILPTMNSDFECIGIYKQPAFKHRLLKNHKIQLNPTFSRYTMQTRLPFMEKTFQIHNSNKGCPSGKVPIRMLKLRQEINYNFSESQPENFRQYSRNPYQHFATLETTPSTTYHGASAWISASDNLLVQGTQYSLSQIWLQNGPLSELNSIQVGVGVNPRVYGDDKPHLASFWTGDNFKKTGCFDAICPGFVQVHPRITLGQTIEPSFTGGLDGKDYIAIKVTQDSVSGHWWLHVEGSDGSEDVGYWPKEIFTHLRKGSSLIKFGGEAYGPPNIGSPPMGTGKLPKTSFPNSGFFARLQIVDSKFRELDVNPIDMKSYCDTSSDCYDLLYHGDQGAQFRQAFLFGGPGGQCGV

SEQ ID NO: 21889 - protein, 381 aa, Glycine max
MSISYYEVDARSKNLPDMQQSFTRSLNLKSILPTMNSDFECIGIYKQPAFKHRLLKNHKIQLNPTFSRYTMQTRLPFMEKTFQIHNSNKGCPSGKVPIRMLKLRQEINYNFSESQPENFRQYSRNPYQHFATLETTPSTTYHGASAWISASDNLLVQGTQYSLSQIWLQNGPLSELNSIQVGVGVNPRVYGDDKPHLASFWTGDNFKKTGCFDAICPGFVQVHPRITLGQTIEPSFTGGLDGKDYIAIKVTQDSVSGHWWLHVEGSDGSEDVGYWPKEIFTHLRKGSSLIKFGGEAYGPPNIGSPPMGTGKLPKTSFPNSGFFARLQIVDSKFRELDVNPIDMKSYCDTSSDCYDLLYHGDQGAQFRQAFLFGGPGGQCGV

SEQ ID NO: 21890 - protein, 364 aa, Glycine max
MQQSFTRSLNLKSILPTMNSDFECIGIYKQPAFKHRLLKNHKIQLNPTFSRYTMQTRLPFMEKTFQIHNSNKGCPSGKVPIRMLKLRQEINYNFSESQPENFRQYSRNPYQHFATLETTPSTTYHGASAWISASDNLLVQGTQYSLSQIWLQNGPLSELNSIQVGVGVNPRVYGDDKPHLASFWTGDNFKKTGCFDAICPGFVQVHPRITLGQTIEPSFTGGLDGKDYIAIKVTQDSVSGHWWLHVEGSDGSEDVGYWPKEIFTHLRKGSSLIKFGGEAYGPPNIGSPPMGTGKLPKTSFPNSGFFARLQIVDSKFRELDVNPIDMKSYCDTSSDCYDLLYHGDQGAQFRQAFLFGGPGGQCGV

SEQ ID NO: 21891 - DNA, 1184 bp, Glycine max
aatttcatcttaataatgaacactctctctgaagcctacaaagcacaccctctccacctcagtcacattattcccttagacttttcttcagcccttagcttacctgattctcacgcatggcctcactgtcaacccaatgatgatgcatcatcatcatcatcatcatcatccatacccatcatagacctcatggatcccaatgctatggacctcataggccatgcatgtgagaagtggggtgctttccaattgaagaaccatggcataccttttggtgtcattgaagatgttgaagaagaggctaaaagactttttgctcttcccactgaacagaagttgaaggctcttcgatctcccggtggtgccactgggtatggcagagcaaggatttcaccgttcttcccaaagtttatgtggcacgaaggattcaccatcattggctctccctctcacgatgccaaaaagatatggcctaatgattatgcacgcttttgtgatttgatggagaattatgagaagcaaatgaaggttctagcggatagactaacagagatgatattcaacttaatggacataagtgaggaaaaaagaaagtgggttggtgcaagcaacataagtgaagctgttcagttaaatttctacccaagttgtcccgagccaaaccgagccatgggcttagcccctcacaccgacacttctctcttcacaattcttcaccaaagtcaaatcactggtcttcaaatcttcaaggaaggaaaagggtgggttcctgtgcaccctcaccctaataccctggtcgtgcacacaggcgatctcttgcacatcatttccaacgcaaggtttcgctgtgcacttcaccgcgtaacggtgaataggacatgggaacgttactctgtggcttatttctattctccaccgatggattatgtagtttctcctttggttcactctgttgctcgttttcgtgatgtgactgtgaaggagtatattgggattaaggctaagaattttggagaagcattgtcctttattagtacttgaaactatgtatgtatcttatgattttgttatatgtattaattccttaaatatttatctagctagatactttattaatttgcttctttgtaaatttcccatttctgttagttgttaggaagtgctagatatatatcagacttaag

SEQ ID NO: 21892 - protein, 346 aa, Glycine max
NFILIMNTLSEAYKAHPLHLSHIIPLDFSSALSLPDSHAWPHCQPNDDASSSSSSSSIPIIDLMDPNAMDLIGHACEKWGAFQLKNHGIPFGVIEDVEEEAKRLFALPTEQKLKALRSPGGATGYGRARISPFFPKFMWHEGFTIIGSPSHDAKKIWPNDYARFCDLMENYEKQMKVLADRLTEMIFNLMDISEEKRKWVGASNISEAVQLNFYPSCPEPNRAMGLAPHTDTSLFTILHQSQITGLQIFKEGKGWVPVHPHPNTLVVHTGDLLHIISNARFRCALHRVTVNRTWERYSVAYFYSPPMDYVVSPLVHSVARFRDVTVKEYIGIKAKNFGEALSFIST

SEQ ID NO: 21893 - protein, 341 aa, Glycine max
MNTLSEAYKAHPLHLSHIIPLDFSSALSLPDSHAWPHCQPNDDASSSSSSSSIPIIDLMDPNAMDLIGHACEKWGAFQLKNHGIPFGVIEDVEEEAKRLFALPTEQKLKALRSPGGATGYGRARISPFFPKFMWHEGFTIIGSPSHDAKKIWPNDYARFCDLMENYEKQMKVLADRLTEMIFNLMDISEEKRKWVGASNISEAVQLNFYPSCPEPNRAMGLAPHTDTSLFTILHQSQITGLQIFKEGKGWVPVHPHPNTLVVHTGDLLHIISNARFRCALHRVTVNRTWERYSVAYFYSPPMDYVVSPLVHSVARFRDVTVKEYIGIKAKNFGEALSFIST

SEQ ID NO: 21894 - protein, 283 aa, Glycine max
MDPNAMDLIGHACEKWGAFQLKNHGIPFGVIEDVEEEAKRLFALPTEQKLKALRSPGGATGYGRARISPFFPKFMWHEGFTIIGSPSHDAKKIWPNDYARFCDLMENYEKQMKVLADRLTEMIFNLMDISEEKRKWVGASNISEAVQLNFYPSCPEPNRAMGLAPHTDTSLFTILHQSQITGLQIFKEGKGWVPVHPHPNTLVVHTGDLLHIISNARFRCALHRVTVNRTWERYSVAYFYSPPMDYVVSPLVHSVARFRDVTVKEYIGIKAKNFGEALSFIST

SEQ ID NO: 21895 - DNA, 1429 bp, Glycine max
atgaagatgtgtccacgactccgaaattcctatggcattggtgtgatctccttagttctgatattggtatcagtaaatgtaaaggtagcgagtggggtgtactatgccataaattgcagaaagcatagtgcagttttgacagattttggtggggttggtgatggcataacatccaacacaaaggcctttcaatctgcaataagcaaacttagccaatatgcatctgatggaggtgcaatgcttgttgtgccacctgggaaatggctaaccggaccctttaatctcacaagccattttactctttttctcgactttggtgctgttattcttgcatctcaggatgaatcagaatggccccaacttcctgtattaccttcatatggaagaggaagagatgctcccggaggaaggtttagcagtctaatttttggaactcacctcacagatgttgttataactggtaacaatggtctaattgatgggcaaggagcttattggtggaacaagttccatcagggtcaattgactctcactaggccatatttgatagagatcatgtactctgatcaaatccagatatcatttctcactttggtcaactcgcctacctggtttgtccatccagtatacagtagtaacataataataaaagggctaaccattaaagcaccagtggactctcccaacacagatgggataaacccagattcatgttcaaacattaggattgaagattgcaacattacttccggtgatgattgcattgcggtaaaaagtggctgggatgagtatggaattagatttggaatgccaacccaacacttaatcattaggaggattacttgtgtatcccctgatagtgctatgattgctttagggagtgaaatgtctggtggaatctatgatgttagagctgaagatctcactgccatcaacactgaagcagcagttagaatcaaaacagcaattggtagaggtggatatgtgaaaaacatatttgtcaaaggaatgaatctcaacaccatgaaatatgtattttggattactggcacttatggagaccaccctgaccctggctatgatcccaaagcactaccttacattaccgggataaattatagagacgttgttgcaacgaatgtcacaaagtccgcaagacttgaaggaatttccaatgatcctttcacaggaatctgcatttctaatgtgagtattcaagtgagtgaacaacagaagaagcttcaatggaattgcagtaacatttctggagttacaagcaatgtcactccttacccttgtgcattgctgccagagaaagggcaattggagtgtccttttccaactgacacacttcccattgacaatgttcagctcaagtcttgtaactaataacatggctatatttgaattctgatcactagttttcatt

SEQ ID NO: 21896 - protein, 462 aa, Glycine max
MKMCPRLRNSYGIGVISLVLILVSVNVKVASGVYYAINCRKHSAVLTDFGGVGDGITSNTKAFQSAISKLSQYASDGGAMLVVPPGKWLTGPFNLTSHFTLFLDFGAVILASQDESEWPQLPVLPSYGRGRDAPGGRFSSLIFGTHLTDVVITGNNGLIDGQGAYWWNKFHQGQLTLTRPYLIEIMYSDQIQISFLTLVNSPTWFVHPVYSSNIIIKGLTIKAPVDSPNTDGINPDSCSNIRIEDCNITSGDDCIAVKSGWDEYGIRFGMPTQHLIIRRITCVSPDSAMIALGSEMSGGIYDVRAEDLTAINTEAAVRIKTAIGRGGYVKNIFVKGMNLNTMKYVFWITGTYGDHPDPGYDPKALPYITGINYRDVVATNVTKSARLEGISNDPFTGICISNVSIQVSEQQKKLQWNCSNISGVTSNVTPYPCALLPEKGQLECPFPTDTLPIDNVQLKSCN

SEQ ID NO: 21897 - protein, 460 aa, Glycine max
MCPRLRNSYGIGVISLVLILVSVNVKVASGVYYAINCRKHSAVLTDFGGVGDGITSNTKAFQSAISKLSQYASDGGAMLVVPPGKWLTGPFNLTSHFTLFLDFGAVILASQDESEWPQLPVLPSYGRGRDAPGGRFSSLIFGTHLTDVVITGNNGLIDGQGAYWWNKFHQGQLTLTRPYLIEIMYSDQIQISFLTLVNSPTWFVHPVYSSNIIIKGLTIKAPVDSPNTDGINPDSCSNIRIEDCNITSGDDCIAVKSGWDEYGIRFGMPTQHLIIRRITCVSPDSAMIALGSEMSGGIYDVRAEDLTAINTEAAVRIKTAIGRGGYVKNIFVKGMNLNTMKYVFWITGTYGDHPDPGYDPKALPYITGINYRDVVATNVTKSARLEGISNDPFTGICISNVSIQVSEQQKKLQWNCSNISGVTSNVTPYPCALLPEKGQLECPFPTDTLPIDNVQLKSCN

SEQ ID NO: 21898 - protein, 383 aa, Glycine max
MLVVPPGKWLTGPFNLTSHFTLFLDFGAVILASQDESEWPQLPVLPSYGRGRDAPGGRFSSLIFGTHLTDVVITGNNGLIDGQGAYWWNKFHQGQLTLTRPYLIEIMYSDQIQISFLTLVNSPTWFVHPVYSSNIIIKGLTIKAPVDSPNTDGINPDSCSNIRIEDCNITSGDDCIAVKSGWDEYGIRFGMPTQHLIIRRITCVSPDSAMIALGSEMSGGIYDVRAEDLTAINTEAAVRIKTAIGRGGYVKNIFVKGMNLNTMKYVFWITGTYGDHPDPGYDPKALPYITGINYRDVVATNVTKSARLEGISNDPFTGICISNVSIQVSEQQKKLQWNCSNISGVTSNVTPYPCALLPEKGQLECPFPTDTLPIDNVQLKSCN

SEQ ID NO: 21899 - DNA, 1567 bp, Glycine max
tcaacgctggctcagccgatttcgtgatttccgcagagactcgttgccgtcgtccacctctttttatcgcaaacgagtgattaaggatttcagttctgaagaagattcaactcttgttcgtatgatgcaagctgttgcggttcctgttcttggaaatgtctgtcacgtgtttatgaacggattaaacagtgtgcaggtatatggtttagaaaaactgcactccgctttactgcaaagacctaaaggaaaacctcttcttacggtcagcaatcatgttgcttccatggatgatcctcttgttattgcttcgctgcttcctccgagtgttcttttggacgctaggaatctcagatggacgctttgcgcaactgataggtgttttaaaaaccctgtgacttctgcattctttcgatcagtcaaagttttgccagtttctcggggtgatggcatttatcaggagggaatggacttggccatatcaaaattgaaccatggtggttgggtccacatattcccagaaggcagtcgctcccgggatggtggaaaaaccatgggctcttccaagagaggtgttgggaggttagtcctggatggagatagcatgcctcttgttgtcccatttgtacatacagggatgcaggagattatgcctgtaggtgctaactttcccagaataggcaagatggttacagtgctcataggtgatccgatcaattttgatgatataattgaatttgacaaagacaaaggctcaaatgtgcccagaagacgactatatgatgcagtagcatctagaattggtgatcggttgcatgagatgaaggtccaggttgacactatcgcaattgatcaagaaatgcagctacaagataagtcctcacacagcactgaacgaacatctaaaatactgcagcaggttgattgggaattatttggaatggatagcttcatgtctgtagaagatgattccaagcagagacaagaaacagttgccctctcaaatgttagtgtttctcagcatcatcaacaatctcatagtgatcagagttggagagctgggttctcatacaggatgcgtggttatattgatcagatggagcttgtgtcttttgctgcgagaggtatatttctgaataatgatacaaagaactctgctcgccctagcagagagatgggccccttaaaggcatggaagcagtttttggaagctaatctattaaggcagtggaattacgtccattactgaaaaaaacatagttctatagagggtgtaaattcaaatcttcggttttcaattaaaataattgagtttttgttaaataaaacagttaaatgcagtagaattgttgagaatttgtgactcaaatagctaacattttcgtttagtttgattaagtttcagggttgaaattatattgttgcacgcggtcctgaagatagaactgtataagccctttcatgtaatatatgcatagttatttactaatgtatacagtatactcttattttttagagaatatattttagtaagttgtaattttcattttctaaaaacataattaagttg

SEQ ID NO: 21900 - protein, 414 aa, Glycine max
QRWLSRFRDFRRDSLPSSTSFYRKRVIKDFSSEEDSTLVRMMQAVAVPVLGNVCHVFMNGLNSVQVYGLEKLHSALLQRPKGKPLLTVSNHVASMDDPLVIASLLPPSVLLDARNLRWTLCATDRCFKNPVTSAFFRSVKVLPVSRGDGIYQEGMDLAISKLNHGGWVHIFPEGSRSRDGGKTMGSSKRGVGRLVLDGDSMPLVVPFVHTGMQEIMPVGANFPRIGKMVTVLIGDPINFDDIIEFDKDKGSNVPRRRLYDAVASRIGDRLHEMKVQVDTIAIDQEMQLQDKSSHSTERTSKILQQVDWELFGMDSFMSVEDDSKQRQETVALSNVSVSQHHQQSHSDQSWRAGFSYRMRGYIDQMELVSFAARGIFLNNDTKNSARPSREMGPLKAWKQFLEANLLRQWNYVHY

SEQ ID NO: 21901 - protein, 374 aa, Glycine max
MMQAVAVPVLGNVCHVFMNGLNSVQVYGLEKLHSALLQRPKGKPLLTVSNHVASMDDPLVIASLLPPSVLLDARNLRWTLCATDRCFKNPVTSAFFRSVKVLPVSRGDGIYQEGMDLAISKLNHGGWVHIFPEGSRSRDGGKTMGSSKRGVGRLVLDGDSMPLVVPFVHTGMQEIMPVGANFPRIGKMVTVLIGDPINFDDIIEFDKDKGSNVPRRRLYDAVASRIGDRLHEMKVQVDTIAIDQEMQLQDKSSHSTERTSKILQQVDWELFGMDSFMSVEDDSKQRQETVALSNVSVSQHHQQSHSDQSWRAGFSYRMRGYIDQMELVSFAARGIFLNNDTKNSARPSREMGPLKAWKQFLEANLLRQWNYVHY

SEQ ID NO: 21902 - protein, 373 aa, Glycine max
MQAVAVPVLGNVCHVFMNGLNSVQVYGLEKLHSALLQRPKGKPLLTVSNHVASMDDPLVIASLLPPSVLLDARNLRWTLCATDRCFKNPVTSAFFRSVKVLPVSRGDGIYQEGMDLAISKLNHGGWVHIFPEGSRSRDGGKTMGSSKRGVGRLVLDGDSMPLVVPFVHTGMQEIMPVGANFPRIGKMVTVLIGDPINFDDIIEFDKDKGSNVPRRRLYDAVASRIGDRLHEMKVQVDTIAIDQEMQLQDKSSHSTERTSKILQQVDWELFGMDSFMSVEDDSKQRQETVALSNVSVSQHHQQSHSDQSWRAGFSYRMRGYIDQMELVSFAARGIFLNNDTKNSARPSREMGPLKAWKQFLEANLLRQWNYVHY

SEQ ID NO: 21903 - DNA, 1246 bp, Glycine max
ttactccattcgtccttttccttttatttacaccacatagccccaccctcaccctcttacagaatgggaaggactccggtcaggtttgagagggtagcggcggcctttgacgctgacgtggcgcgtgtgaggctctgcaatagcagcgagaatgagcagcactcgccggaggactcggctgatttgtcagatctggtgaaatcgttcatggagagagggggagagggagaagatgcggttggtgttcgttcggatgatggggttgagaattttgattctgagaagagggagattttggagggaatatttgatgatgacgacggggatgccaaagaaaagattagaagagaagttcaacttgcatgggggcttgttgccgaaaaggataactcatcaccccaattcaaacaacagttgatgtctctcctacggtacagaggttttgatgctgggctctgcaaatgcaagtgggaaaaaaatacaagattcccagctggtgactatgagtacatcgacgtaaattttgcaggaaatcgctacattgttgaaatttcccttgtcacagaattcgaaatagctcgttccacagaccaatatgccgcgttacttgatgttttccctctaatatttgttggtaaaatggaagaactcaagcaggttgtgaggctaatgtgcactgctattaagggttctatgaaaagcatgaatatgtatatacctccgtggagaagaattgggtacatgcaagctaagtggtttagttcttacaaaagaataacggacgaggttgcaactaacagggcatcatcagcttttttcactacaaggtccattggatttgatgcaaggccagtgaaatcctacaattgcagggatgattatgggactaaacctgcattcagagtttgccatttgactactgcattttatgtggacagccctgggatgcaattatagtcaaatgctgcggcatgtgcattcatctaattgctttttggtgaattaatggtgttgataaatgagtgagtggaagtgccttagctcgggcataaaaagcgcttaagcaaagattttggtgcagtgttctggcggaattttgtttttattactagggatagtatcatagcaaggatgattggtaggagataataattagtgaaatcaatgtaaagtagataattggttggttggttgctccaaaatgtaatttctcttcaaattatatatattagtgatggttgtgttt

SEQ ID NO: 21904 - protein, 318 aa, Glycine max
LLHSSFSFYLHHIAPPSPSYRMGRTPVRFERVAAAFDADVARVRLCNSSENEQHSPEDSADLSDLVKSFMERGGEGEDAVGVRSDDGVENFDSEKREILEGIFDDDDGDAKEKIRREVQLAWGLVAEKDNSSPQFKQQLMSLLRYRGFDAGLCKCKWEKNTRFPAGDYEYIDVNFAGNRYIVEISLVTEFEIARSTDQYAALLDVFPLIFVGKMEELKQVVRLMCTAIKGSMKSMNMYIPPWRRIGYMQAKWFSSYKRITDEVATNRASSAFFTTRSIGFDARPVKSYNCRDDYGTKPAFRVCHLTTAFYVDSPGMQL

SEQ ID NO: 21905 - protein, 297 aa, Glycine max
MGRTPVRFERVAAAFDADVARVRLCNSSENEQHSPEDSADLSDLVKSFMERGGEGEDAVGVRSDDGVENFDSEKREILEGIFDDDDGDAKEKIRREVQLAWGLVAEKDNSSPQFKQQLMSLLRYRGFDAGLCKCKWEKNTRFPAGDYEYIDVNFAGNRYIVEISLVTEFEIARSTDQYAALLDVFPLIFVGKMEELKQVVRLMCTAIKGSMKSMNMYIPPWRRIGYMQAKWFSSYKRITDEVATNRASSAFFTTRSIGFDARPVKSYNCRDDYGTKPAFRVCHLTTAFYVDSPGMQL

SEQ ID NO: 21906 - protein, 249 aa, Glycine max
MERGGEGEDAVGVRSDDGVENFDSEKREILEGIFDDDDGDAKEKIRREVQLAWGLVAEKDNSSPQFKQQLMSLLRYRGFDAGLCKCKWEKNTRFPAGDYEYIDVNFAGNRYIVEISLVTEFEIARSTDQYAALLDVFPLIFVGKMEELKQVVRLMCTAIKGSMKSMNMYIPPWRRIGYMQAKWFSSYKRITDEVATNRASSAFFTTRSIGFDARPVKSYNCRDDYGTKPAFRVCHLTTAFYVDSPGMQL

SEQ ID NO: 21907 - DNA, 1482 bp, Glycine max
atataaaaataaattaaaaatatcttttaaaaaaattgcagtggcagcacacacatctttgtgtttcaaaaatggaacctaatgacaaccaactcacctctttcttccaccaccaccaccaacagcaccaacaccaccagccgccgccaccaccgcagaccacggcgtctccgaccaacgggctcttgccgaacgcggatgggtcccacatactttacccccactctgtggcgtccgctgtttcgtcgcagcttgaaccggcgaagcggaagcgcgggcggccgaggaagtacggaacgccggagcaagctctggccgcgaagaaagccgctacgacgttgtctcattcgttctctgtggacaagaagccccactccccgacgttcccttcctccaagaaatcccattccttcgctctaggcaatgcagggcaagggttcactccgcatgtcatttctgttgctgctggtgaggatgttggccagaaaattatgttatttatgcaacaaagtaggcgtgagatgtgtattctgtctgcatctggttccatctctaatgcctctcttcgccagccagcaacctcaggaggcagcattgcatatgagggtcggtttgagattatttcacttactggttcttatgtccgtaatgaacttggaactcgaactggtggtctcagtgtatgcttatctaatactgatggacaaatcataggtggtggagttggtgggccgcttaaagcagctggtccagttcaggtcatcgttggaacattctttattgacaacaagaaggatactggtgctggtgttaaaggtgacatctctgccagcaagttgccatctccagttggtgaaccggtatcaagtttaggtttccgccaatcagttgactctcccagtggtaatccaatccggggaaatgatgagcatcaagctatggggggaagtcatttcatgattcaacagcttggtttgcatgggacgcctccccggtccacagactggggtcatccggattcaagaaatactggttttgagttgacaggtcatggggcgcaccagtctcctgagaatggaggctatgaacaaattcccgattgaagaaccaagatggcttttggatttgatagcagtgatgaatttgcggtagatgtatgatatctctacataccaccagtctttgtcacgtgatgctgtttatagtatgcaccattcattaaggatcgcggcttctgaaaattaatactcgtgcatctccttgaaaatattgttctgcctcgtttactgatgttgtatttataaatcactaaatcagggctgcttcatttttgcgggcctgttagtttataccgggataaatataatagatatatgcttcctagattagctaatctattgtggactatattttccttccattttcaaggtgcagtcttaatattgttcaaaattctatcaagcatatattattatggttctt

SEQ ID NO: 21908 - protein, 343 aa, Glycine max
MEPNDNQLTSFFHHHHQQHQHHQPPPPPQTTASPTNGLLPNADGSHILYPHSVASAVSSQLEPAKRKRGRPRKYGTPEQALAAKKAATTLSHSFSVDKKPHSPTFPSSKKSHSFALGNAGQGFTPHVISVAAGEDVGQKIMLFMQQSRREMCILSASGSISNASLRQPATSGGSIAYEGRFEIISLTGSYVRNELGTRTGGLSVCLSNTDGQIIGGGVGGPLKAAGPVQVIVGTFFIDNKKDTGAGVKGDISASKLPSPVGEPVSSLGFRQSVDSPSGNPIRGNDEHQAMGGSHFMIQQLGLHGTPPRSTDWGHPDSRNTGFELTGHGAHQSPENGGYEQIPD

SEQ ID NO: 21909 - protein, 203 aa, Glycine max
MLFMQQSRREMCILSASGSISNASLRQPATSGGSIAYEGRFEIISLTGSYVRNELGTRTGGLSVCLSNTDGQIIGGGVGGPLKAAGPVQVIVGTFFIDNKKDTGAGVKGDISASKLPSPVGEPVSSLGFRQSVDSPSGNPIRGNDEHQAMGGSHFMIQQLGLHGTPPRSTDWGHPDSRNTGFELTGHGAHQSPENGGYEQIPD

SEQ ID NO: 21910 - protein, 200 aa, Glycine max
MQQSRREMCILSASGSISNASLRQPATSGGSIAYEGRFEIISLTGSYVRNELGTRTGGLSVCLSNTDGQIIGGGVGGPLKAAGPVQVIVGTFFIDNKKDTGAGVKGDISASKLPSPVGEPVSSLGFRQSVDSPSGNPIRGNDEHQAMGGSHFMIQQLGLHGTPPRSTDWGHPDSRNTGFELTGHGAHQSPENGGYEQIPD

SEQ ID NO: 21911 - DNA, 1164 bp, Glycine max
aagcttttgtaccaaaattgggagcttgatgctgctatttctttggaaggaaggcttctacactctgatcaattcaaatgtttggacaaggctgcaattgtgacaaatgaagagggtagtgatccaaatgcaccaccaaacttatggaaactagccacagtccacagagttgaggagctaaaatccatggttagaatgcttccaatttgggcctcaggaatattgctcataaccgcttcatcaaaccagcagagttttgtgattcaacaggctcgcacaatgaacagacacctctctcactccctccaaatccctccagcaagcatgtccatcttcaacgtcctaaccatgatggtaggcgtcgttctctacgaacgccttttcgttccctttgcttttagactcacaaagaacccttctggaatcacatgcctgcagagaatgggagtaggttttgtggttagcatctttgccacactagtttctgcattggtggaaatcaaaagaaaatcagttgctgcaaagtacaacttattggacagtccaaatgccactattcctattagtgtgttctggttggtgcctcagtattgtcttcatggtgtggctgaagttttcatggttgtgggacatttggaatttctctatgatcaatcacctgaaagcatgagaagcaccgctacagcgctatactgcataactactgccattgggaactacgttggcacactattggtgacattggttcataagtattctggcaatgagaggaattggttgcctgataggaacctcaataggggtagattgtagtgctattattttcttattagtgggattcaggttgtgaatcttatttattatctaatatgcgcttggttttatacctacaagcccttggaggaaattggtgatataaacaagcaagaagacatggaaaaggacattgaaaaaatcaaacatgaaaatttgttagaggggtagggagggagaagatagagagagtttgcaaagaatgaatgaattgatgttcttgttgatgttggaatctgataattgttcaattcctcattgaatgtaaccacatgccagggcgtttcttgttattttctaatgtgctttagtcttttgacattaatgaatgatgagtaatttcatttcctt

SEQ ID NO: 21912 - protein, 270 aa, Glycine max
KLLYQNWELDAAISLEGRLLHSDQFKCLDKAAIVTNEEGSDPNAPPNLWKLATVHRVEELKSMVRMLPIWASGILLITASSNQQSFVIQQARTMNRHLSHSLQIPPASMSIFNVLTMMVGVVLYERLFVPFAFRLTKNPSGITCLQRMGVGFVVSIFATLVSALVEIKRKSVAAKYNLLDSPNATIPISVFWLVPQYCLHGVAEVFMVVGHLEFLYDQSPESMRSTATALYCITTAIGNYVGTLLVTLVHKYSGNERNWLPDRNLNRGRL

SEQ ID NO: 21913 - protein, 208 aa, Glycine max
MVRMLPIWASGILLITASSNQQSFVIQQARTMNRHLSHSLQIPPASMSIFNVLTMMVGVVLYERLFVPFAFRLTKNPSGITCLQRMGVGFVVSIFATLVSALVEIKRKSVAAKYNLLDSPNATIPISVFWLVPQYCLHGVAEVFMVVGHLEFLYDQSPESMRSTATALYCITTAIGNYVGTLLVTLVHKYSGNERNWLPDRNLNRGRL

SEQ ID NO: 21914 - protein, 205 aa, Glycine max
MLPIWASGILLITASSNQQSFVIQQARTMNRHLSHSLQIPPASMSIFNVLTMMVGVVLYERLFVPFAFRLTKNPSGITCLQRMGVGFVVSIFATLVSALVEIKRKSVAAKYNLLDSPNATIPISVFWLVPQYCLHGVAEVFMVVGHLEFLYDQSPESMRSTATALYCITTAIGNYVGTLLVTLVHKYSGNERNWLPDRNLNRGRL

SEQ ID NO: 21915 - DNA, 1365 bp, Glycine max
cctttcctcctcttctgttcttttattctagggttacaaagttttccttccatacttgccggcagccgtgtggtcttgatagagcgacaccgtgccaccgcgccaccacccaaccttgcagccccaagtctgcgtttccgcagatccactgtccgcacataaaggtgtatactctgctcagttatatcatttgctaataattttcactatctttacgacgccgccaccgaccccaagcccgccgtctgcgccgcgcactccgacgccgcggcggcccatctgatcaagatcaacgggaggtttactcgttcgtgtcaagctcaaaggttgaaacaaacacgaaggcgctgaaacaaccctaagaagtaagaaccagattttatctccatacagtagaagtaaaacagtatattgtagccattcggttgagttcaaattgaaagagacaagatggccgggcaatcaaaccatgacctttcattgttttcagctgaggagcttgagttcattgctgaagatgagatcgtggacattgtacccaatctcaaaatgagtgctctcaatttcatttctggagattttggcccatttacgccccagattgttacccaagtaccactgtggttggccactgctctcaagaagagaggcaagtgctccatttgccctccccaatggatgtctgttgagaagttgagtcaagttttggaggcagagcgagactctcaagagatgtcagatcaattgccatttcattatgtggaaatctcaagacttctttttgatcatgcacgtgacaacattcctgatgtatatatggtgaggtctctaattgaggacatcagaaatgttcggtttcataaagttgaaactgatttggaagcatttaatggtcgtacaattgctgttaagattaaaaatttatctgcaatggaagtgaatattgttcgtccatttattggaagagctttacaggcattttataagcatgatagtccagagctgataccagacccagagagagtttctgataggcgcccccaagttatcaacaatgctccaagaagacaactacgaagatagtcattgtcacctattggtaacatctcttctagaatcataagcatttggcccgcttcaaaggggcatctttcatgagaaatacttcacaactttctttgctgctgacttcagtgtaaatgaatggcttgagacatggtcgaatcttcagaaagtaatgttctctcaaaatattctcataattatttgtcaagagtctgaaaaagcaaagcacttcatgggattaacatggccatgcccccatatactttatgttgttaattctattagtagtgttaagtattt

SEQ ID NO: 21916 - protein, 210 aa, Glycine max
MAGQSNHDLSLFSAEELEFIAEDEIVDIVPNLKMSALNFISGDFGPFTPQIVTQVPLWLATALKKRGKCSICPPQWMSVEKLSQVLEAERDSQEMSDQLPFHYVEISRLLFDHARDNIPDVYMVRSLIEDIRNVRFHKVETDLEAFNGRTIAVKIKNLSAMEVNIVRPFIGRALQAFYKHDSPELIPDPERVSDRRPQVINNAPRRQLRR

SEQ ID NO: 21917 - protein, 177 aa, Glycine max
MSALNFISGDFGPFTPQIVTQVPLWLATALKKRGKCSICPPQWMSVEKLSQVLEAERDSQEMSDQLPFHYVEISRLLFDHARDNIPDVYMVRSLIEDIRNVRFHKVETDLEAFNGRTIAVKIKNLSAMEVNIVRPFIGRALQAFYKHDSPELIPDPERVSDRRPQVINNAPRRQLRR

SEQ ID NO: 21918 - protein, 134 aa, Glycine max
MSVEKLSQVLEAERDSQEMSDQLPFHYVEISRLLFDHARDNIPDVYMVRSLIEDIRNVRFHKVETDLEAFNGRTIAVKIKNLSAMEVNIVRPFIGRALQAFYKHDSPELIPDPERVSDRRPQVINNAPRRQLRR

SEQ ID NO: 21919 - DNA, 1401 bp, Glycine max
gacttagattctgattctgggattggatggagctaggcctcatggataagaatccaacgaagctggaacactttgatgacatgtggaggctcgaatccactgccacactattatctcacttgaagggggatgatggtcgacatgtcttgacattggatcgtacaatattctatccgcaaggtggtggtcaacctgcggatactggctttgtactcattcatggctttgataacaacaaatttctggtttctgatgttcggtccaaagatggaattgtttttcactatggtttctttgagaacctgggcggggaatttgagcctacactcgagaaagggaaggaggtttcactctttgttgatcagcccaggcgaaaactcaactccagattgcattcagcaggacatttgcttgatatttgtttgccaagaataggattgggaaatttagagcctagcaaagcctaccattttcctgatgggtatatcattttcctgtttttgaatctttttatgcgcctaatctgaataggttgagtcttgaaagtgatctatttaatatccaagctgactggcagtgtggtatacatcaaatcattgctgatgtaggataatattaatcatgatcaaatgggtttgctagaagtctaacccttatcttcgtcacccaaagatttgcatggtgacacaggtcttgtaatgatttttttggtgatgtttacatctttgaggggacttgcatggtaaaaaaaatctatagaagactaatataatgaataatatgtggaagaccaatttaatcaggggtttactcagaaagatctaaccttcactaatcaatctcctgctgttgtactcccatgagtattccgttgaaatgtgttcagaagttctaaagtttgcttcatacttgctattgtattgtaactattgtttccaggccttgggttgaatacaaaggtacaatttcacaaaatgaaatgcagagtaagcaaaaggatttagagctggaggccaatgcattaatttccatgggaggaaaagtttctgttgatatattaccatatgatgaagctgctaagctttgtggtgggtgtcttcctgattatgttcccaaggaaagcacacctcgcattgtgaggataagagataatcctggctgcccctgtggtggtactcacgttgctgacatttcagacatcaaacaaattaaggtatgaaatccatttatttaaactagtcagctagataggttaggtttgatattttttgtgtcaattactcagtttgctctttgtaactaataaggctttatttctttgtacatttattacgttttataagtagcaccattgaagttgtttgattgaagctgttgaattaatccaaacttggttgttct

SEQ ID NO: 21920 - protein, 166 aa, Glycine max
MELGLMDKNPTKLEHFDDMWRLESTATLLSHLKGDDGRHVLTLDRTIFYPQGGGQPADTGFVLIHGFDNNKFLVSDVRSKDGIVFHYGFFENLGGEFEPTLEKGKEVSLFVDQPRRKLNSRLHSAGHLLDICLPRIGLGNLEPSKAYHFPDGYIIFLFLNLFMRLI

SEQ ID NO: 21921 - protein, 161 aa, Glycine max
MDKNPTKLEHFDDMWRLESTATLLSHLKGDDGRHVLTLDRTIFYPQGGGQPADTGFVLIHGFDNNKFLVSDVRSKDGIVFHYGFFENLGGEFEPTLEKGKEVSLFVDQPRRKLNSRLHSAGHLLDICLPRIGLGNLEPSKAYHFPDGYIIFLFLNLFMRLI

SEQ ID NO: 21922 - protein, 148 aa, Glycine max
MWRLESTATLLSHLKGDDGRHVLTLDRTIFYPQGGGQPADTGFVLIHGFDNNKFLVSDVRSKDGIVFHYGFFENLGGEFEPTLEKGKEVSLFVDQPRRKLNSRLHSAGHLLDICLPRIGLGNLEPSKAYHFPDGYIIFLFLNLFMRLI

SEQ ID NO: 21923 - DNA, 791 bp, Glycine max
tgtggacaaaagtggaaccatagactatggggagtttattgctgcaacagttcatctcaacaaactagagcgtgaagaacatctcattgcagcattccaatattttgacaaggatggtagtgggtacattacagttgatgaacttcaacaagcttgtgcagaacaaaacatgactgacgctcttcttgaagacatcattagagaagttgatcaagataatgatggaaggattgattatggtgaatttgctgccatgatgcaaaaaggcaacgctgggattggtaggagaactatgcgcaacagtctgagtttaagcatgagagatgcaccaagtgctcaatagcttatgattgtgctcattatgtacaggttgtatgcagcaaagccagaaagaaaaaataaagcaaaaatctttacaaaaaattgttcatatctgctgaccagtcctatccctgaagaacaatcaggattgtgggtgctctcgcatgaggactcatcaagcgttacatttatgtgctgtatgagtggaaaatttgtttctcgctttgtaaaccttagtgttgggtgttacagctatttcaagttggtcttctattttttctgtgatttcatgtaggggcattctgtctatagttgaagtagaaggattttgatctttcaagttcttgatttcacggatgtaaagtttcacacgtatgacatgatgtattgggcgaactaagaagccttttggattatgtcggagcacatgcattgtgttaaagtgacagtgctgaagcattttatttcgc

SEQ ID NO: 21924 - protein, 113 aa, Glycine max
VDKSGTIDYGEFIAATVHLNKLEREEHLIAAFQYFDKDGSGYITVDELQQACAEQNMTDALLEDIIREVDQDNDGRIDYGEFAAMMQKGNAGIGRRTMRNSLSLSMRDAPSAQ

SEQ ID NO: 21925 - protein, 89 aa, Glycine max
MIVLIMYRLYAAKPERKNKAKIFTKNCSYLLTSPIPEEQSGLWVLSHEDSSSVTFMCCMSGKFVSRFVNLSVGCYSYFKLVFYFFCDFM

SEQ ID NO: 21926 - protein, 84 aa, Glycine max
MYRLYAAKPERKNKAKIFTKNCSYLLTSPIPEEQSGLWVLSHEDSSSVTFMCCMSGKFVSRFVNLSVGCYSYFKLVFYFFCDFM

SEQ ID NO: 21927 - protein, 57 aa, Glycine max
MTDALLEDIIREVDQDNDGRIDYGEFAAMMQKGNAGIGRRTMRNSLSLSMRDAPSAQ

SEQ ID NO: 21928 - DNA, 1251 bp, Glycine max
aacgccgccgcctcccagcgtgcaccttcctcagcgccgccggccgtgtcctccattagcgccaccgcccctcgacggtcgcctgctccaccgccttcaccttccaactcgaccttgctggccacgcaacagcttctaaagccaccccttccagtggagccaccgccaccgccgccgccgccgccttgcccttacggtggccacctattcgccggaataattagtggtgagaatgggacactcaatcgcgtcttccagtatgtctgcccttcgatctggcgcacggtgagcccgggacgaaccctagcttcatggctccccttgcctgccggggttcctccaccttgctactccgatgagtggtgttcggcctcagctccattccgggccgccctaccgggtgttggccatagtgatgataaagttcttgtctttgttcttgctgctacgagtatgccatatgctctggatcaggctgtgcggcgacagtttgacaagcgtatcctacattcctttacctgactctgagagcaaggcagcatatgtttaaggtccatctttggggatacagcacacagctcatcggaaagtgattttgaggtcttgggccatgggacagatggattttctggttccggcattgctctctgtaacagcacaagtagtttccgcacaatcctgagttgtgtctgtacaatgtgacatgtttctagttcttgctatttgttaacaggtgaaagatatcttgtttgagcccgtgcgtaagacatgggatgtaatgttcttttagactgatggtggcactgtccagactacgatccaggagcttgcatccaaaggcacctgatcgcttcacagattctttcacccctgatcccagtgactgatgtcaagaaagtcctcgctggcagaggccgaccgttggcaagacggacctggaagtacacgagaagctcaagaaacagttcagtgaagagggttgatttgctgccagtactctctggagtctcaatccaacaagtgtattaaagagtaaggattcttaaggtggggagtccttgtgctgtagcttcatagtaattgttttcagtctctctggcatctaaaattactttttactcttttcgacggcgtgtgccacatgagttttgtgccgggctacctgcaacgatacctgaatcatgtaagcgccacttgacagctgaattatactttgtcctgtggattcagtggtacctcctgtaaactttt

SEQ ID NO: 21929 - protein, 173 aa, Glycine max
NAAASQRAPSSAPPAVSSISATAPRRSPAPPPSPSNSTLLATQQLLKPPLPVEPPPPPPPPPCPYGGHLFAGIISGENGTLNRVFQYVCPSIWRTVSPGRTLASWLPLPAGVPPPCYSDEWCSASAPFRAALPGVGHSDDKVLVFVLAATSMPYALDQAVRRQFDKRILHSFT

SEQ ID NO: 21930 - DNA, 1259 bp, Glycine max
ataaaatctcattgtctccgaactcttctttcctcgtactccatcatttccttgttcttcttccttctcttcattctgtctctacccttcaacgcaactttctttcttttctattgagcttccaatattctcacgccttgcaatcgtagttgcaccctccaaactccttcccttttctttcatctaaaccagaaaccttttttccctcaaagagaggaatagagattaacaatcgtggatactgtgatatggttagttgtagagagagaactacaatttttgagaaatataattagggtgcgtgacaaacaatcgtggttcaggtacttgcagtaagagaacatattgtaaaactaaaagggaaaaatggccttagatcactttgaggagactgtgcaccaaaaaggaaattggaaatcttccagtgaaatcattgcagattctgatagaaatgcctctggtgactttgactgcaacatctgcctggagtgtgtgcaagatccagtggtgacactttgtggtcatctttattgctggccctgcatatacaaatggcttcattttcaaagcacctctttggatgatgaagaacaacagaggccacaatgtcctgtatgcaaatcagaagtttctcaatcctcccttgttccattatacggccgtggccaaaccacattaccttctaaagggaagccacgtcaagtaggcactgtcataccacaaagacctcatggtccaagaacacttaacactagaagtgtttcacaacctatttctcaaagttaccatccctatagtaatccttatcatcctcaacaacacttcaactcgattccaagcggttacacctcacctatgattagaacaactggttcaatagacaacacatttggaatctttggtgagatgatatatgcaagggtctttggtaaccacgtgtcaaacattcatacatacgccaattcgtacaatctttcggggaccagtaacccaaggatgagaagacatttaatgcaagttgataaatcactcagcagaataagttgtttcctcctttgctgcctagttttgtgtctgctcttattctgattgctacttcattttcatcattagttatagtgcatccttacatagaatacattcactcattgatccagatgtattctatgttagagaagctgcaaattgatgctgagttatgtgtaaattaccaatctctctacgagctatatgaagtgaataatgatattctcataccg

SEQ ID NO: 21931 - protein, 240 aa, Glycine max
MALDHFEETVHQKGNWKSSSEIIADSDRNASGDFDCNICLECVQDPVVTLCGHLYCWPCIYKWLHFQSTSLDDEEQQRPQCPVCKSEVSQSSLVPLYGRGQTTLPSKGKPRQVGTVIPQRPHGPRTLNTRSVSQPISQSYHPYSNPYHPQQHFNSIPSGYTSPMIRTTGSIDNTFGIFGEMIYARVFGNHVSNIHTYANSYNLSGTSNPRMRRHLMQVDKSLSRISCFLLCCLVLCLLLF

SEQ ID NO: 21932 - DNA, 1042 bp, Glycine max
aaaacaaccccctccaacttctctcattctttttttctttctcttaaattaactacaaaaccaacaaccctcctccaacttcactcatattttttctttctcttaaacttttttaaggaaaaaaaaaatctaaatccttttaaaaccctattaatactaaacatcatataacattcattgttcatcaagaactatctttgtggtcgtgtttgttcaataatgctacaaaattcctccatgtcttccctcctcctccaccggatcaacggtggcggtggtgcaaccacggccaccaactgtcacgacaccgtctttatgacggtgccggatggcgtagcgcgctaccacacccacgcggtagcgccgaaccagtgctgctcctcggtagcgcaggagatcggggcctcggtcgccaccgtgtggtcagtgttgcgccgcttcgacaacccgcaggcctacaagcacttcgtgaagagctgccatgtcatcggcggggacggcgacgtcggcacgctccgggaggttcacgtcatctccggcctgcccgctgccaggagcaccgagcgcctcgagatcctcgacgacgagcgccacgtcatcagcttcagcgtcgtgggcggggaccaccgcctcgccaactaccgctccgtcaccaccctccaccccaccgcttcctccgcctccggaggatgctccggcacggtggtcgtggagtcctacgtggtggacgtgcctcccgggaacacgcgcgaagacacgcgcgtgttcgtcgacactatcgtgaagtgcaaccttcagtcgctcgcgcaaaccgcagagaacttaacgctgcgaaagaacaacaacaacgattacaagtgctgttcttaattttcctcttctttttactattttttgatttacagtgttattatatcgatatatatatatgtgtgtggggggggaggggggtgattgttataattaagtgttgtagatatcgatataatacaatcttaattttacagtgtatattatggataattactggattgttgattgt

SEQ ID NO: 21933 - protein, 216 aa, Glycine max
MLQNSSMSSLLLHRINGGGGATTATNCHDTVFMTVPDGVARYHTHAVAPNQCCSSVAQEIGASVATVWSVLRRFDNPQAYKHFVKSCHVIGGDGDVGTLREVHVISGLPAARSTERLEILDDERHVISFSVVGGDHRLANYRSVTTLHPTASSASGGCSGTVVVESYVVDVPPGNTREDTRVFVDTIVKCNLQSLAQTAENLTLRKNNNNDYKCCS

SEQ ID NO: 21934 - protein, 210 aa, Glycine max
MSSLLLHRINGGGGATTATNCHDTVFMTVPDGVARYHTHAVAPNQCCSSVAQEIGASVATVWSVLRRFDNPQAYKHFVKSCHVIGGDGDVGTLREVHVISGLPAARSTERLEILDDERHVISFSVVGGDHRLANYRSVTTLHPTASSASGGCSGTVVVESYVVDVPPGNTREDTRVFVDTIVKCNLQSLAQTAENLTLRKNNNNDYKCCS

SEQ ID NO: 21935 - protein, 184 aa, Glycine max
MTVPDGVARYHTHAVAPNQCCSSVAQEIGASVATVWSVLRRFDNPQAYKHFVKSCHVIGGDGDVGTLREVHVISGLPAARSTERLEILDDERHVISFSVVGGDHRLANYRSVTTLHPTASSASGGCSGTVVVESYVVDVPPGNTREDTRVFVDTIVKCNLQSLAQTAENLTLRKNNNNDYKCCS

SEQ ID NO: 21936 - DNA, 1480 bp, Glycine max
acttttcctttcatccttgagaccttgacactttcactttctcgcataacccttaaggtgccgcagatacgggcacagcctccctcccttgcgagtcttacaccgtcataagtcacggttgtcatcggagctcttgcggttgctcctcacagtcacagattgttaaaaattgtggtaaatcatggaaaatatcgcgaaccacaacgatgatagcaaacaaaaagaagcgcctcagctggcggcgttgttgaaagaaatgaaggaaggacttgataccgtaaggcataaaattcaatctttaactgccatggtgaaagaaggtctatatcctacagcagatggatttagttaccttgaagttaaaaatttgttgcttctgaattattgtcaatcccttgtttattatttattgcggaaggctaagggattatcaatagaagatcatcctgttgttcgaagtgttgtagagatacgattgtttttggaaaagattcggccaattgacaagaaacaacaataccagatccagaaactgatgcaagctagtgaaaatgcaatcagaagtgatattctaaacaaggagccagttgcatccaataagagcgaggacgcatcaaagtatcgtcccaatcctgacatgcttgttagcaaagtagacctaacctcgcaggctgacaatgagtattatcaacctgtaaaatttgcgcctacttctatggatctagagaaatcttcaaagcatgaaagaaatgccttgcgaagagaaaaagaaattctgaaacaagctaagcagagtgattatcttaggacattgatgaatgatatggaggaaagacctgaagagataagagattttgagggagctagcagagaagttgatagatatattgccaagatggacgaacgtgctcggcaagaggaggagctgttcacacgcgttcctcttacgaaacaggaaaggaaacgagaaaagtatttgaagaaatcaagaaatgggttgcaaggtctaacagaaagtttctatgatgaaatcaaaacattaccctttgaagataaaactggagagcaagtagtgggctctagtaatggtagcagaacaaacaatagactgaagaagcgaaagaggaaacattaaaggaagaaaatttgggttttgagctaaagggctgaaatgctctctggaaaacagaccacttcatgctgttgtcggaagtaatgctagatttaacgaaaacgacagagttggtgttggtgctttcctccgtgtttgtttgtagattttagttacattattgtctttttatttatttatttacttattattattattattataggctcgggtgcttaattgggtacgtgaatttgagattttcgcagagatgaaatgtgtttttttttttgctattacagatgtgcacccatttttgcgatgcaagtggatttttttaacccacctttatatatttaggtggagtac

SEQ ID NO: 21937 - protein, 317 aa, Glycine max
MENIANHNDDSKQKEAPQLAALLKEMKEGLDTVRHKIQSLTAMVKEGLYPTADGFSYLEVKNLLLLNYCQSLVYYLLRKAKGLSIEDHPVVRSVVEIRLFLEKIRPIDKKQQYQIQKLMQASENAIRSDILNKEPVASNKSEDASKYRPNPDMLVSKVDLTSQADNEYYQPVKFAPTSMDLEKSSKHERNALRREKEILKQAKQSDYLRTLMNDMEERPEEIRDFEGASREVDRYIAKMDERARQEEELFTRVPLTKQERKREKYLKKSRNGLQGLTESFYDEIKTLPFEDKTGEQVVGSSNGSRTNNRLKKRKRKH

SEQ ID NO: 21938 - protein, 292 aa, Glycine max
MKEGLDTVRHKIQSLTAMVKEGLYPTADGFSYLEVKNLLLLNYCQSLVYYLLRKAKGLSIEDHPVVRSVVEIRLFLEKIRPIDKKQQYQIQKLMQASENAIRSDILNKEPVASNKSEDASKYRPNPDMLVSKVDLTSQADNEYYQPVKFAPTSMDLEKSSKHERNALRREKEILKQAKQSDYLRTLMNDMEERPEEIRDFEGASREVDRYIAKMDERARQEEELFTRVPLTKQERKREKYLKKSRNGLQGLTESFYDEIKTLPFEDKTGEQVVGSSNGSRTNNRLKKRKRKH

SEQ ID NO: 21939 - protein, 275 aa, Glycine max
MVKEGLYPTADGFSYLEVKNLLLLNYCQSLVYYLLRKAKGLSIEDHPVVRSVVEIRLFLEKIRPIDKKQQYQIQKLMQASENAIRSDILNKEPVASNKSEDASKYRPNPDMLVSKVDLTSQADNEYYQPVKFAPTSMDLEKSSKHERNALRREKEILKQAKQSDYLRTLMNDMEERPEEIRDFEGASREVDRYIAKMDERARQEEELFTRVPLTKQERKREKYLKKSRNGLQGLTESFYDEIKTLPFEDKTGEQVVGSSNGSRTNNRLKKRKRKH

SEQ ID NO: 21940 - DNA, 1186 bp, Glycine max
attcagttccaaaggatacataaccatcaagtttcagttccaaacaaaacccatcaaagtctttctccctcagtgatcatatattcattcagttctatacaaaatcctcaaaaactcttcctctctgccatgaccatggaatacagaaccttagaactcaacatcatatccgcaaaggacatcaagaatgttaatctcttctccaagatggacgtatacgccgccgtttcgctctccggtgaccctctccaccctcagggcgccaccacccacgtccacaaagacgccggcagcaaccccacgtggaactaccccgtgaaattctctgtcaacgaatcgctggcgaaggaaaatcgtttatctcttgagatcaagctcatctccgaccgcaccctcggcgacaccgtcatcggcaccgtccatgttcctctcagggaactcctggataaccccggcgatgacagctccttccgccaagtcagttatcaggtgatgaagcaatcaagaaaatccaagggatccttgaatttctcctacaaattcggcgaacatgttcccgccccggccgccaagacacccaaagcggccaaggcgggacaagagccggtgatggcttatcctcctgctggggcgggatccagttcgatgccctatggtacgccacaccctcccccgccgcagcaatatgcggcgacgggatatgggtatccacctcagcaggtgcatggtggatacccacctcaagcagcatatgggtacccacctcagaccggttatggatacccacaacagtcgggttatggatatccacaacaatccggatatgggtacccacctcaggctcagaaaccaaagaagaacaaatttggaatgggattgggagcaggattgcttggtggtgccttgggtggaatgttgatcggagacatggtatctgatgctgctgaatatgatgcgggctttgatgatgctggtggatttgatttttaattttcagtttttcaatcaaccctgtatttttttttttcttttatatttctggatttcactttttgcctttttcggttgcgtaatgatgttctatgagattgcttattagtatttgtttcagatacctctcattacctgactctgtatttaactgctatgatataaagtataacatacagcctgtgatttcctcgct

SEQ ID NO: 21941 - protein, 329 aa, Glycine max
IQFQRIHNHQVSVPNKTHQSLSPSVIIYSFSSIQNPQKLFLSAMTMEYRTLELNIISAKDIKNVNLFSKMDVYAAVSLSGDPLHPQGATTHVHKDAGSNPTWNYPVKFSVNESLAKENRLSLEIKLISDRTLGDTVIGTVHVPLRELLDNPGDDSSFRQVSYQVMKQSRKSKGSLNFSYKFGEHVPAPAAKTPKAAKAGQEPVMAYPPAGAGSSSMPYGTPHPPPPQQYAATGYGYPPQQVHGGYPPQAAYGYPPQTGYGYPQQSGYGYPQQSGYGYPPQAQKPKKNKFGMGLGAGLLGGALGGMLIGDMVSDAAEYDAGFDDAGGFDF

SEQ ID NO: 21942 - protein, 286 aa, Glycine max
MTMEYRTLELNIISAKDIKNVNLFSKMDVYAAVSLSGDPLHPQGATTHVHKDAGSNPTWNYPVKFSVNESLAKENRLSLEIKLISDRTLGDTVIGTVHVPLRELLDNPGDDSSFRQVSYQVMKQSRKSKGSLNFSYKFGEHVPAPAAKTPKAAKAGQEPVMAYPPAGAGSSSMPYGTPHPPPPQQYAATGYGYPPQQVHGGYPPQAAYGYPPQTGYGYPQQSGYGYPQQSGYGYPPQAQKPKKNKFGMGLGAGLLGGALGGMLIGDMVSDAAEYDAGFDDAGGFDF

SEQ ID NO: 21943 - protein, 284 aa, Glycine max
MEYRTLELNIISAKDIKNVNLFSKMDVYAAVSLSGDPLHPQGATTHVHKDAGSNPTWNYPVKFSVNESLAKENRLSLEIKLISDRTLGDTVIGTVHVPLRELLDNPGDDSSFRQVSYQVMKQSRKSKGSLNFSYKFGEHVPAPAAKTPKAAKAGQEPVMAYPPAGAGSSSMPYGTPHPPPPQQYAATGYGYPPQQVHGGYPPQAAYGYPPQTGYGYPQQSGYGYPQQSGYGYPPQAQKPKKNKFGMGLGAGLLGGALGGMLIGDMVSDAAEYDAGFDDAGGFDF

SEQ ID NO: 21944 - DNA, 1382 bp, Glycine max
atttttaaaacatatgtgtcccctcatccaagctgtgtctcccttctctctcttatattaatcactcactcacacattcgccacttccacacagcatagatcacctttccttttttcccacagaaaaaaacaccacctttctttttccgactaaaggttcgccggaaaatgcctctatcctcctcttcctcctccgccgtagactccgccgtctccggcgagatcatgctctttggcgttagagtcgtggtggactccatgcggaagagtgtgagtatgaacaacctctcgcagtacgagcttcctcgcgacgctgccaacgccaaagacgacgccgcaggatacgcctccgccgatgatgcagctccgatcaactccgacaagaaccgcgaccgcaagcgagggattccatggactaaggaagagcacaagctattcttggtggggttgcagaaagtggggaaaggtgattggagagggatctcaaggaactatgtcaaaacgaggacgccaacacaggttgctagccatgctcagaagtactttctccgccgcaccaacctcaatcgccgtcgccggagatccagcctctttgacatcaccaccgactcggtctctacaacccctatggaggaaggagtacagatccagcatcaagataatgtgtctctctttcatccagtgtaccctgtaacccctgaaggaagcaacatgaatggatttccaaagatgtccatgtatccaaaggatgttggttctggagtcatgtcagttcaagctgggaatccaatggaaacactcactttgggacaaggaaatgtggaacagaatgggccaagtactaagctagtttgtacaacccctattgttccagatcatagaggctccacagtgtctgatatcactgcaagtttgagttccattgatccaccaacactgtctctggggttatctttgtcatccagtccaagacaaacatcatcatcaatacatgcagctttacatgcactgccatacttcaacaatcaagatagcatcataagtgctgcttgaaaaagataaacatatatctgtggcccattatctatagctactttggattcacagagatgtttatcactaatctactttctctttttggcgggagaaatataaaacatgttaaaggaaaagatgatgaattagatccttctgaaggcaaggtaataagtcatgagaccaatttgatccttctgttccttgtacagaccatggaaaggtcctgtcatgtttttgtttattgtttattggccacttttatgtttgtagttactataactgaaaataaccaagtacttcctgttaatttttaatgaatataaatctggactatatcaaagcat

SEQ ID NO: 21945 - protein, 294 aa, Glycine max
MPLSSSSSSAVDSAVSGEIMLFGVRVVVDSMRKSVSMNNLSQYELPRDAANAKDDAAGYASADDAAPINSDKNRDRKRGIPWTKEEHKLFLVGLQKVGKGDWRGISRNYVKTRTPTQVASHAQKYFLRRTNLNRRRRRSSLFDITTDSVSTTPMEEGVQIQHQDNVSLFHPVYPVTPEGSNMNGFPKMSMYPKDVGSGVMSVQAGNPMETLTLGQGNVEQNGPSTKLVCTTPIVPDHRGSTVSDITASLSSIDPPTLSLGLSLSSSPRQTSSSIHAALHALPYFNNQDSIISAA

SEQ ID NO: 21946 - protein, 275 aa, Glycine max
MLFGVRVVVDSMRKSVSMNNLSQYELPRDAANAKDDAAGYASADDAAPINSDKNRDRKRGIPWTKEEHKLFLVGLQKVGKGDWRGISRNYVKTRTPTQVASHAQKYFLRRTNLNRRRRRSSLFDITTDSVSTTPMEEGVQIQHQDNVSLFHPVYPVTPEGSNMNGFPKMSMYPKDVGSGVMSVQAGNPMETLTLGQGNVEQNGPSTKLVCTTPIVPDHRGSTVSDITASLSSIDPPTLSLGLSLSSSPRQTSSSIHAALHALPYFNNQDSIISAA

SEQ ID NO: 21947 - protein, 264 aa, Glycine max
MRKSVSMNNLSQYELPRDAANAKDDAAGYASADDAAPINSDKNRDRKRGIPWTKEEHKLFLVGLQKVGKGDWRGISRNYVKTRTPTQVASHAQKYFLRRTNLNRRRRRSSLFDITTDSVSTTPMEEGVQIQHQDNVSLFHPVYPVTPEGSNMNGFPKMSMYPKDVGSGVMSVQAGNPMETLTLGQGNVEQNGPSTKLVCTTPIVPDHRGSTVSDITASLSSIDPPTLSLGLSLSSSPRQTSSSIHAALHALPYFNNQDSIISAA

SEQ ID NO: 21948 - DNA, 1493 bp, Glycine max
gtccttcctttttctctccctcactcatccgttccgttggttcagaatattcatcaccatcgggcccagcaccaaaccccttcccctctcccccaaattagggtttctctctgggaatgtgattcagcgcgcggcagcatcaatggcggagaagagattcggcgtgatagggtacgctctggcgccgaagaagcagaacagcttcatccgcgactcgctggtgagcctagcgaaatcgcgagggattgagctcgtgcgcgtggactccgacaagcccctcgcggatcagggccccttcgactgcgtcctccacaagctctacggcgacgactggaagcgccagctccaggaattccacaccctctacccaaacgccgtcatcctcgacgcccccgaggcgatcgagcgcctccacaaccgaatctcgatgctgcaggtcgtgtcggagctccgaattgaggaccgacccgagacctttgggatccccaagcagattgtgatatacgacaaggccaccctcctggacccgcaggcctgggagagcctcaagtttcccgtgatagcgaagcctctcgttgccgacggcagcgccaagtcgcacaagatggcgctcgtgttcacgcgcgacgcactgaacaagctcaagccgccgatcgtgctgcaggagttcgtgaaccacggtggcgtgatcttcaaggtgtacgtggtgggcgagcacgtgcgctgcgtgaagcgcaagtccctccccgacgtgtccgacgaggagaaggcgctcggcggcgtttccgaggacctgatgtcgttctcgcaggtctccaacctcgccaccgtgaacgactgcgacggctattaccgtttgatgcatctcgacgacgacaccgaaatgccccccgacgccttcgtcgtcgacatcgctgggggcctcaggcgcgccctcaagctcaacctcttcaatttcgatgtcataagagacgctcgatacgggaaccgttatcttatcattgatatcaactatttccctgggtacgccaaaatgcccggctacgaggccgttttgacccagtttttctgcgaagtaatgctcaagaagaaacagcaagaggaacaacagcaagaagagggtaacgctcctaaggagaaagaggaatctcttcaagcttgagataattttgtcacacagatgttgttctgtcggtgtcggtgtttggtggtttttgggtaacccgaatttccccagtggacccattggttggcacgagttgcaaatttcgatttagggtgcagttggtacagtagggttgtttgtggctagttttttttaaccctcttcaacaacatgtatattcctttcaccattgctctctggagataggtaccttttcaaataccctcaacatttaggaaagttgtattttgcggcttaagattaccaagctagaaactgtttactttgtgttttttttactcaataacttcatttttcccattttgcc

SEQ ID NO: 21949 - protein, 386 aa, Glycine max
SFLFLSLTHPFRWFRIFITIGPSTKPLPLSPKLGFLSGNVIQRAAASMAEKRFGVIGYALAPKKQNSFIRDSLVSLAKSRGIELVRVDSDKPLADQGPFDCVLHKLYGDDWKRQLQEFHTLYPNAVILDAPEAIERLHNRISMLQVVSELRIEDRPETFGIPKQIVIYDKATLLDPQAWESLKFPVIAKPLVADGSAKSHKMALVFTRDALNKLKPPIVLQEFVNHGGVIFKVYVVGEHVRCVKRKSLPDVSDEEKALGGVSEDLMSFSQVSNLATVNDCDGYYRLMHLDDDTEMPPDAFVVDIAGGLRRALKLNLFNFDVIRDARYGNRYLIIDINYFPGYAKMPGYEAVLTQFFCEVMLKKKQQEEQQQEEGNAPKEKEESLQA

SEQ ID NO: 21950 - protein, 339 aa, Glycine max
MAEKRFGVIGYALAPKKQNSFIRDSLVSLAKSRGIELVRVDSDKPLADQGPFDCVLHKLYGDDWKRQLQEFHTLYPNAVILDAPEAIERLHNRISMLQVVSELRIEDRPETFGIPKQIVIYDKATLLDPQAWESLKFPVIAKPLVADGSAKSHKMALVFTRDALNKLKPPIVLQEFVNHGGVIFKVYVVGEHVRCVKRKSLPDVSDEEKALGGVSEDLMSFSQVSNLATVNDCDGYYRLMHLDDDTEMPPDAFVVDIAGGLRRALKLNLFNFDVIRDARYGNRYLIIDINYFPGYAKMPGYEAVLTQFFCEVMLKKKQQEEQQQEEGNAPKEKEESLQA

SEQ ID NO: 21951 - protein, 244 aa, Glycine max
MLQVVSELRIEDRPETFGIPKQIVIYDKATLLDPQAWESLKFPVIAKPLVADGSAKSHKMALVFTRDALNKLKPPIVLQEFVNHGGVIFKVYVVGEHVRCVKRKSLPDVSDEEKALGGVSEDLMSFSQVSNLATVNDCDGYYRLMHLDDDTEMPPDAFVVDIAGGLRRALKLNLFNFDVIRDARYGNRYLIIDINYFPGYAKMPGYEAVLTQFFCEVMLKKKQQEEQQQEEGNAPKEKEESLQA

SEQ ID NO: 21952 - DNA, 1917 bp, Glycine max
atctcatttcatttatctgggtagcggagccaaacaggcttacgcggaatctgactgctgcccgaagtcattctcagtaactgctaatcactgacacggtcagctaagctaagctaccccttctctctctaaaacctttgccattgtctcccacaacaccttacaacttacaacttcaatgtctgagtcaagactcatttatttataaccaccaccagctcaggtggcgcagccaaaccaaacccacaagaggttaagaacaagtagaataacaaaacccattcttcacctctctcccatcgtaataatgggtcagagcctgagttgcagtggcaaccatgaccacggcctcttcaccgccgtgctgcacggcgaccttcaaattgtcacaactctcttggattccgacccttctctcttgcaccaaacaactctctacgatcgccactctcctcttcatattgctgcagccaatggccagatcgagattctgtctaggctcttagatggatctcttaacccagatgttttaaatcgccacaaacagactccgcttatgttggcagcaatgcacgggaacatcgcctgtgtggagaagcttcttcaagccggagctaatgttttgatgtttgatactatttacgggagaacctgcttacactattccgcttactacggccattcttcttgccttaaggctattctttccgctgctcaatctagtccagtggctgcttcttgggggtttgctcggtttgtgaatattagagatggaaaaggtgcaacgccattgcacttggcggctcgtcagaggcggtctgaatgtgtacatattctattagacagtggagctcttgtttgtgcttcaactggtggatatggctgtcctgggagcactcctcttcatctagcagctagaggaggatctctggattgcattcgtgaattgttggcatggggtgcagatcgtcttcaacgcgatgcatctgggcgtataccatatatggttgcccttaaacacaaacatggagcctgtgcatcattgctaaatcctacatctgcagaacctcttgtctggccgtctccattgaagttcatcagtgagcttaatcctgaagccaaagctttattagagcaggccttgatggatgcaaacagagaaagagagaaaaacatattgaaagggagttcttactctctgccatctccatctcattctgatggggtagctgataatacgtctgaggttagtgaatccgaattatgttgcatctgctttgagcaggtgtgcacaattgaagttcagaactgtggccaccagatgtgtgcacaatgcacactagccctgtgttgccacaacaagcccaaccctgccactgcctgtcttactccaccagtttgtccattttgtcgaagcaccataacaagacttgttgttgtgaagacggaatgccacgatgaaactgatcaagacagtgttgatatcaactgttccaagctgagcaagtcatcaaggaaactcagaaacttgaatgacattggtagcagcagcttcaagggactatctagtgttagttcattcgggaaattgggtagccgcagctctggaaggattgctgcagagtggcttgataaacagtgatggcaatttgcaattacttgtggtaatcaatgattccatattggcaaagatacggtaactacaaaggtgcttaaccggcaaggcaaaaatcaaagttaaaagggaaaggaatattatgtaattttgggaaataagcaaagtgagttgaagtgaagttcgcggtaggtaccaagtgttgttgggaaaaaaagagaaggggatgtcatgttgtagtagtattattattacttgagaatgaagaagcatcacctgcgtcgatgattttgggcatcgtc

SEQ ID NO: 21953 - protein, 444 aa, Glycine max
MGQSLSCSGNHDHGLFTAVLHGDLQIVTTLLDSDPSLLHQTTLYDRHSPLHIAAANGQIEILSRLLDGSLNPDVLNRHKQTPLMLAAMHGNIACVEKLLQAGANVLMFDTIYGRTCLHYSAYYGHSSCLKAILSAAQSSPVAASWGFARFVNIRDGKGATPLHLAARQRRSECVHILLDSGALVCASTGGYGCPGSTPLHLAARGGSLDCIRELLAWGADRLQRDASGRIPYMVALKHKHGACASLLNPTSAEPLVWPSPLKFISELNPEAKALLEQALMDANREREKNILKGSSYSLPSPSHSDGVADNTSEVSESELCCICFEQVCTIEVQNCGHQMCAQCTLALCCHNKPNPATACLTPPVCPFCRSTITRLVVVKTECHDETDQDSVDINCSKLSKSSRKLRNLNDIGSSSFKGLSSVSSFGKLGSRSSGRIAAEWLDKQ

SEQ ID NO: 21954 - protein, 361 aa, Glycine max
MLAAMHGNIACVEKLLQAGANVLMFDTIYGRTCLHYSAYYGHSSCLKAILSAAQSSPVAASWGFARFVNIRDGKGATPLHLAARQRRSECVHILLDSGALVCASTGGYGCPGSTPLHLAARGGSLDCIRELLAWGADRLQRDASGRIPYMVALKHKHGACASLLNPTSAEPLVWPSPLKFISELNPEAKALLEQALMDANREREKNILKGSSYSLPSPSHSDGVADNTSEVSESELCCICFEQVCTIEVQNCGHQMCAQCTLALCCHNKPNPATACLTPPVCPFCRSTITRLVVVKTECHDETDQDSVDINCSKLSKSSRKLRNLNDIGSSSFKGLSSVSSFGKLGSRSSGRIAAEWLDKQ

SEQ ID NO: 21955 - protein, 357 aa, Glycine max
MHGNIACVEKLLQAGANVLMFDTIYGRTCLHYSAYYGHSSCLKAILSAAQSSPVAASWGFARFVNIRDGKGATPLHLAARQRRSECVHILLDSGALVCASTGGYGCPGSTPLHLAARGGSLDCIRELLAWGADRLQRDASGRIPYMVALKHKHGACASLLNPTSAEPLVWPSPLKFISELNPEAKALLEQALMDANREREKNILKGSSYSLPSPSHSDGVADNTSEVSESELCCICFEQVCTIEVQNCGHQMCAQCTLALCCHNKPNPATACLTPPVCPFCRSTITRLVVVKTECHDETDQDSVDINCSKLSKSSRKLRNLNDIGSSSFKGLSSVSSFGKLGSRSSGRIAAEWLDKQ

SEQ ID NO: 21956 - DNA, 1142 bp, Glycine max
actacaaaatccaccaactcaaagaaagaaacagttcaagaaatgggtgaagcaaacgctcagtctcagagcgaacccttcatcgtaaactctccacaaccaacatttcagaaacacaaataccccgtcaccgcaaactcaccaccaccaccacactcaccaatgtgcgatcatcaccacattcttcaacaaaaccaagaagcggtggagcccacagacttgttctccatgatgcacctcaccaacggcaatggctgcagcaaccgtcagccaccctgctccgccgccaccaacaacaaccctatgaagcgccgatcgacgccatcttcctcctcctccggcgagccctgcgccaagaagctcttctgcgaccaagaggatctcaccctctacggcttctccgccgtctccattcccctcaacatcaaccccctcgtcaacaagcgcggctctttacccgtcctccgccgctgcgtctccgacccctgcacccctccggcgccgtcgccggaaccggagcaatccattcctccggagagaggctccgggctgccacccctgccgccgagattccaacggagcgtgtcggatctctctgttccttccccggacaaggctatgtcctgtttgagctctgaagaaaccgtcgcgcctgattccgtgaggctgagaaggatgaaggagcgtttgaaagagatgaggcagtggtgggatgaagttatgaaagatgagaaggaagatggtgtagaagaagagtgtgcagttgctgaagatgtcaaggtcctagctcaggatgatttgggaggtggagattctgaagaagctgttagtgttgattgggctgaacggtgcataaaccttgcgtttaggtgcccgtgtgggaaaggctatgaggttctcctctctgaaaataactgttactacaagttgatgtagaggaataagtaatgtgtttgactcctttcagtttgggatcacttctgtttttattctcttttagtttggcaaagtctttttctattctcatgtgtggcatttggttgtaactagaaccaaccaatgttatatcacttgctttcaataatgtaaataaaaatgttgtgtactatctccaagaaatagaggaaagtatattttgttcc

SEQ ID NO: 21957 - protein, 311 aa, Glycine max
TTKSTNSKKETVQEMGEANAQSQSEPFIVNSPQPTFQKHKYPVTANSPPPPHSPMCDHHHILQQNQEAVEPTDLFSMMHLTNGNGCSNRQPPCSAATNNNPMKRRSTPSSSSSGEPCAKKLFCDQEDLTLYGFSAVSIPLNINPLVNKRGSLPVLRRCVSDPCTPPAPSPEPEQSIPPERGSGLPPLPPRFQRSVSDLSVPSPDKAMSCLSSEETVAPDSVRLRRMKERLKEMRQWWDEVMKDEKEDGVEEECAVAEDVKVLAQDDLGGGDSEEAVSVDWAERCINLAFRCPCGKGYEVLLSENNCYYKLM

SEQ ID NO: 21958 - protein, 297 aa, Glycine max
MGEANAQSQSEPFIVNSPQPTFQKHKYPVTANSPPPPHSPMCDHHHILQQNQEAVEPTDLFSMMHLTNGNGCSNRQPPCSAATNNNPMKRRSTPSSSSSGEPCAKKLFCDQEDLTLYGFSAVSIPLNINPLVNKRGSLPVLRRCVSDPCTPPAPSPEPEQSIPPERGSGLPPLPPRFQRSVSDLSVPSPDKAMSCLSSEETVAPDSVRLRRMKERLKEMRQWWDEVMKDEKEDGVEEECAVAEDVKVLAQDDLGGGDSEEAVSVDWAERCINLAFRCPCGKGYEVLLSENNCYYKLM

SEQ ID NO: 21959 - protein, 257 aa, Glycine max
MCDHHHILQQNQEAVEPTDLFSMMHLTNGNGCSNRQPPCSAATNNNPMKRRSTPSSSSSGEPCAKKLFCDQEDLTLYGFSAVSIPLNINPLVNKRGSLPVLRRCVSDPCTPPAPSPEPEQSIPPERGSGLPPLPPRFQRSVSDLSVPSPDKAMSCLSSEETVAPDSVRLRRMKERLKEMRQWWDEVMKDEKEDGVEEECAVAEDVKVLAQDDLGGGDSEEAVSVDWAERCINLAFRCPCGKGYEVLLSENNCYYKLM

SEQ ID NO: 21960 - DNA, 1252 bp, Glycine max
ctttcgttgccatttcactccatcagtacagtcacctagcgtttaaccctagagttttggtttggcctttcttctcttctcttcttatttcccacaaaatcatttcacaaagagaagagacagtggatcgcggtttcatttcagaccaaagatggtgcagtggcagagacacgttttcccctttcttcgccacattcacaagcgagcagtggaaccccacgccacccattctgctccaagccttgtaatttctcgcttagcctcttctctttcacaaggtcagttaggaaggagaacatggacaacaacaactttgccctgtttctctagacccatttttctcggtttccaacatcagggaatttcaagttctgctaacttgctggcaaattcatctgaggaaacacctgttttgtcacctttagtcccagtttcattattgggtagttcaaaaggtgaagaccagaagcagaaagttgttactaagcaagaaaaagttcaagcggtattaaaggcaataaaacagagtccaaagaaggtcaacttggttgctgctctggttcgtggtatgcttgttaaagatgcattgatgcagttggaattgacaataaaacgagcagcaaaaactgtatatcaggttattcattcagcccgagcaaatgcctctcacaatcatgggttagatccagaacgactcattgttgcggaagcatttgtaggaaaggggttttacaaaaagagactttggccccatgctaaaggaaaatcgtcgcttagagtaagaccagaatgcaggctaacagttgtagtaagagagataactgctgaagaagaggcagagattgctaggctgagggtccacaacttcaagaaacgcaccaagcgtcagcaacgacttgtgcctcatcagctcattgtgtccaatcctatttggggccgcaaaaacaaatctagtggtaaaaacttgagtgctacacctgcataagctgagcttttgcttgtttccatgcttatgtcatttttcgtgtatggaaacagttgagaaatatatgtctgtcccttgttgcagatgatagaattttgtactggatcatgtttagtattgttctcatttattagcttatttttcttcctactaggtactataaagaatgtcttgttcaatcaccagcatgaatctcctcttgttttgtggggaagtataaacatatgttttttttatttttatttttaaataaaggcgtattcttgc

SEQ ID NO: 21961 - protein, 277 aa, Glycine max
MVQWQRHVFPFLRHIHKRAVEPHATHSAPSLVISRLASSLSQGQLGRRTWTTTTLPCFSRPIFLGFQHQGISSSANLLANSSEETPVLSPLVPVSLLGSSKGEDQKQKVVTKQEKVQAVLKAIKQSPKKVNLVAALVRGMLVKDALMQLELTIKRAAKTVYQVIHSARANASHNHGLDPERLIVAEAFVGKGFYKKRLWPHAKGKSSLRVRPECRLTVVVREITAEEEAEIARLRVHNFKKRTKRQQRLVPHQLIVSNPIWGRKNKSSGKNLSATPA

SEQ ID NO: 21962 - protein, 138 aa, Glycine max
MLVKDALMQLELTIKRAAKTVYQVIHSARANASHNHGLDPERLIVAEAFVGKGFYKKRLWPHAKGKSSLRVRPECRLTVVVREITAEEEAEIARLRVHNFKKRTKRQQRLVPHQLIVSNPIWGRKNKSSGKNLSATPA

SEQ ID NO: 21963 - DNA, 1244 bp, Glycine max
acatttttcactttgcactccgaagagaggatgagagttcccaattgttcatcattcttcactctacccctacgtcatttcattaccttagcaaacacattgggtttcattctcttgatcttgttcatatctgggatcattgagttcccctctttttctttattatcacaattctcaacccaaccaatcaaagaccaatcaaaggctttcaccgacgtggttggtgcattcaaaaagtgggactccgaagtggggtgtgcccgattcaagaaagagataaaccaacaaagaaatggttcaaattatggtttttctacttctttgcaagatcaatttggtggccaattggaatgtggggtgctgaaaatgaaacatagaagcattggacaaccacttcgtgtatacatggaccttgaacctaaaagaaagcgatcaggtcgtgaagaaatatttattagttatcatgctaaagatgatttgcaatcaacctatgccagttccctattccataatggtcgaaattaccatatttcttcccataagaacaatgtcccacttgtttattggtcttctttcccttgtacaactcaaaggaacaaacttgcccacaaaatccttagtttattgcctcaccattcacttggcaaatgcctaaataatgttggaggaaaaaataaggcaccacgtttatatcctgaatgtgtagataatgctgcaaaacttaccaaatggtggaatcatttacactgtgtgatgtctcactacaagtttgtccttgtaattgagggcacttggactgagttatattacagaaaagatattttatgccttagactctggtgcaattccaatctattttggtgctccaaatatcatggattttgtccctcctcattcaataatagaaggggtgaaattcaagtcaatggaagaattggcttcgtatgtgaaggccatagcagatgatccaatagcctatggagaattccatgcatggagaagatgtggtgtgttgggtaactatgcaaaaactagagcactgagccttgacaccttaccttgtcggttatgtcatgctattagcaaaaaagggggaagaaatgcagatgcctagttttagatacatattaatgtttaaagataatttatttatttgtaatgatgggaggaactatacttgataactatattgattagttcataaaaacataatatgtttagatatatatttgattttgcttaat

SEQ ID NO: 21964 - protein, 321 aa, Glycine max
TFFTLHSEERMRVPNCSSFFTLPLRHFITLANTLGFILLILFISGIIEFPSFSLLSQFSTQPIKDQSKAFTDVVGAFKKWDSEVGCARFKKEINQQRNGSNYGFSTSLQDQFGGQLECGVLKMKHRSIGQPLRVYMDLEPKRKRSGREEIFISYHAKDDLQSTYASSLFHNGRNYHISSHKNNVPLVYWSSFPCTTQRNKLAHKILSLLPHHSLGKCLNNVGGKNKAPRLYPECVDNAAKLTKWWNHLHCVMSHYKFVLVIEGTWTELYYRKDILCLRLWCNSNLFWCSKYHGFCPSSFNNRRGEIQVNGRIGFVCEGHSR

SEQ ID NO: 21965 - protein, 311 aa, Glycine max
MRVPNCSSFFTLPLRHFITLANTLGFILLILFISGIIEFPSFSLLSQFSTQPIKDQSKAFTDVVGAFKKWDSEVGCARFKKEINQQRNGSNYGFSTSLQDQFGGQLECGVLKMKHRSIGQPLRVYMDLEPKRKRSGREEIFISYHAKDDLQSTYASSLFHNGRNYHISSHKNNVPLVYWSSFPCTTQRNKLAHKILSLLPHHSLGKCLNNVGGKNKAPRLYPECVDNAAKLTKWWNHLHCVMSHYKFVLVIEGTWTELYYRKDILCLRLWCNSNLFWCSKYHGFCPSSFNNRRGEIQVNGRIGFVCEGHSR

SEQ ID NO: 21966 - protein, 199 aa, Glycine max
MKHRSIGQPLRVYMDLEPKRKRSGREEIFISYHAKDDLQSTYASSLFHNGRNYHISSHKNNVPLVYWSSFPCTTQRNKLAHKILSLLPHHSLGKCLNNVGGKNKAPRLYPECVDNAAKLTKWWNHLHCVMSHYKFVLVIEGTWTELYYRKDILCLRLWCNSNLFWCSKYHGFCPSSFNNRRGEIQVNGRIGFVCEGHSR

SEQ ID NO: 21967 - DNA, 1294 bp, Glycine max
gccattttcttctctacctatctgccactccacttcccttcttttctacttctcggtgagtcccatcctatcccctccttccaccaagcctacagtaacggaatcatccaatatttcaaaggaaaacatagccattagcagaatcaagggtagctagcgtatatggaagcaggagtaggaggaggaagggtaggtggtgcatgcgacaacgaaattagcgacggaatgcaatgcatgaaccaccctcacaacaacagcaacaacaatcccggtgggatttgcgccttctgtctccaagataaactccgcaaccttctctcttcttcacctcctctttcttcctcgtcttctccttccccttctttcactcctccacctcctccctctgttaaaaccgaccacgaccacaacacgcgctctcgcctccccttcctcgtacccaagaaaaacaacaacaaaaaaccctcctcctacaccaacatttcttcatcagctaatatcattttcaaacgcagcaagtccactgccacacccaaaaggaaccagtttctcgaggagaaggacttcagtcccagaaaaagaaacggtttttggtctttcctctatccttcttcttcaaaggaagctaagagctttggtccaaatggtaagtacagaggcaagtgcttgggaaaaaagagtgatcacgtgattattgtggaagaggacaagtgtttgagctcttcttcttcttcttcttcttctaaggtttcgagatctagatctgttgggtgtggtagcagaagcttctccagtgatttcttcgagaggatctcttctggcctcggcgactgcactctacggagagtggagtctcagcgtgaaggaggaaaacctaagctagctgcttctgctaatactatgaaccattgcatgaaggaaagagtgagatgtggaggaatattcagtggcttcgttatgaattcgtcttcatcaacaacgtcttcttcgtcttgggtttcttcttctgttgatgatggcagaggaaggagttggggttgggcgtttgctagtcctatgagagctttcaccaccaaagggtctcctccttcttcttcttcgaagagagatgcttctgataagaacaacgccacgcctaacttatcagccattcctaccttgctcactgttagaggctgaaagagaataaaaaatgataaactattcggaggcttttatttatttggtttatatgcacattagcatgctctgtttatcttcgctaataataataatgtaatactcagtttactcc

SEQ ID NO: 21968 - protein, 338 aa, Glycine max
MEAGVGGGRVGGACDNEISDGMQCMNHPHNNSNNNPGGICAFCLQDKLRNLLSSSPPLSSSSSPSPSFTPPPPPSVKTDHDHNTRSRLPFLVPKKNNNKKPSSYTNISSSANIIFKRSKSTATPKRNQFLEEKDFSPRKRNGFWSFLYPSSSKEAKSFGPNGKYRGKCLGKKSDHVIIVEEDKCLSSSSSSSSSKVSRSRSVGCGSRSFSSDFFERISSGLGDCTLRRVESQREGGKPKLAASANTMNHCMKERVRCGGIFSGFVMNSSSSTTSSSSWVSSSVDDGRGRSWGWAFASPMRAFTTKGSPPSSSSKRDASDKNNATPNLSAIPTLLTVRG

SEQ ID NO: 21969 - protein, 317 aa, Glycine max
MQCMNHPHNNSNNNPGGICAFCLQDKLRNLLSSSPPLSSSSSPSPSFTPPPPPSVKTDHDHNTRSRLPFLVPKKNNNKKPSSYTNISSSANIIFKRSKSTATPKRNQFLEEKDFSPRKRNGFWSFLYPSSSKEAKSFGPNGKYRGKCLGKKSDHVIIVEEDKCLSSSSSSSSSKVSRSRSVGCGSRSFSSDFFERISSGLGDCTLRRVESQREGGKPKLAASANTMNHCMKERVRCGGIFSGFVMNSSSSTTSSSSWVSSSVDDGRGRSWGWAFASPMRAFTTKGSPPSSSSKRDASDKNNATPNLSAIPTLLTVRG

SEQ ID NO: 21970 - protein, 314 aa, Glycine max
MNHPHNNSNNNPGGICAFCLQDKLRNLLSSSPPLSSSSSPSPSFTPPPPPSVKTDHDHNTRSRLPFLVPKKNNNKKPSSYTNISSSANIIFKRSKSTATPKRNQFLEEKDFSPRKRNGFWSFLYPSSSKEAKSFGPNGKYRGKCLGKKSDHVIIVEEDKCLSSSSSSSSSKVSRSRSVGCGSRSFSSDFFERISSGLGDCTLRRVESQREGGKPKLAASANTMNHCMKERVRCGGIFSGFVMNSSSSTTSSSSWVSSSVDDGRGRSWGWAFASPMRAFTTKGSPPSSSSKRDASDKNNATPNLSAIPTLLTVRG

SEQ ID NO: 21971 - DNA, 1341 bp, Glycine max
taatcgaaaattttttcttgttgccgccaccactcttctaatgtctagttctgagagcacaaacgcgagaactagaacagcgtcatggttttctaccccattctttgttatcgttctcccggtggccgtggctgcgcttctctaccggctcgaaccattcaagccggttcttttgccggtccagctgggccggtccaccgtggcggttccggctcgtaacggccacatgcaagatggatcggaacgtgtgggtgagggacacttggagggcccggaagacttggcctacgacgctgcggcacgtgtcgtttataccgggtgtgaggatgggtggatcaagcgagtcacggtgaatgactcggtggttgactcggcggttgaagattgggtcaacacaggaggaaggccacttggactagttttgaagccgaatggagaactcatagttgctgatgcggaaaagggactgctgagagtgtcaagtgagaaggagattgagttgctggtagatgagtttgaggggttaaaattcaaactcacagatggtgttgatatagcagatgatggtacaatttatttcacagatgcatcacacaaataccccgtgaaggatgctgtgtttgacgtcttagaagggaagccaaatggaagattcttcagctataatccagcaacaaagaagacaaccctgcttgcccaagacctctactttgccaatggggttgcagtttcagcagatcaacaatttgtggtcttctgtgaatctgtcttgatgagatgcaataaatatttcgtcctgggccctaaaacaggaaccatagagaagttctgtgacctgcctggcatgcctgataacattcattatgatggacaagggcactatttaattgcaatgttcacggccctttctcccgaattggaattggcatatagataccctttcattaggaaggcttttgcaatgtttacaaagtatgtagggagtctatctatctcgaagaatggaggagttctagtcgtggatttagaaggaaaaccaactgcacattattatgatcccaaattagcattgactagtgcgattaaaattgggaatcatatatatgctggttccattttctacccctttgtaacacgttttgatgttgagaaatatcctgctctccccacagtttgagcaacagtgaacatcttgtaaggttaatgatgtacaagaaaatgtttagtttctggagtgtcatgatgtgaaaatgtttagtttctggagtgtcatgatgtgaaaattccattcatgaatctgttatatatatttttatataataaaaatggaatttcttttac

SEQ ID NO: 21972 - protein, 391 aa, Glycine max
NRKFFLVAATTLLMSSSESTNARTRTASWFSTPFFVIVLPVAVAALLYRLEPFKPVLLPVQLGRSTVAVPARNGHMQDGSERVGEGHLEGPEDLAYDAAARVVYTGCEDGWIKRVTVNDSVVDSAVEDWVNTGGRPLGLVLKPNGELIVADAEKGLLRVSSEKEIELLVDEFEGLKFKLTDGVDIADDGTIYFTDASHKYPVKDAVFDVLEGKPNGRFFSYNPATKKTTLLAQDLYFANGVAVSADQQFVVFCESVLMRCNKYFVLGPKTGTIEKFCDLPGMPDNIHYDGQGHYLIAMFTALSPELELAYRYPFIRKAFAMFTKYVGSLSISKNGGVLVVDLEGKPTAHYYDPKLALTSAIKIGNHIYAGSIFYPFVTRFDVEKYPALPTV

SEQ ID NO: 21973 - protein, 378 aa, Glycine max
MSSSESTNARTRTASWFSTPFFVIVLPVAVAALLYRLEPFKPVLLPVQLGRSTVAVPARNGHMQDGSERVGEGHLEGPEDLAYDAAARVVYTGCEDGWIKRVTVNDSVVDSAVEDWVNTGGRPLGLVLKPNGELIVADAEKGLLRVSSEKEIELLVDEFEGLKFKLTDGVDIADDGTIYFTDASHKYPVKDAVFDVLEGKPNGRFFSYNPATKKTTLLAQDLYFANGVAVSADQQFVVFCESVLMRCNKYFVLGPKTGTIEKFCDLPGMPDNIHYDGQGHYLIAMFTALSPELELAYRYPFIRKAFAMFTKYVGSLSISKNGGVLVVDLEGKPTAHYYDPKLALTSAIKIGNHIYAGSIFYPFVTRFDVEKYPALPTV

SEQ ID NO: 21974 - protein, 316 aa, Glycine max
MQDGSERVGEGHLEGPEDLAYDAAARVVYTGCEDGWIKRVTVNDSVVDSAVEDWVNTGGRPLGLVLKPNGELIVADAEKGLLRVSSEKEIELLVDEFEGLKFKLTDGVDIADDGTIYFTDASHKYPVKDAVFDVLEGKPNGRFFSYNPATKKTTLLAQDLYFANGVAVSADQQFVVFCESVLMRCNKYFVLGPKTGTIEKFCDLPGMPDNIHYDGQGHYLIAMFTALSPELELAYRYPFIRKAFAMFTKYVGSLSISKNGGVLVVDLEGKPTAHYYDPKLALTSAIKIGNHIYAGSIFYPFVTRFDVEKYPALPTV

SEQ ID NO: 21975 - DNA, 1286 bp, Glycine max
ggccctgacgaacaatccttacatccatgggagcaagatctcttaaagaagatttgcgatgcatattacctccctgcctggtgctcaacttctgattatgttaagttgctccaatccctgtcacttcaggtattcaatatgcctaagtgctgtctcattatatatatatatatatatatatttatataatgattgtttaagttttgttgaatttttgtgtgtagatagttgacgttttgttgctatgttaacttgcttgctatgtaggacatcaagtcagaagattggtctcgctttgttgctccattttggccagcagtgatacgctcagccttcacatggaagggtctaacttcactcttgagcagtggtaagcttggaatttatattgcatttcaaaaacaaacccccccatcttctattgcaacttgcaagtcttatgtcactgatcattatttccacactagataaccctttacaactaagaacgtagtcttcatgttcagcgaaatagataaaaatatgcaacagagtcagagacagggtgcatgatatttacaagaaaatatcttttatatatataaatgattcaatcaaattacttgatgaggattatgagtgaaaatgagaggacagtcatagaaactttatcctacattccttctatttccacttctgtcaaatattcctttcatcttagctatgctacttgacttgagtatgtttggtagtttaaatttttaagggaaaagaagaggaggccaattttttaatttttaaagttaaaaaattagtaaattaacataaatttaatatccttacttttggtttatttctaataacatcataaaattctcataattgatttttaaataaattgtctttcccttttttcttctaaagtttcactcgcaaatatatcttaagtgaagcaatcaagcaagcataaaaaaggcctaatgactaatgaaaaactcagtcttcatctctggcgcaaggattaataagagtttaggcttgtcactctctgaataattaagtccattcaagtttgggagtatgactattttaaaataccagtaaagtataaagtatgtaaattaaaaaaaataatttaaatgatagataactatttactgttgataaaaaaaactaaattaaaataaaaataaggcatttgaaacttccagttttgaaaatttttaaaaaattggtttaatcggtaaaagattattttattggtgatttttaaatatctcaatatcccattatgctttaagattgac

SEQ ID NO: 21976 - protein, 62 aa, Glycine max
GPDEQSLHPWEQDLLKKICDAYYLPAWCSTSDYVKLLQSLSLQVFNMPKCCLIIYIYIYIFI

SEQ ID NO: 21977 - protein, 57 aa, Glycine max
MHITSLPGAQLLIMLSCSNPCHFRYSICLSAVSLYIYIYIYLYNDCLSFVEFLCVDS

SEQ ID NO: 21978 - protein, 44 aa, Glycine max
MLSCSNPCHFRYSICLSAVSLYIYIYIYLYNDCLSFVEFLCVDS

SEQ ID NO: 21979 - DNA, 1128 bp, Glycine max
gaaaaactacccttccctttcgtcgttctccgtctccctcatttgttcactttctctctctaaatccctaaaccagatctcgcactcgcgctttctctctctaggattcgacaatggcggccgctccctcgcctcgcgaagagaacgtgtacatggcgaagctcgccgagcaggccgagcgctacgaagagatggtggagttcatggagaaggtctccgccgccgccgacaacgaggagctcaccgtcgaggagaggaacctcctctccgtcgcgtacaagaacgtgatcggagcgcgccgcgcctcgtggcgcatcatctcctcgatcgagcagaaggaggagagccgcggcaacgaggaccacgtctccgtcatccgcgactaccgatccaagatcgagtccgagctctccaacatctgcgacggtattctcaagctcctcgactctcgcttcattccctccgcttcctccggcgattccaaggtcttctacctcaagatgaagggagattaccacaggtacctcgccgagttcaagaccggcgccgagcgtaaggaggctgccgagagcactctctctgcatacaaagccgctcaggacattgcaaatgccgaactgcctccaactcatccaattaggcttggccttgcacttaacttctctgtattttactacgaaatccttaactctcccgatcgtgcctgcaaccttgcaaaacaggcttttgatgaagctattgctgaattggatacactgggagaggagtcatacaaggatagcactctgatcatgcaactccttcgtgataacctcaccctttggacctctgacatgcaggatgatggagcagatgaaattaaagaagcagcaccgaaacaggatgaccagtaaaaatattttactgctaattagaattgaacttctcctccatatctttttgaagggagaaggtgtttgttgctaatatctctttggtactgagattttaggcattcatgtttgttatgattgtggatgtactgggccgtttttagtttgtccttccattttcaagtgttttccaaattgcctattttattaaggacgctgaagtttttattatatggaattggaattttaagattct

SEQ ID NO: 21980 - protein, 259 aa, Glycine max
MAAAPSPREENVYMAKLAEQAERYEEMVEFMEKVSAAADNEELTVEERNLLSVAYKNVIGARRASWRIISSIEQKEESRGNEDHVSVIRDYRSKIESELSNICDGILKLLDSRFIPSASSGDSKVFYLKMKGDYHRYLAEFKTGAERKEAAESTLSAYKAAQDIANAELPPTHPIRLGLALNFSVFYYEILNSPDRACNLAKQAFDEAIAELDTLGEESYKDSTLIMQLLRDNLTLWTSDMQDDGADEIKEAAPKQDDQ

SEQ ID NO: 21981 - protein, 246 aa, Glycine max
MAKLAEQAERYEEMVEFMEKVSAAADNEELTVEERNLLSVAYKNVIGARRASWRIISSIEQKEESRGNEDHVSVIRDYRSKIESELSNICDGILKLLDSRFIPSASSGDSKVFYLKMKGDYHRYLAEFKTGAERKEAAESTLSAYKAAQDIANAELPPTHPIRLGLALNFSVFYYEILNSPDRACNLAKQAFDEAIAELDTLGEESYKDSTLIMQLLRDNLTLWTSDMQDDGADEIKEAAPKQDDQ

SEQ ID NO: 21982 - protein, 233 aa, Glycine max
MVEFMEKVSAAADNEELTVEERNLLSVAYKNVIGARRASWRIISSIEQKEESRGNEDHVSVIRDYRSKIESELSNICDGILKLLDSRFIPSASSGDSKVFYLKMKGDYHRYLAEFKTGAERKEAAESTLSAYKAAQDIANAELPPTHPIRLGLALNFSVFYYEILNSPDRACNLAKQAFDEAIAELDTLGEESYKDSTLIMQLLRDNLTLWTSDMQDDGADEIKEAAPKQDDQ

SEQ ID NO: 21983 - DNA, 1211 bp, Glycine max
attaacaaacatcctcaaaatatgcgcacgcctctgcttcccgctgcttcatctgcttcgttcttcactctctttctcgcttagccttcactttcttctctctgtttcttctttcttctgccagcgatgccgacttttactgccatggcactggataggttgatagagcccggagcttctaagccagttgataaatctgctccaacttcaatgcctgtgccaaactcgcagaagctggagaggagtactagtgcgcccgccaagaaaagtaaggttcctcagcctccattgaagccggcactttataccactcctgaagtgacaccacttccagatgcgccttcttcgttccctccttcaccatacatcatcaaccacaaacgccgtggtccacgcctcctcaagagttcctctgaggccagtgcactgtctgaggtgaatattcgttgtgatgatgataatgataagagcgtagatgctgttgttacaagttcagctggtgacctccaagttacttctacaaagcctgaacttgttaaagaagagaaggtgaatggtgtttatgacggccaacttgatagaagcaatgatgttgaccatgcaaatggacacagagaaactggaagtggtagcttaaccaatggattactcaaggaaaagccaccggcattgaatttggacagagttagcgaggttgaagactttttttatccattagactcaatgagtttctctagtaacacagatggggaagagaatgcagggacagaattgtctatgaaactcagcagtcccagtacggagttttatgatgcctgggaagaattatcttctgaaggcatgtctcaaaattctacatacgacattgaagctgaattgcgtgaagtaaggttaagtctgttggtggagatagagaagcggaagcaagctgaagaatccatcaacaacatgagaagccaatgggaaagcattaggcaagggttatatcaagcaggaattattttgcctgcatatcttaatgccactgctgaggatgagcagctgacttctgatcccgtggaagatctatgtcaacaagtttatattgctaggttcatatcaaatgccattggaaaaggaattgccagggcagagttggagacagagatggaagctcaactagaggcaaagaactttgagattgctcgacttttggatcgtctccactgtta

SEQ ID NO: 21984 - protein, 361 aa, Glycine max
MPTFTAMALDRLIEPGASKPVDKSAPTSMPVPNSQKLERSTSAPAKKSKVPQPPLKPALYTTPEVTPLPDAPSSFPPSPYIINHKRRGPRLLKSSSEASALSEVNIRCDDDNDKSVDAVVTSSAGDLQVTSTKPELVKEEKVNGVYDGQLDRSNDVDHANGHRETGSGSLTNGLLKEKPPALNLDRVSEVEDFFYPLDSMSFSSNTDGEENAGTELSMKLSSPSTEFYDAWEELSSEGMSQNSTYDIEAELREVRLSLLVEIEKRKQAEESINNMRSQWESIRQGLYQAGIILPAYLNATAEDEQLTSDPVEDLCQQVYIARFISNAIGKGIARAELETEMEAQLEAKNFEIARLLDRLHC

SEQ ID NO: 21985 - protein, 355 aa, Glycine max
MALDRLIEPGASKPVDKSAPTSMPVPNSQKLERSTSAPAKKSKVPQPPLKPALYTTPEVTPLPDAPSSFPPSPYIINHKRRGPRLLKSSSEASALSEVNIRCDDDNDKSVDAVVTSSAGDLQVTSTKPELVKEEKVNGVYDGQLDRSNDVDHANGHRETGSGSLTNGLLKEKPPALNLDRVSEVEDFFYPLDSMSFSSNTDGEENAGTELSMKLSSPSTEFYDAWEELSSEGMSQNSTYDIEAELREVRLSLLVEIEKRKQAEESINNMRSQWESIRQGLYQAGIILPAYLNATAEDEQLTSDPVEDLCQQVYIARFISNAIGKGIARAELETEMEAQLEAKNFEIARLLDRLHC

SEQ ID NO: 21986 - protein, 333 aa, Glycine max
MPVPNSQKLERSTSAPAKKSKVPQPPLKPALYTTPEVTPLPDAPSSFPPSPYIINHKRRGPRLLKSSSEASALSEVNIRCDDDNDKSVDAVVTSSAGDLQVTSTKPELVKEEKVNGVYDGQLDRSNDVDHANGHRETGSGSLTNGLLKEKPPALNLDRVSEVEDFFYPLDSMSFSSNTDGEENAGTELSMKLSSPSTEFYDAWEELSSEGMSQNSTYDIEAELREVRLSLLVEIEKRKQAEESINNMRSQWESIRQGLYQAGIILPAYLNATAEDEQLTSDPVEDLCQQVYIARFISNAIGKGIARAELETEMEAQLEAKNFEIARLLDRLHC

SEQ ID NO: 21987 - DNA, 1533 bp, Glycine max
gaaggtgagtggtgagtctgtgagagaagctgttactttggctgctagtaatcaaccttttgaggtagtttactatcctcgggctaatactccagagttttgtattaggacttctgctgtgagaggggctatgaggattcagtggtcctctgggatgaggttcaagatgccctttgagactgaggactcttccaggataagctggttcatggggactattgcttctgttcagcttcttgatcctatccgctggcctaattcaccctggaggcttcttcaggttacttgggatgagccagatttgctacataatgtgaagcgagtaagcccatggttggttgagttggtatcaaacgtgccaatcatccatctggcacccttctctccaccaaggaagaagcttaggtttccacaacacccagagtttccccttgactttcaatttccgataccatcattttcaggcaacccctttgggtctagcactagcagccccttgtgttgtctatctgataatgctcctgcaggcatacagggagccaggcatgctcaaattggaatatctttatcagatctccaccttaacaataagctgcagttggggttgcttccgactaacgtccaccagcttaatttgcacactgggatttgtaatggcaacatcaccaaccatggtaagagtaaagaaagtctatcatgcttgctgaccatgggaaattctaacaagagtttggagaaatctgatcatgtgaagagacaccaatttttgcttttcggtcaaccgatactcaccgagcaacaaatctctagatcttctagtgatgtgttgtctcaaaattttactgtgacggatgatgagaataaggagaagaaggagaagggatttcttagtgactcccagtcttcagtttcaccaggaaagtcatcttctaccgccgagttctcttggcaagttggttcggataccagtcattgcaaggttttcatagagtcagaggatgtgggacggacccttgacttgtcctgtcttggttcatatgaagagttgtacatgagactggctaacatgtttggaatagaaaggtctgagatgttgagtcatgttctctaccgtgacgcagctggtgctcttaagcaaactggagaggaacccttcagtgagttcatgaagacagcaaaaagattgacaattctgacggattcaaacaacaaagatagtagaagggtttggatcacaggaattcgaaatgctgaacatggattggatactgcatcaaataagacaggtcctcttggtatatttgcttaatatggtgtggcatgtcatggcatctgagatattgtttttagatatgagatgttgaaggacacagttattactctgttgttagagatgctaatatgaactgaaaattcaaacaatattggcgtctttgttttcgatgcccatgtgtagaaaataatgatttttcctgtataatggacaattgttattctaatattaattattaattaacccagatttggttcccc

SEQ ID NO: 21988 - protein, 435 aa, Glycine max
KVSGESVREAVTLAASNQPFEVVYYPRANTPEFCIRTSAVRGAMRIQWSSGMRFKMPFETEDSSRISWFMGTIASVQLLDPIRWPNSPWRLLQVTWDEPDLLHNVKRVSPWLVELVSNVPIIHLAPFSPPRKKLRFPQHPEFPLDFQFPIPSFSGNPFGSSTSSPLCCLSDNAPAGIQGARHAQIGISLSDLHLNNKLQLGLLPTNVHQLNLHTGICNGNITNHGKSKESLSCLLTMGNSNKSLEKSDHVKRHQFLLFGQPILTEQQISRSSSDVLSQNFTVTDDENKEKKEKGFLSDSQSSVSPGKSSSTAEFSWQVGSDTSHCKVFIESEDVGRTLDLSCLGSYEELYMRLANMFGIERSEMLSHVLYRDAAGALKQTGEEPFSEFMKTAKRLTILTDSNNKDSRRVWITGIRNAEHGLDTASNKTGPLGIFA

SEQ ID NO: 21989 - protein, 392 aa, Glycine max
MRIQWSSGMRFKMPFETEDSSRISWFMGTIASVQLLDPIRWPNSPWRLLQVTWDEPDLLHNVKRVSPWLVELVSNVPIIHLAPFSPPRKKLRFPQHPEFPLDFQFPIPSFSGNPFGSSTSSPLCCLSDNAPAGIQGARHAQIGISLSDLHLNNKLQLGLLPTNVHQLNLHTGICNGNITNHGKSKESLSCLLTMGNSNKSLEKSDHVKRHQFLLFGQPILTEQQISRSSSDVLSQNFTVTDDENKEKKEKGFLSDSQSSVSPGKSSSTAEFSWQVGSDTSHCKVFIESEDVGRTLDLSCLGSYEELYMRLANMFGIERSEMLSHVLYRDAAGALKQTGEEPFSEFMKTAKRLTILTDSNNKDSRRVWITGIRNAEHGLDTASNKTGPLGIFA

SEQ ID NO: 21990 - protein, 384 aa, Glycine max
MRFKMPFETEDSSRISWFMGTIASVQLLDPIRWPNSPWRLLQVTWDEPDLLHNVKRVSPWLVELVSNVPIIHLAPFSPPRKKLRFPQHPEFPLDFQFPIPSFSGNPFGSSTSSPLCCLSDNAPAGIQGARHAQIGISLSDLHLNNKLQLGLLPTNVHQLNLHTGICNGNITNHGKSKESLSCLLTMGNSNKSLEKSDHVKRHQFLLFGQPILTEQQISRSSSDVLSQNFTVTDDENKEKKEKGFLSDSQSSVSPGKSSSTAEFSWQVGSDTSHCKVFIESEDVGRTLDLSCLGSYEELYMRLANMFGIERSEMLSHVLYRDAAGALKQTGEEPFSEFMKTAKRLTILTDSNNKDSRRVWITGIRNAEHGLDTASNKTGPLGIFA

SEQ ID NO: 21991 - DNA, 1355 bp, Glycine max
tcaagccaaagtcttgtgcttttcacatccccattttcccatttccctttctgcttcctctttcgccaaatgggtctcccataacacaatcttcacctttttttttcctctttctttcttcttcgcttctcggtggggcttcaagtttcaccataggatgttttctaggttgatacatcctcatgaagggcaggaagacatgcagggtggctccaatcacgctcacctcggagacccttgtcttgttttaacctccgatcccaaacctcgtcttcgttggaccgctgaccttcatgaacgctttgttgatgctgtcactcaacttgggggtgccagtaaagccactccaaaagcaatcatgaggaccatgaatgtcaagggtttgacgctctatcatttgaagagtcatcttcagaagtacaggctaggtaagcaatcaggaaaagattctgatgagggatgcaaagatgcttcatatcttcaagaaagccctggtactgataactcttctccaaagttaccagatgctaacgagggtcatgaagtcaaggaggcattaagagcacagatggaagtgcaaagtaaactacacttactagtggaggcagagaagcacttgcaaattcgccaggatgcagagcgaagatacatgggcatgcttgagcgagcgtgtaagatgttggcagatcaatttattggggatgtaactattgacatggacggccaaaaatttcaagggctggaaagcaaaacatcccagaagttccctagttgatcacgttggcttttatccccaagcgtgtactgaggtcggcggaatgcatgcttcagtagtatcacctattcttcaacctcaaggggctgactgtttcactgaaagttgcctaacatcacttgagagtctgggagggttgacactagaagaatctcctggcggatcgaagaagaggatgctgaacttggactcgatggtagcacctttgatctggagtgaagccaacaccagaactcaaggaattcatttagccaaagttaatccttcaggaatgactaggtacggcatgtaggtagggtagggaaggttagttcctcatgaagagagtttatgacattgtgctttgtcccaagcttttaggattaagtactgagtagggaaggttagctcctcatgaagagagttcatgacattgtgctttgccccaagcttttaggattaagtactgagttagattattatcggttgttgtccattaagttggtgagaatcaacttatctcacatcattgtgtaaattgaaatactatatggcttaacttggcccgtcactaaatgttggcgctgaccatttatgatcg

SEQ ID NO: 21992 - protein, 257 aa, Glycine max
QAKVLCFSHPHFPISLSASSFAKWVSHNTIFTFFFPLSFFFASRWGFKFHHRMFSRLIHPHEGQEDMQGGSNHAHLGDPCLVLTSDPKPRLRWTADLHERFVDAVTQLGGASKATPKAIMRTMNVKGLTLYHLKSHLQKYRLGKQSGKDSDEGCKDASYLQESPGTDNSSPKLPDANEGHEVKEALRAQMEVQSKLHLLVEAEKHLQIRQDAERRYMGMLERACKMLADQFIGDVTIDMDGQKFQGLESKTSQKFPS

SEQ ID NO: 21993 - protein, 205 aa, Glycine max
MFSRLIHPHEGQEDMQGGSNHAHLGDPCLVLTSDPKPRLRWTADLHERFVDAVTQLGGASKATPKAIMRTMNVKGLTLYHLKSHLQKYRLGKQSGKDSDEGCKDASYLQESPGTDNSSPKLPDANEGHEVKEALRAQMEVQSKLHLLVEAEKHLQIRQDAERRYMGMLERACKMLADQFIGDVTIDMDGQKFQGLESKTSQKFPS

SEQ ID NO: 21994 - protein, 191 aa, Glycine max
MQGGSNHAHLGDPCLVLTSDPKPRLRWTADLHERFVDAVTQLGGASKATPKAIMRTMNVKGLTLYHLKSHLQKYRLGKQSGKDSDEGCKDASYLQESPGTDNSSPKLPDANEGHEVKEALRAQMEVQSKLHLLVEAEKHLQIRQDAERRYMGMLERACKMLADQFIGDVTIDMDGQKFQGLESKTSQKFPS

SEQ ID NO: 21995 - DNA, 1336 bp, Glycine max
aaaaaagtgaatgttgatataattgtcaacgtggaggatgagaataattcggatatggagtcaaaggtgaatgtgaaggaaattaaatctaagaaatcactgttaacaagaacaaaaaatcaaaatgaaatgtcagataggttagaaaaagcagaggagagcgatttaaataaaagcgagagcgttggacaagcaacagagcaatacatgaatatttgtataaataatgaggttgatagtgatggtggcgaaggttttagttttttctatgttaacaagaacgtgtataacaagaccaagcactattttgagacaaaaacagacctgaatgaagtctgctcgtgtgttggagggtgtactgatcctgcgatttgtccttgtgcgaggtacaactttgagaattgcgggaagactgcttgctatatttatgatcctaaacacgagaaaaagaagatattaaaccaattgttgagcaaagacatgcatatttatgaatgcacccctcaatgtgcttgtgcaaagagtctatgtttgaattcttgtataaatgaaggagacgcaaacaaagcaaaagttgaggaatttattgtcgagagatatcataaagagtataaaggaaatgagccgaaagctcaaggtatctctgccaagatgtggggattgaagtcaaaggagtttatccctgctaacacttttattattgagtattgtggcgagattattactcgaaaagaaggcgataaaagaggtgaaaagtacgattcggtgaactgtaactacctctttgatctgaataaacatgccgaggttgaggagattgatgaatcaacaaatacaataatcctgaatatcgatggagtttgcgagactcgtaagatgaaaaaattaaaggatattgctgcaaattttcctcttgtgatcgatgcatttttttatgggaaccattcaagatttgttaatcacagctgttggccaaatatggttgctttagctgttcacacagagaatagggatatgctgctcccacgaatcatcttttttgctctgagagatattcagcctggcgaagagttaacaattgactacaactgtgctcctctaaaagatttaaagaatacagatgttcttgtctgtctctgtggagctgtgaattgtcggggctacgtttatgaggaagctcgtgagaatgattaaattctattgtatctctattagggaaaaacaaagtatttacaaacaaaatttcttatcgattccttaataaataataaataaataaatacaatgttaaagcaagtataaatataccatattatggattcaaagcaaaaaatgg

SEQ ID NO: 21996 - protein, 397 aa, Glycine max
KKVNVDIIVNVEDENNSDMESKVNVKEIKSKKSLLTRTKNQNEMSDRLEKAEESDLNKSESVGQATEQYMNICINNEVDSDGGEGFSFFYVNKNVYNKTKHYFETKTDLNEVCSCVGGCTDPAICPCARYNFENCGKTACYIYDPKHEKKKILNQLLSKDMHIYECTPQCACAKSLCLNSCINEGDANKAKVEEFIVERYHKEYKGNEPKAQGISAKMWGLKSKEFIPANTFIIEYCGEIITRKEGDKRGEKYDSVNCNYLFDLNKHAEVEEIDESTNTIILNIDGVCETRKMKKLKDIAANFPLVIDAFFYGNHSRFVNHSCWPNMVALAVHTENRDMLLPRIIFFALRDIQPGEELTIDYNCAPLKDLKNTDVLVCLCGAVNCRGYVYEEAREND

SEQ ID NO: 21997 - protein, 379 aa, Glycine max
MESKVNVKEIKSKKSLLTRTKNQNEMSDRLEKAEESDLNKSESVGQATEQYMNICINNEVDSDGGEGFSFFYVNKNVYNKTKHYFETKTDLNEVCSCVGGCTDPAICPCARYNFENCGKTACYIYDPKHEKKKILNQLLSKDMHIYECTPQCACAKSLCLNSCINEGDANKAKVEEFIVERYHKEYKGNEPKAQGISAKMWGLKSKEFIPANTFIIEYCGEIITRKEGDKRGEKYDSVNCNYLFDLNKHAEVEEIDESTNTIILNIDGVCETRKMKKLKDIAANFPLVIDAFFYGNHSRFVNHSCWPNMVALAVHTENRDMLLPRIIFFALRDIQPGEELTIDYNCAPLKDLKNTDVLVCLCGAVNCRGYVYEEAREND

SEQ ID NO: 21998 - protein, 354 aa, Glycine max
MSDRLEKAEESDLNKSESVGQATEQYMNICINNEVDSDGGEGFSFFYVNKNVYNKTKHYFETKTDLNEVCSCVGGCTDPAICPCARYNFENCGKTACYIYDPKHEKKKILNQLLSKDMHIYECTPQCACAKSLCLNSCINEGDANKAKVEEFIVERYHKEYKGNEPKAQGISAKMWGLKSKEFIPANTFIIEYCGEIITRKEGDKRGEKYDSVNCNYLFDLNKHAEVEEIDESTNTIILNIDGVCETRKMKKLKDIAANFPLVIDAFFYGNHSRFVNHSCWPNMVALAVHTENRDMLLPRIIFFALRDIQPGEELTIDYNCAPLKDLKNTDVLVCLCGAVNCRGYVYEEAREND

SEQ ID NO: 21999 - DNA, 1455 bp, Glycine max
gttatgactctttgacttctccttcatctctttcgctggacaaaacccctttcgccggaaaacccaccgcaacctttgtggttcgcaactccgtttccggcttcaccgtgctcctcttacacgcagtatatatatatgtatgtatatggggaaaactaggtggttgataatattggttacctgtttatgcctgctttccttttctgatggcagagaactcaaggttaggcataaaaagcaacattaccaatacaatcatacagttgctacaatattagtggaatatgcttctgcggtatacttgtcagatttaactgaactttttacttggacgtgctctaggtgtaatggcttgaccaagggatttgaaatgatagagttagttgttgacgtcgagcattgcttacaggcatttgttggagtggccgatgatcctcatgccattatcattgcattcagaggaacaaatgaacacagcttacagaattggattgaagatttatattggaagcagcatgatataaattatccaggcatggatgatgcaatggtacaccgtggtttttataccgcgtaccacaatacaacaatacgtcctgcaattttagatgctgttgaaagagcaaagaagttttatggagatattgaaattatagcaacagggcattcaatgggaggggcaatggcttcattttgtggacttgatttaacggtaaatcaaaatgaaaaaaatgttcaagttatgacatttggacaacctcgtattggaaatgctgcttttgcatctctctatacgaaactagttccaaataccatccgagtcacaaatgaccatgatattgtacctcatttgcctccatactattattatttaccgcagaagacataccgccacttcccaagagaggtatggctttataacatcggattaggtagtcttgtgtacagtgttgagaagatttgtgatgaatctggtgaggatccaaattgcagcagatcggtgactgggaatagcattgctgatcacttggtctattatggcgttgacatgggatcagatgagccaagttcatgcagaattgttatggattcttatgttcagaatactaacatcaaagattcaagaggaaacttaatcttgtccagagatcctgcaacccccctcatcaaattgagtggagagggtgacaatcaggaaaatcccattaatgttgattgaattggcatcagatatctgttgcatgatatgttccagaggtttgccgtgtggcattattcttcagatttcttctttcttcatggtccatacagctgaacaattttattgaacaggctagggctggaaggagtttgtatagtcttggactcgtgtacatatgctcatacttgtatatataactaataattatatttttttacttcataattaataattcttgatactttgttaagtgc

SEQ ID NO: 22000 - protein, 359 aa, Glycine max
MYMGKTRWLIILVTCLCLLSFSDGRELKVRHKKQHYQYNHTVATILVEYASAVYLSDLTELFTWTCSRCNGLTKGFEMIELVVDVEHCLQAFVGVADDPHAIIIAFRGTNEHSLQNWIEDLYWKQHDINYPGMDDAMVHRGFYTAYHNTTIRPAILDAVERAKKFYGDIEIIATGHSMGGAMASFCGLDLTVNQNEKNVQVMTFGQPRIGNAAFASLYTKLVPNTIRVTNDHDIVPHLPPYYYYLPQKTYRHFPREVWLYNIGLGSLVYSVEKICDESGEDPNCSRSVTGNSIADHLVYYGVDMGSDEPSSCRIVMDSYVQNTNIKDSRGNLILSRDPATPLIKLSGEGDNQENPINVD

SEQ ID NO: 22001 - protein, 357 aa, Glycine max
MGKTRWLIILVTCLCLLSFSDGRELKVRHKKQHYQYNHTVATILVEYASAVYLSDLTELFTWTCSRCNGLTKGFEMIELVVDVEHCLQAFVGVADDPHAIIIAFRGTNEHSLQNWIEDLYWKQHDINYPGMDDAMVHRGFYTAYHNTTIRPAILDAVERAKKFYGDIEIIATGHSMGGAMASFCGLDLTVNQNEKNVQVMTFGQPRIGNAAFASLYTKLVPNTIRVTNDHDIVPHLPPYYYYLPQKTYRHFPREVWLYNIGLGSLVYSVEKICDESGEDPNCSRSVTGNSIADHLVYYGVDMGSDEPSSCRIVMDSYVQNTNIKDSRGNLILSRDPATPLIKLSGEGDNQENPINVD

SEQ ID NO: 22002 - protein, 282 aa, Glycine max
MIELVVDVEHCLQAFVGVADDPHAIIIAFRGTNEHSLQNWIEDLYWKQHDINYPGMDDAMVHRGFYTAYHNTTIRPAILDAVERAKKFYGDIEIIATGHSMGGAMASFCGLDLTVNQNEKNVQVMTFGQPRIGNAAFASLYTKLVPNTIRVTNDHDIVPHLPPYYYYLPQKTYRHFPREVWLYNIGLGSLVYSVEKICDESGEDPNCSRSVTGNSIADHLVYYGVDMGSDEPSSCRIVMDSYVQNTNIKDSRGNLILSRDPATPLIKLSGEGDNQENPINVD

SEQ ID NO: 22003 - DNA, 1317 bp, Glycine max
gttttaaaaatgttcatattccgttcttcacttttggacatgtataaaaaaatacattacaccttttgatgaggtagtaattctctaggagaaagaaataaagaagtagctttttggagggttgacatggaagaacggtatgagccattgaaggagcttggtgctgggaattttggtgtggcaaggttggcaaaagacaagaaaactggagagcttgttgcggtcaaatacatagagaggggcaaaaagattgatgagaatgttcagagggagataattaaccaccgatctttaaggcatccaaatataatcaggtttaaagaggtgttactgacccctacacatttagctatcgtcttggagtatgcttcaggtggtgaactttttgagaggatttgtactgctggtcgatttagcgaagatgaggcaagatatttcttccagcagctaatatctggggttagctactgtcattcaatggaaatttgtcatagagatctaaaattggaaaacactctcttggatggaaatccatctcctcggcttaaaatttgtgactttggttattccaagtctgctctactgcactctcaacctaaatcaacagttggaactcctgcatacattgctccggaggttctgtcgcgaaaggagtatgatggaaagatttcagatgtttggtcctgtggagtgactctttatgtcatgttagttggtgcatacccatttgaagatccagaagatcctagaaatttcagaaagactattgggagaataatcggtattcagtactccatacccgactatgttcgtgtttcttctgactgtaggaatcttctctctcgcatctttgttgctgatcctgccaagaggatcaccatcccagagataaaacagtatccttggtttctgaagaatatgcctaaagagatcatcgaagctgaaagaaaaggattcgaggaaacaaccaaagaccaaccaaaccagaaggtggaggaaatcatgaggataattcaagcggcaaggataccaggacaaggatccaaagctggagaaggtggacaagctggcactggatcattagatattgaggatgatgaggaaattgatgttagtggtgactatgaacaagtgtgatcgagaacttgattagttgatatggctagattgtctataagacatagtcagcattattaacatctatcacagtgtgcaacactggtgttctaaagatacttgttataccaggcttgaaataggattttgtgtttatttaaatgaataatattaagaaaaggctgctatttcagtttcagt

SEQ ID NO: 22004 - protein, 336 aa, Glycine max
MEERYEPLKELGAGNFGVARLAKDKKTGELVAVKYIERGKKIDENVQREIINHRSLRHPNIIRFKEVLLTPTHLAIVLEYASGGELFERICTAGRFSEDEARYFFQQLISGVSYCHSMEICHRDLKLENTLLDGNPSPRLKICDFGYSKSALLHSQPKSTVGTPAYIAPEVLSRKEYDGKISDVWSCGVTLYVMLVGAYPFEDPEDPRNFRKTIGRIIGIQYSIPDYVRVSSDCRNLLSRIFVADPAKRITIPEIKQYPWFLKNMPKEIIEAERKGFEETTKDQPNQKVEEIMRIIQAARIPGQGSKAGEGGQAGTGSLDIEDDEEIDVSGDYEQV

SEQ ID NO: 22005 - protein, 219 aa, Glycine max
MEICHRDLKLENTLLDGNPSPRLKICDFGYSKSALLHSQPKSTVGTPAYIAPEVLSRKEYDGKISDVWSCGVTLYVMLVGAYPFEDPEDPRNFRKTIGRIIGIQYSIPDYVRVSSDCRNLLSRIFVADPAKRITIPEIKQYPWFLKNMPKEIIEAERKGFEETTKDQPNQKVEEIMRIIQAARIPGQGSKAGEGGQAGTGSLDIEDDEEIDVSGDYEQV

SEQ ID NO: 22006 - DNA, 1583 bp, Glycine max
actgctgcacataggagaaattcaacttcagaccaatctttttcaaggactgtttctacagatgtgagcgtcgaacaggtgaataggttggcagaatcatcaatagtatcttgcccatctcccacaaaaccatcactgccttcaacttcattatcagcatctcctttatcatctccatgtcacatacctccatcgagctcggcacctttaaggtggccctgccattccccaggacaccacctatcacggcaagcttccgatagccgtatcccagcagttaagtcacccagcagcttctctttgtctgaagaaagggctgtgttttcttcatggagcaatgaagtgggtatgcactcccatggtggatcttcagatggttggtctattcctggcttttctgagctgatgggaactccccacagagaaagatggtcatttgatagtgagtcatttggttttaaccgagaaagattagctagacccagtagttggttttcagcttcaccagttgatttgcaatcatgtggtatttgctcaaagcttttagcagagaagtcttcttggagcactcaaaagataattgcaagtaatgacctttctgtagttgctgtcctcatctgtggacatgtctatcatgctgaatgtttggagattatgacacctgatatcaataagtatgatccagcttgcccagtttgcacttttggtgagaaacaaactatgaagttgtctgaaaaagctctgaaagctgaaatggatttgaaggctagaaccaataaatcaaagaatcgggttgtggacagtgatattgatgatgattctgttgtgtttcatcactttaaagggagagggcttaaaggtaaaagtcctaggatagactccagttccaatgggagaagctcctatgggaaaccttttctgaggcgacacttttcctttggatcaaagggttccagatctacattagataatcaccctacaagaaagaagggtttcttttgggcaaaatctagcaaggaataagctgcttcttggttgttgggaggttccgctgttgaacttttgtgcatcctcaattggtttgtgaaaaggacaaaatgcaatttatgatttcagagcatctgtataaactaatctgcaatttcaactggataagaggttgaagttactctgtaaagaagacatacagaagtataagttgaacatacagacgtaaaatattatgtttagaccccaatgttctttctgcattgtacaggttgatttgtttatttcatggatataattcttatatccaaatgatgttcagttgtccatggttcttatgtaatgcaaaccattagcccttcggagtttctggagttgggaaatggtcttcaaagattgataggcaaataccaattatttcgatccacttagttggttgcttttaatgaaggagcagattcaggatagcctattatcaaaccagtgtttttgcagttagcagattgaattgaatactttattctgatgtgttgcctttaatgaaagaacggtttcagcatagcatccggtcaaattaatatttttttgtcggtagc

SEQ ID NO: 22007 - protein, 340 aa, Glycine max
TAAHRRNSTSDQSFSRTVSTDVSVEQVNRLAESSIVSCPSPTKPSLPSTSLSASPLSSPCHIPPSSSAPLRWPCHSPGHHLSRQASDSRIPAVKSPSSFSLSEERAVFSSWSNEVGMHSHGGSSDGWSIPGFSELMGTPHRERWSFDSESFGFNRERLARPSSWFSASPVDLQSCGICSKLLAEKSSWSTQKIIASNDLSVVAVLICGHVYHAECLEIMTPDINKYDPACPVCTFGEKQTMKLSEKALKAEMDLKARTNKSKNRVVDSDIDDDSVVFHHFKGRGLKGKSPRIDSSSNGRSSYGKPFLRRHFSFGSKGSRSTLDNHPTRKKGFFWAKSSKE

SEQ ID NO: 22008 - protein, 224 aa, Glycine max
MHSHGGSSDGWSIPGFSELMGTPHRERWSFDSESFGFNRERLARPSSWFSASPVDLQSCGICSKLLAEKSSWSTQKIIASNDLSVVAVLICGHVYHAECLEIMTPDINKYDPACPVCTFGEKQTMKLSEKALKAEMDLKARTNKSKNRVVDSDIDDDSVVFHHFKGRGLKGKSPRIDSSSNGRSSYGKPFLRRHFSFGSKGSRSTLDNHPTRKKGFFWAKSSKE

SEQ ID NO: 22009 - protein, 205 aa, Glycine max
MGTPHRERWSFDSESFGFNRERLARPSSWFSASPVDLQSCGICSKLLAEKSSWSTQKIIASNDLSVVAVLICGHVYHAECLEIMTPDINKYDPACPVCTFGEKQTMKLSEKALKAEMDLKARTNKSKNRVVDSDIDDDSVVFHHFKGRGLKGKSPRIDSSSNGRSSYGKPFLRRHFSFGSKGSRSTLDNHPTRKKGFFWAKSSKE

SEQ ID NO: 22010 - DNA, 1678 bp, Glycine max
gaacccatatagcatccaattggtcaaggaatggcctctaagaagtaaactagaatcccaaatctatggtccaccagaatcagctatcaccagagaagtcatcgagccacatatactaggttatggcacaattgaagaggccattaaagagaagaagttgtacatgttagactatcatgatctattgttaccatatgtaagcaaagtgagagagattgaaggaaccacactatatggatcacgaacactattctttctcactaaacaaggaacattgaagccactagctattgagctcactaggccacctattgatggcaagccacaatggaagcaagtcttcactcctgcttcttattcaatttctcattcaaccaatctttggctttggaggcttgccaaagctcatgttcttgcccatgatgctggtgttcatgaacttataaatcattggttaagaactcatgctgtcatggaaccctttgtcgttgcaacaaataggcaactaagtgtcatgcatccaatctacaaactactgcatccacatttgacatacactctggctattaattcacttgctcgtgaaattcttatcaatggaaatgggatcattgaaaaatcattttcaccaaataaatattcaatggagttaagctccgcggcatatgatcaactttggcgatttgatttgcaagcacttcctaatgatcttattgacagaggaattgctgtggtagatccaaatgcaccacatggcctaaagctaacaattgaagactacccttttgccaatgatggtcttctcatatgggatgccatcaaacaatggataactgagtatgtcaaccattactatccaaccccaagtatcatagaatctgaccaagagcttcaaccatggtggacagaaattagaacagtgggtcatggagacaaatctgaagaaccatggtggccaaatctcaaaacaccaaaagaccttattgacatcatcaccaccatagcttggacagcatctgctcatcatgcagctgttaactttacccaatatacttatggaggctattttcctaatcgaccgaacattgttagaaccaaaatacctacagaagatccttctaaggaagagtgggaaacttttctaaacaatcctgagcaaactcttttggagtctttcccatcacaaatccaagcaactacaatgatgttagtttttaacatattatcatatcattccccagatgaagagtatattgggcaatacttgaagccatcatgggctgaggatccaactataaaggcatcctttgaaaggttcaatgggagactcaaggaaattgaaggtattatagactcaaggaatgcagattgtaatatgaaaaatagacatggtgttggggtggtgccttatgagcagatgaagccattttcaggacctggaatcactggaaaaggaattccatatagcgtatccatttaaagactcatactttttaagtggaatattcattgataattttttttgttgcaatatttggtactgtcctcaacaacaagcattttgatataagacttttcatttcccacatttttagtgagcaagaatcatattgtcctacaatagatcttatgttgctatctcaattggttcatatgaaatatattgatggtgaagtac

SEQ ID NO: 22011 - protein, 492 aa, Glycine max
NPYSIQLVKEWPLRSKLESQIYGPPESAITREVIEPHILGYGTIEEAIKEKKLYMLDYHDLLLPYVSKVREIEGTTLYGSRTLFFLTKQGTLKPLAIELTRPPIDGKPQWKQVFTPASYSISHSTNLWLWRLAKAHVLAHDAGVHELINHWLRTHAVMEPFVVATNRQLSVMHPIYKLLHPHLTYTLAINSLAREILINGNGIIEKSFSPNKYSMELSSAAYDQLWRFDLQALPNDLIDRGIAVVDPNAPHGLKLTIEDYPFANDGLLIWDAIKQWITEYVNHYYPTPSIIESDQELQPWWTEIRTVGHGDKSEEPWWPNLKTPKDLIDIITTIAWTASAHHAAVNFTQYTYGGYFPNRPNIVRTKIPTEDPSKEEWETFLNNPEQTLLESFPSQIQATTMMLVFNILSYHSPDEEYIGQYLKPSWAEDPTIKASFERFNGRLKEIEGIIDSRNADCNMKNRHGVGVVPYEQMKPFSGPGITGKGIPYSVSI

SEQ ID NO: 22012 - protein, 438 aa, Glycine max
MLDYHDLLLPYVSKVREIEGTTLYGSRTLFFLTKQGTLKPLAIELTRPPIDGKPQWKQVFTPASYSISHSTNLWLWRLAKAHVLAHDAGVHELINHWLRTHAVMEPFVVATNRQLSVMHPIYKLLHPHLTYTLAINSLAREILINGNGIIEKSFSPNKYSMELSSAAYDQLWRFDLQALPNDLIDRGIAVVDPNAPHGLKLTIEDYPFANDGLLIWDAIKQWITEYVNHYYPTPSIIESDQELQPWWTEIRTVGHGDKSEEPWWPNLKTPKDLIDIITTIAWTASAHHAAVNFTQYTYGGYFPNRPNIVRTKIPTEDPSKEEWETFLNNPEQTLLESFPSQIQATTMMLVFNILSYHSPDEEYIGQYLKPSWAEDPTIKASFERFNGRLKEIEGIIDSRNADCNMKNRHGVGVVPYEQMKPFSGPGITGKGIPYSVSI

SEQ ID NO: 22013 - protein, 335 aa, Glycine max
MEPFVVATNRQLSVMHPIYKLLHPHLTYTLAINSLAREILINGNGIIEKSFSPNKYSMELSSAAYDQLWRFDLQALPNDLIDRGIAVVDPNAPHGLKLTIEDYPFANDGLLIWDAIKQWITEYVNHYYPTPSIIESDQELQPWWTEIRTVGHGDKSEEPWWPNLKTPKDLIDIITTIAWTASAHHAAVNFTQYTYGGYFPNRPNIVRTKIPTEDPSKEEWETFLNNPEQTLLESFPSQIQATTMMLVFNILSYHSPDEEYIGQYLKPSWAEDPTIKASFERFNGRLKEIEGIIDSRNADCNMKNRHGVGVVPYEQMKPFSGPGITGKGIPYSVSI

SEQ ID NO: 22014 - DNA, 1322 bp, Glycine max
tttggttgagcttgttgattttgtggcttgtgggacaatgaggtttagtgagcctgctatccttgctatgtgtagaatgtgtgctattaatttgtttagagtttttcctccaaattatagggcaagtggtggtggtgagaatgatgatgatgagcctatgtttgatcctgcttggccacatttgcagcttgtgtatgaattgctgcttaagtttatctcttccccatgcctcgatgcaaaggtggcaaaaaagtatattgatcactcggttattgccagattgcttgagttgtttgattcggaggatcctagggaaagggattgcttgaagactattctgcataggatttatgggaagttcatggtgcatagaccgtatattcggaaatctattaacaatatattttatcggttcgtgtttgagactgagaagcccaatggaattggtgagttgttggagatttttgggagcgtgattactgggtttgctttgcccttgaaagaggaacacaaaatcttcttgtggagggttttggtccccttgcacaagccgaaatctattggtgtctactttcagcaattgtcctactgtgttatgcagtttatagagaaggagccaaagttagcgagcattgtgataagcggcttgttgaaatattggccagcaacaaatagtcagaaagaggtgatgtttctgggtgaactggaagaaattttggaagttattaacatggtagagttccagaggatcatggtcccattgttttggcggattgggtgctgcattaacagtttacactttcaggtagctgaaagagctcttttcttatggaacaatgaccacatcgtcaacttgattgcgcataaccgacaagtgatcctgcccatcatatttccagctttagacaggaatgttcaaagccattggaaccctgctgtcgtcaacctaactcacaatattagaaagatgttcttggagatggatgagaagctcttcatttcttgtcataatcactttaaggaggaagaagcaatcttgatctcaacagcggagaagcggaaggaggcatggaaacaactagagcatgcagccagtctcaggcccgtaattggaaatactgcagttttagtgtcctgacttgcattgcgggctggatcctcaatccttgttaacctcatgttatggtggaaaatctcaagatatgtggaatagctggttattgggagtggcattttgtatttgaatcctatgttcttagccttaattgcaaaaatattcctcctatttttttcaacttactaaattggtccttttatatttg

SEQ ID NO: 22015 - protein, 378 aa, Glycine max
LVELVDFVACGTMRFSEPAILAMCRMCAINLFRVFPPNYRASGGGENDDDEPMFDPAWPHLQLVYELLLKFISSPCLDAKVAKKYIDHSVIARLLELFDSEDPRERDCLKTILHRIYGKFMVHRPYIRKSINNIFYRFVFETEKPNGIGELLEIFGSVITGFALPLKEEHKIFLWRVLVPLHKPKSIGVYFQQLSYCVMQFIEKEPKLASIVISGLLKYWPATNSQKEVMFLGELEEILEVINMVEFQRIMVPLFWRIGCCINSLHFQVAERALFLWNNDHIVNLIAHNRQVILPIIFPALDRNVQSHWNPAVVNLTHNIRKMFLEMDEKLFISCHNHFKEEEAILISTAEKRKEAWKQLEHAASLRPVIGNTAVLVS

SEQ ID NO: 22016 - protein, 366 aa, Glycine max
MRFSEPAILAMCRMCAINLFRVFPPNYRASGGGENDDDEPMFDPAWPHLQLVYELLLKFISSPCLDAKVAKKYIDHSVIARLLELFDSEDPRERDCLKTILHRIYGKFMVHRPYIRKSINNIFYRFVFETEKPNGIGELLEIFGSVITGFALPLKEEHKIFLWRVLVPLHKPKSIGVYFQQLSYCVMQFIEKEPKLASIVISGLLKYWPATNSQKEVMFLGELEEILEVINMVEFQRIMVPLFWRIGCCINSLHFQVAERALFLWNNDHIVNLIAHNRQVILPIIFPALDRNVQSHWNPAVVNLTHNIRKMFLEMDEKLFISCHNHFKEEEAILISTAEKRKEAWKQLEHAASLRPVIGNTAVLVS

SEQ ID NO: 22017 - protein, 356 aa, Glycine max
MCRMCAINLFRVFPPNYRASGGGENDDDEPMFDPAWPHLQLVYELLLKFISSPCLDAKVAKKYIDHSVIARLLELFDSEDPRERDCLKTILHRIYGKFMVHRPYIRKSINNIFYRFVFETEKPNGIGELLEIFGSVITGFALPLKEEHKIFLWRVLVPLHKPKSIGVYFQQLSYCVMQFIEKEPKLASIVISGLLKYWPATNSQKEVMFLGELEEILEVINMVEFQRIMVPLFWRIGCCINSLHFQVAERALFLWNNDHIVNLIAHNRQVILPIIFPALDRNVQSHWNPAVVNLTHNIRKMFLEMDEKLFISCHNHFKEEEAILISTAEKRKEAWKQLEHAASLRPVIGNTAVLVS

SEQ ID NO: 22018 - DNA, 1257 bp, Glycine max
attagtttgccttagaggtgtcactgcaagagtggaaaagagcctggttgctttgaaggctggtgcagcagggatgattctttgtaatgacgagcttagtggtaatgagcttattgctgatcctcatctcctgcctgcatcacaaattaattatgaagatggtctagctgtctatgcctacatgaattcaaccaagaatccgctaggatatattgatcctcccaagaccaagttgcagataaagcctgctccatccatggcagctttctcctctagagggcccaacatagtcacaccagagatcctcaagcctgatgtcactgctcccggtgtgaacattattgctgcctactcagaaggggttagcccaacagatatgaactttgataagcgcagggttccttttatcaccatgtctggaacatccatgtcttgtcctcatgtggctggagttgttggccttctcaagactctccaccctgactggagtccaacagttattaaatctgcattactgacaactgctagaacaagggacaacactggtaagccaatgcttgatggggggaacaatgctaacgcaacgccatttgcctatggatctggccacatcagaccaaaccgtgccatggatcccgggttggtgtatgacttaaccaacaatgattacctaaactttctttgtgtctctggctataaccagagtcagatagagatgttctctggtgctcattatcgttgtcccgatataataaacatcctggattttaactaccctacaataacaataccaaaactctacggctcagttagtttgacacggagggtgaaaaatgttgggtcaccaggcacttatactgcaagactcaaagtaccagtaggtctttccatatctgtggaacctaatgtgttaaaatttgacaacattggtgaagagaagagctttaagctgacagtggaagttacaagaccaggtgtggctactacatttggaggtataacatggtcagatggcaaacatcaagtgaggagtcaaattgtagttgggggagttagagggtagatcatcatcaactgatacacataattaggatgacatctttttttctttttctggtttatattattgggagatcgggaaaagggaaatgcataacttggaattgttggtttcgtcattttctgttgattagttactctaacttggaagaactgcaatttgtgaatttgagaacaaaataaaaaaaaaattgtaac

SEQ ID NO: 22019 - protein, 353 aa, Glycine max
LVCLRGVTARVEKSLVALKAGAAGMILCNDELSGNELIADPHLLPASQINYEDGLAVYAYMNSTKNPLGYIDPPKTKLQIKPAPSMAAFSSRGPNIVTPEILKPDVTAPGVNIIAAYSEGVSPTDMNFDKRRVPFITMSGTSMSCPHVAGVVGLLKTLHPDWSPTVIKSALLTTARTRDNTGKPMLDGGNNANATPFAYGSGHIRPNRAMDPGLVYDLTNNDYLNFLCVSGYNQSQIEMFSGAHYRCPDIINILDFNYPTITIPKLYGSVSLTRRVKNVGSPGTYTARLKVPVGLSISVEPNVLKFDNIGEEKSFKLTVEVTRPGVATTFGGITWSDGKHQVRSQIVVGGVRG

SEQ ID NO: 22020 - protein, 329 aa, Glycine max
MILCNDELSGNELIADPHLLPASQINYEDGLAVYAYMNSTKNPLGYIDPPKTKLQIKPAPSMAAFSSRGPNIVTPEILKPDVTAPGVNIIAAYSEGVSPTDMNFDKRRVPFITMSGTSMSCPHVAGVVGLLKTLHPDWSPTVIKSALLTTARTRDNTGKPMLDGGNNANATPFAYGSGHIRPNRAMDPGLVYDLTNNDYLNFLCVSGYNQSQIEMFSGAHYRCPDIINILDFNYPTITIPKLYGSVSLTRRVKNVGSPGTYTARLKVPVGLSISVEPNVLKFDNIGEEKSFKLTVEVTRPGVATTFGGITWSDGKHQVRSQIVVGGVRG

SEQ ID NO: 22021 - protein, 293 aa, Glycine max
MNSTKNPLGYIDPPKTKLQIKPAPSMAAFSSRGPNIVTPEILKPDVTAPGVNIIAAYSEGVSPTDMNFDKRRVPFITMSGTSMSCPHVAGVVGLLKTLHPDWSPTVIKSALLTTARTRDNTGKPMLDGGNNANATPFAYGSGHIRPNRAMDPGLVYDLTNNDYLNFLCVSGYNQSQIEMFSGAHYRCPDIINILDFNYPTITIPKLYGSVSLTRRVKNVGSPGTYTARLKVPVGLSISVEPNVLKFDNIGEEKSFKLTVEVTRPGVATTFGGITWSDGKHQVRSQIVVGGVRG

SEQ ID NO: 22022 - DNA, 1241 bp, Glycine max
gaaagagagcagttagttgtgtgtttgtgcagggaaattggaccattgagtatactagactcaaggcaaagattgaccttttgcagagaaatcataggcactatatgggagaagatttaggttcaatgagcctcaaagagcttcagagtctggagcagcagttagatactgctctcaagcaaattcgtacccgcagagtatatatataaaacatacaactaattgtgatacttcacctttattcttaatttaaaaattatgaatttagaatgtgtatttattctttaaaatttaaaattatttttttatccctaaattttgataattttttttaatttttagcataataaattaatattttatgataatttttagattatataaattattttttattttttagccatttcaatttatattttatttaaaactgacatatattcaagtaaaaaaattcattcatgggacaaagaaaaaatatatttataagaataattgtccttattatcctctaagtagatctgcagccactaattatacatttaataacagaaccaactcatgtacgagtccatttcggagcttgagaagaaggtacttactcaaatcttgtcacaactttatgcagctaggtctctgtatggttgtaacggttcaccgtaataagtttcagagaccaatcttgattatgcgtgtccctctagacaaatcagcctgacatgtgctctacttgtactgtgacaggagaaagtgatacaggagcagaataacatgcttgcaaagaagatcaaggagaaagaaaaggttgcagcttcgcaggcacaatgggagcatccaaaccacggagttaatgcatctttcttgctaccgcagccacttttgaacatgggtggcaattaccatgatgaagcaccagaagtagggaggcatgaacttgacctgactctggaaccattatattcctgtcaccttggatgcttttgaatactttcttagaggtggatgatattatataactatatatgtggtatggcatttgacaacatatttgagggcttatatatgcctctatgttttgtggttttccctaatctgaagacgctaatgtttattgtgtgttgtaagttcataatttggttaggctttcttaagtggaagctttgctatatatatttaagttcctgaaagacaagtctcgtatttgaattaattatgcgatgaatttgtttttgtttgctagc

SEQ ID NO: 22023 - protein, 70 aa, Glycine max
MLAKKIKEKEKVAASQAQWEHPNHGVNASFLLPQPLLNMGGNYHDEAPEVGRHELDLTLEPLYSCHLGCF

SEQ ID NO: 22024 - protein, 68 aa, Glycine max
KRAVSCVFVQGNWTIEYTRLKAKIDLLQRNHRHYMGEDLGSMSLKELQSLEQQLDTALKQIRTRRVYI

SEQ ID NO: 22025 - protein, 60 aa, Glycine max
MILYNYICGMAFDNIFEGLYMPLCFVVFPNLKTLMFIVCCKFIIWLGFLKWKLCYIYLSS

SEQ ID NO: 22026 - DNA, 1577 bp, Glycine max
gttcaggttctccttttaacatcttcatcttctcttttcttttgttgtcttctgtgcgcgctctctctctatgcattgatactgtttcttttattttcatctggggttcgccgcttcagctgccaccgttctcggtatctcatgtgatcttcaaagtttgttgctttcagccttttcaagctgtccatttaagtttttgagagcaagcagttttttatgaggaccgaataaaagattcaaatttctatgacgtctatcaaatcattgagatggctgatgagaaaaaagagtggattgtctgatgggggtaaatcaagtttcaagatgaaacatctgccttttctggcagttttgtgcacgataatgttattcattgtgtatagaaccacaaagtatcagtatcaccaagaagagattgacaaaaaatggagtttctggggacaaccaaaggtgtatccttcaacttatgggaagttgaaaggcttgccacgaggtataatacatgataattcagatttggagttaagaccattatggtcaagaagtagttcaagatcaaaggctgtttactctaactctaacttactggcagttccagttggtattaaacaaaagcagaatgttgatgctatggtgcaaaagtttcttcaagaaaacttcacaattattttattccattatgatggcaatgtggatggatggtggaatcttgactggagtagcaaggccatacacattattgctcggaatcaaacaaagtggtggtttgcaaaaaggtttctacatccagatatagtgtctatttatgattatatctttctctgggatgaggatctaggtgtggagcatttttcaccttcaagatatgttgaaattataaagagagaaggtttggagatatctcaaccagctcttgacccaaattcaacagagatacaccatagaattacaattagagctagaaccaagaaatttcatagagtctatgaacgcagaggcagtacaaggtgttcagatttaagtgagggaccgccgtgcactgggtttgtggaaggtatggctcctgttttctctcaatctgcctggtactgcacttggcatcttatacagaatgaccttgtccatggatggggagttgatatgaagctaggatattgtgcacagggagatcgaactaaaaaggtgggagttgttgacagcgaatatgtttttcacaagggaatacaaactctgggggggagtggtcacagaatgacaaaggtttcgaaactacaaaggacaactatgaaacaaggtggagtaggaattgatgtgcgaactgagataagaaggcaatcgacatgggaatttgaaatcttcaaagagcgttggaataaagccattggtgcagacaaaaactgggttgatccatttaagagtgaccaaagacgcataagaaaatggcgtgacacgcaacgccttgctaagaacaatatttaactctgttgcatatcttacagtttcattcacagggcattaccttttatttataggcataatttagtttgtgtagatgagtaaaaattcattcaattttg

SEQ ID NO: 22027 - protein, 410 aa, Glycine max
MTSIKSLRWLMRKKSGLSDGGKSSFKMKHLPFLAVLCTIMLFIVYRTTKYQYHQEEIDKKWSFWGQPKVYPSTYGKLKGLPRGIIHDNSDLELRPLWSRSSSRSKAVYSNSNLLAVPVGIKQKQNVDAMVQKFLQENFTIILFHYDGNVDGWWNLDWSSKAIHIIARNQTKWWFAKRFLHPDIVSIYDYIFLWDEDLGVEHFSPSRYVEIIKREGLEISQPALDPNSTEIHHRITIRARTKKFHRVYERRGSTRCSDLSEGPPCTGFVEGMAPVFSQSAWYCTWHLIQNDLVHGWGVDMKLGYCAQGDRTKKVGVVDSEYVFHKGIQTLGGSGHRMTKVSKLQRTTMKQGGVGIDVRTEIRRQSTWEFEIFKERWNKAIGADKNWVDPFKSDQRRIRKWRDTQRLAKNNI

SEQ ID NO: 22028 - protein, 400 aa, Glycine max
MRKKSGLSDGGKSSFKMKHLPFLAVLCTIMLFIVYRTTKYQYHQEEIDKKWSFWGQPKVYPSTYGKLKGLPRGIIHDNSDLELRPLWSRSSSRSKAVYSNSNLLAVPVGIKQKQNVDAMVQKFLQENFTIILFHYDGNVDGWWNLDWSSKAIHIIARNQTKWWFAKRFLHPDIVSIYDYIFLWDEDLGVEHFSPSRYVEIIKREGLEISQPALDPNSTEIHHRITIRARTKKFHRVYERRGSTRCSDLSEGPPCTGFVEGMAPVFSQSAWYCTWHLIQNDLVHGWGVDMKLGYCAQGDRTKKVGVVDSEYVFHKGIQTLGGSGHRMTKVSKLQRTTMKQGGVGIDVRTEIRRQSTWEFEIFKERWNKAIGADKNWVDPFKSDQRRIRKWRDTQRLAKNNI

SEQ ID NO: 22029 - protein, 384 aa, Glycine max
MKHLPFLAVLCTIMLFIVYRTTKYQYHQEEIDKKWSFWGQPKVYPSTYGKLKGLPRGIIHDNSDLELRPLWSRSSSRSKAVYSNSNLLAVPVGIKQKQNVDAMVQKFLQENFTIILFHYDGNVDGWWNLDWSSKAIHIIARNQTKWWFAKRFLHPDIVSIYDYIFLWDEDLGVEHFSPSRYVEIIKREGLEISQPALDPNSTEIHHRITIRARTKKFHRVYERRGSTRCSDLSEGPPCTGFVEGMAPVFSQSAWYCTWHLIQNDLVHGWGVDMKLGYCAQGDRTKKVGVVDSEYVFHKGIQTLGGSGHRMTKVSKLQRTTMKQGGVGIDVRTEIRRQSTWEFEIFKERWNKAIGADKNWVDPFKSDQRRIRKWRDTQRLAKNNI

SEQ ID NO: 22030 - DNA, 2029 bp, Glycine max
attttggtcaagcacttggatcataagaatgttgctaagcagcctatccttcagattaatatcattaacactacaacaaaacttgcacaaaatttgaagcaacaggcttcagttgcaatactcggtgcaatatctgatctcattaaacatttaaggaagtgtctgcaaaattcggctgaagcttccagcactggaaatgatgggcttaagctgaatactgaactccaatttgccttggaaatgtgtatattacatctttccaaaaaggttggggatgtcggacccattcttgatttgatggctgtggtgttagagaatatctcaagtacagccatcatagcaggaacaacaatctctgctgtttatcaaactgcaaagttaatcatgtccattcctaatgtatcatatcacaaaaaggctttccctgatgctttgtttcatcaattgctcctggcgatggctcatcctgaccatgaaacacgagttggagcacacagcatcttttctttagtacttatgccatctccattttctccccagttagaccaaaaaacaaatatttctcagaaggtaccaagcgaaagcttcttcattcagcatgaaagctttttgggagcagaacagatcaatgggaaatctatggaaggaaaggcagtatttagtgttagtgggaaatatgcagttcatccatatcatggccacatcctttctggtgctctaactgatggacaacatgagctaagttcttttcggttaagcagtcaccaagtgagtctcttgctttcttcaatctgggttcaagcaacatctttggacagtggccctgcaaattttgaggcaatggctcacacttatagcattgctttattgttcactcgttcaaagttacatggctttagtaagatgtttccaactggcattttccctcatgagcctctctctggaccaagaaggaggtttacaaccatctcgcaggagatctctttttactatggcatcatacatgcttatattctcagccagggcaggcaatttccccgagctaattcagaaagttaaagcattcctgaccgagacaactgtagatccttttcttgagttgatcgatgatgtcaggctgcaggctgtttatagagaaccggagaacataatttatggatctcaagaagatgatgtgtcagctatgaagacactgtcagcagtaaaattggatgacaagcagttgaaagagactgtaatatcatgcttcttgactaaattttctaaattatcagaggatgagttgtcaagcataaagaagcaacttgtgcaggggttttctcctgatgatgcatatcccctggggcctccattgtttatggagacaccagggaagtcttctccacttgctcagattgagttccctgattttgacgagattgtggctccattagctttgatggatgaagagacccagcccgaaccaagtggaagtcagtcagatcgtaaatcatcactatctagcaatagcccggacattctaagtgttaatcaactcttacaatcggttttggaaaccgcacgacaagtggcaagtttccccatttcctcaactcctgtaccttatgatcaaatgaagaaccagtgtgaggcacttgtaacagggaaacaacagaaaatgtcaattcttcacagtttcaagcaccagcaggagactagggcactagttctttcaagtgaaaatgaaacgaaagtttcccctctgccaattaagacactggattattcagaaggtgatctgaagttagtgagtcagcagccaattcaagcacaatatcaagttcgcctatgttcatatgactttggacagcaacattctttgaaactaccacctgcaagcccctttgataaattcttgaaagctgctggatgttaatggtacaagattggcataatagatgtgtatgtaactatttatttatatagagatgaacactctctttgtttttgttttggttagctgttgtctctttaccaatcagttggtctt

SEQ ID NO: 22031 - protein, 352 aa, Glycine max
ILVKHLDHKNVAKQPILQINIINTTTKLAQNLKQQASVAILGAISDLIKHLRKCLQNSAEASSTGNDGLKLNTELQFALEMCILHLSKKVGDVGPILDLMAVVLENISSTAIIAGTTISAVYQTAKLIMSIPNVSYHKKAFPDALFHQLLLAMAHPDHETRVGAHSIFSLVLMPSPFSPQLDQKTNISQKVPSESFFIQHESFLGAEQINGKSMEGKAVFSVSGKYAVHPYHGHILSGALTDGQHELSSFRLSSHQVSLLLSSIWVQATSLDSGPANFEAMAHTYSIALLFTRSKLHGFSKMFPTGIFPHEPLSGPRRRFTTISQEISFYYGIIHAYILSQGRQFPRANSES

SEQ ID NO: 22032 - protein, 341 aa, Glycine max
MALVRCFQLAFSLMSLSLDQEGGLQPSRRRSLFTMASYMLIFSARAGNFPELIQKVKAFLTETTVDPFLELIDDVRLQAVYREPENIIYGSQEDDVSAMKTLSAVKLDDKQLKETVISCFLTKFSKLSEDELSSIKKQLVQGFSPDDAYPLGPPLFMETPGKSSPLAQIEFPDFDEIVAPLALMDEETQPEPSGSQSDRKSSLSSNSPDILSVNQLLQSVLETARQVASFPISSTPVPYDQMKNQCEALVTGKQQKMSILHSFKHQQETRALVLSSENETKVSPLPIKTLDYSEGDLKLVSQQPIQAQYQVRLCSYDFGQQHSLKLPPASPFDKFLKAAGC

SEQ ID NO: 22033 - protein, 328 aa, Glycine max
MSLSLDQEGGLQPSRRRSLFTMASYMLIFSARAGNFPELIQKVKAFLTETTVDPFLELIDDVRLQAVYREPENIIYGSQEDDVSAMKTLSAVKLDDKQLKETVISCFLTKFSKLSEDELSSIKKQLVQGFSPDDAYPLGPPLFMETPGKSSPLAQIEFPDFDEIVAPLALMDEETQPEPSGSQSDRKSSLSSNSPDILSVNQLLQSVLETARQVASFPISSTPVPYDQMKNQCEALVTGKQQKMSILHSFKHQQETRALVLSSENETKVSPLPIKTLDYSEGDLKLVSQQPIQAQYQVRLCSYDFGQQHSLKLPPASPFDKFLKAAGC

SEQ ID NO: 22034 - DNA, 2082 bp, Glycine max
gtgatatctctgacacagatgaatttattcttgtaaaatctttgcccccggtgaaaggacgagttttaagtgtgacttggagtacagatgctaactatatatattcaggaagtagtgatgggttgatacgatgctggaatgctacattgggcaatgaaatctataggattacagctggacttggagggttgggcaatggacatgaactttgtatatggtcattactgtctttaaggtctggtacacttgttagtgcggacagcagtggtagtgtccagttttgggacagtcaacatggaactctcttgcaagcacattctttacacaagggacatgtacatgctctggcagcatgtcctagtcataatagggtgttctctgctggttctgatggccagttttttttatttcaaggtaattctttacaagctatctagtagtcagtcaacatcatccaatgatatcaattctccatcaacaatgaagagatggatctatgttcactatgtaagggctcatacacatgacatcagggccctagctgttgctgtaccaataagtcatgaagcagatattaagccagaaaagaggattaaaagagctcgacgtgcagaaaatcccattagtttccgttaccataagtgggctcatttgggggttcctatgcttatctcagcaggagatgacacaaaactttatgcatacccagtgaaagaattcaccatgttttctcctcatgatatctgtcctgcgcctcagagaacacccattcaactagtgcataattctgtctttaatcaacgcaaactgcttttagttcaatcttcgcaaaagatagaggttcaattgctacaactaaaaaatgtccgcacttctggaggctttacaaagaacgttgtagtggctcaagttaacagtaaggcatctcagaagataatttgcagcaccatttctaattcaggggcgctatttgcatactctgatcataaaaagcctagtctttttcaattgaaaagggatgaagttggaaaaatcaagtgggatgttagaaaaagggagcttcctcagatattaccatttgcccattctatgattttcactcatgactcctccaagttgatagtagcaggtcacgataaaaggatatatgttgtgaatgttggggggccagatgaagttaagtcagaattactgcatacttttacaccccttcgcaaatcacaagatcaagaattacctccgactgagccacccataacaagattgtttactagttctgatgggcagtggttggcagctgtgaactgctttggggatatatatgtatttaacttggagatactaagccagcactggttcatttcaagattagatggcgcctctgttacagctggtggatttcctccccagaacgacaatgtactgatagttacaacttcctcaaatcaagtgtatgcttttgacgtagaggccaagcagttgggagaatggtccaaacggcacacatatgctcttcctaggagatacctggaatttcctggtgaagttattgggctctcattccctccatcagaaacttcatcttctccatcggcaacttcatcttcagttgttgtttacagctccagggctatgtgcttgattgactttgggttgcctgtggagcaagacgaaagtgatatgctaaatactaaagattcaagggcaatgaattcacaaaattttaatgttaagaagaggattgaagttaagaagatgattgaagttaagaaggaacataataggaggaactttgaagttatacctttcgagaatcctgttttatgtttaggtcatacttcaaaaaattccatctttatggtagacaaaccatggttgcaagttgtcaagagtttagaaggccgaccagtccacagacatatatatgggacatgaggcattaagcaacctagagaattgttctcagcttgagggggatacatgacggggataaaagttccttgttgtttttctttttgtctcttcatggctgggatctggaatcatgtattgtgttatcataatcaattttgttccattagc

SEQ ID NO: 22035 - protein, 546 aa, Glycine max
MELSCKHILYTRDMYMLWQHVLVIIGCSLLVLMASFFYFKVILYKLSSSQSTSSNDINSPSTMKRWIYVHYVRAHTHDIRALAVAVPISHEADIKPEKRIKRARRAENPISFRYHKWAHLGVPMLISAGDDTKLYAYPVKEFTMFSPHDICPAPQRTPIQLVHNSVFNQRKLLLVQSSQKIEVQLLQLKNVRTSGGFTKNVVVAQVNSKASQKIICSTISNSGALFAYSDHKKPSLFQLKRDEVGKIKWDVRKRELPQILPFAHSMIFTHDSSKLIVAGHDKRIYVVNVGGPDEVKSELLHTFTPLRKSQDQELPPTEPPITRLFTSSDGQWLAAVNCFGDIYVFNLEILSQHWFISRLDGASVTAGGFPPQNDNVLIVTTSSNQVYAFDVEAKQLGEWSKRHTYALPRRYLEFPGEVIGLSFPPSETSSSPSATSSSVVVYSSRAMCLIDFGLPVEQDESDMLNTKDSRAMNSQNFNVKKRIEVKKMIEVKKEHNRRNFEVIPFENPVLCLGHTSKNSIFMVDKPWLQVVKSLEGRPVHRHIYGT

SEQ ID NO: 22036 - protein, 533 aa, Glycine max
MYMLWQHVLVIIGCSLLVLMASFFYFKVILYKLSSSQSTSSNDINSPSTMKRWIYVHYVRAHTHDIRALAVAVPISHEADIKPEKRIKRARRAENPISFRYHKWAHLGVPMLISAGDDTKLYAYPVKEFTMFSPHDICPAPQRTPIQLVHNSVFNQRKLLLVQSSQKIEVQLLQLKNVRTSGGFTKNVVVAQVNSKASQKIICSTISNSGALFAYSDHKKPSLFQLKRDEVGKIKWDVRKRELPQILPFAHSMIFTHDSSKLIVAGHDKRIYVVNVGGPDEVKSELLHTFTPLRKSQDQELPPTEPPITRLFTSSDGQWLAAVNCFGDIYVFNLEILSQHWFISRLDGASVTAGGFPPQNDNVLIVTTSSNQVYAFDVEAKQLGEWSKRHTYALPRRYLEFPGEVIGLSFPPSETSSSPSATSSSVVVYSSRAMCLIDFGLPVEQDESDMLNTKDSRAMNSQNFNVKKRIEVKKMIEVKKEHNRRNFEVIPFENPVLCLGHTSKNSIFMVDKPWLQVVKSLEGRPVHRHIYGT

SEQ ID NO: 22037 - protein, 531 aa, Glycine max
MLWQHVLVIIGCSLLVLMASFFYFKVILYKLSSSQSTSSNDINSPSTMKRWIYVHYVRAHTHDIRALAVAVPISHEADIKPEKRIKRARRAENPISFRYHKWAHLGVPMLISAGDDTKLYAYPVKEFTMFSPHDICPAPQRTPIQLVHNSVFNQRKLLLVQSSQKIEVQLLQLKNVRTSGGFTKNVVVAQVNSKASQKIICSTISNSGALFAYSDHKKPSLFQLKRDEVGKIKWDVRKRELPQILPFAHSMIFTHDSSKLIVAGHDKRIYVVNVGGPDEVKSELLHTFTPLRKSQDQELPPTEPPITRLFTSSDGQWLAAVNCFGDIYVFNLEILSQHWFISRLDGASVTAGGFPPQNDNVLIVTTSSNQVYAFDVEAKQLGEWSKRHTYALPRRYLEFPGEVIGLSFPPSETSSSPSATSSSVVVYSSRAMCLIDFGLPVEQDESDMLNTKDSRAMNSQNFNVKKRIEVKKMIEVKKEHNRRNFEVIPFENPVLCLGHTSKNSIFMVDKPWLQVVKSLEGRPVHRHIYGT

SEQ ID NO: 22038 - DNA, 1509 bp, Glycine max
aactcaacttcggatgaatcactgctatgccaaggactagccctgaatgatgatcttcagcgtgtactggccaagcacgaatctatttcttctggaatttctaccaaaaacgaaaatcacactgagaatttgaatccttcacttgcacctgctggagctcttgtagacattgatgctcctttggttgatactggagatactagcaaacaaactgatgggagatcctcttctaatgttgaagcagggtcccaaacattgaatcagttactacttcctgcacctccaacttctaatggttcaacaattcctgccaaggttgatcccaaatgggacctgctcagtggcgatgactataactcaccaaaagcggattcatcaaatgctcttgttcctctaggagaacaaccaactgccagtcctgtttctcagcagaatgcccttgttctttttgatatgttttctaatggaaataatgcacctacatctgtcaattcccagccaccccatccagctaatgttgctggccaaaccagtccatatgctccccaatttcaacaacagcaaacagtcacatctcaaggtggattttaccccaatggaaatgccccaaatgcaggttcacctcagcagtatgagcaatcattgtatacacaaaatacaggtcctgcctggaatggtcaggttgcccaacagcaacagcaacaaccaccttcacctgtttatggtgcatttaatgttttttcattgtattttatacgtatttctatttggttgtagtccttcacaattacattttctttctagaaaatggttttaaattggttcatggggaatgtgtaagttgcaacatttttctttacccactgactgacggtgatatgctgggtacttgggttggttcctggatggattgagaatgtaaatgtatataggatttgtgccctcatattttggacttcattgcataacacaatttttgtttttgtttgacaggcacacaaagtggatcattgccaccacctccttgggaagctcaaccagcagcagataatggaagtccattagcgggcgctcagtatccacacatgcagaattctggacatcctatggggcctcaaacaatgggcaatgaccagggtgttggtatgtatatgcagccaaatgctaacagccatatgtcaggaatgaataaccatgttgggagcaatcaaatgggcttgcaacctcagcatatgcaaggtgttgcaggaccctacatgggcatggctccacatcaaatgcagggtggtcctgtgatgtatcctcaacagatgtaaggaaaccaatttatgggatacggctatgatcaacgacaaggagttcattatcagcaacaaggagttccatatattgaacggcaaatgtatggtatgtctgttagagacgatagtagtttgagaaacccttaccaagcttctaccacatcgtatgctccatctgggaagccttccaagccagaggataagttat

SEQ ID NO: 22039 - protein, 258 aa, Glycine max
NSTSDESLLCQGLALNDDLQRVLAKHESISSGISTKNENHTENLNPSLAPAGALVDIDAPLVDTGDTSKQTDGRSSSNVEAGSQTLNQLLLPAPPTSNGSTIPAKVDPKWDLLSGDDYNSPKADSSNALVPLGEQPTASPVSQQNALVLFDMFSNGNNAPTSVNSQPPHPANVAGQTSPYAPQFQQQQTVTSQGGFYPNGNAPNAGSPQQYEQSLYTQNTGPAWNGQVAQQQQQQPPSPVYGAFNVFSLYFIRISIWL

SEQ ID NO: 22040 - DNA, 1537 bp, Glycine max
agaaggaagccaccggatgattactttgatgttgcagctgaggaggatcctgaagttagctttggtcagcttaaaaagttttcactgcctgaactgcggattgcaacagataactttagtaacaacaatattcttggtaaaggtggatatggcaaggtttatataggacgtttaacaaatggtggtaatgtagcagtaaaaagacttaaccctgaacgcatccgaggcgaggataagcaatttaaaagagaagtggaaatgatcagcatggctgtgcatcgaaatttgcttcgcctgattggtttttgtatgacgtcttctgaacgcttgcttgtgtatcctttaatggttaatggaagtttagagtcatgtttacgagagccttcggaatcaaaaccaccacttgaatggccgatgcggaagcgtattgctctgggagctgctagggggcttgcttatttgcatgatcattgtgacccaaagattattcatcgtgatgtcaaagctgctaacatattgttggatgacgaatttgaagcagttgtaggagattttggtttagcaaggattatggattaccaaaatactcatgttactactgctgtatgcggtacgcatggccatatagcaccagagtatctcacaactggaaggtcttcagagaagactgatgtttttggatatggcatgatgcttcttgaaataataactggacagagggcttttgatttagcacgattcgccagggatgaggatatcatgttgcttgaatgggtgaaagtacttgtgaaagacaagaagttggagacactggtggatgcaaatttacggggaaattgtgatatagaggaagtagaggagttgatccgggtggccttgatatgcacacaaaggtccccttatgaaagaccaaagatgtctgaggtggtgagaatgctggagggtgaaggtttggcagaaaagtgggatgaatggttgaatatgcaagaggatatacaaaatttcaccttcaatctctgcactccttatgactcaaatccaaatattcaaccagatgttctgtcaggtccaagatgatctttgaagggagaaacattttgaataatgaaacatttagcaagggaagagacgcattgtagaaacaaatagttttctctaaaagctgcaaaatgttggtttagtgcatcttataactagtttgccatgcagtggtgaataacatcctgtgtctaaacattcctaagtctttgatcaccgttacttcactgcattttcaataagtgtttgtcctacattttgaataggttcttcatgaagacatgaactgtagatgccgggttatatgtagttagtctcatattttttaggtgtataaccggacactggctgttgtgggtgggggaatatatagtgatttatggtctaccagttaaaaggagatgtccgagtgagtggtagttatttactcccatcaagttggtgcaaatacttttgtttataactagtattataattaagggatgagatataatttttt

SEQ ID NO: 22041 - protein, 358 aa, Glycine max
RRKPPDDYFDVAAEEDPEVSFGQLKKFSLPELRIATDNFSNNNILGKGGYGKVYIGRLTNGGNVAVKRLNPERIRGEDKQFKREVEMISMAVHRNLLRLIGFCMTSSERLLVYPLMVNGSLESCLREPSESKPPLEWPMRKRIALGAARGLAYLHDHCDPKIIHRDVKAANILLDDEFEAVVGDFGLARIMDYQNTHVTTAVCGTHGHIAPEYLTTGRSSEKTDVFGYGMMLLEIITGQRAFDLARFARDEDIMLLEWVKVLVKDKKLETLVDANLRGNCDIEEVEELIRVALICTQRSPYERPKMSEVVRMLEGEGLAEKWDEWLNMQEDIQNFTFNLCTPYDSNPNIQPDVLSGPR

SEQ ID NO: 22042 - protein, 272 aa, Glycine max
MISMAVHRNLLRLIGFCMTSSERLLVYPLMVNGSLESCLREPSESKPPLEWPMRKRIALGAARGLAYLHDHCDPKIIHRDVKAANILLDDEFEAVVGDFGLARIMDYQNTHVTTAVCGTHGHIAPEYLTTGRSSEKTDVFGYGMMLLEIITGQRAFDLARFARDEDIMLLEWVKVLVKDKKLETLVDANLRGNCDIEEVEELIRVALICTQRSPYERPKMSEVVRMLEGEGLAEKWDEWLNMQEDIQNFTFNLCTPYDSNPNIQPDVLSGPR

SEQ ID NO: 22043 - protein, 269 aa, Glycine max
MAVHRNLLRLIGFCMTSSERLLVYPLMVNGSLESCLREPSESKPPLEWPMRKRIALGAARGLAYLHDHCDPKIIHRDVKAANILLDDEFEAVVGDFGLARIMDYQNTHVTTAVCGTHGHIAPEYLTTGRSSEKTDVFGYGMMLLEIITGQRAFDLARFARDEDIMLLEWVKVLVKDKKLETLVDANLRGNCDIEEVEELIRVALICTQRSPYERPKMSEVVRMLEGEGLAEKWDEWLNMQEDIQNFTFNLCTPYDSNPNIQPDVLSGPR

SEQ ID NO: 22044 - DNA, 1518 bp, Glycine max
ggttgcatatccctctcaagactgacaatcatgttgtgtctgacttcgagggtgaaccctcaagcataattgcttgtgcacttgcgttattgaaagatgcatatgaggtgtcagaagttgatgatgaggatgacagaaacgaaagtggaataacttcaaactcaacagaaagtttgcatggcttgacccatggcgctaccttaacttcttcacactcattttcaagaagttcttcagattcagattctgtgcattcagcaggaagcacttcttcagaggagtcacgagcctctcgtgctacagaaaaccatagcatagagattgctatgggttatgcaaaatcacttgggagggaaaaatattcagtgatatgtcattattttaagcagttccgtgaacttagaaattggtgttgcccatctgagcttgattttattgcttctttaagccgctgtaggaattgggatgccaaaggtggaaaaagcaagtcctattttgcaaaaacacttgatgacagattcatcataaaagagattaagaagacagaacttgattcatttttggggttttcttctctgtatttcaaacacatgagagaatcatttgaatttggcagccaaacttgtcttgcaaaagtcttggggatatatcaggttactaaaagacacgtcaaaagtggaaaagaggttaaatatgaccccctcatggtgatggaaaatcttacctacaatagaaatattacacgccagtatgatcttaaaggtgctctttatgcccggtacaattctgctgccgatggtgctggagatgtttttttggatcagaactttgtgaatgacatgaattcttccccattatatgtcagccataaagcaaaacgtgttcttcaacgtgctgtttggaatgacacatcttttctgaattcaatcaatgtgatggattactccttgcttgttggagtagattctcagaagcacgagcttgtctgcgggatcattgattatctcaggcagtatacttgggacaaacatcttgagacatggatgaagtcttcacttgttgtgccaaaaaatgtgttgccaactgtaatctctcctaaagaatacaaaaagaggttcagaaagtttatgtctacatattttttgagtgttccagatcactggtgttcccagaaatcctccaatccttgcaaactttgttgctcaggggaagatgacccttcccagcaaaagccctagcacaagattgccaagtggtttctctgtccaaatctttttgattcaatttctcaaaagaaaaaaaaaatacaaattgagaatttatgcaagtagttagcagtactgtatatagacagtcaatattgattataaatctagccctgctattctgcgatttttagcgaatttctagggatgctgtcatttacaggtccaccctctcccagtatgagatgagtaaatttttgtaggcctaaggtaaatgtaaaggtttatttaatcaatgaaaagtacagttgct

SEQ ID NO: 22045 - protein, 411 aa, Glycine max
LHIPLKTDNHVVSDFEGEPSSIIACALALLKDAYEVSEVDDEDDRNESGITSNSTESLHGLTHGATLTSSHSFSRSSSDSDSVHSAGSTSSEESRASRATENHSIEIAMGYAKSLGREKYSVICHYFKQFRELRNWCCPSELDFIASLSRCRNWDAKGGKSKSYFAKTLDDRFIIKEIKKTELDSFLGFSSLYFKHMRESFEFGSQTCLAKVLGIYQVTKRHVKSGKEVKYDPLMVMENLTYNRNITRQYDLKGALYARYNSAADGAGDVFLDQNFVNDMNSSPLYVSHKAKRVLQRAVWNDTSFLNSINVMDYSLLVGVDSQKHELVCGIIDYLRQYTWDKHLETWMKSSLVVPKNVLPTVISPKEYKKRFRKFMSTYFLSVPDHWCSQKSSNPCKLCCSGEDDPSQQKP

SEQ ID NO: 22046 - protein, 303 aa, Glycine max
MGYAKSLGREKYSVICHYFKQFRELRNWCCPSELDFIASLSRCRNWDAKGGKSKSYFAKTLDDRFIIKEIKKTELDSFLGFSSLYFKHMRESFEFGSQTCLAKVLGIYQVTKRHVKSGKEVKYDPLMVMENLTYNRNITRQYDLKGALYARYNSAADGAGDVFLDQNFVNDMNSSPLYVSHKAKRVLQRAVWNDTSFLNSINVMDYSLLVGVDSQKHELVCGIIDYLRQYTWDKHLETWMKSSLVVPKNVLPTVISPKEYKKRFRKFMSTYFLSVPDHWCSQKSSNPCKLCCSGEDDPSQQKP

SEQ ID NO: 22047 - protein, 215 aa, Glycine max
MRESFEFGSQTCLAKVLGIYQVTKRHVKSGKEVKYDPLMVMENLTYNRNITRQYDLKGALYARYNSAADGAGDVFLDQNFVNDMNSSPLYVSHKAKRVLQRAVWNDTSFLNSINVMDYSLLVGVDSQKHELVCGIIDYLRQYTWDKHLETWMKSSLVVPKNVLPTVISPKEYKKRFRKFMSTYFLSVPDHWCSQKSSNPCKLCCSGEDDPSQQKP

SEQ ID NO: 22048 - DNA, 1396 bp, Glycine max
acgtttcaaatcgcagtctcagagcaaagcagagccaagaagaagaagaagaaaaccaacataatcaacaacaacaacaacaaaaagcttgcaaattagaagaatcttcagttaaaagggaagaagaacacacaagaagaaagagaagaagaaacgcgcgcgaatgaagggagaattagagttgccacctgggttcagatttcaccccactgatgaagaattggtgaatcactacttgtgtaggaagtgcgctggtcaaccaatcgcggttcccgtcatcaaagaggtcgatttgtacaagtttgatccatggcagcttccagaaattggtttttacggcgagaaagaatggtacttcttttctcctcgggaccggaaatacccgaacggttcacggccgaaccgcgccgccggaagcggctattggaaagccaccggcgctgataaaccgatcggaaaaccgaaagcgcttgggatcaagaaagctctggttttttacgccggaaaagcccccaaaggtgtgaaaaccaattggattatgcacgaatatcgcctcgccaatgttgaccgatctgcctccaagaaaaaaaacaacaacttgaggcttgatgattgggtgttgtgtcgaatctacaacaagaaagggaagattgagaaatacaacacaggcgcagcgaagatgaatgttgagatggttcatagttttgagcacgagaacgagacgaagccagagattcataagctaggaaatgagcaattgtacatggagacttcggattcggtgccaaggttgaacacggactcgagcagttcggagcacgtggtttcgcccgatgtcacgtgcgagagggaggtgcagagcgaccccaagtggaacgatgatctggacctaaagctagaaaacgcgtttgattttcagtttaattacttggacgataataacctttccgtggatgattacctttttggcactgttcagtatcaaatgggccagctctcgcccttgcaggacatgttcatgtacctacagaagatgtgaaaactgaaaacgaaacgttttgagcaacatgggacccgcaaatatctttgttttattatttttttaaaaggaaaagtcagcatttgtatgcaattgcattgcacctaacatgtgatgtgggctaggccaagcttagcaactattcttattctttgttctagagagatgagggaatgttgaattcggctgaaatgggctatttggattggttcttggtgtaaagaaaaaatgagagaaggagattaggtgctgcagtaagtaaaaagtaagtgagcaaattgatgataggttattggagggttaatgtgtgggtgtaaggactcacttaggaaaattcttgttcattgctattccagc

SEQ ID NO: 22049 - protein, 291 aa, Glycine max
MKGELELPPGFRFHPTDEELVNHYLCRKCAGQPIAVPVIKEVDLYKFDPWQLPEIGFYGEKEWYFFSPRDRKYPNGSRPNRAAGSGYWKATGADKPIGKPKALGIKKALVFYAGKAPKGVKTNWIMHEYRLANVDRSASKKKNNNLRLDDWVLCRIYNKKGKIEKYNTGAAKMNVEMVHSFEHENETKPEIHKLGNEQLYMETSDSVPRLNTDSSSSEHVVSPDVTCEREVQSDPKWNDDLDLKLENAFDFQFNYLDDNNLSVDDYLFGTVQYQMGQLSPLQDMFMYLQKM

SEQ ID NO: 22050 - protein, 166 aa, Glycine max
MHEYRLANVDRSASKKKNNNLRLDDWVLCRIYNKKGKIEKYNTGAAKMNVEMVHSFEHENETKPEIHKLGNEQLYMETSDSVPRLNTDSSSSEHVVSPDVTCEREVQSDPKWNDDLDLKLENAFDFQFNYLDDNNLSVDDYLFGTVQYQMGQLSPLQDMFMYLQKM

SEQ ID NO: 22051 - DNA, 1251 bp, Glycine max
atcgatcacacagcttttgttctcgcacttcgctgtctgaggttctggattctcagtgtttgcgaagcgctgcatcatcctttggggaaggtaacaaaaaaagatatgcctgtttctttcttgcatggagctcatgtcatcttccatcacatgattgagagcaccgcattagaggcacatattttcattccttccacgtttacattgaatattttatcatgaatggatcatcaagggcatagccagaacccatctatgggggtggttggtagtggtgctcaattagcatatggttctaacccatatcagccaggccaaataactgggccaccggggtctgttgtgacatcagttggtaccattcaatccacacctgctggagctcagctaggacagcatcaacttgcttatcagcatattcatcagcaacaacaacaccagcttcagcaacagctccaacaattttggtcaaaccagtaccaagaaattgagaaggttactgatttcaagaaccacagtcttcccctggcaaggatcaagaagattatgaaggctgacgaggatgttaggatgatatcagccgaagcaccagtcatctttgcaagggcatgtgaaatgttcatattagagttaaccctgcgttcttggaatcacactgaagagaacaaaaggcgaacacttcaaaaaaatgatattgctgctgcaatcacaaggactgacatctttgatttcttggttgacattgtgcctcgtgaggacttgaaagatgaagtgcttgcatcaatcccaagaggaacaatgcctgttgcagggcctgctgatgcccttccatattgctacatgccgcctcagcatgcgtcccaagttggagctgctggtgttataatgggtaagcctgtgatggacccaaacatgtatgctcagcagtctcacccctacatggcaccacaaatgtggccacagccaccagaccaacgacagtcgtccccagaacattagctgatgtgtcgtggaaattaagataaccaggcaccggaatcagttgtgaatgtcaaactgaatggttgggaagatccatactacattgcgagcagaagctgtagctgatagtttacatgcaatgcagactataaacatatgtagataatgtgctagggaaaacttaaccttatctttgatttagctggataaaatggtatttttcatgtttaaatttacaggtcatcagatgataatatttatttactggtg

SEQ ID NO: 22052 - protein, 258 aa, Glycine max
MDHQGHSQNPSMGVVGSGAQLAYGSNPYQPGQITGPPGSVVTSVGTIQSTPAGAQLGQHQLAYQHIHQQQQHQLQQQLQQFWSNQYQEIEKVTDFKNHSLPLARIKKIMKADEDVRMISAEAPVIFARACEMFILELTLRSWNHTEENKRRTLQKNDIAAAITRTDIFDFLVDIVPREDLKDEVLASIPRGTMPVAGPADALPYCYMPPQHASQVGAAGVIMGKPVMDPNMYAQQSHPYMAPQMWPQPPDQRQSSPEH

SEQ ID NO: 22053 - protein, 247 aa, Glycine max
MGVVGSGAQLAYGSNPYQPGQITGPPGSVVTSVGTIQSTPAGAQLGQHQLAYQHIHQQQQHQLQQQLQQFWSNQYQEIEKVTDFKNHSLPLARIKKIMKADEDVRMISAEAPVIFARACEMFILELTLRSWNHTEENKRRTLQKNDIAAAITRTDIFDFLVDIVPREDLKDEVLASIPRGTMPVAGPADALPYCYMPPQHASQVGAAGVIMGKPVMDPNMYAQQSHPYMAPQMWPQPPDQRQSSPEH

SEQ ID NO: 22054 - protein, 150 aa, Glycine max
MKADEDVRMISAEAPVIFARACEMFILELTLRSWNHTEENKRRTLQKNDIAAAITRTDIFDFLVDIVPREDLKDEVLASIPRGTMPVAGPADALPYCYMPPQHASQVGAAGVIMGKPVMDPNMYAQQSHPYMAPQMWPQPPDQRQSSPEH

SEQ ID NO: 22055 - DNA, 1571 bp, Glycine max
aacgcagaggcgaagcagcaacaacagaagaatgctccgttcaactccatttccggcaccgtacaattcggcgccagttctctctcgcgcacgcacgtgcccctctccagcactcgcacgtgcccttcattctcattcctctttggtttggcggctcgtcttcccacaattccaccaacacaacgtaaatatttccggcggagtgtttgtcgcggccgccgcgaagaagcaacaacggcgcggcggcgctgagctcgccgtaatggacggcggtttcgacgacggtgatttttatgatgcttacgatgatgatgaagaagaagaagaatttgatgatgatgatgatgaagaagaagggatgcttccgttggatgacatgaacaaatggttcgagaagaagccgaggggttttggagaagggaaagtgtacgacacttcggttgaggataagctgctcgaggaaatgcgccagagtagaatagcgcaggctgaaaacttgacgaagcttaagagcaatcctgtgaagcatgcttcaaacgaaagtgttcaaaagaagaaagattcagaacttgttccaattggaggtcgagtgtgcttggtgaacctaccaaagaaaaagaacatccataaagatctgaaatcagccttgcaagggattcctggcataactaatatagtcccagctgttactggaaacaagaagacgagggacccaatctgcaagggttttgcatacgttgatttcgagtgtgaagaagatgcaattaggtttgttgagttatacactggacaagctattacttttggtaaaattcagaagcagataaaatgtgagcttctaaatgtacagtcttcatcttcttctctgaaattaagcaaaaaccttaatgctgctccgcaacttgtggcccgctttgaagaagtttcaaatgaggattctaacttggatggttctgcccttagttcctgggatgaggccaactcttcagatgatttggatgacctggactatcagatgaatggagaagaacaggaagatgatgaggacaatcaagagtctgtctccactttgggggtggatcatgatgatagtgtggaaatgaggatcgatcctgaaatttgttctcttccctcagagcaggttgacagaaaccatgcagctgagcagaagtcatctgccaaggttaaacaggagaatgcccgtaagaaaaaaccaacttccaaagatagagacaaaaaagttttaggtgttcctggatcctcaagaaggttaaagatcagggaaaaggctgttttaagtgacgttttctccaagtacggattaaaagctactcttgcttcaaaagataattagtaaattgctaatgaggtgagatcgccaaagtctaaatcatctcccagcacgtagggtctaaaaactaaaaggtcatattagatgcaatgggactttctagttggccatggatgctagtttttgattcagtgtacaatcaaattgtagcataagagtcttgtagaaaaattgatgatagtagattattatttttatgaatatcaaaacattctttatt

SEQ ID NO: 22056 - protein, 450 aa, Glycine max
TQRRSSNNRRMLRSTPFPAPYNSAPVLSRARTCPSPALARALHSHSSLVWRLVFPQFHQHNVNISGGVFVAAAAKKQQRRGGAELAVMDGGFDDGDFYDAYDDDEEEEEFDDDDDEEEGMLPLDDMNKWFEKKPRGFGEGKVYDTSVEDKLLEEMRQSRIAQAENLTKLKSNPVKHASNESVQKKKDSELVPIGGRVCLVNLPKKKNIHKDLKSALQGIPGITNIVPAVTGNKKTRDPICKGFAYVDFECEEDAIRFVELYTGQAITFGKIQKQIKCELLNVQSSSSSLKLSKNLNAAPQLVARFEEVSNEDSNLDGSALSSWDEANSSDDLDDLDYQMNGEEQEDDEDNQESVSTLGVDHDDSVEMRIDPEICSLPSEQVDRNHAAEQKSSAKVKQENARKKKPTSKDRDKKVLGVPGSSRRLKIREKAVLSDVFSKYGLKATLASKDN

SEQ ID NO: 22057 - protein, 440 aa, Glycine max
MLRSTPFPAPYNSAPVLSRARTCPSPALARALHSHSSLVWRLVFPQFHQHNVNISGGVFVAAAAKKQQRRGGAELAVMDGGFDDGDFYDAYDDDEEEEEFDDDDDEEEGMLPLDDMNKWFEKKPRGFGEGKVYDTSVEDKLLEEMRQSRIAQAENLTKLKSNPVKHASNESVQKKKDSELVPIGGRVCLVNLPKKKNIHKDLKSALQGIPGITNIVPAVTGNKKTRDPICKGFAYVDFECEEDAIRFVELYTGQAITFGKIQKQIKCELLNVQSSSSSLKLSKNLNAAPQLVARFEEVSNEDSNLDGSALSSWDEANSSDDLDDLDYQMNGEEQEDDEDNQESVSTLGVDHDDSVEMRIDPEICSLPSEQVDRNHAAEQKSSAKVKQENARKKKPTSKDRDKKVLGVPGSSRRLKIREKAVLSDVFSKYGLKATLASKDN

SEQ ID NO: 22058 - protein, 363 aa, Glycine max
MDGGFDDGDFYDAYDDDEEEEEFDDDDDEEEGMLPLDDMNKWFEKKPRGFGEGKVYDTSVEDKLLEEMRQSRIAQAENLTKLKSNPVKHASNESVQKKKDSELVPIGGRVCLVNLPKKKNIHKDLKSALQGIPGITNIVPAVTGNKKTRDPICKGFAYVDFECEEDAIRFVELYTGQAITFGKIQKQIKCELLNVQSSSSSLKLSKNLNAAPQLVARFEEVSNEDSNLDGSALSSWDEANSSDDLDDLDYQMNGEEQEDDEDNQESVSTLGVDHDDSVEMRIDPEICSLPSEQVDRNHAAEQKSSAKVKQENARKKKPTSKDRDKKVLGVPGSSRRLKIREKAVLSDVFSKYGLKATLASKDN

SEQ ID NO: 22059 - DNA, 1209 bp, Glycine max
ttcactagaaagagacacaattgttataactgcggactcgtccactgccattcatgcagttcaaggaaagcattaagagcagcacacgctcctaatcctggaaagccgtatcgtgtgtgtgattcttgttatgcaaaattgaacaaggttgctgaagctagcaatagtaataggaggaatgccttgcctcgtctgtcaggtgagaacaaggataggctagacaagtctgacctaagattgtccaaggcagtaattcattctaacatggatttgataaagcagctagatagtaaggcagccaagcaaggaaagaaaggtgatacattctcactggttcacccctcacaaccaccttctttgctacagctgaaagatgttgtcttgtcctctgctcttgatctgagacgaacagttccaagacctgtggttgcaccatcaggagtaagttccagatctgtctcccctttctctagaagaccaagcccccctcgttcagctacgcctattccaacaacttcaggacttgccttctcaaaaagtatttctgatagtttgaagaaaacaaatgaacttttaaatcaagaagtgcagaagttgcatgctcaggtcgagagcctgagacagagatgtgaactgcaagaattagagcttcaaaggtcagcaaaaaatactcaagaagctatggcactggctgctgaggaatctgctaaatgtaaagctgcaaaagaagttattaagtcgctcacggctcagctcaaagatctggctgagaagcttcctcctggagtgtatgatgctgagaacgttagaccagcttacctaccaaatggtattgagccaaatggcatccgccatccagattcaaatggggagcagcactcaagagcagagtcaatcagtgcatctagtttggcctccatgggacttgaatctgctctattgaatagaactgcagggaattcgccaggaacatatggaactaatcctcaccagcaaattcggagccctgtgtcctctaatggggccaataattatccagatgttaaattgcctaatcgtggtggtgcaattcaggcaagcagcggtaatgtgtcagatactgctgatggtcgagattctgggaatttccacaacggcgatagtggtttgaaattgaggagtgttgcacctgctgctgatagtaatcaagttgaggcagaatggattgaa

SEQ ID NO: 22060 - protein, 403 aa, Glycine max
FTRKRHNCYNCGLVHCHSCSSRKALRAAHAPNPGKPYRVCDSCYAKLNKVAEASNSNRRNALPRLSGENKDRLDKSDLRLSKAVIHSNMDLIKQLDSKAAKQGKKGDTFSLVHPSQPPSLLQLKDVVLSSALDLRRTVPRPVVAPSGVSSRSVSPFSRRPSPPRSATPIPTTSGLAFSKSISDSLKKTNELLNQEVQKLHAQVESLRQRCELQELELQRSAKNTQEAMALAAEESAKCKAAKEVIKSLTAQLKDLAEKLPPGVYDAENVRPAYLPNGIEPNGIRHPDSNGEQHSRAESISASSLASMGLESALLNRTAGNSPGTYGTNPHQQIRSPVSSNGANNYPDVKLPNRGGAIQASSGNVSDTADGRDSGNFHNGDSGLKLRSVAPAADSNQVEAEWIE

SEQ ID NO: 22061 - protein, 315 aa, Glycine max
MDLIKQLDSKAAKQGKKGDTFSLVHPSQPPSLLQLKDVVLSSALDLRRTVPRPVVAPSGVSSRSVSPFSRRPSPPRSATPIPTTSGLAFSKSISDSLKKTNELLNQEVQKLHAQVESLRQRCELQELELQRSAKNTQEAMALAAEESAKCKAAKEVIKSLTAQLKDLAEKLPPGVYDAENVRPAYLPNGIEPNGIRHPDSNGEQHSRAESISASSLASMGLESALLNRTAGNSPGTYGTNPHQQIRSPVSSNGANNYPDVKLPNRGGAIQASSGNVSDTADGRDSGNFHNGDSGLKLRSVAPAADSNQVEAEWIE

SEQ ID NO: 22062 - DNA, 1800 bp, Glycine max
tcatctgcttcaagaagaaacagaagtaggagtgtaagtccttatacaaggaaatcacctgtttctccaaaatgtcatagagaaacttcacctcatagaggaaggaaacagtcacgtgttgattctggctctccaagtcatcgcagaggaagtaggccttctccaaagattgatgaaaaaaaactaagaaacagaaggcgctcaaggtcaagatcttcagatgataggcttcactctagcaaaaatgaagaagtcttgcatggaaagtctaagcgcagagagagaaggcgatccaagtcattatctgtggatgagaagcctcacagaaggagccggtcatccccaagaaaagtggatgaaagtagatcccggcacaaaaaacgatcgaggtcaaaatctgtggatgataggcatgattctcctgagagattggatgaaaacagaaatagaagattgaggcatagtgataaaaggcactccagatcaagatctacagacaatagggatcaaactgatgtcagagaggatgaaagtaaaaatgaaaagtcaaaacatcgtgatactaaaaggagcaggtcaaaatctgttgaagggaagcgtcgttctaaagataaatcaggggaaaatagagataagaaatcaaagcatcatgatagaaggcgttcaaggtcaatatcattagaagataagcatgacaaaggaggcacttcactccatataaacttggatgagagaaattttgaactgacaaagtcccctgaaggtaagaatcactacagtgataaatatggaaatagaggtgaaaaatcagagcatcaaaagaaaaccccatctaaatcaaaatcaggacaatttgatgggagtgggcccttacgaggaaattacaaggaggatgattcaaaaggaaaatcaccttctgattctggatctgctgaagttaagcatcatttgaatgatggagaaagtgctaccagtgaagaaaattctaaactctttggagatgtgtttcaggaaccaattataaatgcgaaggactcagcaatcctgaatgataatgggacactgacttcagtgaatggtaactacaaatcagaagggtcaagtgaaaatgcaggagctgatgataacccaggatggatatcagtggaaaaagtgggaagtgaaaaatattaagcaaacttggcttggagtggtggttctaaattatatcaaagaacatagccatgagtatagatttctgttattcaatcttgaatcggaagtggtgtcactcaaggctactatcatttcttgtcactatagtgtagatttatttcaaaagcattgcacagatcatggttttttgaggttgaagatttctgcacctgtcaatgattatgggataaagagcatattctaattcaggattctcatttaggtttcctgacaagttttttccaaggaatatactgtttcttcttaggaggaccgcaattctcagaggatggtgcctccactatttgattggtccccagaatattctctgttctcttatgaacatcttccgttgtttatttcttttgcaggttgggttggtaaagatcaggtgtagaatcccacagctgttggtgtggtttaaggtttcaagaagtgtcctgcttttgtcataatcaaccatgcagcgcttatgtcatgcttcttttactgcttgattgatgtatgttggaatgttattttaagtatactattctttttattgaaggtaatttttgctatgtttgggtcttgatatttatttttaaaatttgatggtgtctgaac

SEQ ID NO: 22063 - protein, 390 aa, Glycine max
SSASRRNRSRSVSPYTRKSPVSPKCHRETSPHRGRKQSRVDSGSPSHRRGSRPSPKIDEKKLRNRRRSRSRSSDDRLHSSKNEEVLHGKSKRRERRRSKSLSVDEKPHRRSRSSPRKVDESRSRHKKRSRSKSVDDRHDSPERLDENRNRRLRHSDKRHSRSRSTDNRDQTDVREDESKNEKSKHRDTKRSRSKSVEGKRRSKDKSGENRDKKSKHHDRRRSRSISLEDKHDKGGTSLHINLDERNFELTKSPEGKNHYSDKYGNRGEKSEHQKKTPSKSKSGQFDGSGPLRGNYKEDDSKGKSPSDSGSAEVKHHLNDGESATSEENSKLFGDVFQEPIINAKDSAILNDNGTLTSVNGNYKSEGSSENAGADDNPGWISVEKVGSEKY

SEQ ID NO: 22064 - DNA, 1534 bp, Glycine max
tcagctacgtgggggggccccccccatggggatgatgacagtgcagatgagtttgaggacttccctggagatgaaggtaactggtggacctcttgtattttgtatcatgccttcaataactttagaagttctagaaaccgaagaaggacaagagttggtgatcaaagtagggttaatcgccatttaagttctgatacttcaaattctgatgaaggttctgtagcatctgtagagtatggcgagtataggctagatgagattgatgatgattttgttagtacaattggccacttgagaggtggaagtggttttcgcagatcgcggagacgtcattctcgctccaatgacaattaggtaagttatgtctacaaataaccttcattgtcctttctgttattgtatgaagtttgtgacgactttaaactggatactgatagtatatttctttctgacttgaagtatgaggtagcagtggtgagaccctggtattttgagctcttttgttttattccctttaatgtacttattaattttcaagtgttggagcagtatttgaactgaaggaagcagaatgagaggaagagatacactcaacatagaaaccagtgtgatcttgatgcagttggtgtgacaactcgcaaaggttacatttaggtcatctaatgcatttgtgataacttgagggatcaacattacaagattgatagttgaatgtggattatattccaagtttctgttatgcttaccattaactaccatttagtatgctagccattgggagcctgttaatttactcctgtgccaccaaagtgattccgctagctttatgctctgtagaacaatgaattacttcttttccttgtatatatagccgcttagttgtgatgtattataatgattctaaagtagggatgtttccatgtcactgaataaaacttttgtttttttttcctcccccattttgatccacgtaacttagggttcatgtggatagatttaataaaaagtatgatattttttatgaaaaatctttttaaaaatattaaaactattttatgatagaaaatagattatgtattatcatacaattacaaattaccaggtatggaagtttgttaaactactttatattggtagtgcataattcttaaaattttaaacaatatatgttaaatttgggaaatgtccctattttatagtttgattttttttagagtacttttaagaagagcaaaactctagacacaaaagaaaaataaatggtttttttttagttcttcagcacaaaattaaaagaaaagaaaactcatctaaacatattaaaatatactgtaaaagtattttttaatctagaaacatattcaagacaagcacatagcctttgttcagttttgagaagaaaaagaaaaaagaaaacaaatagaagagaaagaaaaaagagtagtacatttttagattatttaaattaataaaaataaaaggaaaagataaagaaatgtcaggtacctctagcatgtataattggtttggaggg

SEQ ID NO: 22065 - protein, 117 aa, Glycine max
SATWGGPPHGDDDSADEFEDFPGDEGNWWTSCILYHAFNNFRSSRNRRRTRVGDQSRVNRHLSSDTSNSDEGSVASVEYGEYRLDEIDDDFVSTIGHLRGGSGFRRSRRRHSRSNDN

SEQ ID NO: 22066 - protein, 61 aa, Glycine max
QLRGGAPPMGMMTVQMSLRTSLEMKVTGGPLVFCIMPSITLEVLETEEGQELVIKVGLIAI

SEQ ID NO: 22067 - DNA, 1774 bp, Glycine max
aaaaccatcactgcattctctctgaagcctctaattctgtgtgtcagttaaagaaagaagcgcacatgccaaaagggatggcttcagtcaccacattttcactaatgttacagtttctgttctttatactattttcttcgtttggtcagctaagcttagctttcacgtcgcaagagtaccatgaggctcttgagaaatccattctcttcttcgagggacaacgatctgggaaattgccttccaaccagcaacaaacatggaggggagattctggattgtccgatggctcttcctaccatgtggacttagtaggcggttattatgatgctggagacaacgtcaagtttgggttgccaatggcctttaccactacattgttagcatggagtgtgattgaatttggaagctcaatgcaggaccaacttgaaaatgccagagctgctattcgttggagcacggattaccttcttaaggcagccaccaccacccctgacacattatatgtccaagtaggagagccgaacatggatcataggtgctgggaaagggctgaagatatggacactccacgcaacgtgtataaagtatcagctacaaacccaggttcggatgtagcagcagagacggcaactgcattggctgcttcttcaatagtattcagagattctgatccaagctattcctccaaattgcttcaagcagccatcaaagtattcaattttgcagaccgttacaggggttcttatagtgattctcttaattcggttgtctgtccattctactgctcttactctggataccatgatgagcttctctggggtgcatcatggatttataaagcatcaggaattaacacttatatacaatatatacaatccaatggccacatattaggggctgatgatgatggttacacattcagttgggatgacaagcgacctggaacaaaaatcctgctttccaaggaattcctagaggaaaattctgaagagttccaactatataaggcacatgcagacaattacatttgttcgctaatgtcgggaacacccggtttccaggctcagtacacccgaggggggcttctgtacaaagggagcgagagcaatttgcagtacgtaacatcaactagcttccttctcttgacatacgccaaatatctgaacacaaacggcggtaatgtagttcgatgtgggacttcagcagtcacgggcgaaaacctagtaacactagctaaagcacaagtggactacattctgggcaacaatccaacaaagatgtcttatatggtgggttttggagagaggtatccaaagcatatccaccacaggggttcctctctgccttccatccacgcacacactcaacacatttcatgcaacgacggctttcagtttttccattcttcctcgcccaaccctaatatccttgttggagccatcgtaggtggtcctgataacaatgacaacttctctgatgatcgacataactatcagcagtctgagccagcaacatacatcaatgcgccgtttgtaggtgctcttgcctatttctctgccaacccaccaacaacctattaggattaggaattaataatacacctataatcaagttttcaatatcgaccaatgccgttccaaatgtggttgcagacacttaaaaaacctgttgcctatcattaatgcttgtatgcttggtgttaggctgtttgttagttccttcatccttgatgaatgtttatgtttccatcaaaagtgatgtttaattattagtg

SEQ ID NO: 22068 - protein, 525 aa, Glycine max
NHHCILSEASNSVCQLKKEAHMPKGMASVTTFSLMLQFLFFILFSSFGQLSLAFTSQEYHEALEKSILFFEGQRSGKLPSNQQQTWRGDSGLSDGSSYHVDLVGGYYDAGDNVKFGLPMAFTTTLLAWSVIEFGSSMQDQLENARAAIRWSTDYLLKAATTTPDTLYVQVGEPNMDHRCWERAEDMDTPRNVYKVSATNPGSDVAAETATALAASSIVFRDSDPSYSSKLLQAAIKVFNFADRYRGSYSDSLNSVVCPFYCSYSGYHDELLWGASWIYKASGINTYIQYIQSNGHILGADDDGYTFSWDDKRPGTKILLSKEFLEENSEEFQLYKAHADNYICSLMSGTPGFQAQYTRGGLLYKGSESNLQYVTSTSFLLLTYAKYLNTNGGNVVRCGTSAVTGENLVTLAKAQVDYILGNNPTKMSYMVGFGERYPKHIHHRGSSLPSIHAHTQHISCNDGFQFFHSSSPNPNILVGAIVGGPDNNDNFSDDRHNYQQSEPATYINAPFVGALAYFSANPPTTY

SEQ ID NO: 22069 - protein, 504 aa, Glycine max
MPKGMASVTTFSLMLQFLFFILFSSFGQLSLAFTSQEYHEALEKSILFFEGQRSGKLPSNQQQTWRGDSGLSDGSSYHVDLVGGYYDAGDNVKFGLPMAFTTTLLAWSVIEFGSSMQDQLENARAAIRWSTDYLLKAATTTPDTLYVQVGEPNMDHRCWERAEDMDTPRNVYKVSATNPGSDVAAETATALAASSIVFRDSDPSYSSKLLQAAIKVFNFADRYRGSYSDSLNSVVCPFYCSYSGYHDELLWGASWIYKASGINTYIQYIQSNGHILGADDDGYTFSWDDKRPGTKILLSKEFLEENSEEFQLYKAHADNYICSLMSGTPGFQAQYTRGGLLYKGSESNLQYVTSTSFLLLTYAKYLNTNGGNVVRCGTSAVTGENLVTLAKAQVDYILGNNPTKMSYMVGFGERYPKHIHHRGSSLPSIHAHTQHISCNDGFQFFHSSSPNPNILVGAIVGGPDNNDNFSDDRHNYQQSEPATYINAPFVGALAYFSANPPTTY

SEQ ID NO: 22070 - protein, 500 aa, Glycine max
MASVTTFSLMLQFLFFILFSSFGQLSLAFTSQEYHEALEKSILFFEGQRSGKLPSNQQQTWRGDSGLSDGSSYHVDLVGGYYDAGDNVKFGLPMAFTTTLLAWSVIEFGSSMQDQLENARAAIRWSTDYLLKAATTTPDTLYVQVGEPNMDHRCWERAEDMDTPRNVYKVSATNPGSDVAAETATALAASSIVFRDSDPSYSSKLLQAAIKVFNFADRYRGSYSDSLNSVVCPFYCSYSGYHDELLWGASWIYKASGINTYIQYIQSNGHILGADDDGYTFSWDDKRPGTKILLSKEFLEENSEEFQLYKAHADNYICSLMSGTPGFQAQYTRGGLLYKGSESNLQYVTSTSFLLLTYAKYLNTNGGNVVRCGTSAVTGENLVTLAKAQVDYILGNNPTKMSYMVGFGERYPKHIHHRGSSLPSIHAHTQHISCNDGFQFFHSSSPNPNILVGAIVGGPDNNDNFSDDRHNYQQSEPATYINAPFVGALAYFSANPPTTY

SEQ ID NO: 22071 - DNA, 1407 bp, Glycine max
tttgcagtgaggcaatgcaccaccttggtataccaacaactcgtgcactttctcttgttaccaccggcaacctcgtcacccgtgacatgttttatgacggcaatccaaaggaagaacctggcgcaattgtttgcagagttgcccaatcttttctgcggtttgggtcataccaaatacatgcctccagaagtgatgaggacctaggccttgttcgtgttttggcagactatgctatcaggcaccactttcctcatattcaaaatatgagcaagagtgatagcttatctttctgcactggtgatgaagatcattctgttgtagatctcacttcaaataagtatgcagcatgggtggtggagattgctgagcgtactgcttccctgattgctagatggcagggggttggtttcactcatggcgtgctgaacacggataacatgagcattttgggtcttacaatagattatggcccatttggatttttggatgcttttgatcctaaatttaccccaaatactacagatcttccaggtcgaagatactgttttgcaaaccagcctgacattggtttgtggaatattgcacagttcacaacaacactacaagctgctcatttaataaatgaaaaagaggccaactatgctatggaaagatatggaacgagatttatggatgattatcaggttacaatgaccaaaaagcttggcctccctaagtataataagcagatgattaataaacttcttagcaatatggctgttgacaaagttgattacacaaacttctttcgtacgctttcaaatgttaaagcagacataaacattccagatgatgagctgttagtcccactaaagtctgtactgttagatattggtaaagagcgtaaggaagcatggaccagttggttgaaagcttatatacatgaggtctctaccagtgggatacctgatgacgaaaggaagatctcgatggattcagtgaatcctaaatatatactgaggaactatctctgccagactgcaattgatgctgcagaaataggtgattttggagaggttcgcagcctgctcaaattagtggagcatccgtatgatgagcaaccaggaatggaaaaatatgctcgcttgcccccagcttgggcatatcgaccaggtgtatgcatgctttcttgttcttcatgaggctcccatttaggtctaaaggattacaaaaatgaaaacataaaaactaggaattaattaagagcaaaaaaatagtagtgtgtttctttgtttattatttttccatatgtttccaatatactgtccccgagtattatttaacacgtacaatgtaacatttggtcgaagggtttgtttgcgggttgattgttattgtagtgtgaaaatttgtttgtgatgggtcagt

SEQ ID NO: 22072 - protein, 392 aa, Glycine max
CSEAMHHLGIPTTRALSLVTTGNLVTRDMFYDGNPKEEPGAIVCRVAQSFLRFGSYQIHASRSDEDLGLVRVLADYAIRHHFPHIQNMSKSDSLSFCTGDEDHSVVDLTSNKYAAWVVEIAERTASLIARWQGVGFTHGVLNTDNMSILGLTIDYGPFGFLDAFDPKFTPNTTDLPGRRYCFANQPDIGLWNIAQFTTTLQAAHLINEKEANYAMERYGTRFMDDYQVTMTKKLGLPKYNKQMINKLLSNMAVDKVDYTNFFRTLSNVKADINIPDDELLVPLKSVLLDIGKERKEAWTSWLKAYIHEVSTSGIPDDERKISMDSVNPKYILRNYLCQTAIDAAEIGDFGEVRSLLKLVEHPYDEQPGMEKYARLPPAWAYRPGVCMLSCSS

SEQ ID NO: 22073 - protein, 388 aa, Glycine max
MHHLGIPTTRALSLVTTGNLVTRDMFYDGNPKEEPGAIVCRVAQSFLRFGSYQIHASRSDEDLGLVRVLADYAIRHHFPHIQNMSKSDSLSFCTGDEDHSVVDLTSNKYAAWVVEIAERTASLIARWQGVGFTHGVLNTDNMSILGLTIDYGPFGFLDAFDPKFTPNTTDLPGRRYCFANQPDIGLWNIAQFTTTLQAAHLINEKEANYAMERYGTRFMDDYQVTMTKKLGLPKYNKQMINKLLSNMAVDKVDYTNFFRTLSNVKADINIPDDELLVPLKSVLLDIGKERKEAWTSWLKAYIHEVSTSGIPDDERKISMDSVNPKYILRNYLCQTAIDAAEIGDFGEVRSLLKLVEHPYDEQPGMEKYARLPPAWAYRPGVCMLSCSS

SEQ ID NO: 22074 - protein, 364 aa, Glycine max
MFYDGNPKEEPGAIVCRVAQSFLRFGSYQIHASRSDEDLGLVRVLADYAIRHHFPHIQNMSKSDSLSFCTGDEDHSVVDLTSNKYAAWVVEIAERTASLIARWQGVGFTHGVLNTDNMSILGLTIDYGPFGFLDAFDPKFTPNTTDLPGRRYCFANQPDIGLWNIAQFTTTLQAAHLINEKEANYAMERYGTRFMDDYQVTMTKKLGLPKYNKQMINKLLSNMAVDKVDYTNFFRTLSNVKADINIPDDELLVPLKSVLLDIGKERKEAWTSWLKAYIHEVSTSGIPDDERKISMDSVNPKYILRNYLCQTAIDAAEIGDFGEVRSLLKLVEHPYDEQPGMEKYARLPPAWAYRPGVCMLSCSS

SEQ ID NO: 22075 - DNA, 1486 bp, Glycine max
aaagtaacaggggcatgggtgatactccaaagcgttcaaacctttcacgaagaatagcatccttagtcaggttccgtgagaaacgcaaggaaagatgttttgacaagaaaattaggtattccgtcagaaaagaggtggcacagaggatgcatcggaagaatgggcagtttgcttccttgaaggaaagcccaggttcatctaattgggattctgcacagagttctggtcaagatggcacttctcattctgaatctgtacgtagatgtcaccattgtggtgtcagtgaaaataatactcctgcaatgcgtcgggggccagctggaccaaggactttatgtaatgcatgcggccttatgtgggctaacaagggcacacttagagatctcagtaagggcggaaggaatctttctgttgagcaaagtgatctggacactcctattgatgtcaagcctacttctgttcttgaaggggaattgccaggcatccatgatgagcaagatagttctgaagatccttccaagtccaatgcagcggatggttctagtaatcatgctgtaaaccccagtgatgaggaattgcctgaaactgcagaacactttacgaacgttctgccactgggaattgggcattcttcaacaaatgagaatgaacaggaacctctggtcgagctttctaatccttcagatacagatattgatattccaggaaactttgattagaaggttctaagtgattcattaagttgaggagttttatataatggtcccctctgtagtatattgttggtgtactaatcagatgcagatctagaagcagtgaaagtgatacgtaccagagacaattaggaaatttggggttatgaataattgtagccctcagaaatggaaatgattaccgattagcaagtgtcaatcaagaagctctgctgttccggtctaacaattatgtagtagtctgcgatattgatgctggtataagtgccaagacattgtttgtgtatatgttatccgatgatcttccttctgtgtttatataaaaaaattcattagttagggcctgtgttgtaaaaatgcggtctgcttgtccctgactataataatttcattgagatcaaagttctgctaccctcattttagagatgaaatttcggtgatatgctatgctatgccactcaaggatgggttgctggtttgaatatcaacgcaacggtgtgctaatcacgacctttgatggagtttaggcttgtgctgctgtgctcctggtgagaacatttggatatgttaattaatacagatagactagatccaaatgtacatacataaataaatattggttgtcgtcttctctatgttctttcacacttatgttatcattgctgttgtggtgcccgaaaataattgccattcttgtcatcatcatatcccaatagcctgatattatattaagcatagttataatcaaataaaattattggaatttttacgct

SEQ ID NO: 22076 - protein, 238 aa, Glycine max
SNRGMGDTPKRSNLSRRIASLVRFREKRKERCFDKKIRYSVRKEVAQRMHRKNGQFASLKESPGSSNWDSAQSSGQDGTSHSESVRRCHHCGVSENNTPAMRRGPAGPRTLCNACGLMWANKGTLRDLSKGGRNLSVEQSDLDTPIDVKPTSVLEGELPGIHDEQDSSEDPSKSNAADGSSNHAVNPSDEELPETAEHFTNVLPLGIGHSSTNENEQEPLVELSNPSDTDIDIPGNFD

SEQ ID NO: 22077 - protein, 234 aa, Glycine max
MGDTPKRSNLSRRIASLVRFREKRKERCFDKKIRYSVRKEVAQRMHRKNGQFASLKESPGSSNWDSAQSSGQDGTSHSESVRRCHHCGVSENNTPAMRRGPAGPRTLCNACGLMWANKGTLRDLSKGGRNLSVEQSDLDTPIDVKPTSVLEGELPGIHDEQDSSEDPSKSNAADGSSNHAVNPSDEELPETAEHFTNVLPLGIGHSSTNENEQEPLVELSNPSDTDIDIPGNFD

SEQ ID NO: 22078 - protein, 190 aa, Glycine max
MHRKNGQFASLKESPGSSNWDSAQSSGQDGTSHSESVRRCHHCGVSENNTPAMRRGPAGPRTLCNACGLMWANKGTLRDLSKGGRNLSVEQSDLDTPIDVKPTSVLEGELPGIHDEQDSSEDPSKSNAADGSSNHAVNPSDEELPETAEHFTNVLPLGIGHSSTNENEQEPLVELSNPSDTDIDIPGNFD

SEQ ID NO: 22079 - DNA, 1289 bp, Glycine max
attcatttgtttcttatttctttttttttttcctttgcagaagttggggcatctaacagttttgaagtttgaccggtgcaaatttttaacacagatacctgatgtatctgatctcccaaatttgagggaactttcatttgaagattgtgagagtttagttgcagttgatgactcaattggttttctgaaaaaacttaaaaaattgagtgcttatggttgcaggaagcttacaagttttccgcctctcaacttgacctctcttgaaacacttcaactatctgcgtgttccagtcttgagtattttccagaaatattaggagagatggaaaacataagggaacttcgtttgactggcctttacataaaagaattgccattttcatttcaaaatcttactggactccgtctgttagccttgagtgggtgtggaattgttcagttaccatgtagcttagccatgatgcccgaactgtcttcattctacactgattattgcaacaggtggcaatggatagaattggaagaaggtgaagaaaaattgggctcaataatatcttcaaaggcacaattgttttgtgccacgaattgcaatctatgtgatgattttttcttagcaggtttcaagaggtttgctcatgtaggatatttaaatctatcggggaataatttcacaatccttcctgaattcttcaaagaactgcaatttttaagaactcttgacgtgagtgattgcgagcatcttcaggaaattagagggcttccaccaatcttagagtattttgatgcaagaaactgtgtatcctttacttcctcgagtacaagcatgcttttaaatcaagtattgtcttattttatttaatgtatatgatttgatgatgtatgctgcacttaatgctgttaaacttatgaattatgactaataggaactgcatgaggctggaggaacccagtttgtgtttccaggaacaagaataccagagtggttcgatcaacaaagcagtggaccttcaagttctttctggtttcgtaataaattccctgccaaacttgtttttcttcttattgcacctgtgtcgggtgccagctatcctttccttgagcccaagttgttcatcaatggcaaagttctgccattcaaaaatgaggtgatagatatgttgaaattggatcatacatatatctttgatctccaagagttacctttcaaaaatgataatctctttgaagaagtggcttgggaaaaggaatggaaccatgtggaggttagatatcaaagtgtgttagagtat

SEQ ID NO: 22080 - protein, 285 aa, Glycine max
FICFLFLFFFPLQKLGHLTVLKFDRCKFLTQIPDVSDLPNLRELSFEDCESLVAVDDSIGFLKKLKKLSAYGCRKLTSFPPLNLTSLETLQLSACSSLEYFPEILGEMENIRELRLTGLYIKELPFSFQNLTGLRLLALSGCGIVQLPCSLAMMPELSSFYTDYCNRWQWIELEEGEEKLGSIISSKAQLFCATNCNLCDDFFLAGFKRFAHVGYLNLSGNNFTILPEFFKELQFLRTLDVSDCEHLQEIRGLPPILEYFDARNCVSFTSSSTSMLLNQVLSYFI

SEQ ID NO: 22081 - protein, 178 aa, Glycine max
MENIRELRLTGLYIKELPFSFQNLTGLRLLALSGCGIVQLPCSLAMMPELSSFYTDYCNRWQWIELEEGEEKLGSIISSKAQLFCATNCNLCDDFFLAGFKRFAHVGYLNLSGNNFTILPEFFKELQFLRTLDVSDCEHLQEIRGLPPILEYFDARNCVSFTSSSTSMLLNQVLSYFI

SEQ ID NO: 22082 - DNA, 1145 bp, Glycine max
attttggtaccaccacaactctctatcactcacaacattttcacacaaacactttctgaaaaaagaattcgtttcttttccctaacatggccagatcacaacagcgataccgaggtgtccgacaaaggcattggggctcttgggtctccgaaattcgacaccccatattgtaagtgccccttttgttttcactccaatgcacatttcacttatctatggactaaaaaatagaccaaatgttggtctagcaaaagaaattagtccatggcaaaccaatttatcaacctccgttaaataaaaaatgttcacatttagtgtgtgacagcatgtcaaaccaatgtttgaatctccgttaaaaaggtgtttacatatagtatctgacagtgtctcgaaacattattgattcaaactttcttctaatttgcaggaaaactaggatatggctaggaacttttgaaactgctgaggatgcagctagagcctatgatgaagcagcaaggctaatgtgtggcacaagagcaagaactaacttcccttacaaccccaatgcgtctcagtcatcatcttccaagcttctctcagcaactttaactgcaaaactgcataggtgctacatggcttctttgcaaatgacaaggccatcatcacaggcagagcctcagagagtggcttcaccaaatgtcatcacctcctccgcgagcaacttctccatgaagagtaacgaaactgagacattgttgttgccacaaaagagacaagaagaggagcaagaagcagaagggaattgggttttcaagaaggttaaggtggaaaatgctcagcagttcaagcctcttgaagaggaccacatcgagcaaatgatagaggagttgctgcattacgggtctattgagctatgctctgtgattccaccacaggctctttgaactcacattgagcaagcatttttattgttagttcacattcttactctgctaatttaatcaactaattctcttggacaatttcagtctctattattattaagtgctttaggtgctagactagactagactagaatagtactatcttctaagtgactcattggacaatgttgtatgtacagccagccaatcatgttgaaattgtgcatttgttctgttcac

SEQ ID NO: 22083 - protein, 140 aa, Glycine max
MCGTRARTNFPYNPNASQSSSSKLLSATLTAKLHRCYMASLQMTRPSSQAEPQRVASPNVITSSASNFSMKSNETETLLLPQKRQEEEQEAEGNWVFKKVKVENAQQFKPLEEDHIEQMIEELLHYGSIELCSVIPPQAL

SEQ ID NO: 22084 - protein, 103 aa, Glycine max
MASLQMTRPSSQAEPQRVASPNVITSSASNFSMKSNETETLLLPQKRQEEEQEAEGNWVFKKVKVENAQQFKPLEEDHIEQMIEELLHYGSIELCSVIPPQAL

SEQ ID NO: 22085 - protein, 98 aa, Glycine max
MTRPSSQAEPQRVASPNVITSSASNFSMKSNETETLLLPQKRQEEEQEAEGNWVFKKVKVENAQQFKPLEEDHIEQMIEELLHYGSIELCSVIPPQAL

SEQ ID NO: 22086 - DNA, 1393 bp, Glycine max
tcatttataattcaaaaacctctctctctctctctctctctctctcaattcttcaggcaccttcaaaatttctctctagagtcacgatgcttgcgacgctcaaatccgaagagtccagtggtcagttacagctcgtcgaacgagaagacatagacgacgatgaagatctcttcgaagccatcgacaaactgattgctcaaggcatcaatgccggagatgtgaagaagcttcaggacgcagggatatatacttgcaatggcttgatgatgcacacgaagaagaatttgactggaatcaaaggtctatccgaggctaaggttgataagatctgcgaggctgctgagaagcttgtgaatttcggttatattaccggaagtgatgctctgctcaaaagaaagtcagtgatccgaattactactggaagtcaagcgcttgatgaattgctaggaggcggggtcgagacatcggcaattacagaggcgtttggagaattccgatctgggaaaacacagctagctcacactctctgtgtttccactcagctgccaactaatatgcgtggaggcaacggaaaagttgcttacattgacacagaaggaactttccgaccagaccgaattgttcccatagctgagagatttggcatggatcctggggctgtactggacaatattatatatgctcgtgcctacacttatgagcatcagtacaacctcctccttggtttggctgcaaaaatgtccgaagaaccattcagacttctgattgtggattcggtgattgctctgtttcgagtggacttctcaggaagaggagagcttgcagatcgccagcaaaaattggcacagatgctttctcgattaataaagatagctgaggaatttaatgttgccgtctatatgacaaatcaggtcatatctgatccaggaggtggcgtgtttgtaactgatccaaagaaaccagcaggagggcatgtgctagcccatgcagccacggtaaggttgatgttcagaaaagggaaaggggaacagcgcatttgcaaagtgtttgacgcccccaacctgccagaggctgaagcagtgttccagataacagcagggggaattgcagacgctaaggactaaagagtcgcttctgagttgtgacttctgggccgaatccacaaaagaaacagtagtggctgaatatttctggtaaccttaatcttccagatatttgctacagtttgtatgaaaagtgttgttccttgaacacttttactattttccagtgatatgatatgagttccccttagttatacttatacacgtttcctttattgtaagttgcgatacattttgcaatttgaacgtttcacaaacattgaaaatcttgctgcaagtttctactttct

SEQ ID NO: 22087 - protein, 373 aa, Glycine max
IYNSKTSLSLSLSLSILQAPSKFLSRVTMLATLKSEESSGQLQLVEREDIDDDEDLFEAIDKLIAQGINAGDVKKLQDAGIYTCNGLMMHTKKNLTGIKGLSEAKVDKICEAAEKLVNFGYITGSDALLKRKSVIRITTGSQALDELLGGGVETSAITEAFGEFRSGKTQLAHTLCVSTQLPTNMRGGNGKVAYIDTEGTFRPDRIVPIAERFGMDPGAVLDNIIYARAYTYEHQYNLLLGLAAKMSEEPFRLLIVDSVIALFRVDFSGRGELADRQQKLAQMLSRLIKIAEEFNVAVYMTNQVISDPGGGVFVTDPKKPAGGHVLAHAATVRLMFRKGKGEQRICKVFDAPNLPEAEAVFQITAGGIADAKD

SEQ ID NO: 22088 - protein, 345 aa, Glycine max
MLATLKSEESSGQLQLVEREDIDDDEDLFEAIDKLIAQGINAGDVKKLQDAGIYTCNGLMMHTKKNLTGIKGLSEAKVDKICEAAEKLVNFGYITGSDALLKRKSVIRITTGSQALDELLGGGVETSAITEAFGEFRSGKTQLAHTLCVSTQLPTNMRGGNGKVAYIDTEGTFRPDRIVPIAERFGMDPGAVLDNIIYARAYTYEHQYNLLLGLAAKMSEEPFRLLIVDSVIALFRVDFSGRGELADRQQKLAQMLSRLIKIAEEFNVAVYMTNQVISDPGGGVFVTDPKKPAGGHVLAHAATVRLMFRKGKGEQRICKVFDAPNLPEAEAVFQITAGGIADAKD

SEQ ID NO: 22089 - protein, 286 aa, Glycine max
MMHTKKNLTGIKGLSEAKVDKICEAAEKLVNFGYITGSDALLKRKSVIRITTGSQALDELLGGGVETSAITEAFGEFRSGKTQLAHTLCVSTQLPTNMRGGNGKVAYIDTEGTFRPDRIVPIAERFGMDPGAVLDNIIYARAYTYEHQYNLLLGLAAKMSEEPFRLLIVDSVIALFRVDFSGRGELADRQQKLAQMLSRLIKIAEEFNVAVYMTNQVISDPGGGVFVTDPKKPAGGHVLAHAATVRLMFRKGKGEQRICKVFDAPNLPEAEAVFQITAGGIADAKD

SEQ ID NO: 22090 - DNA, 1612 bp, Glycine max
aacctttctgttcgagtgcacaaagaatatgataaattcattgaagaactgaccagttactttccccatgaaaaggagggtattcttaaattctacggtgaatgctggaagattttcaatgctctgaattcattggaattgaagtcactagaagagccactctacctttttggacagttttttcggaggccgcttgaatgcttgaccctagcctattatttgcctcagaatgctggagccatagctcggaagtacattcgagatccacagttgttgtctttcatagatgcagagtgttttatagtgagcacagtcaatgctttgcagacaccaatgatcaatgctgccatggttctatgtgacagacactttggtgggattaactaccctcttgggggtgttggtgggatagcaaagtccttagcaaaaggtctcgttgatcagggtagcgagatagtttacaaagcaaatgtcaccagtattataattgagcagggcaaagctgtaggtgtgaggctttcaaatggcagagagttctttgccaaaactataatatcaaatgctaccagatggtatacatttggaaagttactgaagggcgttccacttccgaaagaagaagagaacttccagaaagtttatgttaaagctccatcttttctttcaattcacatgggggttaaagctgaggttttgccgccagatacagactgtcaccattttgtgcttgagagcaactggtccaaattggaggagccatatggaagtatctttctaagtataccaactgttcttgattcatcattggctcctgaaggccgtcatatccttcatatattcacaacttcttccatggaggactggtagggtctctcaagagtagaatatgaggcaaagaagcagcttgtagcagatgaaatcacaagcagattagagaataaattgtttcctggtcttagatcatccattgattttatggaggtagggacacctaagacacaccggcgatacctggctcgtgatgagggaacttatggtccaatgccacgcagaatcccaaaggggttattgggaatgccattcaataccacaggcatagatggtctttactgtgttggcgatagctgcttccctggacaaggtgttattgctgtagctttctcaggagttatgtgtgctcatcgagtagctgcagatattgggctggagaagaagtcacctgtgttggattccatgctgcttcggttgcttggttggttaaggacaatggcatgagatatataggagcatttgttggatgcagtatcatcatcccttttgcataagaagctcaactttcattacagcattggttcactgcagatttcttccacaattttcaagagtcaccaaattgtcacagtatatagatgctgttagttgcaatttgatccatgcagtggcagagcttggaaaaaataattgaaggggccaaagtttgaagtgtataaatttaatgcaataattttgataatatcatgtcttataggtgttttctttccccttgctgaaggatatcatgtcttacaggtgatttaagtaattgatggtaatatttaaatattaaatattc

SEQ ID NO: 22091 - protein, 288 aa, Glycine max
NLSVRVHKEYDKFIEELTSYFPHEKEGILKFYGECWKIFNALNSLELKSLEEPLYLFGQFFRRPLECLTLAYYLPQNAGAIARKYIRDPQLLSFIDAECFIVSTVNALQTPMINAAMVLCDRHFGGINYPLGGVGGIAKSLAKGLVDQGSEIVYKANVTSIIIEQGKAVGVRLSNGREFFAKTIISNATRWYTFGKLLKGVPLPKEEENFQKVYVKAPSFLSIHMGVKAEVLPPDTDCHHFVLESNWSKLEEPYGSIFLSIPTVLDSSLAPEGRHILHIFTTSSMEDW

SEQ ID NO: 22092 - protein, 177 aa, Glycine max
MINAAMVLCDRHFGGINYPLGGVGGIAKSLAKGLVDQGSEIVYKANVTSIIIEQGKAVGVRLSNGREFFAKTIISNATRWYTFGKLLKGVPLPKEEENFQKVYVKAPSFLSIHMGVKAEVLPPDTDCHHFVLESNWSKLEEPYGSIFLSIPTVLDSSLAPEGRHILHIFTTSSMEDW

SEQ ID NO: 22093 - protein, 172 aa, Glycine max
MVLCDRHFGGINYPLGGVGGIAKSLAKGLVDQGSEIVYKANVTSIIIEQGKAVGVRLSNGREFFAKTIISNATRWYTFGKLLKGVPLPKEEENFQKVYVKAPSFLSIHMGVKAEVLPPDTDCHHFVLESNWSKLEEPYGSIFLSIPTVLDSSLAPEGRHILHIFTTSSMEDW

SEQ ID NO: 22094 - DNA, 1470 bp, Glycine max
aaacggatgccattgctgcaccccgtgaaagctctatccctctctttctttgttttccgtggaaaccaacctatcttcctttgttattttcattctgataaaacaaacatattttcttccacctttttccatctttgcaaaggggataaagggttgctagttgctaccatttatggttttattccgccatttggaggaaccttatgctcttaaaacaaataaaacccaaagggttctcttgaaaaacaccagaactttcatctaatcaaaacacgtgttggccaaaaacatcaccttctctttattatcgcatgcaagagcttttttagatgctcctttgtgttcaagattgagagaaaacataacctgggtatgatatgactacgagcatgccccgttaatgtttcaacggtttttgtttctttggttcattttcagacacccccatattcttcttctcaattgaaaaccttggtttttgaatctcccctgttttcctttgtgtgcttcaagttctttttgtctttttctagaaacctatgtcgtctgtgccggcacgaacagggcgacaaagacagcgttatgaggacaatttgcgccttgtctctggatgtattccctatagatggacaaaggacaacacagatcaaatgggggaaacccgggagataatagaagtacttatggtttcttcaccaaaacgtgatgaccttgtattcccaaagggtggatgggaggatgatgagactgttacagaagctgcttgccgcgaggctttagaggaagcaggagttaaaggaatactaagagaaattccactaggaatatgggagttcagaagcaaaaccagtcaagacttatgtagcgtggaaggaggctgcagaggatacatgtttgccttggaggtgactgaagaacttgagacatggccagagcagaaaaaccacgctcgccaatggttaaacataaaagatgcattcaaactcagccgatatgactggatgtgtaatgcacttgaggcatttttgagagtaatggcagaagacagaaagcctgagaaccaagaccagaatgtggaacttgaacccccttcaattgtagaagatatgccagaatgccaaagtatgtcacctaactgctataagagatcctctactatgcagcaccatggtatgcctcctaaagccaatcttctgtcacgtgctactcgagaaatagccatccactttggttattgacattatcaggaggacacttttgaaatatgcttatgtaatggatcaacattgtgcaataactccttaaaattgtgaaagaaaaaactatgaagttattatggcttggatgcacaatccatcaacttcattgttgtaggctctttctttctttctttccaatgtgaccatgatgtaaaatgtggtggtgaaagtctcaagtgtatatgatcttaacagttgtttgcttcacccc

SEQ ID NO: 22095 - protein, 232 aa, Glycine max
MSSVPARTGRQRQRYEDNLRLVSGCIPYRWTKDNTDQMGETREIIEVLMVSSPKRDDLVFPKGGWEDDETVTEAACREALEEAGVKGILREIPLGIWEFRSKTSQDLCSVEGGCRGYMFALEVTEELETWPEQKNHARQWLNIKDAFKLSRYDWMCNALEAFLRVMAEDRKPENQDQNVELEPPSIVEDMPECQSMSPNCYKRSSTMQHHGMPPKANLLSRATREIAIHFGY

SEQ ID NO: 22096 - protein, 195 aa, Glycine max
MGETREIIEVLMVSSPKRDDLVFPKGGWEDDETVTEAACREALEEAGVKGILREIPLGIWEFRSKTSQDLCSVEGGCRGYMFALEVTEELETWPEQKNHARQWLNIKDAFKLSRYDWMCNALEAFLRVMAEDRKPENQDQNVELEPPSIVEDMPECQSMSPNCYKRSSTMQHHGMPPKANLLSRATREIAIHFGY

SEQ ID NO: 22097 - protein, 184 aa, Glycine max
MVSSPKRDDLVFPKGGWEDDETVTEAACREALEEAGVKGILREIPLGIWEFRSKTSQDLCSVEGGCRGYMFALEVTEELETWPEQKNHARQWLNIKDAFKLSRYDWMCNALEAFLRVMAEDRKPENQDQNVELEPPSIVEDMPECQSMSPNCYKRSSTMQHHGMPPKANLLSRATREIAIHFGY

SEQ ID NO: 22098 - DNA, 1607 bp, Glycine max
agcattgagaaaatcttcggggacttcgaaagggagcaacaattactggggttaaggcctgccactcctccggagagacctaaaacaccaccttatgtccctccaagagctccttctcctagacctccctctccgagggctccttctccaaggcctccgtctccaagggctgcttctccgagggtggcttctccacgagttacctctcccaaagccgcgtcttcccggattgctcatcaccacaaggaggttggctacagaccagagccaactttgaggcaacagcatgccacagctactaagatccagtctgtttacagaggctatatggccaggaggagttttagagctctaaagggtctggtgaggcttcaaggagtggtaagaggacagaatgtgaagaggcagacagtaaatgccatgaaacacatgcagctgttagtgcgagttcaatctcagattcagtctcgaaggatccagatgttggaaaaccaggcacgatatcaagccgatttcaagaatgataaggatgcagccagtatcttgggcaaactcacttctgaagcaggcaatgaagagtgggatgatagcttactgaccaaagaggaagtagaggcaagattgcagaggaaggtggaagcaatcatcaaaagagaaagagcaatggcatttgcatattcacatcagctatggaaagccactccgaaatcaactcacaccccgatgacagatacacgatccagtggattcccttggtggtggaactggttggaaagacaaacacctgcagcaactccacaagaaagacaaagcttgaagaattttcaaatcacacctccaagaccatactcagagcaaaagactagtccaagacctggctccagcactcaaaggcagccgcagtcgcagcagcagcagcctcatgtttcctttgataatatggacactcccacaccaaagtccacaaaatcaaccatagtggcatcttcaaaaccggtgcgaatgcctccatttagaactcctcaggctaacagctcaggctcaggctctaaatatccgagaccaagggatgtagggtccaattcaccctttgatttgccattgaaggatgatgacagcctcacaagctgcccaccattttcagtgccaaactacatggctccaaccctttcagcccgggccaaagcacgtgctagtagtaatcctagagaaaggcttggtggaactccaactagtactgattcaaagaggaggctctcattccctttatcacaaggaattggatcattcaagtggtctaaagggttctcaagcaaggatcaaagggtgccagacaaatttcagtcacttgaatctataggaaatgtgagtgtggattcaacggtgtctttgcctgcaagggtggtgggaagaaagccttttacaagatttgtgtgatttattctgttctattcttttcttcctttttttttaaccattttattttgtccatgttggtggtgctatcagttacattatgattatgatttgagtgtattggtgatagtttgataacaggtatacccgttgtaaactaataaaaacataatagaaaatgatggtttggt

SEQ ID NO: 22099 - protein, 478 aa, Glycine max
SIEKIFGDFEREQQLLGLRPATPPERPKTPPYVPPRAPSPRPPSPRAPSPRPPSPRAASPRVASPRVTSPKAASSRIAHHHKEVGYRPEPTLRQQHATATKIQSVYRGYMARRSFRALKGLVRLQGVVRGQNVKRQTVNAMKHMQLLVRVQSQIQSRRIQMLENQARYQADFKNDKDAASILGKLTSEAGNEEWDDSLLTKEEVEARLQRKVEAIIKRERAMAFAYSHQLWKATPKSTHTPMTDTRSSGFPWWWNWLERQTPAATPQERQSLKNFQITPPRPYSEQKTSPRPGSSTQRQPQSQQQQPHVSFDNMDTPTPKSTKSTIVASSKPVRMPPFRTPQANSSGSGSKYPRPRDVGSNSPFDLPLKDDDSLTSCPPFSVPNYMAPTLSARAKARASSNPRERLGGTPTSTDSKRRLSFPLSQGIGSFKWSKGFSSKDQRVPDKFQSLESIGNVSVDSTVSLPARVVGRKPFTRFV

SEQ ID NO: 22100 - protein, 369 aa, Glycine max
MARRSFRALKGLVRLQGVVRGQNVKRQTVNAMKHMQLLVRVQSQIQSRRIQMLENQARYQADFKNDKDAASILGKLTSEAGNEEWDDSLLTKEEVEARLQRKVEAIIKRERAMAFAYSHQLWKATPKSTHTPMTDTRSSGFPWWWNWLERQTPAATPQERQSLKNFQITPPRPYSEQKTSPRPGSSTQRQPQSQQQQPHVSFDNMDTPTPKSTKSTIVASSKPVRMPPFRTPQANSSGSGSKYPRPRDVGSNSPFDLPLKDDDSLTSCPPFSVPNYMAPTLSARAKARASSNPRERLGGTPTSTDSKRRLSFPLSQGIGSFKWSKGFSSKDQRVPDKFQSLESIGNVSVDSTVSLPARVVGRKPFTRFV

SEQ ID NO: 22101 - protein, 338 aa, Glycine max
MKHMQLLVRVQSQIQSRRIQMLENQARYQADFKNDKDAASILGKLTSEAGNEEWDDSLLTKEEVEARLQRKVEAIIKRERAMAFAYSHQLWKATPKSTHTPMTDTRSSGFPWWWNWLERQTPAATPQERQSLKNFQITPPRPYSEQKTSPRPGSSTQRQPQSQQQQPHVSFDNMDTPTPKSTKSTIVASSKPVRMPPFRTPQANSSGSGSKYPRPRDVGSNSPFDLPLKDDDSLTSCPPFSVPNYMAPTLSARAKARASSNPRERLGGTPTSTDSKRRLSFPLSQGIGSFKWSKGFSSKDQRVPDKFQSLESIGNVSVDSTVSLPARVVGRKPFTRFV

SEQ ID NO: 22102 - DNA, 1199 bp, Glycine max
agaagtcactagcagcacacaaaaaaaaacacattccctcaaattcctctcttgtccacaaacatgaagctatctgcgaaacccatttcgagtccaggtcgcacagacaagttccctcccccactcatgaggtttctcagaagcaatgcgggcagcagaagcagaaggtccaggtcaagccctatgttcgtacgaaagaaaaacaccaccttcgaaacccacacccaggaaccctcttcccccaaggtcacgtgcatgggccaggtccgagtcaaacgcgcttccaaacaacccaccacccaacccgacttagctcccactcggtgccgccgccgccgccgccgctgctgctgcttctggatccgaaggcccaacaacccctgccgctgcaatcccctctggcccaactggcccttcttccgtcgaaagcccaccaagctcaaacaagactcccagtccgagcccaatttctacgcccacgaagaatcggaattaccgttccaagagagagtcaatgtggataaggatagtgattttgcttccaattccagcactcccccgagaaacgctctgcttttaactcgctgtagatccgctccgtacagatcctcctctttggctagtaggttctggagttcccccgtcaaggaccaagaaacggaactacaacacacttccgagggaccccaaacggaacccgaattagggtttctaacagaaaaaattgcttcactcaccgaaccagaaaggttgaggaagttgaaacagaaacagagtctgtgttacgtcctactgtactcactaggtgcaaatcggaaccggcgagaaccggacacagacttgaccctctggtaaataatttgttgaaaaaaagaaggttggaatttgattaattaatcccattatttttaattcgtacctatctccatattttgcttccttcctactactcttcatttaaatatagtcttttttatatgtaattgaattgaatgtgtttgagtctttgacacctagtcgttggtaacataaaaaggtatgagcgtgtagaaaatagaaagtagaaagagaggggaacgtatagaagtgatttcaggtacttattttctgtcctcgtagttaatgcatttcttgtcattacactacacaagcctgaagcctgaatttcttttttctctgccaacgatgttaagaacctg

SEQ ID NO: 22103 - protein, 263 aa, Glycine max
MKLSAKPISSPGRTDKFPPPLMRFLRSNAGSRSRRSRSSPMFVRKKNTTFETHTQEPSSPKVTCMGQVRVKRASKQPTTQPDLAPTRCRRRRRRCCCFWIRRPNNPCRCNPLWPNWPFFRRKPTKLKQDSQSEPNFYAHEESELPFQERVNVDKDSDFASNSSTPPRNALLLTRCRSAPYRSSSLASRFWSSPVKDQETELQHTSEGPQTEPELGFLTEKIASLTEPERLRKLKQKQSLCYVLLYSLGANRNRREPDTDLTLW

SEQ ID NO: 22104 - protein, 242 aa, Glycine max
MRFLRSNAGSRSRRSRSSPMFVRKKNTTFETHTQEPSSPKVTCMGQVRVKRASKQPTTQPDLAPTRCRRRRRRCCCFWIRRPNNPCRCNPLWPNWPFFRRKPTKLKQDSQSEPNFYAHEESELPFQERVNVDKDSDFASNSSTPPRNALLLTRCRSAPYRSSSLASRFWSSPVKDQETELQHTSEGPQTEPELGFLTEKIASLTEPERLRKLKQKQSLCYVLLYSLGANRNRREPDTDLTLW

SEQ ID NO: 22105 - protein, 223 aa, Glycine max
MFVRKKNTTFETHTQEPSSPKVTCMGQVRVKRASKQPTTQPDLAPTRCRRRRRRCCCFWIRRPNNPCRCNPLWPNWPFFRRKPTKLKQDSQSEPNFYAHEESELPFQERVNVDKDSDFASNSSTPPRNALLLTRCRSAPYRSSSLASRFWSSPVKDQETELQHTSEGPQTEPELGFLTEKIASLTEPERLRKLKQKQSLCYVLLYSLGANRNRREPDTDLTLW

SEQ ID NO: 22106 - DNA, 1495 bp, Glycine max
atcttcaacttgttcaactctctcaaaaccaaataaaatctttcacaactcaaaactcaagctccaaattttcactttacacctttgaattcattttttcacacatggacgagatcgacgtgcctccgttcttcgtgtgccctatttcattagagctcatgaaggaccccgtgacggtctccaccggcatcacctacgaccgcgacagcatcgagaagtggctcttcgccgaggtgaagaacgacacgtgtcccgtcacgaagcagcccctcctcccggacctcactccgaaccacacgctccgcagactcatccaagcctggtgcaccgtcaacgcctcccacggcgtccagagaatccccacaccaaaaccaccggtcgacaaaaccctcatcgagaaactcctccgcaacacctcggcttcggactccccgagcctccagctccggtccctccgaaccctcaagtccattgcctcggaatcccaatcaaacaaacgctgcatcgaatctgcagaaggcgcagttaatttcctagcaacaattataaccaccaccaccaccaccaccaccaacctactcgatgatgacatcgagttggaaataaaaacaagtacagcccacgaagcattgagccttttacacagcattcagctgtcagagtccggtttgaaggctctgttgaaccatccagaatttataaactctctaaccaagatgatgcaaagagggatctacgagtcacgcgcctacgctgttttcttgctgaattccttgtccgaggtggcggatccggcgcagttgattaacctaaaaactgatttgttcactgaattggttcaggttcttaaggatcaggtttcggagaaggtctcgaaggcgaccctgcaggcattgattcaggtgtgttcgtggggcagaaatagggtgaaggctgtggaggctggagctgtgccggttctggtggagcttcttctcgaatgcaacgagagaaaaccgatagaaatggtgctggttttgttggagattttatgtcagagtgctgacgggagggcggggctgttggcccacgcggcgggggtggtgatcgtggcgaagaagattctgagggtttcaacgatggcgaacgatagggcggcgaagattctgctttcggtgtgcagattttcccccacgccgggcttggtgcaggagatggtgcagcttggggtggtggcaaagctttgtctggtgctgcaggtggatagtgggaacaaagcaaaagagatagctagggagattctcaaattgcatgctagggcttggaggaattcgccttgcatctcacaatttgcttgcttcgtttccaatgagttcgtgaaagaaagaaaatccactttgtttttgttttgttcgtgacaccattggatgtaatcgattatttaagaaactaattccttctgtgagatctagtttgcggtgaaagaaaaccgaaagtaaatcacagttgagttttc

SEQ ID NO: 22107 - protein, 464 aa, Glycine max
LQLVQLSQNQIKSFTTQNSSSKFSLYTFEFIFSHMDEIDVPPFFVCPISLELMKDPVTVSTGITYDRDSIEKWLFAEVKNDTCPVTKQPLLPDLTPNHTLRRLIQAWCTVNASHGVQRIPTPKPPVDKTLIEKLLRNTSASDSPSLQLRSLRTLKSIASESQSNKRCIESAEGAVNFLATIITTTTTTTTNLLDDDIELEIKTSTAHEALSLLHSIQLSESGLKALLNHPEFINSLTKMMQRGIYESRAYAVFLLNSLSEVADPAQLINLKTDLFTELVQVLKDQVSEKVSKATLQALIQVCSWGRNRVKAVEAGAVPVLVELLLECNERKPIEMVLVLLEILCQSADGRAGLLAHAAGVVIVAKKILRVSTMANDRAAKILLSVCRFSPTPGLVQEMVQLGVVAKLCLVLQVDSGNKAKEIAREILKLHARAWRNSPCISQFACFVSNEFVKERKSTLFLFCS

SEQ ID NO: 22108 - protein, 430 aa, Glycine max
MDEIDVPPFFVCPISLELMKDPVTVSTGITYDRDSIEKWLFAEVKNDTCPVTKQPLLPDLTPNHTLRRLIQAWCTVNASHGVQRIPTPKPPVDKTLIEKLLRNTSASDSPSLQLRSLRTLKSIASESQSNKRCIESAEGAVNFLATIITTTTTTTTNLLDDDIELEIKTSTAHEALSLLHSIQLSESGLKALLNHPEFINSLTKMMQRGIYESRAYAVFLLNSLSEVADPAQLINLKTDLFTELVQVLKDQVSEKVSKATLQALIQVCSWGRNRVKAVEAGAVPVLVELLLECNERKPIEMVLVLLEILCQSADGRAGLLAHAAGVVIVAKKILRVSTMANDRAAKILLSVCRFSPTPGLVQEMVQLGVVAKLCLVLQVDSGNKAKEIAREILKLHARAWRNSPCISQFACFVSNEFVKERKSTLFLFCS

SEQ ID NO: 22109 - protein, 412 aa, Glycine max
MKDPVTVSTGITYDRDSIEKWLFAEVKNDTCPVTKQPLLPDLTPNHTLRRLIQAWCTVNASHGVQRIPTPKPPVDKTLIEKLLRNTSASDSPSLQLRSLRTLKSIASESQSNKRCIESAEGAVNFLATIITTTTTTTTNLLDDDIELEIKTSTAHEALSLLHSIQLSESGLKALLNHPEFINSLTKMMQRGIYESRAYAVFLLNSLSEVADPAQLINLKTDLFTELVQVLKDQVSEKVSKATLQALIQVCSWGRNRVKAVEAGAVPVLVELLLECNERKPIEMVLVLLEILCQSADGRAGLLAHAAGVVIVAKKILRVSTMANDRAAKILLSVCRFSPTPGLVQEMVQLGVVAKLCLVLQVDSGNKAKEIAREILKLHARAWRNSPCISQFACFVSNEFVKERKSTLFLFCS

SEQ ID NO: 22110 - DNA, 1645 bp, Glycine max
ttttgtaaattcacctaaagcaactgcagcaatagaggctcttgatgaagctatggtaacaattcaaatgtgttctacattggaggaactcttactgaaaaagaaatactttagctatggtgattctccacaacttcatgctgaaaaggttgacaaattgaaagttttatcagagtctcttgcaaattctagcacaaaagctgagactcgcattacagaaaacaggtgccagaaacagttattatgagtttattataaataaataaaaaagaaaaataaaagcttctttcttttatgtgttgtgcttgtgcagcacctgtgcctttgttaagtatcatgcaaagatctcaaaaagaagaagcacttcattttcgggtaactaaatccaacgaggttagccaagttgaaaaggaattagctgtggagattggagaacttgagaagcaaaaagatgagcttgaagatagactgaaaaaggtcaacaacttgttgacatctgcacgagtacgcctccacaatgcaaaagaagaaagagagcaatttgatgaagcaagcaatgaaattattgcacttttaaaaacaaaggaagatgagatggtgcgggccattacttcttatacggtagaagccaatgttgttgatacatggatcaaatttctagagagcacatgggtttttcaagcttcacatacaaagagaaaagaggagcaggtcaaagctgaactagagagctatggagatcattttgtgaatttggtggttcatcttctgtattcttacaaggaaaatttgggtttatctcttactcaaataagaatacttgtggagaatttaagatccagtcaagggttagcaatatcatcagcaacagacaatgaaggtttgaaattagtgaatccaagaaaaaatcttgaagaagaatatttggatatcgaatccaggtttttagccactctgaatatagtggacaccatgaagaagcaatttcacattcaacaggaaggcattttcagaaaagacattgacatagtcacagaactgtttgatgccatcgagaaaataaaaggcgaatttgaatctattgagaggccaaaactggaacttgagagtccaactgtaaggtcagaaacaccatcaagtcaagtaaccttcataactccttcgcatccctcaatggctaataagcacaagcaagatggagtgattaactctccctcagtgactggaagatcacaaatagaaatagaacttgataaattaagcgaagatgactcagcagaagagatatgtgagtgggagtttgatgcttttgacaaagatcatcactccaggagttgaataacaagaatatagaccaaaaccactgatgtattgtaaaaagaatgaaattaaaaggcatcacattgcagtttctttggaaggttgtgattttggcttactccattactcagataactaagttgttcaatcaatggatgtacatgaaacaactttggtccactgataattgtatttgtaccatattcatccttgacgaaatgtagatagatatattcgaccatgtactttcctagataagccttgtttgtgtaacatttttgtgactaagaaaatttgtttttatgacataattgacttgagtgac

SEQ ID NO: 22111 - protein, 347 aa, Glycine max
MCCACAAPVPLLSIMQRSQKEEALHFRVTKSNEVSQVEKELAVEIGELEKQKDELEDRLKKVNNLLTSARVRLHNAKEEREQFDEASNEIIALLKTKEDEMVRAITSYTVEANVVDTWIKFLESTWVFQASHTKRKEEQVKAELESYGDHFVNLVVHLLYSYKENLGLSLTQIRILVENLRSSQGLAISSATDNEGLKLVNPRKNLEEEYLDIESRFLATLNIVDTMKKQFHIQQEGIFRKDIDIVTELFDAIEKIKGEFESIERPKLELESPTVRSETPSSQVTFITPSHPSMANKHKQDGVINSPSVTGRSQIEIELDKLSEDDSAEEICEWEFDAFDKDHHSRS

SEQ ID NO: 22112 - protein, 333 aa, Glycine max
MQRSQKEEALHFRVTKSNEVSQVEKELAVEIGELEKQKDELEDRLKKVNNLLTSARVRLHNAKEEREQFDEASNEIIALLKTKEDEMVRAITSYTVEANVVDTWIKFLESTWVFQASHTKRKEEQVKAELESYGDHFVNLVVHLLYSYKENLGLSLTQIRILVENLRSSQGLAISSATDNEGLKLVNPRKNLEEEYLDIESRFLATLNIVDTMKKQFHIQQEGIFRKDIDIVTELFDAIEKIKGEFESIERPKLELESPTVRSETPSSQVTFITPSHPSMANKHKQDGVINSPSVTGRSQIEIELDKLSEDDSAEEICEWEFDAFDKDHHSRS

SEQ ID NO: 22113 - protein, 247 aa, Glycine max
MVRAITSYTVEANVVDTWIKFLESTWVFQASHTKRKEEQVKAELESYGDHFVNLVVHLLYSYKENLGLSLTQIRILVENLRSSQGLAISSATDNEGLKLVNPRKNLEEEYLDIESRFLATLNIVDTMKKQFHIQQEGIFRKDIDIVTELFDAIEKIKGEFESIERPKLELESPTVRSETPSSQVTFITPSHPSMANKHKQDGVINSPSVTGRSQIEIELDKLSEDDSAEEICEWEFDAFDKDHHSRS

SEQ ID NO: 22114 - DNA, 1217 bp, Glycine max
attctgagaacattaccaacgacaagatccttattaccgagagcatcttcttccatcaccaaattcatggattcttcctccaacgccagcagcattggaggatctcagaggctctttgcgttagcacagcaccttcgccagtacaaggcaccgtctttccccgaagatattgtggaacaaagcattgaagagattggtggcaaggttgtttctcaggtgggatttcaagaatcagccatcccaattggccaaaaccctgagaaattcagacccaaaaaagctgctgttttgatctgcctattcgaaggggatgatggggatctaagggtcattctcaccaagcgctcttccaagctttctactcactcgggtgaagtggcattgcctggtgggaaaactgaggagggggataaggatgatggggatactgcaaaaagagaggcaaaggaagaaattgggttggacccggaacttgtcaatgttgttactgtacttgaaccattcttgtctaagcacctcctaagggtagttccagtcattggcatacttcatgacaagaaagcattcaaacctgttctgaatccagctgaagtggaagcagtatttgatgcacctttggaaatgtttctcaaggatgaaaatcggagacaggatgagagggagtggatgggagagaagtatttgttgcatttctttgactatgatatcgggcataaaaaatacatcatatggggtttaactgctgggatcttgattagggctgcatcagttgtgtaccaacggcagccagcttttgtggagcagaaccctaaattcaagcttccacaggatgtatccaaggacactacaataccttgagttcattgtttattgtattttgtccttgatacttatccttaatcgtgcaaaaaaactcgtagcagccagagttctagaattcatagcaagtgtttatatttactgagaaaggaagagggtactatcccatcacttggaattcatattcctacctattgaatgccatcccaaagtttagagagttgcagacattgaatcactcaaaatagaagtatttgctgacaagcaagtagtaacttgaataccgctgagtgttagaagggctactggaataaagtagttcattttgttacttttagttgaacagaattgtcttcctgcaattcttgttatcttatgatgccgttggcaaagtttac

SEQ ID NO: 22115 - protein, 285 aa, Glycine max
ILRTLPTTRSLLPRASSSITKFMDSSSNASSIGGSQRLFALAQHLRQYKAPSFPEDIVEQSIEEIGGKVVSQVGFQESAIPIGQNPEKFRPKKAAVLICLFEGDDGDLRVILTKRSSKLSTHSGEVALPGGKTEEGDKDDGDTAKREAKEEIGLDPELVNVVTVLEPFLSKHLLRVVPVIGILHDKKAFKPVLNPAEVEAVFDAPLEMFLKDENRRQDEREWMGEKYLLHFFDYDIGHKKYIIWGLTAGILIRAASVVYQRQPAFVEQNPKFKLPQDVSKDTTIP

SEQ ID NO: 22116 - protein, 263 aa, Glycine max
MDSSSNASSIGGSQRLFALAQHLRQYKAPSFPEDIVEQSIEEIGGKVVSQVGFQESAIPIGQNPEKFRPKKAAVLICLFEGDDGDLRVILTKRSSKLSTHSGEVALPGGKTEEGDKDDGDTAKREAKEEIGLDPELVNVVTVLEPFLSKHLLRVVPVIGILHDKKAFKPVLNPAEVEAVFDAPLEMFLKDENRRQDEREWMGEKYLLHFFDYDIGHKKYIIWGLTAGILIRAASVVYQRQPAFVEQNPKFKLPQDVSKDTTIP

SEQ ID NO: 22117 - DNA, 1341 bp, Glycine max
gcttcgttgcttggttggttcaattgtatcagtatatactcagaagccatgatattagttgatggcattccattttctacccattcatctcaccctcagggaaaggatattctacttgatttgttggaaaatcccattctggtatcagcctcaaactctttgaaggctaactcagagaggaagttctcagtatctgatgagtctagtccagagagatcaaaatgggtttatatattccagagagaatatgctaccgttgaccccgcccttgttgattttgttggcaccgatgaagcaacaacgtgtgttggccttgttattcggaaccaaaagaatggaatgacgtcagttgcccatatggattcaccaaaaattgtagaaatgggcctctcccaaatgttatcatcactcgtcgacaacagtttggagactgagtttgatgtgcatcttattggggggtttgaagatgtctcactgcaagtctggccagggtcttctgctttgttagagaattttcaatatatagtttccactcagtgaaagagtaattgtagctggatctattgaacttttttgcagcatgcaaatggtagcacagtatcagaaagccctgcagatttggatggttattcctttcctctgtgtttaaagattgttcacactttatggtcaagagaggagaagtttcacatccgaactatctgtgttcttggacataataccagaagggattctgatggaaacacatacccctttttcaatggatttgtggcggagactacaacaggaatcatcatcccagctatctttgatagaacttctagatgtccagatgaaattgtcagaagaatacgagtatccgtgtcttatgaagatgccaactggaacggaaagttactagaaacatatgattctggcattgactgtttcaaaatcgctccttgtcgctggactcttcgccaaaatcatattgcttcatcacttctgaactattctgattccgaaattctttcaatatgttctacatcacctactgctgaagcctcagattttgtggagaatttaaaaaggcagtggaattatttgatcgagcatccacactggacagaaacctttcccaagaaacagcctcgcacttttgcaaggagttcttctgatggaaggtggataaggtgttgatgacattccaaggttgcgtaggctaatccttgtcaataattagattgccttattaaaatggtcatctctcattaaacgtttcatttctcattcctgttaagttatcaaattgcagccatctttagttttgaactaatatgatatttaattatcattgtgctg

SEQ ID NO: 22118 - protein, 179 aa, Glycine max
ASLLGWFNCISIYSEAMILVDGIPFSTHSSHPQGKDILLDLLENPILVSASNSLKANSERKFSVSDESSPERSKWVYIFQREYATVDPALVDFVGTDEATTCVGLVIRNQKNGMTSVAHMDSPKIVEMGLSQMLSSLVDNSLETEFDVHLIGGFEDVSLQVWPGSSALLENFQYIVSTQ

SEQ ID NO: 22119 - protein, 163 aa, Glycine max
MILVDGIPFSTHSSHPQGKDILLDLLENPILVSASNSLKANSERKFSVSDESSPERSKWVYIFQREYATVDPALVDFVGTDEATTCVGLVIRNQKNGMTSVAHMDSPKIVEMGLSQMLSSLVDNSLETEFDVHLIGGFEDVSLQVWPGSSALLENFQYIVSTQ

SEQ ID NO: 22120 - DNA, 1322 bp, Glycine max
aaaaaagaaaagggaatgttttcttttgcacactgtgatctgcaattggtggccatttcgaaaaattgccaattttctgaaacgtgacgtcttctttgcagttttgcatttaccttacagccactcagaagcgcagagaagataggaacccacccttgaagatggctctgcctccacaaaacccacctgttcagcgacacagagtcataatacccaacaagcacggtgaaaagcttgtgggcacattgcatgaatctggaaccagggacattgtaatcttgtgccatggttttcgatgcacaaaggataccaatctcatattgaaccttgctgttgcattggaaaatgcaaaaattagttctttccgttttgacttttctggaaatggggaaagtgaaggtttgtttcagtttggtaactattggaccgaggttgatgatttacatgctgtagctcaacatttccatgaatctaaccgtgtaatcagtgcaattgttggtcatagtaaaggaggtggcgtagtgcttctatatgcttcaaaatatagtgacattaaaacagttgtcaacctctctgggcgttatgatatgaaggcaggcattgaagaacaccttggaaaagattatttggaaagaatcaggagggatggtttcattgatgtgaagaagaggaggtcaggaagttttgatttccgtgtaactgaagaaagtttgatggatcgcttgggtataaatatacatgaagcatgccttaagattgacaaagaatgcagggtctttacaattcatggttcttccgatgaaattattcctgttgaagatgcatttgagtttgccaagatcatacaaaaccataagttacatgtcattggaggagctaatcatatgttcagtaatcatcaaggagagttgtcctcagttagttgtgaactttatagaagaaaccttgcaccaggtcaagggtactgctagctaggtatctgttcttgcttgcatatgtgtcaaacacccgtgaactctttgttgtgtttttctaatgatatacttatggtatatctcgaagtttcaagccaattgaattttggaaccacaacaaaaatttaccctgaagggtccccaactgatcctgtcttgtgtatacaattacgataatgaaatttgaatttaagaccttgtgtaactactcaaacttactaggccaaccctaatagggttgatgttccatgccatttgagatcaccagctttgtgtttgtcaaagttgaaaatctggcttcattaggttgaatggaagaaaaataaatggtaaagaggactcatggac

SEQ ID NO: 22121 - protein, 269 aa, Glycine max
MALPPQNPPVQRHRVIIPNKHGEKLVGTLHESGTRDIVILCHGFRCTKDTNLILNLAVALENAKISSFRFDFSGNGESEGLFQFGNYWTEVDDLHAVAQHFHESNRVISAIVGHSKGGGVVLLYASKYSDIKTVVNLSGRYDMKAGIEEHLGKDYLERIRRDGFIDVKKRRSGSFDFRVTEESLMDRLGINIHEACLKIDKECRVFTIHGSSDEIIPVEDAFEFAKIIQNHKLHVIGGANHMFSNHQGELSSVSCELYRRNLAPGQGYC

SEQ ID NO: 22122 - DNA, 1551 bp, Glycine max
agttgatgtcgtagagattgctataaaacgccatgcatcagatcttaccacaaaatcgatggctttggttgcactattaaagctctcttcacgtttcccttcatgttcagagaggatcaaagaaattattgttcagttcaaagggagctttgtgctagaattgcagcagagagctattgaattcaattcgattattgcaaagcatcaaaatattaggtctacacttgtagaaaggatgccagttttggatgaggcaacttccattggtaggagggctgggtctctaccaggtgcagcttcaactccaactgcaccttcatttaatcttccaaatggaacagccaaacctgtggctcctcttgtagatctacttgatctaagttcagatgatgctcctgcacctagctcttctagtggaggagatattcttcaggaccttcttggtgttgatctttcaccagcatcacaacaatctgttgctggccaagcttcaaaaagtggcaacgatgttcttttggatcttttgtctattggatcaccttctgtcgaaagcagctcatctacagtagacatcttatcctccaattcgagtaacaaagcaccagtttcctcgttggatggtctctcatctctttcactttctacaaaaacaacttcaaatgctgctcctatgatggatttattggatggatttgcccccatcccgccaacagaaaacaatggaccggtttatccatctgtaactgcatttgagagcagctccttgaggttgacattcaatttctcaaaacaaccaggaaacccacaaacaacagttatccaggctacttttatgaatttgtcctccaatacatatacagattttgttttccaggcagcagttcctaagtttcttcagttgcacttagatccagctagcagcaatactcttcccgcaaatgggtccataacccaaagtttgaaaattactaatagccaacatgggaagaaatctcttgtcatgcgtataaggattgcatacaagataaatggcaaggatacactggaggaaggacaagttaataattttcctcgtggtttatgaagcccaatcaatgatcaggggtcagtaaggtgatgcacaaaacccttcgttttccccggcactctatagttattggtgcggttttcatgtttcattccttcaattgaggaaggtatggttcgagaatctggaccactttttggcttaaatttgaagtcgatttggtggcttcacatcgttgttttacctttttcttttacttaggtgatttatgtacattagtacaacatattcctgtatgaaaatgccatagtcaaattttgcctctcaaggcgctgagagttgtgtcatgttgagtacttgaggtgctttcttgctattttttcggaggtagttgctcggtcttgctgtctaaagttatagtgttgttgaatgcaatttggtatcttttagacgattggtatatttgatttttatgtaacttttccccctcaagattaatgaaaatgtaatctcaaaataatgtc

SEQ ID NO: 22123 - protein, 360 aa, Glycine max
VDVVEIAIKRHASDLTTKSMALVALLKLSSRFPSCSERIKEIIVQFKGSFVLELQQRAIEFNSIIAKHQNIRSTLVERMPVLDEATSIGRRAGSLPGAASTPTAPSFNLPNGTAKPVAPLVDLLDLSSDDAPAPSSSSGGDILQDLLGVDLSPASQQSVAGQASKSGNDVLLDLLSIGSPSVESSSSTVDILSSNSSNKAPVSSLDGLSSLSLSTKTTSNAAPMMDLLDGFAPIPPTENNGPVYPSVTAFESSSLRLTFNFSKQPGNPQTTVIQATFMNLSSNTYTDFVFQAAVPKFLQLHLDPASSNTLPANGSITQSLKITNSQHGKKSLVMRIRIAYKINGKDTLEEGQVNNFPRGL

SEQ ID NO: 22124 - protein, 341 aa, Glycine max
MALVALLKLSSRFPSCSERIKEIIVQFKGSFVLELQQRAIEFNSIIAKHQNIRSTLVERMPVLDEATSIGRRAGSLPGAASTPTAPSFNLPNGTAKPVAPLVDLLDLSSDDAPAPSSSSGGDILQDLLGVDLSPASQQSVAGQASKSGNDVLLDLLSIGSPSVESSSSTVDILSSNSSNKAPVSSLDGLSSLSLSTKTTSNAAPMMDLLDGFAPIPPTENNGPVYPSVTAFESSSLRLTFNFSKQPGNPQTTVIQATFMNLSSNTYTDFVFQAAVPKFLQLHLDPASSNTLPANGSITQSLKITNSQHGKKSLVMRIRIAYKINGKDTLEEGQVNNFPRGL

SEQ ID NO: 22125 - protein, 282 aa, Glycine max
MPVLDEATSIGRRAGSLPGAASTPTAPSFNLPNGTAKPVAPLVDLLDLSSDDAPAPSSSSGGDILQDLLGVDLSPASQQSVAGQASKSGNDVLLDLLSIGSPSVESSSSTVDILSSNSSNKAPVSSLDGLSSLSLSTKTTSNAAPMMDLLDGFAPIPPTENNGPVYPSVTAFESSSLRLTFNFSKQPGNPQTTVIQATFMNLSSNTYTDFVFQAAVPKFLQLHLDPASSNTLPANGSITQSLKITNSQHGKKSLVMRIRIAYKINGKDTLEEGQVNNFPRGL

SEQ ID NO: 22126 - DNA, 1310 bp, Glycine max
agggccacccccatttctgaccaagacttacgatgcagtggaggatcccaccactagccacatggtttcatggaacagaggaggtgccagctttgttgtttgggatccacacgctttctccagagaccttcttcctagatacttcaagcacaacaatttctcaagctttgttagacaactaaacacttacggttttagaaaaattgatccagataggtgggagtttgcaaatgaaggattccttagagggcacaggcacctgttggcaaacataaggagaaggaaacaaccttcttctcagccttcttcttcttcttcttcatcctcttattattattattcttcttcttctcaacaagcacaacaaggtcactgtgttgaagttggtcgctttggacttgatgaagagattgatcgtttgaggcgtgacaagcacgtgttgatgatggagcttgtgaagctgagacagcagcaacagaacacaaggtcataccttcaagcaatggaggagaggctaagagggacggaaattaagcagcaacaaatgatggctttcttggctagagctttgaaaaatccaacctttattcagcagctacttcagcagaaggagaagaggaaggagcttgaagaggccatgtccaagaagaggagaaggccaattgagagagggccaaaccatggggttgttggagaagaatcaagcagtgttaaggttgagtctcttgtgtttggtgatgaatatggttttggagtgtcagagttggaagtgttagctatggagatgcaaggttatggtaagggaaggagggaacaagaggaggagcctgatgaggcactagatcaatcacaagagaggctggagaaagagcttgatgaagggttctgggaagaacttttcagtgagggttttgagggtgaattggatactaatccaactaattcccaagaccaagatgaagaagaagaagatcatgtcaatgtgttggccaatcgctttggttacttgggttcaagtcctaaatgaaaccaaccacatatagtactcaagattattattggttaacattgttcattaatttggttcaagtggaggcactcatgtggtgaatggaggaggaggcatcccatttggcatgatacatgtggaaatgatttactttttggtgtttctaacccccccattatatgatgatgcatgtccttttgtagaacctaaaaaatttctcacttttctctgtttgattaggtaggttgcagctgttgcttggacaagaatctatggtagtgatagcaatcgttatttactc

SEQ ID NO: 22127 - protein, 341 aa, Glycine max
GPPPFLTKTYDAVEDPTTSHMVSWNRGGASFVVWDPHAFSRDLLPRYFKHNNFSSFVRQLNTYGFRKIDPDRWEFANEGFLRGHRHLLANIRRRKQPSSQPSSSSSSSSYYYYSSSSQQAQQGHCVEVGRFGLDEEIDRLRRDKHVLMMELVKLRQQQQNTRSYLQAMEERLRGTEIKQQQMMAFLARALKNPTFIQQLLQQKEKRKELEEAMSKKRRRPIERGPNHGVVGEESSSVKVESLVFGDEYGFGVSELEVLAMEMQGYGKGRREQEEEPDEALDQSQERLEKELDEGFWEELFSEGFEGELDTNPTNSQDQDEEEEDHVNVLANRFGYLGSSPK

SEQ ID NO: 22128 - protein, 321 aa, Glycine max
MVSWNRGGASFVVWDPHAFSRDLLPRYFKHNNFSSFVRQLNTYGFRKIDPDRWEFANEGFLRGHRHLLANIRRRKQPSSQPSSSSSSSSYYYYSSSSQQAQQGHCVEVGRFGLDEEIDRLRRDKHVLMMELVKLRQQQQNTRSYLQAMEERLRGTEIKQQQMMAFLARALKNPTFIQQLLQQKEKRKELEEAMSKKRRRPIERGPNHGVVGEESSSVKVESLVFGDEYGFGVSELEVLAMEMQGYGKGRREQEEEPDEALDQSQERLEKELDEGFWEELFSEGFEGELDTNPTNSQDQDEEEEDHVNVLANRFGYLGSSPK

SEQ ID NO: 22129 - protein, 194 aa, Glycine max
MMELVKLRQQQQNTRSYLQAMEERLRGTEIKQQQMMAFLARALKNPTFIQQLLQQKEKRKELEEAMSKKRRRPIERGPNHGVVGEESSSVKVESLVFGDEYGFGVSELEVLAMEMQGYGKGRREQEEEPDEALDQSQERLEKELDEGFWEELFSEGFEGELDTNPTNSQDQDEEEEDHVNVLANRFGYLGSSPK

SEQ ID NO: 22130 - DNA, 1502 bp, Glycine max
atccctctcggtgctgtgtttagcttccttcttcttcttcctctttcttcttcttctgctgcacccacaaatcaaaaccccccttttccaacccaatttttctccataaaccctagattcaacgaacccgccgaccaagctcgaacctcacgtcgcaaaaaaacacttcttttcccctctccgaggttgtcgtgtcggagcatagccatgttgttccctcgaggaaattgatgatttttcataacattggggtctcgttttgcttgtggggtcaccttgaaggagggaaaagtaacgagctttggggctgaatcgtggtgggtctgttgagtatgcatagatctggagctacgatggcgtggaacgtgttcaagttctgcactgctctgcgtggattgggctcgatcatgatcctgttggttcttggcgttgttggtgccacttactatgctgttgttttgaccaattatggccctgctttgtatgctggaggacttgattctcttgttgccttggcagtgttgatcttgtttcatagcttgttggttatgctgttgtggagttacttttctgttgtttttaccgatccggggagtgtccctccaaactggaagcctacaattgatgaggaaaggggagaggctgatccgttggttgggacagagtttagtaatctgccgtctgatcccaatccacgggttcggtactgtcggaagtgcaatcagctcaagccgcctcgatgccatcattgttcagtttgtgggcgctgtgttttgaagatggaccaccattgtgtgtgggtagtcaactgtgtcggggctctaaattacaaatatttccttcttttcttgttctacacttttcttgagacgactctagtgactgcatccttgctgcctcatttcatagcattctttagtgatggagaaattcctggaacacctggctctcttgctacaacttttcttgctttcgttttaaacctggcctttgcactgagcgtcttaggatttctcatcatgcacatatctttggtggctgctaatacgaccactattgaggcatatgagaagaaaactactccaaaatggcgttatgaccttggtcgtcgaaaaaattttgagcaggtttttgggatggacaagaagtactggttcatccctgcttattcagacgaagatatacgaaagatgccagctctacaaggtcttgactatccttcaaaacctgacttcgattcccaatagttctaaaagctaatatatatccacatcatgtaacaaaagtcatggagactctccacaaccctctacttcactctctaacacaatgtagcgtggagcaatggggggcagggtggtgtgatgctggtttgaggggctaatgtgtttatgttcccataatgataggaactgttttttgtcaagcaatgcaattttctcacctttccttttattcaaattgagtgaaatagcaatttttagtgctggaatttattctct

SEQ ID NO: 22131 - protein, 304 aa, Glycine max
MHRSGATMAWNVFKFCTALRGLGSIMILLVLGVVGATYYAVVLTNYGPALYAGGLDSLVALAVLILFHSLLVMLLWSYFSVVFTDPGSVPPNWKPTIDEERGEADPLVGTEFSNLPSDPNPRVRYCRKCNQLKPPRCHHCSVCGRCVLKMDHHCVWVVNCVGALNYKYFLLFLFYTFLETTLVTASLLPHFIAFFSDGEIPGTPGSLATTFLAFVLNLAFALSVLGFLIMHISLVAANTTTIEAYEKKTTPKWRYDLGRRKNFEQVFGMDKKYWFIPAYSDEDIRKMPALQGLDYPSKPDFDSQ

SEQ ID NO: 22132 - protein, 297 aa, Glycine max
MAWNVFKFCTALRGLGSIMILLVLGVVGATYYAVVLTNYGPALYAGGLDSLVALAVLILFHSLLVMLLWSYFSVVFTDPGSVPPNWKPTIDEERGEADPLVGTEFSNLPSDPNPRVRYCRKCNQLKPPRCHHCSVCGRCVLKMDHHCVWVVNCVGALNYKYFLLFLFYTFLETTLVTASLLPHFIAFFSDGEIPGTPGSLATTFLAFVLNLAFALSVLGFLIMHISLVAANTTTIEAYEKKTTPKWRYDLGRRKNFEQVFGMDKKYWFIPAYSDEDIRKMPALQGLDYPSKPDFDSQ

SEQ ID NO: 22133 - protein, 279 aa, Glycine max
MILLVLGVVGATYYAVVLTNYGPALYAGGLDSLVALAVLILFHSLLVMLLWSYFSVVFTDPGSVPPNWKPTIDEERGEADPLVGTEFSNLPSDPNPRVRYCRKCNQLKPPRCHHCSVCGRCVLKMDHHCVWVVNCVGALNYKYFLLFLFYTFLETTLVTASLLPHFIAFFSDGEIPGTPGSLATTFLAFVLNLAFALSVLGFLIMHISLVAANTTTIEAYEKKTTPKWRYDLGRRKNFEQVFGMDKKYWFIPAYSDEDIRKMPALQGLDYPSKPDFDSQ

SEQ ID NO: 22134 - DNA, 2005 bp, Glycine max
tctctctctctcacacacacacacacactctccccgaggtttgagagggtactggcatccaaaaaatgggttctaaaactaatgcttcgggccatagagcacgaaggccgctgtcaatatttgctgtgcttggtctttgctgtttcttttatcttttgggagcatggcaaagaagtggatctgggaagggagataaccttgcattgaaagttaataacctgatgactgactgcactgttttacccaatttgagttttgaatctcatcacaatgatgtagaaattgtcgaacctgctgagccaaaagctaaagagttcaagccgtgtgatgtgaaatatactgattatacaccttgccaagagcaagaccgagcaatgacatttcccagagagaatatgatctatagagaaaggcattgtcccgctgaaaaggagaaattgcgctgcctcattccagcccccgaagggtacacaactccttttccgtggcctaaaagccgtgattatgcctactatgctaatgttccttacaagagcctgacagtggagaaggctgttcaaaactgggtgcaattccagggaaatgtgtttaaatttccaggtggagggaccatgttccctcacggagcagatgcatatattgatgaacttgcgtcagttattccaattgctgatggttctgttagaacagcactggacactggttgtggggttgcaagctggggagcctacttgctaaagagaaatgtgctggctatgtccttcgctccaaaggacaaccatgaagcacaagttcagtttgctctagaacgaggggtgcctgctgttattggtgtccttggcaccatccaccttccatacccatcaagagccttcgatatggcccagtgttctcgatgtctaataccatggacctcaaatgagggcatgtatctaatggaagttgaccgagtcttaaggcctggtggatactggattttgtctggccccccaattaattggaaaacatactaccaaacatggaagcgatccaaggaagatctgaaggcagaacaaacaaaacttgaggagttagctgaaagtctttgttgggaaaagaagtatgaaaagggtgatattgctatttggagaaagaaaataaatgctaaatcctgcaaaagaaagtctcccaatgtttgtggtttagataatgctgatgatgtgtggtaccaaaaaatggaggtctgtaaaacccctttacctgaggtaaccagcaaaaatgaagttgccggaggagagttacagaagtttcctgctagactttttgcagtccctcctcgaatagcccagggagctattccaggggttacagctgaatcttatcaagaggacaacaaattatggaaaaagcatgttaacgcttacaaaagaatgaataaattgattggcactactagatatcggaatgtgatggacatgaatgcaggccttggaggatttgcagctgcacttgaatcacaaaagtcttgggtgatgaatgttgtgccgtcaattgctgagaacactttgggtgttgtctatgagagaggtctgatcggcatttatcatgactggtgtgaaggcttttccacatacccaaggacatatgatcttattcatgctaatggtttattcagcatataccaggacaagtgcaacctagaagacatccttctagagatggatcgcatcctaaggcctgaaggagcaatcatcatccgggatgaagttgatgttcttaaccaggttaagaaaattgttgggggcatgagatgggatgccaaactggtggatcatgaggatggccctcttgtgcctgagaagatattggttgctctcaaagtgtattgggttggcaccagcaaaaacaaaacatccaatgaggaataaaaccactattgttcgggtgtgaatcttgtacttcagcctgcagtaacatccaaggtttctaaatccaacccaaagaaggaatggggaaaaatatgaat

SEQ ID NO: 22135 - protein, 613 aa, Glycine max
MGSKTNASGHRARRPLSIFAVLGLCCFFYLLGAWQRSGSGKGDNLALKVNNLMTDCTVLPNLSFESHHNDVEIVEPAEPKAKEFKPCDVKYTDYTPCQEQDRAMTFPRENMIYRERHCPAEKEKLRCLIPAPEGYTTPFPWPKSRDYAYYANVPYKSLTVEKAVQNWVQFQGNVFKFPGGGTMFPHGADAYIDELASVIPIADGSVRTALDTGCGVASWGAYLLKRNVLAMSFAPKDNHEAQVQFALERGVPAVIGVLGTIHLPYPSRAFDMAQCSRCLIPWTSNEGMYLMEVDRVLRPGGYWILSGPPINWKTYYQTWKRSKEDLKAEQTKLEELAESLCWEKKYEKGDIAIWRKKINAKSCKRKSPNVCGLDNADDVWYQKMEVCKTPLPEVTSKNEVAGGELQKFPARLFAVPPRIAQGAIPGVTAESYQEDNKLWKKHVNAYKRMNKLIGTTRYRNVMDMNAGLGGFAAALESQKSWVMNVVPSIAENTLGVVYERGLIGIYHDWCEGFSTYPRTYDLIHANGLFSIYQDKCNLEDILLEMDRILRPEGAIIIRDEVDVLNQVKKIVGGMRWDAKLVDHEDGPLVPEKILVALKVYWVGTSKNKTSNEE

SEQ ID NO: 22136 - protein, 561 aa, Glycine max
MTDCTVLPNLSFESHHNDVEIVEPAEPKAKEFKPCDVKYTDYTPCQEQDRAMTFPRENMIYRERHCPAEKEKLRCLIPAPEGYTTPFPWPKSRDYAYYANVPYKSLTVEKAVQNWVQFQGNVFKFPGGGTMFPHGADAYIDELASVIPIADGSVRTALDTGCGVASWGAYLLKRNVLAMSFAPKDNHEAQVQFALERGVPAVIGVLGTIHLPYPSRAFDMAQCSRCLIPWTSNEGMYLMEVDRVLRPGGYWILSGPPINWKTYYQTWKRSKEDLKAEQTKLEELAESLCWEKKYEKGDIAIWRKKINAKSCKRKSPNVCGLDNADDVWYQKMEVCKTPLPEVTSKNEVAGGELQKFPARLFAVPPRIAQGAIPGVTAESYQEDNKLWKKHVNAYKRMNKLIGTTRYRNVMDMNAGLGGFAAALESQKSWVMNVVPSIAENTLGVVYERGLIGIYHDWCEGFSTYPRTYDLIHANGLFSIYQDKCNLEDILLEMDRILRPEGAIIIRDEVDVLNQVKKIVGGMRWDAKLVDHEDGPLVPEKILVALKVYWVGTSKNKTSNEE

SEQ ID NO: 22137 - protein, 510 aa, Glycine max
MTFPRENMIYRERHCPAEKEKLRCLIPAPEGYTTPFPWPKSRDYAYYANVPYKSLTVEKAVQNWVQFQGNVFKFPGGGTMFPHGADAYIDELASVIPIADGSVRTALDTGCGVASWGAYLLKRNVLAMSFAPKDNHEAQVQFALERGVPAVIGVLGTIHLPYPSRAFDMAQCSRCLIPWTSNEGMYLMEVDRVLRPGGYWILSGPPINWKTYYQTWKRSKEDLKAEQTKLEELAESLCWEKKYEKGDIAIWRKKINAKSCKRKSPNVCGLDNADDVWYQKMEVCKTPLPEVTSKNEVAGGELQKFPARLFAVPPRIAQGAIPGVTAESYQEDNKLWKKHVNAYKRMNKLIGTTRYRNVMDMNAGLGGFAAALESQKSWVMNVVPSIAENTLGVVYERGLIGIYHDWCEGFSTYPRTYDLIHANGLFSIYQDKCNLEDILLEMDRILRPEGAIIIRDEVDVLNQVKKIVGGMRWDAKLVDHEDGPLVPEKILVALKVYWVGTSKNKTSNEE

SEQ ID NO: 22138 - DNA, 1378 bp, Glycine max
tattctcgttctccttctccatacaagcgatacagtaggtctgtgtccaggtctctctcaaggacaagctccagaagccgttcaaggagtttatcaagagatgcagaaaatccaggaaacaatttgtatgtgacaggattgtctcctaggatcaccaagagagaactggagaaacatttttctgctgagggaaaagtgatagatgtccatctggtagttgatccttggacaagggaatcccgtgggtttggctttgtgacaatggagactcttgaggaggcagatcgatgtgtaaagtatctgaatcgctcagtacttgaagggcgtgtcatcacggtggagaagtttctgtggcagcaggttagctgtgtgaagcagctcttcatcaaactctcaaatcacaactaaacaaacaaatcaaatacaccaccaagtatcagatcattggggctaaaagacgacgtggtcgaaccccaacaccagggaagtatctagggctgagaactattcgtgctcaacggcgttctccaagtgactctcctcgtcgctcccctagctattctccttatagaagaagctatagccggtctccctattcttcagaccgaagtaggagtcgttcttactctcctgactataggaggaggaagtcaaactatccatatcactctaggcgaaggtcatactctccatactacagccggtacaggtcttattctcgatatgatcgacacaggtcatattctcgctattgctctccttatagcaggtcacctgtcagcatccgcgacagatcatactctccttatgactcacgatatgactcaccggatgatcactcctacagaaggcaccattacagatctgtttcacgaggtgcctcgcctgatgatgattattatagaaggcaccattacaggtctgtttctcgaagtgcctcacccaggccaaggagaaggtcaaggaggagctactctcggagtgccactcctgtttcaaagaggagcaactcgcgaagtgtgtcccccaggtcaaggaagagtcattcaagaagctccaagaggagtggcaaatatgagaaacactactcaagaagcccgagtgtgagtgcaagttcaagatcagtatcgaggtcaaatactccaaggtctacctctccttcaacttgaaatttgttggtcctatatggcttgacatcataggattatagtggataatattttagtgtggtatatgcagttctagattgagttttggtttggatccgttcaaggcttgtctaaaaaccacctgatcctatttcatgtaggattcaaattatgtactgtcagtatagattatctaatttcgaactttcccttggtttagttccattttc

SEQ ID NO: 22139 - protein, 135 aa, Glycine max
YSRSPSPYKRYSRSVSRSLSRTSSRSRSRSLSRDAENPGNNLYVTGLSPRITKRELEKHFSAEGKVIDVHLVVDPWTRESRGFGFVTMETLEEADRCVKYLNRSVLEGRVITVEKFLWQQVSCVKQLFIKLSNHN

SEQ ID NO: 22140 - protein, 127 aa, Glycine max
MIDTGHILAIALLIAGHLSASATDHTLLMTHDMTHRMITPTEGTITDLFHEVPRLMMIIIEGTITGLFLEVPHPGQGEGQGGATLGVPLLFQRGATREVCPPGQGRVIQEAPRGVANMRNTTQEARV

SEQ ID NO: 22141 - protein, 99 aa, Glycine max
MTHDMTHRMITPTEGTITDLFHEVPRLMMIIIEGTITGLFLEVPHPGQGEGQGGATLGVPLLFQRGATREVCPPGQGRVIQEAPRGVANMRNTTQEARV

SEQ ID NO: 22142 - DNA, 1353 bp, Glycine max
aacataacccagtgagtctacccttatctctgaccatttctttctctgaagccaactccaaaactaacagacagaaagaaagagaaaaagaaacccaattcctgtttcaactgaaacacagcacacacaacaatcatcaatttctctacaaaaaataaccccacaaagaaaacaaactgaaacaacagcaaaaaagaaatcttcacctcagcttcctctgttccgtccttcctcgtcgccgcgccggagcatctcgccgccttcatccaccgcatcattcgcgagggaactcggaggtcatcgaattcgcgaagatgtcgcggttcccgttcttcaaccgttcgaacacgattcactcgacgaaatcggaatcctcgcagaaaccctacctcgtccaccaccatctccacaatcttgaccggtccggttcggtgaaccgcttctacggttcagtggactccatgaaatcctcaatccgcggaaaaatggtgaagaagctctgcaccttattcgaatcctccaaaaaacccttgccagaaccagaatccgaatctgaatcgttttcttcttcaaaatcacgttcaaaaacagattcagattcgtgcattactatattgtttcgattacccggcacagaggacagaatagttgtgtatttaacgagccttcgcgggattcggagaactttcgaggattgcaacgcggtccgcatgatcctgaaggggttcagggtttgggtggacgagagggatgtgtctatggacttgagctacagggaggagctgcagcatgtgctgggggagcaccatgtggcgctcccccaagtttttatacgagggaagtacattggtggtgctgatgtgatcaagcatttgtttgagagtggtgacttggcgaagatgattctggaagggctccccaagctgaaacccgggttcgtgtgtgacaattgtggggacgcgaggttcgtgccgtgcgagaattgcagtgggagcaggaaggtgtttgatgaggatgaaggggaattgaagaggtgcttggaatgcaatgagaatggactcctcaggtgtccgtattgctgttcttgattttgattaatgatgattttcatgggggttaattgggttgttgctcgttgaacatgtgttttgttttgttcaagactgggtgttttactttcttatcttggattgagatggaaaactggggtgagtgggggatgtgtatattatattctaatggagggtgtaaatatttagtggtgtacaagaatttgctaaatattggttgttgatggatgatagctttctaatgggaattatgggatgttttaatatatccctttattagtcc

SEQ ID NO: 22143 - protein, 257 aa, Glycine max
MSRFPFFNRSNTIHSTKSESSQKPYLVHHHLHNLDRSGSVNRFYGSVDSMKSSIRGKMVKKLCTLFESSKKPLPEPESESESFSSSKSRSKTDSDSCITILFRLPGTEDRIVVYLTSLRGIRRTFEDCNAVRMILKGFRVWVDERDVSMDLSYREELQHVLGEHHVALPQVFIRGKYIGGADVIKHLFESGDLAKMILEGLPKLKPGFVCDNCGDARFVPCENCSGSRKVFDEDEGELKRCLECNENGLLRCPYCCS

SEQ ID NO: 22144 - protein, 208 aa, Glycine max
MKSSIRGKMVKKLCTLFESSKKPLPEPESESESFSSSKSRSKTDSDSCITILFRLPGTEDRIVVYLTSLRGIRRTFEDCNAVRMILKGFRVWVDERDVSMDLSYREELQHVLGEHHVALPQVFIRGKYIGGADVIKHLFESGDLAKMILEGLPKLKPGFVCDNCGDARFVPCENCSGSRKVFDEDEGELKRCLECNENGLLRCPYCCS

SEQ ID NO: 22145 - protein, 200 aa, Glycine max
MVKKLCTLFESSKKPLPEPESESESFSSSKSRSKTDSDSCITILFRLPGTEDRIVVYLTSLRGIRRTFEDCNAVRMILKGFRVWVDERDVSMDLSYREELQHVLGEHHVALPQVFIRGKYIGGADVIKHLFESGDLAKMILEGLPKLKPGFVCDNCGDARFVPCENCSGSRKVFDEDEGELKRCLECNENGLLRCPYCCS

SEQ ID NO: 22146 - DNA, 1680 bp, Glycine max
aaaaattcagagagaactgtccaccctttttcgtttttctccttattacagaccccccttaattgatggtgctctgtatcccctttttcttctgcaagaactacaccaactaaaacctccttcttctttttttttttttttttttggaggctggtgtgtgtttttctttttcttcttcttcttcttccaatccttaaggaaaaaaactaaagaaaaaaaagtgagccatgtcaggcttgtataatcccaacttctctcctgctagagcagcttctcctcagattaggagcaatccagaagtggacagtcagtacctatcagagttgctggcagaacatcagaagcttggacccttcatgcaagtgcttcccatatgcagccgcctcctaaatcaagaaatattaagggtttctggaatgttgtccaatcaaggttttggtgacttcgatagactgcgacatagaagccctagtcctatggcttcttcaaaccttatgtccaatgtcagtgggactgggttgggtggatggaatagtctccagcaagagagattatgtggaccccctggaatgacgatggactggcaaagtgctcctgcaagtcctagttcgttcactgttaagagaatcttgcgcttggaaattccagtagatacatatcccaatttcaattttgttggaagacttctgggccctagaggcaattctttgaaacgggtagaagctacaactggttgtcgtgtgtatattagaggaaaaggatcgataaaggatccagacaaggaagagaaattacgaggaagaccaggttatgagcatctcaatgaaccactgcacattttgattgaggctgaattacctgctaatgttgttgacataaggctcaggcaggctcaggaaattattgaagaactgctcaagcctgtggatgaatcacaggactatatcaagaggcagcagttgcgtgaactcgccatgctgaattcaaatttcagagaagagagtcccgggcccagtggtagtgtgtccccattcaactctagtggaatgaaacgtgcaaagacgggtcgctgaaagttgtccttgattgttggtgtagatgatgagtatcgtggtcctccagctattgattgctgggaatatcttccagtacatgtctcattcaatgcaagctataaaagaataggctaacaattcttgctggttagcactctggtggtttttccttcccctttgtccctacctttttctttttgaacagacaggagacaaagctggaatgaagaatttttaaaagagaacaattatatagttggggtattgagaataggtttgttcaaaccaaccctttttttttctcccttgcaaacttaatacattcattggatttattcatgcgtcagttactttttgagaagtgtggaatatatacatatgatggttggtggtgatgaagttttaggtcctatgacaatgcagtgtttattggcatgtgacattgtcaaagtctcatggtattttaatatttattataagttagcataggctggattctttttagttgtttgtcacaggcatttgtattctcttcggaggactatgcactgtagttggaatgatgcatgccagataaacttcttaccatgtaccattaaagaacaaatgtggtatttgtttatat

SEQ ID NO: 22147 - protein, 281 aa, Glycine max
MSGLYNPNFSPARAASPQIRSNPEVDSQYLSELLAEHQKLGPFMQVLPICSRLLNQEILRVSGMLSNQGFGDFDRLRHRSPSPMASSNLMSNVSGTGLGGWNSLQQERLCGPPGMTMDWQSAPASPSSFTVKRILRLEIPVDTYPNFNFVGRLLGPRGNSLKRVEATTGCRVYIRGKGSIKDPDKEEKLRGRPGYEHLNEPLHILIEAELPANVVDIRLRQAQEIIEELLKPVDESQDYIKRQQLRELAMLNSNFREESPGPSGSVSPFNSSGMKRAKTGR

SEQ ID NO: 22148 - protein, 238 aa, Glycine max
MQVLPICSRLLNQEILRVSGMLSNQGFGDFDRLRHRSPSPMASSNLMSNVSGTGLGGWNSLQQERLCGPPGMTMDWQSAPASPSSFTVKRILRLEIPVDTYPNFNFVGRLLGPRGNSLKRVEATTGCRVYIRGKGSIKDPDKEEKLRGRPGYEHLNEPLHILIEAELPANVVDIRLRQAQEIIEELLKPVDESQDYIKRQQLRELAMLNSNFREESPGPSGSVSPFNSSGMKRAKTGR

SEQ ID NO: 22149 - protein, 218 aa, Glycine max
MLSNQGFGDFDRLRHRSPSPMASSNLMSNVSGTGLGGWNSLQQERLCGPPGMTMDWQSAPASPSSFTVKRILRLEIPVDTYPNFNFVGRLLGPRGNSLKRVEATTGCRVYIRGKGSIKDPDKEEKLRGRPGYEHLNEPLHILIEAELPANVVDIRLRQAQEIIEELLKPVDESQDYIKRQQLRELAMLNSNFREESPGPSGSVSPFNSSGMKRAKTGR

SEQ ID NO: 22150 - DNA, 1489 bp, Glycine max
tggcagcctcaagaaagatgttccttgctatcaagatttggcgtgcgaaaggaagtgtcagaggatgcgtgactgcggtcggcatgcttgtaagcggcgctgctgtgatggcgattgccctccctgctctgagatatgcggcaggaagcttcgatgtaagaaccataaatgcccttctccatgccatagagggccttgtgctccttgcccaataatggtgacaatttcatgtgcatgtggagagacacgttttgaggttccttgtggtaccgaaatggacaataagccacctagatgtcctaaaccatgtcctatcactcctttatgtcggcatgcatcaaatatcaagccacataaatgccattatggagcctgccatccttgtcggctaccttgtgccaaagagtaccaatgtggtcatacatgcaaattaaggtgtcatggtgctaagcctcctcctaatccagagtttactcttaaaccaaagaaaaagaagattatacaacaaagtgaaagtgttcctggcactccatgccctccgtgcccagaacttgtgtggagatcatgtgttgggaaacacattggagctgagagaatgatggtctgctctgataaatcacagttctcctgtgaaaatttatgtggtaatcctgtaccatgtggtaatcattattgtacaaaaacctgccatgccttggagaaccagttacaaggaagccaaccttgtgaagattgttatctttcttgccaaaaggaaagagagcctgcatgtccacatcactgccctcggcgatgccatcctggagactgtcctccatgcaaggtgctcattaaacggtcatgtcactgtggtgcaatggtccatgtgtttgagtgcctatattacaacagcttgtctgcaaagggtcaagagactgtccgctcatgtggtgggccatgtcacagaaagttgccaaattgtacacatttatgcccagagacatgtcattctggtcaatgcacaaatgctgagaaatgctgtaaaaaggtcactgttcgatgcaaatgccatacattgaaaaaggagtgggtttgtcaagatgttcaagcagcatatcatcttgctggttgccatcctagggatattccaaaaaatcaatttggaattggactcattccttgcaattctgattgtaacagtaaagtgcaggttgttgagtcagaacaacaattgcgtaaaactagagttacagaggtacaagagccagatgtagaaaaatcagttcggaagcggcgaaaaaggcgggaacaagttctagaatccaaggaaacttcaaaactacagaaaattatttcaagaatgaagcggcttcttctatttgtctttattttggtcatacttcttgctgctacatattatgggtacaagggacttttatggctcaatgattggatgaatgaagtggatgaacgaagacaaagatattctagaatcaaatgattatttatc

SEQ ID NO: 22151 - protein, 492 aa, Glycine max
GSLKKDVPCYQDLACERKCQRMRDCGRHACKRRCCDGDCPPCSEICGRKLRCKNHKCPSPCHRGPCAPCPIMVTISCACGETRFEVPCGTEMDNKPPRCPKPCPITPLCRHASNIKPHKCHYGACHPCRLPCAKEYQCGHTCKLRCHGAKPPPNPEFTLKPKKKKIIQQSESVPGTPCPPCPELVWRSCVGKHIGAERMMVCSDKSQFSCENLCGNPVPCGNHYCTKTCHALENQLQGSQPCEDCYLSCQKEREPACPHHCPRRCHPGDCPPCKVLIKRSCHCGAMVHVFECLYYNSLSAKGQETVRSCGGPCHRKLPNCTHLCPETCHSGQCTNAEKCCKKVTVRCKCHTLKKEWVCQDVQAAYHLAGCHPRDIPKNQFGIGLIPCNSDCNSKVQVVESEQQLRKTRVTEVQEPDVEKSVRKRRKRREQVLESKETSKLQKIISRMKRLLLFVFILVILLAATYYGYKGLLWLNDWMNEVDERRQRYSRIK

SEQ ID NO: 22152 - protein, 471 aa, Glycine max
MRDCGRHACKRRCCDGDCPPCSEICGRKLRCKNHKCPSPCHRGPCAPCPIMVTISCACGETRFEVPCGTEMDNKPPRCPKPCPITPLCRHASNIKPHKCHYGACHPCRLPCAKEYQCGHTCKLRCHGAKPPPNPEFTLKPKKKKIIQQSESVPGTPCPPCPELVWRSCVGKHIGAERMMVCSDKSQFSCENLCGNPVPCGNHYCTKTCHALENQLQGSQPCEDCYLSCQKEREPACPHHCPRRCHPGDCPPCKVLIKRSCHCGAMVHVFECLYYNSLSAKGQETVRSCGGPCHRKLPNCTHLCPETCHSGQCTNAEKCCKKVTVRCKCHTLKKEWVCQDVQAAYHLAGCHPRDIPKNQFGIGLIPCNSDCNSKVQVVESEQQLRKTRVTEVQEPDVEKSVRKRRKRREQVLESKETSKLQKIISRMKRLLLFVFILVILLAATYYGYKGLLWLNDWMNEVDERRQRYSRIK

SEQ ID NO: 22153 - protein, 421 aa, Glycine max
MVTISCACGETRFEVPCGTEMDNKPPRCPKPCPITPLCRHASNIKPHKCHYGACHPCRLPCAKEYQCGHTCKLRCHGAKPPPNPEFTLKPKKKKIIQQSESVPGTPCPPCPELVWRSCVGKHIGAERMMVCSDKSQFSCENLCGNPVPCGNHYCTKTCHALENQLQGSQPCEDCYLSCQKEREPACPHHCPRRCHPGDCPPCKVLIKRSCHCGAMVHVFECLYYNSLSAKGQETVRSCGGPCHRKLPNCTHLCPETCHSGQCTNAEKCCKKVTVRCKCHTLKKEWVCQDVQAAYHLAGCHPRDIPKNQFGIGLIPCNSDCNSKVQVVESEQQLRKTRVTEVQEPDVEKSVRKRRKRREQVLESKETSKLQKIISRMKRLLLFVFILVILLAATYYGYKGLLWLNDWMNEVDERRQRYSRIK

SEQ ID NO: 22154 - DNA, 1554 bp, Glycine max
aacagccggcggcggccacagaggcgagcagagcagagcagagtgggcaacaagcgaagaatggcgacggagatggaagaactcgtctcctttctttcttccccatcgccacagatcagaaaagccgccgttgacatagttcgcggcttaaccggctccgtcgagggcttgcagtccctcgccaattactcaaacgccctcttacccgccttgtctcgcctcttaacgttacccaaggaggtttcggaggctgctgcggaggcgctggtgaacctgtcgcagaactcgagcctcgcggaggtgatggttcgaatgggactggtcaaaacggcgatggatgttctgtacaagcccgactgcggcattgctcgcttgcttgtcatgcttttggtcaacctcactcaactcgaagctggtgctgcttccttgcttcagactgaagatgagaaggtgcttggattatatgttattaagcttgtgagatcattttgtagaaccacccatgagaataatgttttctctttgggctgaagcacctgtattggagagttcagattcaaagatgatgcttttgaacatgttggttcaatacttgttaacatctcaaaacagcggaaagggagggagcttctacttgacccaaaacggggtctcttaaagcagataatcagacagtttgattccaacagttcattgagaaagaaaggggtctctggaactattcgcaactgttgttttgaagctgagaatcagctacaaaatttgcttttggtatcagagtttctctggcccgcattacttcttcctgtagctggcaacaagatctacagtgagcaagacagatcgaaaatgccacttgaacttgggactgcactctcgattgaacgtgaactagttaatgatccagaaattcgtattcaggcattggaagccatatacttgatcatattgcaggaggcaggtcgaagagccttttggtctgtaaatggacctagaatagtacaaattggctacgaagatgaggaagatccaaaggtgatggaagcatatgaacaattgggatctttgttggttcacagcagcagtgcggaggaaccatccagtcagaccacaaagtagttattttatattaccatcagttgacccttcaatatctctccataagaactttaataattatgaaggtaattccaagtcaattttccattttgaggttagaattaccaattttagaaatatgtaaattatgcggctcagagtagttagtcaaaattatttatacacatggcagaatgagtgaagatgctcccttgatgcaaaatttcagtttgcttcttcagtttctgtatttggaattttgaattctctaaactgcaggtacaatatttcactttggaagatattatgtagcctgttttctttggattattagtaatcattcatttggctggtaaacgccactgataattcctagcacctatgtcattagtgtgcatttggttgtagtatttgagaatttcaaataatttaacatttaagaattttaattgcttc

SEQ ID NO: 22155 - protein, 176 aa, Glycine max
NSRRRPQRRAEQSRVGNKRRMATEMEELVSFLSSPSPQIRKAAVDIVRGLTGSVEGLQSLANYSNALLPALSRLLTLPKEVSEAAAEALVNLSQNSSLAEVMVRMGLVKTAMDVLYKPDCGIARLLVMLLVNLTQLEAGAASLLQTEDEKVLGLYVIKLVRSFCRTTHENNVFSLG

SEQ ID NO: 22156 - protein, 156 aa, Glycine max
MATEMEELVSFLSSPSPQIRKAAVDIVRGLTGSVEGLQSLANYSNALLPALSRLLTLPKEVSEAAAEALVNLSQNSSLAEVMVRMGLVKTAMDVLYKPDCGIARLLVMLLVNLTQLEAGAASLLQTEDEKVLGLYVIKLVRSFCRTTHENNVFSLG

SEQ ID NO: 22157 - protein, 152 aa, Glycine max
MEELVSFLSSPSPQIRKAAVDIVRGLTGSVEGLQSLANYSNALLPALSRLLTLPKEVSEAAAEALVNLSQNSSLAEVMVRMGLVKTAMDVLYKPDCGIARLLVMLLVNLTQLEAGAASLLQTEDEKVLGLYVIKLVRSFCRTTHENNVFSLG

SEQ ID NO: 22158 - DNA, 1340 bp, Glycine max
gggagaaagaaagaaggaaagcaaagtagacgagtgattgcgttgcgattgacgacgacgaggaatcatgtcttccggcggcggcggtggtaagccgttcttctgccacgtgtgcagtcagaggattacgtgctccgatgagtcggaaccattctgcccgatgtgtatggaaagtttcgtagaagaatgcaaccctaacaatcccaaccctaatctcttccccgacagtgatgaatcttcggatcccgaactccccttccaccgcttctcacttctccctctcttgctctcatcagtctctaggtcccgatccgaacccgacgtgttcgacccgatggtcttcctccagaaccaccttcaggaccttcgcgccgacggtgccaacattcaagttgactttgaccatccttccaacgagaatcaaggctttcgccttgcgaacatcggcgactactttatgggccccggcctcgagcagtttattcagcagcttgccgacaacgaccccaaccgctacggaacgccgcccgccgccaaggacgccgtcgagaatctccccaccgttaccgtcgacgacgacttgctgaactccgagctgaaccagtgcgctgtctgccaggacgagttcgaaaagggttctaaggtgacacagatgccctgcaagcacgcgtatcacggcgactgcttgattccgtggcttcggctgcataattcatgccctgtgtgccgctatgaattgcccacggacgacgccgattacgagaacgaggttcacggtggtgatgctgggtcgaggacaggtgggagcgacggtggaggtgggagtaatagaccttttcgcaggactgttaggatatatttgcgccatcctgatgctggtgactctgcgcaggacggtgctgaaagggaatggagatggagaagttgagattgaaatttatgttttgtttcatgttgaaaaactggaaactatcttgtgcagctctgagcttccgtgaatagattgtagcattgcaatgtttacagaagtccttgtgaggaatgcaagaaatgttatttcccgtggcaaggaactttgttcgatcaaaggtctttgtttgttatggtagtagatagctggaacatgggaatgcacgaaaacacaactattgagattttaggtactgtgttaatgagcgttgataagaaacttcccgttacttttgtacagatcatcttccaaacatccaatattgattatcgtccttttgtacaatatgaactagtcatggtctatattgctcctgtgtgtgtgtataaaacgttttaatttagaaaaatgttcttttgacctatttaag

SEQ ID NO: 22159 - protein, 253 aa, Glycine max
MESFVEECNPNNPNPNLFPDSDESSDPELPFHRFSLLPLLLSSVSRSRSEPDVFDPMVFLQNHLQDLRADGANIQVDFDHPSNENQGFRLANIGDYFMGPGLEQFIQQLADNDPNRYGTPPAAKDAVENLPTVTVDDDLLNSELNQCAVCQDEFEKGSKVTQMPCKHAYHGDCLIPWLRLHNSCPVCRYELPTDDADYENEVHGGDAGSRTGGSDGGGGSNRPFRRTVRIYLRHPDAGDSAQDGAEREWRWRS

SEQ ID NO: 22160 - protein, 286 aa, Glycine max
MSSGGGGGKPFFCHVCSQRITCSDESEPFCPMCMESFVEECNPNNPNPNLFPDSDESSDPELPFHRFSLLPLLLSSVSRSRSEPDVFDPMVFLQNHLQDLRADGANIQVDFDHPSNENQGFRLANIGDYFMGPGLEQFIQQLADNDPNRYGTPPAAKDAVENLPTVTVDDDLLNSELNQCAVCQDEFEKGSKVTQMPCKHAYHGDCLIPWLRLHNSCPVCRYELPTDDADYENEVHGGDAGSRTGGSDGGGGSNRPFRRTVRIYLRHPDAGDSAQDGAEREWRWRS

SEQ ID NO: 22161 - protein, 255 aa, Glycine max
MCMESFVEECNPNNPNPNLFPDSDESSDPELPFHRFSLLPLLLSSVSRSRSEPDVFDPMVFLQNHLQDLRADGANIQVDFDHPSNENQGFRLANIGDYFMGPGLEQFIQQLADNDPNRYGTPPAAKDAVENLPTVTVDDDLLNSELNQCAVCQDEFEKGSKVTQMPCKHAYHGDCLIPWLRLHNSCPVCRYELPTDDADYENEVHGGDAGSRTGGSDGGGGSNRPFRRTVRIYLRHPDAGDSAQDGAEREWRWRS

SEQ ID NO: 22162 - DNA, 1646 bp, Glycine max
acctaggaaaaaccgtttccaactttacattttcccaccaaccctcctctccattcctcaaaacaatcgttaatctcttctccattgtgaactctgatattctccaagtacacaacacaaacacacatcaatttatagcacccgatttctcttttccccctcaaattcagctccattttgttacagattcaaataataagccaagcagccacaccatgatctcgtcaatgaaatgcacagcctcatctctcacatgttctgctttctcaaacagaaagcttcccattgcaaggcctcaactcgtgacattaccaaccatcaacaacgttgaacaaaacatgggtccctctcagttgtgttcacagaagcctctctacctttcatccaccgagaacttggcattggtgaggagaaggagagtgacggagtgccaggcctatgaagctgacaggtcacggcctctggagatcaacattgagctgccggctgaagaggcggcgcagaggttcaagattggtgtgtattttgctacatggtgggctttgaatgtagttttcaacatttacaataagaaggttttgaatgcttttccttacccgtggctcacctccactttgtcccttgctgctggctccctcatgatgttagtctcatgggccaccagggttgctgaggtcccaaaagtcaacttggacttctggaagggcttgtttcctgttgccgtggcacacacaattgggcatgttgctgcaactgtgagcatgtccaaggttgctgtttcattcactcacatcatcaagagtggagagccagctttcagtgtccttgtgtcaaggttcttgctcggagaagcattcccaatgccggtttatctgtcactgctgccaattattggtggttgtgcactagctgcagtgactgagctcaatttcaacatgattggcttcatgggggctatgatatcaaatttggcatttgtcttccgcaatatattctcaaagaaagggatgaagggaatgtctgttagtggaatgaactactatgcttgtctttccataatgtcactgttaattctgacaccttttgccattgctgttgagggccccaaggtttgggctgcaggctggcaaacagctgtatctcaaattggtcccaattttgtatggtgggtagctgcacagagtgtcttttaccacttgtacaatcaagtctcatacatgtctcttgatcagatttctcccttaacatttagcattggaaacacaatgaagaggatttcggtcattgtttcttccatccttatctttcacacgcctgttcagcccatcaatgctcttggtgctgccattgcaattcttggcaccttcctctattcacaggctaaacagtaaggtggttattttgaagcttttatgtaacacaaggaaacgatgactcatggttggagctcaaagtgtcactgatgaggactatggcattaattagctagtatgttttgttgttaataggaatttaagtttatttcttttgggccatagcagcagcatttgtaatcacgttttgatctttgtaaattagctttagaaggatggaatgcactaaactgtacttaatcttgaggctgaaagtctatgaagaatttcttg

SEQ ID NO: 22163 - protein, 462 aa, Glycine max
LGKTVSNFTFSHQPSSPFLKTIVNLFSIVNSDILQVHNTNTHQFIAPDFSFPPQIQLHFVTDSNNKPSSHTMISSMKCTASSLTCSAFSNRKLPIARPQLVTLPTINNVEQNMGPSQLCSQKPLYLSSTENLALVRRRRVTECQAYEADRSRPLEINIELPAEEAAQRFKIGVYFATWWALNVVFNIYNKKVLNAFPYPWLTSTLSLAAGSLMMLVSWATRVAEVPKVNLDFWKGLFPVAVAHTIGHVAATVSMSKVAVSFTHIIKSGEPAFSVLVSRFLLGEAFPMPVYLSLLPIIGGCALAAVTELNFNMIGFMGAMISNLAFVFRNIFSKKGMKGMSVSGMNYYACLSIMSLLILTPFAIAVEGPKVWAAGWQTAVSQIGPNFVWWVAAQSVFYHLYNQVSYMSLDQISPLTFSIGNTMKRISVIVSSILIFHTPVQPINALGAAIAILGTFLYSQAKQ

SEQ ID NO: 22164 - protein, 391 aa, Glycine max
MISSMKCTASSLTCSAFSNRKLPIARPQLVTLPTINNVEQNMGPSQLCSQKPLYLSSTENLALVRRRRVTECQAYEADRSRPLEINIELPAEEAAQRFKIGVYFATWWALNVVFNIYNKKVLNAFPYPWLTSTLSLAAGSLMMLVSWATRVAEVPKVNLDFWKGLFPVAVAHTIGHVAATVSMSKVAVSFTHIIKSGEPAFSVLVSRFLLGEAFPMPVYLSLLPIIGGCALAAVTELNFNMIGFMGAMISNLAFVFRNIFSKKGMKGMSVSGMNYYACLSIMSLLILTPFAIAVEGPKVWAAGWQTAVSQIGPNFVWWVAAQSVFYHLYNQVSYMSLDQISPLTFSIGNTMKRISVIVSSILIFHTPVQPINALGAAIAILGTFLYSQAKQ

SEQ ID NO: 22165 - protein, 387 aa, Glycine max
MKCTASSLTCSAFSNRKLPIARPQLVTLPTINNVEQNMGPSQLCSQKPLYLSSTENLALVRRRRVTECQAYEADRSRPLEINIELPAEEAAQRFKIGVYFATWWALNVVFNIYNKKVLNAFPYPWLTSTLSLAAGSLMMLVSWATRVAEVPKVNLDFWKGLFPVAVAHTIGHVAATVSMSKVAVSFTHIIKSGEPAFSVLVSRFLLGEAFPMPVYLSLLPIIGGCALAAVTELNFNMIGFMGAMISNLAFVFRNIFSKKGMKGMSVSGMNYYACLSIMSLLILTPFAIAVEGPKVWAAGWQTAVSQIGPNFVWWVAAQSVFYHLYNQVSYMSLDQISPLTFSIGNTMKRISVIVSSILIFHTPVQPINALGAAIAILGTFLYSQAKQ

SEQ ID NO: 22166 - DNA, 1416 bp, Glycine max
gaagagataaataataactagttgtagctgctggggagagtggaacataataaacatgacaatgaagctgctgcttttggtagccgttgttgaagttgcatgcttagtttctgggatcttgtcctttggatctgagacactctctgagctttctttcttagaaaacgatgtcgtctcaacagcaagaccttcctcttcatctcaacctcttatggtcgacctcactctcattcaaggagctgattctaaaggagctgtctgtttggatggaacggtgcctggataccatttggatcgtggatttggatctggtgcagatagttggctaattcatttggagggaggaggatggtgtaataccatcagaaactgtgtctatagaaaaaatactcgtcgtggatcctcgaaatacatggaaaatcaaataccattcacgggaatattgatcaacaaacctgaagaaaaccctgatttctttaactggaatagagttaaattacggtactgtgatggggcgtctttcagtggagatagtgaagatgagtctgcacagcttcaatttcgaggacaaaaaatatggctagctgcaatggaggaattaatgtccaaaggaatgcagaaagccgatcaggcacttctctctggatgctctgcgggtggtctggcatcgataatacactgtgatgagttccggagcttgtttccaaaatcttccaaagtcaaatgtttgagtgatggaggtttttttcttgacgtaatggatgtatctgggggacgcacactgaggactctttttggaggtgtggttcagttgcaggagttacaaaaaaatctgccaaaaagttgtcttgaccaactagacccaacttcgtgcttctttcctcagaatatgatcgaacatgttgagaccccattgtttctactcaacgctgcttatgatgtgtggcaggtccaagctagtttagccccaccttcagctgaccgccttggctcttggaatgaatgcaaatcgaaccatgcaaattgtagctcatctcaaatgcagttcctccaagacttcagaaatcaaatgcttagtgacattaaagacttctcgagctcatctcaaactgggctattcataaattcttgttttgctcattgtcagtctgagagacaggagacatggtttgctgatgactctccccttatcgaggacaagccaattgcagttgctattggagactggtattttgatcgagaagttgtcaaagctattgactgtgcttacccgtgtgacaacagctgccataatctggtgtttaactttaagtgaacaaaatttgttgtctcctcgttccactttaatccttgtaactgcaatgagtattccacaattaccattcattgattattatggaaagaccattcttagtc

SEQ ID NO: 22167 - protein, 419 aa, Glycine max
MTMKLLLLVAVVEVACLVSGILSFGSETLSELSFLENDVVSTARPSSSSQPLMVDLTLIQGADSKGAVCLDGTVPGYHLDRGFGSGADSWLIHLEGGGWCNTIRNCVYRKNTRRGSSKYMENQIPFTGILINKPEENPDFFNWNRVKLRYCDGASFSGDSEDESAQLQFRGQKIWLAAMEELMSKGMQKADQALLSGCSAGGLASIIHCDEFRSLFPKSSKVKCLSDGGFFLDVMDVSGGRTLRTLFGGVVQLQELQKNLPKSCLDQLDPTSCFFPQNMIEHVETPLFLLNAAYDVWQVQASLAPPSADRLGSWNECKSNHANCSSSQMQFLQDFRNQMLSDIKDFSSSSQTGLFINSCFAHCQSERQETWFADDSPLIEDKPIAVAIGDWYFDREVVKAIDCAYPCDNSCHNLVFNFK

SEQ ID NO: 22168 - protein, 417 aa, Glycine max
MKLLLLVAVVEVACLVSGILSFGSETLSELSFLENDVVSTARPSSSSQPLMVDLTLIQGADSKGAVCLDGTVPGYHLDRGFGSGADSWLIHLEGGGWCNTIRNCVYRKNTRRGSSKYMENQIPFTGILINKPEENPDFFNWNRVKLRYCDGASFSGDSEDESAQLQFRGQKIWLAAMEELMSKGMQKADQALLSGCSAGGLASIIHCDEFRSLFPKSSKVKCLSDGGFFLDVMDVSGGRTLRTLFGGVVQLQELQKNLPKSCLDQLDPTSCFFPQNMIEHVETPLFLLNAAYDVWQVQASLAPPSADRLGSWNECKSNHANCSSSQMQFLQDFRNQMLSDIKDFSSSSQTGLFINSCFAHCQSERQETWFADDSPLIEDKPIAVAIGDWYFDREVVKAIDCAYPCDNSCHNLVFNFK

SEQ ID NO: 22169 - protein, 367 aa, Glycine max
MVDLTLIQGADSKGAVCLDGTVPGYHLDRGFGSGADSWLIHLEGGGWCNTIRNCVYRKNTRRGSSKYMENQIPFTGILINKPEENPDFFNWNRVKLRYCDGASFSGDSEDESAQLQFRGQKIWLAAMEELMSKGMQKADQALLSGCSAGGLASIIHCDEFRSLFPKSSKVKCLSDGGFFLDVMDVSGGRTLRTLFGGVVQLQELQKNLPKSCLDQLDPTSCFFPQNMIEHVETPLFLLNAAYDVWQVQASLAPPSADRLGSWNECKSNHANCSSSQMQFLQDFRNQMLSDIKDFSSSSQTGLFINSCFAHCQSERQETWFADDSPLIEDKPIAVAIGDWYFDREVVKAIDCAYPCDNSCHNLVFNFK

SEQ ID NO: 22170 - DNA, 1685 bp, Glycine max
aaaaattcccaacccctcctttgttcgctctgtacatctgggtcatttaatccccgaatttcttcgcatcttgcctcatattccatccaattctcgctgtttcaacgatcacggtgttgatccttgatgggtttttctcgtcgatcataaacatacccgggtttgtgaaaaaggtttttcctttccacgcgtcgcttcacttgtcatcgatcctgagctccatagcttgaaacgctgtggaactgtgaactttgttgctccttttcttttgtttccgtgtgtcaattcagcttacgccataactggatcacatgaaaatgaagccttcttctcccaatgaagaacatcatgacttggaaaatgccaagtcggacaaagataaagtaagaacaccaagaaatggaaggggagttaaagtctacaatcaggccttgttgtctggacttgcttattgtttttcctcatgtggcatgatattggtcaacaagcttgtactttcaagctatgattttaatgcggggatatccttgatgttgtaccagaatttaatttcagttgctattgtttccgtgttgagccttctgggtttagtttcaactgagccgctgacgtggagattgatcaaggtctggttgcctgtgaattttatatttgttggaatgctcgttacaagcatgtttagtttgaaatacattaatgtagccatggtgacagtcctgaagaatgttactaatgtcataaccgcccttggtgaaatgtatttgttcaagaagcaccatgatggtaaagtctgggcatctttgtttctaatgatcatttcagcaataactggagggattactgatctctctttcaatgcagttggctatgcttggcagacactaaactgtttcttaactgcatcatattctttgatgctccaagggtcatggatacagcaaagcaagttactaaatctggaaatttaaatgagttttcaatggtcttgttgaacaacaccctttctgtgcctttgggaattttcctgattattgttttcaatgagatggattatctcttaagcacgccacttctgagattgcctagcttttggttggtgatgacctttagtggatttttgggtctagcaatcagcttcacatccatgtggtttcttcatcagactggagctacaacttatagtcttgtaggttcactgaacaagataccactttctattgctggcatccttctcttcaaagttcccactagtttggagaactctgctagcattttgtttggtctattggcaggagtgttttttgctagagccaaaatccgagagagatctcaatcctgaagaacagtaaatggaatttgatttctgggttcagttggacattcagtccaagtctctgaggtgttgtcaagagatggcatcagctaaactaaactgactctcccattcttcatatatccaacttggtgatggttcatgattccttctccaagggacaatttttggtccatgttcgtttggatcttttgaggaaggggctgcttggattgattgcattggctcagactgggaggaaaaattgccactaattttgcatcatgtgacttccttattcccatgtatcatcacattatgatttgcttgatatgaaaattctaattgaaatgaaaaaagtagttaatcatcc

SEQ ID NO: 22171 - protein, 218 aa, Glycine max
MKMKPSSPNEEHHDLENAKSDKDKVRTPRNGRGVKVYNQALLSGLAYCFSSCGMILVNKLVLSSYDFNAGISLMLYQNLISVAIVSVLSLLGLVSTEPLTWRLIKVWLPVNFIFVGMLVTSMFSLKYINVAMVTVLKNVTNVITALGEMYLFKKHHDGKVWASLFLMIISAITGGITDLSFNAVGYAWQTLNCFLTASYSLMLQGSWIQQSKLLNLEI

SEQ ID NO: 22172 - protein, 216 aa, Glycine max
MKPSSPNEEHHDLENAKSDKDKVRTPRNGRGVKVYNQALLSGLAYCFSSCGMILVNKLVLSSYDFNAGISLMLYQNLISVAIVSVLSLLGLVSTEPLTWRLIKVWLPVNFIFVGMLVTSMFSLKYINVAMVTVLKNVTNVITALGEMYLFKKHHDGKVWASLFLMIISAITGGITDLSFNAVGYAWQTLNCFLTASYSLMLQGSWIQQSKLLNLEI

SEQ ID NO: 22173 - protein, 165 aa, Glycine max
MILVNKLVLSSYDFNAGISLMLYQNLISVAIVSVLSLLGLVSTEPLTWRLIKVWLPVNFIFVGMLVTSMFSLKYINVAMVTVLKNVTNVITALGEMYLFKKHHDGKVWASLFLMIISAITGGITDLSFNAVGYAWQTLNCFLTASYSLMLQGSWIQQSKLLNLEI

SEQ ID NO: 22174 - DNA, 1005 bp, Glycine max
acaacaattgaagcctctctgtcattttcacctcactgttctctatctctgcacgaacgacacaattgaacccttaaacgacaatggcgtggggacagtgccgttgctgcgtttggtgactgatgatgctgcgcgtcgtcgtcgtggacggaggtcgcatggggtggaatctggtgcggccgtgtgcattgtgatcaatcaatcataatgaggaaagaggattgtttgattttgtgattgaaatcgaaagagaaagaaagagagaaatttgttgtgatggctgaattagtggcccgaacaggtcgacatcagcagcgatacgaacacggttatcgccttattgccgggtgtgttccatttaggtataaagatgactgtggagactcttgttccgagaagattgttgaagtgcttatgattaattcgactagtggaccaggtcttttgtttccaaagggaggttgggagaatgatgaaactgttgaggaggctgcagttagagaagctattgaagaagcaggagttcgaggagacctaatggattttcttgggtactatgaatttaggagtaagaccctccaagatgagtgtagtccagaaggtttatgcaaagcagcaatgtttgcattgtttgtgaaagaggaacttgagtcatggcctgagcaaagcaccagaaaaaggagttgggtggctgtatcagaggcactagcaaactgtcgacatgcatggatgagggatgccctgcattgtttctgtaaatggcatgaggagtgcaagggaggatcaagcctgaactgactaaatatttgtagggggcaatgataaaaaagattagtgacatttattttaggaaagatatttcttatcaggattacatagggtgtggttgagtgtctctttttttttttttttttttgtgttcaaagctattttagaaagtatatttgaaaaccttttttcagaaagataagttatttgatgaaattctgagagcagttttaaaag

SEQ ID NO: 22175 - protein, 173 aa, Glycine max
MAELVARTGRHQQRYEHGYRLIAGCVPFRYKDDCGDSCSEKIVEVLMINSTSGPGLLFPKGGWENDETVEEAAVREAIEEAGVRGDLMDFLGYYEFRSKTLQDECSPEGLCKAAMFALFVKEELESWPEQSTRKRSWVAVSEALANCRHAWMRDALHCFCKWHEECKGGSSLN

SEQ ID NO: 22176 - protein, 127 aa, Glycine max
MINSTSGPGLLFPKGGWENDETVEEAAVREAIEEAGVRGDLMDFLGYYEFRSKTLQDECSPEGLCKAAMFALFVKEELESWPEQSTRKRSWVAVSEALANCRHAWMRDALHCFCKWHEECKGGSSLN

SEQ ID NO: 22177 - protein, 86 aa, Glycine max
MDFLGYYEFRSKTLQDECSPEGLCKAAMFALFVKEELESWPEQSTRKRSWVAVSEALANCRHAWMRDALHCFCKWHEECKGGSSLN

SEQ ID NO: 22178 - DNA, 1128 bp, Glycine max
aaattgatacggataaggaagagtattcagtgtctcgtgtagaataatcaatggaagtaggaatgtctctgaacgcgctggttcgtcttcctctctcgaattcacgcttccacgacgatgctgctccgatgattattaggcactctctgttttcgagccgaaagcaacagcagcagcagcagagttataaggttccacagcgtcatcaagtgttcgtggttgaagccaagggcaaaaagggaatgatgtctcgtcaatttcagcgcaatgctcctcctcctttacccaagattgaagacgatggcaatcccaaattcgtcatcttcattcgcatggccaatgtatacctttggtaccctcttagtatcgtatcaggcggcaccactgctaaaataatggttgcagctaaagataattttctcggcaagtatatctacaaagacactcttgatagaaatctcgctgctgttatctacagagatgagaaggaggtacagaaatctgcattcaaacagtaccgtgtattgcgaacagctactgatttcagatacggctacaaacttgttgagaatggcaatataagagctgcactttctaccactgatgttattgagcttccaacacaagataaactaaaaaccgtgcttgacaaagtgaaagacttttttggagatgcaaaggaatcttttggaaagataacatcattgggcactactgaaacagaggagtcagaggaagacacaaaagaaaaagccaaggttaaaggatgaaactatagctggaaatgatttgcttgaattgttatgagtagcctgtggccctatgagatcagaaagctcaattatgtttatggattggttaatggggaaacttctgtgcacaacaatgctactccaggttttgttcttagatctgtaaccatcaaaattgttttatattctgcagagtgaacaccatctttacgatactgattgatcactcgtgtatgttgtaatccatgatgctttggaatggatagcatgtaggatgacatgtaatggcaccgttatcagttcaagagattcctggaattgttgtgtaaattacgggttgtaatatctatgcattttatttgacaggaatttactt

SEQ ID NO: 22179 - protein, 239 aa, Glycine max
MEVGMSLNALVRLPLSNSRFHDDAAPMIIRHSLFSSRKQQQQQQSYKVPQRHQVFVVEAKGKKGMMSRQFQRNAPPPLPKIEDDGNPKFVIFIRMANVYLWYPLSIVSGGTTAKIMVAAKDNFLGKYIYKDTLDRNLAAVIYRDEKEVQKSAFKQYRVLRTATDFRYGYKLVENGNIRAALSTTDVIELPTQDKLKTVLDKVKDFFGDAKESFGKITSLGTTETEESEEDTKEKAKVKG

SEQ ID NO: 22180 - protein, 235 aa, Glycine max
MSLNALVRLPLSNSRFHDDAAPMIIRHSLFSSRKQQQQQQSYKVPQRHQVFVVEAKGKKGMMSRQFQRNAPPPLPKIEDDGNPKFVIFIRMANVYLWYPLSIVSGGTTAKIMVAAKDNFLGKYIYKDTLDRNLAAVIYRDEKEVQKSAFKQYRVLRTATDFRYGYKLVENGNIRAALSTTDVIELPTQDKLKTVLDKVKDFFGDAKESFGKITSLGTTETEESEEDTKEKAKVKG

SEQ ID NO: 22181 - protein, 213 aa, Glycine max
MIIRHSLFSSRKQQQQQQSYKVPQRHQVFVVEAKGKKGMMSRQFQRNAPPPLPKIEDDGNPKFVIFIRMANVYLWYPLSIVSGGTTAKIMVAAKDNFLGKYIYKDTLDRNLAAVIYRDEKEVQKSAFKQYRVLRTATDFRYGYKLVENGNIRAALSTTDVIELPTQDKLKTVLDKVKDFFGDAKESFGKITSLGTTETEESEEDTKEKAKVKG

SEQ ID NO: 22182 - DNA, 1503 bp, Glycine max
ataggaagcacgccagctgctacgaatggtgaataaaagacaaaagaaacaaactgctacatagcatacagtctgtcttctcttctcttctccggttatggcgtccgccttgggcacttcttcaattgcggttctgccttcgcgctacttctcttcttcttcttccaagccttccattcacactctctctctaacttcagggcagaactatgggcggaagttttatggaggaattggaatccatggcataaagggaagggctcagctctcggttaccaatgttgccactgaagttaactctgtagaacaggctcagagtattgcttctaaagaaagccagaggccagtatacccattttctgccatagttggacaagatgagatgaagctttgtcttctccttaatgtgattgatcctaagattggaggtgtaatgatcatgggggataggggcacagggaaatctacaacggtcaggtcattggttgatttacttcccgaaatcaaggttgttgctggtgacccttataactcagacccacaagatccagaattcatgggtgttgaagtcagagagcgtgtacttcaagaagaggaactttctgttgtcttgaccaaaattaacatggttgatttgccattgggagctacagaagatagagtgtgtggaacgattgacattgagaaagccctgactgagggtgtcaaggcatttgagcctggactactggctaaagctaataggggaatcttatatgttgatgaagttaatcttttggatgatcacttggtggatgtgttgttggattctgctgcatcaggatggaacacagtagagagagagggaatttctatctcgcctcctgcacggtttatcctaattggctcaggcaaccccgaagaaggggagctccggccgcagctgctagataggtttggaatgcatgctcaagttggaactgttagggatgctgagctcagagtgaagattgtggaggagagaggtcgatttgacaaaaatccaaaggaatttcgagattcttacaaagctgagcaagagaagctccaacaacaaattacctcagcaaggagtgttctttcttctgttcaaattgatcaagatctcaaggtgaaaatctccaaggtgtgtgctgagttgaatgtggatggattaagaggagacatagtaacaaatagagctgcaaaagctctggctgctctgaagggaagagacaacgtaagtgccgaggatattgctactgtcatccctaactgcttgagacaccgtcttagaaaggatcccttggagtctatagactcaggtttacttgtcactgagaaattttatgaggtattcagctgaggatcatagatgtaacacggtttgtattctgtggtattccatgagtataatgctacttcattatttacattttaccttttctgtggagattttcattgtcgttaaacatcaataagattcatgagttccttctacacagg

SEQ ID NO: 22183 - protein, 421 aa, Glycine max
MASALGTSSIAVLPSRYFSSSSSKPSIHTLSLTSGQNYGRKFYGGIGIHGIKGRAQLSVTNVATEVNSVEQAQSIASKESQRPVYPFSAIVGQDEMKLCLLLNVIDPKIGGVMIMGDRGTGKSTTVRSLVDLLPEIKVVAGDPYNSDPQDPEFMGVEVRERVLQEEELSVVLTKINMVDLPLGATEDRVCGTIDIEKALTEGVKAFEPGLLAKANRGILYVDEVNLLDDHLVDVLLDSAASGWNTVEREGISISPPARFILIGSGNPEEGELRPQLLDRFGMHAQVGTVRDAELRVKIVEERGRFDKNPKEFRDSYKAEQEKLQQQITSARSVLSSVQIDQDLKVKISKVCAELNVDGLRGDIVTNRAAKALAALKGRDNVSAEDIATVIPNCLRHRLRKDPLESIDSGLLVTEKFYEVFS

SEQ ID NO: 22184 - protein, 326 aa, Glycine max
MKLCLLLNVIDPKIGGVMIMGDRGTGKSTTVRSLVDLLPEIKVVAGDPYNSDPQDPEFMGVEVRERVLQEEELSVVLTKINMVDLPLGATEDRVCGTIDIEKALTEGVKAFEPGLLAKANRGILYVDEVNLLDDHLVDVLLDSAASGWNTVEREGISISPPARFILIGSGNPEEGELRPQLLDRFGMHAQVGTVRDAELRVKIVEERGRFDKNPKEFRDSYKAEQEKLQQQITSARSVLSSVQIDQDLKVKISKVCAELNVDGLRGDIVTNRAAKALAALKGRDNVSAEDIATVIPNCLRHRLRKDPLESIDSGLLVTEKFYEVFS

SEQ ID NO: 22185 - protein, 309 aa, Glycine max
MIMGDRGTGKSTTVRSLVDLLPEIKVVAGDPYNSDPQDPEFMGVEVRERVLQEEELSVVLTKINMVDLPLGATEDRVCGTIDIEKALTEGVKAFEPGLLAKANRGILYVDEVNLLDDHLVDVLLDSAASGWNTVEREGISISPPARFILIGSGNPEEGELRPQLLDRFGMHAQVGTVRDAELRVKIVEERGRFDKNPKEFRDSYKAEQEKLQQQITSARSVLSSVQIDQDLKVKISKVCAELNVDGLRGDIVTNRAAKALAALKGRDNVSAEDIATVIPNCLRHRLRKDPLESIDSGLLVTEKFYEVFS

SEQ ID NO: 22186 - DNA, 1347 bp, Glycine max
aggtttttgatttgttcttgttttgtatctttcctccaaggtgttttatttattagattcttctcacactcttcactttttttcgcatatcgctccaccacttatttttttaccccacccaccaattatcttctcttctcttccgccaaggtaatcccttccctctccaataatcaaacaatctcacttttttcttttgatacattcaatctcaaaaattgttttaaaaatggcaatggcagcccaagccatggctcaattccgtttctctcctctatcttctcattaccgttaccattaccagtacaattaccattccaccccttctttcccgtccccgcgacgtcacccccgcaaccaaaggctccacctttccttctccggcggagacagaggcggaagcggcggcggcggaggaggaggagattccgatggaggaggggcgacaacgagaagaacgtgggattgggagttgtgggaatggtgttaaacggatggagatcgagagtagcagcggacccacaattcccattcaaggtgttaatggaggaactggtgggagtgagtgcggcggtggctggtgacatggccacgcggcccaagttcggtctgaacgaactggacttggttttctcaactcttgttgtggggtccattctgaatttcatcctcatgtatctgctggcaccaacgtcttttcttcttctagctccacactaccatggatcttcgccaggtgtcccagcagccacatgttcgaagcggggccttacgggagcgtggagcgtttggggactctgttgtacaaggggggcgtgttcgcgctggtggggcttggcgccgggcttgtaggaacagcgatatcgaatgggctgatcgcgacgaggaagaaggtggacccgacgttccagagcccgaacaagtctccccctatggttctgaacgccttcacttgggcggcgcacatgggtgtgagcagcaatgtgaggtaccagactctgaacggtgtggagtttcttttggacaaatggcttcctcctttgctcttcaagttctctgttttggctcttagattcatcaacaacgttgctggagggatgacctttgtcatgctcgctaggttcaccggctctcaggctgctgctgctgctgctgttcctgttcctgttcctgttcctaaacactcttaattactttgggtctagtactttggaattactcatgacgtgccaccttgtcctgagagaaccaacaattaaatgcactatttatttttattagctcttgtttcatttgcatctttttcacggccacttcatttacttaatatagtgttgtttttcaaac

SEQ ID NO: 22187 - protein, 283 aa, Glycine max
RFLICSCFVSFLQGVLFIRFFSHSSLFFAYRSTTYFFTPPTNYLLFSSAKVIPSLSNNQTISLFSFDTFNLKNCFKNGNGSPSHGSIPFLSSIFSLPLPLPVQLPFHPFFPVPATSPPQPKAPPFLLRRRQRRKRRRRRRRRFRWRRGDNEKNVGLGVVGMVLNGWRSRVAADPQFPFKVLMEELVGVSAAVAGDMATRPKFGLNELDLVFSTLVVGSILNFILMYLLAPTSFLLLAPHYHGSSPGVPAATCSKRGLTGAWSVWGLCCTRGACSRWWGLAPGL

SEQ ID NO: 22188 - protein, 145 aa, Glycine max
MFEAGPYGSVERLGTLLYKGGVFALVGLGAGLVGTAISNGLIATRKKVDPTFQSPNKSPPMVLNAFTWAAHMGVSSNVRYQTLNGVEFLLDKWLPPLLFKFSVLALRFINNVAGGMTFVMLARFTGSQAAAAAAVPVPVPVPKHS

SEQ ID NO: 22189 - DNA, 1767 bp, Glycine max
attttttctcttcttttcttttctcccttgcacaccttccatgccttctattaattctctagagatcttcttccttctccttaacctcacaactcttgaaaatcctccttatcgatccaacaagcagcaaactcactgaacaaatccacaaacagaaacaaagatcctactcgtgtagatctaataacatcaccttcttcttctcctacagatcatgaattcctttcaagaatttgactcatcaaacacaaacagtaccaaagccaccaatttcccatcatcatcatcagcagcaccagcagcaacagcaccaccatgttcttcttcttcttcttcgaccactctgagccgctacgagaaccaaaagcggcgcgactggaacacgttcgggcagtacctccgcaaccacaggcccccactctcgctctcacggtgcagcggcgcgcacgtgctggagttcctgcggtacctcgaccagttcgggaaaaccaaggttcacacgcagctttgtcccttcttcgggcacccgaaccctccagcaccgtgcccttgtcctctacgccaagcatgggggagcctcgacgcactcatagggcgcctcagagctgcttttgaagagaatggaggaaaacctgaagctaacccttttggcgctcgcgctgtgagactctaccttcgtgaagtgcgtgattcgcaagccaaggctaggggtattagctacgagaaaaagaagcgcaagcgtccccaacaaccttcattgcctccctctaataatgcaaaagttgtgatttgacaataggctgggggcatgtggacaccctttgcaattgcattagaaaaatattgtgtaaacctaaacagcagtactacttttggtagatgcagcagtaatttaagtagtggcagtaaaaaacactgtggagggcctgtgctgctggtgctgctgatgatgatgatgggaaattggtggctttggtactgtttgtgtttgatgagtcaaattcttgaaaggaattcatgatctgtaggagaagaagaaggtgatgttattagatctacacgagtaggatctttgtttctggcgagggatctggtgttattgttgagggatccctggttgcggagcctgttgcaactcccccagctgctgacactaaggctgctgttgctgaggatgacgatgatgatgatgttgatttgtttggtgaagagactgaggaagagaagaaggcagctgaggaacgggcagctgcagtgaaggcatctgcaaaaaagaaagagtctgggaaatcatctgttctgttggatgtaaaaccatgggatgatgaaactgacatgaagaagcttgaagaatcagtgagatctgttcagatggaagggttgctttggggtgcatccaaacttgttcctgttggatacggtattaagaaactgcaaattatgcttactattgtggatgacctagtttctgttgatactcttattgaggaacatctcacagttgagcccatcaatgaatatgtccagagttgtgacattgtggccttcaataaaatataaactacaatcggtgggatttggagatcatggcaactgggagaattgcaagttttagaaactatgttctagggggaactaccctgaattgagaatttttgtctttagaaacccgcttatattatttgtttctatatatctttgttttgtcatcggattatttggatagtaataatttcacctttaatgtgtcaacggattatttggatg

SEQ ID NO: 22190 - protein, 192 aa, Glycine max
MNSFQEFDSSNTNSTKATNFPSSSSAAPAATAPPCSSSSSSTTLSRYENQKRRDWNTFGQYLRNHRPPLSLSRCSGAHVLEFLRYLDQFGKTKVHTQLCPFFGHPNPPAPCPCPLRQAWGSLDALIGRLRAAFEENGGKPEANPFGARAVRLYLREVRDSQAKARGISYEKKKRKRPQQPSLPPSNNAKVVI

SEQ ID NO: 22191 - protein, 99 aa, Glycine max
MFFFFFFDHSEPLREPKAARLEHVRAVPPQPQAPTLALTVQRRARAGVPAVPRPVRENQGSHAALSLLRAPEPSSTVPLSSTPSMGEPRRTHRAPQSCF

SEQ ID NO: 22192 - DNA, 1539 bp, Glycine max
tcttttgactgggagcttacctagatgtttagtgtcaaattccagtgatagcactgtcctgtatgctagaaattgtctagacaccgtgaatcaaaatcagcagccgcagcccttttgccacactgaagctttagctgtgggaatattacctgagagaaagaagcacaaacaagtatctacggtagttctttcccttggcatagtaggggggactcttggaggagtagcacttgttttgctaattttctttattgttagaagaggaaatgacagaagcaaaaccaagaatcctccaacaagattaatatcagaaaatgctgcttctggttacacatctaagttgctttctgatgcaaggtatatatctcaaacaaagaagttgggagcagttggcctgccaacttatcgaagtttctcattggaagagattgaatcagctacaaactattttgacagagcttctttaatgggtgaagattcttatgggaagatgtacagaggtcagctgaagaatggctcacttgttgctattcggtgtgtagaaatgaaaaagagatacagcactcaaaactttgtgcaacacatagagctgatatcaaaacttaggcatcgtcatctagtcagcgctgttggacactgttttgaatgttctttagatgattcaagtgtcagcaaagtatttcttgtcttcgaatatgtaccaaatggcacgctcaggaattggatctctgatgagcatgctagaaaatccttgagttggactcaacacataggagctgcaattggagtggcaaaaggaatccagtttttgcatacagggattgtccctggtgtatattccaatgatctgaagatagaagatgttttattgtatcagaatcttgttgcaaaaatcagcagttaccacctgcctttgttatctaacatgggaaaggttcggtgtggaaattcttccagtggattaagaaattctagcaatagtaaaagtgtaaagcatgaagataaggctgatatatacgactttggagtgatactactcgaactcattctaggaagacaaataaaaacagcaaatgatgcagatgcttttagggatctgttgcaagcaagcttaggagctgatgaagagggtaggaggagcgttgttgatccagcatttcgcaaggcatgcttggatcaatcattgaagacaatgatggagatttgtgtgaggtgcctggttaaagagccagcagataggccatctatagaagatgttttgtggaacttgcagtttgcatctcaagtacaagatgcatggagaggggattctcaaagtagtgaagggtcaccaggctcagaatctcgagggctacccttccattagtgtcaaaccacaggttttcactttttctattttgtatatttcactataagcctaaaaaattaaatggttgcggatactgcagcctcagaatagtactagttctttatgttgtaactcctttgctaaaaaaatctgtggagcttctaatgaaaaactatgttgtccgagcttgc

SEQ ID NO: 22193 - protein, 454 aa, Glycine max
LLTGSLPRCLVSNSSDSTVLYARNCLDTVNQNQQPQPFCHTEALAVGILPERKKHKQVSTVVLSLGIVGGTLGGVALVLLIFFIVRRGNDRSKTKNPPTRLISENAASGYTSKLLSDARYISQTKKLGAVGLPTYRSFSLEEIESATNYFDRASLMGEDSYGKMYRGQLKNGSLVAIRCVEMKKRYSTQNFVQHIELISKLRHRHLVSAVGHCFECSLDDSSVSKVFLVFEYVPNGTLRNWISDEHARKSLSWTQHIGAAIGVAKGIQFLHTGIVPGVYSNDLKIEDVLLYQNLVAKISSYHLPLLSNMGKVRCGNSSSGLRNSSNSKSVKHEDKADIYDFGVILLELILGRQIKTANDADAFRDLLQASLGADEEGRRSVVDPAFRKACLDQSLKTMMEICVRCLVKEPADRPSIEDVLWNLQFASQVQDAWRGDSQSSEGSPGSESRGLPFH

SEQ ID NO: 22194 - protein, 299 aa, Glycine max
MGEDSYGKMYRGQLKNGSLVAIRCVEMKKRYSTQNFVQHIELISKLRHRHLVSAVGHCFECSLDDSSVSKVFLVFEYVPNGTLRNWISDEHARKSLSWTQHIGAAIGVAKGIQFLHTGIVPGVYSNDLKIEDVLLYQNLVAKISSYHLPLLSNMGKVRCGNSSSGLRNSSNSKSVKHEDKADIYDFGVILLELILGRQIKTANDADAFRDLLQASLGADEEGRRSVVDPAFRKACLDQSLKTMMEICVRCLVKEPADRPSIEDVLWNLQFASQVQDAWRGDSQSSEGSPGSESRGLPFH

SEQ ID NO: 22195 - protein, 291 aa, Glycine max
MYRGQLKNGSLVAIRCVEMKKRYSTQNFVQHIELISKLRHRHLVSAVGHCFECSLDDSSVSKVFLVFEYVPNGTLRNWISDEHARKSLSWTQHIGAAIGVAKGIQFLHTGIVPGVYSNDLKIEDVLLYQNLVAKISSYHLPLLSNMGKVRCGNSSSGLRNSSNSKSVKHEDKADIYDFGVILLELILGRQIKTANDADAFRDLLQASLGADEEGRRSVVDPAFRKACLDQSLKTMMEICVRCLVKEPADRPSIEDVLWNLQFASQVQDAWRGDSQSSEGSPGSESRGLPFH

SEQ ID NO: 22196 - DNA, 1424 bp, Glycine max
ataacatatagggagcgagatcccaaaaccaaaaggtggagggcgtgggcgagggatatctatcttcattttcgtcgtcgttcatttttttattttttttttttctgttttccattcgcttcttctctcagaaaagctcgccaatcgatcttgctctcttctacgcttttcgaattccttccattccattatggacgcagattagattcacgttcacattcacttctcttcgtttgcttcaaccactctgctctgctctgctctactctgagatccgatcgcattttcattcagaaaggaaactcgtgtgactgatttatgcgctaattgcaattgcactgcgagcgtccctgtgccgaatcggaagatgggattagtgtttaccaaattgttttcctctcttttcggtaacaaggaagctcgaatcctcgttctcggcctcgacaatgccggcaaaaccactattctctatcggcttcagatgggcgaagttgtctccaccattccaacaattgggtttaatgtcgaaacagtgcagtataacaacattaaatttcaagtctgggatttaggtgggcaaacaagtatcaggccatattggaggtgttactttccaaatactcaagcaataatctatgttgttgattcaagtgacgttgataggcttgtgatagctaaggaggagttccatgcaattttggaggaggaagaactaaaaggtgcagttgttctcattttcgcaaacaagcaggaccttcctggtgcacttgatgatgctgcagtgaccgaggctctagagttacacaagatcaaaaatcgccaatgggctatttttaaaacttctgccataaaaggagaaggactttttgagggccttgactggttgagcaatacactcaaatctggaggtggctaaaggtgtcagtttcaacgaattaaatggacgattgaattcagaaggaaggtggaaatgcgtattttggtatctctttcactgtgaatgatgctataataatatgattattaaagctcgtacacatgttttattccgttttgtgtttacagttaaaaaggtatgaacaatggtcattggttgtctttttcttggttcctttttatatttttaagttagtctcttggctcctctaatagcagtagctgaatggtttctaagaaaaaatttctagtctaatcttgtgtaattgagatacatgggtttactcttaatgtgcttgacgtatcgatgattacatgaggtagttttgtcaatgacataacggctgatgagggcaaaccttcaaagctctttggtgacatgatgaggactgagcagccattgttgttgacaatgtaaatcaaggtagcaaatttttcattaatgtaaaatgtatcgaagacaatatatgatattctttttggatttg

SEQ ID NO: 22197 - protein, 182 aa, Glycine max
MGLVFTKLFSSLFGNKEARILVLGLDNAGKTTILYRLQMGEVVSTIPTIGFNVETVQYNNIKFQVWDLGGQTSIRPYWRCYFPNTQAIIYVVDSSDVDRLVIAKEEFHAILEEEELKGAVVLIFANKQDLPGALDDAAVTEALELHKIKNRQWAIFKTSAIKGEGLFEGLDWLSNTLKSGGG

SEQ ID NO: 22198 - protein, 144 aa, Glycine max
MGEVVSTIPTIGFNVETVQYNNIKFQVWDLGGQTSIRPYWRCYFPNTQAIIYVVDSSDVDRLVIAKEEFHAILEEEELKGAVVLIFANKQDLPGALDDAAVTEALELHKIKNRQWAIFKTSAIKGEGLFEGLDWLSNTLKSGGG

SEQ ID NO: 22199 - protein, 104 aa, Glycine max
ITYRERDPKTKRWRAWARDIYLHFRRRSFFYFFFFCFPFASSLRKARQSILLSSTLFEFLPFHYGRRLDSRSHSLLFVCFNHSALLCSTLRSDRIFIQKGNSCD

SEQ ID NO: 22200 - DNA, 1420 bp, Glycine max
ctttctctctcgtaatacaatttctctctctagaataaaacagcttctaccgcctccaagtcctacaagaacccattccctctcacaccgcccccaaaatctcactcttctgccttctcttttctcttctcttcttcctccaaaacaagtaaacaaacaacactctcacattcaccacaacacaaacacaaacacaaacaaagacaacaaccttgtttgtctgcaatcaaaacctttcaagctggcgttcgagaaccaagacacccctgtccgagaaatcaagcccaagaaccggagaatcatgggtgctggaggccctgatgacgaggacaataggtggccaccatggctgaaacctcttctcaaagagagcttctttgttcaatgcaagcttcacgctgattcgcacaagagcgagtgcaacatgtattgcttagattgtatgaacggtgctctctgctctctctgcctcgcttaccacaaagatcaccgtgctattcagataagaaggtcttcataccatgatgtgattagggttaatgagattcagaaggtgttggacatcacaggggtccaaacctacattatcaacagcgcaagggttgttttcttgaatgagaggcctcagccaaggcctggtaaaggtgtcaccaacacttgtgaagtctgcgagcgcagccttcttgattccttccgattctgttctcttggttgcaagattgttgggacttcaaggaacttccagaagaagaaaaagtcagcggcaatgggatcagacacagaggattcttcgtacagcagcaacagcagccatgggaagaagaacagcttcacaccgtccacaccgcctccaacttctgttaattacagaacggccaagagaagaaagggaattccacaccgtgccccaatgggtgggctagtcatagaatactagaaattaagttagtagtaactttaggttatttgctataatgccccctgataaattttacctcaaaacgcaactttctccgtgcagtttcacccgtcacaacacactcgagctttttgctgtaaaaggccggtgctggaattgtgttcccttctctgttccttgttaatagcgtttgtctatataggaaaaatccaatagaagtgaaaaaaaggttgagaaagtagaaaaaaaataagacatgtgatctgtgaaatagtttgagagaaaaagaatggtgcagcaaaataagcaaatgttcctttcaaccaaagtacaggaagatgaggaacattataggtttggtttctagagcaattatacgtaagttttggggtgggtgtaaatagtggcttggggaagaagacagtgacaatgtactctttccaaatagatggattgtttatggaatggtgaaaaataataatagtactaatagattttctc

SEQ ID NO: 22201 - protein, 311 aa, Glycine max
FLSRNTISLSRIKQLLPPPSPTRTHSLSHRPQNLTLLPSLFSSLLPPKQVNKQHSHIHHNTNTNTNKDNNLVCLQSKPFKLAFENQDTPVREIKPKNRRIMGAGGPDDEDNRWPPWLKPLLKESFFVQCKLHADSHKSECNMYCLDCMNGALCSLCLAYHKDHRAIQIRRSSYHDVIRVNEIQKVLDITGVQTYIINSARVVFLNERPQPRPGKGVTNTCEVCERSLLDSFRFCSLGCKIVGTSRNFQKKKKSAAMGSDTEDSSYSSNSSHGKKNSFTPSTPPPTSVNYRTAKRRKGIPHRAPMGGLVIEY

SEQ ID NO: 22202 - protein, 211 aa, Glycine max
MGAGGPDDEDNRWPPWLKPLLKESFFVQCKLHADSHKSECNMYCLDCMNGALCSLCLAYHKDHRAIQIRRSSYHDVIRVNEIQKVLDITGVQTYIINSARVVFLNERPQPRPGKGVTNTCEVCERSLLDSFRFCSLGCKIVGTSRNFQKKKKSAAMGSDTEDSSYSSNSSHGKKNSFTPSTPPPTSVNYRTAKRRKGIPHRAPMGGLVIEY

SEQ ID NO: 22203 - protein, 170 aa, Glycine max
MYCLDCMNGALCSLCLAYHKDHRAIQIRRSSYHDVIRVNEIQKVLDITGVQTYIINSARVVFLNERPQPRPGKGVTNTCEVCERSLLDSFRFCSLGCKIVGTSRNFQKKKKSAAMGSDTEDSSYSSNSSHGKKNSFTPSTPPPTSVNYRTAKRRKGIPHRAPMGGLVIEY

SEQ ID NO: 22204 - DNA, 1078 bp, Glycine max
gccactaccatttccaacaacatagccatgccctccatgaagacctcatcgtccaaaacctccgagtcctcgactcagttcgactcgccccactcgcctctccgatccttcccgctcttcgacaacgccgaccccttccactcgccgcaaaatgacaactcccgcgccatcgtcatcgtcgagacaacttcgactcaattcgcccaggccgcgccccccgcgccggagtccgagcaccggaacccgcctccggaggccgtggtcacccgccccgtttggccggagacgaagtcgtcggccaccgttggtcggacgcgaccgaggccggtggcgccgcccagttcggtggtgccgaagagagaaatgatggcgaaaaaagttgcattagggtttcggttaagcgaagtagtgctgtgtctgatttcgttttcggttatggccgcggacaaaactcgtggttggagcggtgattcttttgatcgctacaaggaatacaggtattgtttgtctgtgaatgtaatcgcatttgtatacgctgcgtttcaagcgtgtgatctggcgtatcaggtagtaacgggaagacgcataatcaatcaccacctgcgttaccactttgatttcttcatggatcaggttttggcgtatcttttggtatcggctgcatcatctgctgctacacgcgttgatgactggcaatcgaattggggaaaagatgatttcacagagatggcgagtgcttcaattgcgttgacctttcttgcttttgttgcctttgctattagctcgttaatctctggctacaacctctgcactctgttctcatagcaacattttaacctcgtataagctgtctttccattgtacacacaactacacactttttttttcttctttctattcctctattcttactgctgtggaggaatgcattcatgagtgttggtgccagtgatttttttttactgtacagatagacttgtatacgtacaattgagggaatactgttcgtcttaaatccgaaggatggagaaggaaatttttgtgttcaccttaaaatacaattaaatgattgtatttt

SEQ ID NO: 22205 - protein, 274 aa, Glycine max
ATTISNNIAMPSMKTSSSKTSESSTQFDSPHSPLRSFPLFDNADPFHSPQNDNSRAIVIVETTSTQFAQAAPPAPESEHRNPPPEAVVTRPVWPETKSSATVGRTRPRPVAPPSSVVPKREMMAKKVALGFRLSEVVLCLISFSVMAADKTRGWSGDSFDRYKEYRYCLSVNVIAFVYAAFQACDLAYQVVTGRRIINHHLRYHFDFFMDQVLAYLLVSAASSAATRVDDWQSNWGKDDFTEMASASIALTFLAFVAFAISSLISGYNLCTLFS

SEQ ID NO: 22206 - protein, 265 aa, Glycine max
MPSMKTSSSKTSESSTQFDSPHSPLRSFPLFDNADPFHSPQNDNSRAIVIVETTSTQFAQAAPPAPESEHRNPPPEAVVTRPVWPETKSSATVGRTRPRPVAPPSSVVPKREMMAKKVALGFRLSEVVLCLISFSVMAADKTRGWSGDSFDRYKEYRYCLSVNVIAFVYAAFQACDLAYQVVTGRRIINHHLRYHFDFFMDQVLAYLLVSAASSAATRVDDWQSNWGKDDFTEMASASIALTFLAFVAFAISSLISGYNLCTLFS

SEQ ID NO: 22207 - protein, 262 aa, Glycine max
MKTSSSKTSESSTQFDSPHSPLRSFPLFDNADPFHSPQNDNSRAIVIVETTSTQFAQAAPPAPESEHRNPPPEAVVTRPVWPETKSSATVGRTRPRPVAPPSSVVPKREMMAKKVALGFRLSEVVLCLISFSVMAADKTRGWSGDSFDRYKEYRYCLSVNVIAFVYAAFQACDLAYQVVTGRRIINHHLRYHFDFFMDQVLAYLLVSAASSAATRVDDWQSNWGKDDFTEMASASIALTFLAFVAFAISSLISGYNLCTLFS

SEQ ID NO: 22208 - DNA, 1192 bp, Glycine max
ttctttccttcattccaaaccacacccaccacttcttccgatcagatgtccgacgatcactggatcaaggtcgccatggctgacgattctctcgtcgtcgaccttctcctccgcctccaccgccctccaccgccgccaccgccctgtctaaacctccactggacggtgcgtcagcggcgctccagatctgctcacaacaaagcggagtccaccagggccagccccaccacgccgctttcctggagcggcgccacgtcagcaagcggcggcaacctcgatggctatgaggagtacagccgcccaagcaaaccaacccaaacctcaagatctaaggttgctaatcccagcgaaacaaccactaccagaaagaccaggagaaaaaagaccttagctgaactaaaagcggaggaggatttgttgctgaaagaaagaagaaatttgaaaaaagaactggcattcttgcgtctcactgttgagaaacatagagccacaaatgaaagcataaagagaaagaagcttgattttgagtcacggcagaattctagtgctgctgctacggcctctgaggtgtctgggaaagctgtgaatggctcatttcaatttgtaaaagcagagtgtcatccatctaattcagtctcacatgacgattcacctgtttgtgcagcaaatgtttctcccaaagcacaagataatattggtaaccaagaatctacattcgtgctccctgatctaaatttgcctgtcgatgaggatatcagcgccaatatcatgcattatattgaactaagctaataaaggataggatctcgaatgacattccgcatactgataagttagacgaacatcatcttgcaagtatgcctaatagtcgtaatagtataaggtatagcatgtcagtcctaacaaattagattttgctactgtaattgtagatgttaaaccattcactttttccacttggtcaaaactgatgtggaaattgtttttttcttcttttttttttcattcatgaaactgagggtagtgtagaaatcctaacacatcaggcttagttccattctttttttcttcacaggtttctacattatccaaaattctttgtggcaaccctcgaccgtcctttattatagatatattttctgataaatgtaattaggtgttctatagataattcaagaattttggttctttt

SEQ ID NO: 22209 - protein, 263 aa, Glycine max
FFPSFQTTPTTSSDQMSDDHWIKVAMADDSLVVDLLLRLHRPPPPPPPCLNLHWTVRQRRSRSAHNKAESTRASPTTPLSWSGATSASGGNLDGYEEYSRPSKPTQTSRSKVANPSETTTTRKTRRKKTLAELKAEEDLLLKERRNLKKELAFLRLTVEKHRATNESIKRKKLDFESRQNSSAAATASEVSGKAVNGSFQFVKAECHPSNSVSHDDSPVCAANVSPKAQDNIGNQESTFVLPDLNLPVDEDISANIMHYIELS

SEQ ID NO: 22210 - protein, 248 aa, Glycine max
MSDDHWIKVAMADDSLVVDLLLRLHRPPPPPPPCLNLHWTVRQRRSRSAHNKAESTRASPTTPLSWSGATSASGGNLDGYEEYSRPSKPTQTSRSKVANPSETTTTRKTRRKKTLAELKAEEDLLLKERRNLKKELAFLRLTVEKHRATNESIKRKKLDFESRQNSSAAATASEVSGKAVNGSFQFVKAECHPSNSVSHDDSPVCAANVSPKAQDNIGNQESTFVLPDLNLPVDEDISANIMHYIELS

SEQ ID NO: 22211 - protein, 238 aa, Glycine max
MADDSLVVDLLLRLHRPPPPPPPCLNLHWTVRQRRSRSAHNKAESTRASPTTPLSWSGATSASGGNLDGYEEYSRPSKPTQTSRSKVANPSETTTTRKTRRKKTLAELKAEEDLLLKERRNLKKELAFLRLTVEKHRATNESIKRKKLDFESRQNSSAAATASEVSGKAVNGSFQFVKAECHPSNSVSHDDSPVCAANVSPKAQDNIGNQESTFVLPDLNLPVDEDISANIMHYIELS

SEQ ID NO: 22212 - DNA, 1323 bp, Glycine max
ctgatcgagagacgaaggcagaggaaagatcgcgttatgtggcctcttgtctccttacttgcaaagccggaacagaaatcgcatataaaatgcgaaaagaaatgaattcaatgttcggagatctgcacaggatctctctccgtgtccgttgaactttctttacgccctcctcgtaacataaaaattcagatcccgccaactctgaagacctctattctctttccctcccctttccactttcccgagaaaataaacttttccgtcaattttctctccacggtttccttcttcctcacaatggctccgaacttcgacaatcgaagattcgttctcgctcttcgcattttccttctcctctccttattcttcaacctctcaccgaccttcgctcaggattctctcgtgcagaacgcgaaggaagattccgacgaatctgtggatctcggtcgccgcgccaaaattgcattgaatggtatagagaatgattcgatcctttctcttggcttggactccaccggtcctggactcttcgacgcatttttcgcgagtttttcgatgatccttattggggatgagacgtttataatagcagctctcatggctatgcgtcaccctaagtcaattgtcttgtctggtgcgctcagtgctctgattataatgacagtactttctacagggcttggcaggattgtgcctaatttgatttctaggaagcatacaaatagtgctgctacagttctttatgctttctttgggttaaggttactgtacattgcatggagatcatcagattcaaaatcctcacagaagaaagaaatggaagaagttgaagaaaaactggatggtggacaagggaaaacttcagttaggcgcttcttttcaagattttgtacaccaatatttttggagtcttttattttaacattccttgctgagtggggtgaccgtagccagatagcgacaattgcactggcaacccacaaaaatgcaattggagtagcagttggggccactataggacacaccatctgtacctctctggctgtagtgggaggaagcatgctggcatctaagatttcccaacgctcagtagccactgttggtggcttgctcttcctcggattttctgtatcttcatatttctacccgcctctatgatgaatacaagtgcagagtaatctgattcgtaaaggcttgtggcctttctatcctgctttttccccccctacataattgtctttattgtagattttgttgtacttgttccctaggaaagctcgatactaactggaacatgagattttgaatcccatttttttttgc

SEQ ID NO: 22213 - protein, 286 aa, Glycine max
MAPNFDNRRFVLALRIFLLLSLFFNLSPTFAQDSLVQNAKEDSDESVDLGRRAKIALNGIENDSILSLGLDSTGPGLFDAFFASFSMILIGDETFIIAALMAMRHPKSIVLSGALSALIIMTVLSTGLGRIVPNLISRKHTNSAATVLYAFFGLRLLYIAWRSSDSKSSQKKEMEEVEEKLDGGQGKTSVRRFFSRFCTPIFLESFILTFLAEWGDRSQIATIALATHKNAIGVAVGATIGHTICTSLAVVGGSMLASKISQRSVATVGGLLFLGFSVSSYFYPPL

SEQ ID NO: 22214 - protein, 200 aa, Glycine max
MILIGDETFIIAALMAMRHPKSIVLSGALSALIIMTVLSTGLGRIVPNLISRKHTNSAATVLYAFFGLRLLYIAWRSSDSKSSQKKEMEEVEEKLDGGQGKTSVRRFFSRFCTPIFLESFILTFLAEWGDRSQIATIALATHKNAIGVAVGATIGHTICTSLAVVGGSMLASKISQRSVATVGGLLFLGFSVSSYFYPPL

SEQ ID NO: 22215 - protein, 186 aa, Glycine max
MAMRHPKSIVLSGALSALIIMTVLSTGLGRIVPNLISRKHTNSAATVLYAFFGLRLLYIAWRSSDSKSSQKKEMEEVEEKLDGGQGKTSVRRFFSRFCTPIFLESFILTFLAEWGDRSQIATIALATHKNAIGVAVGATIGHTICTSLAVVGGSMLASKISQRSVATVGGLLFLGFSVSSYFYPPL

SEQ ID NO: 22216 - DNA, 1529 bp, Glycine max
accataacgtgacaccaaattctcattctggcgcgcgtcctcacatccccacagttaccactattcctcttttcttcatcatcatcttcttcttcttcttcttcttcttcttgcatttacatcaactcttctcccaacccataaaaaaaaaaaaaaaagttcgtattttccctcccatgatcgaccctcatggtcacagactccaagcccatcattccccggcgcggcctcgtcgtcggcaactactgtcatgacgtcctccaccgcgacggcgagaccgtcgccgagaccctcggcggcgccgcctccttcatctccgttatcctcgatgccctctcccttcccttccacaccgtctccaaggtgggccccaacttcgcctacaccgccgacacatcgaatcaccccccgttaataatcccaacctcccaaaccacgctcttccacgctcacttcggttcgggccacccggaccgcctcctgaaccgcgtccgatcctgcgattcaatccaacccaccgacctcccggaccaacaaccccggttcgggttcggactcgcggtcggggtcggcggtgagattctcccggagacagtggaaaaaatgctctcgatctgcgaccacgtgttcgtggacattcaggctctgattcgcaggttcgacaacatcaacggtcgcgtgagccacgtggcgctaagagagagcgggttcttccacctcttgccgcgtgtggcgtttctcaaggcttctgcggatgaggccgtttttattgacgtggaggaggtgaggaagtggtgttgcgtggtcgtcacgcacgggaaggatggttgcgaggtgttttgtgaaaacggtgcgtttaaggtggcgccgttcgaggctgatcaggttgatcccaccggcgccggggactgttttctcggcgggtttgcggcggggattgtgaggggcctggccgtgcctgatgcggctctgttggggaacttctttggatccattgctgtggcgcaagtgggaccgcccaagcttgacttcaacttgattcagatggttaaggatgagatgcacaaaaggaagctgcaggatattcccttcttagaaagaagagatgagtcgccagggtttcagaagccacctgaacaagatcaattctatgcatctcttgttactgccaaagccataattacttgccagattcaagaatctggtcggaatctgctaagctctcctaaagtgtttgagcaaaataatgcaaagacaagactttcactggcttctgtgcacgaggaaccaattccaagcgttgatggtaaaccctaacatgggatggttggagttccaaatctcactgtaactctccagtgcccttccttttcatatcaaaaatagagatttcttagcatccaggaatctgtcaatttatggtgccttttccacacctagtctcacgtgcagcctaatttgtagttctacttgtaccaaattactaataaattattcttaaaaagaaaatcgagattgaaattccattc

SEQ ID NO: 22217 - protein, 375 aa, Glycine max
MVTDSKPIIPRRGLVVGNYCHDVLHRDGETVAETLGGAASFISVILDALSLPFHTVSKVGPNFAYTADTSNHPPLIIPTSQTTLFHAHFGSGHPDRLLNRVRSCDSIQPTDLPDQQPRFGFGLAVGVGGEILPETVEKMLSICDHVFVDIQALIRRFDNINGRVSHVALRESGFFHLLPRVAFLKASADEAVFIDVEEVRKWCCVVVTHGKDGCEVFCENGAFKVAPFEADQVDPTGAGDCFLGGFAAGIVRGLAVPDAALLGNFFGSIAVAQVGPPKLDFNLIQMVKDEMHKRKLQDIPFLERRDESPGFQKPPEQDQFYASLVTAKAIITCQIQESGRNLLSSPKVFEQNNAKTRLSLASVHEEPIPSVDGKP

SEQ ID NO: 22218 - protein, 237 aa, Glycine max
MLSICDHVFVDIQALIRRFDNINGRVSHVALRESGFFHLLPRVAFLKASADEAVFIDVEEVRKWCCVVVTHGKDGCEVFCENGAFKVAPFEADQVDPTGAGDCFLGGFAAGIVRGLAVPDAALLGNFFGSIAVAQVGPPKLDFNLIQMVKDEMHKRKLQDIPFLERRDESPGFQKPPEQDQFYASLVTAKAIITCQIQESGRNLLSSPKVFEQNNAKTRLSLASVHEEPIPSVDGKP

SEQ ID NO: 22219 - DNA, 1302 bp, Glycine max
caccttacgtccttacgtttcgtcgtgtgtctcatgaaccattacataaactctttacctttgtttattcataactactatatatatatatagaccctccttaaacccttttcttcaacagccaacaaaaaacaagtctttttctgaaaacttaatttctctctgattttctccctcacttttatttctctctttctggattattctctctgtgtagattgtggcgtgttctcgatgatgatgatgatgagccgcagcggcgccaaccgggtagcgaacaccgcaatgtttgtggcgaagggtttaagcggcgaagttggtggtttaagagcattatatggcggtggtgtgaggagtgagagcactttggctttgtcagagaaggaaaagattgagaagaaggttggtttgtcttctgctggtgggaacaaagaagaaaaagtgatcgtgagttattggggcattcaaccctccaagatcacaaaaaaagatggcacagaatggaagtggaattgctttaggccatgggagacatacaaagcagatctttccattgatctggagaagcaccatgctccaaccacgtttctggacaaaatggctttttggactgtcaaggttctcagataccccaccgatgtgtttttccagaggcgatatggatgccgagcaatgatgctagaaacagtggctgcagtccctgggatggtagcaggcatgctacttcactgcaaatccctaagaagatttgagcacagtggtggttggatcaaagcactgctggaagaagcagagaacgagcgtatgcacctaatgaccttcatggaagtggcaaagccaaagtggtatgagcgtgcactagtgataactgtgcaaggtgttttcttcaatgcatacttcttggggtatttgttgtcacctaaattcgcacaccgcatggttggttacctggaggaggaagcaattcactcctacacagagttccttaaggagctggacaagggcaatatcgaaaatgtgccggctccagccattgccattgactactggcagctcccaccaggctccactttaagggatgttgtcatggttgtaagagctgatgaggcacaccatcgtgatgtcaaccactttgcatcggacattcactatcaagggcgagagttacgagaggctgctgctccaattggttatcactaattttttttgcctcttctgatgttggagtgtggaaatttaagacaaattttggtgtcattttgactagaataaataaaattgctcgtgacagacaaaaaaaat

SEQ ID NO: 22220 - protein, 321 aa, Glycine max
MMMMMSRSGANRVANTAMFVAKGLSGEVGGLRALYGGGVRSESTLALSEKEKIEKKVGLSSAGGNKEEKVIVSYWGIQPSKITKKDGTEWKWNCFRPWETYKADLSIDLEKHHAPTTFLDKMAFWTVKVLRYPTDVFFQRRYGCRAMMLETVAAVPGMVAGMLLHCKSLRRFEHSGGWIKALLEEAENERMHLMTFMEVAKPKWYERALVITVQGVFFNAYFLGYLLSPKFAHRMVGYLEEEAIHSYTEFLKELDKGNIENVPAPAIAIDYWQLPPGSTLRDVVMVVRADEAHHRDVNHFASDIHYQGRELREAAAPIGYH

SEQ ID NO: 22221 - protein, 320 aa, Glycine max
MMMMSRSGANRVANTAMFVAKGLSGEVGGLRALYGGGVRSESTLALSEKEKIEKKVGLSSAGGNKEEKVIVSYWGIQPSKITKKDGTEWKWNCFRPWETYKADLSIDLEKHHAPTTFLDKMAFWTVKVLRYPTDVFFQRRYGCRAMMLETVAAVPGMVAGMLLHCKSLRRFEHSGGWIKALLEEAENERMHLMTFMEVAKPKWYERALVITVQGVFFNAYFLGYLLSPKFAHRMVGYLEEEAIHSYTEFLKELDKGNIENVPAPAIAIDYWQLPPGSTLRDVVMVVRADEAHHRDVNHFASDIHYQGRELREAAAPIGYH

SEQ ID NO: 22222 - protein, 319 aa, Glycine max
MMMSRSGANRVANTAMFVAKGLSGEVGGLRALYGGGVRSESTLALSEKEKIEKKVGLSSAGGNKEEKVIVSYWGIQPSKITKKDGTEWKWNCFRPWETYKADLSIDLEKHHAPTTFLDKMAFWTVKVLRYPTDVFFQRRYGCRAMMLETVAAVPGMVAGMLLHCKSLRRFEHSGGWIKALLEEAENERMHLMTFMEVAKPKWYERALVITVQGVFFNAYFLGYLLSPKFAHRMVGYLEEEAIHSYTEFLKELDKGNIENVPAPAIAIDYWQLPPGSTLRDVVMVVRADEAHHRDVNHFASDIHYQGRELREAAAPIGYH

SEQ ID NO: 22223 - DNA, 1379 bp, Glycine max
aaaaaccccttcccttccacatacactcttctccaatctcaccccaaaaaaacttgcaacaaaccaaaaaccatgcttgatgaatcagtctcatccaccccaacattcttgggcagcctgtacagctggttcacccccactgtcttcttcctcctcctccaactagtcattggcaccattttcatcatctcaaaccttaccaacacccacaaacaccaacaacaagaaccacaacaagcacatgactttccacaccaccatcttcccagatccccttccatgctccaaagactcaaatccatcaacttttacccttcttcccctttcagatcccaagaccttcaaaaccctcattttcacaacgctcatgaaaatgaacaacctcaacttgctagatctccctccgttctccagagactcaaatccatcaacctctacagttacttccctaccgaacccttcacttccaaactcacacccgaccagcacgtgccggagaaaccgtacgtgcgagaacaaaaccaaccgcaacaagtggtggaaacggacgaggaaaaagaagagggttatgatgactatgttgtcgaagatgacaacaacatcattatgagcacgcacaattacaattataacctcggagtctccgaagagggtggtgctggttcttcctcgctggacgagatttactgcaagctgcagcagcagggacaagagggtcatttcgagcggacgcactccgacacgaagccggcgtccggggaggttccggtgaagcttccgaggaagatgaagaagtcggcgagcagcaagtcggcgttctcgcacttcaaggaggacgacatcgtggagactcgccggccggccaccgtgagggaggccaaggtaaccggcggcgccgccgaggacgacgccgaggtggacgccaaggccgacgacttcatcaacaagttcaagcaacagctgaagctccagaggctggattccatcatcaggtacaaggaaatgattggcagagggtctgctaagtaagtactagttattaacaattattattattatcataatactatttttgttttactatgttattgataacaattatctactagttttatggatgagtaatctaattttcattggataacttaattggtcacgtctagcaggattatccgtttattacattttagtgtaatattttatttttttgttagtttttaattaggtttttttgtttctttttttgtaaaattagtgagcttttttggggggttggttatgtgaagtagggtgctgagtgtggcttgttcattttcagccactacttgtgggatgttgggaattagttgtaagttgttgctttatgttgatgactcctc

SEQ ID NO: 22224 - protein, 342 aa, Glycine max
KNPFPSTYTLLQSHPKKTCNKPKTMLDESVSSTPTFLGSLYSWFTPTVFFLLLQLVIGTIFIISNLTNTHKHQQQEPQQAHDFPHHHLPRSPSMLQRLKSINFYPSSPFRSQDLQNPHFHNAHENEQPQLARSPSVLQRLKSINLYSYFPTEPFTSKLTPDQHVPEKPYVREQNQPQQVVETDEEKEEGYDDYVVEDDNNIIMSTHNYNYNLGVSEEGGAGSSSLDEIYCKLQQQGQEGHFERTHSDTKPASGEVPVKLPRKMKKSASSKSAFSHFKEDDIVETRRPATVREAKVTGGAAEDDAEVDAKADDFINKFKQQLKLQRLDSIIRYKEMIGRGSAK

SEQ ID NO: 22225 - protein, 318 aa, Glycine max
MLDESVSSTPTFLGSLYSWFTPTVFFLLLQLVIGTIFIISNLTNTHKHQQQEPQQAHDFPHHHLPRSPSMLQRLKSINFYPSSPFRSQDLQNPHFHNAHENEQPQLARSPSVLQRLKSINLYSYFPTEPFTSKLTPDQHVPEKPYVREQNQPQQVVETDEEKEEGYDDYVVEDDNNIIMSTHNYNYNLGVSEEGGAGSSSLDEIYCKLQQQGQEGHFERTHSDTKPASGEVPVKLPRKMKKSASSKSAFSHFKEDDIVETRRPATVREAKVTGGAAEDDAEVDAKADDFINKFKQQLKLQRLDSIIRYKEMIGRGSAK

SEQ ID NO: 22226 - protein, 249 aa, Glycine max
MLQRLKSINFYPSSPFRSQDLQNPHFHNAHENEQPQLARSPSVLQRLKSINLYSYFPTEPFTSKLTPDQHVPEKPYVREQNQPQQVVETDEEKEEGYDDYVVEDDNNIIMSTHNYNYNLGVSEEGGAGSSSLDEIYCKLQQQGQEGHFERTHSDTKPASGEVPVKLPRKMKKSASSKSAFSHFKEDDIVETRRPATVREAKVTGGAAEDDAEVDAKADDFINKFKQQLKLQRLDSIIRYKEMIGRGSAK

SEQ ID NO: 22227 - DNA, 1328 bp, Glycine max
aactgcgtcccccacaatccagtacctgaaaaatccactgcctctctctctctctcctaaccccccccccccagcaaatatatacccttccttcccacaattctatgatcacaatcttctctttctctcctacttctccgcctccttcaaaatcgtcatcaatttcgcgtctttctttctcaattctcttagattctcaattgggtcttcaaaaatgcggatgagttgcaatggatgtcgagttctgagaaaaggttgcagtgaaaattgcagcatcagaccctgtttacaatggatcaaaagcccagaatcccaagccaatgctactgtgtttctcgctaagttttatggtcgtgctggtctcatgaacctcgttaacgcaggccccgaacatcttcgtccagcgatctttcgctcgttgttgtacgaggcatgcggtcggatagtgaacccgatttacgggtctgtcgggctattatggtccgggagctggcagctgtgtcaagccgccgtggaaaacgtcttgaaaggcgcgccgattacgccgatcacgtctgaagccgcggctagcgggcggtgcccaccgctcaaggcttacgacatacgccacgtgttcaaagacgagaactccgccgccgcgtccaacgaaactcagcaccaacgagtcaagacccgctctcgagtgaagcgacccctcgccaagcccaaatccaccgccaaccaaaacaacaacattaacactaagaatacgggaaccgaattcggatcggatgaaccgggtttggtggcatgcgattggaccgaggaggcgttgaaccggtctggaagtcacgattcgacgctgagccaccagtcggaggcggcgaatgcggtggaaagtgagagcattttgtctgctgagacttcgatcctcttccgagatgaaccggaatccaacccgaagcgcttggaccggaccgatgatgttggtttagagcttacgctagggttcgagccggtatcaggtgcgcagcacgtggttccggtgaagaagagaaggattgatttgaaggattttagtggctcgtcgtgcaagatggagctggggcttgaatgctcggcttgaggactagtggctcggctcagttttgactcatcggctttctgtgtttgatataagagaacagaagtacagaaccgttttagtgttgttgttgttgttgttttttttttgtaatttgggttattgttaacccctttgtgaatgcggtgctgtacaacagtacaaactcaaacatgaatgctagtaagtagatgaacaggtgcatttcaaaattgttaccttgggc

SEQ ID NO: 22228 - protein, 367 aa, Glycine max
TASPTIQYLKNPLPLSLSPNPPPPANIYPSFPQFYDHNLLFLSYFSASFKIVINFASFFLNSLRFSIGSSKMRMSCNGCRVLRKGCSENCSIRPCLQWIKSPESQANATVFLAKFYGRAGLMNLVNAGPEHLRPAIFRSLLYEACGRIVNPIYGSVGLLWSGSWQLCQAAVENVLKGAPITPITSEAAASGRCPPLKAYDIRHVFKDENSAAASNETQHQRVKTRSRVKRPLAKPKSTANQNNNINTKNTGTEFGSDEPGLVACDWTEEALNRSGSHDSTLSHQSEAANAVESESILSAETSILFRDEPESNPKRLDRTDDVGLELTLGFEPVSGAQHVVPVKKRRIDLKDFSGSSCKMELGLECSA

SEQ ID NO: 22229 - protein, 296 aa, Glycine max
MRMSCNGCRVLRKGCSENCSIRPCLQWIKSPESQANATVFLAKFYGRAGLMNLVNAGPEHLRPAIFRSLLYEACGRIVNPIYGSVGLLWSGSWQLCQAAVENVLKGAPITPITSEAAASGRCPPLKAYDIRHVFKDENSAAASNETQHQRVKTRSRVKRPLAKPKSTANQNNNINTKNTGTEFGSDEPGLVACDWTEEALNRSGSHDSTLSHQSEAANAVESESILSAETSILFRDEPESNPKRLDRTDDVGLELTLGFEPVSGAQHVVPVKKRRIDLKDFSGSSCKMELGLECSA

SEQ ID NO: 22230 - protein, 294 aa, Glycine max
MSCNGCRVLRKGCSENCSIRPCLQWIKSPESQANATVFLAKFYGRAGLMNLVNAGPEHLRPAIFRSLLYEACGRIVNPIYGSVGLLWSGSWQLCQAAVENVLKGAPITPITSEAAASGRCPPLKAYDIRHVFKDENSAAASNETQHQRVKTRSRVKRPLAKPKSTANQNNNINTKNTGTEFGSDEPGLVACDWTEEALNRSGSHDSTLSHQSEAANAVESESILSAETSILFRDEPESNPKRLDRTDDVGLELTLGFEPVSGAQHVVPVKKRRIDLKDFSGSSCKMELGLECSA

SEQ ID NO: 22231 - DNA, 1331 bp, Glycine max
agaccaaagagagaattggatcctcttcccatgtggggttgctcgggcctgatggagattgtgttgcaattcttcgaagtattgaaatctacaagcataacaaggaagaaagaatagctagaacttggggaacaactgctcctggattgccatatgttgaggaggtgattactccggcaggaaattggcttattggaggagatttggaagtgctaaaacctatcaaatataatgatggcctagataactacaggctctctcccaaacaactccgtgaagaatttgacaagcgtcaagcagatgcagtttttgcctttcagttaagaaaccctgtacacaatggtcatgccttgttaatgaatgatactcgtaagcgcctattggaaatgggctacaaaaatcccattttactgcttcatcctcttggaggttttgtaaaggctgatgacgttcccttggatgtcaggatggagcaacatagcaaggtcctagaagatggagttcttgatcctgagactaccatagttgccatatttccatcacctatgcattatgctggtccaactgaagtacagtggcatgcaaaggcacggataaatgcaggtgcaaatttctatattgttggtcgtgatccggctggtatgggccacccaactgagaaaagggatttgtatgaccctgatcatggaaagaaggtgcttagcatggctcccggtctggagaagcttaacattttgccattcagggtggcagcttatgacactaaggtaaacaagatggcatttttcgacccaacccgtgctaaagatttcctctttatatctggaaccaagatgcgggcttttgcaaaaagtggggagaatccgccagaaggtttcatgtgcccaagtgggtggaaggttcttgtcaaatattatgaaagtttgcaggcagaagagccatcacaacagcctgtgctatctacttagacattcttctaaaagtagaagcttagcatcaattgattccaatgggagagtgttaaaaacacatttctgggagtgccaatttttatgcctggtcttccagcttcatgatcaagatttaagcaatgcgctagcatatttgaattttttgtaccatattgaattgtccttttctttttaagttactatgactaaagaatttgttgtggtgcatcaagcataattgcagatgtagtcttctatctatggactcctgtaagaccagttcaataagggtgtgagaaattcagcagagccttggtgcttatggctatttagagaggggatatatgggatcaaggttttaaaaaacggttcgtaactgct

SEQ ID NO: 22232 - protein, 321 aa, Glycine max
TKERIGSSSHVGLLGPDGDCVAILRSIEIYKHNKEERIARTWGTTAPGLPYVEEVITPAGNWLIGGDLEVLKPIKYNDGLDNYRLSPKQLREEFDKRQADAVFAFQLRNPVHNGHALLMNDTRKRLLEMGYKNPILLLHPLGGFVKADDVPLDVRMEQHSKVLEDGVLDPETTIVAIFPSPMHYAGPTEVQWHAKARINAGANFYIVGRDPAGMGHPTEKRDLYDPDHGKKVLSMAPGLEKLNILPFRVAAYDTKVNKMAFFDPTRAKDFLFISGTKMRAFAKSGENPPEGFMCPSGWKVLVKYYESLQAEEPSQQPVLST

SEQ ID NO: 22233 - protein, 203 aa, Glycine max
MNDTRKRLLEMGYKNPILLLHPLGGFVKADDVPLDVRMEQHSKVLEDGVLDPETTIVAIFPSPMHYAGPTEVQWHAKARINAGANFYIVGRDPAGMGHPTEKRDLYDPDHGKKVLSMAPGLEKLNILPFRVAAYDTKVNKMAFFDPTRAKDFLFISGTKMRAFAKSGENPPEGFMCPSGWKVLVKYYESLQAEEPSQQPVLST

SEQ ID NO: 22234 - protein, 193 aa, Glycine max
MGYKNPILLLHPLGGFVKADDVPLDVRMEQHSKVLEDGVLDPETTIVAIFPSPMHYAGPTEVQWHAKARINAGANFYIVGRDPAGMGHPTEKRDLYDPDHGKKVLSMAPGLEKLNILPFRVAAYDTKVNKMAFFDPTRAKDFLFISGTKMRAFAKSGENPPEGFMCPSGWKVLVKYYESLQAEEPSQQPVLST

SEQ ID NO: 22235 - DNA, 1543 bp, Glycine max
aggtttgaagtttgggattcacgttatgagagggataagcacgcaagctgtcaatgcaaacacccctatcctagatataacaaagggaggtgcttatcaagaatctggtcgagtgtggcatgcaaaagacatagcaatgccagaaagggcttgtgcatggatgcctcacggtttcatgagtgtaaatacgaagttgggagctgggagagcttttttgaaatccctttatgagcagtatgctgcatggggtgttgatctcgtgaaacatgactgtgtgtttggagatgacttggatttaaatgaaataagctatgtgtcggaggttctcagtgtgcttaatcgccctattgtgtattctctgtctcctggaaccagtgtgacaccagccatggccaaggatgtcagtggactagtcaacatgtatcgaataacaggagatgactgggataaatgggaggacgtcaaggctcattttgatgtaacaagggatttttctacagctaatatgataggagggaaaggtttgaagggaaattcctggcctgatttggacatgctaccatttggatggctaactgatccaggatcaaatgaaggtccacacagatttagtaaactcactctagaagaaaaaaggacacagatgactttgtggtctttggcaaagtctccccttatgtatgggggggatgtgcggaggatcgatccaaccacatacgaacttatcacaaatcctaccctgctagagattaattactttagctcaaacaatatggagtttccttacatcacaagctcaattaacttgaagcaccctggagggaaagaaagaagacttaagaaaggaatacattcattgggtttgactagctgcagtgaatcaaaggcgaggggttggtctattgaaagtcttaaccaagatcttgaaagaatctgttggaaaaagggtttagaaaacaagcatcaggcccctttctgcgtacacaaaagagaacttcaattcagattagacggggtgagtatgtatcaagaggactatcgagggaaacatcaattagttgcaactgacagaatgaaattttgcttggacgcttctccaagacgaaaggttacttctaaagagttcaagagaggtacattttctccatgcagatgggattcaaatcagatctgggaactgaactccaatgggaccatggtaaatagttactccggtctttgtgcaactgtagagtatattgaagctaatgttaattctggtgggattcgctcttggatcgcaacaggaagaacaggggaaatctatcttgctttcttcaatctaagcgaacagaagacggagatatatgcaaagacatcatatctggctaaggttcttcctgacaaaagcatcacttcatgcaagggcgaggaagtgtggagtggaacagatgtaataacaacgcaagggacgatatcaatgaacgtggaaattcatggatgtgcactatttgttctaaattgcaactagtttggcatggcttccaattaatatttaaaaaag

SEQ ID NO: 22236 - protein, 502 aa, Glycine max
GLKFGIHVMRGISTQAVNANTPILDITKGGAYQESGRVWHAKDIAMPERACAWMPHGFMSVNTKLGAGRAFLKSLYEQYAAWGVDLVKHDCVFGDDLDLNEISYVSEVLSVLNRPIVYSLSPGTSVTPAMAKDVSGLVNMYRITGDDWDKWEDVKAHFDVTRDFSTANMIGGKGLKGNSWPDLDMLPFGWLTDPGSNEGPHRFSKLTLEEKRTQMTLWSLAKSPLMYGGDVRRIDPTTYELITNPTLLEINYFSSNNMEFPYITSSINLKHPGGKERRLKKGIHSLGLTSCSESKARGWSIESLNQDLERICWKKGLENKHQAPFCVHKRELQFRLDGVSMYQEDYRGKHQLVATDRMKFCLDASPRRKVTSKEFKRGTFSPCRWDSNQIWELNSNGTMVNSYSGLCATVEYIEANVNSGGIRSWIATGRTGEIYLAFFNLSEQKTEIYAKTSYLAKVLPDKSITSCKGEEVWSGTDVITTQGTISMNVEIHGCALFVLNCN

SEQ ID NO: 22237 - protein, 494 aa, Glycine max
MRGISTQAVNANTPILDITKGGAYQESGRVWHAKDIAMPERACAWMPHGFMSVNTKLGAGRAFLKSLYEQYAAWGVDLVKHDCVFGDDLDLNEISYVSEVLSVLNRPIVYSLSPGTSVTPAMAKDVSGLVNMYRITGDDWDKWEDVKAHFDVTRDFSTANMIGGKGLKGNSWPDLDMLPFGWLTDPGSNEGPHRFSKLTLEEKRTQMTLWSLAKSPLMYGGDVRRIDPTTYELITNPTLLEINYFSSNNMEFPYITSSINLKHPGGKERRLKKGIHSLGLTSCSESKARGWSIESLNQDLERICWKKGLENKHQAPFCVHKRELQFRLDGVSMYQEDYRGKHQLVATDRMKFCLDASPRRKVTSKEFKRGTFSPCRWDSNQIWELNSNGTMVNSYSGLCATVEYIEANVNSGGIRSWIATGRTGEIYLAFFNLSEQKTEIYAKTSYLAKVLPDKSITSCKGEEVWSGTDVITTQGTISMNVEIHGCALFVLNCN

SEQ ID NO: 22238 - protein, 457 aa, Glycine max
MPERACAWMPHGFMSVNTKLGAGRAFLKSLYEQYAAWGVDLVKHDCVFGDDLDLNEISYVSEVLSVLNRPIVYSLSPGTSVTPAMAKDVSGLVNMYRITGDDWDKWEDVKAHFDVTRDFSTANMIGGKGLKGNSWPDLDMLPFGWLTDPGSNEGPHRFSKLTLEEKRTQMTLWSLAKSPLMYGGDVRRIDPTTYELITNPTLLEINYFSSNNMEFPYITSSINLKHPGGKERRLKKGIHSLGLTSCSESKARGWSIESLNQDLERICWKKGLENKHQAPFCVHKRELQFRLDGVSMYQEDYRGKHQLVATDRMKFCLDASPRRKVTSKEFKRGTFSPCRWDSNQIWELNSNGTMVNSYSGLCATVEYIEANVNSGGIRSWIATGRTGEIYLAFFNLSEQKTEIYAKTSYLAKVLPDKSITSCKGEEVWSGTDVITTQGTISMNVEIHGCALFVLNCN

SEQ ID NO: 22239 - DNA, 1508 bp, Glycine max
gattccgcagcttgttactctcttctctctcaaaacaaaacttgaatccatccatactctacataccccttgcccttgctttgcttctttctttctcacaagcaccagcagcactcaaatcaatcaatcgtttttaatgcccttgcttctccctctttccgtgtgtatgtaaaatctttgtttttatcagaggtggtgcagaaagttgtatctcagatccctatatacaccgaaaacgatacaactgtgtgctgtgtacactgtgcactgtgcttctccctctctctctctctctctcacaaaatcataatcattttacatattacacctattaccgaatagagtggtcctcaacctcaacctaaaagcctcactttttttgttttccccgataaccctattcaacccaatcctcctttcccttttcctttgacaaaaggaaaggaagaaatgcaagaaccaagcttgggattgatgggtgaggtctccggcgatcaccaccgtcagctgaaggcggagataacgactcatccgctgtacgagcagcttctggcagcacacgtggcatgcctccgtgtggccaccccgatcgaccagcttccactcatcgatgctcagttatctcagtctcaccatcttctacgctcttatgtctcacacaacactcattctctctcccctcatcaccgccaagaacttgacaacttcctggcacaatatttgatagttctgtgtactttcaaagaacagcttcagcaacatgtaagagtccacgccgtcgaggctgtcatggcctgccgtgatatcgaaaatgccttacaagctctaactggagtgagtttgggagaaggaactggtgcaacaatgtcagatgatgaagatgatttacaaatggatatttctttagatcaatctagcgcggaagggcatgacatgatgggatttggtccattacttcctacagaatctgaaaggtcattgatggaaagagttcgccaggaactaaagattgagctgaaacagggtttcaagtcaagaattgaagatgtcagggaagaaatattaaggaaacgtagagctgggaaattaccaggtgacacaacttctgtgttaaagaactggtggcagcaacatgcaaagtggccttacccaactgaagatgacaaggcaaaacttgtggaggagacagggttgcagctgaagcaaattaataattggttcatcaaccaaaggaaacgcaactggcacagtaactctcaatcggttacctctttgaagtcgaagcgcaagaggtagacatattattttgtccctaactatgtggaacagctagcaagcaacacaactatatataaggacatgcttaatattgctgatagagtgtagtcccactaaggatgcaaaagatggtagatgcatgtgggttactgtaatattgtaagatagctgaaacaaattatagactggctgtaaatttgtggaatttaacgtatgcaaacttttctttt

SEQ ID NO: 22240 - protein, 281 aa, Glycine max
MQEPSLGLMGEVSGDHHRQLKAEITTHPLYEQLLAAHVACLRVATPIDQLPLIDAQLSQSHHLLRSYVSHNTHSLSPHHRQELDNFLAQYLIVLCTFKEQLQQHVRVHAVEAVMACRDIENALQALTGVSLGEGTGATMSDDEDDLQMDISLDQSSAEGHDMMGFGPLLPTESERSLMERVRQELKIELKQGFKSRIEDVREEILRKRRAGKLPGDTTSVLKNWWQQHAKWPYPTEDDKAKLVEETGLQLKQINNWFINQRKRNWHSNSQSVTSLKSKRKR

SEQ ID NO: 22241 - protein, 273 aa, Glycine max
MGEVSGDHHRQLKAEITTHPLYEQLLAAHVACLRVATPIDQLPLIDAQLSQSHHLLRSYVSHNTHSLSPHHRQELDNFLAQYLIVLCTFKEQLQQHVRVHAVEAVMACRDIENALQALTGVSLGEGTGATMSDDEDDLQMDISLDQSSAEGHDMMGFGPLLPTESERSLMERVRQELKIELKQGFKSRIEDVREEILRKRRAGKLPGDTTSVLKNWWQQHAKWPYPTEDDKAKLVEETGLQLKQINNWFINQRKRNWHSNSQSVTSLKSKRKR

SEQ ID NO: 22242 - protein, 168 aa, Glycine max
MACRDIENALQALTGVSLGEGTGATMSDDEDDLQMDISLDQSSAEGHDMMGFGPLLPTESERSLMERVRQELKIELKQGFKSRIEDVREEILRKRRAGKLPGDTTSVLKNWWQQHAKWPYPTEDDKAKLVEETGLQLKQINNWFINQRKRNWHSNSQSVTSLKSKRKR

SEQ ID NO: 22243 - DNA, 1662 bp, Glycine max
tcttgcatcaagtgtagacatcagctcttgccctgatggaattatctgtgttggtggtgatgggataatcaatgaggttcttaatggtctccttagtagagacaatcaaaaggaaggaatatctataccaattggaattataccggctggttctgataactcgttggtatggactgttcttggagttagagatccagtttctgcagcaatggctattgtaaagggtggtcttactgctacagatgtctttgctgttgaatggattcagactaataaaattcactatggattaacagtctcatattatggttttgttggtgatgtgttggaactttctgaaaaatatcagaagcgctttggcccgctgcggtattttgttgctggattcttcaagttcctatgcttaccacgctacaactatgaagttgaatatcttccagcttcaaagactgagagagaaggaaagctttctggtgaaaaggaagtagttgacatgtcagatctgtatactgacatcatgagcagatcaaataaggatggaatgcccagagcatctagtctttctagtattgactcaataatgactccaagtcatatatctggtgtagacctggatacctgtagtagtacccatgctagcactgaaccttctgaattggtgcgtggcttagatccaaagtccaaacgcctatcgtctggaaggggcaatgtaatagcagagccagaagttatccatccgcagctgcctctgtcaacaactcaaactggccaagaaccagatctaagtcaaggaatgataaaggatggactggattgaccacaacacatgatacctctagacggggaaatactgtgacaaatgatagagaggatatatcatcaacactgtctgatccaggtcctatctgggatgctgaaccaaaatgggatgctgaacctagtaattgggatgtggaaaatccaattgagttgccaggaccatcagatgacacagaaataggatctgcaaaggaggttgtgccccgttttggagataaatgggttgcgtcaaagggacaatttcttggcattctggtttgcaaccatgcatgtagaactgttcagagctctcaggtggttgctcccaaagctgagcacgatgataacacactagatttgctcttggttcatgggagtggaaggctgaggctgttgagatttttcttactcctacaaatgggtcgacatctttcactgccatatgttgaatatgtcaaggtaaagtctgtgaggataaagcctgggaagcacactcacaatggatgtggtattgatggggagcttttcccactcaatggacaagtaatttcttctttgcttccagaacagtgccggcttattggtcgctttcgtatatgataactgagttcttttcaattctttcatgggttctgggaagttcatgtaccttctcatatatatgaatccagatacccaatttgtcttgcaaattccttatcgctgtaacagctgagctttgtaaatctttcgttccggttatatgtatctgttgttgcttgcttacctgtctttattttgctttttataaaaaagaaaacaagttgtacatttatgcatttccagcaacaagaagctgaatgtattgctgatcaccatttcctc

SEQ ID NO: 22244 - protein, 271 aa, Glycine max
LASSVDISSCPDGIICVGGDGIINEVLNGLLSRDNQKEGISIPIGIIPAGSDNSLVWTVLGVRDPVSAAMAIVKGGLTATDVFAVEWIQTNKIHYGLTVSYYGFVGDVLELSEKYQKRFGPLRYFVAGFFKFLCLPRYNYEVEYLPASKTEREGKLSGEKEVVDMSDLYTDIMSRSNKDGMPRASSLSSIDSIMTPSHISGVDLDTCSSTHASTEPSELVRGLDPKSKRLSSGRGNVIAEPEVIHPQLPLSTTQTGQEPDLSQGMIKDGLD

SEQ ID NO: 22245 - protein, 202 aa, Glycine max
MAIVKGGLTATDVFAVEWIQTNKIHYGLTVSYYGFVGDVLELSEKYQKRFGPLRYFVAGFFKFLCLPRYNYEVEYLPASKTEREGKLSGEKEVVDMSDLYTDIMSRSNKDGMPRASSLSSIDSIMTPSHISGVDLDTCSSTHASTEPSELVRGLDPKSKRLSSGRGNVIAEPEVIHPQLPLSTTQTGQEPDLSQGMIKDGLD

SEQ ID NO: 22246 - DNA, 1761 bp, Glycine max
gagcttgagagacaaatgtggcacataagagaacagattgggagagaaaaaagtacacgacccgagaaagcaaaagggcatgcacgtcatcgtggaaagaaagaaaactcttctcttcttcccagagaaagaaagaaacacatttcccttccaaggaaagaaaataaaaacgtaacatcattggaatcaaaatcaggatgatgggtagttgcccttgtttcgggttgtggagctggaagaccaaagggaagaccgtcaaggctcaggaggaacaaaacaagaatcgcaaatctctcgatgtctctgaaacttcttcaggacttggaccagaagaaaacccaacagagagtgacagttctcataaggctcagatatttaccttccgagagcttgcaacagcaacaaaaaattttagggatgaaacctttattgggcaaggtggatttggcactgtttataaaggaacaatcggaaaaataaatcaggttgtagctgttaaaagacttgatactactgttgtccaaggggagaaagaatttctggtggaagttctcatgctttcccttctacgccattccaaccttgttaatatgattggttactgtgctgaaggggatcaacgtcttcttgtgtatgagtacatggctttaggatctttagaatctcatcttcatgatgtttcacctgatgaagaaccactcgattggaataccagaatgatgatagcttttggggcagcaaaaggactaaattatctgcaccatgaagcaaagccctctgttatatacagggatctgaaatcatccaacatactattggatgaaggtttccatccaaaactttctgattttgggcttgcaaaatttggtccaaccggagaacaatcgtatgttgccactagggtcatgggaacacaaggttactgtgcccctgaatatgccactagtggaaaattaacgatgagatctgacatttacagttttggggttgtgttattggaactaattactggacgcagagcatatgatgataatggtggccctgaaaagcatcttgtagaatgggcacgcccaatgtttagagacaaaaagagttatccaagatttgcagatccgcggcttaaaggttgctacccaggaacagctctctcgaatgccattgaattggcagccatgtgtcttcgtgaagagccacgtcaacggcctaatgcaggtcatatagtggaagctctcaaattcttgtcatccaaaccatataccccgaaagtatccattacagtcaacacaacaggtatggagagtggagattctccaaaagaaacaccagcgattttgcctcaagaatcagaaagagagcgagctgttgcagaggccaagctgtggggtgagacatggaggcagagacgacaaagtgagcaaagtagtcctgaaggaagcaaatagggggtaccagaaagaaaaccttcaaagcagattagaagtggctagtatctaaaaaggtatagggaaagtaaagaaacttcaaaagataatgtgttcaagatttaaatgtagctaataaaattagttggccagctaaatttaaaaagtgtcgtttaggcacttgtgaatttgaggctcaactttacatgctttgacatgagtttttagattttatggttgctcttgctttgctgcattgaaaaatatgatacattactactacttctatgttctaactctaactgctggagcctggaagcaaacacaaattttttaacag

SEQ ID NO: 22247 - protein, 414 aa, Glycine max
MMGSCPCFGLWSWKTKGKTVKAQEEQNKNRKSLDVSETSSGLGPEENPTESDSSHKAQIFTFRELATATKNFRDETFIGQGGFGTVYKGTIGKINQVVAVKRLDTTVVQGEKEFLVEVLMLSLLRHSNLVNMIGYCAEGDQRLLVYEYMALGSLESHLHDVSPDEEPLDWNTRMMIAFGAAKGLNYLHHEAKPSVIYRDLKSSNILLDEGFHPKLSDFGLAKFGPTGEQSYVATRVMGTQGYCAPEYATSGKLTMRSDIYSFGVVLLELITGRRAYDDNGGPEKHLVEWARPMFRDKKSYPRFADPRLKGCYPGTALSNAIELAAMCLREEPRQRPNAGHIVEALKFLSSKPYTPKVSITVNTTGMESGDSPKETPAILPQESERERAVAEAKLWGETWRQRRQSEQSSPEGSK

SEQ ID NO: 22248 - protein, 413 aa, Glycine max
MGSCPCFGLWSWKTKGKTVKAQEEQNKNRKSLDVSETSSGLGPEENPTESDSSHKAQIFTFRELATATKNFRDETFIGQGGFGTVYKGTIGKINQVVAVKRLDTTVVQGEKEFLVEVLMLSLLRHSNLVNMIGYCAEGDQRLLVYEYMALGSLESHLHDVSPDEEPLDWNTRMMIAFGAAKGLNYLHHEAKPSVIYRDLKSSNILLDEGFHPKLSDFGLAKFGPTGEQSYVATRVMGTQGYCAPEYATSGKLTMRSDIYSFGVVLLELITGRRAYDDNGGPEKHLVEWARPMFRDKKSYPRFADPRLKGCYPGTALSNAIELAAMCLREEPRQRPNAGHIVEALKFLSSKPYTPKVSITVNTTGMESGDSPKETPAILPQESERERAVAEAKLWGETWRQRRQSEQSSPEGSK

SEQ ID NO: 22249 - protein, 295 aa, Glycine max
MLSLLRHSNLVNMIGYCAEGDQRLLVYEYMALGSLESHLHDVSPDEEPLDWNTRMMIAFGAAKGLNYLHHEAKPSVIYRDLKSSNILLDEGFHPKLSDFGLAKFGPTGEQSYVATRVMGTQGYCAPEYATSGKLTMRSDIYSFGVVLLELITGRRAYDDNGGPEKHLVEWARPMFRDKKSYPRFADPRLKGCYPGTALSNAIELAAMCLREEPRQRPNAGHIVEALKFLSSKPYTPKVSITVNTTGMESGDSPKETPAILPQESERERAVAEAKLWGETWRQRRQSEQSSPEGSK

SEQ ID NO: 22250 - DNA, 1620 bp, Glycine max
atctccacaaaggcagcagattatcttgaagccatggttattaaaaataaagcaactttcctcaaacaacaataagggcagatgctctatcaaaaatgattcaccttaagttgctcgtacttgaaaaaatgaatttttcaggaagacttggtaatctttccaatgaattaggatatcttacttggaatgaatatccttttgagtgtttgccacctagttttgagctggacaatcctgttaggttgcttttgcctaatagcaacatcaaacaactatgggaaggcatgaagcctctacagtctacacaatttgagacatttgattctctcattccaaaaatccaattgagatgccagatattggggaggccctaaatcttgagtggctagatctccaaggacgtatacaacttaggcagattgatccatccattggtcttctaagaaagcttatttttgtgaatttcaaagactgcaaaagtcttaccaagttaccacattatcatatttggcctcaattctcttgaatatttgtttctttacggctgttcaaaactgtataataaccagttattgaatgaacctagggatgtagaacatttgatgaagatttatataggtaaagctcctttttatccccaatcaacaccttcctactccagagaacataaaagttgagttagctatttattgccttcctcgccaattttcccatgtatctgcaaacttgatctaagtttctgtaatttacttcaaatccctgatgctatcggaaatttatgttgcttagaaagcctagatttaagtggaaacaatttttctatactgcccaacctcaaggagctttccaaactgttccatttaaacttacaacactgcaagcagttgaaacatttgcctgagctcccttcatgatttgacttcccatcacctacttacatgctgccatggataaaatatctatctagtggaagagatgcaggattatacattttcaactgctcaaaattggttgagagggaacgctgctcaaacatgggtttttcatggatgatacaaattattcagtacatggagcatcaccagtacaaaaattttgattaccctctaatggaatttgcaagaatttaaagtgttactcttggaaatgaaataccaaggtggttcaacaatcaacatttgggcagtttaataagcatagacgcatcacccgttatggatgacaatgattggatcggcgtgctgtgttatatttgtggtacatcatgaaacagttttagctatgagtccttcaaaacaaaaggaaggtatccttttattgttgatatggcggtggatttttatggagatctagaactagtttcagacgaatcagaacacatgtggctattctttctcagtcaaagactattcattgaagaatatcatctgcagggcacatctaacctcggtagcatgaaacaggaatttaaaataattagctactagccaggttttcatgttgaggtgaagaaatacgggtatcattgggtatataaacaggatcttgaactatcaaacttaactatgatgcatagcggaaatttgtcagcttagaagcacaagtttttggcaattgaac

SEQ ID NO: 22251 - protein, 92 aa, Glycine max
MIHLKLLVLEKMNFSGRLGNLSNELGYLTWNEYPFECLPPSFELDNPVRLLLPNSNIKQLWEGMKPLQSTQFETFDSLIPKIQLRCQILGRP

SEQ ID NO: 22252 - protein, 81 aa, Glycine max
MNFSGRLGNLSNELGYLTWNEYPFECLPPSFELDNPVRLLLPNSNIKQLWEGMKPLQSTQFETFDSLIPKIQLRCQILGRP

SEQ ID NO: 22253 - protein, 63 aa, Glycine max
MLPWIKYLSSGRDAGLYIFNCSKLVERERCSNMGFSWMIQIIQYMEHHQYKNFDYPLMEFARI

SEQ ID NO: 22254 - DNA, 1216 bp, Glycine max
aaaaaccgcacacacactctctctttctctctcttcaaatcaaaacccatcacaattcacaacaacatacaaatcccaaatcctatcttttctcttctcatataaaagaacccttctttcgaatccttcccgctcttttccctctgatttaattcatgcgcagatccaaaccctaatccatctctccgagctctttgatttttgagttaataaaaaaaaaaaaattagggtttgatggctgaccaaggattggaagggagccagccggtggatctacagaagcatccttctgggatcgtgcctacccttcaaaatattgtgtccacagtcaatttggactgtaagttggacctcaaaacaattgcacttcaagctcgtaatgcagagtacaatcccaagcgttttgctgctgtcattatgaggataagagatcccaaaacaactgcacttatttttgcttctggcaagatggtttgtactggagctaagagtgaacaacagtctaaattggcagcaaggaagtatgctcgtattatccaaaagcttggcttcccagccaaatttaaggatttcaaaattcagaacattgtcggctcttgtgatgtcaagttccccatacggctggagggtcttgcatattcccatggtgctttctcaagttatgaaccagagctgtttccagggctaatctaccgtatgaagcaacctaaaatagttttgcttatatttgtctctggaaaaattgttctaacaggagccaaggtgagagatgagacttacactgcctttgaaaacatatatcccgtgcttactgagttcaggaaaaaccaacaatgattgtaattcaagaaagagcaggagcagtggtttggcagagaagttcgtggaactgtaaatattaagacaaaggatataatctagattgatataaattaaagacagccgtttgtgttgccccttgtctttgtttttttgatttgtcttgatgtagtaaagtggcagacgttgtctattgaattgacatttttgaaaaaaaaaaaagagaaaagaggattttgaggtgtcagaaatgaggaaaaaaaaagtggagctaaatggaaaaagtagcacattgagtcctgacagtagcttgaaaatgttttgataacttctactatcaattgaccgtagtgtgatctaactactgagtagcattgaatatcttgatcaacaaatc

SEQ ID NO: 22255 - protein, 200 aa, Glycine max; identical to SEQ ID NO: 13406

SEQ ID NO: 22256 - protein, 139 aa, Glycine max; identical to SEQ ID NO: 13407

SEQ ID NO: 22257 - protein, 122 aa, Glycine max; identical to SEQ ID NO: 12754

SEQ ID NO: 22258 - DNA, 1479 bp, Glycine max
atttttttcttcctgtgcaatgaaattccagttattgatccattctgatttttgccattaaatcactcaggttcgttggctgggttatgcttccagctatgacacgtgggagccaatagaaggattgagtgattgcaaggaagctatgaaagattttgtgacaaaaggctacaagaaaagattattgcctcttcctggtgatgctaactttatttgcggtggacccccatgccaaggagtaagcggtttcaaccgcttcaggaatgcagcagctccattagaggacacaaagaataagcagttgcttgtttacatggatattattgattttttgaagccaaaatatgtcctcatggagaatgttgttgatattttgaggttttccggtggttatctggggcgttatgccatatgccgtcttgtagctatgaattatcaagcaagaatgggcatgatggcagcagggtcttatggccttccacaatttcgtatgcgtgttttcctttggggagctcgtcctactgagaaattgcctccatatccgttaccaacacatgaggtggtgtcaagaggttccgttcccactgaatttgaagaaattacagtagcttatgataaaaaggatacctgtcatctggctggcgctcttttacttgaggatgcaatatcagatctaccacatagatggtgggtagtatggctagtgctcaaagcgcaccagatagaatactatatgatcatcgtcctctgcagttgaacaaagatgattatgaaagagtttgccagattccccagaagaagggtgcaaacttcagagatctacctggtgtacttgtgaatggcaacaaagttcaatgggatccatcggttcaaagagtgatgctagactctgggaagcctttggttcctgattatgctatgacatttgtccgtgggacatctagcaagccatttggtcgtttgtggtgggatgaaattgtgtcaacagtggtgacaagggccgagcctcacaaccaggccattctccaccctacacaaaaccgagtacttaccattagagagaatgcgagactacaagggtttcctgattgctataaactttgtgggcctgtcaaagagaggtacatacaagttggaaatgctgttgctgttcctgttgctctagcattgggatacacatttggtttggcctgccagggattattgtcggatgataatcccttgacaaccctccccttcaagtatccaagttgtcttgccctttcatctcttgcagaaactgagaatgataacgaatcaagttgagattgttcccacacaatcccgttctctgtcattgccatgttaaacttgtccatatttccaactttccattttaatgcaagagtgagtgtacactaaaaggccgaaattttgtatcaataatgattgtatgtacactaatgacattgttcataatgatataagattcactttggt

SEQ ID NO: 22259 - protein, 206 aa, Glycine max
MVGSMASAQSAPDRILYDHRPLQLNKDDYERVCQIPQKKGANFRDLPGVLVNGNKVQWDPSVQRVMLDSGKPLVPDYAMTFVRGTSSKPFGRLWWDEIVSTVVTRAEPHNQAILHPTQNRVLTIRENARLQGFPDCYKLCGPVKERYIQVGNAVAVPVALALGYTFGLACQGLLSDDNPLTTLPFKYPSCLALSSLAETENDNESS

SEQ ID NO: 22260 - protein, 203 aa, Glycine max
MKDFVTKGYKKRLLPLPGDANFICGGPPCQGVSGFNRFRNAAAPLEDTKNKQLLVYMDIIDFLKPKYVLMENVVDILRFSGGYLGRYAICRLVAMNYQARMGMMAAGSYGLPQFRMRVFLWGARPTEKLPPYPLPTHEVVSRGSVPTEFEEITVAYDKKDTCHLAGALLLEDAISDLPHRWWVVWLVLKAHQIEYYMIIVLCS

SEQ ID NO: 22261 - protein, 202 aa, Glycine max
MASAQSAPDRILYDHRPLQLNKDDYERVCQIPQKKGANFRDLPGVLVNGNKVQWDPSVQRVMLDSGKPLVPDYAMTFVRGTSSKPFGRLWWDEIVSTVVTRAEPHNQAILHPTQNRVLTIRENARLQGFPDCYKLCGPVKERYIQVGNAVAVPVALALGYTFGLACQGLLSDDNPLTTLPFKYPSCLALSSLAETENDNESS

SEQ ID NO: 22262 - DNA, 1099 bp, Glycine max
attctgtacaatctgcccctgttgctgctgtttgtgcacctgttcctatacaacctagtgaaagccatatttcagttgctaattacatccatccctctacaagtggatgtgctggattgacctctgtatcatgtgtatcagaattgatgccatcttgctcgacacatccttcagcacctagcaatccagttggcactgtatcatgtgtatcagaattgattccctcttgctcggaaccacatcatttgccatcaaacaatcaagttggctctgtttcatgtgtttcagaattcatgccctcttgctcggcacatccttcagcaccaaacagtcaagttggctctgtttcacgtgtttcagaattcatgccatcttgctcggcacatccttcagcaccaaactgtcaagttggctctgtgtcatctgcatcagaattgatgccctcattctcagaccatccttcagcaccaagcaatcaagttggctctgtatcttgtgtaccagaattgatgacctcttgctcagcacatccttcagctccaaataatcaagttgacaatgacattctatctttgcttgattgtttctttgaagatgatgacacattggctgtgaaagaaaacaacagaattgagaacattgatgatcctgatcaggcaaacaatgccgatggtgcactgtgttcagatccaaatgctatttttgaggagttaggagaccttaacagcttggttggattgggtgaaggcagtttttcctgtggccagaaaaatgaatatactacaagcgaaatgctttatactgttgatatattcgggtcttgtgaccatgacttcttggagttgcttgacctagagacaccgcagctctggctgaataaacatggaagtggtagccaagataagtaaggctaaaaaattgagggaagtatcacagcaaattgattgaactatagccccaagtacctaaccttgattagaataaacaaaggattctcttcctgttcttcatttaaaaaccatcatggcaccagttacttcgcatcatatcaactgacaagaatgttgattaaaatctagtgatgttctttgattgtgtt

SEQ ID NO: 22263 - protein, 301 aa, Glycine max
SVQSAPVAAVCAPVPIQPSESHISVANYIHPSTSGCAGLTSVSCVSELMPSCSTHPSAPSNPVGTVSCVSELIPSCSEPHHLPSNNQVGSVSCVSEFMPSCSAHPSAPNSQVGSVSRVSEFMPSCSAHPSAPNCQVGSVSSASELMPSFSDHPSAPSNQVGSVSCVPELMTSCSAHPSAPNNQVDNDILSLLDCFFEDDDTLAVKENNRIENIDDPDQANNADGALCSDPNAIFEELGDLNSLVGLGEGSFSCGQKNEYTTSEMLYTVDIFGSCDHDFLELLDLETPQLWLNKHGSGSQDK

SEQ ID NO: 22264 - protein, 253 aa, Glycine max
MPSCSTHPSAPSNPVGTVSCVSELIPSCSEPHHLPSNNQVGSVSCVSEFMPSCSAHPSAPNSQVGSVSRVSEFMPSCSAHPSAPNCQVGSVSSASELMPSFSDHPSAPSNQVGSVSCVPELMTSCSAHPSAPNNQVDNDILSLLDCFFEDDDTLAVKENNRIENIDDPDQANNADGALCSDPNAIFEELGDLNSLVGLGEGSFSCGQKNEYTTSEMLYTVDIFGSCDHDFLELLDLETPQLWLNKHGSGSQDK

SEQ ID NO: 22265 - protein, 204 aa, Glycine max
MPSCSAHPSAPNSQVGSVSRVSEFMPSCSAHPSAPNCQVGSVSSASELMPSFSDHPSAPSNQVGSVSCVPELMTSCSAHPSAPNNQVDNDILSLLDCFFEDDDTLAVKENNRIENIDDPDQANNADGALCSDPNAIFEELGDLNSLVGLGEGSFSCGQKNEYTTSEMLYTVDIFGSCDHDFLELLDLETPQLWLNKHGSGSQDK

SEQ ID NO: 22266 - DNA, 1469 bp, Glycine max
ggccgaaggtttatttaagtttcgttttcggttgttcttcttcgcagtctctcaagcagccagcatttattctctcaccacttcaccatccagatccagatcaaatggcagccatggctatgttgcgtttatcaccactctctggtcaaaaccatgcactttctttcccatcatcaccatcaccaccacctaagcttcagaaccgtcctctgtatctcaccaatttgcctcatttgccccaaaggttgaaactttccttcgccggcggcgacggcggagatggggtgggacgtggtggcggtggcggtggcggaggtgaaagctggggtgatgaaggaaaacccaaagattcatcttttggaattttgggtctttttctgaacggttggagatcaagggttgccgctgatccacaattccctttcaaggttttgatggaggagttggtgggtgtgagtgcttgtgtattaggtgacatggcttcaaggcctaattttgggttgaatgaacttgactttgtcttttcaactttggtggttggggcaatcctcaatttcactctcatgtatctattggcacctaccatgacatcatcagcagcatcaaatctacccgccctatttgcttcatgccccaagagtcacatgtttgagcctggtgccttttctcttttggataggttaggaaccttggtgtacaaagggaccattttttctgttgttggctttggtgctggattagttggaaccacactttcaaatgggctgatcaagatgaggaagaagatggatccaacctttgagaccccaaacaagcctccaccaacctttttgaatgctctaacttgggctggtcacatgggggttagcagcaatttgaggtaccagactctgaatggagttgagttcatgttggagagggtgcttaaccccttggctttcaagtcctcagtgttggtgctgaggtgtgtgaacaatgttattgggggcatgtcttttgtggtgctggcaaggttgactggggcacagagtgttggaggggagcagaagaaggagaatgaggttgctttgattgctgagaaggagaagttggagtcagagagggaagaagggttgcagaataatcagtcgacagcaccatcaaagtgatggcatcactcactttggcttgtttcagagaggtttgtcttttactttgaccagggttgttgttggggttggagaagctaaggtttttttttttatgaaaatgtgtcctaaggtcatatgatatgagtctctggcagcaccaaataagtgaaaagggtagattgagatttgagacctagtttgtgacatttgctgcttgtatgtatgttgctgaaacctgttacctgaaacaacaataacacgccaaattagtccggccatgtattggcccccccctcccccttttataaacaaaaaatatttaggccatgcggatttttt

SEQ ID NO: 22267 - protein, 381 aa, Glycine max
PKVYLSFVFGCSSSQSLKQPAFILSPLHHPDPDQMAAMAMLRLSPLSGQNHALSFPSSPSPPPKLQNRPLYLTNLPHLPQRLKLSFAGGDGGDGVGRGGGGGGGGESWGDEGKPKDSSFGILGLFLNGWRSRVAADPQFPFKVLMEELVGVSACVLGDMASRPNFGLNELDFVFSTLVVGAILNFTLMYLLAPTMTSSAASNLPALFASCPKSHMFEPGAFSLLDRLGTLVYKGTIFSVVGFGAGLVGTTLSNGLIKMRKKMDPTFETPNKPPPTFLNALTWAGHMGVSSNLRYQTLNGVEFMLERVLNPLAFKSSVLVLRCVNNVIGGMSFVVLARLTGAQSVGGEQKKENEVALIAEKEKLESEREEGLQNNQSTAPSK

SEQ ID NO: 22268 - protein, 347 aa, Glycine max
MAAMAMLRLSPLSGQNHALSFPSSPSPPPKLQNRPLYLTNLPHLPQRLKLSFAGGDGGDGVGRGGGGGGGGESWGDEGKPKDSSFGILGLFLNGWRSRVAADPQFPFKVLMEELVGVSACVLGDMASRPNFGLNELDFVFSTLVVGAILNFTLMYLLAPTMTSSAASNLPALFASCPKSHMFEPGAFSLLDRLGTLVYKGTIFSVVGFGAGLVGTTLSNGLIKMRKKMDPTFETPNKPPPTFLNALTWAGHMGVSSNLRYQTLNGVEFMLERVLNPLAFKSSVLVLRCVNNVIGGMSFVVLARLTGAQSVGGEQKKENEVALIAEKEKLESEREEGLQNNQSTAPSK

SEQ ID NO: 22269 - protein, 344 aa, Glycine max
MAMLRLSPLSGQNHALSFPSSPSPPPKLQNRPLYLTNLPHLPQRLKLSFAGGDGGDGVGRGGGGGGGGESWGDEGKPKDSSFGILGLFLNGWRSRVAADPQFPFKVLMEELVGVSACVLGDMASRPNFGLNELDFVFSTLVVGAILNFTLMYLLAPTMTSSAASNLPALFASCPKSHMFEPGAFSLLDRLGTLVYKGTIFSVVGFGAGLVGTTLSNGLIKMRKKMDPTFETPNKPPPTFLNALTWAGHMGVSSNLRYQTLNGVEFMLERVLNPLAFKSSVLVLRCVNNVIGGMSFVVLARLTGAQSVGGEQKKENEVALIAEKEKLESEREEGLQNNQSTAPSK

SEQ ID NO: 22270 - DNA, 1390 bp, Glycine max
aactccaacacgccctccaagcataaaatttgcaggattagacatttccagcaacacttgaagttgtcaatcaatggccatgaagccctcaacttccacaagtgggtctggcaagaagattagaaagccttatactattaccaaatctagggagagctggtctgaggaagagcacgacaagtttctcgaagctcttcaactatttgacagagattggaagaaaattgaagattttgttggttcaaaatcagttattcagattagaagtcatgcccagaagtacttcttgaaagttcaaaagagcgggacagtagcacatgtgcctcctcctcggcctaagcgcaaagcttctcatccttatccacaaaaggcatccaaaaatgttttgttgccaatgccagcttccatggtttatgtttcttccactagtacccttccaccagggtatgtcacatgggatgaaaattccttgctcatgaattctggatccaacaaatcagtgccttgtaaggatgagctcgccaatcttcttggaaatgaagctgatattggatcaaaggggataacacgaattgaccacagcagtcttagtggtgttgggaactctactagaaatctgcctgctactgagatgccaaaacaagggaaacaggctcaggttattcatggtttgccagattttgctgatgtttacagcttcattggaagtgtttttgatccagacacagaaggccatgtccagaagctgaaggaaatggatcctataaattttgaaactgttttgttgttaatgaaaaacctcactgtcaatttgtctagtcctgactttgagcccgttagggaggtcatgtcatcatacgatgtccatacaaaaacagtaggagttaccgcaggaattgacgtcaagaagcagacaaatgatctatcatgtcaaacagcttgacaaccattaattgaacttattatcaaatttggatggaagaccgaggttttgcccaaccagcagcattagcaatgcattcacattaactcgttgtgaaacttgaaaatgcaaccaaaccatcagcctatgtaaccacaaccaggagagtttgttttaatggaagtgctagcaaagccaaaaatatattcatcgggtaattctaaggtgcacaaggttttgtagtattgcagtgattctagtacttatttatggaatgtggttttcaagtagacacatgggtctaactgtaagataagtttgatggctcaggtgtattaattggagaggtggggggctagtcatagtagcttatatcaatgtggcctaactttcaatgtaaatcataaagagcatcataacaggaagtggtcccaatttctaattctacttacttttttttttagcatc

SEQ ID NO: 22271 - protein, 289 aa, Glycine max
MAMKPSTSTSGSGKKIRKPYTITKSRESWSEEEHDKFLEALQLFDRDWKKIEDFVGSKSVIQIRSHAQKYFLKVQKSGTVAHVPPPRPKRKASHPYPQKASKNVLLPMPASMVYVSSTSTLPPGYVTWDENSLLMNSGSNKSVPCKDELANLLGNEADIGSKGITRIDHSSLSGVGNSTRNLPATEMPKQGKQAQVIHGLPDFADVYSFIGSVFDPDTEGHVQKLKEMDPINFETVLLLMKNLTVNLSSPDFEPVREVMSSYDVHTKTVGVTAGIDVKKQTNDLSCQTA

SEQ ID NO: 22272 - protein, 287 aa, Glycine max
MKPSTSTSGSGKKIRKPYTITKSRESWSEEEHDKFLEALQLFDRDWKKIEDFVGSKSVIQIRSHAQKYFLKVQKSGTVAHVPPPRPKRKASHPYPQKASKNVLLPMPASMVYVSSTSTLPPGYVTWDENSLLMNSGSNKSVPCKDELANLLGNEADIGSKGITRIDHSSLSGVGNSTRNLPATEMPKQGKQAQVIHGLPDFADVYSFIGSVFDPDTEGHVQKLKEMDPINFETVLLLMKNLTVNLSSPDFEPVREVMSSYDVHTKTVGVTAGIDVKKQTNDLSCQTA

SEQ ID NO: 22273 - protein, 182 aa, Glycine max
MPASMVYVSSTSTLPPGYVTWDENSLLMNSGSNKSVPCKDELANLLGNEADIGSKGITRIDHSSLSGVGNSTRNLPATEMPKQGKQAQVIHGLPDFADVYSFIGSVFDPDTEGHVQKLKEMDPINFETVLLLMKNLTVNLSSPDFEPVREVMSSYDVHTKTVGVTAGIDVKKQTNDLSCQTA

SEQ ID NO: 22274 - DNA, 1389 bp, Glycine max
gaagagagagcgcattaccaaaccccccaaagaacacgttcactctcgattttgccttgcaaattgcgatttctctgcagtttcttccatcctccaactctgacctttcttgacgcgattttggtttttgtcaacttcttattgaaacccttcttcagtcttctcccatttccagagttcttataaattgatgctttttacaagtctttctgaacattccgtttccttcctccaggaaaagttagcgtgtccttaggtcacataggattttgagaaatttactttttaatttgcctctgaattaattctgcaagaagagagataatgtctggttcaaagaaatctcctttgaaggttgctaagcctagctctgctgaatcttggacgaatccatttgattctgatgatgagggaaaggatagcaaaaaatatagttcctctagaaaaacttcttcggagcgcgcacttgctacactggaagttaacaccaacccctttgatgatgatattgatgccaataagaaatcttcatcaacttcgtatgcctttcaatctgccaaccggaacaggtataagaatgattttcgtgactctggtggattagagaatcaatcggttcaagaactggagagttatgctgtttacaaggctgaagagactacaaattcagtcaacaattgtttgaagatagcagagaacataagagaggatgctaccaagacactagtcacccttgaacaacagggtgaacaaattaccaggagtcaccatgttgctgctgacattgatcacgatttaagtcggggagaaaagctcttgggaagccttggtggcctcttctccaaaacttggaaaccaaagaagacacgagcaataaccggccctgttattgttggagatgatccggtcaggagaaaggacaatcacttggagcagagagacaagttgggactgacctctgcacccaaagggcagtccaagctacggaccccccctccagaaccaacaaatgcacttgaaaaagttgaggttgaaaaaaagaagcaagatgatgcactatcagatttaagtgatctgttgggagagcttaaagacatggctgttgacatgggatccgagattgagaggcataacaaagccctgaatcatctatacgatgatgtggatgagttgaatttccgagtgaaaggtgctaatcaacgtggccgtcgtttgctcggaaaataagattgattgatttcatcattgtgtttttctctttgtatccatcatctggtttaatgaaggcaatcttttcatttagtttatacttgtgttgcattatatataaaatatgcaacagattaaataagtctgggtgcaatactacataattcaatttgttgattt

SEQ ID NO: 22275 - protein, 300 aa, Glycine max
MSGSKKSPLKVAKPSSAESWTNPFDSDDEGKDSKKYSSSRKTSSERALATLEVNTNPFDDDIDANKKSSSTSYAFQSANRNRYKNDFRDSGGLENQSVQELESYAVYKAEETTNSVNNCLKIAENIREDATKTLVTLEQQGEQITRSHHVAADIDHDLSRGEKLLGSLGGLFSKTWKPKKTRAITGPVIVGDDPVRRKDNHLEQRDKLGLTSAPKGQSKLRTPPPEPTNALEKVEVEKKKQDDALSDLSDLLGELKDMAVDMGSEIERHNKALNHLYDDVDELNFRVKGANQRGRRLLGK

SEQ ID NO: 22276 - DNA, 1206 bp, Glycine max
acgacacgccagccagatccacaaatcggaagaatcagagcgccgtcggaaaccgccgtccacggcggtgaaactcgccttcgcatcctctcgtcttcgaacccgaagcctctctcggttcctcactcttctcacatcgccaaaaactcaaattcacgatggaagagttggagcagtggaaggaacaactttcgcacttcgctaacctagctttggatcgtcttcgcgaggttcccccgaatcagctctacgctgctgctgcaatcgcgattttcacaactctgcttcttctctcaatacggttgttcaagcgcgcgaagtccaacaccattgttttgaccgggctcagtgggagtggaaaaactgttctcttctatcagcttagggatggctcaactcatcagggtacagttacatcgatggagcctaatgaaggcacttttattcttcacaatgagaaaaccaggaagggcaagataaagcctgttcatgttgttgatgttcctgggcattctcggcttcgacccaaactggatgagtacttgcctcaagcagctggggtagtttttgtagtagatgctttggactttttaccaaactgccgtgctgcttcagagtacctttatgatctattgactaaaggaagtgttgtgaggaagaagattccaatgcttattctctgcaacaaaacagacaaagtcactgctcatactaaagagtttatccgaaaacagatggagaaggaaatagacaaattacgggcatcaagaagtgcaatatcagcagctgacatcgcaaatgagttcaccctgggggtacccggtgagccgttttcttttacccagtgctctaacaaagtgacaactgcagacgcttctggtttaactggggaaatatctcagctggaagagtttatcagagaacatgtaaagcgatagctggatattgtgtttaaacttgcggatttttgttgaactgaatgaatatgtagcgttgctcttcttggttgttatttctttgatttcaaagaactgtctggataagaagaggcaaaaaagagaaaatggggttttgggggtggggttggggtgttcggagtaggaatcactatgttgggatcaatgaggatttacttcattttaagtcctggtatattgattggactataatgatttatcaaattgtatccatacttcatttactttt

SEQ ID NO: 22277 - protein, 259 aa, Glycine max
MEELEQWKEQLSHFANLALDRLREVPPNQLYAAAAIAIFTTLLLLSIRLFKRAKSNTIVLTGLSGSGKTVLFYQLRDGSTHQGTVTSMEPNEGTFILHNEKTRKGKIKPVHVVDVPGHSRLRPKLDEYLPQAAGVVFVVDALDFLPNCRAASEYLYDLLTKGSVVRKKIPMLILCNKTDKVTAHTKEFIRKQMEKEIDKLRASRSAISAADIANEFTLGVPGEPFSFTQCSNKVTTADASGLTGEISQLEEFIREHVKR

SEQ ID NO: 22278 - protein, 172 aa, Glycine max
MEPNEGTFILHNEKTRKGKIKPVHVVDVPGHSRLRPKLDEYLPQAAGVVFVVDALDFLPNCRAASEYLYDLLTKGSVVRKKIPMLILCNKTDKVTAHTKEFIRKQMEKEIDKLRASRSAISAADIANEFTLGVPGEPFSFTQCSNKVTTADASGLTGEISQLEEFIREHVKR

SEQ ID NO: 22279 - DNA, 1513 bp, Glycine max
gagaagaggatgaagggagagaagagttttgggagtggcggtgcgaagagtgggtccaaatttgggagtggaaagaaagggtttggtgggaaggcagggaaggatcatgatggtgaagttaaggagatgtgggatacaattgctgggggagattctgaggatgatcaagagggtctcaggaatgtggatgatgacaactttattgatgacactggagtggaacctgcttattatggtagtgatgaaccacgttctcccggtgatgctccccaggcagaggagggtgaagaggacgaagaaattaaggatcttttcaagataggtaagaaaaagaagaagaatgagagaagtcctgcagaaatagcttatttagttgagactgtcatggctgagcttgaggttacagctgaggaggatgctgaacttaatagacaggggaagcctgccgttaataaactcaagaagttgaatcttcttacagaagtcctctcaaagaaacagcttcaactggagtttttagatcatggagtgctaactttattgaagaattggcttgagccacttcctgatggaagcttgccaaatataaatatacgcacagaagttttgaagatattgaatgattttcctatagatctagagcagtatgatagaagagaacagctgaagaagagtggtcttgggaaggtcattatgtttctatcgaagtctgatgaagaaatcaatgtgaataggaaactagccaaggagctggttgataagtggagccggcctatatttaataagagtacccggtttgaagacatgagaaatgtggaggatgatagggttccttataggagattatcagttaaaaagccggcaaataaagctgcaggaatggaatctagagacagtgatcttgatttagaactttcacagcctaggtctggacagtcctcttctaggcagcatgcatcaaggccggaagcaacacctttggattttgtggtccggccccagtctaaaattgatccagaagaaattagagcacgagcaaaacaagctgcacaagatcagcagcgtatgaagatgaataagaaattgcagcaattgagggcaccaaaaaagaagcagcttcaggctacaaaattgagcgtggaaggtcgtggtatgatcaaatatttataaatgtgaccacgttgatactggatgggtttgtttgtcctgctgcaagcttttcatataatgtgctgcctgcattgatgtggattcttctaaaggtgggctattcgttcagtgatctacatggaaatttgatggagagggatgttatgaaaatacatccgtatgctgcatttgtgtattcatctagtgcagcaggaaatccaaaatacattggacggttatgcattcgtatatatagtcaagcttgtcatcagtttaatgaaaatgtggattttgcattcgtccttggtacaagtaatctttgtagtgcagcgctgcagcagtaataccaaccaaaatacactgg

SEQ ID NO: 22280 - protein, 389 aa, Glycine max
EKRMKGEKSFGSGGAKSGSKFGSGKKGFGGKAGKDHDGEVKEMWDTIAGGDSEDDQEGLRNVDDDNFIDDTGVEPAYYGSDEPRSPGDAPQAEEGEEDEEIKDLFKIGKKKKKNERSPAEIAYLVETVMAELEVTAEEDAELNRQGKPAVNKLKKLNLLTEVLSKKQLQLEFLDHGVLTLLKNWLEPLPDGSLPNINIRTEVLKILNDFPIDLEQYDRREQLKKSGLGKVIMFLSKSDEEINVNRKLAKELVDKWSRPIFNKSTRFEDMRNVEDDRVPYRRLSVKKPANKAAGMESRDSDLDLELSQPRSGQSSSRQHASRPEATPLDFVVRPQSKIDPEEIRARAKQAAQDQQRMKMNKKLQQLRAPKKKQLQATKLSVEGRGMIKYL

SEQ ID NO: 22281 - protein, 386 aa, Glycine max
MKGEKSFGSGGAKSGSKFGSGKKGFGGKAGKDHDGEVKEMWDTIAGGDSEDDQEGLRNVDDDNFIDDTGVEPAYYGSDEPRSPGDAPQAEEGEEDEEIKDLFKIGKKKKKNERSPAEIAYLVETVMAELEVTAEEDAELNRQGKPAVNKLKKLNLLTEVLSKKQLQLEFLDHGVLTLLKNWLEPLPDGSLPNINIRTEVLKILNDFPIDLEQYDRREQLKKSGLGKVIMFLSKSDEEINVNRKLAKELVDKWSRPIFNKSTRFEDMRNVEDDRVPYRRLSVKKPANKAAGMESRDSDLDLELSQPRSGQSSSRQHASRPEATPLDFVVRPQSKIDPEEIRARAKQAAQDQQRMKMNKKLQQLRAPKKKQLQATKLSVEGRGMIKYL

SEQ ID NO: 22282 - protein, 347 aa, Glycine max
MWDTIAGGDSEDDQEGLRNVDDDNFIDDTGVEPAYYGSDEPRSPGDAPQAEEGEEDEEIKDLFKIGKKKKKNERSPAEIAYLVETVMAELEVTAEEDAELNRQGKPAVNKLKKLNLLTEVLSKKQLQLEFLDHGVLTLLKNWLEPLPDGSLPNINIRTEVLKILNDFPIDLEQYDRREQLKKSGLGKVIMFLSKSDEEINVNRKLAKELVDKWSRPIFNKSTRFEDMRNVEDDRVPYRRLSVKKPANKAAGMESRDSDLDLELSQPRSGQSSSRQHASRPEATPLDFVVRPQSKIDPEEIRARAKQAAQDQQRMKMNKKLQQLRAPKKKQLQATKLSVEGRGMIKYL

SEQ ID NO: 22283 - DNA, 2000 bp, Glycine max
atacatgtgagctcacaactgccgaagaaaagatcaagctgtttcctctttggtgggctcgtgtgtgctttatttgttaaggaggactgccggaagcctgatgattcagagcaacaagctaatggcgaagaggctctgttttgcacattatgcaatgctgaggttcgcaaattcagtaaacactgcagaagctgtgacaagtgtgtggatggatttgatcatcattgtcggtggctgaataattgtgttgggcggaagaactacttcacgtttattgctctgatggcaatcagtctcctatggcttgcaattgaatttggagtgggcattgctgttcttgttctctgctttgtcgataagaattcaccaaggatccttcaagaaaagcttgggaatggcttgactcgtgctccatttgctgtgattgtaggtgtattcacacttctgtcattagtggcctgcgtacctttaggagaacttttcttcttccacatgatattgatcagaaaggggatctcaacctatgattatgtggttgcaatgagagctatgagtgaggggattccagaggacgaggaaggagcaaatatcatctattccccctcaaattcagcaacaaccggattcagtgttggaagttctcttggccttcaccacaagggtgcttggtgtacacctccaagaatatttattgatcaggatgaagtgattccacatttggaccctgggatggttccttcaaccgttgatcctgatgctgctggatacgctgaaagagcaaacaaagccaagaagccagtcaagattagtgcccggagccttgcaaagctggacagaaacgaggtgatgaaagctgcagcaaaagctcgggcatcatcctctgttctccgaccaatagatgcccgccatggccatgaagctgatattagctccagtggcaatgccagcgtcaggagtagcatgagcgttgactacagtgctacgaacgaatcaaggagtgagatgaggctgtctcctcaacacaactcatatccacagagtcttgcaagccaggatgactatgagactggcacacagactgcaagcagtttaagcaggccggtccacattcacaagcttgcccctcatgctcaatttcgtgcagcacctcatccagctccacctcctgaaaggcctgcgctagggattacaaggccacctgttcctgccacacatataagtaacaacccaatgttccagtcagccacatcatatgtcagggagaaccgaagagcctctgttgtctgggatcaagaggctggtcggtacgtgtcagtgcccatgcaaacaacaagaacaggacccggtgttgagctgcctgcaagaaacccaagtttcttggcgaatccaagtggtgaaccaggcaaccatgggagaaatcttgcacctgccaacacaacttcatcagcgattcctccggggcagccgtccgagaggttgacgtacacaggccaatcaatattctttggcgggccaatcctgagcaccactggcgtaaatgcagaaaggaatgaggcgggcacaagagtgcgtcctgagacaagcagagatcccaactcccaccagcgtgacatccgtggtgagaaggctcggacaggctccttcccattgtttgagcctaggaatttctagaagaacctgctttgttggcaagtgaccttgaccggctgttttactcctctctactatgtcgtctgctcaagtgccaccaccatgacagtgggggtgatgttgatgcactgcaccccttgcagagtcagggaactgctgaaatagttgacctggggtttcagcgatacatagataacgatgcttcttagagctttattatagcgagtgaggatggcgctaactttgtttgatgttttacaaactgactgatagtcgcagttttattttgcgtgcattaggagttgtgatgtttgatgcgcttggcatgtagtagaagagctgattaaact

SEQ ID NO: 22284 - protein, 556 aa, Glycine max
IHVSSQLPKKRSSCFLFGGLVCALFVKEDCRKPDDSEQQANGEEALFCTLCNAEVRKFSKHCRSCDKCVDGFDHHCRWLNNCVGRKNYFTFIALMAISLLWLAIEFGVGIAVLVLCFVDKNSPRILQEKLGNGLTRAPFAVIVGVFTLLSLVACVPLGELFFFHMILIRKGISTYDYVVAMRAMSEGIPEDEEGANIIYSPSNSATTGFSVGSSLGLHHKGAWCTPPRIFIDQDEVIPHLDPGMVPSTVDPDAAGYAERANKAKKPVKISARSLAKLDRNEVMKAAAKARASSSVLRPIDARHGHEADISSSGNASVRSSMSVDYSATNESRSEMRLSPQHNSYPQSLASQDDYETGTQTASSLSRPVHIHKLAPHAQFRAAPHPAPPPERPALGITRPPVPATHISNNPMFQSATSYVRENRRASVVWDQEAGRYVSVPMQTTRTGPGVELPARNPSFLANPSGEPGNHGRNLAPANTTSSAIPPGQPSERLTYTGQSIFFGGPILSTTGVNAERNEAGTRVRPETSRDPNSHQRDIRGEKARTGSFPLFEPRNF

SEQ ID NO: 22285 - protein, 462 aa, Glycine max
MAISLLWLAIEFGVGIAVLVLCFVDKNSPRILQEKLGNGLTRAPFAVIVGVFTLLSLVACVPLGELFFFHMILIRKGISTYDYVVAMRAMSEGIPEDEEGANIIYSPSNSATTGFSVGSSLGLHHKGAWCTPPRIFIDQDEVIPHLDPGMVPSTVDPDAAGYAERANKAKKPVKISARSLAKLDRNEVMKAAAKARASSSVLRPIDARHGHEADISSSGNASVRSSMSVDYSATNESRSEMRLSPQHNSYPQSLASQDDYETGTQTASSLSRPVHIHKLAPHAQFRAAPHPAPPPERPALGITRPPVPATHISNNPMFQSATSYVRENRRASVVWDQEAGRYVSVPMQTTRTGPGVELPARNPSFLANPSGEPGNHGRNLAPANTTSSAIPPGQPSERLTYTGQSIFFGGPILSTTGVNAERNEAGTRVRPETSRDPNSHQRDIRGEKARTGSFPLFEPRNF

SEQ ID NO: 22286 - protein, 392 aa, Glycine max
MILIRKGISTYDYVVAMRAMSEGIPEDEEGANIIYSPSNSATTGFSVGSSLGLHHKGAWCTPPRIFIDQDEVIPHLDPGMVPSTVDPDAAGYAERANKAKKPVKISARSLAKLDRNEVMKAAAKARASSSVLRPIDARHGHEADISSSGNASVRSSMSVDYSATNESRSEMRLSPQHNSYPQSLASQDDYETGTQTASSLSRPVHIHKLAPHAQFRAAPHPAPPPERPALGITRPPVPATHISNNPMFQSATSYVRENRRASVVWDQEAGRYVSVPMQTTRTGPGVELPARNPSFLANPSGEPGNHGRNLAPANTTSSAIPPGQPSERLTYTGQSIFFGGPILSTTGVNAERNEAGTRVRPETSRDPNSHQRDIRGEKARTGSFPLFEPRNF

SEQ ID NO: 22287 - DNA, 1296 bp, Glycine max
atttaccggagagaagggtgatgttggtccaccaggattgccaggtccagctggagagaagggtgatagaggtccaccaggattgccaggcattaacggaagagaaggagcgaaaggcgatattggtccaccaggagcagaaggattacctggcgcaccaggttatccgggagaaaaaggattaccagggccacgaggaagagatggacgtgatggattatttggatcgaagggtgacaaaggtgaaccaggattaatttcgccaccaggaccaccaggtacacctggtattccaggaagagatggaccaaaaggcgatcgcggattcccaggattaaagggtgatgaaggattacaaggtattcgtggcgaaaccggattgcaaggattacaaggtccaagaggtccaacaggaccaccaggatacaaaggtgaatttggattggttggagcaccgggtctcgatggacgacctggatcaagtggtccaaaaggtgatgctggtagagattgtacacatgcgccagattactatagtggtattttgttagtaaaacacagtcaaagcactgatactccacgttgtgacgatggacaaacacaattatgggatggttactcattattgtacgttgatggcaatgattatccacataatcaagatttaggatctccaggttcatgtgtacgacgattctcaacactgccagctttatcgtgtggcgttaacaatgtttgtaattatgcatcacgaaatgatcgaacattctggttatcaacaacagcaccaattccaatgatgccagttgctgatcgtgaaatggaaaaatacatttcacgttgtgttgtatgcgaaattccacaaaacgttatcacattacacagtcaaacaacatcagttccagactgtccatacggttgggaaggactttggcaaggatacagtttccttatgcataccggagttgccaacggaggtggtggtcaagcattatcaggaactggttcatgtttgcaagatttccgtaccaatccgttcattgaatgtaacggtggaaagggacattgtcacttctacgaaacaatgaccagtttctggttgttacacttgattcaagtgaacaatttacaaaaccattgcaacaaaccatcaaagcaggcagcttctattcacgattatccagatgtcaagtctgcataaagaaatagaaatgctgcatcagttgccgaaattatgttagaaacaaaaaaaaaatgaaattgttgttgttttacgattgaaacaatctaccttat

SEQ ID NO: 22288 - protein, 399 aa, Glycine max
FTGEKGDVGPPGLPGPAGEKGDRGPPGLPGINGREGAKGDIGPPGAEGLPGAPGYPGEKGLPGPRGRDGRDGLFGSKGDKGEPGLISPPGPPGTPGIPGRDGPKGDRGFPGLKGDEGLQGIRGETGLQGLQGPRGPTGPPGYKGEFGLVGAPGLDGRPGSSGPKGDAGRDCTHAPDYYSGILLVKHSQSTDTPRCDDGQTQLWDGYSLLYVDGNDYPHNQDLGSPGSCVRRFSTLPALSCGVNNVCNYASRNDRTFWLSTTAPIPMMPVADREMEKYISRCVVCEIPQNVITLHSQTTSVPDCPYGWEGLWQGYSFLMHTGVANGGGGQALSGTGSCLQDFRTNPFIECNGGKGHCHFYETMTSFWLLHLIQVNNLQNHCNKPSKQAASIHDYPDVKSA

SEQ ID NO: 22289 - DNA, 1227 bp, Glycine max
atgaagcttgggggaaggaagtcccaagcttgaaaggtggtactatagaggattacaaggactacaatgtggatgaagatcttaatgatgaggaagaatttgatgaatcagacaagtcacatcataatgaagctccagaatatagacgcctaattgcaattcatgctgggaagcctaaaggtggattagcagaatgcctcaaagtggatcctgataaagtgagacgtctaagtttaagtgagcaacagcttgaaaaggctgccataaatcatggacaacaaattgtcaggtttactcagcggaatatactaagggtgtatccaaaaggtactcgcattgactcatcaaattataacccattaattgggtggatgcatggagctcagatggttgcatttaacatgcaggggtatgggagatctctttggttgatgcatggaatgttcagagccaatggagggtgtggttatgttaaaaaaccaaattttctattggagactggtccagatgacgaggtcttcaatcctaaagctaagttacctgtgaagactactttgaaggtgactgtatatatgggggaaggatggtactatgatttcaagcatacacactttgatcaatattcacctccagacttctacacaagagtggggattgctggagtccctaatgatactataatgaagagaactaaggcaatagaggataactggttacctacatggaatgaggtattcgagttccctctcactgttccggagttggcgttgcttcgcatagaagttcatgagtatgacatgtctgagaaagatgactttggtggacaagcatgcctacctatctgggagcttagaagtggcattcgagcaattccactgcatagccaaaagggggataaatacaacactgtaaagcttctcatgcgctttgaatttattaataattgattctgtgcagtgcatgtgcatccttctgctctacattatcattattattattatgtacagtcattaagatgtgttagtagtaagagtttgtttgtagtagctggatgatatcgtaaaatgatgtaagaaataaaatgtgttgtgtattttgttttcttgaggagacttgtttgtcttgtaaggcttgtcaatataaacacaaggaaattattcgtgttttgtatgagatactttttaagtcatctgtactcatatcttggttttgatctttaaaaaaaaa

SEQ ID NO: 22290 - protein, 314 aa, Glycine max
EAWGKEVPSLKGGTIEDYKDYNVDEDLNDEEEFDESDKSHHNEAPEYRRLIAIHAGKPKGGLAECLKVDPDKVRRLSLSEQQLEKAAINHGQQIVRFTQRNILRVYPKGTRIDSSNYNPLIGWMHGAQMVAFNMQGYGRSLWLMHGMFRANGGCGYVKKPNFLLETGPDDEVFNPKAKLPVKTTLKVTVYMGEGWYYDFKHTHFDQYSPPDFYTRVGIAGVPNDTIMKRTKAIEDNWLPTWNEVFEFPLTVPELALLRIEVHEYDMSEKDDFGGQACLPIWELRSGIRAIPLHSQKGDKYNTVKLLMRFEFINN

SEQ ID NO: 22291 - protein, 191 aa, Glycine max
MHGAQMVAFNMQGYGRSLWLMHGMFRANGGCGYVKKPNFLLETGPDDEVFNPKAKLPVKTTLKVTVYMGEGWYYDFKHTHFDQYSPPDFYTRVGIAGVPNDTIMKRTKAIEDNWLPTWNEVFEFPLTVPELALLRIEVHEYDMSEKDDFGGQACLPIWELRSGIRAIPLHSQKGDKYNTVKLLMRFEFINN

SEQ ID NO: 22292 - protein, 186 aa, Glycine max
MVAFNMQGYGRSLWLMHGMFRANGGCGYVKKPNFLLETGPDDEVFNPKAKLPVKTTLKVTVYMGEGWYYDFKHTHFDQYSPPDFYTRVGIAGVPNDTIMKRTKAIEDNWLPTWNEVFEFPLTVPELALLRIEVHEYDMSEKDDFGGQACLPIWELRSGIRAIPLHSQKGDKYNTVKLLMRFEFINN

SEQ ID NO: 22293 - DNA, 1687 bp, Glycine max
gaagctatcacagctccagctcctggttccactttcgctcttcacaaaatgaaccgagtgataaagaagaccgtttcaaatatctgtgctctcaaggttccaagaaagtctttttgtagtactgagggtgtgaaagttgctggttgctctattccagaggtttccaatgaccatgagaagaagcaggctattagcaaagttattccacaatatgatattgctattgttggaggaggcatggttggcatggctttatcttttttcttggcaagtaatccaatgacaaagcagttgagtgttgcaattattgatagcaatccagctcttggaagtagcttgcacatcaagaaggaagatccccctgatccaagagtcagtacagtaactcctgcttctatttcttttctccaagatgctggtgcatggaaatatgttgagcaaaatagacgtgcttattttaatacaatgcaggtctgggattatactggtttggggtatgctagatatcatgcaagagatgtaaataaagactttctagggtgcgtggcagagaataaagtgctccataatgccttattgtcatgtgtaaaggattctgatttcaagacaacaatctatcctttgaggttaagttcaatgactttgaatacaagctctatgtctatggcggaggagaatccaacatccaaagaaccaccatctgctcaaggtcatggtgcagaactgcagcttagtgatggcagtagcatatatgcaaagttggtggttggcgctgatggaggaaaatcacatgttagggagttagcaggaatcaaaacaactggatggaattactcccagaatgcaataatctgcacggtggagcatacttatgaaaatgaatgtgcatggcaacgttttctaccaacaggtccaattgctcttttacccatgggtgataagtttagcaatattgtttggaccatgagcccaacagagtcaaataaccgcaagtcaattaccgaggaagaatttttaaaggatgtgaattatgctttagattatggacatggacctcatcctacatcaagcttatcaggaactcgagacgtgttctcttggtttaaaacggatgcaacactatcaactaatgaattctttgaaattcctccaaaagtaacaaggttggcatctgaaaggatggtgtttcctttgtctttaaggcatgccaattcctatgcattgaaacgtgtggttcttattggggatgcagcccacacagtccatcctcttgctggtcaaggagttaatttgggttttggagatgcattttctctttcaagaattattgcagaggggattgctttgggcactgatattggagaggtaaatatgttaaagaagtatgaagcagagagaaaaacagcaaatattatgatgatggcaatccttgatggcgtccaaaaagcctattctattgattttggaccttttaatattctgcgagctgcagccttccatggggcaaactatatatcaccactcaaaagaagtatcatttcctatgcttcaggggaacataaattacccattttcttctgaatacagaaatgtcatttaggttaagaagtggacctacaaaatgcagggtgagaatatcaactccctaacttatttaatatattcactttactttggagattaaaag

SEQ ID NO: 22294 - protein, 526 aa, Glycine max
EAITAPAPGSTFALHKMNRVIKKTVSNICALKVPRKSFCSTEGVKVAGCSIPEVSNDHEKKQAISKVIPQYDIAIVGGGMVGMALSFFLASNPMTKQLSVAIIDSNPALGSSLHIKKEDPPDPRVSTVTPASISFLQDAGAWKYVEQNRRAYFNTMQVWDYTGLGYARYHARDVNKDFLGCVAENKVLHNALLSCVKDSDFKTTIYPLRLSSMTLNTSSMSMAEENPTSKEPPSAQGHGAELQLSDGSSIYAKLVVGADGGKSHVRELAGIKTTGWNYSQNAIICTVEHTYENECAWQRFLPTGPIALLPMGDKFSNIVWTMSPTESNNRKSITEEEFLKDVNYALDYGHGPHPTSSLSGTRDVFSWFKTDATLSTNEFFEIPPKVTRLASERMVFPLSLRHANSYALKRVVLIGDAAHTVHPLAGQGVNLGFGDAFSLSRIIAEGIALGTDIGEVNMLKKYEAERKTANIMMMAILDGVQKAYSIDFGPFNILRAAAFHGANYISPLKRSIISYASGEHKLPIFF

SEQ ID NO: 22295 - protein, 510 aa, Glycine max
MNRVIKKTVSNICALKVPRKSFCSTEGVKVAGCSIPEVSNDHEKKQAISKVIPQYDIAIVGGGMVGMALSFFLASNPMTKQLSVAIIDSNPALGSSLHIKKEDPPDPRVSTVTPASISFLQDAGAWKYVEQNRRAYFNTMQVWDYTGLGYARYHARDVNKDFLGCVAENKVLHNALLSCVKDSDFKTTIYPLRLSSMTLNTSSMSMAEENPTSKEPPSAQGHGAELQLSDGSSIYAKLVVGADGGKSHVRELAGIKTTGWNYSQNAIICTVEHTYENECAWQRFLPTGPIALLPMGDKFSNIVWTMSPTESNNRKSITEEEFLKDVNYALDYGHGPHPTSSLSGTRDVFSWFKTDATLSTNEFFEIPPKVTRLASERMVFPLSLRHANSYALKRVVLIGDAAHTVHPLAGQGVNLGFGDAFSLSRIIAEGIALGTDIGEVNMLKKYEAERKTANIMMMAILDGVQKAYSIDFGPFNILRAAAFHGANYISPLKRSIISYASGEHKLPIFF

SEQ ID NO: 22296 - protein, 447 aa, Glycine max
MVGMALSFFLASNPMTKQLSVAIIDSNPALGSSLHIKKEDPPDPRVSTVTPASISFLQDAGAWKYVEQNRRAYFNTMQVWDYTGLGYARYHARDVNKDFLGCVAENKVLHNALLSCVKDSDFKTTIYPLRLSSMTLNTSSMSMAEENPTSKEPPSAQGHGAELQLSDGSSIYAKLVVGADGGKSHVRELAGIKTTGWNYSQNAIICTVEHTYENECAWQRFLPTGPIALLPMGDKFSNIVWTMSPTESNNRKSITEEEFLKDVNYALDYGHGPHPTSSLSGTRDVFSWFKTDATLSTNEFFEIPPKVTRLASERMVFPLSLRHANSYALKRVVLIGDAAHTVHPLAGQGVNLGFGDAFSLSRIIAEGIALGTDIGEVNMLKKYEAERKTANIMMMAILDGVQKAYSIDFGPFNILRAAAFHGANYISPLKRSIISYASGEHKLPIFF

SEQ ID NO: 22297 - DNA, 1159 bp, Glycine max
aatagatgctcattcatgatcatacctatggctgctgtttcttgcgtgtttcttttctttctttcttgtctatttctaaaatccatatctcaagccagcgcccagataatgttaaccgaatcctgtgataataacagcaacggcacctataacaccaatctcaacacccttttatctactctctcttccaacactgaaattaactatggtttctacaacttctcatatggtcaaaatgaagacaaagttaacgccattgggctctgcagaggagaccttaagccagatgagtgtcgtagttgtctcaacgatgccagaagcaatctcacagtcaattgtccaaaccaggaggaagagaaagagggaattttgcaccttgacaaatgcatgttgcgctactcaaatcgctcaatatttagcgtcatggagacttctcctacgctttatatgtggaattccaccaatgcaaccgacgtggatcagttcaatcaggtgctccagaacctgatgaggactctaactgagagagctgcatcgggtgactctcgtcgtaagtatgcagagggaagttcgtctgctccaaattttcaaaccatacatggtcttgtgcagtgtactcctgatttgtctcagcaagactgcaaacaatgcttggatcgtgtggctatctcacaaatcccaagttgttgcaatggcaagatcatgggtggtaaagttcttacaccaagttgtaatactagattcgaaacttaccggcatcttccgtcttcaaaaggaaatagcgacgcgtcacgaactgtactcctcgtcgccatggcagtgctagtcgttagcgttgatttggtgctcggttttatctgaaatgaaaactcgccaacttcactgcagctattatctatatggaaataattcttggacactcttttattaaagtattaccaataccaactaccaatcttttttttacaacttacactgaaattgcctttttctttcagtatatacatcttgagatatataggaagagaagggagataagattgatgatgtaacatcacagattaaaaaaaaaagttagatagataaaatgaaaggcattattagtaggatgtttgtaaattatagatgtctgtcaccattctatatatatccaccgttt

SEQ ID NO: 22298 - protein, 286 aa, Glycine max
NRCSFMIIPMAAVSCVFLFFLSCLFLKSISQASAQIMLTESCDNNSNGTYNTNLNTLLSTLSSNTEINYGFYNFSYGQNEDKVNAIGLCRGDLKPDECRSCLNDARSNLTVNCPNQEEEKEGILHLDKCMLRYSNRSIFSVMETSPTLYMWNSTNATDVDQFNQVLQNLMRTLTERAASGDSRRKYAEGSSSAPNFQTIHGLVQCTPDLSQQDCKQCLDRVAISQIPSCCNGKIMGGKVLTPSCNTRFETYRHLPSSKGNSDASRTVLLVAMAVLVVSVDLVLGFI

SEQ ID NO: 22299 - protein, 281 aa, Glycine max
MIIPMAAVSCVFLFFLSCLFLKSISQASAQIMLTESCDNNSNGTYNTNLNTLLSTLSSNTEINYGFYNFSYGQNEDKVNAIGLCRGDLKPDECRSCLNDARSNLTVNCPNQEEEKEGILHLDKCMLRYSNRSIFSVMETSPTLYMWNSTNATDVDQFNQVLQNLMRTLTERAASGDSRRKYAEGSSSAPNFQTIHGLVQCTPDLSQQDCKQCLDRVAISQIPSCCNGKIMGGKVLTPSCNTRFETYRHLPSSKGNSDASRTVLLVAMAVLVVSVDLVLGFI

SEQ ID NO: 22300 - protein, 277 aa, Glycine max
MAAVSCVFLFFLSCLFLKSISQASAQIMLTESCDNNSNGTYNTNLNTLLSTLSSNTEINYGFYNFSYGQNEDKVNAIGLCRGDLKPDECRSCLNDARSNLTVNCPNQEEEKEGILHLDKCMLRYSNRSIFSVMETSPTLYMWNSTNATDVDQFNQVLQNLMRTLTERAASGDSRRKYAEGSSSAPNFQTIHGLVQCTPDLSQQDCKQCLDRVAISQIPSCCNGKIMGGKVLTPSCNTRFETYRHLPSSKGNSDASRTVLLVAMAVLVVSVDLVLGFI

SEQ ID NO: 22301 - DNA, 1337 bp, Glycine max
ggcgaccacgtttgcaatttataaccttcctatccactctcttcaatttgttctgccatttggtaacactgttttcaccctttttctaatgctagtggttttctctctccctctctgcctctagtagttacaatttgcaaatagagtcatcatcatcatgtcacacccaaagggataaaaaaaaaaaaaaccaaaacttgtaacacatgggagttgttgaacaagaaatggaagaggaagagaaagaaaaacatacaaacaaccaagaccaaaacaaccataaccacccttcttctctccacccaattaaggaagagtgtgttagtgtgagaaaaccctttagtggtgatagagtgaagagagatgaatggagtgaaggggcagtgtcaaccctccttgaggcttatgaggccaaatgggtgctaagaaacagagccaaactcaagggccatgattgggaggatgtggcacggcacgtgtcggcacgtgccaactgcaccaaatcaccaaagacttcaacgcagtgtaagaacaaggttgagtccatgaagaagagatacagatcagaatcagcagcaacagcagatcatgcatcatcatcatggcctctttattcacggcttgatcttcttcttaggggaactggacccgtgttgtcgtcgccgccgccgccgccaccggcgatgatgccggcggcgatgccggttctgtctccggtggagccgtcgcaaccgccgcagctgtcgccgcctccggcggctccttcagggccacttgctaatgcacaaaactcgcatggatccaacggaattgatgagaagcttgctaaggaagatgggttaggaactaagtcatctgatcaagtatctagcaagaatccattggactcagatagcagcacgccagcactttatagcaagaaggacgggttaagatgcaacaagaggaagaagaaaacaattgacaacacagggcgaagaaggaaagagtgtgtggagatagcagaaagcttaagatggcttacagaagctatgataaggtctgaacaagcaagaatggacacaatgaaggagatagagaggatgagagttgaagctgaggccaaaagaggggaaatggaccttaagagaactgaaataattgccaatacacagttagagattgctaggatctttgcaagtgtcaacaataaaggtgttgattcatctctaagaattggaagaagttaagggtaggttatggaagataattaataaaaatgttattattgtatatgcacataaagttatcaaataatgctattaatataataaaatttgagtaaataacttatttcc

SEQ ID NO: 22302 - protein, 340 aa, Glycine max
MGVVEQEMEEEEKEKHTNNQDQNNHNHPSSLHPIKEECVSVRKPFSGDRVKRDEWSEGAVSTLLEAYEAKWVLRNRAKLKGHDWEDVARHVSARANCTKSPKTSTQCKNKVESMKKRYRSESAATADHASSSWPLYSRLDLLLRGTGPVLSSPPPPPPAMMPAAMPVLSPVEPSQPPQLSPPPAAPSGPLANAQNSHGSNGIDEKLAKEDGLGTKSSDQVSSKNPLDSDSSTPALYSKKDGLRCNKRKKKTIDNTGRRRKECVEIAESLRWLTEAMIRSEQARMDTMKEIERMRVEAEAKRGEMDLKRTEIIANTQLEIARIFASVNNKGVDSSLRIGRS

SEQ ID NO: 22303 - protein, 333 aa, Glycine max
MEEEEKEKHTNNQDQNNHNHPSSLHPIKEECVSVRKPFSGDRVKRDEWSEGAVSTLLEAYEAKWVLRNRAKLKGHDWEDVARHVSARANCTKSPKTSTQCKNKVESMKKRYRSESAATADHASSSWPLYSRLDLLLRGTGPVLSSPPPPPPAMMPAAMPVLSPVEPSQPPQLSPPPAAPSGPLANAQNSHGSNGIDEKLAKEDGLGTKSSDQVSSKNPLDSDSSTPALYSKKDGLRCNKRKKKTIDNTGRRRKECVEIAESLRWLTEAMIRSEQARMDTMKEIERMRVEAEAKRGEMDLKRTEIIANTQLEIARIFASVNNKGVDSSLRIGRS

SEQ ID NO: 22304 - protein, 227 aa, Glycine max
MKKRYRSESAATADHASSSWPLYSRLDLLLRGTGPVLSSPPPPPPAMMPAAMPVLSPVEPSQPPQLSPPPAAPSGPLANAQNSHGSNGIDEKLAKEDGLGTKSSDQVSSKNPLDSDSSTPALYSKKDGLRCNKRKKKTIDNTGRRRKECVEIAESLRWLTEAMIRSEQARMDTMKEIERMRVEAEAKRGEMDLKRTEIIANTQLEIARIFASVNNKGVDSSLRIGRS

SEQ ID NO: 22305 - DNA, 1546 bp, Glycine max
atactttgcagtttgattcatgggaagagcctgcagagttggaatatgtaaagctgcatggggtttctgtgtttctcatgccatctgggatgctgggaacgctcctttctctagttgatgttttgcctctattctctaacactgcatggggtcagaatgccaacttagatttcctaaagaaacacatgggagctacatttgagaagcgcaatcagccttggcgtgcaactattgatcctgcagatgttcattctggagattttttagctgtgtcaaagatccgtggtaggtggggaggttttgagacactagaaaagtgggtaactggtgcatttgctggtcatacagcagtttgcttgaaggatgaaattggaaatttatgggttggtgaatctgggcatgagaatgaaaagggtgaagaaataatagtggtaattccctggcatgaatggtggacattagctcttaaagataattccaacccacagatagccttgcttcccctgcatccagagctgcgtgcaagattcaactcgactgctgcatgggaatatgcacggagcatgtctggcaagccatatggttatcataatatgatattcagttggattgacacagtagctgacaactatcctccacctcttgatgctcacttggtaatttctgtcatgtctatgtggacaagaatgcagccagcttatgctgcaaacatgtggaatgaagcgctgaacaagcggttagggactgaggatttggatttgcacgacattctaattgagactgagaagcgtgggatagcttttgatcaattacttacaattcctgaacaagatgaatgggtatacagtgatgggaaatcaacaacatgtgttgcctttattctttcaatgtataaagcggctggaatattcggccctatttctagctccattcaagtaactgaattcacaattcgtgatgcatacatgcttaggatttttgaggataaccaaacacgtctaccaagatggtgcaacaatgagaacgatcggcttccattctgccagattcttggtgaatataggatggaattgcctggctataacaccttggatccatatgccaatatgaacgagcactgtccttcccttcctccaacttatgataggccattgaaatgttagatacgtctcttctccggcattaccattttctgatttgtctgttatccgtgatctcatggcacctaatagtttgctgttgtggaattgtctacaaaccgagggagaaagtgcagtacggaacttcaccttagccttctcaagttgactaaggggcattgtatataagaaatttatattggtgggatagtgtgatgttttattgacttaaattatcaattataagaggataattacctatgcttcgtgatgatttatgttctactatctcaatgaaggaaacatgtcagtaaagatcattgtaattatggcttgaaatcttcgttctgaattggagttggagagaccttttgtattcactgtttggaaataaaatttgattatcg

SEQ ID NO: 22306 - protein, 386 aa, Glycine max
TLQFDSWEEPAELEYVKLHGVSVFLMPSGMLGTLLSLVDVLPLFSNTAWGQNANLDFLKKHMGATFEKRNQPWRATIDPADVHSGDFLAVSKIRGRWGGFETLEKWVTGAFAGHTAVCLKDEIGNLWVGESGHENEKGEEIIVVIPWHEWWTLALKDNSNPQIALLPLHPELRARFNSTAAWEYARSMSGKPYGYHNMIFSWIDTVADNYPPPLDAHLVISVMSMWTRMQPAYAANMWNEALNKRLGTEDLDLHDILIETEKRGIAFDQLLTIPEQDEWVYSDGKSTTCVAFILSMYKAAGIFGPISSSIQVTEFTIRDAYMLRIFEDNQTRLPRWCNNENDRLPFCQILGEYRMELPGYNTLDPYANMNEHCPSLPPTYDRPLKC

SEQ ID NO: 22307 - protein, 361 aa, Glycine max
MPSGMLGTLLSLVDVLPLFSNTAWGQNANLDFLKKHMGATFEKRNQPWRATIDPADVHSGDFLAVSKIRGRWGGFETLEKWVTGAFAGHTAVCLKDEIGNLWVGESGHENEKGEEIIVVIPWHEWWTLALKDNSNPQIALLPLHPELRARFNSTAAWEYARSMSGKPYGYHNMIFSWIDTVADNYPPPLDAHLVISVMSMWTRMQPAYAANMWNEALNKRLGTEDLDLHDILIETEKRGIAFDQLLTIPEQDEWVYSDGKSTTCVAFILSMYKAAGIFGPISSSIQVTEFTIRDAYMLRIFEDNQTRLPRWCNNENDRLPFCQILGEYRMELPGYNTLDPYANMNEHCPSLPPTYDRPLKC

SEQ ID NO: 22308 - protein, 357 aa, Glycine max
MLGTLLSLVDVLPLFSNTAWGQNANLDFLKKHMGATFEKRNQPWRATIDPADVHSGDFLAVSKIRGRWGGFETLEKWVTGAFAGHTAVCLKDEIGNLWVGESGHENEKGEEIIVVIPWHEWWTLALKDNSNPQIALLPLHPELRARFNSTAAWEYARSMSGKPYGYHNMIFSWIDTVADNYPPPLDAHLVISVMSMWTRMQPAYAANMWNEALNKRLGTEDLDLHDILIETEKRGIAFDQLLTIPEQDEWVYSDGKSTTCVAFILSMYKAAGIFGPISSSIQVTEFTIRDAYMLRIFEDNQTRLPRWCNNENDRLPFCQILGEYRMELPGYNTLDPYANMNEHCPSLPPTYDRPLKC

SEQ ID NO: 22309 - DNA, 1486 bp, Glycine max
gacttcagacacagggccttttcatttttgttctatgaaggagaaaatcaagaattgaatgcttcacaaatagtggattctcattcttttccacaacactttttcccattgaaagaagaggttggcctagctcctgctgcaattgttgaatctcgaagggaaccttgcgatgcattagttttgagacaacttgattacaataggaagccaaggcccatgtctcctgcaatagtagctgcaaggaaaagaaatggcaatttcctgaaagaaaatgaagatccagactttgtgaaaaacccctaccaagcaattgtcatggctagagattccctgaagcaaagagaggaaactacaaaaatgcaggctgaaatacagaagatagatgatgaagtgaatgaaatgaagctcaaaaatgaggaagaaaaactcgctattcaagacctggaaatggcacttataaaacgtagaaggaaggcagaaaagtgcagacggttggctgaggctcaatcttcttacaggactatgctagagaagatgattagagattctatgcaccagagtgtcatttataaggaacaggtaagattgaaccaggctgcaagtaatgcactaatggctagacttgaagcccagagggaaatttgtgatgctgcagagaaagatcttcacaagaaatacaaacaaagagatgacatagagaaacagattagacctgaatgggagcaaggaaggaagaggtcgagaatagatgatgccacctatgaagagagagacagtaaacctgctctttatttgcctgggcctataccaagaacacctttgcacaaggagctcggagtgtttttagaggaggaacaaaggtcatccgaagttgacttatctgcaaacgaagaagagcaaaagcaggaagaaaaagaagagaagatgaaaatgccagataataatgacctagaagagaagcttgaagagcataccaaatcaagtgttgcattggatgaagaaaactcaattgagcaaagacttcagaagctcaaaatcagcgaaggcaagaggagttatggcatttcattctcaggtcttcataagacagcaactgaggaagatgaagaaaccagaaagcaacgtggaagagggaatgtggagaagtggcttcaaatgcttttagagaatggtcaacaacaagaaagaactgatccactagaaacaagtgaaaatgcttcttgtggaactgaagaaaaaataatccaacaactgaatcagaagttcccacaaaaggagttgaagatctcaaaagtttcagattctgattataaagagaaccagctgcaacttcttcaaaacaggaacggatggacagagaaagaggatagaatagaaaacgaagctagaagtgttatgccgacaggatacaaaaattactctggagaagcttgcataggtgctaattgcactcttaatgttgaagggatggaaagaaaggaacaac

SEQ ID NO: 22310 - protein, 495 aa, Glycine max
DFRHRAFSFLFYEGENQELNASQIVDSHSFPQHFFPLKEEVGLAPAAIVESRREPCDALVLRQLDYNRKPRPMSPAIVAARKRNGNFLKENEDPDFVKNPYQAIVMARDSLKQREETTKMQAEIQKIDDEVNEMKLKNEEEKLAIQDLEMALIKRRRKAEKCRRLAEAQSSYRTMLEKMIRDSMHQSVIYKEQVRLNQAASNALMARLEAQREICDAAEKDLHKKYKQRDDIEKQIRPEWEQGRKRSRIDDATYEERDSKPALYLPGPIPRTPLHKELGVFLEEEQRSSEVDLSANEEEQKQEEKEEKMKMPDNNDLEEKLEEHTKSSVALDEENSIEQRLQKLKISEGKRSYGISFSGLHKTATEEDEETRKQRGRGNVEKWLQMLLENGQQQERTDPLETSENASCGTEEKIIQQLNQKFPQKELKISKVSDSDYKENQLQLLQNRNGWTEKEDRIENEARSVMPTGYKNYSGEACIGANCTLNVEGMERKEQ

SEQ ID NO: 22311 - protein, 423 aa, Glycine max
MSPAIVAARKRNGNFLKENEDPDFVKNPYQAIVMARDSLKQREETTKMQAEIQKIDDEVNEMKLKNEEEKLAIQDLEMALIKRRRKAEKCRRLAEAQSSYRTMLEKMIRDSMHQSVIYKEQVRLNQAASNALMARLEAQREICDAAEKDLHKKYKQRDDIEKQIRPEWEQGRKRSRIDDATYEERDSKPALYLPGPIPRTPLHKELGVFLEEEQRSSEVDLSANEEEQKQEEKEEKMKMPDNNDLEEKLEEHTKSSVALDEENSIEQRLQKLKISEGKRSYGISFSGLHKTATEEDEETRKQRGRGNVEKWLQMLLENGQQQERTDPLETSENASCGTEEKIIQQLNQKFPQKELKISKVSDSDYKENQLQLLQNRNGWTEKEDRIENEARSVMPTGYKNYSGEACIGANCTLNVEGMERKEQ

SEQ ID NO: 22312 - protein, 390 aa, Glycine max
MARDSLKQREETTKMQAEIQKIDDEVNEMKLKNEEEKLAIQDLEMALIKRRRKAEKCRRLAEAQSSYRTMLEKMIRDSMHQSVIYKEQVRLNQAASNALMARLEAQREICDAAEKDLHKKYKQRDDIEKQIRPEWEQGRKRSRIDDATYEERDSKPALYLPGPIPRTPLHKELGVFLEEEQRSSEVDLSANEEEQKQEEKEEKMKMPDNNDLEEKLEEHTKSSVALDEENSIEQRLQKLKISEGKRSYGISFSGLHKTATEEDEETRKQRGRGNVEKWLQMLLENGQQQERTDPLETSENASCGTEEKIIQQLNQKFPQKELKISKVSDSDYKENQLQLLQNRNGWTEKEDRIENEARSVMPTGYKNYSGEACIGANCTLNVEGMERKEQ

SEQ ID NO: 22313 - DNA, 1392 bp, Glycine max
ataaagaatgaagtgatgatgagtttatttaaagctcttgatgactattctgttgataatagaggtgatgtaggttcttgggttcgtgaggctgcattagatggcctagaaaaatgtacatacatgctctgtaagatagacaagtcagtttgtttgtctggaagatctgatggaaatgaaattgagcctattgcacatccctcaattgatagcatgcttaagaacaaccaagagctttctttatttgatgagaatcttgctaccaatttagttggaggaatttgtaagcaagctgtggagaagatggataagctgagagaagcagcagcaaatgttctctacagaattttgtacaaccagataattcatattccatatatacctttccgagaaaagttagaagaaatcattcctaaggaagcaaatgcacaatggggtgttccttcctattcttacccacgctttatacagttacttcaatttggttgttatagcagagatgtgctatcaggtttagttatatctattggtgggttgcaagattctttgaagagggtatcactctccgcgctgttagagtatctagaagaggttgaatctgaagaccctaatacaagaacatctaggttatacatgctatctgctgatatcctgtgggttctccaacaatacaagaaatctgacagagttatcgtacctactttaaagaccattgagattctgttcagcaaaaagatattccttaatatggaggctcacactccagctttttgtggtgctgttttggattctgtgtcatttgaagtaaagggatcaaaagacttctctaagttgtatgctggtattgcaatacttggttatgtagctgcagttcaggaacctatcaatatgagggccttttcgcaacttcttaactttcttggtcatcgttaccctaagattcgaaaagcttcagctgaacaactgtaccttgtcctcttggaaaatgggaatcttgtggctgaagacaagattgataaagcacttgaaattatttctgagacttgctgggatggcgatatggattcagctaaacaccaaagattaaaattgtatgagattgtaggtctggaggtggggtcacttggcaataatagtgatggaacatcaaggaaaaccagcagtaagaagcctgcaaacttagatgaaaatgcttcatattcctcattagttgagtcatccgggttctaatttttgttgattcaatcccaggtttgctgttgtataatgtaacttcctatagttgatatgaaattttcatgtgcattggtcaatttccaatcatactggtgtcctcaatggatgttatgcatttactagattaattctaaagcaatagagctttgagggaag

SEQ ID NO: 22314 - protein, 409 aa, Glycine max
IKNEVMMSLFKALDDYSVDNRGDVGSWVREAALDGLEKCTYMLCKIDKSVCLSGRSDGNEIEPIAHPSIDSMLKNNQELSLFDENLATNLVGGICKQAVEKMDKLREAAANVLYRILYNQIIHIPYIPFREKLEEIIPKEANAQWGVPSYSYPRFIQLLQFGCYSRDVLSGLVISIGGLQDSLKRVSLSALLEYLEEVESEDPNTRTSRLYMLSADILWVLQQYKKSDRVIVPTLKTIEILFSKKIFLNMEAHTPAFCGAVLDSVSFEVKGSKDFSKLYAGIAILGYVAAVQEPINMRAFSQLLNFLGHRYPKIRKASAEQLYLVLLENGNLVAEDKIDKALEIISETCWDGDMDSAKHQRLKLYEIVGLEVGSLGNNSDGTSRKTSSKKPANLDENASYSSLVESSGF

SEQ ID NO: 22315 - protein, 404 aa, Glycine max
MMSLFKALDDYSVDNRGDVGSWVREAALDGLEKCTYMLCKIDKSVCLSGRSDGNEIEPIAHPSIDSMLKNNQELSLFDENLATNLVGGICKQAVEKMDKLREAAANVLYRILYNQIIHIPYIPFREKLEEIIPKEANAQWGVPSYSYPRFIQLLQFGCYSRDVLSGLVISIGGLQDSLKRVSLSALLEYLEEVESEDPNTRTSRLYMLSADILWVLQQYKKSDRVIVPTLKTIEILFSKKIFLNMEAHTPAFCGAVLDSVSFEVKGSKDFSKLYAGIAILGYVAAVQEPINMRAFSQLLNFLGHRYPKIRKASAEQLYLVLLENGNLVAEDKIDKALEIISETCWDGDMDSAKHQRLKLYEIVGLEVGSLGNNSDGTSRKTSSKKPANLDENASYSSLVESSGF

SEQ ID NO: 22316 - protein, 403 aa, Glycine max
MSLFKALDDYSVDNRGDVGSWVREAALDGLEKCTYMLCKIDKSVCLSGRSDGNEIEPIAHPSIDSMLKNNQELSLFDENLATNLVGGICKQAVEKMDKLREAAANVLYRILYNQIIHIPYIPFREKLEEIIPKEANAQWGVPSYSYPRFIQLLQFGCYSRDVLSGLVISIGGLQDSLKRVSLSALLEYLEEVESEDPNTRTSRLYMLSADILWVLQQYKKSDRVIVPTLKTIEILFSKKIFLNMEAHTPAFCGAVLDSVSFEVKGSKDFSKLYAGIAILGYVAAVQEPINMRAFSQLLNFLGHRYPKIRKASAEQLYLVLLENGNLVAEDKIDKALEIISETCWDGDMDSAKHQRLKLYEIVGLEVGSLGNNSDGTSRKTSSKKPANLDENASYSSLVESSGF

SEQ ID NO: 22317 - DNA, 1699 bp, Glycine max
aaaatgatcggcctgacaggagtacttctgagaaagactttgtaaaggaggtacacagtagtaagactaggatagatgaaaaaggtaacgagaatcaaataagaaaggatgaaagaaaccagaaaagggaaaaaacagattatggcagtgcggcaaaagaaagagtgaaagagcacagtttaaggcatggggagaaggcaaaggaatcagactcaaggaaaagatcctctcatgttgatgtcaaggatgataaaaaggaagcagaaaaatcccatagaggtagtgccactgacgatactagccggaaaagggagcatgcaaaggataagggggaacataaatcaaggcaaaaagatgcaagtaatcatgacaggcacagaagaagacgttcatcttcagtaagcagtagaggtagaaccaagaaggatcgtattaatcatgctgatgattcaagtggtgaaggatcagatggctcaaaaaggaagctgcattcaagaaagcatgacttatcaccgtctccggtcagatctaaaagaaggtattatttattaagagatccttacattgttcaggtttggaatattgaagtttgggtgtttcagcgcatctgatattttagttttttgtacagtatgatagttgacttattttgtaccttgtttctgtgagaaaatatttagcttatgacttttggcagtttgaggattctgaagccgataccatgccacagattcaatcatttgggtcttttttagttgaagttaaattatcttattgcatgttatatggaatgtttttcataatgttcaagtttgtagtaataatcgcattttcatgcatcttttctctactgtgatcgatcaattatccatctgctatatattataagacataatataagagcaaaaaacttttgattttgtgcagaaattatccataattgtaaggatatctgcaccctgaatctaagatatgtaggtacatttgtagtttctggtaaacgtttgactgattctgatcatactcattagaaacagataggatgtattgtaataggcttcttccaatggagtgttgacactgtaccaggttgagttgtatttatgaacttttgtatactttaaactcaccaagtcagtacggtggtttcatttttagacaacttttgcggtctcctcatagcaagcattctcagcgcaggcattctccctatacttctcttgattcttccaggtttgttgccagagtttttcaagattaagatttatgtttttcagacaaacttccatcatcatataagattaagctgcacaggtgaatttgtcaggcttcatatttatgttacaatggtgccttgtttatttactgtaacccttttatgcaggggaaggaggtcaagatccagatcacctgttcggcggcagaaatgaatggatggggacagagatggttgactttgcatttaaggggttcgttcaagaggacataaattcggaggcgtagggcgaagcttgtgatggtctgcaaagggaattttgattaaaaattaataggtagcgatgacttttcccatttttgtaggttcaataaaatgactgttattttcctgatttgctagtgttctttagggagaagtataaaactgggcagggttggacatgtgctgtaatatgttttgatgtaaaaaagaaacggaaaa

SEQ ID NO: 22318 - protein, 202 aa, Glycine max
NDRPDRSTSEKDFVKEVHSSKTRIDEKGNENQIRKDERNQKREKTDYGSAAKERVKEHSLRHGEKAKESDSRKRSSHVDVKDDKKEAEKSHRGSATDDTSRKREHAKDKGEHKSRQKDASNHDRHRRRRSSSVSSRGRTKKDRINHADDSSGEGSDGSKRKLHSRKHDLSPSPVRSKRRYYLLRDPYIVQVWNIEVWVFQRI

SEQ ID NO: 22319 - DNA, 1280 bp, Glycine max
ggaagacagtagtactgcaacctcaacctctgagaagagtgaggtggttgtgagggagcgagaacatccagagaatatgtcagaggcagaagcagagtacaatgccctccttgatggtttaggtcctcggtttgttggatggtggggtacagggattcttcctgttgatgctgatttgcttccccggacagttccaggttacaaaacaccttttaggcttcttcctactgggatgcgttctcggctaacaaatgcagagatgaccaatttaaggaagcttgcaaaatcacttccttgtcattttgccttagggagaaatagaaatcaccaaggtctggcatgtgctattcttaagctttgggagaaaagtttagttgcaaagattgctgtcaaacgtgggatccagaacacaaacaatgaactgatggctgaggagctgaagatgttaactggagggaccttgctgctaaggaataaatatttcattgttatataccgtgggaaagactttgttccaacaagtgtggctgcagttttagctgaaagagaggaattgacaaaacaggtacaggatgttgaagacaaggtgcggtgcagagcagttgatgcaattccattggggcaaggtgaagcaacggcacaggctgggactttagcagagttttatgaggcccaggctcgatggggaagggaaatatctcctgaagaacgtgagaagatggtggaagaagctgccaaaaccaagactgctaagcttgtcagacaaattgaacataaaatatttatagcccagactaaaaagcttagagcagaaaagctcttagccaaaatagaagcatctatggttccagctggtcctgattatgatcaggaaacaatcacagatgaagaacgtgttatgtttcgtaaagttggtttaagaatgaagccatacttaccacttggtatacgtggtgtttttgatggtgttgtcgagaatatgcatttgcattggaaacaccgagaactagtaaaattgatgacaaaacaaaagactgttgcttttgttgaagacacagcaaggttacttgaatatgagagtgggggaatactggtggcaatagagaaagtttccaaagaatttgctcttatttactatcgtggaaagaattataaacgtccaattactcttaggcctaggaacctgctaacaaagggaaaggcattaaagcgtcatgtagccatgcaacgtcatgaggctctgagtcagcatattactgaattggaaaaaactatagaac

SEQ ID NO: 22320 - protein, 426 aa, Glycine max
EDSSTATSTSEKSEVVVREREHPENMSEAEAEYNALLDGLGPRFVGWWGTGILPVDADLLPRTVPGYKTPFRLLPTGMRSRLTNAEMTNLRKLAKSLPCHFALGRNRNHQGLACAILKLWEKSLVAKIAVKRGIQNTNNELMAEELKMLTGGTLLLRNKYFIVIYRGKDFVPTSVAAVLAEREELTKQVQDVEDKVRCRAVDAIPLGQGEATAQAGTLAEFYEAQARWGREISPEEREKMVEEAAKTKTAKLVRQIEHKIFIAQTKKLRAEKLLAKIEASMVPAGPDYDQETITDEERVMFRKVGLRMKPYLPLGIRGVFDGVVENMHLHWKHRELVKLMTKQKTVAFVEDTARLLEYESGGILVAIEKVSKEFALIYYRGKNYKRPITLRPRNLLTKGKALKRHVAMQRHEALSQHITELEKTIE

SEQ ID NO: 22321 - protein, 401 aa, Glycine max
MSEAEAEYNALLDGLGPRFVGWWGTGILPVDADLLPRTVPGYKTPFRLLPTGMRSRLTNAEMTNLRKLAKSLPCHFALGRNRNHQGLACAILKLWEKSLVAKIAVKRGIQNTNNELMAEELKMLTGGTLLLRNKYFIVIYRGKDFVPTSVAAVLAEREELTKQVQDVEDKVRCRAVDAIPLGQGEATAQAGTLAEFYEAQARWGREISPEEREKMVEEAAKTKTAKLVRQIEHKIFIAQTKKLRAEKLLAKIEASMVPAGPDYDQETITDEERVMFRKVGLRMKPYLPLGIRGVFDGVVENMHLHWKHRELVKLMTKQKTVAFVEDTARLLEYESGGILVAIEKVSKEFALIYYRGKNYKRPITLRPRNLLTKGKALKRHVAMQRHEALSQHITELEKTIE

SEQ ID NO: 22322 - protein, 349 aa, Glycine max
MRSRLTNAEMTNLRKLAKSLPCHFALGRNRNHQGLACAILKLWEKSLVAKIAVKRGIQNTNNELMAEELKMLTGGTLLLRNKYFIVIYRGKDFVPTSVAAVLAEREELTKQVQDVEDKVRCRAVDAIPLGQGEATAQAGTLAEFYEAQARWGREISPEEREKMVEEAAKTKTAKLVRQIEHKIFIAQTKKLRAEKLLAKIEASMVPAGPDYDQETITDEERVMFRKVGLRMKPYLPLGIRGVFDGVVENMHLHWKHRELVKLMTKQKTVAFVEDTARLLEYESGGILVAIEKVSKEFALIYYRGKNYKRPITLRPRNLLTKGKALKRHVAMQRHEALSQHITELEKTIE

SEQ ID NO: 22323 - DNA, 1503 bp, Glycine max
gacttgtgcctgaagctttaaatgtcatgatggagatgaagtcacataatgttttcccaacctcaatcagttataacatactgctttcttgtctagggaagaccagaagagttaaggaatcttgtcaaatacttgaaacaatgaaaatttctggttgtgatcctgattgggtcagctattatcttgtggcaaaggtgttgtttctgagtggcaggtttggtaaagggaaagagatggtggatcaaatgattggaaaaggtttggtgccaaaccataagttttactacagtttgattggtattctctgtggggttgaaagggtaaattatgctcttgaactgtttgagaaaatgaagaaaagctcaatgggaggttatggaccagtatatgatgtgctcattccaaagctttgtagaggaggggattttgaaaagggaagagagctttgggatgaagcctcaggtatgggcatcactcttcagtgctcagaggatgttttagatccttcaataacagaagtttacaaacctacaaggccagaaaaaagcagccatgtggacagctcaagagccaagtctccacaaaaacttacaaagttttcagggaaaatgaagatgagaaaaaaaacagctgcaatgaagaagaaaaagaagtaaaaaagtctactgcaacttaattatggcaaagcagattagttatatttcacaatatgaagcataaacgcagacaagagtcacaactcatggcaccacatgatcactgacgaagtccaaattaaaaagacacgagatgcatatttatccaaagcagattatatagatacgatgtgttatttattcaaaacagattattgtttcagtttctgttcgctgaattacttcaagtttgtcttcgaatctccttgttccaggtaggacaataggacagtggcagagaggcggatgacacagtaatggagtttgagagagaaggagggagcgctgcaagatcaagaagatcttgaaacccctcacatgggccttgacaagcacatgtaactgaaggcgcaatatggggatattgtgggcccccctctgcctcactcacgttcccggttgcaactctccaatctaactttccacactatgcaagtggattccacgcggttcctattcatctattctatgttatgttatgtaatgtggttccttcttcctagaagatgcggacactaactaacaagtgcagtgcgtaacagagcatagacaaccatgggtccaatgccagaacgcccaaagcaaagctagctggattagactccatctacatctatagcataagcataccatacataaaaaagatgcattttaattaaattttagggataaacatgtttttaattcttaacaatagaataaagtttgtttttaattcctgaaaaataatttttttattcctcttttataaaaatgtgaattgtcaattattggtctcttattcacatataatgtatttccataaatg

SEQ ID NO: 22324 - protein, 217 aa, Glycine max
LVPEALNVMMEMKSHNVFPTSISYNILLSCLGKTRRVKESCQILETMKISGCDPDWVSYYLVAKVLFLSGRFGKGKEMVDQMIGKGLVPNHKFYYSLIGILCGVERVNYALELFEKMKKSSMGGYGPVYDVLIPKLCRGGDFEKGRELWDEASGMGITLQCSEDVLDPSITEVYKPTRPEKSSHVDSSRAKSPQKLTKFSGKMKMRKKTAAMKKKKK

SEQ ID NO: 22325 - protein, 209 aa, Glycine max
MMEMKSHNVFPTSISYNILLSCLGKTRRVKESCQILETMKISGCDPDWVSYYLVAKVLFLSGRFGKGKEMVDQMIGKGLVPNHKFYYSLIGILCGVERVNYALELFEKMKKSSMGGYGPVYDVLIPKLCRGGDFEKGRELWDEASGMGITLQCSEDVLDPSITEVYKPTRPEKSSHVDSSRAKSPQKLTKFSGKMKMRKKTAAMKKKKK

SEQ ID NO: 22326 - protein, 208 aa, Glycine max
MEMKSHNVFPTSISYNILLSCLGKTRRVKESCQILETMKISGCDPDWVSYYLVAKVLFLSGRFGKGKEMVDQMIGKGLVPNHKFYYSLIGILCGVERVNYALELFEKMKKSSMGGYGPVYDVLIPKLCRGGDFEKGRELWDEASGMGITLQCSEDVLDPSITEVYKPTRPEKSSHVDSSRAKSPQKLTKFSGKMKMRKKTAAMKKKKK

SEQ ID NO: 22327 - DNA, 1063 bp, Glycine max
aactgccattacaaatggtgttaggaaaggggcggttctgtgtacatcaacgtgttcacttatgaaccaaactttttggccccattcccatgcttcatcgtcaatggttttgggatgagatggttccatccaagacttaaaagacttcatggcccccatcttgcacacacgtactagtactacacatacacttttttcctttttccaaaatccctttgttgttgtagctacccttcagagcaaagagagagagagagagagagatgtctcttccaagacccagtgagggtaaagccccttctcagctgaaagaaggagtagcacctgctgctgctgaagcctcaacctcttcttcatggaataataggctaaacacttttcctcctttatctctacacaacaagaatagcaaaattgaagacagtgatgaggatatgttcacagttccagatgtggaagccacaccaattaatgttcattctgcagtgactcttcaaaatagtaaccttaatcaacgtaatgtaacagaccctcaatttcaatctggctttcctggaaagcgccgcaggggaagaaatcctgcagataaggaacatagacgcctcaagaggttgttgcggaatagggtctctgctcaacaagcccgcgaaagaaagaaggtttatgtgaatgacttggaatcaagagctaaagagatgcaagataaaaacgctatcttagaagagcgtatctctactttaatcaatgagaacaccatgctgcggaaggttcttatgaatgcgaggccaaaaaatgatgacagcattgaacaaaagcaagaccagttaagtaagagctaacaagcaaagctagagggtgcgtcaaagtaaggcattcaagagatgcatttatgatttattttagacactagaaattataaatttataaatatattattactttatttctttactcgttattatacttccctcaagactatagatttgaattaaaaagaaactttattgtgatgtaaagttttagtcagactatatataaaaagccatttacaatttgtcattct

SEQ ID NO: 22328 - protein, 191 aa, Glycine max
MSLPRPSEGKAPSQLKEGVAPAAAEASTSSSWNNRLNTFPPLSLHNKNSKIEDSDEDMFTVPDVEATPINVHSAVTLQNSNLNQRNVTDPQFQSGFPGKRRRGRNPADKEHRRLKRLLRNRVSAQQARERKKVYVNDLESRAKEMQDKNAILEERISTLINENTMLRKVLMNARPKNDDSIEQKQDQLSKS

SEQ ID NO: 22329 - protein, 134 aa, Glycine max
MFTVPDVEATPINVHSAVTLQNSNLNQRNVTDPQFQSGFPGKRRRGRNPADKEHRRLKRLLRNRVSAQQARERKKVYVNDLESRAKEMQDKNAILEERISTLINENTMLRKVLMNARPKNDDSIEQKQDQLSKS

SEQ ID NO: 22330 - DNA, 1353 bp, Glycine max
aaggtctggacagtggcgtggaaggcgaatcagccactggcactgaacaattaaccattaacaagaacaagaacatttcaagggaggacatagtaatggacatggttctgcattcagccttgtacccaccatctctgtcttgttcctcttctactactggaacaagatggcccaattcccgggttggtgttagtttgagttggaggagcttgtccttggtgccttgtgcactgaaggcatattatgattctgaattggagaataaaaagcatctacttctgacctctgtccaagacacgcaaaggggcctcttaacaactcctgatcaacgctcttgtatcgaggaggctctggtgagtctcgaaggatgcaacattggctctcaccctatcaatctctccaacttggatggaacatggcgcctccagtacacttctgcctctgatgttctcattcttctccaagctgctgctactcttcctttctttcaagttggacagatctttcaaaaatttgaatgtcgtgatcaatctaatggaggtgttatccgcaatgttgttcgatggagcattccaaatttgttagaggaacaagaaggtgctacactgcttgtatccgccaagtttaatgtagtatctgtccgtaatatctaccttcagtttcaagagatcacaatccaagatataaatattagtgaagagctgcaggctctaatagctccagcaatactaccaagatcttttataagtcttcagattttgcaatttctccgcactttcaaagcttaaatccctgtgagggatccaggaaggcaatcagttggaggactatattaccttagctatttggatgataatatgcttttgggtcgtgctgttggtggaggaggggtatttgtgtttacgagagcccaatctctctactgatgagcaccgagcaggagttaaaacttgtgtttgccagcaataacactcaatgagcctctgtttatagaagtgaccccatggagagagcaagaaattgattcaaagcatatagcgcataaggaattctgcaaagcttattgaagaaggctattatgtgcagttgtcgtgttgactttagtcgaactgcttttttgtttatgtatgtatatttgcattgtttgtatcaatttggttatatattggcaaagtacgaagatggtgagtgttcaatgtaagtgatacaactcgtgggaaaatgataaggagcccagtcctcgctatgtgcagtgtaggcatcttataattatgttatgttgcataggatagatagtattatgtctcttgttagttttcttatctagttagtttaatctgtgatttttaactt

SEQ ID NO: 22331 - protein, 261 aa, Glycine max
GLDSGVEGESATGTEQLTINKNKNISREDIVMDMVLHSALYPPSLSCSSSTTGTRWPNSRVGVSLSWRSLSLVPCALKAYYDSELENKKHLLLTSVQDTQRGLLTTPDQRSCIEEALVSLEGCNIGSHPINLSNLDGTWRLQYTSASDVLILLQAAATLPFFQVGQIFQKFECRDQSNGGVIRNVVRWSIPNLLEEQEGATLLVSAKFNVVSVRNIYLQFQEITIQDINISEELQALIAPAILPRSFISLQILQFLRTFKA

SEQ ID NO: 22332 - protein, 230 aa, Glycine max
MDMVLHSALYPPSLSCSSSTTGTRWPNSRVGVSLSWRSLSLVPCALKAYYDSELENKKHLLLTSVQDTQRGLLTTPDQRSCIEEALVSLEGCNIGSHPINLSNLDGTWRLQYTSASDVLILLQAAATLPFFQVGQIFQKFECRDQSNGGVIRNVVRWSIPNLLEEQEGATLLVSAKFNVVSVRNIYLQFQEITIQDINISEELQALIAPAILPRSFISLQILQFLRTFKA

SEQ ID NO: 22333 - protein, 228 aa, Glycine max
MVLHSALYPPSLSCSSSTTGTRWPNSRVGVSLSWRSLSLVPCALKAYYDSELENKKHLLLTSVQDTQRGLLTTPDQRSCIEEALVSLEGCNIGSHPINLSNLDGTWRLQYTSASDVLILLQAAATLPFFQVGQIFQKFECRDQSNGGVIRNVVRWSIPNLLEEQEGATLLVSAKFNVVSVRNIYLQFQEITIQDINISEELQALIAPAILPRSFISLQILQFLRTFKA

SEQ ID NO: 22334 - DNA, 1141 bp, Glycine max
atcgcttccacaccacaccctattcccaaacaaaaacaacacatcacggagccaccaaccatggcttccaagctctgcgactcatgcaaatccgccactgctaccttgtactgccgccctgacgccgcgttcctctgcggcgcctgcgattctaaggtccacgccgccaacaagctcgcgtcgcgccacccgcgcgtggcgctctgcgaggtgtgcgagcaggccccggcgcacgtaacctgcaaggctgatgccgccgcgctctgccttgcctgcgaccgcgacatccactccgccaaccccctcgccagccgccacgagcgcatccccgtctcaccgttcttcgagtccgtacactccgtcaaggcctcctcgccgatcaacttcctagatgaccaccgcttcttctccgacgccgatgctgacgtcagcaccgaggaggccgaggccgcctcctggctgcttcctaatccgaagacagatctaaattcctctcagtacttgttctccgaaaccgagccggttccttacatagatctggattatgctgccgtggatcctaaggcggagcagaaaagctccgccaccgccgacggcgtcgttcccgtgcagagcaacttcgagccattcgcctacggttacaagtacaataccactctctcacagtctcagatgagccagagtgtatcgtcgtcgtcgatggaggttggagtcgtgccggacgggaacacaatgtcggagacatcgaactgcagctacagcaaggtgcctccggtgacggtgacggtgacggcgcagttctcggcggcggatagggaggcgagagtgttgaggtacagggagaagaggaagaaccgtaagttcgagaagacgattcgttacgcatcgagaaaagcatatgcggaggcgaggccaaggatcaaagggaggtttgcgaaacgcactgacccggaccctctggctggatacggcgtcgttccgtcgtgttgatttcgctatgatgttaatcatatatatcattatatgaatatgaatgatgctgttgtttttgctgtatatacactatgctcttttcttttttgtttgaattatgcaatgtaaagttgcaaaaacacatttgtgatagattttgtagtttgtt

SEQ ID NO: 22335 - protein, 329 aa, Glycine max
IASTPHPIPKQKQHITEPPTMASKLCDSCKSATATLYCRPDAAFLCGACDSKVHAANKLASRHPRVALCEVCEQAPAHVTCKADAAALCLACDRDIHSANPLASRHERIPVSPFFESVHSVKASSPINFLDDHRFFSDADADVSTEEAEAASWLLPNPKTDLNSSQYLFSETEPVPYIDLDYAAVDPKAEQKSSATADGVVPVQSNFEPFAYGYKYNTTLSQSQMSQSVSSSSMEVGVVPDGNTMSETSNCSYSKVPPVTVTVTAQFSAADREARVLRYREKRKNRKFEKTIRYASRKAYAEARPRIKGRFAKRTDPDPLAGYGVVPSC

SEQ ID NO: 22336 - protein, 309 aa, Glycine max
MASKLCDSCKSATATLYCRPDAAFLCGACDSKVHAANKLASRHPRVALCEVCEQAPAHVTCKADAAALCLACDRDIHSANPLASRHERIPVSPFFESVHSVKASSPINFLDDHRFFSDADADVSTEEAEAASWLLPNPKTDLNSSQYLFSETEPVPYIDLDYAAVDPKAEQKSSATADGVVPVQSNFEPFAYGYKYNTTLSQSQMSQSVSSSSMEVGVVPDGNTMSETSNCSYSKVPPVTVTVTAQFSAADREARVLRYREKRKNRKFEKTIRYASRKAYAEARPRIKGRFAKRTDPDPLAGYGVVPSC

SEQ ID NO: 22337 - DNA, 1198 bp, Glycine max
atcatttcttttctcttgttatttgagtaacccattcattaatttccctaatcgaaatggagcagagggatcaaaaccaacggcccatggagtggtgtttagagattcattgggtggaagacacaaagtgtacctgaaggccgatccaaggaacgagataattgtttcagccggtgcacttggaagcccacaacttctaatgttgagtggaattggacccagagagcaccttaaagcccacaacatcagaataacattgaatcagccattagtaggacaggaaatgactgacaaccccatgaacgccatctttgtcccttctcctgtccccgtagaggtctctctgattgaggtggtgggcatcaccagttttggcagctacattgaagctgccagtggtgaaaactttgccggtggttctccaaaagactacggaatgttctcccccaagattgggcaactctccacggtgcctccaaaggaaaggaccccagaggccctggccaaggcaacagaactgatggaaactctagaacaagcagccttcagaggaggattcatattggaaaaaatcatgggtccaatctcaagcgggcatttggagctccgaacccgcgacccgaacgacaacccatcagtgaccttcaactacttccaggaccctcgagacttgcagcgatgcgtgcagggcctgagcaccgtggagaagataatcgagtccaaagctttctctcccttcagataccccaacatgccagtgcccgttctgctcaacctgaccgcaagtgcccccgttaacttgttgcccaagcacaccaattcttcactttctttggaacagtattgcagagacactgtcatgaccatttggcactaccacggtggctgccaagtagggaaggttcttgatagggactacaagcttcttggtgtggatgcactgcgtgttattgatggctccacctttaactactctcctggaactaatcctcaggccactgttatgatgcttggcaggtatatgggagtgaaaatattgagcgagagactaggtggtgcggctgctgctgctgaaacagagcaataagttgtatatttttcctttcaacaaagtgtcttcgtgtcactgaggaaaaacaaattcttgtgagaatgatttgtgaagtaacctttcaatgagaaaaataacaaattaaac

SEQ ID NO: 22338 - protein, 361 aa, Glycine max
SFLFSCYLSNPFINFPNRNGAEGSKPTAHGVVFRDSLGGRHKVYLKADPRNEIIVSAGALGSPQLLMLSGIGPREHLKAHNIRITLNQPLVGQEMTDNPMNAIFVPSPVPVEVSLIEVVGITSFGSYIEAASGENFAGGSPKDYGMFSPKIGQLSTVPPKERTPEALAKATELMETLEQAAFRGGFILEKIMGPISSGHLELRTRDPNDNPSVTFNYFQDPRDLQRCVQGLSTVEKIIESKAFSPFRYPNMPVPVLLNLTASAPVNLLPKHTNSSLSLEQYCRDTVMTIWHYHGGCQVGKVLDRDYKLLGVDALRVIDGSTFNYSPGTNPQATVMMLGRYMGVKILSERLGGAAAAAETEQ

SEQ ID NO: 22339 - protein, 295 aa, Glycine max
MLSGIGPREHLKAHNIRITLNQPLVGQEMTDNPMNAIFVPSPVPVEVSLIEVVGITSFGSYIEAASGENFAGGSPKDYGMFSPKIGQLSTVPPKERTPEALAKATELMETLEQAAFRGGFILEKIMGPISSGHLELRTRDPNDNPSVTFNYFQDPRDLQRCVQGLSTVEKIIESKAFSPFRYPNMPVPVLLNLTASAPVNLLPKHTNSSLSLEQYCRDTVMTIWHYHGGCQVGKVLDRDYKLLGVDALRVIDGSTFNYSPGTNPQATVMMLGRYMGVKILSERLGGAAAAAETEQ

SEQ ID NO: 22340 - protein, 267 aa, Glycine max
MTDNPMNAIFVPSPVPVEVSLIEVVGITSFGSYIEAASGENFAGGSPKDYGMFSPKIGQLSTVPPKERTPEALAKATELMETLEQAAFRGGFILEKIMGPISSGHLELRTRDPNDNPSVTFNYFQDPRDLQRCVQGLSTVEKIIESKAFSPFRYPNMPVPVLLNLTASAPVNLLPKHTNSSLSLEQYCRDTVMTIWHYHGGCQVGKVLDRDYKLLGVDALRVIDGSTFNYSPGTNPQATVMMLGRYMGVKILSERLGGAAAAAETEQ

SEQ ID NO: 22341 - DNA, 1720 bp, Glycine max
aacggatttctttcaaatcagaagtgaagaaggcggatggaaatgatgggattagcaaatactgttctgatgatgaagattcctcagatagtaagtggaagttggagctggcttggcttacaaaggcacttgaaccagctctgcaattttgtaggtgggctttgccaacacgaaatgaaattggaaacaaacccccaccaagcattcgatcccttacggaaataattgcctgcatccaacgaagtaagattggaatccaggattggagcttgagtgaccttacaattggcttgtatctgatctatcttcgtcaagcttctactcatccatttgaagatatcaaaggcattccgatattgtcagaatccattgttcaagatctcatttatcatattgagttggctaaaggtgcttatagggataacccttgtagtatttcaaggaacagcatgctacgagaaagtaatgtcaaaaagtttgttaaaaactccagtgtaatgaggcctgcatactatataggggttgatacccgtaaaaagcttgtaattttgggcattcgaggcacacatactttttatgatcttatcactgatattctttcctcaagtgatggtgaagtcacctatgaaggctattcaacccactttggcactgctgaatctgcacgttggtttctccgtcatgagattgaaatcataagaaaatgcttggagaaacatgagggatttaagttaagacttgtgggtcattctctgggaggggctatagcttctttattggcaataatgatccatagaaaatcatcaaaggagctgggttttagtcctgacattgtatctgctgttggatatggaactccaccatgtgtatctagagaacttgctgaaagctgctctggctatgtatcaacagttgtgatgcaggatgatattatacctagattgagtgtagcttccctagcaaggctccgaaatgaaattgttcaaactgattggatgagtgtaattgagaaagaagactggaaaagcatcacagatttggttacaaatgcaaaggaggttgtgtcttcagtgcaagatgttgctcgcaaacttgctgattatacaaatttcaggggaaacaaaagtttagctgttggtactactgataaggagttgccagttgctaccgaagcacctctgccctccgaagctgcaaaggagacttctggtgtcacgaaagttgcgggaactaaaactgcagtgatcgaggagttatttatacctgggactgtttactatcttaagaggaacttgggatcccaaattgatgctggaaaggattttttcaccctttacaagagggagcctggtgagcatttccagaaggtaatcttttcggggaattttatcacagaccacagatgtgatagccattattatgctttgagagatgtccttaaaggtgtgccatggtgtgggaaggaaggtatatttaaatagaaaatgttgttaattattttaatttaattttcccgtatcatttgattgtaataaaactgaacattgtgtagctgattttctgtgcttagggggtgccttacagttcttcagtctgtgcggaggtgttagcaatagcacagtagattagaagtttggcaatttaggctataaaatacataaaaaattgtggatagtttggttctatcataaataaaaaaatgctgaattgttgtgtctgt

SEQ ID NO: 22342 - protein, 492 aa, Glycine max
RISFKSEVKKADGNDGISKYCSDDEDSSDSKWKLELAWLTKALEPALQFCRWALPTRNEIGNKPPPSIRSLTEIIACIQRSKIGIQDWSLSDLTIGLYLIYLRQASTHPFEDIKGIPILSESIVQDLIYHIELAKGAYRDNPCSISRNSMLRESNVKKFVKNSSVMRPAYYIGVDTRKKLVILGIRGTHTFYDLITDILSSSDGEVTYEGYSTHFGTAESARWFLRHEIEIIRKCLEKHEGFKLRLVGHSLGGAIASLLAIMIHRKSSKELGFSPDIVSAVGYGTPPCVSRELAESCSGYVSTVVMQDDIIPRLSVASLARLRNEIVQTDWMSVIEKEDWKSITDLVTNAKEVVSSVQDVARKLADYTNFRGNKSLAVGTTDKELPVATEAPLPSEAAKETSGVTKVAGTKTAVIEELFIPGTVYYLKRNLGSQIDAGKDFFTLYKREPGEHFQKVIFSGNFITDHRCDSHYYALRDVLKGVPWCGKEGIFK

SEQ ID NO: 22343 - protein, 343 aa, Glycine max
MLRESNVKKFVKNSSVMRPAYYIGVDTRKKLVILGIRGTHTFYDLITDILSSSDGEVTYEGYSTHFGTAESARWFLRHEIEIIRKCLEKHEGFKLRLVGHSLGGAIASLLAIMIHRKSSKELGFSPDIVSAVGYGTPPCVSRELAESCSGYVSTVVMQDDIIPRLSVASLARLRNEIVQTDWMSVIEKEDWKSITDLVTNAKEVVSSVQDVARKLADYTNFRGNKSLAVGTTDKELPVATEAPLPSEAAKETSGVTKVAGTKTAVIEELFIPGTVYYLKRNLGSQIDAGKDFFTLYKREPGEHFQKVIFSGNFITDHRCDSHYYALRDVLKGVPWCGKEGIFK

SEQ ID NO: 22344 - protein, 327 aa, Glycine max
MRPAYYIGVDTRKKLVILGIRGTHTFYDLITDILSSSDGEVTYEGYSTHFGTAESARWFLRHEIEIIRKCLEKHEGFKLRLVGHSLGGAIASLLAIMIHRKSSKELGFSPDIVSAVGYGTPPCVSRELAESCSGYVSTVVMQDDIIPRLSVASLARLRNEIVQTDWMSVIEKEDWKSITDLVTNAKEVVSSVQDVARKLADYTNFRGNKSLAVGTTDKELPVATEAPLPSEAAKETSGVTKVAGTKTAVIEELFIPGTVYYLKRNLGSQIDAGKDFFTLYKREPGEHFQKVIFSGNFITDHRCDSHYYALRDVLKGVPWCGKEGIFK

SEQ ID NO: 22345 - DNA, 1382 bp, Glycine max
aaaaaacccctaaagtctcattcttcttccccgcagcgccgcacagactcatcaaactcgttgtgactgcagctgcacagattttcctcttctctgtgcctttgcgagaacgcgcgtttggtttcaattcaatggcgggaggtaaagcgaagaaggaaaaggggaagccccatcagcagcagaagcacatgccctaccaaggcggaatatcgttccacaaatcaaagggtcagcacattctcaagaaccccttgctcgtcgattccattgtggagaaggccggcgtcaagagcaccgacgtcatcctcgagatcggtcccgggaccggtaacttgacgaagaagcttctcgaagccggcaagaaggtcatcgccgtcgagatcgatccccggatggttctcgagctccagagacggttccagggtacccctcactccaatcgcctcacggttatccaaggtgatgtgttgaagactgaacttccttattttgacatttgtgttgcaaacattccctaccaaatatcttctcctctcacattcaagttactcaagcacgaacctgcttttagggctgcaatcataatgttccagagagaatttgccatgagactggttgctcagcccggtgataaactatattgtcgtctcacggtcaacactcaactacatgctcgagtcttccacctcctcaaagttggaagaaacaacttcaggccccctcccaaggtggattcctctgtggtgcgaattgagcccaggaaaccccgtattgaagttaagcaaaaggagtgggatgggtttttgcggatttgttttaacaggaagaacaaaacacttggttcgatatttaggcagaagagtgtgatctccttgcttgaaaaaaactataggactgtgcgggcactggaacttgggcaagaagattcactaaaggaagtggatgctaaaatggacttctctagttttggtgatgatcgaggtatggagatggatgatgatggagcagatgatgatgaaatggaagttgaggatggggaagcagatgaggtgcaatctgaattcaaggacaaggttttgggtgttctgaaagagggagattttgaagagaagaggtcatccaagctcacattgcaggaattcctatacctgctttctctgtttaacaaaactggcatacacttctattgattttagattatcaattttctcgatagtttcttccctatttaaatctacactattctttcaataggcttatcattattcagaagttttccaagagagagtgatatcaaaaactgttaactatttatgcattgtattttgttaagctccatcgtggatgtatactactctatataatctttaggaggtttgatc

SEQ ID NO: 22346 - protein, 395 aa, Glycine max
KTPKVSFFFPAAPHRLIKLVVTAAAQIFLFSVPLRERAFGFNSMAGGKAKKEKGKPHQQQKHMPYQGGISFHKSKGQHILKNPLLVDSIVEKAGVKSTDVILEIGPGTGNLTKKLLEAGKKVIAVEIDPRMVLELQRRFQGTPHSNRLTVIQGDVLKTELPYFDICVANIPYQISSPLTFKLLKHEPAFRAAIIMFQREFAMRLVAQPGDKLYCRLTVNTQLHARVFHLLKVGRNNFRPPPKVDSSVVRIEPRKPRIEVKQKEWDGFLRICFNRKNKTLGSIFRQKSVISLLEKNYRTVRALELGQEDSLKEVDAKMDFSSFGDDRGMEMDDDGADDDEMEVEDGEADEVQSEFKDKVLGVLKEGDFEEKRSSKLTLQEFLYLLSLFNKTGIHFY

SEQ ID NO: 22347 - protein, 352 aa, Glycine max
MAGGKAKKEKGKPHQQQKHMPYQGGISFHKSKGQHILKNPLLVDSIVEKAGVKSTDVILEIGPGTGNLTKKLLEAGKKVIAVEIDPRMVLELQRRFQGTPHSNRLTVIQGDVLKTELPYFDICVANIPYQISSPLTFKLLKHEPAFRAAIIMFQREFAMRLVAQPGDKLYCRLTVNTQLHARVFHLLKVGRNNFRPPPKVDSSVVRIEPRKPRIEVKQKEWDGFLRICFNRKNKTLGSIFRQKSVISLLEKNYRTVRALELGQEDSLKEVDAKMDFSSFGDDRGMEMDDDGADDDEMEVEDGEADEVQSEFKDKVLGVLKEGDFEEKRSSKLTLQEFLYLLSLFNKTGIHFY

SEQ ID NO: 22348 - protein, 333 aa, Glycine max
MPYQGGISFHKSKGQHILKNPLLVDSIVEKAGVKSTDVILEIGPGTGNLTKKLLEAGKKVIAVEIDPRMVLELQRRFQGTPHSNRLTVIQGDVLKTELPYFDICVANIPYQISSPLTFKLLKHEPAFRAAIIMFQREFAMRLVAQPGDKLYCRLTVNTQLHARVFHLLKVGRNNFRPPPKVDSSVVRIEPRKPRIEVKQKEWDGFLRICFNRKNKTLGSIFRQKSVISLLEKNYRTVRALELGQEDSLKEVDAKMDFSSFGDDRGMEMDDDGADDDEMEVEDGEADEVQSEFKDKVLGVLKEGDFEEKRSSKLTLQEFLYLLSLFNKTGIHFY

SEQ ID NO: 22349 - DNA, 1334 bp, Glycine max
agtatggggacttaaaacataaataaaatggacacaactataaggaccaagtgaatagttcaattcactttcaattgaactttgatgtttcattcattaaatatatcagtgggatctaagtacttgacatgttaaatcttcaggttgactatcttcttggtgacaacccaagagccactagctatatggtgggctatggaagcaacttcccacaaagggttcatcacagaggttcatccattgtttccatcaaggttaacccttcatttgtcagctgccgtggaggttatgctacttggtttagcagcaaaaggagcgacccgaacctgctcactggtgctcttgttggtggacctgatgcatatgatgactttgctgatgaaagagataactatgagcagacagagccagcaacctataacaatgctcctcttatcggtattctggcaagactaggtggaggtcatggtggctataaccagcttcttccagttgttgttccagctcctaagcctgttgttaccaagcctcaaccaacccccagtcccaagacaactccacctccagcttcgtggtcaggcccaatttccattgaacagaaaatgaccacctcgtggattgcccatggaataacttactacagatactcaacagtggtgactaacaaatctaacaagagtctcaattctttcaatctttcaatatccaagctttatggtccaatctggggtgtcacaaaatcaggtgattcatacacattcccatcatggctcagctcattatcagcaggcaaaagccttgaatttgtctacatccattctgcttcagcagcagatgtctccgtgacaaactacgtgttggcctgagagtgacatgggaatggtttactgctttgttgtgtaagattgtgtagccatacaaatgtgcagtgaggagagggtctttacgtttttccttctatattttgatgtcaaatcttcttcttcccttgtgtattttgcatttcagtaggttagatcaaaataggtagattatataagatggaaggaccggagcagaaaggagtgaagagacaaaaggcagagctcatcctctttcttctccgctttacaacttatatacagtgagtgatacaagacagacagtgaaacagtgttgttgagaagtttaaaaaacaaagtgaacttctcaatatttcagagaagagtcatctcttgtatttttcaacagctttggatgtcttttctgtgtttgatgttgtaagctttgcagcattttgtattctctacagagaaacagtttgtgctatatagtattatgtttttgtgctgtgc

SEQ ID NO: 22350 - protein, 245 aa, Glycine max
MLNLQVDYLLGDNPRATSYMVGYGSNFPQRVHHRGSSIVSIKVNPSFVSCRGGYATWFSSKRSDPNLLTGALVGGPDAYDDFADERDNYEQTEPATYNNAPLIGILARLGGGHGGYNQLLPVVVPAPKPVVTKPQPTPSPKTTPPPASWSGPISIEQKMTTSWIAHGITYYRYSTVVTNKSNKSLNSFNLSISKLYGPIWGVTKSGDSYTFPSWLSSLSAGKSLEFVYIHSASAADVSVTNYVLA

SEQ ID NO: 22351 - protein, 226 aa, Glycine max
MVGYGSNFPQRVHHRGSSIVSIKVNPSFVSCRGGYATWFSSKRSDPNLLTGALVGGPDAYDDFADERDNYEQTEPATYNNAPLIGILARLGGGHGGYNQLLPVVVPAPKPVVTKPQPTPSPKTTPPPASWSGPISIEQKMTTSWIAHGITYYRYSTVVTNKSNKSLNSFNLSISKLYGPIWGVTKSGDSYTFPSWLSSLSAGKSLEFVYIHSASAADVSVTNYVLA

SEQ ID NO: 22352 - DNA, 1592 bp, Glycine max
ttttttacaaaacttggatcttttctttcttaaaaccaaaggcacgctgaagcctcacaatagtgcaagtgatcccaaccaggttggcaccccacacgctatcattcatctgcagcacaccaagagatatagatctagttccttatgtcattgccatatcaagttctcattttgaacaatgacatatggatgttttctaaaattctacaacttactcttagtggagactatttatggttggagaaaattccatgtcattgtttgatttgagaacttgttaacaaggatataaatagcttgatataggttttgtcctatttttctttgatcaactatgccttctttctttgcaatctcaatttacaattggtgtgattcttaataatactaattaattcccatgaattaattgtcagagcatggttgcaatgatggtgaagcatctttaggttcaccccttgctggacgattgtttgtgctagttggtgcgggaggtgcagggaaagcactggcatttggtgctaaaagcagaggagctcgtctagtcatctttgacattgattttggtataaaacaaaggcacatatgttgtctactataaaatttaattttcctttgattctctctcgtgatagagttgaagttttaccaacatcaacatacctgtcacaccttccaattactttccccaaaaagtgccacaaagggtaggtggggtgggtggaattacagaaacacccttacctcaatctgcataactttgatcaatcaagtttaatactacctttttttttgttacgtcaagtttaataccttgatgtagcatattatagtttttcacgaatttcactgttatacaaaaactgctctatatctagagattatgttgcattgacatgttttcttattctcttgtgttcaaaaagatagagcaaaatctcttgcttgtgctgtatttggtgaagctcagcctttcaaagagttggtcaactttcagccagagaaaggggcaattcttgcgaatgcaacacctgtaggaatgcatcccaatacagacagaattcctgtggcagaggctactttggaagactaccggttagtctttgatgctgtgtatactccaagaagaaccagattgttgaacgaagcggatgctgcaggagcaataactgtggctggggtagaaatgttcctaaggcaggccattggtcagttcaatcttttcactggcctagaagcacctgaagaatttatgcgggaaattgttttatccaaattttgaaggcgccgctttcataaattgatcctacaacttgaaggaggctgcatgcctgcacctatcaagaaattcttgtatcacattgcataacatttttctttaaaaaaaatcccttatttttagttgggacgacaactataatgcaacataataaattgaaataataggcaaaatagcaaaagttgttgtgggcgcagctgaaagacatggttcaacttaatttgtggttttaggaataaaaatgttgtgattctctgaagaagaaaaaaatgttgtcatagcttcataggtaatattaacttgggccttacac

SEQ ID NO: 22353 - protein, 80 aa, Glycine max
MHPNTDRIPVAEATLEDYRLVFDAVYTPRRTRLLNEADAAGAITVAGVEMFLRQAIGQFNLFTGLEAPEEFMREIVLSKF

SEQ ID NO: 22354 - protein, 57 aa, Glycine max
FLQNLDLFFLKTKGTLKPHNSASDPNQVGTPHAIIHLQHTKRYRSSSLCHCHIKFSF

SEQ ID NO: 22355 - protein, 46 aa, Glycine max
MFSYSLVFKKIEQNLLLVLYLVKLSLSKSWSTFSQRKGQFLRMQHL

SEQ ID NO: 22356 - DNA, 1271 bp, Glycine max
ttttcggtctgccaggactgtggagaggagatccttcagaccttgagattgaacaaatgtttgaagtgggagagtgggtgaggttgaacgacaatgcaaataattggaaatcaattggagcaggtagtgttggtgtcgttcaaggaatagggtatgaaggagatgaattggacagaagcatttttgttggattttgtggggagcaagaaaagtgggtaggaccaagttcccatcttgaaagatttgacaaactctctgttggacagaaggttagagtaaaacaatatgtaaagcaaccgagatttggatggtcagggcatacccatgctagtattgggacgatacaagcaattgatgctgatggaaagcttcggatatacacaccagcaggatccaaaacatggatgttggacccatcagaagtgaaggtggtagaagagaaggagctctgtattggagactgggttagggttaaagcatcaatttcaaccccaacccaccattggggggaagtgagtcattcaagcattggggtggtgcatcggatggcagacgaggatttgtgggtggcgttctgttttacggagaggctatggctttgtaaggcgtgggaaatggaaagggttaggccatttaaagttggggacaaggtaaggatcagagatggactggtgaccccgcgatggggatggggaatggagacacatgccagcaagggacaggttgtaggtgtagatgcaaatggcaaactaagaataaaattccggtggagggaagggaggccctggataggagaccctgctgatcttgcccttgatgaggactgatgctgttttaggaacatggaaggttgtatcataactaaattttctcattcagctctttagcctatgtttttctgggctgagcttgtgcaaagtggaaagcttgatgtgctctgaaccataactcctttatgaaggttagaatgcagtttggccatacatgtattgatgttaataaacagagggggtgaaagaattgaagctgtggagataggaaaattggcttgctgacctagtgtggagatttgaaggcagctaaaacaaatattggcagttggctcatttatattcattactcacatgtttgtagtcccagattttgaggtgtatatcatatgtatgtttatttcatattgtacaaattgtactcaacagtcaacttaatgcattttttgactctccattatgcagttgcataattcttgaaatagaatttattccattaag

SEQ ID NO: 22357 - protein, 274 aa, Glycine max
FGLPGLWRGDPSDLEIEQMFEVGEWVRLNDNANNWKSIGAGSVGVVQGIGYEGDELDRSIFVGFCGEQEKWVGPSSHLERFDKLSVGQKVRVKQYVKQPRFGWSGHTHASIGTIQAIDADGKLRIYTPAGSKTWMLDPSEVKVVEEKELCIGDWVRVKASISTPTHHWGEVSHSSIGVVHRMADEDLWVAFCFTERLWLCKAWEMERVRPFKVGDKVRIRDGLVTPRWGWGMETHASKGQVVGVDANGKLRIKFRWREGRPWIGDPADLALDED

SEQ ID NO: 22358 - protein, 256 aa, Glycine max
MFEVGEWVRLNDNANNWKSIGAGSVGVVQGIGYEGDELDRSIFVGFCGEQEKWVGPSSHLERFDKLSVGQKVRVKQYVKQPRFGWSGHTHASIGTIQAIDADGKLRIYTPAGSKTWMLDPSEVKVVEEKELCIGDWVRVKASISTPTHHWGEVSHSSIGVVHRMADEDLWVAFCFTERLWLCKAWEMERVRPFKVGDKVRIRDGLVTPRWGWGMETHASKGQVVGVDANGKLRIKFRWREGRPWIGDPADLALDED

SEQ ID NO: 22359 - protein, 140 aa, Glycine max
MLDPSEVKVVEEKELCIGDWVRVKASISTPTHHWGEVSHSSIGVVHRMADEDLWVAFCFTERLWLCKAWEMERVRPFKVGDKVRIRDGLVTPRWGWGMETHASKGQVVGVDANGKLRIKFRWREGRPWIGDPADLALDED

SEQ ID NO: 22360 - DNA, 1204 bp, Glycine max
tcagctactagggccccccccccctgcccgcaaagggaaaggtgtcatcaccatcagattgccctattctggctctgcctgtggaataggctatgaagtccgagaagttgacagtaaagagtttctgtgcatatgcagtagcaaaattaaaattgaccgagttgggcttcttgaagatattagcagttctgtttattcgaagactgttcagctgctcatggatttgaaatcagatggaaataagtatcctccagctttggatcctgtgaaagatctaaagttgagagatgtgaaacttgtggcaacataccataagtggactagattattggagaagatgtcccagaatcagtgccatgggtgtataaaattggaagaacatctgaaattggcaaaggagataaagaaacacaaagaagaagtctatgctcttcagtttcaaatgtcagatgaagcacttaaacagatgcctgactttcagggccggattgatgttctgaagcaaattggatgcattgatgaagacctcgttgttcaaatgaaaggccgtgttgcttgtgagatgaattctggggaggaactgatatgtactgagtgcttgtttgagaaccaaatggatgaactggaaccagaagaagcagtggcgataatgtcagcttttgtgttccagcagaagaatacgtctgaaccttcactcacacccaagctgtctgaagcgaaacacagattataccaaacagctataagacttggagagctccaagcacactttaatctaccaataaaccctgctgagtatgcccaagaaaatctcaaatttggtctcgttgaagtggtttatgaatgggcaaagggtactccgtttgctgacatttgtgagctcactgatgttcctgaaggtctgatagtaaggaccattgtcaggttggacgagacatgtcgggagttcaaaaatgctgcagctattatgggtaattctgctctctgcaaaaaaatggaaattgcttctaatgcaataaagcgtgacattgtatttgcagctagcttgtatattactggcgtatgatcattattgaacatgctaatgttttgtatataatgaattccttgcataacttgtatgctccttaaatatgcaccttaccttttcttttttaacttctttgtattacaattttttttaaaaaaatgaatttcattgttg

SEQ ID NO: 22361 - protein, 354 aa, Glycine max
QLLGPPPPARKGKGVITIRLPYSGSACGIGYEVREVDSKEFLCICSSKIKIDRVGLLEDISSSVYSKTVQLLMDLKSDGNKYPPALDPVKDLKLRDVKLVATYHKWTRLLEKMSQNQCHGCIKLEEHLKLAKEIKKHKEEVYALQFQMSDEALKQMPDFQGRIDVLKQIGCIDEDLVVQMKGRVACEMNSGEELICTECLFENQMDELEPEEAVAIMSAFVFQQKNTSEPSLTPKLSEAKHRLYQTAIRLGELQAHFNLPINPAEYAQENLKFGLVEVVYEWAKGTPFADICELTDVPEGLIVRTIVRLDETCREFKNAAAIMGNSALCKKMEIASNAIKRDIVFAASLYITGV

SEQ ID NO: 22362 - protein, 282 aa, Glycine max
MDLKSDGNKYPPALDPVKDLKLRDVKLVATYHKWTRLLEKMSQNQCHGCIKLEEHLKLAKEIKKHKEEVYALQFQMSDEALKQMPDFQGRIDVLKQIGCIDEDLVVQMKGRVACEMNSGEELICTECLFENQMDELEPEEAVAIMSAFVFQQKNTSEPSLTPKLSEAKHRLYQTAIRLGELQAHFNLPINPAEYAQENLKFGLVEVVYEWAKGTPFADICELTDVPEGLIVRTIVRLDETCREFKNAAAIMGNSALCKKMEIASNAIKRDIVFAASLYITGV

SEQ ID NO: 22363 - protein, 242 aa, Glycine max
MSQNQCHGCIKLEEHLKLAKEIKKHKEEVYALQFQMSDEALKQMPDFQGRIDVLKQIGCIDEDLVVQMKGRVACEMNSGEELICTECLFENQMDELEPEEAVAIMSAFVFQQKNTSEPSLTPKLSEAKHRLYQTAIRLGELQAHFNLPINPAEYAQENLKFGLVEVVYEWAKGTPFADICELTDVPEGLIVRTIVRLDETCREFKNAAAIMGNSALCKKMEIASNAIKRDIVFAASLYITGV

SEQ ID NO: 22364 - DNA, 1218 bp, Glycine max
tcgggaagcgcctcaagctcctgcctccagcgtttggccacattcctgcattggtcgtgctcgatgtctccaccaatcaactctcggtgattcctgattcgatatccggattggcaaatctcgaggagcttaatctctcttccaatgctttggagtcactgccagattcaattggcttgttgcagaagttgaaattcctcaatgtgtctggaaacaagctcagtgctcttcctgattccatcagtcagtgcaggtcattggtggagctagatgcaggctttaatagcctgacatatttgccaacaaacattggatatgaattgcttaatttacagaagctcatgattcagctgaacaagattcggtctcttccctcatctgtttgcgagatgaaatccttgcgctatctggatgctcacttcaatgaactgcgcgggcttcctattgcaattgggaaattgactaatcttgaagttctaaacctgagcagcaacttcagtgaccttagagaacttccagagacatttggtgatctgattagcctcagggaattggacctcagcaacaaccaaattcatgcacttcctgacacatttggtcgccttgatagtttgaccaagctaaacttggaccagaatcctgttgaagttccacctatggagattgtgaatcaaggggtccaagccgtgaagagtttcatggtccagaggtggattgatatattggcagaggaagaaagaaaaagcacgcaagtgttgcaagaaggagagaatgactggttaacacgaagcacctcttggctgaagaatgtttctgaaaatgtaactgacatgattatgtcccccagaactcccaaggaatcttttcttgatcagcagctatgagcctatgaggtggtgctatcagctgccagatagctattccctgctcagccttctttggtttctgtttgctactgcatagtacctaacggaggctggatatttcctttatgctattaagaacagcagttttgtttacaggcaataggtacacgagacataatttactattttctattacattttttctccaacccttcggttgttttatacagtttgatccgaataaactccaaattgaaaaggctttcagtttgaacatctttatacgggttatttgcagttttgatggcaactgtagacacaaataatttttaagcaccctcactctcaccgc

SEQ ID NO: 22365 - protein, 293 aa, Glycine max
GKRLKLLPPAFGHIPALVVLDVSTNQLSVIPDSISGLANLEELNLSSNALESLPDSIGLLQKLKFLNVSGNKLSALPDSISQCRSLVELDAGFNSLTYLPTNIGYELLNLQKLMIQLNKIRSLPSSVCEMKSLRYLDAHFNELRGLPIAIGKLTNLEVLNLSSNFSDLRELPETFGDLISLRELDLSNNQIHALPDTFGRLDSLTKLNLDQNPVEVPPMEIVNQGVQAVKSFMVQRWIDILAEEERKSTQVLQEGENDWLTRSTSWLKNVSENVTDMIMSPRTPKESFLDQQL

SEQ ID NO: 22366 - protein, 180 aa, Glycine max
MIQLNKIRSLPSSVCEMKSLRYLDAHFNELRGLPIAIGKLTNLEVLNLSSNFSDLRELPETFGDLISLRELDLSNNQIHALPDTFGRLDSLTKLNLDQNPVEVPPMEIVNQGVQAVKSFMVQRWIDILAEEERKSTQVLQEGENDWLTRSTSWLKNVSENVTDMIMSPRTPKESFLDQQL

SEQ ID NO: 22367 - protein, 164 aa, Glycine max
MKSLRYLDAHFNELRGLPIAIGKLTNLEVLNLSSNFSDLRELPETFGDLISLRELDLSNNQIHALPDTFGRLDSLTKLNLDQNPVEVPPMEIVNQGVQAVKSFMVQRWIDILAEEERKSTQVLQEGENDWLTRSTSWLKNVSENVTDMIMSPRTPKESFLDQQL

SEQ ID NO: 22368 - DNA, 932 bp, Glycine max
gatttaatctacttgatgcttgacaaggctgatgaacagactgacaggcgccttgctaaacatattgtgtccctacactttgagaatcccgagaacgtggaacaggacgtgttggacatttctacattaaccgattatgttagctatgcccgaaagcacatacacccacagctttctgatgaagccgctgaagaattgactagaggttacgtagaaataagaaaaagaggaaattttcctgggagtagcaaaaaggtgataacagcaacaccaaggcagattgagagtctgatacgcctaagtgaagcattggctcggatgcgcttctcagaatgggttgaaaagcatgatgtaatggaggcatttcggcttttggaagttgcaatgcagcagtctgcaacggatcattctactggaactattgacatggatcttattactactggagtttcggcaagtgaaagaatgaggcgagaaagtctgcaacaagcaactcgtaacataatcatggagaaaatgcagattgggggaccatctatgcgcttattggagttattggaagaattgaagaaacaggatactggtagcgaagttcatcttaatgatctaaggaatgcaattgctactctggctacagaaggatttgttaccatgcacggtgacattgtaaaaagatcttgatggcacgagacagtagtgacatcaggggactgtcttatagttattaattatagtgggttactgtttttattctttaaccttcttacccaatcatatgcatccggagttcaatgttacgtacatatttttatatacggtgtcttgtgaatgcatctattggtagttatttggttttatctttttccttatccgaacatctttactgttaggtgtttcattttataattaaacatgtattacctttcttgacg

SEQ ID NO: 22369 - protein, 226 aa, Glycine max
DLIYLMLDKADEQTDRRLAKHIVSLHFENPENVEQDVLDISTLTDYVSYARKHIHPQLSDEAAEELTRGYVEIRKRGNFPGSSKKVITATPRQIESLIRLSEALARMRFSEWVEKHDVMEAFRLLEVAMQQSATDHSTGTIDMDLITTGVSASERMRRESLQQATRNIIMEKMQIGGPSMRLLELLEELKKQDTGSEVHLNDLRNAIATLATEGFVTMHGDIVKRS

SEQ ID NO: 22370 - protein, 221 aa, Glycine max
MLDKADEQTDRRLAKHIVSLHFENPENVEQDVLDISTLTDYVSYARKHIHPQLSDEAAEELTRGYVEIRKRGNFPGSSKKVITATPRQIESLIRLSEALARMRFSEWVEKHDVMEAFRLLEVAMQQSATDHSTGTIDMDLITTGVSASERMRRESLQQATRNIIMEKMQIGGPSMRLLELLEELKKQDTGSEVHLNDLRNAIATLATEGFVTMHGDIVKRS

SEQ ID NO: 22371 - protein, 120 aa, Glycine max
MRFSEWVEKHDVMEAFRLLEVAMQQSATDHSTGTIDMDLITTGVSASERMRRESLQQATRNIIMEKMQIGGPSMRLLELLEELKKQDTGSEVHLNDLRNAIATLATEGFVTMHGDIVKRS

SEQ ID NO: 22372 - DNA, 1153 bp, Glycine max
aactattttgttcagtttcgcaagatagcaaaccatcccttgttaataaggcgaatctacagtgacgaggatgtcattcgctttgctaggaagctacatccgatgggtgcttttggttttgaatgtactttggacagagttatagaggagcttaaaaactacaatgacttctctattcaccggcggcagacatgattatgtgctgggtatgctgagattgagcttctccatggataatgtaggccttagcagaacttcttccttcactaaaggagggtggtcatcgagccttgatctttagtcaatggacttcaatgcttgacatattggagtggactttggatgtcattggattgacctataaacggcttgatggaagtacacaggtagcggagaggcaaacaatagttgatacgttcaataacgatacttcaatttttgcatgcttactttccacaagagctggtggacagggcttaaatttaacaggagctgatacagttgtaattcatgacatggattttaacccacagattgatagacaagccgaagatcgttgccatcgaattggtcaaacaaagcctgtaaccatacatcggtatttatctattattttgcttctctcccattaacattagaaaagtgttaacccttgtatgctttttctttttgttaaactctaagccctacaaactggatatctatttgaatgtctttgtgactgctttcttatgacatattccattgaaggctggtgacaaagggaacggttgatgaaaatgtgtacgagattgcaaaaagaaagctagtattagatgctgctgttctcgagtccatggaggagattaatgaaggtgaattgcccgagaagaccatgggagagatattgtctgcaattttattgagttaaaatattgatctaagaaaaacagtttaatttatcatcacttcattcctatagttccaatcttgaattaatctgttgatttgggatagaagagaactggctgcctacaaattggcaagaatgcggtaccagtattgatgtacattataatcaataggagaattagtataaaaagtcatggcgaagattaacaaatttgttgaacattaattattcctgaagcactaatgaagccttaccctttcg

SEQ ID NO: 22373 - protein, 105 aa, Glycine max
MLDILEWTLDVIGLTYKRLDGSTQVAERQTIVDTFNNDTSIFACLLSTRAGGQGLNLTGADTVVIHDMDFNPQIDRQAEDRCHRIGQTKPVTIHRYLSIILLLSH

SEQ ID NO: 22374 - protein, 64 aa, Glycine max
NYFVQFRKIANHPLLIRRIYSDEDVIRFARKLHPMGAFGFECTLDRVIEELKNYNDFSIHRRQT

SEQ ID NO: 22375 - DNA, 1129 bp, Glycine max
aattatttattataacacgtacattaaactaaaacatagttacatacgtaaaaaaacttgcaattgttttataaggaatcagattagttacacttccattcccttccagcagctgggtttgagaagacaattgattatataggttttgttagtaaacaaaagaaaaggaaacatgaaggacgcagatgtgtcaaggcagatccagcagatgatcaggttcatccgtcaagaggctgaagagaaagctaatgaaatatctgttgctgctgaagaggaattcaatattgagaaactgcaattgcttgaagctgaaaaaagaaagatcaggcaagagtacgaacgaaaagccaaacaaattgacgttcgaagaaagattgaatactcaacacaactgaatgcagcccgaataaaagtgcttcaagcacaagatgatgcggtgggtgctatgaaggacgctgctaaaaaggggcttttacgtatctcaaatgataagaaagtatacaggaaactcgtcaaagacatgattgttcagggtttactacgcctgagggaaccatcagtgctattaagatgcagagagagtgaccgtaagcttgttgagtcattgatagaggaagccaaaaaagaatactcggagaaagccaatatgcaagcccctaagattgcccttgatgatcgtgtttacctcccaccgtcgccaaagaacagtgccgtggattcccatgaaccttattgcaccggaggaatagtattggcctcagaggatgggaagattgtgttggaaaatacccttgatgcacggcttgatgtcattttccggcagaaactacctgaggtaaggaagcgcctgttaggttgaacaacatactgcaatttgaattctcgctttatgtcagcaaatggaagagcaaggatgttgccacttcttttccgctgagcctgatcaaagcaaatgcaccaccccttttgttttttcttttctctaagaccaagttttaaatgttaagtctctttatttttgtaatttttaattctaataagctagactagaggaagaacatttcagtaatgtttttccggtacatttttttttctcagaagagagtaataaaatagactatttaaaatt

SEQ ID NO: 22376 - protein, 228 aa, Glycine max
MKDADVSRQIQQMIRFIRQEAEEKANEISVAAEEEFNIEKLQLLEAEKRKIRQEYERKAKQIDVRRKIEYSTQLNAARIKVLQAQDDAVGAMKDAAKKGLLRISNDKKVYRKLVKDMIVQGLLRLREPSVLLRCRESDRKLVESLIEEAKKEYSEKANMQAPKIALDDRVYLPPSPKNSAVDSHEPYCTGGIVLASEDGKIVLENTLDARLDVIFRQKLPEVRKRLLG

SEQ ID NO: 22377 - protein, 216 aa, Glycine max
MIRFIRQEAEEKANEISVAAEEEFNIEKLQLLEAEKRKIRQEYERKAKQIDVRRKIEYSTQLNAARIKVLQAQDDAVGAMKDAAKKGLLRISNDKKVYRKLVKDMIVQGLLRLREPSVLLRCRESDRKLVESLIEEAKKEYSEKANMQAPKIALDDRVYLPPSPKNSAVDSHEPYCTGGIVLASEDGKIVLENTLDARLDVIFRQKLPEVRKRLLG

SEQ ID NO: 22378 - protein, 137 aa, Glycine max
MKDAAKKGLLRISNDKKVYRKLVKDMIVQGLLRLREPSVLLRCRESDRKLVESLIEEAKKEYSEKANMQAPKIALDDRVYLPPSPKNSAVDSHEPYCTGGIVLASEDGKIVLENTLDARLDVIFRQKLPEVRKRLLG

SEQ ID NO: 22379 - DNA, 930 bp, Glycine max
attagaatgaatattgctgtggagaccgcaagtgcattgaaatttcttcatcaaaaagacatcatccaccgagatgtgaaaaccaacaatattcttcttgacaataacttttgtgtaaaagtggccgattttggactctcacgtcttttcccagatcatgtcactcatgtttcgacagctccacaagggactccaggttatgtggatcccgagtaccaccagtgctatcagcttactaaacaaagcgatgtctatagctttggagtggtgctggttgagctgatatcgtccttgcctgctgtagatattacaaggcatagacaagaaatcaaattgtccgacatggccatcaacaagattcatagtgaggcactgcatgagctagtggaccctagccttgggtttgaatcgaatttcaaggtcaggaaaatgataaatgctgtggcagagttagcatttcagtgcttgcagagttccaaagagatgaggccttctatggaagaagtggcagacactctcaaggatatacagagtgatggcaaacataaaagccagcctgaggtaatggatatcacaagcacagctgatgatgttgtgttgctgaaggatgaccctcctccaccatcacctgattctaatgcggtgagcaagttgacaacaccaaatgctagcggataagaggaccttctttctcacttccatgaaattaaccttatccaaatttatgtaagcagagttagttagcatcacactggtaccagtatccacccagttactgcccgcatattgtcatcttcttatgaggataaattttaagattgagatgtatatattgatgataaagctgctttggttatgaaatttcatctttaacaattatagttatatattattttatttttttggttaaaatcaaaatttattccctcc

SEQ ID NO: 22380 - protein, 225 aa, Glycine max
IRMNIAVETASALKFLHQKDIIHRDVKTNNILLDNNFCVKVADFGLSRLFPDHVTHVSTAPQGTPGYVDPEYHQCYQLTKQSDVYSFGVVLVELISSLPAVDITRHRQEIKLSDMAINKIHSEALHELVDPSLGFESNFKVRKMINAVAELAFQCLQSSKEMRPSMEEVADTLKDIQSDGKHKSQPEVMDITSTADDVVLLKDDPPPPSPDSNAVSKLTTPNASG

SEQ ID NO: 22381 - protein, 223 aa, Glycine max
MNIAVETASALKFLHQKDIIHRDVKTNNILLDNNFCVKVADFGLSRLFPDHVTHVSTAPQGTPGYVDPEYHQCYQLTKQSDVYSFGVVLVELISSLPAVDITRHRQEIKLSDMAINKIHSEALHELVDPSLGFESNFKVRKMINAVAELAFQCLQSSKEMRPSMEEVADTLKDIQSDGKHKSQPEVMDITSTADDVVLLKDDPPPPSPDSNAVSKLTTPNASG

SEQ ID NO: 22382 - DNA, 655 bp, Glycine max
acaaacgtgaagacctcactaaagaggttctgattgatgaatggttccatacaggggatattggagagtggcaacctaatggaagcatgaaaattattgatcggaagaagaatatatttaagctttcacaaggagaatatgttgctgtcgaaaacctggagaatatttacggtcaagtttcttctattgaatctatatgggtttatggaaacagttttgaggccttccttgtggctgttgttaaccccagtaagcaagcacttgaacattgggcccaagaaaatggtatatccatggacttcaattctctctgtgaagatgctcgagcaaaaagttacataattgaagagctctcaaagattgcgaaggaaaagaagttgaaaggttttgagtttataaaagcagttcaccttgactcaattccatttgacatggaacgtgaccttatcactccaacatacaagaagaagaggccacagttgcttaaatactatcagaatgccattgacaacatgtataagagtggaagtaaacccagtgcctgagacctgatttgggagataatttattttctgtatgtgatggtgtttgtctccgttcaattgtttccttttggtgactgtatatacgctgagtagttatatagggatacgtc

SEQ ID NO: 22383 - protein, 180 aa, Glycine max
KREDLTKEVLIDEWFHTGDIGEWQPNGSMKIIDRKKNIFKLSQGEYVAVENLENIYGQVSSIESIWVYGNSFEAFLVAVVNPSKQALEHWAQENGISMDFNSLCEDARAKSYIIEELSKIAKEKKLKGFEFIKAVHLDSIPFDMERDLITPTYKKKRPQLLKYYQNAIDNMYKSGSKPSA

SEQ ID NO: 22384 - protein, 152 aa, Glycine max
MKIIDRKKNIFKLSQGEYVAVENLENIYGQVSSIESIWVYGNSFEAFLVAVVNPSKQALEHWAQENGISMDFNSLCEDARAKSYIIEELSKIAKEKKLKGFEFIKAVHLDSIPFDMERDLITPTYKKKRPQLLKYYQNAIDNMYKSGSKPSA

SEQ ID NO: 22385 - DNA, 1056 bp, Glycine max
aagattttactcagattggaatgaaattcatttctgggattcaaatggagtgatgcatcttgacattttcttttggaggtggtgtgtgtggtggtgcatactgtgaacccatcttgacaagtgtgcaccttatatggtgtgcacgatgctctgttagagtggctacaatagcaatagtaaattggtaactaactcaacgtaaatgaagaatgaaaaatatacccaatagtatctcaatgtgatgtgattatttttactttgtgccttttagttaagaatgttttgataaatgtaacttctacttgagactcaacaacaacaaaaaagccttatcccacatggtgtttagactcgatgaaaatttaattattatatatgaattaaaaagtttaaaagattattcatatatatattcatatatatatatatatatatatgaatacaaaacttttattcaaaacaatttaactctctcatgtgatgacttctttgcttaaagacgagaagaccttatatttgatctggttagtctttccttacaaatttgaccgttgtcactctctcttctcctttaaaacatagattgtctttcttctagaggaggttataatttaaatattcaatgttctttttctgcagattgagtatctccctatctcgtcagttgaaaaatccaagcaaattttggaagagttcattgatatatggaaagaagtcgtgtctaaaaaatcattagccggtcagttcatgcatacagaaccaaattatgcagaatatgggctttctgacaattatacctctcagcatacagctgttcagtatgctgctgcattggcccaactgattcaatctgcacagttacggaactaggaactaggacctttgaagggtatgtaagggatatttattttatgaaatcttattggattcttgtgagtgtggagatggtaatatatatttcaataatgtttgttagaaagtaataaaaaaatatttcctgagatggtcataaaatcatatttattgtgtaaaatttttattataccttcactatcg

SEQ ID NO: 22386 - protein, 52 aa, Glycine max
MVFRLDENLIIIYELKSLKDYSYIYSYIYIYIYEYKTFIQNNLTLSCDDFFA

SEQ ID NO: 22387 - protein, 40 aa, Glycine max
MHTEPNYAEYGLSDNYTSQHTAVQYAAALAQLIQSAQLRN

SEQ ID NO: 22388 - protein, 37 aa, Glycine max
MFFFCRLSISLSRQLKNPSKFWKSSLIYGKKSCLKNH

SEQ ID NO: 22389 - DNA, 821 bp, Glycine max
agttaaattatcatattgagactctagggaggagccattcgccaagaactgtactacctcctcaaagatgagaatgatgttcatttcacatttgggagcataggtggaaatgggattaatcaggcaagccagggcatggccttgtcgaaattctgcctcaacattgcaggggataccccatcctcaaatcgcctttttgatgccatagtaagccactgtgttcctgtgatcatcagtgatgaaattgagctaccctttgaagatgacttggactactctgacttttccataattgtccatgcctctgacgccatgaagaaaggctacttgctgaatctcctttgttcaatcaagcgtgatgagtggaacaagatgtgggaaagattgaagcagattacacaccactttgagtatcagtatccatcccaacctggggatgcagtgaatatgatatggctgcaagttgaacgtaagatatcttcgataaggttcaatttgcacaggaagaacagataccagagatcttagcttcgtgttaagactaactgaaatgctgagattctgttacattagaatctgctgaccttggtcagtcaagttcaacatgccagtggaagacacaaacctactcatgttttgccactagcaagcttctttttcttccttttaattttttctttttgctgaataacatattgttgatgaaaaatagattttatattttaatgtcgaagcatacctcattatttgtcctcttcttggcatatgaatcttaggaaaaactaaaagcaaaaaaattgattggaatatactattagttt

SEQ ID NO: 22390 - protein, 130 aa, Glycine max
MALSKFCLNIAGDTPSSNRLFDAIVSHCVPVIISDEIELPFEDDLDYSDFSIIVHASDAMKKGYLLNLLCSIKRDEWNKMWERLKQITHHFEYQYPSQPGDAVNMIWLQVERKISSIRFNLHRKNRYQRS

SEQ ID NO: 22391 - protein, 71 aa, Glycine max
MKKGYLLNLLCSIKRDEWNKMWERLKQITHHFEYQYPSQPGDAVNMIWLQVERKISSIRFNLHRKNRYQRS

SEQ ID NO: 22392 - DNA, 886 bp, Glycine max
taaatcagtcttttagggatcagggcatgaagtctattcaaactgcacaaccagcaccagatccatttggtttgcttggcctgttaagtgtgatcaggatgagtgatcctgacctgacatctcttgctcttggaattgatcttactacactggggttaaatttgaattcatcagaaaatcttcacaagacctttgggtctccatggactgatgaatcagctaagggagatccagagtttacagtgccacaatgttattttgccaaacagccacctgctctacatcaaggttatttttccaagttttcggtggaaacattgttttacatattttatagcatgcccaaagatgaagcccaattatatgccgccagtgagctttacaacagaggttggttttatcacaaagaacatcgtttatggttaataagagttcccaacatggagccgctggttaaaacaaacacatatgagagaggatcttatcactgtttcgatccaagcatatttgaaaccgtccgcaaggataattttgttctacattatgaaatgttggaaaagagaccacatctgcctcaactttgaggaggaaacaaaaacctttttactgtaaagtttcgattatggatttaatgccttggagtcattttgcagtattagtattcttcaatttggcgtttcttcctatctggtcgccttagtgatccaagctagtattttatttttccttgccttaatataaacaataattaggatacataggataacctagctgtctgacaaacatggttttctgcccattagctaatgcacaggaaaaacacctggatcgaaaatggatgtactttccgaaataattttatcttaatctgaatgttaggatcaag

SEQ ID NO: 22393 - protein, 193 aa, Glycine max
NQSFRDQGMKSIQTAQPAPDPFGLLGLLSVIRMSDPDLTSLALGIDLTTLGLNLNSSENLHKTFGSPWTDESAKGDPEFTVPQCYFAKQPPALHQGYFSKFSVETLFYIFYSMPKDEAQLYAASELYNRGWFYHKEHRLWLIRVPNMEPLVKTNTYERGSYHCFDPSIFETVRKDNFVLHYEMLEKRPHLPQL

SEQ ID NO: 22394 - protein, 185 aa, Glycine max
MKSIQTAQPAPDPFGLLGLLSVIRMSDPDLTSLALGIDLTTLGLNLNSSENLHKTFGSPWTDESAKGDPEFTVPQCYFAKQPPALHQGYFSKFSVETLFYIFYSMPKDEAQLYAASELYNRGWFYHKEHRLWLIRVPNMEPLVKTNTYERGSYHCFDPSIFETVRKDNFVLHYEMLEKRPHLPQL

SEQ ID NO: 22395 - protein, 161 aa, Glycine max
MSDPDLTSLALGIDLTTLGLNLNSSENLHKTFGSPWTDESAKGDPEFTVPQCYFAKQPPALHQGYFSKFSVETLFYIFYSMPKDEAQLYAASELYNRGWFYHKEHRLWLIRVPNMEPLVKTNTYERGSYHCFDPSIFETVRKDNFVLHYEMLEKRPHLPQL

SEQ ID NO: 22396 - DNA, 1000 bp, Glycine max
agacaccgacacagatctgtcttccgaagcaggaactaaatatggctgacttgttggaatggtcaaagcaagataagaaacgaatgcttcatgtcgtctaccgtgttggtgaccttgatcgcaccatcaaattttacacagaatgtttaggaatgaagcttttgaggcaaagagatatcccagaggagaaatatgctaatgcttttcttggatttggccctgaagaatcccattttgttgttgaattaacatataattatggggttacctcgtatgacattggcgatggctttggacattttgcaattgcaactcaggacatttataaattggttgagcacatcagggccaagggtggaaacatcacaagggaacctggtccagttcaaggtggaactactgttatcgcctttgttaaggatcctgatggttatacttttggacttatccaaagacctacagtccatgacccattttgtcaagtaatgcttcgtgttggtgatttagagcgctcaattaagttttatgaaaaggctttgggcatgaaggtggtgaggaaggttgataagcctgagtacaagtacactatagctatgctcgggtatggagaggagcacgagacaactgtgttggagttgacatataactatggtgtgactgaatactctaagggaaatgcttatgcacagattgccattggtactgatgatgtatataagagtgctgaggtagttaaccaagtcataaaagaggttggagggaagattactcggcaaccagggccaattcctggccttaatacaaaaaccacttcgtttttagatccagatggatggaaaactgtcttggttgacaacgttgatttcttggaagaactgaagtgaagagcaagctttatatgaaataagtagtcctgctgcttttgtatgaataagttgtctcgcattttatcattgtgcgttttgtatcagtaccagtcatcaacttgttttcttgcttt

SEQ ID NO: 22397 - protein, 293 aa, Glycine max
TPTQICLPKQELNMADLLEWSKQDKKRMLHVVYRVGDLDRTIKFYTECLGMKLLRQRDIPEEKYANAFLGFGPEESHFVVELTYNYGVTSYDIGDGFGHFAIATQDIYKLVEHIRAKGGNITREPGPVQGGTTVIAFVKDPDGYTFGLIQRPTVHDPFCQVMLRVGDLERSIKFYEKALGMKVVRKVDKPEYKYTIAMLGYGEEHETTVLELTYNYGVTEYSKGNAYAQIAIGTDDVYKSAEVVNQVIKEVGGKITRQPGPIPGLNTKTTSFLDPDGWKTVLVDNVDFLEELK

SEQ ID NO: 22398 - protein, 280 aa, Glycine max
MADLLEWSKQDKKRMLHVVYRVGDLDRTIKFYTECLGMKLLRQRDIPEEKYANAFLGFGPEESHFVVELTYNYGVTSYDIGDGFGHFAIATQDIYKLVEHIRAKGGNITREPGPVQGGTTVIAFVKDPDGYTFGLIQRPTVHDPFCQVMLRVGDLERSIKFYEKALGMKVVRKVDKPEYKYTIAMLGYGEEHETTVLELTYNYGVTEYSKGNAYAQIAIGTDDVYKSAEVVNQVIKEVGGKITRQPGPIPGLNTKTTSFLDPDGWKTVLVDNVDFLEELK

SEQ ID NO: 22399 - protein, 266 aa, Glycine max
MLHVVYRVGDLDRTIKFYTECLGMKLLRQRDIPEEKYANAFLGFGPEESHFVVELTYNYGVTSYDIGDGFGHFAIATQDIYKLVEHIRAKGGNITREPGPVQGGTTVIAFVKDPDGYTFGLIQRPTVHDPFCQVMLRVGDLERSIKFYEKALGMKVVRKVDKPEYKYTIAMLGYGEEHETTVLELTYNYGVTEYSKGNAYAQIAIGTDDVYKSAEVVNQVIKEVGGKITRQPGPIPGLNTKTTSFLDPDGWKTVLVDNVDFLEELK

SEQ ID NO: 22400 - DNA, 981 bp, Glycine max
gttcttgctgcttatgttcctacagaactagtagcaacaattggcaacaaggtgatgttatctagtggctacaatttgctgtctggaacatccatggcatgccctcatgcttctggtgttgctgctcttttgaaagctgcacacactaaatggagtgctgctgctataaggtttatgtcaacaaaagtcggaaggagttgataggccgcaatggtccacatttagtcatgttaactactcaggttctctttcatccacatttggtagcaaggctactcactgtaaggtcgattctagaagaaaaatgctactcactgtgtcatgcaatgcagaagacatgttgcttccacgcggtaattttacattttctgatacttgctgtgaagaaactagacaagagagtttctaatcaccaaacaaatgatgagtttctcgaattgataaacagtattgacataatccggcatccaaatattgttgagcttattgggtactgtgcatagcatggccaaaggcttcttatttatgagtattgcagtaatgggtcgttgcaggatgcactccattcagatgatgaattcaaaacaagattgtcatggaatagtaggtacaagtaaactgaattttacctacagtagaccgtaggtacaagtaaactgacttttacctacagttagagattataggtataaattaatattttttacctacacatttgaaatagtaggtgttacctataatgatagttaaatttgactgtaggtaaaaatatatccgtaggtaaagcctatagtgacagactattagttgtcactgtataccccctcaaagttgacgcaaaaaacgtctgtaggacaaagtcctttatacatctacctacggattttggacttctagtgatagattttgactgtaggtaaaagtcattttccttgtagatatatttttaaaaaattaaaattataatcaaaatattttttc

SEQ ID NO: 22401 - protein, 117 aa, Glycine max
MECCCYKVYVNKSRKELIGRNGPHLVMLTTQVLFHPHLVARLLTVRSILEEKCYSLCHAMQKTCCFHAVILHFLILAVKKLDKRVSNHQTNDEFLELINSIDIIRHPNIVELIGYCA

SEQ ID NO: 22402 - protein, 91 aa, Glycine max
MLTTQVLFHPHLVARLLTVRSILEEKCYSLCHAMQKTCCFHAVILHFLILAVKKLDKRVSNHQTNDEFLELINSIDIIRHPNIVELIGYCA

SEQ ID NO: 22403 - protein, 66 aa, Glycine max
VLAAYVPTELVATIGNKVMLSSGYNLLSGTSMACPHASGVAALLKAAHTKWSAAAIRFMSTKVGRS

SEQ ID NO: 22404 - DNA, 656 bp, Glycine max
agtacattggctggattctggagagtgctccacagccaatcttggagagtcatgagctttcttccatgactttagagtataggagagagtgtggtagggacagtgtgctggattccctgactgctgtatctggggccgacatgggcaatctagctcacagcgggcatgttgagtgcaagcatttgcttcgactggaaaatggtgctgagattgtgaggggcaggactgagtggaggcccaaacctgtgaacaactttggtgttgtgaaccaggttccagcagaaagcacctaagattttgaaatggttaacgattggagttgcatcagtctccttgctatgtttagacttattctggtccctggggagagttttgcttgtgtctatccaatcaatctacatgtctttatatatatacaccttctaatttgtgatactttggtgggtaagggggaaaagcagcagtaaatctcattctcattgtaattagctactgctgtattctctctttctgctgctccatatttcatttcatctctgattgcgctactgctaggctgtcttcaatatttaattgcttgttcaaaatagctaggcatgtatattattattctttttctcttggcccaattaaagatgcaattttccttgtgaacg

SEQ ID NO: 22405 - protein, 96 aa, Glycine max
YIGWILESAPQPILESHELSSMTLEYRRECGRDSVLDSLTAVSGADMGNLAHSGHVECKHLLRLENGAEIVRGRTEWRPKPVNNFGVVNQVPAEST

SEQ ID NO: 22406 - protein, 75 aa, Glycine max
MTLEYRRECGRDSVLDSLTAVSGADMGNLAHSGHVECKHLLRLENGAEIVRGRTEWRPKPVNNFGVVNQVPAEST

SEQ ID NO: 22407 - protein, 54 aa, Glycine max
MVNDWSCISLLAMFRLILVPGESFACVYPINLHVFIYIHLLICDTLVGKGEKQQ

SEQ ID NO: 22408 - DNA, 1009 bp, Glycine max
attctcttcttaatcccacaccatctaattagttcattctcttccttttctttttctttttattcgccgaatctattcaattgctataatattataaactctgatctgatcgatcagtcgcgttgtatgtctcaacggagaagttcgccggtggttgtcgcccggaagaataagccgccgcatccgtcgccgtcgccccgtcgtaggacgaagagcaagtcgaggcctatcaagatcctgaagcgctgttcgtcggcgcctctactttcacgccgtgataacgacgatggtgacgttgaccttgacggtgacgaccattattcgaggacgagcggaggaggctcgtttttccgccctaaaaccttttcggatgcctttctgtcttccccttctcccttttcctctccacggattcacaccaaacagataataaaggggtacaagtacgacaaagaagcaaaggtggtagttaatgtgaccgttgagggaagtccagggccagtccaaacgatggttaaactggggtccagtgtggaggatactatcaagcgtgtggtcgataaatatacagaagaaggcaggagcccccagatcgatgctaatatggcttcttcattccaattgcatcactcctatttcagtctccatagtttggacaaatcagaagtcattgcggatgtgggtagtagaagtttttatctgcggaagaataatgatgcatcatctactttgacttcttcatttcattggggaagtgctcccgaattagccacacatacttccactccatccatagcaaatcctccgttgttgatcccatctttcattgcccgcaggatttgcaaaattgtcagaagagctcaccgcctttggaagattttggtttgctctcagtgaggacattcaaaatcctaccccccccccccagtcaattataggaaaaagcaacgattttttttctgttgcttttcaacccttcatttccacattttatattcgatctacatat

SEQ ID NO: 22409 - protein, 298 aa, Glycine max
ILFLIPHHLISSFSSFSFSFYSPNLFNCYNIINSDLIDQSRCMSQRRSSPVVVARKNKPPHPSPSPRRRTKSKSRPIKILKRCSSAPLLSRRDNDDGDVDLDGDDHYSRTSGGGSFFRPKTFSDAFLSSPSPFSSPRIHTKQIIKGYKYDKEAKVVVNVTVEGSPGPVQTMVKLGSSVEDTIKRVVDKYTEEGRSPQIDANMASSFQLHHSYFSLHSLDKSEVIADVGSRSFYLRKNNDASSTLTSSFHWGSAPELATHTSTPSIANPPLLIPSFIARRICKIVRRAHRLWKILVCSQ

SEQ ID NO: 22410 - protein, 256 aa, Glycine max
MSQRRSSPVVVARKNKPPHPSPSPRRRTKSKSRPIKILKRCSSAPLLSRRDNDDGDVDLDGDDHYSRTSGGGSFFRPKTFSDAFLSSPSPFSSPRIHTKQIIKGYKYDKEAKVVVNVTVEGSPGPVQTMVKLGSSVEDTIKRVVDKYTEEGRSPQIDANMASSFQLHHSYFSLHSLDKSEVIADVGSRSFYLRKNNDASSTLTSSFHWGSAPELATHTSTPSIANPPLLIPSFIARRICKIVRRAHRLWKILVCSQ

SEQ ID NO: 22411 - DNA, 611 bp, Glycine max
acgatgattttgcttttgtgagagagattcgaaaaaatgaaggtttggagatggttgatgagtttgtggtttgtggggttagtgttggtgcctgtgtcaataatgggtcgattcgtggtggagaagaacagcctgagagtgacatcgccggagaaaataagagggacacacgacagtgccattggcaacttcggaatacctcaatacggtggtagcatggcagggaacgtcctttaccctaaggataacaaaaaaggttgcaaagagtttgatgactttgggatttccttcaaatcatcccccggtgctcttcccaccattgttctactcgatcgcggaagttgcttctttgctttgaaggtctggaatgcccagaaggctggtgcttctgctgttcttgttgccgatgatgttgaggagcccttaattactatggacacccctgaagaggatggctcttctgccaagtacgttgagaacattactataccctctgctcttgttggaaaaagttttgctcaaaaactaaaggatgccattattgttggcgatatggtcaacgtaaacctcgattggcgagaggctgttcctcacccagatgatcgcgtcga

SEQ ID NO: 22412 - protein, 191 aa, Glycine max
MKVWRWLMSLWFVGLVLVPVSIMGRFVVEKNSLRVTSPEKIRGTHDSAIGNFGIPQYGGSMAGNVLYPKDNKKGCKEFDDFGISFKSSPGALPTIVLLDRGSCFFALKVWNAQKAGASAVLVADDVEEPLITMDTPEEDGSSAKYVENITIPSALVGKSFAQKLKDAIIVGDMVNVNLDWREAVPHPDDRV

SEQ ID NO: 22413 - protein, 184 aa, Glycine max
MSLWFVGLVLVPVSIMGRFVVEKNSLRVTSPEKIRGTHDSAIGNFGIPQYGGSMAGNVLYPKDNKKGCKEFDDFGISFKSSPGALPTIVLLDRGSCFFALKVWNAQKAGASAVLVADDVEEPLITMDTPEEDGSSAKYVENITIPSALVGKSFAQKLKDAIIVGDMVNVNLDWREAVPHPDDRV

SEQ ID NO: 22414 - protein, 169 aa, Glycine max
MGRFVVEKNSLRVTSPEKIRGTHDSAIGNFGIPQYGGSMAGNVLYPKDNKKGCKEFDDFGISFKSSPGALPTIVLLDRGSCFFALKVWNAQKAGASAVLVADDVEEPLITMDTPEEDGSSAKYVENITIPSALVGKSFAQKLKDAIIVGDMVNVNLDWREAVPHPDDRV

SEQ ID NO: 22415 - DNA, 1118 bp, Glycine max
ttattagtttctatataaatataaggacttaaatattaagtctatcaggaacaacatatatatgctcatcccttctcctctggtttacaaagttctctttaagctgtggtgaagaaagtcatgatcaactaatatttactttatcactgcctctcaaactagaggttttatttggttactttctcattgagcatgtcaataaaagtttgtctatagagacccttattacgctattgcttgcaggtaatggatgagtatgacgagcaatccgaggttgctgaccgacttagaatcagggtatttctcttctattctcttgattactatttactgagtatcaaatgaaacttaatctggataaaactgacctacctcccttggagacagctaagtatcagccatcaggttaatctaaatgtttgttggccaacttgtcttcaatgttccgtggttagtcttcatttgcatgatttctctagtttactctaattaactggtgcacatgccattttcgttttgggtctggtttatcttggcattgctttttatgattatctctaaaactatctttactttcttcacctctcttttatggttaattccatcttcttcctatccgcgatatagatatcggttgtgcatcatttttgctactagctactgcatgtaatcactacactttctagtattcatgctttatgatatgttgaatatgaagcggaaacaaactgatgcaggccgtgcctcttttccacttctacaaagatggggtcctgttggaagcattcccaaccagagacaaagataggattcttgcagctattctcaagtactcatctcttgaagctgaagatatcttaggttaacatcaagagatggggtcatggcaccctcggggactgttgtgcactgcagggaaattagtaaatttttgtacgtgacaaagttcattaaacagcatgttgtatacacaaaataaaatactttagtcctgtcagcctaattcactttgttaggataggatattttcttgcaaaatatctagtgaagagtttaatgtacactacgatacgccttctctttctccagaggtcataaataaaattttcattctgctt

SEQ ID NO: 22416 - protein, 55 aa, Glycine max
MPFSFWVWFILALLFMIISKTIFTFFTSLLWLIPSSSYPRYRYRLCIIFATSYCM

SEQ ID NO: 22417 - protein, 44 aa, Glycine max
MQAVPLFHFYKDGVLLEAFPTRDKDRILAAILKYSSLEAEDILG

SEQ ID NO: 22418 - protein, 40 aa, Glycine max
MIISKTIFTFFTSLLWLIPSSSYPRYRYRLCIIFATSYCM

SEQ ID NO: 22419 - DNA, 1118 bp, Glycine max
aacttaggaaggtgtgtaaccatcctgatctccttgagtcagcatttgacgattcatatttgtatcctcctttagaagagatagttggacaatgtggaaaattccatttgcttgatcgattgctgcaacgtttatttgcaagaaatcacaaagttcttatcttcagtcagtggactaaggtgttagatataatggattattattttagtgaaaaaggctttgaggtttgcaggatagatggtggtgtgaaactggatgagaggaaacaacagatccaggacttcaatgatgtaaatagcaattgtagagtttttcttctttctactagggctggtggattgggaattaacctcactgcagctgatacttgcattctttatgacagtgactggaatcctcaaatggatttacaagccatggatagatgccacagaataggccaaacaaaacctgttcatgtttacaggctctcaactgctcaatctatagagggtcgcatgttgaaaagagctttcagcaaattaaagcttgagcatgtagtgattgagaagggacagtttcatcaagaacgtacaaaacctgccagtatggatgaaattgaggaagatgatgttttggcattgcttcgcgatgaagaaacagctgaagataaaatgatacatacagatattagtgatgaagacctggagaagctcttggatcgcagtgatcttatagtcaatgactttaacgatgataacttcaaagctccagtcagtgtgtttcctcttaaaggaccagggtgggaggtggtgattccaactgcgactgggggcatgctctctactcttaacagctagtttcatgtcactgtttatggctagagtttgaaaattttgctttttgtgggatgagatggaagggcttttctaaacagtctcatgtcacggtggtaatgccctggatggcattcattttttgtagatgcgtctaacggaactatgtttagaaatgaagctactctggccatgttttttgcgagtcggaattaaatattcaacttgttcagtggcgaaagtgattatcttatgtttgttctggaattcattttcaatgaaatgaattggtttggatatgat

SEQ ID NO: 22420 - protein, 278 aa, Glycine max
LRKVCNHPDLLESAFDDSYLYPPLEEIVGQCGKFHLLDRLLQRLFARNHKVLIFSQWTKVLDIMDYYFSEKGFEVCRIDGGVKLDERKQQIQDFNDVNSNCRVFLLSTRAGGLGINLTAADTCILYDSDWNPQMDLQAMDRCHRIGQTKPVHVYRLSTAQSIEGRMLKRAFSKLKLEHVVIEKGQFHQERTKPASMDEIEEDDVLALLRDEETAEDKMIHTDISDEDLEKLLDRSDLIVNDFNDDNFKAPVSVFPLKGPGWEVVIPTATGGMLSTLNS

SEQ ID NO: 22421 - protein, 215 aa, Glycine max
MDYYFSEKGFEVCRIDGGVKLDERKQQIQDFNDVNSNCRVFLLSTRAGGLGINLTAADTCILYDSDWNPQMDLQAMDRCHRIGQTKPVHVYRLSTAQSIEGRMLKRAFSKLKLEHVVIEKGQFHQERTKPASMDEIEEDDVLALLRDEETAEDKMIHTDISDEDLEKLLDRSDLIVNDFNDDNFKAPVSVFPLKGPGWEVVIPTATGGMLSTLNS

SEQ ID NO: 22422 - protein, 145 aa, Glycine max
MDLQAMDRCHRIGQTKPVHVYRLSTAQSIEGRMLKRAFSKLKLEHVVIEKGQFHQERTKPASMDEIEEDDVLALLRDEETAEDKMIHTDISDEDLEKLLDRSDLIVNDFNDDNFKAPVSVFPLKGPGWEVVIPTATGGMLSTLNS

SEQ ID NO: 22423 - DNA, 968 bp, Glycine max
agtgacgacagagattggagctctggctactcgtctcgctcccgcttcacaaaacgatgtgagttgttaaatactggggtttcattcctttggtggatagtgggcttttattgggttgtctctggtggcaatatacttctgcaagatgccccacgattgtactggttggttgttgtctttctggcatttgatgtcttttttgccatcttctgtgttgtcttggcttgcttgattggcattgctctctgttgttgtttgccctgcatcattgctattctctatgctgttgcaggacaggaaggtgcatcagaagcagatcttagcatgcttccaaaatacagatttagaatattaagcgatgaggataagcctagtggtggagctggatctatggttcccatagaaaccagcagcgcttacttggcaaatgaacgaacacttctacctgaggatgcggaatgttgtatatgcctttgttcatatgaggatggagcagagctgcatgctcttccctgcaatcatcatttccattcttcatgcattgtgaaatggctgaagatgaatgcaacttgtcctctctgcaagtacaatattctaaagggaaacgaacaagtgtgacagaaaagtgaagaacataccaagtaccaactgggtgtttcaacaactgttctgtaatatgtatatataatttcaagacaagaaggtaaagtttacctccgtactcgttgggttttgatcgttgtttcgtttagcggtttctgtagagaaaagatatatagagcatttattggtgaataagttagcaactgtagtatgcttaagcattatttcgtcctttttagattcagagttgtccaatttatggattgttcattacttttctgacggaaactagattgtttcatttgctgctgttgagtaatcacaggtttaattcatttgattgtgttaaaaaaaaaaaaaaaaaa

SEQ ID NO: 22424 - protein, 205 aa, Glycine max
SDDRDWSSGYSSRSRFTKRCELLNTGVSFLWWIVGFYWVVSGGNILLQDAPRLYWLVVVFLAFDVFFAIFCVVLACLIGIALCCCLPCIIAILYAVAGQEGASEADLSMLPKYRFRILSDEDKPSGGAGSMVPIETSSAYLANERTLLPEDAECCICLCSYEDGAELHALPCNHHFHSSCIVKWLKMNATCPLCKYNILKGNEQV

SEQ ID NO: 22425 - DNA, 1225 bp, Glycine max
aactgtatgcgtgtgcagtgcagtggtcctctctctcgttgccagttttcatggcgaagaaatcacagaaaagcctcaacagcactgggaagcgcacacgcaaaagcgtcccaagagactcacctccacaacgaagttcaatctataggggtgtcacaaggcatcgatggactggtcgatatgaggctcatttgtgggataagaattgctggaatgaatcacagagcaagaaaggaagacaagtatatctaggggcatatgatgatgaagaagccgcagcacgtgcctatgacttggcagcattgaagtactggggccaagataccattctcaattttccattatcaaattatgaggaaaagctcaaggagatggagggccagtcaaaagaagaatatattggatccttgagaagaaaaagcagtggattctctcgaggagtttcaaaatacagaggcgtagcaagacaccaccataacggaagatgggaagctcgaattggaagggtctttggcaacaaatatctataccttggaacttacgctacacaagaagaagcagccgcagcatatgacatggcagcaatagaatacagaggacttaacgcggttacaaactttgacctgagccgttatatcaattggccacgtcctaaaacagaagaaaatcatcaaactattcctagcaatgaaaatgtaaactctaatgctgaacttgagctaggttcggctagtgatgagatcacagaagagggtgtagcaccatcttcagaatcaaatccttctcgtcgcacattccctgaagacattcaaacaatttttgaaaatcaagattcaggcatctacactgaaaatgatgatatcatttttggtgacctgggctcctttggtgcaccaatttttcattacgagcttgatgtttagaattggaggacttcttctggccaatacgttatttttcaaaagggggtaatcaaccaaaaaagatgataaagaaattagggggtaagagtaaacattttagagatcgagtggaagattctttaaaagtaacatacaaggggggaagagggattggatcattttatttgcgatagaacaagatgcatggcatacaagtacaactgcctcattttaacaatttagttttattatgtatgtctccacaagcgtgggtagatgtcacaacatttagttattataagcaataagaataatattttttc

SEQ ID NO: 22426 - protein, 306 aa, Glycine max
LYACAVQWSSLSLPVFMAKKSQKSLNSTGKRTRKSVPRDSPPQRSSIYRGVTRHRWTGRYEAHLWDKNCWNESQSKKGRQVYLGAYDDEEAAARAYDLAALKYWGQDTILNFPLSNYEEKLKEMEGQSKEEYIGSLRRKSSGFSRGVSKYRGVARHHHNGRWEARIGRVFGNKYLYLGTYATQEEAAAAYDMAAIEYRGLNAVTNFDLSRYINWPRPKTEENHQTIPSNENVNSNAELELGSASDEITEEGVAPSSESNPSRRTFPEDIQTIFENQDSGIYTENDDIIFGDLGSFGAPIFHYELDV

SEQ ID NO: 22427 - protein, 290 aa, Glycine max
MAKKSQKSLNSTGKRTRKSVPRDSPPQRSSIYRGVTRHRWTGRYEAHLWDKNCWNESQSKKGRQVYLGAYDDEEAAARAYDLAALKYWGQDTILNFPLSNYEEKLKEMEGQSKEEYIGSLRRKSSGFSRGVSKYRGVARHHHNGRWEARIGRVFGNKYLYLGTYATQEEAAAAYDMAAIEYRGLNAVTNFDLSRYINWPRPKTEENHQTIPSNENVNSNAELELGSASDEITEEGVAPSSESNPSRRTFPEDIQTIFENQDSGIYTENDDIIFGDLGSFGAPIFHYELDV

SEQ ID NO: 22428 - protein, 183 aa, Glycine max
MEGQSKEEYIGSLRRKSSGFSRGVSKYRGVARHHHNGRWEARIGRVFGNKYLYLGTYATQEEAAAAYDMAAIEYRGLNAVTNFDLSRYINWPRPKTEENHQTIPSNENVNSNAELELGSASDEITEEGVAPSSESNPSRRTFPEDIQTIFENQDSGIYTENDDIIFGDLGSFGAPIFHYELDV

SEQ ID NO: 22429 - DNA, 1276 bp, Glycine max
gttactgtagtgccaccatcccgattgatggctttaattggtcaggctttgaagtggcagcagcatcaagggttacttcctccaggaacgcaatttgatttgtttcgtggaacagctgctatgaaacaagatgtggatgacatgtatccaacaactctttctcacacgataaagtttgggacaaaaagtcatgcagaatgtgcttgcttttcaccagatgggcagtttcttgtatcatgctcagttgatgggtttattgaggtgtgggattacataagtggaaagctgaagaaagatctacagtaccaggctgatgaagtgttcatgatgcatgatgatgctgtgctttgtgtagactttagcagagattcagaaatgcttgcatctgggtctcaagatggaaagattaaagtctggcgtattaggactggtcagtgcttacggcgtcttgaacgtgctcattctcaaggtgtcacaagtgtttccttctcccgtgatggaagccagttattaagcacttcatttgacagcacagcaagaattcatggcctcaaatctggaaagatgttgaaagagttccgtggccatacatcttatgtgaatgatgcaatttttacaaatgatgggagtcgtgttattactgcctcaagtgactgtacaatcaaggtctgggatgtaaagactacagactgcatacaaacttttaagccacctcctcctttaaggggaggtgatgcttctgtcaattctgttcacattttccccaagaatactgatcacattgttgtttgtaacaaaacgtcatccatatatatcatgacacttcaaggacaggttgtgaagagcttctcatctggtaaaagagaaggcggagactttgttgcagcctgtgtttcacctaaaggagaatggatttactgtgttggtgaagacaggaatatgtactgctttagctatcaatctggcaaattggagcatctaatgaaggtccacgagaaggaagttataggtgtcactcatcatccccataggaatcttgtcgcaacatttagtgaagactgcacaatgaagtcgtggaagccatgaatcttgtctgctttaagtctatttctattctatcttgttaacataattgagcatctgtgtagtttgtgcaatgtatatattcaggagtttaattttaatgtattgttggtaaaattattttatattgttgacgaatgatatgttggtagaaaaccgacgctgaggtgagttattgacagattgaaaattc

SEQ ID NO: 22430 - protein, 361 aa, Glycine max
VTVVPPSRLMALIGQALKWQQHQGLLPPGTQFDLFRGTAAMKQDVDDMYPTTLSHTIKFGTKSHAECACFSPDGQFLVSCSVDGFIEVWDYISGKLKKDLQYQADEVFMMHDDAVLCVDFSRDSEMLASGSQDGKIKVWRIRTGQCLRRLERAHSQGVTSVSFSRDGSQLLSTSFDSTARIHGLKSGKMLKEFRGHTSYVNDAIFTNDGSRVITASSDCTIKVWDVKTTDCIQTFKPPPPLRGGDASVNSVHIFPKNTDHIVVCNKTSSIYIMTLQGQVVKSFSSGKREGGDFVAACVSPKGEWIYCVGEDRNMYCFSYQSGKLEHLMKVHEKEVIGVTHHPHRNLVATFSEDCTMKSWKP

SEQ ID NO: 22431 - protein, 352 aa, Glycine max
MALIGQALKWQQHQGLLPPGTQFDLFRGTAAMKQDVDDMYPTTLSHTIKFGTKSHAECACFSPDGQFLVSCSVDGFIEVWDYISGKLKKDLQYQADEVFMMHDDAVLCVDFSRDSEMLASGSQDGKIKVWRIRTGQCLRRLERAHSQGVTSVSFSRDGSQLLSTSFDSTARIHGLKSGKMLKEFRGHTSYVNDAIFTNDGSRVITASSDCTIKVWDVKTTDCIQTFKPPPPLRGGDASVNSVHIFPKNTDHIVVCNKTSSIYIMTLQGQVVKSFSSGKREGGDFVAACVSPKGEWIYCVGEDRNMYCFSYQSGKLEHLMKVHEKEVIGVTHHPHRNLVATFSEDCTMKSWKP

SEQ ID NO: 22432 - protein, 321 aa, Glycine max
MKQDVDDMYPTTLSHTIKFGTKSHAECACFSPDGQFLVSCSVDGFIEVWDYISGKLKKDLQYQADEVFMMHDDAVLCVDFSRDSEMLASGSQDGKIKVWRIRTGQCLRRLERAHSQGVTSVSFSRDGSQLLSTSFDSTARIHGLKSGKMLKEFRGHTSYVNDAIFTNDGSRVITASSDCTIKVWDVKTTDCIQTFKPPPPLRGGDASVNSVHIFPKNTDHIVVCNKTSSIYIMTLQGQVVKSFSSGKREGGDFVAACVSPKGEWIYCVGEDRNMYCFSYQSGKLEHLMKVHEKEVIGVTHHPHRNLVATFSEDCTMKSWKP

SEQ ID NO: 22433 - DNA, 1107 bp, Glycine max
tctagattcacaagtactatcaaagcatatgaagaataaatcatcgtgcgattttatggttccttctaatcataactactctgttaggctgagtccaatatgttgtaagctatcagaaagtgggattgaggagaaccacacgagcacgagcacgggcgagaggccctctaagatcaaggacaggatggaggagtacaatatagctatgaagaaaatgatgaggaacccttatgagtatcaccatgatctgggtatgaattatactcttataacggacaatttgattgttggctcccaaccacagaaacctgaagacatagatcacctcaaaaaggaagagggtgtggcatacattttaaacttgcaacaagataacgatgttgagtattggggagtagacttgcagtcaataataagaaggtctcgtgaacttgaaattagccacacaaggagaccggcaaaagactttgatccagattccttgcaaaatgaactacctaaagcagtctcatccttagaatgggcaatttctgagggaaaaggaagagtttatgtgcattgtacggctggacttggaagagctccagcggtggcaattgcttatttgttctggttttgtgacatgaatctaaatgaagcatatgatatgctaacttcaaagagaccttgtggaccaaataaaagagcaatacgtggcgctacttatgatttggctaagaatgatccttggaaggagccatttgagactcttccagaatatgcatttgaggatatagcagattgggaaaggaacttgattcaagatcgtgcccgctcccttcgtggaatttgacaacttcggtttctacttatctgagattcctacataggttgccacccttgctgggatggtatcaggtgccatgatactgctcaagttggagatattttttcaagcatattcatactgatatgggcacatagcttacaacgtgtacgaaatattcagtatagtacagactatagagtggtaaataatcaattttgcgaataatgcaccataattgtagacgtcctaataatatctgagagtgcaaaatgcctagttgatctattggtctgtcaaag

SEQ ID NO: 22434 - protein, 276 aa, Glycine max
LDSQVLSKHMKNKSSCDFMVPSNHNYSVRLSPICCKLSESGIEENHTSTSTGERPSKIKDRMEEYNIAMKKMMRNPYEYHHDLGMNYTLITDNLIVGSQPQKPEDIDHLKKEEGVAYILNLQQDNDVEYWGVDLQSIIRRSRELEISHTRRPAKDFDPDSLQNELPKAVSSLEWAISEGKGRVYVHCTAGLGRAPAVAIAYLFWFCDMNLNEAYDMLTSKRPCGPNKRAIRGATYDLAKNDPWKEPFETLPEYAFEDIADWERNLIQDRARSLRGI

SEQ ID NO: 22435 - protein, 267 aa, Glycine max
MKNKSSCDFMVPSNHNYSVRLSPICCKLSESGIEENHTSTSTGERPSKIKDRMEEYNIAMKKMMRNPYEYHHDLGMNYTLITDNLIVGSQPQKPEDIDHLKKEEGVAYILNLQQDNDVEYWGVDLQSIIRRSRELEISHTRRPAKDFDPDSLQNELPKAVSSLEWAISEGKGRVYVHCTAGLGRAPAVAIAYLFWFCDMNLNEAYDMLTSKRPCGPNKRAIRGATYDLAKNDPWKEPFETLPEYAFEDIADWERNLIQDRARSLRGI

SEQ ID NO: 22436 - protein, 258 aa, Glycine max
MVPSNHNYSVRLSPICCKLSESGIEENHTSTSTGERPSKIKDRMEEYNIAMKKMMRNPYEYHHDLGMNYTLITDNLIVGSQPQKPEDIDHLKKEEGVAYILNLQQDNDVEYWGVDLQSIIRRSRELEISHTRRPAKDFDPDSLQNELPKAVSSLEWAISEGKGRVYVHCTAGLGRAPAVAIAYLFWFCDMNLNEAYDMLTSKRPCGPNKRAIRGATYDLAKNDPWKEPFETLPEYAFEDIADWERNLIQDRARSLRGI

SEQ ID NO: 22437 - DNA, 1343 bp, Glycine max
aacatagtgaaacctaatgaacgaacttgtggcatcataataagtggttattgcaaggaaggcaatatgccagaagccttgaggtttctatacagaatgaaggagcttggtgtggatccaaatccagtagttttcaactctcttatcaaaggatatctagacactacagacacaaatggagtagatgaggcactgacgttgatggaagaatttgggatcaaaccagatgtagtaacctttagcaccatcatgaatgcatggagttcagcagggcttatggaaaattgtgaggagatattcaacgacatggtgaaggccggtatagaacctgacatccacgcatatagcatccttgcaaaaggctatgtgcgtgccggacagccacgaaaagccgaggctcttctgacttctatgagcaaatatggcgtacaaccaaacgtggtgatcttcactaccatcatcagtggatggtgtgccgcaggcaaaatggatcgtgcatttagactttgtgagaaaatgcatgaaatgggaacttccccaaatttgaaaacttatgaaactttaatatggggatatggagaagcaaaacaaccatggaaagcagaagagttacttactactatggaagagaggggtgttgtccctgaaatgtcgactatgcaactggtggctgatgcttggcgtgccattggtttattcaaagaagccaacagaattcttaatggttcagaagaagaatctgagctagatcaagaatttgatagtgacaagatacaagtgcaaagcttggagagtatttataagaaacagaaactcagtgcttctccctctaatctgcttcaaatacctgacgtagtggtgactcatccaacaagaacaactaatggaaacataagatgcagaatggtagtcaaactatctgacaacatgcggaatgttaccacttccatgttttttgttcgcacaagaagttcatatggagtgcaaccactgattgtaagtaggcagcagattcaaaatcaggttgttaggccattccttgactgttgcagagtagtgtcaatactttgttgaggtgacttaccactgtgatgaaacacaaatcctttctgaatagatttggttgtttccatgacagtacaccatgccaatgagttcaggtggaaaaactgtagataccattcatggacttcagaaatcagaacatacacttacaattttgacaaaatgctggtgtaatttcaattgttgaactgctgctactcgtattcagtaatcacttgccaatgaaatgtgtatcctattacatcactataaaattcgttttgtattgttgtgtacat

SEQ ID NO: 22438 - protein, 357 aa, Glycine max
NIVKPNERTCGIIISGYCKEGNMPEALRFLYRMKELGVDPNPVVFNSLIKGYLDTTDTNGVDEALTLMEEFGIKPDVVTFSTIMNAWSSAGLMENCEEIFNDMVKAGIEPDIHAYSILAKGYVRAGQPRKAEALLTSMSKYGVQPNVVIFTTIISGWCAAGKMDRAFRLCEKMHEMGTSPNLKTYETLIWGYGEAKQPWKAEELLTTMEERGVVPEMSTMQLVADAWRAIGLFKEANRILNGSEEESELDQEFDSDKIQVQSLESIYKKQKLSASPSNLLQIPDVVVTHPTRTTNGNIRCRMVVKLSDNMRNVTTSMFFVRTRSSYGVQPLIVSRQQIQNQVVRPFLDCCRVVSILC

SEQ ID NO: 22439 - protein, 335 aa, Glycine max
MPEALRFLYRMKELGVDPNPVVFNSLIKGYLDTTDTNGVDEALTLMEEFGIKPDVVTFSTIMNAWSSAGLMENCEEIFNDMVKAGIEPDIHAYSILAKGYVRAGQPRKAEALLTSMSKYGVQPNVVIFTTIISGWCAAGKMDRAFRLCEKMHEMGTSPNLKTYETLIWGYGEAKQPWKAEELLTTMEERGVVPEMSTMQLVADAWRAIGLFKEANRILNGSEEESELDQEFDSDKIQVQSLESIYKKQKLSASPSNLLQIPDVVVTHPTRTTNGNIRCRMVVKLSDNMRNVTTSMFFVRTRSSYGVQPLIVSRQQIQNQVVRPFLDCCRVVSILC

SEQ ID NO: 22440 - protein, 325 aa, Glycine max
MKELGVDPNPVVFNSLIKGYLDTTDTNGVDEALTLMEEFGIKPDVVTFSTIMNAWSSAGLMENCEEIFNDMVKAGIEPDIHAYSILAKGYVRAGQPRKAEALLTSMSKYGVQPNVVIFTTIISGWCAAGKMDRAFRLCEKMHEMGTSPNLKTYETLIWGYGEAKQPWKAEELLTTMEERGVVPEMSTMQLVADAWRAIGLFKEANRILNGSEEESELDQEFDSDKIQVQSLESIYKKQKLSASPSNLLQIPDVVVTHPTRTTNGNIRCRMVVKLSDNMRNVTTSMFFVRTRSSYGVQPLIVSRQQIQNQVVRPFLDCCRVVSILC

SEQ ID NO: 22441 - DNA, 1141 bp, Glycine max
aaaaaaaaaaaaaacgcgcactctatataagtgcattttttccctttctctttcatcaaattgtgcttgtgattgtctttgtatcacgaaaactatacgattcgattccttgttttcaatggacaccttcttcaattctcaatcttcttcttcttcgagaagccgctggagttacgatactctcaagaatttccgtgagatctctccgctggttcagaatcacatcaaacgggtttattttacgttatgttgcgctgtggtggctgctgctgttggagcttttcttcatgttctgtggaacattgggggttttctcaccacgttggcttccattggaagcatggtttggttgctatctacaccccctgttgaagagcaaaagaggttgtctctgttgatggcttcggccttgtttcagggcgcttccattggacctctgattgatttggctattgccattgatcctagccttattgttagtgcatttgtggcaacttctttggcttttgcttgcttctctgcggcagctttagttgcaaggcgtagggagtacctctaccttggtggtttgctttcttctgggctgtccattcttatgtggttgcactttgcttcctctctctttgggggctcaattgcactcttcaagtttgagctgtactttgggcttttggtgtttgtgggctacgttatagtagacactcaagaaattattgaaagggctcactttggtgacctggattatgtgaagcatgcattgacattgttcactgatttggctgcaatctttgtgcgaattcttattataatgttgaagaattcatctgagagaaatgagaagaagaagaaaaggagagattagtaggctgaccgaccgactcgagctcaggcttctctacagtaatttagtttgtggagaatacataattagctgtttagatgatgttggtcccttgtgtagttagttagctatgtgtttgctgtaatggtaaatgtcaggatttcttttaaacatcttcatatgtatttgccaatatcataatgtgtcgtataacatcataccttggtttaagcagcatgttgacgaaaccttcactaaattttatttttgggtttagtttattttatacattaagtggac

SEQ ID NO: 22442 - protein, 286 aa, Glycine max
KKKKTRTLYKCIFSLSLSSNCACDCLCITKTIRFDSLFSMDTFFNSQSSSSSRSRWSYDTLKNFREISPLVQNHIKRVYFTLCCAVVAAAVGAFLHVLWNIGGFLTTLASIGSMVWLLSTPPVEEQKRLSLLMASALFQGASIGPLIDLAIAIDPSLIVSAFVATSLAFACFSAAALVARRREYLYLGGLLSSGLSILMWLHFASSLFGGSIALFKFELYFGLLVFVGYVIVDTQEIIERAHFGDLDYVKHALTLFTDLAAIFVRILIIMLKNSSERNEKKKKRRD

SEQ ID NO: 22443 - protein, 247 aa, Glycine max
MDTFFNSQSSSSSRSRWSYDTLKNFREISPLVQNHIKRVYFTLCCAVVAAAVGAFLHVLWNIGGFLTTLASIGSMVWLLSTPPVEEQKRLSLLMASALFQGASIGPLIDLAIAIDPSLIVSAFVATSLAFACFSAAALVARRREYLYLGGLLSSGLSILMWLHFASSLFGGSIALFKFELYFGLLVFVGYVIVDTQEIIERAHFGDLDYVKHALTLFTDLAAIFVRILIIMLKNSSERNEKKKKRRD

SEQ ID NO: 22444 - protein, 173 aa, Glycine max
MVWLLSTPPVEEQKRLSLLMASALFQGASIGPLIDLAIAIDPSLIVSAFVATSLAFACFSAAALVARRREYLYLGGLLSSGLSILMWLHFASSLFGGSIALFKFELYFGLLVFVGYVIVDTQEIIERAHFGDLDYVKHALTLFTDLAAIFVRILIIMLKNSSERNEKKKKRRD

SEQ ID NO: 22445 - DNA, 1519 bp, Glycine max
attcaaaaaacactttaccagccatccatcatcattcccttttccatgaaaaccctttcctttgtgctcatctccacattgtttgcctatctattggcccaagactgtaacaacccactcttgaacgcctttaaccttactggccttgatactcctcaatcaggagcaggtctcgctttctgcggtaaccttcaaaatggtcagacctgttgctcagctgaaaccgtccaatccttccaatcaagacttgataacctcacaacctctcttcaagacttggcaggccaaagagatgtctacatgaccgagctctatgccaactacagcagcgaattccaacgtgctgctgacgacctcactgactatagcgatgagatttctcgactccaaagagataattctactgtcggtaacgagactagatatcaatataatggtctcaatcgtattgctcgcgctcttgataacattgataacaatttccgctctgctattcaagattaccaacaaagaagagctgcttgtttcaacactgttttgcaagttcaatcctcggcttggtgcttggcttgcgaccctaactacgcaagtgtcggagttttatctaatggatcagtaaactcttctcctgcagtctgtaatgctatccaacaaagctgccttccttatgtggaacaatctagctatcttaatcctttgttccaagctcaacaggcttatcaaagattggtgaacttgactggatatttgagagattatgagagaaataattttacgcttccagaaaatgtcactcttgaaaatgatctctatgttcctgctaatgatactgaaagaacctctgctcttcttcctaattgcacaaacggcacttgtcaatggcaatgctccaatttcttctcaccaagtttggttctgaataattctattgttgccaatggtggtggaatcctcggaggagatgacctcaactttactgctatcggtgcaaatatttctcaagctaacaattctgtagttgttaacgatactgcaaacattgtcaatgaaaccgttggtgatgctgtaagcacagtgacaggaggaagacttttgcaagacttacaagagagtttatggacccctgatcttagcggaactggtttgattttcaatgttgtgaatgaccctgcagatattgctgctatcttgaacaataaccctatctttgatgactctgataacaatcaaactgataatgacgagaacactttgactgacaatgatgacgattttactgataatgatggtatcaacacgaccaatgaaggttttgacaacaccgattttgatggtgttgataccactggtaatgatctcactgacaacgacggtattgatactacagataatgatggtgtaaatactggtaatgacttgactgataatgatggtgtggatacgactggggctggtggtgttgataacactgataatgatggtgttaatactgtcaatgatcccactgataatgacggtg

SEQ ID NO: 22446 - protein, 506 aa, Glycine max
IQKTLYQPSIIIPFSMKTLSFVLISTLFAYLLAQDCNNPLLNAFNLTGLDTPQSGAGLAFCGNLQNGQTCCSAETVQSFQSRLDNLTTSLQDLAGQRDVYMTELYANYSSEFQRAADDLTDYSDEISRLQRDNSTVGNETRYQYNGLNRIARALDNIDNNFRSAIQDYQQRRAACFNTVLQVQSSAWCLACDPNYASVGVLSNGSVNSSPAVCNAIQQSCLPYVEQSSYLNPLFQAQQAYQRLVNLTGYLRDYERNNFTLPENVTLENDLYVPANDTERTSALLPNCTNGTCQWQCSNFFSPSLVLNNSIVANGGGILGGDDLNFTAIGANISQANNSVVVNDTANIVNETVGDAVSTVTGGRLLQDLQESLWTPDLSGTGLIFNVVNDPADIAAILNNNPIFDDSDNNQTDNDENTLTDNDDDFTDNDGINTTNEGFDNTDFDGVDTTGNDLTDNDGIDTTDNDGVNTGNDLTDNDGVDTTGAGGVDNTDNDGVNTVNDPTDNDG

SEQ ID NO: 22447 - protein, 491 aa, Glycine max
MKTLSFVLISTLFAYLLAQDCNNPLLNAFNLTGLDTPQSGAGLAFCGNLQNGQTCCSAETVQSFQSRLDNLTTSLQDLAGQRDVYMTELYANYSSEFQRAADDLTDYSDEISRLQRDNSTVGNETRYQYNGLNRIARALDNIDNNFRSAIQDYQQRRAACFNTVLQVQSSAWCLACDPNYASVGVLSNGSVNSSPAVCNAIQQSCLPYVEQSSYLNPLFQAQQAYQRLVNLTGYLRDYERNNFTLPENVTLENDLYVPANDTERTSALLPNCTNGTCQWQCSNFFSPSLVLNNSIVANGGGILGGDDLNFTAIGANISQANNSVVVNDTANIVNETVGDAVSTVTGGRLLQDLQESLWTPDLSGTGLIFNVVNDPADIAAILNNNPIFDDSDNNQTDNDENTLTDNDDDFTDNDGINTTNEGFDNTDFDGVDTTGNDLTDNDGIDTTDNDGVNTGNDLTDNDGVDTTGAGGVDNTDNDGVNTVNDPTDNDG

SEQ ID NO: 22448 - protein, 406 aa, Glycine max
MTELYANYSSEFQRAADDLTDYSDEISRLQRDNSTVGNETRYQYNGLNRIARALDNIDNNFRSAIQDYQQRRAACFNTVLQVQSSAWCLACDPNYASVGVLSNGSVNSSPAVCNAIQQSCLPYVEQSSYLNPLFQAQQAYQRLVNLTGYLRDYERNNFTLPENVTLENDLYVPANDTERTSALLPNCTNGTCQWQCSNFFSPSLVLNNSIVANGGGILGGDDLNFTAIGANISQANNSVVVNDTANIVNETVGDAVSTVTGGRLLQDLQESLWTPDLSGTGLIFNVVNDPADIAAILNNNPIFDDSDNNQTDNDENTLTDNDDDFTDNDGINTTNEGFDNTDFDGVDTTGNDLTDNDGIDTTDNDGVNTGNDLTDNDGVDTTGAGGVDNTDNDGVNTVNDPTDNDG

SEQ ID NO: 22449 - DNA, 1632 bp, Glycine max
actgtcataacataagagtcgtggacgcggttggctgttgctgtctacggttccaacttccaagttacaagcttcacccattttataaaagttacggttcggttccgctgcattcgtgctttctagcaacacaaaatgagcgccatctctttcagttccacccatttgcacagttggaaaaatcccaaggggtttggaaaggtgagaaagcaacgagatgggaagctacttgtcaagtgttccagcaagagtgggaacccaacttcattgcaaaatggggttcgtgttggtgttcttggagctagtggctacactggttctgaggttatgcgactcttggctaatcatccacagtttgggattgcactgatgactgctgataggaaagctgggcagccaatctcttctgtattcccacatttgagcactcgggacttgccagatttgattgcaataaaggatgcaaacttttctgatgtggatgctgtattctgttgtttgcctcatggaactactcaggaaattattaaaggcctaccaaagcacttgaagattgttgatctttctgcagattttcgtctaaaagatctttctgagtatgaagagtggtatggtcagccgcatagagcaccagatttgcagaaagaagctatatatggattaacagaggttttaagggaggaaataaagaatgcacgtctagttgctaatcctggttgttatccaacttctgttcaacttcctcttgtcccattgataaaggctagtcttattgagcttaaaaatattatcattgatgctaaatctggtgtgagtggagcagggcgcagtgccaaagaaaatttattgttcactgaagtaactgaaggtctcaattcttatggtgttaccctacatcgccatgttcctgaaattgagcagggacttgctgatgcttcaggttcaaaagtaactgttagttttacaccacatctaattccaatgagccgtggtatgtaatcaactatttatgtggaaatggctccaggagtgagaattgaggacctgtaccagcaactgaagctctcatatgagaatgaagaatttgtttttgtgttggaaaatggagtcattcctcgaactcacagcgttaaagggactaattactgtttaatcaatgtttttccagaccgaattcctggaagagcaatcattatatctgttattgataatctagtgaagggagcttcaggtcaagctttacaaaaccttaatttgttaatgggatttccagaaaatttgggacttcattacctgcctctttttccatagagtagttgtcttgtccaactagagctccaattctgcagtcacagttccaccaaaatacttgatggagcagaggaaatattttcaagttatgtattttcgttctctagattgtaatgtgagattcttcaagaatttagaagggaattgattatggcattggcagggatactatagcaatttctgtcttttttgtcctttgttttgatctgtaatgttagaaatcactgaaggtggtggcgtgtagttttccaagtttgggttttggtttatttgtaatgccaatattttagtggactatgaaatcaccatctcaagtttttg

SEQ ID NO: 22450 - protein, 287 aa, Glycine max
MSAISFSSTHLHSWKNPKGFGKVRKQRDGKLLVKCSSKSGNPTSLQNGVRVGVLGASGYTGSEVMRLLANHPQFGIALMTADRKAGQPISSVFPHLSTRDLPDLIAIKDANFSDVDAVFCCLPHGTTQEIIKGLPKHLKIVDLSADFRLKDLSEYEEWYGQPHRAPDLQKEAIYGLTEVLREEIKNARLVANPGCYPTSVQLPLVPLIKASLIELKNIIIDAKSGVSGAGRSAKENLLFTEVTEGLNSYGVTLHRHVPEIEQGLADASGSKVTVSFTPHLIPMSRGM

SEQ ID NO: 22451 - protein, 223 aa, Glycine max
MRLLANHPQFGIALMTADRKAGQPISSVFPHLSTRDLPDLIAIKDANFSDVDAVFCCLPHGTTQEIIKGLPKHLKIVDLSADFRLKDLSEYEEWYGQPHRAPDLQKEAIYGLTEVLREEIKNARLVANPGCYPTSVQLPLVPLIKASLIELKNIIIDAKSGVSGAGRSAKENLLFTEVTEGLNSYGVTLHRHVPEIEQGLADASGSKVTVSFTPHLIPMSRGM

SEQ ID NO: 22452 - protein, 209 aa, Glycine max
MTADRKAGQPISSVFPHLSTRDLPDLIAIKDANFSDVDAVFCCLPHGTTQEIIKGLPKHLKIVDLSADFRLKDLSEYEEWYGQPHRAPDLQKEAIYGLTEVLREEIKNARLVANPGCYPTSVQLPLVPLIKASLIELKNIIIDAKSGVSGAGRSAKENLLFTEVTEGLNSYGVTLHRHVPEIEQGLADASGSKVTVSFTPHLIPMSRGM

SEQ ID NO: 22453 - DNA, 1238 bp, Glycine max
tttcaccgatttcatgttgtgtacttggagaccaatgcgaaatgctgccaaaattttgtcaaatttaacaaaatagaattaaccctgatgtatgaagctaccataaaagacggtcttcccaaatgggatagggccacacctataataaaaaagtgagattttcatgcatcgaataactttgagagtatgaccgagttattacttagatggatcgaagttggatgaatgaaagtcgcatcagcccagaatatgaggaaggcgtcgagcaattcttacaatttgcttcagaaagaggtcaaccggatgaagatggaaaatattattgtccttgcatcaattgtttgaatgaaagacgacaaatactggatgacatacgagagcatctgttgtgtgatggaattaagaggaattatacgacgtggatatggcatggtgaaatgacagacatgcagagtgggcaacaatccgaaccgtttgatgtagaaatgggagatcgcttggaggatatgattcgtgaccttggacaagagtcttttcagcaagcacatgcccctatgtatgatacattacaaactgattcaaagaaacctttgtatccggggtgcaagaattcgttgacgctgttgtcggcagttttaagtctggttaatatcaaagccagatatgggtggagtgacaaaaactttagttcactgcttcaagtagtgcacgacatgcttccagaggaaaacacattgcctaaaagttactatcaagcaaagaaaatattgtgtcccatgggtatggagtatcagaagattcatgtttgcccgaatgattgcatattatacagacatcaatttcaagaaatgtacaataagaatctatgtttgtattcaatagtgctttgaaaggacttgacgatactcaacaaagtaaatccaagactcctgctaggtggattgttgttaaatgtaatagacaaaaaggaagcactgagtgtgagtattacgtcatgcattggatgtcaactataatcttaggaaatttccagaataattgggaaatgtatttcactgatcctagaccattggaaccagaaagattgaaggcacttcgcaaccagtgggcaaagtactatttgaaagtgaaaaatgaaacttaggatgtttagacaatcttgtaattgtagtttatatttacttaatttacaattcatgtctcaacattaaatatgttttaaattcatagtaattagt

SEQ ID NO: 22454 - protein, 227 aa, Glycine max
MDRSWMNESRISPEYEEGVEQFLQFASERGQPDEDGKYYCPCINCLNERRQILDDIREHLLCDGIKRNYTTWIWHGEMTDMQSGQQSEPFDVEMGDRLEDMIRDLGQESFQQAHAPMYDTLQTDSKKPLYPGCKNSLTLLSAVLSLVNIKARYGWSDKNFSSLLQVVHDMLPEENTLPKSYYQAKKILCPMGMEYQKIHVCPNDCILYRHQFQEMYNKNLCLYSIVL

SEQ ID NO: 22455 - protein, 222 aa, Glycine max
MNESRISPEYEEGVEQFLQFASERGQPDEDGKYYCPCINCLNERRQILDDIREHLLCDGIKRNYTTWIWHGEMTDMQSGQQSEPFDVEMGDRLEDMIRDLGQESFQQAHAPMYDTLQTDSKKPLYPGCKNSLTLLSAVLSLVNIKARYGWSDKNFSSLLQVVHDMLPEENTLPKSYYQAKKILCPMGMEYQKIHVCPNDCILYRHQFQEMYNKNLCLYSIVL

SEQ ID NO: 22456 - protein, 150 aa, Glycine max
MTDMQSGQQSEPFDVEMGDRLEDMIRDLGQESFQQAHAPMYDTLQTDSKKPLYPGCKNSLTLLSAVLSLVNIKARYGWSDKNFSSLLQVVHDMLPEENTLPKSYYQAKKILCPMGMEYQKIHVCPNDCILYRHQFQEMYNKNLCLYSIVL

SEQ ID NO: 22457 - DNA, 1224 bp, Glycine max
taatcgtagattaacatctttgccaaagtcgctgtctaagttgaggtctcttacttctttagtgctccgccaatgttcaaaattgaaagatatacctccactgggagatctacaagcattgtcaagattggacatttccggttgtaattcgctcctcagggtaccggaaggcttgcaaaatctaaaaaagttgcaatggcttagtctttcccgcaagctgaatttatcattagtaccgttatgcgtactgcccggtttgagcaatatgcaatatctggatctccgcggttggtctggtataaaagtagaagatgtaaaagggatgactatgcttgaatgttttgcagtaagctttctcgatcaggattactacaaccgttctgtgcaagaaattcaggacactggttatggacctcaaacctattttatctattttggaaaatttaaggattacacacttggattttctgagaatcttatttatggtgaattcaagcatcgaagggtatgttttggagattgcgatggattacactatttactgccaagagaccttgcagaattacttgtaagtggcaatgatcaatgggaatgcttatgtgctcctctgtcatctaatggttctctatctttaaagcacattaccattcgggactgcacaaaattgaagagtttattctgtgtatcttgtcccttatgcactaatatccaaaacctcaaatctttgacacttaataatttggatagtttaagtgtcatctgcaaggaagatgttgctggtttaacacaatctttatctcggaggggggtgttttctcatctcaaggaattgagtatcagtggatgccatcaaatagagaagttgctgacgccagggttagtgccacaacttcaaaacctgaagtctatatcggtatcgaactgccaatcaataaaggagatatttgcaggagatagttcccacaacattgcacttcccaatttaaccaacttgcaactatactggttaccagacttaaagacagtgtgcaaaggaattttactcattaactctgaggatatattgcacatcaacaattgtcccaattatgaaaaacccagaattagtcgtgtatgattgattctgttgattcagattatggtacttattttatgtggcttagtctttgtattcgtaattcttgcaaagaaaaaacaaaatcataatttgctttttgaaatagc

SEQ ID NO: 22458 - protein, 371 aa, Glycine max
NRRLTSLPKSLSKLRSLTSLVLRQCSKLKDIPPLGDLQALSRLDISGCNSLLRVPEGLQNLKKLQWLSLSRKLNLSLVPLCVLPGLSNMQYLDLRGWSGIKVEDVKGMTMLECFAVSFLDQDYYNRSVQEIQDTGYGPQTYFIYFGKFKDYTLGFSENLIYGEFKHRRVCFGDCDGLHYLLPRDLAELLVSGNDQWECLCAPLSSNGSLSLKHITIRDCTKLKSLFCVSCPLCTNIQNLKSLTLNNLDSLSVICKEDVAGLTQSLSRRGVFSHLKELSISGCHQIEKLLTPGLVPQLQNLKSISVSNCQSIKEIFAGDSSHNIALPNLTNLQLYWLPDLKTVCKGILLINSEDILHINNCPNYEKPRISRV

SEQ ID NO: 22459 - protein, 283 aa, Glycine max
MQYLDLRGWSGIKVEDVKGMTMLECFAVSFLDQDYYNRSVQEIQDTGYGPQTYFIYFGKFKDYTLGFSENLIYGEFKHRRVCFGDCDGLHYLLPRDLAELLVSGNDQWECLCAPLSSNGSLSLKHITIRDCTKLKSLFCVSCPLCTNIQNLKSLTLNNLDSLSVICKEDVAGLTQSLSRRGVFSHLKELSISGCHQIEKLLTPGLVPQLQNLKSISVSNCQSIKEIFAGDSSHNIALPNLTNLQLYWLPDLKTVCKGILLINSEDILHINNCPNYEKPRISRV

SEQ ID NO: 22460 - protein, 264 aa, Glycine max
MTMLECFAVSFLDQDYYNRSVQEIQDTGYGPQTYFIYFGKFKDYTLGFSENLIYGEFKHRRVCFGDCDGLHYLLPRDLAELLVSGNDQWECLCAPLSSNGSLSLKHITIRDCTKLKSLFCVSCPLCTNIQNLKSLTLNNLDSLSVICKEDVAGLTQSLSRRGVFSHLKELSISGCHQIEKLLTPGLVPQLQNLKSISVSNCQSIKEIFAGDSSHNIALPNLTNLQLYWLPDLKTVCKGILLINSEDILHINNCPNYEKPRISRV

SEQ ID NO: 22461 - DNA, 1826 bp, Glycine max
agaaacgcccttattgtgctcacaaagataactagtatttttcctgtcatgcgaaaaagcggtatcaacatcgagaaaagggttgcgaagctaaagggggatgagagggaagatctgaaagtactggccactggtgtagctgctgctctggcagctcgcaagagttcatgggtatctgaagaagagtttggcatgggtcaccttgatctgaagccagtacctgcaaaacctattgctggaaatcagtatgcagatccctcgacagcaaaagatcatagcgtccgtgcaaaatctgtagagggtaggcatgaaaggtcagaaaatgcaatgaagcctgatgctcataagaagaatgcctcgactacaaacggatctgatattcaaatgccatcttcctctgcacaaggaaaaggttcagggcttgtacgtggtgtagatgaacctccaaaacttttgtccgatgatggagttaaagtcttgaagcctactgcagaacctgagacaagagcgccacaaaagcgtgctgtacaaaatgctgcaaaggtatctaagcacgatgtggtgaaggaagatggaaaacctgggagatctactagcaggggtcttaatcaacaagcctgtgctattcctgttgacagagaagtattgtatcaggcagctgatggtgtgctgaatactaatcccactagtccgttggttggcacaaatggtaatgtacatctggcaccacgaaaggtatctgcatcctcccaaagatcaacagtattggctgcacatagcggtggaacagctaatcccaccggtgaaggtgaatctgctgacttgattgattctaccgtgaaacagcaaaaaagatctgttcccgttgaagaacaagagaggacaggtaaacgaaggaaaggagagattgaaggcagggatggtgacttgacagagcaccatacggacaaagaaaaaaaattggacccgcgatcagtagataaatttcgttctgtggatcatgagagaggtgctagtgaggaacaaaacctaattcggacagagaaattaaaagaaaagtttgatgataaatatgacagagatcatagagaaaaagcagatcggtctgagaggcgccgtggaaaagacgtggttgaacgaccaacagacagatcattggaaaggagagagcgttctattgaaaagatgcaagacagagttcctgaaaaaggaagagaagacaggaataaggaggagaggaacaaagttaagcatgaacccatagatcgagcacatactattaagaatgaacccatagatcgagcatatactattaagaatgaacccatagaccgagcacatactgttaagcatgaacccatagaccgagcacatacttctgatgaacgcttccgagggcaaagcttgccaccacctccacctcttccaactagttttgtaccccaatcagtcgctgctaaccgaagagatgaagacagtgaccgaaggggcggcagcaccaggcatacccaacggtcgtctcccaggcgtgatgagaaagaaaggtggcacttggaggagaatgctccgctctcgcaggatgatgggaagcacagaagagaggaagatcttcgggatagaaagcgtgaagatagggatgtttcatcaagcaaggtagacgacagggatagggacaaaggtaatactgtgaaagaagatagtgatcctaatagtgcatccaaacggcggaagatcaaaagagaacagtctgctttggaagctggggaatatgcgccttctgctccacagcctccgagcgttggacctggtaactcacagtttgaaat

SEQ ID NO: 22462 - protein, 608 aa, Glycine max
RNALIVLTKITSIFPVMRKSGINIEKRVAKLKGDEREDLKVLATGVAAALAARKSSWVSEEEFGMGHLDLKPVPAKPIAGNQYADPSTAKDHSVRAKSVEGRHERSENAMKPDAHKKNASTTNGSDIQMPSSSAQGKGSGLVRGVDEPPKLLSDDGVKVLKPTAEPETRAPQKRAVQNAAKVSKHDVVKEDGKPGRSTSRGLNQQACAIPVDREVLYQAADGVLNTNPTSPLVGTNGNVHLAPRKVSASSQRSTVLAAHSGGTANPTGEGESADLIDSTVKQQKRSVPVEEQERTGKRRKGEIEGRDGDLTEHHTDKEKKLDPRSVDKFRSVDHERGASEEQNLIRTEKLKEKFDDKYDRDHREKADRSERRRGKDVVERPTDRSLERRERSIEKMQDRVPEKGREDRNKEERNKVKHEPIDRAHTIKNEPIDRAYTIKNEPIDRAHTVKHEPIDRAHTSDERFRGQSLPPPPPLPTSFVPQSVAANRRDEDSDRRGGSTRHTQRSSPRRDEKERWHLEENAPLSQDDGKHRREEDLRDRKREDRDVSSSKVDDRDRDKGNTVKEDSDPNSASKRRKIKREQSALEAGEYAPSAPQPPSVGPGNSQFE

SEQ ID NO: 22463 - protein, 592 aa, Glycine max
MRKSGINIEKRVAKLKGDEREDLKVLATGVAAALAARKSSWVSEEEFGMGHLDLKPVPAKPIAGNQYADPSTAKDHSVRAKSVEGRHERSENAMKPDAHKKNASTTNGSDIQMPSSSAQGKGSGLVRGVDEPPKLLSDDGVKVLKPTAEPETRAPQKRAVQNAAKVSKHDVVKEDGKPGRSTSRGLNQQACAIPVDREVLYQAADGVLNTNPTSPLVGTNGNVHLAPRKVSASSQRSTVLAAHSGGTANPTGEGESADLIDSTVKQQKRSVPVEEQERTGKRRKGEIEGRDGDLTEHHTDKEKKLDPRSVDKFRSVDHERGASEEQNLIRTEKLKEKFDDKYDRDHREKADRSERRRGKDVVERPTDRSLERRERSIEKMQDRVPEKGREDRNKEERNKVKHEPIDRAHTIKNEPIDRAYTIKNEPIDRAHTVKHEPIDRAHTSDERFRGQSLPPPPPLPTSFVPQSVAANRRDEDSDRRGGSTRHTQRSSPRRDEKERWHLEENAPLSQDDGKHRREEDLRDRKREDRDVSSSKVDDRDRDKGNTVKEDSDPNSASKRRKIKREQSALEAGEYAPSAPQPPSVGPGNSQFE

SEQ ID NO: 22464 - protein, 544 aa, Glycine max
MGHLDLKPVPAKPIAGNQYADPSTAKDHSVRAKSVEGRHERSENAMKPDAHKKNASTTNGSDIQMPSSSAQGKGSGLVRGVDEPPKLLSDDGVKVLKPTAEPETRAPQKRAVQNAAKVSKHDVVKEDGKPGRSTSRGLNQQACAIPVDREVLYQAADGVLNTNPTSPLVGTNGNVHLAPRKVSASSQRSTVLAAHSGGTANPTGEGESADLIDSTVKQQKRSVPVEEQERTGKRRKGEIEGRDGDLTEHHTDKEKKLDPRSVDKFRSVDHERGASEEQNLIRTEKLKEKFDDKYDRDHREKADRSERRRGKDVVERPTDRSLERRERSIEKMQDRVPEKGREDRNKEERNKVKHEPIDRAHTIKNEPIDRAYTIKNEPIDRAHTVKHEPIDRAHTSDERFRGQSLPPPPPLPTSFVPQSVAANRRDEDSDRRGGSTRHTQRSSPRRDEKERWHLEENAPLSQDDGKHRREEDLRDRKREDRDVSSSKVDDRDRDKGNTVKEDSDPNSASKRRKIKREQSALEAGEYAPSAPQPPSVGPGNSQFE

SEQ ID NO: 22465 - DNA, 1965 bp, Glycine max
ggtcgtcgcgctgataaaaaatgaccgcgtcgaggacgcgctctccgccattcattcctctaagaagcagcttgatgattttcatttcctcaaggcatactgcttatacagacaaaacaagttggatgaagccttggagtctttgaaaagacaagagagcaatgatgaaactatgcttttggaatgtcagatattgtatcgacttgggaaaatggatgcttgcttagatatctaccgcaagttccaaaattccaagattgataacatggaaataaattctgttgctgccctagttatggctggcaggtcatctgaagttcaaggaatgttggattcacttcgggttaaggcaacaagtagctttgaattggcatacaatactgcttgttctttaattgcaaggaataagtactcagatgcagagcaactattattgtcaggccgaagaattggtcaagaggtcctgatggaagataacctggccgatgatgacatagaaattgaattgtctcctatagctgtccaattagcctatgttcaccagctttttgggcgtaagcaagatgctattgaagcttatacagacgtgattaaacgagatatggctgatgaatcatcaatcgcggtggcagtgaacaatcttgtttcactgaaaggtccaaaagatgtttctgatagcctaaggaaacttgatcgacttaaagacaaggagaatcaaagcttccgactagctcctggactagacttgaaactttcagcaaaagaaaaggaagcaatatatgcaaatagggttgtgttacttcttcatgccaataagattgagcaggcacgagaacttgtttctgcattaccagatatgtttccagaaagtgtgataccgatattgctgcaagctgccctcttggttagagagaacaaagctggaagggctgaggaaatactagcacagtttgctagtaagttccctgagaagtccaaagttgttcacttagcccgggctcaggtagctgctgctgctggccacccacatattgcagcggattctctggctaagatatcagatatccaacacatgcctgctactgttgccacccttgtgtctttaaaagaacgagctggtgacattgatggcgcagctgctgtgcttgacgctgcaattaaatggtggtccaatgctatgactgaggacaataagctcaatactataacacaagaggctgcttctttcaaactcaggcatgggaaggaagaggatgctgctcaactctatgagcagctcgtcaaaagccagggaagcatagaagcactagttggtctggtaacaacagttgctcgcatggatgttgttaaggcagagctttatgaaaagcagctgaaggctctacctggtttaaagggaattgatgtggacagcttggagcgtacttctggagtgaaacaagttgatgctcctcgtgttggtgtccctgaaacatacgaggaaggaaagaataagacaaaatctaagaaaaagagaaagagaaagccaaggtatcctaaagggtttgaccctgcaaatccaggtcctgccccagatccagaaaggtggcttcccaagagggagagatcaacatataggcccaagaggaaggataaaagagctgctcaagtgagagggtctcagggtgctgtagttagagataagcatgatactggtgcctcatctaacaattcaaatccaaaatcaaaccagggaacttccaaaggagctgcgcagaatgcggtttctgagcaaaccaagccttcatccaagtcaagaaagaagtcgaggaattaaataggactcgtggttttttatgaacttttttatttgactatttgttaatgctgtttttaatgactaaaatgagggtccatacatacactgtgggttcaaattcaaaaccgtcagttttggttcaaggaatgagtatatcttttagatgc

SEQ ID NO: 22466 - protein, 604 aa, Glycine max
VVALIKNDRVEDALSAIHSSKKQLDDFHFLKAYCLYRQNKLDEALESLKRQESNDETMLLECQILYRLGKMDACLDIYRKFQNSKIDNMEINSVAALVMAGRSSEVQGMLDSLRVKATSSFELAYNTACSLIARNKYSDAEQLLLSGRRIGQEVLMEDNLADDDIEIELSPIAVQLAYVHQLFGRKQDAIEAYTDVIKRDMADESSIAVAVNNLVSLKGPKDVSDSLRKLDRLKDKENQSFRLAPGLDLKLSAKEKEAIYANRVVLLLHANKIEQARELVSALPDMFPESVIPILLQAALLVRENKAGRAEEILAQFASKFPEKSKVVHLARAQVAAAAGHPHIAADSLAKISDIQHMPATVATLVSLKERAGDIDGAAAVLDAAIKWWSNAMTEDNKLNTITQEAASFKLRHGKEEDAAQLYEQLVKSQGSIEALVGLVTTVARMDVVKAELYEKQLKALPGLKGIDVDSLERTSGVKQVDAPRVGVPETYEEGKNKTKSKKKRKRKPRYPKGFDPANPGPAPDPERWLPKRERSTYRPKRKDKRAAQVRGSQGAVVRDKHDTGASSNNSNPKSNQGTSKGAAQNAVSEQTKPSSKSRKKSRN

SEQ ID NO: 22467 - protein, 547 aa, Glycine max
MLLECQILYRLGKMDACLDIYRKFQNSKIDNMEINSVAALVMAGRSSEVQGMLDSLRVKATSSFELAYNTACSLIARNKYSDAEQLLLSGRRIGQEVLMEDNLADDDIEIELSPIAVQLAYVHQLFGRKQDAIEAYTDVIKRDMADESSIAVAVNNLVSLKGPKDVSDSLRKLDRLKDKENQSFRLAPGLDLKLSAKEKEAIYANRVVLLLHANKIEQARELVSALPDMFPESVIPILLQAALLVRENKAGRAEEILAQFASKFPEKSKVVHLARAQVAAAAGHPHIAADSLAKISDIQHMPATVATLVSLKERAGDIDGAAAVLDAAIKWWSNAMTEDNKLNTITQEAASFKLRHGKEEDAAQLYEQLVKSQGSIEALVGLVTTVARMDVVKAELYEKQLKALPGLKGIDVDSLERTSGVKQVDAPRVGVPETYEEGKNKTKSKKKRKRKPRYPKGFDPANPGPAPDPERWLPKRERSTYRPKRKDKRAAQVRGSQGAVVRDKHDTGASSNNSNPKSNQGTSKGAAQNAVSEQTKPSSKSRKKSRN

SEQ ID NO: 22468 - protein, 534 aa, Glycine max
MDACLDIYRKFQNSKIDNMEINSVAALVMAGRSSEVQGMLDSLRVKATSSFELAYNTACSLIARNKYSDAEQLLLSGRRIGQEVLMEDNLADDDIEIELSPIAVQLAYVHQLFGRKQDAIEAYTDVIKRDMADESSIAVAVNNLVSLKGPKDVSDSLRKLDRLKDKENQSFRLAPGLDLKLSAKEKEAIYANRVVLLLHANKIEQARELVSALPDMFPESVIPILLQAALLVRENKAGRAEEILAQFASKFPEKSKVVHLARAQVAAAAGHPHIAADSLAKISDIQHMPATVATLVSLKERAGDIDGAAAVLDAAIKWWSNAMTEDNKLNTITQEAASFKLRHGKEEDAAQLYEQLVKSQGSIEALVGLVTTVARMDVVKAELYEKQLKALPGLKGIDVDSLERTSGVKQVDAPRVGVPETYEEGKNKTKSKKKRKRKPRYPKGFDPANPGPAPDPERWLPKRERSTYRPKRKDKRAAQVRGSQGAVVRDKHDTGASSNNSNPKSNQGTSKGAAQNAVSEQTKPSSKSRKKSRN

SEQ ID NO: 22469 - DNA, 1450 bp, Glycine max
gcgagacaatacagctgattccagtaaaacagaaacaaagtctgacaaagatgacaaaaaggaagaaagagttactggtgaaaaaagtggggcaaagacagacaagctgaaagcctctgataaagatgttaccaatgtaaaggggaaagtgaaagatggggacaagtcaaaagatgagaaagtaacccaagagagggatggaaaggacgagtccaaaagcaaatctagtaaggaagtgaaagacaagaggaagtctaatgaacctcctcgacaccctggatttattcttcaaacaaaatggaccaaagattctaaaatacgttctttgtcattgtcactggattcattgctggattatacagataaagatgttgaagaatcaaatcttgagctttcattgtttgctgaatcattttatgaaatgcttcagtttcaaatgggttctagaattttgacatttcttcagaaactgcgcataaaatttgtgatcaaaagaaatcagaaaaagaggcagagggaagatgagcaagagatggatgatgtaaaaaaatctcctgttaagcgtcaaaagggaaatgatccttcagtgaagaatgagcccacaaatatggacacgttaaatccaaccctactagatgatgagaaagctgttgctaggaatgataactctagtaataaggaggatgatgtgaagatggaagatggatcagacgaggaagaagatccagaagaggatcctgaagagtacgaggaaatggaaaatggtagtccccagcatgaggcatccaatgataaaaatgctgagcaagaggcgaatgcagatactaaatctgaaaatattactaccaatgataaaacagcagatgaaacttctaaagaggagattaaggttaaagatgaggtgcaagaatccaaggccgatctacaggtaaaagaagaaaaggaaggaaaggatgagattaagaaagaaactcctactgctaaggaggttgttgtggacagagaattgttgcaggctttccggttttttgatcgcaatcgtgttgggtacatcagggttgaagatatgagaataattatccataatctggggatgttcttttcgcacagggatgtcaaggaactagtacagagtgcattattggagagcaacactgggagagacgacagaattctttataataagctagtgcggatgagtgatatttgatgccccttgtgtctatttcattgtttacgaaacactggaattgcctgtgttgggacttgggattaatgaaagttgcttttgtaaaattacagttggactttatttgattgttgagagggctggtagtctttcgttttagcgaaagggtaaaacctttcttggcatttacaataggaaaccaagtattttatttacatgttttgaatttttttaatctcatcttttcgtgaaacttctgtc

SEQ ID NO: 22470 - protein, 402 aa, Glycine max
RDNTADSSKTETKSDKDDKKEERVTGEKSGAKTDKLKASDKDVTNVKGKVKDGDKSKDEKVTQERDGKDESKSKSSKEVKDKRKSNEPPRHPGFILQTKWTKDSKIRSLSLSLDSLLDYTDKDVEESNLELSLFAESFYEMLQFQMGSRILTFLQKLRIKFVIKRNQKKRQREDEQEMDDVKKSPVKRQKGNDPSVKNEPTNMDTLNPTLLDDEKAVARNDNSSNKEDDVKMEDGSDEEEDPEEDPEEYEEMENGSPQHEASNDKNAEQEANADTKSENITTNDKTADETSKEEIKVKDEVQESKADLQVKEEKEGKDEIKKETPTAKEVVVDRELLQAFRFFDRNRVGYIRVEDMRIIIHNLGMFFSHRDVKELVQSALLESNTGRDDRILYNKLVRMSDI

SEQ ID NO: 22471 - protein, 262 aa, Glycine max
MLQFQMGSRILTFLQKLRIKFVIKRNQKKRQREDEQEMDDVKKSPVKRQKGNDPSVKNEPTNMDTLNPTLLDDEKAVARNDNSSNKEDDVKMEDGSDEEEDPEEDPEEYEEMENGSPQHEASNDKNAEQEANADTKSENITTNDKTADETSKEEIKVKDEVQESKADLQVKEEKEGKDEIKKETPTAKEVVVDRELLQAFRFFDRNRVGYIRVEDMRIIIHNLGMFFSHRDVKELVQSALLESNTGRDDRILYNKLVRMSDI

SEQ ID NO: 22472 - protein, 257 aa, Glycine max
MGSRILTFLQKLRIKFVIKRNQKKRQREDEQEMDDVKKSPVKRQKGNDPSVKNEPTNMDTLNPTLLDDEKAVARNDNSSNKEDDVKMEDGSDEEEDPEEDPEEYEEMENGSPQHEASNDKNAEQEANADTKSENITTNDKTADETSKEEIKVKDEVQESKADLQVKEEKEGKDEIKKETPTAKEVVVDRELLQAFRFFDRNRVGYIRVEDMRIIIHNLGMFFSHRDVKELVQSALLESNTGRDDRILYNKLVRMSDI

SEQ ID NO: 22473 - DNA, 1733 bp, Glycine max
acaaagtcttgttaatgatgcagataaactttacaaaaagcttacccatctgaaacaaaaaaatgatgctcctgaaaggcagaggcgtgatgggtgtttgggactttttggccgtaaagttgatactttagatcactatgaaaggagtttgggtgatattgaagataatgtgagaatggaacagtcctcactagaagcgaaggaacttcaagctgccttcgtctcatttaagacacgatttggtgctgcaatagctttacacattcaagaaagtgtcaatcccacggaatggattactgagaaagctcctgagcctcatgatgtttattggcctttctttaccgtttcatttattaaaagatggatcagcaagctggtagtttatgttgcatgtgcttttattacagttttgtttttgataccagttgcaatagtacaaggtcttacccatctggatcaattggaaatgtggttcccgtttttgaaaggcatactaagactgtcaattgtgagccaagttataacaggataccttcccagtttgattcttcagttgtttctgtcatttgttccacctactatgattatgctttcatccttgcaaggatacatttcatggagtcaaatacaaaaaagtgcatgcactaaagtattgtggtttaccatttggaacattttctttgcaaatgtcctatcagggtcagctctctatcgagtaaatgtctttcttgagccaaaagagattcccagaatactagcggaagctgtaccatcccaggcatccttcttcatagcttatgttgtgacttctggatggaccgctatagcatcagaactctttcgattgactacacttctttccaattttataagtagaactttttgtagaaataatgatgatgattttgagccccctttaattccttaccatagcgaaattcccaggattcgtctctttggtgttcttggtgtaacatacttcatacttgctccactgatactgccatttctcttgatctacttttgtttgggatacatcattttccgcaatcagctgctgaaagtttacgttccaaagtatgagactggaggagagttttggcctacagtgcacagctccacaattttttcattgatactgatgcatataatagccattggtctttttggtttgaagaagcttcctctagcatccatattgattcttcctcttccaattctcacacttctattcaatgagtattgccagaaacggttcttccctatattcaagaattattctgctgagtgtttgattaagaaggacagagcagaccaaaacgagcataatatgtctgaattttatgacaagttggccaatgcatacaatgatccagctctgatgcgagtgaaatattctgaaaggtctgatagtcacagatctccacttcttcatagttctgaatagttcatagctacatttgtatggccttggctgcaactgtatataaggcaatgtattttcactttgaccgcactgatttggttgtccttgatgaagcatgtctgttgttttcttgtaaattgttagaattgataatgtgtttgtaacgagtgtggaaacttgtaacattagtataagtcattgcaaggccttgtttgtgagcactagcattcattgtgaaaagaaatatagtaactgactaaaagtgtaataggtagggtctgataaaaaggcaaaattttctctctag

SEQ ID NO: 22474 - protein, 481 aa, Glycine max
QSLVNDADKLYKKLTHLKQKNDAPERQRRDGCLGLFGRKVDTLDHYERSLGDIEDNVRMEQSSLEAKELQAAFVSFKTRFGAAIALHIQESVNPTEWITEKAPEPHDVYWPFFTVSFIKRWISKLVVYVACAFITVLFLIPVAIVQGLTHLDQLEMWFPFLKGILRLSIVSQVITGYLPSLILQLFLSFVPPTMIMLSSLQGYISWSQIQKSACTKVLWFTIWNIFFANVLSGSALYRVNVFLEPKEIPRILAEAVPSQASFFIAYVVTSGWTAIASELFRLTTLLSNFISRTFCRNNDDDFEPPLIPYHSEIPRIRLFGVLGVTYFILAPLILPFLLIYFCLGYIIFRNQLLKVYVPKYETGGEFWPTVHSSTIFSLILMHIIAIGLFGLKKLPLASILILPLPILTLLFNEYCQKRFFPIFKNYSAECLIKKDRADQNEHNMSEFYDKLANAYNDPALMRVKYSERSDSHRSPLLHSSE

SEQ ID NO: 22475 - protein, 423 aa, Glycine max
MEQSSLEAKELQAAFVSFKTRFGAAIALHIQESVNPTEWITEKAPEPHDVYWPFFTVSFIKRWISKLVVYVACAFITVLFLIPVAIVQGLTHLDQLEMWFPFLKGILRLSIVSQVITGYLPSLILQLFLSFVPPTMIMLSSLQGYISWSQIQKSACTKVLWFTIWNIFFANVLSGSALYRVNVFLEPKEIPRILAEAVPSQASFFIAYVVTSGWTAIASELFRLTTLLSNFISRTFCRNNDDDFEPPLIPYHSEIPRIRLFGVLGVTYFILAPLILPFLLIYFCLGYIIFRNQLLKVYVPKYETGGEFWPTVHSSTIFSLILMHIIAIGLFGLKKLPLASILILPLPILTLLFNEYCQKRFFPIFKNYSAECLIKKDRADQNEHNMSEFYDKLANAYNDPALMRVKYSERSDSHRSPLLHSSE

SEQ ID NO: 22476 - protein, 326 aa, Glycine max
MWFPFLKGILRLSIVSQVITGYLPSLILQLFLSFVPPTMIMLSSLQGYISWSQIQKSACTKVLWFTIWNIFFANVLSGSALYRVNVFLEPKEIPRILAEAVPSQASFFIAYVVTSGWTAIASELFRLTTLLSNFISRTFCRNNDDDFEPPLIPYHSEIPRIRLFGVLGVTYFILAPLILPFLLIYFCLGYIIFRNQLLKVYVPKYETGGEFWPTVHSSTIFSLILMHIIAIGLFGLKKLPLASILILPLPILTLLFNEYCQKRFFPIFKNYSAECLIKKDRADQNEHNMSEFYDKLANAYNDPALMRVKYSERSDSHRSPLLHSSE

SEQ ID NO: 22477 - DNA, 849 bp, Glycine max
acatgacgttcgagaactacgcagggccggggaggcatcaggcggtggccctccgcgtcggagcagaccacgcggtggtgtaccggtgcaacatcatcggataccaagacacaatgtatgtccactcgaaccgtcaattttaccgagaatgcgacatttacggaaccgtggacttcatattcggcaacgccgcggtggtgttccaaaactgcaccctctgggcccgaaagcccatggcccaacagaagaacaccatcacggcccaaaaccgaaaggacccgaatcagaacacgggcatttcgatccacaattgtaggatcatggccacgccggatcttgaagcatccaagggtagctaccccacttatctgggacgtccttggaaactttacgctagaaccgtcttcatgctgtcctacataggggaccacgtgcatccacgtggctggctcgagtggaacacttcctcctttgctttagacacgtgttattatggtgaatacatgaattatgggccgggttcagctctgggccaacgggttaattgggccggctatcgggccatcaattcgacggtggaagcgtctagattcacggtgggccagtttatatcgggctcgtcctggttgccctctaccggagtggcgttcattgctgggttatcaacgtaagttgatccactgccactgtagacccttttcaaaatcttggttcatagtttaaagtttaaaccaaaccaatttgcccatataatttttatttgtgactgtaataaactacaatatagtttttttattttattttcttttaacccaatgatgatgataataaggaatatatcatgtatgt

SEQ ID NO: 22478 - protein, 222 aa, Glycine max
MTFENYAGPGRHQAVALRVGADHAVVYRCNIIGYQDTMYVHSNRQFYRECDIYGTVDFIFGNAAVVFQNCTLWARKPMAQQKNTITAQNRKDPNQNTGISIHNCRIMATPDLEASKGSYPTYLGRPWKLYARTVFMLSYIGDHVHPRGWLEWNTSSFALDTCYYGEYMNYGPGSALGQRVNWAGYRAINSTVEASRFTVGQFISGSSWLPSTGVAFIAGLST

SEQ ID NO: 22479 - protein, 185 aa, Glycine max
MYVHSNRQFYRECDIYGTVDFIFGNAAVVFQNCTLWARKPMAQQKNTITAQNRKDPNQNTGISIHNCRIMATPDLEASKGSYPTYLGRPWKLYARTVFMLSYIGDHVHPRGWLEWNTSSFALDTCYYGEYMNYGPGSALGQRVNWAGYRAINSTVEASRFTVGQFISGSSWLPSTGVAFIAGLST

SEQ ID NO: 22480 - protein, 145 aa, Glycine max
MAQQKNTITAQNRKDPNQNTGISIHNCRIMATPDLEASKGSYPTYLGRPWKLYARTVFMLSYIGDHVHPRGWLEWNTSSFALDTCYYGEYMNYGPGSALGQRVNWAGYRAINSTVEASRFTVGQFISGSSWLPSTGVAFIAGLST

SEQ ID NO: 22481 - DNA, 1468 bp, Glycine max
cacatttagctaccacgaaacctaatttcaatttctctgtgaagagtcattttccgatgaaacgcaccgttcggcccctcttcgcgctcctcctcctcctcgtattcgccgccacgctcacctcacgcgccgtcctccgccgcggcatcctctccatcgagctcgaatcccgcgtccggatccgccgccatattccgccgccgccgcagctcaacgccacgctcctccaccacgcagccgtcgaaattggcgaggagaagttcaagcaggagatccagagcctccttgatggcaacttcggcagccacgcgcgccaccgcaccttcgtctcctggcgccgcttcatccaccacgaccgcggcagcgccggagtcaccgccgccaaactcccggcgactatccggtcgccgctcttctaccgctcctggctcgacttccggaaggtcctccacgactggttccggaagcgacgattccaacccggtatcatgtccgggttgactcggtcaattaagcttccaattgattcacacaacaacaacaacaaactacaaaccaataacaaaaacaaatactcttcctgtgccgtagttggaaacagcggaattttgttgaatagagactatggtagtgaaattgattcccatgagtttgtgataaggttgaacaatgctagagttgatcactttgagaccaaggttggaaaaaaaactagcatttcattcatgaatagtaacatcttgcatttgtgtgctagaaggggagggtgtttctgccacccttatggtgaccgtgttccgattgttatgtacatttgtcaagccttgcatttcatggactacactgtgtgcaatgcttctcacaaggctcctttgttggtgactgatcctaggtttgatgtgttgtgtgcgaggattgtgaagtactattcgttgaagaggtttgtggaggagagtgggaagggtttggagaagtggggagaggctcatgatggttctctttttcactactcttcagggatgcaggctgtgatgctggctttggggatttgtgatagggttagcatttttgggtttgggaaatcgacttctgctaagcaccattaccacactaaccagaaggctgagcttcacttgcatgactatgaggctgagtatgcgttttatagggaccttgtggatgggaaaaggcctataccctttcttgaggataggtttaaggttcctcctgttgtcatgtatcaatgatgggtgctgaactgctgctgctgctgcaagtggtggtggagggcctctgtgaattgttgttctgttattgtaatacttgtgaaatgcacagatagtggaaagcaaaatactgattcaagattcgtttttgttgtttgtgttgtactgtccaacatgaagcctcaaggcaacaccaagtgtaaattttgttggttagatcaatacagttctttgactccatc

SEQ ID NO: 22482 - protein, 414 aa, Glycine max
HLATTKPNFNFSVKSHFPMKRTVRPLFALLLLLVFAATLTSRAVLRRGILSIELESRVRIRRHIPPPPQLNATLLHHAAVEIGEEKFKQEIQSLLDGNFGSHARHRTFVSWRRFIHHDRGSAGVTAAKLPATIRSPLFYRSWLDFRKVLHDWFRKRRFQPGIMSGLTRSIKLPIDSHNNNNKLQTNNKNKYSSCAVVGNSGILLNRDYGSEIDSHEFVIRLNNARVDHFETKVGKKTSISFMNSNILHLCARRGGCFCHPYGDRVPIVMYICQALHFMDYTVCNASHKAPLLVTDPRFDVLCARIVKYYSLKRFVEESGKGLEKWGEAHDGSLFHYSSGMQAVMLALGICDRVSIFGFGKSTSAKHHYHTNQKAELHLHDYEAEYAFYRDLVDGKRPIPFLEDRFKVPPVVMYQ

SEQ ID NO: 22483 - protein, 396 aa, Glycine max
MKRTVRPLFALLLLLVFAATLTSRAVLRRGILSIELESRVRIRRHIPPPPQLNATLLHHAAVEIGEEKFKQEIQSLLDGNFGSHARHRTFVSWRRFIHHDRGSAGVTAAKLPATIRSPLFYRSWLDFRKVLHDWFRKRRFQPGIMSGLTRSIKLPIDSHNNNNKLQTNNKNKYSSCAVVGNSGILLNRDYGSEIDSHEFVIRLNNARVDHFETKVGKKTSISFMNSNILHLCARRGGCFCHPYGDRVPIVMYICQALHFMDYTVCNASHKAPLLVTDPRFDVLCARIVKYYSLKRFVEESGKGLEKWGEAHDGSLFHYSSGMQAVMLALGICDRVSIFGFGKSTSAKHHYHTNQKAELHLHDYEAEYAFYRDLVDGKRPIPFLEDRFKVPPVVMYQ

SEQ ID NO: 22484 - protein, 252 aa, Glycine max
MSGLTRSIKLPIDSHNNNNKLQTNNKNKYSSCAVVGNSGILLNRDYGSEIDSHEFVIRLNNARVDHFETKVGKKTSISFMNSNILHLCARRGGCFCHPYGDRVPIVMYICQALHFMDYTVCNASHKAPLLVTDPRFDVLCARIVKYYSLKRFVEESGKGLEKWGEAHDGSLFHYSSGMQAVMLALGICDRVSIFGFGKSTSAKHHYHTNQKAELHLHDYEAEYAFYRDLVDGKRPIPFLEDRFKVPPVVMYQ

SEQ ID NO: 22485 - DNA, 1403 bp, Glycine max
aaccttcactccgaccgttgtgcggagtcaggacagcaaccatatacgttcaaatctgttgcagctgggcaggaaaggttcaggactctacacagtacttactatagaaaagcacaacgaatcattctcgcttgtgggtcactttttggaagaaacctgtgtaaatcctacattcatcataaaccacctgagatcatgagtcctctagcaaagtggcacagatccaaaccaggcctgactgaacgttttcaattgtttgttaataaacgtgaactttgctatgcatatactgaattgaatgaccctgtagtacaacgacagagatttgctgaacaactcaaggatcggcaatctggcgatgatgaagcaatggccttagatgaaacattttgtacggctctagagtatggtttaccacctactggtggttggggtttgggcattgatcggttcaccatgttactgactgattcacagaatattaaggtttttgctttttctatatctgcataattactttgtttttgaaatttcttaccatcttctgtctttttggtgacgggaggttcttctcttccctgccatgaaacctcaagactgagccttcaaccaaaactatttgaatctctgagaagtaaaatcatcatacacaggtattttatacctcaagcttttaaattaaaagtatactccacattactgccaagtaccaagtatttccaaggaaattgtgagcacggtactgcgtaacttcattaacttgtaactagtagtgaaatggttaatcttgggtagcgatgttgagtggcaaaccccaataatgctagcagtttagtggactgtaaaaagctgctacataacgatagcagatagaaatcatataattcccaatacaaaatactcaaaaaatactaaaaaagcttcatatattcatcattacttctcaaaagtcacatcttatagacacaatcatcattaatacaaggcttaactaataacaattagaaaaataacaaaggctgggtgtggaagacctacaactcaggtgccaactgaagcctgctaaaaggggtgggcttggttagaaaatgggcgggcagcagaactgaggctagcaagcaggtgttctgtgtgtaattttgcgacaatacaaataactagataaaaatgcatcaaattgtatgcaatgggttaaggaacgatgatgggctagcttgaagttcctgagcttttacattgcagtctggtgagaaatagggctgctaactttgaaaattagtttccccatggcatgtgcatcaagtcatgaaaaacaaagaactcaatcgatggaagcagatgagtttgtgtgggcaaatagagattttgtttgtttaagcgagcataaaacacaacattaattc

SEQ ID NO: 22486 - protein, 170 aa, Glycine max
NLHSDRCAESGQQPYTFKSVAAGQERFRTLHSTYYRKAQRIILACGSLFGRNLCKSYIHHKPPEIMSPLAKWHRSKPGLTERFQLFVNKRELCYAYTELNDPVVQRQRFAEQLKDRQSGDDEAMALDETFCTALEYGLPPTGGWGLGIDRFTMLLTDSQNIKVFAFSISA

SEQ ID NO: 22487 - protein, 105 aa, Glycine max
MSPLAKWHRSKPGLTERFQLFVNKRELCYAYTELNDPVVQRQRFAEQLKDRQSGDDEAMALDETFCTALEYGLPPTGGWGLGIDRFTMLLTDSQNIKVFAFSISA

SEQ ID NO: 22488 - DNA, 1437 bp, Glycine max
aacaattggttttgatgtgcatggtggacagagacagacacagaaacagacacgttcaggttaaaggtgaagccagggaagacatatcttcttcgtttgatcaatgctgcactcaatgatgaactctttttcagcattgcaaaccacaccttggtaactgttgaagctgatgctacttacgttaaacctttcgagtcagagatcatcgtaatagggccaggacaaacctcaaactttctgttaaagacaaaacctgagtacccaaatgtcaatttcttgatgctagcaagaccatatttcactggcatgggaactttcgacaattccacagttgctggcattcttgagtacaagaaaccgcttgttgctccaaaaaacactattcccactttgaaaccctctcttccagccatcaatgacacttccttcgttgccaacttcagtagtaaattcctcagtttgaacactgacaagtaccctgcaaaggtgcctcaaaccgttgacaagagcttcttcttcacaattggacttggaacaagtccttgccccaaaaaccaaacatgccaaggaccaaacaacagttcaaagtttgcagcctcaatgaacaatatatccttcactcttccttccatagcacttcttcagcaacatttcttcggccaagctaataatggcatttacaccactgatttccctgccatgccactcatgccattcaactacacggggaccccaccgaacaacacaagggtcagtaatggaacaaagactgtggtgataccctttaacacaagggtgcaagtggtgctccaagacactagcattttgggagctgagagccaccctttgcaccttcatggctttaacttctatgttgtgggtcaaggctttgggaactttaatcctaacactgaccctccaaaattcaaccttgttgaccccgttgaaaggaacactgttggtgtgccctctggtggttgggttgcaatcagattccttgctgacaacccaggtgtttggctaatgcattgccattttgatgtccaccttagttgggggttgaggatggcttggattgttgaggatgggaagctacctaatcagaagttgcctcctccaccagctgatctccctaagtgttgatgattttctggaccactggcatctgcaaatttttccttcatctttcacaccatttgattttccattaattctaagttaatttccggatttttggtttgtctactatgaaagagtgaagagtcatcaccggcattggcgtttcagtaatttctttctttgtattaatctgtcaggttctggatgacttttctatacctccacctaattttctagtgccaataaagtagggggtggctggagttataccatccagaatatcaatgcattacttcccttaaaaacttaccttgattg

SEQ ID NO: 22489 - protein, 287 aa, Glycine max
MLARPYFTGMGTFDNSTVAGILEYKKPLVAPKNTIPTLKPSLPAINDTSFVANFSSKFLSLNTDKYPAKVPQTVDKSFFFTIGLGTSPCPKNQTCQGPNNSSKFAASMNNISFTLPSIALLQQHFFGQANNGIYTTDFPAMPLMPFNYTGTPPNNTRVSNGTKTVVIPFNTRVQVVLQDTSILGAESHPLHLHGFNFYVVGQGFGNFNPNTDPPKFNLVDPVERNTVGVPSGGWVAIRFLADNPGVWLMHCHFDVHLSWGLRMAWIVEDGKLPNQKLPPPPADLPKC

SEQ ID NO: 22490 - protein, 278 aa, Glycine max
MGTFDNSTVAGILEYKKPLVAPKNTIPTLKPSLPAINDTSFVANFSSKFLSLNTDKYPAKVPQTVDKSFFFTIGLGTSPCPKNQTCQGPNNSSKFAASMNNISFTLPSIALLQQHFFGQANNGIYTTDFPAMPLMPFNYTGTPPNNTRVSNGTKTVVIPFNTRVQVVLQDTSILGAESHPLHLHGFNFYVVGQGFGNFNPNTDPPKFNLVDPVERNTVGVPSGGWVAIRFLADNPGVWLMHCHFDVHLSWGLRMAWIVEDGKLPNQKLPPPPADLPKC

SEQ ID NO: 22491 - protein, 180 aa, Glycine max
MNNISFTLPSIALLQQHFFGQANNGIYTTDFPAMPLMPFNYTGTPPNNTRVSNGTKTVVIPFNTRVQVVLQDTSILGAESHPLHLHGFNFYVVGQGFGNFNPNTDPPKFNLVDPVERNTVGVPSGGWVAIRFLADNPGVWLMHCHFDVHLSWGLRMAWIVEDGKLPNQKLPPPPADLPKC

SEQ ID NO: 22492 - DNA, 2107 bp, Glycine max
aaagaagcttcattttgcttatggttactgcatcctgaccctaagagtcgtccaacacttggggagttgttgcagagcgagttccttaatgaacagagagatgatacggaagaacgtgaagcagcgatagagctgagacaaaggatagaggatcaggagttgttgttagagttccttttgttacttcaacagagaaaacaggaagttgctgagaagttgcaacatactgtctcttttctgtgttcagatattgaagaagtgaccaagcagcacgttagatttaaagagattactggtgctgaactggggagtgatgagcgttcagcatcaagtttcccatccatgacatttgttgatagtgaggattctgcttttctagggactagaaaacgagtcagactagggatggatgttaaaaacattgaggaatgtgacgatgatgtaggggatgatcagaaaagtaacggaagttttctttcaaaaagttcacgactaatgaagaactttaagaaacttgagtcagcttactttttaacacgatgtagaccagcctattcctctgggaaactggcggttagacatccacctgtaacaagtgatggtagagggtctgttgtcgtgactgaaagaagttgcatcaatgacttgaaatctaaagagcagtgcagggagggtgcaagtgcttggataaatccttttcttgagggtttgtgcaagtatttatcattcagtaagctaaaggttaaggctgacctaaagcaaggagatcttttgcattcttccaacctagtatgctcactcagctttgatcgtgatggagaatttttcgctaccgcgggtgtgaataagaaaattaaagtgtttgaatgtgattcaataataaatgaggatcgtgatatccactatccagttgtggagatggctagcaggtcaaagttaagcagtatatgttggaatacatacatcaaaagtcaaattgcttcaagcaactttgaaggtgttgtacagttatgggatgtgacaagaagtcaagtaatctctgaaatgagggagcacgagcggcgggtgtggtccattgatttctcatcagcagacccaacaatgttggcaagtgggagcgatgacggttctgtcaagctatggagtatcaatcaggcaattccatttttgcacttggtggaatgtcagctttgaaactaaacggagttagtgttggtaccatcaaaaccaaggcaaatgtttgctgcgttcagttccccctggattctgctcgtttccttgcttttggttcagcagatcaccgaatatattactatgatcttcgcaaccttaaaatgccactttgtactttagttggacataacaagactgtgagctacatcaagtttgtagacactgtgaaccttgtctctgcttccacagataacactttgaagctttgggatttgtctacatgtgcatctcgagttatagactcaccgattcaatcattcactggtcacgcgaatgttaagaactttgtggggttatcagtatctgatggttacattgccactggttcagagacaaatgaggtgttcatataccacaaggccttccccatgccagcattgtcattcaagtttcagaacacagaccctctttctggcaacgaagtggacgatgctgtgcagttcgtgtcctcagtctgttggcacggccagtcatcgtccaccttgctcgctgcaaattccacagggaatgtcaaaattctggagatggtttaagttgttggcctctacacagcaatctactacaaaatgatacattgtttgctgagcatgaggtgacagaacctatgcttaagattagcttctgttgccactgaatgctttacaaaggggtatatagattccttgattattatttgtaagttgtaacataacaaatttttgcattagtagttcatagcggaagcagttaaagagaagagtgagattgatcacgtggaaaaccaaaaaaggtcctgtagatagtgtcacatggaaaaaagtgaaggtcacaacaatctatatcagattattatcacggttatgatccatattcaatttgatagttacattcacct

SEQ ID NO: 22493 - protein, 397 aa, Glycine max
KEASFCLWLLHPDPKSRPTLGELLQSEFLNEQRDDTEEREAAIELRQRIEDQELLLEFLLLLQQRKQEVAEKLQHTVSFLCSDIEEVTKQHVRFKEITGAELGSDERSASSFPSMTFVDSEDSAFLGTRKRVRLGMDVKNIEECDDDVGDDQKSNGSFLSKSSRLMKNFKKLESAYFLTRCRPAYSSGKLAVRHPPVTSDGRGSVVVTERSCINDLKSKEQCREGASAWINPFLEGLCKYLSFSKLKVKADLKQGDLLHSSNLVCSLSFDRDGEFFATAGVNKKIKVFECDSIINEDRDIHYPVVEMASRSKLSSICWNTYIKSQIASSNFEGVVQLWDVTRSQVISEMREHERRVWSIDFSSADPTMLASGSDDGSVKLWSINQAIPFLHLVECQL

SEQ ID NO: 22494 - protein, 283 aa, Glycine max
MTFVDSEDSAFLGTRKRVRLGMDVKNIEECDDDVGDDQKSNGSFLSKSSRLMKNFKKLESAYFLTRCRPAYSSGKLAVRHPPVTSDGRGSVVVTERSCINDLKSKEQCREGASAWINPFLEGLCKYLSFSKLKVKADLKQGDLLHSSNLVCSLSFDRDGEFFATAGVNKKIKVFECDSIINEDRDIHYPVVEMASRSKLSSICWNTYIKSQIASSNFEGVVQLWDVTRSQVISEMREHERRVWSIDFSSADPTMLASGSDDGSVKLWSINQAIPFLHLVECQL

SEQ ID NO: 22495 - protein, 262 aa, Glycine max
MDVKNIEECDDDVGDDQKSNGSFLSKSSRLMKNFKKLESAYFLTRCRPAYSSGKLAVRHPPVTSDGRGSVVVTERSCINDLKSKEQCREGASAWINPFLEGLCKYLSFSKLKVKADLKQGDLLHSSNLVCSLSFDRDGEFFATAGVNKKIKVFECDSIINEDRDIHYPVVEMASRSKLSSICWNTYIKSQIASSNFEGVVQLWDVTRSQVISEMREHERRVWSIDFSSADPTMLASGSDDGSVKLWSINQAIPFLHLVECQL

SEQ ID NO: 22496 - DNA, 1129 bp, Glycine max
agcagggatggtaagagttatagcaccaatcttgcttacacacctcctgaatatttaagaaatggaagggtcacgcctgaaagtgtcatttacagctttggaaccgttcttctagacctcctcagtggcaagcacatccctcccagtcaagcacttgatatgatacaggggaaaaacaatatgctcttaatggattcacatttagaggggaagttttcaacagaagaggcaacggtagttgttaatcttgcctctaaatgtttgcaatatgaaccaagggagcggcctgatacaaaggatttggtcacaacacttgccccgttgcatacaaaacccgatgttcgttctcatatcatgcttggaattccaaagcatgaggaagctccatcaaccccacaacgtcctctttcagcaatgggtgaggcttgttcaagaatggacctaactgcaatacatcagatcttggttgcgacacactacagagacgatgaaggaactaatgagttgtcttttcaagagtggactcaacagatgagagatatgctggaagcaaggaagcgcggagaccatgcattccgtgacaaggactttaggacagccattgataactattcccagtttattgatgttggaacaatggtctccccaactgtgtttgcaaggcgcagtctatgctatctgttatgtgatcaaccagatcctgcgctacgagatgcaatgcaagcacagtgcgtttatccagactggcccacggctttctacatgcaatcagttgctcttgcaaaactggacatgcacaaggatgcggctgatatgttaaatgaggcagctgcattggaagagaagaggcaaagaggagcgagaggatcatagttttatgcagtgggctaatttgagggtgtcaagttctgtataaaggttgagctgggaagcaaaactaacgtttgaatgggtataaaatgtgtcagagaaatacaaaagtggcggagtagatggcacatgcattttatttcaccatcttataggaatcggttaacttgaaaactgtgcttatgcactctaaattgggaaggaataccggtaatttttccattgttaatgaaattgattggttgatgcctactgggtt

SEQ ID NO: 22497 - protein, 290 aa, Glycine max
SRDGKSYSTNLAYTPPEYLRNGRVTPESVIYSFGTVLLDLLSGKHIPPSQALDMIQGKNNMLLMDSHLEGKFSTEEATVVVNLASKCLQYEPRERPDTKDLVTTLAPLHTKPDVRSHIMLGIPKHEEAPSTPQRPLSAMGEACSRMDLTAIHQILVATHYRDDEGTNELSFQEWTQQMRDMLEARKRGDHAFRDKDFRTAIDNYSQFIDVGTMVSPTVFARRSLCYLLCDQPDPALRDAMQAQCVYPDWPTAFYMQSVALAKLDMHKDAADMLNEAAALEEKRQRGARGS

SEQ ID NO: 22498 - protein, 237 aa, Glycine max
MIQGKNNMLLMDSHLEGKFSTEEATVVVNLASKCLQYEPRERPDTKDLVTTLAPLHTKPDVRSHIMLGIPKHEEAPSTPQRPLSAMGEACSRMDLTAIHQILVATHYRDDEGTNELSFQEWTQQMRDMLEARKRGDHAFRDKDFRTAIDNYSQFIDVGTMVSPTVFARRSLCYLLCDQPDPALRDAMQAQCVYPDWPTAFYMQSVALAKLDMHKDAADMLNEAAALEEKRQRGARGS

SEQ ID NO: 22499 - protein, 230 aa, Glycine max
MLLMDSHLEGKFSTEEATVVVNLASKCLQYEPRERPDTKDLVTTLAPLHTKPDVRSHIMLGIPKHEEAPSTPQRPLSAMGEACSRMDLTAIHQILVATHYRDDEGTNELSFQEWTQQMRDMLEARKRGDHAFRDKDFRTAIDNYSQFIDVGTMVSPTVFARRSLCYLLCDQPDPALRDAMQAQCVYPDWPTAFYMQSVALAKLDMHKDAADMLNEAAALEEKRQRGARGS

SEQ ID NO: 22500 - DNA, 1337 bp, Glycine max
gaagttgaaggggaaagagagaaaagaactagctagctggagtctgagaactctagcatgtactagtactactcctacattcctccatcttcctttgtactattttttttttaaccataaaagcaagagcacaaagatggtgagagctccttgttgtgaaaagatgggtttgaagaagggtccttgggctcccgaggaagatcaaatcctcacatcttacattgacaaacatggtcatggcaattggcgtgccctcccaaagcaagcaggcttgttaaggtgtgggaaaagctgtagactccgctggattaactatttgaggcctgatattaaaagagggaatttcacaattgaagaagaagaaactatcattaagctgcatgacatgctggggaacaggtggtcagcaattgcagccaaattgccaggaagaactgacaatgagattaaaaatgtttggcacaccaatttgaagaagaggctgctgaaatcagaccagtccaagtccaaaccaagttccaaaagagccattaagccaaaaatcgaacgttctgattcaaattccagcatcataactcaatcagaacctgacaattttaatttcagagaaatggacacaataacatcatcagcatgcactacttctagtagtgatttttcatcggtcacggttggtgacagcaaaaatatcaagagtgaagacacagagtctacggaaacaatgcctgtgattgatgagagcttttggtcagaagctgcaattgatgatgaaacccccaccatgtcatcatctcagtctttgacaatctcaaatgagatgcgacttcaatacccttttgctaactatgaggaaactttccagcagggtcatcatgcttatgattcaaactttgatgatggcatggatttctggtatgacatatttaccaggaccaatgattcaatagaattgctagagttctgaagttttcatgtgacacgttgaacgagggcattattgaatttggcagatagagtagtttaaatggcatggtataacttgaatttgaccgttacaacaaaagggtacgataatttctggtgtggggacagcattatcaccagctgcaagatctagaggcataatccattgacaaagaaactagccagggtaatgcgaaaggctaatgaatgatatgtaatgtacacatgtaatcaagtagtgaaacactgactttctttctttttagtggaaaacagcaatgctctaacatttttgtattttacaaattagagtttaattaggctagagttacttgattgtaatatcaataaatgatgtattatgtgaattattc

SEQ ID NO: 22501 - protein, 320 aa, Glycine max
KLKGKERKELASWSLRTLACTSTTPTFLHLPLYYFFFNHKSKSTKMVRAPCCEKMGLKKGPWAPEEDQILTSYIDKHGHGNWRALPKQAGLLRCGKSCRLRWINYLRPDIKRGNFTIEEEETIIKLHDMLGNRWSAIAAKLPGRTDNEIKNVWHTNLKKRLLKSDQSKSKPSSKRAIKPKIERSDSNSSIITQSEPDNFNFREMDTITSSACTTSSSDFSSVTVGDSKNIKSEDTESTETMPVIDESFWSEAAIDDETPTMSSSQSLTISNEMRLQYPFANYEETFQQGHHAYDSNFDDGMDFWYDIFTRTNDSIELLEF

SEQ ID NO: 22502 - protein, 275 aa, Glycine max
MVRAPCCEKMGLKKGPWAPEEDQILTSYIDKHGHGNWRALPKQAGLLRCGKSCRLRWINYLRPDIKRGNFTIEEEETIIKLHDMLGNRWSAIAAKLPGRTDNEIKNVWHTNLKKRLLKSDQSKSKPSSKRAIKPKIERSDSNSSIITQSEPDNFNFREMDTITSSACTTSSSDFSSVTVGDSKNIKSEDTESTETMPVIDESFWSEAAIDDETPTMSSSQSLTISNEMRLQYPFANYEETFQQGHHAYDSNFDDGMDFWYDIFTRTNDSIELLEF

SEQ ID NO: 22503 - protein, 266 aa, Glycine max
MGLKKGPWAPEEDQILTSYIDKHGHGNWRALPKQAGLLRCGKSCRLRWINYLRPDIKRGNFTIEEEETIIKLHDMLGNRWSAIAAKLPGRTDNEIKNVWHTNLKKRLLKSDQSKSKPSSKRAIKPKIERSDSNSSIITQSEPDNFNFREMDTITSSACTTSSSDFSSVTVGDSKNIKSEDTESTETMPVIDESFWSEAAIDDETPTMSSSQSLTISNEMRLQYPFANYEETFQQGHHAYDSNFDDGMDFWYDIFTRTNDSIELLEF

SEQ ID NO: 22504 - DNA, 1314 bp, Glycine max
aaggaataagtttgcacaccgaaggaagtaggaagtattgctcagttactttccatgatgtctaatttcgtttccaattagactcgtatttctagacttgcgggacagagctgccctcgagaaaatattttcaaccaataagtttgatgctgtgatacattttgctgggcttaaggcagtgggtgaaagcgtggataaaccactgctctactttgacaacaacttgatagggacaatcgttctatttgaagtcatggctgcccacggatgcaagaagcttgtgttctcatcttcagcaactgtatatggctggccaaaggaggtcccatgtaccgaagagttccctttgtcagcgacaaacccatatggacgaaccaagcttatcatcgaagaaatttgtcgtgatatctaccgtgcagattctgattggaaagttatactgttgagatacttcaacccagttggtgcacatcccagtggttatattggtgaagatcctcgtggaattccaaacaatctcatgccctttgttcaacaagtggcagttggcagacgccctgcattgactgtttttggaaacgattataaaacaactgacggcactggagttcgtgattacattcatgttcttgatttagcagatgggcatattgcggcattgcgtaaactcaatgatcctaaaataggttgtgaggtttataacttgggaacaggaaagggaacatctgttttggagatggtaaacgcttttgaacaggcctctggaaagaaaattccacttgcaatggctggtcggagacctggagatgctgaaattgtttatgcatcaacagagaaagcggaaagagaacttaattggaagactaaatatagcatcgatgatatgtgccgcgatcaatggaattgggctagcaaaaacccttatggctatggtgcatctgcagattcctccaattgatgtcgatgattgtcggatatagtatatatgttctcttttggggtctttttgaaccctgtcgcccaataggtccctaaagtttttctttagctattctaaggtggaagttaaatcatttcctagtttattatgaattataataaagtggtaaataagtagtggtttagtttacttagcgattctttaggttccaactcacagaatattgaatgggtattctctcatgttcttcatgaacatgactgcatcctgttttgtaaatctaaaccacacattatagagtatgactaaccggtataatcttaccttacctcattatccataataaagttttacatagcattatatgctaaaag

SEQ ID NO: 22505 - protein, 234 aa, Glycine max
MAAHGCKKLVFSSSATVYGWPKEVPCTEEFPLSATNPYGRTKLIIEEICRDIYRADSDWKVILLRYFNPVGAHPSGYIGEDPRGIPNNLMPFVQQVAVGRRPALTVFGNDYKTTDGTGVRDYIHVLDLADGHIAALRKLNDPKIGCEVYNLGTGKGTSVLEMVNAFEQASGKKIPLAMAGRRPGDAEIVYASTEKAERELNWKTKYSIDDMCRDQWNWASKNPYGYGASADSSN

SEQ ID NO: 22506 - protein, 145 aa, Glycine max
MPFVQQVAVGRRPALTVFGNDYKTTDGTGVRDYIHVLDLADGHIAALRKLNDPKIGCEVYNLGTGKGTSVLEMVNAFEQASGKKIPLAMAGRRPGDAEIVYASTEKAERELNWKTKYSIDDMCRDQWNWASKNPYGYGASADSSN

SEQ ID NO: 22507 - DNA, 1887 bp, Glycine max
gaagacgagacagtagctgaattgcacacacgagtcatgagaaagcgggatttggccattctcatgctctccgctttcgctattttcttcactcttcagcaagatggcggtatttcgttcaaagacgcatggatgcacctaactgatgaatatccaatcaaatatgaagccgaacgccttccgccgccgctcgtcgctgatctcaacggagacggcaaaaaggaagtacttgtggctacacacgacgctaaaattcaggttttggagtcccatagtagacgtgtcgatgaaggattcagtgaggcgcgtgtgttggctgaggtgtctttgttgcctgacaaagtacgtgtgatgactgggagacgccctgttgctatggcaaccggctatattgaccgctataaaattgggcagccgcagaaacaggttttggttgtggtaacatcgggttggtccgtgatgtgttttgattccaacctccaaaagttgtgggaaaataatttacaggaggattttccacataatgctcaccatagggaagttgcaatctctataagcaattatactctaaagcatggagatacaggattaataattgtcggtggcaggatggaaatgcagccacatatttttatggatccttttgaagaaatggggatgggtgcaaggtttgccgagcaacatcgaagaagtgctgctgaaaaggaggcttctgaaaactccggaactgtggatttacgacattttgcattttatgcatttgctggtcgatctggtgttgaacgatggagcagaaaaaatgagaacattgaagtgcattcttcagatgcatcacagttacttccgcaacataactacaagcttgatgttcatgctctgaatacccgccaacctggagaggtacttacattttagctgttcaactaaatcctatgggtatgctggattagtgaaatgtgatggaataatggtgtaaagaattattaccttcataacctctcatcagtcaccaggctggattttggggaaagcaatgaaatcattgttttcctttttcaaatatattgattttacaaagcctatagaaatatagttgttggtcttactattcatccttttagttcagtttaaatgttgttatgagtaagtaatgatgtaattccaaattaataactttttcattcctttcctttcctcattaatcctctaaagtctaagcaacttccaaacagagactaagtaacaccatcccttcccactccattgtattccactataatacactaaaaaatccaaacataaatttgtttaaaagtgttgccttgcttattgtcaatgtgtatctaacttcctatagattggagacttgtcacatattcatgttatccaccttttctcttacaatggtcaaccattaaaacatatattttcttgttagtatgagctttaccagaagaactccagtcatcaatccctccattatgtgtggaaacactaacatatgcacataatagagtattttgtttaaatttaatgttattgtaaaatctttgtttttaattatagatatcctcctaaaggttgcttcctgtgacatgtgaaattctagtatgaatgcagggaattcagagaatcaatcctgggagttatgcctcaccaatgggtacatttatcaaccttgattatccttctgtactaaggcttaatcttaattactgtccgttcttgaataaatatgtttatcaggctaggagagaagatactttattgaagcttgcccacttcaggcggcacaagaggaaaacattgaagaaaacacccggaaaggctatgagttacccttttcacaagcctgaggaaaaccatcctccagggaaggactcaact

SEQ ID NO: 22508 - protein, 304 aa, Glycine max
EDETVAELHTRVMRKRDLAILMLSAFAIFFTLQQDGGISFKDAWMHLTDEYPIKYEAERLPPPLVADLNGDGKKEVLVATHDAKIQVLESHSRRVDEGFSEARVLAEVSLLPDKVRVMTGRRPVAMATGYIDRYKIGQPQKQVLVVVTSGWSVMCFDSNLQKLWENNLQEDFPHNAHHREVAISISNYTLKHGDTGLIIVGGRMEMQPHIFMDPFEEMGMGARFAEQHRRSAAEKEASENSGTVDLRHFAFYAFAGRSGVERWSRKNENIEVHSSDASQLLPQHNYKLDVHALNTRQPGEVLTF

SEQ ID NO: 22509 - protein, 292 aa, Glycine max
MRKRDLAILMLSAFAIFFTLQQDGGISFKDAWMHLTDEYPIKYEAERLPPPLVADLNGDGKKEVLVATHDAKIQVLESHSRRVDEGFSEARVLAEVSLLPDKVRVMTGRRPVAMATGYIDRYKIGQPQKQVLVVVTSGWSVMCFDSNLQKLWENNLQEDFPHNAHHREVAISISNYTLKHGDTGLIIVGGRMEMQPHIFMDPFEEMGMGARFAEQHRRSAAEKEASENSGTVDLRHFAFYAFAGRSGVERWSRKNENIEVHSSDASQLLPQHNYKLDVHALNTRQPGEVLTF

SEQ ID NO: 22510 - protein, 283 aa, Glycine max
MLSAFAIFFTLQQDGGISFKDAWMHLTDEYPIKYEAERLPPPLVADLNGDGKKEVLVATHDAKIQVLESHSRRVDEGFSEARVLAEVSLLPDKVRVMTGRRPVAMATGYIDRYKIGQPQKQVLVVVTSGWSVMCFDSNLQKLWENNLQEDFPHNAHHREVAISISNYTLKHGDTGLIIVGGRMEMQPHIFMDPFEEMGMGARFAEQHRRSAAEKEASENSGTVDLRHFAFYAFAGRSGVERWSRKNENIEVHSSDASQLLPQHNYKLDVHALNTRQPGEVLTF

SEQ ID NO: 22511 - DNA, 1432 bp, Glycine max
attactgatatttctctgttaatattctgctccaattacccttctaaatctttgcgctcacttgtcagtatctttcctttgttctgcactgcttttcttgtgcatagtagtaagtgataatgctttgaattcgatgatctttctttcttcaggacgatggccgctacttttaaacaccatcctacgggacttcacggttggggcgctccgagatcttctagaaatctcccaagcttcttctcaatgcgtttcccctgcagcactcgccaccatcacattcgtgcttccgtttctcaccactcatcaaccgaggctgagagtgctttgatattgattcgtcatggggagtctttgtggaatgagaagaacttgttcacgggatgttgcgatgtacctttgaccaatagaggtgtagaggaagctattgaagctggtcagaggattagctatatacccattgatatgatctttacgtccgcactcattcgtgcacagatgaccgctatgcttgcaatgactcagcactcccagaagaaggttcctattatcatccatgatgagagtgaacaggcaacaacttggactcaagtttacagtgaaaaaaccaccaagcaatctattccagttattacagcatggcagttgaatgaaagaatgtatggggagttacagggtcttaataagcaggagactgcagaaagatacggaaaggagaaggtgcatgaatggcgtcggagttttgacattcctcctcccaagggtgagagcctggaaatgtgttttcagagagctgttccgtattttaaagattttattgaaccccaactaaaatcaggaaagcacgtgatggttgctgctcatggaaactcattgaggtctattataatgtatctggacggattaacttctcaagaggtcactagtttagagatatcaactgggataccattgctttacatatacaaagaggggaagtttaacagtagaggaagtcctgtggggcctacagaagctggtgtttatgcatacactcagagtttagctgtttacagacaacagttggatgacatgtctagttgttattgatcctgcatttcaaagatcaaaatggtataaatatcgatattcatttttggtgggtgactctctgaatgttcatatgctaaacatcaatttgaaaattactggaaggaattgaccaatccatgacacttttaaatctgcaacctgcatagcgagacgtagaagccctgaaaaatttctgtactgtagcaaccaaagtagcaccaaaacaattttggttaaagagagtgaaaaacgggattagtaaatgacaatgtaagtttagaacttgtttgtgcctgaatggaagtgaacttataggtatagcttccatgtttagaacttacagggaattgaatttacggtaaat

SEQ ID NO: 22512 - protein, 309 aa, Glycine max
MAATFKHHPTGLHGWGAPRSSRNLPSFFSMRFPCSTRHHHIRASVSHHSSTEAESALILIRHGESLWNEKNLFTGCCDVPLTNRGVEEAIEAGQRISYIPIDMIFTSALIRAQMTAMLAMTQHSQKKVPIIIHDESEQATTWTQVYSEKTTKQSIPVITAWQLNERMYGELQGLNKQETAERYGKEKVHEWRRSFDIPPPKGESLEMCFQRAVPYFKDFIEPQLKSGKHVMVAAHGNSLRSIIMYLDGLTSQEVTSLEISTGIPLLYIYKEGKFNSRGSPVGPTEAGVYAYTQSLAVYRQQLDDMSSCY

SEQ ID NO: 22513 - protein, 280 aa, Glycine max
MRFPCSTRHHHIRASVSHHSSTEAESALILIRHGESLWNEKNLFTGCCDVPLTNRGVEEAIEAGQRISYIPIDMIFTSALIRAQMTAMLAMTQHSQKKVPIIIHDESEQATTWTQVYSEKTTKQSIPVITAWQLNERMYGELQGLNKQETAERYGKEKVHEWRRSFDIPPPKGESLEMCFQRAVPYFKDFIEPQLKSGKHVMVAAHGNSLRSIIMYLDGLTSQEVTSLEISTGIPLLYIYKEGKFNSRGSPVGPTEAGVYAYTQSLAVYRQQLDDMSSCY

SEQ ID NO: 22514 - protein, 207 aa, Glycine max
MIFTSALIRAQMTAMLAMTQHSQKKVPIIIHDESEQATTWTQVYSEKTTKQSIPVITAWQLNERMYGELQGLNKQETAERYGKEKVHEWRRSFDIPPPKGESLEMCFQRAVPYFKDFIEPQLKSGKHVMVAAHGNSLRSIIMYLDGLTSQEVTSLEISTGIPLLYIYKEGKFNSRGSPVGPTEAGVYAYTQSLAVYRQQLDDMSSCY

SEQ ID NO: 22515 - DNA, 1475 bp, Glycine max
aagatttccaacaacccctctctgcaaaacgcttcgcataaggtacttatgcgcgataagactgtactggtaaccggcggagccggttacatcggcagccacaccgttcttcagctcttgctcggaggtttcagagccgtcgtcctcgacaacctcgaaaattcctccgaggttgccatccacagagtcagggagctcgccggcgaatttgggaacaacctctcctttcacaaggtggacctacgggacagagctgctctagaccaaatattttcttccacacaattcgatgctgtcatacattttgctggactgaaagcagtaggagaaagtgtgcaaaaacctttactatactataacaacaacttgactgggacaatcactctattggaagtcatggctgcccatggatgcaagaagctcgtgttttcatcttcagcaactgtatatggttggccaaaggaggttccatgcacagaagagttccctctgtcagcaatgaacccatatggacgaactaagcttatcattgaagaaatttgccgtgatgtccactgtgcagagccagattgtaaaataattttgttaagatacttcaacccagttggtgcacaccttagtggttatattggggaggatcctcgtggaattccaaacaatctcatgccatttgttcagcaagtagcagttggccgacggcctgcactgacagtttttggaaatgattataatacaagtgatggcactggggttcgggattacattcatgttgttgatttagcagatgggcacattgctgcattgcttaaactagatgaacctaatataggttgtgaggtttataacctgggaacaggaaagggaacatcagttttggagatggttagagcttttgaaatggcatctggaaagaaaattccacttgtgatggctggccgtagacctggtgatgctgaaattgtttatgcatcaacaaagaaagcggaaagagagcttaaatggaaggcaaaatatggcattgatgagatgtgccgtgatcaatggaactgggctagcaaaaacccttatggctatggagatcagggctccaccgattaaccacttagttttctctttgggttcttttctgaactcacccacaccgtagtccgtaggtcttgtgaatttagttttcccaaaagcttttctttctttagtgatcttaaggtgacaaagtacttgtattattactattcatagttacatagtaagtaagtagtggtttactatactgtaatttaaaggttctctaggttccttcttacaggttattgattattagattcggattctctcatgttccacatgagcagcatcctgttttgtaaatctaaatcacatgtttgtttaaagtgtgactaacaggtatccttacctcattattgagattaatttattttgaatgttacctttagtaataaatagcatttttcatg

SEQ ID NO: 22516 - protein, 365 aa, Glycine max
KISNNPSLQNASHKVLMRDKTVLVTGGAGYIGSHTVLQLLLGGFRAVVLDNLENSSEVAIHRVRELAGEFGNNLSFHKVDLRDRAALDQIFSSTQFDAVIHFAGLKAVGESVQKPLLYYNNNLTGTITLLEVMAAHGCKKLVFSSSATVYGWPKEVPCTEEFPLSAMNPYGRTKLIIEEICRDVHCAEPDCKIILLRYFNPVGAHLSGYIGEDPRGIPNNLMPFVQQVAVGRRPALTVFGNDYNTSDGTGVRDYIHVVDLADGHIAALLKLDEPNIGCEVYNLGTGKGTSVLEMVRAFEMASGKKIPLVMAGRRPGDAEIVYASTKKAERELKWKAKYGIDEMCRDQWNWASKNPYGYGDQGSTD

SEQ ID NO: 22517 - protein, 349 aa, Glycine max
MRDKTVLVTGGAGYIGSHTVLQLLLGGFRAVVLDNLENSSEVAIHRVRELAGEFGNNLSFHKVDLRDRAALDQIFSSTQFDAVIHFAGLKAVGESVQKPLLYYNNNLTGTITLLEVMAAHGCKKLVFSSSATVYGWPKEVPCTEEFPLSAMNPYGRTKLIIEEICRDVHCAEPDCKIILLRYFNPVGAHLSGYIGEDPRGIPNNLMPFVQQVAVGRRPALTVFGNDYNTSDGTGVRDYIHVVDLADGHIAALLKLDEPNIGCEVYNLGTGKGTSVLEMVRAFEMASGKKIPLVMAGRRPGDAEIVYASTKKAERELKWKAKYGIDEMCRDQWNWASKNPYGYGDQGSTD

SEQ ID NO: 22518 - protein, 233 aa, Glycine max
MAAHGCKKLVFSSSATVYGWPKEVPCTEEFPLSAMNPYGRTKLIIEEICRDVHCAEPDCKIILLRYFNPVGAHLSGYIGEDPRGIPNNLMPFVQQVAVGRRPALTVFGNDYNTSDGTGVRDYIHVVDLADGHIAALLKLDEPNIGCEVYNLGTGKGTSVLEMVRAFEMASGKKIPLVMAGRRPGDAEIVYASTKKAERELKWKAKYGIDEMCRDQWNWASKNPYGYGDQGSTD

SEQ ID NO: 22519 - DNA, 1165 bp, Glycine max
tcaacatgattctgcggatggtctgtgggaagcgctatttcagcgcttctacttcggatgatgagaaggcaaacagatgcgttaaggctgtggatgagttcgtgcgtctcgccgccaccttcaccgtgggagatgccattccttatcttagatggtttgactttggtggctatgagaatgatatgagagaaactgggaaggaattggacgagattattggcgagtggttagatgagcatcgacaaaaaagaaaaatgggtgagaacgttcaagacctcatgagcgtgttgctttccttgcttgaaggaaaaactattgagggcatgaatgttgatattgtcatcaaatcctttgtattgacagtaattcaagcaggaactgaggcaagcattactactcttatatgggcaacaagtttgatattgaataatcctagtgtactagaaaaacttaaagcagaactagacatccaagttggaaaagagagatacatatgtgagtctgatttaagtaagttaacatatcttcaagctgtagtcaaagaaactttaagattgtaccctccagctcctctctcaagacctcgtgagtttgaagaggattgcactataggtggctacactgtcaaaaagggaactcgtctaattacaaatctttccaagatccacacagatcataacgtttggtcaaatccattagagtttaaaccagaaaggttccttacgactgataaagatatagacatgaagggtcaacattttcagctattaccatttggaggtggtaggaggatttgtcctggaataaacttaggccttcaaacagttcgtttgacacttgctagttttttgcattcctttgaaatcttaaatccatcaactgagcctcttgatatgactgaagtctttagagcaaccaacactaaagccactccacttgagattcttattaaaccacgcctatctcctagttgttatgaaagtatctaatatttaattatgtgttagttgtgtgaacctgctgtctgtattttttatttttaaactatatgtaatctgttttaaaataagcctggtttgccttgtaagctattccaaaactatgtattttgttgcttaatctcatttgaataaacatgaagcaagagattgatggtgttttctcc

SEQ ID NO: 22520 - protein, 328 aa, Glycine max
NMILRMVCGKRYFSASTSDDEKANRCVKAVDEFVRLAATFTVGDAIPYLRWFDFGGYENDMRETGKELDEIIGEWLDEHRQKRKMGENVQDLMSVLLSLLEGKTIEGMNVDIVIKSFVLTVIQAGTEASITTLIWATSLILNNPSVLEKLKAELDIQVGKERYICESDLSKLTYLQAVVKETLRLYPPAPLSRPREFEEDCTIGGYTVKKGTRLITNLSKIHTDHNVWSNPLEFKPERFLTTDKDIDMKGQHFQLLPFGGGRRICPGINLGLQTVRLTLASFLHSFEILNPSTEPLDMTEVFRATNTKATPLEILIKPRLSPSCYESI

SEQ ID NO: 22521 - protein, 327 aa, Glycine max
MILRMVCGKRYFSASTSDDEKANRCVKAVDEFVRLAATFTVGDAIPYLRWFDFGGYENDMRETGKELDEIIGEWLDEHRQKRKMGENVQDLMSVLLSLLEGKTIEGMNVDIVIKSFVLTVIQAGTEASITTLIWATSLILNNPSVLEKLKAELDIQVGKERYICESDLSKLTYLQAVVKETLRLYPPAPLSRPREFEEDCTIGGYTVKKGTRLITNLSKIHTDHNVWSNPLEFKPERFLTTDKDIDMKGQHFQLLPFGGGRRICPGINLGLQTVRLTLASFLHSFEILNPSTEPLDMTEVFRATNTKATPLEILIKPRLSPSCYESI

SEQ ID NO: 22522 - protein, 323 aa, Glycine max
MVCGKRYFSASTSDDEKANRCVKAVDEFVRLAATFTVGDAIPYLRWFDFGGYENDMRETGKELDEIIGEWLDEHRQKRKMGENVQDLMSVLLSLLEGKTIEGMNVDIVIKSFVLTVIQAGTEASITTLIWATSLILNNPSVLEKLKAELDIQVGKERYICESDLSKLTYLQAVVKETLRLYPPAPLSRPREFEEDCTIGGYTVKKGTRLITNLSKIHTDHNVWSNPLEFKPERFLTTDKDIDMKGQHFQLLPFGGGRRICPGINLGLQTVRLTLASFLHSFEILNPSTEPLDMTEVFRATNTKATPLEILIKPRLSPSCYESI

SEQ ID NO: 22523 - DNA, 1059 bp, Glycine max
agcgaatcctcctcctcgtcctccttctccacctctctcttcaatttctcttctggaaacccgagaatcgaggagacccgtggcctcatgcatctcttcccagacgacactccttctactctacccgttggacggaagcctctcgtttgcgttgtcggcgtcccaaatcacatgacctatgcggatttctgccagttctgtggttccttcattcagcacatgctagagatgcgcatagtcaggatggatgggatggaggatcagtacagtgttttagttcgctttgacgatcaagactccaccgacagcttctacaagcactacaatggccgccgtttctcttctctcgaggttgaggtttgccgtgttcttttcacattagacgtgcagtacactggctccattgaacatgcacaaccctccaatgctacttcaactgaactgcctacttgtcctgtttgccttgatcaggacaccggtggaattcttacaactatatgcaaccattctttccattgttcctgtatttctaaatgggcagattcttcttgtcctgtatgccgctattgccagcagcaagctgaaaaatctatatgttttgtttgtcaaaccactgagaacctatggatatgtgttatatgtgggtatgttggctgtggaagatacaagggagggcatgctataatacactggaaagagacacagcattgctattccctagaagtggaaacaaaacgagtttgggattatgtgggagacaactatgttcatagacttattcagtccaaaactgatgggaagttgattgagctgaacactcagtgtgcgcatgcagacaatggatgtggaagttgcagctgtgaagataatgccatgaatgaggctatacttaatagtaaagttgaagctgtaatgttgcaagattaatttagtaatttgctcgattcttagatttatgtatctttacggggacttttaatttctcacacattatatgaatatactttcttttacagattgtcaatgagtacaatgaattgcttgctactcaacttgaat

SEQ ID NO: 22524 - protein, 308 aa, Glycine max
SESSSSSSFSTSLFNFSSGNPRIEETRGLMHLFPDDTPSTLPVGRKPLVCVVGVPNHMTYADFCQFCGSFIQHMLEMRIVRMDGMEDQYSVLVRFDDQDSTDSFYKHYNGRRFSSLEVEVCRVLFTLDVQYTGSIEHAQPSNATSTELPTCPVCLDQDTGGILTTICNHSFHCSCISKWADSSCPVCRYCQQQAEKSICFVCQTTENLWICVICGYVGCGRYKGGHAIIHWKETQHCYSLEVETKRVWDYVGDNYVHRLIQSKTDGKLIELNTQCAHADNGCGSCSCEDNAMNEAILNSKVEAVMLQD

SEQ ID NO: 22525 - protein, 279 aa, Glycine max
MHLFPDDTPSTLPVGRKPLVCVVGVPNHMTYADFCQFCGSFIQHMLEMRIVRMDGMEDQYSVLVRFDDQDSTDSFYKHYNGRRFSSLEVEVCRVLFTLDVQYTGSIEHAQPSNATSTELPTCPVCLDQDTGGILTTICNHSFHCSCISKWADSSCPVCRYCQQQAEKSICFVCQTTENLWICVICGYVGCGRYKGGHAIIHWKETQHCYSLEVETKRVWDYVGDNYVHRLIQSKTDGKLIELNTQCAHADNGCGSCSCEDNAMNEAILNSKVEAVMLQD

SEQ ID NO: 22526 - protein, 251 aa, Glycine max
MTYADFCQFCGSFIQHMLEMRIVRMDGMEDQYSVLVRFDDQDSTDSFYKHYNGRRFSSLEVEVCRVLFTLDVQYTGSIEHAQPSNATSTELPTCPVCLDQDTGGILTTICNHSFHCSCISKWADSSCPVCRYCQQQAEKSICFVCQTTENLWICVICGYVGCGRYKGGHAIIHWKETQHCYSLEVETKRVWDYVGDNYVHRLIQSKTDGKLIELNTQCAHADNGCGSCSCEDNAMNEAILNSKVEAVMLQD

SEQ ID NO: 22527 - DNA, 836 bp, Glycine max
ctgatgtaaagatgttgttgatcataccccttattgcatattcaggtctacaacaagcatttgtgtgggctgaatttaccaagtatgttgtaactcctgcaattggtatttctggtgtgggtagttcaatggcagcatacggggcttttgatggaatattttctctgcttgctggtcgtctcacctctggtctcacatctattacaacaatagtttctgctggactttttgctcaggcagtcgtattagtcttacttctgctaaatttcagcataagtagtggattgcttggtactgtttacatactcttcttggctggtttattgggcatcggtgatggagttttaatgacacaacttaatgcattgattggaatactatttaagcatgacacggaaggggcttttgctcagctaaaaatatggcaatgcgctacaattgctatcgtgttctttttcgccccgctcgtctcgttcaaagccgtgcttgtgattatgcttgctctcctttgcttctcattctgcattttcctattgcttgctctgaaggtcgggaagacatcatcaccctccaccagtcagcgaatttaaaactgcttaaactgtagattttttgtatacaatctcagtctgtctttctcgcgtgtagcacgtccactctggactatgtctttatttttgtggtgaaatttcggtcagttgaatgagcttgtacaaattgtgacaaatcagtgtgtttggtaacacatttgttaccgctctggttggacgtggttccgcgaagcaattaatagttgcttttgcattgttttttttacgtgaatttctcataaacat

SEQ ID NO: 22528 - protein, 195 aa, Glycine max
DVKMLLIIPLIAYSGLQQAFVWAEFTKYVVTPAIGISGVGSSMAAYGAFDGIFSLLAGRLTSGLTSITTIVSAGLFAQAVVLVLLLLNFSISSGLLGTVYILFLAGLLGIGDGVLMTQLNALIGILFKHDTEGAFAQLKIWQCATIAIVFFFAPLVSFKAVLVIMLALLCFSFCIFLLLALKVGKTSSPSTSQRI

SEQ ID NO: 22529 - protein, 192 aa, Glycine max
MLLIIPLIAYSGLQQAFVWAEFTKYVVTPAIGISGVGSSMAAYGAFDGIFSLLAGRLTSGLTSITTIVSAGLFAQAVVLVLLLLNFSISSGLLGTVYILFLAGLLGIGDGVLMTQLNALIGILFKHDTEGAFAQLKIWQCATIAIVFFFAPLVSFKAVLVIMLALLCFSFCIFLLLALKVGKTSSPSTSQRI

SEQ ID NO: 22530 - protein, 153 aa, Glycine max
MAAYGAFDGIFSLLAGRLTSGLTSITTIVSAGLFAQAVVLVLLLLNFSISSGLLGTVYILFLAGLLGIGDGVLMTQLNALIGILFKHDTEGAFAQLKIWQCATIAIVFFFAPLVSFKAVLVIMLALLCFSFCIFLLLALKVGKTSSPSTSQRI

SEQ ID NO: 22531 - DNA, 1255 bp, Glycine max
aaaaaagcccatgttatcttgttcttttcctccactatgttttttttttttgcaattatctttcttatttaaaagatgaagcaagcaaacagaatcccctcttttgatcttggtttcaatattcatcatcaaatcactggtcctccttttatagaaatcttagatctgcttttaacacaaggttttggtggagaagaagaagcaaagacgacggtgtataaatacaagagtagaagaagaagaagaagcaattagagggagagttagtgagcaaggtggatcgaaggcaagggaagaggtctctccctcctcatgaggagaaaaaagaagctttcaactttcctattattcatccaacaccatctcaaaatcgaaaggaacaagcttcaccatcacccttttcactcctcatgagtaacaacaaaaacaacaccttcttccccaccccacatggccaaataagcacttctgaatttgttaatagccaaaatccgccccaggctacaaatcaaggcattgatgatattaggaaaaagcactatagaggagttaggcagagaccatggggcaaatgggcagcagaaataagagaccctaagaaagcagctagagtgtggcttggcacctttgacacggcagaggctgcagctatggcttatgatgctgctgcattgaggttcaaaggaaacaaagccaaactcaattttcctgaacgtgttgttatgccaatacaaccacaaacaaataacaataattccacttcttcatcagctcctactacacaatcatcttcttctcttccaccaccacaatctctacataataatagttctctttcagcagaagggtttccaaatcttgaggagtatgcaaggttgctgagttgtagcgatgatgatgattttcaacgtgttgcattggggctctaccagcatcacaataatgaggattttatttgtggttcatcacaaccaccaccagtgccgttttttgtgtcctcttcttcttcttcttctgcaatgacatcgtcatattctgattttttgggccaaggagggagtactggttttgatgaagggaacaagagggggtcgtagttttatgtctctgaattttgagcactgcatgcaggttgcttccacaacaattaaggaagttcaaatctctcatctcttatatgttcttttgtttttattattccaattacaaaataacacctgaggtataaaatctataatactcatctttcgtcttt

SEQ ID NO: 22532 - protein, 228 aa, Glycine max
MSNNKNNTFFPTPHGQISTSEFVNSQNPPQATNQGIDDIRKKHYRGVRQRPWGKWAAEIRDPKKAARVWLGTFDTAEAAAMAYDAAALRFKGNKAKLNFPERVVMPIQPQTNNNNSTSSSAPTTQSSSSLPPPQSLHNNSSLSAEGFPNLEEYARLLSCSDDDDFQRVALGLYQHHNNEDFICGSSQPPPVPFFVSSSSSSSAMTSSYSDFLGQGGSTGFDEGNKRGS

SEQ ID NO: 22533 - protein, 148 aa, Glycine max
MAYDAAALRFKGNKAKLNFPERVVMPIQPQTNNNNSTSSSAPTTQSSSSLPPPQSLHNNSSLSAEGFPNLEEYARLLSCSDDDDFQRVALGLYQHHNNEDFICGSSQPPPVPFFVSSSSSSSAMTSSYSDFLGQGGSTGFDEGNKRGS

SEQ ID NO: 22534 - protein, 124 aa, Glycine max
MPIQPQTNNNNSTSSSAPTTQSSSSLPPPQSLHNNSSLSAEGFPNLEEYARLLSCSDDDDFQRVALGLYQHHNNEDFICGSSQPPPVPFFVSSSSSSSAMTSSYSDFLGQGGSTGFDEGNKRGS

SEQ ID NO: 22535 - DNA, 1102 bp, Glycine max
agaaagcggagacacattgataaataataaaaaaaaggcgggaaagaaagggtgggtcaaaattttgagagccacacccagctttgaatcctccaacaaaatctccgttccgggtttttgcaatcgggagagtgcgagagagacaatacactacacggttgctgcattattgctttcagaggaactcattgcagtcattgattgtaagcaatggaaaaaatgcctgaacaaggtgccaatgcatcattattgccttctaatggaattggatccaggttctccaatttgaacaagtctttcaaatattctcttagatctttgctcacttcatgctcaaaggaggaattttataaagcattttcaagtttctctaacattgaaaaggaattgctccatcgcctatttcttcaggtcattacttcgttgcatgaaaacttagaggatgggtttgagactgtctgtcttcaaacacaggcaggagctactcttgatgctgtggagaaaattgtagaagaacaagatctggatgtcttgttttcagataggagtaacataatggatgttgctgagaatctgtctatggcaaagaagaatgaaatccaacacttaaagcatatggttcaattgggagaggaacataatcaaatgttgcgcacccgactacaactccttaaggaaggcaatcaagtattgtctggtgcctcacaagctgttgagaagttcaaaagcatgaatttaaattatggggcaaacagcggcgatgagatccatgatgtataacatgtcttgctcatgctctcctgcaaattgactaaggttcattctgtggtgaatcattcccatgcttttatgttgtagcaatgcttctaaagattatattaattcacgagtaaatctacatcttagtccttgatattaaagtgtcatgtattttagaagctaagattttagaaatcgtgtattagttcctgaatttttaaaacaccaagtgaatgttaaacattgtatgagtgactttcgttcttttaaatgagccttctgggtcatcctttcaaacactttcataactgattggatcatgcatcatgaactagatattttc

SEQ ID NO: 22536 - protein, 189 aa, Glycine max
MEKMPEQGANASLLPSNGIGSRFSNLNKSFKYSLRSLLTSCSKEEFYKAFSSFSNIEKELLHRLFLQVITSLHENLEDGFETVCLQTQAGATLDAVEKIVEEQDLDVLFSDRSNIMDVAENLSMAKKNEIQHLKHMVQLGEEHNQMLRTRLQLLKEGNQVLSGASQAVEKFKSMNLNYGANSGDEIHDV

SEQ ID NO: 22537 - protein, 186 aa, Glycine max
MPEQGANASLLPSNGIGSRFSNLNKSFKYSLRSLLTSCSKEEFYKAFSSFSNIEKELLHRLFLQVITSLHENLEDGFETVCLQTQAGATLDAVEKIVEEQDLDVLFSDRSNIMDVAENLSMAKKNEIQHLKHMVQLGEEHNQMLRTRLQLLKEGNQVLSGASQAVEKFKSMNLNYGANSGDEIHDV

SEQ ID NO: 22538 - protein, 95 aa, Glycine max
ESGDTLINNKKKAGKKGWVKILRATPSFESSNKISVPGFCNRESARETIHYTVAALLLSEELIAVIDCKQWKKCLNKVPMHHYCLLMELDPGSPI

SEQ ID NO: 22539 - DNA, 1979 bp, Glycine max
aaaacactcggtttcggttcatgctcgaagaggtcctctcgattcagatcatccacaacacatcacaacagaaacttcctctggcaaatctaccataacccacgtcaaatcctcacgaatctcaccgacccattccctattatcatccatctccaccgatcgctaccattaccaacagcagcttcatccattctccacgcacgcttcttccttttctttctcacaccgcgcgttcgtgttcttaatgcagaccctgattgcaacgaaatggacgtaaatttgggaggtgcaggcgcggtgacagcatagcatagcatgcagcagcagcagcagggagtgagcgtgcgaggagggaaggaggagcagcagcatgtcaaatcaggtggtgaaagtgcgaagggacacgattgcagcatgcatgacttgcccactctgcggcaagctcttcagagaagccacaaccatatccgaatgtctccacactttgcaggaagtgcatttatgataaaattacggatgaggagatagaatgttgtccaatatgcaacattgatttgggttgtgttccactcgagaaactgaggccagaccacagtttgcaagatgtaagggccaaagttttccccttaaagggaagaaaggtgaaggcacctgaagttgtcacctcagtaccattaccagctaggagaaaggagagatctctttcatctttggtggtcagcacaccaagggtatctacacaggcaaccatgacaggaagaagaacaaagcctacaagaaaggctagtggtttgcggtccactagtttttccattgaaaagcccattaaaaaagaggaatatttactagaagatcgtcctgatagttcaagctcacctgacacttcacataagtttgctcataattctggacagagcatgtccccttgcgagggtagtcagtccatcccaaataaaggatcagagaatggtgccgaaccatgggatgcaaaattggatctttggaaacccttgaattgtttagtagaagtcgcaagtaggagtaaatctttcaagtctaatattcttgggtctgatgctaaattagaaaccaatcaagtaaatgagagcgattctcaagttctgaaaataaaaaataaggaaaataaacgtaaggcaaaaattgaggatgaaaagagtagcccttatcctgtctcttcagatacagcaaaaccaaataaattgcgcagaatacgcaagaaaaaagagcctgcttctggagaatctggcatatcaccccaagctgtgctggattctgccagcaataatagactctcaaggactggtccaatttggttctccttagtggcttctgaaaaccaggaaggagatgatcccttgccccaaattcctgcaagttatttgagaataaaggatggtagtgtacccgtctctttcatccaaaaatacctaatgaagaaactggatttgacaagtgaaacagaggttgagattaaatgtgtgggacaaccagtgctccctacattgcagttatataatttggttgagttgtggctggatacggcgcccacgtcacagagaattccagcaactattgggtcctcagcaaaggattttgtcatggtcttggcttatgctcggagggttccagacccttgatcatgtttccccattcatactttaatgcaccttgaaaatcttcttcatagcatagtcacttaccatcaccactgtggaggataggataagataggtcaaataaattataaagaaattctctccataaaaacatacccttctgttcattaatctaggcatcctgatttttcatgaccaacatttttttttggtttaagttcgcatattcctataatttggagtgcacatgtgacttaggtataagaagctatgggctaccatgcctggttagaagtttgttgagaatttgacatttgaatctagaggattctttgttatttt

SEQ ID NO: 22540 - protein, 302 aa, Glycine max
MTGRRTKPTRKASGLRSTSFSIEKPIKKEEYLLEDRPDSSSSPDTSHKFAHNSGQSMSPCEGSQSIPNKGSENGAEPWDAKLDLWKPLNCLVEVASRSKSFKSNILGSDAKLETNQVNESDSQVLKIKNKENKRKAKIEDEKSSPYPVSSDTAKPNKLRRIRKKKEPASGESGISPQAVLDSASNNRLSRTGPIWFSLVASENQEGDDPLPQIPASYLRIKDGSVPVSFIQKYLMKKLDLTSETEVEIKCVGQPVLPTLQLYNLVELWLDTAPTSQRIPATIGSSAKDFVMVLAYARRVPDP

SEQ ID NO: 22541 - protein, 246 aa, Glycine max
MSPCEGSQSIPNKGSENGAEPWDAKLDLWKPLNCLVEVASRSKSFKSNILGSDAKLETNQVNESDSQVLKIKNKENKRKAKIEDEKSSPYPVSSDTAKPNKLRRIRKKKEPASGESGISPQAVLDSASNNRLSRTGPIWFSLVASENQEGDDPLPQIPASYLRIKDGSVPVSFIQKYLMKKLDLTSETEVEIKCVGQPVLPTLQLYNLVELWLDTAPTSQRIPATIGSSAKDFVMVLAYARRVPDP

SEQ ID NO: 22542 - DNA, 1358 bp, Glycine max
gttcgttccctctcaaccaaaaccaaccacttcatgttatcattgctatgacccttcaagcttttcatggctctgcatgttgtttccgttcccaccttcttcacttttcttcttccaccgcttcatctccaccattccttgcttcgaggaggttccaatcatgcccttcaacaagaaaatctctcaagttgaattgcagttcaagtggcaataatggtgaccaagattaccttctggatgctccagtttctgttggagatggattctctttcagtggagggaagtattcagatggccctagtccaagtgatgaatggtttaagcaagggaaaaaggttaaagcctattcaatacctggcactggtgaaaaggcaaaagatccaatttttggacttgctatgggttccggttctcaagctactggcgatcgtttcagatggttttgtgttgaaagcggaagtgctgataatccttcagtgatattaatccatggtttcccttcacaggcatattcttaccgcaaagttcttccagtactctccaaggactatcacgtcatagcctttgactggctaggatttgggttttctgacaagcctcaacccagatatgggtttgactacacactggatgagtatgtctcatcattggagtcacttattgatgaactggctgctactaaagtctcacttgttgtccagggatatttttcgcctgttgtagccaagtatgccagcattcaccaggaaaaagtcagaaacttaatactccttaatccgcctctaacagcccaacatgccaagcttccaccaacattgtccatattcagcaactttctactaggtgaaatattttcacaggatccattaagggccagtgacaaagctctaacaagctgtggcccctataaaatgaaagaagaagatgcaatggtctatcgaagaccctatcttacatctggttcctctggctttgctctaaatgcaattagcaggaacatgaacaaagacctcaagagatatgtggaggatatgcaaacaatactgaaggacaaaaattggaaagttcaaaccacaatatgttggggccaaagagaccgctggttgagctatgatggagtggaggatttctgcaaggattccaatcataaactcattgatgttcctacggctggtcatcatgtgcaggaagattgtggcgaagaagttggacaacttattcgtgggataataagcaaaaggaccaagatataggatattttctcattgcttcttgagatgctgaacaaatttttttgttacatggattcctatcttttccttggtctctatccttccaataaatcttgattcaattcc

SEQ ID NO: 22543 - protein, 416 aa, Glycine max
SFPLNQNQPLHVIIAMTLQAFHGSACCFRSHLLHFSSSTASSPPFLASRRFQSCPSTRKSLKLNCSSSGNNGDQDYLLDAPVSVGDGFSFSGGKYSDGPSPSDEWFKQGKKVKAYSIPGTGEKAKDPIFGLAMGSGSQATGDRFRWFCVESGSADNPSVILIHGFPSQAYSYRKVLPVLSKDYHVIAFDWLGFGFSDKPQPRYGFDYTLDEYVSSLESLIDELAATKVSLVVQGYFSPVVAKYASIHQEKVRNLILLNPPLTAQHAKLPPTLSIFSNFLLGEIFSQDPLRASDKALTSCGPYKMKEEDAMVYRRPYLTSGSSGFALNAISRNMNKDLKRYVEDMQTILKDKNWKVQTTICWGQRDRWLSYDGVEDFCKDSNHKLIDVPTAGHHVQEDCGEEVGQLIRGIISKRTKI

SEQ ID NO: 22544 - protein, 401 aa, Glycine max
MTLQAFHGSACCFRSHLLHFSSSTASSPPFLASRRFQSCPSTRKSLKLNCSSSGNNGDQDYLLDAPVSVGDGFSFSGGKYSDGPSPSDEWFKQGKKVKAYSIPGTGEKAKDPIFGLAMGSGSQATGDRFRWFCVESGSADNPSVILIHGFPSQAYSYRKVLPVLSKDYHVIAFDWLGFGFSDKPQPRYGFDYTLDEYVSSLESLIDELAATKVSLVVQGYFSPVVAKYASIHQEKVRNLILLNPPLTAQHAKLPPTLSIFSNFLLGEIFSQDPLRASDKALTSCGPYKMKEEDAMVYRRPYLTSGSSGFALNAISRNMNKDLKRYVEDMQTILKDKNWKVQTTICWGQRDRWLSYDGVEDFCKDSNHKLIDVPTAGHHVQEDCGEEVGQLIRGIISKRTKI

SEQ ID NO: 22545 - protein, 284 aa, Glycine max
MGSGSQATGDRFRWFCVESGSADNPSVILIHGFPSQAYSYRKVLPVLSKDYHVIAFDWLGFGFSDKPQPRYGFDYTLDEYVSSLESLIDELAATKVSLVVQGYFSPVVAKYASIHQEKVRNLILLNPPLTAQHAKLPPTLSIFSNFLLGEIFSQDPLRASDKALTSCGPYKMKEEDAMVYRRPYLTSGSSGFALNAISRNMNKDLKRYVEDMQTILKDKNWKVQTTICWGQRDRWLSYDGVEDFCKDSNHKLIDVPTAGHHVQEDCGEEVGQLIRGIISKRTKI

SEQ ID NO: 22546 - DNA, 1552 bp, Glycine max
ttctaatcagtgcggcattctctgttataaatttctccaatatcaactacctgtatagtcttatactttttgctattactagcatgactgagaccatgactgaatttttcctaccttatcctgttatttatagtattttaatgctttagctaaataaatagtttaatctatgctacattcctatgttgcattgtaacccagtaattgtttttggccatcagtcatataaacatgtaggctttagcagatgctgaaactcttagatctcaagattattttctggcaacggatttctgaattgaatcataattttctacctgtttccagttctttgtttttgaaacaagtaaactctcttgtactgtattgacattaggcagaatgccttcattataaaagtgtcacggaatggaactgcagtttgagcatttaactatactcgtactgagttggatctgggatgatcatctaattgaaggaaattgagacaaactctggcagagcttggcaatatttatctttcaagcttctgcttgcaaggatatgaactgtaaaggtgctcgttctatccacagcattaatgattgatttcatagtaattggtagggtattttgtttgtcaacttgacttggtctttctatggatgattttgagtcacctcatgcgtgcttaattttgtttattatcgaatgttactatctttgagtgcgtgttttgggccattaaattactagatctgtttcctttcctttctcccctttccctctatttcgtgcaggcattttgtccccaatttaactattggcgctccagttattgaaagtttgagaaagcacacaaagtaacaaccttccttgatctagatgattttatgcagatttcttttttcctatttgcataatatatggtgctttttagtcatcaaccattcacccttgcagggcatatttggattgtcaccttatggttacaaatcctcttgattatgttgaacccttggcaaaagctggtgcttctggttttacatttcacgtagagacatcaaaagataactggaaagaacttatccaaagaatcaagtcacatggcatgattcctggtgtagcattaaagcctgggacccccgttggagaggtttatcctctggtggaagccgaaaatcctgtggaaatggttcttgtgatgactgtagaacctggattcggaggacaaaaatttatggcagagacgatggataaagtacgtatacttaggaagaagtatccatcacttgacatagaggttgatggtggtttagggccttcaaccatagacgtggccgcatcagcaggggcaaattgcattgttgctggaagttctgtttttggtgcacctgagccagctcaagtaatatccttactgaggagttctgttgagaaagcccagcaaacctcgatacagtaaaacaatgtcgttttaagttgcagtatacttcacaactttacataaacaatatgcttaatgttaacattttcataagttgaataaaagatcaagtgacttgataatgtc

SEQ ID NO: 22547 - protein, 159 aa, Glycine max
MVTNPLDYVEPLAKAGASGFTFHVETSKDNWKELIQRIKSHGMIPGVALKPGTPVGEVYPLVEAENPVEMVLVMTVEPGFGGQKFMAETMDKVRILRKKYPSLDIEVDGGLGPSTIDVAASAGANCIVAGSSVFGAPEPAQVISLLRSSVEKAQQTSIQ

SEQ ID NO: 22548 - protein, 117 aa, Glycine max
MIPGVALKPGTPVGEVYPLVEAENPVEMVLVMTVEPGFGGQKFMAETMDKVRILRKKYPSLDIEVDGGLGPSTIDVAASAGANCIVAGSSVFGAPEPAQVISLLRSSVEKAQQTSIQ

SEQ ID NO: 22549 - protein, 90 aa, Glycine max
MVLVMTVEPGFGGQKFMAETMDKVRILRKKYPSLDIEVDGGLGPSTIDVAASAGANCIVAGSSVFGAPEPAQVISLLRSSVEKAQQTSIQ

SEQ ID NO: 22550 - DNA, 941 bp, Glycine max
aaaaaaaaacatggaaaggatatagattatagaatacagaggcaccgacgtagcgacggtcaaggtccacaatccacaatccgcaaccgaataacccactacccacagatttctctctctctctctctgttggattggatcctaatatctgtgttccactttcagaggttgctccttcattcacgcccttgctctcttcaaatctattttcttcctctgctctatctatctcttgttatttttccctctcacgccaatcaccatgccttctccttcagatcaccaccgcccccaaccaaaacctaatcccaacctcctttctctgttcctcaaaccaatcatcatgctccttctcacctccctcttcttcctcttcctcggcttcgctgccttcctcctcctcaacctcttcctcctcggcggcgccttccaccgccttcgcttccgcccctccgttaccaccgcacccacctcctccaacggcctcccccctcgcgaaatcaacaagctcccccgctttcgtgtcgccaatggatccgagacccgacccgactccaattgcgtcgtctgcctggacgcattccataacgcccaatggtgccgaaagcttgctgcgtgcgggcacgtgtttcaccgcaggtgcgtcgacacgtggctccttaaggtcgccgcatgccccacgtgccgcacacccgtgggattcaatgccggtgctacggtacatgacccgcctcagcggtctgaccatttgcatacctgcggaactgactccaatgctctcaccacccttttatagcttgtaagttttcgtttttaagcctttcccaaaccatgtaaggatatcaagtaattgtttttttaatctatgtatatgaattgtagcaatagttttttctcccatttcgacgactattgggaagaaatgaaccaacttaattcac

SEQ ID NO: 22551 - protein, 177 aa, Glycine max
MPSPSDHHRPQPKPNPNLLSLFLKPIIMLLLTSLFFLFLGFAAFLLLNLFLLGGAFHRLRFRPSVTTAPTSSNGLPPREINKLPRFRVANGSETRPDSNCVVCLDAFHNAQWCRKLAACGHVFHRRCVDTWLLKVAACPTCRTPVGFNAGATVHDPPQRSDHLHTCGTDSNALTTLL

SEQ ID NO: 22552 - protein, 150 aa, Glycine max
MLLLTSLFFLFLGFAAFLLLNLFLLGGAFHRLRFRPSVTTAPTSSNGLPPREINKLPRFRVANGSETRPDSNCVVCLDAFHNAQWCRKLAACGHVFHRRCVDTWLLKVAACPTCRTPVGFNAGATVHDPPQRSDHLHTCGTDSNALTTLL

SEQ ID NO: 22553 - protein, 101 aa, Glycine max
KKKHGKDIDYRIQRHRRSDGQGPQSTIRNRITHYPQISLSLSLLDWILISVFHFQRLLLHSRPCSLQIYFLPLLYLSLVIFPSHANHHAFSFRSPPPPTKT

SEQ ID NO: 22554 - DNA, 1440 bp, Glycine max
aactctcagcgcccagcctacagcctccaggtgtgttttgttttgcagatccaacactctctctatttatatccaactgtaccatctcccacttccttattctcaaccctttttatcttttcatcaattcaattcaaaccacgccttcccctgttcacaaccttgcccacacactgcattgttctaattaaacatgtcaccctcactgttaccaccatcacaacacaaccaccatttctaactcaacaacaaccaaaaaaaaaaagattctggagcatcatttcttggattctggttcgcgttggtcacatccatcaaacacccctatactctttcttggcgtgcgtcaggtattcatttttacggcaaccctgacagagtaataagacagttaccgtgttgtacgtgtccttcaaacgtcacccacttcaacacataaaccatcgtttttcccaccagatttatattcattcgtcgtatttaaacccaccacaccaaccaaccatacattatcgttgcaattgttgttacaagcttaggttagggtctgtttggtgataatttagaatcttagatggggaattgccaagctgcggaagcggctacggttgtgattcagcatcctgggaacaagatcgagagggtttattggtcgcttagcgcacacgaggttatgaactcgaatcctgggcactatgttgcgcttgtcgtgtcctcgcccacgctcaaggccgagaatggcgctccgatgaagcagcttaagcttctccgacccgacgatactttgcatattggccaggtttatcggttgatcagcttcgaagatgtgttgaaggagtttgcttccaagaaatgtggtaaacttgggaaattgctcaaggagacgggtagtcatgggattcagatgaagcacaaggactctagagctacaaatcctagcccaaattccaaaaccgaattcggttccattaagggtttctccatttttgtcaaactcactgaccatgaaacttgcggaatgttgatgttgtgtgtggtccaatatatctatcctcttcagcaaaattgcttccttttcgtgtattgattattatatatgtttttataaacacgctctggcacgagcagcgtctgcgatcagttataaacccctcgagaaaataatgctatatgttatctacaaactccacagtccacagcagatgagataacctatctaggctacaagataaaaacaaaagtcctgcactcaattcaaatcttagatccgacatgccccagatagtgcctagctccactaggcaccattaacagattaatgtttgtatgtagcttggttgttttgcttggatggaatcacgggtcaatggtgtaatcactttatcccttgcttttttcattcaattctgcctttaattcaaaagacagggtatttgttct

SEQ ID NO: 22555 - protein, 170 aa, Glycine max
MGNCQAAEAATVVIQHPGNKIERVYWSLSAHEVMNSNPGHYVALVVSSPTLKAENGAPMKQLKLLRPDDTLHIGQVYRLISFEDVLKEFASKKCGKLGKLLKETGSHGIQMKHKDSRATNPSPNSKTEFGSIKGFSIFVKLTDHETCGMLMLCVVQYIYPLQQNCFLFVY

SEQ ID NO: 22556 - protein, 137 aa, Glycine max
MNSNPGHYVALVVSSPTLKAENGAPMKQLKLLRPDDTLHIGQVYRLISFEDVLKEFASKKCGKLGKLLKETGSHGIQMKHKDSRATNPSPNSKTEFGSIKGFSIFVKLTDHETCGMLMLCVVQYIYPLQQNCFLFVY

SEQ ID NO: 22557 - protein, 124 aa, Glycine max
NSQRPAYSLQVCFVLQIQHSLYLYPTVPSPTSLFSTLFIFSSIQFKPRLPLFTTLPTHCIVLIKHVTLTVTTITTQPPFLTQQQPKKKRFWSIISWILVRVGHIHQTPLYSFLACVRYSFLRQP

SEQ ID NO: 22558 - DNA, 1483 bp, Glycine max
ttttggtggtaaacggtctgaagaatctgaaaaaatcattgaagaaataagaaacagagaatggggattgctcctcatggatgaggtgcatgtggttccggcccatatgtttcgtaaagtcatcagtatcactaaatctcattgtaaacttgggctcacagctacacttgtcagagaggacgaaaggattacagatctgaacttcctgattggtcccaagctgtatgaggcaaattggttagatctagtaaaaggtggatttattgcaaatgtacagtgtgctgaagtatggtgtccgatgacaaaagagttttttgccgagtatttgaagaaagagaactccaagaagaggcaggcactttacgtgatgaatcctaataagttcagagcatgtgagtttctcataaatttccatgaaaggacacgtggtgataaaattatagtctttgctgataatctgtttgctctcactgagtatgctatgaaactccgtaaaccaatgatatatggtgctacaagtcatgttgagaggacaaaaattttgcaagcattcaaaactagcaaagatataaatactatatttctttccaaggtgggtgacaactcaattgatattcctgaagcaaacgtaataattcagatctcttcacatgctggttcaaggcgacaagaagcccagcgtctgggtcgtattcttagggccaagggaaagcttgaggataggatggcagggggcaaggaggagtataatgcatttttttattcccttgtttcaattgatacccaggagatgtattactcaactaagagacagcaatttttaattgatcagggttacagctttaaggtaattactagcttgcctcctcccgatgaagggcctaatttgagctatcatcgtcttgaggatcaattggcacttcttggaaaggtgttgagtgctggtgacgatcaagttggattagagcaactagatgaagatgcagatgaaatagcccttcagagtgcccgtcgttctcaaggatccatgagtgcaatgtcaggcgcaaaagggatggtttatatggagtacagtactgggcgtaacaaaggccaaggacagatcaagagcaagccgaaagatccagcgaagagacatttcttgtttaaaagaagatatggcgcaacctaaatggtgcacacctgctctgcgaatagaaacgagcacctatgtggcggctttgtaatggtacaatacgaaagtaatcaagtatgcaggatttacagccttacttgacacaatgctggttgcctttttcataaaaaaaaaaaaaggagacttgtatacactgaaatcattggatgcttcgaaaagcaggcataatgcttatttttcaactgttcactttatggagatgtggtcaaacaggttattttttccttcatgtgaacaaagaggcaaccaaggctatattatacagccttcgaaaaggcaaatttgttc

SEQ ID NO: 22559 - protein, 389 aa, Glycine max
FGGKRSEESEKIIEEIRNREWGLLLMDEVHVVPAHMFRKVISITKSHCKLGLTATLVREDERITDLNFLIGPKLYEANWLDLVKGGFIANVQCAEVWCPMTKEFFAEYLKKENSKKRQALYVMNPNKFRACEFLINFHERTRGDKIIVFADNLFALTEYAMKLRKPMIYGATSHVERTKILQAFKTSKDINTIFLSKVGDNSIDIPEANVIIQISSHAGSRRQEAQRLGRILRAKGKLEDRMAGGKEEYNAFFYSLVSIDTQEMYYSTKRQQFLIDQGYSFKVITSLPPPDEGPNLSYHRLEDQLALLGKVLSAGDDQVGLEQLDEDADEIALQSARRSQGSMSAMSGAKGMVYMEYSTGRNKGQGQIKSKPKDPAKRHFLFKRRYGAT

SEQ ID NO: 22560 - protein, 364 aa, Glycine max
MDEVHVVPAHMFRKVISITKSHCKLGLTATLVREDERITDLNFLIGPKLYEANWLDLVKGGFIANVQCAEVWCPMTKEFFAEYLKKENSKKRQALYVMNPNKFRACEFLINFHERTRGDKIIVFADNLFALTEYAMKLRKPMIYGATSHVERTKILQAFKTSKDINTIFLSKVGDNSIDIPEANVIIQISSHAGSRRQEAQRLGRILRAKGKLEDRMAGGKEEYNAFFYSLVSIDTQEMYYSTKRQQFLIDQGYSFKVITSLPPPDEGPNLSYHRLEDQLALLGKVLSAGDDQVGLEQLDEDADEIALQSARRSQGSMSAMSGAKGMVYMEYSTGRNKGQGQIKSKPKDPAKRHFLFKRRYGAT

SEQ ID NO: 22561 - protein, 354 aa, Glycine max
MFRKVISITKSHCKLGLTATLVREDERITDLNFLIGPKLYEANWLDLVKGGFIANVQCAEVWCPMTKEFFAEYLKKENSKKRQALYVMNPNKFRACEFLINFHERTRGDKIIVFADNLFALTEYAMKLRKPMIYGATSHVERTKILQAFKTSKDINTIFLSKVGDNSIDIPEANVIIQISSHAGSRRQEAQRLGRILRAKGKLEDRMAGGKEEYNAFFYSLVSIDTQEMYYSTKRQQFLIDQGYSFKVITSLPPPDEGPNLSYHRLEDQLALLGKVLSAGDDQVGLEQLDEDADEIALQSARRSQGSMSAMSGAKGMVYMEYSTGRNKGQGQIKSKPKDPAKRHFLFKRRYGAT

SEQ ID NO: 22562 - DNA, 1403 bp, Glycine max
aagcttgatcaatggatccgaggtggcagtgaagaaaattcttaacaacttgggacaagcagagaaagaattcagggtggaagtagaggctattggccatgttagacataaaaatcttgtacgattacttggttattgcgtagaaggggttcacaggttgctggtatatgaatatgtgaacaatggtaacttagaacaatggctacatggggctatgagccaacaagggacacttacctgggaagcccggatgaaagttataactggaacagccaaagcgctagcttacttacatgaagcaatagaaccgaaagtcgttcaccgggatataaagtcaagcaacatattgattgatactgatttcaatgcaaaggtttctgactttggtttggccaaacttttggattcaggagaaagtcacattactactagagtaatgggaacatttggttatgtggcaccggaatatgctaatacaggtttgttaaatgagaggagtgacatttacagctttggtgttctcctgcttgaagcagttactggaagggatcctgtggactactcacgtccttctaacgaggtgaatcttgttgaatggctcaagatgatggtggggacaaggagaactgaggaagttgtcgactcaaggcttgaagtgaaaccatcaatacgtgctttaaagtgtgctcttctagttgctcttagatgtgttgatcccgaagcagaaaagaggcccaaaatgagtcaggttgtgaggatgcttgaagccgacgaatatccattccgagaggatcgaagaaatagaaagagccgcaccgcgagcatggaaattgaatctctgaaggatatttctggtccatctgatgctgaaaagttgaagggtgggcatgcaccagaaacaactcaagggtaggattgacagccacacttgacttaaccagcatgtacaattggccttgtttcgatttcagtaaccaatcaaatacaccatatatgttcaaagtttgtcttgagatatttttttgccgcatctgaggagagaatcaattctgagactgagaggagaatcaagttggagatatagcttatttggacaatgaagcattttcttattcacaacatggttatttaaggatatgatatgatatgatacaccaaatttgctaggaggatggagtcagggtgagtgcattagttaatgttgtacatacagatgtctgctgagccaatctcttccatacatgactgttaatttgctgccatttttgtctgcttgagagtggagatgatgaaaaactgatatttggcttcattgtagttgccgttttgctttaagttaatcattatgtataaactccaaaaagtattatgtgaagtgataatatcccttttacttttgcagt

SEQ ID NO: 22563 - protein, 303 aa, Glycine max
SLINGSEVAVKKILNNLGQAEKEFRVEVEAIGHVRHKNLVRLLGYCVEGVHRLLVYEYVNNGNLEQWLHGAMSQQGTLTWEARMKVITGTAKALAYLHEAIEPKVVHRDIKSSNILIDTDFNAKVSDFGLAKLLDSGESHITTRVMGTFGYVAPEYANTGLLNERSDIYSFGVLLLEAVTGRDPVDYSRPSNEVNLVEWLKMMVGTRRTEEVVDSRLEVKPSIRALKCALLVALRCVDPEAEKRPKMSQVVRMLEADEYPFREDRRNRKSRTASMEIESLKDISGPSDAEKLKGGHAPETTQG

SEQ ID NO: 22564 - protein, 232 aa, Glycine max
MSQQGTLTWEARMKVITGTAKALAYLHEAIEPKVVHRDIKSSNILIDTDFNAKVSDFGLAKLLDSGESHITTRVMGTFGYVAPEYANTGLLNERSDIYSFGVLLLEAVTGRDPVDYSRPSNEVNLVEWLKMMVGTRRTEEVVDSRLEVKPSIRALKCALLVALRCVDPEAEKRPKMSQVVRMLEADEYPFREDRRNRKSRTASMEIESLKDISGPSDAEKLKGGHAPETTQG

SEQ ID NO: 22565 - protein, 220 aa, Glycine max
MKVITGTAKALAYLHEAIEPKVVHRDIKSSNILIDTDFNAKVSDFGLAKLLDSGESHITTRVMGTFGYVAPEYANTGLLNERSDIYSFGVLLLEAVTGRDPVDYSRPSNEVNLVEWLKMMVGTRRTEEVVDSRLEVKPSIRALKCALLVALRCVDPEAEKRPKMSQVVRMLEADEYPFREDRRNRKSRTASMEIESLKDISGPSDAEKLKGGHAPETTQG

SEQ ID NO: 22566 - DNA, 1312 bp, Glycine max
atcaaacactgcacttcatttggttggttcatatctcacttaattttgtgtcctttccatttacatattccacattcattaattttgagaaacatttagtgtatgttacatctggggaaggcttaaagtagatttactttgggtccatggtatccactgacttaaattactttgccaaaccatcattctcaacctcaatccacaaggaaaataattgtaccatagatagaaggctgacatttttaatttgaacctttgattttgagtggtttgtaaaatttaaaccccctcatcctaactaaactttatttgtgaatgtaatcccttctgagacactcataattcatgcatggtgtgcttgtacatttcaggttcaggtacttgcagtaagagaacatattgtaaaactaaaagggaaaaatggccttagatcactttgaggagactgtgcaccaaaaaggaaattggaaatcttccagtgaaatcattgcagattctgatagaaatgcctctggtgactttgactgcaacatctgcctggagtgtgtgcaagatccagtggtgacactttgtggtcatctttattgctggccctgcatatacaaatggcttcattttcaaagcacctctttggatgatgaagaacaacagaggccacaatgtcctgtatgcaaatcagaagtttctcaatcctcccttgttccattatacggccgtggccaaaccacattaccttctaaagggaagccacgtcaagtaggcactgtcataccacaaagacctcatggtccaagaacacttaacactagaagtgtttcacaacctatttctcaaagttaccatccctatagtaatccttatcatcctcaacaacacttcaactcgattccaagcggttacacctcacctatgattagaacaactggttcaatagacaacacatttggaatctttggtgagatgatatatgcaagggtctttggtaaccacgtgtcaaacattcatacatacgccaattcgtacaatctttcggggaccagtaacccaaggatgagaagacatttaatgcaagttgataaatcactcagcagaataagttgtttcctcctttgctgcctagttttgtgtctgctcttattctgattgctacttcattttcatcattagttatagtgcatccttacatagaatacattcactcattgatccagatgtattctatgttagagaagctgcaaattgatgctgagttatgtgtaaattaccaatctctctacgagctatatgaagtgaataatgatattctcatacc

SEQ ID NO: 22567 - protein, 240 aa, Glycine max; identical to SEQ ID NO: 21931

SEQ ID NO: 22568 - DNA, 1133 bp, Glycine max
aggaagtgctgggcagtcatttgcatgctttctgactcctggaatgaacattcgccttgttggagaggctaatgattatgttgggaagggcattgctggaggtgagttggttatcactccagtcgacaagaccgggtttgaacctgaggatgcagctattgtagggaacacttgcttgtatggtgcaactggtggacaggtcttcgttagagggagagctggtgaaagatttgctgtcagaaactcacttgctgaagcagtggtggaaggcgcaggagatcattgttgtgagtacatgactggtggctgtgtggttgtcttgggaaaagtgggtagaaatgtagctgctggtatgactggagggttggcttacattcttgatgaggacgatactttcatacccaaggtaaacagagaaattgtaaaaatccaacgggtgtcagcccctgttggacagatgcaactgaagagcctgattgaagctcacgttgaaaaaaccggtagtaccaaaggtgcggctattctgaaggactgggataagtatttatcactattttggcagctggttccacctagtgaagaagatacccccgaggcaaatgccaaatatgacacaactacggcagatcaggtcacttatcagtctgcttagggtaacaatctaaggttacattacattgattacgccaggctatggagccattgttgtgtccctgatttgtacaggaattggagaggctatcaattaggtggaaatgctagccaaaatatgggattaaactatcccttgaaaccatggtgctgcatgtattctcaagatcatttttgccagcagtatgaggaaccccgtatacatccatctgaagcattagcattctcttttgtatagccatgtgaaaggaaaaaagctgtatataaaatgcagttgattcgaatttgattgggacttttgtggacggtcaaaataaatagttggggcttgatatgcctgggtcccctttgctctcctgaattaatgaaaaattattgttttttccttgcacgatcgaagtgcgttgtttctctgcacttataaatataggatgtaattttttatgcttatattgttgataaagtactagcgggtttaatac

SEQ ID NO: 22569 - protein, 216 aa, Glycine max
GSAGQSFACFLTPGMNIRLVGEANDYVGKGIAGGELVITPVDKTGFEPEDAAIVGNTCLYGATGGQVFVRGRAGERFAVRNSLAEAVVEGAGDHCCEYMTGGCVVVLGKVGRNVAAGMTGGLAYILDEDDTFIPKVNREIVKIQRVSAPVGQMQLKSLIEAHVEKTGSTKGAAILKDWDKYLSLFWQLVPPSEEDTPEANAKYDTTTADQVTYQSA

SEQ ID NO: 22570 - protein, 202 aa, Glycine max
MNIRLVGEANDYVGKGIAGGELVITPVDKTGFEPEDAAIVGNTCLYGATGGQVFVRGRAGERFAVRNSLAEAVVEGAGDHCCEYMTGGCVVVLGKVGRNVAAGMTGGLAYILDEDDTFIPKVNREIVKIQRVSAPVGQMQLKSLIEAHVEKTGSTKGAAILKDWDKYLSLFWQLVPPSEEDTPEANAKYDTTTADQVTYQSA

SEQ ID NO: 22571 - protein, 118 aa, Glycine max
MTGGCVVVLGKVGRNVAAGMTGGLAYILDEDDTFIPKVNREIVKIQRVSAPVGQMQLKSLIEAHVEKTGSTKGAAILKDWDKYLSLFWQLVPPSEEDTPEANAKYDTTTADQVTYQSA

SEQ ID NO: 22572 - DNA, 1303 bp, Glycine max
gtattaacccatgtttggcatagattttctcatgggaaacatctgctttttttcaaaagctctctcgtgaagctggaaaaataaagtgcttctttctccaaattaaattgaaataaacatgcacttgtagttttgtcagtctatcataaaatatgtttagtgtagtaaactacactaatgttatactccttatttcctatttttcatgggaacttgtgcaaacagggaaagacattgaaagtgcatattgggaacttgtagtgaaggatatccaagatgcttgcagactatttgaaccaatctatgatcaaacagatggtggtgatgggtatgtttctgttgaagtatctcctaggctcgctgatgacactgagggaaccatagaagctgcaaaatggcttcataaagtggttgatcgccccaatgtgtatattaagattcctgctacagaggcatgtgtgccttcaattaaggaagttattgctaatgggataagtgtgaatgtgacgctgatattctctcttgcaagatatgaagctgtaattgatgcatacttggatggtcttgaggcatctgggttaaatgacctctctagagttacaagtgttgcctctttcttcgtcagtagagtggacaccctcattgacaaggcccttgagaaaattggcaccccagtggcccttaatctacgtgggaaggcagcggtagcccaagcagcattggcttaccagctctaccaaaggaaattttctggtccaaggtgggaagctctagttaaaaagggggccaagaagcaaaggctcctctgggcctcaaccagtgtaaagaatcctgcctattctgacaccttatatgttgctcctcttattggacccgacactgtatcaacaatgccagaccaagcccttcaagcatttatcgatcatggtaccgtatccaggacaatagactcaaatgcatctgaagctgaaggaatatacaatgctctccagaaattgggtattgactggagctttgttggttcccagcttgaacttgaaggagtggactcgtttaagaagagctttgacagcctcctggattctctgcaagagaaggcaaactctcttaagttggtcagccattgaagtgtgaacgtcatagttagtaatgcagtgctatgtatgaagtgatttatggattaataaaaggcagtggctgtgcattttgtgctgctgtaaatgtgctttatggagtcatttatttagacgatagtgatacaatataaatgggaaattgtccgcttcaagtaaagcgttttgtc

SEQ ID NO: 22573 - protein, 324 aa, Glycine max
MFSVVNYTNVILLISYFSWELVQTGKDIESAYWELVVKDIQDACRLFEPIYDQTDGGDGYVSVEVSPRLADDTEGTIEAAKWLHKVVDRPNVYIKIPATEACVPSIKEVIANGISVNVTLIFSLARYEAVIDAYLDGLEASGLNDLSRVTSVASFFVSRVDTLIDKALEKIGTPVALNLRGKAAVAQAALAYQLYQRKFSGPRWEALVKKGAKKQRLLWASTSVKNPAYSDTLYVAPLIGPDTVSTMPDQALQAFIDHGTVSRTIDSNASEAEGIYNALQKLGIDWSFVGSQLELEGVDSFKKSFDSLLDSLQEKANSLKLVSH

SEQ ID NO: 22574 - DNA, 1280 bp, Glycine max
attgttgagagcacacctcttggatcaacagaatcaaatgttataattggaaagctggttctcttcagcaaaagtttaccatcaaaatatgaagattgggaggcaggtaccaaagcattgcttgacaaagagtctttgataggtggtggatcaattggtacagtctaccgaactgattttgaaggtggcgtctcaattgcagtgaagaagcttgagactttgggaaggatcagaaaccaggaggaatttgagcatgaacttgggcgacttggcaaccttcaacaccctcatttagttgcttttcaaggttactattggtcctcttcaatgcagttgattctatcagagtttatcccaaatggaaatctgtatgacaatctacatgggtttggctttcctggaaccagcactagtacaggcaacagagaattatattggtctagaaggttccaaattgcagtgggaactgcaagagcccttgcttatctccaccatgactgtagacctccaattcttcatctcaacattaaatcctctaacattctcctagatgacaagtatgaagctaagttgtctgattatggattaggaaagttacttcccattttggataattatggtctgaccaaattccacaattctgtgggatatgttgcaccagagttggctcaaggcctgaggcagagtgagaagtgtgatgtttacagttttggagtcattcttttggagctggttacagggaggaagcctgtggaaagtccaaccacaaatgaggtagtggttctgtgtgaatatgtaagaggtttgttggagactggctcagcttcagattgctttgatagaaatatacttggctttgctgagaacgaattgattcaggttatgagattggggctaatttgtacttcggaggatcctttaaggagaccaagcatggctgaggttgtccaggtccttgagtccattagaaatggattggagtcccaatcccattaaccagtaagagcttttccatgcagtacagttcagaattgaagtgattgcttattttgttaaattctccatggaacggatgtatcagatttaggcattcaagcatacatggaaggagatttggatcgggatggactgtgtatacaagcgggcatggggaaggatgttacttggcattcacatcgtaaaaaaagatgaaggataaaattcttttgtattcattcttatattgccatttttttccataaaatttgtaacatctgcaaataaaggcatttgtttattcc

SEQ ID NO: 22575 - protein, 331 aa, Glycine max
IVESTPLGSTESNVIIGKLVLFSKSLPSKYEDWEAGTKALLDKESLIGGGSIGTVYRTDFEGGVSIAVKKLETLGRIRNQEEFEHELGRLGNLQHPHLVAFQGYYWSSSMQLILSEFIPNGNLYDNLHGFGFPGTSTSTGNRELYWSRRFQIAVGTARALAYLHHDCRPPILHLNIKSSNILLDDKYEAKLSDYGLGKLLPILDNYGLTKFHNSVGYVAPELAQGLRQSEKCDVYSFGVILLELVTGRKPVESPTTNEVVVLCEYVRGLLETGSASDCFDRNILGFAENELIQVMRLGLICTSEDPLRRPSMAEVVQVLESIRNGLESQSH

SEQ ID NO: 22576 - protein, 222 aa, Glycine max
MQLILSEFIPNGNLYDNLHGFGFPGTSTSTGNRELYWSRRFQIAVGTARALAYLHHDCRPPILHLNIKSSNILLDDKYEAKLSDYGLGKLLPILDNYGLTKFHNSVGYVAPELAQGLRQSEKCDVYSFGVILLELVTGRKPVESPTTNEVVVLCEYVRGLLETGSASDCFDRNILGFAENELIQVMRLGLICTSEDPLRRPSMAEVVQVLESIRNGLESQSH

SEQ ID NO: 22577 - DNA, 1111 bp, Glycine max
attctttggttgactgaaagtagaaaaccattaggtttaattgatgaaatttttggaccagtcaagaatccttattatgttgtgagatacaattctgaaagtgaagtccccacggggatccatgagggaaccttgatctcctttgttccagaatttgctgatcatgtgcttaataacaaggatctttataggaaagggtatgatgcatctggtgcagatgatgaagagttgtctgatgaaatggagttttcagatgatgagaaagaggctgaatacaagagaatgcaaaaacagacaaagagaggcgcaaacgatcaaaatcatggcaagaaaaaaaacaacagaaagaaattttcaccgaaagagcatgcggcacctaccatccatgctgcaccaatgcttcatcatggaaactgtcctcctttttctggcactggacaaggtcttatggggggaactaccccacttccacccttaaacgtagctccaacctttgctacaaatggagtctggacaaacggaacaacatttccacatcagcaacagtctcccatgcttcctaatggatatcccacaaatggcatgccatggtacccacaaaaccctcaaatttctcctcagtttcctatgccaggaattccatttcaacagcaattacatcccaatcagggatctcttcccacaactatgctacctgggatgcccgatatgtttgctcaatcccaatatgcagcaggacttgccggtcaaaatcaaatggcatttgggatgggttcaccctttccacagagtcagccacctatgtttgctgcacagcagggttttccatccaccgaattgcattcccaaagaaacctgaattttcattctaatactatatctggcgcccgatctcaatttcatccgcgttcaaatgctaatcgtgggagaaaaacatttcatggtgcaggtaggaaagggtggcgaccacccaagtgaaggttattatttattgtgtgctctactgcacactgaactaaatttgttgtgttgggccattttgctaggaatgtactacacatgtaaatgtcctgtaagcctcgaattttgaaatgaattcggttggttcctg

SEQ ID NO: 22578 - protein, 325 aa, Glycine max
ILWLTESRKPLGLIDEIFGPVKNPYYVVRYNSESEVPTGIHEGTLISFVPEFADHVLNNKDLYRKGYDASGADDEELSDEMEFSDDEKEAEYKRMQKQTKRGANDQNHGKKKNNRKKFSPKEHAAPTIHAAPMLHHGNCPPFSGTGQGLMGGTTPLPPLNVAPTFATNGVWTNGTTFPHQQQSPMLPNGYPTNGMPWYPQNPQISPQFPMPGIPFQQQLHPNQGSLPTTMLPGMPDMFAQSQYAAGLAGQNQMAFGMGSPFPQSQPPMFAAQQGFPSTELHSQRNLNFHSNTISGARSQFHPRSNANRGRKTFHGAGRKGWRPPK

SEQ ID NO: 22579 - protein, 245 aa, Glycine max
MEFSDDEKEAEYKRMQKQTKRGANDQNHGKKKNNRKKFSPKEHAAPTIHAAPMLHHGNCPPFSGTGQGLMGGTTPLPPLNVAPTFATNGVWTNGTTFPHQQQSPMLPNGYPTNGMPWYPQNPQISPQFPMPGIPFQQQLHPNQGSLPTTMLPGMPDMFAQSQYAAGLAGQNQMAFGMGSPFPQSQPPMFAAQQGFPSTELHSQRNLNFHSNTISGARSQFHPRSNANRGRKTFHGAGRKGWRPPK

SEQ ID NO: 22580 - protein, 231 aa, Glycine max
MQKQTKRGANDQNHGKKKNNRKKFSPKEHAAPTIHAAPMLHHGNCPPFSGTGQGLMGGTTPLPPLNVAPTFATNGVWTNGTTFPHQQQSPMLPNGYPTNGMPWYPQNPQISPQFPMPGIPFQQQLHPNQGSLPTTMLPGMPDMFAQSQYAAGLAGQNQMAFGMGSPFPQSQPPMFAAQQGFPSTELHSQRNLNFHSNTISGARSQFHPRSNANRGRKTFHGAGRKGWRPPK

SEQ ID NO: 22581 - DNA, 1838 bp, Glycine max
aacgctgcctccaaggtgatcgatcatcaatccatccatttaattgcatttctagaaattgaattattagtttttttctcctccttggtctgcatttgcttgattccgtgatttagttttgtaacagaaaacacaagagggtaaaatctttgactctaataagtacaattattgaatagggttttggaacagaaatgagaatagggtaaatgaatatatattaggaaaaaaagttaaatacatttttagtcctttaagctatgtttgagattaaaaatctattatatttgtagagattaaaaatatttaatattttaaaatattattaagataaatatattgtcaatttacatgtaatttttttacaatatcaattaattataagtcatacaaattgatataaattaaagtaattattataaaaatgagcaaacttttatcattcagcgcaagaatttgtgattgattagacaataattgtgcattctaattataattaatagtttttttttataatttttatcttttaataattgagtataattaacatgatatgggagttttaaaaagaatagttaaagggtaaagtaaggaaataattaaaagataaagtagtgaatagtttcgaaagtagttaaagaataaaatagtctagttaaaaacaaatgttttgtctgtgttaatttgttcctaatgctacgaagaagcaaatgtagtccttgggtaaatttaatttttctaatgttaaggaccaaatttaccagtattgtaaatttcagggacaaaatagtgttaataatgtcaaggacccaaattgatcgtttgtgccaaactagattaaattgatgttttgcttattcttcttatggtattcatggaataaacattagagtgcttgtaaatgagtaatgactactggcccaatatttcttcaaaaaaaatatgtttggggctctttgaaaatttaactaaaacattcattagttgttctctccccttctatctgagaaaattagtcactacacattgtcaagggtgtggacagtgttcacaagtcaatggatgcggttgaagcagcaaagttgttagctcggacaagtggtgcaatagttgcagtgtcaggagccacggacattgtcacagatggaaatcgagttgttggggctcataatggggtggcgatgatgcagaaaataacagcaacgggatgttcagtcactgcactgattgctgcctttgttgccgttgacaaaagccatgctttggatgccgcagtgtctgcattagctgtatttggtgttgctggtgagctaggaatgaagatggctaaaggtcctgcatcgcttcgaatgcacttgatagatgaactctatgggcttgatgaatctgccttgaattctcatgttaatgtcaccagtttgtgatgaaatgtgaagatctgcattcaaattgataattaattatcataaaattcgcatgtatcatagttgatagttgtctatcaatggtgtccattggttgaattggaaggtggatcgtattagttagcaatagagatccctctataatttatgtcaataataatcactggtagctacctctggtaataacagtttgttcctgtagttaaaaatatctcatggtttcagcccttaatttagtttggtcaacattttgtatgtataggtttattttgttgaaagttaacttcgtaatttctgtttgatgtataggaatgggtttggtggaaattgtttatgaactcctgatgcattgttaatcagattgtgaaccggtaaagttgagtgtatatatgaattaacaaataacattttctc

SEQ ID NO: 22582 - protein, 121 aa, Glycine max
MDAVEAAKLLARTSGAIVAVSGATDIVTDGNRVVGAHNGVAMMQKITATGCSVTALIAAFVAVDKSHALDAAVSALAVFGVAGELGMKMAKGPASLRMHLIDELYGLDESALNSHVNVTSL

SEQ ID NO: 22583 - protein, 80 aa, Glycine max
MMQKITATGCSVTALIAAFVAVDKSHALDAAVSALAVFGVAGELGMKMAKGPASLRMHLIDELYGLDESALNSHVNVTSL

SEQ ID NO: 22584 - protein, 79 aa, Glycine max
MQKITATGCSVTALIAAFVAVDKSHALDAAVSALAVFGVAGELGMKMAKGPASLRMHLIDELYGLDESALNSHVNVTSL

SEQ ID NO: 22585 - DNA, 1316 bp, Glycine max
ggaaaatataaaccaagcagaacttcaacaaacagaagtgatcaggcaactagaagcaaaatctgaaatcaacatcagccaacctattattgaagagccagcaactccagagccagaatgctcccaagtatccgaaaatgatatagaggataccttcaatgaggaatcatgtgaaattcccaccatcaaactagacatagaagagttcactttgaacttacaaaactatatgcaagaaaacatggaacttcaagaaggtgaaatgtcaaaggccttggttgctctacatccaggtgctgcatgcattcctacacccaagctgaagaatgtgagccggttgcgaacagagcattatgtttatgaactccctgattcacatccccttctgaatgggtggaacaagcgagaacctgatgatccaggcaaataccttctagctatatggactccaggggagacagcagattctatacagccaccagaaagcaaatgcagctctcaggaatgtggccggctctgtaatgagaatgaatgtttttcatgcaacagtttccgtgaagcaagttcacagatagttcgagggacactcctgataccatgtcgaacagctatgagagggagctttccgctaaatggcacctattttcaagtcaacgaggtctttgcagacaatgactcaagtcttaacccaattagtgttccccgaagttggatctggaaccttgataggcgaacagtgtattttggaacctccataccatctatattcaaaggtttatcaacacgagaaattcaacaatgcttttggagaggatatgtctgcgtgcgtggatttgaccgggaaaagcgagcaccccgacctctgttggctagactacacttcccggttagcaggttgcctaagaatagggataagacccaacaagagtccgcatcggcaaactcacaaggattgaattttaaacaaaatccagaacagccagaattgctttccaacattcggcagaccggaggatcctgaaggcaaataattgtcatttaatattcatcctgtactctgtgtataataacgacaaagtcattgtcatgctcagatactgagcagttttcccagactaggactaggaccaagacagtaaaatggtaacaaagtagctttttagctccatgaagattgaagaggaatgtgagctaggtgagatatgaggctatttgcgcaggagctcagtatagatacacatacactcatcagtattcttctagatttttatgtctttcaaaagactagttccgcttgtagaaattatcagattttc

SEQ ID NO: 22586 - protein, 339 aa, Glycine max
ENINQAELQQTEVIRQLEAKSEINISQPIIEEPATPEPECSQVSENDIEDTFNEESCEIPTIKLDIEEFTLNLQNYMQENMELQEGEMSKALVALHPGAACIPTPKLKNVSRLRTEHYVYELPDSHPLLNGWNKREPDDPGKYLLAIWTPGETADSIQPPESKCSSQECGRLCNENECFSCNSFREASSQIVRGTLLIPCRTAMRGSFPLNGTYFQVNEVFADNDSSLNPISVPRSWIWNLDRRTVYFGTSIPSIFKGLSTREIQQCFWRGYVCVRGFDREKRAPRPLLARLHFPVSRLPKNRDKTQQESASANSQGLNFKQNPEQPELLSNIRQTGGS

SEQ ID NO: 22587 - protein, 263 aa, Glycine max
MQENMELQEGEMSKALVALHPGAACIPTPKLKNVSRLRTEHYVYELPDSHPLLNGWNKREPDDPGKYLLAIWTPGETADSIQPPESKCSSQECGRLCNENECFSCNSFREASSQIVRGTLLIPCRTAMRGSFPLNGTYFQVNEVFADNDSSLNPISVPRSWIWNLDRRTVYFGTSIPSIFKGLSTREIQQCFWRGYVCVRGFDREKRAPRPLLARLHFPVSRLPKNRDKTQQESASANSQGLNFKQNPEQPELLSNIRQTGGS

SEQ ID NO: 22588 - protein, 259 aa, Glycine max
MELQEGEMSKALVALHPGAACIPTPKLKNVSRLRTEHYVYELPDSHPLLNGWNKREPDDPGKYLLAIWTPGETADSIQPPESKCSSQECGRLCNENECFSCNSFREASSQIVRGTLLIPCRTAMRGSFPLNGTYFQVNEVFADNDSSLNPISVPRSWIWNLDRRTVYFGTSIPSIFKGLSTREIQQCFWRGYVCVRGFDREKRAPRPLLARLHFPVSRLPKNRDKTQQESASANSQGLNFKQNPEQPELLSNIRQTGGS

SEQ ID NO: 22589 - DNA, 1402 bp, Glycine max
ttaatatgctgcttcggcttggcgcggaaggagttcgtccctgcggtgcgggtgcaggactacccgatgcacccggacatctactccgagtggaagatgctgcagtggaagccccccgagttcgcacgtgcgccgggcggcccgccgtccaacgtggccgtggcgcacgcgcgcctcggggggcgggcggcgttcctggggaaggtcggggacgacgagtttggagaggagatggtgctgatgatgaacgaggagagggttcagacgagaggggtgaagattgattcgaagtgcaggacggggtgctcctacatgaaggtgaagtttgaggaagaagggaggatgaagatggagacggttagggaggccgcggaggactcgcttcttgcaaatgaactcaaccttgccgttttgaaagaggcaaggattttccatttcaattcagaagttctaacatgcccctcgatggaatcaaccctattcagagcaattaagtggactaagaagtttgacggccttgtattttttgatttaaatctgccattacctctgtggagatcacatgatgaaacaagagaaattattaaaaaagcatggaatgaagcagacataattgaagtttcacgaagtgaactagaattccttctagatgaagaatattatgagaggaagagaaattataggccacagtactttgctgaaaattatgaacaaaccaagaatcgacaagagtattaccattacactgctgaagaagtctcgcctttgtggcatgatcgacttaaattcctgtttgtgactgatggaacacttggaattcactactataccccttctttcgatgggtctgtgatgggaactgaagatgtgctcataacaccatatacttgtgatagaacaggctcgggtgatgctgttgtggctgccattttaagaaaactaaccacttgccctgaaatgtttgaaaatcaagatgttttggagagacagctacgctttgctgttgcagcaggaattatatctcaatggactattggtgcagttagaggtttccctactgaaagtgctactcagaatctcaaagaacaagtttatgtgccttcattgtggtgattaaaattgtatctgtaacttcaatagagcttagcagagccttgaggcattagttggtagttattgtttgattatttatttggaacttctctgcaagtgtttgatataaaatgggggcagatgaacacaatcagattgcaaaaattgtttggttgtttcgtttggctccaactcatgcatgtatgaacaggaggcggatgtcaattgaaaattttgtaggtaaaattcagatgtacactattcttgtaatggggttgcagtttgtatttgtaatactcttcccttcctc

SEQ ID NO: 22590 - protein, 370 aa, Glycine max
LICCFGLARKEFVPAVRVQDYPMHPDIYSEWKMLQWKPPEFARAPGGPPSNVAVAHARLGGRAAFLGKVGDDEFGEEMVLMMNEERVQTRGVKIDSKCRTGCSYMKVKFEEEGRMKMETVREAAEDSLLANELNLAVLKEARIFHFNSEVLTCPSMESTLFRAIKWTKKFDGLVFFDLNLPLPLWRSHDETREIIKKAWNEADIIEVSRSELEFLLDEEYYERKRNYRPQYFAENYEQTKNRQEYYHYTAEEVSPLWHDRLKFLFVTDGTLGIHYYTPSFDGSVMGTEDVLITPYTCDRTGSGDAVVAAILRKLTTCPEMFENQDVLERQLRFAVAAGIISQWTIGAVRGFPTESATQNLKEQVYVPSLW

SEQ ID NO: 22591 - protein, 348 aa, Glycine max
MHPDIYSEWKMLQWKPPEFARAPGGPPSNVAVAHARLGGRAAFLGKVGDDEFGEEMVLMMNEERVQTRGVKIDSKCRTGCSYMKVKFEEEGRMKMETVREAAEDSLLANELNLAVLKEARIFHFNSEVLTCPSMESTLFRAIKWTKKFDGLVFFDLNLPLPLWRSHDETREIIKKAWNEADIIEVSRSELEFLLDEEYYERKRNYRPQYFAENYEQTKNRQEYYHYTAEEVSPLWHDRLKFLFVTDGTLGIHYYTPSFDGSVMGTEDVLITPYTCDRTGSGDAVVAAILRKLTTCPEMFENQDVLERQLRFAVAAGIISQWTIGAVRGFPTESATQNLKEQVYVPSLW

SEQ ID NO: 22592 - protein, 338 aa, Glycine max
MLQWKPPEFARAPGGPPSNVAVAHARLGGRAAFLGKVGDDEFGEEMVLMMNEERVQTRGVKIDSKCRTGCSYMKVKFEEEGRMKMETVREAAEDSLLANELNLAVLKEARIFHFNSEVLTCPSMESTLFRAIKWTKKFDGLVFFDLNLPLPLWRSHDETREIIKKAWNEADIIEVSRSELEFLLDEEYYERKRNYRPQYFAENYEQTKNRQEYYHYTAEEVSPLWHDRLKFLFVTDGTLGIHYYTPSFDGSVMGTEDVLITPYTCDRTGSGDAVVAAILRKLTTCPEMFENQDVLERQLRFAVAAGIISQWTIGAVRGFPTESATQNLKEQVYVPSLW

SEQ ID NO: 22593 - DNA, 1632 bp, Glycine max
ttaaatcagaggaactaggacagggtgaagcgattgctcacaatttgagatccatgtttggtctgaaggtgccagttatatctatagttattggagaaggtggttcaggtggcgccctagccattggatgtgctaataaattactcatgcttgaaaatgctgttttttatgttgccagtccagaggcatgtgcagcaatcttgtggaagacagctaaagcttctccaaaggctgctgagaaattgaagattacagccactgaactgtgcaaattacaaattgcagatggtgttatacctgtcataagtatttcagtgttcaggaaaatttgtcaaacctttaactcctggagccacttggtggtgcacatgcagatccagagtggacctctcaacagataaaaaaggctatcaaagaaaccatggatgagctcatgaagatgaacacagaagaactgttaaaacatcgcatgcttaagttcagaaagattggtggattccaggaaggtattcctatagatcctaagagaaaagccaacatgaagaagagggatctatctattgctaagatttctgatgctgaactagaagttgaggttgagaaactgaagcaacaggttttggaagctaaggaatcttctcctgttcctccaaaactagatctggatgagatgctaaagcaactgacaagggaggttgatctagaatactctgaggcagttaaagccacgggcttgacagacagtttgttgaaactaagggaggaagtttcaaaagcaaatgcagataatcaaattgttgatccattgctgaaggataagatagaaaagctaagggtggagtttgaacagcaactgcgtgcagctcccaattatggaaggctgcagaataagtttacctatctgagcgaattatgtaaagttaagcttctgtcagatgcaaacaaggacaatgaggctgtcacatttaagcaagagttggagaaaaaagttgataatgccttgagtaatccaaaaataagggaaacatttgaagcattaaaggctgaaattaaaggtgctggtgcatcctcagcaagtgatttggatgacgagttgaagaagaaaatcgttgagtttatgatagaactaaaagaagtaaaagaagtaaaagaggtaatagaaaatcaaattgaaagtttggttaactcatcggatgatattaagaacaaggtactgcaattgaaattggaggttcctaaggctggagagacgcctgattcagaatcaaagagtagaattggtgattttatatttagaacatcatctagaattattatggccatacttcttagagacatgtttggtaattttaaggagataccgtgttaatggtggccaatattttttctataatcttccaatagaggaccagtaggggggaataaaattgaaaaccattttgtatttgtttgagtcacaatgttgcagttatatttagaatgacttcttatgttttcttttcttttcatgttcattttgctcttttttaatcatttaaaatgttcaatttctccctaaatagacttagatgaacattgtataaattgtttgagtttgaggaaccgagtaataaaatgacgcttggtgctgtg

SEQ ID NO: 22594 - protein, 315 aa, Glycine max
MDELMKMNTEELLKHRMLKFRKIGGFQEGIPIDPKRKANMKKRDLSIAKISDAELEVEVEKLKQQVLEAKESSPVPPKLDLDEMLKQLTREVDLEYSEAVKATGLTDSLLKLREEVSKANADNQIVDPLLKDKIEKLRVEFEQQLRAAPNYGRLQNKFTYLSELCKVKLLSDANKDNEAVTFKQELEKKVDNALSNPKIRETFEALKAEIKGAGASSASDLDDELKKKIVEFMIELKEVKEVKEVIENQIESLVNSSDDIKNKVLQLKLEVPKAGETPDSESKSRIGDFIFRTSSRIIMAILLRDMFGNFKEIPC

SEQ ID NO: 22595 - protein, 311 aa, Glycine max
MKMNTEELLKHRMLKFRKIGGFQEGIPIDPKRKANMKKRDLSIAKISDAELEVEVEKLKQQVLEAKESSPVPPKLDLDEMLKQLTREVDLEYSEAVKATGLTDSLLKLREEVSKANADNQIVDPLLKDKIEKLRVEFEQQLRAAPNYGRLQNKFTYLSELCKVKLLSDANKDNEAVTFKQELEKKVDNALSNPKIRETFEALKAEIKGAGASSASDLDDELKKKIVEFMIELKEVKEVKEVIENQIESLVNSSDDIKNKVLQLKLEVPKAGETPDSESKSRIGDFIFRTSSRIIMAILLRDMFGNFKEIPC

SEQ ID NO: 22596 - protein, 309 aa, Glycine max
MNTEELLKHRMLKFRKIGGFQEGIPIDPKRKANMKKRDLSIAKISDAELEVEVEKLKQQVLEAKESSPVPPKLDLDEMLKQLTREVDLEYSEAVKATGLTDSLLKLREEVSKANADNQIVDPLLKDKIEKLRVEFEQQLRAAPNYGRLQNKFTYLSELCKVKLLSDANKDNEAVTFKQELEKKVDNALSNPKIRETFEALKAEIKGAGASSASDLDDELKKKIVEFMIELKEVKEVKEVIENQIESLVNSSDDIKNKVLQLKLEVPKAGETPDSESKSRIGDFIFRTSSRIIMAILLRDMFGNFKEIPC

SEQ ID NO: 22597 - DNA, 1297 bp, Glycine max
gtcgcagcattacgcgagtgtctttctctcctacagttttggtcctaatcctataagtatcctttgcttctttttcttctatccattctcttctccacacacttcacaacttctcttctcctgaatctgcatcttctttctcctatatgaacttgaagaaaatggaagttacaggtggctaagtcttggcaacttctatggcctactctggtatccgggcaatgtgtgagggaggatacaacttaggcagtttaagaaacaattggcagaaaaccagtaagaagaatcactgtgggagcagaacaactgttatggaatttgaatcagactggacaaagcatagaaaatcatctgctcatactgctcaagtgatccgttctgcaacatcgttcatgccttggtctagtagaatcccaattggtgaaggattttatgaatttctgtagttatatgcttctcaacaaaagttctttacatcctcataattgttggtttaaaaaatgcctggttttactgttggaaagaagagatttatccagccaaatatgtgtttcaccaatttgatccatcaagataaatcaactctttcacaaagcaatcattgtttattccctgaggcactgaataaagattatagccccattctacctgggctgcctgatgatgtggctgagtattgtcttgcacttgtgcctcgttccaacttccctgctatgggtgttgtgtgtaaaggatggaggtcgtttattcaaagcaaagaattcactactgtgcgaaaattggctgggatgctagaggaatggctctatttcttaacaacagactgtgaaggaaaggaaagtcattgggaggttatggattgtctcggtcataaatgccgatctcttccaccaatgcctggtccaggaaaggctgggttccaagtggtggttcttaatggaaagcttcttgtcatggctggttattctgttattgaaggaactgcctttgcctcagcagaggtttaccaatatgattcttgcctcaacagctggagcagattgtcagacatgattgtggctcgttatgacttcgcttgtgctgaagtcgatggcttggtttatgctgtgggaggctatggggtgaatggtgacagtctctccagtgctgaggtgtatgatccagatactgacacgtggacactgatagagagccttcgccgcccgagatggggttgttttgcttgtggatttgagggtaagctctatgtgatgggtggaaggtcaagctttactattggaaactccaagtttgttga

SEQ ID NO: 22598 - protein, 265 aa, Glycine max
MPGFTVGKKRFIQPNMCFTNLIHQDKSTLSQSNHCLFPEALNKDYSPILPGLPDDVAEYCLALVPRSNFPAMGVVCKGWRSFIQSKEFTTVRKLAGMLEEWLYFLTTDCEGKESHWEVMDCLGHKCRSLPPMPGPGKAGFQVVVLNGKLLVMAGYSVIEGTAFASAEVYQYDSCLNSWSRLSDMIVARYDFACAEVDGLVYAVGGYGVNGDSLSSAEVYDPDTDTWTLIESLRRPRWGCFACGFEGKLYVMGGRSSFTIGNSKFV

SEQ ID NO: 22599 - protein, 250 aa, Glycine max
MCFTNLIHQDKSTLSQSNHCLFPEALNKDYSPILPGLPDDVAEYCLALVPRSNFPAMGVVCKGWRSFIQSKEFTTVRKLAGMLEEWLYFLTTDCEGKESHWEVMDCLGHKCRSLPPMPGPGKAGFQVVVLNGKLLVMAGYSVIEGTAFASAEVYQYDSCLNSWSRLSDMIVARYDFACAEVDGLVYAVGGYGVNGDSLSSAEVYDPDTDTWTLIESLRRPRWGCFACGFEGKLYVMGGRSSFTIGNSKFV

SEQ ID NO: 22600 - protein, 194 aa, Glycine max
MGVVCKGWRSFIQSKEFTTVRKLAGMLEEWLYFLTTDCEGKESHWEVMDCLGHKCRSLPPMPGPGKAGFQVVVLNGKLLVMAGYSVIEGTAFASAEVYQYDSCLNSWSRLSDMIVARYDFACAEVDGLVYAVGGYGVNGDSLSSAEVYDPDTDTWTLIESLRRPRWGCFACGFEGKLYVMGGRSSFTIGNSKFV

SEQ ID NO: 22601 - DNA, 1365 bp, Glycine max
tgtttttcctgcgagttacaattgttgtcctgttcctttagattccagaagtcgaaatttcatgatgtcaacaatggaaagaagggaagtgggtttcctatagaacataatggcaaagggcctaacagtgggaggggaggacactatggtttaaaaccaaaggaacataagcagcaaccagaaagatccttgtctgtgacttacactgtgcaagagatccaacagtggcgtgaagcacggaaaaagaatcatcctttcaataacaacattcagaagaagcacagtgaacacccaaaagacaggaaggccattaatagggaggtcttacaaagagagctcaaggaggtgttagcgaagcaagctgaattgggagttgaagttgctgaaataccatcatactacttgaagaattctgacaatcaagctcttcagagtgaagggaaaaacaaatttactgacaaaagaaaattccaaaacaagttcaacaagaaatcagacagaaaaggtaggttcgccaagaggcagaagtttgatgacaaagatttttcagaaagcccctctttgaagaagaggaagcctacattattgcagaaactcctgagttcagatgtaaagagggataagagccacctgattcaggttttcaggttcatggtaatgaattctttcttcaaacattgtcttgataagccgctgagatatccgttggtcgtggttaaagaaaaggggtctgaagttgatggtgaagaaaaatacttgcacaccggaaaagatgttcttaaaggagggaatgaggaaacagttcaaaaaattgtgaccttcaataatgataatagccatgattgtgaagatgaagatagtgatgatgacgagaatgattctattgttgataataatcttcataaagatccttcttccttggttaaaagacagtgtgatagtggcgaaggaattgggaaatttgatgaagaggagggagaaattatagaatgaaattccaaggttgctctctctatttttgcagcaaagttttttaatactgtgatggtaacattttctgttaaatcaatttttgtttctatcgttgttttactagtatacatatgatgttacagtaaatatttttttcagcgaagcttttgaatactaatagttatacttgggcagggcacgtcttagattagggacagtttaattataatattaatagatgttttgacgctgtgacatgcctcaatgttatattaggatttctctcagaacttgtatttgccacttattaaagaagcaacaaccatgccgatgggtttttcctatttgcgcatttgaatgaatttttcacatccatgtttttattgattaaag

SEQ ID NO: 22602 - protein, 330 aa, Glycine max
CFSCELQLLSCSFRFQKSKFHDVNNGKKGSGFPIEHNGKGPNSGRGGHYGLKPKEHKQQPERSLSVTYTVQEIQQWREARKKNHPFNNNIQKKHSEHPKDRKAINREVLQRELKEVLAKQAELGVEVAEIPSYYLKNSDNQALQSEGKNKFTDKRKFQNKFNKKSDRKGRFAKRQKFDDKDFSESPSLKKRKPTLLQKLLSSDVKRDKSHLIQVFRFMVMNSFFKHCLDKPLRYPLVVVKEKGSEVDGEEKYLHTGKDVLKGGNEETVQKIVTFNNDNSHDCEDEDSDDDENDSIVDNNLHKDPSSLVKRQCDSGEGIGKFDEEEGEIIE

SEQ ID NO: 22603 - DNA, 1416 bp, Glycine max
ttatcccaaaactatttggttgacatgattccaaaatccttggagtcaattcgtgatctcaaatttatcaatctttcttataacatgttagaaggtgagattcccaacggtggagctttcaaaaatttcacagctcaatctttcatattcaataaagcactttgtggaaatgcacggttacaagtccccccatgcagtgaattaatgaagagaaaaaggtcaaatgcacatatgtttttcatcaaatgcatattgcctgtaatgttgtcaaccattttggttgttttatgtgtgttccttctgaaaaagagtcgaagaaaaaagcatggtggtggtgatcctgctgaagtcagttcatcaactgtattagcaacaagaacaatttcctacaatgaactttcacgggcaaccaatggatttgatgagagtaatttgcttggtaagggtagttttggctctgtgttcaaaggtatacttccaaataggatggttgttgcagtcaaattatttaatttggaccttgaattgggatcaaggagctttagtgtagaatgtgaagtaatgcggaatctgcgacaccgaaatctcatcaagatcatttgtagttgctcaaattctgattacaagcttttagtaatggaattcatgtccaatggcaaccttgaaagatggttgtattctcataactattatttagacttcttgcaaaggctaaatataatgatagatgtggcttctgcattggaatatatgcatcatggtgcttcgccaactgtggttcattgtgatgtaaagcctagtaatgtcttattggatgaagatatggttgcacatgttagtgacttaggcattgccaaacttcttgatgaaggacaatcccaagagtataccaagaccatggctacatttggctacattgcaccagagtttggatccaaggggactatttctacaaaaggagatgtgtacagttttgggattttgttgatggaaacattctcaagaaagaagccaacagatgaaatgtttgttgaaggattgagcataaaaggttggattagtgaatcattaccccatgccaatactcaagttgtggattccaatttgttagaggatgaagaacacagtgctgatgacataatatcatctatatcatctatttatagaatagccctgaattgttgtgcagatttgcctgaagaaagaatgaatatgacggatgttgctgcatcactaaacaaaatcaaggtcatgtttcagaaaaataacaagtacatgcgagcacaagtccatgcaacctaagtttatatagacatcaaatcaatttataatttggcattaaaataatgtactttttgaattgctaagaaaatcctacttgacattatgaatgcactaaaaaaaaaaaaaaaaaag

SEQ ID NO: 22604 - protein, 433 aa, Glycine max
LSQNYLVDMIPKSLESIRDLKFINLSYNMLEGEIPNGGAFKNFTAQSFIFNKALCGNARLQVPPCSELMKRKRSNAHMFFIKCILPVMLSTILVVLCVFLLKKSRRKKHGGGDPAEVSSSTVLATRTISYNELSRATNGFDESNLLGKGSFGSVFKGILPNRMVVAVKLFNLDLELGSRSFSVECEVMRNLRHRNLIKIICSCSNSDYKLLVMEFMSNGNLERWLYSHNYYLDFLQRLNIMIDVASALEYMHHGASPTVVHCDVKPSNVLLDEDMVAHVSDLGIAKLLDEGQSQEYTKTMATFGYIAPEFGSKGTISTKGDVYSFGILLMETFSRKKPTDEMFVEGLSIKGWISESLPHANTQVVDSNLLEDEEHSADDIISSISSIYRIALNCCADLPEERMNMTDVAASLNKIKVMFQKNNKYMRAQVHAT

SEQ ID NO: 22605 - protein, 425 aa, Glycine max
MIPKSLESIRDLKFINLSYNMLEGEIPNGGAFKNFTAQSFIFNKALCGNARLQVPPCSELMKRKRSNAHMFFIKCILPVMLSTILVVLCVFLLKKSRRKKHGGGDPAEVSSSTVLATRTISYNELSRATNGFDESNLLGKGSFGSVFKGILPNRMVVAVKLFNLDLELGSRSFSVECEVMRNLRHRNLIKIICSCSNSDYKLLVMEFMSNGNLERWLYSHNYYLDFLQRLNIMIDVASALEYMHHGASPTVVHCDVKPSNVLLDEDMVAHVSDLGIAKLLDEGQSQEYTKTMATFGYIAPEFGSKGTISTKGDVYSFGILLMETFSRKKPTDEMFVEGLSIKGWISESLPHANTQVVDSNLLEDEEHSADDIISSISSIYRIALNCCADLPEERMNMTDVAASLNKIKVMFQKNNKYMRAQVHAT

SEQ ID NO: 22606 - protein, 405 aa, Glycine max
MLEGEIPNGGAFKNFTAQSFIFNKALCGNARLQVPPCSELMKRKRSNAHMFFIKCILPVMLSTILVVLCVFLLKKSRRKKHGGGDPAEVSSSTVLATRTISYNELSRATNGFDESNLLGKGSFGSVFKGILPNRMVVAVKLFNLDLELGSRSFSVECEVMRNLRHRNLIKIICSCSNSDYKLLVMEFMSNGNLERWLYSHNYYLDFLQRLNIMIDVASALEYMHHGASPTVVHCDVKPSNVLLDEDMVAHVSDLGIAKLLDEGQSQEYTKTMATFGYIAPEFGSKGTISTKGDVYSFGILLMETFSRKKPTDEMFVEGLSIKGWISESLPHANTQVVDSNLLEDEEHSADDIISSISSIYRIALNCCADLPEERMNMTDVAASLNKIKVMFQKNNKYMRAQVHAT

SEQ ID NO: 22607 - DNA, 1308 bp, Glycine max
gacaagggtcaggctgccaaaattcaagagcaagaaaatctactccgttctgctgtcaatgccggtgacggattacggataccaggagaccagaggcacatcactcctgcacaacctccattgcatttagcagatgcacttcctgtcgtcattgccaatgaccctactactgcacaaccgcaaccacaactctcagcaaacaccatgggcatgcctgcccagaattccttgttacaggcctcctccgcaaccgtatcacaacttttgggaagatcagcagcatctccttctgctgcaaccaccaccaccacttcttttgacaatataacagcttccccaatcccatatgccaattcacctaggtcttctacaaacatcatgaactctccatcccctcagcaacaacaaacccaacaacagccaccagtgctgcagcagcagcagcaacgacagaaattcatgcaattacctcaacagcagcagcagcaccaaattcttgctcagcagcaacagttcaggcagtctgcaatgcaaggactgggacagttgcacggacaacatcagatgcaattttctcaaccacttgggcaccagcaatttcagggtaggcagctgccttcaggacatgttcagcatggcattggtcaaagccaactcaatcaaggaaaccaaatgactcgattaagccagttttctggtcctgctaacagtgcgctattcagtgctgctcaaacaacacctaatactcaaatgattccaaacatttccggcacattaccttcacagtcccttctcccacgggtgcagttaggattatctggaaacaaccctcagcgaagtcatccttcccaaatgttgagtgatcaggtgtttaacatgggaggtggcaatcctggtggtatgatgcccatacaacagcagcagcagcagcagcagcagcaacaacatggttcacaagcatttggtagcatggcaaatgctcagaatctacaatctgggttggtgacacttcaaaacacacaacagaatcaccccaatttctctcagcagagacagcaaaatccacagtgattaggactcggcatggatggggttggttgaaccatgttgctgtagaaacatggttcactaaaactgaaccaaacttttagtttaattattttttgggttaccaaattatttttaattttgtaaaaaaaaactgaactgaaaaaaaaaactggttagtccagttcggtttgtgggttcattggatttatacggcaggcttgtataattacaatattggaaacctatgttagaatttag

SEQ ID NO: 22608 - protein, 356 aa, Glycine max
DKGQAAKIQEQENLLRSAVNAGDGLRIPGDQRHITPAQPPLHLADALPVVIANDPTTAQPQPQLSANTMGMPAQNSLLQASSATVSQLLGRSAASPSAATTTTTSFDNITASPIPYANSPRSSTNIMNSPSPQQQQTQQQPPVLQQQQQRQKFMQLPQQQQQHQILAQQQQFRQSAMQGLGQLHGQHQMQFSQPLGHQQFQGRQLPSGHVQHGIGQSQLNQGNQMTRLSQFSGPANSALFSAAQTTPNTQMIPNISGTLPSQSLLPRVQLGLSGNNPQRSHPSQMLSDQVFNMGGGNPGGMMPIQQQQQQQQQQQHGSQAFGSMANAQNLQSGLVTLQNTQQNHPNFSQQRQQNPQ

SEQ ID NO: 22609 - protein, 288 aa, Glycine max
MGMPAQNSLLQASSATVSQLLGRSAASPSAATTTTTSFDNITASPIPYANSPRSSTNIMNSPSPQQQQTQQQPPVLQQQQQRQKFMQLPQQQQQHQILAQQQQFRQSAMQGLGQLHGQHQMQFSQPLGHQQFQGRQLPSGHVQHGIGQSQLNQGNQMTRLSQFSGPANSALFSAAQTTPNTQMIPNISGTLPSQSLLPRVQLGLSGNNPQRSHPSQMLSDQVFNMGGGNPGGMMPIQQQQQQQQQQQHGSQAFGSMANAQNLQSGLVTLQNTQQNHPNFSQQRQQNPQ

SEQ ID NO: 22610 - protein, 286 aa, Glycine max
MPAQNSLLQASSATVSQLLGRSAASPSAATTTTTSFDNITASPIPYANSPRSSTNIMNSPSPQQQQTQQQPPVLQQQQQRQKFMQLPQQQQQHQILAQQQQFRQSAMQGLGQLHGQHQMQFSQPLGHQQFQGRQLPSGHVQHGIGQSQLNQGNQMTRLSQFSGPANSALFSAAQTTPNTQMIPNISGTLPSQSLLPRVQLGLSGNNPQRSHPSQMLSDQVFNMGGGNPGGMMPIQQQQQQQQQQQHGSQAFGSMANAQNLQSGLVTLQNTQQNHPNFSQQRQQNPQ

SEQ ID NO: 22611 - DNA, 1539 bp, Glycine max
aagcgaacacggttagtagcggcagagaaaggagatggaatcggcgggggagtggctggagaaggcgttggtggagttgtgctccaagattgaaactggcttgggtttaggtttggaccaagacatcatcaaaggcctcgtctcttactgtgaccttgccgagccacgagatgccaaagagtaccttgacaatataatcggtcaggatgcagggaaaactgtgattgaagaatatttacgacggagaggttactcagaatccagcatcggctcaaatgttccaactaccaaattacatgcgtatgtcaaaccgccttcagttgagacatctgctagtggaactaagaaatcatttaaaacaccgaaagtggcaggccgcggtaatcatgcagaaccgaacaagaatgcgagtagcagtaatcaggaaaatcagactccaactgtagttagtgaatcaaaaacatcgcaaaaggggaaccaattgaattccaagaagaagaaagccgggaaagttgtctcacttgctgaggctgccaaaggatccattgtgttccagcagggaagaccatgctcctgtcaagcacgtcgtcacgggctggtcagcaactgcttatcttgtggcaaaatagtctgtgaacaagaaggagaggggccttgccatttttgtggtgcacttgtgttaagagagggcagctcgtatgctggtctggaagaaagtttgcctcccttgtcagagtctgaggctgttgctgaagcttatgcaaagagactggttgaatatgaccgaaactctgcagctcgtacaacagttattgatgaccaaagtgactactatgagattgatggaaacagttggttgtcaaaggaggagaaagaactgttgaagaagaaacaagaggagatggaagaagctgagaaagccaaacgtaatagagttgttgtgacttttgatctagttggccgcaaggtccttgtaaataaagatgaagcttcagaattacagtttgaaaatagaatattgcgtcctccggatgcaagggaagtgaaccgtatcaaaccaaatccaactctaacgtttcaacctgtttttgtggacctgggctttggtaggaaatccactaaagataagcaatcacataaaggcataagcaagggcttgtgcttggagattacagggcgagtgcagcatgatagaaatgaccagaagtatgttatgatggaaaaccaattggcaacagcttcaaatgaaaatgtttggcaagtatcttcaggaaatggaatgcacatcatggaagatgatggtcaatgtttactgaactatgataagtaaagtgccttatccagcttttagcgattattgttacattcttcatttgctttctcccattttctttttgatttgcgcgtctaagccatgaaattgatggtcctaattacttttttcagaaagaaagttaagaattttaggcagcgctatttttgtttatacactgctcagatattaaatatcagtcaactactattatctatttgtattag

SEQ ID NO: 22612 - protein, 431 aa, Glycine max
MESAGEWLEKALVELCSKIETGLGLGLDQDIIKGLVSYCDLAEPRDAKEYLDNIIGQDAGKTVIEEYLRRRGYSESSIGSNVPTTKLHAYVKPPSVETSASGTKKSFKTPKVAGRGNHAEPNKNASSSNQENQTPTVVSESKTSQKGNQLNSKKKKAGKVVSLAEAAKGSIVFQQGRPCSCQARRHGLVSNCLSCGKIVCEQEGEGPCHFCGALVLREGSSYAGLEESLPPLSESEAVAEAYAKRLVEYDRNSAARTTVIDDQSDYYEIDGNSWLSKEEKELLKKKQEEMEEAEKAKRNRVVVTFDLVGRKVLVNKDEASELQFENRILRPPDAREVNRIKPNPTLTFQPVFVDLGFGRKSTKDKQSHKGISKGLCLEITGRVQHDRNDQKYVMMENQLATASNENVWQVSSGNGMHIMEDDGQCLLNYDK

SEQ ID NO: 22613 - DNA, 1283 bp, Glycine max
acgacaacttgcaggacaagcaggtgcttcggccgttgacaggaccaggttagctctcaaagctttcactgatcagaaaaggcgttttttcccacattttgatgatggacttgaaactagtgaatcagcatcgaagaaatgttgtgggtctgaagaaattgcagtggatcccaaggaaggaattagttttctaaggacgctgccggatgttctgaagtccttggagaaggatgtaccaaatctgaaaatattaacttttgaacgattggactggttaaaaagagcttccacacttacctcgtcaacaaatgagaattctttggaacataactatcatggttcgaataagctaaggctaggatcagtgggaaccgtccctgcagagaaggttgcagtgatagaattgttattcccgtgtgtcttcagggctgttatatccttacatcctgctggttccatggatccagatgctgtagctttctttgctccagatgagagcggaagttatgtgcatgcaagggggttttcagttcatcatgtgtttagacatattacggagtatgcagcaacagctctgcagtattttcttgggaaccaatctgaaacgtgtctgtattttcttctgcactggatttgcagctaccagacactgttttcaagaccttgcagcaaatgttcccggctacttgcaatggataaacaatcaactttattgttacctccagttcatcgtccttattggcagttttccttttctaaaattttgttgaacatatcctcaaaggaccagaattctgatactactcaggcttatcatattgactgcctctctgaggaaacataattgcatctaccagtgactcaggtataacccaagtgcccaattcaatgtggaactaccaggagcaagagtttccatttcattgttgtatgtatgttccccttttcctgtcatgtacaggttggaaggtaaggggttggagaagcaatttggttatctttggtctatattttccatctcttagattggaattggatcttcaggaaattgacgagtgcctggcttgttttgtaagcctcatgaaagtggctgccatctgttctaaagatttctcagatattcattgagaagttctcacgtataattgccactagaccaaaaagtacaagataggaacattatgacctgcgtatgctaaatgaaagtgccagctgactgtaatttttgaaatttatcagcatgtgaatacattataatgaccgtctgcaatatttcttatttc

SEQ ID NO: 22614 - protein, 280 aa, Glycine max
RQLAGQAGASAVDRTRLALKAFTDQKRRFFPHFDDGLETSESASKKCCGSEEIAVDPKEGISFLRTLPDVLKSLEKDVPNLKILTFERLDWLKRASTLTSSTNENSLEHNYHGSNKLRLGSVGTVPAEKVAVIELLFPCVFRAVISLHPAGSMDPDAVAFFAPDESGSYVHARGFSVHHVFRHITEYAATALQYFLGNQSETCLYFLLHWICSYQTLFSRPCSKCSRLLAMDKQSTLLLPPVHRPYWQFSFSKILLNISSKDQNSDTTQAYHIDCLSEET

SEQ ID NO: 22615 - DNA, 1621 bp, Glycine max
ttttcgtgcaccaatgtccttttatgactctacaccattgggaaggatacttagtagagtctcatcagatctaagcattgtggatcttgatataccctttattctcagtttcactgtggtaggtgttatatacttctattctaatctgacagtcctagctattatttcttggcaagtcttggttatcgccataccaatggtatatctttcaattcgcctgcagagatactacttttccactgcaaaagaagtgatgcgcgtgaatggcacaacaaaatcctttgtagctaatcatatagctgaaactactgctggagttgtgacaataagagcctttgaagaagaagatcgtttctttgagaagaatcttgatctaattgacagcaatgctagtcctttcttccatagttttagctcaaatgagtggctgatccaaagattagaaatagttagtgcagtactgctttcctccgcagcactatgcatggttatgcttccaccagagactttcagctctggatttcttggcttgtctctctcttatggctttacactaaatgcttccttacaatttttaattcaaagccaatgcagtctagaaaattacataatatctgtagagaggctaaatcaatatatgcatatacctggtgaggcccaagaagtaatagaaggaaatcgtccttcctcgaattggccagttgctggtaaagtagaactaaatgacttgaagatacgatacaggcctgatggaccacttgtacttcatggaatcacatgcacattcaaagcagggcacaagattggaattgttggcaggacaggcagtgggaagtccactcttataggcgctttatttcgtcttgtggagccagcaggtggaaaaattgtagtcgatggcgtagatatatcttctattggtcttcatgatttgaggtcacgttttggtgttatacctcaggatcctaccctttttaatgggactgttagatataatttggaccctttatctcaacactctgatcacgagatatgggaggttcttgggaagtgtcaattgcgagaagctgtgcaagagaaagaagagggcctgaactccccagttgttgaagatggatcaaactggagcatgggacaaaggcaattattttgtttggggcgtgttcttttaaggagaagtaggatattggtgctggatgaagcaactgcatcaattgacaatgcaactgatttgattctgcagaagaccattaggactgagtttgcagattgtacagtgatcacagtagcacacaggataccaaccgtgatggattgcactatggttctttcaatcagagatggaaaattggtggagtatgatgatccaatgtgcctgatgaagaaagaaggatcgctattcaatcagcttgttaatgaatactggtctcattttcaatctgcagaatcacattgatactgcaaaatgtttattttcttttgtcgacattgttatccatctttctttggtattagctacaagtcaatatgtgaggcttgaggagttcggaaggaattggatgaatgaaaagaaacggtgcatgagtatttgaatgtgttgtattagagtttatttgttaag

SEQ ID NO: 22616 - protein, 484 aa, Glycine max
FRAPMSFYDSTPLGRILSRVSSDLSIVDLDIPFILSFTVVGVIYFYSNLTVLAIISWQVLVIAIPMVYLSIRLQRYYFSTAKEVMRVNGTTKSFVANHIAETTAGVVTIRAFEEEDRFFEKNLDLIDSNASPFFHSFSSNEWLIQRLEIVSAVLLSSAALCMVMLPPETFSSGFLGLSLSYGFTLNASLQFLIQSQCSLENYIISVERLNQYMHIPGEAQEVIEGNRPSSNWPVAGKVELNDLKIRYRPDGPLVLHGITCTFKAGHKIGIVGRTGSGKSTLIGALFRLVEPAGGKIVVDGVDISSIGLHDLRSRFGVIPQDPTLFNGTVRYNLDPLSQHSDHEIWEVLGKCQLREAVQEKEEGLNSPVVEDGSNWSMGQRQLFCLGRVLLRRSRILVLDEATASIDNATDLILQKTIRTEFADCTVITVAHRIPTVMDCTMVLSIRDGKLVEYDDPMCLMKKEGSLFNQLVNEYWSHFQSAESH

SEQ ID NO: 22617 - protein, 480 aa, Glycine max
MSFYDSTPLGRILSRVSSDLSIVDLDIPFILSFTVVGVIYFYSNLTVLAIISWQVLVIAIPMVYLSIRLQRYYFSTAKEVMRVNGTTKSFVANHIAETTAGVVTIRAFEEEDRFFEKNLDLIDSNASPFFHSFSSNEWLIQRLEIVSAVLLSSAALCMVMLPPETFSSGFLGLSLSYGFTLNASLQFLIQSQCSLENYIISVERLNQYMHIPGEAQEVIEGNRPSSNWPVAGKVELNDLKIRYRPDGPLVLHGITCTFKAGHKIGIVGRTGSGKSTLIGALFRLVEPAGGKIVVDGVDISSIGLHDLRSRFGVIPQDPTLFNGTVRYNLDPLSQHSDHEIWEVLGKCQLREAVQEKEEGLNSPVVEDGSNWSMGQRQLFCLGRVLLRRSRILVLDEATASIDNATDLILQKTIRTEFADCTVITVAHRIPTVMDCTMVLSIRDGKLVEYDDPMCLMKKEGSLFNQLVNEYWSHFQSAESH

SEQ ID NO: 22618 - protein, 419 aa, Glycine max
MVYLSIRLQRYYFSTAKEVMRVNGTTKSFVANHIAETTAGVVTIRAFEEEDRFFEKNLDLIDSNASPFFHSFSSNEWLIQRLEIVSAVLLSSAALCMVMLPPETFSSGFLGLSLSYGFTLNASLQFLIQSQCSLENYIISVERLNQYMHIPGEAQEVIEGNRPSSNWPVAGKVELNDLKIRYRPDGPLVLHGITCTFKAGHKIGIVGRTGSGKSTLIGALFRLVEPAGGKIVVDGVDISSIGLHDLRSRFGVIPQDPTLFNGTVRYNLDPLSQHSDHEIWEVLGKCQLREAVQEKEEGLNSPVVEDGSNWSMGQRQLFCLGRVLLRRSRILVLDEATASIDNATDLILQKTIRTEFADCTVITVAHRIPTVMDCTMVLSIRDGKLVEYDDPMCLMKKEGSLFNQLVNEYWSHFQSAESH

SEQ ID NO: 22619 - DNA, 1289 bp, Glycine max
ggtccacgtgtacttgttgaaggtcgggttgagcaagaactcacatgttactaattcattgttggatctttatgcaaagtgtggggccatcagggaggctcaacgagtgttcagtgagatgagtgaaaggaatgcggtgtcttggacatcgttgattgttggcttggctgttaatgggtttggtgaggaagcacttgagcttttcaaagagatggagggacaaggactggtgcctagtgagatcacttttgttggtgtcttgtatgcgtgcagccattgtgggatgttggacgaagggtttgagtactttagaagaatgaaagaggaatgtggaatcatacctaggatagagcactatggttgcatggtggatttgttgagtagggcgggtttagtgaaacaagcgtatgagtatattcagaacatgccagtgcagccaaatgcagttatttggaggaccttgttaggggcatgtacaatacatggacatttgggtttgggagagatagctagatcccacctattgaacttggagcctaaacatagtggtgattatgtgcttctttcaaatctttatgcctccgaacgtcgttggtctgatgtacaagtgataaggaggtcaatgctgaaggatggtgttaagaaaacccctggctatagtctagttgagttgggcaaccgtgtttatgaatttactatgggtgatagatctcatcctcaaagtcaggatgtatatgcactactagagaagattacagaattgttgaagttagaaggttatgtgcctcatactgctaatgtacttgcagacatagaggaagaggagaaggaacaagctttgtcttatcatagtgaaaaagttgcaattgcttttatgctcttaaatacaccaccagggaccccaatcagggttatgaagaatttaagagtttgtgcagattgtcatatggctatcaaactcatagcaaagatttacgatagagagattgttatcagggatcgcagtaggttccatcattttagaggtggttcatgttcctgtaaagattactggtaatatagtaatcatcaggatttgataatggcatcttgagagtcaagttctgcattgatttccaagtacaatgtggtgctttaaaatagaggcagtgagacatactttaatatgttgtaataattctccgcaatcctctctgctgcaagggtcaaccaattcaattcaagcctcttgatacatggatgagttagtgaacatgcttaagattatggaagtttggtacaaattgcgt

SEQ ID NO: 22620 - protein, 351 aa, Glycine max
VHVYLLKVGLSKNSHVTNSLLDLYAKCGAIREAQRVFSEMSERNAVSWTSLIVGLAVNGFGEEALELFKEMEGQGLVPSEITFVGVLYACSHCGMLDEGFEYFRRMKEECGIIPRIEHYGCMVDLLSRAGLVKQAYEYIQNMPVQPNAVIWRTLLGACTIHGHLGLGEIARSHLLNLEPKHSGDYVLLSNLYASERRWSDVQVIRRSMLKDGVKKTPGYSLVELGNRVYEFTMGDRSHPQSQDVYALLEKITELLKLEGYVPHTANVLADIEEEEKEQALSYHSEKVAIAFMLLNTPPGTPIRVMKNLRVCADCHMAIKLIAKIYDREIVIRDRSRFHHFRGGSCSCKDYW

SEQ ID NO: 22621 - protein, 312 aa, Glycine max
MSERNAVSWTSLIVGLAVNGFGEEALELFKEMEGQGLVPSEITFVGVLYACSHCGMLDEGFEYFRRMKEECGIIPRIEHYGCMVDLLSRAGLVKQAYEYIQNMPVQPNAVIWRTLLGACTIHGHLGLGEIARSHLLNLEPKHSGDYVLLSNLYASERRWSDVQVIRRSMLKDGVKKTPGYSLVELGNRVYEFTMGDRSHPQSQDVYALLEKITELLKLEGYVPHTANVLADIEEEEKEQALSYHSEKVAIAFMLLNTPPGTPIRVMKNLRVCADCHMAIKLIAKIYDREIVIRDRSRFHHFRGGSCSCKDYW

SEQ ID NO: 22622 - protein, 281 aa, Glycine max
MEGQGLVPSEITFVGVLYACSHCGMLDEGFEYFRRMKEECGIIPRIEHYGCMVDLLSRAGLVKQAYEYIQNMPVQPNAVIWRTLLGACTIHGHLGLGEIARSHLLNLEPKHSGDYVLLSNLYASERRWSDVQVIRRSMLKDGVKKTPGYSLVELGNRVYEFTMGDRSHPQSQDVYALLEKITELLKLEGYVPHTANVLADIEEEEKEQALSYHSEKVAIAFMLLNTPPGTPIRVMKNLRVCADCHMAIKLIAKIYDREIVIRDRSRFHHFRGGSCSCKDYW

SEQ ID NO: 22623 - DNA, 1056 bp, Glycine max
aaatctgaaccaaaccacaaacacttaatttctcatctcatcatttctaattctacctcttttctcttgcactaacaatccaagatgaataccaacaacgacaccgaaaaaaaccaatcatttccagaagcacaaggagcatcatcatcatcatcttctccacccaatgttgggactgagaattggggaactcacataatgggcacccctgctgttccaagcagccacccagataacaaaaaagcagctttacaaagtggacaacctcaaccagttcaatactaccatgaccaacatcaacatccctacgtgcaacatagcccagttgacaaaccaagcaacagtcccatggagtcaatccttaacatgttcgattcatggagcaaaaaagctgaagccaccgcacacaacgtctggcacaaccttaaaactggtccatcagtgtcttcagctgcactggggaagatgaatctgactgtgaaagcaatatcagagggtggatttgagtccctctacaagcaaacattcacaacctatccaaacgagaagctcaagaagagctttgcttgttacctttcaacatcaacaggtcctgttgcaggaaccctttacctgtccaatattcatgtagcgttttgcagcgatcgccctttgtgtttcactgcaccctctggccaagaaacttggacatactacaaggtaatggtgcctttgggaaaggttggagtggtcaacccagtgaccatgagggaaaacccatcagaaaagtacattcaggttgtaacggtggaagggcatgatttttggttcatgggttttgttaattttgacaaagcagttaagaacatctcagaaggtatctcacattttgtagcgccaggagtggccgtgccatccactagtggttcggaagctaatcgaaagaactttcagtgatttctagtttttggagtactatgatgtatactaattttgtttagaatttgactttgcggtttgtgtcgtatactagaacaatactttgttgtaaaaaaacttaggagtgtatgctataag

SEQ ID NO: 22624 - protein, 283 aa, Glycine max
MNTNNDTEKNQSFPEAQGASSSSSSPPNVGTENWGTHIMGTPAVPSSHPDNKKAALQSGQPQPVQYYHDQHQHPYVQHSPVDKPSNSPMESILNMFDSWSKKAEATAHNVWHNLKTGPSVSSAALGKMNLTVKAISEGGFESLYKQTFTTYPNEKLKKSFACYLSTSTGPVAGTLYLSNIHVAFCSDRPLCFTAPSGQETWTYYKVMVPLGKVGVVNPVTMRENPSEKYIQVVTVEGHDFWFMGFVNFDKAVKNISEGISHFVAPGVAVPSTSGSEANRKNFQ

SEQ ID NO: 22625 - protein, 245 aa, Glycine max
MGTPAVPSSHPDNKKAALQSGQPQPVQYYHDQHQHPYVQHSPVDKPSNSPMESILNMFDSWSKKAEATAHNVWHNLKTGPSVSSAALGKMNLTVKAISEGGFESLYKQTFTTYPNEKLKKSFACYLSTSTGPVAGTLYLSNIHVAFCSDRPLCFTAPSGQETWTYYKVMVPLGKVGVVNPVTMRENPSEKYIQVVTVEGHDFWFMGFVNFDKAVKNISEGISHFVAPGVAVPSTSGSEANRKNFQ

SEQ ID NO: 22626 - protein, 195 aa, Glycine max
MESILNMFDSWSKKAEATAHNVWHNLKTGPSVSSAALGKMNLTVKAISEGGFESLYKQTFTTYPNEKLKKSFACYLSTSTGPVAGTLYLSNIHVAFCSDRPLCFTAPSGQETWTYYKVMVPLGKVGVVNPVTMRENPSEKYIQVVTVEGHDFWFMGFVNFDKAVKNISEGISHFVAPGVAVPSTSGSEANRKNFQ

SEQ ID NO: 22627 - DNA, 1363 bp, Glycine max
acacggcaagccccttgagcaagaaagcaagcaaattaggcagagtgagtgaggagcaagcaaataaaacccaaacaaacgcttctcattctctctctactcgttttgaagatgtttctcacaaggtgaactcctccctccctcttttgctgcaaaatttgcatttccatttaattgaggaactgattaggggttttctgtttgtttaattgcgtgagtgaaatctaacaggactgagtatgaccgaggagtcaacaccttttcccccgaaggacgtttgtttcaggttgagtatgcaatcgaagccatcaagctgggatcaactgcgattgggttgaagaccaaagagggtgttgtcctcgcagttgaaaagcgcatcacttcgccgctcctggagcctagtagtgttgagaaaattatggaaattgatgagcacataggttgtgcaatgagtgggttgattgcagatgctcgaacacttgttgagcatgcacgggtggaaactcaggtattgttaaccttatagtatattttaggtagttgattagctaatgattgacatattttggtttattgttcacagaatcataggttctcctatggtgagccgatgactgttgagtccaccacccaagctctttgtgatctagccttgcgttttggtgaaggtgatgaagaatccatggtaaagaacttctcagctttgatatttgtgtctatttttgtttgcttgctttatgatgcttctatttaggaaaaataatttataaacatttcttgcaaagttgcttcttatttatgtatctgctaattatactggtgtcttacgtattgcatttgacgaatgttgattggaaatataaacaagagttatttacctgaaaattccagaacgcacagatatcctcatattgcatcaattattgaatgtacaacatttatagtttataattaaatgtgtaattcatagtataagatgcttttcagacagactggttcagtagcatttgcctataaactgctttacttttgtacaaaatactaaatggctgtgttcttgtcacaatagaccatcatgtatgcattttaacatgtaccatatcttttctctttggcagtctcgcccatttggagtttctctcctcattgctggccatgatgagaatggacctagcttgtaagtatttgttccatctgtcaggaaatggctacttgtggttagtgtgatgaagttgttcttttggctcgttttctgtgtttggccagtgattacatttaaatgtttgtttgcctatgttatagaatttaggtgggaaagagaaagaaacagaaagatagagaaagaaagagggaaaaagagaag

SEQ ID NO: 22628 - protein, 68 aa, Glycine max
TASPLSKKASKLGRVSEEQANKTQTNASHSLSTRFEDVSHKVNSSLPLLLQNLHFHLIEELIRGFLFV

SEQ ID NO: 22629 - protein, 47 aa, Glycine max
MTVESTTQALCDLALRFGEGDEESMVKNFSALIFVSIFVCLLYDASI

SEQ ID NO: 22630 - protein, 45 aa, Glycine max
MKLFFWLVFCVWPVITFKCLFAYVIEFRWERERNRKIEKERGKKR

SEQ ID NO: 22631 - DNA, 1280 bp, Glycine max
tatgaatcgatggatgattcgatggcttacaaccatattgaacgactgttttttacgaccatagaaaaaaacacatttggtccggcattgaaattattagaaaaatatccaacgcagttgggccttgcaggagatgatcaacgtaattgccaaaatgcattgaagatgctggcacgaaagccttcagtaattctaaacaaagtagagaggagagaagaggggcaagagggtctgaaattgcttgagcgattatattggggcgttaataaaatggaggattgtacggtgtggttttctttagtgaaatcaggaaaccttgacgctttaaaacgccttattggaaataatagtgaagtgctcatgaccataaaggacagcgatggaatgagcctactgcataaggctgctttatgtcgccaacgtagcattgtttcctatatacaaggtttcacatccagagaagataaccttgtactgggaggggtcgacaataaaggtaacaacgttctacacttagctgctgcgaagcagcaatcttcgtcacatctattaagaaacgcaaaggtggaaatgcaaaatgatctcgcatggtttaaggaaatcgagaagaaatttcatgaattcagctacaacacaatggtgaacgacaaaggcaagacaccagaggaggtattttatgatcaacacgaggatttatctgacaagattaaagatgattccaaagaaatagccaactcgggcatgattgtggcaatacttgtggccacggtagcatttgccgctgctctcaccgttccaggtgaaaagaccaatgcgtggtttgttgtcttcatattcacaaatgcagttgcattatttgcttcttcagcgtcaatactctctttcttgtcaaatttcacttcattgagattcggacaacgcgaatttgtcaaatcactacatccgagcttgacttttgggcccgtgttactttttatctctgttgttgctatggttgtggcttttacagcagcctcctttttgatatttgatcacacctccaagtgggtttcttacgcagttgcttcaatggggttttttccattactgctgtttattctgtttcaattcaggtttttcgacgacagcttgtggtctagatattatcgtctgtccaaatttgaaaaatttgagtaagttattacagagatacagcttgtggtctagatattattgcctagattgttgcttgtcagccggtcaaaagcttgtgtttgaatttaagattattctgtattttc

SEQ ID NO: 22632 - protein, 391 aa, Glycine max
YESMDDSMAYNHIERLFFTTIEKNTFGPALKLLEKYPTQLGLAGDDQRNCQNALKMLARKPSVILNKVERREEGQEGLKLLERLYWGVNKMEDCTVWFSLVKSGNLDALKRLIGNNSEVLMTIKDSDGMSLLHKAALCRQRSIVSYIQGFTSREDNLVLGGVDNKGNNVLHLAAAKQQSSSHLLRNAKVEMQNDLAWFKEIEKKFHEFSYNTMVNDKGKTPEEVFYDQHEDLSDKIKDDSKEIANSGMIVAILVATVAFAAALTVPGEKTNAWFVVFIFTNAVALFASSASILSFLSNFTSLRFGQREFVKSLHPSLTFGPVLLFISVVAMVVAFTAASFLIFDHTSKWVSYAVASMGFFPLLLFILFQFRFFDDSLWSRYYRLSKFEKFE

SEQ ID NO: 22633 - protein, 388 aa, Glycine max
MDDSMAYNHIERLFFTTIEKNTFGPALKLLEKYPTQLGLAGDDQRNCQNALKMLARKPSVILNKVERREEGQEGLKLLERLYWGVNKMEDCTVWFSLVKSGNLDALKRLIGNNSEVLMTIKDSDGMSLLHKAALCRQRSIVSYIQGFTSREDNLVLGGVDNKGNNVLHLAAAKQQSSSHLLRNAKVEMQNDLAWFKEIEKKFHEFSYNTMVNDKGKTPEEVFYDQHEDLSDKIKDDSKEIANSGMIVAILVATVAFAAALTVPGEKTNAWFVVFIFTNAVALFASSASILSFLSNFTSLRFGQREFVKSLHPSLTFGPVLLFISVVAMVVAFTAASFLIFDHTSKWVSYAVASMGFFPLLLFILFQFRFFDDSLWSRYYRLSKFEKFE

SEQ ID NO: 22634 - protein, 384 aa, Glycine max
MAYNHIERLFFTTIEKNTFGPALKLLEKYPTQLGLAGDDQRNCQNALKMLARKPSVILNKVERREEGQEGLKLLERLYWGVNKMEDCTVWFSLVKSGNLDALKRLIGNNSEVLMTIKDSDGMSLLHKAALCRQRSIVSYIQGFTSREDNLVLGGVDNKGNNVLHLAAAKQQSSSHLLRNAKVEMQNDLAWFKEIEKKFHEFSYNTMVNDKGKTPEEVFYDQHEDLSDKIKDDSKEIANSGMIVAILVATVAFAAALTVPGEKTNAWFVVFIFTNAVALFASSASILSFLSNFTSLRFGQREFVKSLHPSLTFGPVLLFISVVAMVVAFTAASFLIFDHTSKWVSYAVASMGFFPLLLFILFQFRFFDDSLWSRYYRLSKFEKFE

SEQ ID NO: 22635 - DNA, 1636 bp, Glycine max
gacggtcaaagttacgcggcgacgtgtagggaatccaaaggcgcagagtggaaggcagagaccaaaaaccactggcggaattgtagacgaaacagaacacagaaagagcgagcaacggccattcgatttcgatgtggcgcagtcgtgagtaacgtgcaataccacgggtaacgcggttttctggctcacctttccgcattttccttcttccctctcgcacccataagtacccctccctaaatcaacgctttcctcacaaaaaacaaaaactcacttctcatcattcattcatcttcgttctaagagccatgtctagcaccgttggccagaccatcaagtgcaaagctgcgattgcatgggaggctgggaagccgctggtgattgaagaagtggaggttgcgccaccgcaagccggtgaagtccgtttgaagatcctctacacctctctttgccacactgatgtttacttctgggatgcgaagggccagactccattgtttcctcgcatttttggccatgaagcttcggggattgtggagagcgtaggcgagggtgtgactcatctgaaaccaggtgaccatgccctccctgtgttcacaggagagtgtggagattgcgcccattgcaagtcagaggagagcaacatgtgtgagctactcaggatcaacaccgataggggtgtcatgatccatgatggccaatcaaggttctctaagaatggacaacccatacaccatttcttgggaacctctacattcagtgaatacactgttgtccatgctggatgtgttgcaaagatcaaccctgctgctccacttgacaaagtttgtgttctcagttgtggaatttgcacaggttttggtgctaccgtaaatgtagcaaaaccaaaacctggttcctctgttgccatatttggacttggagctgttggccttgcggctgctgaaggtgcaagagtttcaggtgcttcaagaatcattggagttgatttagtttctgcccgatttgaagaagctaagaagtttggggttaatgagtttgtgaacccaaaggatcatgataaacctgtgcaacaggtaattgctgaaatgaccaatggaggtgtggatcgggctgttgaatgtactggcagcatccaagccatggtctcagcattcgaatgcgtccacgatggttggggtcttgctgtacttgttggtgtgcctagtaaagatgatgcattcaaaactgctcctattaatttcctgaacgagaggactcttaagggcaccttttatggcaactacaaaccacgcaccgatcttccatctgttgtcgagaagtacatgagtggggagctagaagtggacaaattcatcactcacacagttccattctcagagatcaacaaagcttttgatttaatgctgaagggacagtccattaggtgtatcatccgcatgcaagagtgagatggatatgaaaagtccatgactgtgttctgggacagactactcttatgtgatttatgaataaaaagagagaagagagaataaaaaatttattgataaaatccccaattaggctattaggattatgattgtattgttgcacattgagtgttgggaatgacagggcatttagccctttgttactt

SEQ ID NO: 22636 - protein, 380 aa, Glycine max
MSSTVGQTIKCKAAIAWEAGKPLVIEEVEVAPPQAGEVRLKILYTSLCHTDVYFWDAKGQTPLFPRIFGHEASGIVESVGEGVTHLKPGDHALPVFTGECGDCAHCKSEESNMCELLRINTDRGVMIHDGQSRFSKNGQPIHHFLGTSTFSEYTVVHAGCVAKINPAAPLDKVCVLSCGICTGFGATVNVAKPKPGSSVAIFGLGAVGLAAAEGARVSGASRIIGVDLVSARFEEAKKFGVNEFVNPKDHDKPVQQVIAEMTNGGVDRAVECTGSIQAMVSAFECVHDGWGLAVLVGVPSKDDAFKTAPINFLNERTLKGTFYGNYKPRTDLPSVVEKYMSGELEVDKFITHTVPFSEINKAFDLMLKGQSIRCIIRMQE

SEQ ID NO: 22637 - protein, 268 aa, Glycine max
MCELLRINTDRGVMIHDGQSRFSKNGQPIHHFLGTSTFSEYTVVHAGCVAKINPAAPLDKVCVLSCGICTGFGATVNVAKPKPGSSVAIFGLGAVGLAAAEGARVSGASRIIGVDLVSARFEEAKKFGVNEFVNPKDHDKPVQQVIAEMTNGGVDRAVECTGSIQAMVSAFECVHDGWGLAVLVGVPSKDDAFKTAPINFLNERTLKGTFYGNYKPRTDLPSVVEKYMSGELEVDKFITHTVPFSEINKAFDLMLKGQSIRCIIRMQE

SEQ ID NO: 22638 - protein, 255 aa, Glycine max
MIHDGQSRFSKNGQPIHHFLGTSTFSEYTVVHAGCVAKINPAAPLDKVCVLSCGICTGFGATVNVAKPKPGSSVAIFGLGAVGLAAAEGARVSGASRIIGVDLVSARFEEAKKFGVNEFVNPKDHDKPVQQVIAEMTNGGVDRAVECTGSIQAMVSAFECVHDGWGLAVLVGVPSKDDAFKTAPINFLNERTLKGTFYGNYKPRTDLPSVVEKYMSGELEVDKFITHTVPFSEINKAFDLMLKGQSIRCIIRMQE

SEQ ID NO: 22639 - DNA, 1506 bp, Glycine max
acacttgatgattgttccatcaatgatgacatcactcttagaatcaaggagcgagtttctgacaaaaggccttttttaagtactcggcaattacttgatatacgctctgcagcacatctcataaaatccattgctcaagatgccatggacgcattacatgaggtgatccaaaagattcgagagagcatcaaatatattagaagttcacaagtagtgcaaggaaaatttaatgaaattgctcaacatgctaggattaacactcaaaacctcttatttcttgattttccagttcagtggaagtctacgtatctcatgcttgaaactgcactagaatacaggactgccttttctcttttccaagaacacgatccctcctattcatcaactctaactgatgaagagtgggaatgggctagttctgttactggctacttaaaacttttagttgaaattatgaatatattttcaggcaacaaatttcctacagcgaatatatacttccctgagatttgtgatgtccatattcaattaattgactggtgcagaagttcagataattttcttagttccatggctttgaagatgaaagacaaatttgacaggtactggagcaagtgcagtttacctttagctgtagctgcagtcctggatcctcggtttaaaatgaagttggttgagtactacttctccctaatttatggtagcactgctctggagcatatcaaggaagtttctgatggtatcaaagaactttttaatgtgtattctatctgttcaactatgattgatcaaggctcggccttgcctggcagcagtttacctagtactagttgtagttccagagataggctaaaaggctttgacagattccttcatgagacatcacagggtcagtctatgatatcagacttagacaagtacttagaggaaccaatctttccacgcaattctgattttaacatattgaactggtggaaagtccacatgccaaggtacccaattttgtctatgatggcacgtgacgttcttgggactccaatgtcaactatggcaccagaattggcatttagcactgggggcagagtgctagattcttctcgtagttcactaaacccagacacacgagaggctttgatatgcacccaagattggctccaaaatgaatctggagatctaaatccatcatcaatccattctgctctacctcttctcatcgaatgaagtttattttttcaaggttttattgacgaatcatctcagaattgtcgagtttgcctttgaagtgatctagcttacaaatattctgtgaagatgcattgtatattcttagaacaacaatgtagatttttaatatttatagatctcttttctattagttgtttttattggactagcacacggctgaatctgattttgtatagagggttgcgtgcccttgatatcaaaatcgctccttgtctgaaaaagttttcttttgcttcactgtccataaaagaaggttgctcg

SEQ ID NO: 22640 - protein, 406 aa, Glycine max
TLDDCSINDDITLRIKERVSDKRPFLSTRQLLDIRSAAHLIKSIAQDAMDALHEVIQKIRESIKYIRSSQVVQGKFNEIAQHARINTQNLLFLDFPVQWKSTYLMLETALEYRTAFSLFQEHDPSYSSTLTDEEWEWASSVTGYLKLLVEIMNIFSGNKFPTANIYFPEICDVHIQLIDWCRSSDNFLSSMALKMKDKFDRYWSKCSLPLAVAAVLDPRFKMKLVEYYFSLIYGSTALEHIKEVSDGIKELFNVYSICSTMIDQGSALPGSSLPSTSCSSRDRLKGFDRFLHETSQGQSMISDLDKYLEEPIFPRNSDFNILNWWKVHMPRYPILSMMARDVLGTPMSTMAPELAFSTGGRVLDSSRSSLNPDTREALICTQDWLQNESGDLNPSSIHSALPLLIE

SEQ ID NO: 22641 - protein, 358 aa, Glycine max
MDALHEVIQKIRESIKYIRSSQVVQGKFNEIAQHARINTQNLLFLDFPVQWKSTYLMLETALEYRTAFSLFQEHDPSYSSTLTDEEWEWASSVTGYLKLLVEIMNIFSGNKFPTANIYFPEICDVHIQLIDWCRSSDNFLSSMALKMKDKFDRYWSKCSLPLAVAAVLDPRFKMKLVEYYFSLIYGSTALEHIKEVSDGIKELFNVYSICSTMIDQGSALPGSSLPSTSCSSRDRLKGFDRFLHETSQGQSMISDLDKYLEEPIFPRNSDFNILNWWKVHMPRYPILSMMARDVLGTPMSTMAPELAFSTGGRVLDSSRSSLNPDTREALICTQDWLQNESGDLNPSSIHSALPLLIE

SEQ ID NO: 22642 - protein, 302 aa, Glycine max
MLETALEYRTAFSLFQEHDPSYSSTLTDEEWEWASSVTGYLKLLVEIMNIFSGNKFPTANIYFPEICDVHIQLIDWCRSSDNFLSSMALKMKDKFDRYWSKCSLPLAVAAVLDPRFKMKLVEYYFSLIYGSTALEHIKEVSDGIKELFNVYSICSTMIDQGSALPGSSLPSTSCSSRDRLKGFDRFLHETSQGQSMISDLDKYLEEPIFPRNSDFNILNWWKVHMPRYPILSMMARDVLGTPMSTMAPELAFSTGGRVLDSSRSSLNPDTREALICTQDWLQNESGDLNPSSIHSALPLLIE

SEQ ID NO: 22643 - DNA, 1446 bp, Glycine max
agaagcatttttttgcattgctttcatctgtctggaaagtggcatcacacgttgaccacaggcgaaatccatcaccctcctgtaatggtctctatttcgatcagagtttctatacttccattggccagccttcacaaaattccttgaagaaatcctctgaaaggatggcatttgcaaatttggccccgagcaagaatttagtagcagctgcacttgatgatatcacaactaggcaagtgaatgacaaagtcattctgtctaaccaaggggaagacatgccagtgagtgcagatcagctggatataacactggagtttgcaaaagaggatagcgacgtcctatcttcatttccatctgttataaatttatcaatacatgggactgaaccaacaccatctttaaataagctaacaggagaagatgatcttaaagttggtttgttcattgctgagaatcgtttcagggaggctgcaagagtttgtggagaagacagctctggatgggcatcatctgcattcccaaccaacgatacaaggtctcgacctggatccaggttacaatcctccggaaagcggaagtcttctgtatctgactcttctaagccttctaggtcaaagtccaaaaaagcttcaatggatcgtagtgaaatgcatccctatcaggctgactcaatgttccagtcaatgccatcacttaaagatctgagaattgatctcacttcattaactactgatgaagttggaattgatggtatggatagcattttctcctttgacttgaatggggaaagttcattggaaatggagagtgttggaatgatcccacatgattatgttgctggtttaatctcagaccttgatgatagtacagcattccctgaatatactgacattagataaggatgaaatcaagcctgaaatgcagttttgaaatgacctttggcttaccaagtggcatactcttggcaagttagtcttgatcagttcatgaattgctgttggcttacaattggaaatgcattcttgcagttcgctccttggcatgccatttttggatatacagacaaaacatttcaaaggctagcctgctgaaggtttcgatatgaaaatatagagatgtagaacgctgtcaatgatttaatttcttacttggaattatgtattggcttggtggttcagctcgaattttgacagcgccattcttccatagatcagtgctgattggtaagaagcccttcattttctcttccctctaatggtgcacatggatttgccttggatgttttgcatgctcacgtacatatgtttttagctgaggcatgcctagggtttagttctttaacttgcaacattttgttatgccaacagaacaatttagtcctttagtggctagttcattagtcccattcatttagaacaacacttcacatgatttaacatgagtttc

SEQ ID NO: 22644 - protein, 298 aa, Glycine max
KHFFALLSSVWKVASHVDHRRNPSPSCNGLYFDQSFYTSIGQPSQNSLKKSSERMAFANLAPSKNLVAAALDDITTRQVNDKVILSNQGEDMPVSADQLDITLEFAKEDSDVLSSFPSVINLSIHGTEPTPSLNKLTGEDDLKVGLFIAENRFREAARVCGEDSSGWASSAFPTNDTRSRPGSRLQSSGKRKSSVSDSSKPSRSKSKKASMDRSEMHPYQADSMFQSMPSLKDLRIDLTSLTTDEVGIDGMDSIFSFDLNGESSLEMESVGMIPHDYVAGLISDLDDSTAFPEYTDIR

SEQ ID NO: 22645 - protein, 244 aa, Glycine max
MAFANLAPSKNLVAAALDDITTRQVNDKVILSNQGEDMPVSADQLDITLEFAKEDSDVLSSFPSVINLSIHGTEPTPSLNKLTGEDDLKVGLFIAENRFREAARVCGEDSSGWASSAFPTNDTRSRPGSRLQSSGKRKSSVSDSSKPSRSKSKKASMDRSEMHPYQADSMFQSMPSLKDLRIDLTSLTTDEVGIDGMDSIFSFDLNGESSLEMESVGMIPHDYVAGLISDLDDSTAFPEYTDIR

SEQ ID NO: 22646 - protein, 207 aa, Glycine max
MPVSADQLDITLEFAKEDSDVLSSFPSVINLSIHGTEPTPSLNKLTGEDDLKVGLFIAENRFREAARVCGEDSSGWASSAFPTNDTRSRPGSRLQSSGKRKSSVSDSSKPSRSKSKKASMDRSEMHPYQADSMFQSMPSLKDLRIDLTSLTTDEVGIDGMDSIFSFDLNGESSLEMESVGMIPHDYVAGLISDLDDSTAFPEYTDIR

SEQ ID NO: 22647 - DNA, 1198 bp, Glycine max
agtttactttagagaggttttatttttatctcgcgtgaagtatcaagtgggaaatttcttttattaggtgatgttggaattagtgcttcaggtgtaataattcttgtggagaaattcacattcacaattgctactagtcttgactcttgagaatatttcatcaattcccttcttcccttttatgtttgatctttatttgacattgaccttgctgaaagcatacgttttggccagcaaaattcatcattccctttttgtactattattattattattattagtgcacctttaatgttaggttgataaaagttgttacaatttagctttcattaattggggtattttagaataggcatgttgttcaaataaaagcactttgctagattcttaaattgaagcctaagttctctgttttggcttaatggaagggcatctaaaaatggtgcttacatccgagactggtcttgagcctaaagagcaaaggttactatttagagggaaagagaaagaggatgaggaatgcttgcatatggtgggagtgaaagacatgtctaaggttatattgctagaggatccagccagcaaagagagaaagcttgaggagatgcataagagtgaagatatctcaaaggcatgtgaagccatctccaaagtcagaacagaagttgacaagctatatcaaaaggtggttgctttggagacaactgtttgtggtggtgctaaggttgaagacaaagaatttgctatcttgacagaattgctaatggttcaattgcttaaactggattccattgctgctgagggagaagccaaagggcagagaagagttgaggttcgtcgtgtacagagttatgtggacacaattgacaacctgaaggcaagaaattttgctgcatttagcaatgctggtaacaatgcagtccctgtgatttgggaggccttggaatccggagttggaagcttgaagtcaccaacttcatttccaacatctacagtgattactcaaaactgggagcactttgaataaatacaagttaatccttccactttatttatagaagaggcttctatgatgacacttggttttttgtaatgacaagctgtttttggtagggaagggttatgcttgtacaaaattaatacatgtacatgttacttctctatgtccaaataaacactgattttgccttgtgtgttc

SEQ ID NO: 22648 - protein, 201 aa, Glycine max
MEGHLKMVLTSETGLEPKEQRLLFRGKEKEDEECLHMVGVKDMSKVILLEDPASKERKLEEMHKSEDISKACEAISKVRTEVDKLYQKVVALETTVCGGAKVEDKEFAILTELLMVQLLKLDSIAAEGEAKGQRRVEVRRVQSYVDTIDNLKARNFAAFSNAGNNAVPVIWEALESGVGSLKSPTSFPTSTVITQNWEHFE

SEQ ID NO: 22649 - protein, 195 aa, Glycine max
MVLTSETGLEPKEQRLLFRGKEKEDEECLHMVGVKDMSKVILLEDPASKERKLEEMHKSEDISKACEAISKVRTEVDKLYQKVVALETTVCGGAKVEDKEFAILTELLMVQLLKLDSIAAEGEAKGQRRVEVRRVQSYVDTIDNLKARNFAAFSNAGNNAVPVIWEALESGVGSLKSPTSFPTSTVITQNWEHFE

SEQ ID NO: 22650 - protein, 165 aa, Glycine max
MVGVKDMSKVILLEDPASKERKLEEMHKSEDISKACEAISKVRTEVDKLYQKVVALETTVCGGAKVEDKEFAILTELLMVQLLKLDSIAAEGEAKGQRRVEVRRVQSYVDTIDNLKARNFAAFSNAGNNAVPVIWEALESGVGSLKSPTSFPTSTVITQNWEHFE

SEQ ID NO: 22651 - DNA, 1285 bp, Glycine max
gatcactattgctggatgcgtccggaggacatggactatgaccgccctgtgactgaatgccacagttgttccgatctcgcggctgagatggctgctgccttggcttctgcttccattgttttcaaggacaacaaggcctattccaagaaactggtgcatggtgcgaccacgctgttcaagttttccagggatcagagaggcaggtacagtgctgggagttcagaggcttcaatattttacaattctaccagttactgggatgagtacgtttggggaggtgcttggatgtactttgctacttgaaattcgtcgtaccttaagcttgctacggctcctggcctggccaagcatgctggtgccttctggggaggccttgattatggagtactcagctgggataacaagcttgctggtgctcaggttcttctgagtcgtttgaggttattcttgagtcccgggtatccatatgaagaaattttaaagacctttcacaaccagacaagcataatcatgtgctcctatctaccagttttcacaagctttaatagaaccaaaggtggcttgattcaattaaaccacggtaggcctcagcctctccaatatgtggtcaatgctgcctttttggctgccctttatagtgattatcttgatgctgctgatacacctggatggtattgtggacctaatttcttttcaactgatgtgctccgtaattttgccaagacccagattgattacatccttggaaataacccaaggaaaatgagctatgttgtaggttttggtaatcattacccaaaacatgttcaccatagaggagcatctataccgaagaacaagatcaagtatagctgtaagggtggatggaaatggagggacacttctaagccaaacccaaatacaattgttggtgccatggttgctggtcctgacaagcatgatggcttccatgatgttcgtacaaactacaattacacagagccaactcttgctggaaatgctggtttagttgcagcactagtggcatttcaggcgacaaaagcacatcgattgacaaaaataccattttctctgctgttcccccaatgtttcctacaccgccaccaccaccagcaccatggaaaccataagcgcatcatgccattggttatttctttctagcaagtatcccagatgatttgagtgcaccggtaaccttcgttgttttgtatcaactgaaagatcaaggtaattttgcagaaaaaaagctttgagaaatagaagaaatggagcttggcctactgaa

SEQ ID NO: 22652 - protein, 216 aa, Glycine max
MCSYLPVFTSFNRTKGGLIQLNHGRPQPLQYVVNAAFLAALYSDYLDAADTPGWYCGPNFFSTDVLRNFAKTQIDYILGNNPRKMSYVVGFGNHYPKHVHHRGASIPKNKIKYSCKGGWKWRDTSKPNPNTIVGAMVAGPDKHDGFHDVRTNYNYTEPTLAGNAGLVAALVAFQATKAHRLTKIPFSLLFPQCFLHRHHHQHHGNHKRIMPLVISF

SEQ ID NO: 22653 - protein, 132 aa, Glycine max
MSYVVGFGNHYPKHVHHRGASIPKNKIKYSCKGGWKWRDTSKPNPNTIVGAMVAGPDKHDGFHDVRTNYNYTEPTLAGNAGLVAALVAFQATKAHRLTKIPFSLLFPQCFLHRHHHQHHGNHKRIMPLVISF

SEQ ID NO: 22654 - DNA, 1526 bp, Glycine max
gatggctcaagagatgaatgagcctgcaatgaacatcatagagcagtctcaagttgctcctccacagggctcccttccttcaacaattatccccctcactttcctcgacattccatggctcctcagccgccacgccagacgcatcttcttctacgactttccctttcctaccacccacttcttgcaaacagcacttcctattctgaaacattctctttcccacacactccaacacttcttcccctttgcctccaatctcatcctccctccacacccccacgtcccttacatccgttaccttgagggtgactctctctcattcactgtcgcagagtccagtcctgcagacttcactcttctcacatcagattcccctcgagactcctatgactggcaaccccttgctccggtgctaccctcgcaacgtacttctcacgacggcacgtgcgagttccccctcatggccattcaggtaacgatgataccaaactctggattcagcatctgtgttatcttcgaccacgttgcaggagatgggagaacccttcatcatttcatgaagttttgggcctccgtttgcaaggccaaaggagatttggatttcccttgctctatgcctctacccttatatgataggaacatagtcaaagaccccaaagggctcatgcacgtttacatgcaagacctgagaaattcagcgttgctaactaaacagttccgaggggttttacgtggtgtttacactgacaaggtacgtgcgactttcatattcagtagcgaacaagctcagaaattaaaaaaatgggtctctcttaaatgtaacggttcgcggactttacatatatcaacctttgtggtgacatgttctttgatatgggtgtgtatgctcagatcagaacaaaaggaaaaggaaggtaataatgagccatgcaacatcggattttccgcagactgtcataaccatcctcagttttcattaccttcaaactactttgggaattgtttgatccctctcattacaaggctaaagaggggtgagttggtggaacaaaatgggattgttgcagctgcaaatgccattgaaaagaacattagagatttcaagagtgatgctttgagatgggccgaaacaacgatgtcagatattagaggcttaaggaaatctggtcaatctcttgtagtgattgttggctcgccaaagctgaccgcgtacaacactgactttggttgggggaagcccgtgaagtctgaagtggtgaatcttgattctgtgggaacagtttctctctctgattgtagggaccaagaaggtggaattcaggttggaatggtactcgagaggattcgaatgaacaatttcaccagcatcttggaagaacaccttagtcatgttgccgttcttgactaattaaaccattcacgtattagtcatcaataaactgtatctttcacgctctgcgtttaatttgtttgttatactcttttatggttttaaataaatattaaaagtattgttgttcggtatg

SEQ ID NO: 22655 - protein, 468 aa, Glycine max
MAQEMNEPAMNIIEQSQVAPPQGSLPSTIIPLTFLDIPWLLSRHARRIFFYDFPFPTTHFLQTALPILKHSLSHTLQHFFPFASNLILPPHPHVPYIRYLEGDSLSFTVAESSPADFTLLTSDSPRDSYDWQPLAPVLPSQRTSHDGTCEFPLMAIQVTMIPNSGFSICVIFDHVAGDGRTLHHFMKFWASVCKAKGDLDFPCSMPLPLYDRNIVKDPKGLMHVYMQDLRNSALLTKQFRGVLRGVYTDKVRATFIFSSEQAQKLKKWVSLKCNGSRTLHISTFVVTCSLIWVCMLRSEQKEKEGNNEPCNIGFSADCHNHPQFSLPSNYFGNCLIPLITRLKRGELVEQNGIVAAANAIEKNIRDFKSDALRWAETTMSDIRGLRKSGQSLVVIVGSPKLTAYNTDFGWGKPVKSEVVNLDSVGTVSLSDCRDQEGGIQVGMVLERIRMNNFTSILEEHLSHVAVLD

SEQ ID NO: 22656 - protein, 464 aa, Glycine max
MNEPAMNIIEQSQVAPPQGSLPSTIIPLTFLDIPWLLSRHARRIFFYDFPFPTTHFLQTALPILKHSLSHTLQHFFPFASNLILPPHPHVPYIRYLEGDSLSFTVAESSPADFTLLTSDSPRDSYDWQPLAPVLPSQRTSHDGTCEFPLMAIQVTMIPNSGFSICVIFDHVAGDGRTLHHFMKFWASVCKAKGDLDFPCSMPLPLYDRNIVKDPKGLMHVYMQDLRNSALLTKQFRGVLRGVYTDKVRATFIFSSEQAQKLKKWVSLKCNGSRTLHISTFVVTCSLIWVCMLRSEQKEKEGNNEPCNIGFSADCHNHPQFSLPSNYFGNCLIPLITRLKRGELVEQNGIVAAANAIEKNIRDFKSDALRWAETTMSDIRGLRKSGQSLVVIVGSPKLTAYNTDFGWGKPVKSEVVNLDSVGTVSLSDCRDQEGGIQVGMVLERIRMNNFTSILEEHLSHVAVLD

SEQ ID NO: 22657 - protein, 459 aa, Glycine max
MNIIEQSQVAPPQGSLPSTIIPLTFLDIPWLLSRHARRIFFYDFPFPTTHFLQTALPILKHSLSHTLQHFFPFASNLILPPHPHVPYIRYLEGDSLSFTVAESSPADFTLLTSDSPRDSYDWQPLAPVLPSQRTSHDGTCEFPLMAIQVTMIPNSGFSICVIFDHVAGDGRTLHHFMKFWASVCKAKGDLDFPCSMPLPLYDRNIVKDPKGLMHVYMQDLRNSALLTKQFRGVLRGVYTDKVRATFIFSSEQAQKLKKWVSLKCNGSRTLHISTFVVTCSLIWVCMLRSEQKEKEGNNEPCNIGFSADCHNHPQFSLPSNYFGNCLIPLITRLKRGELVEQNGIVAAANAIEKNIRDFKSDALRWAETTMSDIRGLRKSGQSLVVIVGSPKLTAYNTDFGWGKPVKSEVVNLDSVGTVSLSDCRDQEGGIQVGMVLERIRMNNFTSILEEHLSHVAVLD

SEQ ID NO: 22658 - DNA, 1229 bp, Glycine max
gataagggcattttatcaaatggcacgataatagctgtcaagatgctttcatctaggtcaaagcaaggaaatcgtgagtttataaatgagataggcttgatttcagccttgcagcacccttgtcttgttaaactttatggttgttgcgttgaaggagatcaattgttgttagtatacgaatatatggaaaacaatagccttgcacaagctttatttggtagtggagaatctcgattaaaattggattggccaacaagacacaagatctgccttggtattgctagaggtttggctttcttacatgaagaatcaagattaaaaattgttcacagggacattaaggccactaatgtgttactagacaaagacttaaatccaaaaatatctgattttggtctagccaagctcgatgaggaggacaatactcatataagcacaagaatagctgggacttatggatatatggctccagaatatgcaatgcatggttatttgacagacaaagcagatgtgtatagttttggagtggttgccttggaaattgtatctggaaagagcaataccatccaccgacccaagcaagaagcattgcatcttctagattgggcacatttattgaaagagaaaggtaacctaatggagctagttgatagaaggttaggttcaaatttcaatgaaaatgaggtaatgatgatgatcaaagtggctctcctatgcaccaatgccacttcaaaccttaggcccaccatgtcatcggtgcttagtatactagaaggaagaactatgattccagaatttatttcagatccatctgagataatggatgaaatgaagttagaggcaatgcgacaatattactttcaaatagaagaaaatgagagaaacgagacacaaacagaaagtcatagtttatcaattgatgggtcatggatggcttcatcttcatcagctgcagatctatatcctgtccacgttgattcttcctattgggagaaaagaaattaggagtatgtataaattgtacctatatatctaggtgctattctttgttctttcattcccatgttttcctcttaaagcacaattccatgcataactgttatatatttaagtatcacaaagtcacatccgtttcctcctaagctacttagcggttttagtgggaccaaacaagtctatatgtagtagttctaacgcttctcaccagtggttactatatttttagagtt

SEQ ID NO: 22659 - protein, 334 aa, Glycine max
DKGILSNGTIIAVKMLSSRSKQGNREFINEIGLISALQHPCLVKLYGCCVEGDQLLLVYEYMENNSLAQALFGSGESRLKLDWPTRHKICLGIARGLAFLHEESRLKIVHRDIKATNVLLDKDLNPKISDFGLAKLDEEDNTHISTRIAGTYGYMAPEYAMHGYLTDKADVYSFGVVALEIVSGKSNTIHRPKQEALHLLDWAHLLKEKGNLMELVDRRLGSNFNENEVMMMIKVALLCTNATSNLRPTMSSVLSILEGRTMIPEFISDPSEIMDEMKLEAMRQYYFQIEENERNETQTESHSLSIDGSWMASSSSAADLYPVHVDSSYWEKRN

SEQ ID NO: 22660 - protein, 320 aa, Glycine max
MLSSRSKQGNREFINEIGLISALQHPCLVKLYGCCVEGDQLLLVYEYMENNSLAQALFGSGESRLKLDWPTRHKICLGIARGLAFLHEESRLKIVHRDIKATNVLLDKDLNPKISDFGLAKLDEEDNTHISTRIAGTYGYMAPEYAMHGYLTDKADVYSFGVVALEIVSGKSNTIHRPKQEALHLLDWAHLLKEKGNLMELVDRRLGSNFNENEVMMMIKVALLCTNATSNLRPTMSSVLSILEGRTMIPEFISDPSEIMDEMKLEAMRQYYFQIEENERNETQTESHSLSIDGSWMASSSSAADLYPVHVDSSYWEKRN

SEQ ID NO: 22661 - protein, 273 aa, Glycine max
MENNSLAQALFGSGESRLKLDWPTRHKICLGIARGLAFLHEESRLKIVHRDIKATNVLLDKDLNPKISDFGLAKLDEEDNTHISTRIAGTYGYMAPEYAMHGYLTDKADVYSFGVVALEIVSGKSNTIHRPKQEALHLLDWAHLLKEKGNLMELVDRRLGSNFNENEVMMMIKVALLCTNATSNLRPTMSSVLSILEGRTMIPEFISDPSEIMDEMKLEAMRQYYFQIEENERNETQTESHSLSIDGSWMASSSSAADLYPVHVDSSYWEKRN

SEQ ID NO: 22662 - DNA, 1454 bp, Glycine max
gagaccaaccctagtaagatgcacaacattttatggtggagattggaacaaagagataaaaagaaagagaaaaaaagtgaacatctgaggataaaaaagccaagttagataacaggagagatgaacacaactgtgttgtagttgttgttgttgatgtttgctttgttctctttctctctctctctagggtttcaagagtgttttgaactactccagaaccctctcttgtttttcacaaatttgggttcagtagagtactgacccagaaaagaagattcaacaggtacctaagagaaggaaagagggggatagaaagaaagaaaaagaaatagaaactgcacgtataaaagaagaaagaaagaatcaaagaaaataggaaaaaagggcaaatattttgtttgaataagatataaggcaatagtaatattagtattgttgataataattaggtagaaaaaatattatggggaggggaagagtggaactgaaaaggatagagaacaagataaacaggcaggtaacgtttgcaaagaggagaaatgggcttctcaagaaagcctatgagctttctgttctctgtgatgctgaggttgccctcatcatcttctccacccgtggcaagctttatgaattctgcagcaccaacagcatgctcaaaacacttgaaaggtaccaaaagtgcagctatggtgcagtggaagtcagcaaacctggcaaagagcttgagagcagctaccgtgagtacttgaagctgaaagcaagatttgaatctcttcaaaggacccaaaggaaccttcttggtgaagacttgggcccattaaataccaaagatcttgagcagcttgagcgccaactggattcatctcttaagcaagtgaggtcaacaaagactcagttcatgctggaccagttagctgatcttcagaataaggagcatatgttggtggaagcaaacagatctttgaccatgaagctggaagaaatcaattcaagaaaccagtataggcaaacatgggaagctggtgagcaaagtatgccatatggaacccaaaatgctcactctcaaggcttcttccagcctttggagtgcaaccccacattgcagataggttctgactacaggtacatccctgaagcctcagagcagcagctagctgccacaactcaagctcaacaagtcaatggatttattcctggatggatgctttgacctaagatctcagtattttagatggctacataaataaaattagcaaacacctaaggccaaagtcaaaatgcctcttgctgttggaaatgtgtaaatgctgcttgttcttctgttaatttgttttggcataaaaacagcagtgactgacttaaaactattaaaactttagccatagacataggatgtggcatgaaggttatagtatttaatttgaatattttggaaggacaagttttatctgacc

SEQ ID NO: 22663 - protein, 248 aa, Glycine max
MGRGRVELKRIENKINRQVTFAKRRNGLLKKAYELSVLCDAEVALIIFSTRGKLYEFCSTNSMLKTLERYQKCSYGAVEVSKPGKELESSYREYLKLKARFESLQRTQRNLLGEDLGPLNTKDLEQLERQLDSSLKQVRSTKTQFMLDQLADLQNKEHMLVEANRSLTMKLEEINSRNQYRQTWEAGEQSMPYGTQNAHSQGFFQPLECNPTLQIGSDYRYIPEASEQQLAATTQAQQVNGFIPGWML

SEQ ID NO: 22664 - protein, 186 aa, Glycine max
MLKTLERYQKCSYGAVEVSKPGKELESSYREYLKLKARFESLQRTQRNLLGEDLGPLNTKDLEQLERQLDSSLKQVRSTKTQFMLDQLADLQNKEHMLVEANRSLTMKLEEINSRNQYRQTWEAGEQSMPYGTQNAHSQGFFQPLECNPTLQIGSDYRYIPEASEQQLAATTQAQQVNGFIPGWML

SEQ ID NO: 22665 - DNA, 1204 bp, Glycine max
acatcgtacacacacacacacacacttttttcaaggcataggattggtgaggcaaacttgaattgaagtgaagaaggagatggctgcaacctcttccttgtgctcatcgaccctccaatcccagatcaatggattcttccttcacaaaacctctctttcccatactccttccctcactttctccaggaggaaaatttcaaccacagtgaaggctacatctcgagtcgacaagttttcaaaaagcgatatcattgtctctccgtccattctttctgcaaacttttcaaaattgggagagcaggtgaaagcagtagaattggctggttgtgattggattcacgttgatgtaatggatggtcgctttgttccaaatattacaattggacctcttgtggttgatgcattgcgccctgtgacagatcttcctttggatgtacacctgatgattgtagagcctgaacaaagggtaccagattttattaaggcaggagctgatatagtcagtgttcattgtgaacaatcttccaccatccatttgcatcgtacagttaatcaagtgaaaagtctgggagctaaagctggagttgtcttaaaccccggtacccccttaagtgcaatagaatatatccttgatgtggttgatttggtcttaattatgtccgtaaaccctggctttggtggccagagttttattgagagtcaagtaaagaaaatttctgatttgagaagattgtgtgcggagaagggagtgaatccatggattgaagtagatggtggagttggtccagcaaatgcatacaaggtgattgaggctggagccaatgcactggttgctggctctgctgtttttggagctaaagattatgccgaagctataagaggaatcaaaaccagcaaaagacctgaagtagttgctgtgtgaaatgcctgtgtggttccatattcaccgtacgctccaatgtaagctgtattttttgccccatagaggtttatccattaaattttggcatatcgttttactgattgggtggttgaatataagcaaaattgactgccagtatgagaaacaatcaagtaaaataatggcagacattgcttatgcgccagtttcaaagtcaactatattatataattaagttatgcttgtggctcaatcatcacatgtatctgactgataattactcaatactagtagaaattttac

SEQ ID NO: 22666 - protein, 280 aa, Glycine max
MAATSSLCSSTLQSQINGFFLHKTSLSHTPSLTFSRRKISTTVKATSRVDKFSKSDIIVSPSILSANFSKLGEQVKAVELAGCDWIHVDVMDGRFVPNITIGPLVVDALRPVTDLPLDVHLMIVEPEQRVPDFIKAGADIVSVHCEQSSTIHLHRTVNQVKSLGAKAGVVLNPGTPLSAIEYILDVVDLVLIMSVNPGFGGQSFIESQVKKISDLRRLCAEKGVNPWIEVDGGVGPANAYKVIEAGANALVAGSAVFGAKDYAEAIRGIKTSKRPEVVAV

SEQ ID NO: 22667 - protein, 190 aa, Glycine max
MDGRFVPNITIGPLVVDALRPVTDLPLDVHLMIVEPEQRVPDFIKAGADIVSVHCEQSSTIHLHRTVNQVKSLGAKAGVVLNPGTPLSAIEYILDVVDLVLIMSVNPGFGGQSFIESQVKKISDLRRLCAEKGVNPWIEVDGGVGPANAYKVIEAGANALVAGSAVFGAKDYAEAIRGIKTSKRPEVVAV

SEQ ID NO: 22668 - protein, 159 aa, Glycine max
MIVEPEQRVPDFIKAGADIVSVHCEQSSTIHLHRTVNQVKSLGAKAGVVLNPGTPLSAIEYILDVVDLVLIMSVNPGFGGQSFIESQVKKISDLRRLCAEKGVNPWIEVDGGVGPANAYKVIEAGANALVAGSAVFGAKDYAEAIRGIKTSKRPEVVAV

SEQ ID NO: 22669 - DNA, 1337 bp, Glycine max
actcgaactcatcatttctaattgttctgatccatatatatcatactttctttgtaataacttaaagaaccccacaaaaacaccaaccatgtccacaattgcaaagagagatttgagttctaatgaagaagagagtgagctgagaagaggtccttggactcttgaagaagacagcttactcatacactatattgctcgtcatggtgaaggccgttggaatatgttagccaaaagtgcaggattgaagaggactggaaaaagttgcagacttagatggctgaattatttgaaaccagacattaagagagggaacctcactccacaggagcaactcttgatccttgaactccattccaagtggggtaacaggtggtcaaaaattgctcagcatctgccaggaagaacagacaatgagatcaagaactattggagaacaaggatacagaaacaggcacgccaacttaacattgaatctggtagcaagagattcattgatgctgtcaagtgtttttggatgccaagattgctccaaaagatggaacagagcaattctccaagccctcatcactcttccatgacaaacatgatgaatttagggaattccggagaagcttctatgagttcaatgtcaagcagcttcaatattaatccttctatgtcttcttcctcatctcctccacaaagggaatttattatggatgatgcaaatcattttaatactatgtccaaccccatcaatccatccccagattccttccaattttcacagctacttgaaatttctgaacaccccaaaagtccttcaaatgtgtttgagaacaatgtttgcagttatccaatccaggacaattgctatgttgataccaataactatggcatggaaggcataaacatggatcccctttcagcaatggatacttacgacttcccacagtttgattttcagacagcaggaaatggatggatgctagacagcatgggggattctactttatggaacatggaggctatgtgacagtgttggcaagagaaggcatgcatctcaagctcttttcatcgtgggatgttatattatcgaaagaaaaaaaagtttgaagattcttatgctatactgattcttagtgtgagtatacattctcataggtagaaattagtactaagtgtaaggttatttgatatgaacctcttgaaatatagtattttaaatagaaaatgcaggagatggtattagagttcccctgtttcagatttattagaagttggaaaagttgtaatttgaccaagacagtgtatcttggctgttataagtggcattttgaacataattcgttttaaag

SEQ ID NO: 22670 - protein, 337 aa, Glycine max
LELIISNCSDPYISYFLCNNLKNPTKTPTMSTIAKRDLSSNEEESELRRGPWTLEEDSLLIHYIARHGEGRWNMLAKSAGLKRTGKSCRLRWLNYLKPDIKRGNLTPQEQLLILELHSKWGNRWSKIAQHLPGRTDNEIKNYWRTRIQKQARQLNIESGSKRFIDAVKCFWMPRLLQKMEQSNSPSPHHSSMTNMMNLGNSGEASMSSMSSSFNINPSMSSSSSPPQREFIMDDANHFNTMSNPINPSPDSFQFSQLLEISEHPKSPSNVFENNVCSYPIQDNCYVDTNNYGMEGINMDPLSAMDTYDFPQFDFQTAGNGWMLDSMGDSTLWNMEAM

SEQ ID NO: 22671 - protein, 308 aa, Glycine max
MSTIAKRDLSSNEEESELRRGPWTLEEDSLLIHYIARHGEGRWNMLAKSAGLKRTGKSCRLRWLNYLKPDIKRGNLTPQEQLLILELHSKWGNRWSKIAQHLPGRTDNEIKNYWRTRIQKQARQLNIESGSKRFIDAVKCFWMPRLLQKMEQSNSPSPHHSSMTNMMNLGNSGEASMSSMSSSFNINPSMSSSSSPPQREFIMDDANHFNTMSNPINPSPDSFQFSQLLEISEHPKSPSNVFENNVCSYPIQDNCYVDTNNYGMEGINMDPLSAMDTYDFPQFDFQTAGNGWMLDSMGDSTLWNMEAM

SEQ ID NO: 22672 - protein, 264 aa, Glycine max
MLAKSAGLKRTGKSCRLRWLNYLKPDIKRGNLTPQEQLLILELHSKWGNRWSKIAQHLPGRTDNEIKNYWRTRIQKQARQLNIESGSKRFIDAVKCFWMPRLLQKMEQSNSPSPHHSSMTNMMNLGNSGEASMSSMSSSFNINPSMSSSSSPPQREFIMDDANHFNTMSNPINPSPDSFQFSQLLEISEHPKSPSNVFENNVCSYPIQDNCYVDTNNYGMEGINMDPLSAMDTYDFPQFDFQTAGNGWMLDSMGDSTLWNMEAM

SEQ ID NO: 22673 - DNA, 1319 bp, Glycine max
acaaacgccatttcctctcttcttcgcttcactccctctcttgtctcgttcctctcccaagtttctaactttttcacacattctcaatcctctctccaattcctaagtgggtcccaacccaattcggatttcgtttctgggtttccccaattcgaagctctgcactttcccctttgaagtggaattttttttcgttcctgtgaagttccattccatattctgggaatgggtctataaaacaagcttccaaattggagagaaagtcccaaacttttcggttcaattttgagttttcgcaattgggtctgtgatcttcttgtgtgggtgagcaaggtttgaaaaaactttctgtgatcgtgattttggccccaacttcaattgtggctgcatccgctgtaatttgttcacaattttccgcaatatcaaaggatcgtgacgacgaaaccacaactgcaaccgcaatttaaacctagtgtgagaatgcgtgctacagcagaatttcaaggttctgttctgaatcttcgtggggttcaggttcactccatggagggttcaagcatggagcaagagcttgatttgtttcagaagcatgtcacggagcgattcctggagctatcttctgttgaaagtggtgaattgctctctctttcatgggttaggaagctgctagattcgttcctgtgttgccaagaggagttcagggtgattctccacaaccacagggatcaggtgatgaagcaccctcccttggatcgcatggtgggcgagtttttcgagcgtagcgtgaaggcacttgatgtgtgcaatgcaatccgtgatggaattgagcagattaggcagtggcagaagctgttggagattgttctctgtgctttggatcacaagaggagcattggtgagggccaatttcgccgtgccaagaaggcccttgtcgatttggccattgggatgcttgatgataaggactctagctccagtggctctatagcacataggaacaggtcatttggtagaaataatgcttcaaaggatcatcaccacaataattcctttggtcattttagatcactttcttggagtgtgtcaaggaattggtctgctgctaggcagcttcaagcacttgggaacaacttgtcccctcccaaggccactgatattgttgccaccaatggccttgcattgcctatttttacaatgagttatgttatggtgtttgtgatgtgggcacttgtggcggcgattccctgccaggaccgcgggctggggctccatttctctttcgtggctttaataaattatgcgcccttgttccatactag

SEQ ID NO: 22674 - protein, 279 aa, Glycine max
MRATAEFQGSVLNLRGVQVHSMEGSSMEQELDLFQKHVTERFLELSSVESGELLSLSWVRKLLDSFLCCQEEFRVILHNHRDQVMKHPPLDRMVGEFFERSVKALDVCNAIRDGIEQIRQWQKLLEIVLCALDHKRSIGEGQFRRAKKALVDLAIGMLDDKDSSSSGSIAHRNRSFGRNNASKDHHHNNSFGHFRSLSWSVSRNWSAARQLQALGNNLSPPKATDIVATNGLALPIFTMSYVMVFVMWALVAAIPCQDRGLGLHFSFVALINYAPLFHT

SEQ ID NO: 22675 - protein, 258 aa, Glycine max
MEGSSMEQELDLFQKHVTERFLELSSVESGELLSLSWVRKLLDSFLCCQEEFRVILHNHRDQVMKHPPLDRMVGEFFERSVKALDVCNAIRDGIEQIRQWQKLLEIVLCALDHKRSIGEGQFRRAKKALVDLAIGMLDDKDSSSSGSIAHRNRSFGRNNASKDHHHNNSFGHFRSLSWSVSRNWSAARQLQALGNNLSPPKATDIVATNGLALPIFTMSYVMVFVMWALVAAIPCQDRGLGLHFSFVALINYAPLFHT

SEQ ID NO: 22676 - protein, 253 aa, Glycine max
MEQELDLFQKHVTERFLELSSVESGELLSLSWVRKLLDSFLCCQEEFRVILHNHRDQVMKHPPLDRMVGEFFERSVKALDVCNAIRDGIEQIRQWQKLLEIVLCALDHKRSIGEGQFRRAKKALVDLAIGMLDDKDSSSSGSIAHRNRSFGRNNASKDHHHNNSFGHFRSLSWSVSRNWSAARQLQALGNNLSPPKATDIVATNGLALPIFTMSYVMVFVMWALVAAIPCQDRGLGLHFSFVALINYAPLFHT

SEQ ID NO: 22677 - DNA, 1520 bp, Glycine max
acatgtcagtgacgaaatatcttttccacctcgttgtccccactggtccatttcacaattgagattttgcattcagcttcctcccatgcttatcaccattcaccattcaccaccatgttgccatgcgattactgccattccaaacccgccatactcttctgcagaccagattccgctaaactatgcttgctatgcgaccagcacgtgcacgccgccaacgccctctccctcaagcacgtgcgcttccagatttgcgactcctgcaagaccgacaccgctgtcctccgctgctccaccgacaacctcgtcctctgccaccactgcgatgtggaaacccacggtgctgccgcttcctcccaccaccaacgtcaccgcctccacggcctctccggctgcccctccgtcacggagatcgcctccgcgctgtgcctcgatttccgggcccaggatcccgtggtccccaccgccgcctccggcggtcgcgatgaggtgtacgagcaggtgctggaaatcgcgcggcagaggaacgacgacctcggcgccgaacaactcaagttcgacgaatcccccataaacgacgtcgttgttgttgacgagatgctgatgcagcaaacgccgttcacgtctttgcttatgttgccgaattccgaatctgaattcgactcccgaaaaagtaacgataacaacggttacggaaccgaggcaggggatcttctctggaattataaccccgcgtatcagcctcctcaggtgtgggattttcagttacaaaaatcaagagattgccatgaaccaagagttgtaacatttgatggtctagaagttccaaaattatttcaggatgagcacaatatgaagtactcaacaattggtgatgacattgatattctatcaagaaataatcaatcggatcagtcatcatcaagccatgcaaagaagaaagaagagaacaacaaaaaagctaaaggtgggttatcatcagagtccaaactgtttgaatccataccgtacaatggcaccaacaatgtcgtagtcatggagcatcttgttggtgggaatgaaaatgttggcaccttaacagccagggttagtttggaagagttggctaagaatagaggggatgccatgttgcgttacaaggagaagaagaaaactcgaaggtacgataagcacattcgctatgaatcaaggaaggccagggctgatactagaaaaagggtgagagggagatttgtgaaggcaagtgatgttcaagcgtgatgatgagtaccttttcagaaatctcatccgagttcaatgctcgtgtgtgtgtacataagttacactataagagaaatatggatatattatagttttcatgaactccctgagcattgattgatttgaatcttttttggtagttgatttatttgaatttttgtttgttacattatatgggaagaggtttttttgtgtgagattctctcataagagggtgatatataagagagacactgacaataaattggtgagtttgtgtt

SEQ ID NO: 22678 - protein, 381 aa, Glycine max
MLPCDYCHSKPAILFCRPDSAKLCLLCDQHVHAANALSLKHVRFQICDSCKTDTAVLRCSTDNLVLCHHCDVETHGAAASSHHQRHRLHGLSGCPSVTEIASALCLDFRAQDPVVPTAASGGRDEVYEQVLEIARQRNDDLGAEQLKFDESPINDVVVVDEMLMQQTPFTSLLMLPNSESEFDSRKSNDNNGYGTEAGDLLWNYNPAYQPPQVWDFQLQKSRDCHEPRVVTFDGLEVPKLFQDEHNMKYSTIGDDIDILSRNNQSDQSSSSHAKKKEENNKKAKGGLSSESKLFESIPYNGTNNVVVMEHLVGGNENVGTLTARVSLEELAKNRGDAMLRYKEKKKTRRYDKHIRYESRKARADTRKRVRGRFVKASDVQA

SEQ ID NO: 22679 - protein, 220 aa, Glycine max
MLMQQTPFTSLLMLPNSESEFDSRKSNDNNGYGTEAGDLLWNYNPAYQPPQVWDFQLQKSRDCHEPRVVTFDGLEVPKLFQDEHNMKYSTIGDDIDILSRNNQSDQSSSSHAKKKEENNKKAKGGLSSESKLFESIPYNGTNNVVVMEHLVGGNENVGTLTARVSLEELAKNRGDAMLRYKEKKKTRRYDKHIRYESRKARADTRKRVRGRFVKASDVQA

SEQ ID NO: 22680 - protein, 218 aa, Glycine max
MQQTPFTSLLMLPNSESEFDSRKSNDNNGYGTEAGDLLWNYNPAYQPPQVWDFQLQKSRDCHEPRVVTFDGLEVPKLFQDEHNMKYSTIGDDIDILSRNNQSDQSSSSHAKKKEENNKKAKGGLSSESKLFESIPYNGTNNVVVMEHLVGGNENVGTLTARVSLEELAKNRGDAMLRYKEKKKTRRYDKHIRYESRKARADTRKRVRGRFVKASDVQA

SEQ ID NO: 22681 - DNA, 1751 bp, Glycine max
acaaacaccagagttgagtgctccaataataccatggaagctcaagcgtcgttcttgtttattagcttgtttttctctctggtgttgcatttgcttgcaaagcattattacaagccaaaaaccaccctttctcacaaactacccccgggaccaaagaagctacctctgatagggaacctgcatcaactagcaatggctggttcacttccacatcgtactctccgagaccttgcccttaaatacggacctctcatgcatctccaacttggtgaaatttcttccgtggttgtatcctcccccaacatggccaaggagataatgaaaacccatgatcttgcttttgtgcagaggccacaatttcttcctgctcaaattttgacctatgggcaaaatgatattgtttttgctccatatggggattattggagacaaatgaagaaaatatgtgtctcggagcttctaagtgccaagagagttcagtctttctctcatattagagaagacgagacatccaaatttatagaatcaattcgaatatcagaaggttcaccaatcaatcttactagtaaaatttactccttggtaagttcttctgtttccagggtagcatttggcgacaaatctaaggaccaggaagagtttttgtgtgtgcttgaaaaaatgatattagcggggggaggatttgaacctgacgatttgtttccttcgatgaaacttcatctcataaatggaaggaaggccaaattggagaagatgcatgagcaggttgacaagatcgcagacaacattctcagagagcatcaagaaaagcgccaaagggcactacgagaaggcaaggttgacctagaggaggaggatcttgttgatgttcttttgagaatccaacaaagtgacaacctcgagatcaaaattagtaccacaaacatcaaagctgttatattggacgtatttactgctggaacggatacttcagcatcaacacttgaatgggctatggcagaaatgatgagaaacccaagagtgaggaagaaagcacaggctgaagtaagacaagcatttagggaattgaaaataatccatgaaacagatgtagggaaacttacatacttaaagttggtgatcaaagagacattaaggttacacgctccttctcctttattggtccctagagaatgctctgaactaaccatcattgatggatatgaaatacctgtcaagactaaagtcatgataaacgtgtgggcaattggaagagatccccaatattggactgatgctgagaggtttgtcccagagagattcgatggtagttctatcgatttcaaagggaataactttgagtatcttccttttggggcaggaaggagaatgtgcccaggaatgacatttggtttagccaacattatgcttccactcgctctattactctatcacttcaattgggaacttccaaatgagatgaaacctgaggatatggatatgtctgaaaactttggattgacagttacaaggaaaagcgagttgtgtttgattcccattgttaatgatctttgacactgcacgattgatatggttggaggaatcaagtttcttttactaaggaaataaatgtgttttaaaatcgcgtctagcaatatgcatgtctttattgttttaaaagctaggttatctaactagccatccgagctatatttttatactagtgtataataatctttgctgaattttatggtttactctttccaatcttt

SEQ ID NO: 22682 - protein, 517 aa, Glycine max
TNTRVECSNNTMEAQASFLFISLFFSLVLHLLAKHYYKPKTTLSHKLPPGPKKLPLIGNLHQLAMAGSLPHRTLRDLALKYGPLMHLQLGEISSVVVSSPNMAKEIMKTHDLAFVQRPQFLPAQILTYGQNDIVFAPYGDYWRQMKKICVSELLSAKRVQSFSHIREDETSKFIESIRISEGSPINLTSKIYSLVSSSVSRVAFGDKSKDQEEFLCVLEKMILAGGGFEPDDLFPSMKLHLINGRKAKLEKMHEQVDKIADNILREHQEKRQRALREGKVDLEEEDLVDVLLRIQQSDNLEIKISTTNIKAVILDVFTAGTDTSASTLEWAMAEMMRNPRVRKKAQAEVRQAFRELKIIHETDVGKLTYLKLVIKETLRLHAPSPLLVPRECSELTIIDGYEIPVKTKVMINVWAIGRDPQYWTDAERFVPERFDGSSIDFKGNNFEYLPFGAGRRMCPGMTFGLANIMLPLALLLYHFNWELPNEMKPEDMDMSENFGLTVTRKSELCLIPIVNDL

SEQ ID NO: 22683 - protein, 506 aa, Glycine max
MEAQASFLFISLFFSLVLHLLAKHYYKPKTTLSHKLPPGPKKLPLIGNLHQLAMAGSLPHRTLRDLALKYGPLMHLQLGEISSVVVSSPNMAKEIMKTHDLAFVQRPQFLPAQILTYGQNDIVFAPYGDYWRQMKKICVSELLSAKRVQSFSHIREDETSKFIESIRISEGSPINLTSKIYSLVSSSVSRVAFGDKSKDQEEFLCVLEKMILAGGGFEPDDLFPSMKLHLINGRKAKLEKMHEQVDKIADNILREHQEKRQRALREGKVDLEEEDLVDVLLRIQQSDNLEIKISTTNIKAVILDVFTAGTDTSASTLEWAMAEMMRNPRVRKKAQAEVRQAFRELKIIHETDVGKLTYLKLVIKETLRLHAPSPLLVPRECSELTIIDGYEIPVKTKVMINVWAIGRDPQYWTDAERFVPERFDGSSIDFKGNNFEYLPFGAGRRMCPGMTFGLANIMLPLALLLYHFNWELPNEMKPEDMDMSENFGLTVTRKSELCLIPIVNDL

SEQ ID NO: 22684 - protein, 453 aa, Glycine max
MAGSLPHRTLRDLALKYGPLMHLQLGEISSVVVSSPNMAKEIMKTHDLAFVQRPQFLPAQILTYGQNDIVFAPYGDYWRQMKKICVSELLSAKRVQSFSHIREDETSKFIESIRISEGSPINLTSKIYSLVSSSVSRVAFGDKSKDQEEFLCVLEKMILAGGGFEPDDLFPSMKLHLINGRKAKLEKMHEQVDKIADNILREHQEKRQRALREGKVDLEEEDLVDVLLRIQQSDNLEIKISTTNIKAVILDVFTAGTDTSASTLEWAMAEMMRNPRVRKKAQAEVRQAFRELKIIHETDVGKLTYLKLVIKETLRLHAPSPLLVPRECSELTIIDGYEIPVKTKVMINVWAIGRDPQYWTDAERFVPERFDGSSIDFKGNNFEYLPFGAGRRMCPGMTFGLANIMLPLALLLYHFNWELPNEMKPEDMDMSENFGLTVTRKSELCLIPIVNDL

SEQ ID NO: 22685 - DNA, 1078 bp, Glycine max
gtcggttacagagataataatcctgcagcactttcagactttctgcaatctgtgcactgtttaattccatattatcctttatctatctctttatctctcttctgcaaagtgcaaaccctacttactactttcacagctcctacctcctattcctctcccttcccatactctctgctcctaactttttctctcttctcccctttcttccattcctccttgtctctcgcaacgcgaaattcatggacgtggacatactgaaaacttccacgagtgacaacatcagcatggacatgatgatgacgatgatgcaaatggaaaagttccctgaattttgtgaacctttttataacaacaacaacaacactagtactgctcctctctacccagaaaacgagctcttaataaactccaccaccactctacccgtgttctccaacgttattaacaacccaaacgttataactccaccaccatcttcctctaattttattcaacaacaacccatgacaccccatcttgaacccaacttggagaagaggaattctgtggcggctatgagggagatgattttccgcgtagcagtgatgcaacctattcatatagaccctgaatccatcaagccaccgaagagaaggaacgtgaagatttcaaaagatccgcagagtgtggcggcgaggcacagaagagaaaggataagcgagagaataaggatacttcagagattagttcctggtgggaccaaaatggacacggcttctatgttggatgaagccattcactacgtgaagttcttgaagaagcaagtgcagacgctggaacaagcaggggcaagtagacccttgaatgttgttggcttccctactactgcgtccaacgccaataataataatagttattctggttttgtgaagagttgtcagccttatccaatgctgggttctgcagcttctaaacaattgcttagttgagaagtgtttgtttgatacatgcatgaaaaatgaaaatcaatgaattatatatgtggtttttattttattttttatcttcatagtattgtgatcgatcgtgcatggattat

SEQ ID NO: 22686 - protein, 242 aa, Glycine max
MDVDILKTSTSDNISMDMMMTMMQMEKFPEFCEPFYNNNNNTSTAPLYPENELLINSTTTLPVFSNVINNPNVITPPPSSSNFIQQQPMTPHLEPNLEKRNSVAAMREMIFRVAVMQPIHIDPESIKPPKRRNVKISKDPQSVAARHRRERISERIRILQRLVPGGTKMDTASMLDEAIHYVKFLKKQVQTLEQAGASRPLNVVGFPTTASNANNNNSYSGFVKSCQPYPMLGSAASKQLLS

SEQ ID NO: 22687 - protein, 227 aa, Glycine max
MDMMMTMMQMEKFPEFCEPFYNNNNNTSTAPLYPENELLINSTTTLPVFSNVINNPNVITPPPSSSNFIQQQPMTPHLEPNLEKRNSVAAMREMIFRVAVMQPIHIDPESIKPPKRRNVKISKDPQSVAARHRRERISERIRILQRLVPGGTKMDTASMLDEAIHYVKFLKKQVQTLEQAGASRPLNVVGFPTTASNANNNNSYSGFVKSCQPYPMLGSAASKQLLS

SEQ ID NO: 22688 - protein, 225 aa, Glycine max
MMMTMMQMEKFPEFCEPFYNNNNNTSTAPLYPENELLINSTTTLPVFSNVINNPNVITPPPSSSNFIQQQPMTPHLEPNLEKRNSVAAMREMIFRVAVMQPIHIDPESIKPPKRRNVKISKDPQSVAARHRRERISERIRILQRLVPGGTKMDTASMLDEAIHYVKFLKKQVQTLEQAGASRPLNVVGFPTTASNANNNNSYSGFVKSCQPYPMLGSAASKQLLS

SEQ ID NO: 22689 - protein, 218 aa, Glycine max
MEKFPEFCEPFYNNNNNTSTAPLYPENELLINSTTTLPVFSNVINNPNVITPPPSSSNFIQQQPMTPHLEPNLEKRNSVAAMREMIFRVAVMQPIHIDPESIKPPKRRNVKISKDPQSVAARHRRERISERIRILQRLVPGGTKMDTASMLDEAIHYVKFLKKQVQTLEQAGASRPLNVVGFPTTASNANNNNSYSGFVKSCQPYPMLGSAASKQLLS

SEQ ID NO: 22690 - DNA, 1607 bp, Glycine max
aataatagtgcagtgcgtttcagtggtggaaagtggaaaccgtaatcgccaagctggaaagaaaacgctccatttctgcgccactctctgccttatcgccccatttccgttccaacattgtcagagagcaacacagattagtcgtagcagtgagaggcatcggagggggaataaaacatggtttcaacagcaacagaaacagagcaagattagaaagcgccagggtgcgcacgttagcaccgaaccccgtgggttcctctcccctaactcgcttcgcccccacggcattcctacgctgatccacactcaaaacgcatcacaaaaaacaccgtttcgcaaccctaacggaggaggggggtaaaaaaaaaaactgaaaaaaatgtttcggataacgagattctcggggtttttctccgccgcaatgtttgtgattgttcttgttattctctccccctccttccaatccgaagccattcgatcctcccaccgattttccttccggaaagcccctccgttccgcaatgccgccgaatgcggttcaatttccggtgaaaccaccaccgtctgcgacccttccttggtccacgtcgccataaccctcgacgtcgactacctccgcggctcaatcgccgccgtgcactccatcctccacaactccctctgtccggagaacatcttcttccatttcctcgtctccgacaccaacctccaaaccctagttgaatccacgttccctaacttgaagttcaacgtctattacttcgatccgaacatcgtcgctcacttgatctcctcctccgtgcggcaggcgttggagcagcctctcaattacgcgagaaattacctcgttgaccttctggagagttgcgtggagagggtgatctacttggactccgatctggtggtagtggatgacgtggcgaaactgtggagcgcgagtctggactcacgcgccatcggcgcgccggagtactgccacgcgaacttcacgaagtatttcacggcggggttctggtcggagccgaggttgtcggggacgttcgcgcagcggagggcgtgctacttcaacacgggggtgatggtgatggatctggtgaagtggaggaaggaagggtacaccaagagaatcgagaggtggatggagattcagaagagtgataggatctacgagcttggttctctgccgccgtttttgctggtgtttgcgggacacgtggcgcccattgagcaccggtggaaccagcatggtttgggcggggataacgtgaagggtagttgccgtgacttgcaccctggtccggttagtttgttgcattggtctggtagtgggaagccatggatccgtttaagttccaaacgcccctgtcctctggattctctatgggctccctttgatttgtatgcacactcttcctcttaaactaattcttccctctcatttaattcaatttctctttgcttgtcatttttcgctagttagatgttattcatctatttcttctccctaaactttttctccggaaaatttgtatgtcatttctattctattattttcctgtcattcctgatttgaaaataaaagaaaaagaaaagaaagcggattttct

SEQ ID NO: 22691 - protein, 346 aa, Glycine max
MFRITRFSGFFSAAMFVIVLVILSPSFQSEAIRSSHRFSFRKAPPFRNAAECGSISGETTTVCDPSLVHVAITLDVDYLRGSIAAVHSILHNSLCPENIFFHFLVSDTNLQTLVESTFPNLKFNVYYFDPNIVAHLISSSVRQALEQPLNYARNYLVDLLESCVERVIYLDSDLVVVDDVAKLWSASLDSRAIGAPEYCHANFTKYFTAGFWSEPRLSGTFAQRRACYFNTGVMVMDLVKWRKEGYTKRIERWMEIQKSDRIYELGSLPPFLLVFAGHVAPIEHRWNQHGLGGDNVKGSCRDLHPGPVSLLHWSGSGKPWIRLSSKRPCPLDSLWAPFDLYAHSSS

SEQ ID NO: 22692 - protein, 332 aa, Glycine max
MFVIVLVILSPSFQSEAIRSSHRFSFRKAPPFRNAAECGSISGETTTVCDPSLVHVAITLDVDYLRGSIAAVHSILHNSLCPENIFFHFLVSDTNLQTLVESTFPNLKFNVYYFDPNIVAHLISSSVRQALEQPLNYARNYLVDLLESCVERVIYLDSDLVVVDDVAKLWSASLDSRAIGAPEYCHANFTKYFTAGFWSEPRLSGTFAQRRACYFNTGVMVMDLVKWRKEGYTKRIERWMEIQKSDRIYELGSLPPFLLVFAGHVAPIEHRWNQHGLGGDNVKGSCRDLHPGPVSLLHWSGSGKPWIRLSSKRPCPLDSLWAPFDLYAHSSS

SEQ ID NO: 22693 - DNA, 1321 bp, Glycine max
cttttcaggtggtgaatttcagagatttcacattcactggcgaagaaggggtttcttctgttcatataactcaacacacacacacccgtgtctctttcttccttcttcaacagtgttgttctgatgcgtgtttttttctcattttttttatcattcccttatttttattttccccaaaaaaaccaaacctgcaatttccgaacccgaaaatcaccgtctttcgaatcacacaaccatatacccctttttcgtccctcttcacgcgcgagacctttcgaatcgtggtggaagcctcagattttgacccttcaatcgctgaatcgaagtacgttcagcggtgggctcgttcgggagtggttgaacgcgttggtgagatgagaagaagaacttgcatgttttgggcttgcaaagagttgttataagaaggagttgttgcagcagagcttcttcttcttcttcttaatggcaccgaagcgcgtttatgaagcatggaaaggaagtaataaattcctatttggaggaaggttgatatttggaccggatgctaggtcactgcttgtcaccttgttgctgatcattgttccagttattgtcttttgtgtatttgtagcaaggcatcttcggcatgaattttcttcatataatgcaggatatgctattttggtggtggcagttctctttaatatttatgtgttgattcttctctttcttacttcctctcgtgatccgggcgttatcccaaggaatttacatccaccagaggaagagttccgttatgactcttcagtttctgttgaaattgggggacgccaaactccgagccttcagttccctcgaacaaaagaagtaatggtaaatggccattctgtgaaggtgaaatattgtgacacttgtatgctctatcgtcctcctcgttgttcacattgctccatttgcaacaattgtgttgaacgttttgatcaccattgcccttgggtgggccaatgtattgggctgaggaactaccgttacttctttctgtttgtttcttcagcaactattctatgtatctatgtgttttccatctcagctttttacatcaaggttctgatggatcattataaggggacagtttggaaggcaatgaaagaatcccctgcatctgttatattaatggcatattgtttcatctctttgtggtttgtcggtggactaactggctttcatttgtaccttattggcacaaatcagactacctatgagaacttccgctacagagccgataacaggatcaatgtttacaatctgggttgttttaacaatttcctagaagtattttgta

SEQ ID NO: 22694 - protein, 286 aa, Glycine max
MAPKRVYEAWKGSNKFLFGGRLIFGPDARSLLVTLLLIIVPVIVFCVFVARHLRHEFSSYNAGYAILVVAVLFNIYVLILLFLTSSRDPGVIPRNLHPPEEEFRYDSSVSVEIGGRQTPSLQFPRTKEVMVNGHSVKVKYCDTCMLYRPPRCSHCSICNNCVERFDHHCPWVGQCIGLRNYRYFFLFVSSATILCIYVFSISAFYIKVLMDHYKGTVWKAMKESPASVILMAYCFISLWFVGGLTGFHLYLIGTNQTTYENFRYRADNRINVYNLGCFNNFLEVFC

SEQ ID NO: 22695 - protein, 157 aa, Glycine max
MVNGHSVKVKYCDTCMLYRPPRCSHCSICNNCVERFDHHCPWVGQCIGLRNYRYFFLFVSSATILCIYVFSISAFYIKVLMDHYKGTVWKAMKESPASVILMAYCFISLWFVGGLTGFHLYLIGTNQTTYENFRYRADNRINVYNLGCFNNFLEVFC

SEQ ID NO: 22696 - DNA, 1132 bp, Glycine max
gttctacagttctcttggtcatgttcaacaaagcagccctctcctcttacaatttcccatttgcaaatgtcatcacacttgctcagatggtgtttgcatttattattctctacgtgttgagatccttgaagataatttctttcacagctggtgaatcgctgagcagttctaagaatacaataatatttgtgtcctataggacattagcccagacacttcctcttgctttaacttatttgctttttatggtagtgaccatggaagcagtgcgcggtataaacattcccatgtacaccaccctcaggcgaactgttgtcgccttcacaatggttatggagtattttctgtcagggcagacacattcaagatttgttgttggaagtgttgggataatcatagccggtgcttttgttgctggagctcgtgacttggcatttgatgctttttcctattcagttgtatttgtagaaaacatgtgtaaggcagtatacctggcttctgtttctcgtgttggtaaatccagcggcctcaatatttttggtattgtatggtgcaatgtggtgatttgtggaccaatcttgtttctctggtccttactcagaggagatctccaagcaacactaaactttccatacttcttttcccgtggatttcaggttgtgatgcttctttcctgcgcttttactttctttataaactacatcgtagttttgaatacaactatcaactcggcacttacacaggcaatctgtggtaacttaaaggatgttttcacaagtggtattggttggttattattcggaggacttccatatgacttgttcaatattcttggtcaagtacttggcttccttgggtcctgtttgtatgcttattgtaaactgatgcaagcagtatgaggatgacctttcaggtgggtgtttaggaacatcaaaacaccaaacaagcatcgtatagtgtccctacaaattttttagggtttacaaattaagtcaacagaaaaaggtcaaatatcaaattatctttatcaaaatttacagtataaaaaatgtttttgtctgcccaagtgtaacttagggaatgacaatagaaatgaattcctgaaaatatttaatataaaagcgtttaattt

SEQ ID NO: 22697 - protein, 298 aa, Glycine max
STVLLVMFNKAALSSYNFPFANVITLAQMVFAFIILYVLRSLKIISFTAGESLSSSKNTIIFVSYRTLAQTLPLALTYLLFMVVTMEAVRGINIPMYTTLRRTVVAFTMVMEYFLSGQTHSRFVVGSVGIIIAGAFVAGARDLAFDAFSYSVVFVENMCKAVYLASVSRVGKSSGLNIFGIVWCNVVICGPILFLWSLLRGDLQATLNFPYFFSRGFQVVMLLSCAFTFFINYIVVLNTTINSALTQAICGNLKDVFTSGIGWLLFGGLPYDLFNILGQVLGFLGSCLYAYCKLMQAV

SEQ ID NO: 22698 - protein, 292 aa, Glycine max
MFNKAALSSYNFPFANVITLAQMVFAFIILYVLRSLKIISFTAGESLSSSKNTIIFVSYRTLAQTLPLALTYLLFMVVTMEAVRGINIPMYTTLRRTVVAFTMVMEYFLSGQTHSRFVVGSVGIIIAGAFVAGARDLAFDAFSYSVVFVENMCKAVYLASVSRVGKSSGLNIFGIVWCNVVICGPILFLWSLLRGDLQATLNFPYFFSRGFQVVMLLSCAFTFFINYIVVLNTTINSALTQAICGNLKDVFTSGIGWLLFGGLPYDLFNILGQVLGFLGSCLYAYCKLMQAV

SEQ ID NO: 22699 - protein, 270 aa, Glycine max
MVFAFIILYVLRSLKIISFTAGESLSSSKNTIIFVSYRTLAQTLPLALTYLLFMVVTMEAVRGINIPMYTTLRRTVVAFTMVMEYFLSGQTHSRFVVGSVGIIIAGAFVAGARDLAFDAFSYSVVFVENMCKAVYLASVSRVGKSSGLNIFGIVWCNVVICGPILFLWSLLRGDLQATLNFPYFFSRGFQVVMLLSCAFTFFINYIVVLNTTINSALTQAICGNLKDVFTSGIGWLLFGGLPYDLFNILGQVLGFLGSCLYAYCKLMQAV

SEQ ID NO: 22700 - DNA, 1394 bp, Glycine max
atattgttttgattgttcattcaagttcaaacttgaatttgattcatctgatctaaccaatgaaatcaaaatcgggattcgattgcagttgcaggtctctctatttggtgcttattacttattattaaggtttctttcttctgttgaaatggtctttagtaattatatttctgccaatgaatctcattgtttaattctgattatacctttcccgaaatgcaattagcgtcaaatggtgacaaggaagaatgttcagaaagcgaacccatcttgaatcatcaccatcttcatttgccaccacccggagaatcctccttttcctgtgaaattattcctatttctgctgctgcttccggcgatgatgatttacaaaacgttcgggttgatgagacttgtcatctcgtaaatgcagatcagccacaatgccgaatatgcctcgatattgtaggagaagatttaattgctccatgccattgcaaaggtacgcaaaagtacgtccacagatcatgtctcgataattggagatccaccaaggaggggttcgcgttttctcactgtacagagtgcagagctgtcttcatattacgtgcaaatgtcccaccagatcggtggtggttgagattaaaatttcagttccttgttgctagagatcatgcattcattttcataattgttcagctggttgttgctttcttgggagtgcttgtgtacaaattttatggagatgaactgagggaaatgtttggttatgaagaacatccatatggattttatacaatggctgttctagccattgttttggttggtttgctctatggcttcttcatagcgataatatgtggtcaaagaatcaatgaacgccactaccatgttcttgccaaacaagaattgactaaggaatatgtggttgaagatcgagaacatgtaaagaatgtgcctgaacttgaccccagccatgtgacagagctaaggatgttgggcctttactagttggatgcatcttctgcatagtcacattgaatttgttgtatttgcggcttgtctccatggtccccttcacatttgtagatcacattggtctgttcagagtgatgccccattaatatggctgtttgggcaccaactggcagtgcacagccacatgggtgttgtttattgtactctattttgattctttatttttaatttatatttttctggcgaaacttgtgaaagaaacatgcagttcacctagaaaattgctcttgtgaatcaatgttgtttggtggagtataaaggaaaaaggtgcagatcctatgaacatgagatattttgtatttgtaacttgtataagtcccttgatgtaacttattttacaatattttttttcatttctatacaaaatattataatcg

SEQ ID NO: 22701 - protein, 257 aa, Glycine max
MQLASNGDKEECSESEPILNHHHLHLPPPGESSFSCEIIPISAAASGDDDLQNVRVDETCHLVNADQPQCRICLDIVGEDLIAPCHCKGTQKYVHRSCLDNWRSTKEGFAFSHCTECRAVFILRANVPPDRWWLRLKFQFLVARDHAFIFIIVQLVVAFLGVLVYKFYGDELREMFGYEEHPYGFYTMAVLAIVLVGLLYGFFIAIICGQRINERHYHVLAKQELTKEYVVEDREHVKNVPELDPSHVTELRMLGLY

SEQ ID NO: 22702 - DNA, 1731 bp, Glycine max
ccaccctcggttacgaccaatccactctcgacctcctcagtttcttcaaggacttgggtagcaatgttggcatcctctcaggtctaatcaacgagctcactccaccctgggtggttctagccattggtgccatccttaacttctttggctacttcatgatttggctttccgtcactaaaaaaatagccaaacccaaagtgtggcagatgtgtctctacatctgcataggtgctaattctcagtccttcgccaacacaggttctcttgtcacgtgtgtcaagaactttccagaaagccgtggggctgtgttgggaatccttaaaggctacgtgggtcttagcggtgcaatcatcacgcaactctaccatgctatttactatgacgacaccaggtctttgattttgctcattgggtggctcccagctgctatttcctttgctttccttcgaaccattcgctacatgaagcccgttaggaagcctaacgagctcaaggttttctacaactttctctatgtttctcttggccttgctgggtttcttatggtcatgatcattgtagagaacaaagtcaacttcactcagagtgagtttggtgtcagcgctgctattatgctcttcttgctcttcctcccacttactattgtttctatagaagaatataaggtctggcagggtaaaagactcgctttggttgacccctccccagtgaaagtagtaaccgatcagggtgaaaaggtgaaaccgaatgagactattaatggtagcaacaataattcagtttcttccaatgacaccaagtggtgggaaaatgtctttagtccaccggcaagaggtgaggactatacaatacttcaggcgctgttcagcgtcgacatgctaatacttttcatgacttgcatatgtggtgttgggggcacgttgaccgccatagataatcttggtcagataggaacctcgcttagatacccaaagaaaactagaagcactttcgtgtccctagtaagcatttggaattatctgggaagggttttctctgggtttgtgtctgaacattttctacaaaagtacaagttccctcgtcctcttatgcttactttgactctgctcttatcatgtgttggtcaccttctgattgcctttgatgtgccaaatggcctttacgtggcttcggtgattattgggttttgttttggtgctcagtggcctttactttttgccatcatatccgagctttttggacttaaatattatgcaactttgtacaattttggaagcgtagcaagtccactgggactatatgtgcttaatgtgaagatgactgggtatctgtacgacaaagaagccaagaagcaacttgcagcgtcggggcttacaagagaggaagggcatgaattgaattgtgttggggtcaattgcttcaagttatctttcattattatcacagctgcaactttctttggtgccattgtttcactcattttggtggctaggacaagaaccttttacagaagtgacatatacaagagatacagggatgcagccacggaggcagaaactgaaatggcggagaaagattccaaacatgtggtgccagctcagacgtaggactaatggtaaaagatatacgatgttgcttgattagatcaatgttcaaacgataaattaattaattaataatgtagtcatacatgttggacaatatgtaatattcaacattatagtttgctac

SEQ ID NO: 22703 - protein, 534 aa, Glycine max
TLGYDQSTLDLLSFFKDLGSNVGILSGLINELTPPWVVLAIGAILNFFGYFMIWLSVTKKIAKPKVWQMCLYICIGANSQSFANTGSLVTCVKNFPESRGAVLGILKGYVGLSGAIITQLYHAIYYDDTRSLILLIGWLPAAISFAFLRTIRYMKPVRKPNELKVFYNFLYVSLGLAGFLMVMIIVENKVNFTQSEFGVSAAIMLFLLFLPLTIVSIEEYKVWQGKRLALVDPSPVKVVTDQGEKVKPNETINGSNNNSVSSNDTKWWENVFSPPARGEDYTILQALFSVDMLILFMTCICGVGGTLTAIDNLGQIGTSLRYPKKTRSTFVSLVSIWNYLGRVFSGFVSEHFLQKYKFPRPLMLTLTLLLSCVGHLLIAFDVPNGLYVASVIIGFCFGAQWPLLFAIISELFGLKYYATLYNFGSVASPLGLYVLNVKMTGYLYDKEAKKQLAASGLTREEGHELNCVGVNCFKLSFIIITAATFFGAIVSLILVARTRTFYRSDIYKRYRDAATEAETEMAEKDSKHVVPAQT

SEQ ID NO: 22704 - protein, 483 aa, Glycine max
MIWLSVTKKIAKPKVWQMCLYICIGANSQSFANTGSLVTCVKNFPESRGAVLGILKGYVGLSGAIITQLYHAIYYDDTRSLILLIGWLPAAISFAFLRTIRYMKPVRKPNELKVFYNFLYVSLGLAGFLMVMIIVENKVNFTQSEFGVSAAIMLFLLFLPLTIVSIEEYKVWQGKRLALVDPSPVKVVTDQGEKVKPNETINGSNNNSVSSNDTKWWENVFSPPARGEDYTILQALFSVDMLILFMTCICGVGGTLTAIDNLGQIGTSLRYPKKTRSTFVSLVSIWNYLGRVFSGFVSEHFLQKYKFPRPLMLTLTLLLSCVGHLLIAFDVPNGLYVASVIIGFCFGAQWPLLFAIISELFGLKYYATLYNFGSVASPLGLYVLNVKMTGYLYDKEAKKQLAASGLTREEGHELNCVGVNCFKLSFIIITAATFFGAIVSLILVARTRTFYRSDIYKRYRDAATEAETEMAEKDSKHVVPAQT

SEQ ID NO: 22705 - protein, 466 aa, Glycine max
MCLYICIGANSQSFANTGSLVTCVKNFPESRGAVLGILKGYVGLSGAIITQLYHAIYYDDTRSLILLIGWLPAAISFAFLRTIRYMKPVRKPNELKVFYNFLYVSLGLAGFLMVMIIVENKVNFTQSEFGVSAAIMLFLLFLPLTIVSIEEYKVWQGKRLALVDPSPVKVVTDQGEKVKPNETINGSNNNSVSSNDTKWWENVFSPPARGEDYTILQALFSVDMLILFMTCICGVGGTLTAIDNLGQIGTSLRYPKKTRSTFVSLVSIWNYLGRVFSGFVSEHFLQKYKFPRPLMLTLTLLLSCVGHLLIAFDVPNGLYVASVIIGFCFGAQWPLLFAIISELFGLKYYATLYNFGSVASPLGLYVLNVKMTGYLYDKEAKKQLAASGLTREEGHELNCVGVNCFKLSFIIITAATFFGAIVSLILVARTRTFYRSDIYKRYRDAATEAETEMAEKDSKHVVPAQT

SEQ ID NO: 22706 - DNA, 1037 bp, Glycine max
tagtccctggactatcatggaattactatttgttgacatgtcccaagcttgagaggattataaggaagcatcttgaggatgtcttcgagaaggacagtggagtagctcctggcatacttcgactcttcttccatgactgctttcctaatggatgcgatgcgtctatattgttgaatggagacggtgacgagaagcaacaccgtgctaactttggtttaaggcaagaggccattgacgccattgaaaaccttcgggttctcatttacaagcagtgtctaccagttgtctcatgctcagacatccttgttatcgcagcacgtgaagctgttcgccaattaggaggccctgattttgacgtgccactgggaagaaaagacggcctaggaccaaacgccaccgcgccggacaacctaccggcaccattcttccgaaccgacgatcttctgagaggattcggaaatagaggtttcgatgccaccgatgtggtcgctctctccggcgcacacacctacggtcgtgcccactgtccctccctagtgaacagaaccatcgaaacggacccaccaatcgacccaaacttcaacaacaatttgatagctacgtgtcccaatgccgagtcccccaacaccgttaatttggacgtgagaacccccgtgaagttcgacaacatgtattacatcaacctcttgaaccgccaaggagtgttcacttctgaccaggacatcgcgggcagccccaaaaccaaggaaatcgtgaaccagttcgcttcagaccagaaactgttttttaagaaattttccgatgcttttgtgaaggtgagccagctagatgtgataacggatcgtattgggaaaggggagattcgtgataagtgctttgttgcaaataagagaagatcttctatggcgtctgtggtggaagaagtagtggaattggctcaggagatataattgtattgggtccttttgctcagggtgttcttttttgtttttctgaatggattgtgtaataaacgttgatatgtgttttctttaaag

SEQ ID NO: 22707 - protein, 315 aa, Glycine max
VPGLSWNYYLLTCPKLERIIRKHLEDVFEKDSGVAPGILRLFFHDCFPNGCDASILLNGDGDEKQHRANFGLRQEAIDAIENLRVLIYKQCLPVVSCSDILVIAAREAVRQLGGPDFDVPLGRKDGLGPNATAPDNLPAPFFRTDDLLRGFGNRGFDATDVVALSGAHTYGRAHCPSLVNRTIETDPPIDPNFNNNLIATCPNAESPNTVNLDVRTPVKFDNMYYINLLNRQGVFTSDQDIAGSPKTKEIVNQFASDQKLFFKKFSDAFVKVSQLDVITDRIGKGEIRDKCFVANKRRSSMASVVEEVVELAQEI

SEQ ID NO: 22708 - DNA, 1189 bp, Glycine max
aacttccctgctctagagaatcccaacagccagccatctgttggtggtccatcatctcaacctgggtttgccaacaatatgcctgttcaaggtgctggccaatcatttcgagatcaattttctatgcctggaatgtcccaggacttcttgggcgatgacttcaaaagccaggggtctcatgttccttataatgtcactgatttctctacacaggcttctcaaagtggatatgctgtcgattatgctacacaaggagcacaaggtggattctcagggaattttcttaaccagaattctcaagctggatattctcgctttggttctggaaatgactttatgtctcaggactacatgggccatggatcacaaggtcttttcactcaggtgggattcactgatcccttgcaagatgatgcaacgcaaagccatttcagtgtggcaaatgccaaccctcttcagtcccagatgagttctctttactcccaaccttttgctcactacaacacacagccgcttaacatgcaggctacccaacagcagcctcaggctcagaactcccaaaatcagaaaatccactataacggttgaggaactttaggagcttaatgtggctttgatgggttatatagtctttgcaatcagcaactggggttgtgcctgtcttttgtgctgaaatacgtttgcatgagacatccgaaggattgccttgggatagctataccgaggaactggtatatatgatttgagttgatggaattttggggcattacgaagatacaagcaggcgcatcccgggctgaaaaatgataagataaccccctttaccttactgaagttttgtattgtttgggattaaggtgaaattgttcgagaaagcattacatggaatggttttgtcgaaagggttttaatcttgaagcagaaggggcggtttacatgtcggtgaaatactgaatatagtaatccatactgcaccaatcatcgccaaggaagttattattgtacagaaggcagggatgcggtgaaccctttcagctcttcctgacatgtaatttaaactcgatattatagacacaagttatatatgcaactattgccactcagaattttctgtggcatataaaggtgtgataattgttttccatgtaaattagttatcttataattgcaacatctgagtgctttgagt

SEQ ID NO: 22709 - protein, 195 aa, Glycine max
NFPALENPNSQPSVGGPSSQPGFANNMPVQGAGQSFRDQFSMPGMSQDFLGDDFKSQGSHVPYNVTDFSTQASQSGYAVDYATQGAQGGFSGNFLNQNSQAGYSRFGSGNDFMSQDYMGHGSQGLFTQVGFTDPLQDDATQSHFSVANANPLQSQMSSLYSQPFAHYNTQPLNMQATQQQPQAQNSQNQKIHYNG

SEQ ID NO: 22710 - protein, 169 aa, Glycine max
MPVQGAGQSFRDQFSMPGMSQDFLGDDFKSQGSHVPYNVTDFSTQASQSGYAVDYATQGAQGGFSGNFLNQNSQAGYSRFGSGNDFMSQDYMGHGSQGLFTQVGFTDPLQDDATQSHFSVANANPLQSQMSSLYSQPFAHYNTQPLNMQATQQQPQAQNSQNQKIHYNG

SEQ ID NO: 22711 - protein, 154 aa, Glycine max
MPGMSQDFLGDDFKSQGSHVPYNVTDFSTQASQSGYAVDYATQGAQGGFSGNFLNQNSQAGYSRFGSGNDFMSQDYMGHGSQGLFTQVGFTDPLQDDATQSHFSVANANPLQSQMSSLYSQPFAHYNTQPLNMQATQQQPQAQNSQNQKIHYNG

SEQ ID NO: 22712 - DNA, 1464 bp, Glycine max
ttctctctcgcacacgcaaacacttgttccggtgtccctctctctttcgcttcatcttcaacattaggtcttctctgactctgtggttgtcactgttcaacgtctttgagagtttatgctgagtagttcggctttacctcaaaagtcctgatcaattgaattcagtttccattggtaggatttattgccgggccttgaggtaatcagcttaccaacatgggaacacaaccccagcaaacatttcgggaggaagaggaggaggagatgcaaggccatggaactacgatgtcaggtcaatcaatgtcaacaagcagaagtgtcgggtctccatccagccggagtgagcagacaatggcaacacctgctagtgatagcacttttcttaggttaaaccatcttgacatacatggtgatgatgctggatcacagggcaccgttgccaagaagaaaaagaggggccaacgggctgttggaggtgataagagtggaagaggtctccgtcaattcagtatgaaagtgtgtgagaaggtagaaagcaagggcagaacaacttacaatgaggtagctgatgaacttgtggccgaatttgctgatccaatcaatggtgtttcaactcctgatcagcaacaatatgatgagaaaaacattcgtcgaagggtgtatgatgctttgaatgttctcatggcaatggatattatttctaaggataaaaaggaaattcaatggaagggtctccctcgtactagtctaagcgatattgaagagctaaagtcggagcgtcttgggctaaggaatagaattgaaaagaaagcagcctatttgcaagagctggaggagcaatacataggtcttcagaaacttatacaacgaaatgagcaactatatagctcaggaaatgctcccaatggaggtgtatctttgcccttcattctggtgcagacacggccccatgcaactgttgaagtggaaatatcagaagatatgcagcttgtgcattttgatttcaatagcactccctttgagctgcatgatgataactatgttctcaaggcaatgaaattttgtgagagatctcagaatgataatacaacagataattctacagatggcggtgaaggttctagcatatatgcacaggttcctacttcagtttcaaaccctccaaataggcctccttcatctccaccactccctggaatattaaaggcaagagttaagaacgagcattgatatgcaattttgtactgcatcgccttatttaagcatgtttgtatatttttgtaaagtaatttgtcagtaattaattgtccttcataatagttaatcagtacagccaattcactcagtaggttagaagcgaaccagtgtgcttgagtctatattcttctgggttgattttggcaaattctttgctaaccatatccattatttactaccttaagaccttaactgatttttttcccc

SEQ ID NO: 22713 - protein, 337 aa, Glycine max
MGTQPQQTFREEEEEEMQGHGTTMSGQSMSTSRSVGSPSSRSEQTMATPASDSTFLRLNHLDIHGDDAGSQGTVAKKKKRGQRAVGGDKSGRGLRQFSMKVCEKVESKGRTTYNEVADELVAEFADPINGVSTPDQQQYDEKNIRRRVYDALNVLMAMDIISKDKKEIQWKGLPRTSLSDIEELKSERLGLRNRIEKKAAYLQELEEQYIGLQKLIQRNEQLYSSGNAPNGGVSLPFILVQTRPHATVEVEISEDMQLVHFDFNSTPFELHDDNYVLKAMKFCERSQNDNTTDNSTDGGEGSSIYAQVPTSVSNPPNRPPSSPPLPGILKARVKNEH

SEQ ID NO: 22714 - protein, 321 aa, Glycine max
MQGHGTTMSGQSMSTSRSVGSPSSRSEQTMATPASDSTFLRLNHLDIHGDDAGSQGTVAKKKKRGQRAVGGDKSGRGLRQFSMKVCEKVESKGRTTYNEVADELVAEFADPINGVSTPDQQQYDEKNIRRRVYDALNVLMAMDIISKDKKEIQWKGLPRTSLSDIEELKSERLGLRNRIEKKAAYLQELEEQYIGLQKLIQRNEQLYSSGNAPNGGVSLPFILVQTRPHATVEVEISEDMQLVHFDFNSTPFELHDDNYVLKAMKFCERSQNDNTTDNSTDGGEGSSIYAQVPTSVSNPPNRPPSSPPLPGILKARVKNEH

SEQ ID NO: 22715 - protein, 314 aa, Glycine max
MSGQSMSTSRSVGSPSSRSEQTMATPASDSTFLRLNHLDIHGDDAGSQGTVAKKKKRGQRAVGGDKSGRGLRQFSMKVCEKVESKGRTTYNEVADELVAEFADPINGVSTPDQQQYDEKNIRRRVYDALNVLMAMDIISKDKKEIQWKGLPRTSLSDIEELKSERLGLRNRIEKKAAYLQELEEQYIGLQKLIQRNEQLYSSGNAPNGGVSLPFILVQTRPHATVEVEISEDMQLVHFDFNSTPFELHDDNYVLKAMKFCERSQNDNTTDNSTDGGEGSSIYAQVPTSVSNPPNRPPSSPPLPGILKARVKNEH

SEQ ID NO: 22716 - DNA, 1712 bp, Glycine max
attggatatttcaaacaataaattagttggttccatcccttcttcccttggtgacttggaacatcttctgaagttgaacctgagcagaaacaatttaacaggagttattccagcagaatttggaaatcttagaagtgttatggaaattgatctttcagataatcagctctctggcttcattcctgaagaacttagtcagcttcagaacatgatatccttgagacttgaaaacaacaaattaactggcgatgtggcgtcactttcaagttgtcttagtctctctctacttaatgtgtcctataacaaactatttggtgttatccccacgagtaacaactttaccaggtttccccctgacagtttcattggaaaccctggtctttgtggtaattggctgaatttgccatgccatggtgctcgtccttcagagcgagttacattatctaaggctgccattcttggaattactttgggtgcccttgtgattcttcttatggtattggtggcagcttgccgaccacacagcccctctccttttcctgatggatcatttgacaaaccaattaatttctcccctccaaagctagtgattcttcatatgaatatggcactacatgtgtatgaagatatcatgaggatgactgaaaacctaagtgagaagtatatcattggatatggtgcatcaagtacagtttataaatgtgtccttaagaattgtaagccggtggctatcaagaggatctattctcactatccccaatgtattaaagaatttgaaactgaactcgagactgttggcagcatcaagcaccggaattttgtcagtctccaaggctactccttgtccccatatggccatctcctgttttatgactacatggaaaatggcagtctatgggatcttcttcatggacctaccaagaagaaaaagcttgactgggagctgcgtctaaaaatagcacttggagcagcacaaggacttgcttatctacaccatgattgctgtcctagaatcatccacagggatgtgaaatcatctaacattatattagatgcagactttgagcctcatctcactgattttggcattgccaaaagtctctgcccctcgaagtcccatacttctacttacataatgggcacaattggctacatagaccctgagtatgctagaacttcgcatctcactgagaagtctgatgtgtacagttatggtattgttttactcgagttgctaactggaaggaaagctgttgacaatgaatccaacctccaccatcttattttgtccaaggcagcaaccaatgctgtgatggaaacagttgatcccgacattactgccacatgcaaggacctaggagctgtaaaaaaggtttatcagcttgctctattatgcacaaagaggcagccagctgataggccaacaatgcacgaagtgacacgtgtactcggaagtctcgtgccatcaagcatcccaccaaagcaactagctgacctaccacctgcttcaaatccatctgccaaagtgccatgctacgtggatgagtatgcaaacctcaaaaccccacacttagtaaactgcccctcaatgagcacttcagatgctcaactcttcctcaagtttggagaagtaatctctcaaaacagtgagtgagtgagaggattttgaaatgaaaatcaatttcaagaatcatgtatattatttaaaaacc

SEQ ID NO: 22717 - protein, 550 aa, Glycine max
LDISNNKLVGSIPSSLGDLEHLLKLNLSRNNLTGVIPAEFGNLRSVMEIDLSDNQLSGFIPEELSQLQNMISLRLENNKLTGDVASLSSCLSLSLLNVSYNKLFGVIPTSNNFTRFPPDSFIGNPGLCGNWLNLPCHGARPSERVTLSKAAILGITLGALVILLMVLVAACRPHSPSPFPDGSFDKPINFSPPKLVILHMNMALHVYEDIMRMTENLSEKYIIGYGASSTVYKCVLKNCKPVAIKRIYSHYPQCIKEFETELETVGSIKHRNFVSLQGYSLSPYGHLLFYDYMENGSLWDLLHGPTKKKKLDWELRLKIALGAAQGLAYLHHDCCPRIIHRDVKSSNIILDADFEPHLTDFGIAKSLCPSKSHTSTYIMGTIGYIDPEYARTSHLTEKSDVYSYGIVLLELLTGRKAVDNESNLHHLILSKAATNAVMETVDPDITATCKDLGAVKKVYQLALLCTKRQPADRPTMHEVTRVLGSLVPSSIPPKQLADLPPASNPSAKVPCYVDEYANLKTPHLVNCPSMSTSDAQLFLKFGEVISQNSE

SEQ ID NO: 22718 - protein, 504 aa, Glycine max
MEIDLSDNQLSGFIPEELSQLQNMISLRLENNKLTGDVASLSSCLSLSLLNVSYNKLFGVIPTSNNFTRFPPDSFIGNPGLCGNWLNLPCHGARPSERVTLSKAAILGITLGALVILLMVLVAACRPHSPSPFPDGSFDKPINFSPPKLVILHMNMALHVYEDIMRMTENLSEKYIIGYGASSTVYKCVLKNCKPVAIKRIYSHYPQCIKEFETELETVGSIKHRNFVSLQGYSLSPYGHLLFYDYMENGSLWDLLHGPTKKKKLDWELRLKIALGAAQGLAYLHHDCCPRIIHRDVKSSNIILDADFEPHLTDFGIAKSLCPSKSHTSTYIMGTIGYIDPEYARTSHLTEKSDVYSYGIVLLELLTGRKAVDNESNLHHLILSKAATNAVMETVDPDITATCKDLGAVKKVYQLALLCTKRQPADRPTMHEVTRVLGSLVPSSIPPKQLADLPPASNPSAKVPCYVDEYANLKTPHLVNCPSMSTSDAQLFLKFGEVISQNSE

SEQ ID NO: 22719 - protein, 481 aa, Glycine max
MISLRLENNKLTGDVASLSSCLSLSLLNVSYNKLFGVIPTSNNFTRFPPDSFIGNPGLCGNWLNLPCHGARPSERVTLSKAAILGITLGALVILLMVLVAACRPHSPSPFPDGSFDKPINFSPPKLVILHMNMALHVYEDIMRMTENLSEKYIIGYGASSTVYKCVLKNCKPVAIKRIYSHYPQCIKEFETELETVGSIKHRNFVSLQGYSLSPYGHLLFYDYMENGSLWDLLHGPTKKKKLDWELRLKIALGAAQGLAYLHHDCCPRIIHRDVKSSNIILDADFEPHLTDFGIAKSLCPSKSHTSTYIMGTIGYIDPEYARTSHLTEKSDVYSYGIVLLELLTGRKAVDNESNLHHLILSKAATNAVMETVDPDITATCKDLGAVKKVYQLALLCTKRQPADRPTMHEVTRVLGSLVPSSIPPKQLADLPPASNPSAKVPCYVDEYANLKTPHLVNCPSMSTSDAQLFLKFGEVISQNSE

SEQ ID NO: 22720 - DNA, 1906 bp, Glycine max
atttattacattttaactttgctccaactcaaatttgtaagtaagtggtttcaaggacgcatgcaattcttcaatctcagttgagtgataatatagaggccttgaagccttttcaagtttagtagaggctgagaaatgtattgtatctagaaaataatgcttgtttgtgtttgtatactatactattcaagaaatgctatagtatcaatatcttgtgatgtttttaatttagataaagaataataacgaaactttccaaagagactgagagtatgtgtaatcttcataaagtgatttttgtgctagaaactagaaagcacaaatacaacaaatgatacatatacaatatggcagacaatagataattttaaaaatagcaggacaccacaactataataagatatataaaattagcacaaaaaatttttaattcaaaagataaaattgatgttttatttttgaatgaatcattgtatacatataagactgttgttgttgtcttctaattattgtgatattcccatcggtattgctacaaaagtgtaagaaataaaggtaaacaatataaaatgtaacttagagtatttgaagtgtccatgaccgacatgacacaactgtaattttgtagtgtccgtgcttccttgtttatgtataagatccagatctgaagattttcctattctattaatgcatatatctaataatgtaaatactgtcttctgctctagattcaatcataaaacaggcgctgaggatgtgcatttcactgccatgtcctctaatgatgaatctgatactgatgttgatggctgtaacaatgatgagggcattgtcgaggaggaagcattggctcaaaattcctctatagatatgactgcgttaaataatgggaactgcaatgtcagtgacttggatagttcttcacttagtgagagtgatacttctatgctggagatgattatgacaaaagatgtcagcagtggaagtgaggtatttaatacttatgggatactgggtaatgctgctttgcttcatagatatggatttactgagcaagataattcctatgatattgtaaacatagatatggaactggtaattcaatggtgttcttccgtgttttcggaccgccacagtagagcaagagtttccctttggagaaggttaggctattctgtatgtggcagccaagactctgactattttgagatctcatttgatggagaaccacagattgaactcctcagtttgttacacatcatgttattaccagataatgcctaccataagttagacctatcagtatcggttgccggaaattatgatgaatcaaatggaaccacccttctgaatggtgatatctttcctagtaaagcatttaatatgaacaataaatccttgctgcccaaaaaagtttgtgatgccctgttgtcgctttctgatatgagggagagtctctatggtttgaaatcaattgaagatgatattgaggcattgggaaggtgtagtttaattagagagagaaaactgtatcattctttgatgctgcgcatcaatgaaaggaagatccttcagaggctcagaaattatgcttcacagccatttaaaaataaaatcacgaaccatggttctccgaggaagaagttgaaaagaacaacaaagaaaacaagttgatttttttagtgtttattttattttaattatttttctatgagatgctttaacttgtattttggtgcaccaagtcattggcctatgcaaagtagcaaagccgtctctttcatttgtcgcatttggtttttggtcagcaataaaacatcgtttttctttcattagttccttaatttatcatttgtgtttccgtcattttatgccatgatctttcatctcatgctcttatattgat

SEQ ID NO: 22721 - protein, 328 aa, Glycine max
MHISNNVNTVFCSRFNHKTGAEDVHFTAMSSNDESDTDVDGCNNDEGIVEEEALAQNSSIDMTALNNGNCNVSDLDSSSLSESDTSMLEMIMTKDVSSGSEVFNTYGILGNAALLHRYGFTEQDNSYDIVNIDMELVIQWCSSVFSDRHSRARVSLWRRLGYSVCGSQDSDYFEISFDGEPQIELLSLLHIMLLPDNAYHKLDLSVSVAGNYDESNGTTLLNGDIFPSKAFNMNNKSLLPKKVCDALLSLSDMRESLYGLKSIEDDIEALGRCSLIRERKLYHSLMLRINERKILQRLRNYASQPFKNKITNHGSPRKKLKRTTKKTS

SEQ ID NO: 22722 - protein, 300 aa, Glycine max
MSSNDESDTDVDGCNNDEGIVEEEALAQNSSIDMTALNNGNCNVSDLDSSSLSESDTSMLEMIMTKDVSSGSEVFNTYGILGNAALLHRYGFTEQDNSYDIVNIDMELVIQWCSSVFSDRHSRARVSLWRRLGYSVCGSQDSDYFEISFDGEPQIELLSLLHIMLLPDNAYHKLDLSVSVAGNYDESNGTTLLNGDIFPSKAFNMNNKSLLPKKVCDALLSLSDMRESLYGLKSIEDDIEALGRCSLIRERKLYHSLMLRINERKILQRLRNYASQPFKNKITNHGSPRKKLKRTTKKTS

SEQ ID NO: 22723 - protein, 267 aa, Glycine max
MTALNNGNCNVSDLDSSSLSESDTSMLEMIMTKDVSSGSEVFNTYGILGNAALLHRYGFTEQDNSYDIVNIDMELVIQWCSSVFSDRHSRARVSLWRRLGYSVCGSQDSDYFEISFDGEPQIELLSLLHIMLLPDNAYHKLDLSVSVAGNYDESNGTTLLNGDIFPSKAFNMNNKSLLPKKVCDALLSLSDMRESLYGLKSIEDDIEALGRCSLIRERKLYHSLMLRINERKILQRLRNYASQPFKNKITNHGSPRKKLKRTTKKTS

SEQ ID NO: 22724 - DNA, 1339 bp, Glycine max
agtttggagaagcactgaatggcttatcaacgattcgtgcttacaaagcgtatgatcgaatggcagatataaatgggaaatccatggacaacaacatccgattcactctggtgaacataagtggaaaccgatggcttgcaatccgattggaaactttgggaggcctcatgatatggttgactgcaacctttgccgtcatgcagaatggcagggcggagaaccagcaagaattcgcatccaccatggggttactacttagctatgctctgaacattactagtttgcttaccggtgtgctgaggctggcaagtttggctgagaatagtttaaacgcagttgaacggattggcacttacattgatttgccctcggaggctccctctatcatcgatgataatcgccctcctcctggctggccttcctcaggctcaatcagattcgaagatgttgttcttcgctacagagctgaacttcctcctgtgttgcatggcttgtctttcaccattttcccaagcgataaggttggcattgttgggaggacaggtgcaggaaaatccagcatgcttaatgctttgtttcgaattgtagaattggaacgtggaagaatattaattgatgattatgatgttgcaaagtttgggcttgctgatttgcgtaaagttcttggcattataccacaatctcctgttctcttttcaggaactgtgagatttaatcttgatccatttaatgaacacaatgatgctgacctctgggaggctctggagagggcacatttgaaggatgtgatacggaggaattctctggggctggacgctgaggtatctgaggcaggcgagaacttcagtgttggacaaagacaactgttgagtctttctcgggctttattgcgtagatcaaagatattagtacttgacgaagcaaccgcagcagttgatgttagaacagatgcactcatacagaaaacaattcgagaggaattcaaatcttgtacaatgctcattatagctcatcgccttaacaccattattgattgtgatcggattcttttgcttgatggtggtaaggttcttgaatatgatacccctgaggagctgttgtcaaatgaaggtagtgctttctctaagatggtccaaagtacaggagcggcaaatgcccaatatttacgcagcttagcccttggaggggataagtcagaaagagaagagaacgagcatctagatggcaagagaaaatggcttgcttcttctcggtgggctgctgcagcgcaatttgctctcgctgttagtctcacctcatcccataatgacctacaacgtttggaattggaagatgagaa

SEQ ID NO: 22725 - protein, 445 aa, Glycine max
FGEALNGLSTIRAYKAYDRMADINGKSMDNNIRFTLVNISGNRWLAIRLETLGGLMIWLTATFAVMQNGRAENQQEFASTMGLLLSYALNITSLLTGVLRLASLAENSLNAVERIGTYIDLPSEAPSIIDDNRPPPGWPSSGSIRFEDVVLRYRAELPPVLHGLSFTIFPSDKVGIVGRTGAGKSSMLNALFRIVELERGRILIDDYDVAKFGLADLRKVLGIIPQSPVLFSGTVRFNLDPFNEHNDADLWEALERAHLKDVIRRNSLGLDAEVSEAGENFSVGQRQLLSLSRALLRRSKILVLDEATAAVDVRTDALIQKTIREEFKSCTMLIIAHRLNTIIDCDRILLLDGGKVLEYDTPEELLSNEGSAFSKMVQSTGAANAQYLRSLALGGDKSEREENEHLDGKRKWLASSRWAAAAQFALAVSLTSSHNDLQRLELEDE

SEQ ID NO: 22726 - protein, 426 aa, Glycine max
MADINGKSMDNNIRFTLVNISGNRWLAIRLETLGGLMIWLTATFAVMQNGRAENQQEFASTMGLLLSYALNITSLLTGVLRLASLAENSLNAVERIGTYIDLPSEAPSIIDDNRPPPGWPSSGSIRFEDVVLRYRAELPPVLHGLSFTIFPSDKVGIVGRTGAGKSSMLNALFRIVELERGRILIDDYDVAKFGLADLRKVLGIIPQSPVLFSGTVRFNLDPFNEHNDADLWEALERAHLKDVIRRNSLGLDAEVSEAGENFSVGQRQLLSLSRALLRRSKILVLDEATAAVDVRTDALIQKTIREEFKSCTMLIIAHRLNTIIDCDRILLLDGGKVLEYDTPEELLSNEGSAFSKMVQSTGAANAQYLRSLALGGDKSEREENEHLDGKRKWLASSRWAAAAQFALAVSLTSSHNDLQRLELEDE

SEQ ID NO: 22727 - protein, 418 aa, Glycine max
MDNNIRFTLVNISGNRWLAIRLETLGGLMIWLTATFAVMQNGRAENQQEFASTMGLLLSYALNITSLLTGVLRLASLAENSLNAVERIGTYIDLPSEAPSIIDDNRPPPGWPSSGSIRFEDVVLRYRAELPPVLHGLSFTIFPSDKVGIVGRTGAGKSSMLNALFRIVELERGRILIDDYDVAKFGLADLRKVLGIIPQSPVLFSGTVRFNLDPFNEHNDADLWEALERAHLKDVIRRNSLGLDAEVSEAGENFSVGQRQLLSLSRALLRRSKILVLDEATAAVDVRTDALIQKTIREEFKSCTMLIIAHRLNTIIDCDRILLLDGGKVLEYDTPEELLSNEGSAFSKMVQSTGAANAQYLRSLALGGDKSEREENEHLDGKRKWLASSRWAAAAQFALAVSLTSSHNDLQRLELEDE

SEQ ID NO: 22728 - DNA, 1350 bp, Glycine max
gtacaaattcacaaagacatcccttgcggccatatctggactacgttggatatctttaccaaagaatggatcctcttcctgagcaagaacgttttgagcttggttacagggattttttacagtcacccttgcaacctttgatggataatttagaggctcagacttacgagacttttgagagagatgcaatgaaatacattcagtaccaaagagcagttagtaaagcattgctggacagggttcctgatgaagaggcatctgttaaaaccattgtattgatggttgtgggggcagggcgtgggcctcttgtgcgggcttcattacaggctgctgaagaaactgggcggaagctcaaagtttatgctgttgaaaagaatccgaatgctgttgttaccctacatgcattagtcaagttagaaggatgggagtatactgtgaccatagtctcaagtgacatgcgtcattggaatgcccctgaaaaagctgacatattggttagtgaattgctaggttcttttggcgacaacgaactgtctcctgagtgccttgatggagcccagagatttctaaagcaagatggaatttcaataccatcttcgtacacaagtttcctccaaccagtgacagcttcaaagttatataatgatgttaaggctcataaagaccttgtacactttgaaactgcttatgttgtgaaaatgcacaatgtagccagacttgcaccaacccaacctgtttttacatttactcatccaaagcaccctgataaagaaagcaatcagcgccataaaaagttgaattttgtgatacctaatgacactgggtcagcaatggtacacggatttgctggttattttgatgcaactctttacaaggatgtgcatcttggaattgaaccttcaacggcaacgccaaacatgttcagttggtttgcaatatttttcccattaaggacacccatttgtgtggatcccggttctacactagaagtacatttttggcgttgttgtggttctacaaaggtttggtatgagcggtgtgttgcctctccctcgtcgtccccaattcacaacagtaatggacgttcatactgggttgggctttagtgccttgtattttctagaacaatcatagacttgagtagttaagtttataatgttgcaaatcagggtgaaaagtaaatactctggtcatttcaagattcaagcaaaagctgaatacaatgttttttggagcaagcatcacggtggatctcttcatttcaattcattgtgggaaattttgttgtacaataagatatttgatttgttattagtgtccttaatgcatcgatctaatgtaattaatttc

SEQ ID NO: 22729 - protein, 367 aa, Glycine max
TNSQRHPLRPYLDYVGYLYQRMDPLPEQERFELGYRDFLQSPLQPLMDNLEAQTYETFERDAMKYIQYQRAVSKALLDRVPDEEASVKTIVLMVVGAGRGPLVRASLQAAEETGRKLKVYAVEKNPNAVVTLHALVKLEGWEYTVTIVSSDMRHWNAPEKADILVSELLGSFGDNELSPECLDGAQRFLKQDGISIPSSYTSFLQPVTASKLYNDVKAHKDLVHFETAYVVKMHNVARLAPTQPVFTFTHPKHPDKESNQRHKKLNFVIPNDTGSAMVHGFAGYFDATLYKDVHLGIEPSTATPNMFSWFAIFFPLRTPICVDPGSTLEVHFWRCCGSTKVWYERCVASPSSSPIHNSNGRSYWVGL

SEQ ID NO: 22730 - protein, 346 aa, Glycine max
MDPLPEQERFELGYRDFLQSPLQPLMDNLEAQTYETFERDAMKYIQYQRAVSKALLDRVPDEEASVKTIVLMVVGAGRGPLVRASLQAAEETGRKLKVYAVEKNPNAVVTLHALVKLEGWEYTVTIVSSDMRHWNAPEKADILVSELLGSFGDNELSPECLDGAQRFLKQDGISIPSSYTSFLQPVTASKLYNDVKAHKDLVHFETAYVVKMHNVARLAPTQPVFTFTHPKHPDKESNQRHKKLNFVIPNDTGSAMVHGFAGYFDATLYKDVHLGIEPSTATPNMFSWFAIFFPLRTPICVDPGSTLEVHFWRCCGSTKVWYERCVASPSSSPIHNSNGRSYWVGL

SEQ ID NO: 22731 - protein, 321 aa, Glycine max
MDNLEAQTYETFERDAMKYIQYQRAVSKALLDRVPDEEASVKTIVLMVVGAGRGPLVRASLQAAEETGRKLKVYAVEKNPNAVVTLHALVKLEGWEYTVTIVSSDMRHWNAPEKADILVSELLGSFGDNELSPECLDGAQRFLKQDGISIPSSYTSFLQPVTASKLYNDVKAHKDLVHFETAYVVKMHNVARLAPTQPVFTFTHPKHPDKESNQRHKKLNFVIPNDTGSAMVHGFAGYFDATLYKDVHLGIEPSTATPNMFSWFAIFFPLRTPICVDPGSTLEVHFWRCCGSTKVWYERCVASPSSSPIHNSNGRSYWVGL

SEQ ID NO: 22732 - DNA, 1588 bp, Glycine max
gccacaccctactcaagtagtagctctacttaaagcccaacaaattcgtcatgttcgtttgtatgatgcagaccaagctatgctccttgcacttgcaaagacaggcattcaggttgttgtgactgtcccaaatgaagagatcctggcaattggtcaatcgaattccacggctgccaattgggtttcccgcaacgtggtagcacattatccagccaccaatatcacagccatttgtgttggttctgaggttttaactaccctcccgaatgcggcaaaagtacttgtcagtgcgattaaatacatccattcagcccttgtggcatccaatcttgatcgccaagttaaagtttcaacacccctttcctcatccatcattcttgattcatttccaccttctcaggctttctttaaccgctcactcaatccagttttagtcccactacttgatttcttgcaatccactggctcttatctgatgctaaacatatacccttactatgactacatgcaatcaaatggagtgattccattagattatgcacttttcaaatctctccctccaaacaaagaagctgttgattccaataccctcctccactacaccaatgtctttgatgccatggttgatgctgcatactttgccatagcttttctaaattacaccaacattcctgttgtggtgactgagtcagggtggccctcaaaaggtggctccaacgaacctgatgcaacggtggacaatgcaaatacttacaacagcaatttgatcaaacatgtgtttaacaaaaccggaactcccaaacatcctggaattgctgttagtacttacatctatgagctctacaacgaggatatgaagcctgggccattgtcagagaagaactggggactgtttgatgcaaatggaacacctatttacattctacacttgacagagtcaggggcagtcttagcaaatgataccagcaacaatactttctgcattgcaaaggacggtgctgacccgaagatgctgcaggctgcactagattgggcatgtggaccgggcaaggtcgaatgctctccattgctgcaggggcaaccatgctatgaaccggacaatgtgattgcacatgcaaattatgcatttgacacttactatcataagatgggaaagactcctgatgcatgtgacttcaatggagtggctactatctccacctcagatccaagtcatggttcttgtttatttcctggaagtgttggcaaaaatggaaccttaggtaacttcacagctccatccatgaattctacaaattcagattcctcagcctacaaattcagctctgacttgagaattagaagccttttaatggtagcaggatttctattatggggagtggttttgctataaagtggtatatgtcagatcgtgttactttgaaaaattttgtggtggatgataatgctactactacatattcgtcttggtagcattgtgttgttcatagtggtccattcaattttgtacaaaaaccagccaagggtttggaccgaatgaggccgcaactgaatcatcatcatcattattattcttttcaactaaaag

SEQ ID NO: 22733 - protein, 463 aa, Glycine max
PHPTQVVALLKAQQIRHVRLYDADQAMLLALAKTGIQVVVTVPNEEILAIGQSNSTAANWVSRNVVAHYPATNITAICVGSEVLTTLPNAAKVLVSAIKYIHSALVASNLDRQVKVSTPLSSSIILDSFPPSQAFFNRSLNPVLVPLLDFLQSTGSYLMLNIYPYYDYMQSNGVIPLDYALFKSLPPNKEAVDSNTLLHYTNVFDAMVDAAYFAIAFLNYTNIPVVVTESGWPSKGGSNEPDATVDNANTYNSNLIKHVFNKTGTPKHPGIAVSTYIYELYNEDMKPGPLSEKNWGLFDANGTPIYILHLTESGAVLANDTSNNTFCIAKDGADPKMLQAALDWACGPGKVECSPLLQGQPCYEPDNVIAHANYAFDTYYHKMGKTPDACDFNGVATISTSDPSHGSCLFPGSVGKNGTLGNFTAPSMNSTNSDSSAYKFSSDLRIRSLLMVAGFLLWGVVLL

SEQ ID NO: 22734 - protein, 437 aa, Glycine max
MLLALAKTGIQVVVTVPNEEILAIGQSNSTAANWVSRNVVAHYPATNITAICVGSEVLTTLPNAAKVLVSAIKYIHSALVASNLDRQVKVSTPLSSSIILDSFPPSQAFFNRSLNPVLVPLLDFLQSTGSYLMLNIYPYYDYMQSNGVIPLDYALFKSLPPNKEAVDSNTLLHYTNVFDAMVDAAYFAIAFLNYTNIPVVVTESGWPSKGGSNEPDATVDNANTYNSNLIKHVFNKTGTPKHPGIAVSTYIYELYNEDMKPGPLSEKNWGLFDANGTPIYILHLTESGAVLANDTSNNTFCIAKDGADPKMLQAALDWACGPGKVECSPLLQGQPCYEPDNVIAHANYAFDTYYHKMGKTPDACDFNGVATISTSDPSHGSCLFPGSVGKNGTLGNFTAPSMNSTNSDSSAYKFSSDLRIRSLLMVAGFLLWGVVLL

SEQ ID NO: 22735 - protein, 305 aa, Glycine max
MLNIYPYYDYMQSNGVIPLDYALFKSLPPNKEAVDSNTLLHYTNVFDAMVDAAYFAIAFLNYTNIPVVVTESGWPSKGGSNEPDATVDNANTYNSNLIKHVFNKTGTPKHPGIAVSTYIYELYNEDMKPGPLSEKNWGLFDANGTPIYILHLTESGAVLANDTSNNTFCIAKDGADPKMLQAALDWACGPGKVECSPLLQGQPCYEPDNVIAHANYAFDTYYHKMGKTPDACDFNGVATISTSDPSHGSCLFPGSVGKNGTLGNFTAPSMNSTNSDSSAYKFSSDLRIRSLLMVAGFLLWGVVLL

SEQ ID NO: 22736 - DNA, 1596 bp, Glycine max
tttttttgtcccaaaaataataaactgttaattttttttccacaaatggcacccagttttgattgcgtttcgagccttctctgtgccgaagacaacagtatttttgacgaaaacgattatgggggttcggtggaggttttggaggacgcgtggcaggatcctagatatcgtcgaaaccttagtcaaagtgagaacttggatgtcccaaatgggttttttccattgcagagtgatgagtgcttgagactgatggtggagaaggaatgggatcacttgcctaatggtgattatgtgaataggctgaggagtggggatttggattttggggccagaaaagaggccattgattggattgaaaaggttcaacagcactttggttttggacccctctgtgcatatctatccataaactacttggaccgtttcctttctgcatatgaattaccaaagcacagagcttggacaatgcaattgttggctgtggggtgcttatctctggcagccaaaatggaagagactgatgtccctttctctcttgatttgcaggtgggtgaatctaagtatatatttgaggctaaaacaatacagagaatggagcttctggtgctgagcacattgagatggagaatgcaggcaattaccccattttccttcattgaccatttcctttacaagatcaatgatgatcaaagtccaattggagcttcaattttgcaatccatccagcttatactgagcactgtaagaggaattgacttcttagaattcagaccctcagagattgcagcagcagtggcaatatctgtggtgggggagggccaaacagtgcacactgagaaagcaatttctgttctgattcagcttgtggaaaaggagagggtcttgaagtgtgttaaaatgatccaagagctggcatcaaatagtggtggttctgccaagggtgctagtgcttctgtttctgtccctagcgtgcccgaaagcccactaggggtgttggtcactgcatgcttcagctacaaaagtgatgacacaaatgctgcttcatatgcaaattcttcacataacattagtccagatgctaaaaggaggaagctaaacaaaacctttggataatagtcattgtggcctgtgattttcaacgtcattcctaggatgcctttacttaaaaaaataagatgttatgtgctttgaaggtgccccctcaagggaatacccaatgaaggaagtaggaatgtagatagggaaagtgaaaaaataaaaaaccatgcataaaagggtgccaaaaagataaaggtggatcgtgactagtgggagatttttaagggatggaatcaacaaatttcatgctccaagccggatgtgaccactcaacaccagctgttaaatattttataggtctttttaacagctataaaagaggtagtgaaagaggagggaataagaaagaaggactagtgtatttgtatgtgtaagtacattttgtctttttacttttaaatgagggagttaaatagaaacccataaggcagaaaaaaaaaaaaaacaaaacaaaataagatgcagagctactagtattgagaaatatttgcggcattc

SEQ ID NO: 22737 - protein, 370 aa, Glycine max
FFCPKNNKLLIFFPQMAPSFDCVSSLLCAEDNSIFDENDYGGSVEVLEDAWQDPRYRRNLSQSENLDVPNGFFPLQSDECLRLMVEKEWDHLPNGDYVNRLRSGDLDFGARKEAIDWIEKVQQHFGFGPLCAYLSINYLDRFLSAYELPKHRAWTMQLLAVGCLSLAAKMEETDVPFSLDLQVGESKYIFEAKTIQRMELLVLSTLRWRMQAITPFSFIDHFLYKINDDQSPIGASILQSIQLILSTVRGIDFLEFRPSEIAAAVAISVVGEGQTVHTEKAISVLIQLVEKERVLKCVKMIQELASNSGGSAKGASASVSVPSVPESPLGVLVTACFSYKSDDTNAASYANSSHNISPDAKRRKLNKTFG

SEQ ID NO: 22738 - protein, 355 aa, Glycine max
MAPSFDCVSSLLCAEDNSIFDENDYGGSVEVLEDAWQDPRYRRNLSQSENLDVPNGFFPLQSDECLRLMVEKEWDHLPNGDYVNRLRSGDLDFGARKEAIDWIEKVQQHFGFGPLCAYLSINYLDRFLSAYELPKHRAWTMQLLAVGCLSLAAKMEETDVPFSLDLQVGESKYIFEAKTIQRMELLVLSTLRWRMQAITPFSFIDHFLYKINDDQSPIGASILQSIQLILSTVRGIDFLEFRPSEIAAAVAISVVGEGQTVHTEKAISVLIQLVEKERVLKCVKMIQELASNSGGSAKGASASVSVPSVPESPLGVLVTACFSYKSDDTNAASYANSSHNISPDAKRRKLNKTFG

SEQ ID NO: 22739 - protein, 287 aa, Glycine max
MVEKEWDHLPNGDYVNRLRSGDLDFGARKEAIDWIEKVQQHFGFGPLCAYLSINYLDRFLSAYELPKHRAWTMQLLAVGCLSLAAKMEETDVPFSLDLQVGESKYIFEAKTIQRMELLVLSTLRWRMQAITPFSFIDHFLYKINDDQSPIGASILQSIQLILSTVRGIDFLEFRPSEIAAAVAISVVGEGQTVHTEKAISVLIQLVEKERVLKCVKMIQELASNSGGSAKGASASVSVPSVPESPLGVLVTACFSYKSDDTNAASYANSSHNISPDAKRRKLNKTFG

SEQ ID NO: 22740 - DNA, 2061 bp, Glycine max
tttatgttcaaagcatttcttttgggcttctgacccaaataattcctcctaacgattcaacccatttcaaacaatctgtaatagtgttataggatagatgaatcagaagacaacgttgcatggaaagcaattggatactgcggacctgatccagaattcaaagctcggttgaagagccactttttagatggaacatctaaaggaggacaagaggataaggaagatgaagatgctgaagaggtgataggaccactttacaaaggtctagtccatctcaattacccacgagacatcactgcagatgctctaaaacgactcggattccctgtatcggtcatccgtcagaagcataaagctgctgcaaacttatcatctccttctttggtgatacaatgtgatgcagtggtggttggttctggctcaggaggtggagtgatagctggtgttcttgcaaaagctggttacaaagtgttggtgttggagaaaggaggttattctgctaggaacaatctttctcttcttgaaggaccaaccatggatcaaatgtacctcaatggtggtctggttgcaagtgatgatatgggtgtgttcattctatcaggatccactgttggtggagggtcagcaatcaactggtctgcgtgcattaaaacccctcagcatgtgtgcaaggagtggagtgataaacatggtctagagctgtttgagagtgaactgtatagagaagccttgaatgctgtttgtgagaagatggaagttcaatctgagattgaagatgaaggattcaacaatgcaatactaagaaaagggtgtcaagaaatggggtatcctgttagtaacattcctaggaattctgcggcagatcactactgtggctggtgttgcatgggttgtaaggatgggaggaagaagggtacctcagaaacatggttagtggacttggtgaaatctggcaatggagcaattcttccaggttgtgaggcaataaaagtcttgcacaagaaaaaggaagggagggatagaaagattgcgcgtggagtggcttttgaatttgaatataaagggactaaagacatttgtgtggtggagtccaaggtcacaattgtagcatgtggagcactgagtactccagcattgcttaaaaaaagtggcttgaggaatcagaacatagggaggaacttgcatcttcatccagtggcgatggcttggggatacttcccagatgcacctgaatctgaggtgtggccagaggcatataagaagagctatgaaggagggataatgacagcaatgtcaactgttgttgcagagtttgaacaatctggatatggtgcagtgatccaaacaccttcattgcatcctggtatgttctcaattgtcacaccatggacttctggaatcgatataagagaccgaatgcgaaagttttcaagaacagctcatatatttgcactggcaagggatcaaggatcagggactgtaaaagccccagatcgtatcagttataagccggcaggtgtagatgaagagaatttaaagaaaggaattgagaaggtgctgagaattctggcagcagctggtgctgaagaaattgggacacatcataataagggaaggaccttaaatgtaaagcaggtaagatatcatgagtttgagaaatttgttaaagaggaaagttcaaggtcattgacagaccttacaacaccattgtgctcggcacatcaaatggggagttgccggatgggttctaatccaaagcaatcagcggtgaatcagacaggggagacatgggaagtggagggcctttatgtggcagatacaagtgtcttcccaacagcattgggtgtgaatccaatggttactgttcaagctattgcttattgcacagcacaatctgttgttgaagtacttagaaggaaaagaactaaatgagaaaaataaaataaaatcttttgctgcttctgttgctccaatggtactgaatattcatggcattgggcagaaaactttgttcaaataataattgtttggtgagaaaagcaatggttgaaattttaacat

SEQ ID NO: 22741 - protein, 465 aa, Glycine max
MDQMYLNGGLVASDDMGVFILSGSTVGGGSAINWSACIKTPQHVCKEWSDKHGLELFESELYREALNAVCEKMEVQSEIEDEGFNNAILRKGCQEMGYPVSNIPRNSAADHYCGWCCMGCKDGRKKGTSETWLVDLVKSGNGAILPGCEAIKVLHKKKEGRDRKIARGVAFEFEYKGTKDICVVESKVTIVACGALSTPALLKKSGLRNQNIGRNLHLHPVAMAWGYFPDAPESEVWPEAYKKSYEGGIMTAMSTVVAEFEQSGYGAVIQTPSLHPGMFSIVTPWTSGIDIRDRMRKFSRTAHIFALARDQGSGTVKAPDRISYKPAGVDEENLKKGIEKVLRILAAAGAEEIGTHHNKGRTLNVKQVRYHEFEKFVKEESSRSLTDLTTPLCSAHQMGSCRMGSNPKQSAVNQTGETWEVEGLYVADTSVFPTALGVNPMVTVQAIAYCTAQSVVEVLRRKRTK

SEQ ID NO: 22742 - protein, 462 aa, Glycine max
MYLNGGLVASDDMGVFILSGSTVGGGSAINWSACIKTPQHVCKEWSDKHGLELFESELYREALNAVCEKMEVQSEIEDEGFNNAILRKGCQEMGYPVSNIPRNSAADHYCGWCCMGCKDGRKKGTSETWLVDLVKSGNGAILPGCEAIKVLHKKKEGRDRKIARGVAFEFEYKGTKDICVVESKVTIVACGALSTPALLKKSGLRNQNIGRNLHLHPVAMAWGYFPDAPESEVWPEAYKKSYEGGIMTAMSTVVAEFEQSGYGAVIQTPSLHPGMFSIVTPWTSGIDIRDRMRKFSRTAHIFALARDQGSGTVKAPDRISYKPAGVDEENLKKGIEKVLRILAAAGAEEIGTHHNKGRTLNVKQVRYHEFEKFVKEESSRSLTDLTTPLCSAHQMGSCRMGSNPKQSAVNQTGETWEVEGLYVADTSVFPTALGVNPMVTVQAIAYCTAQSVVEVLRRKRTK

SEQ ID NO: 22743 - protein, 450 aa, Glycine max
MGVFILSGSTVGGGSAINWSACIKTPQHVCKEWSDKHGLELFESELYREALNAVCEKMEVQSEIEDEGFNNAILRKGCQEMGYPVSNIPRNSAADHYCGWCCMGCKDGRKKGTSETWLVDLVKSGNGAILPGCEAIKVLHKKKEGRDRKIARGVAFEFEYKGTKDICVVESKVTIVACGALSTPALLKKSGLRNQNIGRNLHLHPVAMAWGYFPDAPESEVWPEAYKKSYEGGIMTAMSTVVAEFEQSGYGAVIQTPSLHPGMFSIVTPWTSGIDIRDRMRKFSRTAHIFALARDQGSGTVKAPDRISYKPAGVDEENLKKGIEKVLRILAAAGAEEIGTHHNKGRTLNVKQVRYHEFEKFVKEESSRSLTDLTTPLCSAHQMGSCRMGSNPKQSAVNQTGETWEVEGLYVADTSVFPTALGVNPMVTVQAIAYCTAQSVVEVLRRKRTK

SEQ ID NO: 22744 - DNA, 1776 bp, Glycine max
agaaaaaaaaaaagaaggaaaaaggggctagacggcatgttggactgatttgaccttgaagaaggggtcattcatatgatcccgtgtttgtttgggtctttcttcattcttcaaccaacccattccttcccccacgcgccattctccggccaccgtcgacgacggaacgccgttcaccgcttcatattctcccaaaggcttcggcgaccgcccgtgatggataaagtcttcaacaagctccgcaatttggacgcttacccaaaagtcaatgaagatttttacaaccgcacgctcgccggcggcgttgtcaccgtcgtttccgccgccgtcatgctctttctcttcttttccgagctaagtttatacctctacacagttacggagagtaagcttttggtggatacttcaaggggagataccttgcacatcaattttgatgtcacttttcctgctgttcgatgttcaatactcagcttagatgcaatggatattagtggcgagcagcatcttgacatacgacataatatagtgaagaaaagaattgatgctaatggtaatgtgatagaagagaggaaggatggaattggtgcaccaaagattgagagacccttacagaaacatggtggcagacttggacatgatgaaaagtattgtggttcatgttttggtgcagaagagtcagatgaacactgttgtaattcttgtgaagaagtgcgtgaagcatataggaaaaagggctgggcaatgacaaatatggatttgattgatcagtgtcaaagagagggttatgtgcaaagggtaaaggatgaagaaggtgaaggatgcaatcttcaaggatctcttgaagttaataaagtagcaggaaattttcattttgcaactgggaaaagctttcttcagtctgctatatttctggctgatctgcttgctctacaggataatcattataatattagccatcggatcaacaaattaagttttggtcaccatttccctggattggtaaatcctcttgacggggtaaagtgggtgcaaggacctgctcatggcatgtaccagtatttcataaaggtggtccctacaatatacacagacattagaggccgtgttatccattcaaatcagtattctgtgactgagcatttcaagagttcagagctgggtgttgcagttcctggagttttcttcttttatgacatatctccaatcaaggtcaactttaaagaggaacatattccatttttacatttcctgaccaatatttgtgcaattattggaggtgtatttactgttgcgggaataatagattcatcgatatattatggtcagagaacaatcaagaggaagatggagcttggaaaatttacatgatgtggtcaaattctgcatgagtgctctaatatcctaattgatttgacgtatttggttggctggtgcattgagtatcgtttataatgtggtagcatatgcacataatgccaagggtaagcagagccgtaggttcggttgatgcatgaagtgtattttttggatcatgatttttcctttaatgtgtagcaatttctattaagttgctactttggtgggtttttaatatatggatgaagatgaggaatgcaaagagttgttgggaactttttagatatttttgctgcataatacatgacatggttgattatgcataacatacagttcttgtgttgctgttccccgtgctgtaatctagccaatgttttcattgaacttgaagaatttgaagctgctaagttaggattt

SEQ ID NO: 22745 - protein, 431 aa, Glycine max
MIPCLFGSFFILQPTHSFPHAPFSGHRRRRNAVHRFIFSQRLRRPPVMDKVFNKLRNLDAYPKVNEDFYNRTLAGGVVTVVSAAVMLFLFFSELSLYLYTVTESKLLVDTSRGDTLHINFDVTFPAVRCSILSLDAMDISGEQHLDIRHNIVKKRIDANGNVIEERKDGIGAPKIERPLQKHGGRLGHDEKYCGSCFGAEESDEHCCNSCEEVREAYRKKGWAMTNMDLIDQCQREGYVQRVKDEEGEGCNLQGSLEVNKVAGNFHFATGKSFLQSAIFLADLLALQDNHYNISHRINKLSFGHHFPGLVNPLDGVKWVQGPAHGMYQYFIKVVPTIYTDIRGRVIHSNQYSVTEHFKSSELGVAVPGVFFFYDISPIKVNFKEEHIPFLHFLTNICAIIGGVFTVAGIIDSSIYYGQRTIKRKMELGKFT

SEQ ID NO: 22746 - protein, 384 aa, Glycine max
MDKVFNKLRNLDAYPKVNEDFYNRTLAGGVVTVVSAAVMLFLFFSELSLYLYTVTESKLLVDTSRGDTLHINFDVTFPAVRCSILSLDAMDISGEQHLDIRHNIVKKRIDANGNVIEERKDGIGAPKIERPLQKHGGRLGHDEKYCGSCFGAEESDEHCCNSCEEVREAYRKKGWAMTNMDLIDQCQREGYVQRVKDEEGEGCNLQGSLEVNKVAGNFHFATGKSFLQSAIFLADLLALQDNHYNISHRINKLSFGHHFPGLVNPLDGVKWVQGPAHGMYQYFIKVVPTIYTDIRGRVIHSNQYSVTEHFKSSELGVAVPGVFFFYDISPIKVNFKEEHIPFLHFLTNICAIIGGVFTVAGIIDSSIYYGQRTIKRKMELGKFT

SEQ ID NO: 22747 - protein, 346 aa, Glycine max
MLFLFFSELSLYLYTVTESKLLVDTSRGDTLHINFDVTFPAVRCSILSLDAMDISGEQHLDIRHNIVKKRIDANGNVIEERKDGIGAPKIERPLQKHGGRLGHDEKYCGSCFGAEESDEHCCNSCEEVREAYRKKGWAMTNMDLIDQCQREGYVQRVKDEEGEGCNLQGSLEVNKVAGNFHFATGKSFLQSAIFLADLLALQDNHYNISHRINKLSFGHHFPGLVNPLDGVKWVQGPAHGMYQYFIKVVPTIYTDIRGRVIHSNQYSVTEHFKSSELGVAVPGVFFFYDISPIKVNFKEEHIPFLHFLTNICAIIGGVFTVAGIIDSSIYYGQRTIKRKMELGKFT

SEQ ID NO: 22748 - DNA, 1264 bp, Glycine max
agtagttttaggcacatagggtttggactttggaaaggcttattctccgctctcgtctgaaacctgaaaccctttgttcttcgtcggcggaagcatgtcatcgtcatcatcaagcaacgcctacgacgtgccatgggtagaaaagtaccgtcccagcaaggtcgccgacatcgtcggcaacgaggacgccgtctccaggctccaagtcatcgctcgcgacggcaacatgcccaatctcattttatccggtcctcccggaaccggcaaaaccactagcattctcgccctcgcgcacgagcttctcggaggaccaaattgcaaggaagctgttctcgaactaaacgcttcggatgatagaggaattgatgttgtgaggaacaagatcaagatgtttgctcagaagaaagtcacactgaccccggggaggcacaagatagtgatactggatgaagctgatagcatgaccacaggggcacaacaagcattgagaaggacgatggagatatattcaaacaccactcggtttgcccttgcttgcaatacctcagctaagattattgagcccattcagagtagatgtgccattgtgcgattttcacggttgtctgatcaagagatacttggtcgtctcatggttgtggttcaagctgagaaggttccctatgttcctgaaggacttgaagccatcattttcacagctgacggtgatatgagacaggcattgaataacttgcaagcaacatacagtgggttccaatttgttaaccaagcaaatgttttcaaggtttgtgaccagccacatccactgcatgtgaagaatatggtgcgtaatgtgattgaagggaattttgatgaagcttgttcaggcctcaagcaactgtacgacttgggatattcccccacagatatcatcacgacactctttcgtataataaaaaattatgatatggccgagtacctgaaattggaattcatgaaggaaactggttttgctcatatgagaatttgtgatggagttggttcttatcttcagttgtgtggtctattggctaagctttctctagttcgtgagacagctaaagctgtatgagctggtcctaagtgcaactgagatgtcattatttttaagttttccgatagtgaaatgttctgctgatgtagccttatattttttatgtccagatgctaactgatacatcaatatttcggcttctataaatatgttgtgttttagcttggatcaataactcccacttttgaaaat

SEQ ID NO: 22749 - protein, 331 aa, Glycine max
MSSSSSSNAYDVPWVEKYRPSKVADIVGNEDAVSRLQVIARDGNMPNLILSGPPGTGKTTSILALAHELLGGPNCKEAVLELNASDDRGIDVVRNKIKMFAQKKVTLTPGRHKIVILDEADSMTTGAQQALRRTMEIYSNTTRFALACNTSAKIIEPIQSRCAIVRFSRLSDQEILGRLMVVVQAEKVPYVPEGLEAIIFTADGDMRQALNNLQATYSGFQFVNQANVFKVCDQPHPLHVKNMVRNVIEGNFDEACSGLKQLYDLGYSPTDIITTLFRIIKNYDMAEYLKLEFMKETGFAHMRICDGVGSYLQLCGLLAKLSLVRETAKAV

SEQ ID NO: 22750 - protein, 287 aa, Glycine max
MPNLILSGPPGTGKTTSILALAHELLGGPNCKEAVLELNASDDRGIDVVRNKIKMFAQKKVTLTPGRHKIVILDEADSMTTGAQQALRRTMEIYSNTTRFALACNTSAKIIEPIQSRCAIVRFSRLSDQEILGRLMVVVQAEKVPYVPEGLEAIIFTADGDMRQALNNLQATYSGFQFVNQANVFKVCDQPHPLHVKNMVRNVIEGNFDEACSGLKQLYDLGYSPTDIITTLFRIIKNYDMAEYLKLEFMKETGFAHMRICDGVGSYLQLCGLLAKLSLVRETAKAV

SEQ ID NO: 22751 - protein, 233 aa, Glycine max
MFAQKKVTLTPGRHKIVILDEADSMTTGAQQALRRTMEIYSNTTRFALACNTSAKIIEPIQSRCAIVRFSRLSDQEILGRLMVVVQAEKVPYVPEGLEAIIFTADGDMRQALNNLQATYSGFQFVNQANVFKVCDQPHPLHVKNMVRNVIEGNFDEACSGLKQLYDLGYSPTDIITTLFRIIKNYDMAEYLKLEFMKETGFAHMRICDGVGSYLQLCGLLAKLSLVRETAKAV

SEQ ID NO: 22752 - DNA, 1728 bp, Glycine max
gtttaacccagaataggattcttgtttttgcagaaagtggcaacacaatagttattgtcatctccatagttgtgccaactgttgttgtcgttttgctcatttgtctccgcctctatttaaggaggaggaaggctaggaaaaatcttggaggcaagtccaactatcaatttactgtgacctttttatttccaacttcttcctccatggtttcagagaaatataaatatagagaaaaatctctgtagaaaaagtatatatgatgtatcataatttagagtaattctaccctataagtaataattgaactacatacaatctattaaactgacaaaatatgaaatatttttaataattcctagtacgagtaagtcacggccaggaaggtaagaaattgggagtagtatacactttatgttatggtttcaggaaattatacctcccaatattcaatttcagttatatcatatttgaagtactaaatagtttaaaattgtttcctatgtgaagttaaagaagatgaagttgaggatgaaattaaaattgccgagtcattgcaatttaacttcaacacaatacaagttgctacagaagacttctctgattctaataaacttggacaaggtggatttggagctgtttacagggctctctaatgggcagatgattgcagttaaaaggttgtcaagagattctggccaaggagataccgaatttaagaatgaggtgcttttagtggccaagtttcagcaccgaaatttagttaggctacatggtttctgcttggaaggaaatgaaaggctacttgtctatgaatttgttcctaataaaagccttgattatttcatatttgatccaaacatgaaagcacaattggattggaaaagtcgctacaaaatcattagaggtatagctcgaggccttctatacctccacgaagattctcgactgcgtattatacatcgtgatctcaaagcaagcaacattctcttagacgaagagatgagtccaaaaatagcagattttggcatggcaagactggttttagtggatcaaactcaagcaaatacaagtagaattgttggaacctatggatatatggcaccagaatatgcaatgcatggacaattttcagtgaaatcagatgtcttcagttttggtgtactagttcttgagattttaagcggccaaaataacagtggcattcatcatggggagaatgttgaggatctactaagtttcgcatggagaagttggaaggaggggacagctataaatattgtagatccatcattaaacaacaattcacgaaatgaaatgatgagatgtatccatattggtttactttgtgttcaagaaaatttagcggacagaccaaccatggctaccattatgctcatgcttgatagatattctctaagtctcccaattcccgccaaacctgcattttatatgaacagtagaactgaaagtcttccagacatgcagtcatgggaatacaactgaagggaaacaggatcaagtgaatcgataattaaatcagctcaagaatcagaaaatgaggcttcaataactaagcagtacgctcggtagattctagttaattaggaggatgatattcattcattatctatgcttccgctcttaaaccaaaatacaactattggaactcatgtaatttgatcgtgcaatgtcttgtttaaatacacaacacatcctttgtttaaactg

SEQ ID NO: 22753 - protein, 328 aa, Glycine max
MKLRMKLKLPSHCNLTSTQYKLLQKTSLILINLDKVDLELFTGLSNGQMIAVKRLSRDSGQGDTEFKNEVLLVAKFQHRNLVRLHGFCLEGNERLLVYEFVPNKSLDYFIFDPNMKAQLDWKSRYKIIRGIARGLLYLHEDSRLRIIHRDLKASNILLDEEMSPKIADFGMARLVLVDQTQANTSRIVGTYGYMAPEYAMHGQFSVKSDVFSFGVLVLEILSGQNNSGIHHGENVEDLLSFAWRSWKEGTAINIVDPSLNNNSRNEMMRCIHIGLLCVQENLADRPTMATIMLMLDRYSLSLPIPAKPAFYMNSRTESLPDMQSWEYN

SEQ ID NO: 22754 - protein, 324 aa, Glycine max
MKLKLPSHCNLTSTQYKLLQKTSLILINLDKVDLELFTGLSNGQMIAVKRLSRDSGQGDTEFKNEVLLVAKFQHRNLVRLHGFCLEGNERLLVYEFVPNKSLDYFIFDPNMKAQLDWKSRYKIIRGIARGLLYLHEDSRLRIIHRDLKASNILLDEEMSPKIADFGMARLVLVDQTQANTSRIVGTYGYMAPEYAMHGQFSVKSDVFSFGVLVLEILSGQNNSGIHHGENVEDLLSFAWRSWKEGTAINIVDPSLNNNSRNEMMRCIHIGLLCVQENLADRPTMATIMLMLDRYSLSLPIPAKPAFYMNSRTESLPDMQSWEYN

SEQ ID NO: 22755 - protein, 280 aa, Glycine max
MIAVKRLSRDSGQGDTEFKNEVLLVAKFQHRNLVRLHGFCLEGNERLLVYEFVPNKSLDYFIFDPNMKAQLDWKSRYKIIRGIARGLLYLHEDSRLRIIHRDLKASNILLDEEMSPKIADFGMARLVLVDQTQANTSRIVGTYGYMAPEYAMHGQFSVKSDVFSFGVLVLEILSGQNNSGIHHGENVEDLLSFAWRSWKEGTAINIVDPSLNNNSRNEMMRCIHIGLLCVQENLADRPTMATIMLMLDRYSLSLPIPAKPAFYMNSRTESLPDMQSWEYN

SEQ ID NO: 22756 - DNA, 1982 bp, Glycine max
atgatttctactctctttactctttagtttttttgttttgtatatattaaggcggcacagcacaggcctaagtgggtgtaagtgagtcttgggagtgagtcactcttcctgcagaacccagatctgtagacaatatgggaagcactggtttgctacatttgatatgccttgtcattgctttagtaagtgtgtcgcttgtgcaagcagaagatgcgtataagtatttcacatggacggtgacttatgggactctttatcccttggctagtccccagcaggttattcttatcaatggtcagtttcctgggcctagacttgacttggtaactaatgaaaatgtaattctcaaccttatcaacaagctggacgaaccatttttactcacttggaacggtattaaacaaaggaagaattcatggcaagatggagttttgggaaccaactgccccattcctccaaactcaaattacacatacaagtttcaggccaaggatcagattggcacatatacatactttccatcaactcaactgcataaagcagctggagggtttggagcactcaatgtttatcacagatctgtcatcccaatcccttatccaaaccctgatggagattttactctactcgttggtgattggtacaagaccaaccacaagacactaaggcaaactttagattctggaaaatctcttgcatttcctgatggcctccttattaatggtcaggctcattctaccttcactggtaaccaggggaaaacctatatgtttaggatctcaaatgtaggcttgtcaacctcaattaacttcagaattcagggtcataccctaaaattagttgaggttgaaggatcacacactgttcagaacctatacgattcacttgatgtgcatgttgggcaatcagttgcagtgttagtaaccttgaatcagcctccaaaggactactacattgttgcctcaacaagatttaccgagacacctctcactacaactgcagtactacactatgcaaactctttttcctctgcattaggacccgtgcctgctccccccgttgataaatatgactttgattggtccatgaagcaagctagaacctacagatggaatctgacagcaaatgctgctaggcctaatccacaagggtcattccattatgggaagattactcctacaaaagtaattaagttggccaattcagcacctttgatcaatggaaagctccgttatgctgttaacagtgtctcatatgttaaccctgacacccctctcaagcttgctgattacttcaacattcccggagtcttcagtgtgaatttactccaaaactctccctcaaacggtccaggatacataggcacctcagtgttgcaaacttctctccatgattttattgaggttattttccagaacaacgaaaacaccatgcaatcttggcatcttgatggttatgatttttgggtcattggtcatggtttcggccagtggacagatgctagcagaaaaacatataatctagtggatgccctgactagacacactgcacaggtgtatccaaaatcctggactactatattggtgtctttggataaccaaggcatgtggaacttgaggtctgcaatatgggaaagacaatatcttgggcaacagttctatcttagagtgtggaatgcacagaaaagccttgctaatgaatatgacattcccaataatgttctgctttgtggcaaagctgttggacatcacccttagtatatatatcggtgtattttctggtcatgagggcttgactacacaactagaattatttttcctttttcttaagaaagaaaaggacaatgtgggagaagtcaatttctccaaatttcggatagacttgcgtatatttgagaaaaaagtcttgtattaatttttcgttgctcgtttatgtattaacaattgagttcatacttaatttatttatagctgtaagttgtg

SEQ ID NO: 22757 - protein, 540 aa, Glycine max
MGSTGLLHLICLVIALVSVSLVQAEDAYKYFTWTVTYGTLYPLASPQQVILINGQFPGPRLDLVTNENVILNLINKLDEPFLLTWNGIKQRKNSWQDGVLGTNCPIPPNSNYTYKFQAKDQIGTYTYFPSTQLHKAAGGFGALNVYHRSVIPIPYPNPDGDFTLLVGDWYKTNHKTLRQTLDSGKSLAFPDGLLINGQAHSTFTGNQGKTYMFRISNVGLSTSINFRIQGHTLKLVEVEGSHTVQNLYDSLDVHVGQSVAVLVTLNQPPKDYYIVASTRFTETPLTTTAVLHYANSFSSALGPVPAPPVDKYDFDWSMKQARTYRWNLTANAARPNPQGSFHYGKITPTKVIKLANSAPLINGKLRYAVNSVSYVNPDTPLKLADYFNIPGVFSVNLLQNSPSNGPGYIGTSVLQTSLHDFIEVIFQNNENTMQSWHLDGYDFWVIGHGFGQWTDASRKTYNLVDALTRHTAQVYPKSWTTILVSLDNQGMWNLRSAIWERQYLGQQFYLRVWNAQKSLANEYDIPNNVLLCGKAVGHHP

SEQ ID NO: 22758 - protein, 329 aa, Glycine max
MFRISNVGLSTSINFRIQGHTLKLVEVEGSHTVQNLYDSLDVHVGQSVAVLVTLNQPPKDYYIVASTRFTETPLTTTAVLHYANSFSSALGPVPAPPVDKYDFDWSMKQARTYRWNLTANAARPNPQGSFHYGKITPTKVIKLANSAPLINGKLRYAVNSVSYVNPDTPLKLADYFNIPGVFSVNLLQNSPSNGPGYIGTSVLQTSLHDFIEVIFQNNENTMQSWHLDGYDFWVIGHGFGQWTDASRKTYNLVDALTRHTAQVYPKSWTTILVSLDNQGMWNLRSAIWERQYLGQQFYLRVWNAQKSLANEYDIPNNVLLCGKAVGHHP

SEQ ID NO: 22759 - DNA, 1400 bp, Glycine max
atggcggcgtgatcaccaagtcaagctgtttgtccttgggggtcagcatctgcatctgcatagttgggtgactcaggaatctgaaagctgcaacccaccaacaaagaacaccaccactaagttgttatcttgttctcaaatgtgccgtagaaacaaggacaaataaatcccatgtttctgaagttaccaaagtagaaatgggaaaaaggcaatctttgcgcaacaaagccacccatctcgtatctgtccttctcaaccccatctccgattccgacactctcaatcccaaaacctccaaacacccccaaccgacaccaacacctgcacctccttctggagaagtaggtgtaggtggatcagagacaaatgatgaagagggtaaccgtggtttagttgatgggcctgatacttcatccttcactgcgttcctctattccttattgtcttcctctgacactggagataatgcaaactcctcacgggtgctgagtgatgataataaagctgcagcacctgatcacaaccctttaccagactcatcaacattgaaggaaaatggtgggaggaagagtttgatttctagaagcaagcaatcgcttggtaaggccattcgcaaaatcggtggatttcgccatcaggatcgctgggataatcttgaaatgaaattggatgatgggaatggttctaaggtttctggtgctgttgagatgaggagaattgagcctgtgactgtgcctttggttgatcttccagaaatttctgaaccttcagttctcctttcagatagtataaggaatgttgtctatgtttctctcccgccacttattcatggaaggaaatggctgttgttatacagcacttggaggcatggtatatcactttctactctttaccggagaagcatgctttggcctggattgagtttgctggttgtcggagataaaaaaggagcagtatttggctgtttagttgaagcacctctcagatcatccagcaagaaaaaataccaggtcatgccaaaagacatttattctatgtttccatagattgtttgatagactgatactgttcctgcaattggctgcttgttattttatgttgttgacaatagattttgtacagggaacaaacaatacgtttgttttcacaaatatctctggtcatcctgttatatatcgtccaacaggagtaaaccgctttttcacactttgcaacactgactacatagcaattggtggaggaggtcattttgcgctttatttggatggtgatctgtaaggacactctactttcatgatgctatttttttttttaattttaagaatgttagaattatgaatctataccttacgactatatatagatggtcaagattaaaagttagtagtcatctatgaact

SEQ ID NO: 22760 - protein, 282 aa, Glycine max
MGKRQSLRNKATHLVSVLLNPISDSDTLNPKTSKHPQPTPTPAPPSGEVGVGGSETNDEEGNRGLVDGPDTSSFTAFLYSLLSSSDTGDNANSSRVLSDDNKAAAPDHNPLPDSSTLKENGGRKSLISRSKQSLGKAIRKIGGFRHQDRWDNLEMKLDDGNGSKVSGAVEMRRIEPVTVPLVDLPEISEPSVLLSDSIRNVVYVSLPPLIHGRKWLLLYSTWRHGISLSTLYRRSMLWPGLSLLVVGDKKGAVFGCLVEAPLRSSSKKKYQVMPKDIYSMFP

SEQ ID NO: 22761 - DNA, 1756 bp, Glycine max
gatactgcaggtaatctggcagggacaaatcctattcctcctcctgtgcaagacataattgacccgtcaatggctagggcatctcatcatggtaaatcaaagaatcatacaggcataattgcaggtgttgctggaggagttgttttagtacttgtgattgggctatttgcttttgctgcatcacgtcgtcgcaggcaaggaaaggattctggtacaagtgaagggccatctggctggcttccactttctctttatggtaattcacactctgcagcttctgccaagaccaacacaacaggaagctatgcatcctctctaccatcaaacctttgtcgtcatttctcatttgctgaaatcaaggctgccacaaacaactttgacgaggctttgcttcttggtgtgggaggattcggtaaggtttacaaaggagaaattgatggtggaacaaccaaggtagcaattaaacgtgggaatccactatctgagcagggggtgcatgagttccaaactgagattgaaatgctctcaaaacttcgtcaccgccaccttgtttcactgattggctactgtgaagaaaacactgaaatgatccttgtctatgactgtatggcctatggaacactcagggagcatctgtacaagacccagaaacctccacgtccatggaagcagaggcttgagatatgcattggagctgcccggggtttacactatctacacactggtgctaaacacactattatccaccgtgatgtgaagacaacaaacattttactagatgagaattgggtggctaaggtttctgattttggactgtcaaaaacaggtccagggttggataatacccatgtaagtactgtggtaaagggtagttttgggtacttggatccagaatacttcaggaggcagcaactgactgacaaatctgatgtttactcgtttggtgtggttctctttgaggtattatgcgctcgcccagctttgaaccccacccttgctaaggagcaggtgagtctggctgagtgggcagctcattgctacaagaaaggcattcttgactctatcattgatccttatctaaagggcaagatagcttcagaatgcttcaagaagtttgccgagactgcaatgaagtgcgtggctgaccagggcattgataggccatccatggggtgatgtcttgtggaaccttgaatttgctttgcagctgcaagaaagtgccgaggaaagtggcaacggctttggtgacattcactgtgaagtggagccattatacacagattctaaaggaaaggactccaatccgggttatgatggtaatgcgaccgactccagaagcagtggtatttcaatgagcattggaggtagaagcttggctagtgaagactctgatgggctaacccctagtgctgtgttctcccagataatgaatccaaaaggtcgttaaggttatgcagcagtaacaacactttcaatacatacacagtcaacccactcaagttctgtagtacaatctgctttcaccaaatttgaatgttactcgttattcattttcttaatattgctattcctttgtatgttgtttctaattttttatgattatgtaagttgtaatttgtgaccatgttatataaagattgaagagcaaacatgttgtaacgaggttgttatctgaattatttgaaaaccctttccttcaaagattgataagagacgtgaaaggcaaagaatacgtgtttctttctctctttttttc

SEQ ID NO: 22762 - protein, 391 aa, Glycine max
DTAGNLAGTNPIPPPVQDIIDPSMARASHHGKSKNHTGIIAGVAGGVVLVLVIGLFAFAASRRRRQGKDSGTSEGPSGWLPLSLYGNSHSAASAKTNTTGSYASSLPSNLCRHFSFAEIKAATNNFDEALLLGVGGFGKVYKGEIDGGTTKVAIKRGNPLSEQGVHEFQTEIEMLSKLRHRHLVSLIGYCEENTEMILVYDCMAYGTLREHLYKTQKPPRPWKQRLEICIGAARGLHYLHTGAKHTIIHRDVKTTNILLDENWVAKVSDFGLSKTGPGLDNTHVSTVVKGSFGYLDPEYFRRQQLTDKSDVYSFGVVLFEVLCARPALNPTLAKEQVSLAEWAAHCYKKGILDSIIDPYLKGKIASECFKKFAETAMKCVADQGIDRPSMG

SEQ ID NO: 22763 - protein, 368 aa, Glycine max
MARASHHGKSKNHTGIIAGVAGGVVLVLVIGLFAFAASRRRRQGKDSGTSEGPSGWLPLSLYGNSHSAASAKTNTTGSYASSLPSNLCRHFSFAEIKAATNNFDEALLLGVGGFGKVYKGEIDGGTTKVAIKRGNPLSEQGVHEFQTEIEMLSKLRHRHLVSLIGYCEENTEMILVYDCMAYGTLREHLYKTQKPPRPWKQRLEICIGAARGLHYLHTGAKHTIIHRDVKTTNILLDENWVAKVSDFGLSKTGPGLDNTHVSTVVKGSFGYLDPEYFRRQQLTDKSDVYSFGVVLFEVLCARPALNPTLAKEQVSLAEWAAHCYKKGILDSIIDPYLKGKIASECFKKFAETAMKCVADQGIDRPSMG

SEQ ID NO: 22764 - protein, 218 aa, Glycine max
MLSKLRHRHLVSLIGYCEENTEMILVYDCMAYGTLREHLYKTQKPPRPWKQRLEICIGAARGLHYLHTGAKHTIIHRDVKTTNILLDENWVAKVSDFGLSKTGPGLDNTHVSTVVKGSFGYLDPEYFRRQQLTDKSDVYSFGVVLFEVLCARPALNPTLAKEQVSLAEWAAHCYKKGILDSIIDPYLKGKIASECFKKFAETAMKCVADQGIDRPSMG

SEQ ID NO: 22765 - DNA, 999 bp, Glycine max
accatgataggaactccaataagcaaaagccaattgatacgtgcatatcacaaaaactactcttacacaccaaaaaaatcctctatcaccaaactcacctataccctcaaactcaaggccctatagtccaagcaagtgagtgagtgttacaacttacacagcatggaatatagtcaatatactacttattcagcagaaggtgttgaggcagaaacttacacaagtagctgcaccaccccatcaagatcaaagaagagaaacaacaacaacacaagaaggttcagtgatgaacaaatcaaatcattggagaccatgtttgagtcagagacaaggcttgagcctagaaagaagttgcagcttgcaagagagcttggattgcagccaaggcaagttgctatatggtttcagaacaagagggctagatggaagtcaaagcaacttgagagagactatggcatactccaatccaattataacactttggcttcacgttttgaagctctgaagaaggaaaaacaaacattactaattcagttgcagaagctgaatcatctaatgcagaagccaatggagccaagtcagagatgcacacaagttgaagcagcaaacagcatggacagtgaatcagaaaatggaggcaccatgaaatgtaaagctgagggaaagccaagcccatcatcattggaaagatcagaacatgtacttggtgttctgtctgatgatgacactagcataaaggtggaagactttaacctagaagatgaacatggccttctgaattttgttgagcatgctgatggttccttgacttcaccagaagattggagtgcttttgaatccaatgatctatttggccaatcaaccactgatgattaccaatggtgggacttctggtcctgaatgaaacagaataaccaaaattttgtggaggaaatatatatatatatatatatatatatatatatatatatatatgatgaatgcttcatgtttggttcc

SEQ ID NO: 22766 - protein, 245 aa, Glycine max
MEYSQYTTYSAEGVEAETYTSSCTTPSRSKKRNNNNTRRFSDEQIKSLETMFESETRLEPRKKLQLARELGLQPRQVAIWFQNKRARWKSKQLERDYGILQSNYNTLASRFEALKKEKQTLLIQLQKLNHLMQKPMEPSQRCTQVEAANSMDSESENGGTMKCKAEGKPSPSSLERSEHVLGVLSDDDTSIKVEDFNLEDEHGLLNFVEHADGSLTSPEDWSAFESNDLFGQSTTDDYQWWDFWS

SEQ ID NO: 22767 - protein, 195 aa, Glycine max
MFESETRLEPRKKLQLARELGLQPRQVAIWFQNKRARWKSKQLERDYGILQSNYNTLASRFEALKKEKQTLLIQLQKLNHLMQKPMEPSQRCTQVEAANSMDSESENGGTMKCKAEGKPSPSSLERSEHVLGVLSDDDTSIKVEDFNLEDEHGLLNFVEHADGSLTSPEDWSAFESNDLFGQSTTDDYQWWDFWS

SEQ ID NO: 22768 - DNA, 1093 bp, Glycine max
gaaatttacacgaaggtttcgttcgtctttcacccagaccaacaacatcaagaagaacaaggcaaggaggagaacatataatagcagagagaggaagcgccaagaacgaatacactgttactaattaccctatatttctctcgccagaaactgcacgtgtcgatcttccttcttctcacgctccaaattcaaaccttcagctacgctcttctctccgatctatcgtctttatttctctctttattttctcgggttttccattggaagcgagggttgaattgaggcgaagcatttgcagcatgagcatcgacagccccgagcaaggggacagctaggttttcgaggttccgactgtggagggcgagatttccatgggtgatggaggcgtcgcgtgcatgcatttgcagtatattatggagaggttgcccagttctgagaagactgtttgcggaggcaagagtgggaatggcttcaattccaagttgcgcaagtttgctggcaacgagaggaggaagatgaaaccgaggaagagcgaattggggttggacagagtgagcaagaggagcagcagcagcaacgatgttgagaatggtggcgaagtggagaagcagcagcatgagaaggtgcagaaggaggaagtggaggagggcgaattgggcactttgaagtggccaagagctgacctggagaatggggagtttgtgccggagatgccgccgccaccgaagagaggcgaggttgagaacggggagattgtgagtgagaaatggaaaggaagggagctagagaagggggagattggttctgggaaatggaggaaagaggatgtggaaagaggggagatagtgagtgagaagggtggtaggaaaggggaagctgatagaggtgaatacgggtcgtggagaggaggaaaggatgaaattgagaagggagagttcattccagatagatggtataagggagattatgataacagtagaatccgcaggtaccattcaggtagggacaaaggggggaaaattgaacgtgaacgtgaacgtgaacgtgaaaatacaccttcttctgggagatataccggggatgacttttttag

SEQ ID NO: 22769 - protein, 240 aa, Glycine max
MGDGGVACMHLQYIMERLPSSEKTVCGGKSGNGFNSKLRKFAGNERRKMKPRKSELGLDRVSKRSSSSNDVENGGEVEKQQHEKVQKEEVEEGELGTLKWPRADLENGEFVPEMPPPPKRGEVENGEIVSEKWKGRELEKGEIGSGKWRKEDVERGEIVSEKGGRKGEADRGEYGSWRGGKDEIEKGEFIPDRWYKGDYDNSRIRRYHSGRDKGGKIERERERERENTPSSGRYTGDDFF

SEQ ID NO: 22770 - protein, 232 aa, Glycine max
MHLQYIMERLPSSEKTVCGGKSGNGFNSKLRKFAGNERRKMKPRKSELGLDRVSKRSSSSNDVENGGEVEKQQHEKVQKEEVEEGELGTLKWPRADLENGEFVPEMPPPPKRGEVENGEIVSEKWKGRELEKGEIGSGKWRKEDVERGEIVSEKGGRKGEADRGEYGSWRGGKDEIEKGEFIPDRWYKGDYDNSRIRRYHSGRDKGGKIERERERERENTPSSGRYTGDDFF

SEQ ID NO: 22771 - protein, 226 aa, Glycine max
MERLPSSEKTVCGGKSGNGFNSKLRKFAGNERRKMKPRKSELGLDRVSKRSSSSNDVENGGEVEKQQHEKVQKEEVEEGELGTLKWPRADLENGEFVPEMPPPPKRGEVENGEIVSEKWKGRELEKGEIGSGKWRKEDVERGEIVSEKGGRKGEADRGEYGSWRGGKDEIEKGEFIPDRWYKGDYDNSRIRRYHSGRDKGGKIERERERERENTPSSGRYTGDDFF

SEQ ID NO: 22772 - DNA, 1519 bp, Glycine max
aaaaagaaaatgccattttggagttttatcgacaatttgcttgtgttggtggagatccagtattttctgaatctttatgtaaagaattacaaaaaaaattttttcaacaaagatgtgaattaggaaggattggtcgacgaaatatgaaccaaaagcttaatcttgatatacctcagaacaatacatttttgttaccacgagatatattgacagctgcggatcatttgattggaatgaaatttggaatgggtatacttgacgatataaatcatttgaaaaataaacgtattcgttcggtagcagatctattacaagatcaatttggattggccctggttcgtttagaaaatatggttagaggaactatatgtggagcaattagacataaattgataccgactcctcagaatttggtgacttcaactccattaacaactacttatgaatctttttttggattacatccattatctcaagttttggatcaaactaatccattgacccaaatagttcatgggagaaaattgagttatttgggccctggaggattgacggggcgaactgctagttttcggatacgagatatccaccctagtcactatggacgcatttgtccaattgacacgtcggaaggaatcaatgttggacttattggatctctagcaattcatgcgaggattggtagttgggggtccatagaaagtccattttatgaaatatctgagagatcaaaaagaatacgcatgctttatttatcaccaagtagagatgaatactatatggtagcaacaggaaattctttggcacttaatcgagatattcaggaggaacagactgttccagcccgataccgtcaagaatttcttacgattgcatgggaacaggttcatcttcgaagtatttttcccttccaatatttttctattggagcttctctgattccttttattgaacataatgatgccaatcgagctttaatgagttctaatatgcaacgtcaagcagttccgctttctcagtccgaaaaatgcattgttggaactggattggaacgccaagtagctttagattcaggggtttccgctatagccgaacacgagggaaacatcatttataccaatactgacaggatatttttatttggtaatggagatactctaagcattccattaactatatatcaacgttccaacaaaaatacttgtatgcatcaaaaaccccaggttcgccgaggtaaatgtataaaaaagggacaaattttagcggatggtgctgctacagttgacggcgaactcgctttgggaaaaaacgtcttagtagcttatatgccatgggaaggttacaattttgaagatgctgtactcattaatgagcgtctggtctatgaagatatttatacttcttttcacatacggaaatatgaaattcagactcatatgacaagctatggttctgaaagaatcattaataaaattccacatctagaagcccatttactcagaaaaaaaaaaaaaaaaaa

SEQ ID NO: 22773 - protein, 505 aa, Glycine max
KENAILEFYRQFACVGGDPVFSESLCKELQKKFFQQRCELGRIGRRNMNQKLNLDIPQNNTFLLPRDILTAADHLIGMKFGMGILDDINHLKNKRIRSVADLLQDQFGLALVRLENMVRGTICGAIRHKLIPTPQNLVTSTPLTTTYESFFGLHPLSQVLDQTNPLTQIVHGRKLSYLGPGGLTGRTASFRIRDIHPSHYGRICPIDTSEGINVGLIGSLAIHARIGSWGSIESPFYEISERSKRIRMLYLSPSRDEYYMVATGNSLALNRDIQEEQTVPARYRQEFLTIAWEQVHLRSIFPFQYFSIGASLIPFIEHNDANRALMSSNMQRQAVPLSQSEKCIVGTGLERQVALDSGVSAIAEHEGNIIYTNTDRIFLFGNGDTLSIPLTIYQRSNKNTCMHQKPQVRRGKCIKKGQILADGAATVDGELALGKNVLVAYMPWEGYNFEDAVLINERLVYEDIYTSFHIRKYEIQTHMTSYGSERIINKIPHLEAHLLRKKKKK

SEQ ID NO: 22774 - protein, 458 aa, Glycine max
MNQKLNLDIPQNNTFLLPRDILTAADHLIGMKFGMGILDDINHLKNKRIRSVADLLQDQFGLALVRLENMVRGTICGAIRHKLIPTPQNLVTSTPLTTTYESFFGLHPLSQVLDQTNPLTQIVHGRKLSYLGPGGLTGRTASFRIRDIHPSHYGRICPIDTSEGINVGLIGSLAIHARIGSWGSIESPFYEISERSKRIRMLYLSPSRDEYYMVATGNSLALNRDIQEEQTVPARYRQEFLTIAWEQVHLRSIFPFQYFSIGASLIPFIEHNDANRALMSSNMQRQAVPLSQSEKCIVGTGLERQVALDSGVSAIAEHEGNIIYTNTDRIFLFGNGDTLSIPLTIYQRSNKNTCMHQKPQVRRGKCIKKGQILADGAATVDGELALGKNVLVAYMPWEGYNFEDAVLINERLVYEDIYTSFHIRKYEIQTHMTSYGSERIINKIPHLEAHLLRKKKKK

SEQ ID NO: 22775 - protein, 428 aa, Glycine max
MKFGMGILDDINHLKNKRIRSVADLLQDQFGLALVRLENMVRGTICGAIRHKLIPTPQNLVTSTPLTTTYESFFGLHPLSQVLDQTNPLTQIVHGRKLSYLGPGGLTGRTASFRIRDIHPSHYGRICPIDTSEGINVGLIGSLAIHARIGSWGSIESPFYEISERSKRIRMLYLSPSRDEYYMVATGNSLALNRDIQEEQTVPARYRQEFLTIAWEQVHLRSIFPFQYFSIGASLIPFIEHNDANRALMSSNMQRQAVPLSQSEKCIVGTGLERQVALDSGVSAIAEHEGNIIYTNTDRIFLFGNGDTLSIPLTIYQRSNKNTCMHQKPQVRRGKCIKKGQILADGAATVDGELALGKNVLVAYMPWEGYNFEDAVLINERLVYEDIYTSFHIRKYEIQTHMTSYGSERIINKIPHLEAHLLRKKKKK

SEQ ID NO: 22776 - DNA, 1292 bp, Glycine max
ggttacttggcttgagcattgggagtacgatgagaatgttgtccaccaactttatcgcccgttgctaagttctggtgttggattcggtgctcatagatggattgccaccctccaaaggcagtgtgaatgcttggctatcctaatgtcctcttccatttcaagtgatagtcacacagcattgagccaagctggtaggagaagcatgttgaaattggcacaacgcatgactagcaacttctgttccggggtttgtgcttcgtcagctcgcaagtgggacagccttcacattgggactcttggtgatgacatgaaagtgatgacaaggaaaaacgtggatgaccctggtgagcctcctgggattgtgctcagtgctgcaacttctgtttggatgccagtgtcacggcaaaggctgttcgactttctgcgtgatgaacggctgagaagtgagtgggacatcttgtccaatggtggaccaatgcaggagatggtacatattgccaaaggacaaggacatggaaactgtgtttctcttctccgtgctaatgctgttaacgccaacgatagcagcatgctgattctgcaagagacatggatggacgcgtcatgctcagtggtggtatatgcacctgttgacgtgcaatcactgaacgtggtgatgagtggtggagattctgcatacgttgcactcttgccttcaggctttgcaattcttcccgatggccactgcaacgacaacggctgcaacgggagtctgcagaagggccgcggcagcgacgacggcagtggcggaagccttctcacagtcggtttccaaattctggtgaatagtctcccaacagcaaagctcacagtggagtcagtggacactgtgaataacctcatctcctgcaccattcagaagatcaaagctgcactcagagttgcatgatgccaacaacaacaacaacaacaaccattttgttaatgcagtaataatatgcaaaagttaagttaccttaaaattattattttgtggtcttttttaattttttggtttctaagatgaatattattcggagaggggttatataattcggttgggtgtataggatttataattatatagagtagtggaagaggctgaggcagaaagggtcgcgtaaggaaggtttcgagtcaagaacgaaccgcgatggaggaacttgaattgtgctgtttgcatttgcatgcagcttttctctgctcatagtggttcgggtattgactcgttgacctgcgagttagtctcagtgctcttgtttagataagatgac

SEQ ID NO: 22777 - protein, 308 aa, Glycine max
VTWLEHWEYDENVVHQLYRPLLSSGVGFGAHRWIATLQRQCECLAILMSSSISSDSHTALSQAGRRSMLKLAQRMTSNFCSGVCASSARKWDSLHIGTLGDDMKVMTRKNVDDPGEPPGIVLSAATSVWMPVSRQRLFDFLRDERLRSEWDILSNGGPMQEMVHIAKGQGHGNCVSLLRANAVNANDSSMLILQETWMDASCSVVVYAPVDVQSLNVVMSGGDSAYVALLPSGFAILPDGHCNDNGCNGSLQKGRGSDDGSGGSLLTVGFQILVNSLPTAKLTVESVDTVNNLISCTIQKIKAALRVA

SEQ ID NO: 22778 - protein, 261 aa, Glycine max
MSSSISSDSHTALSQAGRRSMLKLAQRMTSNFCSGVCASSARKWDSLHIGTLGDDMKVMTRKNVDDPGEPPGIVLSAATSVWMPVSRQRLFDFLRDERLRSEWDILSNGGPMQEMVHIAKGQGHGNCVSLLRANAVNANDSSMLILQETWMDASCSVVVYAPVDVQSLNVVMSGGDSAYVALLPSGFAILPDGHCNDNGCNGSLQKGRGSDDGSGGSLLTVGFQILVNSLPTAKLTVESVDTVNNLISCTIQKIKAALRVA

SEQ ID NO: 22779 - protein, 241 aa, Glycine max
MLKLAQRMTSNFCSGVCASSARKWDSLHIGTLGDDMKVMTRKNVDDPGEPPGIVLSAATSVWMPVSRQRLFDFLRDERLRSEWDILSNGGPMQEMVHIAKGQGHGNCVSLLRANAVNANDSSMLILQETWMDASCSVVVYAPVDVQSLNVVMSGGDSAYVALLPSGFAILPDGHCNDNGCNGSLQKGRGSDDGSGGSLLTVGFQILVNSLPTAKLTVESVDTVNNLISCTIQKIKAALRVA

SEQ ID NO: 22780 - DNA, 1404 bp, Glycine max
tttttacttttatttatttttaccgtgcccacattgtaaaatagagaagttaattgataacactacatgccacacatttgagcgcataagtaccaacataagcatgtgatgaagtgggtacgaggggagaagttgaaagttgaaacaacagtcactctctattagattagatcagcagtgtaaggtaattctgtgtgagactggtcctctctgcaaactgtgttttgggacgaagatattgtaattttgcacccttggcttttaacgcacaattggaaacccccacatggcccatatctgaattgacaaaatacaaattagttgcagcacttaaaagcctctttttttcagcaacttcagtgggttctcacaactaattaacaacttgatagtacaatataaacaaatcaaaatgaaataagctaaggtgaatttactttaactcgcgcgtgaaccgatcaacactaaccctataggcatgtaaaaagttgtttcaggtaatgttaaatgaatactgaatgtgtagttgtgtattcttctatatatgttttaaactgatattgctcacgttatataacgttttggctaaactcatatttttatgtattgttcaatcaatgttacatgtttcatggttgtttcaattatttgccagccccctcctgtggtaacagtagttctcaaagttcgaatgcattgtgaagcatgtgctcaagttatacaaaagcgaatccgcaagattcaaggagtagagtcagtggagacaagcttgggaaatgatcaagtcatagtaaaaggtgtgattgacccagcaaagcttgttgattatgtgtacaagaggaccaaaaagcaagcttctattgtgaaagaggaggaaaaggaaaagaaggaagaagaggagaaaaaggaagagaaagaaaaagagaaaaaagaaggtgaagaaagcaagggagaagatgctgaagagggtgatactaaaactgacatcaagcgaagtgaatactggccattaaggtcctacgttgactacgttgactacccttatgctcctcagattttcagtgatgagaacccaaatgcatgcactgtaatgtagatcagtctattgtactaactcggtattttttagtagctgatcaactgaagcaacttgtgctgtgctgagtcgttggagcgtggaataagatgcatggttgtgaatatttcaaggctttgtatatgatttccacggcatccctcagagttggcattctatatatggagatggatgccttgtttcttatgtttatgagctttctacgtatttccttgccaaagggtggctagaatcagttgtgttagtgtgtactgaatttcggcctacaacttcaattatgtacctataatgatggcattaattaatag

SEQ ID NO: 22781 - protein, 164 aa, Glycine max
MYCSINVTCFMVVSIICQPPPVVTVVLKVRMHCEACAQVIQKRIRKIQGVESVETSLGNDQVIVKGVIDPAKLVDYVYKRTKKQASIVKEEEKEKKEEEEKKEEKEKEKKEGEESKGEDAEEGDTKTDIKRSEYWPLRSYVDYVDYPYAPQIFSDENPNACTVM

SEQ ID NO: 22782 - protein, 154 aa, Glycine max
MVVSIICQPPPVVTVVLKVRMHCEACAQVIQKRIRKIQGVESVETSLGNDQVIVKGVIDPAKLVDYVYKRTKKQASIVKEEEKEKKEEEEKKEEKEKEKKEGEESKGEDAEEGDTKTDIKRSEYWPLRSYVDYVDYPYAPQIFSDENPNACTVM

SEQ ID NO: 22783 - protein, 134 aa, Glycine max
MHCEACAQVIQKRIRKIQGVESVETSLGNDQVIVKGVIDPAKLVDYVYKRTKKQASIVKEEEKEKKEEEEKKEEKEKEKKEGEESKGEDAEEGDTKTDIKRSEYWPLRSYVDYVDYPYAPQIFSDENPNACTVM

SEQ ID NO: 22784 - DNA, 1520 bp, Glycine max
aaagcttttattgagccagatctcaaaacagctcatctaaaaattattaacaagtttaatccattctctggattccagaatcccacttacatattgaagtcagcaagagctgtgacagttgatcaaatcaaggcaattattgctgcagagcatactgaaaccaaagaggaaacgtatgacatatttcttctaccccctggggaagaccctgaagcttgtcaatcatatctgagaatgagaaaccgtgatggaaagtacaatctcatgtttgaggaatgggtgacagatagtccattcataatatcacctagaattacttttgaggtcagcgtgcgccttcttggagggctgatggccttgggatacacaattgcagctatcctgaaaagaagcagccatgtctttcatgatgataaagtgaccataaaaactgattggctagaacaacttaatcgcacctatgttcaggttcaagggaaagacagaaactattgtaaatttgtagcagagaaactggggttggatggttcctatgttcctcgcacttacattgaacaaatccagcttgaaaagcttgtaaatgatgtgatggcattgccagatgatcttaagacaaaactcagcatagatgatgacttggtttcaagccccaaagaagccctttccagagcttctgcagataggagaatgaagtatcttaatcgtggtatttcacaatcatattcaactcaaagggacaagattctacctaagctgactaaacttgctataaataacagaagattcgatgcaagagcgctagaatcacctgcaccaattgctaaccaaggagtcatcacacagctttctgatcaaatttccacattaaatgaaagaatggacgaattcacctcccgtattgaagagctgaattcaaagttcgctatcagtaaagattcagcagccagtcaacaaaacttggctttacaggctgaggcctgcaatggctctggccccacttccttctttgtaactggactaagcaatggctcattgactggatcattgctacctaattcttcatcatcttctcaattggctaataaagagtctcccctgatggaagaggtactagttattgcacgaggacaacgtcaaatcatgcatcaactagacactctgagcaattttttgcatgaatactttggagaaaggtcacgcctgggaagaccagaccatacaggaagaatgcgtgaagctgaatccgttgccatccccctggttctgactctggcctttggtgctgttggtgtgcttttgttcagaggttttacatcccaaaaataatgtgtatatattttgtttcttgtcaaattgtcatcactgtgtatgagacaaacttcataagtatatctaaagcataaagggtttatgaaaacaattaccaatctgtgagggactgcctcacattaaagtagtagtatgttggcattcacttaagctgtaatatatagcttctgtatatcttttttttcctcgtt

SEQ ID NO: 22785 - protein, 441 aa, Glycine max
KAFIEPDLKTAHLKIINKFNPFSGFQNPTYILKSARAVTVDQIKAIIAAEHTETKEETYDIFLLPPGEDPEACQSYLRMRNRDGKYNLMFEEWVTDSPFIISPRITFEVSVRLLGGLMALGYTIAAILKRSSHVFHDDKVTIKTDWLEQLNRTYVQVQGKDRNYCKFVAEKLGLDGSYVPRTYIEQIQLEKLVNDVMALPDDLKTKLSIDDDLVSSPKEALSRASADRRMKYLNRGISQSYSTQRDKILPKLTKLAINNRRFDARALESPAPIANQGVITQLSDQISTLNERMDEFTSRIEELNSKFAISKDSAASQQNLALQAEACNGSGPTSFFVTGLSNGSLTGSLLPNSSSSSQLANKESPLMEEVLVIARGQRQIMHQLDTLSNFLHEYFGERSRLGRPDHTGRMREAESVAIPLVLTLAFGAVGVLLFRGFTSQK

SEQ ID NO: 22786 - protein, 363 aa, Glycine max
MRNRDGKYNLMFEEWVTDSPFIISPRITFEVSVRLLGGLMALGYTIAAILKRSSHVFHDDKVTIKTDWLEQLNRTYVQVQGKDRNYCKFVAEKLGLDGSYVPRTYIEQIQLEKLVNDVMALPDDLKTKLSIDDDLVSSPKEALSRASADRRMKYLNRGISQSYSTQRDKILPKLTKLAINNRRFDARALESPAPIANQGVITQLSDQISTLNERMDEFTSRIEELNSKFAISKDSAASQQNLALQAEACNGSGPTSFFVTGLSNGSLTGSLLPNSSSSSQLANKESPLMEEVLVIARGQRQIMHQLDTLSNFLHEYFGERSRLGRPDHTGRMREAESVAIPLVLTLAFGAVGVLLFRGFTSQK

SEQ ID NO: 22787 - protein, 353 aa, Glycine max
MFEEWVTDSPFIISPRITFEVSVRLLGGLMALGYTIAAILKRSSHVFHDDKVTIKTDWLEQLNRTYVQVQGKDRNYCKFVAEKLGLDGSYVPRTYIEQIQLEKLVNDVMALPDDLKTKLSIDDDLVSSPKEALSRASADRRMKYLNRGISQSYSTQRDKILPKLTKLAINNRRFDARALESPAPIANQGVITQLSDQISTLNERMDEFTSRIEELNSKFAISKDSAASQQNLALQAEACNGSGPTSFFVTGLSNGSLTGSLLPNSSSSSQLANKESPLMEEVLVIARGQRQIMHQLDTLSNFLHEYFGERSRLGRPDHTGRMREAESVAIPLVLTLAFGAVGVLLFRGFTSQK

SEQ ID NO: 22788 - DNA, 1769 bp, Glycine max
attgcaagaacagctgcactttatatgaagtttcttatcccgggagtgtttgcttatagcttcttgcaaaacatcttgaggtttctccagacacaatctgtagtaattccattggttgtactctctgctcttccaatgctggttcatattggtgttgcatatggcttggttcagtggtcaggtctgagttttacaggtgcaccagttgctgcttctatttcactatggatatcattgctattattggccttgtatgtaatgtatgctaagaagttcaagcagacatggaaaggattttcaacgcattcatttcgttacgtatttacaaacatgagactagctctgccctctgctgcaatggtatggtatgaattactaataacctttcacttagctagcccttttgattgttcatcttgattggaaaaacaagccaacacaataacaaactcaataatagagtaatagacagtggaaataaattctcccaaatttgcaaaaacctaggagcaccaataaattatagagcgcaaaatagaaattaagaaaaatcagagacacgatttgtttaaagtgaaaaacacctcaatacaagggtaaaaaccatggttcgtccagattcatatatcatcttattacctgatgtttatgttatgcaagtttggagtattgggcttttgaagttttggttttcttagctggactaatgcccgactcacagataaccacttcgttgattgcaatatggtaaggttctaaattctaatagctttatatgttcgaaaacagattcatatattttaatattgttaattaaaatgaaaaaaaaagtttcatataatttactattgttaatcttcaaaaaaatctgcagtataaacacagaattcattgcctacatgatcacttatggtctcagtgcagctgcaagcacaagggtatccaatgaattgggagcaggcaacccggaacgagctaaacatgcgatgagtgtcacactgaagctctctctcctccttggattatgttttgttttggcacttggatttggtcacaatatctggattcagtttttcagcgacagttctacaattaaaaaggagtttgcttcagtgacacccttgcttgccatttctatattacttgatgccatccaaggtgtcttgtcaggggtgtccagaggatgtggctggcagcacttggctgcttacattaaccttgctacattttatcttattggtttgccaatatcatgtttcctaggatttaagaccaatttgcagtacaagggtttatagattggtctgatttgtgggttactttgtcaaagtgggactctcttccttttcataaggcgtgccaaatggactaaattggatctctctagggacaatgataaagaacggcctcttgttgtttaactgaatggaattggacttatggtaaaaaaaaaagaaaaaggtttgcattctattatgcagaagtttatcagatagggtgaacactgaacatgattttggtgaagcgtttcttgcttatattcattttgagaaagtgctcacacttttttttatattttatttgggagtgttggtgagttgcagagagtaaatcttggcatataatgtaacagtctcacgggaacacatcaagaatagatggggagtaatgtatcccaccgtgaaaagaatactataaaaaaactaggaaactacgtgtaattgacaatggagaaccatatgattgatgatagattattttctcgcgtg

SEQ ID NO: 22789 - protein, 159 aa, Glycine max
MKKKVSYNLLLLIFKKICSINTEFIAYMITYGLSAAASTRVSNELGAGNPERAKHAMSVTLKLSLLLGLCFVLALGFGHNIWIQFFSDSSTIKKEFASVTPLLAISILLDAIQGVLSGVSRGCGWQHLAAYINLATFYLIGLPISCFLGFKTNLQYKGL

SEQ ID NO: 22790 - protein, 139 aa, Glycine max
IARTAALYMKFLIPGVFAYSFLQNILRFLQTQSVVIPLVVLSALPMLVHIGVAYGLVQWSGLSFTGAPVAASISLWISLLLLALYVMYAKKFKQTWKGFSTHSFRYVFTNMRLALPSAAMVWYELLITFHLASPFDCSS

SEQ ID NO: 22791 - protein, 132 aa, Glycine max
MITYGLSAAASTRVSNELGAGNPERAKHAMSVTLKLSLLLGLCFVLALGFGHNIWIQFFSDSSTIKKEFASVTPLLAISILLDAIQGVLSGVSRGCGWQHLAAYINLATFYLIGLPISCFLGFKTNLQYKGL

SEQ ID NO: 22792 - DNA, 1231 bp, Glycine max
attctcttctttgattcgaataagttctccggccccattcctccctcactctccgctatctccggcctccgcttcctcatgactctttatgctctccaatgaattgagatgagggatatgagacaataggttcccaagttttcgtggttctccgaatcatagagatggaacgcgtctctgaatttcctcacaaaaaggatacagcagtaaagttttcttcagcttggtggttgtgcaacatgatgatgaagaagcatccaacaggcaaggttttttttttttttgctttgctgttatgcatatttgtttccttttggtagtaacattgatcttgcctattgaatgttcttttgctattgaatgctcttttctttgttattttgttggttttgttgctccaagttaaagtagttttcgctgctccatggttttgcaacgtcacccgtgaggaagtatccagacattgactcatattcctgcacatcagcaaagggccgcactcttccattccacccttcccctgcaacgtaaatgccacaatcatttggactccgttagtttctctcaattcccttcgttttatctttttgtcatttgattcaacaacttctcttgatttatatcaatttttgtctcttttaattatgggtctcaccaccccaattccgtgtttctttctaattttgtatccgttttttacaatctgggaactttttgtgtaacccaagcagtgaaaagtgttgtttacatgttttgttgctgagaacggtttaattatagagaaggagcaatgatacatcgagaaggtttagaagggtgcaagcgaaacacaaagcaatgaacaatatcaatgattatgcagaatccctctttcagttgtgctcagaaaatggtgcggggccagaaagagatgaacttgattttgagtttttgggaaacaaaacaggagagccttatttgattcagactaatgtatacaagaatgggactggtgggcgtaagatgaggcacatgctttggtttgaccccacagaggactaccacacctattccattcacgagggaagaattagaatgatatcatgttaaaaaggcatttgcttagttgattctaactaactaactgttatgtaattttaattttttgagttatttgctgctagctaggggacttattaggaaataattgaacatcaacatgtcatttgaaccttatgatcagaattgaaat

SEQ ID NO: 22793 - protein, 83 aa, Glycine max
MNNINDYAESLFQLCSENGAGPERDELDFEFLGNKTGEPYLIQTNVYKNGTGGRKMRHMLWFDPTEDYHTYSIHEGRIRMISC

SEQ ID NO: 22794 - protein, 51 aa, Glycine max
MERVSEFPHKKDTAVKFSSAWWLCNMMMKKHPTGKVFFFFALLLCIFVSFW

SEQ ID NO: 22795 - DNA, 1494 bp, Glycine max
attagaatcttggaatatactaatagacatgaatatttttataaatattaatagtagattatataacaacttgaaatttattgcagagatctaaattgtggtaattttaaggtaaccgaaaatgcacacttggtttctcaaaaacaattctctgatttctctctttctgtatctctatcatctctctttcttttcaattatacattttatttctgagtagctacatctaccttgttgcagaacttctaggtctgaaaacaggttatttcagtttaagacaaattaaagctgctactaataactttgacccagcaaataagataggtgaaggaggctttggaccagtattcaagggtgtactatcagatggtgctgtgattgctgttaagcagctctcctccaaatcaaagcaagggaatcgtgaattcatcaatgaaataggcatgatatctgctttgcagcatccaaaccttgtgaaactttatggctgctgcattgaaggaaaccagctgctgctagtatatcagtacatggagaacaatagtcttgctcgtgcactttttggtaaagaacatgagaggatgcaattggactggcccagaagaatgcaaatttgtctgggtatagcaaagggcttagcttatcttcataaggaatcaaggttgaaaatagtgcacagggatattaaggcaaccaatgtcttacttgataaacatctgcatgccaagatctctgactttggtttagccaaacttgatgaagaagagaatactcatatcagcacaagaatagctgggacaattggttacatggctcctgagtatgctatgaggggttacttgactgacaaagcagatgtctatagctttggaattgtagctttagagattgttagtggaaagagcaacacaaattataggccaaaggaggagtttgtatatcttttagattgggcctatgttctccaagagcaaggaaaccttctggagctggtggatccaagtcttggttcaaagtactcctcagaagaggccatgagaatgctgctgttagcactcttgtgcaccaacccttctcccactcttagaccatgtatgtcatcagtagtgagcatgcttgagggaaaaactccaattcaagcaccaataattaaacgcggtgacagtgcagaagatgtaagatttaaagcctttgagatgctatcacaagacagtcaaactcatgtctcttctgcattctcagaagaaagtatagagcaaagaagcaaatcaatggggggaccatggcttgactcctccatatcacttccaagtagaattgattaggcttcaaccgatcaacttattagatattccaattatgtgtgatttgcaagtcggggaagttaactcattaaattttaattcatagttgcttgctatatgtatggtggtttaaaggctattaatggaggtttccaacaaaaggggtaatttcatttggaattttattaag

SEQ ID NO: 22796 - protein, 293 aa, Glycine max
MISALQHPNLVKLYGCCIEGNQLLLVYQYMENNSLARALFGKEHERMQLDWPRRMQICLGIAKGLAYLHKESRLKIVHRDIKATNVLLDKHLHAKISDFGLAKLDEEENTHISTRIAGTIGYMAPEYAMRGYLTDKADVYSFGIVALEIVSGKSNTNYRPKEEFVYLLDWAYVLQEQGNLLELVDPSLGSKYSSEEAMRMLLLALLCTNPSPTLRPCMSSVVSMLEGKTPIQAPIIKRGDSAEDVRFKAFEMLSQDSQTHVSSAFSEESIEQRSKSMGGPWLDSSISLPSRID

SEQ ID NO: 22797 - protein, 264 aa, Glycine max
MENNSLARALFGKEHERMQLDWPRRMQICLGIAKGLAYLHKESRLKIVHRDIKATNVLLDKHLHAKISDFGLAKLDEEENTHISTRIAGTIGYMAPEYAMRGYLTDKADVYSFGIVALEIVSGKSNTNYRPKEEFVYLLDWAYVLQEQGNLLELVDPSLGSKYSSEEAMRMLLLALLCTNPSPTLRPCMSSVVSMLEGKTPIQAPIIKRGDSAEDVRFKAFEMLSQDSQTHVSSAFSEESIEQRSKSMGGPWLDSSISLPSRID

SEQ ID NO: 22798 - protein, 247 aa, Glycine max
MQLDWPRRMQICLGIAKGLAYLHKESRLKIVHRDIKATNVLLDKHLHAKISDFGLAKLDEEENTHISTRIAGTIGYMAPEYAMRGYLTDKADVYSFGIVALEIVSGKSNTNYRPKEEFVYLLDWAYVLQEQGNLLELVDPSLGSKYSSEEAMRMLLLALLCTNPSPTLRPCMSSVVSMLEGKTPIQAPIIKRGDSAEDVRFKAFEMLSQDSQTHVSSAFSEESIEQRSKSMGGPWLDSSISLPSRID

SEQ ID NO: 22799 - DNA, 1235 bp, Glycine max
gatagtaataagtacttaagaattccatttagggacttcccaaacacgtcactaatcgtatcaacaattcaccatgcgcttgagctgcaatggatgccgcgttctccgcagagggtgcaccactgagtgccccattcgcatctccctccaatggatcaattcccctaactcccaatccaacgcaaccctcttccttgcaaagttctatggccgccaaggcctcctcaccctcctcaccaacgctccctcacaactacaacaagccgttttaaaatctttgctttacgaagcatgcggtcgaatagtgaacccggttctcggctcgaccgggttgctctccaccgggaattggcatttgtgcgaagccgcggtcaaagccgttcttaatggcgcgccgattgagcaggctcctttggacggcgccacaagcctgcagctcaaggcttgtaatattcgccacgtggcaaagagtgataaatcgtgcggctctgatacacttcgcaaggtgaagtctcgcaccaccacgttcaagcgccgagccgcaaagtccagagtcgagtcagttgtggctgagttggctgaaagcgagttagatggtcatggttcgatgagtcatgactcaggatccggggtgactcggatgagtgagaacaaaatcgttggaggggaagccgatagcggctccgtgcagagtgtggggccggcacgagccgatggtggagaaatggaacttcaattaacattggggtggggtccactgaagagacaatgatgacgccacgtgtagggcttgatctctctggctagtagggttggtgttagctagtggtgaaatatgttttttttatcttcaccccgtttagttatatgataatatttttgaatttttcacatatacatcgtgaaaattgtttgtaggagcattttttttatattataaattacaaaaaaaaaaaaagttagccacagcctgggaaggttttaccaaaggtgactggcagaatgaagtaaacgtccgtgacttcattcagaaaaactacactccgtacgagggtgacgagtccttcctggctggcgctactgaagcgaccaccaccctgtgggacaaagtaatggaaggcgttaaactggaaaaccgcactcacgcgccagttgactttgacaccgctgttgcttccaccatcacctctcacgacgctggctacatcaacaagcagcttgagaaaatcgttggt

SEQ ID NO: 22800 - protein, 232 aa, Glycine max
MRLSCNGCRVLRRGCTTECPIRISLQWINSPNSQSNATLFLAKFYGRQGLLTLLTNAPSQLQQAVLKSLLYEACGRIVNPVLGSTGLLSTGNWHLCEAAVKAVLNGAPIEQAPLDGATSLQLKACNIRHVAKSDKSCGSDTLRKVKSRTTTFKRRAAKSRVESVVAELAESELDGHGSMSHDSGSGVTRMSENKIVGGEADSGSVQSVGPARADGGEMELQLTLGWGPLKRQ

SEQ ID NO: 22801 - DNA, 1374 bp, Glycine max
aatttttgggaaaagagtgagagagagagaggagtgggaaatcgagaaaccctagtggagccggaagtggaagtgaagagagtaaatgacgatccattcggtggtgatacagaagctgcttagcaccaatgctcaggtgggtcgacgtgttgccgctcaccatttgaaggagttcacctatggcttccgcaacaaaatggccaccatcgactccgacaagaccctcatttgcatgcgcagtgcctgcaacttcatggcctccctcgcccgccacaacggccgcttcatgttcatcaacaccaaccctctcttcgacgaaatcttcgacctcatgaccaagaaggtgggctcctacagcccctccaccaactctctctggcgcaccggcggcttcctcaccaatagcctcagccccaagaagttccgctctcgcaacaagaagctcgtcttcggccccacccagcctcccgattgcatcttcatcgtcgacaccgagcgtaagtcttctgtcatcaacgaggctttcaagcttcaaattcccgtcgtcgccttggtcgactccgccatgcccctcgacgtctataagcgcattgcctatcctgttcccgccaatcattctgtccaattcgtttatttgttctgtaatttgattaccaaaaccttgcttcacgagaaggccaagtctgatgctgccaatcccgatattgatgctcaaatggaagaagctccgcgcaagggcaagggcaagacctatttggataaggtcgacgtaaccgtagttctctacgataatttagctcccttacctcaagatatagaagaaactaagaagcttttggacaagcttgttgttttgaagtttaatggttctcaaggaagaaatatgtgttttgacggtcccaaatctgcaattgatatttgtgatggactgacatatctggatttgatcattaaccagattgagaccctcaattccaagtatggaagcagggttccattgcttcttttcaataaagatgacattcatgatagttctctaaaggttttggagaagtattctaaatcaagtgttgaagtgcacacttttaaacagggtgaagatcgagagttgaaatcattgggtgaatattatagcaaggaggaagtgtatgtcatcctttaaatatgtttctattaaattctattctagactagatgtttatttccatttttgtagagatatctcgtttatgtactgattgattggtattgttattgttatggacatttaaaaaacactgttattaggtattagtgttaccatgatatagtctggatgtttatagcagtaatttaggtgtggagacgaagcttagagtcattgggttaatttat

SEQ ID NO: 22802 - protein, 358 aa, Glycine max
MTIHSVVIQKLLSTNAQVGRRVAAHHLKEFTYGFRNKMATIDSDKTLICMRSACNFMASLARHNGRFMFINTNPLFDEIFDLMTKKVGSYSPSTNSLWRTGGFLTNSLSPKKFRSRNKKLVFGPTQPPDCIFIVDTERKSSVINEAFKLQIPVVALVDSAMPLDVYKRIAYPVPANHSVQFVYLFCNLITKTLLHEKAKSDAANPDIDAQMEEAPRKGKGKTYLDKVDVTVVLYDNLAPLPQDIEETKKLLDKLVVLKFNGSQGRNMCFDGPKSAIDICDGLTYLDLIINQIETLNSKYGSRVPLLLFNKDDIHDSSLKVLEKYSKSSVEVHTFKQGEDRELKSLGEYYSKEEVYVIL

SEQ ID NO: 22803 - protein, 321 aa, Glycine max
MATIDSDKTLICMRSACNFMASLARHNGRFMFINTNPLFDEIFDLMTKKVGSYSPSTNSLWRTGGFLTNSLSPKKFRSRNKKLVFGPTQPPDCIFIVDTERKSSVINEAFKLQIPVVALVDSAMPLDVYKRIAYPVPANHSVQFVYLFCNLITKTLLHEKAKSDAANPDIDAQMEEAPRKGKGKTYLDKVDVTVVLYDNLAPLPQDIEETKKLLDKLVVLKFNGSQGRNMCFDGPKSAIDICDGLTYLDLIINQIETLNSKYGSRVPLLLFNKDDIHDSSLKVLEKYSKSSVEVHTFKQGEDRELKSLGEYYSKEEVYVIL

SEQ ID NO: 22804 - protein, 309 aa, Glycine max
MRSACNFMASLARHNGRFMFINTNPLFDEIFDLMTKKVGSYSPSTNSLWRTGGFLTNSLSPKKFRSRNKKLVFGPTQPPDCIFIVDTERKSSVINEAFKLQIPVVALVDSAMPLDVYKRIAYPVPANHSVQFVYLFCNLITKTLLHEKAKSDAANPDIDAQMEEAPRKGKGKTYLDKVDVTVVLYDNLAPLPQDIEETKKLLDKLVVLKFNGSQGRNMCFDGPKSAIDICDGLTYLDLIINQIETLNSKYGSRVPLLLFNKDDIHDSSLKVLEKYSKSSVEVHTFKQGEDRELKSLGEYYSKEEVYVIL

SEQ ID NO: 22805 - DNA, 1039 bp, Glycine max
aacaattcaagaaaactaatcatgaacttgaggtttgtgatagggatatagccaatgtgcttgtgtgaatgcttattctggaaattaaggtttaatttttaactgaccaattatttcaaatcactttgtaagtgctttacctttctgcaatcatgtttatctttcccccttacaactgggagctgtaaaggggattgtaggtctcaaagatacttaatggaaatataaaaaactgagtttaatttattacttgtatgggagaatatgtgcatgctgttgctttggttcttgggagtttttcctttatagaattcccattctcattggttttctttctcaatcatttttcctcaacagtcaacatctgctctataacgggcatatggctccatccttctattgatggttccattgattctttatggcaggaaacgtttatttagcttgatcaatgatcttcctactgtttttgaagttgtgactgagaggaagccagtaaaggacaagcccactgcagacagtggaagcaagtctagaggcagcaccaagagatcaagtgatgggcaagttaagagcaacccaaagtttgcagatgatggttatgaagacgaggatgatgagcacagtgaaaccctttgtgggagctgtggcggaaattacaatgcagatgaattttggattggctgcgatatatgtgagaggtggttccatgggaaatgtgtgaagatcactcctgcaaaagctgagagcataaagcaatacaaatgtccatcatgcagcttgaggcgaggcaggccctaagccgaaggcaaaatgtgaagtgaataatgctgtttcatggccgacaaagatactgtaatattgttgtatcttttatagaagttcttgtaaacggtatagtatctatgtctgatcataatctttcagattaagttaatttcttctaccaagattaatcatcagtgtatgttatataattttatagaatagaattctatacattttatttttgtctattaatctatattttgcttgaatt

SEQ ID NO: 22806 - protein, 132 aa, Glycine max
MVPLILYGRKRLFSLINDLPTVFEVVTERKPVKDKPTADSGSKSRGSTKRSSDGQVKSNPKFADDGYEDEDDEHSETLCGSCGGNYNADEFWIGCDICERWFHGKCVKITPAKAESIKQYKCPSCSLRRGRP

SEQ ID NO: 22807 - DNA, 1141 bp, Glycine max
gagccatacaaaaggtctcaaaaactgcggttcctgagtagagaggtttgtttgttgtcgtttgagaggattcgatcaagcgaatcttgttttcgaagctcaaattgaattgaacagtaaattcctggaagggaacgaagcagaaaatgggagacacaaaccacgcgtccaccgtcgatgacgatttgcttctcaaaaacttcttcgccgaagttagcgaagttgaaagagacaacgaagtgcttaggattctctcttgttttaagttgaatccatttgagtatctaaacctaccatttgattcatcaattgatgatgtgaaaaagcagtaccgcaagttatcattaatggttcacccggataaatgtaagcatccacaagcaaaggaggcttttggagcattagcgaaagctcaacagttactaatggatcaaaatgaaagagattatattcttagccaagttaattcagctaaagaagaacttagagcaaagaggaagaagcagctgaagaaagatacagcttcaaaaatgaaatctttggttgaagagggaaaatatgacaaacagtatgaacaatcagaggaattccggcaggagctcaaagtcaaagttcgtgaactattaacagaacaagaatggaggagaagaaaaatgcaaatgaggatatctgaggaggaaggcagattaaaaagggatgaagaggaacagaaagaaatgtggaaaagaaagcgtgaacatgaggaggaatgggaaggaacacgagaaaagagggtatccagttggagagattttatgaagggtggaaagaagaataagaaaggagaaattcggccaccgaagctgaagacagaagatcccaacaaatcctacgttcaaaggcctgtaaaaagaggttaggggttctgccgttgagtttgaagatcacagcaatcaattgaaaccaggagttcgagagaacttatttatgcaggccatcttttgtgtatcagttagatacttttaaacagatttattactggagtcatttgaggcatgttaatggtgtagacctccgacgaatgactctatccactttgcatcccaatactgataaataggaattactggtcatccgcagcgagccattttagtgttaggtt

SEQ ID NO: 22808 - protein, 250 aa, Glycine max
MGDTNHASTVDDDLLLKNFFAEVSEVERDNEVLRILSCFKLNPFEYLNLPFDSSIDDVKKQYRKLSLMVHPDKCKHPQAKEAFGALAKAQQLLMDQNERDYILSQVNSAKEELRAKRKKQLKKDTASKMKSLVEEGKYDKQYEQSEEFRQELKVKVRELLTEQEWRRRKMQMRISEEEGRLKRDEEEQKEMWKRKREHEEEWEGTREKRVSSWRDFMKGGKKNKKGEIRPPKLKTEDPNKSYVQRPVKRG

SEQ ID NO: 22809 - protein, 183 aa, Glycine max
MVHPDKCKHPQAKEAFGALAKAQQLLMDQNERDYILSQVNSAKEELRAKRKKQLKKDTASKMKSLVEEGKYDKQYEQSEEFRQELKVKVRELLTEQEWRRRKMQMRISEEEGRLKRDEEEQKEMWKRKREHEEEWEGTREKRVSSWRDFMKGGKKNKKGEIRPPKLKTEDPNKSYVQRPVKRG

SEQ ID NO: 22810 - protein, 157 aa, Glycine max
MDQNERDYILSQVNSAKEELRAKRKKQLKKDTASKMKSLVEEGKYDKQYEQSEEFRQELKVKVRELLTEQEWRRRKMQMRISEEEGRLKRDEEEQKEMWKRKREHEEEWEGTREKRVSSWRDFMKGGKKNKKGEIRPPKLKTEDPNKSYVQRPVKRG

SEQ ID NO: 22811 - DNA, 443 bp, Glycine max
tcattgccacatacaagaacttcgagataaatgcgtgtgagtgtcccgtgtcagtggctgcaatggataatgctaagaagtgcaccagcagtgaggggaataagtattggtgggatgagcctaatttggctgaactcaacttgcaccagagccaccagcttatgtgggttagggcaaggcacattttctatgactattgcactgacactgctaggttcccagtcacgcctgctgagtgtgtccatcaccgtcacacctgagcagacttagtgattagtctaaactttattttgttataacttatgggaagttatgaaaataggattggggcataagaaaaaaatggtgggtggtgaacaaagttgtggaacatgtccttcatgtttctgattgtaatatatattgccacaacattaatgtgaattgttggtttttcttcttgt

SEQ ID NO: 22812 - protein, 85 aa, Glycine max
IATYKNFEINACECPVSVAAMDNAKKCTSSEGNKYWWDEPNLAELNLHQSHQLMWVRARHIFYDYCTDTARFPVTPAECVHHRHT

SEQ ID NO: 22813 - protein, 79 aa, Glycine max; identical to SEQ ID NO: 13811

SEQ ID NO: 22814 - protein, 66 aa, Glycine max
MLRSAPAVRGISIGGMSLIWLNSTCTRATSLCGLGQGTFSMTIALTLLGSQSRLLSVSITVTPEQT

SEQ ID NO: 22815 - DNA, 1053 bp, Glycine max
aaaaatcacttaggcccagttcccccttaaaccctattcgccgcaataaaaccttctaggtcgaagcaataaaacgccggagacagaggtagtttccacgacggtgcaggtcgcgacacgaaggggcttcttgcggcgtgagatcgtgcgattataccgatcctaacagagtgagatttcagggttacataatgaccaagaagaagaaacaaaatggggttgttgttggagagggtgatggtgttggtggtgttgtagatttggagtctgtcatacacaaccacgctctttttttcgacaagttgattgaattgattcccgccaagttctatctgccaactgatgacaaggagaagccatggtttcagggtctaaacaaggctgcaaaagctaaggcaaagaaagagaccaaggagaatatcaagaagtctcggagggaccgtttagaccctgacaaaccttctgcaactacccttgaccttctcaaggaaagctttggaaaagagaaggtggaccacagtgacgtagagcagggtgcggtggcggttgctaagcctcttgtttctgggatgatgaaaagagatgatgggtctgtgacatatgaagagcttcagcaaaggcttcgtcgcaggctcgaagagtttcgtgcaggtcgtaatactgggaattcggataggaagagggaagaaaggaatgctaggagaggatataaggacaacaaacgcaagagggatggtgaaactgaggaaggcaaccctgtgcgtggtgaattggcggcggcagaggagaaagtgaagaaggatgctgcagaggcctccaaggatcttgtgtttggacatgtcaaacttcagaatgacgaagggaaaaagaagaggaaggtttcaaagcatcaggaactagaaagggctaagaaattggaagaagtgaagaagaaagatcctgagaaggctgaagcttttgctaaaaagcaatcatggaaagcagcaatggatagagcttcaggggttaaggtgcatgatgatccaaaactgttgcataaaagcattcataaag

SEQ ID NO: 22816 - protein, 287 aa, Glycine max
MTKKKKQNGVVVGEGDGVGGVVDLESVIHNHALFFDKLIELIPAKFYLPTDDKEKPWFQGLNKAAKAKAKKETKENIKKSRRDRLDPDKPSATTLDLLKESFGKEKVDHSDVEQGAVAVAKPLVSGMMKRDDGSVTYEELQQRLRRRLEEFRAGRNTGNSDRKREERNARRGYKDNKRKRDGETEEGNPVRGELAAAEEKVKKDAAEASKDLVFGHVKLQNDEGKKKRKVSKHQELERAKKLEEVKKKDPEKAEAFAKKQSWKAAMDRASGVKVHDDPKLLHKSIHK

SEQ ID NO: 22817 - protein, 161 aa, Glycine max
MMKRDDGSVTYEELQQRLRRRLEEFRAGRNTGNSDRKREERNARRGYKDNKRKRDGETEEGNPVRGELAAAEEKVKKDAAEASKDLVFGHVKLQNDEGKKKRKVSKHQELERAKKLEEVKKKDPEKAEAFAKKQSWKAAMDRASGVKVHDDPKLLHKSIHK

SEQ ID NO: 22818 - protein, 160 aa, Glycine max
MKRDDGSVTYEELQQRLRRRLEEFRAGRNTGNSDRKREERNARRGYKDNKRKRDGETEEGNPVRGELAAAEEKVKKDAAEASKDLVFGHVKLQNDEGKKKRKVSKHQELERAKKLEEVKKKDPEKAEAFAKKQSWKAAMDRASGVKVHDDPKLLHKSIHK

SEQ ID NO: 22819 - DNA, 1392 bp, Glycine max
acggtctctccatacaccgccaccacatagaaccactgatcgacacgtttgcgccttcattaagctgaggaatagttgtaacttagggacaatgacgtcttcagtggttgaaggtggacgcgacgaggggaaacacgaaccctcggatttcatcacggaaaccatgaatctgacgtctccaaacctttcacttcttcccagtgaaactgaaacattcttgagcgcagcaatttccctcaaggacaaggtggtggaggagacttggaaccggagagatcaagtggttgatccgacggtgtacacgggtctgttgggcaccgccttcacttgcttgcggtcgtaccaggttaccggttgccggaacgacttgatattatgcagcgatatcattgacacgtgtgtcaccgctgcacgtgcctccctcaggcacgtgacttttttgtgtggtagaggaggcgtttatgcgcttggtgctgtcgttgccaattacatggaggaccttccaaagcgtgacctgtttttgggtctattctttgaggtggcaaaagagagagccctaccagttggaccagaggaaggtggttttggaatgtcatatgatcttctgtatggacgagctggattcttatggggtgcattgtttgtgaacaagcacctaggagatgatgcagtgcccaaagacattttgatgcctattattgatgcagtgttggcgggtggtagagcaggagcatctgatgttgaagactgtccattgatgtatagatggcatggaactaggtacttgggtgcagcaaatggccttgctggtatccttcatgtgctgctacattttccacttcctagagaggatgctgaggatgtcaagggaactttgaggtacctcatgagtaagcgtttccctcacagtggaaactacccctccagtgaagggaatccgagggataagttagtgcaatggggtcatggtgcaactggcatggccatcacattgtctaaagcagcacaggtatttccaaatgacagagaactacgagatgctgcaatagaagcaggagaagttgtatggaagagtggattggtgaagaaggtgggacttgcagatggggtatctggaaatgcctatgccttcctttccctctacagactcactaaagagagcatatacgaagagagagcaaagtcattcgcttccttcatgtatgataatgcaaaatctctggcttctgccaatggctattcactttcccaaggacttgctgggacagtatgcctctggtttgatctacttgcacccgacagctctaggttcccaggttatgaactatagatggttccagtagagatggaaaatgttaggtagacaccaatcataagtgatatgatcttgac

SEQ ID NO: 22820 - protein, 442 aa, Glycine max
RSLHTPPPHRTTDRHVCAFIKLRNSCNLGTMTSSVVEGGRDEGKHEPSDFITETMNLTSPNLSLLPSETETFLSAAISLKDKVVEETWNRRDQVVDPTVYTGLLGTAFTCLRSYQVTGCRNDLILCSDIIDTCVTAARASLRHVTFLCGRGGVYALGAVVANYMEDLPKRDLFLGLFFEVAKERALPVGPEEGGFGMSYDLLYGRAGFLWGALFVNKHLGDDAVPKDILMPIIDAVLAGGRAGASDVEDCPLMYRWHGTRYLGAANGLAGILHVLLHFPLPREDAEDVKGTLRYLMSKRFPHSGNYPSSEGNPRDKLVQWGHGATGMAITLSKAAQVFPNDRELRDAAIEAGEVVWKSGLVKKVGLADGVSGNAYAFLSLYRLTKESIYEERAKSFASFMYDNAKSLASANGYSLSQGLAGTVCLWFDLLAPDSSRFPGYEL

SEQ ID NO: 22821 - protein, 412 aa, Glycine max
MTSSVVEGGRDEGKHEPSDFITETMNLTSPNLSLLPSETETFLSAAISLKDKVVEETWNRRDQVVDPTVYTGLLGTAFTCLRSYQVTGCRNDLILCSDIIDTCVTAARASLRHVTFLCGRGGVYALGAVVANYMEDLPKRDLFLGLFFEVAKERALPVGPEEGGFGMSYDLLYGRAGFLWGALFVNKHLGDDAVPKDILMPIIDAVLAGGRAGASDVEDCPLMYRWHGTRYLGAANGLAGILHVLLHFPLPREDAEDVKGTLRYLMSKRFPHSGNYPSSEGNPRDKLVQWGHGATGMAITLSKAAQVFPNDRELRDAAIEAGEVVWKSGLVKKVGLADGVSGNAYAFLSLYRLTKESIYEERAKSFASFMYDNAKSLASANGYSLSQGLAGTVCLWFDLLAPDSSRFPGYEL

SEQ ID NO: 22822 - protein, 388 aa, Glycine max
MNLTSPNLSLLPSETETFLSAAISLKDKVVEETWNRRDQVVDPTVYTGLLGTAFTCLRSYQVTGCRNDLILCSDIIDTCVTAARASLRHVTFLCGRGGVYALGAVVANYMEDLPKRDLFLGLFFEVAKERALPVGPEEGGFGMSYDLLYGRAGFLWGALFVNKHLGDDAVPKDILMPIIDAVLAGGRAGASDVEDCPLMYRWHGTRYLGAANGLAGILHVLLHFPLPREDAEDVKGTLRYLMSKRFPHSGNYPSSEGNPRDKLVQWGHGATGMAITLSKAAQVFPNDRELRDAAIEAGEVVWKSGLVKKVGLADGVSGNAYAFLSLYRLTKESIYEERAKSFASFMYDNAKSLASANGYSLSQGLAGTVCLWFDLLAPDSSRFPGYEL

SEQ ID NO: 22823 - DNA, 1486 bp, Glycine max
gaaaattataattttgaggagtgagtgatgataacatgaatcggccgatagaagcatagattctatgatgtcataggtttttgttgaacgaacacaacatacagacacctcttcttggaaagtcaaaccaattcaatgagtagctcatggaggttgcaatcatcaccatctaatgcgccgttttaaggagaattttgaccaggctctacagggagacgatgtcatggcaattgttgttactgcggcttggaaaccattggttgctgccatagatggcctagccttgggtgggggcttagaatttgcaatggcatgcaataaccccaattgctcagccaggcttgcctgaacttcagcttggaataatttctggattagtaggaactctgcgacttcctcgtcttgttggtttgacaaaggctcttgagatgatgctgatcgtggtctggttccaagatacgtcaagaaggttgccatccttggtggaggactaatgggctctggaatagcaacaactttaattcttggcagctatcctgtcatattgaaagaagtaaatgagaagttcttagatgctggtatcaataggattaaaggagagaacagattcttatgagttggctctcactagtccctactctcaaggtcgaattgttggagcccatttcttcagtcctgcacatgttatgctgcttctggaaattgtacgtaccaagcagacctctccctaagtgatagttgacgtgttagatgtttcaaagaagataaagaaaactccagtggtggttggaaactgcgcaggatttgctgttaataggatgttcttcccatatacgcaagcaggtctcttgcttgttgaacatggtgcagatgtttatcaaattgatagagtaataaccaaatttaaaatacccatgggacctttcagattggtggaccttgttgggtttggtgtggcgattgctactggcatgcaatttattcagaattttcctgagcgaacatataaatcaatgcttattccccttctccactaagataagagagctggcgaaacaactcgcaaagggttttatttgtatgatgataaacgcaaggctagtcctgatcctgaattgaaaaactatatccagaaggctaggagctttactggtttctccgttgatcctaagcttgtcaagttacaagaaaaggacatcattgaaatgatattctttcctgtggtgaatgaggcttgttgagtccttgatgaaggtattgcagtcaaagcatctgatcttgatatttctgctgtcttgggcatgggttttccaccttagaggggaggtatcctattctggtctgactctcttggatccaagtacatatgttcaagattagagaaatggtcagagttgtatggacaattcttcaaggcttgtgcctacttggctgcaagagctgccaaaggaattccactaatgagtaacctaagctcatttatttc

SEQ ID NO: 22824 - protein, 72 aa, Glycine max
MFFPYTQAGLLLVEHGADVYQIDRVITKFKIPMGPFRLVDLVGFGVAIATGMQFIQNFPERTYKSMLIPLLH

SEQ ID NO: 22825 - protein, 58 aa, Glycine max
MRRFKENFDQALQGDDVMAIVVTAAWKPLVAAIDGLALGGGLEFAMACNNPNCSARLA

SEQ ID NO: 22826 - protein, 52 aa, Glycine max
MLVSIGLKERTDSYELALTSPYSQGRIVGAHFFSPAHVMLLLEIVRTKQTSP

SEQ ID NO: 22827 - DNA, 1138 bp, Glycine max
ttcccagaagtgcttctcccttgcactcaaatcctcacactccacttgggtatgcaaagcactcatgtctcttcaacaacaccccaattcaacacttcttcaacaacacccccaagaacgccaagtccaagcccgtttaattgttgcttctcacaagctcttccttcacaatcacaccccttctgagctagacacttttctttctcttcatggcaccccagatgatgctattcttgatgctgctaactttcttcactcgctaatctcaccacttttcccacctcaggctcaactctctgtggatctcattgcacaacttcttgcaaaggacagactcaactcctttggcttaatggacccttattcccctgatggccctcagagatctattaaggcttatgctatttaccccaaagccacgttcttcaaccatgactgtgttcccaatgcatgcaggtttgactatgtggacagtactaatgatgattatgaacacaacagtactgacattgttattaggttgattgaggatgttgatgaggggaaagaggtttgcatcagctatttcaggattggtagggactattgtacaaggaaaaggatcttgatggaggattatgggtttacttgtggatgtgataggtgcaagattgaagctaattgggatggtgaagaaaacaacagtgaccttccacacgtgcggtttcttagcaagtatgtttgtgagaggaagaattgtgcgggaactatggctcctctgcctccaaaagatgatgtgccatctaatgttctggaatgtaacttctgtggtaattttaagattgatgctgcttaattggcctttaacacctatcagttattatatttcatctttggtagaaatatatatgttgaggttgctcttgtcttttagcattgcctagagaaagtgatattgcaattctgtattttactttgactctgagagtggagtccttgcatgttctcattcacacctcagtttggtggattttgcgtgcaatatggaagatgaattcatgttttttcagcaacaagctcagtttctgagtccagtgttgtttagtgatgttattggaattcagttcctcgttatgttttaaaaaaaaaaaaaaaaaag

SEQ ID NO: 22828 - protein, 277 aa, Glycine max
SQKCFSLALKSSHSTWVCKALMSLQQHPNSTLLQQHPQERQVQARLIVASHKLFLHNHTPSELDTFLSLHGTPDDAILDAANFLHSLISPLFPPQAQLSVDLIAQLLAKDRLNSFGLMDPYSPDGPQRSIKAYAIYPKATFFNHDCVPNACRFDYVDSTNDDYEHNSTDIVIRLIEDVDEGKEVCISYFRIGRDYCTRKRILMEDYGFTCGCDRCKIEANWDGEENNSDLPHVRFLSKYVCERKNCAGTMAPLPPKDDVPSNVLECNFCGNFKIDAA

SEQ ID NO: 22829 - protein, 256 aa, Glycine max
MSLQQHPNSTLLQQHPQERQVQARLIVASHKLFLHNHTPSELDTFLSLHGTPDDAILDAANFLHSLISPLFPPQAQLSVDLIAQLLAKDRLNSFGLMDPYSPDGPQRSIKAYAIYPKATFFNHDCVPNACRFDYVDSTNDDYEHNSTDIVIRLIEDVDEGKEVCISYFRIGRDYCTRKRILMEDYGFTCGCDRCKIEANWDGEENNSDLPHVRFLSKYVCERKNCAGTMAPLPPKDDVPSNVLECNFCGNFKIDAA

SEQ ID NO: 22830 - protein, 160 aa, Glycine max
MDPYSPDGPQRSIKAYAIYPKATFFNHDCVPNACRFDYVDSTNDDYEHNSTDIVIRLIEDVDEGKEVCISYFRIGRDYCTRKRILMEDYGFTCGCDRCKIEANWDGEENNSDLPHVRFLSKYVCERKNCAGTMAPLPPKDDVPSNVLECNFCGNFKIDAA

SEQ ID NO: 22831 - DNA, 1741 bp, Glycine max
gatgatggaagaaacaaagagaagggaaatatcaggaggtgcgagtaccggagccaaacgcgggtgtgtgtgtgtgtgagggagagagagatgcagttccattcagaaactccaaactaaacatccctggcgacaaccttaggaatctcgatcgctgaaaaaacctatgcagccccgaacacactctctgcattccaacttgtttaagtcatgcctttcgattcacccttctctcaataaatttttaatcagattcttggccaccgccacactcataataaagttttgtttttccaaataaagggaatggcgactcctgttgagcctccaaatgggatcagaactgaagggaagcattattattccatgtggcaaaccctgtttgagattgactcaaaatacgttcccatcaagccgattggtcgcggagcatatggaattgtgtgctcttctgtgaatagagagataaatgagaaggttgccatcaagaagatacagaatgcctttgaaaaccgggttgatgccctgaggactttgcgcgaactcaagcttcttcgccaccttcaccatgagaatgtgattgctttgaaggacatcatgatgcctgttcacaggaatagtttcaaggatgtctatctggtttatgaactcatggacacggatttgcatcagattattaagtcttctcaagctttgtctaatgatcactgccagtatttcctctttcagttgctccggggcttgaaatatcttcactccgctaacattcttcatcgtgacttgaaacctgggaatcttctaatcaatgcaaattgtgacctaaaaatatgtgatttcgggctagctcgtactaattgcagcaagaaccagttcatgaccgagtatgttgtcactcggtggtatagggcaccagagctcctactctgctgtgacaactatgggacatctattgatgtttggtcagttggatgtatctttgcagagcttcttggccgaaaaccgattttccctggttcagagtgtctcaaccagctgaagttgattatcaatatccttggtagtcaaagggaggaggatattgaattcattgataacccaaaggcaaagaagtatatcaaatcacttccttattctcctggaacccccctttcgcaactttatcctaatgcgcatccattggcaattgatcttctggcaaagatgcttgttttcgatccaacaaagaggatcagtgtcactcaagcacttcaacacccttacatggcccctctgtatgatcctaactgtgaccctccagccgtcattccaattgatcttgacattgatgaggatctaggggaagagatgataagggacatgatgtggaaagaaatgcttcattaccatcctgaatctgctatggagagtgcagggttgtgctaatgatatttacttcctttcatagttatgttcccttttgttggtgccaggatagttctaatatcataacttgcttcaaataattaggagggctttgtcatcagtgagctccttatatgttctgttttctatttattgaaagcagagagaaacagcaaaaagatgaccatcttaaaaaaaaatgtgttattgctgatgatgcattgtagtctttaaacgccatgttgagagattgattttgtactgaactttgtattgtagttgccttgttttgttgtacataattatgtttctgtgtctttcataaaccattttgtaaatc

SEQ ID NO: 22832 - protein, 371 aa, Glycine max
MATPVEPPNGIRTEGKHYYSMWQTLFEIDSKYVPIKPIGRGAYGIVCSSVNREINEKVAIKKIQNAFENRVDALRTLRELKLLRHLHHENVIALKDIMMPVHRNSFKDVYLVYELMDTDLHQIIKSSQALSNDHCQYFLFQLLRGLKYLHSANILHRDLKPGNLLINANCDLKICDFGLARTNCSKNQFMTEYVVTRWYRAPELLLCCDNYGTSIDVWSVGCIFAELLGRKPIFPGSECLNQLKLIINILGSQREEDIEFIDNPKAKKYIKSLPYSPGTPLSQLYPNAHPLAIDLLAKMLVFDPTKRISVTQALQHPYMAPLYDPNCDPPAVIPIDLDIDEDLGEEMIRDMMWKEMLHYHPESAMESAGLC

SEQ ID NO: 22833 - protein, 351 aa, Glycine max
MWQTLFEIDSKYVPIKPIGRGAYGIVCSSVNREINEKVAIKKIQNAFENRVDALRTLRELKLLRHLHHENVIALKDIMMPVHRNSFKDVYLVYELMDTDLHQIIKSSQALSNDHCQYFLFQLLRGLKYLHSANILHRDLKPGNLLINANCDLKICDFGLARTNCSKNQFMTEYVVTRWYRAPELLLCCDNYGTSIDVWSVGCIFAELLGRKPIFPGSECLNQLKLIINILGSQREEDIEFIDNPKAKKYIKSLPYSPGTPLSQLYPNAHPLAIDLLAKMLVFDPTKRISVTQALQHPYMAPLYDPNCDPPAVIPIDLDIDEDLGEEMIRDMMWKEMLHYHPESAMESAGLC

SEQ ID NO: 22834 - protein, 274 aa, Glycine max
MMPVHRNSFKDVYLVYELMDTDLHQIIKSSQALSNDHCQYFLFQLLRGLKYLHSANILHRDLKPGNLLINANCDLKICDFGLARTNCSKNQFMTEYVVTRWYRAPELLLCCDNYGTSIDVWSVGCIFAELLGRKPIFPGSECLNQLKLIINILGSQREEDIEFIDNPKAKKYIKSLPYSPGTPLSQLYPNAHPLAIDLLAKMLVFDPTKRISVTQALQHPYMAPLYDPNCDPPAVIPIDLDIDEDLGEEMIRDMMWKEMLHYHPESAMESAGLC

SEQ ID NO: 22835 - DNA, 1411 bp, Glycine max
aacacacaaccaaaccctcttgaccttgtgatatctctctcttttaatttctaggatcaaaccaaaaaatggtcttagaagagagtgtagtgcatgatgtgaggctatcctcagttgggccgggccgggccaccgggtcggacgtattccacaacccgggtggcttggacttggccatgaagcttcactaccttagagtggtgtacttctttgatagtgaggctgcacaagacctaaccatcatgaaaattaaggatggcatgttcactttgttcaaccattacttcatcacctgtggccggttccggcgatcggattccggtcgacccttaatcaagtgcaatgattgtggagcaaggttcattgaggccaagtgcaacaaaaccctagatgagtggctagccatgaaggattggcccttgtacaagttgctcgtctctcaccaagtcattggcccagaactatctttttctcctcctgttttgttccaggtgactaaatttaagtgcggcggaatttcattgggtcttagttgggcccacgtattgggggatcctctttcggcttcagaattcattaactcttggggtctaatattgaaaaatatgggcctaaaaatgctttttaacatcccaagatccatcccaacacccggacagcccggacctgaaaaggatccagtttcagcaaaacggatcgacccggtgggagatcattggattccagccaacaacaaaaaaatggagacattctccttccacctaactagctcccagttgaactacttgcaagcacaaatttggggtacaagtcttgaccaaacccctccttttgaatcactatgtgccatgatttggcgttgcatggcccgaattcgaccaggatccgaacccaaaaccgtaactgtgtgtagaagcaacccctataagaggggcaatcatatcattggtaacaaccaagtgatatgcaaggttgatgctgcaagtgaatcctcaattcttgacactgatttgacagttttagctagcatgcttgtggatcaaggtgtggatgagaggaagcaaattgaggaagcagttgagagagaccaaggtgtgagtgatttcttcgtctatggtgtcaacttgacatttctagacttacaagaaaccaatgtgtatgacttgcaattgaagggacacacaccaaagtttgtttactacacccttcaaggtgttggagatgaaggggttgttttggtgtatccattgcccaaaggttctatggagaatggtgttgatgggaagtttctgaccatgatttttccggaggatgaaatggtgaagcttaaatctgagctcaagataattggtcttttgcttgagaataattaagttttaatgagattaaaagcatgtttgactttccgttc

SEQ ID NO: 22836 - protein, 434 aa, Glycine max
MVLEESVVHDVRLSSVGPGRATGSDVFHNPGGLDLAMKLHYLRVVYFFDSEAAQDLTIMKIKDGMFTLFNHYFITCGRFRRSDSGRPLIKCNDCGARFIEAKCNKTLDEWLAMKDWPLYKLLVSHQVIGPELSFSPPVLFQVTKFKCGGISLGLSWAHVLGDPLSASEFINSWGLILKNMGLKMLFNIPRSIPTPGQPGPEKDPVSAKRIDPVGDHWIPANNKKMETFSFHLTSSQLNYLQAQIWGTSLDQTPPFESLCAMIWRCMARIRPGSEPKTVTVCRSNPYKRGNHIIGNNQVICKVDAASESSILDTDLTVLASMLVDQGVDERKQIEEAVERDQGVSDFFVYGVNLTFLDLQETNVYDLQLKGHTPKFVYYTLQGVGDEGVVLVYPLPKGSMENGVDGKFLTMIFPEDEMVKLKSELKIIGLLLENN

SEQ ID NO: 22837 - protein, 398 aa, Glycine max
MKLHYLRVVYFFDSEAAQDLTIMKIKDGMFTLFNHYFITCGRFRRSDSGRPLIKCNDCGARFIEAKCNKTLDEWLAMKDWPLYKLLVSHQVIGPELSFSPPVLFQVTKFKCGGISLGLSWAHVLGDPLSASEFINSWGLILKNMGLKMLFNIPRSIPTPGQPGPEKDPVSAKRIDPVGDHWIPANNKKMETFSFHLTSSQLNYLQAQIWGTSLDQTPPFESLCAMIWRCMARIRPGSEPKTVTVCRSNPYKRGNHIIGNNQVICKVDAASESSILDTDLTVLASMLVDQGVDERKQIEEAVERDQGVSDFFVYGVNLTFLDLQETNVYDLQLKGHTPKFVYYTLQGVGDEGVVLVYPLPKGSMENGVDGKFLTMIFPEDEMVKLKSELKIIGLLLENN

SEQ ID NO: 22838 - protein, 376 aa, Glycine max
MKIKDGMFTLFNHYFITCGRFRRSDSGRPLIKCNDCGARFIEAKCNKTLDEWLAMKDWPLYKLLVSHQVIGPELSFSPPVLFQVTKFKCGGISLGLSWAHVLGDPLSASEFINSWGLILKNMGLKMLFNIPRSIPTPGQPGPEKDPVSAKRIDPVGDHWIPANNKKMETFSFHLTSSQLNYLQAQIWGTSLDQTPPFESLCAMIWRCMARIRPGSEPKTVTVCRSNPYKRGNHIIGNNQVICKVDAASESSILDTDLTVLASMLVDQGVDERKQIEEAVERDQGVSDFFVYGVNLTFLDLQETNVYDLQLKGHTPKFVYYTLQGVGDEGVVLVYPLPKGSMENGVDGKFLTMIFPEDEMVKLKSELKIIGLLLENN

SEQ ID NO: 22839 - DNA, 1223 bp, Glycine max
gacttgttcctccagactgagcacaaccaatcacaacaagaagaagaagaaaaggaagaaaaacaccaaaacgaccacgtagaggaacaagaagaggatgcgcctaataatcccgaacaaagccaaccctccgattccaaggaagtaaccgatgaagacgaagaagaagaagacgaagaagaggaagaagataaacctaaacacgccaaaaaggccaagaagaataaaggacgatcgaacacgttaggtgatgaggtagtaaagaaaagaggtggtggtttttgcaaattatgtagcctgtctccacaacttcaggaattcatgggagctccagaaatggccagaactgaggttgttaagcaattatgggcctatattagggagaaaaatttgcaagacccgaacaacagacggaatataatttgcgatgagcgattgcgttccctttttaatgtcaattccatcaacatgttccaaatgaataaagcattgtcaaagcatatctggccattggattcagatgatgttgttcaggtgaagtccacaccaaaggaaaagcagaagaagcaagagagagatgatgattcagatgaaccaaaaaaaaaggaaaaacggcagaagggaggagggaaatcaggttttcttgctcctcttcagctatccgatgcccttgtaaacttccttggtactggagagagcgagttagcgagaactgatgtcataaaaagaatgtgggattacattaaaggaaacaaccttcaggatccttctgacaagaggaaaataatatgtgacgagaagctgaaagaactctttgatgtcgacaccttcactggcttcactgttacaaaactgctggctcctcattttataaagacagagcagtgagttgcttgtacattgttattcggtcaagcatgggaaggttggggaattttgtttatcaagttagttttttaaggttctttttgtgtcctgttggcaatagaaattagcaaaatgacacattttcagtaaatttttctcgaagattttttatgttatgtgaccttttattttgttttaaattatcctgttttgccacttggcagttgaaaattttgtatatttggttcctgaagctgcaagcacaatattgacttcatattctactctgctgtcatttggcaaaataggagaatactgatattgtatgaagaaaccatgtattttacttttgactc

SEQ ID NO: 22840 - protein, 295 aa, Glycine max
DLFLQTEHNQSQQEEEEKEEKHQNDHVEEQEEDAPNNPEQSQPSDSKEVTDEDEEEEDEEEEEDKPKHAKKAKKNKGRSNTLGDEVVKKRGGGFCKLCSLSPQLQEFMGAPEMARTEVVKQLWAYIREKNLQDPNNRRNIICDERLRSLFNVNSINMFQMNKALSKHIWPLDSDDVVQVKSTPKEKQKKQERDDDSDEPKKKEKRQKGGGKSGFLAPLQLSDALVNFLGTGESELARTDVIKRMWDYIKGNNLQDPSDKRKIICDEKLKELFDVDTFTGFTVTKLLAPHFIKTEQ

SEQ ID NO: 22841 - protein, 188 aa, Glycine max
MGAPEMARTEVVKQLWAYIREKNLQDPNNRRNIICDERLRSLFNVNSINMFQMNKALSKHIWPLDSDDVVQVKSTPKEKQKKQERDDDSDEPKKKEKRQKGGGKSGFLAPLQLSDALVNFLGTGESELARTDVIKRMWDYIKGNNLQDPSDKRKIICDEKLKELFDVDTFTGFTVTKLLAPHFIKTEQ

SEQ ID NO: 22842 - protein, 183 aa, Glycine max
MARTEVVKQLWAYIREKNLQDPNNRRNIICDERLRSLFNVNSINMFQMNKALSKHIWPLDSDDVVQVKSTPKEKQKKQERDDDSDEPKKKEKRQKGGGKSGFLAPLQLSDALVNFLGTGESELARTDVIKRMWDYIKGNNLQDPSDKRKIICDEKLKELFDVDTFTGFTVTKLLAPHFIKTEQ

SEQ ID NO: 22843 - DNA, 1692 bp, Glycine max
acctcaacaaacacaacaacactctctcttctcgctcttggcttttcgctcttcactcactctcattcattcatttccaccgttcatggatccagtaagcgtgtggggtaacacgcccttggcgacggtggatcccgagatccatgacctcatcgagaaggagaagcgccgtcaatgccgcggaatcgagctcatcgcctccgagaacttcacctccttcgccgtcatcgaggccctcggcagcgctctcacgaacaaatactccgagggcatgccgggcaaccgctactacggcggcaatgaatacatcgaccagatcgaaaacctctgccgctcacgcgccctccaagccttccacctcgacgcccaatcctggggcgtcaacgtccagccctactccggctccccggccaacttcgccgcctacaccgccgtcctcaacccccacgaccgcatcatggggctagatctcccctccggcggccacctcacccacggctactacacctccggcggaaagaagatctccgccacctccatttacttcgagagtctcccttacaaggtaaactccaccaccggctacatcgactacgaccgcttggaagaaaaagccctagacttcaggccaaaactcataatctgcggtggcagcgcgtaccctcgcgattgggactacaaacgtttcagggaagtcgctgataagtgcggagcattgcttctctgcgacatggcgcacactagcggccttgtggccgcgcaggaagtgaacagccccttcgagtattgcgacattgtgaccaccacgactcacaagagcttgcggggcccacgtgcggggatgatcttttaccggaagggccccaagccgccgaagaaggggcagccggagaacgcggtttatgatttcgaggacaagattaacttcgcggtgttcccttcgctgcagggtgggccccacaaccaccagatcggtgctctcgttgtggcgctgaagcaggccgcgtcgcccgggtttaaggcctacgcgaagcaggttaaggcgaacgccgttgcgcttggaaaatacttgatggggaaagggtacagccttgtcactggcggaacggagaaccatcttgttttgtgggatctgagacctcttggattgactgggaataaggtggagaaactctgtgatctctgtaacattactgttaacaagaacgctgtttttggtgatagcagtgccttggcccctggtggagtgcgaattggtgcccctgccatgacttctaggggtttggttgaaaaagactttgagcagattggtgagttccttcaccgtgctgtgactctcacactggagatccagaaggagcatggcaaacttctcaaggatttcaacaagggtctcgtcaacaacaaggctattgaagatctcaaagctgatgttgagaagttctctgccttgtttgacatgcctggcttcctggtatctgaaatgaagtacaaggattaggttcaaccataccactttctactaaattgtgtcactcaagttcgacacaaagtgcagaaatggagaaaaaggaaatatgtgtcttcctttcctgggagtgatagggtttatcgccatggtgtttcaattcaaaagtttgaagtttctttgtctttgatttcatgtttaattttgttagcctgattgatatc

SEQ ID NO: 22844 - protein, 499 aa, Glycine max
PQQTQQHSLFSLLAFRSSLTLIHSFPPFMDPVSVWGNTPLATVDPEIHDLIEKEKRRQCRGIELIASENFTSFAVIEALGSALTNKYSEGMPGNRYYGGNEYIDQIENLCRSRALQAFHLDAQSWGVNVQPYSGSPANFAAYTAVLNPHDRIMGLDLPSGGHLTHGYYTSGGKKISATSIYFESLPYKVNSTTGYIDYDRLEEKALDFRPKLIICGGSAYPRDWDYKRFREVADKCGALLLCDMAHTSGLVAAQEVNSPFEYCDIVTTTTHKSLRGPRAGMIFYRKGPKPPKKGQPENAVYDFEDKINFAVFPSLQGGPHNHQIGALVVALKQAASPGFKAYAKQVKANAVALGKYLMGKGYSLVTGGTENHLVLWDLRPLGLTGNKVEKLCDLCNITVNKNAVFGDSSALAPGGVRIGAPAMTSRGLVEKDFEQIGEFLHRAVTLTLEIQKEHGKLLKDFNKGLVNNKAIEDLKADVEKFSALFDMPGFLVSEMKYKD

SEQ ID NO: 22845 - protein, 471 aa, Glycine max
MDPVSVWGNTPLATVDPEIHDLIEKEKRRQCRGIELIASENFTSFAVIEALGSALTNKYSEGMPGNRYYGGNEYIDQIENLCRSRALQAFHLDAQSWGVNVQPYSGSPANFAAYTAVLNPHDRIMGLDLPSGGHLTHGYYTSGGKKISATSIYFESLPYKVNSTTGYIDYDRLEEKALDFRPKLIICGGSAYPRDWDYKRFREVADKCGALLLCDMAHTSGLVAAQEVNSPFEYCDIVTTTTHKSLRGPRAGMIFYRKGPKPPKKGQPENAVYDFEDKINFAVFPSLQGGPHNHQIGALVVALKQAASPGFKAYAKQVKANAVALGKYLMGKGYSLVTGGTENHLVLWDLRPLGLTGNKVEKLCDLCNITVNKNAVFGDSSALAPGGVRIGAPAMTSRGLVEKDFEQIGEFLHRAVTLTLEIQKEHGKLLKDFNKGLVNNKAIEDLKADVEKFSALFDMPGFLVSEMKYKD

SEQ ID NO: 22846 - protein, 409 aa, Glycine max
MPGNRYYGGNEYIDQIENLCRSRALQAFHLDAQSWGVNVQPYSGSPANFAAYTAVLNPHDRIMGLDLPSGGHLTHGYYTSGGKKISATSIYFESLPYKVNSTTGYIDYDRLEEKALDFRPKLIICGGSAYPRDWDYKRFREVADKCGALLLCDMAHTSGLVAAQEVNSPFEYCDIVTTTTHKSLRGPRAGMIFYRKGPKPPKKGQPENAVYDFEDKINFAVFPSLQGGPHNHQIGALVVALKQAASPGFKAYAKQVKANAVALGKYLMGKGYSLVTGGTENHLVLWDLRPLGLTGNKVEKLCDLCNITVNKNAVFGDSSALAPGGVRIGAPAMTSRGLVEKDFEQIGEFLHRAVTLTLEIQKEHGKLLKDFNKGLVNNKAIEDLKADVEKFSALFDMPGFLVSEMKYKD

SEQ ID NO: 22847 - DNA, 1132 bp, Glycine max
ttctcttatagagccatatttggcagcacatcatcagattttggcccatgcagcagctgtttccatataccggagcaaatacaaggataagcaagggggacaagtgggctttgtggtagattgtgaatgggcagaggctaattccgataagattgaagataaatctgctgctgcaagacgcctggattttcagcttggctggttcttgcatccactatattatggagactatcctgaagttatgcgtgaaagacttggagatcagcttcccaagttttcagaggaggataagaaaattcttttgaatgctttggactttattggtctaaatcactatacgtcaaggtttatttctcatgtgacagaatgcgccgaagaaaaccattactacaaggtgcaagagatggagagaattgtggaatgggaaggtggccaggccataggtgagaaggcagcatcagagtggctctatgttgttccctggggtctacggaagattctcaattatgtatcacaaaaatatgctactccgatatttgtcacagagaatggtatggatgatgaagataatgataaccttgccgttacatgagatgctagatgacaaactgagagttcgctatttcaaaggatatcttgcgtcagttgctcaggctataaaggatggagcagatgtaaggggatactttgcgtggtcattactagacaactttgaatgggctcaaggttatacaaaacgctttggattggtctatgtagattataaaaatgggctcagcaggcaccccaagtcttctgcatattggttttcacggtttctgaaagctggtgaaaacaagaagggtaaagaagagtagcttactttcttcattatgtgtctttccataccagatacaaggaataaaataaagtaagcacagaattccacctttatcagtacttggaagctttgtatgggctataatgccatttctctacatttttctcactatcgaatttcattcccaaattgtgtgaaaactctgttccatcatatttatttgttttgcctgttaatctgtgtcgcaccacaaattagacaacgttgaattttgatgtaccacgttgcttgtgtaatacattttctaagttt

SEQ ID NO: 22848 - protein, 196 aa, Glycine max
SLIEPYLAAHHQILAHAAAVSIYRSKYKDKQGGQVGFVVDCEWAEANSDKIEDKSAAARRLDFQLGWFLHPLYYGDYPEVMRERLGDQLPKFSEEDKKILLNALDFIGLNHYTSRFISHVTECAEENHYYKVQEMERIVEWEGGQAIGEKAASEWLYVVPWGLRKILNYVSQKYATPIFVTENGMDDEDNDNLAVT

SEQ ID NO: 22849 - protein, 128 aa, Glycine max
MLFPGVYGRFSIMYHKNMLLRYLSQRMVWMMKIMITLPLHEMLDDKLRVRYFKGYLASVAQAIKDGADVRGYFAWSLLDNFEWAQGYTKRFGLVYVDYKNGLSRHPKSSAYWFSRFLKAGENKKGKEE

SEQ ID NO: 22850 - protein, 116 aa, Glycine max
MYHKNMLLRYLSQRMVWMMKIMITLPLHEMLDDKLRVRYFKGYLASVAQAIKDGADVRGYFAWSLLDNFEWAQGYTKRFGLVYVDYKNGLSRHPKSSAYWFSRFLKAGENKKGKEE

SEQ ID NO: 22851 - DNA, 1679 bp, Glycine max
gttctgtttcggaactaaacaagaagaaagaatctgaacaataatactgatacacacaacactaacactaacaagaagggaggaagaagctgaaaaccctaatctgcagagatgagatgagatgaaaatgaaaaggcgtggaatcagcgcggcaaggaacatcgtagatgcttgtcttgggagtgtgggatctcaaatggctcctccaattcgtattctccgcgttcgtcttggcgattggactgcacgcgctgctcaagaacaccgcctccaagtacttcgagattgaagccactttccacgctatgcctggccctctcaccgaccattctctctgcgccgtttgtcgcaaccccgccaacaagaaatgttcgcgatgcaaatccgttcgatactgttcacaagcatgtcagcaggcgcactggaaatccgagcataagatgagatgcaaggagtttcagggcagcgccagtgtgatgaatttggatcaaactgaagtaactaatcgtgttttcaaagcttctgctgctgtgaatacaagtacatcttcaattgccctcattcctgaatgcggtcgcggaacatccaggactatcaagcagcctaaaactgttatttatccgtatgatgaatttgtcaaattgtttaactgggacaagccaggatttcctccttgtgggctcaaaaattgtggaaacagctgctttgcgaatgtggttctccaatgtctctcattcacaaggccacttattgcctttctattggagaagggtcatcacggagaatgctgccatagcgattggtgctttctgtgtgaatttgaaacccatgttgaaaaagtaaggctaagttctcaggcattttctccaatgaatattctctctcgtttgcccaacatcagtggcacactgggttatggaagacaagaggatgctcatgagttcataaggtttgccattgatgctatgcaatctgtttgccttgatgaatttggtggagaaaaagttgtccctcctaagcatcaggaaacaacccttatccaacacatttttggtggccaccttcaatctgaggtgatttgcaccgaatgtgaaaagaattcaaatcaatatgaaaatatgatggacttgaacgttgaaattcatggagatgctgcttccttggaggaatgtctagaccaatttactgccaaggagtggcttcatggggataatatgtataaatgtgatgggtgcaagggttatgtgaaggcatggaaacgtctcacagtgaaacgagctccaaatattctcacaattgcgttgaaaagatttcagagtgggaggtttggaaaacttaacaagagagtaactttccctgagactttagatcttagcccttacatgagtgaagctggagatggatctgatatttataagctatatgctgttgtagtacatattgatatgctgaatgcttcattttttggccattacatatgcttcatcaaagatttatgtggaaactggtatagaattgatgattggaaggtctcgagtgtggaattagaagaggtgctttcccagggtgcatacatgttgttgtatagcagggttaatgctcgaccatcaggacttcaaagtattgaattgtcagagacagcagaagttcaaacaatcaaatcaaaggcctgcagcccg

SEQ ID NO: 22852 - protein, 504 aa, Glycine max
MLVLGVWDLKWLLQFVFSAFVLAIGLHALLKNTASKYFEIEATFHAMPGPLTDHSLCAVCRNPANKKCSRCKSVRYCSQACQQAHWKSEHKMRCKEFQGSASVMNLDQTEVTNRVFKASAAVNTSTSSIALIPECGRGTSRTIKQPKTVIYPYDEFVKLFNWDKPGFPPCGLKNCGNSCFANVVLQCLSFTRPLIAFLLEKGHHGECCHSDWCFLCEFETHVEKVRLSSQAFSPMNILSRLPNISGTLGYGRQEDAHEFIRFAIDAMQSVCLDEFGGEKVVPPKHQETTLIQHIFGGHLQSEVICTECEKNSNQYENMMDLNVEIHGDAASLEECLDQFTAKEWLHGDNMYKCDGCKGYVKAWKRLTVKRAPNILTIALKRFQSGRFGKLNKRVTFPETLDLSPYMSEAGDGSDIYKLYAVVVHIDMLNASFFGHYICFIKDLCGNWYRIDDWKVSSVELEEVLSQGAYMLLYSRVNARPSGLQSIELSETAEVQTIKSKACSP

SEQ ID NO: 22853 - protein, 458 aa, Glycine max
MPGPLTDHSLCAVCRNPANKKCSRCKSVRYCSQACQQAHWKSEHKMRCKEFQGSASVMNLDQTEVTNRVFKASAAVNTSTSSIALIPECGRGTSRTIKQPKTVIYPYDEFVKLFNWDKPGFPPCGLKNCGNSCFANVVLQCLSFTRPLIAFLLEKGHHGECCHSDWCFLCEFETHVEKVRLSSQAFSPMNILSRLPNISGTLGYGRQEDAHEFIRFAIDAMQSVCLDEFGGEKVVPPKHQETTLIQHIFGGHLQSEVICTECEKNSNQYENMMDLNVEIHGDAASLEECLDQFTAKEWLHGDNMYKCDGCKGYVKAWKRLTVKRAPNILTIALKRFQSGRFGKLNKRVTFPETLDLSPYMSEAGDGSDIYKLYAVVVHIDMLNASFFGHYICFIKDLCGNWYRIDDWKVSSVELEEVLSQGAYMLLYSRVNARPSGLQSIELSETAEVQTIKSKACSP

SEQ ID NO: 22854 - protein, 413 aa, Glycine max
MRCKEFQGSASVMNLDQTEVTNRVFKASAAVNTSTSSIALIPECGRGTSRTIKQPKTVIYPYDEFVKLFNWDKPGFPPCGLKNCGNSCFANVVLQCLSFTRPLIAFLLEKGHHGECCHSDWCFLCEFETHVEKVRLSSQAFSPMNILSRLPNISGTLGYGRQEDAHEFIRFAIDAMQSVCLDEFGGEKVVPPKHQETTLIQHIFGGHLQSEVICTECEKNSNQYENMMDLNVEIHGDAASLEECLDQFTAKEWLHGDNMYKCDGCKGYVKAWKRLTVKRAPNILTIALKRFQSGRFGKLNKRVTFPETLDLSPYMSEAGDGSDIYKLYAVVVHIDMLNASFFGHYICFIKDLCGNWYRIDDWKVSSVELEEVLSQGAYMLLYSRVNARPSGLQSIELSETAEVQTIKSKACSP

SEQ ID NO: 22855 - DNA, 1275 bp, Glycine max
aaacttatcctaacaggcaatcgaacaactgcttaacatatattacgaatgacaaacttgctcaaagtaattgttagctatgtactacgattgtgtagccttaataactacatcacttgaaatatcattgtttttcctcaaagcccacctagcgggggcaagactttgtcattgatatcgatctttttcatcaattttttaaaatagcattttctacttatctaaaattccattctatgatcaggtgctgataacctaattcctgtggagttggcactgaagatagtcagtaagataagatcgaaggagagattcacagtttatattgtcatcccaatgtggcctgaaggttccccttcttctacttcagtgcaagagatactcttttggcagggacaaacaatgaaaatgatgtatgaaatcatagctctggagttaaaatctatgcagcttgatagtcatccacaagattacctcaatttttactgtcttggaaaccgagagcagttgacaactgaagtttcaagttcaagtaattcaccttcagataatggcgaaacggtttcagcctcacaaaagttccgacggtttatgatttatgtacatgccaaaggaatgattgtggatgatgaatatgtaattcttgggtctgccaatataaatcaacgatctttggctggatccagagatactgagatagcaatgggtgcacatcaaccgcatcatacatggagtcagaaaaagaggcatccacatggtcaggtatatgggtatagaatgtctttgtgggcagaacacatggaaaccatagaagcttgcttcaaggagcctgaaagcttggagtgtgtgaaaagtgtgaacaagattgctgaagacaactggaagaagtacacagctgatgactatactccattgcaagggcacataatgaagtatcccgtgtgtgtaaatgcctatgggaaggtaaagtccttaactggatttgagtctttcccagatgttggtggcaaggtgcttggctcccggtctacccttcctgacgctctaactacatagcataccctcttaatttctacgtgaaaataagtaccaaagtctcagagaagaagagagagggatcaattggattttgctggcgtgcttggtgtaaactgttaaaaagaggccttgcccctgcatttttttaaaccatttacacggtggtatagtatgcaacaggctgcgtatatagtaaattattattaatcagtggactgtatgtcacagccacattgt

SEQ ID NO: 22856 - protein, 239 aa, Glycine max
MWPEGSPSSTSVQEILFWQGQTMKMMYEIIALELKSMQLDSHPQDYLNFYCLGNREQLTTEVSSSSNSPSDNGETVSASQKFRRFMIYVHAKGMIVDDEYVILGSANINQRSLAGSRDTEIAMGAHQPHHTWSQKKRHPHGQVYGYRMSLWAEHMETIEACFKEPESLECVKSVNKIAEDNWKKYTADDYTPLQGHIMKYPVCVNAYGKVKSLTGFESFPDVGGKVLGSRSTLPDALTT

SEQ ID NO: 22857 - protein, 217 aa, Glycine max
MKMMYEIIALELKSMQLDSHPQDYLNFYCLGNREQLTTEVSSSSNSPSDNGETVSASQKFRRFMIYVHAKGMIVDDEYVILGSANINQRSLAGSRDTEIAMGAHQPHHTWSQKKRHPHGQVYGYRMSLWAEHMETIEACFKEPESLECVKSVNKIAEDNWKKYTADDYTPLQGHIMKYPVCVNAYGKVKSLTGFESFPDVGGKVLGSRSTLPDALTT

SEQ ID NO: 22858 - protein, 215 aa, Glycine max
MMYEIIALELKSMQLDSHPQDYLNFYCLGNREQLTTEVSSSSNSPSDNGETVSASQKFRRFMIYVHAKGMIVDDEYVILGSANINQRSLAGSRDTEIAMGAHQPHHTWSQKKRHPHGQVYGYRMSLWAEHMETIEACFKEPESLECVKSVNKIAEDNWKKYTADDYTPLQGHIMKYPVCVNAYGKVKSLTGFESFPDVGGKVLGSRSTLPDALTT

SEQ ID NO: 22859 - DNA, 1588 bp, Glycine max
ggcaaaaagcacaaaagaagagagagacagagagaaagagaaccgtttgagaattttagagacgttatcggatttcaaatccacaattcgccggaatttgggaaccgcggttgcgtccggagcctcggttagtagttagttagggtttcttttttctctttcttctcttccattcggtttcaaattttcgcgattagcgatggaggaacgaggctgaggccgaatttcaaggttctggtttcgtcgtcgctgtggagtgaagaattctgtgctgctgctggtggtgatgtttacgccgcagagggtttggtcgggctggtccctgacttcgaacaggagcggggttcggggcggaaccgggtcgggttccgatttgggtccgaattcgggagatggagcgagcacgaagggaaaaggtgtcgcgcttgttgagaatggtgggaacttggatcgcgaagttttggttgagagggtttccagcctcgagaaagagctttatgagtaccaattcaatatgggactgctcttgattgagaaaaaagagtggaattctaagtatactgaactaagtcaagatttagtagaagtgaaggatgctctagatcgagaaaaagctgctcatttaattgctctatccgaggcagagaagcgagaagagaatctgaggaaggccttgggtgttgagaaagagtgtgtgcttgatcttgagaaggctctgcgagaaatgcggtcagagcatgccaaaattaaatttacagcggactcaaagttggctgaagcaaatgctttagtagctagcatcgaagagaagtctttagaagtagaagccaaattacgttctgctgatgccaaatttgcagaaatcagcagaaagagttcagagtttgataggaaatcactagaccttgagtctcaagaatctgcacttcgaagggatcgattatccttcattgcagagcaagaagcacatgagagtacattgtctaagcagagagaggacttgcgggaatgggaaaagaaactacaggagggtgaagagaggctggccaagggtcaaagaattatcaacgaaagagagcaaagggctaatgagaatgacagactatgcagacagaaagaaaaggaccttgaagaggcacagaagaagattgatgcaactaatgtaacactgagaaataaagaagatgatgtgaacaataggtttgcgaatattactctaaaagagaaggaatatgattctctgagaataaacttggatatcaaagagaaggagttatctgcatgggaggaaaagctcaatgctagagaaaaagttgagatgcagaaacttcttgatgaacaaaatactattcttgatgtgaagaagcaggagtttgaggtggaattggatgagaaaagaaaatcctttgaagatggattgaagaataaattggtggaagtggaaaagaaggaggctgaaatcactcacgcggaggagaaagttgtgaaacgggaacaagccttgggaaagaaagcagagaagcttaaagagaaagaaatagagtatgaacaaaaagtcaaagctttgaaggaaaaggagaagttaatt

SEQ ID NO: 22860 - protein, 434 aa, Glycine max
MFTPQRVWSGWSLTSNRSGVRGGTGSGSDLGPNSGDGASTKGKGVALVENGGNLDREVLVERVSSLEKELYEYQFNMGLLLIEKKEWNSKYTELSQDLVEVKDALDREKAAHLIALSEAEKREENLRKALGVEKECVLDLEKALREMRSEHAKIKFTADSKLAEANALVASIEEKSLEVEAKLRSADAKFAEISRKSSEFDRKSLDLESQESALRRDRLSFIAEQEAHESTLSKQREDLREWEKKLQEGEERLAKGQRIINEREQRANENDRLCRQKEKDLEEAQKKIDATNVTLRNKEDDVNNRFANITLKEKEYDSLRINLDIKEKELSAWEEKLNAREKVEMQKLLDEQNTILDVKKQEFEVELDEKRKSFEDGLKNKLVEVEKKEAEITHAEEKVVKREQALGKKAEKLKEKEIEYEQKVKALKEKEKLI

SEQ ID NO: 22861 - protein, 358 aa, Glycine max
MGLLLIEKKEWNSKYTELSQDLVEVKDALDREKAAHLIALSEAEKREENLRKALGVEKECVLDLEKALREMRSEHAKIKFTADSKLAEANALVASIEEKSLEVEAKLRSADAKFAEISRKSSEFDRKSLDLESQESALRRDRLSFIAEQEAHESTLSKQREDLREWEKKLQEGEERLAKGQRIINEREQRANENDRLCRQKEKDLEEAQKKIDATNVTLRNKEDDVNNRFANITLKEKEYDSLRINLDIKEKELSAWEEKLNAREKVEMQKLLDEQNTILDVKKQEFEVELDEKRKSFEDGLKNKLVEVEKKEAEITHAEEKVVKREQALGKKAEKLKEKEIEYEQKVKALKEKEKLI

SEQ ID NO: 22862 - protein, 288 aa, Glycine max
MRSEHAKIKFTADSKLAEANALVASIEEKSLEVEAKLRSADAKFAEISRKSSEFDRKSLDLESQESALRRDRLSFIAEQEAHESTLSKQREDLREWEKKLQEGEERLAKGQRIINEREQRANENDRLCRQKEKDLEEAQKKIDATNVTLRNKEDDVNNRFANITLKEKEYDSLRINLDIKEKELSAWEEKLNAREKVEMQKLLDEQNTILDVKKQEFEVELDEKRKSFEDGLKNKLVEVEKKEAEITHAEEKVVKREQALGKKAEKLKEKEIEYEQKVKALKEKEKLI

SEQ ID NO: 22863 - DNA, 1246 bp, Glycine max
acaagcatctctgttcagagcctcattaagtttttctctctttcacttatttattgactctccataagcccttcaaacctctctctattcctctctactagtcaccttctcccttccattcactccacttcttaacacccccaaacagaacaacggcagagcaagcagccagaaaaatggtgttgctgtccaaagcaacaacagaacaatactcctacatcaagaactacatgccaactgcattctcctcaacaattcccatagtggacctctccaaacccgatgcaaagaccctcatagtgaaggcttgtgaggagtttggattcttcaaagtcatcaaccatggtgttcccattgaagctatatcccaattggaatccgaagccttcaagttcttctctatgccactcaatgagaaggaaaaagcagggcctcccaaaccatttgggtgtctattaaacagttacatgtcttctgtgagaaaaatggcatgcgagattcttgagttgatggcagaaggattgaagattcagcaaaagaatgtgtttagcaagcttctgatggataaacagagtgactctgttttcagggtgaatcactaccctgcttgtcctgaacttgccgtgaatggtcagaacttgattgggttcggagaacatacagacccacaaatcatttctttacttaggtccaacaacacttcaggccttcagatttttcttagagatggaaactggatttcagtcccacctgatcacaaatctttcttcataaatgttggtgattctcttcaggttatgaccaatggaagatttcggagtgtgagacatagagttttggcaaatggatttaagtctaggctctcaatgatttactttggaggtccacctttgagtgaaaaaatagcgccattaccttctctcatgaaaggaaaagaaagcttatataaagaatttacgtggtttgagtacaagaattcaacctatggttcaagattggctgataataggcttggacattttgagagaattgttgcttgataatatgtagagaattatgggggcacttgtcaatacaaaatgggggttacaatagtctatatactataaatgttttttctttttcttttttctactttaaggttatttatcaattagaatgcctcacagatataggacaacgcatacaccccttttgcttcaacactagtgaatgcatctgatgtagttaacaatggagatttgat

SEQ ID NO: 22864 - protein, 287 aa, Glycine max
MVLLSKATTEQYSYIKNYMPTAFSSTIPIVDLSKPDAKTLIVKACEEFGFFKVINHGVPIEAISQLESEAFKFFSMPLNEKEKAGPPKPFGCLLNSYMSSVRKMACEILELMAEGLKIQQKNVFSKLLMDKQSDSVFRVNHYPACPELAVNGQNLIGFGEHTDPQIISLLRSNNTSGLQIFLRDGNWISVPPDHKSFFINVGDSLQVMTNGRFRSVRHRVLANGFKSRLSMIYFGGPPLSEKIAPLPSLMKGKESLYKEFTWFEYKNSTYGSRLADNRLGHFERIVA

SEQ ID NO: 22865 - protein, 269 aa, Glycine max
MPTAFSSTIPIVDLSKPDAKTLIVKACEEFGFFKVINHGVPIEAISQLESEAFKFFSMPLNEKEKAGPPKPFGCLLNSYMSSVRKMACEILELMAEGLKIQQKNVFSKLLMDKQSDSVFRVNHYPACPELAVNGQNLIGFGEHTDPQIISLLRSNNTSGLQIFLRDGNWISVPPDHKSFFINVGDSLQVMTNGRFRSVRHRVLANGFKSRLSMIYFGGPPLSEKIAPLPSLMKGKESLYKEFTWFEYKNSTYGSRLADNRLGHFERIVA

SEQ ID NO: 22866 - protein, 212 aa, Glycine max
MPLNEKEKAGPPKPFGCLLNSYMSSVRKMACEILELMAEGLKIQQKNVFSKLLMDKQSDSVFRVNHYPACPELAVNGQNLIGFGEHTDPQIISLLRSNNTSGLQIFLRDGNWISVPPDHKSFFINVGDSLQVMTNGRFRSVRHRVLANGFKSRLSMIYFGGPPLSEKIAPLPSLMKGKESLYKEFTWFEYKNSTYGSRLADNRLGHFERIVA

SEQ ID NO: 22867 - DNA, 1261 bp, Glycine max
aaaatactggaacttcgcgaggcactaagtcggataaggtttcttgaaaaggaaaatgcagaacaagataaagagattaaaaagtgcaaagagtatatatctgaaattgtgttgcatgctgaagcccaagcattgcagtaccaacagaagtacaagtgcctggagtccatgttccatgaagtcaaaacagaagtgtcaaattcaacgtcaatggtatcagcatcagagaaaattgagaaaagttcagtaaggacaagaggttcaagctcaccattcagatgcatttcaaatattgttcagcagatgaatcaggagaaagatcaagaactgttagtgtcaaggctccgtgtggaagaactagaagcacttgcagctagccggcaaaaggaggtatgcatgctacaaacaaggctggctgctactgaaagcatgactcatgatgtcattcgggaccttcttggtgtcaaattggacattaccgactatgcaaatttgatagacgaaaaccaaattgtgaaattagtggaggaggctcatcatcatagagaagagttcattgcgaaggaaaaagagaatctcgatttaagactgcagataaatgatctcattgaagaaagagaatgctgcatatcggaactgaaaaccaaagaggcagatatacttgccactcagatagcaatgcagcaactgcaagagcgagatcaattgctttctgcacaaaatgaaatgttgaagatggacaagaccaatctcatcaggaaggttgcagaattagatgacatggtgaaaacactagttgggacacgaaatacccaacctgctccacagtcatcaaagactaaggacaagggtgcattaaatttgggtaacggtggatacaataaaaggttgtctttgtctcaacccgaacgacgcctttctcgttttaatgacgagccttctcgttaccgcaaatttgctggtaataattcgcaaggctaaactgtacagatactcttcacacgcacaaaagagaggagcataaatatcatcaaagaaaaaaatgtacgcatatgtccatttgtgctaaccctcacctcggggagccaattatgcattacagtatttgaagatatccacttccctattgtatttgttcaaattctcagttgacacgttcgtggttgtcatcttgaattttgaacaactatgcttgaaaaggcttgtaatggtgtgcacctaatttttctctcgtgtgcaatttttttcatatgattgacac

SEQ ID NO: 22868 - protein, 326 aa, Glycine max
KILELREALSRIRFLEKENAEQDKEIKKCKEYISEIVLHAEAQALQYQQKYKCLESMFHEVKTEVSNSTSMVSASEKIEKSSVRTRGSSSPFRCISNIVQQMNQEKDQELLVSRLRVEELEALAASRQKEVCMLQTRLAATESMTHDVIRDLLGVKLDITDYANLIDENQIVKLVEEAHHHREEFIAKEKENLDLRLQINDLIEERECCISELKTKEADILATQIAMQQLQERDQLLSAQNEMLKMDKTNLIRKVAELDDMVKTLVGTRNTQPAPQSSKTKDKGALNLGNGGYNKRLSLSQPERRLSRFNDEPSRYRKFAGNNSQG

SEQ ID NO: 22869 - protein, 270 aa, Glycine max
MFHEVKTEVSNSTSMVSASEKIEKSSVRTRGSSSPFRCISNIVQQMNQEKDQELLVSRLRVEELEALAASRQKEVCMLQTRLAATESMTHDVIRDLLGVKLDITDYANLIDENQIVKLVEEAHHHREEFIAKEKENLDLRLQINDLIEERECCISELKTKEADILATQIAMQQLQERDQLLSAQNEMLKMDKTNLIRKVAELDDMVKTLVGTRNTQPAPQSSKTKDKGALNLGNGGYNKRLSLSQPERRLSRFNDEPSRYRKFAGNNSQG

SEQ ID NO: 22870 - protein, 256 aa, Glycine max
MVSASEKIEKSSVRTRGSSSPFRCISNIVQQMNQEKDQELLVSRLRVEELEALAASRQKEVCMLQTRLAATESMTHDVIRDLLGVKLDITDYANLIDENQIVKLVEEAHHHREEFIAKEKENLDLRLQINDLIEERECCISELKTKEADILATQIAMQQLQERDQLLSAQNEMLKMDKTNLIRKVAELDDMVKTLVGTRNTQPAPQSSKTKDKGALNLGNGGYNKRLSLSQPERRLSRFNDEPSRYRKFAGNNSQG

SEQ ID NO: 22871 - DNA, 1369 bp, Glycine max
aaaaaagaagagtgtatttggaggaaggaaggtaaaggaagccagaggagatggaagaagagggttctcagcagccacagttggtgcttgccgagaagctattccttctccgacaacccgttcaagacattgacaaggttcgctacaaggaggatgttttcactcacatcaaggaaaacgagatggtccctttgtacgagaccctagtcgccgattccgtgttggacttggatcgtgcccttttggacttcatgcgcgctaaaattgaagacgagctcaccaagctcgacgaaaagattgctgatgctgaggaaaacttaggagagagtgaagttcgtgaggctcacttggcaaaatccttgttttttatccggattatggacaaggagaaagccttggaacatctcaagataacagaaaccaagacagttgcagttggccagaaaatggacttggtgttttatacattgcagcttggtttcttcgacatggattttgatctcgtttccaaaagcattgacaaagccaaaaacttgtttgaagaaggtggtgattgggaaaggaagaataggctgaaagtgtacgaaggcctgtactgcatgtccactcgaaatttcaagaaggctgccaagttgtttttggattctatttcaacctttaccacctgtgaactttttccctatgacacctttatattttatacagttttgaccagcattatatcattggatagagtttccctaaagcaaaaggtagtggatgctccagagatcttgacagtgattggcaaaatcccatatctttcagagtttttgaactccttatatgattgtcaatacaagtcttttttctcagcatttgctggcctgacagagcaaattaagttggaccgctatctgcatccacacttccgatattacatgagggaggtcagaaccgttgtttattcccaatttttggaatcttacaagagtgtgacaattgaagccatggcaaaagcctttggagtgacagaggatttcattgatgtggagctatcacgctttattgcagcagggaagcttcattgtaagattgataaagttgaaggtgttcttgaaactaatcgccctgatgctaagaatgctctttaccaagcaactattaagcaaggggacttcctattgaatcggatccagaaattgtcacgtgtgatagatctttaggtcattttttgcattttagactaaaagtttattggaaaggcagagataacgacaatttcacggtattttactacgagggtgaggcacggcatttctgtagtccatttgatgtgcaaatatgattaattaaatttgccaaatccaaatatatcaatcagttttcg

SEQ ID NO: 22872 - protein, 384 aa, Glycine max
MEEEGSQQPQLVLAEKLFLLRQPVQDIDKVRYKEDVFTHIKENEMVPLYETLVADSVLDLDRALLDFMRAKIEDELTKLDEKIADAEENLGESEVREAHLAKSLFFIRIMDKEKALEHLKITETKTVAVGQKMDLVFYTLQLGFFDMDFDLVSKSIDKAKNLFEEGGDWERKNRLKVYEGLYCMSTRNFKKAAKLFLDSISTFTTCELFPYDTFIFYTVLTSIISLDRVSLKQKVVDAPEILTVIGKIPYLSEFLNSLYDCQYKSFFSAFAGLTEQIKLDRYLHPHFRYYMREVRTVVYSQFLESYKSVTIEAMAKAFGVTEDFIDVELSRFIAAGKLHCKIDKVEGVLETNRPDAKNALYQATIKQGDFLLNRIQKLSRVIDL

SEQ ID NO: 22873 - protein, 340 aa, Glycine max
MVPLYETLVADSVLDLDRALLDFMRAKIEDELTKLDEKIADAEENLGESEVREAHLAKSLFFIRIMDKEKALEHLKITETKTVAVGQKMDLVFYTLQLGFFDMDFDLVSKSIDKAKNLFEEGGDWERKNRLKVYEGLYCMSTRNFKKAAKLFLDSISTFTTCELFPYDTFIFYTVLTSIISLDRVSLKQKVVDAPEILTVIGKIPYLSEFLNSLYDCQYKSFFSAFAGLTEQIKLDRYLHPHFRYYMREVRTVVYSQFLESYKSVTIEAMAKAFGVTEDFIDVELSRFIAAGKLHCKIDKVEGVLETNRPDAKNALYQATIKQGDFLLNRIQKLSRVIDL

SEQ ID NO: 22874 - protein, 317 aa, Glycine max
MRAKIEDELTKLDEKIADAEENLGESEVREAHLAKSLFFIRIMDKEKALEHLKITETKTVAVGQKMDLVFYTLQLGFFDMDFDLVSKSIDKAKNLFEEGGDWERKNRLKVYEGLYCMSTRNFKKAAKLFLDSISTFTTCELFPYDTFIFYTVLTSIISLDRVSLKQKVVDAPEILTVIGKIPYLSEFLNSLYDCQYKSFFSAFAGLTEQIKLDRYLHPHFRYYMREVRTVVYSQFLESYKSVTIEAMAKAFGVTEDFIDVELSRFIAAGKLHCKIDKVEGVLETNRPDAKNALYQATIKQGDFLLNRIQKLSRVIDL

SEQ ID NO: 22875 - DNA, 1261 bp, Glycine max
ggtaataaggcaaaaccctctctctctctctctcaatttgtttacctcttcaactcaaccacacttctaagatcaaaagctacctttgttgctttgagtttgaactttgaatcaatcaatcaatcaaagtgggtggtgactcatggaagtgaaaggaaggataagcaactccaccatcaccaccaccacaatccaaagtgaggatgagatggaccttcgaagaggtccttggaccgtcgatgaggatcttgctctcatcaattacattgctaatcatggtgaaggtcgatggaactccctagctcgttcagctggactcaaacgaactggcaagagctgcagattgagatggttgaattatttgcgtcccgatgttcgacgtggcaacatcacacttgaagaacagcttcttattctcgagctccatggtcgctggggaaaccgatggtctaaaattgctcaatatttgcctggaagaaccgataatgagataaagaattattggagaacccgtgtccaaaagcaagccaagcaactcaaatgtgacgtgaatagcaagcaattcaaggatgccatgcgctacctttggatgccaaggctggtggagcgcattcaagccgccgccgtggccgccaccactgccacggccaccgtgggttctccaactgcatcagctagtgctactacaaccatcaccactaacaacaacgccaccacatacaactacgagaacaacaacaacaacaaccttaacaacagttttgaagtgcacagtgggaacatgatgttgagaaatccagcaatcatgaacattaataattttgttggttcacacagttacactccagagaataatagtacgggtgcctcatcggattcatttggtgctcaggtttcgcctgtctcggacttgactcaggattattacaataatgtcacggttgggaataataacaacaacaataaccctaatcctgagtattaccaacaagcacatgatcaattgagtttcttagactgcatcacaagcccttcagggttgttcgatttccagtccatggaaccaaacaccccgtggattcagagtaatgttggggacacgtcaaccaacggtttctggaatgttgaaaacatgttgctctttcaacaactctctgacaacatgtgaaacatcaattcgtaggagaattcatggtgagagggactaaaaaaactgtgaagggttgtgaaatttacagatgataaaattatataattaagt

SEQ ID NO: 22876 - protein, 341 aa, Glycine max
MEVKGRISNSTITTTTIQSEDEMDLRRGPWTVDEDLALINYIANHGEGRWNSLARSAGLKRTGKSCRLRWLNYLRPDVRRGNITLEEQLLILELHGRWGNRWSKIAQYLPGRTDNEIKNYWRTRVQKQAKQLKCDVNSKQFKDAMRYLWMPRLVERIQAAAVAATTATATVGSPTASASATTTITTNNNATTYNYENNNNNNLNNSFEVHSGNMMLRNPAIMNINNFVGSHSYTPENNSTGASSDSFGAQVSPVSDLTQDYYNNVTVGNNNNNNNPNPEYYQQAHDQLSFLDCITSPSGLFDFQSMEPNTPWIQSNVGDTSTNGFWNVENMLLFQQLSDNM

SEQ ID NO: 22877 - protein, 319 aa, Glycine max
MDLRRGPWTVDEDLALINYIANHGEGRWNSLARSAGLKRTGKSCRLRWLNYLRPDVRRGNITLEEQLLILELHGRWGNRWSKIAQYLPGRTDNEIKNYWRTRVQKQAKQLKCDVNSKQFKDAMRYLWMPRLVERIQAAAVAATTATATVGSPTASASATTTITTNNNATTYNYENNNNNNLNNSFEVHSGNMMLRNPAIMNINNFVGSHSYTPENNSTGASSDSFGAQVSPVSDLTQDYYNNVTVGNNNNNNNPNPEYYQQAHDQLSFLDCITSPSGLFDFQSMEPNTPWIQSNVGDTSTNGFWNVENMLLFQQLSDNM

SEQ ID NO: 22878 - protein, 197 aa, Glycine max
MRYLWMPRLVERIQAAAVAATTATATVGSPTASASATTTITTNNNATTYNYENNNNNNLNNSFEVHSGNMMLRNPAIMNINNFVGSHSYTPENNSTGASSDSFGAQVSPVSDLTQDYYNNVTVGNNNNNNNPNPEYYQQAHDQLSFLDCITSPSGLFDFQSMEPNTPWIQSNVGDTSTNGFWNVENMLLFQQLSDNM

SEQ ID NO: 22879 - DNA, 1465 bp, Glycine max
ttttgaggataactgtgactagtgcggttgctgttggtgctgttgctttgggagtgggcacagcatctggttatatatctccgtggactggaaggttttactctttgcttgatccaacctatgctaaggatcacattccgattattgcatctgtctctgagcatcagccaactgcttggtcatccttcatgtttgatttccatatcttgctattccttttccctgctggcctctatttttgcttcaagcgcttgtctgatgccacaatctttttagttatgtatggtcttacaagcatgtattttgctggggttatggttcggttgattcttgttgctacccctgctgtgtgcctcattagtgctattgcggtttctgccactgtgaagaatttgactcgggtagtgagggccaaaagccaagctgttcaaagtggatctacaaaaggaactagctctgcaaaaagttctgccaagggtgtagttgacaactcccagcctttccaaaagaatggtgctattgtgttactccttggtgctttctatttgctcagtagatatgccattcactgcacatgggtcacatcagaggcttactcatctccctcaattgtcttggctgcgaggggtgcccatggcaacagggtcatctttgatgattatcgtgaagcttacttttggcttcgccagaacactccacaagatgccaaggtgatgtcatggtgggattatggctatcaaatcactgccatgggaaacagaacagttattgttgacaataacacctggaacaacacacacatagctactgttgggcgagcaatgtcatcctatgaggatgaggcttatgacataatgagatcacttgatgttgactatgtattagttgtgttcggtggtgttactggttattcttctgatgatatcaataaatttctttggatggtgagaattggtggtggagtttttcctgtgataaaggagcctgattaccttgtcaatggagaatatcgtgtagataaaggagcagctccaaagatgttgaactgtcttatgtacaagctgtcttattatcggtttggggagctgacaacagaatatggcaaaccacctgggtatgatcgtgctagaggtgttgaaattggaaataaagacataaagcttgagtacttggaagaggctttcactacacagaattggatagttcgtatttataaagtgaaaccacctaaaaacagatggtaactctaaaaaaacagccccaaaaaacaaagactactcttcgggaaatgatagcattctagtgaacttgagcgctgaaaatctgttagatgttacaggttgtggactatttttgatgtagaattagttgaggtaatttgtggatttttgaaatgttacaggtttatgactttttgtcaacttcccaacttaacctattggcttggtaccacttgtttgacacg

SEQ ID NO: 22880 - protein, 413 aa, Glycine max
LRITVTSAVAVGAVALGVGTASGYISPWTGRFYSLLDPTYAKDHIPIIASVSEHQPTAWSSFMFDFHILLFLFPAGLYFCFKRLSDATIFLVMYGLTSMYFAGVMVRLILVATPAVCLISAIAVSATVKNLTRVVRAKSQAVQSGSTKGTSSAKSSAKGVVDNSQPFQKNGAIVLLLGAFYLLSRYAIHCTWVTSEAYSSPSIVLAARGAHGNRVIFDDYREAYFWLRQNTPQDAKVMSWWDYGYQITAMGNRTVIVDNNTWNNTHIATVGRAMSSYEDEAYDIMRSLDVDYVLVVFGGVTGYSSDDINKFLWMVRIGGGVFPVIKEPDYLVNGEYRVDKGAAPKMLNCLMYKLSYYRFGELTTEYGKPPGYDRARGVEIGNKDIKLEYLEEAFTTQNWIVRIYKVKPPKNRW

SEQ ID NO: 22881 - protein, 351 aa, Glycine max
MFDFHILLFLFPAGLYFCFKRLSDATIFLVMYGLTSMYFAGVMVRLILVATPAVCLISAIAVSATVKNLTRVVRAKSQAVQSGSTKGTSSAKSSAKGVVDNSQPFQKNGAIVLLLGAFYLLSRYAIHCTWVTSEAYSSPSIVLAARGAHGNRVIFDDYREAYFWLRQNTPQDAKVMSWWDYGYQITAMGNRTVIVDNNTWNNTHIATVGRAMSSYEDEAYDIMRSLDVDYVLVVFGGVTGYSSDDINKFLWMVRIGGGVFPVIKEPDYLVNGEYRVDKGAAPKMLNCLMYKLSYYRFGELTTEYGKPPGYDRARGVEIGNKDIKLEYLEEAFTTQNWIVRIYKVKPPKNRW

SEQ ID NO: 22882 - protein, 321 aa, Glycine max
MYGLTSMYFAGVMVRLILVATPAVCLISAIAVSATVKNLTRVVRAKSQAVQSGSTKGTSSAKSSAKGVVDNSQPFQKNGAIVLLLGAFYLLSRYAIHCTWVTSEAYSSPSIVLAARGAHGNRVIFDDYREAYFWLRQNTPQDAKVMSWWDYGYQITAMGNRTVIVDNNTWNNTHIATVGRAMSSYEDEAYDIMRSLDVDYVLVVFGGVTGYSSDDINKFLWMVRIGGGVFPVIKEPDYLVNGEYRVDKGAAPKMLNCLMYKLSYYRFGELTTEYGKPPGYDRARGVEIGNKDIKLEYLEEAFTTQNWIVRIYKVKPPKNRW

SEQ ID NO: 22883 - DNA, 1441 bp, Glycine max
ttttttctgcaactgttgcactatcttctgattttcgcaagaagctaaaacgaggctcaattaaacaaaagcaatcattgacagatggattgaattctatcgaaactctttctgagcgtgcaggaatgagatctaatgcagcaattattgatcttactaatccgtctatattagcaactaagcttgaggagtcatttattgaatgcagagaagaagataaagatgcctatttgtactatattttgactgtccatggacaaggacgcacaatagttttctgtacttcaattgcagctttacgccatatttcttccatactgcgcattcttggcatcaatgtttggactcttcatgcccaaatgcagcagcgtgctcgtttgaaggccatggatcgctttcgtgaaaatgaaaatggcatacttgttgctacagatgttgctgcaaggggtcttgatattcctggtgttagaactgttgtccactatcagcttccacattcagcagaggtttatgttcatagaagtggaagaacagccagagcttctgctgaaggttgtagtattgctttaatatcatcaagagatacatcaaagtttgcttcattgtgcaagtcattttccaaggataactttcagcggtttcctttagagaactcttacatgccagaggtcctaaaacgattatctcttgcacgtcaaatagacaagataacaaggaaggattcccaggaaaaggctgagaaaaactggtttgataggaattctagctcagtagaattagttacagaaagttatgacagcgaagaggaacaagtgaacaaacataagcaaatgaaggccagctctagacaattgaagaaattgcaggaggatctcaaaatactgatttcacgtccattacaatcaaaaacattttcacatcgatatttagctggggctggtgtctcacccctcatgcaggagcaattgcaacaattagcaaggcaaaaactaagtgatcaccagggttcaggactaggcaaaaaggggaagttggtagtgattggtcaagattgtgtggatgcacttcaggcacttcgaagtgctggtgaagaggtgcgaatggatgccaaggatttggctggaaaacagagaaatatgcagaatttaaaaagaaagcgtaaagaggagaaaaagcgtttgcgtgatcagcgtagaaagcagaagaaaaagctaaaatacggggatgaatagaattgtatacataactgagccattagttaaaattttgcatcaaccaaagttttcattagttgctgaattttttaaggcagcgtctgtagtttctccttcctagttttagagcttcgaatttgagtttgaatatatatatatatatatatatatatatatatactgtatcgagcagtggatgtgatcatgtgattgagtttatattaatc

SEQ ID NO: 22884 - protein, 409 aa, Glycine max
FSATVALSSDFRKKLKRGSIKQKQSLTDGLNSIETLSERAGMRSNAAIIDLTNPSILATKLEESFIECREEDKDAYLYYILTVHGQGRTIVFCTSIAALRHISSILRILGINVWTLHAQMQQRARLKAMDRFRENENGILVATDVAARGLDIPGVRTVVHYQLPHSAEVYVHRSGRTARASAEGCSIALISSRDTSKFASLCKSFSKDNFQRFPLENSYMPEVLKRLSLARQIDKITRKDSQEKAEKNWFDRNSSSVELVTESYDSEEEQVNKHKQMKASSRQLKKLQEDLKILISRPLQSKTFSHRYLAGAGVSPLMQEQLQQLARQKLSDHQGSGLGKKGKLVVIGQDCVDALQALRSAGEEVRMDAKDLAGKQRNMQNLKRKRKEEKKRLRDQRRKQKKKLKYGDE

SEQ ID NO: 22885 - protein, 368 aa, Glycine max
MRSNAAIIDLTNPSILATKLEESFIECREEDKDAYLYYILTVHGQGRTIVFCTSIAALRHISSILRILGINVWTLHAQMQQRARLKAMDRFRENENGILVATDVAARGLDIPGVRTVVHYQLPHSAEVYVHRSGRTARASAEGCSIALISSRDTSKFASLCKSFSKDNFQRFPLENSYMPEVLKRLSLARQIDKITRKDSQEKAEKNWFDRNSSSVELVTESYDSEEEQVNKHKQMKASSRQLKKLQEDLKILISRPLQSKTFSHRYLAGAGVSPLMQEQLQQLARQKLSDHQGSGLGKKGKLVVIGQDCVDALQALRSAGEEVRMDAKDLAGKQRNMQNLKRKRKEEKKRLRDQRRKQKKKLKYGDE

SEQ ID NO: 22886 - protein, 290 aa, Glycine max
MQQRARLKAMDRFRENENGILVATDVAARGLDIPGVRTVVHYQLPHSAEVYVHRSGRTARASAEGCSIALISSRDTSKFASLCKSFSKDNFQRFPLENSYMPEVLKRLSLARQIDKITRKDSQEKAEKNWFDRNSSSVELVTESYDSEEEQVNKHKQMKASSRQLKKLQEDLKILISRPLQSKTFSHRYLAGAGVSPLMQEQLQQLARQKLSDHQGSGLGKKGKLVVIGQDCVDALQALRSAGEEVRMDAKDLAGKQRNMQNLKRKRKEEKKRLRDQRRKQKKKLKYGDE

SEQ ID NO: 22887 - DNA, 1563 bp, Glycine max
attgataattttgaattgactctggacgtcttcccttcgcaaaccgatcgcttcaacacaactggagttttaactattgcttttctgctaagcaaccaaatttacaaacccccagaattcttctccccttacatcttcaagggtgccaattatgaatactatggaggagaaccaaaaggatcaaagtcatcatcacatgtaggggttatagttggtgctgtagttgctgttgtggtctttgttgttctagcattctttgcagggatgtatgcccttcgccagaaaagaagagcaagaagatctgcagagttgaacccttttgcaaattgggaacagaatacgaatagtggcactgctcctcagttgaaaggagcacgatggttttcttttgatgatctaaggaaatacaccagcaacttctcagaaaccaatactattggatctggaggctatggaaaggtttatcaaggaaatcttccctctggggagctggttgccatcaaacgggctgcaaaagagtctatgcagggtgctgttgaatttaaaactgagatcgaacttctatcaagggtccatcataagaatctcgtcggtcttgtgggtttctgttttgagaagggtgaacaaatgctggtgtatgagcacattccaaatggcactttaatggatagtctctcaggaaagtctggcatctggatggattggataaggaggcttaaagtagcattaggtgcagccaggggtctggcctatcttcatgaacttgctgatccacctatcatacacagggacataaaatcaagcaatatcctacttgatcatcacctcaatgcaaaagttgcagattttggtctctctaaacttcttgttgatagtgaaaggggccatgtcactactcaagtgaaagggacaatgggttacttggatcctgaatattacatgacccagcagttgactgaaaagagtgatgtatatagctttggagtgctaatgctagaactagcaacagcaagaaggccaatagagcaaggaaagtatattgtaagagaggtaatgagggtaatggacacatcaaaagatttatacaaccttcattccattctagacccaaccataatgaaagcaacaagaccaaaaggtttagaaaagtttgtgatgttggcaatgagatgcgtcaaagaatatgcagcagagaggcctacaatggctgaggttgtaaaagagatcgagagcatgattgagcttgttggattgaaccccaattctgaatcagctacaacatcagaaacttatgtggaagcaggtgtaggaaatgcccaacatccttaccgggaagaagattttagctatagtggaatttttccatccacaagggtagaaccccaataggctttggtataattttctatttgtaattcttttccctcttcaaatgcaatgtctgagatctgctgtgtcaattttggattcaaatcaggcgggtgcttccaaaaaaacttgccctttgtagaaaatgaaggttcaagttgaattttttaaattgattattggaaggttgtactt

SEQ ID NO: 22888 - protein, 462 aa, Glycine max
IDNFELTLDVFPSQTDRFNTTGVLTIAFLLSNQIYKPPEFFSPYIFKGANYEYYGGEPKGSKSSSHVGVIVGAVVAVVVFVVLAFFAGMYALRQKRRARRSAELNPFANWEQNTNSGTAPQLKGARWFSFDDLRKYTSNFSETNTIGSGGYGKVYQGNLPSGELVAIKRAAKESMQGAVEFKTEIELLSRVHHKNLVGLVGFCFEKGEQMLVYEHIPNGTLMDSLSGKSGIWMDWIRRLKVALGAARGLAYLHELADPPIIHRDIKSSNILLDHHLNAKVADFGLSKLLVDSERGHVTTQVKGTMGYLDPEYYMTQQLTEKSDVYSFGVLMLELATARRPIEQGKYIVREVMRVMDTSKDLYNLHSILDPTIMKATRPKGLEKFVMLAMRCVKEYAAERPTMAEVVKEIESMIELVGLNPNSESATTSETYVEAGVGNAQHPYREEDFSYSGIFPSTRVEPQ

SEQ ID NO: 22889 - protein, 374 aa, Glycine max
MYALRQKRRARRSAELNPFANWEQNTNSGTAPQLKGARWFSFDDLRKYTSNFSETNTIGSGGYGKVYQGNLPSGELVAIKRAAKESMQGAVEFKTEIELLSRVHHKNLVGLVGFCFEKGEQMLVYEHIPNGTLMDSLSGKSGIWMDWIRRLKVALGAARGLAYLHELADPPIIHRDIKSSNILLDHHLNAKVADFGLSKLLVDSERGHVTTQVKGTMGYLDPEYYMTQQLTEKSDVYSFGVLMLELATARRPIEQGKYIVREVMRVMDTSKDLYNLHSILDPTIMKATRPKGLEKFVMLAMRCVKEYAAERPTMAEVVKEIESMIELVGLNPNSESATTSETYVEAGVGNAQHPYREEDFSYSGIFPSTRVEPQ

SEQ ID NO: 22890 - protein, 288 aa, Glycine max
MQGAVEFKTEIELLSRVHHKNLVGLVGFCFEKGEQMLVYEHIPNGTLMDSLSGKSGIWMDWIRRLKVALGAARGLAYLHELADPPIIHRDIKSSNILLDHHLNAKVADFGLSKLLVDSERGHVTTQVKGTMGYLDPEYYMTQQLTEKSDVYSFGVLMLELATARRPIEQGKYIVREVMRVMDTSKDLYNLHSILDPTIMKATRPKGLEKFVMLAMRCVKEYAAERPTMAEVVKEIESMIELVGLNPNSESATTSETYVEAGVGNAQHPYREEDFSYSGIFPSTRVEPQ

SEQ ID NO: 22891 - DNA, 1300 bp, Glycine max
ggtagtgctagggaagaagcagtaagcactgagcttgaagtaatagatggacagcagtcgcaatttcttgcttagttctcatgtggcgccatccccacccgtcaaagtcaaagcacaggaaattcgggtatgcaccaaccgcacctgccgcagacagggctcatttcaaaccctagaaactctatctggcctcgctcctccaaacgtcgccgtgaagtcctgcgggtgcttggggcggtgcggtggcggtcccaatctggtggtcctgcctgatggcctcatcgttggccattgcgggacggctgctcgggcggcggaggtcatagcgactctgtttgccggagctggaggccatgacccaaagacttgtttagatgcgcttgctttgaggaagagagcggagattgagtttgccaagcgaaacttcactgaggctgagcttctactctcacaggtcatttgtaaggctggaattgggcaactactctggtgccctcgaagatgctgaagaggctttggcattggctcccggttattctgaggcttatatctgccaaggtgatgcctttttggcgttgaacaaatttgatttggcagagcagtcatattcagcatccttagttatagatccttcgattcgtcattctaaatcattcaaggtagcatttaatctttgatttcagctattctatcacgtgtatttattttagcataaataagcacctgtggttttcgggaaggaagatgcaacaaaactaatgagtgagaacaatgattgtatttcccgtggattttgagttatgtcgaacattaatctaaataataaaagtaaacctagaaacaaatgaaagaatattcacttctggattaatatactctcaagaatctcatatacgaggaaaaactcgtatttttttatgacttaattataaaaaggttgtcgtatcttgtagtgtttttgagaacaatattgagtcatttctgctcggtctcttctttctcctgtccattgtggtgttggtgtatcttgtttgggttcgcctgttttactaatttgaagtggctattcttctggaacaatcgttgttctttaaatttgtgtttaagcaggctcggatagcaaaacttcaggaaaaacttgctgctgtcaagacactgtgagatctagatagtaaatgaaggtccagttaattcagatacagtgatgtcagaaggaataaaatttttatcaactgtttccgggcattaaaatgccatttgcgttgtatttcaattttctggtctcaaatatcaattgacc

SEQ ID NO: 22892 - protein, 153 aa, Glycine max
MDSSRNFLLSSHVAPSPPVKVKAQEIRVCTNRTCRRQGSFQTLETLSGLAPPNVAVKSCGCLGRCGGGPNLVVLPDGLIVGHCGTAARAAEVIATLFAGAGGHDPKTCLDALALRKRAEIEFAKRNFTEAELLLSQVICKAGIGQLLWCPRRC

SEQ ID NO: 22893 - DNA, 1162 bp, Glycine max
tgcaatgagactcagaggcttgcacattactttggaaatgcacttgaagcacgcttggatggaacaggctacaaggtttgtagtgctctatcatccaaaagaacctttgccaaagacatgataaaagcttaccatgtatacgcttcagtgtgcccctttgaaaagctagcaatcatttttgccaacaattcaatttggaatccaagtgtggatgcaaaagcaattcacatcatagactttggcatccgctatggcttcaaatggcctgcacttatcagccgtctatcaagacgttctggtgggccacccaagctacgaatcacggggatagatgtgccacaacctggtttaaggccacaagagagggtgctcgagacagggcgtagacttgcaaatttttgcaagcgtttcaatgttccatttgagttcaatgctattgcacagagatgggacaccatcagagttgaagacctcaagatagagccaaacgaatttgtagctgtgaactgcttgtttcagtttgagcatctgcttgacgagacagtggtgttgaataattccagggatgctgttctgaggttgattaagaatgcaaatccagacatatttgtgcatggcattgtcaacggatcctatgatgtaccattctttgtgtcacggttccgggaggctctctttcattacactgcattgtttgacatgcttgacaccaacgttgctcgtcaagatcccatgaggttgatgtttgagaaggagttgtttggacgggagatagtgaacatcatagcttgcgaaggttttgagagggttgagagaccacaaacatacaagcaatggcagcttcggaacatgagaaatgggtttaggctgcttcctctggatcatcgaatcattggcaaattaaaggataggttgagagatgatgcgcacaacaataatttcttgcttgaggttgatggcgactgggtgctacaaggttggaagggtcgaattctatatgcttcctcttgttgggtacctgcatagcataggccttgaacattatttattccagattacaaaaatctagtcttacacacaactattagtacgtctccttcaatctccctagctcatttgttgttttttatgataaggaaaaaccaaagttatagttagtttc

SEQ ID NO: 22894 - protein, 341 aa, Glycine max
CNETQRLAHYFGNALEARLDGTGYKVCSALSSKRTFAKDMIKAYHVYASVCPFEKLAIIFANNSIWNPSVDAKAIHIIDFGIRYGFKWPALISRLSRRSGGPPKLRITGIDVPQPGLRPQERVLETGRRLANFCKRFNVPFEFNAIAQRWDTIRVEDLKIEPNEFVAVNCLFQFEHLLDETVVLNNSRDAVLRLIKNANPDIFVHGIVNGSYDVPFFVSRFREALFHYTALFDMLDTNVARQDPMRLMFEKELFGREIVNIIACEGFERVERPQTYKQWQLRNMRNGFRLLPLDHRIIGKLKDRLRDDAHNNNFLLEVDGDWVLQGWKGRILYASSCWVPA

SEQ ID NO: 22895 - protein, 302 aa, Glycine max
MIKAYHVYASVCPFEKLAIIFANNSIWNPSVDAKAIHIIDFGIRYGFKWPALISRLSRRSGGPPKLRITGIDVPQPGLRPQERVLETGRRLANFCKRFNVPFEFNAIAQRWDTIRVEDLKIEPNEFVAVNCLFQFEHLLDETVVLNNSRDAVLRLIKNANPDIFVHGIVNGSYDVPFFVSRFREALFHYTALFDMLDTNVARQDPMRLMFEKELFGREIVNIIACEGFERVERPQTYKQWQLRNMRNGFRLLPLDHRIIGKLKDRLRDDAHNNNFLLEVDGDWVLQGWKGRILYASSCWVPA

SEQ ID NO: 22896 - DNA, 1316 bp, Glycine max
catttgctttgcattgttccttcacacaacagttctttaccattcttctgttaatagattctggatccatgttcctgataatattgttccattctcaggatccagtgttgtgcagtgtgacagttggtgtttcccactttgaaagatgtgctctttgggttcaagtattgtattacccattctatggtagtggtgctgtcggagactatgaaggtgactatgccgaagaggatcctcaaatcatgagacagaagagaagcctaaggcccgaattaggtgaacctgtgattttgagatgtcagccatataaaattccattgactgagcttcttttgccacaccaaatatcacctgttgagtttttccgactgtggcccagtttgccagctatcgtagaatatactggcacatatacatatgaaggtagtggctttaaggctactgctgctcagcagtatggtgcatctcctttcttaagtggactgaaatccttgtcttccaagccattccacatagtttgttcacatataatccgcacggtggcagggtttgagatgtgttatgctgctaaaacttggcatggtggcttcttgggcatgatgatatttggtgcaagtgaagtgagtagaaatgtggacttgggtgatgagactacaaccatgctgtgcaagtttgtggttcgagcatccgatccatctattaccaaggagattggatcagatcttcaaggctggttggatgaccttactgatggcggtgtggagtatatgcctgaagatgaagtgaaagtagctgcagccgagaggcttcgcatatcaatggaaaggatagccttgttaaaggcggcccaaccacgacccaagactccaaaatctgacaacgaagatgaagaggaggaagatgacaaaaataaagaaaagaaagatggcgaagatgagaaaaagaaggggccttcaactctatcgaaactaactgctgaggaagctgaacatcaagctcttcaagcagcagtactacaggagtggcatatgatctgcaaggatagaacaactgaagttaattaactattttcttttggtgtttttgatttttcttttttccatggctttccgagaaatgtacgagtgtattctttgtaattttttctcattttacatacacgaattaggtagaagccaaaatttgcccgagaaacgttcgagtgtattctttgtatactctttcccatattttcaggaaagtgttttgtacatgtaccgcgcggctattgatctgctattttatatttgaagcatttgttggaggtgttaggcatt

SEQ ID NO: 22897 - protein, 353 aa, Glycine max
FALHCSFTQQFFTILLLIDSGSMFLIILFHSQDPVLCSVTVGVSHFERCALWVQVLYYPFYGSGAVGDYEGDYAEEDPQIMRQKRSLRPELGEPVILRCQPYKIPLTELLLPHQISPVEFFRLWPSLPAIVEYTGTYTYEGSGFKATAAQQYGASPFLSGLKSLSSKPFHIVCSHIIRTVAGFEMCYAAKTWHGGFLGMMIFGASEVSRNVDLGDETTTMLCKFVVRASDPSITKEIGSDLQGWLDDLTDGGVEYMPEDEVKVAAAERLRISMERIALLKAAQPRPKTPKSDNEDEEEEDDKNKEKKDGEDEKKKGPSTLSKLTAEEAEHQALQAAVLQEWHMICKDRTTEVN

SEQ ID NO: 22898 - protein, 331 aa, Glycine max
MFLIILFHSQDPVLCSVTVGVSHFERCALWVQVLYYPFYGSGAVGDYEGDYAEEDPQIMRQKRSLRPELGEPVILRCQPYKIPLTELLLPHQISPVEFFRLWPSLPAIVEYTGTYTYEGSGFKATAAQQYGASPFLSGLKSLSSKPFHIVCSHIIRTVAGFEMCYAAKTWHGGFLGMMIFGASEVSRNVDLGDETTTMLCKFVVRASDPSITKEIGSDLQGWLDDLTDGGVEYMPEDEVKVAAAERLRISMERIALLKAAQPRPKTPKSDNEDEEEEDDKNKEKKDGEDEKKKGPSTLSKLTAEEAEHQALQAAVLQEWHMICKDRTTEVN

SEQ ID NO: 22899 - protein, 273 aa, Glycine max
MRQKRSLRPELGEPVILRCQPYKIPLTELLLPHQISPVEFFRLWPSLPAIVEYTGTYTYEGSGFKATAAQQYGASPFLSGLKSLSSKPFHIVCSHIIRTVAGFEMCYAAKTWHGGFLGMMIFGASEVSRNVDLGDETTTMLCKFVVRASDPSITKEIGSDLQGWLDDLTDGGVEYMPEDEVKVAAAERLRISMERIALLKAAQPRPKTPKSDNEDEEEEDDKNKEKKDGEDEKKKGPSTLSKLTAEEAEHQALQAAVLQEWHMICKDRTTEVN

SEQ ID NO: 22900 - DNA, 1332 bp, Glycine max
tctgatgcattaaatcatgcatcaataattgatggcattcgtcttgctgagcggcaaaaaagtgtaaaggtgtatgtgtatagacattgtgacgtgtcccacctcaatatgctattatctaattgcagaatgaggaagaaagttgtggtgactgacagcttgtttagcatggatggagactatgcacctatggttgagttagcggaccttcgcaagaagcatggctttttgttagtcattgatgatgctcatggaacatttgtttgtggcaaaaatggtggtggtgtagccgaggagttcaactgtgagaaggatgtggacatatgcattggtacactaagtaaagctgctggttgtcatggaggatttatagcatgcagcaaaaagtggaaactattaatacagtcaagaggtcgttcgtttatattttcaactgctgcacctgttccagttgctgctgctgctcatgctgcggttaaagtggcaaaacatgagacatggcgtagagaggctatttggaaccgggtgaaagactttcatttgcttactggaatccctgttacaagtcccattatttccctaatagtaggcactgaagacaaagcacttcaagcaagccgcctttctggaacaggcatttattgcaatctggcttccacgtgacagcgatcagaccacctactgtgcctcctaactcatgcaggctgcgagtggccctaagtgcagtccatactagggaagatctggaaaaccttgcagctgcactctcacgttgcatcaatttccaagatacccgcatatatgactccaatgcctatgcaagactgtagctagctcttgattctttctggatgaattgaatcatcaatgattttgtgactatacaggaaataagtacacccttagttcctcgttagcaagttcaagtcatttacattccgaatagagtggtagcttattccctcatgttatatcaaaatgacaagctattttgtcgacatctagataaatattgttaaattacttaaacattgatatgtgcatgtatttaattttgataaacttttagtgtaagctctctctttttaaactaccatttagccttgcatcattaattattcaatgagtgtatcatgaatactactagtattgtaagagtaacttcttttgttttcttgtgtcagcatgtgatttcaagacagtgtagaaaactatacacatgtggtgtgcttgggggagcttttcagctttccaaacacagttgtcttgtaaattggattttgccttatttttgggtgtttggttgtgataaatgaaaaatattcaatatgt

SEQ ID NO: 22901 - protein, 220 aa, Glycine max
SDALNHASIIDGIRLAERQKSVKVYVYRHCDVSHLNMLLSNCRMRKKVVVTDSLFSMDGDYAPMVELADLRKKHGFLLVIDDAHGTFVCGKNGGGVAEEFNCEKDVDICIGTLSKAAGCHGGFIACSKKWKLLIQSRGRSFIFSTAAPVPVAAAAHAAVKVAKHETWRREAIWNRVKDFHLLTGIPVTSPIISLIVGTEDKALQASRLSGTGIYCNLAST

SEQ ID NO: 22902 - protein, 184 aa, Glycine max
MLLSNCRMRKKVVVTDSLFSMDGDYAPMVELADLRKKHGFLLVIDDAHGTFVCGKNGGGVAEEFNCEKDVDICIGTLSKAAGCHGGFIACSKKWKLLIQSRGRSFIFSTAAPVPVAAAAHAAVKVAKHETWRREAIWNRVKDFHLLTGIPVTSPIISLIVGTEDKALQASRLSGTGIYCNLAST

SEQ ID NO: 22903 - protein, 177 aa, Glycine max
MRKKVVVTDSLFSMDGDYAPMVELADLRKKHGFLLVIDDAHGTFVCGKNGGGVAEEFNCEKDVDICIGTLSKAAGCHGGFIACSKKWKLLIQSRGRSFIFSTAAPVPVAAAAHAAVKVAKHETWRREAIWNRVKDFHLLTGIPVTSPIISLIVGTEDKALQASRLSGTGIYCNLAST

SEQ ID NO: 22904 - DNA, 1245 bp, Glycine max
atcaacaacaatgcaacatcatttgttagtaataattttttatacatctttgtcaaaaaaaactttttttcatacttctccacccatgaaccacttaacacacttctccaatagaaaacacctttactcaaaataaaatttacttggttttaaaaaaccattatgtaaaataaaatttacatttactctaagtaaaagaaaatattcaataatttactcaaaatccctttcactaatgcaaattgctaaaccctaataatccttctctctctctctctctccatgagcacagtaccgtaacgtaacgtaaccacgagatgcctctattctagcacttggaaccccaaatccgtgccaattcctccgctccttttcgcagacgaaggcacattctgacgattggaaggcaagactaaagattccaccacctgatacaagctagaaaacagaggtttgaaatggctgtgtcactgtggagaagtcgcactgcttcatcagcactgaacttgttcaacaatactcttcgctgtttctcttccgaggcaacaaactccagtcctcatagtacacgagagagtatgatgtattctgacataaactcacgaattgggagttgcatgccactgtctgcaatgcgcattggaacaatcattcacaacattgagttgaacccagggcaaggtggcaagctcgtccgagctgctggaactagtgcaaagatcttgaaagagcccacatcggcatactgtttaatccaactgccctcgggtgttaaaaagttgattgattctcgatgtagggccactgttggtgttgtatctaatcctagccatggggatcgcaaacttaggaaggccggacacagccgatggcttggtcgaagaccagttgtccgaggagtggcaatgaatccagtagatcatcctcatggtggaggagagggtaagagcaagagtggtggacgatttgggcgaggatctctcactccttggggcaagccaactaagagtggctacaagactggacccctgaagcgcaaaaggtagtaggataccatattcattatagctgtttctgatgtttccttatgagatgcttgtaagttgtaataattgtggaaactgtcattcctatttaggaaattcattgaactgattaggttcacagccaatttgtggattttatgggttcaaattttattgttgttaaagtaaaatgtttttgaaatgatcacattttcctctg

SEQ ID NO: 22905 - protein, 195 aa, Glycine max
MAVSLWRSRTASSALNLFNNTLRCFSSEATNSSPHSTRESMMYSDINSRIGSCMPLSAMRIGTIIHNIELNPGQGGKLVRAAGTSAKILKEPTSAYCLIQLPSGVKKLIDSRCRATVGVVSNPSHGDRKLRKAGHSRWLGRRPVVRGVAMNPVDHPHGGGEGKSKSGGRFGRGSLTPWGKPTKSGYKTGPLKRKR

SEQ ID NO: 22906 - protein, 155 aa, Glycine max
MMYSDINSRIGSCMPLSAMRIGTIIHNIELNPGQGGKLVRAAGTSAKILKEPTSAYCLIQLPSGVKKLIDSRCRATVGVVSNPSHGDRKLRKAGHSRWLGRRPVVRGVAMNPVDHPHGGGEGKSKSGGRFGRGSLTPWGKPTKSGYKTGPLKRKR

SEQ ID NO: 22907 - protein, 154 aa, Glycine max
MYSDINSRIGSCMPLSAMRIGTIIHNIELNPGQGGKLVRAAGTSAKILKEPTSAYCLIQLPSGVKKLIDSRCRATVGVVSNPSHGDRKLRKAGHSRWLGRRPVVRGVAMNPVDHPHGGGEGKSKSGGRFGRGSLTPWGKPTKSGYKTGPLKRKR

SEQ ID NO: 22908 - DNA, 1344 bp, Glycine max
agatatctgtttgtacagttttcttgttagatgaaaccacattcaatttaatagtcttttttgagctaattgtaatgatgccaatgaattactggttttctccaaagagttccatatttaggttattatctattaatttgttgttcttgatatgtaggagcatctttcaaatttcagaatgcatttggtattattgttctgcaatgcaatattactttgcatatgtggtgtatattattattgtttggcttatcaaaagttatctcctcctttaaatgttaggccttacaagcacagggcttcaaatattcaattatccagtctgtatatgattattggaaagagaagcgagaacgatggcaaaagccggttttgcgacgtttgcagccgcctccaccggttaacgacaccaacccgtataatgtctttcggccaagggagaaggcccacagacttcacacaagacggatgcaaaggagagaaaacaatgtgcagtcatttgaaaagcttcgccaggtcaggcgcaaccttgaccaagctaagagcttgttggaagcattgatcaagagggaagagaaaaaaagagaagtaatggatagtgaagttacgttgcagaggatgcaaatgaagtacaagcatgaaactgagtttttggaagacaacattgcactctctggatttactcccttcacttccaagtttgtttccagtgaagaggaatatttcgattcagatgatgtcatgacaaaccgtcttctccgcacacgttctactgctttacagtctttcccttctcatgaaaccaacattcccatggttcctgccgctagcacaaagcaagagtttaggaggagatatgtcccacatggatggcctcataaactggatccacttgagccagttttattgttcaccaaacttctacttccagataagttggccatggcaggcattatgccacctgattcaatcacaccaaatggaagggtgtcaccaccgccgtatagatatcgtggaagaatgggtagaggtggccgtataatatttgaccgatggaatccacttatgcaaacaccaattgattgtggtaattcttattatatgccaccaaaaccacgaccttcaacatgtaactaatttgtttgtgcaatctggtgctaaattggtatctatcctgttgattagaatttaattgataatctaatcattaggaaggtacaatgttgcaaagggagcttgtaaacatgatttaggcctgttaagtttttttctattcttttctaggtacaaggccattcaagtattttttattggggcagtaaaagcttgatgcattttatattg

SEQ ID NO: 22909 - protein, 222 aa, Glycine max
MQRRENNVQSFEKLRQVRRNLDQAKSLLEALIKREEKKREVMDSEVTLQRMQMKYKHETEFLEDNIALSGFTPFTSKFVSSEEEYFDSDDVMTNRLLRTRSTALQSFPSHETNIPMVPAASTKQEFRRRYVPHGWPHKLDPLEPVLLFTKLLLPDKLAMAGIMPPDSITPNGRVSPPPYRYRGRMGRGGRIIFDRWNPLMQTPIDCGNSYYMPPKPRPSTCN

SEQ ID NO: 22910 - protein, 181 aa, Glycine max
MDSEVTLQRMQMKYKHETEFLEDNIALSGFTPFTSKFVSSEEEYFDSDDVMTNRLLRTRSTALQSFPSHETNIPMVPAASTKQEFRRRYVPHGWPHKLDPLEPVLLFTKLLLPDKLAMAGIMPPDSITPNGRVSPPPYRYRGRMGRGGRIIFDRWNPLMQTPIDCGNSYYMPPKPRPSTCN

SEQ ID NO: 22911 - protein, 172 aa, Glycine max
MQMKYKHETEFLEDNIALSGFTPFTSKFVSSEEEYFDSDDVMTNRLLRTRSTALQSFPSHETNIPMVPAASTKQEFRRRYVPHGWPHKLDPLEPVLLFTKLLLPDKLAMAGIMPPDSITPNGRVSPPPYRYRGRMGRGGRIIFDRWNPLMQTPIDCGNSYYMPPKPRPSTCN

SEQ ID NO: 22912 - DNA, 1434 bp, Glycine max
tattcaagaacccagttcttccgagacacattgctgcccagtactccccgggaatatttagtctaaacagtaatgggcttatccagaaagggttcaggcgtcaaaggaatttcgttactaggaataaggttactgtcatacgtgccgtggcaattcccgtacaaccagctccggtggaaagtgcggagtatagaaaacaactagctgaagactacggtttcaggcaaattggagagtcgcttcctgatgatgttactttaaaggatgtcatcaattcccttcctaaggaggtctttgagattgatgatgtgaaagcatggaaatctgttttgatatctgtcacttcttatgcactggggatcttcttgatttccaaagctccctggtatcttcttcctctggcttgggcatggacagggactgcaataactgggttctttgttataggacatgattgtgctcacaaatcattttcgtctaacaaattggtagaggacattgttggaactttggcctttatgcccctgatttatccatatgagccttggcgatttaagcatgacaggcatcatgcaaaaacaaacatgttgcgtgaagatactgcttggcaccctgtttggaaggacgagtttgaatctactacacttttgaggaaagcaataatatatggatatggtccatttcgatgttggatgtctatagctcactggttgatgtggcactttgatttgaagaagttcagaccaagtgaatggccattaattatttacaagactggctggaatcatgggatggataaaattctggttgatgccatggttgggctatcacttctggatgagtacatttaccatggtacatcacactgcaccgcatataccattcaaaaactcagaagagtggaatgctgcacaagcacagcttaatggaactgttcattgtgattaccctaaatggatcgagatcctatgtcatgatgttaatgtccatattccacaccacatatccccgaggataccaagctataatttaagggcagcccataagtctctccaagaaaactggggacagtatctgaatgaagctagttggaattggagattgatgaagataatcatgacagtgtgtcatgtgtacgacaaggagcaaaactatgttgccttcgacgaactcgcccctgaagattcacgtccaattacatttttgaaggaaaccatgcctgattatgcttaattaggttcaagctggcttttttctcatatgaaattttttatgtatcaaattaggttcgtatggcattcattttctttttacattttcgatcttgtttagtaatatagttctatttttcatatcatgtattacgagaaaattgcttgctgctctcaaagttcacgtattagagtaattaattatattaccaagttgcggatc

SEQ ID NO: 22913 - protein, 307 aa, Glycine max
FKNPVLPRHIAAQYSPGIFSLNSNGLIQKGFRRQRNFVTRNKVTVIRAVAIPVQPAPVESAEYRKQLAEDYGFRQIGESLPDDVTLKDVINSLPKEVFEIDDVKAWKSVLISVTSYALGIFLISKAPWYLLPLAWAWTGTAITGFFVIGHDCAHKSFSSNKLVEDIVGTLAFMPLIYPYEPWRFKHDRHHAKTNMLREDTAWHPVWKDEFESTTLLRKAIIYGYGPFRCWMSIAHWLMWHFDLKKFRPSEWPLIIYKTGWNHGMDKILVDAMVGLSLLDEYIYHGTSHCTAYTIQKLRRVECCTSTA

SEQ ID NO: 22914 - DNA, 1410 bp, Glycine max
agagaaattccttgacataaccaaagatacattcgtggacatgatgctgctggacgccgtattcatcatggaacttatgttgagaaactgcgagttcaaatcacacaaagccaagcatgagcaaaaccacaagcgaaccgaatcctttagaattaaaaacaacaatgatctgatcatgacacactcatggcttagcaggaacatcgctggggacttgatccttatagagaaccaaatacccttttttgtgctgcagaaactctatgatgatgttgtccctcgtgaaagcaagaaggatgaacacactgcggggtttgttaagcttgctactgagtactttgctttctatgacacccaaatgtcttcttctggtgaaaccaagaaacactgttcctgttacatactccactgtctgaaggaaccttgtaagtcaaaaggaaaagataggagtgagatttcgaaacgtcctctaggaagcaattctgaagagaatccagaaggaccaaaacatttcactgatctgataaggtggcaattttaccttcccaccgagtgtgaagccggtcatgctcatcaggttctaagaactgcaacaaagttacaaggctcagggataagctttgagaaaggtgatgtgaacaagcggttactggaaatagccttcaagaagaccccaattctgagttcatttctttgctttggttgctttccattgtcgaagctcttcaaagcgcgtttgaggattccccaattgaaggtagaccacacaactgaacgtgtgttcaagaacctcgttgcttttgagcagtttcactatccagacaagccttacttttgcaactatgtttctttcattgactctctgatacacactcagcttgatgtggagttgctggttgagaaggaagtgattgtgcatgaacttgggagtgataaggaagtggcaactcttgttaatggtttatgcaaacatgttgtcacaaactcaacttgttaccatcacattataaataagctcaacgaccattacatgaacgattggaaccacactattgcggctttaaggttggtgtacttcagagatctttggagggcaagtggcactgtggtgggtattgctgtgctggtttttgctgtcttccaattcctccgtgtttgtcgttatctcttctagaatgaacaaaaatgtaactcagtttggattattattgcaaataacagctacaaccatggagtgcttattttcttcttgtttctaggggtttgatttgttgttgtttagatttcagattaggagttctgattctgtttttatataaatttaaaatatttaaaattatgttgttatacctacaaacaatggatgtatcagttatgttttgtgctctttatatatacagttgtttcaac

SEQ ID NO: 22915 - protein, 390 aa, Glycine max
EKFLDITKDTFVDMMLLDAVFIMELMLRNCEFKSHKAKHEQNHKRTESFRIKNNNDLIMTHSWLSRNIAGDLILIENQIPFFVLQKLYDDVVPRESKKDEHTAGFVKLATEYFAFYDTQMSSSGETKKHCSCYILHCLKEPCKSKGKDRSEISKRPLGSNSEENPEGPKHFTDLIRWQFYLPTECEAGHAHQVLRTATKLQGSGISFEKGDVNKRLLEIAFKKTPILSSFLCFGCFPLSKLFKARLRIPQLKVDHTTERVFKNLVAFEQFHYPDKPYFCNYVSFIDSLIHTQLDVELLVEKEVIVHELGSDKEVATLVNGLCKHVVTNSTCYHHIINKLNDHYMNDWNHTIAALRLVYFRDLWRASGTVVGIAVLVFAVFQFLRVCRYLF

SEQ ID NO: 22916 - protein, 377 aa, Glycine max
MMLLDAVFIMELMLRNCEFKSHKAKHEQNHKRTESFRIKNNNDLIMTHSWLSRNIAGDLILIENQIPFFVLQKLYDDVVPRESKKDEHTAGFVKLATEYFAFYDTQMSSSGETKKHCSCYILHCLKEPCKSKGKDRSEISKRPLGSNSEENPEGPKHFTDLIRWQFYLPTECEAGHAHQVLRTATKLQGSGISFEKGDVNKRLLEIAFKKTPILSSFLCFGCFPLSKLFKARLRIPQLKVDHTTERVFKNLVAFEQFHYPDKPYFCNYVSFIDSLIHTQLDVELLVEKEVIVHELGSDKEVATLVNGLCKHVVTNSTCYHHIINKLNDHYMNDWNHTIAALRLVYFRDLWRASGTVVGIAVLVFAVFQFLRVCRYLF

SEQ ID NO: 22917 - protein, 376 aa, Glycine max
MLLDAVFIMELMLRNCEFKSHKAKHEQNHKRTESFRIKNNNDLIMTHSWLSRNIAGDLILIENQIPFFVLQKLYDDVVPRESKKDEHTAGFVKLATEYFAFYDTQMSSSGETKKHCSCYILHCLKEPCKSKGKDRSEISKRPLGSNSEENPEGPKHFTDLIRWQFYLPTECEAGHAHQVLRTATKLQGSGISFEKGDVNKRLLEIAFKKTPILSSFLCFGCFPLSKLFKARLRIPQLKVDHTTERVFKNLVAFEQFHYPDKPYFCNYVSFIDSLIHTQLDVELLVEKEVIVHELGSDKEVATLVNGLCKHVVTNSTCYHHIINKLNDHYMNDWNHTIAALRLVYFRDLWRASGTVVGIAVLVFAVFQFLRVCRYLF

SEQ ID NO: 22918 - DNA, 1702 bp, Glycine max
agacattaatgaagaggttgtggaagattatttggaaggagttggtggtagtgacaacatcatggaagcaaaatggttgctaaaacctgttttggatgagtcaaatgatgatagttcttccagcagttgctatgacgaggcattggagaagttgagtggctttgtccttcaagaagcctccagggaatatggcatgaagaaagctcaaccatggaagaaacgctctgtaggttctggacctttagctttggaagacctaatgttggaaaaggatccaagatccatctctgctagaaagaagcatgttcctcgattccctcaatcttggccttcacatgctcagaagagtaaagcttccaaaagaattcatggtgaaaaaaagaaacttcgtaaagaaaggattgctgtaaagcgcagggaaagaatgctgcatcgtggggttgatcttgagaaaattaattcgaaattagaaaaaattgttttggagcaagtggatatgttctcttttcagcctatgcattctcgggattgttcacagatacaacaattagcagcaatttatcaattgcagagtagcagccaaggatctggcaaaaaaagatttgtgacagtgatgcgaacgcagtctacatccatgccatcttcaagtggtagacagcgcctggaaaagttgttgggagttgatgatgaggatgccgatttttccgtggctgactatgtgaataagaaatctgtgagtggagacagaagactgggaaagaaaaatgctaaaaggaatgattttagattccaagaacctcaatctgcccagaacaagtactcaggaagccataaagtgaaggacaagaaagggagtggacaaaagggttcatatgctaatcagcctgtgtcatttgtatcaagtggcttaatccattcagaaactgtacaggttacagttgatgctgaagagactaataggaatggtgtcaccagctctgctaatataggttcatttgaagaacacactactggttttggttcaaaaatgatggctaaaatgggatacacggagggagcaggattggggaaaaatggtcaaggtatggcacaacctattgaggttattcaaaggcccaaatcacttggtttaggtgtagaattttccaacaattcagctgagccagctaggaacaaatcttcaagagttggtgctaaatcacttggtgtgggtgtagaattctccaacagcccggctaagccagctccaaacaaatcttctaatgttggtgcttttgaaaaacacactaaaggctttggatcaaagatgatggcaaagatgggctttgtggaaggcacgggattaggtagagaatcacaaggcattaccactccgttgagtgctgttaggcttccaaagtcgcgaggactaggtgccaaaagttaatttataagtaattgtatgttggcttagtaaatcttatgattctctcgtagtttagctttaccatgggatgaccatctctgaaatcactcggttaaaatgctatatttctagctcctagttatttgtttttactttttttaggaagaactaagaaaactcagtcctaaagaggacatgtaattatgttgaatgtggccagctcttggatgaccacatggaatcatacttttccttatttttttcattaatcattatttaagttacggaccacttaac

SEQ ID NO: 22919 - protein, 474 aa, Glycine max
DINEEVVEDYLEGVGGSDNIMEAKWLLKPVLDESNDDSSSSSCYDEALEKLSGFVLQEASREYGMKKAQPWKKRSVGSGPLALEDLMLEKDPRSISARKKHVPRFPQSWPSHAQKSKASKRIHGEKKKLRKERIAVKRRERMLHRGVDLEKINSKLEKIVLEQVDMFSFQPMHSRDCSQIQQLAAIYQLQSSSQGSGKKRFVTVMRTQSTSMPSSSGRQRLEKLLGVDDEDADFSVADYVNKKSVSGDRRLGKKNAKRNDFRFQEPQSAQNKYSGSHKVKDKKGSGQKGSYANQPVSFVSSGLIHSETVQVTVDAEETNRNGVTSSANIGSFEEHTTGFGSKMMAKMGYTEGAGLGKNGQGMAQPIEVIQRPKSLGLGVEFSNNSAEPARNKSSRVGAKSLGVGVEFSNSPAKPAPNKSSNVGAFEKHTKGFGSKMMAKMGFVEGTGLGRESQGITTPLSAVRLPKSRGLGAKS

SEQ ID NO: 22920 - protein, 454 aa, Glycine max
MEAKWLLKPVLDESNDDSSSSSCYDEALEKLSGFVLQEASREYGMKKAQPWKKRSVGSGPLALEDLMLEKDPRSISARKKHVPRFPQSWPSHAQKSKASKRIHGEKKKLRKERIAVKRRERMLHRGVDLEKINSKLEKIVLEQVDMFSFQPMHSRDCSQIQQLAAIYQLQSSSQGSGKKRFVTVMRTQSTSMPSSSGRQRLEKLLGVDDEDADFSVADYVNKKSVSGDRRLGKKNAKRNDFRFQEPQSAQNKYSGSHKVKDKKGSGQKGSYANQPVSFVSSGLIHSETVQVTVDAEETNRNGVTSSANIGSFEEHTTGFGSKMMAKMGYTEGAGLGKNGQGMAQPIEVIQRPKSLGLGVEFSNNSAEPARNKSSRVGAKSLGVGVEFSNSPAKPAPNKSSNVGAFEKHTKGFGSKMMAKMGFVEGTGLGRESQGITTPLSAVRLPKSRGLGAKS

SEQ ID NO: 22921 - protein, 410 aa, Glycine max
MKKAQPWKKRSVGSGPLALEDLMLEKDPRSISARKKHVPRFPQSWPSHAQKSKASKRIHGEKKKLRKERIAVKRRERMLHRGVDLEKINSKLEKIVLEQVDMFSFQPMHSRDCSQIQQLAAIYQLQSSSQGSGKKRFVTVMRTQSTSMPSSSGRQRLEKLLGVDDEDADFSVADYVNKKSVSGDRRLGKKNAKRNDFRFQEPQSAQNKYSGSHKVKDKKGSGQKGSYANQPVSFVSSGLIHSETVQVTVDAEETNRNGVTSSANIGSFEEHTTGFGSKMMAKMGYTEGAGLGKNGQGMAQPIEVIQRPKSLGLGVEFSNNSAEPARNKSSRVGAKSLGVGVEFSNSPAKPAPNKSSNVGAFEKHTKGFGSKMMAKMGFVEGTGLGRESQGITTPLSAVRLPKSRGLGAKS

SEQ ID NO: 22922 - DNA, 1425 bp, Glycine max
attttacactttcattacctttcacacgtgctctctcaatctctcacgtagctctctcactctcacactgatccaactccaccacaagtcagagaatccgcagatttggccaaagaatctgtagatctgacatccaaagttttaaatacactatcccctcccacctcctcgatcgtgtgtattgtgaacatcactgccacggtcatcgtcactagagtccagtgctagcttttggagcactgtgccaaattatgtcgtgccgctcatcgtcgattcagattcacaatgctaaaaacctgtcataattagattcacagtttttataaatcggtctttgcaatcgacaatctctttcttttcttttcgtgtttagggatttagtctgattcctctgtgtttcttgttattgtgcaggcattacttgcgttttctttgaatctgattttgttactattaccaaatccaaagaggctgcgtgggatttcctcaagcttgaaatatttgtcaccgatatggcttgctatggtgttttagaatttgtgatggaaagtggggccaaaggatgcgaggtttgtttatggactcctaatattgtattgcatcatgtaatggtttggttgttattgttgtttgacctgagtaggtcattactagtggaaaactgagagctctgagagccaagtccatgaaattcaaggatggatacatgatttcttttggacaaccagtcaaggattatattgactcagtagtgagacacgtgctactaagatagggtgctcttggtatcaaggttaagatcatgcttgattgggatcctaaagggaatcagagtcctaaaactccctttcctgatcttgtcacgatccacactccaaaggaggaagaatacaagtagcctccagctgtattggcaaatgatattgagtgaaagcttgtgcaaagattaaagagtaaagtctttggatctacatccaacaaaaccatgtgacaaatattgttgggggctcaattggctggagaagatatcttgatcatcttatcagttcactatgtcatgataaagatatatctagcatggaacttcttctcttacagctgcttgacagttcatgttcaagaaagagagcttgcatcagggaatagtcttcgtggttatatccacttagttgacttggcaggaagctataaaggtaacaggtaaaggatgtgtaaaggtcatctttttactacaccagaacagtgggaacaactttgtcttgaagttagaagtgttgatgttttcagaattcagcttctttccttggtgtttttttttttggttttatctactcttagttctcagtcacggcttagttattctgaagaataatgaagttgtcatttggcaatccttaattatgaaaatgaggaagcatttgtgtc

SEQ ID NO: 22923 - protein, 54 aa, Glycine max
MCKGHLFTTPEQWEQLCLEVRSVDVFRIQLLSLVFFFLVLSTLSSQSRLSYSEE

SEQ ID NO: 22924 - protein, 50 aa, Glycine max
MACYGVLEFVMESGAKGCEVCLWTPNIVLHHVMVWLLLLFDLSRSLLVEN

SEQ ID NO: 22925 - protein, 48 aa, Glycine max
MIKIYLAWNFFSYSCLTVHVQERELASGNSLRGYIHLVDLAGSYKGNR

SEQ ID NO: 22926 - DNA, 1424 bp, Glycine max
gcagagagaaggtttcaaagaaatggccacatgggtgaatggttggggcaaattactaccatttctggggatgttgatggctatgctaactcaaagtggaagcatggtggtaatcaaatttgctatgactgatgggatgaacaagtatgttatggttgtatattcaatggcactctccagctccatacttctcccctttgtcttgtttctacatagcaggtcagagcttcctcttctcacagttcctgcacttggaagcttctttttgcttgcactctttgcgagttcagcacatataatggcttatgttggcatagaactcagctctcctactcttgcatcagctatacttaatgtcattccagctttcacttttgtacttgctctcattttcaggatggaagaagtacattggagatattttagcagccaagctaaagtcttgggaacaatagtgtcaattggtggagcatttgttgtgatactgtacaagggtccacccatctttaggacacattcatcatacacttcaaacaaacttcaattttcggcacaaccaaactggatcttgggagggatatttttggttgctgattctttccttagttccatgtggtacatatatcaggcttcggttgcaaagaaataccctgctgtaacagtcatagtattcttccaattcttattttcaaccattcagtgtggagtatttgccttaattgcagttagagatccaacggaatgggagctgaagttcgatagagggttgagtgtcattttatatcaggcaatagttgcaacaatgttacgttacaccctaaccacatggtgcgtccatagagcaggacctctgttttgtgctatgttcaagccagtgggaatcatcttcaccgtttctatgagtgcaatctttctgggggagaatttcggccttggaagtttgattggtgcggttataatcgtgataggattttatgctgtactatggggaaattccagagaggagaacaagattgagaatttggagtcatcgagccataatgctcctttattgcaagataggtcgtaacaggtaggttgaaatcatcgtaccataatttggcgtatcagaaacaggtgaatgaatcgtatcatgctaaccattgatatgcacttccttgttggatatattttccgtgagtggaatacttgtgtaaaaattttagtcactcatggcacccgtgaatagcttttgttggtgggattttaatccacaaattatagcttcttcttttgtaaatgataggcaaactatacctaattacaggtttaggtagtttacttttggttttgattcacagtttggcctctgtcccccatgtttgttttgtaatcttgcttcctttttttaatatattctggatgtgctgcttttcgtggttaag

SEQ ID NO: 22927 - protein, 355 aa, Glycine max
QREGFKEMATWVNGWGKLLPFLGMLMAMLTQSGSMVVIKFAMTDGMNKYVMVVYSMALSSSILLPFVLFLHSRSELPLLTVPALGSFFLLALFASSAHIMAYVGIELSSPTLASAILNVIPAFTFVLALIFRMEEVHWRYFSSQAKVLGTIVSIGGAFVVILYKGPPIFRTHSSYTSNKLQFSAQPNWILGGIFLVADSFLSSMWYIYQASVAKKYPAVTVIVFFQFLFSTIQCGVFALIAVRDPTEWELKFDRGLSVILYQAIVATMLRYTLTTWCVHRAGPLFCAMFKPVGIIFTVSMSAIFLGENFGLGSLIGAVIIVIGFYAVLWGNSREENKIENLESSSHNAPLLQDRS

SEQ ID NO: 22928 - protein, 348 aa, Glycine max
MATWVNGWGKLLPFLGMLMAMLTQSGSMVVIKFAMTDGMNKYVMVVYSMALSSSILLPFVLFLHSRSELPLLTVPALGSFFLLALFASSAHIMAYVGIELSSPTLASAILNVIPAFTFVLALIFRMEEVHWRYFSSQAKVLGTIVSIGGAFVVILYKGPPIFRTHSSYTSNKLQFSAQPNWILGGIFLVADSFLSSMWYIYQASVAKKYPAVTVIVFFQFLFSTIQCGVFALIAVRDPTEWELKFDRGLSVILYQAIVATMLRYTLTTWCVHRAGPLFCAMFKPVGIIFTVSMSAIFLGENFGLGSLIGAVIIVIGFYAVLWGNSREENKIENLESSSHNAPLLQDRS

SEQ ID NO: 22929 - protein, 332 aa, Glycine max
MLMAMLTQSGSMVVIKFAMTDGMNKYVMVVYSMALSSSILLPFVLFLHSRSELPLLTVPALGSFFLLALFASSAHIMAYVGIELSSPTLASAILNVIPAFTFVLALIFRMEEVHWRYFSSQAKVLGTIVSIGGAFVVILYKGPPIFRTHSSYTSNKLQFSAQPNWILGGIFLVADSFLSSMWYIYQASVAKKYPAVTVIVFFQFLFSTIQCGVFALIAVRDPTEWELKFDRGLSVILYQAIVATMLRYTLTTWCVHRAGPLFCAMFKPVGIIFTVSMSAIFLGENFGLGSLIGAVIIVIGFYAVLWGNSREENKIENLESSSHNAPLLQDRS

SEQ ID NO: 22930 - DNA, 2089 bp, Glycine max
ggtataccaaattgcttgaggccttcaatttcacccttcacacgtggtggtggtgttgttcttcttctcttcccctttctttttcttcttctgagcttgtttaagctctttctatttgattccattaacatatattatcacaatgtgtggtattcttgctgttcttggttgttctgatgactctcgagccaaaagggtccgcgtgcttgagctctctcgcagattgaagcaccgtggccctgactggagtgggctccatcaacatggtgactgctttttagcacatcaacggttagccatagttgatcctgcttctggggatcaacctctctttaacgaggacaaatccgtcattgtcacggtgaatggagagatttacaaccatgaagagctcaggaaacagctgcctaatcacaagttccgtactggatgtgattgtgatgttattgcacacctgtacgaggaacatggagaagactttgtggacatgctggatggtatcttctcatttgttctactggacacccgtgacaacagttttatagtggctcgggatgctattggggtcacttccttgtacattggatggggattagatggctctgtttggatttcatcagaaatgaaaggcctgaatgatgattgtgaacactttgagtgttttccacctggtcacttgtactctagcaaagaaagagggtttcgcagatggtacaatcctccttggttctctgaggctactccatccaccccttatgatcctctcgttttaagacacacctttgagcaggcagtcataaaaagattgatgactgatgtgccttttggtgttctactctctggaggtttggactcttcattggttgcatccgtcacttctcgctacttggccaacacaaaggctgctgagcagtggggatcaaagttacattcattctgtgtaggccttgagggctcaccagatttgaaggctgcaaaagaagttgctgactatctaggcactgtccaccatgagtttaccttcactgttcaggatggaatagatgccattgaagatgttatctaccatgttgaaacatatgatgtgactacaattagagctagcacacccatgtttctcatgtctcggaagattaaatcacttggtgtcaaatgggttatctccggagaaggatctgatgagatctttggagggtatctgtacttccacaaggcacccaacaaggaggagtttcacagagaaacatgccgcaagatcaaagcactccaccaatatgattgcttgcgagccaataaatcaacatttgcttggggtctagaagcccgtgtaccatttttggacaaggcatttatcaatactgcaatgagtattgaccctgagtcgaaaatgataaaaagagatgaaggacgaattgagaagtggattctgaggagagcctttgatgatgaagagcatccttatctgccaaagcacattttatacaggcagaaagagcaattcagtgatggagttggctatagctggattgatggccttaaggcccatgctgcaaaacatgtgactgacaaaatgatgcttaatgctggtaacatctaccctcacaacaccccaacaaccaaggaagcatattactacagaatgatctttgagaggttcttccctcagaactcagctaggctcaccgttcctggaggagcaagtgttgcatgtagcacagccaaagctgttgagtgggatgctgcttggtctaacaaccttgatccttctggtagagcagcacttggagtgcacatttcagcctatgaaaaccagaacaacaacaagggtgtagaaattgagaagattatacctatggatgctgctcctcttggtgttgcaatccagggataatataaagctgtgacaaagaataattgggggagaatgaactatgctaaacgtgtatgaaaaatttgcctgcagtgtacttttatcttggcaaagctttgtagtgtatagatatagatataaggctttctaaaagtgtagcgtattgtattatcttgaatgctgtgatttgaagtcttaataaaagtgtttctattatcg

SEQ ID NO: 22931 - protein, 582 aa, Glycine max
MCGILAVLGCSDDSRAKRVRVLELSRRLKHRGPDWSGLHQHGDCFLAHQRLAIVDPASGDQPLFNEDKSVIVTVNGEIYNHEELRKQLPNHKFRTGCDCDVIAHLYEEHGEDFVDMLDGIFSFVLLDTRDNSFIVARDAIGVTSLYIGWGLDGSVWISSEMKGLNDDCEHFECFPPGHLYSSKERGFRRWYNPPWFSEATPSTPYDPLVLRHTFEQAVIKRLMTDVPFGVLLSGGLDSSLVASVTSRYLANTKAAEQWGSKLHSFCVGLEGSPDLKAAKEVADYLGTVHHEFTFTVQDGIDAIEDVIYHVETYDVTTIRASTPMFLMSRKIKSLGVKWVISGEGSDEIFGGYLYFHKAPNKEEFHRETCRKIKALHQYDCLRANKSTFAWGLEARVPFLDKAFINTAMSIDPESKMIKRDEGRIEKWILRRAFDDEEHPYLPKHILYRQKEQFSDGVGYSWIDGLKAHAAKHVTDKMMLNAGNIYPHNTPTTKEAYYYRMIFERFFPQNSARLTVPGGASVACSTAKAVEWDAAWSNNLDPSGRAALGVHISAYENQNNNKGVEIEKIIPMDAAPLGVAIQG

SEQ ID NO: 22932 - protein, 467 aa, Glycine max
MLDGIFSFVLLDTRDNSFIVARDAIGVTSLYIGWGLDGSVWISSEMKGLNDDCEHFECFPPGHLYSSKERGFRRWYNPPWFSEATPSTPYDPLVLRHTFEQAVIKRLMTDVPFGVLLSGGLDSSLVASVTSRYLANTKAAEQWGSKLHSFCVGLEGSPDLKAAKEVADYLGTVHHEFTFTVQDGIDAIEDVIYHVETYDVTTIRASTPMFLMSRKIKSLGVKWVISGEGSDEIFGGYLYFHKAPNKEEFHRETCRKIKALHQYDCLRANKSTFAWGLEARVPFLDKAFINTAMSIDPESKMIKRDEGRIEKWILRRAFDDEEHPYLPKHILYRQKEQFSDGVGYSWIDGLKAHAAKHVTDKMMLNAGNIYPHNTPTTKEAYYYRMIFERFFPQNSARLTVPGGASVACSTAKAVEWDAAWSNNLDPSGRAALGVHISAYENQNNNKGVEIEKIIPMDAAPLGVAIQG

SEQ ID NO: 22933 - protein, 422 aa, Glycine max
MKGLNDDCEHFECFPPGHLYSSKERGFRRWYNPPWFSEATPSTPYDPLVLRHTFEQAVIKRLMTDVPFGVLLSGGLDSSLVASVTSRYLANTKAAEQWGSKLHSFCVGLEGSPDLKAAKEVADYLGTVHHEFTFTVQDGIDAIEDVIYHVETYDVTTIRASTPMFLMSRKIKSLGVKWVISGEGSDEIFGGYLYFHKAPNKEEFHRETCRKIKALHQYDCLRANKSTFAWGLEARVPFLDKAFINTAMSIDPESKMIKRDEGRIEKWILRRAFDDEEHPYLPKHILYRQKEQFSDGVGYSWIDGLKAHAAKHVTDKMMLNAGNIYPHNTPTTKEAYYYRMIFERFFPQNSARLTVPGGASVACSTAKAVEWDAAWSNNLDPSGRAALGVHISAYENQNNNKGVEIEKIIPMDAAPLGVAIQG

SEQ ID NO: 22934 - DNA, 1321 bp, Glycine max
tctagattcacgtgttgtagaatcaacaacagattttcctcagaagttcttctactgcttttggtggggtttgcgcaatttaagttctcttggacaaaatctaaagactagtactgatgtctcagaaatagcttttgcaatcttcattgccatctttggattggtcttattctcattacttattggaaacatgcagaaatatctgcaatctacaactgtaagagtggaggagatgagagtgaagagacaggacgcagaacagtggatgtcccaccgtatgctacctgagaacttgagggaaagaattagaaagtacgaacagtaccaatggcaagaaaataggggtgttgaggaggaggcattaattcgtaaccttcctaaagatctcagaagggacattaagcgtcacctttgcttaactttagttaaaaaagtgccaatgtttgagaaaatggatgagcagttgttggatgcaatgtgtgatagactgaagccagtcctttatactgagaagagctacattgttcgtgaagaagatccagttgatgagatgcttttcattatgcgcggaaaagtttcgaccatgacaacgaatggtggaagaactggtttcttcaactccatgttcctcaaggctggtgacttttgtggagaggaacttctgacatgggctttggatcccaactcctcctcaaatctacccatttcaaccaggacagtagaaactatatcagaagttgaagcctttgctctcacggctgatgacttgaagtttgttgcttcccaatttcgacgccttcacagcaaacagctccaacacgctttcaggttctattcctcacagtggaagacatgggctgctactttcatacaagcagcttggcgtcgatactggaaaaagaagattgagaggtcattgcgcgaagcagaagatgagctacaagatgctttggcaaatgaggaagagtctagtctaagccttggtgcaaccatatatgcatcaaggtttgctgccaatgcactgcgaaatttgagagaaaatagcagacacaatagaatgcaacagagactactacctctgttacctccaaagccagctgaaccagatttcacttctcagaaacactaatttgcaaataggaataagtacatgttaatgttatccatactccatagctattttgtgtgtatattttgggagggttgcttaggaattgcttcaacaactacatgtggatatgtaggggtaatatttcatcaaaatttaattaaacaatcatttagattacaattttttaaataaccgtctagttaatactgc

SEQ ID NO: 22935 - protein, 375 aa, Glycine max
LDSRVVESTTDFPQKFFYCFWWGLRNLSSLGQNLKTSTDVSEIAFAIFIAIFGLVLFSLLIGNMQKYLQSTTVRVEEMRVKRQDAEQWMSHRMLPENLRERIRKYEQYQWQENRGVEEEALIRNLPKDLRRDIKRHLCLTLVKKVPMFEKMDEQLLDAMCDRLKPVLYTEKSYIVREEDPVDEMLFIMRGKVSTMTTNGGRTGFFNSMFLKAGDFCGEELLTWALDPNSSSNLPISTRTVETISEVEAFALTADDLKFVASQFRRLHSKQLQHAFRFYSSQWKTWAATFIQAAWRRYWKKKIERSLREAEDELQDALANEEESSLSLGATIYASRFAANALRNLRENSRHNRMQQRLLPLLPPKPAEPDFTSQKH

SEQ ID NO: 22936 - protein, 312 aa, Glycine max
MQKYLQSTTVRVEEMRVKRQDAEQWMSHRMLPENLRERIRKYEQYQWQENRGVEEEALIRNLPKDLRRDIKRHLCLTLVKKVPMFEKMDEQLLDAMCDRLKPVLYTEKSYIVREEDPVDEMLFIMRGKVSTMTTNGGRTGFFNSMFLKAGDFCGEELLTWALDPNSSSNLPISTRTVETISEVEAFALTADDLKFVASQFRRLHSKQLQHAFRFYSSQWKTWAATFIQAAWRRYWKKKIERSLREAEDELQDALANEEESSLSLGATIYASRFAANALRNLRENSRHNRMQQRLLPLLPPKPAEPDFTSQKH

SEQ ID NO: 22937 - protein, 298 aa, Glycine max
MRVKRQDAEQWMSHRMLPENLRERIRKYEQYQWQENRGVEEEALIRNLPKDLRRDIKRHLCLTLVKKVPMFEKMDEQLLDAMCDRLKPVLYTEKSYIVREEDPVDEMLFIMRGKVSTMTTNGGRTGFFNSMFLKAGDFCGEELLTWALDPNSSSNLPISTRTVETISEVEAFALTADDLKFVASQFRRLHSKQLQHAFRFYSSQWKTWAATFIQAAWRRYWKKKIERSLREAEDELQDALANEEESSLSLGATIYASRFAANALRNLRENSRHNRMQQRLLPLLPPKPAEPDFTSQKH

SEQ ID NO: 22938 - DNA, 1362 bp, Glycine max
ttttcatccaaatgcaattaccctcaacacactcatcaaaggcctctgttttcgtggggagattaaaaaagcactttactttcacgatcaggtggtggctcaagggttccagttggaccaagtcagttatgggacgttgatcaatggtttgtgcaaaacaggagagacaaaggctgtcgcaagattactgaggaagctggaaggacactcggttaaacctgatgtggtaatgtacaatactataattaatagcttatgcaaaaataaactcctaggagatgcctgtgatgtgtactctgaaatgattgttaagggaatttccccggatgttgtcacctacactactctgatccatggcttttgcatcatgggtcatttgaaagaagcattttccttgttgaatgaaatgaaattgaaaaacatcaaccccaatgtttgtacctttaacatattgattgatgcattaagcaaggaaggtaagatgaaagaagctaaaattgtgttagctgtaatgatgaaagcatgtattaagcctgatgtttttacttataattctctaatagatggatacttcttggttgatgaagtaaaacacgcaaagtatgtattctattctatggctcaaaggggagtgacccctgatgttcagtgttacactaacatgattaatgggttatgtaagacaaaaatggtggatgaagctatgagtctctttgaagaaatgaagcataaaaatatgattcctgatattgtgacttacaattctcttattgatggtctgtgcaaaaatcatcatctggagagggcaattgcattatgcaagagaatgaaagagcagggaattcagccagatgtatactcatacacaatacttcttgatgggctgtgcaagagtggaagacttgaggatgcaaaagagatttttcagcgtcttttggctaaaggctatcatttgaatgtccacgcatatactgttctgatcaacagactttgtaaagcgggcttttttgatgaagcgctggatttgaagtcaaaaatggaagacaaaggttgcatgcctgatgctgtaacttttgacataattattcgggccttatttgaaaaagatgaaaatgataaggcagagaaaattctccgagaaatgattgctagaggcttattgaaagagtaaaactaggggcgattgttttcaattactattgaataactggttcattcatggcaacaaatattcaatcgtttattttcttgatttatataaattttttatacccattcccatttgcttatagatacaatcctgttcaaatgactcaatttcactagtcttcttatggtatttatatttgcgtttttccttcc

SEQ ID NO: 22939 - protein, 389 aa, Glycine max
FHPNAITLNTLIKGLCFRGEIKKALYFHDQVVAQGFQLDQVSYGTLINGLCKTGETKAVARLLRKLEGHSVKPDVVMYNTIINSLCKNKLLGDACDVYSEMIVKGISPDVVTYTTLIHGFCIMGHLKEAFSLLNEMKLKNINPNVCTFNILIDALSKEGKMKEAKIVLAVMMKACIKPDVFTYNSLIDGYFLVDEVKHAKYVFYSMAQRGVTPDVQCYTNMINGLCKTKMVDEAMSLFEEMKHKNMIPDIVTYNSLIDGLCKNHHLERAIALCKRMKEQGIQPDVYSYTILLDGLCKSGRLEDAKEIFQRLLAKGYHLNVHAYTVLINRLCKAGFFDEALDLKSKMEDKGCMPDAVTFDIIIRALFEKDENDKAEKILREMIARGLLKE

SEQ ID NO: 22940 - protein, 313 aa, Glycine max
MYNTIINSLCKNKLLGDACDVYSEMIVKGISPDVVTYTTLIHGFCIMGHLKEAFSLLNEMKLKNINPNVCTFNILIDALSKEGKMKEAKIVLAVMMKACIKPDVFTYNSLIDGYFLVDEVKHAKYVFYSMAQRGVTPDVQCYTNMINGLCKTKMVDEAMSLFEEMKHKNMIPDIVTYNSLIDGLCKNHHLERAIALCKRMKEQGIQPDVYSYTILLDGLCKSGRLEDAKEIFQRLLAKGYHLNVHAYTVLINRLCKAGFFDEALDLKSKMEDKGCMPDAVTFDIIIRALFEKDENDKAEKILREMIARGLLKE

SEQ ID NO: 22941 - protein, 289 aa, Glycine max
MIVKGISPDVVTYTTLIHGFCIMGHLKEAFSLLNEMKLKNINPNVCTFNILIDALSKEGKMKEAKIVLAVMMKACIKPDVFTYNSLIDGYFLVDEVKHAKYVFYSMAQRGVTPDVQCYTNMINGLCKTKMVDEAMSLFEEMKHKNMIPDIVTYNSLIDGLCKNHHLERAIALCKRMKEQGIQPDVYSYTILLDGLCKSGRLEDAKEIFQRLLAKGYHLNVHAYTVLINRLCKAGFFDEALDLKSKMEDKGCMPDAVTFDIIIRALFEKDENDKAEKILREMIARGLLKE

SEQ ID NO: 22942 - DNA, 1717 bp, Glycine max
ggaaagagttcagagcaatgggcaatggtctttgttttgccccaatgaagcgccaggtttggctgattgctggggtgaagaatttgagaaattgtacactcaatatgaaagagaaggaaaagcaaagaaggttgttcaggcacagaatctctggtttgaaattttgaagtcccagatagaaactggaactccttacatgctttttaaggacacttgcaataaaaaaagcaaccaacagaatttgggcacaatcaagtcatcaaacttgtgcactgagataattgagtatacaagtccaacagaaacggctgtgtgcaacttggcatcgattgccctgccgcgatatgtaagagagaagggtgtgcccatggaatctcatccatctaagcttgttggaagcagaggctcaaaaaaccgatattttgactttgacaaactgggagaggttactgcaatagtggcaacaaacctcaataaaataattgatgttaattactacccagttgatactgctagaagatcaaacatgcgacaccgacccattggtattggagttcagggtcttgccgataccttcatactactaggtgtggcatttgattcaccagaggctcagcagttgaacaaggatatatttgagactatatactatcatgcactaaaaacttcatctgaattggctgcaaaagaaggtccctatgaaacatatagtggtagtcctataagcaagggaattcttcagccagacatgtggggtgtgatgccctcaagtcgttgggattgggatgcacttcgggagatgatagcaaagacgggtgtgagaaactcacttcttgttgcccctatgccaactgcatcaactagccagattcttggcaataatgagtgttttgagccatatacttctaatatctacagccgcagagttctaagtggtgaatttgttgtagtgaacaagcatttacttcatgacttgactgaaatgggactttggtctcctacaatcaagaataatattatctatgaggatggttcagttcagaaaatcccagaaatacctgatgatctgaaaatcatatacaagactgtttgggagattaagcaaaagacattggttgatatggctgttgatagaggatgctacatagaccagagtcagagcttgaatattcacatggatcaacccaactttggaaagttaacttctttgcatttctatgcatggtcaaagggtttgaagactgggatgtattatctgcgatcacgtgccgcagccgatgctatcaagtttactgttgatacctctatgctccatgaaaaacctatggcagaggaagaggatgataataccaagatggcacagatggtgtgctctttaacaaaccgagaagagtgtttggcttgtggaagttgaaagcattccaagttgcattttcccggattgattttgggcctaaaaacccttaataagtgcaaacctcaaaaatttgttttaggccttaatgatataaggttcaactcatacatgataatcttaagcattctaaattatctttagagctttgtatagtacttatggtgttaatttcatttgtacctgtttatgtattgtatgttaaatagttgaaagatgtcattgttggtagcatgtcaactgtccagtgagattctttatttcctacatttaaatgttacaatttgcttatctattccttcc

SEQ ID NO: 22943 - protein, 470 aa, Glycine max
ERVQSNGQWSLFCPNEAPGLADCWGEEFEKLYTQYEREGKAKKVVQAQNLWFEILKSQIETGTPYMLFKDTCNKKSNQQNLGTIKSSNLCTEIIEYTSPTETAVCNLASIALPRYVREKGVPMESHPSKLVGSRGSKNRYFDFDKLGEVTAIVATNLNKIIDVNYYPVDTARRSNMRHRPIGIGVQGLADTFILLGVAFDSPEAQQLNKDIFETIYYHALKTSSELAAKEGPYETYSGSPISKGILQPDMWGVMPSSRWDWDALREMIAKTGVRNSLLVAPMPTASTSQILGNNECFEPYTSNIYSRRVLSGEFVVVNKHLLHDLTEMGLWSPTIKNNIIYEDGSVQKIPEIPDDLKIIYKTVWEIKQKTLVDMAVDRGCYIDQSQSLNIHMDQPNFGKLTSLHFYAWSKGLKTGMYYLRSRAAADAIKFTVDTSMLHEKPMAEEEDDNTKMAQMVCSLTNREECLACGS

SEQ ID NO: 22944 - protein, 405 aa, Glycine max
MLFKDTCNKKSNQQNLGTIKSSNLCTEIIEYTSPTETAVCNLASIALPRYVREKGVPMESHPSKLVGSRGSKNRYFDFDKLGEVTAIVATNLNKIIDVNYYPVDTARRSNMRHRPIGIGVQGLADTFILLGVAFDSPEAQQLNKDIFETIYYHALKTSSELAAKEGPYETYSGSPISKGILQPDMWGVMPSSRWDWDALREMIAKTGVRNSLLVAPMPTASTSQILGNNECFEPYTSNIYSRRVLSGEFVVVNKHLLHDLTEMGLWSPTIKNNIIYEDGSVQKIPEIPDDLKIIYKTVWEIKQKTLVDMAVDRGCYIDQSQSLNIHMDQPNFGKLTSLHFYAWSKGLKTGMYYLRSRAAADAIKFTVDTSMLHEKPMAEEEDDNTKMAQMVCSLTNREECLACGS

SEQ ID NO: 22945 - protein, 348 aa, Glycine max
MESHPSKLVGSRGSKNRYFDFDKLGEVTAIVATNLNKIIDVNYYPVDTARRSNMRHRPIGIGVQGLADTFILLGVAFDSPEAQQLNKDIFETIYYHALKTSSELAAKEGPYETYSGSPISKGILQPDMWGVMPSSRWDWDALREMIAKTGVRNSLLVAPMPTASTSQILGNNECFEPYTSNIYSRRVLSGEFVVVNKHLLHDLTEMGLWSPTIKNNIIYEDGSVQKIPEIPDDLKIIYKTVWEIKQKTLVDMAVDRGCYIDQSQSLNIHMDQPNFGKLTSLHFYAWSKGLKTGMYYLRSRAAADAIKFTVDTSMLHEKPMAEEEDDNTKMAQMVCSLTNREECLACGS

SEQ ID NO: 22946 - DNA, 1391 bp, Glycine max
atctctatcaaggggcatttgttgacattggcggggtacatgatgggtgggttcctataaagaacaatgattggtattggcttcgccatcacataaaagtgggtatgcacgtcattgttgaaattacggcaaagcgagatccttatcgcttccgctttcctatcgaacttcgttttgttgatccaaatatagaccatctaatctttaacaaattttacttcccaccaatatttcatcgtgatgaagatactaatgaagatgaaatacggcgtgactgtggaagacctcctgttcctaggaaagatccaggagacaaaccagaggaagaacctctattgtctaatcatccatatgtcgagaagttgtggcaaattaatgtagctgagcaaatgattttggatgatatggcaattaatcctgataaatatgaaggcaaaaaactgtcagatttggttgatgaagaagattttgatgaacaaaacgctgttgagtatacaaaagttcaatataagaataccacgctaccacaaactactctgaaaacaagtgtcaaagagcttgacttagaggctgcacttgctgagcgtgagctccatgttaaactaaggaaggaagcagcggacagaggtgagaaatacaaaattaccaaactgaggcgcaatgttgagatggatgagtatgactacatgcattggcgtagatcatttgaggaaagagaagcattgactagagacatcagctgtcgcaaagctcttggtctgccattggaagagccaggaagatatatggatgctagtttttttggtaaagatcaatatgatcctacaagtcctctgtatcgttatgactactggggggaacccaagaattcggagaagagcatgcaagagcggatgacagatctccataacaaaaaaatcgtgggcaagggcaatgtttggtacgaaatgtcatatgaagattgcatccagcaacagatggaaagtgaagcccagtctaaggagcaagaaaacgatgaagatacaaggcaaggtcaagctgatgaagatgaggatgacgaggatgatgatgatgattttgacttcagtattctgagcagtttcggtagtaatttctccgatcagcctcatgttaatgggaccgagtcttctacaatatcaggtgagggcatgtttgaggattgatgctacaatgcatcattgtttagctaaagtaaattgtacagtcagactgagaaatgtgcataaattttggcagtgtacaatgtgttcacagcggcaatccaattttatttgtattgtttacgaaaattgtcacatggcgactgcactgatacgaccatttaggttttcgggaaatgagaatcaagaaaatacatcgagacattctgt

SEQ ID NO: 22947 - protein, 393 aa, Glycine max
LYQGAFVDIGGVHDGWVPIKNNDWYWLRHHIKVGMHVIVEITAKRDPYRFRFPIELRFVDPNIDHLIFNKFYFPPIFHRDEDTNEDEIRRDCGRPPVPRKDPGDKPEEEPLLSNHPYVEKLWQINVAEQMILDDMAINPDKYEGKKLSDLVDEEDFDEQNAVEYTKVQYKNTTLPQTTLKTSVKELDLEAALAERELHVKLRKEAADRGEKYKITKLRRNVEMDEYDYMHWRRSFEEREALTRDISCRKALGLPLEEPGRYMDASFFGKDQYDPTSPLYRYDYWGEPKNSEKSMQERMTDLHNKKIVGKGNVWYEMSYEDCIQQQMESEAQSKEQENDEDTRQGQADEDEDDEDDDDDFDFSILSSFGSNFSDQPHVNGTESSTISGEGMFED

SEQ ID NO: 22948 - protein, 359 aa, Glycine max
MHVIVEITAKRDPYRFRFPIELRFVDPNIDHLIFNKFYFPPIFHRDEDTNEDEIRRDCGRPPVPRKDPGDKPEEEPLLSNHPYVEKLWQINVAEQMILDDMAINPDKYEGKKLSDLVDEEDFDEQNAVEYTKVQYKNTTLPQTTLKTSVKELDLEAALAERELHVKLRKEAADRGEKYKITKLRRNVEMDEYDYMHWRRSFEEREALTRDISCRKALGLPLEEPGRYMDASFFGKDQYDPTSPLYRYDYWGEPKNSEKSMQERMTDLHNKKIVGKGNVWYEMSYEDCIQQQMESEAQSKEQENDEDTRQGQADEDEDDEDDDDDFDFSILSSFGSNFSDQPHVNGTESSTISGEGMFED

SEQ ID NO: 22949 - protein, 264 aa, Glycine max
MILDDMAINPDKYEGKKLSDLVDEEDFDEQNAVEYTKVQYKNTTLPQTTLKTSVKELDLEAALAERELHVKLRKEAADRGEKYKITKLRRNVEMDEYDYMHWRRSFEEREALTRDISCRKALGLPLEEPGRYMDASFFGKDQYDPTSPLYRYDYWGEPKNSEKSMQERMTDLHNKKIVGKGNVWYEMSYEDCIQQQMESEAQSKEQENDEDTRQGQADEDEDDEDDDDDFDFSILSSFGSNFSDQPHVNGTESSTISGEGMFED

SEQ ID NO: 22950 - DNA, 1322 bp, Glycine max
aaaaaaaaaccgcatctgttccgtgtaaggagaagtcacaaaatttctcagctcctgcctgtatacttcacatggcctaatcccacagtcgcacactcttccaccctgccatcaccaatcatcaacacaacgcccattattatttaaaaatccttaatatattattattcttcgtccatcgctttttcttgaagactacttcatccttcttattagtttctttttatttcaatctttctcactcgcacgcacgcacgcacagtctctagtggtaccgtgccggttcatttgcttcatccaccacctcattttcagagatttcgtgcactcaacaaactctcatccacccatggcgtcatcactatcaacaatagctctattcctgccccaatcgctctatattaagccccgcctggcgccacggcctcttcctccccctcaattccgctcccttttcctaacctcaccggcgggtgctcgtactgctactgtcatgcctagaagggcggcagtcatcgtgtcggcggcgacggcggagacgccgaagaagaagggcgaatcgaaagggttcgtggaagagatgaggttcgtggcgatgaggctgcacacgagggaccaggccagggagggcgagaaggaggtcaagcagcccgaggagaaagccgttaccaagtgggacccatccgtcgaagggtacctgaaatttcttgtggacagtaagctcgtttatgacacgctggagaaaatcgttcaagaggctcctcatccttcttatgctgaattcagaaacactggattggaaaggtctgcaagtttggcagaagatttggagttgttcaaggagcaaggttataccattcctgaaccttcttctcctggtcttacctatgcacaatatcttaaggagttatctgtgaaggatccccaagcattcatttgccatttttacaatatctactttgctcattcagctggtggtcgaatgattgggaaaaaggttgctgaaaagttacttaacaacaaggcgttggagttctacaaatgggatgatgaccttccacgattgttgcagaatgtgagagacaagttgaataaagttgctgaaccttggagtcgggaagaaaaggaccactgtctggaagaaacagaaaaatcattcaagctctctggagagattctccgtttgattttatcatgataatagatgccctgctatctgtgtaattatgggtattaaagtgcatggcggaagccaacaacattaccatatgtgaattattttatttccaatacgcaaaggaataatagaactgatgttgatt

SEQ ID NO: 22951 - protein, 282 aa, Glycine max
MASSLSTIALFLPQSLYIKPRLAPRPLPPPQFRSLFLTSPAGARTATVMPRRAAVIVSAATAETPKKKGESKGFVEEMRFVAMRLHTRDQAREGEKEVKQPEEKAVTKWDPSVEGYLKFLVDSKLVYDTLEKIVQEAPHPSYAEFRNTGLERSASLAEDLELFKEQGYTIPEPSSPGLTYAQYLKELSVKDPQAFICHFYNIYFAHSAGGRMIGKKVAEKLLNNKALEFYKWDDDLPRLLQNVRDKLNKVAEPWSREEKDHCLEETEKSFKLSGEILRLILS

SEQ ID NO: 22952 - protein, 234 aa, Glycine max
MPRRAAVIVSAATAETPKKKGESKGFVEEMRFVAMRLHTRDQAREGEKEVKQPEEKAVTKWDPSVEGYLKFLVDSKLVYDTLEKIVQEAPHPSYAEFRNTGLERSASLAEDLELFKEQGYTIPEPSSPGLTYAQYLKELSVKDPQAFICHFYNIYFAHSAGGRMIGKKVAEKLLNNKALEFYKWDDDLPRLLQNVRDKLNKVAEPWSREEKDHCLEETEKSFKLSGEILRLILS

SEQ ID NO: 22953 - protein, 205 aa, Glycine max
MRFVAMRLHTRDQAREGEKEVKQPEEKAVTKWDPSVEGYLKFLVDSKLVYDTLEKIVQEAPHPSYAEFRNTGLERSASLAEDLELFKEQGYTIPEPSSPGLTYAQYLKELSVKDPQAFICHFYNIYFAHSAGGRMIGKKVAEKLLNNKALEFYKWDDDLPRLLQNVRDKLNKVAEPWSREEKDHCLEETEKSFKLSGEILRLILS

SEQ ID NO: 22954 - DNA, 1446 bp, Glycine max
atgcagtatgtctccaaaggccttcgccatctcagttccgcattttccgttttggacgctaatcgaccctggctctgctactggatcttccactccattgctttgtcgggagaatccgtcgatgatgaactcgaagataacgctatcgattttcttaaccgttgccaggatccgaatggtggatatgccgggggaccaggccagatgcctcatattgccacaacttatgctgctgttaattcacttattactttgggtggtgagaaatccctggcatcaattaataggtgagataaactgtatgggtttctgcggcggatgaagcaaccaaatggtggattcaggatgcatgatgaaggtgaaattgatgttcgagcttgctacactgccatttctgttgcaagtgttttgaacattttggatgatgagctgatccagaatgttggagactacattataagctgtcaaacatatgagggtggcattgctggtgagcctggttctgaggctcatggtgggtacaccttttgtggattagctacaatgattctgattggtgaggttaatcacttggatctgcctcgattagttgactgggtggtattccgacaaggtaaggaatgtggattccaggggagaacaaataaactggtggatggatgctattccttttggcagattatcttctattatcaacaaacagatggaagagacatcacagatttttgcggtatcttatttatctgaagcaaaagaaagtttggatggaacctctagtcatgcaacatgccgtggtgagcatgaaggcaccagtgaatccagttcatctgattttaaaaatattgcctataaatttattaatgagtggagagcacaagaaccactttttcacagtattgctttacagcaatatattctcttatgtgcacaggagcaagagggtggactgagagacaaaccgggtaaacgtagagatcattatcacacatgttactgtttaagtggactctcattgtgccagtatagttggtcaaagcacccagattctccaccactgcctaatctagtattaggcccctactctaatctcttagaaccaatccaccccctctttaatgttgtcttgggacgatatcgtgaagctcatgaattcttctttactgagtcgtgaccactggttttagctaccaacaactttatttgtataatgtaaaataaattcattggaacatataaatgtaaaacagcattggattgctcgggttttatgtctctgggttttgatgattattgataacttgatatggatatgtattgtgttgaagggttgacgtgagatcatgtaaccgacctcacctagtgagataagcctttgctgttattattgttgttgatatgaatatgtagtttcttaaaatagaagtttatgtctattgtgttgtctgc

SEQ ID NO: 22955 - protein, 171 aa, Glycine max
MDAIPFGRLSSIINKQMEETSQIFAVSYLSEAKESLDGTSSHATCRGEHEGTSESSSSDFKNIAYKFINEWRAQEPLFHSIALQQYILLCAQEQEGGLRDKPGKRRDHYHTCYCLSGLSLCQYSWSKHPDSPPLPNLVLGPYSNLLEPIHPLFNVVLGRYREAHEFFFTES

SEQ ID NO: 22956 - protein, 155 aa, Glycine max
MEETSQIFAVSYLSEAKESLDGTSSHATCRGEHEGTSESSSSDFKNIAYKFINEWRAQEPLFHSIALQQYILLCAQEQEGGLRDKPGKRRDHYHTCYCLSGLSLCQYSWSKHPDSPPLPNLVLGPYSNLLEPIHPLFNVVLGRYREAHEFFFTES

SEQ ID NO: 22957 - protein, 142 aa, Glycine max
MKQPNGGFRMHDEGEIDVRACYTAISVASVLNILDDELIQNVGDYIISCQTYEGGIAGEPGSEAHGGYTFCGLATMILIGEVNHLDLPRLVDWVVFRQGKECGFQGRTNKLVDGCYSFWQIIFYYQQTDGRDITDFCGILFI

SEQ ID NO: 22958 - DNA, 1421 bp, Glycine max
aaatgttgtaaccatccctacctctttgtgggtgactatgatatccataaacacaaggaggagattttcagagcatcaggaaagtttgaacttcttgaccgtttgcttccaaaacttcgtagagctggtcacagagtcctccttttttctcagatgactcggctcatggacattcttgaaatttatctgcgacttaatgattttaaatttcttagacttgatggctcaacaaaaactgaggaaagaggttccctactacggaaattcaatgcacctgattctgcatactttatgtttctcttgagcacccgtgccggaggtcttggtttgaacttacaaacagcagatactgttataatctttgacagcgattggaacccacaaatggatcaacaagccgaggatcgagcacatcgcattggacaaaaaaaggaagttagagtttttgtgttagttagtgtgggatctattgaagaggtgattttagagcgtgctaaacaaaagatgggcattgatgccaaagtcattcaggcagggctctttaacacaacttctacagcacaagacagaagagaaatgttgcaggagattatgcgtagaggtactagctcacttggtacggatgtcccgagtgagagagaaattaaccgccttgcggcccgatctgatgaggaattttggctgtttgagaaaatggatgaagagcgaaggcaaaaggagaattacagatctcgtctcatggaagagcatgaactgccggattgggtatactctccactaaataaggatgataaggtcaaaatatttgacagtggtagtgttactggaaagcgtaaaagaaatgaagtggtatatgcagatacattaagtgacctacaatggatgaaggctgtggagaacggacaggacatatctaagctttcagtcaaagggaaaagaagagaccacctccctgttgacaaccatgcacaagctagtgatgacatggggacagaagaacggttatttagaagtgaagacactttcgacgtgacacctgcctctaagagactcaagcccgaagaaataaattcccagaaacatgaaaacgaagatgtcagtgttggtggtttgaacgagcatatattttcctggaatactcgtagaaagaagagatcaggctaccttggccagggttcattctctgatagtagagggcagaattcaaatggaagagcaaactggaactgatagttctaatttagtcatggatgccagaaattttccctacatttgtattgtgattctgcttcattgtgtttgtcaaggtaaatggtagattacactcgatcagcaaatgtagataccagcaaattccttctggcagttgtgaagtttatcagtgtgaatgtaaaatctaattgatgaaacacatttcccct

SEQ ID NO: 22959 - protein, 409 aa, Glycine max
KCCNHPYLFVGDYDIHKHKEEIFRASGKFELLDRLLPKLRRAGHRVLLFSQMTRLMDILEIYLRLNDFKFLRLDGSTKTEERGSLLRKFNAPDSAYFMFLLSTRAGGLGLNLQTADTVIIFDSDWNPQMDQQAEDRAHRIGQKKEVRVFVLVSVGSIEEVILERAKQKMGIDAKVIQAGLFNTTSTAQDRREMLQEIMRRGTSSLGTDVPSEREINRLAARSDEEFWLFEKMDEERRQKENYRSRLMEEHELPDWVYSPLNKDDKVKIFDSGSVTGKRKRNEVVYADTLSDLQWMKAVENGQDISKLSVKGKRRDHLPVDNHAQASDDMGTEERLFRSEDTFDVTPASKRLKPEEINSQKHENEDVSVGGLNEHIFSWNTRRKKRSGYLGQGSFSDSRGQNSNGRANWN

SEQ ID NO: 22960 - protein, 358 aa, Glycine max
MTRLMDILEIYLRLNDFKFLRLDGSTKTEERGSLLRKFNAPDSAYFMFLLSTRAGGLGLNLQTADTVIIFDSDWNPQMDQQAEDRAHRIGQKKEVRVFVLVSVGSIEEVILERAKQKMGIDAKVIQAGLFNTTSTAQDRREMLQEIMRRGTSSLGTDVPSEREINRLAARSDEEFWLFEKMDEERRQKENYRSRLMEEHELPDWVYSPLNKDDKVKIFDSGSVTGKRKRNEVVYADTLSDLQWMKAVENGQDISKLSVKGKRRDHLPVDNHAQASDDMGTEERLFRSEDTFDVTPASKRLKPEEINSQKHENEDVSVGGLNEHIFSWNTRRKKRSGYLGQGSFSDSRGQNSNGRANWN

SEQ ID NO: 22961 - protein, 354 aa, Glycine max
MDILEIYLRLNDFKFLRLDGSTKTEERGSLLRKFNAPDSAYFMFLLSTRAGGLGLNLQTADTVIIFDSDWNPQMDQQAEDRAHRIGQKKEVRVFVLVSVGSIEEVILERAKQKMGIDAKVIQAGLFNTTSTAQDRREMLQEIMRRGTSSLGTDVPSEREINRLAARSDEEFWLFEKMDEERRQKENYRSRLMEEHELPDWVYSPLNKDDKVKIFDSGSVTGKRKRNEVVYADTLSDLQWMKAVENGQDISKLSVKGKRRDHLPVDNHAQASDDMGTEERLFRSEDTFDVTPASKRLKPEEINSQKHENEDVSVGGLNEHIFSWNTRRKKRSGYLGQGSFSDSRGQNSNGRANWN

SEQ ID NO: 22962 - DNA, 1491 bp, Glycine max
aaaaccaaagggtgtcctccatacaactggtggttacatggtgtacactgcaacaacattcaagtatgcatttgactacaagccgcatgacatctactggtgtactgctgattgtggttggattactgggcacagctatgtcacttatggacccatgctcaatggtgcatctgtcatcgtgtatgaaggggctcctaattatcctgatgctgggagatgttgggacattgttgacaaatataaggtgacaatattctacactgctcctacattggtgcggtccctcatgcgtgatggtgacacgtttgttactcgctactcaaggaaatctttacgagtcctaggaagtgtaggcgagcccataaatccaagtgcatggaggtggttttacaatgtagttggagattcaaggtgccctatctctgacacttggtggcaaacagaaacgggtggcttcatgataactccactaccaggtgcttggccccagaaacctggttctgcaactctccctttctttggagttcagccagtcattgtggatgagaaaggtgttgaaatagaaggagagtgcaatggatatttgtgtgtgaagaaatcatggcccggggcattcagaactctgtatggtgatcatgaaagatatgaaacaacatatttcaagccattttccggatactttttcagtggtgatggttgcagcagggataaagatggataccattggctcactggaagagttgatgatgttatcaatgttagtgggcatcgaattggcacagcagaagtggaatcagctttagtttcacatccgcaatgtgcagaggctgctgtggttggtgtggagcatgaggtcaaaggacagggcatctatgcatttgttacagttgtggatggtgttccttacagtgaagaactgcggaaggaccttgtactcacagttcgaaagcagataggagcctttgcagcgcctgacaaaattcattgggcacctggccttccaaaaacaaggagtggaaagataatgcgaagaattctgagaaaaattgcttcccggcagctggatgaacttggagatacaagtaccctttcagatccaaatgtggtcaatcaacttatagaacttgcagattcttgaagccccaaactttgtattattataggtatgagaaatgctagtaacatactctagcatactttttttaacacacttttcattattagttaaagtttattggaaattgcaataatttatggatcatcactacttatttaatgatccgtattcgtgatcttgtagtttcttataaattttaatcaatagtagagagtgaataagaaagagtatgttagagaaagtgttgttagtattccttgtaaaggtatattagcccatgagaaacgaggacaaattttgccttgtgtatctgtaatttttatgggaatcttagttcatgtgataaataataaatcaatcttccatctcttctc

SEQ ID NO: 22963 - protein, 378 aa, Glycine max
KPKGVLHTTGGYMVYTATTFKYAFDYKPHDIYWCTADCGWITGHSYVTYGPMLNGASVIVYEGAPNYPDAGRCWDIVDKYKVTIFYTAPTLVRSLMRDGDTFVTRYSRKSLRVLGSVGEPINPSAWRWFYNVVGDSRCPISDTWWQTETGGFMITPLPGAWPQKPGSATLPFFGVQPVIVDEKGVEIEGECNGYLCVKKSWPGAFRTLYGDHERYETTYFKPFSGYFFSGDGCSRDKDGYHWLTGRVDDVINVSGHRIGTAEVESALVSHPQCAEAAVVGVEHEVKGQGIYAFVTVVDGVPYSEELRKDLVLTVRKQIGAFAAPDKIHWAPGLPKTRSGKIMRRILRKIASRQLDELGDTSTLSDPNVVNQLIELADS

SEQ ID NO: 22964 - protein, 366 aa, Glycine max
MVYTATTFKYAFDYKPHDIYWCTADCGWITGHSYVTYGPMLNGASVIVYEGAPNYPDAGRCWDIVDKYKVTIFYTAPTLVRSLMRDGDTFVTRYSRKSLRVLGSVGEPINPSAWRWFYNVVGDSRCPISDTWWQTETGGFMITPLPGAWPQKPGSATLPFFGVQPVIVDEKGVEIEGECNGYLCVKKSWPGAFRTLYGDHERYETTYFKPFSGYFFSGDGCSRDKDGYHWLTGRVDDVINVSGHRIGTAEVESALVSHPQCAEAAVVGVEHEVKGQGIYAFVTVVDGVPYSEELRKDLVLTVRKQIGAFAAPDKIHWAPGLPKTRSGKIMRRILRKIASRQLDELGDTSTLSDPNVVNQLIELADS

SEQ ID NO: 22965 - protein, 327 aa, Glycine max
MLNGASVIVYEGAPNYPDAGRCWDIVDKYKVTIFYTAPTLVRSLMRDGDTFVTRYSRKSLRVLGSVGEPINPSAWRWFYNVVGDSRCPISDTWWQTETGGFMITPLPGAWPQKPGSATLPFFGVQPVIVDEKGVEIEGECNGYLCVKKSWPGAFRTLYGDHERYETTYFKPFSGYFFSGDGCSRDKDGYHWLTGRVDDVINVSGHRIGTAEVESALVSHPQCAEAAVVGVEHEVKGQGIYAFVTVVDGVPYSEELRKDLVLTVRKQIGAFAAPDKIHWAPGLPKTRSGKIMRRILRKIASRQLDELGDTSTLSDPNVVNQLIELADS

SEQ ID NO: 22966 - DNA, 1592 bp, Glycine max
agaagaaatggtgtttttggtagaccactttgtgtgaacccctctggcaggagaaacctagttggtccagctttttattctctggagactagtgcttatgacgtggctgctttagaatctccttcccgtgttgcagaagaaaaagttggtgtgctgcttctcaatctaggaggaccagagacattgagtgacgtgcaaccttttctgtttaatctttttgcagatcctgatatcattcgtcttccaaggttgtttcggtttctccagcgaccattggcaaaattgatttctgtacttcgggctcctaaatccaaggaagggtatgctgctattggtggtggctctcctttacgaaaaattacagatgaccaggcacttgcaattaaaatggctttggaagcaaagggcatctcttcaaatgtctacgttgggatgcgatactggtacccatttactgaagaagcaattcagcaaattaagagggacagaataacaaggcttgtggtactacccctttatccccagttttctatatccacaactggatcaagcatccgtgttcttgagcatatattcagggaagatgcctacttgtctaagctccctgtttccattataaactcttggtatcaacgagaaggttatattaagtcaatggctaacttaattcagaaagagctccagagtttttctgaaccaaaagaggtaatgatatttttcagtgcccatggtgtacctgtcagttacgttgaggaagctggggatccataccgagaccaaatggaggagtgcatcttcttgatcatgcaagagttgaaagctagaggaattagtaatgagcacactcttgcttatcagagtcgagtgggtcctgtacagtggctgaaaccatatactgatgaagttctcgttgagcttggccaaaaaggtgtgaagagtcttttagctgttccagtgagttttgtgagtgagcatattgaaacccttgaagaaattgacatggagtacaaggaattggctcttgaatctggcatcaagaattgggcacgtgtacctgcccttggtgttaccccttccttcattacagatttagcagatgcagtaatagaagctctcccatcagcaacagcaatatatgcaccgaccagaacctctgaagatgttgatcatgacccagttagatattttatcaagatgttctttggttcaatcttggcattcatcttgttcttgtcacccaaaatgatcacggcattcaggaatcatgtcatttagaagaattaaatcctgcttgctgaattcaatctgcaagcatatagatgaagcctattgatagcaacaaagtatactttgattttttgtctttgttttacttatttcaacctctactgtatacagcacagagctataaggaagcaatttttcgcacttgattataatgagaacttgcacctcggcttaaagaggattcaaagaataataattgtagaccaggatctattcaggagccaagaggcattgtctccatctccgatattaaaccccgaacaagttattgatttttgtatattatttatttacactttttctac

SEQ ID NO: 22967 - protein, 424 aa, Glycine max
RRNGVFGRPLCVNPSGRRNLVGPAFYSLETSAYDVAALESPSRVAEEKVGVLLLNLGGPETLSDVQPFLFNLFADPDIIRLPRLFRFLQRPLAKLISVLRAPKSKEGYAAIGGGSPLRKITDDQALAIKMALEAKGISSNVYVGMRYWYPFTEEAIQQIKRDRITRLVVLPLYPQFSISTTGSSIRVLEHIFREDAYLSKLPVSIINSWYQREGYIKSMANLIQKELQSFSEPKEVMIFFSAHGVPVSYVEEAGDPYRDQMEECIFLIMQELKARGISNEHTLAYQSRVGPVQWLKPYTDEVLVELGQKGVKSLLAVPVSFVSEHIETLEEIDMEYKELALESGIKNWARVPALGVTPSFITDLADAVIEALPSATAIYAPTRTSEDVDHDPVRYFIKMFFGSILAFILFLSPKMITAFRNHVI

SEQ ID NO: 22968 - protein, 295 aa, Glycine max
MALEAKGISSNVYVGMRYWYPFTEEAIQQIKRDRITRLVVLPLYPQFSISTTGSSIRVLEHIFREDAYLSKLPVSIINSWYQREGYIKSMANLIQKELQSFSEPKEVMIFFSAHGVPVSYVEEAGDPYRDQMEECIFLIMQELKARGISNEHTLAYQSRVGPVQWLKPYTDEVLVELGQKGVKSLLAVPVSFVSEHIETLEEIDMEYKELALESGIKNWARVPALGVTPSFITDLADAVIEALPSATAIYAPTRTSEDVDHDPVRYFIKMFFGSILAFILFLSPKMITAFRNHVI

SEQ ID NO: 22969 - protein, 280 aa, Glycine max
MRYWYPFTEEAIQQIKRDRITRLVVLPLYPQFSISTTGSSIRVLEHIFREDAYLSKLPVSIINSWYQREGYIKSMANLIQKELQSFSEPKEVMIFFSAHGVPVSYVEEAGDPYRDQMEECIFLIMQELKARGISNEHTLAYQSRVGPVQWLKPYTDEVLVELGQKGVKSLLAVPVSFVSEHIETLEEIDMEYKELALESGIKNWARVPALGVTPSFITDLADAVIEALPSATAIYAPTRTSEDVDHDPVRYFIKMFFGSILAFILFLSPKMITAFRNHVI

SEQ ID NO: 22970 - DNA, 1136 bp, Glycine max
aaacaaacatcaaacccatttttctatttttttttcttttcttttctctcttacacaccttccatgccttctcttttcaagagatctttcttccttctcctcctcctccttcatctccacaactcttaaaaaccctcctcatcgatccaacaagcagcaacctcactgaatctacaaacagtaacaaagattattactcgtagatccaataacagtaataacacctcagtttcttctcttaacagatcatgaattcctttcaagaatttgactcatcaaacacggacagtaacagtaccaaagccatcatcaacttcacatcaggtaacagcaccaatttcccaccagcgccaccaccatcatcatcttcaccgccatgttcctcttcttcttctggcaccaccaccctgagccgctacgagaaccaaaagcgccgcgactggaacacgttcgggcagtacctccgcaaccacaggcccccactctcgcttgcacggtgcagcggcgcgcacgtgctggagttcctgcggtacctggaccagttcgggaaaaccaaggttcacacgcagctttgtccattcttcgggcacccgaaccctcctgcagcgtgcccttgccttctacggcaagcgtgggggagcctggatgcactcatagggcgcctcagagctgcctttgaagagaatggagggaagcctgaggctaaccctttcggtgctcgcgctgtcagactctaccttcgcgaagtgcgtgattcgcaagccaaggctaggggaattagctacgagaagaagaagcgcaagcgtccccaacaacctcctttgcctccctcaaataatgcaaaagttgtgatttgacaatgggctgggggcactgcaatatgggcacaccctttgcaatggcattagaaaaatattgtgtaaacctaaactgcagtactctcggtagatgcagcagtaatttatgtagtggcagtaataaacactagggagggctgtgcatgtgtgtctgtgacaaatcaacaatatcacaacattgtccgatttgtattaataaaataaaaatgtgtatgaactcttgaagatgttatgaagaaaataataatggatctcaagatcttgtcagtttccatattg

SEQ ID NO: 22971 - protein, 202 aa, Glycine max
MNSFQEFDSSNTDSNSTKAIINFTSGNSTNFPPAPPPSSSSPPCSSSSSGTTTLSRYENQKRRDWNTFGQYLRNHRPPLSLARCSGAHVLEFLRYLDQFGKTKVHTQLCPFFGHPNPPAACPCLLRQAWGSLDALIGRLRAAFEENGGKPEANPFGARAVRLYLREVRDSQAKARGISYEKKKRKRPQQPPLPPSNNAKVVI

SEQ ID NO: 22972 - DNA, 1667 bp, Glycine max
atatgctgatggcaatggaacagactcagatgaggtgaaaacagagtcatttagaaaggttatagctggtgaaatgacttgtgtgccttctaacattgaccttgatggatggggagaaacaagcatccccaacacttcatccagaactggaagcatctctgtccattcttcttcaactcattccttgaaccctacaagtcattgcctttctcggtttagcctcattcctggtaatgtaagcttcagacttagcagaaccactagtttggggtcatcaaggcctcgtcctgtttcttctgccaatctctcaatatttgacaatgaagatgagcataatctcaatcctggatctcctggaagattgataaacagaagtgaaacacaacaatgtagtaacttgcttcccgcatctttttccaatcaaatacatgcacagtgtcatgaagacgcttctaataattcaaggtcaaatgtcccgacatcaggcgtagttggaaacttgcagagctatcccacagatggagtatgtgcaagagaaaggccagacgtgaacttattttctctgagaattcaaacagacacagaaaatgttgacaatgacacaagacatattgatcaacgaattggtgctcgagaaccagttgaacggaatgttcgttttagccgaactttaagtgttggaaggcttcgtgacagagttcttcgtcaatcaacattgtctgacctcacctttttccctttgcaacaagagagagagctgagagatgctagccttcctagccaagatattattgacaggcaagcagtggagggagattcaagagtgtcaccatctgatcatagtaccattaattcttcaacatctagatatcctccatctagtatgtctaactccatctttagcatccaagactatgaggttgagacttcacgattgagagaaggtaggtatcaggatctactggagcataggtccaatttccttgaacggagaagaagaatacggccccaggttctggatgaaattcacctgcaatctgttgttttatcttcccgcccatctgtatcttctattggacctgttcctgcacctaatgatgttgtcgattccttgcctgtcaaattatatgagaagttgcataagcatcaagaggatgctgcacacaatcaaatcctccattgtttccaattaaaatgccatggccgtccatttgttgtccaattactaagaagctagtgatatgctatatatgccttgtggagtatgaggatggagacaacatgcgagtactaccgtgccatcatgaatttcatagaacatgtatagacaagtggctgaaggagattcacagggtatgcccactttgtcgaggggacatatgcatatctgattcaacgccaacagagaactcgagtgactagtggttgatgaatatctgctttgaaacgtcctgtcacttgccttttcttctgtaaatatcagaacttcactccttttcttctgaaactatcaatgcttatttactattatggctgaataaacatcaaatccatggtagagataaaaatgacctgcttaagggagaggacaaaaggtaaaagaaggttcataaaaggcccttgtgttgtatcctaaaattttatttattttttggcccttgtgtttc

SEQ ID NO: 22973 - protein, 411 aa, Glycine max
YADGNGTDSDEVKTESFRKVIAGEMTCVPSNIDLDGWGETSIPNTSSRTGSISVHSSSTHSLNPTSHCLSRFSLIPGNVSFRLSRTTSLGSSRPRPVSSANLSIFDNEDEHNLNPGSPGRLINRSETQQCSNLLPASFSNQIHAQCHEDASNNSRSNVPTSGVVGNLQSYPTDGVCARERPDVNLFSLRIQTDTENVDNDTRHIDQRIGAREPVERNVRFSRTLSVGRLRDRVLRQSTLSDLTFFPLQQERELRDASLPSQDIIDRQAVEGDSRVSPSDHSTINSSTSRYPPSSMSNSIFSIQDYEVETSRLREGRYQDLLEHRSNFLERRRRIRPQVLDEIHLQSVVLSSRPSVSSIGPVPAPNDVVDSLPVKLYEKLHKHQEDAAHNQILHCFQLKCHGRPFVVQLLRS

SEQ ID NO: 22974 - protein, 387 aa, Glycine max
MTCVPSNIDLDGWGETSIPNTSSRTGSISVHSSSTHSLNPTSHCLSRFSLIPGNVSFRLSRTTSLGSSRPRPVSSANLSIFDNEDEHNLNPGSPGRLINRSETQQCSNLLPASFSNQIHAQCHEDASNNSRSNVPTSGVVGNLQSYPTDGVCARERPDVNLFSLRIQTDTENVDNDTRHIDQRIGAREPVERNVRFSRTLSVGRLRDRVLRQSTLSDLTFFPLQQERELRDASLPSQDIIDRQAVEGDSRVSPSDHSTINSSTSRYPPSSMSNSIFSIQDYEVETSRLREGRYQDLLEHRSNFLERRRRIRPQVLDEIHLQSVVLSSRPSVSSIGPVPAPNDVVDSLPVKLYEKLHKHQEDAAHNQILHCFQLKCHGRPFVVQLLRS

SEQ ID NO: 22975 - DNA, 2259 bp, Glycine max
ggtttaacacttgcagaagccaatgaattataccatgttttgactgatattctgtctcagtctcagtctccctcacacatatggcaccaaattgtgactcggagattgctcaaaccatccttcccacactctttgcatcagcttctctattactctgtttatcactctgcttttcattctcaacatgcttccctcccacactattggttcccttctatagagcaatccaaacgcaccaacctgggccgtctcatggaaactcatgcccctaaacttttaggagcttcctacaaagaccccatcaccagttttcatctctttcacaagttctccgttcaacaccctcaggtgtattggtcccttattctcaaggaactttcagtttcctttgttgagcctccaaagtgcattttagatacttcttctgacccttccaaacatggagggacttggcttcccggttctgtcctcaacattgctgattgctgtttgcaacccactccatacccccacaaaacagatgacactttagccgtcgtttggagagatgaaggtttcgatgattccgaggttaatggtatgactctcaaacaactccggcaccaagtgatgttggtagcaaatgcaatagatgccacattctcgaaaggagatgcaattgccattgacatgcaaatgacagtcaatgctgtgattatatatctagccattgttctagcaggatgtgtagtggtatcaatagcagatagctttgcaccaaaagaaattgcaactcgtctgcgtgtttctaaagcaaagggtattttcactcaggatttcatatcaagaggtggcaggaaattccctttgtacagtcgagtcattgaagcagctgcatgtaaagttatcgttctgcctgtgataggtgatgatctaggtgtgcaattaagagattgcgatatatcatggaaggtttttctttcttctagcagacagcatcccaggtcacatcactactctccaatcattcaatcaattgatactgtcactaacatacttttctcatctggaaccacaggggagccaaaagcaattccttggactcaactttcaccaatacgaagtgcagcagatgcatgggctttcattgatattcaacctggagatgtctattgctggcctacaaatttgggatgggtgatgggcccaactcttatatattcatgctttctgtcaggtgcaactcttgctttgtatcatggatctcctctaggccatggttttggaaagttcgttcaggatgcaggtgttactattttgggaacagttccaagcttagtaaaaacttggaagagtacacaatgcatggaggggttggattggacaaaaataaaaatattttgttcaacaggagaaacttcaaatgttgatgatgacctctggctttcttcaaagtcttattacaaaccaatcattgaatgttgtggaggcactgagcttgcatcttcttacatcatcggaagtccactgcaacctcaagcttttggagcatttagcacagcatcaatgacaactggtttggtcatccttgacgaaaatggagttccttatccagaggatgttgcttgtgttggtgaagtgggcttgtttccaatatatatgggagcaactgatagattgcttaatgcggataatgaggaggtttactttaagggaatgcccatatacaaaggaaaggttcttaggagacatggagatataatcaaaagaactgttggaggccattttgttgtacaagggcgggctgatgacacaatgaatattggtggaataaagacaagttctgtagaaattgagcgtgtctgtgatagggccgacgaaggcattttggagacagctgcaatcagtgttgctcctgcaaatggaggcccggaacaactggttatatttgcagttttaaagaaaggatacaattccaatgcagaaactctaaagaggaaattcagtaaagccattcaaagcaaccttaatcctttgtttaaggtgagccttgttaaaattgtgcccgattttccccgaacagcttccaacaaattactaaggagagttttgagagatcaaatgaagcgtgagctatcaattcagagcagactttagtaactataaattcagtccattccctatatctataatacatttatactgggtgaggtctttgcctctttggcgtgtaatcaaatggtgaacatttgatattagtgggaaatgcttcactttatg

SEQ ID NO: 22976 - protein, 711 aa, Glycine max
GLTLAEANELYHVLTDILSQSQSPSHIWHQIVTRRLLKPSFPHSLHQLLYYSVYHSAFHSQHASLPHYWFPSIEQSKRTNLGRLMETHAPKLLGASYKDPITSFHLFHKFSVQHPQVYWSLILKELSVSFVEPPKCILDTSSDPSKHGGTWLPGSVLNIADCCLQPTPYPHKTDDTLAVVWRDEGFDDSEVNGMTLKQLRHQVMLVANAIDATFSKGDAIAIDMQMTVNAVIIYLAIVLAGCVVVSIADSFAPKEIATRLRVSKAKGIFTQDFISRGGRKFPLYSRVIEAAACKVIVLPVIGDDLGVQLRDCDISWKVFLSSSRQHPRSHHYSPIIQSIDTVTNILFSSGTTGEPKAIPWTQLSPIRSAADAWAFIDIQPGDVYCWPTNLGWVMGPTLIYSCFLSGATLALYHGSPLGHGFGKFVQDAGVTILGTVPSLVKTWKSTQCMEGLDWTKIKIFCSTGETSNVDDDLWLSSKSYYKPIIECCGGTELASSYIIGSPLQPQAFGAFSTASMTTGLVILDENGVPYPEDVACVGEVGLFPIYMGATDRLLNADNEEVYFKGMPIYKGKVLRRHGDIIKRTVGGHFVVQGRADDTMNIGGIKTSSVEIERVCDRADEGILETAAISVAPANGGPEQLVIFAVLKKGYNSNAETLKRKFSKAIQSNLNPLFKVSLVKIVPDFPRTASNKLLRRVLRDQMKRELSIQSRL

SEQ ID NO: 22977 - protein, 627 aa, Glycine max
METHAPKLLGASYKDPITSFHLFHKFSVQHPQVYWSLILKELSVSFVEPPKCILDTSSDPSKHGGTWLPGSVLNIADCCLQPTPYPHKTDDTLAVVWRDEGFDDSEVNGMTLKQLRHQVMLVANAIDATFSKGDAIAIDMQMTVNAVIIYLAIVLAGCVVVSIADSFAPKEIATRLRVSKAKGIFTQDFISRGGRKFPLYSRVIEAAACKVIVLPVIGDDLGVQLRDCDISWKVFLSSSRQHPRSHHYSPIIQSIDTVTNILFSSGTTGEPKAIPWTQLSPIRSAADAWAFIDIQPGDVYCWPTNLGWVMGPTLIYSCFLSGATLALYHGSPLGHGFGKFVQDAGVTILGTVPSLVKTWKSTQCMEGLDWTKIKIFCSTGETSNVDDDLWLSSKSYYKPIIECCGGTELASSYIIGSPLQPQAFGAFSTASMTTGLVILDENGVPYPEDVACVGEVGLFPIYMGATDRLLNADNEEVYFKGMPIYKGKVLRRHGDIIKRTVGGHFVVQGRADDTMNIGGIKTSSVEIERVCDRADEGILETAAISVAPANGGPEQLVIFAVLKKGYNSNAETLKRKFSKAIQSNLNPLFKVSLVKIVPDFPRTASNKLLRRVLRDQMKRELSIQSRL

SEQ ID NO: 22978 - protein, 518 aa, Glycine max
MTLKQLRHQVMLVANAIDATFSKGDAIAIDMQMTVNAVIIYLAIVLAGCVVVSIADSFAPKEIATRLRVSKAKGIFTQDFISRGGRKFPLYSRVIEAAACKVIVLPVIGDDLGVQLRDCDISWKVFLSSSRQHPRSHHYSPIIQSIDTVTNILFSSGTTGEPKAIPWTQLSPIRSAADAWAFIDIQPGDVYCWPTNLGWVMGPTLIYSCFLSGATLALYHGSPLGHGFGKFVQDAGVTILGTVPSLVKTWKSTQCMEGLDWTKIKIFCSTGETSNVDDDLWLSSKSYYKPIIECCGGTELASSYIIGSPLQPQAFGAFSTASMTTGLVILDENGVPYPEDVACVGEVGLFPIYMGATDRLLNADNEEVYFKGMPIYKGKVLRRHGDIIKRTVGGHFVVQGRADDTMNIGGIKTSSVEIERVCDRADEGILETAAISVAPANGGPEQLVIFAVLKKGYNSNAETLKRKFSKAIQSNLNPLFKVSLVKIVPDFPRTASNKLLRRVLRDQMKRELSIQSRL

SEQ ID NO: 22979 - DNA, 1365 bp, Glycine max
aaaaaatggaaaagatcctttggtatatccctatatcttgcttttaagcattcaattgcttccagctgtattatacttgtctaaggaagcaggagatgaaggatataacattgatgctgcccacctatcaattgtgctagctgatcatggggtcctttctgaaggtgctggttctgggcaaaagttaggagtgatggatgcttatgcggaagtgtcgaccattatcaggcagtatggatctatgtatttgcgtcttggtgatctccaaatggccctagaatatttcgcacaagctgctgcagcagtgggcgggggggagttatcttggactggtagaggtaatgttgatcaacaaaggcagagaaatttgatggtgaagcagcttctaactgaactattgttaagggatggaggcatatatcttctacttggtgcaagaggtacgggagaagaaggtgaattgggacgttttgtgactgatccaaaagcaaggcaacaatttttaattgaagctgcatgccagtgtcaggaggctgggatgtatgacaagtctatagaaattcagaagagagtgggttccttctcaacggcactggataccatcaataagtgcctctctgaagctatttgtgcccttttccgtggaagattagatggcgagagtcgtactgctggcctcatccattctggcaatgagattttggagacatactcttattacccagatgtcaggcttcaagagagagaacatgtttttgaccagcaaactgtgttacgacaacttgagtcaatattgtcgattcacaaattagcaaggcttggacattatcttgatgcattaagggaggttgctaaacttccattccttcctttagacccccgaggccctgatattgctgttgatgtgcttgaaaatttatctcctcatgtccaagcttgtattccagatcttttgaagactgctctcacttgtctggataatgtgacagactctgatggatctcttcgtgccttgagggctaagattgcaagtttcattgcaaacaatttaaggaggaattggcctcgtgatttgtatgaaagagttgcgcagaggctgtgaaagtaaatcatgtgattgcaatggtagttacgtttgaaaggcaacagaatatgtttggctaaaggttttcagtagtagcatatgtaaagtagtcttaatgacgtgcctgctgcaccacctatgcccggagatatactgagaggaaataatagaaaaaggaaatacactggttctaaatattctctccacttttccactttttgttctagccattggtaatatactgctcactttgtattaataagaacattactttaagtttt

SEQ ID NO: 22980 - protein, 366 aa, Glycine max
KNGKDPLVYPYILLLSIQLLPAVLYLSKEAGDEGYNIDAAHLSIVLADHGVLSEGAGSGQKLGVMDAYAEVSTIIRQYGSMYLRLGDLQMALEYFAQAAAAVGGGELSWTGRGNVDQQRQRNLMVKQLLTELLLRDGGIYLLLGARGTGEEGELGRFVTDPKARQQFLIEAACQCQEAGMYDKSIEIQKRVGSFSTALDTINKCLSEAICALFRGRLDGESRTAGLIHSGNEILETYSYYPDVRLQEREHVFDQQTVLRQLESILSIHKLARLGHYLDALREVAKLPFLPLDPRGPDIAVDVLENLSPHVQACIPDLLKTALTCLDNVTDSDGSLRALRAKIASFIANNLRRNWPRDLYERVAQRL

SEQ ID NO: 22981 - protein, 302 aa, Glycine max
MDAYAEVSTIIRQYGSMYLRLGDLQMALEYFAQAAAAVGGGELSWTGRGNVDQQRQRNLMVKQLLTELLLRDGGIYLLLGARGTGEEGELGRFVTDPKARQQFLIEAACQCQEAGMYDKSIEIQKRVGSFSTALDTINKCLSEAICALFRGRLDGESRTAGLIHSGNEILETYSYYPDVRLQEREHVFDQQTVLRQLESILSIHKLARLGHYLDALREVAKLPFLPLDPRGPDIAVDVLENLSPHVQACIPDLLKTALTCLDNVTDSDGSLRALRAKIASFIANNLRRNWPRDLYERVAQRL

SEQ ID NO: 22982 - protein, 286 aa, Glycine max
MYLRLGDLQMALEYFAQAAAAVGGGELSWTGRGNVDQQRQRNLMVKQLLTELLLRDGGIYLLLGARGTGEEGELGRFVTDPKARQQFLIEAACQCQEAGMYDKSIEIQKRVGSFSTALDTINKCLSEAICALFRGRLDGESRTAGLIHSGNEILETYSYYPDVRLQEREHVFDQQTVLRQLESILSIHKLARLGHYLDALREVAKLPFLPLDPRGPDIAVDVLENLSPHVQACIPDLLKTALTCLDNVTDSDGSLRALRAKIASFIANNLRRNWPRDLYERVAQRL

SEQ ID NO: 22983 - DNA, 1430 bp, Glycine max
aactttggcttgtatactttgatcattgaatcccatgcgaaatcagggaagcttgaaattgctatgtctacattttagatatggagaaagcgggatttctacccaccccatctacgtatgcttgtctcttggaaatgcatgctgcatctggacaaattgatcctgccatgaaactgtacaattcaatgactaatgcaggtttgaggcctggcctaagtacttatactgtccttttaactcttctggctaataagaagctggttgatgtggctgccaaaattctacttgaaatgaaggccatgggatattctgtggatgtcacagctagtgatattttgatggtttatattaaggaaggttcggttgatctagctttgaggtggctgcgtttcatgggttcatcagggatcagaaccaataattttattatcaggcagttgtttgagtcatgcatgaagagtgggttatttgaatccgccaagcctcttctggaaacatatgttaactctgctgcaaaagttgatttgatactttacacctccattttagctcatcttgttaggtgtcaggaagagaaaaatgagaggcatttgatgtctatccttagtgctacaaagcataaggcacactcttttatgtgtggacttttcacaggcccagaacataggggacagccagtgttaacttttgtccgggaattctttcaaggtattgattatgaattggaggagggagctgctaagtactttgtcaatgttcttctcaattatctagttctaatggggcagataaatcgagctcgatgtgtttggaaggttgcttatgagaataaacttttccctaaggctatagtctttgatcagcatattgcatggtcccttgatgttcgaaacttgtcagttggagcggctcttattgcagtagtgcatactcttcatagattcagaaagcgcatgctatattatggcattgtaccaagacggataaaattggttacaggagcaactctgaagattgtgattgcacagatgttgagctcagtagagtctccatttgaggtgagtaaagtggttcttagggcatcaggagattctgtcatggagtggtttaagaaaccaatcgttcagcagtttcttctgaatgaaattccatctaggtctgatattctgatgcataagctaaacatacttttccccagttctgcacctgaacttagatctctatctcctcctaaacctctcattgcaagcagggcaatgtaatcagttttgctatctacggttagtaactggtgtttgagatgttattgtttgtccaatgtcatggagtggcgcacactcttcatgttctgaaagctgatgctacaaacagatatgtactattcaagaatttcgaatataatctatgaagatttatattcttttcccccc

SEQ ID NO: 22984 - protein, 393 aa, Glycine max
MEKAGFLPTPSTYACLLEMHAASGQIDPAMKLYNSMTNAGLRPGLSTYTVLLTLLANKKLVDVAAKILLEMKAMGYSVDVTASDILMVYIKEGSVDLALRWLRFMGSSGIRTNNFIIRQLFESCMKSGLFESAKPLLETYVNSAAKVDLILYTSILAHLVRCQEEKNERHLMSILSATKHKAHSFMCGLFTGPEHRGQPVLTFVREFFQGIDYELEEGAAKYFVNVLLNYLVLMGQINRARCVWKVAYENKLFPKAIVFDQHIAWSLDVRNLSVGAALIAVVHTLHRFRKRMLYYGIVPRRIKLVTGATLKIVIAQMLSSVESPFEVSKVVLRASGDSVMEWFKKPIVQQFLLNEIPSRSDILMHKLNILFPSSAPELRSLSPPKPLIASRAM

SEQ ID NO: 22985 - protein, 375 aa, Glycine max
MHAASGQIDPAMKLYNSMTNAGLRPGLSTYTVLLTLLANKKLVDVAAKILLEMKAMGYSVDVTASDILMVYIKEGSVDLALRWLRFMGSSGIRTNNFIIRQLFESCMKSGLFESAKPLLETYVNSAAKVDLILYTSILAHLVRCQEEKNERHLMSILSATKHKAHSFMCGLFTGPEHRGQPVLTFVREFFQGIDYELEEGAAKYFVNVLLNYLVLMGQINRARCVWKVAYENKLFPKAIVFDQHIAWSLDVRNLSVGAALIAVVHTLHRFRKRMLYYGIVPRRIKLVTGATLKIVIAQMLSSVESPFEVSKVVLRASGDSVMEWFKKPIVQQFLLNEIPSRSDILMHKLNILFPSSAPELRSLSPPKPLIASRAM

SEQ ID NO: 22986 - protein, 364 aa, Glycine max
MKLYNSMTNAGLRPGLSTYTVLLTLLANKKLVDVAAKILLEMKAMGYSVDVTASDILMVYIKEGSVDLALRWLRFMGSSGIRTNNFIIRQLFESCMKSGLFESAKPLLETYVNSAAKVDLILYTSILAHLVRCQEEKNERHLMSILSATKHKAHSFMCGLFTGPEHRGQPVLTFVREFFQGIDYELEEGAAKYFVNVLLNYLVLMGQINRARCVWKVAYENKLFPKAIVFDQHIAWSLDVRNLSVGAALIAVVHTLHRFRKRMLYYGIVPRRIKLVTGATLKIVIAQMLSSVESPFEVSKVVLRASGDSVMEWFKKPIVQQFLLNEIPSRSDILMHKLNILFPSSAPELRSLSPPKPLIASRAM

SEQ ID NO: 22987 - DNA, 1882 bp, Glycine max
ggaggtttctgttcgtttcatttcatttggtcacacagtgttgtcggccactttctctctctttcgcgcttcaactttcgtttttgcactgattgaaattgtgaggagcaacagaccacttgagatagtttaactcagctgcagggatggatctgtggggtgctcatcatcgacttttgttcattggtcggcatgaggaagatggaactcctgatacttctatgggagaggaatcaaacgatgaagaagaaaaaataattaaaactgaacccgtctttgtgcctgaaattaagaaaaggaaacgccttagccttagtcagcttaaagaggtgaaagaggagtcacatgggaagcaaagcagtagcaagcctaagagaaagaagcatgatagtagggatagatggtcagctgagaggtatcaattggctgagcaaaacatgtgggaggtactaaaggctgaaggggcgtcatttgaaaacccaataacccgacctgcactaagattggctgcccgcaaacacattggagatactggacttttagatcacttactgaagcacattgatggtaaagtggcacctggagggactgagagattccgaagatggttcaacaccaatggaatcatggagtattggttggagagtgctgacttggacaaggtgcgccaggaggcaggggtgcaggaccctttctggataccgccatctgcatatagggcagccggtgccccttcccaaaatattgattcttctgatgaattgaaacagcttaaaatagaactgacacaaatgaagaaagatatgcatgagctcattgccaagaaggaagagaaaagtgatattaacatgatggaggagacacacaaggaatttgtgaagtggaaatttatgactgaccatcgccttactgaaatcatgacttctttgaaggatgttcagggaaagtatggtgaattgatgatttggaaaactacagttgcgcaacaacttatggaaataactaataaattgaatgatcttcaagcatctagggaatgcaccacttatagtcctccttcagaaaggtggaaagattggatagaaagcaccaacctagacaatattcaggaagatgcatttgctacttggattgggaatccagagctacttaatgttccacaagaggttatacttgaagatcccaacacgaccatgccaacacagccacccagtgaagaactgactaacaagaagagcgatgtgctggagttagtacctgtaaaactagaagatcaaccaaatgtaacccctgattcttctacaactgttaattcgaagtcagaccttgacaactcattgattatgtttcaggagatgtttatggatttatacaaatggaaagagaaaatggaacagcagctgatggaggtatcgaatactgtatatggtatgcttgcaatgaagtagacatcactccgaagtatcgaggctaagataggatataaccaccgtttcgttctcaagttttctttgttactcttaaaactggtaaagtttagatattgtacagcattaacaatctgatcctgaaaatctatgccaaccactaagttcacagaagaggttgagtctcaccctgctggctgagctgcaaattgtcgatatgtctgactggccttttacagtatacttggccttttaaattgaatgacttaaggtaggtcttcagtggtaatgaaattggttgttttctcaacttattgggtaagattatgagttcctttagtataggtctttaggtaggctacccgtatttaacgtattagctgaaactatcttgttagagcttgtacttaacctatttggtaacaagttgccatatatatatatagaatttctac

SEQ ID NO: 22988 - protein, 433 aa, Glycine max
MDLWGAHHRLLFIGRHEEDGTPDTSMGEESNDEEEKIIKTEPVFVPEIKKRKRLSLSQLKEVKEESHGKQSSSKPKRKKHDSRDRWSAERYQLAEQNMWEVLKAEGASFENPITRPALRLAARKHIGDTGLLDHLLKHIDGKVAPGGTERFRRWFNTNGIMEYWLESADLDKVRQEAGVQDPFWIPPSAYRAAGAPSQNIDSSDELKQLKIELTQMKKDMHELIAKKEEKSDINMMEETHKEFVKWKFMTDHRLTEIMTSLKDVQGKYGELMIWKTTVAQQLMEITNKLNDLQASRECTTYSPPSERWKDWIESTNLDNIQEDAFATWIGNPELLNVPQEVILEDPNTTMPTQPPSEELTNKKSDVLELVPVKLEDQPNVTPDSSTTVNSKSDLDNSLIMFQEMFMDLYKWKEKMEQQLMEVSNTVYGMLAMK

SEQ ID NO: 22989 - protein, 408 aa, Glycine max
MGEESNDEEEKIIKTEPVFVPEIKKRKRLSLSQLKEVKEESHGKQSSSKPKRKKHDSRDRWSAERYQLAEQNMWEVLKAEGASFENPITRPALRLAARKHIGDTGLLDHLLKHIDGKVAPGGTERFRRWFNTNGIMEYWLESADLDKVRQEAGVQDPFWIPPSAYRAAGAPSQNIDSSDELKQLKIELTQMKKDMHELIAKKEEKSDINMMEETHKEFVKWKFMTDHRLTEIMTSLKDVQGKYGELMIWKTTVAQQLMEITNKLNDLQASRECTTYSPPSERWKDWIESTNLDNIQEDAFATWIGNPELLNVPQEVILEDPNTTMPTQPPSEELTNKKSDVLELVPVKLEDQPNVTPDSSTTVNSKSDLDNSLIMFQEMFMDLYKWKEKMEQQLMEVSNTVYGMLAMK

SEQ ID NO: 22990 - protein, 336 aa, Glycine max
MWEVLKAEGASFENPITRPALRLAARKHIGDTGLLDHLLKHIDGKVAPGGTERFRRWFNTNGIMEYWLESADLDKVRQEAGVQDPFWIPPSAYRAAGAPSQNIDSSDELKQLKIELTQMKKDMHELIAKKEEKSDINMMEETHKEFVKWKFMTDHRLTEIMTSLKDVQGKYGELMIWKTTVAQQLMEITNKLNDLQASRECTTYSPPSERWKDWIESTNLDNIQEDAFATWIGNPELLNVPQEVILEDPNTTMPTQPPSEELTNKKSDVLELVPVKLEDQPNVTPDSSTTVNSKSDLDNSLIMFQEMFMDLYKWKEKMEQQLMEVSNTVYGMLAMK

SEQ ID NO: 22991 - DNA, 1744 bp, Glycine max
atactcacactcaacacaatcttgggagaggtaacaacaacagctctggtttttctttgcagccttcacagctagctaacacaaaaatgagaatcttgagttacctttacattgttctcatttgcattattcaagactcaagagagcttaaatagggaaagaggaacaaggcctttttcagttacctctaaatccagttcttgcaattccatttgtgagtgagttgttggaattggaatttggaagtagctaggcagtgtctcaaattaatggcatccatgtctcttattcttctttggttcctcttttttgctagtgaaatgatgtcaatgggaaatagtttacacaaggggcacatggtaatggaagaggaggaactgttgggattgtttgaagtgatggatgctcttctggaagacccttactgggcccaagcacatccaaagccatgcactgatactccatggccaggtgttgagtgtgaacttggcagcaataaccaacaaatctttcatgtcaccaaaatccacattggtcctgatatagtcttcccattctcaccttgcaaaccctcagcttatctctcacactccttgctgaaactcaagtatataaaaaccctttcaatttttaactgttttgttgcttcaccagttactctacccaaaactctctttggtcctttctcttcactagaacacttagctttggagaataacccttccctctatggtgaaatacctacaagtttgggaggtgttgctggtcttagggtcctgagcctctcccagaacagcttacaaggaaacatccctagccagattggtggtttggttagtctagagcaacttgaccttagttataacaacttgagtggtcaaatcccaaaggaaattggaggtttgaaaagcatgaccatattggacctaagttgcaatgcagttgaagggtttctgccttgttctcttggaaagcttcaacttctccagaagatggatttgcactctaacagactcagtgaaaacattcctcctgatataggaaacctcaagaggttagtcttgcttgatttgagtcataattttattgtagggcctattagtgaaaccttctcaagtttagaccttttggaatatttactcattgatgacaaccccattaaaggagggataccccagttcatagggaagcttaagaagctcaaatcattgagtttatcagggtgtggattaacaggttctataccctactctttctcttccttgaaaaatcttacagctctctccttaggtaacaatagtcttattggacaagttcctccaaatttgggttcactcccaagcctagatcaactgaatatcagccacaacaagctgagtggggttctagagctacctggtgacttcattcaaaagttaggtaaaagattggatttaagaggaaacagtgaactctgcatcaatgatcagtcaaagaagaagaacctctcttcttacttggaaatcccttcttgtttgaacacacgacagagaaatgatgataattattttgccggtggaccacttcaagatctttcaggactaaagccgtcttggtatgatagcaacccaagttcatgttcatcatggcctaatgatctacatgtcatcatatttaccttggttttaaacctggttatctgattcctgaatatcattttgtgtaacactagaaattaatattatataaatgttattctactctg

SEQ ID NO: 22992 - protein, 470 aa, Glycine max
MASMSLILLWFLFFASEMMSMGNSLHKGHMVMEEEELLGLFEVMDALLEDPYWAQAHPKPCTDTPWPGVECELGSNNQQIFHVTKIHIGPDIVFPFSPCKPSAYLSHSLLKLKYIKTLSIFNCFVASPVTLPKTLFGPFSSLEHLALENNPSLYGEIPTSLGGVAGLRVLSLSQNSLQGNIPSQIGGLVSLEQLDLSYNNLSGQIPKEIGGLKSMTILDLSCNAVEGFLPCSLGKLQLLQKMDLHSNRLSENIPPDIGNLKRLVLLDLSHNFIVGPISETFSSLDLLEYLLIDDNPIKGGIPQFIGKLKKLKSLSLSGCGLTGSIPYSFSSLKNLTALSLGNNSLIGQVPPNLGSLPSLDQLNISHNKLSGVLELPGDFIQKLGKRLDLRGNSELCINDQSKKKNLSSYLEIPSCLNTRQRNDDNYFAGGPLQDLSGLKPSWYDSNPSSCSSWPNDLHVIIFTLVLNLVI

SEQ ID NO: 22993 - protein, 467 aa, Glycine max
MSLILLWFLFFASEMMSMGNSLHKGHMVMEEEELLGLFEVMDALLEDPYWAQAHPKPCTDTPWPGVECELGSNNQQIFHVTKIHIGPDIVFPFSPCKPSAYLSHSLLKLKYIKTLSIFNCFVASPVTLPKTLFGPFSSLEHLALENNPSLYGEIPTSLGGVAGLRVLSLSQNSLQGNIPSQIGGLVSLEQLDLSYNNLSGQIPKEIGGLKSMTILDLSCNAVEGFLPCSLGKLQLLQKMDLHSNRLSENIPPDIGNLKRLVLLDLSHNFIVGPISETFSSLDLLEYLLIDDNPIKGGIPQFIGKLKKLKSLSLSGCGLTGSIPYSFSSLKNLTALSLGNNSLIGQVPPNLGSLPSLDQLNISHNKLSGVLELPGDFIQKLGKRLDLRGNSELCINDQSKKKNLSSYLEIPSCLNTRQRNDDNYFAGGPLQDLSGLKPSWYDSNPSSCSSWPNDLHVIIFTLVLNLVI

SEQ ID NO: 22994 - protein, 453 aa, Glycine max
MMSMGNSLHKGHMVMEEEELLGLFEVMDALLEDPYWAQAHPKPCTDTPWPGVECELGSNNQQIFHVTKIHIGPDIVFPFSPCKPSAYLSHSLLKLKYIKTLSIFNCFVASPVTLPKTLFGPFSSLEHLALENNPSLYGEIPTSLGGVAGLRVLSLSQNSLQGNIPSQIGGLVSLEQLDLSYNNLSGQIPKEIGGLKSMTILDLSCNAVEGFLPCSLGKLQLLQKMDLHSNRLSENIPPDIGNLKRLVLLDLSHNFIVGPISETFSSLDLLEYLLIDDNPIKGGIPQFIGKLKKLKSLSLSGCGLTGSIPYSFSSLKNLTALSLGNNSLIGQVPPNLGSLPSLDQLNISHNKLSGVLELPGDFIQKLGKRLDLRGNSELCINDQSKKKNLSSYLEIPSCLNTRQRNDDNYFAGGPLQDLSGLKPSWYDSNPSSCSSWPNDLHVIIFTLVLNLVI

SEQ ID NO: 22995 - DNA, 1459 bp, Glycine max
tcaccttaaaaatcccgagagcttctctcctcattttccaaaaaacgttcttttcttcttacagtagcccacacccctctcaacctcatctcttccttccccaaaaatttaatctttcgatctctcactcatatccttccatgattccgaaatttgcaaaattttttcatctttggatttttccaagcacgaggaggtgacgggaaaaaggggaaaaacactacgcgttttctagatttttctgtttgatctctttaaggttctgtggaaaatatagtgcttgaccttcctaacaacggtaaaagtcagtgatgcgttatttaggttatgttgtataggataggctggccagattaagaaagtcatagtctgtgcgccggtcatgtcccaagagtgggccatgacactaatccttactatttgatgatgaacagataaagtaacttgattggaaaataagcattatttatggaatagcaggaggcctattataccttcatgaggactcttggctcagagtaaatcatagagatctcaaagctagcaatgttctattagaccatgagatgagtcccaaaatatcagattttggattagcgagggcatttgaaaatggaaaaagaccaggcaaatacaaaacaattaatgggcactttgtgagttttattgatatctaacatttctttagttaatacgatttttttaatgtagttttaagtacttaattgtctgaaaaattaaattcctgtttttcattatttaatgtaaaggaactaacaaaattcgattgatttcatttagtggatacatggctccagaatatgctatgcaaggattatttttagtgaaatctgtgttttcagctttggagttcttgttttggaaatcattagtgggagaaagaatagtggattccatctattagaacatggtcaaactcttcttttatatgatagttttcactcatacttgatcaagaagttattcaataatactaattgagcttagagaaagaatagtggattcaatctattagaacatggtcaaactcttctttttatgagttttcactcatacttgatcaagaagttattcaatcatacttagcatcattcacatatcacaattacttgcaggcttggaacatgtggtgtgcaggaaaatgttttgagttgatggatccactggaaaaatccttcatggccaatgaagttgtgaagtccttacacattggtttgttgtgtgttcagcaagatgcgatagttagaccgactatctccaccgttgttctaatgctaggaagtgacacaatctcccttccaaaacccaaccatcctgcattttctgttggaacaatgaactcaaataatgaagaatttagttttagaagttcgaagaatatttccattaacaatgtaacaatatctaccattttgccaagggaatagggattattttc

SEQ ID NO: 22996 - protein, 100 aa, Glycine max
MWCAGKCFELMDPLEKSFMANEVVKSLHIGLLCVQQDAIVRPTISTVVLMLGSDTISLPKPNHPAFSVGTMNSNNEEFSFRSSKNISINNVTISTILPRE

SEQ ID NO: 22997 - protein, 90 aa, Glycine max
MDPLEKSFMANEVVKSLHIGLLCVQQDAIVRPTISTVVLMLGSDTISLPKPNHPAFSVGTMNSNNEEFSFRSSKNISINNVTISTILPRE

SEQ ID NO: 22998 - protein, 82 aa, Glycine max
MANEVVKSLHIGLLCVQQDAIVRPTISTVVLMLGSDTISLPKPNHPAFSVGTMNSNNEEFSFRSSKNISINNVTISTILPRE

SEQ ID NO: 22999 - DNA, 2110 bp, Glycine max
gattcccgaggaagaaaccagttattgccacggtactggccaaggtgtacagatctggagctacagcaaatttctatagattcaaattctgtaattactcccttgtttcagaaaactttgagtgctagtgatgctgggcgaattgggcgtttagtgctacccaagaagtgtgctgagacctacttcccaccaatttctcagcctgaaggattgcctcttaaaatccttgatgcaaaaggcaaggaatggatatttcaatttcgcttctggccaaacaataacagcagaatgtatgttttagagggtgtcactccatgcatacagtccatgcagttgcaggctggtgatactgtaacatttagccggttggagccagagggaaggttggttatgggatttagaaaggcttcaagtgtcatgccatctgatcaggacaatgagaccaagactggaaatggattttctgcacatggtgaagttgaattggcagatcctaattcatggtctaaagttgataagtcaggatacatagcaaaagaagcactggggagcaaatcattaatctctagaaaaagaaagagcaacatattgagctcaaagagtaaacgtctaagaattgaaaatgaggatttaatagagctgaagattacatggcaagaagctcaaggtctgctccgaccccctcctagccacattccaagtattgtggtgattgaaggttttgaatttgaggaatatgaggaagctccagtgcttgggaagccaacaatttttaccagtgatagtgtgggtgaaaagatccagtgggctcaatgtgaagattgtttcaagtggcgcaaattgccagcaagtgcgcttcttccatcaaaatggacgtgttctgataattcatgggatccagaaagattttcttgttcagctgcgcaagagctgacagcagagcaacttgagaatttgctacctccttgtaattcagctgttcccaagaaaatgaaggccaccaaacaggatcccgataatgctgaagctttggagggacttgacacccttgcaaatctagctatcctgggagagggtgaggcactcccagcatccgcccaggccacaactaagcatccacgccatagacctggctgctcttgcattgtttgcattcagcctcccagtggaaagggccccaagcataagcagacatgcacatgtaatgtatgcttaacagtgaagcgacgattccgtacccttatgttacggcgtgagaagaaacaatcagaaaaagaagcagagacaactcgtaaaaagcaacagcaacaacatcctctaccattaccttcatctgaaattttgcttgatgaagattccttgccctgtagtaacacaggtgatagtagcccaaaccagaacaaagagggtaatgatggttctgatgatgatcctagccgaataaaatcatctgcttcgccgttcaaaggcaaaattgacctcaatatccaaccagagcgagaagaagaattatcacctggttcggattctggcggcatgatgaagttgctccatgatgctactgagcgatatctcaaacagcagactgtgaactctggtactggagattcatcaggcagtcagtcacagctggtaggagatgcaatgagggaagataaacttagcaatggtgttgcccatggcagtagtagtcataatactgataaggaacatgcccaatctttgcctatgaatgtgtgaaaatcatattggcgctagccataattgatacgttcttgcaaagctatattgaagtggggaaagattttgctgtacattttatccacttcggcttcttgctttttcttgtttgtacataaagaggagtaggaaaaaatggtgagaaaccaatatattccggtaatataagtgggcatcatagtggtttgtgtaggaaaactatgaaatgcagctgaatgggtagtaggttgaagctgtttagtttctttgagagctcaccgtgccacctgatttcaacaacgttgaaaatgtaactatgcctaatttgttctcccaatttattcttagcctgtaagatgtttatactttctagtaactgctagttctgttc

SEQ ID NO: 23000 - protein, 579 aa, Glycine max
DSRGRNQLLPRYWPRCTDLELQQISIDSNSVITPLFQKTLSASDAGRIGRLVLPKKCAETYFPPISQPEGLPLKILDAKGKEWIFQFRFWPNNNSRMYVLEGVTPCIQSMQLQAGDTVTFSRLEPEGRLVMGFRKASSVMPSDQDNETKTGNGFSAHGEVELADPNSWSKVDKSGYIAKEALGSKSLISRKRKSNILSSKSKRLRIENEDLIELKITWQEAQGLLRPPPSHIPSIVVIEGFEFEEYEEAPVLGKPTIFTSDSVGEKIQWAQCEDCFKWRKLPASALLPSKWTCSDNSWDPERFSCSAAQELTAEQLENLLPPCNSAVPKKMKATKQDPDNAEALEGLDTLANLAILGEGEALPASAQATTKHPRHRPGCSCIVCIQPPSGKGPKHKQTCTCNVCLTVKRRFRTLMLRREKKQSEKEAETTRKKQQQQHPLPLPSSEILLDEDSLPCSNTGDSSPNQNKEGNDGSDDDPSRIKSSASPFKGKIDLNIQPEREEELSPGSDSGGMMKLLHDATERYLKQQTVNSGTGDSSGSQSQLVGDAMREDKLSNGVAHGSSSHNTDKEHAQSLPMNV

SEQ ID NO: 23001 - protein, 483 aa, Glycine max
MYVLEGVTPCIQSMQLQAGDTVTFSRLEPEGRLVMGFRKASSVMPSDQDNETKTGNGFSAHGEVELADPNSWSKVDKSGYIAKEALGSKSLISRKRKSNILSSKSKRLRIENEDLIELKITWQEAQGLLRPPPSHIPSIVVIEGFEFEEYEEAPVLGKPTIFTSDSVGEKIQWAQCEDCFKWRKLPASALLPSKWTCSDNSWDPERFSCSAAQELTAEQLENLLPPCNSAVPKKMKATKQDPDNAEALEGLDTLANLAILGEGEALPASAQATTKHPRHRPGCSCIVCIQPPSGKGPKHKQTCTCNVCLTVKRRFRTLMLRREKKQSEKEAETTRKKQQQQHPLPLPSSEILLDEDSLPCSNTGDSSPNQNKEGNDGSDDDPSRIKSSASPFKGKIDLNIQPEREEELSPGSDSGGMMKLLHDATERYLKQQTVNSGTGDSSGSQSQLVGDAMREDKLSNGVAHGSSSHNTDKEHAQSLPMNV

SEQ ID NO: 23002 - protein, 470 aa, Glycine max
MQLQAGDTVTFSRLEPEGRLVMGFRKASSVMPSDQDNETKTGNGFSAHGEVELADPNSWSKVDKSGYIAKEALGSKSLISRKRKSNILSSKSKRLRIENEDLIELKITWQEAQGLLRPPPSHIPSIVVIEGFEFEEYEEAPVLGKPTIFTSDSVGEKIQWAQCEDCFKWRKLPASALLPSKWTCSDNSWDPERFSCSAAQELTAEQLENLLPPCNSAVPKKMKATKQDPDNAEALEGLDTLANLAILGEGEALPASAQATTKHPRHRPGCSCIVCIQPPSGKGPKHKQTCTCNVCLTVKRRFRTLMLRREKKQSEKEAETTRKKQQQQHPLPLPSSEILLDEDSLPCSNTGDSSPNQNKEGNDGSDDDPSRIKSSASPFKGKIDLNIQPEREEELSPGSDSGGMMKLLHDATERYLKQQTVNSGTGDSSGSQSQLVGDAMREDKLSNGVAHGSSSHNTDKEHAQSLPMNV

SEQ ID NO: 23003 - DNA, 1058 bp, Glycine max
gatcaatacatcttcaaatccacctctcatctctctcgccctctctctcacatcatcaccatttcacctatttttctctctctctctctctctctctcgcatcacaatttcatcaaaaccttttaagtcttcatagttttccttctttctttctttgtgaaaaaacaaaaagtccaaaccatggctcagaaaaccgagaaagaagaaaccgacttcaaggttcccgaaacgattacgctttgcgttaacaactgcggcgtcaccggaaaccctgctacgaataacatgtgtcagaagtgcttcaccgccttcaccacctctaccgccaccacgtccggcgccggaggtgccggaatagcttctccggctaccagatccggcatctccgcgcgtccactgaagagatcttttcccgaggagccctcgccgccggcggatcctccgtcttcagaccagacgaccccgtcggaggcgaagcgcgtggtgaaccgctgctccggctgcaggaggaaggtcggactcaccggatttcggtgccgatgcggcgagctcttctgcgccgagcaccggtactccgaccgccacgactgcagctacgactacaaagccgccggaagagaagccatcgcgagggagaatccggtgattagagccgcgaagatcgtcaaagtctgaaaaaaaacaaaaaagaaggaaaaaacccgaacggaacggaatctcaaaacgacgtcgttgacggttgacctttcgcgcgatcgggttcaggtcacgggtttcgctttttttcttttcagatttatatatagagagaagaaaaaaaaagtagcagataacaggtttgagagagagagagagagagtgtgaggttttagattgagagagagagcgagagagagagattgttgctgaaaagaagatgaagaagaatttatctgaatttctcttgtgttcatcgatcaaactctgatcgtttaatttttttttaaattttctcttctaattttatgtttaatttcttcctgatttgatcttgaaatgataaattattgttgtttacc

SEQ ID NO: 23004 - protein, 164 aa, Glycine max; identical to SEQ ID NO: 13487

SEQ ID NO: 23005 - protein, 129 aa, Glycine max; identical to SEQ ID NO: 13488

SEQ ID NO: 23006 - DNA, 1388 bp, Glycine max
gaaccatcattgcgccttgcagcagctacgccttctacttaaatcgtaagaaggaactctctctccaccgtcccatcctctttccactcaacttctgccaatgcgtccgtttgcacctcaagtcgcacgcttcacgaacagatcaacttcatcctcaccagcactacagtccgcagcaagttattttacatccggttaccgcagcactccttctcccacacaacaacaaaccagaatgtcttcctccaccgagactggcgagcttaagctcgagagcaccgtcaagaccgccactggtgtcgagctcagcaacgagcagaggactatcgtgtcttcagtgctggacctcttcgctggcaggccctcccttgccaagctacagctctggaaggacgatgccgtcttcagcgaccccatcactgtcgcaaagggcaggaaggagtttgagcctcaatggtacggcctccaaaccgccttctccgaaatcgagcgcaaagaccacagcgtcacctcctccggcaaccccatcgagctagacatgaccacaatgtacaaggtcaagggtatcggcaaggagacgaccatcaccagcaaggtcaacatcttccacgagaacggcaagatcacccgcgtcgaggacaagtggaacggcaacctccccgactctggcatcgcaaatgcattccgacgactcaacgccgttagtgtccccaagatggtcggcgtgcccaagaacgcagaggaggatgccaagcgcggcaattagaagcgctgctacattgtagcctcccactgctttcgtttcggctttctactcggtggttttcgttctgttgtcaaggagtcggacgttcaacctgcgacagcgcctggcattatgaggaatcctggtcctcagggtggacaagatcgaccgcgcgattctgcaacggctgtgcatttcgagcctgctttgagcgacattccggaagaggctgcttctactggggcttcaccacctccggctgcatcgtcctcggtctcagatccttcagcttcatcttcttctcaacctcgcgatcccgcgccaactgttcactttgatcctaacttgaagaaaccgaagaagggtcgtccctctactgcgactgctttaccttcagacgggtcacctcctccaccaattcggccctatcttaagcagcctccgcaatcgctaccgccgactcccgagtcagagccacctgaggcgtcgaatgctcctccggcagttgctgaagccgaagcgagttcggggaagcgggtgtcgcctctacgtttgctgggttttcgttgattaagatacttttacggttggacagtacacacagcattattcttagcaggatgtatcactattcattatgatg

SEQ ID NO: 23007 - protein, 221 aa, Glycine max
MRPFAPQVARFTNRSTSSSPALQSAASYFTSGYRSTPSPTQQQTRMSSSTETGELKLESTVKTATGVELSNEQRTIVSSVLDLFAGRPSLAKLQLWKDDAVFSDPITVAKGRKEFEPQWYGLQTAFSEIERKDHSVTSSGNPIELDMTTMYKVKGIGKETTITSKVNIFHENGKITRVEDKWNGNLPDSGIANAFRRLNAVSVPKMVGVPKNAEEDAKRGN

SEQ ID NO: 23008 - protein, 177 aa, Glycine max
TIIAPCSSYAFYLNRKKELSLHRPILFPLNFCQCVRLHLKSHASRTDQLHPHQHYSPQQVILHPVTAALLLPHNNKPECLPPPRLASLSSRAPSRPPLVSSSATSRGLSCLQCWTSSLAGPPLPSYSSGRTMPSSATPSLSQRAGRSLSLNGTASKPPSPKSSAKTTASPPPATPSS

SEQ ID NO: 23009 - protein, 176 aa, Glycine max
MSSSTETGELKLESTVKTATGVELSNEQRTIVSSVLDLFAGRPSLAKLQLWKDDAVFSDPITVAKGRKEFEPQWYGLQTAFSEIERKDHSVTSSGNPIELDMTTMYKVKGIGKETTITSKVNIFHENGKITRVEDKWNGNLPDSGIANAFRRLNAVSVPKMVGVPKNAEEDAKRGN

SEQ ID NO: 23010 - DNA, 1701 bp, Glycine max
attttcaagtgataagaaggaagctgacagttggatagcaggaaatgctgccaacatgcacggttcccagtcagtaggtacagacatttggttgggtgatgatgcaaaaatgtctcctgattgggattacagggtgagatcttccagctgtattgaagaaaagcatgaacaaaataagcatgggataacgcagggttttatgtatttagccacctctgaacatgacagaatacaaattgctccaggacaagattttaatcagaatgcagagagttttaatcctttgcattcttcaagctgccaagtagttggacaaactcaagtagcagctcccattctaccttcacagggtggaattgttgatggtatgctgaaacaggaagtctctactgagaaaaaatacactactgaaccaaatatcatggatgctggcttattacaagttagttcaagagatcctcctccaactgagaacgtggtaggcaaagaacagcttgctcagcttaccaatctctcagcctcactggctcatatccttggaacagggcaacagctgccacaactttatgctgctttaaattctcatgatgcaaagggcacatcctccctagcaaaagctgaggtgcttgctatgcctctttccaacacactcatcaggccagatcctgctgttggactcctgaagcagtatgatccaatgtgtgacagtgttgagccaaagagtgctgttgcaagtagtggggtaaccccagccattcccccatgtaaaaaagttgcagaagatgtagtggaaatttcatcacagtccaacacagcaagacaaaattgtggcaattcttccaagtctgctggctcagaagaacttgtcaagagtgatcctctaatcctgttgcagccaggtcaaaacattggggttaataaagatgataacaaggaagtgttacctgaggaaaggcaaaaatctaaagatgatcctaaaaataccaaagagagtggtcctttggaaaacatggagcaaactgatggtcctgatgaggcaaagaaaacaaagggaatgaaggggagtcgtgcatttaaatttgcattggtcgagtttgttaaggagcttctgaaaccaacatggaaagatggtcaaatcaccaaagatgattataaaacaattgtgaagaaagttgttgataaagtaactggttccatgcagggggccaatattcctcagacacaggagaaaattgaccactatttgtcattttcaaaaccaaagcttaacaaacttgtacaggcgtatgtggaaaaggttcagaaggcttagtgcaattatagaaatttgactgccaagtagtttatattttactcagcactgttgtcttcaatatgtattctgcttctttacctctggatttttatttttttttttgtattttggccatttgtttgcgtactgtagctcttttgcagcaattgcgtacaacaaatcagggagcatttttttgggcctttaattttttttcttcgtttttttggggaaaaattattaggtgtttgtgccattaccaactcaatagttaggcagtaatgtgggatttaatttatttttccagtttattgtaattataggagacagctgtttgcttttcagaacagtgagaaagaaatggaaccaaaagatgctcaagtccaatgcttgattatttcaaaaag

SEQ ID NO: 23011 - protein, 436 aa, Glycine max
FSSDKKEADSWIAGNAANMHGSQSVGTDIWLGDDAKMSPDWDYRVRSSSCIEEKHEQNKHGITQGFMYLATSEHDRIQIAPGQDFNQNAESFNPLHSSSCQVVGQTQVAAPILPSQGGIVDGMLKQEVSTEKKYTTEPNIMDAGLLQVSSRDPPPTENVVGKEQLAQLTNLSASLAHILGTGQQLPQLYAALNSHDAKGTSSLAKAEVLAMPLSNTLIRPDPAVGLLKQYDPMCDSVEPKSAVASSGVTPAIPPCKKVAEDVVEISSQSNTARQNCGNSSKSAGSEELVKSDPLILLQPGQNIGVNKDDNKEVLPEERQKSKDDPKNTKESGPLENMEQTDGPDEAKKTKGMKGSRAFKFALVEFVKELLKPTWKDGQITKDDYKTIVKKVVDKVTGSMQGANIPQTQEKIDHYLSFSKPKLNKLVQAYVEKVQKA

SEQ ID NO: 23012 - protein, 418 aa, Glycine max
MHGSQSVGTDIWLGDDAKMSPDWDYRVRSSSCIEEKHEQNKHGITQGFMYLATSEHDRIQIAPGQDFNQNAESFNPLHSSSCQVVGQTQVAAPILPSQGGIVDGMLKQEVSTEKKYTTEPNIMDAGLLQVSSRDPPPTENVVGKEQLAQLTNLSASLAHILGTGQQLPQLYAALNSHDAKGTSSLAKAEVLAMPLSNTLIRPDPAVGLLKQYDPMCDSVEPKSAVASSGVTPAIPPCKKVAEDVVEISSQSNTARQNCGNSSKSAGSEELVKSDPLILLQPGQNIGVNKDDNKEVLPEERQKSKDDPKNTKESGPLENMEQTDGPDEAKKTKGMKGSRAFKFALVEFVKELLKPTWKDGQITKDDYKTIVKKVVDKVTGSMQGANIPQTQEKIDHYLSFSKPKLNKLVQAYVEKVQKA

SEQ ID NO: 23013 - protein, 400 aa, Glycine max
MSPDWDYRVRSSSCIEEKHEQNKHGITQGFMYLATSEHDRIQIAPGQDFNQNAESFNPLHSSSCQVVGQTQVAAPILPSQGGIVDGMLKQEVSTEKKYTTEPNIMDAGLLQVSSRDPPPTENVVGKEQLAQLTNLSASLAHILGTGQQLPQLYAALNSHDAKGTSSLAKAEVLAMPLSNTLIRPDPAVGLLKQYDPMCDSVEPKSAVASSGVTPAIPPCKKVAEDVVEISSQSNTARQNCGNSSKSAGSEELVKSDPLILLQPGQNIGVNKDDNKEVLPEERQKSKDDPKNTKESGPLENMEQTDGPDEAKKTKGMKGSRAFKFALVEFVKELLKPTWKDGQITKDDYKTIVKKVVDKVTGSMQGANIPQTQEKIDHYLSFSKPKLNKLVQAYVEKVQKA

SEQ ID NO: 23014 - DNA, 1471 bp, Glycine max
gcaatttttctaagtctttttttttgtcccattgtggccattttttcccccacttgccatttccattgagatccacagaatgattattttcctcactgctgctgcttttcaggacatgcctctgtctttgggggttatatagggtttttggctgagtagcaatttgttgttgttgcaaccaatttttgaagaaaagatgggggagacagcagcttccaatcctgctttgcaagtgtctgtttcatttggtagatttgagaatgattccttgtcttgggagaaatggtctgctttctcaccaaacaagtacttggaagaagttgagaagtgcgccactcctggatcagttgctcaaaagaaagcttactttgaagctcattacaagaatgttgcggctcggaaagccgaattgctggctcaagcgaagcagacggagaaagattctcctagatcacaacatcaaaatggggaagatctgagttgtaacacttgttggactgatgcagaatgtgatgatactcaaggttctagggaaggggttaaggttaagcaagaaaccaattcaattggtgagattgttaggaccgatgagagtaatttggaggaggatgttgcagtttcaagagattatcaaggttcatctgttgaaggagagaaagagaatgaagaactagaaagcagatcaggtagttcccagatagagaaacttgaagaagttgtctgcattgaacaaggggaaagtaaagaagaaagtcgtaatgttgaagctgaagatgttaaggaaattccacacaatgtaaacaaagagcctgcacaggcttcagaaattgaagcaaaatatgtggcattggatcatccaaaggttacccctgtgaacagagaaagcaatgcgacaaagaagaagaaaaaatcgatgctatccacatctaagcctaaggcatcccaattttccacccctagaagttcaaatcctacaacaactcccaccaaaacattggcatctgcctcttcaactaaaaggggaaattctccatcaatatcttggaggaaaattacttccacatcagagaacagaaaagttccaaataaatctttgcacatgtcccatagtttggctcctagccaaccagatcctgctccacatactacaatgaggaaatctttgattatggagaaaatgggggataaggacatagtcaaacgagcattcaagacttttcagaacaatttcaatcagcgaaaaacttctgctgaaaacaaatctttggtaaaagaaaaggttccttcagaggtgacagagacaaggaatccaacatccatagctttgcgaaaggaaaatggacagtcacctaaggttgacagtatggatagaaaaagtgcaaatgttgttcgaactgcttttggcctaaaaagtgacgttagagcagagaaaggaaaagagtttccgagaaaaatagaagagaaacttaac

SEQ ID NO: 23015 - protein, 425 aa, Glycine max
MGETAASNPALQVSVSFGRFENDSLSWEKWSAFSPNKYLEEVEKCATPGSVAQKKAYFEAHYKNVAARKAELLAQAKQTEKDSPRSQHQNGEDLSCNTCWTDAECDDTQGSREGVKVKQETNSIGEIVRTDESNLEEDVAVSRDYQGSSVEGEKENEELESRSGSSQIEKLEEVVCIEQGESKEESRNVEAEDVKEIPHNVNKEPAQASEIEAKYVALDHPKVTPVNRESNATKKKKKSMLSTSKPKASQFSTPRSSNPTTTPTKTLASASSTKRGNSPSISWRKITSTSENRKVPNKSLHMSHSLAPSQPDPAPHTTMRKSLIMEKMGDKDIVKRAFKTFQNNFNQRKTSAENKSLVKEKVPSEVTETRNPTSIALRKENGQSPKVDSMDRKSANVVRTAFGLKSDVRAEKGKEFPRKIEEKLN

SEQ ID NO: 23016 - DNA, 1288 bp, Glycine max
tgcaatgctagctagacacgctgaaaggggcttaggcattgataatccgatgcaaggtggtaggaatgagttaccaaattatgaaaggtctggggtttcccgatattcagatgtacggccaacaagtgcacctcatcactctggtggggttcagctggctcgaaatgatggaaaaattgttgggtctgatttgcagcaccctatgccttctgaactaactgagcgacctaaactgaagttgctaccaagggcaaagccagtggaaagttcagaacctgctgtcatggattatgcacagggtaatcgtcaggttaatgattctggccatgttgaaaccgtttatcaagcacatggccatgctaattttgtgaagcctgtatcagctggaaatgacaatgggaaagacgcaggacagcgtccgaagctgaatttgaagcctcggtctcagcccactgaaaagctggatggaaacagtgaaagagacaggaatgttttatttggtggagctcgcccacgtgaactagtattgaaggagcgagggattgatgatgtttcaatcaatgtggtggagcattcaaacagggttgaaaacaatattttgagggttcagaaacatcctgaccattcaacccagactcgatatggtgaaaagaccgaggatgctcatcttgatcaaaagacaggcagaaaacctgaaaggaaggagcaaagggcagatggtgatagggctcatgcgcagaggagaaattggcggggtgatactcggagaaatgggaaggagaccgataggcagccgcatgccccggagaggcaaccttcacctgagacatggcgtaagcctgtggagcagcagctaaaatcagctccaggtgctgctagcacacggtacagtagagcagcttcggcggttgaacttgcacaagcattctccagatctgtatcagatccaaaagtgaatgataggttttcaggtcaaaggggtctgaacactggcaacagcagcaggacacaagttccattttcacggcttgttggtcctacatcaaggcctcagatcaatggttattaaaatatttggtggataattggactcactcaagaccaatttctatgagatagcattggattcatgcaatgtggaattgcagagcacttcatgtagtggctgtggttttagttattttctcctcattcacaacaattgagtgagaaattaatgatttctcaagttacatagccttggttgtgacaataccttcttacaattaccatgctttattttgttttt

SEQ ID NO: 23017 - protein, 355 aa, Glycine max
AMLARHAERGLGIDNPMQGGRNELPNYERSGVSRYSDVRPTSAPHHSGGVQLARNDGKIVGSDLQHPMPSELTERPKLKLLPRAKPVESSEPAVMDYAQGNRQVNDSGHVETVYQAHGHANFVKPVSAGNDNGKDAGQRPKLNLKPRSQPTEKLDGNSERDRNVLFGGARPRELVLKERGIDDVSINVVEHSNRVENNILRVQKHPDHSTQTRYGEKTEDAHLDQKTGRKPERKEQRADGDRAHAQRRNWRGDTRRNGKETDRQPHAPERQPSPETWRKPVEQQLKSAPGAASTRYSRAASAVELAQAFSRSVSDPKVNDRFSGQRGLNTGNSSRTQVPFSRLVGPTSRPQINGY

SEQ ID NO: 23018 - protein, 354 aa, Glycine max
MLARHAERGLGIDNPMQGGRNELPNYERSGVSRYSDVRPTSAPHHSGGVQLARNDGKIVGSDLQHPMPSELTERPKLKLLPRAKPVESSEPAVMDYAQGNRQVNDSGHVETVYQAHGHANFVKPVSAGNDNGKDAGQRPKLNLKPRSQPTEKLDGNSERDRNVLFGGARPRELVLKERGIDDVSINVVEHSNRVENNILRVQKHPDHSTQTRYGEKTEDAHLDQKTGRKPERKEQRADGDRAHAQRRNWRGDTRRNGKETDRQPHAPERQPSPETWRKPVEQQLKSAPGAASTRYSRAASAVELAQAFSRSVSDPKVNDRFSGQRGLNTGNSSRTQVPFSRLVGPTSRPQINGY

SEQ ID NO: 23019 - protein, 339 aa, Glycine max
MQGGRNELPNYERSGVSRYSDVRPTSAPHHSGGVQLARNDGKIVGSDLQHPMPSELTERPKLKLLPRAKPVESSEPAVMDYAQGNRQVNDSGHVETVYQAHGHANFVKPVSAGNDNGKDAGQRPKLNLKPRSQPTEKLDGNSERDRNVLFGGARPRELVLKERGIDDVSINVVEHSNRVENNILRVQKHPDHSTQTRYGEKTEDAHLDQKTGRKPERKEQRADGDRAHAQRRNWRGDTRRNGKETDRQPHAPERQPSPETWRKPVEQQLKSAPGAASTRYSRAASAVELAQAFSRSVSDPKVNDRFSGQRGLNTGNSSRTQVPFSRLVGPTSRPQINGY

SEQ ID NO: 23020 - DNA, 1255 bp, Glycine max
gttgtcaatgaggttgctattgctgctgctgattcttttttgcctgtacaggccttgcagtacgttatagatgctgtgcattcctacactggcttaaattggtgggcagccatagttctaacaaccctgttgattcgaaccgctacagttccactcttaataaatcaacttaaggccacttctaaacttacgttaatgaggcctcatttggaagagataaagcaacaaatggagggactgactatggatcccgtagctgttgctaaaggtcagcagcagatgaagaaactatttaaggaatatggtgtgagtccttttacgccattgaagggactctttatccaagggcctatttttgttagtttttttcttgcgatagataacaaatatggctgaaaaagtgccatcattcaagcatggcggagcttcttggtttattgatctctcaactcctgatgccttgtacatttttccagctttgacagcattgtcattcttaataacagtagagtgtaatatgcaagaagggatggaaggaaatcctgtggctggcaccatgaaaaatgtctctaggggtcttgctgttcttacagttcctttcaccatgggatttccaaaggcaatattctgttactgggttacatcaaatttgttttcacttgtgtatggacttgtgcttaaagttcctggtgtaaagaaaactttgggtattcctgaaatacctgttgcaccacccaccaccaccagtgctcctcaatctcccttttctatatttccagctctaaaacaagctacatcatcaacaacaaatgggcaaagctcaattccagaagaagcttcaaaacattcaaataaaaaaatatcttcttcttctgttattagtcaaaggcttagaagtttagagaaacaagtgaaaggaagaaagaagaaccagaagtgaggaaaatttacaataatcctaaattaagccatctatacatggagcaattgtgctcagatttttgttatattttatgatcctgggatgagggagaaattagtttaaactttgtttgcttaggaagttaaaacttttgcttatcgtgttgtctacactcgattcatgggtttctcaattcttgtgtaaaacttggtccctatcagactgggaggcctcaataattttgtataacttttcttcaatttttcatattcattttaaaaaattaatgtgatcaaaagattgctaatattagcccttatttgacacaaaaag

SEQ ID NO: 23021 - protein, 183 aa, Glycine max
MAEKVPSFKHGGASWFIDLSTPDALYIFPALTALSFLITVECNMQEGMEGNPVAGTMKNVSRGLAVLTVPFTMGFPKAIFCYWVTSNLFSLVYGLVLKVPGVKKTLGIPEIPVAPPTTTSAPQSPFSIFPALKQATSSTTNGQSSIPEEASKHSNKKISSSSVISQRLRSLEKQVKGRKKNQK

SEQ ID NO: 23022 - protein, 140 aa, Glycine max
MQEGMEGNPVAGTMKNVSRGLAVLTVPFTMGFPKAIFCYWVTSNLFSLVYGLVLKVPGVKKTLGIPEIPVAPPTTTSAPQSPFSIFPALKQATSSTTNGQSSIPEEASKHSNKKISSSSVISQRLRSLEKQVKGRKKNQK

SEQ ID NO: 23023 - protein, 136 aa, Glycine max
MEGNPVAGTMKNVSRGLAVLTVPFTMGFPKAIFCYWVTSNLFSLVYGLVLKVPGVKKTLGIPEIPVAPPTTTSAPQSPFSIFPALKQATSSTTNGQSSIPEEASKHSNKKISSSSVISQRLRSLEKQVKGRKKNQK

SEQ ID NO: 23024 - DNA, 1547 bp, Glycine max
gtgcttgatcccaatgaaggatttctgagaaacggaaaggatcctgttcttactgtgttttctgctgggcatgctttgcatgtttttataaatggtcagctatcaggaactgcatatggaagcttagaattccctaaactaacatttaacgagggagtgaagctcagaaccggtgttaacaagatctctcttctaagtgttgcagttggactcccgaatgttggtcctcattttgaaacatggaatgctggtgttcttggcccgatttcattaagtggtctcaacgaagggagaagggacttgtcttggcagaaatggtcttataaggttggtcttaaaggtgaaaccttgagtcttcactctcttggtggaagttcgtcagtggagtggattcagggatctttagtttctcaaaggcagccattgacttggtacaaaacaacatttgacgcgccagatgggactgcaccattggctttagacatgaacagcatgggcaaaggtcaagtgtggttaaatggacagaatcttggccgctactggcctgcttataaagcatctggtacttgtgattactgtgactatgctggaacttataacgagaataaatgcagaagtaactgtggcgaggcttctcaaagatggtatcacgttcctcaatcatggctaaagccaacaggaaatttattggttgtgtttgaagagctaggtggagacctcaatggaatctctttggttagaagggatatagatagtgtatgtgcagatatttatgagtggcagccaaatcttataagctatcagatgcaaacttctggcaaagcacctgttagaccaaaagttcatttatcttgtagccctggacagaaaatctcatcaatcaaatttgctagctttggtactccagtaggttcttgtggaaacttccatgaaggaagctgccatgctcacatgtcttatgatgcctttgaaaggaattgtgttggacagaacttgtgcacagtagctgtgtcacctgaaaattttggaggagatccatgtccaaatgtcttgaagaaactctcagtggaagctatttgttcctgatcattttaacctcagaaaataaatggattacaagtctcttcagattgatttttcccaccactattcattttaatacagttcttttgggtcaaccaaagtctacacttctgaatctgatcatcacaagcattattatttcggctttaccaaggtgaagttgcagaaaacacaacacaccatatggttgaaagcattgctgagatgattgtggatatgtgtatatacttgtgttctgcttgttatacagaggtgaaaggtgaagatttgattggtgcactatgagacgataccgaatactgattgtgtccatgtgctagtgttttagacttagtgtggaagcctcttgcttcctgtaatattagttttccattgtaagctgcattcataacgatttggtttctttctccctgtaagaaacttctcaagatgataagatcaagcatattaaattcagtcaaaag

SEQ ID NO: 23025 - protein, 361 aa, Glycine max
VLDPNEGFLRNGKDPVLTVFSAGHALHVFINGQLSGTAYGSLEFPKLTFNEGVKLRTGVNKISLLSVAVGLPNVGPHFETWNAGVLGPISLSGLNEGRRDLSWQKWSYKVGLKGETLSLHSLGGSSSVEWIQGSLVSQRQPLTWYKTTFDAPDGTAPLALDMNSMGKGQVWLNGQNLGRYWPAYKASGTCDYCDYAGTYNENKCRSNCGEASQRWYHVPQSWLKPTGNLLVVFEELGGDLNGISLVRRDIDSVCADIYEWQPNLISYQMQTSGKAPVRPKVHLSCSPGQKISSIKFASFGTPVGSCGNFHEGSCHAHMSYDAFERNCVGQNLCTVAVSPENFGGDPCPNVLKKLSVEAICS

SEQ ID NO: 23026 - protein, 200 aa, Glycine max
MNSMGKGQVWLNGQNLGRYWPAYKASGTCDYCDYAGTYNENKCRSNCGEASQRWYHVPQSWLKPTGNLLVVFEELGGDLNGISLVRRDIDSVCADIYEWQPNLISYQMQTSGKAPVRPKVHLSCSPGQKISSIKFASFGTPVGSCGNFHEGSCHAHMSYDAFERNCVGQNLCTVAVSPENFGGDPCPNVLKKLSVEAICS

SEQ ID NO: 23027 - protein, 197 aa, Glycine max
MGKGQVWLNGQNLGRYWPAYKASGTCDYCDYAGTYNENKCRSNCGEASQRWYHVPQSWLKPTGNLLVVFEELGGDLNGISLVRRDIDSVCADIYEWQPNLISYQMQTSGKAPVRPKVHLSCSPGQKISSIKFASFGTPVGSCGNFHEGSCHAHMSYDAFERNCVGQNLCTVAVSPENFGGDPCPNVLKKLSVEAICS

SEQ ID NO: 23028 - DNA, 1481 bp, Glycine max
tgtctatgtatgcaacttgccctatgggactgacgataacatgctggctgaatatttcggtaccatcggattaataaagaaagataaacgtacagggagaccaaaaatatggttatatcgagacaaagaaactaatgaaccaaaaggagatgctactgtaacatatgaggatccgcatgctgctgtagctgctgttgaatggtttaacaacaaagattttcatggcaatacaattggagtttttatagcagagtcaaaaaacaaggatgaccaagcatataatgcagcagttgaaccgggagttactgataatgttggtggactagaggaaactaccaaggatgttaatggtggtagtggaagaggtagaggtcaaaatgatacttcaggcaaagcatggcaacaagatggtgattggttgtgtctgaatacaaggtctgtgatatgaaattgttgctccaatgtgaactttgcttttcgtggtgcttgtaatcgctgtggaactgctcgtcctgctggtgcttctggaatttcaggggctggtggccgtggcaagggacgtgctgcacaagaatcagggggtattggccggccagctggtggaggactctttggtcccaatgattggccttgtccaatgtgtgggaatatcaattgggcaaagcggactaaatgcaatatctgcaacacaaataagcctgggcataatgagggtggtgtaagaggaggacgaggtggaggttacaaagagcttgatgaagaggaaatagaagaaactagacgtcgtaggagggaagctgaagatgatggggagttgtatgatgaatttggaaatctaaagaaaaaattccgtgccaaaacacagcaagctgaagctgcacgtgggcttcctggttcagggcgtgctggttgggaggttgaggaactagggatagatagggatgctagagaaagtagagacagaggaagggagcgcaatgatggggagagcaggaacagagagcgaagcgaaaaagagaggcgtagcagttggaatagggagaggggaagagatcgagattgggattatgttgatcgagatagagattatgggagagatcgggaccgaagtagacaccgttactaaaattagcagcaagagtgcattctgatgtgttgactaccatgctgtgtgggccttttgtagaagaatttcaattgctttgaattcaatccgtaagtttggggggtcaacttcctgcaatctgatcatggaccttttgtacaacctatggtatttatgttttttctattcacaaagacaagtttttgtttgagaacgtcacaatagtttgaactattagttgtcgtcagctaatttcttgtgttgcttgaatggagtaattactagagcgcgaatgatagtattacaagacgatgatgatcttgaaggctgacaatttttcctgttgcaatttgctaattagtgtttgttgctaaag

SEQ ID NO: 23029 - protein, 162 aa, Glycine max
MCGNINWAKRTKCNICNTNKPGHNEGGVRGGRGGGYKELDEEEIEETRRRRREAEDDGELYDEFGNLKKKFRAKTQQAEAARGLPGSGRAGWEVEELGIDRDARESRDRGRERNDGESRNRERSEKERRSSWNRERGRDRDWDYVDRDRDYGRDRDRSRHRY

SEQ ID NO: 23030 - protein, 148 aa, Glycine max
VYVCNLPYGTDDNMLAEYFGTIGLIKKDKRTGRPKIWLYRDKETNEPKGDATVTYEDPHAAVAAVEWFNNKDFHGNTIGVFIAESKNKDDQAYNAAVEPGVTDNVGGLEETTKDVNGGSGRGRGQNDTSGKAWQQDGDWLCLNTRSVI

SEQ ID NO: 23031 - protein, 135 aa, Glycine max
MLAEYFGTIGLIKKDKRTGRPKIWLYRDKETNEPKGDATVTYEDPHAAVAAVEWFNNKDFHGNTIGVFIAESKNKDDQAYNAAVEPGVTDNVGGLEETTKDVNGGSGRGRGQNDTSGKAWQQDGDWLCLNTRSVI

SEQ ID NO: 23032 - DNA, 1857 bp, Glycine max
tctagatgctcttgatacactttctagaactgaatcattcttcatgagctgtagtgtgagtggtttgagtgaatgggatgatcaagaggtccaactatcaggaaatttttcaacagatcaacaggcacgtgatttcatgattggcaggttcttgcctgcagcaaaggcaatggcttctgaaacacctcaaattcagcacaactctaggaagccacttgttacacaagaacaaccaaaacaggcatggaaggtagttagtggagcgaattcccgtccccttaatccaaaatggcaaaaggttttgccgcattatgctcaagatattggtagggaagagagcgaagatgaaagtgatgataatgatggatatgaaaacaatgcacccaaagtttgtgggctatttcctcggttctgccttttgaatccagttccaggattaagaatggagggtaggattcgaagttctacatttcatggagtgcagagtaaatcaattacttctcacagaagaactgcaaaagagcatggtagaactgctactaatgggaaaaagtcagtaaactcccagtctggttatacagaagagagagattttctgagtactgcagaaaaatctaagcatgatattgatccacatcgtagagcttgcagcaaatcatcagcctctgagagcaccgaatttgaatcaagttgtgatagccctgttgttgagaaaactctatatgtagattctgtacataaggtcaaatcttcagacaccaatatcagaggggatgattttgatactctaagaaaagacactgaccttgataaaagcctttctatagattcttcaattgaggatagcaaacccttgggtattgtggatgagaaggaagtatcagaacctaaaagtttagcttctcttgattcatctctccccgtttgttctgataattcaaatgacaatatgcaaatggaaatgaaaaatcattccaacaaaatatgcccagaaaagcaagagttgacaaagcctgattaccaaggaagtaacttagatcgcgatttggttgcaatctcaagtccagatatggttgcatgcaagaaaatagagtctgaaagcaaagattttagcactaaggaaagttctaatggcctaattaagaatcctgtttcaatgagaaacaggaaattttccagtgatgtgaaatttgattcaaagtgccaacaagctaccaaagtggttgatcaagaatgcactcttggatctagtgaggatcctagtaatttggctagctcaaaggtggtgggtgacacaaagatcaacttagaaagtcaattgcggatgaagttgagccatggaaagacttcaaatgcaagctcttcaaagcttcctcttgcccttccttcaccaaaagctccttcagagtcttggcttaagcgcacattaccaacagttccctcgaagagtatatctttacggtctaatcttgctacctacttccatgcacctgttaaaacttctgaagttaatcatgggcatcttcagtttgctcaggaactactcccacccattccagaagcatgaattttccggagatatcaggccattggttatttgatttgcttggtgaaatgtgccacgttttcttagtgtaattatttgttcttaggattctcattctacagcttggtcccccttttgcttttttatatatatacatgagacagtatactactcaaaagtgtaaatcacagttgccctttttgtcttgtaaatgtaataagttgtttcaactaaaatttatcactataaatcacaacaactttaaggtgatttgttcatgtaataatatcagggcaaaagaccttttgctt

SEQ ID NO: 23033 - protein, 521 aa, Glycine max
LDALDTLSRTESFFMSCSVSGLSEWDDQEVQLSGNFSTDQQARDFMIGRFLPAAKAMASETPQIQHNSRKPLVTQEQPKQAWKVVSGANSRPLNPKWQKVLPHYAQDIGREESEDESDDNDGYENNAPKVCGLFPRFCLLNPVPGLRMEGRIRSSTFHGVQSKSITSHRRTAKEHGRTATNGKKSVNSQSGYTEERDFLSTAEKSKHDIDPHRRACSKSSASESTEFESSCDSPVVEKTLYVDSVHKVKSSDTNIRGDDFDTLRKDTDLDKSLSIDSSIEDSKPLGIVDEKEVSEPKSLASLDSSLPVCSDNSNDNMQMEMKNHSNKICPEKQELTKPDYQGSNLDRDLVAISSPDMVACKKIESESKDFSTKESSNGLIKNPVSMRNRKFSSDVKFDSKCQQATKVVDQECTLGSSEDPSNLASSKVVGDTKINLESQLRMKLSHGKTSNASSSKLPLALPSPKAPSESWLKRTLPTVPSKSISLRSNLATYFHAPVKTSEVNHGHLQFAQELLPPIPEA

SEQ ID NO: 23034 - protein, 507 aa, Glycine max
MSCSVSGLSEWDDQEVQLSGNFSTDQQARDFMIGRFLPAAKAMASETPQIQHNSRKPLVTQEQPKQAWKVVSGANSRPLNPKWQKVLPHYAQDIGREESEDESDDNDGYENNAPKVCGLFPRFCLLNPVPGLRMEGRIRSSTFHGVQSKSITSHRRTAKEHGRTATNGKKSVNSQSGYTEERDFLSTAEKSKHDIDPHRRACSKSSASESTEFESSCDSPVVEKTLYVDSVHKVKSSDTNIRGDDFDTLRKDTDLDKSLSIDSSIEDSKPLGIVDEKEVSEPKSLASLDSSLPVCSDNSNDNMQMEMKNHSNKICPEKQELTKPDYQGSNLDRDLVAISSPDMVACKKIESESKDFSTKESSNGLIKNPVSMRNRKFSSDVKFDSKCQQATKVVDQECTLGSSEDPSNLASSKVVGDTKINLESQLRMKLSHGKTSNASSSKLPLALPSPKAPSESWLKRTLPTVPSKSISLRSNLATYFHAPVKTSEVNHGHLQFAQELLPPIPEA

SEQ ID NO: 23035 - protein, 476 aa, Glycine max
MIGRFLPAAKAMASETPQIQHNSRKPLVTQEQPKQAWKVVSGANSRPLNPKWQKVLPHYAQDIGREESEDESDDNDGYENNAPKVCGLFPRFCLLNPVPGLRMEGRIRSSTFHGVQSKSITSHRRTAKEHGRTATNGKKSVNSQSGYTEERDFLSTAEKSKHDIDPHRRACSKSSASESTEFESSCDSPVVEKTLYVDSVHKVKSSDTNIRGDDFDTLRKDTDLDKSLSIDSSIEDSKPLGIVDEKEVSEPKSLASLDSSLPVCSDNSNDNMQMEMKNHSNKICPEKQELTKPDYQGSNLDRDLVAISSPDMVACKKIESESKDFSTKESSNGLIKNPVSMRNRKFSSDVKFDSKCQQATKVVDQECTLGSSEDPSNLASSKVVGDTKINLESQLRMKLSHGKTSNASSSKLPLALPSPKAPSESWLKRTLPTVPSKSISLRSNLATYFHAPVKTSEVNHGHLQFAQELLPPIPEA

SEQ ID NO: 23036 - DNA, 1283 bp, Glycine max
atagcaggttcttaggcctttctctctctttatggttggcaagttacatttatttcaattggagtgaaattttctgtacagggaacattgaaagccatgaagcacagtcaattgttaagcacatagaagatgttctctttaatttttcaaaatttctgtgcaagcctttattctcatctcaacatttggaaaatcgggttgttaaacttgaaagtggcatgaattacttctacccttcagaatgtcttaatcctgaagatgagaattctgctcttgtgcactatatacaggttgggcgagatgactttaagctgaatgttaaacttcagctttttgcccttgttgcaaagcaaccaacctttcatcagctacgatcagttgagcagctggggtacattactgtgctcatgcagaggaatgattgtggcatacgtggactacagtttattatccaatccacagtaaagtctcctggtaacattgagcaaagggtcgaggcatttctccaaatgtttgagaccaaactccacgagacgacaattgatgaattcaagagtaatgtaaatgctttgatagatgtgaagctagagaaacacaaaaatttgagggaagagtcatcatttttctggcgagagattaatgatggtactttgaggtttgataggacagactatgaggttgaagcattaaggcagctcactcttcaagaattgatagatttcttcaatgaatatgtcaaagttggtgcacctcgaaagaaaactttaagtgtacgagtacatgggaaccgtcattcatctgaatacaaaacggaagcctcagaaccacacttggctaaaatagacaatatctttacttttagaagatcacaggctctttatggttcatttaaaggactttctgggcagatgaaattatagctagtgcatcctccaggtttataaacttccacacgttacagaaataatttaaatgaaatatcacctgtaatattgggcactctcataatagcttggacaaaatgttcccttttcagttcatggacgtgctaagtgctattcatctggatttgaaatgagtgataacttacatgagcagaattatatgaatctcatttctggtatgagtggcttatcaaatcattttgtaatattatataatcgttatacggttataaacacttttatttgctctatatgcaccgacttactgtgatttacaagttaaaaatcagtttagacaattatgagggccatgtaataaagaatgccaaacatttctgt

SEQ ID NO: 23037 - protein, 305 aa, Glycine max
SRFLGLSLSLWLASYIYFNWSEIFCTGNIESHEAQSIVKHIEDVLFNFSKFLCKPLFSSQHLENRVVKLESGMNYFYPSECLNPEDENSALVHYIQVGRDDFKLNVKLQLFALVAKQPTFHQLRSVEQLGYITVLMQRNDCGIRGLQFIIQSTVKSPGNIEQRVEAFLQMFETKLHETTIDEFKSNVNALIDVKLEKHKNLREESSFFWREINDGTLRFDRTDYEVEALRQLTLQELIDFFNEYVKVGAPRKKTLSVRVHGNRHSSEYKTEASEPHLAKIDNIFTFRRSQALYGSFKGLSGQMKL

SEQ ID NO: 23038 - protein, 233 aa, Glycine max
MNYFYPSECLNPEDENSALVHYIQVGRDDFKLNVKLQLFALVAKQPTFHQLRSVEQLGYITVLMQRNDCGIRGLQFIIQSTVKSPGNIEQRVEAFLQMFETKLHETTIDEFKSNVNALIDVKLEKHKNLREESSFFWREINDGTLRFDRTDYEVEALRQLTLQELIDFFNEYVKVGAPRKKTLSVRVHGNRHSSEYKTEASEPHLAKIDNIFTFRRSQALYGSFKGLSGQMKL

SEQ ID NO: 23039 - protein, 170 aa, Glycine max
MQRNDCGIRGLQFIIQSTVKSPGNIEQRVEAFLQMFETKLHETTIDEFKSNVNALIDVKLEKHKNLREESSFFWREINDGTLRFDRTDYEVEALRQLTLQELIDFFNEYVKVGAPRKKTLSVRVHGNRHSSEYKTEASEPHLAKIDNIFTFRRSQALYGSFKGLSGQMKL

SEQ ID NO: 23040 - DNA, 1300 bp, Glycine max
agtatcgagccaattctttccctctctttgctgcttgctccaaaaccccttattagggtcaccgctgtttgggttagggttagggtttctccacacattctttatctaccaatcttcttccactactttcccttcgttccctctcactctcttcatttgtaagctttttgcgctagggttttctctgcaatctcttgtactcgaagttcgttccttcttccggatctcaatctatggatatccgcaagaggggaagacacgaaaccggcttcagcttaaatggaggattcaagagatccaagcaagaaatggagtccttatcaactggtgtaggaagcaaatcgaagccatgtaccaagtttttcagcactgctggttgcccatttggtgagggctgccacttcttgcactatgttcccggtggttataatgcagttgcccatatgatgaatttaacacctgcagcacctcctccaccatcaagaaatgttgcagctctgcctcatgtacctaatgggtctgcaccatctgccgttaagacccgcatatgcaacaagtttaatactgctgaaggttgcaaatttggtgacaaatgccattttgctcatggtgaatgggaacttggcaaacacattgctccatcatttgatgatcatcatgccatgggaccccctggagcaggtcgtcttgctggtcgaatggagcctccgggtcctgccgcaagttttggtgccaattccacagcgaagatcagcgtagaagcttccctggctggagctatcattgggaagggtggtgtgaactcaaaacagatctgccgccaaactggagccaaactttcaattcgagagcatgaatctgacccaaatcttagaaacattgaacttgagggaagttttgagcaaatcaaggaagcaagtaacatggtaaaggatttacttttgaccctgcaaatgtctgcaccacctaaaacaaccccgggtgttcctggtgcacctgcctctcatggaagcaattttaagacgaagctgtgtgagaattttgcaaaagggtcttgcacgtttggagatagatgtcactttgcacatggagcttctgaattgcgtaaatcaggagtatgaactttcttagtgaggcacattagccagggttattattattgttgtgcattgctactttagcagtactgacagtactttcgatgttagttttgttgttgagttgttttaggtcccaattgggatgtttgggatgatttttttttttcagttttgaaattattaaaaaccaaacttagttc

SEQ ID NO: 23041 - protein, 295 aa, Glycine max
MDIRKRGRHETGFSLNGGFKRSKQEMESLSTGVGSKSKPCTKFFSTAGCPFGEGCHFLHYVPGGYNAVAHMMNLTPAAPPPPSRNVAALPHVPNGSAPSAVKTRICNKFNTAEGCKFGDKCHFAHGEWELGKHIAPSFDDHHAMGPPGAGRLAGRMEPPGPAASFGANSTAKISVEASLAGAIIGKGGVNSKQICRQTGAKLSIREHESDPNLRNIELEGSFEQIKEASNMVKDLLLTLQMSAPPKTTPGVPGAPASHGSNFKTKLCENFAKGSCTFGDRCHFAHGASELRKSGV

SEQ ID NO: 23042 - protein, 270 aa, Glycine max
MESLSTGVGSKSKPCTKFFSTAGCPFGEGCHFLHYVPGGYNAVAHMMNLTPAAPPPPSRNVAALPHVPNGSAPSAVKTRICNKFNTAEGCKFGDKCHFAHGEWELGKHIAPSFDDHHAMGPPGAGRLAGRMEPPGPAASFGANSTAKISVEASLAGAIIGKGGVNSKQICRQTGAKLSIREHESDPNLRNIELEGSFEQIKEASNMVKDLLLTLQMSAPPKTTPGVPGAPASHGSNFKTKLCENFAKGSCTFGDRCHFAHGASELRKSGV

SEQ ID NO: 23043 - protein, 225 aa, Glycine max
MMNLTPAAPPPPSRNVAALPHVPNGSAPSAVKTRICNKFNTAEGCKFGDKCHFAHGEWELGKHIAPSFDDHHAMGPPGAGRLAGRMEPPGPAASFGANSTAKISVEASLAGAIIGKGGVNSKQICRQTGAKLSIREHESDPNLRNIELEGSFEQIKEASNMVKDLLLTLQMSAPPKTTPGVPGAPASHGSNFKTKLCENFAKGSCTFGDRCHFAHGASELRKSGV

SEQ ID NO: 23044 - DNA, 1246 bp, Glycine max
attcttgtattttgttgcgctgaacaagacaagaaaactacaaagctatgggcaccatcatcgactcccatttcttggccttcactgcccttgtcactattgcctatcagtttttgtttttcgtcgtcactgcgctcctcaaattcgacaaagtcactgattttgctggaagtacgaatttcattataattgctgcattgaccctggtcatcaaaggctcctggtattttcgacagataatcctcactttgtttgttgggatatggggaattcgcctcggccttttcctcctattcagaattttgcagtggggagaggaccgacgctttgatgaaatgcgcagtaatttgggtagactggccatattttggatatttcaggctgtctgggtgtgggctgtgagtttacctgttacagtggttaatgcaagcgacagaaatcccttcctacaggttgttgatatagtagggtggattttgtgggctgtgggttttattgtggaaggtacagcagatcaacaaaagctgcatttcaaaagatcttcagaaaatagagggaagtggtgtaatgttggactttggaaatattctcgtcatcctaactattttggtgaaatattgctttggtggggaatttttgtggcatctacacctgtactgaagggtgctgaatggctggtgatcattggaccaatctttctcacattattgcttctttttgtcagtggcattccacttcttgaggattcagcggataaaaagtttggcaatgtagatggatataggatatacaaaaagagaaccagccctttaatcccgttgccacgatcaatctatgggaacttatccgcatggttcaaaacaacttttctcttcgagtttccattctacagtcgtaatctaccacaagaagagaactggtgaaatggtattaaattttttagtatctgctcaaggtgcagtgcaaacagtgggaaaatcagtgatgctctgaaaattggctagcacttggttctttgaatttgtttggttcctgtcttacgtcagactgaagttgcagctggtatcatcatccgccatggttagggatgtggctttgtaatgctattgcagctttccttctagatttaatctttctaatttgcttgttctctcttagatatgtataaatttacgtactatatatgttgtgtgcaagtactatggcttgtgcaggtaactaatggatcaatcatgtttttcatctt

SEQ ID NO: 23045 - protein, 291 aa, Glycine max
MGTIIDSHFLAFTALVTIAYQFLFFVVTALLKFDKVTDFAGSTNFIIIAALTLVIKGSWYFRQIILTLFVGIWGIRLGLFLLFRILQWGEDRRFDEMRSNLGRLAIFWIFQAVWVWAVSLPVTVVNASDRNPFLQVVDIVGWILWAVGFIVEGTADQQKLHFKRSSENRGKWCNVGLWKYSRHPNYFGEILLWWGIFVASTPVLKGAEWLVIIGPIFLTLLLLFVSGIPLLEDSADKKFGNVDGYRIYKKRTSPLIPLPRSIYGNLSAWFKTTFLFEFPFYSRNLPQEENW

SEQ ID NO: 23046 - protein, 195 aa, Glycine max
MRSNLGRLAIFWIFQAVWVWAVSLPVTVVNASDRNPFLQVVDIVGWILWAVGFIVEGTADQQKLHFKRSSENRGKWCNVGLWKYSRHPNYFGEILLWWGIFVASTPVLKGAEWLVIIGPIFLTLLLLFVSGIPLLEDSADKKFGNVDGYRIYKKRTSPLIPLPRSIYGNLSAWFKTTFLFEFPFYSRNLPQEENW

SEQ ID NO: 23047 - DNA, 1441 bp, Glycine max
aactaaactgagaaaaagaagagagagaatcatccttccttttccgagaaagaggaagaaaacgccgagaaaacacagaaaccgatttcgccatcatccatcaaagatccacaaattcattcattcattcagcaatcccaattcattaatctgcaaaatgggttttggatgttgaagcgggggaggattgacaatttgcgatggaaagggaaaattggagagaacacatcaacagcaatagcaatgggaattattacgataggtttgtgtgtgattacgacaacggagaacgaagccctgcaaagccttcttcgcctcccagacttggctacatcgaacaccatgtttccaaattcgataccttggccggtgtcgctatcaagtacggtgttgaggtggcagacataagaaagatgaatagccttgttacagaccatcaaatgtttgcacttaaaactctccacattccgctacctgcaaggcatcctccatctccttatttgtcaaatggttccagtactccaggacatggtaactcggatcacagtccacctaatcaggcacaccatgatctgcttgattcattccaatccctgagaataaagtcatcagagcggaaggtctccccagccatgaactcattacagggctactatggacttaaggggaccccaagtccctcagaagatggtccattccccagaaacttacctatgtctgaccgacctctgagtcatcaccggaaatccagaagtttggtcaatgtaattttggaagaaattatggaaaaatcagatgatgcactggctgcagaaaccagggaagttggctccaataaatggaatgacaaacttggcctgagacatcagaaatctgtagctgactttattaggataccggagttgcttttgagggaggataatagcagcagtggtgttcttccatcaagaacaggaaagggcttagctctgagacagaaagcagctaaccgaaccacagcaacaactgattctgaaccaattggtttgaatcctgcggcgttgggcatgggggatgcttctctaattgatggttcatccggggtcaggaaatcatcaagcacttcttgtttacaggatcaagataacagtggctcctcgtccatttggccaaccaaaatgtggaatttgaaaccagacttacaagccctctcaactgcagccattggaaaaccaatctttgatggctttcccaagccaataactggtcggaaaaataaagctgctcttgattaatgtatagaaaatttatgaacacagttttgaccccgtttgtcaggttatggaatcattagccgctacaccagtgggtagattggaggaagtaagacaatgtagaagggacataaaaaatcaaacatcatattttatttctctttgaataggggcattatttttatgcc

SEQ ID NO: 23048 - protein, 357 aa, Glycine max
MERENWREHINSNSNGNYYDRFVCDYDNGERSPAKPSSPPRLGYIEHHVSKFDTLAGVAIKYGVEVADIRKMNSLVTDHQMFALKTLHIPLPARHPPSPYLSNGSSTPGHGNSDHSPPNQAHHDLLDSFQSLRIKSSERKVSPAMNSLQGYYGLKGTPSPSEDGPFPRNLPMSDRPLSHHRKSRSLVNVILEEIMEKSDDALAAETREVGSNKWNDKLGLRHQKSVADFIRIPELLLREDNSSSGVLPSRTGKGLALRQKAANRTTATTDSEPIGLNPAALGMGDASLIDGSSGVRKSSSTSCLQDQDNSGSSSIWPTKMWNLKPDLQALSTAAIGKPIFDGFPKPITGRKNKAALD

SEQ ID NO: 23049 - protein, 286 aa, Glycine max
MNSLVTDHQMFALKTLHIPLPARHPPSPYLSNGSSTPGHGNSDHSPPNQAHHDLLDSFQSLRIKSSERKVSPAMNSLQGYYGLKGTPSPSEDGPFPRNLPMSDRPLSHHRKSRSLVNVILEEIMEKSDDALAAETREVGSNKWNDKLGLRHQKSVADFIRIPELLLREDNSSSGVLPSRTGKGLALRQKAANRTTATTDSEPIGLNPAALGMGDASLIDGSSGVRKSSSTSCLQDQDNSGSSSIWPTKMWNLKPDLQALSTAAIGKPIFDGFPKPITGRKNKAALD

SEQ ID NO: 23050 - protein, 277 aa, Glycine max
MFALKTLHIPLPARHPPSPYLSNGSSTPGHGNSDHSPPNQAHHDLLDSFQSLRIKSSERKVSPAMNSLQGYYGLKGTPSPSEDGPFPRNLPMSDRPLSHHRKSRSLVNVILEEIMEKSDDALAAETREVGSNKWNDKLGLRHQKSVADFIRIPELLLREDNSSSGVLPSRTGKGLALRQKAANRTTATTDSEPIGLNPAALGMGDASLIDGSSGVRKSSSTSCLQDQDNSGSSSIWPTKMWNLKPDLQALSTAAIGKPIFDGFPKPITGRKNKAALD

SEQ ID NO: 23051 - DNA, 1544 bp, Glycine max
gtcattcttgatggttctggagttcagaacaataataaagcgcaatcaacaagtgataaaattggaatgtctgattcaaaaaataaaatcgatgaagatgagactaatcctatcagtgcaggtagattttgtgaaaccatgcagggtgagacatctgtggaaaatatagttcttcgaaggcatactaatcctgatgctgcagctagaaatgggaaatcactaccaccagtgtatttttatgccctagaaagtgatcagcctatactggatatattaaagccgtctatagtcattgtttaccatccagatatgacctttgttagggaaattgaagtctacaaagctgagaatccctcaaaaaggttgaaagtatattttattttctatgaagattcaagtgaggttcagaagtttgaagcaagtatacgtagagagaatggagcatttgaatctttaattaggcaaaaatctttgatgatgattccagttgaccagagtgggcattctttaggattgaattctactttagagtcagatttaaatactcctcaaaacttcgtaaccagaaaagcaggtgggagaaaggaagctgagaaagaaatgcaggttattgtggacatgcgggagttcatgagcagccttccaaatgttcttcatcaaaagggaatgaacatcattccagtgaccctagaagttggtgactatattctatcaccattaatttgtgtggaaagaaaaagtattcaagatctctttatgagcttcacatcaggtcgtctataccaccaggtggagacaatggtacgatattacagaatacctgtactcttgatcgagttttcacaggataagagcttttcattccagtctgctagtgatattggtgatgatgtgacaccaaatagcattatatcaaagttgtctttgcttgctctacacttcccccgactacgaataatctggtctcgaagtttgcatgctactgccgaaatatttgcttcactgaaggcaaatcaagacgagccagatgaaacaaaagcaatcagagtgggtgtcccttcggaagaaggaattgtggaaaatgatgtgagggctgaaaattacaatacatccgctgtggagtttctaagacgatgtccaggtgttacagactcaaactacagggccataatggatggctgtaagagcttggcagaacttgcacttcttcctgtagagaagttagcggaattaatgggtggtcataaagctgctaggactcttagagattttctagatgctaaatacccaactttgttgtgagactatttgaataatttatttgtacaaaaaggtgctatccatttattcaagtcttctgttgtttcgattctacatcattgaattatgatggcaatccattgtaggaaattggaaaacgatccattgagttatttaatatttctccttctcgtggttcagtctgttgtaatttaacaatattgtattacttcacactaggtgagttcggttactgtggcagtgggatgttgtatatgtttaac

SEQ ID NO: 23052 - protein, 433 aa, Glycine max
VILDGSGVQNNNKAQSTSDKIGMSDSKNKIDEDETNPISAGRFCETMQGETSVENIVLRRHTNPDAAARNGKSLPPVYFYALESDQPILDILKPSIVIVYHPDMTFVREIEVYKAENPSKRLKVYFIFYEDSSEVQKFEASIRRENGAFESLIRQKSLMMIPVDQSGHSLGLNSTLESDLNTPQNFVTRKAGGRKEAEKEMQVIVDMREFMSSLPNVLHQKGMNIIPVTLEVGDYILSPLICVERKSIQDLFMSFTSGRLYHQVETMVRYYRIPVLLIEFSQDKSFSFQSASDIGDDVTPNSIISKLSLLALHFPRLRIIWSRSLHATAEIFASLKANQDEPDETKAIRVGVPSEEGIVENDVRAENYNTSAVEFLRRCPGVTDSNYRAIMDGCKSLAELALLPVEKLAELMGGHKAARTLRDFLDAKYPTLL

SEQ ID NO: 23053 - protein, 411 aa, Glycine max
MSDSKNKIDEDETNPISAGRFCETMQGETSVENIVLRRHTNPDAAARNGKSLPPVYFYALESDQPILDILKPSIVIVYHPDMTFVREIEVYKAENPSKRLKVYFIFYEDSSEVQKFEASIRRENGAFESLIRQKSLMMIPVDQSGHSLGLNSTLESDLNTPQNFVTRKAGGRKEAEKEMQVIVDMREFMSSLPNVLHQKGMNIIPVTLEVGDYILSPLICVERKSIQDLFMSFTSGRLYHQVETMVRYYRIPVLLIEFSQDKSFSFQSASDIGDDVTPNSIISKLSLLALHFPRLRIIWSRSLHATAEIFASLKANQDEPDETKAIRVGVPSEEGIVENDVRAENYNTSAVEFLRRCPGVTDSNYRAIMDGCKSLAELALLPVEKLAELMGGHKAARTLRDFLDAKYPTLL

SEQ ID NO: 23054 - protein, 387 aa, Glycine max
MQGETSVENIVLRRHTNPDAAARNGKSLPPVYFYALESDQPILDILKPSIVIVYHPDMTFVREIEVYKAENPSKRLKVYFIFYEDSSEVQKFEASIRRENGAFESLIRQKSLMMIPVDQSGHSLGLNSTLESDLNTPQNFVTRKAGGRKEAEKEMQVIVDMREFMSSLPNVLHQKGMNIIPVTLEVGDYILSPLICVERKSIQDLFMSFTSGRLYHQVETMVRYYRIPVLLIEFSQDKSFSFQSASDIGDDVTPNSIISKLSLLALHFPRLRIIWSRSLHATAEIFASLKANQDEPDETKAIRVGVPSEEGIVENDVRAENYNTSAVEFLRRCPGVTDSNYRAIMDGCKSLAELALLPVEKLAELMGGHKAARTLRDFLDAKYPTLL

SEQ ID NO: 23055 - DNA, 1613 bp, Glycine max
ggtcagccactgcaaccaagccaacggcatcatggaagacagtttcagagtacgagcagagagagcctttggttctcttccaatcccttcttcttctctcaacactctctggtctctcaccgaagacgaaatcaataactccccttccaatcgcacccccaaacctaaacccaaaccctacccctcttcaagctcccgggttcagctccagaagggcctccacgatctcgacgacgacgacgacgacgacgacgaagaagaagaagagcctcgtggagtctctaaaccccctgattacgacgatgaacagtggcagattagggctggtattggccgagattgcaccctcgattacgaggaagaggaggatcaatatgacaagcaggctataggcaaagagaattcgggtgatcgtgtgtatatgaaggatctaaacgacgatggagttgagattagttcttgcaatgttttccccacttcattcagagattttgtcagagacccgcgtgcaaatcatttggcggcaaggattaggctgaagcaggatgacgaagcagcagccaaaaaaattgatgctctgcatgtctctgagaaatctgcaccagacattggtggtggtagtggcagtgatgttattaaccccaagtcaatcttgaagagtaaggataatctttcggagcccagggatgttcgcaaacgtgttcggtttgattctgaatgtgatgatagtggtaacgatgatgatgggcttgaaggaagaaccagggatgttcgcatgaagacctcttcaatggaagaggctacagcttctgaccagttgtcaaagtcaaaagaatttgattcagctgttccagattacattcgtaatccttcaagatacacccgttacacttttgatgattctccaagtgacatggatgacaaatcaaataaggaagcatgcatgagcttccttttgcagttgaaggggtcaaatgctgccaagagaactggacctcaagaagatgaagctttggaagatcttccatcagtaacatttatatcgaagaagaaatctggtgatgccaatatgtgcgacagcgagatggtgtcaaagccgaagcttgatgctggcacggaggccatgaataaaagagccttccctgttggcatagctgccagtgactctgaaaacagtgacgcttgtgcaatggaggaagatgaaccagaagttaaagacattaaaaagagctcacagaaggtgaaccgccagtacaggaagaaagctcaggagaatttggaggagcctgtgtaatgtaatggcgcagttagttcctagacttgcataatttgacatgatcagacttgtaccttttccccccattgtttccctcagactaatgctcccttttcgtaaatttgtgaaactacatcatgtgccaagatctgcctatggccaagttcgttagtttctttctagaagtagaactgctataggtataagcttcaactcaagcataatgatcagagattcagagctaagatgagatgtgttaaaaatgtatttttcatcataaaatatcaaattgtgagcagttgcccataatagcaattttcacctggtttatatttcg

SEQ ID NO: 23056 - protein, 430 aa, Glycine max
VSHCNQANGIMEDSFRVRAERAFGSLPIPSSSLNTLWSLTEDEINNSPSNRTPKPKPKPYPSSSSRVQLQKGLHDLDDDDDDDDEEEEEPRGVSKPPDYDDEQWQIRAGIGRDCTLDYEEEEDQYDKQAIGKENSGDRVYMKDLNDDGVEISSCNVFPTSFRDFVRDPRANHLAARIRLKQDDEAAAKKIDALHVSEKSAPDIGGGSGSDVINPKSILKSKDNLSEPRDVRKRVRFDSECDDSGNDDDGLEGRTRDVRMKTSSMEEATASDQLSKSKEFDSAVPDYIRNPSRYTRYTFDDSPSDMDDKSNKEACMSFLLQLKGSNAAKRTGPQEDEALEDLPSVTFISKKKSGDANMCDSEMVSKPKLDAGTEAMNKRAFPVGIAASDSENSDACAMEEDEPEVKDIKKSSQKVNRQYRKKAQENLEEPV

SEQ ID NO: 23057 - protein, 420 aa, Glycine max
MEDSFRVRAERAFGSLPIPSSSLNTLWSLTEDEINNSPSNRTPKPKPKPYPSSSSRVQLQKGLHDLDDDDDDDDEEEEEPRGVSKPPDYDDEQWQIRAGIGRDCTLDYEEEEDQYDKQAIGKENSGDRVYMKDLNDDGVEISSCNVFPTSFRDFVRDPRANHLAARIRLKQDDEAAAKKIDALHVSEKSAPDIGGGSGSDVINPKSILKSKDNLSEPRDVRKRVRFDSECDDSGNDDDGLEGRTRDVRMKTSSMEEATASDQLSKSKEFDSAVPDYIRNPSRYTRYTFDDSPSDMDDKSNKEACMSFLLQLKGSNAAKRTGPQEDEALEDLPSVTFISKKKSGDANMCDSEMVSKPKLDAGTEAMNKRAFPVGIAASDSENSDACAMEEDEPEVKDIKKSSQKVNRQYRKKAQENLEEPV

SEQ ID NO: 23058 - protein, 290 aa, Glycine max
MKDLNDDGVEISSCNVFPTSFRDFVRDPRANHLAARIRLKQDDEAAAKKIDALHVSEKSAPDIGGGSGSDVINPKSILKSKDNLSEPRDVRKRVRFDSECDDSGNDDDGLEGRTRDVRMKTSSMEEATASDQLSKSKEFDSAVPDYIRNPSRYTRYTFDDSPSDMDDKSNKEACMSFLLQLKGSNAAKRTGPQEDEALEDLPSVTFISKKKSGDANMCDSEMVSKPKLDAGTEAMNKRAFPVGIAASDSENSDACAMEEDEPEVKDIKKSSQKVNRQYRKKAQENLEEPV

SEQ ID NO: 23059 - DNA, 1357 bp, Glycine max
gccttctgcaaggatgggaagacctttgatacattggagggagctgatccgtcaagcttagccaataaggttgctaaagtagcaggctcaattaaccctggagaatctgcatctcctgccagtcttgggatggctgcaggggcttctgttcttgaaacggtgaaagaattagcaaaagacaatgattcttcaaaggagaaaaatcaagttcaaccagggcttagtggtcctctgaaaaagagaattcagcagcttgttgactctaatcctgtcatgcttttcatgaaaggaactcctgaagagccaaaatgtggatttagcaggaaagttgttgttgtgttgaacgaagagagagtcaagtttggaagttttgatgtcctatcagactcagaggttcgtgaaggcttgaagaagttttccaattggcccacatttcctcagctttactgtaaaggagaacttcttggtgggtgtgacatagcaattgctatgcatgagagtggggaactgaaggaagtttttaaagatcatggaattgatactactaatgaagcaaaagagaaagaatcaggaaacggcaaaggtggcatctcaaaatctactgatttgagtacaaccttatcctctcgtctggaaagcctggtaaattcaagtgcagttatgctgtttatgaaaggaaagccagatgaacctaagtgtggtttcagtaggaaggtagttgaaattctccagcaagaaaatgttccctttgagagttttgacattcttactgatgaagaagttcgtcaagggcttaaggtttattcaaactggtccagttatcctcaactgtatatcaagggtgagcttattggtggatcagatattgtgttggagatgcaaaaaagcggagaacttaggaagaatttacacgagaaagggattcttcctgcagagaccattcaagatcgactgaagaatttgattgcctcgtcccctgtgatgctgttcatgaagggtaccccagatgcaccaagatgtggttttagttccagagttgctgatgcccttcgacaagagggcttgaattttgggtcctttgatatattgactgatgaggaagtgagacagggattgaaggtatactcaaattggccaacctatcctcaactctactacaaaagtgagctgattggtggtcatgatattgtgatggagctgcgaaataatggggagctgaagtcgactttatctgagtaggattattattattccttcaaataacatgtgttatgtcctagaagccattttgggaggttgtgtttgatgtcattaatgaactacatggttattttatatgctaccgtcagtgattttg

SEQ ID NO: 23060 - protein, 412 aa, Glycine max
AFCKDGKTFDTLEGADPSSLANKVAKVAGSINPGESASPASLGMAAGASVLETVKELAKDNDSSKEKNQVQPGLSGPLKKRIQQLVDSNPVMLFMKGTPEEPKCGFSRKVVVVLNEERVKFGSFDVLSDSEVREGLKKFSNWPTFPQLYCKGELLGGCDIAIAMHESGELKEVFKDHGIDTTNEAKEKESGNGKGGISKSTDLSTTLSSRLESLVNSSAVMLFMKGKPDEPKCGFSRKVVEILQQENVPFESFDILTDEEVRQGLKVYSNWSSYPQLYIKGELIGGSDIVLEMQKSGELRKNLHEKGILPAETIQDRLKNLIASSPVMLFMKGTPDAPRCGFSSRVADALRQEGLNFGSFDILTDEEVRQGLKVYSNWPTYPQLYYKSELIGGHDIVMELRNNGELKSTLSE

SEQ ID NO: 23061 - protein, 369 aa, Glycine max
MAAGASVLETVKELAKDNDSSKEKNQVQPGLSGPLKKRIQQLVDSNPVMLFMKGTPEEPKCGFSRKVVVVLNEERVKFGSFDVLSDSEVREGLKKFSNWPTFPQLYCKGELLGGCDIAIAMHESGELKEVFKDHGIDTTNEAKEKESGNGKGGISKSTDLSTTLSSRLESLVNSSAVMLFMKGKPDEPKCGFSRKVVEILQQENVPFESFDILTDEEVRQGLKVYSNWSSYPQLYIKGELIGGSDIVLEMQKSGELRKNLHEKGILPAETIQDRLKNLIASSPVMLFMKGTPDAPRCGFSSRVADALRQEGLNFGSFDILTDEEVRQGLKVYSNWPTYPQLYYKSELIGGHDIVMELRNNGELKSTLSE

SEQ ID NO: 23062 - protein, 321 aa, Glycine max
MLFMKGTPEEPKCGFSRKVVVVLNEERVKFGSFDVLSDSEVREGLKKFSNWPTFPQLYCKGELLGGCDIAIAMHESGELKEVFKDHGIDTTNEAKEKESGNGKGGISKSTDLSTTLSSRLESLVNSSAVMLFMKGKPDEPKCGFSRKVVEILQQENVPFESFDILTDEEVRQGLKVYSNWSSYPQLYIKGELIGGSDIVLEMQKSGELRKNLHEKGILPAETIQDRLKNLIASSPVMLFMKGTPDAPRCGFSSRVADALRQEGLNFGSFDILTDEEVRQGLKVYSNWPTYPQLYYKSELIGGHDIVMELRNNGELKSTLSE

SEQ ID NO: 23063 - DNA, 1636 bp, Glycine max
gatgccgatgctacctcagctttgcacaaaaggggcattgtcccaacaaatgatagcttcaaatatgcttggttcaaggaccatgagagtgtggtaaaagcaatatatactggttctgagtttgttgatactgttaacaccggtgatgatattggtgtagttctggagtctacaagcttctatgctgagcaaggtggtcagatttttgatactggatcacttgagggcccacatgctttatttgaagtgcgtaatgttcaagtttatggaggctttgttcttcacattggtaatgggactggtgtctcagttggcgacaaagtagtgtgcaaggttgattatggaagacgcgcccttatagcccctaaccatacctgcacacacatgttaaattttgcccttagggaagtacttggtgatcatgttgaccagaaaggatccattgttcttgctgaaaaattgagatttgacttttctcatggcaagcctattgaagctgacaatttaaggagaattgaatcaattgttaatgagcaaattaaagctgagttggatgtaagtgcaaaagaggcaactcttgctgaagccaagggtatcaatggtttgcgagctgtttttggggaagtctatcctgatcctgttagagttgtgtcaattggacaaaaagttgaggatctccttgctgaccccaagaatgaaaaatggttatctatttcatcagagttatgtggaggtacccatatttcgaacacacgagaggcaaaagcttttgcacttttatctgaggagggaattgcaaaaggaatacgcagaataacagctgttacaactgatcgtgcgtatgacgcaatgaaagtggcagatgaatttgagcagcaagtagatgatgcggctaagttagtaggaactttgctagaagagaaagtttcatcattgaaaagcaatattgaaactttatctattcctgctgccaagaaagctgacatcaagatcaagatagttcggcttcaggatcaagtaagaaaagcacaaaagcaggtcgccgaggaaaacaagcgtaaagctgtaatgattacagcagagaaggctgaacttgctgtttcaaatgggaaaacattttgtatatctcttgttgatgttggtctggatgtagctgcagttcgtgaggctgttacaaaagtcatggaccagaagggcttatctgtgatggtttttagcacggacgaatctacgaacaaggctgtagtgtgtgccggggtgccagagaaaggaggtaaaggtaatctggatgtggcagattggctgagtaatgctttggggcctctaaaagggagatgtggtaaaggaaaaggtggtcttgcaacgggtcagggtacagaggcatcacatgtaaacgaggctatagatctggcagaaaaatttgcgtcgatgaaattgagttaatggtgtatttgcagtatatccttcctggggtgtaagcatgatatggatctttcgtttggtggtataatcataatcatacagaagggaagggcacttgaagtaattattagatccggatgagttgaacaaatttctaatttagtgcctgaatatttttttgctctgatagattatgaagatattttgaaatttc

SEQ ID NO: 23064 - protein, 480 aa, Glycine max
DADATSALHKRGIVPTNDSFKYAWFKDHESVVKAIYTGSEFVDTVNTGDDIGVVLESTSFYAEQGGQIFDTGSLEGPHALFEVRNVQVYGGFVLHIGNGTGVSVGDKVVCKVDYGRRALIAPNHTCTHMLNFALREVLGDHVDQKGSIVLAEKLRFDFSHGKPIEADNLRRIESIVNEQIKAELDVSAKEATLAEAKGINGLRAVFGEVYPDPVRVVSIGQKVEDLLADPKNEKWLSISSELCGGTHISNTREAKAFALLSEEGIAKGIRRITAVTTDRAYDAMKVADEFEQQVDDAAKLVGTLLEEKVSSLKSNIETLSIPAAKKADIKIKIVRLQDQVRKAQKQVAEENKRKAVMITAEKAELAVSNGKTFCISLVDVGLDVAAVREAVTKVMDQKGLSVMVFSTDESTNKAVVCAGVPEKGGKGNLDVADWLSNALGPLKGRCGKGKGGLATGQGTEASHVNEAIDLAEKFASMKLS

SEQ ID NO: 23065 - protein, 352 aa, Glycine max
MLNFALREVLGDHVDQKGSIVLAEKLRFDFSHGKPIEADNLRRIESIVNEQIKAELDVSAKEATLAEAKGINGLRAVFGEVYPDPVRVVSIGQKVEDLLADPKNEKWLSISSELCGGTHISNTREAKAFALLSEEGIAKGIRRITAVTTDRAYDAMKVADEFEQQVDDAAKLVGTLLEEKVSSLKSNIETLSIPAAKKADIKIKIVRLQDQVRKAQKQVAEENKRKAVMITAEKAELAVSNGKTFCISLVDVGLDVAAVREAVTKVMDQKGLSVMVFSTDESTNKAVVCAGVPEKGGKGNLDVADWLSNALGPLKGRCGKGKGGLATGQGTEASHVNEAIDLAEKFASMKLS

SEQ ID NO: 23066 - DNA, 693 bp, Glycine max
ggcgtcatggttgtgcggcgcaagttgcttcagaaaaaggatttttctccattgttattaatcttcaagtacctgcatcaacacactatagtatggtattttattttgtgacaaaggagttagtttctggatccctcttgcatcgctttgttgacggtgatgatgagtttcgaaacagcaggtttaagctcataccatcagtcccaaagggctcatggattgtacgccagagtgttggtagtactccttgtttactgggaaaggcagttgattgcaactatattcgtggtcccaagtatttagaaattgatgttgatattggttcttctactgttgctaatggagttttgggtctggttattggtgtgattacaacattggtggttgatatggcttttcttgtacaggcaaatacacctgatgaattgccggagaggcttattggagctgttcgtatttctcatttagagctcaaatctgccatcatcccaaaactggaatcagatccatcatgactgacgagttgtttcagttcttctatacagaatcatttgtttgaaatatgcaggtgtaccattttttttcccactgggatgtaggttcattgttttataattgggttcttctatgaaatcttataaggaaattcttctttccttcagcaagatattgtagtaatgtagtttctttctc

SEQ ID NO: 23067 - protein, 170 aa, Glycine max
RHGCAAQVASEKGFFSIVINLQVPASTHYSMVFYFVTKELVSGSLLHRFVDGDDEFRNSRFKLIPSVPKGSWIVRQSVGSTPCLLGKAVDCNYIRGPKYLEIDVDIGSSTVANGVLGLVIGVITTLVVDMAFLVQANTPDELPERLIGAVRISHLELKSAIIPKLESDPS

SEQ ID NO: 23068 - protein, 140 aa, Glycine max
MVFYFVTKELVSGSLLHRFVDGDDEFRNSRFKLIPSVPKGSWIVRQSVGSTPCLLGKAVDCNYIRGPKYLEIDVDIGSSTVANGVLGLVIGVITTLVVDMAFLVQANTPDELPERLIGAVRISHLELKSAIIPKLESDPS

SEQ ID NO: 23069 - DNA, 1357 bp, Glycine max
aattgagtcttctctgccactacttctacaaaaaaacaaaaaaaatctttgttttgtttcttcatttgtttttcctccaccaccttctgaggtgaccttgaaagtgatttcattggaagcaattgataccagttgacatttgaagcagcttgtacttcattcagttatgacttgttttcctttattattcagtaagtcgtcttcttcttctgcgagacacgaaccagaaattgatgaaggcattcataatgttaaactctactcctacaaagagctaagaaatgccactgaagattttagtccagccaataaaattggagagggtggttttggttctgtctacaagggacggcttaaagatggaaaagttgctgcaataaaagttctttcagctgaatcaagacaaggggtgaaggagttcttgactgagattaatgtgatctctgagatacagcatgaaaatttggtcaagctatatggttgctgtgtggaaaaaaataacagaatattagtctacaattaccttgagaacaacagcctatcacaaactcttctaggtggaggtcacagtagtctctactttgattggcgaacacgatgtaaaatatgcattggggttgcacgtgggcttgcctatcttcatgaagaagtgaggcctcatattgttcatagggatataaaagcaagcaatatcctccttgacaaagatcttacacccaagatttcagattttggtcttgcaaagcttattccagcaaacatgactcatgtcagcacacgtgtagcaggaacaataaatttgctgatgcatcaatgcatggtttttttagaggttatttggcaccagagtatgcgataggagggaagctaacaaggaaagcagacatttacagctttggcgtcctccttggggaaataatcagtggaagatgtaacacaaactcacgactaccaatagaagaacagtttcttctagagaggacatgggacctttatgagcgaaaggaattggttggactggtggatatgtcactaaatggggaattcgatgctgagcaggcttgtaagtttctgaagattggccttctttgcactcaagaatccccaaagcaccggccatccatgtcttctgtggtcaagatgctcactggaaaaatggatgttgatgacagtaagataacaaaacctgccttaatttctgatttactggacctcaaagttagagggaacgaagaaagtagtattgatatgaagaattcatctatgtatacaaccttttcttcagacaaccatgatactaccacgtcatttgccacaactacaaccttcacagcaacatatgatgaaagcgtgtaaa

SEQ ID NO: 23070 - protein, 230 aa, Glycine max
MTCFPLLFSKSSSSSARHEPEIDEGIHNVKLYSYKELRNATEDFSPANKIGEGGFGSVYKGRLKDGKVAAIKVLSAESRQGVKEFLTEINVISEIQHENLVKLYGCCVEKNNRILVYNYLENNSLSQTLLGGGHSSLYFDWRTRCKICIGVARGLAYLHEEVRPHIVHRDIKASNILLDKDLTPKISDFGLAKLIPANMTHVSTRVAGTINLLMHQCMVFLEVIWHQSMR

SEQ ID NO: 23071 - protein, 180 aa, Glycine max
MHGFFRGYLAPEYAIGGKLTRKADIYSFGVLLGEIISGRCNTNSRLPIEEQFLLERTWDLYERKELVGLVDMSLNGEFDAEQACKFLKIGLLCTQESPKHRPSMSSVVKMLTGKMDVDDSKITKPALISDLLDLKVRGNEESSIDMKNSSMYTTFSSDNHDTTTSFATTTTFTATYDESV

SEQ ID NO: 23072 - DNA, 2051 bp, Glycine max
aatcaaactcgtccgtagactgctcaagaatcgggcaccccattctgactttgatccatatccagatagtgttgactggtttaaatgggaagatgccaaacatccattgtctaatgcacctgaaccaaaaagaaggtttattccttcaaagtgggaagctaaaaaggttgtacagtatgttagagcaatccgtcagggattaatcactttcgacaagccaaaagaggaagatggtccatatcacttgtggggagatgattctggttcaacagaaagagcaaatcatttggcttacattcctgccccaaagcagaaattacctggccatgatgagtcatataatcctcctctagagtacattccaacccaagaagagatcaattcttatcaattgatgtttgaggaagaccgccccaagtttattccaaaaaggtttgcatctatgaggagcattcctgcatatgagaatgctatgaaagactgctttgaacggtgtttggatttgtacttgtgccctcgagttcggaaaaaacgcctcaatattgatcctgaatctttaaagccaaagcttccaagtcgaaaagagcttaagccttatcccacaacttgctatatcgagtataaaggccatgaagatgctgttacatcaatttcactcgaagcttcaggacaatggatggcttcaggttcacgtgatggaactgtccgtatctgggaggttgaaactggcagatgtcttaggcggtgggaggttggtgaatctgttagctgtgttgcttggaatcctctgcctgatattcatcttttggccgtttctgtgggccaagatgtacttctacttaacacttgtttgggggatgaagaagagcagaaacggattaaggagcttctctgggttgactcgtctacagcatcagatgactctggcaacaaagcacctagtgtaagctggcttaaagatgataaacatatgggtttaaggttaaggcactttaagactgttactgctgtagaatggcaccggaaaggtgactacttttcgacagtgatgccagcaggtgaatcaagagcagttctgatacaccagttatccaaaaagcttacgcaaagacttccattcaaattacatggacttgctgttaggtcaaccttccatccatcccgttccatcttctttgtttgtaccaaaaagagtgttcgtgtgtatgatttactgaagaccaagatcataaaaaagcttgatagctgggcttcgtgaagcttcatccattgcagttcatcctggaggtgataatttaattgtgggtagcaaagaggggaagatgtgttggtttgacatggacctttcatctaaaccatataaaattcttaagtgtcacccaaaagatatcaacaatgtcatctttcatcgctcgtatcccttatttgcttcatgttcagatgactgcactgcatatgtttttcatggaatggtttattctgatctcaatcaaaatcctcttattgttcctttagaaattctacgaggtcataccaattcaaatgggagagggatactggactgtaaatttcacccgagacagccatggttatttacggctggtgctgataaactgattaaactttactgtcattaatataaatatggatatacatgcatgtgataggcggataacatctaagaaggtggcttgcaacttcatgaccaattttgttccccaattcttaaatagatagcactgcaaaccgaaatgaagggcaacggagtagtgagtttcttgctctggttttatggattgttgttttgttttccacacatcattcctgaaattcacatccactaaactttgcttgctgtggaaatagaactacaattttgatgtaatatgtttagctatgagaagctcattattttaaggcatccagcggatgcatctttttggacattgaatgtggcattctgcatggttgtatttattacagataacatcaagtaacgcactttaccgtttctttgagtaatgttaaatgttacgaaatatggtcgtttg

SEQ ID NO: 23073 - protein, 418 aa, Glycine max
IKLVRRLLKNRAPHSDFDPYPDSVDWFKWEDAKHPLSNAPEPKRRFIPSKWEAKKVVQYVRAIRQGLITFDKPKEEDGPYHLWGDDSGSTERANHLAYIPAPKQKLPGHDESYNPPLEYIPTQEEINSYQLMFEEDRPKFIPKRFASMRSIPAYENAMKDCFERCLDLYLCPRVRKKRLNIDPESLKPKLPSRKELKPYPTTCYIEYKGHEDAVTSISLEASGQWMASGSRDGTVRIWEVETGRCLRRWEVGESVSCVAWNPLPDIHLLAVSVGQDVLLLNTCLGDEEEQKRIKELLWVDSSTASDDSGNKAPSVSWLKDDKHMGLRLRHFKTVTAVEWHRKGDYFSTVMPAGESRAVLIHQLSKKLTQRLPFKLHGLAVRSTFHPSRSIFFVCTKKSVRVYDLLKTKIIKKLDSWAS

SEQ ID NO: 23074 - protein, 287 aa, Glycine max
MFEEDRPKFIPKRFASMRSIPAYENAMKDCFERCLDLYLCPRVRKKRLNIDPESLKPKLPSRKELKPYPTTCYIEYKGHEDAVTSISLEASGQWMASGSRDGTVRIWEVETGRCLRRWEVGESVSCVAWNPLPDIHLLAVSVGQDVLLLNTCLGDEEEQKRIKELLWVDSSTASDDSGNKAPSVSWLKDDKHMGLRLRHFKTVTAVEWHRKGDYFSTVMPAGESRAVLIHQLSKKLTQRLPFKLHGLAVRSTFHPSRSIFFVCTKKSVRVYDLLKTKIIKKLDSWAS

SEQ ID NO: 23075 - protein, 271 aa, Glycine max
MRSIPAYENAMKDCFERCLDLYLCPRVRKKRLNIDPESLKPKLPSRKELKPYPTTCYIEYKGHEDAVTSISLEASGQWMASGSRDGTVRIWEVETGRCLRRWEVGESVSCVAWNPLPDIHLLAVSVGQDVLLLNTCLGDEEEQKRIKELLWVDSSTASDDSGNKAPSVSWLKDDKHMGLRLRHFKTVTAVEWHRKGDYFSTVMPAGESRAVLIHQLSKKLTQRLPFKLHGLAVRSTFHPSRSIFFVCTKKSVRVYDLLKTKIIKKLDSWAS

SEQ ID NO: 23076 - DNA, 1951 bp, Glycine max
gccaacaatgcgcgccagaaaactcttcaattccttttaccgaaccatttcctcttcaactttcccacctcctcccgttgtttcttcccgaagagtagttgtcactgggttaggcatggtgacgccacttggttgtggagtggacacaacctggaagcgcctcgtcgatggggaatgtggggtgagggctttgtctctggaagacctcaagatgaattcttttgacaaggaaactcagttgagtacgtttgatcagttgacatccaaggttgctgctcttgttcctacaggaacccatctcggcgaattcgacgaccaaatctggcttaattctaaggaccatcgatcaatagcaaggtttatagcatatgcactatgtgctgttgatgaagctctcaaggattctaattggtttcccattgaacaagaagataaggaaagaacgggggtgtctattggtgggggaactggaagcgttagtgacatcttagattctgcacaactgatctgtgagaagcgccttcgtcgccttagtccattttttatcccgcggatattgatcaacatggcatcaggtcatgtgagcataaaatatgggttccagggaccaaatcatgctgcagtcactgcctgtgccactggttcacattctattggtgatgcaatgagaatgattcaatttggggatgcagatgttatggtagctggaggcacagagtccagcattgatgcattatcaattgcaggattctgcaggtctcgagctttgacaacaaaatataattcaagcccacaggaagcatcacggccatttgatagtggtcgagatgggtttgtttatacttttactcaggataggtgaaggttctggagtcttggtcttggaggaatttgagcatgcaaaaaaccgaggagccaaaatctatgcagaggtccgtggctatgggatgtcaggtgatgcatatcatattactcaacctcctagtgatgggagaggagccattttggccatgactcgtgctttaagacagtcaggttttcatccttctgaagtggattacataaatgcacatgctacatctacacctttgggcgatgcaatagaagctaatgctatcaaaaccatgttctctgaccgtgcaagctcgtctgctttagccctctcctccacaaagggtgctattggtcatctcctaggcgctgctggagctgttgaagcaatttttgcagttttggcaatacggcatggtattgctccattaactcttaatttaactaagccagatcctgtgttcggtgatggtttcatgccattgtctgcttcagaagaaatgccaattagagttgccatgtcaaactcttttggtttcggaggcacaaatgcgtccctactttttgctcaaacaggttcggactgaattgactgttgcatctcattctattggcattatttaacaagagctgattgtgccatggtgaggagagtttatttcatgccattgtctgcttcagaagaaatgccaattagagttgccatgtcaaactcttttggtttcggaggcacaaatgcgtccctacttttttgctcaaacaggttcggactgaattgactgttgcatctcattctattggcattatttaacaagagctgattgtgccatggtgaggagagtttaattgcctgaagttcttggcagcgtacatgtgcttgaagtttatgctttgccatgtacattttgatgctgctgttacttttgctcattagtttttgaatgctattagctcttaactatttggaacacaacgttgttaaaaactttgaatgccattcataaaacgttgaatccaacttcaaacttatgtttaaaaacttttatcttgaaaacaaaatttatagtaaaacttggaatgcaatttttaatccaatataagtaattattagattattttc

SEQ ID NO: 23077 - protein, 286 aa, Glycine max
PTMRARKLFNSFYRTISSSTFPPPPVVSSRRVVVTGLGMVTPLGCGVDTTWKRLVDGECGVRALSLEDLKMNSFDKETQLSTFDQLTSKVAALVPTGTHLGEFDDQIWLNSKDHRSIARFIAYALCAVDEALKDSNWFPIEQEDKERTGVSIGGGTGSVSDILDSAQLICEKRLRRLSPFFIPRILINMASGHVSIKYGFQGPNHAAVTACATGSHSIGDAMRMIQFGDADVMVAGGTESSIDALSIAGFCRSRALTTKYNSSPQEASRPFDSGRDGFVYTFTQDR

SEQ ID NO: 23078 - protein, 284 aa, Glycine max
MRARKLFNSFYRTISSSTFPPPPVVSSRRVVVTGLGMVTPLGCGVDTTWKRLVDGECGVRALSLEDLKMNSFDKETQLSTFDQLTSKVAALVPTGTHLGEFDDQIWLNSKDHRSIARFIAYALCAVDEALKDSNWFPIEQEDKERTGVSIGGGTGSVSDILDSAQLICEKRLRRLSPFFIPRILINMASGHVSIKYGFQGPNHAAVTACATGSHSIGDAMRMIQFGDADVMVAGGTESSIDALSIAGFCRSRALTTKYNSSPQEASRPFDSGRDGFVYTFTQDR

SEQ ID NO: 23079 - protein, 248 aa, Glycine max
MVTPLGCGVDTTWKRLVDGECGVRALSLEDLKMNSFDKETQLSTFDQLTSKVAALVPTGTHLGEFDDQIWLNSKDHRSIARFIAYALCAVDEALKDSNWFPIEQEDKERTGVSIGGGTGSVSDILDSAQLICEKRLRRLSPFFIPRILINMASGHVSIKYGFQGPNHAAVTACATGSHSIGDAMRMIQFGDADVMVAGGTESSIDALSIAGFCRSRALTTKYNSSPQEASRPFDSGRDGFVYTFTQDR

SEQ ID NO: 23080 - DNA, 1489 bp, Glycine max
gttgcagaacaaacaccaacttggtaaccaggcttgcctcctcccggaatcaagaaaggagaaaggtgctattgtactggaaatgaaggacagaggacattgctcagagaagaaaattgattggaacagaaggcttcagaagcagcttatattagatgatcttcgcgttcgttcaatgcaaaacaggattcgaagagtagcctccacccataatgtagaagcttcacaaacccaaattccattatcttctggtataaacttgcaaaccttaaactacatagtgacaatgggattgggtagcaagaatatgactgtgataattgacactggaagcgacttgacatgggtccaatgtgagccttgcatgtcatgttataatcaacaaggaccaatattcaaaccttctacctcctcttcctatcaatcagtttcatgcaattcatcaacctgccaatctcttcaatttgccacaggaaacacaggagcctgtggaagtagtaatccatcaacttgtaactatgtggttaactatggtgatggatcttacactaatggtgagctaggtgttgaagcacttagttttggaggtgtttcagtgagtgattttgtatttggttgtggtaggaacaacaaaggtctatttggaggagtctctggccttatggggttgggaagaagttacctctcattggtatctcaaactaatgccacatttggaggagttttctcatactgcttaccaacaacagaagctggttcttctgggtcattagttatgggtaatgagtcttcagttttcaagaacgctaatcccatcacttacaccagaatgctttcaaatccacagctttccaacttctatattctcaatctcactggcatagatgttggtggtgtggctttgaaggccccattaagctttggcaatggtgggattttgattgattctggcactgtgatcacaagactgccctcatctgtgtacaaggctttgaaggcagagttcttgaaaaagttcacgggtttcccttcagcaccagggttttcaattttggacacttgtttcaatctcactgggtatgatgaagtgagcatacctaccataagtttgcgttttgagggcaatgctcagctaaacgtggatgcaactggcacattctacgttgtgaaagaggatgcttcgcaagtttgcttggcacttgcaagtctttctgatgcatatgacactgctattattgggaattatcagcaaaggaaccaaagggtaatatatgacaccaaacagtccaaagtgggatttgctgaggagccatgcagtttcgcttgaacagggaaatttcatagtataatagatgccaatgccattaaggaggatgcaaaaccttccagttcttctttttcatttttctatttggaccacatatatatacataactacatttgccatataaagaattactagcaacaagagtatcatcatttgacattc

SEQ ID NO: 23081 - protein, 441 aa, Glycine max
LQNKHQLGNQACLLPESRKEKGAIVLEMKDRGHCSEKKIDWNRRLQKQLILDDLRVRSMQNRIRRVASTHNVEASQTQIPLSSGINLQTLNYIVTMGLGSKNMTVIIDTGSDLTWVQCEPCMSCYNQQGPIFKPSTSSSYQSVSCNSSTCQSLQFATGNTGACGSSNPSTCNYVVNYGDGSYTNGELGVEALSFGGVSVSDFVFGCGRNNKGLFGGVSGLMGLGRSYLSLVSQTNATFGGVFSYCLPTTEAGSSGSLVMGNESSVFKNANPITYTRMLSNPQLSNFYILNLTGIDVGGVALKAPLSFGNGGILIDSGTVITRLPSSVYKALKAEFLKKFTGFPSAPGFSILDTCFNLTGYDEVSIPTISLRFEGNAQLNVDATGTFYVVKEDASQVCLALASLSDAYDTAIIGNYQQRNQRVIYDTKQSKVGFAEEPCSFA

SEQ ID NO: 23082 - protein, 414 aa, Glycine max
MKDRGHCSEKKIDWNRRLQKQLILDDLRVRSMQNRIRRVASTHNVEASQTQIPLSSGINLQTLNYIVTMGLGSKNMTVIIDTGSDLTWVQCEPCMSCYNQQGPIFKPSTSSSYQSVSCNSSTCQSLQFATGNTGACGSSNPSTCNYVVNYGDGSYTNGELGVEALSFGGVSVSDFVFGCGRNNKGLFGGVSGLMGLGRSYLSLVSQTNATFGGVFSYCLPTTEAGSSGSLVMGNESSVFKNANPITYTRMLSNPQLSNFYILNLTGIDVGGVALKAPLSFGNGGILIDSGTVITRLPSSVYKALKAEFLKKFTGFPSAPGFSILDTCFNLTGYDEVSIPTISLRFEGNAQLNVDATGTFYVVKEDASQVCLALASLSDAYDTAIIGNYQQRNQRVIYDTKQSKVGFAEEPCSFA

SEQ ID NO: 23083 - protein, 383 aa, Glycine max
MQNRIRRVASTHNVEASQTQIPLSSGINLQTLNYIVTMGLGSKNMTVIIDTGSDLTWVQCEPCMSCYNQQGPIFKPSTSSSYQSVSCNSSTCQSLQFATGNTGACGSSNPSTCNYVVNYGDGSYTNGELGVEALSFGGVSVSDFVFGCGRNNKGLFGGVSGLMGLGRSYLSLVSQTNATFGGVFSYCLPTTEAGSSGSLVMGNESSVFKNANPITYTRMLSNPQLSNFYILNLTGIDVGGVALKAPLSFGNGGILIDSGTVITRLPSSVYKALKAEFLKKFTGFPSAPGFSILDTCFNLTGYDEVSIPTISLRFEGNAQLNVDATGTFYVVKEDASQVCLALASLSDAYDTAIIGNYQQRNQRVIYDTKQSKVGFAEEPCSFA

SEQ ID NO: 23084 - DNA, 1822 bp, Glycine max
gttttgaaggagcgcaacttcactaccgtcgtcgagaacaaccgcttcatcatggtcgagttctacgccccctggtgcggccactgccaggccctcgcgccggagtacgccgccgccgccaccgagctcaagcccgacggcgtcgttctcgccaaagtcgacgccaccgtcgaaaacgaactggcgaacgagtacgacgttcagggtttccccaccgtcttcttcttcgtcgatggggtccacaagccctacactggccagagaaccaaagacgctatagtgacatggattaagaagaagatagggcctggtgtgtccaacataactacggtggatgatgctgaacgcatattgacagctgaaagcaaagttgttttgggcctccttaactctttagttggtacggagagtgacgaactagctgcagcatcaaagcttgaggatgatgtcaatttttatcaaactgtggtagctgatgtggcgaagcttttccatattgatccgagtgttaaacgccctgctttgatcttgctcaagaaagaggaagagaaattgaaccattttgatggccaatttgtaaaagctgaaatagccgattttgtaacctccaacaagcttcctttggttacaatttttacaagagaaagtgccccggtaatctttgaaagtcaaatcaagaaacagttgttgctgtttgtgacttcaaatgatacagagaagtttgttccagtatttaaagaagcagcaaaaaaattcaaggggaagctgatctttgttcatgtggaattggataatgaagatgtaggaaagcctgttgcagattattttggtatcactgggaatggtcccaaagtacttgcatatacaggaaacgatgatggaagaaaatttttgcttgatgaggagctgactgttgacacaattacggcatttgggaatgatttccttgaagaaaagctaaaacctttcctcaagtctgatccagttcctaaaagtaatgacggtgatgtgaaaatagttgttgggaataactttgatgaaattgttttggatgagtcaaaggatgttttgcttgagatttatgcaccctggtgcggtcactgccaagccctggaaccaacatacaacaagcttgctaaacatcttcgcaacattgagtctattgttatagccaagatggacggaacaacaaatgagcatcccagggccaagtctgatggattccccacccttctcttcttcccagcaggcaacaagagttctgaccctattcctgttgatgtggatcatacagtgaaagccttttataagttcctcaggaaacatgcatcaatcccattccagctccagaaaccaacctcaactgctaaaaccgggagtgagagttcctatgtcaaggagagccaaagcagcagcacggatgtgaaggatgaattatgagacttaaaggacacttctattgataaagagatatgattcagaaattcagacagctgataacggagtgaaaatgtgcatagcaaagaaagtgactcaatgattgggagagaaagccgtatatttttcctcaccctggccaaaagacaactagccaagtaaagggtagtggaaaaataaggtaacctgtgtattagtttcttcaacttttacatgtttgagtatcagaattttggggagactaattttaaaaatggctcgaaattttattttcggtgtcagaatactggttatttttgcccttaggttaagctttagttgataaaaattgttgaataataaataaaaaaatgaactttcattaaaaaaaaaaaaaaaaaacaat

SEQ ID NO: 23085 - protein, 479 aa, Glycine max
VLKERNFTTVVENNRFIMVEFYAPWCGHCQALAPEYAAAATELKPDGVVLAKVDATVENELANEYDVQGFPTVFFFVDGVHKPYTGQRTKDAIVTWIKKKIGPGVSNITTVDDAERILTAESKVVLGLLNSLVGTESDELAAASKLEDDVNFYQTVVADVAKLFHIDPSVKRPALILLKKEEEKLNHFDGQFVKAEIADFVTSNKLPLVTIFTRESAPVIFESQIKKQLLLFVTSNDTEKFVPVFKEAAKKFKGKLIFVHVELDNEDVGKPVADYFGITGNGPKVLAYTGNDDGRKFLLDEELTVDTITAFGNDFLEEKLKPFLKSDPVPKSNDGDVKIVVGNNFDEIVLDESKDVLLEIYAPWCGHCQALEPTYNKLAKHLRNIESIVIAKMDGTTNEHPRAKSDGFPTLLFFPAGNKSSDPIPVDVDHTVKAFYKFLRKHASIPFQLQKPTSTAKTGSESSYVKESQSSSTDVKDEL

SEQ ID NO: 23086 - protein, 462 aa, Glycine max
MVEFYAPWCGHCQALAPEYAAAATELKPDGVVLAKVDATVENELANEYDVQGFPTVFFFVDGVHKPYTGQRTKDAIVTWIKKKIGPGVSNITTVDDAERILTAESKVVLGLLNSLVGTESDELAAASKLEDDVNFYQTVVADVAKLFHIDPSVKRPALILLKKEEEKLNHFDGQFVKAEIADFVTSNKLPLVTIFTRESAPVIFESQIKKQLLLFVTSNDTEKFVPVFKEAAKKFKGKLIFVHVELDNEDVGKPVADYFGITGNGPKVLAYTGNDDGRKFLLDEELTVDTITAFGNDFLEEKLKPFLKSDPVPKSNDGDVKIVVGNNFDEIVLDESKDVLLEIYAPWCGHCQALEPTYNKLAKHLRNIESIVIAKMDGTTNEHPRAKSDGFPTLLFFPAGNKSSDPIPVDVDHTVKAFYKFLRKHASIPFQLQKPTSTAKTGSESSYVKESQSSSTDVKDEL

SEQ ID NO: 23087 - DNA, 1328 bp, Glycine max
acttcttccaatttcaaattcttcactcacccagtcgcgcttttctctgaatttcacgatgcgcacgtccagaaaagcagaaccctccaacaacgacgtcgtttcttcggaacacagaaactggagcaacatcttcaaatcgctggttcagatggtgtgcagccagcagaaccagcttcactccttcgcgagccgccacaagtttctcgaagaccgccttcgaatgcagcacgaagggtgggtctccgatgttcgatgtcacaaggatcaaatttctcagatgaatgggatgttgacgtttgaggagaagaaacagtcgctcgaggcggcaaaggcggattttgcgcttagtttgaagcacagagaggctgctatgttgaaatggattttagagcatgcagaggatgagttggcggattttaaagcctggtttgaaatcctttcttgtaaatcctctaatggagaagatcaaggaacagcatttaaggatactgacttgaagaagaaaggaagcacggatagagggaacatgtccactaggaatactgcagaaaaagagaagtattccagtgaaaacaaagatgaatttagtaggttaaaaggtgaatatgataagcttgctttagaaaaatattcggaggtgacgacactcttggcagaaaagaaatttatgtggaatcaatataatgtaatggagaatgattatgctgataaattaaggactaaagaagctgaagtagaaaaagcaaatgaaaagataaagatacttgtttctagcatggagcagctacagtctgaaaattatgaaaaggatagtaaaatatcagagttacaaagtaaaatggctgagatggaagctgagacaaaaagattgaacaatgaaatatctgaactctcagtggagttggaatctttaagaaagttcaggaacagccaagttacaccatctgttttaaatcgctgcacagaaggaactaaagcacctgagtcaggagttgttaagagcaacaagagtagaagaaatatgactctgaaaaaagaaatatgtactcctgatgctccagttcctgccaaatcctctgaaaaggggacaaaaacaaaaagcatgaagaggaaagaggctccagttattcccacttctgagactccgaaactgttctcttccggcttcaaggttccaaaactgaagtcctctgtaagggtcacatgacagatgacaccttccgataacttttagtgtgttacttaggatatgttagtcttgtacacgcgacttttgtattatatgctccttgtgtaaactatgtattatgaatgagctttctgtc

SEQ ID NO: 23088 - protein, 402 aa, Glycine max
LLPISNSSLTQSRFSLNFTMRTSRKAEPSNNDVVSSEHRNWSNIFKSLVQMVCSQQNQLHSFASRHKFLEDRLRMQHEGWVSDVRCHKDQISQMNGMLTFEEKKQSLEAAKADFALSLKHREAAMLKWILEHAEDELADFKAWFEILSCKSSNGEDQGTAFKDTDLKKKGSTDRGNMSTRNTAEKEKYSSENKDEFSRLKGEYDKLALEKYSEVTTLLAEKKFMWNQYNVMENDYADKLRTKEAEVEKANEKIKILVSSMEQLQSENYEKDSKISELQSKMAEMEAETKRLNNEISELSVELESLRKFRNSQVTPSVLNRCTEGTKAPESGVVKSNKSRRNMTLKKEICTPDAPVPAKSSEKGTKTKSMKRKEAPVIPTSETPKLFSSGFKVPKLKSSVRVT

SEQ ID NO: 23089 - protein, 383 aa, Glycine max
MRTSRKAEPSNNDVVSSEHRNWSNIFKSLVQMVCSQQNQLHSFASRHKFLEDRLRMQHEGWVSDVRCHKDQISQMNGMLTFEEKKQSLEAAKADFALSLKHREAAMLKWILEHAEDELADFKAWFEILSCKSSNGEDQGTAFKDTDLKKKGSTDRGNMSTRNTAEKEKYSSENKDEFSRLKGEYDKLALEKYSEVTTLLAEKKFMWNQYNVMENDYADKLRTKEAEVEKANEKIKILVSSMEQLQSENYEKDSKISELQSKMAEMEAETKRLNNEISELSVELESLRKFRNSQVTPSVLNRCTEGTKAPESGVVKSNKSRRNMTLKKEICTPDAPVPAKSSEKGTKTKSMKRKEAPVIPTSETPKLFSSGFKVPKLKSSVRVT

SEQ ID NO: 23090 - protein, 352 aa, Glycine max
MVCSQQNQLHSFASRHKFLEDRLRMQHEGWVSDVRCHKDQISQMNGMLTFEEKKQSLEAAKADFALSLKHREAAMLKWILEHAEDELADFKAWFEILSCKSSNGEDQGTAFKDTDLKKKGSTDRGNMSTRNTAEKEKYSSENKDEFSRLKGEYDKLALEKYSEVTTLLAEKKFMWNQYNVMENDYADKLRTKEAEVEKANEKIKILVSSMEQLQSENYEKDSKISELQSKMAEMEAETKRLNNEISELSVELESLRKFRNSQVTPSVLNRCTEGTKAPESGVVKSNKSRRNMTLKKEICTPDAPVPAKSSEKGTKTKSMKRKEAPVIPTSETPKLFSSGFKVPKLKSSVRVT

SEQ ID NO: 23091 - DNA, 1594 bp, Glycine max
aattgcaatgttattcttagggctgtaatggagaagtgtggggacacagatgattgtatctcaacatccgaagctgcagaattggctgcaaagcttgatgagaaggaaataagtagtttaccaatgcctggacaagttgatttcatcaatggtggtcctccatgtcagggtttctctgggatgaataggtttaaccagagcagttggagtaaagtccagtgtgagatgatattggcattcttatcctttgccgattatttccggccaaggtatttcttgttggagaatgtgaggaactttgtgtctttcaataaagggcagacattccgtttaactttggcttcacttcttgagatgggctatcaggtgaggtttggtatccttgaggctggagcatatggggtttcccagtcaagaaaaagggcattcatatgggcagcctctcctgaggatgtgcttcctgaatggcctgaaccaatgcatgtcttttcggcccctgagttgaagattacattatcagaaaatgtccagtatgctgctgtccgcagtactgcaaatggtgctccattacgttcaataactgttcaagatactattggtgatctcccagctgttggcaatggagcctcaaaaggaaacatggagtatcaaaatgatccagtctcatggtttcaaaagaagattcgaggtgatatggttgtcttgactgatcatatatcaaaggagatgaatgaattgaacttgattcgatgccagaaaattcccaagagaccaggcgctgattggcgtgaccttccagaagaaaaggtgaagttaaatatttgagttttagcataacattttttgtgatctatctaatatgtgaaatctaatgaaatgcagataaaattgtctactggacaagttgttgatttgataccatggtgcttgccaaacacggctaagcggcacaatcagtggaagggactgtttggcaggttggattggcaagggaatttcccaacttccattactgaccctcagccaatggggaaggttggaatgtgcttccaccctgaccaagataggattcttactgttcgtgaatgtgctcggtctcaaggcttcccagatagctatcaatttgctggcaatatcatacacaagcaccggcagattggtaatgctgtgcctcctcctctggcatctgcattggggagaaagctcaaggaagcagtggacagtaagagctccacttagaagatggggcttctacattttttgaaatatcatgcttattgtattcatatcagtcaccaagatattgcaaatcattattcagggttccagaaactagaaacccttgtatatagtgatatccattggtcatttgttttgaggctaattccttgtttaactttcctcaaccaaggaattgtatggatgatgttatgatgttcattttctatcaactagtattttcttgattagataatattttggctgtttatgacagaaatggctgggaatttagaattacctcccaatgtatatagttgacaattgagaccaattttgtcattttttttaacttgttatgaatatttgttgttgc

SEQ ID NO: 23092 - protein, 274 aa, Glycine max
NCNVILRAVMEKCGDTDDCISTSEAAELAAKLDEKEISSLPMPGQVDFINGGPPCQGFSGMNRFNQSSWSKVQCEMILAFLSFADYFRPRYFLLENVRNFVSFNKGQTFRLTLASLLEMGYQVRFGILEAGAYGVSQSRKRAFIWAASPEDVLPEWPEPMHVFSAPELKITLSENVQYAAVRSTANGAPLRSITVQDTIGDLPAVGNGASKGNMEYQNDPVSWFQKKIRGDMVVLTDHISKEMNELNLIRCQKIPKRPGADWRDLPEEKVKLNI

SEQ ID NO: 23093 - protein, 265 aa, Glycine max
MEKCGDTDDCISTSEAAELAAKLDEKEISSLPMPGQVDFINGGPPCQGFSGMNRFNQSSWSKVQCEMILAFLSFADYFRPRYFLLENVRNFVSFNKGQTFRLTLASLLEMGYQVRFGILEAGAYGVSQSRKRAFIWAASPEDVLPEWPEPMHVFSAPELKITLSENVQYAAVRSTANGAPLRSITVQDTIGDLPAVGNGASKGNMEYQNDPVSWFQKKIRGDMVVLTDHISKEMNELNLIRCQKIPKRPGADWRDLPEEKVKLNI

SEQ ID NO: 23094 - protein, 233 aa, Glycine max
MPGQVDFINGGPPCQGFSGMNRFNQSSWSKVQCEMILAFLSFADYFRPRYFLLENVRNFVSFNKGQTFRLTLASLLEMGYQVRFGILEAGAYGVSQSRKRAFIWAASPEDVLPEWPEPMHVFSAPELKITLSENVQYAAVRSTANGAPLRSITVQDTIGDLPAVGNGASKGNMEYQNDPVSWFQKKIRGDMVVLTDHISKEMNELNLIRCQKIPKRPGADWRDLPEEKVKLNI

SEQ ID NO: 23095 - DNA, 1481 bp, Glycine max
gaaaataaaaaaagagaaaagctacaagagaagaaaaaaaaaaagagagaaaagaaaaaatttgttttataactttttaacttattgttcacttcttcttcttcttcttcttcaatatcttggttctttgatattattctattgagcaaaaaatgggagttccagagagagaccctcttgcacaattgagtttgcctcctgggtttaggttttaccccacagatgaggagcttttggttcagtacctttgccgcaaggttgctggccatcatttctctcttccaatcattgctgaagttgatttgtacaagtttgatccatgggttcttccaggtaaggcagtgtttggagagaaggagtggtacttttttagcccaagagacaggaagtacccgaatggttcacgaccaaacagagtcgcgggttctgggtattggaaagcaactggaacagacaagatcatcaccactgaaggtagaaaagttggcataaaaaaagcacttgttttctacattggcaaagcacccaaaggctccaaaaccaattggatcatgcacgagtatcgccttctcgattcttcccgcaaacacaacctgaaccgcaaagcttgatgattgggttctatgtcgtatctataagaagaactcaagttcacaaaaggttgaggctaattttttggctatggaatgcagcaatgggtcatcaccttcttcatcgtcccacgtggatgacatgctgggatcgttgccggagataaatgaccggtgcttcaccctgccacgagtgaactcactcagaacaatgcaccagcaggatgagaaattcgggtctccgaacatgggatccgggtttttctcggattgggttaactcgaccgatctcgattcgatttccgaattcgagtcgggttgccaaacccaaagaatggtgaattatgattgcaatgacttttttgttccttctctgccgcccttgggccatgtggactacatggtggatgcacctttggaggaggaggttcaaagtggtgtgagaacccgacgggtcgacgggccggggcattttcaaccgaatccagatacccgattgttaccgggctcaggtgacccattcgggtttgggtttattatgggtcagcaagttgggttcggggttagggagtgaagtgaaggatcagaaagtgtaattgtgtaaataattggggattttagtttaatttgaattctatgaccattgttatggtttgtgttattgattcccgcttggaaaggaaaaattgcaattttggtcatacttttcggctagtacaagatgaaggacggttgacacattatgaaactgagaaaggacgcaatggtgattgcaccacaaccacaacaatgcatgctgaaaagtaattgctttgtaagacattattgcctaaacatgaatcacgttgtacttcaaagcattaatacatagcaactattttccaaagtttg

SEQ ID NO: 23096 - protein, 160 aa, Glycine max
MECSNGSSPSSSSHVDDMLGSLPEINDRCFTLPRVNSLRTMHQQDEKFGSPNMGSGFFSDWVNSTDLDSISEFESGCQTQRMVNYDCNDFFVPSLPPLGHVDYMVDAPLEEEVQSGVRTRRVDGPGHFQPNPDTRLLPGSGDPFGFGFIMGQQVGFGVRE

SEQ ID NO: 23097 - protein, 152 aa, Glycine max
MGVPERDPLAQLSLPPGFRFYPTDEELLVQYLCRKVAGHHFSLPIIAEVDLYKFDPWVLPGKAVFGEKEWYFFSPRDRKYPNGSRPNRVAGSGYWKATGTDKIITTEGRKVGIKKALVFYIGKAPKGSKTNWIMHEYRLLDSSRKHNLNRKA

SEQ ID NO: 23098 - protein, 143 aa, Glycine max
MLGSLPEINDRCFTLPRVNSLRTMHQQDEKFGSPNMGSGFFSDWVNSTDLDSISEFESGCQTQRMVNYDCNDFFVPSLPPLGHVDYMVDAPLEEEVQSGVRTRRVDGPGHFQPNPDTRLLPGSGDPFGFGFIMGQQVGFGVRE

SEQ ID NO: 23099 - DNA, 1742 bp, Glycine max
attatctacatgccaatgattccagaggttatattctctatgcaagcaactgcccgtgtcggagctatccactcagttgtttttggtgggtttggagcacctgaacttgcaggcagaattcaggatttaaagcccaaagttgtcctccttgccagttgtggtatcgaaccaaacaaagttgtcgattacaaaaaaatcttggatgaagctcttaagcttgcagctattcccaacataaaaaaaatccttgtgcaaagagaaatgtataaagtcccaatgatccaaggagaagattttgattactatgaagaactcgctcaagccaagcctatggatccagttccagtcgatggctctgattatctttatattttatacacctcaggaactactggtcagcccaaaggtattgttagagaaaacggaggcaacgctgtggctctctgctacacaatgaaatatctttttggcattactgaaaatgatgtcttcttctgcgctgctgacgttggctgggttactggccattcttacattgtttatgctcctttattgattggagctacaactattctcttcgaaggtaaacccgtcggaaacccagatgctggtgtcgtgtggagaacctgtgaaaagtataacgttagaggtctctactcctctcccaccgctgtcagagcaatcagaaaggatgatcctgatgctttgcacatgaaaaaggccaacttgagcaatcttggcatttttgctcttgcaggtgaaagacttgatatccctgcctacaaatggcttttagataacctcccaaaagattgtctccttaatgataattattggcaaactgaaactggctggagtattggaactaactttaagaaccttcatactttcccttgcaagccaggcagttgttcgagacctgcccccggaatgagagttgaaatcctcgatgaacaaaatcaccctcttcccaaggaaaagctcggaaaggtttgtatcaagttgcccatgccaccctctttcatgccaactttgtataagaatgatcaagccttcttgaataaatatatcagtgataacccaggctattactttactggcgatgcaggtttctttgatgctgataactatcttcacatcactgccagagtcgatgatgttatcaatactgcaggacatagactcagtacctcccaaatggaagaagtactgacaagtcatgatgatattgttgaggcagcagttataggagctttagatgaactcaagggagaaatcccagtcggctttgttgtcttaaagtctggcagacaaagagaccccatggagctcgaagccgaatgtatcaagaagattagatacgaaatcggccctgttgcaagcttcagatattgccttgtcgtcgacaaacttcccaagacaagaagtggtaaaatcatcagaaacgttctcagagagctctcgaatggaaacgaacccaaaatccctcctactattgaagatgctagtgtggttgatgttgttagagatctattaaagaagcgtggaatggccaaacaagtaaacattgattacggtgagactgttgaaggtgaagttaatattgattattaaataaattttgctgaaattattatttttataacaagttcatttgttaatcctattcaaaaagccttctattttacacaatagtttatgggttggtaattaaatttagaataataattataaaatcattt

SEQ ID NO: 23100 - protein, 537 aa, Glycine max
IIYMPMIPEVIFSMQATARVGAIHSVVFGGFGAPELAGRIQDLKPKVVLLASCGIEPNKVVDYKKILDEALKLAAIPNIKKILVQREMYKVPMIQGEDFDYYEELAQAKPMDPVPVDGSDYLYILYTSGTTGQPKGIVRENGGNAVALCYTMKYLFGITENDVFFCAADVGWVTGHSYIVYAPLLIGATTILFEGKPVGNPDAGVVWRTCEKYNVRGLYSSPTAVRAIRKDDPDALHMKKANLSNLGIFALAGERLDIPAYKWLLDNLPKDCLLNDNYWQTETGWSIGTNFKNLHTFPCKPGSCSRPAPGMRVEILDEQNHPLPKEKLGKVCIKLPMPPSFMPTLYKNDQAFLNKYISDNPGYYFTGDAGFFDADNYLHITARVDDVINTAGHRLSTSQMEEVLTSHDDIVEAAVIGALDELKGEIPVGFVVLKSGRQRDPMELEAECIKKIRYEIGPVASFRYCLVVDKLPKTRSGKIIRNVLRELSNGNEPKIPPTIEDASVVDVVRDLLKKRGMAKQVNIDYGETVEGEVNIDY

SEQ ID NO: 23101 - protein, 534 aa, Glycine max
MPMIPEVIFSMQATARVGAIHSVVFGGFGAPELAGRIQDLKPKVVLLASCGIEPNKVVDYKKILDEALKLAAIPNIKKILVQREMYKVPMIQGEDFDYYEELAQAKPMDPVPVDGSDYLYILYTSGTTGQPKGIVRENGGNAVALCYTMKYLFGITENDVFFCAADVGWVTGHSYIVYAPLLIGATTILFEGKPVGNPDAGVVWRTCEKYNVRGLYSSPTAVRAIRKDDPDALHMKKANLSNLGIFALAGERLDIPAYKWLLDNLPKDCLLNDNYWQTETGWSIGTNFKNLHTFPCKPGSCSRPAPGMRVEILDEQNHPLPKEKLGKVCIKLPMPPSFMPTLYKNDQAFLNKYISDNPGYYFTGDAGFFDADNYLHITARVDDVINTAGHRLSTSQMEEVLTSHDDIVEAAVIGALDELKGEIPVGFVVLKSGRQRDPMELEAECIKKIRYEIGPVASFRYCLVVDKLPKTRSGKIIRNVLRELSNGNEPKIPPTIEDASVVDVVRDLLKKRGMAKQVNIDYGETVEGEVNIDY

SEQ ID NO: 23102 - protein, 532 aa, Glycine max
MIPEVIFSMQATARVGAIHSVVFGGFGAPELAGRIQDLKPKVVLLASCGIEPNKVVDYKKILDEALKLAAIPNIKKILVQREMYKVPMIQGEDFDYYEELAQAKPMDPVPVDGSDYLYILYTSGTTGQPKGIVRENGGNAVALCYTMKYLFGITENDVFFCAADVGWVTGHSYIVYAPLLIGATTILFEGKPVGNPDAGVVWRTCEKYNVRGLYSSPTAVRAIRKDDPDALHMKKANLSNLGIFALAGERLDIPAYKWLLDNLPKDCLLNDNYWQTETGWSIGTNFKNLHTFPCKPGSCSRPAPGMRVEILDEQNHPLPKEKLGKVCIKLPMPPSFMPTLYKNDQAFLNKYISDNPGYYFTGDAGFFDADNYLHITARVDDVINTAGHRLSTSQMEEVLTSHDDIVEAAVIGALDELKGEIPVGFVVLKSGRQRDPMELEAECIKKIRYEIGPVASFRYCLVVDKLPKTRSGKIIRNVLRELSNGNEPKIPPTIEDASVVDVVRDLLKKRGMAKQVNIDYGETVEGEVNIDY

SEQ ID NO: 23103 - DNA, 1539 bp, Glycine max
acatacatacactgattcgaatgcatcatctcctagtgcaaacacagctatcttaggattggttgtagttgataatagagacaaggaaaaagtagtagatttgagttcttctctgtcaaaggaagacaaaagattgaacaatatgcaccaagattttgttcttccctctccaaaagaaatttctgtgtgcatgacaggaaacagtacaagtagttctagaaccttgaagttgagccgaagtagaagttgtatagcaagtatcatgaggaatttatcttcagattggtttgaagatgaagacgtaattcagaacactcctccaatagggaatgaaaaagccttccctggaagaccagagggctttccgaagaacatttatgcactaaattacaatgccaatgcagagaggctttcatgtaatggccatgggaattctgtgcaaaattcttctgttcatgatgttcagaatgtgaaatcctccactaacaaggaaagagagggtaatggtcccttggctccaaaaggaaaggaaacagaaaatcttaacaggttgagtttactggctgaccatgaggttccggggacaggattggatcccatcttgtctgcaaagaatgtcaaagatattggcttggatcccatgcaagctgatggagaaactcactcacactcacattggccttcaaaattccagaggctacaaagagagatcattgaattctgggatgcgtgtaatgtttcattggttcacaggacttactttttccttctattcaaaggggaaccatcagattctatttatatggaggtagagttgagaagactatcataccttacgcaaactttttcccaaggcaatcaaactgtggaagatggacgaaccctcacacctgagttaagcatgagatatcttagaaaagagaggcaaatgctgagcaagcaaatgcataagcgactgtctaaatatgatagacagaacctgtacttgaaatggggccttcgtttgagttcaaagcataggagtttgcagttggcccatcaattgtggagtgacacaaaagacatggaccacgttagagacagtgcatcaattgttgcaaagctggttggtttagtagagccagaacaggcatttaaggagatgtttggactcaactttaccccacaacccacgagtagaaaatcttttagttggacagccagtgtgaggcatattttgtgactttggattactttttaggtagtagcttggtatggccatgtgaaaatgtagataattcttttctccccttatcttagaaacaaattgctttctgctgtatgcttctaactctgattgctattgattgtaaagaatgtgcaattctatggttgcagatttgttcatctgtcctaggttggttccaggtagaacatcatgaatagttcaatatggattgttacctgggaaaaaatatgcaatgtgattttttacgtgtgtgctttattgtaacagtccattctttagttaacattaagaatcataaaacctagacgaac

SEQ ID NO: 23104 - protein, 406 aa, Glycine max
HTYTDSNASSPSANTAILGLVVVDNRDKEKVVDLSSSLSKEDKRLNNMHQDFVLPSPKEISVCMTGNSTSSSRTLKLSRSRSCIASIMRNLSSDWFEDEDVIQNTPPIGNEKAFPGRPEGFPKNIYALNYNANAERLSCNGHGNSVQNSSVHDVQNVKSSTNKEREGNGPLAPKGKETENLNRLSLLADHEVPGTGLDPILSAKNVKDIGLDPMQADGETHSHSHWPSKFQRLQREIIEFWDACNVSLVHRTYFFLLFKGEPSDSIYMEVELRRLSYLTQTFSQGNQTVEDGRTLTPELSMRYLRKERQMLSKQMHKRLSKYDRQNLYLKWGLRLSSKHRSLQLAHQLWSDTKDMDHVRDSASIVAKLVGLVEPEQAFKEMFGLNFTPQPTSRKSFSWTASVRHIL

SEQ ID NO: 23105 - protein, 359 aa, Glycine max
MHQDFVLPSPKEISVCMTGNSTSSSRTLKLSRSRSCIASIMRNLSSDWFEDEDVIQNTPPIGNEKAFPGRPEGFPKNIYALNYNANAERLSCNGHGNSVQNSSVHDVQNVKSSTNKEREGNGPLAPKGKETENLNRLSLLADHEVPGTGLDPILSAKNVKDIGLDPMQADGETHSHSHWPSKFQRLQREIIEFWDACNVSLVHRTYFFLLFKGEPSDSIYMEVELRRLSYLTQTFSQGNQTVEDGRTLTPELSMRYLRKERQMLSKQMHKRLSKYDRQNLYLKWGLRLSSKHRSLQLAHQLWSDTKDMDHVRDSASIVAKLVGLVEPEQAFKEMFGLNFTPQPTSRKSFSWTASVRHIL

SEQ ID NO: 23106 - protein, 343 aa, Glycine max
MTGNSTSSSRTLKLSRSRSCIASIMRNLSSDWFEDEDVIQNTPPIGNEKAFPGRPEGFPKNIYALNYNANAERLSCNGHGNSVQNSSVHDVQNVKSSTNKEREGNGPLAPKGKETENLNRLSLLADHEVPGTGLDPILSAKNVKDIGLDPMQADGETHSHSHWPSKFQRLQREIIEFWDACNVSLVHRTYFFLLFKGEPSDSIYMEVELRRLSYLTQTFSQGNQTVEDGRTLTPELSMRYLRKERQMLSKQMHKRLSKYDRQNLYLKWGLRLSSKHRSLQLAHQLWSDTKDMDHVRDSASIVAKLVGLVEPEQAFKEMFGLNFTPQPTSRKSFSWTASVRHIL

SEQ ID NO: 23107 - DNA, 1309 bp, Glycine max
aatattcaaacttcaccatgcacttggagatggttactccctagtgggtgctcttctctcttgtcttcagagagctgatgacccttctcttcctctttcgtttccctcccgaaaatcctcggcatcttcatctccttccaagaagggcttcttcaggttgttctcttcaactttgttctccttttttaactctatttcggattttggatggagcatagtgaaaagctcaattgttgaagatgatgagacacccataaggagtggtgaggaaggtgttgagtctctgccttgtgtgatatcaaacatatcctttgatcttgatcaagtgaagaaaatcaagtccaagctaggagtgacagtaaacgatgtaattactggggcaattttctatgggattaggctgtacatgcaagagattgacaataaggcaggcaaagcaaattccacaggattggtgatgcttagtactagaaacattggaagttaccaatcaatccaagaaatgatgaaggctgattccaaatctccttgggggaatcatatttctttcttgcacgtacccatacctaagctaagccaagccagcctatccaacccccttgaatttgtttggaaagcccaaaaaataatcaagaggaagagaaagtctttcactgtttttctcattgaatggcttttagatatggagctgaaattaagaggacacgaggccgtggctaaacatatctatgggacactaagaaactcaagtgttgtcgtatccaacttgattggaccaatagaacctatggctttggcaaatcatcctgtgaaaggcttgtatttcacaatgactggtggacccgagagtataaatattgcagttataagctacacaaaaacgttaagaattaccttaaaaacacagaaagggtttattgatgagaagaagttcaaattctgcgtggtgaaagcctttgaggtcatatccaaagcagcaatggagatacccaacaaaatcagaggttaaatgatctaagaataattaaagagataggggtcgtctaagggagactatatatgcttgggagtatgtccaagtcagtttaatttcatcaataagtagagatggtggattctaattttgtcaagtgttagaatgaaatttaaaaaatcggccactcaaggcaataataatagcatacatatcgtatgtccatgtaatttcttagaacagtgatatctcctccccgcaaaagaaatgaaggatcaatgttttccttctttagctttatttgatatatactaagtctagttgaattatggattc

SEQ ID NO: 23108 - protein, 335 aa, Glycine max
IFKLHHALGDGYSLVGALLSCLQRADDPSLPLSFPSRKSSASSSPSKKGFFRLFSSTLFSFFNSISDFGWSIVKSSIVEDDETPIRSGEEGVESLPCVISNISFDLDQVKKIKSKLGVTVNDVITGAIFYGIRLYMQEIDNKAGKANSTGLVMLSTRNIGSYQSIQEMMKADSKSPWGNHISFLHVPIPKLSQASLSNPLEFVWKAQKIIKRKRKSFTVFLIEWLLDMELKLRGHEAVAKHIYGTLRNSSVVVSNLIGPIEPMALANHPVKGLYFTMTGGPESINIAVISYTKTLRITLKTQKGFIDEKKFKFCVVKAFEVISKAAMEIPNKIRG

SEQ ID NO: 23109 - protein, 200 aa, Glycine max
MQEIDNKAGKANSTGLVMLSTRNIGSYQSIQEMMKADSKSPWGNHISFLHVPIPKLSQASLSNPLEFVWKAQKIIKRKRKSFTVFLIEWLLDMELKLRGHEAVAKHIYGTLRNSSVVVSNLIGPIEPMALANHPVKGLYFTMTGGPESINIAVISYTKTLRITLKTQKGFIDEKKFKFCVVKAFEVISKAAMEIPNKIRG

SEQ ID NO: 23110 - protein, 183 aa, Glycine max
MLSTRNIGSYQSIQEMMKADSKSPWGNHISFLHVPIPKLSQASLSNPLEFVWKAQKIIKRKRKSFTVFLIEWLLDMELKLRGHEAVAKHIYGTLRNSSVVVSNLIGPIEPMALANHPVKGLYFTMTGGPESINIAVISYTKTLRITLKTQKGFIDEKKFKFCVVKAFEVISKAAMEIPNKIRG

SEQ ID NO: 23111 - DNA, 1157 bp, Glycine max
aaaactgtttctgatgatgataaggctggcagtagtggtggtggtgctaattctccttctatggctagacaaactaagaacagatatgcacctagcaatgctaccgtggcaaccaacctcaaaccaaagccagcgtcaaatctaaaatggcatagagttttgtttaaaattagtggctctgcattggctggaaactgccagaacattgaccccaagagacttaattggaaactgcaattcaactacttccttccatcattaggtggcaatgcagattgctagggaagtggcaacagcttgccgccttggggtggaggtggccattgttgttggtggtcgtaacttcttttgtggagatgcatgggtgtctgctaccgggttagatagacctacggcataccaaataggtatgatggcaacagttatgaattctattttgcttcaatctgctttggaaaagctgggtgttcaagcacgtgttcagagtacattctcgatgccagaggttgctgaaccatatagcaggcaacgagctattagacatcttgagaaaggaagggttgtcatatttggtggtgttggtgctggcactggaaatccactttttaccactgatacagctgcagctctcagagcttctgagcttaatgctgatgcggttctgaaaggtactaatgtgaatggcgtctttgactgccatccccgtaatgataatataacactcgatcacatttcctttagggaagttgtttctaggggcgtcacctccatggacatgatggcgctggcatattgtgaagagaatggaatacctgttgtagtcttcaacgtgcttgaaccggggaatgtttcaagagcattatgtggagatcaagttggcactttgattgatcaaactggtagagtggagcattagcttccaagttaatcgtgcatgatttggttgtaatcagattatggcgtcacttaatatttacacaagggatcccttgatttgtttctgtattgtttgttttttaattgaggcgttgcctgttagctaatgtatttaccgcgcactactgattcattagatttaccacacatgtaacttaagtctgaaattttgtacttatttaactaatgttgatatgataatatatttgacatatttacat

SEQ ID NO: 23112 - protein, 215 aa, Glycine max
MQIAREVATACRLGVEVAIVVGGRNFFCGDAWVSATGLDRPTAYQIGMMATVMNSILLQSALEKLGVQARVQSTFSMPEVAEPYSRQRAIRHLEKGRVVIFGGVGAGTGNPLFTTDTAAALRASELNADAVLKGTNVNGVFDCHPRNDNITLDHISFREVVSRGVTSMDMMALAYCEENGIPVVVFNVLEPGNVSRALCGDQVGTLIDQTGRVEH

SEQ ID NO: 23113 - protein, 168 aa, Glycine max
MMATVMNSILLQSALEKLGVQARVQSTFSMPEVAEPYSRQRAIRHLEKGRVVIFGGVGAGTGNPLFTTDTAAALRASELNADAVLKGTNVNGVFDCHPRNDNITLDHISFREVVSRGVTSMDMMALAYCEENGIPVVVFNVLEPGNVSRALCGDQVGTLIDQTGRVEH

SEQ ID NO: 23114 - protein, 167 aa, Glycine max
MATVMNSILLQSALEKLGVQARVQSTFSMPEVAEPYSRQRAIRHLEKGRVVIFGGVGAGTGNPLFTTDTAAALRASELNADAVLKGTNVNGVFDCHPRNDNITLDHISFREVVSRGVTSMDMMALAYCEENGIPVVVFNVLEPGNVSRALCGDQVGTLIDQTGRVEH

SEQ ID NO: 23115 - DNA, 2571 bp, Glycine max
aacacaacacgcgccctacccttcatcaattgcttctttctcactcactgaaactcaacccttactttgcaattgcattcccagattcatttcagacaacgcaaccttaactttcccacatacgctaactcaataaccctttcattccgttcattgctctttccagattctattttgcctcttagaagttggaatagagaactagagctgggtggatggaggatgacaagaggaggaggaagaacaagaagaagaagaacaagcagaacaagaatgtggaaaatggggtgggagaaactgctaatagggatcagaatctgctgagtaatggaaaggatgagcatactaatctttccaagactgcaaatgagcaaagctcgaatgtcgatttgaatggggttggagagacattaagtagggatcacaatctggtaaataatggtaaggatgaacctgctaatctttcaggagtcgctgatgagcaatgcatggatgcagatcggaatggggttgttgaaacccccaatagtgatcaaaatctggtgaaaagtggaaaggatgagaatattccatcattagagtttgcagatgggcaaagtactaatatggattcaaatggtcatccgccaaatggctatatcagaagagacaatcaggaaattaaaagaagagaatgatatacatattcagaaagagactttatcaaaagagacaatcaggaaattaaaggcagaaaatgatatgcacattcagaaggaggccataatggaagagacaatcagaaaattgacagaacaaaatgacatgcatatgcagaaagagattgcatcagaagagactatcagaaaattaaaagaaaaacatgatatggatgttcagaaagaggccatatcagaagatacaattagaaatttgaaagaaaaaaatgatgtgcacgtgcagaaagaggagacaataaaaaaattgaaagaagaaaatgaagtgcacattcaggaagaggccatatcaaaggagacaattaaaaatctcaaagaagaaaatgataaactacttcagaaagtggtttccttggaagaggtcatcaataatttacaaactgataatgaattgcagacacaaaaacatactagtctggaaatgagaattgcacaattgcaaagtgagaataattccttacttcaaaaagaggcgagtgattatgttttccctttaaaaagattaggaatcattgattttgagaatattatacatccagatatttaatagtatatcatatgtaggctggattggtggaaaaaactaatcagttgctgaatgaaaaggtagttttgagcctgaaagctgagagtttagagagaaaaataaatcttctggagaatgagttgagttcttttagtgagaaagaggttggacttgaaacaagaattgcacaattgcagagtgagaataattccttacttcaaaaagaggctacattggtggaaagaaccaatcaattgctgaatgaaaaggcagttttgagcctgaaaggggagagtttagaacaaaaaatatatcttctggaaagcgatttgaattctttagtcaagaaggagaattcaactaaagaaactatttcaaacctgaatggaaacattgctgtgctacaagcgcaggtggaagaattggaggagtccaggaataatctttttctagaaaaccagcaattgagggaaaaagtgtcgagtcttcagtcaacggtccaaaatcatgaaaacagtaacacttcttcctgctcatgggatgcatctgtaaaggatcttgcttctgaaaacgaggacttgaagtctgaaattgaagcagcctttacgttggtggagaaattgatggctgaaaatgcagaacttgttgagaaggtcaccgagttatgtgttgagctggatcaccgaagtgcagaagtcggacattctggagtcactgaatccaatgggatgactgaatttgttaaacctactggtgttgccattcctctaccagaatctgctgagtatgcgtctgtatcatcccccaagttgaattcattggaagagacttcagtgaaggataatggtaactctaatgatgctaagcatgttgttggggtaacgtcaaactcgtcgttggtatcggctgatgacgctggagaaatcgtgcaaattccattggatgataatgaaatacaagatatagagttgcaggatgctaagaatgtggaaaatgatgctgatgctgtgccaatcacagatgctccgcttatcggtgctccatttcgtttgatatcatttgttgctaattttgttagtggtgctgacttggttaaccaaagctcttcaaacactgctcgttgacttggttgaccaaagctctgttttttttggctggcagtcttgaacatacaataacctcacttacattaggcagaataccaatataggttggcctaatttgggccattttaatgtttgtatgttaattctttgaacacggaaatattgtactggggaaaagcatatagttttatgtgttcttacttcatattgctttcacttttgg

SEQ ID NO: 23116 - protein, 224 aa, Glycine max
MGKVLIWIQMVIRQMAISEETIRKLKEENDIHIQKETLSKETIRKLKAENDMHIQKEAIMEETIRKLTEQNDMHMQKEIASEETIRKLKEKHDMDVQKEAISEDTIRNLKEKNDVHVQKEETIKKLKEENEVHIQEEAISKETIKNLKEENDKLLQKVVSLEEVINNLQTDNELQTQKHTSLEMRIAQLQSENNSLLQKEASDYVFPLKRLGIIDFENIIHPDI

SEQ ID NO: 23117 - protein, 215 aa, Glycine max
MVIRQMAISEETIRKLKEENDIHIQKETLSKETIRKLKAENDMHIQKEAIMEETIRKLTEQNDMHMQKEIASEETIRKLKEKHDMDVQKEAISEDTIRNLKEKNDVHVQKEETIKKLKEENEVHIQEEAISKETIKNLKEENDKLLQKVVSLEEVINNLQTDNELQTQKHTSLEMRIAQLQSENNSLLQKEASDYVFPLKRLGIIDFENIIHPDI

SEQ ID NO: 23118 - protein, 210 aa, Glycine max
MAISEETIRKLKEENDIHIQKETLSKETIRKLKAENDMHIQKEAIMEETIRKLTEQNDMHMQKEIASEETIRKLKEKHDMDVQKEAISEDTIRNLKEKNDVHVQKEETIKKLKEENEVHIQEEAISKETIKNLKEENDKLLQKVVSLEEVINNLQTDNELQTQKHTSLEMRIAQLQSENNSLLQKEASDYVFPLKRLGIIDFENIIHPDI

SEQ ID NO: 23119 - DNA, 1226 bp, Glycine max
tttttctcaggatagtttctctacccaagggtcgaaagctacttgctaggtatcttcaactgctctttcctggtggtgagctaatgcgaatagtctgcatggccatctttcggcatttaaggttcttatttggtggccttccctccgacccagctgcagcagaaactataagtaaccttgcgagggttgtttcgaggtgcattcgtgaaatggatctaggtgcagtaagtgcttgtctagcagcagttgtttatacttccgagccgcctcccctacgtccccttggaagttctgctggagatggggcttcccttattctagtgtctgtgcttgagagggcaactgaacttctaactgatcctcatgctgctagcaactacaatattgcaaatcgttcactttggcaggctacatttgatgaattctttggccttctaaccaagtattgtgtgaataaatatgatagtgtcatgcaatcattccttatacaggggacaccaaatatggcttccattggttcagatgttgccagagctattagtagggaaatgccagttgagctcttacgtgcaagtctacctcacactgatgaccgccagaaaaaacaattacttgattttgctcagcgctctattcctgtagttggatttaatagtaattcgggggatcaaggtcaccatgtgaactcagagtcagtcctgagttaattagataattggacattcatctatggaactgtttttcaaattacggcagtaaattttgcagggacaactgttgtgtgtctaatatctttggagcagtctgatgtggaaggaccgggtgcatgcatctaccttggaagttttaaccgcttcatatcttgttatattgtggggagcttattgttgctcgatttgtggtttctagagcaaagtagtgggtagtgtgtccaggctttaggtgtttaagttggattcccatgttcctttattattaccatacaggcatgggattgtggttgtgttcatactccatatctacctttatagatatcatgtgtccaaattgaagtagcatgggatgcaccaatttaaccagtcggcaaggtggcattggcatgcctaagaataaattgtgttaacctagtttcatggtttcagttttctcttcttttccattggtgtagatgtgtagttttgtatcatcatttcttgtttctcaagtcaattggactattattgctc

SEQ ID NO: 23120 - protein, 234 aa, Glycine max
FLRIVSLPKGRKLLARYLQLLFPGGELMRIVCMAIFRHLRFLFGGLPSDPAAAETISNLARVVSRCIREMDLGAVSACLAAVVYTSEPPPLRPLGSSAGDGASLILVSVLERATELLTDPHAASNYNIANRSLWQATFDEFFGLLTKYCVNKYDSVMQSFLIQGTPNMASIGSDVARAISREMPVELLRASLPHTDDRQKKQLLDFAQRSIPVVGFNSNSGDQGHHVNSESVLS

SEQ ID NO: 23121 - protein, 207 aa, Glycine max
MRIVCMAIFRHLRFLFGGLPSDPAAAETISNLARVVSRCIREMDLGAVSACLAAVVYTSEPPPLRPLGSSAGDGASLILVSVLERATELLTDPHAASNYNIANRSLWQATFDEFFGLLTKYCVNKYDSVMQSFLIQGTPNMASIGSDVARAISREMPVELLRASLPHTDDRQKKQLLDFAQRSIPVVGFNSNSGDQGHHVNSESVLS

SEQ ID NO: 23122 - protein, 202 aa, Glycine max
MAIFRHLRFLFGGLPSDPAAAETISNLARVVSRCIREMDLGAVSACLAAVVYTSEPPPLRPLGSSAGDGASLILVSVLERATELLTDPHAASNYNIANRSLWQATFDEFFGLLTKYCVNKYDSVMQSFLIQGTPNMASIGSDVARAISREMPVELLRASLPHTDDRQKKQLLDFAQRSIPVVGFNSNSGDQGHHVNSESVLS

SEQ ID NO: 23123 - DNA, 1226 bp, Glycine max
gagctcgcttcctctttctaacttgccataccatcttacttttactttgttttcacaacatagccatggccatctccagcaacgcttctccttttgattccatcatcttcggtgagtacttcatcctctctctttctctcctcaatttctaattcccccctctgaattaaacagatttggacgacaccttgtacccgtcaagcaccggtattgacaagtgcgtcaagaaaaacatccaactctttctcatccagaaatgcggattctcagaatccgaagccttcaccctccgagttgatctcttcaaaacctacggaagcacccttgccggtttaagagcactaggccatgatatcaccgcagaggagtaccatggtttcgtgcacggaaggctaccttacgactccatcaaccctgatcatcacttacggaaccttctctgcaccatcaaacagagaaaaattgtttttactaattcggacaggattcacgcgatgaggtcgttggatagacttgggatcaaggactgtttcgagcaaatcatatgtttcgagactataaacccgaaccttccatattccacccgacccgatgaattcctcatcctccttaaaccgtctctcgacgccttcaagatcgcccttgacgctgccaacgtggatcctcgtcgtacgttatttctggatgacagcgttcgcaatattgccgcgggaaaagaaatgggtctccacactgttctggttgggaagacagagaaaagcaaaggagcagactatgcagtggagtgtgtgaatgacttggcacaagtgatcccagagatatgggcaaacgaaatggacggtgaggatcaaacgatgacacgtaccaagagtgaattggaggccgtactcgcgtgtgctgtggttggagcttgaaaagtgtttggatgtggaggaggataaggcctgacgttgtacaatgtacattcccaaaccaacccaactatctaagcaattaaaataatagcagcaagtactatcagaacaccaacaaccaagacaataacaataagtaacatgggcccctaagcaattatttgcgacatcatgttaatcatgtcaatattgtaagatatttagtagtattatttgtacgtattatcaatcgtcttacaaataaaatcaaattgtctctcagagatatcaattgcttaacaattaataaagttgagttactgtcattatttt

SEQ ID NO: 23124 - protein, 139 aa, Glycine max
MRSLDRLGIKDCFEQIICFETINPNLPYSTRPDEFLILLKPSLDAFKIALDAANVDPRRTLFLDDSVRNIAAGKEMGLHTVLVGKTEKSKGADYAVECVNDLAQVIPEIWANEMDGEDQTMTRTKSELEAVLACAVVGA

SEQ ID NO: 23125 - DNA, 1289 bp, Glycine max
aacatctgcgcagtacgagaataagactatagcatcaccaccaggttgtgatagcaaatgtggaaatgtttccattcctttccctttcggaatgcacgatcccaaatgctatgcaagcaaccagtttgaaatagaatgcagacacaataacaatacttctcaaggtcatcagaaacccgtaccccacctaaagtatataaatttggaggtaatgtatattgatattcaatacggtacggttgggatcaagaatccgattttccatcctggctgtggcaagactgttacaggcataaatcttgaaggcagtcctttcgtgtattcccagaattacaactcatttgttggcgtaggttgccaaaacgccgccataatgttgtcaaacgacacgatacttacagcctgtatgtcggtgtgttacgagcacctcgaaaaaggcaatgacatcgacatttcgagttgtcgtggctcctactgctgcgagacttcactgccgccgtatctttcagcatacaacatctcaactgaaaccgtggaagtgaaaagtaatatcaaagcagaatgttcaaattacttgctgattagagcagaatatagtaacttcaagtacgagtacgatgagtacaattccagttactgggttcccactcttggagacctaaagaaacaaaaagatgttcctgcggtgcttgaatgggagattccgattcacacgcccaacaattccttccctgaattccgtacagatgcatatggccatggcagctacaactgcagttacactaatgttacatcttcactatatccacaatcgggttggagatgttcttgcagcgatggcttcgagggaaacccctacatacaagaaggctgtaaattaagtctcgatggacgcaagataataatagatccgacgaaaagttatggaaaggtggccatgataggagttttttcaagcatcgggaccatcattctactctttggtttgtggcggttgcgtaaagttgtaaggaaaaagatagcaaagaaacgcaaagaaaagttcttcaaacaaaatggaggattgttgttagaacaaagactatctactggtgaagttaatgttgacaaaactaaactctttagcttaaaggaattagggaaggccactgatcactttaatataaacagaatacttggaaaaggaggtcaaggtacagtttacaaaggtatgttagtagatggaaaaattgttgcagtgaaaaaatttaaggtcaacggaaatgttgaagaattcatcaacgaatttg

SEQ ID NO: 23126 - protein, 429 aa, Glycine max
TSAQYENKTIASPPGCDSKCGNVSIPFPFGMHDPKCYASNQFEIECRHNNNTSQGHQKPVPHLKYINLEVMYIDIQYGTVGIKNPIFHPGCGKTVTGINLEGSPFVYSQNYNSFVGVGCQNAAIMLSNDTILTACMSVCYEHLEKGNDIDISSCRGSYCCETSLPPYLSAYNISTETVEVKSNIKAECSNYLLIRAEYSNFKYEYDEYNSSYWVPTLGDLKKQKDVPAVLEWEIPIHTPNNSFPEFRTDAYGHGSYNCSYTNVTSSLYPQSGWRCSCSDGFEGNPYIQEGCKLSLDGRKIIIDPTKSYGKVAMIGVFSSIGTIILLFGLWRLRKVVRKKIAKKRKEKFFKQNGGLLLEQRLSTGEVNVDKTKLFSLKELGKATDHFNINRILGKGGQGTVYKGMLVDGKIVAVKKFKVNGNVEEFINEF

SEQ ID NO: 23127 - protein, 399 aa, Glycine max
MHDPKCYASNQFEIECRHNNNTSQGHQKPVPHLKYINLEVMYIDIQYGTVGIKNPIFHPGCGKTVTGINLEGSPFVYSQNYNSFVGVGCQNAAIMLSNDTILTACMSVCYEHLEKGNDIDISSCRGSYCCETSLPPYLSAYNISTETVEVKSNIKAECSNYLLIRAEYSNFKYEYDEYNSSYWVPTLGDLKKQKDVPAVLEWEIPIHTPNNSFPEFRTDAYGHGSYNCSYTNVTSSLYPQSGWRCSCSDGFEGNPYIQEGCKLSLDGRKIIIDPTKSYGKVAMIGVFSSIGTIILLFGLWRLRKVVRKKIAKKRKEKFFKQNGGLLLEQRLSTGEVNVDKTKLFSLKELGKATDHFNINRILGKGGQGTVYKGMLVDGKIVAVKKFKVNGNVEEFINEF

SEQ ID NO: 23128 - protein, 359 aa, Glycine max
MYIDIQYGTVGIKNPIFHPGCGKTVTGINLEGSPFVYSQNYNSFVGVGCQNAAIMLSNDTILTACMSVCYEHLEKGNDIDISSCRGSYCCETSLPPYLSAYNISTETVEVKSNIKAECSNYLLIRAEYSNFKYEYDEYNSSYWVPTLGDLKKQKDVPAVLEWEIPIHTPNNSFPEFRTDAYGHGSYNCSYTNVTSSLYPQSGWRCSCSDGFEGNPYIQEGCKLSLDGRKIIIDPTKSYGKVAMIGVFSSIGTIILLFGLWRLRKVVRKKIAKKRKEKFFKQNGGLLLEQRLSTGEVNVDKTKLFSLKELGKATDHFNINRILGKGGQGTVYKGMLVDGKIVAVKKFKVNGNVEEFINEF

SEQ ID NO: 23129 - DNA, 978 bp, Glycine max
gagcgaaatacaatcatcctctccgtttctttccttccttctccttcctgcccccgcgcgtggttccggtctctcggaacaatcaacacaacaccaacacacgttcacgctttcattcattttataaacacacaatgacattggcatcttcattccccactccacaggttcacgctttcgacaaccccgccagaagtagaagtcaccttcacatcattaaacgcaacaagccccaccgaaccctccactttctcttaatcccaacctctcccccctcctccgcgctcctcttctcctgctcctccttccccctcacccactccgacccaatcctccagtttcgccaccaccacctcctctccaccgacggcaacttcgtggtcgaagacctcagcgctgcggttgaggaggacgcgtctccggccgccgcaaggatcttcgtccaggagccgccgtggctgttcctgaagggtttgctaatgcaggaagaggagatgagacagaaggggaaggagagggagaagtataatttgctgcgaaggaggcagattgaggcggagactgaggcctgggagaggatggtggaggagtacagggaattggagagggagatgcgggagaagatgttggcgcccaatttgccgcacgtcaaggcgctcctcttgggctggttcgagccgttcagggccgccgtggaggccgagcagacggctcaccacgcccgccccaagaagcagcaggactccattgccccccacgtcgacgacttgcccgcagataaggtggccgtcattgttatgcataagatgatggccatggtgatggagagtgaggaaggctgtgttcagcttgttcatgctgctattcatattggcttggctctagaacaggaggttaggattcataaattcattgaaggaaataaaagtaaccggagtaagaagacagagggtgatgctgaagacagtttggatagtg

SEQ ID NO: 23130 - protein, 325 aa, Glycine max
AKYNHPLRFFPSFSFLPPRVVPVSRNNQHNTNTRSRFHSFYKHTMTLASSFPTPQVHAFDNPARSRSHLHIIKRNKPHRTLHFLLIPTSPPSSALLFSCSSFPLTHSDPILQFRHHHLLSTDGNFVVEDLSAAVEEDASPAAARIFVQEPPWLFLKGLLMQEEEMRQKGKEREKYNLLRRRQIEAETEAWERMVEEYRELEREMREKMLAPNLPHVKALLLGWFEPFRAAVEAEQTAHHARPKKQQDSIAPHVDDLPADKVAVIVMHKMMAMVMESEEGCVQLVHAAIHIGLALEQEVRIHKFIEGNKSNRSKKTEGDAEDSLDS

SEQ ID NO: 23131 - protein, 281 aa, Glycine max
MTLASSFPTPQVHAFDNPARSRSHLHIIKRNKPHRTLHFLLIPTSPPSSALLFSCSSFPLTHSDPILQFRHHHLLSTDGNFVVEDLSAAVEEDASPAAARIFVQEPPWLFLKGLLMQEEEMRQKGKEREKYNLLRRRQIEAETEAWERMVEEYRELEREMREKMLAPNLPHVKALLLGWFEPFRAAVEAEQTAHHARPKKQQDSIAPHVDDLPADKVAVIVMHKMMAMVMESEEGCVQLVHAAIHIGLALEQEVRIHKFIEGNKSNRSKKTEGDAEDSLDS

SEQ ID NO: 23132 - protein, 166 aa, Glycine max
MQEEEMRQKGKEREKYNLLRRRQIEAETEAWERMVEEYRELEREMREKMLAPNLPHVKALLLGWFEPFRAAVEAEQTAHHARPKKQQDSIAPHVDDLPADKVAVIVMHKMMAMVMESEEGCVQLVHAAIHIGLALEQEVRIHKFIEGNKSNRSKKTEGDAEDSLDS

SEQ ID NO: 23133 - DNA, 1523 bp, Glycine max
aatgcagtcaaacaataacatatcgtaaaaagtactactatagttgctgttttgttgaagaagaaaacaaagtagaagcaaagttctttaagagtgaaagagaccatttttgcaaccccaattgatcagctcttgaaacaaacatgaagaagaacacctctgcgatggagaatgccggtggcatcaaggcatggagtttccgtcgccaccagcttttggttagaagggtgatgcaattaaccatgttcattgctggacttcctgtgttgtgggtgtttctctctaactctgcctcttccattgaattccataccttctcacattacttcactgctcagtcaacaaaggctggttatgaatcaaagctagagagtgtttttagaactgcgtctatgaaggataagacagtgataatcacaactttaaacgatgcatgggcaaagccaggttcggtatttgacctctttcttgagagttttcgcctagggaatgagacacaatggcttttaaatcacttggtggtaataacttgggaccaaaagacaaatgcttattgccttgctttgcacaaacattgttaccaagttgaaactaaaggtgccaatttcaccggtgaagtattattcatgaccccgacatacctacacatgatgtgtagaagaactgaattcctcacttctgttcttgagatgggatataactttgtgttcacggatactgatataatgtggcttagagatcccttcaaacaattttatgaagatgcagatttccaaatagcttgtgatgctttcaatggcaactcctctgacatatacaactatccaaatggagggtttaaatacataaaatcgaataaccgaactatttggtttaacaagttctggttcaactctagcaaagagtacccagggttgggtgagcaggctgtgttcaataagatcaaaatgcaccccttaatttcccacatgaagctgaagattaggttccttagcactagctattttggagggttttgtgagcctagcaaggacttcaacaaggtctcaacaatgcatgccaattgttgtgttggcatagacaacaaagtcaatgatcttaaaattttgcttgaggattggaagaagtatatggcattgtctgaaattgacaaaaaacagtcaaatcttacttggagcgtaccacaaagttgcagtaagtcctttgaacatgccaaagaaaggaagaataaagggaggttgcgacgggctttggttgaaactgtttgatgcatttataaagaggtttgagaatgattgactcaaattttggatcaaagcaaaaggtttactttgccaagccaattcttttgcaatggaaaagaaatgtgtggaagtggtacacccattgaaaatgtaggaaacagagaaaagtttgttcaaagttttattatgagatgtaatatatgcagtatgtacaataatttatataacagtttgtataacattttttttgggtttatatctatcattataaaatgtaac

SEQ ID NO: 23134 - protein, 374 aa, Glycine max
MKKNTSAMENAGGIKAWSFRRHQLLVRRVMQLTMFIAGLPVLWVFLSNSASSIEFHTFSHYFTAQSTKAGYESKLESVFRTASMKDKTVIITTLNDAWAKPGSVFDLFLESFRLGNETQWLLNHLVVITWDQKTNAYCLALHKHCYQVETKGANFTGEVLFMTPTYLHMMCRRTEFLTSVLEMGYNFVFTDTDIMWLRDPFKQFYEDADFQIACDAFNGNSSDIYNYPNGGFKYIKSNNRTIWFNKFWFNSSKEYPGLGEQAVFNKIKMHPLISHMKLKIRFLSTSYFGGFCEPSKDFNKVSTMHANCCVGIDNKVNDLKILLEDWKKYMALSEIDKKQSNLTWSVPQSCSKSFEHAKERKNKGRLRRALVETV

SEQ ID NO: 23135 - protein, 367 aa, Glycine max
MENAGGIKAWSFRRHQLLVRRVMQLTMFIAGLPVLWVFLSNSASSIEFHTFSHYFTAQSTKAGYESKLESVFRTASMKDKTVIITTLNDAWAKPGSVFDLFLESFRLGNETQWLLNHLVVITWDQKTNAYCLALHKHCYQVETKGANFTGEVLFMTPTYLHMMCRRTEFLTSVLEMGYNFVFTDTDIMWLRDPFKQFYEDADFQIACDAFNGNSSDIYNYPNGGFKYIKSNNRTIWFNKFWFNSSKEYPGLGEQAVFNKIKMHPLISHMKLKIRFLSTSYFGGFCEPSKDFNKVSTMHANCCVGIDNKVNDLKILLEDWKKYMALSEIDKKQSNLTWSVPQSCSKSFEHAKERKNKGRLRRALVETV

SEQ ID NO: 23136 - protein, 345 aa, Glycine max
MQLTMFIAGLPVLWVFLSNSASSIEFHTFSHYFTAQSTKAGYESKLESVFRTASMKDKTVIITTLNDAWAKPGSVFDLFLESFRLGNETQWLLNHLVVITWDQKTNAYCLALHKHCYQVETKGANFTGEVLFMTPTYLHMMCRRTEFLTSVLEMGYNFVFTDTDIMWLRDPFKQFYEDADFQIACDAFNGNSSDIYNYPNGGFKYIKSNNRTIWFNKFWFNSSKEYPGLGEQAVFNKIKMHPLISHMKLKIRFLSTSYFGGFCEPSKDFNKVSTMHANCCVGIDNKVNDLKILLEDWKKYMALSEIDKKQSNLTWSVPQSCSKSFEHAKERKNKGRLRRALVETV

SEQ ID NO: 23137 - DNA, 1654 bp, Glycine max
gtgcttcgttgtgctacgccacgaaagaatttcttgttttctgctttcgaataaacgaataagaagccttcacaccgcttcgttgtgctgtgcttgcttctcttttattctttctattagtattcgtttcgttttctccgccgtttccgtagctcggcttcagcagcaccagaaccaggtgtctactatctgactacacatgtgctgttattgtcttccaattgggtgaagtctgattgaagagcaatgcagaaggatactagtaccaccgccccatcaaccacaagtggtcgggttaggcaccgaaaacgctcaaatgaggttattccggaagttagtaaagcaaatgggaccaagttactggttaatgacaaaagcaaatacaagtctatgctaattcgagcatattcatctgtatggatgattggcggctttgttttgatcatttatatgggtcacctctacatcactgcaatggtggttgttatccaaatcttcatggcaagggagctgttcaatctactcaggagagctcatgaagataggcagctgccaggatttaggctattaaattggcattttttcttcactgcaatgttatttgtttatggacgaattctgagtcaatgcctggttaacacagtaacttcagacatggttttatattggctagtgagcaatcttataaagtatcacatggttatctgctactccctgtacattgcaggatttatgtggttcattctcacgttgaagaagaagatgtacaagtaccaatttggccagtatgcttggacacacatgattctaattgttgtatttggccagtcctccttcaccgtggcaagcatttttgaagggattttctggtttcttctcccagcaacacttattgtcattaatgatattgctgcttatatctttggtttcttctttggaagaacccctttgatcaagttatctccaaagaaaacttgggagggttttataggggcatctgttaccaccatcatctctgcatttatgcttgctaacatcatgggtcgctctcagtggctaacgtgtccaaggaaggatttgtcaactggttggcttcactgtgatcctggtccactgtttaagccagaatcttatcccttacctggatgtatttctcactggttttcttggaaagagatatcaatcctaccaattcaatggcattctttatgtctaggcttgtttgcttcaattattgcaccttttggaggcttctttgcaagtggctttaaaagggcttttaaaataaaggactttggtgatagtattccgggacatggtggaattaccgacagaatggattgccagatggttatggccgtgtttgcatacatatatcatcagtcatttgttgtgccgcaaactctctcggttgaaatgattttggaccagatatcgatgaacctaacattcgatgagcaacaagctctatattggaggcttggggaaattttacaacaggggtttgctaggatgtcttagattcatggcgaggtgtatttgttctgtcaccttctattgtattccttcacatacaggggaaaaggaaaagatactatgtacatgtgtttgttttctatcttttgagtgaaacaaattaaaggttcagaagctg

SEQ ID NO: 23138 - protein, 424 aa, Glycine max
MQKDTSTTAPSTTSGRVRHRKRSNEVIPEVSKANGTKLLVNDKSKYKSMLIRAYSSVWMIGGFVLIIYMGHLYITAMVVVIQIFMARELFNLLRRAHEDRQLPGFRLLNWHFFFTAMLFVYGRILSQCLVNTVTSDMVLYWLVSNLIKYHMVICYSLYIAGFMWFILTLKKKMYKYQFGQYAWTHMILIVVFGQSSFTVASIFEGIFWFLLPATLIVINDIAAYIFGFFFGRTPLIKLSPKKTWEGFIGASVTTIISAFMLANIMGRSQWLTCPRKDLSTGWLHCDPGPLFKPESYPLPGCISHWFSWKEISILPIQWHSLCLGLFASIIAPFGGFFASGFKRAFKIKDFGDSIPGHGGITDRMDCQMVMAVFAYIYHQSFVVPQTLSVEMILDQISMNLTFDEQQALYWRLGEILQQGFARMS

SEQ ID NO: 23139 - protein, 376 aa, Glycine max
MLIRAYSSVWMIGGFVLIIYMGHLYITAMVVVIQIFMARELFNLLRRAHEDRQLPGFRLLNWHFFFTAMLFVYGRILSQCLVNTVTSDMVLYWLVSNLIKYHMVICYSLYIAGFMWFILTLKKKMYKYQFGQYAWTHMILIVVFGQSSFTVASIFEGIFWFLLPATLIVINDIAAYIFGFFFGRTPLIKLSPKKTWEGFIGASVTTIISAFMLANIMGRSQWLTCPRKDLSTGWLHCDPGPLFKPESYPLPGCISHWFSWKEISILPIQWHSLCLGLFASIIAPFGGFFASGFKRAFKIKDFGDSIPGHGGITDRMDCQMVMAVFAYIYHQSFVVPQTLSVEMILDQISMNLTFDEQQALYWRLGEILQQGFARMS

SEQ ID NO: 23140 - protein, 366 aa, Glycine max
MIGGFVLIIYMGHLYITAMVVVIQIFMARELFNLLRRAHEDRQLPGFRLLNWHFFFTAMLFVYGRILSQCLVNTVTSDMVLYWLVSNLIKYHMVICYSLYIAGFMWFILTLKKKMYKYQFGQYAWTHMILIVVFGQSSFTVASIFEGIFWFLLPATLIVINDIAAYIFGFFFGRTPLIKLSPKKTWEGFIGASVTTIISAFMLANIMGRSQWLTCPRKDLSTGWLHCDPGPLFKPESYPLPGCISHWFSWKEISILPIQWHSLCLGLFASIIAPFGGFFASGFKRAFKIKDFGDSIPGHGGITDRMDCQMVMAVFAYIYHQSFVVPQTLSVEMILDQISMNLTFDEQQALYWRLGEILQQGFARMS

SEQ ID NO: 23141 - DNA, 1450 bp, Glycine max
attctttcaactatgggtgctgctcttcagagcctgactggtgccccacgtctgcttgcagcaatagccaatgatgatattttacctattttgaactactttaaagttggagatgccagtgaaccacatgttgctaccttttttactgctttcttatgcattgggtgtgtcgttattgggaatctggatcttatcactccaactgtaactatgtttttccttctatgttacactggtgtcaacttatcctgcttccttctcgatcttctagatgcccctagttggcgtcctcggtggaaatttcaccattggagtctgtcccttgtgggagcattactttgcatagtgatcatgttcctaatctcttggtcattcactgtggtgtctttgctccttgcaagcctcatatataagtacgtgagcattcaaggaaaggctggggactggggagatggtttcaaaagtgcttatttccaactagcacttcgtagccttcggtccctaggagcaagccaagtgcacccgaagaattggtatccaattccacttgtattttgccgaccctggggcaaactgccagaaaatgttccctgtcatcccaaacttgcagattttgctaactgtatgaagaagaaaggtcgaggaatgtccatatttgtctctatactagatggggattaccatgaatgtgctgaagatgccaagactgcttgcaaacaacttagcacctacatagattacaaaaattgtgaaggtgtggctgagatagttgttgcccctaacatgtctgaaggcttccgtggcataattcagacaatgggccttggcaatctcaagccgaacattgtggtgatgcgttacccagaaatttggcggagggaaaacttgatagaaatccctgctacctttgttgggataattaatgattgcattgttgcaaacaaggctgtggttatagttaagggtcttgatgagtggccaaatgagtaccagaggcagtatggcacaattgatttgtattggattgtaagagatggtggtctcatgctgcttctttctcagctccttcttaccaaggagagctttgagaattgcaagattcaggtcttttgtatcgcagaagacgatgcagatgctgaggggctgaaagctgatgtgaaaaaattcctttacgatcttcggatgcaagcggaagtctttgtcataacaatgaaatgggatgcacagatggatggtggtggcgggtccccggcacaagatgagtcaatggatgcatttactagtgctcaacaaagaattgataattacttaacccaaatgaaggcgacagcagagagagaaggtactcctctaatggcagatggcaagcccgtggttgtgaatgagaagcaggttgagaagtttctttatacgacgcttaagctcaattcgacaattttgagatactcga

SEQ ID NO: 23142 - protein, 483 aa, Glycine max
ILSTMGAALQSLTGAPRLLAAIANDDILPILNYFKVGDASEPHVATFFTAFLCIGCVVIGNLDLITPTVTMFFLLCYTGVNLSCFLLDLLDAPSWRPRWKFHHWSLSLVGALLCIVIMFLISWSFTVVSLLLASLIYKYVSIQGKAGDWGDGFKSAYFQLALRSLRSLGASQVHPKNWYPIPLVFCRPWGKLPENVPCHPKLADFANCMKKKGRGMSIFVSILDGDYHECAEDAKTACKQLSTYIDYKNCEGVAEIVVAPNMSEGFRGIIQTMGLGNLKPNIVVMRYPEIWRRENLIEIPATFVGIINDCIVANKAVVIVKGLDEWPNEYQRQYGTIDLYWIVRDGGLMLLLSQLLLTKESFENCKIQVFCIAEDDADAEGLKADVKKFLYDLRMQAEVFVITMKWDAQMDGGGGSPAQDESMDAFTSAQQRIDNYLTQMKATAEREGTPLMADGKPVVVNEKQVEKFLYTTLKLNSTILRYS

SEQ ID NO: 23143 - protein, 479 aa, Glycine max
MGAALQSLTGAPRLLAAIANDDILPILNYFKVGDASEPHVATFFTAFLCIGCVVIGNLDLITPTVTMFFLLCYTGVNLSCFLLDLLDAPSWRPRWKFHHWSLSLVGALLCIVIMFLISWSFTVVSLLLASLIYKYVSIQGKAGDWGDGFKSAYFQLALRSLRSLGASQVHPKNWYPIPLVFCRPWGKLPENVPCHPKLADFANCMKKKGRGMSIFVSILDGDYHECAEDAKTACKQLSTYIDYKNCEGVAEIVVAPNMSEGFRGIIQTMGLGNLKPNIVVMRYPEIWRRENLIEIPATFVGIINDCIVANKAVVIVKGLDEWPNEYQRQYGTIDLYWIVRDGGLMLLLSQLLLTKESFENCKIQVFCIAEDDADAEGLKADVKKFLYDLRMQAEVFVITMKWDAQMDGGGGSPAQDESMDAFTSAQQRIDNYLTQMKATAEREGTPLMADGKPVVVNEKQVEKFLYTTLKLNSTILRYS

SEQ ID NO: 23144 - protein, 413 aa, Glycine max
MFFLLCYTGVNLSCFLLDLLDAPSWRPRWKFHHWSLSLVGALLCIVIMFLISWSFTVVSLLLASLIYKYVSIQGKAGDWGDGFKSAYFQLALRSLRSLGASQVHPKNWYPIPLVFCRPWGKLPENVPCHPKLADFANCMKKKGRGMSIFVSILDGDYHECAEDAKTACKQLSTYIDYKNCEGVAEIVVAPNMSEGFRGIIQTMGLGNLKPNIVVMRYPEIWRRENLIEIPATFVGIINDCIVANKAVVIVKGLDEWPNEYQRQYGTIDLYWIVRDGGLMLLLSQLLLTKESFENCKIQVFCIAEDDADAEGLKADVKKFLYDLRMQAEVFVITMKWDAQMDGGGGSPAQDESMDAFTSAQQRIDNYLTQMKATAEREGTPLMADGKPVVVNEKQVEKFLYTTLKLNSTILRYS

SEQ ID NO: 23145 - DNA, 1461 bp, Glycine max
ggagctatcagatgttatatcaaattgcatgattctcccccaaagtcaacagccgaggaagataatgacatgtctaagttgcttccttctcaaaaaaagaaaatgaggcaaaaacagagaaaggcagaagcaagagctaagaaagaggcagaagaaaaaaatgaagaatcaagtgctggtgggatatcaaagtctgggaaacggcaggcaaaacccattgatccggatccacgtggtgaaaagttgttgcaggtggaagatcctttgttggaaggcacaaaatacttgaagctgctgcagaagaattcaccagattcagtggagacgcactttctctcttttgaattatatatgagaaaacagaggattttgcttgcattccaggctgtgaagcagttactgaggttggatgctgaacaccctgattctcatcgttgcttgattaaattcttcaataaagtgggatccatgaatgctcctgtgaccgacagtgagaaactcatttgtaatgtttagaagctgagcgccaaactattagtcagctgcatgggaaatctctgtttgagacaaataactctttcctagaaaaacatgaagattctttgacacacagagctgcttttggagaaatgttgtatattttggatcccagcagaaggtccgaggctgtcaagttgattgaggggtcagcaaataatcttgtgccaagaaatggagcgcttggaccaatcagggaatggacgcttaaagattgtatttcagttcataaacttcttgcaacagttcttgtcgatcaggatgctgcatcaagatggaaaatgcgttgtgctgagcttttcccatactccacatactttgagggaatttgcagctctgcctctcccaactctgcctttaaccagatacgtaagagcactgaaactgggagttctaaccattgggtgggtgatcacaatgcggaatccacatcaaatggcaaactagaggcattcaaagatctcactatctgacagggctaaaaaatggtttaccttgtttggactttggatgcttggtaatccaagctgctgcatttgaaaccccacctaaactaggctgcaattccgaacaaggttcatgctaagttttggtgccagtgttatcaaaagtcagatgtattttctttgctcgagttctccctctctaaactgacatgtattccatttgcaaatgtgtataattttaccgcaattatgttttagggttgaattttttatttgctcacccctttttttcccgagatgttaagagagaaggctccaaggatttgcaacttcgtccaagttttactaatttaggtcgcagggagagcttcagaaattttaagtttctggtcctgcattcggccagcacatatacacaccgagagcatgttgtactttcccctatttgttggcttatttatcatgtattaattatttg

SEQ ID NO: 23146 - protein, 171 aa, Glycine max
GAIRCYIKLHDSPPKSTAEEDNDMSKLLPSQKKKMRQKQRKAEARAKKEAEEKNEESSAGGISKSGKRQAKPIDPDPRGEKLLQVEDPLLEGTKYLKLLQKNSPDSVETHFLSFELYMRKQRILLAFQAVKQLLRLDAEHPDSHRCLIKFFNKVGSMNAPVTDSEKLICNV

SEQ ID NO: 23147 - protein, 148 aa, Glycine max
MSKLLPSQKKKMRQKQRKAEARAKKEAEEKNEESSAGGISKSGKRQAKPIDPDPRGEKLLQVEDPLLEGTKYLKLLQKNSPDSVETHFLSFELYMRKQRILLAFQAVKQLLRLDAEHPDSHRCLIKFFNKVGSMNAPVTDSEKLICNV

SEQ ID NO: 23148 - protein, 137 aa, Glycine max
MRQKQRKAEARAKKEAEEKNEESSAGGISKSGKRQAKPIDPDPRGEKLLQVEDPLLEGTKYLKLLQKNSPDSVETHFLSFELYMRKQRILLAFQAVKQLLRLDAEHPDSHRCLIKFFNKVGSMNAPVTDSEKLICNV

SEQ ID NO: 23149 - DNA, 1235 bp, Glycine max
accttttgcttttaagagagtggatgctatgctctacattgcaaactttgattctgaattagaataccttaagaagtcctttgaaactctggaggtggcctgtgaggaattaaggaaaagccgcatgtttctgaagatactcgaagctgttctcagaacaggaaatcgaatgaatgttggaaccaatcgtggtgatgctcatgcgttcaaactggacacacttttgaagttagttgatattaaagggactgatggaaagaccactctcttacatttcgttgtatgggaaattgttagaactgagggttctcatatttctggttctaacaataaccatgccgctgacaatgaccaccaatatactcttcaagatgaggttgacttcaaaaagcttggtctgcaagttgtttcaggtttgagtggggagctcaccaatgttaagaaaacagctgctatggattcggacatgctcagtagtgatgttgctaaacttgccagaggaatcgaaaaaattgtgcaagttgtaaaattgaacgaggagtcacctttgaaagaaactaaccaaaaattttctgacgcaatgaaatgtttcttggagaggggagagcaagagatttcaacaatccagggccaagagaaaaatgccctctcttcagtgaaggagataactgagtatttccatggaaattcagcaaaggaagaagctcatccatttagaattttcatggttgtgagggatttcctttcaatcctagatggtgtttgcaaggaaattggtaaagtaaatgagaggacgttggttggttcccgtcaatctgtaatgcctgcaaatcctataatgcaaacctttttccctgaaattattggtaagcaaccatctgattcctctgaatctgattaacctctcaaagccaatctgacccagatgtaacaggttgaagtagtttgggcatgtttggtcattgatgggttggattttcatcatccaaatattatcatgtgaagtgacattttcactcaaatctcactgaaccagaaacccagctttacccctatgatgatgaaacaaagctcatgctatcatagctcttgttttcctgcctatgtagctctgtatatgttttactgcctagattatataatgagtgcattcttttctacttttgtgctaggttggctgcttctctatatttgtattcacaaatgatcaatgacaaattttagatttgctttag

SEQ ID NO: 23150 - protein, 299 aa, Glycine max
PFAFKRVDAMLYIANFDSELEYLKKSFETLEVACEELRKSRMFLKILEAVLRTGNRMNVGTNRGDAHAFKLDTLLKLVDIKGTDGKTTLLHFVVWEIVRTEGSHISGSNNNHAADNDHQYTLQDEVDFKKLGLQVVSGLSGELTNVKKTAAMDSDMLSSDVAKLARGIEKIVQVVKLNEESPLKETNQKFSDAMKCFLERGEQEISTIQGQEKNALSSVKEITEYFHGNSAKEEAHPFRIFMVVRDFLSILDGVCKEIGKVNERTLVGSRQSVMPANPIMQTFFPEIIGKQPSDSSESD

SEQ ID NO: 23151 - protein, 290 aa, Glycine max
MLYIANFDSELEYLKKSFETLEVACEELRKSRMFLKILEAVLRTGNRMNVGTNRGDAHAFKLDTLLKLVDIKGTDGKTTLLHFVVWEIVRTEGSHISGSNNNHAADNDHQYTLQDEVDFKKLGLQVVSGLSGELTNVKKTAAMDSDMLSSDVAKLARGIEKIVQVVKLNEESPLKETNQKFSDAMKCFLERGEQEISTIQGQEKNALSSVKEITEYFHGNSAKEEAHPFRIFMVVRDFLSILDGVCKEIGKVNERTLVGSRQSVMPANPIMQTFFPEIIGKQPSDSSESD

SEQ ID NO: 23152 - protein, 258 aa, Glycine max
MFLKILEAVLRTGNRMNVGTNRGDAHAFKLDTLLKLVDIKGTDGKTTLLHFVVWEIVRTEGSHISGSNNNHAADNDHQYTLQDEVDFKKLGLQVVSGLSGELTNVKKTAAMDSDMLSSDVAKLARGIEKIVQVVKLNEESPLKETNQKFSDAMKCFLERGEQEISTIQGQEKNALSSVKEITEYFHGNSAKEEAHPFRIFMVVRDFLSILDGVCKEIGKVNERTLVGSRQSVMPANPIMQTFFPEIIGKQPSDSSESD

SEQ ID NO: 23153 - DNA, 1088 bp, Glycine max
atatctgctcactataatccttatgcatcaacctttgagaaaccactaagttccaaattcagttcaagtatttatagacaggaagatgaaataatccatggtaacaattatgcttcttctagattgaaccatactcctgtaaatggggaaggtgatggtgtggttggattaagacagtcagcttcctcatcaaaatcagctagagctcttggtcagattttacctaggtctggtggtgaccaatatgacccgatttttgacagcattgaaccatcatcctcttctctgaaaaaaattgattttgatcagaagaaggaagttacaggtgaatccaacatcagcctaaggcccaaaagttcttacatgtctttggactcggatgagaagaacaagcaggaggaggttggggctgttgcctctaccacttctcaaaatattgatgaatatggtgaaacagcagatgcagaagttggtgctgttgaaaatgagagcctaagtgatgatgtggatgttgcaaaactgacttcaggggaggttgagattaatcaggtcaagtctcctgggaaaagaaaaaagagtaaggattccagatcaatgaaattgttcaaagtttccattgcaaactttgtaaaggaggttttgaaaccatcatggcggcaaggtaatatgagtaaggtggctttcaaaaccattgtgaaaaagactgtggataaagtgtcaggagccatgaaaggccaccgtgtacccaagtcccaaacgaagataagtcaatatattgattcatcacagcgaaagttgactaaacttgtgatgggttatgttgacaagtatgtcaaggtatgaaagtgaagtatgcaaatgtttctccaacattaaatgtcaatataggtgcatcatttcaacaggaaacatcgatgcttccctggagttgtctcctctcaattaaaggcatactaggtaggtgcgagaatgattgatcaacattcaagttcctcaagttttggtcgtccccaatatgtatgtattgtattttctacttgttattctttgtgatttgcttttaatttatagtttccacctcatgttat

SEQ ID NO: 23154 - protein, 280 aa, Glycine max
ISAHYNPYASTFEKPLSSKFSSSIYRQEDEIIHGNNYASSRLNHTPVNGEGDGVVGLRQSASSSKSARALGQILPRSGGDQYDPIFDSIEPSSSSLKKIDFDQKKEVTGESNISLRPKSSYMSLDSDEKNKQEEVGAVASTTSQNIDEYGETADAEVGAVENESLSDDVDVAKLTSGEVEINQVKSPGKRKKSKDSRSMKLFKVSIANFVKEVLKPSWRQGNMSKVAFKTIVKKTVDKVSGAMKGHRVPKSQTKISQYIDSSQRKLTKLVMGYVDKYVKV

SEQ ID NO: 23155 - protein, 159 aa, Glycine max
MSLDSDEKNKQEEVGAVASTTSQNIDEYGETADAEVGAVENESLSDDVDVAKLTSGEVEINQVKSPGKRKKSKDSRSMKLFKVSIANFVKEVLKPSWRQGNMSKVAFKTIVKKTVDKVSGAMKGHRVPKSQTKISQYIDSSQRKLTKLVMGYVDKYVKV

SEQ ID NO: 23156 - DNA, 1491 bp, Glycine max
ttaagctggtgagagtgggtcatcctgcacgtttattgcctcaagtattggacagtgcgctggatgctcaggtactacgaggagataatagtggtcttgcaaatgacattcggaaagaaatgaaggcattgaatggaaagctgctgaaaaccaaagacagaaatactagaaaggacatacaaagggaacttaggactctatccaaagaagaacgtaaaaggcagcagcttgctgtaacagatgtacttaaaagtgcagatgtaatattaactactttgattggggctttctctaaaaaactagacagcacttcatttgatttggtgattattgatgaagctgctcaagcacttgagatagcatgctggatacctatactgaagggttcaagatgtatacttgcaggggaccatcttcaacttcctccaaccattcaaagtgttgaagccgagaagaaaggcttaggaagaacgctctttgaacgacttgcagaaatgtatggagatgaaatcacatcaatgcttacaatccagtatcgtatgcatgaacttatcatggattggtcttctaaagagctttacaacagtaagatcaaggctcatccaagtgttactgcgcatatgttatatgatcttgagggtgtgaagcggacaaattctactgaaccaaccctccttctcatagacacagctggatgtgacatggaagaaaagaaagatgaagaagatagcacctttaatgaaggtgaagctgaggttaccgtgactcacgcaaagagactagtgcaaagtggggtgcttccttctgatattggaattattactccgtatgctgcacaggttgttttactcaagatgttgaaaaacaaggaggaccagctgaaggatgttgaaatctcaacagttgatggattccagggaagggagaaggaagccattattatatcaatggttcgatcaaattcaaaaaaagaggttggctttctgagtgatcgccggcgaatgaatgtggctgtgacacggtccagaaggcaatgctgtcttgtctgtgacacagagacagtcagtggtgacggatttctaaagcgattgattgagtattttgaggagcatggtgaatatctaagtgcatctgagtaccagaatgagtaggccagattcacagggttaagatttctattgtcgcactctcatgtgatcaatttgttgattttggtgatgttgctagtagatctgtgtaggtttctcaaatctttcctgagctatttggaatggaaaaaggttgatagtttttatagaaccattttatgtagaagaaaaaaattcttggtatctactaatgttattactttgattttgttaagaaacaatattactttcagaataatgtggacttggagtagtcccttctatttacgtaatctttttcatatgtagtatatgatacttgtaaattgtaaccatgccagttttaatttaaaatacttcttct

SEQ ID NO: 23157 - protein, 382 aa, Glycine max
KLVRVGHPARLLPQVLDSALDAQVLRGDNSGLANDIRKEMKALNGKLLKTKDRNTRKDIQRELRTLSKEERKRQQLAVTDVLKSADVILTTLIGAFSKKLDSTSFDLVIIDEAAQALEIACWIPILKGSRCILAGDHLQLPPTIQSVEAEKKGLGRTLFERLAEMYGDEITSMLTIQYRMHELIMDWSSKELYNSKIKAHPSVTAHMLYDLEGVKRTNSTEPTLLLIDTAGCDMEEKKDEEDSTFNEGEAEVTVTHAKRLVQSGVLPSDIGIITPYAAQVVLLKMLKNKEDQLKDVEISTVDGFQGREKEAIIISMVRSNSKKEVGFLSDRRRMNVAVTRSRRQCCLVCDTETVSGDGFLKRLIEYFEEHGEYLSASEYQNE

SEQ ID NO: 23158 - protein, 343 aa, Glycine max
MKALNGKLLKTKDRNTRKDIQRELRTLSKEERKRQQLAVTDVLKSADVILTTLIGAFSKKLDSTSFDLVIIDEAAQALEIACWIPILKGSRCILAGDHLQLPPTIQSVEAEKKGLGRTLFERLAEMYGDEITSMLTIQYRMHELIMDWSSKELYNSKIKAHPSVTAHMLYDLEGVKRTNSTEPTLLLIDTAGCDMEEKKDEEDSTFNEGEAEVTVTHAKRLVQSGVLPSDIGIITPYAAQVVLLKMLKNKEDQLKDVEISTVDGFQGREKEAIIISMVRSNSKKEVGFLSDRRRMNVAVTRSRRQCCLVCDTETVSGDGFLKRLIEYFEEHGEYLSASEYQNE

SEQ ID NO: 23159 - protein, 218 aa, Glycine max
MYGDEITSMLTIQYRMHELIMDWSSKELYNSKIKAHPSVTAHMLYDLEGVKRTNSTEPTLLLIDTAGCDMEEKKDEEDSTFNEGEAEVTVTHAKRLVQSGVLPSDIGIITPYAAQVVLLKMLKNKEDQLKDVEISTVDGFQGREKEAIIISMVRSNSKKEVGFLSDRRRMNVAVTRSRRQCCLVCDTETVSGDGFLKRLIEYFEEHGEYLSASEYQNE

SEQ ID NO: 23160 - DNA, 1634 bp, Glycine max
agcagcggcagaaggtggaagtgtacaatgagattctccgccgcttgaaggattccggccacgaagaagctatgcaacctggcttccacgatcagctttgggctcacttcaatcgcctccctacacggtatgcgctggatgtgaatgtggaaagggcggcagatgttctcatgcacaagagattgctgcatttggcgcatgatcctgctaataggccttcaattgaagttcgattagttcaggtttatcccataaccgatggaaactcagctgacacttttgaatcagatgatcctgggatagaatctggacaaagttcttcaaagtactcaagcagacagagtatacatccacctcctgcttttggttcttctcctaatcttgaagcactggctcttgaagcaaataattctgaagaagacatagaagaggaacaatctgtacatgccaatgttcaatattcacggcccatgcatgaaatcaccatctcaacagatgacaagcccaagcttctcagtcagttaactgctttgcttgctgagattggactgaacatccaagaagcacatgcattttctacaactgatggtttctcattagatgtgtttgttgttgaaggatgaccctatgaggaaacagaaaagcttaaagcagctttggaaagtgaagtcttgaagaagattgagagacaggtgaggtctagtccacaatccgtatcttcagttgacgagcctgatcaagcaaagttgtacagtgaactggatcatttgacaataccaaatgatgggacagatgtttgggaaatagatcctaaacatttgaaatatggaactcaaattgcatctgggtcatatggtgaactatttaaaggtgtatattgtagccaggaagtggccatcaaagttctcaaggctgagcatgtagattcagaattgcagagagagttcgcacaggaagtctatatcatgagaaaggttcgacacaagaatgttgtacaattcataggagcttgcaccaagtccccacgcttatgcatagtaacagaatttatgtctggtggaagtgtgtatgactacctacataagcagaagggcttttttaaatttcctacactgctcaaagtagcaattgatgtttccaaaggaatgaactacttgcaccaacataatataatccatagagacttgaaggctgccaaccttttgatggatgaaaattgtactgtaaaggtcgctgattttggggttgctagagttaaagctcaatctggcgtcatgactgcagaaactggaacatatcgatggatggctcctgaggttatagaacacaagccgtatgatcacaaggctgatgtatttagttttggaattgttttatgggagttgctcaccggaaagcttccatacgaatatttaacccccctacaggcagctataggagtggttcaaaagggtttgcgacccaccatcccgaagaacactcatccaaagtttgtggagcttcttgagaggtcttggcagcaagatcctacattgagacctgatttctccgaaattatcgagatcctgcagcagttagcaaaggaggttggagatggagaggagcggcacaaggataaatctggaggactcctg

SEQ ID NO: 23161 - protein, 223 aa, Glycine max
MRKVRHKNVVQFIGACTKSPRLCIVTEFMSGGSVYDYLHKQKGFFKFPTLLKVAIDVSKGMNYLHQHNIIHRDLKAANLLMDENCTVKVADFGVARVKAQSGVMTAETGTYRWMAPEVIEHKPYDHKADVFSFGIVLWELLTGKLPYEYLTPLQAAIGVVQKGLRPTIPKNTHPKFVELLERSWQQDPTLRPDFSEIIEILQQLAKEVGDGEERHKDKSGGLL

SEQ ID NO: 23162 - protein, 206 aa, Glycine max
QRQKVEVYNEILRRLKDSGHEEAMQPGFHDQLWAHFNRLPTRYALDVNVERAADVLMHKRLLHLAHDPANRPSIEVRLVQVYPITDGNSADTFESDDPGIESGQSSSKYSSRQSIHPPPAFGSSPNLEALALEANNSEEDIEEEQSVHANVQYSRPMHEITISTDDKPKLLSQLTALLAEIGLNIQEAHAFSTTDGFSLDVFVVEG

SEQ ID NO: 23163 - protein, 195 aa, Glycine max
MSGGSVYDYLHKQKGFFKFPTLLKVAIDVSKGMNYLHQHNIIHRDLKAANLLMDENCTVKVADFGVARVKAQSGVMTAETGTYRWMAPEVIEHKPYDHKADVFSFGIVLWELLTGKLPYEYLTPLQAAIGVVQKGLRPTIPKNTHPKFVELLERSWQQDPTLRPDFSEIIEILQQLAKEVGDGEERHKDKSGGLL

SEQ ID NO: 23164 - DNA, 1836 bp, Glycine max
gagatgcagtatttgaagagcttcggccacattttctaactctagcattcagcgcttatgctgttcacttagtgaagaagatgctcgacaacgcttccaagaaacaactagcaggctttatctccactctccgtggtcatgttgctcctcttcttcgccatatggttggatcgattgttgttgagcatgcttatgagttagcaaatgctgcacagaagcaagaactgctttcggaattatactccacagaacttcagttgtttaaggatctagtctcattgaaagagagcagattatcagatgtgatgtccaagttgggtctacagaaaggttcagttctgcgacacatgacgtcagtgattcagccaattttagagaaagggatagttgaccactctattttacacagagtcttaatggaatattttagcattgctgataagtcatctgtcacagatataatccaacagttatcaagtccactcattgttagaatgattggtacaagggatggagccaaaattggaattctttgtgtaaaatatgggaatgccaaggaaaggaagaagattatcaaaggattaaaggggcacatagacaaaacagcttatcatcaatatgggtgcatggtgctggtttgcatcctttctgttgttgacgacacaaaactgattacaaaggttatcattcgtgagcttcagtctattctaaaggagcttgttctggataagaatggaaggcgtctcttactccaattactacatcctaatagttcacgctatttcagtcctgatgatcttgcttctctgaatttatctataccttctctgtctctcaaggatcagtcagaagcaagctttctgacagaaacttcaaaggtttcacttggtgacaaggaatccaaggaagacatagaggtggcagtggatgaagttaataaagataaaacttctgcggatgattctgacctagctgagagtgggaaaaaagacccatttgtcagaaggcaggagctattgatcaagagtggacttgcagatagtcttcttgatatatgtatcgagagcgtgggagaactgatacggtcaaattttggcaaagaggtcttgtatgaggtaataaatatgatattgatattataatttcacaagttctttaaatttgttagcaagcattgcagttttggtcctcaattgcacaagcaggttgcaacagggggttctgatggcataatgcacccagttttggatgataagataaattctctccacaacgctgtagcttctcttgcagcactgcctaaatcagaagattcacaagaggagcatgtccttgaaaatttccattcaagtcgcaccattagaaaactgattttggattgccccaactttgcttccaccttatgggaaaaagctttaaaagggaaaagtgagttatgggtgcatggccacagctgtaaggttatttctgcatttttggaatcaccagatccgactgtactaaaacttgttaaaaaagagctacagcctttaattgacattggaattctcaagaaccctaagcctatagaacaagcaaaccaataattgtcatgtatggagaagggagctatatctcaaagggacaggtttggcccaagttatcagtggctaagttatgatgtggaggcagtagctagcttcttttctggatttgtagataatgagttaaaaggctcaaactaaatttgatcgagaaagctgctgtggtaattttgacaaccagaagaaacagtaaaaattacttgatgtaatgatctacttttgcatatttttaaaatgcagcaattttgcaacg

SEQ ID NO: 23165 - protein, 379 aa, Glycine max
DAVFEELRPHFLTLAFSAYAVHLVKKMLDNASKKQLAGFISTLRGHVAPLLRHMVGSIVVEHAYELANAAQKQELLSELYSTELQLFKDLVSLKESRLSDVMSKLGLQKGSVLRHMTSVIQPILEKGIVDHSILHRVLMEYFSIADKSSVTDIIQQLSSPLIVRMIGTRDGAKIGILCVKYGNAKERKKIIKGLKGHIDKTAYHQYGCMVLVCILSVVDDTKLITKVIIRELQSILKELVLDKNGRRLLLQLLHPNSSRYFSPDDLASLNLSIPSLSLKDQSEASFLTETSKVSLGDKESKEDIEVAVDEVNKDKTSADDSDLAESGKKDPFVRRQELLIKSGLADSLLDICIESVGELIRSNFGKEVLYEVINMILIL

SEQ ID NO: 23166 - protein, 353 aa, Glycine max
MLDNASKKQLAGFISTLRGHVAPLLRHMVGSIVVEHAYELANAAQKQELLSELYSTELQLFKDLVSLKESRLSDVMSKLGLQKGSVLRHMTSVIQPILEKGIVDHSILHRVLMEYFSIADKSSVTDIIQQLSSPLIVRMIGTRDGAKIGILCVKYGNAKERKKIIKGLKGHIDKTAYHQYGCMVLVCILSVVDDTKLITKVIIRELQSILKELVLDKNGRRLLLQLLHPNSSRYFSPDDLASLNLSIPSLSLKDQSEASFLTETSKVSLGDKESKEDIEVAVDEVNKDKTSADDSDLAESGKKDPFVRRQELLIKSGLADSLLDICIESVGELIRSNFGKEVLYEVINMILIL

SEQ ID NO: 23167 - protein, 326 aa, Glycine max
MVGSIVVEHAYELANAAQKQELLSELYSTELQLFKDLVSLKESRLSDVMSKLGLQKGSVLRHMTSVIQPILEKGIVDHSILHRVLMEYFSIADKSSVTDIIQQLSSPLIVRMIGTRDGAKIGILCVKYGNAKERKKIIKGLKGHIDKTAYHQYGCMVLVCILSVVDDTKLITKVIIRELQSILKELVLDKNGRRLLLQLLHPNSSRYFSPDDLASLNLSIPSLSLKDQSEASFLTETSKVSLGDKESKEDIEVAVDEVNKDKTSADDSDLAESGKKDPFVRRQELLIKSGLADSLLDICIESVGELIRSNFGKEVLYEVINMILIL

SEQ ID NO: 23168 - DNA, 1450 bp, Glycine max
aagaagaaattcgacaaaaagaacgatgccaaggcatgggtcaacactgtcaccgaatccttatccgaacgcatccacaacaaacactggcttcaggccctccaggtatttgatatgcttagagagcaaaccttttaccaacccaaagaagggacttacatgaaactcattgtgttgcttggaaaatctggtcaaccccaccgtgcccatcagctttttaccacaatgattgaagaaggtttagaacctactcctgaactgtacacagcgttgctcgctgcgtattgcaggagcaacatgattgatgaggcgttttcagttcttaatgagatgaagaagcttcctcgttgccagcctgatgttttcacttacagtaccttgatcaaagtttgtgtcgatgctttcaaatttgatttggttgagttgctgtatgaagaaatggctgaaaggtctatcatgccaaacacagtcactcagaacattgttttgggtggttatggcaaggcgggcatgtttgatcagatggagaaagtactgtccagcatgctgctgagcactacatgcaagcctgatgtttggacaatgaacacaatcatcagtgtttttggtaacatgggtcagattgatatgatggaaaaatggtatgaaaaattccgttattttgggatagaaccagagacgcgcacttttaatattttgatcggtgcctatgggaagaaaagaatgtatgacaaaatgtcatctgttatggagtatatgcgtaagttgcaatttccatggacgacctctacttacaacaatgtgattgaggcatttgcagatgcaggtgatgcgaagcacatggaatgtacatttgatcagatgcgtgctgagggtatgaaagcagataccaaaactttatgctgccttatcaatggttatgcaaatgctggtctcttccataaagtaattagcagtgttcgcttggctggaaagctcgagatacctgagaatatcaccttttataatgcggtcttatctgcgtgtgcaaaggcagaggatttgatggaaatggagagagttttcaagcgtatgaaagatagccagtgtcagccagatgacacaacatacacgatcatgatcgaggcatatagaaaagagggtatgaatgacaagatatactatttggagcaggaaaagcagacgatgatgactgatgataaaaaagttagccagtttgagaatgaaatcttgatttgatttttgatttatagttcagactgctaatgcatctgtattctatacctccattttccgggagcggctgttaatttttgttttgacatggagtgaccagttgctgagttgtgctatcaaacttcatttttcacgatgaatgacagctagtcctgcctaacttctgtatgttgttcaagttaaatttatgttttagcatccatttgattcgcag

SEQ ID NO: 23169 - protein, 412 aa, Glycine max
KKKFDKKNDAKAWVNTVTESLSERIHNKHWLQALQVFDMLREQTFYQPKEGTYMKLIVLLGKSGQPHRAHQLFTTMIEEGLEPTPELYTALLAAYCRSNMIDEAFSVLNEMKKLPRCQPDVFTYSTLIKVCVDAFKFDLVELLYEEMAERSIMPNTVTQNIVLGGYGKAGMFDQMEKVLSSMLLSTTCKPDVWTMNTIISVFGNMGQIDMMEKWYEKFRYFGIEPETRTFNILIGAYGKKRMYDKMSSVMEYMRKLQFPWTTSTYNNVIEAFADAGDAKHMECTFDQMRAEGMKADTKTLCCLINGYANAGLFHKVISSVRLAGKLEIPENITFYNAVLSACAKAEDLMEMERVFKRMKDSQCQPDDTTYTIMIEAYRKEGMNDKIYYLEQEKQTMMTDDKKVSQFENEILI

SEQ ID NO: 23170 - protein, 374 aa, Glycine max
MLREQTFYQPKEGTYMKLIVLLGKSGQPHRAHQLFTTMIEEGLEPTPELYTALLAAYCRSNMIDEAFSVLNEMKKLPRCQPDVFTYSTLIKVCVDAFKFDLVELLYEEMAERSIMPNTVTQNIVLGGYGKAGMFDQMEKVLSSMLLSTTCKPDVWTMNTIISVFGNMGQIDMMEKWYEKFRYFGIEPETRTFNILIGAYGKKRMYDKMSSVMEYMRKLQFPWTTSTYNNVIEAFADAGDAKHMECTFDQMRAEGMKADTKTLCCLINGYANAGLFHKVISSVRLAGKLEIPENITFYNAVLSACAKAEDLMEMERVFKRMKDSQCQPDDTTYTIMIEAYRKEGMNDKIYYLEQEKQTMMTDDKKVSQFENEILI

SEQ ID NO: 23171 - protein, 359 aa, Glycine max
MKLIVLLGKSGQPHRAHQLFTTMIEEGLEPTPELYTALLAAYCRSNMIDEAFSVLNEMKKLPRCQPDVFTYSTLIKVCVDAFKFDLVELLYEEMAERSIMPNTVTQNIVLGGYGKAGMFDQMEKVLSSMLLSTTCKPDVWTMNTIISVFGNMGQIDMMEKWYEKFRYFGIEPETRTFNILIGAYGKKRMYDKMSSVMEYMRKLQFPWTTSTYNNVIEAFADAGDAKHMECTFDQMRAEGMKADTKTLCCLINGYANAGLFHKVISSVRLAGKLEIPENITFYNAVLSACAKAEDLMEMERVFKRMKDSQCQPDDTTYTIMIEAYRKEGMNDKIYYLEQEKQTMMTDDKKVSQFENEILI

SEQ ID NO: 23172 - DNA, 1209 bp, Glycine max
gtctgttgatttctctttgttatgccctactaaatttgccagtgggagtgatgattgttctgtgaaactgtggaatatcaatgagaaaaacagtttagccacaatcaggaatgttgctaatgtctgctgtgttcagttctctactcattcctctcatttgctggcctttggatctgctgattactcagcatattgctatgatcttcgcaatcttagaaacccttggtgtgtgttggctggccatcgtaaagctgtaagctatgtcaaattcttggactctgaaacacttgtttctgcatcaaccgataacatgttgaagatctgggatctcaataaaacctctcctgtgggtccatcaactagtgcttgcagcttaaccctgtctggacatactaatgagaagaattttgtgggtttatcagttgccgatggatatatagcatgtggttcagaaacaaatgaggtttatgtctaccataaatctcttcccatgccagtcacttcgcacaggtttgggtccattgatcctatttctggtgaagagacagatgatgacaatggtttgtttgtttcaagtgtgtgctggagaggaaaatcagacatggttgttgcagccaattcaagtggatgtataaaagttctacagatggtttgagagaaagcttgcccttacagtttgtacagtcctctagttttagtgttttacccgtgtcactcaagttaatcccatcaattttctccgagtgtatccaaaaattctgttgacgtcataatttgatgtagaagggattatttcaggcataattagaagtagaagcagtctcaatcttaatccagatcttctaatttgaaggtgggattaaacataaggaatcttaatctagatattctaatttgaaggtggctttaaaccagaatttcaatctggcatttgtagaaaaggcctgttatgcataaagtctcgaggatcaatttgaaaacaggaagcagattcagtgtaaacgattaacacctaagaatggacatggcaggaatttctactaacttttttagtttcaatattatagtcaatatctctgaatgtagtgtaagtgtatctttgagctagcaattgtgcacttgtaatgagatgtttgtagcttaaagcataaagcaactccagtaacgctaacaccttcaaaggaaatcatctttgggtttttccccgac

SEQ ID NO: 23173 - protein, 217 aa, Glycine max
SVDFSLLCPTKFASGSDDCSVKLWNINEKNSLATIRNVANVCCVQFSTHSSHLLAFGSADYSAYCYDLRNLRNPWCVLAGHRKAVSYVKFLDSETLVSASTDNMLKIWDLNKTSPVGPSTSACSLTLSGHTNEKNFVGLSVADGYIACGSETNEVYVYHKSLPMPVTSHRFGSIDPISGEETDDDNGLFVSSVCWRGKSDMVVAANSSGCIKVLQMV

SEQ ID NO: 23174 - protein, 114 aa, Glycine max
MLKIWDLNKTSPVGPSTSACSLTLSGHTNEKNFVGLSVADGYIACGSETNEVYVYHKSLPMPVTSHRFGSIDPISGEETDDDNGLFVSSVCWRGKSDMVVAANSSGCIKVLQMV

SEQ ID NO: 23175 - DNA, 2311 bp, Glycine max
aagcgtcgagcctctgttctgttcatttgcatttccatttttcacactctctctgctttcaccatgtggacacttcgtcgagcttctcttcgtctcagtacgagccaaggacttaacgcgggagctacccgtgcttcggctgtcaaattagtgccaatcactgttgaagaaaatgaggctggtatccctcagtctcgtcaaatcactcacagtagatttctgtccgctgacacattttgccgcacgggtcgggtgtccctgaaatttgctgtgggcacgcgtgaactttcctcacaagctggtgctagcagcacgaaagtggatgatgatgatttggagggtgggttgtctgagctggagatacagggaagtaatgatgaatctgatgctgacctgtctgatgaagacgaggatggtggaaaaccagttgatgagatggacttatcagatgctgacccaaccaagaaaaaatcacaaggtagaaggactcaatcggaactattcaaggcaattgcaaatgctcctgggttgtctgttgattctgctctcaataagtgggttgagcatgggaaagaactaagtcggaaggagatcttgttggctgtgcgtgagcttcggagacgtaaaatgtatgggagggctttccagctctttcagtggttagagtcaaacaagaagcttgaatttatggagagtgattatgcttctcaacttgatttgattgccaagttgcgtggcctcccaaaggcagagaaatacattgagagtgttccagaatcttttagaggctagctattataccgaacattactggctaactgtgctagtcagaacaatttgattgcaacagagaaaatattcaacaaaatgaaggacttggatttaccacttacagcatttgcttgtaaccagttgctgcttttgtataagaagctggacaagaagaaaatagctgatgttttactgctgatggaaaaagagaatgtcaaaccttctctttttacttacagaatcttaatagactcaaagggccagtccaatgatattgctggaatggagcaagtgtttgagacaatgaaggaagaaggctttgaaccagacatccaaatacaggcactcttggctaggcattacacctcatctgggcttaaagaaaaagctgaagctatgttgaaggagatggaaggtgaaaacttgaaagagaatcagtgggtatgtgcaactttgctccgcctttatgcaaacctgggaaaggctgatgaagtggagagaatttggaaggtctgtgaatcaaaacctcgagttgaggactgcctggctgcagttgaagcctggggaaagttaaataaaattgaagaagcagaggcagtttttgagatggtgtcaaagaaatggaaacttaattccaagaattactcagttcttctgaagatttatgcaaataataagatgctaacgaagggtaaggaacttgtcaagctaatggctgatagtggggtgaggataggcccattaacatgggatgcacttgtgaaactgtatatccaagctggggaagttgagaaggcagactctattttgcataaggcaatccaacagaatcagctgcagccaatgtttaccacctatttggctattttagagcagtatgcaaagaggggtgacgtccataactcggagaagattttccttaaaatgagacaagcaggttatacgtcccgaataagtcagttccaagttctaatacaggcatatgtaaacgccaaggttccagcgtatggaatcagagagaggattaaagctgataacctatttcccaacaaaacgttggctaaccagttggctctagttgatgcatttaggaaaaatgcagtttccgatttgcttgattgaggcatatttagtattctgcaagggttgtttcctacgctttccatgcaactattattattagttgaatagtagattgcacatttagtttgaatgaatgttgtcttgcactgctatctataagttagatacacttttgccttttaagcgcattatattaatgcttaaatactgcttttatgattttattatgcccgcttgtttttagttgtaaagctttctttttttaaaatttagaggctacaatcttcttcccgataggataacaaaatagtagataaatgttgttttgctccccttccctcttgagtgaaataaaattaatgctttatgtagtatcttagtatctggtcaaaatgaaaagaaaatgtagtatcttttcatcttcaaactaaataaattttactataaagttttcaac

SEQ ID NO: 23176 - protein, 341 aa, Glycine max
MKDLDLPLTAFACNQLLLLYKKLDKKKIADVLLLMEKENVKPSLFTYRILIDSKGQSNDIAGMEQVFETMKEEGFEPDIQIQALLARHYTSSGLKEKAEAMLKEMEGENLKENQWVCATLLRLYANLGKADEVERIWKVCESKPRVEDCLAAVEAWGKLNKIEEAEAVFEMVSKKWKLNSKNYSVLLKIYANNKMLTKGKELVKLMADSGVRIGPLTWDALVKLYIQAGEVEKADSILHKAIQQNQLQPMFTTYLAILEQYAKRGDVHNSEKIFLKMRQAGYTSRISQFQVLIQAYVNAKVPAYGIRERIKADNLFPNKTLANQLALVDAFRKNAVSDLLD

SEQ ID NO: 23177 - protein, 307 aa, Glycine max
MEKENVKPSLFTYRILIDSKGQSNDIAGMEQVFETMKEEGFEPDIQIQALLARHYTSSGLKEKAEAMLKEMEGENLKENQWVCATLLRLYANLGKADEVERIWKVCESKPRVEDCLAAVEAWGKLNKIEEAEAVFEMVSKKWKLNSKNYSVLLKIYANNKMLTKGKELVKLMADSGVRIGPLTWDALVKLYIQAGEVEKADSILHKAIQQNQLQPMFTTYLAILEQYAKRGDVHNSEKIFLKMRQAGYTSRISQFQVLIQAYVNAKVPAYGIRERIKADNLFPNKTLANQLALVDAFRKNAVSDLLD

SEQ ID NO: 23178 - protein, 279 aa, Glycine max
MEQVFETMKEEGFEPDIQIQALLARHYTSSGLKEKAEAMLKEMEGENLKENQWVCATLLRLYANLGKADEVERIWKVCESKPRVEDCLAAVEAWGKLNKIEEAEAVFEMVSKKWKLNSKNYSVLLKIYANNKMLTKGKELVKLMADSGVRIGPLTWDALVKLYIQAGEVEKADSILHKAIQQNQLQPMFTTYLAILEQYAKRGDVHNSEKIFLKMRQAGYTSRISQFQVLIQAYVNAKVPAYGIRERIKADNLFPNKTLANQLALVDAFRKNAVSDLLD

SEQ ID NO: 23179 - DNA, 1359 bp, Glycine max
acattgccacataacacaacatcgaaaccctctctccctctccctctcttcctctccctctcttccaaccattccgaatgtgaacaagttgttgttgttgaacggtattatatatagtgtgtagtgtggtggtttttttttctcttcttgaaggtgcaaaaatgaatgatggtagacaaatgggggtgcattacgtagacgctgggttcccttatgctgttaatgataacttcgtggattttttccaaggattcactcatgtgcccgtcaattatgcctttgctggctcaattcctgatcaggaaagtgtctactggtcaatgaacatgaatccctataagtttggattgtctggtcctgggagtacatcttactatagttcttatgaggtaaatggtcatttgccgagaatggagatagatagggctgagtgggaatacccttcgacaattaccactgtggaagaaccagctacaacagattctccacctagaagagatggagtcacgagcatgcagaccatccctgaagaatgcagtccaaatcatcatgagtccaacagtagtagccaggtcatatggcaagacaacatctatcctgatgatatgacttatgaggaactactggacctgggggaggcagttgggactcaaagccgaggtctttcccaagaacttattgatatgcttccaacctcaaagtacaaatttggtagtttattcaagagaaaaaattctgggaaaaggtgtgtaatttgtcagatgacatacagaagaggtgaccagcaaatgaaattgccatgcagccatgtctatcatggtgaatgcatcaccaagtggcttagcattaacaagaaatgtcctgtttgcaacactgaggtttttggcgaggaatcaacgcattagcatcaaggtggcaaaagaggatcctttttgctctattaatttttgcttctcatccaactcaccctctccctcccattctcttttttaagttttaattttttacacgtaggtaggtgtagtatgaagaactatggcagctctcacacaatatatgttttgtttactagaaacaacctattggagtcgcatcttcttgtggttaatgtgtgattttgtgtgtattcatgcaatatatattctcttagcttttgtgccccttcctttggtatttgggattgaaaaatctgcttctcagccattgaccaacatagaagtgttgagattttggagtaacaatctcatgagcatgctaaatggattgaaaaaggaaatgtgtggaatgctcggggatatggagatcttaatttgagaaaagtgcatgtttcgatatccagtgaaaaattacttgaagcat

SEQ ID NO: 23180 - protein, 247 aa, Glycine max
MNDGRQMGVHYVDAGFPYAVNDNFVDFFQGFTHVPVNYAFAGSIPDQESVYWSMNMNPYKFGLSGPGSTSYYSSYEVNGHLPRMEIDRAEWEYPSTITTVEEPATTDSPPRRDGVTSMQTIPEECSPNHHESNSSSQVIWQDNIYPDDMTYEELLDLGEAVGTQSRGLSQELIDMLPTSKYKFGSLFKRKNSGKRCVICQMTYRRGDQQMKLPCSHVYHGECITKWLSINKKCPVCNTEVFGEESTH

SEQ ID NO: 23181 - protein, 241 aa, Glycine max
MGVHYVDAGFPYAVNDNFVDFFQGFTHVPVNYAFAGSIPDQESVYWSMNMNPYKFGLSGPGSTSYYSSYEVNGHLPRMEIDRAEWEYPSTITTVEEPATTDSPPRRDGVTSMQTIPEECSPNHHESNSSSQVIWQDNIYPDDMTYEELLDLGEAVGTQSRGLSQELIDMLPTSKYKFGSLFKRKNSGKRCVICQMTYRRGDQQMKLPCSHVYHGECITKWLSINKKCPVCNTEVFGEESTH

SEQ ID NO: 23182 - protein, 194 aa, Glycine max
MNMNPYKFGLSGPGSTSYYSSYEVNGHLPRMEIDRAEWEYPSTITTVEEPATTDSPPRRDGVTSMQTIPEECSPNHHESNSSSQVIWQDNIYPDDMTYEELLDLGEAVGTQSRGLSQELIDMLPTSKYKFGSLFKRKNSGKRCVICQMTYRRGDQQMKLPCSHVYHGECITKWLSINKKCPVCNTEVFGEESTH

SEQ ID NO: 23183 - DNA, 1349 bp, Glycine max
gatctaaatctaacggaaaatattaccttcattatctcagcttctatgaaaaagcaactatactcatcacccacttactcctcccaccaaaaatccacacccggtgttaacatgagagaaagattggttcgcttgactgaaactgtcaatgaactcagaaccaacgtcgaaaccgaagtccaaaaccaggataacctcgaaaaagttagctcaaagaactacactcttatgaacacacaaatcaaggctttgagaaaagctttcaacacccttgctgatgtgattatggaagagttggacgctattaaatcagatgttgctcgtgattctcaggaggctaatgccgctattttccgcaagcttgatgagcttggttcacaagttaatagacttcaaaatgagaagcaggatcaaagggaacaaatgagtaatgttgaacagagtttgagagaaagaatagaagctttggaaagaaagcaagatgagaccagtcaagatgtccaagcagtcgtagaaaacaccaaagaagacaatagagtcctttatgaaaagctccacagtgtcattagaagtaacacttcaaagattgaccagttagctcaggacaatgaaaatgtgaatattgctttagatgaattaaagaacaagagcaatactgatggttctaatataaaggacatattccacaagattggcgaagtggatgatgaactaaagcaccatactcatgaactagccaataagcttggtgataccagaaaccagattactacacttagagaaagcttaaagggagacatttcaaacgctgctaaagctcaaattgagataaccagaagggttgaagaagtgaacactagacttaatgagaaggttcatgctgatcagttaagtgctcaacaaagattctctgaaattgaggacttggtcaatcaagttcaacatgagttccaggataatgttcaagagttggcaaagattcacaaggaaagttcgactcagattattgtggactttgaaaaggcgattagttctattaataatgacaataagatcttgtataagaagtttgcagtattggaaggatcagtaggaaagaatagagaagatcttggggcgatgatatcagatcatgagcatagtgttagcagaaagaatgagcaacttaacagagcggtctttgatatatgcagacaattgaatattaataatcctttgctttcgtattgatttacttttgatttagtatgatccgttcaattttttttacttttgaaatttatttgcataaaaaactgactatgaatacttctataaagatttttatgaataaagatccttcttagaac

SEQ ID NO: 23184 - protein, 409 aa, Glycine max
DLNLTENITFIISASMKKQLYSSPTYSSHQKSTPGVNMRERLVRLTETVNELRTNVETEVQNQDNLEKVSSKNYTLMNTQIKALRKAFNTLADVIMEELDAIKSDVARDSQEANAAIFRKLDELGSQVNRLQNEKQDQREQMSNVEQSLRERIEALERKQDETSQDVQAVVENTKEDNRVLYEKLHSVIRSNTSKIDQLAQDNENVNIALDELKNKSNTDGSNIKDIFHKIGEVDDELKHHTHELANKLGDTRNQITTLRESLKGDISNAAKAQIEITRRVEEVNTRLNEKVHADQLSAQQRFSEIEDLVNQVQHEFQDNVQELAKIHKESSTQIIVDFEKAISSINNDNKILYKKFAVLEGSVGKNREDLGAMISDHEHSVSRKNEQLNRAVFDICRQLNINNPLLSY

SEQ ID NO: 23185 - protein, 394 aa, Glycine max
MKKQLYSSPTYSSHQKSTPGVNMRERLVRLTETVNELRTNVETEVQNQDNLEKVSSKNYTLMNTQIKALRKAFNTLADVIMEELDAIKSDVARDSQEANAAIFRKLDELGSQVNRLQNEKQDQREQMSNVEQSLRERIEALERKQDETSQDVQAVVENTKEDNRVLYEKLHSVIRSNTSKIDQLAQDNENVNIALDELKNKSNTDGSNIKDIFHKIGEVDDELKHHTHELANKLGDTRNQITTLRESLKGDISNAAKAQIEITRRVEEVNTRLNEKVHADQLSAQQRFSEIEDLVNQVQHEFQDNVQELAKIHKESSTQIIVDFEKAISSINNDNKILYKKFAVLEGSVGKNREDLGAMISDHEHSVSRKNEQLNRAVFDICRQLNINNPLLSY

SEQ ID NO: 23186 - protein, 372 aa, Glycine max
MRERLVRLTETVNELRTNVETEVQNQDNLEKVSSKNYTLMNTQIKALRKAFNTLADVIMEELDAIKSDVARDSQEANAAIFRKLDELGSQVNRLQNEKQDQREQMSNVEQSLRERIEALERKQDETSQDVQAVVENTKEDNRVLYEKLHSVIRSNTSKIDQLAQDNENVNIALDELKNKSNTDGSNIKDIFHKIGEVDDELKHHTHELANKLGDTRNQITTLRESLKGDISNAAKAQIEITRRVEEVNTRLNEKVHADQLSAQQRFSEIEDLVNQVQHEFQDNVQELAKIHKESSTQIIVDFEKAISSINNDNKILYKKFAVLEGSVGKNREDLGAMISDHEHSVSRKNEQLNRAVFDICRQLNINNPLLSY

SEQ ID NO: 23187 - DNA, 1322 bp, Glycine max
gaatcaattgatgtcttgtccttctcctccctcagttcctcttcactccctttcattctccctcgcctcacacgcacacgcacacttgtcattctcaaaacacgcccaaattcgaatcaaattagggttagggtttccaactcccctcgaattatccctgtaatgcagtttaattcccgggtcctactaccatggagccatcagcaatgtacggacactcccagcccctgagcatgccctcgcagatcggcggcggcgaaagcgacgacggctccggaaacgagcacgccgtcgacggccaccaccaccacattcagtacgaaacgcacgcgctcgaggacggtgccgccgtcgtcgtcgaggatgttacctcggatgcggtctatgtctccggcggtggaggccccgtagagtccagccagcttacgctgtcgtttcgtggccaagtgtacgtcttcgatgccgttacgcctgataaggttcaagcggtgttgttactgttgggtggatgtgaactatcttcaggtggttcgccatgtgtggatccgggggctcaacataatcaaaggggttcaatggaatttcctaaatgtagtctaccacaccgagctgcctcattacataggttcaggcagaagaggaaagagcgatgctttgacaaaaaagtgagatatagcgtgcggcaagaagttgcgctcaggatgcaccgtaacaagggccagtttacttcatctaagaaacaagatggagctaatagttatggtactgaccaagattcaggacaggatgatagtcaatccgaaacctcatgtacacattgtggcattagttcaaaatccaccccaatgatgcggcgagggccatctggtccaaggtcactttgcaacgcttgtgggcttttttgggcaaataggggtgctttgcgagacctttctaagagaaatcaggaacactctcttccaccagttgagcaggttgatgaaggtaatgactcggactgtcggactgccactgccgaccctgcacataacaatcttcctgctttctcagagcatgataatccagctttggtagctgatcataaagttttccagtctcagaaaatgttgaagtagtttactctggcataagtaggtctatagttcttccattcagattgaccaataggaatgtacagacataacaatactcccatcaatgcaagaactttgtttttatatggttggatctatggcattaaccattgatctctggatgtataacctgaaacttgaatgatgacttggtgatggtctcacccaataccttgaatttaattttac

SEQ ID NO: 23188 - protein, 307 aa, Glycine max
MEPSAMYGHSQPLSMPSQIGGGESDDGSGNEHAVDGHHHHIQYETHALEDGAAVVVEDVTSDAVYVSGGGGPVESSQLTLSFRGQVYVFDAVTPDKVQAVLLLLGGCELSSGGSPCVDPGAQHNQRGSMEFPKCSLPHRAASLHRFRQKRKERCFDKKVRYSVRQEVALRMHRNKGQFTSSKKQDGANSYGTDQDSGQDDSQSETSCTHCGISSKSTPMMRRGPSGPRSLCNACGLFWANRGALRDLSKRNQEHSLPPVEQVDEGNDSDCRTATADPAHNNLPAFSEHDNPALVADHKVFQSQKMLK

SEQ ID NO: 23189 - protein, 302 aa, Glycine max
MYGHSQPLSMPSQIGGGESDDGSGNEHAVDGHHHHIQYETHALEDGAAVVVEDVTSDAVYVSGGGGPVESSQLTLSFRGQVYVFDAVTPDKVQAVLLLLGGCELSSGGSPCVDPGAQHNQRGSMEFPKCSLPHRAASLHRFRQKRKERCFDKKVRYSVRQEVALRMHRNKGQFTSSKKQDGANSYGTDQDSGQDDSQSETSCTHCGISSKSTPMMRRGPSGPRSLCNACGLFWANRGALRDLSKRNQEHSLPPVEQVDEGNDSDCRTATADPAHNNLPAFSEHDNPALVADHKVFQSQKMLK

SEQ ID NO: 23190 - protein, 293 aa, Glycine max
MPSQIGGGESDDGSGNEHAVDGHHHHIQYETHALEDGAAVVVEDVTSDAVYVSGGGGPVESSQLTLSFRGQVYVFDAVTPDKVQAVLLLLGGCELSSGGSPCVDPGAQHNQRGSMEFPKCSLPHRAASLHRFRQKRKERCFDKKVRYSVRQEVALRMHRNKGQFTSSKKQDGANSYGTDQDSGQDDSQSETSCTHCGISSKSTPMMRRGPSGPRSLCNACGLFWANRGALRDLSKRNQEHSLPPVEQVDEGNDSDCRTATADPAHNNLPAFSEHDNPALVADHKVFQSQKMLK

SEQ ID NO: 23191 - DNA, 1095 bp, Glycine max
acaaactcacttcacctgtttcgtgcaaaaacaattcctgttgtctctccacagtccctccctcacattctctctctagctttttagagagagagagagagaagaagaagaagacatggagatcaagaagaggtttggggtgttgatgtgtgcagaggattcggagtacgtgaaaaaagtgtacggagggtattctggggttttcgtgagaatgctggcggaggagggagagacatgggacgtgtacaaggtggcgcgtggggagtttcctgacgaagatgatttgggtctctatgatgggtttgtgatcactggcagctgcagtgacgcacatggcaacgacacatgggtcagtgatcttctcaacttgcttcgcaaactcgattccatcaacaccaagatcctcggcatttgctttggccaccagatacttgggcgtgcattgggagggaaggtgactcgttctactactggatgggatcttggtgtcagaaccataacattgtcaccatctttgcgatttgctttgtcttctcttgatcttccatcaagactttccattatcgaatgccacagggatgagatccgagagctaccagccaaggcagaggttattgcttggtcggataagactggaattgaaatgttcaggtatggagatcacattatgggaatccaaggtcaccctgagtactccaaagacattcttttgcaccttattgaccgtctcattcaacgcaattacatcatagatgcttttggtaaacaagcaagggagagggctgcgttgtgggagccagatagggaggcttggaagaaactctgtgtcacttttttgaagggtagattgtgacataaaaatggcattgaaaagaggaatttcagttctgtaaagaagcgataatatttaaaagtagtcgtatgggaggggtctatgcatagaagttataggttggtagcactaatgtggtgtgttaattagttggctttgttaggttgccagccattaatgttgataggtgctttctatgtaagctcaactatatcaatggtcaaataattagagcaataaaaagtttcagtgttctcccgttt

SEQ ID NO: 23192 - protein, 245 aa, Glycine max
MEIKKRFGVLMCAEDSEYVKKVYGGYSGVFVRMLAEEGETWDVYKVARGEFPDEDDLGLYDGFVITGSCSDAHGNDTWVSDLLNLLRKLDSINTKILGICFGHQILGRALGGKVTRSTTGWDLGVRTITLSPSLRFALSSLDLPSRLSIIECHRDEIRELPAKAEVIAWSDKTGIEMFRYGDHIMGIQGHPEYSKDILLHLIDRLIQRNYIIDAFGKQARERAALWEPDREAWKKLCVTFLKGRL

SEQ ID NO: 23193 - protein, 235 aa, Glycine max
MCAEDSEYVKKVYGGYSGVFVRMLAEEGETWDVYKVARGEFPDEDDLGLYDGFVITGSCSDAHGNDTWVSDLLNLLRKLDSINTKILGICFGHQILGRALGGKVTRSTTGWDLGVRTITLSPSLRFALSSLDLPSRLSIIECHRDEIRELPAKAEVIAWSDKTGIEMFRYGDHIMGIQGHPEYSKDILLHLIDRLIQRNYIIDAFGKQARERAALWEPDREAWKKLCVTFLKGRL

SEQ ID NO: 23194 - protein, 213 aa, Glycine max
MLAEEGETWDVYKVARGEFPDEDDLGLYDGFVITGSCSDAHGNDTWVSDLLNLLRKLDSINTKILGICFGHQILGRALGGKVTRSTTGWDLGVRTITLSPSLRFALSSLDLPSRLSIIECHRDEIRELPAKAEVIAWSDKTGIEMFRYGDHIMGIQGHPEYSKDILLHLIDRLIQRNYIIDAFGKQARERAALWEPDREAWKKLCVTFLKGRL

SEQ ID NO: 23195 - DNA, 1845 bp, Glycine max
gagggaaagcaaaatatctgatctttctccctcccttgcactgagtaggcaatggcggaggaagcacagtactcatcgggacccgattccgcgcccctcaagcgcaagtacgaagaccaaccctccggcatcgagcttgccaagcagcgtgctcaggaagtcgccgcacgcctcctcaacgccgctcctcctccgccactcgacgccaagcgtcccaaacccgacaccggcttcgattctctcgatttgaagcctctgtattccgcatctcctcctcccgtctcctacggtcaccaaggttccagcaagaagattgatatccctaatggcagggttggtgtgattattggtaaaggcggagagactattaagtatctccagttgcagtctggtgccaaaattcaaattactcgtgatattgatgcggaccctaattcttccactaggacggttgagcttatgggcactcctgaagcaatttcctctgccgagaaactcatcaatgaagttcttgctgaggctgaatctgggggttctggcattgttactcgaagattcacgggacaagctgggtcggatgaatttgtcatgaaaatcccaaataataaggttggccttataattggcaaaggtggagaaactataaagaatatgcaagcttctactggagcacggattcaggtgatacctctgcatcttcccccgggtgacacatcaactgaaagaacattaaaaattgatggtactcctgagcaaattgagtctgcaaagcagttggtttatcaagtcatcagtggcgagaatcgtgttagaaatccagcaatgtctggtggttatcctcaacaaggttaccaatctcgaccaccatctaactgggctccccctgctccaacgcagcaacctggttatggctacgtgcaacctggagcatactctggtccatcaccccagtataacatgcctcagcaaccatatgcaggctatcctccccagcaacctgatggatattccaccaattgggatcagtctactgcaccacctcaccaacagtctactcatggtggtggttattattactatagtcaacagccacagcaaccacaaaatcctgggggtcctgcccctccagctgatggctctgcatacaattacagtcagccaccttcctctggttataaccaatcagcacagcagggttatgcacaggacagctataatgcatataatgcgcaatcacaatcagggtatgggcagccacctacatatgatcagcagcaaggctatggtagtgaaagcaacccggcacaagagggccacactgcaaactatgcagtacagggagattcagcccaagctccttctgcccaaccaattaccgtagcgcagcaaggttatcctaccaaccaactgcccagttcaaacactgccaactacccacctcaaggaactcctcagccaggttatggggttccccctacatcccaagcagcttatggcaatcaatcacagcctggttatggtggtgcagtgcaaccagggtacggtcctcaaacatatggtgctccgcagggtggccagcctggttatggtcaggcgctgccttcatacagcaacagttcttatggtgctggttatacacagactccggcgtataccggtgatggtaatgggaatgctcaggcaccccagagtgccattgctaaagcatccccttgatattttggccacccttcccctccccttctcatagacgatttttattgtgtttcaccgtttatggtactagtgacaccaatgtagcattgcattgtttagatggaagaaatggtgtattgtttttttttc

SEQ ID NO: 23196 - protein, 554 aa, Glycine max
MAEEAQYSSGPDSAPLKRKYEDQPSGIELAKQRAQEVAARLLNAAPPPPLDAKRPKPDTGFDSLDLKPLYSASPPPVSYGHQGSSKKIDIPNGRVGVIIGKGGETIKYLQLQSGAKIQITRDIDADPNSSTRTVELMGTPEAISSAEKLINEVLAEAESGGSGIVTRRFTGQAGSDEFVMKIPNNKVGLIIGKGGETIKNMQASTGARIQVIPLHLPPGDTSTERTLKIDGTPEQIESAKQLVYQVISGENRVRNPAMSGGYPQQGYQSRPPSNWAPPAPTQQPGYGYVQPGAYSGPSPQYNMPQQPYAGYPPQQPDGYSTNWDQSTAPPHQQSTHGGGYYYYSQQPQQPQNPGGPAPPADGSAYNYSQPPSSGYNQSAQQGYAQDSYNAYNAQSQSGYGQPPTYDQQQGYGSESNPAQEGHTANYAVQGDSAQAPSAQPITVAQQGYPTNQLPSSNTANYPPQGTPQPGYGVPPTSQAAYGNQSQPGYGGAVQPGYGPQTYGAPQGGQPGYGQALPSYSNSSYGAGYTQTPAYTGDGNGNAQAPQSAIAKASP

SEQ ID NO: 23197 - protein, 418 aa, Glycine max
MGTPEAISSAEKLINEVLAEAESGGSGIVTRRFTGQAGSDEFVMKIPNNKVGLIIGKGGETIKNMQASTGARIQVIPLHLPPGDTSTERTLKIDGTPEQIESAKQLVYQVISGENRVRNPAMSGGYPQQGYQSRPPSNWAPPAPTQQPGYGYVQPGAYSGPSPQYNMPQQPYAGYPPQQPDGYSTNWDQSTAPPHQQSTHGGGYYYYSQQPQQPQNPGGPAPPADGSAYNYSQPPSSGYNQSAQQGYAQDSYNAYNAQSQSGYGQPPTYDQQQGYGSESNPAQEGHTANYAVQGDSAQAPSAQPITVAQQGYPTNQLPSSNTANYPPQGTPQPGYGVPPTSQAAYGNQSQPGYGGAVQPGYGPQTYGAPQGGQPGYGQALPSYSNSSYGAGYTQTPAYTGDGNGNAQAPQSAIAKASP

SEQ ID NO: 23198 - protein, 375 aa, Glycine max
MKIPNNKVGLIIGKGGETIKNMQASTGARIQVIPLHLPPGDTSTERTLKIDGTPEQIESAKQLVYQVISGENRVRNPAMSGGYPQQGYQSRPPSNWAPPAPTQQPGYGYVQPGAYSGPSPQYNMPQQPYAGYPPQQPDGYSTNWDQSTAPPHQQSTHGGGYYYYSQQPQQPQNPGGPAPPADGSAYNYSQPPSSGYNQSAQQGYAQDSYNAYNAQSQSGYGQPPTYDQQQGYGSESNPAQEGHTANYAVQGDSAQAPSAQPITVAQQGYPTNQLPSSNTANYPPQGTPQPGYGVPPTSQAAYGNQSQPGYGGAVQPGYGPQTYGAPQGGQPGYGQALPSYSNSSYGAGYTQTPAYTGDGNGNAQAPQSAIAKASP

SEQ ID NO: 23199 - DNA, 1467 bp, Glycine max
atcaagttggctacacaaaattatttttccggacagggcagattggtgtgcttgaagatactagaaatcgtaccctccatggcattttacgtgtccaaagttgtttcaggggtttccaagcacgtcgttctctcaaggatcttcggggaggaatcactactttgcagtcatttattaggggagacaaaaccagaaaggcatattcagctttacttaagaggcatagagctgctgttattatacagaagcaaatcaaagcagtatttgcaagaaacagaatgaggactattagtgatgctgcaatagtcatacaagcagttattcgtggttggttggtcagaagatgctcaggaaatattggatttttgaaatctggagacatgaagatgaaagagtctgatgaggttctggttaagtcatctttcctggccgaattacagtgccgagtacttaaggctgaagctgcccttagagagaaagaagaggaaaatgacatccttcatcaacgtctccaacaatatgagagcagatggtctgagtatgaactaaagatgaaatccatggaagaagtgtggcagaaacaaatgagatccctacaatctagcctctccattgcaaagaagagccttgctatcgatgactctgaaagaaattcagacacatctgttaatgcaagtgatgagcgggattacagctgggatgtgggaggcaatcatcggcgccaagaaagcaatggggcaagatcaacgagtgctggtctaagtgttataagtcggcttgctgaagaattcgagcacaggagtcaagtatttggtgatgatgccaagttcttggttgaggtaaaatctggtcaggtagaagcaagtttgaacccagatcaagagcttagaaggttaaaacagatgtttgaagcttggaaaaaggattatggggcaagactgcgtgaaacaaaagttattataaataaacttggaagcgaagatggcgcacttgagaaaatgaagaaaaagtggtggggaagaaggaacagtacaatgataaattgattttttttcaaaatttttaatttatcttttatttttttgagttcggttttggtctatgcactgtttcaagagcattgccaactatatatatccgaaagtgaggaaaatacaataggaaaggtaaaaaaaaaaaaaaggagtggtaggaagagtccaaggatgagtgaatttagtgtagtttgggttagttgttgctagccacctttctttaattagtaatttctgcatgaattgttgagtaagatgtatactacaaaccttagtgattcgtgtatatcgctgatgcccatgccttttctggtatgtggattgcatgtcaaatttgttgtggaggcccaaaatgtaatatacagtaatcagtttgttggccgttgcaaaaatcattgtaaaatactaatatttatagaaatttaaaaaattc

SEQ ID NO: 23200 - protein, 347 aa, Glycine max
QVGYTKLFFRTGQIGVLEDTRNRTLHGILRVQSCFRGFQARRSLKDLRGGITTLQSFIRGDKTRKAYSALLKRHRAAVIIQKQIKAVFARNRMRTISDAAIVIQAVIRGWLVRRCSGNIGFLKSGDMKMKESDEVLVKSSFLAELQCRVLKAEAALREKEEENDILHQRLQQYESRWSEYELKMKSMEEVWQKQMRSLQSSLSIAKKSLAIDDSERNSDTSVNASDERDYSWDVGGNHRRQESNGARSTSAGLSVISRLAEEFEHRSQVFGDDAKFLVEVKSGQVEASLNPDQELRRLKQMFEAWKKDYGARLRETKVIINKLGSEDGALEKMKKKWWGRRNSTMIN

SEQ ID NO: 23201 - protein, 255 aa, Glycine max
MRTISDAAIVIQAVIRGWLVRRCSGNIGFLKSGDMKMKESDEVLVKSSFLAELQCRVLKAEAALREKEEENDILHQRLQQYESRWSEYELKMKSMEEVWQKQMRSLQSSLSIAKKSLAIDDSERNSDTSVNASDERDYSWDVGGNHRRQESNGARSTSAGLSVISRLAEEFEHRSQVFGDDAKFLVEVKSGQVEASLNPDQELRRLKQMFEAWKKDYGARLRETKVIINKLGSEDGALEKMKKKWWGRRNSTMIN

SEQ ID NO: 23202 - protein, 221 aa, Glycine max
MKMKESDEVLVKSSFLAELQCRVLKAEAALREKEEENDILHQRLQQYESRWSEYELKMKSMEEVWQKQMRSLQSSLSIAKKSLAIDDSERNSDTSVNASDERDYSWDVGGNHRRQESNGARSTSAGLSVISRLAEEFEHRSQVFGDDAKFLVEVKSGQVEASLNPDQELRRLKQMFEAWKKDYGARLRETKVIINKLGSEDGALEKMKKKWWGRRNSTMIN

SEQ ID NO: 23203 - DNA, 1881 bp, Glycine max
tttttggactttggtcagggtttagcactttcaccttctttctctttctctctgtcatttggtctccgttctacaacaatttctttcactatcaaactcatttgtgttgttgttgttttccgaagagagaaaaccatgtggtacttgtgcgttttcttccacaggttattggattacagaaaaccagaagtggaatctctggcgcaactcttcggagccaccgaggaccctaaaaatggcgacgttccctcccaaatgcaatggaagctccctattcactaccaccccgattcccctttccatttcgtaaacctcccttccgaaaaactcgctcgtgacatcgccacccgaagcatacttgttaaggggatgtatgagctgtggggtgaagggagtagctatgaggagttgaaggagtctgtgttgagttaccctgacgaaaggaagttgccgtacttggattctgatagcactttcaagattactgtcgatagctttgggaaggtcattagcttggaggaccaaaaggagctcattcaagggctctcttatatccctttcaagggacgagtaaagttgaaaaacccagatcacaacttctggcttatagaagttgataattatggaggtaataatggtcttcctccaattgtacaaaagagagtcttctttggtcgcgaagttggtggggcagataggaagcttttacccacatatcagttgaaaagccgtacttatcttgggccaacagctatggatgctgaaattgcttttctaatggccaatcaagcactagctacttctggaaaactagtttatgacccttttgttggaactggaagtattcttgttgcagcagctcattttggagcaataaccatgggtgctgacattgacattagggtagtcctgatggacgtggtcccaactgtaatgtttggagtaattttaagcagtatggattgccaatgcctgttggtcttctaagagcagacaacaaccttcctccctggcgttctacgctgaaagaggtatttgatgccataatatgtgatcctccttacggagtgcgagctgggggacgcaaatctggtggtcggaagctgctaaagggggctgtggaaccttacaccattcctgatgaaaaaagaacaaatcacataccatcaactgcagcttacagtttagttgagtgcgtgcatgatttgtttgatcttgcagccaagatgcttctaatggggggcaggcttgtgtttttctatcctgtattgagagaagatggttttcctgaaaaccatttcccagagcacccatgttttaaactgatttcttcgtcggagcagatccttagttcgcgttatagcagggtgttactgacaatggtcaagacaggtccttacacagaggaaatagccgaggcggctaggaaaaaacacattgaatttaaggagaaccatgtaaaatggttagaagatggtaatcttcattctgcagttttcagtcctgctgatgatcaatttacggaggctggtgatcccaagttaattaaggatccaaagcctaaatacagaggaaagtacgtttagagttttaaggttagatggtcttgtccctcaccattacaatggacagcaatgtatttttcaatgtccaagaggaaaacttatttcactctatggaagccaatgtaccctttttaatccaatttagtgatatttttcagatgttttttttttttttttatattatttcatagatatgtctttttcttccgtttaacgcaaccggtgcttgggcaacccattaggtcccaaatgcagtgtaaacaggcaataaaacatgtcaaagttcagaatcctagtaaaaaaatcaattttcaac

SEQ ID NO: 23204 - protein, 328 aa, Glycine max
FLDFGQGLALSPSFSFSLSFGLRSTTISFTIKLICVVVVFRREKTMWYLCVFFHRLLDYRKPEVESLAQLFGATEDPKNGDVPSQMQWKLPIHYHPDSPFHFVNLPSEKLARDIATRSILVKGMYELWGEGSSYEELKESVLSYPDERKLPYLDSDSTFKITVDSFGKVISLEDQKELIQGLSYIPFKGRVKLKNPDHNFWLIEVDNYGGNNGLPPIVQKRVFFGREVGGADRKLLPTYQLKSRTYLGPTAMDAEIAFLMANQALATSGKLVYDPFVGTGSILVAAAHFGAITMGADIDIRVVLMDVVPTVMFGVILSSMDCQCLLVF

SEQ ID NO: 23205 - protein, 283 aa, Glycine max
MWYLCVFFHRLLDYRKPEVESLAQLFGATEDPKNGDVPSQMQWKLPIHYHPDSPFHFVNLPSEKLARDIATRSILVKGMYELWGEGSSYEELKESVLSYPDERKLPYLDSDSTFKITVDSFGKVISLEDQKELIQGLSYIPFKGRVKLKNPDHNFWLIEVDNYGGNNGLPPIVQKRVFFGREVGGADRKLLPTYQLKSRTYLGPTAMDAEIAFLMANQALATSGKLVYDPFVGTGSILVAAAHFGAITMGADIDIRVVLMDVVPTVMFGVILSSMDCQCLLVF

SEQ ID NO: 23206 - protein, 243 aa, Glycine max
MQWKLPIHYHPDSPFHFVNLPSEKLARDIATRSILVKGMYELWGEGSSYEELKESVLSYPDERKLPYLDSDSTFKITVDSFGKVISLEDQKELIQGLSYIPFKGRVKLKNPDHNFWLIEVDNYGGNNGLPPIVQKRVFFGREVGGADRKLLPTYQLKSRTYLGPTAMDAEIAFLMANQALATSGKLVYDPFVGTGSILVAAAHFGAITMGADIDIRVVLMDVVPTVMFGVILSSMDCQCLLVF

SEQ ID NO: 23207 - DNA, 1292 bp, Glycine max
aggaagaagcctccggggaaattgcttgcttcagctcatgccgtcgacagagagtttcaggttctccatgcattgggcactcataccaaagttccggttcccaaagttttttgtctgtgcaatgatccaactgttattggaactgcgttttatatcatggaatatttggaggggcgcatatttcttgaccccaagttaccaggtgttacatctcaaaagaggagggcaatttacagggcaacagctaaagccttagcttccttacattctgctaatgtagattccattggtctgggaaattacgggcgacgcaatgattattgcaaaagacagattgagaggtgggctaagcaatatgttgcctcaaccagtgagggtaaacctgcaagtaatccaaaaatgtttgcccttattgattggctacggaatcaaatccctcctgaagattcttcgggagcaacaggaggtctggttcacggagatttccgcattgacaaccttgtgttccatcccacagaggatcgagtaattggaatacttgactgggaattgtctacccttggtaaccaaatgtgtgatgttgcatatagctgtatgccttatattgcagatattggacctgaaaaagtacatgaaggtatagagcattttggattacctgagggaatcccttcattaccagaatatttggctgattactgctctttggcacgaagaaaatggcctgttgctgaatggaagttctatgttgccttttctttcttccgggcagcttcaatttatgcaggagtgtataatagatgggttaagggtaatgcatcgggcggtgaacgtgctcgacacacagaagtacttacaaatggccttatagatactgcttggaaatttattgaacacaaatctgtgcttcctcagcatccaccctcagatgcaaacgctcaagactattccaaagagttaccgaatgggaatgatatacaggaactctcaaatcaggggaagtttgttcctaatcaaaaggttttggtgctgaggaacaaattaattaagttcatggaggaacatatttaccccatggaaaatgaattttataaacttgctcaatcagactcacgttggactgttcacccagtagaggaaaagttaaaggaaatggcaaagaaagaaggcttgtggaacttatggattcctcttgatagtgctgtgagagcaagaaatcttctctttgatgggagcaataattatcactctagtgatgcaaatgacttgctattaggggctggtctcacaaa

SEQ ID NO: 23208 - protein, 430 aa, Glycine max
RKKPPGKLLASAHAVDREFQVLHALGTHTKVPVPKVFCLCNDPTVIGTAFYIMEYLEGRIFLDPKLPGVTSQKRRAIYRATAKALASLHSANVDSIGLGNYGRRNDYCKRQIERWAKQYVASTSEGKPASNPKMFALIDWLRNQIPPEDSSGATGGLVHGDFRIDNLVFHPTEDRVIGILDWELSTLGNQMCDVAYSCMPYIADIGPEKVHEGIEHFGLPEGIPSLPEYLADYCSLARRKWPVAEWKFYVAFSFFRAASIYAGVYNRWVKGNASGGERARHTEVLTNGLIDTAWKFIEHKSVLPQHPPSDANAQDYSKELPNGNDIQELSNQGKFVPNQKVLVLRNKLIKFMEEHIYPMENEFYKLAQSDSRWTVHPVEEKLKEMAKKEGLWNLWIPLDSAVRARNLLFDGSNNYHSSDANDLLLGAGLT

SEQ ID NO: 23209 - protein, 378 aa, Glycine max
MEYLEGRIFLDPKLPGVTSQKRRAIYRATAKALASLHSANVDSIGLGNYGRRNDYCKRQIERWAKQYVASTSEGKPASNPKMFALIDWLRNQIPPEDSSGATGGLVHGDFRIDNLVFHPTEDRVIGILDWELSTLGNQMCDVAYSCMPYIADIGPEKVHEGIEHFGLPEGIPSLPEYLADYCSLARRKWPVAEWKFYVAFSFFRAASIYAGVYNRWVKGNASGGERARHTEVLTNGLIDTAWKFIEHKSVLPQHPPSDANAQDYSKELPNGNDIQELSNQGKFVPNQKVLVLRNKLIKFMEEHIYPMENEFYKLAQSDSRWTVHPVEEKLKEMAKKEGLWNLWIPLDSAVRARNLLFDGSNNYHSSDANDLLLGAGLT

SEQ ID NO: 23210 - protein, 297 aa, Glycine max
MFALIDWLRNQIPPEDSSGATGGLVHGDFRIDNLVFHPTEDRVIGILDWELSTLGNQMCDVAYSCMPYIADIGPEKVHEGIEHFGLPEGIPSLPEYLADYCSLARRKWPVAEWKFYVAFSFFRAASIYAGVYNRWVKGNASGGERARHTEVLTNGLIDTAWKFIEHKSVLPQHPPSDANAQDYSKELPNGNDIQELSNQGKFVPNQKVLVLRNKLIKFMEEHIYPMENEFYKLAQSDSRWTVHPVEEKLKEMAKKEGLWNLWIPLDSAVRARNLLFDGSNNYHSSDANDLLLGAGLT

SEQ ID NO: 23211 - DNA, 1282 bp, Glycine max
aaggcccagccaaaaacgcataaattaggtgcgtgttgtgaattgtgtgagccaaagagagagaaagagaagaagaagaagaagaagaagaagctctggattccacctcttcccgtccttcgagacggttgttgtgctgcttgctcttcagacaaatctgacatggatttactaagatttgtccatgttcttgcgttctaggttgacctgggattgaatctaaagaatcttgatttacattttgagatatggagggagtttgtttctggacaaattgctaccagtatcggttttttgcattccaagaagtgcttgattggcgagttttcatccttggagattttcttcgggtttcctttgttaattgcacttagggttctgctccgctttaatgatcagcacagggtacgtgatgctacattcttctgatacaggtgctgcatcttaagtgcacttgtacaatgcattgctgacccaacattcagttaaaacttttggtaaatcttcttcttggggctgaagcatatagatttgtgactgaatattggattctgcctgcatctttgagtgaagcatttgcattgaatcagtgcggactgtagttattgaaatttgtctccttgttgctctcgatgggtattgttgctgacaatacatcagttaccggatgtttctgaaataaatcctacatagattagatgaagtagaccttactatagttctgaagtcttgggtcaaggtgattttagctagagagtgatgctatcgctttgatcagccattttagtgggacctgagaactgtcagtatgatctctggttcttgttcatttctaccacctttgtcctgccactatttcaaagccgtgggtttattaatgaataaggctgagcagcccatccatctgaaagtttctgcttccatgccttcttttgctatgacagaaaattgatggtggattttgctggaccagcaggaacctgttaatattttatacgcctctgagcatcatctacatgagataaatgccatttatccttagtgtttttgttttcatttgttgaataaaggaagtgctgctttgtgttccacgggaacaatggagaggtacaagttaattaaggaagttggtgatgggacttttgggagtgtctggagagctattaataagcaaaccggtgaagttgttgctatcaagaaaatgaagaagaaatattactcttgggaggagtgtgtaaacctgagagaagtcaagtcattacgtaaaatgaatcacccaaat

SEQ ID NO: 23212 - protein, 66 aa, Glycine max
KAQPKTHKLGACCELCEPKREKEKKKKKKKKLWIPPLPVLRDGCCAACSSDKSDMDLLRFVHVLAF

SEQ ID NO: 23213 - protein, 61 aa, Glycine max
MERYKLIKEVGDGTFGSVWRAINKQTGEVVAIKKMKKKYYSWEECVNLREVKSLRKMNHPN

SEQ ID NO: 23214 - protein, 47 aa, Glycine max
MISGSCSFLPPLSCHYFKAVGLLMNKAEQPIHLKVSASMPSFAMTEN

SEQ ID NO: 23215 - DNA, 1645 bp, Glycine max
atggaaataaatgcatgcagagcataaggaaaccaaaactattctgggtctcagctggagctcctcttatgtgtgtcatcatctctaccctcttggtttttgcaattaaggctcaaaatcatggcatcagtgtgattgggaaattgcaagaaggaataaatcctccatcatggaatatgttgctctttcatggaagtcacctggacctagtcatgaaaacagggcttatcactgggattttgtccctcactgaaggtattgcagtaggaaggacatttgcagctctcaaaaactacaaagtggatggaaataaggaaatgatggcaattgggtttatgaatgttgttggctccttcacttcctgctatgttacaacaggtgctttctctcggtcagcagttaacaacaatgcaggcgcaaaaacagctgtgtcaaatgtagtgatgtctgtgacagtcatggtgacactcctttttctcatgccattgtttcaatacacgcctaatgtcgtgctgggcgcaatcatagtcacagcagtaattggcctcatcgatctccccgctgcttgtaacatttggaagatcgacaaattcgattttgttgtgatgatgactgctttcttaggtgttcttttcatctctgtccaaggaggccttgctcttgctgttggattatcaactttgaagatactcttgcaaattacgagaccgaaaacagtgatgttggggaagataccaggaacagacatatatagaaatcttgatcaatacaaggaagctgtgagaatacctggatttcttattttaagcattgaggctcccatcaattttgccaacatcacatatctcaacgagagaacgttaagatggattgaagaagaagaagacaacataaaggaacaattaagccttcgattcttagtattggaaatgtcaggtaacttcattagatagaacaaaggtgaatcatatagtttacacattataacattcagttcataattttggggatcatttgtgtaatgataaaacatttcttttcctgatttctttgttacttattggattattgaaccaataaaatgaagtggtaaaaaaataagtcctactataatctatggatgttcccacttcccattttcaaaatacacctccatctaagtaggttgaggagtaaatagtcacttgtaagactgcattttcatagaatcaagcaattgagctaataataattcactagctattcaagcatatcactaaacatatttcatctacctacttatcctgcaaatagtactcatttaatcatgaaaaaaaagagtatcactttgaaattttcagctgtgagtgctgttgacacaagtggaatctcacttttcaaggagttgaaagcaacactggaaaagaaaggtgttgagcttgtgttggtcaatcctcttgctgaggtcatagaaaagcttaaaaaagcagatgaagctaatgatttcataagagcagataaccttttcttgacagttggagaggctgtagcttcactttcttcagcaatgaaaggccaatcatcaaccattacagaaggggcacacacaattgtgtcacataattgataaaataagactgcaaaatatataagcaaaagttaaaag

SEQ ID NO: 23216 - protein, 316 aa, Glycine max
GNKCMQSIRKPKLFWVSAGAPLMCVIISTLLVFAIKAQNHGISVIGKLQEGINPPSWNMLLFHGSHLDLVMKTGLITGILSLTEGIAVGRTFAALKNYKVDGNKEMMAIGFMNVVGSFTSCYVTTGAFSRSAVNNNAGAKTAVSNVVMSVTVMVTLLFLMPLFQYTPNVVLGAIIVTAVIGLIDLPAACNIWKIDKFDFVVMMTAFLGVLFISVQGGLALAVGLSTLKILLQITRPKTVMLGKIPGTDIYRNLDQYKEAVRIPGFLILSIEAPINFANITYLNERTLRWIEEEEDNIKEQLSLRFLVLEMSGNFIR

SEQ ID NO: 23217 - protein, 312 aa, Glycine max
MQSIRKPKLFWVSAGAPLMCVIISTLLVFAIKAQNHGISVIGKLQEGINPPSWNMLLFHGSHLDLVMKTGLITGILSLTEGIAVGRTFAALKNYKVDGNKEMMAIGFMNVVGSFTSCYVTTGAFSRSAVNNNAGAKTAVSNVVMSVTVMVTLLFLMPLFQYTPNVVLGAIIVTAVIGLIDLPAACNIWKIDKFDFVVMMTAFLGVLFISVQGGLALAVGLSTLKILLQITRPKTVMLGKIPGTDIYRNLDQYKEAVRIPGFLILSIEAPINFANITYLNERTLRWIEEEEDNIKEQLSLRFLVLEMSGNFIR

SEQ ID NO: 23218 - protein, 294 aa, Glycine max
MCVIISTLLVFAIKAQNHGISVIGKLQEGINPPSWNMLLFHGSHLDLVMKTGLITGILSLTEGIAVGRTFAALKNYKVDGNKEMMAIGFMNVVGSFTSCYVTTGAFSRSAVNNNAGAKTAVSNVVMSVTVMVTLLFLMPLFQYTPNVVLGAIIVTAVIGLIDLPAACNIWKIDKFDFVVMMTAFLGVLFISVQGGLALAVGLSTLKILLQITRPKTVMLGKIPGTDIYRNLDQYKEAVRIPGFLILSIEAPINFANITYLNERTLRWIEEEEDNIKEQLSLRFLVLEMSGNFIR

SEQ ID NO: 23219 - DNA, 1450 bp, Glycine max
ggaactgggaaatcgttatctatggagaaagtgaaagacaaattactcaattgggccaaggaggcaggtcttccacagccagatgttttgtctgtaaattgtacaacctttaccaacacatcagatattttcactaagatacttgggttaaaccaaacacagggtaaaaaggtttcggctacgcccttacagcaacttcagaacatgtattctcagaaatcgtctaacaagaacatgacattgatagtagctgatgagttagattatttgataaccaaagacagaggcgtgctccatgatcttttcatgctcaccacctttcctttttctagatgtatattaataggtgtagcgaatgcaattgacctagctgatcgatttcttccaaggcttacatcattaaattgcaaacctattgttgtaaattttcgggcttactctaaagatcagatcctcaagattcttgaagaaaggttaaatgaacttccttacactgtcttccaacagcaagccatggaattatgtgctaggaaagttgctgcagcttctggtgacatgcggaatgctctttgtatatgcgggagggcaatagagatgcttgaagcagaaattagagagtctgcctgcaatttgaatacttcattggaagagatatcatcctccagacaaaatcttgctacagctcctgattttatgaaaaaacgagaatttgagactgtaaggactgatcatatggcacgtgccttgtccaagacatatagatcaccagtggtggatacaatacaatctctgccacatcatcagcagattgtactctgctcttctatgaaacattttcgtggagccaagaaagatacaatccttggagagttgtataaatcgtatgtgggggtatgcaaatcttgtataattcctccagcgggaatcttggaattttcaaacatgtgcagagtgctaaatgaccagggccttattaaacttggacaatctcgagaggataaattgagaagagtgtcgcctaaagtagatgagggtgatattacttttgcattgcagggagtacgtttttttcataactgtctttaatgattctgctgatactggtagttttcactcagcttgacgtgagatcaaagactcttccttagattaagataagtttatttggttctaaccggtgtcttcattatatgaagtggtatactcgaagcgtggagttgaaatcactagtccaaaattttcacccaagaagcaaaagctgttagagaatattttatttttttatgctattttattttctcatgagctgagttgcatcgtgtaatttatttagctcatctcacttagtagtgagttataggaatgaggctttattgttttattttctcaagagcagaaaatagctatatatacatttatttcatactattaaattaattttctcaaatgt

SEQ ID NO: 23220 - protein, 361 aa, Glycine max
GTGKSLSMEKVKDKLLNWAKEAGLPQPDVLSVNCTTFTNTSDIFTKILGLNQTQGKKVSATPLQQLQNMYSQKSSNKNMTLIVADELDYLITKDRGVLHDLFMLTTFPFSRCILIGVANAIDLADRFLPRLTSLNCKPIVVNFRAYSKDQILKILEERLNELPYTVFQQQAMELCARKVAAASGDMRNALCICGRAIEMLEAEIRESACNLNTSLEEISSSRQNLATAPDFMKKREFETVRTDHMARALSKTYRSPVVDTIQSLPHHQQIVLCSSMKHFRGAKKDTILGELYKSYVGVCKSCIIPPAGILEFSNMCRVLNDQGLIKLGQSREDKLRRVSPKVDEGDITFALQGVRFFHNCL

SEQ ID NO: 23221 - protein, 354 aa, Glycine max
MEKVKDKLLNWAKEAGLPQPDVLSVNCTTFTNTSDIFTKILGLNQTQGKKVSATPLQQLQNMYSQKSSNKNMTLIVADELDYLITKDRGVLHDLFMLTTFPFSRCILIGVANAIDLADRFLPRLTSLNCKPIVVNFRAYSKDQILKILEERLNELPYTVFQQQAMELCARKVAAASGDMRNALCICGRAIEMLEAEIRESACNLNTSLEEISSSRQNLATAPDFMKKREFETVRTDHMARALSKTYRSPVVDTIQSLPHHQQIVLCSSMKHFRGAKKDTILGELYKSYVGVCKSCIIPPAGILEFSNMCRVLNDQGLIKLGQSREDKLRRVSPKVDEGDITFALQGVRFFHNCL

SEQ ID NO: 23222 - protein, 293 aa, Glycine max
MYSQKSSNKNMTLIVADELDYLITKDRGVLHDLFMLTTFPFSRCILIGVANAIDLADRFLPRLTSLNCKPIVVNFRAYSKDQILKILEERLNELPYTVFQQQAMELCARKVAAASGDMRNALCICGRAIEMLEAEIRESACNLNTSLEEISSSRQNLATAPDFMKKREFETVRTDHMARALSKTYRSPVVDTIQSLPHHQQIVLCSSMKHFRGAKKDTILGELYKSYVGVCKSCIIPPAGILEFSNMCRVLNDQGLIKLGQSREDKLRRVSPKVDEGDITFALQGVRFFHNCL

SEQ ID NO: 23223 - DNA, 1448 bp, Glycine max
gcagaaaaagcaaaaacatccaaaatacagaaaaagctagaaggccatctctgactaacgcgccaccaaagacctcacgcgcaaccgcagcgcgtgcgtcaatctccgtagcccttttcctttccctctctctctctctagacctcgtcgaagcaccaccatgaccacaacatctctctgaaaatcactcacacgcaaaagagagagagaatcgaaacaccccgtaagcagcacggcacaatcgcaacgcaagagattaataatcaatttgcatcgatcgatcgatcgttggttaggtttttgttttgggggaatatgggcgagttgactcaggcggaggtgtactcgcctcggactcagcaagtgtggagggcactgttgagttggttggccttcttctttcagatcttcttccagattataagagccttaggtcactaccctctactctctttctcttctaattcttcttcttcttcaaacgcttcttcctcttcctcttccttcaaacctcttccctccgttgagattgctgaacacgattcgcctcctccctccgccctcgaaatctcaccacttgattattcccccgccgatcatcccgtcccaaaactcacggttgtgctggacttagatgaaacactggtatgtgcatatgagacatcaagtttgccacctgctctacggactcaagcaatcgaaggtggtttgaattggtttgagctggaatgtgtatcgatagacaaggaaggagaaggcaaaaaaatcaattatgttacagtatttgaaccctgggttgaaggaatttttaaagcaactcagtgaatttgctgacatggtgctgtttacagctggtcttgaaggctatgctagaccccttgttgacagaatagatgtggaaaatcgattcagtctacgactttatcggccctcaacaattagcacggaatatcgggagcatgtcaaggatcttacctgcatctcaaaggatctttgtcgcattgttattgtagacaataatcctttcagctttgtattgcaaccggtgaatggaattccgtgcattccattttctgctgggcaaccacatgacacccagcttctagatgtcattcttccacttctcaagcaactttctgagcagaatgatgtaagacctttcctctatgaaaagttccacatgcctgattggttccagaaacaagggattccagcttccagttggactttgtaggattaaactagtttgccattaagctctctgttttctttttggtgaaattcttagttgttttgctggaagggcagctgctgattggttgaaatagattttttgtatagcatcaatttgtttttggattgcctaagggtttcaaatgctctgcttcttggatgtcaaatcagttcaccacttgtgtatgtagattgccagaattctgattcttgtt

SEQ ID NO: 23224 - protein, 169 aa, Glycine max
MGELTQAEVYSPRTQQVWRALLSWLAFFFQIFFQIIRALGHYPLLSFSSNSSSSSNASSSSSSFKPLPSVEIAEHDSPPPSALEISPLDYSPADHPVPKLTVVLDLDETLVCAYETSSLPPALRTQAIEGGLNWFELECVSIDKEGEGKKINYVTVFEPWVEGIFKATQ

SEQ ID NO: 23225 - protein, 153 aa, Glycine max
MLQYLNPGLKEFLKQLSEFADMVLFTAGLEGYARPLVDRIDVENRFSLRLYRPSTISTEYREHVKDLTCISKDLCRIVIVDNNPFSFVLQPVNGIPCIPFSAGQPHDTQLLDVILPLLKQLSEQNDVRPFLYEKFHMPDWFQKQGIPASSWTL

SEQ ID NO: 23226 - protein, 132 aa, Glycine max
MVLFTAGLEGYARPLVDRIDVENRFSLRLYRPSTISTEYREHVKDLTCISKDLCRIVIVDNNPFSFVLQPVNGIPCIPFSAGQPHDTQLLDVILPLLKQLSEQNDVRPFLYEKFHMPDWFQKQGIPASSWTL

SEQ ID NO: 23227 - DNA, 1461 bp, Glycine max
gtggagaatattgaaggtgaatatggacggattgttcaaaatccaactgaagaaatcaaggtgctttgtgttaacactttggaggccggagtttttagcagtggatttccgacagtttctgatcctgtggaggcatacacttaccctgaatatttgaaatctggatggaacttgaataatatactttcactctcaggatcccttctttgttttgaaagctctgaagcttcacgtaattttgcccccaagattcacatgggaatgtgcttctctccactcaactggaaagttgaagagcaccacttatactcattatattacgtgcatttgggtgaaccaaaagtgtggtatggcatcccaggaaaatttgctattaactttgaaacaatttggaagaagtatctccctgatttgcaagcaggacagcctgatatgcatgataatatggtgatgcagctatcatgctccatattgaaggcagagggcattcctgtatatcgttgtattcagtatcctcgtgagtttgttcttgtctttcccgggtcatatcattcaggatttgattgtggcttcaactgttctgaagcagtaagttttgctcctcttgagtggctgcttcagggacagaatgttgtagagctatactgtgaacagaggagaaagacattactttcatatgataagcttttgctaggagcagcaagggaagctgtgagggtccaatgggaaactaatctgtgcaggaagagcacatcagatagcttaacatataaagatgcctataaaaaaaatgggttcttaataaaagctttgaactctcgcatccagagtgaaagtttgaagagaaaatttctttgcacttctttggtatcacaaagaatggatgaaaattttgatgccacttgtaaaagggaatgtagtatttgcctccgtgatttacacttgtctgctgtaggttgttcatgttcagataactttgcatgtcttgatcatgcaaaacagctttgttcttgcacttggagcaacaaaactctcttctaccgttatgaaatcaataatttgaatgttctttgtcaagctttggatgggaaattaagtgcagtctttaaatgggctaaagaggatctcggattaactctgaactctgttgcctccaagagatcaaaacaaagctcaaaaaacataattggttcaacccacccttcgcaagatttgcagatgaatgaacctgtatcgcagacagcatcagatgaatcctcaaaagggaaacaacgtcaattgctagatatattgaattcatcaaaaacaaaagaaaatgaagtggttccgaattcatcaaagaaaaaaaatgaggtggttccgaattcatcaaagaaacaaaatgcagtcgtttcccaagttgtgcggacttttggtggcactcacagtagttcttatgacattcgttcaaaaatgaagaca

SEQ ID NO: 23228 - protein, 487 aa, Glycine max
VENIEGEYGRIVQNPTEEIKVLCVNTLEAGVFSSGFPTVSDPVEAYTYPEYLKSGWNLNNILSLSGSLLCFESSEASRNFAPKIHMGMCFSPLNWKVEEHHLYSLYYVHLGEPKVWYGIPGKFAINFETIWKKYLPDLQAGQPDMHDNMVMQLSCSILKAEGIPVYRCIQYPREFVLVFPGSYHSGFDCGFNCSEAVSFAPLEWLLQGQNVVELYCEQRRKTLLSYDKLLLGAAREAVRVQWETNLCRKSTSDSLTYKDAYKKNGFLIKALNSRIQSESLKRKFLCTSLVSQRMDENFDATCKRECSICLRDLHLSAVGCSCSDNFACLDHAKQLCSCTWSNKTLFYRYEINNLNVLCQALDGKLSAVFKWAKEDLGLTLNSVASKRSKQSSKNIIGSTHPSQDLQMNEPVSQTASDESSKGKQRQLLDILNSSKTKENEVVPNSSKKKNEVVPNSSKKQNAVVSQVVRTFGGTHSSSYDIRSKMKT

SEQ ID NO: 23229 - protein, 402 aa, Glycine max
MGMCFSPLNWKVEEHHLYSLYYVHLGEPKVWYGIPGKFAINFETIWKKYLPDLQAGQPDMHDNMVMQLSCSILKAEGIPVYRCIQYPREFVLVFPGSYHSGFDCGFNCSEAVSFAPLEWLLQGQNVVELYCEQRRKTLLSYDKLLLGAAREAVRVQWETNLCRKSTSDSLTYKDAYKKNGFLIKALNSRIQSESLKRKFLCTSLVSQRMDENFDATCKRECSICLRDLHLSAVGCSCSDNFACLDHAKQLCSCTWSNKTLFYRYEINNLNVLCQALDGKLSAVFKWAKEDLGLTLNSVASKRSKQSSKNIIGSTHPSQDLQMNEPVSQTASDESSKGKQRQLLDILNSSKTKENEVVPNSSKKKNEVVPNSSKKQNAVVSQVVRTFGGTHSSSYDIRSKMKT

SEQ ID NO: 23230 - protein, 400 aa, Glycine max
MCFSPLNWKVEEHHLYSLYYVHLGEPKVWYGIPGKFAINFETIWKKYLPDLQAGQPDMHDNMVMQLSCSILKAEGIPVYRCIQYPREFVLVFPGSYHSGFDCGFNCSEAVSFAPLEWLLQGQNVVELYCEQRRKTLLSYDKLLLGAAREAVRVQWETNLCRKSTSDSLTYKDAYKKNGFLIKALNSRIQSESLKRKFLCTSLVSQRMDENFDATCKRECSICLRDLHLSAVGCSCSDNFACLDHAKQLCSCTWSNKTLFYRYEINNLNVLCQALDGKLSAVFKWAKEDLGLTLNSVASKRSKQSSKNIIGSTHPSQDLQMNEPVSQTASDESSKGKQRQLLDILNSSKTKENEVVPNSSKKKNEVVPNSSKKQNAVVSQVVRTFGGTHSSSYDIRSKMKT

SEQ ID NO: 23231 - DNA, 1695 bp, Glycine max
atcatttaatgaatagcaaagatcctgaatacagaaatggcaaattggttattccatgcaataggtgagactgggaactttaattacaagtactatgtaaatttattgtacttattgtttgtgaaacagtttgtcccgtgcattgggtatattccaggaggggaaattcagtgtaaatgatacattaaaattagaagcccaagcagtcacgtctgagagcgaagaaggagctgttggggaaccagaaaaaaaggcagaaaatcctgctcccggtataaaggctgaatcagatacatcaacttcagtgggaaaaactgatggtgaaaatgcacttcctgtatccaaagttacacaggaagttcccccggacaatgagtttgagaagcgaataaggcctgaggtaataccagcaaacgagattggtgtaaaattctcggatgttggtgccttagatgagaccaaagagtcgctacaagaactagttatgcttcctcttcgaaggccagaccttttccgcggaggccttctaaagccttgtaaaggaatattgctgtttgggcctcctggcaccgggaagacaatgctggcaaaggccattgcgagagaagctggcgcgagtttcattaatgtatccatgtctaccatcacctctaaatggtttggtgaagatgagaagaatgttcgcgctttattcacgctggccgccaaggtctccccaactattatatttgttgatgaggttgatagtatgctgggacagcggaccagagttggagagcatgaagccatgcgcaagataaagaatgagtttatgactcattgggatggacttatgacaaactccggggagcgcatccttgttcttgctgcaaccaataggccatttgacctcgatgaagcaataattaggagatttgaaaggagaattatggtagggatgccatctgtcgagaacagggaaaagattttgaggactcttttggcaaaagagaaggtggatgagaaacttgattttaaggaagtcgcaaccatgaccgaaggatatagcggaagtgatctcaagaacttgtgcacaactgctgcttacaggcctgttagagagttaattcagcaagagagactaaagactctggagaaaaagcagaaggatgctggaggacagaataacgatgtccaagaagctccggatacagaagagaaagttcaacaagaaagagttattacccttagacctttgaacatgcaggacttcaaagaggctaagagtcaggttgctgcaagctacgcagctgagggggctggaatgagtgagttaaagcagtggaatgaattgtatggggaaggaggttcaaggaagcaagaacagttatcttatttcctatgaaaattaccgagggaagaaagaatttgtagctgcatccttctagttgctctttttctatacgagacatccatggggcaatcaggagtttgccagtgatataaaatttgtgtatgatttccagtagtatctagttgcttcatatttaatactcgattaaatgtattagtcacgtttggtattttgcccgtgaggctgtgaatattgttgttgtagctaattatgcagcttatgttagacccatagaatggtgctttcacagcttgttgtaggtcaatgaaagaaaaaaggcaatgttaagtggtattattatc

SEQ ID NO: 23232 - protein, 299 aa, Glycine max
MLPLRRPDLFRGGLLKPCKGILLFGPPGTGKTMLAKAIAREAGASFINVSMSTITSKWFGEDEKNVRALFTLAAKVSPTIIFVDEVDSMLGQRTRVGEHEAMRKIKNEFMTHWDGLMTNSGERILVLAATNRPFDLDEAIIRRFERRIMVGMPSVENREKILRTLLAKEKVDEKLDFKEVATMTEGYSGSDLKNLCTTAAYRPVRELIQQERLKTLEKKQKDAGGQNNDVQEAPDTEEKVQQERVITLRPLNMQDFKEAKSQVAASYAAEGAGMSELKQWNELYGEGGSRKQEQLSYFL

SEQ ID NO: 23233 - protein, 267 aa, Glycine max
MLAKAIAREAGASFINVSMSTITSKWFGEDEKNVRALFTLAAKVSPTIIFVDEVDSMLGQRTRVGEHEAMRKIKNEFMTHWDGLMTNSGERILVLAATNRPFDLDEAIIRRFERRIMVGMPSVENREKILRTLLAKEKVDEKLDFKEVATMTEGYSGSDLKNLCTTAAYRPVRELIQQERLKTLEKKQKDAGGQNNDVQEAPDTEEKVQQERVITLRPLNMQDFKEAKSQVAASYAAEGAGMSELKQWNELYGEGGSRKQEQLSYFL

SEQ ID NO: 23234 - protein, 249 aa, Glycine max
MSTITSKWFGEDEKNVRALFTLAAKVSPTIIFVDEVDSMLGQRTRVGEHEAMRKIKNEFMTHWDGLMTNSGERILVLAATNRPFDLDEAIIRRFERRIMVGMPSVENREKILRTLLAKEKVDEKLDFKEVATMTEGYSGSDLKNLCTTAAYRPVRELIQQERLKTLEKKQKDAGGQNNDVQEAPDTEEKVQQERVITLRPLNMQDFKEAKSQVAASYAAEGAGMSELKQWNELYGEGGSRKQEQLSYFL

SEQ ID NO: 23235 - DNA, 1193 bp, Glycine max
gattctgagttctctctctctctctttctttcttccactgtatctgcgtgtgtttgcgaattgtgcaattttcaagatctgaatcagagaatagataataatggctacaccggaccacctgttcaacctccgcaacaacttgtatctcggggcgtaccaagccgccatcaacagcggcgacgtcaccaacctctcccaagaagactccctcgagcgcgacaccctcgtccaccgctgctacatcgccctcggccagcttcagttcgtcatctccgagatccatgacgacgctcccacacctctccaagccgtcaaactcctcgctctctatttctcctcccccgacaccaaggattccgccatcgcgagtctcaaggagtggcttgccgatcccgccattgcaaacaacgccacgctgaggctcgtcgccggtctcgtcttcctccatgaaaatgatttcaacgaagccctcaaacacaccaatgctggtggaaccatggacctgcacgcgttgaatgttcagatctttattaagatgcataggtcggattatgctgagaggcagcttcggatcatgcagcagattgatgaagatcacactctcactcaactcgccaatgcctggctcaatttggctgtgggtgggtcaaagatccaggaggcgtatctgatcttccaggatttgtcggagaggtatcagtccaccagcttgcttttgaatggcaaggctgtttgctgcatgcacatgggcaacttcgacgaagccgagacccttttggttgaagctctaaacaaggatgccagggatccagaaactctagccaatctaattgtatgctgtcttcacctcggcaaaccatctaacaaatcattcagccagctgaaaatttctcatccagagcatgtattggtcaaacgggtatcatcagctgaagaaagttttgatagagcgctacaatcattttcctcatgagtgtcgatgattgaatttctttcaagagttgaatggtgtgagatcttcccatgcaatttttacaccttatcgtggctattgtattggttccgtatcttagaacataatcaactgggtaatgtgtcatagtattcaaatttataatgtttggtttacttgagtcttaatgttgtaaaagctacatctgacattaatttttaaacaatttcatttacatcgc

SEQ ID NO: 23236 - protein, 290 aa, Glycine max
MATPDHLFNLRNNLYLGAYQAAINSGDVTNLSQEDSLERDTLVHRCYIALGQLQFVISEIHDDAPTPLQAVKLLALYFSSPDTKDSAIASLKEWLADPAIANNATLRLVAGLVFLHENDFNEALKHTNAGGTMDLHALNVQIFIKMHRSDYAERQLRIMQQIDEDHTLTQLANAWLNLAVGGSKIQEAYLIFQDLSERYQSTSLLLNGKAVCCMHMGNFDEAETLLVEALNKDARDPETLANLIVCCLHLGKPSNKSFSQLKISHPEHVLVKRVSSAEESFDRALQSFSS

SEQ ID NO: 23237 - protein, 158 aa, Glycine max
MDLHALNVQIFIKMHRSDYAERQLRIMQQIDEDHTLTQLANAWLNLAVGGSKIQEAYLIFQDLSERYQSTSLLLNGKAVCCMHMGNFDEAETLLVEALNKDARDPETLANLIVCCLHLGKPSNKSFSQLKISHPEHVLVKRVSSAEESFDRALQSFSS

SEQ ID NO: 23238 - protein, 145 aa, Glycine max
MHRSDYAERQLRIMQQIDEDHTLTQLANAWLNLAVGGSKIQEAYLIFQDLSERYQSTSLLLNGKAVCCMHMGNFDEAETLLVEALNKDARDPETLANLIVCCLHLGKPSNKSFSQLKISHPEHVLVKRVSSAEESFDRALQSFSS

SEQ ID NO: 23239 - DNA, 1858 bp, Glycine max
attcaggccatgaccttcgacaccgttctcgatggttctgatttggtcggtcgggctcgcaccggtcagggtaaaactctggcatttgtgttgcccatattagagtctttaataaatggtccaacaaaagcttcaagaaagactggcttcgggaggactccaagtgttcttgtgcttctacctactagggaattggcctgtcaggtgcatgctgattttgatgtttatggtggggcaatgggattgagttcatgttgtttatatggcggagctccgtatcaaggtcaggaaattaagcttaggagaggtgttgatattgtcattggcacaccaggtcgtgtgaaggatcatatcgagaaagggaatattgacctgagccaactaaagtttcgtgtccttgacgaagccgatgaaatgctgaggatgggttttgttgaagatgttgaaatgattctaggcaaggtagaaaatgttaataaagttcagacacttcttttcagtgctactttgccagactgggttaagcaaattgctgcaagatttttgaagccagataagaaaactgctgaccttgttggaaatacaaaaatgaaggccagcatcaatgttaggcatattgttcttccttgtactagttctgccagggcccaacttatcccagatattattcgctgttatagcagtggaggccggacaattgtttttaccgagacaaaagaatctgcttctcagcttgcagggatcttgactggagcaaaagctctccatggtgacatacagcaatcaacacgtgaggttacactgtctggctttaggtctgggaaattcatgacattagttgccacaaatgtggcagctcgaggtcttgatattaatgatgttcagttaattatacagtgtgaacccccacgggatgtagaagcctatatccatcgttctggacgcacaggaagagcaggtaatactggggttgctgttatgctttatgacccaaaaagatcgaacatatctagaatagagagagagtctggtgtaaaatttgaacacgtatctgctcctcagcctgatgatattgccaaagccgttagtggggaagctgctgaaatgattatccaagtgtctgatagtgtggttcctgcattcaagtctgctgctgaagatcttttgaacaattctggtttaccagtcattgaattactggcaaaggctcttgcaaaggctgttggttatactgaagtaaagcaaagatcacttctaacttccatggagaactatgttacattacttcttgagactggcaaaccaatctacacccaatcttttgcctatggagtcttgaggagatttttgcctgaagagaaggttgaggccgtgaaaggtctttcaatcactgctgatggaaatggcgttgtttttgatgtagcagctaaagatttagacatatatcttaacggtcaggaaaatgcctcgaatgtaagtttagagatagtgaaaacattgccacagttgcaacagatggagcaacaccaaagaggtggcagatttggtgatggtggtggtcgtggttaccggtttggtggaagaggtggaggaggcaggaatggtaggttctccaatggtggcggaagaggtggacgtggcggcaactggggtggaaagagatggtgaagctgagaaaggacttagggagttgagttttcactctgctcaatgtgggaggagcattgctgcgtgatacaaccacatggagagatgactactacagttgtgaatgaagaaaacagttgatgttggttaggccttcggaggattcaagttcagatggattcaatgtgccccccccattaacatactcttg

SEQ ID NO: 23240 - protein, 555 aa, Glycine max
IQAMTFDTVLDGSDLVGRARTGQGKTLAFVLPILESLINGPTKASRKTGFGRTPSVLVLLPTRELACQVHADFDVYGGAMGLSSCCLYGGAPYQGQEIKLRRGVDIVIGTPGRVKDHIEKGNIDLSQLKFRVLDEADEMLRMGFVEDVEMILGKVENVNKVQTLLFSATLPDWVKQIAARFLKPDKKTADLVGNTKMKASINVRHIVLPCTSSARAQLIPDIIRCYSSGGRTIVFTETKESASQLAGILTGAKALHGDIQQSTREVTLSGFRSGKFMTLVATNVAARGLDINDVQLIIQCEPPRDVEAYIHRSGRTGRAGNTGVAVMLYDPKRSNISRIERESGVKFEHVSAPQPDDIAKAVSGEAAEMIIQVSDSVVPAFKSAAEDLLNNSGLPVIELLAKALAKAVGYTEVKQRSLLTSMENYVTLLLETGKPIYTQSFAYGVLRRFLPEEKVEAVKGLSITADGNGVVFDVAAKDLDIYLNGQENASNVSLEIVKTLPQLQQMEQHQRGGRFGDGGGRGYRFGGRGGGGRNGRFSNGGGRGGRGGNWGGKRW

SEQ ID NO: 23241 - protein, 552 aa, Glycine max
MTFDTVLDGSDLVGRARTGQGKTLAFVLPILESLINGPTKASRKTGFGRTPSVLVLLPTRELACQVHADFDVYGGAMGLSSCCLYGGAPYQGQEIKLRRGVDIVIGTPGRVKDHIEKGNIDLSQLKFRVLDEADEMLRMGFVEDVEMILGKVENVNKVQTLLFSATLPDWVKQIAARFLKPDKKTADLVGNTKMKASINVRHIVLPCTSSARAQLIPDIIRCYSSGGRTIVFTETKESASQLAGILTGAKALHGDIQQSTREVTLSGFRSGKFMTLVATNVAARGLDINDVQLIIQCEPPRDVEAYIHRSGRTGRAGNTGVAVMLYDPKRSNISRIERESGVKFEHVSAPQPDDIAKAVSGEAAEMIIQVSDSVVPAFKSAAEDLLNNSGLPVIELLAKALAKAVGYTEVKQRSLLTSMENYVTLLLETGKPIYTQSFAYGVLRRFLPEEKVEAVKGLSITADGNGVVFDVAAKDLDIYLNGQENASNVSLEIVKTLPQLQQMEQHQRGGRFGDGGGRGYRFGGRGGGGRNGRFSNGGGRGGRGGNWGGKRW

SEQ ID NO: 23242 - protein, 476 aa, Glycine max
MGLSSCCLYGGAPYQGQEIKLRRGVDIVIGTPGRVKDHIEKGNIDLSQLKFRVLDEADEMLRMGFVEDVEMILGKVENVNKVQTLLFSATLPDWVKQIAARFLKPDKKTADLVGNTKMKASINVRHIVLPCTSSARAQLIPDIIRCYSSGGRTIVFTETKESASQLAGILTGAKALHGDIQQSTREVTLSGFRSGKFMTLVATNVAARGLDINDVQLIIQCEPPRDVEAYIHRSGRTGRAGNTGVAVMLYDPKRSNISRIERESGVKFEHVSAPQPDDIAKAVSGEAAEMIIQVSDSVVPAFKSAAEDLLNNSGLPVIELLAKALAKAVGYTEVKQRSLLTSMENYVTLLLETGKPIYTQSFAYGVLRRFLPEEKVEAVKGLSITADGNGVVFDVAAKDLDIYLNGQENASNVSLEIVKTLPQLQQMEQHQRGGRFGDGGGRGYRFGGRGGGGRNGRFSNGGGRGGRGGNWGGKRW

SEQ ID NO: 23243 - DNA, 1390 bp, Glycine max
attcattgcacgcagttcctggaaagtagcaaagtaaagctctcttggttttgggaaccgaaacctaagaaaaacgcagaatctgtttcggaaagcgaaggaggcatggcatttgagtccaacgaagttgcagccacaacgctccaagccatatgctacaagcgcggttccctccagcttctcgatcagagaaagctccctctggagacagtttacttggaaattcgggattcaacggatggctggaatgccatacgggaaatggtggtccggggagcacctgctattgcaattgcagcggcactctctttggctgtggaggtgttcaatttagattttaatgggtcagctactgatgctgtatccttgctgcagaagaaattagaatatcttgtcacaagtcggccaactgcagtgaacctatcagatgctgcgacaaaactcaaagaagtgatatcaaatgctgctgctaccacttcagagggaaggagtgttttccaagtgtatatagatgctgctgaagttatgcttgaggatgatgttgcgtcaaatagagctattggttcttatggagctagtattattcaacaacaaacagagaaacaaaagctttctgttttgactcattgcaacactggaagtctagccacagctggatatggtactgctctgggtgtcatccgtgcacttcatagtgccggagttctaaaaagggcttattgcacagaaacacgcccatttaatcaaggatctagacttactgcctttgagttggtgcatgaaaaaataccaggaactcttattgccgattctgctgcagctgcattaatgaaggcaggacatgtggatgctgttgttgttggggcagatcgggttgcatcaaatggtgacacagccaacaaaattggaacctacagcgttgccttgtccgctaagtttcataatgtacctttttatgtggctgcacccctaacttccattgatctatcactttcttctggacaagaaattgtcattgaggagaggtctcccaaggaattgctgaacacacatggaggacttggagagcagattgctgcctcaggaatttctgtgtggaacccagcttttgatgttactcctgctaatctaatatcggggatcatcactgagaagggtgtcattacgaagacatctgctggtgatgcatttgacatcaaagccttcgtacagaaaacaggttaaggtagagtgagatttttatcacacgttacaacattgtaggcttgaaaagtattggagtggtagggttctttaagagcctctttggtacgcaagttagataagacttattaactttgagacctaattgtataagatgataacatcaatatattatgcaatgtttggt

SEQ ID NO: 23244 - protein, 407 aa, Glycine max
IHCTQFLESSKVKLSWFWEPKPKKNAESVSESEGGMAFESNEVAATTLQAICYKRGSLQLLDQRKLPLETVYLEIRDSTDGWNAIREMVVRGAPAIAIAAALSLAVEVFNLDFNGSATDAVSLLQKKLEYLVTSRPTAVNLSDAATKLKEVISNAAATTSEGRSVFQVYIDAAEVMLEDDVASNRAIGSYGASIIQQQTEKQKLSVLTHCNTGSLATAGYGTALGVIRALHSAGVLKRAYCTETRPFNQGSRLTAFELVHEKIPGTLIADSAAAALMKAGHVDAVVVGADRVASNGDTANKIGTYSVALSAKFHNVPFYVAAPLTSIDLSLSSGQEIVIEERSPKELLNTHGGLGEQIAASGISVWNPAFDVTPANLISGIITEKGVITKTSAGDAFDIKAFVQKTG

SEQ ID NO: 23245 - protein, 372 aa, Glycine max
MAFESNEVAATTLQAICYKRGSLQLLDQRKLPLETVYLEIRDSTDGWNAIREMVVRGAPAIAIAAALSLAVEVFNLDFNGSATDAVSLLQKKLEYLVTSRPTAVNLSDAATKLKEVISNAAATTSEGRSVFQVYIDAAEVMLEDDVASNRAIGSYGASIIQQQTEKQKLSVLTHCNTGSLATAGYGTALGVIRALHSAGVLKRAYCTETRPFNQGSRLTAFELVHEKIPGTLIADSAAAALMKAGHVDAVVVGADRVASNGDTANKIGTYSVALSAKFHNVPFYVAAPLTSIDLSLSSGQEIVIEERSPKELLNTHGGLGEQIAASGISVWNPAFDVTPANLISGIITEKGVITKTSAGDAFDIKAFVQKTG

SEQ ID NO: 23246 - protein, 320 aa, Glycine max
MVVRGAPAIAIAAALSLAVEVFNLDFNGSATDAVSLLQKKLEYLVTSRPTAVNLSDAATKLKEVISNAAATTSEGRSVFQVYIDAAEVMLEDDVASNRAIGSYGASIIQQQTEKQKLSVLTHCNTGSLATAGYGTALGVIRALHSAGVLKRAYCTETRPFNQGSRLTAFELVHEKIPGTLIADSAAAALMKAGHVDAVVVGADRVASNGDTANKIGTYSVALSAKFHNVPFYVAAPLTSIDLSLSSGQEIVIEERSPKELLNTHGGLGEQIAASGISVWNPAFDVTPANLISGIITEKGVITKTSAGDAFDIKAFVQKTG

SEQ ID NO: 23247 - DNA, 1163 bp, Glycine max
gtacgattaacatggagcaaatagtttttctccgctcactgcgagcacctttgttgcacggaggaaaagagggctttgttcatctacccaatctccatgcatgctgtgaatcatccaattcccacccatgttctctcaatgcagaaaaccattttaacagttctatttcttaccttggagttgcattgcttggagtaggaatcgctctagatttttttcttacaactgggggaggaagtggatttgagtcttcattgctggagagtgtgtcgttttgcctgtcattgtagggaaccaggaatggaatggcttagaagaaatgtatgtgaaaacggcttgtggtttcacccatagcctgcggaaaatgctttattgtgtttcggatatcaatttaaagttcacagttatgcaaataaccagtgcattagtgaatggcagcgctcttcgtttccacttacctagatttctatgtgtgcgtcatcattcatcaaccaagttgtttgtcacagggctttcctatgataccaatgaaccgattctgagagatgcctttgggcaacatggtgaaatcattgaagttaaagtaatatgtgatcatgtgactgggaaatcaagaggttatggatttgtgcggttcgtttctgaaactacagctgctgcagctcgcaaagaaatgaatggccagatactggatggaagacgcattcgggtgagttatgcacacaaaggcgagcgactaagtctgccaaacaattcataaaacagttcatggttgcaacatattcactttctaactgtgatactcgaagtctatagttttggcttttaattttagccattcaacgcaccttttttcatttgatggcgatctagatagtctcagtttgtttcgatggcttgaattgttgttctcatgttccttgaccttgaaatgctaatatccgatgaataacaaaatataatttagggttcattttgttttgatggatggcttgaattgatgttctcatatcccttgcccttgaaatactaatatcatatcataagatcattgacaatatataatttgggaccaagctgtttttctgtttgtttcttcttttcttttttttttccgtaaattgttacttgaaatagaaagatgagtgtgacatattggcaac

SEQ ID NO: 23248 - protein, 146 aa, Glycine max
MYVKTACGFTHSLRKMLYCVSDINLKFTVMQITSALVNGSALRFHLPRFLCVRHHSSTKLFVTGLSYDTNEPILRDAFGQHGEIIEVKVICDHVTGKSRGYGFVRFVSETTAAAARKEMNGQILDGRRIRVSYAHKGERLSLPNNS

SEQ ID NO: 23249 - protein, 131 aa, Glycine max
MLYCVSDINLKFTVMQITSALVNGSALRFHLPRFLCVRHHSSTKLFVTGLSYDTNEPILRDAFGQHGEIIEVKVICDHVTGKSRGYGFVRFVSETTAAAARKEMNGQILDGRRIRVSYAHKGERLSLPNNS

SEQ ID NO: 23250 - protein, 117 aa, Glycine max
MQITSALVNGSALRFHLPRFLCVRHHSSTKLFVTGLSYDTNEPILRDAFGQHGEIIEVKVICDHVTGKSRGYGFVRFVSETTAAAARKEMNGQILDGRRIRVSYAHKGERLSLPNNS

SEQ ID NO: 23251 - DNA, 1311 bp, Glycine max
tttatatggtctcaaggatggagacatgggcattggttctccattcatgtggctccaaggtgggcttggggatcaaggaatgcaatctttaaacttccaggggcttggtgttacaccatggatgcaacctagacttgatccttctataccaggtctccagccagagttataccaagcaattacttcttctgcattccaggaaatgaggacaatggatctttcaaaatcttcgcaatctcttttgcagtttcagcagacttcaaatgttcccagtgctcatgcttctgaggtacagaggcaattgttaccacagtctcagcttcaaaacacccttctacacaattttcaagaaaaccaggtgcctgctcagtcacaacttctgcaacagcagttgcatcgttaccacccgtatagtgatcagcagcaacagcagcagcaacttaaaaacttgcctgttcagcagcagttaccaaatgtcatctctcctatgtctaagtttgcatcaggtacccagtctcaatctcctcccatgcaagccctagcttcacattgtcagcagcagagctttcctgaacctatgaggaatcatatttccggttctgatgtttcccctatccagagtctactagggtcattctcccaggatggaacatcccagttacttaacttgagtggatccaattctgttatgtcttctgctgccatactgcccaagcaaataactgccgagcctcctcagcttccatctgctgcttctcagtgcatattgcctcaggtggaaaacttgggaacatcacaatcaaatgtgtctgaacttgctgctttgcctccatttcctggaagagaacattctgcataccatggcgctgctgatcctcagagcaatcttttatttgggattaacattgatccctcttctcttatgctgcaaagtggcatgtcaaacctgagaaatataggcaaagtgaacgattcattatcgttgccattttctacttcgaattgtggtggtgctacaggcactgatttccccttgagttcaaacatgacaacttcaagttgtgtggatgaatcaggcttcttgcagtgttctgaaaatgtagaccaagcaaatataccaactggaacctttgttaaggttcacaagtcagggtcctttggcaggtcactggacatttctaagttcagcagctatgatgaactgattagtgagcttgctcgcatgtttggccttgaaggccaactagaggaccctaagactcagagatcaggctaaaattaaaaaaaaaaaaaaaaaaaaaaaaaaaaaac

SEQ ID NO: 23252 - protein, 424 aa, Glycine max
LYGLKDGDMGIGSPFMWLQGGLGDQGMQSLNFQGLGVTPWMQPRLDPSIPGLQPELYQAITSSAFQEMRTMDLSKSSQSLLQFQQTSNVPSAHASEVQRQLLPQSQLQNTLLHNFQENQVPAQSQLLQQQLHRYHPYSDQQQQQQQLKNLPVQQQLPNVISPMSKFASGTQSQSPPMQALASHCQQQSFPEPMRNHISGSDVSPIQSLLGSFSQDGTSQLLNLSGSNSVMSSAAILPKQITAEPPQLPSAASQCILPQVENLGTSQSNVSELAALPPFPGREHSAYHGAADPQSNLLFGINIDPSSLMLQSGMSNLRNIGKVNDSLSLPFSTSNCGGATGTDFPLSSNMTTSSCVDESGFLQCSENVDQANIPTGTFVKVHKSGSFGRSLDISKFSSYDELISELARMFGLEGQLEDPKTQRSG

SEQ ID NO: 23253 - protein, 416 aa, Glycine max
MGIGSPFMWLQGGLGDQGMQSLNFQGLGVTPWMQPRLDPSIPGLQPELYQAITSSAFQEMRTMDLSKSSQSLLQFQQTSNVPSAHASEVQRQLLPQSQLQNTLLHNFQENQVPAQSQLLQQQLHRYHPYSDQQQQQQQLKNLPVQQQLPNVISPMSKFASGTQSQSPPMQALASHCQQQSFPEPMRNHISGSDVSPIQSLLGSFSQDGTSQLLNLSGSNSVMSSAAILPKQITAEPPQLPSAASQCILPQVENLGTSQSNVSELAALPPFPGREHSAYHGAADPQSNLLFGINIDPSSLMLQSGMSNLRNIGKVNDSLSLPFSTSNCGGATGTDFPLSSNMTTSSCVDESGFLQCSENVDQANIPTGTFVKVHKSGSFGRSLDISKFSSYDELISELARMFGLEGQLEDPKTQRSG

SEQ ID NO: 23254 - protein, 409 aa, Glycine max
MWLQGGLGDQGMQSLNFQGLGVTPWMQPRLDPSIPGLQPELYQAITSSAFQEMRTMDLSKSSQSLLQFQQTSNVPSAHASEVQRQLLPQSQLQNTLLHNFQENQVPAQSQLLQQQLHRYHPYSDQQQQQQQLKNLPVQQQLPNVISPMSKFASGTQSQSPPMQALASHCQQQSFPEPMRNHISGSDVSPIQSLLGSFSQDGTSQLLNLSGSNSVMSSAAILPKQITAEPPQLPSAASQCILPQVENLGTSQSNVSELAALPPFPGREHSAYHGAADPQSNLLFGINIDPSSLMLQSGMSNLRNIGKVNDSLSLPFSTSNCGGATGTDFPLSSNMTTSSCVDESGFLQCSENVDQANIPTGTFVKVHKSGSFGRSLDISKFSSYDELISELARMFGLEGQLEDPKTQRSG

SEQ ID NO: 23255 - DNA, 1424 bp, Glycine max
aaaactgaaaatttcctctactctcttgcttctcactctccctctcactcccattctcattctcattagattccatcacgaaccctaaaatcttctttgatcttttcatcttccactctctccatcttcttccttcttttttaaattttgtgtattcacaactatcaccatcgaacagtgacaccctactccaccacacaagttgatcaatcctctcccttgtttattttgcatctccctttccctcttggtctccgacagcaaagggagatgcgaaataaagggcatggtgctggtgtggaaagaggcggtgttaggaaaagagaaaggaagtaggaaaaagagaggcaaatgataggaaagaaaagggacaccatcgcacatacgacggtcgaatatcatcgtgctcgaagaagactgggaagggaaagagacctggaaaaggtgggaaccacttttggaagtccattgggcttggatttaagactcccaaggaatccattaaagtgtaggaaatggaatttggtttgggtgggaaggaataaggttgctgcattagagcctaatgaagtagaaacattgttgggcttcccaaggagccacactagaggaggtggaataagtaggactgacagaaagtgacccattatcaggttactacatcaatatacaatctcatattgggaaagctatattgtgaacactatggtacaatgcatacacagggaaaccaagaatactcgtgtaaactaaaattcaagaaacaatctataattgatagaaatcctcatcaagtgctttatatctattgcaatgattctatttttttcacatttaatatattattatttccattagctctagtattaaattttccttcctctttggtttgtataagacctaattgtcttaccggatagactcaatatgcatacttttgcaccaatgctcagatttctctttaaggaaaatagtgtcgcctttgctagtaaatggtcttttaattttgttgtagaagtttgcctcttaatgtggtttgcatgcttttctaggttcatagtatcattcaagatagtaatatgggatgaaaacatgcagtgttaatggaaactacactaggaaagggaaaggtcatgaatctttgtcagatgttcgtttactctgaaagcgaagcagggctcccaagtttcccactagatataacttcacctgctttgtcatcacattaaatgaacttacccccagattaaaggttgtgtggctgagtactttggtggtcgatacacatatgcaacacatataatgctttattattattgtaaattgtaaataaacatgttgtagatacatatatgcaacgcatacaatcctttattacatttttaactttttaattatatttaaataaatttttaattatattt

SEQ ID NO: 23256 - protein, 96 aa, Glycine max
MIGKKRDTIAHTTVEYHRARRRLGRERDLEKVGTTFGSPLGLDLRLPRNPLKCRKWNLVWVGRNKVAALEPNEVETLLGFPRSHTRGGGISRTDRK

SEQ ID NO: 23257 - protein, 68 aa, Glycine max
MHTQGNQEYSCKLKFKKQSIIDRNPHQVLYIYCNDSIFFTFNILLFPLALVLNFPSSLVCIRPNCLTG

SEQ ID NO: 23258 - protein, 58 aa, Glycine max
MHTFAPMLRFLFKENSVAFASKWSFNFVVEVCLLMWFACFSRFIVSFKIVIWDENMQC

SEQ ID NO: 23259 - DNA, 1475 bp, Glycine max
aggactagcatttgcaccaaatgtgagtcacgcagctcttcactttgaagactgaagacggtggcgtttagggtttcggaagagcatgcaattgaacccaaatggcgacggctgaagatgctccagtgctccctgaggacctcatagtggaaattctgtcatgggttgaagtgaagaatctcatgcgattcaggtgcgtttccaagtcctggaattccctcatcttcaatcccacattcattaaattgcaccttcaaaggtcctcccaaaacatccacatcctgttaacatttgaccaagattcatcgaacccctacccgtaccatgatgataactacatctccgtcgttgccgcaccctgctctatacagcgtttacttgagaacccatcatccactatttataatatagttcattttctcgaggctcagtcaacatcatcatcgtccactatttattttgatgtttgttaccgatttaagcacacttatttgttcttgggtgtatgcaatgggttggtttgcttgcttgattgtttgtatgaggatgaatttgaggaatactgggtccgattttggaacccggccactagggccatgtccgcagattcgccccacttgcgtgtccattcgagcaattataaacttggagacattgctgtgaagcatgcgtttgggtacgatgattcgagtgacacttacaaggtgttggcgatcctttttaacgttaaatcacaagattgggagctgagagttcactgcatgggtgatgacactggttggagaaatgttttgacttgttctgcttttcccattttgcaacaagtttatgggcagtttgtgagtggcactcttaactggctagcacttaacaattcgtcgggttctgatcattatcaatgggaaactgtcactgtcgatcagttagtcattttttcctatgatctgaagaacgagacatacagttatttgtcgatgcctgatggtctttctgaaatctctcttgacgagccttatcttggggttttgaatggctgcctttgtctttctcatgatcacaggcgaaccaatcttgttgtttggctaatgagagagtttggagctgaaaagtcttggactcagttgctgaatgtaagctatcatcatcttcaagttctagattttccaccttgtccagtggtacctttgtgcaagtctgaaaatgacgacgtcctgttgctggaagactatggaggtggtgcagaatttgttctggttgataagagagataatagtatagaccgcatggaaggtttcaacaatggattatcgtctttctctgcatttgtctctcatgattatgttcaaagtttggttttgccatatcgaaattaagctacctgcatttgcttatattatgtaagtggtttcagaaccgtggcatttaacatttggacaggagagatagcttgaataattttggtggttccttagttt

SEQ ID NO: 23260 - protein, 423 aa, Glycine max
MATAEDAPVLPEDLIVEILSWVEVKNLMRFRCVSKSWNSLIFNPTFIKLHLQRSSQNIHILLTFDQDSSNPYPYHDDNYISVVAAPCSIQRLLENPSSTIYNIVHFLEAQSTSSSSTIYFDVCYRFKHTYLFLGVCNGLVCLLDCLYEDEFEEYWVRFWNPATRAMSADSPHLRVHSSNYKLGDIAVKHAFGYDDSSDTYKVLAILFNVKSQDWELRVHCMGDDTGWRNVLTCSAFPILQQVYGQFVSGTLNWLALNNSSGSDHYQWETVTVDQLVIFSYDLKNETYSYLSMPDGLSEISLDEPYLGVLNGCLCLSHDHRRTNLVVWLMREFGAEKSWTQLLNVSYHHLQVLDFPPCPVVPLCKSENDDVLLLEDYGGGAEFVLVDKRDNSIDRMEGFNNGLSSFSAFVSHDYVQSLVLPYRN

SEQ ID NO: 23261 - protein, 396 aa, Glycine max
MRFRCVSKSWNSLIFNPTFIKLHLQRSSQNIHILLTFDQDSSNPYPYHDDNYISVVAAPCSIQRLLENPSSTIYNIVHFLEAQSTSSSSTIYFDVCYRFKHTYLFLGVCNGLVCLLDCLYEDEFEEYWVRFWNPATRAMSADSPHLRVHSSNYKLGDIAVKHAFGYDDSSDTYKVLAILFNVKSQDWELRVHCMGDDTGWRNVLTCSAFPILQQVYGQFVSGTLNWLALNNSSGSDHYQWETVTVDQLVIFSYDLKNETYSYLSMPDGLSEISLDEPYLGVLNGCLCLSHDHRRTNLVVWLMREFGAEKSWTQLLNVSYHHLQVLDFPPCPVVPLCKSENDDVLLLEDYGGGAEFVLVDKRDNSIDRMEGFNNGLSSFSAFVSHDYVQSLVLPYRN

SEQ ID NO: 23262 - protein, 258 aa, Glycine max
MSADSPHLRVHSSNYKLGDIAVKHAFGYDDSSDTYKVLAILFNVKSQDWELRVHCMGDDTGWRNVLTCSAFPILQQVYGQFVSGTLNWLALNNSSGSDHYQWETVTVDQLVIFSYDLKNETYSYLSMPDGLSEISLDEPYLGVLNGCLCLSHDHRRTNLVVWLMREFGAEKSWTQLLNVSYHHLQVLDFPPCPVVPLCKSENDDVLLLEDYGGGAEFVLVDKRDNSIDRMEGFNNGLSSFSAFVSHDYVQSLVLPYRN

SEQ ID NO: 23263 - DNA, 1213 bp, Glycine max
ttcttaggacatgccaccaatcttctcttcttctcaaatcccacaatctcataagattgagttgtttgttgagaattggcgctcaattcaatctgattgattcacaatgcattccccaaacaaccacaaccctgctcctccagcattcccttcgacatgcactccttcttcaacccctagccctaacccttcctcctcctaccctccctccttccacttccccaacttcgacctccctctccctccccacctcaccaccgctccatctccttccccacccaacccatccctccccctccccgccgcagcccccgccacccgagttcgttcccgcctcctcctctgccgtcctcgccgctgccctcacgcgcctccccagcagtaaggtccccaagggaagacacttggccggggagctcaggacttacgacgttgacgtgaggcttcccagcgaggtccagccccagctcgaggtggctccgattacgatatacgggtcggatcctaacccgtttctggggaggcagattgcggtgaataagtcgtatatatgctatggcttgaaacaggggaacattaggtgcttgatattcacactgctgtcaggtccttgctcagaggccacactcagacggtcacagacttggcgttctttgctgaagatgttcatctcttggctagatgaccgtgtctacttgtgggagatctctgaaggcccagatgatgaagataagcttcaaattactaccaatattgttattgctcttcaaatagtgagggaggagaaagttgaacatcctcaaatttgctggcactgccacaaacaagagattttgatagttggtatgggaaaacatgttttacggattgataccccaaaagttggaaatggtgaagcctttgtggtagatgatcctctgagatgtcctgtggataagctcattgatggggttaagctggtaggcacacataacggggaggtgactgatttgtcgatgtgccaatggatgaccaatcaatttgtatctacatcacaggatgacacggtttgtatttttctgttgtaattaactgctacttttgttttctcaagtttaaattcattttttttttatgaaagatgacaatgtttattaaagcattttcctgatcaggctaaataatgcagtggtatgaatgttttgttaatgtctatgttgaactttacttgacc

SEQ ID NO: 23264 - protein, 354 aa, Glycine max
LRTCHQSSLLLKSHNLIRLSCLLRIGAQFNLIDSQCIPQTTTTLLLQHSLRHALLLQPLALTLPPPTLPPSTSPTSTSLSLPTSPPLHLLPHPTHPSPSPPQPPPPEFVPASSSAVLAAALTRLPSSKVPKGRHLAGELRTYDVDVRLPSEVQPQLEVAPITIYGSDPNPFLGRQIAVNKSYICYGLKQGNIRCLIFTLLSGPCSEATLRRSQTWRSLLKMFISWLDDRVYLWEISEGPDDEDKLQITTNIVIALQIVREEKVEHPQICWHCHKQEILIVGMGKHVLRIDTPKVGNGEAFVVDDPLRCPVDKLIDGVKLVGTHNGEVTDLSMCQWMTNQFVSTSQDDTVCIFLL

SEQ ID NO: 23265 - DNA, 1189 bp, Glycine max
atataaacttacccttgccttgtcaaccaacacaaagaaggttaatctcaccaatctgacagggatcatcaatggcaaagcaattaattcccttcataatctctcttctcctcttcattttcacagaagtggaaggggctaaaaggtcttatggggtatacaacagcaaccctgtaaaactgtttgtttttggggactcctatgttgacactgggaatttcgtgcattcagaatcatacaagcctcccagtggaatcacttttcctggtaaccctgcagggagattctgcgacggtcgcatcatcactgattacgttgcttcctttctgaaaattgaatcccccacaccatatacttttagaaattcatctaatcttcactacggtataaactttgcctatggagggaccggtattttcagtacttcgattgatggaccaaacgcgactgcccaaatcgactcatttgagaagctaatccaacaaaatatctataccaaacatgatcttgaatcctcaattgctctcgtcaatgccggtggtaatgattatacaaatgcattaaaaactgggcgcattattgatttaccaggcttcatggaatcccttgtgaagcaaatgtctgtaaatcttaaacgcattcgcagcttagggataaaaaaggtagcagttgggttattacagccaattgggtgtttgcctgtgttaaatgtgatatctttccgtacgaactgcattggccttttgaacgtgatctccaaagatcacaacaaaatgttgctcaaagctgtgcaagaactcaacaaggaagcagcagacaaatcagttttcataacactggacctctacaactccttcctctctgcaattgaaactatgcagaaaaagcgtgcagaaaagtctacactgatgaatccgttgcaaccatgctgtgagggaaacaatttggaagattcatgtggaagtctggatgacgaaggatcaaagaaatacagtttatgtgagaacccgaaactttctttcttttgggacacacttcacccttctcaaaatggttggtttgcagtctacacaatattgcaatctactcttggccaacttattacatgaaaaaaacttctaatcaatattagtgtatttggattagttccatgatgaaaaataatctattaatccttcaaagttattgc

SEQ ID NO: 23266 - protein, 345 aa, Glycine max
MAKQLIPFIISLLLFIFTEVEGAKRSYGVYNSNPVKLFVFGDSYVDTGNFVHSESYKPPSGITFPGNPAGRFCDGRIITDYVASFLKIESPTPYTFRNSSNLHYGINFAYGGTGIFSTSIDGPNATAQIDSFEKLIQQNIYTKHDLESSIALVNAGGNDYTNALKTGRIIDLPGFMESLVKQMSVNLKRIRSLGIKKVAVGLLQPIGCLPVLNVISFRTNCIGLLNVISKDHNKMLLKAVQELNKEAADKSVFITLDLYNSFLSAIETMQKKRAEKSTLMNPLQPCCEGNNLEDSCGSLDDEGSKKYSLCENPKLSFFWDTLHPSQNGWFAVYTILQSTLGQLIT

SEQ ID NO: 23267 - DNA, 1534 bp, Glycine max
atctatgcctaaaacttatctttttaattatataaatatttgccatatctttctatgctagttgtggaatcatattacttgttgaatatttaggcacttggatgtctcctttttcgcatatgctacttcaaaagtgcttttgatggggaatcaaagctccaagtcttaaatggaaactaccgcattcccgaattaccaaaatacacttcacctgtcacggacttgataagagaaatgctccaagctagaccagatgacagaccagatatcacgcaggcaagcgctttgcttgattgaccattcatctccatcagtttaggtctggtttcgtgttaatgagcaactacctattaatttacagaagtcgttacctgacagaccacctgaatcgccctcatctaacaatcatgaaggtgtgtcaatgccctcaaacagatcacctccaatgcctcgtaggaacccacctcctccaccttcatctggagaacccaaaacttcaccacaaccaccccctgcttctaggggagggggaagtgggggtgcacttggtgctttctggtccactcagcatgcaaaggaatcacttgttgctgaggataagagtaaaccaatttttgatgaagaaccatctagccaccatatttcaccgaaacatgataggattcttcctgaaaacgaacagttacccaaaaatgttggtcctaacaaagtggttaacacacaaactcataccgtgaaaagcagtacacatggaaaattacacaagcctgatactgtaccctccaaggattttgaaataaatttgtttaaggataaagatcgcgtacgtgagagtacaactaactttcaaaaccaggcttttaacacttttgttgctgaatttgatactactaatctcaactctggacttagtaacaaacccgaaagggaacaagcattagaggctgaggtggagaaactcaaagagcagctgaaggaagctaacttggaaaaagctgaaataacatcaaagtatgaaaagctttctgctatctgccgatcacaaaggcaagaactgcaggatctgaagcaagcactcacagctaggactccttcgccaattagagatggtttgaaaacctctcctgcagttacatcatctgcatctgcatctgcgaataagtcatggcatgcttttccagaggaacctcaacaacaaaagtccttctcagctgaaaatacctccaaatccgtcagggtgaaaaatggtcagcagaacaagcaacctgttgcactagctactgattttgattcatggggttttggatcagatagcttcagtgctgtacctgctggcagcccacacatgcaaagacctagcagtgcaggaacaaagtctcaggcttttggtgaggcaaacaagtcaacttctcaaccagctggatgggctggtttttaattatgggaaaagttctaaaggatctattctgtgattgctatgagacttattttttggtcctacatggagaagtaaaatgaatgcaaactattatat

SEQ ID NO: 23268 - protein, 338 aa, Glycine max
MPSNRSPPMPRRNPPPPPSSGEPKTSPQPPPASRGGGSGGALGAFWSTQHAKESLVAEDKSKPIFDEEPSSHHISPKHDRILPENEQLPKNVGPNKVVNTQTHTVKSSTHGKLHKPDTVPSKDFEINLFKDKDRVRESTTNFQNQAFNTFVAEFDTTNLNSGLSNKPEREQALEAEVEKLKEQLKEANLEKAEITSKYEKLSAICRSQRQELQDLKQALTARTPSPIRDGLKTSPAVTSSASASANKSWHAFPEEPQQQKSFSAENTSKSVRVKNGQQNKQPVALATDFDSWGFGSDSFSAVPAGSPHMQRPSSAGTKSQAFGEANKSTSQPAGWAGF

SEQ ID NO: 23269 - protein, 330 aa, Glycine max
MPRRNPPPPPSSGEPKTSPQPPPASRGGGSGGALGAFWSTQHAKESLVAEDKSKPIFDEEPSSHHISPKHDRILPENEQLPKNVGPNKVVNTQTHTVKSSTHGKLHKPDTVPSKDFEINLFKDKDRVRESTTNFQNQAFNTFVAEFDTTNLNSGLSNKPEREQALEAEVEKLKEQLKEANLEKAEITSKYEKLSAICRSQRQELQDLKQALTARTPSPIRDGLKTSPAVTSSASASANKSWHAFPEEPQQQKSFSAENTSKSVRVKNGQQNKQPVALATDFDSWGFGSDSFSAVPAGSPHMQRPSSAGTKSQAFGEANKSTSQPAGWAGF

SEQ ID NO: 23270 - DNA, 1046 bp, Glycine max
acaaacaattaaacaaattaatcttcaattctctcaattttctttttgtttttccctcttttttttttttcttttctggtcatcatcatgcccagaacaaaggtgaaaatcgccttcataaccaacgatgctgcgaggagggcagcatacaggaaaaggaagaagggaattctgaagaagatggaggaactcagcaccctttgtggaattgaagcatgtgctatagcatatagcccctatgatcccgagccagtgatttggccatccgaattgggtgtccatcatgtgctgggaaaattcaggaccatgtctgaatgggagaagaacaagaagatggcgaaccaggagagcttcctagggcatatgatcgcgaagcacaaggagcagctgaagaaactcgtgaaggaaaacaaggagaaggagatgaccgtgttcatgcatcaatgccttgatgaagggagggttctgccagataacaacttgacggcagacgatttgaacgatctttcgtcgatcatcgaacagaacctgaaggatgtttgtagaaggttggaaacgctgaatgttatggagaagacaccaccacaccaacaacccccccagatccaatcatcaccagtgttggatatgagtgctaaccatgatcaaaagcagaagaagtttatggatttgcttaatggtaatgaggatgagacaacaacagtgcctccatttgaatcagatgctaatctccaactccaaattgggttttaggctaacctgttaccttgaaaaaattaagcacgtgtgtgcttgttagtcttttgggaatcatgtttcagttcaatttgtctatgctttgatttttaattttaattactgtcctagcttgtgtgtcaatgtgaagacacaatagtaagtagtcatttaattactgtctagctagtcttcacattttattttcgtgcctggaaatacatgttgatttggtttgacatgtttatcctgctttcaggacttggttgttcatttaatcattatggtttaattaagaatgtttcgcttgc

SEQ ID NO: 23271 - protein, 221 aa, Glycine max
MPRTKVKIAFITNDAARRAAYRKRKKGILKKMEELSTLCGIEACAIAYSPYDPEPVIWPSELGVHHVLGKFRTMSEWEKNKKMANQESFLGHMIAKHKEQLKKLVKENKEKEMTVFMHQCLDEGRVLPDNNLTADDLNDLSSIIEQNLKDVCRRLETLNVMEKTPPHQQPPQIQSSPVLDMSANHDQKQKKFMDLLNGNEDETTTVPPFESDANLQLQIGF

SEQ ID NO: 23272 - protein, 190 aa, Glycine max
MEELSTLCGIEACAIAYSPYDPEPVIWPSELGVHHVLGKFRTMSEWEKNKKMANQESFLGHMIAKHKEQLKKLVKENKEKEMTVFMHQCLDEGRVLPDNNLTADDLNDLSSIIEQNLKDVCRRLETLNVMEKTPPHQQPPQIQSSPVLDMSANHDQKQKKFMDLLNGNEDETTTVPPFESDANLQLQIGF

SEQ ID NO: 23273 - protein, 148 aa, Glycine max
MSEWEKNKKMANQESFLGHMIAKHKEQLKKLVKENKEKEMTVFMHQCLDEGRVLPDNNLTADDLNDLSSIIEQNLKDVCRRLETLNVMEKTPPHQQPPQIQSSPVLDMSANHDQKQKKFMDLLNGNEDETTTVPPFESDANLQLQIGF

SEQ ID NO: 23274 - DNA, 1591 bp, Glycine max
actactgttctgcaaaaaagctattttggccctgtgccaccaaagccatctcccccatttttgctcctctatctcttttttctaatcatcacaattgggtgagaaaaaaacacacacacaactcaacaatgggtgagaaagatgatggcttgggtttggggttgagtttgaagttaggatggggagaaaataatgataacaataataatcaacaacaacaccctttcaacgtgcacaagcctcctcaatcggttccaaaccaaagggtttccgtcaatagcttgttccattttcatgatcggagctccgagatgcggtcgttcttccgcggaatagacgtgaatttgccaccgcccccgccttcggcggctctggcggcgttcgatgacgagaacggggtgtcctcgccgaacagcacgatatcgagcatcagcgggaagcggagcgagagagagggaaacggagaggagaacgagagaacgtcgagttctcgcggcggcggcggaagcgacgacgatgaaggcggcgcgtgtggtggagacgccgacgccgatgcgtcgaggaagaagctgaggttgtctaaggaacaggccttggtgctggaagaaacattcaaggaacacaatactctgaacccgaagcaaaagcaagctttggcaaagcagttgaatttgatgcctaggcaggtggaggtgtggtttcaaaacagaagagcaaggaccaaattgaagcagactgaagtggattgtgaatatttgaagaggtgctgtgagaatctaactgaagagaataggaggcttcaaaaggaagtgcaagagctcagggcattgaagttatccccacagctttacatgcaaatgaaccctcccaccactctcacaatgtgcccttcatgtgagcgtgttgctgtctcatccgcatcctcttcctcatcggccaccatgccctctgccctgcctccagctaatctcaacccggtgggccctaccatccagcggccaatgcccgtcaacccttgggcagcaatgttgaatcagcaccgtggccggccataatcaaaccctccaggccgtaggtaatagggtaaagttcaggatggaagctaggacattttagttgtgctagacagaaatgaatcaaagaaataggaatcttatgtgttggttaactttactaggactttgagagctcatggtttgggaaattctatttgcatccttttttttttcattgcaccttccattctcttttacattgcagaaattagttttcggaatctacaatgcaattatagaaattaatttttgaaatgtaaaagaaaaggtagagattttgaagagttaaaaaaaaaggatgcaactagaatcatcctcatgcttttggttaactctttttgtctaggcttattttactttgagcatagatagaacatgtttttagtcaactttaggatgtgtaaagtttggacatgttaaagtagttagtgttttcatctgctgaacagtgtttgttatttgttaaccttggaaagttggaaaagggaattggaatctgtattttattttatattttatttgcttcttttcattgg

SEQ ID NO: 23275 - protein, 350 aa, Glycine max
YCSAKKLFWPCATKAISPIFAPLSLFSNHHNWVRKKHTHNSTMGEKDDGLGLGLSLKLGWGENNDNNNNQQQHPFNVHKPPQSVPNQRVSVNSLFHFHDRSSEMRSFFRGIDVNLPPPPPSAALAAFDDENGVSSPNSTISSISGKRSEREGNGEENERTSSSRGGGGSDDDEGGACGGDADADASRKKLRLSKEQALVLEETFKEHNTLNPKQKQALAKQLNLMPRQVEVWFQNRRARTKLKQTEVDCEYLKRCCENLTEENRRLQKEVQELRALKLSPQLYMQMNPPTTLTMCPSCERVAVSSASSSSSATMPSALPPANLNPVGPTIQRPMPVNPWAAMLNQHRGRP

SEQ ID NO: 23276 - protein, 308 aa, Glycine max
MGEKDDGLGLGLSLKLGWGENNDNNNNQQQHPFNVHKPPQSVPNQRVSVNSLFHFHDRSSEMRSFFRGIDVNLPPPPPSAALAAFDDENGVSSPNSTISSISGKRSEREGNGEENERTSSSRGGGGSDDDEGGACGGDADADASRKKLRLSKEQALVLEETFKEHNTLNPKQKQALAKQLNLMPRQVEVWFQNRRARTKLKQTEVDCEYLKRCCENLTEENRRLQKEVQELRALKLSPQLYMQMNPPTTLTMCPSCERVAVSSASSSSSATMPSALPPANLNPVGPTIQRPMPVNPWAAMLNQHRGRP

SEQ ID NO: 23277 - protein, 247 aa, Glycine max
MRSFFRGIDVNLPPPPPSAALAAFDDENGVSSPNSTISSISGKRSEREGNGEENERTSSSRGGGGSDDDEGGACGGDADADASRKKLRLSKEQALVLEETFKEHNTLNPKQKQALAKQLNLMPRQVEVWFQNRRARTKLKQTEVDCEYLKRCCENLTEENRRLQKEVQELRALKLSPQLYMQMNPPTTLTMCPSCERVAVSSASSSSSATMPSALPPANLNPVGPTIQRPMPVNPWAAMLNQHRGRP

SEQ ID NO: 23278 - DNA, 1296 bp, Glycine max
atttatcatttcattcctataaagtgagtaatcgtgtcctgtcagtagatattccaaaaatgatttttcattaaaattaaaaacaattactttatcctcctccaaactccaaagtgagtaaccatatatagccaccctctctcctccgatcactctccactccagtgtggaaaatcaaaacaaggtgccatctttgtttgtcatacatgaccatggccatgcccctgtttctgatgttccttcttctgcacatagcttgggtggcatcgtcggatctccgacctgggttttactcaaaaacatgtccaaaagcggaactcatagtccgagatgtgatgaagaaggcccttatgagggaacccagaagtgttgcctctgttatgcgcttccagttccatgattgctttgtcaacgggtgtgatggttctatgctgcttgatgatacaccaacgatgctgggggagaaattggccctctcaaatataaattcgctgagatcgtatgaagttgtcgatcaagtgaaggaagcgctcgagaaggactgcccctgagtggtttcctgtgctgacatcataattatggcatctagagatgctgtctctctgacaggtggacctgagtgggaggtgaggttgggaagattggacagcttgagtgctaatcaagaagactcaaacaacatcatgccaagcccaagagccaacgcaagctctcttattgatctcttccagaaatataaccttactgtgaaagacctggtagcactctcaggatctcactctattggccaaggtcgttgtttctccatcatgtttaggctatacaatcaatctggaactggaaggcctgaccctgccattgaccctagctatagacaataccttaacaggctatgtccactggatgttgaccaaaatgtcacagggaaccttgattccacgcctctcgtctttgataaccaatatttcaaggacttggctgctgggaggggctttctcaattctgatcaaacactcttcacattcccccacacaagggagtttgtgaggttatttagtagacgcaaaactgagtttttcaaggcatttgtggaaggaatgttgaaaatgggtgacttgcagtctggtcgacctggggaagttaggactaactgcaggctcgtcaatgctcgcccgattaatttgctgcttcagtctccacacaacatggagagtaacgataaataaataaaaaataaatgcgtgtctcttcatattatatgttatccaaatatgaaacgaaatattttcacttccg

SEQ ID NO: 23279 - protein, 215 aa, Glycine max
MASRDAVSLTGGPEWEVRLGRLDSLSANQEDSNNIMPSPRANASSLIDLFQKYNLTVKDLVALSGSHSIGQGRCFSIMFRLYNQSGTGRPDPAIDPSYRQYLNRLCPLDVDQNVTGNLDSTPLVFDNQYFKDLAAGRGFLNSDQTLFTFPHTREFVRLFSRRKTEFFKAFVEGMLKMGDLQSGRPGEVRTNCRLVNARPINLLLQSPHNMESNDK

SEQ ID NO: 23280 - protein, 180 aa, Glycine max
MPSPRANASSLIDLFQKYNLTVKDLVALSGSHSIGQGRCFSIMFRLYNQSGTGRPDPAIDPSYRQYLNRLCPLDVDQNVTGNLDSTPLVFDNQYFKDLAAGRGFLNSDQTLFTFPHTREFVRLFSRRKTEFFKAFVEGMLKMGDLQSGRPGEVRTNCRLVNARPINLLLQSPHNMESNDK

SEQ ID NO: 23281 - protein, 138 aa, Glycine max
MFRLYNQSGTGRPDPAIDPSYRQYLNRLCPLDVDQNVTGNLDSTPLVFDNQYFKDLAAGRGFLNSDQTLFTFPHTREFVRLFSRRKTEFFKAFVEGMLKMGDLQSGRPGEVRTNCRLVNARPINLLLQSPHNMESNDK

SEQ ID NO: 23282 - DNA, 1574 bp, Glycine max
aaagcagagagcaaatcaacaaaagaagccatggtagtgttacaagaagtcttcaacgttgtaccaacttccgaatcagaagagtttcagttaccaactcaaacatcgctttccctcaccttcttcgacatcctatggttaaggttaccacctgttcaacgcgtcttcttctatgaattccctcacccaacccatctcttctttgatacccttcttcccaaactcaaacactctctttctcttgcacttgcccactttttccctcttgcgggccacctcacttggccacttcactcccaaaaacccatcatcaattacaaatctggtgacactgttcccctcacagttgctgtatctgaagctgatttcaaccacctagcaggcacagatctttatgaagccaaagaaattccccatcttttaccccacttgaccatatcccacgaaaaagccacgcttttggccctgcaagctaccctctttccaaactctggattttccattggaataacctcacaccatgctgttctagatggcaagacttcaacatcgtttatcaaatcctgggcttatctttgtagagaatcacaatcacccacttctttaccacctgaactgattcctttttatgacagggaagtaatcaaagaccctaaccatttaggggtaaaatatgtcagtgattggttagagcagaatggacccaacaaccgaagcctcttggtttgggatctgcaagctccagaagatgcaactagaggcatatttcaattgtctcgttcggatattgaaaagctgaagcaaatagtggtgtccaagaagaaagggaacaacaccaaccttcgcttgtcaacctttgtgttgtctattgcctatgcttgtgttttcagggtgagagcagaggaaacaaagaacaagagagttatgttggctttgaatgttgattgcagggcacgtttggagccacctattccaccaacatattttggaaactgtgttggagcgagacttgcaattgctgaaacaagagagatattgggggaagatggcctaattgtggttgtggatgcactgaatgatgccttggggagtctcaaggatggagcactgagtggagcagaaaattggtcaaggtggttgcttgaaagttttagtgatgatgtgagaataattggtgttgctgggtcacctaggtttgaggcttatagtaatgactttggttggggaagaccaaagaaagtggagatggcttctatagacagaactggggcactttgtttatcagatagcaaaaatggtgatggggttgaggtaagttttgtgtccaacaaaagagcaatggagacctttgcttatctctttgccaatggccttcgatcttgagtccctcttggtacaatcttgtggtttttcatgaataaaaagttgaggaaaaataaaggtagagtagtgtaggtgttcttatgaaaattcgtttttaacaattaattgtctgaaatgttctggtggtgtgtaatgcttcaattatttgacaattttatgtatattaatcatgtattgctgttgattatccg

SEQ ID NO: 23283 - protein, 460 aa, Glycine max
KAESKSTKEAMVVLQEVFNVVPTSESEEFQLPTQTSLSLTFFDILWLRLPPVQRVFFYEFPHPTHLFFDTLLPKLKHSLSLALAHFFPLAGHLTWPLHSQKPIINYKSGDTVPLTVAVSEADFNHLAGTDLYEAKEIPHLLPHLTISHEKATLLALQATLFPNSGFSIGITSHHAVLDGKTSTSFIKSWAYLCRESQSPTSLPPELIPFYDREVIKDPNHLGVKYVSDWLEQNGPNNRSLLVWDLQAPEDATRGIFQLSRSDIEKLKQIVVSKKKGNNTNLRLSTFVLSIAYACVFRVRAEETKNKRVMLALNVDCRARLEPPIPPTYFGNCVGARLAIAETREILGEDGLIVVVDALNDALGSLKDGALSGAENWSRWLLESFSDDVRIIGVAGSPRFEAYSNDFGWGRPKKVEMASIDRTGALCLSDSKNGDGVEVSFVSNKRAMETFAYLFANGLRS

SEQ ID NO: 23284 - protein, 450 aa, Glycine max
MVVLQEVFNVVPTSESEEFQLPTQTSLSLTFFDILWLRLPPVQRVFFYEFPHPTHLFFDTLLPKLKHSLSLALAHFFPLAGHLTWPLHSQKPIINYKSGDTVPLTVAVSEADFNHLAGTDLYEAKEIPHLLPHLTISHEKATLLALQATLFPNSGFSIGITSHHAVLDGKTSTSFIKSWAYLCRESQSPTSLPPELIPFYDREVIKDPNHLGVKYVSDWLEQNGPNNRSLLVWDLQAPEDATRGIFQLSRSDIEKLKQIVVSKKKGNNTNLRLSTFVLSIAYACVFRVRAEETKNKRVMLALNVDCRARLEPPIPPTYFGNCVGARLAIAETREILGEDGLIVVVDALNDALGSLKDGALSGAENWSRWLLESFSDDVRIIGVAGSPRFEAYSNDFGWGRPKKVEMASIDRTGALCLSDSKNGDGVEVSFVSNKRAMETFAYLFANGLRS

SEQ ID NO: 23285 - DNA, 1411 bp, Glycine max
attgcattctagcaaagcaagtggaccttgccagctcaaggaaattttaccagacaataaatgagtgagtattcagaaaccaaaaaccaatagcaatacatttccgatttccagacagaggaactactcagcttagcttgagtattttcaagaggggatcaaagggaagaagaagggaaggactcaaacttgcacacgcaacctttggttcctttcccaacactcaccatggtggcagattctaagtccaattccgacctctccttcggaaaaatctttgccagcagtgctttctctgcatgtttcgctgaggtgtgtactattcctttggatactgccaaagtgaggcttcagcttcaaaagcaagctgtagctggtgatgttgtctccttacctaaatataagggtatgctgggaacagttggaaccattgccagggaagaaggtctttcagcactctggaagggcattgtgccagggttacatcgtcaatgtttgtatggaggcttaagaattgggttatatgaacctgttaagactttctatgtggggaaagaccatgttggagatgttccattgtcaaagaaaattcttgctgcatttacaactggtgcttttgcaattgcagtggcaaatccaaccgatcttgtcaaagttagacttcaagctgaaggaaaattacctcctggtgttcccaggcgctactctggatctttaaatgcttattcaacaattgtgagacaggaaggagttggggctctttggactgggcttggccccaatatagcaagaaatggtatcatcaatgctgccgaattagccagctatgatcaagtgaaacagactattttgaaaattccaggattcactgacaatgttgtaactcatcttcttgctggtcttggggcagggtttttcgccgtctgtattggctccccagttgatgtggttaagtcgagaatgatgggagattctagttacaagaacacccttgattgttttatcaaaacattgaagaatgatggacccttagccttttataaagggttcctcccaaattttggacggctgggatcttggaatgtgatcatgtttctaaccttagaacagactaaaaagttcgtcaaaagtttagagtcgtcctgaggcgagttcccgttgagaattttctaaggggactggttgcaactgcaaatgtagtggaaattgtagaaaataaaggtccctttctcttcattctgctaaccaggatgtggtcaaacatttttttagggaggaaaaatttgatagtaaaatgagaatgctattcatatatactagcttttagcaattgccatatattctgtgggattgcatgcagttgtcatgtatttctctttaaactttattatgaaccgagcttggacatatc

SEQ ID NO: 23286 - protein, 305 aa, Glycine max
MVADSKSNSDLSFGKIFASSAFSACFAEVCTIPLDTAKVRLQLQKQAVAGDVVSLPKYKGMLGTVGTIAREEGLSALWKGIVPGLHRQCLYGGLRIGLYEPVKTFYVGKDHVGDVPLSKKILAAFTTGAFAIAVANPTDLVKVRLQAEGKLPPGVPRRYSGSLNAYSTIVRQEGVGALWTGLGPNIARNGIINAAELASYDQVKQTILKIPGFTDNVVTHLLAGLGAGFFAVCIGSPVDVVKSRMMGDSSYKNTLDCFIKTLKNDGPLAFYKGFLPNFGRLGSWNVIMFLTLEQTKKFVKSLESS

SEQ ID NO: 23287 - protein, 245 aa, Glycine max
MLGTVGTIAREEGLSALWKGIVPGLHRQCLYGGLRIGLYEPVKTFYVGKDHVGDVPLSKKILAAFTTGAFAIAVANPTDLVKVRLQAEGKLPPGVPRRYSGSLNAYSTIVRQEGVGALWTGLGPNIARNGIINAAELASYDQVKQTILKIPGFTDNVVTHLLAGLGAGFFAVCIGSPVDVVKSRMMGDSSYKNTLDCFIKTLKNDGPLAFYKGFLPNFGRLGSWNVIMFLTLEQTKKFVKSLESS

SEQ ID NO: 23288 - DNA, 1914 bp, Glycine max
atatttctcactgtttctagctttttttctggattggagtggtaacatttgcaccattgttggcaagaacacttgaattggaccttgcagataatcaagtgattattcgaccttcaaatcagaatcttttataaccttattggctggtagaatgattcatgcccctattggaggaagcttgcaagagggtctgcaagatgcagccttagttgggaacacaaatggtttcaaggttaacgtaaatagtgctcttcaaacttcatcatcccaaaggaaactacttagcgatgaaagcaatcatgtagggaaatacagaatgttcatctattgccaatatctttaaactgcagaaactctcaccccatgctaatttagctactccatctgctaaacttaggaagaagaccgaggaaaagttgagaaaaccttttaattgtgtttttgccaagattgattggccatctctctggagaagctgcagataatggattaagaatcctttgaacatggccattcttcaaaggataatttgtgttgctgtttcaggagcaattctttttcttgtcatgacaggaatcttaagcaaaatacttaataagcagtcacaaagggactaatggtttgaggtcaacaatcaatttctcaatgctctatttactctcatgtgtctataccaacatccaaagcggttccaccatcttgtacttctttgtaggtggaagcctaagggcatcatattcctaagaaaaatatactgcaagaatggcacttgcaagcctcatgaaagggtacatatgatggtagtagttgtgttactccatgttaattgcttttctcagtatgcactttgtggccttaaatggggtttcaatagatctgaaagacctgttgttggggttggtatatgcatctccattgcaattgctgctccagcacttgcaggagttaactgcattgcaagccctataggaaaagagtatgaaactgatgaagaagtacagaatcatactgcttttgcatcaagaaatgatcagtcttgttgagtacacacctcaatggagagggggactatttgatcttagggacaatctttctgtggcatgtctcactctcttttgtagtttttgtgtcgttggaaggaatttggagaaacttcattttggtaacaagtatgtccacattgcaactttcctcctcttctgtgtggctcccttttggatcttgaatacggttaccatcaatattgataatgagcctgtgagagtagttctggggctattgggtatgttgctttgtgtgtttggtttactctatggtggctattggaggattcaaatgaggggaaaatttaatttgccaccaaataaactttgttgtgggaagccagcagtcacagattgcatacagtggctattgtgttgctggtgttcccttgcacaggaagtaagaactgcagaatattatgacatagttgatgacaaatttttctgccaaaaactgactcaaagttgtgttaagcctgcactgaactcattgcctcctgaagataaagcccctcaagttacatcaaagtccacttcattttggagcagtcacactgtaaataagatctggtctcaagagtcaaatgattattcaagtctctcagaaattgagttttcaagagagaggaagcaaaatgttatggaagcgcctattcttcaaacaattcaagtcgatgataatgacatcaaaagaacataaagaggagaaccttcaatgatatatgaggctttttgcagtcatgtatgcatttcgaaatagaattttacttttgtaatatttgaacatcattttttgaatcagatggtaagatgtaccttgtgtttgataattttcaaaagatattgttaaagaagtttgaatttccatctt

SEQ ID NO: 23289 - protein, 254 aa, Glycine max
MKLMKKYRIILLLHQEMISLVEYTPQWRGGLFDLRDNLSVACLTLFCSFCVVGRNLEKLHFGNKYVHIATFLLFCVAPFWILNTVTINIDNEPVRVVLGLLGMLLCVFGLLYGGYWRIQMRGKFNLPPNKLCCGKPAVTDCIQWLLCCWCSLAQEVRTAEYYDIVDDKFFCQKLTQSCVKPALNSLPPEDKAPQVTSKSTSFWSSHTVNKIWSQESNDYSSLSEIEFSRERKQNVMEAPILQTIQVDDNDIKRT

SEQ ID NO: 23290 - protein, 251 aa, Glycine max
MKKYRIILLLHQEMISLVEYTPQWRGGLFDLRDNLSVACLTLFCSFCVVGRNLEKLHFGNKYVHIATFLLFCVAPFWILNTVTINIDNEPVRVVLGLLGMLLCVFGLLYGGYWRIQMRGKFNLPPNKLCCGKPAVTDCIQWLLCCWCSLAQEVRTAEYYDIVDDKFFCQKLTQSCVKPALNSLPPEDKAPQVTSKSTSFWSSHTVNKIWSQESNDYSSLSEIEFSRERKQNVMEAPILQTIQVDDNDIKRT

SEQ ID NO: 23291 - protein, 238 aa, Glycine max
MISLVEYTPQWRGGLFDLRDNLSVACLTLFCSFCVVGRNLEKLHFGNKYVHIATFLLFCVAPFWILNTVTINIDNEPVRVVLGLLGMLLCVFGLLYGGYWRIQMRGKFNLPPNKLCCGKPAVTDCIQWLLCCWCSLAQEVRTAEYYDIVDDKFFCQKLTQSCVKPALNSLPPEDKAPQVTSKSTSFWSSHTVNKIWSQESNDYSSLSEIEFSRERKQNVMEAPILQTIQVDDNDIKRT

SEQ ID NO: 23292 - DNA, 1384 bp, Glycine max
atacaatcaaactgcaaaaaaaaaaaaaaaaacaaagcattttttttttgccgcaatcaatcaataactgtcggcgacatatccgaatcaccgttgcagtctcacgtttcctctaactgtttttctcgggctccgagctcgccggagctaacattcacggcggcgcaccgcccatttcttcaccctcactcaaaatgcagtgccaccgcgtctccgccgtgctttttctaagcttatgctttagaattgcgctagtatacgcgcaaggagagcctcatctcactgctctggaccaacattggttcccgggaaccgccacgtggtacggcgaccccgaaggtgacggtagcaccggaggggcatgtgggtatggtacgttggtggacgtgaagccgttgaaggcaagggtgggagcagtggggtcagtgctgtttaagaagggggaagggtgtggtgcttgctacaaggtgaagtgtttggaccatagcatatgttcgaagcgggcagtgacggttataataacggatgagtgcccgggctgcccgtctgaccggacgcacttcgacctcagtggctctgcctttggccgcatggcagttgtgggtgaaaacggtcagctcaggaacctaggtgaaatcccagtcatttaccgcagaacaccgtgcaagtatgctggcaaaaacattgccttccatgtcaatgaaggctccactcctttttggctatcccttctggtggagtttgaagatggagatggggacattggctccatgcatatacaagaagcagggtcgagtgagtggcagcagatgaatcatgtatggggtgcaaattggtgcattgttaaggggccattaagaggacctttctctgttaaactaagcacatctacagggaaaagcctcactgccaaagatgttattccaagcaattggactccaaaagccacttatacctctcgcttaaatttcctttcttagtacaaggtttccaactgaacaatcaccaacaccaaggcccttcttcccaaagggagaaagtaatttaataaatcaccatttacccagttaaagttgctcaagttccacaaggcagagagtcttcttggcctttgagtctttgtgttttttaataagaaagaaaagtagccgttgagtgtacaaggccatatccaatgatctttccttttcttagttttatcttttcgcttttgaatacctataattttgtcatttttgtggtgtgcaactgtttgtaccaagaagtcatggtattattggtagccctctccaaaaaggagggagagcgtgtagtgtagtatcgtagaatgcgtgtactgggctcagtgggcttcaaatgaatgaatatataaattttagaaccg

SEQ ID NO: 23293 - protein, 261 aa, Glycine max
MQCHRVSAVLFLSLCFRIALVYAQGEPHLTALDQHWFPGTATWYGDPEGDGSTGGACGYGTLVDVKPLKARVGAVGSVLFKKGEGCGACYKVKCLDHSICSKRAVTVIITDECPGCPSDRTHFDLSGSAFGRMAVVGENGQLRNLGEIPVIYRRTPCKYAGKNIAFHVNEGSTPFWLSLLVEFEDGDGDIGSMHIQEAGSSEWQQMNHVWGANWCIVKGPLRGPFSVKLSTSTGKSLTAKDVIPSNWTPKATYTSRLNFLS

SEQ ID NO: 23294 - DNA, 945 bp, Glycine max
aaacacaacaactcatcatcctatattctcttcttggatcatcttggttaagctgcagatcagaatagaataataataaataaagataagatggagactcatttggttttcttgcttggtttgatcttcactctagttgccggcgttggagcccaagcccaaggcccatccacctctcctgcgcctcccacaccccaagcatctccacctcccgtccagtcttctccgccacctgttccctcttcacctccaccctctcagtctccaccaccagcttccactccccctccatccccactcagctctcctcctccttcctctcctccaccctcctcccctcctccttcttctccaccccccgcctctcctcctccttcttctccaccccccgcctctcctcctccttcttcccctcccccttcctctccccctcctttttcaccacctcctgccactcctccccccgccactcctccccccgcagttccaccaccctcattgaccccaacagttacacctctttcttctccacctgtctcttctccagctccgtctccttccaaggtgtttgctcctgcactctctccttcccttgctcccggtcccagcctctccaccatctctccctccggcgatgacagtggggctcaaaacttgtggtcctttcagaagatgattgggagcttagtattcggatgtgctttgctgtccatgttgttctagacatcgatctctgtcttcggactcgcagatttttctgccaattcatgttattttgctatttaccctataccttacctttatatattattttgtggatgtgatcgtgggagtttattactgtatttgaactatataaattgcttgcattcttgggagatttgaggggaggttttgtattcgagggcagttattttgtatgacattactattagtttatcgatc

SEQ ID NO: 23295 - protein, 210 aa, Glycine max
METHLVFLLGLIFTLVAGVGAQAQGPSTSPAPPTPQASPPPVQSSPPPVPSSPPPSQSPPPASTPPPSPLSSPPPSSPPPSSPPPSSPPPASPPPSSPPPASPPPSSPPPSSPPPFSPPPATPPPATPPPAVPPPSLTPTVTPLSSPPVSSPAPSPSKVFAPALSPSLAPGPSLSTISPSGDDSGAQNLWSFQKMIGSLVFGCALLSMLF

SEQ ID NO: 23296 - DNA, 1460 bp, Glycine max
tggaattgagccacactcagtgaaaatatctccaaatggtgaatttctagtactggattctgagaacagtaacatctacaaggtctctggctcaatgtcccgatatagcagacccaaattgcttgctggatcagctgaagggaatattggacacatagatgggaggcctagagaagctagaatgaaccaccctaaaggacttacagtggatgacagagggaatatctacatagcagacacattgaatatggccatcagaaagatcagtgatgaaggggttaccaccattgcaggtgggaaaaggggctatgcaggaggtcatgttgatggtccaagtgaggatgctaagttttcaaatgactttgatgtagtttatgttggtagtagctctctcttctggtggtggatagaggaaaccatgctatccgagagattcaactccatcaagatgactgcactagttatgatgaagatgacaatagtttcaacttaggaatagtggtgcttgttgctgctgcattctttggctatatgttggcattgctgcagtggagggtgagggctatgttttcttctccagatgatccaagagctccttcaaggaagaaaggagcaccatttgtagcacagcaaatgcaaaggcctcctcctactacaaagtcagtcaggcctcctttgattccaaatgaagatgaatttgagaaacaagatgagggcttctttgtttcccttggaagactattcctgaactctggcacatgcatgagtgaaattctggggggcttgttctcaggatccaaaagaaaatcactgcagtatcatcagtatcagcagcagtatcagtatgctaatagatatcccaatgcatggcccatgcaagagagttttgtcattccagatgaagatgaacctcctccttctttagaaactaaaacacccacacctagggaaacatatcctatcatgaccaaagagcttgaaaaaccacagcacttcaagccaagtaggggttacttgaaaaggtgggagggtggtgattatcaagaacaacatcaacaacttcaacaacatcatcagcaacatcaacaagagcatcccaagttgcaacatcaacagcaccaacaacaggtcaagctccaacatcagcaccaagttcacacacgttattcttccacccctcaaggttattatgaacagaactgcgagacaaatgagattgtgtttggtgcagttcaagagcatgatggaagacgcgaagccatggtgataaaggctgtagattatggggatccaaagtacactcaccacaatatccgcccaagattaaattatgtcggttactcccatggttattgaagattagtgataatttcatcatagcatcaaagtgatagaactcatggacttagctaaaaaaaaatgaaagacagagcatttctcttgcttcattttctctacct

SEQ ID NO: 23297 - protein, 274 aa, Glycine max
MLALLQWRVRAMFSSPDDPRAPSRKKGAPFVAQQMQRPPPTTKSVRPPLIPNEDEFEKQDEGFFVSLGRLFLNSGTCMSEILGGLFSGSKRKSLQYHQYQQQYQYANRYPNAWPMQESFVIPDEDEPPPSLETKTPTPRETYPIMTKELEKPQHFKPSRGYLKRWEGGDYQEQHQQLQQHHQQHQQEHPKLQHQQHQQQVKLQHQHQVHTRYSSTPQGYYEQNCETNEIVFGAVQEHDGRREAMVIKAVDYGDPKYTHHNIRPRLNYVGYSHGY

SEQ ID NO: 23298 - protein, 263 aa, Glycine max
MFSSPDDPRAPSRKKGAPFVAQQMQRPPPTTKSVRPPLIPNEDEFEKQDEGFFVSLGRLFLNSGTCMSEILGGLFSGSKRKSLQYHQYQQQYQYANRYPNAWPMQESFVIPDEDEPPPSLETKTPTPRETYPIMTKELEKPQHFKPSRGYLKRWEGGDYQEQHQQLQQHHQQHQQEHPKLQHQQHQQQVKLQHQHQVHTRYSSTPQGYYEQNCETNEIVFGAVQEHDGRREAMVIKAVDYGDPKYTHHNIRPRLNYVGYSHGY

SEQ ID NO: 23299 - protein, 240 aa, Glycine max
MQRPPPTTKSVRPPLIPNEDEFEKQDEGFFVSLGRLFLNSGTCMSEILGGLFSGSKRKSLQYHQYQQQYQYANRYPNAWPMQESFVIPDEDEPPPSLETKTPTPRETYPIMTKELEKPQHFKPSRGYLKRWEGGDYQEQHQQLQQHHQQHQQEHPKLQHQQHQQQVKLQHQHQVHTRYSSTPQGYYEQNCETNEIVFGAVQEHDGRREAMVIKAVDYGDPKYTHHNIRPRLNYVGYSHGY

SEQ ID NO: 23300 - DNA, 676 bp, Glycine max
ttcattaaatggaaattaccctgcaaaatcattgtcaaattttgcagacattatctctagatgccttcagtctgagccagaatttaggccagcaatgtccgaggtcgtcctatacttgctaaatatgataaggaaggagtctcagcaaactgaatcaaatgaaaaatgagaaaggtagtgacatttgtttgtgaatttatcataatgtgcagagatgagagatccacttgctgaatatcaacttgtagagatgtcatgtcgtctgaggggagcccaattagttgtctccatgcttcattattccctactaacctattcaacattcacatgccaagttctaccaagagttttgtccaatcaaaaacttaagagaatggtagtgaccaacctcatatttgtagtcttatgatatctgataatttcatagtggattaaaatatgccatattaatattgtagatacgtgccaactaacccatttgtttgataattgtttcccaagtcttgatagcaaatgtaattccgttgtggcatccttgtggtttttaggttcatccttcgtaataaaagtttgttgatcatttgtattaaatcacagacaagcattgtaatttattgattgttctttgtacactacaaaaagatgttaggataaaatcattgtattttggtctttg

SEQ ID NO: 23301 - protein, 64 aa, Glycine max
MRDPLAEYQLVEMSCRLRGAQLVVSMLHYSLLTYSTFTCQVLPRVLSNQKLKRMVVTNLIFVVL

SEQ ID NO: 23302 - protein, 55 aa, Glycine max
SLNGNYPAKSLSNFADIISRCLQSEPEFRPAMSEVVLYLLNMIRKESQQTESNEK

SEQ ID NO: 23303 - protein, 52 aa, Glycine max
MSCRLRGAQLVVSMLHYSLLTYSTFTCQVLPRVLSNQKLKRMVVTNLIFVVL

SEQ ID NO: 23304 - DNA, 1696 bp, Glycine max
agatccttgcacaggttcgggcacaaggaaatattggcaattcacctgcttatggagatatggatccacaacgattaaggggattagctaggggaagtttgaatgctaaagacggtctatcaattgcaaatgatggatcaataggctctccaattcaatctacttcatctaagatcaacatggcacagatccaacaatccacttcccagcaacaacaagatcctttgcatccacaacaattggtgcagaataaccggaaaaggaaggggcctacatcttcaggacctgccaacagtaccggtaccggaaatacacttggcccttctaattctcagccatcaactccatccactcatactcccggtgatggagttgctatgacgggtaacttgcagaatgtagctggtatatccaaaggtttgatcatgtatggtactgatggagtgggctgtcttgcatcttcaacaaatcagctggatgacatggaacattttggagatgttggctccttagaggacaatgtggaattatttctctcacaggatgatggtgatggaagggacttgtttggcacgttgaaacggaacccttctgagcttgctacagatgcttcaaaaggcttttcctttgatgaagttggttctatacgcaaaagcaacagcaaagttgtttgctgtcatttctcttcagatgggaaattattagctagtgctggacatgacaagaaggttgttctgtggaacatggagacattgcaaacagaaagcactccggaggaacacagtcttattattactgatgttcgcttcagaccaaattcaactcagctggcaacatcttcgtttgatacaactgtgcggctgtgggatgctgcagatccaaccttccctttacatacatatagtggtcatacttcacatgtggtgtcccttgatttccacccaaagaaaactgagcttttctgttcttgtgacaataacaatgagattcgcttctggagtattagtcaatattcttccacacgtatttttaagggaggatctacacaggtgaggtttcagccaaggcttggtcaccttctggctgcagcaagtggcagtgttgtgtctctctttgatgttgagactgacaggcagatacacacattacagggacattctgcagaggtacgctgtgtctgttgggatacaaatggagattacttggcatctgtgagtcaagaatctgtcaaagtgtggtcacttgcctctggggaatgcattcatgaacttacttccagtggaaacatgttccattcttgtgtttttcacccaagctactccactctcttggttatcggaggataccagtcattggaattatggaacatggctgagaataaatgtatgacagtgtcagcagctcacgagtgtgtgatatctgctctagcacattcacccgtgacaaggatggttgcttctgccagtcatgacaaatctgtaaagatctggaaataaaattgattattttatgatttaaacaaacatataagatgtgctacatgttatattttcaaggtataacaacataaaaaaacaaggttgaatggatgggtcaagagacgtatctccaccctctcctaatcttcttatttatctatttgctaccctctcctaatcttcttatttatctatttactacggagaaatttaaatcg

SEQ ID NO: 23305 - protein, 497 aa, Glycine max
ILAQVRAQGNIGNSPAYGDMDPQRLRGLARGSLNAKDGLSIANDGSIGSPIQSTSSKINMAQIQQSTSQQQQDPLHPQQLVQNNRKRKGPTSSGPANSTGTGNTLGPSNSQPSTPSTHTPGDGVAMTGNLQNVAGISKGLIMYGTDGVGCLASSTNQLDDMEHFGDVGSLEDNVELFLSQDDGDGRDLFGTLKRNPSELATDASKGFSFDEVGSIRKSNSKVVCCHFSSDGKLLASAGHDKKVVLWNMETLQTESTPEEHSLIITDVRFRPNSTQLATSSFDTTVRLWDAADPTFPLHTYSGHTSHVVSLDFHPKKTELFCSCDNNNEIRFWSISQYSSTRIFKGGSTQVRFQPRLGHLLAAASGSVVSLFDVETDRQIHTLQGHSAEVRCVCWDTNGDYLASVSQESVKVWSLASGECIHELTSSGNMFHSCVFHPSYSTLLVIGGYQSLELWNMAENKCMTVSAAHECVISALAHSPVTRMVASASHDKSVKIWK

SEQ ID NO: 23306 - protein, 478 aa, Glycine max
MDPQRLRGLARGSLNAKDGLSIANDGSIGSPIQSTSSKINMAQIQQSTSQQQQDPLHPQQLVQNNRKRKGPTSSGPANSTGTGNTLGPSNSQPSTPSTHTPGDGVAMTGNLQNVAGISKGLIMYGTDGVGCLASSTNQLDDMEHFGDVGSLEDNVELFLSQDDGDGRDLFGTLKRNPSELATDASKGFSFDEVGSIRKSNSKVVCCHFSSDGKLLASAGHDKKVVLWNMETLQTESTPEEHSLIITDVRFRPNSTQLATSSFDTTVRLWDAADPTFPLHTYSGHTSHVVSLDFHPKKTELFCSCDNNNEIRFWSISQYSSTRIFKGGSTQVRFQPRLGHLLAAASGSVVSLFDVETDRQIHTLQGHSAEVRCVCWDTNGDYLASVSQESVKVWSLASGECIHELTSSGNMFHSCVFHPSYSTLLVIGGYQSLELWNMAENKCMTVSAAHECVISALAHSPVTRMVASASHDKSVKIWK

SEQ ID NO: 23307 - protein, 438 aa, Glycine max
MAQIQQSTSQQQQDPLHPQQLVQNNRKRKGPTSSGPANSTGTGNTLGPSNSQPSTPSTHTPGDGVAMTGNLQNVAGISKGLIMYGTDGVGCLASSTNQLDDMEHFGDVGSLEDNVELFLSQDDGDGRDLFGTLKRNPSELATDASKGFSFDEVGSIRKSNSKVVCCHFSSDGKLLASAGHDKKVVLWNMETLQTESTPEEHSLIITDVRFRPNSTQLATSSFDTTVRLWDAADPTFPLHTYSGHTSHVVSLDFHPKKTELFCSCDNNNEIRFWSISQYSSTRIFKGGSTQVRFQPRLGHLLAAASGSVVSLFDVETDRQIHTLQGHSAEVRCVCWDTNGDYLASVSQESVKVWSLASGECIHELTSSGNMFHSCVFHPSYSTLLVIGGYQSLELWNMAENKCMTVSAAHECVISALAHSPVTRMVASASHDKSVKIWK

SEQ ID NO: 23308 - DNA, 1305 bp, Glycine max
gaactttatgaagaggaatacaatgagcttgttgacatctatgcttttggcatgtgcttgctagagttggtaaccgttgagtacccgtatattgaatgcaccaatgctgctcaaatatacaagaaagtgacatctggaataaagccagcatcattggcaaaggtggctgatcttgaagttaaagcatttatcgaaaagtgtattgctgatgtgtcggaacgattgtctgcgaaagacctcttgatcgatcccttccttcagtcagattatgataatgatagtgtaggtcgatcttcaagatctcaaacccatcattcaggaaataattctcataatcaagctattgctgaggataattctgttgagacaagtagggaattcacggtggaaggtcagaggaaagataatcatacaatatttttaaaattgcgaattgcagattcctcaggtaatattcgcaatatccactttccttttgatactgaagcagacacttcaatctctgttgctagtgaaatggttgaggagttggaactcactgatcaagatgttacaactattgctgggatgattgattctgaaattcgatatcacattcctagttggaatttcagtgaaactcctgttgactttaaccatcaagattcaagttatacctctgaaactaggccagaggcctctcctatgaaaattgattctgttgttgctcctggcagtcttgcattagaaattttaccttcaggtcgtaagtactggtcagattcaccaaggggatttggtggaaactctccatctcgacatatgacttcaatcttgtctaatgaagcaggtgtgaactctgaggaagacaacccgactgcaaatggtggtatttcagctgatgattgtgttgacggtaccattgagcaggaatgtgatgagatagctgattctccttccagtgagaaatctgaaatggaatacatcaatcaaataacaacaaaattggagaatttgttggttaaacaaagagaggagttagatgaactaaagaggaaacacaaactagctgtctcagatcttttgatggaaattcctccagaaatgtgccagaaggtcctaaatatatgcaacctgcagatgcctgacagtgaaatggccaggcttgcccttcattaatctaaatgccactttgtgtggtttatggtagtagttcacttagaaagctcattttaggagtgaaatttagaagttgtgatcttgcttgttgcttggaactgttgatattttgggtttcataattcatgcataagagggtaaattttc

SEQ ID NO: 23309 - protein, 385 aa, Glycine max
ELYEEEYNELVDIYAFGMCLLELVTVEYPYIECTNAAQIYKKVTSGIKPASLAKVADLEVKAFIEKCIADVSERLSAKDLLIDPFLQSDYDNDSVGRSSRSQTHHSGNNSHNQAIAEDNSVETSREFTVEGQRKDNHTIFLKLRIADSSGNIRNIHFPFDTEADTSISVASEMVEELELTDQDVTTIAGMIDSEIRYHIPSWNFSETPVDFNHQDSSYTSETRPEASPMKIDSVVAPGSLALEILPSGRKYWSDSPRGFGGNSPSRHMTSILSNEAGVNSEEDNPTANGGISADDCVDGTIEQECDEIADSPSSEKSEMEYINQITTKLENLLVKQREELDELKRKHKLAVSDLLMEIPPEMCQKVLNICNLQMPDSEMARLALH

SEQ ID NO: 23310 - protein, 368 aa, Glycine max
MCLLELVTVEYPYIECTNAAQIYKKVTSGIKPASLAKVADLEVKAFIEKCIADVSERLSAKDLLIDPFLQSDYDNDSVGRSSRSQTHHSGNNSHNQAIAEDNSVETSREFTVEGQRKDNHTIFLKLRIADSSGNIRNIHFPFDTEADTSISVASEMVEELELTDQDVTTIAGMIDSEIRYHIPSWNFSETPVDFNHQDSSYTSETRPEASPMKIDSVVAPGSLALEILPSGRKYWSDSPRGFGGNSPSRHMTSILSNEAGVNSEEDNPTANGGISADDCVDGTIEQECDEIADSPSSEKSEMEYINQITTKLENLLVKQREELDELKRKHKLAVSDLLMEIPPEMCQKVLNICNLQMPDSEMARLALH

SEQ ID NO: 23311 - protein, 213 aa, Glycine max
MVEELELTDQDVTTIAGMIDSEIRYHIPSWNFSETPVDFNHQDSSYTSETRPEASPMKIDSVVAPGSLALEILPSGRKYWSDSPRGFGGNSPSRHMTSILSNEAGVNSEEDNPTANGGISADDCVDGTIEQECDEIADSPSSEKSEMEYINQITTKLENLLVKQREELDELKRKHKLAVSDLLMEIPPEMCQKVLNICNLQMPDSEMARLALH

SEQ ID NO: 23312 - DNA, 1194 bp, Glycine max
gagtctttcaatgaagcaaaccagtcaataatggattacccaagtcatgaagttgatcttgacaaggaggatctggatattccatggagtgaacttattttgaaggagaacattgggacagggtcatttggaaccgtccttcgtgcggactggcgcggttctgatgttgctgtgaagattcttaaagtgcagggttttgatcctgggcgatttgaagaatttctaaaggaggtctcactcatgaagcgcctccggcatccaaacattgtacttttgatgggtgcagttattcaacccccgaagttatcaatagtaacagaatatttatcaagaggcagtttgtatgaacttctgcacatgcccaatgttggatcatcacttagtgaaaagcgtcgtttaagtatggcttatgatgttgcaagcggaatgaattatcttcatcaaatgagaccccctattgttcatagagatttgaagtctccaaatcttttggttgatgattcatacactgttaaggtatgtgattttggcctttcacgtacaaaggcaaacacatttctttcatctaaaaccgctgccggaactcctgaatggatggcacctgaagtcattcgaggagaactgtcaagcgaaaaatgtgatgtattcagctttggtgtaatcttgtgggaactagtgaccctgcaacagccatggagacaattaaatccttcacaggttgttgcagctgttggttttatgggcaaaaggctagagattccagggcatgtgaatcctcaagtggctgccttgattgagctctgctgggccacggaacactggagacgaccttctttctcctatgttatgaaatgtttgcagcaaataattgctgatgctaaagggtgaacaagtttaccctgataatcttcaacctgtatacagacaagaaacagcaatattgaacagaaaaataaatgggattccagtttattcaggaaactgctgaagaattacaatataccgttttatagagtaacctacgaatttttgttgtatatgctatttatataatcattactcacattgtcatatatattactatttgctttggatgtacctataataatcgtatgacactgggattctaatttatacatataagaattatttttatcttttaaaagaaataataataaagtttcctttcccccg

SEQ ID NO: 23313 - protein, 295 aa, Glycine max
ESFNEANQSIMDYPSHEVDLDKEDLDIPWSELILKENIGTGSFGTVLRADWRGSDVAVKILKVQGFDPGRFEEFLKEVSLMKRLRHPNIVLLMGAVIQPPKLSIVTEYLSRGSLYELLHMPNVGSSLSEKRRLSMAYDVASGMNYLHQMRPPIVHRDLKSPNLLVDDSYTVKVCDFGLSRTKANTFLSSKTAAGTPEWMAPEVIRGELSSEKCDVFSFGVILWELVTLQQPWRQLNPSQVVAAVGFMGKRLEIPGHVNPQVAALIELCWATEHWRRPSFSYVMKCLQQIIADAKG

SEQ ID NO: 23314 - protein, 285 aa, Glycine max
MDYPSHEVDLDKEDLDIPWSELILKENIGTGSFGTVLRADWRGSDVAVKILKVQGFDPGRFEEFLKEVSLMKRLRHPNIVLLMGAVIQPPKLSIVTEYLSRGSLYELLHMPNVGSSLSEKRRLSMAYDVASGMNYLHQMRPPIVHRDLKSPNLLVDDSYTVKVCDFGLSRTKANTFLSSKTAAGTPEWMAPEVIRGELSSEKCDVFSFGVILWELVTLQQPWRQLNPSQVVAAVGFMGKRLEIPGHVNPQVAALIELCWATEHWRRPSFSYVMKCLQQIIADAKG

SEQ ID NO: 23315 - protein, 215 aa, Glycine max
MKRLRHPNIVLLMGAVIQPPKLSIVTEYLSRGSLYELLHMPNVGSSLSEKRRLSMAYDVASGMNYLHQMRPPIVHRDLKSPNLLVDDSYTVKVCDFGLSRTKANTFLSSKTAAGTPEWMAPEVIRGELSSEKCDVFSFGVILWELVTLQQPWRQLNPSQVVAAVGFMGKRLEIPGHVNPQVAALIELCWATEHWRRPSFSYVMKCLQQIIADAKG

SEQ ID NO: 23316 - DNA, 1347 bp, Glycine max
taattgcattcatgggcacgttctaaaatcgggttttggtgaccatgacttgttggtgctttcgaatcaccaaattcatgtgtactccaaatgcaatgactatgaagctgcccgtaaggtgtttgatggaatgccccaaagaaacgtgttttcgtggactgtcatgattgtcgcgtccaatgaacatggctactaccgtgatggggtggagcggttttgcatgatgatggaccaaggcgtgttgccggatggtttcgccttctctgctgttttgcagtcatgtgtggggtatgattcggttgagttgggtgagatggtgcatgcccatgttgttgtcacgggtttttttatgcatacagttgttggtacctctcttctcaacatgtatgcaaagttgggagagaatgagagttcagttaaggtgttcaactccatgccagagcgtaacattgtctcctggaatgcaatgatttctgggtttacctctaacggtttacacctacaagcatttgattgttttatcaacatgattgaagtaggggttactcctaataattttacatttgtaagtgtttccaaggcagttgggcagttaggtgactttcacaagtgtctccaagttcacagatatgcttctgattggggattggattccaatactttggttggaacagctcttatcgatatgtactgcaagtgcgggtctatgtcagatgcacagattctttttgactcgaagttcaccggttgtccagttaacacgccttggaatgcaatggtaacaggttattcacaagttggttctcacgtagaggctttggaactgttcacaagaatgtgccaaaacgatatcaaaccagatgtgtacacattctgttgtgtgtttaactcaattgctgctttgaagtgtctgaaatccttgagggagactcatgggatggctttgaaatgtcgatttgatgcaatgcagattagtgcaaccaatgccctcgcccatgcatatgccaaatgtgactcacttgaagctgtagagaacgtattcaatagaatggaagagaaagacgtagtatcttggacaaccatggtgacttcatattgccaatattatgaatggggaaaagccttgaccatcttctcacaaatgcgcaatgaaggttttgtacccaatcattttactctttcaagtgtcatcaccgcatgtggaggtctttgtttactagaatacggccagcaaattcacggtctgacatgcaaggctaacatggatgctgaaacatgcatagaaagtgctctaattgacatgtacgccaaatgtgggaatctaacaggagcaaagaagattttcaa

SEQ ID NO: 23317 - protein, 448 aa, Glycine max
NCIHGHVLKSGFGDHDLLVLSNHQIHVYSKCNDYEAARKVFDGMPQRNVFSWTVMIVASNEHGYYRDGVERFCMMMDQGVLPDGFAFSAVLQSCVGYDSVELGEMVHAHVVVTGFFMHTVVGTSLLNMYAKLGENESSVKVFNSMPERNIVSWNAMISGFTSNGLHLQAFDCFINMIEVGVTPNNFTFVSVSKAVGQLGDFHKCLQVHRYASDWGLDSNTLVGTALIDMYCKCGSMSDAQILFDSKFTGCPVNTPWNAMVTGYSQVGSHVEALELFTRMCQNDIKPDVYTFCCVFNSIAALKCLKSLRETHGMALKCRFDAMQISATNALAHAYAKCDSLEAVENVFNRMEEKDVVSWTTMVTSYCQYYEWGKALTIFSQMRNEGFVPNHFTLSSVITACGGLCLLEYGQQIHGLTCKANMDAETCIESALIDMYAKCGNLTGAKKIF

SEQ ID NO: 23318 - protein, 405 aa, Glycine max
MPQRNVFSWTVMIVASNEHGYYRDGVERFCMMMDQGVLPDGFAFSAVLQSCVGYDSVELGEMVHAHVVVTGFFMHTVVGTSLLNMYAKLGENESSVKVFNSMPERNIVSWNAMISGFTSNGLHLQAFDCFINMIEVGVTPNNFTFVSVSKAVGQLGDFHKCLQVHRYASDWGLDSNTLVGTALIDMYCKCGSMSDAQILFDSKFTGCPVNTPWNAMVTGYSQVGSHVEALELFTRMCQNDIKPDVYTFCCVFNSIAALKCLKSLRETHGMALKCRFDAMQISATNALAHAYAKCDSLEAVENVFNRMEEKDVVSWTTMVTSYCQYYEWGKALTIFSQMRNEGFVPNHFTLSSVITACGGLCLLEYGQQIHGLTCKANMDAETCIESALIDMYAKCGNLTGAKKIF

SEQ ID NO: 23319 - protein, 394 aa, Glycine max
MIVASNEHGYYRDGVERFCMMMDQGVLPDGFAFSAVLQSCVGYDSVELGEMVHAHVVVTGFFMHTVVGTSLLNMYAKLGENESSVKVFNSMPERNIVSWNAMISGFTSNGLHLQAFDCFINMIEVGVTPNNFTFVSVSKAVGQLGDFHKCLQVHRYASDWGLDSNTLVGTALIDMYCKCGSMSDAQILFDSKFTGCPVNTPWNAMVTGYSQVGSHVEALELFTRMCQNDIKPDVYTFCCVFNSIAALKCLKSLRETHGMALKCRFDAMQISATNALAHAYAKCDSLEAVENVFNRMEEKDVVSWTTMVTSYCQYYEWGKALTIFSQMRNEGFVPNHFTLSSVITACGGLCLLEYGQQIHGLTCKANMDAETCIESALIDMYAKCGNLTGAKKIF

SEQ ID NO: 23320 - DNA, 1617 bp, Glycine max
agacctcttagagaactcagagaggttgctaagggagtcactaaacaaattggtggcccaatgcatgagttagctgcaaaagttgatgaatatgcgcgtggcatgatcagcggttctggatcaacactatttgaagagcttggactttactacataggtcctgttgatggtcataatatagatgatcttgtgtccattctaaatgaagttaaaagtactaaaacaactggtcctgtgctgctccatgttgtcactgaaaaaggccatggatatccatatgcagaaagagcagcagacaagtaccatggagttactaagtttgatccagcaactggaaaacaattcaaatccaatgctgccacccagtcatacacaacatactttgcagaggctttaattgctgaagcggaagctgacaaagacattgtcggaatccatgctgcaatgggaggtggaactggcatgaatctcttccttcgccgtttcccaacaagatgctttgatgtggggatagcagaacagcatgctgttacatttgcggctggtctggcttgtgaaggccttaagcctttttgtgcaatttactcatcatttatgcagagagcttatgaccaggtggtgcatgatgtcgatttgcagaagctgcctgtaagattcgcaatggaccgagccggattagttggagcagatggtcccacacactgcggtgcatttgatgtcacttttatggcatgcctccctaacatggtggtgatggctccttctgatgaagcagagctttttcacatggttgcaactgcagctgccattgatgatcgacccagttgtttccgatacccgaggggaaatggtattggtgttgagctaccactagggaataaaggcattcctcttgagattgggaagggtaggatactaattgaaggagaaagagtggccttgttgggctatggatcagctgttcagagctgtctggctgctgcttccttgttggaacatcatggcttgcgcgcaacagtggcggatgcacgtttctgcaagccattggaccgttcccttattcgcagccttgcccaatcgcacgaggttttgatcactgtggaagaagggtcaataggaggattcggatctcatgttgttcagttcatggcccttgatggccttcttgatgggaaattaaagtggaggccaattgttcttcctgattgttacattgaccatggatcaccggttgaccaattgagtgcagctggtcttacaccatctcacatagcagcaacagttttcaatctacttggacaaacaagagaggcactagaggtcatgacataaaacaaatgcaaaggggttcaatttttgttccctgcaatgtacaaagtagcgtgattcacccagtgtaatacaaatgtgtttgttaaaaaataatagaaatggaaaatgcagattgacaaataatagtgccaacaaatggttaaacgaataaacaaacacaattggtagtgtatcttcatattttgatatgacggggaaaagatttagctgaaggcatgacagaaacgaatttttagctatgagaggactcttgaatgtgaatgtcgaagatgacgttggtatgcc

SEQ ID NO: 23321 - protein, 443 aa, Glycine max
RPLRELREVAKGVTKQIGGPMHELAAKVDEYARGMISGSGSTLFEELGLYYIGPVDGHNIDDLVSILNEVKSTKTTGPVLLHVVTEKGHGYPYAERAADKYHGVTKFDPATGKQFKSNAATQSYTTYFAEALIAEAEADKDIVGIHAAMGGGTGMNLFLRRFPTRCFDVGIAEQHAVTFAAGLACEGLKPFCAIYSSFMQRAYDQVVHDVDLQKLPVRFAMDRAGLVGADGPTHCGAFDVTFMACLPNMVVMAPSDEAELFHMVATAAAIDDRPSCFRYPRGNGIGVELPLGNKGIPLEIGKGRILIEGERVALLGYGSAVQSCLAAASLLEHHGLRATVADARFCKPLDRSLIRSLAQSHEVLITVEEGSIGGFGSHVVQFMALDGLLDGKLKWRPIVLPDCYIDHGSPVDQLSAAGLTPSHIAATVFNLLGQTREALEVMT

SEQ ID NO: 23322 - protein, 423 aa, Glycine max
MHELAAKVDEYARGMISGSGSTLFEELGLYYIGPVDGHNIDDLVSILNEVKSTKTTGPVLLHVVTEKGHGYPYAERAADKYHGVTKFDPATGKQFKSNAATQSYTTYFAEALIAEAEADKDIVGIHAAMGGGTGMNLFLRRFPTRCFDVGIAEQHAVTFAAGLACEGLKPFCAIYSSFMQRAYDQVVHDVDLQKLPVRFAMDRAGLVGADGPTHCGAFDVTFMACLPNMVVMAPSDEAELFHMVATAAAIDDRPSCFRYPRGNGIGVELPLGNKGIPLEIGKGRILIEGERVALLGYGSAVQSCLAAASLLEHHGLRATVADARFCKPLDRSLIRSLAQSHEVLITVEEGSIGGFGSHVVQFMALDGLLDGKLKWRPIVLPDCYIDHGSPVDQLSAAGLTPSHIAATVFNLLGQTREALEVMT

SEQ ID NO: 23323 - protein, 409 aa, Glycine max
MISGSGSTLFEELGLYYIGPVDGHNIDDLVSILNEVKSTKTTGPVLLHVVTEKGHGYPYAERAADKYHGVTKFDPATGKQFKSNAATQSYTTYFAEALIAEAEADKDIVGIHAAMGGGTGMNLFLRRFPTRCFDVGIAEQHAVTFAAGLACEGLKPFCAIYSSFMQRAYDQVVHDVDLQKLPVRFAMDRAGLVGADGPTHCGAFDVTFMACLPNMVVMAPSDEAELFHMVATAAAIDDRPSCFRYPRGNGIGVELPLGNKGIPLEIGKGRILIEGERVALLGYGSAVQSCLAAASLLEHHGLRATVADARFCKPLDRSLIRSLAQSHEVLITVEEGSIGGFGSHVVQFMALDGLLDGKLKWRPIVLPDCYIDHGSPVDQLSAAGLTPSHIAATVFNLLGQTREALEVMT

SEQ ID NO: 23324 - DNA, 1422 bp, Glycine max
gatgaggctgatagactcttagatatgggattccagaagcagataacttctattataactctcttgcctaagcttcggagaactggtctgttctctgctactcaaactgaggctattgaagagcttgctaaggcaggattgaggaacccagtgagggttgaagttcgagcagaaacaaaatcagaaaatggtcctgcatcatcaaaacaaccagaatcttccaaaacaccttcaggacttcacattgagtacttggaatgcgaggcagataagaagccatcacagctagtacatatcctgataaagaatctctcgaaaaaaattattatatatttcatgacttgtgcttgtgttgattattggggagctgtccttccttgtctttctgttttgaaaggcttctccttgattcccctgcatggaaagatgaagcagtctgccagggagaaagcactagcttcatttacatccctttcaaatggaattcttctatgtacggatgttgcagcacgtggactggacataccaggtgtagattgtatagtgcagtatgatcctcctcaagatccaaatgttttcatacatagagtaggtcgaactgctcggctgggtaaacaaggtcatgctgttgtcttcttattaccaaaggaggaatcttatgtagaattcctgcgtataagaagagttcctcttcaagagagaatatgtgctgatgaagcatctgatgttgttcctcagattcgttctgctgcaaaaaaagatcgcgatgtcatggaaaagggaattaaggcctttgtctcttacatccgtgcttataaagagcatcactgttcctatatttttaggtggaaagaacttgaaattggtaaattggccacaggatttggcttattacaacttccttcaatgccagaggtaaaacaccactcactttccattgatggatttgaaccagttgaagatatcaatttgggggacattaagtacagggataaatcacgggagaaacaaaggaagaagaaccttcaagcaaagaaagaagccaaagagaaagagccaaaacctcaaaaaccgaagaaaaccccaaatgcacccactgacatgcggaagaaaacagcccgacagagacgtgctcagcagacaatggaagacgaggaagagttgatgcatgaataccgcttgttgaagaaattgaagaaagggaccatagatgagaatgaatatgccaagttgacaggcactgaggaattactttgaaagcaaagtatgcatgcctgattatgctgttctggataccatggttgaaagcaaagtaatgaatgacagtttcaaacaccacaattttggctagtaagttactagattcttgccatgtgggtacactgtaggcatctaatctaataatataaaatttgttaatcc

SEQ ID NO: 23325 - protein, 418 aa, Glycine max
DEADRLLDMGFQKQITSIITLLPKLRRTGLFSATQTEAIEELAKAGLRNPVRVEVRAETKSENGPASSKQPESSKTPSGLHIEYLECEADKKPSQLVHILIKNLSKKIIIYFMTCACVDYWGAVLPCLSVLKGFSLIPLHGKMKQSAREKALASFTSLSNGILLCTDVAARGLDIPGVDCIVQYDPPQDPNVFIHRVGRTARLGKQGHAVVFLLPKEESYVEFLRIRRVPLQERICADEASDVVPQIRSAAKKDRDVMEKGIKAFVSYIRAYKEHHCSYIFRWKELEIGKLATGFGLLQLPSMPEVKHHSLSIDGFEPVEDINLGDIKYRDKSREKQRKKNLQAKKEAKEKEPKPQKPKKTPNAPTDMRKKTARQRRAQQTMEDEEELMHEYRLLKKLKKGTIDENEYAKLTGTEELL

SEQ ID NO: 23326 - protein, 410 aa, Glycine max
MGFQKQITSIITLLPKLRRTGLFSATQTEAIEELAKAGLRNPVRVEVRAETKSENGPASSKQPESSKTPSGLHIEYLECEADKKPSQLVHILIKNLSKKIIIYFMTCACVDYWGAVLPCLSVLKGFSLIPLHGKMKQSAREKALASFTSLSNGILLCTDVAARGLDIPGVDCIVQYDPPQDPNVFIHRVGRTARLGKQGHAVVFLLPKEESYVEFLRIRRVPLQERICADEASDVVPQIRSAAKKDRDVMEKGIKAFVSYIRAYKEHHCSYIFRWKELEIGKLATGFGLLQLPSMPEVKHHSLSIDGFEPVEDINLGDIKYRDKSREKQRKKNLQAKKEAKEKEPKPQKPKKTPNAPTDMRKKTARQRRAQQTMEDEEELMHEYRLLKKLKKGTIDENEYAKLTGTEELL

SEQ ID NO: 23327 - protein, 306 aa, Glycine max
MTCACVDYWGAVLPCLSVLKGFSLIPLHGKMKQSAREKALASFTSLSNGILLCTDVAARGLDIPGVDCIVQYDPPQDPNVFIHRVGRTARLGKQGHAVVFLLPKEESYVEFLRIRRVPLQERICADEASDVVPQIRSAAKKDRDVMEKGIKAFVSYIRAYKEHHCSYIFRWKELEIGKLATGFGLLQLPSMPEVKHHSLSIDGFEPVEDINLGDIKYRDKSREKQRKKNLQAKKEAKEKEPKPQKPKKTPNAPTDMRKKTARQRRAQQTMEDEEELMHEYRLLKKLKKGTIDENEYAKLTGTEELL

SEQ ID NO: 23328 - DNA, 1619 bp, Glycine max
agtatttgaaaaagaaactcccaactgatgaacagaacaggtttcactttttcaatagcttcttctttcgtaagcttgctgatttagacaaagatccatcaagtgcttgtgatggtagagcagcatttcaacgtgtacgcaaatggacaagaaaagtgaacctttttgaaaaggattatatcttcattcctgtaaactacagtcttcactggagtttaattgtcatttgtcatccgggtgaagtgtcatgcttcaaagatgaagaaattaaggaatcttccaaagtaccttgtatcttgcacatggattccctaaaaggaagtcataaaggtctcaagaatgttttccaaagttacctatgtgaagaatggaaagagaggcacagtaatgtagtggaggatgtttcttctaaatttttacatctgagattcatctcacttgagctgcctcagcaggaaaatttatatgattgtggcctctttttgctccactatgtggaacgttttctggaagaagctccaatcaactttaaccctttcatgataacgaagtcctccatctttttgaacagcaattggttccctccactggaggtttctctgaaacgatctcatatacagagcgtaatttatgatatatttgaaaataattctttgcaagcacctcatactgattgccttgacaaagatcttcttttagaagaccctgccattattgtcaatcccaaactggaagaagattccctaaggggttgctgttatccaacagcttcacccataagagttgcatcatgtttgacaggacctggacttgtttccaaggacttagtggctgttgtaacttcacgttctgcttgtctgcagatgtcagcatgtcatcagaggggcttcctgtcaccattagaggaatttgaagagtctagtgaggagactgttttatcattagagagagaaaattctcaagttggtatattggcatatgatttcccagccacatatgtcagcaatgatcatggagcatcagaaacatttcaggttgggttctctgtaaattttgtggaagctgttgagagccattctcattcaagaacatctactggtgtatcctggatcccatcgaatacagctactcatgaagaccagcctcttgagaaaatcgaagagtccagcattcctgataagacagcgcttgagtatttatcaacctcagtctctggtgaggagcttacagactacactgttccggattctcctgtcgcaaatgatgttgatgtgagtgttgaatctcattcctcattccggaataatatgaattcagtaacccatcaaatatttgatctgactcacaatacgagtctcgaagataatactttagttagcaaggaagagtcactagcatttgaatctgatgaacgagatgccaagaggcctaagcttatgaatgcaggtggtccaagtcgtagattcactagaagcatggtaaaaaaagcatgtgtaatgtcttgtgaatagtgttagtagcagcagggtggctataagcaaattaaatgttaatatattaaagaaagcattaaccgcaaattaaaaaggttttggtcgtatcaacatagccccgaatgg

SEQ ID NO: 23329 - protein, 502 aa, Glycine max
YLKKKLPTDEQNRFHFFNSFFFRKLADLDKDPSSACDGRAAFQRVRKWTRKVNLFEKDYIFIPVNYSLHWSLIVICHPGEVSCFKDEEIKESSKVPCILHMDSLKGSHKGLKNVFQSYLCEEWKERHSNVVEDVSSKFLHLRFISLELPQQENLYDCGLFLLHYVERFLEEAPINFNPFMITKSSIFLNSNWFPPLEVSLKRSHIQSVIYDIFENNSLQAPHTDCLDKDLLLEDPAIIVNPKLEEDSLRGCCYPTASPIRVASCLTGPGLVSKDLVAVVTSRSACLQMSACHQRGFLSPLEEFEESSEETVLSLERENSQVGILAYDFPATYVSNDHGASETFQVGFSVNFVEAVESHSHSRTSTGVSWIPSNTATHEDQPLEKIEESSIPDKTALEYLSTSVSGEELTDYTVPDSPVANDVDVSVESHSSFRNNMNSVTHQIFDLTHNTSLEDNTLVSKEESLAFESDERDAKRPKLMNAGGPSRRFTRSMVKKACVMSCE

SEQ ID NO: 23330 - protein, 402 aa, Glycine max
MDSLKGSHKGLKNVFQSYLCEEWKERHSNVVEDVSSKFLHLRFISLELPQQENLYDCGLFLLHYVERFLEEAPINFNPFMITKSSIFLNSNWFPPLEVSLKRSHIQSVIYDIFENNSLQAPHTDCLDKDLLLEDPAIIVNPKLEEDSLRGCCYPTASPIRVASCLTGPGLVSKDLVAVVTSRSACLQMSACHQRGFLSPLEEFEESSEETVLSLERENSQVGILAYDFPATYVSNDHGASETFQVGFSVNFVEAVESHSHSRTSTGVSWIPSNTATHEDQPLEKIEESSIPDKTALEYLSTSVSGEELTDYTVPDSPVANDVDVSVESHSSFRNNMNSVTHQIFDLTHNTSLEDNTLVSKEESLAFESDERDAKRPKLMNAGGPSRRFTRSMVKKACVMSCE

SEQ ID NO: 23331 - protein, 323 aa, Glycine max
MITKSSIFLNSNWFPPLEVSLKRSHIQSVIYDIFENNSLQAPHTDCLDKDLLLEDPAIIVNPKLEEDSLRGCCYPTASPIRVASCLTGPGLVSKDLVAVVTSRSACLQMSACHQRGFLSPLEEFEESSEETVLSLERENSQVGILAYDFPATYVSNDHGASETFQVGFSVNFVEAVESHSHSRTSTGVSWIPSNTATHEDQPLEKIEESSIPDKTALEYLSTSVSGEELTDYTVPDSPVANDVDVSVESHSSFRNNMNSVTHQIFDLTHNTSLEDNTLVSKEESLAFESDERDAKRPKLMNAGGPSRRFTRSMVKKACVMSCE

SEQ ID NO: 23332 - DNA, 1452 bp, Glycine max
gaagcacagagagaggaacttgtaagggagcaaaaaataaaggaacaagctgttgccatcagattgaatacaccggcattggtgagattttactcattctattctatttgcagttagcataagcttgagtagtaaaatgtttcaaatcctatacatgggactgctacagattgtcggtaacaagtatttgaaatagtttagcgcaagattaaaaaatctatgtgggatacagttacttctaatggagcagatgattttgaaatgactgtctagaatttcataactattattttatcacttaatcagagcccaaatcatgtttatcaatttttagattcttaactagaattagttatagttttgattacataagagatccttacaaatttaatctctcattcattataattatataaagtttctgactgaaaccagcaggaaaactctcgatccttgaaacaccttgcggatgaaatgagtggtccattatctccaatgtcacttcctgcaccaaagcaactcaaattcactcctggagttgttaattggtcaggcagggagtcagctacatttttagatgaagcacgaaagatgatacccattggagagttgtcaacgaagaggctagcagctataggacaagccggaaaactttggaagtggaagagaagtcatcatcaatggctgctacagtttaaatggaagtggcagaagccctggaaactctcagaatggatcaaacacagtgatgagacaattatgaggtcaaggcctcgagcacaagctttgattaatgtgatatgatctgatgttgttgaactcatagtaaaggacatttccaattctgaatattgaccgcggtgtgtttcaacacagcttgacaagaggacagttgattgcaggtagtctttaccctgttgttccaaaagctttttttaactcctaaggaggcaaggactgccgagcatttctcaatgtgtttgtcatcttttccttacttcctaaaaaacagtattacatgaattcttcattctaatgaactaattgatttatgctatggggaaaataaattaaaatgaattaatggtgtaaaaggaatcaaatttccacacaagttaaaatgtactaatgagccttaacttatatgaaagttaggagtcaaaaactttagttgaaaagttctcatgaactagaagctgatagtagtgcacgatgtagacgcagaatagtccatgctttttagtaaattattagcttcctttaattgaaactcagattgtgcttctgcactggaattgttctcttaatttgcagtatgcatgcaggtacgatgtaaattggacaagtttcctgggatttatcagggtctttttgctgaggtacagtttggttgttggagaaacaaatgtgaataaaacgatacatgtattgttttattctcataattctgtg

SEQ ID NO: 23333 - protein, 109 aa, Glycine max
MSGPLSPMSLPAPKQLKFTPGVVNWSGRESATFLDEARKMIPIGELSTKRLAAIGQAGKLWKWKRSHHQWLLQFKWKWQKPWKLSEWIKHSDETIMRSRPRAQALINVI

SEQ ID NO: 23334 - protein, 102 aa, Glycine max
MSLPAPKQLKFTPGVVNWSGRESATFLDEARKMIPIGELSTKRLAAIGQAGKLWKWKRSHHQWLLQFKWKWQKPWKLSEWIKHSDETIMRSRPRAQALINVI

SEQ ID NO: 23335 - protein, 70 aa, Glycine max
MIPIGELSTKRLAAIGQAGKLWKWKRSHHQWLLQFKWKWQKPWKLSEWIKHSDETIMRSRPRAQALINVI

SEQ ID NO: 23336 - DNA, 1382 bp, Glycine max
agaattaacgagataaaacagagaacccccttggttctgctccctttggttcaagaagaactctctacaagaacacaagtctcacactctgttatctctctcttcccttacgtgcccagtgtttcctctcatatgtttctcacaaaaatctcagtacctctcacaatgattatagttagttacccttacacagatcccgtgacctctatttataggctccaaatcactaagactcaacaacataagcctaacagaaaacactcaatagtctgatgcgtatcaaattaatgaaacaaattgttccatctgactaagccttagtttgataacaacagacgatcctcatcagaccgaacaatagattttgagtcatagacaacaatttttgttagaaatctcttgggaaaataaagataagagttataattttataaatattgccagtgcaaaacatcttcacacagcacaattattcaataagatttttattactttatcacgtcattctattcattatgacgtgtcaatgaagtatgttttgtataaagatgttttacacagataatgtatataaactaaagatgtttagttcattctcactgttagtcctagctattgctctggcttttgatttggtagtctcaactcgtaaaacacaactctactaaattgtgcttgaagtcccttgtgttcatggctaatgactttgttacgtttggtcttcttgagcaacatcaaagtgatttaatcattgttataatattgtttgttcagaatcagaacatggtgattttaaattatagttgcttgtaggttatttatgactcagatagtaaccactatgataagatgatgttggttcagttgttcttgaagtgtgtaataatcctcattttgaataaacaggtggacaaaatacctggtggagctagattgggttttatcaccattggggatgggaaaactgaagttcttgtgtatattgattgcttggtttttccaccaactgaaaactctgctccaattttccgtgccattagaaatggtcccttgaaggataaggcaccaccaggtgagcccagaattatgagaagccttcttcaagctcttcagaagtcagttgaaatcgccagattgtgaatattttgtttgtttctaacgtccttgtaattgtaaggttttgacttttgaaccaaaatgttaacatgaagtatgaatttgatgtatatatatttattcaaattcattcatccaatattatgtttactcactgaagagatcaatgttcgtttaaactgtctaagtgtcaagagatgtctggaatctctaacttcagttctgttttgtacatgagaaataatatttacatttacattacatac

SEQ ID NO: 23337 - protein, 96 aa, Glycine max
MMLVQLFLKCVIILILNKQVDKIPGGARLGFITIGDGKTEVLVYIDCLVFPPTENSAPIFRAIRNGPLKDKAPPGEPRIMRSLLQALQKSVEIARL

SEQ ID NO: 23338 - protein, 95 aa, Glycine max
MLVQLFLKCVIILILNKQVDKIPGGARLGFITIGDGKTEVLVYIDCLVFPPTENSAPIFRAIRNGPLKDKAPPGEPRIMRSLLQALQKSVEIARL

SEQ ID NO: 23339 - protein, 90 aa, Glycine max
RINEIKQRTPLVLLPLVQEELSTRTQVSHSVISLFPYVPSVSSHMFLTKISVPLTMIIVSYPYTDPVTSIYRLQITKTQQHKPNRKHSIV

SEQ ID NO: 23340 - DNA, 1560 bp, Glycine max
ggccaaagacatcccaaatctaagaccgtatatcctctctctctctctctctctttctctttctctttttccccttccaagcatgtcaaagaacacagcatcatccaagactaaatccagcgcaatctgtccatgagttatgttctttaaagttttataacaataaggccacgaaggttctccataggtgactaagtgaagaaagatatggttgtatatatatatatatatgcagtgttgcatctatgatcaataggcttggaaaagaaagaaaagaggcacatcatcgtgaatagggtcattggaagagaaagaaaagaggcacatcatcatcgtgaataggctcattggaagagaaaggatagaggcacatcatcatcgtgaatggttggtactttagggaaaaagacatgaaatgccattcataatttgtacacattaataaagaattgaagttggaggtgatcctgatcgagcaacaacaaataaatatgtcagatgaatatgagaggagtgaacatgctgatgatgactcttcaatgggatcatcccagaaatgctcatcctttgatttgaatgaagaagctagtagcaaagataacaatgacaacgatgataagggattcgaggaagcaagggaagaaggtacttcaactaataaaagtagcagcatgacaaaggaaggaagtaatgaacggagaggtggcgtgagacaatatgttagatcaaaaatgcctcggcttcggtggacacctgaacttcatctatcctttgtgcatgctgttgaaaggcttggaggtcaagaaagagcaacacccaaattggtgcttcagctaatgaatgtgagaggcctcagcattgctcatgtcaagagtcacttgcagatgtatcgaagcaagaaactagacgaggctgggcaagtattaggtcaaacatacaaatcaacccatgaacttggtcgtatttctcatgtagcccatcagtccatgaatcctcgtcaacattttaagatgggaaatggaggaattattctagcaagtgattacaacgaccacagttatttccatggtctcatgcatccctgctccctatcacattcacatacaaaagccatcgattcaaggcgccaacaatggtacttcaataatcatcaaccttttagaagaccaagttactttagcaacgaagttgtctcctcaactgccttacaaacgcaaggaagatcattatcttcaaaccaaattaacctaatggatgccaccagcattgcacccatgagaccaagccagtttcttgaagagaaaaagtggcctcccttagatattatgaacaaccatcactggaagaaaaggttgcctgccaatattacttctaatgctgtgtcacaacctattgtacatgaatttggcaccactgcagcatctctgcttagaccaagtgagttgaactttggaaacaacacaagaatcaaggagcatctatcaaactccgacgagcatcgcaactattccaacagtttcaagctagaatttgagcctccatttcggattaagtcgaatc

SEQ ID NO: 23341 - protein, 356 aa, Glycine max
MSDEYERSEHADDDSSMGSSQKCSSFDLNEEASSKDNNDNDDKGFEEAREEGTSTNKSSSMTKEGSNERRGGVRQYVRSKMPRLRWTPELHLSFVHAVERLGGQERATPKLVLQLMNVRGLSIAHVKSHLQMYRSKKLDEAGQVLGQTYKSTHELGRISHVAHQSMNPRQHFKMGNGGIILASDYNDHSYFHGLMHPCSLSHSHTKAIDSRRQQWYFNNHQPFRRPSYFSNEVVSSTALQTQGRSLSSNQINLMDATSIAPMRPSQFLEEKKWPPLDIMNNHHWKKRLPANITSNAVSQPIVHEFGTTAASLLRPSELNFGNNTRIKEHLSNSDEHRNYSNSFKLEFEPPFRIKSN

SEQ ID NO: 23342 - protein, 340 aa, Glycine max
MGSSQKCSSFDLNEEASSKDNNDNDDKGFEEAREEGTSTNKSSSMTKEGSNERRGGVRQYVRSKMPRLRWTPELHLSFVHAVERLGGQERATPKLVLQLMNVRGLSIAHVKSHLQMYRSKKLDEAGQVLGQTYKSTHELGRISHVAHQSMNPRQHFKMGNGGIILASDYNDHSYFHGLMHPCSLSHSHTKAIDSRRQQWYFNNHQPFRRPSYFSNEVVSSTALQTQGRSLSSNQINLMDATSIAPMRPSQFLEEKKWPPLDIMNNHHWKKRLPANITSNAVSQPIVHEFGTTAASLLRPSELNFGNNTRIKEHLSNSDEHRNYSNSFKLEFEPPFRIKSN

SEQ ID NO: 23343 - protein, 296 aa, Glycine max
MTKEGSNERRGGVRQYVRSKMPRLRWTPELHLSFVHAVERLGGQERATPKLVLQLMNVRGLSIAHVKSHLQMYRSKKLDEAGQVLGQTYKSTHELGRISHVAHQSMNPRQHFKMGNGGIILASDYNDHSYFHGLMHPCSLSHSHTKAIDSRRQQWYFNNHQPFRRPSYFSNEVVSSTALQTQGRSLSSNQINLMDATSIAPMRPSQFLEEKKWPPLDIMNNHHWKKRLPANITSNAVSQPIVHEFGTTAASLLRPSELNFGNNTRIKEHLSNSDEHRNYSNSFKLEFEPPFRIKSN

SEQ ID NO: 23344 - DNA, 1248 bp, Glycine max
actctcatcttttcagtttatctgtttctcaatcgttagatctcatcttatactcaccggcgagtccatctcgcgccagcgtcgacgccgctccggcaaccgctccggccaccgcctttggttccctcactttctcgtccttcttcttctcagaaatatgccttctcagaaagttgaaacgggtcatcaagacacggtccatgatgttgcaatggattactatggtaagaggctggccacggcttcatcagatcacacaattaagataattggggtgagtaatacggcctctcagcatctcgcaacattgactggtcaccaaggacctgtttggcaagtggcgtgggctcaccctaagtttggttctctacttgcatcgtgttcctatgatggtcgtgtcattgtttggaaggagggcaaccaaaatgaatggactcaagctcatgtgtttgatgaccacaagtcatctgtgaattcggttgcttgggcgcctcacgagttgggtctttgcttggcttgtggctcgtctgatgggaatatatctgttctgactgcaagagcagacggtggctgggacactgtgagaattgatcaggctcatccagttggtgtcacttcggtgtcatgggcgccatcgatggcacccggagcccttgtcggtgcagggttgcttgatccagtacagaagctgtgctctggtggttgtgataatactgtgaaggtatggaagctaaacaatggactctggaagatggactgcttccctgctcttcagatgcacacggattgggttcgagatgttgcttgggcacccaatttagggctccctaaatctaccattgctagcgcatcacaggacggtaaagtgattatatggaccgtggcgaaagagggggatcagtgggaaggcaaggttttgaatgatttcaacacccctgtttggagggtctcatggtcattgacaggaaacatattggctgtggctgatgggaacaacaatgtgacattgtggaaggaagcagttgatggggaatggcaacaggtgacaacagtggagccttagaatttgatattttttttttgaaaatggttagaattttcgttttgaaatatatagttgacgacatcttgtttctttgcatactatacagttgattaattgtgcttcataatgcactaagttccttgacgtttgtgatccattgagtattccgtgattggaagaatgaagttaattagtttgagttg

SEQ ID NO: 23345 - protein, 353 aa, Glycine max
LSSFQFICFSIVRSHLILTGESISRQRRRRSGNRSGHRLWFPHFLVLLLLRNMPSQKVETGHQDTVHDVAMDYYGKRLATASSDHTIKIIGVSNTASQHLATLTGHQGPVWQVAWAHPKFGSLLASCSYDGRVIVWKEGNQNEWTQAHVFDDHKSSVNSVAWAPHELGLCLACGSSDGNISVLTARADGGWDTVRIDQAHPVGVTSVSWAPSMAPGALVGAGLLDPVQKLCSGGCDNTVKVWKLNNGLWKMDCFPALQMHTDWVRDVAWAPNLGLPKSTIASASQDGKVIIWTVAKEGDQWEGKVLNDFNTPVWRVSWSLTGNILAVADGNNNVTLWKEAVDGEWQQVTTVEP

SEQ ID NO: 23346 - protein, 301 aa, Glycine max
MPSQKVETGHQDTVHDVAMDYYGKRLATASSDHTIKIIGVSNTASQHLATLTGHQGPVWQVAWAHPKFGSLLASCSYDGRVIVWKEGNQNEWTQAHVFDDHKSSVNSVAWAPHELGLCLACGSSDGNISVLTARADGGWDTVRIDQAHPVGVTSVSWAPSMAPGALVGAGLLDPVQKLCSGGCDNTVKVWKLNNGLWKMDCFPALQMHTDWVRDVAWAPNLGLPKSTIASASQDGKVIIWTVAKEGDQWEGKVLNDFNTPVWRVSWSLTGNILAVADGNNNVTLWKEAVDGEWQQVTTVEP

SEQ ID NO: 23347 - protein, 283 aa, Glycine max
MDYYGKRLATASSDHTIKIIGVSNTASQHLATLTGHQGPVWQVAWAHPKFGSLLASCSYDGRVIVWKEGNQNEWTQAHVFDDHKSSVNSVAWAPHELGLCLACGSSDGNISVLTARADGGWDTVRIDQAHPVGVTSVSWAPSMAPGALVGAGLLDPVQKLCSGGCDNTVKVWKLNNGLWKMDCFPALQMHTDWVRDVAWAPNLGLPKSTIASASQDGKVIIWTVAKEGDQWEGKVLNDFNTPVWRVSWSLTGNILAVADGNNNVTLWKEAVDGEWQQVTTVEP

SEQ ID NO: 23348 - DNA, 2209 bp, Glycine max
gagggtttaagcgtttcttctcctatggcattcagcgataagcaaaagcaagaagaagaagaagaaccgcacagaatggaagaagacgacgacgaaagcgaagaagaagaagaagaagaagaagaagaagaagaagaagaagaagaagaagaagtgtgggacgattgggaaggagaagacgaaggagagagagaatctgaattcgtgtgtctattctgtgactcccggtacagttcgtgcggttccttgttcgaccactgcgcctcccttcaccgctttgatttccacacgatcagaacaactctcagcttggatttctatgcctccttcaagctcattaacttcatccgctctcgggtggcagagaacatatgttggagttgtggattaacatgccagtccaactgtgaccttcagaatcatttgcatgatgtagttgactttaatgagataaagactttgtggaatgatgataggtatctgatacctttcatgcaagatgattcactgttgtacagttttggtgattgtgacgaagacggggaagatgaacatattactcgaattgatgaagatcttataaaggatctaatgaacattgaagagagtatccatgacgatcaagatcttgtgaaaaaagtggtagttgatgatgacaaacatgagattgattctgtctctaataatcatttgaacaaggctagttcttcaaagaaacttattaatggtaaggactcaaaaggacatgttttgtgcagtgataaggatccagaaggacatttgatggttaattctcaaaatcacattgcaaagcatattaagaagatcaatgaaagttattttgggtcttacagttcatttggtatccatcgagagatgttaagtgataaggtgagaatggatgcttatggccaagcgattttgaagaatccctctctactaaatagtgctgtggttatggatgtaggttgtggaactggaattctcagcctattttcagcaaaagctggcgcttcaagggttattgcagttgaggctagtgccaagatggcagcagtagcatctcaggttgcaaaagataatggtcttttgctgagtaaaagccaaaatggagttgatggcctccaaaagggagtcatagaagtggttcatggtatggttgaagagattgataaaacagttgaacttcaacctcgcagtgttgatgtattgctaagtgaatggatgggatattgcctgctgtatgaatccatgcttggttcagtgctttatgcacgagaccggtggttgaagcctggtggtgccattcttcctgatacagcaactatttttgttgcaggatttggaaaaggagccacaagtcttcctttttgggaaaatgtgtgtgatttcgacatgtcttgcattgggaatgagcttgtcatagatgctgcccgaattcctatagttgatgttgtggactctcaagatttagttacctgttctgctattcttcagtcctttgacttggcaaccatgaagcctaatgaagtggatttcactgcaactgctactttggaattgaaaccaagtacttctggaacatgctgctggtgttatggtgttgtcctatggtttgatactggattttcaagcagattctgccgagaaacaccagccgtgttatccacattcccttacatgccaagaacacattggtcacaaacaatcttaacctttcaagaacctattgcgatgggatttggaaaagaaaacaggggtaaaccagaagcaattggcactgaggtgtatcctgctgtgaagattgatttacgtgtcagcattgtccgttctactgagcatcgcagcattgatatatccttagaagctgctggtgttggtcctgacagtcacaaacgcagttggcctgctcagcttttaatctgcagtaggatgcatgacgccacaacagcaaagatcattgtgcagcagtttttcttgttggctgccagttaaaatcagttttggaatgctacagctgtaattgctaacatttaggttcctttttttgttcactggaaatagctactgcttgttgaatgctagactctacgctgcccaattacatagaaaatgtaatgtttctccaattcatatttatgtatgacaaaacttacgtgcagtactgttttcttatactgttttccaattaaaattggttattcatttc

SEQ ID NO: 23349 - protein, 664 aa, Glycine max
EGLSVSSPMAFSDKQKQEEEEEPHRMEEDDDESEEEEEEEEEEEEEEEEEEVWDDWEGEDEGERESEFVCLFCDSRYSSCGSLFDHCASLHRFDFHTIRTTLSLDFYASFKLINFIRSRVAENICWSCGLTCQSNCDLQNHLHDVVDFNEIKTLWNDDRYLIPFMQDDSLLYSFGDCDEDGEDEHITRIDEDLIKDLMNIEESIHDDQDLVKKVVVDDDKHEIDSVSNNHLNKASSSKKLINGKDSKGHVLCSDKDPEGHLMVNSQNHIAKHIKKINESYFGSYSSFGIHREMLSDKVRMDAYGQAILKNPSLLNSAVVMDVGCGTGILSLFSAKAGASRVIAVEASAKMAAVASQVAKDNGLLLSKSQNGVDGLQKGVIEVVHGMVEEIDKTVELQPRSVDVLLSEWMGYCLLYESMLGSVLYARDRWLKPGGAILPDTATIFVAGFGKGATSLPFWENVCDFDMSCIGNELVIDAARIPIVDVVDSQDLVTCSAILQSFDLATMKPNEVDFTATATLELKPSTSGTCCWCYGVVLWFDTGFSSRFCRETPAVLSTFPYMPRTHWSQTILTFQEPIAMGFGKENRGKPEAIGTEVYPAVKIDLRVSIVRSTEHRSIDISLEAAGVGPDSHKRSWPAQLLICSRMHDATTAKIIVQQFFLLAAS

SEQ ID NO: 23350 - protein, 656 aa, Glycine max
MAFSDKQKQEEEEEPHRMEEDDDESEEEEEEEEEEEEEEEEEEVWDDWEGEDEGERESEFVCLFCDSRYSSCGSLFDHCASLHRFDFHTIRTTLSLDFYASFKLINFIRSRVAENICWSCGLTCQSNCDLQNHLHDVVDFNEIKTLWNDDRYLIPFMQDDSLLYSFGDCDEDGEDEHITRIDEDLIKDLMNIEESIHDDQDLVKKVVVDDDKHEIDSVSNNHLNKASSSKKLINGKDSKGHVLCSDKDPEGHLMVNSQNHIAKHIKKINESYFGSYSSFGIHREMLSDKVRMDAYGQAILKNPSLLNSAVVMDVGCGTGILSLFSAKAGASRVIAVEASAKMAAVASQVAKDNGLLLSKSQNGVDGLQKGVIEVVHGMVEEIDKTVELQPRSVDVLLSEWMGYCLLYESMLGSVLYARDRWLKPGGAILPDTATIFVAGFGKGATSLPFWENVCDFDMSCIGNELVIDAARIPIVDVVDSQDLVTCSAILQSFDLATMKPNEVDFTATATLELKPSTSGTCCWCYGVVLWFDTGFSSRFCRETPAVLSTFPYMPRTHWSQTILTFQEPIAMGFGKENRGKPEAIGTEVYPAVKIDLRVSIVRSTEHRSIDISLEAAGVGPDSHKRSWPAQLLICSRMHDATTAKIIVQQFFLLAAS

SEQ ID NO: 23351 - protein, 639 aa, Glycine max
MEEDDDESEEEEEEEEEEEEEEEEEEVWDDWEGEDEGERESEFVCLFCDSRYSSCGSLFDHCASLHRFDFHTIRTTLSLDFYASFKLINFIRSRVAENICWSCGLTCQSNCDLQNHLHDVVDFNEIKTLWNDDRYLIPFMQDDSLLYSFGDCDEDGEDEHITRIDEDLIKDLMNIEESIHDDQDLVKKVVVDDDKHEIDSVSNNHLNKASSSKKLINGKDSKGHVLCSDKDPEGHLMVNSQNHIAKHIKKINESYFGSYSSFGIHREMLSDKVRMDAYGQAILKNPSLLNSAVVMDVGCGTGILSLFSAKAGASRVIAVEASAKMAAVASQVAKDNGLLLSKSQNGVDGLQKGVIEVVHGMVEEIDKTVELQPRSVDVLLSEWMGYCLLYESMLGSVLYARDRWLKPGGAILPDTATIFVAGFGKGATSLPFWENVCDFDMSCIGNELVIDAARIPIVDVVDSQDLVTCSAILQSFDLATMKPNEVDFTATATLELKPSTSGTCCWCYGVVLWFDTGFSSRFCRETPAVLSTFPYMPRTHWSQTILTFQEPIAMGFGKENRGKPEAIGTEVYPAVKIDLRVSIVRSTEHRSIDISLEAAGVGPDSHKRSWPAQLLICSRMHDATTAKIIVQQFFLLAAS

SEQ ID NO: 23352 - DNA, 1379 bp, Glycine max
ggaaggatgcttcttcaattccctttccttctttcttagctttgaagaccaactcatttcaacttaacccatcaaaaccatcgctctctattttcgtcctttctacctttctccgatcccaatccctaatctttctctcttcaaactctaattttttcatctggggagatcggctgacgaatcgagaggatctcatcgctcgcaagggattagggtttcaatcgatcgcatcacatatcacaatcatgtttagccggatgttcggtaaacctaaacaggaaaccaatgctgttgccactttggacaagctaaacgagacacttgaaatgctggagaaaaaggagaaagtgctccttaaaaaggtggcagcagaagttgaaaaggccaaagaattcacaagggggaagaacaaaagggcggcaatacaatgtctgaagaggaagaggttatatgaacagcaaatagagcagcttggaaatttccagttgcgtattcatgaccagatgataatgttggaaggtgctaaagccaccacagaaacggtagacgcgttaagaactggagcagctgctatgaaggctatgcaaaaagcaacgaatattgatgatgttgacaagactatggatgagatcaatgaacagactgagaatatgaaacagattcaggatgcattgtctgctccaattggtgcggctgctgattttgacgaggatgaattggaagcagaacttgaagaactggagggtgctgagttggaagaacagcttcttcagccagcaactacagctcctgcggccccagtgcaggtcccagctgggcagcaacctactcgcccagttcccgcaaagcgaactccggaagaagatgaattggcagctttgcaggctgagatggcactttgagcagaattttgcaggcttttttttgtgcatggcttcaatgaagaattgtaaccactattacgtggagaattctgcttctctcctgctcgcttatctttgaaattattgagctgaccagaggatgtatataaaagtggaaaaaaaattatcataaaagtcttcaaaacgtactacttttattttggatgagttcgaacccctcctttccattatacgtatcaagtatattgatgcatttgactatcttatactttatgtggttgagtttaacgtggtcagtttaatcaatgtattatatcttaaacatgcttacagcaaagtataaggaataagaatttggttagcctatgagctagaacacagccatgattaaggtgatgatttttatttgtccataggaggatttacaagctgcactgccactgtgaatgtaaaattttattttctttatattataataatgattaagtaattaag

SEQ ID NO: 23353 - protein, 299 aa, Glycine max
KDASSIPFPSFLALKTNSFQLNPSKPSLSIFVLSTFLRSQSLIFLSSNSNFFIWGDRLTNREDLIARKGLGFQSIASHITIMFSRMFGKPKQETNAVATLDKLNETLEMLEKKEKVLLKKVAAEVEKAKEFTRGKNKRAAIQCLKRKRLYEQQIEQLGNFQLRIHDQMIMLEGAKATTETVDALRTGAAAMKAMQKATNIDDVDKTMDEINEQTENMKQIQDALSAPIGAAADFDEDELEAELEELEGAELEEQLLQPATTAPAAPVQVPAGQQPTRPVPAKRTPEEDELAALQAEMAL

SEQ ID NO: 23354 - protein, 218 aa, Glycine max
MFSRMFGKPKQETNAVATLDKLNETLEMLEKKEKVLLKKVAAEVEKAKEFTRGKNKRAAIQCLKRKRLYEQQIEQLGNFQLRIHDQMIMLEGAKATTETVDALRTGAAAMKAMQKATNIDDVDKTMDEINEQTENMKQIQDALSAPIGAAADFDEDELEAELEELEGAELEEQLLQPATTAPAAPVQVPAGQQPTRPVPAKRTPEEDELAALQAEMAL

SEQ ID NO: 23355 - protein, 214 aa, Glycine max
MFGKPKQETNAVATLDKLNETLEMLEKKEKVLLKKVAAEVEKAKEFTRGKNKRAAIQCLKRKRLYEQQIEQLGNFQLRIHDQMIMLEGAKATTETVDALRTGAAAMKAMQKATNIDDVDKTMDEINEQTENMKQIQDALSAPIGAAADFDEDELEAELEELEGAELEEQLLQPATTAPAAPVQVPAGQQPTRPVPAKRTPEEDELAALQAEMAL

SEQ ID NO: 23356 - DNA, 1210 bp, Glycine max
agcaacaaaaaattttagggatgaaacctttattgggcaaggtggatttggcactgtttataaaggaacaatcggaaaaataaatcaggttgtagctgttaaaagacttgatactactggtgtccaaggggagaaagaatttctggtggaagttctcatgctttcccttctacgccattccaaccttgttaatatgattggttactgtgctgaaggggatcaacgtcttcttgtgtatgagtacatggctttaggatctttagaatctcatcttcatgatgtttcacctgatgaagaaccactcgattggaataccagaatgatgatagcttttggggcagcaaaaggactaaattatctgcaccatgaagcaaagccctctgttatatacagggatctgaaatcatccaacatactattggatgaaggtttccatccaaaactttctgattttgggcttgcaaaatttggtccaaccggagaacaatcgtatgttgccactagggtcatgggaacacaaggttactgtgcccctgaatatgccactagtggaaaattaacgatgagatctgacatttacagttttggggttgtgttattggaactaattactggacgcagagcatatgatgataatggtggccctgaaaagcatcttgtagaatgggcacgcccaatgtttagagacaaaaagagttatccaagatttgcagatccgcggcttaaaggttgctacccaggaacagctctctcgaatgccattgaattggcagccatgtgtcttcgtgaagagccacgtcaacggcctaatgcaggtcatatagtggaagctctcaaattcttgtcatccaaaccatataccccgaaagtatccattacagtcaacacaacaggtatggagagtggagattctccaaaagaaacaccagcgattttgcctcaagaatcagaaagagagcgagctgttgcagaggccaagctgtggggtgagacatggaggcagagacgacaaagtgagcaaagtagtcctgaaggaagcaaatagggggtaccagaaagaaaaccttcaaagcagattagaagtggctagtatctaaaaaggtatagggaaagtaaagaaacttcaaaagataatgtgttcaagatttaaatgtagctaataaaattagttggccagctaaatttaaaaagtgtcgtttaggcacttgtg

SEQ ID NO: 23357 - protein, 347 aa, Glycine max
ATKNFRDETFIGQGGFGTVYKGTIGKINQVVAVKRLDTTGVQGEKEFLVEVLMLSLLRHSNLVNMIGYCAEGDQRLLVYEYMALGSLESHLHDVSPDEEPLDWNTRMMIAFGAAKGLNYLHHEAKPSVIYRDLKSSNILLDEGFHPKLSDFGLAKFGPTGEQSYVATRVMGTQGYCAPEYATSGKLTMRSDIYSFGVVLLELITGRRAYDDNGGPEKHLVEWARPMFRDKKSYPRFADPRLKGCYPGTALSNAIELAAMCLREEPRQRPNAGHIVEALKFLSSKPYTPKVSITVNTTGMESGDSPKETPAILPQESERERAVAEAKLWGETWRQRRQSEQSSPEGSK

SEQ ID NO: 23358 - protein, 295 aa, Glycine max; identical to SEQ ID NO: 22249

SEQ ID NO: 23359 - protein, 283 aa, Glycine max
MIGYCAEGDQRLLVYEYMALGSLESHLHDVSPDEEPLDWNTRMMIAFGAAKGLNYLHHEAKPSVIYRDLKSSNILLDEGFHPKLSDFGLAKFGPTGEQSYVATRVMGTQGYCAPEYATSGKLTMRSDIYSFGVVLLELITGRRAYDDNGGPEKHLVEWARPMFRDKKSYPRFADPRLKGCYPGTALSNAIELAAMCLREEPRQRPNAGHIVEALKFLSSKPYTPKVSITVNTTGMESGDSPKETPAILPQESERERAVAEAKLWGETWRQRRQSEQSSPEGSK

SEQ ID NO: 23360 - DNA, 1569 bp, Glycine max
ctctctctcgtgtgtgtgtgtgtgtgtgtgtgtgtgtgtgttgggttcaatgtgctgttggtttgcttgaccttgtttatcaaccaaatctagagcaacccatttctctgttctcccatttgaaggaaaggaaaacttacacctctctctctctctaactgattcgctccaattccgccgcgcccagattcttctctctcacctacaaacccggtcccaacaaggtctttccttccaactcctatggcgggagaaacatcttggatcagccactatgatgacagacaaagggagactggggcgtttgattcatttttagaacttggtgaggaaggtgaaaaagaagcaactgctgtttctttggatgttttgccagatgacttgttggaacgaatcctagcctatctccccattgcaagcatttttagagctggctgtgtgtctaagaagtggcatgaaattgttaattcagagaggtttgtatggaacctttcacatgttctaccgcagaaaccttggtactttatgtttacgagctctgatgaaccagatggttatgcttttgatcccgtccttcggaaatggtatcggtatcgcattgaacttccatgcattgaaacttctaattggttcattgcttcatcatatggcatggtctgcttcatggacaatgacagcagaagtgaaatatgcatctgcaacccaattaccaaaacctacaggaagcttgaggagcctccaggtttgaaagtttctgattacagtgcattagcaatctcagtgaacagggaatctcactgttatactgtggcaattgtaaaatctaaacaagtccctgagaactttgtccagtgggatatctcaattcatctatacaattcagaaaatgcaacctgggtgacctctttaacggaagttttgatggggtggagaggtggtaatgagagtgtgatatgcaatgggatgctgtactttttagtttattcaaccgggggtggccaacctgtaaatcgtcatgccctaattgcgtataacatgtccaatcattcttctcaaggtagcttaacaaggaacttcattccagtacctttttctctaacatgtggccgtttgatgaatctgaaggagaagcttgtaatggtgggaggaattggtaaaccagatcgacctgacataataaaaggaattggtatctggcttctaaaggataagaagtgggaagagattgctcgaatgccccacaaattcttccaaggctttggggagtttgatgatgtgtttgctagcagcggtgcagatgatctgatatatattcagagttatggaggtccggcgcttctcatatttgatgtgaaccataagcaatggaaatggtcgcagaaatgccctgtgggaaaaagattcccgctgcagctttttactggcttttgctttgaggctagacttgaaattgctccatagttctccttacaatcaagagctgctaattgtgtccaaggcttctactcattttccttcattgttcttttaagtaaaaatttaatatgatttcagtgttttcacagttcc

SEQ ID NO: 23361 - protein, 405 aa, Glycine max
MAGETSWISHYDDRQRETGAFDSFLELGEEGEKEATAVSLDVLPDDLLERILAYLPIASIFRAGCVSKKWHEIVNSERFVWNLSHVLPQKPWYFMFTSSDEPDGYAFDPVLRKWYRYRIELPCIETSNWFIASSYGMVCFMDNDSRSEICICNPITKTYRKLEEPPGLKVSDYSALAISVNRESHCYTVAIVKSKQVPENFVQWDISIHLYNSENATWVTSLTEVLMGWRGGNESVICNGMLYFLVYSTGGGQPVNRHALIAYNMSNHSSQGSLTRNFIPVPFSLTCGRLMNLKEKLVMVGGIGKPDRPDIIKGIGIWLLKDKKWEEIARMPHKFFQGFGEFDDVFASSGADDLIYIQSYGGPALLIFDVNHKQWKWSQKCPVGKRFPLQLFTGFCFEARLEIAP

SEQ ID NO: 23362 - protein, 311 aa, Glycine max
MFTSSDEPDGYAFDPVLRKWYRYRIELPCIETSNWFIASSYGMVCFMDNDSRSEICICNPITKTYRKLEEPPGLKVSDYSALAISVNRESHCYTVAIVKSKQVPENFVQWDISIHLYNSENATWVTSLTEVLMGWRGGNESVICNGMLYFLVYSTGGGQPVNRHALIAYNMSNHSSQGSLTRNFIPVPFSLTCGRLMNLKEKLVMVGGIGKPDRPDIIKGIGIWLLKDKKWEEIARMPHKFFQGFGEFDDVFASSGADDLIYIQSYGGPALLIFDVNHKQWKWSQKCPVGKRFPLQLFTGFCFEARLEIAP

SEQ ID NO: 23363 - protein, 269 aa, Glycine max
MVCFMDNDSRSEICICNPITKTYRKLEEPPGLKVSDYSALAISVNRESHCYTVAIVKSKQVPENFVQWDISIHLYNSENATWVTSLTEVLMGWRGGNESVICNGMLYFLVYSTGGGQPVNRHALIAYNMSNHSSQGSLTRNFIPVPFSLTCGRLMNLKEKLVMVGGIGKPDRPDIIKGIGIWLLKDKKWEEIARMPHKFFQGFGEFDDVFASSGADDLIYIQSYGGPALLIFDVNHKQWKWSQKCPVGKRFPLQLFTGFCFEARLEIAP

SEQ ID NO: 23364 - DNA, 1310 bp, Glycine max
tcgtctttctcttcttcctaagatcccttctcacttctatagttctattctcttctctttctccacctcttcacctcttctctcccctgtcttcttcttaattagcctctctcattgcgtgcaccaccccaaaaaaaatatacatatacatatatacataaaaaaaacaaccccccccctctacgtggccacactcgctcacaacacaacacaccctcttaattaaatctctatataaaaccccttcagggtctctccactatgacgggcagggaaatttttcataagatgaaggaaaaagttttgggctcatctgatcctgattctggtaaaggaaagagcaagatgaagaagaacataactcatggctttcacttggtaaaggggagatcaggtcatgccatggaagactatcttgttgctcaattcaagcaagttgacgacaatgaattgggtttatttgcaatatttgatggccactcaggtcacagtgtacctgattacttgaagtctcatttgtttgataatatcttgaaagagcctaacttctggacagaacctgctgaggctgttaagagagcatatggtataactgattctactattttagacaaatcaggtgaattgggtagagggggttcaactgcggttactgcaatattgatcaactgtcaggagctgctagtggccaatattggggattcccgggctgtcttatgcaagaatggcgtggccaaacaactatcagtggatcatgaaccaagcatagaaagtgaagatataagaaacagaggtggttttgtgtcaaacttcccaggggatgttccacgtgtcgatggtcagttggcggtgtcaagggcatttggtgacaaaagcctgaagatacatttgagctcagaaccatatgtaactttggagatgatagaagatgatgcagagtttcttatactagccagtgatgggttatggaaggtaatgtcaaatcaagaagcagttagtgctatcaaagatgttaaggatgccaggtccgcagctaaggtgcttaccgaagaagcaaagatcaggaaaagttctgatgatatctcttgcgttgttgtgaaatttcagtgatcactgaactcacatagtagatttttatcttcgaacttgaaaatgtaacatatactttagtgtatatggattaatgttgattccctttaggtgttattatgttgtggcattctgtttgtgatattttatctgctttcgtacaaatcaactgtctgagaacgtgttgtttgatgtaacagtgtaaaaaaggatttagtttc

SEQ ID NO: 23365 - protein, 282 aa, Glycine max
MTGREIFHKMKEKVLGSSDPDSGKGKSKMKKNITHGFHLVKGRSGHAMEDYLVAQFKQVDDNELGLFAIFDGHSGHSVPDYLKSHLFDNILKEPNFWTEPAEAVKRAYGITDSTILDKSGELGRGGSTAVTAILINCQELLVANIGDSRAVLCKNGVAKQLSVDHEPSIESEDIRNRGGFVSNFPGDVPRVDGQLAVSRAFGDKSLKIHLSSEPYVTLEMIEDDAEFLILASDGLWKVMSNQEAVSAIKDVKDARSAAKVLTEEAKIRKSSDDISCVVVKFQ

SEQ ID NO: 23366 - protein, 273 aa, Glycine max
MKEKVLGSSDPDSGKGKSKMKKNITHGFHLVKGRSGHAMEDYLVAQFKQVDDNELGLFAIFDGHSGHSVPDYLKSHLFDNILKEPNFWTEPAEAVKRAYGITDSTILDKSGELGRGGSTAVTAILINCQELLVANIGDSRAVLCKNGVAKQLSVDHEPSIESEDIRNRGGFVSNFPGDVPRVDGQLAVSRAFGDKSLKIHLSSEPYVTLEMIEDDAEFLILASDGLWKVMSNQEAVSAIKDVKDARSAAKVLTEEAKIRKSSDDISCVVVKFQ

SEQ ID NO: 23367 - protein, 254 aa, Glycine max
MKKNITHGFHLVKGRSGHAMEDYLVAQFKQVDDNELGLFAIFDGHSGHSVPDYLKSHLFDNILKEPNFWTEPAEAVKRAYGITDSTILDKSGELGRGGSTAVTAILINCQELLVANIGDSRAVLCKNGVAKQLSVDHEPSIESEDIRNRGGFVSNFPGDVPRVDGQLAVSRAFGDKSLKIHLSSEPYVTLEMIEDDAEFLILASDGLWKVMSNQEAVSAIKDVKDARSAAKVLTEEAKIRKSSDDISCVVVKFQ

SEQ ID NO: 23368 - DNA, 1165 bp, Glycine max
atcatcctcacactttcttccacatttaataccgtatctcactctcccctccctcaaaaaactctctctttctcttccctctccctctgtcccctcacggtcacgcattctaccaaccaaataaacttcaaattccctctatttctcttcattctttcttcccataaacttttctctctttttatttcccacttccaacccttttcatcagtcaacactttcacccgattcctcatcacctaaagaaaaagaaaaaaaaaggatcaaaacaaagaaggaataaaaagaaaccctctttatttattcccctctttaccccatattcttatatttttttttatatagtacgacgctgagaaagttttttgctttttaatcgatatgggattctccgagaaggcgcaagtagaaggagcgtttgattcagataccagcaacaataacaataatcgaaaatgggtcatcgctggaatcgcgttgcgtgcaccattgaagccgatatacactactatgatccctacggagaaggaacaaaaggaagaggttgaaattgaaacgacagaggagtgttcatcatgttcgagttcgacaacgacaccaacaagcgtggaatcgaagatcccaacaccgttgacgtgcccacctgctcctaggaagcgaaacccgcgttgaagaagtgctataattattgcggtggcggtggtggtgttgttagagagttcttcacgccaccagacttggaaactgtgttcatacgccacgttgaaaaagctatttgatcgcacggaagaaggaaaaaaagatatggctaataaaagaactattttccttatcttaagaactggtgcaattccaaaaccgggtacatgtaacactgttcataaacacgccagatatttgatatttgatatttgaagtcaaaatcaaaggtgattaagtagcccaatagttgagttgccaagcgcgaatggaggaggaatgcaaatccttttcaaagatgtaggcagaagagaggggcatggcacattcttaaattgactggagaccaaagccccacataagtactcatagccaagccaagtaccatcacctttacggtgcatgtatgtttttaagtttgaataaatttaatgaaatttatcttcaaccgttgaattaatgtcag

SEQ ID NO: 23369 - protein, 96 aa, Glycine max
MGFSEKAQVEGAFDSDTSNNNNNRKWVIAGIALRAPLKPIYTTMIPTEKEQKEEVEIETTEECSSCSSSTTTPTSVESKIPTPLTCPPAPRKRNPR

SEQ ID NO: 23370 - protein, 80 aa, Glycine max
IILTLSSTFNTVSHSPLPQKTLSFSSLSLCPLTVTHSTNQINFKFPLFLFILSSHKLFSLFISHFQPFSSVNTFTRFLIT

SEQ ID NO: 23371 - protein, 53 aa, Glycine max
MIPTEKEQKEEVEIETTEECSSCSSSTTTPTSVESKIPTPLTCPPAPRKRNPR

SEQ ID NO: 23372 - DNA, 1084 bp, Glycine max
ttttcaatttcaatatccgctcaaaccctaacctaactcctctcgtcgtcacaaaaagtcttcttctccgatcgttacgatgttggaactccgtctcgtgcaaggttcccttctgaagaaggttctggaatcgatcaaggagctcgtaaacgacgcgaacttcgactgctcctccaccgggttctccctccaggccatggattccagccacgtcgccctcgttgcgctcctcctccggtccgagggctttgagcactaccgctgcgaccgcaatacctccatgggcatgaacctcaacaacatggccaagatgctcaagtgcgccggcaatgacgacatcataaccatcaaggccgacgacggcagcgacaccgtcactttcatgttcgaaagccctacacaagataagatttctgattttgagatgaagctgatggacattgacagtgagcaccttgggattccagaggcagagtatcatgccattgttaagatgccatcctctgagtttgctaggatctgcaaggatctcagtagtattggtgacactgttgtcatttcaattactaaggagggtgttaagttttccaccaaaggagacattggaactgccaatatagtttgcaggcagaatacttctgtggacaagcctgaagaagctactgtcattgagatgaatgagcctgtgtccttgacatttgctttgcgatatatgaactcttttacaaaggcaacgccattgtccaacacagttaccattagtctgtcaaatgagctgccagttgtagtcgagtataagattgctgagatgggttatgtgcggttctatttggctcccaagatagaagaggatgaagaagatacgaaacctcaagtttaatctacctattagatgttgggttaggatattaggattttaatgccttttgaacttgtttttgttatacatctttgaagatattttaaccttgtgagcaacgaattggcattttgtggatttcttatgtgtattagtttcctgccaccttattttctcctgaatttattgtttattgtttagaacaatgtgaaacaattggtgtgc

SEQ ID NO: 23373 - protein, 266 aa, Glycine max
MLELRLVQGSLLKKVLESIKELVNDANFDCSSTGFSLQAMDSSHVALVALLLRSEGFEHYRCDRNTSMGMNLNNMAKMLKCAGNDDIITIKADDGSDTVTFMFESPTQDKISDFEMKLMDIDSEHLGIPEAEYHAIVKMPSSEFARICKDLSSIGDTVVISITKEGVKFSTKGDIGTANIVCRQNTSVDKPEEATVIEMNEPVSLTFALRYMNSFTKATPLSNTVTISLSNELPVVVEYKIAEMGYVRFYLAPKIEEDEEDTKPQV

SEQ ID NO: 23374 - protein, 227 aa, Glycine max
MDSSHVALVALLLRSEGFEHYRCDRNTSMGMNLNNMAKMLKCAGNDDIITIKADDGSDTVTFMFESPTQDKISDFEMKLMDIDSEHLGIPEAEYHAIVKMPSSEFARICKDLSSIGDTVVISITKEGVKFSTKGDIGTANIVCRQNTSVDKPEEATVIEMNEPVSLTFALRYMNSFTKATPLSNTVTISLSNELPVVVEYKIAEMGYVRFYLAPKIEEDEEDTKPQV

SEQ ID NO: 23375 - protein, 199 aa, Glycine max
MGMNLNNMAKMLKCAGNDDIITIKADDGSDTVTFMFESPTQDKISDFEMKLMDIDSEHLGIPEAEYHAIVKMPSSEFARICKDLSSIGDTVVISITKEGVKFSTKGDIGTANIVCRQNTSVDKPEEATVIEMNEPVSLTFALRYMNSFTKATPLSNTVTISLSNELPVVVEYKIAEMGYVRFYLAPKIEEDEEDTKPQV

SEQ ID NO: 23376 - DNA, 1320 bp, Glycine max
attcacaactccaatccctcttcgctttagcaaattccaattcccaatccaaaaccctaatttcgttcaaagaaccaattgtgatggcaccaaaggcagagaagaagccagcggagaagaagcccgcggaggagaagaagtcgacggtgggagacaaggctccggcggagaagaagccgaaggccggaaagaagcttcctaaggagggaggagccggcggagaaggggggaagaagaagaagaggaacaagaagagcgtggagacatacaagatatacatattcaaggtgctgaagcaggtccaccctgacattggtatctcaagcaaggccatgggaatcatgaacagcttcatcaacgacatcttcgagaagcttgctcaggaatcttccagacttgcccgctacaacaagaagcccaccatcacttcaagggaaatccagaccgcgcaaccctcccactcatccttcctacgaggagatgattaaagacgcaattacctcgctgaaggagaaaaccggttcgagccaacacgcgattgcgaagttcatcgaggagaagcacaagcagcttccaccgaacttcaggaagcttcttctctaccatttgaagaaacttgtagccgctggaaaactcgtcaaagtcaaaggctccttcaagctcccacctacccgaccttctgcatcttcttcttcttcgccggcgaagaagaagaagcccgcacctgctaagccccaacccaagcccaagcctaagcctaagcccaagcccgctgctaaagccaaggacactaaggcaactaagtcaaaggcaccagctaatcccaaggcagctgctaagcctaaagccaaagctccagccaagcccaagcccgcccctaaaccaaaggctgctgctgctgctgcttccaagcccaagcctgctgccgccaagcccaaagggactaagccagctgccaagcccaagcccaagcccgctgctaaaacaaaggctgctgctgccaagcccgcggcaaagcccaaagcgaagcccgccaaggcttcaaggacgtcgacacggacttcaccagggaagaaagcagctcctgctgcgaagccggcagcgaagaaagtagcgcctgctaagaaagcgccagtgaagagtgtgaaaccaaagagtgtaaagtctccagcgaaaaaggctacggctaagagagggggtaggaagtgagaatgtggtgggtagagtggttttagggttagttttgtgaagttctttgtcctcttggtggtgtagttggggttacagatgatcctataatatatgaaatctgattttatc

SEQ ID NO: 23377 - protein, 242 aa, Glycine max
MIKDAITSLKEKTGSSQHAIAKFIEEKHKQLPPNFRKLLLYHLKKLVAAGKLVKVKGSFKLPPTRPSASSSSSPAKKKKPAPAKPQPKPKPKPKPKPAAKAKDTKATKSKAPANPKAAAKPKAKAPAKPKPAPKPKAAAAAASKPKPAAAKPKGTKPAAKPKPKPAAKTKAAAAKPAAKPKAKPAKASRTSTRTSPGKKAAPAAKPAAKKVAPAKKAPVKSVKPKSVKSPAKKATAKRGGRK

SEQ ID NO: 23378 - protein, 161 aa, Glycine max
SQLQSLFALANSNSQSKTLISFKEPIVMAPKAEKKPAEKKPAEEKKSTVGDKAPAEKKPKAGKKLPKEGGAGGEGGKKKKRNKKSVETYKIYIFKVLKQVHPDIGISSKAMGIMNSFINDIFEKLAQESSRLARYNKKPTITSREIQTAQPSHSSFLRGDD

SEQ ID NO: 23379 - protein, 134 aa, Glycine max
MAPKAEKKPAEKKPAEEKKSTVGDKAPAEKKPKAGKKLPKEGGAGGEGGKKKKRNKKSVETYKIYIFKVLKQVHPDIGISSKAMGIMNSFINDIFEKLAQESSRLARYNKKPTITSREIQTAQPSHSSFLRGDD

SEQ ID NO: 23380 - DNA, 1489 bp, Glycine max
cgcgctaactcccggtcccgccgtcgccggtgaagttcaaaagatcgacgtgaatcctcccaaggggacgcgcgacttcccgcccgaggacatgcgcttgcgcaactggctcttcaatcatttcaaagaggtttcgcggttgtatggatttgaagaggttgattacccggtgcttgagtcggaggcattgttcactaggaaagcaggagaagaaattaaggatcagctttattgttttgaagatcgaggcaatcgccgtgttgcattgaggcctgaacttactccttctttggcaaggctggtgatccagaaagggaagtccgtgtcattaccaataaagtggttcactgttggacaatgttggcggtacgagagaatgacaagggggcgtcgtcgtgagcactaccaatggaacatggatattattggtgttcccggggttatggctgaagcagagcttatagcttctatcgtcactttgtttaagcgaataggaattacagaatcagatgtcggatttaaggtttccagtcgaaaggttctgcaagaagtattaaattgttattcagtaccagaaaatttatttggcaaggtctgcgtcattattgataaaattgagaaaattccagctgacgagataaagaaagagttgaaagctgttggtctatctcaagaggctgtccaggagctattgcaagtcctttctgtgaagtcattgaccgagttagaagagagacttgggagcagtggggaagcagttgctgatctgaaacagctattctcccttgctgaaaaaattggttactctaaatggcttcaatttgatgcatcagttgttcgaggtcttgcttactacactggcattgtatttgagtagggttttgaccgagaaggaaagctgcgagctatctgtggtggtggtcgatatgatcatttgttctcaacttttggtgctgatgacattgctgcatgtggttttggatttggtgatgcagtcatagtggaattgctcaaagagaagggtctgttaccggagcttaacttgcaaatagatgacattgtgtgtgccttggacgaagatcttcaaggatgtgctgctatggtcgctaacattctcagagaaaaagggcagattgttgagttggttttggaaagcaaaccacttaaatgggtttttaaacgtgcagcccgattaaatgctgagcggcttgtgttagtggggaattctgaatggcaaaggggtgtggttggtgtcaaaattctctctactgctgaacagtatgaggttaaactggatgatctgaagtaaatcagaatttgaattttttgtggttatgtattctgtctttactattggtattaatttcaccttgattttttttacatagtcctttgagactcaagtacttgttttgtatgtgtacatactcacctgtgtatgcatatgtgattatccatataccaaaacttccgcttctgtttacattag

SEQ ID NO: 23381 - protein, 291 aa, Glycine max
ALTPGPAVAGEVQKIDVNPPKGTRDFPPEDMRLRNWLFNHFKEVSRLYGFEEVDYPVLESEALFTRKAGEEIKDQLYCFEDRGNRRVALRPELTPSLARLVIQKGKSVSLPIKWFTVGQCWRYERMTRGRRREHYQWNMDIIGVPGVMAEAELIASIVTLFKRIGITESDVGFKVSSRKVLQEVLNCYSVPENLFGKVCVIIDKIEKIPADEIKKELKAVGLSQEAVQELLQVLSVKSLTELEERLGSSGEAVADLKQLFSLAEKIGYSKWLQFDASVVRGLAYYTGIVFE

SEQ ID NO: 23382 - protein, 261 aa, Glycine max
MRLRNWLFNHFKEVSRLYGFEEVDYPVLESEALFTRKAGEEIKDQLYCFEDRGNRRVALRPELTPSLARLVIQKGKSVSLPIKWFTVGQCWRYERMTRGRRREHYQWNMDIIGVPGVMAEAELIASIVTLFKRIGITESDVGFKVSSRKVLQEVLNCYSVPENLFGKVCVIIDKIEKIPADEIKKELKAVGLSQEAVQELLQVLSVKSLTELEERLGSSGEAVADLKQLFSLAEKIGYSKWLQFDASVVRGLAYYTGIVFE

SEQ ID NO: 23383 - protein, 166 aa, Glycine max
MTRGRRREHYQWNMDIIGVPGVMAEAELIASIVTLFKRIGITESDVGFKVSSRKVLQEVLNCYSVPENLFGKVCVIIDKIEKIPADEIKKELKAVGLSQEAVQELLQVLSVKSLTELEERLGSSGEAVADLKQLFSLAEKIGYSKWLQFDASVVRGLAYYTGIVFE

SEQ ID NO: 23384 - DNA, 1340 bp, Glycine max
acatatcttcccttttccttccttcctctcccaaaatcaaaacccctctcctgtgttgttgtgagagaaaaacacagagacagagacagagggtagtagttgagttgagcgagtggggggaagtagcgaagaatgagtatgttgaaaggaggtgaaatgggtggagaaggagggagagaaggggattgggagtgcagcagttgcaacaacaggaactacgccttcagatcattctgcaacagatgcaagcaaccccgcctcctcgtcgattccaaaacccccgctgattccaagtggctcccccgtatcggcgattggatctgcaccgagagaagtgcaagaagtgcggacaaccaaaggaggtagcagccatgccagcaattgcgatgaccggagcatctttccccacttattcacactatttttccagggccccaggagtaccagaacaaaagatgaatattggattgcttggcaatggtgcaccatcacagtcactgcatttaaactccaattggcctgttcctggagcagataagtacggtgtccagccactttccatatggctacctggtggaaattatggcactgtgcatcatcatgaaaattctaccaaccagaacctatctgttccaaagggatggcgcaatggggactggatctgtaactgtggcttccacaattactcatcccgctctcagtgtaaaaagtgcaatgcttttcctcctgcacttgggacaaagcggttagcttcagaagagttggtttatgattgggacaacaagagattgaatataggaactacaaatgatcagcatcaaatatatacaagtttagagcaagtggtagggacaggtgcagatccaaaacctggactcttcccctcttatcccagcatgaactcaactacagctccaagtttgccattggccacatggcttccacctcaagcttctgcacctgccctccttggaaaaggagcaaggcaatggcgaagtggagattggatgtgctcaaattgcaacaatcataattatgcttcaagactacagtgtaacaggtgcaaaactcaaagaatggctcccatgcaacctgttaatgttgtgtaatgatgaattcattagttaaattgacgtcatgtgccctagtttggctgagttttgttttgattttctagcgtgtattttgccagcaaaacatagttgatattctcatcaggctcattatatatgcgtaacaacgtaagacataagtggtttatgcttagtggcatcgtatttttcagtttctgaaaggtgtattgcttactataaatagagcattgtgggtgagttgtgagt

SEQ ID NO: 23385 - protein, 245 aa, Glycine max
MPAIAMTGASFPTYSHYFSRAPGVPEQKMNIGLLGNGAPSQSLHLNSNWPVPGADKYGVQPLSIWLPGGNYGTVHHHENSTNQNLSVPKGWRNGDWICNCGFHNYSSRSQCKKCNAFPPALGTKRLASEELVYDWDNKRLNIGTTNDQHQIYTSLEQVVGTGADPKPGLFPSYPSMNSTTAPSLPLATWLPPQASAPALLGKGARQWRSGDWMCSNCNNHNYASRLQCNRCKTQRMAPMQPVNVV

SEQ ID NO: 23386 - protein, 240 aa, Glycine max
MTGASFPTYSHYFSRAPGVPEQKMNIGLLGNGAPSQSLHLNSNWPVPGADKYGVQPLSIWLPGGNYGTVHHHENSTNQNLSVPKGWRNGDWICNCGFHNYSSRSQCKKCNAFPPALGTKRLASEELVYDWDNKRLNIGTTNDQHQIYTSLEQVVGTGADPKPGLFPSYPSMNSTTAPSLPLATWLPPQASAPALLGKGARQWRSGDWMCSNCNNHNYASRLQCNRCKTQRMAPMQPVNVV

SEQ ID NO: 23387 - protein, 217 aa, Glycine max
MNIGLLGNGAPSQSLHLNSNWPVPGADKYGVQPLSIWLPGGNYGTVHHHENSTNQNLSVPKGWRNGDWICNCGFHNYSSRSQCKKCNAFPPALGTKRLASEELVYDWDNKRLNIGTTNDQHQIYTSLEQVVGTGADPKPGLFPSYPSMNSTTAPSLPLATWLPPQASAPALLGKGARQWRSGDWMCSNCNNHNYASRLQCNRCKTQRMAPMQPVNVV

SEQ ID NO: 23388 - DNA, 1395 bp, Glycine max
ctaatcgaaaaaaaaatgcctcctcctcttccatctctctgcaacttcaacttggcgatactcttcctcttcctcacacccactttccaaatccccctcatagccccaatctcaaaagacgacaccacccaactctacactctctccgtgttcctgaaaaccccactccaacccacaaaactccacctccaccttggctcctccctcagctgggtcctctgcgactccacctacacctcctcctcctcccaccacatcccctgcaacacccctctctgcaactccttcccctccaacgcatgctccaacaactcctccctctgcgccctcttccccgaaaaccccgtcacaagaaacaccctcctggacaccgccctcatcgattccctcgctcttcccacctacgacgcttcctcctctctcgtcctcatctccgacttcatcttctcctgcgccacggcccatcttctccagggcctcgccgccaatgcattgggcctcgcctcattgggccggtccaactactccctcccggcccaaatcagcacttcattaacctcacctcgttctttcactctctgcctgccagcttcatcagccaacacaggggcagctatattcgcctccactgcctcctcatttcttttctcttccaaaattgaccttacttacacacaactcatcgtaaaccccgttgccgacaccgtcgtcaccgacaatccacaaccgtctgatgagtatttcataaacttaacctcaatcaaaatcaacggtaagcctctttatatcaactcctccatcctcaccgttgatcagaccggcttcggtgggaccaagataagcactgcggaaccctacactgttttagaaacttctatttacagactatttgttcagcgttttgtgaacgagtcctctgcttttaacttgacggtgacggaagcagttgagccgtttggcgtgtgctaccctgcgggggatctcacggagacacgagttggacccgcggtgcccaccgttgatctggtgatgcacagcgaggacgtgttctggagaatctttggcgggaattcgatggtgagggttgcgaagggaggagtggatgtgtggtgtttgggttttgtggacggtgggacccgcgggagaactcccattgtaatcggagggcatcagttggaggataatttaatgcagtttgatcttgactcaaatagattcggtttcacttcgactctcttgcttcaggatgccaaatgttctaatctcaaggtcaataattttgcaaatggaattaaataaattccaattcaaaaaatatgtataggtaatttgattgtttctattttttctgtaacactattacctgttttattacatgttgtaatcaaatgttcc

SEQ ID NO: 23389 - protein, 432 aa, Glycine max
LIEKKMPPPLPSLCNFNLAILFLFLTPTFQIPLIAPISKDDTTQLYTLSVFLKTPLQPTKLHLHLGSSLSWVLCDSTYTSSSSHHIPCNTPLCNSFPSNACSNNSSLCALFPENPVTRNTLLDTALIDSLALPTYDASSSLVLISDFIFSCATAHLLQGLAANALGLASLGRSNYSLPAQISTSLTSPRSFTLCLPASSANTGAAIFASTASSFLFSSKIDLTYTQLIVNPVADTVVTDNPQPSDEYFINLTSIKINGKPLYINSSILTVDQTGFGGTKISTAEPYTVLETSIYRLFVQRFVNESSAFNLTVTEAVEPFGVCYPAGDLTETRVGPAVPTVDLVMHSEDVFWRIFGGNSMVRVAKGGVDVWCLGFVDGGTRGRTPIVIGGHQLEDNLMQFDLDSNRFGFTSTLLLQDAKCSNLKVNNFANGIK

SEQ ID NO: 23390 - protein, 427 aa, Glycine max
MPPPLPSLCNFNLAILFLFLTPTFQIPLIAPISKDDTTQLYTLSVFLKTPLQPTKLHLHLGSSLSWVLCDSTYTSSSSHHIPCNTPLCNSFPSNACSNNSSLCALFPENPVTRNTLLDTALIDSLALPTYDASSSLVLISDFIFSCATAHLLQGLAANALGLASLGRSNYSLPAQISTSLTSPRSFTLCLPASSANTGAAIFASTASSFLFSSKIDLTYTQLIVNPVADTVVTDNPQPSDEYFINLTSIKINGKPLYINSSILTVDQTGFGGTKISTAEPYTVLETSIYRLFVQRFVNESSAFNLTVTEAVEPFGVCYPAGDLTETRVGPAVPTVDLVMHSEDVFWRIFGGNSMVRVAKGGVDVWCLGFVDGGTRGRTPIVIGGHQLEDNLMQFDLDSNRFGFTSTLLLQDAKCSNLKVNNFANGIK

SEQ ID NO: 23391 - protein, 219 aa, Glycine max
NRKKNASSSSISLQLQLGDTLPLPHTHFPNPPHSPNLKRRHHPTLHSLRVPENPTPTHKTPPPPWLLPQLGPLRLHLHLLLLPPHPLQHPSLQLLPLQRMLQQLLPLRPLPRKPRHKKHPPGHRPHRFPRSSHLRRFLLSRPHLRLHLLLRHGPSSPGPRRQCIGPRLIGPVQLLPPGPNQHFINLTSFFHSLPASFISQHRGSYIRLHCLLISFLFQN

SEQ ID NO: 23392 - DNA, 1276 bp, Glycine max
atttgtatgtattcatgttcttaggacttatcttcattattgctaatttcagtttacaagggaaagagtatctgctcccaaggatagactctgttttgaaggtgctttatacctctcaaactttaaaacaataggttattccataataataacacaacacatgttctgaagggacacataatctcgagttccttgcaaggagctaattccacaagttggcctttgttaagcatctacaatctacactgattccttctgttttttcatttcaaaatggaatgtgctgtcttgggcgtgcattttatgaaaatcggtgcttaatcctatgatgcatgaatacatttttctgatttttttcttgaatgtgggttcctctcttctcaggatcattggtgcattattttttaattgaattacactggactttgagtggctgctttttctttgctcaccagtaagtgtttttatttttgttggaactaattatttctgtttttatcagaaatggcgatacatatgctggcgaatactttgcggataagatgcatggatttggggtatacagttttgctaatggccatcgttatgaaggatcctggcatgaaggcaaaaggcaaggtcttggaatgtatacatttagaaatggagaaacccagtctggtcactggcaaaatggagtccttgacattccaagcacacagagtaccacctatcctgtttcccctgttggggtcaatcattccagagtacttaatgcagtccaggaagcaagaagagcagctgagaaagcctatgatgtggccaaggtagatgagagggttaatagagcagtagctgccgctaacagagcagccaatgcagctagagtagctgctgtcaaggccgtgcaaaaccaaatgcttcataatgttaacagcacgagcatcccaattcccattgtgtgaggctgtcagctgcaaacttttgatagtagagatgcacgagattgtcagaagaggtcggtagtttaaactgctttgtttacaccgtcatcatcactgctggctgaatgaaatcaagcagatttattatccatctgccacgagtcttgtatagagggaggaagggtgatggcttccacatggtaaaatactacatatacatactatattttttccctttgcctacattttgtaaatttacttagatgtaaatgctggtgtgcgggtgaaacctcaacccagctactgttgtaagatcgcttggtaaaataaggagagaaacaaacatctagcct

SEQ ID NO: 23393 - protein, 133 aa, Glycine max
MHGFGVYSFANGHRYEGSWHEGKRQGLGMYTFRNGETQSGHWQNGVLDIPSTQSTTYPVSPVGVNHSRVLNAVQEARRAAEKAYDVAKVDERVNRAVAAANRAANAARVAAVKAVQNQMLHNVNSTSIPIPIV

SEQ ID NO: 23394 - protein, 105 aa, Glycine max
MYTFRNGETQSGHWQNGVLDIPSTQSTTYPVSPVGVNHSRVLNAVQEARRAAEKAYDVAKVDERVNRAVAAANRAANAARVAAVKAVQNQMLHNVNSTSIPIPIV

SEQ ID NO: 23395 - protein, 101 aa, Glycine max
MAIHMLANTLRIRCMDLGYTVLLMAIVMKDPGMKAKGKVLECIHLEMEKPSLVTGKMESLTFQAHRVPPILFPLLGSIIPEYLMQSRKQEEQLRKPMMWPR

SEQ ID NO: 23396 - DNA, 604 bp, Glycine max
agcaagcattgatgatctctttgaaccctttacatatatacctatacctacacagtcccacagtgacttttttcttctctcttatcacgatcttctttcctcttcttcatacacacaaaggataaggctcatagtgtggtggtatctatcacattcaaagttcctctgctgcttgtgatggatgagaagagaaaggcatcaaagaaggacacaggttccttttcttccccagggtcattattctcaaggagcacctctacttcaaactctcctctccttagaagcttatctcaaaagagttcttcatcttcttccaaatgcaataataataatcttcctaggagcttctcacagaagaacccttccattggccgcaaatgcaccaaattagctaaggaacagaaagcaaggttttacatcatgaggaggtgtgttgccatgttggtttgctggcacaagcatggggattcatgaaagaagtgcacagatcttgtgcttagtttttattggtttatgatccttttattggcccactttgaatactatagattcgattgtaattacgagttgactaaggtgagttataagatttacacattgctgg

SEQ ID NO: 23397 - protein, 98 aa, Glycine max
MDEKRKASKKDTGSFSSPGSLFSRSTSTSNSPLLRSLSQKSSSSSSKCNNNNLPRSFSQKNPSIGRKCTKLAKEQKARFYIMRRCVAMLVCWHKHGDS

SEQ ID NO: 23398 - protein, 69 aa, Glycine max
MRRERHQRRTQVPFLPQGHYSQGAPLLQTLLSLEAYLKRVLHLLPNAIIIIFLGASHRRTLPLAANAPN

SEQ ID NO: 23399 - protein, 58 aa, Glycine max
ASIDDLFEPFTYIPIPTQSHSDFFLLSYHDLLSSSSYTQRIRLIVWWYLSHSKFLCCL

SEQ ID NO: 23400 - DNA, 1251 bp, Glycine max
ttcaggcccatttctctaggcaatttgttggtgggaaccttgcattggaccagaaggaggtgcttctttctgcaaatagactgcttcaggcaatggtagatgtgatatcgagcaacggttggctgagcctggccttacttgctatggaagtcagtcaaatggtgacacagggaatgtgggaacgcgactccatgctgcttcaacttcctcatttcacaaaggatctggctaagaaatgccaggagaacccagggaagagtatagaaactgtgtttgatttattagaaatggaggatgaggagaggcaaaaattgttgggcatgtcagatttgcagttgttggatattgcccgattttgtaaccgattccctaatattgatttgtcatatgaggtgctggacagtgacaatgtgcgggctggggaggttgtcactgtgctggtcactcttgagcgggattttgagggaaggacagaagtaggacctgttgacgctcccaggtatccaaaagccaaggaggaagggtggtggctcattgttggtgataccaaaaccaatctgttgcttgccattaaacgggtttccctgcagcggaaattaaaagccaaactggaatttgatgctcctgctgatgctggaaggaaatcctattcgctttatttcatgtgtgattcatacttgggttgtgatcaggagtatggtttcaccgttgatgttaatgctgatggcggtgatgaagatagcggcagagactgaaaagtttcatgaagcttcgaatgcgaaggacaatattgtagcactgctgaaagattgtatcttattctggctaaggaagagataattgtagcagtaggaagtaacacctgtagctggaggctcactatttgcagcattaggaagtggataggttgcttattgaagacgctggagcccttttttgattttgcttcggaatgaacagtaagttgtgtcatcgaaggacgaaagcagagtttactattgtggatgttggagaactaactataatatcttaatgcttgttgtacggcagattgtatagatgtttgtattgcttttcggttatctaagttaattgttcccacataatcagttcttctcgacatagaagtaacatgcaccagctctttttgaggatcttactgaggatgtattttgggatctttattggttacttccatgtactagacgataccttgaagttagccataaaaatcaactatattttctttcc

SEQ ID NO: 23401 - protein, 250 aa, Glycine max
QAHFSRQFVGGNLALDQKEVLLSANRLLQAMVDVISSNGWLSLALLAMEVSQMVTQGMWERDSMLLQLPHFTKDLAKKCQENPGKSIETVFDLLEMEDEERQKLLGMSDLQLLDIARFCNRFPNIDLSYEVLDSDNVRAGEVVTVLVTLERDFEGRTEVGPVDAPRYPKAKEEGWWLIVGDTKTNLLLAIKRVSLQRKLKAKLEFDAPADAGRKSYSLYFMCDSYLGCDQEYGFTVDVNADGGDEDSGRD

SEQ ID NO: 23402 - protein, 220 aa, Glycine max
MVDVISSNGWLSLALLAMEVSQMVTQGMWERDSMLLQLPHFTKDLAKKCQENPGKSIETVFDLLEMEDEERQKLLGMSDLQLLDIARFCNRFPNIDLSYEVLDSDNVRAGEVVTVLVTLERDFEGRTEVGPVDAPRYPKAKEEGWWLIVGDTKTNLLLAIKRVSLQRKLKAKLEFDAPADAGRKSYSLYFMCDSYLGCDQEYGFTVDVNADGGDEDSGRD

SEQ ID NO: 23403 - protein, 203 aa, Glycine max
MEVSQMVTQGMWERDSMLLQLPHFTKDLAKKCQENPGKSIETVFDLLEMEDEERQKLLGMSDLQLLDIARFCNRFPNIDLSYEVLDSDNVRAGEVVTVLVTLERDFEGRTEVGPVDAPRYPKAKEEGWWLIVGDTKTNLLLAIKRVSLQRKLKAKLEFDAPADAGRKSYSLYFMCDSYLGCDQEYGFTVDVNADGGDEDSGRD

SEQ ID NO: 23404 - DNA, 1192 bp, Glycine max
aagcaaggtatcattgcactactacactactccgatcccctccttcactacactaaaaaaatttcaagttcaattccttcactaaccatgccctcattactctccgcactgtacctcattctctcagcatacttaatccctttatgtttgagccaccccaacacatgccgctcatattgcggcaacataaccatcgactacccgttcgcactccaatacggttgcggccaccccggcttccgcgacctcctcttctgcatgaacgacgttctcatgttccacgtgagctccggctcctacagggtcctcgagatcgactacgcctaccaggccctcacgctccacgagccccacatgtccacctgcgacaacctcgtcctcggaacccgcggcaacggcttctccgtcgagccctggcgcgcgccatacatgaaccctgccgccgacaacgtcttcatgctcatcgcctgctccccacgctcccccttgttccagggcttccccgggaagcacctcccctgccgcaacgtctctggcatgggctgcgaggactactacgcctgcccggcctgggagatgtgggccacaagagattgggctcagcctcgttctttgggtcaggcccacccgagtgctgtgctgttccgtacgaggctattagggggattaaccttacgaagcttgagtgcgaagggtatagcagtgcctatagtgtggctccgctgaaagttgatgggcctggtgggtggtcctatgggatccgcgtcaggtattccgtgcaagggaatgatgagttctgtggggcgtgtgaggccactgctggcacgtgtggatatggctccgatgggattagacaggtctgcatgtgtggagacttcaattccacgtcaaattgtgattctgttggggttttgtcgggggcaagggttatatgtacgagggtaaaaatattttcaggattattgacgtatgtgctagcgtgggtgacaatcaaccagatttcaaaagtgtggtatattatgtgagactgggtcgtgaataatgtattccatattgtaaatgccatttttttttgctgaagaacgtgctcatacaatgagagtgattgtgagtgagttttgatttgtattccctagcctattcccccatgaaagcctttctcaaacattattcaaaagcgtaggattcaggt

SEQ ID NO: 23405 - protein, 293 aa, Glycine max
MFEPPQHMPLILRQHNHRLPVRTPIRLRPPRLPRPPLLHERRSHVPRELRLLQGPRDRLRLPGPHAPRAPHVHLRQPRPRNPRQRLLRRALARAIHEPCRRQRLHAHRLLPTLPLVPGLPREAPPLPQRLWHGLRGLLRLPGLGDVGHKRLGSASFFGSGPPECCAVPYEAIRGINLTKLECEGYSSAYSVAPLKVDGPGGWSYGIRVRYSVQGNDEFCGACEATAGTCGYGSDGIRQVCMCGDFNSTSNCDSVGVLSGARVICTRVKIFSGLLTYVLAWVTINQISKVWYIM

SEQ ID NO: 23406 - protein, 286 aa, Glycine max
MPLILRQHNHRLPVRTPIRLRPPRLPRPPLLHERRSHVPRELRLLQGPRDRLRLPGPHAPRAPHVHLRQPRPRNPRQRLLRRALARAIHEPCRRQRLHAHRLLPTLPLVPGLPREAPPLPQRLWHGLRGLLRLPGLGDVGHKRLGSASFFGSGPPECCAVPYEAIRGINLTKLECEGYSSAYSVAPLKVDGPGGWSYGIRVRYSVQGNDEFCGACEATAGTCGYGSDGIRQVCMCGDFNSTSNCDSVGVLSGARVICTRVKIFSGLLTYVLAWVTINQISKVWYIM

SEQ ID NO: 23407 - protein, 241 aa, Glycine max
KQGIIALLHYSDPLLHYTKKISSSIPSLTMPSLLSALYLILSAYLIPLCLSHPNTCRSYCGNITIDYPFALQYGCGHPGFRDLLFCMNDVLMFHVSSGSYRVLEIDYAYQALTLHEPHMSTCDNLVLGTRGNGFSVEPWRAPYMNPAADNVFMLIACSPRSPLFQGFPGKHLPCRNVSGMGCEDYYACPAWEMWATRDWAQPRSLGQAHPSAVLFRTRLLGGLTLRSLSAKGIAVPIVWLR

SEQ ID NO: 23408 - DNA, 1101 bp, Glycine max
caacatttcacaacctgtcttcacctgcaagttcagtttcagaaacaacggcgaccgaaatcaccgttccaggtcgttacagtcggaaccgggaggttctagaagttggttgagttcgttcggaagcgagcgcgagcgaccggggaaggaacgcaagggatggtccataacggttcacgatctttccggttcaccggtggccgcagcttctatggtcacgcctttcgtcgcttcgcccggttcggaccgggtgagctgctccaaccctggttcgtggctaattcttcgcccgagcgacggcacgtggaagccatgggggaggctcgaggcgtggcgcgagcgcggcggctccgacggcctcggctaccgcttcgagctcataccggacaccaacggcggcatgagcgccgccggtatagtgcttgcggaatccacgctgagctccaacaaaggagggaagttcgtcatcgatttgagttgccgcaacgccgttaacggtagcggaaatggtggatctaatggccgtgcgacgccggggagcgcgacttcaccggcgtgcagcccgaggagtagtggagattatggatacggtctctggccttattgtatgtatagaggttttgtgatgtcggcgagcgtggagggtgaggggaggtgcagcaagcctactgtggaggtgagcgtgccgcacgtgaattgcacggaggatgcggcggcgtttgtggctttagcggctgccgttgatctgagcgtggatgcgtgcaggcttttctctcaacggctgaggaaggagctgtgccagcagctggatttgcttggctgattccgctggttttctttgtcgtttcgtgttttgccccctgtcgtttggtttaaatttttttttttagtggggttgttcattttgagtgagaggcattttactaactaacaaacaatttacaggctgtacagaggaaggagagtattagagtgggcgctgtgtattcacgtgtggctttttcattgatttttctctctcttttttttcatcagttatgggaaatcaagaaaaagctttttttgctttaaatattttttatagcaggactccactgctgc

SEQ ID NO: 23409 - protein, 273 aa, Glycine max
NISQPVFTCKFSFRNNGDRNHRSRSLQSEPGGSRSWLSSFGSERERPGKERKGWSITVHDLSGSPVAAASMVTPFVASPGSDRVSCSNPGSWLILRPSDGTWKPWGRLEAWRERGGSDGLGYRFELIPDTNGGMSAAGIVLAESTLSSNKGGKFVIDLSCRNAVNGSGNGGSNGRATPGSATSPACSPRSSGDYGYGLWPYCMYRGFVMSASVEGEGRCSKPTVEVSVPHVNCTEDAAAFVALAAAVDLSVDACRLFSQRLRKELCQQLDLLG

SEQ ID NO: 23410 - protein, 203 aa, Glycine max
MVTPFVASPGSDRVSCSNPGSWLILRPSDGTWKPWGRLEAWRERGGSDGLGYRFELIPDTNGGMSAAGIVLAESTLSSNKGGKFVIDLSCRNAVNGSGNGGSNGRATPGSATSPACSPRSSGDYGYGLWPYCMYRGFVMSASVEGEGRCSKPTVEVSVPHVNCTEDAAAFVALAAAVDLSVDACRLFSQRLRKELCQQLDLLG

SEQ ID NO: 23411 - protein, 140 aa, Glycine max
MSAAGIVLAESTLSSNKGGKFVIDLSCRNAVNGSGNGGSNGRATPGSATSPACSPRSSGDYGYGLWPYCMYRGFVMSASVEGEGRCSKPTVEVSVPHVNCTEDAAAFVALAAAVDLSVDACRLFSQRLRKELCQQLDLLG

SEQ ID NO: 23412 - DNA, 1713 bp, Glycine max
acctctcccttccagtcatctgacatctgctcccgtcctctcctcttctcttccccccgaagcagcagcgtccctcctctccgcccggatcgcgatggccgccgccgccgactccaagatcgacaacctccgcgacgccgtcgccaagctcggcgagatcagcgagaacgagaaggccggcttcatcagcctcgtctcgcgctacctcagcggcgaggcggagcagatcgagtggagcaagatccagacccccaccgatgaggtggtggtgccctacgacaccctcgcgccccctcccgaagatctcgacgccatgaaggctctgctcgacaagctcgtggtgctcaagctcaacggaggcctcggcaccaccatgggctgcaccggccccaagtccgtcattgaagttcgcaatgggtttacatttcttgaccttattgtgattcagattgagtccctgaacaagaagtatggatgcagtgttcctttgcttctaatgaactctttcaacactcatgacgacacacagaagattgttgagaagtactccaactccaacattgaaattcacactttcaaccagagccaataccctcgcattgttactgaagacttcttgccacttccaagcaaagggcagacagggaaggatggctggtaccccccaggccacggtgatgtgttcccctctttgaacaacagtggaaaactcgataccttactgtcacagggaaaggagtatgtcttcatggcgaactcagacaacttgggtgctatagttgacatcaagatactaaaccacctgatcactaaccagaatgagtactgcatggaagttactccaaaaacattggctgatgtcaaaggtggtaccctcatctcatacgaaggaagagtccagctcttggagattgcccaagtccctgatgagcatgtgaatgaattcaagtcgattgagaagttcaagatatttaacaccaacaacctgtgggtgaacttgaaggcgatcaagaggcttgtagatgctgaagcacttaagatggaaatcattcccaaccctaaggaagttgatggcgtgaaagtcctgcagctagaaaccgcagctggagcagcgatcaggttctttgagaaagcaatcggcatcaacgttccccgctcaaggtttctgcccgtgaaggctacatctgatttgttgcttgtgcagtctgatctctataccttggttgatggctacgtcatccgcaacccagccagagtgaagccatcgaacccttcaattgagcttggtcctgagttcaaaaaggttgccaacttccttgcccgtttcaagtcgatccccagcatcgttgagctcgacagcttgaaggtctctggtgatgtctcgtttggctctggagtcgtactcaagggcaacgtgaccatcgctgccaaggctggagtcaagttggagatcccagacggagctgtgctcgagaacaaggacatcaacggccctgaggatctttgagcgacgcccgccgccatcgccagtcgcattcccagaaaccttccggtcctccttcgctgagttaaccgtcctgtaattttcgtgtgcattctgctggagtgttgtcctgggatagcccctttacataataattgtaatcccctctgtgatgttcatctacacttgttcttcctgggtgtgccagggacgtaaaatttcttttggtc

SEQ ID NO: 23413 - protein, 501 aa, Glycine max
PLPSSHLTSAPVLSSSLPPEAAASLLSARIAMAAAADSKIDNLRDAVAKLGEISENEKAGFISLVSRYLSGEAEQIEWSKIQTPTDEVVVPYDTLAPPPEDLDAMKALLDKLVVLKLNGGLGTTMGCTGPKSVIEVRNGFTFLDLIVIQIESLNKKYGCSVPLLLMNSFNTHDDTQKIVEKYSNSNIEIHTFNQSQYPRIVTEDFLPLPSKGQTGKDGWYPPGHGDVFPSLNNSGKLDTLLSQGKEYVFMANSDNLGAIVDIKILNHLITNQNEYCMEVTPKTLADVKGGTLISYEGRVQLLEIAQVPDEHVNEFKSIEKFKIFNTNNLWVNLKAIKRLVDAEALKMEIIPNPKEVDGVKVLQLETAAGAAIRFFEKAIGINVPRSRFLPVKATSDLLLVQSDLYTLVDGYVIRNPARVKPSNPSIELGPEFKKVANFLARFKSIPSIVELDSLKVSGDVSFGSGVVLKGNVTIAAKAGVKLEIPDGAVLENKDINGPEDL

SEQ ID NO: 23414 - protein, 470 aa, Glycine max
MAAAADSKIDNLRDAVAKLGEISENEKAGFISLVSRYLSGEAEQIEWSKIQTPTDEVVVPYDTLAPPPEDLDAMKALLDKLVVLKLNGGLGTTMGCTGPKSVIEVRNGFTFLDLIVIQIESLNKKYGCSVPLLLMNSFNTHDDTQKIVEKYSNSNIEIHTFNQSQYPRIVTEDFLPLPSKGQTGKDGWYPPGHGDVFPSLNNSGKLDTLLSQGKEYVFMANSDNLGAIVDIKILNHLITNQNEYCMEVTPKTLADVKGGTLISYEGRVQLLEIAQVPDEHVNEFKSIEKFKIFNTNNLWVNLKAIKRLVDAEALKMEIIPNPKEVDGVKVLQLETAAGAAIRFFEKAIGINVPRSRFLPVKATSDLLLVQSDLYTLVDGYVIRNPARVKPSNPSIELGPEFKKVANFLARFKSIPSIVELDSLKVSGDVSFGSGVVLKGNVTIAAKAGVKLEIPDGAVLENKDINGPEDL

SEQ ID NO: 23415 - protein, 397 aa, Glycine max
MKALLDKLVVLKLNGGLGTTMGCTGPKSVIEVRNGFTFLDLIVIQIESLNKKYGCSVPLLLMNSFNTHDDTQKIVEKYSNSNIEIHTFNQSQYPRIVTEDFLPLPSKGQTGKDGWYPPGHGDVFPSLNNSGKLDTLLSQGKEYVFMANSDNLGAIVDIKILNHLITNQNEYCMEVTPKTLADVKGGTLISYEGRVQLLEIAQVPDEHVNEFKSIEKFKIFNTNNLWVNLKAIKRLVDAEALKMEIIPNPKEVDGVKVLQLETAAGAAIRFFEKAIGINVPRSRFLPVKATSDLLLVQSDLYTLVDGYVIRNPARVKPSNPSIELGPEFKKVANFLARFKSIPSIVELDSLKVSGDVSFGSGVVLKGNVTIAAKAGVKLEIPDGAVLENKDINGPEDL

SEQ ID NO: 23416 - DNA, 1132 bp, Glycine max
gacactgcggtacagagagaggcaagtcccacatggatgttccaaacagcccggaaatctcggttgatgttcctccttaccttcgagtgcacaaagacagcacggtcgagagaattgccggcacccaagtcgttcccgcaggcctcgattccgacaccaacgttgtctccaaagacatcctcgtcgtccccgaaaccggcgtcactggcagactctaccgtcccaattccaccccgccaaccgccaataagctccctttacttgtctacttccacggcggcgccttctgcatctcctccgcctccgatcctctctaccacacctctctcaacaacctcgtcgccgaggccaacgttgtcgctctctccgtcaattacaggctcgcgccagaacaccctcttcccaccgcgtaccaagactcttggtccgcgattcaatgggtcgctgacgcctctcgtgctaaacaacaccaccaagaagattggatcagggacaacgttgactttgacagagtcttcctagcaggggacagcgcaggtgccaacctgggacactacatggccttaaaattgaataataattttccaacaaatgatggtttcgatttcaaggttgcgggtcttatcatggtgaacccttatttctggggaaaggaagcaattggagtggagattactgatccggagaggaagaagatggtggataagtggtggagttttgtttgtccttcggataaagggaacgatgaccctttgattaacccctttgtggaggaggctccgggtattgaaggggttgcttgcgatagggttcttgttactgttgcggagaaagacatactgagggaaagggggaagctttatcacaaaatgttgagtaacagtgactggagaggaactgctgagttccacgagactccaggggaggatcatgtgtttcacatcttcaaccccaactgcgagcaagcaaagagtttgattaaacgcattgctcatttcattaatgaacattgaatgtttactgtcattttgttcttttttcttgtgttgtgttgtgtgtggatccattaataaaattcaactttgacatttaggttttgattttgatggaatacaataagttttgattcctc

SEQ ID NO: 23417 - protein, 336 aa, Glycine max
HCGTERGKSHMDVPNSPEISVDVPPYLRVHKDSTVERIAGTQVVPAGLDSDTNVVSKDILVVPETGVTGRLYRPNSTPPTANKLPLLVYFHGGAFCISSASDPLYHTSLNNLVAEANVVALSVNYRLAPEHPLPTAYQDSWSAIQWVADASRAKQHHQEDWIRDNVDFDRVFLAGDSAGANLGHYMALKLNNNFPTNDGFDFKVAGLIMVNPYFWGKEAIGVEITDPERKKMVDKWWSFVCPSDKGNDDPLINPFVEEAPGIEGVACDRVLVTVAEKDILRERGKLYHKMLSNSDWRGTAEFHETPGEDHVFHIFNPNCEQAKSLIKRIAHFINEH

SEQ ID NO: 23418 - protein, 326 aa, Glycine max
MDVPNSPEISVDVPPYLRVHKDSTVERIAGTQVVPAGLDSDTNVVSKDILVVPETGVTGRLYRPNSTPPTANKLPLLVYFHGGAFCISSASDPLYHTSLNNLVAEANVVALSVNYRLAPEHPLPTAYQDSWSAIQWVADASRAKQHHQEDWIRDNVDFDRVFLAGDSAGANLGHYMALKLNNNFPTNDGFDFKVAGLIMVNPYFWGKEAIGVEITDPERKKMVDKWWSFVCPSDKGNDDPLINPFVEEAPGIEGVACDRVLVTVAEKDILRERGKLYHKMLSNSDWRGTAEFHETPGEDHVFHIFNPNCEQAKSLIKRIAHFINEH

SEQ ID NO: 23419 - protein, 173 aa, Glycine max
DTAVQREASPTWMFQTARKSRLMFLLTFECTKTARSRELPAPKSFPQASIPTPTLSPKTSSSSPKPASLADSTVPIPPRQPPISSLYLSTSTAAPSASPPPPILSTTPLSTTSSPRPTLSLSPSITGSRQNTLFPPRTKTLGPRFNGSLTPLVLNNTTKKIGSGTTLTLTESS

SEQ ID NO: 23420 - DNA, 805 bp, Glycine max
tattcaattttgtgattggctggacgttcatgtttgcccctttgctgttcacagatcgcaacaatgatagatataaagggtctctagatgtactctggggcctgcaaatgttcctgacaaatacgtttctgatcccatacatggctatccgattgaatgatgctgatgatgagagtgttacaagaaaactttcacagtttggctcagtgatgacaaatggtgctccaattgttggagtgattggtgggagtgcatgcattgtatctctattgtgggctctttttggtcgaatggatgcaaattttgggggcatagcagatagatgggactacttggtgggttatcttggatcagaaaggctggcttatgctttcatatgggatatatgtctttacataattttccagccttggttgattggagacaacctccagaatgtccaggaaaacaaggttgttgtagtgaagtatcttagatatgtacccgtgattggcttaattgcgtatctattttgcttggaccaaaaagagcccacaatagagatacaatgcatgcactcccaccaatcactccaacaattagagcactcagttctcatcaaactgcccaacaatcagccttgagcacattattcaggtcccatatatgaagaatataactttaattaaaagagaaggatttatttagttcggaagagttctatccattggaataataaagagtgtgtttgaaagagtgtgttagagaatgagcaggtaacatttctgaattgaaaaagatcttgaatggaaattattttctgtgt

SEQ ID NO: 23421 - protein, 206 aa, Glycine max
FNFVIGWTFMFAPLLFTDRNNDRYKGSLDVLWGLQMFLTNTFLIPYMAIRLNDADDESVTRKLSQFGSVMTNGAPIVGVIGGSACIVSLLWALFGRMDANFGGIADRWDYLVGYLGSERLAYAFIWDICLYIIFQPWLIGDNLQNVQENKVVVVKYLRYVPVIGLIAYLFCLDQKEPTIEIQCMHSHQSLQQLEHSVLIKLPNNQP

SEQ ID NO: 23422 - protein, 197 aa, Glycine max
MFAPLLFTDRNNDRYKGSLDVLWGLQMFLTNTFLIPYMAIRLNDADDESVTRKLSQFGSVMTNGAPIVGVIGGSACIVSLLWALFGRMDANFGGIADRWDYLVGYLGSERLAYAFIWDICLYIIFQPWLIGDNLQNVQENKVVVVKYLRYVPVIGLIAYLFCLDQKEPTIEIQCMHSHQSLQQLEHSVLIKLPNNQP

SEQ ID NO: 23423 - protein, 171 aa, Glycine max
MFLTNTFLIPYMAIRLNDADDESVTRKLSQFGSVMTNGAPIVGVIGGSACIVSLLWALFGRMDANFGGIADRWDYLVGYLGSERLAYAFIWDICLYIIFQPWLIGDNLQNVQENKVVVVKYLRYVPVIGLIAYLFCLDQKEPTIEIQCMHSHQSLQQLEHSVLIKLPNNQP

SEQ ID NO: 23424 - DNA, 807 bp, Glycine max
aaagaaggatctagataggccttatgggagggtcaacaggaagctgctgaagtccaagatgctgcagaaatgcatatcgaatggcgtcaagtttcaccaagcgaaagttatcaaggttattcatgaggaggccaaatctttgttgatttgtaatgatggtgtcactgttcatgccactgtggttctcgatgcaactggcttttcgagatgccttgttcagtatgataaaccgtataatccgggataccaagttgcttatgggattttggccgaggttgatgaacacccatttgatgtagataaaatgctttttatggactggagagattcacatctggacaatgacatggaactgaagcagagaaatagtagaatacccacttttctatatgcgatgcccttttcatccactaagatatttcttgaagaaacttctcttgtggcacgccctgggttgcgaatggatgatatacaagaaagaatggctgctaggttgaaacacttgggtattagagtgaaaagcattgaagaagatgagcattgtgtcattccaatgggtgttcatcaacctcggccaaaatcccataagcaacttggtatcccggattatacggtttatcatactgaacaaggcatctcgaaaagccagttgcatcgagaaccacagtggcatgaacagtgacaccatcattacaaatcaacaaagatttggcctcctcatgaataaccttgataactttcgctttgtgagaattgctagtatttgtatttctgcagcatctttcgctccaactatttctctttgcc

SEQ ID NO: 23425 - protein, 226 aa, Glycine max
KKDLDRPYGRVNRKLLKSKMLQKCISNGVKFHQAKVIKVIHEEAKSLLICNDGVTVHATVVLDATGFSRCLVQYDKPYNPGYQVAYGILAEVDEHPFDVDKMLFMDWRDSHLDNDMELKQRNSRIPTFLYAMPFSSTKIFLEETSLVARPGLRMDDIQERMAARLKHLGIRVKSIEEDEHCVIPMGVHQPRPKSHKQLGIPDYTVYHTEQGISKSQLHREPQWHEQ

SEQ ID NO: 23426 - protein, 207 aa, Glycine max
MLQKCISNGVKFHQAKVIKVIHEEAKSLLICNDGVTVHATVVLDATGFSRCLVQYDKPYNPGYQVAYGILAEVDEHPFDVDKMLFMDWRDSHLDNDMELKQRNSRIPTFLYAMPFSSTKIFLEETSLVARPGLRMDDIQERMAARLKHLGIRVKSIEEDEHCVIPMGVHQPRPKSHKQLGIPDYTVYHTEQGISKSQLHREPQWHEQ

SEQ ID NO: 23427 - protein, 125 aa, Glycine max
MLFMDWRDSHLDNDMELKQRNSRIPTFLYAMPFSSTKIFLEETSLVARPGLRMDDIQERMAARLKHLGIRVKSIEEDEHCVIPMGVHQPRPKSHKQLGIPDYTVYHTEQGISKSQLHREPQWHEQ

SEQ ID NO: 23428 - DNA, 1798 bp, Glycine max
gtatagctaggcttagctatttcttacctcttggcatggccattcaaatgtcttcttttgtctttgtttctcttacaattttattttgcttctcttccttggagaagagttttgcctttcaaacaacaaaggaggacacagaaagcaacaatcttcatcaatatactcatcttgttcacctcagctcactccttccttcatcttcctgcagctcttctgccaaaggtcccaaaagaaaagcatcattagaagtggtacacaaacatgggccatgctcccaactgaataatcatgatggcaaagcaaagtctaaaacaccacacagtgagattctgaaccaagacaaagaaagggttaagtacattaactcaaggatctcaaagaacttgggccaagatagtagtgtgagtgaattggactcagttacactaccagccaagtctggtagccttattgggtctgggaattactttgtggttgttggtcttggaacacccaagagggacttgtcactcatctttgacactggcagtgatctcacttggactcagtgtgaaccatgtgctcgttcttgctacaagcaacaagatgctatctttgatccatcaaagtctacatcatattccaatattacatgcacatctacgctttgcacccagctctctactgctacagggaatgagccgggatgttcagcctccacaaaagcatgcatatacggcatccagtacggtgacagttcgttctccgttggctacttcagccgcgagcggctctccgtgaccgccaccgacatcgtcgacaacttcctcttcggttgcggccaaaacaaccagggcctctttggtggctccgccggcctcatcggcctcggccgccaccccatctccttcgtccaacaaaccgccgccgtatatcgtaaaatcttctcctactgcctccccgccacctccagctccaccggccgcctctccttcggcaccaccaccacttcctacgtcaagtacacccccttctccaccatctcccgcggctcctccttctacggcctcgacatcaccggcatctccgtgggcggcgccaaactcccagtctcctcctccaccttctccaccggcggtgcaatcatcgactccggcaccgtgatcacccgcctcccccccaccgcctacaccgccctccgctccgccttcaggcaaggcatgtccaaatacccctccgccggggaactctccatactcgacacgtgttatgatctcagcggctacgaggtcttttctattcccaagatagatttttccttcgccggcggcgtcacggtgcagcttccgccgcaagggatactctacgtggccagtgccaagcaagtttgcttggcttttgctgcaaatggtgacgatagtgatgttactatatatgggaacgtgcagcagaaaacaatagaggttgtgtatgatgttggtggtggaagaattgggtttggtgctggtggctgcaagtgattaagattaaacatatgctttgggctagttagagaaaaatcaatcttaattggctctaggctttcataattattgttgttccttttattgcaaagtgtacgtaacagtggcaatagaaaaaaaaggaaaacaaaaatgtgggaattaaatataatataatttgtagcatgaagaagaatggaggggtgaatatatgactctcaagccgtgcgattgcttgcaattgtacatatgtaaggtggaaaaaaaaatgtaaacttgtccttgttattaattaaatgtttgttgaataaagc

SEQ ID NO: 23429 - protein, 499 aa, Glycine max
IARLSYFLPLGMAIQMSSFVFVSLTILFCFSSLEKSFAFQTTKEDTESNNLHQYTHLVHLSSLLPSSSCSSSAKGPKRKASLEVVHKHGPCSQLNNHDGKAKSKTPHSEILNQDKERVKYINSRISKNLGQDSSVSELDSVTLPAKSGSLIGSGNYFVVVGLGTPKRDLSLIFDTGSDLTWTQCEPCARSCYKQQDAIFDPSKSTSYSNITCTSTLCTQLSTATGNEPGCSASTKACIYGIQYGDSSFSVGYFSRERLSVTATDIVDNFLFGCGQNNQGLFGGSAGLIGLGRHPISFVQQTAAVYRKIFSYCLPATSSSTGRLSFGTTTTSYVKYTPFSTISRGSSFYGLDITGISVGGAKLPVSSSTFSTGGAIIDSGTVITRLPPTAYTALRSAFRQGMSKYPSAGELSILDTCYDLSGYEVFSIPKIDFSFAGGVTVQLPPQGILYVASAKQVCLAFAANGDDSDVTIYGNVQQKTIEVVYDVGGGRIGFGAGGCK

SEQ ID NO: 23430 - protein, 488 aa, Glycine max
MAIQMSSFVFVSLTILFCFSSLEKSFAFQTTKEDTESNNLHQYTHLVHLSSLLPSSSCSSSAKGPKRKASLEVVHKHGPCSQLNNHDGKAKSKTPHSEILNQDKERVKYINSRISKNLGQDSSVSELDSVTLPAKSGSLIGSGNYFVVVGLGTPKRDLSLIFDTGSDLTWTQCEPCARSCYKQQDAIFDPSKSTSYSNITCTSTLCTQLSTATGNEPGCSASTKACIYGIQYGDSSFSVGYFSRERLSVTATDIVDNFLFGCGQNNQGLFGGSAGLIGLGRHPISFVQQTAAVYRKIFSYCLPATSSSTGRLSFGTTTTSYVKYTPFSTISRGSSFYGLDITGISVGGAKLPVSSSTFSTGGAIIDSGTVITRLPPTAYTALRSAFRQGMSKYPSAGELSILDTCYDLSGYEVFSIPKIDFSFAGGVTVQLPPQGILYVASAKQVCLAFAANGDDSDVTIYGNVQQKTIEVVYDVGGGRIGFGAGGCK

SEQ ID NO: 23431 - protein, 484 aa, Glycine max
MSSFVFVSLTILFCFSSLEKSFAFQTTKEDTESNNLHQYTHLVHLSSLLPSSSCSSSAKGPKRKASLEVVHKHGPCSQLNNHDGKAKSKTPHSEILNQDKERVKYINSRISKNLGQDSSVSELDSVTLPAKSGSLIGSGNYFVVVGLGTPKRDLSLIFDTGSDLTWTQCEPCARSCYKQQDAIFDPSKSTSYSNITCTSTLCTQLSTATGNEPGCSASTKACIYGIQYGDSSFSVGYFSRERLSVTATDIVDNFLFGCGQNNQGLFGGSAGLIGLGRHPISFVQQTAAVYRKIFSYCLPATSSSTGRLSFGTTTTSYVKYTPFSTISRGSSFYGLDITGISVGGAKLPVSSSTFSTGGAIIDSGTVITRLPPTAYTALRSAFRQGMSKYPSAGELSILDTCYDLSGYEVFSIPKIDFSFAGGVTVQLPPQGILYVASAKQVCLAFAANGDDSDVTIYGNVQQKTIEVVYDVGGGRIGFGAGGCK

SEQ ID NO: 23432 - DNA, 1339 bp, Glycine max
aattcttctttgtattctccatccaccctcattgcactttttagtttttaccctttttcggtgtcttctcatattcctcacacgcacaccctcttcgatctcaacgcctctttggcttatattctcaccgacccacattgccattctcaccattctttgcagatcacgcacccctttaggaagagaggaaggaaagtctagtttttggttcgtgggggttggtttgcgaaatggcctctttctcggtcccatgccccaagtgtcctacaacttcttcttctccccctttggggttgaaatctctaaatgtttcatttcaaagggtgttgagcttgaagccttctctttcattcggatctttgtctgctgaatctgctgcatcaaggattcagtgccttaacaggaagcaattttctgttctgaaggctactaaagttgaaaattccaattctgcccctgtaatggtcaatggacctaatgttgcttcatcgaaagaaaaagaagtgcataatggaaaactctctggtggtactatcccagatgatgcttcaattattgcattcatgtctcaagtttcagaccttgtaaaactcgtggattcgagagatattgtggaacttcaacttaagcaatcagactgtgagctcatgataagaaaaaaagaagcattgcagcctccaccagttatagccccaacatccccaccaatgcactatgccacagttccttctccgccaccaccaccagcagctgctcctgctagctctgcacctccaaaagcagttcctgccttgccttcccctgcaaaagcaggcacatcttctcacccaacgctgaaatgtccgatggcaggaaccttctacaggagtccagcacctggtgaacctgcatttgtcaaggtgggagataaagtgcagaaaggccaggttatttgcattatcgaggctatgaaactgatgaatgaaattgaggctgatcagtcaggaacaatagctgaggtattagctgaggatgggaaaccagtcagtgtggacacgcctctttttgtaatagttccatgagtaccagaagggaccttacttcgaacttgatgtgaaatctcccttgttggagcagcatggtattcgatgacttagactctgtgttcagaaatttgttgagtggtaatgtttgtctcattttaagaaatccttgtcgtctttagcccccacccctcctcttaatttattgagatattttggacataaaagccccagcatatcagaatgagaatatttgacatttcagttctataagcagttttgacatttttagtagtatttatgttctatttttgttt

SEQ ID NO: 23433 - protein, 276 aa, Glycine max
MASFSVPCPKCPTTSSSPPLGLKSLNVSFQRVLSLKPSLSFGSLSAESAASRIQCLNRKQFSVLKATKVENSNSAPVMVNGPNVASSKEKEVHNGKLSGGTIPDDASIIAFMSQVSDLVKLVDSRDIVELQLKQSDCELMIRKKEALQPPPVIAPTSPPMHYATVPSPPPPPAAAPASSAPPKAVPALPSPAKAGTSSHPTLKCPMAGTFYRSPAPGEPAFVKVGDKVQKGQVICIIEAMKLMNEIEADQSGTIAEVLAEDGKPVSVDTPLFVIVP

SEQ ID NO: 23434 - protein, 199 aa, Glycine max
MVNGPNVASSKEKEVHNGKLSGGTIPDDASIIAFMSQVSDLVKLVDSRDIVELQLKQSDCELMIRKKEALQPPPVIAPTSPPMHYATVPSPPPPPAAAPASSAPPKAVPALPSPAKAGTSSHPTLKCPMAGTFYRSPAPGEPAFVKVGDKVQKGQVICIIEAMKLMNEIEADQSGTIAEVLAEDGKPVSVDTPLFVIVP

SEQ ID NO: 23435 - protein, 165 aa, Glycine max
MSQVSDLVKLVDSRDIVELQLKQSDCELMIRKKEALQPPPVIAPTSPPMHYATVPSPPPPPAAAPASSAPPKAVPALPSPAKAGTSSHPTLKCPMAGTFYRSPAPGEPAFVKVGDKVQKGQVICIIEAMKLMNEIEADQSGTIAEVLAEDGKPVSVDTPLFVIVP

SEQ ID NO: 23436 - DNA, 1866 bp, Glycine max
aattctccaccaaccccattctctctttctctctttacataactcaatttctccttgtatcattttcactacacatattacattattccttccaaaatgagcacgcagctgaaaaggttcaactcaatggaacgcaggccaagaatgctgaaggacttcctcagcgagaatctaaactcgtgctcctcaagcggcttcaaatcacttccaagaaaaccaaccaacaacaacagcatgcacagcctcatcgaaatggaactcaaatcttcatcaccctttcaaacactcatgaacaccataagaagcatctctctcttcacctcaaaatcaccctccgtgctttctctaccgaggagcctctcacgcaagctatcatcttcaaggagaaaaacaagaacaagaagaagaaggagccatgtgtgcagcagcgatgtcaacatcacaacggtggtgaagatcaaggacatcatacggtggaagtcattcagggatatcgtggtggaaccttctcttccaccaccaccgttggatttcatggtggggtccaccaacaccacttgtagtagctgtagcagtggctctagttggactgagagtgatttttttttaacctcgtcctgggaagaaccacaaaacgacaacgttgaagcgggtaaaaggttttcatttttttcaccccttgttgtcggcaaggactccggggctacggacacttcaacttgccaagaagaacaacacagtccagtttcagttcttcacgttggagaagatgatttctcaccttttgatcaaagtcttgccaatattctaaggagaaaacagaagttcatacaaacagttcaaaaattggagagtcatgcaaaatttgaccttgcaaacttagaccaatgtctctcattggatgacaactctggctatgatgaagaatatgaagaagaagaagatgatgataatgatgacattgaagaacaagattggattgaggaaaaggcaaagcagctgctacattgtgtcaaagcaagagtttcagcacatggctgtatagactatttggatacacttctgttggattttttcagggaagaactaagtggaagtagaaaccaatacaagaatgaagaggagtttgagttggagacattgagaataactgaggattggataaatgggtcatttgcttttgatgcagggcatgctgacaaacatgcttacataaaggacatggagaggagagatcagtggagtaggttggaggaggatcaagaagaattggcctttgaaattgagacagctatattgcatagtttgattgctgatcttctggacctggatgcttaatacttaatagtttcccttttcaaagttcaaatcaagttttggcaattgcttcttcgcctccataatggcttcgtgtacctttttaagtttatgaaacacctaattcggaatgtaaattacattccagaaagactaattcgaaatgtaattttacattccaggttaggtggaagcaattgcctcaagttctttaagatctctgggcctttagcctcacttttctcaacagaaattatctggccgcacttgaagtccgaatcagaaaagtaggtttcatcctacagcacccatttagattttaggcttaccaaccagaccagaaaaataaggatacctaccaaccaagggcagagggatgcctacttttgtggtaacaaaggacatataggtcagagtttggtgagttttggatactgttatatgaaggggtaatgagatgctagtggacataagtacatgattgggctgtactgtacttaaatttagttatggcttaattagattttggactttggagtgtagcatatt

SEQ ID NO: 23437 - protein, 413 aa, Glycine max
MSTQLKRFNSMERRPRMLKDFLSENLNSCSSSGFKSLPRKPTNNNSMHSLIEMELKSSSPFQTLMNTIRSISLFTSKSPSVLSLPRSLSRKLSSSRRKTRTRRRRSHVCSSDVNITTVVKIKDIIRWKSFRDIVVEPSLPPPPLDFMVGSTNTTCSSCSSGSSWTESDFFLTSSWEEPQNDNVEAGKRFSFFSPLVVGKDSGATDTSTCQEEQHSPVSVLHVGEDDFSPFDQSLANILRRKQKFIQTVQKLESHAKFDLANLDQCLSLDDNSGYDEEYEEEEDDDNDDIEEQDWIEEKAKQLLHCVKARVSAHGCIDYLDTLLLDFFREELSGSRNQYKNEEEFELETLRITEDWINGSFAFDAGHADKHAYIKDMERRDQWSRLEEDQEELAFEIETAILHSLIADLLDLDA

SEQ ID NO: 23438 - protein, 403 aa, Glycine max
MERRPRMLKDFLSENLNSCSSSGFKSLPRKPTNNNSMHSLIEMELKSSSPFQTLMNTIRSISLFTSKSPSVLSLPRSLSRKLSSSRRKTRTRRRRSHVCSSDVNITTVVKIKDIIRWKSFRDIVVEPSLPPPPLDFMVGSTNTTCSSCSSGSSWTESDFFLTSSWEEPQNDNVEAGKRFSFFSPLVVGKDSGATDTSTCQEEQHSPVSVLHVGEDDFSPFDQSLANILRRKQKFIQTVQKLESHAKFDLANLDQCLSLDDNSGYDEEYEEEEDDDNDDIEEQDWIEEKAKQLLHCVKARVSAHGCIDYLDTLLLDFFREELSGSRNQYKNEEEFELETLRITEDWINGSFAFDAGHADKHAYIKDMERRDQWSRLEEDQEELAFEIETAILHSLIADLLDLDA

SEQ ID NO: 23439 - protein, 397 aa, Glycine max
MLKDFLSENLNSCSSSGFKSLPRKPTNNNSMHSLIEMELKSSSPFQTLMNTIRSISLFTSKSPSVLSLPRSLSRKLSSSRRKTRTRRRRSHVCSSDVNITTVVKIKDIIRWKSFRDIVVEPSLPPPPLDFMVGSTNTTCSSCSSGSSWTESDFFLTSSWEEPQNDNVEAGKRFSFFSPLVVGKDSGATDTSTCQEEQHSPVSVLHVGEDDFSPFDQSLANILRRKQKFIQTVQKLESHAKFDLANLDQCLSLDDNSGYDEEYEEEEDDDNDDIEEQDWIEEKAKQLLHCVKARVSAHGCIDYLDTLLLDFFREELSGSRNQYKNEEEFELETLRITEDWINGSFAFDAGHADKHAYIKDMERRDQWSRLEEDQEELAFEIETAILHSLIADLLDLDA

SEQ ID NO: 23440 - DNA, 1614 bp, Glycine max
aaacactagtagtctagtacattacatcacaaaaatatcatccctctttgttcctaaacacggggcactggtttcgaaccctcgttgtggttaggtcttcttcacctttcgaattttggaatccatgggtcagggaactccgggcggcatgaaccggcagggcgaccggaagccggacggcggcgacaagaaggagaagaagttcgagccgtcggctccgccggcgcgcgtggggcggaaacagcggaagcagaaaggtccggaggcggcggcgcggttgccgacagtgactccggtgacgaagtgcaaactgcggcttctgaagctggagcggatcaaggactaccttctgatggaggaggagttcgtggcgaatcaggagcgactcaagccgcaggaggagaaggccgaggaagacagatccaaggtcgatgatctccgaggctctcccatgagcgtcggaaacctcgaagagctcatcgacgagaatcacgctattgtctcctcctccgttgggcctgagtactatgtcggaatcctgtctttcgttgataaggatcagttggagcctggttgtgctattttgatgcataataaggttctttctgttgttgggcttcttcaagatgaagttgatccaatggtctctgtcatgaaggttgagaaggctcctctggaatcttatgctgacattggtggtttagatgcccaaatacaggaaattaaagaagcagttgagctacccctgacgcatcctgaactatatgaagacattggtatcaagcctcctaagggggtcattttatatggagaacctggaactgggaagacattgcttgcgaaggctgtggcaaactcaacatcagcaacattcttgcgtgttgttggtagtgaactgatacaaaagtacttgggagatggcccaaaacttgtaagagaacttttcagagttgctgatgatctttctccttctattgtattcattgatgaaattgatgcagttggtacaaaaaggtatgatgctcactcaggaggagaacgtgaaattcaaaggaccatgctagagttgctgaaccagttagatggttttgattcaagaggagatgtgaaagtgattctggcaaccaacagaattgaaagtcttgatccagctttgctacgacctggtcgaattgacaggaagatagaatttcctcttcctgatatcaaaacaaggagacgcatcttccagatacacacgtcaaggatgacattagctgatgatgtcaacttggaagaatttgttatgactaaagacgaattctccggagctgatataaaggcaatatgtactgaagctggtttacttgctctacgagaacgtcgaatgaaggtgactcatgccgactttaagaaggccaaggataaagtgatgtttaagaagaaagaaggggtgcctgaagggctgtatatgtgaaaaactatcctctattatctctggccctcttgtctttcttttaacgttctagttatgcgaacaaatgccaattcatttgtattctgcgaacaaatgtcagttgtattttaggggctttgaatctcaacaacgattttaattcaatatagttttctttc

SEQ ID NO: 23441 - protein, 443 aa, Glycine max
MGQGTPGGMNRQGDRKPDGGDKKEKKFEPSAPPARVGRKQRKQKGPEAAARLPTVTPVTKCKLRLLKLERIKDYLLMEEEFVANQERLKPQEEKAEEDRSKVDDLRGSPMSVGNLEELIDENHAIVSSSVGPEYYVGILSFVDKDQLEPGCAILMHNKVLSVVGLLQDEVDPMVSVMKVEKAPLESYADIGGLDAQIQEIKEAVELPLTHPELYEDIGIKPPKGVILYGEPGTGKTLLAKAVANSTSATFLRVVGSELIQKYLGDGPKLVRELFRVADDLSPSIVFIDEIDAVGTKRYDAHSGGEREIQRTMLELLNQLDGFDSRGDVKVILATNRIESLDPALLRPGRIDRKIEFPLPDIKTRRRIFQIHTSRMTLADDVNLEEFVMTKDEFSGADIKAICTEAGLLALRERRMKVTHADFKKAKDKVMFKKKEGVPEGLYM

SEQ ID NO: 23442 - protein, 435 aa, Glycine max
MNRQGDRKPDGGDKKEKKFEPSAPPARVGRKQRKQKGPEAAARLPTVTPVTKCKLRLLKLERIKDYLLMEEEFVANQERLKPQEEKAEEDRSKVDDLRGSPMSVGNLEELIDENHAIVSSSVGPEYYVGILSFVDKDQLEPGCAILMHNKVLSVVGLLQDEVDPMVSVMKVEKAPLESYADIGGLDAQIQEIKEAVELPLTHPELYEDIGIKPPKGVILYGEPGTGKTLLAKAVANSTSATFLRVVGSELIQKYLGDGPKLVRELFRVADDLSPSIVFIDEIDAVGTKRYDAHSGGEREIQRTMLELLNQLDGFDSRGDVKVILATNRIESLDPALLRPGRIDRKIEFPLPDIKTRRRIFQIHTSRMTLADDVNLEEFVMTKDEFSGADIKAICTEAGLLALRERRMKVTHADFKKAKDKVMFKKKEGVPEGLYM

SEQ ID NO: 23443 - protein, 367 aa, Glycine max
MEEEFVANQERLKPQEEKAEEDRSKVDDLRGSPMSVGNLEELIDENHAIVSSSVGPEYYVGILSFVDKDQLEPGCAILMHNKVLSVVGLLQDEVDPMVSVMKVEKAPLESYADIGGLDAQIQEIKEAVELPLTHPELYEDIGIKPPKGVILYGEPGTGKTLLAKAVANSTSATFLRVVGSELIQKYLGDGPKLVRELFRVADDLSPSIVFIDEIDAVGTKRYDAHSGGEREIQRTMLELLNQLDGFDSRGDVKVILATNRIESLDPALLRPGRIDRKIEFPLPDIKTRRRIFQIHTSRMTLADDVNLEEFVMTKDEFSGADIKAICTEAGLLALRERRMKVTHADFKKAKDKVMFKKKEGVPEGLYM

SEQ ID NO: 23444 - DNA, 1297 bp, Glycine max
attgggagagccgcctctctcaaaatacgtagcagagagaagcttctggatgatcaactagctgttctcaccgccatgcttctctccggttctgttctgcaatcgatgaaggtgcttgcctgtatagccaccacgaggtcgaggacagctgtgaccttgacgttgacaaaagtaagctgccattgcagttagccattctaggacgccctaatgttggtaaatcaaccttattgaatgcattgttgcaagaagaccatgttcttgtgggtcctgaagctggtttgacaagagattcaatcagaacccagtttgaatttcagggaagaacaatttatctggttgatactgctggttggttacagatgcagtctactccgggcattatgcaatcaaggaagagtctactccaggctcatataattgctttggtactagatgcagaagagattataaatgcaagacgaagtatgaaacatgctgaagtaattatagccagatgggcagtggaagaaggacgtgggctggttgtgattgtgaacaagatgaaccttccaagaggcaaacaccaatcgtcatcctatgagaaggttatggaaattgttccacaagaaattcagacaattatacctcaggtaaaaggaatcccagttgtattcatttcagcattggagggaaggggcaggaccactgtcttgaatcaggtcatcgaaacatatgaaaaatggtgttcaagattacctacagctcgtctaaaccgttggttgcaaaaggttatgagcaggcattcttggaaaggccaagcagcacagcctaaggttaagtatttcactcaggtcaaggcccggccacctacatttgttgcgtgactcaactttctgatacagacattaggttcttaaccaagtccttgaaggagaactttgatttgggtggaattcctatacggctcatgcaacgttttgtcactaagaaagatgccagtggaagtgaaactagaactagcaagaatagccattcagtaggcagagtgattgaaaggactgtctctgacaagagaagtgtcttagttgaataacaaatttgacttctcattgaagggcatgagcatcactccgcaaaatttgcttaaacgagtttagagtaatttaattataattttgttctcacttcaattcaaatgaacaacaagattcactctttttgttttgtacgtttaatattttgtaggacatagtatttggaaacaactgaacatggatcagggttctcttaaggaataattatactcattcatctt

SEQ ID NO: 23445 - protein, 167 aa, Glycine max
MQSTPGIMQSRKSLLQAHIIALVLDAEEIINARRSMKHAEVIIARWAVEEGRGLVVIVNKMNLPRGKHQSSSYEKVMEIVPQEIQTIIPQVKGIPVVFISALEGRGRTTVLNQVIETYEKWCSRLPTARLNRWLQKVMSRHSWKGQAAQPKVKYFTQVKARPPTFVA

SEQ ID NO: 23446 - protein, 160 aa, Glycine max
MQSRKSLLQAHIIALVLDAEEIINARRSMKHAEVIIARWAVEEGRGLVVIVNKMNLPRGKHQSSSYEKVMEIVPQEIQTIIPQVKGIPVVFISALEGRGRTTVLNQVIETYEKWCSRLPTARLNRWLQKVMSRHSWKGQAAQPKVKYFTQVKARPPTFVA

SEQ ID NO: 23447 - protein, 132 aa, Glycine max
MKHAEVIIARWAVEEGRGLVVIVNKMNLPRGKHQSSSYEKVMEIVPQEIQTIIPQVKGIPVVFISALEGRGRTTVLNQVIETYEKWCSRLPTARLNRWLQKVMSRHSWKGQAAQPKVKYFTQVKARPPTFVA

SEQ ID NO: 23448 - DNA, 1346 bp, Glycine max
tttgttcggaatctaggaagaatctcttgcagcctgccaaggtttccttaatggtggacatcttgaatgagggttccattgagacgaagatcaattgcacgcggttgattgaatcgttgattgaggagaaggattttcgatccgaggttatcttgagccatagcctcttggttgggttgatgaggcttgttaaggataagaggcacaacaatggagtgtgtcctgggctgagtctcctcagaacaatttgtttgcataaggaagttaggaatttgcttgtgagcattggggctgtttctcagttggttgaattgttgtctggcatggagcctgattgtttggaattggccctttgtgttttggatgcgttggcttcggtccctgaaggtagagtggctttgaaggattgctctaacaccatacccatcatggtgaaactgttgatgaggatctcagaaaactgcactcagtatgctttgtcaattctatggtctgtgtgtaagctttcacctgaagagtgctcgtcgattgcggttgatgcagggcttgctgcgaaactcctactcgtgattcagagtggttgcaatcctatattgaaacagcagtctgctgagcttttgaagctgtgtagtttaaattattcagatactatctttctttccaagtgcaagcttaccagaaccatccaatgatcatggactatatcaatctggtggtgccaacaatttgtaaatttgtggggcaagagtagtaaagatcagttgcatctcaagaccaccgaactctaataaaccccaagacaatgatcatggggttgaggtgcaagtctctctcctgtatatacctttagtattttgattccaacaattgatttgaatgaagaagaatcataatgtggacattgacacacccttgctttcagtgcggtctacttctgcgggttactttttgtccaatatttattttcaataagccccattaagaagatactgaaattttttatactgctttggggttattatatatggatgtagaaatcatgctgttgttggataaaagatacttcttaggagtgatcacactgcgatgatggaggagcatgcaatttcaattgtaattgttgaggagttgctctgctccgtgccttttttgttgtatcttcttcccctctggatcttttagaggcctccaatttttcattaaaaaatactgggaattttgctttttgatctcaaacgggtagagagactggagagcctgtgaccgtcaatttttatgtgtacaatggaagcaatttttcatgttaattctgcagttcaattcaacttctaattttgtgatgtctg

SEQ ID NO: 23449 - protein, 229 aa, Glycine max
CSESRKNLLQPAKVSLMVDILNEGSIETKINCTRLIESLIEEKDFRSEVILSHSLLVGLMRLVKDKRHNNGVCPGLSLLRTICLHKEVRNLLVSIGAVSQLVELLSGMEPDCLELALCVLDALASVPEGRVALKDCSNTIPIMVKLLMRISENCTQYALSILWSVCKLSPEECSSIAVDAGLAAKLLLVIQSGCNPILKQQSAELLKLCSLNYSDTIFLSKCKLTRTIQ

SEQ ID NO: 23450 - protein, 213 aa, Glycine max
MVDILNEGSIETKINCTRLIESLIEEKDFRSEVILSHSLLVGLMRLVKDKRHNNGVCPGLSLLRTICLHKEVRNLLVSIGAVSQLVELLSGMEPDCLELALCVLDALASVPEGRVALKDCSNTIPIMVKLLMRISENCTQYALSILWSVCKLSPEECSSIAVDAGLAAKLLLVIQSGCNPILKQQSAELLKLCSLNYSDTIFLSKCKLTRTIQ

SEQ ID NO: 23451 - protein, 170 aa, Glycine max
MRLVKDKRHNNGVCPGLSLLRTICLHKEVRNLLVSIGAVSQLVELLSGMEPDCLELALCVLDALASVPEGRVALKDCSNTIPIMVKLLMRISENCTQYALSILWSVCKLSPEECSSIAVDAGLAAKLLLVIQSGCNPILKQQSAELLKLCSLNYSDTIFLSKCKLTRTIQ

SEQ ID NO: 23452 - DNA, 544 bp, Glycine max
attaattcatcccataccacctccccttcagtctcctgagacatctcctgagcgtgttatggatgaaacatggatgcaggagcttaatattcagaggccaccaactcctactcggggtcgacctcagccggaccttgatcgtggctcactagcatatatatgatttgattcacgacttgaataaatactgcatattcgggatttttcatcatcgcttgatatcctgccaaccaaaagttctgtttctaaacctgtcattgttggcagaatacatattttgtactagattcttctttagttgcagaaaagcaaactctcattagcatgcaaatagcttgagagagtgcattatttatgttagccaattagcgaatggcttgtggagattggttttactaggcacgggacatggataaagtggaagagatgctagtggcttctccccctcaacatggggatggataacttagtcagggaataccgatgtttggtatatatattgtatcatagagaaatatatatatatatatatattttttccttt

SEQ ID NO: 23453 - protein, 53 aa, Glycine max
LIHPIPPPLQSPETSPERVMDETWMQELNIQRPPTPTRGRPQPDLDRGSLAYI

SEQ ID NO: 23454 - protein, 34 aa, Glycine max
MDETWMQELNIQRPPTPTRGRPQPDLDRGSLAYI

SEQ ID NO: 23455 - protein, 31 aa, Glycine max
MGMDNLVREYRCLVYILYHREIYIYIYIFSF

SEQ ID NO: 23456 - DNA, 1575 bp, Glycine max
aagttcaaagttcgaagccatgcgaatgaagccaatccagctcccggagccgccaagccccacggcggcgcgtggcactccggacatcttcgaatccggcgtccacaccctcgtccgccgcgccgtcgtcatcggcaacggcttcccctcctccgagaatcacagcatcggtttgctccgcgcccttggcctctcccacaaccacctcctctaccgcgttacgaggccgagaggtggaatcaacgattggctccattggcttcccctctctgtccatcgaaaatttcattacctaatttccatgttccgcgccttctcctccaaatctcactacctgcccctcacttcccaccctaacggcttgtcctctattctcgaagctgatgccaatcacatagtcaatttggctcgcgaaacttgtgaaaaggagggaccgttattggtggttgcatctggaagagacaccatttctgttgcgagttccataaacgtttagctcctgaccttgtttttgttgttcagatacaacatccaaggtctcatttgaataggtttgacatggtaattacacctcatcatgattattatcctttgactccagaaggacagaagcaggttcctaagtttcttagaaggtggataactccacgcgaacctccagatagtcatgtggttctgacattgggagccttacatcgaatagattttgcttcacttcgcagtgctgccattacatggcaagatgtgtttgcaaatgttccaaggccattgctcgtggtcaacattggaggaccaacaagaaactgtcggtatggtgtcgaccttgcaaagcagttagcaacatgtttgctcagtgttcttggtagttgtgggagtgtaagaatatccttttcagataggactccacaaaagttatcgaatattatagtcaaagaacttggaaataatccaaaagtttatatttgggatgggcaagaaccaaacccacaaatggggcatctagcttgggccgatgcatttgttgtcacagcagattcagttagcatgataagtgaagcttgcagcactgggaagcctgtgtatattatgggagctgagcgttgcagatggaagttcacagaattccacaaatcattgagagaacgaggagttgttcggccttttacagggtctgaggatatatcggaaaattggagttatccaccccttgatgacacttctgatgcagctaaacgggttcatgaagcgcttgctgcccgagggtggaaactgaagatatagaacacaattattagttcacatgatactcaatttttgttatatttatcgttaaggtcgtaaccatttgttgtttggaagatagtgtccaaaatttcatgtttctttgatagcacgaatagaaaataccgtttgggtgttcgtcattctttccaccatagcaattttcaaggatgtaatgtagtataaggttaactgtgcgattgcagcttgtaaactgggaggaaattttttacttttttgtgccgattgacacattttaataaatgaggtgaataaaaaatttgtttgtgctgt

SEQ ID NO: 23457 - protein, 240 aa, Glycine max
MVITPHHDYYPLTPEGQKQVPKFLRRWITPREPPDSHVVLTLGALHRIDFASLRSAAITWQDVFANVPRPLLVVNIGGPTRNCRYGVDLAKQLATCLLSVLGSCGSVRISFSDRTPQKLSNIIVKELGNNPKVYIWDGQEPNPQMGHLAWADAFVVTADSVSMISEACSTGKPVYIMGAERCRWKFTEFHKSLRERGVVRPFTGSEDISENWSYPPLDDTSDAAKRVHEALAARGWKLKI

SEQ ID NO: 23458 - protein, 164 aa, Glycine max
SSKFEAMRMKPIQLPEPPSPTAARGTPDIFESGVHTLVRRAVVIGNGFPSSENHSIGLLRALGLSHNHLLYRVTRPRGGINDWLHWLPLSVHRKFHYLISMFRAFSSKSHYLPLTSHPNGLSSILEADANHIVNLARETCEKEGPLLVVASGRDTISVASSINV

SEQ ID NO: 23459 - protein, 158 aa, Glycine max
MRMKPIQLPEPPSPTAARGTPDIFESGVHTLVRRAVVIGNGFPSSENHSIGLLRALGLSHNHLLYRVTRPRGGINDWLHWLPLSVHRKFHYLISMFRAFSSKSHYLPLTSHPNGLSSILEADANHIVNLARETCEKEGPLLVVASGRDTISVASSINV

SEQ ID NO: 23460 - DNA, 1486 bp, Glycine max
gcaattcctctgtctgttccttcaattcttcaaatcccgaaattgtcatttttaatctcgctgcaaattgcgctcacgattctttgctttccttcgaaactctcccaaatcccacttctttctctctcataaataaattcgccacctttgtatttttgcgtaactgctctgcaccttattgattcttctctctctctccattctccaattctccatttcgatctgcagctccccgctttcaaagctctgaaatttccgattcgggatggagaaatacgagctcgtgaaggatataggatctgggaatttcggtgtggccaggctcatgcgacacaaagacaccaaggagcttgttgccatgaaatacattgaacggggtcacaagattgatgagaatgttgcgagggaaatcataaaccatagaagtcttcggcaccccaatattattcggttcaaggaggtggttctgactccaacccatctgggtattgttatggagtatgcggctggtggagagctctttgagaggatttgcagtgctggaagattcagcgaagatgaggctcgatatttcttccagcagctcatctcaggagttagctactgtcattccatgcaaatctgtcatcgagacttgaagctggagaacacattattggatggcagcccagccccacggctcaaaatttgtgattttggctattctaagtcatctctgcttcattctaggcctaagtcaacggtgggaaccccggcctacattgcacctgaggttctttcacgtagagagtatgatggaaagttagcagatgtatggtcctgtggagtgactctttatgtaatgctggtgggagcatacccatttgaagaccaagaggatcccaaaaatttcaggaaaaccatcaatcgaattatggctgttcaatacaagattccagactacgttcacatatctcaagactgtagacatcttctatctcgcatttttgtggcaaatccagctaggagaatcaccattaaggaaatcaagtcccacccatggtttgtaaagaacttgcccagagaattaacagaagtagctcaagctgcctactacagaaaagaaaacccaaccttttctcttcagagtatagaggacatcatgaatattgttgaggaggccaaggctccacctccagcatccaggtcaattggaggatttggctggggaggggaggaagaagaagaggatgaaacaaaagaagcagtggctgagactgaagaagatgagtacgaaaagagagtcaaggaagcacaagcaagtggggaatttcatgtcagttaaaaagtgtttatttttagatagagagcaattgattcttggtttcctttgcacttagctaagttcaactaaggtgagtgtgttttgcttgtatgtataaaattaagttttccgcatgggacatatagtttaataaatggctgtacatttttttaaggttgtgcg

SEQ ID NO: 23461 - protein, 352 aa, Glycine max
MEKYELVKDIGSGNFGVARLMRHKDTKELVAMKYIERGHKIDENVAREIINHRSLRHPNIIRFKEVVLTPTHLGIVMEYAAGGELFERICSAGRFSEDEARYFFQQLISGVSYCHSMQICHRDLKLENTLLDGSPAPRLKICDFGYSKSSLLHSRPKSTVGTPAYIAPEVLSRREYDGKLADVWSCGVTLYVMLVGAYPFEDQEDPKNFRKTINRIMAVQYKIPDYVHISQDCRHLLSRIFVANPARRITIKEIKSHPWFVKNLPRELTEVAQAAYYRKENPTFSLQSIEDIMNIVEEAKAPPPASRSIGGFGWGGEEEEEDETKEAVAETEEDEYEKRVKEAQASGEFHVS

SEQ ID NO: 23462 - protein, 332 aa, Glycine max
MRHKDTKELVAMKYIERGHKIDENVAREIINHRSLRHPNIIRFKEVVLTPTHLGIVMEYAAGGELFERICSAGRFSEDEARYFFQQLISGVSYCHSMQICHRDLKLENTLLDGSPAPRLKICDFGYSKSSLLHSRPKSTVGTPAYIAPEVLSRREYDGKLADVWSCGVTLYVMLVGAYPFEDQEDPKNFRKTINRIMAVQYKIPDYVHISQDCRHLLSRIFVANPARRITIKEIKSHPWFVKNLPRELTEVAQAAYYRKENPTFSLQSIEDIMNIVEEAKAPPPASRSIGGFGWGGEEEEEDETKEAVAETEEDEYEKRVKEAQASGEFHVS

SEQ ID NO: 23463 - protein, 321 aa, Glycine max
MKYIERGHKIDENVAREIINHRSLRHPNIIRFKEVVLTPTHLGIVMEYAAGGELFERICSAGRFSEDEARYFFQQLISGVSYCHSMQICHRDLKLENTLLDGSPAPRLKICDFGYSKSSLLHSRPKSTVGTPAYIAPEVLSRREYDGKLADVWSCGVTLYVMLVGAYPFEDQEDPKNFRKTINRIMAVQYKIPDYVHISQDCRHLLSRIFVANPARRITIKEIKSHPWFVKNLPRELTEVAQAAYYRKENPTFSLQSIEDIMNIVEEAKAPPPASRSIGGFGWGGEEEEEDETKEAVAETEEDEYEKRVKEAQASGEFHVS

SEQ ID NO: 23464 - DNA, 1053 bp, Glycine max
ctataatagcctgatgtcatttgaaacaaattacaaggaagtttcaaacatatatgatcagatgcaaagagctgatctcagacctgacgttgtgagctatgccttacttgtaagtgcgtatgggaaggcccggagggaggaagaagcattagctgtatttgaggaaatgcttgatgctggtatcagaccaactcggaaggcttacaatattttacttgatgcattttctatatcgggaatggtagagcaagctcagactgtgtttaagagcatgagaagggatagatactttccagatctttgctcatacactaccatgttatcagcttatatcaatgcagatgacatggagggtgctgagaagtttttcaaaagattgatacaagatggctttgagcctaatgttgtcacttatggaaccttgattaaagggtatgctaagataaatgatcttgagatggtaatgaaaaagtatgaagaaatgctcatgcggggaatcaaggccaatcagacaattttaactactatcatggatgcatatggaaaaagtggagacttcgacagtgctgttcattggtttaaggaaatggagtctaatggaattcctcctgatcagaaagctaaaaatgttcttctatctttagcaaaaacagatgaagaaagggaagaggctaatgagctcgtagtgcatttcagtgaaaatagcagtttacctaaagttaatggcattgttaaacttgttgacgaagatgaagaagaagataattatgaatattttgatgcccagctcgcaagggcttatgaacattctacagaggtaaaagttgacgaatgtcaagtcctttgagacctagacactcaaattttgtacacttgtagtcattgtattttgtggtagcattatattatcaagcaattgaaagtatttaacttagacataatatactccaaatatgggagtcatattggaaagtaatcatgtcccttgtgtctcatcatccatttatgttcacggtatcttgactagttagcgcatgcttgttttgccgttat

SEQ ID NO: 23465 - protein, 281 aa, Glycine max
YNSLMSFETNYKEVSNIYDQMQRADLRPDVVSYALLVSAYGKARREEEALAVFEEMLDAGIRPTRKAYNILLDAFSISGMVEQAQTVFKSMRRDRYFPDLCSYTTMLSAYINADDMEGAEKFFKRLIQDGFEPNVVTYGTLIKGYAKINDLEMVMKKYEEMLMRGIKANQTILTTIMDAYGKSGDFDSAVHWFKEMESNGIPPDQKAKNVLLSLAKTDEEREEANELVVHFSENSSLPKVNGIVKLVDEDEEEDNYEYFDAQLARAYEHSTEVKVDECQVL

SEQ ID NO: 23466 - protein, 277 aa, Glycine max
MSFETNYKEVSNIYDQMQRADLRPDVVSYALLVSAYGKARREEEALAVFEEMLDAGIRPTRKAYNILLDAFSISGMVEQAQTVFKSMRRDRYFPDLCSYTTMLSAYINADDMEGAEKFFKRLIQDGFEPNVVTYGTLIKGYAKINDLEMVMKKYEEMLMRGIKANQTILTTIMDAYGKSGDFDSAVHWFKEMESNGIPPDQKAKNVLLSLAKTDEEREEANELVVHFSENSSLPKVNGIVKLVDEDEEEDNYEYFDAQLARAYEHSTEVKVDECQVL

SEQ ID NO: 23467 - protein, 261 aa, Glycine max
MQRADLRPDVVSYALLVSAYGKARREEEALAVFEEMLDAGIRPTRKAYNILLDAFSISGMVEQAQTVFKSMRRDRYFPDLCSYTTMLSAYINADDMEGAEKFFKRLIQDGFEPNVVTYGTLIKGYAKINDLEMVMKKYEEMLMRGIKANQTILTTIMDAYGKSGDFDSAVHWFKEMESNGIPPDQKAKNVLLSLAKTDEEREEANELVVHFSENSSLPKVNGIVKLVDEDEEEDNYEYFDAQLARAYEHSTEVKVDECQVL

SEQ ID NO: 23468 - DNA, 1504 bp, Glycine max
atctaacaataaattctcaaaaaataaaaaagctttttttcactgtttggaaattgtggggttgggtatctcaactttcaatttctcattagattctgaacagtgaagcttccatttttgcctttttttttataattatttccaatctattctcaactgatctgattaataataaaaatgaaaaagtaaaaaagtatcggaggttaatataattaggagaaaatggaatttaaaaagagaaagaaagggtggaaattgtaggtgtggtgtgtttcacatttgaagtaacactgaaaagaaaggaaagtgaagttgagagtttaagaagaacaagaaatgggggttggttcccaggatgccatcaagcagttccaggcattcattgaccaagttgaggagcctttgcgaacaacgtttcagaatgttcatcaaggatttgtcactgcaactttaatgcggtttctaaaagcaagggactgggatccttacaaggcacagaaaatgttggttgattgtttaaattggagggtgcaaaatgagattgacaatatattatctaaaccaattgttcctgctgatttatacagagcggtgcgtgattcacaactcataggattatcaggttactcaagagagggtctgcctgtctttgcaattggtgttgggcttagcacatttgacaaagcatctgtccattattatgtgcagtcacacattcaaattaatgaatatcgtgagcgtatagtcttgccttctgcatcagagaagcaagggcgacctattaccacttgtataaaggtcttagacatgactggtctgaagttatcagccctgaatcagattaagttgttaactattatatcatccattgatgatctgaactaccctgagaagacaaatacttattacattgtaaatgctccatacatattttcagcttgttggaaggttgtgaagctacttttacaagagaggacaagaagaaaaatacaggtgttaccaggttgtggacgagatgagctgttgactatcatggattactcgtctctaccacatttctgtagaagagaaggttctggatcatccagacattctgagagtggtagtgaaaattgctattccttggatcatcccttccatcaagggctctacaaccacatcaagcagcaagccagactccgtgaagctgttgaacccatcaagcagggatcgtttcatgtagattttccagtacctccagatgatgaagttgagatcgccaagactatagagtcggagttacacaagtttgagaacggaaatgatgtctaatacgttcttttaggatctactgttgagaccttaaaatcagagatcttttgcttagtacaaccaatgtaggaagaagactccacattagaattacttctatcaggattcggcagaattagttagcattgtttatgtatgttaaaagagaaattaaggggtagtcaacttaatgcaaatcccagctttacatcgt

SEQ ID NO: 23469 - protein, 324 aa, Glycine max
MGVGSQDAIKQFQAFIDQVEEPLRTTFQNVHQGFVTATLMRFLKARDWDPYKAQKMLVDCLNWRVQNEIDNILSKPIVPADLYRAVRDSQLIGLSGYSREGLPVFAIGVGLSTFDKASVHYYVQSHIQINEYRERIVLPSASEKQGRPITTCIKVLDMTGLKLSALNQIKLLTIISSIDDLNYPEKTNTYYIVNAPYIFSACWKVVKLLLQERTRRKIQVLPGCGRDELLTIMDYSSLPHFCRREGSGSSRHSESGSENCYSLDHPFHQGLYNHIKQQARLREAVEPIKQGSFHVDFPVPPDDEVEIAKTIESELHKFENGNDV

SEQ ID NO: 23470 - protein, 285 aa, Glycine max
MRFLKARDWDPYKAQKMLVDCLNWRVQNEIDNILSKPIVPADLYRAVRDSQLIGLSGYSREGLPVFAIGVGLSTFDKASVHYYVQSHIQINEYRERIVLPSASEKQGRPITTCIKVLDMTGLKLSALNQIKLLTIISSIDDLNYPEKTNTYYIVNAPYIFSACWKVVKLLLQERTRRKIQVLPGCGRDELLTIMDYSSLPHFCRREGSGSSRHSESGSENCYSLDHPFHQGLYNHIKQQARLREAVEPIKQGSFHVDFPVPPDDEVEIAKTIESELHKFENGNDV

SEQ ID NO: 23471 - protein, 269 aa, Glycine max
MLVDCLNWRVQNEIDNILSKPIVPADLYRAVRDSQLIGLSGYSREGLPVFAIGVGLSTFDKASVHYYVQSHIQINEYRERIVLPSASEKQGRPITTCIKVLDMTGLKLSALNQIKLLTIISSIDDLNYPEKTNTYYIVNAPYIFSACWKVVKLLLQERTRRKIQVLPGCGRDELLTIMDYSSLPHFCRREGSGSSRHSESGSENCYSLDHPFHQGLYNHIKQQARLREAVEPIKQGSFHVDFPVPPDDEVEIAKTIESELHKFENGNDV

SEQ ID NO: 23472 - DNA, 1474 bp, Glycine max
aatttggaaatgtaaaaaaaaattgggtgtttccgatagtagtagttgtagcggtcaagccgagccgatccgatgacgcgagccactcacacactgggggttcccccaacaacacgcgcccctccccggcgaccgtaccgtattatccctcaccattcccactctttcgccttgccgtttcgctttctctctcttcttcttcttctttctctttctctttctctttctcttttccctttctctttatctctcttccaaccctaattccctttttccgatgccggacttccacgactccctcctcaccaccacgccgccgccatcgcgccccgtccccgtccgcgaggactgctggtccgaggaggcctcctccacgctcgtcgacgcctggggccgccgctacctcgagctcaaccgcggcaacctccgccaaaaggactggcaggacgtcgccgacgccgtcaacgcgctccacggccacaccaaaaagacgcaccgcaccgacgtccagtgcaaaaaccgcatcgacaccattaagaagaagtacaagatcgagaaggctagggtttcggcctccaacggtactctctcttcctcttggcctttctacgagcgcttggacgctctaatcggccctaattttagcgcgaagaaatcaacctcttcgccgtctccgtcgccgccggtggctcttcctttgctgccgcatcggaagaaccagaaccaaaaccagaacccttcctcttctcctgcgattgcggtgccgccgacggccgtcgctctgccgcagaagcgctcctcggcagcggcgatggacgagggttacttcagaaggaattactccgccgtggctgccgcggcggcggcagcggaggctgatgaggacgatgaggaggaagacgaggaggaggcggaggatttggaggaggaggaggaggaagaatgtgaagaggaagggagagggagcgaagtggaggaaggggataaggagagggaagggatgaggaggttggcgaaggcgatagagaggtttggggaagtttatgagagagtggaggcgcagaagctgaggcagatggtggatttggagaaacagaggatgcagtttgctaaagatcttgaagtgcagaggatggagatgtttatggacacacaggttcagctcgagagaattaagcgcggtaaaagatctggctctaatggtgagatacaaaaaaaaattcggccttttatttgcttcccttttggcttgatttgatcacacgttgtactttttagtgttttgttttcaacgaatgaatgatgttttggacttgaggataagtgggtcgctagaggattattctccagtgagttcctttttggtggtaaaagaaaaatagattggtttggactctagagggtgcactgaatgctctgaattggttgtttcttgtagtcctacaattaaatatactagcatgtgatgcacttt

SEQ ID NO: 23473 - protein, 326 aa, Glycine max
MPDFHDSLLTTTPPPSRPVPVREDCWSEEASSTLVDAWGRRYLELNRGNLRQKDWQDVADAVNALHGHTKKTHRTDVQCKNRIDTIKKKYKIEKARVSASNGTLSSSWPFYERLDALIGPNFSAKKSTSSPSPSPPVALPLLPHRKNQNQNQNPSSSPAIAVPPTAVALPQKRSSAAAMDEGYFRRNYSAVAAAAAAAEADEDDEEEDEEEAEDLEEEEEEECEEEGRGSEVEEGDKEREGMRRLAKAIERFGEVYERVEAQKLRQMVDLEKQRMQFAKDLEVQRMEMFMDTQVQLERIKRGKRSGSNGEIQKKIRPFICFPFGLI

SEQ ID NO: 23474 - protein, 208 aa, Glycine max
FGNVKKNWVFPIVVVVAVKPSRSDDASHSHTGGSPNNTRPSPATVPYYPSPFPLFRLAVSLSLSSSSSFSFSFSFSFPFLFISLPTLIPFFRCRTSTTPSSPPRRRHRAPSPSARTAGPRRPPPRSSTPGAAATSSSTAATSAKRTGRTSPTPSTRSTATPKRRTAPTSSAKTASTPLRRSTRSRRLGFRPPTVLSLPLGLSTSAWTL

SEQ ID NO: 23475 - DNA, 1188 bp, Glycine max
ttccattgtatctttcggaaatggctccagctaagaaccgaggagcagtgaaccaactgtttcagttcacaacttgtgctggaatcttaattgcaaacctagtgaattactttactgaaaaaatccatccctatggatggaggatatctctgggtttggcaggtcttccagcatttgcaatgcttgttggaggtatttgttgtgctgagacaccaaacagccttgtggagcaaggaaggttggataaagcaaaacaagtattgcagagaattagaggtaccgagaacgttgaagccgaatttgaggatcttaaagaagccagtgaagaagcacaagctgttaagagcccgtttaggacactcctcaagaggaagtacaggccacaactgatcataggtgcattggggattccagcgttccagcagctaactggcaataactccatcctcttctatgcccctgtcatttttcagagcttgggctttggtgccaatgcttcactgttttcatcttttattaccaatggggctcttcttgttgccactgtcatctcaatgtttttggttgacaagtatggtagaagaaaattctttctggaagctggctttgaaatgatatgctgcatgattattacaggtgcagtcttggctgtgaactttgggcacggcaaagaaattgggaaaggagtgagtgcctttctggttgttgtgatcttcttgttcgttttggcatatgggagatcttggggtccccttgggtggttggttcccagtgagctcttcccattagagataagatcatctgcacagagtattgtggtctgtgtcaacatgatcttcactgcacttgttgctcaattgttcctcatgtcactttgccacctcaaatttgggatcttcttgctctttgcttccttaattatcttcatgagcttctttgtcttcttccttttgcccgaaaccaagaaagttccaattgaggagatttatcttctttttgagaatcattggttctggaggagatttgtaactgaccaagacccagagacatcaaaggggactgcttaaaattctcaacaaaatagattgaacaagtgtaggttttttgtttctctttctttattttggagtcaattatttcttacttgcagctttgtcaaaaaaataaatctgttaggacatttctttt

SEQ ID NO: 23476 - protein, 354 aa, Glycine max
PLYLSEMAPAKNRGAVNQLFQFTTCAGILIANLVNYFTEKIHPYGWRISLGLAGLPAFAMLVGGICCAETPNSLVEQGRLDKAKQVLQRIRGTENVEAEFEDLKEASEEAQAVKSPFRTLLKRKYRPQLIIGALGIPAFQQLTGNNSILFYAPVIFQSLGFGANASLFSSFITNGALLVATVISMFLVDKYGRRKFFLEAGFEMICCMIITGAVLAVNFGHGKEIGKGVSAFLVVVIFLFVLAYGRSWGPLGWLVPSELFPLEIRSSAQSIVVCVNMIFTALVAQLFLMSLCHLKFGIFLLFASLIIFMSFFVFFLLPETKKVPIEEIYLLFENHWFWRRFVTDQDPETSKGTA

SEQ ID NO: 23477 - protein, 348 aa, Glycine max
MAPAKNRGAVNQLFQFTTCAGILIANLVNYFTEKIHPYGWRISLGLAGLPAFAMLVGGICCAETPNSLVEQGRLDKAKQVLQRIRGTENVEAEFEDLKEASEEAQAVKSPFRTLLKRKYRPQLIIGALGIPAFQQLTGNNSILFYAPVIFQSLGFGANASLFSSFITNGALLVATVISMFLVDKYGRRKFFLEAGFEMICCMIITGAVLAVNFGHGKEIGKGVSAFLVVVIFLFVLAYGRSWGPLGWLVPSELFPLEIRSSAQSIVVCVNMIFTALVAQLFLMSLCHLKFGIFLLFASLIIFMSFFVFFLLPETKKVPIEEIYLLFENHWFWRRFVTDQDPETSKGTA

SEQ ID NO: 23478 - protein, 295 aa, Glycine max
MLVGGICCAETPNSLVEQGRLDKAKQVLQRIRGTENVEAEFEDLKEASEEAQAVKSPFRTLLKRKYRPQLIIGALGIPAFQQLTGNNSILFYAPVIFQSLGFGANASLFSSFITNGALLVATVISMFLVDKYGRRKFFLEAGFEMICCMIITGAVLAVNFGHGKEIGKGVSAFLVVVIFLFVLAYGRSWGPLGWLVPSELFPLEIRSSAQSIVVCVNMIFTALVAQLFLMSLCHLKFGIFLLFASLIIFMSFFVFFLLPETKKVPIEEIYLLFENHWFWRRFVTDQDPETSKGTA

SEQ ID NO: 23479 - DNA, 1599 bp, Glycine max
acccttttcgaagcttgaggaggaagagtgcctcggtattggcgatgaaaaaaatgaagactcaatcatggcgttgatgatgaataagcggggcagtaccttttttgaccaaagaaagaaagccaccacagttaaaataaaaaacttgtccctttgacaagcacttcttagctctctctccgccattctttctttattgctccctccctcctttcccctcctctcccacacgcttcttcttatcctcattccctttcttcaattccattttcacatccttccttcaacttccactgttagaaacttcacgtatgcaaccatgcttctttaccaaccacccaaagaagaggtagaaagaaccatgaagggcaacaacgttttggatctgaaaacgttaattgatgagcttgagtcatcatcaattgaagtcccttcggtttttatctgccctatttcacttgagccaatgctagacccggtgaccctttgcacgggacaaacctacgaccgttccaacatcctcagatggttctccctcggtcacaacacgtgtcccacaacaatgcaagagctttgggatgattcggtcacaccaaacaccacactccaccacttcatactctcttggttctctcacaagtacttggtcatgaagaagaagctcgaggacgttcaaggcacggccttggagctcttggacacgttaaagaaggtaaagggtcaaaatagagttcgagctctcaaacaacttcgccaactcgttgattcccacgtgtccacgaggaaaaccgttgaggaaaataatggttcttctttgatttcttccttgctgggtcctttcacttcccacgctgttggttcggaagcaattgggattctcgtgaatttggagttgggttcggagttgaagaggagtctcatggaccccgcgaaggtgtcgttgttggtggacatcatgaacgagggaacaattcagacaaagatgaattgtgccaaattgattcaaacgttgttggtagaaggtgacccctccgagacagttgttttatcaagtttgagtcttttggttggggtgttgaggttagtgagagataagaaacaccccactagtgttgtaaccggactcatattactcaaaattgtatcttcgcgtgaatccgttagaggctcaattataagcataggagcggtgcctcaattgattcagcttttacccactttgaataatgagtgtttggagatagcacttcatattcttgaggttttgtcaacacttcctgaagggagaatggctttgaaagagtgtccaaatattattcccaatgtggtcaagttgttgatgagagtttcagagagttgcacacaatttgcattgtcgatattgtgggctatttacaagcttgccccagaggaatgtgcttcgaaagctgtggaggcagggttggcggcgaagctactgctagtaattcagagtggttgcaacccggtgttaaagcagaaatctaccgagtttttgaaaatgtgcagcctagattactctactagtattttgatttccaagtgtatgcttactgcaacaatacaatgaaattcaaaacc

SEQ ID NO: 23480 - protein, 422 aa, Glycine max
MLLYQPPKEEVERTMKGNNVLDLKTLIDELESSSIEVPSVFICPISLEPMLDPVTLCTGQTYDRSNILRWFSLGHNTCPTTMQELWDDSVTPNTTLHHFILSWFSHKYLVMKKKLEDVQGTALELLDTLKKVKGQNRVRALKQLRQLVDSHVSTRKTVEENNGSSLISSLLGPFTSHAVGSEAIGILVNLELGSELKRSLMDPAKVSLLVDIMNEGTIQTKMNCAKLIQTLLVEGDPSETVVLSSLSLLVGVLRLVRDKKHPTSVVTGLILLKIVSSRESVRGSIISIGAVPQLIQLLPTLNNECLEIALHILEVLSTLPEGRMALKECPNIIPNVVKLLMRVSESCTQFALSILWAIYKLAPEECASKAVEAGLAAKLLLVIQSGCNPVLKQKSTEFLKMCSLDYSTSILISKCMLTATIQ

SEQ ID NO: 23481 - protein, 408 aa, Glycine max
MKGNNVLDLKTLIDELESSSIEVPSVFICPISLEPMLDPVTLCTGQTYDRSNILRWFSLGHNTCPTTMQELWDDSVTPNTTLHHFILSWFSHKYLVMKKKLEDVQGTALELLDTLKKVKGQNRVRALKQLRQLVDSHVSTRKTVEENNGSSLISSLLGPFTSHAVGSEAIGILVNLELGSELKRSLMDPAKVSLLVDIMNEGTIQTKMNCAKLIQTLLVEGDPSETVVLSSLSLLVGVLRLVRDKKHPTSVVTGLILLKIVSSRESVRGSIISIGAVPQLIQLLPTLNNECLEIALHILEVLSTLPEGRMALKECPNIIPNVVKLLMRVSESCTQFALSILWAIYKLAPEECASKAVEAGLAAKLLLVIQSGCNPVLKQKSTEFLKMCSLDYSTSILISKCMLTATIQ

SEQ ID NO: 23482 - protein, 373 aa, Glycine max
MLDPVTLCTGQTYDRSNILRWFSLGHNTCPTTMQELWDDSVTPNTTLHHFILSWFSHKYLVMKKKLEDVQGTALELLDTLKKVKGQNRVRALKQLRQLVDSHVSTRKTVEENNGSSLISSLLGPFTSHAVGSEAIGILVNLELGSELKRSLMDPAKVSLLVDIMNEGTIQTKMNCAKLIQTLLVEGDPSETVVLSSLSLLVGVLRLVRDKKHPTSVVTGLILLKIVSSRESVRGSIISIGAVPQLIQLLPTLNNECLEIALHILEVLSTLPEGRMALKECPNIIPNVVKLLMRVSESCTQFALSILWAIYKLAPEECASKAVEAGLAAKLLLVIQSGCNPVLKQKSTEFLKMCSLDYSTSILISKCMLTATIQ

SEQ ID NO: 23483 - DNA, 1332 bp, Glycine max
ttcacgatctcagcatcttcttacttctgctgttcctggtgtatatcctgccggtggttcactcattggtccaggtgctggagctccaattgtggggatagctcctcttgttggtgcttatgggggatataaaggtgacactggtgactggccgccgcggtccatgtactcagctccaagggatgaggcatctacaaaggaattttcagttcgattggtttgtccaacaggaaacattggaggtgtgataggaaaaggtggtatgataatcaatcaaattaggcaggagtccggggcaacaatcaaagttgatagttcaacaacagaaggagatgaatgcttgatagccatttcgaccaaagagttctttgaagagactttctctccaacaatagaagcagctgtgcgtttgcaacctcgatgcagtgagaaggttgaaagagattcaggaatcatctctttcactacccgtctgctggtaccaacctcacgtattggttgccttattggtaaaggggggtctatcataactgagatgaggaggcttacaaaagctaacattcgcattatttcgaaggaaaatcttcctaagattgcatctgaagatgatgaaatggtgcagatttcaggagaccttgatattgccaaggatgctctagtgcatgtacttacgcggttgagagcaaatctttttgatagggagggtgctctctcttcattccttccagttctgccatatctccctgtttcagcagatggatcagatggcctaaactatgatggtagagatggtaaaagacatggacgtggacattcatattcaagtgggtatggaggctcaagtgatttagcagctggtgacatttatggaagctatggtggttctcagcttggaagcaacagtgcttatggggcttatggaagttattctttgggacggtctagtactgctgggttgtcaagtcagagtggtgcttctaggaggagaaaccatgcttactagacttaatggtccatgcagctgagatctatgaagcctgcagcctgcctactgcctaaaccagaagacctgatgaaccagggtttgacaaacttatggcccaccctgaagcttctacttagaggaccaaacatatgtggagactattgaaattggccatgtccattttaccttaattcccaagcttgataacttgtgcacccaagaacctataaagctggcttgcctttgcttctgtttttattattgtggttcatttgtctttaaaactgaaaacaccatgtagctttgatcagcctgcagttgtatactatttaatgttttttggtttt

SEQ ID NO: 23484 - protein, 333 aa, Glycine max
SRSQHLLTSAVPGVYPAGGSLIGPGAGAPIVGIAPLVGAYGGYKGDTGDWPPRSMYSAPRDEASTKEFSVRLVCPTGNIGGVIGKGGMIINQIRQESGATIKVDSSTTEGDECLIAISTKEFFEETFSPTIEAAVRLQPRCSEKVERDSGIISFTTRLLVPTSRIGCLIGKGGSIITEMRRLTKANIRIISKENLPKIASEDDEMVQISGDLDIAKDALVHVLTRLRANLFDREGALSSFLPVLPYLPVSADGSDGLNYDGRDGKRHGRGHSYSSGYGGSSDLAAGDIYGSYGGSQLGSNSAYGAYGSYSLGRSSTAGLSSQSGASRRRNHAY

SEQ ID NO: 23485 - protein, 279 aa, Glycine max
MYSAPRDEASTKEFSVRLVCPTGNIGGVIGKGGMIINQIRQESGATIKVDSSTTEGDECLIAISTKEFFEETFSPTIEAAVRLQPRCSEKVERDSGIISFTTRLLVPTSRIGCLIGKGGSIITEMRRLTKANIRIISKENLPKIASEDDEMVQISGDLDIAKDALVHVLTRLRANLFDREGALSSFLPVLPYLPVSADGSDGLNYDGRDGKRHGRGHSYSSGYGGSSDLAAGDIYGSYGGSQLGSNSAYGAYGSYSLGRSSTAGLSSQSGASRRRNHAY

SEQ ID NO: 23486 - protein, 246 aa, Glycine max
MIINQIRQESGATIKVDSSTTEGDECLIAISTKEFFEETFSPTIEAAVRLQPRCSEKVERDSGIISFTTRLLVPTSRIGCLIGKGGSIITEMRRLTKANIRIISKENLPKIASEDDEMVQISGDLDIAKDALVHVLTRLRANLFDREGALSSFLPVLPYLPVSADGSDGLNYDGRDGKRHGRGHSYSSGYGGSSDLAAGDIYGSYGGSQLGSNSAYGAYGSYSLGRSSTAGLSSQSGASRRRNHAY

SEQ ID NO: 23487 - DNA, 1317 bp, Glycine max
attatgttaggaagacgcccctttatccatttggccggacaccacacaccgaagctattcagctattgtctattgcattgccattttcaagtaatggcgctactacgtcttgtttgcttaccttcaacaaatcaattatccactcaaccccattcccattcccaatccacctctttctcttttcttcgcaaaacgccccattctcaacccatcaatttcagtctctcttcctttcactttccacgcctatcccttatcacaaccaaacaaacccttaacctcactcccacacattcctccacttccgaacaacaaaccgaggagcctcttgtctctgaagaagaattttctcgcaccaggttgctcgctcagaactgccctggacaagcacccctgaagacattcgcaccctcttcgaaaaacatgggaaagtcctcgaagtcgagctttctatgtataagaaaaacagaaaccggggtttggcctttgtcgaaatgggttccccagaagaggcactggaagctctcaataatctcgaatcgtatgagtttgagggtcgtgtaattaaagtcaattatgctcggccaaaaaaggagaaaacagcgccgccccctgtgaaaccaaaggtggtgacgtttaacttgtttgttgctaacttatcctatgaagcaagctccaaagatcttaaggagttttttgatttgggaactggtagagttgtctctgctgaggttgtgtatcgtgataatcctagaaggccgtctggatatggatttgtgtccttcaagtctaagaaagaagctgaggctgctcttgctgagttccaaggaaaggtttttatgggaaggccaatcagggtggatcggggtcggcgttttgttcaacaaccaggggacgggagtgcaaagtctgaagatactccttctgagttgagtgtgaatggggcagaagctccacaaccagcagaggggagtgcaaagtctgaagatactccttctgagttgagtgtgaatggggaagaagctgacaaagctgattgatatcagtttttccctgatgcatatcgatattattgatgttgtatgtccttgcttcagacattttgaaagtttgctcattcttgcagataatccgaaatctttgattggtttagattatgtgttttactggtggttttcacccttatataccagaggcccttgagatacaaggagcggataggtgtaagcacaagcacttccgtgattcaagaatccatttatcttcattgcataatttaacaattgttggcaagctactatatcttaagaaagcgat

SEQ ID NO: 23488 - protein, 195 aa, Glycine max
MYKKNRNRGLAFVEMGSPEEALEALNNLESYEFEGRVIKVNYARPKKEKTAPPPVKPKVVTFNLFVANLSYEASSKDLKEFFDLGTGRVVSAEVVYRDNPRRPSGYGFVSFKSKKEAEAALAEFQGKVFMGRPIRVDRGRRFVQQPGDGSAKSEDTPSELSVNGAEAPQPAEGSAKSEDTPSELSVNGEEADKAD

SEQ ID NO: 23489 - protein, 187 aa, Glycine max
IMLGRRPFIHLAGHHTPKLFSYCLLHCHFQVMALLRLVCLPSTNQLSTQPHSHSQSTSFSFLRKTPHSQPINFSLSSFHFPRLSLITTKQTLNLTPTHSSTSEQQTEEPLVSEEEFSRTRLLAQNCPGQAPLKTFAPSSKNMGKSSKSSFLCIRKTETGVWPLSKWVPQKRHWKLSIISNRMSLRVV

SEQ ID NO: 23490 - protein, 186 aa, Glycine max
MLGRRPFIHLAGHHTPKLFSYCLLHCHFQVMALLRLVCLPSTNQLSTQPHSHSQSTSFSFLRKTPHSQPINFSLSSFHFPRLSLITTKQTLNLTPTHSSTSEQQTEEPLVSEEEFSRTRLLAQNCPGQAPLKTFAPSSKNMGKSSKSSFLCIRKTETGVWPLSKWVPQKRHWKLSIISNRMSLRVV

SEQ ID NO: 23491 - DNA, 1551 bp, Glycine max
cttgctctcactctcactccgtctccggtggcctcaaaccgctccctcacaattccaaacaccgcgtgcgctgcccacatctccgttcgcatctcctccttgaccagctcgaagtttctctccagtgttgctttgtgagaagtcgttcttgcttgaagtggcttttcattcacaagctctttgagactttcttggagaagagatgtaggagttggactaaggtttcttccaattttcaattgggcacagccacaatcttattctacttaaccttcctcaccttttcggatacctaaggcgaagtatagctaaaaaatgggagtggagagagaagagaaggtgtctttggaactcagcgaagaaattcttcagagtatggaagtgggaatgtccttcaaagactataacggtagaattagttcgttggattttcacagggcatccagttatctagtgaccgctagtgatgatgaatccattcgtctgtatgatgttactggtggaacatgtttgaagacaattaatagcaagaagtatggagttgacctggtttgcttcacatctcatcctacaactgtcatttactcttcaaaaaatggttgggatgaatctttgcggcttctatcgttgcatgataacaagtatttgagatatttcaaaggtcaccatgacagggttgtgtctctaagcttatgctctcgaaaagactgctttatatctggatctctagatcgaactgttttactgtgggatcaaagggctgagaagtgccagggacttttacatgtacaaggaagacctgctatatcatatgatgatccagggcttgtctttgcaattgcctttggaggatacataagaatgtttgatgcccgcaagtatgaaaagggtccctttgagatattttctgttgggggagatatttctgatgcaaatgttgtgaaatttagtaatgatgggagactaatgcttttaacaacggcagatgggcatattcatgtgcttgacacatttcgtggcacacttttatccacatataatgtcacacctgtctcatgcaactccacattagaagcttctttcagccctgagggaatgttcataatatctggttctggagaaggcagcatctacgcatggagtgttcgaagtggcaaagaagttgcaagttggaggagtgcaacttctgatactggacctcctgtaataaagtgggctcctggaagtcttatgtttgctacaggatcatctgagttgtcattctgggttcctgatttgtctaagttgggatcctatgttggaagaaagtagaaacaaatcaaacaatgcatgataaaactattgtttgcctattaacccactgaaaggtaattttttttattaatactacacaaatttaactgtgccgaatggcgtcgtgtgatccatgtagccgacctcacctagtgggataaaactttgttgttgttgcactacacaaagtgacagattttgccatgtttttgtaaatattcttcaccgaagagcaatggatatttcaatgatcctcct

SEQ ID NO: 23492 - protein, 331 aa, Glycine max
MGVEREEKVSLELSEEILQSMEVGMSFKDYNGRISSLDFHRASSYLVTASDDESIRLYDVTGGTCLKTINSKKYGVDLVCFTSHPTTVIYSSKNGWDESLRLLSLHDNKYLRYFKGHHDRVVSLSLCSRKDCFISGSLDRTVLLWDQRAEKCQGLLHVQGRPAISYDDPGLVFAIAFGGYIRMFDARKYEKGPFEIFSVGGDISDANVVKFSNDGRLMLLTTADGHIHVLDTFRGTLLSTYNVTPVSCNSTLEASFSPEGMFIISGSGEGSIYAWSVRSGKEVASWRSATSDTGPPVIKWAPGSLMFATGSSELSFWVPDLSKLGSYVGRK

SEQ ID NO: 23493 - protein, 311 aa, Glycine max
MEVGMSFKDYNGRISSLDFHRASSYLVTASDDESIRLYDVTGGTCLKTINSKKYGVDLVCFTSHPTTVIYSSKNGWDESLRLLSLHDNKYLRYFKGHHDRVVSLSLCSRKDCFISGSLDRTVLLWDQRAEKCQGLLHVQGRPAISYDDPGLVFAIAFGGYIRMFDARKYEKGPFEIFSVGGDISDANVVKFSNDGRLMLLTTADGHIHVLDTFRGTLLSTYNVTPVSCNSTLEASFSPEGMFIISGSGEGSIYAWSVRSGKEVASWRSATSDTGPPVIKWAPGSLMFATGSSELSFWVPDLSKLGSYVGRK

SEQ ID NO: 23494 - protein, 307 aa, Glycine max
MSFKDYNGRISSLDFHRASSYLVTASDDESIRLYDVTGGTCLKTINSKKYGVDLVCFTSHPTTVIYSSKNGWDESLRLLSLHDNKYLRYFKGHHDRVVSLSLCSRKDCFISGSLDRTVLLWDQRAEKCQGLLHVQGRPAISYDDPGLVFAIAFGGYIRMFDARKYEKGPFEIFSVGGDISDANVVKFSNDGRLMLLTTADGHIHVLDTFRGTLLSTYNVTPVSCNSTLEASFSPEGMFIISGSGEGSIYAWSVRSGKEVASWRSATSDTGPPVIKWAPGSLMFATGSSELSFWVPDLSKLGSYVGRK

SEQ ID NO: 23495 - DNA, 1274 bp, Glycine max
tccttttcctcttatttccctccctttgcttcaacaaaaagtatcttcttgtcatttgtcatgtttgctgcatgttttgcaagttctcatcttttttctcccttttcacactctcctgtgttggatgtctgaaaaaaatgtttactttgtagagggtttcttggttgaattttaagttccttagctttcaaagaaagaaacttggaatgtttgaactttgaacctcattttccagtgaatgtttctcacataatattcagaacttttcctcaaattaaaagtgacttattgttgtttttggactttgttctagcaatagtttgttcagggttaccatgaaagtttctagctttcattcatttggcttaaaatttttgttttgtttgtggtttgcagggggtcacattaacccagcggtgacatttgggctgtttttggctcgcaaggtgtctttgatccgagccatcatgtacatggtggctcagtgcttaggtgctatctgtggagttggtttggttaaggctttccaaaagtcttacttcaacaagtatggtggtggggctaattccctcgctgctgggtacagcacaggtactggattgggtgctgagattattggaacctttgttttggtctacactgtcttctctgccactgaccccaagaggaatgccagagattcccatgtgccggttttggctccacttcccattggatttgctgtgttcatggttcacttggccaccatcccagtcactggtactggtatcaaccctgctaggagtcttggagctgctgttatctacaaccaagataagccatgggatgaccattggatcttttgggtaggaccatttattggggcagccattgcagccttctaccatcagttcatcttaagagcaggtgcagctaaggctcttggatcattcaggagtaacccccataattgagttgtctttctcttccttatgatggctctagtggaaagaagataattggagagatgggggttgatatggcaagtttaataataattgggaatgcttttggcttgtgttttgcaacgtttctttgaccctctcgattatgtcttcaagattgtggataagtgtagattaaagtctctttcatgacagggggagccttttgcactttcctctgtggtgttcttccctttagtgtgtcatttttttcttttaagttattctcttcagctgtcatctctgtactcaaaatatatttatggaaaatgttaaattttaattttaatt

SEQ ID NO: 23496 - protein, 205 aa, Glycine max
MKVSSFHSFGLKFLFCLWFAGGHINPAVTFGLFLARKVSLIRAIMYMVAQCLGAICGVGLVKAFQKSYFNKYGGGANSLAAGYSTGTGLGAEIIGTFVLVYTVFSATDPKRNARDSHVPVLAPLPIGFAVFMVHLATIPVTGTGINPARSLGAAVIYNQDKPWDDHWIFWVGPFIGAAIAAFYHQFILRAGAAKALGSFRSNPHN

SEQ ID NO: 23497 - protein, 161 aa, Glycine max; identical to SEQ ID NO: 13238

SEQ ID NO: 23498 - protein, 159 aa, Glycine max
MVAQCLGAICGVGLVKAFQKSYFNKYGGGANSLAAGYSTGTGLGAEIIGTFVLVYTVFSATDPKRNARDSHVPVLAPLPIGFAVFMVHLATIPVTGTGINPARSLGAAVIYNQDKPWDDHWIFWVGPFIGAAIAAFYHQFILRAGAAKALGSFRSNPHN

SEQ ID NO: 23499 - DNA, 1667 bp, Glycine max
cattcatcttagtatatactctcccaatgttgttaacttgacactcgttgatcttcctgggcttacgaaagtagctgttgagggtcaaccggatagtattgtgaaagacattgaggatatggttcgctcctacattgagaagccgaactgtataattttggccatttcaccagccaatcaagatcttgcaacatctgatgcaattaaaatttcccgtgaagtggaccctactggagataggaccattggagttttgacaaagattgatcttatggacaagggtactgatgctgttgatatattggaaggaagagcatataggttaaagtttccctggattggtgttgtgaatagatcacaacaagacataaacaagaatgttgacatgattgctgctaggcgtagagaacgtgagtacttcaatagtacccctgaatataaacaccttgcgaacagaatgggttccgagcatctggcgaagatgctctcaaagcatttggagacagtaatcaagtccaaaattcctggcattcaatctctaattaacaaaacaattgctgaacttgaagctgaactaactcgtttaggaaagcctgtagcagctgatgctgggggaaagttgtatgcaatcatggaaatatgccgctcatttgatcaaatatttaaagaccatcttgatggcgtgcggcctggaggtgataaaatttataatgtctttgacaatcagctccccgctgctttaaaaaggttgcagtttgataagcagctttcaatggaaaatataaggaaacttattactgaagctgatgggtatcagcctcatcttatagctccagaacaaggatatcgtcgtctaattgaatcttctctaataactattaggggccctgctgaggcagctgttgatgcggttcactcgctgttaaaggacttggttcacaaagctatcagtgagactttggacttgaagcagtatcctggtctccgggttgaggttggggctgctgctgttgattcactagaaagaatgagggatgaaagcaaaagagcaacactgcagctagttgatatggagtgtggctatctgactgttgatttctttcggaagcttcctcaagatgttgataagggtggcaatcccacacattcaatttttgatagatataatgattcatatctaaggcgaataggaaccacaattttgtcatatgtcaatatggtctgtgctacactgcggaattcaattcccaagtccatcgtctattgtcaagtgcgggaggcaaaacgaagtctacttgatcacttttttaccgagctaggcaaaatggagaccaagcgtctgtcatcgttattgaatgaggatcctgcaattatggaacgacgtagtgcgctcgcaaagagactagagttataccggagtgcacaagctgaaatagatgcagttgcttggtctaagtagatatatgtatgccagatcacgtttatacgagagccagcagtgtcattattcattgtttccctatttccagttcattattcatactcattttttgttgtcatcttatccacttgtattgtcatcttaaatagatgagacgattctgaaaagggaaaaaaaatgattttttgggttatacaattgagtgtccccgtatatttcatttttc

SEQ ID NO: 23500 - protein, 485 aa, Glycine max
IHLSIYSPNVVNLTLVDLPGLTKVAVEGQPDSIVKDIEDMVRSYIEKPNCIILAISPANQDLATSDAIKISREVDPTGDRTIGVLTKIDLMDKGTDAVDILEGRAYRLKFPWIGVVNRSQQDINKNVDMIAARRREREYFNSTPEYKHLANRMGSEHLAKMLSKHLETVIKSKIPGIQSLINKTIAELEAELTRLGKPVAADAGGKLYAIMEICRSFDQIFKDHLDGVRPGGDKIYNVFDNQLPAALKRLQFDKQLSMENIRKLITEADGYQPHLIAPEQGYRRLIESSLITIRGPAEAAVDAVHSLLKDLVHKAISETLDLKQYPGLRVEVGAAAVDSLERMRDESKRATLQLVDMECGYLTVDFFRKLPQDVDKGGNPTHSIFDRYNDSYLRRIGTTILSYVNMVCATLRNSIPKSIVYCQVREAKRSLLDHFFTELGKMETKRLSSLLNEDPAIMERRSALAKRLELYRSAQAEIDAVAWSK

SEQ ID NO: 23501 - protein, 446 aa, Glycine max
MVRSYIEKPNCIILAISPANQDLATSDAIKISREVDPTGDRTIGVLTKIDLMDKGTDAVDILEGRAYRLKFPWIGVVNRSQQDINKNVDMIAARRREREYFNSTPEYKHLANRMGSEHLAKMLSKHLETVIKSKIPGIQSLINKTIAELEAELTRLGKPVAADAGGKLYAIMEICRSFDQIFKDHLDGVRPGGDKIYNVFDNQLPAALKRLQFDKQLSMENIRKLITEADGYQPHLIAPEQGYRRLIESSLITIRGPAEAAVDAVHSLLKDLVHKAISETLDLKQYPGLRVEVGAAAVDSLERMRDESKRATLQLVDMECGYLTVDFFRKLPQDVDKGGNPTHSIFDRYNDSYLRRIGTTILSYVNMVCATLRNSIPKSIVYCQVREAKRSLLDHFFTELGKMETKRLSSLLNEDPAIMERRSALAKRLELYRSAQAEIDAVAWSK

SEQ ID NO: 23502 - protein, 395 aa, Glycine max
MDKGTDAVDILEGRAYRLKFPWIGVVNRSQQDINKNVDMIAARRREREYFNSTPEYKHLANRMGSEHLAKMLSKHLETVIKSKIPGIQSLINKTIAELEAELTRLGKPVAADAGGKLYAIMEICRSFDQIFKDHLDGVRPGGDKIYNVFDNQLPAALKRLQFDKQLSMENIRKLITEADGYQPHLIAPEQGYRRLIESSLITIRGPAEAAVDAVHSLLKDLVHKAISETLDLKQYPGLRVEVGAAAVDSLERMRDESKRATLQLVDMECGYLTVDFFRKLPQDVDKGGNPTHSIFDRYNDSYLRRIGTTILSYVNMVCATLRNSIPKSIVYCQVREAKRSLLDHFFTELGKMETKRLSSLLNEDPAIMERRSALAKRLELYRSAQAEIDAVAWSK

SEQ ID NO: 23503 - DNA, 1430 bp, Glycine max
agttcaactaagtacgctgtttttttattttccccacaaaaccatatagccatcggtcgtagatcccacgaaccccatcatcacaccactctctgcagttttcgcaaccaaaccttcttttttgtttttattcctctgcttattggattcaacgaagttgttgtgattaaggagaacataactttttgaatcacacagagagagagagagaagagacccagtactttctgcatccaaaccaatcactactgcggataactggtaagttcataaaggggagattcttcagtgatcatctatctgatttggtccagctaaggaatcattcagaagccaagttgattaagtactagagagatcatattttggattagtaaaagttaatcataagcatgggatctttcaagggtcatgctttgccagggactttgtttcttctagttggggtgtggcacgtatggggctctgtggtgagatatgttcgcaatccaatggcgtttcaagtcagagtttggaatcctgtgccagggtttgatgggaggctgaagcacctggagctatatgttattgcaattggtgctttcgttgacatgtgcatcgagcttttgtattcaccacacctcaagatttttgttggtggagtccttaaccccgctcacatgaatgactttgagcactctggaatgcttcttatgtttttcatctttggtgttgttgccctactttcccaaaagaccagatttcttcccttgccagaaggtgctctttgtttgcttgctgcctcagcattcactgcagagtaccttcttttctacttccattcaacaacacacaagggccttgagggctattaccacaccctccttgtcttcctggttggactgtgcattttatcttcaattgctggagcccttttgccaacaagctttccagtggatttatgcaatggcattgctatagcactgcaaggtttatggttctatcagacagcctttgttctctatggccctatgatgccaagtggttgtaagcttagggaaaacagtgtcacatgtcattctattgatagtgaggttcggggcgaattgcttgctaattttcagctctttgttgcggttcttgtggtccttgtgggaactgtggcatcatatggctttgctgcttcaagatatgggagttctgaagtcaggaacttgcatgcaattcagactgaattagatcaagactaaagttgcgttgctattttttctggtggtagttgaaatgtgttggcagcatagagtttcttatagaacatgtttgttgtatattgaagtgcaaaggatcatgcatgcatgatcactgaaaattgaaaattaacaccccctcctccctcaaaaaggaattatacatttttgacttttaggaatcggatgtcaaaggagcaacag

SEQ ID NO: 23504 - protein, 278 aa, Glycine max
MGSFKGHALPGTLFLLVGVWHVWGSVVRYVRNPMAFQVRVWNPVPGFDGRLKHLELYVIAIGAFVDMCIELLYSPHLKIFVGGVLNPAHMNDFEHSGMLLMFFIFGVVALLSQKTRFLPLPEGALCLLAASAFTAEYLLFYFHSTTHKGLEGYYHTLLVFLVGLCILSSIAGALLPTSFPVDLCNGIAIALQGLWFYQTAFVLYGPMMPSGCKLRENSVTCHSIDSEVRGELLANFQLFVAVLVVLVGTVASYGFAASRYGSSEVRNLHAIQTELDQD

SEQ ID NO: 23505 - protein, 245 aa, Glycine max
MAFQVRVWNPVPGFDGRLKHLELYVIAIGAFVDMCIELLYSPHLKIFVGGVLNPAHMNDFEHSGMLLMFFIFGVVALLSQKTRFLPLPEGALCLLAASAFTAEYLLFYFHSTTHKGLEGYYHTLLVFLVGLCILSSIAGALLPTSFPVDLCNGIAIALQGLWFYQTAFVLYGPMMPSGCKLRENSVTCHSIDSEVRGELLANFQLFVAVLVVLVGTVASYGFAASRYGSSEVRNLHAIQTELDQD

SEQ ID NO: 23506 - protein, 212 aa, Glycine max
MCIELLYSPHLKIFVGGVLNPAHMNDFEHSGMLLMFFIFGVVALLSQKTRFLPLPEGALCLLAASAFTAEYLLFYFHSTTHKGLEGYYHTLLVFLVGLCILSSIAGALLPTSFPVDLCNGIAIALQGLWFYQTAFVLYGPMMPSGCKLRENSVTCHSIDSEVRGELLANFQLFVAVLVVLVGTVASYGFAASRYGSSEVRNLHAIQTELDQD

SEQ ID NO: 23507 - DNA, 1424 bp, Glycine max
atttgatgctagaagcttgtgaattaaactctgtttctgaagaggactataatgacctgggaagagctggtttaggcagttgtttgcttggaggcctgccagattggctagtttcctatgcagctcgccttgtgagatttatcaattttgaacgaactaaacttcctgaggaaattttaaagcataatcttgaagagaaaagaaaatatttttcagatatctgtcttgaagttgaaaggagtgatgcagaggttcaggctgaaggtgtatacaatcagaggcttcaaaatcttgctgtcactcttgataaggtaaggtatgttatgcgatgtatttttggtgatccactgaaagctccacctcctcttgagaagctcagtcctgaagcagttgtttccttcctctggaaaggagaggattcatttgttgaagagcttcttcagtgcctggccccttatgttgaagagtctacattgaatgatcttaagtccaaaattcatgctcatgatccttcaagttctggagatattcaaaggcagttcaaaaatctcttttgtggttgagggatgaggttcgaaaccttccttgtacatacaaatgccggcatgatgctgctgctgacttaattcatatttatgcttataccaagtacttctttagaatacaggattatcaaactataacatcaccacccgtctatattagtccacttgacttaggtcccaagtatgctgacaaattgggagcaggatttcaggagtatcgaaagatatacggtgaaaattattgtttagggcaactgattttttggcataatcagagtaacgcggagccagattgcaccctggctagaataagcaggggttgcttgtcattaccagacatcagttccttttatgccaaagctcagaagccttcacgacatcgtgtttatggtccaaggactgtcagatctatgctggcaaggatggagaagcagccccaaaaaccttggcccaaagatcggatttggtcattcaaaaattctccgaaatattttggcagcccaatgttagacgctgtaattaataactctccacttgacagagagatggttcattggttgaagcacagacctgcaatattccaggccttgtgggaccagtgaagttttgcttgcatggtttggggaaagcccttgttagagattagagagtggttcatcattcagaacctgcctccctcttttagcgtggggagtctaattattaatccatagcataagttcttgtttcgcattgtccttcattcttgtgtacagttttcttgacctttgatttgtaattcatttggttgtagggcattgttttactcttatctaatgtcaaaagaaatgaagggaaaataggtttatttcaagccatctgtcttatctgacttgagtc

SEQ ID NO: 23508 - protein, 186 aa, Glycine max
LMLEACELNSVSEEDYNDLGRAGLGSCLLGGLPDWLVSYAARLVRFINFERTKLPEEILKHNLEEKRKYFSDICLEVERSDAEVQAEGVYNQRLQNLAVTLDKVRYVMRCIFGDPLKAPPPLEKLSPEAVVSFLWKGEDSFVEELLQCLAPYVEESTLNDLKSKIHAHDPSSSGDIQRQFKNLFCG

SEQ ID NO: 23509 - protein, 185 aa, Glycine max
MLEACELNSVSEEDYNDLGRAGLGSCLLGGLPDWLVSYAARLVRFINFERTKLPEEILKHNLEEKRKYFSDICLEVERSDAEVQAEGVYNQRLQNLAVTLDKVRYVMRCIFGDPLKAPPPLEKLSPEAVVSFLWKGEDSFVEELLQCLAPYVEESTLNDLKSKIHAHDPSSSGDIQRQFKNLFCG

SEQ ID NO: 23510 - DNA, 1313 bp, Glycine max
catcaaaaactggtgtatttaagaaaaaagaaaagtcacaagtgactcagaggaggaaagcccatgtcggaaccactattggagacaactcaattgatataacccagatgtgtgttcgcatcaatactatgcagcgcattcgcatggaattaggggttttggaaaagaggatagttgccaatctcagcagttctagatccactaatgcggatatagcaaatggggtgagcttgaagttcaagctttccgcatctgctgctgtggaaggcatccatcaactctgcgagtgcatagcatacaaaatcgttttccatgaactctggcatgttatttgggatggcctttatgttggagaagttgcatctgctaggattgagccttttcttcaggagcttgagcaatacttggagattgtatcatctacagtgcatgataaagttagaacacgtgtaattgttaaagtaatgcaggcttcttttgatgggtttctgttggttttgttagccggaggtccatcacgtgctttctctctgcaagattctgttattatagaggaagatttcaagtttctgactggcttgttctggtccaatggagatggattgccagctgaattgatagaaaagcattctaccactgtcaaaggtgtacttcccttgtttcgtgctgatactgagcacataattcagcagttcagtcaacttactatggaaatgtacggttctacagccaaatcccggcttccattgcctccaacagcagatcaatggagtccaacagaaccgaacacacttttgcgagtcttgtgtaataggaatgatgaggcagctgcaaagttccttaagaagaattacaacttacctaagaagctctaacaattgacaagtaaccactactctgatatgccacgcctttccacccaatataaatttgaagtttgttcgttatgtgttgtgaaaccctggcctagtttttgaggatgtgattcaggtaaaggtggtacggtatgcattatacacttactgatcaactctaggaaatatgatgctttatcatcaataatgctcaaaagtataaattgtacaggagtgattcttttgcctttgctaatttgttggcttgttttcagctcgtgccaaaacacaatcactgacaccatggtaatacagagaagtatttacaattagttattatttgtttttataatttcaaaattaatggtctatttatttgtgctgcattgtaatttccccccacaaactacttcagcttgatcttgatcttgtaaatgaaatgaaattatttatttgtgc

SEQ ID NO: 23511 - protein, 290 aa, Glycine max
SKTGVFKKKEKSQVTQRRKAHVGTTIGDNSIDITQMCVRINTMQRIRMELGVLEKRIVANLSSSRSTNADIANGVSLKFKLSASAAVEGIHQLCECIAYKIVFHELWHVIWDGLYVGEVASARIEPFLQELEQYLEIVSSTVHDKVRTRVIVKVMQASFDGFLLVLLAGGPSRAFSLQDSVIIEEDFKFLTGLFWSNGDGLPAELIEKHSTTVKGVLPLFRADTEHIIQQFSQLTMEMYGSTAKSRLPLPPTADQWSPTEPNTLLRVLCNRNDEAAAKFLKKNYNLPKKL

SEQ ID NO: 23512 - protein, 255 aa, Glycine max
MCVRINTMQRIRMELGVLEKRIVANLSSSRSTNADIANGVSLKFKLSASAAVEGIHQLCECIAYKIVFHELWHVIWDGLYVGEVASARIEPFLQELEQYLEIVSSTVHDKVRTRVIVKVMQASFDGFLLVLLAGGPSRAFSLQDSVIIEEDFKFLTGLFWSNGDGLPAELIEKHSTTVKGVLPLFRADTEHIIQQFSQLTMEMYGSTAKSRLPLPPTADQWSPTEPNTLLRVLCNRNDEAAAKFLKKNYNLPKKL

SEQ ID NO: 23513 - protein, 248 aa, Glycine max
MQRIRMELGVLEKRIVANLSSSRSTNADIANGVSLKFKLSASAAVEGIHQLCECIAYKIVFHELWHVIWDGLYVGEVASARIEPFLQELEQYLEIVSSTVHDKVRTRVIVKVMQASFDGFLLVLLAGGPSRAFSLQDSVIIEEDFKFLTGLFWSNGDGLPAELIEKHSTTVKGVLPLFRADTEHIIQQFSQLTMEMYGSTAKSRLPLPPTADQWSPTEPNTLLRVLCNRNDEAAAKFLKKNYNLPKKL

SEQ ID NO: 23514 - DNA, 1185 bp, Glycine max
ctattctgtcgcattcatcatggtttccttcagctccctgttaagacggaagacctccccctgcgtcttcctggtcttcctcccttggattctcgctccctcccgagtttcgttaagtttccggagagctatcccgcttacatggccatgaaattgagccaattctccaacttgaacaatgcggattggatcttcgtcaacacctttcaagcattggaaagcgaggtggtgaaaggcttaacggagctctttccggcgaagatgatagggccaatggtcccttctagttacttggatgggaggattaaaggggacaaagggtatggagcaagtctatggaagcctctagctgaagagtgcagcaattggttggaagcaaaggcgccgcagtctgtggtgtacatctcctttggaagcatggtgtcattgacagcagaacaggtggaagaggtggcatggggattgaaagaaagtggggtgagtttcttgtgggttttaagagaatctgaacatggcaaattgcctcttgggtacagagaattggtaaaagataagggtctaattgtgacatggtgtaaccaacttgaattgctggctcaccaagccactggctgctttgtgacacattgtggctggaattccaccctcgaaagccttagcctcggtgttccggtggtgtgtttgccacagtgggctgaccagttgcctgatgctaagtttttggatgaaatctgggatgttggtgtgtggcctaaggaggatgagaaaggaattgtgaggaagcaagagtttgtcaagagtttgaaggttgtgatggagggtgaaagaagccgagagattagaaggaacgcccataaatggaagaagttggctagggaagcagttgctgaaggaggcagctctgataatcacattaatcagtttgtgaatcatttgatgaatctgatatgaatggaagtttgaaagtatactgagtgcctattctcatcatcagttgttatttgttagtggatgcatgtattctggtctcatttgtgttcactttttcaatatggaaatttatgtgaatgtatggcatccttttttagtttcattcttgtctgccaataacacctgtctcttctaatttatcatgtatttgttacaaattctttattgaaaagaaatgatcagttcataaatagc

SEQ ID NO: 23515 - protein, 316 aa, Glycine max
LFCRIHHGFLQLPVKTEDLPLRLPGLPPLDSRSLPSFVKFPESYPAYMAMKLSQFSNLNNADWIFVNTFQALESEVVKGLTELFPAKMIGPMVPSSYLDGRIKGDKGYGASLWKPLAEECSNWLEAKAPQSVVYISFGSMVSLTAEQVEEVAWGLKESGVSFLWVLRESEHGKLPLGYRELVKDKGLIVTWCNQLELLAHQATGCFVTHCGWNSTLESLSLGVPVVCLPQWADQLPDAKFLDEIWDVGVWPKEDEKGIVRKQEFVKSLKVVMEGERSREIRRNAHKWKKLAREAVAEGGSSDNHINQFVNHLMNLI

SEQ ID NO: 23516 - protein, 269 aa, Glycine max
MAMKLSQFSNLNNADWIFVNTFQALESEVVKGLTELFPAKMIGPMVPSSYLDGRIKGDKGYGASLWKPLAEECSNWLEAKAPQSVVYISFGSMVSLTAEQVEEVAWGLKESGVSFLWVLRESEHGKLPLGYRELVKDKGLIVTWCNQLELLAHQATGCFVTHCGWNSTLESLSLGVPVVCLPQWADQLPDAKFLDEIWDVGVWPKEDEKGIVRKQEFVKSLKVVMEGERSREIRRNAHKWKKLAREAVAEGGSSDNHINQFVNHLMNLI

SEQ ID NO: 23517 - protein, 267 aa, Glycine max
MKLSQFSNLNNADWIFVNTFQALESEVVKGLTELFPAKMIGPMVPSSYLDGRIKGDKGYGASLWKPLAEECSNWLEAKAPQSVVYISFGSMVSLTAEQVEEVAWGLKESGVSFLWVLRESEHGKLPLGYRELVKDKGLIVTWCNQLELLAHQATGCFVTHCGWNSTLESLSLGVPVVCLPQWADQLPDAKFLDEIWDVGVWPKEDEKGIVRKQEFVKSLKVVMEGERSREIRRNAHKWKKLAREAVAEGGSSDNHINQFVNHLMNLI

SEQ ID NO: 23518 - protein, 225 aa, Glycine max
MVPSSYLDGRIKGDKGYGASLWKPLAEECSNWLEAKAPQSVVYISFGSMVSLTAEQVEEVAWGLKESGVSFLWVLRESEHGKLPLGYRELVKDKGLIVTWCNQLELLAHQATGCFVTHCGWNSTLESLSLGVPVVCLPQWADQLPDAKFLDEIWDVGVWPKEDEKGIVRKQEFVKSLKVVMEGERSREIRRNAHKWKKLAREAVAEGGSSDNHINQFVNHLMNLI

SEQ ID NO: 23519 - DNA, 1507 bp, Glycine max
ttttcggaagcggaaattggactgatcctttctctctctctctctctttctcctcaacgcctcttcctttcaatttaatccaacaataataattattcgcaaaaaaacgttgaacagataccatcatcatcacccacatcatcagaatttcaagctatacagagggaagcgcaattgattctttttgtgtgtttgactttgatcaatcagttggatatcgcatagaggattgtgttgccttgaggggaaactcagtttttgactcactaaaagtaagtagccaaacaatttctcggggtcttgttgaagttgattcctttgataagttaccaacttcactcaataaaaacccattaacaagccaaacagagcgacaaagattgcaattacaaaaggttcaattatcaaatctggtcagtggggatacggaacaccaggaagagtctgccatggctgacgccagtcctagaactgatatttctacagatgttgacactgatgataagaatccacggtttgatagaagtcagtcccttgttgctgtggtttctgactccagtgacagatcaaaggataaatcagatcagaagactctccgaaggcttgctcagaatcgtgaggcagcaagaaaaagtcggttgagaaagaaagcttatgttcaacagcttgaaagtagtcgcttaaagttaacccaactggagcaagagcttcagcgagctaggcagcagggaatcattatatcaaactcaggtgatcaagcacattcaatgagtggaaatggggctatggcatttgatgtagagtatgcaagatggctggaagagcagaatcgacaagttaatgagctaagagcagctgtaaattcccatgcaggtgatacagaacttcgcatgattatcgatggtataatggcacattatgatgagatatttaggctgaaggccgatgcagctaaggctgatgtcttccatttgttgtctggaatgtggaagacaccagcagagaggtgttttctatggcttggtggttttcggtcatctgaactcctcaagctcctggtaaatcagttggaacctctgacagagcaacagttagtgggtattaccaacttgcagcaatcttcccaacaggccgaagatgcattgtctcagggcatggaagcattgcaacagtccctttctgagacattatccactggatcacttggctcctctggttcatcaggcaatgtggcaaattacatgggtcaaatggctatggccatgggtaaactagggacacttgaggggttcattaagcaggctgacaatttgcgccagcagactttgcaacaaattcaccgcatattgacaactcggcaatcggctcgtgcactacttgcaatacatgactacttttctaggttgcgtgcccttagctctctttggcttgcccgcccaagagactgatgggtggtaaatagtgtcattaattttcatggatctggcaccagaatcatttgtcgtag

SEQ ID NO: 23520 - protein, 332 aa, Glycine max
MADASPRTDISTDVDTDDKNPRFDRSQSLVAVVSDSSDRSKDKSDQKTLRRLAQNREAARKSRLRKKAYVQQLESSRLKLTQLEQELQRARQQGIIISNSGDQAHSMSGNGAMAFDVEYARWLEEQNRQVNELRAAVNSHAGDTELRMIIDGIMAHYDEIFRLKADAAKADVFHLLSGMWKTPAERCFLWLGGFRSSELLKLLVNQLEPLTEQQLVGITNLQQSSQQAEDALSQGMEALQQSLSETLSTGSLGSSGSSGNVANYMGQMAMAMGKLGTLEGFIKQADNLRQQTLQQIHRILTTRQSARALLAIHDYFSRLRALSSLWLARPRD

SEQ ID NO: 23521 - protein, 226 aa, Glycine max
MSGNGAMAFDVEYARWLEEQNRQVNELRAAVNSHAGDTELRMIIDGIMAHYDEIFRLKADAAKADVFHLLSGMWKTPAERCFLWLGGFRSSELLKLLVNQLEPLTEQQLVGITNLQQSSQQAEDALSQGMEALQQSLSETLSTGSLGSSGSSGNVANYMGQMAMAMGKLGTLEGFIKQADNLRQQTLQQIHRILTTRQSARALLAIHDYFSRLRALSSLWLARPRD

SEQ ID NO: 23522 - protein, 220 aa, Glycine max
MAFDVEYARWLEEQNRQVNELRAAVNSHAGDTELRMIIDGIMAHYDEIFRLKADAAKADVFHLLSGMWKTPAERCFLWLGGFRSSELLKLLVNQLEPLTEQQLVGITNLQQSSQQAEDALSQGMEALQQSLSETLSTGSLGSSGSSGNVANYMGQMAMAMGKLGTLEGFIKQADNLRQQTLQQIHRILTTRQSARALLAIHDYFSRLRALSSLWLARPRD

SEQ ID NO: 23523 - DNA, 1150 bp, Glycine max
attgctaatagcaatactgtgacgtaactctccaacttatgaagcttgcaataataatgttttgaggacatttctctctccgaaccctcccatgcatggcctcttccgcattcctttccgtttatctcattatctccgtcatcgtccttttgtcgaacaggtgctgcgcgtttcaatgcggggtttcctacgacacgatcaccgtcctcaacgcgttccctcacgacccacaagccttcactgagggtcttctttatcatggaaatgacaccttatttgagtcaactggcctttatggggagtcatccgtccgtaaagttgctcttcgtactgggaaggttgagaatattcagaagatggatgattctttatttggtgaaggcttagctctcctcaataataggctgttccagctaaattggttgcagaaagatggtttcatatatgagccaaaaaatttaagccaaatagggacatttaaatatgatatgaaagagggttggggtctggcaactgatggaaaagtcttgtttggaagtgatggcagttcaacattgtatcaatttgagcctcaaccatttaaagttgtatcaaaacaagttgtttactacaagggtcatcaagtgcacaatctcaatgaattggaatacataaatggtgaagtttgggccaatgttttgccgactgactgcattgtaagaatctctccccatgatggaagggttcttggatggattctcctccaaaatttgaggaaagaacttgtggaagctggggagattagtgatcgtgatattttgaatgggatagcatgggatggtgagcagaattgtatttttgtgactggaaaacaatggccaaagctgtatgaaatcaaggtttcccctataaagaaaccaattgaagaagggatcatcgagcaactttgcttgtatgagcctttgaatgggggatttgtgttggctgacccagcccaaagagaatgaggtgaagctgaacataaaatgatggccttaagaggacccaaaaggatgtttgggacaactcccaggttgaaaaaactttattttatattgggtttaggataaatatcattagattatgtattttggcaaatgatattaataaagtatactccattttccctttt

SEQ ID NO: 23524 - protein, 296 aa, Glycine max
MASSAFLSVYLIISVIVLLSNRCCAFQCGVSYDTITVLNAFPHDPQAFTEGLLYHGNDTLFESTGLYGESSVRKVALRTGKVENIQKMDDSLFGEGLALLNNRLFQLNWLQKDGFIYEPKNLSQIGTFKYDMKEGWGLATDGKVLFGSDGSSTLYQFEPQPFKVVSKQVVYYKGHQVHNLNELEYINGEVWANVLPTDCIVRISPHDGRVLGWILLQNLRKELVEAGEISDRDILNGIAWDGEQNCIFVTGKQWPKLYEIKVSPIKKPIEEGIIEQLCLYEPLNGGFVLADPAQRE

SEQ ID NO: 23525 - protein, 209 aa, Glycine max
MDDSLFGEGLALLNNRLFQLNWLQKDGFIYEPKNLSQIGTFKYDMKEGWGLATDGKVLFGSDGSSTLYQFEPQPFKVVSKQVVYYKGHQVHNLNELEYINGEVWANVLPTDCIVRISPHDGRVLGWILLQNLRKELVEAGEISDRDILNGIAWDGEQNCIFVTGKQWPKLYEIKVSPIKKPIEEGIIEQLCLYEPLNGGFVLADPAQRE

SEQ ID NO: 23526 - protein, 165 aa, Glycine max
MKEGWGLATDGKVLFGSDGSSTLYQFEPQPFKVVSKQVVYYKGHQVHNLNELEYINGEVWANVLPTDCIVRISPHDGRVLGWILLQNLRKELVEAGEISDRDILNGIAWDGEQNCIFVTGKQWPKLYEIKVSPIKKPIEEGIIEQLCLYEPLNGGFVLADPAQRE

SEQ ID NO: 23527 - DNA, 1044 bp, Glycine max
attgagtacaacttcacattttagaagaataccccctcttttgctgcatcagaggagttgtaaattaagagcatggctgcacaagctcttgtatcatcatcttctcttaccttctcagcggaggctgcaagacaaagtcttggaccaagatcactccaatctccatttggcttctccagaaaagcctcctttcttgttaaggcagctgctaccccccctgtcaagcaaggatcagacaggcctttgtggtttgcatcaaagcaaagtctttcttacttggatggcagccttccgggtgactatggatttgaccctctgggactttcagaccctgaaggaacaggagggttcattgagccgaaatggctagcatatggtgagataatcaatggtcgttatgcaatgttgggtgcagttggtgcaatagcacctgaaattctaggcaaggctggtctgatccctcaggagacagcactcccatggttcagaacgggtgtgttcccacctgcaggaacctacaactactgggcagactcctacacactgttcgtgtttgagatggcactgatgggatttgcagagcacagaagattccaagactgggccaaaccaggctctatgggcaaacaatacttcctaggactagagaaggggcttggaggttctggtgagccagcttatccaggaggacctttcttcaacccactaggctttggtaaggatgagaagtccttgaaggatttgaagctcaaggaagtgaagaatggaaggttggctatgttggcaatcttgggttactttgttcaagctcttgtcacaggtgttggcccataccaaaacctcctagatcatttggctgaccccgtgcacaacaacatcttgaccagtctcaagttccactgaatgtattatatgttattttacatattctttacgttgccaaaactcaactacctttctacctttctatatcatgtggacattttgttccttgatgtggcgctgtaagaaatgacatgtaaaacaactagaaacattcgacat

SEQ ID NO: 23528 - protein, 276 aa, Glycine max; identical to SEQ ID NO: 16477

SEQ ID NO: 23529 - protein, 166 aa, Glycine max; identical to SEQ ID NO: 16478

SEQ ID NO: 23530 - DNA, 1312 bp, Glycine max
aaggatcctccaaaacctcgtccaaggtttgtgttgtgttgggtgagattttattctaacatcgtttcatcaaatggcttttatgtctggagttcagcgtctgcttcgccgcactccacttgttcattcccactatgcttctattcgtctcagctcaactctcacttcccccaattttttttttttttttgtaacacaaattgaatttgctgctttattactaataattattgcaaacacaacaacagggtacaacacaaaaatgccacaataaatagaaaagcaatcatacacgaccatattaatctatgaacaaataaattaaagagatcactaaaaatggactgtacttttcacatttacttggcatttacatttcaaatctctctttcctgtttggatttgtccgtcacttgaacacaataagatcaggacgtgcaagatggccatcaaacaaatagaatcaacctgatctgaatcataaacattgtagcatagagatgacacattcagacttttattcaaagaacttggacaggaagatagatgtttcacttgactccaaatagagcttgcctttattcctcgataaaaactagaacatgatttatcgtgaatggtgcttccgcaattcgaacttacttgtagataggtggaggtggggaagcatatatgtaaactggaggtggaggtgatttgtaaatgtacttgggagcgggagctggggaaggaggaggtggtgatgtgtaatggtatggtggaggaggagatggagaaggtggtggagggctcacatagtggtaaggtggaggagcataagaagaaagtggaggccaaaaatgcattggaaaattatgcctataacatgaggaacacaatcaaggatgacaagattgcttccaaactgtcttctgatgataagaagaaaattgaagatgcgattgagcaggctatccaatggctagatggaaaccaacttgctgaggctgacgaatttgaggataagatgaaggagttggagagcatttgtaatcccatcatagcaaagatgtaccagggtgctggtggtgatgcgggtggagccatggatgaggatggtcctgcagctggcagtggaagcggtgctggacccaaaattgaggaagtcgattaagcagaagattctcatgggttgttcttgattttgtcaaagacccttttgaagtttagataacagcgtgtcattatgtttttattgcgattttatttttctcttttttttttaatgtacttttccccgtttctacttgaacaatgatataagtttttgctc

SEQ ID NO: 23531 - protein, 136 aa, Glycine max
MCNGMVEEEMEKVVEGSHSGKVEEHKKKVEAKNALENYAYNMRNTIKDDKIASKLSSDDKKKIEDAIEQAIQWLDGNQLAEADEFEDKMKELESICNPIIAKMYQGAGGDAGGAMDEDGPAAGSGSGAGPKIEEVD

SEQ ID NO: 23532 - protein, 132 aa, Glycine max
MVEEEMEKVVEGSHSGKVEEHKKKVEAKNALENYAYNMRNTIKDDKIASKLSSDDKKKIEDAIEQAIQWLDGNQLAEADEFEDKMKELESICNPIIAKMYQGAGGDAGGAMDEDGPAAGSGSGAGPKIEEVD

SEQ ID NO: 23533 - protein, 127 aa, Glycine max
MEKVVEGSHSGKVEEHKKKVEAKNALENYAYNMRNTIKDDKIASKLSSDDKKKIEDAIEQAIQWLDGNQLAEADEFEDKMKELESICNPIIAKMYQGAGGDAGGAMDEDGPAAGSGSGAGPKIEEVD

SEQ ID NO: 23534 - DNA, 1526 bp, Glycine max
aaaaaacgcacgaaagattccatccatttgcgacttgggagagagtaccattgctccactccctctccctcttcgccggcggccaccatgtctttgtcggagttccgaccactcgacgacaagttcctcatcgaatacataaagtccgtccccgccctctcctccaaactcgccgacaacttcgacgacttatctgtcaaagaagtcggagatggcaaccttaacttcgtcttcattgtttccaaccccgcaggttcttttgtcatcaaacaggctctgccatacgttcgttgcataggggaatcgtggcctatgacgaaggagagagcgtattttgagtcactggcactgaaagaagagggtcgtttgagccccgaacatgttcctgaagtatatcactttgaccgtaccatgtctttgattggtatgcgttacttggagcctccacatataatcctcagaaaagggttgattgctgggattgagtaccctcttttggctcaacacatggctgatttcatggcaaagacactcttcttcacgtctctgcttttccgttccacatctgaccacaaacgagacgttgccgaattttgtgggaatgtggagttatgcaggctcactgagcaggttgttttctccgacccttataaagtttctcaatataatcgttggacttccccctatctcgatcgtgatgctgaggcagttcgggaagacaatccgctgaagcttgaagttgctgagctgaaatctaagttcattgagagggcccaggcactaatacatggagatctacacactggttctgtgatggttacccgtgaatcaactcaagttattgatccagaatttgcattttatggaccaatgggttttgatattggagcattcttgggaaacttgattttggctttctttgctcaagatgggcatgctgatcaagcaaatgatcgaaaagcctataaggagtggattcttaagacaatcgaagacagttggaatcttttctatcaaaaattcacttcactttgggatgagcacaaaaatggtgctggtgaagcatatcttccaacaatctataacaatcctgaggttcaactgcttgtacagaagaaatacatgacagatttgtttcacgacagtcttggatttggtgctgctaaaattattaggagaattgttggtgtggcacatgttgaggatttcgaatccattactgatgctgctaaacgggcaagttgtgaacggcgggcacttgatttagctaagatgcttctcaaagaaagaagaaaatttgaaggcattgctgaaattatttcagcaattcggcaatactagccataacaaggttttgctatatcaatagttcaatacctccgtaatgtatcgtgttccccaacattttaactgagttgctctagtaacagttttgatcactttctaattatattatccatactgataacatttctcttgtggaccatcttaaaatttatatccaccgtgatttttgaatgattttt

SEQ ID NO: 23535 - protein, 446 aa, Glycine max
KKRTKDSIHLRLGREYHCSTPSPSSPAATMSLSEFRPLDDKFLIEYIKSVPALSSKLADNFDDLSVKEVGDGNLNFVFIVSNPAGSFVIKQALPYVRCIGESWPMTKERAYFESLALKEEGRLSPEHVPEVYHFDRTMSLIGMRYLEPPHIILRKGLIAGIEYPLLAQHMADFMAKTLFFTSLLFRSTSDHKRDVAEFCGNVELCRLTEQVVFSDPYKVSQYNRWTSPYLDRDAEAVREDNPLKLEVAELKSKFIERAQALIHGDLHTGSVMVTRESTQVIDPEFAFYGPMGFDIGAFLGNLILAFFAQDGHADQANDRKAYKEWILKTIEDSWNLFYQKFTSLWDEHKNGAGEAYLPTIYNNPEVQLLVQKKYMTDLFHDSLGFGAAKIIRRIVGVAHVEDFESITDAAKRASCERRALDLAKMLLKERRKFEGIAEIISAIRQY

SEQ ID NO: 23536 - protein, 417 aa, Glycine max
MSLSEFRPLDDKFLIEYIKSVPALSSKLADNFDDLSVKEVGDGNLNFVFIVSNPAGSFVIKQALPYVRCIGESWPMTKERAYFESLALKEEGRLSPEHVPEVYHFDRTMSLIGMRYLEPPHIILRKGLIAGIEYPLLAQHMADFMAKTLFFTSLLFRSTSDHKRDVAEFCGNVELCRLTEQVVFSDPYKVSQYNRWTSPYLDRDAEAVREDNPLKLEVAELKSKFIERAQALIHGDLHTGSVMVTRESTQVIDPEFAFYGPMGFDIGAFLGNLILAFFAQDGHADQANDRKAYKEWILKTIEDSWNLFYQKFTSLWDEHKNGAGEAYLPTIYNNPEVQLLVQKKYMTDLFHDSLGFGAAKIIRRIVGVAHVEDFESITDAAKRASCERRALDLAKMLLKERRKFEGIAEIISAIRQY

SEQ ID NO: 23537 - protein, 342 aa, Glycine max
MTKERAYFESLALKEEGRLSPEHVPEVYHFDRTMSLIGMRYLEPPHIILRKGLIAGIEYPLLAQHMADFMAKTLFFTSLLFRSTSDHKRDVAEFCGNVELCRLTEQVVFSDPYKVSQYNRWTSPYLDRDAEAVREDNPLKLEVAELKSKFIERAQALIHGDLHTGSVMVTRESTQVIDPEFAFYGPMGFDIGAFLGNLILAFFAQDGHADQANDRKAYKEWILKTIEDSWNLFYQKFTSLWDEHKNGAGEAYLPTIYNNPEVQLLVQKKYMTDLFHDSLGFGAAKIIRRIVGVAHVEDFESITDAAKRASCERRALDLAKMLLKERRKFEGIAEIISAIRQY

SEQ ID NO: 23538 - DNA, 1448 bp, Glycine max
tacgtatggattgcttgttggtccgtttggcccaatggaggataggattctggaatggagtcctgagaaacgttctggcacatgtaacaggaaggaggactttgcacgtctggtttggtccagaagatttatcttgatattccacgagctttccatgactggagctccactttcaatgatggagttggcaactgaacttttgagctgtggggccactgtttcagctgttgtgcttagcaggaaaggtggtttaatgtcagagcttgctaggagacggatcaaggtgcttgaggacaaatcagatctcagcttcaaaactgcaatgaaggctgatcttgtaattgctggttcagctgtctgtgcatcatggattgaacaatatattgatcatttcccagctggtgcaagccaagttgcctggtggattatggaaaatcgacgagagtactttgatcgttcaaaggatatattgcacagagtaaagatgttggttttttctttctgaatcacaatctaaacagtggcaaaaatggtgtgaagaggaaagcataaaactgagatccctccctgaaattgttgcattgtctgttaatgaagaactggcatttgtagctggtattccttcaacacttaacactccatcctttagtaccgagaaaatggttgagaaaaagcagttattgagggaatcagtccgaaaagaaatgggcctaactgataatgacatgcttgtgatatctctaagcagcatcaaccctgggaagggccagctattgcttcttgaatcagtaagctcagtacttgaacaaggacagttgcaagatgataagaaaatgaaaaaagtgtcaaatataaaggaaggcctatcttccctgactagaaagcatcgtattagaaaattgttgccattgatgaagaatgggaaagtagcttcaaatagtatctcaagcaattctttaagcagaaggaaacaagtgttgcctaatggcaaaggaacaattcaacaatctctcaaacttctcattggttctgttagatcaaagagtaacaaggcagattatgttaaaagccttctaagtttcttagaacaacatccaaacgcctcgacatcaattttttggactccagccacaactcgagttgcctcactttactctgctgcagatgtttatgttataaactctcaggggctgggagaaacatttggacgtgtgactatagaagcaatggcatatggtcttccggttcttggaacggatgctggaggaacacgggagattgttgagaacaatgttactggtcttcttcatcctgttggacatccggggaatgatgttcttgcacagaatctccggtttttactcaaaaaccagttggcaaggaagcaaatgggggtggaaggaagaaagaaggtgcagaagatgtatttgaagcaacacatgtataag

SEQ ID NO: 23539 - protein, 263 aa, Glycine max
MVEKKQLLRESVRKEMGLTDNDMLVISLSSINPGKGQLLLLESVSSVLEQGQLQDDKKMKKVSNIKEGLSSLTRKHRIRKLLPLMKNGKVASNSISSNSLSRRKQVLPNGKGTIQQSLKLLIGSVRSKSNKADYVKSLLSFLEQHPNASTSIFWTPATTRVASLYSAADVYVINSQGLGETFGRVTIEAMAYGLPVLGTDAGGTREIVENNVTGLLHPVGHPGNDVLAQNLRFLLKNQLARKQMGVEGRKKVQKMYLKQHMYK

SEQ ID NO: 23540 - protein, 248 aa, Glycine max
MGLTDNDMLVISLSSINPGKGQLLLLESVSSVLEQGQLQDDKKMKKVSNIKEGLSSLTRKHRIRKLLPLMKNGKVASNSISSNSLSRRKQVLPNGKGTIQQSLKLLIGSVRSKSNKADYVKSLLSFLEQHPNASTSIFWTPATTRVASLYSAADVYVINSQGLGETFGRVTIEAMAYGLPVLGTDAGGTREIVENNVTGLLHPVGHPGNDVLAQNLRFLLKNQLARKQMGVEGRKKVQKMYLKQHMYK

SEQ ID NO: 23541 - protein, 241 aa, Glycine max
MLVISLSSINPGKGQLLLLESVSSVLEQGQLQDDKKMKKVSNIKEGLSSLTRKHRIRKLLPLMKNGKVASNSISSNSLSRRKQVLPNGKGTIQQSLKLLIGSVRSKSNKADYVKSLLSFLEQHPNASTSIFWTPATTRVASLYSAADVYVINSQGLGETFGRVTIEAMAYGLPVLGTDAGGTREIVENNVTGLLHPVGHPGNDVLAQNLRFLLKNQLARKQMGVEGRKKVQKMYLKQHMYK

SEQ ID NO: 23542 - DNA, 1145 bp, Glycine max
agtggagtggaagtagtagcaagtacgtcgtatatgtggttgatcttttgctggttgtttgttttgttccttccaattgtcagatctgaatcaccggactcactcttcacactcactcacactgaatggcttctgaaggcgaccatcaccaccaccaccaccaccatcaagatcacgatcatcatcatcatgatcatgatcaccatcatcatcacgatggagagggagagaccaactcatgggtaggtaaggatgggaaggtgtaccatagccacgatggtctggcgccgcattctcacgaacccatttactcccccggctacttcaccagaagagctccaccgcttctcaacagaaacttcaacgaaagagccttcaccgtcggaatcggtggacccgtcggtactggcaaaacagctctcatgttggccctttgtgaactcttgcgcgaaaactacagtctcgcagctgtgacaaatgatatattcactaaagaggatggtgagttcttggtgaagcacaaagcacttcctgaggaaaggatacgcgctgtagaaactgggggttgcccacatgctgctattcgggaggacatcagtattaatcttggaccgctggaggagctttctaacctcttcaaagcagatatacttctttgtgaatctgggggagataacctggctgccaatttcagcagggaattggctgactatattatttacataatagacgtgtctggcggtgataaaattcctcggaaaggtggtcctggaatcacgcaagctgatctccttgtgataaacaagactgaccttgctcctgcaattggggctgatttggcagtcatgcagcgggatgctctgcggatgagagatggagggccatttgtctttgcacaggtgaagcataagattggagtagaagaaattgggaatcttgtcttgcaggcatgggaagcagccacagggaataagcgtcattaacatttctttgaaaaacggtttcctttgtgttgtatattttcttagcatgtttagtaataactccagaaacatgatgttcacgacgtggattcgagttcttatgttgtgtctgttcctgcatgttacagtatcaagttcataaacatgttactacttggacat

SEQ ID NO: 23543 - protein, 285 aa, Glycine max
MASEGDHHHHHHHHQDHDHHHHDHDHHHHHDGEGETNSWVGKDGKVYHSHDGLAPHSHEPIYSPGYFTRRAPPLLNRNFNERAFTVGIGGPVGTGKTALMLALCELLRENYSLAAVTNDIFTKEDGEFLVKHKALPEERIRAVETGGCPHAAIREDISINLGPLEELSNLFKADILLCESGGDNLAANFSRELADYIIYIIDVSGGDKIPRKGGPGITQADLLVINKTDLAPAIGADLAVMQRDALRMRDGGPFVFAQVKHKIGVEEIGNLVLQAWEAATGNKRH

SEQ ID NO: 23544 - protein, 186 aa, Glycine max
MLALCELLRENYSLAAVTNDIFTKEDGEFLVKHKALPEERIRAVETGGCPHAAIREDISINLGPLEELSNLFKADILLCESGGDNLAANFSRELADYIIYIIDVSGGDKIPRKGGPGITQADLLVINKTDLAPAIGADLAVMQRDALRMRDGGPFVFAQVKHKIGVEEIGNLVLQAWEAATGNKRH

SEQ ID NO: 23545 - DNA, 1182 bp, Glycine max
atatacaccccattgctacgaagggctatatagcataaacattttagtcttcattgcacaatgtcgacctcttccattaacgggtggtgcctctcttccatctccccagccaaaacctctctcaagaaggccacattaggcccttctgtcttcgcaaccagagaggatatggcaaaggaatacgagcaagctattgaagaactccagaaattgttgagggagaagagtgaactcaaagccacagctgctgagaaagtggagcagataacagcttctctgggaacatcatcatctgatggcatcccatcatcagaagcctcagacaggatcaaagctggtttcattcacttcaagaaggagaaatatgacaagaatccagctttgtatggtgaacttgccaaaggccagagccccaagtttatggtgtttgcttgctcagactcaagggtgtgcccatctcatgtgctagatttccaaccaggagaggcctttgtggtcagaaatgttgctaacattgtcccaccatatgaccagtcaaaatacgctggaactggggcagcagttgagtatgctgttttgcatcttaaggtgtctgagattgtggtcattggacacagtgcttgtggtggtattaaggggcttctgtctttcccatatgatggaacctactctactgattttattgaggagtgggtcaaaattggcttgcctgcaaaggcaaaggtgaagacacaacatggggatgcaccttttgctgagttgtgctcacactgtgagaaggaagctgtgaatgtttcccttggaaaccttctaacatacccatttgttagagatggcttggtgaacaagacattgtcactaaaaggaggatactatgactttgttaagggatcttttgagctctggggccttcagtttggccttgcatcctctttctccgtatgaacatcaaccattatcaatgacctcatcttggttccctaagttaaagatgtggccaccattctgcattggaagctataggggccatgcttagaggtcgtgtgtatctgcaatgaagaggcctagccaccttcatcaccatatgatatttataaaaatatatatatatgaaactatgaactgcgtttatgcatgtcggaaaatcttcttttgataagagtttggaaatcctcttgtaac

SEQ ID NO: 23546 - protein, 294 aa, Glycine max
MSTSSINGWCLSSISPAKTSLKKATLGPSVFATREDMAKEYEQAIEELQKLLREKSELKATAAEKVEQITASLGTSSSDGIPSSEASDRIKAGFIHFKKEKYDKNPALYGELAKGQSPKFMVFACSDSRVCPSHVLDFQPGEAFVVRNVANIVPPYDQSKYAGTGAAVEYAVLHLKVSEIVVIGHSACGGIKGLLSFPYDGTYSTDFIEEWVKIGLPAKAKVKTQHGDAPFAELCSHCEKEAVNVSLGNLLTYPFVRDGLVNKTLSLKGGYYDFVKGSFELWGLQFGLASSFSV

SEQ ID NO: 23547 - protein, 258 aa, Glycine max
MAKEYEQAIEELQKLLREKSELKATAAEKVEQITASLGTSSSDGIPSSEASDRIKAGFIHFKKEKYDKNPALYGELAKGQSPKFMVFACSDSRVCPSHVLDFQPGEAFVVRNVANIVPPYDQSKYAGTGAAVEYAVLHLKVSEIVVIGHSACGGIKGLLSFPYDGTYSTDFIEEWVKIGLPAKAKVKTQHGDAPFAELCSHCEKEAVNVSLGNLLTYPFVRDGLVNKTLSLKGGYYDFVKGSFELWGLQFGLASSFSV

SEQ ID NO: 23548 - protein, 174 aa, Glycine max
MVFACSDSRVCPSHVLDFQPGEAFVVRNVANIVPPYDQSKYAGTGAAVEYAVLHLKVSEIVVIGHSACGGIKGLLSFPYDGTYSTDFIEEWVKIGLPAKAKVKTQHGDAPFAELCSHCEKEAVNVSLGNLLTYPFVRDGLVNKTLSLKGGYYDFVKGSFELWGLQFGLASSFSV

SEQ ID NO: 23549 - DNA, 1377 bp, Glycine max
aggaatgtgtcactactgaactgtgcaatatgagtgcttgcaaaaccctttcatgtttctccctctcttcttcctcttccttcttcaaacccacccttctccaccctcgccaacgtctaaccctaactcggagatgttccacgtcagccctactcgaagaaccggaaccccaatctccgagcgttcagcacctcctcacgagtcccgacggcgtctccacgctgatgaagatggaccgcaagcctcttctccctcacgagccgcacgttcgctggttcccttacctcgacgcctaccgctgccgaaacggctgcgttttgagcagcgccgaggtcgtccaggccctcgcgccctgcatctccgacgaccggaggcagaggttcgggagcgtggttcggaaccggagctactcggtctgcctcgtcgtggaagggctctgcgacttcggcaacgtctccgccacgttccggtccgcggacgcgcttggcgtccagtccgtccacgtcgtgtcgtgtgacgccaacaaaaggtataaagataatcgccatgtgagcatgggtgcagagaaatggttggacattgaactgtgggactctacaaaggagtgctttaaaatgttgaaatcacgcggttatcgaattgcgacaactcatgtgggaatggatgcggtttctattcatgacttagattggtcctgcccaactgcaatcgtggttgggaatgaaaataggggtattagtgatgaggcattggagctgtcagatttgcattgcagtattcctatggcaggaatggtggactctttcaatgtttcagttgctgcgggaatcctcatgcaccactctgtttgtgatagaatatctcgtatgggccgtcatggtgatctaacagtggaagaatgccagattctacttgcagagttttctctgcgccatagcaagagttcgattagtattgttgaagattatgcaatgcgtaaagcagcgacattgacctaacagcaataacaggaagtcaaacttcttctgactgtgcttggctgcttgcctgtacttggcaaggagacaaaccagagactagattgtctctgattgattgaatgattcctacaaactagcattagcttatgcatgctgtgcaaggctcacagatgacaatggggaccttaccaacacccagcttcttggactatagaatatttccttaatgatgtgcttactagccccactttacttagcaatgggggaatgatgctgtcaaaagtgcaattgcaattttatttatgtggatttttcgggccttacagtatctaatggtttttatttggatgagaaaagaaaatagaaaagggaaattttttacctcctatttttaagc

SEQ ID NO: 23550 - protein, 331 aa, Glycine max
ECVTTELCNMSACKTLSCFSLSSSSSFFKPTLLHPRQRLTLTRRCSTSALLEEPEPQSPSVQHLLTSPDGVSTLMKMDRKPLLPHEPHVRWFPYLDAYRCRNGCVLSSAEVVQALAPCISDDRRQRFGSVVRNRSYSVCLVVEGLCDFGNVSATFRSADALGVQSVHVVSCDANKRYKDNRHVSMGAEKWLDIELWDSTKECFKMLKSRGYRIATTHVGMDAVSIHDLDWSCPTAIVVGNENRGISDEALELSDLHCSIPMAGMVDSFNVSVAAGILMHHSVCDRISRMGRHGDLTVEECQILLAEFSLRHSKSSISIVEDYAMRKAATLT

SEQ ID NO: 23551 - protein, 322 aa, Glycine max
MSACKTLSCFSLSSSSSFFKPTLLHPRQRLTLTRRCSTSALLEEPEPQSPSVQHLLTSPDGVSTLMKMDRKPLLPHEPHVRWFPYLDAYRCRNGCVLSSAEVVQALAPCISDDRRQRFGSVVRNRSYSVCLVVEGLCDFGNVSATFRSADALGVQSVHVVSCDANKRYKDNRHVSMGAEKWLDIELWDSTKECFKMLKSRGYRIATTHVGMDAVSIHDLDWSCPTAIVVGNENRGISDEALELSDLHCSIPMAGMVDSFNVSVAAGILMHHSVCDRISRMGRHGDLTVEECQILLAEFSLRHSKSSISIVEDYAMRKAATLT

SEQ ID NO: 23552 - protein, 257 aa, Glycine max
MKMDRKPLLPHEPHVRWFPYLDAYRCRNGCVLSSAEVVQALAPCISDDRRQRFGSVVRNRSYSVCLVVEGLCDFGNVSATFRSADALGVQSVHVVSCDANKRYKDNRHVSMGAEKWLDIELWDSTKECFKMLKSRGYRIATTHVGMDAVSIHDLDWSCPTAIVVGNENRGISDEALELSDLHCSIPMAGMVDSFNVSVAAGILMHHSVCDRISRMGRHGDLTVEECQILLAEFSLRHSKSSISIVEDYAMRKAATLT

SEQ ID NO: 23553 - DNA, 2018 bp, Glycine max
acatttctcactctcgtctcgaagatcgagatatctatttagatctcagaaaaacagtgtttcatttcaattcattcagtcttattattattagggtttggcgattcagagagaaagagaaatgggagaacgaaaaggaatcccaattgctctggggctcttggcgatgctcctcttcttcattgcttcttcctcttcctctcacctcgttcgtgcttccgatgacgccgacgacgcgatcttctacgagtcattcgacgaggattttgacggacggtggattgtgtccgacaacgaggattacaacggtgtctggaagcatgctaagagtgatgggcatgatgattatggacttcttattagtgaacaagcccggaaatatgctatagtcaaaaaacttgacgagcctgtcagtcttaaggatggaacagttgttcttcagtttgagactcgccttcagaatggcctcgaatgtggtggcgcatatattaaatatcttcgaccccaggagagcggatggaaaccaaaggaatttgataacgaatctccatattctatcatgtttggtcctgataagtgtggtgctacaaacaaggtgcacttcattttcaagcataagaatccaaagagtggggagtatgttgaacaccatctcaagtatcctccttctgtcccatctgacaaactaactcatgtatacactgcaattctgaagcccgataatgaattgcaaattttgattgatggtgaggagaagaaaaaggcaaatttcttgtcttctgaggactttgagcctcctcttatcccttccaagacaatccctgatcctgatgataagaaacctgaggactgggacgaaagagccaaaatcccggacccaagtgctgtgaagccagatgactgggatgaggatgcacccatggaaattttagatgaagaagcagagaaacctgaaggatggttggatgacgagccagaggaaattgatgacccagaggcgacaaaacccgaagactgggatgatgaggaggatggtgaatgggaagccccaaagattgaaaacccgaagtgtgaggcagcccctggttgtggtgaatggaagaggccaatgaagaggaatccagcttataagggaaagtggagtgctccttacatcgataaccccaattacaagggcatatggaagcctcgcgagattccaaaccctgaatactttgaactcgagaaacctgattttgagcccattgctgctcttggcattgagatttggacaatgcaggatggcatcctatttgacaatattctgatagctaacgatgataaagttgcagaatcctatcgggagaccacatggaagcccaagtttaccattgagaaagaaaaacagaaggctgaagatgaggctgcaactggttcagatggtattgcaggcttccagaagaaggtatttgacctcttgtacaagattgcagacattcccttcctgagcgaccacaaatctaagatatacgatctcattgagaaagctgagaaacagccaaatctcactattggaattcttgtagcggttgtggttgtcttcgtgtcaattttcttcaggctcatatttggtggcaagaaacctgcaaaggtggagaagaaaccagaacgcacagaagcttccaataaccaaggtggtgcagagaatgaagaaaacaaagagaaagaggaagcatctaatgctccgcgtcggaggccaaggcgagaagattgaaatggttgaatcttttaaatggcgccctgtcaactatcatcaccacagctacagataaattttgggctttagtttcattttaggtgcactctgttttcattcgtttccttttttccctttttttttaagaaaaagaaaagattatttgcttcaggggtgtagatcttctcctgtttttggagacttgagtgtttgagctagtagttgaagttgtacaattattttttgtctttatttttctattaatggatcctgtttttaacac

SEQ ID NO: 23554 - protein, 543 aa, Glycine max
MGERKGIPIALGLLAMLLFFIASSSSSHLVRASDDADDAIFYESFDEDFDGRWIVSDNEDYNGVWKHAKSDGHDDYGLLISEQARKYAIVKKLDEPVSLKDGTVVLQFETRLQNGLECGGAYIKYLRPQESGWKPKEFDNESPYSIMFGPDKCGATNKVHFIFKHKNPKSGEYVEHHLKYPPSVPSDKLTHVYTAILKPDNELQILIDGEEKKKANFLSSEDFEPPLIPSKTIPDPDDKKPEDWDERAKIPDPSAVKPDDWDEDAPMEILDEEAEKPEGWLDDEPEEIDDPEATKPEDWDDEEDGEWEAPKIENPKCEAAPGCGEWKRPMKRNPAYKGKWSAPYIDNPNYKGIWKPREIPNPEYFELEKPDFEPIAALGIEIWTMQDGILFDNILIANDDKVAESYRETTWKPKFTIEKEKQKAEDEAATGSDGIAGFQKKVFDLLYKIADIPFLSDHKSKIYDLIEKAEKQPNLTIGILVAVVVVFVSIFFRLIFGGKKPAKVEKKPERTEASNNQGGAENEENKEKEEASNAPRRRPRRED

SEQ ID NO: 23555 - protein, 528 aa, Glycine max
MLLFFIASSSSSHLVRASDDADDAIFYESFDEDFDGRWIVSDNEDYNGVWKHAKSDGHDDYGLLISEQARKYAIVKKLDEPVSLKDGTVVLQFETRLQNGLECGGAYIKYLRPQESGWKPKEFDNESPYSIMFGPDKCGATNKVHFIFKHKNPKSGEYVEHHLKYPPSVPSDKLTHVYTAILKPDNELQILIDGEEKKKANFLSSEDFEPPLIPSKTIPDPDDKKPEDWDERAKIPDPSAVKPDDWDEDAPMEILDEEAEKPEGWLDDEPEEIDDPEATKPEDWDDEEDGEWEAPKIENPKCEAAPGCGEWKRPMKRNPAYKGKWSAPYIDNPNYKGIWKPREIPNPEYFELEKPDFEPIAALGIEIWTMQDGILFDNILIANDDKVAESYRETTWKPKFTIEKEKQKAEDEAATGSDGIAGFQKKVFDLLYKIADIPFLSDHKSKIYDLIEKAEKQPNLTIGILVAVVVVFVSIFFRLIFGGKKPAKVEKKPERTEASNNQGGAENEENKEKEEASNAPRRRPRRED

SEQ ID NO: 23556 - protein, 397 aa, Glycine max
MFGPDKCGATNKVHFIFKHKNPKSGEYVEHHLKYPPSVPSDKLTHVYTAILKPDNELQILIDGEEKKKANFLSSEDFEPPLIPSKTIPDPDDKKPEDWDERAKIPDPSAVKPDDWDEDAPMEILDEEAEKPEGWLDDEPEEIDDPEATKPEDWDDEEDGEWEAPKIENPKCEAAPGCGEWKRPMKRNPAYKGKWSAPYIDNPNYKGIWKPREIPNPEYFELEKPDFEPIAALGIEIWTMQDGILFDNILIANDDKVAESYRETTWKPKFTIEKEKQKAEDEAATGSDGIAGFQKKVFDLLYKIADIPFLSDHKSKIYDLIEKAEKQPNLTIGILVAVVVVFVSIFFRLIFGGKKPAKVEKKPERTEASNNQGGAENEENKEKEEASNAPRRRPRRED

SEQ ID NO: 23557 - DNA, 1305 bp, Glycine max
attacttattagtatacctctcactctaaagttgtcttagtctctctattcttcacattcatcagcaggtcaggttggctggcaagttattgaaatgaagaataagaatggaaaacttaaattgacgtttgagaagttcacatggacgattagtaacttctctaaattggactccaagaaactgtactctgagaagttttagctcgatcaccatacatggaagattcttgcctatccaaaggggactgatgtgggctacttgtcaatttatttagatgctggtgttgttaatttgccttttggctggagcaaatttgcaaatttcaagttcgctttaattaatcaggccaatgacaaaatgactaaaataaaagaaactacaaaacagttcaatgcaacagaaattgcttggggttttccaaaattcatacacttagatgaacttaatgattctagcagtgggtttatggtgaatgatacttgtataattgaagttcagattttggtcagcaagtcagaacaggagaatcaagtagatcaacaagttaacaagattgatgataatcatgatattgataagcctattaaacacacagatatcttcttacccaaggaaacgttcccaacctcatttggtgagctagttgatttccaaggcttagggaaaatagaacaagcttttgttccattgttagaagaagtattttctcgacatccctcactcattgattgtcagcaaaaaagaagtggcaggtttgttgaatgggcattcacagctttgggtcgagttttacattttctcaagactaaaaaggtgaaagatatggatggtgatgcttgcaataatcttcaaattttttgggaggaattgaagatgtttagatttgatttgacttggctggaacctcatgttcaatctgccttggctatgaaaacttgtattgagagagctgttcgggtgaaaaggacgagggaggatgtgactgctttagagatggaaacaaagaggttgaaggcaaagatgattcaagcagaggtagatcttgaaatagcaagaagagacttcgtgaaagcaaaagaaggctttgaagagtgcgatttggatgctgaactaggctatggagaaccataatttgatattatgtcacttgttgaagaatatttcagtagagctagcctacatgttttggatgagcattcctaaacacctgagtgttcttctagacatcaaatcatcaatgaacttgaaagtactcaaactcaaagcagaaattgattattctgttaactgaaatgttgtttctg

SEQ ID NO: 23558 - protein, 257 aa, Glycine max
MTKIKETTKQFNATEIAWGFPKFIHLDELNDSSSGFMVNDTCIIEVQILVSKSEQENQVDQQVNKIDDNHDIDKPIKHTDIFLPKETFPTSFGELVDFQGLGKIEQAFVPLLEEVFSRHPSLIDCQQKRSGRFVEWAFTALGRVLHFLKTKKVKDMDGDACNNLQIFWEELKMFRFDLTWLEPHVQSALAMKTCIERAVRVKRTREDVTALEMETKRLKAKMIQAEVDLEIARRDFVKAKEGFEECDLDAELGYGEP

SEQ ID NO: 23559 - protein, 221 aa, Glycine max
MVNDTCIIEVQILVSKSEQENQVDQQVNKIDDNHDIDKPIKHTDIFLPKETFPTSFGELVDFQGLGKIEQAFVPLLEEVFSRHPSLIDCQQKRSGRFVEWAFTALGRVLHFLKTKKVKDMDGDACNNLQIFWEELKMFRFDLTWLEPHVQSALAMKTCIERAVRVKRTREDVTALEMETKRLKAKMIQAEVDLEIARRDFVKAKEGFEECDLDAELGYGEP

SEQ ID NO: 23560 - DNA, 2220 bp, Glycine max
cacttatcaagaaaccctaatacagatacagtttccctctctctttctcaagcaatccaaagtcacaacccacacacactgtacgggttgtgcagatcagagggtgttggtacactctatctatcttttttctcccataagcagaaacaccctctctaatgtttctctctttgtcccatacccatacctcattctgcaagcgtccccttaaataataaatacaccgcgtgtgtgtgtgtatgtgagagagagagagtaagaaataaagcaaatctctctgctgtttctcttacgtctttctattttgggctctcatggattcgggtaacagtgggagtatgcaatcttccagcaccgccggtgatgaagagtacgattcacgcgccgacccatctttgtcgtcatcaatctctgcgttctttaatagtaactcccatccttcagctccaccacaaccaacaacgttaacaaaccacgttggtcctcctttctctactcagcaccaccacgtgttcgaccctttatcatccaattacttggatccgacacaaagatcgccgcaatcaaaccaaatcctcaacctcgacatggtgcggtccaaggttgccgccagatccggacccgattttagctccttcataccttcatcttccccacacaacaacaacaaccaagcttttctgttaactcaattgggaggaggaggagttaacaacgttggtgcttttcccagtaccactctccctccagaaagtggaggaggcggattagtaatgaatgaacaagtaaacagtagcaacaccaacaaaaacatggttcgaaacccgaagaaaaggtcaagagcttctaggcgtgcacccaccactgttctcactacggacaccacgaatttccgagccatggttcaggaattcactggcatcccagcacctcctttcacttcctcctcctcgtctttcccaagaacaaggttagatctctttgccacctctaatgcttcttcttcatccattattagagaacaaacaccttcttatcttcttcgcccctttgcacacaaagtccaagctcaagtaccttcttcaatcccaccaccctcttcctttcaacccatgttgaacaactaccaccaccaccaccaccagcataacccaattctcagcttccaatccattctccaaccgcatcaactcattggttctaaaactcaacaacaaccctccttggaaataccgcctagtgctcttgggttggaggaattaggattgaaccatgctcatcatcaaaacatcaacatgcgttcgtcttcatcggatggaacattgtcaagggtcaacaacgacaataacaacatgcgtggtccttcggcagattgggcccaggcccaggcccaaagaattgataacaatgatggaggacttttggggtctcttactggtgccaccttaaactacagaagcaatattgtttcggatcagcgagtcaaggttactaataattcggattttcatggagaaaaaggaccggaatgtgttgtggctgtacgaagcgaaggtatggtcgaatcgtggattaattgttcttctgattgagagcagaaataagcaaccatcaaatgggaaaagaatatatgaacaaagaaaaaaagggagattcataaatatattttcctcacacggtttaaagcaactgatgatggtagtatactaattcatgagagacagaatcttggtaattggtatcctcagcttaaccatgaccgtcaaattaattaaacacctttttcttcttcttttatttggttctttgtgtccattagaattatgcgtaaataactagcagctaccttgtctttctctactcctttattttattttatttgttttcttctcaaaatctcaattgtggttttgatcgatattatatacagctatatacgaattagaatcctggagggttttcgtttcgacgtacgtttgtttcatcgtaatttgtgtctctatttggtaaactagagagctacatacatacaatggcagcatcatatgatcagtttgtggttcgtgtcactgtatatggattttggttttgactacttgtgtgaaattatggttcagagaatgtacaatgtgcacagcatagaatgaacaacacagacaaaactgtatgtatcctctcttttcctgttttgtcgcaccttctattctctgattttacctc

SEQ ID NO: 23561 - protein, 425 aa, Glycine max
MDSGNSGSMQSSSTAGDEEYDSRADPSLSSSISAFFNSNSHPSAPPQPTTLTNHVGPPFSTQHHHVFDPLSSNYLDPTQRSPQSNQILNLDMVRSKVAARSGPDFSSFIPSSSPHNNNNQAFLLTQLGGGGVNNVGAFPSTTLPPESGGGGLVMNEQVNSSNTNKNMVRNPKKRSRASRRAPTTVLTTDTTNFRAMVQEFTGIPAPPFTSSSSSFPRTRLDLFATSNASSSSIIREQTPSYLLRPFAHKVQAQVPSSIPPPSSFQPMLNNYHHHHHQHNPILSFQSILQPHQLIGSKTQQQPSLEIPPSALGLEELGLNHAHHQNINMRSSSSDGTLSRVNNDNNNMRGPSADWAQAQAQRIDNNDGGLLGSLTGATLNYRSNIVSDQRVKVTNNSDFHGEKGPECVVAVRSEGMVESWINCSSD

SEQ ID NO: 23562 - protein, 417 aa, Glycine max
MQSSSTAGDEEYDSRADPSLSSSISAFFNSNSHPSAPPQPTTLTNHVGPPFSTQHHHVFDPLSSNYLDPTQRSPQSNQILNLDMVRSKVAARSGPDFSSFIPSSSPHNNNNQAFLLTQLGGGGVNNVGAFPSTTLPPESGGGGLVMNEQVNSSNTNKNMVRNPKKRSRASRRAPTTVLTTDTTNFRAMVQEFTGIPAPPFTSSSSSFPRTRLDLFATSNASSSSIIREQTPSYLLRPFAHKVQAQVPSSIPPPSSFQPMLNNYHHHHHQHNPILSFQSILQPHQLIGSKTQQQPSLEIPPSALGLEELGLNHAHHQNINMRSSSSDGTLSRVNNDNNNMRGPSADWAQAQAQRIDNNDGGLLGSLTGATLNYRSNIVSDQRVKVTNNSDFHGEKGPECVVAVRSEGMVESWINCSSD

SEQ ID NO: 23563 - protein, 334 aa, Glycine max
MVRSKVAARSGPDFSSFIPSSSPHNNNNQAFLLTQLGGGGVNNVGAFPSTTLPPESGGGGLVMNEQVNSSNTNKNMVRNPKKRSRASRRAPTTVLTTDTTNFRAMVQEFTGIPAPPFTSSSSSFPRTRLDLFATSNASSSSIIREQTPSYLLRPFAHKVQAQVPSSIPPPSSFQPMLNNYHHHHHQHNPILSFQSILQPHQLIGSKTQQQPSLEIPPSALGLEELGLNHAHHQNINMRSSSSDGTLSRVNNDNNNMRGPSADWAQAQAQRIDNNDGGLLGSLTGATLNYRSNIVSDQRVKVTNNSDFHGEKGPECVVAVRSEGMVESWINCSSD

SEQ ID NO: 23564 - DNA, 1365 bp, Glycine max
ctctcacgcacacatggtgctgccactgtcactcttctcttctcctttctgcttcgccgattctctatttttgcgcgcaatcgagtaacttgattgcatgtggtcctaaacttgcaggatggattgtatgctttgggccagtcgttaatgataacttgaggtctggatgatgctttctgattggttgtttacatattgtaattcagaatgtggaactttgcatcgaattgcattgctggaactgtgggactgaaaaatgattcaaagcctactcattctgcttcggaatgttctgatgatgaaaactctgttataggcagagaggaagggctggaatgcccaatatgctgggaatctttcaatattgttgaaaatgtgccctatgttttatggtgtggccacaccctttgtaaaaattgtatcctcggactgcagtgggctgttgtgaaatttccaacactgcctgttcaacttcccctttttatctcctgtccatggtgcaaccttctgtctttccgtttagtttaccggggaaaccttaaattccctcgcaaaaactactttcttctttggatggttgagagcatgaatggtgatagagggaaatcgcattcacctttctgtggtgataatcagcaacactcaattaaagataatttaaccatgggaagccaagtaagccatggaaaccttcggagggggctagttcgccatccagagacatcgagttccaaccaatatcatggtaatactggtaatcacctcaatacagaaagatttcatgtttatcttcggaagtcactgatcttctttgtccagttgacggctaagttcccattggtcattatattccttttaattgtcttatatgcaataccagcaagtgcagccattttggccctgtatgtacttgttacaattctgtttgccctcccatcatttctcattttgtacttctcatatcctagtttggattggcttgtgagggaaattatcacttaagattgtgaactagtgtaggctccaactttgcaaacattaagacaacagcttatatcttctactttgtaattatccgacttctcctttagaagctgtcatttatcttcccatatagggtcgttatcaatatatgtatacttgagtcttgattgtagctcaggtcgaacttggctagttggtggatgaaatgtcagtttttggcattagcttcgatgtcaatcagggcagtgggatagggtaatgataaatgcttgtgccctttcctggtggcaagaatttgtttgattaatgccatgttttatttcaattctgattatacttatatttgtaaattgtatataataattgagttgtttgtttgac

SEQ ID NO: 23565 - protein, 264 aa, Glycine max
MWNFASNCIAGTVGLKNDSKPTHSASECSDDENSVIGREEGLECPICWESFNIVENVPYVLWCGHTLCKNCILGLQWAVVKFPTLPVQLPLFISCPWCNLLSFRLVYRGNLKFPRKNYFLLWMVESMNGDRGKSHSPFCGDNQQHSIKDNLTMGSQVSHGNLRRGLVRHPETSSSNQYHGNTGNHLNTERFHVYLRKSLIFFVQLTAKFPLVIIFLLIVLYAIPASAAILALYVLVTILFALPSFLILYFSYPSLDWLVREIIT

SEQ ID NO: 23566 - protein, 142 aa, Glycine max
MVESMNGDRGKSHSPFCGDNQQHSIKDNLTMGSQVSHGNLRRGLVRHPETSSSNQYHGNTGNHLNTERFHVYLRKSLIFFVQLTAKFPLVIIFLLIVLYAIPASAAILALYVLVTILFALPSFLILYFSYPSLDWLVREIIT

SEQ ID NO: 23567 - protein, 138 aa, Glycine max
MNGDRGKSHSPFCGDNQQHSIKDNLTMGSQVSHGNLRRGLVRHPETSSSNQYHGNTGNHLNTERFHVYLRKSLIFFVQLTAKFPLVIIFLLIVLYAIPASAAILALYVLVTILFALPSFLILYFSYPSLDWLVREIIT

SEQ ID NO: 23568 - DNA, 1217 bp, Glycine max
ccgtatcttctaataatattctacagccacaagcccaagtaatggcagagaacctgtctcagcacctccttcagaaatcacacaacaatcgagaagaccaaacacagcagcagcagcagcagcggcacacttatcaagatacagttttacttcaaagtgatcagctccatcagaggcaacactctggtctaccttcaccgtcatattcaaaaccagatttcttagattcaagcatgaagttccctgcttcagtttcaccaggacaaaacattcttggttcactttgtcctgaagggagtggtaatctcttgaatttatccagaagtggtcagtccatgctgactgaacagttacctcaacaatcatgggccccaaaattcacaccgttgcaggttaatgcttttggcaactcaatgcaacatgtgcagtattctggaaaagataccgcaatggtgccaccacattgtaactcggacacccaaaatcctattctatttggggtcaacatcgattcatctggtcttctgctccctacgactgtcccgcgttatactactgcatcagcggatagtgatgcatcagcaatgccattaggagagtctggattccagtctcctttatatccttgtggtcaagattcatcagagttggtgcaaagtgcagggcaagttgaccctcaaaaccagacacgaacattcgtcaaggtttacaaatcagggtcagttgggcgctcacttgacatctcccggttcagcagttatcatgagctgcgggaggagttggcacagatgtttggtattgaggggaaattagaagaccctcttagatcaggctggcagcttgtattcgtcgacagggagaacgatgttcttctccttggagacgatccgtgggaatcatttgtcaataatgtatggtatatcaaaatactttcacctgaagatatccataaaatgggagaacaagccctggaatcccttggtccaagtccaggacagaggctgaatagcactggtgcagattctcatgaaattgtttcaggactaccatcaattggctcccttgaatactgagagaattttaacatgtatttttctctcaggtcctacggttaagaagactattacatatccacatgtttagtacttctgtttgaacactacttttcgaccttgcatatctgaatcaatatatactgtattgtctgtttcactttc

SEQ ID NO: 23569 - protein, 356 aa, Glycine max
VSSNNILQPQAQVMAENLSQHLLQKSHNNREDQTQQQQQQRHTYQDTVLLQSDQLHQRQHSGLPSPSYSKPDFLDSSMKFPASVSPGQNILGSLCPEGSGNLLNLSRSGQSMLTEQLPQQSWAPKFTPLQVNAFGNSMQHVQYSGKDTAMVPPHCNSDTQNPILFGVNIDSSGLLLPTTVPRYTTASADSDASAMPLGESGFQSPLYPCGQDSSELVQSAGQVDPQNQTRTFVKVYKSGSVGRSLDISRFSSYHELREELAQMFGIEGKLEDPLRSGWQLVFVDRENDVLLLGDDPWESFVNNVWYIKILSPEDIHKMGEQALESLGPSPGQRLNSTGADSHEIVSGLPSIGSLEY

SEQ ID NO: 23570 - protein, 343 aa, Glycine max
MAENLSQHLLQKSHNNREDQTQQQQQQRHTYQDTVLLQSDQLHQRQHSGLPSPSYSKPDFLDSSMKFPASVSPGQNILGSLCPEGSGNLLNLSRSGQSMLTEQLPQQSWAPKFTPLQVNAFGNSMQHVQYSGKDTAMVPPHCNSDTQNPILFGVNIDSSGLLLPTTVPRYTTASADSDASAMPLGESGFQSPLYPCGQDSSELVQSAGQVDPQNQTRTFVKVYKSGSVGRSLDISRFSSYHELREELAQMFGIEGKLEDPLRSGWQLVFVDRENDVLLLGDDPWESFVNNVWYIKILSPEDIHKMGEQALESLGPSPGQRLNSTGADSHEIVSGLPSIGSLEY

SEQ ID NO: 23571 - protein, 279 aa, Glycine max
MKFPASVSPGQNILGSLCPEGSGNLLNLSRSGQSMLTEQLPQQSWAPKFTPLQVNAFGNSMQHVQYSGKDTAMVPPHCNSDTQNPILFGVNIDSSGLLLPTTVPRYTTASADSDASAMPLGESGFQSPLYPCGQDSSELVQSAGQVDPQNQTRTFVKVYKSGSVGRSLDISRFSSYHELREELAQMFGIEGKLEDPLRSGWQLVFVDRENDVLLLGDDPWESFVNNVWYIKILSPEDIHKMGEQALESLGPSPGQRLNSTGADSHEIVSGLPSIGSLEY

SEQ ID NO: 23572 - DNA, 1313 bp, Glycine max
aaaaacaaccatttttattttagttttcctaccatttaaacttgtacttgtaattgcagttgtcacaatagtaattatctatacaatgaaaatgtagcttgtctcatcacttccatcctaagaagctgtaagtttttaatctcaagtttttgggtctcctggtgaaaacccatgttgaactagacccttttctggccagaatctcaccagtattaggcaactgtatctagattaatggtgtagtgtgctgatgccactgcttaacctgtaagaattgagcatgtcatggtgcggtctctcatgacccttggatccttccttgaaaagagttgataatctatcaatcattgttcttgattggaacaaattatcatcccagtgcccgaaacattttcccattacaaaaatctcaccatccttagtcttaataattgcgggttgactggaacatttccacataagatcttcaacattggaacattgtcggttattgacatatcttggaacaacaatctccatggtttcttgactgaatttccatccaggggatctccatgggaatccgaaaagaaaagaatggttatttatgccgcataacatttgtctgaagctccattcttcttagacaataatatcctttcatctcttccatgtcttcttcctctagttatgactacgatctccatgatgatgacgagatggactttctgcgtgatcggtacaaggaggacaacataaactatgatgtgtttttgagtttcagaggggaagacacgcgtgcttctttcacttcacatctctatacagctcttcacaacttgggaatctttgttttcaaggatgatgagacacttccaaggggaaataaaatttcaccctcgctgcggttagcaattgaagagtctcgactttctgttgttattttctctagaaactatgcagagtcgcggtggtgtttgaaagagttgcagaaaataatggagtgtcacagaacaacagggcaagtggtagtgccagtgttctatgatgtagatccctctgaagtacgtcatcaaacaggccactttggaaaagcatttcgaaaccttgagaacaaacttttaaaaggggaagaggaagaggaagagctacaacgatggtggaagacgcttgctgaggccgctggcatctcagggctttctgtagtccgaaattgcaagtaataaaaacacttccagctttctcgtatttttactgaacattgtctctggaattttagtttatgaaattcataacatgtacatgtatgaagtggtcaaagtgagattttggat

SEQ ID NO: 23573 - protein, 183 aa, Glycine max
MSSSSSYDYDLHDDDEMDFLRDRYKEDNINYDVFLSFRGEDTRASFTSHLYTALHNLGIFVFKDDETLPRGNKISPSLRLAIEESRLSVVIFSRNYAESRWCLKELQKIMECHRTTGQVVVPVFYDVDPSEVRHQTGHFGKAFRNLENKLLKGEEEEEELQRWWKTLAEAAGISGLSVVRNCK

SEQ ID NO: 23574 - protein, 167 aa, Glycine max
MDFLRDRYKEDNINYDVFLSFRGEDTRASFTSHLYTALHNLGIFVFKDDETLPRGNKISPSLRLAIEESRLSVVIFSRNYAESRWCLKELQKIMECHRTTGQVVVPVFYDVDPSEVRHQTGHFGKAFRNLENKLLKGEEEEEELQRWWKTLAEAAGISGLSVVRNCK

SEQ ID NO: 23575 - DNA, 1101 bp, Glycine max
aacttcaatacaaaaccaaaacagtaaagctaacttcaacacctttaattttctaaaagtaattcagcggctgaataccaagcggagaagatgagtcaggagcagccacggcgtcccaaaggccaaaaccccatcaaatacggcgacgtttttgtcgtctccggcgaccttgcacagaagcccgtcgcaccggaagatgctgccatgatgcaaagcgcggaaactcgagtgctcggacaaacccaacccggcggagcagcttccgtcatgcaatctgccgccaccaggaatgaacaggctggccttgtcggtcaccgggacgtcaccgacgttaccggcgaccgtggcgtcacagtcacagaaactaaagtccctggaagacgcattataaccgaggctgttggtggccaggttgtggagcagtatgtggaggcaactccggttgaggcagggcgaagcagtgcaattaaggagaatgccataacaataggagaggcattggaggcgacggcacagactgtgggtcagaaagcggtggatcagagtgacgcctccgcgattcaggcggcggaggtgagagcaacgggaagtaacgttataacgccgggtggacttgcggctatggctcaatcagctgctgcttataatgctgactgcaagcttgaccaggacaaggtcaagctcgccgacattttggccggagccacagccaagttgcccgcggacaaggccgccacactgcaagatgctgaaggtgtagcgtgtgctgaggtgaggaacaaccctgatgccaccgccactcccggtggcgtagccgcttctgttgcggctgctgctaggctcaatgaaaatgttaagtaacgagtcatgttatgtgtcttgataatcatacttttgtttcatgatgtgtggtgttgatgtgttatagtctatagtgtattaataagtgtaagtggtgcaacatcttgtttttctttcttgtactctttgtgagttatattaattactggttttaaggactctacttaaggtgatgtatgtatactatgcgctatatgcatttctgtggttatcagttaataatatgtgctccaatcttgt

SEQ ID NO: 23576 - protein, 256 aa, Glycine max
MSQEQPRRPKGQNPIKYGDVFVVSGDLAQKPVAPEDAAMMQSAETRVLGQTQPGGAASVMQSAATRNEQAGLVGHRDVTDVTGDRGVTVTETKVPGRRIITEAVGGQVVEQYVEATPVEAGRSSAIKENAITIGEALEATAQTVGQKAVDQSDASAIQAAEVRATGSNVITPGGLAAMAQSAAAYNADCKLDQDKVKLADILAGATAKLPADKAATLQDAEGVACAEVRNNPDATATPGGVAASVAAAARLNENVK

SEQ ID NO: 23577 - protein, 218 aa, Glycine max
MMQSAETRVLGQTQPGGAASVMQSAATRNEQAGLVGHRDVTDVTGDRGVTVTETKVPGRRIITEAVGGQVVEQYVEATPVEAGRSSAIKENAITIGEALEATAQTVGQKAVDQSDASAIQAAEVRATGSNVITPGGLAAMAQSAAAYNADCKLDQDKVKLADILAGATAKLPADKAATLQDAEGVACAEVRNNPDATATPGGVAASVAAAARLNENVK

SEQ ID NO: 23578 - protein, 217 aa, Glycine max
MQSAETRVLGQTQPGGAASVMQSAATRNEQAGLVGHRDVTDVTGDRGVTVTETKVPGRRIITEAVGGQVVEQYVEATPVEAGRSSAIKENAITIGEALEATAQTVGQKAVDQSDASAIQAAEVRATGSNVITPGGLAAMAQSAAAYNADCKLDQDKVKLADILAGATAKLPADKAATLQDAEGVACAEVRNNPDATATPGGVAASVAAAARLNENVK

SEQ ID NO: 23579 - DNA, 1159 bp, Glycine max
gagagtcacctctcaaattgaattcctagctagtacttaacataatgcagtgagattcacactcccaacgcttcctctttctcccttaaatatcttcattcatctcaacaccaccaccacttccccacttttgttactcagtatgcttggagcccttctcctcaacgccaacttcaagattcatttctcactcatatcatgccaagcccgtgtccccttacccgtcaagcccgcaccgctcagaatgccctctccccactacccccactgggcctccttgcaggccgacattgaagcccacctcaaacaaaccattcccctcaaagaacccctcgaggtcttcgagcccatgctccacctcgccttctccgccccccggaccaccgtcccggccctatgcctcgccgcctgcgagcttgtcggcggtcaccgccaacaagccatggccgcggcatcggccttgttactcaacctcgccaatgcacacgcccatgaacacctaaccgacgggcccatgtacggccccaacatagaactcctcaccggggacgggattgttccgttcgggtttgagttgctggcgaggcccgacgggccagcaagtgcgagcccggagcgagtcctacgtgtgatgattgagatatcacgtgcggtgggttcggtggggttgcaagacgcgcagtacgtgaagaaaacgttgtgggacggtggtgaggaggtgcaaaacgtggaaagcatgcagcgctttgtattggagaaaagggacggtgggttgcatgcatgtggggctgcgtctggtgccatcttgggaggtgggagtgaggaccaaattgaaaggttgagaaattttggatttcatgtggggatgatgaggggaatgctacaaatggggttcatggaaaaacatgtgcaagaggagagacatcttgcactcaaggaactgcaatttttcatggacagagatgttcatgttatttctagttttatttattaatttctagccacttttaagttttctatatatctggaatctcaagtgggttgttgtccatcttcatatgtacggaacatgatcaactgtgcggttcatagacaataattgcacgatcatgtgtttcaaattaaatctgatggtatatatagcagaagtttttaactt

SEQ ID NO: 23580 - protein, 283 aa, Glycine max
MLGALLLNANFKIHFSLISCQARVPLPVKPAPLRMPSPHYPHWASLQADIEAHLKQTIPLKEPLEVFEPMLHLAFSAPRTTVPALCLAACELVGGHRQQAMAAASALLLNLANAHAHEHLTDGPMYGPNIELLTGDGIVPFGFELLARPDGPASASPERVLRVMIEISRAVGSVGLQDAQYVKKTLWDGGEEVQNVESMQRFVLEKRDGGLHACGAASGAILGGGSEDQIERLRNFGFHVGMMRGMLQMGFMEKHVQEERHLALKELQFFMDRDVHVISSFIY

SEQ ID NO: 23581 - protein, 249 aa, Glycine max
MPSPHYPHWASLQADIEAHLKQTIPLKEPLEVFEPMLHLAFSAPRTTVPALCLAACELVGGHRQQAMAAASALLLNLANAHAHEHLTDGPMYGPNIELLTGDGIVPFGFELLARPDGPASASPERVLRVMIEISRAVGSVGLQDAQYVKKTLWDGGEEVQNVESMQRFVLEKRDGGLHACGAASGAILGGGSEDQIERLRNFGFHVGMMRGMLQMGFMEKHVQEERHLALKELQFFMDRDVHVISSFIY

SEQ ID NO: 23582 - protein, 214 aa, Glycine max
MLHLAFSAPRTTVPALCLAACELVGGHRQQAMAAASALLLNLANAHAHEHLTDGPMYGPNIELLTGDGIVPFGFELLARPDGPASASPERVLRVMIEISRAVGSVGLQDAQYVKKTLWDGGEEVQNVESMQRFVLEKRDGGLHACGAASGAILGGGSEDQIERLRNFGFHVGMMRGMLQMGFMEKHVQEERHLALKELQFFMDRDVHVISSFIY

SEQ ID NO: 23583 - DNA, 1172 bp, Glycine max
actaaataaatagttctgttttgtttctctctcaactctcacaacccatctttcatatccaaattccaatgcttcttcttccttcttatttcaatttcaatcactactattattactctttcacgcttttgcttctcgatttttaaaccctaaatctatctatctgtctaatagataagatagggcaaaaacaaaacaaaacaaaataaaaccctagccaaagaaagaccttgttgagcagcagcagcagagagagagaggcttatggaaggagtaccgcacccaatacccagaactgtcgaagaggttttcaccgattttaagggcagacgcgctggtttgattaaggccctcactactgacgttgaaaagttttaccagcagtgcgatcccgagaaggagaatttgtgtctatatgggtttccaaatgaaacatgggaagtgaatttgcctgttgaggaagtgcctcctgaacttcctgagccagcattaggtataaactttgccagggacggcatgcaagagaaggactggctatcactggttgcagttcacagtgactcatggctgcttgctgttgctttctattttggtgcccgctttggatttggtaagaatgaaaggaaaaggctttttcagatgataaatgatctgccaacaatcttcgaacttgtgacaggaagtgctaagcaatcaaaggatcaaccagctgctcacaacaatggtagcaaatgcaaatcaagtggaaagtcccatcagtctgagtctcaggccaaggggatgaagatgtctgcaccacccaaagaagaggatgagagtggagaagaagaagaagaagatgatgaacagggtgcaacatgtggtgcttgcggtgataattatggcactgatgaattctggatctgttgtgatatgtgtgaaagatggttccatggtaaatgtgttaaaattactcctgctaaggctgagcacatcaagcaatacaagtgccctagctgcagtaacaagagggttagagtttgaaagctctaaacctttggatcaatcaccaattaaacagacaagatttagaatgtttgataacatttttacaagtgaaaattgcttcctgttctagtgaatggttcactttaatgactatgcagatggaatttcaagttttgctactgttc

SEQ ID NO: 23584 - protein, 252 aa, Glycine max
MEGVPHPIPRTVEEVFTDFKGRRAGLIKALTTDVEKFYQQCDPEKENLCLYGFPNETWEVNLPVEEVPPELPEPALGINFARDGMQEKDWLSLVAVHSDSWLLAVAFYFGARFGFGKNERKRLFQMINDLPTIFELVTGSAKQSKDQPAAHNNGSKCKSSGKSHQSESQAKGMKMSAPPKEEDESGEEEEEDDEQGATCGACGDNYGTDEFWICCDMCERWFHGKCVKITPAKAEHIKQYKCPSCSNKRVRV

SEQ ID NO: 23585 - protein, 168 aa, Glycine max
MQEKDWLSLVAVHSDSWLLAVAFYFGARFGFGKNERKRLFQMINDLPTIFELVTGSAKQSKDQPAAHNNGSKCKSSGKSHQSESQAKGMKMSAPPKEEDESGEEEEEDDEQGATCGACGDNYGTDEFWICCDMCERWFHGKCVKITPAKAEHIKQYKCPSCSNKRVRV

SEQ ID NO: 23586 - protein, 127 aa, Glycine max
MINDLPTIFELVTGSAKQSKDQPAAHNNGSKCKSSGKSHQSESQAKGMKMSAPPKEEDESGEEEEEDDEQGATCGACGDNYGTDEFWICCDMCERWFHGKCVKITPAKAEHIKQYKCPSCSNKRVRV

SEQ ID NO: 23587 - DNA, 1263 bp, Glycine max
atatatatactaggtagcacataagactatagataaataatgaagatgatcccttcttcagaatccctgctttccttttttgacttagatacttcttatgcaactatagtgaggctaagagttggtgcataattaatcaaaatgttggccatattccacaaagcttttgctcatccacctgaagagctgaacagtcctgcatcttacaaaggttccaagaagcctaaggttcctgaggaaactctcaaagatttcctttcccaccatcctcacaacacttgctccatgagctttggtgaagctgctgtgctagcttatgttcgtcctgatcaatccttctctcgtcatcaaaggttgttttgtgggattgataacatatactgtctcttcttggggagcttgaacaatttgtccctactcaacaagcaatatggattgtcaaagagtactgacgaggccatgtttgtgattgaagcttataagactctccgtgaccggggtccataccctgcagatcaagtggtcaaggaacttgatggcagttttgcttttgttgtctatgacagcaaggttggcagtgtctttgcagcactgggttctgatggaggagtgaagttgtattggggtattgcagctgatggatctgtggtgatctctgatgatctagaagtcataaaagagggttgtgccaaatcctttgctccctttccaacagggtgtatgtttcacagtgaaggaggtctgatgagttttgagcatccaatgaacaagttgaaggcaatgccaagggtggacagtgaaggggccatgtgtggggccaacttcaaagttgataagttcgccagagtcaacagcattcctcgagtgggaagtcaatctaattggatggaatgggaccaacattagcttagaaataaaaccttaggataatgtaaaataaaaaagtgccatctatgtatgttcctttcctaacttaccattctgaatttgttttgttttctgcttgcttgtgctgttttcccgtttccctttccggcattgtacatattgaattactttttcatacatgttaattgttcatcatggtacttgtgagtgagagagattaacacggttcaagtcaggaacttctgtatcacagtgttaagatcgatgcactgagtgggtcataggaattttaatgtaacatggatgacataatctacaaaaatggaaataaatggatgaacaagggcaaacttgagttactgcattcaatgtgtc

SEQ ID NO: 23588 - protein, 254 aa, Glycine max
MLAIFHKAFAHPPEELNSPASYKGSKKPKVPEETLKDFLSHHPHNTCSMSFGEAAVLAYVRPDQSFSRHQRLFCGIDNIYCLFLGSLNNLSLLNKQYGLSKSTDEAMFVIEAYKTLRDRGPYPADQVVKELDGSFAFVVYDSKVGSVFAALGSDGGVKLYWGIAADGSVVISDDLEVIKEGCAKSFAPFPTGCMFHSEGGLMSFEHPMNKLKAMPRVDSEGAMCGANFKVDKFARVNSIPRVGSQSNWMEWDQH

SEQ ID NO: 23589 - protein, 206 aa, Glycine max
MSFGEAAVLAYVRPDQSFSRHQRLFCGIDNIYCLFLGSLNNLSLLNKQYGLSKSTDEAMFVIEAYKTLRDRGPYPADQVVKELDGSFAFVVYDSKVGSVFAALGSDGGVKLYWGIAADGSVVISDDLEVIKEGCAKSFAPFPTGCMFHSEGGLMSFEHPMNKLKAMPRVDSEGAMCGANFKVDKFARVNSIPRVGSQSNWMEWDQH

SEQ ID NO: 23590 - protein, 148 aa, Glycine max
MFVIEAYKTLRDRGPYPADQVVKELDGSFAFVVYDSKVGSVFAALGSDGGVKLYWGIAADGSVVISDDLEVIKEGCAKSFAPFPTGCMFHSEGGLMSFEHPMNKLKAMPRVDSEGAMCGANFKVDKFARVNSIPRVGSQSNWMEWDQH

SEQ ID NO: 23591 - DNA, 535 bp, Glycine max
aaaagtgtttccggctgcgattaatcgaaaccctcggagaagctttttacacaatgtccggcgaggaagacgccaccgtgagggagccactagatctgattcgcctgagtctcgacgagagaatctatgtcaagctccgctctgaccgcgaactccgcggcaagcttcacgcgtttgatcagcatttgaacatgattctgggtgatgttgaagaagttatcacaactgtagaaatcgatgacgagacctacgaagagatcgtcaggacgataaagcggaatattcagtatctgtttgtgagaggagatggagtgatattggtgtctccacctttgaggacaacctgagcttaaaaaaaactcagatctgaagcctaacataaggaagactcttttaaacaaaaatcttttgtgtcctctctatgaagaaggcctttgtgactagtggtgtgtcttttattcagtcgtgtgttgtctaaaaactcaaaaaacatcaatgttgctttgattccagaaaaaactcctttggtttttct

SEQ ID NO: 23592 - protein, 114 aa, Glycine max
KCFRLRLIETLGEAFYTMSGEEDATVREPLDLIRLSLDERIYVKLRSDRELRGKLHAFDQHLNMILGDVEEVITTVEIDDETYEEIVRTIKRNIQYLFVRGDGVILVSPPLRTT

SEQ ID NO: 23593 - protein, 97 aa, Glycine max
MSGEEDATVREPLDLIRLSLDERIYVKLRSDRELRGKLHAFDQHLNMILGDVEEVITTVEIDDETYEEIVRTIKRNIQYLFVRGDGVILVSPPLRTT

SEQ ID NO: 23594 - DNA, 1525 bp, Glycine max
attccaatccaccctcgccactccttcgatccgaatcatcttttccgcccacacacaagttgggtttttttgatataattgataatgggtgatagcagtgttccatctgggtctccaaatgcaaaatcagatcttgttgacagagacttggcggtttccaacaacgcgtcgtcgttggaaaccattgtgcaaagtttccaagattcaatgtctcttggtaagagacacaagttctgggaaactcagcctgtggggcaatacaaggatgttggggactcaagtttgcctgagggcccgattgagcccccgacacctttgtccgaggttaagcaggagccttacaaccttcccagtgcttatgagtggacaacatgtgacatggactctgaggaaatctgtgatgaggtttatgcccttctcaagaataactatgttgaggatgatgagaacatgttcaggttcaactattccaaggagtttctcagttgggcgttgcgtgttccgggctattaccagagttggcacattggcgtgagagccaagacgtcaaagaagttggttgctttcatcagtggcatccccgccaggatcagggttaatgaggaggttgtgaagatggccgagatcaatttcttgtgtgttcataagaagctcaggtcaaagagacttgcacctgttatgatcaaggaggtcaccaggagggttcatttggagaatatttggcaggcggcctatacggctggagttgttcttccaacgccaatcacgacttgtcaatattggcaccgatcgttgaatccgaagaagctaattgatgttgggttttcaaggcttggtgctaggatgacgatgagccgcactataaagctttacaaattgcctgattcaacggttactcctggattcaggaaaatggagcttcgggatgtccctgctgttactcggctgcttaggaactacttgagccagtttgttgttgcacctgattttgatgaaaatgatgttgaacattggcttcttcccaatgagaatgtggtggatagtttcttggttgagagtccagagaatcatgagatcacagacttctgcagcttctatactcttccttcttccatccttggaaatcaaaattactcaattttgaaagctgcttattcttattataatgtctccaccaaaactccgctgacccagttgatgaatgatgtgctgattgtagcaaagcaaaaggattttgatgttttcaatgccttggatgtaatgcacaatgagagtttcctcaaagaactcaagtttggaccaggagatggacagcttcactactacttgtacaattataggattcgtagtgccttgaaaccatctggacttggacttgtgctcttgtagtttgatactattcagttttggtttcactatgtaattggtaaaaccattcatttgttttgttttattagcttgttgtttcaacattatttcttgttcctttcaaatattggcaattaacatattaggttttcagggc

SEQ ID NO: 23595 - protein, 434 aa, Glycine max
MGDSSVPSGSPNAKSDLVDRDLAVSNNASSLETIVQSFQDSMSLGKRHKFWETQPVGQYKDVGDSSLPEGPIEPPTPLSEVKQEPYNLPSAYEWTTCDMDSEEICDEVYALLKNNYVEDDENMFRFNYSKEFLSWALRVPGYYQSWHIGVRAKTSKKLVAFISGIPARIRVNEEVVKMAEINFLCVHKKLRSKRLAPVMIKEVTRRVHLENIWQAAYTAGVVLPTPITTCQYWHRSLNPKKLIDVGFSRLGARMTMSRTIKLYKLPDSTVTPGFRKMELRDVPAVTRLLRNYLSQFVVAPDFDENDVEHWLLPNENVVDSFLVESPENHEITDFCSFYTLPSSILGNQNYSILKAAYSYYNVSTKTPLTQLMNDVLIVAKQKDFDVFNALDVMHNESFLKELKFGPGDGQLHYYLYNYRIRSALKPSGLGLVLL

SEQ ID NO: 23596 - protein, 393 aa, Glycine max
MSLGKRHKFWETQPVGQYKDVGDSSLPEGPIEPPTPLSEVKQEPYNLPSAYEWTTCDMDSEEICDEVYALLKNNYVEDDENMFRFNYSKEFLSWALRVPGYYQSWHIGVRAKTSKKLVAFISGIPARIRVNEEVVKMAEINFLCVHKKLRSKRLAPVMIKEVTRRVHLENIWQAAYTAGVVLPTPITTCQYWHRSLNPKKLIDVGFSRLGARMTMSRTIKLYKLPDSTVTPGFRKMELRDVPAVTRLLRNYLSQFVVAPDFDENDVEHWLLPNENVVDSFLVESPENHEITDFCSFYTLPSSILGNQNYSILKAAYSYYNVSTKTPLTQLMNDVLIVAKQKDFDVFNALDVMHNESFLKELKFGPGDGQLHYYLYNYRIRSALKPSGLGLVLL

SEQ ID NO: 23597 - protein, 336 aa, Glycine max
MDSEEICDEVYALLKNNYVEDDENMFRFNYSKEFLSWALRVPGYYQSWHIGVRAKTSKKLVAFISGIPARIRVNEEVVKMAEINFLCVHKKLRSKRLAPVMIKEVTRRVHLENIWQAAYTAGVVLPTPITTCQYWHRSLNPKKLIDVGFSRLGARMTMSRTIKLYKLPDSTVTPGFRKMELRDVPAVTRLLRNYLSQFVVAPDFDENDVEHWLLPNENVVDSFLVESPENHEITDFCSFYTLPSSILGNQNYSILKAAYSYYNVSTKTPLTQLMNDVLIVAKQKDFDVFNALDVMHNESFLKELKFGPGDGQLHYYLYNYRIRSALKPSGLGLVLL

SEQ ID NO: 23598 - DNA, 1366 bp, Glycine max
ttcgtctagggtttcttccttctgcaaccatcaatggcggcaatcacagctccccagcaccgatcctcgaagacggagtcctacgttgacaacaagcgcaaggatgacatccgccacgccaacatcgtggccgcacgctccgtcgccaacgcggttcgcaccagtctgggccccaagggcatggacaagatgatctccacctcctccgacgaggtcatcatcaccaatgacggcgccaccatcctcaacaagatgcaggtcctccagcccgccgccaagatgctcgtcgagctctccaagtcccaggactccgccgccggcgacggcaccactaccgtcgtcgtcattgctggcgccctcctcgagcagtgcctcctcctcctctcccacggcatccaccccaccgtcgtctccgacgccctccacaaggctgccgtgaaggccgtcgacgttctcaccgccatggccgtccccgtcgagctctctgaccgcgactccctcgtgaagtccgctagcacatccctcaacagcaaggtcgtcagccagtactccacgctcctggctcccctcgccgtcgacgccgttctttccgtcgtcgatgccgccaagcccgacatggtcgacctccgcgatgtgaagatcgtgaagaagctcggcggcaccgtcgacgacaccgagctcgtgaaaggtctcgtctttgacaagaaggtcagccatgccgccgggggacccacccgcatggagaacgccaagatcgccgtcatacagttccagatttcgcctcccaaaacagacatcgaacagagcattgtggtgagtgattactctcagatggataggattctaaaggaagagcgtagttatattctcggcatgattaagaagatcaaggccactggttgtaatgtgttgttgattcagaagagtattttgagggatgctgttactgatttgtccttgcattaccttgccaaagctaagattttggtcattaaggatgtggagagggatgagattgagttcattaccaagacactgaattgtttgcccattgctaacattgagcattttcgcactgagaagttgggttacgctgatcttgtggaagaggtttctcttggggatgggaagattgtgaagattactgggattaaggagatggggaagaccaccactgtgcttgtacgtgggtctaatcagcttgttctcgatgaggccgagaggagtttgcacgatgctttgtgtgttgttaggtgtttggttgccaagaggtttctcattgccggcggtggtgcgcctgagattgagctctccaggcagctgggtgcctgggctaaggtgttgcatgggatggagggttactgtg

SEQ ID NO: 23599 - protein, 444 aa, Glycine max
MAAITAPQHRSSKTESYVDNKRKDDIRHANIVAARSVANAVRTSLGPKGMDKMISTSSDEVIITNDGATILNKMQVLQPAAKMLVELSKSQDSAAGDGTTTVVVIAGALLEQCLLLLSHGIHPTVVSDALHKAAVKAVDVLTAMAVPVELSDRDSLVKSASTSLNSKVVSQYSTLLAPLAVDAVLSVVDAAKPDMVDLRDVKIVKKLGGTVDDTELVKGLVFDKKVSHAAGGPTRMENAKIAVIQFQISPPKTDIEQSIVVSDYSQMDRILKEERSYILGMIKKIKATGCNVLLIQKSILRDAVTDLSLHYLAKAKILVIKDVERDEIEFITKTLNCLPIANIEHFRTEKLGYADLVEEVSLGDGKIVKITGIKEMGKTTTVLVRGSNQLVLDEAERSLHDALCVVRCLVAKRFLIAGGGAPEIELSRQLGAWAKVLHGMEGYC

SEQ ID NO: 23600 - protein, 395 aa, Glycine max
MDKMISTSSDEVIITNDGATILNKMQVLQPAAKMLVELSKSQDSAAGDGTTTVVVIAGALLEQCLLLLSHGIHPTVVSDALHKAAVKAVDVLTAMAVPVELSDRDSLVKSASTSLNSKVVSQYSTLLAPLAVDAVLSVVDAAKPDMVDLRDVKIVKKLGGTVDDTELVKGLVFDKKVSHAAGGPTRMENAKIAVIQFQISPPKTDIEQSIVVSDYSQMDRILKEERSYILGMIKKIKATGCNVLLIQKSILRDAVTDLSLHYLAKAKILVIKDVERDEIEFITKTLNCLPIANIEHFRTEKLGYADLVEEVSLGDGKIVKITGIKEMGKTTTVLVRGSNQLVLDEAERSLHDALCVVRCLVAKRFLIAGGGAPEIELSRQLGAWAKVLHGMEGYC

SEQ ID NO: 23601 - protein, 392 aa, Glycine max
MISTSSDEVIITNDGATILNKMQVLQPAAKMLVELSKSQDSAAGDGTTTVVVIAGALLEQCLLLLSHGIHPTVVSDALHKAAVKAVDVLTAMAVPVELSDRDSLVKSASTSLNSKVVSQYSTLLAPLAVDAVLSVVDAAKPDMVDLRDVKIVKKLGGTVDDTELVKGLVFDKKVSHAAGGPTRMENAKIAVIQFQISPPKTDIEQSIVVSDYSQMDRILKEERSYILGMIKKIKATGCNVLLIQKSILRDAVTDLSLHYLAKAKILVIKDVERDEIEFITKTLNCLPIANIEHFRTEKLGYADLVEEVSLGDGKIVKITGIKEMGKTTTVLVRGSNQLVLDEAERSLHDALCVVRCLVAKRFLIAGGGAPEIELSRQLGAWAKVLHGMEGYC

SEQ ID NO: 23602 - DNA, 1472 bp, Glycine max
aatttctttcacttattgaatccttttgcttccatacttgagcaacacaagcacacatcctatctcttgacaattctctgagtgccatagtttggcatcttaatcattgcacattgttgatgcccataaggaacgtgtaacttcctcatttatttttctattgttttctttcacttattggctttcatttccctatataaagcctccattgctcccttctctccccatcttcccttgttttgattcctaatacaaacatggcaatgaagaagctcttgtgggttgtcctgtctctatctttggttcttggagtggccaatagctttgattttcacgacaaggatttggcgtccgaggaaagcttttgggacttgtacgagagatggaggagtcaccacacggtttcgcgaagcctcggtgacaagcacaagcggtttaacgtgtttaaagcaaatgtgatgcatgtccataacactaacaagatggataagccttacaagctgaaactaaacaagtttgctgacatgaccaaccatgaatttaggagtacctatgctggctcaaaggttaatcaccacagaatgttccaaggcacgccacgtgggaacgggaccttcatgtatgagaaggttggtagtgttcctccttctgtggattggaggaagaatggtgctgtcactggtgtaaaagatcaaggccaatgtggtagttgttgggcgttttcaactgttgtagctgttgaaggcattaaccaaatcaagacaaataagctagtctccttgtctgaacaagagctggtggactgtgacaccaaaaaaaaatgcaggatgcaatggtgggttaatggaatctgcttttgagttcatcaagcagaagggaggcataacaacagaaagcaattacccttacacagcacaagatggaacctgcgatgcatcaaaggcaaatgacctagctgtatcaattgatggccatgagaatgtccctgctaacgacgaaaatgcattgctcaaagctgttgccaaccaacctgtctctgtagccatagatgctgggggatctgattttcaattctactctgagggagtatttactggtgattgtagcacggagctaaatcacggtgtagcgattgtagggtatggaacaactgttgatgggactaattactggacagtgaggaactcttggggaccagaatggggagaacagggttacatcagaatgcaaaggagcatatctaagaaggagggactttgtggcatagctatgatggcttcctacccaatcaaaaactcctccaataatccaacaggaccctcatcatctcctaaagatgaactttgaatgcttaccacaaaatcaaactctaatcacccttggttgttgttttctattagcatctcagattctatgccagtgtatccatcaacatatttatgcttattacatcacaaagaaataaatatttc

SEQ ID NO: 23603 - protein, 200 aa, Glycine max
MAMKKLLWVVLSLSLVLGVANSFDFHDKDLASEESFWDLYERWRSHHTVSRSLGDKHKRFNVFKANVMHVHNTNKMDKPYKLKLNKFADMTNHEFRSTYAGSKVNHHRMFQGTPRGNGTFMYEKVGSVPPSVDWRKNGAVTGVKDQGQCGSCWAFSTVVAVEGINQIKTNKLVSLSEQELVDCDTKKKCRMQWWVNGICF

SEQ ID NO: 23604 - protein, 198 aa, Glycine max
MKKLLWVVLSLSLVLGVANSFDFHDKDLASEESFWDLYERWRSHHTVSRSLGDKHKRFNVFKANVMHVHNTNKMDKPYKLKLNKFADMTNHEFRSTYAGSKVNHHRMFQGTPRGNGTFMYEKVGSVPPSVDWRKNGAVTGVKDQGQCGSCWAFSTVVAVEGINQIKTNKLVSLSEQELVDCDTKKKCRMQWWVNGICF

SEQ ID NO: 23605 - protein, 167 aa, Glycine max
MESAFEFIKQKGGITTESNYPYTAQDGTCDASKANDLAVSIDGHENVPANDENALLKAVANQPVSVAIDAGGSDFQFYSEGVFTGDCSTELNHGVAIVGYGTTVDGTNYWTVRNSWGPEWGEQGYIRMQRSISKKEGLCGIAMMASYPIKNSSNNPTGPSSSPKDEL

SEQ ID NO: 23606 - DNA, 1121 bp, Glycine max
atcaacagcatattctagccatgtcaagtcctcagtgttttgagaatccaccaaaccttaactcggacatccatggagcaggaactgtccaagaacttggaggacttaattcctacgtcactggatcttccgattccaaattggcactcatcctggtttctgatgtttttgggtatgaagcaccaaaactaaggaaacttgcggacaaagtagcagcagctggattcttggttgttgttcctgatcttctgtatggtgattacattgttgaccttaataatcctcaatttgatcgagagtcatggcgaaaggctcatggaaaggataaggcatgtgaagacaccaaacctctaatttctgctctaaagagtaaaggtgttaaatccataggggctgcaggtttttgctggggaggggttgtggttgtgaaacttgcaatgtccactgatattcaggctgcagttattctgcatcctggtctaatcgcagataatgaatttaatgaggtcaggattcctattgctatactgggagctgaaatcgaccatcttttcccaccagaaaggttgaagcaaattgaagaaatgttgtctgtaaaagctgagtttgagagctttgtgaaactataccctggtgttagtcatggatggactttgcggtacaatgatgatgatgaagcaactgttaagagtgcaaaagaggcgcatcaagacatgttgaattggtttatcaagcacgtcaagtgaaaattgttttcaccaccagaagatgcctgtcattgatttgcagttaatttttttagtagcaaataaatattacttattattgaaaagggccaatttcatgtacaagatgtgtccaaagcggcccaaccaccatgatacaaaaattataatatcccaccagaatatcactagcatttctcttataataacaatactacaactgcctaagaaaaagatacagcatagacaaaagctgcactatgcggcttaactcctagccttcatgttattggtgtgacgtatccattgccaccgaatttactaatgattaattctcgttgaaaaatctgatgatgatcacttttaatgatatatatatgctattttttcttaaat

SEQ ID NO: 23607 - protein, 247 aa, Glycine max
QQHILAMSSPQCFENPPNLNSDIHGAGTVQELGGLNSYVTGSSDSKLALILVSDVFGYEAPKLRKLADKVAAAGFLVVVPDLLYGDYIVDLNNPQFDRESWRKAHGKDKACEDTKPLISALKSKGVKSIGAAGFCWGGVVVVKLAMSTDIQAAVILHPGLIADNEFNEVRIPIAILGAEIDHLFPPERLKQIEEMLSVKAEFESFVKLYPGVSHGWTLRYNDDDEATVKSAKEAHQDMLNWFIKHVK

SEQ ID NO: 23608 - protein, 241 aa, Glycine max
MSSPQCFENPPNLNSDIHGAGTVQELGGLNSYVTGSSDSKLALILVSDVFGYEAPKLRKLADKVAAAGFLVVVPDLLYGDYIVDLNNPQFDRESWRKAHGKDKACEDTKPLISALKSKGVKSIGAAGFCWGGVVVVKLAMSTDIQAAVILHPGLIADNEFNEVRIPIAILGAEIDHLFPPERLKQIEEMLSVKAEFESFVKLYPGVSHGWTLRYNDDDEATVKSAKEAHQDMLNWFIKHVK

SEQ ID NO: 23609 - DNA, 1282 bp, Glycine max
accacataaaactaaaagagcatctcctcttagctcttgcttccttctcgagcgtaaaccctagatcccatctccaaaatgttcagatccgtgctcgtccgttcctcttcatcggcgaagcaatcgcttctccaccgcagcttctcctcctccgtccccgagcgcaaagtcgccatcctcggggccgccggtggaatcgggcagcctctcgctctcctcatgaagctcaaccccctcgtctcaagcctctccctcttcgatatcgcaaacacccctggagtcgccgctgatgtcggtcacatcaacaccagatctgaggtggttggatacatgggagatgatgaattggcgaaagctcttgcaggagctgacctcgttatcatccctgctggtgtccccaggaagcctggcatgactcgtgatgatcttttcaacatcaacgctggtattgtcaagaacctttgctctgccatcgccaagtactgccctcatgcacttgttaacatgatcagcaacccagtgaactccactgttccaattgcagctgagatattcaagaaggctggtatgtacgatgagaagaagttgtttggtgtcaccactcttgacgttgttagggccaagactttctacgctggaaaggctaatgtccctgttgctgaagttaatgttccggtgattggtggtcatgctggggttacaattctcccactcttctctcaggccactcctcaggccaacttgtctaatgatgtactcaccgctctcaccaagcgtacccaagatggaggtaccgaagtcgtggaggctaaagcaggaaaaggttcagctacattgtcaatggcctatgctggagcactatttgctgatgcatgcttgaaaggactcaacggagttccagacgttgtggaatgttcatacgtgcagtccaccatcactgagcttcctttctttgcctcaaaggtgaggttggggaagaacggtgtggaggaggttcttgatttggggccactctcagactttgagaaacaagggttggaagcactgaagccagaactcaagtcttccatcgagaagggtgttaagtttgcaaaccaatgagttaaatcgatttgagtcgggttatttttccaattttccggttatattatcgcccttcattgggttgcatcaataaaattcatgtgttgaggctttttgggttctttcccaaagcacagagataaaaaaaactgtaacatgtaaggtttctttcttatataacaatgtttttttctgtcat

SEQ ID NO: 23610 - protein, 340 aa, Glycine max
MFRSVLVRSSSSAKQSLLHRSFSSSVPERKVAILGAAGGIGQPLALLMKLNPLVSSLSLFDIANTPGVAADVGHINTRSEVVGYMGDDELAKALAGADLVIIPAGVPRKPGMTRDDLFNINAGIVKNLCSAIAKYCPHALVNMISNPVNSTVPIAAEIFKKAGMYDEKKLFGVTTLDVVRAKTFYAGKANVPVAEVNVPVIGGHAGVTILPLFSQATPQANLSNDVLTALTKRTQDGGTEVVEAKAGKGSATLSMAYAGALFADACLKGLNGVPDVVECSYVQSTITELPFFASKVRLGKNGVEEVLDLGPLSDFEKQGLEALKPELKSSIEKGVKFANQ

SEQ ID NO: 23611 - protein, 293 aa, Glycine max
MKLNPLVSSLSLFDIANTPGVAADVGHINTRSEVVGYMGDDELAKALAGADLVIIPAGVPRKPGMTRDDLFNINAGIVKNLCSAIAKYCPHALVNMISNPVNSTVPIAAEIFKKAGMYDEKKLFGVTTLDVVRAKTFYAGKANVPVAEVNVPVIGGHAGVTILPLFSQATPQANLSNDVLTALTKRTQDGGTEVVEAKAGKGSATLSMAYAGALFADACLKGLNGVPDVVECSYVQSTITELPFFASKVRLGKNGVEEVLDLGPLSDFEKQGLEALKPELKSSIEKGVKFANQ

SEQ ID NO: 23612 - protein, 256 aa, Glycine max
MGDDELAKALAGADLVIIPAGVPRKPGMTRDDLFNINAGIVKNLCSAIAKYCPHALVNMISNPVNSTVPIAAEIFKKAGMYDEKKLFGVTTLDVVRAKTFYAGKANVPVAEVNVPVIGGHAGVTILPLFSQATPQANLSNDVLTALTKRTQDGGTEVVEAKAGKGSATLSMAYAGALFADACLKGLNGVPDVVECSYVQSTITELPFFASKVRLGKNGVEEVLDLGPLSDFEKQGLEALKPELKSSIEKGVKFANQ

SEQ ID NO: 23613 - DNA, 1316 bp, Glycine max
atggttttgcaataatcgaaagcaattgaaattgtcctaaggtaaggtgtttgaatgcttacatacatagattaaggattttaggaccaaagagggagtcatgaatgtgacaaacaaaccaaacccatatggttccaccaatgggtttcagtctcagcttcaacaaaatgggtgggaacagggatcatctagactcagacccactaagctttaccctgcaccaacggctggctaccaggacattgttcgtgatgcaaacctcttctggggaacgcttcaagcttttcacaaaacacttggcaccaaatataagatttctactgtgggaggaacgccacttgatctacatcgtctttttgtcgaagttacatctcgcggtgggattgaaaaggtgattgttgatcgtaagtggaaggaagtgattctgaccttcaatttcaaagataccataaccaatgcatcatttatggtgcgcaaatcctacctctcgatgctttatcactttgagcaagtgtattattttgggaggcaaggcattcctcccacaacacctgatcttatgattagaggccaatcatgccaaccctatagctccacaaccattccagaagttgctgctgtgaatgattcacctgttcagagtactccagtacaggcacatgatgatatggtttctggaacaattgatgcgaaatttgatgttggatatgtagttacagtgactctaggttctgagcagctgcaaggtgtcctgtttcatgttcctgataacgtgtcccagagttctcatgccgaaggcacatctagttcacagaatcttggtgatgacacgtctaatttacagagtcgaaagagagcaaaatatgcaccacgtgatccatttcggccaaagtcaaacaggagcggttacaactttttctttgctgaaaattatgccaggctgaagccctcgtatcatgggcaggagagagcaattagtaagaggattgggtttctgtggaacaatctgtcagaagcagaaagacaggtttatcaagagaaagggataagagataaggaaagatacaggactgaactgatggagtacaaatccaataattcaactccaaatgctcaataggctgttttatgtaatccttagactgtcatttcatatgcttcatctgttgttcttttcatgcctttgctatagttaattttcttatccattctacagagaaacttagaagagtagctttgtgacaattctggtgtaaattatgctgaatggttttaataaacatcttgtagcggttaattcattgtagttactcttg

SEQ ID NO: 23614 - protein, 339 aa, Glycine max
MNVTNKPNPYGSTNGFQSQLQQNGWEQGSSRLRPTKLYPAPTAGYQDIVRDANLFWGTLQAFHKTLGTKYKISTVGGTPLDLHRLFVEVTSRGGIEKVIVDRKWKEVILTFNFKDTITNASFMVRKSYLSMLYHFEQVYYFGRQGIPPTTPDLMIRGQSCQPYSSTTIPEVAAVNDSPVQSTPVQAHDDMVSGTIDAKFDVGYVVTVTLGSEQLQGVLFHVPDNVSQSSHAEGTSSSQNLGDDTSNLQSRKRAKYAPRDPFRPKSNRSGYNFFFAENYARLKPSYHGQERAISKRIGFLWNNLSEAERQVYQEKGIRDKERYRTELMEYKSNNSTPNAQ

SEQ ID NO: 23615 - protein, 217 aa, Glycine max
MVRKSYLSMLYHFEQVYYFGRQGIPPTTPDLMIRGQSCQPYSSTTIPEVAAVNDSPVQSTPVQAHDDMVSGTIDAKFDVGYVVTVTLGSEQLQGVLFHVPDNVSQSSHAEGTSSSQNLGDDTSNLQSRKRAKYAPRDPFRPKSNRSGYNFFFAENYARLKPSYHGQERAISKRIGFLWNNLSEAERQVYQEKGIRDKERYRTELMEYKSNNSTPNAQ

SEQ ID NO: 23616 - protein, 209 aa, Glycine max
MLYHFEQVYYFGRQGIPPTTPDLMIRGQSCQPYSSTTIPEVAAVNDSPVQSTPVQAHDDMVSGTIDAKFDVGYVVTVTLGSEQLQGVLFHVPDNVSQSSHAEGTSSSQNLGDDTSNLQSRKRAKYAPRDPFRPKSNRSGYNFFFAENYARLKPSYHGQERAISKRIGFLWNNLSEAERQVYQEKGIRDKERYRTELMEYKSNNSTPNAQ

SEQ ID NO: 23617 - DNA, 1130 bp, Glycine max
attgtacatttgtttcttctaggatgaaaatcgatacaatgctgggagaggttctcatattactctcaagagagctgagaaagcccgtgccttggttaacaaacttccagcaatggtagatgctttaacttcaaaaactgtagcatgggaaaaggacaaaggcattgagttcacatatgatggtacctgtctgctctccatgcttgagaactactccctatcacggcaagagaaggagcaagaacgtcgtaggcagcgggaactaaagaaacttcagggacaaataatagtggaaaaggaggtactgtatggatctaaaccaagcccttcaaaggcccagagtgtaaaaaaagcacctaggttgtcaactagaagtacatcaagtaaaagaatctcccttggatgtcaaaccccaaaatctgattcaaaagctactcagtcattctccacagggaagacagacaaagtacaccaaaatgagcaactaaataacctggatgacgatgtttcatgtttatcatcagccagaagaggacttgatattgctggtgttcctttgagaaaatactctaccggtgctggaagtgttcttgacatggtatctcctttgacacgacaacctttttctcccatctctttaacattatcatcgaaagccaatgtcgcaaatgctgcaaatgatacacagaatgagaagttgcagaaaacattagtagttaggcaattttccatctatcactacctcaaagacaaccacagtggccaatgaagagaacaaaactccaaaggcagtacctattcctgaccccactacacctttgaaattgttgaatcctatgaatatgtccatgactccaggtcctgcatcagttccttatggagtctcggctcaagagattgaatattcctttgaggaaagaaggctcggttttgtgttagcataatttgtttgtttggttttccagattacatagttacattgttatagtagttacctgtgatgatgatcacaagtcaaatgtaattgtttttccagatgtacatagtcagagaaatggatgtgaactatggtgtggaaagagcgtcttaatgcaaaattttgcaatctaatgtaatgtttttttcttcac

SEQ ID NO: 23618 - protein, 218 aa, Glycine max
MVDALTSKTVAWEKDKGIEFTYDGTCLLSMLENYSLSRQEKEQERRRQRELKKLQGQIIVEKEVLYGSKPSPSKAQSVKKAPRLSTRSTSSKRISLGCQTPKSDSKATQSFSTGKTDKVHQNEQLNNLDDDVSCLSSARRGLDIAGVPLRKYSTGAGSVLDMVSPLTRQPFSPISLTLSSKANVANAANDTQNEKLQKTLVVRQFSIYHYLKDNHSGQ

SEQ ID NO: 23619 - protein, 189 aa, Glycine max
MLENYSLSRQEKEQERRRQRELKKLQGQIIVEKEVLYGSKPSPSKAQSVKKAPRLSTRSTSSKRISLGCQTPKSDSKATQSFSTGKTDKVHQNEQLNNLDDDVSCLSSARRGLDIAGVPLRKYSTGAGSVLDMVSPLTRQPFSPISLTLSSKANVANAANDTQNEKLQKTLVVRQFSIYHYLKDNHSGQ

SEQ ID NO: 23620 - DNA, 1567 bp, Glycine max
aacaagcatacatatcatatctttgattcagcttccaaacgcgccattcccatttctctctctctgcttcttcttcagatacctaacctaatctcccaaacaaacaaaccaactcaaccttatcaatatcgtttaaataaattttgatcgcgcacgcgctttgagatagatcatgctgcgtttgtgctacggccctctggattgctgcttcggacgccgtggtggccgcgccgccgacggacttctctggcacaccgacttgaagccccacgcctccggcgacttctccatcgccgtcgcccaggcgaattacagtcttgaggatcagagccaagtcttcacctccccctccgccacctacgtcggcgtctacgacggccacggcggccccgaagcttccagattcgtcaacaagcgtctcttcccttatttgcacaaattcgccactgagcaagggggtttgtcagtggatgtgattaaaaaggcgttcagtgccacagaggaggaattcttgcatttggtgaagctatccatgcccattagtccccagattgcttccgtcggatcctgttgcctttttggtgcaatttctaataatgtgttgtatgttgcaaaccttggagactcgagagctgttcttggcaggagggatacagagagaaagaacagtccggtggtggcacagcgtttgtcaactgatcataatgtagctgatgaggaggtgagaaaagaagttgaagctctccatcccgatgactcacacattgtggtttatagccgtggagtttggaggattaagggcattatacaggtgtcaagatctattggtgatgtgtatttgaagaaaccagatttctaccgtgacctgggttttcagcagtttggaaatcctattcctttgaagcgttctgtaatgacagctgaaccatcaatcattattagggagcttgagtcagaggatttattcttgatatttgcatcagatggcctctgggaacaattaagtgatgaggctgcggttcagatcgttttcaaacatccaagagctggaattgccaagagactggtgagagctgctcttcatgaagctgcaaagaagagagagatgagatacgatgacataaagaaaattgacaaaggaataagacgacacttccatgatgatatcactgtggttgtaatctatcttgatcaccatgcaggctcctctaagcaaactgctgttggctatacaactgccccagttgatattttttccctaaatgcggatgggatgcttggtacagttgcctaagagtgaaattgcttcaaaggatcatacactgacattatttggggcaaaaattatttataggtgaagattaatattgttggtaaatgaagggaattcttgagaaaaatatacaaaaaattactgcatagatatagtagctgggagttgctgacagattctttctggtgcagatatgcatttgtatagttgtgaagtttattttttgggtttgatggtatcaattttgtttttctttggaaagaaagaaaataaaattatattgattggttagcc

SEQ ID NO: 23621 - protein, 373 aa, Glycine max
MLRLCYGPLDCCFGRRGGRAADGLLWHTDLKPHASGDFSIAVAQANYSLEDQSQVFTSPSATYVGVYDGHGGPEASRFVNKRLFPYLHKFATEQGGLSVDVIKKAFSATEEEFLHLVKLSMPISPQIASVGSCCLFGAISNNVLYVANLGDSRAVLGRRDTERKNSPVVAQRLSTDHNVADEEVRKEVEALHPDDSHIVVYSRGVWRIKGIIQVSRSIGDVYLKKPDFYRDLGFQQFGNPIPLKRSVMTAEPSIIIRELESEDLFLIFASDGLWEQLSDEAAVQIVFKHPRAGIAKRLVRAALHEAAKKREMRYDDIKKIDKGIRRHFHDDITVVVIYLDHHAGSSKQTAVGYTTAPVDIFSLNADGMLGTVA

SEQ ID NO: 23622 - protein, 253 aa, Glycine max
MPISPQIASVGSCCLFGAISNNVLYVANLGDSRAVLGRRDTERKNSPVVAQRLSTDHNVADEEVRKEVEALHPDDSHIVVYSRGVWRIKGIIQVSRSIGDVYLKKPDFYRDLGFQQFGNPIPLKRSVMTAEPSIIIRELESEDLFLIFASDGLWEQLSDEAAVQIVFKHPRAGIAKRLVRAALHEAAKKREMRYDDIKKIDKGIRRHFHDDITVVVIYLDHHAGSSKQTAVGYTTAPVDIFSLNADGMLGTVA

SEQ ID NO: 23623 - DNA, 1359 bp, Glycine max
attcctcaccaagtcacgacacgacaccaaatattctcactcgtcgtcttcgtctgcgccctaaccaaattcaattcaaactcttctcatcaaaatccaaggctcgttcttgaaaccctaattcgatatcctcctcctcagaagaagaaggatcgatgtgggcagcttcttgcctggcgtcatgctgcgcggcctgcgcatgcgacgcctgcaggaccgtcgtatcgggaatcagccgccgttccgccaggatcgcctactgcggcctcttcgccttctctctcgtcgtcgcctggatcctccgtgaggtcgccgctcccctcatggaatcccttccctggatcaatcacttcaaacacacacctagccgtgaatggtttgaaacggatgcagttctgcgggttagcttggggaattttctgtttttcactattctagctgttctgatggttggtgtgaaaacccagagggatccccgggatagtatgcaccatggaggttggatgatgaaaattatctgctggtgccttctggtaatctttatgtttttcgttccaaatgagatcatcagcttctatgaaacaatatcaaagtttggctcgggcatgtttcttcttgttcaagtcatgctcttgttggattttgttcatggatggaatgacaaatgggttggatatgatgaacaattctggtacattgctctatttgttgtttcccttgtttgttatgtggcaacatttgcattctcaggagttctctttcacttcttcacgccatctggacaagactgtggactcaatgtctttttcattactatgaccatgattcttgcatttgtttttgccatagtggcattgcatcctgcagtaaatggaagtgttttgcctgcttcagtaatatcattatactgcacttatctctgctatagtgcactggctagtgaaccaagagattatgagtgcaatggtcttcacaaacactcaaaagctgtttccactggcacccttactttgggtttagctacaactgttctatctgtcgtttattctgctgtgcgtgctggatcttctgctgcagtgctttccccaccaagctcccctcgtgctggtaagcctctgcttccattggatgcaaaggaggatgaagagaaggagaaagcaaagccagttacatattcatatgccttcttccacttgattttctctcttgctagcatgtattctgcaatgcttctgactggttggtctacatctgttggagagagcgggaagttggttgacgtggggtggccttctgtgtaggttcgaatcatcacttcctgggcaactgctctgctgtacttgtggtctctcgtagctc

SEQ ID NO: 23624 - protein, 381 aa, Glycine max
MWAASCLASCCAACACDACRTVVSGISRRSARIAYCGLFAFSLVVAWILREVAAPLMESLPWINHFKHTPSREWFETDAVLRVSLGNFLFFTILAVLMVGVKTQRDPRDSMHHGGWMMKIICWCLLVIFMFFVPNEIISFYETISKFGSGMFLLVQVMLLLDFVHGWNDKWVGYDEQFWYIALFVVSLVCYVATFAFSGVLFHFFTPSGQDCGLNVFFITMTMILAFVFAIVALHPAVNGSVLPASVISLYCTYLCYSALASEPRDYECNGLHKHSKAVSTGTLTLGLATTVLSVVYSAVRAGSSAAVLSPPSSPRAGKPLLPLDAKEDEEKEKAKPVTYSYAFFHLIFSLASMYSAMLLTGWSTSVGESGKLVDVGWPSV

SEQ ID NO: 23625 - protein, 325 aa, Glycine max
MESLPWINHFKHTPSREWFETDAVLRVSLGNFLFFTILAVLMVGVKTQRDPRDSMHHGGWMMKIICWCLLVIFMFFVPNEIISFYETISKFGSGMFLLVQVMLLLDFVHGWNDKWVGYDEQFWYIALFVVSLVCYVATFAFSGVLFHFFTPSGQDCGLNVFFITMTMILAFVFAIVALHPAVNGSVLPASVISLYCTYLCYSALASEPRDYECNGLHKHSKAVSTGTLTLGLATTVLSVVYSAVRAGSSAAVLSPPSSPRAGKPLLPLDAKEDEEKEKAKPVTYSYAFFHLIFSLASMYSAMLLTGWSTSVGESGKLVDVGWPSV

SEQ ID NO: 23626 - protein, 284 aa, Glycine max
MVGVKTQRDPRDSMHHGGWMMKIICWCLLVIFMFFVPNEIISFYETISKFGSGMFLLVQVMLLLDFVHGWNDKWVGYDEQFWYIALFVVSLVCYVATFAFSGVLFHFFTPSGQDCGLNVFFITMTMILAFVFAIVALHPAVNGSVLPASVISLYCTYLCYSALASEPRDYECNGLHKHSKAVSTGTLTLGLATTVLSVVYSAVRAGSSAAVLSPPSSPRAGKPLLPLDAKEDEEKEKAKPVTYSYAFFHLIFSLASMYSAMLLTGWSTSVGESGKLVDVGWPSV

SEQ ID NO: 23627 - DNA, 1197 bp, Glycine max
aacatttgttctagacaagatctccatatctgttcccaaaagcttgtttgtaagaatggcttccggtgaacagaaattccctcctcaacaacaacaaacacagcctgggaaggagcatgctatgactccagtaccccaattcactagccctgactacaagccttcaaataaacttcaagggaagattgcattagtcactgggggtgattctgggattggacgagcggtgtgtaacttgtttgccttagaaggtgctaccgtggccttcacgtatgtgaaggggcatgaggacaaggacgcgagggacacattggaaatgatcaagagagcaaagacttcggatgccaaggatccaatggcaataccatctgatttgggttacgatgagaactgcaagagggtggttgatgaggtcgtgagtgcttatggttgtattgacattctggtaaacaatgcagctgagcagtacgagtgtggaaccgtggaggacatagacgagcctaggcttgagagggtctttcgtacaaatatcttctcctatttcttcatggcgaggcatgccttgaagcacatgaaggaaggaagcagcattatcaacacgacatcagtgaatgcatacaagggacatgcgaaactattggactacacgtccaccaagggggcaattgtggcctatacaaggggtcttgcccttcagctggtgagtaagggaattcgggttaatggggtggctccagggcccatttggacccctttgataccagcctctttcaaggaggaagaaacggcccaatttggagcgcaggtcccaatgaagagagctggtcaacctattgaggttgctccttcctatgtttttcttgcttccaaccaatgctcctcttacataactggacaagtccttcaccccaatggtggaaccgttgtgaatggttaaaccgttggtgatgatgatattcgggatgaatatatgtggcgagagtagtaggccagtgttacgttttgtgtgaatgttttacgatgtgttttaatgcatggctaactcactcaggtcctctctgcactgttagaggtggggcttggaggattatccacttttgaatgtacgagttattagcctaagaaaatgtgtcttttgtagccaaatatatgtaaacaagtaaaagtatataataaagatcggtatgtataaggttt

SEQ ID NO: 23628 - protein, 311 aa, Glycine max
TFVLDKISISVPKSLFVRMASGEQKFPPQQQQTQPGKEHAMTPVPQFTSPDYKPSNKLQGKIALVTGGDSGIGRAVCNLFALEGATVAFTYVKGHEDKDARDTLEMIKRAKTSDAKDPMAIPSDLGYDENCKRVVDEVVSAYGCIDILVNNAAEQYECGTVEDIDEPRLERVFRTNIFSYFFMARHALKHMKEGSSIINTTSVNAYKGHAKLLDYTSTKGAIVAYTRGLALQLVSKGIRVNGVAPGPIWTPLIPASFKEEETAQFGAQVPMKRAGQPIEVAPSYVFLASNQCSSYITGQVLHPNGGTVVNG

SEQ ID NO: 23629 - protein, 293 aa, Glycine max
MASGEQKFPPQQQQTQPGKEHAMTPVPQFTSPDYKPSNKLQGKIALVTGGDSGIGRAVCNLFALEGATVAFTYVKGHEDKDARDTLEMIKRAKTSDAKDPMAIPSDLGYDENCKRVVDEVVSAYGCIDILVNNAAEQYECGTVEDIDEPRLERVFRTNIFSYFFMARHALKHMKEGSSIINTTSVNAYKGHAKLLDYTSTKGAIVAYTRGLALQLVSKGIRVNGVAPGPIWTPLIPASFKEEETAQFGAQVPMKRAGQPIEVAPSYVFLASNQCSSYITGQVLHPNGGTVVNG

SEQ ID NO: 23630 - protein, 271 aa, Glycine max
MTPVPQFTSPDYKPSNKLQGKIALVTGGDSGIGRAVCNLFALEGATVAFTYVKGHEDKDARDTLEMIKRAKTSDAKDPMAIPSDLGYDENCKRVVDEVVSAYGCIDILVNNAAEQYECGTVEDIDEPRLERVFRTNIFSYFFMARHALKHMKEGSSIINTTSVNAYKGHAKLLDYTSTKGAIVAYTRGLALQLVSKGIRVNGVAPGPIWTPLIPASFKEEETAQFGAQVPMKRAGQPIEVAPSYVFLASNQCSSYITGQVLHPNGGTVVNG

SEQ ID NO: 23631 - DNA, 926 bp, Glycine max
aattatcggaagatgacaaagtacggatttctataataatacgctccgacgacagcagatcataagcgcagttcgttccacgttgttgttcgctctgtgtctctcactctctctatatttgcatcattcatcggaaatggctctcgaggttgctgttaaggctgctgttggggctccaaatgttctcggagattgtccattttcccaaagggtcctcttaactttggaggagaagaaaatcccttacaaactccacctcatcgatctcagtaacaaacccgaatggtttttgggtgtgaatcctgaagggaaggtgccagtggttctttttgatggcaaatgggtggctgattctgatgtaattgtggggatactagaggaaaagtacccagaaccctctctaatcactcctcctgaatttgcctccgtgggatcaaagatatttgggtcttttgtgagttttctgaagagcaaggatacaaacgatggaactgagcaagcattggttgctgaattgagtgccttggatgaacatctcaagacccatggtccatacattgctggggagaaagtcactgctgttgatctgagtttggcaccaaaactgtaccatcttgtggtagcactgggccacttcaagaattggaatattccagaaagtttggtacatgtgcacaattacactaagctgctgttctcccgagagtcatttgagaaaacaaagactccaaaggaggaatatgttattgctggatgggcgcctaaggtgaatgcttgaagtaattctaaattatgaggcatctgaacatcagatatgtgatgtactgtgactgaacctggttaagaataggatggcgaactcatgatgtttaagagtattgttacccttttaataatgaataaacatgtagtttgttggtgttttt

SEQ ID NO: 23632 - protein, 213 aa, Glycine max
MALEVAVKAAVGAPNVLGDCPFSQRVLLTLEEKKIPYKLHLIDLSNKPEWFLGVNPEGKVPVVLFDGKWVADSDVIVGILEEKYPEPSLITPPEFASVGSKIFGSFVSFLKSKDTNDGTEQALVAELSALDEHLKTHGPYIAGEKVTAVDLSLAPKLYHLVVALGHFKNWNIPESLVHVHNYTKLLFSRESFEKTKTPKEEYVIAGWAPKVNA

SEQ ID NO: 23633 - DNA, 1405 bp, Glycine max
ctcttgatttctttcgtgacgcgtcatattggtttattgcaaggtcggtggcaacccaaccctacccttgtctcctttctcatatgctatatatcagcctcctccacctagcacttgctccaattcactaccaccaaacacaacacaacacagcataccgtgtttcattttctctcacacacaaacctccttcgttttcatttacttctcaggaggtataactactatttttcgctttttttttaaaaaaaaaattgattaaatcttttgccatgggaacccagattttgcgacctcaggactgcttggtagaacgaatcagggctcctccggctgacttttcccggcggaggagttccggtaattactgtaattattattactacaacaacaacaacaaccatgtcgccacttccaggtcgtgccggaagcctgttagccgacccgaccaaaggaaacgggctgctcccggttctgcccagccggtggtggcggaggccgcggcggcggtgttgaagagaccgagccgtgatgattcaagggtggccaggagccaaagtttggagatgactacgattctacgtaggggccagtcgcttgattcggctgtgaagagcgaggtgtacgccggatctgcgttcgcggtgtctccgtcgccggaagcgcttcctctgccgtctttttcgacgaagaagcaggactcagtggcggttgatgactccgccacgcgagatctgaggcgtctgctccgcctcgaatgaaaacgagccgggttgcagtcccgggtttctgggtcgggttggacccgacaaattatccatattcccctctctctctcaccttattattactatctagaatcttctctttctcttatcctctccgtaaccgttaccgttacgcccgtcccggtttgaagttctgacccgactgtgatttttttaaacggaagggtggatgatctgatctaaactagggggtgaaatgtttaaaggtttggagtagcgtatgggccgtgaggctatgattatgtatcatgtaacttgtaacatatttcttgggttgtttattaaaacattaaaataaaatttagggtttatatacttgtaacactaataccaatcagttcaaaggggtgggaagaaatgaggaagaagcataagaaggaggaaatgtaagttagttttgtaaaatccagcaagtgtttgaatttggtgtaggttgggctttcagctatgaacagtttgatgtgatcaagtatagttcgtgctgtgttgtgaaacacggtgatcaacaagtgaatggttctggttcgtgctctgttgtgaatttgccagcttctctttgtacgctattttttgtaaagtggagcaaattattaacttgaggagatttgatcagattt

SEQ ID NO: 23634 - protein, 162 aa, Glycine max
MGTQILRPQDCLVERIRAPPADFSRRRSSGNYCNYYYYNNNNNHVATSRSCRKPVSRPDQRKRAAPGSAQPVVAEAAAAVLKRPSRDDSRVARSQSLEMTTILRRGQSLDSAVKSEVYAGSAFAVSPSPEALPLPSFSTKKQDSVAVDDSATRDLRRLLRLE

SEQ ID NO: 23635 - DNA, 1258 bp, Glycine max
tgctggtactgttagatgtcgttgtgaaaacactgcaacgttgggtgagagaaaaatgttaaccttcctggtgttgtggtggatctacccacacttactgagaaggataaggaagacattcttggatggggtgtacccaacaagattgacatgattgctctttcatttgttcgtaaaggctcggatcttgttaatgtccgcaaggttctggggccacatgcaaagaatattcagttgatgtcaaaggttgagaatcaggagggagtcctgaattttgacgaaatcctgcgggagactgatgcattcatggtggcacgtggtgatcttggaatggagatcccagtagaaaagattttcctggcacagaagatgatgatatacaagtgtaatcttgttgggaagccagtggtgactgctacccaaatgcttgaatcaatgataaagtctcccaggccaacccgagctgaagcaactgatgtagctaatgcagttcttgatggaacagattgtgtgatgcttagtggtgaaagtgctgctggggcatacccagaacttgctgtgaaaatcatggctcgcatttgcattgaagcagaatcatcccttgactatggtgccatcttcaaagagatgataaggtctaccccattgcctatgagtccattggagagccttgcatcatctgctgtccgcacagcaaacaaggccaaagcaaaactcattgttgtgctgacacgtggcgggtctacagccaagttagttgccaagtataggccagcggttccaatattgtcggtggtggttccagtgttgagcacggactcatttgattggacctgcagtgatgagacgccagcaaggcacagcctgatatacaggggcttgattcctatactgggcgagggatctgcaaaggctaccgatgcagaatccacagaggtcattctcgaagctgctcttaagtccgcaacagaaagggccctttgtaagcctggtgatgcagttgttgccctgcatcgtattggagctgcctctgtcataaagatctgcatagtcaaataatgcatgctcaactcaacgtgccgccaactaatgcagggttatgttttgccttttatttctttctttctgctgtttatccgtatcataaaatggaggatttagttactagctgtagatcgagtgttttttggtatactctgtttatattgcggagtacttctaaatcagattatcatggaaataatactcttaccttttt

SEQ ID NO: 23636 - protein, 302 aa, Glycine max
MIALSFVRKGSDLVNVRKVLGPHAKNIQLMSKVENQEGVLNFDEILRETDAFMVARGDLGMEIPVEKIFLAQKMMIYKCNLVGKPVVTATQMLESMIKSPRPTRAEATDVANAVLDGTDCVMLSGESAAGAYPELAVKIMARICIEAESSLDYGAIFKEMIRSTPLPMSPLESLASSAVRTANKAKAKLIVVLTRGGSTAKLVAKYRPAVPILSVVVPVLSTDSFDWTCSDETPARHSLIYRGLIPILGEGSAKATDAESTEVILEAALKSATERALCKPGDAVVALHRIGAASVIKICIVK

SEQ ID NO: 23637 - protein, 273 aa, Glycine max
MSKVENQEGVLNFDEILRETDAFMVARGDLGMEIPVEKIFLAQKMMIYKCNLVGKPVVTATQMLESMIKSPRPTRAEATDVANAVLDGTDCVMLSGESAAGAYPELAVKIMARICIEAESSLDYGAIFKEMIRSTPLPMSPLESLASSAVRTANKAKAKLIVVLTRGGSTAKLVAKYRPAVPILSVVVPVLSTDSFDWTCSDETPARHSLIYRGLIPILGEGSAKATDAESTEVILEAALKSATERALCKPGDAVVALHRIGAASVIKICIVK

SEQ ID NO: 23638 - protein, 250 aa, Glycine max
MVARGDLGMEIPVEKIFLAQKMMIYKCNLVGKPVVTATQMLESMIKSPRPTRAEATDVANAVLDGTDCVMLSGESAAGAYPELAVKIMARICIEAESSLDYGAIFKEMIRSTPLPMSPLESLASSAVRTANKAKAKLIVVLTRGGSTAKLVAKYRPAVPILSVVVPVLSTDSFDWTCSDETPARHSLIYRGLIPILGEGSAKATDAESTEVILEAALKSATERALCKPGDAVVALHRIGAASVIKICIVK

SEQ ID NO: 23639 - DNA, 956 bp, Glycine max
ctgtggcctctgttttcaaaggaaacccttgttcttttccttgcctttctttcctagcactgtcttctaacttccaactcatataattcattttccctagtcttctttgttttcaccctttccttgtgaaatctgcaaaaccagctattcagtttggctatcaaaccaagccaaagctcttatattattttttatatataaataggcaccaaatacacatttatgatacaccaatttgaagcttgtccacacaagacaagattatcaccagcccctttccattcacaaacctgagagtaagaagcacttgtcagtgaccaacaaaccaaccaaccaaccatgatgcctgctcatggcctcatcatctctctcatttttgtgtccattttagccaatgaggcaagcttggtccatgaggcaaatgggtcatttccaatggtgcccttggtggaggctgggaagatggagatgatgatggtgatgaatgagagcagaaggaaacttggaagcttccagatatgtgccttgtgcacctgctgtggtggagcaaaagggatgtgcttgccctctccttgttgctatgccatcaattgcaacattcctcatagaccttttggcttttgctcattcacaccaaagacctgtaattgctttggatgccatctttagtcccctctccccctattatagtcttataataataattgaaaaaaaattgagggttatttttagttaattatgttgcaagtgtgaatgggaagtgaagtgaagaatatctgctcttggttagtctgtttattaattactattagttattattattatttggggattgttatttccaggaattattttttctttctgcagtgcttactgggatttgttaggggtgcctggagatatagcacattgtctgatttgtcagaatagcaatatatgatataattatatgtagt

SEQ ID NO: 23640 - protein, 109 aa, Glycine max
MMPAHGLIISLIFVSILANEASLVHEANGSFPMVPLVEAGKMEMMMVMNESRRKLGSFQICALCTCCGGAKGMCLPSPCCYAINCNIPHRPFGFCSFTPKTCNCFGCHL

SEQ ID NO: 23641 - protein, 108 aa, Glycine max
MPAHGLIISLIFVSILANEASLVHEANGSFPMVPLVEAGKMEMMMVMNESRRKLGSFQICALCTCCGGAKGMCLPSPCCYAINCNIPHRPFGFCSFTPKTCNCFGCHL

SEQ ID NO: 23642 - protein, 83 aa, Glycine max
MRAEGNLEASRYVPCAPAVVEQKGCACPLLVAMPSIATFLIDLLAFAHSHQRPVIALDAIFSPLSPYYSLIIIIEKKLRVIFS

SEQ ID NO: 23643 - DNA, 1150 bp, Glycine max
ctacttagagcagccaaaccttacgcattccatttctctctattcgctctctttcaatcacaacaacatggccgaacgtggaggcggagaccgtgccggtttcggtcgcggctttggcggtcgtggacgcggcggcgacaggggacgagggcggcgcagggcaggagggcgccgcgacgaggaggagaagtgggtcccagtgacgaagctggggcgcctggtgaaggaggggaaaattcggagcctggagcagatctacctacactcgctcccaatcaaggagcaccaaatcattgacaccctcgtggggcccaccctgaaggacgaggtgatgaagatcatgcccgtccagaagcagacccgcgccggtcagcgaacccgcttcaaggccttcgtggtggtcggcgacaacaacggccacgtcggtctcggagtgaagtgcagcaaggaagtcgccaccgccatacgcggcgccatcattctcgcaaagctctctgttattcctgtgaggagaggctattggggtaacaagatcggaaagccccacaccgttccctgcaaggttaccggaaagtgtggctccgtcaccgtccgcatggtccccgcccctcgtgggtccggaatcgtcgccgctagggtccccaagaaggtcttgcagttcgctggaatcgatgacgtcttcacttcctccaggggttccaccaaaaccctcggaaatttcgtcaaggctacttttgactgtttgctgaaaacctacggttttctaacacctgaattctggaaggagactcggttctccaaatcaccattccaagagtacactgatctattggcaaagccaacagggaaggcccttatcctcgaggaggaaagggtggaggcttgagttagcagaagcagcagcagttttgatgttatcggatgattgtgcctcgtcttaagcatgctaggacccagtaattatatgttttgctaccttttgttatttcattttctattgaaggacatattatatatctccatgctttttgttttttctcaaatttagttgaatggatattatttactgaactttcaaacaggggtttattaaatttttcatgctgtcccaactaaatcataattcaaagaaaagaaaatgtgtttctgc

SEQ ID NO: 23644 - protein, 294 aa, Glycine max
YLEQPNLTHSISLYSLSFNHNNMAERGGGDRAGFGRGFGGRGRGGDRGRGRRRAGGRRDEEEKWVPVTKLGRLVKEGKIRSLEQIYLHSLPIKEHQIIDTLVGPTLKDEVMKIMPVQKQTRAGQRTRFKAFVVVGDNNGHVGLGVKCSKEVATAIRGAIILAKLSVIPVRRGYWGNKIGKPHTVPCKVTGKCGSVTVRMVPAPRGSGIVAARVPKKVLQFAGIDDVFTSSRGSTKTLGNFVKATFDCLLKTYGFLTPEFWKETRFSKSPFQEYTDLLAKPTGKALILEEERVEA

SEQ ID NO: 23645 - protein, 272 aa, Glycine max
MAERGGGDRAGFGRGFGGRGRGGDRGRGRRRAGGRRDEEEKWVPVTKLGRLVKEGKIRSLEQIYLHSLPIKEHQIIDTLVGPTLKDEVMKIMPVQKQTRAGQRTRFKAFVVVGDNNGHVGLGVKCSKEVATAIRGAIILAKLSVIPVRRGYWGNKIGKPHTVPCKVTGKCGSVTVRMVPAPRGSGIVAARVPKKVLQFAGIDDVFTSSRGSTKTLGNFVKATFDCLLKTYGFLTPEFWKETRFSKSPFQEYTDLLAKPTGKALILEEERVEA

SEQ ID NO: 23646 - protein, 184 aa, Glycine max
MKIMPVQKQTRAGQRTRFKAFVVVGDNNGHVGLGVKCSKEVATAIRGAIILAKLSVIPVRRGYWGNKIGKPHTVPCKVTGKCGSVTVRMVPAPRGSGIVAARVPKKVLQFAGIDDVFTSSRGSTKTLGNFVKATFDCLLKTYGFLTPEFWKETRFSKSPFQEYTDLLAKPTGKALILEEERVEA

SEQ ID NO: 23647 - DNA, 1292 bp, Glycine max
acacatagctgagagagaaaggaaaggttaactaagaagcaatacttcaatggccacccttgttgttcataaccaaacttcttctgctcaagatgctgaggctctccaacaggctttcaaaggatggggggctgatgacaaggccattatagcaatactgggtcacagaaatgttcatcagaggcaagaaatcagaaaagcttatgaggagatttaccaagaggatctcatcaaacgccttgagtccgagatctctggtgactttgagagagctatgtaccggtggatgttgcagcctgcggatcgtgatgctgttttggtgaatgtggcaatcaagaatggcaccaaagactaccatgtgattgcagagattgcttgtgtcctatcagctgaagagctcttggcagtgaggcgggcctaccaccgccgctacaagtgttccttggaggaagatgtggcagctaacaccaccggcaatcttcgccagcttttggttggattggtgacctcatataggtatgagggtgatgagatcaatgtaaaattttcacaaactgaagctaatgttcttcatgaatctgtcaaggagaagaaaggcaacagtgaagaagtcatcaggatccttactacaagaagcaaaactcaacttgtggcaactttcaaccgctacagagatgaacatggaatttccatcagtaagaaattgttggatcaaacatctgatgacttccacaaggtgttgcacactgctattcgctgcatcaatgaccataagaagtactatgagaaggttttgcgcaatgcagtcaagaagtttggaactgacgaggatggactaagccgtgtgattgttacaagggctgagaaggatctgaaggacatcaaagagctctactacaagagaaacagtgttcaccttgaggatgaagtgtccaaggaaacttctggggactacaagaagttcctcctcactctcttggggaaataagactaagttaagaacttgctctaagggcatcttagtaatgggtttttgttaattatgtcattggtttctggtttgtgcgatttcattatgttagttttccagtaagagtttgttatatctggttaagtttttgagacaacaagaactcgtgtcttgtttgagggcatgcgtgccatttcttagggttgtgttggtacttggcatgctcttattagaggacctctatgctgcgtgtttcctttggattatgctattacctcacctggtttgcttttaatgaaaggttgataacaaatttatatgt

SEQ ID NO: 23648 - protein, 312 aa, Glycine max
MATLVVHNQTSSAQDAEALQQAFKGWGADDKAIIAILGHRNVHQRQEIRKAYEEIYQEDLIKRLESEISGDFERAMYRWMLQPADRDAVLVNVAIKNGTKDYHVIAEIACVLSAEELLAVRRAYHRRYKCSLEEDVAANTTGNLRQLLVGLVTSYRYEGDEINVKFSQTEANVLHESVKEKKGNSEEVIRILTTRSKTQLVATFNRYRDEHGISISKKLLDQTSDDFHKVLHTAIRCINDHKKYYEKVLRNAVKKFGTDEDGLSRVIVTRAEKDLKDIKELYYKRNSVHLEDEVSKETSGDYKKFLLTLLGK

SEQ ID NO: 23649 - protein, 237 aa, Glycine max
MYRWMLQPADRDAVLVNVAIKNGTKDYHVIAEIACVLSAEELLAVRRAYHRRYKCSLEEDVAANTTGNLRQLLVGLVTSYRYEGDEINVKFSQTEANVLHESVKEKKGNSEEVIRILTTRSKTQLVATFNRYRDEHGISISKKLLDQTSDDFHKVLHTAIRCINDHKKYYEKVLRNAVKKFGTDEDGLSRVIVTRAEKDLKDIKELYYKRNSVHLEDEVSKETSGDYKKFLLTLLGK

SEQ ID NO: 23650 - protein, 233 aa, Glycine max
MLQPADRDAVLVNVAIKNGTKDYHVIAEIACVLSAEELLAVRRAYHRRYKCSLEEDVAANTTGNLRQLLVGLVTSYRYEGDEINVKFSQTEANVLHESVKEKKGNSEEVIRILTTRSKTQLVATFNRYRDEHGISISKKLLDQTSDDFHKVLHTAIRCINDHKKYYEKVLRNAVKKFGTDEDGLSRVIVTRAEKDLKDIKELYYKRNSVHLEDEVSKETSGDYKKFLLTLLGK

SEQ ID NO: 23651 - DNA, 1257 bp, Glycine max
cttctgcgtcgaccacctcgtcatttcttcctttccattttcatttctcggtgttgttgttcttcatccatggcttttcctcagcaccacttccaacagcactaccaaacccaacagcaacaacagccacaaaacaaatccttcagaaatctgcaaacaatcgatggtcagatgtcacagcaggtggcgttttacaaccctactgatttgcaagatcaatcccaacatccaccctacattcctccatttcatgttgttgggtttgctccgggtcctgttcctcctgctgatggcagtgatggtggagttgatttgcaattgcaatggaattatggtttggagccagagaggaagagactaaaagaacaggattttttggagaacaattctcagatatcttctgttgatttccttcaaccacgatcagtgtcgactgggttgggcttgtcactagacaatactcgcctgacatccactggagactcagctttgttgtcactcatcggtgatgacatcgagcgtgagttgcagcagcaggacgcagagatagatagatttctcaaagtgcagggtggacgtttgcggcaagcagtcttggagaaggttcaggcaacacagcttcagagtgtctcactaattgaagacaaaatccttcagaaactttgcgagaaagaagctatggtagaaagcatcaacaagaggaacattgaactcgaagatcaaatggagcagttgactgtggaagctggttcgtggcaacagcgagcaagatataatgaaaatatgattgctgctctcaagttcaaccttcagcaagcgtatgtccaaagcagagatagtaaagaaggatgtggtgacagtgaggtcgacgatacagcttcttgctgcaatggccgttccctcgattttcatctgctttcaagggagaacaccgacatgaaagagatgatgacatgcaaggcttgcagagtcaatgaagtgaccatggttttgttaccttgtaagcatctttgcctctgtaaagattgtgaaagtaagcttagtttctgtcctctatgtcaatcctccaaatttatcggcatggaggtctacatgtaactgcaaagtatacttctacttgtgaaatctctaatttcatgtttttattatgtgtcctttcatgtagcttgtgtctcaaggaccatgacaccttgtaactagtttttaagatgtatttgaccataatgaatttcacttgcttgagaacagtgaattttg

SEQ ID NO: 23652 - protein, 365 aa, Glycine max
LLRRPPRHFFLSIFISRCCCSSSMAFPQHHFQQHYQTQQQQQPQNKSFRNLQTIDGQMSQQVAFYNPTDLQDQSQHPPYIPPFHVVGFAPGPVPPADGSDGGVDLQLQWNYGLEPERKRLKEQDFLENNSQISSVDFLQPRSVSTGLGLSLDNTRLTSTGDSALLSLIGDDIERELQQQDAEIDRFLKVQGGRLRQAVLEKVQATQLQSVSLIEDKILQKLCEKEAMVESINKRNIELEDQMEQLTVEAGSWQQRARYNENMIAALKFNLQQAYVQSRDSKEGCGDSEVDDTASCCNGRSLDFHLLSRENTDMKEMMTCKACRVNEVTMVLLPCKHLCLCKDCESKLSFCPLCQSSKFIGMEVYM

SEQ ID NO: 23653 - protein, 342 aa, Glycine max
MAFPQHHFQQHYQTQQQQQPQNKSFRNLQTIDGQMSQQVAFYNPTDLQDQSQHPPYIPPFHVVGFAPGPVPPADGSDGGVDLQLQWNYGLEPERKRLKEQDFLENNSQISSVDFLQPRSVSTGLGLSLDNTRLTSTGDSALLSLIGDDIERELQQQDAEIDRFLKVQGGRLRQAVLEKVQATQLQSVSLIEDKILQKLCEKEAMVESINKRNIELEDQMEQLTVEAGSWQQRARYNENMIAALKFNLQQAYVQSRDSKEGCGDSEVDDTASCCNGRSLDFHLLSRENTDMKEMMTCKACRVNEVTMVLLPCKHLCLCKDCESKLSFCPLCQSSKFIGMEVYM

SEQ ID NO: 23654 - protein, 308 aa, Glycine max
MSQQVAFYNPTDLQDQSQHPPYIPPFHVVGFAPGPVPPADGSDGGVDLQLQWNYGLEPERKRLKEQDFLENNSQISSVDFLQPRSVSTGLGLSLDNTRLTSTGDSALLSLIGDDIERELQQQDAEIDRFLKVQGGRLRQAVLEKVQATQLQSVSLIEDKILQKLCEKEAMVESINKRNIELEDQMEQLTVEAGSWQQRARYNENMIAALKFNLQQAYVQSRDSKEGCGDSEVDDTASCCNGRSLDFHLLSRENTDMKEMMTCKACRVNEVTMVLLPCKHLCLCKDCESKLSFCPLCQSSKFIGMEVYM

SEQ ID NO: 23655 - DNA, 1263 bp, Glycine max
ctagagccagtcttttataatattagagcatctagctcaaatagcatggcttccaatctgattagagtgagcacaagcttggttctagtagttttagtagctctcacagttcaaattttctacatttcacccatagatccagttttgctggatataaaacctgctccttcaaccaaagacaatcaattacagaatatcattaagcttggagaaggacttttgaaggaaccagaagatgttgttgtagataaagaagggactctctatacagctactcgagatggttggattaaaagattgcgcaggaataatggaaaatgggagaattggaagcatatagatagtcatactttgctaggaatcgcaacagcaaaagaaggtggtctcattgtttgtgatacttccaagggtttgctcaaggttacagaagaagatggttttagtgttcttgtttcacacgtaaatggttctcagttaaggtttgcagacgatgtgatagaaggctcaaacgggaatgtatattttagtgttgttagtacaaaatttgatcttcaagattggtatttggatgtgttagaggcaagacctcgtggacaagttctcaagtacaatcccacatcaaatgagactgttattgttcttgataatgttgcatttgccaacggcgttgcactctctaaggacgaagattatcttgtggtttgtgaaacttggaaatacaggtgtttgaggcattggttagaaggagcaaacaaaggcacaacagatattttcattgaaaaccttcctggtgcacctgataatatcaatcttgctcccgatggatccttctggatcgctttgattcagttgacttctgaaggatttgagtttgtccacaactacaagataactaagcacttggttgcatcgtttccaaggctaattaaccttgtcaatggctgcaagaagaaagcaacggtggtgaatgtggcaactaatggcaggataataagaaagcttgatgatagtgatgggaaggtgattaattttgtgacttcagctgtggagtttgaggaccacctttaccttggtagtcttaattccaactttgttggaaaattaccattgtatagtgcatagaatagtcaagtttagccctccttgaataaaggtgtgcctcagcttggatcaagcgaaagaagcatcccatgatggatatgtatgatttagaccaagcacatataggagaatattgttccataatgcatattctctgttcac

SEQ ID NO: 23656 - protein, 373 aa, Glycine max
LEPVFYNIRASSSNSMASNLIRVSTSLVLVVLVALTVQIFYISPIDPVLLDIKPAPSTKDNQLQNIIKLGEGLLKEPEDVVVDKEGTLYTATRDGWIKRLRRNNGKWENWKHIDSHTLLGIATAKEGGLIVCDTSKGLLKVTEEDGFSVLVSHVNGSQLRFADDVIEGSNGNVYFSVVSTKFDLQDWYLDVLEARPRGQVLKYNPTSNETVIVLDNVAFANGVALSKDEDYLVVCETWKYRCLRHWLEGANKGTTDIFIENLPGAPDNINLAPDGSFWIALIQLTSEGFEFVHNYKITKHLVASFPRLINLVNGCKKKATVVNVATNGRIIRKLDDSDGKVINFVTSAVEFEDHLYLGSLNSNFVGKLPLYSA

SEQ ID NO: 23657 - protein, 358 aa, Glycine max
MASNLIRVSTSLVLVVLVALTVQIFYISPIDPVLLDIKPAPSTKDNQLQNIIKLGEGLLKEPEDVVVDKEGTLYTATRDGWIKRLRRNNGKWENWKHIDSHTLLGIATAKEGGLIVCDTSKGLLKVTEEDGFSVLVSHVNGSQLRFADDVIEGSNGNVYFSVVSTKFDLQDWYLDVLEARPRGQVLKYNPTSNETVIVLDNVAFANGVALSKDEDYLVVCETWKYRCLRHWLEGANKGTTDIFIENLPGAPDNINLAPDGSFWIALIQLTSEGFEFVHNYKITKHLVASFPRLINLVNGCKKKATVVNVATNGRIIRKLDDSDGKVINFVTSAVEFEDHLYLGSLNSNFVGKLPLYSA

SEQ ID NO: 23658 - DNA, 1443 bp, Glycine max
ctgcaaagcccaagaccaaaaccctacttgaaccctttctctcttcgtcaccgctcacaaacatcacaactatgtccttgggaattcttcgatcgcgagcgatttcattggcatcgaagcgatttctctgcaccaatgccgcttcggctcctctcccccctcctccttccgccgcttctcccagccgctggaacttcctcaaatacgccgtcgtcggcgctctcaccggaggcactgcctttgccggttacgcctcttacgcttacagtttggaagaagtagaagagaaaacgaggtcgtttcgtgaatcggccaaatacgctgctggtgatggagccactgctctcgataaatttcaaggtttgctatactcaactgcaatgacagtgcctgctaaagcagtagagctttatttggatgcaagaaggctaattgaagaacaagttaggagttatactgaaccatacacagacaagctccttcctgatctgcttcctcaggagcaacatgtgtttacacttgttcttgatctcaatgagacattgattcactatatttggacacgagatacaggttggcagacttttaaaagacctggagttgatgccttcttggaacatttagctcagttctacgaaatagtggtgtacacagatgagcaaaatatgtttgtagaccctgttatagaaaggctggataccaagcattgcattagatacaggctatcgaggccagctactaagtatcaggatgggaaacacttcagagacctctcaaaactaaacagaaatccaggaaaagttctttatttaagtggccatgctttggaaagttgcctacaacccgagaactgtctccctattaaggcttggcagcagcaagatatagatgacacagctcttttggattttataccatttcttgagtttgttgcccgtagtagtccacctgatataagaccagtgctagcctcttaccaaggatgtgatattccaagtgagttcatcaggcgttccaaggagcatcaaaggagaatgcaagaacaaaaaaatcgtggtcgcttctggaaatgagattcagtttcattgcaagttgataacaaatgttctttgttgaggctagataatgagattgtctgtttcattacaagttgatcagtcagttcatccaagattttgaagtcactgcaagttgacaagtgattgaattaaatagagaaaatgtagattttgttttacgcaagtcttgcaactcatgtcttgaaccattttttctttttgcctattgtaattctgttgctggaaagcacttattaattttggggatggaattctcaatgctagatgtttcttgcaaggtgatttaaccttgagtacatctctgtgcagaagtggttatggatgaccataaaaactgaattgacataataaaatattttacttg

SEQ ID NO: 23659 - protein, 356 aa, Glycine max
AKPKTKTLLEPFLSSSPLTNITTMSLGILRSRAISLASKRFLCTNAASAPLPPPPSAASPSRWNFLKYAVVGALTGGTAFAGYASYAYSLEEVEEKTRSFRESAKYAAGDGATALDKFQGLLYSTAMTVPAKAVELYLDARRLIEEQVRSYTEPYTDKLLPDLLPQEQHVFTLVLDLNETLIHYIWTRDTGWQTFKRPGVDAFLEHLAQFYEIVVYTDEQNMFVDPVIERLDTKHCIRYRLSRPATKYQDGKHFRDLSKLNRNPGKVLYLSGHALESCLQPENCLPIKAWQQQDIDDTALLDFIPFLEFVARSSPPDIRPVLASYQGCDIPSEFIRRSKEHQRRMQEQKNRGRFWK

SEQ ID NO: 23660 - protein, 333 aa, Glycine max
MSLGILRSRAISLASKRFLCTNAASAPLPPPPSAASPSRWNFLKYAVVGALTGGTAFAGYASYAYSLEEVEEKTRSFRESAKYAAGDGATALDKFQGLLYSTAMTVPAKAVELYLDARRLIEEQVRSYTEPYTDKLLPDLLPQEQHVFTLVLDLNETLIHYIWTRDTGWQTFKRPGVDAFLEHLAQFYEIVVYTDEQNMFVDPVIERLDTKHCIRYRLSRPATKYQDGKHFRDLSKLNRNPGKVLYLSGHALESCLQPENCLPIKAWQQQDIDDTALLDFIPFLEFVARSSPPDIRPVLASYQGCDIPSEFIRRSKEHQRRMQEQKNRGRFWK

SEQ ID NO: 23661 - protein, 230 aa, Glycine max
MTVPAKAVELYLDARRLIEEQVRSYTEPYTDKLLPDLLPQEQHVFTLVLDLNETLIHYIWTRDTGWQTFKRPGVDAFLEHLAQFYEIVVYTDEQNMFVDPVIERLDTKHCIRYRLSRPATKYQDGKHFRDLSKLNRNPGKVLYLSGHALESCLQPENCLPIKAWQQQDIDDTALLDFIPFLEFVARSSPPDIRPVLASYQGCDIPSEFIRRSKEHQRRMQEQKNRGRFWK

SEQ ID NO: 23662 - DNA, 1320 bp, Glycine max
aacccacaccacgctgttgaattgcgcaaccctgcacctgcacccgtaccgcagtgacaacatcggcgtgcataaactctaaaccctactatgtccgaagacaagtacgacgtgctcctctattacaagtacgttgaaattcccaacctcaacgacctcctcaccttctaccactccaactgctcctccctcagcctcctcggtcgtgttcgcctttcttctcacgacgtcaatgtcaccgttggcggcaacttatcctctctcaagaatcacatcgaagccctcaaagcctacagaaccttgtttcaccacactgatttcaagctcgacacttgtcatcatccattaaacaacaaagtagcctaggaatgtggattcacttccctctctattcgaatcatcgacgaacttgttactctcagttcccatccactgttaaagtcaccggatatctcaaatgtcggaaagcatctctctgccctcgacttccattcttccctccacaataccaatgacaatggaagtaggagctgttgcagccatgagatatgtaaaggatggaattaaagttgccaggttagtgatgcaacatactaaacacactttgctggtaggagagaaagcatcagaatttgctatttcaatgcgtcttccaggtcccatgaacttgagttcaccagaatctatggagaagtgggccaaatggaaagatagtcgttgtcaaccaaatttcaagaaaaatgtatcacctgcaaatagttgtggtccttatcgtccaacaaattatctggggcatcctgatgaaacatgctccagtactgtttagatgctaactagtaattccaatttacttcttgttagtcttcatagccatgatactatatcaatggctgttattggtagagtaagatataacaaaaaattgatttgtattggaacctggttagtattgaaacctgattattctattcatcggtcgaaggctgcaaggaatagacaacaatgattttttatgcttgatcaatgattcattttggagcaagttatgacattgatcaatgattttttaactcttattttttatgcttgatctatcttcccgttatagattaatcagactaatctgaaatgaagttattgttgatcatgttaataattcaaatattttttgttttgggtattgggggagagattaaggaactggttaaggattattgtagcagaaaagttttcttattatagcatttcttgagggatttgttttgttaatctataagcagacatttcttgaggaatcaattttttttttctttttgagct

SEQ ID NO: 23663 - protein, 122 aa, Glycine max
MSESISLPSTSILPSTIPMTMEVGAVAAMRYVKDGIKVARLVMQHTKHTLLVGEKASEFAISMRLPGPMNLSSPESMEKWAKWKDSRCQPNFKKNVSPANSCGPYRPTNYLGHPDETCSSTV

SEQ ID NO: 23664 - protein, 104 aa, Glycine max
MTMEVGAVAAMRYVKDGIKVARLVMQHTKHTLLVGEKASEFAISMRLPGPMNLSSPESMEKWAKWKDSRCQPNFKKNVSPANSCGPYRPTNYLGHPDETCSSTV

SEQ ID NO: 23665 - protein, 102 aa, Glycine max
MEVGAVAAMRYVKDGIKVARLVMQHTKHTLLVGEKASEFAISMRLPGPMNLSSPESMEKWAKWKDSRCQPNFKKNVSPANSCGPYRPTNYLGHPDETCSSTV

SEQ ID NO: 23666 - DNA, 1306 bp, Glycine max
ctcgcgtgtcgtacggtaagtaagtaaccacactcactcactgcttcacgcatttttcccaatctccgatccctcgtttctagggttttccatctattcatcacatcgcataatcttttcttttcttctaataagtgtgtttttttgccgggaaacaggatcgtgcattttccttgaacgcgatcggcgaatgataatgaaaaagaaacgaaaggaaagcgaggccagtggacggtcgaacttgccggatgagatttcgaagtcgcattactcccttgagcggcgttcgcggttgatcaaacggtgcagggaagacggcgtcgtggcgacggtgccgccgtcacgcggcgcgtcgttattcctaacgccgtcgcggggcttgaagcggaagataggttgcatcgacaaggccacgcagatggggcgcagcgtgaggatcgaggacgactacgtgaccgggggcagcgcgatcgggcaggggaagttcgggtcggtgacggtgtgccgcgcacgtgcgaacggcgcggagcacgcgtgcaagacgctgaggaagggggaggagacggtgcaccgcgaggtggagataatgcagcacctgtcggggcaccctggggtggtgacgctggaggcggtgtatgaggatgaggagtgttggcatcttgtgatggagttgtgttctggggggaggttggttgataggatgaaggaggggccgtgttcggaacacgtggcggcggggatactgaaggaggtgatgttggtggttaagtattgccatgatatgggtgtcgtgcatagagatattaagcctgagaatatcttgctcaccgcggccgggaagatcaagcttgcggatttcgggctcgccatcaggatttctgagggtcagaatttgacaggtgtggctgggagccctgcatatgttgcgccagaagtgttgttgggtagatattctgagaaggtggatatatggagttctggggtgctcctgcatgctttgttggttggtggtcttccatttaaaggagattcaccggaagcagtttttgaggaaattaagaatgtcaaactagattttcaaacaggggtgtgggaatcaatatctaaacctgcacgagatcttgttgggagaatgctgacaagggatgtttcagcaaggataacagctgatgaagtactaagtaggtttattatagatctcgagtgtttgcctgctttgtcttctttcctcgatgatgaacacacgaaagatttattgaatctgattttttgttattttaatcttgaaatgatcaacatagataat

SEQ ID NO: 23667 - protein, 372 aa, Glycine max
MIMKKKRKESEASGRSNLPDEISKSHYSLERRSRLIKRCREDGVVATVPPSRGASLFLTPSRGLKRKIGCIDKATQMGRSVRIEDDYVTGGSAIGQGKFGSVTVCRARANGAEHACKTLRKGEETVHREVEIMQHLSGHPGVVTLEAVYEDEECWHLVMELCSGGRLVDRMKEGPCSEHVAAGILKEVMLVVKYCHDMGVVHRDIKPENILLTAAGKIKLADFGLAIRISEGQNLTGVAGSPAYVAPEVLLGRYSEKVDIWSSGVLLHALLVGGLPFKGDSPEAVFEEIKNVKLDFQTGVWESISKPARDLVGRMLTRDVSARITADEVLSRFIIDLECLPALSSFLDDEHTKDLLNLIFCYFNLEMINIDN

SEQ ID NO: 23668 - protein, 370 aa, Glycine max
MKKKRKESEASGRSNLPDEISKSHYSLERRSRLIKRCREDGVVATVPPSRGASLFLTPSRGLKRKIGCIDKATQMGRSVRIEDDYVTGGSAIGQGKFGSVTVCRARANGAEHACKTLRKGEETVHREVEIMQHLSGHPGVVTLEAVYEDEECWHLVMELCSGGRLVDRMKEGPCSEHVAAGILKEVMLVVKYCHDMGVVHRDIKPENILLTAAGKIKLADFGLAIRISEGQNLTGVAGSPAYVAPEVLLGRYSEKVDIWSSGVLLHALLVGGLPFKGDSPEAVFEEIKNVKLDFQTGVWESISKPARDLVGRMLTRDVSARITADEVLSRFIIDLECLPALSSFLDDEHTKDLLNLIFCYFNLEMINIDN

SEQ ID NO: 23669 - protein, 296 aa, Glycine max
MGRSVRIEDDYVTGGSAIGQGKFGSVTVCRARANGAEHACKTLRKGEETVHREVEIMQHLSGHPGVVTLEAVYEDEECWHLVMELCSGGRLVDRMKEGPCSEHVAAGILKEVMLVVKYCHDMGVVHRDIKPENILLTAAGKIKLADFGLAIRISEGQNLTGVAGSPAYVAPEVLLGRYSEKVDIWSSGVLLHALLVGGLPFKGDSPEAVFEEIKNVKLDFQTGVWESISKPARDLVGRMLTRDVSARITADEVLSRFIIDLECLPALSSFLDDEHTKDLLNLIFCYFNLEMINIDN

SEQ ID NO: 23670 - DNA, 1336 bp, Glycine max
actgaggtctagataataaaataaataaataagtaagccttattatttttttttttttgggttcaaaataaaagaaaaaaaaaacttatttatttggcgttcgaattggtttctcactcatcgacatttccgttttgcccccattggccaattcggccactcttctctgaaaaagcctccagcctccttcttcatccatcttccctctccaccaaaatcctccgcggttcgttccgttattcatcgaaccgttctctcaagtctcgtacttggcttagttcacaactcgaaacttcaccgaacgcattccattcaccaattcgtccaagtctcgtatcaatcagtcaatccgtctcgtggaggttggagagatcggaggggaaaggatccatggcgcatcgagtggaccacgagtatgactatctgttcaagatcgttttgatcggagactcaggtgtaggaaaatctaacatcctctccaggttcactcgaaacgagttctgtttagagtccaaatccactatcggagttgagttcgccaccagaactcttcaggtagagggaaagactgtgaaagcacagatctgggacacagcaggtcaagagcggtaccgtgccattaccagtgcttattacagaggagctgttggagctctactcgtatatgacataaccaagaggcaaacctttgacaatgtccaaaggtggttgcgtgaactgagggaccatgcagactctaatatagttatcatgatggctggaaataaatctgatttgagccatcttagagcggtttcagaggatgatggtcaagcattggcagagagggaaggtctctcgtttcttgagacatctgcactggaagcaaccaacattgagaaggcattccaaaccattttgacagagatttatcatattgttagcaaaaaggcacttgcggctcaggaagcagctgttggtaccacacttcctggtcaaggtaccaccatcaatgttggggatgcatctgggaatacaaagagaggctgctgctccacttaatgcgacatttgaggaaaaagcgatggtagcagatagccagatagtattttttttcccccaattctgttttgcccctttctcttttcatcttttttttcctcctttctttatatgggtgagagagacacatgtagagtacatttacttcattgagttgcaaaaacgaagtctgtgaaatttataaaacaatagtcttgctagttcctttgaatttatctcttccttgatgttatagtttcgcatgaattaatgtaatattggaacgaacagatattgatgatatattgtcgttgct

SEQ ID NO: 23671 - protein, 216 aa, Glycine max
MAHRVDHEYDYLFKIVLIGDSGVGKSNILSRFTRNEFCLESKSTIGVEFATRTLQVEGKTVKAQIWDTAGQERYRAITSAYYRGAVGALLVYDITKRQTFDNVQRWLRELRDHADSNIVIMMAGNKSDLSHLRAVSEDDGQALAEREGLSFLETSALEATNIEKAFQTILTEIYHIVSKKALAAQEAAVGTTLPGQGTTINVGDASGNTKRGCCST

SEQ ID NO: 23672 - DNA, 1973 bp, Glycine max
actaaactttttacttttgtgccaaccacaccttaaaaaaccagaaaagctgaaacgtgtctgcttgaagctttttatgccacttgtcttctctcctttttccaaattccctttatgcttctttcctgctccaatgatcgcagcaagatttcgaccttcttttctgcaaaatactgtcagctcaaactctttgtgggttttcggctgaaccccttcatatatggccactgaagcacatcgttttcccaagattaataatgaccaaggctcttctagtatacctcataacccaattcaaaaggatgtagagtcatccgaaataactgaggaactccctagtagacatgcacatggtagaaggaaaaaccttatcttggagataccaacaagaacactagatgaaacaagagaggaatttttcagaacaaaccaacctccaactccatctcctagaagccaaatcaatgagttccaaggtcctttgtcaaccaaaaatattaaatttcacaagataagttcagatgttgaagaggcttccatcccagcacttgacggttcccccccggagccactgcaagagcctatgatttcaagaacattatcacctaatgagatgaaaatatcatccttacctgtcaccccaattgctcagtcaaatctggagtctggacatggagggaacattgcctatccagcaacacatgttaagaaaggactgcaactaccaatgcatcgttcccgttcagttcccgtgcttactgaagatgacagcacatatgtaggtgccatgtttcgtattgttcctaccacaccacggttgacaaagagcattgccacaacatctatgaaatctccgcctgacgataccgttgaaaatgaggatggggaagatattcctgaagaagaagccgtctgcagaatttgtttgattgaattgggagaaggttctgatacacttaaaatggagtgcagctgcaaaggtgaacttgcactggcacaccaagagtgtgcagttaaatggtttagcattaaaggcaacagaacatgtgatgtgtgcaagcaggaagttcagaaccttcctgtcactcttctacgagttttaaatggccaaacactttacttgacaaggagtagaagccaacaatacagggtttggcaaaatattcccattcttgtgattatcaacatgctggcatacttttgtttccttgagcagctacttgtttcaagtatgggatctggtgctgttgccatttctctccctttttcatgtatactaggtctacttgcaagcatgacatccacaataatggtgacgtgtgaacatgtttgggtttatgcaattgcccagtttgttatggtggttctcgctggacgtcttttctattcactgcttaataagcaagccgttctatctatcctacttgctacatttactgggtttggagctgtgatgtgtggagcttatattcttattgagtttttgaaatggagaagacgatggcttggttcccaagaggtggtactgcctcattaatcacattcatcagcgaccactcaccaagctttgactgattctcaacaccatggaaataatgtgagagacactgcagtgcatgtgagtgtgagttgacatagaatatacttttatattgatggtgtttaattggctgtatataaaagtataatgtatggactatactttaagcacattacacccttttttgtctccgtggtactcgcgagaatacacaagtatcgcattccttgtattgagaccgctgactcgaagccagttgtattgtaactgtgaggccatattataatattggacttgcaagaaacttctgagcaaatcctgtaggtgaaaagataaagaaaggttgtttttgtacaattataggggaacaaaaagggattctgtactgtaaagatggttgaagagatgaatacacatgtcttattttggttcc

SEQ ID NO: 23673 - protein, 438 aa, Glycine max
MATEAHRFPKINNDQGSSSIPHNPIQKDVESSEITEELPSRHAHGRRKNLILEIPTRTLDETREEFFRTNQPPTPSPRSQINEFQGPLSTKNIKFHKISSDVEEASIPALDGSPPEPLQEPMISRTLSPNEMKISSLPVTPIAQSNLESGHGGNIAYPATHVKKGLQLPMHRSRSVPVLTEDDSTYVGAMFRIVPTTPRLTKSIATTSMKSPPDDTVENEDGEDIPEEEAVCRICLIELGEGSDTLKMECSCKGELALAHQECAVKWFSIKGNRTCDVCKQEVQNLPVTLLRVLNGQTLYLTRSRSQQYRVWQNIPILVIINMLAYFCFLEQLLVSSMGSGAVAISLPFSCILGLLASMTSTIMVTCEHVWVYAIAQFVMVVLAGRLFYSLLNKQAVLSILLATFTGFGAVMCGAYILIEFLKWRRRWLGSQEVVLPH

SEQ ID NO: 23674 - protein, 317 aa, Glycine max
MISRTLSPNEMKISSLPVTPIAQSNLESGHGGNIAYPATHVKKGLQLPMHRSRSVPVLTEDDSTYVGAMFRIVPTTPRLTKSIATTSMKSPPDDTVENEDGEDIPEEEAVCRICLIELGEGSDTLKMECSCKGELALAHQECAVKWFSIKGNRTCDVCKQEVQNLPVTLLRVLNGQTLYLTRSRSQQYRVWQNIPILVIINMLAYFCFLEQLLVSSMGSGAVAISLPFSCILGLLASMTSTIMVTCEHVWVYAIAQFVMVVLAGRLFYSLLNKQAVLSILLATFTGFGAVMCGAYILIEFLKWRRRWLGSQEVVLPH

SEQ ID NO: 23675 - protein, 307 aa, Glycine max
MKISSLPVTPIAQSNLESGHGGNIAYPATHVKKGLQLPMHRSRSVPVLTEDDSTYVGAMFRIVPTTPRLTKSIATTSMKSPPDDTVENEDGEDIPEEEAVCRICLIELGEGSDTLKMECSCKGELALAHQECAVKWFSIKGNRTCDVCKQEVQNLPVTLLRVLNGQTLYLTRSRSQQYRVWQNIPILVIINMLAYFCFLEQLLVSSMGSGAVAISLPFSCILGLLASMTSTIMVTCEHVWVYAIAQFVMVVLAGRLFYSLLNKQAVLSILLATFTGFGAVMCGAYILIEFLKWRRRWLGSQEVVLPH

SEQ ID NO: 23676 - DNA, 1397 bp, Glycine max
atgttttaaatttctggaattttcttttccttggtgaggcttggcagtgaaaatagattgggatgcttgaagcccctagggaaaagtaatatccttctctgcgataagaggaagcccaccacctcagaaaacagaaaacagagtgagtgagtgtgttgtgtaatatggataaaagctgtcatccctctagcaatactagtataagcacatcctctgctgccaaccccaacaacaatagcagggatcaatatcttcgccatctcaacaagctctctcaaaagatctccaaacccatcattaagaaacccgtctttgatcctcctcaggcccaagtcccaaacaatcaggtgcagcatcagccgccggtgtacaacatcaacaagaacgacttccgtgatgtggttcagaaactgacgggctcacctgcgcacgaccgcatctcaacgccgcctcccattcagccacccaagcccccgagctctcgccttcagaggattcgccctcctcccctgcctcaaattactaaccgcccacccccgctccttaaccccaccaccctcccccgccctcaacaactccctaacgccgttaccttcaacaacaacttctccgttttttcgagaccccccgcgccgttatctcctctgccgccgttccccaccgtccacgcccccgctgagtcacctatctccgcctacatgcgcgatctgcagaccctcgtcgatgcaaacgccaagcacttttcaggcttttctcccttgcctccaccgcctctggttcaacctcaacctcaacctcaacctcagcctcagcctcagcaagaacaacagccacagcagcagcagcaagggatggttccgtcgcaagcgccgtcgtcgtttcagatgccgtcttcgcctgtgccgtttgggtgtttgaattcgcagctggcgtcctaccctctgctgtcgccggggcttctgttttccccaacttctggtcagttagggtttccgcagcttccgctttcgcccactgtgccggtccctagccctcgctggaagggaatttgagaggggtgaggtgagtttggtcacagacatgtcaatttagctcagctttttttagggttttttaaattttgttgttgttgttgttgttgtgttacctgtacatggtgctggtgctagggggaattcaatttgcggtggttggactcgaagtggtccgctgctgcttagtttaattctgtaaatgggatatcaaagacatcaaaaagggtacaattttgcattggttcttgccatgctgtttggggatatgcaaaaacaaaattagatgttatacaattatagtgggattattatcatcattatcattatgctgttttcaatataatcaaaatctttattgtcttc

SEQ ID NO: 23677 - protein, 295 aa, Glycine max
MDKSCHPSSNTSISTSSAANPNNNSRDQYLRHLNKLSQKISKPIIKKPVFDPPQAQVPNNQVQHQPPVYNINKNDFRDVVQKLTGSPAHDRISTPPPIQPPKPPSSRLQRIRPPPLPQITNRPPPLLNPTTLPRPQQLPNAVTFNNNFSVFSRPPAPLSPLPPFPTVHAPAESPISAYMRDLQTLVDANAKHFSGFSPLPPPPLVQPQPQPQPQPQPQQEQQPQQQQQGMVPSQAPSSFQMPSSPVPFGCLNSQLASYPLLSPGLLFSPTSGQLGFPQLPLSPTVPVPSPRWKGI

SEQ ID NO: 23678 - DNA, 1207 bp, Glycine max
gagtgagacaatatcacacataatataattccaaaatcactcctattgctatagcaatatgatgggtgacactgagatcaaaccatcagttgaagtagtcatatgtgcttccatgaacaataacaatagcgcaaacaaccacaccctcccaaccgacatcaccaagtcatcacaatcacacttaccaatcttgaccaagctccatgctggttactttttcatatgcctttcctttggtgcacaagctttgctctggaagagtttgagtaaacacaacaaggactcacaaactctctggcatggattcaatttgatgccttccattgcgtttctactactttggtgtgtggcactgctcactgccactactttgtctttactttacgtgctcaagtgcatctttcacttggacatggtgaaggaggagttctcacatcatgttggagtgaactgcatgtatgctccttggatttcttggcttctcatgcttcaatcagcacccatcatcgttcattcaacttcttgctacggagttctttgcttggccttttcgtttgtaatattgctgcttgacataaaactatatggacaatggttcacaactaaaaagaggtttctgtcagttgtggcaaaccctactagcctggtgtcggttatagggaacttggtgtctgctcaagttgttgcagaaattggttggaaagagagtgcacttttaatgttctcactcggattggtatattatctaattatatttgtaacgctgtatcaacgtctgacaagtggcaatcagtttcccactgtgctaaggccaacttacttgttgttttttgctgcaccaagcatggcaagtctagcctggaaatccatcacaggtgcttttgtcaccccatcaaagatgctcctctttctgtctttattcctttttatgtctcaggcttgcaggccagccatgttcaagaaatccatgaagaggttaaacgttacatggtgggcgtattcattccctttaaccttccttggactagcttgtgctgaatatgctcaagaggtgaaaagtggcatggcctcttggttaatgctggttatatgtatggtctccgtgctggtttttattgctttgatgatcatcactgtactcaaaattgagagactgttccataaaaatgctcccattatgacttgaaaataaaatgtctttaaactc

SEQ ID NO: 23679 - protein, 375 aa, Glycine max
MMGDTEIKPSVEVVICASMNNNNSANNHTLPTDITKSSQSHLPILTKLHAGYFFICLSFGAQALLWKSLSKHNKDSQTLWHGFNLMPSIAFLLLWCVALLTATTLSLLYVLKCIFHLDMVKEEFSHHVGVNCMYAPWISWLLMLQSAPIIVHSTSCYGVLCLAFSFVILLLDIKLYGQWFTTKKRFLSVVANPTSLVSVIGNLVSAQVVAEIGWKESALLMFSLGLVYYLIIFVTLYQRLTSGNQFPTVLRPTYLLFFAAPSMASLAWKSITGAFVTPSKMLLFLSLFLFMSQACRPAMFKKSMKRLNVTWWAYSFPLTFLGLACAEYAQEVKSGMASWLMLVICMVSVLVFIALMIITVLKIERLFHKNAPIMT

SEQ ID NO: 23680 - protein, 374 aa, Glycine max
MGDTEIKPSVEVVICASMNNNNSANNHTLPTDITKSSQSHLPILTKLHAGYFFICLSFGAQALLWKSLSKHNKDSQTLWHGFNLMPSIAFLLLWCVALLTATTLSLLYVLKCIFHLDMVKEEFSHHVGVNCMYAPWISWLLMLQSAPIIVHSTSCYGVLCLAFSFVILLLDIKLYGQWFTTKKRFLSVVANPTSLVSVIGNLVSAQVVAEIGWKESALLMFSLGLVYYLIIFVTLYQRLTSGNQFPTVLRPTYLLFFAAPSMASLAWKSITGAFVTPSKMLLFLSLFLFMSQACRPAMFKKSMKRLNVTWWAYSFPLTFLGLACAEYAQEVKSGMASWLMLVICMVSVLVFIALMIITVLKIERLFHKNAPIMT

SEQ ID NO: 23681 - protein, 357 aa, Glycine max
MNNNNSANNHTLPTDITKSSQSHLPILTKLHAGYFFICLSFGAQALLWKSLSKHNKDSQTLWHGFNLMPSIAFLLLWCVALLTATTLSLLYVLKCIFHLDMVKEEFSHHVGVNCMYAPWISWLLMLQSAPIIVHSTSCYGVLCLAFSFVILLLDIKLYGQWFTTKKRFLSVVANPTSLVSVIGNLVSAQVVAEIGWKESALLMFSLGLVYYLIIFVTLYQRLTSGNQFPTVLRPTYLLFFAAPSMASLAWKSITGAFVTPSKMLLFLSLFLFMSQACRPAMFKKSMKRLNVTWWAYSFPLTFLGLACAEYAQEVKSGMASWLMLVICMVSVLVFIALMIITVLKIERLFHKNAPIMT

SEQ ID NO: 23682 - DNA, 1136 bp, Glycine max
atgggaccaaactaagtaaaggcacgcgcagcacaactcaaagcaatggagtgagttgcttatgagcatattgagaaaaaaaggcagaggcagaagcagaagcaaaaccccactttttcatggccaaaatcattggcaagagcagaagaagaagaacaacgacgactcaacaactatgccacagaatggttcaccatgtcaacgtccactgcaacctgttccatagggtgtcctttcttggccggttcatttgggacaggatgcttctctgctctcttggaaggccttcttacctcaggctgcccctccgtgacccgccaccgcaggccaccgtccacggtggcgcctccatgcatggataccccttcaccaccaccaccccctccccctgtgactctgactctgatttggtcaacctcaagatcagcttgcttggtgattgccatattggaaaaactagttttgtgatcaagtatgtaggggatgagcaagaaaaaaggagcttgcagatgaagggacttaatttgatggacaaaactttatttgttcaaggagctaggatttcgtttagtatatgggatgttgcaggtgacacagggtccctttatcaaattccaatggcttgtaaagattcagttgcaattttgattatgtttgatctcaccagtcggtgtacactgaatagtgttgttggatggtacagtaaagcaagaaagtggaatcagattgcaattcccattctaataggaaccaaatttgatgattttgttaaactccccccagatgtgcaatggacaattgtaacacaggcaagggcatatgcaagggcaatgaatgctactcttttcttctcaagtgcaacccacaatataaatgtcaacaaaatcttcaagtttatcatggccaagctcttcaacttgccatggaaagtggaacgaaatctgacactaggagaacccacaattgacttctgaaatgtactttacattattgatttatatgtaaatagcaggacaaagaaaagaaaaaggaaaaaagaaaaaagaagaggtccactcatattaactactcttgctttgtagagttcatcgcctaagaacctaattcatttatcttcattgggccattttaactac

SEQ ID NO: 23683 - protein, 284 aa, Glycine max
MAKIIGKSRRRRTTTTQQLCHRMVHHVNVHCNLFHRVSFLGRFIWDRMLLCSLGRPSYLRLPLRDPPPQATVHGGASMHGYPFTTTTPSPCDSDSDLVNLKISLLGDCHIGKTSFVIKYVGDEQEKRSLQMKGLNLMDKTLFVQGARISFSIWDVAGDTGSLYQIPMACKDSVAILIMFDLTSRCTLNSVVGWYSKARKWNQIAIPILIGTKFDDFVKLPPDVQWTIVTQARAYARAMNATLFFSSATHNINVNKIFKFIMAKLFNLPWKVERNLTLGEPTIDF

SEQ ID NO: 23684 - protein, 262 aa, Glycine max
MVHHVNVHCNLFHRVSFLGRFIWDRMLLCSLGRPSYLRLPLRDPPPQATVHGGASMHGYPFTTTTPSPCDSDSDLVNLKISLLGDCHIGKTSFVIKYVGDEQEKRSLQMKGLNLMDKTLFVQGARISFSIWDVAGDTGSLYQIPMACKDSVAILIMFDLTSRCTLNSVVGWYSKARKWNQIAIPILIGTKFDDFVKLPPDVQWTIVTQARAYARAMNATLFFSSATHNINVNKIFKFIMAKLFNLPWKVERNLTLGEPTIDF

SEQ ID NO: 23685 - protein, 237 aa, Glycine max
MLLCSLGRPSYLRLPLRDPPPQATVHGGASMHGYPFTTTTPSPCDSDSDLVNLKISLLGDCHIGKTSFVIKYVGDEQEKRSLQMKGLNLMDKTLFVQGARISFSIWDVAGDTGSLYQIPMACKDSVAILIMFDLTSRCTLNSVVGWYSKARKWNQIAIPILIGTKFDDFVKLPPDVQWTIVTQARAYARAMNATLFFSSATHNINVNKIFKFIMAKLFNLPWKVERNLTLGEPTIDF

SEQ ID NO: 23686 - protein, 207 aa, Glycine max
MHGYPFTTTTPSPCDSDSDLVNLKISLLGDCHIGKTSFVIKYVGDEQEKRSLQMKGLNLMDKTLFVQGARISFSIWDVAGDTGSLYQIPMACKDSVAILIMFDLTSRCTLNSVVGWYSKARKWNQIAIPILIGTKFDDFVKLPPDVQWTIVTQARAYARAMNATLFFSSATHNINVNKIFKFIMAKLFNLPWKVERNLTLGEPTIDF

SEQ ID NO: 23687 - DNA, 1215 bp, Glycine max
acttcaattgcaatcaaattagttcattctctttgcgcagttccctacctctcctttcaagatgcagatcttcgtcaagaccctcaccggaaagaccatcacccttgaggtggaaagctctgacaccatcgacaacgtcaaggccaagatccaggacaaggaaggaattcccccggatcagcaacgtctcatcttcgccggaaagcagctcgaggacggccgtaccctcgccgactacaacatccagaaggagtcaacccttcaccttgtccttcgtctccgtggtggcatgcagatcttcgtcaagactctcactggcaaaaccataaccctagaggtcgaaagctctgacaccattgacaacgtcaaggccaagatccaggacaaggagggaatccccccagaccagcaacgtctcatcttcgccggaaagcaacttgaggacgggcgcaccctcgccgactacaacatccagaaggaatcaacccttcacctcgtcctccgtctccgtggtggcatgcagatcttcgttaagaccctcaccggcaagactataaccctagaagtcgagagctccgacaccatcgacaacgtcaaggctaagatccaggacaaggagggtatccccccagaccagcagaggctgatcttcgccggcaagcagctcgaggacggacgtacccttgctgactacaacatccagaaggagtcaactctccacttggtgttgcgtcttcgtggtggtatgcagatcttcgtcaagacccttacgggtaagactattaccctcgaggtggagagctccgacaccattgacaatgtgaaggcgaagatccaggacaaggaaggaatcccaccggaccagcagaggcttatttttgctggcaaacagctagaggatggaaggaccctcgctgactacaacatccagaaggagtcaactctgcacttggtgttgcgtcttcgtggggggttttaagctggagctgatttctgtgtgatgttcgatgttggattttcccaaacattttaagaagaaatgtgatgtgtaatgggtctgtaatgacctttgaaaataagtttggtttgtgttgaactctattgtcccattaatgttactactgtttgttatcaatttgtggagctgatatataattatcaactgtatgctggcatattgtgtttgaattttgttctcaatccagtgaattggcg

SEQ ID NO: 23688 - protein, 305 aa, Glycine max; identical to SEQ ID NO: 4883

SEQ ID NO: 23689 - protein, 229 aa, Glycine max; identical to SEQ ID NO: 4884

SEQ ID NO: 23690 - protein, 153 aa, Glycine max; identical to SEQ ID NO: 9361

SEQ ID NO: 23691 - DNA, 1512 bp, Glycine max
gcaccgcttgagcagacttaacaacagcacaaagcgggttactgtctgttcaagctaccatctctctctctctttcttagtgcctccttgccagaagttaaaatggcccaagaaactttcctattcacatctgaatcagtgaacgaggggcaccctgacaagctctgtgaccagatctccgatgctgtgctcgatgcatgcttggagcaggaccctgacagcaaggttgcctgtgaaacctgcaccaagaccaacatggtgatggttttcggagagatcacaaccaaggccaacgtggactatgagaagattgtgcgtgacacatgcaggaacattggttttgtctctgatgatgttggtcttgatgctgacaactgcaaggtcctcgtcaacattgagcaacagagtcctgatattgctcaaggtgtgcacggccacctcacaaagaggcctgaggagattggtgctggtgaccaaggtcatatgttcggctatgccactgacgagactcccgagctcatgcccttgagccatgtccttgccacgaagctcggtgccaagctcaccgaggttcggaagaacgggacatgcccttggctgagacctgatggcaagacccaagtcactgttgagtactacaatgacaagggtgccatggttccaatccgcgtccacactgtgctcatctccacacagcatgatgagactgtcacaaatgatgagattgcagctgatcttaaagaacacgtgattaagcctgtgattcctgagaagtaccttgatgagaagaccattttccatttgaacccttctggcaggtttgtcattggagggccgcatggcgatgctggtctcaccggccgcaagatcatcatcgacacctatggaggatggggtgcacatggtggtggtgccttctctgggaaggatcctaccaaggttgataggagtggtgcctacattgtgaggcaagctgcaaagagcattgttgcaaatggacttgttaggagggcaattgtgcaagtttcctatgccattggtgtgcctgagcccttgtctgtgtttgttgacacttatggcactgggaagatccctgacaaggaaatcctcagcattgtgaaggagagttttgacttcaggcctggcatgatctccatcaaccttgatctcaagaggggtggaaatggcaggttcttgaagactgctgcatatggacactttggcagagatgaccctgacttcacatgggaagtggtgaagccactcaagggggagaaggtacctgcttaactaaaaggggttccaacactcttggcaagggacttttgcactactactggcttcttattatctgattgctaaaattttctctatgtttccttccctcttactcaattctgtttttttttttctgtatttttttatgaatttcccccttttttttgtgtacttgtatgtgttctttcagaacatatatattttatatgatgaaacaaaaaaaaatgttctccc

SEQ ID NO: 23692 - protein, 395 aa, Glycine max
MAQETFLFTSESVNEGHPDKLCDQISDAVLDACLEQDPDSKVACETCTKTNMVMVFGEITTKANVDYEKIVRDTCRNIGFVSDDVGLDADNCKVLVNIEQQSPDIAQGVHGHLTKRPEEIGAGDQGHMFGYATDETPELMPLSHVLATKLGAKLTEVRKNGTCPWLRPDGKTQVTVEYYNDKGAMVPIRVHTVLISTQHDETVTNDEIAADLKEHVIKPVIPEKYLDEKTIFHLNPSGRFVIGGPHGDAGLTGRKIIIDTYGGWGAHGGGAFSGKDPTKVDRSGAYIVRQAAKSIVANGLVRRAIVQVSYAIGVPEPLSVFVDTYGTGKIPDKEILSIVKESFDFRPGMISINLDLKRGGNGRFLKTAAYGHFGRDDPDFTWEVVKPLKGEKVPA

SEQ ID NO: 23693 - protein, 344 aa, Glycine max
MVMVFGEITTKANVDYEKIVRDTCRNIGFVSDDVGLDADNCKVLVNIEQQSPDIAQGVHGHLTKRPEEIGAGDQGHMFGYATDETPELMPLSHVLATKLGAKLTEVRKNGTCPWLRPDGKTQVTVEYYNDKGAMVPIRVHTVLISTQHDETVTNDEIAADLKEHVIKPVIPEKYLDEKTIFHLNPSGRFVIGGPHGDAGLTGRKIIIDTYGGWGAHGGGAFSGKDPTKVDRSGAYIVRQAAKSIVANGLVRRAIVQVSYAIGVPEPLSVFVDTYGTGKIPDKEILSIVKESFDFRPGMISINLDLKRGGNGRFLKTAAYGHFGRDDPDFTWEVVKPLKGEKVPA

SEQ ID NO: 23694 - protein, 342 aa, Glycine max
MVFGEITTKANVDYEKIVRDTCRNIGFVSDDVGLDADNCKVLVNIEQQSPDIAQGVHGHLTKRPEEIGAGDQGHMFGYATDETPELMPLSHVLATKLGAKLTEVRKNGTCPWLRPDGKTQVTVEYYNDKGAMVPIRVHTVLISTQHDETVTNDEIAADLKEHVIKPVIPEKYLDEKTIFHLNPSGRFVIGGPHGDAGLTGRKIIIDTYGGWGAHGGGAFSGKDPTKVDRSGAYIVRQAAKSIVANGLVRRAIVQVSYAIGVPEPLSVFVDTYGTGKIPDKEILSIVKESFDFRPGMISINLDLKRGGNGRFLKTAAYGHFGRDDPDFTWEVVKPLKGEKVPA

SEQ ID NO: 23695 - DNA, 1257 bp, Glycine max
attaggggaagcgtggctagcagagactagagagatagaattagaattaaaaagcgtgaaggacagtgataggtttggtttggaaggaagaagaaaatgaaggccatagtgataacgaggccaggaggtcccgaagtgctccaacttgaggaagtggaagatccccaagtcggagacgacgagcttctcatcggagtccacgccacttcccttaacagagccgatacctttcagaggaaaggctcctaccctccccctaagggcgccagcccttacctcggtctcgaatgttccggaactgtcctttccctgggtaaaaacgtttccagctggaaaatcggtgatcaggtgtgtgctcttctcgccggaggcggatatgccgagaaagttgcagttccggtaggacaagttcttccggttccagccggtgtttctctcacggatgcagctagttttcctgaggttgcttgcactgtctggtcaactgttttcatgatgagtcgcttatctcaaggggaaaccttgttggttcatggaggttccagtgggattggtacatttgcaattcagatagccaagtatcgagggtcacgagtgtttgttactgcaggaagtgaggagaagctagctttttgcaagagtatcggagctgatgtgggcatcaattataaaacagaagactttgttgcgcgggtaaaggaagaaactggtggccaaggtgttgatgttattcttgattgtatgggagcatcctactatcaaagaaatcttgatagcttgaattttgatggaaggctttttattattggctttcaaggtggggttagtacacaagcagatctacgccctttacttgctaagcgtctcacagtacaaggagctggtttacgcaatagaagtctggaaaataaagctgtgattgttagtgaagtggagaagaatgtttggcctgcaattgccgaaggaaaggttaagcctgtggtctacaaatctttcccgctttctgaggcagcggaggctcaccagcttatggaaagcagccagcatattgggaagatattgcttttgccatgaaaattgtcgtaaatactgaagttcgtgacatacttctggatcctttgtgtttggacttgtttctttgttaagatctcaggattctaatatggttgcggattaaaataacagctaaaggaattgatatggcaagttcatttaaacaatcacaccgtatttatcaattgatatgattattgaaac

SEQ ID NO: 23696 - protein, 325 aa, Glycine max
MKAIVITRPGGPEVLQLEEVEDPQVGDDELLIGVHATSLNRADTFQRKGSYPPPKGASPYLGLECSGTVLSLGKNVSSWKIGDQVCALLAGGGYAEKVAVPVGQVLPVPAGVSLTDAASFPEVACTVWSTVFMMSRLSQGETLLVHGGSSGIGTFAIQIAKYRGSRVFVTAGSEEKLAFCKSIGADVGINYKTEDFVARVKEETGGQGVDVILDCMGASYYQRNLDSLNFDGRLFIIGFQGGVSTQADLRPLLAKRLTVQGAGLRNRSLENKAVIVSEVEKNVWPAIAEGKVKPVVYKSFPLSEAAEAHQLMESSQHIGKILLLP

SEQ ID NO: 23697 - protein, 193 aa, Glycine max
MMSRLSQGETLLVHGGSSGIGTFAIQIAKYRGSRVFVTAGSEEKLAFCKSIGADVGINYKTEDFVARVKEETGGQGVDVILDCMGASYYQRNLDSLNFDGRLFIIGFQGGVSTQADLRPLLAKRLTVQGAGLRNRSLENKAVIVSEVEKNVWPAIAEGKVKPVVYKSFPLSEAAEAHQLMESSQHIGKILLLP

SEQ ID NO: 23698 - protein, 192 aa, Glycine max
MSRLSQGETLLVHGGSSGIGTFAIQIAKYRGSRVFVTAGSEEKLAFCKSIGADVGINYKTEDFVARVKEETGGQGVDVILDCMGASYYQRNLDSLNFDGRLFIIGFQGGVSTQADLRPLLAKRLTVQGAGLRNRSLENKAVIVSEVEKNVWPAIAEGKVKPVVYKSFPLSEAAEAHQLMESSQHIGKILLLP

SEQ ID NO: 23699 - DNA, 1540 bp, Glycine max
atttttgagctttccatttttctctctttttcaactttcaattcaagcagctttggaaaaaccaaccagccaacgggttttttttttttttcacctcctgaaatttctttggaagaagcttgcacaaggtggagtcgcagagacaggtgttggtttggtaatataggccttggagtgaaaattcaatattttgcatggaagccagagaaggtattagttctggggttacagtgataggggcagaagctccatcagcttaccatgtggctccgaggagtgaagctccaaaccaggttcatgtccctgatggtggtggtggtggtgctgctacagctgcacctgttggtgtctcacctgtgagtgtggggttggatggaacagttaagaagaaacggggtagaccgaggaaatatgggcctgatgggtctgtaactatggcattgtcgccaatgccaatctcgtcttctgctccgccttcgaatgacttttcatccgggaagcgggggaaaatgcgggggatggaccataagccgtcgaaaaaagttggcttggattatataggtgacttgaatgtatgctctgatggtacaaattttatgccacatatcatcactgtcaatgctggcgaggacatcacaatgaaggtgatatccttttctcaacaaggaccacgagctatatgtatcttatctgctaatggtgtaatttcaaatgttacacttcgtcagcctgattcttctgggggtactttaacttatgagggccgttttgagatactttccttgtctggatcattcatgcctactgataaccaaggaacaagaagcaggaccggtggaatgtctgtgtcgttggctagtcctgatggccgtgttgtaggtggtggagttgctggtcttcttgtagctgccagccctgtgcaggtggtggtgggaagctttttaccaagcagccagcaagaacagaaaataaagaagccaaagtctagtgattatgcaccggtaactgttactccagcgattgcagtgtcttctgcaccgccacctccaaccaatgctgaaaaagaggatgtgaatgttatgggtggagcacatgtactgcaaaattctggaacccttaactctaacctcactcctcccaatgcctttagaagagacaactgggtcaacatgcactctatgccagactctagaaaatcagctacagatattaacatatctttgcctgatagttaggttggcgatcgaggggcgcactctctatcctcaagaactcttgctgacaacattcatgactcagctgttttattaatgtttagtgttctctctctttctctcactctcatttaaagattgtttcaatcgtgtctaatgtctatcaccataggatgtagtttcagtgttgtaagttgcagctagttagagtatctgatatatttatcggctgattaggtagatgctgcattctgcagatttatgagtaggctaatttggatgtaatgaaaacttgtttgcctatttatttatgactgaatttgtgg

SEQ ID NO: 23700 - protein, 346 aa, Glycine max
MEAREGISSGVTVIGAEAPSAYHVAPRSEAPNQVHVPDGGGGGAATAAPVGVSPVSVGLDGTVKKKRGRPRKYGPDGSVTMALSPMPISSSAPPSNDFSSGKRGKMRGMDHKPSKKVGLDYIGDLNVCSDGTNFMPHIITVNAGEDITMKVISFSQQGPRAICILSANGVISNVTLRQPDSSGGTLTYEGRFEILSLSGSFMPTDNQGTRSRTGGMSVSLASPDGRVVGGGVAGLLVAASPVQVVVGSFLPSSQQEQKIKKPKSSDYAPVTVTPAIAVSSAPPPPTNAEKEDVNVMGGAHVLQNSGTLNSNLTPPNAFRRDNWVNMHSMPDSRKSATDINISLPDS

SEQ ID NO: 23701 - protein, 266 aa, Glycine max
MALSPMPISSSAPPSNDFSSGKRGKMRGMDHKPSKKVGLDYIGDLNVCSDGTNFMPHIITVNAGEDITMKVISFSQQGPRAICILSANGVISNVTLRQPDSSGGTLTYEGRFEILSLSGSFMPTDNQGTRSRTGGMSVSLASPDGRVVGGGVAGLLVAASPVQVVVGSFLPSSQQEQKIKKPKSSDYAPVTVTPAIAVSSAPPPPTNAEKEDVNVMGGAHVLQNSGTLNSNLTPPNAFRRDNWVNMHSMPDSRKSATDINISLPDS

SEQ ID NO: 23702 - protein, 261 aa, Glycine max
MPISSSAPPSNDFSSGKRGKMRGMDHKPSKKVGLDYIGDLNVCSDGTNFMPHIITVNAGEDITMKVISFSQQGPRAICILSANGVISNVTLRQPDSSGGTLTYEGRFEILSLSGSFMPTDNQGTRSRTGGMSVSLASPDGRVVGGGVAGLLVAASPVQVVVGSFLPSSQQEQKIKKPKSSDYAPVTVTPAIAVSSAPPPPTNAEKEDVNVMGGAHVLQNSGTLNSNLTPPNAFRRDNWVNMHSMPDSRKSATDINISLPDS

SEQ ID NO: 23703 - DNA, 1360 bp, Glycine max
agtgatatgatcatacccaaaattaaaccttgtttattgttattccttgatgctatacctctctctaattgcgtttctttttctttcttttcaagccaattaatccttaaaaaacaccgatcgatctgaagcagctagctagccccatcccatcttatatttcatatttgtcaatttggtcatggagaccaacactagtgcattcacaaatgtgaacagcacttggaatcttgaaaagatggaaacaaatgaacaacaaaatgatgaacataatattattctccaagtccaagaccctatgggttctgggatttggcccagcaacaactaccacaaccttcttcaaatgcatcaaacacccaacacaacaaccttatccatcatagcaccaccaccctcctcatcagggttccttggagacatactgggtgttcacaacctagaagaagatgaagagccagaagaagagctaggtgccatgaaggagatgatgtacaagatcgctgctatgcaacccgtggacatcgaccccgccacgattcgaaaaccaaagagaagaaatgttcgcatcagtgatgaccctcagagtgtggctgcacgccacaggagagagaggatcagcgagaaaatccgcatcctccagagactcgttcccgggggaaccaaaatggacaccgcttcaatgcttgatgaagccattcgctatgttaagttcttgaagagacaaataaggttgcttcaatctattcctcaatcttcaaatccaccacaatgcattggtgttgctactacttctcatcatgctagtaccttgttgttagccccttcctgtgattggccttttgcaccaaatgttcttcccagttccaccgccgccaccgcctcaatggacatgtcggccggactgggattcgacgtcggccatgctcatgcttgtgatggctcctccagctttaaccatcatgaggtaatcagtgaataattagtggttataggttataattaattgtattgctttgtatgtgtatgtatatggaattgaggagtgcttggttagtattagtgtatgtgtatgtgtatgttgatgactgttttgagcttggggaaaatcaaggaaaaaagaatagagtaataatttaggggaggggagaaaggtttgttaggatattgttgactaaaggcttctgtagaataatcataacggttggcttggttacgtacacagccatatagaataatgtgtatgccagtttcggtgttggccggaaagtttgtttggtcgagtctcttcctggaataacttccactgtgacgttataacctagtattgaataatgaacaatattattgatttgtggcc

SEQ ID NO: 23704 - protein, 266 aa, Glycine max
METNTSAFTNVNSTWNLEKMETNEQQNDEHNIILQVQDPMGSGIWPSNNYHNLLQMHQTPNTTTLSIIAPPPSSSGFLGDILGVHNLEEDEEPEEELGAMKEMMYKIAAMQPVDIDPATIRKPKRRNVRISDDPQSVAARHRRERISEKIRILQRLVPGGTKMDTASMLDEAIRYVKFLKRQIRLLQSIPQSSNPPQCIGVATTSHHASTLLLAPSCDWPFAPNVLPSSTAATASMDMSAGLGFDVGHAHACDGSSSFNHHEVISE

SEQ ID NO: 23705 - protein, 247 aa, Glycine max
METNEQQNDEHNIILQVQDPMGSGIWPSNNYHNLLQMHQTPNTTTLSIIAPPPSSSGFLGDILGVHNLEEDEEPEEELGAMKEMMYKIAAMQPVDIDPATIRKPKRRNVRISDDPQSVAARHRRERISEKIRILQRLVPGGTKMDTASMLDEAIRYVKFLKRQIRLLQSIPQSSNPPQCIGVATTSHHASTLLLAPSCDWPFAPNVLPSSTAATASMDMSAGLGFDVGHAHACDGSSSFNHHEVISE

SEQ ID NO: 23706 - protein, 227 aa, Glycine max
MGSGIWPSNNYHNLLQMHQTPNTTTLSIIAPPPSSSGFLGDILGVHNLEEDEEPEEELGAMKEMMYKIAAMQPVDIDPATIRKPKRRNVRISDDPQSVAARHRRERISEKIRILQRLVPGGTKMDTASMLDEAIRYVKFLKRQIRLLQSIPQSSNPPQCIGVATTSHHASTLLLAPSCDWPFAPNVLPSSTAATASMDMSAGLGFDVGHAHACDGSSSFNHHEVISE

SEQ ID NO: 23707 - DNA, 1563 bp, Glycine max
aactcactcactcattcaagtcgctaatcctagttccttcaactcctcgctggcaacaacagcagtactaccattagccgcgtttttcaaaagtgattttcgagaattagcgatgggaattgaaagaggaggcttcaagggattcaggagcgcctggagcgtgccgcccaagccgtgcgattcctgcaagctggcctcggcggcgcttttctgccgccccgattccgcgtttctctgcatcgcctgcgattccaacattcactgctcgaacaaactcgcgtcgcgccacgagcgcgtgtggatgtgtgaggtgtgcgagcaggcacccgctgctgtcacgtgcaaggccgacgccgccgccctctgcgtcacgtgtgactccgacatccactccgcgaaccccctcgcgcaacgccacgagcgcgtccccgtggaacctttctttgactccgctgagtccatagtgaaagcctctgctgccgccaccttcgggttcattgtcccatccgacgacggcggcgcctccgacgctttcgcccccgatgactccgacgccgccgcgtggctcatcccgaaccctaatttcgggtccaagctcatggacgcccccgaaatcaagtccaaggagatatcttctctgaaatggaccccttcctcgattttgattactcaaactccttccaaaacaacaacagcgccggaaacgacagcgtcgttccagttcaaaaaccctctctcgcccctcccctaatcaataatcaccaccaccaccaatcagaaacttgcttcgacgtcgatttttgtcgctcgaagctctcctcctttaactacccttccaattctcttagccaaagcgtttcgtcgtcgtcgcttgatgttggagtggtgccggacgggaacacggtgtcagacatgtcgtattcttttggtcggaacagttcggattcgagtgggattgttgttgtgtcaggaaatagtgtggggcaaggtgcgacgcagttgtgtggaatggatcgggaagcgagggtactgcgatacagagagaaaaggaagaaccgaaaattcgagaagacaattcgatacgcatcgcgaaaagcatatgcggaaacccggcccaggataaaaggccgcttcgccaaacgaacagaaattgactcggatgtggagcgtctctatagccctggccctgcggtgctcatgctggacactccatacggcgtcgtaccatcgttttagttaatttcaaaatgaagaaacgatggagtgcatgaatcttagaataatgattagcgattctgtgggattgttaggggaaaaaggtgaagaatcgaatcggtacgaacgtgattcttagctggagcgcgatgggggaagattattgtgaagatttgtctcgatcgaccagaaaagcccgtttactttttataaaaaaaaaaaaaaaaacttttaaaagggggctgctgtttcatattcacctcgtgtagaattagaatctgtactgtaaactcttttcactgccttgccttctgtctttttttagtataaaagtgtcttttttctatc

SEQ ID NO: 23708 - protein, 249 aa, Glycine max
THSLIQVANPSSFNSSLATTAVLPLAAFFKSDFRELAMGIERGGFKGFRSAWSVPPKPCDSCKLASAALFCRPDSAFLCIACDSNIHCSNKLASRHERVWMCEVCEQAPAAVTCKADAAALCVTCDSDIHSANPLAQRHERVPVEPFFDSAESIVKASAAATFGFIVPSDDGGASDAFAPDDSDAAAWLIPNPNFGSKLMDAPEIKSKEISSLKWTPSSILITQTPSKTTTAPETTASFQFKNPLSPLP

SEQ ID NO: 23709 - protein, 212 aa, Glycine max
MGIERGGFKGFRSAWSVPPKPCDSCKLASAALFCRPDSAFLCIACDSNIHCSNKLASRHERVWMCEVCEQAPAAVTCKADAAALCVTCDSDIHSANPLAQRHERVPVEPFFDSAESIVKASAAATFGFIVPSDDGGASDAFAPDDSDAAAWLIPNPNFGSKLMDAPEIKSKEISSLKWTPSSILITQTPSKTTTAPETTASFQFKNPLSPLP

SEQ ID NO: 23710 - protein, 197 aa, Glycine max
MDPFLDFDYSNSFQNNNSAGNDSVVPVQKPSLAPPLINNHHHHQSETCFDVDFCRSKLSSFNYPSNSLSQSVSSSSLDVGVVPDGNTVSDMSYSFGRNSSDSSGIVVVSGNSVGQGATQLCGMDREARVLRYREKRKNRKFEKTIRYASRKAYAETRPRIKGRFAKRTEIDSDVERLYSPGPAVLMLDTPYGVVPSF

SEQ ID NO: 23711 - DNA, 767 bp, Glycine max
atgttgcgtgtgatgaaccataaccatgtcagacgaggagcaccacttcgagtcaaaggctgatgctggagcatcaaagacatttccccagcaagctggaaccatccgcaaaaacggttacattgtcatcaagaacaggccatgcaaggttgtggaggtttcaacttccaaaactggcaagcatggacacgcaaagtgtcactttgttgcaattgacatcttcactgggaaaaagcttgaggatattgtcccatcttcccataactgtgatgttccccatgttaatcgcattgactaccagctcattgacatctcagaggatggatttgtgagtctgctgactgagactggtggtactaaggatgaccttaggcttccaaccgatgaaaatctgctttcgcagatcaaggatggatttgctgagggcaaagatctggttgtgtctgttatgtcttccatgggggaggagcagatttgtgcccttaaggacattggccccaagtaatagagttgtgtcagttgaatatctggaaagcagaagttgaaactgagatgataaatagtatttattattattttttcacttttatgtgggtttgtatactaaatcagccaaagtttgtacctttcttacaagatgtggtcaaacttgaatggctttatttgggagtccttgacctactatatttttaaacgtgttggatcaatgctagaaccatattctgttaaatggtgtgaagttatattggtcactggccattaaatct

SEQ ID NO: 23712 - protein, 159 aa, Glycine max
MSDEEHHFESKADAGASKTFPQQAGTIRKNGYIVIKNRPCKVVEVSTSKTGKHGHAKCHFVAIDIFTGKKLEDIVPSSHNCDVPHVNRIDYQLIDISEDGFVSLLTETGGTKDDLRLPTDENLLSQIKDGFAEGKDLVVSVMSSMGEEQICALKDIGPK

SEQ ID NO: 23713 - protein, 89 aa, Glycine max
MLEHQRHFPSKLEPSAKTVTLSSRTGHARLWRFQLPKLASMDTQSVTLLQLTSSLGKSLRILSHLPITVMFPMLIALTTSSLTSQRMDL

SEQ ID NO: 23714 - DNA, 747 bp, Glycine max
gagagaagttattagggtttttgagtgcggcggtccaaacactcttctctgcagcttttgcctacaactcccttcaccatggctgaacaaaccgagaaagcttttctgaagcaaccaaaagtgtttctcagcacaaagaagactgggaagggaaagagacctggaaaaggtgggaaccgcttttggaagtccattgggcttggatttaagactcccagggaagccatcgaaggaacctatattgacaagaagtgccccttcactggcaatgtttccatccgtggccgtatcttggctggaacatgtcacagtgctaagatgaacaggactattattgttagaaggaattatctccattttatcaagaagtaccagaggtacgagaagaggcactcaaatattcctgctcatatatcacctgccttccgtgtgaaggaaggggatcacgttattattggtcaatgcaggcctctctctaagacagtgaggttcaatgtcttgaaagtgatcccagctggatcttctagtggtgcaaagaaggcttttactggaatgtgagcttcgatttccagtttttattgaagaaaaatgttaccttgttatttagtagatctgatttcttttctggaaggtgacatattaaaaccttatcaattttggattttctttgaggtttcgttctggctttatgtttaggattttgttatacattatgtttttcgaatactatttgccttttaatttttg

SEQ ID NO: 23715 - protein, 159 aa, Glycine max
MAEQTEKAFLKQPKVFLSTKKTGKGKRPGKGGNRFWKSIGLGFKTPREAIEGTYIDKKCPFTGNVSIRGRILAGTCHSAKMNRTIIVRRNYLHFIKKYQRYEKRHSNIPAHISPAFRVKEGDHVIIGQCRPLSKTVRFNVLKVIPAGSSSGAKKAFTGM

SEQ ID NO: 23716 - protein, 79 aa, Glycine max
MNRTIIVRRNYLHFIKKYQRYEKRHSNIPAHISPAFRVKEGDHVIIGQCRPLSKTVRFNVLKVIPAGSSSGAKKAFTGM

SEQ ID NO: 23717 - DNA, 1984 bp, Glycine max
tctctcgagtcttgtccctggtcactactcacaaatgtgaattgtccccagtctctcgagaacttagaatagaatactcgtcccacacccaattttcttctctctctcctctcatcacttcatatattcgcaatttctcttccaccgtgaaaccctagacccaactgcgagcgcggagccaagccatgtccctcaaccgcctcctctccgtggcccgccgctccgatcggcgggcctccgccctctcctccctccgatccctctctgcctccgccgccgctgtggctccctccgcctcctcccctcccgcccctcttccccccaccgccatgatctacgaccgcgccgccgaggccgtgaagtccaagctccggcagctcgagaaccccgacccccgcttcctgaagcatgggtccccccggcccaccctctctgaccacacgcgcatcctgtcctcccccgagacgcgcgtgaccacgcttcccaacggcctccgcatcgccaccgagtccaccctcagcgcccgcaccgccaccgtcggcgtctggatcgacgccggttcgcggttcgagaccgaggagaccaacggcaccgcacacttcctcgagcacatgatctttaagggcaccgagaggcgcaacgcgcgtgagctcgaggaagagattgagaacatgggaggacacctcaacgcctacacctcaagggagcaaaccacctactacgccaaggtcaccgacaaggacgtcccccaggccctcgacatcctcgccgacatcctccagaactcccgattcgaggaaactcgcatcaaccgcgagcgcgatgtcattctccgggagatggaggaggttgagggtcaaactgaggaagtgatttttgaccacctacacgctactgcattccagtacactcctcttggaagaaccattcttggacctgctcagaacattaagacgatcaccaaagctcatctgcagagttacattcagacacattacacagctcctaggatggtgatagctgcatctggagctgtcaagcatgaagacattgttgagcaagtgaaaaagttgtttactaagttgtcaacagatcccactaccacatctcaattagttgctagagagccggctatttttactggttctgaggttagaatgcttgatgatgatattcccctagctcaatttgctgtggcttttgaaggggcatcttggaaggatccggattcaattcctctcatggtcatgcaagctatgttgggttcttggaataaggcagcaggaggtggaaaacacatgggttctgagttagcacagcgaattggcattaatgaagttgccgagagcattatggctttcaacaccaattacaaggacacaggtctttttggtgtttatgccgttgccaagcctgattgcttggatgatttgtcctatgcaataatgtatgagacaaccaagttggcttatcgtgtttcagaagatgatgttacacgtgctcgtaatcagttgaaatcttcactgctactacacatagatggaacaagcccagtggctgaagatattggtcgtcagctactcacatatggtcgaagaatcccatttgctgaattgtttgctagaattgatgctgttgatgccagtacaattaaacgtgttgcgaaccgatttatctatgacaaggatgttgttattgctgccacgggtcctattcagcgtttgcctgattacaactggttccgacgcagaacctactggaaccgctattagttcattatagtttttttgcctcatttaaacttcattggaggtctggcaaatgttttattcaaatttacaagatttatgcctctggatggctgctttggcagccatttttcatttatttgtcatggacctctattttgtaacatttttgcagtaataagtatgctgttgtcagtgatgtaattggcatccttcgcaattactcattcctgtcg

SEQ ID NO: 23718 - protein, 528 aa, Glycine max
MSLNRLLSVARRSDRRASALSSLRSLSASAAAVAPSASSPPAPLPPTAMIYDRAAEAVKSKLRQLENPDPRFLKHGSPRPTLSDHTRILSSPETRVTTLPNGLRIATESTLSARTATVGVWIDAGSRFETEETNGTAHFLEHMIFKGTERRNARELEEEIENMGGHLNAYTSREQTTYYAKVTDKDVPQALDILADILQNSRFEETRINRERDVILREMEEVEGQTEEVIFDHLHATAFQYTPLGRTILGPAQNIKTITKAHLQSYIQTHYTAPRMVIAASGAVKHEDIVEQVKKLFTKLSTDPTTTSQLVAREPAIFTGSEVRMLDDDIPLAQFAVAFEGASWKDPDSIPLMVMQAMLGSWNKAAGGGKHMGSELAQRIGINEVAESIMAFNTNYKDTGLFGVYAVAKPDCLDDLSYAIMYETTKLAYRVSEDDVTRARNQLKSSLLLHIDGTSPVAEDIGRQLLTYGRRIPFAELFARIDAVDASTIKRVANRFIYDKDVVIAATGPIQRLPDYNWFRRRTYWNRY

SEQ ID NO: 23719 - protein, 480 aa, Glycine max
MIYDRAAEAVKSKLRQLENPDPRFLKHGSPRPTLSDHTRILSSPETRVTTLPNGLRIATESTLSARTATVGVWIDAGSRFETEETNGTAHFLEHMIFKGTERRNARELEEEIENMGGHLNAYTSREQTTYYAKVTDKDVPQALDILADILQNSRFEETRINRERDVILREMEEVEGQTEEVIFDHLHATAFQYTPLGRTILGPAQNIKTITKAHLQSYIQTHYTAPRMVIAASGAVKHEDIVEQVKKLFTKLSTDPTTTSQLVAREPAIFTGSEVRMLDDDIPLAQFAVAFEGASWKDPDSIPLMVMQAMLGSWNKAAGGGKHMGSELAQRIGINEVAESIMAFNTNYKDTGLFGVYAVAKPDCLDDLSYAIMYETTKLAYRVSEDDVTRARNQLKSSLLLHIDGTSPVAEDIGRQLLTYGRRIPFAELFARIDAVDASTIKRVANRFIYDKDVVIAATGPIQRLPDYNWFRRRTYWNRY

SEQ ID NO: 23720 - protein, 386 aa, Glycine max
MIFKGTERRNARELEEEIENMGGHLNAYTSREQTTYYAKVTDKDVPQALDILADILQNSRFEETRINRERDVILREMEEVEGQTEEVIFDHLHATAFQYTPLGRTILGPAQNIKTITKAHLQSYIQTHYTAPRMVIAASGAVKHEDIVEQVKKLFTKLSTDPTTTSQLVAREPAIFTGSEVRMLDDDIPLAQFAVAFEGASWKDPDSIPLMVMQAMLGSWNKAAGGGKHMGSELAQRIGINEVAESIMAFNTNYKDTGLFGVYAVAKPDCLDDLSYAIMYETTKLAYRVSEDDVTRARNQLKSSLLLHIDGTSPVAEDIGRQLLTYGRRIPFAELFARIDAVDASTIKRVANRFIYDKDVVIAATGPIQRLPDYNWFRRRTYWNRY

SEQ ID NO: 23721 - DNA, 1439 bp, Glycine max
aaaagaagaagatttcctctattgattttctttattaaattcaggttacgtactaatgacggcccagttccagaagattgttgttgctgaccacatggatcgaattagtgatttaccaagtcatttgattgattttattctacaacgcttgcccctgcaagatgttgttagaacgagtttattatcaagtaaatggagatataagtggacttctatccccaaacttgatttttcaaatgatttttttcaaaagtgtagggatttagaacttcatgaagtttcaagtactattacagaaattcttttgattcacgatgggcaattagatgagtttgttctttgcattcccgaaaatgtgccaatcaaaattgaatcccttaataagtggattctttgtttatcaagaaaagggattaaagaacttgagctttggaaccttcaaacagatccttgtgaaacaccatctcatatcttctcttgtcaaggattgacgtatcttcaacttcacaattttaaattatcaactgtgcctaatttttctagctttaaaagtttggtttaccttatgttagttgatattatatttgagtccagtgcaattgatcttatgtttggttgtccatcacttgtgatgctctccatttgttactgttctggttttgagtgtatcaatgtgtcctctcctgctctcgaagtcttacatgtacaaggtgaacaagttatcaagtcaatttgtttggagaaagctaaaagaatgactgatgtttcactcatggctgataatcctggggataactttgacatggatacaatatcaaatttgatcaaaggcttgtcagaagttgaaagcatgtgtttaacagaaggttatattcagatcttttccacagcttatacccttccaaagagtttgcaaaaaccactcaactgcttagaatctctagaattggaaggtgtgaatttcgacgatacaacagagcttctgtttgttatttccctacttaaaagttctccaaacctagagaaactttttatacagggtaattatagcactggcgtggatctgccacaaatattggagaagtcaaagtacaatggttgttgccttagtcaccttctgactgtgcacataaaagcttacaaaccctgtgagaatacaatgaacttcatacgttttttgctggctaattccacatcattggagctccttactttctgcattattcctgctcatgatcaacaacatcattccatatctagtgttggacgagaattggaacaaatggcacgagcttcaaaaagtgcagtagttgagttcattgatttatcatttgattgattggtgattgtatttgttatcattcaatccccaactcctcctcatctcttgctttgttctattgtaatttttgctagttacagacaactctttcacaccc

SEQ ID NO: 23722 - protein, 427 aa, Glycine max
MTAQFQKIVVADHMDRISDLPSHLIDFILQRLPLQDVVRTSLLSSKWRYKWTSIPKLDFSNDFFQKCRDLELHEVSSTITEILLIHDGQLDEFVLCIPENVPIKIESLNKWILCLSRKGIKELELWNLQTDPCETPSHIFSCQGLTYLQLHNFKLSTVPNFSSFKSLVYLMLVDIIFESSAIDLMFGCPSLVMLSICYCSGFECINVSSPALEVLHVQGEQVIKSICLEKAKRMTDVSLMADNPGDNFDMDTISNLIKGLSEVESMCLTEGYIQIFSTAYTLPKSLQKPLNCLESLELEGVNFDDTTELLFVISLLKSSPNLEKLFIQGNYSTGVDLPQILEKSKYNGCCLSHLLTVHIKAYKPCENTMNFIRFLLANSTSLELLTFCIIPAHDQQHHSISSVGRELEQMARASKSAVVEFIDLSFD

SEQ ID NO: 23723 - protein, 414 aa, Glycine max
MDRISDLPSHLIDFILQRLPLQDVVRTSLLSSKWRYKWTSIPKLDFSNDFFQKCRDLELHEVSSTITEILLIHDGQLDEFVLCIPENVPIKIESLNKWILCLSRKGIKELELWNLQTDPCETPSHIFSCQGLTYLQLHNFKLSTVPNFSSFKSLVYLMLVDIIFESSAIDLMFGCPSLVMLSICYCSGFECINVSSPALEVLHVQGEQVIKSICLEKAKRMTDVSLMADNPGDNFDMDTISNLIKGLSEVESMCLTEGYIQIFSTAYTLPKSLQKPLNCLESLELEGVNFDDTTELLFVISLLKSSPNLEKLFIQGNYSTGVDLPQILEKSKYNGCCLSHLLTVHIKAYKPCENTMNFIRFLLANSTSLELLTFCIIPAHDQQHHSISSVGRELEQMARASKSAVVEFIDLSFD

SEQ ID NO: 23724 - protein, 257 aa, Glycine max
MLVDIIFESSAIDLMFGCPSLVMLSICYCSGFECINVSSPALEVLHVQGEQVIKSICLEKAKRMTDVSLMADNPGDNFDMDTISNLIKGLSEVESMCLTEGYIQIFSTAYTLPKSLQKPLNCLESLELEGVNFDDTTELLFVISLLKSSPNLEKLFIQGNYSTGVDLPQILEKSKYNGCCLSHLLTVHIKAYKPCENTMNFIRFLLANSTSLELLTFCIIPAHDQQHHSISSVGRELEQMARASKSAVVEFIDLSFD

SEQ ID NO: 23725 - DNA, 1339 bp, Glycine max
agggaaagtaaaccttgaaacaatcatgagcatcggaacaacactactttcaacaccaccacattactgtttccactccaacactcaaaccacattcctcagcaccgttactccaattcaaaacctctctatccgcaataacaatttcagagtcctctgtttctcttcggacccgtcgcagttgccgccggtggtggtggtggggtccgccaacgccgacatctacgtcgaggtagaccggctcccgggcgagggcgagaccctggcggcgaggtccgggcagacgattgccggcggcaagggcgccaaccaggccacgtgctccgccaagctcgcgtacccgacctacttcgtcgggcaggtcggggacgacgcttacgggagactcgtcacggcgggcctccgcggtggcggggttcgcctcgataatctcgccgtggtggcttcggcggcaacgggtcatgcagttgtgatgctccagtccaacggccagaactccatcgtctacattgggggtgccaacttgagctgctggcctagttccctgccacgtcagcatttggacctcgttgcccaagctggcatcgttttgctgcagagggagattcctgatgctgtcaatgctcaagtcgcacaggctgccaaaaatgctggggtgccagtagtgttggatgctggaggcatggatgggccacttccgccacaattaataaattttgttgatattttgagtcctaatgaaactgaacttgcacgccttacgggaatgccaacagaaagttttgaagagattcaacaggctgctttgaaatgccatgaaatgggagctaagcaagttcttgtgaaacttggacacaaaggatctgccctttttgtagaaggagaaaaaacaattcagcagcctgccatacttgctaaaacagttgttgatacaactggtgctggtgatacttttactgctgcttttgccgtggccttggttgagggcaagtccaaaaaggaatgcctcagatttgccgctgctgcagcttgtctctgtgttcaagtgaagggagcctctcccagcatgcctgataggaaatctgttttggatcttcttaattgtcaatgataatactcgcaaaaggtcacaattcgaactatcaggaatagaataactgtgtatggcagagggaaagacccttgaaaatggcagcaaggaaagcaaaaatccttttacagagtatatctgcaagatggattcttcaacataatagtttgttgtcattgtaataagattaggacaaacactttaccgtttggtaatggaaggaaaatgaaaagaaaaatgttttatatg

SEQ ID NO: 23726 - protein, 369 aa, Glycine max
GKVNLETIMSIGTTLLSTPPHYCFHSNTQTTFLSTVTPIQNLSIRNNNFRVLCFSSDPSQLPPVVVVGSANADIYVEVDRLPGEGETLAARSGQTIAGGKGANQATCSAKLAYPTYFVGQVGDDAYGRLVTAGLRGGGVRLDNLAVVASAATGHAVVMLQSNGQNSIVYIGGANLSCWPSSLPRQHLDLVAQAGIVLLQREIPDAVNAQVAQAAKNAGVPVVLDAGGMDGPLPPQLINFVDILSPNETELARLTGMPTESFEEIQQAALKCHEMGAKQVLVKLGHKGSALFVEGEKTIQQPAILAKTVVDTTGAGDTFTAAFAVALVEGKSKKECLRFAAAAACLCVQVKGASPSMPDRKSVLDLLNCQ

SEQ ID NO: 23727 - protein, 361 aa, Glycine max
MSIGTTLLSTPPHYCFHSNTQTTFLSTVTPIQNLSIRNNNFRVLCFSSDPSQLPPVVVVGSANADIYVEVDRLPGEGETLAARSGQTIAGGKGANQATCSAKLAYPTYFVGQVGDDAYGRLVTAGLRGGGVRLDNLAVVASAATGHAVVMLQSNGQNSIVYIGGANLSCWPSSLPRQHLDLVAQAGIVLLQREIPDAVNAQVAQAAKNAGVPVVLDAGGMDGPLPPQLINFVDILSPNETELARLTGMPTESFEEIQQAALKCHEMGAKQVLVKLGHKGSALFVEGEKTIQQPAILAKTVVDTTGAGDTFTAAFAVALVEGKSKKECLRFAAAAACLCVQVKGASPSMPDRKSVLDLLNCQ

SEQ ID NO: 23728 - protein, 212 aa, Glycine max
MLQSNGQNSIVYIGGANLSCWPSSLPRQHLDLVAQAGIVLLQREIPDAVNAQVAQAAKNAGVPVVLDAGGMDGPLPPQLINFVDILSPNETELARLTGMPTESFEEIQQAALKCHEMGAKQVLVKLGHKGSALFVEGEKTIQQPAILAKTVVDTTGAGDTFTAAFAVALVEGKSKKECLRFAAAAACLCVQVKGASPSMPDRKSVLDLLNCQ

SEQ ID NO: 23729 - DNA, 1271 bp, Glycine max
aacccacttctactctactcattccacacccaacttacaaaaacccattcttttgctcactcattttcttaacgtagattaatcattatgtgtggcggtgccatcatcgctgacttcataccccgccgtggaggccgccgcctcacggcctccgagctctggccaaactccttcgccaaagacgatgactttgacttggattactcccacatcgctacccaacaaccctccactctcaaaaggtcccaacctcccaaagttagcgagcaggttgagaataagccggtgaagaggcagaggaagaatctctacagagggattcggcagcgtccgtggggcaaatgggccgcggagattcgcgatcctagaaaaggggttcgtgtctggttgggcacctttaacaccgcagaagaagccgcgagagcctacgatcgtgaagctcgaaaaatccgaggcaaaaaggctaaggtgaatttccccaacgaggacgacgaatattccattcaagctcgtaatccaattccaccccttcctttcgctccacaacaccctcccctgtaccagcaacagtaccgttgcgatctcaacaatgcccctaaaaatctcaactttgagttcggttacgacctgaaccacgcggaggcgttcccatcccgcgtggacgccgtcaacgctgactcggtggttgtctccgttgatgaaaattcggggtcagcgtcgggttcagagggtgcttattcgacaacggagttcatggggtccgttcagaacgggaacggttatttgggtggcacggtaatggagaagaaggagaaagagacagaggttattgaagctgaagaagaaaagaacaaagtgctggagctttctgaggagctgatggcgtacgaaaattacatgaagttttatcagattccgtactatgatggacaatccacgacgaataatgttcaggaaagcttggttggggatctctggagtttcgattagcgaggaatatatcaaggatgttcttttcatgcatgtgttttgtttcttcgtcaatgctgtgaaagcttttgctttctccctccattctgctgactaaactaacatctctggcgttttggcagggatgcacaggaatttaaattgagtgcttcggtagaaatggtctcattagttagtgctatgctatcatctggttttgttgaattgtaattttttgttttggtggtatgttgaacagtaattttactggatatattcaagtctatttgaattccaattcc

SEQ ID NO: 23730 - protein, 300 aa, Glycine max
MCGGAIIADFIPRRGGRRLTASELWPNSFAKDDDFDLDYSHIATQQPSTLKRSQPPKVSEQVENKPVKRQRKNLYRGIRQRPWGKWAAEIRDPRKGVRVWLGTFNTAEEAARAYDREARKIRGKKAKVNFPNEDDEYSIQARNPIPPLPFAPQHPPLYQQQYRCDLNNAPKNLNFEFGYDLNHAEAFPSRVDAVNADSVVVSVDENSGSASGSEGAYSTTEFMGSVQNGNGYLGGTVMEKKEKETEVIEAEEEKNKVLELSEELMAYENYMKFYQIPYYDGQSTTNNVQESLVGDLWSFD

SEQ ID NO: 23731 - DNA, 1386 bp, Glycine max
aaaagaattattagtaacctaatgaaggaggtttcctttccatcagtttcagttccaccaaaattcaaaaatctctcggcatggggtgcgtgtcttcgaatttgctgaaccaagacgaagacttcagcacccaacttggctcctccgcactgggccaccacatcgtgtccctcacctccaccacctacggcctcctcaccctcgaccctccttccacgcctccttcccgctttacccttggatctctcttcccctccgaaccagaggtcatcaactcatgggagctcatgtccggcctcgacaccgacagcttccgcttctctcctttacctttacccaaacccaaagaaaaccgcctcactcccccaaccggttccaaactcttattaaccccaactctggcggaccggttcgagaaaatatgcccccccaacggtgagaagcgcgtggtgatctatacgacgtcgttgcggggcgtgcggacgactttcgaggcctgcaacgcggttcgcgccgccttggagggattcggggtggtgatctgcgagcgtgacgtgtccatgcacagcggcttcagagaggagctcaggactctattgaaggggaagcaggtgatggtgcctccgagagtgttcgtgaaggggctctacatcggtggcgccgatgaaatgcttaaggtcgccgaagagggtctccttggagacttgcttgatggcttgcctagaaagaaggttggggctgtttgtgtgggttgtggggacttgaggttcttgccttgcttcaactgcaatgggagctgtaagactcttgttaaggaacaggggaggacggttgtggttaagtgtacccattgtaacgaaaatggcttagtcttgtgcccgctttgtacttgattactttttcacaatcatgtcatcactctcttcactgttcatattaacctgtattcctcctctcttctcttggtgatcttgtatcccgattcaccattttcaaatcagccttcattgttacagagcctgcaattgcgcacattagtatttatcaatggattttcattagtatcatcactcttgtgtggcgtgtaggctgtagcatatagcctataacttatttatcgtaatattaaagcttagaatttgttggactcactcagtcaagttacattgacaaactagaccttaaatatttgttgaaagaatcacaggatgagtctgtgttgattgtgaaatgtgccattcactcatgatagagattagagggtaaaaaggaaaatgaaactaggtatttgttaaaatgtgtagcccattgttcacaacaacacaagtgtatcgaataacttgctaaactgcacgaattgcacatgtttaagtgcgtgtttgcttt

SEQ ID NO: 23732 - protein, 270 aa, Glycine max
MGCVSSNLLNQDEDFSTQLGSSALGHHIVSLTSTTYGLLTLDPPSTPPSRFTLGSLFPSEPEVINSWELMSGLDTDSFRFSPLPLPKPKENRLTPPTGSKLLLTPTLADRFEKICPPNGEKRVVIYTTSLRGVRTTFEACNAVRAALEGFGVVICERDVSMHSGFREELRTLLKGKQVMVPPRVFVKGLYIGGADEMLKVAEEGLLGDLLDGLPRKKVGAVCVGCGDLRFLPCFNCNGSCKTLVKEQGRTVVVKCTHCNENGLVLCPLCT

SEQ ID NO: 23733 - protein, 201 aa, Glycine max
MSGLDTDSFRFSPLPLPKPKENRLTPPTGSKLLLTPTLADRFEKICPPNGEKRVVIYTTSLRGVRTTFEACNAVRAALEGFGVVICERDVSMHSGFREELRTLLKGKQVMVPPRVFVKGLYIGGADEMLKVAEEGLLGDLLDGLPRKKVGAVCVGCGDLRFLPCFNCNGSCKTLVKEQGRTVVVKCTHCNENGLVLCPLCT

SEQ ID NO: 23734 - DNA, 1258 bp, Glycine max
ataccacactttctaaccaaccaaccatcaatggcagatgtaaccacctacctccgccaccaccgcgaccccgaccccgaccccgacgacgacgaccaaaccctaattccattcccttattgggatttggactttgatttcgaccccgaattccccacaaacactttctccttcaccgaccgcgaaaaccagatcaatttcgtcatggatctcttccaccagcgcgtggagcagtctcaactcaccgatcccctctccaacgacgccgttttcggcgtcatcgacggaatcgacttaggtttccccgccgccgacgacttcttcatcggacggagattctccgtcggatccgacgaatccgacggaggacactctcactcgcacgcggggattgacgacggtgtcctggggttctgcgcgcattccgacgaagactacaacgaaaacgacgacgttgcgagcatccctctctgctgggacgcgcttcaattggaagacaacaacaacaactacgatgacttcgagtgggaggaagtgatagacgagagagacgttctcagcatgctcgacgacaccgtttccgttaacctcggaatcgaagcagaagcagcagcagcagcagcagaagaagaagaagcagaatcagaagccagcattttggagtggcaagttttattgaactccaacaatttggaaggaccaaattcggagccttatttcggagacaacgaggatttcgtttacaccgcggactacgagatgatgctcgggcaattcaacgacgatgcgtttaatgggaagcctccggcctccgcctccgtcgtgaggaatcttccgtcggtggttgtgaccgaagctgacgtcgtttgcgcggtttgtaaagacgagtttggcgttggggaaggggtgaaggtgttgccgtgttcgcatcgttaccatgaggactgcattgtgccgtggttggggataagaaacacgtgtcccgtttgtcgctatgagttccccactgatgatgctgattatgagcggaggaaggcgcagagatctgttgttatgtgataatcatgatcatggtgttattattagggtcagtttttttttcttactttcagtgatagggtataaaaagtatagatttttttttttgctgctgaagaaaattgtgcttgttgattttccgaaatttgagttttgggatgatgcttctcttcgaattgtacttttgggatacatcacagaaacgattcatttttccatc

SEQ ID NO: 23735 - protein, 352 aa, Glycine max
IPHFLTNQPSMADVTTYLRHHRDPDPDPDDDDQTLIPFPYWDLDFDFDPEFPTNTFSFTDRENQINFVMDLFHQRVEQSQLTDPLSNDAVFGVIDGIDLGFPAADDFFIGRRFSVGSDESDGGHSHSHAGIDDGVLGFCAHSDEDYNENDDVASIPLCWDALQLEDNNNNYDDFEWEEVIDERDVLSMLDDTVSVNLGIEAEAAAAAAEEEEAESEASILEWQVLLNSNNLEGPNSEPYFGDNEDFVYTADYEMMLGQFNDDAFNGKPPASASVVRNLPSVVVTEADVVCAVCKDEFGVGEGVKVLPCSHRYHEDCIVPWLGIRNTCPVCRYEFPTDDADYERRKAQRSVVM

SEQ ID NO: 23736 - protein, 342 aa, Glycine max
MADVTTYLRHHRDPDPDPDDDDQTLIPFPYWDLDFDFDPEFPTNTFSFTDRENQINFVMDLFHQRVEQSQLTDPLSNDAVFGVIDGIDLGFPAADDFFIGRRFSVGSDESDGGHSHSHAGIDDGVLGFCAHSDEDYNENDDVASIPLCWDALQLEDNNNNYDDFEWEEVIDERDVLSMLDDTVSVNLGIEAEAAAAAAEEEEAESEASILEWQVLLNSNNLEGPNSEPYFGDNEDFVYTADYEMMLGQFNDDAFNGKPPASASVVRNLPSVVVTEADVVCAVCKDEFGVGEGVKVLPCSHRYHEDCIVPWLGIRNTCPVCRYEFPTDDADYERRKAQRSVVM

SEQ ID NO: 23737 - protein, 284 aa, Glycine max
MDLFHQRVEQSQLTDPLSNDAVFGVIDGIDLGFPAADDFFIGRRFSVGSDESDGGHSHSHAGIDDGVLGFCAHSDEDYNENDDVASIPLCWDALQLEDNNNNYDDFEWEEVIDERDVLSMLDDTVSVNLGIEAEAAAAAAEEEEAESEASILEWQVLLNSNNLEGPNSEPYFGDNEDFVYTADYEMMLGQFNDDAFNGKPPASASVVRNLPSVVVTEADVVCAVCKDEFGVGEGVKVLPCSHRYHEDCIVPWLGIRNTCPVCRYEFPTDDADYERRKAQRSVVM

SEQ ID NO: 23738 - DNA, 576 bp, Glycine max
attgaaatttcttctcctgggtttctctatatatttttctttccttgcaagtagattctagcaatttcttctattccttagtattgtttaaaggatgattctttcgatgaagcaagttttctcactagcaatattcattgcattttgggaactttcttctgttgtagctgatgggggagatgtgactatagttcgagtatcaaataatttaaaccaaggtttaagtttcacaattcattgcaaaaccaataacaaagacttgggaactcaagtggtgaatcaaaattactatgaacgatttgaactccatcgtgacaatgcacctggcttaacattcttgttttgcaaaataacatggagagatgcatcaattctatatgtcctttaccaagatgcaagggattttcgccgtagatgtacaactgattgtaattgggaagtcaacaacgaaaaccttcttggcactaatcaatatactctaaaaccagatattattgtcccatggcctaaaaattgatacccatttagtgaacatccaattttacttggataatttaaataaaaaagtgttgtgtt

SEQ ID NO: 23739 - protein, 140 aa, Glycine max
MILSMKQVFSLAIFIAFWELSSVVADGGDVTIVRVSNNLNQGLSFTIHCKTNNKDLGTQVVNQNYYERFELHRDNAPGLTFLFCKITWRDASILYVLYQDARDFRRRCTTDCNWEVNNENLLGTNQYTLKPDIIVPWPKN

SEQ ID NO: 23740 - protein, 136 aa, Glycine max
MKQVFSLAIFIAFWELSSVVADGGDVTIVRVSNNLNQGLSFTIHCKTNNKDLGTQVVNQNYYERFELHRDNAPGLTFLFCKITWRDASILYVLYQDARDFRRRCTTDCNWEVNNENLLGTNQYTLKPDIIVPWPKN

SEQ ID NO: 23741 - DNA, 989 bp, Glycine max
actcacaactccataacacaaggcagaaagcaagctcatcctatagttttaaaaatggcagcagcctcctccatggctctctcttccccatcctaggctggcaaggccgtgaagctgggcccatcagcccccgaagtcgggagggtcagcatgaggaagaccgtcaccaagcaggcctcctccggaagcccatggaacggcccagaccgcgtcaagtacttgggccacattctctggcgagcccccgtcctacctcactggcgagttcccaggtgactacggctgggacactgctgggctttcggccgacccagaaaccttcgccagaaaccgtgagctcgaagtgatccactccaggtgggccatgctcgagggcttgggctgcgtcttccccgaactattgtcccgcaacggggtcaagtttggagaagctgtgtggttcaaggccgggtcccagatcttcagcgagggtgggctggactacttgggcaacccaagccttgtccacgcccagagcatcctcgccatctgggccacccaagttatcctaatgggtgctgttgagggttatcgtattgctggtgggcccctcggtgaggtcactgacccaatctaccctggtggcagctttgacccattgggccttgctgatgacccagaggcttttgctgagcttaaggtgaaggaactcaagaacgggagattggccatgttctctatgtttgggttctttgttcaggccattgtcaccggtaagggtccattggagaaccttgctgatcaccttgcggacccagtcaacaacaatgcctgggcctacgccaccaacttcgtccccggcaagtgagcatgaaagaaaaggatgacttgtggacttttgagagtttttagatttgtgtttggtgaagtatatgttattgcaatgtacttcagataatgtgaattatcttgtgtatccgaatccaacttaatgttacttgctttttacg

SEQ ID NO: 23742 - protein, 160 aa, Glycine max
MLEGLGCVFPELLSRNGVKFGEAVWFKAGSQIFSEGGLDYLGNPSLVHAQSILAIWATQVILMGAVEGYRIAGGPLGEVTDPIYPGGSFDPLGLADDPEAFAELKVKELKNGRLAMFSMFGFFVQAIVTGKGPLENLADHLADPVNNNAWAYATNFVPGK

SEQ ID NO: 23743 - protein, 114 aa, Glycine max
SQLHNTRQKASSSYSFKNGSSLLHGSLFPILGWQGREAGPISPRSREGQHEEDRHQAGLLRKPMERPRPRQVLGPHSLASPRPTSLASSQVTTAGTLLGFRPTQKPSPETVSSK

SEQ ID NO: 23744 - protein, 98 aa, Glycine max
MGAVEGYRIAGGPLGEVTDPIYPGGSFDPLGLADDPEAFAELKVKELKNGRLAMFSMFGFFVQAIVTGKGPLENLADHLADPVNNNAWAYATNFVPGK

SEQ ID NO: 23745 - DNA, 1731 bp, Glycine max
gacaaagatctcactcaattcaaccgcctccactctcacgcaaaccatttttcttttctttctctccctctgagcctttcatcgctgcctcggagagatggcagtgtcggaaggatcaccaacccctcagacggttggcaatgcttttgttgagcagtattactccatactgcatcaaaagccagaccaagttcacagattttaccacgagtctagcatcctaagccgacctgaagaagatggtaccatgactatggtgactactactttggaaattaataaaaagatactctctctggattacacaagctttagggtggaaattctgagtgctgatgcacagccttcttacaaggatggggtaattgttgtagtgactggctgcttaactggaagtgacaatctgaaaaggaagtttactcagtcctttttcctagctccccaggacaaaggctactttgttttgaatgatgttttcagatatgttgatgagtataagtcagttgatattgagtctgtgcctgcaaacgatgctgctgatgaaagtgctccaacagatgcttttgtccccgagcctgaggccattcatgttgctgaagatgttcccgctagtcaaactgatgttgttgatgctgacattggtgtcagtaaagaagtgagtcaaccactagagaatggaaatttatcagttactgaaaaggtggtgcctgttgatcatgttaaagaatgcagtcatcaggaacatcattcacacgctgagaaagctgcttctaataattcactggaggatactccaaagaagtcttttgcatccattgtgaatgcactaaaagaaaatgctgctcccttccatgtgagggtttcccctgtgaaacttcttgaacaaccacgtgtttctagtatacctgcaccagaagcaccagctcctagcactgacagtccaccagaaaagaataatgagattggaggtaaggcttatgcaatatttgttgcaaatttgcccatgaatgcaacagttgaacagctggaacgtgttttccagaaattttgggcccattaaacgggatggctttcaggttagaagtaacaagcaacaacaatccttgttttggttttggggaaatttgaatctgctacttcaatgcaaagtgcacttgaggcttctcctcctgttaccttggatggacgtagactttcaattgaagagcgacgagcaaataatgatagggggaggcattcatcaggaaggggcagttaccggaatgacagaaacgataacttcaggggccgtggcaacttcggtggtggccatggtggcggttatggaaacaggaaatgatagtttcgagaagcgaagcgagttctctggccggcctcgtggtggcaacaatggtgggcgtagcaatggagaagctgttccaaggagttatcagaatggaggagcaaaagtcactgtcaaccagtgaaagttcagtaaagtgattcattttgttgggaattgagtgacaacggcatttttcttatagatagcggcatctagggattctggtttgcaactgcattaagagttttttttctctattcctttatagctgtcatgatccttttgcttcagagtttttttggttaaatcacatcattccctatattcctttaaatcacattttgtatctaatattccggaataattgttttggaactgcccacaattatgccatttttttagaagcc

SEQ ID NO: 23746 - protein, 320 aa, Glycine max
MAVSEGSPTPQTVGNAFVEQYYSILHQKPDQVHRFYHESSILSRPEEDGTMTMVTTTLEINKKILSLDYTSFRVEILSADAQPSYKDGVIVVVTGCLTGSDNLKRKFTQSFFLAPQDKGYFVLNDVFRYVDEYKSVDIESVPANDAADESAPTDAFVPEPEAIHVAEDVPASQTDVVDADIGVSKEVSQPLENGNLSVTEKVVPVDHVKECSHQEHHSHAEKAASNNSLEDTPKKSFASIVNALKENAAPFHVRVSPVKLLEQPRVSSIPAPEAPAPSTDSPPEKNNEIGGKAYAIFVANLPMNATVEQLERVFQKFWAH

SEQ ID NO: 23747 - protein, 270 aa, Glycine max
MTMVTTTLEINKKILSLDYTSFRVEILSADAQPSYKDGVIVVVTGCLTGSDNLKRKFTQSFFLAPQDKGYFVLNDVFRYVDEYKSVDIESVPANDAADESAPTDAFVPEPEAIHVAEDVPASQTDVVDADIGVSKEVSQPLENGNLSVTEKVVPVDHVKECSHQEHHSHAEKAASNNSLEDTPKKSFASIVNALKENAAPFHVRVSPVKLLEQPRVSSIPAPEAPAPSTDSPPEKNNEIGGKAYAIFVANLPMNATVEQLERVFQKFWAH

SEQ ID NO: 23748 - protein, 268 aa, Glycine max
MVTTTLEINKKILSLDYTSFRVEILSADAQPSYKDGVIVVVTGCLTGSDNLKRKFTQSFFLAPQDKGYFVLNDVFRYVDEYKSVDIESVPANDAADESAPTDAFVPEPEAIHVAEDVPASQTDVVDADIGVSKEVSQPLENGNLSVTEKVVPVDHVKECSHQEHHSHAEKAASNNSLEDTPKKSFASIVNALKENAAPFHVRVSPVKLLEQPRVSSIPAPEAPAPSTDSPPEKNNEIGGKAYAIFVANLPMNATVEQLERVFQKFWAH

SEQ ID NO: 23749 - DNA, 1534 bp, Glycine max
aaaaaaaaaaaaatgaaaaggttgtgttgtgttggatttgtgttttgagttttcactgcagtggaaaacgaatcaagcgttgaattggtttgaatttgcatcccaatccaaccaacgtcgcaatttcattcttttcatccaataattcaattcaccaatggagcttttgaagcctttgcaccctcaccatgcacccattttgcgaattccctttcacgctgttccctcctcctcttcttcttcttctcaatctaaggttccccttcctatgatttctaaggttcatgtagctgttgggaaatcgctcgacaaagctgtccccttgcttcgatggactttaaatcacttccggaacgcggaaatcgtcattgttcatgcttatcaaccttctctcaccatccccactctattggggaaattgccagcatcacaggctagtcctgcagtggtgtctgcttttcgaaaagcggaaagagaacaaaccgtgaagctcttagacaagtatttgagcatttgccgcgctgctagggttagggcaagcgttattgtaactgaagctgaccaagtccaaaagggaattgttgatttggttattaagcataatattgagaagcttgtcattggagcaataccagaaaagtcaatttgtttgaatctgcccatgtgcgtgaaagtaaagctcagaaaagaggctgaggatgcactgacagatacagtacaagaacaacaaaagctcttgaatgcgagtgaagaaattgctggcgagctacaaatgaccatgagaaatattgccctgctagatagtcgtgctcaggaagcacaccgtaggtgcgatgaagctgcagatgaactatcactaattcaagaatccatctcaaccctgtggcaagaaaggcagcaaatcaggagacagaaaatggaagccttacgttggcttgagcgttggagaagtcgtgggaaagttggagcagctcattgcaatggggtcattgggtttgctgaagaattacctgagttagcagaattttcattatcagatcttcaaaatgccacatgtaatttttccaatagctttataattgagcaaggtggatacgtttgtatatacaagggagaaatgttgggtaggactgttgctataaaaaagttccatcaacataacatgcaaggaccattggagtttcgtcaagaggttcaagttcttggtagtctccagcaccctcatttaatcactttgcttggtgtttgccctgaagcctggtcaattgtatatgagtacctccccaatggaactcttcaagactacctattccgaaaaagcaacaattcccctttgacatggaatacccgagcacgaatgattgctgaaatcgctagtgcactctgcttcctgcattcttttagacctgaatctattatccatggtgatctgaagccagaaactgtactacttgattcttcacttggttgcaagatgtgtggatttgggttctgcaggctggtcagtgaggagtctctcctccgtcctagtttc

SEQ ID NO: 23750 - protein, 459 aa, Glycine max
MELLKPLHPHHAPILRIPFHAVPSSSSSSSQSKVPLPMISKVHVAVGKSLDKAVPLLRWTLNHFRNAEIVIVHAYQPSLTIPTLLGKLPASQASPAVVSAFRKAEREQTVKLLDKYLSICRAARVRASVIVTEADQVQKGIVDLVIKHNIEKLVIGAIPEKSICLNLPMCVKVKLRKEAEDALTDTVQEQQKLLNASEEIAGELQMTMRNIALLDSRAQEAHRRCDEAADELSLIQESISTLWQERQQIRRQKMEALRWLERWRSRGKVGAAHCNGVIGFAEELPELAEFSLSDLQNATCNFSNSFIIEQGGYVCIYKGEMLGRTVAIKKFHQHNMQGPLEFRQEVQVLGSLQHPHLITLLGVCPEAWSIVYEYLPNGTLQDYLFRKSNNSPLTWNTRARMIAEIASALCFLHSFRPESIIHGDLKPETVLLDSSLGCKMCGFGFCRLVSEESLLRPSF

SEQ ID NO: 23751 - protein, 422 aa, Glycine max
MISKVHVAVGKSLDKAVPLLRWTLNHFRNAEIVIVHAYQPSLTIPTLLGKLPASQASPAVVSAFRKAEREQTVKLLDKYLSICRAARVRASVIVTEADQVQKGIVDLVIKHNIEKLVIGAIPEKSICLNLPMCVKVKLRKEAEDALTDTVQEQQKLLNASEEIAGELQMTMRNIALLDSRAQEAHRRCDEAADELSLIQESISTLWQERQQIRRQKMEALRWLERWRSRGKVGAAHCNGVIGFAEELPELAEFSLSDLQNATCNFSNSFIIEQGGYVCIYKGEMLGRTVAIKKFHQHNMQGPLEFRQEVQVLGSLQHPHLITLLGVCPEAWSIVYEYLPNGTLQDYLFRKSNNSPLTWNTRARMIAEIASALCFLHSFRPESIIHGDLKPETVLLDSSLGCKMCGFGFCRLVSEESLLRPSF

SEQ ID NO: 23752 - protein, 291 aa, Glycine max
MCVKVKLRKEAEDALTDTVQEQQKLLNASEEIAGELQMTMRNIALLDSRAQEAHRRCDEAADELSLIQESISTLWQERQQIRRQKMEALRWLERWRSRGKVGAAHCNGVIGFAEELPELAEFSLSDLQNATCNFSNSFIIEQGGYVCIYKGEMLGRTVAIKKFHQHNMQGPLEFRQEVQVLGSLQHPHLITLLGVCPEAWSIVYEYLPNGTLQDYLFRKSNNSPLTWNTRARMIAEIASALCFLHSFRPESIIHGDLKPETVLLDSSLGCKMCGFGFCRLVSEESLLRPSF

SEQ ID NO: 23753 - DNA, 1357 bp, Glycine max
aacatcctcacacacccctttctttctttcttcacttcattccccttatcctctcttcagttacacacattctcagcaaaactttgtgagcattgtctattgctacatgcttatctaatcttgttacagggcttaaaagtgtgtgatgcaagcaatggagaacattcatcagagggaaatattggaagagcaaaggtttgaattgccaccaggattcaggtttcatccaacagatgaagaactcatcactcactacctctcacagaaggttcttgatagctgcttctgtgccagagccattggagaggctgatttgaacaagtgtgaaccatgggatttgccttggatggccaaaatgggtgaaaaggagtggtattttttctgtgtgagggacagaaaatacccaactggtcaaaggactaatagggccactggtgttggctactggaaggcaacaggcaaggacagagagatatataaggcaaaggcactgattggaatgaagaaaactcttgttttctacaaaggaagagctccaagtggtgaaaaaactagctgggtcatgcatgaatacagattagaagatgaacattctgtgcacaatccacccaaaaaggccatgatgatttgggccatctgcaggatttttcagaagagtaatggtgggaagaaaatgccaatttctggttggtgagattcagcaattttgcaaaggacatgccttcatgatggattcttctccatacaacgacagtgaatcaaaacctgttttgggggagtcatcacagccaacatgcttctctgatccaaaccaaagtgaggaccagaggacacaagatgaaaacatagcggatagctatgaaactctcatgttggcatcttcatattcttcaaacccctctgatatttcccctgcctcatggactttttctaaatctgcccctaccgtgtcccaccaatcactccaagttgggaattcacacagctcagattacttcatgcttcatcaggaacagtccatgttggggatgttgattgaaaaccatggagcaagtgctggccaaagaactcagaaagctcaggatagtaaaggctctgatgctgacatgtcctctgtgatgtacaacaactatgaaatgttccaaagatcatttgggaaccaggaatattcatcaccttccgtaggacatgtgtattctagtggcctatggggattttaaagaaggttgaaggatacactatatgcagattaaaattagagaaactttagggattaaatgctattatacatgtaaataaattgctcttaagctaatgttatcctacaaagtacaggaaatggatgttacggttttcc

SEQ ID NO: 23754 - protein, 186 aa, Glycine max
MVGRKCQFLVGEIQQFCKGHAFMMDSSPYNDSESKPVLGESSQPTCFSDPNQSEDQRTQDENIADSYETLMLASSYSSNPSDISPASWTFSKSAPTVSHQSLQVGNSHSSDYFMLHQEQSMLGMLIENHGASAGQRTQKAQDSKGSDADMSSVMYNNYEMFQRSFGNQEYSSPSVGHVYSSGLWGF

SEQ ID NO: 23755 - protein, 182 aa, Glycine max
MQAMENIHQREILEEQRFELPPGFRFHPTDEELITHYLSQKVLDSCFCARAIGEADLNKCEPWDLPWMAKMGEKEWYFFCVRDRKYPTGQRTNRATGVGYWKATGKDREIYKAKALIGMKKTLVFYKGRAPSGEKTSWVMHEYRLEDEHSVHNPPKKAMMIWAICRIFQKSNGGKKMPISGW

SEQ ID NO: 23756 - protein, 179 aa, Glycine max
MENIHQREILEEQRFELPPGFRFHPTDEELITHYLSQKVLDSCFCARAIGEADLNKCEPWDLPWMAKMGEKEWYFFCVRDRKYPTGQRTNRATGVGYWKATGKDREIYKAKALIGMKKTLVFYKGRAPSGEKTSWVMHEYRLEDEHSVHNPPKKAMMIWAICRIFQKSNGGKKMPISGW

SEQ ID NO: 23757 - DNA, 1637 bp, Glycine max
gctcttggctgatatttcctgataagtggacagacgcttaaacagagaaactaacacagatttgcatgcatggggaaaataacgcacattgtagtaattcccagtgcagggtacagccacttcgttcccgttatccacttctcaaagagacttgttgagcttcacccagaaattcacgtcacatgcatcattcccattctggggtctctcccaagtgctgcaaaacccattctccaaacccttccacaaaacatcaacacggttttccttccaccggtgaaccctaatgacctaccacaaggtgttcccgtagttgtccaaattcagctagcaatggctcactccatgccctccatccaccacaccctcaagtccataacttcaaagactccctacgtggccatggtggttgattctttcgccatgcatgccctagatttcgctcacgagttcaacatgttgtcctacgtttacttccctatatcagccaccacactctccatgcacttgaacttgcccttgttggacgaggaaacatcatgtgagtacagatatctgccggaggctatcaaattaccgggttgcgtgccgtttcacggccgcgatctctatgcccaagcccaggatcgaaccagtcaactctaccagatgtcgctgaagcgttacaaacgatgctggttcgttaatgggatcttcatcaacagcttcctggcattggaaactggtcctataagagcattgagagatgaggatagaggttaccctgctgtgtaccctgttggaccacttgtccaaagtggtgatgatgatgcaaaagggttattggagtgtgtaacatggttggagaaacagcaagatggttcagttttgtatgtttcttttgggagtggtggaacactttcacaagagcaaatgaatgagctggcttgtggtttggagttgagtaaccacaagttcttgtgggttgtgagagcaccgaacaatgcaaaagctgatgctgcttatcttggtgcacaaaagtgtgttgaccctttgcagttcttaccatgtgagttcttggagaggacaaaagagaaaggtatggttgttccttcatgggcaccgcaggttcaaatccttagccacagttcagttggtgggttcttgactcactgtggctggaattcgaccctcgagagtgtgctgcatggtgtgccattgataacttggccactgtatgctgagcagagaatgaatgcggttgtgctttgtgaggatctcaaagtgggattgaggccgagagttggtgaaaatggtttggtcgagagaaaagaaattgctgatgttgtgaagcgtttgatggaaggaagggaaggtggggaaatgcgaaaaagaatgaagaaactagaagttgcggctgttaatgctctcaaagaagatgggtcttctaccaagactctttcagagttggcactaatgtggaaaaatgtggcttaggaaaacaagttttttatttatgttatgcatgcagcttgtgtagtagtgcctgtaatgttcaggtatttcgtatcttagtttttatttatgtaatgtaatgcagcttgtatggtgcttgtgtttttagttataaataaataaactttggtcattacaagatc

SEQ ID NO: 23758 - protein, 468 aa, Glycine max
MGKITHIVVIPSAGYSHFVPVIHFSKRLVELHPEIHVTCIIPILGSLPSAAKPILQTLPQNINTVFLPPVNPNDLPQGVPVVVQIQLAMAHSMPSIHHTLKSITSKTPYVAMVVDSFAMHALDFAHEFNMLSYVYFPISATTLSMHLNLPLLDEETSCEYRYLPEAIKLPGCVPFHGRDLYAQAQDRTSQLYQMSLKRYKRCWFVNGIFINSFLALETGPIRALRDEDRGYPAVYPVGPLVQSGDDDAKGLLECVTWLEKQQDGSVLYVSFGSGGTLSQEQMNELACGLELSNHKFLWVVRAPNNAKADAAYLGAQKCVDPLQFLPCEFLERTKEKGMVVPSWAPQVQILSHSSVGGFLTHCGWNSTLESVLHGVPLITWPLYAEQRMNAVVLCEDLKVGLRPRVGENGLVERKEIADVVKRLMEGREGGEMRKRMKKLEVAAVNALKEDGSSTKTLSELALMWKNVA

SEQ ID NO: 23759 - protein, 380 aa, Glycine max
MAHSMPSIHHTLKSITSKTPYVAMVVDSFAMHALDFAHEFNMLSYVYFPISATTLSMHLNLPLLDEETSCEYRYLPEAIKLPGCVPFHGRDLYAQAQDRTSQLYQMSLKRYKRCWFVNGIFINSFLALETGPIRALRDEDRGYPAVYPVGPLVQSGDDDAKGLLECVTWLEKQQDGSVLYVSFGSGGTLSQEQMNELACGLELSNHKFLWVVRAPNNAKADAAYLGAQKCVDPLQFLPCEFLERTKEKGMVVPSWAPQVQILSHSSVGGFLTHCGWNSTLESVLHGVPLITWPLYAEQRMNAVVLCEDLKVGLRPRVGENGLVERKEIADVVKRLMEGREGGEMRKRMKKLEVAAVNALKEDGSSTKTLSELALMWKNVA

SEQ ID NO: 23760 - protein, 376 aa, Glycine max
MPSIHHTLKSITSKTPYVAMVVDSFAMHALDFAHEFNMLSYVYFPISATTLSMHLNLPLLDEETSCEYRYLPEAIKLPGCVPFHGRDLYAQAQDRTSQLYQMSLKRYKRCWFVNGIFINSFLALETGPIRALRDEDRGYPAVYPVGPLVQSGDDDAKGLLECVTWLEKQQDGSVLYVSFGSGGTLSQEQMNELACGLELSNHKFLWVVRAPNNAKADAAYLGAQKCVDPLQFLPCEFLERTKEKGMVVPSWAPQVQILSHSSVGGFLTHCGWNSTLESVLHGVPLITWPLYAEQRMNAVVLCEDLKVGLRPRVGENGLVERKEIADVVKRLMEGREGGEMRKRMKKLEVAAVNALKEDGSSTKTLSELALMWKNVA

SEQ ID NO: 23761 - DNA, 1415 bp, Glycine max
atttttacactctttgccagttgacacttgtttctctcttttcatgactccctttctcccaaaaagtgaaacaccaaaatcctcccacaacaacaacaaacaggttaggacttagagagccactcattcccatttgatggaggcgaagaaggaatatgaagtggaccatctgagcacacccacagggaccagtttctctcagttactattcggagatgacgacgacgacgttgatgaaagtgcattgggtctcgctgtggaccagtcttactcttacaattacaacaaccttacccgttcacctcttttctccattcacaaggcaccccaaatgctttgttttggcaaccatcaaaacgaagaaggtggcgttttgcttcctgaaaccaacgtaacccctcagaaatctgtcatcacttctagtgactcctcttctgctagcgcttcctcctgcaaccacaccaacaccgccttcaattccttacctaagtctaataatagtttgcagaaaaagcgacaagaaggagttgccaaggttggtgttggaagccagagacaaactaaaaagaacaaagcagagaaccccacctcaaccggacatgcaaagaggaaggagaagctcggagaacgaattgcaacgttacaacaacttgtttctccctttggaaagacagatacagcatcagtgcttcacgaggccatgggttatataagatttcttcatgaccaagttcaggtcctgtgctctccttacttgcaaagtttgccttcctcataccatcaaaatcagcacgggggcggaggtaacaatgaagaggaagtgaacaaggacttgaggagtaagggtctttgcttgatccctgtgggatgcaccgtacacgtggcaggtagcaatggtgctgatttttggtcatctgctgcaatagggaacaatgttagtttcaccatcagccaagcagtgaaacgaaaccaagatcaatgaatccttttcaaaaaaagttgtagccttttgggaaatgggtttcctatgtctgcccaaattgaagttgtacccaatctggagatggatggttgaggaggtaaactacatgaaatggcaaagagggataacaaataacaagaatggttcaaagttcacacatgggggtacaaaccagaggccatgattttgtccttaattatgtaacatctgttttggtttttggggggtccttttctcaggacacctatatcaatattctatagaaggaaggaaggaaatattttatgtaggatttagggatgtgtgctggcattgaaccctgaactaggagtctaggattccatatatttttattatagatattttgtctctgtaaatttcggtaggcaagccagttaatgaagttattataacatatatttttattatatac

SEQ ID NO: 23762 - protein, 281 aa, Glycine max
MEAKKEYEVDHLSTPTGTSFSQLLFGDDDDDVDESALGLAVDQSYSYNYNNLTRSPLFSIHKAPQMLCFGNHQNEEGGVLLPETNVTPQKSVITSSDSSSASASSCNHTNTAFNSLPKSNNSLQKKRQEGVAKVGVGSQRQTKKNKAENPTSTGHAKRKEKLGERIATLQQLVSPFGKTDTASVLHEAMGYIRFLHDQVQVLCSPYLQSLPSSYHQNQHGGGGNNEEEVNKDLRSKGLCLIPVGCTVHVAGSNGADFWSSAAIGNNVSFTISQAVKRNQDQ

SEQ ID NO: 23763 - protein, 216 aa, Glycine max
MLCFGNHQNEEGGVLLPETNVTPQKSVITSSDSSSASASSCNHTNTAFNSLPKSNNSLQKKRQEGVAKVGVGSQRQTKKNKAENPTSTGHAKRKEKLGERIATLQQLVSPFGKTDTASVLHEAMGYIRFLHDQVQVLCSPYLQSLPSSYHQNQHGGGGNNEEEVNKDLRSKGLCLIPVGCTVHVAGSNGADFWSSAAIGNNVSFTISQAVKRNQDQ

SEQ ID NO: 23764 - DNA, 1583 bp, Glycine max
acaacccaccttggattgtttttctgcgaccaaagcacgaacttacacacacacagactccgacttgtgttgtgaaaacctttgtgcattacccgacgcttcttcttttcttgttttcgctccaaaacccattgcttcaatcactaatactccactttcagatcggggtgtgtctctctccaacacgcacaaaaaaaggatttgaagatttggataagttgctttcagtcttgaagtactaaaaaagttgagtgtgaggtgtgaagtgaattttaacagtgataattggtaaatggggacccaaactatggggactcatggtggtggtggagacagtaatgggaaacagtcaccactccagcctctggtgcggcaaaactcaatgtacagtctcacacttgatgaggttcagaatcaattgggcgatttggggaagccgctaactagtatgaacattgatgagcttctaaaaaatgtgtggaccgctgaggcaagtcagaccattggtatggacaatgagggcacagcacaagctagtcaagcttctctgcagcgtcaggctagtctgtcattaaccggtgcactaagcaagaagactgtagatgaggtttggagagatatccaacaaaacaaaatcgtaggggagaagaagttccaagacagacatcctactttgggagaaatgacattggaggatttcttggtgaaagcaggtgttgttgcaggtgcatcttctaatagaacaaataccagtactatagctggagttgattcaaacgtggcagtaccacagtttccttcacaagcacagtggatacaatatccacaagcacaatatcagcatccaccacaaagtttaatggggatgtatatgcctagccaaggtatggtacagccattacacatgggggctggagcttcattagatgtttcgtttgcagataatcagatggcaatgccatcgtctctgatgggaacaatgtcagatacgcagactcctggaagaaaaaagagcacttctgaggacatgatagagaagactgttgagaggagacagaaaaggatgataaaaaatcgggaatctgctgcccgttcaagagcaaggaaacaggcatacacaaatgaattggagaataaagtctcgcgcctggaagaggaaaatgaaaggctgaggaaacgaaaggagctagagcagatgttgtcatgtgcaccccctcctgaacctaaatatcaacttcgccgaatagcatcagctccattctgagatctgtacctagttgtagcggtttgtatatttgagtatcagggaattctccttgtggattactgtgtggttgaatccagtatgtcaagaatagctatgtgatgcatttgcatccaatgacttgcttttaattgttaagttctttataactcctctgtgaaggttctttagaaaaaaatgtaaaatattgtagttttacctttcacaatatagcccttttaataatgccttgaggtacttttacgatttggggatgacaaaattgtggggtcttgccatttttcaagatatgggaaaatagggccactgtttaatattc

SEQ ID NO: 23765 - protein, 323 aa, Glycine max
MGTQTMGTHGGGGDSNGKQSPLQPLVRQNSMYSLTLDEVQNQLGDLGKPLTSMNIDELLKNVWTAEASQTIGMDNEGTAQASQASLQRQASLSLTGALSKKTVDEVWRDIQQNKIVGEKKFQDRHPTLGEMTLEDFLVKAGVVAGASSNRTNTSTIAGVDSNVAVPQFPSQAQWIQYPQAQYQHPPQSLMGMYMPSQGMVQPLHMGAGASLDVSFADNQMAMPSSLMGTMSDTQTPGRKKSTSEDMIEKTVERRQKRMIKNRESAARSRARKQAYTNELENKVSRLEEENERLRKRKELEQMLSCAPPPEPKYQLRRIASAPF

SEQ ID NO: 23766 - protein, 318 aa, Glycine max
MGTHGGGGDSNGKQSPLQPLVRQNSMYSLTLDEVQNQLGDLGKPLTSMNIDELLKNVWTAEASQTIGMDNEGTAQASQASLQRQASLSLTGALSKKTVDEVWRDIQQNKIVGEKKFQDRHPTLGEMTLEDFLVKAGVVAGASSNRTNTSTIAGVDSNVAVPQFPSQAQWIQYPQAQYQHPPQSLMGMYMPSQGMVQPLHMGAGASLDVSFADNQMAMPSSLMGTMSDTQTPGRKKSTSEDMIEKTVERRQKRMIKNRESAARSRARKQAYTNELENKVSRLEEENERLRKRKELEQMLSCAPPPEPKYQLRRIASAPF

SEQ ID NO: 23767 - protein, 293 aa, Glycine max
MYSLTLDEVQNQLGDLGKPLTSMNIDELLKNVWTAEASQTIGMDNEGTAQASQASLQRQASLSLTGALSKKTVDEVWRDIQQNKIVGEKKFQDRHPTLGEMTLEDFLVKAGVVAGASSNRTNTSTIAGVDSNVAVPQFPSQAQWIQYPQAQYQHPPQSLMGMYMPSQGMVQPLHMGAGASLDVSFADNQMAMPSSLMGTMSDTQTPGRKKSTSEDMIEKTVERRQKRMIKNRESAARSRARKQAYTNELENKVSRLEEENERLRKRKELEQMLSCAPPPEPKYQLRRIASAPF

SEQ ID NO: 23768 - DNA, 1282 bp, Glycine max
gaaattcttttaacattgaattacctagctgagaatccagagaccacttgggtaactgaaatggaataaaaagggagtcgagtttcattagcgatagcatgagccagtctagttagccacatggggatggtagatcggcaagagcaacatattcagttcctccttaacattcttcatcccacccaaatccctaaaaattgtcacatccttccccttaacctcaacaccaccacagactgaacccttccgaagctgaaccagaagggcctcctccactcgacgccgccggagcaccggccttctcccgttcctactgaacccagcaatgagacccagctgtgcctgagcctgtcccacaaaaacaattaccaaaaaactaggctagaaaaaaaaaaaagataacttctcaatctgtttttctaaactgtttttattttaaaaaatatattttctcttgagaaacaaattttattgaatacacttatcttaaaattgattttttcctctttgttctcaagatgtcctcacccgaaacccttacattcatggagctcgccatacaacaggcaaagttagctttggatgttcttgaagtgcctgttggatgtgtaattgttgaggatggcaaggttatagcctcaggcaggaatcgaactacccagacacgaaatgctacaaggcatgcagaaatggaagctgtagatgtgcttctcgggcagtggcagaaacatggactttcaatgtctgaagtttctgaaaaattctcaaactgcagcctttatgttacctgtgaaccatgcataatgtgtgcatctgctttatcaattttaggtataaaggaagtattttatggctgttcaaatgataaatttggaggctgtggatcgatactgtcattgcatttaagtaacaccacaccgctcaataatgaagttccacccggaaagtgtttcaaatgtactggaggtataatggcatcagaagctgttcttctctttcgaacattctatgagcaaggaaatcccaatgctccaaagccacacaggcctctagcacgtcaggcatgaagtttaatttgtatataaccagttactgatatggttatcagtcatggcctgaggatctgtgctaccgtagcattttgggcaggttgaagctgttattgaatgccatacagggctttttaattcgaaaaatcaacttcatgtattgattattaatgtatgatttgaaagatgaatcaggggttgccgtttgaaatgaatcttactggattaagttc

SEQ ID NO: 23769 - protein, 182 aa, Glycine max
MSSPETLTFMELAIQQAKLALDVLEVPVGCVIVEDGKVIASGRNRTTQTRNATRHAEMEAVDVLLGQWQKHGLSMSEVSEKFSNCSLYVTCEPCIMCASALSILGIKEVFYGCSNDKFGGCGSILSLHLSNTTPLNNEVPPGKCFKCTGGIMASEAVLLFRTFYEQGNPNAPKPHRPLARQA

SEQ ID NO: 23770 - protein, 173 aa, Glycine max
MELAIQQAKLALDVLEVPVGCVIVEDGKVIASGRNRTTQTRNATRHAEMEAVDVLLGQWQKHGLSMSEVSEKFSNCSLYVTCEPCIMCASALSILGIKEVFYGCSNDKFGGCGSILSLHLSNTTPLNNEVPPGKCFKCTGGIMASEAVLLFRTFYEQGNPNAPKPHRPLARQA

SEQ ID NO: 23771 - protein, 125 aa, Glycine max
MEAVDVLLGQWQKHGLSMSEVSEKFSNCSLYVTCEPCIMCASALSILGIKEVFYGCSNDKFGGCGSILSLHLSNTTPLNNEVPPGKCFKCTGGIMASEAVLLFRTFYEQGNPNAPKPHRPLARQA

SEQ ID NO: 23772 - DNA, 1292 bp, Glycine max
ccttttttaagactgagagagttatgttttgtccatgtcattgacacagtattaaatattacaaatattctgttcaaaaacaagttttaaaatgagctgtaaaatcaaccatataatcaaaagtgtgattaaaacaattaagtaatacaagctagtttatttctgcttccaacaagcatgcagtgcacttattaaaaaaagggttaggttagtcaattaggcaaaacatgttaaactgttagttcaacaatataaaaatgcatttaattacttgtcttgtagtttatttaacattaattggacaaaataaagctgaatcaatgcttgaaggcttctactgcggccgagacaattgttatgatgtgttgggtgttactcgggatacaagcagagctgacattgcaaaagcctacagaaaacttgcaaaaaaattccatccagatttatataggaatgaagatgagaaaatagaagcggaatctaattttaagagggtagccaatgcatatgaaatcctcaaagatgaagaatcacgaatggactatgattacatgcttgacaatccagagcaggtgtacagccattactaccgatattatcgtaggagagttgcgcctaaagtggatgttcgagtagtgatagccgtcagtattactatcatatccgctattcagtatgtcactgcttggcagagatacaactcggcaataaaatacttattgacagttccaaaatacagaaataaggcgctgcaaattgccaaagaaaaagggctgcttgaaaaagttagaaaaacacgaggaaaaagcaagtcagaagtgaaagaggaaactgaagatgtaatacgaaaagtgttagaagagaacatggatatcagaggagcatatgccaagccagtgataactgatattctgtggctgaaaataatacttttcccagttgatttagtaaaatacatgtactggtacacatgttggatttggaagcataatatcctccaacttccttatgatgatgaagaaaagctgtatcttatcaggaagtacatgaagaaaggacctaatcaatttgctgctattgaagaatctgaaaaacaagagtacttaaaacaagaactgtggatcagagagaaatttgatgtatggtttcaagaaaaagaagaagaacagaaaaagcttcttgctgaaaatgcgagatacaaagcataccgaagatacctcaagacacatggaactggaagaatgacatttgatgattcatgattttgtgatttattataattctcagttgtt

SEQ ID NO: 23773 - protein, 334 aa, Glycine max
MHLITCLVVYLTLIGQNKAESMLEGFYCGRDNCYDVLGVTRDTSRADIAKAYRKLAKKFHPDLYRNEDEKIEAESNFKRVANAYEILKDEESRMDYDYMLDNPEQVYSHYYRYYRRRVAPKVDVRVVIAVSITIISAIQYVTAWQRYNSAIKYLLTVPKYRNKALQIAKEKGLLEKVRKTRGKSKSEVKEETEDVIRKVLEENMDIRGAYAKPVITDILWLKIILFPVDLVKYMYWYTCWIWKHNILQLPYDDEEKLYLIRKYMKKGPNQFAAIEESEKQEYLKQELWIREKFDVWFQEKEEEQKKLLAENARYKAYRRYLKTHGTGRMTFDDS

SEQ ID NO: 23774 - protein, 313 aa, Glycine max
MLEGFYCGRDNCYDVLGVTRDTSRADIAKAYRKLAKKFHPDLYRNEDEKIEAESNFKRVANAYEILKDEESRMDYDYMLDNPEQVYSHYYRYYRRRVAPKVDVRVVIAVSITIISAIQYVTAWQRYNSAIKYLLTVPKYRNKALQIAKEKGLLEKVRKTRGKSKSEVKEETEDVIRKVLEENMDIRGAYAKPVITDILWLKIILFPVDLVKYMYWYTCWIWKHNILQLPYDDEEKLYLIRKYMKKGPNQFAAIEESEKQEYLKQELWIREKFDVWFQEKEEEQKKLLAENARYKAYRRYLKTHGTGRMTFDDS

SEQ ID NO: 23775 - protein, 241 aa, Glycine max
MDYDYMLDNPEQVYSHYYRYYRRRVAPKVDVRVVIAVSITIISAIQYVTAWQRYNSAIKYLLTVPKYRNKALQIAKEKGLLEKVRKTRGKSKSEVKEETEDVIRKVLEENMDIRGAYAKPVITDILWLKIILFPVDLVKYMYWYTCWIWKHNILQLPYDDEEKLYLIRKYMKKGPNQFAAIEESEKQEYLKQELWIREKFDVWFQEKEEEQKKLLAENARYKAYRRYLKTHGTGRMTFDDS

SEQ ID NO: 23776 - DNA, 1484 bp, Glycine max
aatcatataaataaataaacatagtataattaattgatcgtcgatggtagtagtatgttgagggggctgtttgtgtttggtggcacgtgctgcaggagattgacgttggcacgacagtccacgcagaaacagaaacagtggtgggatcatcttcatcatcatcttcgctccaaaaaccttcattgggcaggtctcatggagagtaatgggaactcggtgaaggatgctgagaaacaaatcacccgtgttttgttttgtggaccccgtttccctgcttctcatgaatatacaattgagtatttgcaaaatcattcacatatcaaggttgatgttctccctttagaagatgtgccaaaggatattgccaactatcatgtctgcatagtaaaaaacatgaggctagattcagaaataatttctcgtgcagttcagatgcagcttataatgcagtatggtgttgggctggaaggtgttgatattgatgctgcaacaaagcatggaatcaaagttgctaggataccaggtgatgtttcgggaaattcagcttcatgtgctgaaatggccatatatctaatgctgggtctcctccgtaagcaaaatgaactgcaagtttccatacaacaaaagaagcttggagagccaattaccgaaactttacttgggaaaactatattcattttgggctttgggaacattggaatggatttagcaaagcgattgcaaccctttggtgtaaaagttattgctataaagcggagctgggcttcatatgcacaacatgctagcaaattaagcagaaatgatgctgaagatcttgttgatgtgaagggtagtcatgaagatatatatgagtttgcaaggaaggctgacattgttgtttgctgcctaacattaaacagagaaacggttggtataataaacaataagtttatatcttctatgaaaaagggtggccttctggtgaatgttgctagaggtggtcttgtagactatgaggctgtgatcaaccaccttgaatcaggtcatttaggagggttaggcactgatgttgcttggactgagccatttaaccctgatgatcagatatttaaatttaagaatgttatcatgactcctcatgttgcaggcgttacagagcattcttatagatccatggctaaggctgttggtgatgtcgttcttcaacttcatgccgggcttcctttgacagggatagagttagttaactgaattagtgccaacaattcattccagtatcttcaactaaatgacttttataattcaagatgaattttctgaggtgcaaaaacacttaatattttgtaaagaaaatttagatgaggcaatgcttatgtgttgcccatttgttattctatggttgtggtgaaccaattgttctttagtagcgggttgtgttacagtatgcgattttatgaattttctagttctattttgccactatttatatacacggacaaatatat

SEQ ID NO: 23777 - protein, 391 aa, Glycine max
MLRGLFVFGGTCCRRLTLARQSTQKQKQWWDHLHHHLRSKNLHWAGLMESNGNSVKDAEKQITRVLFCGPRFPASHEYTIEYLQNHSHIKVDVLPLEDVPKDIANYHVCIVKNMRLDSEIISRAVQMQLIMQYGVGLEGVDIDAATKHGIKVARIPGDVSGNSASCAEMAIYLMLGLLRKQNELQVSIQQKKLGEPITETLLGKTIFILGFGNIGMDLAKRLQPFGVKVIAIKRSWASYAQHASKLSRNDAEDLVDVKGSHEDIYEFARKADIVVCCLTLNRETVGIINNKFISSMKKGGLLVNVARGGLVDYEAVINHLESGHLGGLGTDVAWTEPFNPDDQIFKFKNVIMTPHVAGVTEHSYRSMAKAVGDVVLQLHAGLPLTGIELVN

SEQ ID NO: 23778 - protein, 344 aa, Glycine max
MESNGNSVKDAEKQITRVLFCGPRFPASHEYTIEYLQNHSHIKVDVLPLEDVPKDIANYHVCIVKNMRLDSEIISRAVQMQLIMQYGVGLEGVDIDAATKHGIKVARIPGDVSGNSASCAEMAIYLMLGLLRKQNELQVSIQQKKLGEPITETLLGKTIFILGFGNIGMDLAKRLQPFGVKVIAIKRSWASYAQHASKLSRNDAEDLVDVKGSHEDIYEFARKADIVVCCLTLNRETVGIINNKFISSMKKGGLLVNVARGGLVDYEAVINHLESGHLGGLGTDVAWTEPFNPDDQIFKFKNVIMTPHVAGVTEHSYRSMAKAVGDVVLQLHAGLPLTGIELVN

SEQ ID NO: 23779 - protein, 278 aa, Glycine max
MRLDSEIISRAVQMQLIMQYGVGLEGVDIDAATKHGIKVARIPGDVSGNSASCAEMAIYLMLGLLRKQNELQVSIQQKKLGEPITETLLGKTIFILGFGNIGMDLAKRLQPFGVKVIAIKRSWASYAQHASKLSRNDAEDLVDVKGSHEDIYEFARKADIVVCCLTLNRETVGIINNKFISSMKKGGLLVNVARGGLVDYEAVINHLESGHLGGLGTDVAWTEPFNPDDQIFKFKNVIMTPHVAGVTEHSYRSMAKAVGDVVLQLHAGLPLTGIELVN

SEQ ID NO: 23780 - DNA, 1983 bp, Glycine max
aagcgcccgccattgccaaagagaagagtgcgaaacaagaagaagaaaatttctcatttctcgttctgaaaatcggagttcaacgctattattatatttgtgatatcttctatctgattcagcatcatggttcagctaatgaggtctgatacggataatcactgtctgaaaaaggtgaagttggaggttcaagatgaaatcccccctcttcacactcacaagcgacccaaattggaatctccccctaagtgtggtgcaagcgatgaatccatttcaatcccaccagcttcatacaatcccttggatgagccaagccctttgggtttgcgtctcaggaagagtccctcccttttggatttgattcagatgaggctctcgcaacaagaggaatccaaaaagaaagatcaaaaggcttcttcttcttcttctgctgctgctgctgctgctgctgctgattctaaacttaaggcctccaattttcctggaaccattttgaaaattgggaattgggagtataagtctagatatgaaggagacttggtggcgaagtgttactttgcgaagcataagctggtatgggaagtccttgatggttgtcttaagaataagattgaaatcccatggtctgatatcatggctatcaaggctaactaccctgatgatggaccaggtacgctcgaagtagtgcttgcaagaagacccttgttttttagggagatcaatccacagccaaggaagcataccttatggcaggcaacatcggactttactggtggacaagccggcataaacaggcgacattttctgcagtgtccacaaggattgctaggcaagcattttgagaagctcattcagtgtgatccccgtctcaactatctaagccagcaggcggatttggtgttggattctccgtattttgaacctggaacaacttcaattcacgaccacattgaatctagtgatggctttgatagaaaaagcgaagagcgatctggtatttttggattgcaggatgtggagtcaggatctgcagttcaatcatcttcctcaaaaagtgaacataaccttggtaaagctgttgaaaatgtttcccaagaaattacctcacctagctcagtgatgaacatccatgcaatgaaagatttcaggagtagaggagctgaaacattgaagtttcttagtaatttggaccagatcaaattgcctggacttcacccttctatgtcaatggacgatttggttagccacattggacattgcatttcagaacagatgggatctgacaatccaaatttcgctggtgacaaccagtatagcagatctattctggaagaatttactcagtacttgttcaatgactctcaacatgcaactacctccgatgaacagcgtgtcatgtcaaaggtaaactcactctactgccttctgcagaaggatccttctacagcagaagacatgaccaaaaatggcaatagtctgggagatgcaaatgccttgtcaagggtgaactcactatactcccttctgcagaatgcagaagacgcaatggccagaaatggcaatggtctgagagatgcagatgtgatgtcaagggtgaactcgctgtactgtcttctgcagaaggatccttatacagcagaagacacaaacacaatgacaagaaatggcaatggtcttgatgcagatgagggtggaaaagttggtgtgagtaactccactgaattgtcacaaccatgcaaaactaaagtgtctgatttggaagttcaagcggatgatgcttctggctgcaagcagggggggactggtatgtccaggaaggaatcagctggcgatttgcttcttaatcttccaagggtggcatctctgcttcagtttttgtttaacatgtccgaggattctgttaataaagttagatagatagtaaccatctttcaaaacttgcaagaaacacaaaagctatattatcaacaatgtgaatattgt

SEQ ID NO: 23781 - protein, 596 aa, Glycine max
MVQLMRSDTDNHCLKKVKLEVQDEIPPLHTHKRPKLESPPKCGASDESISIPPASYNPLDEPSPLGLRLRKSPSLLDLIQMRLSQQEESKKKDQKASSSSSAAAAAAAADSKLKASNFPGTILKIGNWEYKSRYEGDLVAKCYFAKHKLVWEVLDGCLKNKIEIPWSDIMAIKANYPDDGPGTLEVVLARRPLFFREINPQPRKHTLWQATSDFTGGQAGINRRHFLQCPQGLLGKHFEKLIQCDPRLNYLSQQADLVLDSPYFEPGTTSIHDHIESSDGFDRKSEERSGIFGLQDVESGSAVQSSSSKSEHNLGKAVENVSQEITSPSSVMNIHAMKDFRSRGAETLKFLSNLDQIKLPGLHPSMSMDDLVSHIGHCISEQMGSDNPNFAGDNQYSRSILEEFTQYLFNDSQHATTSDEQRVMSKVNSLYCLLQKDPSTAEDMTKNGNSLGDANALSRVNSLYSLLQNAEDAMARNGNGLRDADVMSRVNSLYCLLQKDPYTAEDTNTMTRNGNGLDADEGGKVGVSNSTELSQPCKTKVSDLEVQADDASGCKQGGTGMSRKESAGDLLLNLPRVASLLQFLFNMSEDSVNKVR

SEQ ID NO: 23782 - protein, 592 aa, Glycine max
MRSDTDNHCLKKVKLEVQDEIPPLHTHKRPKLESPPKCGASDESISIPPASYNPLDEPSPLGLRLRKSPSLLDLIQMRLSQQEESKKKDQKASSSSSAAAAAAAADSKLKASNFPGTILKIGNWEYKSRYEGDLVAKCYFAKHKLVWEVLDGCLKNKIEIPWSDIMAIKANYPDDGPGTLEVVLARRPLFFREINPQPRKHTLWQATSDFTGGQAGINRRHFLQCPQGLLGKHFEKLIQCDPRLNYLSQQADLVLDSPYFEPGTTSIHDHIESSDGFDRKSEERSGIFGLQDVESGSAVQSSSSKSEHNLGKAVENVSQEITSPSSVMNIHAMKDFRSRGAETLKFLSNLDQIKLPGLHPSMSMDDLVSHIGHCISEQMGSDNPNFAGDNQYSRSILEEFTQYLFNDSQHATTSDEQRVMSKVNSLYCLLQKDPSTAEDMTKNGNSLGDANALSRVNSLYSLLQNAEDAMARNGNGLRDADVMSRVNSLYCLLQKDPYTAEDTNTMTRNGNGLDADEGGKVGVSNSTELSQPCKTKVSDLEVQADDASGCKQGGTGMSRKESAGDLLLNLPRVASLLQFLFNMSEDSVNKVR

SEQ ID NO: 23783 - protein, 516 aa, Glycine max
MRLSQQEESKKKDQKASSSSSAAAAAAAADSKLKASNFPGTILKIGNWEYKSRYEGDLVAKCYFAKHKLVWEVLDGCLKNKIEIPWSDIMAIKANYPDDGPGTLEVVLARRPLFFREINPQPRKHTLWQATSDFTGGQAGINRRHFLQCPQGLLGKHFEKLIQCDPRLNYLSQQADLVLDSPYFEPGTTSIHDHIESSDGFDRKSEERSGIFGLQDVESGSAVQSSSSKSEHNLGKAVENVSQEITSPSSVMNIHAMKDFRSRGAETLKFLSNLDQIKLPGLHPSMSMDDLVSHIGHCISEQMGSDNPNFAGDNQYSRSILEEFTQYLFNDSQHATTSDEQRVMSKVNSLYCLLQKDPSTAEDMTKNGNSLGDANALSRVNSLYSLLQNAEDAMARNGNGLRDADVMSRVNSLYCLLQKDPYTAEDTNTMTRNGNGLDADEGGKVGVSNSTELSQPCKTKVSDLEVQADDASGCKQGGTGMSRKESAGDLLLNLPRVASLLQFLFNMSEDSVNKVR

SEQ ID NO: 23784 - DNA, 1484 bp, Glycine max
aaaaaagaagcagaggaattttcatttttcaaacagagagagctcatagtagtgtgattttgccattttttgtgaagttaaaaaaattctcgtttgtttctcacgagagaacaagagaattaaaggtttgaaagctgaatcaggtaatgaattgaggtcctcttgttgtactacctaaacaagaggtcttataatattctctccagtttttgtagcctgtgccctgtggcattcccacctattctgcatttaaatccacctttcatatttaatgacctatgcagagaaataatgatgattgcatgttctcttatggaacccaatgactaactgaacaacccctatgtccttagaaaagtttggtatttatgcttcctgtgggttaatttcactttttcattgacagcttctacctgtgtctggtgctgggtaagtcagagaattaatgggtctttacatgcacttccaggtggtgttgtgtggtgaaagacttgtctcaaggccattaaagagattctgatcacattttgctttgagtctttgatacatacatacatatctcaagtgctggtgttttctcaggtgtctatgaacattttttttttatagaaaaatgttaatggttaatttgttagtttttttattagcggaagaaattcgagaagttgttctcccttctcttctttcttaaccatcctactaaccttatatctccgtgtctataaatagatacatgttattttaatttcctatttttctctttgatttttttaccattatttctcattctccttctttgcacaccctcaggatggagccattcggtgcagagggatgtcacagcagtgaatctggatggaccatgtatattgggtcccccatagatgatgctggacatagtagtgacaacgacgacaacaacaagaaaggtactcaagctcatccacaagatgatgatgatgatgatgatgaaagtgatgattctatggcttctgatgcgtcttctgggccaagtcatcatcatggctttgcggatttccgccgagatgccgaagaagaaaatgatgaaaacaagtattgcttagagaagaaagcaggtaaaactcaacacaagcaaatggaagggaaaaaggtggaaaagaaagggatgttaatagttgatagcaaagataagtctccagttcagggttgtggaaaggtgagaaaaaattactttgtgggaaaaaggaaatagctaggtgtatttccctgctccacagctggttaatttgttgatgtttaggttttcttttgaaactagataattaattaatagctgcaattactgtgttgtactcatttgcatttccatagttgttgtgatagtgatggccatttcactatattagccacagcatgcaaggattaaagggtatggatgcatatctggttagttctgaaatatgttgttcagatatgtactagtatgttactttttgtatgct

SEQ ID NO: 23785 - protein, 140 aa, Glycine max
MEPFGAEGCHSSESGWTMYIGSPIDDAGHSSDNDDNNKKGTQAHPQDDDDDDDESDDSMASDASSGPSHHHGFADFRRDAEEENDENKYCLEKKAGKTQHKQMEGKKVEKKGMLIVDSKDKSPVQGCGKVRKNYFVGKRK

SEQ ID NO: 23786 - protein, 123 aa, Glycine max
MYIGSPIDDAGHSSDNDDNNKKGTQAHPQDDDDDDDESDDSMASDASSGPSHHHGFADFRRDAEEENDENKYCLEKKAGKTQHKQMEGKKVEKKGMLIVDSKDKSPVQGCGKVRKNYFVGKRK

SEQ ID NO: 23787 - protein, 82 aa, Glycine max
MASDASSGPSHHHGFADFRRDAEEENDENKYCLEKKAGKTQHKQMEGKKVEKKGMLIVDSKDKSPVQGCGKVRKNYFVGKRK

SEQ ID NO: 23788 - DNA, 1141 bp, Glycine max
tgatttagattgtcaagttgtatgagagatgtgtcattgcatgtgccaattatcctgagtattggatacgctatgttttgtgtatggaagccagtggaagcatggatcttgcaaataatgttcttgctcgggcaacccaagtctttgttaagagacaaccagagatacatattttttgtgctcggttcaaggagcagactggagatatagatggtgctagagctgcatatcaacttgtgcatactgaaacttctcctggtcttcttgaagcaattatcaaacatgccaatatggaataccgactggaaaaaatggaggatgccttctctttgtatgaacaggccattgccattgagaaagggaaagaacattcacaaacattgccgatgttgtttgctcaatattctcgatttgtatatttggcttctgggaatgcagagaaggcaaggcagattctagttgaggggcttgagaatgttttgttgtcaaagccactacttgaggctatattgcattttgaggctattcaacccttgccaaagcgcgttgatattgactttctggagtcatgggttgtcaaattcataatgcctaactcagagagtcctggtgtagcaagtgcaacagagcgtgaggaactttctagtatttttctggagtttttaaatctctttggtgatgttcaatctatcaagagggctgaagataggcatgccaaattgtttttgccacacagaagcatgtcagagttgaaaaaacgtcatgctgaggatttcttagcttcagacaaaacaaaagcgccgagatcttattctgctcaatcacctgcccaatctgggatgggtgcatatccaaatgcacagaaccagtggtctaattatggagttcaacctcaaacttggcctccagttacacaagcacaagggcaacaatggactgctggctacacccaacaggcttcctacggggcttatgctggatatgggggcaactatgcgaattctcaattgcctacatcagttccacaaagtactgcatacggagcctatcctcctgcatatcctgcacagccggcggttcctcaacaaaactatgcacaacctgtggctgcagcccctgcacagcaacctgctgcggttcc

SEQ ID NO: 23789 - protein, 352 aa, Glycine max
MEASGSMDLANNVLARATQVFVKRQPEIHIFCARFKEQTGDIDGARAAYQLVHTETSPGLLEAIIKHANMEYRLEKMEDAFSLYEQAIAIEKGKEHSQTLPMLFAQYSRFVYLASGNAEKARQILVEGLENVLLSKPLLEAILHFEAIQPLPKRVDIDFLESWVVKFIMPNSESPGVASATEREELSSIFLEFLNLFGDVQSIKRAEDRHAKLFLPHRSMSELKKRHAEDFLASDKTKAPRSYSAQSPAQSGMGAYPNAQNQWSNYGVQPQTWPPVTQAQGQQWTAGYTQQASYGAYAGYGGNYANSQLPTSVPQSTAYGAYPPAYPAQPAVPQQNYAQPVAAAPAQQPAAV

SEQ ID NO: 23790 - protein, 346 aa, Glycine max
MDLANNVLARATQVFVKRQPEIHIFCARFKEQTGDIDGARAAYQLVHTETSPGLLEAIIKHANMEYRLEKMEDAFSLYEQAIAIEKGKEHSQTLPMLFAQYSRFVYLASGNAEKARQILVEGLENVLLSKPLLEAILHFEAIQPLPKRVDIDFLESWVVKFIMPNSESPGVASATEREELSSIFLEFLNLFGDVQSIKRAEDRHAKLFLPHRSMSELKKRHAEDFLASDKTKAPRSYSAQSPAQSGMGAYPNAQNQWSNYGVQPQTWPPVTQAQGQQWTAGYTQQASYGAYAGYGGNYANSQLPTSVPQSTAYGAYPPAYPAQPAVPQQNYAQPVAAAPAQQPAAV

SEQ ID NO: 23791 - protein, 283 aa, Glycine max
MEYRLEKMEDAFSLYEQAIAIEKGKEHSQTLPMLFAQYSRFVYLASGNAEKARQILVEGLENVLLSKPLLEAILHFEAIQPLPKRVDIDFLESWVVKFIMPNSESPGVASATEREELSSIFLEFLNLFGDVQSIKRAEDRHAKLFLPHRSMSELKKRHAEDFLASDKTKAPRSYSAQSPAQSGMGAYPNAQNQWSNYGVQPQTWPPVTQAQGQQWTAGYTQQASYGAYAGYGGNYANSQLPTSVPQSTAYGAYPPAYPAQPAVPQQNYAQPVAAAPAQQPAAV

SEQ ID NO: 23792 - DNA, 1851 bp, Glycine max
gttggttgttcaggcgaaacaatggcgacggtggagctctggtggatgacgtgctttctctaacaactgctcttagaaaagagagagagaatggcggtggagtacacatgctgctcaacggcgttcttcgttcacatagtggtaatcgtgctgctggtgctgttcgcgggcctcatgtcgggcctcaccttgggcctcatgtcgctcagcctcgttgatcttgaggttctcgctaagtccggcactcctcaggatcgtaaacacgctgagaagatattaccagttgtcaaaaaccaacatttattgctatgtactcttctaatttgcaatgctgcggccatggagacacttcctatttttcttgatggtcttgttactgcttggggcgctatcctgatttcagtgacattaattcttttgtttggtgagattataccccaatcagtttgttctcggtatggtttggctattggtgcatcagtggctccctttgtccgtgtgcttgtatgcatatgtttcccagttgcctttccaattagtaagttgttggattttttgctgggccatcgacatgaagccctattccgtagagctgagttgaaaacactcgtaaatttgcatggtaatgaggtctgtatcagagcaatgtgatgtttttagttgaagtaatggcatctatctttattgtataatgtttttttatcgctattaatttgctcttgtagttgagctaaacctttgttatgtattccacaagtattctgctcttctagcttttctttttcaatgaaaatatgttgtttctgtgaaatgtcactaaggactatcttatctacttctcttctggttatttggaatcctgtgctcggacattcatgcttctgtttgtttgttgttgctgcttatggctgaattgtattaggctggaaaagggggggaactgacacatgatgaaacaacgatcattgctggggcacttgaactcagtgagaagacagcgagtgatgccatgactcctatatctgaaacatttaccgttgatattaattcaaagcttgatagggaactgatgaatgaaatattggagaaagggcacagcagagtcccagtctattatgagcagcctacaaacattattggccttgtactggtcaagaatttattgacagttcacccagaagatgaagcacccgtgaagagtgtaaccatacgcaggattccaagggttccagaaagtatgccactttatgacattttgaatgagtttcagaagggccatagtcacatggctgttgttgtcagacggtgtgacaagactaaccaacaatcttcccaaaataatgcaaatgactcggtgagagatgttaaggtggatattgatggtgaaaagcctcccaaagagaaagctttgaaacccaagatgccactccacaagtggaaaagctttccaaatacaaacaagtcatcaaataggggttctcggagcagaaaatggtcaaaaaatatgtactcggatattttagagatagatggaagtccacttccaaagctccctgaagaagaagaagctgttggaattattaccatggaagatgtcattgaagagcttttgcaggaggagatctttgatgagacggatcatcattttgaagactcataacagtgctttttccataaaaccttccatgttcatatttcttgtttggaccttatagataattaaatagataatgcggtttagggttgaaagctgctgtatagagatctgagttgtgatttggaacgtgtaagccattatcgttgatgtaatgcagagaccagacagctgttatataaaccaaaccttttgag

SEQ ID NO: 23793 - protein, 216 aa, Glycine max
MTPISETFTVDINSKLDRELMNEILEKGHSRVPVYYEQPTNIIGLVLVKNLLTVHPEDEAPVKSVTIRRIPRVPESMPLYDILNEFQKGHSHMAVVVRRCDKTNQQSSQNNANDSVRDVKVDIDGEKPPKEKALKPKMPLHKWKSFPNTNKSSNRGSRSRKWSKNMYSDILEIDGSPLPKLPEEEEAVGIITMEDVIEELLQEEIFDETDHHFEDS

SEQ ID NO: 23794 - protein, 196 aa, Glycine max
MNEILEKGHSRVPVYYEQPTNIIGLVLVKNLLTVHPEDEAPVKSVTIRRIPRVPESMPLYDILNEFQKGHSHMAVVVRRCDKTNQQSSQNNANDSVRDVKVDIDGEKPPKEKALKPKMPLHKWKSFPNTNKSSNRGSRSRKWSKNMYSDILEIDGSPLPKLPEEEEAVGIITMEDVIEELLQEEIFDETDHHFEDS

SEQ ID NO: 23795 - protein, 186 aa, Glycine max
MAVEYTCCSTAFFVHIVVIVLLVLFAGLMSGLTLGLMSLSLVDLEVLAKSGTPQDRKHAEKILPVVKNQHLLLCTLLICNAAAMETLPIFLDGLVTAWGAILISVTLILLFGEIIPQSVCSRYGLAIGASVAPFVRVLVCICFPVAFPISKLLDFLLGHRHEALFRRAELKTLVNLHGNEVCIRAM

SEQ ID NO: 23796 - DNA, 1228 bp, Glycine max
taagttatataatggtggtgagtaaattaagcaattaatgaattaatatatatgtatataggttgaagcagtagatggagggttcacagatgcagcatcagaggcgtttcggtattgggtaggggatttggaaaacaggtaccacttgagtggctcagcggtgggaccacacccgtgtccaaccatggttcgggagtttcagtcagtgatagggaaagaaacgaggatgcaagcattggaaaaatggggtgggaagccagatgttcttgttgccagcgtagggactgggtcaaacgctttgggtctgtttcatgagtttatagcagacaaagatgtgaggttcgttggagttgaggctgggggtttgggcttggagagtggaaagcattcttcaacgttgaccacaggagaagtgggtgcgtaccatggagccatcagctatttactgcaggaccaagatggtcaaattattcatccacattccatcgctgctgggttagtaattaatagttcccagaattcaaattctactatacgtactcaatttctttttagtaaaacattgttcgtatatctctcttaagttaagaaattcatgaatcgggtacacatctttgaaattgacattggtattcttttaattcacaggatggagtatccaggagttggtccagagttaagcttccttaaagaaagcgggcgtgcggaattctgcgttgcaaatgatgaagaggctcttgatgcgtaccaaagactatgcaaattagagggcatatttccctctttggaggccgcacatgcattggctatcttagataaattggtccctactctatgcaatggtactaaggttgttgtgaattgtagtgggcgaggagataaggatgcagcaatagtcttcaatcggggaatatatatttgacaaggaataacaaagatggatgaagacctgtgttaaataacgatttgacctagcttacgatgaatactataaatgctatatataaataaaaactacacgattcatacgttgttaaaggctaggaagtggcctcggtaaataattattttcaccgtcattaactatcatcagatatttattcatgttactgtgaaaaagggattaaaggaaagtattaaactctttagagagatttgtgtaagaagatattcagtgacaaatctttatcttgtaaaaagaaagaaatgataatgaaaatattcaatc

SEQ ID NO: 23797 - protein, 132 aa, Glycine max
MVREFQSVIGKETRMQALEKWGGKPDVLVASVGTGSNALGLFHEFIADKDVRFVGVEAGGLGLESGKHSSTLTTGEVGAYHGAISYLLQDQDGQIIHPHSIAAGLVINSSQNSNSTIRTQFLFSKTLFVYLS

SEQ ID NO: 23798 - protein, 118 aa, Glycine max
MQALEKWGGKPDVLVASVGTGSNALGLFHEFIADKDVRFVGVEAGGLGLESGKHSSTLTTGEVGAYHGAISYLLQDQDGQIIHPHSIAAGLVINSSQNSNSTIRTQFLFSKTLFVYLS

SEQ ID NO: 23799 - protein, 108 aa, Glycine max
MNRVHIFEIDIGILLIHRMEYPGVGPELSFLKESGRAEFCVANDEEALDAYQRLCKLEGIFPSLEAAHALAILDKLVPTLCNGTKVVVNCSGRGDKDAAIVFNRGIYI

SEQ ID NO: 23800 - DNA, 1348 bp, Glycine max
gaagaaatcaggagattttatgacaatagctggtttcaatgctgagaatgaaatactgcatacccttgccttcttagcagggctgatgatttggtcacagataacagatttgcccttttctctgtactcaacttttgtgattgaggcccgtcatggttttaataagcaaacaccatggttattctttagggacatgcttaaaggaattttcctttctgtaataattggtccacctattgtggctgcaatcattgtaatagtacagaaaggaggtccatacttggccatctatctttgggtttttacgtttggtctttctattgtgatgatgaccctttatccagtactaatagctccactcttcaataagttcactccacttccagatggtcaactcagggagaaaatcgagaaacttgcttcctccctcaactatccgttaaagaaactatttgttgtcgatggatccacaagatcaagtcacagcaatgcctatatgtatggattcttcaagaacaagaggattgtcctttatgacacattaattcaacagtgcaaagacgatgaggaaattgttgctgttattgcccatgagttgggacactggaagctcaaccatactgtgtacacatttgttgctatgcagattcttacacttctacaatttggatgatatacactagtgcgaaattcagctgatctgtatcgaagctttgggtttgatacgcagccagtcctcattgggctcatcatatttcagcatactgtaatcccacttcagcaattggtcagctttggtctgaacctagtcagccgatcatttgaatttcaggctgatggctttgccaagaagcttggatatgcatctggattacgcggtggtcttgtgaaactacaggaggagaatctgtcagctatgaatacagatccttggtactctgcttatcactattctcatcctccccttgttgaaagattggctgtgctggacgaaccggataagaaggaagactaagcaagtaacttagatgaagagctgcaaaaattggctataccctaacttgctatgatttagtgctgcaatagctgtaatatctcaaaaggtgacatgtttatgtagcttaggtttcagtgatcgtgttttggtccaggaagataagattacgatagtgaagactaattgggacaaagcaaaaacgtagttttacgtatctctagatggcattttattactctgctttggtttatgtcccacttttgtttttgtcgatcttctttctttcatactacatttaaaaaatgttgaccttttgggattaagagtaaaatacattctctttctcttcat

SEQ ID NO: 23801 - protein, 223 aa, Glycine max
KKSGDFMTIAGFNAENEILHTLAFLAGLMIWSQITDLPFSLYSTFVIEARHGFNKQTPWLFFRDMLKGIFLSVIIGPPIVAAIIVIVQKGGPYLAIYLWVFTFGLSIVMMTLYPVLIAPLFNKFTPLPDGQLREKIEKLASSLNYPLKKLFVVDGSTRSSHSNAYMYGFFKNKRIVLYDTLIQQCKDDEEIVAVIAHELGHWKLNHTVYTFVAMQILTLLQFG

SEQ ID NO: 23802 - protein, 217 aa, Glycine max
MTIAGFNAENEILHTLAFLAGLMIWSQITDLPFSLYSTFVIEARHGFNKQTPWLFFRDMLKGIFLSVIIGPPIVAAIIVIVQKGGPYLAIYLWVFTFGLSIVMMTLYPVLIAPLFNKFTPLPDGQLREKIEKLASSLNYPLKKLFVVDGSTRSSHSNAYMYGFFKNKRIVLYDTLIQQCKDDEEIVAVIAHELGHWKLNHTVYTFVAMQILTLLQFG

SEQ ID NO: 23803 - protein, 195 aa, Glycine max
MIWSQITDLPFSLYSTFVIEARHGFNKQTPWLFFRDMLKGIFLSVIIGPPIVAAIIVIVQKGGPYLAIYLWVFTFGLSIVMMTLYPVLIAPLFNKFTPLPDGQLREKIEKLASSLNYPLKKLFVVDGSTRSSHSNAYMYGFFKNKRIVLYDTLIQQCKDDEEIVAVIAHELGHWKLNHTVYTFVAMQILTLLQFG

SEQ ID NO: 23804 - DNA, 1236 bp, Glycine max
taaggatagcaagtgtagctgctggtggtcgccataccttagcattgtcagatataggacaggtgtggggttggggctatggtggtgaagggcagcttggtttgggttctagaatacgaatggtgtcctctcctcatctagttccttgtattaattcctcttcttatggtaaagatatggctcgagtaagcataagttcagatgggcaaaatttcagagttcctggaagttatattaagggaattgcctgcggaggtcgacacagtgcagtaatcacagatgctggagctgttcttacatttggttggggactttatggacaggtaaagtagaatatggtgggcaaaagcaatgtagatgttgaagatgaggttcactctaacaagggataatatctattctgttactttacaatatttatatttctattcgctctctttgttgttgcatgctaatgcttgttaattattctaaattaatgtcatcttgtgttggaaaagtgtgggcaaggaagtacagatgatgaactgagcccgagttgcgtatcttccttattgggtattcaaatagagggagttgctgcaggactgtggcatactgtgtgtacatctgtggatggtgatgtatatgcatttggtggaaaccagtttggacagctgggaactggtggtgatcaagctgagactataccgaggctcttggattgtccgagcttggaaaatgtgaatgtaaagaggatatcttgtggggctcgtcacactgctctaatagcagataatggaaaagtcttctgctggggatggaacaagtatggacagcttggccttggggacgtgatagaccgtaacatcccttctgaagttaccatcgaaggttgtgtagctaaaaacgttgcatgcggctggtggcatactcttcttctggcggaatcacccacttgatgtcatgtggcttttctcgagactcatgacccaattttgttagttagctgttcttttgtttggtaaaaatcatatgaaagtccatatgcatatgtatatgtacatacattagtggtatacatatgacatatgtatatatgcttgtattctttcatggtgtgaatcatcatgactggctctagcatttaaacaacatccaatagagatttctggtttgcatgggaaggaaagtattgggtccttttcattcatgtaacattattcatcatagtgtatattttcttttaattgtatt

SEQ ID NO: 23805 - protein, 109 aa, Glycine max
RIASVAAGGRHTLALSDIGQVWGWGYGGEGQLGLGSRIRMVSSPHLVPCINSSSYGKDMARVSISSDGQNFRVPGSYIKGIACGGRHSAVITDAGAVLTFGWGLYGQVK

SEQ ID NO: 23806 - protein, 70 aa, Glycine max
MVSSPHLVPCINSSSYGKDMARVSISSDGQNFRVPGSYIKGIACGGRHSAVITDAGAVLTFGWGLYGQVK

SEQ ID NO: 23807 - DNA, 1589 bp, Glycine max
agcaagaattggcacattccttcttcttttccaagtgatactgttatatctgcttactattctccccatgttgataaatccactgagccattcacatggggaaagccagatcatcttgttcttcgaaaattgtgctgggagaaatttgggtggactggccagaaagcagatgaattgatcctaccagtcttaaaggagtataacaagcgtgagactcaattgcggttggaagcattttacaattttaatgaaagatttgcaaaaattcgtagtaaaagaattaagaaagcggtaaaaggaatcactggtaagcagccttcagatttgatagatgattctgcagaagagttccccaagagtaggaagactgggagagaacctgaggatatcacattggagacttcaaggggaatagagggaaatcttgagggtagaaggaaatcaaaaataaaacagtcaaggaagaatgatactgttgctaaggaacagtcaaagaaaaagaaagtcaatgatgatccctcttcagcacctggtacatctgagattgagaatttacagccaagtctgcagatagaagaagagcaacatgatggtaaggcattgattcggaatagaagtggcagaggaagaggtagaattatgggaataaaaagaggaagggataacaaaggtctcagttttcaatcttgcgaaactgaagcctcatctggtagcagtgacattgatgatcatgggccaagagtgcatgtggatagagttccaaaagatgtgcgaaggtcaatgcgatctcggaaacctgtcaactattctttcaaagagcctgaagatgaagattctgatgattcatttgatcggagaaatcagactggtccaatagaagaaaatttatctcatattcttggtgcttgtgaagatggtgcaacagatttcagcatggcgaaagaatgcagtgcaatgaattttcctccagaggagaacttgcctacagactcccttgagtcaggtggttggttttgcacagatgccggtgaaacttgtcatcctggtactggcaatcaggactcttctgatgactaccttaaaatgggaggtggattctgtttagatgatggtgatacaggtgtcaagcaggatacaagtgacaatgtcgatactgctacagtcgattataatgcagactttccacacggttctgattatttggatgaaactaatcgtgataaaagtagttcagatatattattttctggcgctgaaaagcctgaaaatgggatacaaggtggagggccattcaatatagagccaaatgaccttgcaagtgctagtagttatgatcattctgatatagcggtcttgaaacaggagaatactcgcaacaatagtggagcctccactggagtatttagtgccatgccgtttttgaagagaagaaggaaaaactgaaacttttctaactttggatgtcaggcttgtgcacatatttgtcaatcctccaaattgtttatattttagtcatgtattttcttgttccatttgaatcgattttttggagaaacgttgatgactcttattccacatatatgtttatt

SEQ ID NO: 23808 - protein, 480 aa, Glycine max
SKNWHIPSSFPSDTVISAYYSPHVDKSTEPFTWGKPDHLVLRKLCWEKFGWTGQKADELILPVLKEYNKRETQLRLEAFYNFNERFAKIRSKRIKKAVKGITGKQPSDLIDDSAEEFPKSRKTGREPEDITLETSRGIEGNLEGRRKSKIKQSRKNDTVAKEQSKKKKVNDDPSSAPGTSEIENLQPSLQIEEEQHDGKALIRNRSGRGRGRIMGIKRGRDNKGLSFQSCETEASSGSSDIDDHGPRVHVDRVPKDVRRSMRSRKPVNYSFKEPEDEDSDDSFDRRNQTGPIEENLSHILGACEDGATDFSMAKECSAMNFPPEENLPTDSLESGGWFCTDAGETCHPGTGNQDSSDDYLKMGGGFCLDDGDTGVKQDTSDNVDTATVDYNADFPHGSDYLDETNRDKSSSDILFSGAEKPENGIQGGGPFNIEPNDLASASSYDHSDIAVLKQENTRNNSGASTGVFSAMPFLKRRRKN

SEQ ID NO: 23809 - protein, 267 aa, Glycine max
MGIKRGRDNKGLSFQSCETEASSGSSDIDDHGPRVHVDRVPKDVRRSMRSRKPVNYSFKEPEDEDSDDSFDRRNQTGPIEENLSHILGACEDGATDFSMAKECSAMNFPPEENLPTDSLESGGWFCTDAGETCHPGTGNQDSSDDYLKMGGGFCLDDGDTGVKQDTSDNVDTATVDYNADFPHGSDYLDETNRDKSSSDILFSGAEKPENGIQGGGPFNIEPNDLASASSYDHSDIAVLKQENTRNNSGASTGVFSAMPFLKRRRKN

SEQ ID NO: 23810 - DNA, 1547 bp, Glycine max
gaaatcttttctaatattctatgataccattgaggttcaccttgaaaagcctgttaaacttgtgcatttcagagcaacccaaataatgcacttggacaatcagtctcatttgggaggttcatgccagagtccctggcatgggagaaatggtctactttctctcacaaccgctatgttgaagaggcagagaggtttacacggcccggttcggttgcacagaagaaagctttctttgaagctcactacatgaaacttgctgctcaaaaggcagctgctttgcttgaacaagcaaacagtgcctcacagacacagcaagaacaagaagaggccatagttgataacacgcataatttgaacatgactagtccaaaatctaagctagttctccttgaagaaaatgcacaggtttttaactctgagccagatgccactacctataattcaaattcaaatacagatgctgctttacctcaaagtgacatgttaggaggagctcaaccactgatagatcaccaagcttttgtggttaagttgcaaaatcagcttggaaaagttgataactacaaggagccaagtgaagagggtacaaactttgatcagaatattttgcaatcaacgggcaagaagaaacaagctgtttcttcattcaagttgttaaaagttattggtacccccaagttcaactctacaccagtgaaatcaaaaactcctagtcattctagtaaagatggtattgctaccccaatgagcaataatcctgcactaacctcttctaaaaaagaaggatcaacttctaagttacctcacatgtcacttaatttcacactagttagagaaatcaataaattgaccgtatcattggtgaggaaatttggaagtactggagttggagctagttcttccaaggcttcaaaggatagctcgactcttataaagaccacaactaaggcttctaagaatgagtctcaaaagcattcttcatttactccgttaacagaagcgcaaagaagtaaaaggaaaacccccattatatcctccccatttaggttgagcaccgaagaaagagcttcaattagaaagaagaaacttgagaaagtgtgcaatgctagtgaatcacagaaagtgcagccacatacaaaattcaaggagaaagcagagacaaagattagaaaactaagtcagagaatttgtttcaaagcagggtcatcacctgatttttaccaggatagagaagcatcacaaaaggatcgattaacacctcctgagtcacccaaagagggaagaaaacccactttaagtgtcgtagagagtaaaagttctttacctcgtaatagacctttccagggaaagaattgtggcaccatgactctgcctcgcacttcaaattcctctatgattactactcatgaaaatacatctccaaatattcagcatagaaatccaaatgatagaaattacaaacaattttagggagtacactattaatgtgtaatgcacttctacttttgtagccaaagatcatagttaatatgtaaatatagcttcat

SEQ ID NO: 23811 - protein, 449 aa, Glycine max
MPESLAWEKWSTFSHNRYVEEAERFTRPGSVAQKKAFFEAHYMKLAAQKAAALLEQANSASQTQQEQEEAIVDNTHNLNMTSPKSKLVLLEENAQVFNSEPDATTYNSNSNTDAALPQSDMLGGAQPLIDHQAFVVKLQNQLGKVDNYKEPSEEGTNFDQNILQSTGKKKQAVSSFKLLKVIGTPKFNSTPVKSKTPSHSSKDGIATPMSNNPALTSSKKEGSTSKLPHMSLNFTLVREINKLTVSLVRKFGSTGVGASSSKASKDSSTLIKTTTKASKNESQKHSSFTPLTEAQRSKRKTPIISSPFRLSTEERASIRKKKLEKVCNASESQKVQPHTKFKEKAETKIRKLSQRICFKAGSSPDFYQDREASQKDRLTPPESPKEGRKPTLSVVESKSSLPRNRPFQGKNCGTMTLPRTSNSSMITTHENTSPNIQHRNPNDRNYKQF

SEQ ID NO: 23812 - protein, 407 aa, Glycine max
MKLAAQKAAALLEQANSASQTQQEQEEAIVDNTHNLNMTSPKSKLVLLEENAQVFNSEPDATTYNSNSNTDAALPQSDMLGGAQPLIDHQAFVVKLQNQLGKVDNYKEPSEEGTNFDQNILQSTGKKKQAVSSFKLLKVIGTPKFNSTPVKSKTPSHSSKDGIATPMSNNPALTSSKKEGSTSKLPHMSLNFTLVREINKLTVSLVRKFGSTGVGASSSKASKDSSTLIKTTTKASKNESQKHSSFTPLTEAQRSKRKTPIISSPFRLSTEERASIRKKKLEKVCNASESQKVQPHTKFKEKAETKIRKLSQRICFKAGSSPDFYQDREASQKDRLTPPESPKEGRKPTLSVVESKSSLPRNRPFQGKNCGTMTLPRTSNSSMITTHENTSPNIQHRNPNDRNYKQF

SEQ ID NO: 23813 - protein, 370 aa, Glycine max
MTSPKSKLVLLEENAQVFNSEPDATTYNSNSNTDAALPQSDMLGGAQPLIDHQAFVVKLQNQLGKVDNYKEPSEEGTNFDQNILQSTGKKKQAVSSFKLLKVIGTPKFNSTPVKSKTPSHSSKDGIATPMSNNPALTSSKKEGSTSKLPHMSLNFTLVREINKLTVSLVRKFGSTGVGASSSKASKDSSTLIKTTTKASKNESQKHSSFTPLTEAQRSKRKTPIISSPFRLSTEERASIRKKKLEKVCNASESQKVQPHTKFKEKAETKIRKLSQRICFKAGSSPDFYQDREASQKDRLTPPESPKEGRKPTLSVVESKSSLPRNRPFQGKNCGTMTLPRTSNSSMITTHENTSPNIQHRNPNDRNYKQF

SEQ ID NO: 23814 - DNA, 1604 bp, Glycine max
tttttaaatcaactcaatttggttctttagtttaaattgcaaaacatcacatttggtaaccattcaaaatcgttacgtagtggttttaaaccaccataaaatacatattttcccaaaaaaataaaaattggaggtctaaattgaacaaaaaactagaggaccaaattgaatcgattttataaattaaaggaccttgtgcgtcaaacatggaagaaaaaaaatggttgtttagaagtggattttagcattttcacactaacggtgatttctgtcgaattggatttttgtataattgttttcagtggtgctgttccttacggaaataagtggcacgaattgcacatactgagcatgtgtacagataaaacaaaatttgacaagtcctaaacttgacattacaggaaattgccatcaggcaacagatacaccgaacatgaaaatgggccaaatttcaagggtctgtcaagtatttcaaatttcccccattttctgtgtctgtcaagtatgtaataacagttatttttgttcctattcttcagttcaaagttgatatgtaagctgactggagacaatgtcaataagtcagaggaacatatctggaagcatatgagtgggaaaaggtttctcaataaattaggtcagtgatatcttatatttgctaaattcttttggatttggaatgatagcagagcttcattgatgaagtgggctcagtttttctgtgagtatttgcagattatataataggtgattgcgtatggattttatagagctttatttactgatgcattttggcttctataaacagagcaagaggaagaagaaaagttgttgtgtcatggattggaaggtgaagagagcttacatgagtcaaaaagtgcagatggtggaaaaaaggatagaatgaagaagaagaagaagaaaaagaatagggtcaaggaaattgatgaggagaaattgcaggtgtcaaaaagtgcagatggtgcaaaaaaagatagaatgaagaaggaaaataataaggacaagggaattgaggaggttatatctgaagttaggaagtcttccaatgagaacagtgacactgaagacgaagacttctggatgcctcctgctggtgatcgttgggacaatgatgatggtggcgatagatggggttcagagtcagagcagggaactgaagagggagatgtaattgatggtgatgctgctgaggattgcaaggagtcagacgagttgtcatcaaggacgaaaagaatgtcgatagaaattggaccaagcagctttgctacaagaaaaaagaaaagtaagaagaaccaccaaacttagtatttgttagtacttttagttgagagaattgcaagacaacttttgcaggcattgcgtgatttaaattatgtcagcccaggtcattagcattatgatacaaaggggatatgggtacaaaatacattgttcaaatgaattttttcttgtattaagaagctgctttttcagtaaatttgtatgacaagcagcatgaaactggatcaaattgtaagtcttcaagtatgcagtcaaagccaagtctgtttttggtattatttatataaggtcagtacttcttt

SEQ ID NO: 23815 - protein, 140 aa, Glycine max
MKKKKKKKNRVKEIDEEKLQVSKSADGAKKDRMKKENNKDKGIEEVISEVRKSSNENSDTEDEDFWMPPAGDRWDNDDGGDRWGSESEQGTEEGDVIDGDAAEDCKESDELSSRTKRMSIEIGPSSFATRKKKSKKNHQT

SEQ ID NO: 23816 - protein, 108 aa, Glycine max
MKKENNKDKGIEEVISEVRKSSNENSDTEDEDFWMPPAGDRWDNDDGGDRWGSESEQGTEEGDVIDGDAAEDCKESDELSSRTKRMSIEIGPSSFATRKKKSKKNHQT

SEQ ID NO: 23817 - protein, 74 aa, Glycine max
MPPAGDRWDNDDGGDRWGSESEQGTEEGDVIDGDAAEDCKESDELSSRTKRMSIEIGPSSFATRKKKSKKNHQT

SEQ ID NO: 23818 - DNA, 1533 bp, Glycine max
gttctctattagaatgaggctaggcctatttgatggaaatccaacaaggctctcattcggcttgattggctccaatcatgtatgttccaaagagcaccaatatctggctcttgaagctgcaagaaatggcatagtcctcttaaaaaactctcccacacttctcccacttccaaaaacaagccccagcatttccttagcagtgataggtcccaatgccaattcttctccgctaactcttcttgggaactatgctggccctccttgtaaatacgttacaatactgcaaggctttcggcactatgttaagaacgcgttttatcatcccggctgtgatggtggacccaagtgttcttccgctcaaatagaccaggcagtggaagttgcaaagaaagtggattatgtggtgctggttatgggattggatcaaagtgaagagagggaagaacgcgatcgcgttcatcttgacttgccgggcaagcaacttgaactcattaacggcgttgctgaagcttctaagaaaccagttattttggtcctccttagtggagggcctttagatatcacttcagccaagtataaccacaaaattggaggaattctctgggctggttatccaggggaacttggaggcattgcacttgctcagattatctttggtgaccacaatccaggagggagactaccaactacttggtacccaaaagattacatcaaagtaccaatgacagacatgaggatgcgagctgatccttcaaccggctatcccgggagaacttaccggttttacaagggtccaaaggtgtatgagtttggctatggactaagctactcaaagtattcctatgagtttgtttctgtcacacatgacaagcttcacttcaaccaatcatccactcatttgatggttgaaaattccgaaaccataagttacaaactagtttcggagttggatgaacaaacctgccaaagcatgtcactctcagtcacagtgagagttcaaaatcatggaagcatggtggggaagcatcctgtattgctgtttattaggcctaaaagacagaaaagtggaagtcctgtgaaacagttggtgggtttcgagagtgttatgcttgatgcaggggaaatggctcatgttgaatttgaggtaagcccttgtgagcatcttagtagagcaaatgaggctggtgcaatgataatagaagaagggtctcatatgttgcttgtggatgatctagagcatccaatagatatatatgtttgatgctacagatttattcttcaacgatgtcaagataattttagcgaacatgtctctgaaacacgctgcattttgggattatgagaccaagaaatgtactataatttgatttgaatcttggctccatggtatttgcatctgaaattcagatgaacgaagaactatttgagtgttgcatgtaaaagttggtcctcgtcgattattgatcgggataaacctggtcactaaatagaattgttgtatgcatcatcttatagtgtgttttttttttcttt

SEQ ID NO: 23819 - protein, 419 aa, Glycine max
FSIRMRLGLFDGNPTRLSFGLIGSNHVCSKEHQYLALEAARNGIVLLKNSPTLLPLPKTSPSISLAVIGPNANSSPLTLLGNYAGPPCKYVTILQGFRHYVKNAFYHPGCDGGPKCSSAQIDQAVEVAKKVDYVVLVMGLDQSEEREERDRVHLDLPGKQLELINGVAEASKKPVILVLLSGGPLDITSAKYNHKIGGILWAGYPGELGGIALAQIIFGDHNPGGRLPTTWYPKDYIKVPMTDMRMRADPSTGYPGRTYRFYKGPKVYEFGYGLSYSKYSYEFVSVTHDKLHFNQSSTHLMVENSETISYKLVSELDEQTCQSMSLSVTVRVQNHGSMVGKHPVLLFIRPKRQKSGSPVKQLVGFESVMLDAGEMAHVEFEVSPCEHLSRANEAGAMIIEEGSHMLLVDDLEHPIDIYV

SEQ ID NO: 23820 - protein, 415 aa, Glycine max
MRLGLFDGNPTRLSFGLIGSNHVCSKEHQYLALEAARNGIVLLKNSPTLLPLPKTSPSISLAVIGPNANSSPLTLLGNYAGPPCKYVTILQGFRHYVKNAFYHPGCDGGPKCSSAQIDQAVEVAKKVDYVVLVMGLDQSEEREERDRVHLDLPGKQLELINGVAEASKKPVILVLLSGGPLDITSAKYNHKIGGILWAGYPGELGGIALAQIIFGDHNPGGRLPTTWYPKDYIKVPMTDMRMRADPSTGYPGRTYRFYKGPKVYEFGYGLSYSKYSYEFVSVTHDKLHFNQSSTHLMVENSETISYKLVSELDEQTCQSMSLSVTVRVQNHGSMVGKHPVLLFIRPKRQKSGSPVKQLVGFESVMLDAGEMAHVEFEVSPCEHLSRANEAGAMIIEEGSHMLLVDDLEHPIDIYV

SEQ ID NO: 23821 - protein, 282 aa, Glycine max
MGLDQSEEREERDRVHLDLPGKQLELINGVAEASKKPVILVLLSGGPLDITSAKYNHKIGGILWAGYPGELGGIALAQIIFGDHNPGGRLPTTWYPKDYIKVPMTDMRMRADPSTGYPGRTYRFYKGPKVYEFGYGLSYSKYSYEFVSVTHDKLHFNQSSTHLMVENSETISYKLVSELDEQTCQSMSLSVTVRVQNHGSMVGKHPVLLFIRPKRQKSGSPVKQLVGFESVMLDAGEMAHVEFEVSPCEHLSRANEAGAMIIEEGSHMLLVDDLEHPIDIYV

SEQ ID NO: 23822 - DNA, 1185 bp, Glycine max
atatacatgattcgttttaaattgaagtctagttacatggaggagaaagacaactttgctatatactatgtggtgataccatgtgctgtgttagccttgtttattcatccatcaacttcacatcatttattgaacaggatttcctgggcattctgtgtatatctcgaagctgtgtcagtactgccccaactgcgagtcatgcagaacacccaaattgttgagccattcacagctcattatgtatttgccctgggtgtggcaagattcttgagctgtgctcattgggttcttcaggtatgatctgttcgtccaaacttgtgattgcattcatcagctctatgaaccattttcaaattcgcttgtcacttgtttgctggcttgtgctgctgtctgttatcactaagatggacattttctggattggctatctagtcaatcaaggagtggaatgtgaatatatttataatttgtaattttaagtttggcttatttccattggcataataatcagctttcttctataagtattacagggacatgtgtttggccagtgggttattagtttgctgttcttagcacatttttttagtagtgcaacttattggatttactaattgctggtctcctacagtcctactaacttaccatttcttttaacaggtgttagatagtcgtggacatttgttggttgccttggggtatggattatggccgtcaatggtgcttatttctgaaattgtccagacttttatcttagcagatttctgttactattatgtcaaaaggttagttgagtgcattatagcaactctttcctgttttgaaccttctttcgtgggctgataatgtctcaagaacttttcagcatgattctgttccttatgatatttattttattgcagtgttttcggcggacagcttgttctccgcctaccttctggagtggtgtaatagaagattcacttcactacatacttgcatttaaattaacttaatcaagcaatatggtcggttatcattgttggagtccatattgcattgaaaaagtatggttccttggaagaatctggttctttgtaaagttagagatgaagggaaaacaagatatttatgttgaaggtacagtatttgtagctggaaatgctttacacataacatgtctatttgcttaggctcttgaaattc

SEQ ID NO: 23823 - protein, 99 aa, Glycine max
IYMIRFKLKSSYMEEKDNFAIYYVVIPCAVLALFIHPSTSHHLLNRISWAFCVYLEAVSVLPQLRVMQNTQIVEPFTAHYVFALGVARFLSCAHWVLQV

SEQ ID NO: 23824 - protein, 97 aa, Glycine max
MIRFKLKSSYMEEKDNFAIYYVVIPCAVLALFIHPSTSHHLLNRISWAFCVYLEAVSVLPQLRVMQNTQIVEPFTAHYVFALGVARFLSCAHWVLQV

SEQ ID NO: 23825 - protein, 87 aa, Glycine max
MEEKDNFAIYYVVIPCAVLALFIHPSTSHHLLNRISWAFCVYLEAVSVLPQLRVMQNTQIVEPFTAHYVFALGVARFLSCAHWVLQV

SEQ ID NO: 23826 - DNA, 1477 bp, Glycine max
aatccaatgtagaggacattcactcgtattaatattgttccaaactcccaagtcccaaccttctctccctgtctttgcttctgcaattactcccactctggaaatgggttcgctacccgatttagacactctcccccctctgagctcgaggatttcaacggtggttccagcaacccctcgagaagatgaaaacggtgcgtttcaactcaactacatggacctcctcgtgaagctccattacatacgacccgttttcttcttcacttccgaagccgttcaaggcctctcaatctccgacttgaagaaacccatgttcccgcttctcgacccgtattaccacgtttcgggtcgggtcagaagatccgaatccggacgcccctttattaagtgcaacgacgccggtgttcgcatcgctgagtcgcactgcgacagaaccctcgaagaatggttccgtgaaaacggaaacggcgccgttgaagggcttgtccatgatcacgtgcttggacctgatcttgccttttctcctctcgttttcgtcaagttcacttggttcaaatgtggaggattatccgtgggattaagctgggctcacgttcttggagatgccttttctgcatttaatttcctgtccaagtggagtcaaatactagcagtttccattaaaaagacaaatattcttggagagtattggctcgctactaattaccacgatgtggctactcactcttttcacatcacttccaaacaacttcaccatttggtaacagccacatttaatcaaaccaatgacaataccaataaggccaagaccaccacctattttgaaattatttcagcattactttggaagtgtatagcaaacataaggggccaaaaaattggaccaaatgttgtgactatatgtactagtgaatctaatcgtgcagaaaacgaattccccaccaatggcttcttagtgttaagcaaaattgaagcagatttttcgactgggaaatatgaaatttcagaattggtgaagctgattgctgagaacaagatggttgagaaccatgtaatggaaaaattggtggaggcagatgaagggaaagaggattttatagtttatggggtaaacttgacgtttgtgaatttggaagaagctaatatttatgatgggatgaatctgaatggacagaaaccaattatggcaaattgtacatttcgtggggtgagtgataaaggggttgttttggttcttccagcaccagaagatgacgaagatggtggtaatggaaggattgttactgtttctttgcctcgtgaagaactatatcagctgaaagataagctaggaggagaatggggcatacactaattgttcgtgtccgtgttttttatttttggaagcaaaactggtttaagtcgtgtggattgtttttcatctatttgttattgcatttagtatgtttgccggtaataaaatactaatgatttggtc

SEQ ID NO: 23827 - protein, 450 aa, Glycine max
IQCRGHSLVLILFQTPKSQPSLPVFASAITPTLEMGSLPDLDTLPPLSSRISTVVPATPREDENGAFQLNYMDLLVKLHYIRPVFFFTSEAVQGLSISDLKKPMFPLLDPYYHVSGRVRRSESGRPFIKCNDAGVRIAESHCDRTLEEWFRENGNGAVEGLVHDHVLGPDLAFSPLVFVKFTWFKCGGLSVGLSWAHVLGDAFSAFNFLSKWSQILAVSIKKTNILGEYWLATNYHDVATHSFHITSKQLHHLVTATFNQTNDNTNKAKTTTYFEIISALLWKCIANIRGQKIGPNVVTICTSESNRAENEFPTNGFLVLSKIEADFSTGKYEISELVKLIAENKMVENHVMEKLVEADEGKEDFIVYGVNLTFVNLEEANIYDGMNLNGQKPIMANCTFRGVSDKGVVLVLPAPEDDEDGGNGRIVTVSLPREELYQLKDKLGGEWGIH

SEQ ID NO: 23828 - protein, 416 aa, Glycine max
MGSLPDLDTLPPLSSRISTVVPATPREDENGAFQLNYMDLLVKLHYIRPVFFFTSEAVQGLSISDLKKPMFPLLDPYYHVSGRVRRSESGRPFIKCNDAGVRIAESHCDRTLEEWFRENGNGAVEGLVHDHVLGPDLAFSPLVFVKFTWFKCGGLSVGLSWAHVLGDAFSAFNFLSKWSQILAVSIKKTNILGEYWLATNYHDVATHSFHITSKQLHHLVTATFNQTNDNTNKAKTTTYFEIISALLWKCIANIRGQKIGPNVVTICTSESNRAENEFPTNGFLVLSKIEADFSTGKYEISELVKLIAENKMVENHVMEKLVEADEGKEDFIVYGVNLTFVNLEEANIYDGMNLNGQKPIMANCTFRGVSDKGVVLVLPAPEDDEDGGNGRIVTVSLPREELYQLKDKLGGEWGIH

SEQ ID NO: 23829 - protein, 379 aa, Glycine max
MDLLVKLHYIRPVFFFTSEAVQGLSISDLKKPMFPLLDPYYHVSGRVRRSESGRPFIKCNDAGVRIAESHCDRTLEEWFRENGNGAVEGLVHDHVLGPDLAFSPLVFVKFTWFKCGGLSVGLSWAHVLGDAFSAFNFLSKWSQILAVSIKKTNILGEYWLATNYHDVATHSFHITSKQLHHLVTATFNQTNDNTNKAKTTTYFEIISALLWKCIANIRGQKIGPNVVTICTSESNRAENEFPTNGFLVLSKIEADFSTGKYEISELVKLIAENKMVENHVMEKLVEADEGKEDFIVYGVNLTFVNLEEANIYDGMNLNGQKPIMANCTFRGVSDKGVVLVLPAPEDDEDGGNGRIVTVSLPREELYQLKDKLGGEWGIH

SEQ ID NO: 23830 - DNA, 1441 bp, Glycine max
ttttggccgagtcttctctgggaaggtgtcaactaatatgaaggctagaattatggggccaaattttgttcctggggagaagaaagacctgtatgtgaagagtgttcaggggacttcaatttggatggggaagaaatatgaaacagttgaggatgttccttgtggaaacacagttgccttggctggtttggaccatttcatcaccaagaatgctactataacaaatgagacagaaattgaagcacaccccattagagctatgaagttttctgtgtcaccattggtaagtgtagctgttaactgcaatgctgcatcagatcttcctaagcttgttgagggcctaaaacgtttggcaaagtcagaccccatcatgatgtgcacaatttcagaaactggagaacacatcataggtgctactggtgagctgcatcttgaaacatgcgtaaaagacttgaaggacgattttatgaatgggattgagatttcaatatctgaccctattgtctccttcaaggagacagtgctggagaagtcttgccacactgtgatgagcaaatcacctaacaaacacaaccgtttgtacatggaagcaaggccaatggaggaagggcttgtggaggccattgagagaggcaagattggtccaaagaataacaacaaaatggtgtgtgaagagtttggttgggacaaggatctagccaagagaatatggtgttttggccctgataccattggacccaacatgatggtggatgcatgtaagggagttcagtacctcaatgaaatgaaggaggctgttcttgctggctttcagatagcatcaagagaaggtccacttgcagaagagaacttgagaggggtatgctttgatctttgtgatgttgtacttcatgctgatacaatccataggggaggtggccaaatcattccaactgctagaagggctttctatgctgccatactttcagctaagccaagactacttgagcctgtgtatgtgatggaaatacaagcacatgaaaaggctcttggtggcatcaatagtgttgttaacaagaaaagagggcatgtgtttgaggaaattcagaggcctggcaccccattttacaatgtcaaggcatatataccagtgattgagtcattcaaattcagtgaaacactgaggactcaaattggagagcaggctttcccacagatggtgtttgatcactgggatatggtgcagtctgatccactggaacctggaacaccagcttctgcatgtgttgctgacattcggaagaagaaagggttgaatgaacaagttatgcctttgtgtgtgttcgaggacatgctttgaagtatcaataatgtagaatattatttaggaccaatgtaaagtcgtgtgtgtgcatgtaattttagttttatgtttcaataaagtatcatgtccattagcacc

SEQ ID NO: 23831 - protein, 445 aa, Glycine max
FGRVFSGKVSTNMKARIMGPNFVPGEKKDLYVKSVQGTSIWMGKKYETVEDVPCGNTVALAGLDHFITKNATITNETEIEAHPIRAMKFSVSPLVSVAVNCNAASDLPKLVEGLKRLAKSDPIMMCTISETGEHIIGATGELHLETCVKDLKDDFMNGIEISISDPIVSFKETVLEKSCHTVMSKSPNKHNRLYMEARPMEEGLVEAIERGKIGPKNNNKMVCEEFGWDKDLAKRIWCFGPDTIGPNMMVDACKGVQYLNEMKEAVLAGFQIASREGPLAEENLRGVCFDLCDVVLHADTIHRGGGQIIPTARRAFYAAILSAKPRLLEPVYVMEIQAHEKALGGINSVVNKKRGHVFEEIQRPGTPFYNVKAYIPVIESFKFSETLRTQIGEQAFPQMVFDHWDMVQSDPLEPGTPASACVADIRKKKGLNEQVMPLCVFEDML

SEQ ID NO: 23832 - protein, 433 aa, Glycine max
MKARIMGPNFVPGEKKDLYVKSVQGTSIWMGKKYETVEDVPCGNTVALAGLDHFITKNATITNETEIEAHPIRAMKFSVSPLVSVAVNCNAASDLPKLVEGLKRLAKSDPIMMCTISETGEHIIGATGELHLETCVKDLKDDFMNGIEISISDPIVSFKETVLEKSCHTVMSKSPNKHNRLYMEARPMEEGLVEAIERGKIGPKNNNKMVCEEFGWDKDLAKRIWCFGPDTIGPNMMVDACKGVQYLNEMKEAVLAGFQIASREGPLAEENLRGVCFDLCDVVLHADTIHRGGGQIIPTARRAFYAAILSAKPRLLEPVYVMEIQAHEKALGGINSVVNKKRGHVFEEIQRPGTPFYNVKAYIPVIESFKFSETLRTQIGEQAFPQMVFDHWDMVQSDPLEPGTPASACVADIRKKKGLNEQVMPLCVFEDML

SEQ ID NO: 23833 - protein, 428 aa, Glycine max
MGPNFVPGEKKDLYVKSVQGTSIWMGKKYETVEDVPCGNTVALAGLDHFITKNATITNETEIEAHPIRAMKFSVSPLVSVAVNCNAASDLPKLVEGLKRLAKSDPIMMCTISETGEHIIGATGELHLETCVKDLKDDFMNGIEISISDPIVSFKETVLEKSCHTVMSKSPNKHNRLYMEARPMEEGLVEAIERGKIGPKNNNKMVCEEFGWDKDLAKRIWCFGPDTIGPNMMVDACKGVQYLNEMKEAVLAGFQIASREGPLAEENLRGVCFDLCDVVLHADTIHRGGGQIIPTARRAFYAAILSAKPRLLEPVYVMEIQAHEKALGGINSVVNKKRGHVFEEIQRPGTPFYNVKAYIPVIESFKFSETLRTQIGEQAFPQMVFDHWDMVQSDPLEPGTPASACVADIRKKKGLNEQVMPLCVFEDML

SEQ ID NO: 23834 - DNA, 1650 bp, Glycine max
gaaacatctttggctcctcctccttctgttcctatcaagatgggtcatcttcaactgctagaaaaactgggagcctctctattgatgccctagctaaggctaagaaagctttacaaatgcagaaagagttgtcagaaaagctaaagaaaattcctcagttgaataagagttctacccaaaattcacaaggaagctctaacttgggctcaatgaatgaatctgcagtaccctcttctgctgctggagtggcatcaaaaagttccacgtcagcttctttggtccatgctgcaaatatgtcaattttcccctcaactgcttttgctgcttctgctaatactccagtaattggcactagtgctgctggtattccaaatgcaactctgcccaactgggaagctgtcaggcgtgctcaagagcttgctgccaggatgggatttcgtcaagatccacaatttgctcctctgataaacatgtttcctggtcagatggtaacagatgttactctcctgcagaaacccatgaaggcccctgttcttcgtcttgatgctcagggacgggaaatagatgagcatggaaatgttattaatgtgactaagcccatcaaccttagcacattaaaggtcaacattaacaaacaaaagaaagaagcatttgaaatactacaacctgtattagatgtcgatcctgaatctaatcctcattttgatgcaagcatgggtatcaacaaaacaaagctcctgcggcccaagaggatgaatttccaatttgttgaggaaggaaaatggtcaaaagatgctgaaacaataaaattgaagagtaaatttggagaagctcaagcaaaagagcacaaggccaaactggcacagttggcaaaggcaaaggctgctcctgatataaatcctaacttaatagaaataacagagagagttgtaattaaagaaaagcccaaggaccaaattccagacattgagtggtgggatgtgccacttctgcattgtcgaaattatggtgacattgataatggaaccattggcgaagataaactgaaaatagaaaaaatcactttttatgtggagcatcctcgtccagttgagccacctgctgagcctgctcccccaccacctcaaccactcaagctaactaagcaagagcagaagaaactccggacacaaagacgtatagctaaggagaaagagcgacaggagatgataagacagggtgtcatagaaccaccaaaaccaaaggtcaagattagcaatttaatgaaagtacttggctctgaagcaactcaagatcctactcggctcgaaaaggaaatacgtactgcagctgcggagcgtgagcaggctcacatagataggaacattgcacgcaagcttactcctgctgagctgcgggagaagaaggagaagaagttgttcgatgacccaaatacactggagacacttgtctctctttacaggataaatgacctctcacatccaaaggccagattcagagttgacgttaatgctcaagagaaccgtttgactggatgtgctgtgatttgtgatggtattagtgttgttgttgttgaaggtggaagcaagtccattaagaggtatgggaaacttatgcttagacgtattaattggagtgaagtttcaaaag

SEQ ID NO: 23835 - protein, 549 aa, Glycine max
NIFGSSSFCSYQDGSSSTARKTGSLSIDALAKAKKALQMQKELSEKLKKIPQLNKSSTQNSQGSSNLGSMNESAVPSSAAGVASKSSTSASLVHAANMSIFPSTAFAASANTPVIGTSAAGIPNATLPNWEAVRRAQELAARMGFRQDPQFAPLINMFPGQMVTDVTLLQKPMKAPVLRLDAQGREIDEHGNVINVTKPINLSTLKVNINKQKKEAFEILQPVLDVDPESNPHFDASMGINKTKLLRPKRMNFQFVEEGKWSKDAETIKLKSKFGEAQAKEHKAKLAQLAKAKAAPDINPNLIEITERVVIKEKPKDQIPDIEWWDVPLLHCRNYGDIDNGTIGEDKLKIEKITFYVEHPRPVEPPAEPAPPPPQPLKLTKQEQKKLRTQRRIAKEKERQEMIRQGVIEPPKPKVKISNLMKVLGSEATQDPTRLEKEIRTAAAEREQAHIDRNIARKLTPAELREKKEKKLFDDPNTLETLVSLYRINDLSHPKARFRVDVNAQENRLTGCAVICDGISVVVVEGGSKSIKRYGKLMLRRINWSEVSK

SEQ ID NO: 23836 - protein, 511 aa, Glycine max
MQKELSEKLKKIPQLNKSSTQNSQGSSNLGSMNESAVPSSAAGVASKSSTSASLVHAANMSIFPSTAFAASANTPVIGTSAAGIPNATLPNWEAVRRAQELAARMGFRQDPQFAPLINMFPGQMVTDVTLLQKPMKAPVLRLDAQGREIDEHGNVINVTKPINLSTLKVNINKQKKEAFEILQPVLDVDPESNPHFDASMGINKTKLLRPKRMNFQFVEEGKWSKDAETIKLKSKFGEAQAKEHKAKLAQLAKAKAAPDINPNLIEITERVVIKEKPKDQIPDIEWWDVPLLHCRNYGDIDNGTIGEDKLKIEKITFYVEHPRPVEPPAEPAPPPPQPLKLTKQEQKKLRTQRRIAKEKERQEMIRQGVIEPPKPKVKISNLMKVLGSEATQDPTRLEKEIRTAAAEREQAHIDRNIARKLTPAELREKKEKKLFDDPNTLETLVSLYRINDLSHPKARFRVDVNAQENRLTGCAVICDGISVVVVEGGSKSIKRYGKLMLRRINWSEVSK

SEQ ID NO: 23837 - protein, 480 aa, Glycine max
MNESAVPSSAAGVASKSSTSASLVHAANMSIFPSTAFAASANTPVIGTSAAGIPNATLPNWEAVRRAQELAARMGFRQDPQFAPLINMFPGQMVTDVTLLQKPMKAPVLRLDAQGREIDEHGNVINVTKPINLSTLKVNINKQKKEAFEILQPVLDVDPESNPHFDASMGINKTKLLRPKRMNFQFVEEGKWSKDAETIKLKSKFGEAQAKEHKAKLAQLAKAKAAPDINPNLIEITERVVIKEKPKDQIPDIEWWDVPLLHCRNYGDIDNGTIGEDKLKIEKITFYVEHPRPVEPPAEPAPPPPQPLKLTKQEQKKLRTQRRIAKEKERQEMIRQGVIEPPKPKVKISNLMKVLGSEATQDPTRLEKEIRTAAAEREQAHIDRNIARKLTPAELREKKEKKLFDDPNTLETLVSLYRINDLSHPKARFRVDVNAQENRLTGCAVICDGISVVVVEGGSKSIKRYGKLMLRRINWSEVSK

SEQ ID NO: 23838 - DNA, 1875 bp, Glycine max
aggttttccaaaggtaaacataagaggggttctgatgtgaagaagaacattgaggagaaatcagaacgtgcaaagaggttgaaagcagaaaacttgacccgtgaaccattttctccaggtatagatgtgcagacactggacaattctcggaacttgtctcctttcgaattgactgaagacactggtaagggatctaatgtacaagtgttgaacagagcagagagacaggggaattcaagtgttgggttacagaaaggatccaatcgagcatttcctggaaaatctagttcagattttccacaaataggtcaaaggtcatcagttcaaaccccttcagaaaaccctccctacccattggaaaaatcagataagcaagttgagagtgtaaggcatggtaaaaaacactcaggaaaggactttcatacacgtgaagcctcttctgtgcagaaagataaatctagtagagattccttgaatgaagatattcatgccattgagaaaaaagtccccaggaattccagggatggtagtaatggaagtaaacagtcactatccatggattcttattaccaaaaacaaggtgaaatggttggtaaattaaaggaaggccgacaaagtacacagtcacacttgggaacatcacctaaggacaacaatcgaattggttttgatgaatcccctgtaactaatgggcgaggtatctcccttcaaagagagctttcggacttggagttgggtgaattccgtgagtccactccagatgaaactcatgttgcaaagcaatttgaacaaaaaggttcatttaaactgttggaaaacaaagcaaacacttctgaggataggaattcagatattactaaagtaaagccttcattgaaagcaacttcagattcaggaaagccatcttcagcctttgtaaattctggttttcccagtaatttggacaacactaataaaaagaattcggataaccattttgaagattcaacaaaatctcgttctagagttatgcaggctcatttgcaacatttgagagcagatcatgcagaagttggatctcaaaacaaattggcagaaatgagcagtaaatatagaaatagtgaatctggggttagccaagattttgacttggaaggtcgcagtgaaagcaatagaagagtgcctgcaaatgcatctaaaccacaagacagtaaacgcggaaacgtttcctaccctgtgaaagaaattaaaagacaaacacctaattcagtggaagagatggctgatggaggaaaggattctgttgcagatagaaatcatagcgattaaaagaagagagaatcatcttcagatgaaaatagttgctcttattcaaagtatgaaaaggatgaacctgagttgaagggaccgataaggactttctcccaatataaagaatatgtgcaggagtttcaagataaatatgatagttactgctccttgaacaagattttggagggatacagggatgagtttcagaaactaggcaacgatttagaacacgctaaaggcagggatatggatagatattatgacattgtggagcagctgaaggaatcctatcgacgctgtggaccgaggcacaagagattgaagaaaatatttgttgttcttcatacggaattggagaatctcaagggaaggatcaaagacttttcaaactcgtataataaatgatgaaaatacaagagtactatatagataaaattgaagcctgtttatcaaggttaagaacttttgggtgatacatgatgcgcagttgagtagatgaaattcttttgtaggttgggtgtgcactagttttttatactgtgtcttggtagagccatatatttgtgtataaatgaaattttgtcc

SEQ ID NO: 23839 - protein, 435 aa, Glycine max
RFSKGKHKRGSDVKKNIEEKSERAKRLKAENLTREPFSPGIDVQTLDNSRNLSPFELTEDTGKGSNVQVLNRAERQGNSSVGLQKGSNRAFPGKSSSDFPQIGQRSSVQTPSENPPYPLEKSDKQVESVRHGKKHSGKDFHTREASSVQKDKSSRDSLNEDIHAIEKKVPRNSRDGSNGSKQSLSMDSYYQKQGEMVGKLKEGRQSTQSHLGTSPKDNNRIGFDESPVTNGRGISLQRELSDLELGEFRESTPDETHVAKQFEQKGSFKLLENKANTSEDRNSDITKVKPSLKATSDSGKPSSAFVNSGFPSNLDNTNKKNSDNHFEDSTKSRSRVMQAHLQHLRADHAEVGSQNKLAEMSSKYRNSESGVSQDFDLEGRSESNRRVPANASKPQDSKRGNVSYPVKEIKRQTPNSVEEMADGGKDSVADRNHSD

SEQ ID NO: 23840 - protein, 250 aa, Glycine max
MDSYYQKQGEMVGKLKEGRQSTQSHLGTSPKDNNRIGFDESPVTNGRGISLQRELSDLELGEFRESTPDETHVAKQFEQKGSFKLLENKANTSEDRNSDITKVKPSLKATSDSGKPSSAFVNSGFPSNLDNTNKKNSDNHFEDSTKSRSRVMQAHLQHLRADHAEVGSQNKLAEMSSKYRNSESGVSQDFDLEGRSESNRRVPANASKPQDSKRGNVSYPVKEIKRQTPNSVEEMADGGKDSVADRNHSD

SEQ ID NO: 23841 - protein, 240 aa, Glycine max
MVGKLKEGRQSTQSHLGTSPKDNNRIGFDESPVTNGRGISLQRELSDLELGEFRESTPDETHVAKQFEQKGSFKLLENKANTSEDRNSDITKVKPSLKATSDSGKPSSAFVNSGFPSNLDNTNKKNSDNHFEDSTKSRSRVMQAHLQHLRADHAEVGSQNKLAEMSSKYRNSESGVSQDFDLEGRSESNRRVPANASKPQDSKRGNVSYPVKEIKRQTPNSVEEMADGGKDSVADRNHSD

SEQ ID NO: 23842 - DNA, 1102 bp, Glycine max
tttattctatggagcagtaacagtactggcgccataccgatttccttgtattttgagctgttctttctctggttttgcatttctgtacctcttaccctcattggaggatttatggggacaaaagctcagcctattgaatatcctgtgcgcactaaccagattccaagggaaattcctgcacgtaaatacccatcgtggcttcttgttcttggtgctggaactcttccatttggaaccctcttcattgagcttttcttcatcctttccagtatttggcttgggaggttctattatgtgtttggtttcctgttggttgttcttctattgctaattattgtttgtgctgaagtgtctgtggtcctcacttatatgcatctctgtgtggaagactggcggtggtggtggaaggcattctttgcatcaggttctgtggctctttacgtcttcttgtactccattaattacttggtgttcgacctgcagagtttgagtgaacctgtctcagctaccctttaccttggttattcactactcatggccattgcaatcatgttgtcaaccggcaccattggcttccttatgtcattctactttgtgcactacttgttctcatcagtaaagatagattgaggttcttgttgtcattgcatattaactatgaaaaaggttgattgatataacttgatcacattgcatagtagggcaacggatgtttaattcattgtctgattttatattgcgatgggatctgcagtttgttctccttctgcctgtttcccaaagtagtgtactcattcaagtattcaactagtgtttgagatcatgtttcaagtattttgttcaagtttctttagaaggttgtaattcaaactctcatctcatttcaatactttagaaaaatgatgttagatagatacatgctttcagaactcgttgtgatattcactgtgcttctgggtatttaatatttttagcttcttttgggttcaaggatgggaaagtgacttagtataggatagggaaagtgacttggtattgtactattaaaatattttattcaaacataattaattgtctgcaatttttgcttttgtaaaaaaag

SEQ ID NO: 23843 - protein, 209 aa, Glycine max
FILWSSNSTGAIPISLYFELFFLWFCISVPLTLIGGFMGTKAQPIEYPVRTNQIPREIPARKYPSWLLVLGAGTLPFGTLFIELFFILSSIWLGRFYYVFGFLLVVLLLLIIVCAEVSVVLTYMHLCVEDWRWWWKAFFASGSVALYVFLYSINYLVFDLQSLSEPVSATLYLGYSLLMAIAIMLSTGTIGFLMSFYFVHYLFSSVKID

SEQ ID NO: 23844 - protein, 172 aa, Glycine max
MGTKAQPIEYPVRTNQIPREIPARKYPSWLLVLGAGTLPFGTLFIELFFILSSIWLGRFYYVFGFLLVVLLLLIIVCAEVSVVLTYMHLCVEDWRWWWKAFFASGSVALYVFLYSINYLVFDLQSLSEPVSATLYLGYSLLMAIAIMLSTGTIGFLMSFYFVHYLFSSVKID

SEQ ID NO: 23845 - protein, 109 aa, Glycine max
LFYGAVTVLAPYRFPCILSCSFSGFAFLYLLPSLEDLWGQKLSLLNILCALTRFQGKFLHVNTHRGFLFLVLELFHLEPSSLSFSSSFPVFGLGGSIMCLVSCWLFFYC

SEQ ID NO: 23846 - DNA, 1415 bp, Glycine max
attgagttgtggtcaacagagagaaagtaggagagaaaaaaaaaaagcctcaccgacttcggcgaaatggatctgccgccggcaccgatccggtggcgcgcaaccgcaatcccattctttgtggcggttctctttgtatccaccatctccccttcgcgcgcaatctactgcgacgaagatgattgctacgatctacttggggtttctcaaagtgccaatgcttccgaaattaaaaaagcttactacaagctctccttgaagtatcacccagataaaaaccctgatccggaatcgcgaaagctgtttgtaaaagtcgccaatgcttatgagattttgaaggatgaggccacgcgagaacaatatgattatgcaattgcacatccggaggaggtgttttataatactgcacgctactatcgggcttactatggtcacaagacggatccccgtgctgtgttggttggccttcttcttattctttcaggttttcaatatctaaatcaatcaacaaggtataatcaggctgtagctatggtcaagaagacacctgcatataaaaataaactaagggcattggaacttgaacgcagtggaggggttacaaacaagaagaagagtcagaagaatatggacaagaaaacagaggaagaccttagtaaagaactcgatctgcagataaccggagctgaaatggcctctgtatggaaacttcttggcgtccgctttgttctattaccatataccttaggcaagctgctgttgtggactgcctgttggttttggagatacaaagtgaaaaagtacccttattcttgggaagatgcttcttatctgacacaaagatccctcagtattcctctcgataggtggagaaatatagatgaagcaacaaaggaagatcttgtgctcagacgcttgtgggagaaatcgaatctggagagctatgtagcagagatgcggaaagaatcgaagcgcagaagatagttgcattagtcgcctctgctgcttttaaagtactaaattttgttgcaaattgattttcggggtggccgtgatagaagcagaatcattcgtgtcaaccacaaaatcgtagaatcatatacaaagtttatttagtttacacatgctattgttgctctctaacagcctgtaaacaatgaacaccaaagaatactgctttagatattgcttttattctttcaatgaatcgggtacctgagcctcaatcttgctacaatcgcatgtttggtagtaattttgagtgcctctctagttcaataattttaaggataaagatgtatggataccctaatgttatttgacaccttgagagagatagaagagaaatataggtatgataagtgatgacttgaatgcagatgtacttgaaatatatatccttcgacttttcgtgt

SEQ ID NO: 23847 - protein, 305 aa, Glycine max
MDLPPAPIRWRATAIPFFVAVLFVSTISPSRAIYCDEDDCYDLLGVSQSANASEIKKAYYKLSLKYHPDKNPDPESRKLFVKVANAYEILKDEATREQYDYAIAHPEEVFYNTARYYRAYYGHKTDPRAVLVGLLLILSGFQYLNQSTRYNQAVAMVKKTPAYKNKLRALELERSGGVTNKKKSQKNMDKKTEEDLSKELDLQITGAEMASVWKLLGVRFVLLPYTLGKLLLWTACWFWRYKVKKYPYSWEDASYLTQRSLSIPLDRWRNIDEATKEDLVLRRLWEKSNLESYVAEMRKESKRRR

SEQ ID NO: 23848 - DNA, 1024 bp, Glycine max
tcggatgtaatgaaaggagtgatatattgtctttggaatttgactgtgttgtcttcttctttgtgactcactctctcttcagctcttgaatttgatccacctgtgttgcttttcccaccaaaccaaacaaaataacctgatattaacgtaatagtagttcttttatcgaacattgtgccatgacattcgacgaggtttccatggaacacggcaagagcttcatcttcgccttgcaggaacttaagaacctgaggcctcaactctattctgctgcagactactgtgagaaatcttatctcaatagtgataaaaaaccaatggtacttgacaacatgaaagattatgtagtaagggcccttgttaatgctgttgatcatctaggaactgtggcttacaagttaagcgacattcttgagaagcaaacatttgatgtctcgaccatggatttgaaggtctctactttgaatcagagacttcttacatggcatatgtacactgataaagaaggtcttcggcaacagcagttgttggctttcattcccagacatcataagcactacattttgccaaatcccgtcaataaaaaggtacatttcatcccacacagaaaaattggtgcaagacaaaattcatttcaaaccagaactcgtcttcattcttcaggtacccctatttcaaaaactctttcatggcatttagcatcagaaactaagtctaccttaaaaaaacagacttcacgcacttcaaaaaacaccaaggactcaaaattttataagaagatctctggagttttccaccttttagatagtgaagggagtacgcggatgaaaacctcagcagcacaacctcacttgacaaatggagttcctacttctggtgctgccacccaaactatgggtgccacaggcagggtaatgccactttcatcaggttcaaatgcctggtggtgccatgtttgatagaatagtgaaattgtgattattgttgaccaatatgttgctatttattttcgtgtgtttgcaaa

SEQ ID NO: 23849 - protein, 259 aa, Glycine max
MTFDEVSMEHGKSFIFALQELKNLRPQLYSAADYCEKSYLNSDKKPMVLDNMKDYVVRALVNAVDHLGTVAYKLSDILEKQTFDVSTMDLKVSTLNQRLLTWHMYTDKEGLRQQQLLAFIPRHHKHYILPNPVNKKVHFIPHRKIGARQNSFQTRTRLHSSGTPISKTLSWHLASETKSTLKKQTSRTSKNTKDSKFYKKISGVFHLLDSEGSTRMKTSAAQPHLTNGVPTSGAATQTMGATGRVMPLSSGSNAWWCHV

SEQ ID NO: 23850 - protein, 252 aa, Glycine max
MEHGKSFIFALQELKNLRPQLYSAADYCEKSYLNSDKKPMVLDNMKDYVVRALVNAVDHLGTVAYKLSDILEKQTFDVSTMDLKVSTLNQRLLTWHMYTDKEGLRQQQLLAFIPRHHKHYILPNPVNKKVHFIPHRKIGARQNSFQTRTRLHSSGTPISKTLSWHLASETKSTLKKQTSRTSKNTKDSKFYKKISGVFHLLDSEGSTRMKTSAAQPHLTNGVPTSGAATQTMGATGRVMPLSSGSNAWWCHV

SEQ ID NO: 23851 - protein, 213 aa, Glycine max
MVLDNMKDYVVRALVNAVDHLGTVAYKLSDILEKQTFDVSTMDLKVSTLNQRLLTWHMYTDKEGLRQQQLLAFIPRHHKHYILPNPVNKKVHFIPHRKIGARQNSFQTRTRLHSSGTPISKTLSWHLASETKSTLKKQTSRTSKNTKDSKFYKKISGVFHLLDSEGSTRMKTSAAQPHLTNGVPTSGAATQTMGATGRVMPLSSGSNAWWCHV

SEQ ID NO: 23852 - DNA, 1073 bp, Glycine max
gaactctgtctaaaagacactttcttttctgataacatctctactaaaaagttactaaaaatggaaggaagatctatcaccacctccgccgcggagtcatcggagatccaataccatccaccgaaccccccgaaccagatcttcatcctctccggacaaagcaacatggccggacgcggcggcgtcgtcaaggaccaccaccaaaaccgttgggtatgggacaaaatcgttccgtcggaatgctcgccggactcgtcgatcctccgcctgagagcagatctccgatgggaggaagcgcgtgagccgctccacgccgacatcgacaccggcaaagtgtgcggcgtaggtccggggatggcgttcgcgaacgcggtgaggaaacgatccgactcggattccgacgtgatcgggctggttccgtgcgccgtcggtgggacggcgataaaagagtgggagcgtgggagccgtttgtacgagacgatggttaagagagcggaggagagtaggaggtacggtggagagatcaaggcgatgctttggtaccaaggagagagtgacgtgtcggacatccacgacgccgagagttacgggaggaatatgactcgtttggttaagaaccttcgtcatgatcttaaccttccttctcttcccattattcaggtggcgataacatcgggaggagggtatatagataaggtgagggaagcacagttgggtttgaaactttctaatgtggtctgtgtagatgctaaaggattgcagctaaagccggataatcttcacttgaccactgaggctcaagttcagcttggtctctcattagcacaagcttacctttccaacctctgctagactatcaagttattccttgttgagaaatgtgatcgatggtattttaaactctgcgaatgtttgtctacatttctcagaatgagatatgcagtttgagcgatggtactgttgtagagactatgtaatcttttcacctttagagcacacattattattccacgttgttacgttgcaacaatttgctgctctttgtagaatattttgaataaaatgggtttcat

SEQ ID NO: 23853 - protein, 283 aa, Glycine max
ELCLKDTFFSDNISTKKLLKMEGRSITTSAAESSEIQYHPPNPPNQIFILSGQSNMAGRGGVVKDHHQNRWVWDKIVPSECSPDSSILRLRADLRWEEAREPLHADIDTGKVCGVGPGMAFANAVRKRSDSDSDVIGLVPCAVGGTAIKEWERGSRLYETMVKRAEESRRYGGEIKAMLWYQGESDVSDIHDAESYGRNMTRLVKNLRHDLNLPSLPIIQVAITSGGGYIDKVREAQLGLKLSNVVCVDAKGLQLKPDNLHLTTEAQVQLGLSLAQAYLSNLC

SEQ ID NO: 23854 - protein, 263 aa, Glycine max
MEGRSITTSAAESSEIQYHPPNPPNQIFILSGQSNMAGRGGVVKDHHQNRWVWDKIVPSECSPDSSILRLRADLRWEEAREPLHADIDTGKVCGVGPGMAFANAVRKRSDSDSDVIGLVPCAVGGTAIKEWERGSRLYETMVKRAEESRRYGGEIKAMLWYQGESDVSDIHDAESYGRNMTRLVKNLRHDLNLPSLPIIQVAITSGGGYIDKVREAQLGLKLSNVVCVDAKGLQLKPDNLHLTTEAQVQLGLSLAQAYLSNLC

SEQ ID NO: 23855 - protein, 228 aa, Glycine max
MAGRGGVVKDHHQNRWVWDKIVPSECSPDSSILRLRADLRWEEAREPLHADIDTGKVCGVGPGMAFANAVRKRSDSDSDVIGLVPCAVGGTAIKEWERGSRLYETMVKRAEESRRYGGEIKAMLWYQGESDVSDIHDAESYGRNMTRLVKNLRHDLNLPSLPIIQVAITSGGGYIDKVREAQLGLKLSNVVCVDAKGLQLKPDNLHLTTEAQVQLGLSLAQAYLSNLC

SEQ ID NO: 23856 - DNA, 1387 bp, Glycine max
atctaaacattgacaaccttaataatttattctgtttgtggtctcactagctagaaacaacatcactacacacaaatggcacatactttatccactaatctggctcttaaccttcccacatcgaggtatgttcgtccctcgagaccaacccaggtgaagcccatgaaggtcatgatgggtgatgcaagagaaaagctagaacatgtccatgtgcctaaacacaacaagcaccaccagcccctccccaaaaacaaagttgctcctaccccacccgtaggtaattaattaagctcaatcactctttcacataaattattatatacattaaattctaattgagctattcaacttacaagtaaaattaataaaactcaattatgtttcagctaaaaatttgttttagatcttgttcacctttggatcgaccttgaatcatataatagtcctatgtccacgtataagttgaaattgttctaaacgatatattaatttctggcactctgtggatttgtatatgctatgttattgactaagtgcaaacttaattattcttcttcttaattttctagttagcactaaatatatgactatatactgtgtattaattcagttaacatggggaattgaataaacgcagggttgtgggatcgatttcctacggcaaggacagtgcaagagatgatggagacgatggagagaatgatggaggacccttttgcatttagcacacttgagtggccttcatcaccccttccaagtgagggagtgggagggtatcgaagaaggggaagggcaccatgggaaattaaagagtgtgagagtgaatacaagatgaggtttgatatgcctgggatgaacaaggaggatgtgaaggtgtgggtggaggagaagatgcttgtggtcaaggctgagaaggcacaaaagaagaagcaagagaatgagattgtggaattacaacaagaaaagcagcaagaagaggaggaatggtctgctaagagttatggtaggtatagcagtaggattgctttgcctgataatgtgcagtttgagaatattaaggcagaggttaaggatggtatgctttacataaccatacccaaggctaccagctactccaacatccttgatatccaagttcaatgattcattttgttttgaggtcttttcttagtttttttgttttggattttccacatgtctcttcctttggagacaatcctgttagaggtatgatcagatattaaatataaacatcttttttaacagagatttaaacattaatttatcactttatgaaagactaacctcttctcttagacctaattattggtcttttattagtttgatagacaactttcctctaaataaatagaaaatatgtgtagat

SEQ ID NO: 23857 - protein, 154 aa, Glycine max
MMETMERMMEDPFAFSTLEWPSSPLPSEGVGGYRRRGRAPWEIKECESEYKMRFDMPGMNKEDVKVWVEEKMLVVKAEKAQKKKQENEIVELQQEKQQEEEEWSAKSYGRYSSRIALPDNVQFENIKAEVKDGMLYITIPKATSYSNILDIQVQ

SEQ ID NO: 23858 - protein, 153 aa, Glycine max
METMERMMEDPFAFSTLEWPSSPLPSEGVGGYRRRGRAPWEIKECESEYKMRFDMPGMNKEDVKVWVEEKMLVVKAEKAQKKKQENEIVELQQEKQQEEEEWSAKSYGRYSSRIALPDNVQFENIKAEVKDGMLYITIPKATSYSNILDIQVQ

SEQ ID NO: 23859 - protein, 150 aa, Glycine max
MERMMEDPFAFSTLEWPSSPLPSEGVGGYRRRGRAPWEIKECESEYKMRFDMPGMNKEDVKVWVEEKMLVVKAEKAQKKKQENEIVELQQEKQQEEEEWSAKSYGRYSSRIALPDNVQFENIKAEVKDGMLYITIPKATSYSNILDIQVQ

SEQ ID NO: 23860 - DNA, 1072 bp, Glycine max
accttatgtatgccatgggttctggtttatgtctcacaagcatcagcaatgggaggtttagtccccaccacacactcttctacaccatcaacgccttctttggccctgatgtcggttctttcacggagtggcttggttcactctttggtggctctgctcatgcttttggatctgcccttgaagatctcactcaccatcccctcttctacatccttcttttgggacttcctctctcttttctctattctcggatatcctcctatcttctccacacgcagcttcttgattctctctccagagtgccccttacgaggatgcaatgctttttgttgatatcagctggctcttttacccacttctttcttgatcatctgtttgaggagaatgggaaaacaaccacgtacacatggattttgagcactggctggtggcagagtagagcaccagttaacccagatgctgttgttgtagttgtcttcttatgtgcttgcttaattggtggctttttttacctcaacagagcaaatgcctcaaactccataaagaagaagtcatatcagtcaatgcttcttgtgatgtccatagcttgtttgtactgcttttggtgtgcaattcagatatactggatcagtccacgtcgtccagccgtaggtgaagaggccgatcttggtgttctcgtgttcttagctatatactttttcctaccttatggtttgtgtataatgtccatgtccccaaaagatcatgatcctaatctgattcctctttaatagtgttcaccctattagagatgtgttctgcttttgccactcctatatagttgtgagggtagctagaatatttcgccagtaagtaaattgtataatcactcagcaaaactatgtgaagctatgcatccattccttgttggaactggattcttttgagcttacaggttatatttcactgactcatacgttgttatctgtatcttgttgcaaagtgatccaatatagaagtttgacatttgactcctgtcataatgtacctttcatttgttcaaataaagcttcttgtaggtcttaataacatt

SEQ ID NO: 23861 - protein, 255 aa, Glycine max
LMYAMGSGLCLTSISNGRFSPHHTLFYTINAFFGPDVGSFTEWLGSLFGGSAHAFGSALEDLTHHPLFYILLLGLPLSFLYSRISSYLLHTQLLDSLSRVPLTRMQCFLLISAGSFTHFFLDHLFEENGKTTTYTWILSTGWWQSRAPVNPDAVVVVVFLCACLIGGFFYLNRANASNSIKKKSYQSMLLVMSIACLYCFWCAIQIYWISPRRPAVGEEADLGVLVFLAIYFFLPYGLCIMSMSPKDHDPNLIPL

SEQ ID NO: 23862 - protein, 254 aa, Glycine max
MYAMGSGLCLTSISNGRFSPHHTLFYTINAFFGPDVGSFTEWLGSLFGGSAHAFGSALEDLTHHPLFYILLLGLPLSFLYSRISSYLLHTQLLDSLSRVPLTRMQCFLLISAGSFTHFFLDHLFEENGKTTTYTWILSTGWWQSRAPVNPDAVVVVVFLCACLIGGFFYLNRANASNSIKKKSYQSMLLVMSIACLYCFWCAIQIYWISPRRPAVGEEADLGVLVFLAIYFFLPYGLCIMSMSPKDHDPNLIPL

SEQ ID NO: 23863 - protein, 251 aa, Glycine max
MGSGLCLTSISNGRFSPHHTLFYTINAFFGPDVGSFTEWLGSLFGGSAHAFGSALEDLTHHPLFYILLLGLPLSFLYSRISSYLLHTQLLDSLSRVPLTRMQCFLLISAGSFTHFFLDHLFEENGKTTTYTWILSTGWWQSRAPVNPDAVVVVVFLCACLIGGFFYLNRANASNSIKKKSYQSMLLVMSIACLYCFWCAIQIYWISPRRPAVGEEADLGVLVFLAIYFFLPYGLCIMSMSPKDHDPNLIPL

SEQ ID NO: 23864 - DNA, 1889 bp, Glycine max
ctagtttttctaacgtttatgacttttctttcccttcttgggtagtcaggtcccgcagcatcgaaaacctggtctggttcaacatgcataggtagttgagtgcagtgattcagattgtttttttttttttttttggctctttttgctttatttgcactcttcttatcagaaaccaagacaacaagagtttaacgttacttcatcatctctgtctctttgctatttcttttgttagcagaaaccaagacaacaagagttgagtatagtgttcttgtaccacagacagcgcagggtgtagcacatcattcctcgatcgagctcgctccaatggcagagacaccaaacaaaggccacatcgtgatggtacctctcatggcacaaggtcacctcatcccatttctcgcactagcaagacaaatccaacaaaacacaagcttcaccatcaccatagccaacacaccccaaaacattcaacaccttcgatctgcactttcttcttctacttctcctaatcatcaaatccatcttgctgagttagtacccttcaactctacccaacactccaacaaagacaacaacacacaaaaggctcctctcactgacctattgaaacttggctatgcatcactcacccttgagcctccttttcgctccttgatatcacagatcacagaagaagacggtcaccctccactttgcataatatctgacatgttccttggttgggttaacaatgttgcaaagagcttaggcactaggaacctaaccttcaccacttgtggtgcttatggtatcttggcctatatctctatctggtccaacctccctcataggaaaactgattctgatgagttccatgttccgggattccctcaaaactaccgtttccacaaaacacaactgcataggtttcttcaagcggctgatggcaccgatgactggtcaagattcctcgttccacagattcaactttctatgaagtctgatgggtggatttgcaatacgattgaaaagatagagcctttggggttaaagcttctcaggaactatcttcaacttcccgtttgggccgtggggcctctccttccacctgcttcactcatgggttcaaaacatcgttcaggaaaggaaactggcatagctcttgatgcatgcatggagtggctggattcaaaggatgaaaattctgttctctatatttcatttgggtcactgcacactatcaatgcatctcaaatgatggctttggctgagggtttggaagagagtggcaaatcgtttatttgggttataaggccaccagttggttttgacatcaatggagagttcagtccagaatggttgccaaaagggtttgaagagagaatgagagacaccaaacgtggccttttggtgcacaaatggggaccccagttggagattctgtcacacacatccacaggagcttttctaagccattgtggatggaactctgtgttggagagtctcagctatggggtgcctatgattgggtggccaattgttgcagatcaaccttataatgtgaagatgttggtggaagaaatgggtgtggctgtggaacttactcgttctacggaaactgttgtttctagggagaaggttaagaagaccatagaaatagtcatggattatgaagggaagggaaaggtgatgaaggagaaggcaaatgagattgcagcttacattagagaggccaaaacagagaaaggtaaagaaaaagggtcttctgtgagagcaatggatgatcttgttacaaccattttatcacccaaggttctgtgatttgttgcatttagaatttagaatttgaatgatataataaagttgcttgtgtgagcatacttgtcataaactgctcaccaatcttt

SEQ ID NO: 23865 - protein, 491 aa, Glycine max
MAETPNKGHIVMVPLMAQGHLIPFLALARQIQQNTSFTITIANTPQNIQHLRSALSSSTSPNHQIHLAELVPFNSTQHSNKDNNTQKAPLTDLLKLGYASLTLEPPFRSLISQITEEDGHPPLCIISDMFLGWVNNVAKSLGTRNLTFTTCGAYGILAYISIWSNLPHRKTDSDEFHVPGFPQNYRFHKTQLHRFLQAADGTDDWSRFLVPQIQLSMKSDGWICNTIEKIEPLGLKLLRNYLQLPVWAVGPLLPPASLMGSKHRSGKETGIALDACMEWLDSKDENSVLYISFGSLHTINASQMMALAEGLEESGKSFIWVIRPPVGFDINGEFSPEWLPKGFEERMRDTKRGLLVHKWGPQLEILSHTSTGAFLSHCGWNSVLESLSYGVPMIGWPIVADQPYNVKMLVEEMGVAVELTRSTETVVSREKVKKTIEIVMDYEGKGKVMKEKANEIAAYIREAKTEKGKEKGSSVRAMDDLVTTILSPKVL

SEQ ID NO: 23866 - protein, 480 aa, Glycine max
MVPLMAQGHLIPFLALARQIQQNTSFTITIANTPQNIQHLRSALSSSTSPNHQIHLAELVPFNSTQHSNKDNNTQKAPLTDLLKLGYASLTLEPPFRSLISQITEEDGHPPLCIISDMFLGWVNNVAKSLGTRNLTFTTCGAYGILAYISIWSNLPHRKTDSDEFHVPGFPQNYRFHKTQLHRFLQAADGTDDWSRFLVPQIQLSMKSDGWICNTIEKIEPLGLKLLRNYLQLPVWAVGPLLPPASLMGSKHRSGKETGIALDACMEWLDSKDENSVLYISFGSLHTINASQMMALAEGLEESGKSFIWVIRPPVGFDINGEFSPEWLPKGFEERMRDTKRGLLVHKWGPQLEILSHTSTGAFLSHCGWNSVLESLSYGVPMIGWPIVADQPYNVKMLVEEMGVAVELTRSTETVVSREKVKKTIEIVMDYEGKGKVMKEKANEIAAYIREAKTEKGKEKGSSVRAMDDLVTTILSPKVL

SEQ ID NO: 23867 - protein, 476 aa, Glycine max
MAQGHLIPFLALARQIQQNTSFTITIANTPQNIQHLRSALSSSTSPNHQIHLAELVPFNSTQHSNKDNNTQKAPLTDLLKLGYASLTLEPPFRSLISQITEEDGHPPLCIISDMFLGWVNNVAKSLGTRNLTFTTCGAYGILAYISIWSNLPHRKTDSDEFHVPGFPQNYRFHKTQLHRFLQAADGTDDWSRFLVPQIQLSMKSDGWICNTIEKIEPLGLKLLRNYLQLPVWAVGPLLPPASLMGSKHRSGKETGIALDACMEWLDSKDENSVLYISFGSLHTINASQMMALAEGLEESGKSFIWVIRPPVGFDINGEFSPEWLPKGFEERMRDTKRGLLVHKWGPQLEILSHTSTGAFLSHCGWNSVLESLSYGVPMIGWPIVADQPYNVKMLVEEMGVAVELTRSTETVVSREKVKKTIEIVMDYEGKGKVMKEKANEIAAYIREAKTEKGKEKGSSVRAMDDLVTTILSPKVL

SEQ ID NO: 23868 - DNA, 944 bp, Glycine max
gaccccgggaaaaagaaaagaaaagaaactcacagctattgaatttcacttcacttcacttgcatgccaaatgaaaacaacctcttcccagaatcttgtcggtatttaactccctcgatttcacaacaccaataacaatgagagtttcaacagagacagagccggagactaaaaagataaaacgcattcgcggcggcggggactcgagcaagcaccctttgtaccgcggcgtgcggatgcggaactgggggaagtgggtgtcggaaatccgcgagccgaggaagaaatcgcggatatggctaggcacattccccacgccggaaatggcggcgagagcgcacgacgtcgccgctctcagcatcaaaggccccgccgccattctcaacttccctcacttggccaactcgctcccccgcccggcttcgctggcgccgcgcgacgttcaagctgcggcggcgaaggcggcgcacatggacccttcctccctctcctccttggtctccgcaatggacttgtcctctgcctctgacgagttgagccaaatcatagagcttccttctttggaaagcaccgatgatggctctgttgacttaaagaaggagtttgtttttgttgattcccttgatgcttggatgtatcagccaccctttggttttgacaccgaacaagacactggtttcgagggtttgatgtggaattactaggttcgatccaagtttctattctatgtcttgtgtttgtataaatttatatcgatctcttttatgttttggtttgtgtgtgtctataagcagtaagcagccacttgtggtttttctttcgggggctgccagtgctactgatcactctcgtattcatcatcatgtctctgtgtccttttcttaattcctctgattttaattgtaaatggctagatgaataaagtaagaggagaaattttctgt

SEQ ID NO: 23869 - protein, 188 aa, Glycine max
MRVSTETEPETKKIKRIRGGGDSSKHPLYRGVRMRNWGKWVSEIREPRKKSRIWLGTFPTPEMAARAHDVAALSIKGPAAILNFPHLANSLPRPASLAPRDVQAAAAKAAHMDPSSLSSLVSAMDLSSASDELSQIIELPSLESTDDGSVDLKKEFVFVDSLDAWMYQPPFGFDTEQDTGFEGLMWNY

SEQ ID NO: 23870 - protein, 155 aa, Glycine max
MRNWGKWVSEIREPRKKSRIWLGTFPTPEMAARAHDVAALSIKGPAAILNFPHLANSLPRPASLAPRDVQAAAAKAAHMDPSSLSSLVSAMDLSSASDELSQIIELPSLESTDDGSVDLKKEFVFVDSLDAWMYQPPFGFDTEQDTGFEGLMWNY

SEQ ID NO: 23871 - protein, 126 aa, Glycine max
MAARAHDVAALSIKGPAAILNFPHLANSLPRPASLAPRDVQAAAAKAAHMDPSSLSSLVSAMDLSSASDELSQIIELPSLESTDDGSVDLKKEFVFVDSLDAWMYQPPFGFDTEQDTGFEGLMWNY

SEQ ID NO: 23872 - DNA, 1250 bp, Glycine max
gacttaataattagtcttgtgtgtctaacgggtgtgtcccctttctcccattcttcacatcattagaatgccggcttggtggaatagaaagtggagcaagagcaaggaggaggatgaggaggatgagccacgtgccggttttcacttgaattttatgaaatctccggtttctgttacatcgtctaagagcaagagtaagaccacgacgccgacgccgatgaagaagaagaagaagcccaagagcttcgacgagaaggtggagggtgttcccttgcctcgtccggcgcatagtcacgccgatcctcttggatctgtttcggtgtcggggggttccagcgtcagctcctccacctccttcgacgatcatccaatttcgtctcccaacaccaaccccaaccccaacagaggacatgatgaggttagggtcaatgtaaggtcaaaaagtccgggtcctgggtcaagaggacctaccagtcctacctcaccgcttcatcaaaggttgaataatttgagccttgactctcctacggggagtcagtgtcatccattacctcttccacctggctctccaactagtccttcttctgtgctttccaacgcacgagcaaatggacatttggaaaatgctactagcaatgtgtccaagtggagaaaaggaaagcttctaggacggggaacatttgggcatgtatatctgggattcaatagtgaaaatggacaaatgtgtgcaataaaagaggtcaaggttgtctctgatgatcaaacatcaaaagagtgcctcaaacaacttaaccaggagataaatttgctaaatcagctttcacaccctaatattgttcaataccatgggagtgaactggtagaagaatcactttctgtatatttggaatatgtctctggtggttctatccataaattacttcaggagtatggttcatttaaggagcctgttattcaaaattataccagacagattgtctctggacttgcctatctgcatggaagaaatacagtacacagggatattaaaggggcgaacatactagttgatcctaatggtgaaatcaaactggcagactttggaatggctaaacatataaattcttctgcctcaatgctttcattcaaaggaagtccatactggatggcacctgaggttgtaatgaatacaaatggctatagtcttccagttgatatatggagcttgggatgcacaattattgaaatggcaacatcaaaacctccatgga

SEQ ID NO: 23873 - protein, 394 aa, Glycine max
MPAWWNRKWSKSKEEDEEDEPRAGFHLNFMKSPVSVTSSKSKSKTTTPTPMKKKKKPKSFDEKVEGVPLPRPAHSHADPLGSVSVSGGSSVSSSTSFDDHPISSPNTNPNPNRGHDEVRVNVRSKSPGPGSRGPTSPTSPLHQRLNNLSLDSPTGSQCHPLPLPPGSPTSPSSVLSNARANGHLENATSNVSKWRKGKLLGRGTFGHVYLGFNSENGQMCAIKEVKVVSDDQTSKECLKQLNQEINLLNQLSHPNIVQYHGSELVEESLSVYLEYVSGGSIHKLLQEYGSFKEPVIQNYTRQIVSGLAYLHGRNTVHRDIKGANILVDPNGEIKLADFGMAKHINSSASMLSFKGSPYWMAPEVVMNTNGYSLPVDIWSLGCTIIEMATSKPPW

SEQ ID NO: 23874 - protein, 365 aa, Glycine max
MKSPVSVTSSKSKSKTTTPTPMKKKKKPKSFDEKVEGVPLPRPAHSHADPLGSVSVSGGSSVSSSTSFDDHPISSPNTNPNPNRGHDEVRVNVRSKSPGPGSRGPTSPTSPLHQRLNNLSLDSPTGSQCHPLPLPPGSPTSPSSVLSNARANGHLENATSNVSKWRKGKLLGRGTFGHVYLGFNSENGQMCAIKEVKVVSDDQTSKECLKQLNQEINLLNQLSHPNIVQYHGSELVEESLSVYLEYVSGGSIHKLLQEYGSFKEPVIQNYTRQIVSGLAYLHGRNTVHRDIKGANILVDPNGEIKLADFGMAKHINSSASMLSFKGSPYWMAPEVVMNTNGYSLPVDIWSLGCTIIEMATSKPPW

SEQ ID NO: 23875 - protein, 344 aa, Glycine max
MKKKKKPKSFDEKVEGVPLPRPAHSHADPLGSVSVSGGSSVSSSTSFDDHPISSPNTNPNPNRGHDEVRVNVRSKSPGPGSRGPTSPTSPLHQRLNNLSLDSPTGSQCHPLPLPPGSPTSPSSVLSNARANGHLENATSNVSKWRKGKLLGRGTFGHVYLGFNSENGQMCAIKEVKVVSDDQTSKECLKQLNQEINLLNQLSHPNIVQYHGSELVEESLSVYLEYVSGGSIHKLLQEYGSFKEPVIQNYTRQIVSGLAYLHGRNTVHRDIKGANILVDPNGEIKLADFGMAKHINSSASMLSFKGSPYWMAPEVVMNTNGYSLPVDIWSLGCTIIEMATSKPPW

SEQ ID NO: 23876 - DNA, 1521 bp, Glycine max
agattttggttggaggaaaatacccacccaaccatggctgcaaccattcctttctctctgcttaggaactgcgcgccattgaaactagcaacacctttcgctcgcaaagcctccatctttaatcttcttctccctcttcaaccacgcaggttggtctctagtacctgtgctgtgaacaatgaagaggctacagcaaaaacagcagctgttaattttgatagtgaagctccaacaatgtagcagccctttcacttctagcatcattttttttaatttattttatcatggttttcttcttattcatggaagtatagttattgtgtcatgattattgattaacctcaattactcaaatacaagggagtgcaaatctctttgcatgataccaattttccaaaagattccaccaatatttaacttctctgcttccatctccctctaagaatgatgttaaagatagcattgattttaaatttaaagggttcactgggatgtgaagattttaaacctcagttctgctaggtttcccactcaaatgatgactgtgacagttaatttgaatttcagggactggtaaatataattatggagaattatggcttgaacccttttggactccatgctgtgagcaagatctgtatttcttgatagttgtacacacactgactcatacatgcacgaataatacttgttttgctggggggtggttagtcttttttgatgtctagaacattggtgggggaacagatgtatgttggggtatcatggctctgttccaaattttttcctcatgtaatttgaacctgtcttgggttactggaccatttgtctttcgggttctctaacttgaggtatgtacattgagggtatcacttatacccttagaaatacaatattttcactttgctgataaaaaaaaaacaaactgactcatacatgcatagatgcatgaagacttataatggcttaatcattttattgtgtttcttttctttatttgtgtaattttgtaacttctgttttcatttcagatttgataagatcataaataaggaaatcccttcgagcattgtatatgaggatgaaaaggttcttgcatttcgtgacattaatccacaggctccggttcatgtcctagtcattccaaaattaagagatggattaacacaacttgggaaggctgatagtaggcatggggaaatattgggtcaacttctgtatgctgccaaaattgtagctgagaaagaaggtattgatgatggattccgtgtcgtcatcaacaatggtcccagtgcctgtcaatctgtgtatcatctgcacttgcatgtattaggtggcagacagatgaattggccacctggttgaaggttgactattactttttaaattttaactgcctattttctgatgaatctctcatggatatttcttcatcaagagttgtaattttgagacctacatataaataatcttgcaacaactgatcctttagtttggttatatgattattcattgggagct

SEQ ID NO: 23877 - protein, 79 aa, Glycine max
RFWLEENTHPTMAATIPFSLLRNCAPLKLATPFARKASIFNLLLPLQPRRLVSSTCAVNNEEATAKTAAVNFDSEAPTM

SEQ ID NO: 23878 - protein, 68 aa, Glycine max
MAATIPFSLLRNCAPLKLATPFARKASIFNLLLPLQPRRLVSSTCAVNNEEATAKTAAVNFDSEAPTM

SEQ ID NO: 23879 - protein, 49 aa, Glycine max
MKRLQQKQQLLILIVKLQQCSSPFTSSIIFFNLFYHGFLLIHGSIVIVS

SEQ ID NO: 23880 - DNA, 1589 bp, Glycine max
aactacgatgaaacaagaggaatggatgattacgacagcgttgctatcgttgctgtttgtttcatcttttccgccgttgagttacggagttgttcctcctcgtactctgctcaataagctgtcggagggcaaatatctcaacactcaggagctctggttcgaccaaaccctcgatcacttctctccctatgatcaccgacaattccggcaacgttactatgagtttctagactatttccggattcccgatggaccaattttttttggtaataggtggtgaaggtatattgaatggggtagcaaatgactatcttgctgtactggcaaagaagtttggagcagctatggttactcttgaacatcgctactacggaaagagtactccatttaattctttggagacagaaaatttgaaatatctttcgtccaagcaggcactctctgatttggctgtttttcggcagtattatcaggactccataaatgcaaagcttaatagaacaaaaattgaaaacccctggttcatttttggtggttcatattctggagcactcagtgcatggttccgtcttaagtttccccatttaacatgtggaagtctggctagttctgcagttgttcttgctgtttataactacacagaatttgatcagcagattggtgagtcggcaggtcctgaatgtaaagaagcgctgcaagaaactactcaactcattgaacacaaacttgcaaccagtggaaaggaattgaaggcctcttttgatgctgctgatcttgaaatagatggagactttttttatttcttggctgatgctactgctatagcgtttcaatatggaaatccagataaagtatgcaagcctcttgttgaagcaaagaaggctggagaggacttggtggatgcttatgccaaatatgtcaaagagtactacattggaacttttggtactgatgtgcagacatatgatcagaagtacttgaaaagaactgctatgaacgaggacaattctgctcgattatggtggtttcaagtttgcactgaagttgcatactttcaggtggctccctcaaatgacagtattcgctcctcaaaagtggacataaaataccatttggacctttgcaaaaatgtctttggagagggcatctttcctgatgttgatgcaactaatttatactacggaggcactaaaattgctggttcaaaaataatatttacaaatggctcacaagatccttggcgccatgcatccaagcaaacttcatctcctgatatgccttcctacatcgtcaaatgttacaattgtggccactgttctgattatcgaggatgtcctcaattccctttctccattgaaggtaatgagaaaaactgcacctctcctgatgcagttcacaaagtaaggcaaaagatttcagaacatatggacttgtggttatctgaatgcgtcgacacaggcagaagttttatatgattatttacataagatgtgaatgatgtacttttttttctaagttgttaatgatgtactataactccgcatgacttttggtatttctttccttcataagctaattatgacaccgtg

SEQ ID NO: 23881 - protein, 408 aa, Glycine max
MDQFFLVIGGEGILNGVANDYLAVLAKKFGAAMVTLEHRYYGKSTPFNSLETENLKYLSSKQALSDLAVFRQYYQDSINAKLNRTKIENPWFIFGGSYSGALSAWFRLKFPHLTCGSLASSAVVLAVYNYTEFDQQIGESAGPECKEALQETTQLIEHKLATSGKELKASFDAADLEIDGDFFYFLADATAIAFQYGNPDKVCKPLVEAKKAGEDLVDAYAKYVKEYYIGTFGTDVQTYDQKYLKRTAMNEDNSARLWWFQVCTEVAYFQVAPSNDSIRSSKVDIKYHLDLCKNVFGEGIFPDVDATNLYYGGTKIAGSKIIFTNGSQDPWRHASKQTSSPDMPSYIVKCYNCGHCSDYRGCPQFPFSIEGNEKNCTSPDAVHKVRQKISEHMDLWLSECVDTGRSFI

SEQ ID NO: 23882 - protein, 376 aa, Glycine max
MVTLEHRYYGKSTPFNSLETENLKYLSSKQALSDLAVFRQYYQDSINAKLNRTKIENPWFIFGGSYSGALSAWFRLKFPHLTCGSLASSAVVLAVYNYTEFDQQIGESAGPECKEALQETTQLIEHKLATSGKELKASFDAADLEIDGDFFYFLADATAIAFQYGNPDKVCKPLVEAKKAGEDLVDAYAKYVKEYYIGTFGTDVQTYDQKYLKRTAMNEDNSARLWWFQVCTEVAYFQVAPSNDSIRSSKVDIKYHLDLCKNVFGEGIFPDVDATNLYYGGTKIAGSKIIFTNGSQDPWRHASKQTSSPDMPSYIVKCYNCGHCSDYRGCPQFPFSIEGNEKNCTSPDAVHKVRQKISEHMDLWLSECVDTGRSFI

SEQ ID NO: 23883 - DNA, 1539 bp, Glycine max
aacaacaaaggtgtttcagcaaaataattatttatgtcataaagttgttccaactgaagatgcgaaggctttttctctctctctaaaagcagtggccatcatgttctcttcctaaaccctttcaatcatcatttagctctgaaaaaaataatagaaattaaaacgaaaaatgtcctggctcttcaagtccaaccaccctgacccagaatcttctaatctccacaaccgcaccgttatccactcgtcttcgccgccgcatcccgccgccgatcgccacggcgtcaaggacgacatatcgcatattttccgcggcgtcgccaacttcctcgctccgccgccgccgtcttcctcttcctcttcttcttcttcttcttcttcctcctccgccggcgattcctcctcctcgcaagctctgtcaggaatccggaacgatctcgtggagatcggcggaagcttcaaaaactctctctcgcgcatttcctcgaacaaagccgtcaccggaatctccaagctcgcttcgcagttgttgcagttggagcctgatcaacaacggagcaacgatgacgacgcggtgcctggaacgacggaagatgttgttcgtttcgtgaaggagatttctgcgcggcctcagtgttggactgaattccccttgccactccataacgattttagcatgtccaattctcagagagaacatgcattggctatagagcaactggtacccgaattcattgcactaagactgaatctttgcagttacatgaatgtggaaaagttttggatgatctattttttgttaatacttccaagactaaatcagcatgattttgagcgcctatcaactcccaagaaactaggagagaggaaaaatttgcaagctggagaacctgaaaacccaaggactgtggatacatatcaagagggtagggaggaccgtggaacagaaagtatctcatttgagcaaaatcagatattgactgaggttacaaacgcagtagagggtttagaagttgatgacacggttagcactgaaaaatggttggaagatacagacattgatgctagttcattggcttcctgtacaaaacttcaacaggaagaggacgtctcattcagtgacctagaggatgataggagttatagctccgataaattatctggctacagggaggcgcatgacataaggggttcatcacctgaaggtgctactagtgactgggttcggctgcgtgaaagttctgagagagatggcaggaagaaggttatccgtttgaagggtaaggattcagaagatgagtcaaatgattggctcactgttgatgatttcaattagatagtcttttcttgattcaccaagttgtaaaggttcgatatttacccccttccccgtggttctgtatttagggagtacaaaattatataaatcaaagtatttcttttcttattcacacgtacatatttcttgtttgtacaaggcattgggtagacaacattcaatttttgaaagtgtacaacgcaaataaaatcaaggatttcaag

SEQ ID NO: 23884 - protein, 387 aa, Glycine max
MSWLFKSNHPDPESSNLHNRTVIHSSSPPHPAADRHGVKDDISHIFRGVANFLAPPPPSSSSSSSSSSSSSSAGDSSSSQALSGIRNDLVEIGGSFKNSLSRISSNKAVTGISKLASQLLQLEPDQQRSNDDDAVPGTTEDVVRFVKEISARPQCWTEFPLPLHNDFSMSNSQREHALAIEQLVPEFIALRLNLCSYMNVEKFWMIYFLLILPRLNQHDFERLSTPKKLGERKNLQAGEPENPRTVDTYQEGREDRGTESISFEQNQILTEVTNAVEGLEVDDTVSTEKWLEDTDIDASSLASCTKLQQEEDVSFSDLEDDRSYSSDKLSGYREAHDIRGSSPEGATSDWVRLRESSERDGRKKVIRLKGKDSEDESNDWLTVDDFN

SEQ ID NO: 23885 - protein, 219 aa, Glycine max
MSNSQREHALAIEQLVPEFIALRLNLCSYMNVEKFWMIYFLLILPRLNQHDFERLSTPKKLGERKNLQAGEPENPRTVDTYQEGREDRGTESISFEQNQILTEVTNAVEGLEVDDTVSTEKWLEDTDIDASSLASCTKLQQEEDVSFSDLEDDRSYSSDKLSGYREAHDIRGSSPEGATSDWVRLRESSERDGRKKVIRLKGKDSEDESNDWLTVDDFN

SEQ ID NO: 23886 - DNA, 1434 bp, Glycine max
aaaagatttcattcttcctcttctaggttattacgcaccacccaccacgtatccctgaaaagagagaaaaacacactaagccaaagccaaagcagcaatggttaaagacacaaagcctttagcctatgctgctaataatggataccaaaaggaagcttttgatcccagtgctcctccaccgtttaagattgcagaaatcagagttgcaataccaaaacattgctgggtcaagaatccatggagatccctcagttatgttctcagggatgtgcttgtaattgctgcattgatggctgctgcaagtcacttcaacaactggcttctctggctaatctattggcccattcaaggaacaatgttctgggctctgtttgttcttggacatgattgtggccatggaagcttttcagacagcccttttctaaatagcctggtgggacacatcttgcattcctcaattcttgtgccataccatggatggagaattagccacagaactcaccatcaaaatcatggacacattgagaaggatgaatcctgggttccattaaccgagaagatttacaagaatctagacaacatgacaagacttgttagattcactgtgccatttccattgtttgtgtatccaatttatttgttctcaagaagccccggaaaggaaggttctcacttcaatccctacagcaatctgttcccacccagtgagagaaagggaatagcaatatcaacactgtgttgggttaccatgttttctatgcttatctatctctccttcataactagtccagttctattgctcaagctctatggaattccatattggatatttgttatgtggctggactttgtcacatacttgcatcaccatggtcatcatcagaaactgccttggtatcgcggcaaggaatggagttatttaagaggtggtctcacaactgtggatcgtgactatggttggatcaataacattcaccatgacattggcacccatgttattcaccatcttttccctcaaattcctcattatcacctcgttgaagcgacacaagcagcaaaatcagttcttggagagtattaccgtgagccagaaagatctgcaccattaccatttcatctaataaagtatttaattcagagtatgagacaagaccacttcgtaagtgacactggagatgtggtttattatcagactgattctctgcaccttcactcgcaccgagactgagtttcaatttttgggttatttattggattctagctactcaaattactttttttttaatgttacgtttttggagttttaacgttttctgaacaacttgcaaattacatgcatagagagacaggaattcatagtgggcctcaatggaatatttatttgaaattagtaaggtggtaattaataaatattgaattgtcagtttcatttgt

SEQ ID NO: 23887 - protein, 376 aa, Glycine max
MVKDTKPLAYAANNGYQKEAFDPSAPPPFKIAEIRVAIPKHCWVKNPWRSLSYVLRDVLVIAALMAAASHFNNWLLWLIYWPIQGTMFWALFVLGHDCGHGSFSDSPFLNSLVGHILHSSILVPYHGWRISHRTHHQNHGHIEKDESWVPLTEKIYKNLDNMTRLVRFTVPFPLFVYPIYLFSRSPGKEGSHFNPYSNLFPPSERKGIAISTLCWVTMFSMLIYLSFITSPVLLLKLYGIPYWIFVMWLDFVTYLHHHGHHQKLPWYRGKEWSYLRGGLTTVDRDYGWINNIHHDIGTHVIHHLFPQIPHYHLVEATQAAKSVLGEYYREPERSAPLPFHLIKYLIQSMRQDHFVSDTGDVVYYQTDSLHLHSHRD

SEQ ID NO: 23888 - protein, 312 aa, Glycine max
MAAASHFNNWLLWLIYWPIQGTMFWALFVLGHDCGHGSFSDSPFLNSLVGHILHSSILVPYHGWRISHRTHHQNHGHIEKDESWVPLTEKIYKNLDNMTRLVRFTVPFPLFVYPIYLFSRSPGKEGSHFNPYSNLFPPSERKGIAISTLCWVTMFSMLIYLSFITSPVLLLKLYGIPYWIFVMWLDFVTYLHHHGHHQKLPWYRGKEWSYLRGGLTTVDRDYGWINNIHHDIGTHVIHHLFPQIPHYHLVEATQAAKSVLGEYYREPERSAPLPFHLIKYLIQSMRQDHFVSDTGDVVYYQTDSLHLHSHRD

SEQ ID NO: 23889 - protein, 290 aa, Glycine max
MFWALFVLGHDCGHGSFSDSPFLNSLVGHILHSSILVPYHGWRISHRTHHQNHGHIEKDESWVPLTEKIYKNLDNMTRLVRFTVPFPLFVYPIYLFSRSPGKEGSHFNPYSNLFPPSERKGIAISTLCWVTMFSMLIYLSFITSPVLLLKLYGIPYWIFVMWLDFVTYLHHHGHHQKLPWYRGKEWSYLRGGLTTVDRDYGWINNIHHDIGTHVIHHLFPQIPHYHLVEATQAAKSVLGEYYREPERSAPLPFHLIKYLIQSMRQDHFVSDTGDVVYYQTDSLHLHSHRD

SEQ ID NO: 23890 - DNA, 1460 bp, Glycine max
gaaagtgttgtgcgtgctacgcgcggaacctgtcgtttcgagttctacttgtacgttctaccacctttgagtatcttaaacaatctaccatacgtggatcaaaacaccattgccattggctctctttctttgccgtaccatttgaattgaatgtgattgcaattgcaaatccccccttcaattcaattactactttcacgacctaatctaacccttcgctctgctctgctctcacttcaccatattcacacccagatggaaactgtttgtctccactgtggcgacagaggctttccagagacattggttttttgcaccgaatgtatggcttatgcgctgcataggtactgtttaaaggggcttgtgaattttactgatgctgttacatggttttgcgaggattgtgcaacaaagcttggggtgccacctgctcttgaccaatctacacctatcgcatctgtaacaagagaaaattgcatacagggagtgaaaaaacacaataaacagcaaaaaaagaagattacaaagaagcagattgaaggaaaagctaacgctggcttagttgctaaaacaaagggtgtgttatctgctagtcacagttcatctgagcctgagcatcctcattgtagtaacagaggcgaagaagaacatgaggtgaaaaatgactgtggaccagttccaagggatgtagctaattttgatgtaggtgaagaagaaagtgtggcaagggatttagctaattctgatgtaagtttcaaatctgttccagtttctcaaggagctaccaatagtgattcaggttgtgtagaagtagatggtcatgtttatgcacagcctactattgatccaatctggaggggaagtatgtacttttgcaatggaacaattcgtactgtcagtggacttctggctcatatctccaatttagcgtgctcccaagttgcggaggagacaggacatttcccagaagtgcttcatgcagaatttcttcccagagataaggtgtgggctgaaagtttcaagaggggggatccaactgatcaggacattgctctttttttctttcctgacagtgaaggatctgaaaaggacttcgatgtgctggttgaagatatcatgatctgtaaacatgtcataagatttgtgggtaaaaatgcagagcttttaatttttccttctactgagcttccagtccaaaattggagatatgaagccaagtattatttgtggggtgtcttcagaaagaaagcaaacttaagaagagacaaatgatgcagtgtgcagagtttgacaaggctcttaggttggcataaccatagacgtagtctccatctaaaaatttgagcaatagtggttgtgtagctatgactctagtgcatagtactcctgtgtttatagtcactgatatgttaattaaacatatatatactgtagtgcatagtaccctttttgtgaaaaat

SEQ ID NO: 23891 - protein, 338 aa, Glycine max
METVCLHCGDRGFPETLVFCTECMAYALHRYCLKGLVNFTDAVTWFCEDCATKLGVPPALDQSTPIASVTRENCIQGVKKHNKQQKKKITKKQIEGKANAGLVAKTKGVLSASHSSSEPEHPHCSNRGEEEHEVKNDCGPVPRDVANFDVGEEESVARDLANSDVSFKSVPVSQGATNSDSGCVEVDGHVYAQPTIDPIWRGSMYFCNGTIRTVSGLLAHISNLACSQVAEETGHFPEVLHAEFLPRDKVWAESFKRGDPTDQDIALFFFPDSEGSEKDFDVLVEDIMICKHVIRFVGKNAELLIFPSTELPVQNWRYEAKYYLWGVFRKKANLRRDK

SEQ ID NO: 23892 - protein, 315 aa, Glycine max
MAYALHRYCLKGLVNFTDAVTWFCEDCATKLGVPPALDQSTPIASVTRENCIQGVKKHNKQQKKKITKKQIEGKANAGLVAKTKGVLSASHSSSEPEHPHCSNRGEEEHEVKNDCGPVPRDVANFDVGEEESVARDLANSDVSFKSVPVSQGATNSDSGCVEVDGHVYAQPTIDPIWRGSMYFCNGTIRTVSGLLAHISNLACSQVAEETGHFPEVLHAEFLPRDKVWAESFKRGDPTDQDIALFFFPDSEGSEKDFDVLVEDIMICKHVIRFVGKNAELLIFPSTELPVQNWRYEAKYYLWGVFRKKANLRRDK

SEQ ID NO: 23893 - DNA, 1583 bp, Glycine max
cctttattctccgtttctggtccgccccttcccttctcttcccatctcatctaaatctcaatctctgtctctgtctctgtccgcctcagctttcactccaaaccctaaccaaccgatctctttcgccgatcccggaaaccttccgaatcgtttaattgacgctacgccgtggaatctgggcggaacaaatccacgatggcggcctccaccaccagccaggtctacatccaggtaatcgacgatgtcatgaacaaggtccgcgacgagttcgtcaacaacggtggtcccggcgacgaagttctcaaggagcttcaatctatatgggaatcgaagatgatgcaagctggtgccattgttggtcccatagaaaggtccggggcgcctaagccaacgcccggtggtccaattactccggttcatgatcttaacatgccttatgaggggactgaggagtatgaaactcccacagcggaaatgcttttcccccctacgccattgcaaactcctcttcaaacccctttaccaggaactgtggataactcaatgtataacattcccactggacctagtgactacccgtctgctggaaatgagcctggtgcaaataacgagataaaaggtggaaggcctggtccatacatgcaacctcctccttcaacgtggacgaaccagaaccagaaccaaagggctccacttgacgtcaatgttgcttacgtggaagggcgggatgaggcggaaagaggagcttcaaatcaacctctgacacaggacttcttcatgtcctcggggaagcggaaacgtgatgaaattgcttctcaatataatgctggtggatatatacctcagcaagatggagctggagatgctgcttctcaaatttttgaaattgaagtgtatggagggggcatgtccattgatgcaggtcactctacttctaaaggaaaaatgccagcacaatcagacaggccagcttctcagattcctcaacttgatggaccaattccctacgatgatgatgtgctttctactccaaatatatacaattatggagtgttcaatgaagactacaacattgcaaatacaccagctccttccgaagtaccagcaagtacccctgctcccattgctcaaaatgaggttgatgaagaagatgatgatgatgagccccccctaaatgaaaatgatgatgatgatttggatgatttggatcagggagaggatcaaaatacacatcatcttgttttggcccagtttgacaaggtgacacgtaccaagagtagatggaagtgcaccctaaaggatggtatcatgcatataaataataaggacattctcttcaataaggcaactggagaatttgacttctgattttgtcagggattggtcttgccatttttgtggcagtgctttggtgaattacaggtactctgaggcatttcctgaagtttgccatttgtcaagtgggatatgtatgtctattagctctgcatacttggacagtttaaactgcagtgactctcgtggttagttttttagccgtcataaagaacaacgataatgtcaagtttgcttttcttggttcc

SEQ ID NO: 23894 - protein, 390 aa, Glycine max
MAASTTSQVYIQVIDDVMNKVRDEFVNNGGPGDEVLKELQSIWESKMMQAGAIVGPIERSGAPKPTPGGPITPVHDLNMPYEGTEEYETPTAEMLFPPTPLQTPLQTPLPGTVDNSMYNIPTGPSDYPSAGNEPGANNEIKGGRPGPYMQPPPSTWTNQNQNQRAPLDVNVAYVEGRDEAERGASNQPLTQDFFMSSGKRKRDEIASQYNAGGYIPQQDGAGDAASQIFEIEVYGGGMSIDAGHSTSKGKMPAQSDRPASQIPQLDGPIPYDDDVLSTPNIYNYGVFNEDYNIANTPAPSEVPASTPAPIAQNEVDEEDDDDEPPLNENDDDDLDDLDQGEDQNTHHLVLAQFDKVTRTKSRWKCTLKDGIMHINNKDILFNKATGEFDF

SEQ ID NO: 23895 - protein, 373 aa, Glycine max
MNKVRDEFVNNGGPGDEVLKELQSIWESKMMQAGAIVGPIERSGAPKPTPGGPITPVHDLNMPYEGTEEYETPTAEMLFPPTPLQTPLQTPLPGTVDNSMYNIPTGPSDYPSAGNEPGANNEIKGGRPGPYMQPPPSTWTNQNQNQRAPLDVNVAYVEGRDEAERGASNQPLTQDFFMSSGKRKRDEIASQYNAGGYIPQQDGAGDAASQIFEIEVYGGGMSIDAGHSTSKGKMPAQSDRPASQIPQLDGPIPYDDDVLSTPNIYNYGVFNEDYNIANTPAPSEVPASTPAPIAQNEVDEEDDDDEPPLNENDDDDLDDLDQGEDQNTHHLVLAQFDKVTRTKSRWKCTLKDGIMHINNKDILFNKATGEFDF

SEQ ID NO: 23896 - protein, 344 aa, Glycine max
MMQAGAIVGPIERSGAPKPTPGGPITPVHDLNMPYEGTEEYETPTAEMLFPPTPLQTPLQTPLPGTVDNSMYNIPTGPSDYPSAGNEPGANNEIKGGRPGPYMQPPPSTWTNQNQNQRAPLDVNVAYVEGRDEAERGASNQPLTQDFFMSSGKRKRDEIASQYNAGGYIPQQDGAGDAASQIFEIEVYGGGMSIDAGHSTSKGKMPAQSDRPASQIPQLDGPIPYDDDVLSTPNIYNYGVFNEDYNIANTPAPSEVPASTPAPIAQNEVDEEDDDDEPPLNENDDDDLDDLDQGEDQNTHHLVLAQFDKVTRTKSRWKCTLKDGIMHINNKDILFNKATGEFDF

SEQ ID NO: 23897 - DNA, 1637 bp, Glycine max
acatttacaggttagccttgaagggcaaatatctcgtcagtcagtaaaacaaagtttgagcaatggtcatataccttctggagatcaaataccatggaaattctgtgagcaataccaagacacagtttttccttcactttcgggcgctcgcattgttcgcattgctacacaccctgatgacatgaagcatggatatggttcgcaagcagttgagcttttaatacgctactatgaaggtcgacttactcctatctctgggattgacgttgatgatgaagtgcagacttcgcaaattagggttactgaagctgcagaaaaagtttcactacttgaagaaaatataaaaccaagaaaagaacttcctcatttgctagtacatctgcgtgaaaggcgcccagagaagctccattacattggcgtctcctttgggctaaccttggacctttttcgcttttggaggaagctcaaatttgctcctttctacattagccagattccaaatactgtgactggtgagcattctattatggtcctgaaacccctaaacaatgatgaaattaaagttgatggatcaaatcagtggggctttgtcagcccattttaccaagattttaggcaaagattttttagacttctagcttccaattttcgtggcatggaattcaagcttgctatgagcatcctggatccaaaaatcaattttgaagagcaagatccttcaaagactgcttctcataaatttatggggtcagtcagggaatatttatcaccacatgatatgaagcgactaaaggcttatgtttccaattttgctgactttaaccttcacctgattttggatttagttcccatccttgcacgtctctactttgaagaaaagcttcccgttaaattgtcatatgttcaagcttctgtgttactctgcattggcctgcaaaatcacaacattttgtacattgagggacaaatgaagttggaaaggcaacagctattgtctgaatttaggaggataatgaagttgttctacaattatctaaatggccttgcatccaaggagattgaatctaccttgccccgaatgaaagaaatcgtcatggaacctcattgtgtctgtggatgatgacctcaataatgctgctaaacaagttgaggatggcatgaagttaaaagcagaagcacccgttactcctgaattgctccagcgatatgcgattgtggaaggagaatctgacttggagacagttttacaaaacaacagaggaaaaatacccattggtggtcttatcagtgtaaaatccagtagtaagcctgagatgatgaagagaagtcgaaagaatgataaaaaacggacaagatttttttggtcacacaaccattttttttggtggaattgctcatacaaccataagctaagcaaaaggagaagaaccatacaagattgatgaatgttttcactaaattctattctattttaaatattaatttttatatattggtcttggtcatatttagcaatcaatatgtttgacatgtcaaaattacaaatttagcaaaacataataaaaacaattatattgatgcatgtaggtttctggttcttttgtgttgactaaatataaacttttgtgtttctggtt

SEQ ID NO: 23898 - protein, 372 aa, Glycine max
HLQVSLEGQISRQSVKQSLSNGHIPSGDQIPWKFCEQYQDTVFPSLSGARIVRIATHPDDMKHGYGSQAVELLIRYYEGRLTPISGIDVDDEVQTSQIRVTEAAEKVSLLEENIKPRKELPHLLVHLRERRPEKLHYIGVSFGLTLDLFRFWRKLKFAPFYISQIPNTVTGEHSIMVLKPLNNDEIKVDGSNQWGFVSPFYQDFRQRFFRLLASNFRGMEFKLAMSILDPKINFEEQDPSKTASHKFMGSVREYLSPHDMKRLKAYVSNFADFNLHLILDLVPILARLYFEEKLPVKLSYVQASVLLCIGLQNHNILYIEGQMKLERQQLLSEFRRIMKLFYNYLNGLASKEIESTLPRMKEIVMEPHCVCG

SEQ ID NO: 23899 - protein, 312 aa, Glycine max
MKHGYGSQAVELLIRYYEGRLTPISGIDVDDEVQTSQIRVTEAAEKVSLLEENIKPRKELPHLLVHLRERRPEKLHYIGVSFGLTLDLFRFWRKLKFAPFYISQIPNTVTGEHSIMVLKPLNNDEIKVDGSNQWGFVSPFYQDFRQRFFRLLASNFRGMEFKLAMSILDPKINFEEQDPSKTASHKFMGSVREYLSPHDMKRLKAYVSNFADFNLHLILDLVPILARLYFEEKLPVKLSYVQASVLLCIGLQNHNILYIEGQMKLERQQLLSEFRRIMKLFYNYLNGLASKEIESTLPRMKEIVMEPHCVCG

SEQ ID NO: 23900 - protein, 197 aa, Glycine max
MVLKPLNNDEIKVDGSNQWGFVSPFYQDFRQRFFRLLASNFRGMEFKLAMSILDPKINFEEQDPSKTASHKFMGSVREYLSPHDMKRLKAYVSNFADFNLHLILDLVPILARLYFEEKLPVKLSYVQASVLLCIGLQNHNILYIEGQMKLERQQLLSEFRRIMKLFYNYLNGLASKEIESTLPRMKEIVMEPHCVCG

SEQ ID NO: 23901 - DNA, 674 bp, Glycine max
gaagccctttcgaaaacgtagatcttggtaatggaaaagtgggtcatgtaaatcaagcaaacaacatgtacctcttcccaggaattggtttgggaactcttctgtcaggtgctcaccttataacagatggaatgttgcaggcagcttctgaatgccttgcttcatacatggccgaggaagatatcttgaaaggaattttgtatccatccgttgatagcatacgagatgttacggcagaggtcggggctgctgtgcttcgagcagcagttgaagaagaactggcagaaggacatggtgatgtggggcccaaggaactttcccatatgtcaaaagatgaggctgtggagtatgtgcgaagcaatatgtggtatcctgtgtattctcctctcgttcatgaaaaataatatcctatcgatattttcaattttttgggggacctgtgcaattcacgtctcaaattgctgctgcaaagattcttaatttatgcttattactagcaacgctgagtatcggatggcaagggtttttctaaagatgtcagggttttataaagatgtcagctagttggttgtttgtgtctacaaatcaccttttaacacatgatctttaaggaaaggatgtcttatttttatatgtttagtactagaatgcatgacccgatttttgcccctgtt

SEQ ID NO: 23902 - protein, 133 aa, Glycine max
SPFENVDLGNGKVGHVNQANNMYLFPGIGLGTLLSGAHLITDGMLQAASECLASYMAEEDILKGILYPSVDSIRDVTAEVGAAVLRAAVEEELAEGHGDVGPKELSHMSKDEAVEYVRSNMWYPVYSPLVHEK

SEQ ID NO: 23903 - protein, 112 aa, Glycine max
MYLFPGIGLGTLLSGAHLITDGMLQAASECLASYMAEEDILKGILYPSVDSIRDVTAEVGAAVLRAAVEEELAEGHGDVGPKELSHMSKDEAVEYVRSNMWYPVYSPLVHEK

SEQ ID NO: 23904 - protein, 90 aa, Glycine max
MLQAASECLASYMAEEDILKGILYPSVDSIRDVTAEVGAAVLRAAVEEELAEGHGDVGPKELSHMSKDEAVEYVRSNMWYPVYSPLVHEK

SEQ ID NO: 23905 - DNA, 754 bp, Glycine max
atcacactaatcactcactcttcactcaaaactcttctctttcattttcataattcccacacattatggctgagcttcactaccaaccacaacaccaataccccctccgctaccctaacgatccacaccaacaaacccgttcctccacccaccaggtcgtcaaggccgccaccgccgtcacagcgggcggctccctcttgatcctcgcctcgttgatcctcgccgccaccgtcattgccctcaccatcgtcaccccgctgttcgtcattttcagtccggttctcgtccccgccgtaatcaccgttgcgctcctgagcctggggttcctcgcctcgagtgggttcggtgtggcggcgatcacggtgctggcgtggatctacaggtacgtcaccggcaagcaaccacctggcgcggatcagttagacagcgcgcgtcacaagatcatggacaaggcgcgtgagatcaaggactacggacagcaacaaatcagcggggtccaggcttcttaattctgcactcgcacgcacatgatcgtatccatctcgtggaatatttctctctttgtctagttagtttatatttaccatttatgaatgaatgaatgcatgattgagcgttaaagttgaatttgaatctctcttttctttgtattttcgtttattgtgggtgttcgctcatcatcacttgttgtaatgtcttaattttgtgtgcatgctgcgactattcaaggacgatccatttgtgtttttattct

SEQ ID NO: 23906 - protein, 147 aa, Glycine max
MAELHYQPQHQYPLRYPNDPHQQTRSSTHQVVKAATAVTAGGSLLILASLILAATVIALTIVTPLFVIFSPVLVPAVITVALLSLGFLASSGFGVAAITVLAWIYRYVTGKQPPGADQLDSARHKIMDKAREIKDYGQQQISGVQAS

SEQ ID NO: 23907 - DNA, 779 bp, Glycine max
atccaggatttaaaccaagatatccatcatttctttctctccccttcttccaattatcgatttggtgaggatttctccctcccgcttgaatgaactatcgcagagccaaaacgataaatccaaacccattgatccattatgccaataatcgatcaataccccacacccacaaacctcgaccccatgaaagaccaactccaaagttccgcaagcgcattcccttcgtcaccgaagtcaaaacagtggaagacccggaagaagcattgtccctctttcaccgttacaaagaacagggtttccggcactattacccttcctatgccgcattactctacaaactagctcgttctagaatgttcgatgccgttgaaacgattctcgctcacatgaaagacaccgaaatgcaatgcagagagagcgttttcattgccctctttcaacattacggtcccgaaaaagccgttgaactcttcaacagaatgcctcagttcaattgcacccgcacgatacagtccttcaacgcgcttctcaatgttctaattgacaatgacaggtttgacgaggccaatgatatttggggtcattagtttttgttggtcggatttgtgtttgcttttatttattggtattgctcattagtattttctacttgtttgctctgtcccttgttttagtagcttggattagctgtgtctcaccatgcatttgtacttcacttttcatgttttttgggttactactatgaaactggaacaattggttgcaattagtgcttttac

SEQ ID NO: 23908 - protein, 165 aa, Glycine max
MNYRRAKTINPNPLIHYANNRSIPHTHKPRPHERPTPKFRKRIPFVTEVKTVEDPEEALSLFHRYKEQGFRHYYPSYAALLYKLARSRMFDAVETILAHMKDTEMQCRESVFIALFQHYGPEKAVELFNRMPQFNCTRTIQSFNALLNVLIDNDRFDEANDIWGH

SEQ ID NO: 23909 - DNA, 1354 bp, Glycine max
aaaataagagaaggggtgagggggcggcaccacctttccttccctcccgattgccctaggtaaaaaatgtatatagttcttttcttttgcatcaattcagcggcgacgaaaccgcaatagatctccgtttctcgccaaacaaacacaaaatagctgccttcagcggcgacgaaaccgcacctttctttggcttcctcggagccaccgctaccctcgttttttcctgtaactaactcatcaaggaggatccatctctgaaacatattttggaggagatagagactggtggtcctgctgctatgatgaggtactggaatgatgaggaggttttgcggaagttgggacaaaccatgggagtttccttaataaacgtgtaaagggattaggaacccagaacataaactgtcctaaagctacttgagaaagatgcttttctgtaattgtaatgcatgatgccatgctgtcaccaacaatcaaaggggaaactgaggggaagaagatgtttccgtgatgaaaatttaagagctgatagacaacttgagttcacccaactagacatggaaatgacctttactccttacgaggatatgttaacacttaatgaagaattgattagaaagaagtagtaaagttgcaggaaaaatggtgtgaggataaagagaaaacaaaggaagaatatgaaggagacaagcgatggtaactcaaaaaattataaataggatgagggttgcgagtggatcgagtaccttttcggatggcaatgggccagtctgactaagagtgatgagagacaggtgaggaagcaggatccatggttggaggactagttggagaaggatgagaatcacgaggggaggcttcaggtactgtagaattagctggccgtgtcctgtgatgatatgtaagtagaggtagagagacaacttcaattgaatttggtagagaagatgagacttcattgacattttggtcggagttacctagaggacaaggaattggcagtacttcctggagagaagaagaatgatctacagaggatgagaagaaaggtgtgtcttcaaagaaggttacatctgcagacatataatatcgtcttgtgattggagagtagcatttgtaacccttttgaagacgagaataacccaaaaagacacattttactgacttagctgaaagtttgtctaaatcaagggaaagatcatgaacaaaacaagtacaaccaaacactctaggagagacatgaaacaatgggtcatgaggaaagataattgagtgaggaatttggttttcaagagaagaagaaggcatcctattaattaagaagcacgcagtaagcactgcgtctccccagtga

SEQ ID NO: 23910 - protein, 58 aa, Glycine max
MMPCCHQQSKGKLRGRRCFRDENLRADRQLEFTQLDMEMTFTPYEDMLTLNEELIRKK

SEQ ID NO: 23911 - protein, 57 aa, Glycine max
MPCCHQQSKGKLRGRRCFRDENLRADRQLEFTQLDMEMTFTPYEDMLTLNEELIRKK

SEQ ID NO: 23912 - DNA, 1285 bp, Glycine max
agtcttccatcgaagtgtattgcattggattattgacttttgacttgggtgttgtcacacggccacaccggagtatcgcgtgtccttcgtcagcctgtcctgtcagtcctttgtgcatctttgcctgacccagtcgctgttgtgagcggccgcgttttcgtctgtcaaacagagcatcgccgacaagggcagcgccaagatggccgactggaagagcgcttcgtctgtgtacgacttcagcgtcaaggacatcactggcgccgacgtcagcctagacaagtacaagggccacgttctgctgatcgtcaacatcgcctcgctgtgcgggctgacggccaccaactacaaggagctcgtcgagctggacgagaagtaccgcgagcgcgggctgcgcatcctcgccttcccctgcaaccagttcaacggccaggagcccggcacggccgacgacatcgtgtgcttcgccaagaagcagaacgccaactttgacctgttcgagaaggtgaacgtcaacggcgacgacgccagccccctctggaagtacctgaagaacaagcagggcggcaccttcggagacttcatcaagtggaacttcaccaagttcatcgtcgacaaggagggccagcccgtggagcgacacagccccactacggagccacacaaactgatctctcacattgagaagtacctgtaaagtgccctggctccggggaaactccactattgttactattgaagtttaggatgcttaatagttgttagaaatcacaagggaaagtcaccgaacacctgcaacacacaattgtgataagacaaactagaggtactttgttttaatttacccttgtcatgattttgtagctcttttaacaatgttagtctaaattaatgaatgaaatgtgtagattatttaattttaaatgttttagcttggtgaaggagataaatttacttctcatttataaatagcggaactttgaacttcaccagttccgtagcacaaggaatcaaacaaacacatattgtcacattcaatactctgcccttgtggttttttcactcacatttttcattgtgtcataatcgctgccatgaatagtgtttttacttttttaatagatgatttttgcagccgtgtattgtttctgaagtgtaattctcatgtggctcatggacaaaaatgagcccaccccgatcgctgagcacatttttgtgtgaagactgtgttgcacaaagtgcacgtcaaggctgtgtaatgttcgaataaaggtataacgagaaccct

SEQ ID NO: 23913 - protein, 164 aa, Glycine max
MADWKSASSVYDFSVKDITGADVSLDKYKGHVLLIVNIASLCGLTATNYKELVELDEKYRERGLRILAFPCNQFNGQEPGTADDIVCFAKKQNANFDLFEKVNVNGDDASPLWKYLKNKQGGTFGDFIKWNFTKFIVDKEGQPVERHSPTTEPHKLISHIEKYL

SEQ ID NO: 23914 - DNA, 1203 bp, Glycine max
actataaaacacttttttttctcgtttccctttcgctcacacaacacaactcctaccaacaaggtgctctgctcgttcactcctctctcatacagcctctggctcctcctccggtgaaagagggtgagaagaggagttagcaagcaatttttgtttcttttgggagttgggacccctcactcacatggacgcatcaacggctttaatgatcctatccgcaatagcggcctatttaatatggttcaccttcgtcactcgctccctaaaaggtccacgtgtctggcccctattcggcagcctccctggcctcatccaacacgccaaccgcatgcacgactggatcgccgacaacctccgcgcgtgcggcggcacgtaccaaacctgcatctgcgcccttcccttcctcgcccgtaaacagtgcctcgtcaccgtcacgtgcgaccccaaaaacctcgagcacatcctcaagctccgcttcgacaactaccccaaaggccccacgtggcagtccgcgttccacgatttgctcggcgaaggcatcttcaactccgacggcgacacgtggctgttccaacgtaaaaccgccgcactggaattcaccacgcgcactctgcgccaagccatggcgcgttgggtgaaccgagccataaagcacaggttctgccccatcctagccacggctcagaaagaaaacaaatcagtggatcttcaagacctcttgcttcggctcacttttgacaacatatgcggcttggctttcggccaagacccgcaaaccctagccgtggggctcccagataacgctttcgctctctccttcgatcgagccaccgaggccactctacaacgctttattttacccgagatcttgtggaagctgaagcgatggctcaggctcggaatggaagtgagcctgagccggagcctgaaacacatcgacaattacctctcccacatcatcaagaaccgcaagctggagcttctgaatggcactgggtcccaccacgacgacctcttatcccgcttcatgaggaagaaagaatcctactctgaagagtttctccaacacgtggcactcaacttcatcctggcagggcgcgacacgtcatcggtcgctctaagttggttcttctggctctgcattaagaacccgcatgtggaggaaaagatcctccacgagctctgcagtgtcctcaagtttac

SEQ ID NO: 23915 - protein, 339 aa, Glycine max
MDASTALMILSAIAAYLIWFTFVTRSLKGPRVWPLFGSLPGLIQHANRMHDWIADNLRACGGTYQTCICALPFLARKQCLVTVTCDPKNLEHILKLRFDNYPKGPTWQSAFHDLLGEGIFNSDGDTWLFQRKTAALEFTTRTLRQAMARWVNRAIKHRFCPILATAQKENKSVDLQDLLLRLTFDNICGLAFGQDPQTLAVGLPDNAFALSFDRATEATLQRFILPEILWKLKRWLRLGMEVSLSRSLKHIDNYLSHIIKNRKLELLNGTGSHHDDLLSRFMRKKESYSEEFLQHVALNFILAGRDTSSVALSWFFWLCIKNPHVEEKILHELCSVLKF

SEQ ID NO: 23916 - protein, 332 aa, Glycine max
MILSAIAAYLIWFTFVTRSLKGPRVWPLFGSLPGLIQHANRMHDWIADNLRACGGTYQTCICALPFLARKQCLVTVTCDPKNLEHILKLRFDNYPKGPTWQSAFHDLLGEGIFNSDGDTWLFQRKTAALEFTTRTLRQAMARWVNRAIKHRFCPILATAQKENKSVDLQDLLLRLTFDNICGLAFGQDPQTLAVGLPDNAFALSFDRATEATLQRFILPEILWKLKRWLRLGMEVSLSRSLKHIDNYLSHIIKNRKLELLNGTGSHHDDLLSRFMRKKESYSEEFLQHVALNFILAGRDTSSVALSWFFWLCIKNPHVEEKILHELCSVLKF

SEQ ID NO: 23917 - protein, 291 aa, Glycine max
MHDWIADNLRACGGTYQTCICALPFLARKQCLVTVTCDPKNLEHILKLRFDNYPKGPTWQSAFHDLLGEGIFNSDGDTWLFQRKTAALEFTTRTLRQAMARWVNRAIKHRFCPILATAQKENKSVDLQDLLLRLTFDNICGLAFGQDPQTLAVGLPDNAFALSFDRATEATLQRFILPEILWKLKRWLRLGMEVSLSRSLKHIDNYLSHIIKNRKLELLNGTGSHHDDLLSRFMRKKESYSEEFLQHVALNFILAGRDTSSVALSWFFWLCIKNPHVEEKILHELCSVLKF

SEQ ID NO: 23918 - DNA, 1083 bp, Glycine max
ttttttctacctctagggtttttcaatgctacctactccaccctcttctctaaattctttcactttctttctctctcaatgttttcttcttgttttatttaattaattattactcgcccaattttttatgaataaatattaattgtttatttcttagtttttgttactcgccaaattatgtatgtaaaattttgtccattgatcttttcccccttaattttcaggtaagtgttccttgcacaagcttgttcaagaccgtcactgtccgatgcggccattgcactaacctcctcccagtgaacatgcgagggttgcttatgccatctcccactcaatttcatttgggtcactctttcttctccccatctcataaccttctggaggagataccaaaccccactccaaattttcttatgaaccaaacaaatttcagtgcgtcacatgagttctctatgcctgctaggactgcagctgatgagcttccacggccaccgatcacaaacagacctcctgagaagagacagagagtcccctcagcgtacaatcgctttatcaaggacgagatccaacgcatcaagtctgtcaatcccgatataactcacagggaagccttcagtgcagctgcaaagaattgggcccacttcccacacatccactttggtctcatgcctgatcagactgtgaagaagacaaatgtgtgccagcaggatggagaagaggttctcatgaaagatgggttttatgcttcggctaatgttggtgtctcaccctactaattcaccccagtctgttttctctttcgaagaaattatgcaaagaggaaaaattttccaagttccaccaacctatgaagctcaggaactctgattccttaacttataaatgcatctatttgtggctcaagagcgattatgttgatataactaaggactactactacactaggactagctcttggggttgtgcatgcatgcatgtagttctcttcttatgagtagactttaattattaactttcatgttcttcaattcccccagtactactgcagctgattgcttatctaatcaataattaattagccat

SEQ ID NO: 23919 - protein, 157 aa, Glycine max
MRGLLMPSPTQFHLGHSFFSPSHNLLEEIPNPTPNFLMNQTNFSASHEFSMPARTAADELPRPPITNRPPEKRQRVPSAYNRFIKDEIQRIKSVNPDITHREAFSAAAKNWAHFPHIHFGLMPDQTVKKTNVCQQDGEEVLMKDGFYASANVGVSPY

SEQ ID NO: 23920 - protein, 152 aa, Glycine max
MPSPTQFHLGHSFFSPSHNLLEEIPNPTPNFLMNQTNFSASHEFSMPARTAADELPRPPITNRPPEKRQRVPSAYNRFIKDEIQRIKSVNPDITHREAFSAAAKNWAHFPHIHFGLMPDQTVKKTNVCQQDGEEVLMKDGFYASANVGVSPY

SEQ ID NO: 23921 - protein, 120 aa, Glycine max
MNQTNFSASHEFSMPARTAADELPRPPITNRPPEKRQRVPSAYNRFIKDEIQRIKSVNPDITHREAFSAAAKNWAHFPHIHFGLMPDQTVKKTNVCQQDGEEVLMKDGFYASANVGVSPY

SEQ ID NO: 23922 - DNA, 1379 bp, Glycine max
cttccactctctccctctttcctatcacactttctagatagctagcctgtaagatatatatatagatatttcatatatatcctatggtccgtgagtgcccttgttctgtaccaaccctttcttccacatgttgagtttcagcatcgtcctctcttgagtccccatatcaaatacccaccgaattcaaccccccatataacaaatctcctcccatcccatttttcagcaccaaagtttgaaacttttctcaattgggttgaggagagtttgactcaaatttttatttttctaacgaagcagtagctattagaagtgcaaaaattaaatgtccaacatcttcttgttgatgtttgagattcatgtatccgattctcagtgaaatcttcttttccgggtgtatgatcaattccactgttaggcgcaggacccatttagttcaatccttctcagttgctttcctctattggttgtactacgtttcatgatttctaaaccttccttagtctaataatcatctactactagttattattatcatcatcatatataataaaatctatctgcaatattatttttctgagtttttgtctagttagtgtctgggtcctggtcctgccaattgtgtcaattaattgtattgaatcataaaagatggcttcctcaagtggaacatcttcagggtcatctctgcttcagaactctggttctgaggaggatttgcaggcggtgatggatcagagaaagaggaagagaatgatatcaaaccgcgaatctgcacggcgatctcgcatgaggaagcagaagcacttggacgatcttgtttcccaagtggctcagctcagaaaagagaaccaacaaatactcacaagcgtcaacatcaccacgcaacagtacctgagcgttgaggctgagaactcggtgcttagggctcaggtgggtgagcttagtcacaggttagagtctctgaatgagatcgttgacgtgttgaatgccaccactgtggcgggttttggagcagcagcaacatcgagcaccttcgttgagccaattaataataatagcttcttcaacccgttgaatatggggtatctgaaccaccctattatggcttctgcggatatattgcagtattgagatccatggtctctgagtctgagatttgatgaggatttcttcttcttcttctaggtttgagtctgttgagaaattgtaatcactaccatatggtgataaggaataataataatgaatgtgtatcgtaaaacggatgggattgttgggtgctggttctgtaaatgtggcatgggccattactgtaatttgtcaccctcctttcctatattattataataataatattgacctacttctctgtcttg

SEQ ID NO: 23923 - protein, 160 aa, Glycine max; identical to SEQ ID NO: 17377

SEQ ID NO: 23924 - protein, 134 aa, Glycine max; identical to SEQ ID NO: 17378

SEQ ID NO: 23925 - protein, 126 aa, Glycine max; identical to SEQ ID NO: 17379

SEQ ID NO: 23926 - DNA, 705 bp, Glycine max
atatcctcgtcagtgcttactacttaatttccacttctaattaacaaagttaagcaagcattgacttggtacctataagtagtaatggctgtggctttgacgattgtgttgagcttgctctcggttctctcttctgcatcttgtgcacgaatggtgggggggaagacggaggtccccgacgtgagaacaaacagggaagtgcaagagcttggaaggttcgcggtggaggagtacaaccgcggtttgaaacagtggaagaacaatgggagtgaacagttgaacttttcggaggtggtggaggcgcagcaacaagtggtgtcaggaatgaagtactacttgaagatctcagctactcataaaggggttcacaaaatgttcacctctgttgtggtggtcaagccatggcttcattccaagcaactccttcattttgcgcctgcagcaccatccagtaaagatttttgagatgcatgcatgctagctatttggagctaattaattatataataattaataaccatggcggtatttgtaattgcaagtgagctttttgattttcttctactaaagttttcctctactttttgtaatgggtatatctgtgggcagaacaacaaaaatcaactacgagttgaaatcttacttaccagccatatgtaccaaagaaagtgaataataactatatatatgctatagttttgttct

SEQ ID NO: 23927 - protein, 126 aa, Glycine max
MAVALTIVLSLLSVLSSASCARMVGGKTEVPDVRTNREVQELGRFAVEEYNRGLKQWKNNGSEQLNFSEVVEAQQQVVSGMKYYLKISATHKGVHKMFTSVVVVKPWLHSKQLLHFAPAAPSSKDF

SEQ ID NO: 23928 - protein, 104 aa, Glycine max
MVGGKTEVPDVRTNREVQELGRFAVEEYNRGLKQWKNNGSEQLNFSEVVEAQQQVVSGMKYYLKISATHKGVHKMFTSVVVVKPWLHSKQLLHFAPAAPSSKDF

SEQ ID NO: 23929 - DNA, 1235 bp, Glycine max
cattctatacggaaatctcaattttcattttctcttgtaaattcagaaaccccaacacgctctgtcggtgtaggttcggtgaaaatgagttcaagaggaaagcagggtgccatcgtttcttaccaaaacgtcgtcgtaatgaggcacggcgagcgcttcgacaacttcgagccgtcatgggcggcgacggcggcgcggccttgggacccgccgctggccgaggccggccggaaacgggcgttcaaaacgggcctgaggctccgagagagtgtcgagtttccgatcgggcgcgtcttcgtttcgccgttcctccgctgcctccagaccgccgtggaactcgtggcatctctctccgatggtgttgccgttaagccttccgaagtcaaggtctctgtcgagtatggattgtgcgaaatgatgaacagcaaggctatccgtcccaatgttgcccccaaagatggaaacatggggtttgatgtagcagtttgtgaagccatgctcccagctgagatagtggataaaaatgttgaaaggatgtgtaaagagttgccccagtgggaagaatcagttctgcaagcaggggcaagatatcagcagttaattaaggaccttgcagataaataccctactgagaacttgctgcttgttacacatggggaaggagtcaaggtagctgtttcttcattcaaaaaggatgctgaggtaaatgaagtcgattactgtggatatgtggaacttagacgtcccatgttcataaaagatcacacatttgccgctggagagttcgatttacttacaactagtggtcaaactggcgtaagctatttcctaccacgtcctttgggaagtgacaccaaccaaactttaccatgatcaagcatatactcgtgattctcacttcaagtttgtgagctttatacttgagtggtgtctgtttcaaggtttataattaggtgaattaaaaaaaaaacatgttaattaggatttaacatgtataggaacttttcaaatgctaggagaaaatgaaagtgaaaatctacatgttcctgattcggatgtcataatttcagaatatttccatagaaaattaatatatcctctccttaacatggagaatggagattaaagtcaagtaaaatatcacaaaactttcttaaagaacaaatatatagcccgtttggttgtaagttacacaagtacttcgctttcgtcaaagtaatatataaataagtagg

SEQ ID NO: 23930 - protein, 290 aa, Glycine max
HSIRKSQFSFSLVNSETPTRSVGVGSVKMSSRGKQGAIVSYQNVVVMRHGERFDNFEPSWAATAARPWDPPLAEAGRKRAFKTGLRLRESVEFPIGRVFVSPFLRCLQTAVELVASLSDGVAVKPSEVKVSVEYGLCEMMNSKAIRPNVAPKDGNMGFDVAVCEAMLPAEIVDKNVERMCKELPQWEESVLQAGARYQQLIKDLADKYPTENLLLVTHGEGVKVAVSSFKKDAEVNEVDYCGYVELRRPMFIKDHTFAAGEFDLLTTSGQTGVSYFLPRPLGSDTNQTLP

SEQ ID NO: 23931 - protein, 262 aa, Glycine max
MSSRGKQGAIVSYQNVVVMRHGERFDNFEPSWAATAARPWDPPLAEAGRKRAFKTGLRLRESVEFPIGRVFVSPFLRCLQTAVELVASLSDGVAVKPSEVKVSVEYGLCEMMNSKAIRPNVAPKDGNMGFDVAVCEAMLPAEIVDKNVERMCKELPQWEESVLQAGARYQQLIKDLADKYPTENLLLVTHGEGVKVAVSSFKKDAEVNEVDYCGYVELRRPMFIKDHTFAAGEFDLLTTSGQTGVSYFLPRPLGSDTNQTLP

SEQ ID NO: 23932 - protein, 244 aa, Glycine max
MRHGERFDNFEPSWAATAARPWDPPLAEAGRKRAFKTGLRLRESVEFPIGRVFVSPFLRCLQTAVELVASLSDGVAVKPSEVKVSVEYGLCEMMNSKAIRPNVAPKDGNMGFDVAVCEAMLPAEIVDKNVERMCKELPQWEESVLQAGARYQQLIKDLADKYPTENLLLVTHGEGVKVAVSSFKKDAEVNEVDYCGYVELRRPMFIKDHTFAAGEFDLLTTSGQTGVSYFLPRPLGSDTNQTLP

SEQ ID NO: 23933 - DNA, 1260 bp, Glycine max
acaaaaacttcattttcgactttgcaaacaccctcggtaaagagctagtttcacttgggaggtcgcaagcaccgaacgcaaaaacgaagctctggtaactcacgaaacgtgattagcatactcaaatggccgattctggcttcaccagtgacaggagggaccccattaagtcctcagttggcaatgctgcggctagtaggagacgacagcatgcagtcacagtggggaaagaaaggagggaatcgctgatgcgcgcgaaaagactctgtagggtgcattggtggcggtaatggcgaattttccgttgacagtgtcatgttaactgatgaagagcaatccattttggagtcccagactttagcggcagtggaaaatttgaaatctgcccttgcttttcaggggaagggtgcagtaaagaaaagagttggggctcttcaagagttaaggcgtttgctgtcaagatctgaatttcctcctgttgagtctgctattaatgctggagctgtacccttgcttatgcagtgcctttcatttggttccccagaagaacaggtgcttgaggctgcttggtgtctcacaaatattgctgcagggaatccagaagaaacagaggctctgttgcctgcattgcccttgcttattactcatcttggggaaaagagctacccaccggttgctgaacagtgtgcttggcgctgggaaatgtggctggtgaaggtgaagagttgaggaatgttctgctagttcaaggggcattactacctcttgcaagaatgatgctaccaaacagaggttcaactgctagaacagctgcctgggctttgtctaacctaatcaaggatttcagtttcatgaaaatgaagatctgagaactatggcaaatactctaattgacaagtattttggagaggactatgggcttgatgaataatagtaggggtcagaatagtgagatccactgttgtttttgtccttataatgcatgccttgcattagccgcatctcaaatatggagccttcagtttcatgaaaatgaagatctgagaagtatggcaagtactttacttgacattgctgattgctgatcgatgattcattattgaaggccaataggatctgtattggtattattgaggtgtttgataaaattatcaagggcttgtggttgtacactttccgtggccctttttgtgagagtacatacacgttagactgaaatgtaaatttttgtttgtaattctgttccagttctctttgcac

SEQ ID NO: 23934 - protein, 137 aa, Glycine max
MLTDEEQSILESQTLAAVENLKSALAFQGKGAVKKRVGALQELRRLLSRSEFPPVESAINAGAVPLLMQCLSFGSPEEQVLEAAWCLTNIAAGNPEETEALLPALPLLITHLGEKSYPPVAEQCAWRWEMWLVKVKS

SEQ ID NO: 23935 - protein, 73 aa, Glycine max
MLELYPCLCSAFHLVPQKNRCLRLLGVSQILLQGIQKKQRLCCLHCPCLLLILGKRATHRLLNSVLGAGKCGW

SEQ ID NO: 23936 - protein, 70 aa, Glycine max
MQCLSFGSPEEQVLEAAWCLTNIAAGNPEETEALLPALPLLITHLGEKSYPPVAEQCAWRWEMWLVKVKS

SEQ ID NO: 23937 - DNA, 1235 bp, Glycine max
agaaagggtttgcagtatgggttcttctgcagtttgtcagtccttcatgattcactgtcttttagtctcctcattttcttcatcatttttctccttgcagagcttcctccaagacctttactagagaaactggctaaggagcttcgatggcgattggtaactagctcattctttggttcaaggtgtcatgttattgatacaaggactataattatgcttctttgtcatattcttatttctagggtcttcgcctattcaacctggatattatccgtgagtatggaacaagagatcacttttacgtcattgacataaactacttccctggtaagacgatatattgaagatcttgtttacttaaatcccatatcacactaatagagagtatgccaggttatttggtatgcccaatgagatttcacctgtgttgacaagagtatatgtcagaagagttcgtttataaaaatttcttttgatattctactttgagttgacatataatcctctcaccttcccatcatcatctcaaaaaaaaaaaaaaaaaaaaatctttcaccttcctatctggtatttgtatgactttcttttacttgttaacacaatgttaagtcttcaatcttgtgagaatattaacagttgcctttgaaattggtattaaaaatattaagagttcatctaattttgtatgactttcgtttaaaacttctgtattggttttaaaattgttgcagggtatggcaaaatgccagaatatgaacacatatttacagacttcctgttgagcctggggcaggggaattacaagaaaaaataggctaaagtaactctttccagccctttgatttatgtgcctctcataacgtaagcccgttcgcctctcagtatgaagctcaaaactatggctgttggaaagtatcttagaaagcattagtgataataacatcaactataaagacttaatgtttcgtgaacttcgacctgtacagaaaaactgttagtattttgttgtgcgggaactttctgctgtccttccaaagtaacaaaatgttgtttcaaatcctgaagttctatagctgggtagcttgatgaccgaaggggtcaagtctgcaatttgaaggatttgtattcgccccgcaatggatgttgatatgaccatgttggataagttgaaggatttcaaatgtactgaccgttctttgctgtatatatggcataaattcttgacagtaggaatc

SEQ ID NO: 23938 - protein, 104 aa, Glycine max
RKGLQYGFFCSLSVLHDSLSFSLLIFFIIFLLAELPPRPLLEKLAKELRWRLVTSSFFGSRCHVIDTRTIIMLLCHILISRVFAYSTWILSVSMEQEITFTSLT

SEQ ID NO: 23939 - DNA, 1616 bp, Glycine max
ggtttttctgtcttaaggcttcattcattgagcttttctcttcttatttctatttctctctccccaaaagcttttgtttctctctgcttatggaaggcccttaaactttcgctctctctgcttcactttctcgcttttgcattttcttgtgaaaaaaaaaaatcctcagaacaaaaataggtcttcttcttctctgatctaccaaagcttcaaattctccttagtttggtttgtctgtgagtttggagtgtaatgtcgccgccgacgctggtaacggaggaggaggggcggagcaccgtggcgtccgattcttcgcaatccttggactgtttctctcagaatggtgctggattgaaagaacggaattacttagggttgtctgattgctcatcagtggatagctgtgcctctactgtgccaagcttgtgtgatgagaaaaaggagaacatgaatttgaaggctacagagttgaggcttggtcttcccggattccaatcgcctgaaagggaaccggatcttttctctttaagctcaccaaagcttgatgagaagccactcttccctttgcttcctactaaagacgggatttgctcgtcggggcagaaagctgttgtttctggcaacaaaagaggttttgctgataccatggatgggttttctcaggggaagtttgctggtaatacagggatgaacgcggtgctatcacctagaccttctggagctcaaccttctgctatgaaagaaacaccaagcaaattgtcagaacgtccttgctcaactaataatggaaccggtcataaccatacaggtgcttctatcagtggcagcgcaccggcttctaaggcacaggttgttggttggcctcctattagatcatttaggaaaaactcaatggctaccaccactaacaagaacaatgatgaagtcgatggaaaaccaggtgttggcgcactctttgtgaaggtcagcatggatggtgctccgtatcttaggaaggtagatctaagaagttatacaacatatcaggaactatcttctgcccttgagaagatgttcctaagctgttttaccctaggtcagtgtggttcccatggagctccaggaagagaaatgttgagtgagagcaagctgagggatcttctgcatggttctgagtatgttctcacttatgaagataaagatggagattggatgcttgtaggggatgtgccatgggaaatgttcattgagacttgcaaaaggctgaaaattatgaagggttctgatgccattggtttagctcccagggccatggaaaagtctaaaagcaggatttagggtatcctggatttcctcttttgtctaatcaagtgtttattgttggatcctccggaatgggaaaagcaaaggatgatgactgaaatcctggcattggtggtttaacgcccttccacttatttgttttcaagtccctcaagagtttgtcatggtcctgtgttaatttgttaccactgtaatatcatatgaaagctacaatgaaatattagtatttgtggagtctgtaatcattataggaatccgtttgttttggaagaattgaacatctgttacagccgccaccatacggttctaacact

SEQ ID NO: 23940 - protein, 354 aa, Glycine max
MSPPTLVTEEEGRSTVASDSSQSLDCFSQNGAGLKERNYLGLSDCSSVDSCASTVPSLCDEKKENMNLKATELRLGLPGFQSPEREPDLFSLSSPKLDEKPLFPLLPTKDGICSSGQKAVVSGNKRGFADTMDGFSQGKFAGNTGMNAVLSPRPSGAQPSAMKETPSKLSERPCSTNNGTGHNHTGASISGSAPASKAQVVGWPPIRSFRKNSMATTTNKNNDEVDGKPGVGALFVKVSMDGAPYLRKVDLRSYTTYQELSSALEKMFLSCFTLGQCGSHGAPGREMLSESKLRDLLHGSEYVLTYEDKDGDWMLVGDVPWEMFIETCKRLKIMKGSDAIGLAPRAMEKSKSRI

SEQ ID NO: 23941 - protein, 289 aa, Glycine max
MNLKATELRLGLPGFQSPEREPDLFSLSSPKLDEKPLFPLLPTKDGICSSGQKAVVSGNKRGFADTMDGFSQGKFAGNTGMNAVLSPRPSGAQPSAMKETPSKLSERPCSTNNGTGHNHTGASISGSAPASKAQVVGWPPIRSFRKNSMATTTNKNNDEVDGKPGVGALFVKVSMDGAPYLRKVDLRSYTTYQELSSALEKMFLSCFTLGQCGSHGAPGREMLSESKLRDLLHGSEYVLTYEDKDGDWMLVGDVPWEMFIETCKRLKIMKGSDAIGLAPRAMEKSKSRI

SEQ ID NO: 23942 - protein, 223 aa, Glycine max
MDGFSQGKFAGNTGMNAVLSPRPSGAQPSAMKETPSKLSERPCSTNNGTGHNHTGASISGSAPASKAQVVGWPPIRSFRKNSMATTTNKNNDEVDGKPGVGALFVKVSMDGAPYLRKVDLRSYTTYQELSSALEKMFLSCFTLGQCGSHGAPGREMLSESKLRDLLHGSEYVLTYEDKDGDWMLVGDVPWEMFIETCKRLKIMKGSDAIGLAPRAMEKSKSRI

SEQ ID NO: 23943 - DNA, 1524 bp, Glycine max
atttccaactccctgatttggaaaagaatcttccagtcaggatttcttcccctgcgctttctattgtaagtcatgatgctgcaaagaatgatttggatcagaaaagcgttgaagataatttaggggaccgttgtagggaaattaggtgcatcgagtcagatgatctaaattcaaacacacatacattctctactgcatcatctccagccgtctcaggattaactgatgttgataatacagacaaagaaaatctagatttgtgctcatctgtgttaaagaacaacaaagaagtagcggatctagttcttccttctttgttcttgcaagaacactttgttcttccctcttcagagaaaatatctccaggtctgacacaaagtagtgcatctagttccaaaaccacgaaattaaccagaagcagaagttgtaaagcaagtctcatgagatatccatcttcagattggtttgaccaggaagaaatgattcagaacgcacccccaataggaagcgaaaaagatttcacaagaagacccgagggccttcaaaggaagacttgtacacatcattctaatgccaatgctaagaggttatcatgggctggctacgcgaattctctgggaagagcttctgatgtacagaatatgaaatcctccatcgataatggaagttataaagacaattctttaccccagggaagaaacggaaagaatgatcttgaaagttcaaatctgcaagggaaccctgaggttcaagagacaggaatggagtccaaaattaatacaaagaagttcaaagatgttggtttggacccattgcaatctgaggaagaaaaacagttggaatggccttcagaattcaagcggctgcagaaagagattattgaactctggaatgcttgtaatgtttcattggttcacaggacttactttttccttctgttcaaaggagacccttcagattctatctatatggaagtagagcgaagaaggctgttctatctcaagcaaaattttgaccatgggaatcagactgtggaagatggacttacccctgaatcaagtaagaggcatcttagaggagagagacagatgttgagtaggcaaatgcagaagaagctgtcaagatctgaaagagagagcctatacattaaatggggaattcgtttgagttcaaagaatagaaggttgcacttggcccattgcttgtggtcagaaacagaagacttagagcacattagagagagtgctaccattgttgcaaagttggttggttcagtagagccagatcaggcttttaaggagatgtttgtactcaactttgccccaaggcgcacgagaaagaaatcgtttggttggacagccagtatgaagaatattttgtgaggttgatttgattctctaagcgaattattttataggaagtttgatttggccatgtaaaaaatccccctttggctccttttaacataggacattcttttttttccaccttttacaaacaatcttatctctgttttatgtttct

SEQ ID NO: 23944 - protein, 459 aa, Glycine max
FQLPDLEKNLPVRISSPALSIVSHDAAKNDLDQKSVEDNLGDRCREIRCIESDDLNSNTHTFSTASSPAVSGLTDVDNTDKENLDLCSSVLKNNKEVADLVLPSLFLQEHFVLPSSEKISPGLTQSSASSSKTTKLTRSRSCKASLMRYPSSDWFDQEEMIQNAPPIGSEKDFTRRPEGLQRKTCTHHSNANAKRLSWAGYANSLGRASDVQNMKSSIDNGSYKDNSLPQGRNGKNDLESSNLQGNPEVQETGMESKINTKKFKDVGLDPLQSEEEKQLEWPSEFKRLQKEIIELWNACNVSLVHRTYFFLLFKGDPSDSIYMEVERRRLFYLKQNFDHGNQTVEDGLTPESSKRHLRGERQMLSRQMQKKLSRSERESLYIKWGIRLSSKNRRLHLAHCLWSETEDLEHIRESATIVAKLVGSVEPDQAFKEMFVLNFAPRRTRKKSFGWTASMKNIL

SEQ ID NO: 23945 - protein, 313 aa, Glycine max
MRYPSSDWFDQEEMIQNAPPIGSEKDFTRRPEGLQRKTCTHHSNANAKRLSWAGYANSLGRASDVQNMKSSIDNGSYKDNSLPQGRNGKNDLESSNLQGNPEVQETGMESKINTKKFKDVGLDPLQSEEEKQLEWPSEFKRLQKEIIELWNACNVSLVHRTYFFLLFKGDPSDSIYMEVERRRLFYLKQNFDHGNQTVEDGLTPESSKRHLRGERQMLSRQMQKKLSRSERESLYIKWGIRLSSKNRRLHLAHCLWSETEDLEHIRESATIVAKLVGSVEPDQAFKEMFVLNFAPRRTRKKSFGWTASMKNIL

SEQ ID NO: 23946 - protein, 300 aa, Glycine max
MIQNAPPIGSEKDFTRRPEGLQRKTCTHHSNANAKRLSWAGYANSLGRASDVQNMKSSIDNGSYKDNSLPQGRNGKNDLESSNLQGNPEVQETGMESKINTKKFKDVGLDPLQSEEEKQLEWPSEFKRLQKEIIELWNACNVSLVHRTYFFLLFKGDPSDSIYMEVERRRLFYLKQNFDHGNQTVEDGLTPESSKRHLRGERQMLSRQMQKKLSRSERESLYIKWGIRLSSKNRRLHLAHCLWSETEDLEHIRESATIVAKLVGSVEPDQAFKEMFVLNFAPRRTRKKSFGWTASMKNIL

SEQ ID NO: 23947 - DNA, 1715 bp, Glycine max
atcttccttccaagaatgagtttattcctagtgacttttctatacgtgctagtgacacctgtgttgatgattttgcaaattcaacatctcctagatgtataattgatgaagcattaataaaattatggtacaaaccggatagcactttcaaagttcctcgtgccaatacatattttcgaattaccatgaagggtggctatgctgacgtgaagagttgtgtattatccgaattgtttattcatcttcttaaagatgagttgaatgaaatcacatatcaggctagtattgccaagttagaaacttctgtcacttatgttggtgacatgcttgagctgaaggtctatggtttcaatgaaaagcttcctgttttgttatctaaattcttttcagtatctaaatctttcgtgccaactgatgatcggtttaaggtaataaaagaagacatgaagagagctttaaagaacaccaacatgaagcctctaagccattcaacatatttgagattgcaagttttgtgtgagagtttttatgacgctgatgagaagctgtgttatctaaatgatttgtttcttgatgatctgaaggcatttatccctgggcttctctcccagatatacgtggagggtctatgccatggaaatctgtcaaaagaagaagcaattaacatatcaaaaatatttaagatgagttttccagttaatccgctccctattgagttgagacatgctgagcgtgttatttgcctcccatccagtgccaatttagttagagatgtcaatgtgaagaataagtcagaaaaaaactcagtggttgagctttattttcaaattgatcaagattttggtctgggttcaatcaaattgaaagctttaattgatctttttgatgaaattgtggaggagccatttttcaatcaactgaggacaaaagagcagcttggttatgttgttgaatgcagcccgcgagtaacataccgtgtctttgggttttgtttctgcgtccagtcatctgagtacaacccagtttacttgcagggtagaattgaaaacttcttaaatggcctggaagaattgctggatggacttgatggtgattcctttgagaattacaaaagtgggttagtggcaaagctgctggagaaagacccttcactcacatatgaaagcaatagattgtggaaccaaattgttgaaaaaaggtacatctttgacttgtcaaagaaagaagcagaagaattgaagaacataagtaagcatgatattgttgaatggtacaagacttacttgaaaccgtcgtctccaaagtgtcggcaactacttattcggctatggggttgcaacacagacttgaaagaagctgaagcactacccaaatctgtgctggccattacagatccagcagcttttaagatgcaatccaagttttatccaagtttttgttaacttcgaagatgtagtttgttcaactgttgaaatgacaactagaaccagagatagtcttcatttctcatttattggttgtagtcttgtcagactgcaggggtaccatccatatacttataatgaaactaaagtttttgaggggaatacagaatttgttatctggagtttttaaggaggggaatacagaatttgttacctggaaccacagattttgttgatgtaaattacatttatttgggaaatattctttttatccacaagttattataggtc

SEQ ID NO: 23948 - protein, 479 aa, Glycine max
LPSKNEFIPSDFSIRASDTCVDDFANSTSPRCIIDEALIKLWYKPDSTFKVPRANTYFRITMKGGYADVKSCVLSELFIHLLKDELNEITYQASIAKLETSVTYVGDMLELKVYGFNEKLPVLLSKFFSVSKSFVPTDDRFKVIKEDMKRALKNTNMKPLSHSTYLRLQVLCESFYDADEKLCYLNDLFLDDLKAFIPGLLSQIYVEGLCHGNLSKEEAINISKIFKMSFPVNPLPIELRHAERVICLPSSANLVRDVNVKNKSEKNSVVELYFQIDQDFGLGSIKLKALIDLFDEIVEEPFFNQLRTKEQLGYVVECSPRVTYRVFGFCFCVQSSEYNPVYLQGRIENFLNGLEELLDGLDGDSFENYKSGLVAKLLEKDPSLTYESNRLWNQIVEKRYIFDLSKKEAEELKNISKHDIVEWYKTYLKPSSPKCRQLLIRLWGCNTDLKEAEALPKSVLAITDPAAFKMQSKFYPSFC

SEQ ID NO: 23949 - protein, 418 aa, Glycine max
MKGGYADVKSCVLSELFIHLLKDELNEITYQASIAKLETSVTYVGDMLELKVYGFNEKLPVLLSKFFSVSKSFVPTDDRFKVIKEDMKRALKNTNMKPLSHSTYLRLQVLCESFYDADEKLCYLNDLFLDDLKAFIPGLLSQIYVEGLCHGNLSKEEAINISKIFKMSFPVNPLPIELRHAERVICLPSSANLVRDVNVKNKSEKNSVVELYFQIDQDFGLGSIKLKALIDLFDEIVEEPFFNQLRTKEQLGYVVECSPRVTYRVFGFCFCVQSSEYNPVYLQGRIENFLNGLEELLDGLDGDSFENYKSGLVAKLLEKDPSLTYESNRLWNQIVEKRYIFDLSKKEAEELKNISKHDIVEWYKTYLKPSSPKCRQLLIRLWGCNTDLKEAEALPKSVLAITDPAAFKMQSKFYPSFC

SEQ ID NO: 23950 - protein, 372 aa, Glycine max
MLELKVYGFNEKLPVLLSKFFSVSKSFVPTDDRFKVIKEDMKRALKNTNMKPLSHSTYLRLQVLCESFYDADEKLCYLNDLFLDDLKAFIPGLLSQIYVEGLCHGNLSKEEAINISKIFKMSFPVNPLPIELRHAERVICLPSSANLVRDVNVKNKSEKNSVVELYFQIDQDFGLGSIKLKALIDLFDEIVEEPFFNQLRTKEQLGYVVECSPRVTYRVFGFCFCVQSSEYNPVYLQGRIENFLNGLEELLDGLDGDSFENYKSGLVAKLLEKDPSLTYESNRLWNQIVEKRYIFDLSKKEAEELKNISKHDIVEWYKTYLKPSSPKCRQLLIRLWGCNTDLKEAEALPKSVLAITDPAAFKMQSKFYPSFC

SEQ ID NO: 23951 - DNA, 1540 bp, Glycine max
gtagtcagaaggaggaggtactgctgtctgaggagacaaaagttcacagagtccagttatggacagagataagatcatctcttcaaactattgaggatatgatgagtgttcgtgtaaagaagaacaccggatcagtaaaagatgaaagagtcaagaaaggtttgttaaaagatgaacagattattgaaactgcaaaatcaccatcacattctgatgatgttaaatcaccaaaaggagcagcatgtgaggaagactctgaggaggagttctatgatgttgagaggttagatcctagtccggatatgcctgttgttgatggcacaaatgccttggcaaatggtattactgctgatgctgcacaaccagaggcttcatttccttggaaagaagagttggaagttctggttcgtggtggagtaccaatggcattgaggggagagctttggcaagcttttgttggtgtaaaagcaaggcgggtggagaagtattatcaggatctgctatcctcagaaagtgattctgaagttaaaactgatcagcaaagcatggagtcaactgacagtaatgggaaaacaggtgcagattttggacatatgccagaaaaatggaaaggagtcaaaggacagattgagaaggatctgcctcgaacatttcctggtcatcctgctttggacgaggatggtagaaatgctttgagacgattacttactgcatatgctcgacataacccctcagttggttactgccaggccatgaatttttttgctggcttattgctacttttgatgcctgaagaaaatgccttttggaccttaatgggcattttagatgattattttgatggctattattcagaggaaatgatagaatctcaggtggatcaacttgtttttgaggagttgccaatcatctagattatctgggagtgcaggtggcatgggttactggaccatggttcctgtccatttttgtgaacatgcttccttgggaaagtggtcagttcttcgagtgtgggatgtgcttctttttgaaggaaaccgagtcatgctctttagaactgcagttgctttaatggagctatatggtcctgcgttggtaacaacaaaggatgctggagatgcagttactttacttcagtcgttggctggctccacatttgacagcagtcagctggtactgacagcttgcatgggttaccaaaatataaatgagactcgtttgcagcagctgaggaataaacatcggccagctgtaatagcttccgttgaagaaagatcaaaagggcttaaagcttggaaggattctcagggactagcatcaaagctagctgatatgcaagtgcttggcaatttatctcgtacagaatctggttccactaatgcagatgaaattctgattagtctgactggagagggtgagatagattccgttccagatcttcaagagcaggttgtctggttgaaggttgaactttgtagattactagaggagaaaagatcagccattcttagagcggaggagctggaaacagcattaatgg

SEQ ID NO: 23952 - protein, 303 aa, Glycine max
SQKEEVLLSEETKVHRVQLWTEIRSSLQTIEDMMSVRVKKNTGSVKDERVKKGLLKDEQIIETAKSPSHSDDVKSPKGAACEEDSEEEFYDVERLDPSPDMPVVDGTNALANGITADAAQPEASFPWKEELEVLVRGGVPMALRGELWQAFVGVKARRVEKYYQDLLSSESDSEVKTDQQSMESTDSNGKTGADFGHMPEKWKGVKGQIEKDLPRTFPGHPALDEDGRNALRRLLTAYARHNPSVGYCQAMNFFAGLLLLLMPEENAFWTLMGILDDYFDGYYSEEMIESQVDQLVFEELPII

SEQ ID NO: 23953 - protein, 271 aa, Glycine max
MMSVRVKKNTGSVKDERVKKGLLKDEQIIETAKSPSHSDDVKSPKGAACEEDSEEEFYDVERLDPSPDMPVVDGTNALANGITADAAQPEASFPWKEELEVLVRGGVPMALRGELWQAFVGVKARRVEKYYQDLLSSESDSEVKTDQQSMESTDSNGKTGADFGHMPEKWKGVKGQIEKDLPRTFPGHPALDEDGRNALRRLLTAYARHNPSVGYCQAMNFFAGLLLLLMPEENAFWTLMGILDDYFDGYYSEEMIESQVDQLVFEELPII

SEQ ID NO: 23954 - protein, 270 aa, Glycine max
MSVRVKKNTGSVKDERVKKGLLKDEQIIETAKSPSHSDDVKSPKGAACEEDSEEEFYDVERLDPSPDMPVVDGTNALANGITADAAQPEASFPWKEELEVLVRGGVPMALRGELWQAFVGVKARRVEKYYQDLLSSESDSEVKTDQQSMESTDSNGKTGADFGHMPEKWKGVKGQIEKDLPRTFPGHPALDEDGRNALRRLLTAYARHNPSVGYCQAMNFFAGLLLLLMPEENAFWTLMGILDDYFDGYYSEEMIESQVDQLVFEELPII

SEQ ID NO: 23955 - DNA, 1103 bp, Glycine max
aatctctgtgctgcttcgtctatccctcccaccgtcctcggctccccggggatcccgccgtcgccgccgccggcccgcgttggtgccgccctggctctttcaacttggaagggctgccaccaccgcctcctccctccgcgccagtccccgcaagcgctcctcggcacccctcctcctgccgtcggatcccctcaccgtagcatctgattggcagtggacagggcaagatgtctggcggcaatcctgcaggtgtggataacactttccgtaggaaatttgacaaggaggagtacttggagcgagctcgacagagagagcgggatgagaaggatgaagcccggagaggcaaggacaggggccctcctgtgcaaagacagcctttgaagcatagggattatgaagttgatcttgagtctcgtcttggtaaaacccaggtggtaaccccaatcgcacctttgagtcagcaggctggatactactgttcagtatgtgagtgtgttgttaaagattcagccaactatttggatcatataaatggcaagaagcatcagagagcattgggcatgtctatgcgtgttgaaagggcgtcactcgaacaggttcaaaaacggtttgaggcacttaagaagaggaaggacccagccagcttcagtgaacaagatttggatgagagaatatggaagcagcagcaagaggaggaggagaagaagcgtcaacgcagagaaaagaagaaagaaaagaagaaagagcaggctggccagaatgaacctgaggacattgaccctgatgttgctgctatgatgggcttcggcgggttcggcacctcttcaaagaagtgaaaattgctgcttcaggtggcgccattccgttggtctgtggctgctgaagacgtcgccgcggctccgtgcacctggatctcagcaaaggccagacacagctctgatgcagtgttgcgagtagtgtactggagccttgttgcaaccgctacctgataatgtcagcgaaacgatacttaatgctggaacaattcagcttctgtaatcggtgaccggtgatcatttgagaagcatttcatctttgagaaatgagatgactaattcgtc

SEQ ID NO: 23956 - protein, 203 aa, Glycine max
MSGGNPAGVDNTFRRKFDKEEYLERARQRERDEKDEARRGKDRGPPVQRQPLKHRDYEVDLESRLGKTQVVTPIAPLSQQAGYYCSVCECVVKDSANYLDHINGKKHQRALGMSMRVERASLEQVQKRFEALKKRKDPASFSEQDLDERIWKQQQEEEEKKRQRREKKKEKKKEQAGQNEPEDIDPDVAAMMGFGGFGTSSKK

SEQ ID NO: 23957 - DNA, 1258 bp, Glycine max
aaacacagttaaagacgcacaagaaaacatctcgctcaacaccaccaacacttcggatctacgtttccactctccgaacatcaaaaaaggaaagaaaaaccgatttacagcgacaacaacgaacgaacgatttctcgaagcgctctcaaaatggcgcgtgcaccctttacttcattccccttcgtcctcattacccttctctcaattctccacctttcgcactgcaagaccctcaagcgtgacgttaaggctttgaacgagatcaaggcttcgcttgggtggagagtggtgtatgcgtgggtcgatgatgatccatgtggagatggggatcttcctccttggtctggtgtcacgtgttccactgtcggtgattatcgtgttgttaccgagcttgaggtgtatgcggtgtcgattgttggaccttttcccactgctgttaccagcttgttggatcttacacggcttgatcttcacaataacaagctgacagggcctattcctcctcaaattggacggttgaagcgccttaaaatattaaatttgaggtggaacaaactacaggatgcaattcctccaaaaattggcgagcttaaaagtttaacacatctgtacctaagcttcaacaatttcaagggagaaattccgaaggagctagcaaatcttcaagaccttcgctatctttatctccatgaaaaccgtttaactggaagaataccaccagaattgggcacactgcaaaatcttcggcacttggatgctggtaacaatcatttagtaggtaccataagggaactcattcgtattgaaggttgctttcctgcactacgcaatctgtatctaaacaataattattttactggaggaatgcctgcacagcttgctaacttaaccagtcttgagatcttgtacctatcctacaacaaaatgtcaggagttataccatcttccgttgctcgtattcctaaattgacatacttgtacttggatcacaatcagttttcagggagaattcctgaacccttttacaagcatccatttttgaaagaaatgtacattgagggaaatgcattccggcccggtgtcaatcccattggcttccataaagtgcttgaagtttctgatggagacttccttgtttaatgaaagctctaaatatttataattttttctcttcaggaagtgcacttgtataattattgaaacaattgttcctctaattatctcaatgaaatagccaaataggtaatccaattttgtc

SEQ ID NO: 23958 - protein, 329 aa, Glycine max
MARAPFTSFPFVLITLLSILHLSHCKTLKRDVKALNEIKASLGWRVVYAWVDDDPCGDGDLPPWSGVTCSTVGDYRVVTELEVYAVSIVGPFPTAVTSLLDLTRLDLHNNKLTGPIPPQIGRLKRLKILNLRWNKLQDAIPPKIGELKSLTHLYLSFNNFKGEIPKELANLQDLRYLYLHENRLTGRIPPELGTLQNLRHLDAGNNHLVGTIRELIRIEGCFPALRNLYLNNNYFTGGMPAQLANLTSLEILYLSYNKMSGVIPSSVARIPKLTYLYLDHNQFSGRIPEPFYKHPFLKEMYIEGNAFRPGVNPIGFHKVLEVSDGDFLV

SEQ ID NO: 23959 - DNA, 1286 bp, Glycine max
tacttcgccgatggcctcgagaaacggttagctgctgggacaccaaagttcatttcctttcagtcagcatctgccgcagatatgttgaaagcataccgagtgtatatctcggcatcaccatttctaaggatgtctaatttcttggcaaaccgcactattctgaagctagcgcaaaatgaaagcagtcttcacattattgactttgggattagctatggtttccagtggccttgcctcatccaacggctttcagagaggccaggcgggcctccaaagcttcttatgacaggaattgatcttccccagccgggatttaggccggcggaaagggttgaggagacggggcggtggctggagaagtactgcaagaggtttggagtcccatttgagtacaattgccttgcacagaaatgggagactataagacttgaggacctcaaaattgataggagtgaagtaactgtggttaactgtttgtacagattgaagaacctttccgatgaaaccgtgactgcaaactgtccaagagatgctttgctgaggttgatcaggaggatcaatccaaacatcttcatgcacggggtcgtcaatggcacttacaatgcaccatttttcgtgacaaggttcagggaagcactcttccacttctcatcattgtttgacatgtttgaagttaacgtgcctcgtgaagatccatctaggcttatgattgagaaaggggtgttcggaagggatgcaatcaatgtgatagcatgtgagggggcagagagggttgaaaggccagaaacctacaagcagtggcaagttaggaaccagagagcagggttcaagcaacttccattggccccagagcatgtgaatagagtgaaggaaatggtgaagaaggaacatcataaagattttgtggttgatgaggatggcaagtgggttttgcaaggatggaaagggcgaattctttttgctgtttcctcttgggttcctgcttgaggaatgaccaactcctaacccactcattggcaaggaaaattgttttaggtgtaaggtgcactaagggtatatttatccttgaatagaagtgaatcatgatcatattttgtttctatttgaatagtgaaaataccctcttatatgtgcacttttatgaacaagagtagaagacttaaactcctctgaaatcactgattttagaaggatatctaatatccacattaatgtactagttttctagtgatgcctaggagcaacatagaaagaagttggtagttattataaatcttcatttgctt

SEQ ID NO: 23960 - protein, 328 aa, Glycine max
YFADGLEKRLAAGTPKFISFQSASAADMLKAYRVYISASPFLRMSNFLANRTILKLAQNESSLHIIDFGISYGFQWPCLIQRLSERPGGPPKLLMTGIDLPQPGFRPAERVEETGRWLEKYCKRFGVPFEYNCLAQKWETIRLEDLKIDRSEVTVVNCLYRLKNLSDETVTANCPRDALLRLIRRINPNIFMHGVVNGTYNAPFFVTRFREALFHFSSLFDMFEVNVPREDPSRLMIEKGVFGRDAINVIACEGAERVERPETYKQWQVRNQRAGFKQLPLAPEHVNRVKEMVKKEHHKDFVVDEDGKWVLQGWKGRILFAVSSWVPA

SEQ ID NO: 23961 - protein, 301 aa, Glycine max
MLKAYRVYISASPFLRMSNFLANRTILKLAQNESSLHIIDFGISYGFQWPCLIQRLSERPGGPPKLLMTGIDLPQPGFRPAERVEETGRWLEKYCKRFGVPFEYNCLAQKWETIRLEDLKIDRSEVTVVNCLYRLKNLSDETVTANCPRDALLRLIRRINPNIFMHGVVNGTYNAPFFVTRFREALFHFSSLFDMFEVNVPREDPSRLMIEKGVFGRDAINVIACEGAERVERPETYKQWQVRNQRAGFKQLPLAPEHVNRVKEMVKKEHHKDFVVDEDGKWVLQGWKGRILFAVSSWVPA

SEQ ID NO: 23962 - protein, 285 aa, Glycine max
MSNFLANRTILKLAQNESSLHIIDFGISYGFQWPCLIQRLSERPGGPPKLLMTGIDLPQPGFRPAERVEETGRWLEKYCKRFGVPFEYNCLAQKWETIRLEDLKIDRSEVTVVNCLYRLKNLSDETVTANCPRDALLRLIRRINPNIFMHGVVNGTYNAPFFVTRFREALFHFSSLFDMFEVNVPREDPSRLMIEKGVFGRDAINVIACEGAERVERPETYKQWQVRNQRAGFKQLPLAPEHVNRVKEMVKKEHHKDFVVDEDGKWVLQGWKGRILFAVSSWVPA

SEQ ID NO: 23963 - DNA, 2012 bp, Glycine max
ataccaagatgctcatgttccagatggttgcctccctaatgttgtgcttgataatggtgtgtattatgctcatggaaagtgttggcttgacatctttgacgccataaatcgagctaagcgtttgatttacattacggggtggtcggtgtggcacaaagttaggctggtaagggatcctggaaatccatcaaagttcaccctgggtgatattctgaggtctaagtcatcggagggagtaagagtgcttctccttatttgggatgaccctacatcaagaagcattctaggttacaaagtggatggtgtgatggcaactcatgatgaggaaactagacgatttttcaagcactcttctgtgcacgtgctgctttgtcctcgcattgctgcaaaacgtcatagctgggccaaacaaaaggaagttggaacaatatatacacatcatcagaaaactgtaattgtggatgctgatgccggaaataaccaaagaaaaatagtagcatttgttggcggacttgatttgtgtgatgggcgatatgatactccccaccatcctctgtttaggacgctgcagacactgcataaggatgactatcacaaccctactttcacgcttacgatattttgaaaaactttgaggagcgctggttaagagccgcaaaaccaaaagggattcaaaagttgaggagttcatacgatgatgcgttgcttaagctagacagaatcggagatattattagttcatctaatgctcctagtgtcggtgatgataatcctgagtcatggcatgttcagatattccgttcaattgattcaagttctgtcaaggggtttccaaaggagccaaaagatgcatcaagcatgaatctagtatgtgggaagaatgtgctgattgacatgagcatacatacagcatatgtaaaggccattcgtgctgcacaacattacatttatatagagaatcaatatttcattgggtcttcatataattggagtcaacataaagaccttggtgctaataatttaattcctatggaaattgcgctgaagattgctgcaaagataagggcaaatgagagatttgcagtgtacattgttattccaatgtggccagagggtgttccaactggtgctgccacccaaagaattctattttggcagcataaaacaatgcaaatgatgtatgagacaatttacaaggctttggttgaagttgggcttgaaacagcattctctccacaagactatttgaactttttttgtcttggcaatagggaggccatagatatgtacgagaatatcactgtgtctggaactcctccgccagcaaatagtccacaagcatttagtagaaacaatcgccgtttcatgatttatgttcattcaaaaggcatgatagttgatgatgaatatgtcatattggggtctgcaaacatcaaccagcgctctatggaaggaacaagggacaccgagattgcaatgggtgcgtaccaacctcatcatacctgggcaagaagccagtatcatcctcgtgggcaaatccatggatataggatgtcactttgggctgaacatacgggtacgattgaagactgcttcttacaaccagagagccttgaatgtgttagtaggattagaacaatgggtgagctgaactggaagcaatttgcatcaaatgatgtaacagaaatgacagggcatctgctcaagtacccggtagaagtcgatcgaaagggtaaggtaagatccctcccgggccacgaagagtttccagatgtgggaggaaagattgtaggatcattcatagccattcaggagaatctaaccatttgattacttttttacattcacgttgctggccattaggataggaataggatgaatgtaaatcactggtgtgcatgtaacttaattaaatgataactttttttgggccaatcatcattcatataaataatcacacacattaacatttaacatttgtgaataatctacacaagagaaatcactttggc

SEQ ID NO: 23964 - protein, 323 aa, Glycine max
MNLVCGKNVLIDMSIHTAYVKAIRAAQHYIYIENQYFIGSSYNWSQHKDLGANNLIPMEIALKIAAKIRANERFAVYIVIPMWPEGVPTGAATQRILFWQHKTMQMMYETIYKALVEVGLETAFSPQDYLNFFCLGNREAIDMYENITVSGTPPPANSPQAFSRNNRRFMIYVHSKGMIVDDEYVILGSANINQRSMEGTRDTEIAMGAYQPHHTWARSQYHPRGQIHGYRMSLWAEHTGTIEDCFLQPESLECVSRIRTMGELNWKQFASNDVTEMTGHLLKYPVEVDRKGKVRSLPGHEEFPDVGGKIVGSFIAIQENLTI

SEQ ID NO: 23965 - protein, 311 aa, Glycine max
MSIHTAYVKAIRAAQHYIYIENQYFIGSSYNWSQHKDLGANNLIPMEIALKIAAKIRANERFAVYIVIPMWPEGVPTGAATQRILFWQHKTMQMMYETIYKALVEVGLETAFSPQDYLNFFCLGNREAIDMYENITVSGTPPPANSPQAFSRNNRRFMIYVHSKGMIVDDEYVILGSANINQRSMEGTRDTEIAMGAYQPHHTWARSQYHPRGQIHGYRMSLWAEHTGTIEDCFLQPESLECVSRIRTMGELNWKQFASNDVTEMTGHLLKYPVEVDRKGKVRSLPGHEEFPDVGGKIVGSFIAIQENLTI

SEQ ID NO: 23966 - protein, 266 aa, Glycine max
MEIALKIAAKIRANERFAVYIVIPMWPEGVPTGAATQRILFWQHKTMQMMYETIYKALVEVGLETAFSPQDYLNFFCLGNREAIDMYENITVSGTPPPANSPQAFSRNNRRFMIYVHSKGMIVDDEYVILGSANINQRSMEGTRDTEIAMGAYQPHHTWARSQYHPRGQIHGYRMSLWAEHTGTIEDCFLQPESLECVSRIRTMGELNWKQFASNDVTEMTGHLLKYPVEVDRKGKVRSLPGHEEFPDVGGKIVGSFIAIQENLTI

SEQ ID NO: 23967 - DNA, 1649 bp, Glycine max
gaacaaagaaatcttcaatttgaattccaatgggtgaagagcgatccgagatagtgttcttcgatgtggagaccagcgttccgacccgggcggggcagggttttgcgcttctggaattcggcgccattttggtttgccccaggacgctcacggagctccgcgattactccactctcgtccgcccagccaacctctccgtcatcacccccttgtccgagcgctgcaacggcatcaacgccgccgctgtctccgccgcccctaccttcgccgacattgctcacctcgtttacgacctcctccacgggaggatttgggcggggcataacatcataagattcgactgtgttcggattagagatgcgtttgctgagattaatcagccaccgcctgaacctaaggggaccattgactcgctggttttgttgactcaaaagtttggtagaagagctggtgacatgaagatggctactcttgctacttattttgggcttggacgccagacacataggagcttggatgatgttcggatgaatcttgaagtcctcaaatactgtgcaacagttctattcttggagtcaagtctcccagatatattcactgcaaatagttgggtttcaccaaatgctactacaagaagccgcagtaatgggaaatctccatcacagtggggcttattaaatattaataaagattctgtattatcatctcctgcaactgaatccaaagacaaaaatcgtccaataatttcttttgcattgagcagcccaaaagggaatgtctcgaatattgcagatcctaacatggatcaatcagatccttttaacttgagcactcttgaggctgaaataaaaagagaatccattaagtcagatgtcgccttggaggaaaaacccatgcaagagtcaactgatttggcttcctcatcttctgtatctcagccttgcagcagctctattgctgttttggaacctgatggaatatgtataccttctattgatgcatctcttgttccatcttttcgtggcagtcaaagaatagagttactgcatgaaggtttcctgtttcagcttcattgtactgatttgaaagtgcggtttggaataaactcaaagttttttgatagtgctggccggccacgattgagttttgtggttgatccatcaccaagtctatgtaatgttcttgatgcatgtgaccgtgtagcacagaagttaaccgtggattctggtagcagctctgattggaggcctgttgttattaggaaagaaggcttcttcaactatcctactgtcagattacacatacctactgcagtagtggcagacattgctatttatgccacggaaatatatcaaagagaatcatctggaacagtgcaaagacttctcttcagtaagtttgatgctgcagaacttggttccttgttcatgcctgggacatttgttgatgccgtcttctccttagatccgtatgattatcagcagaatgcagggattaaattagttgccaaaaaattgatcattcatagcaaatagaaggaaattgataattaagtataggttagttattacatgctaaggttgatagattaaatattggttatgctgtaaagttagttccatttcatgtttgtagttcaattgaggttc

SEQ ID NO: 23968 - protein, 501 aa, Glycine max
MGEERSEIVFFDVETSVPTRAGQGFALLEFGAILVCPRTLTELRDYSTLVRPANLSVITPLSERCNGINAAAVSAAPTFADIAHLVYDLLHGRIWAGHNIIRFDCVRIRDAFAEINQPPPEPKGTIDSLVLLTQKFGRRAGDMKMATLATYFGLGRQTHRSLDDVRMNLEVLKYCATVLFLESSLPDIFTANSWVSPNATTRSRSNGKSPSQWGLLNINKDSVLSSPATESKDKNRPIISFALSSPKGNVSNIADPNMDQSDPFNLSTLEAEIKRESIKSDVALEEKPMQESTDLASSSSVSQPCSSSIAVLEPDGICIPSIDASLVPSFRGSQRIELLHEGFLFQLHCTDLKVRFGINSKFFDSAGRPRLSFVVDPSPSLCNVLDACDRVAQKLTVDSGSSSDWRPVVIRKEGFFNYPTVRLHIPTAVVADIAIYATEIYQRESSGTVQRLLFSKFDAAELGSLFMPGTFVDAVFSLDPYDYQQNAGIKLVAKKLIIHSK

SEQ ID NO: 23969 - protein, 359 aa, Glycine max
MKMATLATYFGLGRQTHRSLDDVRMNLEVLKYCATVLFLESSLPDIFTANSWVSPNATTRSRSNGKSPSQWGLLNINKDSVLSSPATESKDKNRPIISFALSSPKGNVSNIADPNMDQSDPFNLSTLEAEIKRESIKSDVALEEKPMQESTDLASSSSVSQPCSSSIAVLEPDGICIPSIDASLVPSFRGSQRIELLHEGFLFQLHCTDLKVRFGINSKFFDSAGRPRLSFVVDPSPSLCNVLDACDRVAQKLTVDSGSSSDWRPVVIRKEGFFNYPTVRLHIPTAVVADIAIYATEIYQRESSGTVQRLLFSKFDAAELGSLFMPGTFVDAVFSLDPYDYQQNAGIKLVAKKLIIHSK

SEQ ID NO: 23970 - protein, 357 aa, Glycine max
MATLATYFGLGRQTHRSLDDVRMNLEVLKYCATVLFLESSLPDIFTANSWVSPNATTRSRSNGKSPSQWGLLNINKDSVLSSPATESKDKNRPIISFALSSPKGNVSNIADPNMDQSDPFNLSTLEAEIKRESIKSDVALEEKPMQESTDLASSSSVSQPCSSSIAVLEPDGICIPSIDASLVPSFRGSQRIELLHEGFLFQLHCTDLKVRFGINSKFFDSAGRPRLSFVVDPSPSLCNVLDACDRVAQKLTVDSGSSSDWRPVVIRKEGFFNYPTVRLHIPTAVVADIAIYATEIYQRESSGTVQRLLFSKFDAAELGSLFMPGTFVDAVFSLDPYDYQQNAGIKLVAKKLIIHSK

SEQ ID NO: 23971 - DNA, 650 bp, Glycine max
acttatcatcaaattgatgaactagtgtgacattagagaagaaccaatttaaaagaagagcagcggagctaaagaggggagaggagagaggagaagagaagctaaagaaagaaaggagatgggagtggagaagcagttgttgaggtctggcacctgtccgaagccaattcccggtcagaacgtaaccgttcactgcactggtttcgggaagaacggtgacctttctcagaaattctggagcacaaaggatcctggccagaacccattcactttcaaaatcggccaaggttctgttatcaaaggatgggatgaaggtgtgcttggcatgcaaattggtgaagttgctcgtctccggtgctctccggattatgcttatggtgctggtggctttcctgcttggggaatacggcccaactctgtcttggaatttgaaatcgaagtcttaagtgcgcaatgaaaaccttggtagtctgtctctgtcctaaagaataaaattcttccattttcatggacttgtacaatggtatccccacattgtgacttgtgggtgatatctacagtggttgagttgtccaagtgaaatactaaataactttctgaatgatctcaaactctctaatattatattgggtagcctttactttcttctc

SEQ ID NO: 23972 - protein, 112 aa, Glycine max
MGVEKQLLRSGTCPKPIPGQNVTVHCTGFGKNGDLSQKFWSTKDPGQNPFTFKIGQGSVIKGWDEGVLGMQIGEVARLRCSPDYAYGAGGFPAWGIRPNSVLEFEIEVLSAQ

SEQ ID NO: 23973 - DNA, 1244 bp, Glycine max
acagaattgaacagcttgtttcgtggcattgacaatgctctccaagtgtatgcaaataatgtagttaatgagttggcaagcaaggaggaactgataccacctgtgcctattcttacacgatacaaaaaggaagctggaataaaggcttttgtaaagaaggaactgtttgatgctcgtgtgcctgaacctgatgaaacaaggcccagccaaattagtgtccttgcaactccaacactttgtgttcaattaaatacattatactatgcaattagtcatctgaataaattggaagacaacatctgggagcgatggacaagtaaaaggtcccaagaaaaactcataaagaaatcctttgatgacaagtccaaaagtttttcccaaaaggatacctttgagggaagtagaaaagttataaatgctgctatggaccgcatttgtgagtacacaggaactaaaattgtcttctgtgatttgagagttccatttatggacaacttatataaacccagtgtctctggatgtaggttggatgcacttatagaaccacttgatatggaacttagccaactttgtgatattgttgtggagcctctcagggatcgcatagtgacaagtcttcttcaggcatcattggatggcttactccgtgttatcttagatgggggtccatcgagagttttcttcaccggtgatgcaaaattattagaggaagatttggaggtgttaaaggaattctttatatctggaggtgacggcctccctcggggtgtagtcgaaaatcaggttgcacgtgttcggcatgtgatcaagttgcacggctatgagacgcgagagttgattgaagacttgaaatctgctagtggcatggaaatgcaaggtagcaaaagcaaattgggaactgattccaaaactctattaagaatattatgccacaggagtgactcagaagcctctcaatttctgaagaaacaatacaaaatacctagttcttctgcttagaggaatgtgtacaacagaagggaaccagcaaaatttttcattttggtgttagctttctgtgaatatacattgctgccaatgtgtcattttttgtcagaattattaaaattacccattcggtgtataattagcggccataactgatatttttcctttccttttttttcgtttttaatcgaactacactgttgttgatcttcttttgtaaaatttcctccatgtgaatactgtaactgtaagatttc

SEQ ID NO: 23974 - protein, 332 aa, Glycine max
TELNSLFRGIDNALQVYANNVVNELASKEELIPPVPILTRYKKEAGIKAFVKKELFDARVPEPDETRPSQISVLATPTLCVQLNTLYYAISHLNKLEDNIWERWTSKRSQEKLIKKSFDDKSKSFSQKDTFEGSRKVINAAMDRICEYTGTKIVFCDLRVPFMDNLYKPSVSGCRLDALIEPLDMELSQLCDIVVEPLRDRIVTSLLQASLDGLLRVILDGGPSRVFFTGDAKLLEEDLEVLKEFFISGGDGLPRGVVENQVARVRHVIKLHGYETRELIEDLKSASGMEMQGSKSKLGTDSKTLLRILCHRSDSEASQFLKKQYKIPSSSA

SEQ ID NO: 23975 - protein, 191 aa, Glycine max
MDRICEYTGTKIVFCDLRVPFMDNLYKPSVSGCRLDALIEPLDMELSQLCDIVVEPLRDRIVTSLLQASLDGLLRVILDGGPSRVFFTGDAKLLEEDLEVLKEFFISGGDGLPRGVVENQVARVRHVIKLHGYETRELIEDLKSASGMEMQGSKSKLGTDSKTLLRILCHRSDSEASQFLKKQYKIPSSSA

SEQ ID NO: 23976 - protein, 170 aa, Glycine max
MDNLYKPSVSGCRLDALIEPLDMELSQLCDIVVEPLRDRIVTSLLQASLDGLLRVILDGGPSRVFFTGDAKLLEEDLEVLKEFFISGGDGLPRGVVENQVARVRHVIKLHGYETRELIEDLKSASGMEMQGSKSKLGTDSKTLLRILCHRSDSEASQFLKKQYKIPSSSA

SEQ ID NO: 23977 - DNA, 1600 bp, Glycine max
gtggatgtatcgtttaacaatcttactggagcccttcctaagcaattggctaaccttgccaatcttcttaccttcaatttatctcataacaaccttcagggtgaactgccggctggtggttttttcaacaccattacgccttcctctgtttctggcaatccatctctttgtggcgctgcagtaaacaaatcatgccttgctgttctcccaaagcctattgttctaaatcccaacacttctactgacaccggccctagttcattgcctccaaatttgggtcacaaaagaatcattctcagcatttctgcactcattgccattggtgcagcagctgtcattgtaattggtgttataagcatcacagttctcaatctccgtgttcgctcctctacatctcgtgatgcagctgccctcacattttctgcaggggacgaattcagccattccccaactacagatgctaactctggcaagcttgtcatgttttcaggtgagcctgatttcagttctggtgctcatgctttgcttaataaggattgtgagcttggacgtggaggatttggagcagtgtaccaaacagttcttagagatggacattcagttgccataaagaagctcacagtatcaagccttgtcaagtctcaagaagattttgaaagagaagtgaagaaattaggaaaaatcagacaccaaaacctcgttgaacttgagggttattattggactccatcactgcagctcctcatatatgagtatctctctggtggtagtctctataagcatctccatgaaggatctggtggaaatttcctctcatggaacgagaggtttaatgtgattctcggaaccgcaaaggccttggcacacttgcaccattccaacattattcactataacattaagtcaaccaacgtccttcttgatagttatggtgaaccaaaagtaggggactttggcctggcaagactgctgccaatgcttgatcgatacgttttgagcagcaaaattcaaagcgcactcggctacatggcaccagagtttgcctgcaagacggtgaaaatcaccgagaaatgtgatgtatatgggttcggtgtcttggtcttggagattgttacagggaagaggccggttgaatacatggaggatgatgtggtggtactttgcgacatggtgagaggggctttggaagagggcagggtggaggaatgcattgatgagaggctccaagggaagttcccagcagaagaagctattcctgtgatgaagttaggcttaatatgtacttctcaggtgccatctaacaggcctgacatgggagaggtagttaacatattggagctgataagatgtccctctgaaggacaagaagaattggcatgaattaacttgcgattttctttattaggaggatagacaatgggttgtccggggaagaagaatccggttttatttattataagagagagaggaattattttgttgcaaaatgtttactttttcattgtattttttcccttgttaattagtctctagttgtttgttttaagatttctcgtgttatgctactacacctaggatgccggattccttttcaacaaag

SEQ ID NO: 23978 - protein, 459 aa, Glycine max
VDVSFNNLTGALPKQLANLANLLTFNLSHNNLQGELPAGGFFNTITPSSVSGNPSLCGAAVNKSCLAVLPKPIVLNPNTSTDTGPSSLPPNLGHKRIILSISALIAIGAAAVIVIGVISITVLNLRVRSSTSRDAAALTFSAGDEFSHSPTTDANSGKLVMFSGEPDFSSGAHALLNKDCELGRGGFGAVYQTVLRDGHSVAIKKLTVSSLVKSQEDFEREVKKLGKIRHQNLVELEGYYWTPSLQLLIYEYLSGGSLYKHLHEGSGGNFLSWNERFNVILGTAKALAHLHHSNIIHYNIKSTNVLLDSYGEPKVGDFGLARLLPMLDRYVLSSKIQSALGYMAPEFACKTVKITEKCDVYGFGVLVLEIVTGKRPVEYMEDDVVVLCDMVRGALEEGRVEECIDERLQGKFPAEEAIPVMKLGLICTSQVPSNRPDMGEVVNILELIRCPSEGQEELA

SEQ ID NO: 23979 - protein, 299 aa, Glycine max
MFSGEPDFSSGAHALLNKDCELGRGGFGAVYQTVLRDGHSVAIKKLTVSSLVKSQEDFEREVKKLGKIRHQNLVELEGYYWTPSLQLLIYEYLSGGSLYKHLHEGSGGNFLSWNERFNVILGTAKALAHLHHSNIIHYNIKSTNVLLDSYGEPKVGDFGLARLLPMLDRYVLSSKIQSALGYMAPEFACKTVKITEKCDVYGFGVLVLEIVTGKRPVEYMEDDVVVLCDMVRGALEEGRVEECIDERLQGKFPAEEAIPVMKLGLICTSQVPSNRPDMGEVVNILELIRCPSEGQEELA

SEQ ID NO: 23980 - DNA, 1789 bp, Glycine max
atcactctgtgctccctcgctctatttctcagtctctgtgtttgcggctgaggattccgaacgagtgaccttcttcgtttctcgcaaagtttaagtaatcatgggtaaggaaaaggttcacatcaacattgtcgtcattggacatgtcgactctgggaagtcaactaccactggtcacttgatctacaagcttggaggtattgacaagcgtgtgattgagaggttcgagaaggaggctgccgagatgaacaagaggtcattcaagtatgcctgggtgctcgacaagctcaaagctgagcgtgaaagaggaattaccattgatattgctttgtggaagtttgaaaccaccaagtactactgcacggtcattgatgctcctggacatcgtgactttatcaagaacatgattactggtacctcccaggccgactgtgctgtccttattattgactccaccactggtggttttgaagctggtatttctaaggatggacagacccgtgagcatgctcttcttgctttcaccctaggtgtgaagcagatgatctgttgctgtaacaagatggatgccactacccccaagtactctaaggctaggtatgatgaaatcgtgaaggaagtctcttcttacttgaagaaggttggttacaacccagacaagattccctttgttcccatctctggttttgagggtgacaacatgattgagaggtccaccaaccttgactggtacaagggaccaactctccttgaggctcttgaccaaatcaatgagcccaagaggccctctgacaagcctctaaggcttccattgcaggatgtctacaagattggtggtattggtactgtgccagtgggacgtgtagagactggggttgtgaagcctggtatggtggtgacttttggtcccactgggctgacaactgaggttaagtctgttgagatgcaccatgaggctctcacagaggctcttccaggtgacaatgttggatttaatgtgaagaatgttgcagtcaaggatctcaagcgtggttttgttgcatccaactccaaggacgaccctgccaaggaagctgccaacttcacatcccaagtcattatcatgaaccatcctggccagattggtaatggatacgcaccagtccttgactgccacacttctcacattgctgtgaagttttctgaaatcttgaccaagattgacaggcgatctggtaaggagcttgagaaggagcccaaatttttgaagaatggtgatgctggtatggttaagatggttccaaccaagcccatggtggttgaaactttctctgagtatcctccccttggtcgttttgctgtgagggacatgcgtcagaccgtagctgttggagtcatcaagagtgttgagaagaaagaccccaccggagccaaggtcacaaaggctgccgccaagaagaagtgattgcattttggcaattttgctagcacatgtgatcatcaacgtggtttcaaaaaaacttgttcctttacagtagtttatctttgcagagtcttaggtgtttgttttaccagttatattttgaagtgtccgccgatttcatgtagccgtagccttcaaaactgggttcttgatcggcggtaacattttcgttgctgtttgtttttgatgagtactgttttttgttttgatggtaaaagtctgagattttcaaattcacaagcagccatagggttttagtccatttcctttgctgctgaggagggatgtcttaaatttgcatttaatttataaggaagttttgttaag

SEQ ID NO: 23981 - protein, 447 aa, Glycine max
MGKEKVHINIVVIGHVDSGKSTTTGHLIYKLGGIDKRVIERFEKEAAEMNKRSFKYAWVLDKLKAERERGITIDIALWKFETTKYYCTVIDAPGHRDFIKNMITGTSQADCAVLIIDSTTGGFEAGISKDGQTREHALLAFTLGVKQMICCCNKMDATTPKYSKARYDEIVKEVSSYLKKVGYNPDKIPFVPISGFEGDNMIERSTNLDWYKGPTLLEALDQINEPKRPSDKPLRLPLQDVYKIGGIGTVPVGRVETGVVKPGMVVTFGPTGLTTEVKSVEMHHEALTEALPGDNVGFNVKNVAVKDLKRGFVASNSKDDPAKEAANFTSQVIIMNHPGQIGNGYAPVLDCHTSHIAVKFSEILTKIDRRSGKELEKEPKFLKNGDAGMVKMVPTKPMVVETFSEYPPLGRFAVRDMRQTVAVGVIKSVEKKDPTGAKVTKAAAKKK

SEQ ID NO: 23982 - protein, 399 aa, Glycine max
MNKRSFKYAWVLDKLKAERERGITIDIALWKFETTKYYCTVIDAPGHRDFIKNMITGTSQADCAVLIIDSTTGGFEAGISKDGQTREHALLAFTLGVKQMICCCNKMDATTPKYSKARYDEIVKEVSSYLKKVGYNPDKIPFVPISGFEGDNMIERSTNLDWYKGPTLLEALDQINEPKRPSDKPLRLPLQDVYKIGGIGTVPVGRVETGVVKPGMVVTFGPTGLTTEVKSVEMHHEALTEALPGDNVGFNVKNVAVKDLKRGFVASNSKDDPAKEAANFTSQVIIMNHPGQIGNGYAPVLDCHTSHIAVKFSEILTKIDRRSGKELEKEPKFLKNGDAGMVKMVPTKPMVVETFSEYPPLGRFAVRDMRQTVAVGVIKSVEKKDPTGAKVTKAAAKKK

SEQ ID NO: 23983 - protein, 346 aa, Glycine max
MITGTSQADCAVLIIDSTTGGFEAGISKDGQTREHALLAFTLGVKQMICCCNKMDATTPKYSKARYDEIVKEVSSYLKKVGYNPDKIPFVPISGFEGDNMIERSTNLDWYKGPTLLEALDQINEPKRPSDKPLRLPLQDVYKIGGIGTVPVGRVETGVVKPGMVVTFGPTGLTTEVKSVEMHHEALTEALPGDNVGFNVKNVAVKDLKRGFVASNSKDDPAKEAANFTSQVIIMNHPGQIGNGYAPVLDCHTSHIAVKFSEILTKIDRRSGKELEKEPKFLKNGDAGMVKMVPTKPMVVETFSEYPPLGRFAVRDMRQTVAVGVIKSVEKKDPTGAKVTKAAAKKK

SEQ ID NO: 23984 - DNA, 953 bp, Glycine max
cattataatggatgataacttcactactattgtcaatgtggccaggtggggacgggccatatacataaacattcaaaaatttgtgcagtttcagttaacagtcaatattgttgctctgattattaactttgtttctgcatgcatcacaggatctgctcccctcacagctgttcagttgctttgggtcaacctgattatggacactctgggtgctttggccttggccactgaacctcccaatgatggacttatgctaagacccccagttggaaggacaacaaattttatcaccaaacccatgtggaggaatatttttggtcaaagtttatatcaactaattgtccttgcggtcctcacttttgatgggaagaggctactgagaattaatcgtccagatgcaactatagtgctcaacactttgatattcaactcctttgtattttgccaggttttcaatgagataaacagccgagaaatcgaaaagataaacatattcaaaggcatgtttgagagctggatattttttacggtgatcttctccacagtggtgttccaagtactcatagttgagttcctgggaacatttgccagtacagtgcctctaagctggcaattctgggtgctcagtgtcgtaatcggagcatttagcatgcctatatctgctatactcaagtgcatcccagttgaaagaggagatgctacaacgccccatgatggttacgaggcgctaccttctggtcccgagctggcataaaatacgggaaggaaaaacataacttttcccttctaagattttctttagtgcaaatgtggctgaaattttggcctctgtggcatactacaaatcttgtcttttggcttcgtttttaagaaattttctcacaaaaatggagggaggaaccgccacttgttcaaattattttcggaaaatgaaaaaaggttttgttttttct

SEQ ID NO: 23985 - protein, 250 aa, Glycine max
IIMDDNFTTIVNVARWGRAIYINIQKFVQFQLTVNIVALIINFVSACITGSAPLTAVQLLWVNLIMDTLGALALATEPPNDGLMLRPPVGRTTNFITKPMWRNIFGQSLYQLIVLAVLTFDGKRLLRINRPDATIVLNTLIFNSFVFCQVFNEINSREIEKINIFKGMFESWIFFTVIFSTVVFQVLIVEFLGTFASTVPLSWQFWVLSVVIGAFSMPISAILKCIPVERGDATTPHDGYEALPSGPELA

SEQ ID NO: 23986 - protein, 248 aa, Glycine max
MDDNFTTIVNVARWGRAIYINIQKFVQFQLTVNIVALIINFVSACITGSAPLTAVQLLWVNLIMDTLGALALATEPPNDGLMLRPPVGRTTNFITKPMWRNIFGQSLYQLIVLAVLTFDGKRLLRINRPDATIVLNTLIFNSFVFCQVFNEINSREIEKINIFKGMFESWIFFTVIFSTVVFQVLIVEFLGTFASTVPLSWQFWVLSVVIGAFSMPISAILKCIPVERGDATTPHDGYEALPSGPELA

SEQ ID NO: 23987 - protein, 185 aa, Glycine max
MDTLGALALATEPPNDGLMLRPPVGRTTNFITKPMWRNIFGQSLYQLIVLAVLTFDGKRLLRINRPDATIVLNTLIFNSFVFCQVFNEINSREIEKINIFKGMFESWIFFTVIFSTVVFQVLIVEFLGTFASTVPLSWQFWVLSVVIGAFSMPISAILKCIPVERGDATTPHDGYEALPSGPELA

SEQ ID NO: 23988 - DNA, 1085 bp, Glycine max
aagtcttttttccttcgtaacatcttttttctctttttcttcccatagcattctgactcatacccaaattatttattgtttgtctacgaaagcagtgaaaaaaaatgacagtggagcttatggggttccccaaaatggaggaacagaaggcaattcaagaagctgcctccgaaggcctcaaggccatggaacacctcctccgtctcctatcctatcaaccctctcacctccacgctcaccacaccgacgccaccgtttccaacttcaaaaaactcatctccttactcagccgccgcaccggccacgcccgtttccgtcgcgcacctctcccttccccgccaccggctaacccggtcaccctccaccaacctccctccaccttcgtcccttcgcactcccagtctctaaccctcgatttcacaaaacctagcattttcgcctccaacgccaaatccatggacctccaattctctaaagaaaccttcagcgtctcctccaactcctccttcatgtcctccgccatcaccggcgacgccagtgtctcttacggcaaactaggatcctccctcttcctcactcctccgccagtctcagccggaaaacctcctctctcctccgctccgatcaagaagaggtgtcacgaccaccgcgaacactccgacgagatctccgggaaactctccggctccagcaagtgccactgcactaagagaaggaagaatcgagtgaagaaaacggtaagagttccggtgatcagttcgaagatcgccgatattccgccggacgagtactcgtggaggaagtacgggcagaagccgatcaagggatcgccgtacccgagggggtattacaagtgcagtagcgttatagggtgtccggcgaggaaacacgtggagcgtgctccggacgatccgacgatgttgattgtgacatatgaaggggagcaccggcactcgatgcaggagaacatttccgggggagtgggtttgggattcgagtcaacgtgagggtggttgcaatgtaaatctgacattattaaaagaaaagattatattacaggggaatcttaatcttctcccgaaaag

SEQ ID NO: 23989 - protein, 300 aa, Glycine max
MTVELMGFPKMEEQKAIQEAASEGLKAMEHLLRLLSYQPSHLHAHHTDATVSNFKKLISLLSRRTGHARFRRAPLPSPPPANPVTLHQPPSTFVPSHSQSLTLDFTKPSIFASNAKSMDLQFSKETFSVSSNSSFMSSAITGDASVSYGKLGSSLFLTPPPVSAGKPPLSSAPIKKRCHDHREHSDEISGKLSGSSKCHCTKRRKNRVKKTVRVPVISSKIADIPPDEYSWRKYGQKPIKGSPYPRGYYKCSSVIGCPARKHVERAPDDPTMLIVTYEGEHRHSMQENISGGVGLGFEST

SEQ ID NO: 23990 - protein, 295 aa, Glycine max
MGFPKMEEQKAIQEAASEGLKAMEHLLRLLSYQPSHLHAHHTDATVSNFKKLISLLSRRTGHARFRRAPLPSPPPANPVTLHQPPSTFVPSHSQSLTLDFTKPSIFASNAKSMDLQFSKETFSVSSNSSFMSSAITGDASVSYGKLGSSLFLTPPPVSAGKPPLSSAPIKKRCHDHREHSDEISGKLSGSSKCHCTKRRKNRVKKTVRVPVISSKIADIPPDEYSWRKYGQKPIKGSPYPRGYYKCSSVIGCPARKHVERAPDDPTMLIVTYEGEHRHSMQENISGGVGLGFEST

SEQ ID NO: 23991 - protein, 290 aa, Glycine max
MEEQKAIQEAASEGLKAMEHLLRLLSYQPSHLHAHHTDATVSNFKKLISLLSRRTGHARFRRAPLPSPPPANPVTLHQPPSTFVPSHSQSLTLDFTKPSIFASNAKSMDLQFSKETFSVSSNSSFMSSAITGDASVSYGKLGSSLFLTPPPVSAGKPPLSSAPIKKRCHDHREHSDEISGKLSGSSKCHCTKRRKNRVKKTVRVPVISSKIADIPPDEYSWRKYGQKPIKGSPYPRGYYKCSSVIGCPARKHVERAPDDPTMLIVTYEGEHRHSMQENISGGVGLGFEST

SEQ ID NO: 23992 - DNA, 926 bp, Glycine max
aagcgactccttttacttggcccaaatcgccaaacctactggcgaatcctctttaatttcctaagcccaaggagtcaaaggctgctccctgcacctgcaacctgttcctcctgcacgcgctgcacctgcactcccgtagcctgcaacctgttcctcctgcacgcgcctgcaactgcaaagtcgccagtcaaaccagcggtttgtgaaaccactgcttgaatcgccagtagaggtggcgagatccaccttaggcgaagtgcatgccatagcattgcctaaagcacaaaggaagaagaaagcctcggtttgtggaattgagacatggagagcagcagtgggagagagagcacggggcgtgtgccactgtcaggggtggtcagatgtactgtcatggctatggtgttcccagagatgggaagaatttggctgactaaagtgtcgagggttaggtcttcagtttggaaagttgggggtaaacgtccaggttataatgcaagtgactctgagtctgatgaattggaagaagattcttaaacagactaaatttgatttcatgtccaaaattctcaaaagtgagtttatcctgatcccaaccctgtccttgtgttgttagtgattttactctttttatctaatagaaaagcttgaggcttgggcttgtgtgccttatttcttcctatttagattgttgtgtattttgtatcaagtaattcaaatttatttctgacttgggagtgttatgatgggttttatgttctgagatccagaaatatgtattgcataatttggcgtgtgatgtaacttctctacatgagtctaagagtttgtgtctagtctacctgggagaggggtttcagaaattttaagtattttgtttgtattgttcttactttctcttgaacttgaaaggttacatgtctcttttt

SEQ ID NO: 23993 - protein, 72 aa, Glycine max
KRLLLLGPNRQTYWRILFNFLSPRSQRLLPAPATCSSCTRCTCTPVACNLFLLHAPATAKSPVKPAVCETTA

SEQ ID NO: 23994 - protein, 70 aa, Glycine max
MESSSGRESTGRVPLSGVVRCTVMAMVFPEMGRIWLTKVSRVRSSVWKVGGKRPGYNASDSESDELEEDS

SEQ ID NO: 23995 - protein, 47 aa, Glycine max
MAMVFPEMGRIWLTKVSRVRSSVWKVGGKRPGYNASDSESDELEEDS

SEQ ID NO: 23996 - DNA, 1123 bp, Glycine max
gcgaagaatgagtttctgtctgagttgtctataattggaagtcttaggcataggaatttggttcaccttcaaggttggtgccatgagaaaggtgagattttgttggtgtatgacttgatgccaaatgggagtctggataaggctttgcatgagtctagaatgccgttgtcttggcctcacaggctcaaaattttgttaggtgtgtcgtctgttttggcctacttgcatcatgagtgcgaaaaccaggtaattcatagggacattaagactagtaacattatgttagatgaagggttcattgctaggttaggcgattttggtttagcgaggcaaacggagcatgacaagtctcctgatgccactgtggctgccgggacaatggggtaccttgcacctgagtacgtgcttactggtagagccacggagaaaactgatgtgtttagctatggtgctgtggttcttgaggtggccagtgggaggaggcctattgagaaagatgctcctgctgctgggaatggtaaagttggaattagcagcaatttggtggaatgggtttggagtttgcatcaagaaggtaagttgctaacagcggctgatccgagacttgaaggtgagtttgaggaaggggagatgaggaaggtactcttggttggattagcttgctcacaccctgattcaatggcaagacctactatgaggggtgtggttcagatgctgctgggtgaggctgaagtgcctattgtccctagagccaagccatctactagttacagtacttctcaactcttaatgaacttgcaagatagtgaatctgagtgtaataatggtatgatcaccatctctacctcttcatcagagagcagcttcaatggcagagatagtctgatggaagtctagagctgagatcttgtcatttttttaattatttactcaaattgtagatagagtggtatgtattcttttgatcatgtatttaaacgccaataacattacgattaaaggccttgagaaaggaaagaattttggggaatatgcaattttgcctctggcatttaagtttatggtagagtgcttctgttgtacatttttatacagattaaattaaaatgatcttggtgcgaag

SEQ ID NO: 23997 - protein, 298 aa, Glycine max
AKNEFLSELSIIGSLRHRNLVHLQGWCHEKGEILLVYDLMPNGSLDKALHESRMPLSWPHRLKILLGVSSVLAYLHHECENQVIHRDIKTSNIMLDEGFIARLGDFGLARQTEHDKSPDATVAAGTMGYLAPEYVLTGRATEKTDVFSYGAVVLEVASGRRPIEKDAPAAGNGKVGISSNLVEWVWSLHQEGKLLTAADPRLEGEFEEGEMRKVLLVGLACSHPDSMARPTMRGVVQMLLGEAEVPIVPRAKPSTSYSTSQLLMNLQDSESECNNGMITISTSSSESSFNGRDSLMEV

SEQ ID NO: 23998 - protein, 259 aa, Glycine max
MPNGSLDKALHESRMPLSWPHRLKILLGVSSVLAYLHHECENQVIHRDIKTSNIMLDEGFIARLGDFGLARQTEHDKSPDATVAAGTMGYLAPEYVLTGRATEKTDVFSYGAVVLEVASGRRPIEKDAPAAGNGKVGISSNLVEWVWSLHQEGKLLTAADPRLEGEFEEGEMRKVLLVGLACSHPDSMARPTMRGVVQMLLGEAEVPIVPRAKPSTSYSTSQLLMNLQDSESECNNGMITISTSSSESSFNGRDSLMEV

SEQ ID NO: 23999 - protein, 245 aa, Glycine max
MPLSWPHRLKILLGVSSVLAYLHHECENQVIHRDIKTSNIMLDEGFIARLGDFGLARQTEHDKSPDATVAAGTMGYLAPEYVLTGRATEKTDVFSYGAVVLEVASGRRPIEKDAPAAGNGKVGISSNLVEWVWSLHQEGKLLTAADPRLEGEFEEGEMRKVLLVGLACSHPDSMARPTMRGVVQMLLGEAEVPIVPRAKPSTSYSTSQLLMNLQDSESECNNGMITISTSSSESSFNGRDSLMEV

SEQ ID NO: 24000 - DNA, 1516 bp, Glycine max
caaaatctacggtaaagagttcatcggctgggtgaagccggaagccgccgacgattccgtctgggaggacgccgtctccggagaaccgtctccttcgccgtcgccgtcgcggcggagaaacgatttaatggaggaattcgaagaggccgcgaatggcggggtccaaaccctaaccctaggcgctttggataatagttttatggtgaacgacaccggcgtccacgtgtaccgcaacttcgaccgcgggatccacggcaagggcgtcgccgtgaaattcgccggagatggttcgacaccgaacaaggctttgttgatgcgcgcagaaacgaacatgatgctgatgagtcccttaaacgacggaaagccccacgcttcgaagcttcaccagctcgacattgaaacggggaagattgttacggagtggaagtttggaaaagacggtgctgacttaacgatgagggatatcaccaatgacaccaaagggtcgcagttggacccttcggagtcaacgtttttggggctggatgataaccggttgtgccagtgggacatgagggataggaagggaattgttcagaacattgccacggcgagttcttctcccgttttgcattggagccaggggcatcagttttccagagggactaactttcagtgctttgcgaccaccggtgatgggtccattgttgtggggtctcttgatgggaagataaggttgtactcgaagacgtcgatgaggatggctaagacagcatttcctgggcttggttcgccgattactagtgttgatgttacttatgatggcaagtgggtgcttggcactacggatacctacttggtgctcatttgtaccttgtttacggataaagatgggaggacgaagaccggatttagtggtagaatggggaacaggatacctgctccgaggctcttgaagttgactcctcttgattcgcatttggctggcgcgaacaataagtttcacggtggccatttctcgtgggtcactgagaatggtaaacaagaacgccaccttgttgcaactgtgggcaagtttagtgtgatatgggattttcagcaggtgaagaacagtgctcatgaatgttacaggaatcaagaagggctgaagagctgttactgttacaagataatattgaaggatgagtccattgtagaatcgcgatttatgcacgacaaatttgctgttagtgactctccagaagctccgttggtggtggcaactcctatgaaagtcagctcaatcagcatgtctggaaagcgacatggttaaacctctgtttacattttttctttaaaggtttcaaatttctagtgttaggagtgtctttgaagtttgaacaatatacttgcttgtatccaagtttgagatgctgttatttttctgtaaagcacgttttaggttgccctgtatgtattttcttcttttttgtgattagtttgggtttgctgactgaattgtccttttttattacaaataataaaataattgcttatg

SEQ ID NO: 24001 - protein, 429 aa, Glycine max
KIYGKEFIGWVKPEAADDSVWEDAVSGEPSPSPSPSRRRNDLMEEFEEAANGGVQTLTLGALDNSFMVNDTGVHVYRNFDRGIHGKGVAVKFAGDGSTPNKALLMRAETNMMLMSPLNDGKPHASKLHQLDIETGKIVTEWKFGKDGADLTMRDITNDTKGSQLDPSESTFLGLDDNRLCQWDMRDRKGIVQNIATASSSPVLHWSQGHQFSRGTNFQCFATTGDGSIVVGSLDGKIRLYSKTSMRMAKTAFPGLGSPITSVDVTYDGKWVLGTTDTYLVLICTLFTDKDGRTKTGFSGRMGNRIPAPRLLKLTPLDSHLAGANNKFHGGHFSWVTENGKQERHLVATVGKFSVIWDFQQVKNSAHECYRNQEGLKSCYCYKIILKDESIVESRFMHDKFAVSDSPEAPLVVATPMKVSSISMSGKRHG

SEQ ID NO: 24002 - protein, 387 aa, Glycine max
MEEFEEAANGGVQTLTLGALDNSFMVNDTGVHVYRNFDRGIHGKGVAVKFAGDGSTPNKALLMRAETNMMLMSPLNDGKPHASKLHQLDIETGKIVTEWKFGKDGADLTMRDITNDTKGSQLDPSESTFLGLDDNRLCQWDMRDRKGIVQNIATASSSPVLHWSQGHQFSRGTNFQCFATTGDGSIVVGSLDGKIRLYSKTSMRMAKTAFPGLGSPITSVDVTYDGKWVLGTTDTYLVLICTLFTDKDGRTKTGFSGRMGNRIPAPRLLKLTPLDSHLAGANNKFHGGHFSWVTENGKQERHLVATVGKFSVIWDFQQVKNSAHECYRNQEGLKSCYCYKIILKDESIVESRFMHDKFAVSDSPEAPLVVATPMKVSSISMSGKRHG

SEQ ID NO: 24003 - protein, 363 aa, Glycine max
MVNDTGVHVYRNFDRGIHGKGVAVKFAGDGSTPNKALLMRAETNMMLMSPLNDGKPHASKLHQLDIETGKIVTEWKFGKDGADLTMRDITNDTKGSQLDPSESTFLGLDDNRLCQWDMRDRKGIVQNIATASSSPVLHWSQGHQFSRGTNFQCFATTGDGSIVVGSLDGKIRLYSKTSMRMAKTAFPGLGSPITSVDVTYDGKWVLGTTDTYLVLICTLFTDKDGRTKTGFSGRMGNRIPAPRLLKLTPLDSHLAGANNKFHGGHFSWVTENGKQERHLVATVGKFSVIWDFQQVKNSAHECYRNQEGLKSCYCYKIILKDESIVESRFMHDKFAVSDSPEAPLVVATPMKVSSISMSGKRHG

SEQ ID NO: 24004 - DNA, 1363 bp, Glycine max
atcttctcttctcacaacacgttcccattcctctctccctaacctcaccggcagcgccttcacggtcatcgccgccgacaccccccctcccttcttaatggcctcaatcccagtcgcgtgttccacacaccccaggctccaagcctcacccttattccaatcccacgcgcgctcccgcagcgcgtccttctggagggttcagcagaggggttcgatgggtggtggtggtgccgcgtcgagtttcgcctgctccacttctcagttccgcggcggattcgggttccggttccaccggagacaggggaagttctcgttgctctctttcggcggtgacgacgacggaagcgccgttggcggcgaagcgagagaaagagacttgtctcagcttctctccgcattgcttcccgttgttgttgctgccaccgccgttgccgctctcgctaaaccctccacttttacttgggtatcaaaagagttatatgctcctgcacttggtgggattatgttgtctattggaataagactatccgtagatgacttcgctcttgcatttaaaagacctttgccacttaccattgggttaattgcgcaatacgtgcttaagcctgttcttggaatcttggttgcaaaggcttttggtttgtctaggatgttttacgcgggctttgtcctcacagcttgtgtttcgggggctcaactatccagctatgcaaacttcttaagcaaaggggatgtagccttgggcattcttctcacaagctataccacaattgcatcagttattgttacacctctgttaactggtcttctgattggatcagtagtgccagttgatgcagttgccatgtcaaagtcaattctgcaggttgtacttgttccggtgacccttggtcttcttctcaatacatatgcaaagtcagttgtatctgttcttcaacctgtgatgccctttgttgccatgatttgtacttcactgtgcattggcagccctcttgctttaaacaggagtcaaattttgacaggcgaaggtctccggttggtttttccagtattaacatttcatgttgttgccttcactttaggatattggttctcaaagattccatccttgaggcaggaagaacaggtgagcaggacgatttcactatgcactggaatgcagagttccacccttgcaggactccttgcaacgcaatttttggatagtagtcaggcagttcctcctgcatgttctgtcattgctatggctataatgggtctctgtcttgcctctttttggggaagtggctttgtaattagaaacctgttgccattacctcctctcagaaccaattctgctgttaaaacttaacttttttgtttc

SEQ ID NO: 24005 - protein, 449 aa, Glycine max
SSLLTTRSHSSLPNLTGSAFTVIAADTPPPFLMASIPVACSTHPRLQASPLFQSHARSRSASFWRVQQRGSMGGGGAASSFACSTSQFRGGFGFRFHRRQGKFSLLSFGGDDDGSAVGGEARERDLSQLLSALLPVVVAATAVAALAKPSTFTWVSKELYAPALGGIMLSIGIRLSVDDFALAFKRPLPLTIGLIAQYVLKPVLGILVAKAFGLSRMFYAGFVLTACVSGAQLSSYANFLSKGDVALGILLTSYTTIASVIVTPLLTGLLIGSVVPVDAVAMSKSILQVVLVPVTLGLLLNTYAKSVVSVLQPVMPFVAMICTSLCIGSPLALNRSQILTGEGLRLVFPVLTFHVVAFTLGYWFSKIPSLRQEEQVSRTISLCTGMQSSTLAGLLATQFLDSSQAVPPACSVIAMAIMGLCLASFWGSGFVIRNLLPLPPLRTNSAVKT

SEQ ID NO: 24006 - protein, 417 aa, Glycine max
MASIPVACSTHPRLQASPLFQSHARSRSASFWRVQQRGSMGGGGAASSFACSTSQFRGGFGFRFHRRQGKFSLLSFGGDDDGSAVGGEARERDLSQLLSALLPVVVAATAVAALAKPSTFTWVSKELYAPALGGIMLSIGIRLSVDDFALAFKRPLPLTIGLIAQYVLKPVLGILVAKAFGLSRMFYAGFVLTACVSGAQLSSYANFLSKGDVALGILLTSYTTIASVIVTPLLTGLLIGSVVPVDAVAMSKSILQVVLVPVTLGLLLNTYAKSVVSVLQPVMPFVAMICTSLCIGSPLALNRSQILTGEGLRLVFPVLTFHVVAFTLGYWFSKIPSLRQEEQVSRTISLCTGMQSSTLAGLLATQFLDSSQAVPPACSVIAMAIMGLCLASFWGSGFVIRNLLPLPPLRTNSAVKT

SEQ ID NO: 24007 - protein, 378 aa, Glycine max
MGGGGAASSFACSTSQFRGGFGFRFHRRQGKFSLLSFGGDDDGSAVGGEARERDLSQLLSALLPVVVAATAVAALAKPSTFTWVSKELYAPALGGIMLSIGIRLSVDDFALAFKRPLPLTIGLIAQYVLKPVLGILVAKAFGLSRMFYAGFVLTACVSGAQLSSYANFLSKGDVALGILLTSYTTIASVIVTPLLTGLLIGSVVPVDAVAMSKSILQVVLVPVTLGLLLNTYAKSVVSVLQPVMPFVAMICTSLCIGSPLALNRSQILTGEGLRLVFPVLTFHVVAFTLGYWFSKIPSLRQEEQVSRTISLCTGMQSSTLAGLLATQFLDSSQAVPPACSVIAMAIMGLCLASFWGSGFVIRNLLPLPPLRTNSAVKT

SEQ ID NO: 24008 - DNA, 1325 bp, Glycine max
ccctcacgacgcgacgacgcagagatcggagagctacaaaactagcggatctgagtttcagcacgaggctgatcctgttgcttctgataccgaaagcgtaacctctggaagttcctctggagaaggaattcgaggttctcggggactcgtggtgccggcgaggttctggcaagagcatcataataaccgtttgcggcgccaaacggaaactccgtcttctagaaacggcgtaattggaaacaaaggaacggttaatactcctattcctagttctagacttctggtgcagaagaaaacggcgttggattgtcctgtttcgtcgccacgtggagttctgaatagccgtgctcttcaaggttctccgattcgttccgcggtacgtccggcgtctccaagtaagctagcgacgacgccgtcgtcggtgtggtctccttcgagaggagtgagtccgtcacgagcgcaaaacggcgtcgttggtggcgtgagtagtagtaggttcggtgctagtgaaccttctgttttgagtttcgctgttgatgtttcgagggggaaggtagcggagaaccggatttttgatgcgcatttattgagactcttccataacaggcttcttcagtggcgttttgttaacgccagagctgatgctgctctctctgcgcagacattgaatgcggagaaaagcctctatgatgcatgggttgctatgtccaatctacgagaatctgttagagccaaaagagcagagtttcagttgctgaagcaacagttcaagttaatatccatcctgaaggatcaaatggtgtgtttggaagattgggctactttggatccggtttactctagttcactttcaggagctactgaagccctaagggctagcactcttcgtcttcctgtagttggtggggccaagacagatttggtaaatttgaaggacgcaattagttcagcaatggatgtgatgcaggcaatggcgtcctccatatgcctattgtcgccaaaggttgggcaattaaattcgctggttgttgaagttgccaacttaactgcgaaggagcgtgttttgcttgaagagtgcaaagaccttttgtcagtgattacaaccatgcaggttagagagtgtagcctgagaacgcatgttgctcaactgaaatgccaaccgtgaagtactacagtgaaaataacaagtaatacattggctgactagcatactttcagtgctaacatcataacataggaatggtaatttcggccttgaattcaatacatgaaatgaaatcatcattattgattgagtaaagctagttagtatttgaaaaaacaac

SEQ ID NO: 24009 - protein, 387 aa, Glycine max
PHDATTQRSESYKTSGSEFQHEADPVASDTESVTSGSSSGEGIRGSRGLVVPARFWQEHHNNRLRRQTETPSSRNGVIGNKGTVNTPIPSSRLLVQKKTALDCPVSSPRGVLNSRALQGSPIRSAVRPASPSKLATTPSSVWSPSRGVSPSRAQNGVVGGVSSSRFGASEPSVLSFAVDVSRGKVAENRIFDAHLLRLFHNRLLQWRFVNARADAALSAQTLNAEKSLYDAWVAMSNLRESVRAKRAEFQLLKQQFKLISILKDQMVCLEDWATLDPVYSSSLSGATEALRASTLRLPVVGGAKTDLVNLKDAISSAMDVMQAMASSICLLSPKVGQLNSLVVEVANLTAKERVLLEECKDLLSVITTMQVRECSLRTHVAQLKCQP

SEQ ID NO: 24010 - DNA, 1212 bp, Glycine max
acatttctgcatccatggcttcttcactgggtcgaagaagaacccacgctcccaaatcttcctccaccctaaacgacgacgtttcctgcgaggaatgcggcggaggccactctccttcgaagcttcttctctgcgacaaatgcgaccgtggctaccacctcttctgcctccgtcccattcttccctctgtccccaaaggctcttggttctgcccctcttgctccaatcacaaacctaagtgtttccctcttgtgcagaccaaaatcattgacttctttcgaatccaacgctcgcccgaggcattggcgaaccaagacacgcggaagaagcgaaagaggggtgggggcttggtggtttcgaagaagaagaggaagctgttggcgttcgtgccgagtgaggatccgaagaggagattggagcaaatggcgtcgctggcgacggcgttgatcgcaactgaaacggagttcagcaatgagcttacttacatgcctgcaatggcgccaaggtccgctaatcgccctgctcttgagcgcggtggaatgcaggtcttgtcaaaagaagacaccgagaccttaaacctgtgcaaaagtatgatggaaagaggagaatggccgcctctcatggttgtttttgatcctctagaaggcttcactgtagaagcagatagatccatcaaagatttaaccataataacagaatatgttggagatgtagactttttaaagaatagggaaaatgatgatggagatagtataatgacacttctctcagcttctgatccttcacggacgcttgtcatctgtccagacaaacgaagcaacatagctcgtttcattaacggcatcaataatcacacacctgtagggaagggaaaaagaagcagaacttgaaatgcgtgaggtttgatgttggaggtgaatgtcgggttcttttaattgccaatagagatattacaaagggggaaaggttgtactacgactacaacggagatgaacatgaatatccaactgaacattttgtctgattgcgttcaaatataaattataagcaaatcaccctaacagggagggattgtaagctcgtgattttttcatttcttagttgatttggtcaccccttaatatggttgccttgtcactaccccacatgtatcatgttggatactcaatatatttcacagtagacttgtggtttatattatattgttcaatt

SEQ ID NO: 24011 - protein, 295 aa, Glycine max
ISASMASSLGRRRTHAPKSSSTLNDDVSCEECGGGHSPSKLLLCDKCDRGYHLFCLRPILPSVPKGSWFCPSCSNHKPKCFPLVQTKIIDFFRIQRSPEALANQDTRKKRKRGGGLVVSKKKRKLLAFVPSEDPKRRLEQMASLATALIATETEFSNELTYMPAMAPRSANRPALERGGMQVLSKEDTETLNLCKSMMERGEWPPLMVVFDPLEGFTVEADRSIKDLTIITEYVGDVDFLKNRENDDGDSIMTLLSASDPSRTLVICPDKRSNIARFINGINNHTPVGKGKRSRT

SEQ ID NO: 24012 - protein, 291 aa, Glycine max
MASSLGRRRTHAPKSSSTLNDDVSCEECGGGHSPSKLLLCDKCDRGYHLFCLRPILPSVPKGSWFCPSCSNHKPKCFPLVQTKIIDFFRIQRSPEALANQDTRKKRKRGGGLVVSKKKRKLLAFVPSEDPKRRLEQMASLATALIATETEFSNELTYMPAMAPRSANRPALERGGMQVLSKEDTETLNLCKSMMERGEWPPLMVVFDPLEGFTVEADRSIKDLTIITEYVGDVDFLKNRENDDGDSIMTLLSASDPSRTLVICPDKRSNIARFINGINNHTPVGKGKRSRT

SEQ ID NO: 24013 - protein, 155 aa, Glycine max
MASLATALIATETEFSNELTYMPAMAPRSANRPALERGGMQVLSKEDTETLNLCKSMMERGEWPPLMVVFDPLEGFTVEADRSIKDLTIITEYVGDVDFLKNRENDDGDSIMTLLSASDPSRTLVICPDKRSNIARFINGINNHTPVGKGKRSRT

SEQ ID NO: 24014 - DNA, 1628 bp, Glycine max
aatcgaaaagaacatcttccatagagaaaacggacggggtggttatagttactcatcattctccattgctccattctccgcatacactcactacccgcttttctctctcaaacatcgtcgccgcccttccctccgattcatctccgtcggcctcgccgacacgaaaccgtagacgaataactccaacaattctcaggtttgaggcaatgccatcgccggcattgtaattgcgtgttcggtagatccgtcgccggcattgtaattgcgtgtgcggtagatccttcgccggcattgtaattgcgtgtgcggtagatccttcgccggcattttctttctttaatattttgagaggagcaccaggaatcgtttggcactaaagagaaagtgagagagggagatgaaataagttcgtactgaagatggcgtcgaggcaaatggaagagattcggaagaaattggctgaccttaattacccgagagcgaatgcccctgcacagtccctcctatttgctggcatggagcgctatgcccttctagagtggctcttctttcggcttttaggtgataagtcacccttttctcaacaaaacatacaaggggatggccttgatcgtgatgaggagacaggtcgaattcagtatttggctgagattgctaagtttctgggtattacaacaactgtagatacagatgccattcaggggcatggaagctatgaagaccgtactgcaatgcttcgtcttattgtagatctagtggacgcaacaatatgcgcagataatccagaatggagtgttgacgagcaggtagccaaggacatccaattaatagactccattgcagaaaaacaagctcaaatattttctgaagaatgtaaattgtttcctgcagatgttcagattcagtccatatatccattgccagatgtttctgagctggagttgaagttttctgaacaatcaaaaatattgttgaatcttcaacaaaaagttgatgacttggcatccaagcatgcttacaatcctgatgaggagtatactgaggtggaatcccaattgcgggcacatttggaatcttttctagaaacagctagaacattcaatttgatttacaccaaggaaattcgtccatggacacacatgatggaggttccgcaacttcatggatttggaccagctgccaatcgtttattggaggcctataaaatgcttttgaagtttttgggcaacctacggaatcttagggactcacatgcagcacttgccttcggttcttctgagacatccgacgggccttcatctgtcacacgaataatctctgaatgtgaatctgcattgacagtcttaaatcgtgatcttggaattctctctgcttccattgctcgtgaacaggtagagaagatgaacatttgacgaaacatgagaaacaagttattaatccttattcttttggattttgtgaacttgtgcataatgttcatattgttgacatgatgtgtgctgatgtgaagtcagcacggttgtcagactgggtctatgtaaacttgtggagggtctgaagtgtgacacatagacttcacttgtaaactgagaagagtatagctaatacaaaaatattattaaaaaacc

SEQ ID NO: 24015 - protein, 330 aa, Glycine max; identical to SEQ ID NO: 19836

SEQ ID NO: 24016 - protein, 325 aa, Glycine max; identical to SEQ ID NO: 19837

SEQ ID NO: 24017 - protein, 298 aa, Glycine max; identical to SEQ ID NO: 19838

SEQ ID NO: 24018 - DNA, 1061 bp, Glycine max
aattcaggcgatggcgccgcgtctctggtcctgcttccgcagcagcagtagcaagggcagcaccaccggcggcggtgtctccgacgcctccgcctcgcggcgcgtggtgactgcggacctgacatcggaggagcagaagcgcgggggcccggtggtggtggagatgttctcgtcgcaggggtgcgcgacttcaccggcggcggagctggtgctgtcgcggctggggagaggggatttcgagctggaggcgccggtggtggtgctggctttccacgttgactactgggactatatgggatggaaggatccgttcggggccagccagtggacggttcggcagaaggcctatgttgaggcccttgggcttgacaccattttcacgccacaggttgtggttcagggaaaggcccagtgtgttggaaatgacgagaacgcccttgtttctgccattactagtgctcctaggttccctgctccaaccttccaggcaactttcaccaggcctgcaccagattcattgcaagtgtccctaacaggagcattgaggaccaaggtggacagcgatggcgcgaatgtcatggttgcattatacgaaaacggtttggtcaccgattgtccaagaggggagaacaaagggcgtgtcctatccaacgactatgttgttagaaagctcgaaaagctctgcactgtcaaagacatctctgccaagaaaacagtatcaggaatggttaactttcccttatgggaaggattcaaaagcagcaaatgtggtttggctgtctttgttcagagcaaatctcaccagatttttggttcacagagttttcagctgccggatgatatatgattctgattctttagtttcatttgatctgcttgctgttatcatattcgggttacattgtgttttgttaggctatatgtacagattgtgatatgatttaggataataaatgttgttttctttcttttcttacatattttttcctatgtactttgtccttccttactattgaccctatgtttaggagatggagagagaagtctaaatttgtggcgtg

SEQ ID NO: 24019 - protein, 281 aa, Glycine max
IQAMAPRLWSCFRSSSSKGSTTGGGVSDASASRRVVTADLTSEEQKRGGPVVVEMFSSQGCATSPAAELVLSRLGRGDFELEAPVVVLAFHVDYWDYMGWKDPFGASQWTVRQKAYVEALGLDTIFTPQVVVQGKAQCVGNDENALVSAITSAPRFPAPTFQATFTRPAPDSLQVSLTGALRTKVDSDGANVMVALYENGLVTDCPRGENKGRVLSNDYVVRKLEKLCTVKDISAKKTVSGMVNFPLWEGFKSSKCGLAVFVQSKSHQIFGSQSFQLPDDI

SEQ ID NO: 24020 - protein, 278 aa, Glycine max
MAPRLWSCFRSSSSKGSTTGGGVSDASASRRVVTADLTSEEQKRGGPVVVEMFSSQGCATSPAAELVLSRLGRGDFELEAPVVVLAFHVDYWDYMGWKDPFGASQWTVRQKAYVEALGLDTIFTPQVVVQGKAQCVGNDENALVSAITSAPRFPAPTFQATFTRPAPDSLQVSLTGALRTKVDSDGANVMVALYENGLVTDCPRGENKGRVLSNDYVVRKLEKLCTVKDISAKKTVSGMVNFPLWEGFKSSKCGLAVFVQSKSHQIFGSQSFQLPDDI

SEQ ID NO: 24021 - protein, 227 aa, Glycine max
MFSSQGCATSPAAELVLSRLGRGDFELEAPVVVLAFHVDYWDYMGWKDPFGASQWTVRQKAYVEALGLDTIFTPQVVVQGKAQCVGNDENALVSAITSAPRFPAPTFQATFTRPAPDSLQVSLTGALRTKVDSDGANVMVALYENGLVTDCPRGENKGRVLSNDYVVRKLEKLCTVKDISAKKTVSGMVNFPLWEGFKSSKCGLAVFVQSKSHQIFGSQSFQLPDDI

SEQ ID NO: 24022 - DNA, 1170 bp, Glycine max
cccccttttggagaattgtgaggctggacttgtcaatgtaaacctcactggttgctggaacttgacagataatatagtttcagccttggccaggctacatggtggaaccctcgaagtactaaatcttgatggatgctggaaaattactgatgcaagcttggttgcaattgcaaacaacttcctagtgcttaatgatctagatgtgtcaaagtgtgcaatcaccgatgccggtgtagctgttctctcaagggccagtctgcctagcttgcaagtgctttcgttgtctggttgttctgatgtatcaaacaagagtgcgcctttcctgacaaaattgggccagaccttgctgggattgaatcttcaaaactgcaattcaattggcagcagcacaatggagttgctagtggagaagttgtggagatgtgatattctggcttaatcatgttacaaaactagaaacaaataaaactggctaaatcagggaaggagatagaactgtacaggtcacattcggcatacattttggttgatatgtctatcaagggtggattggtggcagtttggtgacttggttgttttccagggaactttggcttgttactttatgacccatttttttcgcaagcatgaaatgcttgttccaacttacaacccttttggccccttggcttactggggctacttctttcatggctagggtcccctgagaatacagttactaagtcttggttgatggtatccactgctagatagtgcatgcttgtgctaggtcttattttgtacagctggatgttgacaataaaaagcatgttttagcttctgttgcacatttgctatgatgttgcttagacttaagctttagttcatgtcttttgaagtcttctgtctttttagtttatactaatcaagcatcttcaccatgccttagagtgtggaagaggctttagcttgtcttcctttggtcttgtcagtgtggttatgttgtgcaattttaaggctaggtacctcatattcaagggctttggtgtggtggcagggcgtccatttgttgctatttttttttcttcccttttaaatcaagtccttgtttttgtaggcttgtcttgcttttgaattgtacttagcagaccactttgcttgtcttcaataataaaactacaatttcgcttc

SEQ ID NO: 24023 - protein, 145 aa, Glycine max
PLLENCEAGLVNVNLTGCWNLTDNIVSALARLHGGTLEVLNLDGCWKITDASLVAIANNFLVLNDLDVSKCAITDAGVAVLSRASLPSLQVLSLSGCSDVSNKSAPFLTKLGQTLLGLNLQNCNSIGSSTMELLVEKLWRCDILA

SEQ ID NO: 24024 - DNA, 1614 bp, Glycine max
agagaaagaagaagacattctcagttgtgttgtctgacaaaacgaacagcaattgggagcagatgcaagatccatcttcaaaccctaattccaatccaaatcccaatcctcacaatgccaatgccgcatcccagctaccgcgtccaccgccggccaccaccgccggcgccggcgcctcctcgtcctcgctgttcgcgcgctccggcgggcctcaccaccggcgagcccattcggaagtgagtttccggctgccggacgacatgatggacctctcgccgtcggatccgttcgccggcgggtcgtcgacggccagcatggaggagatcggatcggaggacgacctgttctcgacgtacattgacgtggacaagctcggcggcgcaaacgggtcgggcgcctccggaaacggagcggatccgaccggcgaaaccgagaagagtccggcgaggccgcgacaccggcacagtagctccgtcgatttcggggaaattatggatgcgaagaaagctatgcctcctgataagttagctgagctatggacaattgatcccaagcgtgctaagagaatacttgcaaatcggcaatctgctgctcgatcgaaggagagaaaagcgcgctacatacaagaacttgagcgcaaggttcagactcttcagacggaagccacaactctttctgcccaattgaccttataccagagggacacaacaggactgagtactgaaaatacagagctaaagctccgtttgcaagccatggagcaacaagcacaacttcgtgacgctcttaatgaagcattgaagaaggaagttgagaggcttaaggttgctactggtgagatgatgagccacactgattcctttaatctgggaatgcacctgatgccattttccggatcaaatttcgttccaatcccgccacaatcaggtccttctggtcaccaaaacatgcagatgccaccatttggtctcaccccatccacaatgccaagccatctactgcatcaaacaagttctcatccatattcagaaatattgcaaaatgaccagcttggtcgtttccaggggcttgacattagtagcaaaggatcaactctcgtgaagtctgaaggcccctcactctccgcaagtgagagtagcactacattttgaatttgacagaaaatgcttgacctgctgacttatccatgccattcattgttcatagggttgacatttagtcaactaatgaaggtaccttatttcatgattcaaatttgaggattaattttaactatttattctaagggggtgctcaccaaaaaggggaagcacccatggggttttgttgcaaagttcacgtaatcatgtttcagcatggcatttggtgtttctgggagctggaatattgggaatgaaaggtcattcccattgtatctttgtatttgtatcatcgtttacgtgatagcatgtaaactgtgtgatttattgttgtgtttcactacattcagagtccaagacggactctttttctttctttctataattacttagtttcaggtttattcatagtcgttgtacaatgcaagagttttgggtactccgtacgtgttgtattaagcttcttccgagatcg

SEQ ID NO: 24025 - protein, 382 aa, Glycine max
RKKKTFSVVLSDKTNSNWEQMQDPSSNPNSNPNPNPHNANAASQLPRPPPATTAGAGASSSSLFARSGGPHHRRAHSEVSFRLPDDMMDLSPSDPFAGGSSTASMEEIGSEDDLFSTYIDVDKLGGANGSGASGNGADPTGETEKSPARPRHRHSSSVDFGEIMDAKKAMPPDKLAELWTIDPKRAKRILANRQSAARSKERKARYIQELERKVQTLQTEATTLSAQLTLYQRDTTGLSTENTELKLRLQAMEQQAQLRDALNEALKKEVERLKVATGEMMSHTDSFNLGMHLMPFSGSNFVPIPPQSGPSGHQNMQMPPFGLTPSTMPSHLLHQTSSHPYSEILQNDQLGRFQGLDISSKGSTLVKSEGPSLSASESSTTF

SEQ ID NO: 24026 - protein, 362 aa, Glycine max
MQDPSSNPNSNPNPNPHNANAASQLPRPPPATTAGAGASSSSLFARSGGPHHRRAHSEVSFRLPDDMMDLSPSDPFAGGSSTASMEEIGSEDDLFSTYIDVDKLGGANGSGASGNGADPTGETEKSPARPRHRHSSSVDFGEIMDAKKAMPPDKLAELWTIDPKRAKRILANRQSAARSKERKARYIQELERKVQTLQTEATTLSAQLTLYQRDTTGLSTENTELKLRLQAMEQQAQLRDALNEALKKEVERLKVATGEMMSHTDSFNLGMHLMPFSGSNFVPIPPQSGPSGHQNMQMPPFGLTPSTMPSHLLHQTSSHPYSEILQNDQLGRFQGLDISSKGSTLVKSEGPSLSASESSTTF

SEQ ID NO: 24027 - protein, 296 aa, Glycine max
MMDLSPSDPFAGGSSTASMEEIGSEDDLFSTYIDVDKLGGANGSGASGNGADPTGETEKSPARPRHRHSSSVDFGEIMDAKKAMPPDKLAELWTIDPKRAKRILANRQSAARSKERKARYIQELERKVQTLQTEATTLSAQLTLYQRDTTGLSTENTELKLRLQAMEQQAQLRDALNEALKKEVERLKVATGEMMSHTDSFNLGMHLMPFSGSNFVPIPPQSGPSGHQNMQMPPFGLTPSTMPSHLLHQTSSHPYSEILQNDQLGRFQGLDISSKGSTLVKSEGPSLSASESSTTF

SEQ ID NO: 24028 - DNA, 1568 bp, Glycine max
ccttcacaagtgtgcatttctgtcagacaatgggttgatatcatttgccaaggctgcttcatcacttgagagcctacgattggaagagtgccaccgaattacccaacttgggttttttggtgtcctttttaactgtggtgcaaaattgaaggctatctctttggtgagctgctacgggatcaaagatctgaacttggtgttgccaacagtatctccatgtgaatcacttcggtctttatctatcagtaattgccctggatttggcaatgcctccctctctgtattgggaaagctgtgccctcagcttcagcatgttgaattgagtggactcgagggagtgacagatgcagggcttcttccactccttgagagttccgaggctggtttggttaaagtgaaccttagtggttgcacaaacgttaccaataaagtagtttcgtccttggccaatctgcatggttggactcttgagaatctaaaccttgatggttgcaaaaacatcagtgatgctagcttgatggcaattgctgaaaactgtgcattgctatgtgatctcgatgtctccaagtgtgctataaccgatgctgggattgaagccctggcacatgctaaacagattaatctgcaagttctttctttgtcaggttgcactttggtctcagacaggagcttgcctgcgttgagagaattgggtcacacccttttgggactaaacatccagcactgcaatgcaatcaacagcagtacggttgacacacttgtggagcttctctggaggtgtgacatcctctcctgagctgaaagaaaaactaatctcactgcaatttaggccaggatcacatcagcaggaagcttgttatgctcagtgttgcacagtagttttttaggtccttaacaggtcttcatcgtccagtgactcggttcctttttaccggagtgtgcagtcatttagccctcatttttgcaggttccttcaatgggaagcctgttctttttggcatcctttttgcccccttttaaatggctgcatatctgagaacatagctaccgggttctggagtgtaggaatctttgttactggtgttggcacctgatgtttttagctcagctttgcattggttttgccaccatgtgtgtcttagttttctaagtttttacagctagctgtaccactgtatcagtctttgtttaccaaatgtttcatgtgtttgaactatgttcttcacatgatgtttgggtatcagttttactcacagggcaggttagaagttgcagtgtcatgtgctgttattagcgtggttgcagttgtcaagttcggtgttatgaagccttgtttttagggactggctgtggcagcaagttatacaggtctgccataaccacgaccttttttcccctttgggaagggttgtgtttttttaccaagtcctagtttttttaaggcttcattttttttgaacttggcactgcacctccttattgtctaatgatattcatacctgcccttgtgctgtatgttatgaaatgtaatgaaataaataaaattcagtctcattcctagttgcttg

SEQ ID NO: 24029 - protein, 264 aa, Glycine max
LHKCAFLSDNGLISFAKAASSLESLRLEECHRITQLGFFGVLFNCGAKLKAISLVSCYGIKDLNLVLPTVSPCESLRSLSISNCPGFGNASLSVLGKLCPQLQHVELSGLEGVTDAGLLPLLESSEAGLVKVNLSGCTNVTNKVVSSLANLHGWTLENLNLDGCKNISDASLMAIAENCALLCDLDVSKCAITDAGIEALAHAKQINLQVLSLSGCTLVSDRSLPALRELGHTLLGLNIQHCNAINSSTVDTLVELLWRCDILS

SEQ ID NO: 24030 - DNA, 1120 bp, Glycine max
agcctaccactggttactgcaccttttgggcatgcctcccaggaaattgtgaacctactgctctgtggggaggctgttcctaatgtgtttgatggaaggatggatttaggtggaggaatgtttgtgaaaggtatatcccgatatgtggaagttggatttcttactctattagaatccctgaatttttgcaaggttggtcagtttctgaaatccccaaagtggcctatatgggttgtggggagtgaatcccattacacagtgttgtttgctcttgaccccagtgtccaaaatgagaatgaactggaaggaagggaaactcagattcgcaaagcttttgatgcacaagatcagagtggaggtggtggtttcattagtgtggaagggttccatcaagtcctcagagaaacaaatatcaaatttccaccagagaagctggaacatctttgctctgcagggttcattgtatggagtgaattctggcaagtaattttggatctagacaaaagcttggggggtttgaaggattcatcaggattgatgggtaagaaggtttttgatctttaccattttaatgggattgccaaatcggatctgaatggaagtcaagtaaattctgggggcgaaactccactgcaaagaccccggctcacaaaattgagagtttcagttcccccaaggtggacgcctgaggaatttatggcagatgtgaaagttccatctgctgctagtgcaagtgagtctgctgggaaggacaatgaagtatctaaaccagagccttctaagcatgcacctttggtggactgcataaggacacgctgggcgcgtgctgtctgcagctggtcaggggatcctcctagtatagtttgagaggacattatttggagtcatttgtggtggttcttacaagtgtttttacagggaaagcactattggttcagcaaagagtagatacagtttttatgtaatttgatgtggtacctcgaggcacatgaacagggaggggttcagatctccaagtttttatgtaatttgatgtggggggatattattagtaataaacgtgaaaacctgttcttgtttctgaaattgctgtaatagtaaagcatcattcttgtttcat

SEQ ID NO: 24031 - protein, 288 aa, Glycine max
SLPLVTAPFGHASQEIVNLLLCGEAVPNVFDGRMDLGGGMFVKGISRYVEVGFLTLLESLNFCKVGQFLKSPKWPIWVVGSESHYTVLFALDPSVQNENELEGRETQIRKAFDAQDQSGGGGFISVEGFHQVLRETNIKFPPEKLEHLCSAGFIVWSEFWQVILDLDKSLGGLKDSSGLMGKKVFDLYHFNGIAKSDLNGSQVNSGGETPLQRPRLTKLRVSVPPRWTPEEFMADVKVPSAASASESAGKDNEVSKPEPSKHAPLVDCIRTRWARAVCSWSGDPPSIV

SEQ ID NO: 24032 - protein, 255 aa, Glycine max
MDLGGGMFVKGISRYVEVGFLTLLESLNFCKVGQFLKSPKWPIWVVGSESHYTVLFALDPSVQNENELEGRETQIRKAFDAQDQSGGGGFISVEGFHQVLRETNIKFPPEKLEHLCSAGFIVWSEFWQVILDLDKSLGGLKDSSGLMGKKVFDLYHFNGIAKSDLNGSQVNSGGETPLQRPRLTKLRVSVPPRWTPEEFMADVKVPSAASASESAGKDNEVSKPEPSKHAPLVDCIRTRWARAVCSWSGDPPSIV

SEQ ID NO: 24033 - protein, 249 aa, Glycine max
MFVKGISRYVEVGFLTLLESLNFCKVGQFLKSPKWPIWVVGSESHYTVLFALDPSVQNENELEGRETQIRKAFDAQDQSGGGGFISVEGFHQVLRETNIKFPPEKLEHLCSAGFIVWSEFWQVILDLDKSLGGLKDSSGLMGKKVFDLYHFNGIAKSDLNGSQVNSGGETPLQRPRLTKLRVSVPPRWTPEEFMADVKVPSAASASESAGKDNEVSKPEPSKHAPLVDCIRTRWARAVCSWSGDPPSIV

SEQ ID NO: 24034 - DNA, 1686 bp, Glycine max
actgtgtgatattgtttgttccaactcttgatgcttcttttgggtgttcagaggtcagtgaggcagaaacaacctgttatagaaaaagaacaaattttcccatctcatccacaactcctctcagtgggtttgatttggtgtgattattaccccatgctcctcttcttgttatgttatctcttcaacttcaaccttcacggatatccacaaaaaaacaaactttttggttggaccactccagttcaagcatagtggagctcctttcttgagatatatcaactgggttttgtgcaacttttctcttttgccttgtggaacaggaagtatcataaagcaccaaactttgtgcgccctgaggggtggattgctgagaaattttttgggtttgcttcaattttgcttttgcagttgaagattcatggtgggttgcttggtggttcagctttttgaatgttctgctcaagctgctggggcttgccttgaatctccaggactgttacgttggtgaatttggcaaggatgtctgtgaatcgaaggcttcctgcttcaaatggtagattgctatcaaatatgaagtcttggaagctgaatgagcctctgcatgggtctaattgtcccagggcatgcaggaggaagcccttgcttctttggttttttggctttgttgccatagggactgtttggttcatcttgagtttcaatagtaagtatttgatgagcaaggagaatgaagcaatttgtgaagagagagagagaatcttgctacaacgttacaatgttagtaggaaacagattcatgctttggcttccttgctctctggatcagatcagattttatccaactgtattgatgaaagaagacttcaaatgctgctaggcagcggcatggttagcactccacagttaatgtgtccggagaatcaggagttacaaaaggagcatacatgtgttgtagacactgtagaacctatagaacaatgcccaattcttgatgattatgtccagacaaggctcgaattatcattcccattgaaaaattatgtatcattggccttgcgctctgcactttcaactgatttggttagttatttgcaccgcggaaagaacactgtgcaatcatgggaactgagggtatctgcaattcggtatcatgtgagttcatctaatttaattaaaggatgctggtgggtcattggaattataatgtcctacttctgtttactatggaggagtcaaaagcagaagctagttcaggggcatccaggtgcacaacaaaagcagttgaaacattttccaaggggtccttcaaggggtactgggaggtggaggaaaaagttactagttatatttgtgtcacttggaattatcgggtccttttggttattttggcacctgaatacgggcattatgcagagaagagaagaaacactagcaaatatgtgtgatgagagagcccgtatgctgcaagatcagtttaatgtgagcatgaaccatgttcatgctctggctatccttgtatctacctttcaccatggtaaacatccttctgcaattgaccagaaaatttttggagaatatacagagagtacagcatttgaaagaccacttactagtggtgttgcttatgctttgaaagttctccactctgataggatgcattttgagaagcagcatgggtggacaatt

SEQ ID NO: 24035 - protein, 389 aa, Glycine max
MSVNRRLPASNGRLLSNMKSWKLNEPLHGSNCPRACRRKPLLLWFFGFVAIGTVWFILSFNSKYLMSKENEAICEERERILLQRYNVSRKQIHALASLLSGSDQILSNCIDERRLQMLLGSGMVSTPQLMCPENQELQKEHTCVVDTVEPIEQCPILDDYVQTRLELSFPLKNYVSLALRSALSTDLVSYLHRGKNTVQSWELRVSAIRYHVSSSNLIKGCWWVIGIIMSYFCLLWRSQKQKLVQGHPGAQQKQLKHFPRGPSRGTGRWRKKLLVIFVSLGIIGSFWLFWHLNTGIMQRREETLANMCDERARMLQDQFNVSMNHVHALAILVSTFHHGKHPSAIDQKIFGEYTESTAFERPLTSGVAYALKVLHSDRMHFEKQHGWTI

SEQ ID NO: 24036 - protein, 372 aa, Glycine max
MKSWKLNEPLHGSNCPRACRRKPLLLWFFGFVAIGTVWFILSFNSKYLMSKENEAICEERERILLQRYNVSRKQIHALASLLSGSDQILSNCIDERRLQMLLGSGMVSTPQLMCPENQELQKEHTCVVDTVEPIEQCPILDDYVQTRLELSFPLKNYVSLALRSALSTDLVSYLHRGKNTVQSWELRVSAIRYHVSSSNLIKGCWWVIGIIMSYFCLLWRSQKQKLVQGHPGAQQKQLKHFPRGPSRGTGRWRKKLLVIFVSLGIIGSFWLFWHLNTGIMQRREETLANMCDERARMLQDQFNVSMNHVHALAILVSTFHHGKHPSAIDQKIFGEYTESTAFERPLTSGVAYALKVLHSDRMHFEKQHGWTI

SEQ ID NO: 24037 - protein, 324 aa, Glycine max
MSKENEAICEERERILLQRYNVSRKQIHALASLLSGSDQILSNCIDERRLQMLLGSGMVSTPQLMCPENQELQKEHTCVVDTVEPIEQCPILDDYVQTRLELSFPLKNYVSLALRSALSTDLVSYLHRGKNTVQSWELRVSAIRYHVSSSNLIKGCWWVIGIIMSYFCLLWRSQKQKLVQGHPGAQQKQLKHFPRGPSRGTGRWRKKLLVIFVSLGIIGSFWLFWHLNTGIMQRREETLANMCDERARMLQDQFNVSMNHVHALAILVSTFHHGKHPSAIDQKIFGEYTESTAFERPLTSGVAYALKVLHSDRMHFEKQHGWTI

SEQ ID NO: 24038 - DNA, 1462 bp, Glycine max
gattacaagagccttcagataatgtcactgagaacctcaaaagtgaagttgcttctcttaagaggaaagtggaagaatcagaacatgagttacaatcgcttcagaagctgatggagaaggaatgcagtcgaggacaaagtatgtcaagacagataatcagcctcagagatgagagaaatatgatcaaaactaaatatgagcaactcctgtcccagcaaaatgagaccaaatctttaaaagccttacagactgagattgcagatgctagacagcagttagaagcaacaaaagaagagtttctttatgaaaaagagtttagttctaatcttcaattgcaactccagaagacacaaaactcaaactctgaactgcttttggcagtgagagaacttgaagcaatgctggaacaaaagaataaggaattgttggaaaataataaagagaatgaggatgccacagaattagatcacttgaagcagaaaattgcagaccagaatggtgaaatagacaattattacaagcaatgtgaagagctaaatgggcacataaaagagctcaattttgaatgtgaggttctgaagaaagaaaacctgaatatctctttgagattaaaacacggagaagaacaacaagttgtgttgcaaaataaacattcagcttctttggcaactatagaacaacttgaatcacaagtacagagattagaagagaagataaagaatcaggcagatgatttttcagagactttgatttacatcaatgaacttgaaaatcaagtcagtgatttggagagagaactgaaaacgcaagcagaaaaatttgaaaaagatttccatgctatgaaatgtgcaaaacttgagcaggaagaacgggccaccgaagcagaggagacattgataaagacaagacacaacaatgatctcagatgtcagcgtttgcaggatgaatatagaagtctttctgttgaaatggcattgaaagtagaagaaaatgaaaagaagaccatggaagcttgtgcagaagctgatgaatttcggaagcagaacaaacttatggaaaaaatgctccagaaatgcaatcaagagctcaggcttattacaaatcagaatgaatcaaaactgcaacagctcttgaaccaaatagattcaaaacaaaaggcaatagaaatgatgtcacaagaactagagattaagtccaaacaacttgaagatctacaaaggcacagggatgaacaggatgaggcattatcgaagcaaattcaattgctcagaattgaaattagaaagctgatggcagaggagcatgcattgtctaaaactgagtcaaaagagaacatgacaacgatgttaatgctagagaacaatgatgaggaggagataaggcttggcaccctaatgtcagaagtagaaatccttaagacccagcacaatgaattgaaacataacttgcacacggaacaagc

SEQ ID NO: 24039 - protein, 486 aa, Glycine max
LQEPSDNVTENLKSEVASLKRKVEESEHELQSLQKLMEKECSRGQSMSRQIISLRDERNMIKTKYEQLLSQQNETKSLKALQTEIADARQQLEATKEEFLYEKEFSSNLQLQLQKTQNSNSELLLAVRELEAMLEQKNKELLENNKENEDATELDHLKQKIADQNGEIDNYYKQCEELNGHIKELNFECEVLKKENLNISLRLKHGEEQQVVLQNKHSASLATIEQLESQVQRLEEKIKNQADDFSETLIYINELENQVSDLERELKTQAEKFEKDFHAMKCAKLEQEERATEAEETLIKTRHNNDLRCQRLQDEYRSLSVEMALKVEENEKKTMEACAEADEFRKQNKLMEKMLQKCNQELRLITNQNESKLQQLLNQIDSKQKAIEMMSQELEIKSKQLEDLQRHRDEQDEALSKQIQLLRIEIRKLMAEEHALSKTESKENMTTMLMLENNDEEEIRLGTLMSEVEILKTQHNELKHNLHTEQ

SEQ ID NO: 24040 - protein, 450 aa, Glycine max
MEKECSRGQSMSRQIISLRDERNMIKTKYEQLLSQQNETKSLKALQTEIADARQQLEATKEEFLYEKEFSSNLQLQLQKTQNSNSELLLAVRELEAMLEQKNKELLENNKENEDATELDHLKQKIADQNGEIDNYYKQCEELNGHIKELNFECEVLKKENLNISLRLKHGEEQQVVLQNKHSASLATIEQLESQVQRLEEKIKNQADDFSETLIYINELENQVSDLERELKTQAEKFEKDFHAMKCAKLEQEERATEAEETLIKTRHNNDLRCQRLQDEYRSLSVEMALKVEENEKKTMEACAEADEFRKQNKLMEKMLQKCNQELRLITNQNESKLQQLLNQIDSKQKAIEMMSQELEIKSKQLEDLQRHRDEQDEALSKQIQLLRIEIRKLMAEEHALSKTESKENMTTMLMLENNDEEEIRLGTLMSEVEILKTQHNELKHNLHTEQ

SEQ ID NO: 24041 - protein, 440 aa, Glycine max
MSRQIISLRDERNMIKTKYEQLLSQQNETKSLKALQTEIADARQQLEATKEEFLYEKEFSSNLQLQLQKTQNSNSELLLAVRELEAMLEQKNKELLENNKENEDATELDHLKQKIADQNGEIDNYYKQCEELNGHIKELNFECEVLKKENLNISLRLKHGEEQQVVLQNKHSASLATIEQLESQVQRLEEKIKNQADDFSETLIYINELENQVSDLERELKTQAEKFEKDFHAMKCAKLEQEERATEAEETLIKTRHNNDLRCQRLQDEYRSLSVEMALKVEENEKKTMEACAEADEFRKQNKLMEKMLQKCNQELRLITNQNESKLQQLLNQIDSKQKAIEMMSQELEIKSKQLEDLQRHRDEQDEALSKQIQLLRIEIRKLMAEEHALSKTESKENMTTMLMLENNDEEEIRLGTLMSEVEILKTQHNELKHNLHTEQ

SEQ ID NO: 24042 - DNA, 2811 bp, Glycine max
atggtcaatccctacactgcactcctcgctgttaactactacttcacgcagaagattaaaccctctaggcacgttgttctctacaacgtcaccctcaagctgtttagggcggtaagggatttcgaaggtgaagagaaggtgtttgatgaaatgcttcaaagaggggtcaacccaaatctcattacgttttcaactataattagctctgcttccatgttttctttgccgtacaaggctattgagttttttgagaaaatgccctcctttggggttcaacctgatgccggtgtaacatcctttatgattcatgcttatgcgtgtagttggaatgctgatatggctttgaaactgtatgatcgtgcaaaaacagagaaatggcgagttgatacggcagcattcttggcattgattaagatgtttgggaagtttgacgattttgatggatgtttaagagtttacaatgatatgaaggttcttggtgccaagcctatcaaggaaacttatgacactctgttgaatgtcatggggagagctaagagagccggggacaccaaggctatatatgaggagatgataagtaatggattttcacccaattggcctacctatgcagctcttttagaagcctattgtaaagcacggtgtcatgaggatgcgctgagagtttataaggaaatgaaggaaaagagaattaatgttgatgtatttctttataacttgctttttgaaatgtgtgctgatgttggttgcatggatgaagctgttgaaatctttaaagacatgaaaagttcatggacttgccagccagacaattttacatactcgtgcttgatcaacatgtacagttctcatctcaaactcaccgagtctttggaatcaagcaatccatgggagcaacaggtctccacaattttgaagggtataggggacatggtttcagaaggagatgttatatttattctcaataggatggtaaatcccaacactgcatcctttgttcttaaatacttcctgaacaggattaatttcactatagataaggagttgattttttacaatgcggtcctgaatttgtttaggaagtatagggattttgaaggagcaaagaagttgttcgacgaaatgcttcaaagaggggtaaaacctaataactttacattttcaactatggttaactgtgctaataagcctgtcgagttgtttgaaaagatgtctggctttgggtatgaacctgatggcatcacatgctcggccatggtatatgcttatgcactttctaataatgttgacaaggctgtgagcctatatgatcgtgcaatagcagagaaatggtgccttgatgcagcaacgttctcagcattgattaagatgtatagcatggcaggaaattatgataaatgcttgaaagtctaccaagaaatgaaagttcttggtgcgaagcctaatgtggtgacatataacactctgttgggtgccatgttgaaagctcagaagcaccgacaggccaaggctatatataaagagatgaaaagtaatggagtttcaccagattttataacatatgcatgtcttttggaagtctatactatagcacattgtagtgaagaggctcttggtgtttataaggaaatgaaggggaatggaatggatatgactgcagatctttataacaagcttttagctatgtgtgctgatgttggctacacagatagagcagctgaaattttttatgaaatgaaaagttctgggacttgccagcctgacagttggacattttcatccatgattaccatgtattcccgcagtggtaaagtttcagaggcagaagggatgttgaatgaaatgatccaatctggatttcaacctactatttttgttctgacatcacttgtccattgctatgggaaagctaagcgaactgatgatgttgtgaaggtatttaagcaacttctggatttgggtattgttccaaatgatcacttctgctgttctcttctaaatgttctgactcaaacaccaaaagaagagtatggtaagctaacagattgcattgaaaaggctaacacaaagcttggttctgtggtaaaatatttggtggaggaggagggtgacggggattttaaaaaggaagcatcagaatttcttaattcaattgatgccaaagtaaagatgcctttgtgcaattgtctaattgatctttgtgtcaaactgaatgtgcctgaaagagcatgtgaccttctggatttaggactggtgcttgagatatatccaaatatccaatccaaatcccaaactcagtggtctttgcatctgaaagagctctcggttggtgctgctatgactgcattacatgtttggatcaatgagttgtctaaggcattggaatcaggggaggaccttcctccactacttggaattaatactgggaaaggaaaacttaagtattcagaaaaaggcttagctggtgtatttgaatcacatttgaaggaactccatgctccatttcatgaggctaaggctggctggtttttggttacaaaggctgctgccaaatcatggctggagtctagaggttcaattgctgatttgaactttgaactctatggttttacgtgttccaacttccaacaatgaccttaagtatcgataatattgtttgagaaacgatgtgccatgctaatgtttttggcattttcctattcgttttgtagaaattttgtactgtatatgattgtacagaacttcgtgtgaagaaatacaagtatgattatgaacacatgattttaattttattttctattattaatttag

SEQ ID NO: 24043 - protein, 877 aa, Glycine max
MVNPYTALLAVNYYFTQKIKPSRHVVLYNVTLKLFRAVRDFEGEEKVFDEMLQRGVNPNLITFSTIISSASMFSLPYKAIEFFEKMPSFGVQPDAGVTSFMIHAYACSWNADMALKLYDRAKTEKWRVDTAAFLALIKMFGKFDDFDGCLRVYNDMKVLGAKPIKETYDTLLNVMGRAKRAGDTKAIYEEMISNGFSPNWPTYAALLEAYCKARCHEDALRVYKEMKEKRINVDVFLYNLLFEMCADVGCMDEAVEIFKDMKSSWTCQPDNFTYSCLINMYSSHLKLTESLESSNPWEQQVSTILKGIGDMVSEGDVIFILNRMVNPNTASFVLKYFLNRINFTIDKELIFYNAVLNLFRKYRDFEGAKKLFDEMLQRGVKPNNFTFSTMVNCANKPVELFEKMSGFGYEPDGITCSAMVYAYALSNNVDKAVSLYDRAIAEKWCLDAATFSALIKMYSMAGNYDKCLKVYQEMKVLGAKPNVVTYNTLLGAMLKAQKHRQAKAIYKEMKSNGVSPDFITYACLLEVYTIAHCSEEALGVYKEMKGNGMDMTADLYNKLLAMCADVGYTDRAAEIFYEMKSSGTCQPDSWTFSSMITMYSRSGKVSEAEGMLNEMIQSGFQPTIFVLTSLVHCYGKAKRTDDVVKVFKQLLDLGIVPNDHFCCSLLNVLTQTPKEEYGKLTDCIEKANTKLGSVVKYLVEEEGDGDFKKEASEFLNSIDAKVKMPLCNCLIDLCVKLNVPERACDLLDLGLVLEIYPNIQSKSQTQWSLHLKELSVGAAMTALHVWINELSKALESGEDLPPLLGINTGKGKLKYSEKGLAGVFESHLKELHAPFHEAKAGWFLVTKAAAKSWLESRGSIADLNFELYGFTCSNFQQ

SEQ ID NO: 24044 - protein, 827 aa, Glycine max
MLQRGVNPNLITFSTIISSASMFSLPYKAIEFFEKMPSFGVQPDAGVTSFMIHAYACSWNADMALKLYDRAKTEKWRVDTAAFLALIKMFGKFDDFDGCLRVYNDMKVLGAKPIKETYDTLLNVMGRAKRAGDTKAIYEEMISNGFSPNWPTYAALLEAYCKARCHEDALRVYKEMKEKRINVDVFLYNLLFEMCADVGCMDEAVEIFKDMKSSWTCQPDNFTYSCLINMYSSHLKLTESLESSNPWEQQVSTILKGIGDMVSEGDVIFILNRMVNPNTASFVLKYFLNRINFTIDKELIFYNAVLNLFRKYRDFEGAKKLFDEMLQRGVKPNNFTFSTMVNCANKPVELFEKMSGFGYEPDGITCSAMVYAYALSNNVDKAVSLYDRAIAEKWCLDAATFSALIKMYSMAGNYDKCLKVYQEMKVLGAKPNVVTYNTLLGAMLKAQKHRQAKAIYKEMKSNGVSPDFITYACLLEVYTIAHCSEEALGVYKEMKGNGMDMTADLYNKLLAMCADVGYTDRAAEIFYEMKSSGTCQPDSWTFSSMITMYSRSGKVSEAEGMLNEMIQSGFQPTIFVLTSLVHCYGKAKRTDDVVKVFKQLLDLGIVPNDHFCCSLLNVLTQTPKEEYGKLTDCIEKANTKLGSVVKYLVEEEGDGDFKKEASEFLNSIDAKVKMPLCNCLIDLCVKLNVPERACDLLDLGLVLEIYPNIQSKSQTQWSLHLKELSVGAAMTALHVWINELSKALESGEDLPPLLGINTGKGKLKYSEKGLAGVFESHLKELHAPFHEAKAGWFLVTKAAAKSWLESRGSIADLNFELYGFTCSNFQQ

SEQ ID NO: 24045 - protein, 806 aa, Glycine max
MFSLPYKAIEFFEKMPSFGVQPDAGVTSFMIHAYACSWNADMALKLYDRAKTEKWRVDTAAFLALIKMFGKFDDFDGCLRVYNDMKVLGAKPIKETYDTLLNVMGRAKRAGDTKAIYEEMISNGFSPNWPTYAALLEAYCKARCHEDALRVYKEMKEKRINVDVFLYNLLFEMCADVGCMDEAVEIFKDMKSSWTCQPDNFTYSCLINMYSSHLKLTESLESSNPWEQQVSTILKGIGDMVSEGDVIFILNRMVNPNTASFVLKYFLNRINFTIDKELIFYNAVLNLFRKYRDFEGAKKLFDEMLQRGVKPNNFTFSTMVNCANKPVELFEKMSGFGYEPDGITCSAMVYAYALSNNVDKAVSLYDRAIAEKWCLDAATFSALIKMYSMAGNYDKCLKVYQEMKVLGAKPNVVTYNTLLGAMLKAQKHRQAKAIYKEMKSNGVSPDFITYACLLEVYTIAHCSEEALGVYKEMKGNGMDMTADLYNKLLAMCADVGYTDRAAEIFYEMKSSGTCQPDSWTFSSMITMYSRSGKVSEAEGMLNEMIQSGFQPTIFVLTSLVHCYGKAKRTDDVVKVFKQLLDLGIVPNDHFCCSLLNVLTQTPKEEYGKLTDCIEKANTKLGSVVKYLVEEEGDGDFKKEASEFLNSIDAKVKMPLCNCLIDLCVKLNVPERACDLLDLGLVLEIYPNIQSKSQTQWSLHLKELSVGAAMTALHVWINELSKALESGEDLPPLLGINTGKGKLKYSEKGLAGVFESHLKELHAPFHEAKAGWFLVTKAAAKSWLESRGSIADLNFELYGFTCSNFQQ

SEQ ID NO: 24046 - DNA, 1332 bp, Glycine max
aaacttgactaatgaaattgagataacaaacgaaaaccttgacaaaatgcaatataagtttaatgaaaagactatgtccttgagtaggatgcttgaggagaaagataagcttcacaatgcctttgaagaagaatcaaggaatatgcagcgtagagctcgtaacgaggtacgaaggatcttggatgaacaagaaaagctgagtagtgaattggaggaaaaaaagcggaaacttgattcctggagtagagatctaaacaaacgtgaggccctaactgatcaagagaagaagaaactagatgaggacaagaagaagaaagatttgaggaatgaatcactccaattggcttcaaaggaacaaaagatagctgatgagaatgtcttgaggcttgttgaagagcaaaagcgagagaaagaggaggcctataacaagatacttcagttggaaaaacagttagatgccaaacaaaagttggaaatggaaattgaagagttaaaagggaaattgcaagttatgaagcatcttggagatgaagatgatgcagctgttcagaataaaataaaggagatgaatgatgaattgcaagaaaaagtagacaatttggaaaatatggaggccatgaatcaaaccctcatcgtgaaggagcgccaaagtaatgatgaactgcaggaagctcgtaaagaattaataaacgggttagacgatatgctgaatggtcctagaactaatattgggctcaagagaatgggagagcttgatcagaagatttttgtgaataactgcaagaaaagatttcctcttgaagaagctgggaccaaaggtgtcgagctttgctctttgtggcaggagaacgtgaagaattcagcttggcatccatttaaagtggtcacagttgatgataaaccagagaatattataaatgaggaagatgagaagttaagaagcctcaagcaggaatggggggatgagatatattcagctgttgttacagccctaaaagaaataaatgaatacaatgcaagtggtgggtatactgttaaagagctatggaacttcaaggaaaaaagaaaggctacattgaaagaagttatcaattatattatggatcatatcaagccacttaagcgcaagagagcttaggcaaaaggggataaatgcctgatagctcaaccggtagatggaagtatcaccgtttcttgggcttatacgagccatttgaaacaagctactgaagataagcgtagaatgtgataacatttcatcaataatggatttgaacatctgtaatctggcaaatatccctaaatactaacaacgaatcaattttctgaggt

SEQ ID NO: 24047 - protein, 378 aa, Glycine max
NLTNEIEITNENLDKMQYKFNEKTMSLSRMLEEKDKLHNAFEEESRNMQRRARNEVRRILDEQEKLSSELEEKKRKLDSWSRDLNKREALTDQEKKKLDEDKKKKDLRNESLQLASKEQKIADENVLRLVEEQKREKEEAYNKILQLEKQLDAKQKLEMEIEELKGKLQVMKHLGDEDDAAVQNKIKEMNDELQEKVDNLENMEAMNQTLIVKERQSNDELQEARKELINGLDDMLNGPRTNIGLKRMGELDQKIFVNNCKKRFPLEEAGTKGVELCSLWQENVKNSAWHPFKVVTVDDKPENIINEEDEKLRSLKQEWGDEIYSAVVTALKEINEYNASGGYTVKELWNFKEKRKATLKEVINYIMDHIKPLKRKRA

SEQ ID NO: 24048 - protein, 363 aa, Glycine max
MQYKFNEKTMSLSRMLEEKDKLHNAFEEESRNMQRRARNEVRRILDEQEKLSSELEEKKRKLDSWSRDLNKREALTDQEKKKLDEDKKKKDLRNESLQLASKEQKIADENVLRLVEEQKREKEEAYNKILQLEKQLDAKQKLEMEIEELKGKLQVMKHLGDEDDAAVQNKIKEMNDELQEKVDNLENMEAMNQTLIVKERQSNDELQEARKELINGLDDMLNGPRTNIGLKRMGELDQKIFVNNCKKRFPLEEAGTKGVELCSLWQENVKNSAWHPFKVVTVDDKPENIINEEDEKLRSLKQEWGDEIYSAVVTALKEINEYNASGGYTVKELWNFKEKRKATLKEVINYIMDHIKPLKRKRA

SEQ ID NO: 24049 - protein, 354 aa, Glycine max
MSLSRMLEEKDKLHNAFEEESRNMQRRARNEVRRILDEQEKLSSELEEKKRKLDSWSRDLNKREALTDQEKKKLDEDKKKKDLRNESLQLASKEQKIADENVLRLVEEQKREKEEAYNKILQLEKQLDAKQKLEMEIEELKGKLQVMKHLGDEDDAAVQNKIKEMNDELQEKVDNLENMEAMNQTLIVKERQSNDELQEARKELINGLDDMLNGPRTNIGLKRMGELDQKIFVNNCKKRFPLEEAGTKGVELCSLWQENVKNSAWHPFKVVTVDDKPENIINEEDEKLRSLKQEWGDEIYSAVVTALKEINEYNASGGYTVKELWNFKEKRKATLKEVINYIMDHIKPLKRKRA

SEQ ID NO: 24050 - DNA, 1277 bp, Glycine max
aaccttgccatggatttaaagcagaagcacaacgttggaagtaaatcaaaaccaagccttgatgcatcatccaatgttatttctttctcttctggttctgcccctttggtccgagacaagaaccttggaggcagcaagtctttaccatccaataaaagggctttggcagattataagaattattctgaacttaataggaatgcaaaggaaaaggcttatactgttcatctgaaaaattgtcctgataaggctggtgggagttttcttagagcacaaggaacagatggctctggtataacttctgccaaagatgctagcactaggactgcttctgcagaaaggctcagggaacctttaccttcccatggaagaaaggagcttatcagccttgtgaatactatgaaatgtgcaaacagttcaacaataggtccttcttctcaaaggaaaagggttactgctccctcaagcaaggcagatgacaacattttttatattaccccgatgcctttgcattcatctattgttggtgggggattattgagaagcaaaggtgatggaaagaaaaaagaaggttcatgtgttggaaccaaaggatttcgtgctccggaggttttgttaaggtctcagcatcagggacataagattgatatttggtcagctggagtcactctactctacttggtgatcgggaagactcctttcactggcgacccagaacagaatataaaagaaattgttaaattgcggggcagtgaagagttttgggaagtggctaagctacatgaccgtgaattatcttttcctgtggagttacttaatgaccgatacttacagtcatgggatttagaaggctggtgcaaggttcacacaaagagacctgagtttcttgagcagatccccaaatcgttatttgatttgatagacaagtgtctaacagttaacccaagaaataggctcagtgctgaagatgttctaagacatgaattctttgactcagttaatgagtccctgaggaagaaaaggatgattcatcgtcatcgagctcttgggtcggatgacactgcagcttccagagcaatctgacatcagtttcattatgtgcatgtatttttggtagcaactgatcgcatgagtagttgttactgtgtatttttttgaggtgatggtggttaacccataagagggtttccttacctgttattgatggctgtatatatgactatatcagagaaacctagcagagtaacttgtaagttgtgtaagctccttaaatttag

SEQ ID NO: 24051 - protein, 360 aa, Glycine max
NLAMDLKQKHNVGSKSKPSLDASSNVISFSSGSAPLVRDKNLGGSKSLPSNKRALADYKNYSELNRNAKEKAYTVHLKNCPDKAGGSFLRAQGTDGSGITSAKDASTRTASAERLREPLPSHGRKELISLVNTMKCANSSTIGPSSQRKRVTAPSSKADDNIFYITPMPLHSSIVGGGLLRSKGDGKKKEGSCVGTKGFRAPEVLLRSQHQGHKIDIWSAGVTLLYLVIGKTPFTGDPEQNIKEIVKLRGSEEFWEVAKLHDRELSFPVELLNDRYLQSWDLEGWCKVHTKRPEFLEQIPKSLFDLIDKCLTVNPRNRLSAEDVLRHEFFDSVNESLRKKRMIHRHRALGSDDTAASRAI

SEQ ID NO: 24052 - protein, 357 aa, Glycine max
MDLKQKHNVGSKSKPSLDASSNVISFSSGSAPLVRDKNLGGSKSLPSNKRALADYKNYSELNRNAKEKAYTVHLKNCPDKAGGSFLRAQGTDGSGITSAKDASTRTASAERLREPLPSHGRKELISLVNTMKCANSSTIGPSSQRKRVTAPSSKADDNIFYITPMPLHSSIVGGGLLRSKGDGKKKEGSCVGTKGFRAPEVLLRSQHQGHKIDIWSAGVTLLYLVIGKTPFTGDPEQNIKEIVKLRGSEEFWEVAKLHDRELSFPVELLNDRYLQSWDLEGWCKVHTKRPEFLEQIPKSLFDLIDKCLTVNPRNRLSAEDVLRHEFFDSVNESLRKKRMIHRHRALGSDDTAASRAI

SEQ ID NO: 24053 - protein, 227 aa, Glycine max
MKCANSSTIGPSSQRKRVTAPSSKADDNIFYITPMPLHSSIVGGGLLRSKGDGKKKEGSCVGTKGFRAPEVLLRSQHQGHKIDIWSAGVTLLYLVIGKTPFTGDPEQNIKEIVKLRGSEEFWEVAKLHDRELSFPVELLNDRYLQSWDLEGWCKVHTKRPEFLEQIPKSLFDLIDKCLTVNPRNRLSAEDVLRHEFFDSVNESLRKKRMIHRHRALGSDDTAASRAI

SEQ ID NO: 24054 - DNA, 1467 bp, Glycine max
aggcaacctccttttcgtgagtctttaagaaagggaaaacttagaaagcaagaattagttcttacgaagcagaagactgctcttatacaggcagcggactccattggcaagagaatccagtatgattgtcctggtttcctacctaatggacgccagcatcgtatggcaggatttgctgctattgaaattgcacaaaaggtctccaaggcttggcgttcctttcaagcagaatggaaacattctaataaaaataactcaaactcaaagaatggcaaaagggcaaggagaagggaaagaattaatatgctcagtcagaataggggaggtgcaggttgtagcacaagtagtgcctctgaaatatctccttcatatggcattgcagttgatagatcatccagccgttccatgtcatggcaagatgtttattcaatagctgttagatggagacaaatttctgagccttgtgatcctgttgtgtgggtgaacaagttaagtgaagagtttaattctggatttggttctcacactcctatgattctgggacaagccaaagttgtccgttactttcctaactatgaaaggacattagatattgcaaagactgtcataaaagagaaatcatatgtctacagcaagacagatcagatcattcgtctttccaaagatgggaaattagaagaggtcattcatgccaattctgtctctgatctttataatgttgttggtgaggatttctggtcatctacttggtgcaacagtactgcatttgaagggaaacaacttgaggggacaaggataacacttgtaaaaatgggggagaatggttttgattttgcaattagaacaccttgtacacctgctagatgggaggattatgatgcagaaatggcaatggcatgggaagctctctgcaatgcttactgtggtgaaaattatgggtctactgatttcgacgtgcttgaaaatgtgagagatgcaattttaaggatgacatattactggtataacttcatgccactgtccagaggatctgctgtagtcggatttgtagtcatgctgggtttgttacttgctgccaatatggagttcacaggaagcatcccacaaggttttcaggttgattgggaagccgttttgaacttggatcctaattcctttgtggattctgtcaaaagttggctatacccatctctgaaggtaacaacctcatggaaagactatcatgatgttgcgtcaacttttgcaacaacagggtcggttgttgctgccttgagctcttctgatgattgaactccttggaataatgacaggttagtcaatggccaagttattttcaatttctgtttttcttaatttctggtcttgtactgttgtttttgcaattaattacccaatacaacagaacggttcaattcaatgtctctgctaaagcaaacacaaggttctatctgcttttgtacgcttctg

SEQ ID NO: 24055 - protein, 429 aa, Glycine max
RQPPFRESLRKGKLRKQELVLTKQKTALIQAADSIGKRIQYDCPGFLPNGRQHRMAGFAAIEIAQKVSKAWRSFQAEWKHSNKNNSNSKNGKRARRRERINMLSQNRGGAGCSTSSASEISPSYGIAVDRSSSRSMSWQDVYSIAVRWRQISEPCDPVVWVNKLSEEFNSGFGSHTPMILGQAKVVRYFPNYERTLDIAKTVIKEKSYVYSKTDQIIRLSKDGKLEEVIHANSVSDLYNVVGEDFWSSTWCNSTAFEGKQLEGTRITLVKMGENGFDFAIRTPCTPARWEDYDAEMAMAWEALCNAYCGENYGSTDFDVLENVRDAILRMTYYWYNFMPLSRGSAVVGFVVMLGLLLAANMEFTGSIPQGFQVDWEAVLNLDPNSFVDSVKSWLYPSLKVTTSWKDYHDVASTFATTGSVVAALSSSDD

SEQ ID NO: 24056 - protein, 375 aa, Glycine max
MAGFAAIEIAQKVSKAWRSFQAEWKHSNKNNSNSKNGKRARRRERINMLSQNRGGAGCSTSSASEISPSYGIAVDRSSSRSMSWQDVYSIAVRWRQISEPCDPVVWVNKLSEEFNSGFGSHTPMILGQAKVVRYFPNYERTLDIAKTVIKEKSYVYSKTDQIIRLSKDGKLEEVIHANSVSDLYNVVGEDFWSSTWCNSTAFEGKQLEGTRITLVKMGENGFDFAIRTPCTPARWEDYDAEMAMAWEALCNAYCGENYGSTDFDVLENVRDAILRMTYYWYNFMPLSRGSAVVGFVVMLGLLLAANMEFTGSIPQGFQVDWEAVLNLDPNSFVDSVKSWLYPSLKVTTSWKDYHDVASTFATTGSVVAALSSSDD

SEQ ID NO: 24057 - protein, 328 aa, Glycine max
MLSQNRGGAGCSTSSASEISPSYGIAVDRSSSRSMSWQDVYSIAVRWRQISEPCDPVVWVNKLSEEFNSGFGSHTPMILGQAKVVRYFPNYERTLDIAKTVIKEKSYVYSKTDQIIRLSKDGKLEEVIHANSVSDLYNVVGEDFWSSTWCNSTAFEGKQLEGTRITLVKMGENGFDFAIRTPCTPARWEDYDAEMAMAWEALCNAYCGENYGSTDFDVLENVRDAILRMTYYWYNFMPLSRGSAVVGFVVMLGLLLAANMEFTGSIPQGFQVDWEAVLNLDPNSFVDSVKSWLYPSLKVTTSWKDYHDVASTFATTGSVVAALSSSDD

SEQ ID NO: 24058 - DNA, 1616 bp, Glycine max
agggacgatttttgttgataatctaaaacaagcagtagatcttgatgtcgtcgttaaagcaactctgaaagacagcaacaagctcagcagtggaactttcagcactgtttacaaggcaatcatgccttccggggtggtcttatctgttaggagactgaagtctgtagacaagacaataatccaccaccagaacaagatgattagagaacttgaaagactaagcaaagtttgtcatgaaaatctagtgcgtcccattggctatgtcatttatgaagatgttgctcttctcttgcatcattattttccaaatggaacattggctcagcttcttcatgaatctaccaggaaacctgaataccagcctgactggccctctagattatccattgccattggtgtggccgaagggttggctttccttcatcatgtggcaatcatccatcttgatatctcttcaggcaatgttctcttggatgcaaattccaagccagtggttgcggagattgagatttcaaaacttctagatccaaccaaaggcactgcaagtattagtgcagttgctggttcttttggttacataccaccaggtatactactttctggcatgcaattcttccatctattgattctattcttcctattaacttttgtagtaaatattctttatactatcatctaaattacaaattgccatttatggttagttaattgattaacagtgaactttttttatactgaaaatacagagaaattaaactataacttttattgcgtttagcatgcttcatgttacatttcttctttaatgcagaatatgcatatactatgcaagtcactgcaccaggaaatgtttatagctatggtgttgttctgttggaaatccttacaactagactaccagttgatgaggactttggtgaaggtgtagatttggtgaaatgggttcacagtgctccggtaagaggggaaactccagagcagatattggatgctaagcttagcacagtttcctttggttggaggaaagaaatgcttgccgctttgaaggtcgcgttgctgtgcactgacaacacaccagccaaacgaccaaaaatgaagaatgtcgtggaaatgcttcgagagataaaagaaaattgagaacagcaagccactcaagtattctattctgtgctgtaatctacaccgttgaagatttgatgtatgcaaaactctcacggatacaacagagggactgatgagttacaacttacaacaactttaaagtagtagacttgtatgaggaattattccatgtggtgaagttggtgtgtcatagtaaattcaggcattgatagaaacttcacctttgtagtttgtccaaagggttagttgtgaaatggcagcttgtctatttgagttggacactatgttaggttaggggaggacaaatactagcagaaaccttgaaatgggacatatcagttcctgttgcatataagctagtccacagttttcatattgaatttactcatttgggagatgtatgcaccaatcaatcagtctgttcccattgaaactgaaagttcaaatttatttttgttgaaatagcagacagtatgtctgaattgtgcacatgc

SEQ ID NO: 24059 - protein, 225 aa, Glycine max
GTIFVDNLKQAVDLDVVVKATLKDSNKLSSGTFSTVYKAIMPSGVVLSVRRLKSVDKTIIHHQNKMIRELERLSKVCHENLVRPIGYVIYEDVALLLHHYFPNGTLAQLLHESTRKPEYQPDWPSRLSIAIGVAEGLAFLHHVAIIHLDISSGNVLLDANSKPVVAEIEISKLLDPTKGTASISAVAGSFGYIPPGILLSGMQFFHLLILFFLLTFVVNILYTII

SEQ ID NO: 24060 - protein, 185 aa, Glycine max
MPSGVVLSVRRLKSVDKTIIHHQNKMIRELERLSKVCHENLVRPIGYVIYEDVALLLHHYFPNGTLAQLLHESTRKPEYQPDWPSRLSIAIGVAEGLAFLHHVAIIHLDISSGNVLLDANSKPVVAEIEISKLLDPTKGTASISAVAGSFGYIPPGILLSGMQFFHLLILFFLLTFVVNILYTII

SEQ ID NO: 24061 - protein, 160 aa, Glycine max
MIRELERLSKVCHENLVRPIGYVIYEDVALLLHHYFPNGTLAQLLHESTRKPEYQPDWPSRLSIAIGVAEGLAFLHHVAIIHLDISSGNVLLDANSKPVVAEIEISKLLDPTKGTASISAVAGSFGYIPPGILLSGMQFFHLLILFFLLTFVVNILYTII

SEQ ID NO: 24062 - DNA, 1165 bp, Glycine max
agtgtatatctttacaagatggtgaatacgtaaaggaaatgtacatcttgtatcacaaattcaaattacatcgcctttgtcttgttcttggaaatcaaacatattactctaaattgccatgtgaaataattttgctcttgtttggcatttgacttaccttgtttgcttctctataaataccatactatccatatatagcatctatttcttacatatcacaattaactatcaacatccaattagggatttcgtgataatatggcttctacacttcatcgtgcattgtctcatttactcactcttgtagcttcactttcaatactccttgtgctcccttcctcttgtttcaatcccagaaagattgtcaatgcttcatacaactcaaacggtttatattggtcaccagctgtggccacttggtatggacctccccatggggatggaagtgaaggtggtgcttgtggttttggcagtgttgttggggtacctccattctcatcaatgatatctgcgggaagccctcttttgtttgaatcaggcaaaggatgtggtttttgttatgaggtgaagtgcacagggaattctggatgttcaggcaaccctgtgagggtagtgatcactgatgagtgtgctggatgctcggatgctcaattccattttgatttgagtggcactgcttttggtgccatggcagtttctggccaagatgaaaagctacgcaacgctggcaaaattgccattcaatatagaagagttgaatgcaactatcccggtgtatacatagcttttcacgtggacttaggatccaaccccgaatattttgcagtttgtgctgaatacgaggatgggaatggtgatcttgacaaagttgaactcaaggaagcattttcagcctcatggtattccatgcagcgatcatggggtgcaatttggaaactcagcaaaggttcaccacttaaagcaccattctccatcaggctaacagactctggcaaatctgttgtggctaacaatgtgatcccttcgggctggaaacctggccagacttatagatcaattgtgaattttagaatctaagttgtccattggtttggatcatcagcttgtagctctctccaacttaatgtaatatataaataagaagataaccctaatcttaatttct

SEQ ID NO: 24063 - protein, 272 aa, Glycine max
MASTLHRALSHLLTLVASLSILLVLPSSCFNPRKIVNASYNSNGLYWSPAVATWYGPPHGDGSEGGACGFGSVVGVPPFSSMISAGSPLLFESGKGCGFCYEVKCTGNSGCSGNPVRVVITDECAGCSDAQFHFDLSGTAFGAMAVSGQDEKLRNAGKIAIQYRRVECNYPGVYIAFHVDLGSNPEYFAVCAEYEDGNGDLDKVELKEAFSASWYSMQRSWGAIWKLSKGSPLKAPFSIRLTDSGKSVVANNVIPSGWKPGQTYRSIVNFRI

SEQ ID NO: 24064 - protein, 191 aa, Glycine max
MISAGSPLLFESGKGCGFCYEVKCTGNSGCSGNPVRVVITDECAGCSDAQFHFDLSGTAFGAMAVSGQDEKLRNAGKIAIQYRRVECNYPGVYIAFHVDLGSNPEYFAVCAEYEDGNGDLDKVELKEAFSASWYSMQRSWGAIWKLSKGSPLKAPFSIRLTDSGKSVVANNVIPSGWKPGQTYRSIVNFRI

SEQ ID NO: 24065 - DNA, 1456 bp, Glycine max
agtactcattatgctgaaagtaaatcaactaatgatactagtagagaccaaccaacagccccagcagtctcttctacaaccactagtaatgctgaaagcaattcatcatccacttccaagcttgaagaagagcttaaaattgcttccaggctgcgaaagttctctttcaatgaactcaagttagcaacaagaaatttccgacctgaaagttttcttggtgaaggtgggtttggttgtgttttcaaggggtggattgaagaaaatggaactgctccagtgaaacctggcacaggacttacggttgctgtaaaaaccctaaaccatgatgggctccagggtcataaagaatggctggctgaagtgaatttttttggtgacctagttcatccaaaccttgttaaacttgtaggttactgcattgaagaggatcaaaggttgctagtgtatgagttcatgcctcggggtagcctggaaaaccacttatttaggagatccattcctcttccatggtccattagaatgaaaattgcactaggagctgctaagggtcttgcttttcttcatgaagaagctgaacgaccagtaatatatagggattttaaaacttcaaacatattactggatgcagagtacaatgccaagctctcagattttggtcttgccaaagatggtccagaaggtgataaaacccatgtgtctactcgagtgatgggaacctatggttatgcagcaccagaatatgtcatgacgggtcatctcacatcaaaaagtgatgtgtacagtttcggagtggtactacttgagatgttgaccggcagaagatccatggacaagcaccgacccaacggtgagcataaccttgtggaatgggctcggccacatctaggagagagaagaaggttctacaggttgatagaccctcgcttggaggccatttttcggtaaaaggagctcagaaagctgccctactggctgctcactgccttagtagagatccaaaagccagacccctaatgagtgaagttgtggaagctttaaagcctttgccaaacctcaaggacatggcaagctcttcatattatttccaggcaatgcaagttgaccgcattggagcgagcccaaacacaagaaatgggcgaatgcaaggagcgttgctcacccgcaatggacagcagcaaaggagcctttcaataccaaatggtacttatgcatctccatatcaccatcagtttccccaaccatcaccaaaacccaatggcaaagcatagagctgatgaaaattttctttttctttttctctttcaccctttacaccatttcttagtttcttcttatagatgtaccttctcttaaagcatagcatatgctgctttatgatgttatgttaacttatgggtgttgaccccctttatcttgaaagaatgtgagggtgagagcaagtgaagcttattgagcc

SEQ ID NO: 24066 - protein, 314 aa, Glycine max
STHYAESKSTNDTSRDQPTAPAVSSTTTSNAESNSSSTSKLEEELKIASRLRKFSFNELKLATRNFRPESFLGEGGFGCVFKGWIEENGTAPVKPGTGLTVAVKTLNHDGLQGHKEWLAEVNFFGDLVHPNLVKLVGYCIEEDQRLLVYEFMPRGSLENHLFRRSIPLPWSIRMKIALGAAKGLAFLHEEAERPVIYRDFKTSNILLDAEYNAKLSDFGLAKDGPEGDKTHVSTRVMGTYGYAAPEYVMTGHLTSKSDVYSFGVVLLEMLTGRRSMDKHRPNGEHNLVEWARPHLGERRRFYRLIDPRLEAIFR

SEQ ID NO: 24067 - protein, 163 aa, Glycine max
MPRGSLENHLFRRSIPLPWSIRMKIALGAAKGLAFLHEEAERPVIYRDFKTSNILLDAEYNAKLSDFGLAKDGPEGDKTHVSTRVMGTYGYAAPEYVMTGHLTSKSDVYSFGVVLLEMLTGRRSMDKHRPNGEHNLVEWARPHLGERRRFYRLIDPRLEAIFR

SEQ ID NO: 24068 - DNA, 1296 bp, Glycine max
ttttctttacgggcatatgtttcgatgttgtaccttagaaaattttctaacttctctatcatactaagggggaaacttgtggatcaatttaacattgtggacgatttaatatattcaaaagtaattccatataagcctcagctagccatggcatcaaatgaggctatagtggagacaaagacaaccattggatttataaaggaggctgcagaaattaaggttactggatttaatgtgtaccacaaaaatcgcctaatcaagcccttttggaaagtagttgctgatggttcatcaaaagggcgttgtgttgttggggttcttgaagccaattttatagaaccagcgcatgacaagcaggattttgagagatcagtgctgttcattcggttggaaaacaaactgaaacaaatgacaatggattactggagagaacactgtcacttggttggatatcagccaccaaatttgaaatcacaaaaaaatgtggtaaaagaagcccacattcgaaaatcagctgaacattcaactaatccacagaatcagttgcttgctgatcaacaggatactagcttggtagctgagcatcaaagtggtctgagtcagtcagttgtgggtcttgcagtgactggcatgcaaggtttgcgtcatgagcaccttgtatgcaacaatttggggttcatgagcatgcattttttctcacagggtacaatagtagaaactccaggatctgtatctcctgatgaaatctgtgcagaaaacataaaacttttcgagaggtgtgaggagtacaggcaaaaagagactgaactgaaacagacggttgtggacttagaggacgaattgaaacaaatccagaagaaatgtactcttcttgtttcactcgtagagacaaagaggaaggcaaagagtgttaagggacaataattacgttatacaagcatcatatcattgagaggcaagttgattacctttcaagtaatttccgagtgtaaaagcacctgttttgtatatatgttcacccgtgttagaacaactctggctggttcggaagaaaaggcatactggactttgcacacatagtagaattgattcacgtaattagaggaaactctatcagtttaaggttgctattagctgattctgtgaaaacttttctctaatttgtaaagttctgtcttttcggttaaaaatttctgctattattgtcaaagaaatcagatcagataatattgttcttgaggaaaagaggtttcgaagagcaaagcctcattttattatcgaaatactgattgacac

SEQ ID NO: 24069 - protein, 307 aa, Glycine max
FSLRAYVSMLYLRKFSNFSIILRGKLVDQFNIVDDLIYSKVIPYKPQLAMASNEAIVETKTTIGFIKEAAEIKVTGFNVYHKNRLIKPFWKVVADGSSKGRCVVGVLEANFIEPAHDKQDFERSVLFIRLENKLKQMTMDYWREHCHLVGYQPPNLKSQKNVVKEAHIRKSAEHSTNPQNQLLADQQDTSLVAEHQSGLSQSVVGLAVTGMQGLRHEHLVCNNLGFMSMHFFSQGTIVETPGSVSPDEICAENIKLFERCEEYRQKETELKQTVVDLEDELKQIQKKCTLLVSLVETKRKAKSVKGQ

SEQ ID NO: 24070 - protein, 299 aa, Glycine max
MLYLRKFSNFSIILRGKLVDQFNIVDDLIYSKVIPYKPQLAMASNEAIVETKTTIGFIKEAAEIKVTGFNVYHKNRLIKPFWKVVADGSSKGRCVVGVLEANFIEPAHDKQDFERSVLFIRLENKLKQMTMDYWREHCHLVGYQPPNLKSQKNVVKEAHIRKSAEHSTNPQNQLLADQQDTSLVAEHQSGLSQSVVGLAVTGMQGLRHEHLVCNNLGFMSMHFFSQGTIVETPGSVSPDEICAENIKLFERCEEYRQKETELKQTVVDLEDELKQIQKKCTLLVSLVETKRKAKSVKGQ

SEQ ID NO: 24071 - protein, 258 aa, Glycine max
MASNEAIVETKTTIGFIKEAAEIKVTGFNVYHKNRLIKPFWKVVADGSSKGRCVVGVLEANFIEPAHDKQDFERSVLFIRLENKLKQMTMDYWREHCHLVGYQPPNLKSQKNVVKEAHIRKSAEHSTNPQNQLLADQQDTSLVAEHQSGLSQSVVGLAVTGMQGLRHEHLVCNNLGFMSMHFFSQGTIVETPGSVSPDEICAENIKLFERCEEYRQKETELKQTVVDLEDELKQIQKKCTLLVSLVETKRKAKSVKGQ

SEQ ID NO: 24072 - DNA, 1689 bp, Glycine max
aacatacacttcttctattgcgacccatttttccaatccacaatcgtgggagtgagcgaacaactacaaagggatattagatactattgtgagtgagtgcgtgcgattcattgtgtttgtgtagtagtgactttgggttgggtttcgtctcaactcaacaaacgtcgtcgttctgcatttcccaaccttcctccaatggcttctgcttccttaatcaactcgttgacttgttcttcgcgtgctcccactcagcactgttccactttcacccgcaccaccgccgccacgtcactgagacaatttaacagccactgtcggagaccactcgcgacgaggatctcgccgccttccaccgttgtctgcaaagctgtctccgttaagccccaaaccgaaatcgaaggtctcaacattgctgaagatgtcacccagctcatagggaaaacgccaatggtttacctgaacaatatcgtgaagggttctgtggccaatattgctgccaagcttgagattatggagccctgttgtagtgtaaaggacaggattggttttagtatgataaatgatgctgagcagagaggagctataacacctgggaagagtatattggtggaacctactagcggcaacaccggaattggtcttgcctttatagcagcttcaagaggttataaactcattttgacaatgcctgcttcaatgagtttagaaagacgagttctcttgaaagcatttggggccgagcttgttttgactgatgcagcaaagggcatgaatggagcagttcaaaaagctgaagaaattttaaaaagtacccccaatgcatacatgcttcaacaatttgataatccttcaaatcctaagattcattatgagacaactggcccagagatatgggaagatacaagaggaaagatagatattttagttgcaggaattggaactggtggaactgtttctggagttggccaattcctaaaacaacaaaatccaaaaatacaggttattggtgtagagcctctggaaagcaacatacttactggcggaaagccaggacctcacaaaattcagggtattggggctggttttgtgcccaggaatttggatcaagatgtgcttgatgaagttatagcgatatcaagtgatgaagcagttgaaactgcaaagcaattagcactccaggaaggcttgctggtgggaatttcttcaggagctgctgctgcagctgctttgaaggttggaaagaggcctgagaatgcaggcaagcttattggggttgtcttcccaagctttggtgaaagatatttgtctactattcttttccagtcaattcgggaagaatgcgagaaaatgcaacctgagccatgaattgactttgcttgttaatgtttcatactcattctccacgagtatctgtatgtaaatgacagtgtgacatgtccatgttatgtccgtgtttctcatttttgacactcaagaaattagataactgtgtaaaggtcattgacttgacttacagcacagatcaatggcccttgattgaataagttttttttccttctctctttgggctaaaacttttagatgtagtaggaattactggcattgctcttctttttgtatggcagcgtaagaaatttctgtctaatgttcgctattaaaaaataattgatgaaacagtttatctgttgc

SEQ ID NO: 24073 - protein, 389 aa, Glycine max
MASASLINSLTCSSRAPTQHCSTFTRTTAATSLRQFNSHCRRPLATRISPPSTVVCKAVSVKPQTEIEGLNIAEDVTQLIGKTPMVYLNNIVKGSVANIAAKLEIMEPCCSVKDRIGFSMINDAEQRGAITPGKSILVEPTSGNTGIGLAFIAASRGYKLILTMPASMSLERRVLLKAFGAELVLTDAAKGMNGAVQKAEEILKSTPNAYMLQQFDNPSNPKIHYETTGPEIWEDTRGKIDILVAGIGTGGTVSGVGQFLKQQNPKIQVIGVEPLESNILTGGKPGPHKIQGIGAGFVPRNLDQDVLDEVIAISSDEAVETAKQLALQEGLLVGISSGAAAAAALKVGKRPENAGKLIGVVFPSFGERYLSTILFQSIREECEKMQPEP

SEQ ID NO: 24074 - protein, 305 aa, Glycine max
MVYLNNIVKGSVANIAAKLEIMEPCCSVKDRIGFSMINDAEQRGAITPGKSILVEPTSGNTGIGLAFIAASRGYKLILTMPASMSLERRVLLKAFGAELVLTDAAKGMNGAVQKAEEILKSTPNAYMLQQFDNPSNPKIHYETTGPEIWEDTRGKIDILVAGIGTGGTVSGVGQFLKQQNPKIQVIGVEPLESNILTGGKPGPHKIQGIGAGFVPRNLDQDVLDEVIAISSDEAVETAKQLALQEGLLVGISSGAAAAAALKVGKRPENAGKLIGVVFPSFGERYLSTILFQSIREECEKMQPEP

SEQ ID NO: 24075 - protein, 284 aa, Glycine max
MEPCCSVKDRIGFSMINDAEQRGAITPGKSILVEPTSGNTGIGLAFIAASRGYKLILTMPASMSLERRVLLKAFGAELVLTDAAKGMNGAVQKAEEILKSTPNAYMLQQFDNPSNPKIHYETTGPEIWEDTRGKIDILVAGIGTGGTVSGVGQFLKQQNPKIQVIGVEPLESNILTGGKPGPHKIQGIGAGFVPRNLDQDVLDEVIAISSDEAVETAKQLALQEGLLVGISSGAAAAAALKVGKRPENAGKLIGVVFPSFGERYLSTILFQSIREECEKMQPEP

SEQ ID NO: 24076 - DNA, 1773 bp, Glycine max
actcactctgaaaccctaaacatgccgccattagcgcctctgcatcttcggaagctcttactccgttctcgttccttatcattcacttctcccactccgattcaccctcctcctctgtttccccaacaaccttcttcccatttccattcccgaaccctcctcactccttcttcgctcttcataatcagacatttctcatcggaaacccaaacggatcagattgcgcactccctctcctcagagcttctcaaagagccagactcggacgctctctccgtctcgcagcgccttcacctgagcttctcccacatcactccaacccccaatttgattctccaaaccctaaacctctcccacgaatctggccgcactgtattagggttccatcaatggctctcttccaacccccaattctcccacacggacgacactctttcctacttcgtcgactactttggccgccgtaaggacttcaaggccacgcatgacgtcctctccgccgcttcccccgccgccggccccaaaaccctagcctccgcgatcgaccgcctcgtccgcgcgggccgccccagccaggcggttcagttcttcgagcgaatggagagagactacgggctgaagcgcgatcgtgcttccttaaaagtggtcgtggagaagctgtgttcgaagggtttcgctagttacgcggaaaaaatggttaaggatttggcgaaggtgtttttccccgacgaagccacgtgtgatatgttgatcaaagggtggtgcgttgatgggaagctcgatgaagctcaaaggctcgccggtgagatgtatcgtggtgggtttgagcttggtgtggggtcttacaatgccatgcttgattgcgtttgcaagctttgtcgccaaaaggatccgtttcaacttcactcggaagcagagaaggtgttggtggagatggagcaccgtggggttccaaggaatgtggagacattcaatgtgttgataacgaatttatgtaagattaggaagaccgaagatgctttgggattgtttcgtagcatgggagagtgggggtgttaccctaatgagactacttttcttgttttgattaggagtctgtatcaggctgctaggttggaagagggggatgagatgattgataggatgaggtctgctgggtttggtgagtttctagataagaaggcttactatcagctcctcaagattttgtgtggcattgagagggttgatcatgctttgagtgtgtttgctatgatgaaggatggtgggtgtgaacccgggcttataacttatgacttgttgatgggaaaattgggtgctcacaatcgtatcgataaggctaatgctctattcaatgaagcgaagagtagagggctgcctgtgatgctcaaagagtatgctgttgacccgaggtatttgaagaagaagaaggttgtcaagggtgtgaagaagagggaaaccttgcctgagaaaatggctaggaagagaagccgcctgaaacagattcggttgagttttgtgaagaagcccaaaagagtgatgggtcgttgatcattttttgtactttataaaggtttcggaatagatttccttatttaatcatcattttctttgtttcattgttagttttgaatatttggagataaatctttgcatggaaatggctccattgtaggacataaatgccgccacatattcagaaataattttttgtacttggtgctttatgttggttcaacttctgggagatgtatgctgggcttcttaatgatt

SEQ ID NO: 24077 - protein, 516 aa, Glycine max
THSETLNMPPLAPLHLRKLLLRSRSLSFTSPTPIHPPPLFPQQPSSHFHSRTLLTPSSLFIIRHFSSETQTDQIAHSLSSELLKEPDSDALSVSQRLHLSFSHITPTPNLILQTLNLSHESGRTVLGFHQWLSSNPQFSHTDDTLSYFVDYFGRRKDFKATHDVLSAASPAAGPKTLASAIDRLVRAGRPSQAVQFFERMERDYGLKRDRASLKVVVEKLCSKGFASYAEKMVKDLAKVFFPDEATCDMLIKGWCVDGKLDEAQRLAGEMYRGGFELGVGSYNAMLDCVCKLCRQKDPFQLHSEAEKVLVEMEHRGVPRNVETFNVLITNLCKIRKTEDALGLFRSMGEWGCYPNETTFLVLIRSLYQAARLEEGDEMIDRMRSAGFGEFLDKKAYYQLLKILCGIERVDHALSVFAMMKDGGCEPGLITYDLLMGKLGAHNRIDKANALFNEAKSRGLPVMLKEYAVDPRYLKKKKVVKGVKKRETLPEKMARKRSRLKQIRLSFVKKPKRVMGR

SEQ ID NO: 24078 - protein, 509 aa, Glycine max
MPPLAPLHLRKLLLRSRSLSFTSPTPIHPPPLFPQQPSSHFHSRTLLTPSSLFIIRHFSSETQTDQIAHSLSSELLKEPDSDALSVSQRLHLSFSHITPTPNLILQTLNLSHESGRTVLGFHQWLSSNPQFSHTDDTLSYFVDYFGRRKDFKATHDVLSAASPAAGPKTLASAIDRLVRAGRPSQAVQFFERMERDYGLKRDRASLKVVVEKLCSKGFASYAEKMVKDLAKVFFPDEATCDMLIKGWCVDGKLDEAQRLAGEMYRGGFELGVGSYNAMLDCVCKLCRQKDPFQLHSEAEKVLVEMEHRGVPRNVETFNVLITNLCKIRKTEDALGLFRSMGEWGCYPNETTFLVLIRSLYQAARLEEGDEMIDRMRSAGFGEFLDKKAYYQLLKILCGIERVDHALSVFAMMKDGGCEPGLITYDLLMGKLGAHNRIDKANALFNEAKSRGLPVMLKEYAVDPRYLKKKKVVKGVKKRETLPEKMARKRSRLKQIRLSFVKKPKRVMGR

SEQ ID NO: 24079 - protein, 317 aa, Glycine max
MERDYGLKRDRASLKVVVEKLCSKGFASYAEKMVKDLAKVFFPDEATCDMLIKGWCVDGKLDEAQRLAGEMYRGGFELGVGSYNAMLDCVCKLCRQKDPFQLHSEAEKVLVEMEHRGVPRNVETFNVLITNLCKIRKTEDALGLFRSMGEWGCYPNETTFLVLIRSLYQAARLEEGDEMIDRMRSAGFGEFLDKKAYYQLLKILCGIERVDHALSVFAMMKDGGCEPGLITYDLLMGKLGAHNRIDKANALFNEAKSRGLPVMLKEYAVDPRYLKKKKVVKGVKKRETLPEKMARKRSRLKQIRLSFVKKPKRVMGR

SEQ ID NO: 24080 - DNA, 624 bp, Glycine max
aattttcacttaaaaaaaaagaacaaacgtcccaagtatcgtttttccatatttgattacagcctcaactcaaccgtgtctgaagtcacttcaatggcggatagggaaccaaagcctaaagactcgccttcagaaaaagatgtgaaaagtccaaacatttttgagcgagctaaggaggagattgaggcagtgtttcatcatgacaaatcgcctcaccatcacaaagaaactcatgggacaagtgatgacattgacgagggaacttcacctgatgaaataaaagcgcctggtgtgtttgaacgggtgaaggaggagattgaagctgttgctgaggccattcatcccaagaaagaatctgaatccgacactcgtgatgtgtcaccaaagtgatggctaggatgtgcctttattttgtaacaaagagtgtgaagacttgtttcaatggtgttaaccatcaaaactaccttggctttgtccactgatctttctttcttttttttattttgttgttgttgttgtttcctttaagtagtaaatttctcttcttttttcaattgattatgtgaatgcttagtccttttgtcttcaaaaaaagaaagattatccctgaactggtacattatc

SEQ ID NO: 24081 - protein, 129 aa, Glycine max
NFHLKKKNKRPKYRFSIFDYSLNSTVSEVTSMADREPKPKDSPSEKDVKSPNIFERAKEEIEAVFHHDKSPHHHKETHGTSDDIDEGTSPDEIKAPGVFERVKEEIEAVAEAIHPKKESESDTRDVSPK

SEQ ID NO: 24082 - protein, 98 aa, Glycine max
MADREPKPKDSPSEKDVKSPNIFERAKEEIEAVFHHDKSPHHHKETHGTSDDIDEGTSPDEIKAPGVFERVKEEIEAVAEAIHPKKESESDTRDVSPK

SEQ ID NO: 24083 - DNA, 1329 bp, Glycine max
accacaccaccctactacattcccacctttagtcttgttcttagagatggcttgtgaaaccaagtcatggttggttatgtttcttgttttcttggttgctaattgcatgcaacattgtgtccacggggtgtctcaagtgccttgcctttttatctttggggactctatgtctgatagtggaaacaacaatgaacttccaaccacttcaaaatctaatttcagaccatatgggatcgactttccattaggaccaactgggagatataccaatggccgaacagaaattgacataatcactcaatttctgggatttgagaaatttatcccaccctttgcaaacactagtggttcagacatacttaaaggtgttaactatgcatcaggtggatctggtatacgcaacgaaactggctggcattatggtgctgctatcggcttgggattacagttagcaaatcacagagtcatagtatctgaaattgctaccaaacttggaagtcctgacttagctcgacaataccttgaaaaatgcttgtattatgtgaacataggcagcaatgattacatgggcaattacttccttcccccgttctacccaacaagcaccatttataccattgaggagtttacacaagttctgattgaagagttatctctgaatttacaggctttacatgacattggagcaagaaagtatgccttggctgggttgggccttataggatgcaccccaggtatggtgagtgctcatgggacaaatggatcatgtgctgaagagcaaaatctcgctgcattcaatttcaataacaagcttaaagctcgagtggatcaattcaacaatgatttctattatgctaattccaaattcatctttataaacactcaagcattggccattgagcttcgcgataaatatggttttccggttccggaaactccttgctgcctaccgggattaacaggggagtgtgttcctgatcaagagccgtgctataataggaatgactatgtgttttttgatgctttccatcccaccgagcaatggaacctactcaatgcattgacatcttataattctaccactaattcagccttcacttatccaatggatatcaagcaccttgttgatcatgaaattaagacggaattggagctcacaaatgagtccacttcacaacttagtgccactgaataagttctggttatcatgtagtcgttcatatggagttgaaataattgtgagttgaatatgtattaagtaatggcctgccactgaattgaacgacaaagtggaatgaatcaagtgaataaattggctatcctgcctcg

SEQ ID NO: 24084 - protein, 397 aa, Glycine max
PHHPTTFPPLVLFLEMACETKSWLVMFLVFLVANCMQHCVHGVSQVPCLFIFGDSMSDSGNNNELPTTSKSNFRPYGIDFPLGPTGRYTNGRTEIDIITQFLGFEKFIPPFANTSGSDILKGVNYASGGSGIRNETGWHYGAAIGLGLQLANHRVIVSEIATKLGSPDLARQYLEKCLYYVNIGSNDYMGNYFLPPFYPTSTIYTIEEFTQVLIEELSLNLQALHDIGARKYALAGLGLIGCTPGMVSAHGTNGSCAEEQNLAAFNFNNKLKARVDQFNNDFYYANSKFIFINTQALAIELRDKYGFPVPETPCCLPGLTGECVPDQEPCYNRNDYVFFDAFHPTEQWNLLNALTSYNSTTNSAFTYPMDIKHLVDHEIKTELELTNESTSQLSATE

SEQ ID NO: 24085 - protein, 382 aa, Glycine max
MACETKSWLVMFLVFLVANCMQHCVHGVSQVPCLFIFGDSMSDSGNNNELPTTSKSNFRPYGIDFPLGPTGRYTNGRTEIDIITQFLGFEKFIPPFANTSGSDILKGVNYASGGSGIRNETGWHYGAAIGLGLQLANHRVIVSEIATKLGSPDLARQYLEKCLYYVNIGSNDYMGNYFLPPFYPTSTIYTIEEFTQVLIEELSLNLQALHDIGARKYALAGLGLIGCTPGMVSAHGTNGSCAEEQNLAAFNFNNKLKARVDQFNNDFYYANSKFIFINTQALAIELRDKYGFPVPETPCCLPGLTGECVPDQEPCYNRNDYVFFDAFHPTEQWNLLNALTSYNSTTNSAFTYPMDIKHLVDHEIKTELELTNESTSQLSATE

SEQ ID NO: 24086 - protein, 372 aa, Glycine max
MFLVFLVANCMQHCVHGVSQVPCLFIFGDSMSDSGNNNELPTTSKSNFRPYGIDFPLGPTGRYTNGRTEIDIITQFLGFEKFIPPFANTSGSDILKGVNYASGGSGIRNETGWHYGAAIGLGLQLANHRVIVSEIATKLGSPDLARQYLEKCLYYVNIGSNDYMGNYFLPPFYPTSTIYTIEEFTQVLIEELSLNLQALHDIGARKYALAGLGLIGCTPGMVSAHGTNGSCAEEQNLAAFNFNNKLKARVDQFNNDFYYANSKFIFINTQALAIELRDKYGFPVPETPCCLPGLTGECVPDQEPCYNRNDYVFFDAFHPTEQWNLLNALTSYNSTTNSAFTYPMDIKHLVDHEIKTELELTNESTSQLSATE

SEQ ID NO: 24087 - DNA, 803 bp, Glycine max
ctcattgttgttcttctctttcttttattgcttcctttcccattcttcatcttcttctctctgaaccgtactcaaactcactttcccacttatttatacaatgtcggcttacaaagaccaggatccccgtcttcatggcatcaaaactaagattcgtgtcgtccccaatttccccaaatccggtcttatgttcctagacattactactctattgcttgatcccaaagcatttaaggactcaatagatttgttcgtggagcggtacaagggcaaaaacatttctgttgttgcaggaattgaagctcgaggttttatttttggtccccccattgcgctggctataggagcaaagtttgtaccattgaggaaaccaaagaagttgcctggaaaagttatttctcaagaatatattctggaatatggaagggactgtcttgagatgcatgttggagctgttgatgatttgattgcaactggcggaacactctgtgccgctatggacttgttagaacgtgtgggagcagaagtagtggagtgtgcatgtgtaattgaattaccagaattgaagggtcgtgaacgtttgaacgggaagcccttgtgcgtgttggtggaatatgtggatatatgattatgaagaagtgggcaaaagaatattaagatgtagatttgggagatgatgtgtctttcagtgggtgctttcccattctgattacaattctagcttgtagtaggaacgatcaaatcaaattaatgcatttgtatgacccactctttgggctcatcttctcatctctttttcgaat

SEQ ID NO: 24088 - protein, 175 aa, Glycine max
MSAYKDQDPRLHGIKTKIRVVPNFPKSGLMFLDITTLLLDPKAFKDSIDLFVERYKGKNISVVAGIEARGFIFGPPIALAIGAKFVPLRKPKKLPGKVISQEYILEYGRDCLEMHVGAVDDLIATGGTLCAAMDLLERVGAEVVECACVIELPELKGRERLNGKPLCVLVEYVDI

SEQ ID NO: 24089 - protein, 146 aa, Glycine max
MFLDITTLLLDPKAFKDSIDLFVERYKGKNISVVAGIEARGFIFGPPIALAIGAKFVPLRKPKKLPGKVISQEYILEYGRDCLEMHVGAVDDLIATGGTLCAAMDLLERVGAEVVECACVIELPELKGRERLNGKPLCVLVEYVDI

SEQ ID NO: 24090 - DNA, 1310 bp, Glycine max
accacccccctcattgcagcagtttttgagtttccttacattcttaaagaaaccactcgttgttctttaggatatttctcttttcattttcctcttttcttcaaatcccaaaggatatttgtctctaatatccaaccttcaagatcatggatgttgcgcatttcattttcgggatatttgggaatgcttctggtttgttcctcttcttggccccaatagtgacattctggaggatcgtttcgaacaaatccacagagaagttctcgggggttccttaccctatgacacttctcaattgtctcctttctgcttggtatggtttgccatttgtgtccccaaacaacttacttgtgacaattatcaatggcacaggagcaggaattgaaatcatatacgtctttatattcatctacttcgcaccaaagaaagagaagaccaagattattggccttttctccttcgtggtggcagtgttctctgttgttgttctggtgtcactgtttgctctgcagggcaatgcccgaaagctcttctgtggcttcgctgctgccatattttccatcgtcatgtatggttcacccctctcaattatgaggctagtgataaaaaccaagagcgtggagttcatgcccttcttcctctcactctttgtgttcctctgtggcacatcttggttcatctacgggctactaggccgtgacccatttgtggctgtacctaatggcgttggttctgcgttggggacagcacaactaatattgtattttatctaccgtgacaacaaaagtgatccaaagaagattccaagaacagaagaagaagctatggaaatgggcaccgctaataaaaatcccatatccaactcgaatggaatacaagagggacgcgtctagggacgcgtctagggacgcgtgttagcattaaaaagaacaagccgttatctttgtctctgtctctttctaagcattaagagcacatctttaatttggactatgcttacatctttgttgttgttttttttttcttttttctttttaaaaaatctgttgttgttgctatcatctttgtgactctgtttcctccacgatttgtagtttttgttttttttttcttttagttatgatagttgtactataagtttagccatattgaaacgagtttgtgttgtgtgaattttcttttcttttcttccttttcagtccatttgtcgagacacatccgagcgatatcttgtgtctggataaaatttaaaagagtaatgaatatgtgaatctttctatctttaatttacaatattcatatttttggtt

SEQ ID NO: 24091 - protein, 248 aa, Glycine max
MDVAHFIFGIFGNASGLFLFLAPIVTFWRIVSNKSTEKFSGVPYPMTLLNCLLSAWYGLPFVSPNNLLVTIINGTGAGIEIIYVFIFIYFAPKKEKTKIIGLFSFVVAVFSVVVLVSLFALQGNARKLFCGFAAAIFSIVMYGSPLSIMRLVIKTKSVEFMPFFLSLFVFLCGTSWFIYGLLGRDPFVAVPNGVGSALGTAQLILYFIYRDNKSDPKKIPRTEEEAMEMGTANKNPISNSNGIQEGRV

SEQ ID NO: 24092 - protein, 203 aa, Glycine max
MTLLNCLLSAWYGLPFVSPNNLLVTIINGTGAGIEIIYVFIFIYFAPKKEKTKIIGLFSFVVAVFSVVVLVSLFALQGNARKLFCGFAAAIFSIVMYGSPLSIMRLVIKTKSVEFMPFFLSLFVFLCGTSWFIYGLLGRDPFVAVPNGVGSALGTAQLILYFIYRDNKSDPKKIPRTEEEAMEMGTANKNPISNSNGIQEGRV

SEQ ID NO: 24093 - DNA, 1232 bp, Glycine max
tgcttgtaacagtattgttattactttgttgattgaaaaccattaaatataatgatttttacctaaactaattgtcatccatttaatataacacctttcaacaaggtatttttaggtgctggttttatttatttataatgattcgtccttctggactccctattctgcattttactactatcaaagatataaaattatttactcatcattttaaaaatggttgcttatcttgcgtgtttgcgtgctgtttactctgggtaagaattggtactgggaggcattttactgttcttctgcctaccattagtattataatagtttttaattaacaggaatctttgcttacttttttctttgacaggctgtgagagtagaacactgcgaacgagttcatgtaatcgtagcagcaaagcgtatttgtattgctaattgtcgtgaatgtgttttctttttgggagtgaaccagcaacctcttattcttggtgataatcataaactgcaggtggctccctataatacattttactcccaattggaaaagcatatgaatgaagttggaattgtgcccacagttaaccgatgggatgagcctctagcattgggcatggttgatccccatgattcattatctcatccagcaggtgtctctgatgttcaagctgagtctgctacacgggtggaccctgatcagttcactgattttgtgattccaaactggtttggaggagagtccactggggctacaaaaggcaacccattcacgttaccagatgcctatatggtatctcagcataaaaatcaaaaaaatttaggggagataaggcacctcttgcgagaagcacctttagaagatagtcgcaaacgagaattgtcatctgcacttcatgtctacttcaaggactggttatatgcttcaggaaacattcgtcagctttattgtttacaaggcgattgatctttgtcagacaatggaatggcacagttaatggtataggaacgaggtttctggtttcctttttgtacttcctcttcaattcctcttgccaattctattggcggcataggtagctgagatcaaatgaggtgaattagagtaaaacctatttatgccgtgacatcagcggtgcacagaatcaaatgaaaaatacagttgctaatctgattgtaatatttttttgtttgtgaaaataattactgtaatattttgttagcctaaattaatggcttttggg

SEQ ID NO: 24094 - protein, 136 aa, Glycine max
MNEVGIVPTVNRWDEPLALGMVDPHDSLSHPAGVSDVQAESATRVDPDQFTDFVIPNWFGGESTGATKGNPFTLPDAYMVSQHKNQKNLGEIRHLLREAPLEDSRKRELSSALHVYFKDWLYASGNIRQLYCLQGD

SEQ ID NO: 24095 - protein, 116 aa, Glycine max
MVDPHDSLSHPAGVSDVQAESATRVDPDQFTDFVIPNWFGGESTGATKGNPFTLPDAYMVSQHKNQKNLGEIRHLLREAPLEDSRKRELSSALHVYFKDWLYASGNIRQLYCLQGD

SEQ ID NO: 24096 - DNA, 1675 bp, Glycine max
gtatcgagaactagaagcgtaacagcaatggagctgtcttccagtgcatttgtggtaatattgttggcagtcgcagctacagcagtactctcaaatgggttggatctatctttcttgcccagcgatttcctctttggcattgcttcttcctcttaccagtatgaaggagcttacaagagtgacggcaaaggactgagcaactgggataactacactcacggaccaggtagaagtgtaataatggatggaagcaatggggatatcgcgattgatcattatcatcgctacctggaggatatagatttaatggaaactttgggagtaaacagctaccggctatccctgtcatgggcaagaattctaccaaagggtagattcggagagcccaaccatgctggtatcgagttctataacagactaattgatgttctactactcaaagggatccaaccctttgtaactcttagtcactatgacattccccaagagcttgaagacagatacgggagttggctaagtccccagttacaggaagattttgctttttatgcggacctatgttttaaaacctttggtgacagagttaagtactgggtcacattcaatgagccgaatttcctagtgtcacttggttaccgttctggtttatatcctccatgccgttgctctggccaattagcaatggctaaatgcagtgaaggagactcagaaaaggagccctttgtagcagctcataatgttatcctgtcacatgcagctgcagttgatatctatagaaccaaataccagactgagcaaaaaggaagtattggtatagtccttcaacatgaatggtttgaaccaatgagcaattcaacagctgacaaattggctagcgaaagagcaagagcattcaacttcaattggttcttggacccaatcatattcggaaagtaccctacagagatggagaacgttcttggaagcctcttgcccaaattttccagctacgaaaaagagaaactcaagagaggattggatttcattggcgtcaattactacacggctttctatgtccaagattgcatgtactccgcttgtaaaccaggacccgggatctccagaacagagggttcatacaagaaaagtggagaaaagaatggtgtcccaatcggtgaacctactccatttagttggtttaatatttacccagatggcatggaaaagactgtaacatatgtgagagatagatacaataacactccaattttcctaactgaaaatggatatgccgaagaagttgatccaaatttcacttcggaagaacatctcaatgattttaaaagaataaagtacatggtggatcacatagaggctctgttagcagcaataaggaaaggagcagatgtgaggggatactttgcctggaccttaatcgactcgtttgagtggatatatggatatacggtaagatatggattccatcatgtggattatgcgacgctgaaaagaactccaagattgtcagcaagttggtacaagcaactccttgttcagtacaagaaaacctttttattaggcacgagcatgacagggcatgaaaaactcgtacaacacacttgacgcaaaaaagcttataaccctaatgtagaaccttatcagctacaattctaataatttatgatatattgtgggt

SEQ ID NO: 24097 - protein, 533 aa, Glycine max
VSRTRSVTAMELSSSAFVVILLAVAATAVLSNGLDLSFLPSDFLFGIASSSYQYEGAYKSDGKGLSNWDNYTHGPGRSVIMDGSNGDIAIDHYHRYLEDIDLMETLGVNSYRLSLSWARILPKGRFGEPNHAGIEFYNRLIDVLLLKGIQPFVTLSHYDIPQELEDRYGSWLSPQLQEDFAFYADLCFKTFGDRVKYWVTFNEPNFLVSLGYRSGLYPPCRCSGQLAMAKCSEGDSEKEPFVAAHNVILSHAAAVDIYRTKYQTEQKGSIGIVLQHEWFEPMSNSTADKLASERARAFNFNWFLDPIIFGKYPTEMENVLGSLLPKFSSYEKEKLKRGLDFIGVNYYTAFYVQDCMYSACKPGPGISRTEGSYKKSGEKNGVPIGEPTPFSWFNIYPDGMEKTVTYVRDRYNNTPIFLTENGYAEEVDPNFTSEEHLNDFKRIKYMVDHIEALLAAIRKGADVRGYFAWTLIDSFEWIYGYTVRYGFHHVDYATLKRTPRLSASWYKQLLVQYKKTFLLGTSMTGHEKLVQHT

SEQ ID NO: 24098 - protein, 524 aa, Glycine max
MELSSSAFVVILLAVAATAVLSNGLDLSFLPSDFLFGIASSSYQYEGAYKSDGKGLSNWDNYTHGPGRSVIMDGSNGDIAIDHYHRYLEDIDLMETLGVNSYRLSLSWARILPKGRFGEPNHAGIEFYNRLIDVLLLKGIQPFVTLSHYDIPQELEDRYGSWLSPQLQEDFAFYADLCFKTFGDRVKYWVTFNEPNFLVSLGYRSGLYPPCRCSGQLAMAKCSEGDSEKEPFVAAHNVILSHAAAVDIYRTKYQTEQKGSIGIVLQHEWFEPMSNSTADKLASERARAFNFNWFLDPIIFGKYPTEMENVLGSLLPKFSSYEKEKLKRGLDFIGVNYYTAFYVQDCMYSACKPGPGISRTEGSYKKSGEKNGVPIGEPTPFSWFNIYPDGMEKTVTYVRDRYNNTPIFLTENGYAEEVDPNFTSEEHLNDFKRIKYMVDHIEALLAAIRKGADVRGYFAWTLIDSFEWIYGYTVRYGFHHVDYATLKRTPRLSASWYKQLLVQYKKTFLLGTSMTGHEKLVQHT

SEQ ID NO: 24099 - protein, 453 aa, Glycine max
MDGSNGDIAIDHYHRYLEDIDLMETLGVNSYRLSLSWARILPKGRFGEPNHAGIEFYNRLIDVLLLKGIQPFVTLSHYDIPQELEDRYGSWLSPQLQEDFAFYADLCFKTFGDRVKYWVTFNEPNFLVSLGYRSGLYPPCRCSGQLAMAKCSEGDSEKEPFVAAHNVILSHAAAVDIYRTKYQTEQKGSIGIVLQHEWFEPMSNSTADKLASERARAFNFNWFLDPIIFGKYPTEMENVLGSLLPKFSSYEKEKLKRGLDFIGVNYYTAFYVQDCMYSACKPGPGISRTEGSYKKSGEKNGVPIGEPTPFSWFNIYPDGMEKTVTYVRDRYNNTPIFLTENGYAEEVDPNFTSEEHLNDFKRIKYMVDHIEALLAAIRKGADVRGYFAWTLIDSFEWIYGYTVRYGFHHVDYATLKRTPRLSASWYKQLLVQYKKTFLLGTSMTGHEKLVQHT

SEQ ID NO: 24100 - DNA, 1528 bp, Glycine max
ttaccacttcccatcttcgcacacaacacagccatccctttctctcccttcttttgctctctgccctaaccagcctcaccagatcttttacctccatttccagtgcatcacaccttagcttcaagccatcacaagttgtagatacagttaatactcaatatggagctgagtactataaaagatgcttttgaccgtgttactaagaagcaaaagttatcttgttccaagactcaagaagcaattgatcagatcagacaggaaattgagagtgttttagacacactgcagtcagcgaataacactgaccatgaacttgattataaaactgtcctgaatgaacttaaggccagttttcttttaattgctccacttagtcaaatggaaggtacacagaaggagctaaatgtagcactcaccaagtatgggaagcttcttgagaaacatttcaaccctgatatatccaaggcttacagaaatatcgacattgatagacatacattaaaccaaataattgctaaccatttttatcaccagggcctttttgagataggggaccattttatgagtgtggttggagagcctgaatccgcagccattatgaaatttccgttcgtggaaatgtatcaaatacttgaagccatgcagaatcagaacctagagccagccctcaactgggcttccactaatggtgacaaacttgctcaaagtggatctgatattgtgttgaaacttcactcaatgcaatttgtgaaagtacttcaaaatggaagtagagaggaagctcttcattatgctcgaatgcacctttctccttttgctaccagtcacatgaccgatattcagaaacttatgggctgtcttctatggacgggaaagcttgatcgttctccttaccatgcattactatcaccatctaactgggataagttggctgaggaacttaaaaggcagttctgcaatcttttgggacagtcgtataatagtccattgagcgtgactgtagcagcaggggtccaggttttgccaccactcctcaaatttatgaatgtcatggcagggaagaagaatgaatggcagtctatgaaccagttaccggtgccggttgagttggaccgtgagttccagttccattctatttttgtttgtcctgtctccaaggaacaagcaaccgaggataaccctccgatgttaatgtcctgtggccatgtcctctgcaagcagtctatcttgaagatgtccaagaatagcacaaaagtgtttaagtgcccatattgtccctttgatattgatgcagcacagtgcaagcagctatatttctgatgttgatggatttgtatgaaactcctgtataaattcaatcctgtgttagcaataggtgtaaccacgtttgcaaaggcccatgccttgttgtgatctctgtgtatttcataaatttgttgtaaatagaaattctttttaatctggatatgactggcaagtccttcattatttgaataagttttgatacacttaaagctggtttttcccc

SEQ ID NO: 24101 - protein, 386 aa, Glycine max
MELSTIKDAFDRVTKKQKLSCSKTQEAIDQIRQEIESVLDTLQSANNTDHELDYKTVLNELKASFLLIAPLSQMEGTQKELNVALTKYGKLLEKHFNPDISKAYRNIDIDRHTLNQIIANHFYHQGLFEIGDHFMSVVGEPESAAIMKFPFVEMYQILEAMQNQNLEPALNWASTNGDKLAQSGSDIVLKLHSMQFVKVLQNGSREEALHYARMHLSPFATSHMTDIQKLMGCLLWTGKLDRSPYHALLSPSNWDKLAEELKRQFCNLLGQSYNSPLSVTVAAGVQVLPPLLKFMNVMAGKKNEWQSMNQLPVPVELDREFQFHSIFVCPVSKEQATEDNPPMLMSCGHVLCKQSILKMSKNSTKVFKCPYCPFDIDAAQCKQLYF

SEQ ID NO: 24102 - protein, 313 aa, Glycine max
MEGTQKELNVALTKYGKLLEKHFNPDISKAYRNIDIDRHTLNQIIANHFYHQGLFEIGDHFMSVVGEPESAAIMKFPFVEMYQILEAMQNQNLEPALNWASTNGDKLAQSGSDIVLKLHSMQFVKVLQNGSREEALHYARMHLSPFATSHMTDIQKLMGCLLWTGKLDRSPYHALLSPSNWDKLAEELKRQFCNLLGQSYNSPLSVTVAAGVQVLPPLLKFMNVMAGKKNEWQSMNQLPVPVELDREFQFHSIFVCPVSKEQATEDNPPMLMSCGHVLCKQSILKMSKNSTKVFKCPYCPFDIDAAQCKQLYF

SEQ ID NO: 24103 - protein, 252 aa, Glycine max
MSVVGEPESAAIMKFPFVEMYQILEAMQNQNLEPALNWASTNGDKLAQSGSDIVLKLHSMQFVKVLQNGSREEALHYARMHLSPFATSHMTDIQKLMGCLLWTGKLDRSPYHALLSPSNWDKLAEELKRQFCNLLGQSYNSPLSVTVAAGVQVLPPLLKFMNVMAGKKNEWQSMNQLPVPVELDREFQFHSIFVCPVSKEQATEDNPPMLMSCGHVLCKQSILKMSKNSTKVFKCPYCPFDIDAAQCKQLYF

SEQ ID NO: 24104 - DNA, 1397 bp, Glycine max
aaatttgagggtcacaaagctgctgttctttgtgttcagtggtctccagacaaatcatctgtatttggaagttcagctgaagatggtctcttaaacatttgggactatgagaaggttggtaaaaagatagagcgatctggaaaatcaataagttctcctccagggttgttttttcaacatgcaggtcatagggataaagttgttgacttccattggaatgcatatgatccatggacgattgttagtgtgtctgatgactgtgaaagtactggaggagggggaacgttgcaggtatgaaaagcttttttcaatttttgaaatatagattatggaaaataattttaacattttcttataattgaagattctacttttggaaaaaccttgtaagtggcatgaccaaatttgatggtacagttgacattaaacctaatgagagacatgtatccccgaaagatgacccatttattaatattcacaaaaacacatccctaagagcaaccaatctctttcctcttccaagaactgcacaaacattttccaggctcatcctggtattttcactcgattgtggagtttctggttttcgtattggatttgaggatgctcaaggtagagcagatacatgactggcatgggtggggacagtggcaagactgtttccttttcctttctttggcgcagtggggctttggtgatgtggactatgcacttgcagatcaagttttctgttattttgacatttttttttaatgtgaatgactaaatcatgtacatctgccaagtcaaattggtttacaccacaggttgtgtgcttgatttttctgaatagttttactcagacccattaatgaggttgaactgggccaaactgtccactctggtatttcaagtttagtaaccagtaattactatgattgaaacatgtgtatcggcttgttttaacacgtctttgtctgatgcaaattcaatctcattcatgcagatatggcgcatgagtgatttgatctacagaccagaagatgaggttttggccgagctggagaaattcaaatctcatgttgtggcgtgtgcttcaaagactgaaaaatgacatacgtcgtaggcaaaaatgagttatattattattgctgttgtatttaatttaacatttgcggtggatgtttcttggcattttaaaaccattcatgtatggggctggagtagggaaaacctagattaacgtagatctgacgatgatttgtggttagtgttacttaattgatacaattctattttctgtttgaagatcatgatccttggttcatgtggctcatttctccaatcactgaacggaacatacattgttaattcattatgatctttatgaaactttagacatgctttctacggttggc

SEQ ID NO: 24105 - protein, 98 aa, Glycine max
KFEGHKAAVLCVQWSPDKSSVFGSSAEDGLLNIWDYEKVGKKIERSGKSISSPPGLFFQHAGHRDKVVDFHWNAYDPWTIVSVSDDCESTGGGGTLQV

SEQ ID NO: 24106 - protein, 77 aa, Glycine max
MTKFDGTVDIKPNERHVSPKDDPFINIHKNTSLRATNLFPLPRTAQTFSRLILVFSLDCGVSGFRIGFEDAQGRADT

SEQ ID NO: 24107 - protein, 59 aa, Glycine max
MIETCVSACFNTSLSDANSISFMQIWRMSDLIYRPEDEVLAELEKFKSHVVACASKTEK

SEQ ID NO: 24108 - DNA, 1024 bp, Glycine max
ttttctgccattcattataccaacgtataagcatctctctctctctctctgtgttgtgccttttcactactactttgttcggtagctacttcgcttctaccctccattccattctctggaacaatgtctgagaaaatcacagctgaaaaccttttaaacacccttgtggaaacacttactgagaagcaaaaatctggatcattttttgaagaagacaagtcaagctcagtgagctaccaattcaacagactgtttggacgccagaaacctgtgcaccatattttagggggtggaaaatctgctgatgtcttgttatggaggaacaagaagatctctgctagcgttttatcggcagcaacagctatatgggtgctttttgaatggcttaattataatttcataactattttattctttgttgtggctcttggtatgcttggacagtttctttggacaaatgtttctggcttgtttagcaggaagccatctaaagttccccgttttgtcctcccagatgatatcttcgtgaatattgcaactgtagttggtgctgaggttaaccgtggtttgaggtttctccaagatgtttcttgtggaggaagcctaaaacaatttcttattgttgtagtaagcttatgggctggtgctgtgattgggagctggtgcaattttttgactgtcatgtatattggttttgttgctgcacatacactcccagttctctatgaaaggtatgaggatcaagttgacaactttgtgtacaaggtctttgatcagatgcaaaatcactatcagaagctggatactggtttgctcagcaaaatccccaagggaaagctcaaaggaaagaagtatgaatagactcttccttttgtaaatggtttgattttcaatatctctttctctcacttgtgatggaattgggaaaggctgaaggatgtgatgtaactagggaacaaatctatgttggggtctttaaaatttgttgtatctcttctgtcaaaaaaaaaaaaagttttatcac

SEQ ID NO: 24109 - protein, 245 aa, Glycine max
MSEKITAENLLNTLVETLTEKQKSGSFFEEDKSSSVSYQFNRLFGRQKPVHHILGGGKSADVLLWRNKKISASVLSAATAIWVLFEWLNYNFITILFFVVALGMLGQFLWTNVSGLFSRKPSKVPRFVLPDDIFVNIATVVGAEVNRGLRFLQDVSCGGSLKQFLIVVVSLWAGAVIGSWCNFLTVMYIGFVAAHTLPVLYERYEDQVDNFVYKVFDQMQNHYQKLDTGLLSKIPKGKLKGKKYE

SEQ ID NO: 24110 - protein, 142 aa, Glycine max
MLGQFLWTNVSGLFSRKPSKVPRFVLPDDIFVNIATVVGAEVNRGLRFLQDVSCGGSLKQFLIVVVSLWAGAVIGSWCNFLTVMYIGFVAAHTLPVLYERYEDQVDNFVYKVFDQMQNHYQKLDTGLLSKIPKGKLKGKKYE

SEQ ID NO: 24111 - DNA, 1616 bp, Glycine max
atgcatataaactacaaacattatttcatccaagccctcttgtctcaacaaattaataataattaatcacacccttcgatcttcgagtcatctaataataaatcttttgtttcccatcaacactagttcatgcaaattaatgggtatccctcactttctttgtataccatttccagttcaaggacatgtgaaccctcttatgcaattttctctgcttttggttaaacatggttgcaaggtcacttttgtacacactgagttcagcctcaaacgaacaaagacttctggtgctgacaacctcgagcattcacaagtaaagttggtgactcttcctgatggtttggaggctgaagatgacagaagtgatgtgacaaaacttcttttgtctatcaaaagcaacatgcctgctttgcttccaaagctcatagaagatatcaatgccttggatgctgacaataagatcacctgtattattgttacatttaatatgggttggcctttggaagttggccacaaactgggaatcaaaggagctcttctctgtccagcatctgcaacttccttggcttctgctgcttgcatcccaaagctgattcatgatggcattattgattctcaaggacttcccaccaaaacacaagaaattcaactctctccaaacatgcctctgatagacacagaaaactttccatggcgtggctttaataagatcttctttgaccatcttgtgcaagagatgaaaactttggagttaggagagtggtggctttgcaacactacttatgatcttgagcctggagcattttccgtatcaccaaagttcctacccattggcccattgatggaaagtgacaacagcaaaagtgcattttgggaagaagatacaacttgcttagagtggttagatcaacaaccacctcaatctgtcatatatgtttcctttggcagtttggcagtaatggatccaaaccaatttaaagaattagctcttgcacttgatctccttgacaagcctttcatttgggttgtacgtccatgtaatgacaacaaggaaaatgttaatgcatacgcacatgatttccatggaagcaaaggtaaaatagttggttgggcaccccagaagaagatattgaaccaccctgcattggctagcttcattagtcactgtggttggaattctaccctagaaggtatatgtgccggtgtacctttcttgtgttggccatgcgccactgatcaatatcttgacaagtcatatatatgtgatgtgtggaagattgggcttggactagacaaggatgaaaatggaataatttctagggaagagataaggaagaaggtggatcaactgcttgttgatgaagacatcaaagctaggtcattgaaattgaaagacatgaccataaataacatactagaaggtggtcagtcatcaaagaatctcaacttctttatggattgggcgaagtaattatgcttaatttggttctatattgaaaagtcatgtgtaatttctacatgtaagaatttaatttctatgtagatcttaatgtaatctatttaaaaattaataagctttattatatgcaatgatttttagttttatgaaattaatt

SEQ ID NO: 24112 - protein, 443 aa, Glycine max
MGIPHFLCIPFPVQGHVNPLMQFSLLLVKHGCKVTFVHTEFSLKRTKTSGADNLEHSQVKLVTLPDGLEAEDDRSDVTKLLLSIKSNMPALLPKLIEDINALDADNKITCIIVTFNMGWPLEVGHKLGIKGALLCPASATSLASAACIPKLIHDGIIDSQGLPTKTQEIQLSPNMPLIDTENFPWRGFNKIFFDHLVQEMKTLELGEWWLCNTTYDLEPGAFSVSPKFLPIGPLMESDNSKSAFWEEDTTCLEWLDQQPPQSVIYVSFGSLAVMDPNQFKELALALDLLDKPFIWVVRPCNDNKENVNAYAHDFHGSKGKIVGWAPQKKILNHPALASFISHCGWNSTLEGICAGVPFLCWPCATDQYLDKSYICDVWKIGLGLDKDENGIISREEIRKKVDQLLVDEDIKARSLKLKDMTINNILEGGQSSKNLNFFMDWAK

SEQ ID NO: 24113 - protein, 423 aa, Glycine max
MQFSLLLVKHGCKVTFVHTEFSLKRTKTSGADNLEHSQVKLVTLPDGLEAEDDRSDVTKLLLSIKSNMPALLPKLIEDINALDADNKITCIIVTFNMGWPLEVGHKLGIKGALLCPASATSLASAACIPKLIHDGIIDSQGLPTKTQEIQLSPNMPLIDTENFPWRGFNKIFFDHLVQEMKTLELGEWWLCNTTYDLEPGAFSVSPKFLPIGPLMESDNSKSAFWEEDTTCLEWLDQQPPQSVIYVSFGSLAVMDPNQFKELALALDLLDKPFIWVVRPCNDNKENVNAYAHDFHGSKGKIVGWAPQKKILNHPALASFISHCGWNSTLEGICAGVPFLCWPCATDQYLDKSYICDVWKIGLGLDKDENGIISREEIRKKVDQLLVDEDIKARSLKLKDMTINNILEGGQSSKNLNFFMDWAK

SEQ ID NO: 24114 - protein, 356 aa, Glycine max
MPALLPKLIEDINALDADNKITCIIVTFNMGWPLEVGHKLGIKGALLCPASATSLASAACIPKLIHDGIIDSQGLPTKTQEIQLSPNMPLIDTENFPWRGFNKIFFDHLVQEMKTLELGEWWLCNTTYDLEPGAFSVSPKFLPIGPLMESDNSKSAFWEEDTTCLEWLDQQPPQSVIYVSFGSLAVMDPNQFKELALALDLLDKPFIWVVRPCNDNKENVNAYAHDFHGSKGKIVGWAPQKKILNHPALASFISHCGWNSTLEGICAGVPFLCWPCATDQYLDKSYICDVWKIGLGLDKDENGIISREEIRKKVDQLLVDEDIKARSLKLKDMTINNILEGGQSSKNLNFFMDWAK

SEQ ID NO: 24115 - DNA, 728 bp, Glycine max
attcaaaccctagatcagttttaattagtttcctagttttattcatagtgtgcaagaatgggaaacagcttaaggtgttgtttggcttgtgttcttccatgtggagctctagacttgattcgaatagtccatttgaatggctatgtggaagagattacacgtccaatcacagcaggagaggttctcaaagcaaaccctaaccatgttctaagcaaacctagctctcaaggcgtcgttcgccggattttgatcctttcaccggagaccgagctcaagaggggcagcatctacttcttgatcccggaatcttcgctgccggagaagaaacggctagccggaaagggaagaaatgttggtggtgataatgatataaaaaagaaaccatcaacattgaaagggaacaagggtagtagtgatgatgattattcttcactatcacaagggtgcctcaataaagccactcacaaaggttctaaagagaagaaatcgtcgtgccgggatcgccggaaaggccgcatcggaatatggaggcctcatttggagagtatattggaagattagtcggttttttgtgtcgctggccggtggccggaatccaacatggctggaaaaaagaagaggagaaaaagaagaagaaatatgttaaattattgaaatatagcaacaggactttttttttttttttgttcccttttgttttataaatgtatgtgggaatttgatgggag

SEQ ID NO: 24116 - protein, 167 aa, Glycine max
MGNSLRCCLACVLPCGALDLIRIVHLNGYVEEITRPITAGEVLKANPNHVLSKPSSQGVVRRILILSPETELKRGSIYFLIPESSLPEKKRLAGKGRNVGGDNDIKKKPSTLKGNKGSSDDDYSSLSQGCLNKATHKGSKEKKSSCRDRRKGRIGIWRPHLESILED

SEQ ID NO: 24117 - DNA, 1083 bp, Glycine max
atacataaaatccattcattcggtttcgttccactccccccaatagccgttattctactcgcaagcaaatcagaacaagagaagagaatggcaggagcagaggagctaaacagagaacagtacgtgtaccttgcgaagctgtcggagcaggcggagcggtacgaagagatggtggagttcatgcagaaggtggtggtggggtggacgccggcgtcggagctcacggtggaggagcgcaacctcctctcggtggcctacaagaacgtgatcgggtctctgcgtgccgcgtggcgcatcgtgtcctccatcgaacagaaggaggaagggcgcaagaacgacgaccacgtgtccctcgtgaagcactacagatccaaggtcgagaacgagctcacgcaggtctgcgccagcatcctcaacctcctcgactccaacctcgtaccctccgtcttcgccagcgagtccaaggtcttctacttgaagatgaagggcgattaccaccgctatctcgcagagtttaaggttggggatgagagaaaaaccgctgctgaggataccatgttgtcttacaaggctgcccaggacattgcttctggggatcttccccctactcaccccatcagattgggtctcgctctcaacttctccgtcttctactatgaaatcctcaaccagtctgacaaagcgtgtgccatcgctaaacaggcttttgaggaagcaattgctgagctggacaccttgggagaagaatcctacaaagacagcacgctcataatgcagcttttaagagacaacctcaccctttggacttctgatgtccaggaccagctagatgagccctgatatccattataggtttgatgggtggtattcttcctctcatggaggtgggctttgaatgtcatttctttgtgctaaattaagaatcgccctagtttataaaatgattggcaatctgtgatataatgttgtatgaacagagaccaggcttctttgttttttatttttatgtctcatgatattttggaaaggatactgtataatgggatatccaattaattaattattatatctgttgcaatcttt

SEQ ID NO: 24118 - protein, 279 aa, Glycine max
IHKIHSFGFVPLPPIAVILLASKSEQEKRMAGAEELNREQYVYLAKLSEQAERYEEMVEFMQKVVVGWTPASELTVEERNLLSVAYKNVIGSLRAAWRIVSSIEQKEEGRKNDDHVSLVKHYRSKVENELTQVCASILNLLDSNLVPSVFASESKVFYLKMKGDYHRYLAEFKVGDERKTAAEDTMLSYKAAQDIASGDLPPTHPIRLGLALNFSVFYYEILNQSDKACAIAKQAFEEAIAELDTLGEESYKDSTLIMQLLRDNLTLWTSDVQDQLDEP

SEQ ID NO: 24119 - protein, 250 aa, Glycine max
MAGAEELNREQYVYLAKLSEQAERYEEMVEFMQKVVVGWTPASELTVEERNLLSVAYKNVIGSLRAAWRIVSSIEQKEEGRKNDDHVSLVKHYRSKVENELTQVCASILNLLDSNLVPSVFASESKVFYLKMKGDYHRYLAEFKVGDERKTAAEDTMLSYKAAQDIASGDLPPTHPIRLGLALNFSVFYYEILNQSDKACAIAKQAFEEAIAELDTLGEESYKDSTLIMQLLRDNLTLWTSDVQDQLDEP

SEQ ID NO: 24120 - protein, 223 aa, Glycine max
MVEFMQKVVVGWTPASELTVEERNLLSVAYKNVIGSLRAAWRIVSSIEQKEEGRKNDDHVSLVKHYRSKVENELTQVCASILNLLDSNLVPSVFASESKVFYLKMKGDYHRYLAEFKVGDERKTAAEDTMLSYKAAQDIASGDLPPTHPIRLGLALNFSVFYYEILNQSDKACAIAKQAFEEAIAELDTLGEESYKDSTLIMQLLRDNLTLWTSDVQDQLDEP

SEQ ID NO: 24121 - DNA, 951 bp, Glycine max
aaagaaaccaaagtctatttttttttttgtttctgagcctcccctcccctctctctaagatccccaaattgcttgtgaatgctagaaaccctagacagattcgattggatgcgctcccatttcacatcaagggcgagcgcattcggttcttgcaagcaagcctggtactaccgctgcctcggcctcgacccctgaatttgaaccattcatcaccacctttcttcattcattcacggttttccttttcgactcgatttgttgttttttttgttttgtttccttgacgatgttgacgatgagcaagcagaagaagaaccagaacgcgaagaggctgttgataagcatcaatgtgctggggagcgcggggcccattaggttcgtggtgaacgaggaggagcttgtggcggcggtcatcgacaccgcacttaagtcctacgcgcgtgagggcaggcttcccgtcctgggaaacaacaccaccggtttcgtgctttattgcccccatcttggatctgatgctttgagtccttgggagagaattggatcacatggggtgaggaatttcgtgctgtttaagaagccagagggtgtggcggatgtagatggaagtacagcactttctcgcagcagcagggggagtgggagctggaaggcttggttcaacaagtccctcaacctcaagatttctacccactaatgaataaatctctcggggaattgaacatgatgccttttgtggtgaatgccactaataatatccataatacgtagtatttcttttggttgtttttgttctcgctagccagagaaccctctctttaggaaattgttcaactttgacatttaggttttgattttgatggaatacaataagttttgattcctcacttccttgccattttttattcaattaaattaaacttaagatggtgaatgtgagctaatattccaagt

SEQ ID NO: 24122 - protein, 135 aa, Glycine max
MLTMSKQKKNQNAKRLLISINVLGSAGPIRFVVNEEELVAAVIDTALKSYAREGRLPVLGNNTTGFVLYCPHLGSDALSPWERIGSHGVRNFVLFKKPEGVADVDGSTALSRSSRGSGSWKAWFNKSLNLKISTH

SEQ ID NO: 24123 - protein, 132 aa, Glycine max
MSKQKKNQNAKRLLISINVLGSAGPIRFVVNEEELVAAVIDTALKSYAREGRLPVLGNNTTGFVLYCPHLGSDALSPWERIGSHGVRNFVLFKKPEGVADVDGSTALSRSSRGSGSWKAWFNKSLNLKISTH

SEQ ID NO: 24124 - protein, 93 aa, Glycine max
RNQSLFFFLFLSLPSPLSKIPKLLVNARNPRQIRLDALPFHIKGERIRFLQASLVLPLPRPRPLNLNHSSPPFFIHSRFSFSTRFVVFFVLFP

SEQ ID NO: 24125 - DNA, 1118 bp, Glycine max
actggaaattatgcttccaatatggaaaattttagacagcattctgcaactgtcacttctgctcctggtggtttgttatctactgcacctactgtgcaaataccatctgcctctcattcaacttcatcgatatcaggcttcccccttgactctcttgaaacagccaagagtggcaatcaagtcattaatcttgttaagccttctactttttttgcatcaacgtcttcatcttcactgttagttccacctatttattcatctgtgccgcctagtgcagttgttcatcattccctgaatgtgccacgccaatacggcactccagtacttcaacccttccctccccctaatcctcctctttctcttacccctatttcaagctccactccaaatagacctgtaatcagcagggataatgtccgtgatgcacttttatcattggttcaggaggatcatttcattgacatgatgttccaggcattactgaaggtgagtcattcatgagtaatcaaactctgaaggttggatggaaactgcatataaagttagttctgtatattgtagttacacaccatcacatctaacaagaggtgtaacctagtagtccgtctttagctttagccacaactttgcacgatacatctgaaatggcctattgcacaatatactaacaaatcatatggtgcattaatacactataatcttcaccactgaatttatgtgtgtctacgtgaacaagttacaagagaaaacaatggtaaaaatatagaatgatcttaatcgctaagttgatataacgattgctccacgtttacacacaaaaactaatggtgaaggtgctgtgtattcttacactgtaactctgttgtgtattgtagaaatagtcgtctgtatctgcaaaatgataaaagtgtttcgatgtcagtgtcgccttattaccctttgttgtcttgtctgtactttgtggttttaaatactgtcatggttctgtcgattgagtctttgcattaagttggacaagtcctctctatcgaccaatgaagatgcatgtataatcccatgcttagtatgcattttgatataaataaataaaaatttacctttcaatttagtccttaaag

SEQ ID NO: 24126 - protein, 166 aa, Glycine max
TGNYASNMENFRQHSATVTSAPGGLLSTAPTVQIPSASHSTSSISGFPLDSLETAKSGNQVINLVKPSTFFASTSSSSLLVPPIYSSVPPSAVVHHSLNVPRQYGTPVLQPFPPPNPPLSLTPISSSTPNRPVISRDNVRDALLSLVQEDHFIDMMFQALLKVSHS

SEQ ID NO: 24127 - protein, 159 aa, Glycine max
MENFRQHSATVTSAPGGLLSTAPTVQIPSASHSTSSISGFPLDSLETAKSGNQVINLVKPSTFFASTSSSSLLVPPIYSSVPPSAVVHHSLNVPRQYGTPVLQPFPPPNPPLSLTPISSSTPNRPVISRDNVRDALLSLVQEDHFIDMMFQALLKVSHS

SEQ ID NO: 24128 - DNA, 1249 bp, Glycine max
aaagattaccgttctcacttaaaccaataaacaaacccacccaatcactaaagcaaccttcttgattatcctaaagccgcagcgcaagcaatcactctttttctttctcataataatgcaaattcttccccactctgcagcaacaaattctcatttgcaaaccccataaaggcatatcatctttatactttaccgggatctgtgtctccttttatttttccccaagacaaagtagacattgtcttccactcacttcaaaaaagagagtgagagagagaaactttgtggtctgtgttctgtgaaactgaagtgttcttcctcaatcattgtcttttacagtcaaattcagcgtctaagatctcatttcaaaaaaatttccgcttgttaaagttggtttctcactcacaagtcacaagtcacaccctttatttacttcagcatccaacaaagtgttccttacttgttctgttcaatgactcagatcttcaaatgtgagtgttgtagcatcattgcatgagtcacccatcaaacattgttcaagtaactgtttttagtttattttgtaaatgagggtgtggagggttcacccacaagagcaaaagctttgtccaaatggtgttttgaggtgggttttggtttggatgagtgtttgttttcttgtgttcacggttggtccaccgtctcgctcgagggtgaggaagagtgtatcttctcaactttcttgtcctccatgtgattgtttctgctcttcagctgaatatctcctcgatcctctaggactggtcaacagctcaatttccaattgtggtaaacatgatccgattttgaatgaggaaatgaacaagggtctactgacaatgctatctgaggagctaaatttgcagaaaattgtggccaacgagaccatggaacacaccaaacagttaataatggatgccaggaaaaccttttcacattaccagaaggaagcagaaaagtgcaacattggggtggaaacttgtgaagaagcaagggagagggcagaggcagagctcattgaagaacacaagctgacaacattatgggaaaatcgtgcaagtgaatatgggtgggtggaatgactgaagaacacactgaaggagtttagttaaccattgctacattatgttatgttaccccttaattgtatcatagcttttatagccaatacacagatctcttgtgatgatttcaaccaggttaacaattctattgaaacaagttttgtgcc

SEQ ID NO: 24129 - protein, 177 aa, Glycine max
MRVWRVHPQEQKLCPNGVLRWVLVWMSVCFLVFTVGPPSRSRVRKSVSSQLSCPPCDCFCSSAEYLLDPLGLVNSSISNCGKHDPILNEEMNKGLLTMLSEELNLQKIVANETMEHTKQLIMDARKTFSHYQKEAEKCNIGVETCEEARERAEAELIEEHKLTTLWENRASEYGWVE

SEQ ID NO: 24130 - protein, 152 aa, Glycine max
MSVCFLVFTVGPPSRSRVRKSVSSQLSCPPCDCFCSSAEYLLDPLGLVNSSISNCGKHDPILNEEMNKGLLTMLSEELNLQKIVANETMEHTKQLIMDARKTFSHYQKEAEKCNIGVETCEEARERAEAELIEEHKLTTLWENRASEYGWVE

SEQ ID NO: 24131 - DNA, 1303 bp, Glycine max
agagaagcccaatatggattctctatatatgccttgggaccatgttaatatgacacccacatttagaggtagaggcctatctataaggggtgagggtcctttaaggaatgtgaggagccgttctgcacttgatttggaatccaacctggctaggacccatttatcaaatactcatccacacaactcatactctactggtctaccaattgaccattctaacatggtcgatctttcaactcaaacttctggcactttgaccagggattggagcccaatgagtatatgtcctcctcatggaagggtgtcatcatcagatgcaaatgcttttaatcacgaggcaagtcatttccttattggaagcagttctagtaatgctcctgtagatgttggaggttttcataatgaatttggaactagtagaaatcctactgctcctcaaagttttcataataatctgactcaaactgcaagaggagttcacagtaactactctcaaagatccactccaacttttagggcttcttctagcttacgtttgggacgtgtggcaccttctgatgatggattgcatatggtgtccgaaagttactcttctagacagccaaggccattgaccaccgttggctggcagaacaataatagaaatggaaggtcaagaatacctagtgacagatatcggtcattggatgatgagggtttcatgattgttgatcgcacttcactgtatggacctaggaatatgcttgatcgacatagagacatgaggatggacatagacaacatgagttatgaggaactacttgcacttggagagagaataggccatgtgagcacaggattgtctgaggatttgatttccaagtatttgacagaaacaatatactgttcatctgagcaaagtcaagaagaagaagcttgtgcaatctgcctggaagaatacaagaacatggacgatgtcgggacgctgaaagcttgtggacatgattaccatgtgggttgcattaggaagtggttgtctatgaagaaagtatgtcctatatgcaaagcttctgctttgcctgaggataagaagggcaaataaacaatttattcattatactttagtttaacgtatatcatcattctgtacatatatttggatattccttgaagtggagaaaacagacttccatttggatatgttgttgtaatagctaatgctatactctatctatatgtctatgaattcgttctctttggcttcactcttaatttcgtgaagccttgaaattaaattatcgtacttcaatatttgatttaattc

SEQ ID NO: 24132 - protein, 359 aa, Glycine max
EKPNMDSLYMPWDHVNMTPTFRGRGLSIRGEGPLRNVRSRSALDLESNLARTHLSNTHPHNSYSTGLPIDHSNMVDLSTQTSGTLTRDWSPMSICPPHGRVSSSDANAFNHEASHFLIGSSSSNAPVDVGGFHNEFGTSRNPTAPQSFHNNLTQTARGVHSNYSQRSTPTFRASSSLRLGRVAPSDDGLHMVSESYSSRQPRPLTTVGWQNNNRNGRSRIPSDRYRSLDDEGFMIVDRTSLYGPRNMLDRHRDMRMDIDNMSYEELLALGERIGHVSTGLSEDLISKYLTETIYCSSEQSQEEEACAICLEEYKNMDDVGTLKACGHDYHVGCIRKWLSMKKVCPICKASALPEDKKGK

SEQ ID NO: 24133 - protein, 355 aa, Glycine max
MDSLYMPWDHVNMTPTFRGRGLSIRGEGPLRNVRSRSALDLESNLARTHLSNTHPHNSYSTGLPIDHSNMVDLSTQTSGTLTRDWSPMSICPPHGRVSSSDANAFNHEASHFLIGSSSSNAPVDVGGFHNEFGTSRNPTAPQSFHNNLTQTARGVHSNYSQRSTPTFRASSSLRLGRVAPSDDGLHMVSESYSSRQPRPLTTVGWQNNNRNGRSRIPSDRYRSLDDEGFMIVDRTSLYGPRNMLDRHRDMRMDIDNMSYEELLALGERIGHVSTGLSEDLISKYLTETIYCSSEQSQEEEACAICLEEYKNMDDVGTLKACGHDYHVGCIRKWLSMKKVCPICKASALPEDKKGK

SEQ ID NO: 24134 - protein, 350 aa, Glycine max
MPWDHVNMTPTFRGRGLSIRGEGPLRNVRSRSALDLESNLARTHLSNTHPHNSYSTGLPIDHSNMVDLSTQTSGTLTRDWSPMSICPPHGRVSSSDANAFNHEASHFLIGSSSSNAPVDVGGFHNEFGTSRNPTAPQSFHNNLTQTARGVHSNYSQRSTPTFRASSSLRLGRVAPSDDGLHMVSESYSSRQPRPLTTVGWQNNNRNGRSRIPSDRYRSLDDEGFMIVDRTSLYGPRNMLDRHRDMRMDIDNMSYEELLALGERIGHVSTGLSEDLISKYLTETIYCSSEQSQEEEACAICLEEYKNMDDVGTLKACGHDYHVGCIRKWLSMKKVCPICKASALPEDKKGK

SEQ ID NO: 24135 - DNA, 942 bp, Glycine max
attcaccccactttcttttttcgttcacagcttggcttccctttaggcaaagcttgatccttcaagccttttaaggtacacaggtactcattgtgctcttttcttcttaattagaaatttttatgggcatcatttatctaacagcttgagtcaaaataggtagcatcctttggccaaaattggaagaaacatgagcgataaaaaaggaagcacttcaaaccatggcttgaatttgaacatacccccaccaagggttgccaatcagatacctgattcaccaactcgattaccaatagcgccaccaacatcaccaacaagctcatgtgtgtccagcgaactaagccaagatgacaacagcagcagcagcagcagaaaaaacaacaaccgcggctgcactcggagccctgaagacatttccatggtgctagtagggtgttctcgctgccttatgtatatgatggtcaatgagggtgaacccaagtgccccaaatgcaaaagcaccactttgattcattttcttaattacaacaacatcccataaggaggggacacaatgctatgctaccttgctgtgatttctgtattttgtgccgcaagtaggataagttagcttaaaaaaaaaaaggaatctcctttttaggacatttcttttatcttatgttttctatctttttcctaaacctttctttatgagttgtgctgcttgcgctccactttttccctttatctcctattcttaggaaggaaatcacaaaagagtttaagtgtaagtagcactacatgtcagggaggttacttttaataaatggttgtctcaccaagtttaccatcttaaatataaggttaggaaatttcctccatcagtatggctaattaacatatcatgtaaacctgattacataaaataagagaatgaatcgcaaggtatttcaattatctacc

SEQ ID NO: 24136 - protein, 116 aa, Glycine max
MSDKKGSTSNHGLNLNIPPPRVANQIPDSPTRLPIAPPTSPTSSCVSSELSQDDNSSSSSRKNNNRGCTRSPEDISMVLVGCSRCLMYMMVNEGEPKCPKCKSTTLIHFLNYNNIP

SEQ ID NO: 24137 - DNA, 1282 bp, Glycine max
aggcagtttatttctgcagtggggatcttagccctccagaatatcatcattatgggcttgcagctcctttgtatacccatttcacatcacctataagaagatatgcagatgtcattgtgcacaggctacttgctgcttctttagggatatccaagttaccacctgtatttcaagacagtctccagctcactagtattgcagacaatttaaattatcggcacaggaatgcccagtatgcagggcgggcatctgtagagctacatactctaatttatttcaggaagaggtatgtgacttaacttctgctccctgttactgttatttttatctacacttaacagcctattctaacgtatgttgatctttgttcacacaggcctacagacacggagggtagaatagtgaaaataagatctaatggattttttgtgtttgttcccaagtaaagcatcttattcttacctcgtctctttcctttttattttgctttgctatataacagaaggaaaggtgaatacggataacaaaaaataggagaaaagaatgatctgatttaatctgaccaggagatggttacttcagaaatgtttaagaagccagctatttctgtatactttcagtgagtttgtcacttattgtctgtatggcccttttaccccttacagatatggcatagaaggacctgtatatttgacaaaagcagaaaagggaagtggagaatggtatgtagatgagcaacagcagaagattaaaaagatggatggtagcctttcatacaacgttttgcagacagtccaaattcacatggaggttgtggagcctcagcctaaccggccaaaacttcagcttaccctcatctagaggtatatgagcattgaacaacaggcatgcctcgaatataactcctatgtagattgccatatgcatctcagcacttttcaatgaaggtttctggtattggaattggccggcatgaaaaattatcgaatgaacgaaacattgatggaagattttggttggagaaattttttgtagatggaacataagatttttggttgacaaggtaagttttagttagtccttttgcaactatttgcttttaaattgtgaagtaagacgtggaatttttatacatgtgatgctgtaagcaagcgtgaacagctcaagtaaaaaaaaatacgttagcttaaatgtgccaatattgtattttgaaagaatatcagaattgttgcattaagaaatatggaatcattcaagaggctccaccaaagtttagtttctt

SEQ ID NO: 24138 - protein, 98 aa, Glycine max
AVYFCSGDLSPPEYHHYGLAAPLYTHFTSPIRRYADVIVHRLLAASLGISKLPPVFQDSLQLTSIADNLNYRHRNAQYAGRASVELHTLIYFRKRYVT

SEQ ID NO: 24139 - DNA, 1503 bp, Glycine max
agagaaaattagagtggttgctcgtgaaaccaatgaagagttacgtgcaatcaaggccgatccagccgaagcatttgatgtaggagcaatcctctccattgctaggaggcaactatctagtgaatgggaggctactcgtattgaagctttgcactggatatcaacccttttatccagacatcgtagtgaggttttgacatttctgaatgacatatttgaaaccctactcaaagcactttcagattcatctgatgaggttgtgcttctagttcttgatgttcatgcatgcattgcaagagatccccaccacttccggcagcttgttgtttttctagtgcacaatttccgactagataattctcttttggagaagcgtggtgctttgatagtccgtcgcctttgtgttcttttgaatgctgagagagtctaccgtgaactttctacaatattagaaagagaatctgactttgattttgcgtcaattatggttcaggctctgaatttgatcttacttacatcatcagaattatctgagattcgagatcttttgaagcaatcactggtaaatcctgctgggaaggacttgtatgtttctctgtatgtctcttggtgtcattctcctatggcaattataagtctttgctttttggctcagacttaccaacatgccagtgctgtgattcaatcaatggaggaggaggatattaatgtcaaatttttggtccaactggataaattgattcgcttgatggaaactccaatctttgcttatcttcgattgcagcttcttgaacctggaagatatatttggctattcaaggcattgtatggtcttctgatgttgcttcctcagcaaagtgccgcctttaagatactaaaaactcgtttaaaagctgtgccattgtattcattcaatggagagcagttgaaaagaatgccttcaggggattcataccaatttcgtaacgtgccggatggatttcgaaccattgaggatggtgacgtagccaaagatggtggtagctcacgcaatggaataaattttgctgctaggctacaacagtttcagcaaatgcagcatcagcatcgggtgcttaccaaaacacaggcaaagttgcgcaatatgtccacttcattgtcaaagcattacatgcaggagccacaaagagaggaagaaccaagaaaacctcagtctattgaagttaatgttcctccttcaagatcatcatcaaagagaggtccagggcagctacaattataattttaatattgcttctgcccatggggtctaagttaaagtatgtcaactttgaaagggtcggtatgatttgtaaaattgtaaatcatagtagctcgttttattccacttgttatagaagttgggatggcaaaaattgggtttttgaatcaagataagtttgggcttttcctaggctattcttttgactttgtacaacgtgattcccacgtggttatgttattttttatttattaaaaaccaag

SEQ ID NO: 24140 - protein, 419 aa, Glycine max
EKIRVVARETNEELRAIKADPAEAFDVGAILSIARRQLSSEWEATRIEALHWISTLLSRHRSEVLTFLNDIFETLLKALSDSSDEVVLLVLDVHACIARDPHHFRQLVVFLVHNFRLDNSLLEKRGALIVRRLCVLLNAERVYRELSTILERESDFDFASIMVQALNLILLTSSELSEIRDLLKQSLVNPAGKDLYVSLYVSWCHSPMAIISLCFLAQTYQHASAVIQSMEEEDINVKFLVQLDKLIRLMETPIFAYLRLQLLEPGRYIWLFKALYGLLMLLPQQSAAFKILKTRLKAVPLYSFNGEQLKRMPSGDSYQFRNVPDGFRTIEDGDVAKDGGSSRNGINFAARLQQFQQMQHQHRVLTKTQAKLRNMSTSLSKHYMQEPQREEEPRKPQSIEVNVPPSRSSSKRGPGQLQL

SEQ ID NO: 24141 - protein, 258 aa, Glycine max
MVQALNLILLTSSELSEIRDLLKQSLVNPAGKDLYVSLYVSWCHSPMAIISLCFLAQTYQHASAVIQSMEEEDINVKFLVQLDKLIRLMETPIFAYLRLQLLEPGRYIWLFKALYGLLMLLPQQSAAFKILKTRLKAVPLYSFNGEQLKRMPSGDSYQFRNVPDGFRTIEDGDVAKDGGSSRNGINFAARLQQFQQMQHQHRVLTKTQAKLRNMSTSLSKHYMQEPQREEEPRKPQSIEVNVPPSRSSSKRGPGQLQL

SEQ ID NO: 24142 - protein, 212 aa, Glycine max
MAIISLCFLAQTYQHASAVIQSMEEEDINVKFLVQLDKLIRLMETPIFAYLRLQLLEPGRYIWLFKALYGLLMLLPQQSAAFKILKTRLKAVPLYSFNGEQLKRMPSGDSYQFRNVPDGFRTIEDGDVAKDGGSSRNGINFAARLQQFQQMQHQHRVLTKTQAKLRNMSTSLSKHYMQEPQREEEPRKPQSIEVNVPPSRSSSKRGPGQLQL

SEQ ID NO: 24143 - DNA, 1379 bp, Glycine max
taatcgaaaaacaatcagagatcattttcatcaaattgttcaaaactcaaagcatcgatttgatgccatttgcgctcctgcttgtcgtagacattccccaatcgatcaccgtcctcccgatccaccagtctgaatggaagaaggtaagaggaagttggcgatgaagagaaagagagagagcacaggtggtggaaaagacagactgagtgagttgcctgactctgtattggtccacataatggaattgatggagacaagaaatgcagttcagacttgtgtactctctcagcgttggaagaacctttggagacgtatgactcgtctctctttcaaccaccctagaacattttccagatatcacaattttgtgtctcatgttctttctggacgagaccattctgtttccctaattgatcttctttttgtggtccttcattcaacttcggccacactcttgcatgacgtcatcagttatgctgtgtcgcacaatgtgcagcagttgacaatctatatagatacattagattgcattaacggtgccacaccctcctttcagctttccaaaactccttttgtccctctcctttttccctctccatctttgacttctcttaagctttccagtgtgttcattggatattctttggaacttccaaaatctctactactaccatctttgaaaaccttgcatctcacaaatgttcactttactgctagtgaccacaacaacaactttgttgagcccttttctacttgtcacatgttgaatactttggtcattcaatattgctttatgcacacttctgcacaagtcctctccatatccaattctaacctttcttctttgacccttgacacctttcaagaacacattgtgctttctactccgaatctcacttctcttacaatcagggatggtttccattttactcttctccaactctcctccacttgtgatctttcacttcttaaagaggcggatattgagacccgtgttgatatacattattcagtcatcattacctggctgcgacttatgactaatgttaagatgctcacaatctcttctgctacccttaaggcaatactaaatgacctatcagatcctgctgcagcgactgttcaacctccatgctttggtagattggagtcattgaaagtgaaaatgcatccacatgtaaacatatctaaggaagaagtaagtaggacattggagcacttacttgtgaactctcctccaccgaccagagtttatctcataaatgtatccctatcccatcaagaactagttaggtatgcttgaaggaaatgaaacattggggaagatgaagagaaagatggaagagttacagaggacaaggacaggatcaatgataagt

SEQ ID NO: 24144 - protein, 389 aa, Glycine max
MEEGKRKLAMKRKRESTGGGKDRLSELPDSVLVHIMELMETRNAVQTCVLSQRWKNLWRRMTRLSFNHPRTFSRYHNFVSHVLSGRDHSVSLIDLLFVVLHSTSATLLHDVISYAVSHNVQQLTIYIDTLDCINGATPSFQLSKTPFVPLLFPSPSLTSLKLSSVFIGYSLELPKSLLLPSLKTLHLTNVHFTASDHNNNFVEPFSTCHMLNTLVIQYCFMHTSAQVLSISNSNLSSLTLDTFQEHIVLSTPNLTSLTIRDGFHFTLLQLSSTCDLSLLKEADIETRVDIHYSVIITWLRLMTNVKMLTISSATLKAILNDLSDPAAATVQPPCFGRLESLKVKMHPHVNISKEEVSRTLEHLLVNSPPPTRVYLINVSLSHQELVRYA

SEQ ID NO: 24145 - protein, 380 aa, Glycine max
MKRKRESTGGGKDRLSELPDSVLVHIMELMETRNAVQTCVLSQRWKNLWRRMTRLSFNHPRTFSRYHNFVSHVLSGRDHSVSLIDLLFVVLHSTSATLLHDVISYAVSHNVQQLTIYIDTLDCINGATPSFQLSKTPFVPLLFPSPSLTSLKLSSVFIGYSLELPKSLLLPSLKTLHLTNVHFTASDHNNNFVEPFSTCHMLNTLVIQYCFMHTSAQVLSISNSNLSSLTLDTFQEHIVLSTPNLTSLTIRDGFHFTLLQLSSTCDLSLLKEADIETRVDIHYSVIITWLRLMTNVKMLTISSATLKAILNDLSDPAAATVQPPCFGRLESLKVKMHPHVNISKEEVSRTLEHLLVNSPPPTRVYLINVSLSHQELVRYA

SEQ ID NO: 24146 - protein, 354 aa, Glycine max
MELMETRNAVQTCVLSQRWKNLWRRMTRLSFNHPRTFSRYHNFVSHVLSGRDHSVSLIDLLFVVLHSTSATLLHDVISYAVSHNVQQLTIYIDTLDCINGATPSFQLSKTPFVPLLFPSPSLTSLKLSSVFIGYSLELPKSLLLPSLKTLHLTNVHFTASDHNNNFVEPFSTCHMLNTLVIQYCFMHTSAQVLSISNSNLSSLTLDTFQEHIVLSTPNLTSLTIRDGFHFTLLQLSSTCDLSLLKEADIETRVDIHYSVIITWLRLMTNVKMLTISSATLKAILNDLSDPAAATVQPPCFGRLESLKVKMHPHVNISKEEVSRTLEHLLVNSPPPTRVYLINVSLSHQELVRYA

SEQ ID NO: 24147 - DNA, 1012 bp, Glycine max
atcgaaaattatcttatcttcgttaataatatcgacgcgtttaattgatttttctctcgcaaaagaagaaaacatggaatcgttctcgtccttcttcgattctcagccaggcagcagaagctggagctatgattctctcaagaacctccatcagatctctccgtccgtccagaatcatctcaagcgggtttatctcactttgtgttgtgcccttgttgcgtctgcctttggagcttacctccacgtgctctggaacatcggtggtatcctcacaaccattgcatgctgtggaagcatgatttggcttctctcatgtcctccttatcagcaacaaaagaggctctcacttctcttcctgtctgccgttcttgaaggtgcctctgttggccccttgatcaaagtggctgttgattttgacccaagcatccttatcactgcgtttgtcggaactgcgatagcgtttatctgcttctcaggagcagcgatgctggcaagacgtagagagtatctctacctcggaggacttctctcttctggcttgtccatgcttatgtggcttcagtttgcctcttcgatctttggtggctctgcctctatctttaagtttgagctctacttcggattgttgatctttgtgggatacatggtggtcgacacacaagagattatagagaaggcacacctcggcgacatggactatgtgaaacatgcgttgacccttttcaccgattttgtggctgtgtttgtccgtgttctcatcataatgctgaagaactcggcagataaagaggagaagaagaagaagaggagaaactgagactaaaagtgacaaggaaagctaataagagtgggtgttttaaataacatgaaagctttggtgtttttacgtgttaggacgcacttttggtttgcgtattcctcttatcgcacacgattgtaaatggatcaagtagttttcgtttttgtctcgactctcgttcactttcgtaatgtccaaagtatttcctctact

SEQ ID NO: 24148 - protein, 271 aa, Glycine max
SKIILSSLIISTRLIDFSLAKEENMESFSSFFDSQPGSRSWSYDSLKNLHQISPSVQNHLKRVYLTLCCALVASAFGAYLHVLWNIGGILTTIACCGSMIWLLSCPPYQQQKRLSLLFLSAVLEGASVGPLIKVAVDFDPSILITAFVGTAIAFICFSGAAMLARRREYLYLGGLLSSGLSMLMWLQFASSIFGGSASIFKFELYFGLLIFVGYMVVDTQEIIEKAHLGDMDYVKHALTLFTDFVAVFVRVLIIMLKNSADKEEKKKKRRN

SEQ ID NO: 24149 - protein, 247 aa, Glycine max
MESFSSFFDSQPGSRSWSYDSLKNLHQISPSVQNHLKRVYLTLCCALVASAFGAYLHVLWNIGGILTTIACCGSMIWLLSCPPYQQQKRLSLLFLSAVLEGASVGPLIKVAVDFDPSILITAFVGTAIAFICFSGAAMLARRREYLYLGGLLSSGLSMLMWLQFASSIFGGSASIFKFELYFGLLIFVGYMVVDTQEIIEKAHLGDMDYVKHALTLFTDFVAVFVRVLIIMLKNSADKEEKKKKRRN

SEQ ID NO: 24150 - protein, 173 aa, Glycine max
MIWLLSCPPYQQQKRLSLLFLSAVLEGASVGPLIKVAVDFDPSILITAFVGTAIAFICFSGAAMLARRREYLYLGGLLSSGLSMLMWLQFASSIFGGSASIFKFELYFGLLIFVGYMVVDTQEIIEKAHLGDMDYVKHALTLFTDFVAVFVRVLIIMLKNSADKEEKKKKRRN

SEQ ID NO: 24151 - DNA, 1735 bp, Glycine max
gtgagtgtttttgttcctcaatcaatctaattctcccatttctcttccaatggcgtcttctctttccaccaaaccattctcagccgacgctctctccgccttcgcttctctcaattccgatctcggatccctctcccccgcctacctccgactctcactccgtcctcgtcttcccaagagacttcacatacaggcggctgggagtacctatggaaatcactttcgtgttacaacatatggggaatcacatggaggaggtgttggttgtgttattgatggatgtcctcctcgccttcctctctctgaagctgatatgcaagtggatcttgacagaaggaggccaggtcagagccgaattacaactcctagaaaggagactgatacatgtaaaatattttcaggagtttccgaaggaatcactactggaactccaattcatgtatctgtacccaatactgatcaaagaggacatgactatagcgagatggcagtagcttataggccctcccatgcagatgctacctatgacatgaagtatggtgtcagatcagttcagggtggtggtagatcttctgcaagagaaacaattggaagggttgcttctggtgctgttgctaagaaaatccttaaagaattttctggaactgagattctggcctatgtctctcaagttcataagattgttcttccagaggaccttattgatcatgacactctgactcttgatcagattgagagtaacattgttcgatgtccagacccggagtatgcagagaagatgatatctgcaattgatgctgtgcgagtgagaggtgattctgttggtggtgttgtgacatgcattgtgaggaactgtccacgaggtctcggttcaccagtatttgacaaacttgaagctgagctggctaaagctgcaatgtcattgcctgcaaccaagggctttcagtttggtagtgggtttgcaggcacctttttgactgggagtgaacacaatgatgagttctatatagatgaacatggaaacacaagaacaagaacaaatcgctctggtgggatacagggtggaatttccaatggggaaatcattaatatgagaatagctttcaagccaacatcaacaattggaaagaagcaaaagactgtgactcgagataaaaaagaaacagagtttatagcccgtggtcgccatgatccttgtgttgtcccaagagctgtacctatggtagaagcaatggtagctttggttcttgtggaccaattgatggcacaatatgcgcagtgtaatctttttcccgtaaactcagatttgcaagaacccttggtgcccatactacggccagaagaagcgctcctctgaagaggaagggggtccataaatcagtaattggcctttgataaaatcttccttatggctagtgtttaattgacacggttaattcactttgatgacaagtccaagtgaacattgtggcagatatttttgcgggtgcaatctatcgttttgtattaatgtaagttaaactatgttttcttttcctctcttcttctattttcattctgagggtgaacattgtttctagtaaaccttgttgcaaaagcagagatagatgtattcttaaagtgaactgatattaaaaattgtaagaaacgtatcagtttttggtcttaataagtgttgctctgctttgcaataaatgaaagctttggcaactttaactggctgttcacattatgt

SEQ ID NO: 24152 - protein, 435 aa, Glycine max
MASSLSTKPFSADALSAFASLNSDLGSLSPAYLRLSLRPRLPKRLHIQAAGSTYGNHFRVTTYGESHGGGVGCVIDGCPPRLPLSEADMQVDLDRRRPGQSRITTPRKETDTCKIFSGVSEGITTGTPIHVSVPNTDQRGHDYSEMAVAYRPSHADATYDMKYGVRSVQGGGRSSARETIGRVASGAVAKKILKEFSGTEILAYVSQVHKIVLPEDLIDHDTLTLDQIESNIVRCPDPEYAEKMISAIDAVRVRGDSVGGVVTCIVRNCPRGLGSPVFDKLEAELAKAAMSLPATKGFQFGSGFAGTFLTGSEHNDEFYIDEHGNTRTRTNRSGGIQGGISNGEIINMRIAFKPTSTIGKKQKTVTRDKKETEFIARGRHDPCVVPRAVPMVEAMVALVLVDQLMAQYAQCNLFPVNSDLQEPLVPILRPEEALL

SEQ ID NO: 24153 - protein, 347 aa, Glycine max
MQVDLDRRRPGQSRITTPRKETDTCKIFSGVSEGITTGTPIHVSVPNTDQRGHDYSEMAVAYRPSHADATYDMKYGVRSVQGGGRSSARETIGRVASGAVAKKILKEFSGTEILAYVSQVHKIVLPEDLIDHDTLTLDQIESNIVRCPDPEYAEKMISAIDAVRVRGDSVGGVVTCIVRNCPRGLGSPVFDKLEAELAKAAMSLPATKGFQFGSGFAGTFLTGSEHNDEFYIDEHGNTRTRTNRSGGIQGGISNGEIINMRIAFKPTSTIGKKQKTVTRDKKETEFIARGRHDPCVVPRAVPMVEAMVALVLVDQLMAQYAQCNLFPVNSDLQEPLVPILRPEEALL

SEQ ID NO: 24154 - protein, 290 aa, Glycine max
MAVAYRPSHADATYDMKYGVRSVQGGGRSSARETIGRVASGAVAKKILKEFSGTEILAYVSQVHKIVLPEDLIDHDTLTLDQIESNIVRCPDPEYAEKMISAIDAVRVRGDSVGGVVTCIVRNCPRGLGSPVFDKLEAELAKAAMSLPATKGFQFGSGFAGTFLTGSEHNDEFYIDEHGNTRTRTNRSGGIQGGISNGEIINMRIAFKPTSTIGKKQKTVTRDKKETEFIARGRHDPCVVPRAVPMVEAMVALVLVDQLMAQYAQCNLFPVNSDLQEPLVPILRPEEALL

SEQ ID NO: 24155 - DNA, 1936 bp, Glycine max
aaactcacattggcgctccgtcaaggttggctgggatgaatccactgctggagacaggcaacctagagtgtctctttgggaaattgagccattaactacatttcctatgtatccatctccattcccccttaggcttaaacggccatggcctccaggactgccttcattccatggcatgaaggatgacgattttggcccgaattcacctctgttgtggctccgagatcctgatagagggcttccgtctcttaattttcaggggattgggattaatccttggatgcagccaagatttgatcccaccatgttgaatatgcaaacagacatgtaccaagctgcggctgttcaggacatgaggagtttagatccttccaaacagcattctgcttccttacttccatttcagcaaccacagaacttcccaaacaggactgctgctttaatgcaggcccagatgttgcagcagtcacaacctcagcagatttttggaaatactcaagagaatcaacattccccacaatctcaggctcatcttcagcaacatctacaacatcaacactcgttcaatagtcagcatcatcatcaccaccagcaacaacaacagcgacagcaacatcaagtggtagataatcaacagatttctagtgcagtctctacaatgtctcagtttgtttcagctcctcaacctcaatcaccacctatgcaagttatctcttccatgtgccaacagcaaaacttttctgattcaaacgggaacactgtgactactattgtttctcccctgcacagtatcttgggttcttttccccaggatgaaacatctcacctcctgaaccttcctagaacaagctcttggattcctgttcaaaattcaagtgggtggccctcgaagcgtgttgcagtggatcctctcctttcttccggagcctctcaatgtgttctacctcaggtggagcagctagggcagccacagagtaccatgtctcaaaatgctatttctttaccaccttttcctggtagggagtgctcaatagaccaagaagggagcaatgatccacaaaaccatctcttatttggtgttaatatagagccctcgtcccttctcatgcctaatggaatgtcaagccttaagggggtctgtggaaacaatggctcctcaaccttgccatatcaatcttctaattatctgaatactaccacacggactgattcttcattgaatcatggaatgacccccaacataggcgactcgggtttcctgcagtgtctggaagaggcaggacaaggaaacccactgaacaaaacctttgtgaaggtttataagtcagggtcctttggaaggtcattggatatcactaaattcagcagctaccatgagctgcgtggtgaactcgctcgaatgtttggccttgaaggcgagttggaggaccctgtgagatcaggctggcagcttgtatttgtagaccgagagaacgatgttcttctccttggtgatggcccctggccggaattcgtaaatagcgtatggtgcataaagatactttctcctcaggaagtgcagcagatgggcaacaatggccttgagctgttgaactcgtttccaattcaaaggctctctaatggcatctgtgatgactatgtgagccgtcaagacccaagaaatttaggcactgggataacaaccgtggggtctttagactactaaatagtcttcacttcttctatcacatgtaatattattacccttacttctcaaccctttctttgtgtacggtgggaagcacctttgcctaagtgtagtttacatagcctactctttagcctttggatgttttcctgttttttcctgctaggacatttcataaactaatactgtaactatatggcatctagtcattgtgctagccacaatatatacgatacttaatccgttagg

SEQ ID NO: 24156 - protein, 567 aa, Glycine max
NSHWRSVKVGWDESTAGDRQPRVSLWEIEPLTTFPMYPSPFPLRLKRPWPPGLPSFHGMKDDDFGPNSPLLWLRDPDRGLPSLNFQGIGINPWMQPRFDPTMLNMQTDMYQAAAVQDMRSLDPSKQHSASLLPFQQPQNFPNRTAALMQAQMLQQSQPQQIFGNTQENQHSPQSQAHLQQHLQHQHSFNSQHHHHHQQQQQRQQHQVVDNQQISSAVSTMSQFVSAPQPQSPPMQVISSMCQQQNFSDSNGNTVTTIVSPLHSILGSFPQDETSHLLNLPRTSSWIPVQNSSGWPSKRVAVDPLLSSGASQCVLPQVEQLGQPQSTMSQNAISLPPFPGRECSIDQEGSNDPQNHLLFGVNIEPSSLLMPNGMSSLKGVCGNNGSSTLPYQSSNYLNTTTRTDSSLNHGMTPNIGDSGFLQCLEEAGQGNPLNKTFVKVYKSGSFGRSLDITKFSSYHELRGELARMFGLEGELEDPVRSGWQLVFVDRENDVLLLGDGPWPEFVNSVWCIKILSPQEVQQMGNNGLELLNSFPIQRLSNGICDDYVSRQDPRNLGTGITTVGSLDY

SEQ ID NO: 24157 - protein, 532 aa, Glycine max
MYPSPFPLRLKRPWPPGLPSFHGMKDDDFGPNSPLLWLRDPDRGLPSLNFQGIGINPWMQPRFDPTMLNMQTDMYQAAAVQDMRSLDPSKQHSASLLPFQQPQNFPNRTAALMQAQMLQQSQPQQIFGNTQENQHSPQSQAHLQQHLQHQHSFNSQHHHHHQQQQQRQQHQVVDNQQISSAVSTMSQFVSAPQPQSPPMQVISSMCQQQNFSDSNGNTVTTIVSPLHSILGSFPQDETSHLLNLPRTSSWIPVQNSSGWPSKRVAVDPLLSSGASQCVLPQVEQLGQPQSTMSQNAISLPPFPGRECSIDQEGSNDPQNHLLFGVNIEPSSLLMPNGMSSLKGVCGNNGSSTLPYQSSNYLNTTTRTDSSLNHGMTPNIGDSGFLQCLEEAGQGNPLNKTFVKVYKSGSFGRSLDITKFSSYHELRGELARMFGLEGELEDPVRSGWQLVFVDRENDVLLLGDGPWPEFVNSVWCIKILSPQEVQQMGNNGLELLNSFPIQRLSNGICDDYVSRQDPRNLGTGITTVGSLDY

SEQ ID NO: 24158 - protein, 509 aa, Glycine max
MKDDDFGPNSPLLWLRDPDRGLPSLNFQGIGINPWMQPRFDPTMLNMQTDMYQAAAVQDMRSLDPSKQHSASLLPFQQPQNFPNRTAALMQAQMLQQSQPQQIFGNTQENQHSPQSQAHLQQHLQHQHSFNSQHHHHHQQQQQRQQHQVVDNQQISSAVSTMSQFVSAPQPQSPPMQVISSMCQQQNFSDSNGNTVTTIVSPLHSILGSFPQDETSHLLNLPRTSSWIPVQNSSGWPSKRVAVDPLLSSGASQCVLPQVEQLGQPQSTMSQNAISLPPFPGRECSIDQEGSNDPQNHLLFGVNIEPSSLLMPNGMSSLKGVCGNNGSSTLPYQSSNYLNTTTRTDSSLNHGMTPNIGDSGFLQCLEEAGQGNPLNKTFVKVYKSGSFGRSLDITKFSSYHELRGELARMFGLEGELEDPVRSGWQLVFVDRENDVLLLGDGPWPEFVNSVWCIKILSPQEVQQMGNNGLELLNSFPIQRLSNGICDDYVSRQDPRNLGTGITTVGSLDY

SEQ ID NO: 24159 - DNA, 1317 bp, Glycine max
gattttagccattccaccttttaactatcccgtcaatcttgctgtttccaaaattgctcctgcgctgattgctggaaactccattgtgctcaagcctccaactcagggagctgtttctgctcttcatatggttcactgctttcacttggctggttttcccaaaggcctaatcaactgtgtcactggcaaaggctcagaaattggtgacttccttacaatgcatccaggagtgaactgtataagctttactggtggtgatactggcattgcaatttcaaagaaggcaggcatgattcctctgcaaatggagttgggaggaaaagatgcctgcattgtacttgaagatgctgacctggatttggttgctgcaaacattataaagggaggtttttcatacagtggtcagagatgcactgctgttaaggttgtcctggtaatggagtccgctgctgatgctttggttgagaaagtgaaggctaaggtggcaaaactaactgttggaccaccagaggatgactgtgatatcaccccggttgtgtcagaatcatccgccaatttcattgaaggcctggtcttggatgctaaggagaaaggagcaacattctgtcaggagtacaaaagagaaggcaatctcatttggcctttgctactggacaatgttaggccagacatgagaattgcatgggaagagccatttggaccggttttaccagtaattaggatcaattcagttgaagaaggaatccatcattgtaatgctagcaactttggacttcagggatgtgtcttcacaaaggatgtcaacaaagcaataatgatcagtgatgcaatggaaacgggaacagttcagataaattctgccccagctcgtgggccagatcattttccctttcagggtataaaggacagtggcattggatctcaagggattaccaacagcataaacatgatgaccaaggtcaaaacgactgtgatcaacttacccagcccttcctatactatgggctagtagtgtaatacacacatgcatgggggaacatcattatatagcatgttccataaatcatagtgaacgtacaaccgtgtgagttcagcattgcattgtcttttgcagctgggaatcacagagatgaataacgagtttgattgatatgtcgcatagctacttcatatgtgactacttgttgtactcgtatttaggatgatatgaaactgaattttatcttgtgccttatcattaaggaatatcattgtgttccaattaaattgaatgtcaaatcaatgaaatgagggggaaaaacattggcttctgtttcc

SEQ ID NO: 24160 - protein, 335 aa, Glycine max
ILAIPPFNYPVNLAVSKIAPALIAGNSIVLKPPTQGAVSALHMVHCFHLAGFPKGLINCVTGKGSEIGDFLTMHPGVNCISFTGGDTGIAISKKAGMIPLQMELGGKDACIVLEDADLDLVAANIIKGGFSYSGQRCTAVKVVLVMESAADALVEKVKAKVAKLTVGPPEDDCDITPVVSESSANFIEGLVLDAKEKGATFCQEYKREGNLIWPLLLDNVRPDMRIAWEEPFGPVLPVIRINSVEEGIHHCNASNFGLQGCVFTKDVNKAIMISDAMETGTVQINSAPARGPDHFPFQGIKDSGIGSQGITNSINMMTKVKTTVINLPSPSYTMG

SEQ ID NO: 24161 - protein, 293 aa, Glycine max
MVHCFHLAGFPKGLINCVTGKGSEIGDFLTMHPGVNCISFTGGDTGIAISKKAGMIPLQMELGGKDACIVLEDADLDLVAANIIKGGFSYSGQRCTAVKVVLVMESAADALVEKVKAKVAKLTVGPPEDDCDITPVVSESSANFIEGLVLDAKEKGATFCQEYKREGNLIWPLLLDNVRPDMRIAWEEPFGPVLPVIRINSVEEGIHHCNASNFGLQGCVFTKDVNKAIMISDAMETGTVQINSAPARGPDHFPFQGIKDSGIGSQGITNSINMMTKVKTTVINLPSPSYTMG

SEQ ID NO: 24162 - protein, 263 aa, Glycine max
MHPGVNCISFTGGDTGIAISKKAGMIPLQMELGGKDACIVLEDADLDLVAANIIKGGFSYSGQRCTAVKVVLVMESAADALVEKVKAKVAKLTVGPPEDDCDITPVVSESSANFIEGLVLDAKEKGATFCQEYKREGNLIWPLLLDNVRPDMRIAWEEPFGPVLPVIRINSVEEGIHHCNASNFGLQGCVFTKDVNKAIMISDAMETGTVQINSAPARGPDHFPFQGIKDSGIGSQGITNSINMMTKVKTTVINLPSPSYTMG

SEQ ID NO: 24163 - DNA, 1446 bp, Glycine max
actgtgttcacactttttcaactgcacttcctctccgtctctaagctactcaagcaaacaaacccattccgcatagacagtgaagaaggctttctctagcagctagagatggcagacggaagagggtccactctcgtgcatctcttggtcgtggttctgtgcttggtcgcatttgggtttgccgttgccgccgagagaagaagaagcgtcggaaccatgcaaaaaatagaaggaacaaatgaaacattttgtagctacagttctgatgttgcgactggttatggagtgggtgctttcctgtttcttctttcaggtgaatcactgctaatgggagtgacaaagtgcatgtgctttgggaggcccttaacacctgggggaaatcgagcatggtccattatatactttctttcttcctggtaagaattctaaattcttacaccggaatttctattgaatcttagcaactgatattgaagaaggtaaatattgaggtaggagtgggaatgatatatgcttcaaatgtctgcttttgttactctagtgaaaataatcattggagatttcattatttttctcatctctatggtttcattgttagatttataagctacataacccctcacccaaagcctatatacatttggtcagaggtaacaaaaatattatgttactctacagtatgtggtttttgtctttttcatgttaagctacatggtccctagtcctaacaacgtacaaaatattactcattaaataaacaccacatgattgttgtggatctgtaaagatcattcatgccacaccgttcacacccgtgaatcattgaatttcatttgtacatttttctatgcattcccagggtcacttttctggtagcagaatcatgcttgatagcaggtgcaaccaagaatgcctatcacaccaaataccgtggaatgatttatgctcagaacttctcatgtgaagccttgcggaaaggtgtcttcgttgctggagcagttttcgttgttgtaaccatgattcttaacgtatactattacatgtacttcacaaaggcaacgaccacaccagtttctcataaggctaatcgggtgagctccacagttggaatggctggatatgcatgatggaccatggctgaaagggtaacacattgagtcttaatttcagtggatgtctctatgattatcactagcaaaacggtgattttcagtttggtttttcttaggtgtttataatgtttttgtggatgttactggttagaagcaatttatagctatatctataaatatcatagtttaggaaaagagggtctcatcatgttattgggtttcagataaacttgatgttgaaagtgtgtaaaatgtttgagcctatgtttccctctaattagaattgggattttttatgatgttgctatacataagatcaattgagttggaggct

SEQ ID NO: 24164 - protein, 103 aa, Glycine max
MADGRGSTLVHLLVVVLCLVAFGFAVAAERRRSVGTMQKIEGTNETFCSYSSDVATGYGVGAFLFLLSGESLLMGVTKCMCFGRPLTPGGNRAWSIIYFLSSW

SEQ ID NO: 24165 - protein, 72 aa, Glycine max
MIYASNVCFCYSSENNHWRFHYFSHLYGFIVRFISYITPHPKPIYIWSEVTKILCYSTVCGFCLFHVKLHGP

SEQ ID NO: 24166 - protein, 67 aa, Glycine max
MQKIEGTNETFCSYSSDVATGYGVGAFLFLLSGESLLMGVTKCMCFGRPLTPGGNRAWSIIYFLSSW

SEQ ID NO: 24167 - DNA, 1504 bp, Glycine max
atagaaaattaagagacctggccataaaatatggacccgtgatgcatcttcaacttggacaggtttcaactattgtcatttcatcccctgagtgtgctagggaagtgatgaaaacccatgacattaactttgccacaaggcctaaagttctagctattgaaataatgtcttacaattccacaagtatagcttttgctggctatggaaattattggaggcagctaagaaaaatatgcacattggagcttttaagcctaaaacgcgtcaactcattccagccaattagagaagatgagctcttcaatcttgtcaaatggattgattcaaagaaaggatcccccatcaacctcactgaagcagtacttacatcaatttacacaattgcttcaagggctgcctttggcaagaattgcaaagaccaagaaaaatttatatcagtggttaaaaaaacatcaaaacttgctgcaggttttggcattgaagatttgtttccttctgttacttggcttcaacatgtcactggcttgagggctaagcttgagaggttgcatcaacaggctgatcagataatggaaaacatcatcaatgagcataaagaggcaaattcgaaagccaaggatgaccaaagtgaagcagaagaagatcttgtggatgttctcatacaatatgaggatgggagcaagaaggatttttccttaactagaaacaagatcaaggccataattctggacatttttgctgctggaggtgagacaacagcaacaaccatagattgggcaatggctgaaatggtaaagaatccaacagtaatgaagaaagcacaatctgaggtgagagaggtatgcaatatgaaagcaagggttgatgaaaattgcatcaatgaacttcaatatttgaaactaattgtgaaagagaccttgaggttgcaccctccagctcctcttttgctgccaagagaatgtggtcaaacatgtgagatacatggttatcacataccagccaaaaccaaggtcatagtcaatgcctgggcaattggaagagatccaaactattggactgaatcagagaggttttatcctgagaggttcattgatagcactattgactacaaagggagtaattttgagttcattccttttggtgctggaagaaggatatgcgcaggaagcacatttgctttgagagctgcggaactagcccttgcaatgttgttgtatcactttgattggaagcttccaagtggaatgagaagtggagaactggacatgagtgaggattttggagtcacaactataagaaaagataatctattcttggttccttttccatatcatcctttgcctgtctcatgagctcagaatgagaaactgaaacatttggtgatggctgtcacatttacttcagaataaagatcttctgttaattgaaattagactttgtgctgtgattggttgtaacagaagatggaaattgtgactactgcatattaaaatagcttttatag

SEQ ID NO: 24168 - protein, 449 aa, Glycine max
RKLRDLAIKYGPVMHLQLGQVSTIVISSPECAREVMKTHDINFATRPKVLAIEIMSYNSTSIAFAGYGNYWRQLRKICTLELLSLKRVNSFQPIREDELFNLVKWIDSKKGSPINLTEAVLTSIYTIASRAAFGKNCKDQEKFISVVKKTSKLAAGFGIEDLFPSVTWLQHVTGLRAKLERLHQQADQIMENIINEHKEANSKAKDDQSEAEEDLVDVLIQYEDGSKKDFSLTRNKIKAIILDIFAAGGETTATTIDWAMAEMVKNPTVMKKAQSEVREVCNMKARVDENCINELQYLKLIVKETLRLHPPAPLLLPRECGQTCEIHGYHIPAKTKVIVNAWAIGRDPNYWTESERFYPERFIDSTIDYKGSNFEFIPFGAGRRICAGSTFALRAAELALAMLLYHFDWKLPSGMRSGELDMSEDFGVTTIRKDNLFLVPFPYHPLPVS

SEQ ID NO: 24169 - protein, 436 aa, Glycine max
MHLQLGQVSTIVISSPECAREVMKTHDINFATRPKVLAIEIMSYNSTSIAFAGYGNYWRQLRKICTLELLSLKRVNSFQPIREDELFNLVKWIDSKKGSPINLTEAVLTSIYTIASRAAFGKNCKDQEKFISVVKKTSKLAAGFGIEDLFPSVTWLQHVTGLRAKLERLHQQADQIMENIINEHKEANSKAKDDQSEAEEDLVDVLIQYEDGSKKDFSLTRNKIKAIILDIFAAGGETTATTIDWAMAEMVKNPTVMKKAQSEVREVCNMKARVDENCINELQYLKLIVKETLRLHPPAPLLLPRECGQTCEIHGYHIPAKTKVIVNAWAIGRDPNYWTESERFYPERFIDSTIDYKGSNFEFIPFGAGRRICAGSTFALRAAELALAMLLYHFDWKLPSGMRSGELDMSEDFGVTTIRKDNLFLVPFPYHPLPVS

SEQ ID NO: 24170 - protein, 414 aa, Glycine max
MKTHDINFATRPKVLAIEIMSYNSTSIAFAGYGNYWRQLRKICTLELLSLKRVNSFQPIREDELFNLVKWIDSKKGSPINLTEAVLTSIYTIASRAAFGKNCKDQEKFISVVKKTSKLAAGFGIEDLFPSVTWLQHVTGLRAKLERLHQQADQIMENIINEHKEANSKAKDDQSEAEEDLVDVLIQYEDGSKKDFSLTRNKIKAIILDIFAAGGETTATTIDWAMAEMVKNPTVMKKAQSEVREVCNMKARVDENCINELQYLKLIVKETLRLHPPAPLLLPRECGQTCEIHGYHIPAKTKVIVNAWAIGRDPNYWTESERFYPERFIDSTIDYKGSNFEFIPFGAGRRICAGSTFALRAAELALAMLLYHFDWKLPSGMRSGELDMSEDFGVTTIRKDNLFLVPFPYHPLPVS

SEQ ID NO: 24171 - DNA, 1921 bp, Glycine max
attacattccaatgccgattactattttaaagttcctgtagtggttcttgtgaaacttttgcactcaacacttgagagtacaattagcatagcccttaatgctttaatagttcatgacagaagcgatgcttcaagtgctgagcagatgatggaagctggagttatagatgctctgttggaacttttaagatctcatcattgtgaagaagcatctggtagattactagaagctttatttaacaatgtgagagtacgagagatgaaggtgtctaagtatgctatagcacctttatcccagtatctattggatccgcaaaccagatcacagtctggcaagcttcttgctgctttagctttgggagatctttcccagcatgaaggacatgctagatctagcgcctctgtttccgcatgtcgtgcattgataagtttacttgaagatcagccaactgaagaaatgaaggtggtggctatatgtgcattgcaaaactttgtcatgaacagcaggaccaatagacgagctgttgcagaagctgggggcatattggtgattcaggaattgcttctgtctccaaacacagaagtttctgcacaagctgctttactgatcaaatttttgttttctacccatacactgcaagaatacgtgtcaaatgagttgatcaggtctttgacagctgcactggaaagagagttatggtcaactgccacaatcaatgaggaggttttgagaactctacatgtgatattcatgaacttccctaagctccacacatctgaagcagcaactctttgcattcctcatttggtaggggcacttaaatctggtggtgaagcggctcaggactctgtacttgacacgttttgcttgctaagacaatcttggtcaactatgcctatagatatagctaagtctcaagctatgattgctgcagaagccatccccatattgcaaatgctcatgaaaacctgcccgcctagtttccatgagagggcagatactcttctgcactgcttaccaggttgtttgactgtcaccattaagcgtggaaacaacctcaaacaaactatgggaagcacaaatgcgttctgccggttaacaataggcaatggtcctccaaaacaaaccaaggtagtgaatcatagtacttctccagaatggaaagaaggattcacttgggcatttgatgtacctccgaagggccaaaagctacatatcatatgcaaaagcaagaatacttttggaaagacaacacttggaagagtcactatccaaattgataaagttgtatcagagggggtttatagtggattattcagtcttaatcatgatggtaataaagatggttcttcccgaacacttgaaattgagattatatggtccaacaggatttccaatgatgacatttgaaaagtatagcaagctactttttgggtggaagcatagaaaggtaatctgcaacatgcatgagatgttggaaatggttttgcttgtaattatcagcacatttgaatgatccaattttgtagtctggcagattaagttgctcctgttgtaagtgtaaattaaattataaatgtctagaggcagcaagcgtttgaaaaggatgctcccacggtaaagtcaaaaaatgtttgcaattgtacaggtcagtccacaggtatattagaaacttgaatcatagggaaaaaatggcattttaattaaatttgtcaaaagtttttattttttatttttttatttgtattagtctctgatgttgggatgtacactagcatctgctgtaaagtggctttgttttatgtttgtaagccacaagagatgataaactgacaatatgtcattgtccccttgtgtcgggaacatgctcatttttcaccaccttggcccccacccaataaacaattccctgttttttcc

SEQ ID NO: 24172 - protein, 469 aa, Glycine max
LHSNADYYFKVPVVVLVKLLHSTLESTISIALNALIVHDRSDASSAEQMMEAGVIDALLELLRSHHCEEASGRLLEALFNNVRVREMKVSKYAIAPLSQYLLDPQTRSQSGKLLAALALGDLSQHEGHARSSASVSACRALISLLEDQPTEEMKVVAICALQNFVMNSRTNRRAVAEAGGILVIQELLLSPNTEVSAQAALLIKFLFSTHTLQEYVSNELIRSLTAALERELWSTATINEEVLRTLHVIFMNFPKLHTSEAATLCIPHLVGALKSGGEAAQDSVLDTFCLLRQSWSTMPIDIAKSQAMIAAEAIPILQMLMKTCPPSFHERADTLLHCLPGCLTVTIKRGNNLKQTMGSTNAFCRLTIGNGPPKQTKVVNHSTSPEWKEGFTWAFDVPPKGQKLHIICKSKNTFGKTTLGRVTIQIDKVVSEGVYSGLFSLNHDGNKDGSSRTLEIEIIWSNRISNDDI

SEQ ID NO: 24173 - protein, 421 aa, Glycine max
MMEAGVIDALLELLRSHHCEEASGRLLEALFNNVRVREMKVSKYAIAPLSQYLLDPQTRSQSGKLLAALALGDLSQHEGHARSSASVSACRALISLLEDQPTEEMKVVAICALQNFVMNSRTNRRAVAEAGGILVIQELLLSPNTEVSAQAALLIKFLFSTHTLQEYVSNELIRSLTAALERELWSTATINEEVLRTLHVIFMNFPKLHTSEAATLCIPHLVGALKSGGEAAQDSVLDTFCLLRQSWSTMPIDIAKSQAMIAAEAIPILQMLMKTCPPSFHERADTLLHCLPGCLTVTIKRGNNLKQTMGSTNAFCRLTIGNGPPKQTKVVNHSTSPEWKEGFTWAFDVPPKGQKLHIICKSKNTFGKTTLGRVTIQIDKVVSEGVYSGLFSLNHDGNKDGSSRTLEIEIIWSNRISNDDI

SEQ ID NO: 24174 - protein, 420 aa, Glycine max
MEAGVIDALLELLRSHHCEEASGRLLEALFNNVRVREMKVSKYAIAPLSQYLLDPQTRSQSGKLLAALALGDLSQHEGHARSSASVSACRALISLLEDQPTEEMKVVAICALQNFVMNSRTNRRAVAEAGGILVIQELLLSPNTEVSAQAALLIKFLFSTHTLQEYVSNELIRSLTAALERELWSTATINEEVLRTLHVIFMNFPKLHTSEAATLCIPHLVGALKSGGEAAQDSVLDTFCLLRQSWSTMPIDIAKSQAMIAAEAIPILQMLMKTCPPSFHERADTLLHCLPGCLTVTIKRGNNLKQTMGSTNAFCRLTIGNGPPKQTKVVNHSTSPEWKEGFTWAFDVPPKGQKLHIICKSKNTFGKTTLGRVTIQIDKVVSEGVYSGLFSLNHDGNKDGSSRTLEIEIIWSNRISNDDI

SEQ ID NO: 24175 - DNA, 1550 bp, Glycine max
agacaggcacagacacagagggccaatatgaagactcgtacctctaagaagatctctgcaaaatgggttccaattttctctgtatcttccttccttattggaatgctcataacaaccaggatgtgggaaccaccagaatctaacggggtgttactgtcaaatcaccgacatgagcaagaactacaagtggtgtcaggggattgtgctactaaaaagcctgtgcaggatgaggatgtaatgagtaaagtgtacaaaacccatgaagccattcaatctctagacaagcaagtttccatgcttcagatggagctggcagcagcaaggagtacacgagaacccgagatctcggatggttcgaataacaccttggcctcgggggtaaccactgaaggcccaccaaggaagaaggtgtttgtagtgattggcataaacactgccttcagtagcaggaagcggcgtgattcggttagagagacttggatgcctcaaggtgaacagcttcttcaattggaacgcgagaagggaattgtcatcagattcatgattggtcacagtgcaacttctaacagcattctagatcgagctattgattcagaagaagcccagcacaaagacttccttcgcctggaacacgctgaagggtatcatgaattgtctgcaaagacaaaaacattcttttctacagcagttgcaaaatgggatgctgagttctatgtcaaagtggatgatgatgtccatgttaatttaggtgtacttgcaacaacccttgctcgtcatcgttccaaaccaagggtctatgttggatgtatgaaatctggacctgttctttctcgaaaggatgttaaatatcatgaacctgagttttggaagtttggagaagaggggaacaaatatttccgacatgcaactgggcagatatatgcaatctctaaggatctagccacctacatttccattaaccagccaattttgcacaaatatgccaatgaagatgtgtcacttggtgcatggttcataggtctggaagttgaacatatagatgaccgcagtatgtgctgtgggactcctccagattgtgagtggaaggcacaagcaggtaacatatgtgttgcatcctttgactggagctgtagtggaatctgcaagtcggtagagaagatcaaatatgtgcactcaaagtgtggtgaaggggatggagctgtttggagtgccttagtttaggtttgatgggttcaacagaaagccaactaactaattcacgtgttggtatgcatacctcccagctttttgtttttgggtgtgggaggatatgatgatatatttttggttcaactatagtctatacttggtattatgtgacatagacctctcttgttacatgtatctctttatatttttgttcctttgacccacccttttgcacaatgcctttggaggtagttgtgcggggtcaattttcagtgtagcttactaaagagcaatgaagtgatagtgttgttgattcgttcagtgataatatgaattatgaaatcactttatttttttcgatg

SEQ ID NO: 24176 - protein, 406 aa, Glycine max
RQAQTQRANMKTRTSKKISAKWVPIFSVSSFLIGMLITTRMWEPPESNGVLLSNHRHEQELQVVSGDCATKKPVQDEDVMSKVYKTHEAIQSLDKQVSMLQMELAAARSTREPEISDGSNNTLASGVTTEGPPRKKVFVVIGINTAFSSRKRRDSVRETWMPQGEQLLQLEREKGIVIRFMIGHSATSNSILDRAIDSEEAQHKDFLRLEHAEGYHELSAKTKTFFSTAVAKWDAEFYVKVDDDVHVNLGVLATTLARHRSKPRVYVGCMKSGPVLSRKDVKYHEPEFWKFGEEGNKYFRHATGQIYAISKDLATYISINQPILHKYANEDVSLGAWFIGLEVEHIDDRSMCCGTPPDCEWKAQAGNICVASFDWSCSGICKSVEKIKYVHSKCGEGDGAVWSALV

SEQ ID NO: 24177 - protein, 397 aa, Glycine max
MKTRTSKKISAKWVPIFSVSSFLIGMLITTRMWEPPESNGVLLSNHRHEQELQVVSGDCATKKPVQDEDVMSKVYKTHEAIQSLDKQVSMLQMELAAARSTREPEISDGSNNTLASGVTTEGPPRKKVFVVIGINTAFSSRKRRDSVRETWMPQGEQLLQLEREKGIVIRFMIGHSATSNSILDRAIDSEEAQHKDFLRLEHAEGYHELSAKTKTFFSTAVAKWDAEFYVKVDDDVHVNLGVLATTLARHRSKPRVYVGCMKSGPVLSRKDVKYHEPEFWKFGEEGNKYFRHATGQIYAISKDLATYISINQPILHKYANEDVSLGAWFIGLEVEHIDDRSMCCGTPPDCEWKAQAGNICVASFDWSCSGICKSVEKIKYVHSKCGEGDGAVWSALV

SEQ ID NO: 24178 - protein, 372 aa, Glycine max
MLITTRMWEPPESNGVLLSNHRHEQELQVVSGDCATKKPVQDEDVMSKVYKTHEAIQSLDKQVSMLQMELAAARSTREPEISDGSNNTLASGVTTEGPPRKKVFVVIGINTAFSSRKRRDSVRETWMPQGEQLLQLEREKGIVIRFMIGHSATSNSILDRAIDSEEAQHKDFLRLEHAEGYHELSAKTKTFFSTAVAKWDAEFYVKVDDDVHVNLGVLATTLARHRSKPRVYVGCMKSGPVLSRKDVKYHEPEFWKFGEEGNKYFRHATGQIYAISKDLATYISINQPILHKYANEDVSLGAWFIGLEVEHIDDRSMCCGTPPDCEWKAQAGNICVASFDWSCSGICKSVEKIKYVHSKCGEGDGAVWSALV

SEQ ID NO: 24179 - DNA, 1734 bp, Glycine max
gaattttgcagttgcgtgcgtttctgttccatacaatttcgatttcaatggcgaggcctaatcaggaggcagtcgagacgttcgtcagcatcactggcttgacagaagcagtagcgctgcaaaaattagaggagcatggcggtaatctcaatgaagcagtcaatgcacattttagtgaaggagacagaaatctaacgaccggctctcgcaacagctctgccgtatttcctcaagatgatttcatggatatagatgatcagcatgatgcaggaattcccagaattccatcactacttccagctttagcagcaaatgttaatccattttctcttcttgatccaacaattgggagaggtatatttggtacacgttttgattcaacaatcgaggcaccatttgttacccatccaagagaggtaagggagattcctatagaggttaaggatggcagtcaatccactcctcaagctggccatgttccatccattgaagatgtcactggaactgtcgatgcccatggtccagatatccatgggactgtcataattgatgatgaagatgatgacgatattccacctgcacagattgcacatcaagatgagcaaacacaaaagatcttggctgatacttcactcaatagcagtgttagacctagtgctcctgaatctgagaatttgccagattacagcaatgacatagaagaagaaatgattcgtgcagccattgaggcttctaaacaggaggctgaggaaaattatagaaatcacaaacttgacaggcaaattgacttaagtgaatcaggatcacagccaaggcaatcatatttggaggatcctgagcttgcccatgcagtttcattgtccctgaagacagcagagcaagaaaaagcattgcgagtacacgggggagattctggatcaccaacagcagggccatctaagtcatcagaggctggactaggggaagtgacatcaaatggaagattacaggcaggaagcttgtcatttcatgatgaagctgaagatgttgaggagcagccactggttaggaatagatctagacatatgtcttcgggatccacaggattgggcaaagatgttgaacttgctgaggctagcacactaccaagcacagcaacagtgactgcaacacaggatagcagtaatcctcatcataatggaaattccttcccagatgagtggggtggcatttcttcagaggagcatgatgaagcagtaatgcttgaagcggcaatgtttggtggaattccagaagggactgggtatcactatggttatgcaccacatgagtttatgcaaaataggggtttcaatccccggccccaatatcgtcctccttcaccatcactggcagctcaacgcttgataagggaacagcaggatgatgaatatcttgcatcgttacaagcagacagagaaaaagaattgaaggccatggaggaagctgaggctgctcgtgaagaggaaagacagagagcagaagactctcgcaggaaattacaggaagaacaggaattggaaacaaaattagcagccaaagaagtctcactaccaccagaaccatcctcagatgatgataatgctgtaaacttgatggtaaaaatgccagatggcaatcgtcgtggacgtcgattcctaagatctgataggctacagtctctgtttgactacatagatattggtagggtggtgaaaccaggcagttacagactgg

SEQ ID NO: 24180 - protein, 577 aa, Glycine max
ILQLRAFLFHTISISMARPNQEAVETFVSITGLTEAVALQKLEEHGGNLNEAVNAHFSEGDRNLTTGSRNSSAVFPQDDFMDIDDQHDAGIPRIPSLLPALAANVNPFSLLDPTIGRGIFGTRFDSTIEAPFVTHPREVREIPIEVKDGSQSTPQAGHVPSIEDVTGTVDAHGPDIHGTVIIDDEDDDDIPPAQIAHQDEQTQKILADTSLNSSVRPSAPESENLPDYSNDIEEEMIRAAIEASKQEAEENYRNHKLDRQIDLSESGSQPRQSYLEDPELAHAVSLSLKTAEQEKALRVHGGDSGSPTAGPSKSSEAGLGEVTSNGRLQAGSLSFHDEAEDVEEQPLVRNRSRHMSSGSTGLGKDVELAEASTLPSTATVTATQDSSNPHHNGNSFPDEWGGISSEEHDEAVMLEAAMFGGIPEGTGYHYGYAPHEFMQNRGFNPRPQYRPPSPSLAAQRLIREQQDDEYLASLQADREKELKAMEEAEAAREEERQRAEDSRRKLQEEQELETKLAAKEVSLPPEPSSDDDNAVNLMVKMPDGNRRGRRFLRSDRLQSLFDYIDIGRVVKPGSYRL

SEQ ID NO: 24181 - protein, 562 aa, Glycine max
MARPNQEAVETFVSITGLTEAVALQKLEEHGGNLNEAVNAHFSEGDRNLTTGSRNSSAVFPQDDFMDIDDQHDAGIPRIPSLLPALAANVNPFSLLDPTIGRGIFGTRFDSTIEAPFVTHPREVREIPIEVKDGSQSTPQAGHVPSIEDVTGTVDAHGPDIHGTVIIDDEDDDDIPPAQIAHQDEQTQKILADTSLNSSVRPSAPESENLPDYSNDIEEEMIRAAIEASKQEAEENYRNHKLDRQIDLSESGSQPRQSYLEDPELAHAVSLSLKTAEQEKALRVHGGDSGSPTAGPSKSSEAGLGEVTSNGRLQAGSLSFHDEAEDVEEQPLVRNRSRHMSSGSTGLGKDVELAEASTLPSTATVTATQDSSNPHHNGNSFPDEWGGISSEEHDEAVMLEAAMFGGIPEGTGYHYGYAPHEFMQNRGFNPRPQYRPPSPSLAAQRLIREQQDDEYLASLQADREKELKAMEEAEAAREEERQRAEDSRRKLQEEQELETKLAAKEVSLPPEPSSDDDNAVNLMVKMPDGNRRGRRFLRSDRLQSLFDYIDIGRVVKPGSYRL

SEQ ID NO: 24182 - protein, 497 aa, Glycine max
MDIDDQHDAGIPRIPSLLPALAANVNPFSLLDPTIGRGIFGTRFDSTIEAPFVTHPREVREIPIEVKDGSQSTPQAGHVPSIEDVTGTVDAHGPDIHGTVIIDDEDDDDIPPAQIAHQDEQTQKILADTSLNSSVRPSAPESENLPDYSNDIEEEMIRAAIEASKQEAEENYRNHKLDRQIDLSESGSQPRQSYLEDPELAHAVSLSLKTAEQEKALRVHGGDSGSPTAGPSKSSEAGLGEVTSNGRLQAGSLSFHDEAEDVEEQPLVRNRSRHMSSGSTGLGKDVELAEASTLPSTATVTATQDSSNPHHNGNSFPDEWGGISSEEHDEAVMLEAAMFGGIPEGTGYHYGYAPHEFMQNRGFNPRPQYRPPSPSLAAQRLIREQQDDEYLASLQADREKELKAMEEAEAAREEERQRAEDSRRKLQEEQELETKLAAKEVSLPPEPSSDDDNAVNLMVKMPDGNRRGRRFLRSDRLQSLFDYIDIGRVVKPGSYRL

SEQ ID NO: 24183 - DNA, 1557 bp, Glycine max
acactacttcatttcgtggcatagataataaggtttattacatgctggacaataatgggcaattgctgaacttctctggctgtggaaatacattgaattgtaatcatcctgtggtcatggagctaattcttgacagcctaagacactgggtcaccgaataccatgtggatggatttcgatttgatcttgcaagtgtcctgtgtcgaggaattgatggctcccccctcaatgcacccccacttattagggctattgctaaagatgcagtattatcaagatgtaaaattattgcagagccttgggattgtggaggtctctatcttgttgggagttttcctaattgggatcggtgggctgaatggaatgggaaatatcgtgatgatgtacggaaatttattaagggtgattctggtgtgaaggggagctttgcaactcgtgtagctgggtcttctgatctttacagtgtgaacaatcgtaggccatatcatggtattaactttgttattgcacatgacggattcaccttgcgtgatcttgtttcatacaatttcaagcacaatgaagccaatggggaaggtggaaatgacggaagcaatgataattttagttggaattgtggtttggaaggggaaactgatgatgctagtgtaagagctttgcgatcacggcaaatgaaaaacttccatttggcattaatgatatctcagggtacaccaatgatgctaatgggggatgaatatggccatactcgcaatggaaataacaatagttatgggcatgatactgccattaataattttttgtgggatcagttggatgcacggaagagtgatcacttccggtttttctcaaacatgataaagtacaggcatgcacatgaagtattcaatcatgaaagttttctcagcaagaacgacataacatggcatgaagacaattgggacaatcatgacagcaaatttcttgcattcacgcttcatgacaagagcgggggagatatctatttggcatttaatgctcacgattactttgtcaaagttctgctgccggcacctccaaaaaagagaaactggtttcgtgtggtggacactaatctcaaatcaccggatgactttgtccttgatggtgtccctaacgtaggaaacacgtacaatatagctccatactcctccattcttcttgaggcgaagttttgattgcagaagctgttgtataaaaacgaaaaagagaaaagcactagaagacgtatatgcatatatacaaaacaaaagataactgcatctgcatgggaagtgtagttcagctaggtcaaggggaacaaaagcggaagaggaaaaatctaaaatcttatcgtttccagaatggagcatggcatggagttgggttacaaggtacttgagaccggtcttatgaatttggttaatcatcaccactttatctatacatatattgtaaatttgatctgagtgtaataaatgccattatctatgtatattcaaatggtattgtttactttgtaaatttggcttgactggaataaatgttattaatttatac

SEQ ID NO: 24184 - protein, 397 aa, Glycine max
TTSFRGIDNKVYYMLDNNGQLLNFSGCGNTLNCNHPVVMELILDSLRHWVTEYHVDGFRFDLASVLCRGIDGSPLNAPPLIRAIAKDAVLSRCKIIAEPWDCGGLYLVGSFPNWDRWAEWNGKYRDDVRKFIKGDSGVKGSFATRVAGSSDLYSVNNRRPYHGINFVIAHDGFTLRDLVSYNFKHNEANGEGGNDGSNDNFSWNCGLEGETDDASVRALRSRQMKNFHLALMISQGTPMMLMGDEYGHTRNGNNNSYGHDTAINNFLWDQLDARKSDHFRFFSNMIKYRHAHEVFNHESFLSKNDITWHEDNWDNHDSKFLAFTLHDKSGGDIYLAFNAHDYFVKVLLPAPPKKRNWFRVVDTNLKSPDDFVLDGVPNVGNTYNIAPYSSILLEAKF

SEQ ID NO: 24185 - protein, 384 aa, Glycine max
MLDNNGQLLNFSGCGNTLNCNHPVVMELILDSLRHWVTEYHVDGFRFDLASVLCRGIDGSPLNAPPLIRAIAKDAVLSRCKIIAEPWDCGGLYLVGSFPNWDRWAEWNGKYRDDVRKFIKGDSGVKGSFATRVAGSSDLYSVNNRRPYHGINFVIAHDGFTLRDLVSYNFKHNEANGEGGNDGSNDNFSWNCGLEGETDDASVRALRSRQMKNFHLALMISQGTPMMLMGDEYGHTRNGNNNSYGHDTAINNFLWDQLDARKSDHFRFFSNMIKYRHAHEVFNHESFLSKNDITWHEDNWDNHDSKFLAFTLHDKSGGDIYLAFNAHDYFVKVLLPAPPKKRNWFRVVDTNLKSPDDFVLDGVPNVGNTYNIAPYSSILLEAKF

SEQ ID NO: 24186 - protein, 359 aa, Glycine max
MELILDSLRHWVTEYHVDGFRFDLASVLCRGIDGSPLNAPPLIRAIAKDAVLSRCKIIAEPWDCGGLYLVGSFPNWDRWAEWNGKYRDDVRKFIKGDSGVKGSFATRVAGSSDLYSVNNRRPYHGINFVIAHDGFTLRDLVSYNFKHNEANGEGGNDGSNDNFSWNCGLEGETDDASVRALRSRQMKNFHLALMISQGTPMMLMGDEYGHTRNGNNNSYGHDTAINNFLWDQLDARKSDHFRFFSNMIKYRHAHEVFNHESFLSKNDITWHEDNWDNHDSKFLAFTLHDKSGGDIYLAFNAHDYFVKVLLPAPPKKRNWFRVVDTNLKSPDDFVLDGVPNVGNTYNIAPYSSILLEAKF

SEQ ID NO: 24187 - DNA, 1866 bp, Glycine max
ggtgatcggtgatcggtgatcagtggtttggtgttgttgatagaaaaatgcattccagccctttgcttcttgaggaacccattaggatggcatccattcttgagccatccaagcctactttctttccagctatgacaaaaattgttggcacacttggtctaaagtcacgatcagttgatacaatttcccgttgccttgatgcaggaatgtctgtggcaaggtttgacttctcatggggtgatccagaataccatcaagagacattggaaaatttgagagttgctatcaaaagtaccaagaaactctgtgcggttatgctagatactgtgggtcctgaattacagattgagaataagacagatcacccaatcacccttgaagcagacacattagttgtcttaactccagatcaaaccaaagaagctggttcaaatctcttaccagtaaattttaacggactatcaaaggctgtgaagaagggtgatactatttttatcggaaaatacctgtttactggaagtgaaacagcttccttatggctggaggtcagtgaggtgaaaggtgaggatgtcacctgtctggtaaaaaacactgctacactgtctggatcattgtttactgcacatgtctctcagatccacatcgatcttcctactcttgctgataaagataaggaggtaataagcacatggggtgttcgaaacaatattgacttcctttcattatatacccggcacgttgaagatattcgtcatgcgcgtgaatttctttctaaattgggtgaccttaagcagacacatatttatgcaaagattgaaaatatagagggactgaagcattttgatgaaatattgagagaagcagatggcatcatcctcgctcgtggaaatttagggatagaactcccacctgagaaggttttcttattccaaaaggctgctatttacaagtgcaacatggttggaaagccagttgttgttacacgtgttgtagactctatgactgataatctaagacctactcgtgctgaagcaacagatgttgccaatgcagtgctggatggaagtgatgcaattctccttggagcagagaccctgcggggacaataccctgtagagaccatttctatagttggaaaaatatgtgctgaggcagagaaagttcataatcaagatttgtattttaagaaggctgtcaaatatgtgggagagccaatgagccatttggaatcaattgcttcctctgcggttcgagcagctatcaaggttaaagcctctgttattatttgcttcacttcatctggaagagctgcaagattgattgctaagtacagaccaattatgcctgtcatatccgttgtcattcctcaactgaagacaaatcaactccgatggacattcaccggtgcttttgaggctaggcaatctcttattgtgaggggtctttttcctatgctggcagatccacgacacccggctgagtctaaaagtggaacaaatgaatcaattttgaaggttgctttagatcatggcaaggcttttggcatcataaagccacatgaccgagttgttgtctgccagaaagtagctgactcgtcagttgtgaagattcttgagctcgaagattgattggttcaatacaacttatgtgtcatttgatgcatcataataaaacttcttctcaaccttttcattctagcgtttgtgtttcattgaagtacaataacaaacacataacattgagatacatattgtagagtgggaaagagacttttttgtttgattgtttttttaataggcaatcacagttttgagctataaataatggtattggtatggaaataaaaaaaaatgatgttatatcagc

SEQ ID NO: 24188 - protein, 526 aa, Glycine max
MHSSPLLLEEPIRMASILEPSKPTFFPAMTKIVGTLGLKSRSVDTISRCLDAGMSVARFDFSWGDPEYHQETLENLRVAIKSTKKLCAVMLDTVGPELQIENKTDHPITLEADTLVVLTPDQTKEAGSNLLPVNFNGLSKAVKKGDTIFIGKYLFTGSETASLWLEVSEVKGEDVTCLVKNTATLSGSLFTAHVSQIHIDLPTLADKDKEVISTWGVRNNIDFLSLYTRHVEDIRHAREFLSKLGDLKQTHIYAKIENIEGLKHFDEILREADGIILARGNLGIELPPEKVFLFQKAAIYKCNMVGKPVVVTRVVDSMTDNLRPTRAEATDVANAVLDGSDAILLGAETLRGQYPVETISIVGKICAEAEKVHNQDLYFKKAVKYVGEPMSHLESIASSAVRAAIKVKASVIICFTSSGRAARLIAKYRPIMPVISVVIPQLKTNQLRWTFTGAFEARQSLIVRGLFPMLADPRHPAESKSGTNESILKVALDHGKAFGIIKPHDRVVVCQKVADSSVVKILELED

SEQ ID NO: 24189 - protein, 513 aa, Glycine max
MASILEPSKPTFFPAMTKIVGTLGLKSRSVDTISRCLDAGMSVARFDFSWGDPEYHQETLENLRVAIKSTKKLCAVMLDTVGPELQIENKTDHPITLEADTLVVLTPDQTKEAGSNLLPVNFNGLSKAVKKGDTIFIGKYLFTGSETASLWLEVSEVKGEDVTCLVKNTATLSGSLFTAHVSQIHIDLPTLADKDKEVISTWGVRNNIDFLSLYTRHVEDIRHAREFLSKLGDLKQTHIYAKIENIEGLKHFDEILREADGIILARGNLGIELPPEKVFLFQKAAIYKCNMVGKPVVVTRVVDSMTDNLRPTRAEATDVANAVLDGSDAILLGAETLRGQYPVETISIVGKICAEAEKVHNQDLYFKKAVKYVGEPMSHLESIASSAVRAAIKVKASVIICFTSSGRAARLIAKYRPIMPVISVVIPQLKTNQLRWTFTGAFEARQSLIVRGLFPMLADPRHPAESKSGTNESILKVALDHGKAFGIIKPHDRVVVCQKVADSSVVKILELED

SEQ ID NO: 24190 - protein, 498 aa, Glycine max
MTKIVGTLGLKSRSVDTISRCLDAGMSVARFDFSWGDPEYHQETLENLRVAIKSTKKLCAVMLDTVGPELQIENKTDHPITLEADTLVVLTPDQTKEAGSNLLPVNFNGLSKAVKKGDTIFIGKYLFTGSETASLWLEVSEVKGEDVTCLVKNTATLSGSLFTAHVSQIHIDLPTLADKDKEVISTWGVRNNIDFLSLYTRHVEDIRHAREFLSKLGDLKQTHIYAKIENIEGLKHFDEILREADGIILARGNLGIELPPEKVFLFQKAAIYKCNMVGKPVVVTRVVDSMTDNLRPTRAEATDVANAVLDGSDAILLGAETLRGQYPVETISIVGKICAEAEKVHNQDLYFKKAVKYVGEPMSHLESIASSAVRAAIKVKASVIICFTSSGRAARLIAKYRPIMPVISVVIPQLKTNQLRWTFTGAFEARQSLIVRGLFPMLADPRHPAESKSGTNESILKVALDHGKAFGIIKPHDRVVVCQKVADSSVVKILELED

SEQ ID NO: 24191 - DNA, 1404 bp, Glycine max
aaagctgaagcaagtatatatgttgcggatcacccggttggattacacttagaagtggaaaaaataaggaaacttttggaggctggatctagtgatgctatctccatgatagggatccacggaatgggcggggtaggaaaatcaacacttgctcgagcagtttataatttgcatactgatcattttgatgattcgtgtttcctacaaaacgtgagagaagaatcaaacagacacgggttaaaacgcctacaaagcatccttctttcacaaatacttaagaaggaaatcaacttagcaagtgagcaacaaggcacttcgatgataaaaaataagctcaagggaaagaaggttctcttagttctagatgatgttgatgagcacaagcaattacaggcaattgttggaaaatctgtttggtctgagtctgagtttggcaccagattggttctgatcatcaccactcgggacaaacaactcctaacatcttatggggtcaaaagaacacatgaggtgaaagaattgagtaagaaagatgctattcaattgcttaaacggaaagcttttaaaacatatgatgaagttgatcaaagttacaatcaggtcttgaatgatgtagtaacttggacttctggccttccattggctttggaagtgataggttcgaacctgtttggaaaaagtattaaagaatgggaatcagctatcaaacaatatcaaagaattcccaataaggaaatcttgaagatacttaaagtaagctttgatgctttggaggaagaagaaaaaagtgtttttcttgacattacttgttgcttgaaaggctataaatgcagagagattgaagatatacttcacagtctttatgataactgcatgaaataccatattggggtgcttgttgacaagtctctcatacagattagtgacgatagagttacattgcatgacttgattgagaacatgggtaaagaaattgacagacagaaatcacctaaagagacagggaagcggaggagattatggttactaaaagatataattcaagtcttaaaagacaactcggggaccagtgaagttaaaatcatttgtcttgatttccccatatctgacaaacaagaaacaatagaatggaatggaaatgccttcaaggagatgaaaaaccttaaagcacttattatcagaaacggtattttatcccaaggtcccaattatctaccagaaagtttgagaatattggaatggcacagacatccttcccattgtttaccgtctgattttgatacaacgaatcttgccatacgcgacttggaatagttccatcccgtcattggggtgtggtggcatatccaaggcaagtttaaagaatacattttccttgtaaattaataaattcacagcagtatt

SEQ ID NO: 24192 - protein, 437 aa, Glycine max
KAEASIYVADHPVGLHLEVEKIRKLLEAGSSDAISMIGIHGMGGVGKSTLARAVYNLHTDHFDDSCFLQNVREESNRHGLKRLQSILLSQILKKEINLASEQQGTSMIKNKLKGKKVLLVLDDVDEHKQLQAIVGKSVWSESEFGTRLVLIITTRDKQLLTSYGVKRTHEVKELSKKDAIQLLKRKAFKTYDEVDQSYNQVLNDVVTWTSGLPLALEVIGSNLFGKSIKEWESAIKQYQRIPNKEILKILKVSFDALEEEEKSVFLDITCCLKGYKCREIEDILHSLYDNCMKYHIGVLVDKSLIQISDDRVTLHDLIENMGKEIDRQKSPKETGKRRRLWLLKDIIQVLKDNSGTSEVKIICLDFPISDKQETIEWNGNAFKEMKNLKALIIRNGILSQGPNYLPESLRILEWHRHPSHCLPSDFDTTNLAIRDLE

SEQ ID NO: 24193 - protein, 402 aa, Glycine max
MIGIHGMGGVGKSTLARAVYNLHTDHFDDSCFLQNVREESNRHGLKRLQSILLSQILKKEINLASEQQGTSMIKNKLKGKKVLLVLDDVDEHKQLQAIVGKSVWSESEFGTRLVLIITTRDKQLLTSYGVKRTHEVKELSKKDAIQLLKRKAFKTYDEVDQSYNQVLNDVVTWTSGLPLALEVIGSNLFGKSIKEWESAIKQYQRIPNKEILKILKVSFDALEEEEKSVFLDITCCLKGYKCREIEDILHSLYDNCMKYHIGVLVDKSLIQISDDRVTLHDLIENMGKEIDRQKSPKETGKRRRLWLLKDIIQVLKDNSGTSEVKIICLDFPISDKQETIEWNGNAFKEMKNLKALIIRNGILSQGPNYLPESLRILEWHRHPSHCLPSDFDTTNLAIRDLE

SEQ ID NO: 24194 - protein, 396 aa, Glycine max
MGGVGKSTLARAVYNLHTDHFDDSCFLQNVREESNRHGLKRLQSILLSQILKKEINLASEQQGTSMIKNKLKGKKVLLVLDDVDEHKQLQAIVGKSVWSESEFGTRLVLIITTRDKQLLTSYGVKRTHEVKELSKKDAIQLLKRKAFKTYDEVDQSYNQVLNDVVTWTSGLPLALEVIGSNLFGKSIKEWESAIKQYQRIPNKEILKILKVSFDALEEEEKSVFLDITCCLKGYKCREIEDILHSLYDNCMKYHIGVLVDKSLIQISDDRVTLHDLIENMGKEIDRQKSPKETGKRRRLWLLKDIIQVLKDNSGTSEVKIICLDFPISDKQETIEWNGNAFKEMKNLKALIIRNGILSQGPNYLPESLRILEWHRHPSHCLPSDFDTTNLAIRDLE

SEQ ID NO: 24195 - DNA, 1264 bp, Glycine max
gtggttagactaaccagccacggcaatggcagagacaccatgtttggtggtggtggacaagaaaggttggctgttgtcaagattcaaactttctttagaggatacttggcaaggaaggcactgagagccttaaaaggattggtcaagttacaagcacttgtgagagggtacttggtgcggaagcaagcagcagcaaccctgcatagtatgcaggctctaattagagctcaagcaacagtaaggtctaagaaatctcacggactcagcagcacaaagaatgaagcacatttgtttcaaacacaagcacgaagatccatggagagatttgatgacataaagagtgagtacatagctcccatccacagcagaaggctatcatcttcttttgatgccacaatgaataatgcaaacagtgttgatgggagccccaaaatagtggaagtggacactggcagtggcaggccaaagtcaaggtctcgcaggagcaacacctcaatgtcagattttggcgatgacccatcatttcaggcacttccttctcctcttccatttgctcatttgtccataccaagccacaggaactaccacgactcagaatggggcttaacaagagaagagtgcagattctccacagcgcaaagcactccacgatttaccaactcttgtagctgtggatctgttgttgttgcacctatgagtatgacacctaaaagtgtttgcaccgagaacttcttctatggccagtatcacaattttccaaactacatggccagcactcagtctttcaaggccaaattgaggtctcatagtgctccaaagcaacgccccgatccagggccaaagaagaggcttaccctcaacgagatgatggagtctaggagtagtttaagtgggactagaatgcaaaggtcttgctcacagattcaagaagctatcaattttaagaatgctgtgatgagtaagcttcagaagtccgcagaacttggtagggacacagaattgaacttttccaaccagaggaggtggtgattggtgaaacttagtgatagagttggctttctttttcacattgttagtaatagttctgtgtgtttctgcgccccatgattggcaatttgagaacatatagtgggtaggaaacaggggagtcaagacaaaatagaaggagaacaatgagaaggtccccgttataatttggtcatggaattatcttcatatattatcattataatcaaatgctacagcaattaattttcaccttcag

SEQ ID NO: 24196 - protein, 342 aa, Glycine max
VVRLTSHGNGRDTMFGGGGQERLAVVKIQTFFRGYLARKALRALKGLVKLQALVRGYLVRKQAAATLHSMQALIRAQATVRSKKSHGLSSTKNEAHLFQTQARRSMERFDDIKSEYIAPIHSRRLSSSFDATMNNANSVDGSPKIVEVDTGSGRPKSRSRRSNTSMSDFGDDPSFQALPSPLPFAHLSIPSHRNYHDSEWGLTREECRFSTAQSTPRFTNSCSCGSVVVAPMSMTPKSVCTENFFYGQYHNFPNYMASTQSFKAKLRSHSAPKQRPDPGPKKRLTLNEMMESRSSLSGTRMQRSCSQIQEAINFKNAVMSKLQKSAELGRDTELNFSNQRRW

SEQ ID NO: 24197 - protein, 329 aa, Glycine max
MFGGGGQERLAVVKIQTFFRGYLARKALRALKGLVKLQALVRGYLVRKQAAATLHSMQALIRAQATVRSKKSHGLSSTKNEAHLFQTQARRSMERFDDIKSEYIAPIHSRRLSSSFDATMNNANSVDGSPKIVEVDTGSGRPKSRSRRSNTSMSDFGDDPSFQALPSPLPFAHLSIPSHRNYHDSEWGLTREECRFSTAQSTPRFTNSCSCGSVVVAPMSMTPKSVCTENFFYGQYHNFPNYMASTQSFKAKLRSHSAPKQRPDPGPKKRLTLNEMMESRSSLSGTRMQRSCSQIQEAINFKNAVMSKLQKSAELGRDTELNFSNQRRW

SEQ ID NO: 24198 - protein, 273 aa, Glycine max
MQALIRAQATVRSKKSHGLSSTKNEAHLFQTQARRSMERFDDIKSEYIAPIHSRRLSSSFDATMNNANSVDGSPKIVEVDTGSGRPKSRSRRSNTSMSDFGDDPSFQALPSPLPFAHLSIPSHRNYHDSEWGLTREECRFSTAQSTPRFTNSCSCGSVVVAPMSMTPKSVCTENFFYGQYHNFPNYMASTQSFKAKLRSHSAPKQRPDPGPKKRLTLNEMMESRSSLSGTRMQRSCSQIQEAINFKNAVMSKLQKSAELGRDTELNFSNQRRW

SEQ ID NO: 24199 - DNA, 1845 bp, Glycine max
aaggatgccaatgccccaccaatcactcctgctgccagtaggagaagggctactgcggtttctactcgcagaaagaaagaagttgagatggtagaagaagatgctggtgttcaaggaaaccctaaaacacctgctgcagtagctcccgtgagtaggagaagagctactagccgttcagtttgcaccaccaagattgagacccccggtgcccatggtacttcagtgtataacacgaggagatccgttagattgttggagaaggacttgtctaagatgagcttgctcgacactgaagacactactggacttgtcaagattgatggtgatgtttctcaagattcgagtaatgtctctcaccaactagaagaagactcgtctggtaatgaaaagggggatagtttgcagatggaatcaactgtggtttcgggggatactcgggagttggaagtttgctctcttgagaaaaacactgaatatgaatgccaatcacgtgatttagattcagatgtgaaattagtttctgtgacagaaatagatatgctggttgagccacatggtcctaatgaagctggatcggagaaagttaattgcttggagttggaggctgaaccaaatgcttcggatgaagcaggatctgagtccttacctgtacttgaggaatcctatgattcttctgagctggaaactcaaaataattttcctttggaggcatccgaagatgcttttccggaggttactatcggccaagatattgctgctgtgactgttgtggtacctgatgacgtttcagaggatgttactcatcaaaaggttgctgcctcgcttcctatgcaatctgagtgcattgtggatgataaagtcagctacgagggtgatgttaaagaagacaagaacaatgagccacgagaagaggatgaaccatatgattcaaatttgaaactggaaggaagtatcgacacatgtgacaaatctgatgatgcagatgctcctatggaggttgcccaccaagatactgttgtggtggctgatgatgtttttgatcaagatgttgctggcacccttcctatgtcacctgttaatgatgctctaaaggaatttgttgagtgcaacactgatgatgatcaaggcatcaataagggtgatgacaaccaagatatgaacagtgaaactgaaaatttgaatctggctgatggcaacatggcacatgaagattaccagcatccttttaatgatgatgaaaaatctgctgatgaacgtgactctatgacaggttctgaagggggttttgttgagctcgagtcaatttctcattctgctgctatcgaggtctgcactgaatcttcattgccagatgtagaagcagaggagaatacttcggaaaacttggaagctgaagaatccgaggaacctgtagctggagaggatgttatgttggaagctggtgatgcattttctagtcctcgaatccctcttgttcatcagcaggtttcagttgaatctattggaaattacatagtttcctgtcctttagatgttgagctgagttgcaagtccaacacaatggtggatggtgatgttgtttcagaagataatgccattacaaacaaggaggaacctcgtctctctatggattctatcacagaaaattcaatccaggagcagttgaaggtagatgtgcacaacactaaaatgatgaaggaaaacgtgacctctgacgatctaaataataagagtcttggggagctgaagaggatgctgaggcagttaacgctaaatgaaaaaccaaaatccaagactaatgatgtcaaggatgtggagaagaaaaggactgcactgcaggtattg

SEQ ID NO: 24200 - protein, 615 aa, Glycine max
KDANAPPITPAASRRRATAVSTRRKKEVEMVEEDAGVQGNPKTPAAVAPVSRRRATSRSVCTTKIETPGAHGTSVYNTRRSVRLLEKDLSKMSLLDTEDTTGLVKIDGDVSQDSSNVSHQLEEDSSGNEKGDSLQMESTVVSGDTRELEVCSLEKNTEYECQSRDLDSDVKLVSVTEIDMLVEPHGPNEAGSEKVNCLELEAEPNASDEAGSESLPVLEESYDSSELETQNNFPLEASEDAFPEVTIGQDIAAVTVVVPDDVSEDVTHQKVAASLPMQSECIVDDKVSYEGDVKEDKNNEPREEDEPYDSNLKLEGSIDTCDKSDDADAPMEVAHQDTVVVADDVFDQDVAGTLPMSPVNDALKEFVECNTDDDQGINKGDDNQDMNSETENLNLADGNMAHEDYQHPFNDDEKSADERDSMTGSEGGFVELESISHSAAIEVCTESSLPDVEAEENTSENLEAEESEEPVAGEDVMLEAGDAFSSPRIPLVHQQVSVESIGNYIVSCPLDVELSCKSNTMVDGDVVSEDNAITNKEEPRLSMDSITENSIQEQLKVDVHNTKMMKENVTSDDLNNKSLGELKRMLRQLTLNEKPKSKTNDVKDVEKKRTALQVL

SEQ ID NO: 24201 - protein, 586 aa, Glycine max
MVEEDAGVQGNPKTPAAVAPVSRRRATSRSVCTTKIETPGAHGTSVYNTRRSVRLLEKDLSKMSLLDTEDTTGLVKIDGDVSQDSSNVSHQLEEDSSGNEKGDSLQMESTVVSGDTRELEVCSLEKNTEYECQSRDLDSDVKLVSVTEIDMLVEPHGPNEAGSEKVNCLELEAEPNASDEAGSESLPVLEESYDSSELETQNNFPLEASEDAFPEVTIGQDIAAVTVVVPDDVSEDVTHQKVAASLPMQSECIVDDKVSYEGDVKEDKNNEPREEDEPYDSNLKLEGSIDTCDKSDDADAPMEVAHQDTVVVADDVFDQDVAGTLPMSPVNDALKEFVECNTDDDQGINKGDDNQDMNSETENLNLADGNMAHEDYQHPFNDDEKSADERDSMTGSEGGFVELESISHSAAIEVCTESSLPDVEAEENTSENLEAEESEEPVAGEDVMLEAGDAFSSPRIPLVHQQVSVESIGNYIVSCPLDVELSCKSNTMVDGDVVSEDNAITNKEEPRLSMDSITENSIQEQLKVDVHNTKMMKENVTSDDLNNKSLGELKRMLRQLTLNEKPKSKTNDVKDVEKKRTALQVL

SEQ ID NO: 24202 - protein, 524 aa, Glycine max
MSLLDTEDTTGLVKIDGDVSQDSSNVSHQLEEDSSGNEKGDSLQMESTVVSGDTRELEVCSLEKNTEYECQSRDLDSDVKLVSVTEIDMLVEPHGPNEAGSEKVNCLELEAEPNASDEAGSESLPVLEESYDSSELETQNNFPLEASEDAFPEVTIGQDIAAVTVVVPDDVSEDVTHQKVAASLPMQSECIVDDKVSYEGDVKEDKNNEPREEDEPYDSNLKLEGSIDTCDKSDDADAPMEVAHQDTVVVADDVFDQDVAGTLPMSPVNDALKEFVECNTDDDQGINKGDDNQDMNSETENLNLADGNMAHEDYQHPFNDDEKSADERDSMTGSEGGFVELESISHSAAIEVCTESSLPDVEAEENTSENLEAEESEEPVAGEDVMLEAGDAFSSPRIPLVHQQVSVESIGNYIVSCPLDVELSCKSNTMVDGDVVSEDNAITNKEEPRLSMDSITENSIQEQLKVDVHNTKMMKENVTSDDLNNKSLGELKRMLRQLTLNEKPKSKTNDVKDVEKKRTALQVL

SEQ ID NO: 24203 - DNA, 1648 bp, Glycine max
atgtcaatcatagtgataattggagagagagagagaacacacggtgtgagagaaagaaagtttttggttagggaggaacccacctacattctagttagggagaaagtgtgagagagaaagaaagggatcggaagaatgaagctctagttttctctgagagtaagtgaagaaaaactcaaaatagaagatgtttatcatgctgatggtgatgagagagaaagggtcagcaacaagaacagaagaaaagagattcatcacactaatatagattgtacttgattggagcaggattgtccataaaaatacaagccttcagttgtggctactacaaggtggttcccttcggattccggtgcctttgcggactggtcggcccctccgtctgctgtctccggccgcggcgacgatctctccctcggcttcaatgcttcatccgccaccacacatggtggcggtgcagccatgtggccgggggcatccaggtcatttaactacaacatggcgcctcaccacgacatcttcgtggtagcgcccgcttcctctttccaccaccaccacgaccacaacgacgccgtattgtccgatccaaataacggttctaacaattcgaacaacaatcctggaactgcactcggtgtgaatgttttccctctcctaaccgccacgccatgcctcgagagcgagggcataatgggaaacatcagccaccaccgtaacagaattcagttatgggaagatcacgagtcttctccaccgcagcagcaacagggtcacgtggagcgtgacacgtgtggggatgggggtttgggtgggagtgggactaacacgtgccaggactgtgggaaccaggcgaagaaggactgtagtcaccggaggtgcaggacgtgttgcaagagtaggggttttgattgcgccacgcacgtgaagagcacgtgggtgccggcgtcgcggcggagggagaggcagctcatgacggttgcggcggccaggtccagtggggacacttctggtgccaagaaacctaggcttgttgcttcccagactacttcgcatacttcaacgtctaataatactaataccactcctccgaggagttttgacactggttctagccaccaagatgtgggtttcaaggagtcactaccttgccaagtgcgtgcaccggcggtgttcaagtgtgttcgtgtaacagcagtggatgatggtggggaagatgagtatgcttatcaagcagttgtgaagattggtggccatgtgttcaaagggtttctctatgatcaaggggttgaggacaaagaagggtatcctaatttatcagaattgcatttgggtggtggaaatggggtttcctcttcatctccaatggtggatccttctcatgatgtctatgcagcttcaggtggtgggttacttcttggaggttcatcaaactatggtaatcatccaataaattaaaaaccattctttccaagtgcaacatagatgatgatgatgggcttggaaagcctgacttattaattattgtagggtaatttttctaattttgccaaatattgggggttgggggtggggggtatagattaattaatattaatattcttctgagtttgtatcttatcttataaccatatgtcactctgcatttttc

SEQ ID NO: 24204 - protein, 330 aa, Glycine max
MWPGASRSFNYNMAPHHDIFVVAPASSFHHHHDHNDAVLSDPNNGSNNSNNNPGTALGVNVFPLLTATPCLESEGIMGNISHHRNRIQLWEDHESSPPQQQQGHVERDTCGDGGLGGSGTNTCQDCGNQAKKDCSHRRCRTCCKSRGFDCATHVKSTWVPASRRRERQLMTVAAARSSGDTSGAKKPRLVASQTTSHTSTSNNTNTTPPRSFDTGSSHQDVGFKESLPCQVRAPAVFKCVRVTAVDDGGEDEYAYQAVVKIGGHVFKGFLYDQGVEDKEGYPNLSELHLGGGNGVSSSSPMVDPSHDVYAASGGGLLLGGSSNYGNHPIN

SEQ ID NO: 24205 - protein, 318 aa, Glycine max
MAPHHDIFVVAPASSFHHHHDHNDAVLSDPNNGSNNSNNNPGTALGVNVFPLLTATPCLESEGIMGNISHHRNRIQLWEDHESSPPQQQQGHVERDTCGDGGLGGSGTNTCQDCGNQAKKDCSHRRCRTCCKSRGFDCATHVKSTWVPASRRRERQLMTVAAARSSGDTSGAKKPRLVASQTTSHTSTSNNTNTTPPRSFDTGSSHQDVGFKESLPCQVRAPAVFKCVRVTAVDDGGEDEYAYQAVVKIGGHVFKGFLYDQGVEDKEGYPNLSELHLGGGNGVSSSSPMVDPSHDVYAASGGGLLLGGSSNYGNHPIN

SEQ ID NO: 24206 - protein, 254 aa, Glycine max
MGNISHHRNRIQLWEDHESSPPQQQQGHVERDTCGDGGLGGSGTNTCQDCGNQAKKDCSHRRCRTCCKSRGFDCATHVKSTWVPASRRRERQLMTVAAARSSGDTSGAKKPRLVASQTTSHTSTSNNTNTTPPRSFDTGSSHQDVGFKESLPCQVRAPAVFKCVRVTAVDDGGEDEYAYQAVVKIGGHVFKGFLYDQGVEDKEGYPNLSELHLGGGNGVSSSSPMVDPSHDVYAASGGGLLLGGSSNYGNHPIN

SEQ ID NO: 24207 - DNA, 900 bp, Glycine max
ttcaatctttcaattaggggtcatgctgagtgtgtcaaatacatgagatcattcaatgtgcccctcttgctactaggtggtggtggctacaccattcggaatgttgctcgttgttggtgctatgagacaggagttgctcttggaatagaagttgatgacaaaatgccacaacacgagtattatgaatattttggtccagattatacccttcatgttgccccaagtaacatggaaaacaagaattcccgtcatttacttgaagaaattcgatctaaactacttgagaatctttccaagctgcagcatgctcctagtgtccaatttcaggaaagacctcctgattctgatcttggagaggccgatgaagatcatgatgatggagatgagccttgggatccagattctgacatggacgttgacgttgaacgtgagcttgtctcgagcaaagtaaagaaagaaattgctgaacctcagcccaatgatctggaggaccagagaagtggagagcatttgagagactctgatactgcagttgcggaaacctgcatgaaggctctagatatttcttctcagaaagctgatgaagataatgtgaaagtagaacagaatactgtgaatgatttggccaaagagacggacctgaagggttaagcaacataggctttaactgattggtgaacagttaaattgattttccatttatgctgtcgcatttccaaattaattgagatgtggctgctgcttggttccatcatagtccattgtatacaccagtcgcattttcctaatgttaggggcaagtttgcaaatttaaattggtttttttttttttatctcatccacgatggttttttgtactgttacattacatcttgttacagaatagtattacgtgctatt

SEQ ID NO: 24208 - protein, 216 aa, Glycine max
FNLSIRGHAECVKYMRSFNVPLLLLGGGGYTIRNVARCWCYETGVALGIEVDDKMPQHEYYEYFGPDYTLHVAPSNMENKNSRHLLEEIRSKLLENLSKLQHAPSVQFQERPPDSDLGEADEDHDDGDEPWDPDSDMDVDVERELVSSKVKKEIAEPQPNDLEDQRSGEHLRDSDTAVAETCMKALDISSQKADEDNVKVEQNTVNDLAKETDLKG

SEQ ID NO: 24209 - protein, 202 aa, Glycine max
MRSFNVPLLLLGGGGYTIRNVARCWCYETGVALGIEVDDKMPQHEYYEYFGPDYTLHVAPSNMENKNSRHLLEEIRSKLLENLSKLQHAPSVQFQERPPDSDLGEADEDHDDGDEPWDPDSDMDVDVERELVSSKVKKEIAEPQPNDLEDQRSGEHLRDSDTAVAETCMKALDISSQKADEDNVKVEQNTVNDLAKETDLKG

SEQ ID NO: 24210 - protein, 162 aa, Glycine max
MPQHEYYEYFGPDYTLHVAPSNMENKNSRHLLEEIRSKLLENLSKLQHAPSVQFQERPPDSDLGEADEDHDDGDEPWDPDSDMDVDVERELVSSKVKKEIAEPQPNDLEDQRSGEHLRDSDTAVAETCMKALDISSQKADEDNVKVEQNTVNDLAKETDLKG

SEQ ID NO: 24211 - DNA, 1341 bp, Glycine max
agatttaattcctttcaaccaaacacaccaaaataagccgggcgccaaaacaaataagccggaatcaaagagtaccctttccagccttccgtaccaaacaaaattgaatctctcttccgcacaaacaacctctcacgccccaaagccacacacaaaacatttaccttttccaacccttcaattccctaaacatttttcttttccttcgaactccaattccctcaccagaacacggtcaccattgttttccctttcaacaacattcgccatcctttcgcgacgaagagaaaaaaaaaaggggtgttagggtttcgattctctgcgacgctctccgcattgcgctaccctgcaccttcctcaccatatcgcgcgcctctctcactcccctactgtttttccgctccccaccccctctctctgtgttgcgaaaattagggttcataggtttggggctaattcttcttccgatttcgaaccgagcgcaatcgtaaagagagaaaatgtacgctgatcgcgtggagggtggagcaaggaggccagtgaaggaacgccttaatgatgtgaatggtgtcagtggctctactcgcccgcagcagcagcgtcaaatcactggcaagaggtcaaggcaagatgacaagtgggaacatgatctctttgacaatgacgaaccccggatcactaatcgcaaagttagtgctcaagatcttcgcctcaagcttcaaaggaagggtcttcaacctgcatctcagagtggaaagagttctgccccaaacgtgctggatctccgtgaaaggctatcagggacaatggcaccacaacctacaaattatgatctgcctaagacaaaagttattaaaccaagcagtaaaagtgttggtgttgaggctcctgcagtgcagatcaaaaggccagctgacccagctcctaaaaagtcatggaaggctggtccttcagttgatgaatttttgcggtccttgggtctcgaaaagtatctcataacttttcaggctgaagaagttgatatgacagctctcaatcatatgactgatgaagatctcaaggctatgggcataccaatgggaccaagaaagaagatacttttagcactggagtcgaaagtctaacatttagttatggaattgattttctaagctggatggtggtgggaggagatcaggatctaaaaaccaagtgtaatagcatagttctttgattattttcgtttttaatattttcccttactttttagacattaatcaagttaattttggtgtttattttgctaaaccccgtcaatctcctgaaactctcttataatgcaattaatggatttgagagttt

SEQ ID NO: 24212 - protein, 207 aa, Glycine max
MYADRVEGGARRPVKERLNDVNGVSGSTRPQQQRQITGKRSRQDDKWEHDLFDNDEPRITNRKVSAQDLRLKLQRKGLQPASQSGKSSAPNVLDLRERLSGTMAPQPTNYDLPKTKVIKPSSKSVGVEAPAVQIKRPADPAPKKSWKAGPSVDEFLRSLGLEKYLITFQAEEVDMTALNHMTDEDLKAMGIPMGPRKKILLALESKV

SEQ ID NO: 24213 - protein, 144 aa, Glycine max
MVSVALLARSSSVKSLARGQGKMTSGNMISLTMTNPGSLIAKLVLKIFASSFKGRVFNLHLRVERVLPQTCWISVKGYQGQWHHNLQIMICLRQKLLNQAVKVLVLRLLQCRSKGQLTQLLKSHGRLVLQLMNFCGPWVSKSIS

SEQ ID NO: 24214 - protein, 122 aa, Glycine max
MTSGNMISLTMTNPGSLIAKLVLKIFASSFKGRVFNLHLRVERVLPQTCWISVKGYQGQWHHNLQIMICLRQKLLNQAVKVLVLRLLQCRSKGQLTQLLKSHGRLVLQLMNFCGPWVSKSIS

SEQ ID NO: 24215 - DNA, 1513 bp, Glycine max
tgagagtgtggttggggaatgggcagcagcagtgtcctcacgaaacactgtccttgtcatggaaattgaaacaacctcgtccccaattgcaagcgcgttgcacgctaaccaaacaaggccaacgattccttacaaagctaaccacctcctccgccaccgccgacaacctcattcgtaggttcctactagcttctcccaaatccgtcgttctcagcactctctcccacctcctctccccttccacctcctacccccacctctcttccctcgcctcgcagctttacacgggaatcagccaagccccatggttctcctggaaccccaccaccgtcgccgaactcgccgccctcctccacagtctcggccaccacgcccaatccgaatccctcatttccgacgccagttccaggttacaatcacgccaacgcgacctcgttcttttctacggcaaactcatcgattcacactccaagcgaaactcccacaccgccttcgacgccgcttttggttacctccataaccttgtccgcacttcctcctcccttcacgtgaaacgcagggcctaccagtacatggtgagcggcttatgtttaatggatagaccccgtgaggccgaggatttggttcttgggcttcaaccttcgggcttcgagtacaagtccattgtgtatggatacggaaggttgggtttgtttaatgatatgaatagagtggtggatgaaatggagaggaatggctttgctgttgacaccgtttgttacaacatggttctttcgacttacggcattcacggggagcacgtggagatggtgaggtggcttcggaggatgagcaattcgggtgttccgttttctgtcaggacttacaattccgtctctaatagttgccctagtattaccagaatgacgagggacttgagcaaattggcgttgttgtcgatttcagaattgaaggagggtttggaaggaggggaggggatggtggtgagggagttgttgttgttggggtcttgtgggatattggaggaggtcatggtgtgggattcttcggaggtcaagttggacttgcatggatttcacttggcttcggcgtatttgatcgtgttgctttggttggaggagatgggaagaaggttgaatgattccaattatggagttcctgcggaatttacggtggtttgtgggttgggaaagcatagcagtgtcagaggagagtcgccggtgagagtgttggttcagaagatgatggtcaaaatggggagtccgttgaaggttgataggaagaacaatggctgcttcattgccaaaggtaaagctgtcaaaaactggttaagtcaattcaacaacaacaagtcatccttcactcaacactaagttttgctgcacaaggctcaacttattgtcactgtcaccaagatagcttcaggggtcatttttattttttttgataaatttgatcatgtatcatttgaattttgtaacaattctgtgttaattgattcgcaagcttgtac

SEQ ID NO: 24216 - protein, 456 aa, Glycine max
RVWLGNGQQQCPHETLSLSWKLKQPRPQLQARCTLTKQGQRFLTKLTTSSATADNLIRRFLLASPKSVVLSTLSHLLSPSTSYPHLSSLASQLYTGISQAPWFSWNPTTVAELAALLHSLGHHAQSESLISDASSRLQSRQRDLVLFYGKLIDSHSKRNSHTAFDAAFGYLHNLVRTSSSLHVKRRAYQYMVSGLCLMDRPREAEDLVLGLQPSGFEYKSIVYGYGRLGLFNDMNRVVDEMERNGFAVDTVCYNMVLSTYGIHGEHVEMVRWLRRMSNSGVPFSVRTYNSVSNSCPSITRMTRDLSKLALLSISELKEGLEGGEGMVVRELLLLGSCGILEEVMVWDSSEVKLDLHGFHLASAYLIVLLWLEEMGRRLNDSNYGVPAEFTVVCGLGKHSSVRGESPVRVLVQKMMVKMGSPLKVDRKNNGCFIAKGKAVKNWLSQFNNNKSSFTQH

SEQ ID NO: 24217 - protein, 266 aa, Glycine max
MVSGLCLMDRPREAEDLVLGLQPSGFEYKSIVYGYGRLGLFNDMNRVVDEMERNGFAVDTVCYNMVLSTYGIHGEHVEMVRWLRRMSNSGVPFSVRTYNSVSNSCPSITRMTRDLSKLALLSISELKEGLEGGEGMVVRELLLLGSCGILEEVMVWDSSEVKLDLHGFHLASAYLIVLLWLEEMGRRLNDSNYGVPAEFTVVCGLGKHSSVRGESPVRVLVQKMMVKMGSPLKVDRKNNGCFIAKGKAVKNWLSQFNNNKSSFTQH

SEQ ID NO: 24218 - protein, 259 aa, Glycine max
MDRPREAEDLVLGLQPSGFEYKSIVYGYGRLGLFNDMNRVVDEMERNGFAVDTVCYNMVLSTYGIHGEHVEMVRWLRRMSNSGVPFSVRTYNSVSNSCPSITRMTRDLSKLALLSISELKEGLEGGEGMVVRELLLLGSCGILEEVMVWDSSEVKLDLHGFHLASAYLIVLLWLEEMGRRLNDSNYGVPAEFTVVCGLGKHSSVRGESPVRVLVQKMMVKMGSPLKVDRKNNGCFIAKGKAVKNWLSQFNNNKSSFTQH

SEQ ID NO: 24219 - DNA, 1458 bp, Glycine max
cattttcatggatgaacccacttcaggtcttgatgcaagagcagcagctattgttatgaggactgtgagaaacactgtggacacaggaagaacagttgtctgcacaattcaccagcctagcattgatatctttgaagcctttgatgagcttttgttgatgaaaagaggagggcaagtgatctactcaggaccattaggccgaaactcccacaagattgtagaatactttgaggcaattccaggggttccaaaaattaaagagatgtacaacccagcaacatggatgctagaagtgagttctgtagcagctgaagttcgtcttggaatggactttgctgaatactacaaaacatcatctttgttccagcgaaacaaagctcttgtaaaggagttaagcacacccccgcctggagctactgatttgtatttccccactaagtattctcaatccacattggggcaatttaaatcctgtttttggaagcaatggctgacatactggaggagtccagattataatcttgtcagatattttttcacattggcttgtgccctcatgatagggacagtattttggagaattggcaaaaacagggagagctcagctgacctgacaatgattataggagccatgtatgctgctgttatttttgttggaattaacaattgccaaactgttcaaccaattgtagccgttgaaagaacagtgttctatcgagaaagagctgccggaatgtatgctcctttgccttatgccttagcacaggtcttttgtgaagtaccatatgtgtttttccaaactgtttattactcactcatagtgtatgctatggtgagctttgaatggaaagtggagaagttcttttggttcttctttgtcagcttcttctctttcttgtacttcacatattatggaatgatgactgtgtccatcacaccaaaccaccaagtggcatcaatctttgcagcagcattctatggactctttaatctcttctctggtttctttatcccaagaccgaaaattcctaaatggtgggtgtggtattactggatttgtccagtggcatggacagtgtatggattaattgtctctcaatatagagatatagaggaccatctttttgtgcctgggagtactactcaaaatttcactgtcaaaggatatattgaagaccactacgggtttaaatccgacttcatgggtccagttgctgcagttttggtagctttcactgtcttctttgcctttgtattttccttctgcatcagggcactgaacttccaaacaagataaaagaacttcaatgttaaagtacaagttatgctatggcatgttgtaacggtctaaatgacctgtgtatgtaaataactgaggctggagtcaatgctcaagatttatgcaacattataagcttaatagatggccacgatagttttgctggcggagtgttcttc

SEQ ID NO: 24220 - protein, 431 aa, Glycine max
IFMDEPTSGLDARAAAIVMRTVRNTVDTGRTVVCTIHQPSIDIFEAFDELLLMKRGGQVIYSGPLGRNSHKIVEYFEAIPGVPKIKEMYNPATWMLEVSSVAAEVRLGMDFAEYYKTSSLFQRNKALVKELSTPPPGATDLYFPTKYSQSTLGQFKSCFWKQWLTYWRSPDYNLVRYFFTLACALMIGTVFWRIGKNRESSADLTMIIGAMYAAVIFVGINNCQTVQPIVAVERTVFYRERAAGMYAPLPYALAQVFCEVPYVFFQTVYYSLIVYAMVSFEWKVEKFFWFFFVSFFSFLYFTYYGMMTVSITPNHQVASIFAAAFYGLFNLFSGFFIPRPKIPKWWVWYYWICPVAWTVYGLIVSQYRDIEDHLFVPGSTTQNFTVKGYIEDHYGFKSDFMGPVAAVLVAFTVFFAFVFSFCIRALNFQTR

SEQ ID NO: 24221 - protein, 429 aa, Glycine max
MDEPTSGLDARAAAIVMRTVRNTVDTGRTVVCTIHQPSIDIFEAFDELLLMKRGGQVIYSGPLGRNSHKIVEYFEAIPGVPKIKEMYNPATWMLEVSSVAAEVRLGMDFAEYYKTSSLFQRNKALVKELSTPPPGATDLYFPTKYSQSTLGQFKSCFWKQWLTYWRSPDYNLVRYFFTLACALMIGTVFWRIGKNRESSADLTMIIGAMYAAVIFVGINNCQTVQPIVAVERTVFYRERAAGMYAPLPYALAQVFCEVPYVFFQTVYYSLIVYAMVSFEWKVEKFFWFFFVSFFSFLYFTYYGMMTVSITPNHQVASIFAAAFYGLFNLFSGFFIPRPKIPKWWVWYYWICPVAWTVYGLIVSQYRDIEDHLFVPGSTTQNFTVKGYIEDHYGFKSDFMGPVAAVLVAFTVFFAFVFSFCIRALNFQTR

SEQ ID NO: 24222 - protein, 413 aa, Glycine max
MRTVRNTVDTGRTVVCTIHQPSIDIFEAFDELLLMKRGGQVIYSGPLGRNSHKIVEYFEAIPGVPKIKEMYNPATWMLEVSSVAAEVRLGMDFAEYYKTSSLFQRNKALVKELSTPPPGATDLYFPTKYSQSTLGQFKSCFWKQWLTYWRSPDYNLVRYFFTLACALMIGTVFWRIGKNRESSADLTMIIGAMYAAVIFVGINNCQTVQPIVAVERTVFYRERAAGMYAPLPYALAQVFCEVPYVFFQTVYYSLIVYAMVSFEWKVEKFFWFFFVSFFSFLYFTYYGMMTVSITPNHQVASIFAAAFYGLFNLFSGFFIPRPKIPKWWVWYYWICPVAWTVYGLIVSQYRDIEDHLFVPGSTTQNFTVKGYIEDHYGFKSDFMGPVAAVLVAFTVFFAFVFSFCIRALNFQTR

SEQ ID NO: 24223 - DNA, 1129 bp, Glycine max
atcaaatcctcaatacttgtttatcactatcacttccccttcctatctctgaagccattctcgttcattttgtttttttatcttctctttatctccctcaacaagattcctataaagttcgtagcggctttcacacaactttaagaaaatctcgtgaatccgtgatcgcaaacaaaacaatgtctcccccttctatgttaggcaaccgcaaagacggttctgaaatggactctttgaggggctaaaagcacatagaactgaagatgggcatgtacttttatttcgaccagatgagaatgctcaacgcatgaaacgaggtgcagatagattgtgtatgccatccccatctcctggccaatttgttaatgctgtaaagcagatagttattgccaacaaacgttgggtgcctccaccagggaaagggtcactatatattaggccattgctgataggaacaggagcattgttaggggtggcacctgcccctgagtatacatttcttatttattgttctccagttggcagctaccagaagggtgcactaaatttaaaggttgaggataaactatatagagcaatatctggctgtggtggaactggagggatcaaaagtgtcaccaattatgcccctgtttatactgcaatggctgatgcaaaggccaacggattctctgatgtgctgttcttagactcagcaactggaaaacatatagaggaggcctcagcatgcaatgtatttgttttgaaggacaatgctatctccactcctgcaatagatggaaccatcctacctggtatcacccgaaaatccatcattgacattgccattgatttgggttatcaggtcatggaacgttccgtatcagtggaggagatgctaggtgctgatgaaatgttctgcactggaactgcagttgttgtcaactctgttgcatctgtaacttataaggaaacaagggtggattacaaaacaggcccagcaacattgtcctcaaaactacggaaaacacttgttggaattcaaacagggtgtcttgaggacaaaaaatcatggacagtccgagtagattcaacaatatagcaccgtttccgtcacaaataaaaagagaaaaatattgcaccgtttgtc

SEQ ID NO: 24224 - protein, 257 aa, Glycine max
MKRGADRLCMPSPSPGQFVNAVKQIVIANKRWVPPPGKGSLYIRPLLIGTGALLGVAPAPEYTFLIYCSPVGSYQKGALNLKVEDKLYRAISGCGGTGGIKSVTNYAPVYTAMADAKANGFSDVLFLDSATGKHIEEASACNVFVLKDNAISTPAIDGTILPGITRKSIIDIAIDLGYQVMERSVSVEEMLGADEMFCTGTAVVVNSVASVTYKETRVDYKTGPATLSSKLRKTLVGIQTGCLEDKKSWTVRVDSTI

SEQ ID NO: 24225 - protein, 248 aa, Glycine max
MPSPSPGQFVNAVKQIVIANKRWVPPPGKGSLYIRPLLIGTGALLGVAPAPEYTFLIYCSPVGSYQKGALNLKVEDKLYRAISGCGGTGGIKSVTNYAPVYTAMADAKANGFSDVLFLDSATGKHIEEASACNVFVLKDNAISTPAIDGTILPGITRKSIIDIAIDLGYQVMERSVSVEEMLGADEMFCTGTAVVVNSVASVTYKETRVDYKTGPATLSSKLRKTLVGIQTGCLEDKKSWTVRVDSTI

SEQ ID NO: 24226 - protein, 145 aa, Glycine max
MADAKANGFSDVLFLDSATGKHIEEASACNVFVLKDNAISTPAIDGTILPGITRKSIIDIAIDLGYQVMERSVSVEEMLGADEMFCTGTAVVVNSVASVTYKETRVDYKTGPATLSSKLRKTLVGIQTGCLEDKKSWTVRVDSTI

SEQ ID NO: 24227 - DNA, 1290 bp, Glycine max
attctattctctcgtgtctctctctctctctctgaaaccatgcctgtcacaaacacaacaacacctacagtggcagaacacatcaaatggagaaggcccagaaaccaattcaaccaccaccatcatcaccatcaccaccccatttcagaaacagatccaaaccctcaaatcccttccataatccaatccactaggtgcaagtccaccatttcctccctgctcctctccactttctccaacaacacctccaataatgccactgcccacagcaagaaaaaaagcaacttttctgcatcaaccttcagagggttgggctgcactgctggctcgtcgcagcaggtgtcggtgccggcggtgattcgctcctccgccgattggcaagggaagaaaacaagaaaaaagaagcacaagagaagcaacagaagcagcaagaacaagactttccatggtggggttctggaaggttccaatccagggtgtgtggattttcaagatgtttggtgtggccctggaattgggttctcaacagatgctgctgcctctgttgattgtgttgtggccaggaagaatgtctcttctgcaagagggaaaattgatgtggataagatcactcacagggagataatgatgcttcaagggagtctactaatgggtggacaactaaattcacatgatcatttcagagactggagactggatgttgataacatgtcctatgagcaattgctagagcttggtgagagaattggtcatgtgaacactggactcaaggaagatgagatgggacggaacataaggaagactaggattcaattttgggatgatacatcaaagcttcaagtagataaagagtgcagcatttgtcaggaggagtatgaagcgggtgatgagttggggaggctaaattgtgagcacagttatcactttcagtgtataaaacaatgggttgcacaaaaaaatttctgcccagtatgtaagcaacaagttgcggctcgacactgagtgactcaacccttctgtttttttggacagcttccattctcatccataaatttgtgtatagtttttcatatccaatacaagcaagagttttcattctttgctgtcaattatcatttcatctttcaaaattcctgcatcctctgcgaggaatcggcaattatatgttatcgagtaaaggtttatattcgggctgagacctttgcatattatacgcaagagttgccttgcttaagagcagttattattatttttttgttttgggtttttaatgaagttgtgtctgtgacc

SEQ ID NO: 24228 - protein, 333 aa, Glycine max
ILFSRVSLSLSETMPVTNTTTPTVAEHIKWRRPRNQFNHHHHHHHHPISETDPNPQIPSIIQSTRCKSTISSLLLSTFSNNTSNNATAHSKKKSNFSASTFRGLGCTAGSSQQVSVPAVIRSSADWQGKKTRKKKHKRSNRSSKNKTFHGGVLEGSNPGCVDFQDVWCGPGIGFSTDAAASVDCVVARKNVSSARGKIDVDKITHREIMMLQGSLLMGGQLNSHDHFRDWRLDVDNMSYEQLLELGERIGHVNTGLKEDEMGRNIRKTRIQFWDDTSKLQVDKECSICQEEYEAGDELGRLNCEHSYHFQCIKQWVAQKNFCPVCKQQVAARH

SEQ ID NO: 24229 - protein, 320 aa, Glycine max
MPVTNTTTPTVAEHIKWRRPRNQFNHHHHHHHHPISETDPNPQIPSIIQSTRCKSTISSLLLSTFSNNTSNNATAHSKKKSNFSASTFRGLGCTAGSSQQVSVPAVIRSSADWQGKKTRKKKHKRSNRSSKNKTFHGGVLEGSNPGCVDFQDVWCGPGIGFSTDAAASVDCVVARKNVSSARGKIDVDKITHREIMMLQGSLLMGGQLNSHDHFRDWRLDVDNMSYEQLLELGERIGHVNTGLKEDEMGRNIRKTRIQFWDDTSKLQVDKECSICQEEYEAGDELGRLNCEHSYHFQCIKQWVAQKNFCPVCKQQVAARH

SEQ ID NO: 24230 - DNA, 1628 bp, Glycine max
tccattttgtttggaacactgcgtaaggctgcgccaccacctccgcctccgtcgtccacggccagttgcttgcgttcctttcactttttttataattggctaagaataataatggcgtaccggcgctgcctcttgataagagggagcctcgtggatcggaggtgccatctgtctttcagttatgttctccacagcaacgaggggaagcgcgaacgcaccaatgaaaaatcatcttcaggaggggttggtgattttactcaaacaaggtcctttggaagctctcttaatggacagatgcggttcttctcgccttcccgagatagatttctttctccatgcaccggatatggtttctgccaatatatgtcgacggtgaatcggggttcagataagattggcagtgatgtaatgactgatgtggctgatgtcctcgctgacacgaccatggattctgtagcttctcaggctcctgttgttaatgaggttgctattgctgctgctgattcttttttgcctgtacaggccttgcagtacgtgatagatgctgtgcatttctacactggcttaaattggtgggcagccatagttctaacaaccctgttgattcgaaccgctacagttccactcttaataaatcaacttaaggccacttctaaacttacgttaatgaggcctcacttagaagagataaagcaagaaatggagggactgactatggatcctgtagctgttgctaaaggtcagcagcagatgaagaagctatttaaggaatatggtgtgagtccttttacgccattgaaaggactctttattcaaggccctatttttgttagtttttttcttgcgataacaaatatggctgaaaaagtgccgtcattcaagcatggtggagcttcttggtttattgatctctcaactcctgatgccctgtacgtttttccagttttgacagcattgtcattcttaataacagtagagtgtaatatgcaagaagggatggaaggaaatcctgtggctggtaccatgaaaaatgtctctaggggtcttgctgttcttacagttcctttcaccatgggatttccaaaggcaatattctgttactgggttacatcaaatttgttttcacttgtgtatggacttgtgcttaaagttcctggcgtaaagaaaactttgggtattcctgaaatacctgttgctccacccaccacgaccagtgctactcaatctcccttttctatatttcctgctctaaaacaagctacatctgcaacaacaaatgggtcaagctcaataccagatgaagcttcaaaacattcaaataaaaagatatcttctgcttctgttattagtcaaaggcttagaagtttagagaaacaagtgaaaggaagaaagaagaacaagaagtgaggaaaatttacaataatcctaaattataacatctatacatggagcaattgtgctcagcattttgttatattttattatcctgggatgagggagaaattagttcgaactttgtatgtttagtctacactcgattcatcggtttctcaattcttgtgtaaaacttggtccctatcagaaagggcggcctcaataattttatataacttttcatccttcatttt

SEQ ID NO: 24231 - protein, 468 aa, Glycine max
SILFGTLRKAAPPPPPPSSTASCLRSFHFFYNWLRIIMAYRRCLLIRGSLVDRRCHLSFSYVLHSNEGKRERTNEKSSSGGVGDFTQTRSFGSSLNGQMRFFSPSRDRFLSPCTGYGFCQYMSTVNRGSDKIGSDVMTDVADVLADTTMDSVASQAPVVNEVAIAAADSFLPVQALQYVIDAVHFYTGLNWWAAIVLTTLLIRTATVPLLINQLKATSKLTLMRPHLEEIKQEMEGLTMDPVAVAKGQQQMKKLFKEYGVSPFTPLKGLFIQGPIFVSFFLAITNMAEKVPSFKHGGASWFIDLSTPDALYVFPVLTALSFLITVECNMQEGMEGNPVAGTMKNVSRGLAVLTVPFTMGFPKAIFCYWVTSNLFSLVYGLVLKVPGVKKTLGIPEIPVAPPTTTSATQSPFSIFPALKQATSATTNGSSSIPDEASKHSNKKISSASVISQRLRSLEKQVKGRKKNKK

SEQ ID NO: 24232 - protein, 431 aa, Glycine max
MAYRRCLLIRGSLVDRRCHLSFSYVLHSNEGKRERTNEKSSSGGVGDFTQTRSFGSSLNGQMRFFSPSRDRFLSPCTGYGFCQYMSTVNRGSDKIGSDVMTDVADVLADTTMDSVASQAPVVNEVAIAAADSFLPVQALQYVIDAVHFYTGLNWWAAIVLTTLLIRTATVPLLINQLKATSKLTLMRPHLEEIKQEMEGLTMDPVAVAKGQQQMKKLFKEYGVSPFTPLKGLFIQGPIFVSFFLAITNMAEKVPSFKHGGASWFIDLSTPDALYVFPVLTALSFLITVECNMQEGMEGNPVAGTMKNVSRGLAVLTVPFTMGFPKAIFCYWVTSNLFSLVYGLVLKVPGVKKTLGIPEIPVAPPTTTSATQSPFSIFPALKQATSATTNGSSSIPDEASKHSNKKISSASVISQRLRSLEKQVKGRKKNKK

SEQ ID NO: 24233 - protein, 370 aa, Glycine max
MRFFSPSRDRFLSPCTGYGFCQYMSTVNRGSDKIGSDVMTDVADVLADTTMDSVASQAPVVNEVAIAAADSFLPVQALQYVIDAVHFYTGLNWWAAIVLTTLLIRTATVPLLINQLKATSKLTLMRPHLEEIKQEMEGLTMDPVAVAKGQQQMKKLFKEYGVSPFTPLKGLFIQGPIFVSFFLAITNMAEKVPSFKHGGASWFIDLSTPDALYVFPVLTALSFLITVECNMQEGMEGNPVAGTMKNVSRGLAVLTVPFTMGFPKAIFCYWVTSNLFSLVYGLVLKVPGVKKTLGIPEIPVAPPTTTSATQSPFSIFPALKQATSATTNGSSSIPDEASKHSNKKISSASVISQRLRSLEKQVKGRKKNKK

SEQ ID NO: 24234 - DNA, 1358 bp, Glycine max
aaaacctcaccggttctcacagggtttatcgtttaacggttgaaacgaagcgaaacttccaacttcatcttcaaccctgcgcttcttttgaactggtaaaaacttcgatcattttttgctctttagtcggtgttcatttcaactcagaagtcagaacatcggagctcatcaagtatgttaatcacttaccgcgcattcacgaattgggtcttgaccaaaaccctaattagaaaactagtgtttttacatttgtaattgatttgtgtgctttggaatctgaagattttattatgtgtatttagtgtatgatatctacttctctgagtgaatgacaattaggacttaaaacagccggaagtgaacattgatgattttatgaacttcaattgttattcatttttctggtccatttccattccattgttgtgggttttaaagtgtgtaggtactaggtaaggtaagcctcacccttcaaattttcaagaaaaaaaaagttggaaacttgtttctttttctagccatatgtgatggaaacagacacagcacaacacacaagtaaaacaaacaaacccacatagggaagcatacctacacgtgctactatagaatcaacggaaggttatgttatagtgtcagtttttccccctttgcagttaaaaattaactgagattactcatggtaatttaagagggaagtctttgaatttcttaaaacctttcttgcagatttgtgctagtttgcaagggaagctcattgattgtaaactgttaacaggcatggcaagctctttgacaacattagccattacctattctcctgtcaacaatggttccaggggtttcagaaagtcagttaatgcttctaaaggaaggtgttgcataaaagcaatgaggatagagaaatccttggaggaattgtacaatgtgaaggtggaaagaaaagttcctcctgagagactagcggagcttggagtttcaaaatggtcagtgtggaagactgggaaaagcaggttgccttgggactggcaggtagaccaactggtgtacatagaagaaggggaagtgagagttgtgcctgaaggaagccagcgtttcatgcaatttgtggccggagacttggtccggtacccaaagtggtttgaagctgacctctggttcaatggtccatatcaagaacgttatagtttcagagcatatggtgatgatcattgacgagaagatgatgcttggtaaccacttaaaagtagcatgcacatcttatttggatgttttatgtaatagatgttttttaaaagttatagttttccagttctaaatgtattaccaatattttttaatgttagtgatactttgccatc

SEQ ID NO: 24235 - protein, 144 aa, Glycine max
MASSLTTLAITYSPVNNGSRGFRKSVNASKGRCCIKAMRIEKSLEELYNVKVERKVPPERLAELGVSKWSVWKTGKSRLPWDWQVDQLVYIEEGEVRVVPEGSQRFMQFVAGDLVRYPKWFEADLWFNGPYQERYSFRAYGDDH

SEQ ID NO: 24236 - protein, 107 aa, Glycine max
MRIEKSLEELYNVKVERKVPPERLAELGVSKWSVWKTGKSRLPWDWQVDQLVYIEEGEVRVVPEGSQRFMQFVAGDLVRYPKWFEADLWFNGPYQERYSFRAYGDDH

SEQ ID NO: 24237 - protein, 75 aa, Glycine max
NLTGSHRVYRLTVETKRNFQLHLQPCASFELVKTSIIFCSLVGVHFNSEVRTSELIKYVNHLPRIHELGLDQNPN

SEQ ID NO: 24238 - DNA, 1974 bp, Glycine max
aaattttacgtatttataagcgctcgcaaagcagtgaagacttgagagagggagagagagaatccaaattcggatttttgaaacgggatcgactccattcctcttcttcttcactgtcacacacactcacacactcctgtccatcgtttctccccactgattcacgaaaccctaatttttcgtggttcctcttctggggagcgaagatttagggttagattgagctgaggtggcagatgcagcagcatctcctctgagaaaaaaaatggaaggtggcaagagaattacggtgagccctcgaccttgctgcggccgcagaatcgttgccgcgaagaagagaccgcgtgcgaacgatggcttcgtcaacagcgtcaagaaactacagagacgcgaaatcagctccaagcgtgatcgcgctttcaccatgagcgacgctcaagagagattccggaatattcgcttgcaggaagaatatgatacgcatgatccgaaaggtccttcatctatggtgttgccgtttctgagaaaaagatcaaagattattgagattgtagcagcacgcgatattgtttttgctcttgcacaatcgggtgtttgtgcggcatttagccgagagaccaatcaacggatatgctttttgaatgttagtcctgatgaagttataagaagtctgttttataacaaaaataacgactcacttatcacagtttctgtatatgcttcagacagttacagttctttgaagtgcagaagcacaaggattgaatatataaggaggggtacaccagatgctggctttgctctttttgaatccgagtctctgaagtggccaggttttgttgagtttgatgatgtaaatgggaaggtattaacgtactctgctcaagacagcatatacaaggtatttgacctgaaaaactatacgatgctgtactctatttcggataaaaatgtccaagagattaagatcagcccgggaatcatgttgttgatttatgctaaagcaagtagccatgtcccccttaaaatcctttcaatagaagatggtactattttgaagtcattcagtcatctcctttatcggaataagaaggtagattttattgaacagttcaacgaaaagctacttgtaaagcaagaaaacgagaacctccaaattcttgatgtgcggacttttgaacatacggaagtttgcagaagtgaatttatgacaccgtctgcatttatttttctatatgagaaccaattgttcctaacatttcgaaatcgtactgtggctgtgtggaacttccgtggagagctggtaacttcttttgaggatcacctcttgtggcatcctgactgcaacaccaacaatatatatataaccagtgaccaggatcttatcatatcctactgtaaagctgattctgatgattcgttgtctgaaggaaatgcaggttccatcaacgtcagcaacatcttaactggcaagtgtctggccaaaataagagcaagtaacagctttccagtggataacagttgcagtgacaatccttcaggtagctgttgttgtaattcaaagaagcgaaaacatggatccaagacgaggagcactgttgcagaagccttggaagacattactgctctcttctatgatgaagagcgcaatgaaatctatacaggcaacaggcatggactagttcatgtctggtccaactaatggatatattattgaatgttctgttgcactttgtttttcttagtgggtacattgattattctgatctgctattgagaacttttggggggatgtaactataagtgcctttgaatcattcatttttttttctcttgacatttacgccttaggcgagtttgttcggtagttgtaagaggtgtatgaagatgctgttaactcaccggatgttgcttctgctgtaatctatatttttacattaatggagcggcttcgatggaatttagcatgtgaat

SEQ ID NO: 24239 - protein, 478 aa, Glycine max
MEGGKRITVSPRPCCGRRIVAAKKRPRANDGFVNSVKKLQRREISSKRDRAFTMSDAQERFRNIRLQEEYDTHDPKGPSSMVLPFLRKRSKIIEIVAARDIVFALAQSGVCAAFSRETNQRICFLNVSPDEVIRSLFYNKNNDSLITVSVYASDSYSSLKCRSTRIEYIRRGTPDAGFALFESESLKWPGFVEFDDVNGKVLTYSAQDSIYKVFDLKNYTMLYSISDKNVQEIKISPGIMLLIYAKASSHVPLKILSIEDGTILKSFSHLLYRNKKVDFIEQFNEKLLVKQENENLQILDVRTFEHTEVCRSEFMTPSAFIFLYENQLFLTFRNRTVAVWNFRGELVTSFEDHLLWHPDCNTNNIYITSDQDLIISYCKADSDDSLSEGNAGSINVSNILTGKCLAKIRASNSFPVDNSCSDNPSGSCCCNSKKRKHGSKTRSTVAEALEDITALFYDEERNEIYTGNRHGLVHVWSN

SEQ ID NO: 24240 - protein, 425 aa, Glycine max
MSDAQERFRNIRLQEEYDTHDPKGPSSMVLPFLRKRSKIIEIVAARDIVFALAQSGVCAAFSRETNQRICFLNVSPDEVIRSLFYNKNNDSLITVSVYASDSYSSLKCRSTRIEYIRRGTPDAGFALFESESLKWPGFVEFDDVNGKVLTYSAQDSIYKVFDLKNYTMLYSISDKNVQEIKISPGIMLLIYAKASSHVPLKILSIEDGTILKSFSHLLYRNKKVDFIEQFNEKLLVKQENENLQILDVRTFEHTEVCRSEFMTPSAFIFLYENQLFLTFRNRTVAVWNFRGELVTSFEDHLLWHPDCNTNNIYITSDQDLIISYCKADSDDSLSEGNAGSINVSNILTGKCLAKIRASNSFPVDNSCSDNPSGSCCCNSKKRKHGSKTRSTVAEALEDITALFYDEERNEIYTGNRHGLVHVWSN

SEQ ID NO: 24241 - protein, 398 aa, Glycine max
MVLPFLRKRSKIIEIVAARDIVFALAQSGVCAAFSRETNQRICFLNVSPDEVIRSLFYNKNNDSLITVSVYASDSYSSLKCRSTRIEYIRRGTPDAGFALFESESLKWPGFVEFDDVNGKVLTYSAQDSIYKVFDLKNYTMLYSISDKNVQEIKISPGIMLLIYAKASSHVPLKILSIEDGTILKSFSHLLYRNKKVDFIEQFNEKLLVKQENENLQILDVRTFEHTEVCRSEFMTPSAFIFLYENQLFLTFRNRTVAVWNFRGELVTSFEDHLLWHPDCNTNNIYITSDQDLIISYCKADSDDSLSEGNAGSINVSNILTGKCLAKIRASNSFPVDNSCSDNPSGSCCCNSKKRKHGSKTRSTVAEALEDITALFYDEERNEIYTGNRHGLVHVWSN

SEQ ID NO: 24242 - DNA, 630 bp, Glycine max
aggcagtgcaaaactcacaacacatctaaacaaatatcaagaacaatggcttatgctaggcttgctcctatggctgtcttcttgcttgccacttccaccataatgttcccaacgaagatagaagcagcagattgtaatggtgcatgttcacctttcgaggtgccaccgtgccgctcacgtgattgtcgttgtgtccctataggactatttgttggtttctgcatacatccaactggactttcatctgttgcgaagatgatcgacgaacatcccaacttatgtcaatctgatgatgaatgcatgaagaaaggaagtggcaatttttgcgctcgttaccctaataattatatcgattatggatggtgttttgactctgattctgaagcactgaaaggcttcttggccatgcctagggcaaccaccaagtaatatggtgggtatgccaaagtgggcatgcttgatgcatcttctactacttaaaaataaaagcttatgatgcatctactgctttaaacaaaagagtgctccactacgcaacttttgtttccaacttatagttggttacgttttatgtaaactcaacccatgtatgttttggagcattccagttaataaaaaatgtttctatac

SEQ ID NO: 24243 - protein, 142 aa, Glycine max
RQCKTHNTSKQISRTMAYARLAPMAVFLLATSTIMFPTKIEAADCNGACSPFEVPPCRSRDCRCVPIGLFVGFCIHPTGLSSVAKMIDEHPNLCQSDDECMKKGSGNFCARYPNNYIDYGWCFDSDSEALKGFLAMPRATTK

SEQ ID NO: 24244 - protein, 127 aa, Glycine max
MAYARLAPMAVFLLATSTIMFPTKIEAADCNGACSPFEVPPCRSRDCRCVPIGLFVGFCIHPTGLSSVAKMIDEHPNLCQSDDECMKKGSGNFCARYPNNYIDYGWCFDSDSEALKGFLAMPRATTK

SEQ ID NO: 24245 - protein, 119 aa, Glycine max
MAVFLLATSTIMFPTKIEAADCNGACSPFEVPPCRSRDCRCVPIGLFVGFCIHPTGLSSVAKMIDEHPNLCQSDDECMKKGSGNFCARYPNNYIDYGWCFDSDSEALKGFLAMPRATTK

SEQ ID NO: 24246 - DNA, 599 bp, Glycine max
aaaccgcgtacggcaccatccggctaatcgccaccgctcgaagctacggaggagattgattcaacctctctctatctatatcggaaacgtctaacggcggactaatttacgtgtcgacggagctagaagcagcttatcttctccagatctctaaccgattctcaccgcttcctgtttcaccggttgggtgatcaaagcaatggttcttgatgggattgtatcttcaccattgaggagacaccagtctctaaagaaacagtgggaagatttgggtagctgctcaaccgttgttaaccggcatcgatatttattaacagcattgcttctcttgggctttctctgcacggtttatctttactttgctgtcactttagatgctaggcacaactcctcctgctacggcttggctgggaaagagaaggcaatgtgtcaagccatctctaaagggaaactcaaattgttttgataaattgttcttgtgccactacattcttttttgttttattgattctataatgccatttgtgtgtaattgtttcattacatggtgaaaaaccagagatttgtaacctaaacatcaaaaaacattttcatttctg

SEQ ID NO: 24247 - protein, 88 aa, Glycine max
MVLDGIVSSPLRRHQSLKKQWEDLGSCSTVVNRHRYLLTALLLLGFLCTVYLYFAVTLDARHNSSCYGLAGKEKAMCQAISKGKLKLF

SEQ ID NO: 24248 - protein, 58 aa, Glycine max
MLGTTPPATAWLGKRRQCVKPSLKGNSNCFDKLFLCHYILFCFIDSIMPFVCNCFITW

SEQ ID NO: 24249 - DNA, 1237 bp, Glycine max
ctcttagtatttattctcttttatttgtttcttcacagcccctcaatgaagaacaagaagggtgaagctctgagtgagacttctctcccaccttcaaccatgtcttcttcctcctcttctcttgtcaccactcttgttgataataataaccctactcaaccttctcagttaagagcggcacgccgtcgtttcacctctgatcatcaccttcctgagataagcctcaaaacccctatggttaggccttatgttcgatcaaaaatgcctaggcttcgttggacaccagatctccatcgttgcttcgtgcatgcagttcaaagacttggaggagaagacagggccacaccaaagttggttttacagctcatgaatgtaaaggggcttactatatctcacgtcaaaagccaccttcagatgtacaggagcatgagacacgagcagatgagtcaaggtgcaaagaagaataatatggctccggatttcccagcttccacactcgcaactcttggcccaaggcaacagaaacctcacaaaagaagctgcacggaagagcttgttcccacccaagctcaatggaatcatgatgagcaagagtgttacaatggaaaccaagggggtgaatcgattataatttgtaacggcaatgaacagaaggtgcactcctacatcatcttcgagggtcttctgagaggccaatctgtccaagagaataaaactactactactgaaaaggtgtcactaggtgatgccggttacgaaagcgaccatcaaagattccaagacacaactctgtccctttcaatgagctcaaggccttcttcacattcgttcttgaatcggagccacagtactggtccagatgcgaatgatgtctctcttgagctcacgctctcttagaatcatgcacataataataacagcaagccttttctttgtcatcatttatgcatgtttcttccatcctacaactacactacaaactaatggtgcatgacctttcaagaaagaacaatccatactatcaagtgtttttccgacatcgattaagaaattaaaatttttaaaaaattattaaatttttgtcgatgcatttttatttattaatttcttaataaatgtctctaaaagcacttgttagcaggagaccgaggaaattgtaataccaacgctactttagttcgcatcatttagtgcccatgatcagaagtactagaaatcaagtgaactaattaagaac

SEQ ID NO: 24250 - protein, 298 aa, Glycine max
LLVFILFYLFLHSPSMKNKKGEALSETSLPPSTMSSSSSSLVTTLVDNNNPTQPSQLRAARRRFTSDHHLPEISLKTPMVRPYVRSKMPRLRWTPDLHRCFVHAVQRLGGEDRATPKLVLQLMNVKGLTISHVKSHLQMYRSMRHEQMSQGAKKNNMAPDFPASTLATLGPRQQKPHKRSCTEELVPTQAQWNHDEQECYNGNQGGESIIICNGNEQKVHSYIIFEGLLRGQSVQENKTTTTEKVSLGDAGYESDHQRFQDTTLSLSMSSRPSSHSFLNRSHSTGPDANDVSLELTLS

SEQ ID NO: 24251 - protein, 283 aa, Glycine max
MKNKKGEALSETSLPPSTMSSSSSSLVTTLVDNNNPTQPSQLRAARRRFTSDHHLPEISLKTPMVRPYVRSKMPRLRWTPDLHRCFVHAVQRLGGEDRATPKLVLQLMNVKGLTISHVKSHLQMYRSMRHEQMSQGAKKNNMAPDFPASTLATLGPRQQKPHKRSCTEELVPTQAQWNHDEQECYNGNQGGESIIICNGNEQKVHSYIIFEGLLRGQSVQENKTTTTEKVSLGDAGYESDHQRFQDTTLSLSMSSRPSSHSFLNRSHSTGPDANDVSLELTLS

SEQ ID NO: 24252 - protein, 265 aa, Glycine max
MSSSSSSLVTTLVDNNNPTQPSQLRAARRRFTSDHHLPEISLKTPMVRPYVRSKMPRLRWTPDLHRCFVHAVQRLGGEDRATPKLVLQLMNVKGLTISHVKSHLQMYRSMRHEQMSQGAKKNNMAPDFPASTLATLGPRQQKPHKRSCTEELVPTQAQWNHDEQECYNGNQGGESIIICNGNEQKVHSYIIFEGLLRGQSVQENKTTTTEKVSLGDAGYESDHQRFQDTTLSLSMSSRPSSHSFLNRSHSTGPDANDVSLELTLS

SEQ ID NO: 24253 - DNA, 1426 bp, Glycine max
attcagattagaaagtgagagtttggattctcaaagacagatattgagattttgcacacacagagagagagagagagagagagatgggaagagctccatgttgtgacaaggcaagtgttaagagagggccatggtccccagaagaagacacaaagctgaaggagtacatagagaagcatggaactggagggaattggattgctcttcctcagaaagctggacttaagagatgtggaaaaagttgtagattgagatggctcaactatctcaggcccaacattaagcatggagatttctcagatgaggaagacagaataatttgcagcctttatgttaatattggaagcaggtggtcaattatagctgctcagttaccaggaaggacagacaatgatattaagaactactggaacaccaagttgaagaaaaagctcatgggtttgcttcctctttctcatcacagaaaacaaccttcatttccatcctctacccttcaaaactctccaccctctccttcatctgaccaactttacggagagtactgcacctacacccccttaacaaccacatctttcacaagtaatattgaacccttttccctcccttcaagtaactacgcaagcacaagtacaacctcagtttctcactccttttaccagaaccaagactccatgcaacaatgctatcaccctacgagagacaacaacatgctcatgtttggaagcgaaggaagttgcagtacttcctctgacggaagctgcactcaaggcagagaaattatcaagcaagaagaaattggttaccacagctacaataatgattataactttatgcttaatcacagcaacaatattaatgatggagaaaagtcatgttttggtgagtggtttagccaaacactactaacaccgttggattatgatcttgaggatattaagcaattgattagtagcagcagtagcactgctagcttcaataatgttgatgaaaacaagacagaagagaaggccatgtactactactactactagtgcctgcaaactgatgatgatgactgaatctgactactggtaaaagatatgatgatggagaaagggtatgttaagttggtgtggcaaagattcagaaaaaaaaaaattgatgagatcttctggggttctgcgttctctgatgaaacatttcttgttttgacagtacatggtaaaagcttctcttatattttgtgcatatcttctcggaatgggtgatgatgatgaccacaacgacaaagaagaaaaagaagatgttgttagatttgttttttgttaagtattctctcctaatcagatattaatgttgtgaaaaaacactcaatgatcaattcaaattattttatatcagagattataattatatatataacatagtttagtgtgttataagtact

SEQ ID NO: 24254 - protein, 315 aa, Glycine max
MGRAPCCDKASVKRGPWSPEEDTKLKEYIEKHGTGGNWIALPQKAGLKRCGKSCRLRWLNYLRPNIKHGDFSDEEDRIICSLYVNIGSRWSIIAAQLPGRTDNDIKNYWNTKLKKKLMGLLPLSHHRKQPSFPSSTLQNSPPSPSSDQLYGEYCTYTPLTTTSFTSNIEPFSLPSSNYASTSTTSVSHSFYQNQDSMQQCYHPTRDNNMLMFGSEGSCSTSSDGSCTQGREIIKQEEIGYHSYNNDYNFMLNHSNNINDGEKSCFGEWFSQTLLTPLDYDLEDIKQLISSSSSTASFNNVDENKTEEKAMYYYYY

SEQ ID NO: 24255 - protein, 198 aa, Glycine max
MGLLPLSHHRKQPSFPSSTLQNSPPSPSSDQLYGEYCTYTPLTTTSFTSNIEPFSLPSSNYASTSTTSVSHSFYQNQDSMQQCYHPTRDNNMLMFGSEGSCSTSSDGSCTQGREIIKQEEIGYHSYNNDYNFMLNHSNNINDGEKSCFGEWFSQTLLTPLDYDLEDIKQLISSSSSTASFNNVDENKTEEKAMYYYYY

SEQ ID NO: 24256 - DNA, 522 bp, Glycine max
gttacatacactcccaggaacgggaataaaaacgaagaagagcgagtcactgttccgtgttcccactgagtcggtatcaacgagtgaccgagtcgaaaagcgagtcaccactccccgcgctgcatggaccctctcgaagctttggtcgcccaaatccaagggctatcgagctctcccggcgacctcactcgcctccacactgttctaaagcaagccgatgactcgcttcgatccgagtcaactcgcctcgctccgattctcacacagctcgacccctccattcactccctcgggtttctctacatcctagaagcttccatgaccggtccggttaccaaaacgcaggctgaggtcgtcgttccgatcgttactaggtttatcggcgcttgcagcacggagcagattcgtttggcgcctgataaatttttatctgtctgtaagaggttgaaggatcaagtgatgctgttggaagctccaatacggggcgtggctcccttgttcaatgctcttcggaaacttcag

SEQ ID NO: 24257 - protein, 133 aa, Glycine max
MDPLEALVAQIQGLSSSPGDLTRLHTVLKQADDSLRSESTRLAPILTQLDPSIHSLGFLYILEASMTGPVTKTQAEVVVPIVTRFIGACSTEQIRLAPDKFLSVCKRLKDQVMLLEAPIRGVAPLFNALRKLQ

SEQ ID NO: 24258 - protein, 68 aa, Glycine max
LHTLPGTGIKTKKSESLFRVPTESVSTSDRVEKRVTTPRAAWTLSKLWSPKSKGYRALPATSLASTLF

SEQ ID NO: 24259 - protein, 68 aa, Glycine max
MTGPVTKTQAEVVVPIVTRFIGACSTEQIRLAPDKFLSVCKRLKDQVMLLEAPIRGVAPLFNALRKLQ

SEQ ID NO: 24260 - DNA, 1494 bp, Glycine max
agatcccggaaaggcgtgccagcgtcagagagactcatcagttctcactcgtacggcgcttttgctttgctttgcttcatttctttcatcgtcatcataaagttcgttcctttctcagttttcacccatacccagatgagtaacagcaccatctcggatctgtgtccctcctttgagtgaaaaaggttcaatctttggtctctggggctgttggggttccgtcattgaagaagaagaagaagaagggtattattgttattataatcatgtacccgaggctcatacacccccacgatgggattgtgacgcaggatgagttgcagggtggtgctgcttccaacctctctcacgctcacaagggtgacccttgtctcgttttaacggctgatcccaagcctcgtcttcgttggactcaggacttgcatgaacgcttcgttgatgcggtcacgcagcttggtggagctagtaaagctacaccaaaagcaatcatgcggactatgaatgtcaagggtttgactctgtttcatttgaagagtcatcttcagaaatacaggcttggtaagcaatctgggaaagatgtgggcgaaggatgcaaagatggttcatatcttttagaaagccctggtgctgataacacttctccaaagttgccaactcctgatacaaatgagggttatgaaatcaaggaggcattgagagcacagatggaagtgcaaagtaaattacatttgcaagtggaggcggaaaagcacttgcagattcgccaggatgcagagaggagatacatggcgatgctcgaaagagcttgcaagatgctggctgatcaatttatcagtgctacagttatagacacagacagccaaaagttccaaggaattggaagcaaagcacctagaggtaccttggttgatcctcttggtttttactccttgccatccactgaggtagccggagtgaatgtcccggaagaagaaatactgccaagtctcccaccccaaagggccgattgttcaaccgaaagttgtttaacctcgcatgagagctctggaggattggctttagaaggatctccaggcgagggaaaaaggaggatgctaggcatggactctatggcagcacctttgatctggagtgaagctaagatgagaactcaagccatcaatgtagctcaaggtaatcatcctcaaggaataactaggtatggcatgtagggatggaaggtcttcttgatggttcatcccctcataatatataaacctttgagcttcatgcattccctttttttatgggtacttgaactcttcatgtcttgtaagttagtgagacataggtggaatcaattttacccctttgtaaattcaatctactctgtggctttaaacatcgcaaaaaactagctttgactatacacaaaattgtgtgctttggtgacttatatggattccttattgctcattgcatcatgctgaataaagaagatggagagtcattagt

SEQ ID NO: 24261 - protein, 314 aa, Glycine max
MYPRLIHPHDGIVTQDELQGGAASNLSHAHKGDPCLVLTADPKPRLRWTQDLHERFVDAVTQLGGASKATPKAIMRTMNVKGLTLFHLKSHLQKYRLGKQSGKDVGEGCKDGSYLLESPGADNTSPKLPTPDTNEGYEIKEALRAQMEVQSKLHLQVEAEKHLQIRQDAERRYMAMLERACKMLADQFISATVIDTDSQKFQGIGSKAPRGTLVDPLGFYSLPSTEVAGVNVPEEEILPSLPPQRADCSTESCLTSHESSGGLALEGSPGEGKRRMLGMDSMAAPLIWSEAKMRTQAINVAQGNHPQGITRYGM

SEQ ID NO: 24262 - protein, 240 aa, Glycine max
MRTMNVKGLTLFHLKSHLQKYRLGKQSGKDVGEGCKDGSYLLESPGADNTSPKLPTPDTNEGYEIKEALRAQMEVQSKLHLQVEAEKHLQIRQDAERRYMAMLERACKMLADQFISATVIDTDSQKFQGIGSKAPRGTLVDPLGFYSLPSTEVAGVNVPEEEILPSLPPQRADCSTESCLTSHESSGGLALEGSPGEGKRRMLGMDSMAAPLIWSEAKMRTQAINVAQGNHPQGITRYGM

SEQ ID NO: 24263 - protein, 237 aa, Glycine max
MNVKGLTLFHLKSHLQKYRLGKQSGKDVGEGCKDGSYLLESPGADNTSPKLPTPDTNEGYEIKEALRAQMEVQSKLHLQVEAEKHLQIRQDAERRYMAMLERACKMLADQFISATVIDTDSQKFQGIGSKAPRGTLVDPLGFYSLPSTEVAGVNVPEEEILPSLPPQRADCSTESCLTSHESSGGLALEGSPGEGKRRMLGMDSMAAPLIWSEAKMRTQAINVAQGNHPQGITRYGM

SEQ ID NO: 24264 - DNA, 1425 bp, Glycine max
ctcccactgcagtgtgtgtctctcttgacacatttcgttagccgctgttggcaaaaaccctctccctttggctccttccactctcactctgttttcatcgtcttcaaccaccgccatgtgctcttagacctcccaggttcttcgtggacaacccagaagaacaatttgttctgttgttttagctcttgaaatgaaaccacaaaccagtgggatgtctagagctcataaggcaaataatactcaaattgaagggcctaactggcttatttttgctgctggtgctttgttgagtactctatccattcgccttggttacaagttgaagcaggcacttgactcgaagccgaagcaaaatgcaactactggtcagaaaggaaatggaaaatccaccaacacaaaaaactccgcagactgctttatgcagtctaatggatattccctagcgcaagataatcatggatgcttcggttgcatttcaggaactgggggtaccatggagctaaagtgcccaccaaatggtcagatgcagatgcataatgagtttgatggggctctccctttggtgacagttcctgctgctgctgaatttagcaaggaaaatggtgtctgggcatgctctcctgatcgtcttgaactgccttcaaagccattccaccattcaaactgctcagattcaccatgtgtatcagaatctggttctgatatttttagtaagcgggaagtcatacagaaactgcggcaacagttgaagagaagagatgatatgatactagaaatgcaagatcaaatggctgaattgcaaaattccctcaatgctcagatgggactttcttctcatttgcaattgcagcttgatgctacaaaccgggacttatttgagtccaagagagagatccaacggctacgaaaagcaattgcagatcactgtgttggatttgttccccatgacaaatcttccaaggtgacagttttgcctactgagattagaaatggcctttcaaatgggcatcttgatggggagaataattgtgagtcctctgaaaaactaagggatgaggaggagagaattgaattgctgaaaaggcaagtaggagagttgaaagaggtaatagaaggaaaagaatacttgctcctgagctacaaggagcaaaaggcagaactgtctctgaagatcagggaattgcagcagagattggattctcagctgcctaatattttgtagaagctattaagtttgtgaatactttggttctttacatttgacaaatcttcactgtcttcctcattctttatttcctctgtaattagctcaatatatttcgagtttgtgcaatgtatgctactaaggaatgaaagagggctgggtatttgaaatgagatgaatgcatatggtcttagaaatagaaaatttatatttgtcactgt

SEQ ID NO: 24265 - protein, 343 aa, Glycine max
MKPQTSGMSRAHKANNTQIEGPNWLIFAAGALLSTLSIRLGYKLKQALDSKPKQNATTGQKGNGKSTNTKNSADCFMQSNGYSLAQDNHGCFGCISGTGGTMELKCPPNGQMQMHNEFDGALPLVTVPAAAEFSKENGVWACSPDRLELPSKPFHHSNCSDSPCVSESGSDIFSKREVIQKLRQQLKRRDDMILEMQDQMAELQNSLNAQMGLSSHLQLQLDATNRDLFESKREIQRLRKAIADHCVGFVPHDKSSKVTVLPTEIRNGLSNGHLDGENNCESSEKLRDEEERIELLKRQVGELKEVIEGKEYLLLSYKEQKAELSLKIRELQQRLDSQLPNIL

SEQ ID NO: 24266 - protein, 336 aa, Glycine max
MSRAHKANNTQIEGPNWLIFAAGALLSTLSIRLGYKLKQALDSKPKQNATTGQKGNGKSTNTKNSADCFMQSNGYSLAQDNHGCFGCISGTGGTMELKCPPNGQMQMHNEFDGALPLVTVPAAAEFSKENGVWACSPDRLELPSKPFHHSNCSDSPCVSESGSDIFSKREVIQKLRQQLKRRDDMILEMQDQMAELQNSLNAQMGLSSHLQLQLDATNRDLFESKREIQRLRKAIADHCVGFVPHDKSSKVTVLPTEIRNGLSNGHLDGENNCESSEKLRDEEERIELLKRQVGELKEVIEGKEYLLLSYKEQKAELSLKIRELQQRLDSQLPNIL

SEQ ID NO: 24267 - protein, 267 aa, Glycine max
MQSNGYSLAQDNHGCFGCISGTGGTMELKCPPNGQMQMHNEFDGALPLVTVPAAAEFSKENGVWACSPDRLELPSKPFHHSNCSDSPCVSESGSDIFSKREVIQKLRQQLKRRDDMILEMQDQMAELQNSLNAQMGLSSHLQLQLDATNRDLFESKREIQRLRKAIADHCVGFVPHDKSSKVTVLPTEIRNGLSNGHLDGENNCESSEKLRDEEERIELLKRQVGELKEVIEGKEYLLLSYKEQKAELSLKIRELQQRLDSQLPNIL

SEQ ID NO: 24268 - DNA, 533 bp, Glycine max
aaacaccatctgttcctggaagaagtctctacctcaacctcatcatcgtcttagcgctctttgcatcgatcaccatggctgaatcaacgggagaagcatcgtcggaagcgaaggtccacatcatctacaccgagaagcccaccgatgaggaacctaaagactatcatctccgtactctctcctccgctctcggcagtgaggaagcagcaaaggacgctctgatctacagttacaaggaagctgcttctggtttctcagctaagctcacacctgagcaagtcaccgagatctccaagcaaccaggtgtgattcaagttgtgccgagccagacctaccatttgcacaaacctgttggtgctggtttcaagctcacctaactaatatgtagcttcttgttgttgtaaatgtcgtggctttcagaactggtatctaactataataatgccatgagtttgctttggattctagttgttctgtgttgttgagaaattgggtcttataaatatattatttgaagacataattgttattct

SEQ ID NO: 24269 - protein, 124 aa, Glycine max
TPSVPGRSLYLNLIIVLALFASITMAESTGEASSEAKVHIIYTEKPTDEEPKDYHLRTLSSALGSEEAAKDALIYSYKEAASGFSAKLTPEQVTEISKQPGVIQVVPSQTYHLHKPVGAGFKLT

SEQ ID NO: 24270 - protein, 100 aa, Glycine max
MAESTGEASSEAKVHIIYTEKPTDEEPKDYHLRTLSSALGSEEAAKDALIYSYKEAASGFSAKLTPEQVTEISKQPGVIQVVPSQTYHLHKPVGAGFKLT

SEQ ID NO: 24271 - DNA, 1599 bp, Glycine max
aacagaaagacacaatgggcaaagaaagtagtacttgtgttcttctatcccttctcattctttcactctttgtggctgaaatatatggaaatagacaagttcaagctcttaacaaactgcacaagtccaccaagttcagaggaaattcacaaattgataggagtgagtttgaggtagaggagcttgcttatgatggcattgttcactctcaagagggtctcaaagagaaagatagaattgagagtcttccaggacaaccccctgtgagtttttctcactatggagggtatgtcactgtggataaagaagcaggtcgtgccttctattattacttcgttgaagctcaacgttctaaacaaacactcccacttcttctttggctcaatggaggtcctggatgttcatctcttggctatggagcaatgcaagaacttggaccttttcgagtaaacagtgatggtaaaacactccacagaaatatattttcttggaacaaagttgcaaatgttttattcctggagtcacctgctggagtaggattttcctattcaaacaaatcaaaagattatgatacgaatggagataagaaaacagctgcagacaattatttattcttggtgaattggttggagagatatccagaatataaggaaagagatttctatattgctggggaaagctatgctgggcattatgtgcctcaatttgcacataccattctctatcataacaaaaaggcaaataagaaaatcatcaatctaaaaggaatcttgattgggaatgcagtgatcaacgaggaaactgactcggacggactgtatgattatcttgccagccatgcaatcatctcagacaaagcagcttatctcaacaaagcttgtgattcatcatcatcaaagattcaggaaagtgtgtgcgatgcagccggagatgaacttggggaggatattgaatacattgatttatacaatatttatgctccactatgcaagaatgcaaatctcacagccctgcccaaaaggaacacaattgtgactgatccatgtagtgagaattatgtgtacgcatatcttaatagaaaagatgttcaagaggctctccatgccaatgtaaccaacctcaaacatgactgggaaccctgcagcgatgtcataacaaagtgggttgatcaagcttcaacagttcttccacttttacatgaattcctcaacaatagcctcagggtttggattttcagtggtgacacagatggaagggtgcctattacatcaaccaagtattcagttaagaagatgaaccttcccattaaatctgtttggcacccttggttttcctatggagaggttggtggctatgtagaagtatacaagggaggcctaacattagctacggtgagggaagcagggcatcaagtgccaagttaccaaccagccagagccctaactttgatcaaatatttcttagacggcactcctcttcccggtcctcccaaaagaaaggactaggactagtttcttcaaatccacttttcaataattgttgtggtaattattaatttaaggaaaataaatacaattatattatagtggggtttcttgg

SEQ ID NO: 24272 - protein, 500 aa, Glycine max
QKDTMGKESSTCVLLSLLILSLFVAEIYGNRQVQALNKLHKSTKFRGNSQIDRSEFEVEELAYDGIVHSQEGLKEKDRIESLPGQPPVSFSHYGGYVTVDKEAGRAFYYYFVEAQRSKQTLPLLLWLNGGPGCSSLGYGAMQELGPFRVNSDGKTLHRNIFSWNKVANVLFLESPAGVGFSYSNKSKDYDTNGDKKTAADNYLFLVNWLERYPEYKERDFYIAGESYAGHYVPQFAHTILYHNKKANKKIINLKGILIGNAVINEETDSDGLYDYLASHAIISDKAAYLNKACDSSSSKIQESVCDAAGDELGEDIEYIDLYNIYAPLCKNANLTALPKRNTIVTDPCSENYVYAYLNRKDVQEALHANVTNLKHDWEPCSDVITKWVDQASTVLPLLHEFLNNSLRVWIFSGDTDGRVPITSTKYSVKKMNLPIKSVWHPWFSYGEVGGYVEVYKGGLTLATVREAGHQVPSYQPARALTLIKYFLDGTPLPGPPKRKD

SEQ ID NO: 24273 - protein, 496 aa, Glycine max
MGKESSTCVLLSLLILSLFVAEIYGNRQVQALNKLHKSTKFRGNSQIDRSEFEVEELAYDGIVHSQEGLKEKDRIESLPGQPPVSFSHYGGYVTVDKEAGRAFYYYFVEAQRSKQTLPLLLWLNGGPGCSSLGYGAMQELGPFRVNSDGKTLHRNIFSWNKVANVLFLESPAGVGFSYSNKSKDYDTNGDKKTAADNYLFLVNWLERYPEYKERDFYIAGESYAGHYVPQFAHTILYHNKKANKKIINLKGILIGNAVINEETDSDGLYDYLASHAIISDKAAYLNKACDSSSSKIQESVCDAAGDELGEDIEYIDLYNIYAPLCKNANLTALPKRNTIVTDPCSENYVYAYLNRKDVQEALHANVTNLKHDWEPCSDVITKWVDQASTVLPLLHEFLNNSLRVWIFSGDTDGRVPITSTKYSVKKMNLPIKSVWHPWFSYGEVGGYVEVYKGGLTLATVREAGHQVPSYQPARALTLIKYFLDGTPLPGPPKRKD

SEQ ID NO: 24274 - protein, 360 aa, Glycine max
MQELGPFRVNSDGKTLHRNIFSWNKVANVLFLESPAGVGFSYSNKSKDYDTNGDKKTAADNYLFLVNWLERYPEYKERDFYIAGESYAGHYVPQFAHTILYHNKKANKKIINLKGILIGNAVINEETDSDGLYDYLASHAIISDKAAYLNKACDSSSSKIQESVCDAAGDELGEDIEYIDLYNIYAPLCKNANLTALPKRNTIVTDPCSENYVYAYLNRKDVQEALHANVTNLKHDWEPCSDVITKWVDQASTVLPLLHEFLNNSLRVWIFSGDTDGRVPITSTKYSVKKMNLPIKSVWHPWFSYGEVGGYVEVYKGGLTLATVREAGHQVPSYQPARALTLIKYFLDGTPLPGPPKRKD

SEQ ID NO: 24275 - DNA, 1660 bp, Glycine max
cttagtaaaccttttaattaaggatccatccaaaaatattggtagtcagctagaagttggcaggcatatttcctcaacgcttatctaatctaattgctttatttttttaatttaatttttgttctcccccttctattgtttgattgtttttggttccccatttttggccttaaaaggtacagttttgaagaattttgaataaaattaaatgcttgagattgatgataacatccacgggtttcaatttcttctattcttcataaatttgtgctcgaatgccacttgcagaccatcagttacatggctgaacgtgttgttggcactggatcattcggaattgttttccaggtaaggataagtgaagtaattacctctttaggtgataactgttcctactttgctttccctgctgtcaagtatctcatattgcttcacaccattgggttatgttcctttttgaccggaaacaaaggcgaagtgcttggagacgggggaggcagtggctataaaaaaggtcttgcaggacaggcgatacaaaaatcgtgaactgcagttaatgcgcatgatggatcacccaaatataattaccctgagtaactatttcttctctacaacaagtagagatgaactttttctgaatttggtgatggaatatgtccctgagacgatcttccgtgttataaagcactacagtagtatgaaacagagaatgcccctaatctatgtgaaattatatacatatcaaatctttaggggactggcgtatatccacactgtaccaggaatttgccatagggatgtgaagcctcaaaatcttttagttgatccactcacacaccaagtcaagctctgtgattttgggagtgcaaaagttctggtggagggtgaatcaaacatttcatacatatgctcacggtactatcgtgccccagaactaatatttggtgcaacagaatacacaacttctgttgatatttggtcagctggttgtgtccttgcagaacttcttctaggccagcctttgttcccaggagaaaatcaggtcgatcaactcgtggaaattatcaagattcttggcactcccacccgagaagaaattcgatgcatgaatcctaattatacagatttcagattcccccatatcaaagctcatccttggcataaggtttttcacaagcgaatgcctcctgaagcaattgaccttgcatcaaggcttctccaatattccccaaaacttcgttacagtgcagtggaagcaatggcacatcctttctttgaggagcttcgcgagcccaatgcccggctacctaatggtcgttcactgcctccccttttcaactttaaaaaggaattagatggaacgccccctgaactgcttcctaagctcatcccagagcacgtcaggcggcaaactggtctcggcttcctgtactcggcagaaacccaaacccaaatgtaaagagatagtgaaacatagagtcaaccgttctagtggattagtgtgaaatacatcatggcctgcttgtggtcaaaatagaacaggggttatgcctaaatatgcacagtttttctccccttgtgaagatgtatacatgtgctggaaactcagtgtaacccggaaatgttgattatgtctaatgtctaatatttcattctagtt

SEQ ID NO: 24276 - protein, 300 aa, Glycine max
MRMMDHPNIITLSNYFFSTTSRDELFLNLVMEYVPETIFRVIKHYSSMKQRMPLIYVKLYTYQIFRGLAYIHTVPGICHRDVKPQNLLVDPLTHQVKLCDFGSAKVLVEGESNISYICSRYYRAPELIFGATEYTTSVDIWSAGCVLAELLLGQPLFPGENQVDQLVEIIKILGTPTREEIRCMNPNYTDFRFPHIKAHPWHKVFHKRMPPEAIDLASRLLQYSPKLRYSAVEAMAHPFFEELREPNARLPNGRSLPPLFNFKKELDGTPPELLPKLIPEHVRRQTGLGFLYSAETQTQM

SEQ ID NO: 24277 - protein, 298 aa, Glycine max
MMDHPNIITLSNYFFSTTSRDELFLNLVMEYVPETIFRVIKHYSSMKQRMPLIYVKLYTYQIFRGLAYIHTVPGICHRDVKPQNLLVDPLTHQVKLCDFGSAKVLVEGESNISYICSRYYRAPELIFGATEYTTSVDIWSAGCVLAELLLGQPLFPGENQVDQLVEIIKILGTPTREEIRCMNPNYTDFRFPHIKAHPWHKVFHKRMPPEAIDLASRLLQYSPKLRYSAVEAMAHPFFEELREPNARLPNGRSLPPLFNFKKELDGTPPELLPKLIPEHVRRQTGLGFLYSAETQTQM

SEQ ID NO: 24278 - protein, 297 aa, Glycine max
MDHPNIITLSNYFFSTTSRDELFLNLVMEYVPETIFRVIKHYSSMKQRMPLIYVKLYTYQIFRGLAYIHTVPGICHRDVKPQNLLVDPLTHQVKLCDFGSAKVLVEGESNISYICSRYYRAPELIFGATEYTTSVDIWSAGCVLAELLLGQPLFPGENQVDQLVEIIKILGTPTREEIRCMNPNYTDFRFPHIKAHPWHKVFHKRMPPEAIDLASRLLQYSPKLRYSAVEAMAHPFFEELREPNARLPNGRSLPPLFNFKKELDGTPPELLPKLIPEHVRRQTGLGFLYSAETQTQM

SEQ ID NO: 24279 - DNA, 1415 bp, Glycine max
atgctttggttagagtttgatttcggtataggaaaaagtgaagctagcaagaacgaaaggttggctcagattgcaatattttaaggctcaagagaatcaaagactccttggcatatttaacttttaagacggcaaaaaatgtttccattttctgctcaagctatctcagatagatagccataaagtttgtcaagttaatgtgatgttttctgcataaaaattacttggatgttgtgttttctcttcatttaagaatggaaaagattccaaatgcaggatttacacgtgttttcggttttccaatggaaatgaagaatgaggatcagatcacacaacaggctcagagaccaaaatatgattgccttctatttgatttagatgatactttgtatcctctcaattctggtcttgcaaatgcaattgacaaaaatattaaagactacatggtcgagaagcttggcgcagaaccaagtaaaactggtgaattggtcaacctcctttacagtaactatggaactactattgctggtctaagggctattggatatgacattgactatgaagaatattacagttttgttcatgggaaattaccttatgagaacttaaagccagacccagttctgaggaatctgctgctgagtctcccctatagaaagcttattttcacaaactcagacaaagtccatacgattaaggcacttgaaagacttgggttggaagactgctttgaaggaatgatatgctttgagacccttaatcctatccaaaagagcactgttttttattatgaagctgacataaagtttgagggttcaaagagcataaatccaacacccaaaaatggtgtagaatgctctgaaatctttgacatcatagagcattttgctcaacctgaacccagtgcagtcctgccagagacaccaattatctgcaaaccatccgaacatgccattaaattggccctcaagatggccaaccttaacccacaaagaaccttgttctttgaggatagtgtccgcaacatacaatctggaaaacgattgggccttcacactgtgttggttggtagatcctacagggttaaaggtgctgattatgccatggaaagcattcacaaccttaaggaggcagtgcctgaactgtgggaagctgacataaaagcacaagttgcatgcccgggaactgagaagcttgcagtggagacatcagatatagcttgagacttcgcaagaatgccccttttagtatcgttaataaattgaaaatctatgtagaaataaagaagcagtcagccacagggttttccatcttcaaatgtttttttttaaatctataggatcattgcattcaatatcagagatttgataacattcacagatcctattcaatcaatgatttagatttcttcgttc

SEQ ID NO: 24280 - protein, 322 aa, Glycine max
MEKIPNAGFTRVFGFPMEMKNEDQITQQAQRPKYDCLLFDLDDTLYPLNSGLANAIDKNIKDYMVEKLGAEPSKTGELVNLLYSNYGTTIAGLRAIGYDIDYEEYYSFVHGKLPYENLKPDPVLRNLLLSLPYRKLIFTNSDKVHTIKALERLGLEDCFEGMICFETLNPIQKSTVFYYEADIKFEGSKSINPTPKNGVECSEIFDIIEHFAQPEPSAVLPETPIICKPSEHAIKLALKMANLNPQRTLFFEDSVRNIQSGKRLGLHTVLVGRSYRVKGADYAMESIHNLKEAVPELWEADIKAQVACPGTEKLAVETSDIA

SEQ ID NO: 24281 - protein, 306 aa, Glycine max
MEMKNEDQITQQAQRPKYDCLLFDLDDTLYPLNSGLANAIDKNIKDYMVEKLGAEPSKTGELVNLLYSNYGTTIAGLRAIGYDIDYEEYYSFVHGKLPYENLKPDPVLRNLLLSLPYRKLIFTNSDKVHTIKALERLGLEDCFEGMICFETLNPIQKSTVFYYEADIKFEGSKSINPTPKNGVECSEIFDIIEHFAQPEPSAVLPETPIICKPSEHAIKLALKMANLNPQRTLFFEDSVRNIQSGKRLGLHTVLVGRSYRVKGADYAMESIHNLKEAVPELWEADIKAQVACPGTEKLAVETSDIA

SEQ ID NO: 24282 - protein, 304 aa, Glycine max
MKNEDQITQQAQRPKYDCLLFDLDDTLYPLNSGLANAIDKNIKDYMVEKLGAEPSKTGELVNLLYSNYGTTIAGLRAIGYDIDYEEYYSFVHGKLPYENLKPDPVLRNLLLSLPYRKLIFTNSDKVHTIKALERLGLEDCFEGMICFETLNPIQKSTVFYYEADIKFEGSKSINPTPKNGVECSEIFDIIEHFAQPEPSAVLPETPIICKPSEHAIKLALKMANLNPQRTLFFEDSVRNIQSGKRLGLHTVLVGRSYRVKGADYAMESIHNLKEAVPELWEADIKAQVACPGTEKLAVETSDIA

SEQ ID NO: 24283 - DNA, 1504 bp, Glycine max
cctgaagtgaaaaaatagttgaaataaaattcgcttactgagttggttactactattgttcttaaacattgattagatacagtaatttcaaaattagattttgtgatattatgagttgtgagactatgctaacttacattgatttaaactttcccaaacactgttgcttgcggattagaatcataatcatatatcacacaaaacctgatgaactgcttagtttgctgcaaggcattcctgtataaactagttacggttatgaactttaggcagcatcatgctaatgaaatatatgaaaccaagatattctaagcaaagactagtttcaattgagcatgaatggagaagctgtgtcatgcaattgtgacacatgaaacataattttggtggcaacatagtggtgagacaggtatagatgggaaaacaccagttggaatcattttagtgagtgaagatgaaacaagtttttgggacttgaaagataataagctgctttggagttgcacctttttttcaaaatgtcatttatttggctgcagagtagttccagtattttagccaaaatcttcctttctgcttgggtgggcatgtaccctttgacatgctatgatgttttttctttttcctttcttgtagtatcgcttgtagcaccaagaggatttctggtcctcctgttttgtatttcaacattgcaagatgattttgttgctcaaacatatgtagcactggccaaatgttatgcttgctataatccttttgttcaacaactgtgtttagagctaagctgaatatattaagctcaatattgttctcatgtttctgataccccctcctatctttttcttttacaattgaacaatgaagtgaatattttttatgttgataaaatgatattatcacctctaacttattacttcttttggtttcttgtgttgaaaaaccaaaatagtgggccgttctctgttcggtggattaagcaacagttcccctggtttatttaccacattacatgagatgacatgcaaaaatatgttttctcagcaacaacgtaccttcatacagatgaggactgttctcaaggttgtggataactcgggggctaaaaaggtgatgtgcatacaggcattgaaagggaagaaaggggcaagattaggtgacacaataatagcatctgtgaaggaagcacatcctaatggaaaagtgaagaaaggaaaggttgtatatggggtagtggtgcgtgcggcaatgcaaaaggggcgttgtgatggcagtgaagtcaagtttgatgataatgctgtggtgcttgttgacaagcaaggccaacctattggaaccagagtttttggaccagtgcctcatgagctaaggcaaaagaagcatgtcaagattcttaccttggcagggcacattgcataaatgagaaaaagggctgtccttgagttttgttatgaattcaaatgtcacatctaccatttttatatttggatattttgatgtgatgtgc

SEQ ID NO: 24284 - protein, 133 aa, Glycine max
MTCKNMFSQQQRTFIQMRTVLKVVDNSGAKKVMCIQALKGKKGARLGDTIIASVKEAHPNGKVKKGKVVYGVVVRAAMQKGRCDGSEVKFDDNAVVLVDKQGQPIGTRVFGPVPHELRQKKHVKILTLAGHIA

SEQ ID NO: 24285 - protein, 128 aa, Glycine max
MFSQQQRTFIQMRTVLKVVDNSGAKKVMCIQALKGKKGARLGDTIIASVKEAHPNGKVKKGKVVYGVVVRAAMQKGRCDGSEVKFDDNAVVLVDKQGQPIGTRVFGPVPHELRQKKHVKILTLAGHIA

SEQ ID NO: 24286 - protein, 117 aa, Glycine max
MRTVLKVVDNSGAKKVMCIQALKGKKGARLGDTIIASVKEAHPNGKVKKGKVVYGVVVRAAMQKGRCDGSEVKFDDNAVVLVDKQGQPIGTRVFGPVPHELRQKKHVKILTLAGHIA

SEQ ID NO: 24287 - DNA, 1499 bp, Glycine max
aataattcaaagctccttggtcatcttatcatgactagatttgaagtggttttcatcgctaccccagccctcggcaaccttgttccaattgtggaattcgcggatctcctaaccaaacacaaccctcaattatctgcaaccgttctcactgtcaccacgccgcaacgacccctcataagcacctacgtccaatcccgcgcctcctcagccactaatctcaaactcctccacctccctacagtggacccacccacacccgaccagtaccaatccttcatcgccttcgtctccctccacatccaaaatcacaaacaccaggtcaagaacgagctcctcaacctcaaaaaaaacgagtcaaactcgtttgactcggttcgactcgtcgctctcttcgtcgacatgttctccaccacgctcatcgacgtcgccgccgagctcgccgtcccgtgctacctcttcttcgcgtcaccggcgagcttcctcggcttcacgctccacctcgaccgagtcgacccggtcgagtcggaatccgagttggcggttccgagttttgaaaaccccttgccacggtccgttttgcccaacctcgtgttggacgcgaacgacgcgttttcttgggtggcataccacgcgagaaggtacagggaaacaaagggcatcttcgtgaatacggttcaagagcttgaacctcacgcgcttcagtcactctacaacgattcggaattgccacgcgtttatccaattgggccggttcttgaccttgttggatcgaaccaatgggatccgaacccggcccaatacaagcgaattatggagtggcttgatcagcagcctgtgtcttcagtggtttttgtctgcttcgggagcatgggaagcttaaaggcaaaccaggtggaggagattgcaactgggcttgaaatggctaatgttagattcttatgggctttgcgggagcctccgaaggcccaattggaagacccgagagattacacaaaccccaaggacgtgctaccagatggatttcttgaacgaacggctgagatgggtttggtgtgtgggtgggtcccacaagcggtggtgttggcccacaaggccgtagggggtttcgtgtcgcattgtggttggaactcgatattagagagcttgtggcatggtgtaccgattgccacgtggccggtgtacgctgagcaacaaatgaacgcgtttcaaatggttagggaattgggattagcggtggagattagggtagattatagggtgggtggggatctggtgcgggcagaagaagtgctgaatggcgtgaggtcgctgatgaagggtgctgatgagatccaaaaaaaggtgaaagagatgagtgacatctgtagaagcgcattgatggagaacaggtcatcttacaataatctagtgttcctaattcaacacttgacaagttgaacaacccatgcaatcaactgcttttttagggattaaataataaagtttcataagtatggatt

SEQ ID NO: 24288 - protein, 478 aa, Glycine max
NNSKLLGHLIMTRFEVVFIATPALGNLVPIVEFADLLTKHNPQLSATVLTVTTPQRPLISTYVQSRASSATNLKLLHLPTVDPPTPDQYQSFIAFVSLHIQNHKHQVKNELLNLKKNESNSFDSVRLVALFVDMFSTTLIDVAAELAVPCYLFFASPASFLGFTLHLDRVDPVESESELAVPSFENPLPRSVLPNLVLDANDAFSWVAYHARRYRETKGIFVNTVQELEPHALQSLYNDSELPRVYPIGPVLDLVGSNQWDPNPAQYKRIMEWLDQQPVSSVVFVCFGSMGSLKANQVEEIATGLEMANVRFLWALREPPKAQLEDPRDYTNPKDVLPDGFLERTAEMGLVCGWVPQAVVLAHKAVGGFVSHCGWNSILESLWHGVPIATWPVYAEQQMNAFQMVRELGLAVEIRVDYRVGGDLVRAEEVLNGVRSLMKGADEIQKKVKEMSDICRSALMENRSSYNNLVFLIQHLTS

SEQ ID NO: 24289 - protein, 468 aa, Glycine max
MTRFEVVFIATPALGNLVPIVEFADLLTKHNPQLSATVLTVTTPQRPLISTYVQSRASSATNLKLLHLPTVDPPTPDQYQSFIAFVSLHIQNHKHQVKNELLNLKKNESNSFDSVRLVALFVDMFSTTLIDVAAELAVPCYLFFASPASFLGFTLHLDRVDPVESESELAVPSFENPLPRSVLPNLVLDANDAFSWVAYHARRYRETKGIFVNTVQELEPHALQSLYNDSELPRVYPIGPVLDLVGSNQWDPNPAQYKRIMEWLDQQPVSSVVFVCFGSMGSLKANQVEEIATGLEMANVRFLWALREPPKAQLEDPRDYTNPKDVLPDGFLERTAEMGLVCGWVPQAVVLAHKAVGGFVSHCGWNSILESLWHGVPIATWPVYAEQQMNAFQMVRELGLAVEIRVDYRVGGDLVRAEEVLNGVRSLMKGADEIQKKVKEMSDICRSALMENRSSYNNLVFLIQHLTS

SEQ ID NO: 24290 - protein, 345 aa, Glycine max
MFSTTLIDVAAELAVPCYLFFASPASFLGFTLHLDRVDPVESESELAVPSFENPLPRSVLPNLVLDANDAFSWVAYHARRYRETKGIFVNTVQELEPHALQSLYNDSELPRVYPIGPVLDLVGSNQWDPNPAQYKRIMEWLDQQPVSSVVFVCFGSMGSLKANQVEEIATGLEMANVRFLWALREPPKAQLEDPRDYTNPKDVLPDGFLERTAEMGLVCGWVPQAVVLAHKAVGGFVSHCGWNSILESLWHGVPIATWPVYAEQQMNAFQMVRELGLAVEIRVDYRVGGDLVRAEEVLNGVRSLMKGADEIQKKVKEMSDICRSALMENRSSYNNLVFLIQHLTS

SEQ ID NO: 24291 - DNA, 1538 bp, Glycine max
actctcaaatttgtgtcagccaacattcccatcatcttgttaactttatccaaaccatcacaaaaaccacaacatttccagcttctgctactgtgaagcacaccctgtaccatgaccatccatctgctatatctgccaaatatcgcctacacaccctgcagcaatcacctcactgctcatcaccaccacaaagccgccttcaatctcaattctcaactaaacaacacctctcctttcacagtgagcaccacctcctcaatggatagttcccaacacctcagccccacattccacgtcttgaaccaaaatagctgcacaacattctctgagacaaattttcaccatcctcaacctttgtggcattgacattcttgccactaaactaaccttctcactggaatttaccattcttgagtggatcactctctagagttgcatgaaccactatcaatggaactttccacttctgagaaaaataagagagatgtggcaaacctttgctgctaggatggaggagaatgagagaagaacaagggaaagggtttagggcttatatttctgaaatttatagttcatgttcttggtgaggcttttgtttttaccacaaatgatcatggaggtagtataaagtgctactggaatcaccttgtttctccaaacttgtggacattgtctgagtcattcatgattgtagttgtttataactctcatgttagattttgaaaaagacatgcttttaagttttcaccttgacttcaaccttatatctcattgcctgttgttggtttttggtaatatatattttttcacagattccaacaaatcctgctggtcttattgaatatagggcacatccattctggatccagaaatattgccctactcacgaacatgatggtactacacgctgttgcagctgcgagcgaatggaggttagtatggatggagtatatttatctgataaaatattatttgtagtcttgcctagggaaaggtggatgaacttgtacagtgcaaagtgaatagaatgtaaaattttctctcatcatatgcagtcccaagaggcaggatatattgctcttaaggatggccggaagctctgcttagagtgtcttgattctgctatcatggatactaatgaatgccaaccccttcatgctgatatacaaagattttatgaaagcctaaatatgaaactggaccaacaaattccacttctattggttgaaagacaagcactgaatgaagcaagagaaggagagaagaatgtaagagaaaatgcatttccatctgtttgctataaatataataactgataatttgattgtaatgacattcagctgtctgacatactaggaactattttttggtgtttggcattgtctgcacaactaatattaaaagtaaaataatgccttttgctattgatagctttgagaatgctatctctgatgaaggtttttctattcgtgatatgttaaccacatgctatgtcaaatagttcaatatgactagcacgatatagaaaatttaagagt

SEQ ID NO: 24292 - protein, 88 aa, Glycine max
MQSQEAGYIALKDGRKLCLECLDSAIMDTNECQPLHADIQRFYESLNMKLDQQIPLLLVERQALNEAREGEKNVRENAFPSVCYKYNN

SEQ ID NO: 24293 - protein, 87 aa, Glycine max
SQICVSQHSHHLVNFIQTITKTTTFPASATVKHTLYHDHPSAISAKYRLHTLQQSPHCSSPPQSRLQSQFSTKQHLSFHSEHHLLNG

SEQ ID NO: 24294 - protein, 84 aa, Glycine max
MTIHLLYLPNIAYTPCSNHLTAHHHHKAAFNLNSQLNNTSPFTVSTTSSMDSSQHLSPTFHVLNQNSCTTFSETNFHHPQPLWH

SEQ ID NO: 24295 - DNA, 916 bp, Glycine max
ctccctcccactccctccaccgatgattccgacgccgccatgcatctctccaatcctagggttctggtcgtcgtcgagaaaggagcacacgtcaatataatcgaggactttcccgcttctccagagaatcagaatgactcttactggagtaatgccgcatttgaggcagtgattggtcaaggtgcaaagcttacgcattcttatattcaaactcagtctttccgtgctgctcacatcaaatggacctccattcgccaggaagcttctagtacatatgagcttacagaggtaagcacgggaggaaaactggggaggcacaatcttcatatccagcaattgggcccagacaccgtcactgagttatcaactttgcacttgtctgttgctgatcaaacgcaggatctccacagtactcttgtgttggatcatccacgcggctattctcggcaactccataaatgcattgttacacattcacagggacaagcagttttttgatggaaacattaaggttaacaggtatgctcagcagacagatgcaggacagttaacaagaacccttctgcttgaacctcgtgcgactgtaaatgttaaaccgaatcttcagattgtggctgatgatgttaagtgctcccatggagctgctataagcgacctggaagaaagtcaactcttatatttccaagctcgcggcattgacatagagactgctagaagagttctggtttttgcttttgggagtgaggtgatagataagtttccttattcttccattagagacagagtgcgtagtcagattaagaatttgttggatccatcatcgaattgatcatcattttaggggtgtcctgaatgtaaacattttaagctacctgatacaatgataaactgaaatcacaatgaaaatcgtttcccc

SEQ ID NO: 24296 - protein, 165 aa, Glycine max
LPPTPSTDDSDAAMHLSNPRVLVVVEKGAHVNIIEDFPASPENQNDSYWSNAAFEAVIGQGAKLTHSYIQTQSFRAAHIKWTSIRQEASSTYELTEVSTGGKLGRHNLHIQQLGPDTVTELSTLHLSVADQTQDLHSTLVLDHPRGYSRQLHKCIVTHSQGQAVF

SEQ ID NO: 24297 - protein, 152 aa, Glycine max
MHLSNPRVLVVVEKGAHVNIIEDFPASPENQNDSYWSNAAFEAVIGQGAKLTHSYIQTQSFRAAHIKWTSIRQEASSTYELTEVSTGGKLGRHNLHIQQLGPDTVTELSTLHLSVADQTQDLHSTLVLDHPRGYSRQLHKCIVTHSQGQAVF

SEQ ID NO: 24298 - DNA, 1318 bp, Glycine max
actcacacactctttcttaagttctcagaaaccttaaaaacaacaacgtaggagtgttcggaaaagatggctaagcaggaagtggtggaagggttcaagttcgagcagaggcacgggaaagaacgcgtgagagtggcgcgcgtgtggaagacgaggcaggggcagcacttcattgtggagtggcgcgtggggatcactctcttttcggattgcgtcaactcgtacctccgcgatgacaactctgacatcgttgctactgataccatgaaaaacaccgtgtatgcaaaagcaaaggaatgctctgacatactttctgccgaggagtttgctattctgcttgctaagcactttgtatcattttaccagaaggttactggtgctattgtgaatattgtggaaaaaccatgggagcgtgtcactgtggatggtcaacctcatgaacatggtttcaaacttgggtctgagaagcatacaacagaggcgatagtacaaaagtctggttcacttcagttgacttctggtattgaaggattgtcagtgttgaagacaacccagtctggttttgtgaatttcataagagacaagtacacagcacttcctgatacccgtgaaaggatggtagcaacagaagtaaccgcactgtggaggtattcgtatgaatcgctgtatagcctccctcagaagccgctttactttacagaaaagtatcaggaagtgaaaaaagttctggctgacactttttttggcccaccaaaagggggagtctatagcccatctgttcaaaacacactctacctgatggcaaaggccacactgaacaggtttcctgacatagcttatgtcagtctaaagttgccaaatcttcatttcatacctgtcaatatctcaaaccaggatggccctattgtgaagtttgaggatgatgtgtacttgccaacggatgagccacatgggtcaattcaagctagtttgagccgcctttggtcaaagctgtagaaactgcagaaactatggtgctcatcccttctggtggattgctagtgcagcctaaactagcaaacctggcctcagataatgctttccattaatgtgtcttgtaattctggtttttgttatctttatcttttgttttgtttcatgaagaactattatgcatgaataacttccaggagggatattctgtgggttgcaccaatgttaagctttttgtttctactattccaataatttcctagtgtccttgtggaatctgaaataagtcttactatgacgttgatgcaatgcttttttatggtcatataaagatggtcatactcgc

SEQ ID NO: 24299 - protein, 309 aa, Glycine max
MAKQEVVEGFKFEQRHGKERVRVARVWKTRQGQHFIVEWRVGITLFSDCVNSYLRDDNSDIVATDTMKNTVYAKAKECSDILSAEEFAILLAKHFVSFYQKVTGAIVNIVEKPWERVTVDGQPHEHGFKLGSEKHTTEAIVQKSGSLQLTSGIEGLSVLKTTQSGFVNFIRDKYTALPDTRERMVATEVTALWRYSYESLYSLPQKPLYFTEKYQEVKKVLADTFFGPPKGGVYSPSVQNTLYLMAKATLNRFPDIAYVSLKLPNLHFIPVNISNQDGPIVKFEDDVYLPTDEPHGSIQASLSRLWSKL

SEQ ID NO: 24300 - protein, 243 aa, Glycine max
MKNTVYAKAKECSDILSAEEFAILLAKHFVSFYQKVTGAIVNIVEKPWERVTVDGQPHEHGFKLGSEKHTTEAIVQKSGSLQLTSGIEGLSVLKTTQSGFVNFIRDKYTALPDTRERMVATEVTALWRYSYESLYSLPQKPLYFTEKYQEVKKVLADTFFGPPKGGVYSPSVQNTLYLMAKATLNRFPDIAYVSLKLPNLHFIPVNISNQDGPIVKFEDDVYLPTDEPHGSIQASLSRLWSKL

SEQ ID NO: 24301 - DNA, 592 bp, Glycine max
attaatataaacagtgtatctttgaagacatatgcctatgatgatacatcattgggatcatggatgatgggcgtccaagcaacttacatagatgacagtcggctttgctgcagtagtatcagacaagacaaggtatgctccttggcttgattggaggatcacaagcacattcttccctactcttatgggaactcacacaatttgtctgaaaatcagtatcagttgaacattatgttcactcttttcagttgcatactgccttgagagctttgtagacaatatcaatataattcctttctagatccagttatctgttcattcttttagatgctagcagcgaaattgagggataactactgattacggagttcagcccttggtgctcaattgctatttccgggggtgatatgattgtacttttactctgctattggatatacacaacttctgttgatgaccaaatattgaagagaaaaaaaaactatatacaaaatattgatgtattgaaccgctgacgaactaattgtagactttgttgcactgaaattttgctgcaactcaatttatttatgatgcttttgcctttcgtatt

SEQ ID NO: 24302 - protein, 49 aa, Glycine max
ININSVSLKTYAYDDTSLGSWMMGVQATYIDDSRLCCSSIRQDKVCSLA

SEQ ID NO: 24303 - protein, 44 aa, Glycine max
MTVGFAAVVSDKTRYAPWLDWRITSTFFPTLMGTHTICLKISIS

SEQ ID NO: 24304 - protein, 35 aa, Glycine max
MIVLLLCYWIYTTSVDDQILKRKKNYIQNIDVLNR

SEQ ID NO: 24305 - DNA, 1810 bp, Glycine max
attacagattcaattgcttaattaaatactattttcccctccttctataataccctccaaaatctttttccttcttcattctccctttctctatgttttggcaaaccactttaggtaaccagattactactactattgcttcatatacaaagatgctatcgtaaaaaagagagaaacttgggaagtgggaacacattcaaaatccttgtttttctttttggtctaatttttcatctcaaaacacacccattgagtatttttcatttttttgttcttttgggacaaaaaaggtgggtgttgttggcattattgaagatagaggcccccaaaatgaagaggtctccagcatcttcttgttcatcatctacttcctctgttgggtttgaagctcccattgaaaaaagaaggcctaagcatccaaggaggaataatttgaagtcacaaaaatgcaagcagaaccaaaccaccactggtggcagaagaagctctatctatagaggagttacaaggcataggtggacagggaggtttgaagctcacctatgggataagagctcttggaacaacattcagagcaagaagggtcgacaaggggcatatgatactgaagaatctgcagcccgtacctatgaccttgcagcccttaaatactggggaaaagatgcaaccctgaatttcccgatagaaacttataccaaggagctcgaggaaatggacaaggtttcaagagaagaatatttggcttctttgcggcgccaaagcagtggcttttctagaggcctgtctaagtaccgtggggttgctaggcatcatcataatggtcgctgggaagcacgaattggaagagtatgcggaaacaagtacctctacttggggacatataaaactcaagaggaggcagcagtggcatatgacatggcagcaatagagtaccgtggagtcaatgcagtgaccaattttgacataagcaactacatggacaaaataaagaagaaaaatgaccaaacccaacaacaacaaacagaagcacaaacggaaacagttcctaactcctctgactctgaagaagtagaagtagaacaacagacaacaacaataaccacaccacccccatctgaaaatctgcacatgccaccacagcagcaccaagttcaatacaccccccatgtctctccaagggaagaagaatcatcatcactgatcacaattatgaaccatgtgcttgagcaggatctgccatggagcttcatgtacactggcttgtctcagtttcaagatccaaacttggctttctgcaaaggtgatgatgacttggtgggcatgtttgatagtgcagggtttgaggaagacattgattttctgttcagcactcaacctggtgatgagactgagagtgatgtcaacaatatgagcgcagttttggatagtgttgagtgtggagacacaaatggggctggtggaagcatgatgcatgtggataacaagcagaagatagtatcatttgcttcttcaccatcatctacaactacagtttcttgtgactatgctctagatctatgatctcttcagaagggtgatggatgacctacatggaatggaaccttgtgtagattattattgggtttgttatgcatgttgttggggtttgttgtgataggttggtggatgggtgtgacttgtgaaaatgttcattggttttaggattttcctttcatccatactccgttatcgaaagaagaaaatgttcattttagacttggattttagtataaaaaaaaaggagaaaaaaccaaaaatgtgatttgggtgc

SEQ ID NO: 24306 - protein, 409 aa, Glycine max
MKRSPASSCSSSTSSVGFEAPIEKRRPKHPRRNNLKSQKCKQNQTTTGGRRSSIYRGVTRHRWTGRFEAHLWDKSSWNNIQSKKGRQGAYDTEESAARTYDLAALKYWGKDATLNFPIETYTKELEEMDKVSREEYLASLRRQSSGFSRGLSKYRGVARHHHNGRWEARIGRVCGNKYLYLGTYKTQEEAAVAYDMAAIEYRGVNAVTNFDISNYMDKIKKKNDQTQQQQTEAQTETVPNSSDSEEVEVEQQTTTITTPPPSENLHMPPQQHQVQYTPHVSPREEESSSLITIMNHVLEQDLPWSFMYTGLSQFQDPNLAFCKGDDDLVGMFDSAGFEEDIDFLFSTQPGDETESDVNNMSAVLDSVECGDTNGAGGSMMHVDNKQKIVSFASSPSSTTTVSCDYALDL

SEQ ID NO: 24307 - protein, 282 aa, Glycine max
MDKVSREEYLASLRRQSSGFSRGLSKYRGVARHHHNGRWEARIGRVCGNKYLYLGTYKTQEEAAVAYDMAAIEYRGVNAVTNFDISNYMDKIKKKNDQTQQQQTEAQTETVPNSSDSEEVEVEQQTTTITTPPPSENLHMPPQQHQVQYTPHVSPREEESSSLITIMNHVLEQDLPWSFMYTGLSQFQDPNLAFCKGDDDLVGMFDSAGFEEDIDFLFSTQPGDETESDVNNMSAVLDSVECGDTNGAGGSMMHVDNKQKIVSFASSPSSTTTVSCDYALDL

SEQ ID NO: 24308 - protein, 214 aa, Glycine max
MAAIEYRGVNAVTNFDISNYMDKIKKKNDQTQQQQTEAQTETVPNSSDSEEVEVEQQTTTITTPPPSENLHMPPQQHQVQYTPHVSPREEESSSLITIMNHVLEQDLPWSFMYTGLSQFQDPNLAFCKGDDDLVGMFDSAGFEEDIDFLFSTQPGDETESDVNNMSAVLDSVECGDTNGAGGSMMHVDNKQKIVSFASSPSSTTTVSCDYALDL

SEQ ID NO: 24309 - DNA, 1665 bp, Glycine max
atagaatttctgaaacaaagaatcttccctctatttctccccaattttccatcaccatttttcctcaaatttctcttcttcttcatccagaaaatgaatcccaatcccaacaccaacgatttccctctcctctcccaccttcttaaccaccttgatccccaaacacacccacccctccccgcagagctagaccaatctctattaacccaattccctcacttgaaccaccccagcgtgttatcctcactcgcccgtcacgcctccaccctcaacgtcacccccacactctccctcctccgcaccctcggcccccgcccagacccctccgctgtcgccgccgcccgcgccaggatcgccgacccccacgcgcgcgaggacggcggcgaggcccacgtggtccacgcgctggtgcgcgtggacgacacgcacgaggagtgcgtgaagcagctgagagcctccgagaaaaagctcctcgaggcctatgctgaatcggtgaaaggggtcgttgaagaagtgagcgaaggagtggttagggtattgaagaaagcggagagtgaggaagtggaaagggttgatctctctgggtcccacttgaggattctccccgaagcgttcgggaagattcgtggcctcgttgtgcttaatttgtctcagaatcagttagaggtgattcctgattcaatagcaggactacagaggcttgtggagctggatgtttcatctaatgttttagagtccctacctgactctattggattgttggttaatctgaagatctttaatgtgtcagcaaacaagctaactgctcttcctgaatccattgctctttgcaggtcactagtcgaattggatgcaagctttaacaacttaatgtgtctgccaacgaacatgggttttggacttgttaaccttgagaagctcttgatccatttgaacaagatacgatttcttcccgcctccattggagaaatgaaatctctcaggcatcttgatgttcatttcaatgagcttcatggcctacctcaatccattgggaaactcacaaatctggaatatctgaatgttagcagtaactttagtgacatgacagagctacctgaaacacttggtgatctggtcaacttaagggagcttgacctcagcaacaaccaaatccgagctcttccttactcgttcggtaggcttgaaaaattgacaaagctcaacctggaccagaatccaatcatagttcccccaattgaggttgtaaatcaaggggctgaggctgtgaaggagttcatggccaagtggtggctcgatctcattgaagaagctcaacagaaaagcatgtccgaaacacaaaatcagcaagcacagacaggatggctcgcatggggagcctcattgttgaataatgttgctgaagtttctgaaagtgttgcagaatattttggcgctaaaaaagctcctagagacccatggttggatcaacagctgtgatacaagaatatctggactctgcctacatacactgggtttataatttcgtgggatgtatagtttgtgatatagcttttggactcttgttaccactgtaatcaatacttttgtttttcatcttttttttttttttttacttgcagttatacttacacggtataatttgtttggcattactgtctgatc

SEQ ID NO: 24310 - protein, 492 aa, Glycine max
IEFLKQRIFPLFLPNFPSPFFLKFLFFFIQKMNPNPNTNDFPLLSHLLNHLDPQTHPPLPAELDQSLLTQFPHLNHPSVLSSLARHASTLNVTPTLSLLRTLGPRPDPSAVAAARARIADPHAREDGGEAHVVHALVRVDDTHEECVKQLRASEKKLLEAYAESVKGVVEEVSEGVVRVLKKAESEEVERVDLSGSHLRILPEAFGKIRGLVVLNLSQNQLEVIPDSIAGLQRLVELDVSSNVLESLPDSIGLLVNLKIFNVSANKLTALPESIALCRSLVELDASFNNLMCLPTNMGFGLVNLEKLLIHLNKIRFLPASIGEMKSLRHLDVHFNELHGLPQSIGKLTNLEYLNVSSNFSDMTELPETLGDLVNLRELDLSNNQIRALPYSFGRLEKLTKLNLDQNPIIVPPIEVVNQGAEAVKEFMAKWWLDLIEEAQQKSMSETQNQQAQTGWLAWGASLLNNVAEVSESVAEYFGAKKAPRDPWLDQQL

SEQ ID NO: 24311 - protein, 461 aa, Glycine max
MNPNPNTNDFPLLSHLLNHLDPQTHPPLPAELDQSLLTQFPHLNHPSVLSSLARHASTLNVTPTLSLLRTLGPRPDPSAVAAARARIADPHAREDGGEAHVVHALVRVDDTHEECVKQLRASEKKLLEAYAESVKGVVEEVSEGVVRVLKKAESEEVERVDLSGSHLRILPEAFGKIRGLVVLNLSQNQLEVIPDSIAGLQRLVELDVSSNVLESLPDSIGLLVNLKIFNVSANKLTALPESIALCRSLVELDASFNNLMCLPTNMGFGLVNLEKLLIHLNKIRFLPASIGEMKSLRHLDVHFNELHGLPQSIGKLTNLEYLNVSSNFSDMTELPETLGDLVNLRELDLSNNQIRALPYSFGRLEKLTKLNLDQNPIIVPPIEVVNQGAEAVKEFMAKWWLDLIEEAQQKSMSETQNQQAQTGWLAWGASLLNNVAEVSESVAEYFGAKKAPRDPWLDQQL

SEQ ID NO: 24312 - DNA, 1544 bp, Glycine max
gcatcatggagaaaataactcacatagcagttgttccaggtcctggatttagccatctaatcccaattcttgagttctccaaacggcttgttaaactccaccctctcttgcatgtcacagccttcattcccacacttgggtctctctcaagtgtctcaaaatcctttcttaaaacactctcaccaagcataaccccaactttccttccaccagtggaccccattgacataccacaggggcttgaaactgcaatccgaatgcaactcacagtgacttactctttgccctctttacacaatgctttaaagtccttgacttcaaggactccccttgtggccctagtggttgataacttcgcctatgaagcactagattttgccaaagagttcaacatgttgtcatatatttactttccaaaatcggcttttacactttcaatgtactttcacttgcccaagttggatgaagacacatcatgtgagttcaaagaccttccagaacctattcaaatgccaggttgtgtaccaatacacggccttgatctccaccaccaaattcaagatcgatcaagtcaaggttatgaacttttccttcaacgtgttaaacgtttttgcacagttgatgggattttcatcaatagctttattgaaatggaaaaagagcccataagagcattggctaaagagtggaatggctaccctcctgtttaccctattgggccgataattcaaacaggcattgagtccgatgggcccattgaattagactgcataaagtggttggacaaacaacaacctaagtctgttctatatgtttcttttgggagtggtggcacattatcacaagttcaaattattgaactagctatgggcctagaatcgagtaatcataaatttttgtgggtggtaagagcacctagtagttcagctagtagtgcttatctcagtggtcaaaatgagaatccattggaatttttaccatatggattcttggagagaaccaaggggcaaggcttggtgattctatcatgggcaccccagattgaaattctcagccatagttcaattggtgggttcatgagtcattgtggttggaattcaacccttgaaagtgtcttgcaaggtgtgccattgatagcatggcctctctttgcagagcaaagaatgaacgctgttatgctaagtgatgacctcaaagtggcactaaggctaaaagggaatggcaatggagtggtggaaaaggaagaagttgctgaagtgataaagagtctaatggaaattgaaagtggaaaaatgagaaaaataatgaagaggttgaaagaagctgctattaatgcaataaaagaagatggtagttctacaaagaccatgcatcaatcaacaattaaatggatgcaattagtaggaatataaaaggatgtagataggcctcttttgcatgtcaaggtcgtgcctaggtatttggggggctaatgtgacaccatttactccaaatacattattaaataaatattgcaaagagcataaataaagtttttgtttctg

SEQ ID NO: 24313 - protein, 469 aa, Glycine max
IMEKITHIAVVPGPGFSHLIPILEFSKRLVKLHPLLHVTAFIPTLGSLSSVSKSFLKTLSPSITPTFLPPVDPIDIPQGLETAIRMQLTVTYSLPSLHNALKSLTSRTPLVALVVDNFAYEALDFAKEFNMLSYIYFPKSAFTLSMYFHLPKLDEDTSCEFKDLPEPIQMPGCVPIHGLDLHHQIQDRSSQGYELFLQRVKRFCTVDGIFINSFIEMEKEPIRALAKEWNGYPPVYPIGPIIQTGIESDGPIELDCIKWLDKQQPKSVLYVSFGSGGTLSQVQIIELAMGLESSNHKFLWVVRAPSSSASSAYLSGQNENPLEFLPYGFLERTKGQGLVILSWAPQIEILSHSSIGGFMSHCGWNSTLESVLQGVPLIAWPLFAEQRMNAVMLSDDLKVALRLKGNGNGVVEKEEVAEVIKSLMEIESGKMRKIMKRLKEAAINAIKEDGSSTKTMHQSTIKWMQLVGI

SEQ ID NO: 24314 - protein, 468 aa, Glycine max
MEKITHIAVVPGPGFSHLIPILEFSKRLVKLHPLLHVTAFIPTLGSLSSVSKSFLKTLSPSITPTFLPPVDPIDIPQGLETAIRMQLTVTYSLPSLHNALKSLTSRTPLVALVVDNFAYEALDFAKEFNMLSYIYFPKSAFTLSMYFHLPKLDEDTSCEFKDLPEPIQMPGCVPIHGLDLHHQIQDRSSQGYELFLQRVKRFCTVDGIFINSFIEMEKEPIRALAKEWNGYPPVYPIGPIIQTGIESDGPIELDCIKWLDKQQPKSVLYVSFGSGGTLSQVQIIELAMGLESSNHKFLWVVRAPSSSASSAYLSGQNENPLEFLPYGFLERTKGQGLVILSWAPQIEILSHSSIGGFMSHCGWNSTLESVLQGVPLIAWPLFAEQRMNAVMLSDDLKVALRLKGNGNGVVEKEEVAEVIKSLMEIESGKMRKIMKRLKEAAINAIKEDGSSTKTMHQSTIKWMQLVGI

SEQ ID NO: 24315 - protein, 384 aa, Glycine max
MQLTVTYSLPSLHNALKSLTSRTPLVALVVDNFAYEALDFAKEFNMLSYIYFPKSAFTLSMYFHLPKLDEDTSCEFKDLPEPIQMPGCVPIHGLDLHHQIQDRSSQGYELFLQRVKRFCTVDGIFINSFIEMEKEPIRALAKEWNGYPPVYPIGPIIQTGIESDGPIELDCIKWLDKQQPKSVLYVSFGSGGTLSQVQIIELAMGLESSNHKFLWVVRAPSSSASSAYLSGQNENPLEFLPYGFLERTKGQGLVILSWAPQIEILSHSSIGGFMSHCGWNSTLESVLQGVPLIAWPLFAEQRMNAVMLSDDLKVALRLKGNGNGVVEKEEVAEVIKSLMEIESGKMRKIMKRLKEAAINAIKEDGSSTKTMHQSTIKWMQLVGI

SEQ ID NO: 24316 - DNA, 679 bp, Glycine max
aaaaaaattcatccccatcaaaacacaagcaaatcctaaaaagttgattgagatatatagaaactagcttcaatttcacaaaatgaagaaagtgtttgtcacatttttagctgtgctagttgtatttgttcttacagcgaaagcttcagaggcacgactaccagttaaaacaaattcagcatcaaatgactacaattgttcacaagtctataacctgttagtttcgtgcgtagattacatgattggtggagatgatggtgccccttcaggtgtttgttgccaaagtgttaatgcagtgaaagcatcagcaccaacacaaattcaacgaatggctgcatgtaagtgctttttcgacgtagcaactcgccttccttccttgctcgaaaacaaggccaattcacttcctaaattatgtggtgttgatttgggttttatcatgagcaagcagaacaccaattgtaacaatgttcctgtaagctcaaggcaagggagagattagtacaataaaattgatgcatgtttggaagtttctttcttcttgaaaaaagaaaataaaatggtttgttgaatatacaagcgtttcatgttggaaataataatgagtggatattttctaaatgtgttcttattcatatgcatcttcatcatatagattaatatataatgtttaattaagtcg

SEQ ID NO: 24317 - protein, 138 aa, Glycine max
MKKVFVTFLAVLVVFVLTAKASEARLPVKTNSASNDYNCSQVYNLLVSCVDYMIGGDDGAPSGVCCQSVNAVKASAPTQIQRMAACKCFFDVATRLPSLLENKANSLPKLCGVDLGFIMSKQNTNCNNVPVSSRQGRD

SEQ ID NO: 24318 - protein, 86 aa, Glycine max
MIGGDDGAPSGVCCQSVNAVKASAPTQIQRMAACKCFFDVATRLPSLLENKANSLPKLCGVDLGFIMSKQNTNCNNVPVSSRQGRD

SEQ ID NO: 24319 - DNA, 874 bp, Glycine max
atctgttaaatgtaactgctccaatcagatgctatcatatctgtgagattatatacagataagcttccacaatgaattgaagggctagctattccgttttcataaagtagggaaagagatcgatcttcttcttcatctttcttctccttttctattcttggtttcttcttttagaaatgaacgtgaagggtatcatggatggtaaaattgaagctgggaacaccaattgtattgttaaggaggatgtgaatgatgattcgatatccattggatcagtatcagaagattcaatgaactctgtgtgttcatcttcttcatcagaattggctgaggatgcatcatcctcttcagcatcttatttgtcaacctcatcatcgcattcaaacggccctttgtttgaactatcagagctaatgagtcaactccctatcaagagaggcttgtctatgttttatcaagggaaggctcagtctttcagttctctagcaagcgtggagagcataggggatcttcctaagaagaaagagagattttacaggaagaaaatgaaatcatgcaaaagcttcgcgggaggcttggatagcagccacagaatatcgttcgctccaaaggctacaatatcaaagaaatcttcgagagcaacttttgtatccgtgctaactaaaagagggagtttccttggaggctccagaacttccttttctgtacagaagaacttttgatatccaaccttgttaattagagcttagttaatatttcatgcacaaaatagggaaaattttgagtccctcaccttcagcttttctcacacgaagaagtcatgtcatattgtttattggtaaataattaatatacatatgattcattaattagt

SEQ ID NO: 24320 - protein, 181 aa, Glycine max
MNVKGIMDGKIEAGNTNCIVKEDVNDDSISIGSVSEDSMNSVCSSSSSELAEDASSSSASYLSTSSSHSNGPLFELSELMSQLPIKRGLSMFYQGKAQSFSSLASVESIGDLPKKKERFYRKKMKSCKSFAGGLDSSHRISFAPKATISKKSSRATFVSVLTKRGSFLGGSRTSFSVQKNF

SEQ ID NO: 24321 - protein, 175 aa, Glycine max
MDGKIEAGNTNCIVKEDVNDDSISIGSVSEDSMNSVCSSSSSELAEDASSSSASYLSTSSSHSNGPLFELSELMSQLPIKRGLSMFYQGKAQSFSSLASVESIGDLPKKKERFYRKKMKSCKSFAGGLDSSHRISFAPKATISKKSSRATFVSVLTKRGSFLGGSRTSFSVQKNF

SEQ ID NO: 24322 - protein, 143 aa, Glycine max
MNSVCSSSSSELAEDASSSSASYLSTSSSHSNGPLFELSELMSQLPIKRGLSMFYQGKAQSFSSLASVESIGDLPKKKERFYRKKMKSCKSFAGGLDSSHRISFAPKATISKKSSRATFVSVLTKRGSFLGGSRTSFSVQKNF

SEQ ID NO: 24323 - DNA, 1585 bp, Glycine max
ttttgagtgctatgttcaatttttatgaaacttatcaatattggaatctattttatttggtcatgattcttttggttattgttctgatccggaacttagtgtatgaggaatgaggatagctgcaattttttgctgttttttgtaacttttgattctgatgcaaatgctgcattctgtttccaaaagtaaacctgcgacttggctgtaaactttcaataagatgtagagaattgggtatttgtatcaatgaatgtgtatactgccccttaatattgattgtcatttgtcttggttagatactaagatgtacagaaatgttctaattgtactgtagtggagacttttccattgttaataacaacaatgaagccttatcccacaagatgagttcaactacatagatcgcacaatgacatttggcttggttaaagaccaaatcttcacagatagcaacattatattcgggtgctgatgcagtggctctaactcatttgacacagtactgtagccatatacaacactttacttctggataacaacctagcattagcaaaaatctgttgtgtgtgatccatgtcccgtatatcgacaagttttatgttaactgcctagagcctgatacaatcctcctcctttacttgggcttgggactggctatgaaactataggcggtgttactttttcattgttaatgtttcatataatttcaagctcatgaatttgaatgtttcttgaccctccaaatataatagttgatcacaagagaatactttgtctaatttgtaatttagtttatgtcattctgcactgttaaggttggttgctttagattttaatttttcattgtttactgatagccagaacatcatgttaatgaccctgaatccgatcctgttcttcttgatgcaatccctactttgaagttcaaccaagaggctttcagttcccttgaacacacacagtgtgtaatatgtttggcagattacagagaaagagaagtattgcgcatcatgcccaaatgtggccacacttttcatctttcttgcattgatatatggctgaggaaacaatccacctgtccagtatgccgtctgccattgaaaaactcttccgaaacgaaacatgtgagacctgtgacatttaccatgagccaatcccttgacgagtctcacacatcagacagaaacgatgatattgagagatatgttgaacctacacctactgcagccagtaactctttacaaccaacttcaggagaacaagaagcaaggcaatgatcttagagaactaaaggggttgttctgctcaaaaagagaagaatgtagaatttctgcttctatagaggaatgcttctaattatagattggattcaaattctttgtctgtaatatggccttcatattcacttggtggtgtaaatatgtttccttttgtagcatatgcgggccaaggttttggtggaatttcttgcataccgatttgaagttcttttgtctatggtatcgcttactctagcaagcacactgctcttgttaatgcttaacagattaaacaaatggttgattacatattttttttcttgtac

SEQ ID NO: 24324 - protein, 88 aa, Glycine max
MPKCGHTFHLSCIDIWLRKQSTCPVCRLPLKNSSETKHVRPVTFTMSQSLDESHTSDRNDDIERYVEPTPTAASNSLQPTSGEQEARQ

SEQ ID NO: 24325 - protein, 55 aa, Glycine max
MILRDMLNLHLLQPVTLYNQLQENKKQGNDLRELKGLFCSKREECRISASIEECF

SEQ ID NO: 24326 - protein, 50 aa, Glycine max
MLNLHLLQPVTLYNQLQENKKQGNDLRELKGLFCSKREECRISASIEECF

SEQ ID NO: 24327 - DNA, 381 bp, Glycine max
attaaagcagtgtgttagagatgtgtcaactggtaatcgaatggttgctttcttgcttctggataattctcaggagtcaattatggatctcaaggaagcgtctgttgagggtggacagacgaaaattttcaagtacatggattcctttccatttccctactacattgttctgaggaacattgaagcactgcctaggactcttgcaaacttattgagacagtggatggagcttatgcaacattcaactggttgaggacttttatcgtgcaagttccattttgggagagaatctgctccctatttcatatatatagtagacccaattgtacagtgtacagatgcttcttctttgattaagaatatcatgttagctgtgcattc

SEQ ID NO: 24328 - protein, 83 aa, Glycine max
LKQCVRDVSTGNRMVAFLLLDNSQESIMDLKEASVEGGQTKIFKYMDSFPFPYYIVLRNIEALPRTLANLLRQWMELMQHSTG

SEQ ID NO: 24329 - protein, 70 aa, Glycine max
MVAFLLLDNSQESIMDLKEASVEGGQTKIFKYMDSFPFPYYIVLRNIEALPRTLANLLRQWMELMQHSTG

SEQ ID NO: 24330 - protein, 56 aa, Glycine max
MDLKEASVEGGQTKIFKYMDSFPFPYYIVLRNIEALPRTLANLLRQWMELMQHSTG

SEQ ID NO: 24331 - DNA, 1418 bp, Glycine max
acttgccttgctttgcttaggtgcgagagagagagatggatactggtatgctatgaagatgggatctcagactcagcgtcatcaccactctctttgattctcttcaatcttgagtctccaggaatcacattagctgagtatttcagagatatgggttataatgtcagtatgatggcagattctacatctagatgggcagaagcattgcgtgaaatctctggacgactggcagaaatgcctgcagatagtggatatcctgcataccttgctgcacgtttagcctcgttctatgaacgtgctgggaaggtaaaatgtcttggaggccctgaacgtacaggtagcgtaactattgttggtgctgtttcgccacctggaggagatttctcagatcctgtgacatctgcaaccctgagcatagttcaggttttctggggtttggacaaaaagcttgctcagaggaagcactttccttctgtaaactggcttatttcttattcaaaatactcaacggcacttgaaaccttttatgagcaatttgatccagattttatcaacattaggacaaaggctcgtgaagttctgcaaagggaagatgacctgaatgaaattgttcagcttgtgggcaaggatgctttagctgaaggagataagatcaccttagaaactgcaaagcttttgagagaggattatcttgctcaaaatgcctttacaccatatgacaaattctgccccttctacaagtctgtttggatgatgcgcaacattatccatttctacaatttggcaaatcaggcagtagagaggggagctggttcagatggtcagaagatatcttacacccttatcaagcatcgtatgggagatctgttctaccgattagtgtctcagaaatttgaggatccagcagaaggggaagctgctttggttgcgaaatttcagaagttacatgaggacctgactaatggtttccgcaaccttgaggacgaaacccgatgattgatgattgaagatttggtagtttgctcaaatattgtgttatttccaattgtaagacgcagtctagcatcgcagggttgcaacgtcccgagtgttctcatatttgactgctcgattcattcatatcacatttatttcctttcttggtgctggtttggcttttgatctagtctcatgtgtagctataatcatgtgtttcagtcatcctcagtttgtttattgagaataagaaacgagacttgctctttcaatatgtatttaggagaataaaattatcttaggacatgaagtgcctacagcaagcggattctggattcatataggtggaatttttggtggaagtggattatcttgaatcctgtatttcatagatggacttcttgtagcaatgagtatttaattatttattcgaaatatgttgc

SEQ ID NO: 24332 - protein, 331 aa, Glycine max
TCLALLRCERERWILVCYEDGISDSASSPLSLILFNLESPGITLAEYFRDMGYNVSMMADSTSRWAEALREISGRLAEMPADSGYPAYLAARLASFYERAGKVKCLGGPERTGSVTIVGAVSPPGGDFSDPVTSATLSIVQVFWGLDKKLAQRKHFPSVNWLISYSKYSTALETFYEQFDPDFINIRTKAREVLQREDDLNEIVQLVGKDALAEGDKITLETAKLLREDYLAQNAFTPYDKFCPFYKSVWMMRNIIHFYNLANQAVERGAGSDGQKISYTLIKHRMGDLFYRLVSQKFEDPAEGEAALVAKFQKLHEDLTNGFRNLEDETR

SEQ ID NO: 24333 - protein, 281 aa, Glycine max
MGYNVSMMADSTSRWAEALREISGRLAEMPADSGYPAYLAARLASFYERAGKVKCLGGPERTGSVTIVGAVSPPGGDFSDPVTSATLSIVQVFWGLDKKLAQRKHFPSVNWLISYSKYSTALETFYEQFDPDFINIRTKAREVLQREDDLNEIVQLVGKDALAEGDKITLETAKLLREDYLAQNAFTPYDKFCPFYKSVWMMRNIIHFYNLANQAVERGAGSDGQKISYTLIKHRMGDLFYRLVSQKFEDPAEGEAALVAKFQKLHEDLTNGFRNLEDETR

SEQ ID NO: 24334 - protein, 275 aa, Glycine max
MMADSTSRWAEALREISGRLAEMPADSGYPAYLAARLASFYERAGKVKCLGGPERTGSVTIVGAVSPPGGDFSDPVTSATLSIVQVFWGLDKKLAQRKHFPSVNWLISYSKYSTALETFYEQFDPDFINIRTKAREVLQREDDLNEIVQLVGKDALAEGDKITLETAKLLREDYLAQNAFTPYDKFCPFYKSVWMMRNIIHFYNLANQAVERGAGSDGQKISYTLIKHRMGDLFYRLVSQKFEDPAEGEAALVAKFQKLHEDLTNGFRNLEDETR

SEQ ID NO: 24335 - DNA, 1547 bp, Glycine max
gcccattctaagacttgtggcaccagagaatatagatgtgactgtggcaccctcttctccaggcgtgacagtttcatcacccacagggccttctgcgatgcactggctcaagagagtgcaagacagccacctagccttagcggcggaggaattggcagtcatctgtacggaagcaccaccaacatggccttaaacctatctcaggtcggttctcaaatctcaaccatgcaagaccctaacgcccagcccaccgagctcctccgcctgggcgccgcctccggtcgaaccggccagttcgaccacatcctcggttcacccttccgaccgtcgaaccaacaacaacaacaacaacctttcttcatgtcctccgaacccaaccaaacctaccaccaccccgaccaaaacaaacccttccaacaagggttaatgcagttgtctgatcaccttaacaacaacagccaccacaataattcacccttcagccttccctttctctccaacaacacaagcaacgcttcgttctctgaacacttcaacaatgccaatggaggaggaggcaacaacaacaacaacaacaacaacgagggcactaactacttcgcaacttcaagtgcaccttctctcttcagcaacagtgtcaatgccagtgccttatctcacatgtccgcaactgcactgcttcagaaagcagcacaaatgggtgcaactacgagcaacggcggcaccgcttcgctgttgaaaagcttcggaagcgcgtcctccagcagcggcggcggcggctcgaaactggtgaatgctgcaaactacgtcagtggcatgttcggagggaataatcacgtgaacgaacagagtaacagtaacctccaagacctgatgaactcgttcgctgttggtggaaactcttccattttcgaagatgggtttgaagcatatgaacatagtaacaataacagtaatagggacccaaaagtgcacgcaatgagtggaagtagcagcagcattggagggtctgataggctcacccgcgattttctgggtgttggtcagatagtgaggggaatgagtgggagtggaggagttgcgcagagagaacaacagcagcaacatggcttcaacttgagttctttggaggcagaaagatataataataatagcaataatgctgcgccgtcatcagggcaagcttttggaggtggtggagggaattttcagtgatgagaaaacttattctccatcatgccaacaaggtacaaagggatttcaacttgttccattgaaacttgactgtccagctcatctaattaaggcatttttaagtgcagcattagggaagcatatgtgaagtttctgcagtttactaatagcgcaagcaaattaggcttcaaaattagggttcttcaactccgttacaactttcagttttttctttccctacctttctataagtttattcggtttataaacaaactagcttcaagattttcatggtttaatttaatagattttgttattggacaatgcataacttatatttaaatttgactgcc

SEQ ID NO: 24336 - protein, 404 aa, Glycine max
AHSKTCGTREYRCDCGTLFSRRDSFITHRAFCDALAQESARQPPSLSGGGIGSHLYGSTTNMALNLSQVGSQISTMQDPNAQPTELLRLGAASGRTGQFDHILGSPFRPSNQQQQQQPFFMSSEPNQTYHHPDQNKPFQQGLMQLSDHLNNNSHHNNSPFSLPFLSNNTSNASFSEHFNNANGGGGNNNNNNNNEGTNYFATSSAPSLFSNSVNASALSHMSATALLQKAAQMGATTSNGGTASLLKSFGSASSSSGGGGSKLVNAANYVSGMFGGNNHVNEQSNSNLQDLMNSFAVGGNSSIFEDGFEAYEHSNNNSNRDPKVHAMSGSSSSIGGSDRLTRDFLGVGQIVRGMSGSGGVAQREQQQQHGFNLSSLEAERYNNNSNNAAPSSGQAFGGGGGNFQ

SEQ ID NO: 24337 - protein, 343 aa, Glycine max
MALNLSQVGSQISTMQDPNAQPTELLRLGAASGRTGQFDHILGSPFRPSNQQQQQQPFFMSSEPNQTYHHPDQNKPFQQGLMQLSDHLNNNSHHNNSPFSLPFLSNNTSNASFSEHFNNANGGGGNNNNNNNNEGTNYFATSSAPSLFSNSVNASALSHMSATALLQKAAQMGATTSNGGTASLLKSFGSASSSSGGGGSKLVNAANYVSGMFGGNNHVNEQSNSNLQDLMNSFAVGGNSSIFEDGFEAYEHSNNNSNRDPKVHAMSGSSSSIGGSDRLTRDFLGVGQIVRGMSGSGGVAQREQQQQHGFNLSSLEAERYNNNSNNAAPSSGQAFGGGGGNFQ

SEQ ID NO: 24338 - protein, 329 aa, Glycine max
MQDPNAQPTELLRLGAASGRTGQFDHILGSPFRPSNQQQQQQPFFMSSEPNQTYHHPDQNKPFQQGLMQLSDHLNNNSHHNNSPFSLPFLSNNTSNASFSEHFNNANGGGGNNNNNNNNEGTNYFATSSAPSLFSNSVNASALSHMSATALLQKAAQMGATTSNGGTASLLKSFGSASSSSGGGGSKLVNAANYVSGMFGGNNHVNEQSNSNLQDLMNSFAVGGNSSIFEDGFEAYEHSNNNSNRDPKVHAMSGSSSSIGGSDRLTRDFLGVGQIVRGMSGSGGVAQREQQQQHGFNLSSLEAERYNNNSNNAAPSSGQAFGGGGGNFQ

SEQ ID NO: 24339 - DNA, 1918 bp, Glycine max
aaaatcttcattgcttcctcactcaccggcgcctactcatatcacagatcatagataaataataccaatacttcatagtattcacgaaccattctatttccattcggcagcaacaaaatcaccatccttcttctgcaccgcaatgctcttcctcttccctccgtcattagtttgttagttagattacccttttcccttccatgcttacgtcaccaccgctcaccattcactctctttttacccctaaaccattgaatcgatctaaatctctcccaaatcgcaaaccccttttgctcaattgagtcaattctctccctaagttcctctgtcggcgtctgggtgggtaaaagttgttgttttgtcttctgggttttggagcaaagacaaaagatgggtgagggagaacgtttccagcttgggactgtgggtgcgttgactctttctgtggtctcatctgtgtccattgtgatttgcaataaggcgctgatgagttcactgcatttcattttcgctacaactttgaccagctggcatctgcttgtcacgttttgttcccttcatgtggcgctcaaaatgagattctttgagcacaaaccttttgagcagaaagctgtaatgggattcgggattttaaatgggatctcaattggacttttaaatttgagcctggggttcaattccgttggcttctatcaaatgactaagctggcaatcattccttgtactgtattgttggagaccatttttcttgggaagagattcagtaagagaattcaatttgccctcagtatcctccttttgggtgtcgggattgctactgtcacagatttgcagctcaatgctctgggctctttcttatcttttcttgcagtgattacaacttgtgttgctcagattatgacaaatactatccagaagaagtacaaggtttcttccacccagcttctgtatcaatcatgtccatatcaagcagcaaccctgttaatcgctggtccatatctggataaacttttgaccaaccaaaatgtatttggtttcaagtatacgacacaagtgacggttttcataattctttcctgccttatctccatctctgtcaatttcagtacgttccttgttattggaaagacatctccagtcacctatcaggttcttggacacctgaagacatgccttgtattggcatttggttatatacttctccgagacccatttagctggagaaacatactgggtattttgatagccatgattgggatgattctatattcttactattgcactctcgagaatcagcaaaaaactgttgaagctgcatcacaatcatcccaggcaagagaagatgaatctgatcctctgatgaatgtggaaaatggaagtgcagttgtgagttctaatgtcggacaaagacaaatgtcccctgtatggagcaagagcaaagactagtatgtttaatgggctttgttttagcattgtcaagaacagttttatagtccctatagagggttaacacccgtaatccatgaggaattagaaagtggaagtgctgccaaacacatgtcctagtcatttttaatagctttagtctaatatttttatgaatcgtttgccgaccaacagtattagggaagggaacaagcacatggtcatgtcgtaattctattggccaacaaatatgtcttatagtaacatacatctcctggtgatgttttcatatcatgatacatttatgattttatatagatattcaaactttttcttggcttgaatagcatataaacacctactggtaattctttttctcccttattatctctatttgtattcctatactaatagtagtaatttattcaagtccatttttttattttagaaactgaacttattcgaagcatgaggaccacattatattgttttc

SEQ ID NO: 24340 - protein, 351 aa, Glycine max
MGEGERFQLGTVGALTLSVVSSVSIVICNKALMSSLHFIFATTLTSWHLLVTFCSLHVALKMRFFEHKPFEQKAVMGFGILNGISIGLLNLSLGFNSVGFYQMTKLAIIPCTVLLETIFLGKRFSKRIQFALSILLLGVGIATVTDLQLNALGSFLSFLAVITTCVAQIMTNTIQKKYKVSSTQLLYQSCPYQAATLLIAGPYLDKLLTNQNVFGFKYTTQVTVFIILSCLISISVNFSTFLVIGKTSPVTYQVLGHLKTCLVLAFGYILLRDPFSWRNILGILIAMIGMILYSYYCTLENQQKTVEAASQSSQAREDESDPLMNVENGSAVVSSNVGQRQMSPVWSKSKD

SEQ ID NO: 24341 - protein, 319 aa, Glycine max
MSSLHFIFATTLTSWHLLVTFCSLHVALKMRFFEHKPFEQKAVMGFGILNGISIGLLNLSLGFNSVGFYQMTKLAIIPCTVLLETIFLGKRFSKRIQFALSILLLGVGIATVTDLQLNALGSFLSFLAVITTCVAQIMTNTIQKKYKVSSTQLLYQSCPYQAATLLIAGPYLDKLLTNQNVFGFKYTTQVTVFIILSCLISISVNFSTFLVIGKTSPVTYQVLGHLKTCLVLAFGYILLRDPFSWRNILGILIAMIGMILYSYYCTLENQQKTVEAASQSSQAREDESDPLMNVENGSAVVSSNVGQRQMSPVWSKSKD

SEQ ID NO: 24342 - protein, 290 aa, Glycine max
MRFFEHKPFEQKAVMGFGILNGISIGLLNLSLGFNSVGFYQMTKLAIIPCTVLLETIFLGKRFSKRIQFALSILLLGVGIATVTDLQLNALGSFLSFLAVITTCVAQIMTNTIQKKYKVSSTQLLYQSCPYQAATLLIAGPYLDKLLTNQNVFGFKYTTQVTVFIILSCLISISVNFSTFLVIGKTSPVTYQVLGHLKTCLVLAFGYILLRDPFSWRNILGILIAMIGMILYSYYCTLENQQKTVEAASQSSQAREDESDPLMNVENGSAVVSSNVGQRQMSPVWSKSKD

SEQ ID NO: 24343 - protein, 249 aa, Glycine max
MTKLAIIPCTVLLETIFLGKRFSKRIQFALSILLLGVGIATVTDLQLNALGSFLSFLAVITTCVAQIMTNTIQKKYKVSSTQLLYQSCPYQAATLLIAGPYLDKLLTNQNVFGFKYTTQVTVFIILSCLISISVNFSTFLVIGKTSPVTYQVLGHLKTCLVLAFGYILLRDPFSWRNILGILIAMIGMILYSYYCTLENQQKTVEAASQSSQAREDESDPLMNVENGSAVVSSNVGQRQMSPVWSKSKD

SEQ ID NO: 24344 - DNA, 1272 bp, Glycine max
taatgatggtaatgcgccaaattttattcatatagattggagcgtttgcagttattattcggcaaacaaatattatatgggtggtttttgttgcatgctctgggatcataaatatttctgtgactcatgcaaagcaccatacaaaaactgctgagtcggatgtatctatccaacatgggttggcatatgctactggtacaaatacagagggtttcaatctgagaagacgaagaattgttaaatctagggataccgttgagcactcgtcgtctagttcacatgcttcttcttccttttcttcaggtttgctttcacatgtttaagaaaaccatgaagcctattttatgctcctaagaaaataaaattactatataactgtagggagcaagaagttaatcccatctcactccttcaactttctgcaacatatataggacacgattattgctatcattttgcaggttttgctcatgaaatatggtccatccttttaacattatggtacatgaagtggaagcttttaatttcatttagtccctatctcatggtggtggtggcctttcttttatttgtctattggaatggaagtgttgttctgggtgcaaaagaagcgcatgcagttaccccacattttgcacagatgctttattttagtctggtttctgtattggctcaggctcctatgcacttcactatcactcaagctgtggacctgtttcagatgtttcggaatagtaggccccttctttactttcagatgtttctggcccttgttgttggcctgctttcagtacactttttcagtgtagctcatccatacctgcttgccgataatcggcattaccctttttatctttggaggaaagttatcatggctcactggccaattaaatatcttttagtcccagtttatatatgctcatggctctctatgatccacatgttgggaaaatttaggagtaaaatatgggtattggcatacttcttggcgactgctgctgttcttgtacaactccactaatagagttcagatactacactataccattctatttcctggtgcttcattgtaacaattgggatgatcaaagttggattctcacaggcacactgtatattggtgtcaatatctttacaatgatgatgtttctgtttcggccattccattgggatcatgagcctggaattcaaaggtttatatggtgattcaattcatcagaaaaacaagatttgtaacacagaaactgccctttttattaggcttttaccccc

SEQ ID NO: 24345 - protein, 171 aa, Glycine max
MKWKLLISFSPYLMVVVAFLLFVYWNGSVVLGAKEAHAVTPHFAQMLYFSLVSVLAQAPMHFTITQAVDLFQMFRNSRPLLYFQMFLALVVGLLSVHFFSVAHPYLLADNRHYPFYLWRKVIMAHWPIKYLLVPVYICSWLSMIHMLGKFRSKIWVLAYFLATAAVLVQLH

SEQ ID NO: 24346 - protein, 158 aa, Glycine max
MVVVAFLLFVYWNGSVVLGAKEAHAVTPHFAQMLYFSLVSVLAQAPMHFTITQAVDLFQMFRNSRPLLYFQMFLALVVGLLSVHFFSVAHPYLLADNRHYPFYLWRKVIMAHWPIKYLLVPVYICSWLSMIHMLGKFRSKIWVLAYFLATAAVLVQLH

SEQ ID NO: 24347 - protein, 126 aa, Glycine max
MLYFSLVSVLAQAPMHFTITQAVDLFQMFRNSRPLLYFQMFLALVVGLLSVHFFSVAHPYLLADNRHYPFYLWRKVIMAHWPIKYLLVPVYICSWLSMIHMLGKFRSKIWVLAYFLATAAVLVQLH

SEQ ID NO: 24348 - DNA, 1309 bp, Glycine max
accacatcaactcatcaagggttgtgaaagcagagaagtgagatacactaagttatcctcataaatacactctaattaggtggcaagataagtgtctaaccttagtaacattgccacatattgtgttcattttggaattgtgccactaaaattctattcaattcatctatggctgcctcttcttatgctatgcaatcaatcctggcaaaccctttgatccgcatttccagcgggtctagggtgaaccaatttggcgttcctgctttgcacatgagaaggaatgttggcctgagagttaggtccatggctaaggaagaacaaccaagtgagcctgcaaccccagttacaccgccaccatcagtagaacccaagccacagccagtctctgctccttcaccaaaggtaagccttgtgttaaacttaaatgtaaatcaaaatatataacctttgttcttcctgatttgagtttttagcatatactctatttgatttttgtgccaattattgtggaaatcgaatttcacattcttcatgtgggtcattaattaatttaagttggcaattaactaaccttgaaggaataatcacttatatcagatgagaaattattacatatatggtcttaagactactgcaagcttaatcaattttcacatggcaccaagttcagttctattagtttttccatattaaattagtaaatttaaatgcatgctacatagagaacaattgaaacctgggacacatgatgacgatccgagactactaataatttcttagttatgcaaatgtgaattttgataagcaatatgtccctctctctattgatatcatggttaatggcaggtgagcactaagttttctgatgtgttggcattcagtgggccagcacctgagaggatcaatggaaggttggccatgattgggtttgtggctgcaatggcagtggaagtagccaaagggcaaggtgtgttagaacaaatatccaatggtggcatcccatggttcttggggacaagtgtggtccttacccttgcttccttgattccactcttccaaggtgtcagcgtggagtctaagtccaaagggttcatgtcctcagatgcagaactgtggaatgggagatttgctatgttgggtttgattgctctggcttttactgagtatgttaagggtagtactttggtataattcagtcatgaaggcacaccacaatggacttaatctcctttgtgattagagagaccaatgtttatttgtacttcgtgtgtttatttaatctacatatcaaaattatttcgttaatcgt

SEQ ID NO: 24349 - protein, 91 aa, Glycine max
MAASSYAMQSILANPLIRISSGSRVNQFGVPALHMRRNVGLRVRSMAKEEQPSEPATPVTPPPSVEPKPQPVSAPSPKVSLVLNLNVNQNI

SEQ ID NO: 24350 - protein, 90 aa, Glycine max
MIGFVAAMAVEVAKGQGVLEQISNGGIPWFLGTSVVLTLASLIPLFQGVSVESKSKGFMSSDAELWNGRFAMLGLIALAFTEYVKGSTLV

SEQ ID NO: 24351 - protein, 84 aa, Glycine max
MQSILANPLIRISSGSRVNQFGVPALHMRRNVGLRVRSMAKEEQPSEPATPVTPPPSVEPKPQPVSAPSPKVSLVLNLNVNQNI

SEQ ID NO: 24352 - DNA, 1292 bp, Glycine max
ttcctaaaaggctgtccctgtccatgttgagcgcgtttgttcacgcgccttcaatttgttcttccaacaccctcagtcattgtgtgagtccgaagctcaacctctctcgctcttcaatggccgtatcctctattcgaatcgccgtcgtcggtgatgtgcatgattgctggaaccttgaacaagattcgaaagcacttgagctcttgcagccagatttggtgctgtttacaggtgattttggtgaagaaaatcttgaagtcattaagagtgttgtgaatcttgaatttgctaaagcagttatattgggaaaccacgatgcctggtttactaaacagttttctggaagcaaggagaaggataaagttcagcttcagctagaatgccttggtaaggagcacgtggcttatcaacgttcagacttccctcagataaaagtaagcgttgttggtggacgaccattttctattgggggtaaaccaatgtttcggaaaaagcttcttttggcaagatacggagtcaaagacatggatgagagtgctaagagaatccagaaagctgctcttggaacaccagaggaccattttcttatattacttgcacataatggacccacaggccttggttctgattcaaatgatatatgtggaaaggattgggaatttgagggtgatggtgatcatggtgacccagatctagcacaagcaatatccttgctaaaggagaacaatcagatatccattccattggttgtgttcggtcacatgcacaaagagctggcatatggcaatggctttaggaaaatgattgtggttggcgctgataacaccatatacttgaatggggcaattgttccaagggtcaaaaggttgggtggtgatgaagacaagaaaagcttagatgatgaaagtgcccttgcctcaccagaggccaaaggtacaagaagagcctttactttagttgagatttcggaaggaagagttgccaagattgcagaaagttgggtctcggttgtcgaagataggaccacattagaagaagagcacatactatttgagagcagctaggatcctcatcctccacatataggttcctgcttcagtcacatggattttaatgcgcatagataaatgcagccaggggtgaattatgtctcgatactcatgaatacatcgtatttaatgttagtaactactgtatagacttgataaatggtacatgctctgataccaattcccccttatctaggtggtgatttattgcttgtaccgctcctccattctatgtggcaattc

SEQ ID NO: 24353 - protein, 353 aa, Glycine max
PKRLSLSMLSAFVHAPSICSSNTLSHCVSPKLNLSRSSMAVSSIRIAVVGDVHDCWNLEQDSKALELLQPDLVLFTGDFGEENLEVIKSVVNLEFAKAVILGNHDAWFTKQFSGSKEKDKVQLQLECLGKEHVAYQRSDFPQIKVSVVGGRPFSIGGKPMFRKKLLLARYGVKDMDESAKRIQKAALGTPEDHFLILLAHNGPTGLGSDSNDICGKDWEFEGDGDHGDPDLAQAISLLKENNQISIPLVVFGHMHKELAYGNGFRKMIVVGADNTIYLNGAIVPRVKRLGGDEDKKSLDDESALASPEAKGTRRAFTLVEISEGRVAKIAESWVSVVEDRTTLEEEHILFESS

SEQ ID NO: 24354 - protein, 346 aa, Glycine max
MLSAFVHAPSICSSNTLSHCVSPKLNLSRSSMAVSSIRIAVVGDVHDCWNLEQDSKALELLQPDLVLFTGDFGEENLEVIKSVVNLEFAKAVILGNHDAWFTKQFSGSKEKDKVQLQLECLGKEHVAYQRSDFPQIKVSVVGGRPFSIGGKPMFRKKLLLARYGVKDMDESAKRIQKAALGTPEDHFLILLAHNGPTGLGSDSNDICGKDWEFEGDGDHGDPDLAQAISLLKENNQISIPLVVFGHMHKELAYGNGFRKMIVVGADNTIYLNGAIVPRVKRLGGDEDKKSLDDESALASPEAKGTRRAFTLVEISEGRVAKIAESWVSVVEDRTTLEEEHILFESS

SEQ ID NO: 24355 - protein, 315 aa, Glycine max
MAVSSIRIAVVGDVHDCWNLEQDSKALELLQPDLVLFTGDFGEENLEVIKSVVNLEFAKAVILGNHDAWFTKQFSGSKEKDKVQLQLECLGKEHVAYQRSDFPQIKVSVVGGRPFSIGGKPMFRKKLLLARYGVKDMDESAKRIQKAALGTPEDHFLILLAHNGPTGLGSDSNDICGKDWEFEGDGDHGDPDLAQAISLLKENNQISIPLVVFGHMHKELAYGNGFRKMIVVGADNTIYLNGAIVPRVKRLGGDEDKKSLDDESALASPEAKGTRRAFTLVEISEGRVAKIAESWVSVVEDRTTLEEEHILFESS

SEQ ID NO: 24356 - DNA, 1627 bp, Glycine max
ttttccctttgttttatattctttattttaacttttttctgttttggttgaccagagaggatatatcctcctttgtacttttgtttctcttaatgaattttcttattatataaaggaaatctattgaaaatagtttaatcgtgcacatttctatcagaaaaatatatgcaacatcttaatgagttaggacagtcatgttgaacttggagagttcatatatttagaagcaacttagggggggtttggtgaatgtaatcttttttcattcttggaaatcatgtttcctaggaatcatatttcctgggaatatctaaaatattactggaattgaaggacataattgtgtttttgcattataaaaaacttccccccttcatgggaatcttggactccacccctcccataggaaaattttactgggaaacacagttaaaaaataatttctgggaatgttaaactcttaggaatgattattaaaattgtcataccaaacatgggaattcaacattcacaacctaagattcttgagaaacttaagaaatcttccttccgaacactgccttaatgtttgatttaattgtactgagacatagttgtttgcttttatcttgtgtccttttccctgttttctttttattggagtatgtaatttccttattcctcaaagttaaacagagagcacattctatatccactgagaaggctacagtttctgctaccgatgaagattccattgctgatgtgatggaacagcatgacgaatttcttagttcaatgctggctcgttcagctaagttacagatggtcttcagatgttgggaaagaaatgatgttaaggaggtcattggcataatggcaaggatggatgatcatgctgtgattgctgatgttgttagcattataatggaaaaaattgatatcattacacttgagatatgtgctggtcttctgccacttctaactgatcttctacaaagtgaaatggaaagacatctaggaatatccttggaaatgctattgaaactggtcagaatatttggttcagtaatctattcaaccgtatcagctacacaacctgttggtgtcgatatcgaggcagagaacaggctagagcgttgcaacctctgcttcacagagcttgaaaaagtcaaacgttttttgccttctctttcaagaagaggaggatcaattgcaaaatctgcacaagagttgaatctggctttgcaggatgtttcgtgatcttttcctgattcaattatttccgccgctcaagttttaccggtgctttttaggggttttgtgcattttaaagatttaaacctccatacaagccaccgaatagtttgatgcattgtcatttggcattgaatgaagccttttcctgtatgtacatttattgctgttaaaaattcatggtaattgattagtggaggcactgatagctgctaattctgcgacatatactcgaagccaaagcttgaggcatgtcaccctctgctgatggttgcacagctgactataacctgtcgatatctgcttaatgtgtagatctcagtcggttccataactaacctaatatgtggcgcaagatactactgcctatctaatcttatttcaaaatttcatg

SEQ ID NO: 24357 - protein, 224 aa, Glycine max
MFDLIVLRHSCLLLSCVLFPVFFLLEYVISLFLKVKQRAHSISTEKATVSATDEDSIADVMEQHDEFLSSMLARSAKLQMVFRCWERNDVKEVIGIMARMDDHAVIADVVSIIMEKIDIITLEICAGLLPLLTDLLQSEMERHLGISLEMLLKLVRIFGSVIYSTVSATQPVGVDIEAENRLERCNLCFTELEKVKRFLPSLSRRGGSIAKSAQELNLALQDVS

SEQ ID NO: 24358 - protein, 164 aa, Glycine max
MEQHDEFLSSMLARSAKLQMVFRCWERNDVKEVIGIMARMDDHAVIADVVSIIMEKIDIITLEICAGLLPLLTDLLQSEMERHLGISLEMLLKLVRIFGSVIYSTVSATQPVGVDIEAENRLERCNLCFTELEKVKRFLPSLSRRGGSIAKSAQELNLALQDVS

SEQ ID NO: 24359 - protein, 154 aa, Glycine max
MLARSAKLQMVFRCWERNDVKEVIGIMARMDDHAVIADVVSIIMEKIDIITLEICAGLLPLLTDLLQSEMERHLGISLEMLLKLVRIFGSVIYSTVSATQPVGVDIEAENRLERCNLCFTELEKVKRFLPSLSRRGGSIAKSAQELNLALQDVS

SEQ ID NO: 24360 - DNA, 1312 bp, Glycine max
aaactacataatattttccataatgcatataatcatgcattggaaactgcaaaactgaaatatatagaatcccttagatattatggggcggcaaggttagaactgaatgccatcaatgaacatgatgattctgttacaagcagcttgaagaatgaggcacatacacagtttgctcatacttttctgcggtttggaatgcttttggcaagagaaaatactactgcaatttatgaaactggatcactggaaggtacatgggtaagtcacaccacgccccatgacagaaaagccaggaaagatttgagaaagcatgagatttcagctaacgaggccattagagaagcattatctgtgtatgagtcgctcggtgaactgcgcaaacaggaggctgcatatgcttacttccaattggcttgctatcagagagactgttgtttgagatttatgaattctggcaataagaaaagcattttgtctaaaggcgaaaatagtgctgtgcaacgagtaaagcagtatgcatctctggcagagaggaactggcaaaaggccctggacttctatggccccaaaactcatcctaatatgtatttgactattcttatggagagatcagctctttcattaagcctttcaagccatctacactccaatgtggtgctggaatcagctttggctcatatgcttgaaggacgccatgtatcagatacaaatgccgacactttcggtactagttatcccgaattacatgcaaaatattggagtcagttgcagatgcttttgaagaaaatgttggccacgatactttcatcgagtgcaaacaaatctccctgtcaaccatcttcaacatctagcagatttggagatggtggaaagatcagggaactctacaagatgtccctgaagggtactaatatgatccaattgtataacatgtacaacttgtggatatcatgatggaaaattcatccaactgcataccgtgtgcagtttttggatatcatgatgacagttttctcttgtttacatcatcaaatcaaagtaaagagaaaataggtaatgcaccgacattgtaaaatagttttatgtcatcatccatcataactcatcatgtataagtttgttttacactgttaggatatgaccattaaactccaaagtaaatgttttcttacttctttctaatttttgtctgatatctgttgttgggccaactgttcaagtaaaaagtacttaaatgtggttattcacctgtaatgaatttttgggccaactattcaagtaaaaagtacttataatgtggttattcacctgt

SEQ ID NO: 24361 - protein, 317 aa, Glycine max
KLHNIFHNAYNHALETAKLKYIESLRYYGAARLELNAINEHDDSVTSSLKNEAHTQFAHTFLRFGMLLARENTTAIYETGSLEGTWVSHTTPHDRKARKDLRKHEISANEAIREALSVYESLGELRKQEAAYAYFQLACYQRDCCLRFMNSGNKKSILSKGENSAVQRVKQYASLAERNWQKALDFYGPKTHPNMYLTILMERSALSLSLSSHLHSNVVLESALAHMLEGRHVSDTNADTFGTSYPELHAKYWSQLQMLLKKMLATILSSSANKSPCQPSSTSSRFGDGGKIRELYKMSLKGTNMIQLYNMYNLWIS

SEQ ID NO: 24362 - protein, 252 aa, Glycine max
MLLARENTTAIYETGSLEGTWVSHTTPHDRKARKDLRKHEISANEAIREALSVYESLGELRKQEAAYAYFQLACYQRDCCLRFMNSGNKKSILSKGENSAVQRVKQYASLAERNWQKALDFYGPKTHPNMYLTILMERSALSLSLSSHLHSNVVLESALAHMLEGRHVSDTNADTFGTSYPELHAKYWSQLQMLLKKMLATILSSSANKSPCQPSSTSSRFGDGGKIRELYKMSLKGTNMIQLYNMYNLWIS

SEQ ID NO: 24363 - protein, 169 aa, Glycine max
MNSGNKKSILSKGENSAVQRVKQYASLAERNWQKALDFYGPKTHPNMYLTILMERSALSLSLSSHLHSNVVLESALAHMLEGRHVSDTNADTFGTSYPELHAKYWSQLQMLLKKMLATILSSSANKSPCQPSSTSSRFGDGGKIRELYKMSLKGTNMIQLYNMYNLWIS

SEQ ID NO: 24364 - DNA, 1342 bp, Glycine max
gattcactactattatttccccttctctgttcgcgccactttgcctccactaccgcgcagaatccttccacattgaatgctcttcaggatcattatcaggccattgattttcctggaggagcagtacaattcatccctgaaatgaggtttatatccgaatcacctaaagagagaataccttgctaccgtgtccttgatgataatgggcaaccaattttgggccataattttgtgcaggtcagcaaggaagttgctgttaagatgtatactgacatggtcactctccgatctatggacactatcttctatgaagcacaaaggcaaggtagaatatcattttatgtgacagcaattggggaggaggctatcaatgttgcttcagctgcagctcttgccatggacgatgttgttttccctcagtatagggaagcgggagtcttgttatggcgtggtttcactttgcaagaatttgcaaaccagttattttccaatatatatgattatgggaaaggaaggcagatgccagctcattatgggtccaaaaagcacaattactttacagtagcatcaactattgctacacaaatttcccatgctgttggagccgcttattccttaaagatggataaaaaggatgcatgtgccgtcacttacttcggtgatggtggctcaagtgagggtgatttccacgctgccttaaattttgcagcagttttggaggccccagttatttttatatgccggaacaatggatgggctatcagcacacccatttcagatcagtttcgaagtgatggtgttgttgtgaaagggcaggcatatggagttcgtagcattcgtgtagatggcaatgatgccctggctatctatagtgctattcaagctgctcgtcaaatggcaattactgaagagagaccaattctaatagaagctcttacatatagagttggacaccacaccacatcagatgactctaccaagtatcgtccagcgaatgagattgaatggtggagagtggcacgtgatcctgtggttagatttagaaagtggatagaaaagcatggctggtggaatgatatggctgagtcagagcttataaacaatttgagacagcagcttctacatacaattcaagaagcagagggtgtagaaaaacctccacttgcagatagttttagtgatgtttatgatgtcgctccttttaatctccgtgaacaggagcaatggctgaaggagattgtaagaaaacaaccacaagagtatccaacaaatatttctgtgtagacttcaatatgctaatacacattacattgcttctaataaaaaattctcttcaaacttg

SEQ ID NO: 24365 - protein, 427 aa, Glycine max
DSLLLFPLLCSRHFASTTAQNPSTLNALQDHYQAIDFPGGAVQFIPEMRFISESPKERIPCYRVLDDNGQPILGHNFVQVSKEVAVKMYTDMVTLRSMDTIFYEAQRQGRISFYVTAIGEEAINVASAAALAMDDVVFPQYREAGVLLWRGFTLQEFANQLFSNIYDYGKGRQMPAHYGSKKHNYFTVASTIATQISHAVGAAYSLKMDKKDACAVTYFGDGGSSEGDFHAALNFAAVLEAPVIFICRNNGWAISTPISDQFRSDGVVVKGQAYGVRSIRVDGNDALAIYSAIQAARQMAITEERPILIEALTYRVGHHTTSDDSTKYRPANEIEWWRVARDPVVRFRKWIEKHGWWNDMAESELINNLRQQLLHTIQEAEGVEKPPLADSFSDVYDVAPFNLREQEQWLKEIVRKQPQEYPTNISV

SEQ ID NO: 24366 - protein, 380 aa, Glycine max
MRFISESPKERIPCYRVLDDNGQPILGHNFVQVSKEVAVKMYTDMVTLRSMDTIFYEAQRQGRISFYVTAIGEEAINVASAAALAMDDVVFPQYREAGVLLWRGFTLQEFANQLFSNIYDYGKGRQMPAHYGSKKHNYFTVASTIATQISHAVGAAYSLKMDKKDACAVTYFGDGGSSEGDFHAALNFAAVLEAPVIFICRNNGWAISTPISDQFRSDGVVVKGQAYGVRSIRVDGNDALAIYSAIQAARQMAITEERPILIEALTYRVGHHTTSDDSTKYRPANEIEWWRVARDPVVRFRKWIEKHGWWNDMAESELINNLRQQLLHTIQEAEGVEKPPLADSFSDVYDVAPFNLREQEQWLKEIVRKQPQEYPTNISV

SEQ ID NO: 24367 - protein, 340 aa, Glycine max
MYTDMVTLRSMDTIFYEAQRQGRISFYVTAIGEEAINVASAAALAMDDVVFPQYREAGVLLWRGFTLQEFANQLFSNIYDYGKGRQMPAHYGSKKHNYFTVASTIATQISHAVGAAYSLKMDKKDACAVTYFGDGGSSEGDFHAALNFAAVLEAPVIFICRNNGWAISTPISDQFRSDGVVVKGQAYGVRSIRVDGNDALAIYSAIQAARQMAITEERPILIEALTYRVGHHTTSDDSTKYRPANEIEWWRVARDPVVRFRKWIEKHGWWNDMAESELINNLRQQLLHTIQEAEGVEKPPLADSFSDVYDVAPFNLREQEQWLKEIVRKQPQEYPTNISV

SEQ ID NO: 24368 - DNA, 1434 bp, Glycine max
attgaaccatgcaattcctcaaactcgtgcccctctcttctctcttatctcttgccatgggactccaagctctccgaaatcgccactcgcttcaatgtaaacttttttgatatcttggcctcaaactctctcttccccataacaccatcaagtgcacaccaaatccttagtgccaaatcacaagtgaaaataccaatctcatgttcttgtgtggatggcatccgaaggtccatgtcaaccatttacactgttcatgcagctgatacacttgcttccatatcagaaggctatggtggattggttagtgctgaacaaatcaagattgtgaacgccatcaatgccaccaaccctttgacatatagaggcacccttgttattccactgccatgcacgtgttttgacaatgtgaataatgggggaaatgctatttatatgtcatatgtggtgcagagaagggagagcctggggagcatagcaaccaagtttggtacaactgtttcggacttggaaactgtaaatggctttggggaagctacggtagatccaggagacattctatctattcccattgcagaattgtaccgtcctttgcagcatgttcatcagcaaccttgaattggtacgatgagagtatgatagtcccaaatggctcatatacattaactgccaccaactgcatcaaatgcacttgtgaaccaacggatatcacgttgcaatgtgttccttctggactagacgtcccctgctataatttacgttgcaaaggatccaatcttattattggtgatcaatgtgtggatctttcacaaacagcttgcaatgtgagccaatgtgtttaccgtggccataggggtggcaaaattctgagtagtatgaagaaatcttcttacctcgagtgcccggatagtttgtgtcatagcggaccatcatgttggccttcctcatcaccatatcctgaagacccatttggtatgtctccaaagccatccccctccttgccactaccagtttctaaggctgctctgaggactcttgcctccagtggaaggcttggtccatttttattcaatgtgctgcaattattcttgttaaaatttatcatttattttctgatttgaataagcatatctagtcgataataacccatatcttttattcaattctaccttaacccttcttccctcaaagaaaagaaagatttcaatttggtgctttttggtgtacaaagccattgttttttttttttctctattgtaaactttgttgctttggttgtttagtttgttgctatttacatgctttgcttatagtggaatttctttattggtcttgtggacctgtagtttataagggtttgcatgtaaaaatattgaaatttcttgttgtaaaccgtgttatttatttttctattatatatatgttttgttactcccc

SEQ ID NO: 24369 - protein, 204 aa, Glycine max
IEPCNSSNSCPSLLSYLLPWDSKLSEIATRFNVNFFDILASNSLFPITPSSAHQILSAKSQVKIPISCSCVDGIRRSMSTIYTVHAADTLASISEGYGGLVSAEQIKIVNAINATNPLTYRGTLVIPLPCTCFDNVNNGGNAIYMSYVVQRRESLGSIATKFGTTVSDLETVNGFGEATVDPGDILSIPIAELYRPLQHVHQQP

SEQ ID NO: 24370 - protein, 161 aa, Glycine max
MIVPNGSYTLTATNCIKCTCEPTDITLQCVPSGLDVPCYNLRCKGSNLIIGDQCVDLSQTACNVSQCVYRGHRGGKILSSMKKSSYLECPDSLCHSGPSCWPSSSPYPEDPFGMSPKPSPSLPLPVSKAALRTLASSGRLGPFLFNVLQLFLLKFIIYFLI

SEQ ID NO: 24371 - protein, 127 aa, Glycine max
MSTIYTVHAADTLASISEGYGGLVSAEQIKIVNAINATNPLTYRGTLVIPLPCTCFDNVNNGGNAIYMSYVVQRRESLGSIATKFGTTVSDLETVNGFGEATVDPGDILSIPIAELYRPLQHVHQQP

SEQ ID NO: 24372 - DNA, 1423 bp, Glycine max
gattggagggagtgaagtctttccctccacaagaaaaaaaaatcagaaaaaggaaatgagagattgttggacaccgtgcaaatcaagcactttgcttgttatttcacgcgccctctctccattttgacctccctttcctcttcgttccccactcactgcaacggcgccggagatccgtcgctctcctcctcctcctcctcctcctcctcctcctccgccgcgatgggcgccaattccatgctctccgagtcctctcacgatctcgacgaccagatctcccagctcatgcagtgcaagccactctccgagcaacaggtcagaggtttatgtgagaaggctaaggagattttaatggatgaaagtaatgttcagcctgttaaaagccctgtgacaatttgtggcgatattcatgggcaatttcatgatcttgctgaactgtttcgaattggagggaagtgtccagatactaactacttgtttatgggtgattatgtggaccggggttattattcagttgagactgtatcgctccttgtggcactgaaagttcggtatccccagcgaattactattcttagaggaaaccatgaaagccgtcagattactcaagtatatggattttatgatgaatgccttagaaagtatggtaatgctaatgtttggaagacctttacagacctttttgatttttttccattgactgcattggttgaatctgaaatattctgtttgcatggtggactgtcaccttcaattgagacccttgataacataaggaactttgatcgtgttcaagaggttcctcatgaaggccccatgtgtgatctattgtggtctgacccagatgacagatgtggctggggaatttctcctcgtggtgctggatatacttttggccaggatatatctgaacaattcaatcacactaacagccttaaattgattgctagagctcatcagcttgttatggatggatttaactgggctcatgaacaaaaggtggttaccatttttagtgcacctaactactgttaccgatgtgggaacatggcttccatattggaggttgatgattgcaagggtcacacattcatccagtttgaacctgctcctaggagaggagaacctgatgtcactcgtagaacgcctgattacttcttataatgtagctgttgaatgtcatactgttatatcatggttacctctactgcactaatttcaggcaggtaacattccactgattacactcgaggaattgctggacaccttgtctggagaagtcgccaagatgatgtcataatacgtattgttccagcaaaatgtggtcttttttttttttttttcgtgtttattttttgtatcttatgttcagtaactcccttttatggctttacaagctatatgactggattttgttggtcgc

SEQ ID NO: 24373 - protein, 313 aa, Glycine max
MGANSMLSESSHDLDDQISQLMQCKPLSEQQVRGLCEKAKEILMDESNVQPVKSPVTICGDIHGQFHDLAELFRIGGKCPDTNYLFMGDYVDRGYYSVETVSLLVALKVRYPQRITILRGNHESRQITQVYGFYDECLRKYGNANVWKTFTDLFDFFPLTALVESEIFCLHGGLSPSIETLDNIRNFDRVQEVPHEGPMCDLLWSDPDDRCGWGISPRGAGYTFGQDISEQFNHTNSLKLIARAHQLVMDGFNWAHEQKVVTIFSAPNYCYRCGNMASILEVDDCKGHTFIQFEPAPRRGEPDVTRRTPDYFL

SEQ ID NO: 24374 - protein, 308 aa, Glycine max
MLSESSHDLDDQISQLMQCKPLSEQQVRGLCEKAKEILMDESNVQPVKSPVTICGDIHGQFHDLAELFRIGGKCPDTNYLFMGDYVDRGYYSVETVSLLVALKVRYPQRITILRGNHESRQITQVYGFYDECLRKYGNANVWKTFTDLFDFFPLTALVESEIFCLHGGLSPSIETLDNIRNFDRVQEVPHEGPMCDLLWSDPDDRCGWGISPRGAGYTFGQDISEQFNHTNSLKLIARAHQLVMDGFNWAHEQKVVTIFSAPNYCYRCGNMASILEVDDCKGHTFIQFEPAPRRGEPDVTRRTPDYFL

SEQ ID NO: 24375 - protein, 292 aa, Glycine max
MQCKPLSEQQVRGLCEKAKEILMDESNVQPVKSPVTICGDIHGQFHDLAELFRIGGKCPDTNYLFMGDYVDRGYYSVETVSLLVALKVRYPQRITILRGNHESRQITQVYGFYDECLRKYGNANVWKTFTDLFDFFPLTALVESEIFCLHGGLSPSIETLDNIRNFDRVQEVPHEGPMCDLLWSDPDDRCGWGISPRGAGYTFGQDISEQFNHTNSLKLIARAHQLVMDGFNWAHEQKVVTIFSAPNYCYRCGNMASILEVDDCKGHTFIQFEPAPRRGEPDVTRRTPDYFL

SEQ ID NO: 24376 - DNA, 1396 bp, Glycine max
ttttattttatatgataatgttttggtcgactgctggcacttctaaattgaaggaaggcagagatgaatggcactctggatggtggttagtgaagattgttgtcttggtccttgtgacaatattcccatttttacttccttctgagttgattgatctctatggacagattgcacattttggtgctggggttttcctcctaattcaactaataagcataatcagcttcattaactggttgactgattgttttggctctgaaaaatatgcagaaagatgccaaatccaggtgatgttatttgcaactatttcatattttatctgcttggtggggatcattttgatgtacatttggtatgcgccacaaccatcttgcctcctcaacattttcttcatcacttggaccctagtgcttctccaactcatgacaagcgtatctcttcacccaaaagtgaatgctggcattttaagtccagggttgatggggctctatgttgtcttcctttgctggtgtgcaattagaagtgaacctgagggagctgaatgcatcaggaagtcagaatctgcaaacaaaacagactggcaaagcatcattagctttgttgttgcaatactagcacttgttgttgcaacattttctaccggcatagattccaaatgctttcagtttaggaagagtgatccaccagcagaagatgatgttccatatggttatggtttcttccacttcgtttttgccacaggagcaatgtactttgcaatgctattgatcggatggaatagtcatcattctatgagaaaatggacaattgatgtgggatggaccagtgcatgggtcagaatagtaaatgaatggttggcagtttgtgtctacttatggatgctggtagctccaatcatatggaagagtagacatgctgattctacatgagaacttccctgttatctctattctggtttgaaattgtgaggattaagatcttaaaatgccacatatatttgctgcacatgtagtggactcctccagatactgctcttaggaaaaaggaatcaacaccctgcaaatttgatgtcagaagcaatggttctgccaaaaatgcacataagctgttgggtttgttacttgaagctacacagtacctgttcatttatccctgatcactgaaggagtataaagtaacttaacaaccatttagaggatgctcatcagaaagttcattcatgatttgtcaatttatcagagtaattttgttgtgagtgaatcatcatatgttcaacataaggtaagcagtgtattaccatttgtcagtgacaaataatatagaagtcacaatcaatgaaacaccgagtctgagttcattgttttttctaatatatttatttgtaccatgttaaaag

SEQ ID NO: 24377 - protein, 308 aa, Glycine max
LFYMIMFWSTAGTSKLKEGRDEWHSGWWLVKIVVLVLVTIFPFLLPSELIDLYGQIAHFGAGVFLLIQLISIISFINWLTDCFGSEKYAERCQIQVMLFATISYFICLVGIILMYIWYAPQPSCLLNIFFITWTLVLLQLMTSVSLHPKVNAGILSPGLMGLYVVFLCWCAIRSEPEGAECIRKSESANKTDWQSIISFVVAILALVVATFSTGIDSKCFQFRKSDPPAEDDVPYGYGFFHFVFATGAMYFAMLLIGWNSHHSMRKWTIDVGWTSAWVRIVNEWLAVCVYLWMLVAPIIWKSRHADST

SEQ ID NO: 24378 - protein, 305 aa, Glycine max
MIMFWSTAGTSKLKEGRDEWHSGWWLVKIVVLVLVTIFPFLLPSELIDLYGQIAHFGAGVFLLIQLISIISFINWLTDCFGSEKYAERCQIQVMLFATISYFICLVGIILMYIWYAPQPSCLLNIFFITWTLVLLQLMTSVSLHPKVNAGILSPGLMGLYVVFLCWCAIRSEPEGAECIRKSESANKTDWQSIISFVVAILALVVATFSTGIDSKCFQFRKSDPPAEDDVPYGYGFFHFVFATGAMYFAMLLIGWNSHHSMRKWTIDVGWTSAWVRIVNEWLAVCVYLWMLVAPIIWKSRHADST

SEQ ID NO: 24379 - protein, 303 aa, Glycine max
MFWSTAGTSKLKEGRDEWHSGWWLVKIVVLVLVTIFPFLLPSELIDLYGQIAHFGAGVFLLIQLISIISFINWLTDCFGSEKYAERCQIQVMLFATISYFICLVGIILMYIWYAPQPSCLLNIFFITWTLVLLQLMTSVSLHPKVNAGILSPGLMGLYVVFLCWCAIRSEPEGAECIRKSESANKTDWQSIISFVVAILALVVATFSTGIDSKCFQFRKSDPPAEDDVPYGYGFFHFVFATGAMYFAMLLIGWNSHHSMRKWTIDVGWTSAWVRIVNEWLAVCVYLWMLVAPIIWKSRHADST

SEQ ID NO: 24380 - DNA, 1298 bp, Glycine max
gaaatctaaagaagagaagggattggaacagattgaagagcaacgtgttatagaggcaaaaattaggatgcggcagcaggaacttcaggatgaagaggaaagaatgcacaaaagactggaaatgagctcctcgaatgtgaatgtggcagttgcagatgttgaatacagttcaaatgcagtgtcttcatcttcagtttctgttgttgaaaatgatgaaattgtttcttctcaagactcatgtgccacatcagtggttagagcaaatgcaaccactaggaccaatagagatgatgaatttgacgttgaccttgaggacatcatggtcatggaagcaatttggctttccattcaggagaatggcaggcggagaaatttatcttttgtcgatgctacttctggacactatgtagctgacggccgctatgtttcatccgtctcatctgtctcatccgtcatgggtccaccaacgggatcatcctcgtctccatctgggggtctcgcttgtgccattgcagctcttgctgagcgccagcaaatggctggagaatcatctatgagcctcaccaatgaaaatatgccatcattcaacaccctaccgggttccagaagattttataacagacttggtagggatatggctaattatccgcctggtgacaacctcaatgaggagccactggatgaagctgtgacaatgactaggagtcatggtgaatgggacatggaccatgggacacagttgactgaaacagcaaccagctatacaaactctgtcgcagcagaagatcgtggtgaactatcatctttgccacggtctgatgacaatgatggaagccttcaaagtgccacagaacccattgttcccgagagttttgaggagcagatgatgctcgccatggctgtctctttggctgaagctcgagccatgtcaagtggacagagtgcttcttggcagtagtttttggttgaggtgctggtttaatctttcttaaattggtgatgcttgccttggctatttgacaagccaagtccaaggttgagaatttgagggaagttcactcgtatgcaatttgttcaaggatcaggtagtgatctcttctcacaaatttatatatataagtatcaaaagaaaactaatgattctagttggtgaaaggttgctgcttaatgccattttttttacttgtgctcgatgtcctctcctgccccctcattggttttctgtaaatagtttgtctttgatagatgtactctcattcttacagtaatatatggcacattttagacacgtactgaag

SEQ ID NO: 24381 - protein, 318 aa, Glycine max
KSKEEKGLEQIEEQRVIEAKIRMRQQELQDEEERMHKRLEMSSSNVNVAVADVEYSSNAVSSSSVSVVENDEIVSSQDSCATSVVRANATTRTNRDDEFDVDLEDIMVMEAIWLSIQENGRRRNLSFVDATSGHYVADGRYVSSVSSVSSVMGPPTGSSSSPSGGLACAIAALAERQQMAGESSMSLTNENMPSFNTLPGSRRFYNRLGRDMANYPPGDNLNEEPLDEAVTMTRSHGEWDMDHGTQLTETATSYTNSVAAEDRGELSSLPRSDDNDGSLQSATEPIVPESFEEQMMLAMAVSLAEARAMSSGQSASWQ

SEQ ID NO: 24382 - protein, 296 aa, Glycine max
MRQQELQDEEERMHKRLEMSSSNVNVAVADVEYSSNAVSSSSVSVVENDEIVSSQDSCATSVVRANATTRTNRDDEFDVDLEDIMVMEAIWLSIQENGRRRNLSFVDATSGHYVADGRYVSSVSSVSSVMGPPTGSSSSPSGGLACAIAALAERQQMAGESSMSLTNENMPSFNTLPGSRRFYNRLGRDMANYPPGDNLNEEPLDEAVTMTRSHGEWDMDHGTQLTETATSYTNSVAAEDRGELSSLPRSDDNDGSLQSATEPIVPESFEEQMMLAMAVSLAEARAMSSGQSASWQ

SEQ ID NO: 24383 - protein, 284 aa, Glycine max
MHKRLEMSSSNVNVAVADVEYSSNAVSSSSVSVVENDEIVSSQDSCATSVVRANATTRTNRDDEFDVDLEDIMVMEAIWLSIQENGRRRNLSFVDATSGHYVADGRYVSSVSSVSSVMGPPTGSSSSPSGGLACAIAALAERQQMAGESSMSLTNENMPSFNTLPGSRRFYNRLGRDMANYPPGDNLNEEPLDEAVTMTRSHGEWDMDHGTQLTETATSYTNSVAAEDRGELSSLPRSDDNDGSLQSATEPIVPESFEEQMMLAMAVSLAEARAMSSGQSASWQ

SEQ ID NO: 24384 - DNA, 1314 bp, Glycine max
atggttgaattttgatttcaacgatgcacatccggatttgccagctttatacttaaaaggtggctcgattattcccgtgggcctccctcatcagcatgttggagaggctaatccttcagatgacttgactctttttgtggctttagatgaacatgggaaagctgaaggtgttctatttgaggatgatggtgatggatatgaattcactaaaggcagttatttattaacacattatgtggctgaacttaaatcatcagttgttacagtgagtgtccacaaaactgatggatcatgggaaagacctaaacgccgcttgcatattcaattattgctgggtgggggtgcaatgcttgatacatggggaactgatggagaagttctgcaactaattttgccttcggaagatgaggtgttgaagctagtatctactagtgagaagaattacaaggaccgtttggaaaatgcaactccaattcctgatgtagaagaggtttctggacccaagggaacagagctttcaagaactcccattgaactgaaaaatggtgagtggaatcttaaagttgttccctggattgggggtagaatcatgtccatgacacacattccttcaggaacacaatggctccatagtaggattgagataaatgggtatgaggagtatagtggtatggagtatcgttctgctgggtgttctgaggaatattctgtcattgatcgagaaccagggcttgtggtgttagagggtgatattggtgggggattggttcttaaacgtcatatctatgttccaaagaatgttcccaatgccatccagatagactctagtataatagcacgaagtgttggagctggttctggagggttctcaaggttggtttgcttaagagttcacccaacatttagtgttttgcatccatcagaatcttttgtttcatttacttcaatggatggatcgaagcatgaagtctttcctgatggtatggagcaattctttgaaggagacctcattcctaatggcgaatggaggctggttgataaatgtcttggcttggcactggtgaaccgatttagtgttagtgaggtattcaagtgtcttgttcactgggattgtggcactgtcaacctggagctttggtcccagagtaggcctgtttcagagcaatcccctctcagaatttcccatcagtacgaggttataggaatttcataataatttaactgatcatcaatgtatctagaatgttcgaaacagtgtagtgctgttacaaaacctgcacctaaaatctatgcataaaaatttcagtgttgttt

SEQ ID NO: 24385 - protein, 403 aa, Glycine max
WLNFDFNDAHPDLPALYLKGGSIIPVGLPHQHVGEANPSDDLTLFVALDEHGKAEGVLFEDDGDGYEFTKGSYLLTHYVAELKSSVVTVSVHKTDGSWERPKRRLHIQLLLGGGAMLDTWGTDGEVLQLILPSEDEVLKLVSTSEKNYKDRLENATPIPDVEEVSGPKGTELSRTPIELKNGEWNLKVVPWIGGRIMSMTHIPSGTQWLHSRIEINGYEEYSGMEYRSAGCSEEYSVIDREPGLVVLEGDIGGGLVLKRHIYVPKNVPNAIQIDSSIIARSVGAGSGGFSRLVCLRVHPTFSVLHPSESFVSFTSMDGSKHEVFPDGMEQFFEGDLIPNGEWRLVDKCLGLALVNRFSVSEVFKCLVHWDCGTVNLELWSQSRPVSEQSPLRISHQYEVIGIS

SEQ ID NO: 24386 - protein, 288 aa, Glycine max
MLDTWGTDGEVLQLILPSEDEVLKLVSTSEKNYKDRLENATPIPDVEEVSGPKGTELSRTPIELKNGEWNLKVVPWIGGRIMSMTHIPSGTQWLHSRIEINGYEEYSGMEYRSAGCSEEYSVIDREPGLVVLEGDIGGGLVLKRHIYVPKNVPNAIQIDSSIIARSVGAGSGGFSRLVCLRVHPTFSVLHPSESFVSFTSMDGSKHEVFPDGMEQFFEGDLIPNGEWRLVDKCLGLALVNRFSVSEVFKCLVHWDCGTVNLELWSQSRPVSEQSPLRISHQYEVIGIS

SEQ ID NO: 24387 - protein, 207 aa, Glycine max
MSMTHIPSGTQWLHSRIEINGYEEYSGMEYRSAGCSEEYSVIDREPGLVVLEGDIGGGLVLKRHIYVPKNVPNAIQIDSSIIARSVGAGSGGFSRLVCLRVHPTFSVLHPSESFVSFTSMDGSKHEVFPDGMEQFFEGDLIPNGEWRLVDKCLGLALVNRFSVSEVFKCLVHWDCGTVNLELWSQSRPVSEQSPLRISHQYEVIGIS

SEQ ID NO: 24388 - DNA, 1493 bp, Glycine max
agggttctcttcacaacttcttctgttgttcgaggggttacagcatttgctgctgtaacttctggaaaaataaatcttccaggggataaaatattgggtttagcaaattttttcctgggaattggaatcccaggagatgccaaggacttcttcaatcaagttgaatcattagctcttctagagaacaacaaggtttcgatcccattggtactgtcacttcctgcaacggtttattcattatccaaaaaagatcagctcaaggttagggtgaacactgtacttggttcagctgcaccacctttaacagttaagcttgtgcaagctttccgctctaacgctaaagattcagctattgagagcaaggagctccaatatgatcaaaataatggaattcatttcttggaagctttcccagacaatgtagatgtgggaacttatgtgtttgtttttgagattgcacttcacgattctgctggtgaaaaagtttatgctactggaggccaaattcatgtaccaatatatgtcactggcattattaaagtcagcaatgctgaaattgctgttcttgacagtgatcttggaagtgttgaaacccagaaaacgctagatttggctggaaatgatgatgtttcactctcagctaaccacttgcaaaagttgcgcttttctttccagttgacaacacctcacggtcatgcttttaagcctcatcaggcatttttcaagttgaagcatgagacaaagcatgaacacatctttgtggttggaaatactggcaggaagtttgagattattcttgattttcttggtttggtggagaaattttattacctctctggcagatatgacattgagctgactgttggggatactgtcatggagaactctttcttacggctgcttggtgaagttgatttagatcttcccgaagcacctgagaaggcagcccgtcttcctccactccctgtcgatccttactcaagatatgggcccaaagccgagatagcccacttattcagggctccagaaaagcgaccaccccaggaactctctcttactttcttgggtttgatccttctgccatttattggctttttagttgggctgttacgcctgggagtgaacttgaagaattttccttcttcagctgtacctgctacatatgccttcttattccatcttggcattgctgcagttctattgctttatgtacttttctggttgaagctggacttgttcactacactcaaaactgtaggatttttgggagcttttctgttgtttgtgggacacagaattctttcccatctcgcttcaacatcatctaagttgaagtctgcatgagtaaaaggaagattatctatttataaagacatgacatgataatgtgtttttccttgaaaaaatgatactaatccaattttgtaggactttgttgtactagttcgtaacgaatttagagctcaattatatcaagagaaaagttttatcat

SEQ ID NO: 24389 - protein, 447 aa, Glycine max
RVLFTTSSVVRGVTAFAAVTSGKINLPGDKILGLANFFLGIGIPGDAKDFFNQVESLALLENNKVSIPLVLSLPATVYSLSKKDQLKVRVNTVLGSAAPPLTVKLVQAFRSNAKDSAIESKELQYDQNNGIHFLEAFPDNVDVGTYVFVFEIALHDSAGEKVYATGGQIHVPIYVTGIIKVSNAEIAVLDSDLGSVETQKTLDLAGNDDVSLSANHLQKLRFSFQLTTPHGHAFKPHQAFFKLKHETKHEHIFVVGNTGRKFEIILDFLGLVEKFYYLSGRYDIELTVGDTVMENSFLRLLGEVDLDLPEAPEKAARLPPLPVDPYSRYGPKAEIAHLFRAPEKRPPQELSLTFLGLILLPFIGFLVGLLRLGVNLKNFPSSAVPATYAFLFHLGIAAVLLLYVLFWLKLDLFTTLKTVGFLGAFLLFVGHRILSHLASTSSKLKSA

SEQ ID NO: 24390 - DNA, 1502 bp, Glycine max
gggttatactcctgggctttttattgtgggactttttgccatccttattttgtggatgtatgcaaacttctggataaccggaacattactcatagttggaggttatttattctccctaaatcatgcacgcttggtggtattagtcggaactatatatgctatatactgtgttcaagtacgagtgggatggcttggtgtttttcttgctataaaccttgcattcctctctaatgacattttgaattttctgctccaatggtttgataacgtgagtgaaagtttgcattctgaagatcagaagcaatcagaaacagttatggaagatgacttctctgaagagtgtgaatatcctatccctactaatgaatctgagaatttgcattcatgtaaatcatccagtaaacctgctgttaccgcagcagttgttgataacaagaaagaactttctgttaacaaagttgttagagaacaaacaacgacaacaacaacaacaacaagctcaattgatgaaatgaaaaggatactgaagagtctgaatcattatgatgcccttggatttagccgccacaagaagattgatgctgcagttttgaaaaaggaatacaggaaaaaggctatgcttgtgcatcctgataaaaatatgggaagttctttggcaagtgaatcatttaagaagcttcaatgcgcatatgaggttctttctgactctgtgaagaagcgagattatgatgaacaattaagaaaagaagaatccatggctaagagtgtctgccagagatcccatagtagttcacatcaggataatgctgattatcgttctgaagaatccagacgaatacaatgcaccaagtgtggaaattcacatatttgggtatgcaccaacaggagtaaggccaaagcaagatggtgtcaggactgttgtcagtttcatcaagccaaggatggagatggatgggttgaatataaagggtctttggtttttgacaggcctcagaaggtggagattccacgcgcttttgtttgtgctgagagcaaaatttttgatgtgtcagaatgggcgatatgtcagggaatggcttgcaggccaaatacccatcgaccaagtttccatgtaaacatggttggcttggagaaaagccaacgttgcaactcgagtagattcccgtgggattttgatgcagaaatgatggatgaagacgaagaggcgtttgacctgtggcttgagcaggctctggcatctggtctcttctgtgagacctccaaacgcaggaagagttggagtccattcaagttgcatcaaaagaaagggaagaagcaatggcgaagaacatcgtgctgaagccgaagtctgtagggaaaattcatggttcattgcatgtccctaagggattgatgttctaaacattttttagaaggaaagtgatgcattgctgatatcaaaacaagaaggaaggaaggattagctaacactccaaaaggtgccttatcaaagatagaagttc

SEQ ID NO: 24391 - protein, 445 aa, Glycine max
GYTPGLFIVGLFAILILWMYANFWITGTLLIVGGYLFSLNHARLVVLVGTIYAIYCVQVRVGWLGVFLAINLAFLSNDILNFLLQWFDNVSESLHSEDQKQSETVMEDDFSEECEYPIPTNESENLHSCKSSSKPAVTAAVVDNKKELSVNKVVREQTTTTTTTTSSIDEMKRILKSLNHYDALGFSRHKKIDAAVLKKEYRKKAMLVHPDKNMGSSLASESFKKLQCAYEVLSDSVKKRDYDEQLRKEESMAKSVCQRSHSSSHQDNADYRSEESRRIQCTKCGNSHIWVCTNRSKAKARWCQDCCQFHQAKDGDGWVEYKGSLVFDRPQKVEIPRAFVCAESKIFDVSEWAICQGMACRPNTHRPSFHVNMVGLEKSQRCNSSRFPWDFDAEMMDEDEEAFDLWLEQALASGLFCETSKRRKSWSPFKLHQKKGKKQWRRTSC

SEQ ID NO: 24392 - protein, 427 aa, Glycine max
MYANFWITGTLLIVGGYLFSLNHARLVVLVGTIYAIYCVQVRVGWLGVFLAINLAFLSNDILNFLLQWFDNVSESLHSEDQKQSETVMEDDFSEECEYPIPTNESENLHSCKSSSKPAVTAAVVDNKKELSVNKVVREQTTTTTTTTSSIDEMKRILKSLNHYDALGFSRHKKIDAAVLKKEYRKKAMLVHPDKNMGSSLASESFKKLQCAYEVLSDSVKKRDYDEQLRKEESMAKSVCQRSHSSSHQDNADYRSEESRRIQCTKCGNSHIWVCTNRSKAKARWCQDCCQFHQAKDGDGWVEYKGSLVFDRPQKVEIPRAFVCAESKIFDVSEWAICQGMACRPNTHRPSFHVNMVGLEKSQRCNSSRFPWDFDAEMMDEDEEAFDLWLEQALASGLFCETSKRRKSWSPFKLHQKKGKKQWRRTSC

SEQ ID NO: 24393 - protein, 340 aa, Glycine max
MEDDFSEECEYPIPTNESENLHSCKSSSKPAVTAAVVDNKKELSVNKVVREQTTTTTTTTSSIDEMKRILKSLNHYDALGFSRHKKIDAAVLKKEYRKKAMLVHPDKNMGSSLASESFKKLQCAYEVLSDSVKKRDYDEQLRKEESMAKSVCQRSHSSSHQDNADYRSEESRRIQCTKCGNSHIWVCTNRSKAKARWCQDCCQFHQAKDGDGWVEYKGSLVFDRPQKVEIPRAFVCAESKIFDVSEWAICQGMACRPNTHRPSFHVNMVGLEKSQRCNSSRFPWDFDAEMMDEDEEAFDLWLEQALASGLFCETSKRRKSWSPFKLHQKKGKKQWRRTSC

SEQ ID NO: 24394 - DNA, 1373 bp, Glycine max
ggtttatggaatagctggaaagcggagtcagtcacatcgataaaaaaaaagggcgggaaagaaagggtgtgtcaaaattttgagagccactcccagttttgcaccctcccacaaaatcaaaatcttcgttccgtgttttagcaatcggtagagagcgagacacggaatttgaaaattcatccaaaaactctccctctctacgcggcgcgaccctcacttcggcactccgcactgtctcggatcactcgctctctctgttggttctggtcatttctgatgtttatgaatctcacctaatgtgtgaatatgtgactttaaacttgttttgacaactggtctgtaaacaatattccaaaatttgataatactgtagctcataatgctagtaaatgagtgtcatatgcttgtaattttgagccaatatccatctactcaatctcatatgtaatctcaacatgctatttctttcatgtttctgcattattgctttcagagggactcattgcaggtaattgttgctcacatctttgcttcaaagttcactcatttcaatgacatatgataatatgatttgctcattgattgtaagcaatggagaaaacgcccaaacaaggttccgatgcatcactttttccttctactggaattggatcgaggttctccaatttgaacaagtctttcaaatattctctcagatctttgctcacttcatgctcaaaggaggaattttataaagcattttcaagtttctctaacactgaaaaggaattgctccatcgcctatttcttcaggtcattacttcgttgcatgaaaacttagaggatgggtttgagacggtctgtcttcaaacacaggcaggagctactcttgatgctgtggaggaaattgtggaagaacaagatctggatgtcttattttcagataggagtaacataatggatgttgctgagaatctgtctatggcaaagaagaatgaaatccaacacttaaagcatatggttcaattgggagaggaacataatcaaatgttgcgcactcgactgcaactccttagagaaggcaatcaagtgttatctggtgcctcacaagctgttgagaagttcaaaagcatgaatgtaaattatggggcaaacagcggtgatggccatgatgtataacatgtcttgctcattctttcctgcaaattgacgaaggttcattctctggtgaataattcccattgttttatgttgtagcaatgtttcttaagattcttacttcacgagtaagtctaccttagtccttgagattatagggtcatgtattttagaagctaagattttaaaaatcgtgcattagttcctgactttataaaacatactaatttgctttc

SEQ ID NO: 24395 - protein, 188 aa, Glycine max
MEKTPKQGSDASLFPSTGIGSRFSNLNKSFKYSLRSLLTSCSKEEFYKAFSSFSNTEKELLHRLFLQVITSLHENLEDGFETVCLQTQAGATLDAVEEIVEEQDLDVLFSDRSNIMDVAENLSMAKKNEIQHLKHMVQLGEEHNQMLRTRLQLLREGNQVLSGASQAVEKFKSMNVNYGANSGDGHDV

SEQ ID NO: 24396 - DNA, 1004 bp, Glycine max
acaatggattggaaactttgagctcaatcgtacggttaggaaaatttgcagtttcttagcatagattggaggaagaagattgttggcaactgttcccagggagaacaaccttcatcttcttctgaaggtgctcggtgaaagggtgtttgaccaagagaagaaatccagttccagagattttttattcaaggatgggtgaaaggaaggacactattgctaccttgtgtacttggtggatgtagctcggcattgtggaaatttacaaaaggaggatggcacttatccttgcagcaaatatgtgctccattacaaattccaaaacggttgaagtgataaaaagaatcgatattgaagataaaatgcaatccagatctaatattgcactgcctccttcggaagcttcatcaagtcgcaggcatctcttaatcggtgttggtccttcattgcttaccttgacgtgtggtttatcaccaccaacggtatgggccgaagagaagtctggcgacaaagaggaagaagataaaggggttattggggccatcaaatcactatttgatcctaatgagaaaacaaagtctggaaaggtgttgccaaaggcttacttaaggtcagcaagggaagtagtgaaaacactgcgtgaatctttaaacgaaggcaccgatgataatgccaaatttagacggactgcggactcagcaaaggagtcaattcgggagtatttgggcagttggaggggaaatcagattgttgctcaagaagaatcatatgttattttggaaaaagtaatcagatctttggcaaactattactcaaaagcagggccatcagctccactgtcacatgaagtaaagtctgaaatattagattatctaaatacagctgaagaatttttgtagaacatcctccaatgtgttatagaaacaacaccatttctaactccctggatgtcgtcaatggctgtgataaaagtaaatttattcttcaatcaatttaaattttgtagc

SEQ ID NO: 24397 - protein, 207 aa, Glycine max
MALILAANMCSITNSKTVEVIKRIDIEDKMQSRSNIALPPSEASSSRRHLLIGVGPSLLTLTCGLSPPTVWAEEKSGDKEEEDKGVIGAIKSLFDPNEKTKSGKVLPKAYLRSAREVVKTLRESLNEGTDDNAKFRRTADSAKESIREYLGSWRGNQIVAQEESYVILEKVIRSLANYYSKAGPSAPLSHEVKSEILDYLNTAEEFL

SEQ ID NO: 24398 - protein, 199 aa, Glycine max
MCSITNSKTVEVIKRIDIEDKMQSRSNIALPPSEASSSRRHLLIGVGPSLLTLTCGLSPPTVWAEEKSGDKEEEDKGVIGAIKSLFDPNEKTKSGKVLPKAYLRSAREVVKTLRESLNEGTDDNAKFRRTADSAKESIREYLGSWRGNQIVAQEESYVILEKVIRSLANYYSKAGPSAPLSHEVKSEILDYLNTAEEFL

SEQ ID NO: 24399 - protein, 178 aa, Glycine max
MQSRSNIALPPSEASSSRRHLLIGVGPSLLTLTCGLSPPTVWAEEKSGDKEEEDKGVIGAIKSLFDPNEKTKSGKVLPKAYLRSAREVVKTLRESLNEGTDDNAKFRRTADSAKESIREYLGSWRGNQIVAQEESYVILEKVIRSLANYYSKAGPSAPLSHEVKSEILDYLNTAEEFL

SEQ ID NO: 24400 - DNA, 1484 bp, Glycine max
ataatatagttcaggcattatggagagagttgtatactccagggaaacaacctgagaaagtgtgcacctcggtcaaaaaacctgccggcactcgtatctgtgacaccgtgttcaattcggatccaaaaatctgatttatcgggtctcttcccaactcccccacctccaaccaacttccaccagtagtaaacagaaatacaagcataagcaaaagaagacccgcgacacatcgcaacatcgtatcatgtctgcaacaaacgtccccaaagtgctgttacaactacaaccaccctccaaatcgaacccactctgcgtgccggtgataggactcggcaccgccgcggtccacaacgacggtgacacggtgaaggctgcagtcatagaggctatcaaactcggttacagacacttcgacaccgcggcacagtacggatcggagcaggctcttggagaagccattgccgaagcacttcgggttggtctcatagcctcaagagacgagcttttcatcacttccaagttatggtgttgtgataatcatccccatcttgttcttcctgctctacaaaattcgcttcggtctcttaaattagattatttggacctatatttaattcattggccaattactgcaaagcctggaatgtgggagatgccttattctgaagagagccttgttccatttgacttaaagagtgtgtgggcagcaatggaagaatgtcacaaacttggccttaccaaatcaattggagttagcaacttctcttgcaagaaacttgaaaatcttctctcttttgctacaattcctccttctgtcaatcaagtggagatgaatattgcctggcagcaaaagaatcttagagcatactgcaaggcaaagggtataattgtgactgcctactctcctttgggagccaaagggagcaaatgggatatcaatcaaattttggacaatgaattgaccaagcagattgcacaggctcatggcaaaactgcagctcaggtatgtcttagatggttatttgagcaaggtgtgactttcataccaaagagctacaataaagagagattaaaggaaaatttagagatatttgattggtcactcaccaaagatgaccatgaaaagattaatcaagtcaaacaggagcgtatgttcaagtacggaacagcagcattcccgcttcctgatctatttgatggggaaacttagtaatacattatcagcttcaatattccattttccttgggatttaggtttctcgtgtctgtgacacaataaaaggatgaagtgtaatctgtctttagaatacccttaaagaaactcaaaattgaaatcactggtttcactttttgtgggaagtttgtttacagcaatgttatgcttttcttccatgtaattttatgtgctacactgttttatctgttgaaatgtaattgtaattcaagctacaggcatccaataaaaactagactgtttatagttt

SEQ ID NO: 24401 - protein, 321 aa, Glycine max
MSATNVPKVLLQLQPPSKSNPLCVPVIGLGTAAVHNDGDTVKAAVIEAIKLGYRHFDTAAQYGSEQALGEAIAEALRVGLIASRDELFITSKLWCCDNHPHLVLPALQNSLRSLKLDYLDLYLIHWPITAKPGMWEMPYSEESLVPFDLKSVWAAMEECHKLGLTKSIGVSNFSCKKLENLLSFATIPPSVNQVEMNIAWQQKNLRAYCKAKGIIVTAYSPLGAKGSKWDINQILDNELTKQIAQAHGKTAAQVCLRWLFEQGVTFIPKSYNKERLKENLEIFDWSLTKDDHEKINQVKQERMFKYGTAAFPLPDLFDGET

SEQ ID NO: 24402 - protein, 188 aa, Glycine max
MWEMPYSEESLVPFDLKSVWAAMEECHKLGLTKSIGVSNFSCKKLENLLSFATIPPSVNQVEMNIAWQQKNLRAYCKAKGIIVTAYSPLGAKGSKWDINQILDNELTKQIAQAHGKTAAQVCLRWLFEQGVTFIPKSYNKERLKENLEIFDWSLTKDDHEKINQVKQERMFKYGTAAFPLPDLFDGET

SEQ ID NO: 24403 - protein, 185 aa, Glycine max
MPYSEESLVPFDLKSVWAAMEECHKLGLTKSIGVSNFSCKKLENLLSFATIPPSVNQVEMNIAWQQKNLRAYCKAKGIIVTAYSPLGAKGSKWDINQILDNELTKQIAQAHGKTAAQVCLRWLFEQGVTFIPKSYNKERLKENLEIFDWSLTKDDHEKINQVKQERMFKYGTAAFPLPDLFDGET

SEQ ID NO: 24404 - DNA, 1507 bp, Glycine max
acaacgtggcctccttcttccacagcaaaatcccattttccaaaacccctctctctctctctgacacacactaccatggcggcactgaagcttctcctctcccaagctcgccgccattccctccccaaatgcgctttctctatgacctctcacagatccctctgtgcttcttcggaatcaaactcaaaccctccccgaagacccttcgaacccatccccatccaacccgtctcctaccccgtcaagcccaaacccgcaccacccgaacctcaaccttcacccgaacctcaatcacaatccctccccccttcctcgccggactcgcaacgcgcttggacgcgcgaggacatccgctacgtgaaggacgtgccgtcgatcgcgccggtggcgtacgcctcgcgcggcggcgtggcgcctctccccgatgacagagctcccgtggaggacgcggcagagagcgagaggaggatgatcgaggcggagaatgaaatgaggttgcgaatggccaaggccgtcgaagaggaaagaatgaaggtgccgtttccgctgctgattaagcccaagaagaacgagaagcctcctccgcttgatttgaacgaagccattcgccaagttaaggccaatgccaaggcaaagtttgatgaaactgttgaagcacatataagattgggtgttgattcaaagcgaacagaaatggcagttcgtggtactgtgattctgcctcatggtgctccaaaggctgtcagtgtggctgtttttgcagaaggggctgaggcagaggaagcgaaagctgcaggagctgatatagttggtggtaaagagcttattgaggagattgctagcggtaaaaataagctcaaagttgacaaatgcttctcaactcctggaatggcacctaatcttggaaagatagcacaatatcttagaaagcgaagactgatgccagataagaaactaggtactcttactagtgatattgctgggcagttgaaagagctaagacaaggccgtgtagagtttaaaatggaaagtaaatcaattttgcatgtgggacttggaaaggtaagctacaaagaagaggctttacgggagaatattagtgcatttatgaatgctgtattgcttgcaaagcctgctggcttaaaaaagacttccaaatatgctgggtatgtgttgtctgtccatataagcagcacgatgggcccaggattacctgtatctatacaatcaatatccaaagcagcagataactacaagaaaatgcatatggtttgaatcatgtggacgtggccaatgtgggcatttttctacatgaatccaagtttagatgaacatatgttgtcgtaggtttttgttcattaccattgattatgtaaactttgtttagtcatatatgtggcaataagtgaaaattttgacaattttttgtgagcttgttgaattttctggtcacctaatggtgtatcatgttcctcattgcaacacagaaaattatgccttagtttac

SEQ ID NO: 24405 - protein, 424 aa, Glycine max
TTWPPSSTAKSHFPKPLSLSLTHTTMAALKLLLSQARRHSLPKCAFSMTSHRSLCASSESNSNPPRRPFEPIPIQPVSYPVKPKPAPPEPQPSPEPQSQSLPPSSPDSQRAWTREDIRYVKDVPSIAPVAYASRGGVAPLPDDRAPVEDAAESERRMIEAENEMRLRMAKAVEEERMKVPFPLLIKPKKNEKPPPLDLNEAIRQVKANAKAKFDETVEAHIRLGVDSKRTEMAVRGTVILPHGAPKAVSVAVFAEGAEAEEAKAAGADIVGGKELIEEIASGKNKLKVDKCFSTPGMAPNLGKIAQYLRKRRLMPDKKLGTLTSDIAGQLKELRQGRVEFKMESKSILHVGLGKVSYKEEALRENISAFMNAVLLAKPAGLKKTSKYAGYVLSVHISSTMGPGLPVSIQSISKAADNYKKMHMV

SEQ ID NO: 24406 - protein, 399 aa, Glycine max
MAALKLLLSQARRHSLPKCAFSMTSHRSLCASSESNSNPPRRPFEPIPIQPVSYPVKPKPAPPEPQPSPEPQSQSLPPSSPDSQRAWTREDIRYVKDVPSIAPVAYASRGGVAPLPDDRAPVEDAAESERRMIEAENEMRLRMAKAVEEERMKVPFPLLIKPKKNEKPPPLDLNEAIRQVKANAKAKFDETVEAHIRLGVDSKRTEMAVRGTVILPHGAPKAVSVAVFAEGAEAEEAKAAGADIVGGKELIEEIASGKNKLKVDKCFSTPGMAPNLGKIAQYLRKRRLMPDKKLGTLTSDIAGQLKELRQGRVEFKMESKSILHVGLGKVSYKEEALRENISAFMNAVLLAKPAGLKKTSKYAGYVLSVHISSTMGPGLPVSIQSISKAADNYKKMHMV

SEQ ID NO: 24407 - protein, 377 aa, Glycine max
MTSHRSLCASSESNSNPPRRPFEPIPIQPVSYPVKPKPAPPEPQPSPEPQSQSLPPSSPDSQRAWTREDIRYVKDVPSIAPVAYASRGGVAPLPDDRAPVEDAAESERRMIEAENEMRLRMAKAVEEERMKVPFPLLIKPKKNEKPPPLDLNEAIRQVKANAKAKFDETVEAHIRLGVDSKRTEMAVRGTVILPHGAPKAVSVAVFAEGAEAEEAKAAGADIVGGKELIEEIASGKNKLKVDKCFSTPGMAPNLGKIAQYLRKRRLMPDKKLGTLTSDIAGQLKELRQGRVEFKMESKSILHVGLGKVSYKEEALRENISAFMNAVLLAKPAGLKKTSKYAGYVLSVHISSTMGPGLPVSIQSISKAADNYKKMHMV

SEQ ID NO: 24408 - DNA, 1312 bp, Glycine max
attgttaatttaccatgacgccaccaaaatagaagcttgacctccaccctatgcaaacccgccacgtgccgctaatagcgtgtcctcgtcaacgtagcggcaaggaattacaaccatagaagagacccaccgaagaaactacctctccgaatccaaacttccttcgcttgtagaaaattcccccgattttctcgagaaagtgaaacggaattatgagctttcaggacatcgaggccgggcgccccttcggttcgaggcgcgggttgatgaatgggaagcaagaccccacgcaagcggtggctgccggcatattccagatcaacactgccgtctccaccttccagagactcgtcaacaccctcggaacccccaaagacaccctcgacctccgcgaaaagctccacaagacaagactacatattgggcaattggtaaaggatacatcagctaaacttaagcaagccagtgacattgatcaccatgctgaagttaatgcaagcaagaagatagcagatgctaaacttgcgaaagattttcaggcagtgttgaaagagtttcagaaggcacaacgtcttgcagctgagagggaaacagcgtacactccttttgttcctcaagcagtccttccttcgagctatacagctagcgaagtagatgttggttctgataagtcaccagaacagcgtgccctgcttgtggaatcaaggaggcaggaggttttattcttagataatgagattgccttcaatgaggctatcattgaggaaagggagcaaggcattcaagaaatacagcagcaaattggtgaagttaatgagatcttcaaagatcttgctgtacttgtccatgagcaaggagccatgattgatgatattggctccaacattgagaactcccatgcagcaacagcacaagcaaaatctcaactttcaaaagcttcaaaaacccaaagatcaaattcctctttgacatgcttgcttttggtgatttttgggattgtgcttctcatcgtgatcatagttcttgctgcttagtcaaaggttatctcaattacattatggagcaaatgcatatatactgggcagcagatagcatctcccttgctgatggtgtcacttgattggtgttttgccgggtcttgtggttgactggagtttgttgcatctaatttcagtacatgatgtgggaattcccataattttgttgtggggttttatgttctctctatgttagtgtttggggttttaaaatgtgtcacggattatggtttaagtcctctccttgtttctttaattaaaaaaatatttaattc

SEQ ID NO: 24409 - protein, 273 aa, Glycine max
MSFQDIEAGRPFGSRRGLMNGKQDPTQAVAAGIFQINTAVSTFQRLVNTLGTPKDTLDLREKLHKTRLHIGQLVKDTSAKLKQASDIDHHAEVNASKKIADAKLAKDFQAVLKEFQKAQRLAAERETAYTPFVPQAVLPSSYTASEVDVGSDKSPEQRALLVESRRQEVLFLDNEIAFNEAIIEEREQGIQEIQQQIGEVNEIFKDLAVLVHEQGAMIDDIGSNIENSHAATAQAKSQLSKASKTQRSNSSLTCLLLVIFGIVLLIVIIVLAA

SEQ ID NO: 24410 - protein, 255 aa, Glycine max
MNGKQDPTQAVAAGIFQINTAVSTFQRLVNTLGTPKDTLDLREKLHKTRLHIGQLVKDTSAKLKQASDIDHHAEVNASKKIADAKLAKDFQAVLKEFQKAQRLAAERETAYTPFVPQAVLPSSYTASEVDVGSDKSPEQRALLVESRRQEVLFLDNEIAFNEAIIEEREQGIQEIQQQIGEVNEIFKDLAVLVHEQGAMIDDIGSNIENSHAATAQAKSQLSKASKTQRSNSSLTCLLLVIFGIVLLIVIIVLAA

SEQ ID NO: 24411 - DNA, 1138 bp, Glycine max
actggaatatttttcacgtttgatttgaccattaaattggagataggatttttgtgcgggccaagaaagatacattcatcgttcaacaatcttcaaacaaacaaaaaataaagtgtcttagaaatgacacgatccttggcaatggcttcttcatcaatgttatgtccgaagctggggagttgtgcagtgtcacatacaaagttccaagcttttcatctctcttcaatgttctctccactgggtcgaggccttgtctcaccttggagtggtttaaagcatctgggtatctcagctaaagcaaagcctcttattcacatagatagaaagggtgggtgtaagggtaaggtggtttatgcttctctctttggggttggagctcctgaggctttggtaattggggtcgttgctttgttggtttttggccctaaaggtcttgctgaggttgctagaaatctgggaaaaacattgcgtacatttcaacccaccattaaagagcttcaggatgtttcaagggaatttaagagtactcttgaacgggagattggtcttgatgacaatttaagtccaacccagaacacatacaattccaacatacgcaataccacaccaacttcatcatccacttccactgttgaccctaatggcacgccagatcctactaaagcatacagctctgaggagtatcttaagattacagaggagcagctgaaggcatctgctgcacaacagcaggggcaaacaccttccaaggaaggtgacaatgagcctcaaatccagccttctggttagtcttttttgtggaacataggcactttttttttttttctccctctttccaccctctttgttcttcacctttctttgatatgtcaacagctgaggaaacagctactactgtacctccacctcagaagccagaaagtgagacgtaaactctgggttcataagcatagggagttaaaataatttgtccaattatcgcttcaatgcccggaagtgggcagtactattggcacaagagatgagaagggtcaggcaattttgttaccagctagtcattagaatcatgtaaaatgtaaagaacaaaaccattaacgattagtatgtttccaaattaattgtagttatatttgtcatc

SEQ ID NO: 24412 - protein, 221 aa, Glycine max
MTRSLAMASSSMLCPKLGSCAVSHTKFQAFHLSSMFSPLGRGLVSPWSGLKHLGISAKAKPLIHIDRKGGCKGKVVYASLFGVGAPEALVIGVVALLVFGPKGLAEVARNLGKTLRTFQPTIKELQDVSREFKSTLEREIGLDDNLSPTQNTYNSNIRNTTPTSSSTSTVDPNGTPDPTKAYSSEEYLKITEEQLKASAAQQQGQTPSKEGDNEPQIQPSG

SEQ ID NO: 24413 - protein, 215 aa, Glycine max
MASSSMLCPKLGSCAVSHTKFQAFHLSSMFSPLGRGLVSPWSGLKHLGISAKAKPLIHIDRKGGCKGKVVYASLFGVGAPEALVIGVVALLVFGPKGLAEVARNLGKTLRTFQPTIKELQDVSREFKSTLEREIGLDDNLSPTQNTYNSNIRNTTPTSSSTSTVDPNGTPDPTKAYSSEEYLKITEEQLKASAAQQQGQTPSKEGDNEPQIQPSG

SEQ ID NO: 24414 - protein, 210 aa, Glycine max
MLCPKLGSCAVSHTKFQAFHLSSMFSPLGRGLVSPWSGLKHLGISAKAKPLIHIDRKGGCKGKVVYASLFGVGAPEALVIGVVALLVFGPKGLAEVARNLGKTLRTFQPTIKELQDVSREFKSTLEREIGLDDNLSPTQNTYNSNIRNTTPTSSSTSTVDPNGTPDPTKAYSSEEYLKITEEQLKASAAQQQGQTPSKEGDNEPQIQPSG

SEQ ID NO: 24415 - DNA, 1527 bp, Glycine max
acttttccttcttccatggtttgcctctctctctctctctctctctactctcctttcatttcagaaatcatggggaaataaacataattaatctccgaaataaacaaaacatttttcgtgacattcgatgaatgatatgaaggtgagaagtgggttgtgcgtgtggccaaatgtgagacaactttgctttagaaaaggcattctatatgggtttatgcgattgttttctactccgttgaaaacgctgcgtggagctagccgctcgctgagagtggctcaattttgcagtgttgccaatatgtcttcctcattgcagattgaattggtaccttgcctgaaggacaattatgcatatctgttacatgatgtagatacgggtacagttggtgttgttgatccttctgaagctgtgcctgtcatagatgccttgagtaggaaaaatcgaaatttgacatacatactcaacactcaccatcatcatgatcacacgggtggaaatgtagaattgaaagcaagatacggggcaaaggtgattggttcaggaactgacaagaaaaggattcctggcattgatatccacttgaacgatggtgataagtggatgtttgctggccatgaggtgcgtgtaatggacactcctggtcacacccaaggccatataagcttctattttcctggatctggggcaatttttactggagacactttgttcagcttatcatgtggcaagctctttgaaggaaccccacagcagatgctatcttctcttaaaaagatcatgtctttgccagataatacaaatatatactgtggacacgagtatacattgaataatacaaagtttgcattgtctatcgaacctgaaaacgaggaacttcaatcctatgctgcccaagtagcttaccttcgaagtaaaggcctgcccacgattcccaccacactgaagatggaaaaggcttgtaatccattccttcgtacatccagtgctgcaatccggcaatcactaaacattgcagccacagcaaatgatgcagaagcccttggtggcatccggcaagcaaaggataatttttagatttttgacttacaatattttgaacgtttgaagaaacttgttctatgtagggtaggatataaatccatccgtggaataatatatgcttgatgctatgttctcgatgtatatgatttcagaaattttggttctatttggaagtgtgtgtacttggtgcctaagaaagttgtggtgcgatttagaggggtacaatgcacacatgacactcactcagtgttctgttcagttgaggatgtgtggcgggaagaagggtagctagaagtttaaagtaaactccttgtccttggccaatggccacccaccccacttccctcagaagaacaagaaccttgtaaatgtatgggtctgtactctggacttagagcgcgtatatttggcttcttcaggatctatctgcaagtctcaacatacaaataaaataaatcaattagtaatataaattatactatttt

SEQ ID NO: 24416 - protein, 315 aa, Glycine max
MNDMKVRSGLCVWPNVRQLCFRKGILYGFMRLFSTPLKTLRGASRSLRVAQFCSVANMSSSLQIELVPCLKDNYAYLLHDVDTGTVGVVDPSEAVPVIDALSRKNRNLTYILNTHHHHDHTGGNVELKARYGAKVIGSGTDKKRIPGIDIHLNDGDKWMFAGHEVRVMDTPGHTQGHISFYFPGSGAIFTGDTLFSLSCGKLFEGTPQQMLSSLKKIMSLPDNTNIYCGHEYTLNNTKFALSIEPENEELQSYAAQVAYLRSKGLPTIPTTLKMEKACNPFLRTSSAAIRQSLNIAATANDAEALGGIRQAKDNF

SEQ ID NO: 24417 - protein, 312 aa, Glycine max
MKVRSGLCVWPNVRQLCFRKGILYGFMRLFSTPLKTLRGASRSLRVAQFCSVANMSSSLQIELVPCLKDNYAYLLHDVDTGTVGVVDPSEAVPVIDALSRKNRNLTYILNTHHHHDHTGGNVELKARYGAKVIGSGTDKKRIPGIDIHLNDGDKWMFAGHEVRVMDTPGHTQGHISFYFPGSGAIFTGDTLFSLSCGKLFEGTPQQMLSSLKKIMSLPDNTNIYCGHEYTLNNTKFALSIEPENEELQSYAAQVAYLRSKGLPTIPTTLKMEKACNPFLRTSSAAIRQSLNIAATANDAEALGGIRQAKDNF

SEQ ID NO: 24418 - protein, 286 aa, Glycine max
MRLFSTPLKTLRGASRSLRVAQFCSVANMSSSLQIELVPCLKDNYAYLLHDVDTGTVGVVDPSEAVPVIDALSRKNRNLTYILNTHHHHDHTGGNVELKARYGAKVIGSGTDKKRIPGIDIHLNDGDKWMFAGHEVRVMDTPGHTQGHISFYFPGSGAIFTGDTLFSLSCGKLFEGTPQQMLSSLKKIMSLPDNTNIYCGHEYTLNNTKFALSIEPENEELQSYAAQVAYLRSKGLPTIPTTLKMEKACNPFLRTSSAAIRQSLNIAATANDAEALGGIRQAKDNF

SEQ ID NO: 24419 - DNA, 1636 bp, Glycine max
agagtgtaaagtgtaaaacgttggttttctctgagaatggcaatgcaggcaggggaactctgtcagcaccaaagtccacattgccctctcattttcttcaacccgattcccgattttggttccttcagcggagggttgtttctcgagcccaaaatccccgattccttcgttcgttccatttcgctgaagatccactccactcccttttcagaatccaatcctcgccgccaccggagaagggttccggcagcgtgctttctatcggtgagcttgccgagtgcaaatctcgttaccgaacccaaactgcaaaatggcgaacacgtgtcagaccaggtgacaacctcaaacggtgtcgttctgcaaagaaaggttagggtacgaggaggcaatgccgtcaacaccaccaaacatctctgggccggtgctgtagccgctatggtctctagaacttgtgtggctccacttgaaaggcttaagttggagtacatagtccgtggtgagaagaggagcatattcgagcttattagcaaaattgcttcttctcaagggttgagaggattttggaaaggcaaccttgtgaatattctgcggacagctccattcaaagcggttaatttttgtgcttacgatacttatagaaagcagctgcttaggttttctgggaatgaggaaactaccaattttgagaggtttattgctggtgctgctgctgggattactgctaccattatctgcctccctcttgacactatccgaaccaagttggtggcacctggtggagaagctttgggcggtgtaattggtgctttcagatacatgattcgaactgaaggattcttttctctttacaagggtttagtgccatcaattataaaaggaatgaagagaatccagaatatgcataaacagggtcaggaactgagtgcctttgaccaacttgagttgggaccggtaaggacattgttgaatggggctattgctggtgcttgtgcagaagctgctacatacccatttgaagtggtgagaaggcaacttcaattgcaagtccaggctacaaaattaagttcttttgcaacatttgccaaaatagttgaacagggaggcattccagctctctatgcaggacttattcccagcttattacaggtgcttccttcagcttccataagtttctttgtctatgagttcatgaagattgttctgaaagtggagtaggcaatgaacaaattcccaggtatatactgctaagaagctgcaccatgatttacgggcaagctgctaaaatagttacagaatagtaacattcaattttaattggcaatcatatttgatgtctgcctttgagggtgaaaggataattcaggtctgctatcccgtacaactgatcacagtatcaacagaatttttggattgactctacactcaatatacccaggcttcaagtctgcaaagtgaaaataaatttattttgttactcccagatcttgaatcctattctcattaggtttacacaattttgttagttttttttttccatctggcagtaagtcttgatcattatcatggggcgtacaagcaaagtccaattactttataagttataacctgaaatgtagcttataaattattcttgtgc

SEQ ID NO: 24420 - protein, 392 aa, Glycine max
MAMQAGELCQHQSPHCPLIFFNPIPDFGSFSGGLFLEPKIPDSFVRSISLKIHSTPFSESNPRRHRRRVPAACFLSVSLPSANLVTEPKLQNGEHVSDQVTTSNGVVLQRKVRVRGGNAVNTTKHLWAGAVAAMVSRTCVAPLERLKLEYIVRGEKRSIFELISKIASSQGLRGFWKGNLVNILRTAPFKAVNFCAYDTYRKQLLRFSGNEETTNFERFIAGAAAGITATIICLPLDTIRTKLVAPGGEALGGVIGAFRYMIRTEGFFSLYKGLVPSIIKGMKRIQNMHKQGQELSAFDQLELGPVRTLLNGAIAGACAEAATYPFEVVRRQLQLQVQATKLSSFATFAKIVEQGGIPALYAGLIPSLLQVLPSASISFFVYEFMKIVLKVE

SEQ ID NO: 24421 - protein, 390 aa, Glycine max
MQAGELCQHQSPHCPLIFFNPIPDFGSFSGGLFLEPKIPDSFVRSISLKIHSTPFSESNPRRHRRRVPAACFLSVSLPSANLVTEPKLQNGEHVSDQVTTSNGVVLQRKVRVRGGNAVNTTKHLWAGAVAAMVSRTCVAPLERLKLEYIVRGEKRSIFELISKIASSQGLRGFWKGNLVNILRTAPFKAVNFCAYDTYRKQLLRFSGNEETTNFERFIAGAAAGITATIICLPLDTIRTKLVAPGGEALGGVIGAFRYMIRTEGFFSLYKGLVPSIIKGMKRIQNMHKQGQELSAFDQLELGPVRTLLNGAIAGACAEAATYPFEVVRRQLQLQVQATKLSSFATFAKIVEQGGIPALYAGLIPSLLQVLPSASISFFVYEFMKIVLKVE

SEQ ID NO: 24422 - protein, 259 aa, Glycine max
MVSRTCVAPLERLKLEYIVRGEKRSIFELISKIASSQGLRGFWKGNLVNILRTAPFKAVNFCAYDTYRKQLLRFSGNEETTNFERFIAGAAAGITATIICLPLDTIRTKLVAPGGEALGGVIGAFRYMIRTEGFFSLYKGLVPSIIKGMKRIQNMHKQGQELSAFDQLELGPVRTLLNGAIAGACAEAATYPFEVVRRQLQLQVQATKLSSFATFAKIVEQGGIPALYAGLIPSLLQVLPSASISFFVYEFMKIVLKVE

SEQ ID NO: 24423 - DNA, 1500 bp, Glycine max
atcgaagccacatacagagtgagagagaaagagcttagcttaggaatggaagcagagaagcatgaagcagcattggcagtggcctcagtctccctctctctccccagagttttgcccttcttccaacccaccacccctcagccaaccaagctcaaagtcccaacccaggcctcatccctcacacacctttctctctccactccttccaaaacctccttcaaatccaccatctcctccaccccccttcacgcccctctctccctcggcccccaccgcccccgcgacccctccaacgccgccgccctccgccgcgccgcagtagtctggttccgcaacgacctccgcctcctcgacaacgagtgcctcaccgccgccaacaacgagtccctctccgtcctccccgtctactgcttcgaccccgccgactacggtaagtcggcctccggcttcgacaagaccggcccctaccgcgccgccttcctcatcgactctgtctccgacctccgccgtaacctccaggctcgcggctccgatctcgtcgttcgcgttgggaagcccgaggcggtgctggtggagctcgccaaggccgtcggggccgacgccgtgtacgcgcaccgagaggtctcgcacgacgaggcgaaggcggaggagagggtggaggcggccatgaaggaggagaatgtggaggtgaagtacttctggggaagcacgttgtatcacgtggacgatttgccttttcaattggaggacatgccttccaattacggagggtttagggatagggttcagaaattggaggtaaggaagacaattgaggcattagatcagcttaagggaatgccttctcgcggtgatgttgagcctggggagattccttctttaatggacctaggccttaatccatctgcaacaatgtcacagaatggaaagtgcgttgctaatgcttctatggtaggaggggagactgaggcactgcagaagcttaaaaaatttgcagctgagtgtgcagctcagccacacaaggggtttaaggatggaacacagagtatatatggtgccaacttctcctgcaagatttctccgtggttggcaatgggatgcctttcccctcgcacaatgtatgaagaactgaagaagactgccggcagagtcatttctgcttcgtccaaccggaatgatggtggtaatggctcgtccagaactggaacaaattggttgatgtttgagttgctatggagggacttctttaggtttataacaaaaaaatacagtactgcaaagaaacagctggaagctgctccagccactgcatgtgctggtgcatttgcttaaactagaagttctagtgggcataaggaagtttgtttcagggtatgggttggttccctacgcagtcatggcagtagggtgctggatgaacaagatttggttccccttctgaagttctgttgtaactgacagatacattatttcaatatggaagctttacattattttctc

SEQ ID NO: 24424 - protein, 443 aa, Glycine max
IEATYRVREKELSLGMEAEKHEAALAVASVSLSLPRVLPFFQPTTPQPTKLKVPTQASSLTHLSLSTPSKTSFKSTISSTPLHAPLSLGPHRPRDPSNAAALRRAAVVWFRNDLRLLDNECLTAANNESLSVLPVYCFDPADYGKSASGFDKTGPYRAAFLIDSVSDLRRNLQARGSDLVVRVGKPEAVLVELAKAVGADAVYAHREVSHDEAKAEERVEAAMKEENVEVKYFWGSTLYHVDDLPFQLEDMPSNYGGFRDRVQKLEVRKTIEALDQLKGMPSRGDVEPGEIPSLMDLGLNPSATMSQNGKCVANASMVGGETEALQKLKKFAAECAAQPHKGFKDGTQSIYGANFSCKISPWLAMGCLSPRTMYEELKKTAGRVISASSNRNDGGNGSSRTGTNWLMFELLWRDFFRFITKKYSTAKKQLEAAPATACAGAFA

SEQ ID NO: 24425 - protein, 428 aa, Glycine max
MEAEKHEAALAVASVSLSLPRVLPFFQPTTPQPTKLKVPTQASSLTHLSLSTPSKTSFKSTISSTPLHAPLSLGPHRPRDPSNAAALRRAAVVWFRNDLRLLDNECLTAANNESLSVLPVYCFDPADYGKSASGFDKTGPYRAAFLIDSVSDLRRNLQARGSDLVVRVGKPEAVLVELAKAVGADAVYAHREVSHDEAKAEERVEAAMKEENVEVKYFWGSTLYHVDDLPFQLEDMPSNYGGFRDRVQKLEVRKTIEALDQLKGMPSRGDVEPGEIPSLMDLGLNPSATMSQNGKCVANASMVGGETEALQKLKKFAAECAAQPHKGFKDGTQSIYGANFSCKISPWLAMGCLSPRTMYEELKKTAGRVISASSNRNDGGNGSSRTGTNWLMFELLWRDFFRFITKKYSTAKKQLEAAPATACAGAFA

SEQ ID NO: 24426 - protein, 221 aa, Glycine max
MKEENVEVKYFWGSTLYHVDDLPFQLEDMPSNYGGFRDRVQKLEVRKTIEALDQLKGMPSRGDVEPGEIPSLMDLGLNPSATMSQNGKCVANASMVGGETEALQKLKKFAAECAAQPHKGFKDGTQSIYGANFSCKISPWLAMGCLSPRTMYEELKKTAGRVISASSNRNDGGNGSSRTGTNWLMFELLWRDFFRFITKKYSTAKKQLEAAPATACAGAFA

SEQ ID NO: 24427 - DNA, 1440 bp, Glycine max
acaccaaatcctcaccttcacaacttcatttctcccctgtaattgttacctcccctgcatcaccccactctgtttttgcaccttcttcctctgtttctttggccttcccctgtttcccactaatgattacatcaaagagggtccacagattcttcaagttccgtgccttagtgctttctcttatctattccaaccattctttgtgccttgtgaatgcccaaaactgacccttccccaaactcttatctgccacaaatcccctgctaataccctgaatcaaagaggggtactttgacacgaacctgtcactttccttgttaaatagtatctgcttattctcccatccaatcacaccgtgcaccactttctctccctcccctctgaaactttcgttttcaaatagaacaagaaacgagaaaaaaaaaatcaaatggttgctaaggactataaccacttatcatgtacggttgtgagcatgggcaaaatgatgcagagcattgactactctagacttttctggctattttttggggtcttctctcacgtaaatcatgaaggaaagcctaggatttaggataatataccataaagaaattttgttctgctttcattttatccctttttttcttctctgcacaattaagttgcagtgtgaaagacatacataagaggtagttgttaagttggtatatatagataagaatcaaatatgggagaaaattgttatgtggaaatcgacccaactggtcgatatggcagggtaagttctaatccctctgttttcattccattttttgtgtgctatacttttttgccatttttgtgcacatggttagtattgtaaaatttaagccaagtactaattagtttattagactgattggtaatctcctaaaattgtattaagttgagaagaaatactgtgtttctaaaactgtatgtgtaatggatggattgtaaatgattaaggtgccctgcttgtgattgattattagtttggagatattcttggaaaaggggcaatgaagacagtgtacaaagccattgatgaggtgcttggaattgaggtagcatggaaccaggtcagactcaatgaggtgcttcgcacgccggacgatttgcagcggctttactcagaggttcatctcctcagtaccctcaagcatcaatccatcttaagattctacacttcttggattgatattgatagcagggccttcaactttatcacagaatttttcacatctgggtcactgagagagtaactaacttccattccaactataacttaggcaattactccagtcccattatgtagttccttacaaaagttaggcaacttaggtgtaagtcatcacaaagattttgtttgatacaagtgaagcgattccaaattttaacaatttatatttaatggacacatataagggatcataaaag

SEQ ID NO: 24428 - protein, 97 aa, Glycine max
HQILTFTTSFLPCNCYLPCITPLCFCTFFLCFFGLPLFPTNDYIKEGPQILQVPCLSAFSYLFQPFFVPCECPKLTLPQTLICHKSPANTLNQRGVL

SEQ ID NO: 24429 - protein, 80 aa, Glycine max
MKTVYKAIDEVLGIEVAWNQVRLNEVLRTPDDLQRLYSEVHLLSTLKHQSILRFYTSWIDIDSRAFNFITEFFTSGSLRE

SEQ ID NO: 24430 - protein, 74 aa, Glycine max
TKSSPSQLHFSPVIVTSPASPHSVFAPSSSVSLAFPCFPLMITSKRVHRFFKFRALVLSLIYSNHSLCLVNAQN

SEQ ID NO: 24431 - DNA, 1412 bp, Glycine max
atcccttcttttcaaaaccctaattcctcttttctctcttccaatctcatttctcaagatcgctttcgctgcttcctcaggaattatgtcttttgtgcggaattatcaagcagaagatcgtagtttacatagtggttactggtccacctttgatggaaacaactatggtaacaacaataggaaaagaagcaggaacaattattataacaggaattgtaacatttacaatgataaccggacaaaatttggggaccattttaatttttacaatgctgatcatgctaattatgctagatatgatgctgttcgatcatctttgaaaaggagaaaatattcagcccctgtttggcaagaaagccagcagtactatgttccacccatggtccatgacaatatcccttcagcctataatttccaaggtcctccgacaagatctgatggtgatgcctctacatcagctagctgcaagcgtgattgctctatttttgaagatgataaacctgtcttcatgtcaagggacgaaattgatagacactctccatcaagaaaagatggtattgatgtacatcatgagacacacttgcggtactcctattgtgccttccttcagaatcttggaatgcgtcttgagctgcctcaaaacatcattgggacagctatggttctgtgccaccgtttctttgttcgacgatcacatgcttgccatgatagatttttgattgctactgctgctctttttcttactgcaaagtcagaggaagctccacgtcatttgaataacgtattgagaacatccagtgaaattttatataaacaagattttgctttgttatcctaccggtttcctgttgattggtttgaacagtatcgggagcgggtgcttgaggctgaacaactgatacttactactctaaattttgaactcaatgtgcaacatccatatgtacctcttacatctgttcttaacaagttgggtctatcaaagactgttttggtgaatctggcattaaacttggtcagtgaagggcttcggagttctctgtggcttcaatttaaaccccatcatattgctgctggagctgcatatcttgctgccaagtttctgaacatggatctcgcagcttatcagaacatctggcaagagttccagacaacaccatccatacttcaagatgtctcgcagcaattaatggagctcttttaaaagtatggaagaactggattacagcgttcttcttagtagagtaggttttgagtatataattcaaaatgttatttactttggagggagacattaggaactatgacatatttggtgagttacaggattagtggttgtgtgacctacggatttttaagttttaccaacttctctgaatcttctgctaacatgtcgagcatgccttgcgttc

SEQ ID NO: 24432 - protein, 400 aa, Glycine max
SLLFKTLIPLFSLPISFLKIAFAASSGIMSFVRNYQAEDRSLHSGYWSTFDGNNYGNNNRKRSRNNYYNRNCNIYNDNRTKFGDHFNFYNADHANYARYDAVRSSLKRRKYSAPVWQESQQYYVPPMVHDNIPSAYNFQGPPTRSDGDASTSASCKRDCSIFEDDKPVFMSRDEIDRHSPSRKDGIDVHHETHLRYSYCAFLQNLGMRLELPQNIIGTAMVLCHRFFVRRSHACHDRFLIATAALFLTAKSEEAPRHLNNVLRTSSEILYKQDFALLSYRFPVDWFEQYRERVLEAEQLILTTLNFELNVQHPYVPLTSVLNKLGLSKTVLVNLALNLVSEGLRSSLWLQFKPHHIAAGAAYLAAKFLNMDLAAYQNIWQEFQTTPSILQDVSQQLMELF

SEQ ID NO: 24433 - protein, 372 aa, Glycine max
MSFVRNYQAEDRSLHSGYWSTFDGNNYGNNNRKRSRNNYYNRNCNIYNDNRTKFGDHFNFYNADHANYARYDAVRSSLKRRKYSAPVWQESQQYYVPPMVHDNIPSAYNFQGPPTRSDGDASTSASCKRDCSIFEDDKPVFMSRDEIDRHSPSRKDGIDVHHETHLRYSYCAFLQNLGMRLELPQNIIGTAMVLCHRFFVRRSHACHDRFLIATAALFLTAKSEEAPRHLNNVLRTSSEILYKQDFALLSYRFPVDWFEQYRERVLEAEQLILTTLNFELNVQHPYVPLTSVLNKLGLSKTVLVNLALNLVSEGLRSSLWLQFKPHHIAAGAAYLAAKFLNMDLAAYQNIWQEFQTTPSILQDVSQQLMELF

SEQ ID NO: 24434 - protein, 274 aa, Glycine max
MVHDNIPSAYNFQGPPTRSDGDASTSASCKRDCSIFEDDKPVFMSRDEIDRHSPSRKDGIDVHHETHLRYSYCAFLQNLGMRLELPQNIIGTAMVLCHRFFVRRSHACHDRFLIATAALFLTAKSEEAPRHLNNVLRTSSEILYKQDFALLSYRFPVDWFEQYRERVLEAEQLILTTLNFELNVQHPYVPLTSVLNKLGLSKTVLVNLALNLVSEGLRSSLWLQFKPHHIAAGAAYLAAKFLNMDLAAYQNIWQEFQTTPSILQDVSQQLMELF

SEQ ID NO: 24435 - DNA, 2330 bp, Glycine max
tcacactctttcttcctttcttcttcttcttcttcttcctgtcttcacctaaccaaatgggcgcctccaccacctgatccacctctgtttcttcttcctttcatccgttcatacgggggttagatgatggagtcctgtgattgtatagatacgcagtatccgccggatgaacttcttgtgaagtatcagtatatctcggatgtgctaattgctcttgcgtatttttcgattccggtggagctcatctattttgttcagaagtctgctttctttccgtatagatgggtgcttatgcagtttggtgcctttattgttctctgtggagcaactcatttcataaacctgtggacattctctccgcactctaagtctgttgctgttgtcatgacgattgccaaagtttcgtgtgctattgtgtcatgtgcgacggcactgatgcttgtacacattattcccgatctgttgagtgtcaagaggcgcgaatcgatcctcaagaacaaggctgaagagcttgacagagagatgggacttattcttactcaggaagagacgggaagacatgttagaatgttgactcatgaaattaggagcacacttgacaggcatacaattttaaagactactcttgtggagctggggaggactttgggcttggaggagtgtgcattatggatgccttcgagaagtggtctgaatctgcaactttcccatactttaacctatcatgtgcaagttgggtctacggtgcaaacaaacaattctattgtcaatgaagttttcaacagccctcaagctatgcggataccacccacctgtccattggccaggatcagacctcttgtgggaagatatgtgccccctgaagttgttgctgttcgggtgccgcttttgaatctgtcaaattttcaaattaacgattggcctgatatttcagcaaagagctatgcaatcatggttctcatcctccctactgacagtgttagaaaatggcgagaccatgagttggaacttgttgatgttgttgcagatcaggtagcagttgccctttcacatgctgctattttggaggagtctatgcgtgcccgtgatcaactcatggagcagaatgttgctttagatttagcccggcgagaggcagagatggcaattcatgctcgcaatgattttcttgctgtcatgaatcatgaaatgaggacaccaatgcatgcaattatagcattgtcatcacttctcttggagactgaactgacgccagagcaaagggttatgatagagacagtgttgaagagtagtaatgttttggcaacactcattaatgatgttctagatctttctcgacttgaagatggtagcctcgaattagaaatgggaaaattcaacctccatggagttttgggagagattgttgaactgataaaaccaatagcatccgtgaaaaagttacctatcaccttaattctgtctcctgatctgcctactcatgccattggtgatgaaaagcggcttacacaaactcttttgaatgtcgtgggtaatgctgtcaaattcactaaggagggctatgtttctgtaagagtatcagttgcaaaaccagaatcttcacaggattggcgacctccagagttttatccagcatctagtgatggccatttctacattcgagtccaggttaaggactctggatgtgggattctcccacaagatattccgcatctctttaccaagtttgcccagtctcggagtggaccagctcgacctagcagtggtgcaggtcttgggcttgccatttgtaaaagatttgtaaacctcatgggaggccacatatggattgagagtgagggccttgacaaaggaagcacagctacatttatagtcaaacttgggatttgtggcaatccagatccatccgatcatcaagctgcaaacagaagccaagcatatagtggaagtggtggcctcgctagatttaaacccttcatcacagatgaaaacgacactggtttttctactagacgcaatcaaagaagtttctaatatccaagacaccaaaattgcatacctctcaatcacagtcgacaagatggagtaaacctcctactttcattttgcatgtgctaaattgtataatttgcagtttgcggctgtagaataggattactatgtcaggcatatttctaacaaacaggttttatgcgaactcctgttgtattaactagaatacaatacaacaaaacaaagttgagagacgatctgttacttaatttgacttgtagtatatattgtcagtggcttttgccgtttagcgttcataaaaatgacagtattggcac

SEQ ID NO: 24436 - protein, 636 aa, Glycine max
MMESCDCIDTQYPPDELLVKYQYISDVLIALAYFSIPVELIYFVQKSAFFPYRWVLMQFGAFIVLCGATHFINLWTFSPHSKSVAVVMTIAKVSCAIVSCATALMLVHIIPDLLSVKRRESILKNKAEELDREMGLILTQEETGRHVRMLTHEIRSTLDRHTILKTTLVELGRTLGLEECALWMPSRSGLNLQLSHTLTYHVQVGSTVQTNNSIVNEVFNSPQAMRIPPTCPLARIRPLVGRYVPPEVVAVRVPLLNLSNFQINDWPDISAKSYAIMVLILPTDSVRKWRDHELELVDVVADQVAVALSHAAILEESMRARDQLMEQNVALDLARREAEMAIHARNDFLAVMNHEMRTPMHAIIALSSLLLETELTPEQRVMIETVLKSSNVLATLINDVLDLSRLEDGSLELEMGKFNLHGVLGEIVELIKPIASVKKLPITLILSPDLPTHAIGDEKRLTQTLLNVVGNAVKFTKEGYVSVRVSVAKPESSQDWRPPEFYPASSDGHFYIRVQVKDSGCGILPQDIPHLFTKFAQSRSGPARPSSGAGLGLAICKRFVNLMGGHIWIESEGLDKGSTATFIVKLGICGNPDPSDHQAANRSQAYSGSGGLARFKPFITDENDTGFSTRRNQRSF

SEQ ID NO: 24437 - protein, 635 aa, Glycine max
MESCDCIDTQYPPDELLVKYQYISDVLIALAYFSIPVELIYFVQKSAFFPYRWVLMQFGAFIVLCGATHFINLWTFSPHSKSVAVVMTIAKVSCAIVSCATALMLVHIIPDLLSVKRRESILKNKAEELDREMGLILTQEETGRHVRMLTHEIRSTLDRHTILKTTLVELGRTLGLEECALWMPSRSGLNLQLSHTLTYHVQVGSTVQTNNSIVNEVFNSPQAMRIPPTCPLARIRPLVGRYVPPEVVAVRVPLLNLSNFQINDWPDISAKSYAIMVLILPTDSVRKWRDHELELVDVVADQVAVALSHAAILEESMRARDQLMEQNVALDLARREAEMAIHARNDFLAVMNHEMRTPMHAIIALSSLLLETELTPEQRVMIETVLKSSNVLATLINDVLDLSRLEDGSLELEMGKFNLHGVLGEIVELIKPIASVKKLPITLILSPDLPTHAIGDEKRLTQTLLNVVGNAVKFTKEGYVSVRVSVAKPESSQDWRPPEFYPASSDGHFYIRVQVKDSGCGILPQDIPHLFTKFAQSRSGPARPSSGAGLGLAICKRFVNLMGGHIWIESEGLDKGSTATFIVKLGICGNPDPSDHQAANRSQAYSGSGGLARFKPFITDENDTGFSTRRNQRSF

SEQ ID NO: 24438 - protein, 580 aa, Glycine max
MQFGAFIVLCGATHFINLWTFSPHSKSVAVVMTIAKVSCAIVSCATALMLVHIIPDLLSVKRRESILKNKAEELDREMGLILTQEETGRHVRMLTHEIRSTLDRHTILKTTLVELGRTLGLEECALWMPSRSGLNLQLSHTLTYHVQVGSTVQTNNSIVNEVFNSPQAMRIPPTCPLARIRPLVGRYVPPEVVAVRVPLLNLSNFQINDWPDISAKSYAIMVLILPTDSVRKWRDHELELVDVVADQVAVALSHAAILEESMRARDQLMEQNVALDLARREAEMAIHARNDFLAVMNHEMRTPMHAIIALSSLLLETELTPEQRVMIETVLKSSNVLATLINDVLDLSRLEDGSLELEMGKFNLHGVLGEIVELIKPIASVKKLPITLILSPDLPTHAIGDEKRLTQTLLNVVGNAVKFTKEGYVSVRVSVAKPESSQDWRPPEFYPASSDGHFYIRVQVKDSGCGILPQDIPHLFTKFAQSRSGPARPSSGAGLGLAICKRFVNLMGGHIWIESEGLDKGSTATFIVKLGICGNPDPSDHQAANRSQAYSGSGGLARFKPFITDENDTGFSTRRNQRSF

SEQ ID NO: 24439 - DNA, 1134 bp, Glycine max
atgttctttgtttgattgaggcttctgaacagtttctgacaccgaaattcagccacaaagttgaccatcttgggatggatgagaatatcatcatgttccaccatttccccacattgatacaacaaggagattccaacaattgaaaactccttatcatctttctcttgcaacatcgtttcgcggttcctttgccgtgatttcaattgttgcataagaaaacatcactcactacttctttcctctcctttttcattcaatttctctgattgacacaattgccgcccagatcagtgattgacccaattgagaaaaaaaccttaaaagttccgggttttttttttctttaattgttgctggttttgcaggtggcccagttgggaattcaagatggttctgtgatttaacaagtgccctcttgaaatactacccgagtgagatacttcgatttaactccctctgttgatggctgaaactcaattgaagtgattcactggactactttatcatcttggtctgaggttgaagctatttaatttctgaatttccgtgagtttcttaatccctgagtatggccgggagccaagatcagttagagatcaagtttcggttgagtgatggtacggatattggccccaaaagttattctgctgctactagtattgtaacactaaaagaaagtgttcttgctcaatggccaaaagataaggagtatggaccaagaactgtaaaagatttgaagttaattagtgctggaaaagtattggagaacaacaaaacagtgggagactgtcagagtccattgtgtgatctacctggtggagttacaacaatgcatgtggttgtgcaaccaccttctgtggaggaagatatgaaagtagcaagcgaagcaaagcagagcaaatgtgtttgtgtgatattatagtgtccagattgaatagaaggtgtcatctatttaggtggttaaaagttacacttgtattcattttaaaagtaatctatggctttcaaaagatttcctcatacacaaactgtttcgttgcatgcctcattgtctaattgatgtaaatgctgattgaaatgagaactctaaaattattctcgtgcttcagctagatgcaaagtgcacctagagtt

SEQ ID NO: 24440 - protein, 117 aa, Glycine max
MAGSQDQLEIKFRLSDGTDIGPKSYSAATSIVTLKESVLAQWPKDKEYGPRTVKDLKLISAGKVLENNKTVGDCQSPLCDLPGGVTTMHVVVQPPSVEEDMKVASEAKQSKCVCVIL

SEQ ID NO: 24441 - DNA, 1311 bp, Glycine max
attcaaaacctcttccccttctcatctatcctcctcctaaaaattggtcaaaatctatccaatctctttgcatattccttcttatcatcatcttcttcttcttctctgttgcctctagaattgaaaagttcttcttcctgcccatagtctttgacacccttttccaacctctagattttttcttccctctataattatctccttcacagaaaccttcttatcccacatatcatcaattaccttgttcctctcaaagtttgattctttttctcttgaattggattgttataatttttgttcatacttacatgttatgcagttatgaatgattgagagacaacacaaatgtcttctccagtgatctccgagatcctcctctctggcttcaccataaactcttccctaagacgcaggacacacttggtgcaatctttctctgttgttttcctccactggttctacgttttctcatgaactaaataaattaacctcgtacatagtataaacatagtacgtaccagtgttcttttttcaaattcaatcattaaacctagctagcagattagggttattattgttcaaatagcagactactgcatggcttctcctggtggaagtggaacctattcatctggttccagttctcttcaaaactctggttctgaaggagacagagacatcatggaacagaggaagaggaagagaatgttgtccaatagggaatcggcacgtagatcgaggataaggaaacagcagcacctggaaggtctgagtgcccaattggatcagcttaaaaaggagaacgcacaaatcaacacaaacataagcatcacgacgcagatgtacctcaacgtggaagctgagaacgcgattctgagggctcaaatgggggaactgagcaacagattgaactctctgaacgaaatgataagtttcattaactccaccaacaacaactgcttgatgatgttcgatgaggcacaggagacgaccactcagttgttcaatgattgtggcttcatggattatgcttggaatggaataccaatcatggcttccgctgacaatgaaatgttgatcatgtattgatcttgagttgtagcacaacacccacgtcttctcttgttttaattttttttttttttttttattgtaatagtgatgtctattgttttcagtttatgttatgtttagggttgtcttgtcttgtgcgtatttcaagagggggattcttttttcttctcgaaaatgtaaaatatcgaccttttattttccagatagtgattttcgttcatttccactttttatttt

SEQ ID NO: 24442 - protein, 163 aa, Glycine max
MASPGGSGTYSSGSSSLQNSGSEGDRDIMEQRKRKRMLSNRESARRSRIRKQQHLEGLSAQLDQLKKENAQINTNISITTQMYLNVEAENAILRAQMGELSNRLNSLNEMISFINSTNNNCLMMFDEAQETTTQLFNDCGFMDYAWNGIPIMASADNEMLIMY

SEQ ID NO: 24443 - protein, 135 aa, Glycine max
MEQRKRKRMLSNRESARRSRIRKQQHLEGLSAQLDQLKKENAQINTNISITTQMYLNVEAENAILRAQMGELSNRLNSLNEMISFINSTNNNCLMMFDEAQETTTQLFNDCGFMDYAWNGIPIMASADNEMLIMY

SEQ ID NO: 24444 - protein, 127 aa, Glycine max
MLSNRESARRSRIRKQQHLEGLSAQLDQLKKENAQINTNISITTQMYLNVEAENAILRAQMGELSNRLNSLNEMISFINSTNNNCLMMFDEAQETTTQLFNDCGFMDYAWNGIPIMASADNEMLIMY

SEQ ID NO: 24445 - DNA, 839 bp, Glycine max
atcattgagaagcttggatgatgactgggatgatgaaaaggcaagtcccatgactcccatccacatgggggctgctaacagtaataacagcattgaagaggttgaatctgatgacaatgtcgaagcaatggaatctgatgacaatgttcaagcaatggagtctgatgacaaagtccaagcaatggaatccgatgacaatgtccaagcagcagaatctgatgacaatggccaagctgtggaatatgatcaaggaaactgggaaataggttttaatggtgcccccagcagatggagtagggatttggtaggaggaattagcgatgaggatgaggatgaggatgcggaagcttctgaagatgacaatgacaatggcattggcattgaaaacaatgaggaggaggattcagaggcagatgctatgagtgaggagggttcagatggtactgcaaacagaattgtaaatgaagaaagctcagactcggatgtctctgaagattcttctgattagaacattgcttttttaagggaaaggatcctcgagtaacatttattttctcaaaaacttaataatggaagaaatggagagaaaaggaaacagaggatcttttctcgttttttaaggctgcgttacattttttccccctatactgcagccagctttacaacgtacctgagctccaaagtcatggcaaggcttcatagttcatactagttttatggttgagtagattaatagtgtataataggatatataaacccgcccattgcgtggattcttaaaaaaaaaataaaaaaaattaatatcattatacaatcaataattcaagaaaacaattcac

SEQ ID NO: 24446 - protein, 168 aa, Glycine max
SLRSLDDDWDDEKASPMTPIHMGAANSNNSIEEVESDDNVEAMESDDNVQAMESDDKVQAMESDDNVQAAESDDNGQAVEYDQGNWEIGFNGAPSRWSRDLVGGISDEDEDEDAEASEDDNDNGIGIENNEEEDSEADAMSEEGSDGTANRIVNEESSDSDVSEDSSD

SEQ ID NO: 24447 - protein, 152 aa, Glycine max
MTPIHMGAANSNNSIEEVESDDNVEAMESDDNVQAMESDDKVQAMESDDNVQAAESDDNGQAVEYDQGNWEIGFNGAPSRWSRDLVGGISDEDEDEDAEASEDDNDNGIGIENNEEEDSEADAMSEEGSDGTANRIVNEESSDSDVSEDSSD

SEQ ID NO: 24448 - protein, 147 aa, Glycine max
MGAANSNNSIEEVESDDNVEAMESDDNVQAMESDDKVQAMESDDNVQAAESDDNGQAVEYDQGNWEIGFNGAPSRWSRDLVGGISDEDEDEDAEASEDDNDNGIGIENNEEEDSEADAMSEEGSDGTANRIVNEESSDSDVSEDSSD

SEQ ID NO: 24449 - DNA, 1302 bp, Glycine max
aagacagagactttggatgtttcttcgttgcagaagcagaggcacaccaatcccatttaatttatcgttcctcttctcctcttcactttccaaccacccattcattccttttcttcttgcactctgccctttgggtaagcatattctcattttgcttctctgctttcataacttgaggagtacccaatagttttattagacttctttgtttggttttaactttaatctttgtggtatgatttcattccttcttagttacactacggatcatcatcatcatttttaagatagttaccacaaaagtcgacaaatttagcatatagtatgatttgtgattaaataatgagtcctagtatagacatagactatttgctcatatatgaagagaggttaaataaaaaatgaaagtgtggagttgaagagtattttagttcaagaaaacatgtaaatcaaaatgaacatggacataaaactttggattgtctatttattgtcatagattttagataaaattatcttcttttttttttgtagttctaaactgatgagatgttatgatttgtgttctacaacctttaaagcagttaacttcttcaggcagttggtaatggggaagtccaaattatgcttggttgaattccattatttctcacaaagtataggtctatgtgggtgcaggaggagtttgtaacatggctgctctacctactgcggagcttagtgatgcaaatgcaacacatgtagcaagtggtgatgtgagggtgctgcatccagtgttcaaggtttatggccaggccacggcattctccggccccattgtcaccgtgaaggtgtttgaagacaacgtgttggtgagggagcttgttgagacgaaaggcgaaggaagagtattggttgttgatggaggaggaagcttgaggtgtgcattgatgggagggaatttggtacagattgcatataacatggggtgggctgggattgtggtgaatggttgcgttagagatgtggatgatatcaatgcgtgtaatattggcgtcagagccttggcttctcatccactcagatccaacaaaaagcgcactggtgaaaagaatgtccctgtttatgttggtggaacatttattcgtgaaggagaatggttgtatgcagataatgatggcatcctcgtatcaaaatttgagttgtcaaactaaaatagtttaccttcagttcaatattattgcaactttagacttttaagtcatgctttttctggtttagtttgtggggaagtgaataaaattttaagaatttcttgtgtgc

SEQ ID NO: 24450 - protein, 166 aa, Glycine max
MAALPTAELSDANATHVASGDVRVLHPVFKVYGQATAFSGPIVTVKVFEDNVLVRELVETKGEGRVLVVDGGGSLRCALMGGNLVQIAYNMGWAGIVVNGCVRDVDDINACNIGVRALASHPLRSNKKRTGEKNVPVYVGGTFIREGEWLYADNDGILVSKFELSN

SEQ ID NO: 24451 - protein, 87 aa, Glycine max
MGGNLVQIAYNMGWAGIVVNGCVRDVDDINACNIGVRALASHPLRSNKKRTGEKNVPVYVGGTFIREGEWLYADNDGILVSKFELSN

SEQ ID NO: 24452 - protein, 83 aa, Glycine max
MVALEMWMISMRVILASEPWLLIHSDPTKSALVKRMSLFMLVEHLFVKENGCMQIMMASSYQNLSCQTKIVYLQFNIIATLDF

SEQ ID NO: 24453 - DNA, 1339 bp, Glycine max
agaatattattcactgtactttatccctttctgtgagggaattatggtaattgatatcgaggttttgactcatggattctgatcgccccagaaaaccttccaaaaatttagttcactctcgcttcttccttttcggcttctattgctgggattgggagttcttaaccgctctcctcctttttagttgttccccttaatcttgttccttcatatttttatttttttttcttattagatcagattgaacaaaagggttgctctttattttttaatcttgggggaataatagaaatagaaataagaaaagattagtgaggttgaaatgttgcaacaacgatcggtgccggcaccgttcttgacgaagacgtatcagttggtggaggatccggggacggacgaggtaatatcgtggggtgaaagtgggaacacttttgtggtgtggaagcatgcggattttgcaaaggatttgcttccaaaatatttcaagcacaacaacttctccagctttgttcgacagctcaacacctatggatttcgaaaaattgtgccagacaaatgggaattcgcgaacgaacacttcaagcgagggcagaaggagcttctctcggagatcaaacgccgcaagaccgtgcctcagtcgtcgacacattccccggatgccggaaaacccggcgccgaaggcaactctccgtcgaaccccggcggctgcgacgacgcgggctccacctcaacctcgtcctcgtcctccggttccaagaaccagggatcggtggaaacaaacacaacgccttctcaccagttatcgagcgagaacgagaaactgaagaaggataacgaaacgctgagttgcgagctggcacgtgcgaggaagcagtgcgatgagctcgtggcttttctcagggaccgtctgatggtgggtcccgatcagatcgatcgcatcatgcggcaaggaagttgcggatctgaaaacgcggtaggtgaaggcggtggtggaggacactgtttgaaactgtttggtgtttggttaaaaggggatacactaacagacaaaagaaacaaccacaagagaggccgcgaagaccaaatgggcttcggtgggcctcgcctcaaggagtcaaagcccgttgttgactttagtaggaataggatgatgatgattaatgaaaaaggaaaaggctaagcggtaatcatgtttgggtaaaaagaccaaatgcgctagcctatgcttcctaaacatgttgaggctgtgtaatttttaatgtacgtaggtaaatgcctctatgaatattgattgggaaattaaacaggttttaataatcaatgtatggccttttatgtc

SEQ ID NO: 24454 - protein, 285 aa, Glycine max
MLQQRSVPAPFLTKTYQLVEDPGTDEVISWGESGNTFVVWKHADFAKDLLPKYFKHNNFSSFVRQLNTYGFRKIVPDKWEFANEHFKRGQKELLSEIKRRKTVPQSSTHSPDAGKPGAEGNSPSNPGGCDDAGSTSTSSSSSGSKNQGSVETNTTPSHQLSSENEKLKKDNETLSCELARARKQCDELVAFLRDRLMVGPDQIDRIMRQGSCGSENAVGEGGGGGHCLKLFGVWLKGDTLTDKRNNHKRGREDQMGFGGPRLKESKPVVDFSRNRMMMINEKGKG

SEQ ID NO: 24455 - DNA, 1647 bp, Glycine max
cttgtgttttatggtgtcgtagcctcctccaaaaacagagaagcaccatctcctaacactgctcaaaagcgaaggatggaggttgttttggcgtcgtcgtccgtcgacggcggaatagggtgctgggaccttcacaccggcgcggagcagctccgctacaaatcttgcacctccccttctcatggcctcgtctctgtcgctgctcgcttcatcgcttcgtcgcagcttcgagaagatcaatcagcccctggctctgttctcttctggtcctggtccaagcctcaagttgaagtgaagagttttcctgctgaacaaattaaacctcttgctactaatcacccgggaacctttatagctgctggagctccgtctggtgacatttacttgtgggaggttgaaacgggtaggttgcttaagaagtggcatgctcattttagggcggtttcttgcttggtgttttccgaagatgactcgctgctggtatctggttctgaagatggatccgtaagagtttggtctctcttcatgatatttgatgatttgcgaaatcagcaagcaagtagtctttatgagtatagtttttcagagcacaccctgactgtgactgatgttgttattggtaatggagggtgcaatgcgattatcgtgtcagcttcaaaggatcggacttgtaaggtatggagcttatctaggggaatgctactaagaaatatagtattcccttcaataattaattgcattgcattggatccagccgaacatgtcttttatgctggcagtgaagatggaaagatatttatcgcagcacttaacactgaaagcatcgccactaataattatgggatgcatatcatcagttctttttctaaccacagcaaccaagttacttgcttagcatatggctcaagtgagaatttgttaatatctgggtcagaggatggaatggttcgtgtttggaatgcgagaactcgtaacattgtccgcatgtttaaacattctaaaggacctgtaaataacattctcgttgttagacgagaaaatgactccagtaatcacatatcttctaatgtacaagcatcatcaagaaagcagggatctaatttaccccctccattggaaaaatatgcaaattcaatagatgacgactcagatatgaagactatgatcagccttgggggtggcaggaaatctgtggatccttcatacatcagttctcatgtgatatctaattacattaaggaacttcagcatcaaggttcagctgctgcttctgaaatggagatggagaaactaaaacatgattaccaaaagtcagtgcaaatggctaaccagttgaagaaaatgaatgaaaaattgcatcaattttgtgtaaaggagctgttggatggtagtcaagctagaaccttgggtgaaaatgacaattaagacatttttttttctcttgccagtcacttttctattttgtaggtaaaatgtgtaggatctctggcatcagtagattcccttctgcgagtttgcaattcttcaatgctgctattatattatttttgttgcccctcgtcccctttctctcggtgtgttttgctgctgaatgttgtaaaaagaattttcatcttttgtggatacgataaaagaattgatttctac

SEQ ID NO: 24456 - protein, 449 aa, Glycine max
MEVVLASSSVDGGIGCWDLHTGAEQLRYKSCTSPSHGLVSVAARFIASSQLREDQSAPGSVLFWSWSKPQVEVKSFPAEQIKPLATNHPGTFIAAGAPSGDIYLWEVETGRLLKKWHAHFRAVSCLVFSEDDSLLVSGSEDGSVRVWSLFMIFDDLRNQQASSLYEYSFSEHTLTVTDVVIGNGGCNAIIVSASKDRTCKVWSLSRGMLLRNIVFPSIINCIALDPAEHVFYAGSEDGKIFIAALNTESIATNNYGMHIISSFSNHSNQVTCLAYGSSENLLISGSEDGMVRVWNARTRNIVRMFKHSKGPVNNILVVRRENDSSNHISSNVQASSRKQGSNLPPPLEKYANSIDDDSDMKTMISLGGGRKSVDPSYISSHVISNYIKELQHQGSAAASEMEMEKLKHDYQKSVQMANQLKKMNEKLHQFCVKELLDGSQARTLGENDN

SEQ ID NO: 24457 - protein, 299 aa, Glycine max
MIFDDLRNQQASSLYEYSFSEHTLTVTDVVIGNGGCNAIIVSASKDRTCKVWSLSRGMLLRNIVFPSIINCIALDPAEHVFYAGSEDGKIFIAALNTESIATNNYGMHIISSFSNHSNQVTCLAYGSSENLLISGSEDGMVRVWNARTRNIVRMFKHSKGPVNNILVVRRENDSSNHISSNVQASSRKQGSNLPPPLEKYANSIDDDSDMKTMISLGGGRKSVDPSYISSHVISNYIKELQHQGSAAASEMEMEKLKHDYQKSVQMANQLKKMNEKLHQFCVKELLDGSQARTLGENDN

SEQ ID NO: 24458 - protein, 474 aa, Glycine max
LVFYGVVASSKNREAPSPNTAQKRRMEVVLASSSVDGGIGCWDLHTGAEQLRYKSCTSPSHGLVSVAARFIASSQLREDQSAPGSVLFWSWSKPQVEVKSFPAEQIKPLATNHPGTFIAAGAPSGDIYLWEVETGRLLKKWHAHFRAVSCLVFSEDDSLLVSGSEDGSVRVWSLFMIFDDLRNQQASSLYEYSFSEHTLTVTDVVIGNGGCNAIIVSASKDRTCKVWSLSRGMLLRNIVFPSIINCIALDPAEHVFYAGSEDGKIFIAALNTESIATNNYGMHIISSFSNHSNQVTCLAYGSSENLLISGSEDGMVRVWNARTRNIVRMFKHSKGPVNNILVVRRENDSSNHISSNVQASSRKQGSNLPPPLEKYANSIDDDSDMKTMISLGGGRKSVDPSYISSHVISNYIKELQHQGSAAASEMEMEKLKHDYQKSVQMANQLKKMNEKLHQFCVKELLDGSQARTLGENDN

SEQ ID NO: 24459 - DNA, 1006 bp, Glycine max
acagtatatgcaaacaaagcctccaccaatgtcgctgctgccgccgccgaaacctcaccggagctccggtaactcccctggcgacagcattccagactggatctccgaatcaatcaacggcggctccctccgccgcgtcgacctcaactccggcaccaacggctgggcgtcgccgccaggctccgtgttctccctccgctccgaaagttactttcagaaccgccaaaaatgtcccgccggcgactacctcctctcgccggcgggcatggactggctcaaatccgccgcgaaactcgaccacgtgctctcacgcgcggacaaccgcgtgatgcacgcgctgcgaagatgtcaaaccctaggtcgctccctaaagagcttcgtcttcgcggtgaacctccagatcccgggcgcgaaggagcaccacagcgcggtgttctacttcgcgaccgaggaaccggatccggtccgaaccggttcactcttaaaccggttcgtgcacggcgacgacgcgtttcggaaccagcggttcaagctggtgaaccggatcgcgaaggggccgtggatcgtgaagaaggccgtggggagccacagcgcgtgcttgttagggaaagcgttgaattgcgcttactacaaaggttcgaattacctcgaaattgacgtcgatatcggaagcagcgcgatcgcgaacgcgattctgcacctcgcgttggggtgcgtgacgacggtgacgatcgatatggggtttgtggtggaggcacaggcggaggatgagttgccggagcggttgatcggtgcgattagggtttgccagatggagatggcgtcggccacggtggttgaggcgttgcacgtgccgcgcggggttgggtgggccaaggtgaatcatcataagtctgcggatgagcttgctttggatgattagatatttgtttagtgatagtagtacgaagtttatgatttttttttatattttaattattcttcaatggattttaatttcttgttc

SEQ ID NO: 24460 - protein, 306 aa, Glycine max
QYMQTKPPPMSLLPPPKPHRSSGNSPGDSIPDWISESINGGSLRRVDLNSGTNGWASPPGSVFSLRSESYFQNRQKCPAGDYLLSPAGMDWLKSAAKLDHVLSRADNRVMHALRRCQTLGRSLKSFVFAVNLQIPGAKEHHSAVFYFATEEPDPVRTGSLLNRFVHGDDAFRNQRFKLVNRIAKGPWIVKKAVGSHSACLLGKALNCAYYKGSNYLEIDVDIGSSAIANAILHLALGCVTTVTIDMGFVVEAQAEDELPERLIGAIRVCQMEMASATVVEALHVPRGVGWAKVNHHKSADELALDD

SEQ ID NO: 24461 - protein, 304 aa, Glycine max
MQTKPPPMSLLPPPKPHRSSGNSPGDSIPDWISESINGGSLRRVDLNSGTNGWASPPGSVFSLRSESYFQNRQKCPAGDYLLSPAGMDWLKSAAKLDHVLSRADNRVMHALRRCQTLGRSLKSFVFAVNLQIPGAKEHHSAVFYFATEEPDPVRTGSLLNRFVHGDDAFRNQRFKLVNRIAKGPWIVKKAVGSHSACLLGKALNCAYYKGSNYLEIDVDIGSSAIANAILHLALGCVTTVTIDMGFVVEAQAEDELPERLIGAIRVCQMEMASATVVEALHVPRGVGWAKVNHHKSADELALDD

SEQ ID NO: 24462 - protein, 297 aa, Glycine max
MSLLPPPKPHRSSGNSPGDSIPDWISESINGGSLRRVDLNSGTNGWASPPGSVFSLRSESYFQNRQKCPAGDYLLSPAGMDWLKSAAKLDHVLSRADNRVMHALRRCQTLGRSLKSFVFAVNLQIPGAKEHHSAVFYFATEEPDPVRTGSLLNRFVHGDDAFRNQRFKLVNRIAKGPWIVKKAVGSHSACLLGKALNCAYYKGSNYLEIDVDIGSSAIANAILHLALGCVTTVTIDMGFVVEAQAEDELPERLIGAIRVCQMEMASATVVEALHVPRGVGWAKVNHHKSADELALDD

SEQ ID NO: 24463 - DNA, 1303 bp, Glycine max
ccaccaccggcttcgtcttacaacccggcgagtccaacgtgatcaccgtgccggccgcctggtccggccgcctctgggggcggaccgtctgcacccaagacgccaccggaaaattctcctgcgtcacaggcgactgcggctcctccgccgtggaatgcaacggcgcaggagccgccccgccggccacgctcgccgagttcacactgaacggcgccggcgggcttgatttcttcgacgtgagcctcgtcgacggttacaatctccccatgatcgtggagccacagggcggaagcggcgccggaaactgcagcgccacggggtgcgtggtggacttaaacacgccgtgcccgacggagctcaaggtgatgagcagcggagatggcgtggcgtgcaaaagcgcgtgtgaagcattcgatgatccacaatactgctgtagtggcgcttacgcgacgcctgacacatgcaaacccagttcatactcgcagttcttcaagagcgcgtgcccacgcgcttacagttacgcttatgacgatggctccagcaccttcacttgtgcctcagcggattataccatcactttctgcccccagccatccactagttcgattaaatcggggaacgggaaatacccaatggcggtggacacttcgggtggtaatgtggacgtaagaaaaaacaatgttatggcggtgattgcttatgttttggtggcatttgtggcaactcaattaggtggcccttcactgccaaagttgcattaaaatggctgggctatgactttctattaattaatacacagtgcatgatggcaatggccagtctctatcggttgggcgatcaacttgcatcagattcttacttgtgtgtgaagagatgcaatgggaaccggtgcaaagattgtcacttctcaacttgtaaaactaaaacattaatttgccatgtcttcatatggagcacttatttagagtaggaaggttcagatgcacagacagaattaggcagctgccttttacatcagctcacgagtctcataccattcatgtgttgtcctctgtcttcagagaaaaaacaaataacaggaggacattttgggaagaatttgtgacattttatgaaaataaatatcattaccattaatttgctccaattgtaaatatgaacatcaaatttattgaggttaacaaagtagtactcaaattttcatttgctggagcagttattttctcgcctaatggcaccagatagatgtatgtgcgtttgacctacttttatatattcatatatatcataaattttgcttact

SEQ ID NO: 24464 - protein, 252 aa, Glycine max
TTGFVLQPGESNVITVPAAWSGRLWGRTVCTQDATGKFSCVTGDCGSSAVECNGAGAAPPATLAEFTLNGAGGLDFFDVSLVDGYNLPMIVEPQGGSGAGNCSATGCVVDLNTPCPTELKVMSSGDGVACKSACEAFDDPQYCCSGAYATPDTCKPSSYSQFFKSACPRAYSYAYDDGSSTFTCASADYTITFCPQPSTSSIKSGNGKYPMAVDTSGGNVDVRKNNVMAVIAYVLVAFVATQLGGPSLPKLH

SEQ ID NO: 24465 - protein, 164 aa, Glycine max
MIVEPQGGSGAGNCSATGCVVDLNTPCPTELKVMSSGDGVACKSACEAFDDPQYCCSGAYATPDTCKPSSYSQFFKSACPRAYSYAYDDGSSTFTCASADYTITFCPQPSTSSIKSGNGKYPMAVDTSGGNVDVRKNNVMAVIAYVLVAFVATQLGGPSLPKLH

SEQ ID NO: 24466 - protein, 131 aa, Glycine max
MSSGDGVACKSACEAFDDPQYCCSGAYATPDTCKPSSYSQFFKSACPRAYSYAYDDGSSTFTCASADYTITFCPQPSTSSIKSGNGKYPMAVDTSGGNVDVRKNNVMAVIAYVLVAFVATQLGGPSLPKLH

SEQ ID NO: 24467 - DNA, 1341 bp, Glycine max
gaaattttccggaaatagaaaacataatttctctctctgtgttgggtgtgtctctgtttctctctctctctccgttgttgttgttgatccatggaagaggaacttcagaacccagaagaaagttgaaacctttgggctaaactccgatacccaattggctgaaagctccaatgcggtgttgttggaggaggagaccctccttgaagaaggaaaatcgtggatctgatgatggtggggacatgggtgatgaagatggtttcaggtggttgtagggttgttgtggggggcaacgatccggtggtggtgcggcagcagcatagacgacgatgcagcttcacttctcgcctagcatgagaagcatcacgatatcgagcaaaaatgggtttattgacttgatgaagatcaaggtcgcagcttgccacatttcctatcgaaccctcttccacaccatcctcatcctcgctttcttgttgccctttgtctttattctcactgctcttgttacccttgaaggtgtcaacaagtgctcctcattcgattgtttaggtaggcggttgggaccaaagcttcttggtagggttgatgatccggcgcagagactagttagagatttttacaatatccttaacgaagtaaagactagggaaattccatctgctctagagcttccggattcatttgatcaactggtttctgatatgaagagcaatcaatatgatgcgaaaacgtttgcattcatgttaaggggaatgatgcagaaatttgagagagaaatcagagaatctaaattttcagagctgatgaataaacattttgcagcaagttcagttcctaaagggattcattgtctgtctttgcgtttgactgatgaatattcgtcaaatgcccatgcacgcaaacaactgcctcctccagaattactacctacactgtctgacaactcttaccatcattttattgtttcaacggataacatcttggctgcttcggtagttgttacttctactgtgcagtcatctcagaaacctgagaatatagtcttccatgtcatcactgacaaaaaaacttatgctggtatgcactcatggtttgctctaaatccagccactcctgctatagttgaggtcagaggcattcaccagtttgactggttgacgagagaaaatgttccagtacttgaagcagtagaaaatcaaaatgggatcaggaatgataactggggttattgatttttcaattagcaaaatgtcaggttgatgttgttctggctggtttaataataactacattgatttctttgtaactcggttctctttttcagttcaaaggatcttatatatg

SEQ ID NO: 24468 - protein, 300 aa, Glycine max
MQLHFSPSMRSITISSKNGFIDLMKIKVAACHISYRTLFHTILILAFLLPFVFILTALVTLEGVNKCSSFDCLGRRLGPKLLGRVDDPAQRLVRDFYNILNEVKTREIPSALELPDSFDQLVSDMKSNQYDAKTFAFMLRGMMQKFEREIRESKFSELMNKHFAASSVPKGIHCLSLRLTDEYSSNAHARKQLPPPELLPTLSDNSYHHFIVSTDNILAASVVVTSTVQSSQKPENIVFHVITDKKTYAGMHSWFALNPATPAIVEVRGIHQFDWLTRENVPVLEAVENQNGIRNDNWGY

SEQ ID NO: 24469 - protein, 292 aa, Glycine max
MRSITISSKNGFIDLMKIKVAACHISYRTLFHTILILAFLLPFVFILTALVTLEGVNKCSSFDCLGRRLGPKLLGRVDDPAQRLVRDFYNILNEVKTREIPSALELPDSFDQLVSDMKSNQYDAKTFAFMLRGMMQKFEREIRESKFSELMNKHFAASSVPKGIHCLSLRLTDEYSSNAHARKQLPPPELLPTLSDNSYHHFIVSTDNILAASVVVTSTVQSSQKPENIVFHVITDKKTYAGMHSWFALNPATPAIVEVRGIHQFDWLTRENVPVLEAVENQNGIRNDNWGY

SEQ ID NO: 24470 - protein, 277 aa, Glycine max
MKIKVAACHISYRTLFHTILILAFLLPFVFILTALVTLEGVNKCSSFDCLGRRLGPKLLGRVDDPAQRLVRDFYNILNEVKTREIPSALELPDSFDQLVSDMKSNQYDAKTFAFMLRGMMQKFEREIRESKFSELMNKHFAASSVPKGIHCLSLRLTDEYSSNAHARKQLPPPELLPTLSDNSYHHFIVSTDNILAASVVVTSTVQSSQKPENIVFHVITDKKTYAGMHSWFALNPATPAIVEVRGIHQFDWLTRENVPVLEAVENQNGIRNDNWGY

SEQ ID NO: 24471 - DNA, 2083 bp, Glycine max
catacgcgcacactgagtcataacgctaatggactcgttctctttcaccactgttccatagagcaactcaaaaccacacacacaaaaaaacatgaatccccgttttgcccctctctctttctcaatcccttctcttcgaaaaacaccttctctcattggtgctaaccacacctccgctcgcttctgctcccgataaataataccacacaaaaaaaatcccaacttttttttttcttcttcttcttttatttcaattcaattcatttttttttgtgattttttctggttattgttattaatttctgtgagaagtgcacaatttgtttccatggatccaaccgtagcgaagcctggctttctcagaaacgttctggttcggttactcctcttcggcgttttcatcgtcgtcgtacggttcgcttacgtcatcaccctcgccggtgagtcctgcaccgtcggcgacttctgcttcttctctccgtcgatcaacctcgcaatcgccggcaccagatcaggcgccctcgcagcgcgcggaggagccgccgggccgccggagcgctatgccagcaaggactggatcaacggcgtccggttctactcgtcggctttccaggacatgatctccggtggcttcctctcgccggcggcgaaggcgctctgcgtggagacgccgaccggccgcgacgtcctcgcgctgcgcgagatcggcgtcatcgacgccgtcgggatctcgaagaaggcgtctccgccgcttgtgaaatccggcgaggctcgccggattccgttccccgatggctcgttcgacttcgtgttcgccggcgacggcgctttagaaaaatcgccgcggccggcggagttcgccgccgaaatctctcggacgctcaaacccgaagggtttgccgcgttccatgtaaaggccaatgacacttacagttacaattcattcgttgatttgttgaatttttgttgcaacgtggtgaaaataaacgacatgttagggtttgattcatccatacctcacataagagagatcgtggtgaagaaagtgcgtcacacaattgattctgaatccaattcaaactccaattccaatggaaaagaatgctctgttccggagtacaaggaaaagctggtgagaaatgcagaggctttgattgaagaggagccactgaagccatggctgactctaaagaaaaacgtgaagaacataaagtacctatcttcaatggttgatataagcttcaaggataggtatgtgtatgttgatgttggagctagaagctatggttccagcattggacgttggtttaggaaacagtacccgaaacagaacaagacctttcatgtgtatgcaattgaggctgataaaacgtttcatcaggagtatgaaacgaaaaagggtgttactttgttgccttatgctgcatgggtgaggaatgagagtttggtgtttgagattaaccgcgacccgggggagaaggagaaggagaaggagaaggagaaggttaagggtaagggaaggggaatggggaggattcaaccattgaaatcttcaggtggttttgatggtggtgaggttgagaagattcctgggttcgatttcgcagactggttgaagaacacggtttcggagaatgatttcgttgtgatgaagatggatgtggagggtactgagtttgatttgattccaagattgtttgaaactggggctatctgtttggtggatgagatttttcttgagtgccattacaataggtggcagaggtgttgccctggacagaggagccccaagtatgagaaaacttatgatcagtgcttgcagctcttcacttctctcagacaaagtggagttcttgttcatcaatggttttaattaactttgtagaattgcctgatggatgatgggtcaaaccctatatgcatgttcttagcttctgcatgtttcttctttttagttttcttatttttttcccaagccaatagagaagagagagagtgagagtgagagttctttattttttaaaatttctctacttgtaacagttgcaactgaaagtgaaaattaaaaccatccctttacaac

SEQ ID NO: 24472 - protein, 514 aa, Glycine max
MDPTVAKPGFLRNVLVRLLLFGVFIVVVRFAYVITLAGESCTVGDFCFFSPSINLAIAGTRSGALAARGGAAGPPERYASKDWINGVRFYSSAFQDMISGGFLSPAAKALCVETPTGRDVLALREIGVIDAVGISKKASPPLVKSGEARRIPFPDGSFDFVFAGDGALEKSPRPAEFAAEISRTLKPEGFAAFHVKANDTYSYNSFVDLLNFCCNVVKINDMLGFDSSIPHIREIVVKKVRHTIDSESNSNSNSNGKECSVPEYKEKLVRNAEALIEEEPLKPWLTLKKNVKNIKYLSSMVDISFKDRYVYVDVGARSYGSSIGRWFRKQYPKQNKTFHVYAIEADKTFHQEYETKKGVTLLPYAAWVRNESLVFEINRDPGEKEKEKEKEKVKGKGRGMGRIQPLKSSGGFDGGEVEKIPGFDFADWLKNTVSENDFVVMKMDVEGTEFDLIPRLFETGAICLVDEIFLECHYNRWQRCCPGQRSPKYEKTYDQCLQLFTSLRQSGVLVHQWF

SEQ ID NO: 24473 - protein, 418 aa, Glycine max
MISGGFLSPAAKALCVETPTGRDVLALREIGVIDAVGISKKASPPLVKSGEARRIPFPDGSFDFVFAGDGALEKSPRPAEFAAEISRTLKPEGFAAFHVKANDTYSYNSFVDLLNFCCNVVKINDMLGFDSSIPHIREIVVKKVRHTIDSESNSNSNSNGKECSVPEYKEKLVRNAEALIEEEPLKPWLTLKKNVKNIKYLSSMVDISFKDRYVYVDVGARSYGSSIGRWFRKQYPKQNKTFHVYAIEADKTFHQEYETKKGVTLLPYAAWVRNESLVFEINRDPGEKEKEKEKEKVKGKGRGMGRIQPLKSSGGFDGGEVEKIPGFDFADWLKNTVSENDFVVMKMDVEGTEFDLIPRLFETGAICLVDEIFLECHYNRWQRCCPGQRSPKYEKTYDQCLQLFTSLRQSGVLVHQWF

SEQ ID NO: 24474 - protein, 293 aa, Glycine max
MLGFDSSIPHIREIVVKKVRHTIDSESNSNSNSNGKECSVPEYKEKLVRNAEALIEEEPLKPWLTLKKNVKNIKYLSSMVDISFKDRYVYVDVGARSYGSSIGRWFRKQYPKQNKTFHVYAIEADKTFHQEYETKKGVTLLPYAAWVRNESLVFEINRDPGEKEKEKEKEKVKGKGRGMGRIQPLKSSGGFDGGEVEKIPGFDFADWLKNTVSENDFVVMKMDVEGTEFDLIPRLFETGAICLVDEIFLECHYNRWQRCCPGQRSPKYEKTYDQCLQLFTSLRQSGVLVHQWF

SEQ ID NO: 24475 - DNA, 1225 bp, Glycine max
aaaaaaacgtgtcatgtgcctctctccttttcccccaaaatctgcttcagttcacgttcacgcttcgctacctgcgcctattcattgtctcttctcttcccctgctcaacgtttttcttctcccttcccccacccacctccactcttttcatttctattctcttcccaaacagaacgaccatcggaacaaacggcattttgtcaaacagttacgagactcagcattattcataggtgatagtactggcagtgattaagattgcaattgcacaatcagaatattttttatatacaatgttttcaaggtgactgacaacaattaagattgcaattgcaccaaggggacaaaacaaaacaatgagcagcgttttgcaagggaaacgcaagcgccaggacttggcttcaaggctctcggcctcaatgaataatgaggagggtcgtgtctacaacatcattcgcgggaggaaggagatggggatatggcaaggggacatcaaacgagaagccaacatccccgatagtttgttgaagaaatccatcaagatgcttatcaccaagaaactcgtcaaggaggttgtgaacgtgcagaacaggtccaagaagttgttgatggcatcggatttcgaaccctccaatgagatcagtggtggagagtggtacaccgaaggcaaactcgacacagaatttattgacaagctgtctgaggcttgctttagtagtattcgtcgcctgaaggtcgcgacttgtgagggcatccttgagtggattaggaaggcgggtggtggagtcagtaaagggcagatggagcagattttgaagaagttggttatggagaataaggtgcaggaagtgactagtgatggctctggggattttgagtctgttcctgttggtgaagtttgttatagattggtgaagaaggctgctggtgttggtgccatggcttctattccttgtggggtttgtcctaggattaattcttgtacacccgatggtgttatctcccctacaacttgtcaatattatcagaaatggttggacttctaaatgtgtcccattcaaatccaagtccttttttagtttgggattttacataccttttagttttgaattccatcttttttatttttttatttttcatatggcactttctagagtctttattgattttctgttcaatgtgatacttaaaagaattaattgattttccttttgcatttaaggg

SEQ ID NO: 24476 - protein, 229 aa, Glycine max
MSSVLQGKRKRQDLASRLSASMNNEEGRVYNIIRGRKEMGIWQGDIKREANIPDSLLKKSIKMLITKKLVKEVVNVQNRSKKLLMASDFEPSNEISGGEWYTEGKLDTEFIDKLSEACFSSIRRLKVATCEGILEWIRKAGGGVSKGQMEQILKKLVMENKVQEVTSDGSGDFESVPVGEVCYRLVKKAAGVGAMASIPCGVCPRINSCTPDGVISPTTCQYYQKWLDF

SEQ ID NO: 24477 - protein, 208 aa, Glycine max
MNNEEGRVYNIIRGRKEMGIWQGDIKREANIPDSLLKKSIKMLITKKLVKEVVNVQNRSKKLLMASDFEPSNEISGGEWYTEGKLDTEFIDKLSEACFSSIRRLKVATCEGILEWIRKAGGGVSKGQMEQILKKLVMENKVQEVTSDGSGDFESVPVGEVCYRLVKKAAGVGAMASIPCGVCPRINSCTPDGVISPTTCQYYQKWLDF

SEQ ID NO: 24478 - protein, 191 aa, Glycine max
MGIWQGDIKREANIPDSLLKKSIKMLITKKLVKEVVNVQNRSKKLLMASDFEPSNEISGGEWYTEGKLDTEFIDKLSEACFSSIRRLKVATCEGILEWIRKAGGGVSKGQMEQILKKLVMENKVQEVTSDGSGDFESVPVGEVCYRLVKKAAGVGAMASIPCGVCPRINSCTPDGVISPTTCQYYQKWLDF

SEQ ID NO: 24479 - DNA, 1419 bp, Glycine max
gaggtacccctactactacttagagaaagtgaaagtgaaagtgaagtgcaacactgcagatgcagttgcaggggaatcagttaaaccgtatttaattttcacaacctccaactccaccaacttacccaatattctttactttcttcctccgtcttcttccctttcaaaccctagaaacagcaaaatcccccttttgatgcaaatgggatcactccaccaactctagagccacacccttcaagatttagctcatgcccacttcaattatggctccattttccacttccccccacttcacagccttcaccttcctcatcttgttcctcaaaacacaagcttttgatccactctctttcttttccttcacggattttgagaaagatccaaattttaagtcaagtgtggggctttatggcaatgcaaaagttgtcaataatggttctgaggttcttctttctgggaatggtgggagagtcatatacaagaagcccgtcaagcttgttcatggtggagcaagggaattggtctcattttcaacttactttgggttttcaatgtccttggatagtgagaagagtggcttggcttttgttatggttcctagtggtgttgaaggtgaggtttttggtaatagttcatatgggctttcttttggattgaaggaaagggaatttaaggttgtcggtgttcagtttagtgcttatggtaggaatgggggttctggtagttgtattgtgtccattaatgttggtagttctgttcctgttaaaacaatcaatgcctcatctgtcattatgggtctaaaaagtgaggggaaattgcatgcttggattgattatgaggcgagttcaaagcgcttagaagttaggttgaatcaatatggtcaatcaaggccagttgatccattgctttggcattcaatggacttatcaaatgtttggggtactgaagagatgtttgcaggctttagcacagtgaaagagaataatacttctcaaacatgctttctctattcatggagctttattgtgaggcattttccacattggatgcattctgagcctctgaatccaaaggtccttgctaagaagactgaaactccagcagtgaaatccagaagtgattgccttttgagggttcttgctgcaatgatatttggtgctggatgtggagcattgacagcattcattgtgctttatttgtggaccatctttggtaataaacgaccggtggtgccggaggagtatgctatgcagcctgtagattttgagtacaagaaagtgagcattgttgtagataaaacaaccatcatagatgctaaggagtagatctacagttggatgcttgcattgtaaatcagtgtttcttgtattcaggttttgctttgttgtagtttgataaagaactgttttatttacc

SEQ ID NO: 24480 - protein, 358 aa, Glycine max
MPTSIMAPFSTSPHFTAFTFLILFLKTQAFDPLSFFSFTDFEKDPNFKSSVGLYGNAKVVNNGSEVLLSGNGGRVIYKKPVKLVHGGARELVSFSTYFGFSMSLDSEKSGLAFVMVPSGVEGEVFGNSSYGLSFGLKEREFKVVGVQFSAYGRNGGSGSCIVSINVGSSVPVKTINASSVIMGLKSEGKLHAWIDYEASSKRLEVRLNQYGQSRPVDPLLWHSMDLSNVWGTEEMFAGFSTVKENNTSQTCFLYSWSFIVRHFPHWMHSEPLNPKVLAKKTETPAVKSRSDCLLRVLAAMIFGAGCGALTAFIVLYLWTIFGNKRPVVPEEYAMQPVDFEYKKVSIVVDKTTIIDAKE

SEQ ID NO: 24481 - protein, 353 aa, Glycine max
MAPFSTSPHFTAFTFLILFLKTQAFDPLSFFSFTDFEKDPNFKSSVGLYGNAKVVNNGSEVLLSGNGGRVIYKKPVKLVHGGARELVSFSTYFGFSMSLDSEKSGLAFVMVPSGVEGEVFGNSSYGLSFGLKEREFKVVGVQFSAYGRNGGSGSCIVSINVGSSVPVKTINASSVIMGLKSEGKLHAWIDYEASSKRLEVRLNQYGQSRPVDPLLWHSMDLSNVWGTEEMFAGFSTVKENNTSQTCFLYSWSFIVRHFPHWMHSEPLNPKVLAKKTETPAVKSRSDCLLRVLAAMIFGAGCGALTAFIVLYLWTIFGNKRPVVPEEYAMQPVDFEYKKVSIVVDKTTIIDAKE

SEQ ID NO: 24482 - protein, 257 aa, Glycine max
MSLDSEKSGLAFVMVPSGVEGEVFGNSSYGLSFGLKEREFKVVGVQFSAYGRNGGSGSCIVSINVGSSVPVKTINASSVIMGLKSEGKLHAWIDYEASSKRLEVRLNQYGQSRPVDPLLWHSMDLSNVWGTEEMFAGFSTVKENNTSQTCFLYSWSFIVRHFPHWMHSEPLNPKVLAKKTETPAVKSRSDCLLRVLAAMIFGAGCGALTAFIVLYLWTIFGNKRPVVPEEYAMQPVDFEYKKVSIVVDKTTIIDAKE

SEQ ID NO: 24483 - DNA, 1637 bp, Glycine max
acctttcgaagccgaaaacgcgttggaagcgtcgctgagggtagccttcgagtctctgcaaccatccctgagaccccctttctccttatccattcccacccccgaccaatacgccctcctcaacggcgcaattcttcacggcgctttaacggagccccatttctccaaaacacacatcaaacacttgcacgcaatcgtcaccgacggctacgccaccttcgtcaacttactcctcgacgccgtccttcaactctaccccaaacttctccactccgccaaaacgcagttgctctggctcaccgaggaaatggtccacgttttggccatcggctacgacgccgttttggtctcccttttgcgccaaataggcgccgccgattgcaccgaaggcaacttgaacctctgctccgagttggtgacccttttcttaaaacaattcgatcgcttattggaagacgcgccgcacgttttgtcgtctgcgttgtacgcgtttcttaggattttatctgatcaatttagggtttgtgtcgaaaagttggagactttgaagcggttggatatcgaaaagttggagactttgaagcggagggagattcatctgtgtgtgaagatagtgagggaagagtttcacttgtgtttgaaaattgggagggattttattcgcttgttgcaggatttagctcatgttcccgagtttaaggctttattacaagacattgtgttcaatccatctgtgtttaatgttgttgggtttaaggatgtttctcagatttactgcaccaggacttccagtaggtattctctgcttaggattagtcctgagatggaaacccaattgaggttttggttaacggatataaaattggggcatcacaggaggcaccagctttggtttgctaacaagtttttgaatgagcgtgataaagagtttcttatagttgatattgtgaggtttatatgttgtgcacaccaccctccaaatgagatcattcagtctgatatttttcctaggtgggcactgattggttggcttttgacgtgttgtaggaagaaacatgtggaggagagtgtgaaactggctttgttttatgactggctcttctttgatgaaaggatggatagtatcatgaacatcgagcctgcgattctgctcatggtgcattctgttcccaagttcatcaacatgactcatgctcttcttgagttcttgttgcatcttgtggatcgttatgatgtgggacggagaagtgtcattgttaaaggcgtgtcgtccgcctttcagttgcttgttcgcaaaggtgtggttcggtcgctcaatgttttgacttcttgttctgcacttaatcctggtctcagagagggtctgaaacggttgttatcagatgggaaggttggaagctcttaagggatttctgccaggatagttgctacctgctagtccacaatggccacctttgtgtttcttcaaattttgtcctcaatgtaaaccaacgtagataagaatatgtatcaatcaatacacacaaatgtaagttccaattcataggtagctaagaatattgcagaagtatgtaagaagcagtagacacaaatgtaagtcccgattcttataaattcaattgagttataagttatat

SEQ ID NO: 24484 - protein, 467 aa, Glycine max
PFEAENALEASLRVAFESLQPSLRPPFSLSIPTPDQYALLNGAILHGALTEPHFSKTHIKHLHAIVTDGYATFVNLLLDAVLQLYPKLLHSAKTQLLWLTEEMVHVLAIGYDAVLVSLLRQIGAADCTEGNLNLCSELVTLFLKQFDRLLEDAPHVLSSALYAFLRILSDQFRVCVEKLETLKRLDIEKLETLKRREIHLCVKIVREEFHLCLKIGRDFIRLLQDLAHVPEFKALLQDIVFNPSVFNVVGFKDVSQIYCTRTSSRYSLLRISPEMETQLRFWLTDIKLGHHRRHQLWFANKFLNERDKEFLIVDIVRFICCAHHPPNEIIQSDIFPRWALIGWLLTCCRKKHVEESVKLALFYDWLFFDERMDSIMNIEPAILLMVHSVPKFINMTHALLEFLLHLVDRYDVGRRSVIVKGVSSAFQLLVRKGVVRSLNVLTSCSALNPGLREGLKRLLSDGKVGSS

SEQ ID NO: 24485 - protein, 365 aa, Glycine max
MVHVLAIGYDAVLVSLLRQIGAADCTEGNLNLCSELVTLFLKQFDRLLEDAPHVLSSALYAFLRILSDQFRVCVEKLETLKRLDIEKLETLKRREIHLCVKIVREEFHLCLKIGRDFIRLLQDLAHVPEFKALLQDIVFNPSVFNVVGFKDVSQIYCTRTSSRYSLLRISPEMETQLRFWLTDIKLGHHRRHQLWFANKFLNERDKEFLIVDIVRFICCAHHPPNEIIQSDIFPRWALIGWLLTCCRKKHVEESVKLALFYDWLFFDERMDSIMNIEPAILLMVHSVPKFINMTHALLEFLLHLVDRYDVGRRSVIVKGVSSAFQLLVRKGVVRSLNVLTSCSALNPGLREGLKRLLSDGKVGSS

SEQ ID NO: 24486 - DNA, 1485 bp, Glycine max
gatgtcgtttacgagctcgggatcccaagaatagtcttcaccggcaatgggtgcttcgcacgctgcgtccacgacaacgtaagacatgttgcccttgagagtctcggttcagactcagagccttttgttgtccccaatctacccgacaggatcgaaatgacgaggtctcagcttccggtttttctgagaactccttctcagtttcctgatagggtgaggcagctagaggagaagagtttcggaacttttgtcaacagcttccatgacttggaacctgcttatgctgagcaagtgaaaaacaagtgggggaagaaggcgtggattataggaccagtgtccctttgcaacagaactgcagaagataaaaccgagagagggaagctacccactattgatgaggaaaaatgcttgaattggttgaattctaagaaaccaaattcagttctttatgtaagctttggaagcctgcttcggttaccctctgaacagttaaaggaaattgcttgtggtcttgaagcttctgaacaatcgttcatttgggtggtgaggaatatccataacaacccatcagaaaacaaagaaaatgggaacggaaactttcttccggaagggtttgagcagaggatgaaggaaacgggtaaagggttggttcttagaggttgggctcctcagttgttgattttggagcatgttgcaatcaaagggtttatgacccattgtggatggaactccactttggaaagtgtgtgtgcgggagtgcctatgattacgtggcctctctcggccgagcaattttcgaatgagaagttgataactgaggttttgaagattggtgttcaagtgggaagcagagagtggttgtcgtggaattcagaatggaaagatttggtgggaagagagaaggtggaatccgcagtgaggaagttgatggtggagagtgaagaggcagaggaaatgacaacaagagtcaaagacattgcagagaaagctaaaagagccgtggaagaaggtggaacatcttacgctgatgctgaggcgttgattgaggagcttaaagctcgcagattggcaagacaagattagatttttacataatagaagaaagaattcagtttctaaagtacgcataaaaacacaagaaaagaagcttgttactttcctgcaccacttgaaagttctaaattgcagtcagcaaccacaattttggtcgcaatattgttgttgcggaaccgtctaccgtaacagcccacaattgcaatgcgaatttcaatcccatgaaatactcaacgtagccgaaacagaatatcagtattgctctacacttctattccactcttttttttttgtttgtttgttaaaagacaagtttagatttcaatattctattatagcttctaagtgtcaatgataaaaaagggtgtgaccgtatgagatgttaggagatactaaatttaaatgaatgaaaaattatactatcttataaat

SEQ ID NO: 24487 - protein, 360 aa, Glycine max
DVVYELGIPRIVFTGNGCFARCVHDNVRHVALESLGSDSEPFVVPNLPDRIEMTRSQLPVFLRTPSQFPDRVRQLEEKSFGTFVNSFHDLEPAYAEQVKNKWGKKAWIIGPVSLCNRTAEDKTERGKLPTIDEEKCLNWLNSKKPNSVLYVSFGSLLRLPSEQLKEIACGLEASEQSFIWVVRNIHNNPSENKENGNGNFLPEGFEQRMKETGKGLVLRGWAPQLLILEHVAIKGFMTHCGWNSTLESVCAGVPMITWPLSAEQFSNEKLITEVLKIGVQVGSREWLSWNSEWKDLVGREKVESAVRKLMVESEEAEEMTTRVKDIAEKAKRAVEEGGTSYADAEALIEELKARRLARQD

SEQ ID NO: 24488 - protein, 308 aa, Glycine max
MTRSQLPVFLRTPSQFPDRVRQLEEKSFGTFVNSFHDLEPAYAEQVKNKWGKKAWIIGPVSLCNRTAEDKTERGKLPTIDEEKCLNWLNSKKPNSVLYVSFGSLLRLPSEQLKEIACGLEASEQSFIWVVRNIHNNPSENKENGNGNFLPEGFEQRMKETGKGLVLRGWAPQLLILEHVAIKGFMTHCGWNSTLESVCAGVPMITWPLSAEQFSNEKLITEVLKIGVQVGSREWLSWNSEWKDLVGREKVESAVRKLMVESEEAEEMTTRVKDIAEKAKRAVEEGGTSYADAEALIEELKARRLARQD

SEQ ID NO: 24489 - DNA, 1485 bp, Glycine max
gagagagagagagagaacttcactcactcactcatgggctgcgtctcctcaaaacacatcaagaaagacctcaagcaagaagaagaagtcactgtcaccaatggcggcggttacgtgaaccacgtggtatccctgacttcctccacctatggagcactaatgctggacaaggagaaggagcaacttcaacttcaacccaccgtcgaagaagaatccaaaacatcccctcctcggattcgcgaagaacccgaagtcatcaacgcttgggaactcatggagggtctcgaagagggagtgcccatttcaaataaccccatgaaaagccccaagtccacacctttccttcgcggattcatctccaccgacccaaaacccaaaattacccccttcaaattccttaaccaattcgggtcccccaagagtctcaggaagttcacagggaaagagaacaaagttcaagttcaaccacccaatgctggtgttagacgcttggactacaatttcagcccaaagggtattctcaaaccctccaatttttgttctcctctaaaagggtctccgattcgtgctcgaaggaacagtttcgggaccgacattaagcgaaggagtcctagtcctctgttcgatccagagcttctcgcctcttacgaaaaggaactctccgaagaggaagaacagatcaagagaatggtgtgggccacccccaagacccgaagagtcagaaaacctttggattcacaaactttcattaagacgtttgaggaaaaattgccccctggaggagaaaactgcgttgtcatttacaccaccacgttacgggggatcagaaaaacgtttgaggagtgcaacaaggtaaggtccattgtcgagtcctattgcgtgcacgtggtggagcgtgacgtgtcaatggattcggggtttaaggaggagttgcggaagctgatggggaccaaacaagttaaggttccggttgtgttcgtgaaaggaaggttggttgggggtgctgaggaaattgtgaagttggaagaagagggaaaattgggtgttctctttgaagggattccccacaaggctttgggggagtgtgaagggtgtggtggtgtgaggtttgtaatgtgcgtggagtgtaatggaagttgtaaggttttggatcatgagaatcacaagaagactctgaggtgtggccagtgtaatgagaatggattgattcagtgtcctatgtgtcgttgaggttgctgaaaatggagtgttggtttgggttttgggatggtttgtttctgttattgatttgtaggaagagagggacagaacaggcatgatgtgcatgtggtccgttgttaatttgtcatgttccttagtgtagggttctaaagcgtgttttagttccctttttgttgtttgattctgtagtttgtcatgtattttgggacactggttgttccttctctagtctaatttaatttgcactatcactagcttcttttt

SEQ ID NO: 24490 - protein, 409 aa, Glycine max
ERERENFTHSLMGCVSSKHIKKDLKQEEEVTVTNGGGYVNHVVSLTSSTYGALMLDKEKEQLQLQPTVEEESKTSPPRIREEPEVINAWELMEGLEEGVPISNNPMKSPKSTPFLRGFISTDPKPKITPFKFLNQFGSPKSLRKFTGKENKVQVQPPNAGVRRLDYNFSPKGILKPSNFCSPLKGSPIRARRNSFGTDIKRRSPSPLFDPELLASYEKELSEEEEQIKRMVWATPKTRRVRKPLDSQTFIKTFEEKLPPGGENCVVIYTTTLRGIRKTFEECNKVRSIVESYCVHVVERDVSMDSGFKEELRKLMGTKQVKVPVVFVKGRLVGGAEEIVKLEEEGKLGVLFEGIPHKALGECEGCGGVRFVMCVECNGSCKVLDHENHKKTLRCGQCNENGLIQCPMCR

SEQ ID NO: 24491 - protein, 398 aa, Glycine max
MGCVSSKHIKKDLKQEEEVTVTNGGGYVNHVVSLTSSTYGALMLDKEKEQLQLQPTVEEESKTSPPRIREEPEVINAWELMEGLEEGVPISNNPMKSPKSTPFLRGFISTDPKPKITPFKFLNQFGSPKSLRKFTGKENKVQVQPPNAGVRRLDYNFSPKGILKPSNFCSPLKGSPIRARRNSFGTDIKRRSPSPLFDPELLASYEKELSEEEEQIKRMVWATPKTRRVRKPLDSQTFIKTFEEKLPPGGENCVVIYTTTLRGIRKTFEECNKVRSIVESYCVHVVERDVSMDSGFKEELRKLMGTKQVKVPVVFVKGRLVGGAEEIVKLEEEGKLGVLFEGIPHKALGECEGCGGVRFVMCVECNGSCKVLDHENHKKTLRCGQCNENGLIQCPMCR

SEQ ID NO: 24492 - protein, 356 aa, Glycine max
MLDKEKEQLQLQPTVEEESKTSPPRIREEPEVINAWELMEGLEEGVPISNNPMKSPKSTPFLRGFISTDPKPKITPFKFLNQFGSPKSLRKFTGKENKVQVQPPNAGVRRLDYNFSPKGILKPSNFCSPLKGSPIRARRNSFGTDIKRRSPSPLFDPELLASYEKELSEEEEQIKRMVWATPKTRRVRKPLDSQTFIKTFEEKLPPGGENCVVIYTTTLRGIRKTFEECNKVRSIVESYCVHVVERDVSMDSGFKEELRKLMGTKQVKVPVVFVKGRLVGGAEEIVKLEEEGKLGVLFEGIPHKALGECEGCGGVRFVMCVECNGSCKVLDHENHKKTLRCGQCNENGLIQCPMCR

SEQ ID NO: 24493 - DNA, 1584 bp, Glycine max
aaaaacaagacctgggatatgattcctcttccttcaaacagaaaaacaattgggtgcaagtgggttttcagagttaaagagaatgttgatgggtctcttaataaatataaagcgcgtttagtggctaaagggtttcatcaagttcagggttttgatttttaatgagacattttctcttgtcatcaaaccagtaactgttagactcattattactcttgctttgactcaacattgggatttgtttcaattagatgttaataatgctttcttgaatggactgcttgaggagtcagtttacatgactcagcctccagaatttgagatttctgattcatccttggtctgtaagctaaataaagttttgtatggccttaaacagtcccctagacagtggtttgagagactgctatttactctcagggattttggttttgtagcaagcaagtgtgatccatccttgtgtatctacaaagctcaatctcaaacagtttatgttttggtttatggggttgacattgttataactggtagttcacctcaactaatttaacatctcactgccaaactgaactgcacttcctctttaaaacagctaggaaagcttgactgttttttgggtagaggtcaagactctttctgataactccttactacttactcaaagtatatcagagatctcttacagaaaactcacatggcagaggcacaacccatatgttctcctatggttactaactgtaaactgtctaagtctggggctgatatcttttttgatcctactctctattctgttgtgggggctctgcagtatactacaattactcgacctgaaataagctttacagtcaacaaagtttgtcaattcatgtctaatcccttagacactcattgggtggcagtcaaacgtattccaaggtatctcaaagggtcaatttcttatggtcttcatctcagacctgcaattccacgcagacctctctccattcatgctctctgtaatgctgactgggcctctgatgttgatgatcatagatcaacatcaggagtggcaatttatctgggtcctaatttggtgtcctggtggtccagaaaacaagttgtggcaaggtcaagcactgaagcagaatacgacagcttagctcaggctacagctgaaactttatggattcaaactcttctgacagaactgggagttcctttcaccataccagtcatcttttgtgattaccaaagtgctgtaccactagcacataatccagttcttcacactcaaaccaagcacatggagactgatgttttctttgttcgggaatgggtgctgacaaaacaactaaatggttcatcatattcctgctcttgatcagtgggcagatgcaatgacaaagcctcaaccaccttgagtttgaggggcagggggggagtaatcggagtattgtaagagaactgcagtctcaggtagttaagtattagtgagttagttcactaagatagtttagttagtgacaactaattacagctgtcataactaacagttttgtacttttgagtttgttgggttaatgaaactaaagtttcttttctgtt

SEQ ID NO: 24494 - protein, 221 aa, Glycine max
MAEAQPICSPMVTNCKLSKSGADIFFDPTLYSVVGALQYTTITRPEISFTVNKVCQFMSNPLDTHWVAVKRIPRYLKGSISYGLHLRPAIPRRPLSIHALCNADWASDVDDHRSTSGVAIYLGPNLVSWWSRKQVVARSSTEAEYDSLAQATAETLWIQTLLTELGVPFTIPVIFCDYQSAVPLAHNPVLHTQTKHMETDVFFVREWVLTKQLNGSSYSCS

SEQ ID NO: 24495 - protein, 211 aa, Glycine max
MVTNCKLSKSGADIFFDPTLYSVVGALQYTTITRPEISFTVNKVCQFMSNPLDTHWVAVKRIPRYLKGSISYGLHLRPAIPRRPLSIHALCNADWASDVDDHRSTSGVAIYLGPNLVSWWSRKQVVARSSTEAEYDSLAQATAETLWIQTLLTELGVPFTIPVIFCDYQSAVPLAHNPVLHTQTKHMETDVFFVREWVLTKQLNGSSYSCS

SEQ ID NO: 24496 - protein, 164 aa, Glycine max
MSNPLDTHWVAVKRIPRYLKGSISYGLHLRPAIPRRPLSIHALCNADWASDVDDHRSTSGVAIYLGPNLVSWWSRKQVVARSSTEAEYDSLAQATAETLWIQTLLTELGVPFTIPVIFCDYQSAVPLAHNPVLHTQTKHMETDVFFVREWVLTKQLNGSSYSCS

SEQ ID NO: 24497 - DNA, 1243 bp, Glycine max
atgaagttgccacagcttgtgccttggctataggggcagacaaattaatatgccttatagatggtccaatacttgatgagagtggacgcttaattcgtttcttgccacttcaagaagcagacatgctaattcgtaaacgggctgagcaaagtgaagcagctgctaactatgtgaaagctgttgacgaagaaggtttcaactctcttgagtataacaattttaatggagcagtcaaatcaccacctattggacgttttacagaatggcataatgcaaccttccataatggtgttggttttgagagtggaaatggcttagggtctggtgagcaaggttttgctattggaggtcaagaacggctaagtcgaatgaatggttacctgtcagaattggctgctgcagcttttgtttgcagaggtggtgttcaaagagttcacttgctggatggaactattagtggagttttgttgttggaattgtttaaaagagatgggatgggaacgatggtggctagtgacctttatgaaggcactcggacagcaggggtaaaagatatttctggaataaaacaacttattcagcctttggaggcatctggcatattggttaagcggactgatgaagagctgttaaaaacattggattcgttcattgttgtggaaagagaaggtcacataattgcttgtgctgccctttttcctcactttgaggagaagtgcggagaggttgcttgtattgcagtatctcctgattgccgtggccaaggacagggtgacaaattgcttgattatatggagaagaaagcatcatctcttggattgaatatgcttttccttcttacaacacgtacagcagattggtttgtaaggcgtggattttcggaatgttcaattgattatcttcctgaaaagaaaaggagaatgatcaatctttcccgcaattctaagtattatatgaagaagcttctgccaaatattagtggaattactgttggtgtaaaatctgcttcaagttagtactattttatgttgtttccacctaccaggaatggagggtgattggaagcaatattatgaggcacttctatagataattacttcgtaacagtatggcctctagaattattactatctctggcaggtcttccacgtgtaagcattaagtttctaactttctactgttaatatattgttagtatttaatttcctcatttatgggttatgccaaaaaaaaaaaaaaaaaa

SEQ ID NO: 24498 - protein, 337 aa, Glycine max
EVATACALAIGADKLICLIDGPILDESGRLIRFLPLQEADMLIRKRAEQSEAAANYVKAVDEEGFNSLEYNNFNGAVKSPPIGRFTEWHNATFHNGVGFESGNGLGSGEQGFAIGGQERLSRMNGYLSELAAAAFVCRGGVQRVHLLDGTISGVLLLELFKRDGMGTMVASDLYEGTRTAGVKDISGIKQLIQPLEASGILVKRTDEELLKTLDSFIVVEREGHIIACAALFPHFEEKCGEVACIAVSPDCRGQGQGDKLLDYMEKKASSLGLNMLFLLTTRTADWFVRRGFSECSIDYLPEKKRRMINLSRNSKYYMKKLLPNISGITVGVKSASS

SEQ ID NO: 24499 - protein, 297 aa, Glycine max
MLIRKRAEQSEAAANYVKAVDEEGFNSLEYNNFNGAVKSPPIGRFTEWHNATFHNGVGFESGNGLGSGEQGFAIGGQERLSRMNGYLSELAAAAFVCRGGVQRVHLLDGTISGVLLLELFKRDGMGTMVASDLYEGTRTAGVKDISGIKQLIQPLEASGILVKRTDEELLKTLDSFIVVEREGHIIACAALFPHFEEKCGEVACIAVSPDCRGQGQGDKLLDYMEKKASSLGLNMLFLLTTRTADWFVRRGFSECSIDYLPEKKRRMINLSRNSKYYMKKLLPNISGITVGVKSASS

SEQ ID NO: 24500 - protein, 215 aa, Glycine max
MNGYLSELAAAAFVCRGGVQRVHLLDGTISGVLLLELFKRDGMGTMVASDLYEGTRTAGVKDISGIKQLIQPLEASGILVKRTDEELLKTLDSFIVVEREGHIIACAALFPHFEEKCGEVACIAVSPDCRGQGQGDKLLDYMEKKASSLGLNMLFLLTTRTADWFVRRGFSECSIDYLPEKKRRMINLSRNSKYYMKKLLPNISGITVGVKSASS

SEQ ID NO: 24501 - DNA, 1704 bp, Glycine max
tttggtcagaaagatgctaaagaaaatgaaaaagcaacctctcttgtttgtggaactccttttctggaagactcgaagggaatgtcattacatcaatgctgaatatttgttgagcgagcttggtcatttgaagaaagaaagtgccaattggaataactctcaaggagatgaagaaattggttcatccccaacaaaggtgtggacacgtagaagcatagctgatgcacttggtgaggatgaagctgatgttgtgattactcatgactcaagatgtcaacaagacaagcttgaggatgttattgaaggttttgcatctacctctggcagtaacagtggcaaagatgttcataatggggagcaattgatggaagatgaatctcaactggctccaaggagaaggaagaaacttgttcttgatggtgatttggaaagacaaatcaaggatctctatgagaaattcaaagatgaaccacattgcagtcgtcatatagctgaagtgctagatccagatggtaaaatttcaccagctcaaatttccaatatgttaaaaagattaggactagcagttgcacctaagagaaagatgggtgatgctgatgctgaaggacatttgtctactagccctaatcagttagatggtgacaaaagagctaccaatcataaatcagtgaatttggagggaagcctgttggttcagcacctgcaaaaaaagaagagagtccaggctttcaatgaagctcaagaagcttgatcaaagttctatatgagcaattcaaggatcacagaagatgcagttacatgatagccaatgcactggatgaggatggtaaaatcactgctgctcaagtctctcgaaaacttaagcaacttggtttatctcttcctcagaagagttctggaggcaaaatgcacccaaaggatgcagatctcatggatctttcaaatgataggattaatgaatctgatgatgagacattggtaacattgataaaaaggaagaaaatggagaatgacaaattatcaaggggacagttacatggacaaatcagtgaggatagattgtcaatagatgattctgatgatgaaatgctcagctctgttctcaaggaaaaaataaatagcaaagtatcaactgaacaattacttgaacccatcaatgtggatgcattgtcaagagatgattctgatgatgaaatgcccagctctgctctcaaaagaactagaagatcctctcttaattcaaagcaagttgagcttgaaaatatccaaattcaggagagaataatgggcgatgattctttcaatgaaggcaaaacagatgctttggaaagggataatcgtgttgattctatgaattcctcccaaatagaacatcagcaaatggatgacttagcagattcagaagatgaagtggctgttagtggatttcctgacaatgccagatctagaaggcagctgagaatggtgattgatcctgaggatgatgactgaaggagaaagcatgattagggtccaggtttctttatttttgcatatattttctactaaactgaaggagaaagcattgattagtgagtgttgcagagacaagatatgaggatgtttacaagttgccatccttattacaacatatcagttctatatttatagagtataattataactgttataaactttcattaaatcttggacgttgatgatttt

SEQ ID NO: 24502 - protein, 249 aa, Glycine max
LVRKMLKKMKKQPLLFVELLFWKTRRECHYINAEYLLSELGHLKKESANWNNSQGDEEIGSSPTKVWTRRSIADALGEDEADVVITHDSRCQQDKLEDVIEGFASTSGSNSGKDVHNGEQLMEDESQLAPRRRKKLVLDGDLERQIKDLYEKFKDEPHCSRHIAEVLDPDGKISPAQISNMLKRLGLAVAPKRKMGDADAEGHLSTSPNQLDGDKRATNHKSVNLEGSLLVQHLQKKKRVQAFNEAQEA

SEQ ID NO: 24503 - protein, 245 aa, Glycine max
MLKKMKKQPLLFVELLFWKTRRECHYINAEYLLSELGHLKKESANWNNSQGDEEIGSSPTKVWTRRSIADALGEDEADVVITHDSRCQQDKLEDVIEGFASTSGSNSGKDVHNGEQLMEDESQLAPRRRKKLVLDGDLERQIKDLYEKFKDEPHCSRHIAEVLDPDGKISPAQISNMLKRLGLAVAPKRKMGDADAEGHLSTSPNQLDGDKRATNHKSVNLEGSLLVQHLQKKKRVQAFNEAQEA

SEQ ID NO: 24504 - protein, 241 aa, Glycine max
MKKQPLLFVELLFWKTRRECHYINAEYLLSELGHLKKESANWNNSQGDEEIGSSPTKVWTRRSIADALGEDEADVVITHDSRCQQDKLEDVIEGFASTSGSNSGKDVHNGEQLMEDESQLAPRRRKKLVLDGDLERQIKDLYEKFKDEPHCSRHIAEVLDPDGKISPAQISNMLKRLGLAVAPKRKMGDADAEGHLSTSPNQLDGDKRATNHKSVNLEGSLLVQHLQKKKRVQAFNEAQEA

SEQ ID NO: 24505 - DNA, 2103 bp, Glycine max
atgatagaactttctctgatgagctaccatctataaacaagattgaaccagatactcctaggaaaaaggtactttattctcatgttgaagataaagaacgttatgatcctgtatttatattgcgattttcaattcatagtctctcaaaggcttatgtagcgcctgtggagtttgctggttcagggttgcttgcgattgcatttgttagcttgtcttccccagaccaagggataagaagattagcgtatggcactcttgataaatttaagaatgcagtagagaagtgccaaaagaggaaggatgtaatgggacttcggcttctattaaattctgttcaaaacagcatagaagagccatggcaaagaatcccatcagttattgctttatttgctgcagaggcatcttgtgtattgttagatccggcacatgatcattatgcagctataagtacattttttatacattcatctaagttgaatatgagggttatgtttgataactttttttggagtacctctgtcaatttcaaagcagagaggtcttggatgcttcgcctagtatatgcagggatgaactcagatgatgatgctgcgatatatatcaggaactctatccttgagaagctaatgagtttttacgtctcttctctttcagattttgagtctaagaacctgattattgaggtgataaataaatctgttaaattgcacaagattacccgtcatctagtgaagcattgttctttattttcatggttttcgtctctcatctccgttgccagacagaggcttaatggaaatgaaaataaacttttcttgaagcatgtgttggtagcattgaaggttgtcaatgatgttatttcatcaggaggcatctccaagtggttgcaaaatcatggccttgagcagcttatggagctttcatcaaatctatttaatttcttattccaggatgcaacattgacaaatgaaactgtagtactagttaatccttttctacgaatgatagcatcagtgttgaaattatctcaaaaaaggaaaatatatcagccacattttaccctatcaattgagggcttgtatcagatgtaccaggctggcagtgtgtgtaatcaagccataaaaagcattaaaccagagcttgcacttgaagccatacttatgaatgcacctcctgtttccattttcatgatgaatcaggaaaggctacaaagctttcttatctgggcaactacaactgctttacagtccgagtctttacaaaggctggggtccaatgagtctcagttctcaagaaataattcaagggaagattttcgagagaactcagtagtttcaacatttctacgttggttaacagcatcagtaatcaatgggaagctccataaaaaatcttataattgggattcagaatttgctgaaacgcacaaccttgaatccctgcattctttgctggtgcatgttgaaaatacctctggacaaagaaatgatattgatattggtgctgaggaggtactagcttcaacaatcttccatctccaactgcgtcttggtgtcaatcatgaagtgctaccatcagttgtatgtgctctctgtctcctgatgtttggtgcctctaaatttgcagtcagcagaactgatttattgaaagactacaacacattaatatcatcatacagttcaagggtacggtgtcctcctgaagctaatccaacttggagatggtcgttttatcagccatggaaggatgattctctggagctcactgactcgcagaagatggaggaatatcatgcttgcctaactttgttagttattatctctaatgttcttggtgcaaagaaattagagtcggctagtttatcccctgtagatttagagagatctggcttattccaatgggaaataagtttactaagaaactaagtttatacaagagtcgttagctttttatttttattttttgtacgttagtaagtgtacagctagtgtcaaagtatcgatatatttgaaaatgcaaattttgccaatgaaaacaggccatcttttatgtatttgatggcattatataagttaaattaaaattatggtccttatatatact

SEQ ID NO: 24506 - protein, 640 aa, Glycine max
DRTFSDELPSINKIEPDTPRKKVLYSHVEDKERYDPVFILRFSIHSLSKAYVAPVEFAGSGLLAIAFVSLSSPDQGIRRLAYGTLDKFKNAVEKCQKRKDVMGLRLLLNSVQNSIEEPWQRIPSVIALFAAEASCVLLDPAHDHYAAISTFFIHSSKLNMRVMFDNFFWSTSVNFKAERSWMLRLVYAGMNSDDDAAIYIRNSILEKLMSFYVSSLSDFESKNLIIEVINKSVKLHKITRHLVKHCSLFSWFSSLISVARQRLNGNENKLFLKHVLVALKVVNDVISSGGISKWLQNHGLEQLMELSSNLFNFLFQDATLTNETVVLVNPFLRMIASVLKLSQKRKIYQPHFTLSIEGLYQMYQAGSVCNQAIKSIKPELALEAILMNAPPVSIFMMNQERLQSFLIWATTTALQSESLQRLGSNESQFSRNNSREDFRENSVVSTFLRWLTASVINGKLHKKSYNWDSEFAETHNLESLHSLLVHVENTSGQRNDIDIGAEEVLASTIFHLQLRLGVNHEVLPSVVCALCLLMFGASKFAVSRTDLLKDYNTLISSYSSRVRCPPEANPTWRWSFYQPWKDDSLELTDSQKMEEYHACLTLLVIISNVLGAKKLESASLSPVDLERSGLFQWEISLLRN

SEQ ID NO: 24507 - protein, 539 aa, Glycine max
MGLRLLLNSVQNSIEEPWQRIPSVIALFAAEASCVLLDPAHDHYAAISTFFIHSSKLNMRVMFDNFFWSTSVNFKAERSWMLRLVYAGMNSDDDAAIYIRNSILEKLMSFYVSSLSDFESKNLIIEVINKSVKLHKITRHLVKHCSLFSWFSSLISVARQRLNGNENKLFLKHVLVALKVVNDVISSGGISKWLQNHGLEQLMELSSNLFNFLFQDATLTNETVVLVNPFLRMIASVLKLSQKRKIYQPHFTLSIEGLYQMYQAGSVCNQAIKSIKPELALEAILMNAPPVSIFMMNQERLQSFLIWATTTALQSESLQRLGSNESQFSRNNSREDFRENSVVSTFLRWLTASVINGKLHKKSYNWDSEFAETHNLESLHSLLVHVENTSGQRNDIDIGAEEVLASTIFHLQLRLGVNHEVLPSVVCALCLLMFGASKFAVSRTDLLKDYNTLISSYSSRVRCPPEANPTWRWSFYQPWKDDSLELTDSQKMEEYHACLTLLVIISNVLGAKKLESASLSPVDLERSGLFQWEISLLRN

SEQ ID NO: 24508 - protein, 481 aa, Glycine max
MRVMFDNFFWSTSVNFKAERSWMLRLVYAGMNSDDDAAIYIRNSILEKLMSFYVSSLSDFESKNLIIEVINKSVKLHKITRHLVKHCSLFSWFSSLISVARQRLNGNENKLFLKHVLVALKVVNDVISSGGISKWLQNHGLEQLMELSSNLFNFLFQDATLTNETVVLVNPFLRMIASVLKLSQKRKIYQPHFTLSIEGLYQMYQAGSVCNQAIKSIKPELALEAILMNAPPVSIFMMNQERLQSFLIWATTTALQSESLQRLGSNESQFSRNNSREDFRENSVVSTFLRWLTASVINGKLHKKSYNWDSEFAETHNLESLHSLLVHVENTSGQRNDIDIGAEEVLASTIFHLQLRLGVNHEVLPSVVCALCLLMFGASKFAVSRTDLLKDYNTLISSYSSRVRCPPEANPTWRWSFYQPWKDDSLELTDSQKMEEYHACLTLLVIISNVLGAKKLESASLSPVDLERSGLFQWEISLLRN

SEQ ID NO: 24509 - DNA, 1488 bp, Glycine max
acaacttgaggtagccaaagccagatatacagcagctgtttcagatttaatagctgtgaaagaggagctggaagcattgcacaaagaatacacttccttagtgactgatagagatgtagctattaagaaagctgaagaggctgttactgcatcaaaggaagtagagaagtctgttgaagatttaactgttgaactaattgctgcaaaagagtcattggagactacacacgctgcgcatttggaagcagaggaacaaagaataggaacagtcatggcaagagatcaagattctctcaattgggagaaggaacttaaacaggcagaagaagagctccaaagactcaaccagcaaatttcatctgcgaaggaactcaaatctaaactggaaacagcctctgctttgctgattgatttgaaagctgaattaactgcttatatggaatcaaagttaaagcaagaaggaggcccagaagaaccagagataaagacacacactgacatacgagaagcagtggcatcagccggaaaggaacttgaggaagtaaatcttaacatagagaaagcaactgctgagattagtatcttgaaggtagctgctacatcattgaaattggaacttgaacaagaaaaagcaactcttgcctccattaggcaaagagaaggaatggcctccgttgcagtggcatctctggaagctgaattggaaaagaccagatcagaaatagctttggttcagatgaaggagaaagaagctaaagagaaaatgaccgagcttcccaagaaactacaactaacagctgaagagactaatcaagccaacttgcttgctcaagcagctcgggaagagctacagaaagtaaaggcggaagcagagcaagccaaggctggagtaagtaccttggaaagtagattacttgcagctcaaaaggagatagaggctgcaaaggcttctgaaaatttggcaatagcagcaattaaagcattgcaagagagtgaatcaactagaagcaaaaatgaagtggacccatctaatggggtaacactgtctttggaagagtactatgagcttagcaagcgagcacatgaggcagaagagcgagccaatatgagggttgcagctgctaattctgaaattgataaagtcaaggagtctgaattgaaagcctttgaaaagttggacgaagtgaatagagagatagctgctagaagggaatccttgaaattggcaatggagaaagctgagaaggcaaaggaaggtaaattaggtgtagaacaagaattaagaaagtggagagctgaaagtgaacaacgaagaaaggccggcgagtctggccaaggagtaataaaccagagtaaaagccctaggggtagttttgaggggaaagcaaataattttgaccgcactagtgatgcagctaatcccgcacattacttgacaagtccaaaggctaatgagcatgcagacaatgatgaaggtggatcatcccc

SEQ ID NO: 24510 - protein, 495 aa, Glycine max
QLEVAKARYTAAVSDLIAVKEELEALHKEYTSLVTDRDVAIKKAEEAVTASKEVEKSVEDLTVELIAAKESLETTHAAHLEAEEQRIGTVMARDQDSLNWEKELKQAEEELQRLNQQISSAKELKSKLETASALLIDLKAELTAYMESKLKQEGGPEEPEIKTHTDIREAVASAGKELEEVNLNIEKATAEISILKVAATSLKLELEQEKATLASIRQREGMASVAVASLEAELEKTRSEIALVQMKEKEAKEKMTELPKKLQLTAEETNQANLLAQAAREELQKVKAEAEQAKAGVSTLESRLLAAQKEIEAAKASENLAIAAIKALQESESTRSKNEVDPSNGVTLSLEEYYELSKRAHEAEERANMRVAAANSEIDKVKESELKAFEKLDEVNREIAARRESLKLAMEKAEKAKEGKLGVEQELRKWRAESEQRRKAGESGQGVINQSKSPRGSFEGKANNFDRTSDAANPAHYLTSPKANEHADNDEGGSS

SEQ ID NO: 24511 - protein, 405 aa, Glycine max
MARDQDSLNWEKELKQAEEELQRLNQQISSAKELKSKLETASALLIDLKAELTAYMESKLKQEGGPEEPEIKTHTDIREAVASAGKELEEVNLNIEKATAEISILKVAATSLKLELEQEKATLASIRQREGMASVAVASLEAELEKTRSEIALVQMKEKEAKEKMTELPKKLQLTAEETNQANLLAQAAREELQKVKAEAEQAKAGVSTLESRLLAAQKEIEAAKASENLAIAAIKALQESESTRSKNEVDPSNGVTLSLEEYYELSKRAHEAEERANMRVAAANSEIDKVKESELKAFEKLDEVNREIAARRESLKLAMEKAEKAKEGKLGVEQELRKWRAESEQRRKAGESGQGVINQSKSPRGSFEGKANNFDRTSDAANPAHYLTSPKANEHADNDEGGSS

SEQ ID NO: 24512 - protein, 350 aa, Glycine max
MESKLKQEGGPEEPEIKTHTDIREAVASAGKELEEVNLNIEKATAEISILKVAATSLKLELEQEKATLASIRQREGMASVAVASLEAELEKTRSEIALVQMKEKEAKEKMTELPKKLQLTAEETNQANLLAQAAREELQKVKAEAEQAKAGVSTLESRLLAAQKEIEAAKASENLAIAAIKALQESESTRSKNEVDPSNGVTLSLEEYYELSKRAHEAEERANMRVAAANSEIDKVKESELKAFEKLDEVNREIAARRESLKLAMEKAEKAKEGKLGVEQELRKWRAESEQRRKAGESGQGVINQSKSPRGSFEGKANNFDRTSDAANPAHYLTSPKANEHADNDEGGSS

SEQ ID NO: 24513 - DNA, 1308 bp, Glycine max
acttctcatacaatacaagaggtcacatatacagaccttctctccctctctctctttctctctcaacattctaccttcttttcttttcctcttttcacaaccatttgtgagattcctccaatgttcttctctcttccattggattgtacagattcccagctacactacacacatcaatcccttcaattctagttgctgtgggattgtttgtttatgtgaaaaaattttaaggactgtaaaagacaaaacttttctgggtttattggtttctgctttatatttattttttcttctgcaaactatcattctgggtttgctcataaaacaaagcctttcaagataactgttgtatttttcagaaaaaaaatccatttttcttagcttatttgtcaaaagaataattttttttctttttcttcctcatttttctgcaaattttcttcatattcctttttattaatttgcggaaaagattgagacatgggcaagcaaggaccttgctatcactgtggagttacaagcacgccactctggcgcaatggaccacccgagaagccagtactatgcaatgcatgtgggtctcgatggagaacaaagggaactcttgcaaattatacccctttacatgctcgagcagaaactgatgattatgatgatcaaagggtttccaggataaagagcatatcgataaataagaagaaagaagtggcattgctcaaacgaaaacagaaccatgataatgtaatgtctggagggtttgcacctgattacaaccagggataccaaaaggttgtagatgaagatattagcaaccggtcgagttcaggatcagctatctctaactcagagagctgtgcacaatttggttatgatggcatggatgctagtgatctgacaggttgaattaagatctttcttcacaactgattacagcagcatttatcattttgaaacaagtattgattttattgcctgtccaggtttatattagcacaatccagaagaggataatggaacgaaggaaaatgaaaaagaaatatattagtttcgtagtcattggttttcctaaaagaaaaacaaatgaactttgttttaactatgtacggttgtgctcttcattgacaaaaagaattgaagaagtggttttaatattttaccaccatgaagctctaattatacttgccaacatttgtaatggcaagtccaataattagacatggtggattatttgttttttgtttagtgtgtaacaatatgtagtacttttccctcccaataatagaatgtcaagtcttgcatatatttttc

SEQ ID NO: 24514 - protein, 140 aa, Glycine max
MGKQGPCYHCGVTSTPLWRNGPPEKPVLCNACGSRWRTKGTLANYTPLHARAETDDYDDQRVSRIKSISINKKKEVALLKRKQNHDNVMSGGFAPDYNQGYQKVVDEDISNRSSSGSAISNSESCAQFGYDGMDASDLTG

SEQ ID NO: 24515 - protein, 113 aa, Glycine max
LLIQYKRSHIQTFSPSLSFSLNILPSFLFLFSQPFVRFLQCSSLFHWIVQIPSYTTHINPFNSSCCGIVCLCEKILRTVKDKTFLGLLVSALYLFFLLQTIILGLLIKQSLSR

SEQ ID NO: 24516 - DNA, 1462 bp, Glycine max
aagttaatcaatcatcgctgtcgttgatcattcagcgcaagtctgcaaatcccatcatcatggcggccataacccgcctcgcgaagcgcgcgttcgtcgtctcttccctggcgaggaggtgcctgagctcctccgtagtcaactgccacgcgccgccgcacgacgccacgtcgttccgcccgtttccgctgcgtgaagattcgagcaagcggtgcgtgcagtgggtgttcctcggctgccccggcgtcggaaaaggaacgtacgctagtcgcctctcgaacctcctcggcgtttctcacatcgccaccggcgatctcgttcgcgacgaactcacctcctctggccccctttcttcccagctatcagaaattgtaaaacaaggtcaattggtgtcagatgaaattattattagtttattgtcaaagagacttgttgccggggaagctaaaggcgatttgggatttattcttgatggttttcctcgaacaattaagcaagcagaaatattggaaggggtaactgacattgacttggtaatcaatctgaagcttcgagaagatgttctgcttgagaaatgccttggtaggagaatttgcaatcagtgtgggggaaattttaatgttgcttccatcaacatcaaggctgagaatgggagccctggaattattatggctccacttcttcctcctgagaattgtatatcaaagctcattactcgatcagatgatactgaagcagtggtcaaagaaaggcttcgaatatacaatgaaatgactcagcctgtggaggaattttaccgttcaagaggaaaattattggagtttaacctgcctggaggaatcccggagtcttggcctaagttgctacatgctcttaatcttgatgattatgaggacaaacgatctgctgcagcataacgatataataatgtatcataacagtaagtatttcattctttgcgtgcatatattgcatgcttggcaattttgcaggacagagagccaaagaaagggaacttccctgctagtattattttggaccaataatgatatttgtaagtgttgtaatctgataagaggataagactggtagtgttgcgttttcttttcatataatttggttatatgggaagggtttcccagcatataatgttattgtgaagagtgaataatatatcacagcattgctagatggatagttggtcaggaatcagcttcgataggactggtgcatcatcactgtactgttgtaaattaaatgtgaatgaacttattctatttaatcatcagattctcgtgatttagggaaggcttttactgaagtaacttccaggaaaaattatttaatatgatgtttcatgttatttgaataagtcttatgatttcacagtactcatgaataactccttttctatgaatgttcttgttgctttaacattcaatgaatagaacaagaattctct

SEQ ID NO: 24517 - protein, 304 aa, Glycine max
VNQSSLSLIIQRKSANPIIMAAITRLAKRAFVVSSLARRCLSSSVVNCHAPPHDATSFRPFPLREDSSKRCVQWVFLGCPGVGKGTYASRLSNLLGVSHIATGDLVRDELTSSGPLSSQLSEIVKQGQLVSDEIIISLLSKRLVAGEAKGDLGFILDGFPRTIKQAEILEGVTDIDLVINLKLREDVLLEKCLGRRICNQCGGNFNVASINIKAENGSPGIIMAPLLPPENCISKLITRSDDTEAVVKERLRIYNEMTQPVEEFYRSRGKLLEFNLPGGIPESWPKLLHALNLDDYEDKRSAAA

SEQ ID NO: 24518 - protein, 285 aa, Glycine max
MAAITRLAKRAFVVSSLARRCLSSSVVNCHAPPHDATSFRPFPLREDSSKRCVQWVFLGCPGVGKGTYASRLSNLLGVSHIATGDLVRDELTSSGPLSSQLSEIVKQGQLVSDEIIISLLSKRLVAGEAKGDLGFILDGFPRTIKQAEILEGVTDIDLVINLKLREDVLLEKCLGRRICNQCGGNFNVASINIKAENGSPGIIMAPLLPPENCISKLITRSDDTEAVVKERLRIYNEMTQPVEEFYRSRGKLLEFNLPGGIPESWPKLLHALNLDDYEDKRSAAA

SEQ ID NO: 24519 - DNA, 1285 bp, Glycine max
agaagtcattcacactgttcattctgataggatcaatggtaactccactcagctaaagggcatgaaccaaaataatgcagcagaagagttgagcaaggaaagctttatggctgagaaaacaattacagcagaacaaccaagtcctgtgtctgttcttgatgcttctttctacagagaagaaccaccttctccagttaaaaagaaatcagacatgtcaaaagatttagatgatgctctgaacacttatgatagtagtgaggagaactcagaaaatcttcagctttcatcaagcactgcaaaagccaagttcggcagtgaaatcagtgatactgacttgagaactcaaaagttggtcagaattctccaacaaattgactacaatgatgagagattcaccaatttcagagatgataaagatcctaaccataaatatatatcagaaatactgttagcatcggggctgctcagcagtcaaagctctagccaggtttttcattcatcaagttacccgataaacccaaatttgttccttgcactggagcaaatcaagacaaacatgacgtgtttcaatattgaatgcaacgccaagaagattgctgcactgaatagtcctgagcaaatacaaagaaagctaatatttgatgttgttaatgacattctagctcagaaaataatactggaaagttttactctgtggtgccaaccaaatcagccagcaggtagaaaactaagaggacagctgcttttggatgagctttgcacagaaattgataagttacaacataaaaatacaaatgccaacctgaatgatgaggatgagaatttgacaagtctcctgtgggaagagttgatgcactgtcccacaatttacacaaacagttacagtgaaataccaaatgtcgtgttggatattgaacggttgatcttcaaagatttgataactgaagttgtgagaagtggactagctaaccattctggtaagcattgcagacaactgctgttttccaagtaggacttctggctaaccagtttaagaaataattttcggccttaatatgccaactatcttttctacctatacttatactttgaggaggggggaataagctaattaattgacattttaaattgtatttcctatctaaacttgtgagcattagtgtctacagccatcttttttgcatgtattaatagtgtatgctgaagaaatacatgcagaaatgcagataaatgtatatatcaatgacatgatctctttaagttcaactacaggtatcttaagttc

SEQ ID NO: 24520 - protein, 336 aa, Glycine max
EVIHTVHSDRINGNSTQLKGMNQNNAAEELSKESFMAEKTITAEQPSPVSVLDASFYREEPPSPVKKKSDMSKDLDDALNTYDSSEENSENLQLSSSTAKAKFGSEISDTDLRTQKLVRILQQIDYNDERFTNFRDDKDPNHKYISEILLASGLLSSQSSSQVFHSSSYPINPNLFLALEQIKTNMTCFNIECNAKKIAALNSPEQIQRKLIFDVVNDILAQKIILESFTLWCQPNQPAGRKLRGQLLLDELCTEIDKLQHKNTNANLNDEDENLTSLLWEELMHCPTIYTNSYSEIPNVVLDIERLIFKDLITEVVRSGLANHSGKHCRQLLFSK

SEQ ID NO: 24521 - protein, 316 aa, Glycine max
MNQNNAAEELSKESFMAEKTITAEQPSPVSVLDASFYREEPPSPVKKKSDMSKDLDDALNTYDSSEENSENLQLSSSTAKAKFGSEISDTDLRTQKLVRILQQIDYNDERFTNFRDDKDPNHKYISEILLASGLLSSQSSSQVFHSSSYPINPNLFLALEQIKTNMTCFNIECNAKKIAALNSPEQIQRKLIFDVVNDILAQKIILESFTLWCQPNQPAGRKLRGQLLLDELCTEIDKLQHKNTNANLNDEDENLTSLLWEELMHCPTIYTNSYSEIPNVVLDIERLIFKDLITEVVRSGLANHSGKHCRQLLFSK

SEQ ID NO: 24522 - protein, 301 aa, Glycine max
MAEKTITAEQPSPVSVLDASFYREEPPSPVKKKSDMSKDLDDALNTYDSSEENSENLQLSSSTAKAKFGSEISDTDLRTQKLVRILQQIDYNDERFTNFRDDKDPNHKYISEILLASGLLSSQSSSQVFHSSSYPINPNLFLALEQIKTNMTCFNIECNAKKIAALNSPEQIQRKLIFDVVNDILAQKIILESFTLWCQPNQPAGRKLRGQLLLDELCTEIDKLQHKNTNANLNDEDENLTSLLWEELMHCPTIYTNSYSEIPNVVLDIERLIFKDLITEVVRSGLANHSGKHCRQLLFSK

SEQ ID NO: 24523 - DNA, 1290 bp, Glycine max
tgcagcacaggccgccgtggcagtggttagactaaccagccacggcaacagcagagacaccacgtttggtggtgctggacaagaaaggttggctgttgtcaagattcaaaccgtgtttagaggatatttggcaaggaaggcattgagagccttaaaaggattggtcaagttacaagcacttgtgagagggtacttagtgcggaagcaggcagcagcaaccctgcatagtatgcaggctctaattagagctcaagcaacagtaaggtctaagaaatctcgcaatgaagctcataggtttcaaacacaagcgcgaagatccatgcagagatttgatgacataaagagtgtgtacatagctcccatccaaagcagaaggctatcatcttcttttgatgccacaatgaacaatgcaaacagtgttgatgggagccccaaaatagtggaagtggacactggcagtggcaggccaaagtcaaggtctcgcaggagcaacacctcaatgtcagattttggtgatgacccatcatcattccaggcacttccttctcctctcccatttgctcatttgtccataccaaacctcaggaattaccacaactcagagtggggcttaacaggagaagagtgcagattctccacagcacaaagcactccacgcttcaccaccaactcttgtagttgtggaggatctgttgttgttgctgcacctacgaatatgagtatgagtatgacacctaaaagtgtttgcaccgagaacaacttcttctatgggcagtatcatgacaattttccaaactacatggccagcactcagtctttcaaggccaaactgaggtctcatagtgctccaaagcaacgccccgatccagctgggccaaagaagaggcttaccctcaacgagatgatggagtctaggtgtagtttaagtgggactagaatgcaaaggtcttgctctcagattcaagaagctatcagttttaagaatgctgtcatgagtaagcttcagaagtctgcagaacttggaagggacacagaattgaacttttccaaccaaaggaggtggtgattggtgaaacttagtgatagagttagctttcttttcacattgttagtaatagttgtgttctgtgtgtttctgcgccccatgattggcaatttcagaacatatggtgggtaggaaacaggggagtcaagacaaaatagaaggagaacaattagaaggtccccaatgtaatttgctcatggaattatcttcatatattgtcattataatcaaatgctacagcaatt

SEQ ID NO: 24524 - protein, 354 aa, Glycine max
AAQAAVAVVRLTSHGNSRDTTFGGAGQERLAVVKIQTVFRGYLARKALRALKGLVKLQALVRGYLVRKQAAATLHSMQALIRAQATVRSKKSRNEAHRFQTQARRSMQRFDDIKSVYIAPIQSRRLSSSFDATMNNANSVDGSPKIVEVDTGSGRPKSRSRRSNTSMSDFGDDPSSFQALPSPLPFAHLSIPNLRNYHNSEWGLTGEECRFSTAQSTPRFTTNSCSCGGSVVVAAPTNMSMSMTPKSVCTENNFFYGQYHDNFPNYMASTQSFKAKLRSHSAPKQRPDPAGPKKRLTLNEMMESRCSLSGTRMQRSCSQIQEAISFKNAVMSKLQKSAELGRDTELNFSNQRRW

SEQ ID NO: 24525 - protein, 278 aa, Glycine max
MQALIRAQATVRSKKSRNEAHRFQTQARRSMQRFDDIKSVYIAPIQSRRLSSSFDATMNNANSVDGSPKIVEVDTGSGRPKSRSRRSNTSMSDFGDDPSSFQALPSPLPFAHLSIPNLRNYHNSEWGLTGEECRFSTAQSTPRFTTNSCSCGGSVVVAAPTNMSMSMTPKSVCTENNFFYGQYHDNFPNYMASTQSFKAKLRSHSAPKQRPDPAGPKKRLTLNEMMESRCSLSGTRMQRSCSQIQEAISFKNAVMSKLQKSAELGRDTELNFSNQRRW

SEQ ID NO: 24526 - protein, 248 aa, Glycine max
MQRFDDIKSVYIAPIQSRRLSSSFDATMNNANSVDGSPKIVEVDTGSGRPKSRSRRSNTSMSDFGDDPSSFQALPSPLPFAHLSIPNLRNYHNSEWGLTGEECRFSTAQSTPRFTTNSCSCGGSVVVAAPTNMSMSMTPKSVCTENNFFYGQYHDNFPNYMASTQSFKAKLRSHSAPKQRPDPAGPKKRLTLNEMMESRCSLSGTRMQRSCSQIQEAISFKNAVMSKLQKSAELGRDTELNFSNQRRW

SEQ ID NO: 24527 - DNA, 1278 bp, Glycine max
aaaacttatgtgcccataaagatccagaggtacaaaggctagctctgttagctgttgggaatttggccttcagtctggaaaatcgccgcatacttgtttcttctgaaagcttacgagaacttctcttacgtctggctgttgcaactgagccacgtgtttataaagctgcagctcgtgctttggcaattcttggagaaaatgaaaacctgaggcgtgcaataaaaggaagacaagtgggaaagcaaggacttcgcatactctcaatggatggaggaggaatgaaaggtctagcaactgtacaaatgctaaaggaaattgaaaaaggaactggaaaacgaatacatgagttgtttgatttaatatgcggcacatcaacgggaggaatgctagctgttgcacttgggattaagttaatgactttggaagaatgtgaagatatatacaaaaatcttgggaagcttgtttttgctgatcctgttcccaaggacaacgaagctgctacttggagagaaaaattagatcaactttataaaagttcatcacagagttttagggttgttgttcatggatcaaaacatagtgcagaacagttcgaaaggctattgaaggaaatgtgtgctgatgaagatggagatctaatgatagattctgctgtgaaaaatgtgcccaaagtttttgttgtatcaactttggtgagcatgatgcctgcacaaccattcgtatttcgcaattatcagtaccctgctggaacacctgaggtggctcttgttgcaacatcagatagctccgggatcaatgtattagcttcacctataggtgaacaggttggctataagcgtagtgctttcattggaagctgtaagcatcaagtatggaaggctatcagagcatcatctgctgctccttattatcttgatgatttctcggatgatgtcaaccgctggcaagatggtgcaatagtggctaacaatcctacaatttttgccataagagaagcacaacttctgtggcctgatacaaaaattgactgtctggtttcagtaggatgtggttctgttcgaactagggtacgaaaaggaggttggcggtatctggacacggggcaggtgttgattgagagttcatgctctgttgatcgggtggaggaagctttaagtacattgctacccatgcttcctgagatacaatattttcgtttcaatccagttgatgaacgctgtgatatggaacttgatgagacagatccaactaactggctaaagttggaatctgcgattg

SEQ ID NO: 24528 - protein, 425 aa, Glycine max
NLCAHKDPEVQRLALLAVGNLAFSLENRRILVSSESLRELLLRLAVATEPRVYKAAARALAILGENENLRRAIKGRQVGKQGLRILSMDGGGMKGLATVQMLKEIEKGTGKRIHELFDLICGTSTGGMLAVALGIKLMTLEECEDIYKNLGKLVFADPVPKDNEAATWREKLDQLYKSSSQSFRVVVHGSKHSAEQFERLLKEMCADEDGDLMIDSAVKNVPKVFVVSTLVSMMPAQPFVFRNYQYPAGTPEVALVATSDSSGINVLASPIGEQVGYKRSAFIGSCKHQVWKAIRASSAAPYYLDDFSDDVNRWQDGAIVANNPTIFAIREAQLLWPDTKIDCLVSVGCGSVRTRVRKGGWRYLDTGQVLIESSCSVDRVEEALSTLLPMLPEIQYFRFNPVDERCDMELDETDPTNWLKLESAI

SEQ ID NO: 24529 - protein, 338 aa, Glycine max
MDGGGMKGLATVQMLKEIEKGTGKRIHELFDLICGTSTGGMLAVALGIKLMTLEECEDIYKNLGKLVFADPVPKDNEAATWREKLDQLYKSSSQSFRVVVHGSKHSAEQFERLLKEMCADEDGDLMIDSAVKNVPKVFVVSTLVSMMPAQPFVFRNYQYPAGTPEVALVATSDSSGINVLASPIGEQVGYKRSAFIGSCKHQVWKAIRASSAAPYYLDDFSDDVNRWQDGAIVANNPTIFAIREAQLLWPDTKIDCLVSVGCGSVRTRVRKGGWRYLDTGQVLIESSCSVDRVEEALSTLLPMLPEIQYFRFNPVDERCDMELDETDPTNWLKLESAI

SEQ ID NO: 24530 - protein, 333 aa, Glycine max
MKGLATVQMLKEIEKGTGKRIHELFDLICGTSTGGMLAVALGIKLMTLEECEDIYKNLGKLVFADPVPKDNEAATWREKLDQLYKSSSQSFRVVVHGSKHSAEQFERLLKEMCADEDGDLMIDSAVKNVPKVFVVSTLVSMMPAQPFVFRNYQYPAGTPEVALVATSDSSGINVLASPIGEQVGYKRSAFIGSCKHQVWKAIRASSAAPYYLDDFSDDVNRWQDGAIVANNPTIFAIREAQLLWPDTKIDCLVSVGCGSVRTRVRKGGWRYLDTGQVLIESSCSVDRVEEALSTLLPMLPEIQYFRFNPVDERCDMELDETDPTNWLKLESAI

SEQ ID NO: 24531 - DNA, 1146 bp, Glycine max
taaaggacatggacgtacgggattcagagatagttgaactagtgaatcaagttgaggaacttgagaaaaaattggtcgctcatcctatgcataagcatcaagatatggatcaaattaaatgctttgagaggaaagcagaagtgaatcatgaagttcagcaactgaagacaaaaatgcgggattcccagctacaaaaatttcgtgaagaacttaagaatcgctcacgagtcttaaagaagcttggtcatattgatgctgatggtgtagttcagttgaagggacgagcagcctgcttgattgacacaggcgatgaactccttgtcactgaattaatgtttaatggtacttttaatgaccttgaccatcatcaagttgctgcccttgcgagttgtttcataccaggagataagtcaactgagcagatacaactgagaacagagcttgcaaggcctctgcaacagcttcaagatagtgcaagaaggatagctgagatacaacatgaatgcaaattggatataaatgtgaatgagtatgtggaatcaaccgtaagaccattcttgatggatgtgatatactcatggtcaaagggagcaaattttgctgatgttatacaaatgactgacatctttgaggggagtattattcggagtgctagaaggcttgacgagtttttgaatcagttgcgtgctgctgctaatgcagttggagaggctgacttggagaagaaatttgcagctgcaagtgaaagccttcgacgaggtattatgtttgcaaattctttgtatctgtgacttgtttttctccagaccttacgttatatctcacggtcattccggctggctgaaagtttactttcccatccaaccttttggcatgcacccacttccttctcttaaaagctttctggtgtaaatatttgtatgctgtcactaatggtaaagggtgtgaatatagagtgatagaaaaatctggtcaatagatagaaaattccggtcaataaaggttcatcttgagagtcgcagatcattcatttatttaccttcagaacctctagtctgtctggggcttgaggagtgagggtgccgaagatatttgtttgtaatttgctgaaaaattttcaatacaaattttgattgatagttcatt

SEQ ID NO: 24532 - protein, 262 aa, Glycine max
KDMDVRDSEIVELVNQVEELEKKLVAHPMHKHQDMDQIKCFERKAEVNHEVQQLKTKMRDSQLQKFREELKNRSRVLKKLGHIDADGVVQLKGRAACLIDTGDELLVTELMFNGTFNDLDHHQVAALASCFIPGDKSTEQIQLRTELARPLQQLQDSARRIAEIQHECKLDINVNEYVESTVRPFLMDVIYSWSKGANFADVIQMTDIFEGSIIRSARRLDEFLNQLRAAANAVGEADLEKKFAAASESLRRGIMFANSLYL

SEQ ID NO: 24533 - protein, 260 aa, Glycine max
MDVRDSEIVELVNQVEELEKKLVAHPMHKHQDMDQIKCFERKAEVNHEVQQLKTKMRDSQLQKFREELKNRSRVLKKLGHIDADGVVQLKGRAACLIDTGDELLVTELMFNGTFNDLDHHQVAALASCFIPGDKSTEQIQLRTELARPLQQLQDSARRIAEIQHECKLDINVNEYVESTVRPFLMDVIYSWSKGANFADVIQMTDIFEGSIIRSARRLDEFLNQLRAAANAVGEADLEKKFAAASESLRRGIMFANSLYL

SEQ ID NO: 24534 - protein, 234 aa, Glycine max
MHKHQDMDQIKCFERKAEVNHEVQQLKTKMRDSQLQKFREELKNRSRVLKKLGHIDADGVVQLKGRAACLIDTGDELLVTELMFNGTFNDLDHHQVAALASCFIPGDKSTEQIQLRTELARPLQQLQDSARRIAEIQHECKLDINVNEYVESTVRPFLMDVIYSWSKGANFADVIQMTDIFEGSIIRSARRLDEFLNQLRAAANAVGEADLEKKFAAASESLRRGIMFANSLYL

SEQ ID NO: 24535 - DNA, 1317 bp, Glycine max
gatcctgccgcacccaagatgcttgagaggtgcacctctttggtcatccctcatgagtttctctgcccaattacactagaaatcatgacagatcctgtcattgtaacaagtggacagacatatgaaagggaaagcataaagaagtggttccaatccaaccataacacatgcccaaagaccaggcaacctttggaacacttgtcattggcaccaaaccgtgccttgaaaagcttgattgaagaatggtgtgagaacaacaacttcaaacttcctaaaaaatacaattcttcaggtccagaaagctgtcctatagacagcaaagaggaaattccagctttggttgagagcctgtcatctattcatttagaagagcagagaaaagcagtggagaagatacgtatgctatcaaaggaaaatcctgagaacagagttttggttgctgaacatggaggaataccacctctagtgcaacttttgtcctatccagattcaaaaatacaagaacatgcagtaacagcacttttgaatttatcaattgatgagggtaacaagagtcttatatccacagaaggtgccattccagctatcatagaagttttggagaatggtagttgtgtggctaaggagaactcagccgcagctttattcagcttgtcaatgcttgatgagattaaagagattgttggtcaatcaaatgggtacccgcctttggtggatttgttgaggaatggaacaattagagggaagaaagatgctgtgacagctctttttaacttatctatcaaccatgcaaataaaggtagggccattagagctggcattgtgacacccttgcttcaattgctcaaggacagaaacttgggcatgattgatgaggctctctccattttgttactccttgtatcaaattcagaagcaagacaagagattggacaacttagtttcattgaaacccttgttgagttcatgagagaagggagtccaaagaacaaggaatgtgcagcatctgttcttcttgagttgtgctcaagtaactcatcctttacattggcagcacttcagtttggagtgtatgagtatttaatggagataaaacaaaatggaacaaatagagcacagaggaaagcaaatgcaatcttagatctcattagcaggagcgagcaaatttaatcttgctttctccaatgtaggtataactgtatttcatagcaaattaaactaattctttcatatatcctgatgtacaaagtacagtgaaaaagtgtaattaaacttctttttcattatattagttacaataaatatgtatttcttttc

SEQ ID NO: 24536 - protein, 389 aa, Glycine max
DPAAPKMLERCTSLVIPHEFLCPITLEIMTDPVIVTSGQTYERESIKKWFQSNHNTCPKTRQPLEHLSLAPNRALKSLIEEWCENNNFKLPKKYNSSGPESCPIDSKEEIPALVESLSSIHLEEQRKAVEKIRMLSKENPENRVLVAEHGGIPPLVQLLSYPDSKIQEHAVTALLNLSIDEGNKSLISTEGAIPAIIEVLENGSCVAKENSAAALFSLSMLDEIKEIVGQSNGYPPLVDLLRNGTIRGKKDAVTALFNLSINHANKGRAIRAGIVTPLLQLLKDRNLGMIDEALSILLLLVSNSEARQEIGQLSFIETLVEFMREGSPKNKECAASVLLELCSSNSSFTLAALQFGVYEYLMEIKQNGTNRAQRKANAILDLISRSEQI

SEQ ID NO: 24537 - protein, 383 aa, Glycine max
MLERCTSLVIPHEFLCPITLEIMTDPVIVTSGQTYERESIKKWFQSNHNTCPKTRQPLEHLSLAPNRALKSLIEEWCENNNFKLPKKYNSSGPESCPIDSKEEIPALVESLSSIHLEEQRKAVEKIRMLSKENPENRVLVAEHGGIPPLVQLLSYPDSKIQEHAVTALLNLSIDEGNKSLISTEGAIPAIIEVLENGSCVAKENSAAALFSLSMLDEIKEIVGQSNGYPPLVDLLRNGTIRGKKDAVTALFNLSINHANKGRAIRAGIVTPLLQLLKDRNLGMIDEALSILLLLVSNSEARQEIGQLSFIETLVEFMREGSPKNKECAASVLLELCSSNSSFTLAALQFGVYEYLMEIKQNGTNRAQRKANAILDLISRSEQI

SEQ ID NO: 24538 - protein, 361 aa, Glycine max
MTDPVIVTSGQTYERESIKKWFQSNHNTCPKTRQPLEHLSLAPNRALKSLIEEWCENNNFKLPKKYNSSGPESCPIDSKEEIPALVESLSSIHLEEQRKAVEKIRMLSKENPENRVLVAEHGGIPPLVQLLSYPDSKIQEHAVTALLNLSIDEGNKSLISTEGAIPAIIEVLENGSCVAKENSAAALFSLSMLDEIKEIVGQSNGYPPLVDLLRNGTIRGKKDAVTALFNLSINHANKGRAIRAGIVTPLLQLLKDRNLGMIDEALSILLLLVSNSEARQEIGQLSFIETLVEFMREGSPKNKECAASVLLELCSSNSSFTLAALQFGVYEYLMEIKQNGTNRAQRKANAILDLISRSEQI

SEQ ID NO: 24539 - DNA, 1224 bp, Glycine max
ttaactcccggtatcatctaccagtgcaacctaggaacagagattcctgatatgaagatatttcgtgaaattgttgtccctgggtttgatcggtctgaatttaatgttaaacaggattttgtgactagtaaagatggtaccaagatcccaatgttcattgttgccaaaaaggatattactttggatggttcacacccatgtttgttatatggatatggtggttttaacatcaatattacgccatatttcagtgtcagtcgcattgtactcacaagacatttaggtgttgttttcagcatagcaaatattcgtggtggtggagaatatggggaggaatggcataaagcaggctcccttgcaagaaagcagaattgctttgatgacttcatttctgctgctgaataccttgtatctactggttacactcaacccaaaaagttatgtatcgaaggtggaagcaatggtggacttcttgttggtgcttgtataaatcagagacctgatttatttggctgtgctctggctcatgttggtgttatggacatgctacggttccacaaatttaccataggtcatgcttggacctctgattatggttgttcagacaaggaggaagagtttcattggctaatcaaatactcaccattacataatgtccggagaccgtgggaacagcatcatgatcagtcatttcagtatccatcaaccatgctgttgacagctgatcatgatgatcgtgttgtgccactgcacacattgaagctattagcgaccatgcaatatgtcctctgtacgagcttggaaaaaagtccccagacaaacgctataattggtcgcattgactgcaagtctggtcatggagctggtcgtccaacacagaaaatgatcgatgaagctgctgaccggtacggttttatggctaaagtgttggaagtgcattggattgaatagaatccacttagtcacaggttagagagaacaatggattatttctttaagacgatacccttgaaccattttatttctctgtttttcacttctaccaagaaaatacattgaacatgagattgtcagaaaagtggccagtgggggttagatttgaagttactaatgctaacgccccgatggatttgtcaatcatttaattggcattaggttcactaaagtctgttaaaatatgttgcctaaatattgattcttaaggaattgttatggtatataagg

SEQ ID NO: 24540 - protein, 316 aa, Glycine max
LTPGIIYQCNLGTEIPDMKIFREIVVPGFDRSEFNVKQDFVTSKDGTKIPMFIVAKKDITLDGSHPCLLYGYGGFNINITPYFSVSRIVLTRHLGVVFSIANIRGGGEYGEEWHKAGSLARKQNCFDDFISAAEYLVSTGYTQPKKLCIEGGSNGGLLVGACINQRPDLFGCALAHVGVMDMLRFHKFTIGHAWTSDYGCSDKEEEFHWLIKYSPLHNVRRPWEQHHDQSFQYPSTMLLTADHDDRVVPLHTLKLLATMQYVLCTSLEKSPQTNAIIGRIDCKSGHGAGRPTQKMIDEAADRYGFMAKVLEVHWIE

SEQ ID NO: 24541 - protein, 299 aa, Glycine max
MKIFREIVVPGFDRSEFNVKQDFVTSKDGTKIPMFIVAKKDITLDGSHPCLLYGYGGFNINITPYFSVSRIVLTRHLGVVFSIANIRGGGEYGEEWHKAGSLARKQNCFDDFISAAEYLVSTGYTQPKKLCIEGGSNGGLLVGACINQRPDLFGCALAHVGVMDMLRFHKFTIGHAWTSDYGCSDKEEEFHWLIKYSPLHNVRRPWEQHHDQSFQYPSTMLLTADHDDRVVPLHTLKLLATMQYVLCTSLEKSPQTNAIIGRIDCKSGHGAGRPTQKMIDEAADRYGFMAKVLEVHWIE

SEQ ID NO: 24542 - protein, 266 aa, Glycine max
MFIVAKKDITLDGSHPCLLYGYGGFNINITPYFSVSRIVLTRHLGVVFSIANIRGGGEYGEEWHKAGSLARKQNCFDDFISAAEYLVSTGYTQPKKLCIEGGSNGGLLVGACINQRPDLFGCALAHVGVMDMLRFHKFTIGHAWTSDYGCSDKEEEFHWLIKYSPLHNVRRPWEQHHDQSFQYPSTMLLTADHDDRVVPLHTLKLLATMQYVLCTSLEKSPQTNAIIGRIDCKSGHGAGRPTQKMIDEAADRYGFMAKVLEVHWIE

SEQ ID NO: 24543 - DNA, 1391 bp, Glycine max
agagaagatcaaggagtgctacttggacctgtgttgttttcctgaggataagaaaatcccccttgatgttctcatcaatatatgggtggaaatccatgatattcctgaaacagaagcttatgccattgtggtagagctctccaacaaaaatctcctcaccttaatgaaagaggctcgtgctggaggcatgtatagcagttgctttgagatctcagttactcaacatgatgtactgagagacctggcccttaatttcagaaaccgtgagagcattgatgaacgccggctattagttatgccaaaacgggagaatggaatgcctaaagagtggttgagatacaggcacaagccatttgaggctcagattgtttcaattcacacaggtgaaatgaaggaagtggactggtgtaatctagaatttccaaaggctgaagtgctgatcattaatttcacatccactgaatacttcttgccccctttcatcaatagaatgccaaatttgagggcattgataataataaactacagtgcaacatatgcttgccttcacaatgtttcagttttcaagaacttgtccaacttaaggagcctctggcttgaaaaagtttccacccccgagttatcaagcattgtcttggaaaacttgggaaaattatttattgtcctgtgcaaggttaatgacagtttggtggaaaaagaagtagacttggctcaagtcttccctaatctctttgagctcactcttgatcactgtgatgatctaacccaattgccctcaagcatttgtgggatgaagtcactccagaacttgagtctcaccaactgccacaatttgactgaattaccagttgaactagggaaactaagatctctagagatcctacgtttatatgcttgtccttatctgaaaacacttcctaatagcatctgtgacatgatgagattgaagtatattgacatttctcaatgtgttaacttgacatgcttccctgaaaagattggtagattggtaagcttggagaagattgacatgagggaatgctccatgattagaaatgtgccaaagtctgcagtgtcattgcaatctctgaggcttgtaatttgtgttgaggaggtatctgggatttggaaagaggttgccaagcctgataatgtgcatattcaagtatcagagcaatactttgatttggactggctcaaagagtgacatatatgtgtctatgtttttgtgatattttactttctaatttgatgtttttttttcttctagatcacacggatcctccattagaggtaatactgtatgactattatgaacagaactttccaatttgatgtgaatacttgtacataacttctatttgaagtggaaattatctttttccaaaatc

SEQ ID NO: 24544 - protein, 401 aa, Glycine max
EKIKECYLDLCCFPEDKKIPLDVLINIWVEIHDIPETEAYAIVVELSNKNLLTLMKEARAGGMYSSCFEISVTQHDVLRDLALNFRNRESIDERRLLVMPKRENGMPKEWLRYRHKPFEAQIVSIHTGEMKEVDWCNLEFPKAEVLIINFTSTEYFLPPFINRMPNLRALIIINYSATYACLHNVSVFKNLSNLRSLWLEKVSTPELSSIVLENLGKLFIVLCKVNDSLVEKEVDLAQVFPNLFELTLDHCDDLTQLPSSICGMKSLQNLSLTNCHNLTELPVELGKLRSLEILRLYACPYLKTLPNSICDMMRLKYIDISQCVNLTCFPEKIGRLVSLEKIDMRECSMIRNVPKSAVSLQSLRLVICVEEVSGIWKEVAKPDNVHIQVSEQYFDLDWLKE

SEQ ID NO: 24545 - protein, 347 aa, Glycine max
MKEARAGGMYSSCFEISVTQHDVLRDLALNFRNRESIDERRLLVMPKRENGMPKEWLRYRHKPFEAQIVSIHTGEMKEVDWCNLEFPKAEVLIINFTSTEYFLPPFINRMPNLRALIIINYSATYACLHNVSVFKNLSNLRSLWLEKVSTPELSSIVLENLGKLFIVLCKVNDSLVEKEVDLAQVFPNLFELTLDHCDDLTQLPSSICGMKSLQNLSLTNCHNLTELPVELGKLRSLEILRLYACPYLKTLPNSICDMMRLKYIDISQCVNLTCFPEKIGRLVSLEKIDMRECSMIRNVPKSAVSLQSLRLVICVEEVSGIWKEVAKPDNVHIQVSEQYFDLDWLKE

SEQ ID NO: 24546 - protein, 339 aa, Glycine max
MYSSCFEISVTQHDVLRDLALNFRNRESIDERRLLVMPKRENGMPKEWLRYRHKPFEAQIVSIHTGEMKEVDWCNLEFPKAEVLIINFTSTEYFLPPFINRMPNLRALIIINYSATYACLHNVSVFKNLSNLRSLWLEKVSTPELSSIVLENLGKLFIVLCKVNDSLVEKEVDLAQVFPNLFELTLDHCDDLTQLPSSICGMKSLQNLSLTNCHNLTELPVELGKLRSLEILRLYACPYLKTLPNSICDMMRLKYIDISQCVNLTCFPEKIGRLVSLEKIDMRECSMIRNVPKSAVSLQSLRLVICVEEVSGIWKEVAKPDNVHIQVSEQYFDLDWLKE

SEQ ID NO: 24547 - DNA, 1224 bp, Glycine max
atttaactgatacttcaatgttgcccgagtggaaaaatggtaatggcattgatactctatcatgccctcctacagagcttggtggttgtggtaaaagccaccttgagttgagatctgttttcccctcgagttggatcaaagagatggaagtaaaggcagaagaaattgtttgcagctatgactttcctgaaacttcagataaaagttcgagctgctcgttgtgttttgacactgatcacagtactaacagatacaagcagttgcaagaagcagctctaagagaagattccaatgataattacttgttttgtcccacagtgatggacatcagtggtgataactttgagcactttcagaaacactgtggaaaaggccatcctatagttgtccaagatgcactccgaagtacatcaaacctcagttgggatccactgaccatgttctgtacttatcttgagcagagcattacaagatatgagaaaaataaagacttgcttgaatcttgtttggattggtgggaggtggaaattaacattaggcagtactttactgggtctgtcaaacgtcgtcctcagagaaacacttgggatgagatgctgaaactaaaagggtggctttcttcccaaatattcaaagagcagtttccagctcattttgctgaggtaattgatgctctaccagttaaagaatacatgcatcccctgtccggtcttctgaatttagctgcaaatttgccacatgggagtgcaaaacatgacattgggccatatgtctacatttcttatggctctgctgacaaagaaactgattcagtgacaaagctctgctatgactcatatgatgtgatgcccccctctctatagaacaacttaccaaaataagaaaactgctgaaaaagcacaaaactctgtgtcaaatggagactattgctactgaggggccacaggaacagaaattgaatggaataccattattgcatggtccagaaacagagcgaaaaggctcacggagtatggttgaaggaatgaactttttccggagagtcaatagaacatcttgcatctcaactgaagctaaaaaagtttctagtcagagcatggacagcaatggggaatgtgatttcatttctgattctgattctggatctgctttacttctccttgggactgttcaaactgctgaattgtcagaacacgataatcctagaaatccctttaaaagctc

SEQ ID NO: 24548 - protein, 286 aa, Glycine max
LTDTSMLPEWKNGNGIDTLSCPPTELGGCGKSHLELRSVFPSSWIKEMEVKAEEIVCSYDFPETSDKSSSCSLCFDTDHSTNRYKQLQEAALREDSNDNYLFCPTVMDISGDNFEHFQKHCGKGHPIVVQDALRSTSNLSWDPLTMFCTYLEQSITRYEKNKDLLESCLDWWEVEINIRQYFTGSVKRRPQRNTWDEMLKLKGWLSSQIFKEQFPAHFAEVIDALPVKEYMHPLSGLLNLAANLPHGSAKHDIGPYVYISYGSADKETDSVTKLCYDSYDVMPPSL

SEQ ID NO: 24549 - protein, 281 aa, Glycine max
MLPEWKNGNGIDTLSCPPTELGGCGKSHLELRSVFPSSWIKEMEVKAEEIVCSYDFPETSDKSSSCSLCFDTDHSTNRYKQLQEAALREDSNDNYLFCPTVMDISGDNFEHFQKHCGKGHPIVVQDALRSTSNLSWDPLTMFCTYLEQSITRYEKNKDLLESCLDWWEVEINIRQYFTGSVKRRPQRNTWDEMLKLKGWLSSQIFKEQFPAHFAEVIDALPVKEYMHPLSGLLNLAANLPHGSAKHDIGPYVYISYGSADKETDSVTKLCYDSYDVMPPSL

SEQ ID NO: 24550 - protein, 239 aa, Glycine max
MEVKAEEIVCSYDFPETSDKSSSCSLCFDTDHSTNRYKQLQEAALREDSNDNYLFCPTVMDISGDNFEHFQKHCGKGHPIVVQDALRSTSNLSWDPLTMFCTYLEQSITRYEKNKDLLESCLDWWEVEINIRQYFTGSVKRRPQRNTWDEMLKLKGWLSSQIFKEQFPAHFAEVIDALPVKEYMHPLSGLLNLAANLPHGSAKHDIGPYVYISYGSADKETDSVTKLCYDSYDVMPPSL

SEQ ID NO: 24551 - DNA, 1120 bp, Glycine max
gacgctttaagaccaaaagcaccgtctccgtctccgtctccacctcctgtccttcgttgcacttcgctttttccaaaaccaatcacatcagcatcactctcgtcgccgccgtcgtcgaccaccgcaagagccatcgcactccgccgtcatccgttagggcaaaaatgagtcgaggaagtggaggtggatacgatcgtcacatcactattttctcccctgaaggacgtctcttccaagtcgagtatgctttcaaggctgttaaggccgcaggaatcacctcaattggtgtccgaggaaaggattcgatttgtgttgttactcagaagaaggttccggataagcttttggacaacacaagtgttacacacctctttcccatcaccaagtaccttggtttattggctactggcatgacagctgatgctaggacactggtccaacaagcaagaaatgaagcagctgagtttcgctttacatatggatatgaaatgcctgtagatgtattagctaaatggattgcagacaaatcacaagtctatactcaacatgcttatatgagaccacttggagtagttgccatggttttgggtattgatgatgaatatggacctcagctttacaaatgtgatccagctggtcattactttggtcacaaggcaacaagtgctggattgaaggaccaagaggcaattaatttcttggaaaagaagatgaagaatgacccttcatttacatatgaggagacagttcagactgccatttctgccctgcaatcagttcttcaggaggattttaaggccactgagattgaggttggagtggtgcggaaagaaaatccagaattcagagttttaaccaccgaggaaattgatgagcacttgactgcaataagtgagcgtgactgagttcttgataaggatgtaatggttcaaactttctaatgctagagattaaattatgtacttgtttctggaatcattgaattgatttccttgtgatatttgagtagtaagtttatttaagaatgatgttgaagacggtatttgatttcctattacaagtttacttgggagcaattttatgtttctaccaatgaaatgaaatgaaaattttaaaaaat

SEQ ID NO: 24552 - protein, 300 aa, Glycine max
RFKTKSTVSVSVSTSCPSLHFAFSKTNHISITLVAAVVDHRKSHRTPPSSVRAKMSRGSGGGYDRHITIFSPEGRLFQVEYAFKAVKAAGITSIGVRGKDSICVVTQKKVPDKLLDNTSVTHLFPITKYLGLLATGMTADARTLVQQARNEAAEFRFTYGYEMPVDVLAKWIADKSQVYTQHAYMRPLGVVAMVLGIDDEYGPQLYKCDPAGHYFGHKATSAGLKDQEAINFLEKKMKNDPSFTYEETVQTAISALQSVLQEDFKATEIEVGVVRKENPEFRVLTTEEIDEHLTAISERD

SEQ ID NO: 24553 - protein, 246 aa, Glycine max
MSRGSGGGYDRHITIFSPEGRLFQVEYAFKAVKAAGITSIGVRGKDSICVVTQKKVPDKLLDNTSVTHLFPITKYLGLLATGMTADARTLVQQARNEAAEFRFTYGYEMPVDVLAKWIADKSQVYTQHAYMRPLGVVAMVLGIDDEYGPQLYKCDPAGHYFGHKATSAGLKDQEAINFLEKKMKNDPSFTYEETVQTAISALQSVLQEDFKATEIEVGVVRKENPEFRVLTTEEIDEHLTAISERD

SEQ ID NO: 24554 - protein, 164 aa, Glycine max
MTADARTLVQQARNEAAEFRFTYGYEMPVDVLAKWIADKSQVYTQHAYMRPLGVVAMVLGIDDEYGPQLYKCDPAGHYFGHKATSAGLKDQEAINFLEKKMKNDPSFTYEETVQTAISALQSVLQEDFKATEIEVGVVRKENPEFRVLTTEEIDEHLTAISERD

SEQ ID NO: 24555 - DNA, 1313 bp, Glycine max
aattttttttgctcatcattttgtgctcatggtggtgaggtttaacccttcatgtctcaccctctctcataatcctcaccacactacatatttctctaagcaagtgacagttaggagcagttatgggaaacacatgaaaagtggtggccttggaagaaggcctcagatagtgtcttcagttttggggaacagtaacactgaaggggtgagtgtgtttgtggtgtctgacttgcacactgactatgctgagaatttgaagtgggtggagtgcttgtctaatgtgaagcacaagaatgatgtgcttcttgtggcaggtgatgtggctgagacatgttccatgtttgttgtgacaatgtctcttttgaaagagaggtttgagcatgtcttctatgttcctggaaaccatgacctttggtgccgtcgcgaggggcaaaattatgttgattctcttgaaaagctgaataaattgcttgatgcgtgtgagagaattggagtggagacaaatccaacggttatagatgaaataggaatcattcctttgttctcttggtaccatgagagctttgacaaagagaaggacataacaggctttcgcatcccgtctttggagatggcatgtaaagatttctatgcgtgtaagtggcccgagggactttcaaatggagatatgtcactggctttatattttgatgccatgaatgataaacaaatagatgtgataaaggagattcagatggcatgcgatcacatcattaccttttcacactttgttcccaggcaggaactttgtccagagaagaggatgttgttctatcccaagcttccaaaaataattggttcagactctcttgaagatcgaataaggtctattcatggtgctgagggaaggaaggatgcgtcgtcttgtcatgtgtttggtcatactcacttctgttgggatgctgttgttgatggtatcaggtatgtacaggcacccttagcttacccaagggaaaggaagagaagaatgaatggaggtgaaaattggctaccgttttgcctttatgctgacaacaaatttgctgatagactcaacccttgctattggtctgattattactctgccaaccccaggacaccccataatactaaacttgctccttgggtagccagattttataagcaaacagaaactgtggatgtatagtattcactattgactttattgagctggttttatttgttgataagacattcctatattgtgttgtcttttttacattaaatcaataaataacatgagtcattttgcaaggtgaaagttgcacaaacac

SEQ ID NO: 24556 - protein, 394 aa, Glycine max
IFFAHHFVLMVVRFNPSCLTLSHNPHHTTYFSKQVTVRSSYGKHMKSGGLGRRPQIVSSVLGNSNTEGVSVFVVSDLHTDYAENLKWVECLSNVKHKNDVLLVAGDVAETCSMFVVTMSLLKERFEHVFYVPGNHDLWCRREGQNYVDSLEKLNKLLDACERIGVETNPTVIDEIGIIPLFSWYHESFDKEKDITGFRIPSLEMACKDFYACKWPEGLSNGDMSLALYFDAMNDKQIDVIKEIQMACDHIITFSHFVPRQELCPEKRMLFYPKLPKIIGSDSLEDRIRSIHGAEGRKDASSCHVFGHTHFCWDAVVDGIRYVQAPLAYPRERKRRMNGGENWLPFCLYADNKFADRLNPCYWSDYYSANPRTPHNTKLAPWVARFYKQTETVDV

SEQ ID NO: 24557 - protein, 385 aa, Glycine max
MVVRFNPSCLTLSHNPHHTTYFSKQVTVRSSYGKHMKSGGLGRRPQIVSSVLGNSNTEGVSVFVVSDLHTDYAENLKWVECLSNVKHKNDVLLVAGDVAETCSMFVVTMSLLKERFEHVFYVPGNHDLWCRREGQNYVDSLEKLNKLLDACERIGVETNPTVIDEIGIIPLFSWYHESFDKEKDITGFRIPSLEMACKDFYACKWPEGLSNGDMSLALYFDAMNDKQIDVIKEIQMACDHIITFSHFVPRQELCPEKRMLFYPKLPKIIGSDSLEDRIRSIHGAEGRKDASSCHVFGHTHFCWDAVVDGIRYVQAPLAYPRERKRRMNGGENWLPFCLYADNKFADRLNPCYWSDYYSANPRTPHNTKLAPWVARFYKQTETVDV

SEQ ID NO: 24558 - protein, 350 aa, Glycine max
MKSGGLGRRPQIVSSVLGNSNTEGVSVFVVSDLHTDYAENLKWVECLSNVKHKNDVLLVAGDVAETCSMFVVTMSLLKERFEHVFYVPGNHDLWCRREGQNYVDSLEKLNKLLDACERIGVETNPTVIDEIGIIPLFSWYHESFDKEKDITGFRIPSLEMACKDFYACKWPEGLSNGDMSLALYFDAMNDKQIDVIKEIQMACDHIITFSHFVPRQELCPEKRMLFYPKLPKIIGSDSLEDRIRSIHGAEGRKDASSCHVFGHTHFCWDAVVDGIRYVQAPLAYPRERKRRMNGGENWLPFCLYADNKFADRLNPCYWSDYYSANPRTPHNTKLAPWVARFYKQTETVDV

SEQ ID NO: 24559 - DNA, 1346 bp, Glycine max
tttgcttgtgccgaaattgaaagtgctagagctgtggtgctgagaattggggaggctcttgaagaacaagaaaaagcttcccaagcttctaaaccacaggatgtggatggactagtcgaagaggttcaagagtctagaagaatcaaattgttgcatcacccaagcaaggtgatggccatggaatatgaactacgtgctcttagggatcaaattcgagagaaatctatattttcaattaagcttcagaaagagctaatcatgagcaagaggaacgaggaaaataaatcttgtttatacatgttagatggttctgaagctttgggttcatatctgcgagtccagccttgctcagatgaagtgccacaggtttcgaaatgttcatttcagtggtaccgcttgtcttctgaaggcagctggagggaagttatttcagatctatacttgagatgtaaaaccattcacgtgcctgtgcctaacagcagctttagcttttaggatagttggtccttgacatggtatcaaagcctttaagtcaaatagtgccaacaaatcaatatatgctcctgacccctctgatgttgggagaatcttacaagtagatattgtctcaaatgggaaaaagctcaccctaacaactaatcccattcaaactgtttcaggacttggaagccatgtggagacacttctacgaaaatctaatactgattttaatgtagttatttctcaaatgaatggaaaagatcactcatcccattctactcattcatttaatgtggggagaatgaggataaagctatgcagaggttggattacaaaagctagagagatttactccccatcaatgcagctatgtggcgttagaagtgatgtcgcgaatgcagcgaaggtgttgttttggcaagcaagaaagggcctctcatttgtattaacctttgaatcagagagagaccgaaattcagccattatggttgccaggaaatatgctcttgattgcaatgtcgtgcttgccgggccagatgatctagtgtaggagcaaaaattaactgactgagcttttccaacaaacgtgagatttatcagattcttggtgtgagtatacgtgtgtgcttgttttgttaaagaaagatatgatttcatctgtgattgggtttttcactaattgagttgcattgttttaggcatggtttttttatttgcctaatcatgttgtaccaaactcaactttttttttataattattagttcatttgttcattgtggctaatttgcatgtgctagttgttttgtaatgtaaagcatatccgaaacatggtatataccaaaatttcctaatgattattggctcg

SEQ ID NO: 24560 - protein, 164 aa, Glycine max
FACAEIESARAVVLRIGEALEEQEKASQASKPQDVDGLVEEVQESRRIKLLHHPSKVMAMEYELRALRDQIREKSIFSIKLQKELIMSKRNEENKSCLYMLDGSEALGSYLRVQPCSDEVPQVSKCSFQWYRLSSEGSWREVISDLYLRCKTIHVPVPNSSFSF

SEQ ID NO: 24561 - protein, 107 aa, Glycine max
MAMEYELRALRDQIREKSIFSIKLQKELIMSKRNEENKSCLYMLDGSEALGSYLRVQPCSDEVPQVSKCSFQWYRLSSEGSWREVISDLYLRCKTIHVPVPNSSFSF

SEQ ID NO: 24562 - protein, 105 aa, Glycine max
MEYELRALRDQIREKSIFSIKLQKELIMSKRNEENKSCLYMLDGSEALGSYLRVQPCSDEVPQVSKCSFQWYRLSSEGSWREVISDLYLRCKTIHVPVPNSSFSF

SEQ ID NO: 24563 - DNA, 1206 bp, Glycine max
tcaaattttacgcgctgagcggctccattgctcggcgcgtattcttccgcgcgttattgctctcctccgctgtctccctcgttgccctgatccgcttcctccccaccgtcgatttgggatctttgactcccaagacctactttgactgcgtcgacgacgactcagattcgctctccgaaaacgccaccttaacagccggctcctacttgttccagagccgcatcctcaacaccttctggggctccttcgactccatgaactgcaaaaacgacacgagtttagcttccaccgtcatcaccattctaacgggtaaacgactcttgaacttcggcgcaagaagcctctgcgttggagaagggtctaatgtaattgtctcctcaatgcaacggttgggattctccagtgtcgttggtctccacaagcacccttttttgtccctccacaaaaagaaaaccgtgtgccacttcgagtacgatgattccaccttcgacttcgtgttctccaaggatgttgttgaccaggtttctgtcccagctgcattgctcgtgcttgaggttgagcgcattcttaagcctggtggaatcggtgccttgcttgttggttcttcttcttcatcatcagtgccttcattgctgagatcttccaacctggtgcatgttggttatgtcaatgaactcaaccttgtggttttcaagaaaagatctgaaaacgcaagcacaagctctcctttttataaccatgtactaccagaagattgtgcaagtgttgaattcaccaagcctttggtgaaactaatggagcctcttgtggtggaaagagtaggacatgatgtcaagtatgagaaaaaaaatgtctcctatttgcctaagtttgtggacgtttctaataagaagaggctggtgtatattgatattggggtgagggagttggtgaatgcaaatgtcaatgttactaattggttcccaccgtcttatcccattgatcagaaggctttcagtgtttactttgttcattacaacgcttctgtgttgtcctatgtgaaactgcctcgtgtcacgttcgtttatcatccgggtttagctgggaaaattgcacacaagaatggtgtggatggagaaatggaaccgtttttcggtgaggaagagtttgattttcttgtgtggttcaaggaaactgtgcagcatgctgattttgtggttctgaaga

SEQ ID NO: 24564 - protein, 401 aa, Glycine max
KFYALSGSIARRVFFRALLLSSAVSLVALIRFLPTVDLGSLTPKTYFDCVDDDSDSLSENATLTAGSYLFQSRILNTFWGSFDSMNCKNDTSLASTVITILTGKRLLNFGARSLCVGEGSNVIVSSMQRLGFSSVVGLHKHPFLSLHKKKTVCHFEYDDSTFDFVFSKDVVDQVSVPAALLVLEVERILKPGGIGALLVGSSSSSSVPSLLRSSNLVHVGYVNELNLVVFKKRSENASTSSPFYNHVLPEDCASVEFTKPLVKLMEPLVVERVGHDVKYEKKNVSYLPKFVDVSNKKRLVYIDIGVRELVNANVNVTNWFPPSYPIDQKAFSVYFVHYNASVLSYVKLPRVTFVYHPGLAGKIAHKNGVDGEMEPFFGEEEFDFLVWFKETVQHADFVVLK

SEQ ID NO: 24565 - protein, 317 aa, Glycine max
MNCKNDTSLASTVITILTGKRLLNFGARSLCVGEGSNVIVSSMQRLGFSSVVGLHKHPFLSLHKKKTVCHFEYDDSTFDFVFSKDVVDQVSVPAALLVLEVERILKPGGIGALLVGSSSSSSVPSLLRSSNLVHVGYVNELNLVVFKKRSENASTSSPFYNHVLPEDCASVEFTKPLVKLMEPLVVERVGHDVKYEKKNVSYLPKFVDVSNKKRLVYIDIGVRELVNANVNVTNWFPPSYPIDQKAFSVYFVHYNASVLSYVKLPRVTFVYHPGLAGKIAHKNGVDGEMEPFFGEEEFDFLVWFKETVQHADFVVLK

SEQ ID NO: 24566 - protein, 275 aa, Glycine max
MQRLGFSSVVGLHKHPFLSLHKKKTVCHFEYDDSTFDFVFSKDVVDQVSVPAALLVLEVERILKPGGIGALLVGSSSSSSVPSLLRSSNLVHVGYVNELNLVVFKKRSENASTSSPFYNHVLPEDCASVEFTKPLVKLMEPLVVERVGHDVKYEKKNVSYLPKFVDVSNKKRLVYIDIGVRELVNANVNVTNWFPPSYPIDQKAFSVYFVHYNASVLSYVKLPRVTFVYHPGLAGKIAHKNGVDGEMEPFFGEEEFDFLVWFKETVQHADFVVLK

SEQ ID NO: 24567 - DNA, 1228 bp, Glycine max
aatatagcttgcactcacttgctctctctcataatgaaacaaaatattactacttcccttacctttctctctctctcaaaacctcatttgtcgtcctcttcatcaacctctttcttctgcctcaccaaccaatttgttttctttttgcaatgctggtgcttggaagcatctctccattgaatgtgatagcttcaattctccaacatttgtataaatactttaacatcgacaagtgtgaagctctgatattaatttggtcatggcgatggtccagacagttatgtacgaaatcatttaataaagcattgagaatcccaacttagatgatgtatatacatcaaagtttgatttgatcagtgtttgacatacacactactcttcttcaattcccttgtgtgtgaaggagagacaaattaagattatatatttagcttagtttctagctagtggctactgaaattgaaactgataacatgtgtttgtttttgtattccgaaacgggtttttgcaggttagtgttccatgcagcagtttgctcaccatagttacggttagatgtggacactgtgccaatttgctgacagttaacatgggagcatcacttcaaacttttccttctcaagacactactcagttacagagacagcatctaagtgttcaagaagcatgcagcaaggaactaggatcatcatcaaagtgcaaatcatttgagactgtagaccatgagcagcaacctaggattcctcccattcgtcctcctgagaagagacaacgtgttccttctgcttataaccggttcattaagtaagtgatcttttcaaatttacattttaaataaacttcctgccatttccccagctactttgtacataatgtatatcctcgtattctaattagtatatatggttgaatagagtttggatcccatgattaatatgttccaattaaaaaaataaaattagttaaatagaaggattaatgagaatgactattcatgattcaaataatataattggttaagtgatggacaagcatgagatcataaatgcatacatttgaaataaatcatactaatataaacaattatatacaaatgaaaattcttatgtatataaaattattaacaaaataaaattttaatatgacagtggcaaagggaatgactacatattaaaactttagagtatgtttctcaaaaaagaaaaaaaaaactttagagaatgtttac

SEQ ID NO: 24568 - protein, 106 aa, Glycine max
YSLHSLALSHNETKYYYFPYLSLSLKTSFVVLFINLFLLPHQPICFLFAMLVLGSISPLNVIASILQHLYKYFNIDKCEALILIWSWRWSRQLCTKSFNKALRIPT

SEQ ID NO: 24569 - protein, 72 aa, Glycine max
MGASLQTFPSQDTTQLQRQHLSVQEACSKELGSSSKCKSFETVDHEQQPRIPPIRPPEKRQRVPSAYNRFIK

SEQ ID NO: 24570 - protein, 59 aa, Glycine max
NIACTHLLSLIMKQNITTSLTFLSLSKPHLSSSSSTSFFCLTNQFVFFLQCWCLEASLH

SEQ ID NO: 24571 - DNA, 1219 bp, Glycine max
ttttgtctggaggattggactcatcacttgttgctgcagtggtcaatcgttatttggctgaatctgaatctgctcgtcaatggggatcacagttacatactttctgcattggtttaaagggctctcctgacttgaaagctgcaaaagaggtagcagattaccttggtactcgtcaccatgaactttatttcacggttcaggaaggtatagatgcacttgaagaagtcatttaccatattgaaacatatgatgtaacgactatcagagcaagtactgcaatgtttcttatgtccagaaaaattaaagccttgggagtgaaaatggtactttctggagaaggttcagatgaaatatttggaggttacctgtattttcacaaggcacctaacaagaaagagtttcatgaagaaacatgtcgaaaaattaaagctcttcatctttatgactgcctgagagccaataaatcaactgcagcatggggtgtagaggcacgtgtaccattcttggataaagaatttatcaacgtagccatgagtatagatccggaatggaaaatgataaggcctgatcttggaaggatagagaagtgggtattacgcaatgcatttgatgacgataagaatccatatttaccaaagcacatattgtacaggcagaaggaacaattcagtgatggggttggttacagctggattgatggcttgaaggatcacgcaaacaaacaagtcacagatgcgacgatgatggctgccaattttatttaccctgaaaacactcctaccacaaaagaaggatacctctacaggacaatttttgagaagttctttccaaagaatgcagcaaaggcaacagtgccaggaggtcctagtgtggcatgcagtactgcaaaagctgtggaatgggatgcagcatggtcaaaaaatcttgatccttctggtcgtgccgcacttggtattcatgatgctgcatatgatgcagtggataccaaaattgacgagcccaaaaatggaaccctttaaggcccataatcgattgtcaagagaaaaaaatgtatgcaacaactgtctagtggggatttaaacttctagtaggcaaaactaatgagaagtgggattgtttttattttcagctcaaattaatatgtaggttttgaactgtttgtgggttattttaaataaatatctatatttaaattttgtaattaagtcattaaattttc

SEQ ID NO: 24572 - protein, 338 aa, Glycine max
LSGGLDSSLVAAVVNRYLAESESARQWGSQLHTFCIGLKGSPDLKAAKEVADYLGTRHHELYFTVQEGIDALEEVIYHIETYDVTTIRASTAMFLMSRKIKALGVKMVLSGEGSDEIFGGYLYFHKAPNKKEFHEETCRKIKALHLYDCLRANKSTAAWGVEARVPFLDKEFINVAMSIDPEWKMIRPDLGRIEKWVLRNAFDDDKNPYLPKHILYRQKEQFSDGVGYSWIDGLKDHANKQVTDATMMAANFIYPENTPTTKEGYLYRTIFEKFFPKNAAKATVPGGPSVACSTAKAVEWDAAWSKNLDPSGRAALGIHDAAYDAVDTKIDEPKNGTL

SEQ ID NO: 24573 - protein, 246 aa, Glycine max
MFLMSRKIKALGVKMVLSGEGSDEIFGGYLYFHKAPNKKEFHEETCRKIKALHLYDCLRANKSTAAWGVEARVPFLDKEFINVAMSIDPEWKMIRPDLGRIEKWVLRNAFDDDKNPYLPKHILYRQKEQFSDGVGYSWIDGLKDHANKQVTDATMMAANFIYPENTPTTKEGYLYRTIFEKFFPKNAAKATVPGGPSVACSTAKAVEWDAAWSKNLDPSGRAALGIHDAAYDAVDTKIDEPKNGTL

SEQ ID NO: 24574 - protein, 243 aa, Glycine max
MSRKIKALGVKMVLSGEGSDEIFGGYLYFHKAPNKKEFHEETCRKIKALHLYDCLRANKSTAAWGVEARVPFLDKEFINVAMSIDPEWKMIRPDLGRIEKWVLRNAFDDDKNPYLPKHILYRQKEQFSDGVGYSWIDGLKDHANKQVTDATMMAANFIYPENTPTTKEGYLYRTIFEKFFPKNAAKATVPGGPSVACSTAKAVEWDAAWSKNLDPSGRAALGIHDAAYDAVDTKIDEPKNGTL

SEQ ID NO: 24575 - DNA, 1383 bp, Glycine max
ttttcacgctttggaactgtatcaatggctgaaatcatccgtgatcaaaagaccggtgacagtttatgctatgctttcatagagtttgaggacaaacggtcatgtgagcaggcatattttaagatggataatgctttgattgatgatcgaaggatacacgtggattttagtcaaagtgtggcaaaactgtggtcacaatacaggcagaaagatcaaaagggtaaaggtggtggttgcttcaaatgtggttctacagatcatattgctaaggattgtacgggagaggctacaatgaaacaaccacaagcaaaatacatcttaaaggatgataatgtccaacgtggtggagatagtgcgagatatgaaatggtgtttgatgaagataattcacaacatccaaggcaagatgtaaaacaccaaaggcatgacagggatgacccagtcgaaagaaaagatcatagaagccgcagagatcaggatatgatagactcaaacaacagagataggtatggtgatagaagcagagggcatgggggaaatggtgagaacaaagcacggtctgaaagaggtgtaatagatttggattccaatgctgataagaaagacagagataggcacatgggaagacatggagatgatgattacaagcggaaggatgagcatgattccagaaaaagagacgaagattatgtctacaagtggaaagacaagcgagactcaagaaaaagagatgaagatgatgagtatagagaaatacaaactagtcgatatgataggagaaacacagattctagccatttggagagaaggaatagcagagattataggaagaaacctgaagacagtggaacgcaagatatgaagattgactctggacaaagaaaaggaagtccaggtgatgaggattacaaaaatggaagggatcatgaggattacgaacgtaaaatgaaggatgaggattacagaaatagaaaggaagaacgtgtgcataaaagccaagatattgaagcggatgatggctacaaacgtagaagggaggatgcagattacaaacgcagaagggatgatggagattacagacatagaagggaagagcgtggacacgacaggagatgattattggtgtcactatatcctaatgctaagcacagaacctttgaacggctatcttgtatgtcccttttgcttcaatttttctggtggagcaagatattgatatgttttagaacaaggtttttgaagtattctacatttactacttagaacatatttaattatttttacatagcttcagaaaacttgttttcatattccgtgcacaacagcacagttaagttttcatgttcagctaattgttaaaatggtgtttgacttaactaacgc

SEQ ID NO: 24576 - protein, 371 aa, Glycine max
FSRFGTVSMAEIIRDQKTGDSLCYAFIEFEDKRSCEQAYFKMDNALIDDRRIHVDFSQSVAKLWSQYRQKDQKGKGGGCFKCGSTDHIAKDCTGEATMKQPQAKYILKDDNVQRGGDSARYEMVFDEDNSQHPRQDVKHQRHDRDDPVERKDHRSRRDQDMIDSNNRDRYGDRSRGHGGNGENKARSERGVIDLDSNADKKDRDRHMGRHGDDDYKRKDEHDSRKRDEDYVYKWKDKRDSRKRDEDDEYREIQTSRYDRRNTDSSHLERRNSRDYRKKPEDSGTQDMKIDSGQRKGSPGDEDYKNGRDHEDYERKMKDEDYRNRKEERVHKSQDIEADDGYKRRREDADYKRRRDDGDYRHRREERGHDRR

SEQ ID NO: 24577 - protein, 363 aa, Glycine max
MAEIIRDQKTGDSLCYAFIEFEDKRSCEQAYFKMDNALIDDRRIHVDFSQSVAKLWSQYRQKDQKGKGGGCFKCGSTDHIAKDCTGEATMKQPQAKYILKDDNVQRGGDSARYEMVFDEDNSQHPRQDVKHQRHDRDDPVERKDHRSRRDQDMIDSNNRDRYGDRSRGHGGNGENKARSERGVIDLDSNADKKDRDRHMGRHGDDDYKRKDEHDSRKRDEDYVYKWKDKRDSRKRDEDDEYREIQTSRYDRRNTDSSHLERRNSRDYRKKPEDSGTQDMKIDSGQRKGSPGDEDYKNGRDHEDYERKMKDEDYRNRKEERVHKSQDIEADDGYKRRREDADYKRRRDDGDYRHRREERGHDRR

SEQ ID NO: 24578 - protein, 330 aa, Glycine max
MDNALIDDRRIHVDFSQSVAKLWSQYRQKDQKGKGGGCFKCGSTDHIAKDCTGEATMKQPQAKYILKDDNVQRGGDSARYEMVFDEDNSQHPRQDVKHQRHDRDDPVERKDHRSRRDQDMIDSNNRDRYGDRSRGHGGNGENKARSERGVIDLDSNADKKDRDRHMGRHGDDDYKRKDEHDSRKRDEDYVYKWKDKRDSRKRDEDDEYREIQTSRYDRRNTDSSHLERRNSRDYRKKPEDSGTQDMKIDSGQRKGSPGDEDYKNGRDHEDYERKMKDEDYRNRKEERVHKSQDIEADDGYKRRREDADYKRRRDDGDYRHRREERGHDRR

SEQ ID NO: 24579 - DNA, 1481 bp, Glycine max
attgtaaagctttattattcctttcaagatgaagagtacttatatctcataatggagtatctacctggtggtgatatgatgacgttgctcatgcggaaggatatactgacagaaaatgaggccaggttctatgttggggagactgtcctagctatagagtcaattcataaacataattatattcatagagatatcaagcctgacaacttgctgctagatagaaatggtcacatgaaattatcagactttggattatgtaaaccactagactgcagtaatcttcaggaaaaggacttctctattggaagcaacagaagtggagcccttcagagcgatgggcgtcctgtggctcctaaaagaagccaacaggagcaactgcagcattggcagaaaaataggcgaatgctagcctattctacagtcggaacacctgactatattgcccccgaagttcttctgaagaaaggatatggcatggaatgtgattggtggtccctgggagcgataatgtatgaaatgttagtggggtatccgcccttttattcagatgaaccaatgttgacttgtagaaagatagtaaattggagaaattatttaaaatttccagaagaagttaaaatttcggcagaagcaaaggatcttattagtagactcctatgtaatgtggatcagaggcttggaaccaaaggggctgatgaaataaaggcgcacccatggtttaaaggtattgaatgggacaaattgtaccaaattaaagctgcttttattcctgaggttaatgatgaattagatactcaaaattttgagaagtttgaagaggctgacaaccaaactcaaccttcctcaaaatcaggcccatggagaaagatgctgtcatctaaagatgtcaactttgttggttacacatataagaactatgaaatcgtgaatgatgatcaactacctgaaattgctgaattgaagaagaagagcacaaaacctaagcgaccatctattaagaccctatttgatgatgaatcagctacagctgccaatcaacctacccaagggagcttcttaaaactgttacctactcaaccagaagttcctgagaagagtgaatctcaatgatcccaactagtaatattttacaggactcttacatggccatggaggtatgaccaaatgctgagttgaatactgattgttttagtctttcccacattcttttgttagtttggcgtggatagttgtgggagcaaaggctctgaaactttgtggttttggatagtgggttttggcttgactgggatatttgtctgtagaaaaatctttgaaggtatatattctttacatttttggttggtggtgtattcttttgttcaccatttatcaagctgcaatgtgttgagaatccaagttatttcttgtaattaagttactgctgaagtgctgacaaggatgtacaattctcacatgtagagattcattagtttgtaagg

SEQ ID NO: 24580 - protein, 369 aa, Glycine max
IVKLYYSFQDEEYLYLIMEYLPGGDMMTLLMRKDILTENEARFYVGETVLAIESIHKHNYIHRDIKPDNLLLDRNGHMKLSDFGLCKPLDCSNLQEKDFSIGSNRSGALQSDGRPVAPKRSQQEQLQHWQKNRRMLAYSTVGTPDYIAPEVLLKKGYGMECDWWSLGAIMYEMLVGYPPFYSDEPMLTCRKIVNWRNYLKFPEEVKISAEAKDLISRLLCNVDQRLGTKGADEIKAHPWFKGIEWDKLYQIKAAFIPEVNDELDTQNFEKFEEADNQTQPSSKSGPWRKMLSSKDVNFVGYTYKNYEIVNDDQLPEIAELKKKSTKPKRPSIKTLFDDESATAANQPTQGSFLKLLPTQPEVPEKSESQ

SEQ ID NO: 24581 - protein, 352 aa, Glycine max
MEYLPGGDMMTLLMRKDILTENEARFYVGETVLAIESIHKHNYIHRDIKPDNLLLDRNGHMKLSDFGLCKPLDCSNLQEKDFSIGSNRSGALQSDGRPVAPKRSQQEQLQHWQKNRRMLAYSTVGTPDYIAPEVLLKKGYGMECDWWSLGAIMYEMLVGYPPFYSDEPMLTCRKIVNWRNYLKFPEEVKISAEAKDLISRLLCNVDQRLGTKGADEIKAHPWFKGIEWDKLYQIKAAFIPEVNDELDTQNFEKFEEADNQTQPSSKSGPWRKMLSSKDVNFVGYTYKNYEIVNDDQLPEIAELKKKSTKPKRPSIKTLFDDESATAANQPTQGSFLKLLPTQPEVPEKSESQ

SEQ ID NO: 24582 - protein, 344 aa, Glycine max
MMTLLMRKDILTENEARFYVGETVLAIESIHKHNYIHRDIKPDNLLLDRNGHMKLSDFGLCKPLDCSNLQEKDFSIGSNRSGALQSDGRPVAPKRSQQEQLQHWQKNRRMLAYSTVGTPDYIAPEVLLKKGYGMECDWWSLGAIMYEMLVGYPPFYSDEPMLTCRKIVNWRNYLKFPEEVKISAEAKDLISRLLCNVDQRLGTKGADEIKAHPWFKGIEWDKLYQIKAAFIPEVNDELDTQNFEKFEEADNQTQPSSKSGPWRKMLSSKDVNFVGYTYKNYEIVNDDQLPEIAELKKKSTKPKRPSIKTLFDDESATAANQPTQGSFLKLLPTQPEVPEKSESQ

SEQ ID NO: 24583 - DNA, 1415 bp, Glycine max
tatattgcatttggaccctatagaggtagacatcttccgaggaatcactcctccagatgctccaacatttgggaaggtatttggtggacaaatagttggacaggcactggctgcagcatcaaaatctgttgattgtcgtaaagttgttcatagcttgcatgtctattttcttcttgtgggggattttaacatacccattatatatcaagttaagcgtctccgtgatgggaagagttttgctacaaggaaagtggatgcaattcaaaagggaaatgtcatattcactttgttggcttcatttcataaggaagaagtagggtttcaccaccaggaagtgtctatcccatcagtccctgctccagatacgcttttatcgttggaagagcttcgggagcaacgtcttactgaccctcgtcttccaagaacttaccggaacaaggttgctacaattgaattcattccctggcccatagagatacggttctgtgaacctaaaatttcaacaaatcagaccaaatctcctcctagtttgagatactggtttagagcaaggggaaaactttcagatgatcaagccttgcataggtgtgtggtagcatatacatcagatctaatcttccttcaagtgagtttgaaccccaaccgtaggaagggaaggaaggctcgtgctgtgagtctggaccactccatgtggtttcacagacctttaagagctgatgattggatactatttgtgatctttagtcctactgccaataatgcccgcggctatgtcactggccaaatgttcaatcagaagggagagcatcttgtgtctgtggttcaagaaggtgtaatgagggaagttatttctgctaagtcagccatcaaatctaatctatgaatagctaaaaatgcactgaaacttgtgttctttttagttttgtcttcttttgttttccttctatagtgaatgatcgggtgaaccatacaataggtggtgcaccactatatcaccatcatatagtgcacctttatttttaatcaacggttcaaaattgtgattgacaagtaattgatgtgttagatttatttacaattaactagttttaaaatttacaaattggtccttttgttgtcgcgtttgtaccatctcctacaaagattcacgcctctgtcggctcttccatcaccacgagccctgatctctgctggcatccgcaacaaccatggctcatctcttcatttcaaaagttatagctttacttcatcaatcactatacaaccagaattgccaattcaaatgtaagaaaaatatactttttttttatggacaaatgatacatataacattacctaccagtatagtcttgcttcctaagtcttgggagaagacaaatgatgaattctgggtttgttttgggtccttatgcttt

SEQ ID NO: 24584 - protein, 293 aa, Glycine max
ILHLDPIEVDIFRGITPPDAPTFGKVFGGQIVGQALAAASKSVDCRKVVHSLHVYFLLVGDFNIPIIYQVKRLRDGKSFATRKVDAIQKGNVIFTLLASFHKEEVGFHHQEVSIPSVPAPDTLLSLEELREQRLTDPRLPRTYRNKVATIEFIPWPIEIRFCEPKISTNQTKSPPSLRYWFRARGKLSDDQALHRCVVAYTSDLIFLQVSLNPNRRKGRKARAVSLDHSMWFHRPLRADDWILFVIFSPTANNARGYVTGQMFNQKGEHLVSVVQEGVMREVISAKSAIKSNL

SEQ ID NO: 24585 - DNA, 1659 bp, Glycine max
aaaaagcctctatagtttatatagcaagatgaaacgaaaggatataagcattgataaagtatatgatgcacgtgcattaagagtagttgtgggagacaagaatggaactttacatggtcctgcagttcagtgttgttatagtcttcttgacattgtacacaggctttggactccaatagatggtgaatttgatgactacatcattaatccgaagcctagtggctatcagtccttgcacactgcagtccaaggtcctgacaactcacctttagaagtacaaataaggacacagaggatgcatgagtgtgctgaacaaggacttgctgcacattggctttacaaggaaactggcaatccttttttatccatagacagcatggatgaacctgaaactgaagcatcctcctatttctccaaagatctagaggaaggaaattcttcagatattttattaagtaaatataagtcattgaaggctggacatccagtcctcagagtagaaggaagtcacttacttgctgcaattatcatcagtgtagaaaatgatgaaagagaattgctagttgctgtgagctttgggctagcagcttctgaagcagtagctgacagaagatctttccagattaagcgatgggaagcttatgcacgactgtacaaaaaggtgtctgatgaatggtggtttgaaccggggcatggggattggtttacgtgtctagagaagtacacactgtgtcgagatggtatgtatcataagcaagaccaatttgggcgcctactcccaacatttatccaggttatcaattttactgagcaagaagaatctgaatattgggctgttgtatctgctgtgtttgagggcaggcaagtggattggataacatctcggtcaaaatttgacttggttgcatcaacttctgtagaagctggcatcaataacaaggtgaaccttttgagaacaatgctctcttgggaagagcaattgcgctctgaagtaagtttcatgcaagcaaagcatgatgcaaagctttatgatcttcatggttctcttggggaagtggtaattatatgttggcctcatggtgaaattttgaggttaaaggcgggtagcactgctactgatgctgctcaaagagttggtttggagggaaagctggttttgattaacggacagttagtactgcccaacacaaaactcagagatggcgatgtagttgaagtaagaatttaaatcattctttagaaaaatgtaaataattctttatgggtcgtatgtggttaaagtagatggtatagaaatagtttttattttatttagggacgtggattcttggtagaataacgtactttcaaaaattttaaatgtgctggctttaaacttgattccaagaataagttggataaccacatgtgctatcatattttttattgttgtgttggctgtatgtgtggttattactaatttttggtactatggttattcactgtatttggaattaagcattaaaccactgcactttaaaatcatttgaagctgcaataattttatcaagaatccttggaaagagcggccaagccagggaaaatgctgtgtatctgattattagaaatatttgtatgatacagattaaatttatagcaaaacataggcttaggattccc

SEQ ID NO: 24586 - protein, 408 aa, Glycine max
KSLYSLYSKMKRKDISIDKVYDARALRVVVGDKNGTLHGPAVQCCYSLLDIVHRLWTPIDGEFDDYIINPKPSGYQSLHTAVQGPDNSPLEVQIRTQRMHECAEQGLAAHWLYKETGNPFLSIDSMDEPETEASSYFSKDLEEGNSSDILLSKYKSLKAGHPVLRVEGSHLLAAIIISVENDERELLVAVSFGLAASEAVADRRSFQIKRWEAYARLYKKVSDEWWFEPGHGDWFTCLEKYTLCRDGMYHKQDQFGRLLPTFIQVINFTEQEESEYWAVVSAVFEGRQVDWITSRSKFDLVASTSVEAGINNKVNLLRTMLSWEEQLRSEVSFMQAKHDAKLYDLHGSLGEVVIICWPHGEILRLKAGSTATDAAQRVGLEGKLVLINGQLVLPNTKLRDGDVVEVRI

SEQ ID NO: 24587 - protein, 399 aa, Glycine max
MKRKDISIDKVYDARALRVVVGDKNGTLHGPAVQCCYSLLDIVHRLWTPIDGEFDDYIINPKPSGYQSLHTAVQGPDNSPLEVQIRTQRMHECAEQGLAAHWLYKETGNPFLSIDSMDEPETEASSYFSKDLEEGNSSDILLSKYKSLKAGHPVLRVEGSHLLAAIIISVENDERELLVAVSFGLAASEAVADRRSFQIKRWEAYARLYKKVSDEWWFEPGHGDWFTCLEKYTLCRDGMYHKQDQFGRLLPTFIQVINFTEQEESEYWAVVSAVFEGRQVDWITSRSKFDLVASTSVEAGINNKVNLLRTMLSWEEQLRSEVSFMQAKHDAKLYDLHGSLGEVVIICWPHGEILRLKAGSTATDAAQRVGLEGKLVLINGQLVLPNTKLRDGDVVEVRI

SEQ ID NO: 24588 - protein, 310 aa, Glycine max
MHECAEQGLAAHWLYKETGNPFLSIDSMDEPETEASSYFSKDLEEGNSSDILLSKYKSLKAGHPVLRVEGSHLLAAIIISVENDERELLVAVSFGLAASEAVADRRSFQIKRWEAYARLYKKVSDEWWFEPGHGDWFTCLEKYTLCRDGMYHKQDQFGRLLPTFIQVINFTEQEESEYWAVVSAVFEGRQVDWITSRSKFDLVASTSVEAGINNKVNLLRTMLSWEEQLRSEVSFMQAKHDAKLYDLHGSLGEVVIICWPHGEILRLKAGSTATDAAQRVGLEGKLVLINGQLVLPNTKLRDGDVVEVRI

SEQ ID NO: 24589 - DNA, 755 bp, Glycine max
gccgcttccgcttcccaccgctctttcaacaccaacgccatgcgccagtatgacaaccgcgccgacgaccacagcaccgacatcgatcgtcactccgaacgctctttccctagcactgcgcgccgcgacgatatcttctcaggtaatgtgttggatccattttttccgactcggagtttgagccaggttctgaacatgatggaccaggtcatggacaatccgttcctctccgcgtcgcgcgggatcggagctggcgctggagtgcgtcgcggatgggacgcgagggagacagaggatgctctgcatctgcgcgtggacatgcctgggctcggcaaggaagacgtgaagatctccgtggagcagaacactctcattatcaaaggtgaaggtgctaaagaaggcgatgaagaagagagcgctcgtcgctacactagcaggattgacttgccggacaagctctacaagattgaccagatcagagctgagatgaagaacggtgtgctcaaggtcgttgtgccgaaaatgaaggaggaagagaggaaagacgtgatcagtgttaaggttgagtagaacaacccaagctgatttggccattttgcatcgacactactctttagttttcttttattaggtggtgatgaatctagttagtagatataacagcttaatagtattgttgctgtgtttggttttgaaacttcaaacgtatctgtaataattgttatatagagttgtgaatgagcttgttgttttgg

SEQ ID NO: 24590 - protein, 189 aa, Glycine max
AASASHRSFNTNAMRQYDNRADDHSTDIDRHSERSFPSTARRDDIFSGNVLDPFFPTRSLSQVLNMMDQVMDNPFLSASRGIGAGAGVRRGWDARETEDALHLRVDMPGLGKEDVKISVEQNTLIIKGEGAKEGDEEESARRYTSRIDLPDKLYKIDQIRAEMKNGVLKVVVPKMKEEERKDVISVKVE

SEQ ID NO: 24591 - protein, 176 aa, Glycine max
MRQYDNRADDHSTDIDRHSERSFPSTARRDDIFSGNVLDPFFPTRSLSQVLNMMDQVMDNPFLSASRGIGAGAGVRRGWDARETEDALHLRVDMPGLGKEDVKISVEQNTLIIKGEGAKEGDEEESARRYTSRIDLPDKLYKIDQIRAEMKNGVLKVVVPKMKEEERKDVISVKVE

SEQ ID NO: 24592 - protein, 124 aa, Glycine max
MMDQVMDNPFLSASRGIGAGAGVRRGWDARETEDALHLRVDMPGLGKEDVKISVEQNTLIIKGEGAKEGDEEESARRYTSRIDLPDKLYKIDQIRAEMKNGVLKVVVPKMKEEERKDVISVKVE

SEQ ID NO: 24593 - DNA, 1396 bp, Glycine max
tctttgggttccgtcttctaaatgcatcttctctatcgcttgctattttcattccaagtataggtcgaagatatctagcacctataccgaaatcggaataccttgtaaaatcccttacggccaaggatcaatttttggattcttcagccaagataatgtacaagttggggatatcatcatcaaagatcaagaatttgctgagattacaagggaaggatccttggcacttccagcacttccatttgatggcatacttggactcggattccaggatacttcggttggaaaagtcacaccagtttggtataatatgttggaaggagggctcatatcccacaaaattttctctctttggctaaatcaagatccatcagaagagatggggggtgagattgtctttggtggtattgactacaggcattttagaggagaacacacatacgttccactttctcaaaaaggttattggcagattgatttgggagatattctacttgcaaataattcaacaggcttatgtgagggtggctgtgctgcagttgttgactcgggcacatcattaattgctggtccaactactgttgtgactcaaattaaccatgccattggagcagaaggatataccagttttgagtgtaaaagcattctccataactatggggattcaatatgggaatccttgattgctgggttatatcctgacattatatgcagtgccattggattctgttcaaataatgaatttaatacaatggatgatgttattaaaacagtggtgcataatcaaagttggaatcggtctcaaacaagggagagccccttttgtagtttttgcaatatgattgtcctttggatccaagttcagcttaagcaaagcaatgtaaaggaaaaagtattaaaatatgtggatgagctttgtgagaagctcccaaatcccccgggacaatcatttataaattgcaataggattgctactatgccacacattacattcaccattggaaacaagtcctttcccctctctccagaacagtatgtccttcgagttgaagaaggctgttctactgtctgctatggcggttttgttgctatagatgtgcctcccccacagggtcccctctgggttcttggaagtattttcttgggggcatatcatacagtgtttgattatggcaatctccgtataggatttgcagaagctgcctagtcatagtttggtgatattactatgccaaaatctttgtgaataaaaaaaatgcaggtctacgtgattcattacagcaaataatgatagaagtctctgaggatttgtctcagggtctcttgtaagtgacgattggtatattatataagctttgtgatattagttaacaaggaaaaaaaaaaaaaaaaaaag

SEQ ID NO: 24594 - protein, 401 aa, Glycine max
LWVPSSKCIFSIACYFHSKYRSKISSTYTEIGIPCKIPYGQGSIFGFFSQDNVQVGDIIIKDQEFAEITREGSLALPALPFDGILGLGFQDTSVGKVTPVWYNMLEGGLISHKIFSLWLNQDPSEEMGGEIVFGGIDYRHFRGEHTYVPLSQKGYWQIDLGDILLANNSTGLCEGGCAAVVDSGTSLIAGPTTVVTQINHAIGAEGYTSFECKSILHNYGDSIWESLIAGLYPDIICSAIGFCSNNEFNTMDDVIKTVVHNQSWNRSQTRESPFCSFCNMIVLWIQVQLKQSNVKEKVLKYVDELCEKLPNPPGQSFINCNRIATMPHITFTIGNKSFPLSPEQYVLRVEEGCSTVCYGGFVAIDVPPPQGPLWVLGSIFLGAYHTVFDYGNLRIGFAEAA

SEQ ID NO: 24595 - protein, 298 aa, Glycine max
MLEGGLISHKIFSLWLNQDPSEEMGGEIVFGGIDYRHFRGEHTYVPLSQKGYWQIDLGDILLANNSTGLCEGGCAAVVDSGTSLIAGPTTVVTQINHAIGAEGYTSFECKSILHNYGDSIWESLIAGLYPDIICSAIGFCSNNEFNTMDDVIKTVVHNQSWNRSQTRESPFCSFCNMIVLWIQVQLKQSNVKEKVLKYVDELCEKLPNPPGQSFINCNRIATMPHITFTIGNKSFPLSPEQYVLRVEEGCSTVCYGGFVAIDVPPPQGPLWVLGSIFLGAYHTVFDYGNLRIGFAEAA

SEQ ID NO: 24596 - protein, 275 aa, Glycine max
MGGEIVFGGIDYRHFRGEHTYVPLSQKGYWQIDLGDILLANNSTGLCEGGCAAVVDSGTSLIAGPTTVVTQINHAIGAEGYTSFECKSILHNYGDSIWESLIAGLYPDIICSAIGFCSNNEFNTMDDVIKTVVHNQSWNRSQTRESPFCSFCNMIVLWIQVQLKQSNVKEKVLKYVDELCEKLPNPPGQSFINCNRIATMPHITFTIGNKSFPLSPEQYVLRVEEGCSTVCYGGFVAIDVPPPQGPLWVLGSIFLGAYHTVFDYGNLRIGFAEAA

SEQ ID NO: 24597 - DNA, 1882 bp, Glycine max
gtaccgggccccccctcggcgagacccccaaggccagcacgttcgaccgcactgatgtgaacaaacacgtcgttgctgccatcgtccggctggatgaatccgaagcccttctggccattgaaccactttacggtacctgtcgtcattttcttctccaaagcgcacaagcgcattccgcgcgacattcacgcggctgtttcaacttcgtcgatgtctttggaaaaggagcccgcgggcacgatcaacaaggcacagcggctaatcgaatagagcgaacatatacattgttcgccccttttacaaggaaggctgccagtttgttttcagcccggcgatccagacgccggccgggagcagttccggatctgatctgccgggtcgggccagggcccttatcgattgacttggccggttgacttggccggttgacttgatcggttgacttggccgcgcgggggtggtcacctcgctgccactgagccgcgcatctccgtgacgggcaaatctgctcgttcgaaaccgacgaagacatccgcggttgctcccattctcccattcgcaacgagttccctgcgcaattggctgcttgcagggtcgtcccatttcgcagcccagcgaggagtttcgatgcaggttatggtccgcgacaacaatgtcgatcaggcacttcgggtcctgaagaagaagatgcagcgtgaaggcgtttttcgcgaaatgaagcagcggcgcgcctatgagaagccttcggagcgaaagacgcgcgaaaaatccgaagcaatccggcgcgcccgcaagcttgcgcgcaaacaggcgatcagggaaggcttgctgccggcgccgccgaagaagaagctccctgaacgcaggccgcccctgccgcagacctccaggccggcgggctgacacggcctattctctcggaaccggcgaagcggtgctgtccgtacgcgtcaacggtgcgattggtcaggaacggccaattggcgctgatgttgacgtccgtgccaattcagagagccgccgcggtgacccgctattatttcgacatcagggacgataccggcctctatcctgatgaggaaggtctggagttcggcacccagcaagaagccgaggtggaagcggcccacgcgctggcggatctggctcgcgacattgcagtcatggacgagcgtcgagacgtttccgtcgaggtgcgaaccgatgccaaacgggtgtttcaggcagcgcttatcttcaggtgcagcagaacaacgcagtgaaacgtgagaagctgcagcttggccactcccggcgttggcagcctgtctgctgatcgtcacaagccgccgataacgcttgcagtggccgacctccgctgcgctctggtaagctgacgatcaagcgcacgcccccaagcggagttcttgtgaccacaggggcccggaaggacagcccatgaacctcaaagccgtcgtcttcgacgcctacgggacgctctacgacatccagtcggtcgcggagatcaccgaagatgcgtttccgggctatggcgagatcatcacgcaggtctggcggatcaagcaactcgaatacacctggttgcgctcgctgatgcggcgttaccaggattttgccgcggtcacccgcgactcgctgggctatacgctgcgcgtgctcgggctcgactatgagaaggacgcgtttgagcgcgtcatcgagaaatacctgcatctcgatctctatccggacgcgacggccgcgctttcggcgctcaagccgcgaaagctcgctatcctttccaatggcagcccggacatgctgaatgcgctggtgcgcaactccggcctcgaccgcctgctcgatgccaccatcagcgtcgatgccaggaagaccttcaagc

SEQ ID NO: 24598 - protein, 148 aa, Glycine max
MNLKAVVFDAYGTLYDIQSVAEITEDAFPGYGEIITQVWRIKQLEYTWLRSLMRRYQDFAAVTRDSLGYTLRVLGLDYEKDAFERVIEKYLHLDLYPDATAALSALKPRKLAILSNGSPDMLNALVRNSGLDRLLDATISVDARKTFK

SEQ ID NO: 24599 - protein, 137 aa, Glycine max
TGPPLGETPKASTFDRTDVNKHVVAAIVRLDESEALLAIEPLYGTCRHFLLQSAQAHSARHSRGCFNFVDVFGKGARGHDQQGTAANRIERTYTLFAPFTRKAASLFSARRSRRRPGAVPDLICRVGPGPLSIDLAG

SEQ ID NO: 24600 - protein, 113 aa, Glycine max
MRSLRSERRAKNPKQSGAPASLRANRRSGKACCRRRRRRSSLNAGRPCRRPPGRRADTAYSLGTGEAVLSVRVNGAIGQERPIGADVDVRANSESRRGDPLLFRHQGRYRPLS

SEQ ID NO: 24601 - DNA, 1642 bp, Glycine max
tcctgcctcccaggtgaaaaagaaaacacactgacgaagacagttccttctagaattgatagtatgcctctacacattgcaatgctcccgtggctcgcagtgggtcatgtgaacccttatttggagctgtcaaagattcttgctcaaaagggacactttgttacctttataagcactccaaaaaacattgatggcatgcccaaaatcccggaaaccttacagccatccatcaaattggtgaggctacccttgccacacacagatcatcatcatcatctcccagaagatgctgagagcacaatggacattccctcaaacaaaagctattacctcaagctggcttacgaggctctccaaggccctgtatcggagttgctcaaaacttcaaagcccgattgggttttttacgatttcgcaaccgagtggttaccaccaatagccaagagcctcaacattccctgtgcacactacaacttaaccgcagcgtggaacaaagtgttcattgatccacccaaggattatcaactgaacaactcaattacgcttcaagacatgtgtctccctcccacgtggcttcctttcaccacaaccgttcatctcaggcctcacgaaatcagaagagcaacaagttctatcaaagattcggacacaggacgcatggcaaattttgatctcagaaaggcatattccagctgcgacatgtttcttctcagaacatgcagagaactcgaaggagaatggttggattatcttgctcacaagtacaaggttcctgtggttccggtagggttggttccaccatccattcagataagggatgttgaagaggaagacaataaccctgactgggtcaaaattaaggattggttggacaaacaagagtcatcatccgtggtttatatagggtttgggagcgagttgaggctgagtcagcaggacgtcaccgagttggctcatggtattgagctttctgggttgcgtttcttttgggctttgaggaacctgcagaaagaggatttgccacatgggtttgaggagagaaccaaggaacgtggcattgtttggaagagttgggcaccccagattaagatcttaggccatgcagctattggaggatgcatcactcactgtggtaccaattctctcgttgagatgcttaattttgggcatgtgcttgtgactcttccctatttgctagaccaagctttgttttcgagggtgctagaggaaaagaaagtgggtattgaggtgccaaggagcgagaaagatgggtcctttactcgagacgatgtggccaagacattaaagttggcaatagtagatgaggaagggagtgattataggaagaatgccaaagaaatgggcaaggttttcagttccacggatcttcatagtcgatacattgacgactgcattgttgctcttcaaaagtacaagactcctaattccaactgttaagcacggctattcatgccagcaaggattccactccagtttcttctctgtttttgttttgcaattaagtttttcttttatttctgcaaatgcttgaacttttatccttaaatatttccaatcttcaatcatcatcatgtgtacgtttagttttgtaataaagaaggttatgagtaattacctaccc

SEQ ID NO: 24602 - protein, 485 aa, Glycine max
SCLPGEKENTLTKTVPSRIDSMPLHIAMLPWLAVGHVNPYLELSKILAQKGHFVTFISTPKNIDGMPKIPETLQPSIKLVRLPLPHTDHHHHLPEDAESTMDIPSNKSYYLKLAYEALQGPVSELLKTSKPDWVFYDFATEWLPPIAKSLNIPCAHYNLTAAWNKVFIDPPKDYQLNNSITLQDMCLPPTWLPFTTTVHLRPHEIRRATSSIKDSDTGRMANFDLRKAYSSCDMFLLRTCRELEGEWLDYLAHKYKVPVVPVGLVPPSIQIRDVEEEDNNPDWVKIKDWLDKQESSSVVYIGFGSELRLSQQDVTELAHGIELSGLRFFWALRNLQKEDLPHGFEERTKERGIVWKSWAPQIKILGHAAIGGCITHCGTNSLVEMLNFGHVLVTLPYLLDQALFSRVLEEKKVGIEVPRSEKDGSFTRDDVAKTLKLAIVDEEGSDYRKNAKEMGKVFSSTDLHSRYIDDCIVALQKYKTPNSNC

SEQ ID NO: 24603 - protein, 464 aa, Glycine max
MPLHIAMLPWLAVGHVNPYLELSKILAQKGHFVTFISTPKNIDGMPKIPETLQPSIKLVRLPLPHTDHHHHLPEDAESTMDIPSNKSYYLKLAYEALQGPVSELLKTSKPDWVFYDFATEWLPPIAKSLNIPCAHYNLTAAWNKVFIDPPKDYQLNNSITLQDMCLPPTWLPFTTTVHLRPHEIRRATSSIKDSDTGRMANFDLRKAYSSCDMFLLRTCRELEGEWLDYLAHKYKVPVVPVGLVPPSIQIRDVEEEDNNPDWVKIKDWLDKQESSSVVYIGFGSELRLSQQDVTELAHGIELSGLRFFWALRNLQKEDLPHGFEERTKERGIVWKSWAPQIKILGHAAIGGCITHCGTNSLVEMLNFGHVLVTLPYLLDQALFSRVLEEKKVGIEVPRSEKDGSFTRDDVAKTLKLAIVDEEGSDYRKNAKEMGKVFSSTDLHSRYIDDCIVALQKYKTPNSNC

SEQ ID NO: 24604 - protein, 458 aa, Glycine max
MLPWLAVGHVNPYLELSKILAQKGHFVTFISTPKNIDGMPKIPETLQPSIKLVRLPLPHTDHHHHLPEDAESTMDIPSNKSYYLKLAYEALQGPVSELLKTSKPDWVFYDFATEWLPPIAKSLNIPCAHYNLTAAWNKVFIDPPKDYQLNNSITLQDMCLPPTWLPFTTTVHLRPHEIRRATSSIKDSDTGRMANFDLRKAYSSCDMFLLRTCRELEGEWLDYLAHKYKVPVVPVGLVPPSIQIRDVEEEDNNPDWVKIKDWLDKQESSSVVYIGFGSELRLSQQDVTELAHGIELSGLRFFWALRNLQKEDLPHGFEERTKERGIVWKSWAPQIKILGHAAIGGCITHCGTNSLVEMLNFGHVLVTLPYLLDQALFSRVLEEKKVGIEVPRSEKDGSFTRDDVAKTLKLAIVDEEGSDYRKNAKEMGKVFSSTDLHSRYIDDCIVALQKYKTPNSNC

SEQ ID NO: 24605 - DNA, 1653 bp, Glycine max
agttcacatggagaactcaggcctggttagtatgcttgtggatgacaaatatgaagacttgcaaagaatgcataacttgtttcgccgggtgcctgatgggctcacaattgttaaagatgtcatgacctcttttgtacgggatacaggtaagcagctagttatggatcctgaaaggttgagagatcctgtggattttgttcaacgtctcttggatttgaaggataaatatgacagggttattactatgtcatttaacaatgacaagacatttcagaatgccttgaattcctcttttgaatatttcatcaatttgaatgcccggtctccagagttcatttctttgtttgtggatgacaaacttcgcagagggttgaaaggggtcggcgaagaggatgtggagattctactagacaaagtcatgatgcttttcaggtacctacaagagaaggatgtgtttgagaagtattacaagcaacacttagcaaaaaggcttctttcagggaagactatatctgatgatgcagagaggagtttgattgttaagctcaaaacagaatgtggatatcaattcacttctaagttagagggtatgtttactgacatgaagacttctcatgatacgatgcagggtttctatgcaatccttggcactgagatgggggatagcccttcgctatctgtccaggtacttacaacaggatcatggcctactcaacctagcccaccatgtaatcttccagcagaaatactgggtgtatgtgataagtttcggacatattatcttggcacccataatggtaggagattgtcctggcaaactaatatggggactgctgatttgaaagcaacatttggtaagggccaaaagcatgagttgaatgtttccacataccaaatgtgtgtacttatgcttttcaacagcgctgagcggttgacttgtaaggagatagagcaagctacagcaatacccatgtcagatttgaggaggtgccttcagtctctggcctgtgtcaaaggaaaaaatgttcttcgaaaagagccaatgagcaaggacatagctgaggatgatgcattcttctttaatgacaaattcaccagcaagttcttcaaggtaaagatagggactgttgttgctcagagggagtctgaaccagaaaacctagaaactaggcaaagagtggaagaagacagaaagccacagatcgaagcagccattgtgaggataatgaagtctaggcggactctagatcataataatattgttgctgaggtcacaaagcagctgcagtcacggtttttgcctaatcctgttgttattaagaaaaggattgaatcccttattgagcgtgagtttttggagagggataaagtggacagaaaactgtaccgctatcttgcttgaactgtatgtgcttttgatttggcatggctcttgtgtgattctgtctgtcataagtttgagtgcacatcacaaattgccgcaagtagtgtaactctctgcatactcaacaaaacctagatttctcagggttacttcttttcaggctgcaaaacttaaatatatcatttttagcttcttatttctaaacaaaaataaaccaatttttttttatagtttatgtccctcaactgtaatatattcaattttcaatc

SEQ ID NO: 24606 - protein, 466 aa, Glycine max
VHMENSGLVSMLVDDKYEDLQRMHNLFRRVPDGLTIVKDVMTSFVRDTGKQLVMDPERLRDPVDFVQRLLDLKDKYDRVITMSFNNDKTFQNALNSSFEYFINLNARSPEFISLFVDDKLRRGLKGVGEEDVEILLDKVMMLFRYLQEKDVFEKYYKQHLAKRLLSGKTISDDAERSLIVKLKTECGYQFTSKLEGMFTDMKTSHDTMQGFYAILGTEMGDSPSLSVQVLTTGSWPTQPSPPCNLPAEILGVCDKFRTYYLGTHNGRRLSWQTNMGTADLKATFGKGQKHELNVSTYQMCVLMLFNSAERLTCKEIEQATAIPMSDLRRCLQSLACVKGKNVLRKEPMSKDIAEDDAFFFNDKFTSKFFKVKIGTVVAQRESEPENLETRQRVEEDRKPQIEAAIVRIMKSRRTLDHNNIVAEVTKQLQSRFLPNPVVIKKRIESLIEREFLERDKVDRKLYRYLA

SEQ ID NO: 24607 - protein, 464 aa, Glycine max
MENSGLVSMLVDDKYEDLQRMHNLFRRVPDGLTIVKDVMTSFVRDTGKQLVMDPERLRDPVDFVQRLLDLKDKYDRVITMSFNNDKTFQNALNSSFEYFINLNARSPEFISLFVDDKLRRGLKGVGEEDVEILLDKVMMLFRYLQEKDVFEKYYKQHLAKRLLSGKTISDDAERSLIVKLKTECGYQFTSKLEGMFTDMKTSHDTMQGFYAILGTEMGDSPSLSVQVLTTGSWPTQPSPPCNLPAEILGVCDKFRTYYLGTHNGRRLSWQTNMGTADLKATFGKGQKHELNVSTYQMCVLMLFNSAERLTCKEIEQATAIPMSDLRRCLQSLACVKGKNVLRKEPMSKDIAEDDAFFFNDKFTSKFFKVKIGTVVAQRESEPENLETRQRVEEDRKPQIEAAIVRIMKSRRTLDHNNIVAEVTKQLQSRFLPNPVVIKKRIESLIEREFLERDKVDRKLYRYLA

SEQ ID NO: 24608 - protein, 456 aa, Glycine max
MLVDDKYEDLQRMHNLFRRVPDGLTIVKDVMTSFVRDTGKQLVMDPERLRDPVDFVQRLLDLKDKYDRVITMSFNNDKTFQNALNSSFEYFINLNARSPEFISLFVDDKLRRGLKGVGEEDVEILLDKVMMLFRYLQEKDVFEKYYKQHLAKRLLSGKTISDDAERSLIVKLKTECGYQFTSKLEGMFTDMKTSHDTMQGFYAILGTEMGDSPSLSVQVLTTGSWPTQPSPPCNLPAEILGVCDKFRTYYLGTHNGRRLSWQTNMGTADLKATFGKGQKHELNVSTYQMCVLMLFNSAERLTCKEIEQATAIPMSDLRRCLQSLACVKGKNVLRKEPMSKDIAEDDAFFFNDKFTSKFFKVKIGTVVAQRESEPENLETRQRVEEDRKPQIEAAIVRIMKSRRTLDHNNIVAEVTKQLQSRFLPNPVVIKKRIESLIEREFLERDKVDRKLYRYLA

SEQ ID NO: 24609 - DNA, 1462 bp, Glycine max
aacacaaacaccacggccgccgccgccaccgagattatcacaacgcgccgccgccaccgagattatcacaacgcgccgccgcagcattcacctccccggagatccaccctttgcatggcagtgagctttctggcgcgcgatgtatcggacctctgccttgggaagccaccgctgaggtcgctctccgctgccgccaccgtcgccgacgccttagacgcgctcaagagctccgacggcgagatccacgtcagcgtgtggagcttcgagaatgaagtgggtcgatgcgtagggaaactgtgcatggtcgatgttatttgctacctttgcagagaggacaatctcttgtctccttctaaatctctcaaagaaccactttcctcaattctccctaaggatcataatctcgttgtgcatcttcaaccttcttctagcttgttggaagctattgatcttatcctacaaggtgcacagaattttgtggtgccaatattgccaacaaagaggagtggagtttcaagaaggaaacagcagcatcagaaggcatcatcaacaatcaacagccatagtagttgtgaattcagttggttgactcaagaggatgtgattaggttccttcttggttccattggggtcttcactccacttcctgctttgtctattgactctcttggcatcgttagctctgatgtgcttgccattgactactactcccctgcatcttctacagttggagccatctcaaagtcccttgcccagcaaacttctgttgccattgtggacagtgatggcactttcattggagagatatcacccttcactctcgcttgttgcgacgagacggtcgcggccgccatggccaccttgtctgcgggggacctaatggcctacattgattgtggaggccctcctgaggatcttgtgagagtggtcaaggcaaggttgaaggagaagaatttggagaagatgttgcaggagttcacaattttgtcatcttgcgagagttcacaattggcatcctcctcgtcttcctccgatgaggagtcaacaacaaggacaccagctaggtctggaaggttggcaaggtcatctagctactcggctaggatggtgaggaaggccgaggctatagtgtgtcatccaaagagctcccttgttgctgtgatgatccaggccattgcacatagagtgaactacttgtgggttattgaggatgattgtagcttagttggcattgtcactttttctaatatgttgaaggtgttcagagaacatttagaaactatgtagattattaggtgatgaggttttggctttggatgcttctggtgagaagcatgaacaccaaggtgtatgagcatggtccttcttttgtaagtattgcaatgtggcccgggaggttttggtttttgttgtgctttatttctgtgtgcttcccttctaataaaaaaactcccttcaacgt

SEQ ID NO: 24610 - protein, 428 aa, Glycine max
NTNTTAAAATEIITTRRRHRDYHNAPPQHSPPRRSTLCMAVSFLARDVSDLCLGKPPLRSLSAAATVADALDALKSSDGEIHVSVWSFENEVGRCVGKLCMVDVICYLCREDNLLSPSKSLKEPLSSILPKDHNLVVHLQPSSSLLEAIDLILQGAQNFVVPILPTKRSGVSRRKQQHQKASSTINSHSSCEFSWLTQEDVIRFLLGSIGVFTPLPALSIDSLGIVSSDVLAIDYYSPASSTVGAISKSLAQQTSVAIVDSDGTFIGEISPFTLACCDETVAAAMATLSAGDLMAYIDCGGPPEDLVRVVKARLKEKNLEKMLQEFTILSSCESSQLASSSSSSDEESTTRTPARSGRLARSSSYSARMVRKAEAIVCHPKSSLVAVMIQAIAHRVNYLWVIEDDCSLVGIVTFSNMLKVFREHLETM

SEQ ID NO: 24611 - protein, 390 aa, Glycine max
MAVSFLARDVSDLCLGKPPLRSLSAAATVADALDALKSSDGEIHVSVWSFENEVGRCVGKLCMVDVICYLCREDNLLSPSKSLKEPLSSILPKDHNLVVHLQPSSSLLEAIDLILQGAQNFVVPILPTKRSGVSRRKQQHQKASSTINSHSSCEFSWLTQEDVIRFLLGSIGVFTPLPALSIDSLGIVSSDVLAIDYYSPASSTVGAISKSLAQQTSVAIVDSDGTFIGEISPFTLACCDETVAAAMATLSAGDLMAYIDCGGPPEDLVRVVKARLKEKNLEKMLQEFTILSSCESSQLASSSSSSDEESTTRTPARSGRLARSSSYSARMVRKAEAIVCHPKSSLVAVMIQAIAHRVNYLWVIEDDCSLVGIVTFSNMLKVFREHLETM

SEQ ID NO: 24612 - protein, 328 aa, Glycine max
MVDVICYLCREDNLLSPSKSLKEPLSSILPKDHNLVVHLQPSSSLLEAIDLILQGAQNFVVPILPTKRSGVSRRKQQHQKASSTINSHSSCEFSWLTQEDVIRFLLGSIGVFTPLPALSIDSLGIVSSDVLAIDYYSPASSTVGAISKSLAQQTSVAIVDSDGTFIGEISPFTLACCDETVAAAMATLSAGDLMAYIDCGGPPEDLVRVVKARLKEKNLEKMLQEFTILSSCESSQLASSSSSSDEESTTRTPARSGRLARSSSYSARMVRKAEAIVCHPKSSLVAVMIQAIAHRVNYLWVIEDDCSLVGIVTFSNMLKVFREHLETM

SEQ ID NO: 24613 - DNA, 1788 bp, Glycine max
aaggtcactgttctctgcaatggcatggaagggacatattttccaagccttcacttagttttatgcaagtgtggtttttgcgagactagaaaacaatcacttagagaatgggaacgacacacaggttccaaatttagaaattggaggacaagtgttctggtgaaaggatccatgctatcgctggaaaaatggatgctgcaagtggctgagtttcatgctaatgctgtagtttctgtgaaacctaaaaagccttcctttaaagaaaggaaacagaagttgcttacctttctacaagagaagtatgaaccagtttgtgctaagtggactacagaacgatgtgctgtatgtagatgggttgaagattgggattacaacaaaattatcatttgcaacagatgtcaaatagccgttcatcaagaatgttatggagcaagaaatgttcaagattttacgtcatgggtttgtaaagcttgtgaaacacctgacatcaagcaggaatgttgtctttgtcctgtaaaaggtggtgctctaaagccaaccgatgttgacacattatgggttcatgttacttgtgcttggtttcgacctgaagtatcttttgctagtgatgaaaagatggagcctgcattgggtattctgagtattccattgaattcttttgtgaagatttgtgttatttgtaaggaaattcatggttcgtgcacacaatgttgcaagtgttccacttatttccatgctatgtgtgcatcaagggctggttatcggatggagttgcattgtatggagaaaaatggtaaacagacaacaagaatggtttcttattgtgcttaccacagagctcccaatccagacactgtttcaattatgcaaacccctcttggggtcatttcaaccaaaagccttcttcaaactaagagaaaagctggatcaagattgatttcatctaaaagaataaaggttgaagacacttctcctgcagagaacactagacatgagccattctctgctgctaggtgtcgaatatatcgaagaacaaatcatacaaaaaagagagcagcaggtgaagccattgctcatcatgtgaggggtcactaccatcatcctttagatgcaatacagagtttaaatgcagacagaatggtagacaagcctccagcattttcttctttcagggaacgccttcatcatttacagagaacagaaaatgaaagagtttgctttggtagatcaggcatacatggatggggcctctttgcacgtcaaaatattcaagaaggggaaatgcttttcaagataagtgaagaagtggtagtagatgccactgataaaggaaatatagcacggctaattaaccattcttgtatgcccaattgctatgcaaggattatgagtgtgggtgatgatgagagccggattgtactcatcgctaagactgatgtgtctactggtgatgagctaacgtatgactacttgtttgatcctgatgagccagatgaatttaaagtcccttgtttatgtaaagcatcaaactgccggaaattcatgaattaggatttattcagatcatgatgatagtattgcttctccgcaaggagcagtagcacatccccctcatcagtgggaacctcagttacacccaagctgtaattttaatcaaatcataagagaagtataggaaaaaaaaattgtggcataggtttgtcttctatccttctaatattctattatttgacattcatcaaggcctaataaaagatacagatttaacagtttttggctcttggcgtc

SEQ ID NO: 24614 - protein, 516 aa, Glycine max
KVTVLCNGMEGTYFPSLHLVLCKCGFCETRKQSLREWERHTGSKFRNWRTSVLVKGSMLSLEKWMLQVAEFHANAVVSVKPKKPSFKERKQKLLTFLQEKYEPVCAKWTTERCAVCRWVEDWDYNKIIICNRCQIAVHQECYGARNVQDFTSWVCKACETPDIKQECCLCPVKGGALKPTDVDTLWVHVTCAWFRPEVSFASDEKMEPALGILSIPLNSFVKICVICKEIHGSCTQCCKCSTYFHAMCASRAGYRMELHCMEKNGKQTTRMVSYCAYHRAPNPDTVSIMQTPLGVISTKSLLQTKRKAGSRLISSKRIKVEDTSPAENTRHEPFSAARCRIYRRTNHTKKRAAGEAIAHHVRGHYHHPLDAIQSLNADRMVDKPPAFSSFRERLHHLQRTENERVCFGRSGIHGWGLFARQNIQEGEMLFKISEEVVVDATDKGNIARLINHSCMPNCYARIMSVGDDESRIVLIAKTDVSTGDELTYDYLFDPDEPDEFKVPCLCKASNCRKFMN

SEQ ID NO: 24615 - protein, 508 aa, Glycine max
MEGTYFPSLHLVLCKCGFCETRKQSLREWERHTGSKFRNWRTSVLVKGSMLSLEKWMLQVAEFHANAVVSVKPKKPSFKERKQKLLTFLQEKYEPVCAKWTTERCAVCRWVEDWDYNKIIICNRCQIAVHQECYGARNVQDFTSWVCKACETPDIKQECCLCPVKGGALKPTDVDTLWVHVTCAWFRPEVSFASDEKMEPALGILSIPLNSFVKICVICKEIHGSCTQCCKCSTYFHAMCASRAGYRMELHCMEKNGKQTTRMVSYCAYHRAPNPDTVSIMQTPLGVISTKSLLQTKRKAGSRLISSKRIKVEDTSPAENTRHEPFSAARCRIYRRTNHTKKRAAGEAIAHHVRGHYHHPLDAIQSLNADRMVDKPPAFSSFRERLHHLQRTENERVCFGRSGIHGWGLFARQNIQEGEMLFKISEEVVVDATDKGNIARLINHSCMPNCYARIMSVGDDESRIVLIAKTDVSTGDELTYDYLFDPDEPDEFKVPCLCKASNCRKFMN

SEQ ID NO: 24616 - protein, 459 aa, Glycine max
MLSLEKWMLQVAEFHANAVVSVKPKKPSFKERKQKLLTFLQEKYEPVCAKWTTERCAVCRWVEDWDYNKIIICNRCQIAVHQECYGARNVQDFTSWVCKACETPDIKQECCLCPVKGGALKPTDVDTLWVHVTCAWFRPEVSFASDEKMEPALGILSIPLNSFVKICVICKEIHGSCTQCCKCSTYFHAMCASRAGYRMELHCMEKNGKQTTRMVSYCAYHRAPNPDTVSIMQTPLGVISTKSLLQTKRKAGSRLISSKRIKVEDTSPAENTRHEPFSAARCRIYRRTNHTKKRAAGEAIAHHVRGHYHHPLDAIQSLNADRMVDKPPAFSSFRERLHHLQRTENERVCFGRSGIHGWGLFARQNIQEGEMLFKISEEVVVDATDKGNIARLINHSCMPNCYARIMSVGDDESRIVLIAKTDVSTGDELTYDYLFDPDEPDEFKVPCLCKASNCRKFMN

SEQ ID NO: 24617 - DNA, 741 bp, Glycine max
tgataataattcagataaaagtcagaaatctgaggagaaacttactgatgataatgaacgccggtcaaaaagaaagtaccgttcaagatctagtagacatgaagaggaggaagaagaaaacaaagataggagggatcacaaaagatccaggaaaaaacatcactctcatcgcgcttcacaccacaatcgggacaggcataagcacaagagaagacattcctcctccaaagacaaatattcttacagggggaccaagcacgatagctcctctgatgatgaacatcatcgctcaaggcatcatcgtcataaatatgatagctcctcctctgatgatgagcaccactcttccaaacaacgacatagggatgataacttgtcagaccatgagcatagacattctcgccattctaatgaagattatagttcatctgatgatgagcataggcatcgaagcagaagcagaagtgtaaggcataagagcaaatctcatgctgaaagagaaacagagctggaggatggggagataattatgaaatcggaaaagtcagtagtaagtggtgaagttggacgtgctagtagggaggcttctgagggattatctaatgcaagggcacaatctcaagcacctgaaataactgatgtttcttatgagcttagagccaaaattcgagccatgttgatggctaacttgtaaaagctatatggggctgacaataattgcattgctttaacttctttggt

SEQ ID NO: 24618 - protein, 230 aa, Glycine max
DNNSDKSQKSEEKLTDDNERRSKRKYRSRSSRHEEEEEENKDRRDHKRSRKKHHSHRASHHNRDRHKHKRRHSSSKDKYSYRGTKHDSSSDDEHHRSRHHRHKYDSSSSDDEHHSSKQRHRDDNLSDHEHRHSRHSNEDYSSSDDEHRHRSRSRSVRHKSKSHAERETELEDGEIIMKSEKSVVSGEVGRASREASEGLSNARAQSQAPEITDVSYELRAKIRAMLMANL

SEQ ID NO: 24619 - protein, 155 aa, Glycine max
IIIQIKVRNLRRNLLMIMNAGQKESTVQDLVDMKRRKKKTKIGGITKDPGKNITLIALHTTIGTGISTREDIPPPKTNILTGGPSTIAPLMMNIIAQGIIVINMIAPPLMMSTTLPNNDIGMITCQTMSIDILAILMKIIVHLMMSIGIEAEAEV

SEQ ID NO: 24620 - protein, 140 aa, Glycine max
MIMNAGQKESTVQDLVDMKRRKKKTKIGGITKDPGKNITLIALHTTIGTGISTREDIPPPKTNILTGGPSTIAPLMMNIIAQGIIVINMIAPPLMMSTTLPNNDIGMITCQTMSIDILAILMKIIVHLMMSIGIEAEAEV

SEQ ID NO: 24621 - DNA, 1613 bp, Glycine max
aaaaatatccgtggcaagagacagaaagaaggacactgttcacggttagggtttgagtctcaaccactctttctttaaagcacagtctcgcattcctccttgcctctttgttctctctttttctctctccttctttctttgtttctgtgtgttcgagattgaagaagatgatgcaggctggacccggcggcatggcccaacaagcgaaccaacaatacgcacagcaacagcaacaaccctacatgatgatgccgccacagcctcagccccctcagatgtgggccacatcggcccagcctccgtcccagtcggtggctcctccgcaacccaccagcgccgatgaggtccgtaccctctggatcggtgatttgcagtactggatggacgaaaattatctctacacctgtttggcacacaccggcgaggtggcttcagttaaagtcattcggaacaaacaaactagtcaatcggagggatatgggtttattgagtttactagtcgtgctggtgctgagagagtccttcaaacatacaatggcaccattatgccaaatggcgggcagaacttcagattgaactgggcaactcttagtgcaggtgagaggcgtcacgatgatagcccagatcacaccatatttgttggagacctggctgccgatgttacggattatcttcttcaagagacatttcgggcacgatatccctcaattaagggggccaaagttgtaattgataggctaactggacggacaaagggttatggttttgttaggtttggagatgagagtgaacaggttagagctatgactgaaatgcaaggggttctttgttcaacaaggcccatgcgaattggaccagcctctaataaaaaccctagcactcagtctcagccaaaagcatcatatcagaatcctcaaggggcacagaacgagcatgatccaaataatacaactatttttgtcggcaatttggatcctaacgtcacggatgaccatttgagacaagtttttgggcattatggagagttagttcatgtgaagattccagctggcaagcgatgtggatttgtccaatttgcggaccggagctgtgcggaagaggcactgcgggttttgaatggcacacttctaggcggacaaaatgttaggctttcatgggggcgaagtccttcaaacaaacaggctcaaccagatgcaaaccagtggaatggtagtggtggtggatactacggatatgctcaggggggctatgaaaattatggttatgcccctgctggacaggaccccaatatgtatggcagttatcctgggtatgcgaattaccaacctccccagcaacagcagcaaataggatatagctaagaagttgggcaccaattttttccgttttcttctgtaatgctatgctattgctaagatactcgttttggttgcttctcttttattgtatcgtggagaacaaacttggctgaatacattctatgcgaataggatatagctaagaagtttcttatgacattctatgcgaattttattttgtatccattaaatattgcttgctgaattctatttggtgaaagcgatcacatttgattgttatgtgtaattcgcagc

SEQ ID NO: 24622 - protein, 397 aa, Glycine max
MMQAGPGGMAQQANQQYAQQQQQPYMMMPPQPQPPQMWATSAQPPSQSVAPPQPTSADEVRTLWIGDLQYWMDENYLYTCLAHTGEVASVKVIRNKQTSQSEGYGFIEFTSRAGAERVLQTYNGTIMPNGGQNFRLNWATLSAGERRHDDSPDHTIFVGDLAADVTDYLLQETFRARYPSIKGAKVVIDRLTGRTKGYGFVRFGDESEQVRAMTEMQGVLCSTRPMRIGPASNKNPSTQSQPKASYQNPQGAQNEHDPNNTTIFVGNLDPNVTDDHLRQVFGHYGELVHVKIPAGKRCGFVQFADRSCAEEALRVLNGTLLGGQNVRLSWGRSPSNKQAQPDANQWNGSGGGYYGYAQGGYENYGYAPAGQDPNMYGSYPGYANYQPPQQQQQIGYS

SEQ ID NO: 24623 - protein, 396 aa, Glycine max
MQAGPGGMAQQANQQYAQQQQQPYMMMPPQPQPPQMWATSAQPPSQSVAPPQPTSADEVRTLWIGDLQYWMDENYLYTCLAHTGEVASVKVIRNKQTSQSEGYGFIEFTSRAGAERVLQTYNGTIMPNGGQNFRLNWATLSAGERRHDDSPDHTIFVGDLAADVTDYLLQETFRARYPSIKGAKVVIDRLTGRTKGYGFVRFGDESEQVRAMTEMQGVLCSTRPMRIGPASNKNPSTQSQPKASYQNPQGAQNEHDPNNTTIFVGNLDPNVTDDHLRQVFGHYGELVHVKIPAGKRCGFVQFADRSCAEEALRVLNGTLLGGQNVRLSWGRSPSNKQAQPDANQWNGSGGGYYGYAQGGYENYGYAPAGQDPNMYGSYPGYANYQPPQQQQQIGYS

SEQ ID NO: 24624 - protein, 389 aa, Glycine max
MAQQANQQYAQQQQQPYMMMPPQPQPPQMWATSAQPPSQSVAPPQPTSADEVRTLWIGDLQYWMDENYLYTCLAHTGEVASVKVIRNKQTSQSEGYGFIEFTSRAGAERVLQTYNGTIMPNGGQNFRLNWATLSAGERRHDDSPDHTIFVGDLAADVTDYLLQETFRARYPSIKGAKVVIDRLTGRTKGYGFVRFGDESEQVRAMTEMQGVLCSTRPMRIGPASNKNPSTQSQPKASYQNPQGAQNEHDPNNTTIFVGNLDPNVTDDHLRQVFGHYGELVHVKIPAGKRCGFVQFADRSCAEEALRVLNGTLLGGQNVRLSWGRSPSNKQAQPDANQWNGSGGGYYGYAQGGYENYGYAPAGQDPNMYGSYPGYANYQPPQQQQQIGYS

SEQ ID NO: 24625 - DNA, 1377 bp, Glycine max
ttgccgtgcaataactaatcttgaactcacatgccctaatctagagaaagttattttggatggctgtgatcatttggaaagagcatcattttgtccagttggtcttttatctctcaatttaggaatatgtccaaaattgaacacactcagcattgaagcaccgtttatggtttcacttgagttgaaaggatgtggtgtactatctgaagcattcattaattgtccactcctaacatctctcgatgcttccttttgcagccaactaacagatggttgcttgtctgcaacaactgtctcatgcccactgatcgaatcattgatattgatgtcatgctcttcaattggttcagatggtcttcgatctctgtattgtcttccaaatttgattgttcttgacttatcatacactttcttggtgaacttgcagcctatctttgattcttgtttgcaactaaaggttttaaagctgcaagcatgcaaatatctcactgacacatcacttgaacctctttacaaaggaggtgctttaccagcacttcaggagttggacttatcttatggaactctttgtcaatcagccatagatgagcttcttgcttactgcacaaacctcactcatgtgagcttgactggctgtgtgaatatgcatgatttgaattggggaagtagttgtgggcaaagtgacaatttccctgctgtaaacaccccatctagggcaagttctaatgagaatatccctgaatcaagtgagcaatccactcgcttactgcaaaacctcaactgtgttggatgtccaaatattaggaaggttgtcattccattgagggcaaattgttttcatttgttatttttaaacctttcactctcggcaaatttgaaagaggttgatgttacttgtctcaacctatgctttcttaatttaagcaattgttcctctttggaaattttgaagctagagtgtccaaaattgaccagtctgttccttcagtcttgcaatattgacgaggaagctgttgaagctgccatatcaaaatgctctatactggagacccttgacgttcgcttttgtccaaagataagctcaatgagcatgggaagattacgcacaatttgttcaagtttgaagcgaatattcagcagttagtcaactcttgttaccatgatcaaggatataaaaaaaaaaatccctagtgcttcacttggattgaaagcgcgcttggtaataaatttgattatttcttcgtggtgttgtaaatggctaaattttaaatgtttgtttggcatatggaaatccgttctgtatttgcaataatttatctttgttgtacccgtattcttgtaaaatcaacatttcaaatttaagctctctttattctg

SEQ ID NO: 24626 - protein, 380 aa, Glycine max
CRAITNLELTCPNLEKVILDGCDHLERASFCPVGLLSLNLGICPKLNTLSIEAPFMVSLELKGCGVLSEAFINCPLLTSLDASFCSQLTDGCLSATTVSCPLIESLILMSCSSIGSDGLRSLYCLPNLIVLDLSYTFLVNLQPIFDSCLQLKVLKLQACKYLTDTSLEPLYKGGALPALQELDLSYGTLCQSAIDELLAYCTNLTHVSLTGCVNMHDLNWGSSCGQSDNFPAVNTPSRASSNENIPESSEQSTRLLQNLNCVGCPNIRKVVIPLRANCFHLLFLNLSLSANLKEVDVTCLNLCFLNLSNCSSLEILKLECPKLTSLFLQSCNIDEEAVEAAISKCSILETLDVRFCPKISSMSMGRLRTICSSLKRIFSS

SEQ ID NO: 24627 - protein, 325 aa, Glycine max
MVSLELKGCGVLSEAFINCPLLTSLDASFCSQLTDGCLSATTVSCPLIESLILMSCSSIGSDGLRSLYCLPNLIVLDLSYTFLVNLQPIFDSCLQLKVLKLQACKYLTDTSLEPLYKGGALPALQELDLSYGTLCQSAIDELLAYCTNLTHVSLTGCVNMHDLNWGSSCGQSDNFPAVNTPSRASSNENIPESSEQSTRLLQNLNCVGCPNIRKVVIPLRANCFHLLFLNLSLSANLKEVDVTCLNLCFLNLSNCSSLEILKLECPKLTSLFLQSCNIDEEAVEAAISKCSILETLDVRFCPKISSMSMGRLRTICSSLKRIFSS

SEQ ID NO: 24628 - protein, 272 aa, Glycine max
MSCSSIGSDGLRSLYCLPNLIVLDLSYTFLVNLQPIFDSCLQLKVLKLQACKYLTDTSLEPLYKGGALPALQELDLSYGTLCQSAIDELLAYCTNLTHVSLTGCVNMHDLNWGSSCGQSDNFPAVNTPSRASSNENIPESSEQSTRLLQNLNCVGCPNIRKVVIPLRANCFHLLFLNLSLSANLKEVDVTCLNLCFLNLSNCSSLEILKLECPKLTSLFLQSCNIDEEAVEAAISKCSILETLDVRFCPKISSMSMGRLRTICSSLKRIFSS

SEQ ID NO: 24629 - DNA, 1318 bp, Glycine max
atgaaaagtacatgcagatgtgtatgaacttcatatcatctttccttcagctatatcttcgtgaggatgatctattgtttgaagtgcttttgctattgtttagcatatcatcttctctccaggaacagtctgaaagtaaggatgctgcgtatcatgatgtaatgaaagattttccttttgagctgtcagacatttttaattctgtgcacctttttcatctgtttctttcagagatacattatgatcaccaagtgcttcttgattacctcatttcaaaagatactggaataagctgtgctaaatatcttctaagatgcttgcatttgatatgcaactcatggaagttatttgtggaatttccattatttggagaatttttggatcaatcatcttgcaagagaagaaaaattgtaggggatggtctacactttctagcagatggaatgcctacgtcaattgacaacagtggaagtatcatattgcatatcaagaattataaggaagacaggggtggcttcaagtactacaatattaagccattcaagaaagccggagaatgtttactatctttgaacaattctgtatataatcttcatcaaaagaagttgtttccgtataatcctaaagtgcttctgaaacgtctaagaagatttcaagagttatgctgtcaggaaaagggattccatggactgaagactgagtaataattaccaaaactgcatgtctgattctgaaagcttggctatcttatgctattaatggctatagaactacatttttgggtattggtggcacggatggacaggaaatagagaaattttgtgctggttcatagttgtatgggtaagatggctactacactggcttagatcagacttagtgcccacagctgtcaacattgtgctactggtgtccatctagtgacagtcttggttcacttcaaatccgtcgattattctatgggtttggggttacatgtcatctctggagaatctggtgagccatatcatggatccagggtgcatgaatggttcctaccagtcttcaatcttgaatttgtaaaggtactaatccattccctcaacttttagccagcagcatgatcttccctttgcgataccttttgtactatatcctccaggtaatccaagcaattatcgcattgaaggatgtctttcttgcggatacctgcctttctcttggtacttggagcttgcattcatgctcctacaaaaaagcatgtaatgagtagaagaccaaaagtgtaaaacttcgttggtttggttaagctagtaccccttcgtttgaaggctggggt

SEQ ID NO: 24630 - protein, 233 aa, Glycine max
EKYMQMCMNFISSFLQLYLREDDLLFEVLLLLFSISSSLQEQSESKDAAYHDVMKDFPFELSDIFNSVHLFHLFLSEIHYDHQVLLDYLISKDTGISCAKYLLRCLHLICNSWKLFVEFPLFGEFLDQSSCKRRKIVGDGLHFLADGMPTSIDNSGSIILHIKNYKEDRGGFKYYNIKPFKKAGECLLSLNNSVYNLHQKKLFPYNPKVLLKRLRRFQELCCQEKGFHGLKTE

SEQ ID NO: 24631 - protein, 230 aa, Glycine max
MQMCMNFISSFLQLYLREDDLLFEVLLLLFSISSSLQEQSESKDAAYHDVMKDFPFELSDIFNSVHLFHLFLSEIHYDHQVLLDYLISKDTGISCAKYLLRCLHLICNSWKLFVEFPLFGEFLDQSSCKRRKIVGDGLHFLADGMPTSIDNSGSIILHIKNYKEDRGGFKYYNIKPFKKAGECLLSLNNSVYNLHQKKLFPYNPKVLLKRLRRFQELCCQEKGFHGLKTE

SEQ ID NO: 24632 - protein, 228 aa, Glycine max
MCMNFISSFLQLYLREDDLLFEVLLLLFSISSSLQEQSESKDAAYHDVMKDFPFELSDIFNSVHLFHLFLSEIHYDHQVLLDYLISKDTGISCAKYLLRCLHLICNSWKLFVEFPLFGEFLDQSSCKRRKIVGDGLHFLADGMPTSIDNSGSIILHIKNYKEDRGGFKYYNIKPFKKAGECLLSLNNSVYNLHQKKLFPYNPKVLLKRLRRFQELCCQEKGFHGLKTE

SEQ ID NO: 24633 - DNA, 1126 bp, Glycine max
attagacattaatgcagaagagaaagttgtgcgcgacaaattaagtgagttacaacaactgggggccacagaaaaggaaattaaagaggttatgaaggacttgggcattagcagggcaaagttatatggatggccaaatacatatgtattcaccaaggcaatgggagagatgcttgtggagcaactaaaaggaaacttatccgttgtgatcattcgtcccagcattgttaccagcacattaaaagaacctttccctggttgggctgaaggtgtaagaaccattgacagtttagctgtagcttatgggaaaggaaaattaacatgcttccttggagatctaaaagcaattgttgatgcgattccagcagacatggtggtgaatgcaatacttgtggccatggtggctcatgcaaatcgtcctagtgatgatgttatatatcatattggttcctctgttagaagaccactaagatatggcaaacttcaagagtatggatttagatatttcacagcaaaaccatgcataagtaaggatggaaggccagttaaggttggaaaagttacagtactgagcaatatggatagcttcagaagatatatgttcattcgctacctgcttgtgttaaagggacttgagcttgccaatactgcattttgccagtatttccaaggaacatatcttgatctcaataggaagatccagattgtgatgcggttggtggacctttacaaaccttacttgttcttcaaagctgcatttgatgatatgaacacagagaagttgagaatggcaggaagacaaggtggggtggagacagatttgttttattttgaccccgaactgattgattgggaagattactttctgaacatccatcttcctggtatggtgaagtacatattgaagtgatattataattgaagtgatatatagagctttgaaactagtaattttattatgttcaaatttgtactagaagagtcacattatagtttgttatttgtttcttaagggcagtatgattgtgttagatagctgccaaatatgtttcaaaactttgatcaagtgtatccaatatcatatgttttaattttattttacttgtccctcagtctcttacaaaag

SEQ ID NO: 24634 - protein, 302 aa, Glycine max
LDINAEEKVVRDKLSELQQLGATEKEIKEVMKDLGISRAKLYGWPNTYVFTKAMGEMLVEQLKGNLSVVIIRPSIVTSTLKEPFPGWAEGVRTIDSLAVAYGKGKLTCFLGDLKAIVDAIPADMVVNAILVAMVAHANRPSDDVIYHIGSSVRRPLRYGKLQEYGFRYFTAKPCISKDGRPVKVGKVTVLSNMDSFRRYMFIRYLLVLKGLELANTAFCQYFQGTYLDLNRKIQIVMRLVDLYKPYLFFKAAFDDMNTEKLRMAGRQGGVETDLFYFDPELIDWEDYFLNIHLPGMVKYILK

SEQ ID NO: 24635 - protein, 272 aa, Glycine max
MKDLGISRAKLYGWPNTYVFTKAMGEMLVEQLKGNLSVVIIRPSIVTSTLKEPFPGWAEGVRTIDSLAVAYGKGKLTCFLGDLKAIVDAIPADMVVNAILVAMVAHANRPSDDVIYHIGSSVRRPLRYGKLQEYGFRYFTAKPCISKDGRPVKVGKVTVLSNMDSFRRYMFIRYLLVLKGLELANTAFCQYFQGTYLDLNRKIQIVMRLVDLYKPYLFFKAAFDDMNTEKLRMAGRQGGVETDLFYFDPELIDWEDYFLNIHLPGMVKYILK

SEQ ID NO: 24636 - protein, 249 aa, Glycine max
MGEMLVEQLKGNLSVVIIRPSIVTSTLKEPFPGWAEGVRTIDSLAVAYGKGKLTCFLGDLKAIVDAIPADMVVNAILVAMVAHANRPSDDVIYHIGSSVRRPLRYGKLQEYGFRYFTAKPCISKDGRPVKVGKVTVLSNMDSFRRYMFIRYLLVLKGLELANTAFCQYFQGTYLDLNRKIQIVMRLVDLYKPYLFFKAAFDDMNTEKLRMAGRQGGVETDLFYFDPELIDWEDYFLNIHLPGMVKYILK

SEQ ID NO: 24637 - DNA, 1490 bp, Glycine max
gttaacaaagattccagcaccaaatcagaatatagcccaaagcaatgtggcattctatgagccaataacgatcgttccttcatttccacaaaagaatatcaatcaatatgcacaagtggaaccacaagtttatacagagaataatatgaatgggaactatggaggaggaatggtacctcagaacaagaataatatgagcggaatgactcaattcaaccctctcatgaacttgaatgcgatgaatcatatgccaacagcaaatgaaataaatcattataacaatgtgcctggctacaataatatgaataatctcagcaataacataccaaaattaaccagcatgcacagcaataatacctatactagcaatagtactctagataccacaattacaaacctcacaaatatgagcaatatgagcagtatgaatgatataagcaatctcagtaacctcagcaatgtcagtaatgtcagcagcatgagcaatattactcaaacgagtaataataataacccatataatcttcaaatgagcaattttatgaatcaacagaattggtttaataattatttgcaatattatttaccaataatgcatcccttccaataccagaaaatggaacaagatttcaatgcaaatcccgcttttaatccatatatgggcaatatatttgttcccgctgctgctgctgccgtgaacaatcagccagaagaagtaccaaaagttgcaaaggctacaaaagcaaagacgacaaacaaaagatcatcaaaacaagcaaatgtcaataaaactactatcaatagcaataaacctctcaatgagaacctggatgataagaaggtgcttgatacattgaatgaattggattatgacttcttggaatgttataaagtttctgaagagaatctaaattgcaagagagtcggaggtccaggaatccaggatctggatgaactggtcaagaaaagacaagtaccaaacccgtttgtgggagtagaatgaatgaatacgatatattgcagaagaaatgacgctgaattttgagacagagttctcgccaacaaaatcttttacttactttaaaaaccccaaaaaaattgtaatattatttgagattttctcctgacctgtggagagctttcaaaaaagagattttctcttgctgcatcatcatcaaattttatcttttatcgttggacttcataaaggagatgttttgttttttctgggtgaaaaaaattgtacagaagagtgaagcaaattacttgggaaaaatcaaacagcaacttgaagagtccagattatgttttattattcagtcctattttgtgtctatcttccgctttttattattaatatttttttaataccgtgtgttgccatctattcttttaaaaccaacccgaaaagactgagaggaaaaaaagagcccacagtgaaaaattgaggggaatccttaccaaaaaagaatttaatcaagaagaaccgc

SEQ ID NO: 24638 - protein, 333 aa, Glycine max
LTKIPAPNQNIAQSNVAFYEPITIVPSFPQKNINQYAQVEPQVYTENNMNGNYGGGMVPQNKNNMSGMTQFNPLMNLNAMNHMPTANEINHYNNVPGYNNMNNLSNNIPKLTSMHSNNTYTSNSTLDTTITNLTNMSNMSSMNDISNLSNLSNVSNVSSMSNITQTSNNNNPYNLQMSNFMNQQNWFNNYLQYYLPIMHPFQYQKMEQDFNANPAFNPYMGNIFVPAAAAAVNNQPEEVPKVAKATKAKTTNKRSSKQANVNKTTINSNKPLNENLDDKKVLDTLNELDYDFLECYKVSEENLNCKRVGGPGIQDLDELVKKRQVPNPFVGVE

SEQ ID NO: 24639 - protein, 285 aa, Glycine max
MNGNYGGGMVPQNKNNMSGMTQFNPLMNLNAMNHMPTANEINHYNNVPGYNNMNNLSNNIPKLTSMHSNNTYTSNSTLDTTITNLTNMSNMSSMNDISNLSNLSNVSNVSSMSNITQTSNNNNPYNLQMSNFMNQQNWFNNYLQYYLPIMHPFQYQKMEQDFNANPAFNPYMGNIFVPAAAAAVNNQPEEVPKVAKATKAKTTNKRSSKQANVNKTTINSNKPLNENLDDKKVLDTLNELDYDFLECYKVSEENLNCKRVGGPGIQDLDELVKKRQVPNPFVGVE

SEQ ID NO: 24640 - protein, 277 aa, Glycine max
MVPQNKNNMSGMTQFNPLMNLNAMNHMPTANEINHYNNVPGYNNMNNLSNNIPKLTSMHSNNTYTSNSTLDTTITNLTNMSNMSSMNDISNLSNLSNVSNVSSMSNITQTSNNNNPYNLQMSNFMNQQNWFNNYLQYYLPIMHPFQYQKMEQDFNANPAFNPYMGNIFVPAAAAAVNNQPEEVPKVAKATKAKTTNKRSSKQANVNKTTINSNKPLNENLDDKKVLDTLNELDYDFLECYKVSEENLNCKRVGGPGIQDLDELVKKRQVPNPFVGVE

SEQ ID NO: 24641 - DNA, 1547 bp, Glycine max
gaacaactctggattgatgtgctacatgccacacttgaatatggacttgcaccagtttcttggactgattatttgtacttgaccgtgggagggacactttctaatgctggaatcagtggccagagcttccgttatggacctcaaatcagcaacgttcatgaaatggatgtcatcactggaaaaggagagttcgtaacatgctcttcacagaagaacttggagttattccacgcggttcttggaggcttgggacaatttggagttatagcaagggcgagaattgctcttgagccagcacccaaaagggttaagtgggtcagactactttatagtgacttttctgcttttaccaaagaccaggaacgattaatctcaatcaatggaaggaaacaaaagaacgcattggattttctggaagggatgctgctaatgaaccaaggccccataaataattggagatcctctttcttccctctatctgaccatcccagaatagcttctttaataactgaacatagcatcctctactgtcttgaagtggctaaatattatgacgaacaaaccgagttaaatgtggacaaggaaattgaagttttgctccaaggactagcctatatccctggatttaattatgagaaaaatgtctcgtacgttgagttcttgaatagggtccgaagtggagagttgaaacttcagtcacaaggactgtgggaagttcctcacccgtggcttaatttgtttataccaaaatctcaaatcttggattttaattcaggagtattcaaagatatagttcttaaaagaaacatctcctctggaccagtcttggtttatcccatgaatagaaacaagtgggacgataggatgtcagcatctataccagacgaggatgttttctacacagttgggtttttgcactcaagtgggtttgatacttggaaggcatatgatgctcaaaacagagaaattttggagttctgtagagatgctggcatcatggtcaagcaatatcttcccaaccacagcacacaagaagattggacaaaccattttggtgctaaatggatgaaattcttagaaagaaaacatcagtttgatccaagaatgattctatcacctgggcaaaaaatcttccacaaaaaattacagccagtgttttaaatattttccctaataaaaaaagtaaaaatgttttgtggtgggactacctcaattagatggctagctagggacaggtgtacatacagtgtgaccaagaccaagatggcttttgtatgctaaagtttgcattgctagctagagaaattaataaggtggggcattaaaggctgcatgagtacttttggcacctattatgctacatattaccttagatacgttaggttgacaaagtcgtactggtaggtacaagaagcacagttgtctctcacactgtctgtcacccaacttgctatatagtgtgtggagaaattcggatcatattgaagatgctgtgagttatagtcctccaatattaaatgtttaacgattctgtctttctcttatac

SEQ ID NO: 24642 - protein, 386 aa, Glycine max
EQLWIDVLHATLEYGLAPVSWTDYLYLTVGGTLSNAGISGQSFRYGPQISNVHEMDVITGKGEFVTCSSQKNLELFHAVLGGLGQFGVIARARIALEPAPKRVKWVRLLYSDFSAFTKDQERLISINGRKQKNALDFLEGMLLMNQGPINNWRSSFFPLSDHPRIASLITEHSILYCLEVAKYYDEQTELNVDKEIEVLLQGLAYIPGFNYEKNVSYVEFLNRVRSGELKLQSQGLWEVPHPWLNLFIPKSQILDFNSGVFKDIVLKRNISSGPVLVYPMNRNKWDDRMSASIPDEDVFYTVGFLHSSGFDTWKAYDAQNREILEFCRDAGIMVKQYLPNHSTQEDWTNHFGAKWMKFLERKHQFDPRMILSPGQKIFHKKLQPVF

SEQ ID NO: 24643 - protein, 332 aa, Glycine max
MDVITGKGEFVTCSSQKNLELFHAVLGGLGQFGVIARARIALEPAPKRVKWVRLLYSDFSAFTKDQERLISINGRKQKNALDFLEGMLLMNQGPINNWRSSFFPLSDHPRIASLITEHSILYCLEVAKYYDEQTELNVDKEIEVLLQGLAYIPGFNYEKNVSYVEFLNRVRSGELKLQSQGLWEVPHPWLNLFIPKSQILDFNSGVFKDIVLKRNISSGPVLVYPMNRNKWDDRMSASIPDEDVFYTVGFLHSSGFDTWKAYDAQNREILEFCRDAGIMVKQYLPNHSTQEDWTNHFGAKWMKFLERKHQFDPRMILSPGQKIFHKKLQPVF

SEQ ID NO: 24644 - protein, 246 aa, Glycine max
MLLMNQGPINNWRSSFFPLSDHPRIASLITEHSILYCLEVAKYYDEQTELNVDKEIEVLLQGLAYIPGFNYEKNVSYVEFLNRVRSGELKLQSQGLWEVPHPWLNLFIPKSQILDFNSGVFKDIVLKRNISSGPVLVYPMNRNKWDDRMSASIPDEDVFYTVGFLHSSGFDTWKAYDAQNREILEFCRDAGIMVKQYLPNHSTQEDWTNHFGAKWMKFLERKHQFDPRMILSPGQKIFHKKLQPVF

SEQ ID NO: 24645 - DNA, 1523 bp, Glycine max
ttgtactgtgagtgctttgcagctgggatctattgtgatggctgcaactgtgtaaattgccataataatgtggataatgaggctgccagacaggaggcagttggaataacattggaacgcaatccaaatgctttcagaccaaaaattgctagcagtccacaagaacaaagagattccaaggaatgtgaaattaaagtaataggaaagcacaataaaggatgtcactgcaagaaatcaggctgccttaagaagtattgtgagtgcttccaagccaatatcctctgctctgaaaattgtaaatgcatggactgcaagaattttgaaggaagtgatgaaagaatagcaatatttcacaaagattacaatctagttcacatgaaacaggcagctaatgctaccattagtggagctgttggatcatctggctatggaacccatataacacccaagaagagaaaaaatcaggaaatgtttcctggaaagtcagccatggatcaaactgttaacatgactgctcaatacctacaggaaattgatcctatggcttcatcgccatcatctctgtcagattcctttatttctgacccttccaacacaagaatttcagggtcttcaagatctacataccggtccgtattggcagatgtcctcaagccaaataatgtaaagaatctctgttcactttttgttgttctctcacgagtagctgcaaagacaaatgcagaaatgagaggcaaagtagaccagcaaacaaaaactgggaactttgaagcttctgttgcttcatcagctaaatcactgcaagaaactagagatgtccaccagcctgcttgtgatgatcatgtgaataaagatgaagcagaagcagttgatgtcgctcattataataggccattatcacctgaaacactagcattgatgtgtgatgaacaggatgatatgctttttggaaattgttctgcagatggagttgcatgcaacagcacttttcaaaacatgattcaaaagtcatttaattctgatggatgcactgatgtttacagagagcaggaaaggcttatattgaccaagttcttggacattcttcgcggactcgttactcatggcagcatcaaagaaacaatgtgctcttcattgaccaagaaaggggagagaagcaagaaagaacctgcagacaatggcaataatggtgctgaaactaacgttgggagtgagaagggaattcaaagcaactgctttgcaaattacctcatcccatcgatcgctaaaatatcccagacaaattatgccataaccaatggacatggtaataatgatctttcgttgacctgattgataatgaaacatgttgctggtgacagtgtgcagcccggaatttctgctgctgatgtgcatgttacatacaactgatacaagccctgttctctgctgttaaattagagcttgtctagatctttatatgataatataaataagaataaaaaaataaaaaataaaaataatatatataaggtacaaatagc

SEQ ID NO: 24646 - protein, 443 aa, Glycine max
LYCECFAAGIYCDGCNCVNCHNNVDNEAARQEAVGITLERNPNAFRPKIASSPQEQRDSKECEIKVIGKHNKGCHCKKSGCLKKYCECFQANILCSENCKCMDCKNFEGSDERIAIFHKDYNLVHMKQAANATISGAVGSSGYGTHITPKKRKNQEMFPGKSAMDQTVNMTAQYLQEIDPMASSPSSLSDSFISDPSNTRISGSSRSTYRSVLADVLKPNNVKNLCSLFVVLSRVAAKTNAEMRGKVDQQTKTGNFEASVASSAKSLQETRDVHQPACDDHVNKDEAEAVDVAHYNRPLSPETLALMCDEQDDMLFGNCSADGVACNSTFQNMIQKSFNSDGCTDVYREQERLILTKFLDILRGLVTHGSIKETMCSSLTKKGERSKKEPADNGNNGAETNVGSEKGIQSNCFANYLIPSIAKISQTNYAITNGHGNNDLSLT

SEQ ID NO: 24647 - protein, 342 aa, Glycine max
MDCKNFEGSDERIAIFHKDYNLVHMKQAANATISGAVGSSGYGTHITPKKRKNQEMFPGKSAMDQTVNMTAQYLQEIDPMASSPSSLSDSFISDPSNTRISGSSRSTYRSVLADVLKPNNVKNLCSLFVVLSRVAAKTNAEMRGKVDQQTKTGNFEASVASSAKSLQETRDVHQPACDDHVNKDEAEAVDVAHYNRPLSPETLALMCDEQDDMLFGNCSADGVACNSTFQNMIQKSFNSDGCTDVYREQERLILTKFLDILRGLVTHGSIKETMCSSLTKKGERSKKEPADNGNNGAETNVGSEKGIQSNCFANYLIPSIAKISQTNYAITNGHGNNDLSLT

SEQ ID NO: 24648 - protein, 318 aa, Glycine max
MKQAANATISGAVGSSGYGTHITPKKRKNQEMFPGKSAMDQTVNMTAQYLQEIDPMASSPSSLSDSFISDPSNTRISGSSRSTYRSVLADVLKPNNVKNLCSLFVVLSRVAAKTNAEMRGKVDQQTKTGNFEASVASSAKSLQETRDVHQPACDDHVNKDEAEAVDVAHYNRPLSPETLALMCDEQDDMLFGNCSADGVACNSTFQNMIQKSFNSDGCTDVYREQERLILTKFLDILRGLVTHGSIKETMCSSLTKKGERSKKEPADNGNNGAETNVGSEKGIQSNCFANYLIPSIAKISQTNYAITNGHGNNDLSLT

SEQ ID NO: 24649 - DNA, 2199 bp, Glycine max
aacaaccacctctgcaacacatagcagatataataaagagaatgagggcgccaaattcgcacgtgctcctcatagatctcccacttcatatcctccctccgtcccccacgcttccctagaaacggaatcccatgtacggcttcgccggagattcgccgcccctccgatcgcttctacggctcctctccatcgacgtctcgcccggaggacctgaacctcttcctggagctgctccctctgacgttgcggagggaactgtatctccacaccgaaatcggaggcctcatagaggtcgtcatggatttgggtagaaaacctctggcacggttcccttccggtgattgggtcatctccgaacaacccattgcgcaagaggatttacgccatgccatttcaaaggttggtgagttttctgatgacaacaggtcaggtattgataggtctttgcatcggataagtgcgattcggaatcggaaaatgcaaatcattgggcttacttgtcgtgtgggtcgagctgtgggtggcagtgctgaaatcatccgtgatttggttgaggatggaggttctatcttggtcattggacctcctggagtcggtaaaacaaccttaatcagagagattgctaggatgctggctgatgagttcaggaagcgtgttgtaatagtggatacctctaatgaaattggaggtgatggagatgttcctcatgcaggaataggcagggccaggaggacgcaagttccaaatgtgaatatgcagcatggtgttatgattgaagcaattgaaaatcacatgcctgaaaccattattattgatgaaattggaacggagcttgaggcattggcagccagtactattgctcaaagaggagttcaattggttggaacggcacatggaatgaccattgaaaacataataaaaaatccttatcttcagattcttgttggtggcatagaggtgcaaagttgcacttttaattttcctttcacttttatgatttataatcaataatgattaattaaatgcactcctctgttttggcccccctcttctttctcaaagtgaatcggtcttaaatttttgaaccacatacaaatggaatgtgtagtgctttcccacatttgtaatattattgaatcatttatttgaatagagcgtgacccttggagaaacttctgatttaactaacaatgatatcacgagttctgaaattgaatctagtaaggatgataaagaccatccacgtacttggtccacgaactggagtaccagtgtacctgtgatgacgaggagttcacgaatgcaagtttatacttataagattcttgaagctgatctactacaagttgcaaaggtaatggggcttgaagatgtaatagatgtgactgatgacattggaactgctgaagcaattctagcatccagttctgagatccgacaaaacccatggatccgtggtgtggcaaaattccatcacgtacctgtatttgttatcaagtccaataccatggcacaagtggtcaaggcagtgcgcatgatccttgggctagaattctttggccctacaccaaagaaggcattaaatgaatgtttggatattgaaatcgaggatgatgaacctaaacgaaaaccatctttggaagagattgatgccttggaggaggtcaggcttgcaatagagtacattgtgattcctggtggagaacctgtggaacttcttcctagacgctctgaaattattgcccggcagcttgaactcgttcaaagttatcagttggctgctgaaaagtcaggtagcgatcagaatcccaggttgcaaattcttcccttgaggctaaatacaaaaaaaccctctaaatctactattggccgtaagaaaacaagtcctacctcaatgtctactggtgacagcggcaatggcatcagtgtcaccaaggcttcctatttttcctgaataattcaaattctttcccaattctaacatatttcacttcactggtttgtacatgtatgatgcatatgtaacatgtacagtcatgcaagtggtgtaaataatttatttatagcctaagaagagcttgtagctcaattggggtgtgacatttatgacggaagtttgatcctccgccaagctaccccttcttgtttcaaggtatatatattgaaaaaatcaatctacataaaatgtaatatttaatc

SEQ ID NO: 24650 - protein, 237 aa, Glycine max
MDLGRKPLARFPSGDWVISEQPIAQEDLRHAISKVGEFSDDNRSGIDRSLHRISAIRNRKMQIIGLTCRVGRAVGGSAEIIRDLVEDGGSILVIGPPGVGKTTLIREIARMLADEFRKRVVIVDTSNEIGGDGDVPHAGIGRARRTQVPNVNMQHGVMIEAIENHMPETIIIDEIGTELEALAASTIAQRGVQLVGTAHGMTIENIIKNPYLQILVGGIEVQSCTFNFPFTFMIYNQ

SEQ ID NO: 24651 - protein, 223 aa, Glycine max
MTRSSRMQVYTYKILEADLLQVAKVMGLEDVIDVTDDIGTAEAILASSSEIRQNPWIRGVAKFHHVPVFVIKSNTMAQVVKAVRMILGLEFFGPTPKKALNECLDIEIEDDEPKRKPSLEEIDALEEVRLAIEYIVIPGGEPVELLPRRSEIIARQLELVQSYQLAAEKSGSDQNPRLQILPLRLNTKKPSKSTIGRKKTSPTSMSTGDSGNGISVTKASYFS

SEQ ID NO: 24652 - protein, 217 aa, Glycine max
MQVYTYKILEADLLQVAKVMGLEDVIDVTDDIGTAEAILASSSEIRQNPWIRGVAKFHHVPVFVIKSNTMAQVVKAVRMILGLEFFGPTPKKALNECLDIEIEDDEPKRKPSLEEIDALEEVRLAIEYIVIPGGEPVELLPRRSEIIARQLELVQSYQLAAEKSGSDQNPRLQILPLRLNTKKPSKSTIGRKKTSPTSMSTGDSGNGISVTKASYFS

SEQ ID NO: 24653 - DNA, 1219 bp, Glycine max
tttcaaactcactacttcgcggccttcccaattctcagctcctcctcgttactcatgctctgtaaaaaagataaaagcttccggaagtcagcaaacaggatccatacgacatggagacaaccttgatgcaacgaagagcaggagtttgctggagaagtttcagaggaaaatgccaatggaattccttagcacccttttcaacaaacaatctatgttgagtgactttacaaccaaagatattgtagatggggaaagatcatccaaatgggtttcagcattcctctttggacaaactatatcagtgatttctcctgatgtttcatatgcaagcagctcagcaagaataaatgagatatatgaggttggagagttgtttgatttaagcatccaactaatatacttggtattgctattaggtttgctagggactggaactttctttgtgattcgtcaagttcttgtccgcagagaacttgacctatctgccaaagagttgcaggagcaagtaagaagtggtgatgctggtgcaactgagctttttgaacttggtgcagtgatgctgcgcaggaaattttaccctgctgctaccaagttcttgcttcaagcaattgagaaatgggatggggataatccggatcttgcccaggtttacaacgctcttggtgtgagctatgtccgcgatgggaaagttgacaaaggaattgctcagtttgagacagctgtcaagcttcaaccaggccatgtcacagcttggaacaatctcggtgatgcctttgagagtaaaaaggactacaagtctgctctaaaggcatttgaagaagtcctactatttgatcctaacaacaaggttgcccggcctaggagagattctttgaagggacttgttgatgcaaccaaaggagttactgtcatcaagtcaacagagaagaagtgagtgtcattgtatcaactcactatgaatatggcattgttaaatacatagttttcaataacttggttgtgttggaaggaattttggctctattggtgtagttactgcttactagctgaggcatactagtgctgcgaaatgtagttgaaattgaaacttgaaagtgctcgattctccaatgggttaccaaagctttgctctggtgctgatggtgtattcacttgtgaaaattcctttatttttttaaatggtcattttcgtgccttgttaaaaaaaaaaaaaaaaaat

SEQ ID NO: 24654 - protein, 310 aa, Glycine max
FKLTTSRPSQFSAPPRYSCSVKKIKASGSQQTGSIRHGDNLDATKSRSLLEKFQRKMPMEFLSTLFNKQSMLSDFTTKDIVDGERSSKWVSAFLFGQTISVISPDVSYASSSARINEIYEVGELFDLSIQLIYLVLLLGLLGTGTFFVIRQVLVRRELDLSAKELQEQVRSGDAGATELFELGAVMLRRKFYPAATKFLLQAIEKWDGDNPDLAQVYNALGVSYVRDGKVDKGIAQFETAVKLQPGHVTAWNNLGDAFESKKDYKSALKAFEEVLLFDPNNKVARPRRDSLKGLVDATKGVTVIKSTEKK

SEQ ID NO: 24655 - protein, 254 aa, Glycine max
MPMEFLSTLFNKQSMLSDFTTKDIVDGERSSKWVSAFLFGQTISVISPDVSYASSSARINEIYEVGELFDLSIQLIYLVLLLGLLGTGTFFVIRQVLVRRELDLSAKELQEQVRSGDAGATELFELGAVMLRRKFYPAATKFLLQAIEKWDGDNPDLAQVYNALGVSYVRDGKVDKGIAQFETAVKLQPGHVTAWNNLGDAFESKKDYKSALKAFEEVLLFDPNNKVARPRRDSLKGLVDATKGVTVIKSTEKK

SEQ ID NO: 24656 - protein, 252 aa, Glycine max
MEFLSTLFNKQSMLSDFTTKDIVDGERSSKWVSAFLFGQTISVISPDVSYASSSARINEIYEVGELFDLSIQLIYLVLLLGLLGTGTFFVIRQVLVRRELDLSAKELQEQVRSGDAGATELFELGAVMLRRKFYPAATKFLLQAIEKWDGDNPDLAQVYNALGVSYVRDGKVDKGIAQFETAVKLQPGHVTAWNNLGDAFESKKDYKSALKAFEEVLLFDPNNKVARPRRDSLKGLVDATKGVTVIKSTEKK

SEQ ID NO: 24657 - DNA, 2151 bp, Glycine max
tccgattctgatggttcagagaaaagccttgattcatttgttatccagctgtttgaactcatgttgaccattgtgggtaatccaagactgggaaaggtggttgtggctaatatcagagaattggtgtactatactattgcttttcttcaaatgactgagcagcaggttcatacatggtctgtggatgctaaccagttcattgctgatgaagaagatgccacttatagttgccgcgtctctggtgtgcttttactggaagaggttgtgaattcttttgctggtgaaggaattttggccataacagatggtgcaaaacaatggttcaccgagtctcaaattagaaaagcagctggtaatgcaagctggtggaggataagagaagctactctttttgccttatcgtctctttcagaagaactgttggagacagaggaaaccggatttgatacaagtagcttgaagcacctggttgagcagattttcactgaagactctctaataggtcctcttgaatatccctttttatatgctcgcatctttacgtcagttgctaaattgtcttctttgataagcaatggtttactagaacactttctttatttagcaatgaaagcaattacaatggatgtgcccccacctgtaaaagtaggtgcctgcagagcacttactaaccttcttcctgaagcaaaaaaagaaattgtccaatcgcaattgttgggtttaatttcatccctcacagatcttcttaatcatgcatcagatgaaaccttgctcatggtacttgatacattgcttgctgcagtaaaagcaggtcatgagtcatcaacattagttgaacacatgatttctcctgtaatccttaatgtgtgggcatcacatgtttcggatccttttatcagtattgatgcactggaagttcttgaggctatcaaaagcattcctgaatgtgtacatccattggtttctagaattttgccgtatattggaccaattttgaataaaccccaagagcaggctgatggtttggtagctggatcattagatctggtaacaatgttactgaagaatgcccctgctgatgtagtgaaagcaatatatggtgtctcttttaatgctgttatcaacataatccttcaaagtgatgaccacagtgaaattcagaatgctacagaatgtttatctgcttttatatctgggggaagacaagaaattcttgcatggggatctgattctggatcaactatgagaagtttacttgatattgcttcaagactgctagaccccaaattggaaagctctgggtctctctttgttggaagttacattcttcaactgattttgcatttaccatcacagatggctgtacatatacgagacctgattgctgctcttgtcaaacgcatgcaatctgctcaaaactctgtcttgctaagctcattgctaattgtttttgccagactggtacacatgagtgttcctaatgttggacaatttattgatttgctgatctcaattcctgcggaaggacatggtaattcctttgcttatataatgtcagaatggactaagcagcaaggggagatacagggggcatatcaaataaaagtcactacaagtgccctggccttgttgctaaccagtaggcacaatgaattggcaaatatacatgtccagggctatcttattaagtctggcgagggaataactacaagatcaaaagctaaatcagccccagatcaatgggtaatgttgccactttctacaaagatagtggctttattggcagatgcattaactgagatacaagaacaagttttggccgctgatgatgaggatagtgactgggaagaagttcaagcagatggcattgaaaatgataaagaatttctttattcagtatctacatcttcgggaaaagccacaaatgaacaacttgaagcaatggcgaaagtatttaatgaggatcaagatgatcactatgaagatgaccttttaagtattgctgatcctctcaatcagataaacctggcaaattaccttcttgatttctttgttagcttttctcagtctgacagacagctcttagatcacatttgcaagagcttgtctcagtctcaacgaaatgccattcaaatggtactgaagagatga

SEQ ID NO: 24658 - protein, 716 aa, Glycine max
SDSDGSEKSLDSFVIQLFELMLTIVGNPRLGKVVVANIRELVYYTIAFLQMTEQQVHTWSVDANQFIADEEDATYSCRVSGVLLLEEVVNSFAGEGILAITDGAKQWFTESQIRKAAGNASWWRIREATLFALSSLSEELLETEETGFDTSSLKHLVEQIFTEDSLIGPLEYPFLYARIFTSVAKLSSLISNGLLEHFLYLAMKAITMDVPPPVKVGACRALTNLLPEAKKEIVQSQLLGLISSLTDLLNHASDETLLMVLDTLLAAVKAGHESSTLVEHMISPVILNVWASHVSDPFISIDALEVLEAIKSIPECVHPLVSRILPYIGPILNKPQEQADGLVAGSLDLVTMLLKNAPADVVKAIYGVSFNAVINIILQSDDHSEIQNATECLSAFISGGRQEILAWGSDSGSTMRSLLDIASRLLDPKLESSGSLFVGSYILQLILHLPSQMAVHIRDLIAALVKRMQSAQNSVLLSSLLIVFARLVHMSVPNVGQFIDLLISIPAEGHGNSFAYIMSEWTKQQGEIQGAYQIKVTTSALALLLTSRHNELANIHVQGYLIKSGEGITTRSKAKSAPDQWVMLPLSTKIVALLADALTEIQEQVLAADDEDSDWEEVQADGIENDKEFLYSVSTSSGKATNEQLEAMAKVFNEDQDDHYEDDLLSIADPLNQINLANYLLDFFVSFSQSDRQLLDHICKSLSQSQRNAIQMVLKR

SEQ ID NO: 24659 - protein, 696 aa, Glycine max
MLTIVGNPRLGKVVVANIRELVYYTIAFLQMTEQQVHTWSVDANQFIADEEDATYSCRVSGVLLLEEVVNSFAGEGILAITDGAKQWFTESQIRKAAGNASWWRIREATLFALSSLSEELLETEETGFDTSSLKHLVEQIFTEDSLIGPLEYPFLYARIFTSVAKLSSLISNGLLEHFLYLAMKAITMDVPPPVKVGACRALTNLLPEAKKEIVQSQLLGLISSLTDLLNHASDETLLMVLDTLLAAVKAGHESSTLVEHMISPVILNVWASHVSDPFISIDALEVLEAIKSIPECVHPLVSRILPYIGPILNKPQEQADGLVAGSLDLVTMLLKNAPADVVKAIYGVSFNAVINIILQSDDHSEIQNATECLSAFISGGRQEILAWGSDSGSTMRSLLDIASRLLDPKLESSGSLFVGSYILQLILHLPSQMAVHIRDLIAALVKRMQSAQNSVLLSSLLIVFARLVHMSVPNVGQFIDLLISIPAEGHGNSFAYIMSEWTKQQGEIQGAYQIKVTTSALALLLTSRHNELANIHVQGYLIKSGEGITTRSKAKSAPDQWVMLPLSTKIVALLADALTEIQEQVLAADDEDSDWEEVQADGIENDKEFLYSVSTSSGKATNEQLEAMAKVFNEDQDDHYEDDLLSIADPLNQINLANYLLDFFVSFSQSDRQLLDHICKSLSQSQRNAIQMVLKR

SEQ ID NO: 24660 - protein, 666 aa, Glycine max
MTEQQVHTWSVDANQFIADEEDATYSCRVSGVLLLEEVVNSFAGEGILAITDGAKQWFTESQIRKAAGNASWWRIREATLFALSSLSEELLETEETGFDTSSLKHLVEQIFTEDSLIGPLEYPFLYARIFTSVAKLSSLISNGLLEHFLYLAMKAITMDVPPPVKVGACRALTNLLPEAKKEIVQSQLLGLISSLTDLLNHASDETLLMVLDTLLAAVKAGHESSTLVEHMISPVILNVWASHVSDPFISIDALEVLEAIKSIPECVHPLVSRILPYIGPILNKPQEQADGLVAGSLDLVTMLLKNAPADVVKAIYGVSFNAVINIILQSDDHSEIQNATECLSAFISGGRQEILAWGSDSGSTMRSLLDIASRLLDPKLESSGSLFVGSYILQLILHLPSQMAVHIRDLIAALVKRMQSAQNSVLLSSLLIVFARLVHMSVPNVGQFIDLLISIPAEGHGNSFAYIMSEWTKQQGEIQGAYQIKVTTSALALLLTSRHNELANIHVQGYLIKSGEGITTRSKAKSAPDQWVMLPLSTKIVALLADALTEIQEQVLAADDEDSDWEEVQADGIENDKEFLYSVSTSSGKATNEQLEAMAKVFNEDQDDHYEDDLLSIADPLNQINLANYLLDFFVSFSQSDRQLLDHICKSLSQSQRNAIQMVLKR

SEQ ID NO: 24661 - DNA, 1365 bp, Glycine max
aggcacttgcttgggatctctctgcaaacttctttctttttccatttctctttttagatttgcatttttttagttgttttatgtatgtatgcatgtattcattgaacttggagaaaattgggtaataagcagttgctacaatatggcttgaaagttgaaacttattatgcgtgtgcttggatatatgttgttttggtggttgcatgtcttcgttaattgaccaaaatgttgtgggttttgtggctgtacttcttatatattgattctgtgagtggatattgagaagaaaagattggagaatcttcaaatcttcaaatttactagtgtctctagactctaatcatttgatgtactatactgtagaagatggacttaggttgttatatatatatatatatgcccatctgcattggacacaacagtactgtttctttgtatagtttgttgtcttacaaaaattaactttaagcctaatgtaatggcttttacggaaagaaaaaatctagcctaatatcatatttgtttgtgggatgcagctgagaaacttagtatgggcaacttcaaaacatgatgtctaccttatctccaactactctgttaatcactggtcatcattaagtggtaatttgactgagataatcaattttgctgggcatgtggcaccgccccctactgagcgtttgaataagaaaggagtaagcttttgtacatggatcacacatgatgataatgctatatcaaatgcagttgaaatatatgacagcttgagcattactcacgaaaggattagctggaatccaacctgttgatattcctgggatccaaaattcccgttcttatctgaataatttaaatcatcaccaaaagcatcaaaacaatttagtaagattggtgtctagggattttatcagcagtaatggcttgtcaacgagaagaagtaactgcactggctagaggaattgtagtgtaattcgatctctagcttcgcaaacatcagtcgctgatccagtgttgtcctcttcaagaagcaatgctggtgacacttacaagaaatcaactttaatccttattcggcatggtgagtcgttatggaatgagaagaacttattcacagggtgtgttgatgtccttctaagcaagaagggtatagatgaggcaattgaagctgggaaaagaattagcagcattccttctgaagctggaatttatgcctatactagggtatgctgtttatagcccttttaagaccctttcttttttttaatgaaatgtttaacaatagatattatttttctggaaggctgcaatggcacttgcagacctctaccaatagatagaatagaacataaaaatggttttgcttgt

SEQ ID NO: 24662 - protein, 92 aa, Glycine max
MQLRNLVWATSKHDVYLISNYSVNHWSSLSGNLTEIINFAGHVAPPPTERLNKKGVSFCTWITHDDNAISNAVEIYDSLSITHERISWNPTC

SEQ ID NO: 24663 - DNA, 1909 bp, Glycine max
gatgcttagaatcagatgtgaaagaggtggagaggagacatgacttgagaaaatccttgcttccctcaagcttgcagaatgactcctctcttcaaatagagaatgtatctcttaaagaatccataatttctaatgcaaatgaactgagattgatgaaaattataccccgacttgaaagtgcttacttttccatgagatccaaaattaagcttcctgaaacagatactgcaactcacccagataaagatatactgataaatcatgacaattggtgtggagctcaaaaagacatggaacaacataaagcgacagatgctttaggagctttctttgacagtttgtgcaagtatgcacgttatagcaagtttgaagtgcggggcatactaagaaatactgattttaataatcctgcaaatgtaatatgctctctgagttttgatagggatgaagattactttgctgctgctgggatatcaaagaaaattaaaatatttgagttcaatgcacttttcaatgattccattgacatccattatcctgtagttgagatgtcaaacagatcaaggctcagttgtgtttgctggaataactacatccagaactatcttgcctccacagactatgatggtgctgttaagctatgggatgctaatacaggccaagggttttctcgattcaccgaacatgaaaagagggcttggtctgttgatttctctttgttatgccctactaaatttgccagtgggagtgatgattgttctgtgaaactgtggaatatcaatgagaaaaacagtttagccacaatcaggaatgttgctaatgtctgctgtgttcagttctctactcattcctctcatttgctggcctttggatctgctgattactcagcatattgctatgatcttcgcaatcttagaaacccttggtgtgtgttggctggccatcgtaaagctgtaagctatgtcaaattcttggactctgaaacacttgtttctgcatcaaccgataacatgttgaagatctgggatctcaataaaacctctcctgtgggtccatcaactagtgcttgcagcttaaccctgtctggacatactaatgagaagaattttgtgggtttatcagttgccgatggatatatagcatgtggttcagaaacaaatgaggtttatgtctaccataaatctcttcccatgccagtcacttcgcacaggtttgggtccattgatcctatttctggtgaagagacagatgatgacaatggtttgtttgtttcaagtgtgtgctggagaggaaaatcagacatggttgttgcagccaattcaagtggatgtataaaagttctacagatggtttgagagaaagcttgcccttacagtttgtacagtcctctagttttagtgttttacccgtgtcactcaagttaatcccatcaattttctccgagtgtatccaaaaattctgttgacgtcataatttgatgtagaagggattatttcaggcataattagaagtagaagcagtctcaatcttaatccagatcttctaatttgaaggtgggattaaacataaggaatcttaatctagatattctaatttgaaggtggctttaaaccagaatttcaatctggcatttgtagaaaaggcctgttatgcataaagtctcgaggatcaatttgaaaacaggaagcagattcagtgtaaacgattaacacctaagaatggacatggcaggaatttctactaacttttttagtttcaatattatagtcaatatctctgaatgtagtgtaagtgtatctttgagctagcaattgtgcacttgtaatgagatgtttgtagcttaaagcataaagcaactccagtaacgctaacaccttcaaaggaaatcatctttgggtttttccccgat

SEQ ID NO: 24664 - protein, 450 aa, Glycine max
CLESDVKEVERRHDLRKSLLPSSLQNDSSLQIENVSLKESIISNANELRLMKIIPRLESAYFSMRSKIKLPETDTATHPDKDILINHDNWCGAQKDMEQHKATDALGAFFDSLCKYARYSKFEVRGILRNTDFNNPANVICSLSFDRDEDYFAAAGISKKIKIFEFNALFNDSIDIHYPVVEMSNRSRLSCVCWNNYIQNYLASTDYDGAVKLWDANTGQGFSRFTEHEKRAWSVDFSLLCPTKFASGSDDCSVKLWNINEKNSLATIRNVANVCCVQFSTHSSHLLAFGSADYSAYCYDLRNLRNPWCVLAGHRKAVSYVKFLDSETLVSASTDNMLKIWDLNKTSPVGPSTSACSLTLSGHTNEKNFVGLSVADGYIACGSETNEVYVYHKSLPMPVTSHRFGSIDPISGEETDDDNGLFVSSVCWRGKSDMVVAANSSGCIKVLQMV

SEQ ID NO: 24665 - protein, 400 aa, Glycine max
MKIIPRLESAYFSMRSKIKLPETDTATHPDKDILINHDNWCGAQKDMEQHKATDALGAFFDSLCKYARYSKFEVRGILRNTDFNNPANVICSLSFDRDEDYFAAAGISKKIKIFEFNALFNDSIDIHYPVVEMSNRSRLSCVCWNNYIQNYLASTDYDGAVKLWDANTGQGFSRFTEHEKRAWSVDFSLLCPTKFASGSDDCSVKLWNINEKNSLATIRNVANVCCVQFSTHSSHLLAFGSADYSAYCYDLRNLRNPWCVLAGHRKAVSYVKFLDSETLVSASTDNMLKIWDLNKTSPVGPSTSACSLTLSGHTNEKNFVGLSVADGYIACGSETNEVYVYHKSLPMPVTSHRFGSIDPISGEETDDDNGLFVSSVCWRGKSDMVVAANSSGCIKVLQMV

SEQ ID NO: 24666 - protein, 387 aa, Glycine max
MRSKIKLPETDTATHPDKDILINHDNWCGAQKDMEQHKATDALGAFFDSLCKYARYSKFEVRGILRNTDFNNPANVICSLSFDRDEDYFAAAGISKKIKIFEFNALFNDSIDIHYPVVEMSNRSRLSCVCWNNYIQNYLASTDYDGAVKLWDANTGQGFSRFTEHEKRAWSVDFSLLCPTKFASGSDDCSVKLWNINEKNSLATIRNVANVCCVQFSTHSSHLLAFGSADYSAYCYDLRNLRNPWCVLAGHRKAVSYVKFLDSETLVSASTDNMLKIWDLNKTSPVGPSTSACSLTLSGHTNEKNFVGLSVADGYIACGSETNEVYVYHKSLPMPVTSHRFGSIDPISGEETDDDNGLFVSSVCWRGKSDMVVAANSSGCIKVLQMV

SEQ ID NO: 24667 - DNA, 1420 bp, Glycine max
aaaacttccacccaagatccaacaagggctattttgatttctgaagtttataaaactgtgatgagaaacgccgcgagtgttacaagccatgctgcttgtattctcatgggcagcacaaatttgttacttgagacagtggcaaattttgttgagttgagcccttataggccctttggaacatatgttttctgcaacggaaatggacagctgattgtggtggaaaactcagatgctgttttgcaactcttgttccacactgccctgttaagcgatttggcagaacttgaagaagttgccgacaaaagcatatcgcaacacctgaactatgtggctgagttgcaggaaagcttgggaatgcagaatgtagtgtacttggagcaacttgagcaacttcccttgtctgctgacggttcaaatagtgatgttgcaacagccttggatggccttggactgaacacaagagcaaggctgtgtctacgagcagctggtgagttggagaagcagaaacgcaaaaacgaggacaaaatcatgaaggagattcaggataaagccttgacaagcatgaaagagcttcaaaattacaaaacaacatgtgagatgcacaaggggaagggctattacgatgccttcaaggtgcaaaaggagtcgaacgacttccaagcaaacgtgaagaggcttatgctagcaggggtatgggatgaagtcattgagatgctaaagaggtatgaactccctgatgagttcgaaggggacaaagaatggataaagcgtggaaccgaatatcgccgccttgtggagcctctagacattgcaaactattaccgccacttgaagaatgaggacacaggaccttacatgatcagggccaggccaaaacggtataggtacactcaaagatggttggaacatgctaaaaggatgccacctgctcctatcactgaatcaaccttttgggctgaagtggaggaactttatagctggattaacagcaagaagcctcttgatgatcatgtcgagcaaagggttaagcagcttcaaaaagaccttaaaaattggactgatgatgagaaagtactagccaaggatacgttcttgaaggatcctaactttattaggtggaaggatattctacctcaggaactcaaggacacttcttcctagctagtctagttactgctgtgaaaggatattctgtattagtcttttttccactcaatgaggaagctataagcttctgatgatgcttttgatgtgtatttgtcatgcaggtgtagtgttggttacttcagtgttgtaactttgtatttgtattcctaatgtttttgattcccaagttttgtattacttgtgagaaccaaaaatcattcagactgctggactaaataaatttgtttaatagtagggtctgaactagagcggt

SEQ ID NO: 24668 - protein, 386 aa, Glycine max
KTSTQDPTRAILISEVYKTVMRNAASVTSHAACILMGSTNLLLETVANFVELSPYRPFGTYVFCNGNGQLIVVENSDAVLQLLFHTALLSDLAELEEVADKSISQHLNYVAELQESLGMQNVVYLEQLEQLPLSADGSNSDVATALDGLGLNTRARLCLRAAGELEKQKRKNEDKIMKEIQDKALTSMKELQNYKTTCEMHKGKGYYDAFKVQKESNDFQANVKRLMLAGVWDEVIEMLKRYELPDEFEGDKEWIKRGTEYRRLVEPLDIANYYRHLKNEDTGPYMIRARPKRYRYTQRWLEHAKRMPPAPITESTFWAEVEELYSWINSKKPLDDHVEQRVKQLQKDLKNWTDDEKVLAKDTFLKDPNFIRWKDILPQELKDTSS

SEQ ID NO: 24669 - protein, 366 aa, Glycine max
MRNAASVTSHAACILMGSTNLLLETVANFVELSPYRPFGTYVFCNGNGQLIVVENSDAVLQLLFHTALLSDLAELEEVADKSISQHLNYVAELQESLGMQNVVYLEQLEQLPLSADGSNSDVATALDGLGLNTRARLCLRAAGELEKQKRKNEDKIMKEIQDKALTSMKELQNYKTTCEMHKGKGYYDAFKVQKESNDFQANVKRLMLAGVWDEVIEMLKRYELPDEFEGDKEWIKRGTEYRRLVEPLDIANYYRHLKNEDTGPYMIRARPKRYRYTQRWLEHAKRMPPAPITESTFWAEVEELYSWINSKKPLDDHVEQRVKQLQKDLKNWTDDEKVLAKDTFLKDPNFIRWKDILPQELKDTSS

SEQ ID NO: 24670 - protein, 351 aa, Glycine max
MGSTNLLLETVANFVELSPYRPFGTYVFCNGNGQLIVVENSDAVLQLLFHTALLSDLAELEEVADKSISQHLNYVAELQESLGMQNVVYLEQLEQLPLSADGSNSDVATALDGLGLNTRARLCLRAAGELEKQKRKNEDKIMKEIQDKALTSMKELQNYKTTCEMHKGKGYYDAFKVQKESNDFQANVKRLMLAGVWDEVIEMLKRYELPDEFEGDKEWIKRGTEYRRLVEPLDIANYYRHLKNEDTGPYMIRARPKRYRYTQRWLEHAKRMPPAPITESTFWAEVEELYSWINSKKPLDDHVEQRVKQLQKDLKNWTDDEKVLAKDTFLKDPNFIRWKDILPQELKDTSS

SEQ ID NO: 24671 - DNA, 1297 bp, Glycine max
aattgctatccaagctttaccttatttcttctgcatgtgaacatatatttattttttcattttctttcttctgccccctattcttttttagttggttgttatggttaaatagtatcatgttcatgacgtctcaaatgcaagtaacatcatggattttgtagagactgtgagagtgagtgaacgtgcccctaggtgtttatgcttaagcaggaaaaaaaatctcaggattagtgaggtggagatcaaagatcactaacttatttgaatttctgcatatgtcaactagtatagtatttgagaaagatgtttgttgtttgatttcttcgacctcattaagtcaaacaacttagaattaattatttaactaagctacttgtattgtcatcatccagttatttgtggataccatatctcgtctgtttatgtttaccttgctatttctctctttctctttattgcaattttgaagtcatttgcctactgatgttcacttttaccaatcgaatacaatttatgagcagtctgcattggatgatgatatatggtttatattacattcaattcactgtgtatgttattgttatgttatgccaattgccaccgaagaaggtcagaaacacaatgagttcgtcgaacctgagagatctccaacgcgaattggagaacaaagccaacgatctcagcaagcttcaaaaggaaattgcaaagaatcaccaaatgagaaagaagtacacactccagcttggcgagaacgagctcgtccttaaggaactggatttattgaaagatgacacaaatgtttataagttgattgggccagtacttgttaagcaagatttggccgaggccaatgcaaatgtccgcaagaggatcgaatacatctcagctgaattgaagcgtcttgatgccactgttcaagatttggaagagaagcaaaatagcaagaaagatgcaatactaaaattgcaacaaaggattcaatcacttcaggctgggaaaggcaaggcatagttttccctcacatattgttccagcattgtaatttgaccgtgctaaggttggatgtgcatttgtattttgtgcctctttgttttggactgaagttgactcttaggaatgtgtttcgggaaacaatttggaaattagattgatattattatagttggtattggctcattttcaagaaaatgacctgtacaaggttctgtggaaggcttagagaagtcatttgttgcaagggctactttttgtggaaaagccattggcttttttctaatgcatggactatttttttttt

SEQ ID NO: 24672 - protein, 175 aa, Glycine max
MFTFTNRIQFMSSLHWMMIYGLYYIQFTVYVIVMLCQLPPKKVRNTMSSSNLRDLQRELENKANDLSKLQKEIAKNHQMRKKYTLQLGENELVLKELDLLKDDTNVYKLIGPVLVKQDLAEANANVRKRIEYISAELKRLDATVQDLEEKQNSKKDAILKLQQRIQSLQAGKGKA

SEQ ID NO: 24673 - protein, 165 aa, Glycine max
MSSLHWMMIYGLYYIQFTVYVIVMLCQLPPKKVRNTMSSSNLRDLQRELENKANDLSKLQKEIAKNHQMRKKYTLQLGENELVLKELDLLKDDTNVYKLIGPVLVKQDLAEANANVRKRIEYISAELKRLDATVQDLEEKQNSKKDAILKLQQRIQSLQAGKGKA

SEQ ID NO: 24674 - protein, 159 aa, Glycine max
MMIYGLYYIQFTVYVIVMLCQLPPKKVRNTMSSSNLRDLQRELENKANDLSKLQKEIAKNHQMRKKYTLQLGENELVLKELDLLKDDTNVYKLIGPVLVKQDLAEANANVRKRIEYISAELKRLDATVQDLEEKQNSKKDAILKLQQRIQSLQAGKGKA

SEQ ID NO: 24675 - protein, 129 aa, Glycine max
MSSSNLRDLQRELENKANDLSKLQKEIAKNHQMRKKYTLQLGENELVLKELDLLKDDTNVYKLIGPVLVKQDLAEANANVRKRIEYISAELKRLDATVQDLEEKQNSKKDAILKLQQRIQSLQAGKGKA

SEQ ID NO: 24676 - DNA, 3064 bp, Glycine max
aaaagaacattagtgtctgcttcatataaccaaactcttcactctgcttctgcttctttggtcagttcccaattctctactttttctcgtttctcttcttaccctttaatcattcttcacggatttttgatcccggacacttttcctcaactgggttccgaaaaagtttctgtctttttcacgcaatattctattttcaaactcttttagcggcagcatttcccctgttttctaactctgtacttctctgtcacggggtagttttttaattcacgcaattctactttttttttttgcaattttattataaagggtcatcggttggtgaagttttctcgcaactgggttcttaaatcccgcatctttctccatgtgtttgtgcatgcaggaaagcacttaaccaaactctctgtttcagcttcctctgttttttgggtacgaacagagtttctctgtttttgacgatggccataaaggcgattgaactgttgaaagggtgcggatcacaagaagaaataatggaagtgcttgctgcggtggcttcggatttgggggatgtgatcgatgatgtgaacaccttgcaggtgattccactgaatggtgcaatgaccaatgaggtttttcagataaactggccaaccaaaaatggtggtgagatcagaaaggttctggttcgtttatatggggaaggtgttgaagttttctttgacagggaagaagaaattcgaaactttgactgtatttcaaagcatggtcagggtccacgccttcttggccgattcacctctggcagagttgaggagtttattcatgcccgaactctctcagctgctgacctccgtgaccctgaagtatctgctttgatagcatctaagatgagagagttccataatcttcatatgcctggtgcaaagaaggttcagatttggcacagaatgaggaagtggctcggtcaagccaaaagtctgtgctccccaaaggatgaaaaaaattttggcttggacaatctggatgaggaaataaatatcctggagaagaagttatctgaaggatatcaagagattggtttttgtcacaatgacttacaatatggtaacataatgatggatgaagagacaagattaatcactataattgactatgaatatgccagttataatcccattgcatatgacctcgcaaatcatttttgtgaaatggtggcagattaccacagtgacacacctcatgttcttgactacacgaagtatccaggactagaggaacgtcaaagatttatccgcaactatctgagttctgaaggcaataaaccaagcaatgctaaagtgaaccagttagcgaaagctgcagaaaaatacactcttgcaaaccatctattttgggggttgtggggacttatttcgagttatgtgaacaaaattgattttgactataaggagtatgcaaggcagaggtttcagcaatactggataaggaagcctactttattggactcaccaagcatcgtttccctagatgaaactgtgaatggattgatgccatccttcacgtgattttgcttcagatttcttatagcctttttggagatgtagggtgcgataccaaacatgcatttactgaagtttagtcttagtatatatattaatatattaataacacctgaaggtatgatatgcagcatcatatatgtaaacaatatgtaatcactaacaatgtgtgatgagttttggaaatttaaggattgtttaccagtccctctcttttgggattgagttgggggataagagtgagaataagtagtttatattgtttgcaatattgatgggatatgcatatagcaaatagatagatttgttctcgcattttacttacacattaaataatgattgaggttgagatttcatacatccttcttctttttcttcatgttactcgctacctcctctctcgcccaatccccttcagcttcccccgccgcaactcccaaagcctcgccgtcgccaccacaggctgccgctcccaaagcctctcctccaaccacctcctccgctcccccacccaccacctccacccctcctccacccgctcccgctcccgtttccaagaccgctccggcctcttctcctccgtcccccaccccttcctcctcctcctcctccggccccaccgcttcctctccttctaactcccccaccgactctcctcccgcccccgtgtctccctccgactcccccgtcgcctccggccccgccgtagtcagcgacggacccgccgacgcccccaccgctcttggccccagcagccacgcccacctccgcagagtctccgcctccggatctgtcgccgccgttgcattcgccgccgcggccgctttgatgatgtagatccggaggcggagactcggcggaggttgcggtcacggtggcggtggaggcgtcgagttctatttccacaagctcaggttcggttgcgcaaccgaaccggtgtgccacgtgtcggaagcgcgtggggctgaccgggttcaagtgcaggtgcggattgacgttctgcggggcccacaggtactcggagaagcacgcgtgcgggttcgattttaagacggtggggagagaggagattgcacgtgccaaccccgtgatcaaagcggagaagctgcggaggatttgatgattcgttctcggccgttcgatgggaccggatttggtgatttgatctcgaccgtccacgtgtactgcgaaagatagagagagaaaatgtcgttattatctaaaattatgattatgatgatctgtgttttaattaagattaagatgaaagcttgaatagtcggtttgtctggtctagtagggcatgaaaatgaaataaatgagtaatttattttggctttgtaaaagcgagaaaaaaagaaaagaaaaaacaacgttggattaaaaaatttctaggtccaccgatgggggtggttgaaacttgaaatgatttgtgataagagtctccgggcaacgacgcagtgcggtggagcgttttattgtgctttcggtaatgaatgtgaaagtgaaattattgc

SEQ ID NO: 24677 - protein, 362 aa, Glycine max
MAIKAIELLKGCGSQEEIMEVLAAVASDLGDVIDDVNTLQVIPLNGAMTNEVFQINWPTKNGGEIRKVLVRLYGEGVEVFFDREEEIRNFDCISKHGQGPRLLGRFTSGRVEEFIHARTLSAADLRDPEVSALIASKMREFHNLHMPGAKKVQIWHRMRKWLGQAKSLCSPKDEKNFGLDNLDEEINILEKKLSEGYQEIGFCHNDLQYGNIMMDEETRLITIIDYEYASYNPIAYDLANHFCEMVADYHSDTPHVLDYTKYPGLEERQRFIRNYLSSEGNKPSNAKVNQLAKAAEKYTLANHLFWGLWGLISSYVNKIDFDYKEYARQRFQQYWIRKPTLLDSPSIVSLDETVNGLMPSFT

SEQ ID NO: 24678 - protein, 344 aa, Glycine max
MEVLAAVASDLGDVIDDVNTLQVIPLNGAMTNEVFQINWPTKNGGEIRKVLVRLYGEGVEVFFDREEEIRNFDCISKHGQGPRLLGRFTSGRVEEFIHARTLSAADLRDPEVSALIASKMREFHNLHMPGAKKVQIWHRMRKWLGQAKSLCSPKDEKNFGLDNLDEEINILEKKLSEGYQEIGFCHNDLQYGNIMMDEETRLITIIDYEYASYNPIAYDLANHFCEMVADYHSDTPHVLDYTKYPGLEERQRFIRNYLSSEGNKPSNAKVNQLAKAAEKYTLANHLFWGLWGLISSYVNKIDFDYKEYARQRFQQYWIRKPTLLDSPSIVSLDETVNGLMPSFT

SEQ ID NO: 24679 - protein, 315 aa, Glycine max
MTNEVFQINWPTKNGGEIRKVLVRLYGEGVEVFFDREEEIRNFDCISKHGQGPRLLGRFTSGRVEEFIHARTLSAADLRDPEVSALIASKMREFHNLHMPGAKKVQIWHRMRKWLGQAKSLCSPKDEKNFGLDNLDEEINILEKKLSEGYQEIGFCHNDLQYGNIMMDEETRLITIIDYEYASYNPIAYDLANHFCEMVADYHSDTPHVLDYTKYPGLEERQRFIRNYLSSEGNKPSNAKVNQLAKAAEKYTLANHLFWGLWGLISSYVNKIDFDYKEYARQRFQQYWIRKPTLLDSPSIVSLDETVNGLMPSFT

SEQ ID NO: 24680 - DNA, 1235 bp, Glycine max
aatgcctcaaagctaaaccccaaaccatcttcttcaccttttctctctgcacacgaatatggcatcaatttgcgacaaagatatccctcttcgactacacaacatcgacgctttcatcgcttcttacagaaactccctccactcgctcagagccaccgcactcgaagccgcgcgatctcaatccgaattagccgaggttaaagctaaactgcgagaggctgaggatgaattggtaaaggcacttgcagttaagactcggagagaggcgaagcgaatggccttgaaagaggcgattgtttctgtgaagggaagaattgaggatctgaagacgagtattcagaagcagagaacccaaaacgaggaatgtgccacggttgtgtcgcatcaccgtcttgttttggaagtgtctgaacagaaatcaaatgaaagcagtgaacatagagatgaagtccaggaggccatatcttggtacaataggatccttggttttcagattgaaggtggacgtggggtaaaattcagcttcaagaatattaatgtggacaacccaaatgaggagttcttttttaccatccgccacgaagatgacgtgtatacattgctaaattgtaaaccatctgtcaaagatactgacgagttgatccatgaattaaacaacacaaatgggctatttaaatttgtcagaacaatgaggaaaaagtttcaagaagtagtggcacaaggccgtttatctatgacaacaaatgaacattaagaatctgcctttatctctgcatctggtccagttttatcaatatcaaccattactgaagataatgatcatcaagatgaacccaccaaaggtaatgcacatctccagaaacaagttaatcgaagaagggtaaaatcagcaattctatctcctggatctgcatcatctgtccgtcaatctcctcgtttgaaggtcaggaaatgaagcggtgtgggggatgctcacctgctcggtaccttattttgatgagacatgctggttcatgtagggaattaattgctaactaattgacatgtaaattaagacatacccaggttccagatgtctgaacctgtatataatagaccagaagatccctacattttttgtgtatggtccatttgatatttgtgtgtattttattttgttttttccattgctgatatactggtattgttcaataaaacatcagtcattctagtgagatatcttgtcttggcattgt

SEQ ID NO: 24681 - protein, 231 aa, Glycine max
MASICDKDIPLRLHNIDAFIASYRNSLHSLRATALEAARSQSELAEVKAKLREAEDELVKALAVKTRREAKRMALKEAIVSVKGRIEDLKTSIQKQRTQNEECATVVSHHRLVLEVSEQKSNESSEHRDEVQEAISWYNRILGFQIEGGRGVKFSFKNINVDNPNEEFFFTIRHEDDVYTLLNCKPSVKDTDELIHELNNTNGLFKFVRTMRKKFQEVVAQGRLSMTTNEH

SEQ ID NO: 24682 - protein, 159 aa, Glycine max
MALKEAIVSVKGRIEDLKTSIQKQRTQNEECATVVSHHRLVLEVSEQKSNESSEHRDEVQEAISWYNRILGFQIEGGRGVKFSFKNINVDNPNEEFFFTIRHEDDVYTLLNCKPSVKDTDELIHELNNTNGLFKFVRTMRKKFQEVVAQGRLSMTTNEH

SEQ ID NO: 24683 - DNA, 1298 bp, Glycine max
aaaacccacgtccgtgcccttgaagctaagcaacagtacaaccaaagactcctccaagctgtctgttttcctgtgtagttcttttgtctgctttcctttgtccttgagagggtttcatttttttgcgtatcacaaaaggtaacagagtcaaaaccctgcaaaaagtacaaaatgatgccaggcaatggacagttaactgttcctccgggcttcaggttccaccctactgatgaggagcttctctactattatctgaggaagaaagtttcttatgaagtcattgatcttgatgtcataagagaagtagatctcaacaaacttgagccttgggacctcaaagataagtgtaggattggatcagggcctcagaatgagtggtatttcttcagccataaggacaagaaatacccaacaggaaccagaacaaatcgagcaactacagctggtttttggaaagcaactggaagagacaagtccatataccacactaattccaagaggattggcatgaggaaaaccctagttttctacactggtcgtgctcctcatggccagaagactgattggatcatgcatgagtatcgccttgatgaagatgatgctgatgttcaagaagatgggtgggtggtatgcagggtcttcaaaaagaaaaaccaaagccgaggtttccaacaagaacttgaagaagaagagcacttaaccacccacatgagagcaagtggtccatgccaggttctagagcagaagcatcttcacatgcaaggaggaccatatgatcattacaactttgatgggacaatgcacctcccacagttgttcagtccagaatcagctattgcaccacctacaaattcttccttggccttatccatgaatgccatggacatccttgagtgctctcaaaacctgttgaggctcacaaccactggctgtggacttaatcttatgcagcaacaacaagaagagaggttcagtggtgactggtctttcttggacaagctactagcatcacaccatggcatggatcaaagcaaatgtaaccctcctactaatcatcatgctgcaactgttgtgggcacttctgctcaaaaattcccatttcattaccttggctgtgacaccacccatgatatcatgaaattttccaagtaggaagggatattgcattttaatgtgttattatacttaaggtgatcatgaggtgagaaatatttggtttctaagtatgtgtaatatgtagcaccttgttagatactcattgagattccactcattaatttagttatttcttgagtgtc

SEQ ID NO: 24684 - protein, 326 aa, Glycine max
MMPGNGQLTVPPGFRFHPTDEELLYYYLRKKVSYEVIDLDVIREVDLNKLEPWDLKDKCRIGSGPQNEWYFFSHKDKKYPTGTRTNRATTAGFWKATGRDKSIYHTNSKRIGMRKTLVFYTGRAPHGQKTDWIMHEYRLDEDDADVQEDGWVVCRVFKKKNQSRGFQQELEEEEHLTTHMRASGPCQVLEQKHLHMQGGPYDHYNFDGTMHLPQLFSPESAIAPPTNSSLALSMNAMDILECSQNLLRLTTTGCGLNLMQQQQEERFSGDWSFLDKLLASHHGMDQSKCNPPTNHHAATVVGTSAQKFPFHYLGCDTTHDIMKFSK

SEQ ID NO: 24685 - protein, 325 aa, Glycine max
MPGNGQLTVPPGFRFHPTDEELLYYYLRKKVSYEVIDLDVIREVDLNKLEPWDLKDKCRIGSGPQNEWYFFSHKDKKYPTGTRTNRATTAGFWKATGRDKSIYHTNSKRIGMRKTLVFYTGRAPHGQKTDWIMHEYRLDEDDADVQEDGWVVCRVFKKKNQSRGFQQELEEEEHLTTHMRASGPCQVLEQKHLHMQGGPYDHYNFDGTMHLPQLFSPESAIAPPTNSSLALSMNAMDILECSQNLLRLTTTGCGLNLMQQQQEERFSGDWSFLDKLLASHHGMDQSKCNPPTNHHAATVVGTSAQKFPFHYLGCDTTHDIMKFSK

SEQ ID NO: 24686 - protein, 214 aa, Glycine max
MRKTLVFYTGRAPHGQKTDWIMHEYRLDEDDADVQEDGWVVCRVFKKKNQSRGFQQELEEEEHLTTHMRASGPCQVLEQKHLHMQGGPYDHYNFDGTMHLPQLFSPESAIAPPTNSSLALSMNAMDILECSQNLLRLTTTGCGLNLMQQQQEERFSGDWSFLDKLLASHHGMDQSKCNPPTNHHAATVVGTSAQKFPFHYLGCDTTHDIMKFSK

SEQ ID NO: 24687 - DNA, 1398 bp, Glycine max
ggacttgacacccagagtttcgtccaactcccaaaagttggaaggaaatgcgccaagcgtcttgatagcatttggggtgcttggtttttcttcagattctactttaagccagcgttggttgagaagtctaaggccaaggttgttagggacagcaatggtgttttggggtttgataaatccgatatcaagcttgatgttttcttggttcaacatgacatggaaaacatgtacatgtgggttttcaaggagaagccggacaatgctttgggtaagatgcaactgaggagttacatgaatgggcattcccgccaaggggagcgcccatttccgtttagtgccctccggggttttgttcgatcccaccggatgcaacggaagcattacaggggactttcaaatcctcaatgtgtgcatggcatcgaggttgttccatcgcccaatcttatgagtcttgataaggatgagcggagaaagtggattgaactcactggacgagatttgaacttcacaatcccacctgaagcaagtgacttcagttcatggaggaatcttcccaacagagaatttgagctcgagagaccacttcccctgatcaagagcactctgaatccacacccaaagaagctgcttaatggatctgtgttgaatttatcaactcatctgcctagcctcagtaatggtaatgggactgtcctgtcttctattagcagcaagaaaaggaaggacttttttctttatgggaaagatgaagaatgttgtttggctattaatcctccatctgatcggagtccagatttggtaatgcacccaagtgaatcacactggttgaatgacttcagaggggtgatgaagaatgtttgtggaccatttacagctgcaaaaactgtttatgaggacgaacaaggtttcttgatcattatcagtctgccattcgtggatcttcctagtgtgaaagtttcatggaggaacactgttactcatggtatcataaaggtttcttgtgtgagcatatcttgcaagccatttattaaaagaaacgataggacattcaagctttcagagccatcgtcagagcactgccctcctggtgagtttgttcgtgaaatcccactttcaactcgaattcctgaagatgccaatatagaagcgtactacgatgggccaggatctgtgcttgagataatggtgccaaaacttcttccaggagcagaatagcatgaagtttgtgtttgccttcggcctaatgtggggaatgaactcatgttgaattgagatagacattagttaggcacttttgaaaaatatatgggtatgattgccagcatggtcggttaatcatttgttttagtgactttgtaccatactgtgttttctataatacaaatgcattgtgttaac

SEQ ID NO: 24688 - protein, 404 aa, Glycine max
GLDTQSFVQLPKVGRKCAKRLDSIWGAWFFFRFYFKPALVEKSKAKVVRDSNGVLGFDKSDIKLDVFLVQHDMENMYMWVFKEKPDNALGKMQLRSYMNGHSRQGERPFPFSALRGFVRSHRMQRKHYRGLSNPQCVHGIEVVPSPNLMSLDKDERRKWIELTGRDLNFTIPPEASDFSSWRNLPNREFELERPLPLIKSTLNPHPKKLLNGSVLNLSTHLPSLSNGNGTVLSSISSKKRKDFFLYGKDEECCLAINPPSDRSPDLVMHPSESHWLNDFRGVMKNVCGPFTAAKTVYEDEQGFLIIISLPFVDLPSVKVSWRNTVTHGIIKVSCVSISCKPFIKRNDRTFKLSEPSSEHCPPGEFVREIPLSTRIPEDANIEAYYDGPGSVLEIMVPKLLPGAE

SEQ ID NO: 24689 - protein, 332 aa, Glycine max
MENMYMWVFKEKPDNALGKMQLRSYMNGHSRQGERPFPFSALRGFVRSHRMQRKHYRGLSNPQCVHGIEVVPSPNLMSLDKDERRKWIELTGRDLNFTIPPEASDFSSWRNLPNREFELERPLPLIKSTLNPHPKKLLNGSVLNLSTHLPSLSNGNGTVLSSISSKKRKDFFLYGKDEECCLAINPPSDRSPDLVMHPSESHWLNDFRGVMKNVCGPFTAAKTVYEDEQGFLIIISLPFVDLPSVKVSWRNTVTHGIIKVSCVSISCKPFIKRNDRTFKLSEPSSEHCPPGEFVREIPLSTRIPEDANIEAYYDGPGSVLEIMVPKLLPGAE

SEQ ID NO: 24690 - protein, 329 aa, Glycine max
MYMWVFKEKPDNALGKMQLRSYMNGHSRQGERPFPFSALRGFVRSHRMQRKHYRGLSNPQCVHGIEVVPSPNLMSLDKDERRKWIELTGRDLNFTIPPEASDFSSWRNLPNREFELERPLPLIKSTLNPHPKKLLNGSVLNLSTHLPSLSNGNGTVLSSISSKKRKDFFLYGKDEECCLAINPPSDRSPDLVMHPSESHWLNDFRGVMKNVCGPFTAAKTVYEDEQGFLIIISLPFVDLPSVKVSWRNTVTHGIIKVSCVSISCKPFIKRNDRTFKLSEPSSEHCPPGEFVREIPLSTRIPEDANIEAYYDGPGSVLEIMVPKLLPGAE

SEQ ID NO: 24691 - DNA, 1583 bp, Glycine max
aaaaagcagctctcagttgagtctgcttccctggcatctgcagcgaatgaaattcagttgctcaaggcgcaacttgaattggttgctaattgtgagagcgtgcaatctcaacatgcagaatcagcagacatggagctactaaaccttaagcagaacttgtcagaaactctttctcttgtggacgccttgaaaaaccaagtaagggattgcaaagagtctgaagctcaggcccaagcattggtcaatgaaactacggtgcaacttgaggccgcaaaaggaactgttgagttcctaagggctgatgttgcaagagctgttgatggctacaactccgttgctttagagttagaccagtctaaagctcgggtgaactcactagaggcacttgttagcaaaattgagaaagaccccatcaataataaatgcatcccttctgaaaatgttgcagatgaccataaatctgagcaccaacctgaaatattgaaagagggagaggatcctaatcagctggaagcagaagttgtttctttgaagtccgaggttgaacaattgagatctgctatagagactgctgagactaaataccaagaggaacagattcgaagcatggtgcagatcaggaatgcatatgagttagtagagcagataaaatctgaatcaggtaagagggaatgtgagctagaggctgagttgaaaaagaagaaagctgatattgaagagttgaaggctaacctaatggacaaggaaactgagttgcaaggcattgtggaggagaatgacaacttgaacctaaagcttgaagagagcatgtcatccaaaaatgagcacaaactcaaaagggaaattaaaagactagcagaatgtgtggcagaactgaaggcggatatgatggacaaggagacaacactgcaaagcatatctgaagagaacgaaatgctgaaatcggaaatcaacaacagtggcaaagcgagagaggaagttgctgctgaagtagagggagccaaggcggcagaacacgaggctctcatgaaacttgggattgtgatggaggaagcagataagagcaacaagaaggctgcaagagtggccgagcagctggaagcggcacaagctgcaaacttggaaatggaagctgaactgagaagactgaaggtgcagtctgatcagtggaggaaggctgcagaggcagctgctgctatgatttcaacagggaacaacaatgggaggctcacagagagaactgtgtctttggataacaacaactatatgtgctcaccctatgctgaagacatggatgatgatttccagaggaagaaaaatggcaacatgctgaagaagattggagtcttgtggaagaagcctcaaaaatagttgtgatgatgtctgatttatgaagtgttctgaaattgtagtccaataaatagtgtgttcatgtcatgtttattactatgtcttttgcaattgtctgacccctacattaccctctgcactgcactgtaaatcctgcccctatctgaaactgtttgtgaactgtacttgaaacattggcgtttaattattgaatgaactaagctcttaacatg

SEQ ID NO: 24692 - protein, 456 aa, Glycine max
KKQLSVESASLASAANEIQLLKAQLELVANCESVQSQHAESADMELLNLKQNLSETLSLVDALKNQVRDCKESEAQAQALVNETTVQLEAAKGTVEFLRADVARAVDGYNSVALELDQSKARVNSLEALVSKIEKDPINNKCIPSENVADDHKSEHQPEILKEGEDPNQLEAEVVSLKSEVEQLRSAIETAETKYQEEQIRSMVQIRNAYELVEQIKSESGKRECELEAELKKKKADIEELKANLMDKETELQGIVEENDNLNLKLEESMSSKNEHKLKREIKRLAECVAELKADMMDKETTLQSISEENEMLKSEINNSGKAREEVAAEVEGAKAAEHEALMKLGIVMEEADKSNKKAARVAEQLEAAQAANLEMEAELRRLKVQSDQWRKAAEAAAAMISTGNNNGRLTERTVSLDNNNYMCSPYAEDMDDDFQRKKNGNMLKKIGVLWKKPQK

SEQ ID NO: 24693 - protein, 413 aa, Glycine max
MELLNLKQNLSETLSLVDALKNQVRDCKESEAQAQALVNETTVQLEAAKGTVEFLRADVARAVDGYNSVALELDQSKARVNSLEALVSKIEKDPINNKCIPSENVADDHKSEHQPEILKEGEDPNQLEAEVVSLKSEVEQLRSAIETAETKYQEEQIRSMVQIRNAYELVEQIKSESGKRECELEAELKKKKADIEELKANLMDKETELQGIVEENDNLNLKLEESMSSKNEHKLKREIKRLAECVAELKADMMDKETTLQSISEENEMLKSEINNSGKAREEVAAEVEGAKAAEHEALMKLGIVMEEADKSNKKAARVAEQLEAAQAANLEMEAELRRLKVQSDQWRKAAEAAAAMISTGNNNGRLTERTVSLDNNNYMCSPYAEDMDDDFQRKKNGNMLKKIGVLWKKPQK

SEQ ID NO: 24694 - protein, 254 aa, Glycine max
MVQIRNAYELVEQIKSESGKRECELEAELKKKKADIEELKANLMDKETELQGIVEENDNLNLKLEESMSSKNEHKLKREIKRLAECVAELKADMMDKETTLQSISEENEMLKSEINNSGKAREEVAAEVEGAKAAEHEALMKLGIVMEEADKSNKKAARVAEQLEAAQAANLEMEAELRRLKVQSDQWRKAAEAAAAMISTGNNNGRLTERTVSLDNNNYMCSPYAEDMDDDFQRKKNGNMLKKIGVLWKKPQK

SEQ ID NO: 24695 - DNA, 1323 bp, Glycine max
acagagaccttaaacctgagaactttctcttcatcaatcagcacgaggattcacttctcaaaaccattgactttggattatctgtcttctttaagccaggtgatatatttaatgatgtggtgggcagcccatactatgttgcccctgaagttttgcgaaagcgttatggtcctgaggcagatgtttggagtgctggtgttatcctttacattcttttgagtggagtacctccattttgggctgaaaatgaacaaggaatatttgaacaagttctgcgtggtgatcttgacttttcttctgatccctggccttcaatttctgaaagtgcaaaagatttagtaaggaaaatgcttgttcgcgaccctagaaggcggctgactgcacatcaagtattatgtcatccttggattcaagttgatggtgtagctcctgacaaaccacttgattctgctgtattaagtcgcttaaagcaattttctgctatgaacaagctcaagaaaatggcccttataattatcgcagagagcttatctgaagaagaaatagctggcttaaaagaaatgttcaagatgatagatgcagacaacagtggtcaaatcacttttgaagaacttaaagctggtttgaaaagagtgggtgctaatcttaaggagtctgaaatttatgatttaatgcaagcggctgatgttgataacagtgggacaattgattacggcgagttccttgctgcaacattgcaccgcaacaaaattgaaagagaagataatctatttgcagccttttcttactttgataaagatggaagtggctatattactcaggaagaacttcaacaggcttgtgatgagtttggcataaaagatgtccgcctggaggagataatcaaggaaattgatgaagacaatgatggacgcatagattacaatgagtttgtggctatgatgcagaagggaaatcttccagcggttggtaagaagggcctagaaaatagcttcagcattaaattcagggaagcattaaaattgtagtgttcattgtcagcattgagattttttttttgtgttctttattaccacacatccctccttttcactttgaaggttcaagattttttattcattgtgcaaagtgtttgcatggggatttaggtgggccttttcatctttgcatttattttgtttgtccaatttaaatggatttttgtaattacgagaatatattgaaaagagatatctggtggagtattactgttagaaaggaaattgattatttgtcaatggaattgacacataataatgcaaacacctgaaatgatggtttaac

SEQ ID NO: 24696 - protein, 341 aa, Glycine max
RDLKPENFLFINQHEDSLLKTIDFGLSVFFKPGDIFNDVVGSPYYVAPEVLRKRYGPEADVWSAGVILYILLSGVPPFWAENEQGIFEQVLRGDLDFSSDPWPSISESAKDLVRKMLVRDPRRRLTAHQVLCHPWIQVDGVAPDKPLDSAVLSRLKQFSAMNKLKKMALIIIAESLSEEEIAGLKEMFKMIDADNSGQITFEELKAGLKRVGANLKESEIYDLMQAADVDNSGTIDYGEFLAATLHRNKIEREDNLFAAFSYFDKDGSGYITQEELQQACDEFGIKDVRLEEIIKEIDEDNDGRIDYNEFVAMMQKGNLPAVGKKGLENSFSIKFREALKL

SEQ ID NO: 24697 - protein, 226 aa, Glycine max
MLVRDPRRRLTAHQVLCHPWIQVDGVAPDKPLDSAVLSRLKQFSAMNKLKKMALIIIAESLSEEEIAGLKEMFKMIDADNSGQITFEELKAGLKRVGANLKESEIYDLMQAADVDNSGTIDYGEFLAATLHRNKIEREDNLFAAFSYFDKDGSGYITQEELQQACDEFGIKDVRLEEIIKEIDEDNDGRIDYNEFVAMMQKGNLPAVGKKGLENSFSIKFREALKL

SEQ ID NO: 24698 - protein, 181 aa, Glycine max
MNKLKKMALIIIAESLSEEEIAGLKEMFKMIDADNSGQITFEELKAGLKRVGANLKESEIYDLMQAADVDNSGTIDYGEFLAATLHRNKIEREDNLFAAFSYFDKDGSGYITQEELQQACDEFGIKDVRLEEIIKEIDEDNDGRIDYNEFVAMMQKGNLPAVGKKGLENSFSIKFREALKL

SEQ ID NO: 24699 - DNA, 1522 bp, Glycine max
gttttcattcaccgccgcattttgttcttgttgttgctctttcaacaggaaactcctccttcaacagattatgagtgcggttcattactcttgaagcaaggtttggtgggggggaataagatcatgcctggcattctctcaaggctgaatgcaaccatttactgtcgcattcgggaagcaataacaaggcaacaaggagtgccgacatccttgtacagaagttcagctttgcctctttgttcgctcacttcaagtcacacacttcacacaaaatcaatgattactgcctcacattccaatgctatgctgggagatgtttatgcttatggcttaatctcaggtcgtggtagtgtgcgagacttcacaaagcctgctgtaggttgcttgaggggtagtgtgaatctaaggagactacaaccattgtatggtcctttgagttttgggtgttctacttttgatgctaataggaggatccgggattcgagtttgctgcatggatcatggctcaagaatttctcagcctcttcttctgcttgctactcagccggggctgcacatgctgtctcatttgatggaagccctcctgatgaacagcttgcaaattcctctttttcgcctgacccaactattgttggtggtaagcccttgaagatgttgtcaggatcttgttacctaccacatccagataaggaggagacaggaggagaggatgctcattttatttgcacggatgaacaagcaattggtgttgctgatggtgtaggtggctgggcggatgttggcgttaatgcaggactgtttgcacaggaacttatatccaatttagtgagagcaattcaaaaggagcctaaaggttcttttaatctgacaagagtgttaagggaagctcacgcaaatacaaaggtcaagggttcatcaacagcttgtattgttgctcttactgacaagggactacattctattaatttgggtgacagtggattcattgtggttagagatggatgcaccattttcgagtccccttctcaacagcatgacttcaatttcccatatcagttggagagtgggaatggcgctgatctacccagctctggtgaggtttttaccatacccgttgcttcaggagatgtggtcatttctggaacagatggtttatttgacaatttgtacaacagtgagatcactggagttgttgaacatgcaattagggctggactagagccccaagtaactgctcagaagatagcagcactggctcgtcagcgagcactgtccaagagtagtcggacaccattttctaccctgctgaaaaagctggattctgttattatggtggcaaacttgatgacataactgttgttgtctcatacatatcaggttcagtgagtgagtgagtctcatttttgttctacatgtttgaactggtggaagagaatgaaatgtaacgatattatggtccattttttttggattggtataacgaagatgagatataatggaaactagtagtgaaatttattct

SEQ ID NO: 24700 - protein, 450 aa, Glycine max
VFIHRRILFLLLLFQQETPPSTDYECGSLLLKQGLVGGNKIMPGILSRLNATIYCRIREAITRQQGVPTSLYRSSALPLCSLTSSHTLHTKSMITASHSNAMLGDVYAYGLISGRGSVRDFTKPAVGCLRGSVNLRRLQPLYGPLSFGCSTFDANRRIRDSSLLHGSWLKNFSASSSACYSAGAAHAVSFDGSPPDEQLANSSFSPDPTIVGGKPLKMLSGSCYLPHPDKEETGGEDAHFICTDEQAIGVADGVGGWADVGVNAGLFAQELISNLVRAIQKEPKGSFNLTRVLREAHANTKVKGSSTACIVALTDKGLHSINLGDSGFIVVRDGCTIFESPSQQHDFNFPYQLESGNGADLPSSGEVFTIPVASGDVVISGTDGLFDNLYNSEITGVVEHAIRAGLEPQVTAQKIAALARQRALSKSSRTPFSTLLKKLDSVIMVANLMT

SEQ ID NO: 24701 - protein, 409 aa, Glycine max
MPGILSRLNATIYCRIREAITRQQGVPTSLYRSSALPLCSLTSSHTLHTKSMITASHSNAMLGDVYAYGLISGRGSVRDFTKPAVGCLRGSVNLRRLQPLYGPLSFGCSTFDANRRIRDSSLLHGSWLKNFSASSSACYSAGAAHAVSFDGSPPDEQLANSSFSPDPTIVGGKPLKMLSGSCYLPHPDKEETGGEDAHFICTDEQAIGVADGVGGWADVGVNAGLFAQELISNLVRAIQKEPKGSFNLTRVLREAHANTKVKGSSTACIVALTDKGLHSINLGDSGFIVVRDGCTIFESPSQQHDFNFPYQLESGNGADLPSSGEVFTIPVASGDVVISGTDGLFDNLYNSEITGVVEHAIRAGLEPQVTAQKIAALARQRALSKSSRTPFSTLLKKLDSVIMVANLMT

SEQ ID NO: 24702 - protein, 358 aa, Glycine max
MITASHSNAMLGDVYAYGLISGRGSVRDFTKPAVGCLRGSVNLRRLQPLYGPLSFGCSTFDANRRIRDSSLLHGSWLKNFSASSSACYSAGAAHAVSFDGSPPDEQLANSSFSPDPTIVGGKPLKMLSGSCYLPHPDKEETGGEDAHFICTDEQAIGVADGVGGWADVGVNAGLFAQELISNLVRAIQKEPKGSFNLTRVLREAHANTKVKGSSTACIVALTDKGLHSINLGDSGFIVVRDGCTIFESPSQQHDFNFPYQLESGNGADLPSSGEVFTIPVASGDVVISGTDGLFDNLYNSEITGVVEHAIRAGLEPQVTAQKIAALARQRALSKSSRTPFSTLLKKLDSVIMVANLMT

SEQ ID NO: 24703 - DNA, 1499 bp, Glycine max
atcgtatcaaaaatatggttgcgtgtgatatgcagtccttcatttcgtcaatgctacttgaggcaatggggacaaagttttcgacttttgggtttttttgtttgcaactttttatatcttggaagacctcgtgatggctatcgtcgccctcgttgggagcctgcgctcccaatcttgtccacttgcaaagatggtgatgatttgaaactttctggaatcctcaaacatcttgggtacttcattgatagttccaaaggaattattctttctggtttccatccaaagacatattatgtgtacaatactgtgaccaagcaaaagtatgaactcccagaacctcagcagttctataaagttctgtgcatggcattgattgttgaggaatatcttgatagtgacatatgctacaaggtgatccgtgcaagatgtgaatgcaaacttaaggaacgcaacactgtctcaattgagacttattcatcaaaaactagacaatggaagcaatccactctgatgtgctccacaacttttgcattgtgcccaaggacggcagctatggtggttggaggggttgtacactggtttgcaatgtggggaaaacttgccatttatgatcctcgtcttggagacaggtatatagccttgattaaactaccaacaggtgtgttaacacatgagcatgaggaatctgttcttggggagtcatctgatgggcttttgcagtatggccagagcaataatttgggcctggagatatggatacttgagaaggaatcaggagccaactcatctatttactgcaactgcactcatctgaagtacaagtggattctgaggtggagattaaactttaaagtattatggaagcagatgccgtctttaagcacacattctaaagaaacccagatattgtcattccttcctcagaattctacttctatcttcattaggtcggggtggaatattttgctgtgtgatttggagaccaaaacggtggaaattgtcaattatcagggtcgtggaggaaccatttcatgggaatctagcaaagtagttccttactttctaccagcttggccacacacttcctcggtgtcggtgtcatgacaacatggaacaagggaaaacttgtcgtttttcaatctagaggcacttggtcttttccattctgtttttgatctggatatgatgaaaattaagggtctgttttattttctgtgttcacttttaattacaatcttgttttcaatctaaaagttgttttcactagtttctattcaaatctttgaaaacaggaaatagattgaaaacaaggtataattaaaagtaaaaaccaaaaacattttgtcaaagtaaacggaccctaagcttttagcttctttgttctgttttgaatagccatagtattagtaggaccttcatttctcttacagtttcagtggtgtactgtacatgcctagaggttgctgtgttatcaaaacactgaaaaatattactcttct

SEQ ID NO: 24704 - protein, 367 aa, Glycine max
IVSKIWLRVICSPSFRQCYLRQWGQSFRLLGFFVCNFLYLGRPRDGYRRPRWEPALPILSTCKDGDDLKLSGILKHLGYFIDSSKGIILSGFHPKTYYVYNTVTKQKYELPEPQQFYKVLCMALIVEEYLDSDICYKVIRARCECKLKERNTVSIETYSSKTRQWKQSTLMCSTTFALCPRTAAMVVGGVVHWFAMWGKLAIYDPRLGDRYIALIKLPTGVLTHEHEESVLGESSDGLLQYGQSNNLGLEIWILEKESGANSSIYCNCTHLKYKWILRWRLNFKVLWKQMPSLSTHSKETQILSFLPQNSTSIFIRSGWNILLCDLETKTVEIVNYQGRGGTISWESSKVVPYFLPAWPHTSSVSVS

SEQ ID NO: 24705 - protein, 246 aa, Glycine max
MALIVEEYLDSDICYKVIRARCECKLKERNTVSIETYSSKTRQWKQSTLMCSTTFALCPRTAAMVVGGVVHWFAMWGKLAIYDPRLGDRYIALIKLPTGVLTHEHEESVLGESSDGLLQYGQSNNLGLEIWILEKESGANSSIYCNCTHLKYKWILRWRLNFKVLWKQMPSLSTHSKETQILSFLPQNSTSIFIRSGWNILLCDLETKTVEIVNYQGRGGTISWESSKVVPYFLPAWPHTSSVSVS

SEQ ID NO: 24706 - protein, 197 aa, Glycine max
MCSTTFALCPRTAAMVVGGVVHWFAMWGKLAIYDPRLGDRYIALIKLPTGVLTHEHEESVLGESSDGLLQYGQSNNLGLEIWILEKESGANSSIYCNCTHLKYKWILRWRLNFKVLWKQMPSLSTHSKETQILSFLPQNSTSIFIRSGWNILLCDLETKTVEIVNYQGRGGTISWESSKVVPYFLPAWPHTSSVSVS

SEQ ID NO: 24707 - DNA, 1295 bp, Glycine max
atccattttctataacctccgcccctggtgatgattaccttagcgttcatatcagaacacttggtgattggacccggagtctcaaagtcaagttctcagagtgttgccagccaccggacaacggcaagagtggacttctaagagctgaatacttgcaaggagatagaagtccgagtgctctccctaaagttctaattgatggtccgtacggagcaccagcccaagactacaagcaatatgaggtggttttgctagtggggctaggaattggagccaccccaatgattagtatacttaaggacatagtgaataacatgaaagccatggaagaggaagaggagaccaacatagaggaaggaacaaatagtgggtttggtaataaatcaccaagagggtcgtccccacacaagaaaaatagctcgagcaacttcaacactaggagggcctacttctattgggtgacaagggagcaagggtcctttgattggttcaaaggggtgatgaatgaggtggctgaagaggatcataagggggtgattgagctccacaactattgcactagtgtctatgaagagggtgatgctcgctcagctcttattgctatgttgcaatctctaaaccatgccaagaatggcgtggacattgtctctggcacgcgtgtaaagtcccactttgctaaacctaattggcgcgctgtctacaagcgcattgcggttagtcatccacgagctcgtgttggggtattttactgtgggccaccagcgctaaccaaagagcttggtcagttagcttcggatttctctcacaacacaaacacgaaatatgatttccacaaggaaaatttctaataagatggagattgttgagggcaagatggtcttccagctttatatcacaccatgaagattattacaccatatccttgttgataataattaatccatgtgtttcaatgtaggaataataattacggatttgtataattgcgaaagctttgctttaaggttaaaatggttgtttgtgggctaccagataccaaaggtgtgattggatggcaacggcatcagttccaaaagtgaatcacgagatgatgtgcaatgcgagtagcagaagattacatacttaaacatttcgtggaggggaataatttttccaaccggaaataggtggcagcacttacattacatgaacctcataagaattagtccaggtgcatcatggactctacaaggttgattgtgtttaaatattaagcgatcgatgttatggaaatgaagacctataaccattgtagc

SEQ ID NO: 24708 - protein, 281 aa, Glycine max
PFSITSAPGDDYLSVHIRTLGDWTRSLKVKFSECCQPPDNGKSGLLRAEYLQGDRSPSALPKVLIDGPYGAPAQDYKQYEVVLLVGLGIGATPMISILKDIVNNMKAMEEEEETNIEEGTNSGFGNKSPRGSSPHKKNSSSNFNTRRAYFYWVTREQGSFDWFKGVMNEVAEEDHKGVIELHNYCTSVYEEGDARSALIAMLQSLNHAKNGVDIVSGTRVKSHFAKPNWRAVYKRIAVSHPRARVGVFYCGPPALTKELGQLASDFSHNTNTKYDFHKENF

SEQ ID NO: 24709 - protein, 188 aa, Glycine max
MISILKDIVNNMKAMEEEEETNIEEGTNSGFGNKSPRGSSPHKKNSSSNFNTRRAYFYWVTREQGSFDWFKGVMNEVAEEDHKGVIELHNYCTSVYEEGDARSALIAMLQSLNHAKNGVDIVSGTRVKSHFAKPNWRAVYKRIAVSHPRARVGVFYCGPPALTKELGQLASDFSHNTNTKYDFHKENF

SEQ ID NO: 24710 - protein, 177 aa, Glycine max
MKAMEEEEETNIEEGTNSGFGNKSPRGSSPHKKNSSSNFNTRRAYFYWVTREQGSFDWFKGVMNEVAEEDHKGVIELHNYCTSVYEEGDARSALIAMLQSLNHAKNGVDIVSGTRVKSHFAKPNWRAVYKRIAVSHPRARVGVFYCGPPALTKELGQLASDFSHNTNTKYDFHKENF

SEQ ID NO: 24711 - DNA, 1531 bp, Glycine max
atcatatcatatattcatattcatctccccacgagattctggttctgtttaggccacccacacacctccatttccccaactcgctccgagtttactcactcctttccctttcgagatcaaccgccaccgctacgcctccgcgctccgccgccactgcaatccccgcctcccttctccgtcaatgcaaaattcggcgtcgattctcgccggaaccttctcccgctcttccttcccctccgggctttgacttttgctttcttgcgattgcgatgagtccctttcgccctttgttgctcttcgccgccgtattcttcctcctccgtcccctcgccgccaccgacggcgacgccgatccgctttacataggttgtgtggagcagtgtaagaaaactggatgtgtaggggatagatactttcaacattgtaaattttcatcagatggaaaaccaattgatggtccatggtatatgcatgaacccctctatctgaggtggaaacaatgggactgttgcactgactgtaggtattactgtatgctagctagagaggaagaacgaacaaaacttggcgacaagcctgtcaagtatcatggaaaatggccattccgtcgcgtttatggaattcaggaacctgtggctgttgctctgtctgccgtcaatcttgctatgcagtttcatggttgggtatcctttttcattcttgtgtactataagttgactttgaggccagataagaagacttactatgagtacactggattgtggcatatttatgggattttatccatgaacgcatggctgtggagtgctgttttccatagtagagccgtggaattaacagagaagctggatttttcttctgctgtggcattacttggattcagcctcattctagcaatattgcgagcttttaacgtgagggatgaggctacgcgagtcatgatttctgctcccttgattgcttttgtgacaactcatatcatgtatctgaatttctatgaacttgcttatggtttgaacagaatagtttgcacgggaatggttgttgtccagcttcttatttgggccatttgggctggtgcttcgaaccacccggcgcgatggaaattatgggcagtagtggttggaggaggcttagctatggtgttggagacatatgactttccaccttacatgggatatgtggatgctcatgctctatggcatgcaacaagcattcctctcacatttttttggtggggttttataagggatgatgctgagtttagaaccacagctatgctcaagaaggtaaaatagtgctgcagacacaatttggcagaggttggatctgatgaagaacatgtcatatatgttgctgcttactttgtttttgtacatcagaactttttttttttttttaatttgttttcctcgtgtaggcgtttatttgaaatgcttaacacgatggtttctgtgcttttgattttgtaactttttgttttcctcatgtatgaagcatactttcttagtggaattaattgcaatgcttt

SEQ ID NO: 24712 - protein, 431 aa, Glycine max
HIIYSYSSPHEILVLFRPPTHLHFPNSLRVYSLLSLSRSTATATPPRSAATAIPASLLRQCKIRRRFSPEPSPALPSPPGFDFCFLAIAMSPFRPLLLFAAVFFLLRPLAATDGDADPLYIGCVEQCKKTGCVGDRYFQHCKFSSDGKPIDGPWYMHEPLYLRWKQWDCCTDCRYYCMLAREEERTKLGDKPVKYHGKWPFRRVYGIQEPVAVALSAVNLAMQFHGWVSFFILVYYKLTLRPDKKTYYEYTGLWHIYGILSMNAWLWSAVFHSRAVELTEKLDFSSAVALLGFSLILAILRAFNVRDEATRVMISAPLIAFVTTHIMYLNFYELAYGLNRIVCTGMVVVQLLIWAIWAGASNHPARWKLWAVVVGGGLAMVLETYDFPPYMGYVDAHALWHATSIPLTFFWWGFIRDDAEFRTTAMLKKVK

SEQ ID NO: 24713 - protein, 342 aa, Glycine max
MSPFRPLLLFAAVFFLLRPLAATDGDADPLYIGCVEQCKKTGCVGDRYFQHCKFSSDGKPIDGPWYMHEPLYLRWKQWDCCTDCRYYCMLAREEERTKLGDKPVKYHGKWPFRRVYGIQEPVAVALSAVNLAMQFHGWVSFFILVYYKLTLRPDKKTYYEYTGLWHIYGILSMNAWLWSAVFHSRAVELTEKLDFSSAVALLGFSLILAILRAFNVRDEATRVMISAPLIAFVTTHIMYLNFYELAYGLNRIVCTGMVVVQLLIWAIWAGASNHPARWKLWAVVVGGGLAMVLETYDFPPYMGYVDAHALWHATSIPLTFFWWGFIRDDAEFRTTAMLKKVK

SEQ ID NO: 24714 - protein, 276 aa, Glycine max
MHEPLYLRWKQWDCCTDCRYYCMLAREEERTKLGDKPVKYHGKWPFRRVYGIQEPVAVALSAVNLAMQFHGWVSFFILVYYKLTLRPDKKTYYEYTGLWHIYGILSMNAWLWSAVFHSRAVELTEKLDFSSAVALLGFSLILAILRAFNVRDEATRVMISAPLIAFVTTHIMYLNFYELAYGLNRIVCTGMVVVQLLIWAIWAGASNHPARWKLWAVVVGGGLAMVLETYDFPPYMGYVDAHALWHATSIPLTFFWWGFIRDDAEFRTTAMLKKVK

SEQ ID NO: 24715 - DNA, 854 bp, Glycine max
tccctttggttcccgtatcagtatcaaagtccaggacgatgtcgtttgggtcctctctgttgtctcattcgcatgcccttcgattcttgtccaacaacaacagaaacagaacctcccgcttcaaagccactgccaaagttcccgatttcctctctgcagattggtttgaatcgcgcaagaaaataccctttggaccacgattagattttagtgcagaagatgcggtgcattaccagcttgaagccttgaagtataatgaccagcctcgtccagactatggaatcgaggttatgtacaggtttgctggatttgatccctttgaaaggtctccctattttggccctttctttgatttgggccagtttgaacggtttaggcgaatttttcaccattctacttatcgggtcttactaggtcacaaggagagaaagatcatgagcactttgttcgtcgaggagaacaaatacaagcagcgggtttggattcgtggaagtcgaccagaggaagaggagatatttcaacttacaatggtttagaaggttggaggatgctgggatggttactggttaacagagtctctgcttcacgatacggatacatttgccggtggattagcatattgaaagtcatctaatgcaggaatcaggctcgtgaggttccactgtcaaaagcatgaaatgatctgcattcctgcaactactatcctaatctgtaaaatttgtgtacatatgtaagaaattcagctgttaatatgtgtatataattggtcctcgctaatcaaatgtaaacattcttgtatattttgctgaatgttgcaggagctagcatactttaatgcttatgctcacatctgt

SEQ ID NO: 24716 - protein, 177 aa, Glycine max
PLVPVSVSKSRTMSFGSSLLSHSHALRFLSNNNRNRTSRFKATAKVPDFLSADWFESRKKIPFGPRLDFSAEDAVHYQLEALKYNDQPRPDYGIEVMYRFAGFDPFERSPYFGPFFDLGQFERFRRIFHHSTYRVLLGHKERKIMSTLFVEENKYKQRVWIRGSRPEEEEIFQLTMV

SEQ ID NO: 24717 - protein, 165 aa, Glycine max
MSFGSSLLSHSHALRFLSNNNRNRTSRFKATAKVPDFLSADWFESRKKIPFGPRLDFSAEDAVHYQLEALKYNDQPRPDYGIEVMYRFAGFDPFERSPYFGPFFDLGQFERFRRIFHHSTYRVLLGHKERKIMSTLFVEENKYKQRVWIRGSRPEEEEIFQLTMV

SEQ ID NO: 24718 - DNA, 1240 bp, Glycine max
aaaaaacacacaattcacaaaggcattcgacggagaatagaaaagaagcggaagaggaagcagcaggtgaagcgcgacggagagccaaagcccaaatcggttcgtgcgggttcaacccgaaccgacaatgtgaaagatccatttccatctcatgctcgacccaccccacatgaatgcgaagccgtgcgtgacactctcttagccctacacggcattcccccggaactcgccaagtaccgcaaactcccaccgtccgatgacccggtccaactgcagccacccgaaccggttctcgacggtcttgtccgaaccgtcctctcgcagaacaccaccgaggccaattcccaaaaggctttcgcttccctcaaatcctcctttcccagttgggaactagttctctgtgccgagtccaaggacgtggagaatgccattcggtgcggaggtctagctccgactaaggcttcctgcattaagaacgtgttgcgttgtttgcgcgagagaagaggtgaattgtgtttggagtatttgcgggacttgtcagttgatgaagttaaggctgagctttctcttttcaaaggaattggtcccaaaacggtggcttgtgtgttgatgttcaatcttcagcaagatgattttcctgtggacactcacgtaagcatgatttcatcttttactgcatttgactccattgagctatttatagcacttgaatgtttatgcagatatttgagattgcaaaaaccatgggttgggtaccagctgttgcaaacagaaataagtcatatcttcatctaaaccaaagggtaccaaatgaacttaagtttgacctgaattgtcttctgtatacgcacgggaagctttgccaccaatgctccggtaaaaagggtaacaagcaaggaaagaaatgtgacgataactcctgtcctttattgaattatgataaagactcagttgaactttgagctggggaagcaaattatttttcaattatttgtttctctaactaaatgaagtcaataggggcactctaatcttgtaagttgtaagtgtatagaatactactagtatagagttaggctgttaggcaggagaaccaattttgagattagatgaaagaaaggtcaacaattgtgagctagtgcatcaagcacttgtagggtttgggttgcctaaaaattgcccatctttaattaattctgtaaagggatcttgctggaaatggaacattatgtttatttct

SEQ ID NO: 24719 - protein, 264 aa, Glycine max
KKHTIHKGIRRRIEKKRKRKQQVKRDGEPKPKSVRAGSTRTDNVKDPFPSHARPTPHECEAVRDTLLALHGIPPELAKYRKLPPSDDPVQLQPPEPVLDGLVRTVLSQNTTEANSQKAFASLKSSFPSWELVLCAESKDVENAIRCGGLAPTKASCIKNVLRCLRERRGELCLEYLRDLSVDEVKAELSLFKGIGPKTVACVLMFNLQQDDFPVDTHVSMISSFTAFDSIELFIALECLCRYLRLQKPWVGYQLLQTEISHIFI

SEQ ID NO: 24720 - DNA, 1364 bp, Glycine max
actgcaattctccattcatccatccacggcaccaccatgcttcttcttctttacctctcccttctgtgttcccttccccacattgcattgtcatcccattgcaccgtggaaaccgccacgaaaacgtttaaaaaatgcatgaacctcccaacccagcaagcctccatagcgtggacattccaccctcacaactcaaccttagaactagtcttctttggaagcttcatatcaccttctgggtgggttggatggggcatcaatcccacatcacccgaaatgaccggaacacgtgccttaataaccttcccggacccaaactcaggccaaatagtgcttctaccgtatattcttgaccccacagtgaagcttcaaaaatctccactactctctcgcccactcgacatccacctcctctcctccaccgccactatgtacggcggaaaaatggccaccgtgcacaacggtgcagccatccaaatcttgggcacggtgaagctgcaaacgaacaagaccaagattcacctcgtttggaacagggggctgtacgttcagggctactctcccaccattcatccaactacttccaccgatctgtcttccattgttacctttgacgtattgtcgggttcgtcggctccacagcacacggatctcacgacgttgagagtgatccatggcaccgttaacgccatatcgtggggcattttgttaccaatgggagccatcaccgcacgctaccttaggcacattcaagcactcggccctgcatggttctatgctcatgcaggaatgcaagtgtttggtttcgttctgggaacagtgggggtttgtgatcggaatcaggctggggcaactgtcgccgggagtggagtataggctccaccggaagcttggaatggcggtgttttgtctggggggtctgcagactctggccttgttatttaggccaaacacaaggaacaagttcagaaaatactggaagtcctaccatcactttgtagggtactcgtgtgtggtccttggctttgtgaatgtctttcagggatttgaggttatgggggcaagcagatcttacgccaagttgacttactgcttaggtctctccactctcattgggctttgcattgctttggaggtcaactcttgggttgtcttctgtaggaaatccaaggaagacaagatgaggagagagggactcattggaacttcccacaaacccatccacaattaacattcatcattattcttattatatattattacatttcattcctctttaatttctcttttactaatacattacattttctctccaattaatgccaaggtctgcaattatatataaagattaattttgtcgtttc

SEQ ID NO: 24721 - protein, 291 aa, Glycine max
TAILHSSIHGTTMLLLLYLSLLCSLPHIALSSHCTVETATKTFKKCMNLPTQQASIAWTFHPHNSTLELVFFGSFISPSGWVGWGINPTSPEMTGTRALITFPDPNSGQIVLLPYILDPTVKLQKSPLLSRPLDIHLLSSTATMYGGKMATVHNGAAIQILGTVKLQTNKTKIHLVWNRGLYVQGYSPTIHPTTSTDLSSIVTFDVLSGSSAPQHTDLTTLRVIHGTVNAISWGILLPMGAITARYLRHIQALGPAWFYAHAGMQVFGFVLGTVGVCDRNQAGATVAGSGV

SEQ ID NO: 24722 - protein, 279 aa, Glycine max
MLLLLYLSLLCSLPHIALSSHCTVETATKTFKKCMNLPTQQASIAWTFHPHNSTLELVFFGSFISPSGWVGWGINPTSPEMTGTRALITFPDPNSGQIVLLPYILDPTVKLQKSPLLSRPLDIHLLSSTATMYGGKMATVHNGAAIQILGTVKLQTNKTKIHLVWNRGLYVQGYSPTIHPTTSTDLSSIVTFDVLSGSSAPQHTDLTTLRVIHGTVNAISWGILLPMGAITARYLRHIQALGPAWFYAHAGMQVFGFVLGTVGVCDRNQAGATVAGSGV

SEQ ID NO: 24723 - protein, 245 aa, Glycine max
MNLPTQQASIAWTFHPHNSTLELVFFGSFISPSGWVGWGINPTSPEMTGTRALITFPDPNSGQIVLLPYILDPTVKLQKSPLLSRPLDIHLLSSTATMYGGKMATVHNGAAIQILGTVKLQTNKTKIHLVWNRGLYVQGYSPTIHPTTSTDLSSIVTFDVLSGSSAPQHTDLTTLRVIHGTVNAISWGILLPMGAITARYLRHIQALGPAWFYAHAGMQVFGFVLGTVGVCDRNQAGATVAGSGV

SEQ ID NO: 24724 - DNA, 1406 bp, Glycine max
ctctctctcaattgcattcccccttcccatttctgagaaggtgggagagaaaccccagagaaattcaatccacccctttctctgggtctgatcccatatctctctccagatttgctcgcccttttacttcaatttctcaaaaccggcacgcattcttttgtcttctaatttctggtggctgaatatcaaaaaccctagagagcactgttttggggctacgtttctgtttcggacggagaacgagaaaaggcgagggttttgcgcccgacccatttcgactggaaggccctagattcaaagggatcgtttgatttcattggataatcccccgacacgaaagggggtagttgcggagaaaccccctctgaaaactggaagccctaattgagagattcaaatcgttcttctaaatcgatggattcagcgttttcgcccttgagtttggttattttcggtatttcaattagcttttacgcatttattgtccaatcgcagacgcaaaatgggaacaatggcgctgaattagcaccaccggcgtattgggtgtcaagtccaccgctgcctccgcctcctccgccacctcctccgccgttgtcactgtctcctccgccgccaccctcaaaatctatgacactcagtttcgttcccccgccgggagcgccgccgccctatcctaacaatatgcccaacgtgagaagacctcctcaccgccgccgccgccaccgcagaccgcctccgccgccgccaccaccaccaccgcacaagatgaatgccggtaaaaaggttggacttttgtttgtgggcattgcggcaatcatgcaagttggcgtggttgggttcttggtaatcaagagaagacaacttttgaagagcgatgacagatacgagagttgttcttgaacgagattttccacggttttcttatcaaattctttttttattttaatttaatgggttgaaattctttgctgaacgaggtttggttcgaggaaggggaatattggttggattttgcagaatctggtgggaggaacatgaaaaaggcaagcatggaaagacatggagaatttgaggaatcattggaacatgaattgtgcaattgatgccatcatttcggcccctttggcgttactgtgtatattggtactgctagttcacgtttccttcacgtttcaagttgtgttgcccctttttcccttagttccattacattggctggcttataatggaaaagaaaaagtagccctcatgtacctttttatttattatttttttttttaatttgatttttctctaacatgttccgtgtacaatgatgttaggaatccttaaaggattaacaatgacacaatcttatattctttggcttttcacctcgaattgatgatgtcaggttcaatgttctc

SEQ ID NO: 24725 - protein, 161 aa, Glycine max
MDSAFSPLSLVIFGISISFYAFIVQSQTQNGNNGAELAPPAYWVSSPPLPPPPPPPPPPLSLSPPPPPSKSMTLSFVPPPGAPPPYPNNMPNVRRPPHRRRRHRRPPPPPPPPPPHKMNAGKKVGLLFVGIAAIMQVGVVGFLVIKRRQLLKSDDRYESCS

SEQ ID NO: 24726 - protein, 90 aa, Glycine max
MTLSFVPPPGAPPPYPNNMPNVRRPPHRRRRHRRPPPPPPPPPPHKMNAGKKVGLLFVGIAAIMQVGVVGFLVIKRRQLLKSDDRYESCS

SEQ ID NO: 24727 - DNA, 1393 bp, Glycine max
ttttttcccttaacgcaaactgtcatcttgtcattcaccgagaaagtcgtactgattcctcttcatctttcgttaaagcgagtacttttcgttcttgatctgttggttacgatgtcgtattcaaggagatctaggtattctccttctccttctccttctccatacaagcgatacggtaggtctgtgtccaggtctctctcaatgtcaagatccagaagccgttcaaggagtttatcaagagatgcagaaaatccaggaaacaatttgtatgtgacaggattgtctcctaggattaccaagagagaactggagaaacattttgctgctgaaggaaaagtgatagatgtccatctggtagttgatccttggacaagggaatcccgtgggtttggctttgtgacaatggagactcttgaggaggctgaacgatgtgtaaagtatctgaatcactctgtacttgaagggcgtgtcatcacggtggagaaggctaaaagacgacgtggtcgaaccccaacgccagggaggtatctaggactgagaactattcgtgctcgacgtcgctctccaagttactctcctcgtcgctctcctagctattctcccttcagaagaagctacagtcgctctccctattcttcagaccgaagtaggagtcgttcttactctcctgactatcagaggaggtcttactctccatatcactccaggcggaggtcttactctccattctatagccggtacaggtcctattctcgatatgatcgacacaggtcatattctcgatctcgctctccgtatagcaggtcacctgtcagcatgcgtgacagatcatactctccatatgaaatacgatatgactcgccggatgcgcactcctacagaaggcaccgttaccgatctgtttcacaaagtgcctcgcctgatgatcgttattatggaaggcaccgttacaggtctgtttctcggagtgcctcacccaggccaaggagaaggtcaaggaggagctactcacggagtgccacacctgtttcaaagagaagcaactcacgaaatgtgtcccccaggtcaaggaggagccattcaagaagctctaagaggagtggcaaatgtgagaaacgctactcaagaagctcgagtgtgaatgcaagttcaagatcagtatcgaggtcaaatactccaaggtctacctctccttcaacttgaaatttgttggtcctatatggcttaacatcttaggcttatagtggataatatattagtgtggtatatgtatgcagttctagatggagttttcgtttggttccgttcaggacttgtctaaaaaccacctgatcttatttcatgtagtatgggattgaaattatgttactcagtatagattatctaatttcgt

SEQ ID NO: 24728 - protein, 400 aa, Glycine max
FFPLTQTVILSFTEKVVLIPLHLSLKRVLFVLDLLVTMSYSRRSRYSPSPSPSPYKRYGRSVSRSLSMSRSRSRSRSLSRDAENPGNNLYVTGLSPRITKRELEKHFAAEGKVIDVHLVVDPWTRESRGFGFVTMETLEEAERCVKYLNHSVLEGRVITVEKAKRRRGRTPTPGRYLGLRTIRARRRSPSYSPRRSPSYSPFRRSYSRSPYSSDRSRSRSYSPDYQRRSYSPYHSRRRSYSPFYSRYRSYSRYDRHRSYSRSRSPYSRSPVSMRDRSYSPYEIRYDSPDAHSYRRHRYRSVSQSASPDDRYYGRHRYRSVSRSASPRPRRRSRRSYSRSATPVSKRSNSRNVSPRSRRSHSRSSKRSGKCEKRYSRSSSVNASSRSVSRSNTPRSTSPST

SEQ ID NO: 24729 - protein, 363 aa, Glycine max
MSYSRRSRYSPSPSPSPYKRYGRSVSRSLSMSRSRSRSRSLSRDAENPGNNLYVTGLSPRITKRELEKHFAAEGKVIDVHLVVDPWTRESRGFGFVTMETLEEAERCVKYLNHSVLEGRVITVEKAKRRRGRTPTPGRYLGLRTIRARRRSPSYSPRRSPSYSPFRRSYSRSPYSSDRSRSRSYSPDYQRRSYSPYHSRRRSYSPFYSRYRSYSRYDRHRSYSRSRSPYSRSPVSMRDRSYSPYEIRYDSPDAHSYRRHRYRSVSQSASPDDRYYGRHRYRSVSRSASPRPRRRSRRSYSRSATPVSKRSNSRNVSPRSRRSHSRSSKRSGKCEKRYSRSSSVNASSRSVSRSNTPRSTSPST

SEQ ID NO: 24730 - protein, 333 aa, Glycine max
MSRSRSRSRSLSRDAENPGNNLYVTGLSPRITKRELEKHFAAEGKVIDVHLVVDPWTRESRGFGFVTMETLEEAERCVKYLNHSVLEGRVITVEKAKRRRGRTPTPGRYLGLRTIRARRRSPSYSPRRSPSYSPFRRSYSRSPYSSDRSRSRSYSPDYQRRSYSPYHSRRRSYSPFYSRYRSYSRYDRHRSYSRSRSPYSRSPVSMRDRSYSPYEIRYDSPDAHSYRRHRYRSVSQSASPDDRYYGRHRYRSVSRSASPRPRRRSRRSYSRSATPVSKRSNSRNVSPRSRRSHSRSSKRSGKCEKRYSRSSSVNASSRSVSRSNTPRSTSPST

SEQ ID NO: 24731 - DNA, 1138 bp, Glycine max
ctgtccaacaaaaatctcgaccaatagctatattctctcatggctggagattaggtagagacaaaattgggcaagagatatggggtagtttttatgatgctttggggaatgaatttaatatccatctatcgagaatgagtttgatgtcagcactggaatggtggctggtataccatcccagcatccagaagttctcatggaagcctcctcacacccctttctcctcccctctcttccttagtctctccatcctcagctacctctccctcaccctcctcctcaccctcctccctctcccacccttcccacaccgcctcctgaagcccatcaccgccctccacaacctcctcctcctcctcctctccctcctcatgctcctgggctgctccctcaccctcctcatccacacccctcacctccgctgggccgtctgcttcccaccccacaccaatcccaccgggcccctcttcttctgggcctacatcttctacctctccaaaatcctcgaattcctcgacacgctcttcatcgtcctctcccgctccttccgacgcctctccttcctccacgtctaccaccacgccaccgtcctcctcatgtgctacctctggctccaaacctcccaatccctcttccccgtcgcgctcctcaccaatgcctccgtccacgtcatcatgtacggttactacttcctcagcgccctcggcatccgcccctcctggaagcgcgccgtcaccgactgccagatcatccagttcgtcttcagcttcgcaatttcgggtctcatgctccactaccacttctccggatccggatgctccgggatttggggctggtgcttcaatgcggtttttaatgcctctctcttggccctctttgttgattttcatctcaagagttatgctaagaaacgcactcttaataaggactcatgaattcctcgtccatttcattggtagcatactttatcttctgtaagacaagagaaaaaaaatattcattggaattcaatgacaatgttttttttttcctcctccttgttaaaggattattacaagataataatgccttacattacctgtcatctttattttctttcctttttccttaccattcaagggatgcaacttttaatccg

SEQ ID NO: 24732 - protein, 310 aa, Glycine max
VQQKSRPIAIFSHGWRLGRDKIGQEIWGSFYDALGNEFNIHLSRMSLMSALEWWLVYHPSIQKFSWKPPHTPFSSPLFLSLSILSYLSLTLLLTLLPLPPFPHRLLKPITALHNLLLLLLSLLMLLGCSLTLLIHTPHLRWAVCFPPHTNPTGPLFFWAYIFYLSKILEFLDTLFIVLSRSFRRLSFLHVYHHATVLLMCYLWLQTSQSLFPVALLTNASVHVIMYGYYFLSALGIRPSWKRAVTDCQIIQFVFSFAISGLMLHYHFSGSGCSGIWGWCFNAVFNASLLALFVDFHLKSYAKKRTLNKDS

SEQ ID NO: 24733 - protein, 266 aa, Glycine max
MSLMSALEWWLVYHPSIQKFSWKPPHTPFSSPLFLSLSILSYLSLTLLLTLLPLPPFPHRLLKPITALHNLLLLLLSLLMLLGCSLTLLIHTPHLRWAVCFPPHTNPTGPLFFWAYIFYLSKILEFLDTLFIVLSRSFRRLSFLHVYHHATVLLMCYLWLQTSQSLFPVALLTNASVHVIMYGYYFLSALGIRPSWKRAVTDCQIIQFVFSFAISGLMLHYHFSGSGCSGIWGWCFNAVFNASLLALFVDFHLKSYAKKRTLNKDS

SEQ ID NO: 24734 - protein, 263 aa, Glycine max
MSALEWWLVYHPSIQKFSWKPPHTPFSSPLFLSLSILSYLSLTLLLTLLPLPPFPHRLLKPITALHNLLLLLLSLLMLLGCSLTLLIHTPHLRWAVCFPPHTNPTGPLFFWAYIFYLSKILEFLDTLFIVLSRSFRRLSFLHVYHHATVLLMCYLWLQTSQSLFPVALLTNASVHVIMYGYYFLSALGIRPSWKRAVTDCQIIQFVFSFAISGLMLHYHFSGSGCSGIWGWCFNAVFNASLLALFVDFHLKSYAKKRTLNKDS

SEQ ID NO: 24735 - DNA, 1271 bp, Glycine max
gagttcctcaaagcattgccatacacctgctaccagaaggcaattgttcagggaaaatgatgtcgtgggcgtgtcgttcggaagagtcagagagccccaacaacctaatcccgtacctcccaaacgacgtcgcattgaactgcctagcacgcatccctcgttcccaccacccaaccctctcgcttgtgtcgaaaccaatccgaagcctcctctattcccctctcttgttcaccacgcgctccctcctccaatgcacccaacccctcctctacctcactctccgctcacgcgattcctccctccagtggttcacgctccaccgcacaaaccctaaccccctccttgctcctcttcctcccatcccctcccccgccgttggctccgcctacgccgtccttggccccaccatctacgtcctcggcggctccatccaagacgtcccctcctcccacgtctggctcctcgactgccgcttccaccgctggctccgtggtccccccatgcgcgtcgcccgcgagttcgccgccgccggcgtcctccacggcaagatctacgtcctcggaggctgcgtcgccgacacctggtcccgctccgccaactgggcagaggtccttgaccccgcctcgggccggtgggagagggtcgccagtccgacggaggtccgggagaagtggatgcacgccagcgccgtcgtcggggaccgaatctacgcgatggcggaccgcggcggcatcgctttcgagccacgcagctgcgcgtgggagagcgtggggggagaattggaccacgggtggaaggggagggcgtgcgtggtggagggaatcttatactgctacgactactggggaaaatcaaagggttcgatgtggggcgcggggtgtgggaggagctgaaggggttggagaatgctttgccgaggtttttgtgtggggccaccatggctgatttgggtgggaaactgtgcgtggtttgggagtgccaatgcaatgggaaggagatggagatttggtgcgcggagattggggtgaagaagaattcggatggggaattgtggggtcaacttggttggtttgggaaggttctttctgttcccaaaggctcttctattgtcaactgttcttctgtttccttgtgattgtgaccatgcatgcaagcattctttgattttgcattgaattgccgccacttcctgctctgatgtttgtatgtgaaactatgaataattaaataaacaggagctgctcaagcagtactacgcctggaagtgaacc

SEQ ID NO: 24736 - protein, 296 aa, Glycine max
VPQSIAIHLLPEGNCSGKMMSWACRSEESESPNNLIPYLPNDVALNCLARIPRSHHPTLSLVSKPIRSLLYSPLLFTTRSLLQCTQPLLYLTLRSRDSSLQWFTLHRTNPNPLLAPLPPIPSPAVGSAYAVLGPTIYVLGGSIQDVPSSHVWLLDCRFHRWLRGPPMRVAREFAAAGVLHGKIYVLGGCVADTWSRSANWAEVLDPASGRWERVASPTEVREKWMHASAVVGDRIYAMADRGGIAFEPRSCAWESVGGELDHGWKGRACVVEGILYCYDYWGKSKGSMWGAGCGRS

SEQ ID NO: 24737 - protein, 278 aa, Glycine max
MMSWACRSEESESPNNLIPYLPNDVALNCLARIPRSHHPTLSLVSKPIRSLLYSPLLFTTRSLLQCTQPLLYLTLRSRDSSLQWFTLHRTNPNPLLAPLPPIPSPAVGSAYAVLGPTIYVLGGSIQDVPSSHVWLLDCRFHRWLRGPPMRVAREFAAAGVLHGKIYVLGGCVADTWSRSANWAEVLDPASGRWERVASPTEVREKWMHASAVVGDRIYAMADRGGIAFEPRSCAWESVGGELDHGWKGRACVVEGILYCYDYWGKSKGSMWGAGCGRS

SEQ ID NO: 24738 - protein, 277 aa, Glycine max
MSWACRSEESESPNNLIPYLPNDVALNCLARIPRSHHPTLSLVSKPIRSLLYSPLLFTTRSLLQCTQPLLYLTLRSRDSSLQWFTLHRTNPNPLLAPLPPIPSPAVGSAYAVLGPTIYVLGGSIQDVPSSHVWLLDCRFHRWLRGPPMRVAREFAAAGVLHGKIYVLGGCVADTWSRSANWAEVLDPASGRWERVASPTEVREKWMHASAVVGDRIYAMADRGGIAFEPRSCAWESVGGELDHGWKGRACVVEGILYCYDYWGKSKGSMWGAGCGRS

SEQ ID NO: 24739 - DNA, 1476 bp, Glycine max
aagcaagtagagctgaaaacagtttaaattctgttgagcgtgtcgacacatacataaatttagaaactgaggctcccggtgtaattgagacacatcgtccaccaccaggatggccaacatcaggatcaattgagtttgaggatgttgttctgagataccggccagaacttcctccagtgttgcatggattgtcctttacagtacctccaactgagaagatagggatagttggaagaactggtgcaggaaaatctagcatgcttaacgcactattccggattgtggagctacaaaaaggaaaaatcattattgatggttgtgatatttctacattcggattagaagatgttcgaaaagttcttactatcataccacaatctccagttcttttctctggaactgttcgtttcaatcttgatccatttaatgaacacaatgatgctgacctatggcaagctttagaaagggcgcatttgaaggatgtaataagaagaaatacgtttggtctagatgctaaggtttcagagggaggagacaattttagtgttggacagaggcaactgttaagtctagctagagcattgctacgaagatcaaaggttcttgtcctggatgaagctactgctgctgtagatgttagaactgatgcacttatacagaaaactatcagacaagaatttcagtcctgcacaatgctcatcattgcacacagactaaatacaatcatcgactgcaatcagattctgctgctagatgctggccgggttcttgaatatagttcaccagaggagctcttacaaaacgaaggaactgctttctacaagatggttcaaagtactggacctgaaaatgctcagtatttatgtagcctagtatttggaaagacagagaataactctaatgaatataacaaggagttggaacaccatgtgagacaattagcttcttctcactggacttcttctactcagtttgccatagcttctaccctttcttcattacaccagcaccttcaagagccaagtagtgaagaaaataaagatatccttcataaaacaacggctgcagttacaacacttcaagaagttctagtggggaagcatgatgaagacatagaagagacactgtataaataccatattcctacagatagatggtggtctactctctataaagttattgaaggtctttctcttttgaagaggttgcctctagacaacattcaacaactagaacttgattttgaagggagatcttttgactaacatacatcttgaggggtgtgaagaagagtttgcaaatgcaattaaatcggagggatagccacaatatgacaagattctttagaattttccccctctttgttacaccagtttcctctctgtatgttttaatactttctcttatgctaatagggttaccaagtaatccatattcaatataattattttagcttccgccgggctaggttatttt

SEQ ID NO: 24740 - protein, 420 aa, Glycine max
ASRAENSLNSVERVDTYINLETEAPGVIETHRPPPGWPTSGSIEFEDVVLRYRPELPPVLHGLSFTVPPTEKIGIVGRTGAGKSSMLNALFRIVELQKGKIIIDGCDISTFGLEDVRKVLTIIPQSPVLFSGTVRFNLDPFNEHNDADLWQALERAHLKDVIRRNTFGLDAKVSEGGDNFSVGQRQLLSLARALLRRSKVLVLDEATAAVDVRTDALIQKTIRQEFQSCTMLIIAHRLNTIIDCNQILLLDAGRVLEYSSPEELLQNEGTAFYKMVQSTGPENAQYLCSLVFGKTENNSNEYNKELEHHVRQLASSHWTSSTQFAIASTLSSLHQHLQEPSSEENKDILHKTTAAVTTLQEVLVGKHDEDIEETLYKYHIPTDRWWSTLYKVIEGLSLLKRLPLDNIQQLELDFEGRSFD

SEQ ID NO: 24741 - protein, 335 aa, Glycine max
MLNALFRIVELQKGKIIIDGCDISTFGLEDVRKVLTIIPQSPVLFSGTVRFNLDPFNEHNDADLWQALERAHLKDVIRRNTFGLDAKVSEGGDNFSVGQRQLLSLARALLRRSKVLVLDEATAAVDVRTDALIQKTIRQEFQSCTMLIIAHRLNTIIDCNQILLLDAGRVLEYSSPEELLQNEGTAFYKMVQSTGPENAQYLCSLVFGKTENNSNEYNKELEHHVRQLASSHWTSSTQFAIASTLSSLHQHLQEPSSEENKDILHKTTAAVTTLQEVLVGKHDEDIEETLYKYHIPTDRWWSTLYKVIEGLSLLKRLPLDNIQQLELDFEGRSFD

SEQ ID NO: 24742 - DNA, 1311 bp, Glycine max
ttgacgaccaaaccaagtggaatacaacatatcagatgctggtggcagcttctgaactacaggaagtgttttcttgtttggacacttctgatcctgattacaagggtgccccatctatgcaggattggaagctggttgagaccctctgcacatacttgaagcccctttttgatgcagcaaacattcttaccacagcaactcatcccactgttattaccttcttccatgaagtttggaaattgcagttggatctgtctcgtgctgttgtgagtgaggatcctttcatcagcaaccttactaaacccatgcaacaaaagattgataagtactggaaagattgcagtttggttttggctattgcagtagttatggatcctcgtttcaagatgaagcttgttgagtttagtttcactaaaatctatggcgaggatgcccatgaatatgttaagattgttgatgatggaattcatgagctgtttcacgagtatgtagcccttcccctgccactaaccccggcttatgcagaagaaggaaatgctggaagtcacccgagggctggggaatctccaggaggaactctgatgccagataatggactaacagattttgatgtctacatcatggaaacatccagccatcaaatgaagtctgaactggaccagtatctggaagaatcactgttgccacgtgttccggactttgatgtattgggttggtggaagctaaacaaactcaagtaccctactctttccaagatggctcgggatatattgtctattccggtttcaagtgttcctcctgaatctgtctttgatacaaaagtcaaagagatggatcagtatagaagttccttgcggccagagacagtagaggccattgtatgtgcaaaagactggatgcagtatggagcagccgaagcttccaatgcgatcgtgaaaatggagttctagattttattcatgtaatttttgtttaggagagggtgggaaagcccacgggaagggtatgtgaaagaaagaccacagcatgcattgcgatattttataaacctgcaagttctcttttaggttgttgtactctttatgtatgatggtaggtgcttgtattttacttgtatttcttagttctctgttagagcatcttggtgatatttaatgtgtagagttggacctgaatgccttaattctagtttacttttctagattagatgctagaacagatctcccctccttaaggtgattcgtccatgtgataatttatgtcctcaatattcaatcaccaaagaatccacgtaattttgatgcatgttgc

SEQ ID NO: 24743 - protein, 315 aa, Glycine max
DDQTKWNTTYQMLVAASELQEVFSCLDTSDPDYKGAPSMQDWKLVETLCTYLKPLFDAANILTTATHPTVITFFHEVWKLQLDLSRAVVSEDPFISNLTKPMQQKIDKYWKDCSLVLAIAVVMDPRFKMKLVEFSFTKIYGEDAHEYVKIVDDGIHELFHEYVALPLPLTPAYAEEGNAGSHPRAGESPGGTLMPDNGLTDFDVYIMETSSHQMKSELDQYLEESLLPRVPDFDVLGWWKLNKLKYPTLSKMARDILSIPVSSVPPESVFDTKVKEMDQYRSSLRPETVEAIVCAKDWMQYGAAEASNAIVKMEF

SEQ ID NO: 24744 - protein, 304 aa, Glycine max
MLVAASELQEVFSCLDTSDPDYKGAPSMQDWKLVETLCTYLKPLFDAANILTTATHPTVITFFHEVWKLQLDLSRAVVSEDPFISNLTKPMQQKIDKYWKDCSLVLAIAVVMDPRFKMKLVEFSFTKIYGEDAHEYVKIVDDGIHELFHEYVALPLPLTPAYAEEGNAGSHPRAGESPGGTLMPDNGLTDFDVYIMETSSHQMKSELDQYLEESLLPRVPDFDVLGWWKLNKLKYPTLSKMARDILSIPVSSVPPESVFDTKVKEMDQYRSSLRPETVEAIVCAKDWMQYGAAEASNAIVKMEF

SEQ ID NO: 24745 - protein, 277 aa, Glycine max
MQDWKLVETLCTYLKPLFDAANILTTATHPTVITFFHEVWKLQLDLSRAVVSEDPFISNLTKPMQQKIDKYWKDCSLVLAIAVVMDPRFKMKLVEFSFTKIYGEDAHEYVKIVDDGIHELFHEYVALPLPLTPAYAEEGNAGSHPRAGESPGGTLMPDNGLTDFDVYIMETSSHQMKSELDQYLEESLLPRVPDFDVLGWWKLNKLKYPTLSKMARDILSIPVSSVPPESVFDTKVKEMDQYRSSLRPETVEAIVCAKDWMQYGAAEASNAIVKMEF

SEQ ID NO: 24746 - DNA, 1366 bp, Glycine max
gttggaacttggaggaacttgtgtctgtgtccctttttacagagtcatgactatggctggagctttgagtctctcccaattcccagttcgtgggtctgtttctttgcccaaaagaagaatacccagaagaagcttttgcattaggggcatgtcagaaatctcttccactttttctgtgagcacccaacaagaagaaccaacttctaatgcttcgtcagtgacaattgcacctccccccaacttcaagccccctgagcctaaacgctttgcaatcagacctgacaagaccagtgaagtatttggagctttgcttcctttgctctttcgctttgctaccggagttttcgtttctgggtattctttttcaattgtttctaaggatgaaattcctccagatgaatatgctttggaacttaatggcgttaccataaaagaaacagcaaaattaggccctcgcccagagaagcctattgagatatatgaatttgagagctgtccattttgccgaaaggttagagaaattgttgccattttggaccttgatgttcttttctatccttgtccaagaaatggcccaaatttccgtcaaaaggttctagagatgggtggcaaactgcagttcccctacatggttgacccaaacacaggcgcttcaatgtatgaatcagatgacataattcggtatttggttgacaaatatggtgatggaaacgttcctctatctttatcacttggatttttaacgaccctaactgctggtcttggtatgcttagtcgtatttcaaaggggactacttatactccagcgaagttccctccaaagccacttaaattatgggcatatgaggggtctcctttctgcaaacttgtacgtgaagtacttgtggaattggagctgccacacttgcttgtctgttgtgctaggggtagcccaaagagaaatatactatatcagaaaactggaactttccaggcaccttttttggaagatccaaacactgggatagaaatgtttgaaagtgcagaaatcatagagtatctaagagcaacatacgctcttcagtaagtgatgcctatgataggaagaggcttgtgagggtttttaagtaaatgtaattgctaatggttctaacagggttacatcaaattttctctatatagaaatttcaaatagtggaatcaagtgcctcaatattcagcaatggtttgaggtggataaaaatttcggttgcaaaatgggaatctgtttcattcttcttttcttctttattattgttattattatttgggactcttttcattcattattactgcacctacaactctgcaataataactacataatacattaatgcccttgaaaatg

SEQ ID NO: 24747 - protein, 354 aa, Glycine max
LELGGTCVCVPFYRVMTMAGALSLSQFPVRGSVSLPKRRIPRRSFCIRGMSEISSTFSVSTQQEEPTSNASSVTIAPPPNFKPPEPKRFAIRPDKTSEVFGALLPLLFRFATGVFVSGYSFSIVSKDEIPPDEYALELNGVTIKETAKLGPRPEKPIEIYEFESCPFCRKVREIVAILDLDVLFYPCPRNGPNFRQKVLEMGGKLQFPYMVDPNTGASMYESDDIIRYLVDKYGDGNVPLSLSLGFLTTLTAGLGMLSRISKGTTYTPAKFPPKPLKLWAYEGSPFCKLVREVLVELELPHLLVCCARGSPKRNILYQKTGTFQAPFLEDPNTGIEMFESAEIIEYLRATYALQ

SEQ ID NO: 24748 - protein, 339 aa, Glycine max
MTMAGALSLSQFPVRGSVSLPKRRIPRRSFCIRGMSEISSTFSVSTQQEEPTSNASSVTIAPPPNFKPPEPKRFAIRPDKTSEVFGALLPLLFRFATGVFVSGYSFSIVSKDEIPPDEYALELNGVTIKETAKLGPRPEKPIEIYEFESCPFCRKVREIVAILDLDVLFYPCPRNGPNFRQKVLEMGGKLQFPYMVDPNTGASMYESDDIIRYLVDKYGDGNVPLSLSLGFLTTLTAGLGMLSRISKGTTYTPAKFPPKPLKLWAYEGSPFCKLVREVLVELELPHLLVCCARGSPKRNILYQKTGTFQAPFLEDPNTGIEMFESAEIIEYLRATYALQ

SEQ ID NO: 24749 - protein, 337 aa, Glycine max
MAGALSLSQFPVRGSVSLPKRRIPRRSFCIRGMSEISSTFSVSTQQEEPTSNASSVTIAPPPNFKPPEPKRFAIRPDKTSEVFGALLPLLFRFATGVFVSGYSFSIVSKDEIPPDEYALELNGVTIKETAKLGPRPEKPIEIYEFESCPFCRKVREIVAILDLDVLFYPCPRNGPNFRQKVLEMGGKLQFPYMVDPNTGASMYESDDIIRYLVDKYGDGNVPLSLSLGFLTTLTAGLGMLSRISKGTTYTPAKFPPKPLKLWAYEGSPFCKLVREVLVELELPHLLVCCARGSPKRNILYQKTGTFQAPFLEDPNTGIEMFESAEIIEYLRATYALQ

SEQ ID NO: 24750 - DNA, 1164 bp, Glycine max
cacttcactcgccgccactctccactcacaatgcaaccccttcaccgtctcgcatcctgcacgcgccgcgtcgccacatcgtcgctccgtcacgacagcctccttccccgagccccttcaggaatcctctccttctccaccgacgcgcccgccggaggaggaggctccttcgacgcggcatgggagagcgcctcctcgtggtcgacgggcctcgccggcgaccacttcaacggccaggccccgtccgaggtcctcgcgtacctccaggacacggaggacaggctccgcgagctggaggcggagaaccgccgagggaaggcctactgtgacagctggaagagtcgcttggaggagacgacggtgcttctgaagcaggttcaggagcccggcgcgcgaggctcgtatctgaaggattccgagaaggcggagatgtaccggctgcacaagaagaaccctcaggtctacaccgtggagaagctcgctagggattacaggatcatgcggcagagggttcacgccatcctctggctcaaggagatcgaggaggaggaagagaagaggctcggccacccgctcgacgattccgtcgagcagttgctcgattcttgccctgagttttttaattcgcatgatagggagtttcatgtggcgtctctgccgtacaagccggacttcaaggttatgccggaggggtgggatggcattaccaaggatgtggatgaggtgcattatgagatctccatgaaggaggatgagatgctctatcgggagtttgtcgagaagatgaacttcaataaaaagaaaatggctggagaggtaaaatgccataagtatagtcgacgacgcccttcagatggatggacttttacagtagagaaattgggacatcagggaaagcgtggaggtggtggtggctggaagtttgctagcatgccagatggatcaagccgaccactgaatgatatggagaaaatgtatgtgaagcgagagacaccacgccggcgacgcaggattcttccttgattacttgatttttttttttggaagttttgattagctgttaaaattagattttttacccattgtattcaatggtttgggatgtgtagtgtcaattgttgtcttttttcttttggatgagttattgtattagaagatttactt

SEQ ID NO: 24751 - protein, 340 aa, Glycine max
HFTRRHSPLTMQPLHRLASCTRRVATSSLRHDSLLPRAPSGILSFSTDAPAGGGGSFDAAWESASSWSTGLAGDHFNGQAPSEVLAYLQDTEDRLRELEAENRRGKAYCDSWKSRLEETTVLLKQVQEPGARGSYLKDSEKAEMYRLHKKNPQVYTVEKLARDYRIMRQRVHAILWLKEIEEEEEKRLGHPLDDSVEQLLDSCPEFFNSHDREFHVASLPYKPDFKVMPEGWDGITKDVDEVHYEISMKEDEMLYREFVEKMNFNKKKMAGEVKCHKYSRRRPSDGWTFTVEKLGHQGKRGGGGGWKFASMPDGSSRPLNDMEKMYVKRETPRRRRRILP

SEQ ID NO: 24752 - protein, 330 aa, Glycine max
MQPLHRLASCTRRVATSSLRHDSLLPRAPSGILSFSTDAPAGGGGSFDAAWESASSWSTGLAGDHFNGQAPSEVLAYLQDTEDRLRELEAENRRGKAYCDSWKSRLEETTVLLKQVQEPGARGSYLKDSEKAEMYRLHKKNPQVYTVEKLARDYRIMRQRVHAILWLKEIEEEEEKRLGHPLDDSVEQLLDSCPEFFNSHDREFHVASLPYKPDFKVMPEGWDGITKDVDEVHYEISMKEDEMLYREFVEKMNFNKKKMAGEVKCHKYSRRRPSDGWTFTVEKLGHQGKRGGGGGWKFASMPDGSSRPLNDMEKMYVKRETPRRRRRILP

SEQ ID NO: 24753 - protein, 197 aa, Glycine max
MYRLHKKNPQVYTVEKLARDYRIMRQRVHAILWLKEIEEEEEKRLGHPLDDSVEQLLDSCPEFFNSHDREFHVASLPYKPDFKVMPEGWDGITKDVDEVHYEISMKEDEMLYREFVEKMNFNKKKMAGEVKCHKYSRRRPSDGWTFTVEKLGHQGKRGGGGGWKFASMPDGSSRPLNDMEKMYVKRETPRRRRRILP

SEQ ID NO: 24754 - DNA, 1717 bp, Glycine max
agaaaaatcttttggattcccttctcattcactttcactttcactccttagcctggttataggagctagggtttatcgagggtttcgttccttcctctctgcaacaacaatggcgaaacctgggcgaggtcgtcgctctccctccggttccgtttccggctcctcctctcgctcctcttccccctccgactctcgttcctcctctcgctcgcgctccctttctcggtcccgttctccctcgcgctccagatcctcttccccctcctcctcctcttcctcccgaagctcccgcagccgcagccctcccccgcagaggcgccgaagtcctgctgacgcaactaggcgaggtcggtctcctccacctcagtctaagagagcttcacctcccccaaggaaaccttctcctgtacgcgagtcacttgttcttcatgtagaaaagctcagcagaaatgtcaatgaagggcacttgaaagaaattttcagtaactttggtgaggttataagtgtcgagttggcaatggatcgaactgtcaatcttccaaaagggtatggatatgtgcagttcaagacaagaggggatgctgaaaaggcattattgtacatggatggtgcccaaatagatggcaatgtcatcaaggcaagatttactctacctccaaggcagaaagtttcaccacccccaaaggcttctgctgttgctccaaagagagacacccccagggctgataatgctagtgcagatgttgacaaggatggaccaaagcggcaaagagaatcttctcctcgtagaaaacctcctccctcaccacggaggagatctcctgtacctagaagagctggatctccgagacgaccagattctccacgtcgccgtgcagattctcctgttcgtcgccgattagactctccttatcgtcgtggaggagacacacctcctaggaggcggcctgtgtctcctggaagaggtcgttctccatctccacctagacgccttagatcccctgcaaggctgtcacctagaaggatacgtggaagtccaggtcgaagacgttcacctccacctcctcccaggcgccgatcaccacctagacgaccacgtagtcctcctagaaggtctccaattggtcgtagacgtactcgctctccaatacgtaggtctgcacgctcacgctcaaggtcattctcacctcgcagaggtagaccaccagttagacgtggaaggtcatcatcctactctgattcacctagtccacgcaaggtatcccggagatcaaagagtcggagcccaagaaggcctttgagaggaagaggcagtagcaacagcagcagcagcagttcaccaccaccaccaccaccaccaccaactcgcaagccatagataattcttgtacatctactgtctatttctgttgatgtatttattgagattctgtaccggctgagttctagcttgatgtgcttggggatatatgttgcttttcattgtggtctattaacacattttttcttattagcacttaaaagttgtttggaaactaggcattccgtttttgtttggatcctactttagttgttactttgctcaaaaatgcaaaacatgaaagacgatagtgctctgctttattgtatttctagaaattcagtggaattccatgtaactggtagtttctttagaaatttgattatgcgaagaaagtagtagtaaatgttcaatgtg

SEQ ID NO: 24755 - protein, 458 aa, Glycine max
EKSFGFPSHSLSLSLLSLVIGARVYRGFRSFLSATTMAKPGRGRRSPSGSVSGSSSRSSSPSDSRSSSRSRSLSRSRSPSRSRSSSPSSSSSSRSSRSRSPPPQRRRSPADATRRGRSPPPQSKRASPPPRKPSPVRESLVLHVEKLSRNVNEGHLKEIFSNFGEVISVELAMDRTVNLPKGYGYVQFKTRGDAEKALLYMDGAQIDGNVIKARFTLPPRQKVSPPPKASAVAPKRDTPRADNASADVDKDGPKRQRESSPRRKPPPSPRRRSPVPRRAGSPRRPDSPRRRADSPVRRRLDSPYRRGGDTPPRRRPVSPGRGRSPSPPRRLRSPARLSPRRIRGSPGRRRSPPPPPRRRSPPRRPRSPPRRSPIGRRRTRSPIRRSARSRSRSFSPRRGRPPVRRGRSSSYSDSPSPRKVSRRSKSRSPRRPLRGRGSSNSSSSSSPPPPPPPPTRKP

SEQ ID NO: 24756 - protein, 422 aa, Glycine max
MAKPGRGRRSPSGSVSGSSSRSSSPSDSRSSSRSRSLSRSRSPSRSRSSSPSSSSSSRSSRSRSPPPQRRRSPADATRRGRSPPPQSKRASPPPRKPSPVRESLVLHVEKLSRNVNEGHLKEIFSNFGEVISVELAMDRTVNLPKGYGYVQFKTRGDAEKALLYMDGAQIDGNVIKARFTLPPRQKVSPPPKASAVAPKRDTPRADNASADVDKDGPKRQRESSPRRKPPPSPRRRSPVPRRAGSPRRPDSPRRRADSPVRRRLDSPYRRGGDTPPRRRPVSPGRGRSPSPPRRLRSPARLSPRRIRGSPGRRRSPPPPPRRRSPPRRPRSPPRRSPIGRRRTRSPIRRSARSRSRSFSPRRGRPPVRRGRSSSYSDSPSPRKVSRRSKSRSPRRPLRGRGSSNSSSSSSPPPPPPPPTRKP

SEQ ID NO: 24757 - protein, 286 aa, Glycine max
MDRTVNLPKGYGYVQFKTRGDAEKALLYMDGAQIDGNVIKARFTLPPRQKVSPPPKASAVAPKRDTPRADNASADVDKDGPKRQRESSPRRKPPPSPRRRSPVPRRAGSPRRPDSPRRRADSPVRRRLDSPYRRGGDTPPRRRPVSPGRGRSPSPPRRLRSPARLSPRRIRGSPGRRRSPPPPPRRRSPPRRPRSPPRRSPIGRRRTRSPIRRSARSRSRSFSPRRGRPPVRRGRSSSYSDSPSPRKVSRRSKSRSPRRPLRGRGSSNSSSSSSPPPPPPPPTRKP

SEQ ID NO: 24758 - DNA, 1850 bp, Glycine max
ccttcgtgcaaaaataccctgcgacggccaccaccaccatagccactttttttgttcgtccctgtatgttcaagatttctcacatctcggcctcattatttgtttagatccggattagagaatccgtaagtgtttgtgtttattccggactgtgcgttccgtaacatggaggtgcatgtcgaaattggtgaggtgcaggaagcaacgaccccactataaacggggttaagtccaatcagagaaggcaaaggcatcatcggtgatggaaactatgctcacaagtgacagagtagaagcaaaagattttaattttagtaataactaacataataaactaggtgaacgtaactgcacagacacaactactacataaatcttaccttaatttctccgcccacttccctcctataaataaatcttccattctctctcttcatttcatctccatctttcttgggtgatccaatggcgacccttttccagggattgggagttgtgaacccatcattgtcttcttccaactccaacaacttcctgcttccttctcgtacatccctctctgagagaaaagatggcatatttgtagtcagatctgatgcaagggtaagcagcaaggttctgaaggccggagctcgcaagcatgaattgttggttactaatgcagtcgcaacaaaggaaggcagttctgcggcttctacatcaaaatctgggcatgaacttctcctttttgaggccctacgtgaaggtttggaagaagaaatggagagggatccttgtgtatgtgtcatgggcgaagatgtaggtcactatggaggatcctacaaggtgactaaaggccttgccacaaagtttggggaccttagagttttggacacacctattgctgagaactccttcacgggcatgggcattggggctgccatgactggtctgaggccagttgttgagggcatgaacatgggatttctacttctggcatttaaccagatttctaacaattgtggcatgctccattacacttctggaggccagtttaagataccaattgtcattcgtggacctggtggagttgggcggcaacttggagcagagcactcgcagcgattggagtcatattttcagtcaatccctggaatccagatggtggcttgctcaaccccttacaatgccaagggcttgatgaaagctgcaatccggagtgagaaccctgtgattcttttcgagcatgttttgctttataacctcaaggagagaattccagatgaagagtatgtattgtcacttgaagaagctgagatggttaggcctggggagcatgttacaatattaacgtactccaggatgaggtatcatgtcatgcaagctgctaagacactggtgaacaaggggtatgaccctgaagtaattgatatcaggtctttgaaaccattcgatcttcacacaattgggaactcggtgaagaagacacatcgtgtgctaattgtggaagagtgtatgaggacgggtggaattggggctagtttgaccgctgctattactgaaaatttccatgactatttggatgcccctatagtatgtttatcctctcaggatgtgccaactccttatgctggcacattggaggaatggacagtggttcaacctgctcaaattgtgactgcagttgagcaactctgcaagtgattgctacaaaacactagcaattaggatatggtttttggtaaagctattgtgcttgtcaaattaagcttgaattttcatcatgactttcttttccttttatttctgaagtctatagcccgtaactttaaattgttgtttaatttctgataatctttgcaatttttttt

SEQ ID NO: 24759 - protein, 405 aa, Glycine max
MATLFQGLGVVNPSLSSSNSNNFLLPSRTSLSERKDGIFVVRSDARVSSKVLKAGARKHELLVTNAVATKEGSSAASTSKSGHELLLFEALREGLEEEMERDPCVCVMGEDVGHYGGSYKVTKGLATKFGDLRVLDTPIAENSFTGMGIGAAMTGLRPVVEGMNMGFLLLAFNQISNNCGMLHYTSGGQFKIPIVIRGPGGVGRQLGAEHSQRLESYFQSIPGIQMVACSTPYNAKGLMKAAIRSENPVILFEHVLLYNLKERIPDEEYVLSLEEAEMVRPGEHVTILTYSRMRYHVMQAAKTLVNKGYDPEVIDIRSLKPFDLHTIGNSVKKTHRVLIVEECMRTGGIGASLTAAITENFHDYLDAPIVCLSSQDVPTPYAGTLEEWTVVQPAQIVTAVEQLCK

SEQ ID NO: 24760 - protein, 307 aa, Glycine max
MERDPCVCVMGEDVGHYGGSYKVTKGLATKFGDLRVLDTPIAENSFTGMGIGAAMTGLRPVVEGMNMGFLLLAFNQISNNCGMLHYTSGGQFKIPIVIRGPGGVGRQLGAEHSQRLESYFQSIPGIQMVACSTPYNAKGLMKAAIRSENPVILFEHVLLYNLKERIPDEEYVLSLEEAEMVRPGEHVTILTYSRMRYHVMQAAKTLVNKGYDPEVIDIRSLKPFDLHTIGNSVKKTHRVLIVEECMRTGGIGASLTAAITENFHDYLDAPIVCLSSQDVPTPYAGTLEEWTVVQPAQIVTAVEQLCK

SEQ ID NO: 24761 - protein, 298 aa, Glycine max
MGEDVGHYGGSYKVTKGLATKFGDLRVLDTPIAENSFTGMGIGAAMTGLRPVVEGMNMGFLLLAFNQISNNCGMLHYTSGGQFKIPIVIRGPGGVGRQLGAEHSQRLESYFQSIPGIQMVACSTPYNAKGLMKAAIRSENPVILFEHVLLYNLKERIPDEEYVLSLEEAEMVRPGEHVTILTYSRMRYHVMQAAKTLVNKGYDPEVIDIRSLKPFDLHTIGNSVKKTHRVLIVEECMRTGGIGASLTAAITENFHDYLDAPIVCLSSQDVPTPYAGTLEEWTVVQPAQIVTAVEQLCK

SEQ ID NO: 24762 - DNA, 1521 bp, Glycine max
attcaaacatctcaccctcttgtccctctctctcttctttcttctctcaccttttcctctctcaatttcctttcccttttgaaattatgatataagagaacaaaaactcccccttaaacagataaggtatatataagccacccttcagagcaatttgtccatcttcttcaatttattagcagaagatgtggtgcattagattaccttagtctttgtcctagtgtcttccacaacaacttggtccaacgtttccaaatattcacataaaagaagaacaatagttctctccctagaaactcatgatatgctagataagccatccttaggagcaatatatccgtcctcttcaatttattagcagaaggtgtgttgcgtattagaccatagtctttttgtcattgttgtttcccaacaacgcagtttagcctttgagagcatcagcaatcacatggtgatcagaatatcattcagcaattgaagatcagtggcatcaggcataggctagcaagcaatgatatggctttcttcccagcaaatttcatgctacaaacacctcaccaagatgaccatcaacctccaccttcactcaactcaattataacttcatgtgcacctcaagagtaccatggtggaggagcatcctttcttggcaagagatctatgtcattttcagggattgaacttggagaagaagctaatgctgaggaagattctgatgatggatctcaggcaggagagaagaaaaggaggcttaacatggaacaagtgaagacacttgagaagagctttgagttgggaaacaagcttgaacctgagaggaaaatgcagcttgcaagggctcttggattgcaacctagacagattgctatatggttccagaacagaagggctaggtggaagaccaagcagttggagaaggactatgatcttctcaaaagacaatatgaagctatcaaagcagataatgatgcacttcaatttcagaaccaaaaacttcagactgagatattggcactgaaaagcagagaaccaactgaatccatcaacctcaacaaagaaactgagggatccagcagcaatagaagtgagaacagctcagagattaagttggatatctcaagaacaccagctattgatagtcctctatccactcagcagaacaacaacaacagaacactctttccatcttctgctagaccaacaggagtggctcagcttttccaaaccactccaaggccagagattcagtgccaaaagattgatcacatggtcaaagaagagagcctaagcaacatgttctgtgccattgatgatcaatctggcctttggccttggttggagcagcaacatttcaattgatcatcatgcaaaaggagagtgtgagagtgagtgagagagtttcatattgcaatgtaatttttccttttccgaatgaaaatgaaatcatctagaggtgtctgtgtcaattgattaccatatttaatgagttataatttaaattaaaaaaatccatattttgac

SEQ ID NO: 24763 - protein, 280 aa, Glycine max
MAFFPANFMLQTPHQDDHQPPPSLNSIITSCAPQEYHGGGASFLGKRSMSFSGIELGEEANAEEDSDDGSQAGEKKRRLNMEQVKTLEKSFELGNKLEPERKMQLARALGLQPRQIAIWFQNRRARWKTKQLEKDYDLLKRQYEAIKADNDALQFQNQKLQTEILALKSREPTESINLNKETEGSSSNRSENSSEIKLDISRTPAIDSPLSTQQNNNNRTLFPSSARPTGVAQLFQTTPRPEIQCQKIDHMVKEESLSNMFCAIDDQSGLWPWLEQQHFN

SEQ ID NO: 24764 - protein, 272 aa, Glycine max
MLQTPHQDDHQPPPSLNSIITSCAPQEYHGGGASFLGKRSMSFSGIELGEEANAEEDSDDGSQAGEKKRRLNMEQVKTLEKSFELGNKLEPERKMQLARALGLQPRQIAIWFQNRRARWKTKQLEKDYDLLKRQYEAIKADNDALQFQNQKLQTEILALKSREPTESINLNKETEGSSSNRSENSSEIKLDISRTPAIDSPLSTQQNNNNRTLFPSSARPTGVAQLFQTTPRPEIQCQKIDHMVKEESLSNMFCAIDDQSGLWPWLEQQHFN

SEQ ID NO: 24765 - protein, 232 aa, Glycine max
MSFSGIELGEEANAEEDSDDGSQAGEKKRRLNMEQVKTLEKSFELGNKLEPERKMQLARALGLQPRQIAIWFQNRRARWKTKQLEKDYDLLKRQYEAIKADNDALQFQNQKLQTEILALKSREPTESINLNKETEGSSSNRSENSSEIKLDISRTPAIDSPLSTQQNNNNRTLFPSSARPTGVAQLFQTTPRPEIQCQKIDHMVKEESLSNMFCAIDDQSGLWPWLEQQHFN

SEQ ID NO: 24766 - DNA, 1319 bp, Glycine max
tcgatgctattacagaatgtgccccctgccattctcctaaggttcctgagggagcatagatcagaatgggcagacaacaatatggatgcttacacagctgctgctattaaagtcggcccttgcagcctatcaggatctcgtgttggaaactatggaggtcaagttatactccccctagcacacacaattgagcatgaggagtttttggaagtcattaaattggaaggaatagctcattctcctgaagacacaataatgcctagagaaatgtttcttttgcaactctgcagtggaatggatgagaatgctgttggcacctgtgctgaacttatatctgctccaattgatgcttcctttgctgatgatgcccccctcctaccttctggatttcgcatcattcctcttgaatctggaaaggaagcttccagccccaatcgcacacttgaccttgcatctgcccttgacgttggtcccagtggaaaccgagcttcaaatggatgtgctaattccagctgtatgagatctgtgatgacaatagcatttgaatttgcatttgaaagccatatgcaagagcatgtagcatctatggcacgccaatatgttcggagcattatatcatcagtccaaagggtagcattagcactttctccttctcatttgagttcacatgcagggcttaggtcaccattgggtactcctgaagcgcaaacccttgctcattggatctgcaacagttataggtgctacttgggtgtggagctacttaaatctaacaacgaggggaatgaatctttgctcaagtccttgtggcatcactcagatgcaatattgtgctgcactctaaaggcattgccagtgttcactttctcgaaccaggctgggcttgacatgcttgagaccaccctagttgcattacaagatataactttagagaaaatatttgatgatcatggacgaaaaattctcttttcagagtttccacagattatccaacagggttttgcatgtcttcaaggtggcatttgtctttcaagcatggggcgacctgtctcatatgaaagagttgttgcttggaaggtgctgaatgaagaagagaatgctcattgtatttgctttatgtttgtgaactggtcttttgtttgacatcttgttctgagtacacttgggcttattgtatccaagtgttagataaagttttactctaagactcttgtgtgctttgttggttggtgttttactgtatttgcactaaatacttggattgcactttaaatgactatttgtgttattattagcttatgtaacttgtttccttattc

SEQ ID NO: 24767 - protein, 380 aa, Glycine max
SMLLQNVPPAILLRFLREHRSEWADNNMDAYTAAAIKVGPCSLSGSRVGNYGGQVILPLAHTIEHEEFLEVIKLEGIAHSPEDTIMPREMFLLQLCSGMDENAVGTCAELISAPIDASFADDAPLLPSGFRIIPLESGKEASSPNRTLDLASALDVGPSGNRASNGCANSSCMRSVMTIAFEFAFESHMQEHVASMARQYVRSIISSVQRVALALSPSHLSSHAGLRSPLGTPEAQTLAHWICNSYRCYLGVELLKSNNEGNESLLKSLWHHSDAILCCTLKALPVFTFSNQAGLDMLETTLVALQDITLEKIFDDHGRKILFSEFPQIIQQGFACLQGGICLSSMGRPVSYERVVAWKVLNEEENAHCICFMFVNWSFV

SEQ ID NO: 24768 - protein, 379 aa, Glycine max
MLLQNVPPAILLRFLREHRSEWADNNMDAYTAAAIKVGPCSLSGSRVGNYGGQVILPLAHTIEHEEFLEVIKLEGIAHSPEDTIMPREMFLLQLCSGMDENAVGTCAELISAPIDASFADDAPLLPSGFRIIPLESGKEASSPNRTLDLASALDVGPSGNRASNGCANSSCMRSVMTIAFEFAFESHMQEHVASMARQYVRSIISSVQRVALALSPSHLSSHAGLRSPLGTPEAQTLAHWICNSYRCYLGVELLKSNNEGNESLLKSLWHHSDAILCCTLKALPVFTFSNQAGLDMLETTLVALQDITLEKIFDDHGRKILFSEFPQIIQQGFACLQGGICLSSMGRPVSYERVVAWKVLNEEENAHCICFMFVNWSFV

SEQ ID NO: 24769 - protein, 353 aa, Glycine max
MDAYTAAAIKVGPCSLSGSRVGNYGGQVILPLAHTIEHEEFLEVIKLEGIAHSPEDTIMPREMFLLQLCSGMDENAVGTCAELISAPIDASFADDAPLLPSGFRIIPLESGKEASSPNRTLDLASALDVGPSGNRASNGCANSSCMRSVMTIAFEFAFESHMQEHVASMARQYVRSIISSVQRVALALSPSHLSSHAGLRSPLGTPEAQTLAHWICNSYRCYLGVELLKSNNEGNESLLKSLWHHSDAILCCTLKALPVFTFSNQAGLDMLETTLVALQDITLEKIFDDHGRKILFSEFPQIIQQGFACLQGGICLSSMGRPVSYERVVAWKVLNEEENAHCICFMFVNWSFV

SEQ ID NO: 24770 - DNA, 1473 bp, Glycine max
taccattcgaattctgctgcaagagtgaagttcaataacaggaactatgacttgcctccttggtcaataagtatcctcccagattgtagaacagatgtatttaacactgcaagagtaagttttcaaacttcacagatacaaatgttgcctagcaattctaggttgttatcatgggagacctatgatgaagatgtatcttcgctagccgaaagttccaagattacagcttctggactattagaacagatcagcactaccagagacactagtgactatctatggtatataaccagtgctgacataagttcatcagaatcctttcttagaggaaggaacaagcccagcattactgtgcattctgcaggccatgctgttcatgtgtttgttaatggtcaattttcaggctccgcttttgggacaagtgaagacagaagttgcacatttaatggccctgtcaacctacgtgcaggaactaataaaatagcacttctcagtgttgctgttggattaccaaatgttggattccattttgaaacatggaaggctgggatcactggagttttgcttcatggtcttgaccatggacagaaagatttgacttggcagaagtggtcataccagattggcctaaaaggagaggctatgaatttggtgtctcccaatggagtctcatctgttgactgggtgagagactcactagctgtccgaagccagtcacagttgaaatggcacaaggcttatttcaatgcacctgatggagttgaaccattggccttggacctgagcagcatgggaaagggtcaagtatggatcaatggacaaagcatagggagatattggatggtttatgcaaagggtgcttgtggttcttgcaactatgctgggacataccggcctgcaaagtgccaacttggttgtggacaacctactcaacgatggtatcacgtgccaagatcatggttaaagccaacaaagaacttgatagtagtatttgaggaattgggtgggaatccttggaaaatagctctagtaaaaaggacaatacatactccagcaaactagtgaacccaattcaaagaactgaaaaaagacgtgaatatgagtagtcaaatggtgattgacagagcaacatgcgatgggaccatagtatagaaaatggttatgcccacttgtgccgttctctggcttccgttggcattggtagatcataatgttgagggaataagtaaatgttaggttcaagcgttgatgtgttcatctccaattcttcattcttcttgatcttgcatcaaaatagacaaccgtggatgatacaaaaaaaaaggtgtgaccaagttgatttttaatttattcttacagtatgtacttaataagagaaaataacaaagttcagaggtgtgcttttattcacttgtgtaatttgtatatcttaaattctcaatacatgcaatgcatttaagtggttggcttttt

SEQ ID NO: 24771 - protein, 353 aa, Glycine max
YHSNSAARVKFNNRNYDLPPWSISILPDCRTDVFNTARVSFQTSQIQMLPSNSRLLSWETYDEDVSSLAESSKITASGLLEQISTTRDTSDYLWYITSADISSSESFLRGRNKPSITVHSAGHAVHVFVNGQFSGSAFGTSEDRSCTFNGPVNLRAGTNKIALLSVAVGLPNVGFHFETWKAGITGVLLHGLDHGQKDLTWQKWSYQIGLKGEAMNLVSPNGVSSVDWVRDSLAVRSQSQLKWHKAYFNAPDGVEPLALDLSSMGKGQVWINGQSIGRYWMVYAKGACGSCNYAGTYRPAKCQLGCGQPTQRWYHVPRSWLKPTKNLIVVFEELGGNPWKIALVKRTIHTPAN

SEQ ID NO: 24772 - protein, 306 aa, Glycine max
MLPSNSRLLSWETYDEDVSSLAESSKITASGLLEQISTTRDTSDYLWYITSADISSSESFLRGRNKPSITVHSAGHAVHVFVNGQFSGSAFGTSEDRSCTFNGPVNLRAGTNKIALLSVAVGLPNVGFHFETWKAGITGVLLHGLDHGQKDLTWQKWSYQIGLKGEAMNLVSPNGVSSVDWVRDSLAVRSQSQLKWHKAYFNAPDGVEPLALDLSSMGKGQVWINGQSIGRYWMVYAKGACGSCNYAGTYRPAKCQLGCGQPTQRWYHVPRSWLKPTKNLIVVFEELGGNPWKIALVKRTIHTPAN

SEQ ID NO: 24773 - DNA, 781 bp, Glycine max
acattaacaaggcattcgagaggtttggttcaaaccccaacattgaggttctaggaaacttaaaggccaagagacaagccatattgtcctttctgatatactctaccaccaccaactcttcctcagctggtgagtggagtgatggtaacaaagaaaatgaaggggagcttgatttgtgggcagaaacggggaaccaaagaggtaaaccacttcatggcccttttgttgcagcattgctcaatgacctctttggcattcaagctcgaggagggtgtgcttgtgctggaccttatggccacgaattgctccacatcaacaagtctcaatcccttgccattagatcagcagttcaagagggctatattggagtaaagccagggtggactcgagtcagttttccatactacatgagtgaagaagatgttgagtacattctaagagctatagagtttttagctgtgtatggccaacgattcattcctctgtatagtttcaatttgataaatggcagctggagattgaagacagagaaatttgaggcactaaccaaggaaggcatgcgaagggacgaatcatactttgaggtggctaaatgtgttgctagtggcctcccaaaattcccttctcagggtatactccaggaggatgtggatcccaatatcttctgctttagagtttaaattttgtcaatatagtaccaaacatcatttgttcgatgtacaaatatttcatgagactttccattgctttcacaccatgattgagatctacatttcctggc

SEQ ID NO: 24774 - protein, 225 aa, Glycine max
INKAFERFGSNPNIEVLGNLKAKRQAILSFLIYSTTTNSSSAGEWSDGNKENEGELDLWAETGNQRGKPLHGPFVAALLNDLFGIQARGGCACAGPYGHELLHINKSQSLAIRSAVQEGYIGVKPGWTRVSFPYYMSEEDVEYILRAIEFLAVYGQRFIPLYSFNLINGSWRLKTEKFEALTKEGMRRDESYFEVAKCVASGLPKFPSQGILQEDVDPNIFCFRV

SEQ ID NO: 24775 - DNA, 1366 bp, Glycine max
ttacttgctggagcaggataacccaaaccggaacagaagcaaaagcagaaacgaagatgggtggttccgttttcactcacttcctcgttctcccctcctcttctactccttctctttccactctcttcccatccaaattccccaccagacccatcaatgaatcttttcccttcacccttacctgcaaccaattcccttccaaactcactacttcgcggccttcccaattctcagctcctcctagttactcatgctctgtaaaaaagataaaagcttcgggaagtcagcaaacaggatccattcgacatggagacaaccttgatgcaatgaatagcaggagtttgctgcagaagtttcagaggaaaatgccaacggtattccttttcaacaagcaatctatgatgagtgactttacaaccaaagatattgatgacagggaaagatcatccaaatgggtttcagcattcctctttggacaaactatatcagtgatttctcctgatgtttcatgtgcaagcagctcagcaagaataaatgagatatatgaggttggagagttgtttgatttaagcatccaactaatatacttgatattgctattgggtttgctagggagtgggactttctttgtgattcgccaagttcttgtccgcagagaactcgacctatctgccaaagagttgcaggagcaagtaagaagtggtgatgctggtgcaactgagcttttaacttggtgcagtgatgctgcgcaggaaattttaccctgctgctaccaagttcttgcttcaagcaattgagaaatgggatggggataatccggatcttgcccaggtttacaacgctcttggtgtgagctatgtccgcgatgggaaagttgacaaaggaattgctcaatttgagacagctgtcaagcttcaaccaggctatgtcacagcttggaacaatctcggtgatgcctttgagagtaaaaaagactacaagtctgctctgaaggcatttgaagaagtcctactgtttgatcctaacaacaaggttgcccggcctagaagagattctttgaagggacttgttgatgcaaccaaaggagttactgtcatcaagtcaacagagaagaaatgagtgccactgtatcaactcacactatgaatatggcttagttaaatacatagttttcaataactgggttgtgttggaaggaattttggctctattggtgtagttactaattactagctgaggcatactagtgctgggaaatgtagttgaaattgaaacttgaaagtgctcaattctctaatgggttaccaaagctttttgctctggtgctgatgttgtattaactcgtgaaaattcctttatttttttt

SEQ ID NO: 24776 - protein, 264 aa, Glycine max
TCWSRITQTGTEAKAETKMGGSVFTHFLVLPSSSTPSLSTLFPSKFPTRPINESFPFTLTCNQFPSKLTTSRPSQFSAPPSYSCSVKKIKASGSQQTGSIRHGDNLDAMNSRSLLQKFQRKMPTVFLFNKQSMMSDFTTKDIDDRERSSKWVSAFLFGQTISVISPDVSCASSSARINEIYEVGELFDLSIQLIYLILLLGLLGSGTFFVIRQVLVRRELDLSAKELQEQVRSGDAGATELLTWCSDAAQEILPCCYQVLASSN

SEQ ID NO: 24777 - protein, 246 aa, Glycine max
MGGSVFTHFLVLPSSSTPSLSTLFPSKFPTRPINESFPFTLTCNQFPSKLTTSRPSQFSAPPSYSCSVKKIKASGSQQTGSIRHGDNLDAMNSRSLLQKFQRKMPTVFLFNKQSMMSDFTTKDIDDRERSSKWVSAFLFGQTISVISPDVSCASSSARINEIYEVGELFDLSIQLIYLILLLGLLGSGTFFVIRQVLVRRELDLSAKELQEQVRSGDAGATELLTWCSDAAQEILPCCYQVLASSN

SEQ ID NO: 24778 - protein, 156 aa, Glycine max
MNSRSLLQKFQRKMPTVFLFNKQSMMSDFTTKDIDDRERSSKWVSAFLFGQTISVISPDVSCASSSARINEIYEVGELFDLSIQLIYLILLLGLLGSGTFFVIRQVLVRRELDLSAKELQEQVRSGDAGATELLTWCSDAAQEILPCCYQVLASSN

SEQ ID NO: 24779 - DNA, 1138 bp, Glycine max
gtttcctctctcacctttgcggttccgcccacgccctccgcggcggcgcgtgacttggtcgaggctgaggaagatgggtttggggtgtactgcaagagaggcaggagggagtacatggaggatcgttacaccgctgggaataatcttcgcggagaacacaaactggctttttttggcatatttgatgggcacggtggtgcaaaagctgctgaatttgctgcaaataacttgcaaaagaatgtgttagatgaagttattgtgagagatgaagatgatgttgaggaggcagtgaagcgtgggtacctgaacaccgattcggatttcctaaaggaggatctccatggtggctcttgctgtgtgacagcattgattaggaatggtaacctcgttgtgtccaacgcgggtgattgccgtgctgtcattagcagagggggtgttgctgaggccctaacatctgatcacaggccttcaagggaagatgaaagggacagaattgagagcctgggtggctatgtcgatttatgccgcggtgtttggaggatccagggatctctggctgtgtcaaggggaattggagatagacacctgaaacaatgggtgacagcagaacctgagaccaaagttctccgaattgaacctgaacatgacttgttaattttagcttcagatggattatgggataaggttggtaatcaggaagcagtagatattgctcgttcttttctcgtaggcaacaacaaatcacaaccattgctgcaggcttgtaaaaagcttgtagatttgtctgtttcacgaggctctttggatgatacaagtgtcatgctaatcaaattggagcactatatttaaagttaccttagtacaactaaggtttcaagattattgcagttgagatcgcattgaggtcaagattgcgttgcagtttgtgatttttgaacaaccttggtggtgcctgatgatggatagagagtagctgattcttttctgtatatataaatctgactaccttattggaattttttgtacccgcgtaggggagggatattaacaataacatttagtaattatttttttcatagaataatttatgtaataagcataaagttaattaatttatacattatttatttagtaatcc

SEQ ID NO: 24780 - protein, 282 aa, Glycine max
VSSLTFAVPPTPSAAARDLVEAEEDGFGVYCKRGRREYMEDRYTAGNNLRGEHKLAFFGIFDGHGGAKAAEFAANNLQKNVLDEVIVRDEDDVEEAVKRGYLNTDSDFLKEDLHGGSCCVTALIRNGNLVVSNAGDCRAVISRGGVAEALTSDHRPSREDERDRIESLGGYVDLCRGVWRIQGSLAVSRGIGDRHLKQWVTAEPETKVLRIEPEHDLLILASDGLWDKVGNQEAVDIARSFLVGNNKSQPLLQACKKLVDLSVSRGSLDDTSVMLIKLEHYI

SEQ ID NO: 24781 - protein, 244 aa, Glycine max
MEDRYTAGNNLRGEHKLAFFGIFDGHGGAKAAEFAANNLQKNVLDEVIVRDEDDVEEAVKRGYLNTDSDFLKEDLHGGSCCVTALIRNGNLVVSNAGDCRAVISRGGVAEALTSDHRPSREDERDRIESLGGYVDLCRGVWRIQGSLAVSRGIGDRHLKQWVTAEPETKVLRIEPEHDLLILASDGLWDKVGNQEAVDIARSFLVGNNKSQPLLQACKKLVDLSVSRGSLDDTSVMLIKLEHYI

SEQ ID NO: 24782 - DNA, 1263 bp, Glycine max
ttttgttctctgttctcgcgatttcggaagggtcgtgtttccctgcttcagtttcagcttcggcttcgagaagcgtcgattgggtccttaagctgttccttctctgtttctgctttggagcatcttggagcaaatgagcaatggagcttgtggagcacggctcacctcaaggattgctctcttgacaaactgtataactcctatcaaacatgagcggtcgcttttctcgcacaatttatgtcggcaacctgccctctgatataagagagtcagaaattgaagatctattctacaagtatggccgtataatggatattgaattgaaggttcctccccgccctccatgttattgctttgttgagtttgataatgctcgagatgccgaagatgcaattcggggtcgagatggatacaactttgatggttgtcggttaagagtggagcttgctcatggtggtagagggccatcatcaagtgatcgacgtggatatggaggaggaggtggtaatggtggagcaggcgggggtcgttttggcatctcacgccattctgaatttcgagttattgttcgtggactcccatcttctgcatcttggcaagatttgaaggatcatatgcgaaaagctggggacgtgtgttttgctgaggtttcccgtgatagtgaagggacttttggcattgttgattacactaattatgatgacatgaagtatgccattcggaaattggatgacactgagtttagaaatccctgggcgagagcttatattcgggtgaggaagtatgagagtagtcgttctaggagccgcagcaggagccccagcaggagccccagcaggagcagaagtccaaaaagagttagaagatctctggagcgttctgtgtctaggtcacgatctagatctcaatcagcatcaccaatcaaatcttctaggccaagatcacgatcccgatcacgatcacgatctggatctggatctcctcatcaggtcctgtcaggtagtggttgaatttctgacaaagctggtggttctctggtgatattgttccattctggtgggcagtatcggaattatattggagttggactaaattgttttaagggaaaattattgatgtgcctaggctgtttggtgattgtcttatttcttttaaattaaaatgttggacattggccttgccctttgtaccttagcaaacacaagaatatctttagtcctcgcaaactgtgaatccaatttgaatggttttaaacagatttat

SEQ ID NO: 24783 - protein, 266 aa, Glycine max
MSGRFSRTIYVGNLPSDIRESEIEDLFYKYGRIMDIELKVPPRPPCYCFVEFDNARDAEDAIRGRDGYNFDGCRLRVELAHGGRGPSSSDRRGYGGGGGNGGAGGGRFGISRHSEFRVIVRGLPSSASWQDLKDHMRKAGDVCFAEVSRDSEGTFGIVDYTNYDDMKYAIRKLDDTEFRNPWARAYIRVRKYESSRSRSRSRSPSRSPSRSRSPKRVRRSLERSVSRSRSRSQSASPIKSSRPRSRSRSRSRSGSGSPHQVLSGSG

SEQ ID NO: 24784 - protein, 233 aa, Glycine max
MDIELKVPPRPPCYCFVEFDNARDAEDAIRGRDGYNFDGCRLRVELAHGGRGPSSSDRRGYGGGGGNGGAGGGRFGISRHSEFRVIVRGLPSSASWQDLKDHMRKAGDVCFAEVSRDSEGTFGIVDYTNYDDMKYAIRKLDDTEFRNPWARAYIRVRKYESSRSRSRSRSPSRSPSRSRSPKRVRRSLERSVSRSRSRSQSASPIKSSRPRSRSRSRSRSGSGSPHQVLSGSG

SEQ ID NO: 24785 - DNA, 1388 bp, Glycine max
aatactaagctttcttaccccttggaaaaatttgcctctgatgtttctggaagaagctttcacaatggccgtttcatacaaaggatgcgagaaaaagcttcatctcttccaaatgtaaaattagaacaaggaactgtcacatctctactagaagaaaatggaatcatcaaaggggtaaactacaaatccaagagtggacaagaggtcacagctaaggcttccctcaccatagtatgcgatggctgtttttccaacttgagacgttctctttgtaacccaaaggttgatgtgccatctcattttgttggtctggttctagagaactgcaatcttccgtatgcaaaccatgggcacgttatcttgagtgatccttctcccattttgttttatccaattagtagctctgagattcggtgtttggttgatgttcctggccaaaaattaccttcccttggtaatggtgacatggcacgttatttgaaaacagtagtagctccccagaaattgtgtgtttcaggttcctccagagctgcgtgagtcttttatagcagcagttgagaaaggaaacatgagaagcatgccaaacagaagcatgcctgcatctccttatcctacacctggcgcccttctcatgggagatgccttcaacatgcgtcaccctttaaccggagggggaatgactgtggctttgtctgacattgttttgctaaggaaccttcttagacccctgcatgatctgcatgatgctaatgctctttgcaaatatcttgaatcattctacaccctgcgcaagccagtggcatctacaataaacacactagctggggcactgtacaaggtgttttgtgcatcccctgacccagctagtaaggaaatgcgccaggcatgttttgattatttaagccttggaggtgttttctcagatggaccaatagctctactctctggtctaaatcctcgtccattaagcttggttctccacttctttgccgtggctatatatggcgttggtcgcttactcataccattcccttctccaaaacgcatgtggattggagctagattgatttccggtgcatctgctatcattttccccattatcaaggctgaaggaattagacaaatgttcttcccagtaactgtgccagcatattacagaacaccccctaccaatttggatgattaagtacacttcttggaaggaaagtcataaattcataacataatctgtgcccgcattctttgtaactgtgattagtcctaccaaaaggaataagagagcctagaggggaattttgttaaaaggctccacatattagggcactggttttgtgcgtgtgcaatatactactatcttgttttaataaaactttttaaacgtattgtcc

SEQ ID NO: 24786 - protein, 205 aa, Glycine max
MRSMPNRSMPASPYPTPGALLMGDAFNMRHPLTGGGMTVALSDIVLLRNLLRPLHDLHDANALCKYLESFYTLRKPVASTINTLAGALYKVFCASPDPASKEMRQACFDYLSLGGVFSDGPIALLSGLNPRPLSLVLHFFAVAIYGVGRLLIPFPSPKRMWIGARLISGASAIIFPIIKAEGIRQMFFPVTVPAYYRTPPTNLDD

SEQ ID NO: 24787 - protein, 202 aa, Glycine max
MPNRSMPASPYPTPGALLMGDAFNMRHPLTGGGMTVALSDIVLLRNLLRPLHDLHDANALCKYLESFYTLRKPVASTINTLAGALYKVFCASPDPASKEMRQACFDYLSLGGVFSDGPIALLSGLNPRPLSLVLHFFAVAIYGVGRLLIPFPSPKRMWIGARLISGASAIIFPIIKAEGIRQMFFPVTVPAYYRTPPTNLDD

SEQ ID NO: 24788 - protein, 197 aa, Glycine max
MPASPYPTPGALLMGDAFNMRHPLTGGGMTVALSDIVLLRNLLRPLHDLHDANALCKYLESFYTLRKPVASTINTLAGALYKVFCASPDPASKEMRQACFDYLSLGGVFSDGPIALLSGLNPRPLSLVLHFFAVAIYGVGRLLIPFPSPKRMWIGARLISGASAIIFPIIKAEGIRQMFFPVTVPAYYRTPPTNLDD

SEQ ID NO: 24789 - DNA, 1479 bp, Glycine max
attgccttcactttcaacccgtactttctctgtttctaaacaccccccacaaaattttctcactcgagaattttcccggaaaatctcacctttttcgatttctcagtcaagacaaacaacaacaaaaactctaaattctttcttaattcttgccaaattcgaaggagagagaaagagaaaaagaaaaggaaaaaaggttaatggcatcactgggatctccgtcttctttctggtgctaccgctgcaaccgcatagttagggttccacaaaaccacgccgttctcctctgccccgattgcaactccggcttcctcgaagagctccaaacccctccccactcgcgccgatccacgcgcggcggcggtgggtcccccttcaacccggtaatcgtcctgcgcaacgcaaacgacgtcgtctcgcccgaaacgcggaacttcgaactctactacaacgacgccgtttcaggttcctccggcccaagcagtctccgtcctttaccacagggagtatccgagttcctcatgggctccggcttcgacaatgtactcgaccatctcgacgccgccgcggggggcgccggagcactgccccccacggcagcgtcgaaagcggcgatcgagtcgatgccggtggttaagatcctcgcgagccacacctacgcggaatcgcactgcgcggtctgcatggagaatttcgagatcaactgcgacgcacgtgagatgccgtgcggtcacgtgtaccattccgagtgcatcgtgccgtggctctcggtgagaaactcgtgccccgtgtgccgccacgaggttccttcggatgaagttgaagaaagtaataacaatactgtggggttgactatttggagacttcctgggggaggattcgctgtgggcaggttcatcggagggagggagctcccactggtgtatacggagatggacggcgggtttaacggcgctaacggcgttccaaggagagtcgcttgggatagctccgttgggaggtctagggagaatagaggcttcggtgctgctttcaggaatgttttttcgtatatcgggagggttaggagctcgttttctcgccgaacgagaaattcgcgtgccaacggaagatctcgttcttaaacaacggtctgcaattgcaatttcgatcgtaacgtcaaggttattagagctcactgactgtgacgcggtcgcaattgatgctgcgctgtcctcaacatttttctgcaattttctacgatatcaaaggctgcggtgatgagaccgcaatcgcagattcgcagtaaggttttaagaaaaaacgtgattgcaattgacgtcacatcagctgcatttgtctgcaatttttctgttgtattcggaaacaatgacgagactgcaacttttttttaccacagtgggatttttcgatttttgtgatgtttttagtttgctaagtattcgtttgaatttttagaggaaatgcatttttttttat

SEQ ID NO: 24790 - protein, 307 aa, Glycine max
MASLGSPSSFWCYRCNRIVRVPQNHAVLLCPDCNSGFLEELQTPPHSRRSTRGGGGSPFNPVIVLRNANDVVSPETRNFELYYNDAVSGSSGPSSLRPLPQGVSEFLMGSGFDNVLDHLDAAAGGAGALPPTAASKAAIESMPVVKILASHTYAESHCAVCMENFEINCDAREMPCGHVYHSECIVPWLSVRNSCPVCRHEVPSDEVEESNNNTVGLTIWRLPGGGFAVGRFIGGRELPLVYTEMDGGFNGANGVPRRVAWDSSVGRSRENRGFGAAFRNVFSYIGRVRSSFSRRTRNSRANGRSRS

SEQ ID NO: 24791 - protein, 200 aa, Glycine max
MGSGFDNVLDHLDAAAGGAGALPPTAASKAAIESMPVVKILASHTYAESHCAVCMENFEINCDAREMPCGHVYHSECIVPWLSVRNSCPVCRHEVPSDEVEESNNNTVGLTIWRLPGGGFAVGRFIGGRELPLVYTEMDGGFNGANGVPRRVAWDSSVGRSRENRGFGAAFRNVFSYIGRVRSSFSRRTRNSRANGRSRS

SEQ ID NO: 24792 - protein, 166 aa, Glycine max
MPVVKILASHTYAESHCAVCMENFEINCDAREMPCGHVYHSECIVPWLSVRNSCPVCRHEVPSDEVEESNNNTVGLTIWRLPGGGFAVGRFIGGRELPLVYTEMDGGFNGANGVPRRVAWDSSVGRSRENRGFGAAFRNVFSYIGRVRSSFSRRTRNSRANGRSRS

SEQ ID NO: 24793 - DNA, 2014 bp, Glycine max
ccataaatgtgtgaaattctatgatggactttcgaagcagcttgtgcatcaaggtcatgtactagatctttttgcttgtgctcttgatcaggttggaattgctgaacttaaaactgctgttgaaagaaccggaggtcttgttgtacttgctgaaagttttggccattcagtgttcaaggattcactaaagcgtattttccaatcgggtgattatgatttgggcctatcttcaaatggaatatttgagataaactgctctaaggacttgaaagtccaaggtattattggcccttgtgcatctcttgaaaagaaaggcccattatgctcagatgttactattggtcaagggggtacaagtgcatggaaaatgtgtggccttgacaaatccacatcattgtgtctattttttgacgttgtgaggaaggaaactcctgatgcaacaatccagtccacaagcaatcaattttacttccaattcttgacttattatcagaataacggtgggcaaatgagattacgggttacgaccctttcacgtagatgggttgctggacctgaaagtatacaggacttgattgctggatttgaccaagaagcagctgctatagtcatggcacgccaagtctccttcaaaatggaaacagaggaattgatcttacacttggtctctcataggagtgactgtggttggtctcaaaccaggaaaatcatgttcaagtttgaaaatgccttctccttcaataaatggatccccaccacgagtgtgtaaattaatttacagaactaaaaatgcattataattaattactgcatgttatagataccacatgcagaaaaaagtatgtatggaggtttttagaaattattgttatttgatatcttaaaatcaaattctgcaataggaaaaaaaatcaaacaacattgagtttatccagctaaaaactacattaccgcatgaaaagtggcatggggtttccttttcttttcctcctttcatgaaaaagaatgaggaactatagtgaattgaaacccattatacaagaactacagttgaaaagtacattgacataaagaatcaagagtctcagaagtttgctttgccacttgatacacatgacacacacccatagaggccgaatttgatcctatcagatggttggacaaggcattgataaatttgtgttctcggtttggggaatttcaaaaagacactccatcttctttcagtttgtctcccaggttgtcaatattccctcaatttatgtttcatttacgacgctctcagtttgttcaggtctttaacaacagcccagatgagactgcttactttagaatgatactaaaccgtgaaaatgttgcgaattctgttgtcatggttcagccttcgttgatttcttattcattccatgctggtcctgaaccagctcttcttgatgttgcagccattgcggctgataagatcctgcttttggattcatttttcacagttgtcatttttcatggttcaaccattgctcagtggcgtaaggctggatatcataatgaaccagaacatcaggcatttgctcaattgctacgagctcctcatgatgatgctgatttaattataaaggagagatttcctgtacctcgcctggttgtttgtgatcagcatggctctcaggctcgatttttactggcaaagttaaacccttctgctacttataacactgaatcttacaatcccggaggggatattatctttacggatgatgttagctttgatgtcttcctggatcacttacagagattagtagttcaataaaattatattgaccttagactttttatgtaaaattttccttcaattgctgcctgcttgtacattaccttcattttagtacgctgttataatttccaattttgtgcaaaatgttgtaattatttggaatcgtgcactctccaatcgattacatgagtattgaatctattttcctttgtgtagctttttattcagatttaaaactttaaaaac

SEQ ID NO: 24794 - protein, 255 aa, Glycine max
HKCVKFYDGLSKQLVHQGHVLDLFACALDQVGIAELKTAVERTGGLVVLAESFGHSVFKDSLKRIFQSGDYDLGLSSNGIFEINCSKDLKVQGIIGPCASLEKKGPLCSDVTIGQGGTSAWKMCGLDKSTSLCLFFDVVRKETPDATIQSTSNQFYFQFLTYYQNNGGQMRLRVTTLSRRWVAGPESIQDLIAGFDQEAAAIVMARQVSFKMETEELILHLVSHRSDCGWSQTRKIMFKFENAFSFNKWIPTTSV

SEQ ID NO: 24795 - protein, 180 aa, Glycine max
MFHLRRSQFVQVFNNSPDETAYFRMILNRENVANSVVMVQPSLISYSFHAGPEPALLDVAAIAADKILLLDSFFTVVIFHGSTIAQWRKAGYHNEPEHQAFAQLLRAPHDDADLIIKERFPVPRLVVCDQHGSQARFLLAKLNPSATYNTESYNPGGDIIFTDDVSFDVFLDHLQRLVVQ

SEQ ID NO: 24796 - protein, 156 aa, Glycine max
MILNRENVANSVVMVQPSLISYSFHAGPEPALLDVAAIAADKILLLDSFFTVVIFHGSTIAQWRKAGYHNEPEHQAFAQLLRAPHDDADLIIKERFPVPRLVVCDQHGSQARFLLAKLNPSATYNTESYNPGGDIIFTDDVSFDVFLDHLQRLVVQ

SEQ ID NO: 24797 - DNA, 1306 bp, Glycine max
attcgaaaacaccaactacgactttgagtggtcaaaaacctctgcgcttctctctcaagtctcaaagacacgctccctgaaaaccctaacatctaccacttctctgagatctccgccgcaaccgccaatttctccgcgccacgcctttcctcttcctcctggcgctgcgtaattcgtcaccgcgaagtcgtcgtttcgcgccgcgacttccgccgtcaaattgatatcccggagctcagccgccgcctcgccctcatctgccggagtcaccacagcagcctcttgaaactcctcggcgcgtcggtctctggcgccgtcatcttcctcgtcaacgagttcgtccccggcgccagcctcgccgactgcctccgcaaccgccggaaccctagcttcaccgatctcaacacgtggatctctcggatgcagatcgcgtccgacgtggcgcacggtctcgattacatccacaatttctctggttccggttcggattccggttccggatcaggatccggattcgttcacaagcacatcaagagttcgagcattgttatcacggaggagaatctgcgcgcgagaatctgccacttcggcgtgtcgggtctctgcggcgaggccgtcgccggcgacggcgatccttctggcggccggactgtgaggatctaggggaggagaggctacatggcgccggagtttcagatcagcggcgtcgcgacgaagaagagcgacgtgtacgctttcggagtggtggttttggagctgctgagcggggaagaggcggtgaagttcgaattcaacgacgacggcggttatcgcaggattagcgtggtggagacggcaaagattgcggcggaggagaacggcggcgtgaggaagtgggtggatacgaggctgagggattcatttcccgtgaatgttgcggagagaatgattcgggtcggattggaatgtgtcggggatgacccgaatgagagacccgatatgggttgggtttctgatgaggtgtcgaagttgtatttggatctcgttggccccacggtgacttcttttggttgggtttgaggggttttcttttctttttatttgcattcgctatgaattttgattgtaaagaaagagaaaaaactgactgtgaaaagagattgatgtataattttatactttgtatagtacatgattgcggatatgaaggaaaaggtgaagtttgaagcactcaaatcagccaattgggcttgagtggaatggaaggattctgtcttgtgtagaatttggattttgaacaaaataaacatatttagttaagcaagcg

SEQ ID NO: 24798 - protein, 126 aa, Glycine max
MAPEFQISGVATKKSDVYAFGVVVLELLSGEEAVKFEFNDDGGYRRISVVETAKIAAEENGGVRKWVDTRLRDSFPVNVAERMIRVGLECVGDDPNERPDMGWVSDEVSKLYLDLVGPTVTSFGWV

SEQ ID NO: 24799 - protein, 80 aa, Glycine max
MQIASDVAHGLDYIHNFSGSGSDSGSGSGSGFVHKHIKSSSIVITEENLRARICHFGVSGLCGEAVAGDGDPSGGRTVRI

SEQ ID NO: 24800 - DNA, 1241 bp, Glycine max
caacacgttcgccgccgtcaccaaaggcgggtccgccaagaaactcctccgcgcgccggacttcacgagggaaaccgtcttcaactccgccgccgtcctccccgtcccctccggcggccccaccgtcaccttcgacgccaacgagcctctccgggaacgcgtcttccacttctcccgcgaagccattcagaaactcaaacaacgagccaacaacactgtcaacaacaaggaactaacggaagttatgggaaaacatgtaaatgacggttggaaagtcgttaacggtaacggtaactgtaacggaatgattaacggtaacggaagaaacgagatctcgtcgtttcagtcgttatctgctcagctctggagagcggtgacacgtgcgaggaaattcaacgacccggccaaaacgtcgacgtttcggatggcggtgaattgccgccaccgtctggagccgaagatggacgcgttctacttcggcaatgcgattcagagcatcccgacggtcgcgaccgtcggagacattctctcgcgcgatctgcgcttctgcgcagatcttctgcaccgtaacgtcgtcgctcatgatgacgctacggtgcgccgcggaattgaggactgggagagtgcgccaaggctgtttcctctcggaaactttgacggcgcgatgatcaccatgggaagctctccgcggtttcccatgtacgaaaacgacttcggctggggcagacccgttgcgattcggagtgggaaagcgaacaagttcgacggaaagatctccgcgtttccggggagagagggaaacggcagcgtcgatttggaggtcgttttggccccggcgaccatggcggggctcgaaaacgacatggagtttatgcaatacgtaacgcaattcgtttgaataagtttgttcatgaagtttcggcacagtagtagtgatagtgaaaactgggaggagggagggagtgaaaaaaaaattataagtcggtgatgaaacgacggggaaggtgggtgggtgattgcacgacaatagtaccatggggtgtgggcgtcgttttgtgtcagtcaaaggtcaaacgttcggggagtggggtctcttttttaggctgtgtttgagtgtttcggtggttggcccaaatgatataatggtttttctgtacgtgattccggggaggtttttcagtcttcacttttcaggtgaccaataacaggacgaaataataatatggatgatgatgatgatg

SEQ ID NO: 24801 - protein, 298 aa, Glycine max
NTFAAVTKGGSAKKLLRAPDFTRETVFNSAAVLPVPSGGPTVTFDANEPLRERVFHFSREAIQKLKQRANNTVNNKELTEVMGKHVNDGWKVVNGNGNCNGMINGNGRNEISSFQSLSAQLWRAVTRARKFNDPAKTSTFRMAVNCRHRLEPKMDAFYFGNAIQSIPTVATVGDILSRDLRFCADLLHRNVVAHDDATVRRGIEDWESAPRLFPLGNFDGAMITMGSSPRFPMYENDFGWGRPVAIRSGKANKFDGKISAFPGREGNGSVDLEVVLAPATMAGLENDMEFMQYVTQFV

SEQ ID NO: 24802 - protein, 217 aa, Glycine max
MGKHVNDGWKVVNGNGNCNGMINGNGRNEISSFQSLSAQLWRAVTRARKFNDPAKTSTFRMAVNCRHRLEPKMDAFYFGNAIQSIPTVATVGDILSRDLRFCADLLHRNVVAHDDATVRRGIEDWESAPRLFPLGNFDGAMITMGSSPRFPMYENDFGWGRPVAIRSGKANKFDGKISAFPGREGNGSVDLEVVLAPATMAGLENDMEFMQYVTQFV

SEQ ID NO: 24803 - protein, 197 aa, Glycine max
MINGNGRNEISSFQSLSAQLWRAVTRARKFNDPAKTSTFRMAVNCRHRLEPKMDAFYFGNAIQSIPTVATVGDILSRDLRFCADLLHRNVVAHDDATVRRGIEDWESAPRLFPLGNFDGAMITMGSSPRFPMYENDFGWGRPVAIRSGKANKFDGKISAFPGREGNGSVDLEVVLAPATMAGLENDMEFMQYVTQFV

SEQ ID NO: 24804 - DNA, 1220 bp, Glycine max
atgcatccaacgtgacatccacactcaactcaaaaaccaattccaataatggcgaccttatctatgtcatcttgatcgtaatccccgtcatcaaactctttctttattctacgattcacaatcaaaacccaacaacttcaactctccaatctctatcctcaattcaacccttttggtggcaacttctatttatgctacaaaaaatgctgcgattgcacttcaccaccgcactctctcactttgcttccaaggcctcaccttttcctctcacacccgtttccgttaccgtttccagagctattgtttgcaacaaccccaccaggttcagatcgcaaatgggttctttctccacttcctcttcctcttcctccaaactcttgttccgccagctttttgagaaggaatcttccacctacacttaccttctcgctgatgcctcgcacccagaaaaacctgcacttctgattgacccagttgataggacagtagacagggacttgtcgatcattgagcaactggggttgaagcttgtgtatgccatgaacacacatgtgcatgcggatcatgtcactgggactggccttatcaagagcaaagttccttctgtaaaatctgttatttcaaaagcaagtggtgcaacggcagatctttatgtggagccaggtgataaggtccaaattggtgatctttttctagagggtgggagttcagagcagctttacaaatcaatccattcacagattttaacactgcccaagagtacgttaatctatccagctcatgactacaaaggattcactgtgagcactgttggagaggagctgcaaaacaatccacgcataacaaaggatgaggaaactttcaagaacatcatgggaaatcttaacctgtcatatcctaaaatgattgacatagctgtcccagctaatatggtttgcggaatccaatccaatccaaagcaagctgaggcttcataagccttatctgagagtcacacactgatgttatttgacacaaagaccttgcaagcaaaagggggaaaaattgttatagccctttgaattgaagagaaaaatggaaattgtaaataaataaaatggtatttgtgttgtggcccaatataattagaattaggttccagtgattatgctgtgtttctgttgtatctgattgtttatgttaaaacttcctaatcctatacttcaaagccaaattttcag

SEQ ID NO: 24805 - protein, 324 aa, Glycine max
ASNVTSTLNSKTNSNNGDLIYVILIVIPVIKLFLYSTIHNQNPTTSTLQSLSSIQPFWWQLLFMLQKMLRLHFTTALSHFASKASPFPLTPVSVTVSRAIVCNNPTRFRSQMGSFSTSSSSSSKLLFRQLFEKESSTYTYLLADASHPEKPALLIDPVDRTVDRDLSIIEQLGLKLVYAMNTHVHADHVTGTGLIKSKVPSVKSVISKASGATADLYVEPGDKVQIGDLFLEGGSSEQLYKSIHSQILTLPKSTLIYPAHDYKGFTVSTVGEELQNNPRITKDEETFKNIMGNLNLSYPKMIDIAVPANMVCGIQSNPKQAEAS

SEQ ID NO: 24806 - protein, 261 aa, Glycine max
MLQKMLRLHFTTALSHFASKASPFPLTPVSVTVSRAIVCNNPTRFRSQMGSFSTSSSSSSKLLFRQLFEKESSTYTYLLADASHPEKPALLIDPVDRTVDRDLSIIEQLGLKLVYAMNTHVHADHVTGTGLIKSKVPSVKSVISKASGATADLYVEPGDKVQIGDLFLEGGSSEQLYKSIHSQILTLPKSTLIYPAHDYKGFTVSTVGEELQNNPRITKDEETFKNIMGNLNLSYPKMIDIAVPANMVCGIQSNPKQAEAS

SEQ ID NO: 24807 - protein, 257 aa, Glycine max
MLRLHFTTALSHFASKASPFPLTPVSVTVSRAIVCNNPTRFRSQMGSFSTSSSSSSKLLFRQLFEKESSTYTYLLADASHPEKPALLIDPVDRTVDRDLSIIEQLGLKLVYAMNTHVHADHVTGTGLIKSKVPSVKSVISKASGATADLYVEPGDKVQIGDLFLEGGSSEQLYKSIHSQILTLPKSTLIYPAHDYKGFTVSTVGEELQNNPRITKDEETFKNIMGNLNLSYPKMIDIAVPANMVCGIQSNPKQAEAS

SEQ ID NO: 24808 - DNA, 1307 bp, Glycine max
attgtcgtccatctctccaaagagctcaagcgcatcatcactgccactgctttcatcctccaacaactatcgccctgccgttattctcccaggcttagggaacaactccggtgactaccagagtttgaagcaaacgctgaacgacaagtacggcgtggccaccgtggtggccaaggtgtcgaggcttgattggttccgcaacgctgctggtttgctcgaccgcaattattggcgtggcactctgctacccagacctgtcctcgattggtatttggagagggttcacgatgctgttcaagaggctaaggagggtgctgcaaatggaactgtgtctttgattggacactcggcaggaggatggctcgcgcgtgtctatatggaagaatttggagtgtccaacgatatatccctcttattgacccttggaactcctcatctaccacccccgaaaggcgtgcaaggggttattgatcaaacgcggggtctccttgattatgttgaacaaaattgctccaaacctgtttacacccctcaggctcaagtcaagtatgtatgtatagcaggaaggtatattaaaggagcaaggctttttggcaactccaatccaaatccagatattgagggcgaggctcagctagtatccgatgctgctattctcaccacctatccatctaaatctaatacaacattacgtgctcgctttgtggggcaaggatacaaacaggtttgtggccaagcagatgtatggggcgatggtgttgtaccagaagtatcagctcatcttgagggtgcacttaacattagcttccatggagtttatcactcgccagttggtgcagatgatgcaaccagaccatggtatggttcacctcatgtcttggaccaatgggtacaacaccttcttaattaattttcaaatgtttcaccacttcatctatgtattgtttaatctgttaccaagtcattgttttatcattctatatatagcctctccttcctctggctccttctgtaatttattgttaccttttctaattaacacgtgttattttgtcttgagagttgagatgagatcatcaattcacttaactggagctcattcatgttagagacttagagttgtgagactttttgtcttttgaataagtagagtctttgctgttacagacttttctccttattttttctgttttttagttagttattgctatcccaataaaatcttagtagttgagattttttaagcatagcccaagaattgtctgttgtattctttgtcttcaattctaatttctaaatttcatacc

SEQ ID NO: 24809 - protein, 302 aa, Glycine max
LSSISPKSSSASSLPLLSSSNNYRPAVILPGLGNNSGDYQSLKQTLNDKYGVATVVAKVSRLDWFRNAAGLLDRNYWRGTLLPRPVLDWYLERVHDAVQEAKEGAANGTVSLIGHSAGGWLARVYMEEFGVSNDISLLLTLGTPHLPPPKGVQGVIDQTRGLLDYVEQNCSKPVYTPQAQVKYVCIAGRYIKGARLFGNSNPNPDIEGEAQLVSDAAILTTYPSKSNTTLRARFVGQGYKQVCGQADVWGDGVVPEVSAHLEGALNISFHGVYHSPVGADDATRPWYGSPHVLDQWVQHLLN

SEQ ID NO: 24810 - protein, 177 aa, Glycine max
MEEFGVSNDISLLLTLGTPHLPPPKGVQGVIDQTRGLLDYVEQNCSKPVYTPQAQVKYVCIAGRYIKGARLFGNSNPNPDIEGEAQLVSDAAILTTYPSKSNTTLRARFVGQGYKQVCGQADVWGDGVVPEVSAHLEGALNISFHGVYHSPVGADDATRPWYGSPHVLDQWVQHLLN

SEQ ID NO: 24811 - protein, 154 aa, Glycine max
MLLFSPPIHLNLIQHYVLALWGKDTNRFVAKQMYGAMVLYQKYQLILRVHLTLASMEFITRQLVQMMQPDHGMVHLMSWTNGYNTFLINFQMFHHFIYVLFNLLPSHCFIILYIASPSSGSFCNLLLPFLINTCYFVLRVEMRSSIHLTGAHSC

SEQ ID NO: 24812 - DNA, 1749 bp, Glycine max
actctggagaatttatgaaccggagtttgtatttttctctgttaattctataatttttttctcaaaattttgtgttaatttcgaagctttctgtgttctctgcaatggtgcagatttgagctcacagcactgcgattttctcggtggccaagctcaaactgctccaatttcatttctgggtttcatcttttcaccattttagacaaaaaaaattgtgtttttaaagtttcctgtaagattataaattttttctgcacccaaatctgtttcctcttaaataaagttagtatttaccccctttaaaaaaattcaatttttttgtgatttttttgggtgattgggtgtggaagagcccgaatcttcaatggatagggtttaagtgaagttttgaggttttggggtatcttagttttttttctttgatttgcataaaaatggagggaagagagaattttggtgttgtggtgggtgatgaggccccagagagcttccatgtggctcctagaattgagaacaacttggacttttcaagggccaccgtgccggcgccggcgccggccacggaggggaagaagaagagagggaggccgaggaagtatgggccggatgggaagccggcgttgggggcggtgacagcgctttcgccgatgccgatttcttcgtcgattccgttgaccggcgagttctctgcttggaagagtggtagagggaggcctgttgaatctatcaagaagtcatcgtttaagtttgaggttgaaagccctggaccagttgagggaatagcatactcagttggtgccaatttcacaccacatgtgctcacagtaaatgctggcgaggatgtcactatgaaaattatgaccttctctcaacaaggatcacgtgctatatgcattctctcagcaactgggacaatttcaaatgttactcttcgtcaaccgtcttcttgtgggggtactttaacgtatgagggactgtttgagattctttccttgtctggttcctttatgccaactgagaatggagttacaagaagtagatctggtgggatgagtgtctctttggctggtccagatggtcgagtaatggggggcggacttgctggtttgttggtagctgctggtccagtgcaggttgtggtggccagttttcttcctggtcaccagttggagcataaaaccaaaaagcaaagggtggagcatgtatcaactattagcccttcacctgttaatcttatcactagtgaggaaataaaagtaagttttggtggagtaaagcctattatgacccctgctgcttttcaagaagagaatattgcttcttttaacaatgttcaagactctaggaactcatctgctgatgacaaagatcctttgcctgaaaaggagtctaacctaagccaatcaaatgctgaggctgcatgctaaacatattccctgtgaattatttgatgttatgcagagtcaacctcatttaggctctcactcatgcttgactgacagctgacaattaacttacaaagacaactctgatggtcagatgagtgtcacacgatggttttgactcaacagttgcactctttggttggtactaggtgttagttggcaaatctgtttgttaggttttccacgtgtcatttctccagatgtatctgtagtattgtttactcattgttgtatcaattagatataggatatatgttgtgccattttctcccttatttatattctatatggatatgtatgttat

SEQ ID NO: 24813 - protein, 330 aa, Glycine max
MEGRENFGVVVGDEAPESFHVAPRIENNLDFSRATVPAPAPATEGKKKRGRPRKYGPDGKPALGAVTALSPMPISSSIPLTGEFSAWKSGRGRPVESIKKSSFKFEVESPGPVEGIAYSVGANFTPHVLTVNAGEDVTMKIMTFSQQGSRAICILSATGTISNVTLRQPSSCGGTLTYEGLFEILSLSGSFMPTENGVTRSRSGGMSVSLAGPDGRVMGGGLAGLLVAAGPVQVVVASFLPGHQLEHKTKKQRVEHVSTISPSPVNLITSEEIKVSFGGVKPIMTPAAFQEENIASFNNVQDSRNSSADDKDPLPEKESNLSQSNAEAAC

SEQ ID NO: 24814 - protein, 259 aa, Glycine max
MPISSSIPLTGEFSAWKSGRGRPVESIKKSSFKFEVESPGPVEGIAYSVGANFTPHVLTVNAGEDVTMKIMTFSQQGSRAICILSATGTISNVTLRQPSSCGGTLTYEGLFEILSLSGSFMPTENGVTRSRSGGMSVSLAGPDGRVMGGGLAGLLVAAGPVQVVVASFLPGHQLEHKTKKQRVEHVSTISPSPVNLITSEEIKVSFGGVKPIMTPAAFQEENIASFNNVQDSRNSSADDKDPLPEKESNLSQSNAEAAC

SEQ ID NO: 24815 - protein, 192 aa, Glycine max
MKIMTFSQQGSRAICILSATGTISNVTLRQPSSCGGTLTYEGLFEILSLSGSFMPTENGVTRSRSGGMSVSLAGPDGRVMGGGLAGLLVAAGPVQVVVASFLPGHQLEHKTKKQRVEHVSTISPSPVNLITSEEIKVSFGGVKPIMTPAAFQEENIASFNNVQDSRNSSADDKDPLPEKESNLSQSNAEAAC

SEQ ID NO: 24816 - DNA, 1296 bp, Glycine max
acaattccacgcatcaaccaaatctaactctctttctctgtcccccacacccctccctcctatgtcctatcccattctgaagaaacacaattacaggttagaaccccccatatcaaagctaaagtcttttggagccaaacttgaagttttattcatcatcttcacctcgaatcagatgagggagaagttcctattattcaacttttgttagcagtaaaagctctcttctttatttttttatttatttattttgtttctaataaggagttaaagacaatttgttgttggtgttgccatgagggagtttccttcttgttttggagaaaatggggttcagattgctgactcatcctcatcaagcaccacaagagcagctcaaaatgtggttacgtgtgtctatcagtgcaaattaagaggccgttcatgcctgattacagtctggtggacaaaaactctgatgggtcaaggcttgagtgtgggaatagatgacttgggaaaccattgcctctgcaaggtggagataaagccatggctcttctcgaagagaaaagggtcaaagaatttggaggtccaatctggtaaagttgacatcttttgggatttgagttgtgccaagtttggttcagggcctgagccattggaggggttctacttagcggttgtgttcaacaaggagatggtgttgctcctaggggatctgaaaaaggaggcatgcaagaagattgagagtgattgtgccttttctcactgtggtgctgtttgcattgcaaagagagagcacattattgggaagaagttttatggtgcaaaggctcagttttgtgacaaggggcaggtgcatgatgtcacaattgagtgtgacactttggggcccagcgatccctctcttgtgattcgaattgatagcaagacagtgatgcaggtgaagcgtctcaagtggaagttccgagggaatcacaccattttggtggatggtgttccggttgaagtgttttgggatgtgcacagttggctctttgggaatgctatgggcaatgcagtgttcatgttccaaacatgcatttcaaatgataagatgtgggaaggccaatcagtttctgatccctctgcattaacatgggcttcttctcagcagtttagggattctcaattgcaaggctttgggttctctctcattttttatgtttggaaacatgagtaatcaatagaggtgttaagtcttattcctcaatgttacatttatattgacagccacatttttcaacaatgaaactgatcaacttgcccctttttccc

SEQ ID NO: 24817 - protein, 301 aa, Glycine max
MREFPSCFGENGVQIADSSSSSTTRAAQNVVTCVYQCKLRGRSCLITVWWTKTLMGQGLSVGIDDLGNHCLCKVEIKPWLFSKRKGSKNLEVQSGKVDIFWDLSCAKFGSGPEPLEGFYLAVVFNKEMVLLLGDLKKEACKKIESDCAFSHCGAVCIAKREHIIGKKFYGAKAQFCDKGQVHDVTIECDTLGPSDPSLVIRIDSKTVMQVKRLKWKFRGNHTILVDGVPVEVFWDVHSWLFGNAMGNAVFMFQTCISNDKMWEGQSVSDPSALTWASSQQFRDSQLQGFGFSLIFYVWKHE

SEQ ID NO: 24818 - protein, 247 aa, Glycine max
MGQGLSVGIDDLGNHCLCKVEIKPWLFSKRKGSKNLEVQSGKVDIFWDLSCAKFGSGPEPLEGFYLAVVFNKEMVLLLGDLKKEACKKIESDCAFSHCGAVCIAKREHIIGKKFYGAKAQFCDKGQVHDVTIECDTLGPSDPSLVIRIDSKTVMQVKRLKWKFRGNHTILVDGVPVEVFWDVHSWLFGNAMGNAVFMFQTCISNDKMWEGQSVSDPSALTWASSQQFRDSQLQGFGFSLIFYVWKHE

SEQ ID NO: 24819 - protein, 174 aa, Glycine max
MVLLLGDLKKEACKKIESDCAFSHCGAVCIAKREHIIGKKFYGAKAQFCDKGQVHDVTIECDTLGPSDPSLVIRIDSKTVMQVKRLKWKFRGNHTILVDGVPVEVFWDVHSWLFGNAMGNAVFMFQTCISNDKMWEGQSVSDPSALTWASSQQFRDSQLQGFGFSLIFYVWKHE

SEQ ID NO: 24820 - DNA, 1820 bp, Glycine max
agtattttggttcgtttcttgttaaaaacgcccccatccccttcgtttcccatttccgaggttgttgccggccacccaaacccaattcacatcattatcttttttctttctttcttgtgtttgtgtgtttcctcaaaattcacaattacaatcctcacaatcctcctcccttcatttctcaaattcccaatatttcaccaattcaaaacccttcatcattgatcttttcactcttttcttctttgctcgcaacattcattcacaatttgggtgctccttctgtttcttctcctcaccattggattggataatctgcaatttcttcaattgacaaaagcaacgggagttgggttccaacggaattatggttttcctcattgcgatgtttagggaagccagctatgtcatttgtcttttgctttgagaaacctaatttgtgatttttaaatggaaaagaaaagattggatgactatgaacctggtcctgttccttcaccaagagcattagatagatttgggtttgtaaaacaggatgttaatacttctgaaggcttagtcaagaatagatcagcctacgagtatgagagatatagggaggagagaagggttagaaaatggaggaagatgattggggttggtggcagtgactggaagcattatctaaggagaaaacctcatgttgtgaaaaggcgtataaggaaaggaattcccgattgtttaaggggccttgtttggcaattgatatctggaagtcgagacctattgctgatgaaccctggagtttatgagcaactagtcatatatgagacatctgcctctgaactggatataattcgagatatttctcgaaccttcccttcacatgtattctttcaacagagacatggacctgggcagcggtccctctacaatgttctaaaagcttactctgtctttgacagagatgtaggctatgttcagggcatgggatttttagcggggcttttgcttctttatatgagtgaggaggatgcattttggttgttggtggcattgctaaaaggagccgttcatgctccaatggagggcttgtatctggcaggattgcctctggtacagcaatacctctttcaatttgaatgctcggtgagggagcatctaccaaagttgggagaacatttttcctatgaaatgataaatcctagcatgtatgctagccagtggttcataactgtattttcatattcctttccatttcatttggctcttcgaatttgggatgtcttcctctacgagggtgttaaaattgtctttaaagttggcttggccctattaaagtactgccatgatgacttgattaaactacctttcgaaaaactcatacatgccttgaaaaactttcccgagggtgcaatgaatccggatacattgttaccactggcttattctatcaagatatccaagcgtttagaagaattgaaacaagagtatgagaagaagaatggaaagataagacgatctggagaactttctgaaaaaccaatacttcctagtgtccagggcaattgaagcaggacatatgcaagacaacatttgctggacatgtaaaactattggtaaagctgagcggaggacctcccagtgaaggtctatctttcctgctgggaactaatccattgtgaaaaccataccctcaaattctatgttgagaccatatgttgcatactatgtacagttgtattagttgctcactcttgtcaaaattcagtgttttataaagatgaagttgtctttataaattgtggttattgttattatgcttaattactattttagttccc

SEQ ID NO: 24821 - protein, 366 aa, Glycine max
MEKKRLDDYEPGPVPSPRALDRFGFVKQDVNTSEGLVKNRSAYEYERYREERRVRKWRKMIGVGGSDWKHYLRRKPHVVKRRIRKGIPDCLRGLVWQLISGSRDLLLMNPGVYEQLVIYETSASELDIIRDISRTFPSHVFFQQRHGPGQRSLYNVLKAYSVFDRDVGYVQGMGFLAGLLLLYMSEEDAFWLLVALLKGAVHAPMEGLYLAGLPLVQQYLFQFECSVREHLPKLGEHFSYEMINPSMYASQWFITVFSYSFPFHLALRIWDVFLYEGVKIVFKVGLALLKYCHDDLIKLPFEKLIHALKNFPEGAMNPDTLLPLAYSIKISKRLEELKQEYEKKNGKIRRSGELSEKPILPSVQGN

SEQ ID NO: 24822 - protein, 307 aa, Glycine max
MIGVGGSDWKHYLRRKPHVVKRRIRKGIPDCLRGLVWQLISGSRDLLLMNPGVYEQLVIYETSASELDIIRDISRTFPSHVFFQQRHGPGQRSLYNVLKAYSVFDRDVGYVQGMGFLAGLLLLYMSEEDAFWLLVALLKGAVHAPMEGLYLAGLPLVQQYLFQFECSVREHLPKLGEHFSYEMINPSMYASQWFITVFSYSFPFHLALRIWDVFLYEGVKIVFKVGLALLKYCHDDLIKLPFEKLIHALKNFPEGAMNPDTLLPLAYSIKISKRLEELKQEYEKKNGKIRRSGELSEKPILPSVQGN

SEQ ID NO: 24823 - protein, 259 aa, Glycine max
MNPGVYEQLVIYETSASELDIIRDISRTFPSHVFFQQRHGPGQRSLYNVLKAYSVFDRDVGYVQGMGFLAGLLLLYMSEEDAFWLLVALLKGAVHAPMEGLYLAGLPLVQQYLFQFECSVREHLPKLGEHFSYEMINPSMYASQWFITVFSYSFPFHLALRIWDVFLYEGVKIVFKVGLALLKYCHDDLIKLPFEKLIHALKNFPEGAMNPDTLLPLAYSIKISKRLEELKQEYEKKNGKIRRSGELSEKPILPSVQGN

SEQ ID NO: 24824 - DNA, 1134 bp, Glycine max
tgcaacgaagatgttctgatctgcgtcgacgtcgatcctcagtgcctcgtcgaaatgaaaggtgccaccggtcccaatggcagacccctcacccgtttggactccatcaaacaagccatcgttctcttcgtcaatgccaaactcaccatcaaccccgaacaccgttttgccttcgccactctctccaacaccctcgtcaggaaagagtttagcagtgaaattgagtcaacacttgcagcaatgcgtgttctttcagcttcttcttcttcttccaccaccgccggccaacccgatctcactcatttgttccgtcttgccgctcatgaagccaagaaatcccgtcttcagggtcgcatcctaagagtcattttgttctactgtagatcatcagagcgaccaaagcatcagtggcctgtgaaccagaagctcttcactttggatgttatgtaccttcatgataaacctggaccagataactgcccccaggaggtttacgatacactggtggaggcacttgaacatgttagtgaatatgagggttatatcttggagagtggacaggggttggcacgtgttctattccgtcatgtgctgatactattgtcacatcctcagcagcgttgcatccaagagtatgttgacataccaaagtcaattgcaaagaagcctccccaggtggagcctatggctactgaagatagtgctcccatatcaagccaataatactatgagttgggaagtggatggcagttgcatgtggtcaacctcttaaggggaatggaatatgatcataattcagcaatgttcaagttggaggttagtgtcactaggttgacaagggaatgattgttactagcgtaacagtttctgaaattggattcgattcctacaaccctctttcgttctcaagttgataccatttactattttgaatcaaatgtatgaaaagtgtactttcaaacatatccatattcattagtaatcaagcgtttaggtctggtaatgaaagtgagcaagggatgtgattatacacaagctgttagattttattttatttttcttgtcggtaactttcaaagacaaagacaatattaataaatttataacacaaagacaatattaataaatttatag

SEQ ID NO: 24825 - protein, 240 aa, Glycine max
CNEDVLICVDVDPQCLVEMKGATGPNGRPLTRLDSIKQAIVLFVNAKLTINPEHRFAFATLSNTLVRKEFSSEIESTLAAMRVLSASSSSSTTAGQPDLTHLFRLAAHEAKKSRLQGRILRVILFYCRSSERPKHQWPVNQKLFTLDVMYLHDKPGPDNCPQEVYDTLVEALEHVSEYEGYILESGQGLARVLFRHVLILLSHPQQRCIQEYVDIPKSIAKKPPQVEPMATEDSAPISSQ

SEQ ID NO: 24826 - protein, 222 aa, Glycine max
MKGATGPNGRPLTRLDSIKQAIVLFVNAKLTINPEHRFAFATLSNTLVRKEFSSEIESTLAAMRVLSASSSSSTTAGQPDLTHLFRLAAHEAKKSRLQGRILRVILFYCRSSERPKHQWPVNQKLFTLDVMYLHDKPGPDNCPQEVYDTLVEALEHVSEYEGYILESGQGLARVLFRHVLILLSHPQQRCIQEYVDIPKSIAKKPPQVEPMATEDSAPISSQ

SEQ ID NO: 24827 - protein, 160 aa, Glycine max
MRVLSASSSSSTTAGQPDLTHLFRLAAHEAKKSRLQGRILRVILFYCRSSERPKHQWPVNQKLFTLDVMYLHDKPGPDNCPQEVYDTLVEALEHVSEYEGYILESGQGLARVLFRHVLILLSHPQQRCIQEYVDIPKSIAKKPPQVEPMATEDSAPISSQ

SEQ ID NO: 24828 - DNA, 953 bp, Glycine max
aatttccctaggggcttaatatctccccgcatttgtgcctagcctcattattatcatagtagatattcattccccttatctttctctcttctctctccccgcccaaaccctaactccctaccctattccgctttctctcatccatcatgaaaggaggaaagtccaagaccgaatctaagagagccgatgccaaacttgctgtgaataagaagggcgccgccaccaagactaggaaacccgccggaaaggggaaggcagcgaaagatcctaacaagccaaagaggcctccaagtgctttcttcgttttcatggaggaattcaggaaggtgttcaacaaggaacatcccgacaacaaagcagtgtctgctgtgggcaaagctgctggagcaaaatggaagacgatgtctgatgctgaaaaagcaccttatgtggcaaagtctgagaaaaggaaagtggagtacgagaagaacatgagagcttataacaagaaacaggcggaaggtcctactggtggggatgaagaagaatctgagaagtctgtatctgaggtgaatgatgaggatgatgacgaggaaggcagtggcgaggaggaggatgacgattagagaatggactgatgataatagcatttatgtaggttctgatgattttgatcatccgtgtaggtggtctggtcatttccttataaacatatttctctttccaaaaaatatttccctgctcctccttccgtaaattgctcgtctttccaaaacgtgaatagtttaaagaagggagttctctttatttgtatttctaaatccaactgtttagttaagggatggttatctcttgtagagcttttagtttgatttagagttttcttgttgaaatctggttaagtttgtatcaatataattgacttatcatcccctttctgctgtatatatgcgatttatgttttttagttcctg

SEQ ID NO: 24829 - protein, 152 aa, Glycine max
MKGGKSKTESKRADAKLAVNKKGAATKTRKPAGKGKAAKDPNKPKRPPSAFFVFMEEFRKVFNKEHPDNKAVSAVGKAAGAKWKTMSDAEKAPYVAKSEKRKVEYEKNMRAYNKKQAEGPTGGDEEESEKSVSEVNDEDDDEEGSGEEEDDD

SEQ ID NO: 24830 - protein, 98 aa, Glycine max
MEEFRKVFNKEHPDNKAVSAVGKAAGAKWKTMSDAEKAPYVAKSEKRKVEYEKNMRAYNKKQAEGPTGGDEEESEKSVSEVNDEDDDEEGSGEEEDDD

SEQ ID NO: 24831 - DNA, 1419 bp, Glycine max
atgaaaatgtctctagccgaatatctctcatatgtccctgatgatcttattgttgaaattctatcacggcttccagtgaaagatcttatgcgttttaggtgcgtttgcaaaacctggaaatccatcatctttgatccaagttttgtgaaaaaacatcttgaaagatcttcaaaaaaaatccatctcataataacccgagaagaagtcctctatgatggttttgactatgactatggtgatgcttatgccataccctactccataaatcaattattcgagaatccatcatcagatgttgatgaagatgactactatcaattaaatggttattggatcattggctcatgcaatggattggtttgtttgggtggttatcatggtgaagaagacacaatttacgaatattgggtccaattttggaacccagctacaaggatgaaatcaaggaaatctccgcgcttacatgtcaatccatgttgtcaaggattcgacccatcaaattctataggctttggatttctttatgatgatttgagtgccatttacaaggtggtgtcagtcctttcaaattgtagatccaagaaaacagaggtatgggtttacaacttaggtggcaattgttggacaaatatctttagttgcccaaatttccccattcttcgtcaaaatggaagacttgtgaatggaactattaattggctagctatcgacatgtcaagttctcattatgaagagcgaaatgatattatcgatccgttagtaattttttcagttgatttacaaaaggacacatataaatatttattgttgcctaaaggtcttgatcaaatcccagataatgatcaattgagaattgtggaattaagggatcgtttgtgcctttatcatgatcgcaatgcaacccattttgttgtttggcaaatgaaggagtttggagtagagaagtcttggactttgttgatgaaggtcacttataatcatctccagataccataccctccagatcgtccattacttccattctgtatatcagaaaatggtgaagtcttgatgttggtaaacaatgatgtgttgaatatgactttttataatcggagaaataaccgagtagaagttattccaattccaaacaacaatgcttggtggcaagctaccaattatattccaagcttggtttcgccttttcagaattaatctcctatgcaacaatttgcttgtttgaatatatctcaagtaatgacccaattgatcatccaacgactctaccaacccattgaagaagttaattgatattgatgttgttatgggtttatatttatgagacatagttagtatcagaaaaatattttatttattccaatatgttgattgactttgccttgctatattttatggacctcataataaaaagactttatt

SEQ ID NO: 24832 - protein, 397 aa, Glycine max
MKMSLAEYLSYVPDDLIVEILSRLPVKDLMRFRCVCKTWKSIIFDPSFVKKHLERSSKKIHLIITREEVLYDGFDYDYGDAYAIPYSINQLFENPSSDVDEDDYYQLNGYWIIGSCNGLVCLGGYHGEEDTIYEYWVQFWNPATRMKSRKSPRLHVNPCCQGFDPSNSIGFGFLYDDLSAIYKVVSVLSNCRSKKTEVWVYNLGGNCWTNIFSCPNFPILRQNGRLVNGTINWLAIDMSSSHYEERNDIIDPLVIFSVDLQKDTYKYLLLPKGLDQIPDNDQLRIVELRDRLCLYHDRNATHFVVWQMKEFGVEKSWTLLMKVTYNHLQIPYPPDRPLLPFCISENGEVLMLVNNDVLNMTFYNRRNNRVEVIPIPNNNAWWQATNYIPSLVSPFQN

SEQ ID NO: 24833 - protein, 395 aa, Glycine max
MSLAEYLSYVPDDLIVEILSRLPVKDLMRFRCVCKTWKSIIFDPSFVKKHLERSSKKIHLIITREEVLYDGFDYDYGDAYAIPYSINQLFENPSSDVDEDDYYQLNGYWIIGSCNGLVCLGGYHGEEDTIYEYWVQFWNPATRMKSRKSPRLHVNPCCQGFDPSNSIGFGFLYDDLSAIYKVVSVLSNCRSKKTEVWVYNLGGNCWTNIFSCPNFPILRQNGRLVNGTINWLAIDMSSSHYEERNDIIDPLVIFSVDLQKDTYKYLLLPKGLDQIPDNDQLRIVELRDRLCLYHDRNATHFVVWQMKEFGVEKSWTLLMKVTYNHLQIPYPPDRPLLPFCISENGEVLMLVNNDVLNMTFYNRRNNRVEVIPIPNNNAWWQATNYIPSLVSPFQN

SEQ ID NO: 24834 - protein, 368 aa, Glycine max
MRFRCVCKTWKSIIFDPSFVKKHLERSSKKIHLIITREEVLYDGFDYDYGDAYAIPYSINQLFENPSSDVDEDDYYQLNGYWIIGSCNGLVCLGGYHGEEDTIYEYWVQFWNPATRMKSRKSPRLHVNPCCQGFDPSNSIGFGFLYDDLSAIYKVVSVLSNCRSKKTEVWVYNLGGNCWTNIFSCPNFPILRQNGRLVNGTINWLAIDMSSSHYEERNDIIDPLVIFSVDLQKDTYKYLLLPKGLDQIPDNDQLRIVELRDRLCLYHDRNATHFVVWQMKEFGVEKSWTLLMKVTYNHLQIPYPPDRPLLPFCISENGEVLMLVNNDVLNMTFYNRRNNRVEVIPIPNNNAWWQATNYIPSLVSPFQN

SEQ ID NO: 24835 - DNA, 895 bp, Glycine max
aacccaccacatagccgattcactactcgcacggcacatgcaccctcctctatctctctctgcagcataagcacagcatcatagaccctttctcaaaaaatagggttcctccgttagggttagaggtcacaccatcttacactatactaacccctagccagccagcgagtttgagtgcttgggggtgcaatggcgggagtgagggaacaggaccagtacatgccgatagcgaacgtgataaggatcatgcgtcggattctgccagcgcacgcgaagatctcagacgacgcgaaggagacgatccaggagtgcgtgtctgagtacatcagtttcatcacggcggaggcgaacgagcggtgccagcgggagcagcggaagacggtgaccgcagaggatgtgttgtgggcgatggagaagcttggctttgacaactacgctcaccctctctctctttaccttcaccgctaccgcgagagtgaaggagaacctgcttctgtcagacgcgcttcttctgcaatggggatcaataataatatggtgcacccaccttatattaattctcatggctttggaatgtttgattttgacccatcatcgcaagggttttacagggacgatcataacgctgcttctggatctggtggttttgttgcgccttttgatccttatgctaacatcaaacgtgatgccctgtgatcatgtaagaacaacaactagtgcatgctgctttttcacttggttagttatattcaagcacaagcacatgcaggtgcagctgcaactatttagcttcatctacaaatcttttttcctctcttcttctcatgctttaattatttagagacaatacttgttattcattgttatgctcaattgctagcttctattcatcgcc

SEQ ID NO: 24836 - protein, 168 aa, Glycine max
MAGVREQDQYMPIANVIRIMRRILPAHAKISDDAKETIQECVSEYISFITAEANERCQREQRKTVTAEDVLWAMEKLGFDNYAHPLSLYLHRYRESEGEPASVRRASSAMGINNNMVHPPYINSHGFGMFDFDPSSQGFYRDDHNAASGSGGFVAPFDPYANIKRDAL

SEQ ID NO: 24837 - protein, 158 aa, Glycine max
MPIANVIRIMRRILPAHAKISDDAKETIQECVSEYISFITAEANERCQREQRKTVTAEDVLWAMEKLGFDNYAHPLSLYLHRYRESEGEPASVRRASSAMGINNNMVHPPYINSHGFGMFDFDPSSQGFYRDDHNAASGSGGFVAPFDPYANIKRDAL

SEQ ID NO: 24838 - protein, 149 aa, Glycine max
MRRILPAHAKISDDAKETIQECVSEYISFITAEANERCQREQRKTVTAEDVLWAMEKLGFDNYAHPLSLYLHRYRESEGEPASVRRASSAMGINNNMVHPPYINSHGFGMFDFDPSSQGFYRDDHNAASGSGGFVAPFDPYANIKRDAL

SEQ ID NO: 24839 - DNA, 1336 bp, Glycine max
attttcaatttcattcattcatcactctaaaaatttcgcttccaattattttctcccaccctcccaatttcccctccccctttttcgctgaacccgctccaattctcaaatctcaattcaaaagaatcaaaacccaaacttcaaattcgtttcccttacaacactttcccttctcagtcaattcctccttccaccactttccctcccttcttccttcctttcaatgttccaacctaacaaccccaaaatggattcctccaccacattcctcaacgaccttcctcccctcaagagactaagactcttgcaacaacaacagcaacaaaaagaagaacatcagtattatgactcttcttcacctttacccgctaaaaaacgcaaggagtctcgaaccctatctccaccctctcccaccaccaccaaaaccgtttataactattccctccccgccaagaaaagagtgtgggccctacaaccccagagcccaccctcaaatgacgtcgtccccgccttcgacctcaatgtggaatacacacccagccccaacaaccacggagacttcgaagaagaccactccgaggacgaggacggggttctatgctgtgtgtgccagagcacggacggcgaccctgcggatccaatagtcttctgcgacgggtgcgacctcatggtgcacgcctcctgctacggcactcccctgtccaagtccatcccggatggagactggttctgcgaacgctgctgtttccgtttcgagaagaatgatgttggcaacatcaattgcaatgcttgcgtgctgtgcccttccaccgagggggcgatgaagcggaccaccgtcgaggaggaaggtggcgcgacgtgggcacacgtggtgtgcgccctgttcgtgccggaagtgttctttcttgaccccgaagggagggaggggatcgacttctccaaggttccaaagaagaggtgggaggagaggtgctatctttgcggatcctgcgaagggtgtgctttggtgtgttctgagcccaagtgcgggttggggtttcatgtcacttgtgcgctgaaggaggaactttggattgagtacagggaagggaagaagggtggtaccatagttgccggcttctgcaaaaaccacacccaagtttgggaaaagcaatccgggaagtacaaaattgttgctgttgaagataaaaagtagcaaaagtcttggttttttttttttttgaaactgttagttaattaaccatcctagggaaattcaaagttagttacttttgaagatcatttgaatcagttgtaattttactcttcatagctgatagcttttatgctttgtttt

SEQ ID NO: 24840 - protein, 323 aa, Glycine max
MFQPNNPKMDSSTTFLNDLPPLKRLRLLQQQQQQKEEHQYYDSSSPLPAKKRKESRTLSPPSPTTTKTVYNYSLPAKKRVWALQPQSPPSNDVVPAFDLNVEYTPSPNNHGDFEEDHSEDEDGVLCCVCQSTDGDPADPIVFCDGCDLMVHASCYGTPLSKSIPDGDWFCERCCFRFEKNDVGNINCNACVLCPSTEGAMKRTTVEEEGGATWAHVVCALFVPEVFFLDPEGREGIDFSKVPKKRWEERCYLCGSCEGCALVCSEPKCGLGFHVTCALKEELWIEYREGKKGGTIVAGFCKNHTQVWEKQSGKYKIVAVEDKK

SEQ ID NO: 24841 - protein, 315 aa, Glycine max
MDSSTTFLNDLPPLKRLRLLQQQQQQKEEHQYYDSSSPLPAKKRKESRTLSPPSPTTTKTVYNYSLPAKKRVWALQPQSPPSNDVVPAFDLNVEYTPSPNNHGDFEEDHSEDEDGVLCCVCQSTDGDPADPIVFCDGCDLMVHASCYGTPLSKSIPDGDWFCERCCFRFEKNDVGNINCNACVLCPSTEGAMKRTTVEEEGGATWAHVVCALFVPEVFFLDPEGREGIDFSKVPKKRWEERCYLCGSCEGCALVCSEPKCGLGFHVTCALKEELWIEYREGKKGGTIVAGFCKNHTQVWEKQSGKYKIVAVEDKK

SEQ ID NO: 24842 - protein, 175 aa, Glycine max
MVHASCYGTPLSKSIPDGDWFCERCCFRFEKNDVGNINCNACVLCPSTEGAMKRTTVEEEGGATWAHVVCALFVPEVFFLDPEGREGIDFSKVPKKRWEERCYLCGSCEGCALVCSEPKCGLGFHVTCALKEELWIEYREGKKGGTIVAGFCKNHTQVWEKQSGKYKIVAVEDKK

SEQ ID NO: 24843 - DNA, 1260 bp, Glycine max
ctcttcctcactaactccgatctccacttctcctccttatgggaccagttcttctccaacaccccctccaaccttttcaacatctacatccacgccgacccctccgtcaacctcacccgccctttgtcccctcttttcatcaacaaattcatctcctccaaacgcaccttccgctcctcccctaccctaatctccgccacccgccgcctcctcgccaccgccctcctcgacgacccctccaacgcctacttcgccctcctctcccagcactgcatccctctccactccttctcctacacctacaagtccctcttcctctcccccaccttcgactcccaagaccccgaatcttcttcttccacccgcttcggcctccgcctcaaatacaagtccttcgtcgagatcctctcccacgctcccaagctctggaagcgctacacctcccggggtcgctacgccatgatgccggagatccccttcgaagctttccgcgtgggctctcagttcttcacgctcacgcgccgccacgcgctggtcgtcgtcaaggataggaccctgtggcagaaattcaagatcccgtgttaccgtgacgatgaatgctaccctgaggagcattattttccgaccctgttgtccatggcggatcctgatggctgcaccaaatacacgctcaccagggttaattggaccggcaccgtcaacggtcatccttacacttaccggcccacggaggtctcgccggaactcattctccgcctccggaagtccaaccattccgagtcttacctcttcgccaggaaattcaccccggattgcttggagcccttgatgcgcattgccaaatcggtcatcttcagggattgaaattgaaaacatggtggaaaaggcctgtgaagagcttgctgttgctgtggctgtagcttgatggtggtgtatagtttgaagaggcaggaacagcccacatcctatatacataccgggaactctcaaattgagagacttgggattacacaaattgagggaattcaaagcaaagaaataggtaaaacacctgcgtgagttgaaatggaaatgcgggtgctctattcaagtgtatttagttgggatgcaagtgctaagtaattgcctatttgtcatacaggattatgtagatttctttccttttgtgggatggtttttgtacatacgagttgtgtaaacattgtttgaaagctctacagtgttactacttttgaacaacaaaaaaaagagttgttgtct

SEQ ID NO: 24844 - protein, 287 aa, Glycine max
LFLTNSDLHFSSLWDQFFSNTPSNLFNIYIHADPSVNLTRPLSPLFINKFISSKRTFRSSPTLISATRRLLATALLDDPSNAYFALLSQHCIPLHSFSYTYKSLFLSPTFDSQDPESSSSTRFGLRLKYKSFVEILSHAPKLWKRYTSRGRYAMMPEIPFEAFRVGSQFFTLTRRHALVVVKDRTLWQKFKIPCYRDDECYPEEHYFPTLLSMADPDGCTKYTLTRVNWTGTVNGHPYTYRPTEVSPELILRLRKSNHSESYLFARKFTPDCLEPLMRIAKSVIFRD

SEQ ID NO: 24845 - protein, 170 aa, Glycine max
MGPVLLQHPLQPFQHLHPRRPLRQPHPPFVPSFHQQIHLLQTHLPLLPYPNLRHPPPPRHRPPRRPLQRLLRPPLPALHPSPLLLLHLQVPLPLPHLRLPRPRIFFFHPLRPPPQIQVLRRDPLPRSQALEALHLPGSLRHDAGDPLRSFPRGLSVLHAHAPPRAGRRQG

SEQ ID NO: 24846 - DNA, 1231 bp, Glycine max
gattattatttattgttgttgaaaaagaagcaaaaccctaaaccctgaagtcatatcctggtttggttgtgtgacggtgaattgaggagagagagagagaggatgagaggggtgaagagagcaatgtttgtaggcagagccctgagaagcaattccaacagcggcgtgtctccccatggccatggctgcttgaccccatcaaatccaaatccaaatccaaatccttctgtttctgttactgggtttagatacctttctgcttatgctgctgccacgtctcttgtccaagacgctctgaccaaggccttcaaacccaaagaacttgcctctttcaatactaggcctgtccattctgcaacaagcgtttctggactattatgatattccattcaaagtggttgaggtaaatcccatcaacaagaaggagatcaagtggtccgactacaagaaggtgcctatcctcaccgttgatggtcaacaaatggtcgactcttcagacataattgataaattgatcaaaaggatacatccagattatgacctaaatgcacaagaagagaacaagtggcgatactatgttttgcttattatacttcgactacttggttgcatacacacatcgggttacatctgatgtcattattaggagtttgtggtgctataaccaactgcttctatgtatgaacattatgctgtgacatgttgtattggtgggtggataatcacttggtgcatgccttgtcacggaatatatatcgaaatgttcctgaagctcttgaatcatttgattatatcaccacccaaggaaatttcagtttttctgagaggttagtggcaaagtatagtggggctgcggctatgtattttgtgtcaaagaaattttagcagatcttgctgtgtttggtgttctaagacccatccaccatctcaagtcaggtagagatataatagagcacgccctgattgggaaatggttttctgagatggatcttgcagtaggacagtcttctagggtgagtgagcatagctagaaaaaactatagtgagcaaaaatacatagcttctatatggggaaatgaaatgacttttattctaagtttggtgagtcttagtaagctataaatgctttgcagtttgtacttgtaatttatcttgtggtgattagtgatcacatactgttctggtaaatccgggtatatattcaataaaaaagtttatctcactttgggac

SEQ ID NO: 24847 - protein, 92 aa, Glycine max
MRGVKRAMFVGRALRSNSNSGVSPHGHGCLTPSNPNPNPNPSVSVTGFRYLSAYAAATSLVQDALTKAFKPKELASFNTRPVHSATSVSGLL

SEQ ID NO: 24848 - protein, 85 aa, Glycine max
MFVGRALRSNSNSGVSPHGHGCLTPSNPNPNPNPSVSVTGFRYLSAYAAATSLVQDALTKAFKPKELASFNTRPVHSATSVSGLL

SEQ ID NO: 24849 - protein, 61 aa, Glycine max
MLYWWVDNHLVHALSRNIYRNVPEALESFDYITTQGNFSFSERLVAKYSGAAAMYFVSKKF

SEQ ID NO: 24850 - DNA, 1266 bp, Glycine max
atccgttacccttcctttcacaagtcataaaactcccttcacttgctctgaaattttcatgtatcactttcccttcactggttctattatcgttcttcttcttcactaagaatccaaaaaaaaatgaacgatcttatgacgaaatccttcaccagctacgtggagctgaagaaggtcgcaatgaaagaagacgttgatttggaagccggtggtcctggtgatcgcaaggtggaactgagctcttccacgacccacttggacacagacatgggcctcttcctagaagaggccgagaaggtgaaggccgagatggggtccctccgagacatcctgggccggctccagcaggccaacgaggagagcaagtccctccacaagcctgaagcccacaaggccctcagaagccgaatcaacgctgaaatccttgccgtactcaagaaggcccgggccatccggacccagctggaggagatggaccgcgccaatgccgccaacaggcgcctctccgccctcaaggacgggacccccgccatctaccggacccggattgctgtcaccaatggcctcaggaagaagctgaaggagctcatgatggactttcaggatctgaggcagaggatgatgactgagtacaaggatactgtgtgtagaaggtacttcacagttactggggagcacccagatgaggatgtgattgagaagatcatcgccaacgggaacgaggaagaggttcttgctaaggccatagaggaacacgggagagggaaggttctggataccgtgctggaaattcaggacaggcatgatgctgccaaggaggttgagaagagtctgcttgagctgcaccaggtgtttcttgacatggctgtcatggtggaggcacagggtgagaagatggacgacatcgagcatcacgtcttccacgcttcccactatgtcaaggatggaaccaagagtctccagagtgcaaaggagtaccagaagaggagcaggaagtggatgtgcattgggatcattcttctgctcattcttattctggttattgttattcctattgtcaccagtttaagcagttcttgagcttagtaaggaggagactttggatgatgatgatgatgattcttcttgactcatcgtgtttagagtgcttgatgggagataatgattcatctttttttcttttcctgcagatttgtttaattgttgttaaggtgttaccttaaccatgatttttctatctttgcgaaattgaaatataattcaatc

SEQ ID NO: 24851 - protein, 318 aa, Glycine max
MNDLMTKSFTSYVELKKVAMKEDVDLEAGGPGDRKVELSSSTTHLDTDMGLFLEEAEKVKAEMGSLRDILGRLQQANEESKSLHKPEAHKALRSRINAEILAVLKKARAIRTQLEEMDRANAANRRLSALKDGTPAIYRTRIAVTNGLRKKLKELMMDFQDLRQRMMTEYKDTVCRRYFTVTGEHPDEDVIEKIIANGNEEEVLAKAIEEHGRGKVLDTVLEIQDRHDAAKEVEKSLLELHQVFLDMAVMVEAQGEKMDDIEHHVFHASHYVKDGTKSLQSAKEYQKRSRKWMCIGIILLLILILVIVIPIVTSLSSS

SEQ ID NO: 24852 - protein, 314 aa, Glycine max
MTKSFTSYVELKKVAMKEDVDLEAGGPGDRKVELSSSTTHLDTDMGLFLEEAEKVKAEMGSLRDILGRLQQANEESKSLHKPEAHKALRSRINAEILAVLKKARAIRTQLEEMDRANAANRRLSALKDGTPAIYRTRIAVTNGLRKKLKELMMDFQDLRQRMMTEYKDTVCRRYFTVTGEHPDEDVIEKIIANGNEEEVLAKAIEEHGRGKVLDTVLEIQDRHDAAKEVEKSLLELHQVFLDMAVMVEAQGEKMDDIEHHVFHASHYVKDGTKSLQSAKEYQKRSRKWMCIGIILLLILILVIVIPIVTSLSSS

SEQ ID NO: 24853 - protein, 299 aa, Glycine max
MKEDVDLEAGGPGDRKVELSSSTTHLDTDMGLFLEEAEKVKAEMGSLRDILGRLQQANEESKSLHKPEAHKALRSRINAEILAVLKKARAIRTQLEEMDRANAANRRLSALKDGTPAIYRTRIAVTNGLRKKLKELMMDFQDLRQRMMTEYKDTVCRRYFTVTGEHPDEDVIEKIIANGNEEEVLAKAIEEHGRGKVLDTVLEIQDRHDAAKEVEKSLLELHQVFLDMAVMVEAQGEKMDDIEHHVFHASHYVKDGTKSLQSAKEYQKRSRKWMCIGIILLLILILVIVIPIVTSLSSS

SEQ ID NO: 24854 - DNA, 1773 bp, Glycine max
cacgtttagtgactattaatttggcagaaagaggtatggggttgggtgaactccaactccaagggcgtcgccgtgagaagggacacccgcggagtggtggtgagggctgaaatgttcggccaattgactagtggccttgagactgcatggaacaagctcaaaggagaagaggttttgtctaaagagaacattgtggagcccatgcgagatattaggagagctctcttagaagctgatgttagtcttcctgttgtcagaaggtttgtgcagtctgtcagtgatcaggctgtgggtgttggtgtcattcgaggagtgagaccggatcagcaattggttaagattgtacatgatgaacttgtacgattgatgggtggagaagtttctgaactggtttttgccaaatctgggcccactgtcattttattggctggacttcagggagttgggaagacaacggtttgcgcaaagttggcaaattatctcaagaaacagggaaaaagttgcatgctagttgctggggatgtttacagacctgctgctattgaccagcttgctattttgggaaaacaggtggatgtgcctgtctatacagcaggtaccgatgttaaaccttcagaaattgccaaacaaggtttagaagaggcaaaaaagaagaaaattgatgttgttattgttgatactgctggtaggctgcagattgacaagacaatgatggatgagttaaaagaagtgaaaaaggcattgaatccaacagaagtgttgctagttgtggatgcaatgacagggcaagaagctgcagcgttggtgactactttcaatcttgagattggaataacaggtgccatcttgacaaagcttgatggtgattcaagaggtggagcagctttgagtgtcaaagaggtatccggaaagccaattaaacttgtaggacggggtgaacgcatggaggatcttgaacctttctaccctgatcggatggcaggacgcattctaggaatgggagatgttctttcttttgtagagaaggcacaacaagttatgcgtcaagaagatgctgaagaactgcaaaagaagatcatgagtgcaaagtttgacttcaatgattttctaaagcaaacccgtactgttgcaaaaatgggttctgtctctcgtgtcattggaatgattcctggtatggggaaggttactcctgctcaaattcgagatgcagagaagaatttgcagaacatggaagctatgatagaagcaatgacccctgaggagagggaaaagccagaactgttggcagaatcccctgtcaggaggaaaagagttgctcaggattcagggaaaacagagcagcaggtaagccaacttgtagctcaacttttccaaatgcgtgttcgtatgaagaacctgatgggtgtaatggaaagtggatcacttccaacacttagtaatcttgaggaagcgcttaaagcagaggaaaaggccccacctggcactgcaaggaggaggaagagatcggaatcaaggagtgtatttggggactcaacaccagcaaggccaagtcctcgtggttttgggagcaaaaattgaaaatccataaagggtttaacacaacaatataatagaaagtctggatcaacgggtcactagtgatcaacttgtttgatttagctttattcagctaaaataattctttgccatcattagagcaattcatatagctccaactcgtttgattcagctttcttcggctaaaataattaattaccatagttagttcaattc

SEQ ID NO: 24855 - protein, 488 aa, Glycine max
MFGQLTSGLETAWNKLKGEEVLSKENIVEPMRDIRRALLEADVSLPVVRRFVQSVSDQAVGVGVIRGVRPDQQLVKIVHDELVRLMGGEVSELVFAKSGPTVILLAGLQGVGKTTVCAKLANYLKKQGKSCMLVAGDVYRPAAIDQLAILGKQVDVPVYTAGTDVKPSEIAKQGLEEAKKKKIDVVIVDTAGRLQIDKTMMDELKEVKKALNPTEVLLVVDAMTGQEAAALVTTFNLEIGITGAILTKLDGDSRGGAALSVKEVSGKPIKLVGRGERMEDLEPFYPDRMAGRILGMGDVLSFVEKAQQVMRQEDAEELQKKIMSAKFDFNDFLKQTRTVAKMGSVSRVIGMIPGMGKVTPAQIRDAEKNLQNMEAMIEAMTPEEREKPELLAESPVRRKRVAQDSGKTEQQVSQLVAQLFQMRVRMKNLMGVMESGSLPTLSNLEEALKAEEKAPPGTARRRKRSESRSVFGDSTPARPSPRGFGSKN

SEQ ID NO: 24856 - protein, 458 aa, Glycine max
MRDIRRALLEADVSLPVVRRFVQSVSDQAVGVGVIRGVRPDQQLVKIVHDELVRLMGGEVSELVFAKSGPTVILLAGLQGVGKTTVCAKLANYLKKQGKSCMLVAGDVYRPAAIDQLAILGKQVDVPVYTAGTDVKPSEIAKQGLEEAKKKKIDVVIVDTAGRLQIDKTMMDELKEVKKALNPTEVLLVVDAMTGQEAAALVTTFNLEIGITGAILTKLDGDSRGGAALSVKEVSGKPIKLVGRGERMEDLEPFYPDRMAGRILGMGDVLSFVEKAQQVMRQEDAEELQKKIMSAKFDFNDFLKQTRTVAKMGSVSRVIGMIPGMGKVTPAQIRDAEKNLQNMEAMIEAMTPEEREKPELLAESPVRRKRVAQDSGKTEQQVSQLVAQLFQMRVRMKNLMGVMESGSLPTLSNLEEALKAEEKAPPGTARRRKRSESRSVFGDSTPARPSPRGFGSKN

SEQ ID NO: 24857 - protein, 403 aa, Glycine max
MGGEVSELVFAKSGPTVILLAGLQGVGKTTVCAKLANYLKKQGKSCMLVAGDVYRPAAIDQLAILGKQVDVPVYTAGTDVKPSEIAKQGLEEAKKKKIDVVIVDTAGRLQIDKTMMDELKEVKKALNPTEVLLVVDAMTGQEAAALVTTFNLEIGITGAILTKLDGDSRGGAALSVKEVSGKPIKLVGRGERMEDLEPFYPDRMAGRILGMGDVLSFVEKAQQVMRQEDAEELQKKIMSAKFDFNDFLKQTRTVAKMGSVSRVIGMIPGMGKVTPAQIRDAEKNLQNMEAMIEAMTPEEREKPELLAESPVRRKRVAQDSGKTEQQVSQLVAQLFQMRVRMKNLMGVMESGSLPTLSNLEEALKAEEKAPPGTARRRKRSESRSVFGDSTPARPSPRGFGSKN

SEQ ID NO: 24858 - DNA, 1430 bp, Glycine max
ctgaactgaaaccgctgcttccgatctgaggtatgctcctttgtttttctatttcttcacttctcttattctttccttgttttctgtgaaaatgcgagagttagagggaattaaattgatggatttgatctcgaattccccgatgcttctgttgtgcttgtttgtagggcgaattgttgtttatatttgatgaaattcggctcgcgtagcttggagttagggtttttggtcagttgttatatttacccttgggatcggtgtgccttcataacattgttggattcatcgagctttagttgttgacatttagtttttcgcgaacttcgtagcttagctacttataaatattgaatatccgtcactttagtctagctgatttgttacagtaaattttaggaaccaatttgaagggtttttaatattttggggactacatagtacttagcatgatttctcatagttttaggactattcaagtaatttttatgctgtaaggactacttaatagagtgagtaataattcaagaataaaattggtggtttactagtttgaaacttatcaagcctgacttacttgctattcctgtttttcgtgaagagaagcttgccgtattgcactgtaaagagcgttttcatgtcatggatgaaaacatttaagtggatttttttaatcaaaatatgttttattggattatacttgtagccactagagatctgtggctgcttggatccacggcaagcatatgttgtaattttggtataatgtgctttatatacttaagtgctgtttcagcttgcaactcagtgatggatgatagtactttttcctgttattctcacaattgtttctgtgttcacgattgctgaacttgcaatgagaaggccatggcggggtctgggagttccatgctatattcctttcttctcttcacagtcattctctcacttcaagaaatgtaccgagggaaactagcatcatcagaattatacactatacttggagggttcgttagctctctcctatttcttgtgctcctaactttcattggaaattttcaggaaacaattggtgcaagaactggttggggagctgtcattgttgcagaagctgttgctctgattgctgcaagcactgtccaccgagtttgcatcactacatgtttcctgttctcggctgcattgctgtatgaggttaacaagatctctgggtcagcgctttcaacaagtgactccaggactaaaaagcaaagtggaagagcttaagcctatgtatgcttactataaaggcgcatttagaaaattttccccaggagcattagttttataaccctagtagcaaaacttataagaagagtgttttaagtttgtatgacttttcactgtacaatttcaatgatatgatttgaattttgaaagaggtgcctctaact

SEQ ID NO: 24859 - protein, 125 aa, Glycine max
MAGSGSSMLYSFLLFTVILSLQEMYRGKLASSELYTILGGFVSSLLFLVLLTFIGNFQETIGARTGWGAVIVAEAVALIAASTVHRVCITTCFLFSAALLYEVNKISGSALSTSDSRTKKQSGRA

SEQ ID NO: 24860 - protein, 118 aa, Glycine max
MLYSFLLFTVILSLQEMYRGKLASSELYTILGGFVSSLLFLVLLTFIGNFQETIGARTGWGAVIVAEAVALIAASTVHRVCITTCFLFSAALLYEVNKISGSALSTSDSRTKKQSGRA

SEQ ID NO: 24861 - protein, 102 aa, Glycine max
MYRGKLASSELYTILGGFVSSLLFLVLLTFIGNFQETIGARTGWGAVIVAEAVALIAASTVHRVCITTCFLFSAALLYEVNKISGSALSTSDSRTKKQSGRA

SEQ ID NO: 24862 - DNA, 1292 bp, Glycine max
aaaaaaaacacaacacaacgagtagatccagaaagagcgttgaaacattgaaccttttgaatgagttggacggtttcgcagaaattgacgtttgaattgtagtcgcacgcacgtttcatcatcctctcgcaatcgccaatactccgatccccaaccagagaaaacctaagcgaacaacaacatgagtgctgacgccccaccccaaacccaagccaccaacaccaaaccggaagaatctcaatctcaatctcagtctcagcctcagcgtcactccggcgattatgctccataccctaaactggaccccaccgatgttgcgccaccacaacaaccactgaacactgaatctcgcgctcccatttccgaagatgctgccactactatgcccaaagactccaatccctatgtcactcctgctcccgtcactgcttcttctactaagactactttagattcggtgaaagacgttctcgggaaatgggggaagaaagccgccgaggccaccaagaaggccgaggatctcgccggcaacatgtggcagcacttgaaaacgggaccgagttttgctgatgctgccgtggggaggattgctcagggaactaaggttcttgcagaaggagggtatgaaaagatctttaggcaaacatttgagacagttccggaggagcagcttctcaaaacttatgcatgctacttgtctacctcggctggacctgtgatgggagtcttatatttgtcaacggctaagctggcattttgtagtgataacccactttcttaccaagtgggtgaccagactcaatggagctattataaggtggtcattccattgcaccagctgagagctgtaaacgcatccacaagcaaaaccaaccaatctgaaaaatatatacagattatctctgttgacaaccatgaattttggtttatgggctttgtgcactatgacagcgctgttaaaaatattcaaggagcattgcagcctcattgacaaacaagggattgaaaagcaccatgtattgtttataccagagatgaggtttgtgttgataaattatccatccatcaaagaaacatttatatgtttatctttacgtggttagttcgctagtctagtttgtggagctgttattattgtattaaaattgaaactcattcagtgttcacatgatatatttgctttaccttgttgctttctgaaagcgagagtcaattgatttgttgtaagttgaattgatatatagacggtggatttacatttaaatctattaaaatatcttttttttttgtat

SEQ ID NO: 24863 - protein, 269 aa, Glycine max
MSADAPPQTQATNTKPEESQSQSQSQPQRHSGDYAPYPKLDPTDVAPPQQPLNTESRAPISEDAATTMPKDSNPYVTPAPVTASSTKTTLDSVKDVLGKWGKKAAEATKKAEDLAGNMWQHLKTGPSFADAAVGRIAQGTKVLAEGGYEKIFRQTFETVPEEQLLKTYACYLSTSAGPVMGVLYLSTAKLAFCSDNPLSYQVGDQTQWSYYKVVIPLHQLRAVNASTSKTNQSEKYIQIISVDNHEFWFMGFVHYDSAVKNIQGALQPH

SEQ ID NO: 24864 - protein, 202 aa, Glycine max
MPKDSNPYVTPAPVTASSTKTTLDSVKDVLGKWGKKAAEATKKAEDLAGNMWQHLKTGPSFADAAVGRIAQGTKVLAEGGYEKIFRQTFETVPEEQLLKTYACYLSTSAGPVMGVLYLSTAKLAFCSDNPLSYQVGDQTQWSYYKVVIPLHQLRAVNASTSKTNQSEKYIQIISVDNHEFWFMGFVHYDSAVKNIQGALQPH

SEQ ID NO: 24865 - protein, 152 aa, Glycine max
MWQHLKTGPSFADAAVGRIAQGTKVLAEGGYEKIFRQTFETVPEEQLLKTYACYLSTSAGPVMGVLYLSTAKLAFCSDNPLSYQVGDQTQWSYYKVVIPLHQLRAVNASTSKTNQSEKYIQIISVDNHEFWFMGFVHYDSAVKNIQGALQPH

SEQ ID NO: 24866 - DNA, 1218 bp, Glycine max
aagaagtggcaaccaaaatctgccacttcaaggcttcaagctaagcacactatggcttgcatcgataacacggccaccacctctactgacgaagcaggcggagccaccaccatcaccgccgtgcatcccgacataattcaaacccacatcctcacgtgcctggacggcccgtcgctcgcctccgtcgccagcacgtgctcccaactccacgctctctcagcgcgcgagcctctctgggagaacatttgccactccacgtggccctccacgagctcgccacgcgtccgccacgtcatgtccacgttcccacgcgcgtctctgtcctttttctccgactcgttcccttcgttcgccgcggcgcgcgaaggttcttcttcgcgcgcaccggagctgatttccgctgtggacatcttccaccggcggcgggcggtgctgtcgagagtggtggagacggagacggagtccgactggttccggtgctcgccgtttcgaatcgatgttcttgatcagaaggaggcagtggcgacggcgatggagtatccacggagcgaggaagcgtgtgagattctgggcgaggatttgaggttgagttggatagtggtggatccgaatggaaagcgtgcggtgaatgtgtcgagtgggagagtggtgtcggtggagcggcactggctgagcggggaggtgaaggcgcggttcgcgacggtggtgggcggaggggagagggggacggcggtggaggtggcgctgtgcagcgtgactgtgactttcgggggtgagatgcaggtgagggaagcgtgtctgcagatggaggacatggatggaatgttcctgaatggtagggacagtttggggattttgcagcgggcattggagggtataaggggaacattactgaaggacggaaaggaggaagaagggaggaatagatacttggaattcataaagagaaagatggagagaaaagataaaaaagaaagagatgagaggaggttggatatgctctgcgtgcctctcgcgcttttgtcctttgcggctttttctacactctttctcttctgaatcaatatacactatcacttcaaattcaataaacacaacacggaaaaattgtacaaaattaatttaacaaactaagtgtcagtcgatgctgtaatgtcgcatactagtttatttatttaaaacagtaatgaatagtgaatgggttcttctagcagctgc

SEQ ID NO: 24867 - protein, 352 aa, Glycine max
KKWQPKSATSRLQAKHTMACIDNTATTSTDEAGGATTITAVHPDIIQTHILTCLDGPSLASVASTCSQLHALSAREPLWENICHSTWPSTSSPRVRHVMSTFPRASLSFFSDSFPSFAAAREGSSSRAPELISAVDIFHRRRAVLSRVVETETESDWFRCSPFRIDVLDQKEAVATAMEYPRSEEACEILGEDLRLSWIVVDPNGKRAVNVSSGRVVSVERHWLSGEVKARFATVVGGGERGTAVEVALCSVTVTFGGEMQVREACLQMEDMDGMFLNGRDSLGILQRALEGIRGTLLKDGKEEEGRNRYLEFIKRKMERKDKKERDERRLDMLCVPLALLSFAAFSTLFLF

SEQ ID NO: 24868 - protein, 335 aa, Glycine max
MACIDNTATTSTDEAGGATTITAVHPDIIQTHILTCLDGPSLASVASTCSQLHALSAREPLWENICHSTWPSTSSPRVRHVMSTFPRASLSFFSDSFPSFAAAREGSSSRAPELISAVDIFHRRRAVLSRVVETETESDWFRCSPFRIDVLDQKEAVATAMEYPRSEEACEILGEDLRLSWIVVDPNGKRAVNVSSGRVVSVERHWLSGEVKARFATVVGGGERGTAVEVALCSVTVTFGGEMQVREACLQMEDMDGMFLNGRDSLGILQRALEGIRGTLLKDGKEEEGRNRYLEFIKRKMERKDKKERDERRLDMLCVPLALLSFAAFSTLFLF

SEQ ID NO: 24869 - protein, 254 aa, Glycine max
MSTFPRASLSFFSDSFPSFAAAREGSSSRAPELISAVDIFHRRRAVLSRVVETETESDWFRCSPFRIDVLDQKEAVATAMEYPRSEEACEILGEDLRLSWIVVDPNGKRAVNVSSGRVVSVERHWLSGEVKARFATVVGGGERGTAVEVALCSVTVTFGGEMQVREACLQMEDMDGMFLNGRDSLGILQRALEGIRGTLLKDGKEEEGRNRYLEFIKRKMERKDKKERDERRLDMLCVPLALLSFAAFSTLFLF

SEQ ID NO: 24870 - DNA, 1145 bp, Glycine max
acaaggatggggcagatgtcaaagagctcaaagaacagatagcctgcctcaaggcagcattggcaagaaaggaaggtgaatcagaacattctttatcaggcagctctgaaaaatataggacaatggctagtgagctatcaccttatcatgcaaaccaacagggtgctgatattgtgagcccagggtgccggcaaccaatgcttgatgtaggcaatatagagcttcacagtagtaccacattgagacaaaaaactcagagctatgattttgatgagatgtcaacgaattcaccgccctggcccccggtgaataatcctagacaactctatggggatgatgacagagaaactggctcaggagagtgggtagataaagtcatggtaaacaagcaagatgctaataaaactgagaacatcttagggtgttgggaagcagacagtgggaacttatccgatgtcttttatcaaaaatatctccaaggttcttccaaaatgttctcagaacgatcctacaacatgttcatgggaggcaacaaccagtttaacgttgctggttcagatgacatggatgatcttgatgatacaaccactgattcctcggaacctgacttgctttggcaatttaatcattccaaacttaccagcatagccaatggcaacggatcaaaggctaggagacctgtctcaaagcccacaaatagcccagtattgagcaagaataatgttcattcttctcttggtccttcaccttcaaggaaacaatcaaacagtgtctcacatcgaacagcaagacatccagctccagttgacatgaaacgtaaaactgggagtagaaagtaaacttgttttgaaacgttaaaagggtgatttctatttttattttttatttctttccccctttttctttttttcaattttttagatggagggcttttgcaataatatttctttttattttttattttttattttttgggtttatgcttgtaagttttgtaacttgtatttacgcagataatggagcaataatgcccgttgcttgtaccatgggtccatgacattcttttcattttacactgtagcttttaggtgatgtaaaaatttcaaaaccactgaaacgatcaaaattgcaacaatggtttgatt

SEQ ID NO: 24871 - protein, 278 aa, Glycine max
KDGADVKELKEQIACLKAALARKEGESEHSLSGSSEKYRTMASELSPYHANQQGADIVSPGCRQPMLDVGNIELHSSTTLRQKTQSYDFDEMSTNSPPWPPVNNPRQLYGDDDRETGSGEWVDKVMVNKQDANKTENILGCWEADSGNLSDVFYQKYLQGSSKMFSERSYNMFMGGNNQFNVAGSDDMDDLDDTTTDSSEPDLLWQFNHSKLTSIANGNGSKARRPVSKPTNSPVLSKNNVHSSLGPSPSRKQSNSVSHRTARHPAPVDMKRKTGSRK

SEQ ID NO: 24872 - protein, 238 aa, Glycine max
MASELSPYHANQQGADIVSPGCRQPMLDVGNIELHSSTTLRQKTQSYDFDEMSTNSPPWPPVNNPRQLYGDDDRETGSGEWVDKVMVNKQDANKTENILGCWEADSGNLSDVFYQKYLQGSSKMFSERSYNMFMGGNNQFNVAGSDDMDDLDDTTTDSSEPDLLWQFNHSKLTSIANGNGSKARRPVSKPTNSPVLSKNNVHSSLGPSPSRKQSNSVSHRTARHPAPVDMKRKTGSRK

SEQ ID NO: 24873 - protein, 213 aa, Glycine max
MLDVGNIELHSSTTLRQKTQSYDFDEMSTNSPPWPPVNNPRQLYGDDDRETGSGEWVDKVMVNKQDANKTENILGCWEADSGNLSDVFYQKYLQGSSKMFSERSYNMFMGGNNQFNVAGSDDMDDLDDTTTDSSEPDLLWQFNHSKLTSIANGNGSKARRPVSKPTNSPVLSKNNVHSSLGPSPSRKQSNSVSHRTARHPAPVDMKRKTGSRK

SEQ ID NO: 24874 - DNA, 1603 bp, Glycine max
aaatatttaagatgagttttccagttaatccgctccctattgagttgagacatgctgagcgtgttatttgcctcccatccagtgccaatttagttagagatgtcaatgtgaagaataagtcagaaaaaaactcagtggttgagctttattttcaaattgatcaagattttggtctgggttcaatcaaattgaaagctttaattgatctttttgatgaaattgtggaggagccatttttcaatcaactgaggacaaaagagcagcttggttatgttgttgaatgcagcccgcgagtaacataccgtgtctttgggttttgtttctgcgtccagtcatctgagtacaacccagtttacttgcagggtagaattgaaaacttcttaaatggcctggaagaattgctggtaagtgttcctgattctttcaacctccatgttcttagcctatttgcttccttgtgaactgcaattaagttaacatggatgcaaatagtaaaatgcgaggaatttgtaatcagcagagtctgaaatcttttctccccctcagatgacagcattaacattgttatagcccaaatctgaattgtttatcgtttagatcacagaatatgagaaatccattgcctgttttaatgcttgttatgtagttgtctcaaattcaatgaaaaacaagaggttgggaaaaagagagaaagagagacagaagctgctattctatgaattatttttcatttctctttgtagcaaaattatctttctctgttgggttttcgtcgcaaagacaataaaatgccaaaagaacttgttccaaaaaggcttttttgtttctgactagatttttttattcccttgtctaaaatattatattgaaatgtgtatatattttctgagtgaagacttatgctttggagaaatattttgggattgcaggatggacttgatggtgattcctttgagaattacaaaagtgggttagtggcaaagctgctggagaaagacccttcactcacatatgaaagcaatagattgtggaaccaaattgttgaaaaaaggtacatctttgacttgtcaaagaaagaagcagaagaattgaagaacataagtaagcatgatattgttgaatggtacaagacttacttgaaaccgtcgtctccaaagtgtcggcaactacttattcggctatggggttgcaacacagacttgaaagaagctgaagcactacccaaatctgtgctggccattacagatccagcagcttttaagatgcaatccaagttttatccaagtttttgttaacttcgaagatgtagtttgttcaactgttgaaatgacaactagaaccagagatagtcttcatttctcatttattggttgtagtcttgtcagactgcaggggtaccatccatatacttataatgaaactaaagtttttgaggggaatacagaatttgttatctggagtttttaaggaggggaatacagaatttgttacctggaaccacagattttgttgatgtaaattacatttatttgggaaatattctttttatccacaagttattataggtcattgactgaaagagttatacattggtcctttgtat

SEQ ID NO: 24875 - protein, 152 aa, Glycine max
IFKMSFPVNPLPIELRHAERVICLPSSANLVRDVNVKNKSEKNSVVELYFQIDQDFGLGSIKLKALIDLFDEIVEEPFFNQLRTKEQLGYVVECSPRVTYRVFGFCFCVQSSEYNPVYLQGRIENFLNGLEELLVSVPDSFNLHVLSLFASL

SEQ ID NO: 24876 - protein, 149 aa, Glycine max
MSFPVNPLPIELRHAERVICLPSSANLVRDVNVKNKSEKNSVVELYFQIDQDFGLGSIKLKALIDLFDEIVEEPFFNQLRTKEQLGYVVECSPRVTYRVFGFCFCVQSSEYNPVYLQGRIENFLNGLEELLVSVPDSFNLHVLSLFASL

SEQ ID NO: 24877 - protein, 131 aa, Glycine max
MLWRNILGLQDGLDGDSFENYKSGLVAKLLEKDPSLTYESNRLWNQIVEKRYIFDLSKKEAEELKNISKHDIVEWYKTYLKPSSPKCRQLLIRLWGCNTDLKEAEALPKSVLAITDPAAFKMQSKFYPSFC

SEQ ID NO: 24878 - DNA, 1603 bp, Glycine max
taaacattggcattgccatggaagccaagctctggaactggaaccctctccttcttcctcctcgtttttcttcactcaaacatgcttttccatcaacaactactcgcctcgtagctcacaattcagtctcagaaaccgttcccattcataaggaaaaggaacaaaccctaccttctgtcaaacctacttactcccccactcctcccaatcgaggccttcgaacccctcacagcgggtaccattttgatgggactactcgcaaattcttcgagggttggtacttcaaagtctccattcccgaacggaagcagagcttttgctttatgtataccgtcgagagtcccctgtttcgtaaaccattgacgcagctcgaactggcccaatacgggcccaggtttactggtgtcggggcccaaattctcggtgctgatgacaaatatgtttgccaacactctccccaatcacattttttctggggaagcaggcatgaactaatgttggggaacacgttcgagcccaaccaaaattctaaacctccaaacaaggaggttcctcctcaggaatttaatgatagggtgctggaaggttttcaagtcacccccctttggcatcaaggttttattcgcgatgatggaaggtcaaattatgtagagacggtaaagacagctcgttgggagtatagtacacgtcctgtatatggttggggtgatgttggttctacgcagaagtctactgctgggtggcttgcagcttttcctgtttttgaaccacattggcaaatatgcatggctggtggactgtcaacaggttggatagagtgggatggcgagaggattgagtttgataatgctccatcttattcagaaaagaactggggtggaggattcccaagaaaatggttttgggttcaatgtaatgtttttgaaggtgctagtggagaaattgctcttacagcagctggtggattgaggcaaattcctggaataaccgagacctttgaaaatgctgcattgattggaattcattatggtggaaatttttatgaatttgtgccatggaatggtgttgttaactgggaagttactacttggggttattggtttatgtcagcagacaatggcaaatatgtggttgaattagaagcaacaacagaggatccaggtacaacattgcgtgctccaacagcagaagctggctttgcccctgcatgtaaagatacatgctttggaaatctaaaattacaaatgtgggaacgaagatatgatggcagcaaggggaagatcatattggacgtttcaagtaacatggcagcactagaagttggaggaggtccatggtttaacacttggaagggcaagacatcaactccagcagcccttagccgtgtccttgaattacccatagacgtagagggcattttcaatcctgttcctctatttaaaccgcctggcctgtagtcatttggtttggtattatcttcctttttttttagtttttaatctaatcatgcggcataatgcatggtttaatgttataaactttgtcatagtgcatgaaaggattcagagtttcaccataaggatagaaagggattcttgattac

SEQ ID NO: 24879 - protein, 484 aa, Glycine max
NIGIAMEAKLWNWNPLLLPPRFSSLKHAFPSTTTRLVAHNSVSETVPIHKEKEQTLPSVKPTYSPTPPNRGLRTPHSGYHFDGTTRKFFEGWYFKVSIPERKQSFCFMYTVESPLFRKPLTQLELAQYGPRFTGVGAQILGADDKYVCQHSPQSHFFWGSRHELMLGNTFEPNQNSKPPNKEVPPQEFNDRVLEGFQVTPLWHQGFIRDDGRSNYVETVKTARWEYSTRPVYGWGDVGSTQKSTAGWLAAFPVFEPHWQICMAGGLSTGWIEWDGERIEFDNAPSYSEKNWGGGFPRKWFWVQCNVFEGASGEIALTAAGGLRQIPGITETFENAALIGIHYGGNFYEFVPWNGVVNWEVTTWGYWFMSADNGKYVVELEATTEDPGTTLRAPTAEAGFAPACKDTCFGNLKLQMWERRYDGSKGKIILDVSSNMAALEVGGGPWFNTWKGKTSTPAALSRVLELPIDVEGIFNPVPLFKPPGL

SEQ ID NO: 24880 - protein, 479 aa, Glycine max
MEAKLWNWNPLLLPPRFSSLKHAFPSTTTRLVAHNSVSETVPIHKEKEQTLPSVKPTYSPTPPNRGLRTPHSGYHFDGTTRKFFEGWYFKVSIPERKQSFCFMYTVESPLFRKPLTQLELAQYGPRFTGVGAQILGADDKYVCQHSPQSHFFWGSRHELMLGNTFEPNQNSKPPNKEVPPQEFNDRVLEGFQVTPLWHQGFIRDDGRSNYVETVKTARWEYSTRPVYGWGDVGSTQKSTAGWLAAFPVFEPHWQICMAGGLSTGWIEWDGERIEFDNAPSYSEKNWGGGFPRKWFWVQCNVFEGASGEIALTAAGGLRQIPGITETFENAALIGIHYGGNFYEFVPWNGVVNWEVTTWGYWFMSADNGKYVVELEATTEDPGTTLRAPTAEAGFAPACKDTCFGNLKLQMWERRYDGSKGKIILDVSSNMAALEVGGGPWFNTWKGKTSTPAALSRVLELPIDVEGIFNPVPLFKPPGL

SEQ ID NO: 24881 - protein, 377 aa, Glycine max
MYTVESPLFRKPLTQLELAQYGPRFTGVGAQILGADDKYVCQHSPQSHFFWGSRHELMLGNTFEPNQNSKPPNKEVPPQEFNDRVLEGFQVTPLWHQGFIRDDGRSNYVETVKTARWEYSTRPVYGWGDVGSTQKSTAGWLAAFPVFEPHWQICMAGGLSTGWIEWDGERIEFDNAPSYSEKNWGGGFPRKWFWVQCNVFEGASGEIALTAAGGLRQIPGITETFENAALIGIHYGGNFYEFVPWNGVVNWEVTTWGYWFMSADNGKYVVELEATTEDPGTTLRAPTAEAGFAPACKDTCFGNLKLQMWERRYDGSKGKIILDVSSNMAALEVGGGPWFNTWKGKTSTPAALSRVLELPIDVEGIFNPVPLFKPPGL

SEQ ID NO: 24882 - DNA, 1656 bp, Glycine max
aaaagactatccctggttttcaatctggctccttcctctctgtccatgacgacgtcgtccggttccctaaagaacacgattcccccaggcctccaagaagtgcttctcaacagaaaacgcccccaacaagaacccaacaacaatgccggaccctcttcctccaccgaggacgctgccatcgccgacgattgctccagctccaactccaagctcatcgtgctggtcaccaacagtgacagcattgagtcaccgggccttacattcctcgtcgaagccctcgtgcgtcagggcctctacgacgtccatgtctgcgttcctcaatcggacaaatcggcttcgggccactctgtcactcgcggagaaaccgtcgaagcttgttcggtacaaattaatggcgccaccgcctttgaagtttcaggaactcctgtggattgcgtttcactagcgttatctggggccttgttttcatggtcaaagcctgtgctggttattagcggaattaaccagggatcaagctgtggtcatcacatgttttactcaggtgctgttgctggagctagagaggcgttattatgtggtgtaccttcattgtcaatatcattaaatcggaagaaggatgaaagtcaagagactgatttcaaggatgcagtagtactctgtttacctttaataaatgctgctatcagggatgttgtaaacggaactttcctcaaaaactgctttctgaatatagaaattcctaaatcacctttaaccagcaagggcttcaaattgaccaagcaaagtatgtggagatccactccaaactggcaggcagtttcaactagccggtatcctcctggtcatttcttggccagtaaacaaggctttggtcttcagtttgcacagattggccgagatgcctctgctgctggtgcagctcggagattaactacacagaaaaagaatttggagattgttgaatcaattggagctgccggaaaagctgattccaacagggtgaagaagtacttcaggctagagtttttggataaacagcaggaagatatagatgatgatctagattacatggcacttgaaaatggatttgttgcagttactccactctctctttctcttcatactgagaccgatattcaaatggcagcttctgattggatttcatctgtgctttctggtgaacaatagcctcaagcagagttcagcttcagcgtaattatgtacatttgagatttctgatgattctttcttttctatgttcttgaaagcaaaggtcgagcagaagcggcagtcacacctattctatagttgatatcatcaatctgcactctttttttttttgtatgcgtgtaagatattttgtattcctctcttcattgtttcatttcttttggtcgctagttatttctgatgtgtgcttcctgtaatctcctaggcatattttaaaaatgccatttcgtctgtttgtaacttaaaaaactactagcaaaacgctggtgcacgtgtcattgtaatttttcgctaaattgttgtttgaaagatagttttaagcttggtttgatggtttgtagcctctggtcagatatctagcagccttgtatggattttgacctttcaaaatatttttttttcaatgttaaaatgtttaacgaaaac

SEQ ID NO: 24883 - protein, 395 aa, Glycine max
KRLSLVFNLAPSSLSMTTSSGSLKNTIPPGLQEVLLNRKRPQQEPNNNAGPSSSTEDAAIADDCSSSNSKLIVLVTNSDSIESPGLTFLVEALVRQGLYDVHVCVPQSDKSASGHSVTRGETVEACSVQINGATAFEVSGTPVDCVSLALSGALFSWSKPVLVISGINQGSSCGHHMFYSGAVAGAREALLCGVPSLSISLNRKKDESQETDFKDAVVLCLPLINAAIRDVVNGTFLKNCFLNIEIPKSPLTSKGFKLTKQSMWRSTPNWQAVSTSRYPPGHFLASKQGFGLQFAQIGRDASAAGAARRLTTQKKNLEIVESIGAAGKADSNRVKKYFRLEFLDKQQEDIDDDLDYMALENGFVAVTPLSLSLHTETDIQMAASDWISSVLSGEQ

SEQ ID NO: 24884 - protein, 380 aa, Glycine max
MTTSSGSLKNTIPPGLQEVLLNRKRPQQEPNNNAGPSSSTEDAAIADDCSSSNSKLIVLVTNSDSIESPGLTFLVEALVRQGLYDVHVCVPQSDKSASGHSVTRGETVEACSVQINGATAFEVSGTPVDCVSLALSGALFSWSKPVLVISGINQGSSCGHHMFYSGAVAGAREALLCGVPSLSISLNRKKDESQETDFKDAVVLCLPLINAAIRDVVNGTFLKNCFLNIEIPKSPLTSKGFKLTKQSMWRSTPNWQAVSTSRYPPGHFLASKQGFGLQFAQIGRDASAAGAARRLTTQKKNLEIVESIGAAGKADSNRVKKYFRLEFLDKQQEDIDDDLDYMALENGFVAVTPLSLSLHTETDIQMAASDWISSVLSGEQ

SEQ ID NO: 24885 - protein, 219 aa, Glycine max
MFYSGAVAGAREALLCGVPSLSISLNRKKDESQETDFKDAVVLCLPLINAAIRDVVNGTFLKNCFLNIEIPKSPLTSKGFKLTKQSMWRSTPNWQAVSTSRYPPGHFLASKQGFGLQFAQIGRDASAAGAARRLTTQKKNLEIVESIGAAGKADSNRVKKYFRLEFLDKQQEDIDDDLDYMALENGFVAVTPLSLSLHTETDIQMAASDWISSVLSGEQ

SEQ ID NO: 24886 - DNA, 687 bp, Glycine max
attaataaatttagttaacacaataagattgatttgacaacttgtttttatttccacttatctcattttggttatcgtagaaatccgcggcggaggcagatcacatagatggagccacagtctcagagcaacaaccctaaccctaaccctcatcggaataattcggtagcgtcatcgatgccgctgtggccaacgatcgacggcccattgggcctgtcggaggaagagtcagtgggctacgctcgcaggttctacactttcggcttcgctcttctccctctcctttgggccgtcaattgcttctacttctggcccgtccttcgccactcccactccttccctcgcattcgcccctatgttgttggatctgcaattgggtttgcagtatgtgcgacacttctcagttcttggagtctaacatttgccattggaggggaacgcctcttcggccctgtttgggatcaattggttatgtacaatcttgctgataggttaggcttaacaggttggagctagttgtgtggcacctctgatacaaatattttgatcttttattaccacacttaccttcttccctgttttttgaatgcatctgcattacctttacattttactatattctatcatggaactagtagtgaattttatcttgctgccacagttgatagataacaagcaatgttttgg

SEQ ID NO: 24887 - protein, 135 aa, Glycine max
MEPQSQSNNPNPNPHRNNSVASSMPLWPTIDGPLGLSEEESVGYARRFYTFGFALLPLLWAVNCFYFWPVLRHSHSFPRIRPYVVGSAIGFAVCATLLSSWSLTFAIGGERLFGPVWDQLVMYNLADRLGLTGWS

SEQ ID NO: 24888 - protein, 112 aa, Glycine max
MPLWPTIDGPLGLSEEESVGYARRFYTFGFALLPLLWAVNCFYFWPVLRHSHSFPRIRPYVVGSAIGFAVCATLLSSWSLTFAIGGERLFGPVWDQLVMYNLADRLGLTGWS

SEQ ID NO: 24889 - DNA, 996 bp, Glycine max
aatcaccctttgctttcttccaatattccacatcaaagcacctttccacttttccattctatatcccccatcttttcctcccttattaaaagccgcatgcagcacctaagctaagcataacttgtacacacttacacttgcacacatagggagagagggtgaaggtgagaatctcaattgtttagcttattccgtgagtgactctattctattccattaacatgacagggaagagaaaccaaattacaacaagtcctgtgggaagtccaacatctggtaacatctcagacagctcctcctcaaaagaacaagacaggttcctccctatagccaatgttagccgaatcatgaaaagggcactcccagccaatgccaaaatctcaaaggaagccaaggaaacagttcaagagtgtgtgtctgagttcataagcttcatcactggtgaggcctcagacaagtgccagagggaaaagaggaagacaatcaatggtgatgatcttctttgggccatgacaacactaggatttgagaactatgttggacccttgaagctctacctgaacaactacagggaaactgagggagaaaagagttctatggcaaaacaagaagaacactctccaactcatcaaaccaatattgatggggtggtggttgaaatcaacaagttgcatcattctgtggcagcaaccaacaaagctgcagacttcaacactttcagtggtggtggcttctattctgtggggcctcaagtggctgctccaaagagcttcactgagattggagggatcaatggctatagagaaagttccattgctcaaagtgcggtcagtggtgatcatgatgcaagtggcaatagaatgatgccacccaacctacgttatagggttgaatggtagatgtgatatgcataccaacaagttcatgtcccttccccattatatattatatcatatcatatagtataatatatataaataatatttttattatgat

SEQ ID NO: 24890 - protein, 225 aa, Glycine max
MTGKRNQITTSPVGSPTSGNISDSSSSKEQDRFLPIANVSRIMKRALPANAKISKEAKETVQECVSEFISFITGEASDKCQREKRKTINGDDLLWAMTTLGFENYVGPLKLYLNNYRETEGEKSSMAKQEEHSPTHQTNIDGVVVEINKLHHSVAATNKAADFNTFSGGGFYSVGPQVAAPKSFTEIGGINGYRESSIAQSAVSGDHDASGNRMMPPNLRYRVEW

SEQ ID NO: 24891 - protein, 183 aa, Glycine max
MKRALPANAKISKEAKETVQECVSEFISFITGEASDKCQREKRKTINGDDLLWAMTTLGFENYVGPLKLYLNNYRETEGEKSSMAKQEEHSPTHQTNIDGVVVEINKLHHSVAATNKAADFNTFSGGGFYSVGPQVAAPKSFTEIGGINGYRESSIAQSAVSGDHDASGNRMMPPNLRYRVEW

SEQ ID NO: 24892 - protein, 129 aa, Glycine max
MTTLGFENYVGPLKLYLNNYRETEGEKSSMAKQEEHSPTHQTNIDGVVVEINKLHHSVAATNKAADFNTFSGGGFYSVGPQVAAPKSFTEIGGINGYRESSIAQSAVSGDHDASGNRMMPPNLRYRVEW

SEQ ID NO: 24893 - DNA, 559 bp, Glycine max
aacagaaacaaaccctaaagagaagcgagttccgtcttaattttctccccagcgaaaatggcgtcgttcgatgaagcaccaccaggaaactccaaggccggtgagaagatcttcagaaccaagtgcgctcagtgtcacaccgtcgacaaaggcgccggtcacaaacaaggaccgaacctaaacgggctgtttggaaggcagtctggaacaacagccggttactcttactctgcggctaacaagaacaaggctgttgaatgggaagagaagaccttgtacgattacttgctcaatcccaagaagtacattcctggaacaaagatggtcttccctgggctcaagaagccacaagatcgcgctgatctcatcgcctacttgaaggaagctactgcttagtgaaatctatcaaccaatggtggtgtgggaacatcatgaattattattcttttgacaaataaaatctccaaaacttttgaatttttttttcacttttggaaattgtgtcttcttcaaatacgttttggtgagtaccaaatgtactcatgagtacttccattat

SEQ ID NO: 24894 - protein, 112 aa, Glycine max
MASFDEAPPGNSKAGEKIFRTKCAQCHTVDKGAGHKQGPNLNGLFGRQSGTTAGYSYSAANKNKAVEWEEKTLYDYLLNPKKYIPGTKMVFPGLKKPQDRADLIAYLKEATA

SEQ ID NO: 24895 - DNA, 1402 bp, Glycine max
attctgaattgtgattgctctcacttataaaaccctcttttctgcttcttcgtccattggcattggctttcaatggcgaagtgcatgaccagttcttcttcttcttcctatgcactgcttctctttttcttctgctttctccaactggaggctattttggaccctgctgatttcctcgctctgcaaaacattcgtaaagctctgcaagacatgcctgcttccgatttcttctcttcctgggatttcaccgcagacccatgcaacttcgccggcgtttactgcgactccgacaaggtcatcgcgctcaacctcggcgaccccagggctggctctcccggcctcaccggccgcctccacccctccgtcggcaagctctccgcgctcgccgagttcaccgtcgtccctggccgtatttacggtcccctccccgaaacactctccgatttgaagaacctcaggtttctcggcgtcaaccgcaacttcatctccggcgaaattccgaccaagctgggagaactccgcaacctccgaaccgtcgatctcagctacaaccagctcactggacgcattcctccaacggtaggaaccctaccggagctaacaaacctaatcctctgccacaaccgcctctccggttcggttccccggttcgagtcgcacacactaacccggctcgatctgaagcacaactctctctccggttcgctccctcccaactctctccctccctctctccagtacctctctctttcctggaaccagctcacgggcccaatggaccgcctcctagcccgcctcgaccaggtcaagtatttggacctaagcctaaacaagttcacgggcccaatcccgggccatatcttttcctttccgctgacaaatctgcagctagaaaggaaccagttctcgggcccggtccagcccgtggatcaggtttccatcccgaccgttgatctcagttacaaccggttgtatggtcagatatcaccgatgctggcgacagtgcagaatctttacctgaacaacaaccggttcacgggtcgggttccggctagcttcgtggagcggttgctggacgcgagcattcagatactttacttgcagcataactatctgacggggattgatataagcccaacggcggtgattccagaaagaagctcgctgtgtctgcagtataactgcatggtccctcccgtagagacgccctgccccttgagggctggcaaggagaaaaccaggcctactacgcagtgcaaccagctgaaggatttgaaggactgatcctgatcccgatcaaaatcatatatatacctttccttctctttcttgccctttttgattcattattatttaattttgtgataactatgggggaatgaataagatgatgattgtgaat

SEQ ID NO: 24896 - protein, 403 aa, Glycine max
MAKCMTSSSSSSYALLLFFFCFLQLEAILDPADFLALQNIRKALQDMPASDFFSSWDFTADPCNFAGVYCDSDKVIALNLGDPRAGSPGLTGRLHPSVGKLSALAEFTVVPGRIYGPLPETLSDLKNLRFLGVNRNFISGEIPTKLGELRNLRTVDLSYNQLTGRIPPTVGTLPELTNLILCHNRLSGSVPRFESHTLTRLDLKHNSLSGSLPPNSLPPSLQYLSLSWNQLTGPMDRLLARLDQVKYLDLSLNKFTGPIPGHIFSFPLTNLQLERNQFSGPVQPVDQVSIPTVDLSYNRLYGQISPMLATVQNLYLNNNRFTGRVPASFVERLLDASIQILYLQHNYLTGIDISPTAVIPERSSLCLQYNCMVPPVETPCPLRAGKEKTRPTTQCNQLKDLKD

SEQ ID NO: 24897 - protein, 399 aa, Glycine max
MTSSSSSSYALLLFFFCFLQLEAILDPADFLALQNIRKALQDMPASDFFSSWDFTADPCNFAGVYCDSDKVIALNLGDPRAGSPGLTGRLHPSVGKLSALAEFTVVPGRIYGPLPETLSDLKNLRFLGVNRNFISGEIPTKLGELRNLRTVDLSYNQLTGRIPPTVGTLPELTNLILCHNRLSGSVPRFESHTLTRLDLKHNSLSGSLPPNSLPPSLQYLSLSWNQLTGPMDRLLARLDQVKYLDLSLNKFTGPIPGHIFSFPLTNLQLERNQFSGPVQPVDQVSIPTVDLSYNRLYGQISPMLATVQNLYLNNNRFTGRVPASFVERLLDASIQILYLQHNYLTGIDISPTAVIPERSSLCLQYNCMVPPVETPCPLRAGKEKTRPTTQCNQLKDLKD

SEQ ID NO: 24898 - protein, 357 aa, Glycine max
MPASDFFSSWDFTADPCNFAGVYCDSDKVIALNLGDPRAGSPGLTGRLHPSVGKLSALAEFTVVPGRIYGPLPETLSDLKNLRFLGVNRNFISGEIPTKLGELRNLRTVDLSYNQLTGRIPPTVGTLPELTNLILCHNRLSGSVPRFESHTLTRLDLKHNSLSGSLPPNSLPPSLQYLSLSWNQLTGPMDRLLARLDQVKYLDLSLNKFTGPIPGHIFSFPLTNLQLERNQFSGPVQPVDQVSIPTVDLSYNRLYGQISPMLATVQNLYLNNNRFTGRVPASFVERLLDASIQILYLQHNYLTGIDISPTAVIPERSSLCLQYNCMVPPVETPCPLRAGKEKTRPTTQCNQLKDLKD

SEQ ID NO: 24899 - DNA, 1427 bp, Glycine max
aagatggttagaagtgaatggttgtcatctcagggctttgaagccctttttcctttcgctctcgcgaaatccagcagtgcctatactcacacagtcacaaaccctaacaatgacaccaccacattttcttgcttctcctccctttagccatgcccgaatcacgtgactgtcgcgtaaccatcattgaccttgccacctccttatcccgcttgtgtcccatttatctacaatgacgctccaactctttgtaccccccccccccaaagaaccgccaccctcaatagcggaagagcttgtgcttgtcccgactcccaaaacataccacaatctactgtgtgacatggtaaaggatgtgttctgttacgctgcgtgcttccgacgtggtaccctaggatccaattcttctactcttttcttcatcacagatagcttgactttagcattttacttgtgaagtaatataatccaaacaagcttcaacaacattctttctgctcaacaagtcttcaatttcaatcagtgatcttcacctttctctctgcctcatctccctttaattcagctcaaaatctactgtctcaaattagcagaggagcttggggtgatagttcctaacccatgggttacttgctttaaggcggctagtttacctgccattgtttgtcttcttatgccattgattttgtacaagctctatccccctgaaatcaaagacacaccagaggctcctgccctggctgccaagaaactggaaagtatgggccttgtcattaaaaacgaatggattatggtcggcacaatgctccttgcagtgtctttatggatctttggacactatcagcatagcaagtgctgtagctgcaatgattggtttatcaatactcctcctattaggagtccttgactggaataactgttggaatgaaaaatcagcatgggataccttagcttggtttgccattttggtaggtatggcaagccagttgacaaaccttggttatgtgagctggatgtctgattgtgtggccaacaaccttcggtcattctctttgagctggccggcttcagtagctgttcttcaggcagcttatttcttcatccactacctttttgcaagtcagactggacacgtgggggctttatactccgcagttcttgccatgcataaggcaggtggtgttcctggtattttggcagcccttgctttaggttataatacaaatctttttggtgcaataacactatagtagccacccctattgaattggcaaacgtcagagaactccttatgaactatgatgtttttagtttcctttattttccttgttacaacttacaagctttattttattttaattttaattatatttttttctctttgattctgtttctagtccaagctatatttaatattctcttgttaatat

SEQ ID NO: 24900 - protein, 127 aa, Glycine max
MIGLSILLLLGVLDWNNCWNEKSAWDTLAWFAILVGMASQLTNLGYVSWMSDCVANNLRSFSLSWPASVAVLQAAYFFIHYLFASQTGHVGALYSAVLAMHKAGGVPGILAALALGYNTNLFGAITL

SEQ ID NO: 24901 - protein, 91 aa, Glycine max
MASQLTNLGYVSWMSDCVANNLRSFSLSWPASVAVLQAAYFFIHYLFASQTGHVGALYSAVLAMHKAGGVPGILAALALGYNTNLFGAITL

SEQ ID NO: 24902 - protein, 78 aa, Glycine max
MSDCVANNLRSFSLSWPASVAVLQAAYFFIHYLFASQTGHVGALYSAVLAMHKAGGVPGILAALALGYNTNLFGAITL

SEQ ID NO: 24903 - DNA, 879 bp, Glycine max
aaaaaccccaggggctccacttagttgttcctctctggcctcttttctttctacttctcatcagggttttacttttagcttaaacccgcggccatggcgacgagagcagcagtggcggcgccgcgcgttttgcggcggtttttctgcacaaactcagcctcttcttctttccccttcgtttctacgctgcctcccggtgccacccccgccccaacccgacccacggcggagcccaacaccaacctcttcgtctctggtcttagtaaacgtactaatacagaaaggcttcgagaggagtttgcaaagttcggtgaagttgttcatgcgagggtggtaactgatcgagtctcaggttactctaaggggtttggttttgttcaatatgctacaatagaagatgctgcaaagggcattgaaggcatggatggcaagtttttggacggttgggttatatttgcagagtatgcgagaccaagaccaccaccaggccaacctctaaatagcaacagttctcagtatggccggcagtgattcctgttatttatctaaaacattcttatgcccattgaactggttgtctcaattagcaattgcaattcaaaaagtattatttattagggcatggatgctcgggtgatctttaattatctatagaagttctagattattgtaatggaaggataacttatgacattgttgtaatgcaagatttctcgttgatagtcttgcatattttgtggttatggttactccaaagtagcttcctgtttgtacttaagtatagattgatgccaatgtctggacacgatggggttatctggtctgataatcccttacccttatacttgaaacgagataaaaatgattattgtctacgat

SEQ ID NO: 24904 - protein, 145 aa, Glycine max
MATRAAVAAPRVLRRFFCTNSASSSFPFVSTLPPGATPAPTRPTAEPNTNLFVSGLSKRTNTERLREEFAKFGEVVHARVVTDRVSGYSKGFGFVQYATIEDAAKGIEGMDGKFLDGWVIFAEYARPRPPPGQPLNSNSSQYGRQ

SEQ ID NO: 24905 - protein, 111 aa, Glycine max
KTPGAPLSCSSLASFLSTSHQGFTFSLNPRPWRREQQWRRRAFCGGFSAQTQPLLLSPSFLRCLPVPPPPQPDPRRSPTPTSSSLVLVNVLIQKGFERSLQSSVKLFMRGW

SEQ ID NO: 24906 - DNA, 1503 bp, Glycine max
aaacccaaacacaacaacacaaagaaaaaaagagcacaaacagaccaattccaacggttgaattttttggctgaagacaccccaccgacgttagtcaaataaaacatgtcttgctccgtcgcggtttccaattcgccggtgttctctccttcttcttccctcttctgctcgaagccctccatcatctcttcttcgccggaatccctctcgctctctctctcgcatctcaaaccttccaactcttctacgacgtcgtcttgttcttcaccctctgctgctgcttcttcatcttcttctccttcttctccgtttcggcttcgccttcccaagcctcccaccgtgttctctgcttcttcttctgcttcgtctacctctccgaacggcaccgttttgaagaggaagcgacccgctaggttggacatacccgtttcctctctcacctttgcggttccgcccacgccctccgcggcggcgcgtgacttggtcgaggctgaggaagatgggtttggggtgtactgcaagagaggcaggagggagtacatggaggatcgttacaccgctgggaataatcttcgcggagaacacaaactggctttttttggcatatttgatgggcacggtggtgcaaaagctgctgaatttgctgcaaataacttgcaaaagaatgtgttagatgaagttattgtgagagatgaagatgatgttgaggaggcagtgaagcgtgggtacctgaacaccgattcggatttcctaaaggaggatctccatggtggctcttgctgtgtgacagcattgattaggaatggtaacctcgttgtgtccaacgcgggtgattgccgtgctgtcattagcagagggggtgttgctgaggccctaacatctgatcacaggccttcaagggaagatgaaagggacagaattgagagcctgggtggctatgtcgatttatgccgcggtgtttggaggatccagggatctctggctgtgtcaaggggaattggagatagacacctgaaacaatgggtgacagcagaacctgagaccaaagttctccgaattgaacctgaacatgacttgttaattttagcttcagatggattatgggataaggttggtaatcaggaagcagtagatattgctcgttcttttctcgtaggcaacaacaaatcacaaccattgctgcaggcttgtaaaaagcttgtagatttgtctgtttcacgaggctctttggatgatacaagtgtcatgctaatcaaattggagcactatatttaaagttaccttagtacaactaaggtttcaagattattgcagttgagatcgcattgaggtcaagattgcgttgcagtttgtgatttttgaacaaccttggtggtgcctgatgatggatagagagtagctgattcttttctgtatatataaatctgactaccttattggaattttttgtacccgcgtaggggagggatattaacaataacatttagtaattatttttttcat

SEQ ID NO: 24907 - protein, 389 aa, Glycine max
MSCSVAVSNSPVFSPSSSLFCSKPSIISSSPESLSLSLSHLKPSNSSTTSSCSSPSAAASSSSSPSSPFRLRLPKPPTVFSASSSASSTSPNGTVLKRKRPARLDIPVSSLTFAVPPTPSAAARDLVEAEEDGFGVYCKRGRREYMEDRYTAGNNLRGEHKLAFFGIFDGHGGAKAAEFAANNLQKNVLDEVIVRDEDDVEEAVKRGYLNTDSDFLKEDLHGGSCCVTALIRNGNLVVSNAGDCRAVISRGGVAEALTSDHRPSREDERDRIESLGGYVDLCRGVWRIQGSLAVSRGIGDRHLKQWVTAEPETKVLRIEPEHDLLILASDGLWDKVGNQEAVDIARSFLVGNNKSQPLLQACKKLVDLSVSRGSLDDTSVMLIKLEHYI

SEQ ID NO: 24908 - protein, 244 aa, Glycine max; identical to SEQ ID NO: 24781

SEQ ID NO: 24909 - DNA, 1227 bp, Glycine max
cccccttctcccttttgcttccttcaataacttataacttagcattgtattgtgttcaaactttgtttcttccataccctcttcttctttggccttaaccgtcatatttggctttgaaatggagttcgaggaccgcttcagacaccaggttcagagaccaaaatatgattgccttctttttgatttagatgacactttgtatcctctcaaatctggtctggcaaaatcatgtctccaaaatattaaacactacatggttgagaagcttggcatagaccctagcaaaattgatgacctgtccaacctcctttacaagaattatggaactactatggctggtctaagggcaattggatatgactttgactatgatgaatatcatagctttgttcatgggagattaccttatgagaacctaaaaccagacccagttctgaggaacctgttgctgagcctaccctataggaaacttatcttcacaaacgcagacaaagtccacgcggctaaggcgcttagcaggcttggattagaagactgctttgaaggaatcatatgctttgagacccttaatcctatccacaagagcactgtttctgatgatgaagatgatattgagtttgtgggttcaaggaccaccaatcctaccacttgtaatggttcaggcacctctcaaatctttgacattatagggcattttgctcagcccaatcccggtgcagtcctgccaaagacaccaattgtttgcaagccatcagaaaatgccattgaattggccatcaagatagccaaccttaacccacaaagaactttgttctttgaggacagtacccgcaacatacaagctggaaaacgtgtggggcttcacactgtgctggttggtacatcacaaagatgtaaaggagcagattatgccttggaaagcattcacaaccttagggaggctgtgcctgaactatgggaggctgatataaaatcagaagttgcataccctggaaagctagctgtggagacatctgtcactgcttgagattattattaagtgcatgaaattaattaagtcccttcaaaattgttcatttaatcaaaattgaaaatccaaccaccaacaacaaaaaaaaaaacgaacaaaagagagaagaagcccacgggaattcccccaacttcagatgtagtagttgtagttgatgtagatgctttgtaagattgcaataaaatagtcattcaaat

SEQ ID NO: 24910 - protein, 302 aa, Glycine max
MEFEDRFRHQVQRPKYDCLLFDLDDTLYPLKSGLAKSCLQNIKHYMVEKLGIDPSKIDDLSNLLYKNYGTTMAGLRAIGYDFDYDEYHSFVHGRLPYENLKPDPVLRNLLLSLPYRKLIFTNADKVHAAKALSRLGLEDCFEGIICFETLNPIHKSTVSDDEDDIEFVGSRTTNPTTCNGSGTSQIFDIIGHFAQPNPGAVLPKTPIVCKPSENAIELAIKIANLNPQRTLFFEDSTRNIQAGKRVGLHTVLVGTSQRCKGADYALESIHNLREAVPELWEADIKSEVAYPGKLAVETSVTA

SEQ ID NO: 24911 - protein, 257 aa, Glycine max
MVEKLGIDPSKIDDLSNLLYKNYGTTMAGLRAIGYDFDYDEYHSFVHGRLPYENLKPDPVLRNLLLSLPYRKLIFTNADKVHAAKALSRLGLEDCFEGIICFETLNPIHKSTVSDDEDDIEFVGSRTTNPTTCNGSGTSQIFDIIGHFAQPNPGAVLPKTPIVCKPSENAIELAIKIANLNPQRTLFFEDSTRNIQAGKRVGLHTVLVGTSQRCKGADYALESIHNLREAVPELWEADIKSEVAYPGKLAVETSVTA

SEQ ID NO: 24912 - protein, 231 aa, Glycine max
MAGLRAIGYDFDYDEYHSFVHGRLPYENLKPDPVLRNLLLSLPYRKLIFTNADKVHAAKALSRLGLEDCFEGIICFETLNPIHKSTVSDDEDDIEFVGSRTTNPTTCNGSGTSQIFDIIGHFAQPNPGAVLPKTPIVCKPSENAIELAIKIANLNPQRTLFFEDSTRNIQAGKRVGLHTVLVGTSQRCKGADYALESIHNLREAVPELWEADIKSEVAYPGKLAVETSVTA

SEQ ID NO: 24913 - DNA, 1336 bp, Glycine max
aaaacaagttttctagtgttttacactttgcacatgtgatgagagactagactagtcccttgagagaagctcctaacaaataaaacgaaaccatacttcactgtcgcagtcaaaatctccgtatttgaatccaatgacgcatatatcaattcaactctgaatctgaagcttcccgtatgtcaacggaagcgcccaagcgcgaccaatggcagtgggagaacgccaccgccggcgccgccgctggattcgccaccgtcgccgtcatgcatcccctcgatgttgtccgaactaggttccaagttaacgatggtcgagtctctaattttcccagttacaagaacaccgctcacgccgttttcactatcgctcgttccgagggattaagagggttatatgcaggcttccttcctggggttcttgggtcaactatttcatggagtttatatttcttcttctatgacagagccaaacagagatatgcaaggaacagggaggggaagttgagcccaggtctgcatcttgcctcagcagctgaagcaggagctatagtttccttcttcacaaatccagtatggctggtaaagacaagattgcagcttcaaactcctcttcatcagacacgaccatactctggggtttatgatgcatttaggaccataatgagggaagaaggatttagtgcactttacagaggaattgttcctggtctatttctgttctctcatggtgctattcagtttacagcatatgaggagctacgcaaagttattgttgattttaagagtaagggaagtacagtagataatcaaaaccctgataaattgctggtacaactgtttgtcccctctctttggaaggaggattctagcttctacagtccttaagtatgatatatcaatcattgaagaagttgctttctcatgagacatactttatcccccctttttcaggttatacgggctcgattgcagcaaagacccagtggtgatggggttccaagatatatggacactttgcatgttgtgaaagaaactgcacgatttgaaagtgtccgaggtttttacaaaggaattaccgcaaacctcttgaagaatgctcccgcttcttcgataacatttattgtttatgaaaatgtcctaaaattgcttaaaccggctagaaggaatgactgagtatttcatgattctttcctttctccttattgctgtttaatctcctttcttatctgatatttgttgcattgaaaaattgctcatttttcctatcactttttaatgatgggattctacacaatacacaattgctcattgaagttagacaaccccaaaaacaaagt

SEQ ID NO: 24914 - protein, 235 aa, Glycine max
MSTEAPKRDQWQWENATAGAAAGFATVAVMHPLDVVRTRFQVNDGRVSNFPSYKNTAHAVFTIARSEGLRGLYAGFLPGVLGSTISWSLYFFFYDRAKQRYARNREGKLSPGLHLASAAEAGAIVSFFTNPVWLVKTRLQLQTPLHQTRPYSGVYDAFRTIMREEGFSALYRGIVPGLFLFSHGAIQFTAYEELRKVIVDFKSKGSTVDNQNPDKLLVQLFVPSLWKEDSSFYSP

SEQ ID NO: 24915 - protein, 206 aa, Glycine max
MHPLDVVRTRFQVNDGRVSNFPSYKNTAHAVFTIARSEGLRGLYAGFLPGVLGSTISWSLYFFFYDRAKQRYARNREGKLSPGLHLASAAEAGAIVSFFTNPVWLVKTRLQLQTPLHQTRPYSGVYDAFRTIMREEGFSALYRGIVPGLFLFSHGAIQFTAYEELRKVIVDFKSKGSTVDNQNPDKLLVQLFVPSLWKEDSSFYSP

SEQ ID NO: 24916 - DNA, 1430 bp, Glycine max
atactcactgtcccaaattcctcttaggtcccaacccagtaactatgattccatcggaaaccgttaattttgctcgaaatttcgcagctatggtcagagttcgtggccctgtgagtttctctttctctcttctacaacgccgcctactctattatcaccgctcactcagcttgcaattaacttttcgggacccaaaagggttaaagatgagaaaacacgcttttcatcaatactgttctggtggaacaactctttcagcttctgggatgctcgtacctgataccctttgtgatgctcaagtagctgggtgtctctatggtgataactgtgaggatagggtgttggttgtgacggttgcttcagttgttgagccttttctgtcacctcaacagagagacaatattcctcagggtaggccagacttgatttctggtgttcggattgatgttatgacagaggaagccaatgaaaaatccaatcagggaactccttgttggcttgcggcagagcttttgtcattagttgatattcctgcttcatccaattgtctccagtcacttattgaagcatctttgggtttgccagagcatgaatgggaggttggttggtctttggcatcttacaataatgattctcaaccttccaaagatttttttcaaactcatccttgggattcttcccatctgtttgctctggtgtggtagcaaaagtggttgaggcaaagactcctcaatcttatctgtccattcaacctgagcatctgcacaaccatgagcacttcccagcaatgctcgaaacaacagctactattcatcctggtgctagtggtggtgctgttatcaattcagatggtcacatgattggcctggttacaagcaatgcaaggcatagtggaggagcagtaatacctcatcttaattttagcattccatctgctgctttggcacccgtcttcaaattctcaaaagccatgcaggatttatcacttctacggattctagatgaaccgaacgaatacctttcatctgtatgggcattgatgcggccatcatatcctaatcctcatcctatgcatgatccacctcagtctgttacagacaataaaaataaagagaagggttctcggtttgctaaagtttattgctgaaagaaaggacattttcaattctggaaaaagtggagtgatttctaaggaagttattcctagtaagttatgatctctgatgaagtgacaaagtttacctgaatgaccatggcaaagctttgccagcatacaacttgtcaatgtgtacacttcctatgattaaaatctttgaactgaaatcttctgccttggattgttagccaaagaaaaatcaaggaaataaattttctagaacctctaaacgattatacttgtactttattaaagtttaaaactgattttacat

SEQ ID NO: 24917 - protein, 233 aa, Glycine max
THCPKFLLGPNPVTMIPSETVNFARNFAAMVRVRGPVSFSFSLLQRRLLYYHRSLSLQLTFRDPKGLKMRKHAFHQYCSGGTTLSASGMLVPDTLCDAQVAGCLYGDNCEDRVLVVTVASVVEPFLSPQQRDNIPQGRPDLISGVRIDVMTEEANEKSNQGTPCWLAAELLSLVDIPASSNCLQSLIEASLGLPEHEWEVGWSLASYNNDSQPSKDFFQTHPWDSSHLFALVW

SEQ ID NO: 24918 - protein, 219 aa, Glycine max
MIPSETVNFARNFAAMVRVRGPVSFSFSLLQRRLLYYHRSLSLQLTFRDPKGLKMRKHAFHQYCSGGTTLSASGMLVPDTLCDAQVAGCLYGDNCEDRVLVVTVASVVEPFLSPQQRDNIPQGRPDLISGVRIDVMTEEANEKSNQGTPCWLAAELLSLVDIPASSNCLQSLIEASLGLPEHEWEVGWSLASYNNDSQPSKDFFQTHPWDSSHLFALVW

SEQ ID NO: 24919 - protein, 204 aa, Glycine max
MVRVRGPVSFSFSLLQRRLLYYHRSLSLQLTFRDPKGLKMRKHAFHQYCSGGTTLSASGMLVPDTLCDAQVAGCLYGDNCEDRVLVVTVASVVEPFLSPQQRDNIPQGRPDLISGVRIDVMTEEANEKSNQGTPCWLAAELLSLVDIPASSNCLQSLIEASLGLPEHEWEVGWSLASYNNDSQPSKDFFQTHPWDSSHLFALVW

SEQ ID NO: 24920 - DNA, 874 bp, Glycine max
actcacaaccacaacacaacgcggcagagcgaagagaaggggcaaaagagaaagaagcgcttatcgaactcggacggaagcactgagttgactcggagggagtggaaagtgttgttgcgtaatgtctggtggtatcgctcgtggacgcctcaccgaggagcgcaagtcgtggcggaagaaccatccccatggttttgttgcgaagccggagacgctgcccgatggaaccgtgaatttgatggtgtggcattgcactattcccgggaagactgggactgattgggagggtggctacttcccacttacgctgcactttagtgaagactaccctagcaagcctccaaagtgtaaattcccacaaggtttcttccaccctaatgtttatccttctgggactgtttgcttgtctatacttaacgaggatagtgggtggaggccagccataacagttaagcaaattctcgtgggcatccaagacttacttgaccagccaaatcctgctgaccctgcccagacagaaggctatcatctattcatccaggatgcagcagagtacaagagaagggtccgccagcaggcaaagcaatatccacctcttctctagggttgcatcagctaaatttatgaactatttttactatggcagatgtttcttcttttgtcccgtgttaaaactgtgttgtcattgtgattaatggctgccataacattaaacatgaatgttttagctatttatgattactcccagatctggaagaagtgttaatatataaaaaaaatgtgaaagtcaaccaatgaatacttgttggtgacatgtttctgatgtttgctgctacatttttatatgaatggatcattactataagtctataac

SEQ ID NO: 24921 - protein, 160 aa, Glycine max
MSGGIARGRLTEERKSWRKNHPHGFVAKPETLPDGTVNLMVWHCTIPGKTGTDWEGGYFPLTLHFSEDYPSKPPKCKFPQGFFHPNVYPSGTVCLSILNEDSGWRPAITVKQILVGIQDLLDQPNPADPAQTEGYHLFIQDAAEYKRRVRQQAKQYPPLL

SEQ ID NO: 24922 - protein, 121 aa, Glycine max
MVWHCTIPGKTGTDWEGGYFPLTLHFSEDYPSKPPKCKFPQGFFHPNVYPSGTVCLSILNEDSGWRPAITVKQILVGIQDLLDQPNPADPAQTEGYHLFIQDAAEYKRRVRQQAKQYPPLL

SEQ ID NO: 24923 - protein, 92 aa, Glycine max
THNHNTTRQSEEKGQKRKKRLSNSDGSTELTRREWKVLLRNVWWYRSWTPHRGAQVVAEEPSPWFCCEAGDAARWNREFDGVALHYSREDWD

SEQ ID NO: 24924 - DNA, 1390 bp, Glycine max
gattgtagatgctgccgttgagcttgcgtcccaaggccataaagttcatgtttttactgcacatcatgataaaaacagatgctttgaggaaactgttgctggcacctttccagttactgtgcatggttcctttcttccccggcatatattctaccgtcttcatgcattgtgtgcataccttcggtgcctatttgttgctttctgtgtacttttcatgtggcattcatttgatgttatcctggcagatcaagtctctgtggttattcccatcttgaaactcaaaagatcaacaaaggttgtattctactgccattttccagacttgttgctggctcaacattcaactttcattaggagaatgtatcgaaaaccaatagaccttgcagaagaaataacaactggaatggctgatttgatacttgttaacagcaagttcactgcatctacttttgcaaatacttttaagtatctagatgctaaaggaattcgaccagctgttttatatccagcggttaatgtggatcagttcaatgaacccagttcctttaagctgaattttctttccatcaatcgctttgaaaggaagaagaatatacaattagctatttcagcttttgctatgcttaactcacccgaaggagttcttaagcataaagatattactaatgcttctttgactattgcaggtggctttgataaacggttgaaggagaatgtggaatacttagaagagcttaaagatttagctgaaaaggaaggagtctctaataaaataagattcatcacgtcttgctctacagctgaaaggaatgaacttctttctgaatgcttgtgtgtcctttacacgccaaaggatgagcactttggcattgttcctttggaggcaatggcagcttataaacctgttattgcatgcaatagtggtggccctgtggagtcaattaagaatggtgtaacgggattcctttgtgatcctacaccacaggagttttctttagcaatggctaagctcataaatgatccccaggaggcagaaagaatggggagagaagctaggaggcatgttgctgagtcattctctacaaagtcatttggccagcatctaaatagatatctagttgacattcaccggggaaaggaggattgagtttgacattggatagcatgatttttgccctctaattgttaactgcaattggtgaccattcaacttgctgttcagattttagtggcttagttaactatttgctacaagttctattttcaagataatttttattttataccaatataccatgtaaatctgaatcagagatgatgacatgttcaatgttccaagtcttgctccttttggatatattcttacaataataggaaagttacttttttt

SEQ ID NO: 24925 - protein, 381 aa, Glycine max
IVDAAVELASQGHKVHVFTAHHDKNRCFEETVAGTFPVTVHGSFLPRHIFYRLHALCAYLRCLFVAFCVLFMWHSFDVILADQVSVVIPILKLKRSTKVVFYCHFPDLLLAQHSTFIRRMYRKPIDLAEEITTGMADLILVNSKFTASTFANTFKYLDAKGIRPAVLYPAVNVDQFNEPSSFKLNFLSINRFERKKNIQLAISAFAMLNSPEGVLKHKDITNASLTIAGGFDKRLKENVEYLEELKDLAEKEGVSNKIRFITSCSTAERNELLSECLCVLYTPKDEHFGIVPLEAMAAYKPVIACNSGGPVESIKNGVTGFLCDPTPQEFSLAMAKLINDPQEAERMGREARRHVAESFSTKSFGQHLNRYLVDIHRGKED

SEQ ID NO: 24926 - protein, 310 aa, Glycine max
MWHSFDVILADQVSVVIPILKLKRSTKVVFYCHFPDLLLAQHSTFIRRMYRKPIDLAEEITTGMADLILVNSKFTASTFANTFKYLDAKGIRPAVLYPAVNVDQFNEPSSFKLNFLSINRFERKKNIQLAISAFAMLNSPEGVLKHKDITNASLTIAGGFDKRLKENVEYLEELKDLAEKEGVSNKIRFITSCSTAERNELLSECLCVLYTPKDEHFGIVPLEAMAAYKPVIACNSGGPVESIKNGVTGFLCDPTPQEFSLAMAKLINDPQEAERMGREARRHVAESFSTKSFGQHLNRYLVDIHRGKED

SEQ ID NO: 24927 - protein, 262 aa, Glycine max
MYRKPIDLAEEITTGMADLILVNSKFTASTFANTFKYLDAKGIRPAVLYPAVNVDQFNEPSSFKLNFLSINRFERKKNIQLAISAFAMLNSPEGVLKHKDITNASLTIAGGFDKRLKENVEYLEELKDLAEKEGVSNKIRFITSCSTAERNELLSECLCVLYTPKDEHFGIVPLEAMAAYKPVIACNSGGPVESIKNGVTGFLCDPTPQEFSLAMAKLINDPQEAERMGREARRHVAESFSTKSFGQHLNRYLVDIHRGKED

SEQ ID NO: 24928 - DNA, 1590 bp, Glycine max
ttttttaccatggagtgctcagatactaagcctgtgaaacccaactcgaataatatatcggaaatggtgtgcaagtttgccaaagtttgtaaattgaagtctattggggtgttctcttccgaaatccccaatctccctcacttgcaaagatccatttacaatgagacccttctgagtgaagacagcagtgaagagagcagatgctatgaccagaaagtgcatccccaccccactgaagttcctgccaaagaaaatgcttgtgctggtttggaggtcatgaggaagctgtttgatgctgtttcggcgctgaaattggcataccttcagcttcagcaggctcatatcccttatgaccctcagaagattgttgcagctgatgaccttgttgttgctgagcttgagaagctttgcaagttcaagcgcgaatatgtgcagaaacattgcaagaaaacaaggttcaatgccgctcgttcttctctcttgatggctgaaattgtggccaaagaggcacttttggggaagctgaagtctcagaacagtgccaaagattctgatattcttcagttgtggcgggagctgcaagatttggagatggggaatagaaatctgagtgagaagatcaagcagataagtttggagaaaaggagagtaggtgttttgagtgttactaagtttcaggatgtcttcaaggctgcttcaaagtccattcatgattttgcaaaaccgttgattagcttgatgaaagcttcgggttgggaccttgatagggctgcaaactccattgagaatggtgctgtttattccaaaaggtgtgacaagaagtatgcttttgaggcctacattgcgcgcagaatgtttcatgggatcgctttaacatcttatgatgtgagtgatattatgaagtttgatgacccttttgatgcactgatggagaatccacattctgattttgccaaattttgtcaagcaaagtaccttcttgttgtgcatccgaaaattgaagagtcattctttggcaatttggatcacagaacattcgtaatgagtggcaagcaccctagaaccaagttctatcagttgtttgctaaaatggcaaaatgggtttgggttttacttggatctgctgtgtcaatagatcctgaagcaaccttgttttcggtgagcagaggaagtgtgttttccagcttgtacatggaatctgttgaggaagaaaaggagagtgcaatactttcagatgaagaaagagtgacatataaagttcagttcatgatcatgccagggtttcaaattggaaagatggtggtgaagtctcgagtttatgtctcgaaacattctttaagctaaatggtggaccttttaactggtaattcagctaacagaaccacataatttttgtactagagttcttttaatggtaccttagctagtcaagataaccatggctactaggttatgctagaacctcaatccaccatctctatatttgtaatctttcctattaatgtgagacctgggatatgtagtcgttacagtggtcttatatttctttctttctgcactgtatttatttttaacctttcaaaaaaaaat

SEQ ID NO: 24929 - protein, 447 aa, Glycine max
FFTMECSDTKPVKPNSNNISEMVCKFAKVCKLKSIGVFSSEIPNLPHLQRSIYNETLLSEDSSEESRCYDQKVHPHPTEVPAKENACAGLEVMRKLFDAVSALKLAYLQLQQAHIPYDPQKIVAADDLVVAELEKLCKFKREYVQKHCKKTRFNAARSSLLMAEIVAKEALLGKLKSQNSAKDSDILQLWRELQDLEMGNRNLSEKIKQISLEKRRVGVLSVTKFQDVFKAASKSIHDFAKPLISLMKASGWDLDRAANSIENGAVYSKRCDKKYAFEAYIARRMFHGIALTSYDVSDIMKFDDPFDALMENPHSDFAKFCQAKYLLVVHPKIEESFFGNLDHRTFVMSGKHPRTKFYQLFAKMAKWVWVLLGSAVSIDPEATLFSVSRGSVFSSLYMESVEEEKESAILSDEERVTYKVQFMIMPGFQIGKMVVKSRVYVSKHSLS

SEQ ID NO: 24930 - protein, 444 aa, Glycine max
MECSDTKPVKPNSNNISEMVCKFAKVCKLKSIGVFSSEIPNLPHLQRSIYNETLLSEDSSEESRCYDQKVHPHPTEVPAKENACAGLEVMRKLFDAVSALKLAYLQLQQAHIPYDPQKIVAADDLVVAELEKLCKFKREYVQKHCKKTRFNAARSSLLMAEIVAKEALLGKLKSQNSAKDSDILQLWRELQDLEMGNRNLSEKIKQISLEKRRVGVLSVTKFQDVFKAASKSIHDFAKPLISLMKASGWDLDRAANSIENGAVYSKRCDKKYAFEAYIARRMFHGIALTSYDVSDIMKFDDPFDALMENPHSDFAKFCQAKYLLVVHPKIEESFFGNLDHRTFVMSGKHPRTKFYQLFAKMAKWVWVLLGSAVSIDPEATLFSVSRGSVFSSLYMESVEEEKESAILSDEERVTYKVQFMIMPGFQIGKMVVKSRVYVSKHSLS

SEQ ID NO: 24931 - protein, 426 aa, Glycine max
MVCKFAKVCKLKSIGVFSSEIPNLPHLQRSIYNETLLSEDSSEESRCYDQKVHPHPTEVPAKENACAGLEVMRKLFDAVSALKLAYLQLQQAHIPYDPQKIVAADDLVVAELEKLCKFKREYVQKHCKKTRFNAARSSLLMAEIVAKEALLGKLKSQNSAKDSDILQLWRELQDLEMGNRNLSEKIKQISLEKRRVGVLSVTKFQDVFKAASKSIHDFAKPLISLMKASGWDLDRAANSIENGAVYSKRCDKKYAFEAYIARRMFHGIALTSYDVSDIMKFDDPFDALMENPHSDFAKFCQAKYLLVVHPKIEESFFGNLDHRTFVMSGKHPRTKFYQLFAKMAKWVWVLLGSAVSIDPEATLFSVSRGSVFSSLYMESVEEEKESAILSDEERVTYKVQFMIMPGFQIGKMVVKSRVYVSKHSLS

SEQ ID NO: 24932 - DNA, 1108 bp, Glycine max
gttgacattacttgaaaaggtttgctcagattttcctacttttggcgattatgtgaaaaatacatggctgattcctcacaaggaaaaatttgttatggcatgggtagatcgagtgatgcatttgggtaacactacaatcgacaggtttgaaacagcacattggaggctggagaacttgcttcaagatagtgggggggatatgtgtagttgttgggatgctgtgaacaacatgattaaattgcaacacacacagattaaggtgtcgtttgagaaaagtataaacattgtggaatacaatgatccattctatagcaagctgcggggatttgtatcaaggaatgcattgagttatatagctgaccattatgaccgagttaagaccgttggtattgatattgatggttctttatgtggatgcacaattagaactacacatggtctaccttgtgcgtgtgaacttgctaagtatagtaggacgtggcacccaattcccttgcaagcaattcatgttcattggaggacattaaacttcagtgaccaagaaatgaacaatgaggggctcgagttagcgttgcaacgtgaagtggatgctttgcacaatcaatttcaggaacttgattatgctggaaaaattactttgaaggccaaattgcgtgaactagcatttcctgatgcaattttaatgtgtccgtctcctgaaaattactttgatgctccaaaggctctgggtttccgcgagagacaaatcaattgaatgtgatcctttatgtccggagcatgctgatgcataacattctgaccatgatagcatgttagctcacccttcatcttagaaatcagcccatgagagttttgcccaaattccggttgagattcatccttttattgaagacattgtagatgtgaaacagacgagaaatgtggttaattgtcttagatatattgtggtcttagtttctttatcttcacatggaagcattacgtttttccttcttggaggttaaccaacgttatgtcagtcaagtcacctacttaggtttgtgcataaatgtcactctgtacaactatgatatgtagtttgtttaaaatcaggtctttaatttaatct

SEQ ID NO: 24933 - protein, 250 aa, Glycine max
LTLLEKVCSDFPTFGDYVKNTWLIPHKEKFVMAWVDRVMHLGNTTIDRFETAHWRLENLLQDSGGDMCSCWDAVNNMIKLQHTQIKVSFEKSINIVEYNDPFYSKLRGFVSRNALSYIADHYDRVKTVGIDIDGSLCGCTIRTTHGLPCACELAKYSRTWHPIPLQAIHVHWRTLNFSDQEMNNEGLELALQREVDALHNQFQELDYAGKITLKAKLRELAFPDAILMCPSPENYFDAPKALGFRERQIN

SEQ ID NO: 24934 - protein, 219 aa, Glycine max
MAWVDRVMHLGNTTIDRFETAHWRLENLLQDSGGDMCSCWDAVNNMIKLQHTQIKVSFEKSINIVEYNDPFYSKLRGFVSRNALSYIADHYDRVKTVGIDIDGSLCGCTIRTTHGLPCACELAKYSRTWHPIPLQAIHVHWRTLNFSDQEMNNEGLELALQREVDALHNQFQELDYAGKITLKAKLRELAFPDAILMCPSPENYFDAPKALGFRERQIN

SEQ ID NO: 24935 - protein, 212 aa, Glycine max
MHLGNTTIDRFETAHWRLENLLQDSGGDMCSCWDAVNNMIKLQHTQIKVSFEKSINIVEYNDPFYSKLRGFVSRNALSYIADHYDRVKTVGIDIDGSLCGCTIRTTHGLPCACELAKYSRTWHPIPLQAIHVHWRTLNFSDQEMNNEGLELALQREVDALHNQFQELDYAGKITLKAKLRELAFPDAILMCPSPENYFDAPKALGFRERQIN

SEQ ID NO: 24936 - DNA, 1625 bp, Glycine max
ttttcttgagtagctatgggttgcaaattgacaccattagcttagatttcaagtctggtttggaggctttgctaaaggaaaaaccgattcgagctatcttccttggagttcgaattggagaccctactgcggttggtcaagaacaattctcccctagttcgcctgggtggccacctttcatgagggtgaatcccattttagattggtcatacagagatgtgtgggccttccttttaacttgcaaggtgaactattgcagcctttatgatcaaggttatacttcaattgggagcatatacgacacagttcccaactcattattatgcattagcaattcttccaataaattcaaacctgcgtatttacttgctgacggaagattagagagggcagggagggctaaaaggccatctacttcaactggtggacaacatcctgcagagagcaatggcctgactagccaggattcacttaaaaacagcatgctcacagcatcaatcattgctgtgggagatgagattctgtttggcattgttgaggatcagttgggaccttatttgtgtaggaaattgcattgcattggttggtctgtgtttcaacattctgttgtgcacaacaatgtgagttcttttctgcagaagtcctacgtatgtttatatgaactgttccgctttgcagacatcaacacttgaagattctgtggccgaagaagttgagagacaaaaatctaaaagtgatatggtatttatatatggaggtgtaggtccactgcattcagatgttagcatagcaggcattgcaaaagcttttggtgttcgtttggctccagatgaagaatttgaagaatatctcaggcatattattggtgatcaatgtactggtgaccggaatgagatggctcaattgcctgagggcataactgaattatggcatcatgacaaattgtctgtgcccttgatcaagtgtgaaaatgtaataattcttagtgcaacaaatgttccagagctggaaaagcagtgggactgttggattgaattagcaaaatctagtgatctactagcattgctggaaccatatgtatcaaaggacgtgacaactaatctgtcagatgttgaaattgctcaacctctatcaaagctttgccttgaatttccagacctttatattggttgttaccgcaaagccagatatggatctcttatagtaagcttcaaaggaaaggacctaacacgcattgaatcagctataaaagcattacacaagaagtttcaacccagtgctttcgttgagatgaactaggatgatgttctaaatgctatggtccatttcttttggatgccaacagaatgaaaacctttcatggctgggatcatatcattctcatattatctacaaatataagatgcattgggataaagatggagagggcagaaaacaaggtgctgctgtgttgctagaagaaagaacaatggtacaaggaggtgactgaatcttcaattctattgccacagcacttttaactgcttcatgggggcatggacaacctatagattattatagaattattattgaattatctcaacttacatcaccactttacaagtatatactatacaggttttttc

SEQ ID NO: 24937 - protein, 229 aa, Glycine max
FLSSYGLQIDTISLDFKSGLEALLKEKPIRAIFLGVRIGDPTAVGQEQFSPSSPGWPPFMRVNPILDWSYRDVWAFLLTCKVNYCSLYDQGYTSIGSIYDTVPNSLLCISNSSNKFKPAYLLADGRLERAGRAKRPSTSTGGQHPAESNGLTSQDSLKNSMLTASIIAVGDEILFGIVEDQLGPYLCRKLHCIGWSVFQHSVVHNNVSSFLQKSYVCLYELFRFADINT

SEQ ID NO: 24938 - protein, 213 aa, Glycine max
MNCSALQTSTLEDSVAEEVERQKSKSDMVFIYGGVGPLHSDVSIAGIAKAFGVRLAPDEEFEEYLRHIIGDQCTGDRNEMAQLPEGITELWHHDKLSVPLIKCENVIILSATNVPELEKQWDCWIELAKSSDLLALLEPYVSKDVTTNLSDVEIAQPLSKLCLEFPDLYIGCYRKARYGSLIVSFKGKDLTRIESAIKALHKKFQPSAFVEMN

SEQ ID NO: 24939 - protein, 186 aa, Glycine max
MVFIYGGVGPLHSDVSIAGIAKAFGVRLAPDEEFEEYLRHIIGDQCTGDRNEMAQLPEGITELWHHDKLSVPLIKCENVIILSATNVPELEKQWDCWIELAKSSDLLALLEPYVSKDVTTNLSDVEIAQPLSKLCLEFPDLYIGCYRKARYGSLIVSFKGKDLTRIESAIKALHKKFQPSAFVEMN

SEQ ID NO: 24940 - DNA, 1750 bp, Glycine max
aaaaaactctttctctttagccctcaaaggtacccctgaaaagtgaaaggtcttgctcccatttctttaacggcttgttttttattttttaataatcccatcgtaattatcgctttttctcgttgtccactaagaatgtcaagacaggagatcaagatctgaagccttgttgaagaggctgcttctttggatctgaacaatgcctctggctctggatctttgccgcgccttcaaacattgaaaaagacttccatttcttctcgaaggtctggtactgccactttccctagtcctggtacactcaattatcgcgttgcaatgcacaagggatggagctccgagcgagttcccttgcatgcaggtgctacccggaagcacgttttgccgttcaacaatgggaaaacattgccgtcaaagtgggaagatgctgagaggtggattctcagccctgtttcggcagatggcactgggagggcctcgcttaatgcaccccaaaggaggccaaagtccaagagcggtcctcttggaccccctggtgttgcgtatcattctatgtactcgccggccgcgccggtgtttgaagtggggaatggggggagttttatggaaggttctccgtttacaggtgatggtttaataatctgcaccggtggccatggtggagctctttccgtgagaacagaaccttgcatggcacgctcagcaagtgtccacggatgctctaagatacagagtcagtcatcatcaatgcccctccaagaggataagtttggggggttcaaagatgtgggcaccaatgtgtcccgtgccacttcaaggagggacatggcgacccagatgagcccacagggtagctcacgctcctctcctaatctgaggccttctttctctgcctccaccccatcaaccttgcctgtcacagaattgcggactgttggttcctctaaagtggatattagggatgtgcaggtagatgaacacgttaccgtgacaagatggtccaagaaacatagggccctattcactggcagaggctcagaaaaagtcgaaagctggaaaaaagaactaagcactcaatcgtcaacttgggacgtttctgaaacgtcaaagcctgcctcaaagacaagaagtgaggaagccaaaatctctgcatgggagaacttgcaaaaggcaaaagcagaagcagcaatacggaaactagagatgaaattggaaaaaaggcgagcatcctctatggataagattatgaacaagcttagattggcccagaaaaaagctcaggaaatgagaagttcagttccacacaaccaaaccgatcgggttgtaagaacttcacacaaggcttcatcatttcttagaaccagccagatgcgttctttgagtggttgtttcacttgccatgtcttttaagcattctttcatgtttgagtgatggtgggtttccgaaggattcaaatgggccacatgttaatgattgaaaggggcacaacagttgacaaaattggtgttgttgcgttttgctatccatggcaccttctttgaaagtctcagatatcataaaatctaagccccgtgttcgggagtttggattcaatgggtagcaatatttgtaagtaggccaaattttagaaataagatcttttgtatttttttctctcctcccaacatgattgtgtgctgttcaaaaacttcaaatgtaatctaccttatagttgaacgagaaaagcaaccacaatatcatttcgttctc

SEQ ID NO: 24941 - protein, 363 aa, Glycine max
MHKGWSSERVPLHAGATRKHVLPFNNGKTLPSKWEDAERWILSPVSADGTGRASLNAPQRRPKSKSGPLGPPGVAYHSMYSPAAPVFEVGNGGSFMEGSPFTGDGLIICTGGHGGALSVRTEPCMARSASVHGCSKIQSQSSSMPLQEDKFGGFKDVGTNVSRATSRRDMATQMSPQGSSRSSPNLRPSFSASTPSTLPVTELRTVGSSKVDIRDVQVDEHVTVTRWSKKHRALFTGRGSEKVESWKKELSTQSSTWDVSETSKPASKTRSEEAKISAWENLQKAKAEAAIRKLEMKLEKRRASSMDKIMNKLRLAQKKAQEMRSSVPHNQTDRVVRTSHKASSFLRTSQMRSLSGCFTCHVF

SEQ ID NO: 24942 - protein, 285 aa, Glycine max
MYSPAAPVFEVGNGGSFMEGSPFTGDGLIICTGGHGGALSVRTEPCMARSASVHGCSKIQSQSSSMPLQEDKFGGFKDVGTNVSRATSRRDMATQMSPQGSSRSSPNLRPSFSASTPSTLPVTELRTVGSSKVDIRDVQVDEHVTVTRWSKKHRALFTGRGSEKVESWKKELSTQSSTWDVSETSKPASKTRSEEAKISAWENLQKAKAEAAIRKLEMKLEKRRASSMDKIMNKLRLAQKKAQEMRSSVPHNQTDRVVRTSHKASSFLRTSQMRSLSGCFTCHVF

SEQ ID NO: 24943 - protein, 268 aa, Glycine max
MEGSPFTGDGLIICTGGHGGALSVRTEPCMARSASVHGCSKIQSQSSSMPLQEDKFGGFKDVGTNVSRATSRRDMATQMSPQGSSRSSPNLRPSFSASTPSTLPVTELRTVGSSKVDIRDVQVDEHVTVTRWSKKHRALFTGRGSEKVESWKKELSTQSSTWDVSETSKPASKTRSEEAKISAWENLQKAKAEAAIRKLEMKLEKRRASSMDKIMNKLRLAQKKAQEMRSSVPHNQTDRVVRTSHKASSFLRTSQMRSLSGCFTCHVF

SEQ ID NO: 24944 - DNA, 1217 bp, Glycine max
ataaagcaatggatctaatccaaggtatgcctcatgaaccaaattaccatatctggtccaccttactatttgtttgtgccaaaggtgacctaaagaatgcagagttggcagctagtcttctctttgaattggatccacataatgctggaccctatatcatgctttccaacttgtatgctgcttgtgggaaatggaaagatgtagctgttgtaagatctctcatgaaggaaaagaatgcaaagaagttttctgcttacagttgggttgaggttaggaaagaagtccacagatttgtttcagaagatcactctcatccagaagtgggaaaaatctatggtgaaatgaacagattgatctcaatattgcaacaaattgggtgtaatccagatacaaacattgtcctacacattgtggggaaggaagaaaagtttagatccatttcttaccaatgagaaacttgctcttgcatttgctttaattagaaagcccaatggagttgcacctatacggatcataaagaatgtacgggtctgtgctgactgtcatgtatttatgaagtttgcatcaattactatagcacgaccaatcattatgagagattcaaacaggtttcatcatttctttggtgggaagtgctcttgcaaggacaattggtaaagtctcaatcaaatggtaatctgctgcaagtttactgtttccaaaaggaagggtgctagcaatgtaatatgcactctgtatcctttctaaaagattttgaaacaagggaaaaagtcatgatatgattccagactaccaactcccgagtattaaagcaggtgtgtagcatgagaatactaagtgagaagtacagcagtacttcgatgaaaatttcttgtgacttggcaatgcagcttaagatgtttgggactctgaggcaagtatactctgaagtcattgatcactactttgcattgaatgagcaggtttgaaccttgaatggaagtctgaaatatcctcataaattgctgggaaatcggggctaaatattgtttgtaacatatgctgtatgtatctcaatattttggcagaggcaatttctagcttctaaggtaaatttgaattatgattatacatattctaaaagctttatataatgtttatggataaagaaaaaggtcaagtttgtaatgttatacaacatcttatatttaagaagacattcttccagttccatcacc

SEQ ID NO: 24945 - protein, 149 aa, Glycine max
KAMDLIQGMPHEPNYHIWSTLLFVCAKGDLKNAELAASLLFELDPHNAGPYIMLSNLYAACGKWKDVAVVRSLMKEKNAKKFSAYSWVEVRKEVHRFVSEDHSHPEVGKIYGEMNRLISILQQIGCNPDTNIVLHIVGKEEKFRSISYQ

SEQ ID NO: 24946 - protein, 147 aa, Glycine max
MDLIQGMPHEPNYHIWSTLLFVCAKGDLKNAELAASLLFELDPHNAGPYIMLSNLYAACGKWKDVAVVRSLMKEKNAKKFSAYSWVEVRKEVHRFVSEDHSHPEVGKIYGEMNRLISILQQIGCNPDTNIVLHIVGKEEKFRSISYQ

SEQ ID NO: 24947 - protein, 141 aa, Glycine max
MPHEPNYHIWSTLLFVCAKGDLKNAELAASLLFELDPHNAGPYIMLSNLYAACGKWKDVAVVRSLMKEKNAKKFSAYSWVEVRKEVHRFVSEDHSHPEVGKIYGEMNRLISILQQIGCNPDTNIVLHIVGKEEKFRSISYQ

SEQ ID NO: 24948 - DNA, 1555 bp, Glycine max
tgatcaaatggagcgtcaatttattcccacaatggttgtgatattcataaggaattcttgattggcaggtctttgatgggcataacggtatatcagctgctatttttgcgaaggaaaacttgctaagtaatgttttgagtgcaatacctcaagatattagcagggatgcttggcttcaggctcttcctcgtgctctggttgttggttttgtgaagactgacatagagtttcagcaaaagggggaaacttctggaacaacagctacatttgttttggttgatggatggactatcactgttgcatctgtgggagattcccgctgcatattagatactcagggaggtgttgtttctctcttgacagttgatcacaggctggaagagaatgcagaagagagggagcgcgttactgccagcggtggtgaagtaggaagactcaatgtatttggaggcaatgaggttgggcctcttcgctgctggccaggtggattgtgcctatctagatctataggtgacacagacgtgggagaatttattgtgccaataccacatgttaagcaagtgaagctttcaaatgctggtggaaggcttattatagcttctgatggtatttgggatgctttatcatctgatatggctgctaagtcttgtcggggtctacctgcagagcttgctgcaaaactagtggttaaggaagctctaaggtcaagaggcctcaaggatgatacaacttgccttgttgtagatattattccttcggacctccctgtattaccaccaattccaagaaagaaacataatatgctaacttcgcttctattttttggaaagaaatctgagaactctatgaacaaagctaccaataagctttctgcagttggtgttgtggaggagttatttgaagagggttctgcaatgcttacagaaaggctaggtaaggatttcccgcttaacaagaattctggtattttccgttgtgcggtttgccaaatggaccaaccccctggtgatggtttatcaatgaactctgggccttttttctctcctgcatctaatccatgggaaggcccattcctctgcacaaactgttggaagaagaaggatgccatggaaggaaaaagcctagcagacccaccgttacagcataatgattatctagtattacagtagtagcatagtaaatattagtataatttttccctggcagtgtgagcatgcttgactttacattttcggtggttattgccatagatgtgtaagaaatgaggttgagaattgagatagggctagtaggtgttttggaggttgctgcaagtttgattctggcttgtgctcagctgttggaagttggactgactgacagaacaaacaagaaagttgtgtctggtagaaaaaaattctagtgaaatctgctaacggcttgtatttgtaagtaaactgaagcttttgtggctgcctctgttttgagagtgcttcaatgctacacagcccaaatgcatctgtatcttttaaacttatgttatacaaatacaactacatgtctcgaatgtctctgt

SEQ ID NO: 24949 - protein, 178 aa, Glycine max
MAAKSCRGLPAELAAKLVVKEALRSRGLKDDTTCLVVDIIPSDLPVLPPIPRKKHNMLTSLLFFGKKSENSMNKATNKLSAVGVVEELFEEGSAMLTERLGKDFPLNKNSGIFRCAVCQMDQPPGDGLSMNSGPFFSPASNPWEGPFLCTNCWKKKDAMEGKSLADPPLQHNDYLVLQ

SEQ ID NO: 24950 - protein, 122 aa, Glycine max
MLTSLLFFGKKSENSMNKATNKLSAVGVVEELFEEGSAMLTERLGKDFPLNKNSGIFRCAVCQMDQPPGDGLSMNSGPFFSPASNPWEGPFLCTNCWKKKDAMEGKSLADPPLQHNDYLVLQ

SEQ ID NO: 24951 - protein, 107 aa, Glycine max
MNKATNKLSAVGVVEELFEEGSAMLTERLGKDFPLNKNSGIFRCAVCQMDQPPGDGLSMNSGPFFSPASNPWEGPFLCTNCWKKKDAMEGKSLADPPLQHNDYLVLQ

SEQ ID NO: 24952 - DNA, 1800 bp, Glycine max
actcatataaataactcagggcggtggctatgtcaaactgagaactaagatcccgctggcggttggcgcaacctttcgatcttcatccaacggggcaacgttggatctgctgaactgaacttctttttatatgcactctgtgatttcactctgcttcgccatcctatgggggacaacaacagcaacaacgatgccttcatgcgcaaccaaaacgccgccgttcaggcccgcaccaaagcgcagaaccgctccaacgtccttcagctcaaactgattggacagagtcacccaaccggtctcacagcgaacctgttgaagctcttcgagcctaggcctccgttggagtacaagccacctccggagaaacgaaaatgcccaccgttatcagggatggcacaatttgtgagcaagtttgccgagcctggcgagccagaatacgctccacctgtcccagaaactgagactcctgcacaaaaaagagccagaatacacaagctaaggcttgagaagggagctgcaaaggctgctgaggagcttgagaaatatgatccacataatgacccaaatgtgtcgggagatccatacaagacattgtttgtggctaaactcagttacgagaccactgagagcagaatcaaaagggagtttgagtcatatggtccaatcaaacgggttcgattagttgctgacaaagatataaataagcccaggggttatgctttcattgagtatctgcatacaagagacatgaaagctgcttataaacaagctgatggtaggaaaattgatggtagaagggtgcttgtggatgttgagcgtgggaggactgttccaaattggagaccccgtcgcttaggtggtggacttggtaccactagagttggaggtgaagaagttaatcagcgacattctgggagggagcaacaacagtctcgttctgaagaaccgagagtgcgagaggaccgacacgctgatagagacagggaaatatcacgtgaaagaggtagggacaaagacagagaacgggagcgatcacgtgaacattctcatgaaagggtcagggatcgtgatcatagggaggataggcaccacagagaccgggataggaacagggacagagaccgagacagggaaagagatagagatcgtgggcgtgatcgagatagaacacgggaccgtgatcgtgagcgagggagggaccgtgatcgggatcgagaatatgatcgacatcgtgagagggatagagattatgaagttggtgaccctgatcgaggacgctcacgtgatagggagtctgattatgatcgtgttgaatctaaacatggggaaaggaatcatgactatgaacctgaggatgatcgtggtaggcataaccagtatgaacatggacgtaggcatgcagaccctgatcatgaccctgagcggtatgaccactacaatcatggagatgaccatggtgaccattacaatcagtatcgtgaccatgatgggatggaagatgactaccatgctggacgtgcaacatctgaatcgcatgaaaaggagagaagtcatgatgtggaccgtgaatatcaacgctcagagagatcacattcccgggagtatgattattaggacttgggcatagttcttctcaactttgttggtaagattttataatttggtatgtttacttttgaatcttgctcacctgccggtattggtagttgttgaatggattaaggcacagtgtgatcattaaaaagaaaactgtagctgctgctatccatatggcccatatttgaaagctgccttttgtcg

SEQ ID NO: 24953 - protein, 482 aa, Glycine max
MGDNNSNNDAFMRNQNAAVQARTKAQNRSNVLQLKLIGQSHPTGLTANLLKLFEPRPPLEYKPPPEKRKCPPLSGMAQFVSKFAEPGEPEYAPPVPETETPAQKRARIHKLRLEKGAAKAAEELEKYDPHNDPNVSGDPYKTLFVAKLSYETTESRIKREFESYGPIKRVRLVADKDINKPRGYAFIEYLHTRDMKAAYKQADGRKIDGRRVLVDVERGRTVPNWRPRRLGGGLGTTRVGGEEVNQRHSGREQQQSRSEEPRVREDRHADRDREISRERGRDKDRERERSREHSHERVRDRDHREDRHHRDRDRNRDRDRDRERDRDRGRDRDRTRDRDRERGRDRDRDREYDRHRERDRDYEVGDPDRGRSRDRESDYDRVESKHGERNHDYEPEDDRGRHNQYEHGRRHADPDHDPERYDHYNHGDDHGDHYNQYRDHDGMEDDYHAGRATSESHEKERSHDVDREYQRSERSHSREYDY

SEQ ID NO: 24954 - protein, 471 aa, Glycine max
MRNQNAAVQARTKAQNRSNVLQLKLIGQSHPTGLTANLLKLFEPRPPLEYKPPPEKRKCPPLSGMAQFVSKFAEPGEPEYAPPVPETETPAQKRARIHKLRLEKGAAKAAEELEKYDPHNDPNVSGDPYKTLFVAKLSYETTESRIKREFESYGPIKRVRLVADKDINKPRGYAFIEYLHTRDMKAAYKQADGRKIDGRRVLVDVERGRTVPNWRPRRLGGGLGTTRVGGEEVNQRHSGREQQQSRSEEPRVREDRHADRDREISRERGRDKDRERERSREHSHERVRDRDHREDRHHRDRDRNRDRDRDRERDRDRGRDRDRTRDRDRERGRDRDRDREYDRHRERDRDYEVGDPDRGRSRDRESDYDRVESKHGERNHDYEPEDDRGRHNQYEHGRRHADPDHDPERYDHYNHGDDHGDHYNQYRDHDGMEDDYHAGRATSESHEKERSHDVDREYQRSERSHSREYDY

SEQ ID NO: 24955 - protein, 407 aa, Glycine max
MAQFVSKFAEPGEPEYAPPVPETETPAQKRARIHKLRLEKGAAKAAEELEKYDPHNDPNVSGDPYKTLFVAKLSYETTESRIKREFESYGPIKRVRLVADKDINKPRGYAFIEYLHTRDMKAAYKQADGRKIDGRRVLVDVERGRTVPNWRPRRLGGGLGTTRVGGEEVNQRHSGREQQQSRSEEPRVREDRHADRDREISRERGRDKDRERERSREHSHERVRDRDHREDRHHRDRDRNRDRDRDRERDRDRGRDRDRTRDRDRERGRDRDRDREYDRHRERDRDYEVGDPDRGRSRDRESDYDRVESKHGERNHDYEPEDDRGRHNQYEHGRRHADPDHDPERYDHYNHGDDHGDHYNQYRDHDGMEDDYHAGRATSESHEKERSHDVDREYQRSERSHSREYDY

SEQ ID NO: 24956 - DNA, 1216 bp, Glycine max
gaattgaaatatgcccacaatcaagtgagttctgggaaatattcaagtaatcaacgagaaacaagtgcagagctggacccagtaggactgtctgcatggaaccactatggggatgaagatatacagtcacagggcagaagttctgtacctttagccccaacccttcctattccacagcctaaacttaaagctttcacaaaaaaggagaagaatgatccagttctgccagcctctaaatgggctcgggaggatgatgagagtgatgatgaacaaagaagtggaaaaaatctcggcttaagctactcatcttctggtagtgagaacgtggatgatggtcttgttaaagctgatgaatcagagtctgcagctgatagaagtttttcagctcacgctgacagtggaatgaatgaagagcagaggcaaaagctgagacgcttggaggttgctttaattgaatacggtgagtctcttgaagagaggggaattaaaaatttggaggaaattgagaagaaagttcagttgcataggaaacggctgcaagtggagtatgggttatcagattctggtgaagatggtcaaggcaatagaagaacttcagagaggagggataggcatgatgtttcaaggaaacggcaccgaagccgtagtccaagtagtagtccacagccaacattatctggcaaagacagagatagagaacacgatttagaaagggatcgagacagacaaagagatagaagtcatgatttcgatagtgaaagaggaagggaccggcacagggagaagagtggaagcagagagagagatgatcatgataaggacagaagcagggatagggacaggagaagacgagccaaataagaacatttcagatgtttcagctcagatttgataccttgatgatttccaaatttgcttctaagagtctagaggacagttgacttttcgtcatcacggggatattggcaatgtgatacctgttgggagataggaatgaaacatctgccaggaaagtgtcactgtagacaatccttggaagtgctgagtagtaactggctcttgatacccccacaatttcaacttaatgtaatattaagattttaaatcgttaattttgcctgtgaattagtgcatgctgctgcacactgcatatttgatcaagagggttctgtcaataccaattattgagatagtttacagggagattcggctgact

SEQ ID NO: 24957 - protein, 286 aa, Glycine max
ELKYAHNQVSSGKYSSNQRETSAELDPVGLSAWNHYGDEDIQSQGRSSVPLAPTLPIPQPKLKAFTKKEKNDPVLPASKWAREDDESDDEQRSGKNLGLSYSSSGSENVDDGLVKADESESAADRSFSAHADSGMNEEQRQKLRRLEVALIEYGESLEERGIKNLEEIEKKVQLHRKRLQVEYGLSDSGEDGQGNRRTSERRDRHDVSRKRHRSRSPSSSPQPTLSGKDRDREHDLERDRDRQRDRSHDFDSERGRDRHREKSGSRERDDHDKDRSRDRDRRRRAK

SEQ ID NO: 24958 - protein, 152 aa, Glycine max
MNEEQRQKLRRLEVALIEYGESLEERGIKNLEEIEKKVQLHRKRLQVEYGLSDSGEDGQGNRRTSERRDRHDVSRKRHRSRSPSSSPQPTLSGKDRDREHDLERDRDRQRDRSHDFDSERGRDRHREKSGSRERDDHDKDRSRDRDRRRRAK

SEQ ID NO: 24959 - DNA, 2104 bp, Glycine max
gtgatagaatctatgattatgctacgtacaatgacttgggcaaccctgataaggatgaggaacttgctaggccagtccttgggggtcacgaaatgccttaccctcgtcgttgtagaactggaagacctcccactctctctgatccactgtctgagagtagaattgaaaagcctcatcctgtttatgtgccacgggatgaaacttttgaggagatcaaacaggacactttctctgctggaaggttgaaagctctgttccacaatcttttgccatcgctcgcagccactctgtcgagttcagacgttcctttcaagtgcttctccgacattgacaagctttatatcgatggtgttgttctgagagatgaagagcaaaaaggggtaatggaaaatctcttagttggcaaggtgatgaaacaagtcctgagtgctggggagagtttgttgaagtatgagatccctgcggttataaaaggggataaattttgttggttgcgggacaatgaatttgcaagacagaccttagctggggtcaatccagtgaatattgagctgttgaaggaatttcccatccgcagcaagctagatccttctctctatggcccttctgaatcagcaataacaaaggaacttctagagcaagaacttggtggaatgaacttggaacaggctattgaggaaaagagactgtttatccttgattaccatgatatgcttttgccgttcatcaagaagatgaactctttgcctgggaggaaagcttatgcctctcggacaattctcttcaatacaaagactggtattttgcgccctatagcaattgagctttcacttcctcaaacgcactcttccccacaaaacaaacgaatttacacacaagggcatgatgccacaacacactggatttggaagttggcaaaagctcatgtatgctcaaatgatgctggcatccatcaactagtaaatcattggttgagaactcatgcatgcatggagccatatattattgctactcgtagacaactaagctcaatgcatccaatttacaagctgctacaccctcatatgcgctacacattagaaattaatgcactagctcggcaaaatctgataaatggaggtggtataattgaggcatctttcagtccaggaaagtatgccatggagcttagttcagcagcttacaagaaattgtggcgatttgacatggagtcactgccagcagatcttattcggaggggcatggcagtagatgacccttcaatgccctgtggtgtaaaacttgtgattgatgactacccttatgctgcagatggactcttgatctggtcagccataaaagaatgggtagaatcttatgtagcacacttctactccgatccaaattcagtcacatctgatgttgagctccaagcatggtggagagaaatcaagttaaagggtcactctgacaaaaaaaatgaaccttggtggcctaaactcgataccaaagaggacctatccggtatacttaccacaatgatatggattgcttcaggccaacatgctgccataaactttggacaatacccctttggaggatatgtgcctaaccgccctaccctcatgagaaaactcatccctcaggagaatgatccagattatgagaagtttattcaaaatcctcagcttgttttcctatcatcactacctactcaacttcaagctaccaaagttatggctgttcaggacacactgtccactcattcacctgatgaagagtacttgggtcaacttaaacctctgcagaatcattggatcaatgatcatgaaatcatggaattatttaataaattttctgctagactggaggaaatagaggaaataataaatgcaagaaacaaggacccccgtttgagaaacagaagtggtgctggtgtccctccctatgaactgttgcttccctcgtcagggccaggggtaaccggtcgtggaattcccaacagcatatctatatgatcaattgttgtttattatgtcatcttatcctattttcttagcggaaaccacgtattaacatacatatttttatgggaaagaaatgttaacgatatattttctattct

SEQ ID NO: 24960 - protein, 664 aa, Glycine max
DRIYDYATYNDLGNPDKDEELARPVLGGHEMPYPRRCRTGRPPTLSDPLSESRIEKPHPVYVPRDETFEEIKQDTFSAGRLKALFHNLLPSLAATLSSSDVPFKCFSDIDKLYIDGVVLRDEEQKGVMENLLVGKVMKQVLSAGESLLKYEIPAVIKGDKFCWLRDNEFARQTLAGVNPVNIELLKEFPIRSKLDPSLYGPSESAITKELLEQELGGMNLEQAIEEKRLFILDYHDMLLPFIKKMNSLPGRKAYASRTILFNTKTGILRPIAIELSLPQTHSSPQNKRIYTQGHDATTHWIWKLAKAHVCSNDAGIHQLVNHWLRTHACMEPYIIATRRQLSSMHPIYKLLHPHMRYTLEINALARQNLINGGGIIEASFSPGKYAMELSSAAYKKLWRFDMESLPADLIRRGMAVDDPSMPCGVKLVIDDYPYAADGLLIWSAIKEWVESYVAHFYSDPNSVTSDVELQAWWREIKLKGHSDKKNEPWWPKLDTKEDLSGILTTMIWIASGQHAAINFGQYPFGGYVPNRPTLMRKLIPQENDPDYEKFIQNPQLVFLSSLPTQLQATKVMAVQDTLSTHSPDEEYLGQLKPLQNHWINDHEIMELFNKFSARLEEIEEIINARNKDPRLRNRSGAGVPPYELLLPSSGPGVTGRGIPNSISI

SEQ ID NO: 24961 - protein, 634 aa, Glycine max
MPYPRRCRTGRPPTLSDPLSESRIEKPHPVYVPRDETFEEIKQDTFSAGRLKALFHNLLPSLAATLSSSDVPFKCFSDIDKLYIDGVVLRDEEQKGVMENLLVGKVMKQVLSAGESLLKYEIPAVIKGDKFCWLRDNEFARQTLAGVNPVNIELLKEFPIRSKLDPSLYGPSESAITKELLEQELGGMNLEQAIEEKRLFILDYHDMLLPFIKKMNSLPGRKAYASRTILFNTKTGILRPIAIELSLPQTHSSPQNKRIYTQGHDATTHWIWKLAKAHVCSNDAGIHQLVNHWLRTHACMEPYIIATRRQLSSMHPIYKLLHPHMRYTLEINALARQNLINGGGIIEASFSPGKYAMELSSAAYKKLWRFDMESLPADLIRRGMAVDDPSMPCGVKLVIDDYPYAADGLLIWSAIKEWVESYVAHFYSDPNSVTSDVELQAWWREIKLKGHSDKKNEPWWPKLDTKEDLSGILTTMIWIASGQHAAINFGQYPFGGYVPNRPTLMRKLIPQENDPDYEKFIQNPQLVFLSSLPTQLQATKVMAVQDTLSTHSPDEEYLGQLKPLQNHWINDHEIMELFNKFSARLEEIEEIINARNKDPRLRNRSGAGVPPYELLLPSSGPGVTGRGIPNSISI

SEQ ID NO: 24962 - protein, 537 aa, Glycine max
MENLLVGKVMKQVLSAGESLLKYEIPAVIKGDKFCWLRDNEFARQTLAGVNPVNIELLKEFPIRSKLDPSLYGPSESAITKELLEQELGGMNLEQAIEEKRLFILDYHDMLLPFIKKMNSLPGRKAYASRTILFNTKTGILRPIAIELSLPQTHSSPQNKRIYTQGHDATTHWIWKLAKAHVCSNDAGIHQLVNHWLRTHACMEPYIIATRRQLSSMHPIYKLLHPHMRYTLEINALARQNLINGGGIIEASFSPGKYAMELSSAAYKKLWRFDMESLPADLIRRGMAVDDPSMPCGVKLVIDDYPYAADGLLIWSAIKEWVESYVAHFYSDPNSVTSDVELQAWWREIKLKGHSDKKNEPWWPKLDTKEDLSGILTTMIWIASGQHAAINFGQYPFGGYVPNRPTLMRKLIPQENDPDYEKFIQNPQLVFLSSLPTQLQATKVMAVQDTLSTHSPDEEYLGQLKPLQNHWINDHEIMELFNKFSARLEEIEEIINARNKDPRLRNRSGAGVPPYELLLPSSGPGVTGRGIPNSISI

SEQ ID NO: 24963 - DNA, 1770 bp, Glycine max
aaattacaaagtccaaaagtcacctaacagaggtaagaaccaagtaaaagcatcgtgtaatgtggacagttgcacaacagaaatggatagtcagccgtccggttcttctgcagatgctgtagatgttaatgagtctggaagtagcaagttaggtggatctgagcctgagggtgctgttctctgcttgcaggatcgattaaagtggcttgatcagcctgtcatcagaaaggaagaggatatatcttcgctacaaaagaaacaaaccatcaaagaccaagttaacatagaaagaactgtggataatgaaagcctatcaaaagagaagaaatcagcggtgccatcctcatctagtagtcctccaagaaacttacctgttcaaatgaagtcagaaaaccaaactagagttactggagatcctgttcatgtcaggaaaacatcttttggtgtctcacaatcaactgataaagaggcgtcttcatcttcaacttctgtatcacaagtaacaattggtccaaaaacagaaatccagaaagcttcacccccaagactaaccgaaagatccatggcacaagtggctatgttgtcaaggccatctagtgctccactagttcctggtggtcccaggcccactgctgctgttgtctccatggttcaaactgctccactacttgcacgctctgtgagtgcaactggtcggttaggtcctgatccctcacctgctactcatagttatgttccccagtcctatagaaatgcaataatggggaatcctgtggtgtcaactgctgccagtcttcctcattccagctccagttcaggagtaaacccatctcctggctattcacatccacccatggtatcatccccactatttatctcccggagctccgacaaaatggattcaaatacttcccagtctggtgttccctttggtatgatttcacgggatgttttacagaacggacctaattggattgatagttctcaaagggaagccagcagaagcatgcactatgaacctccttcccgactaaatgatgttcaaaacctagacttgttcaggccaatagattgtagatctttgggcaacataccaagtgagttcccagtttacacatccaggcgtccgaaccaaggggcgttggtggatgagttcccacacctcgatatcattaatgacctgcttgatgaaccaagggaccatggtattgggaaggcatccagggcaagttcagtcttccactccctcaatgatggaccacagttgctaaatcgtcaattcacttttcctagagacttgggtaccgatgatgatttgggatcttccaccagttcttgtaggcttgagagatcacgtagttaccatgatgccgggtttcaacaagggtatagcacatctggttggcattatgattcactgcaggattatgttcctcaggccagtacattatcatatggaaatggcaaggtagatgggatgattccaaaccaatggcaggttgctgatctatcttatctaggcatgagaaacactgagaatagttactcgtactatcaagattactcaaatatggcatgtggtgtcaatggttatactgtattcaggccttcaaatggtccgtagagggaaaagatgacaaaggttgcccacaaattagtggtcatcaacaaatgtaataatgtatttgaggaaattgttgggtctctttagattggagtgaggttgtatccccttgataggaaaacattttgtaaagagtgtttccgatt

SEQ ID NO: 24964 - protein, 540 aa, Glycine max
NYKVQKSPNRGKNQVKASCNVDSCTTEMDSQPSGSSADAVDVNESGSSKLGGSEPEGAVLCLQDRLKWLDQPVIRKEEDISSLQKKQTIKDQVNIERTVDNESLSKEKKSAVPSSSSSPPRNLPVQMKSENQTRVTGDPVHVRKTSFGVSQSTDKEASSSSTSVSQVTIGPKTEIQKASPPRLTERSMAQVAMLSRPSSAPLVPGGPRPTAAVVSMVQTAPLLARSVSATGRLGPDPSPATHSYVPQSYRNAIMGNPVVSTAASLPHSSSSSGVNPSPGYSHPPMVSSPLFISRSSDKMDSNTSQSGVPFGMISRDVLQNGPNWIDSSQREASRSMHYEPPSRLNDVQNLDLFRPIDCRSLGNIPSEFPVYTSRRPNQGALVDEFPHLDIINDLLDEPRDHGIGKASRASSVFHSLNDGPQLLNRQFTFPRDLGTDDDLGSSTSSCRLERSRSYHDAGFQQGYSTSGWHYDSLQDYVPQASTLSYGNGKVDGMIPNQWQVADLSYLGMRNTENSYSYYQDYSNMACGVNGYTVFRPSNGP

SEQ ID NO: 24965 - protein, 513 aa, Glycine max
MDSQPSGSSADAVDVNESGSSKLGGSEPEGAVLCLQDRLKWLDQPVIRKEEDISSLQKKQTIKDQVNIERTVDNESLSKEKKSAVPSSSSSPPRNLPVQMKSENQTRVTGDPVHVRKTSFGVSQSTDKEASSSSTSVSQVTIGPKTEIQKASPPRLTERSMAQVAMLSRPSSAPLVPGGPRPTAAVVSMVQTAPLLARSVSATGRLGPDPSPATHSYVPQSYRNAIMGNPVVSTAASLPHSSSSSGVNPSPGYSHPPMVSSPLFISRSSDKMDSNTSQSGVPFGMISRDVLQNGPNWIDSSQREASRSMHYEPPSRLNDVQNLDLFRPIDCRSLGNIPSEFPVYTSRRPNQGALVDEFPHLDIINDLLDEPRDHGIGKASRASSVFHSLNDGPQLLNRQFTFPRDLGTDDDLGSSTSSCRLERSRSYHDAGFQQGYSTSGWHYDSLQDYVPQASTLSYGNGKVDGMIPNQWQVADLSYLGMRNTENSYSYYQDYSNMACGVNGYTVFRPSNGP

SEQ ID NO: 24966 - protein, 414 aa, Glycine max
MKSENQTRVTGDPVHVRKTSFGVSQSTDKEASSSSTSVSQVTIGPKTEIQKASPPRLTERSMAQVAMLSRPSSAPLVPGGPRPTAAVVSMVQTAPLLARSVSATGRLGPDPSPATHSYVPQSYRNAIMGNPVVSTAASLPHSSSSSGVNPSPGYSHPPMVSSPLFISRSSDKMDSNTSQSGVPFGMISRDVLQNGPNWIDSSQREASRSMHYEPPSRLNDVQNLDLFRPIDCRSLGNIPSEFPVYTSRRPNQGALVDEFPHLDIINDLLDEPRDHGIGKASRASSVFHSLNDGPQLLNRQFTFPRDLGTDDDLGSSTSSCRLERSRSYHDAGFQQGYSTSGWHYDSLQDYVPQASTLSYGNGKVDGMIPNQWQVADLSYLGMRNTENSYSYYQDYSNMACGVNGYTVFRPSNGP

SEQ ID NO: 24967 - DNA, 1851 bp, Glycine max
agggccaagtatagctatcagcttctctgtgtatgaaaccttgagatcttattggcagtcaaatagatccgatgattcacctgtcgtgattagtctggcttgcggcagtctttcaggcattgcatcatcaactgtggtttactatgcttttgatgcagagaaagagagtttggtgcaggaactgcaccaagtatctaaccagactgacccatagaaccagagaccaggtgggagttgttattgtatctgtggcatatgacaatttagtaaggaaaatgacaaaataacatttttcttgcctttctgtaactttatttcttatctaaagatcttgctcaagtaatcatcttcccaagttttgttctatggcatgtctccccaagctatgcaggggattccatcatggggtggcattacttggatgaacctatatgattccctcagttaccaaatgtgagaggtgtcctctttgaggtatgcttctcacttaggctaccttcacctgatgtttggacgggtaccagaatccttttcagccctaagtgtttctgaagaatctgttcttattgctttcagcatactctaaatgatgaaaattatggcaaaaaattacaatatagttgtttatgatataagaaaatttataaatgaaattgtcaataaagaacgactgttctttacatgggaaaaacactaaatcatactgattggggaatggatattttgtgtcaaaaccgtattatacagatagatactaaccacatgtatccaaaatattcacgcataaaaaactttagtatgccctttttatcaattgtgttaataaaggttctctgcccctttgctacaataaatgtatgttcaggtaaggatgtgttttacttcaactcttacctcttgatgccaattttacaggtaatgtttttacatgtttggatttgttaaatgctgcgtctaccatgttaagataggcttgtgcatccataaatttcttgctgtcaattgatcacaaattcagtagagccacatggtatcaataatatgtttgccacagttattctttagaatagccactgatgttgaggtgcaggtttgcaactttctcagagacacaattagaaactcctattttgtctacaatttataggttattgatttcaaacatcgttgattttgatggccaaaatatcgattagaagatttagcttgtataaattgatattcatttcatttattgttttggaattggtttgcaattcaatcgattaatcatcttaccacctttgatgatgcactgtaatgtcacagactactggtctgatgtaaaaattgaatttctgttgagtagaatgggtgtagttcaattcaattcatctgttatactatatgcagcaacatttccgttggatcttgtaaggcggaggaagcaacttgagggggctggtgggcgagctcgtgtgtatacaacaggcctctatggtgtgtttaggcacataatccggacagaaggctttcgtggtctttacagaggaattttgcctgaatattacaaggtggtgccaggtgtaggtatttgttttatgacttatgagacgttgaagatgcttttagcagatattgctactggataattacacccatcaaccttggagtctgatatacaagaagtaaatgtatgaagttatttacccatacaaaaaagggtaagagttacatttacgaattaacaattgtaagttcattttatttctcgagccctcacctgggcaattttgtaatgtgttcccgtcgggattgcatttttgcatgtacagagacttgcataacatttaatattaagctgttatcgtc

SEQ ID NO: 24968 - protein, 114 aa, Glycine max
MMHCNVTDYWSDVKIEFLLSRMGVVQFNSSVILYAATFPLDLVRRRKQLEGAGGRARVYTTGLYGVFRHIIRTEGFRGLYRGILPEYYKVVPGVGICFMTYETLKMLLADIATG

SEQ ID NO: 24969 - protein, 113 aa, Glycine max
MHCNVTDYWSDVKIEFLLSRMGVVQFNSSVILYAATFPLDLVRRRKQLEGAGGRARVYTTGLYGVFRHIIRTEGFRGLYRGILPEYYKVVPGVGICFMTYETLKMLLADIATG

SEQ ID NO: 24970 - protein, 93 aa, Glycine max
MGVVQFNSSVILYAATFPLDLVRRRKQLEGAGGRARVYTTGLYGVFRHIIRTEGFRGLYRGILPEYYKVVPGVGICFMTYETLKMLLADIATG

SEQ ID NO: 24971 - DNA, 1325 bp, Glycine max
gaagctgaggcattgactgatgagattgaaaaagagtctcaatacgttgaggaggtgttcagaatcaaggatattttccttaactacgaagaagagtctgattcagtgttgtttgattcattgaggaggcttcagctgatggaactcacagtggatcttctgaaggcaactgaaattggaaaggctgtcaatcctcttcgaaagcatggatcaagagacatttgtcaacttgcacggactcttattgatggctggaaacaaatggtggatgagtgggtcaaggataccacagctattgcaggttcagaaggtactccagattcagtaaatccatctgttgttgatgatgaagaagggcttccatcacctcctatggatgaaggggctttatttgcagctccaactggttcgatggaactctcacagttctttgatggcatggatgatgatggaaatcctcaacacagtggggaattcatcaagaaccatgaacatggaagaagaccatctctgaacagtcaaaatacagcaaagaggaaacctcaggcatcaaatgaggcaaacatcattgccaaggacagtaagggtcagcaagcaaagaaaaacgaggctgctgtgagaccaaataaatcagtaatcgctgattctggccctagcagaccacctaaatcaaccatgcagaagaaaggcaacattgaaccaaagatgcaacaaaatatcgtgaagagtgctatcccaagaaatcctcacattcatcagctagataaacccaagtgttcagacgatgctgctgtgcacgtaaagttagaagccactaagagaaaacttcaggagcgttatcaacaagctgaaaaggctaagaggcagcggacggtacaggttatggagttgcatgacctcccaaagcaagggattggccatcgaaatccacatgtgaaacccggaaatcacaagaggcaatggggtcatggacgaagatagaactgttaattgtgaatttggctgcattttcaagcttccaaaatctgggcaagaactccctttgctagccattattgaagcttcttcctctttccatacaaaagcaacaattcagttcaccattcttacctgtattgaactgttctgattgagagggaagtaaactctgagtcacagtttatttcctaagttaaaaagttgaatatatatagaaattttgttgatccaaagactggatttggaagagggtcctttagcacttaagtgttgatgtggttctaaactggctgtctgttgaaatgtccattagttccattctcatgattgatcatttaaaaaaaaag

SEQ ID NO: 24972 - protein, 326 aa, Glycine max
EAEALTDEIEKESQYVEEVFRIKDIFLNYEEESDSVLFDSLRRLQLMELTVDLLKATEIGKAVNPLRKHGSRDICQLARTLIDGWKQMVDEWVKDTTAIAGSEGTPDSVNPSVVDDEEGLPSPPMDEGALFAAPTGSMELSQFFDGMDDDGNPQHSGEFIKNHEHGRRPSLNSQNTAKRKPQASNEANIIAKDSKGQQAKKNEAAVRPNKSVIADSGPSRPPKSTMQKKGNIEPKMQQNIVKSAIPRNPHIHQLDKPKCSDDAAVHVKLEATKRKLQERYQQAEKAKRQRTVQVMELHDLPKQGIGHRNPHVKPGNHKRQWGHGRR

SEQ ID NO: 24973 - protein, 280 aa, Glycine max
MELTVDLLKATEIGKAVNPLRKHGSRDICQLARTLIDGWKQMVDEWVKDTTAIAGSEGTPDSVNPSVVDDEEGLPSPPMDEGALFAAPTGSMELSQFFDGMDDDGNPQHSGEFIKNHEHGRRPSLNSQNTAKRKPQASNEANIIAKDSKGQQAKKNEAAVRPNKSVIADSGPSRPPKSTMQKKGNIEPKMQQNIVKSAIPRNPHIHQLDKPKCSDDAAVHVKLEATKRKLQERYQQAEKAKRQRTVQVMELHDLPKQGIGHRNPHVKPGNHKRQWGHGRR

SEQ ID NO: 24974 - protein, 239 aa, Glycine max
MVDEWVKDTTAIAGSEGTPDSVNPSVVDDEEGLPSPPMDEGALFAAPTGSMELSQFFDGMDDDGNPQHSGEFIKNHEHGRRPSLNSQNTAKRKPQASNEANIIAKDSKGQQAKKNEAAVRPNKSVIADSGPSRPPKSTMQKKGNIEPKMQQNIVKSAIPRNPHIHQLDKPKCSDDAAVHVKLEATKRKLQERYQQAEKAKRQRTVQVMELHDLPKQGIGHRNPHVKPGNHKRQWGHGRR

SEQ ID NO: 24975 - DNA, 1571 bp, Glycine max
aactgaaacggatgttcattatgccacatccagcgaaaacttcgtttataaggataatattacagacaaagtcactgggtatactgctgatgctatagctcttcacctagatggaactgagtttacacctgctgtacgagattataacttgaatgctcatgttaagagattgtcaacagaaagcattagaagtgacttaagttctctaaggaatactgaaacatcaaatttaactacgaccactttggttcaggatgcttcacataaccttgctgggagccatgaagtctcaagaaattcagatttatttttgacttttccattggatgagcggcacaagttgaacaaaattcttaatacccagaaacagagattggtcactgcaaaagctgatgttgaagatcttatagcaagattgaatcaagaaatggctgcaagacaatatcttgtgacaaaggtcaaagatttggaagttgaacttgaaacaactcgactgaactgccgagaaaacatgcagcaggctgttttgactgaaaaagaaaggtttacacaaatgcagtgggatatggaggaacttcggaggaaatgcctggagacagaaatgaaattgaagttggaagaggatgaaaggctgctagcagaatctacgaaagaatctgtcattcaggagaagcaaatgttgcagcaagagctagatgtagctagagaacaatttaagcacttgcaaaaacatcatgatgagtttgagatgaaatcaaagacagatttgaaggttctaataaaggaggtaaaatcccttagaaattctgagttagaactgaaacagcagctaagtgaattgatgaaggagaagttagatttggagagaatcctccagaaggaaaagcaaagaatggaaaattcacataatgcaaatacaaagttgctgcatgagtgtgcaatccttcagaagaggcttcgggagtgtagtgtaaatttccttgttgaagaggaagataaactaaatatcgacactttgccatctgatgctctggatttattagcaacatcagataatcggattggtctcttgcttgcagaggcacagctcttggcacaagatgtagaagatactgttgttgctgttgaagagacccgggatataaccacagacaatactgggaaaactcatgatgaattgagaaagatgctggcacatatgtttgttgacaatgccagtttaaggaaacaaatcaattctgttattcgttgtgctctaaatgcaaatatcaattccgaagaggacggtgaagaaatccatttgcaaaaaactgtcctaagcaagttcttagaaagatagcttgttcaatactacaccgtgtatctattattgagttacttctctgttaattatggtctataaatttttgcacttgtatggtttcactgccattcgttccgagccgatcttaaaaaaacaaaaatgcgtttattgttccgccaaaattgatatgaatagttcgagtcattgcggctactgtaccaatcaattgtaatcgaaaaatctaatacctgagtttgacacttccatc

SEQ ID NO: 24976 - protein, 445 aa, Glycine max
TETDVHYATSSENFVYKDNITDKVTGYTADAIALHLDGTEFTPAVRDYNLNAHVKRLSTESIRSDLSSLRNTETSNLTTTTLVQDASHNLAGSHEVSRNSDLFLTFPLDERHKLNKILNTQKQRLVTAKADVEDLIARLNQEMAARQYLVTKVKDLEVELETTRLNCRENMQQAVLTEKERFTQMQWDMEELRRKCLETEMKLKLEEDERLLAESTKESVIQEKQMLQQELDVAREQFKHLQKHHDEFEMKSKTDLKVLIKEVKSLRNSELELKQQLSELMKEKLDLERILQKEKQRMENSHNANTKLLHECAILQKRLRECSVNFLVEEEDKLNIDTLPSDALDLLATSDNRIGLLLAEAQLLAQDVEDTVVAVEETRDITTDNTGKTHDELRKMLAHMFVDNASLRKQINSVIRCALNANINSEEDGEEIHLQKTVLSKFLER

SEQ ID NO: 24977 - protein, 303 aa, Glycine max
MAARQYLVTKVKDLEVELETTRLNCRENMQQAVLTEKERFTQMQWDMEELRRKCLETEMKLKLEEDERLLAESTKESVIQEKQMLQQELDVAREQFKHLQKHHDEFEMKSKTDLKVLIKEVKSLRNSELELKQQLSELMKEKLDLERILQKEKQRMENSHNANTKLLHECAILQKRLRECSVNFLVEEEDKLNIDTLPSDALDLLATSDNRIGLLLAEAQLLAQDVEDTVVAVEETRDITTDNTGKTHDELRKMLAHMFVDNASLRKQINSVIRCALNANINSEEDGEEIHLQKTVLSKFLER

SEQ ID NO: 24978 - protein, 275 aa, Glycine max
MQQAVLTEKERFTQMQWDMEELRRKCLETEMKLKLEEDERLLAESTKESVIQEKQMLQQELDVAREQFKHLQKHHDEFEMKSKTDLKVLIKEVKSLRNSELELKQQLSELMKEKLDLERILQKEKQRMENSHNANTKLLHECAILQKRLRECSVNFLVEEEDKLNIDTLPSDALDLLATSDNRIGLLLAEAQLLAQDVEDTVVAVEETRDITTDNTGKTHDELRKMLAHMFVDNASLRKQINSVIRCALNANINSEEDGEEIHLQKTVLSKFLER

SEQ ID NO: 24979 - DNA, 1481 bp, Glycine max
aaataaaaacgtgataaaaaagtgattctgctcacagtcgtttcggggtagcattcttgcgcactcagttattctctctctctctctagagcgtcgtcgtttagttagggcagaaaaccccttttcggatcggtggagcgaagcctcgccggcgagacccccgaggctgttcaatcggcgatcgagcaacggcgaaaagcgacgaagatgaaggttttcgtgaagactctcaagggcacgcacttcgaaattgaagtgaacccttcggacacgctttctgaagtgaagaaaaatatagaaactgttcagggtgcagatgtctatcctgctgcacagcaaatgcttattcatcaaggaaaagttctaaaagatggtactactttggaggaaaataaagtagctgaaagtagttttattgtaattatgctatcaaagccaagtgcaactcctacttcaacttctgtgtctactgcacctcaagctcctgcttcaactggagcatcggctacacctgttactgccccaacagctgctcctgcacctgcacctgcaccagctgctccagctccagctcctgctcctatattttcaggctcttctgtgccagagtctgatatatatgggcaggcagcatccaatcttgttgctggaagtaacttggagggaacaattcagcaaatccttgacatgggtggaggaagctgggacagggatactgttgttcgcacccttcgtgctgcttataacaaccccgagagagctgttgaatatttgtattctggcataccagagcaagccgaagctccaccagttaccggagtgcctgcaagtgctcaaccttcaaatcctccagctgatactccacaggcagcacaaccagcatctgttccttctagtggacctaatgctaatcctttagacctctttccccagggccttcctaatgttgggtctggtgctgctggtgctggttccttagactttcttcgcaacagtcaacagttccaagccttacgcgctatggtacaggctaatccacaaatattgcagcctatgctacaagagcttggcaaacaaaatcctcatcttatgcgattgattcaagagcatcaagttgacttccttcgcctaattaatgaacctgttgaagggggtgagggaaatatactgggacagctggctggtgccatgccgcaagcagtgactgtcacccctgaggagcggcaagcaattgagcgtctcgaagcaatgggttttgatcgtgcaactgtattggaggtgtactttgcttgtaacaaaaatgaggagctggctgccaactaccttttagatcacatgcatgagtttgatgaataattagatctcctttacaatttgtcaaaatatttgttttatgtttccttttgaatggtctttgttatgtaatgaaggtaatatttgataatgacaagtctcgaatggacaaggaatattttaatcag

SEQ ID NO: 24980 - protein, 382 aa, Glycine max
MKVFVKTLKGTHFEIEVNPSDTLSEVKKNIETVQGADVYPAAQQMLIHQGKVLKDGTTLEENKVAESSFIVIMLSKPSATPTSTSVSTAPQAPASTGASATPVTAPTAAPAPAPAPAAPAPAPAPIFSGSSVPESDIYGQAASNLVAGSNLEGTIQQILDMGGGSWDRDTVVRTLRAAYNNPERAVEYLYSGIPEQAEAPPVTGVPASAQPSNPPADTPQAAQPASVPSSGPNANPLDLFPQGLPNVGSGAAGAGSLDFLRNSQQFQALRAMVQANPQILQPMLQELGKQNPHLMRLIQEHQVDFLRLINEPVEGGEGNILGQLAGAMPQAVTVTPEERQAIERLEAMGFDRATVLEVYFACNKNEELAANYLLDHMHEFDE

SEQ ID NO: 24981 - protein, 338 aa, Glycine max
MLIHQGKVLKDGTTLEENKVAESSFIVIMLSKPSATPTSTSVSTAPQAPASTGASATPVTAPTAAPAPAPAPAAPAPAPAPIFSGSSVPESDIYGQAASNLVAGSNLEGTIQQILDMGGGSWDRDTVVRTLRAAYNNPERAVEYLYSGIPEQAEAPPVTGVPASAQPSNPPADTPQAAQPASVPSSGPNANPLDLFPQGLPNVGSGAAGAGSLDFLRNSQQFQALRAMVQANPQILQPMLQELGKQNPHLMRLIQEHQVDFLRLINEPVEGGEGNILGQLAGAMPQAVTVTPEERQAIERLEAMGFDRATVLEVYFACNKNEELAANYLLDHMHEFDE

SEQ ID NO: 24982 - protein, 310 aa, Glycine max
MLSKPSATPTSTSVSTAPQAPASTGASATPVTAPTAAPAPAPAPAAPAPAPAPIFSGSSVPESDIYGQAASNLVAGSNLEGTIQQILDMGGGSWDRDTVVRTLRAAYNNPERAVEYLYSGIPEQAEAPPVTGVPASAQPSNPPADTPQAAQPASVPSSGPNANPLDLFPQGLPNVGSGAAGAGSLDFLRNSQQFQALRAMVQANPQILQPMLQELGKQNPHLMRLIQEHQVDFLRLINEPVEGGEGNILGQLAGAMPQAVTVTPEERQAIERLEAMGFDRATVLEVYFACNKNEELAANYLLDHMHEFDE

SEQ ID NO: 24983 - DNA, 1186 bp, Glycine max
acacacatacacactcacatcagtcatgttttaataattgaattttgagaaaacctcagccacaggtcaagtagcaaatgaaatcatctggatatctgctggcttgagatatgcctttttattaaatgttaatgttatataacttcatttaattttctcatttgcaggatgctcatcatttgattgttgatgattctgaaatcatagttgattacaacaggcagcaattgatgcctggatggattcctagaaggtggtggtcttagtggtaagaaggaatcgggacaacttcgttttggggggaaagaaaaaccatttcgtgcacccctgaaaccaatcccatatgaggagttgaagaagcttggcatcccccctcctcctgagggaagatacatgtcacgctttcaggtgccatcgcctcctaggagagaaaggaacctttcagacagggaagaagactctcatagtcacaggaggggatctaatgacaggaacaggacggaagatagccacagaagttcagtggacattggtgaagggcactgtaggagttcaagtcatcgcgatgaccactcacgtggaaggagctctttagagaggagtggccgttaccatgataggagttcatctgagaaagaacatcgatacaggagttctactgacaaagacaaacattctcagaagagaaaagaaagtgacaggagttcatctgagaaagaacatcaatataggagttctaccgacaaagataaacattctcggaagagaaaagaaagtgacaggagttcacccgagaaagaacatggactcaggagttctactgacaaagacaaacatcatcggaagagaaaagaaagagatgaacagtcttgaaggcaggaaatatagtcgccattcccctcacgaggactaagctgtacaactcattattatcaccattctgttgtgcttttctgctttgtgtatggtatatgcatgggaggaatgggaatgcaaagtggaaatcctcaaagacttctcaatgaacatgagactggtgcatgtatgttcaatgatagtcatgcttttggtttatattttcatagggggtgttgtatgcaaaagcactcaatctcataccaggcacatcttgctgtagataagtcacaggcagtatgctgagtgaaagttgagcttttttcttaag

SEQ ID NO: 24984 - protein, 159 aa, Glycine max
MSRFQVPSPPRRERNLSDREEDSHSHRRGSNDRNRTEDSHRSSVDIGEGHCRSSSHRDDHSRGRSSLERSGRYHDRSSSEKEHRYRSSTDKDKHSQKRKESDRSSSEKEHQYRSSTDKDKHSRKRKESDRSSPEKEHGLRSSTDKDKHHRKRKERDEQS

SEQ ID NO: 24985 - protein, 99 aa, Glycine max
MIGVHLRKNIDTGVLLTKTNILRREKKVTGVHLRKNINIGVLPTKINILGREKKVTGVHPRKNMDSGVLLTKTNIIGREKKEMNSLEGRKYSRHSPHED

SEQ ID NO: 24986 - DNA, 1097 bp, Glycine max
tatatcctctgcttttaagtctgttataggcagtctatggcactctttttgaagctgaacacagatccactttctacattccatattggaaaattccattggcaaggtggatagtcccaaggcaaagaaagtttcaggatgacctaaaggtcatcaatacttgtcttgatggacttatcagaaatgcaaaagagagcagacaggaaacagatgttgagaaattgcagcagagggattacttaaatttgaaggatgcaagtcttctgcgtttcctggttgatatgcggggagctgatgttgatgatcgtcagttgagggatgatttaatgacaatgcttattgccggtcatgaaacaacggctgcagttcttacttgggcagttttcctcctagctcaaaatcctagcaaaatgaagaaggctcaagcagaggtagatttggtgctgggtacggggaggccaacttttgaatcacttaaggaattgcagtacattagattgattgttgtggaggctcttcgtttatacccccaaccacctttgctgattagacgttcactcaaatctgatgttttaccaggtgggcacaaaggtgaaaaagatggttatgcaattcctgctgggactgatgtcttcatttctgtatataatctccatagatctccatatttttgggaccgccctgatgacttcgaaccagagagatttcttgtgcaaaacaagaatgaagaaattgaaggatgggctggtcttgatccatctcgaagtcccggagccttgtatccgaacgaggttatatcggattttgcattcttaccttttggtggcggaccacgaaaatgtgttggggaccaatttgctctgatggagtccactgtagcgttgactatgctgctccagaattttgacgtggaactaaaagggacccctgaatcggtggaactagttactggggcaactattcataccaaaaatggaatgtggtgcagattgaagaagagatctaatttacgttgacatatgtactgtggccatttttcttatacagaataatgtatattattattctttgagaataatatgaataaattcctagac

SEQ ID NO: 24987 - protein, 244 aa, Glycine max
MRGADVDDRQLRDDLMTMLIAGHETTAAVLTWAVFLLAQNPSKMKKAQAEVDLVLGTGRPTFESLKELQYIRLIVVEALRLYPQPPLLIRRSLKSDVLPGGHKGEKDGYAIPAGTDVFISVYNLHRSPYFWDRPDDFEPERFLVQNKNEEIEGWAGLDPSRSPGALYPNEVISDFAFLPFGGGPRKCVGDQFALMESTVALTMLLQNFDVELKGTPESVELVTGATIHTKNGMWCRLKKRSNLR

SEQ ID NO: 24988 - protein, 229 aa, Glycine max
MTMLIAGHETTAAVLTWAVFLLAQNPSKMKKAQAEVDLVLGTGRPTFESLKELQYIRLIVVEALRLYPQPPLLIRRSLKSDVLPGGHKGEKDGYAIPAGTDVFISVYNLHRSPYFWDRPDDFEPERFLVQNKNEEIEGWAGLDPSRSPGALYPNEVISDFAFLPFGGGPRKCVGDQFALMESTVALTMLLQNFDVELKGTPESVELVTGATIHTKNGMWCRLKKRSNLR

SEQ ID NO: 24989 - protein, 227 aa, Glycine max
MLIAGHETTAAVLTWAVFLLAQNPSKMKKAQAEVDLVLGTGRPTFESLKELQYIRLIVVEALRLYPQPPLLIRRSLKSDVLPGGHKGEKDGYAIPAGTDVFISVYNLHRSPYFWDRPDDFEPERFLVQNKNEEIEGWAGLDPSRSPGALYPNEVISDFAFLPFGGGPRKCVGDQFALMESTVALTMLLQNFDVELKGTPESVELVTGATIHTKNGMWCRLKKRSNLR

SEQ ID NO: 24990 - DNA, 1286 bp, Glycine max
gattaaaaaaaaaaacacaaaaaaattacaatgcaaaattaaagtgagcagggaggattgaattgtccccgctattcgatttgagaaattcgacgttttcaaagaattggaaactggaaacttcactttcattcgatcaatcatgagaactcgaaacgccgattccgcctccaaatccgcaacccctaagaagacgccgccgaagaaatcccctgcggccaagcgcaccaccgccaccaaaaccagagccaccaagaagaacgagctctcgcccgcacccgattccaaccccgatcaatctcctctggaacagaaatcgttaggcagtgctagcagcgcaaaatctgtgaaaaagaagactccggggagatcgagaagtaaagcaatcaatactccgaattcggaagaacaatgtgaggcagtagctgatgaaactccaattgaagatgataccgaggtagcagagaaagtggaagatgttggagtggttgatgcagataatgttgagggtgagaaggaggggggaaaaggtgttggttctgttggattgtctgatgagacggatcgtaagtcgatggaagtggatgaacttgttcaaaaggtttgtgaatctgtgggaaaggaaaatgatgtaatggaagttgaagtagctgcttgctgggatgcttctgtttcttttaggcgaccagggcgacctattgtggatctcaatatatctgcggataatgaagattgtactggtgaaaaggagggagagaaatggaaggaagagttgaaagatcaagagggggacaaagggaaggaagagttgaaaaaacaggaaggagacaacgggaaggaagagttgaaagaactggaaggagagaaaggagaggaagagttgaaagaactggaaggagaaaaaggtgaggaagagttgacagaactggaaggagagaaaggaaatgttgaattgaaagaacagaaaggagacaaaggaaaggaaaagttgaaagagcaggagccagagaaagcaaagggagaggaaacaaacctttttggacatgaagagaactctgagtcttttggtgtagaaggtgaagcccagatgcaaaaagaagatgctaatcctattaaagatggcggtgaaggaccaaagattggtgaaaattcagatcttggagaacaagggaaggtggagcttgttgaagatccagaagaaaaccctgaagaagatccagaggaacctccataagaaacttcggcattggaggaggagcatagggaattggaggctattgcaaatc

SEQ ID NO: 24991 - protein, 363 aa, Glycine max
MRTRNADSASKSATPKKTPPKKSPAAKRTTATKTRATKKNELSPAPDSNPDQSPLEQKSLGSASSAKSVKKKTPGRSRSKAINTPNSEEQCEAVADETPIEDDTEVAEKVEDVGVVDADNVEGEKEGGKGVGSVGLSDETDRKSMEVDELVQKVCESVGKENDVMEVEVAACWDASVSFRRPGRPIVDLNISADNEDCTGEKEGEKWKEELKDQEGDKGKEELKKQEGDNGKEELKELEGEKGEEELKELEGEKGEEELTELEGEKGNVELKEQKGDKGKEKLKEQEPEKAKGEETNLFGHEENSESFGVEGEAQMQKEDANPIKDGGEGPKIGENSDLGEQGKVELVEDPEENPEEDPEEPP

SEQ ID NO: 24992 - protein, 219 aa, Glycine max
MEVDELVQKVCESVGKENDVMEVEVAACWDASVSFRRPGRPIVDLNISADNEDCTGEKEGEKWKEELKDQEGDKGKEELKKQEGDNGKEELKELEGEKGEEELKELEGEKGEEELTELEGEKGNVELKEQKGDKGKEKLKEQEPEKAKGEETNLFGHEENSESFGVEGEAQMQKEDANPIKDGGEGPKIGENSDLGEQGKVELVEDPEENPEEDPEEPP

SEQ ID NO: 24993 - protein, 199 aa, Glycine max
MEVEVAACWDASVSFRRPGRPIVDLNISADNEDCTGEKEGEKWKEELKDQEGDKGKEELKKQEGDNGKEELKELEGEKGEEELKELEGEKGEEELTELEGEKGNVELKEQKGDKGKEKLKEQEPEKAKGEETNLFGHEENSESFGVEGEAQMQKEDANPIKDGGEGPKIGENSDLGEQGKVELVEDPEENPEEDPEEPP

SEQ ID NO: 24994 - DNA, 1111 bp, Glycine max
acattgtgagactcaacatgctgagagagaatttgagaacgaggtgaatatgttaagcaaaattcagcatccgaatataatatctttactgggttgtagcatggatggttacacgaggctcgttgtctatgagctgatgcataatggatcattggaagctcagttacatggaccttctcatggctcggcattgacttggcacatgaggatgaagattgctcttgacacagcaagaggattagaatatctgcacgagcactgtcaccctgcagtgatccatagggatatgaaatcttctaatattctcttagatgcaaacttcaatgccaagctgtctgattttggtcttgccttaactgatgggtcccaaagcaagaagaacattaaactatcgggtaccttgggatacgtagcaccggagtatcttctagatggtaaattaagtgataaaagtgatgtctatgcttttggggttgtgctattggagctcctactaggaaggaagccagtagaaaaactggtaccagctcaatgccaatctattgtcacatgggccatgccacacctcacggacagatccaagcttccaagcattgtggatccagtgattaagaatacaatggatcccaagcacttgtaccaggttgctgctgtagctgtgctgtgcgtgcaaccagaacctagttaccgtccactgatcattgatgttcttcactcactcatccctcttgttcccattgagcttggaggaacactaagagtttcacaagtaatttgatacatgctaaacagcgtgaaacaaggatattatttgagattatgatgctgccaaaacggattggcttttaccaaatactcgaattacagatagatccacgtcaaacgtactagacattcattcgggaagaatgatagcttaaataggcgagaagagcattagattgttaacaacaaatgtaaagaagaaattagtttcactttggataagatagtcttccattccccctactttttaggtgaatgaaattcagtacataagcaaaaatattactagtaaactctttaagtcaatcatacatcatacatacaacatattgtgatgagaattcag

SEQ ID NO: 24995 - protein, 258 aa, Glycine max
HCETQHAEREFENEVNMLSKIQHPNIISLLGCSMDGYTRLVVYELMHNGSLEAQLHGPSHGSALTWHMRMKIALDTARGLEYLHEHCHPAVIHRDMKSSNILLDANFNAKLSDFGLALTDGSQSKKNIKLSGTLGYVAPEYLLDGKLSDKSDVYAFGVVLLELLLGRKPVEKLVPAQCQSIVTWAMPHLTDRSKLPSIVDPVIKNTMDPKHLYQVAAVAVLCVQPEPSYRPLIIDVLHSLIPLVPIELGGTLRVSQVI

SEQ ID NO: 24996 - protein, 242 aa, Glycine max
MLSKIQHPNIISLLGCSMDGYTRLVVYELMHNGSLEAQLHGPSHGSALTWHMRMKIALDTARGLEYLHEHCHPAVIHRDMKSSNILLDANFNAKLSDFGLALTDGSQSKKNIKLSGTLGYVAPEYLLDGKLSDKSDVYAFGVVLLELLLGRKPVEKLVPAQCQSIVTWAMPHLTDRSKLPSIVDPVIKNTMDPKHLYQVAAVAVLCVQPEPSYRPLIIDVLHSLIPLVPIELGGTLRVSQVI

SEQ ID NO: 24997 - protein, 225 aa, Glycine max
MDGYTRLVVYELMHNGSLEAQLHGPSHGSALTWHMRMKIALDTARGLEYLHEHCHPAVIHRDMKSSNILLDANFNAKLSDFGLALTDGSQSKKNIKLSGTLGYVAPEYLLDGKLSDKSDVYAFGVVLLELLLGRKPVEKLVPAQCQSIVTWAMPHLTDRSKLPSIVDPVIKNTMDPKHLYQVAAVAVLCVQPEPSYRPLIIDVLHSLIPLVPIELGGTLRVSQVI

SEQ ID NO: 24998 - DNA, 524 bp, Glycine max
aaattatcgcgtgctcggtttttgatcgagtttttctccgtttgcagcacaacgaatttcgaaatcccgtggagaacgtaacgtgctctggtttctggactcgaagatgaaggccacaaaggaattgagcgagcaagtggaggaaaacgaggtcaaggttttggttgaggaggacgacgaagaatacgagtccgtggatgaagtagtagacgacgcagaagatgatgaagacgaagaagaggacgatgacgacgacgaaggagacgacaatgacgacgaggaagatgatgctcctgacggcggtgacgacgacgacgacgaagaggaaggaagtgacatagttttgatgcaaaatcataggataaaaggaagtaaggttgaggaccaggagacactgtgttgtattccttgtttcattcagatgtaatgttaatatgttgttgattctttttgtaagaggcatgcatatgccatcaactatttcgctataaggttataatgtggttatgcagatcatgcttgct

SEQ ID NO: 24999 - protein, 106 aa, Glycine max
MKATKELSEQVEENEVKVLVEEDDEEYESVDEVVDDAEDDEDEEEDDDDDEGDDNDDEEDDAPDGGDDDDDEEEGSDIVLMQNHRIKGSKVEDQETLCCIPCFIQM

SEQ ID NO: 25000 - DNA, 1277 bp, Glycine max
agcctcatcactcactctaatctaacgatgaatctgaataccaagctttctcactcataagttcccactccctctcttatcatttatcaaacaaatttttcatctttccccacttgttggattaatggctgcctcagctttgtcactaacatccccattccatttcagaaaaccccacaacagggtttcacctctcaatgctcatcctctcattctcatccaaaagggtaaacaatctcttaaatcaaacttctcattctcaaccctgaatgcttccccccacttcagaccccctattgccattgctccttccacactgaccctaacaagagcttcttcctctgatgaatgctttgaccctgctggtgaagcccaaaggttgctgctttctgaggaaaaaccagttaattttgctttctgggtcatattttgggcctctttgtccctggcttggtttgctgtttcaagggatgctaatgctgctgttgaatcctccatcaaagcctctggctttggcttcaacattgccaattcgttgaggaaattgggttggcctgattgggttgtggtgttcacccttgccactcttcctgtgcttgagcttcgtggggctatacctgttggttactggatgcaacttaaccctgtaactttaacagtgttatctattctggggaacatggtccctgtgccattcatcgtgctctaccttaaaaaaattgcgtctttcgttgctgcgaggagcccttctgcgtctcgattccttgacatgctgttcgagaatgccaaagagaaggctggtccagtggaggagtttcagtggcttggtctgatgctctttgtggctgttccttttcctggaacaggagcatggaccggagcctttatagcatccattcttgatatgccattttgggctgctgtgtctgctaatttctttggtgttgtatttgctgggttgctagtaaatttgttagtgaaccttggtctgaagtatgccatcattactggtgtcatccttttctttgtttccacattcatgtggagtgtccttagaaatcttaaaaaaggtttgagctcgtcaaattgacgtgaaatgtctgattttcctttaccaacatgatgacaattgttagttttgttgttcattctcttggttttcattttcttatattttcataattgagcatcctagttcagtgatatgtaaaaatgaaaaggcttatgtcttgtatataccctttttctgatgttttaaaaatcatgggctgactgac

SEQ ID NO: 25001 - protein, 321 aa, Glycine max
MAASALSLTSPFHFRKPHNRVSPLNAHPLILIQKGKQSLKSNFSFSTLNASPHFRPPIAIAPSTLTLTRASSSDECFDPAGEAQRLLLSEEKPVNFAFWVIFWASLSLAWFAVSRDANAAVESSIKASGFGFNIANSLRKLGWPDWVVVFTLATLPVLELRGAIPVGYWMQLNPVTLTVLSILGNMVPVPFIVLYLKKIASFVAARSPSASRFLDMLFENAKEKAGPVEEFQWLGLMLFVAVPFPGTGAWTGAFIASILDMPFWAAVSANFFGVVFAGLLVNLLVNLGLKYAIITGVILFFVSTFMWSVLRNLKKGLSSSN

SEQ ID NO: 25002 - DNA, 1301 bp, Glycine max
aggatcacagtaggagataaggagagcattcaccattttcttgtggtttggtttcctagagacactaagtactcccatggaacaaaacaacaaaagccttgtttcttctaaattcttatgtttatgtttgttgatcaccttgatcagcattattgttgctccacaagcggaagcagcacgagcatttttcgtgtttggcgattcgcttgtagacaacgggaacaacaatttcttggccaccacggcgcgtgccgattcatatccttatggcattgattctgcatctcatagagcctctggtcgtttctccaatggcctcaacatgcctgaccttatcagtgagaaaattggctcagaacccacattaccatatttgagtccacagctcaatggtgaaaggctgcttgttggtgcaaactttgcttctgctgggataggaattctcaacgacactggaattcagtttataaacataatccgaattacagaacaattggcatacttcaaacagtatcagcagagggtgagtgcactaattggagaagagcagactcgaaatttagtgaacaaagcattggtgctcataaccttaggtggcaatgattttgtcaacaactattatttggttcctttctctgccagatcccgcgaatatgctcttccagactacgttgtcttcctcatttcggagtatcgtaaaattcttgcgaatctgtatgaattgggggcacgaagggttctagtgacaggcacgggaccactgggttgcgtgccagcagaattggctatgcacagccaaaacggagaatgtgcgactgagctgcaacgagccgttaacctgttcaatcctcaactcgtccaactactgcacgaacttaacactcaaattggctccgatgtcttcatttccgcaaacgccttcaccatgcatttggatttcgttagtaacccacaagcctatgggtttgtcacgtcaaaagtagcatgctgtggtcaaggagcatacaatggaatcggactctgcactccagcttcaaacttgtgcccaaacagggatttatatgcattttgggaccccttccatccatcagagagagcaaatagattgatcgtggataaattcatgactggatccaccgaatacatgcaccctatgaaccttagtacaattattgctttagattctacaacctaatgcaccattactgtatgagttgtcttcttttcttgtctatgcacacctagttcctacaagatattgtatttttcttgaatgtttaaaactatgacgttaattactc

SEQ ID NO: 25003 - protein, 372 aa, Glycine max
MEQNNKSLVSSKFLCLCLLITLISIIVAPQAEAARAFFVFGDSLVDNGNNNFLATTARADSYPYGIDSASHRASGRFSNGLNMPDLISEKIGSEPTLPYLSPQLNGERLLVGANFASAGIGILNDTGIQFINIIRITEQLAYFKQYQQRVSALIGEEQTRNLVNKALVLITLGGNDFVNNYYLVPFSARSREYALPDYVVFLISEYRKILANLYELGARRVLVTGTGPLGCVPAELAMHSQNGECATELQRAVNLFNPQLVQLLHELNTQIGSDVFISANAFTMHLDFVSNPQAYGFVTSKVACCGQGAYNGIGLCTPASNLCPNRDLYAFWDPFHPSERANRLIVDKFMTGSTEYMHPMNLSTIIALDSTT

SEQ ID NO: 25004 - protein, 290 aa, Glycine max
MPDLISEKIGSEPTLPYLSPQLNGERLLVGANFASAGIGILNDTGIQFINIIRITEQLAYFKQYQQRVSALIGEEQTRNLVNKALVLITLGGNDFVNNYYLVPFSARSREYALPDYVVFLISEYRKILANLYELGARRVLVTGTGPLGCVPAELAMHSQNGECATELQRAVNLFNPQLVQLLHELNTQIGSDVFISANAFTMHLDFVSNPQAYGFVTSKVACCGQGAYNGIGLCTPASNLCPNRDLYAFWDPFHPSERANRLIVDKFMTGSTEYMHPMNLSTIIALDSTT

SEQ ID NO: 25005 - DNA, 1839 bp, Glycine max
atcacaattcctcaacaacacaacacacaaacacaaaatccccttcaaaacctttcgctttctctctctctctaaagcaaaaacaaaaaagcttccctcgaattgcagaaaatggcaacaatgtccgcatctccaatgaacctcaacatgattgactctaacttcgaagtcgacaagctcacctacgaaatcttctccattctcgagaacaatttcctcttcggctacggcgacaccgaaaatcgcaccaattcgattaattttccgccgagagacgcgaaaccggcgaaacacgccgccggcaaggtccgcatcctctgcattgacggcgccggcgccactgacggcatcctcgccgcgaagtccctcgcgcacctcgaggcctgcctccgccgcaagtcaggcgacgcgaacgcgcgcgtcgccgatttcttcgacgccgccgccggctccggggtcggtggcgtcctcgccgcgctgcttttcactcgcggcaaggacggaaggccgctgtgcagcgccgagggggcgctgcggttcctcaccgacaaccgccgcaggatttcgcggcgggcggggctcctccggcgagtgctccggcctgcggcaaaggcggagaagctcttccgcaagacgttcggggagtgcacgctgaaggacacggtgaagcccgtgctgatcccctgctacgacctcgtcacgcgcgcggcgttcgttttctcgcgcgccgacgcgcttgaagtggacggctacgatttcaagatgcgcgatgtgtgcgccgccacgtcagcggacccatcctctgcccccacagagatgcggtccgtcgacggcaggaccaggatcatggccgtcgacggaggcgtcgccatgaacaatccaacggctgccgccatcacgcacgtgctcaataacaaacatgagttcccgttctgtaacggcgtttccgacctcctcgtactctccctcggtaacggagagtcagactttaacgccgttaagtcctcctctggcttcgtaaggatcgccggcgaaggagcttccgatatggtggatcaagccgtatcgatggcatttggtgagtgtcggacgagcaattatgtgcggattcagtcaaacgggatcatggcaaacaagagcacagaggccaagtcctgcaaaacggcgtcggatttgtttgccatgtcggaggagatgttggcccagaagaacgttgagtccattttgttcagggggaagaaggtggcggagaacaccaacatggacaagttagagttgtttgggggagagttaattaaggagcaagagagaagaaaaacaagcattttagcaacggtggtgttgaagaacaataatgcctcaccctcacccagcagaacttcctctgccactaccttgtccactttgtcctccagtagttaaaaccagaaacagacaagggagattagagggaagaaatccaaagttagatttttcattgtggggttgaatttttatgccagtttttcttttttattttaagtttgtggtgttggggtagctgccgcttgggaccaaattaaggcaaattgagagactgagctgtgcagagccgaatccttaattactactattactattactacctacattatatttattttttttatttttctttagtttttttgggggtatatattacatttttatgtaatgatagtgatttgtgtatatggttattgccatggcatgatttttggtttaatgttagagctgtgcttgatttgtgagaattgtactgttcggtaagaacatcatcatctgatagttaaatagtattgtgactgaatgcagaacact

SEQ ID NO: 25006 - protein, 436 aa, Glycine max
MATMSASPMNLNMIDSNFEVDKLTYEIFSILENNFLFGYGDTENRTNSINFPPRDAKPAKHAAGKVRILCIDGAGATDGILAAKSLAHLEACLRRKSGDANARVADFFDAAAGSGVGGVLAALLFTRGKDGRPLCSAEGALRFLTDNRRRISRRAGLLRRVLRPAAKAEKLFRKTFGECTLKDTVKPVLIPCYDLVTRAAFVFSRADALEVDGYDFKMRDVCAATSADPSSAPTEMRSVDGRTRIMAVDGGVAMNNPTAAAITHVLNNKHEFPFCNGVSDLLVLSLGNGESDFNAVKSSSGFVRIAGEGASDMVDQAVSMAFGECRTSNYVRIQSNGIMANKSTEAKSCKTASDLFAMSEEMLAQKNVESILFRGKKVAENTNMDKLELFGGELIKEQERRKTSILATVVLKNNNASPSPSRTSSATTLSTLSSSS

SEQ ID NO: 25007 - protein, 433 aa, Glycine max
MSASPMNLNMIDSNFEVDKLTYEIFSILENNFLFGYGDTENRTNSINFPPRDAKPAKHAAGKVRILCIDGAGATDGILAAKSLAHLEACLRRKSGDANARVADFFDAAAGSGVGGVLAALLFTRGKDGRPLCSAEGALRFLTDNRRRISRRAGLLRRVLRPAAKAEKLFRKTFGECTLKDTVKPVLIPCYDLVTRAAFVFSRADALEVDGYDFKMRDVCAATSADPSSAPTEMRSVDGRTRIMAVDGGVAMNNPTAAAITHVLNNKHEFPFCNGVSDLLVLSLGNGESDFNAVKSSSGFVRIAGEGASDMVDQAVSMAFGECRTSNYVRIQSNGIMANKSTEAKSCKTASDLFAMSEEMLAQKNVESILFRGKKVAENTNMDKLELFGGELIKEQERRKTSILATVVLKNNNASPSPSRTSSATTLSTLSSSS

SEQ ID NO: 25008 - protein, 428 aa, Glycine max
MNLNMIDSNFEVDKLTYEIFSILENNFLFGYGDTENRTNSINFPPRDAKPAKHAAGKVRILCIDGAGATDGILAAKSLAHLEACLRRKSGDANARVADFFDAAAGSGVGGVLAALLFTRGKDGRPLCSAEGALRFLTDNRRRISRRAGLLRRVLRPAAKAEKLFRKTFGECTLKDTVKPVLIPCYDLVTRAAFVFSRADALEVDGYDFKMRDVCAATSADPSSAPTEMRSVDGRTRIMAVDGGVAMNNPTAAAITHVLNNKHEFPFCNGVSDLLVLSLGNGESDFNAVKSSSGFVRIAGEGASDMVDQAVSMAFGECRTSNYVRIQSNGIMANKSTEAKSCKTASDLFAMSEEMLAQKNVESILFRGKKVAENTNMDKLELFGGELIKEQERRKTSILATVVLKNNNASPSPSRTSSATTLSTLSSSS

SEQ ID NO: 25009 - DNA, 1172 bp, Glycine max
gcttttccctgcgaaacaaaacaacaacaacaatgggagcacgaaagagactctcttcttccgagcctcattcttcttctcctgcaacaaaggaaaacaccacaaccaccaaacccgaacaaaaaccaaccacaacagaccctccaattgcgcctcctaaatggggtcttcttctgaagctctctctcttcttcttgctcccttactcgtatctcctcttccgctactatcccatcgagccggagctccgaagatcgatcctcatcaacgctggaatgagcctcgcgggtctcttcgtcacggtcaagatgatccccgtcgcgtcccgctacgtccagaagcggaacctctttgggtatgacatcaacaagaagggcacccctcagggaactgtcaaagtgcctgaatcattaggtatagttgttggtattgtgttcttggttgtggcaatcttgtttcagtattttaacttcacatcagattcaaattggcttgttgaatacaatgcagcattagcgtgcatttgtttcatgacactgctaggatttgtcgatgatgtccttgatgtcccatggagagtaaagttactactcccatcaattgctgcacttcctttgttaatggcatatgctggacacacaactatagttataccaaagccacttgtcccacacattgggattgaggttttggatcttggatggatgtataaactatatatggggctcttggctgttttttgcacaaattccatcaatatacatgctggaataaatggccttgaagttgggcagacagtggttattgcatcagctatcctgatacacaatattatgcaaattggagcatcaacagatcctgaatataagcaagcacatgcattttctatttacttagctcagcccttgctagctacctctttggctttactttcttacaactggtatccctcttcagtttttgttggtgatacatatacatactttgctgggatgactatggctgtgattggtatctggagtcttcttcatttggaaattcatgtgaatctttttgttttaatccattgtatggatgtaaattatgacatgattagttccttgattgtatttgtgacactctgaatggattacttgttttattttatttgtttacaatggattacttctttt

SEQ ID NO: 25010 - protein, 373 aa, Glycine max
FSLRNKTTTTMGARKRLSSSEPHSSSPATKENTTTTKPEQKPTTTDPPIAPPKWGLLLKLSLFFLLPYSYLLFRYYPIEPELRRSILINAGMSLAGLFVTVKMIPVASRYVQKRNLFGYDINKKGTPQGTVKVPESLGIVVGIVFLVVAILFQYFNFTSDSNWLVEYNAALACICFMTLLGFVDDVLDVPWRVKLLLPSIAALPLLMAYAGHTTIVIPKPLVPHIGIEVLDLGWMYKLYMGLLAVFCTNSINIHAGINGLEVGQTVVIASAILIHNIMQIGASTDPEYKQAHAFSIYLAQPLLATSLALLSYNWYPSSVFVGDTYTYFAGMTMAVIGIWSLLHLEIHVNLFVLIHCMDVNYDMISSLIVFVTL

SEQ ID NO: 25011 - protein, 363 aa, Glycine max
MGARKRLSSSEPHSSSPATKENTTTTKPEQKPTTTDPPIAPPKWGLLLKLSLFFLLPYSYLLFRYYPIEPELRRSILINAGMSLAGLFVTVKMIPVASRYVQKRNLFGYDINKKGTPQGTVKVPESLGIVVGIVFLVVAILFQYFNFTSDSNWLVEYNAALACICFMTLLGFVDDVLDVPWRVKLLLPSIAALPLLMAYAGHTTIVIPKPLVPHIGIEVLDLGWMYKLYMGLLAVFCTNSINIHAGINGLEVGQTVVIASAILIHNIMQIGASTDPEYKQAHAFSIYLAQPLLATSLALLSYNWYPSSVFVGDTYTYFAGMTMAVIGIWSLLHLEIHVNLFVLIHCMDVNYDMISSLIVFVTL

SEQ ID NO: 25012 - protein, 282 aa, Glycine max
MSLAGLFVTVKMIPVASRYVQKRNLFGYDINKKGTPQGTVKVPESLGIVVGIVFLVVAILFQYFNFTSDSNWLVEYNAALACICFMTLLGFVDDVLDVPWRVKLLLPSIAALPLLMAYAGHTTIVIPKPLVPHIGIEVLDLGWMYKLYMGLLAVFCTNSINIHAGINGLEVGQTVVIASAILIHNIMQIGASTDPEYKQAHAFSIYLAQPLLATSLALLSYNWYPSSVFVGDTYTYFAGMTMAVIGIWSLLHLEIHVNLFVLIHCMDVNYDMISSLIVFVTL

SEQ ID NO: 25013 - DNA, 1320 bp, Glycine max
attccaatagcgaggcgagacatcgattccaaaggtgcgtttctgctgtgctagggtttctgcatcttccacctccgtcgcgatgaaaccaggcttcatctgattccgatttcccttcgctccttctcctccttaacattcatcttcttcgattcctctacaaattatgattattattatgatgaactccatcttcgcctcgcataaccttcgcgtcttcggtcccggcttgaatcccttcgcaccttattgcatcgccaatcactcccttttcctttccctttcctctcgctaaattacaattccctttctttttcctctccaacttctccttctccgtttctccgaacatgtaaattcggaggacaccgtctttgattcggtctatttttttgggggttactttacttcggttacgcgtcgtcgttttgcttttctttgtcgtcgtttttgcgttgcgttgattgctgagaaagaaagaaagaaagaaagatgctggaggaacagcctgttgttttgttcaggaagagcccttccaggaggcgcttgagatctgcttttgctaccgatgataggggttggacctcgcttcatgttttcgctcgaaaaggcgatctcaaattggttaaaaaacttctcaatgaaggaatggatgtcaatgtgtctgcatggggccccaaatcaaaaggggtgacccctctccaccttgctgccgaaggtggtcacattggagtgatggatgtactacttgagtgtggtgctgacattgatgccagaactaagggtgcttgtggctggacgccgctccacattgcagccaaggaaaggaggagggatgctgtgaaattcttgatagagaatggagccttcatgccacctgatatcagtgatagcagatttaacccaccgcttcattactgccccggactggaatgggcctatgaggagatgaagcgacttcgtcaggaagacttgtctgctggagagacatgttacagctctgaaagttaatttgcttttcagggatttggttggtgtttgatagtgtgtttggatgccattcagaggagatcaaagttaatataactagcttttgcgtcacctttacaaatttgacatgaaaatatgctgatacgtacattcagaaagcgtatccagacatgcactgtatctgtattgtatgaataaatgtacaattgaaataaaactactatgtagtgtatggggatgttttactattttagcatcttggatgcccttgtttatggaaacaattatgtacgattattaatgtgatatgctgtgattgttgatgtttcc

SEQ ID NO: 25014 - protein, 172 aa, Glycine max
MLEEQPVVLFRKSPSRRRLRSAFATDDRGWTSLHVFARKGDLKLVKKLLNEGMDVNVSAWGPKSKGVTPLHLAAEGGHIGVMDVLLECGADIDARTKGACGWTPLHIAAKERRRDAVKFLIENGAFMPPDISDSRFNPPLHYCPGLEWAYEEMKRLRQEDLSAGETCYSSES

SEQ ID NO: 25015 - protein, 120 aa, Glycine max
MDVNVSAWGPKSKGVTPLHLAAEGGHIGVMDVLLECGADIDARTKGACGWTPLHIAAKERRRDAVKFLIENGAFMPPDISDSRFNPPLHYCPGLEWAYEEMKRLRQEDLSAGETCYSSES

SEQ ID NO: 25016 - protein, 91 aa, Glycine max
MDVLLECGADIDARTKGACGWTPLHIAAKERRRDAVKFLIENGAFMPPDISDSRFNPPLHYCPGLEWAYEEMKRLRQEDLSAGETCYSSES

SEQ ID NO: 25017 - DNA, 1174 bp, Glycine max
atcatcaccttcctatgcaccaccaataagctccataccttctaattctctactctctctcacttctctctatcacatttttcttacaagatggcagcatcatcagcatgccttgtagggaatggtttatctacacggggtaatagaataactcttaagaaggacttcaatggaagaagatatctctactcatcttggagattttcattattgaacaacaataaggcatcaaaagcattttccataaaggcatctttggagcaaaggcaagaagaagggagaagggggtttctgaaactgttgcttggaaatctgggagttggtttgcctgcactattgggaagtggcaaagcttatgctgatgaacaaggggtttcatcctccagaatgtcttactccaggtttctggagtatttggacaaggacagagttaaaaaagtggatctttatgacaatggaaacactgctgttgttgaggctgtttcgcccgagttggggaaccggtcacagtatgttagagttcaactccctggacttaaccaagagctccttcagaaattcagggaaaagaatattgactttgcagctcataatccccaagaagagtcaggttctcttttagctaacctgattgggaatctggctttccctttgctcttgattggaggattgttccttctctcgagacgatccggagggatgggaggtcctggtggccctggatttcctcttgcttttggtcaatccaaagccaagtttcaaatggaaccaaacaccggagtgacatttgatgatgttgctggggtggatgaagccaagcaggactttatggaggtggtggagtttttaaagaagcctgagaggtttactgctgttggggctcgcattcctaaaggagttcttcttgttggtcctccaggaactgggaagaccttgttagccaaggctattgctggtgaagctggtgttccatttttctctatatcaggttctgagtttgttgagatgtttgttggtgttggtgcttctcgtgttcgtgatttgttcaagaaggcgaaagagaatgccccttgcattgtctttgttgatgaaattgatgctgttggaagacaaagagggactggaattggtggagggaatgatgaaagagagcagaccctcaaccaacttttga

SEQ ID NO: 25018 - protein, 361 aa, Glycine max
MAASSACLVGNGLSTRGNRITLKKDFNGRRYLYSSWRFSLLNNNKASKAFSIKASLEQRQEEGRRGFLKLLLGNLGVGLPALLGSGKAYADEQGVSSSRMSYSRFLEYLDKDRVKKVDLYDNGNTAVVEAVSPELGNRSQYVRVQLPGLNQELLQKFREKNIDFAAHNPQEESGSLLANLIGNLAFPLLLIGGLFLLSRRSGGMGGPGGPGFPLAFGQSKAKFQMEPNTGVTFDDVAGVDEAKQDFMEVVEFLKKPERFTAVGARIPKGVLLVGPPGTGKTLLAKAIAGEAGVPFFSISGSEFVEMFVGVGASRVRDLFKKAKENAPCIVFVDEIDAVGRQRGTGIGGGNDEREQTLNQLL

SEQ ID NO: 25019 - protein, 262 aa, Glycine max
MSYSRFLEYLDKDRVKKVDLYDNGNTAVVEAVSPELGNRSQYVRVQLPGLNQELLQKFREKNIDFAAHNPQEESGSLLANLIGNLAFPLLLIGGLFLLSRRSGGMGGPGGPGFPLAFGQSKAKFQMEPNTGVTFDDVAGVDEAKQDFMEVVEFLKKPERFTAVGARIPKGVLLVGPPGTGKTLLAKAIAGEAGVPFFSISGSEFVEMFVGVGASRVRDLFKKAKENAPCIVFVDEIDAVGRQRGTGIGGGNDEREQTLNQLL

SEQ ID NO: 25020 - DNA, 1511 bp, Glycine max
gcaccgcttgagcagacttaacaacagcacaaagcgggttactgtctgttcaagctaccatctctctctctctttcttagtgcctccttgccagaagttaaaatggcccaagaaactttcctattcacatctgaatcagtgaacgaggggcaccctgacaagctctgtgaccagatctccgatgctgtgctcgatgcatgcttggagcaggaccctgacagcaaggttgcctgtgaaacctgcaccaagaccaacatggtgatggttttcggagagatcacaaccaaggccaacgtggactatgagaagattgtgcgtgacacatgcaggaacattggttttgtctctgatgatgttggtcttgatgctgacaactgcaaggtcctcgtcaacattgagcaacagagtcctgatattgctcaaggtgtgcacggccacctcacaaagaggcctgaggagattggtgctggtgaccaaggtcatatgttcggctatgccactgacgagactcccgagctcatgcccttgagccatgtccttgccacgaagctcggtgccaagctcaccgaggttcggaagaacgggacatgcccttggctgagacctgatggcaagacccaagtcactgttgagtactacaatgacaagggtgccatggttccaatccgcgtccacactgtgctcatctccacacagcatgatgagactgtcacaaatgatgagattgcagctgatcttaaagaacacgtgattaagcctgtgattcctgagaagtaccttgatgagaagaccattttccatttgaacccttctggcaggtttgtcattggagggccgcatggcgatgctggtctcaccggccgcaagatcatcatcgacacctatggaggatggggtgcacatggtggtggtgccttctctgggaaggatcctaccaaggttgataggagtggtgcctacattgtgaggcaagctgcaaagagcattgttgcaaatggacttgctaggagggcaaattgcaagtttcctatgccattggtgtgcctgagcccttgtctgtgtttgttgacacttatggcactgggaagatccctgacaaggaaatcctcagcattgtgaaggagagttttgacttcaggcctggcatgatctccatcaaccttgatctcaagaggggtggaaatggcaggttcttgaagactgctgcatatggacactttggcagagatgaccctgacttcacatgggaagtggtgaagccactcaagggggagaaggtacctgcttaactaaaaggggttccaacactcttggcaagggacttttgcactactactggcttcttattatctgattgctaaaattttctctatgtttccttccctcttactcaattctgtttttttttttctgtatttttttatgaatttcccccttttttttgtgtacttgtatgtgttctttcagaacatatatattttatatgatgaaacaaaaaaaaatgttctctc

SEQ ID NO: 25021 - protein, 338 aa, Glycine max
MAQETFLFTSESVNEGHPDKLCDQISDAVLDACLEQDPDSKVACETCTKTNMVMVFGEITTKANVDYEKIVRDTCRNIGFVSDDVGLDADNCKVLVNIEQQSPDIAQGVHGHLTKRPEEIGAGDQGHMFGYATDETPELMPLSHVLATKLGAKLTEVRKNGTCPWLRPDGKTQVTVEYYNDKGAMVPIRVHTVLISTQHDETVTNDEIAADLKEHVIKPVIPEKYLDEKTIFHLNPSGRFVIGGPHGDAGLTGRKIIIDTYGGWGAHGGGAFSGKDPTKVDRSGAYIVRQAAKSIVANGLARRANCKFPMPLVCLSPCLCLLTLMALGRSLTRKSSAL

SEQ ID NO: 25022 - protein, 287 aa, Glycine max
MVMVFGEITTKANVDYEKIVRDTCRNIGFVSDDVGLDADNCKVLVNIEQQSPDIAQGVHGHLTKRPEEIGAGDQGHMFGYATDETPELMPLSHVLATKLGAKLTEVRKNGTCPWLRPDGKTQVTVEYYNDKGAMVPIRVHTVLISTQHDETVTNDEIAADLKEHVIKPVIPEKYLDEKTIFHLNPSGRFVIGGPHGDAGLTGRKIIIDTYGGWGAHGGGAFSGKDPTKVDRSGAYIVRQAAKSIVANGLARRANCKFPMPLVCLSPCLCLLTLMALGRSLTRKSSAL

SEQ ID NO: 25023 - protein, 285 aa, Glycine max
MVFGEITTKANVDYEKIVRDTCRNIGFVSDDVGLDADNCKVLVNIEQQSPDIAQGVHGHLTKRPEEIGAGDQGHMFGYATDETPELMPLSHVLATKLGAKLTEVRKNGTCPWLRPDGKTQVTVEYYNDKGAMVPIRVHTVLISTQHDETVTNDEIAADLKEHVIKPVIPEKYLDEKTIFHLNPSGRFVIGGPHGDAGLTGRKIIIDTYGGWGAHGGGAFSGKDPTKVDRSGAYIVRQAAKSIVANGLARRANCKFPMPLVCLSPCLCLLTLMALGRSLTRKSSAL

SEQ ID NO: 25024 - DNA, 1381 bp, Glycine max
atgtggtgttaccagaaagcagataagacttgaacacgtgtgctactacttaccacttctccatgaattactgaactgcgagctccctccaattcgcttctccttcttcttcattccttggcagtacacaaatctgtcatatcttgctgctcgatcgttacgatgatggcgctcaattcattgtcaccactttcaattaattctcttcacgtatcttcaagctcaacttcaaagatttcgcattctcattccaagtcctttcccgtcgttgtgtgccaaattaactcaaacagagatcatcgtcaagaatccacaaaatggggaaaagtggtttcggccacgttggcggctgctgttattgccttcagctctgacatgtctgcccttgctgatctcaacaaatttgaggctgaaatgaggggtgaatttggaataggatcggctgcgcagtttggctctgctgacctcaggaaagcggtgcatgtcaatgaaaatttcagaagagccaatttcacagctgctgatatgagagaatctgattttagtggttcaactttcaatggtgcataccttgagaaagctgttgcatacaaggcaaacttttcaggtgctgatttaagtgatacattgatggatcgcatggtatctacatcaagttgattaactttatctatacgttcaatactaattttttttctctcttttaattgggtatatgtgtgattttcttgtttgaggtctaaaggttctaaatgaagccaatctcactaatgccattctccttagaacagtcctcacacggagtgaccttgggggagccatcatcgaaggtgctgactttagtgatgctgtgttggatcttcctcaaaagcaggcgctatgcaagtatgctagtggcacaaatcctgtgacaggagtaagcacaagagtaagcttaggttgtgggaacaaacgacgaaatgcatatggctccccgtcatctccccttttaagtgctccaccacagaaactgcttgaccgagacggtttttgtgatgatgcaacaggactttgcgatgcaaagtagtaactagttgtaatatttgctacaaggccatattcgtgtaaatatatcagagactacaattgaggcctctatttgcctttgcatttctgagagcatatccgcattcaacaaatgatgccctctcttgaatctatgttggatattgctggtctctgtttagcaagccagaacctattttgtccagccactttctcctatgtaagatctacgggatataaaatgatgcttcgtgttcataatttctcacccatttgccacaaaactttaatgaaccatgtaagtccaatttcttgtttaaatttatattacacaaac

SEQ ID NO: 25025 - protein, 165 aa, Glycine max
MMALNSLSPLSINSLHVSSSSTSKISHSHSKSFPVVVCQINSNRDHRQESTKWGKVVSATLAAAVIAFSSDMSALADLNKFEAEMRGEFGIGSAAQFGSADLRKAVHVNENFRRANFTAADMRESDFSGSTFNGAYLEKAVAYKANFSGADLSDTLMDRMVSTSS

SEQ ID NO: 25026 - protein, 164 aa, Glycine max
MALNSLSPLSINSLHVSSSSTSKISHSHSKSFPVVVCQINSNRDHRQESTKWGKVVSATLAAAVIAFSSDMSALADLNKFEAEMRGEFGIGSAAQFGSADLRKAVHVNENFRRANFTAADMRESDFSGSTFNGAYLEKAVAYKANFSGADLSDTLMDRMVSTSS

SEQ ID NO: 25027 - protein, 94 aa, Glycine max
MSALADLNKFEAEMRGEFGIGSAAQFGSADLRKAVHVNENFRRANFTAADMRESDFSGSTFNGAYLEKAVAYKANFSGADLSDTLMDRMVSTSS

SEQ ID NO: 25028 - DNA, 951 bp, Glycine max
cttcacggcaacagaagaataatcgagacacaaagatcatagtgatcattttttaatttctcagatttatccgacgtccttgcagatccaccaaccgttatggctgccttcagcggtgatgaaacggcaccgtttttcggcttccttggcgccgcagctgccctcgtcttctcctgtatgggagctgcctatggcacagcgaagagtggcgtgggcgtggcttccatgggtgtaatgagacctgagctggtgatgaagtcgattgttcctgttgtcatggctggagttttgggtatttatggccttattattgctgttattatcagtaccggtattaatccaaaggccaaatcctattacctctttgatggttatgcacatctctcttctggtcttgcctgtggcttggctggcctttctgctggcatggctattggtattgttggtgatgccggtgttagagccaatgcacaacaaccaaaactttttgttggaatgattctcatcctcatttttgctgaagcacttgccctttatggtctcattgttggtattatcctgtcttctcgtgctggccagtctagagccgactaagaaaggagttgtgctgcaaaatattctttgaccacccatctgttttaacctccttttaaaggggatgagggaggtaattattagttgttccgagcttagcgatgttcaggcagcattttcaggctttagcaatggtgtgaaagttcaattcgccatttgtggtgtttgtttgtataattaggtttatgtttacttaataaagcttcttaagcttcctcttttttatactttattgattgtattttgccatatcatccgacttttatatgtattttttgggctgctgaaactggtgcatgtaatgatttggctagcaatgcagtgtatttcatgggtctttccatgttggatattggt

SEQ ID NO: 25029 - protein, 164 aa, Glycine max
MAAFSGDETAPFFGFLGAAAALVFSCMGAAYGTAKSGVGVASMGVMRPELVMKSIVPVVMAGVLGIYGLIIAVIISTGINPKAKSYYLFDGYAHLSSGLACGLAGLSAGMAIGIVGDAGVRANAQQPKLFVGMILILIFAEALALYGLIVGIILSSRAGQSRAD

SEQ ID NO: 25030 - protein, 138 aa, Glycine max
MGAAYGTAKSGVGVASMGVMRPELVMKSIVPVVMAGVLGIYGLIIAVIISTGINPKAKSYYLFDGYAHLSSGLACGLAGLSAGMAIGIVGDAGVRANAQQPKLFVGMILILIFAEALALYGLIVGIILSSRAGQSRAD

SEQ ID NO: 25031 - protein, 122 aa, Glycine max
MGVMRPELVMKSIVPVVMAGVLGIYGLIIAVIISTGINPKAKSYYLFDGYAHLSSGLACGLAGLSAGMAIGIVGDAGVRANAQQPKLFVGMILILIFAEALALYGLIVGIILSSRAGQSRAD

SEQ ID NO: 25032 - DNA, 989 bp, Glycine max
attattggtgttgaagatagaaaagaaagagaaagagcgatgccaggatcattgaggcctcggtttgttatctttggttcttccatcgttcaatttggtttttatgatgaaggttgggtggctattctttctcatttgtatgcccgcaaggttgatattgatttgcgaggatatgctggttggaattcaaggcgtgctgtgcaggttctggataaagtttttcccaaggatgcccctatacaaccttcattggttattgtctactttggtggtaatgattcttctgctcccctctcatctggcctaggtcctcatgtgcctctccaagaatacattgaaaatttgaggaagatcgttgaccatctcaagagcctctcagagaacactcgcattctacttctcagtactcctcccctcaatgatgcagcaattacgccaaacagtgatgggaagccaacaaagacaaatgaagcttgtcaaatatattcagaagcatgtttggatgtgtgccgcaagatgaatatcaaggccattgatttgtggtctgctattcagaaaagagataactggcaagatgtttgcttcattgatggaattcacctctcatctgagggaagcaagatagtgttgaaagagatactgaatgtcctcaaaggtgcagaatgggaacctagtctatattggaaatcaatgccaagtgagtttgatgaagattcaccatatgatccagttacaactgatggaaagtcaactattaatctttccagctgggtcttccctgacaatgacaaatgggactagactttatatgtgcattaacggcgagtcactgaatcgcatcgaacgaaaatgcctatttttatcttttttttttgtgttgcatgtttgggttcctttctttatcgtgtttatttctgtattacttgcaaaaaatgacgtctattactatgattaactttgaggttcacgagtcattttcaatcttctcc

SEQ ID NO: 25033 - protein, 266 aa, Glycine max
IIGVEDRKERERAMPGSLRPRFVIFGSSIVQFGFYDEGWVAILSHLYARKVDIDLRGYAGWNSRRAVQVLDKVFPKDAPIQPSLVIVYFGGNDSSAPLSSGLGPHVPLQEYIENLRKIVDHLKSLSENTRILLLSTPPLNDAAITPNSDGKPTKTNEACQIYSEACLDVCRKMNIKAIDLWSAIQKRDNWQDVCFIDGIHLSSEGSKIVLKEILNVLKGAEWEPSLYWKSMPSEFDEDSPYDPVTTDGKSTINLSSWVFPDNDKWD

SEQ ID NO: 25034 - protein, 253 aa, Glycine max
MPGSLRPRFVIFGSSIVQFGFYDEGWVAILSHLYARKVDIDLRGYAGWNSRRAVQVLDKVFPKDAPIQPSLVIVYFGGNDSSAPLSSGLGPHVPLQEYIENLRKIVDHLKSLSENTRILLLSTPPLNDAAITPNSDGKPTKTNEACQIYSEACLDVCRKMNIKAIDLWSAIQKRDNWQDVCFIDGIHLSSEGSKIVLKEILNVLKGAEWEPSLYWKSMPSEFDEDSPYDPVTTDGKSTINLSSWVFPDNDKWD

SEQ ID NO: 25035 - DNA, 1108 bp, Glycine max
attcggcctccagccctttaaaccccacaaaaccctagacttcgcagcgagcagccgtcgtccgatccccacagaaacaccaaagcccgagccatgtcgtcggcgtccctcgccgccaggctcctccgccgcgccgcctcttcgtcgcgggcctccaccctatcccgacgctgcgcccactcctccgcgacgtcccgcgcgcccgtttcgcttgcccgtttccaccccgccgccgcctccccttcagggaccactgcccgccgcttcctgtcgtcgcagtccccggcgtcttcctccaagatctccccggacgagaacctgaggcgggtcatcgactccgagatcgagtgcgtcgtcgaatcggaggagggctccgcgcagcaaattgatccaccagaagacttcccctttgagataattgataaccctggtgatcagtccatcgttctcaaaagagagcttgcaggagagactattaaagctactgtctacacaaattttgatactgaggaagatttgaacaatgaggactctggtgctgagaatgatgatgactcatttaagccagcacttcagatggttgtcactgttgagaaaccaggaggctcaatcctggaatttgagtgcaactttaatgatgatgaactggcaattgaaaatatgaggttgctgaatcgcgatgccaagtttactgagaatgcatatgaggggccacaattctctgatctggacgagagcttgcagaagtcctttcacaggtatcttgaggtgagggggatcaagcactcgctgcatgactggctgcacgagtacatgatgagcaaggatgagaaggagtacgtggtttggttgaagaacatgagagagttcatcgagaaatgagtgccactgcccgtcattctcttttaatagaaagaacatgcctggtgctctatgtcaaacctgtctgatcataattgtgccttgctttctggcacaccaagtctcggtggacgctgagctggatttatattttgctggacctgtttagctgtagaaaagtttcggcatcttatctttcgatgtttaacctgtgatccgttcagatatgatcagttcatgtattttc

SEQ ID NO: 25036 - protein, 262 aa, Glycine max
MSSASLAARLLRRAASSSRASTLSRRCAHSSATSRAPVSLARFHPAAASPSGTTARRFLSSQSPASSSKISPDENLRRVIDSEIECVVESEEGSAQQIDPPEDFPFEIIDNPGDQSIVLKRELAGETIKATVYTNFDTEEDLNNEDSGAENDDDSFKPALQMVVTVEKPGGSILEFECNFNDDELAIENMRLLNRDAKFTENAYEGPQFSDLDESLQKSFHRYLEVRGIKHSLHDWLHEYMMSKDEKEYVVWLKNMREFIEK

SEQ ID NO: 25037 - DNA, 1228 bp, Glycine max
tttaagttgaacatgatggaatggccgtctttctcttttgggtatcttcccaaatcaggaaacactttctcatcttccctttcccagtttcacaccctacctcatggaaggctctgtcaacgaacgtcttcattttgggaagattggatatggatgcaatcattacaggagaagatgcaggattcgtgctccctgctgcaacgagatctactcatgccgtcactgtcataacgaggccgcgagcttgttgaagaatccctttgatcgccacgagctcgttcgccaagatgttaaacaagttatttgttcagtttgtgacactgagcaacctgttgctcaagtttgcacaaactgtggcgtcaaaatgggagaatatttctgcaacatctgcaaattcttcgatgatgatgttgagaaagaacagtttcactgtgatgattgtgggatctgcagggttggtggtcgagataattttttccactgcaagaagtgcgggtcttgttatgcagttggtctgcatgataatcatttatgtgtggagaactccatgaggcatcactgtcccatttgttacgagtacctttttgattcattgaaagatgtcattgttatgaaatgtggtcacacaatgcaccatgaatgttacctggagatgataaaaaatgacaaatattgttgtcccatatgctccaagtcagtgattgacatgtctaagacatggaagagaattgatgaagagattgaagcaaccgtcatgcctcaagattatcgaaacaggaaggtttggatactatgtaatgactgcaatgacacaacagaagtttacttccacattcttggccaaaaatgtggtcactgcagatcatataatacccgcacagttgcacctccagttcttccccaatgaccagatctcttgggttcaagaagggaacactgtcagcagaaagttaaagttagcaccctgttattactatggagggttattgaattaattgagcatcaaaagtgattggtgtattgtgtcctagatagttttcttaggttattcttcctccaacatatggagtgggattgttgtctcttggttatttattgggcaggtataaacatctttatactgtaatagagggaaaacatttttcccgtcatgaattgctggtaatagtgatgcattgatacttgatgattgattgcattgtcggccatagtggttttctataaaaag

SEQ ID NO: 25038 - protein, 267 aa, Glycine max
MEGSVNERLHFGKIGYGCNHYRRRCRIRAPCCNEIYSCRHCHNEAASLLKNPFDRHELVRQDVKQVICSVCDTEQPVAQVCTNCGVKMGEYFCNICKFFDDDVEKEQFHCDDCGICRVGGRDNFFHCKKCGSCYAVGLHDNHLCVENSMRHHCPICYEYLFDSLKDVIVMKCGHTMHHECYLEMIKNDKYCCPICSKSVIDMSKTWKRIDEEIEATVMPQDYRNRKVWILCNDCNDTTEVYFHILGQKCGHCRSYNTRTVAPPVLPQ

SEQ ID NO: 25039 - protein, 180 aa, Glycine max
MGEYFCNICKFFDDDVEKEQFHCDDCGICRVGGRDNFFHCKKCGSCYAVGLHDNHLCVENSMRHHCPICYEYLFDSLKDVIVMKCGHTMHHECYLEMIKNDKYCCPICSKSVIDMSKTWKRIDEEIEATVMPQDYRNRKVWILCNDCNDTTEVYFHILGQKCGHCRSYNTRTVAPPVLPQ

SEQ ID NO: 25040 - DNA, 569 bp, Glycine max
aaaaccctaacaagtgacctcaaatttctcaaccagaggttctgtcggtgttctctcccttccgtttcgtggcgtgtgttccaaatggcgaagcgtttgattccactgttcaatcgggttttggtggagaaaatcgtgcctccatcaaagaccaacgctggcattttgttacccgagaaatcctccaagctaaattctggaaaagttattgctgttggccctggctttcacagtaaggatgggaagctaattcctgtggctgttaaggaaggtgatactgttcttttgcctgaatatgggggaactgaggtatcatctgtttagagacgatgatattctggggacattgcatgattgatgtcaaaatgatccgcggaaatttacatgctaggtgttctgctacatttgaggagtttctttctgttctgatttttatgtatgatgtctaaatcaacattttgttgtggagcaaaacactttaactttttttttaaaaacttacaatgaatgttattttctgcaacaactgggaaaactattttgttgctcatgaaatttattgtcttaac

SEQ ID NO: 25041 - protein, 107 aa, Glycine max
KTLTSDLKFLNQRFCRCSLPSVSWRVFQMAKRLIPLFNRVLVEKIVPPSKTNAGILLPEKSSKLNSGKVIAVGPGFHSKDGKLIPVAVKEGDTVLLPEYGGTEVSSV

SEQ ID NO: 25042 - protein, 79 aa, Glycine max
MAKRLIPLFNRVLVEKIVPPSKTNAGILLPEKSSKLNSGKVIAVGPGFHSKDGKLIPVAVKEGDTVLLPEYGGTEVSSV

SEQ ID NO: 25043 - DNA, 1251 bp, Glycine max
aacgtatggatcgaaggactatgtctatgatgtctagcaaagttgatcccttccagcatctcaaactcgtccccaattccgacggcacgatcactcgccagcgtgatgacccacccatctcaccctcactcaatcccacccttcccgtcctcacccaagacgcaaccatcaaccgatcaaacaacaccttcgcccgcatattcctaccccgcgaagcactcgattcctccccctccaacaacctccctctcgtcgtttacttccacggcggcggcttcgtcctcttcagcgccgcctctgacttcttccacgacgcatgcgtaaacctcgcagacgacaccaactccatcgtcgtttccgtggagtaccgcctcgcaccggaacacagactccccgcggcgtacgaagatgccgtcgaagcgctgcactggatcaaagcacagtcaaacgattggttgcgcaaccacgcggatttttccaactgttaccttatgggaagtagcgccggagcaaacatcgcgtaccacgtgggtctacgtgtagctgcggagcttaacgtttatggagacaattatctggcgccacttaagatcagagggctgatattgagtcagccgttcttcggaggaacgaagagggtgccttctgaggtgaggcttgtggacgatccggttttgccgccgcacgtgtgtgacttactgtgggagttgtcgctgcccctgggggttgaccgtgatcacgagtattgcaatccgacggctggcgatgggcctgtgattctggatcgggtgaggcagcttgcgtggcgggtgctggtgagtgggtgccatggggacccacttctggatcatcagatggctctggcaagactgatagaggagaagggtgtggctgtggtcacccgttttgaccaagggggatgtcatgggattgaggttcgtgctcgtaagcaccaaaaccaactctataacctagtcaaagattttattgcataatttctgacatggaactaccatttctttttaagctctatactgtataattacattttcaaaatattgctacaaataaatgttattttctctcttttgatactctcctccacccctcacttagagactgtttggtattacgaaaatagagagggagattaaggaagaaagtgaaaatgagttgtttaataatgtaacggaattgaaggtgtgtataatggcacacatagtatttcagtagcctacatttttaaatttg

SEQ ID NO: 25044 - protein, 330 aa, Glycine max
RMDRRTMSMMSSKVDPFQHLKLVPNSDGTITRQRDDPPISPSLNPTLPVLTQDATINRSNNTFARIFLPREALDSSPSNNLPLVVYFHGGGFVLFSAASDFFHDACVNLADDTNSIVVSVEYRLAPEHRLPAAYEDAVEALHWIKAQSNDWLRNHADFSNCYLMGSSAGANIAYHVGLRVAAELNVYGDNYLAPLKIRGLILSQPFFGGTKRVPSEVRLVDDPVLPPHVCDLLWELSLPLGVDRDHEYCNPTAGDGPVILDRVRQLAWRVLVSGCHGDPLLDHQMALARLIEEKGVAVVTRFDQGGCHGIEVRARKHQNQLYNLVKDFIA

SEQ ID NO: 25045 - protein, 329 aa, Glycine max
MDRRTMSMMSSKVDPFQHLKLVPNSDGTITRQRDDPPISPSLNPTLPVLTQDATINRSNNTFARIFLPREALDSSPSNNLPLVVYFHGGGFVLFSAASDFFHDACVNLADDTNSIVVSVEYRLAPEHRLPAAYEDAVEALHWIKAQSNDWLRNHADFSNCYLMGSSAGANIAYHVGLRVAAELNVYGDNYLAPLKIRGLILSQPFFGGTKRVPSEVRLVDDPVLPPHVCDLLWELSLPLGVDRDHEYCNPTAGDGPVILDRVRQLAWRVLVSGCHGDPLLDHQMALARLIEEKGVAVVTRFDQGGCHGIEVRARKHQNQLYNLVKDFIA

SEQ ID NO: 25046 - protein, 324 aa, Glycine max
MSMMSSKVDPFQHLKLVPNSDGTITRQRDDPPISPSLNPTLPVLTQDATINRSNNTFARIFLPREALDSSPSNNLPLVVYFHGGGFVLFSAASDFFHDACVNLADDTNSIVVSVEYRLAPEHRLPAAYEDAVEALHWIKAQSNDWLRNHADFSNCYLMGSSAGANIAYHVGLRVAAELNVYGDNYLAPLKIRGLILSQPFFGGTKRVPSEVRLVDDPVLPPHVCDLLWELSLPLGVDRDHEYCNPTAGDGPVILDRVRQLAWRVLVSGCHGDPLLDHQMALARLIEEKGVAVVTRFDQGGCHGIEVRARKHQNQLYNLVKDFIA

SEQ ID NO: 25047 - DNA, 803 bp, Glycine max
agttggcgaatgacaatgcaatgctcgtgtcgttttggtgtcactgagtcagtctgagtaggaagaggaagccatgggcaacacatcctccatgctcacccaatacgacatcgaagaggttcagcaacattgcaaaaacgcttttacgcaacaggagatagtttctctgtaccaacgcttctgtcagctggatcgcaacaactgcggtttcatcccttccgatgaattcctctccattcccgaattcgccgtcaatcctctctctcagagtttgttgaggatgctggatgggttgaacttcaaggaatttgtggccttcttgtccgccttcagtccccgtgccactctccaccacaaaattgaattcattttcaaggtctatgacaccgattgcaatggaaaagttaccttccatgacatgttgagggctttaaggaatttgagtggacccttcatgtctgagcaacagagagaggacgttctgacacaggtccttgaggaagctggctatgcaaaggattcttcattagtcttgtctgacttcatgaagattcttggcaattcgggtttgaagatggaagtagaggttccggtggattagagtgaggataatacaattccctttttgagttttcttttttcttttttttgaggataactttccctttcagtttgatgacggaggttcttggttctggtatttagttcttcctcttaatgggtaaaagattatttgttcagtgattaattactgcaaacaaagttatggattatataatgtttaacaaatgctttcaaaactg

SEQ ID NO: 25048 - protein, 175 aa, Glycine max
MGNTSSMLTQYDIEEVQQHCKNAFTQQEIVSLYQRFCQLDRNNCGFIPSDEFLSIPEFAVNPLSQSLLRMLDGLNFKEFVAFLSAFSPRATLHHKIEFIFKVYDTDCNGKVTFHDMLRALRNLSGPFMSEQQREDVLTQVLEEAGYAKDSSLVLSDFMKILGNSGLKMEVEVPVD

SEQ ID NO: 25049 - protein, 169 aa, Glycine max
MLTQYDIEEVQQHCKNAFTQQEIVSLYQRFCQLDRNNCGFIPSDEFLSIPEFAVNPLSQSLLRMLDGLNFKEFVAFLSAFSPRATLHHKIEFIFKVYDTDCNGKVTFHDMLRALRNLSGPFMSEQQREDVLTQVLEEAGYAKDSSLVLSDFMKILGNSGLKMEVEVPVD

SEQ ID NO: 25050 - protein, 106 aa, Glycine max
MLDGLNFKEFVAFLSAFSPRATLHHKIEFIFKVYDTDCNGKVTFHDMLRALRNLSGPFMSEQQREDVLTQVLEEAGYAKDSSLVLSDFMKILGNSGLKMEVEVPVD

SEQ ID NO: 25051 - DNA, 1158 bp, Glycine max
aatcccaagagagttggaaaacaaagtatagagtgaaagaatgggtgagaaaagcaagattttgatcataggaggcaccggctacatcggcaaacatatagtggaagcaagcgcaaaggctggaaatcccacttttgctttggtgagggaatccacactctctgacccctccaaggcacaactcatccacaattttgaggctttgggcgttaatttggtccgcggggatctgtacgatcatgagaagttggtgaaagctatcaagcaagtagatgtcgtcatatccacgctgggtcacctgcagcttgccgatcagctcaagatcatcgctgccattaaggaagccggtaatgttaagaggtttttcccttcggaattcggtaacgacgtggatcgtgtccatgccgtggaaccagcaaaatctgcattagctatcaaagcccaaattcgacgcagcattgaagccgaaggcatcccctatacgtacgtttccagcaactacttcgctggctattttcttcccacattagcacaaccaggtgcttttgctccacctccacccaaagacaaagtcattatcttgggcgatggaaatcctaaagcaattttcaacaaggaagaggacattggaacctacaccatcagggctgtggatgaccctaggacattgaacaagattctctacctcaggccccctaagaacatttactcgttcaacgagcttgtggccttgtgggagaacaagattggcaagaccctcgaaaaaatttatgtaccagaggagaaggttctcaaggacatcgaagaggcacctcttccaatcaatgtggtattagcaatcaaccactcagtgttcgtgaagggtgaccacaccaactttgagattgagccatctttcggggttgaggcttctgagttgtacccggatgtcaactacaccaccgtggaagaataccttggtcagttcgcttgagaatttaaaaggagaaagatgctcttgtgatcggatatttaaataatctgagttgttgatttggagagtggaagattgtgttttatgtcaaaagatcgctatgtgatgtaatcttgcctttcatgtgtagaatgttcctacttgaatggttgaaaaataataaatgacttacgagttgagataac

SEQ ID NO: 25052 - protein, 310 aa, Glycine max
MGEKSKILIIGGTGYIGKHIVEASAKAGNPTFALVRESTLSDPSKAQLIHNFEALGVNLVRGDLYDHEKLVKAIKQVDVVISTLGHLQLADQLKIIAAIKEAGNVKRFFPSEFGNDVDRVHAVEPAKSALAIKAQIRRSIEAEGIPYTYVSSNYFAGYFLPTLAQPGAFAPPPPKDKVIILGDGNPKAIFNKEEDIGTYTIRAVDDPRTLNKILYLRPPKNIYSFNELVALWENKIGKTLEKIYVPEEKVLKDIEEAPLPINVVLAINHSVFVKGDHTNFEIEPSFGVEASELYPDVNYTTVEEYLGQFA

SEQ ID NO: 25053 - DNA, 1179 bp, Glycine max
attttcatttccccactctgtttactccgtgtccgcagaagatggaaagtggattacctttgcttaattatctcttgcagcagactctcagaaccatttgcacttctcccaattcttccactccttctaagtgggtatatgctgtcttctggaggatattacctcgcaactttcctccaccaaggtgggaatttggaggaactgctcttgatctctccaaaggaaataaaaggaactggatccttgtctgggaagatgggttctgcgattttaacgaatgcgagcaaaggaagagtggtagtggttacttgaacggtagatttggagctgacgtattcttcaaaatgtcgcatgaggtttacaattatggagagggactcgtgggaaaagttgccgcagataatagtcacaaatgggtttacaatgagagtcacaatgagtgtgaatctagctatattgcttcatggaatgcttcagtcgaacctcaaccaaaggcgtgggagtttcagttcaattcaggcattcagagtatagtcataatcgccgtcagagaaggcgtagtgcaattgggttcttttaacaagatatcagaggacctgaatctggtgatcagcatacagaggcaattcagctaccttcagagcatacctggtgtgtttggtattcaaagaccatacctacctcttcaacatccatacattgtgaagccaagtttcatagaaaacaatgcaatgactctatatgatatggggtggaacaccaaccctcagaatggagcaccaggcccatctctttgttcaggttctccttctctaccactaccaaccatgccctgtagttttggagctttgctatcaaagttaccatctggaatcccaccctataattccactcaagtccttgatgcagggacacaaagcaccattgagagagtgaagatagaggattgtgaatttcatcctacccttgatgacgatcacaaaggaagaaaggtcggttccctgaacaagtagcatggatttggaattggaagattaattaattaagagacaggaaccactttgaccataatgactcctaaatcatagtcagtatgttaagaaatggttagttatttattttctttcacttggccacaatgtgtattgtggtatgtttattggtggccgacaacctatc

SEQ ID NO: 25054 - protein, 336 aa, Glycine max
FHFPTLFTPCPQKMESGLPLLNYLLQQTLRTICTSPNSSTPSKWVYAVFWRILPRNFPPPRWEFGGTALDLSKGNKRNWILVWEDGFCDFNECEQRKSGSGYLNGRFGADVFFKMSHEVYNYGEGLVGKVAADNSHKWVYNESHNECESSYIASWNASVEPQPKAWEFQFNSGIQSIVIIAVREGVVQLGSFNKISEDLNLVISIQRQFSYLQSIPGVFGIQRPYLPLQHPYIVKPSFIENNAMTLYDMGWNTNPQNGAPGPSLCSGSPSLPLPTMPCSFGALLSKLPSGIPPYNSTQVLDAGTQSTIERVKIEDCEFHPTLDDDHKGRKVGSLNK

SEQ ID NO: 25055 - protein, 323 aa, Glycine max
MESGLPLLNYLLQQTLRTICTSPNSSTPSKWVYAVFWRILPRNFPPPRWEFGGTALDLSKGNKRNWILVWEDGFCDFNECEQRKSGSGYLNGRFGADVFFKMSHEVYNYGEGLVGKVAADNSHKWVYNESHNECESSYIASWNASVEPQPKAWEFQFNSGIQSIVIIAVREGVVQLGSFNKISEDLNLVISIQRQFSYLQSIPGVFGIQRPYLPLQHPYIVKPSFIENNAMTLYDMGWNTNPQNGAPGPSLCSGSPSLPLPTMPCSFGALLSKLPSGIPPYNSTQVLDAGTQSTIERVKIEDCEFHPTLDDDHKGRKVGSLNK

SEQ ID NO: 25056 - protein, 222 aa, Glycine max
MSHEVYNYGEGLVGKVAADNSHKWVYNESHNECESSYIASWNASVEPQPKAWEFQFNSGIQSIVIIAVREGVVQLGSFNKISEDLNLVISIQRQFSYLQSIPGVFGIQRPYLPLQHPYIVKPSFIENNAMTLYDMGWNTNPQNGAPGPSLCSGSPSLPLPTMPCSFGALLSKLPSGIPPYNSTQVLDAGTQSTIERVKIEDCEFHPTLDDDHKGRKVGSLNK

SEQ ID NO: 25057 - DNA, 1696 bp, Glycine max
attttcaacttatccatgtactggataattgtgatacacgtgttcaattgcattttaggatgagaatgtgcaatctgatgatgaaagtgaggatgatgattacaccgggacaaagaggaatgaaaatgctccaagtgacgattctggagaggaagacgatgataggcatgcaaggatgctacaagcaattactggcatgccgagtgaggcttttgaagagaataagaagaaaaagaaggtgatgaaggacactgttataccagagctatatccagagtctgaatataatcctagtcgtgatgttgtggatggtgacggacgcattagcatagaagacctactgaatcctcttcgtgaaaaatctggttatggaaaacttaggaagagatatcaacaaattgagaagaatgctaaaattattcatgtgccactttcaaaggcagttcaagctaaggtagagaggaaggcagcatatgaaatatcaaagaaagatgtcaccaagtggcagcatattattcagagaaatagagaggccccaactattttctttgatgaaaatgtaaatttagggttttcaactgtaggagcaatagcttctgaatttgaacccagaactgaatttgagaagaaaattgctgcactagtttatgatgaggaagttatggaagcttataaaaaggatggttctaagcttcttgaaatgaacaaggtctctattgaagatgagaaggataggcaaaatcggattgctaaaatgcggagccttctttttcgtcatgaaatgaaggcaaagcatattaaaaagattaagtctagaacatttcatcgtttgttgaagaaagatagattaaaggcagaagcttctcagatgcaaatggaccctgaagctgctaaagaatatgccatgaaacaagagcgtcaaagggctgaggaacgcatgacgctgaaacacaaaaaccataatccgtgggctgcacgtattatccagcgtggtttacataaccaagatgaaggaactcgtgctgccatacatgaacaacttcaaaggcatgctgaattgactagaaaaatgaagtctatgaagggtagcagcagtagcagtgaagatagcagtgatgaggatgaggatgacaactctgctggttctgatcaggatagggattacaagattttgggaaaagctaaagaaaaaacagtgaaagtgttggaggaagaggatgaagttcccaaatcaggattgctttctttgccttttatgaggcgtggattggagaaaagaaaagaggcagctgttgaagaagccaaccttgctttccacgaatatgaagattccttgaagaagttggagaatactggtggctcagaagatctgaaagctgcttctaccagtggcagaagagtatttggaatggctaaagcccagatgtctgataccagtaataaggtaaaatcagataattgctatgatggcagtgatagtgaggatgacttggggatcagcaaaagtggcaatatagagaatgagggaagcgaccttttgcatacggatgtaaacaaggatttggttgtaattcaagatgacactgatactcaccgggaatcagtttttaagaatattgatgagattattaaaaatcctgggccaaaaactacatatgatgtttccatatttgtttcagatacatggaaaaagcag

SEQ ID NO: 25058 - protein, 507 aa, Glycine max
MLQAITGMPSEAFEENKKKKKVMKDTVIPELYPESEYNPSRDVVDGDGRISIEDLLNPLREKSGYGKLRKRYQQIEKNAKIIHVPLSKAVQAKVERKAAYEISKKDVTKWQHIIQRNREAPTIFFDENVNLGFSTVGAIASEFEPRTEFEKKIAALVYDEEVMEAYKKDGSKLLEMNKVSIEDEKDRQNRIAKMRSLLFRHEMKAKHIKKIKSRTFHRLLKKDRLKAEASQMQMDPEAAKEYAMKQERQRAEERMTLKHKNHNPWAARIIQRGLHNQDEGTRAAIHEQLQRHAELTRKMKSMKGSSSSSEDSSDEDEDDNSAGSDQDRDYKILGKAKEKTVKVLEEEDEVPKSGLLSLPFMRRGLEKRKEAAVEEANLAFHEYEDSLKKLENTGGSEDLKAASTSGRRVFGMAKAQMSDTSNKVKSDNCYDGSDSEDDLGISKSGNIENEGSDLLHTDVNKDLVVIQDDTDTHRESVFKNIDEIIKNPGPKTTYDVSIFVSDTWKKQ

SEQ ID NO: 25059 - protein, 500 aa, Glycine max
MPSEAFEENKKKKKVMKDTVIPELYPESEYNPSRDVVDGDGRISIEDLLNPLREKSGYGKLRKRYQQIEKNAKIIHVPLSKAVQAKVERKAAYEISKKDVTKWQHIIQRNREAPTIFFDENVNLGFSTVGAIASEFEPRTEFEKKIAALVYDEEVMEAYKKDGSKLLEMNKVSIEDEKDRQNRIAKMRSLLFRHEMKAKHIKKIKSRTFHRLLKKDRLKAEASQMQMDPEAAKEYAMKQERQRAEERMTLKHKNHNPWAARIIQRGLHNQDEGTRAAIHEQLQRHAELTRKMKSMKGSSSSSEDSSDEDEDDNSAGSDQDRDYKILGKAKEKTVKVLEEEDEVPKSGLLSLPFMRRGLEKRKEAAVEEANLAFHEYEDSLKKLENTGGSEDLKAASTSGRRVFGMAKAQMSDTSNKVKSDNCYDGSDSEDDLGISKSGNIENEGSDLLHTDVNKDLVVIQDDTDTHRESVFKNIDEIIKNPGPKTTYDVSIFVSDTWKKQ

SEQ ID NO: 25060 - protein, 485 aa, Glycine max
MKDTVIPELYPESEYNPSRDVVDGDGRISIEDLLNPLREKSGYGKLRKRYQQIEKNAKIIHVPLSKAVQAKVERKAAYEISKKDVTKWQHIIQRNREAPTIFFDENVNLGFSTVGAIASEFEPRTEFEKKIAALVYDEEVMEAYKKDGSKLLEMNKVSIEDEKDRQNRIAKMRSLLFRHEMKAKHIKKIKSRTFHRLLKKDRLKAEASQMQMDPEAAKEYAMKQERQRAEERMTLKHKNHNPWAARIIQRGLHNQDEGTRAAIHEQLQRHAELTRKMKSMKGSSSSSEDSSDEDEDDNSAGSDQDRDYKILGKAKEKTVKVLEEEDEVPKSGLLSLPFMRRGLEKRKEAAVEEANLAFHEYEDSLKKLENTGGSEDLKAASTSGRRVFGMAKAQMSDTSNKVKSDNCYDGSDSEDDLGISKSGNIENEGSDLLHTDVNKDLVVIQDDTDTHRESVFKNIDEIIKNPGPKTTYDVSIFVSDTWKKQ

SEQ ID NO: 25061 - DNA, 1260 bp, Glycine max
attttcactaaactaacttcctcaaatcaattacaatttttggacattttctctctcaaccctccaacaatattcccttctctctcatcattctcatgacataatcacatcacacaattgatttcctcaattacttctaatccacaatcaaatagcgcagcatggaagaatctgcgccccaacccaaaccaatcttacagaaaccccccggttaccgggaccccaactccaaaccgccaccacctcctcctcgaaagctcatgctgcccccccccttccagcccaaacggaagcgtcgcaacttctgccgcatatgctgctgtaccttctgcatcctcatcctcatcctcctccttgtgctcgttatcgccgccgctctcttctacctcatctacgacccctccctccctgagtttcacctcggctccttccgcgtccccaaacttaacgtcaccaatgccgccgacggggcctacctggctgccgacacggccgcacgtgtcgaggtcaagaaccgcagcggcaggatgtcgtggcatttctcccagagccgcttctcggtttcggcggagaacggggacctgaatctggggtccacgaaggtggccgggttcacggtgaaggagaagggcgtgaccgagctgaaggcggagacgagcgtaaaggagctggcattgaatgagaagcagaggagaaggcttaagagcgctgtggagagcaaagcgttggtccccaccgtggaggttcgaaccaaaaccggtgttggcttggagggttggaactcaccctccatctccgtcactgtcgtctgcggagatgccaccgtgagacaactcgataaaggagaccctcccctttgctccatcactctcctcaaatggatcaaaatacgatgagttggggatgtgttctgccagattgatgtccactgcgcgccatttagatcgaggtgaagattttgtgcgcttgtatctaaattatttttatattcttcttttttctctttacaaagtaaaggaagaatgaaaatgtaaattctttgcttagaaaaaagaaaagagtctcttctacagcagatcaacttgctgctggttctcccaaatgcgatgtgggatgcacataagaccaatacgtgaggttgtatttatcaaatatttattgttttttatgtggctggtgatcgtaggaatcgtaagtactcgagaaaatgttctctgtctttctctttttaataagaagaaaaccacaatgtgatgaggc

SEQ ID NO: 25062 - protein, 244 aa, Glycine max
MEESAPQPKPILQKPPGYRDPNSKPPPPPPRKLMLPPPFQPKRKRRNFCRICCCTFCILILILLLVLVIAAALFYLIYDPSLPEFHLGSFRVPKLNVTNAADGAYLAADTAARVEVKNRSGRMSWHFSQSRFSVSAENGDLNLGSTKVAGFTVKEKGVTELKAETSVKELALNEKQRRRLKSAVESKALVPTVEVRTKTGVGLEGWNSPSISVTVVCGDATVRQLDKGDPPLCSITLLKWIKIR

SEQ ID NO: 25063 - protein, 211 aa, Glycine max
MLPPPFQPKRKRRNFCRICCCTFCILILILLLVLVIAAALFYLIYDPSLPEFHLGSFRVPKLNVTNAADGAYLAADTAARVEVKNRSGRMSWHFSQSRFSVSAENGDLNLGSTKVAGFTVKEKGVTELKAETSVKELALNEKQRRRLKSAVESKALVPTVEVRTKTGVGLEGWNSPSISVTVVCGDATVRQLDKGDPPLCSITLLKWIKIR

SEQ ID NO: 25064 - protein, 122 aa, Glycine max
MSWHFSQSRFSVSAENGDLNLGSTKVAGFTVKEKGVTELKAETSVKELALNEKQRRRLKSAVESKALVPTVEVRTKTGVGLEGWNSPSISVTVVCGDATVRQLDKGDPPLCSITLLKWIKIR

SEQ ID NO: 25065 - DNA, 1232 bp, Glycine max
ttatttttttttaccaccatgtccgagtttcgaaaacaaccggcttctagaccgaagcaaaagcttcgccaacagcactcctcgaaagagtcaaaggcgatgagaaaacttcgcatcatttgcgacgatcctgaggctactgattcatccgaagatgagtctgagagggttcagaagccgagaagagtaaaaagaagcgtgttggagatgtctcttccccctctccctcaaacattcaccaccactactcctgatactagctcctgtgaggtgaatagcagcaaaaatgcaacattgaaggtttgcactgaaggtcaaccccagagcaagaagagggttttgactcacactccatcaacgagaaggagcacttgtgggaaatatagaggtgttaggcagagaaaatggggtaaatgggctgcagaaattcgtgacccgtttcagtgtactcgtatatggcttggcactttcaacactgcagaagaggcttccaaagcctatgaaaccagaaggcttgagtttgaagccatggcaaagactcaaactctaaaaactggttctgaacctttgtctacaacttctgataagagtaactgctgtaactcctctgctgctgccgccgccgatgtgtctgtgtctgaaaagttttctactacttctgatgactcggaagagagtatgttgtcacacaattcaccatcctctgtgcttgagttggatacctcggcttccaaatccgttgagaagggtaatggttcaactgaggaagctactggggctaataatttggtggctgaacttgcagggcttgagataccagatttgagtctgttgaacctgccaccaccaccatctgttgctgcggatgctgctgggattgagccaaattttgggcttgattttgattggctgtcgtttaatgattatggacagggttttgaggatttcggtggcttggagaacattcatattggtgggtttgatgacactgagcctagtgagcttcctgacttcgattttggtgattttggtgctgatgagtttgctggttggattgaggaacccctcaatataccttgtgcctaagttttgttatttgttatggcctcaagttctgttagttttgttttttgttttatttattatttgtgagatctcaggaatttgcaataccaatttctgagcgagtgaatgttactttatgcgttttatattttcatttgtttttgagg

SEQ ID NO: 25066 - protein, 361 aa, Glycine max
LFFFTTMSEFRKQPASRPKQKLRQQHSSKESKAMRKLRIICDDPEATDSSEDESERVQKPRRVKRSVLEMSLPPLPQTFTTTTPDTSSCEVNSSKNATLKVCTEGQPQSKKRVLTHTPSTRRSTCGKYRGVRQRKWGKWAAEIRDPFQCTRIWLGTFNTAEEASKAYETRRLEFEAMAKTQTLKTGSEPLSTTSDKSNCCNSSAAAAADVSVSEKFSTTSDDSEESMLSHNSPSSVLELDTSASKSVEKGNGSTEEATGANNLVAELAGLEIPDLSLLNLPPPPSVAADAAGIEPNFGLDFDWLSFNDYGQGFEDFGGLENIHIGGFDDTEPSELPDFDFGDFGADEFAGWIEEPLNIPCA

SEQ ID NO: 25067 - protein, 355 aa, Glycine max
MSEFRKQPASRPKQKLRQQHSSKESKAMRKLRIICDDPEATDSSEDESERVQKPRRVKRSVLEMSLPPLPQTFTTTTPDTSSCEVNSSKNATLKVCTEGQPQSKKRVLTHTPSTRRSTCGKYRGVRQRKWGKWAAEIRDPFQCTRIWLGTFNTAEEASKAYETRRLEFEAMAKTQTLKTGSEPLSTTSDKSNCCNSSAAAAADVSVSEKFSTTSDDSEESMLSHNSPSSVLELDTSASKSVEKGNGSTEEATGANNLVAELAGLEIPDLSLLNLPPPPSVAADAAGIEPNFGLDFDWLSFNDYGQGFEDFGGLENIHIGGFDDTEPSELPDFDFGDFGADEFAGWIEEPLNIPCA

SEQ ID NO: 25068 - protein, 328 aa, Glycine max
MRKLRIICDDPEATDSSEDESERVQKPRRVKRSVLEMSLPPLPQTFTTTTPDTSSCEVNSSKNATLKVCTEGQPQSKKRVLTHTPSTRRSTCGKYRGVRQRKWGKWAAEIRDPFQCTRIWLGTFNTAEEASKAYETRRLEFEAMAKTQTLKTGSEPLSTTSDKSNCCNSSAAAAADVSVSEKFSTTSDDSEESMLSHNSPSSVLELDTSASKSVEKGNGSTEEATGANNLVAELAGLEIPDLSLLNLPPPPSVAADAAGIEPNFGLDFDWLSFNDYGQGFEDFGGLENIHIGGFDDTEPSELPDFDFGDFGADEFAGWIEEPLNIPCA

SEQ ID NO: 25069 - DNA, 2318 bp, Glycine max
ctcttctctctttctgtgtctcaaacccaaagaacacggagttggcggcgaccctttctctctctgatttcgatcatggcagctgttgctccttcttctgacaaaactgcagatttattgcagaatttgaccctggactctgagtccaaacccattggagttgctgagcctgcgaagaagaatggacccactttttccagtggtgcagctaaagggagggccaagccattcaatccaaattcatgctttgttccaaatggatacccttctgcgtattattatggaggttatgatgggcaaggtgattggaatgcttattccagatatatgaaccttgatggagggatggctcaaggtgtttatggggataactgctcttatatgtaccatcaaggttatggttatgcaccatatggaacatatgcatctcccaattcctcttctccaatgattcaacaggatggtcagcagtacgggctgcaacagtaccagtatccatgttcttattacaaatctccagcttctgctgatgtgtcatttactaccaacaaaatcagtcttccacaaggagaaatatcaactactgttgatgttgctgattgtgtttcttcaacaaatgctatgaataaaggaaacaatgttaacgtgggcaatagtaatttcactgataaaaatgggttaaatccatttttaactagttcacagcacacatctttgaatacaaatgattcttatcaaggggctagcttgccagcttatgctcctttgtcaggatatcagggtccaagaagcacccatggtacacaactgccagtcccttcggatgcgtccttagtatctgacggacaggccaaacatggagccaaggttggattatcttcatcagtagtgcctgtcaaagatttttcatctcaaagaaatcaaagacttcctcagccacttccccaatactcaaacatgagtggttccagacatccttctggacttgacctggtttctggattcatgaacgggatgtatccgagcaacaggatgtacagccaatatggaaacacattcaggcctaattctcatttcggatctgctgcgtatggatctagaatgggctctttcgatagcaaacataatggtgcagggtatggctgcggtcttaaccattttaaaaaaagtatggatggtttcagcgagctaaataagggacccagagctgccaagagttctgataataaaaacatcaaaagtcttggacctgtcacattattacacaagggacagaacctttcagtgaagagtgacaacaaagaagttcctttggttcccgacaaggaacagtacaatgggaaagatttggctgagaattattctgatgccaagttttttgtcatcaaatcctatagtgaggatgatattcataaaagcataaaatacagcgcttgggcaagcacccctaacggcaacaaaaagctggattcggcatatcaggaagccaaggagaagcccggtggctgtcccatatttttgttattttcggtcaacactagtgggcaatttgttggtttagccgagatgttgggtcctgttgattttggtaaaaccgtagattattggcagcaggacaggtggactggttgcttttctgtgaagtggcatgtcatcaaggatatcccaaatagcgtgttgaggcacataacgcttgaaaacaatgaaaacaaacctgtaacaaatagtagggatactcaggaggttaagtttgagaagggtgttcaacttgtcaaaatattcaaggagcattcaagccaaacatgcatcttggatgattttgggttctacgaggatcgtgaaaaggtgactcaggagaaaaagtctaaggaacagcagttaccaaaacagatcagcaagcccagtgatttcacatttgggacggttacatttccgaagtctcttgatgcaaccttgatcaatgaatctgctacagcaaatgcagcagagggaagaatgaatgcagaagggctgttagaagggaatggatcgactacagcacttgaagatgcttctaagagctgttaaagcaatgatagtcattggctgatttttgttttggtttgtttattccctattgctttagtcatctagtgagtggtggtgtttttcagtttcaaattatctgttatgtgatcttggtcttggtttggagtggagcatctaattttagcatttttctttggtctcgttcaataaaatgtgattgtttttagtagttataagtttcatggtaggtcaaaggaagttttaatcaaaatatattgtgttattgtagt

SEQ ID NO: 25070 - protein, 688 aa, Glycine max
LFSLSVSQTQRTRSWRRPFLSLISIMAAVAPSSDKTADLLQNLTLDSESKPIGVAEPAKKNGPTFSSGAAKGRAKPFNPNSCFVPNGYPSAYYYGGYDGQGDWNAYSRYMNLDGGMAQGVYGDNCSYMYHQGYGYAPYGTYASPNSSSPMIQQDGQQYGLQQYQYPCSYYKSPASADVSFTTNKISLPQGEISTTVDVADCVSSTNAMNKGNNVNVGNSNFTDKNGLNPFLTSSQHTSLNTNDSYQGASLPAYAPLSGYQGPRSTHGTQLPVPSDASLVSDGQAKHGAKVGLSSSVVPVKDFSSQRNQRLPQPLPQYSNMSGSRHPSGLDLVSGFMNGMYPSNRMYSQYGNTFRPNSHFGSAAYGSRMGSFDSKHNGAGYGCGLNHFKKSMDGFSELNKGPRAAKSSDNKNIKSLGPVTLLHKGQNLSVKSDNKEVPLVPDKEQYNGKDLAENYSDAKFFVIKSYSEDDIHKSIKYSAWASTPNGNKKLDSAYQEAKEKPGGCPIFLLFSVNTSGQFVGLAEMLGPVDFGKTVDYWQQDRWTGCFSVKWHVIKDIPNSVLRHITLENNENKPVTNSRDTQEVKFEKGVQLVKIFKEHSSQTCILDDFGFYEDREKVTQEKKSKEQQLPKQISKPSDFTFGTVTFPKSLDATLINESATANAAEGRMNAEGLLEGNGSTTALEDASKSC

SEQ ID NO: 25071 - protein, 663 aa, Glycine max
MAAVAPSSDKTADLLQNLTLDSESKPIGVAEPAKKNGPTFSSGAAKGRAKPFNPNSCFVPNGYPSAYYYGGYDGQGDWNAYSRYMNLDGGMAQGVYGDNCSYMYHQGYGYAPYGTYASPNSSSPMIQQDGQQYGLQQYQYPCSYYKSPASADVSFTTNKISLPQGEISTTVDVADCVSSTNAMNKGNNVNVGNSNFTDKNGLNPFLTSSQHTSLNTNDSYQGASLPAYAPLSGYQGPRSTHGTQLPVPSDASLVSDGQAKHGAKVGLSSSVVPVKDFSSQRNQRLPQPLPQYSNMSGSRHPSGLDLVSGFMNGMYPSNRMYSQYGNTFRPNSHFGSAAYGSRMGSFDSKHNGAGYGCGLNHFKKSMDGFSELNKGPRAAKSSDNKNIKSLGPVTLLHKGQNLSVKSDNKEVPLVPDKEQYNGKDLAENYSDAKFFVIKSYSEDDIHKSIKYSAWASTPNGNKKLDSAYQEAKEKPGGCPIFLLFSVNTSGQFVGLAEMLGPVDFGKTVDYWQQDRWTGCFSVKWHVIKDIPNSVLRHITLENNENKPVTNSRDTQEVKFEKGVQLVKIFKEHSSQTCILDDFGFYEDREKVTQEKKSKEQQLPKQISKPSDFTFGTVTFPKSLDATLINESATANAAEGRMNAEGLLEGNGSTTALEDASKSC

SEQ ID NO: 25072 - protein, 579 aa, Glycine max
MNLDGGMAQGVYGDNCSYMYHQGYGYAPYGTYASPNSSSPMIQQDGQQYGLQQYQYPCSYYKSPASADVSFTTNKISLPQGEISTTVDVADCVSSTNAMNKGNNVNVGNSNFTDKNGLNPFLTSSQHTSLNTNDSYQGASLPAYAPLSGYQGPRSTHGTQLPVPSDASLVSDGQAKHGAKVGLSSSVVPVKDFSSQRNQRLPQPLPQYSNMSGSRHPSGLDLVSGFMNGMYPSNRMYSQYGNTFRPNSHFGSAAYGSRMGSFDSKHNGAGYGCGLNHFKKSMDGFSELNKGPRAAKSSDNKNIKSLGPVTLLHKGQNLSVKSDNKEVPLVPDKEQYNGKDLAENYSDAKFFVIKSYSEDDIHKSIKYSAWASTPNGNKKLDSAYQEAKEKPGGCPIFLLFSVNTSGQFVGLAEMLGPVDFGKTVDYWQQDRWTGCFSVKWHVIKDIPNSVLRHITLENNENKPVTNSRDTQEVKFEKGVQLVKIFKEHSSQTCILDDFGFYEDREKVTQEKKSKEQQLPKQISKPSDFTFGTVTFPKSLDATLINESATANAAEGRMNAEGLLEGNGSTTALEDASKSC

SEQ ID NO: 25073 - DNA, 550 bp, Glycine max
acggcactaccaccaccagtacgcgccagcttctcggttctcgtctaggagcaacaacaatggccatcacttctctgcagctgccctctcagatccgcggccatactcctgctagaaatggccgcgcccgcacaaggtcacgggctactccgcttagctgcaaacacaaccagtcaaccattgtccaagtagccagcaggacatctcgtagaagtaccctggcatacatttcgtctgccttctttgcaatgttcctggtggctgaacatgcagaagctagaacctcgagacaagagaacaagaggaaagtaatggagaagctggagaaggtccgggaggaggccctgcgctcaaaggagaagaaagaggacacgagcaaggagtctgtggcgaacttgttgatgcctcctactttggtcgatgcttacatctgaaaaggcatcgtgtcgttgtaaattttatgtttatgctaagtgctacttaacactattctgaatgtactaataacaattggaaccaagcaaccttgcaaaagaactttccggtgtcc

SEQ ID NO: 25074 - protein, 143 aa, Glycine max
GTTTTSTRQLLGSRLGATTMAITSLQLPSQIRGHTPARNGRARTRSRATPLSCKHNQSTIVQVASRTSRRSTLAYISSAFFAMFLVAEHAEARTSRQENKRKVMEKLEKVREEALRSKEKKEDTSKESVANLLMPPTLVDAYI

SEQ ID NO: 25075 - protein, 124 aa, Glycine max
MAITSLQLPSQIRGHTPARNGRARTRSRATPLSCKHNQSTIVQVASRTSRRSTLAYISSAFFAMFLVAEHAEARTSRQENKRKVMEKLEKVREEALRSKEKKEDTSKESVANLLMPPTLVDAYI

SEQ ID NO: 25076 - DNA, 2140 bp, Glycine max
catccaacgtcatcttatctctttatctatttgggaggaattacgattttgggaaggatattttgactatttaatggagcaatcttcaaacaagtctgccaactatgcatctttggtgacagctcagcttgttgtgttggcatcacacatggctgggctgggacttcctgataatgatgcttggtacatgatcgaaacaattgcagagaggaatagcatcggatccaagcaatttataaagatcagagggttcttgtctcatatccagcaattacacaatggatactggggaatcacctcaatgaaggcacagtctgtgttattacttgcactgccatccccgcattctaaagataccaaagatgagaaccagcaaccctctgaggcaactggtgttggtagaaactgggtgcagagtatgttcagccgaaataaaacaactagatccagctcatttagtcacgttcatagatggacgtctgatggaggaaactcagctacaaatgagaatgggacttctcgcaaacaagatctgtcaagtggtggccagaaaaagcttcataccaatgttcgcatacttaggggtcataatggtgccattactgctctccattgtgttacaaaaagagaagtgtgggatttggtcggtgatcgtgaagatgctggtttctttattagtggaagcacagactgctcagttaagatctgggatcctagtcttcgtggttctgaactcagggcaactttaaaagggcatactagaaccatccgtgccataagttcagatagggggaaggtggtgtcaggatctgatgatcagtctgttttggtgtgggataagcaaacaactcaacttctagaagagcttaaaggccatgatggaccggtcagctgtgtgcgcatgctttctggggagcgtgtgttaactgcatcccatgatggcactgtgaagatgtgggatgtaagaacagatagatgtgttgcaactgttggtcgttgctctagtgctgttctatgcatggaatatgatgacaatgtgggagtcttggctgctgctggaagagatgtggttgctaacatatgggatatccgtgctagtaggcagatgcataaactttcaggacatacacaatggatacgctaaacaaggaaaaacatgcattcttactcatttacaaatgtaaacaaataatacatgatcatatacaaaaacaaaatgcaggtccataagaatggttggtgacactgtgattactggtagtgatgattggacggcaagagtatggtctgtttctcgaggaacatgtgatactgtcttagcatgccatgctggaccaatattatgtgttgagtattcttctttagatagaggaataattacaggtgcttcatctccaattttttgctatgctgccatttgatatcttttattttgttggttcttggacttgcttgaagagaaatttccgccatgctttttatatccagtgcttactaaaatgttaaatttccattccagggtccactgatggcctgctacgtttttgggaaaatgatgatggaggcatacattgtgcaaaaaatgttacaattcacaatgctgccatattatctatcaatgctggggagcactggttaggcattggagcagctgataattctttgtcactctttcaccggccccaagaaagacttggtggtttttctggcactgggtccaagatggctgattggcagctttacagaacaccacagaaaacagttgctatggttagatgtgttgcttcagacttggaaaggaaaaggatatgcagcggtggtcgcaatgggcttctaaggctgtgggatgcaactattaatatttgagcttgatcgttaaatgcatgttcacgtttgtaaattctaacaattttataggtgaaaaacaaggtacttaatgaacaggggggttctccaatattttttgttttatttcccttatagtatataatgtgcaagatatgtctgatgagtccaacttgtgaacaattgtaattttgtggttagaggtttctgtatcctgaatgtacagactgctacgaagaacaagttttgttagtgtgtggatagatttagatttaatgtctaccattaaagccac

SEQ ID NO: 25077 - protein, 380 aa, Glycine max
IQRHLISLSIWEELRFWEGYFDYLMEQSSNKSANYASLVTAQLVVLASHMAGLGLPDNDAWYMIETIAERNSIGSKQFIKIRGFLSHIQQLHNGYWGITSMKAQSVLLLALPSPHSKDTKDENQQPSEATGVGRNWVQSMFSRNKTTRSSSFSHVHRWTSDGGNSATNENGTSRKQDLSSGGQKKLHTNVRILRGHNGAITALHCVTKREVWDLVGDREDAGFFISGSTDCSVKIWDPSLRGSELRATLKGHTRTIRAISSDRGKVVSGSDDQSVLVWDKQTTQLLEELKGHDGPVSCVRMLSGERVLTASHDGTVKMWDVRTDRCVATVGRCSSAVLCMEYDDNVGVLAAAGRDVVANIWDIRASRQMHKLSGHTQWIR

SEQ ID NO: 25078 - protein, 356 aa, Glycine max
MEQSSNKSANYASLVTAQLVVLASHMAGLGLPDNDAWYMIETIAERNSIGSKQFIKIRGFLSHIQQLHNGYWGITSMKAQSVLLLALPSPHSKDTKDENQQPSEATGVGRNWVQSMFSRNKTTRSSSFSHVHRWTSDGGNSATNENGTSRKQDLSSGGQKKLHTNVRILRGHNGAITALHCVTKREVWDLVGDREDAGFFISGSTDCSVKIWDPSLRGSELRATLKGHTRTIRAISSDRGKVVSGSDDQSVLVWDKQTTQLLEELKGHDGPVSCVRMLSGERVLTASHDGTVKMWDVRTDRCVATVGRCSSAVLCMEYDDNVGVLAAAGRDVVANIWDIRASRQMHKLSGHTQWIR

SEQ ID NO: 25079 - protein, 331 aa, Glycine max
MAGLGLPDNDAWYMIETIAERNSIGSKQFIKIRGFLSHIQQLHNGYWGITSMKAQSVLLLALPSPHSKDTKDENQQPSEATGVGRNWVQSMFSRNKTTRSSSFSHVHRWTSDGGNSATNENGTSRKQDLSSGGQKKLHTNVRILRGHNGAITALHCVTKREVWDLVGDREDAGFFISGSTDCSVKIWDPSLRGSELRATLKGHTRTIRAISSDRGKVVSGSDDQSVLVWDKQTTQLLEELKGHDGPVSCVRMLSGERVLTASHDGTVKMWDVRTDRCVATVGRCSSAVLCMEYDDNVGVLAAAGRDVVANIWDIRASRQMHKLSGHTQWIR

SEQ ID NO: 25080 - DNA, 938 bp, Glycine max
tacatggatgttgtagggaagctcaagcaccccaacattgttagactaagagcttattattacgctaaggaagaaaaacttcttgtctatgattatctccccaatggaagcttgcatgctcttcttcatgggaaccggggaccaggaaggattccgttagattggaccacgagaataagcttgatgttaggtgcagctagaggtttggcacggattcatgcggagtataacgcatcaaagatacctcacgggaacgtgaaatcttccaacgtgcttcttgacaaaaacggcgtcgctttaatatctgactttggcctttcgctgcttttaaaccctgttcacgcgattgcaaggttgggagggtacagggcgccggagcaagttgaggtgaagaggctgtcgcaggaggctgacgtgtacggcttcggggtgctactgttggaggttctgacgggtcgggctccgtcgaaggagtacacttctccggcgcgtgaggctgaggtggatcttccgaagtgggtgaaatcggtggtgaaagaagagtggacttcggaggtgtttgaccaggagctgctgaggtacaagaacatagaggatgagttggtggcgatgctgcacgtgggactggcgtgcgtggcggcgcaggcggagaagaggccgtgcatgttggaggttgtgaagatgattgaggagatcagagtggaagagtctcctctgggagatgattacgatgaggctcgctcgcgcacttcgctttcgccttcccttgccaccaccgaagacaacctcgcttgattattgtctcatgcatgcttgtcatttttagttccattgtgtgttagttaccgttttctttctaaaactttgctgttcttgcacttgtcttcagatatcactcatctattcaattaatccatggccatgacccgagtttgtgt

SEQ ID NO: 25081 - protein, 264 aa, Glycine max
YMDVVGKLKHPNIVRLRAYYYAKEEKLLVYDYLPNGSLHALLHGNRGPGRIPLDWTTRISLMLGAARGLARIHAEYNASKIPHGNVKSSNVLLDKNGVALISDFGLSLLLNPVHAIARLGGYRAPEQVEVKRLSQEADVYGFGVLLLEVLTGRAPSKEYTSPAREAEVDLPKWVKSVVKEEWTSEVFDQELLRYKNIEDELVAMLHVGLACVAAQAEKRPCMLEVVKMIEEIRVEESPLGDDYDEARSRTSLSPSLATTEDNLA

SEQ ID NO: 25082 - protein, 263 aa, Glycine max
MDVVGKLKHPNIVRLRAYYYAKEEKLLVYDYLPNGSLHALLHGNRGPGRIPLDWTTRISLMLGAARGLARIHAEYNASKIPHGNVKSSNVLLDKNGVALISDFGLSLLLNPVHAIARLGGYRAPEQVEVKRLSQEADVYGFGVLLLEVLTGRAPSKEYTSPAREAEVDLPKWVKSVVKEEWTSEVFDQELLRYKNIEDELVAMLHVGLACVAAQAEKRPCMLEVVKMIEEIRVEESPLGDDYDEARSRTSLSPSLATTEDNLA

SEQ ID NO: 25083 - protein, 203 aa, Glycine max
MLGAARGLARIHAEYNASKIPHGNVKSSNVLLDKNGVALISDFGLSLLLNPVHAIARLGGYRAPEQVEVKRLSQEADVYGFGVLLLEVLTGRAPSKEYTSPAREAEVDLPKWVKSVVKEEWTSEVFDQELLRYKNIEDELVAMLHVGLACVAAQAEKRPCMLEVVKMIEEIRVEESPLGDDYDEARSRTSLSPSLATTEDNLA

SEQ ID NO: 25084 - DNA, 921 bp, Glycine max
aatcttgttcacgttacacgttttccatctctcttcttcctttttctcttcctttcttttagttctgttattgcaattttgccaggcctataatgcaaagttaaccaacatttgattccattctttctgtttccttcttcaaatatctttgtatcttgttttgcaagtaaaacaagaacaaccttatttgtatatattttagaaacttcattatttgacagtatattcacccatagttgaatttcaatggggaaaggaggtggttgctttccaagcaaaacaaaggcaccaatttctggagcagaaaaggatccaattattgttgaaagtctaattccaacaaatgatccaagtagcacaagccaagaggtggaagcaccagcaccagcaccagcagcagtgaaaaagctgaaaattttcattgtgttctactcaacttatggccatgtggagtcattggcaaggtccttgaagaaaggggttgattcaattgaaggcgttgaaggggtgttgtaccgcgtgctggagacgctgccaaaggaggttctggaactcatgaaggcacctgagaaggatgagacagtgccactcatatctgaagacaagttggtggaggctgatggcttgctgtttggttttccaacaaggtatggcagcatggcggcgcagatgaaggtgtttttcgattcgaccggtcagttgtggagagagcagaagctggcaggggtgcctgctggcttctttgtcagcactggcactcagggtggaggccaagaaaccacagcgtaagaaggccttttattttctgccttcattgatgcatgcataaataagagccttgctcttcattttattttctttaatggaacttcagaattttatctatgtatataaataaattgatagaatttaattagaaag

SEQ ID NO: 25085 - protein, 180 aa, Glycine max
MGKGGGCFPSKTKAPISGAEKDPIIVESLIPTNDPSSTSQEVEAPAPAPAAVKKLKIFIVFYSTYGHVESLARSLKKGVDSIEGVEGVLYRVLETLPKEVLELMKAPEKDETVPLISEDKLVEADGLLFGFPTRYGSMAAQMKVFFDSTGQLWREQKLAGVPAGFFVSTGTQGGGQETTA

SEQ ID NO: 25086 - DNA, 1253 bp, Glycine max
tccacaacctcgtatttctattctctcctctttctctctctatggcttccttgctttaatcgcaattttactcttttttttaatcggccgatcattcgattggatctgatttcatattaaaatcttatctttttgctaattgtcgctttcccaattcgtaattatctgaagtttggatttgggtgctttctttgcccctttatcgttgattgaatggttttgatccgggactgtgatttacgctctatcggggcagttgctggtcttgctgttgcaattgttttcacatggaggctcttgagatctccttctgggtctcaacggaggcaacagaaacggcaaggtccttcatctagtaatcctggagtcggtacaaattcaaattcaaatgcgtcggtggttccttcggatgcttgttcaccctcagatgattcaagggcgcaaaatgttgttgatgagttctttcagccagtcaagccaaccttggggcagatagttaggcagaagttgagtgaaggaagaaaggtaacttgtcgccttcttggagtgatccttgaggaaagtagtccagaggagctgcagaaacaagctactgtgaggtcctctgtgctagaagtactattggaagtaacaaaattttgtgatttatatctcatggaacgagttctggatgatgaaagcgagaaaagagttcttgtagcattggaagaagcaggggtattcacttcaggtggtctggtcaaggacaaggttctgttctgcagcacagagaatgggcggtcatcgtttgttcggcaattggaacctgattggcatattgattcaaatcctgaaattgtcactcagttggctaggtttatcaagtatcaacttcatgtatctccttacaaaactgaaagaactgctgcaaatgtgttcagtgctccatctctggaacagttctttggatccatatgaaactaaaaccactacaaatcagatgttattcataaatatctcctagtttatttctatgtgcatcttggtttccacattcaccatatgttttttttccagcttttctagatgtatgagaacaaggttagattttttttgaagttttaaggttctcactctaggtaggtgaaagaccttatgtgtatgatgctttgaagaagttttactattttcttttttcttctttgttttgaaatttgtgcattacattgtatcccatccagacattttaaactggcaaggtgacaatttttatt

SEQ ID NO: 25087 - protein, 247 aa, Glycine max
MVLIRDCDLRSIGAVAGLAVAIVFTWRLLRSPSGSQRRQQKRQGPSSSNPGVGTNSNSNASVVPSDACSPSDDSRAQNVVDEFFQPVKPTLGQIVRQKLSEGRKVTCRLLGVILEESSPEELQKQATVRSSVLEVLLEVTKFCDLYLMERVLDDESEKRVLVALEEAGVFTSGGLVKDKVLFCSTENGRSSFVRQLEPDWHIDSNPEIVTQLARFIKYQLHVSPYKTERTAANVFSAPSLEQFFGSI

SEQ ID NO: 25088 - DNA, 985 bp, Glycine max
tttttctttcgctcttcttccattccacactaaaaagtaacagtttcggagggaaacacaatacaacacaaaaagccccccccacaaagcaaatcacctttttttcctttcaaaatgttcgccgaagagaatggcctcaagggagaccccagactccaagccatttcccaagccatcagagtcgtccctcacttccccaaacatggaataatgttccaagacataacgacattgctgttggatcacaaggcgtttaaagacaccgtcgacatttttgtcgatcgttacagagacatgcacatttccgtagttgctggaattgaggcaagggggttcatgtttggtccctcaattgcgttgggcattggtgcaaagtttgttcctttacgcaaaccacggaagctgccaggtgaagtaatttcagaaaaatatgctctagaatatggaactgattgcttggagttgcatgttggtgctgcccagcccggtgaacgggccataataattgatgacttggtggccacaggtggaactctgtcagcaggagtaaaacttctagaacgtgttggggctgaagtggtggaatgtgcttgtgtcattggtgtgcctgatgtcaaggggcagtgcaggagtattggaaagccactttatgttcttgttgagccacgtaaagcagataaatgtcaagctcaagcagataaatgttactgagatgtgatgttggttcgatcttgaactgacatacaaaaaggacgcttagtgtgagaaacacaggccataatgtgatccttaagttttcggctgatggagagttgtgttcatggcaattgccaaatatcatcctgggaaatgttcccccttttcatatctttttatctttgtacatgttagccatcatgttatgtggccagcagtttagaacaataacaatcattaaagaagggatggattttatggcattttataaaatgtcaatttaaggtcc

SEQ ID NO: 25089 - protein, 198 aa, Glycine max
MFAEENGLKGDPRLQAISQAIRVVPHFPKHGIMFQDITTLLLDHKAFKDTVDIFVDRYRDMHISVVAGIEARGFMFGPSIALGIGAKFVPLRKPRKLPGEVISEKYALEYGTDCLELHVGAAQPGERAIIIDDLVATGGTLSAGVKLLERVGAEVVECACVIGVPDVKGQCRSIGKPLYVLVEPRKADKCQAQADKCY

SEQ ID NO: 25090 - protein, 166 aa, Glycine max
MFQDITTLLLDHKAFKDTVDIFVDRYRDMHISVVAGIEARGFMFGPSIALGIGAKFVPLRKPRKLPGEVISEKYALEYGTDCLELHVGAAQPGERAIIIDDLVATGGTLSAGVKLLERVGAEVVECACVIGVPDVKGQCRSIGKPLYVLVEPRKADKCQAQADKCY

SEQ ID NO: 25091 - protein, 138 aa, Glycine max
MHISVVAGIEARGFMFGPSIALGIGAKFVPLRKPRKLPGEVISEKYALEYGTDCLELHVGAAQPGERAIIIDDLVATGGTLSAGVKLLERVGAEVVECACVIGVPDVKGQCRSIGKPLYVLVEPRKADKCQAQADKCY

SEQ ID NO: 25092 - DNA, 1196 bp, Glycine max
atctaccattggggtttcactgttcagtgtaactctcaagccatgtctccgggtcccgttattgacgcagccaccgaccccggcgccgaccaacaaattccctccgtcgacgacgcaatcctcaagaagaaagctcacccccaggttccccccatttccattcttttttctactttactttatctcttattcgcttccacgatcttttttttctcaggaagatgacgctcccattgtcgaggacgtcaaggacgatgacaaagaggaaaccgaagacgaggatgaggacgatgacgacgatgacaaggaagatgacgcccaaggtggtgctgagggtgggaagcagagcagaagtgagaagaagagccgaaaagcaatgttgaagttgggactgaaacctgttactggcgttagtagggtcacaatcaagaggacaaagaatattctttttttcatctcaaaacctgatgtcttcaagagtccaaattctgagacctacatcatatttggggaggcaaaaatagaggacttgagctctcagttgcagacacaggctgctcaacagttcaggatgccagatgtgggatccgtactggcaaaacaagatcaagatgctgcagctgcagcggcacagcctgaagaagaggaggaggaggttgatgaaactggtgtcgagccccatgacattgatttggtgatgacacaggcaggagtgtcaagaagcaaggctgtcaaggcccttaagactcacaatggggacattgtcggtgccattatggagctcactacttagtttcggtttatgttccatttgtagtttttgatttttggggatgattttggaactagtgccatcgtttttgtggtagtcaaaccatatatttggtccatatggttgtgcttaccttataatttcttgtggtacgatgtgatgatcaatgatcatattattttgttgtctttacttatagtagccttcttttagctctatatctttttgcccttaagttaacgtctagccctaaaattcgttggtttaaactttaggtatatatggttggtttgttgtatctgtacctgcaacactaaaggttcatgtcccgtggcctttggaaaatgggggccattgagctaggaatttttgtatcttaggctatattgatgattggattaaattgaattaattttaaaatttg

SEQ ID NO: 25093 - protein, 263 aa, Glycine max
STIGVSLFSVTLKPCLRVPLLTQPPTPAPTNKFPPSTTQSSRRKLTPRFPPFPFFFLLYFISYSLPRSFFSQEDDAPIVEDVKDDDKEETEDEDEDDDDDDKEDDAQGGAEGGKQSRSEKKSRKAMLKLGLKPVTGVSRVTIKRTKNILFFISKPDVFKSPNSETYIIFGEAKIEDLSSQLQTQAAQQFRMPDVGSVLAKQDQDAAAAAAQPEEEEEEVDETGVEPHDIDLVMTQAGVSRSKAVKALKTHNGDIVGAIMELTT

SEQ ID NO: 25094 - protein, 138 aa, Glycine max
MLKLGLKPVTGVSRVTIKRTKNILFFISKPDVFKSPNSETYIIFGEAKIEDLSSQLQTQAAQQFRMPDVGSVLAKQDQDAAAAAAQPEEEEEEVDETGVEPHDIDLVMTQAGVSRSKAVKALKTHNGDIVGAIMELTT

SEQ ID NO: 25095 - DNA, 1355 bp, Glycine max
ttccttcatcagctatcttcatctgcttctgtcacatcaagcattctcataccgcttctcagtttctcattttcccaatcgcagctaaaaaatcctttgagccctttaacctattctcaataagcagaaattagggaacgcaacaatggctcaagcggttgaagaatggtataagcagatgcctgtcatcacgcgctcttatctcaccgctgctgttgtcaccaccatcggatgttcccttgatataatttctccgtatcatttgtacttgaaccctagattggtggtgaagcaatatcagttttggcgtctggttactaatttcttgtactttcgtaaaatggagggagcactagtgaagaaaggctattgctatagatgggtggtatacctacattttggaaaaaggggtcaatccgattgcccctgacataatcataagagatatgactatggacatgatagttcccagaactaaactatttgattaaagatatgagcttttgtcagtttgtgggcttatctgaagcaatgaaaatacttggatttcctgtttcatatgttttttcttgcccgttactgcaagcttcttgaggagaactcgttcagggggaggactgctgatttcttttacatgctcttatttggtgccactgtattgactggaattgttcttcttgggggcatgataccttatttatcagagtcgtttgcaaaaataatattccttagcaactcattgacatttatgatggtttacgtgtggagcaaacaaaatcccttcattcacatgagcttcctgggtctctttactttcactgctgcctaccttccatgggttctcttggggttctctgtactcgttggtgctagtgcttgggtggatctactggggatgattgctggtcatgcatattattttcttgaagatgtttatcctcggatgacgggtcgtaggccgctaaaaacaccatcattcatcaaagcactatttgcagatgacccagttgttgtggcacggcctgctaatgtcagatttgctcccccacctgctgaagaacttcaccaagattgaatgaatggcaatcaaaatgtttagaggattagcaacagaacagcaaagcggttgaccgtgtaatatatagattttaaacatcttttttcgcgtgcatttgttaattattaggatttaaggggcaactatgtcgaatgttcagagttttaactgaatgagatcctcttttctcatcgtaatttgtcagacactaccttgtagatatttatatactcttgtattccacaaagtttttttaagctaattaagtcagcaaatttggttcttctatttaaaaaag

SEQ ID NO: 25096 - protein, 171 aa, Glycine max
MFFLARYCKLLEENSFRGRTADFFYMLLFGATVLTGIVLLGGMIPYLSESFAKIIFLSNSLTFMMVYVWSKQNPFIHMSFLGLFTFTAAYLPWVLLGFSVLVGASAWVDLLGMIAGHAYYFLEDVYPRMTGRRPLKTPSFIKALFADDPVVVARPANVRFAPPPAEELHQD

SEQ ID NO: 25097 - protein, 146 aa, Glycine max
MLLFGATVLTGIVLLGGMIPYLSESFAKIIFLSNSLTFMMVYVWSKQNPFIHMSFLGLFTFTAAYLPWVLLGFSVLVGASAWVDLLGMIAGHAYYFLEDVYPRMTGRRPLKTPSFIKALFADDPVVVARPANVRFAPPPAEELHQD

SEQ ID NO: 25098 - protein, 129 aa, Glycine max
MIPYLSESFAKIIFLSNSLTFMMVYVWSKQNPFIHMSFLGLFTFTAAYLPWVLLGFSVLVGASAWVDLLGMIAGHAYYFLEDVYPRMTGRRPLKTPSFIKALFADDPVVVARPANVRFAPPPAEELHQD

SEQ ID NO: 25099 - DNA, 1227 bp, Glycine max
gttctatttttccgctctgctgtacatggcgtcggctgcaggtgaggggaggagccgggtgctggtgataggcggcacgggctacatcggccgcttcatcgtcgccgccagcgcacgcgagggccaccccaccgccgtcctcgtccgcgacgccgcgcccgccgacccagccaaggccgccgtcctccagggattccgggatgccggcgtcaccatcgtcaagggtgatatgtatgatcatgagagcctggtgacagccattaaatcagcagatgttgtgatctcggccgtaggttatcaacagctaccggatcaaactctcattatctcggcaattaaggaagttgggcatgtaaagagattcttcccatcagagtatggtaatgatgtggatcgtaaccatgcagttgaacctgcaaagacagtattcggtgggaaagctcgtataaggcgtgccattgaggctgaggggattccctacacatatgtctcttccaacttctttgctggtcgtttcttgcgaagccttgcgcagattgggatcatggagcctccaactgagaaggttctcattatgggtgatggaaatgtaaaaggaatctttgcggcggaagaagacgtgggaacctacactattaaagctgtagatgatccaaggaccctgaacaaaattctgtatctgagaccacgaagcaacactttgtcccataacgagcttgtctcactctgggagaagaaacttggtaagacacttgagagggtgtacctcccagaggacgaactcctgaataagattcaagagtcgtcagcgccgctgaatgtagcactggcaatcagccactctgtctggttgaagggggaccacactaactttgagatcgacccatcatttggagttgaagcaactgagctttaccccgatgtgcattatattaccgtggatgaatacctaaataggttcctttaaactcctaaatcctatcgtccccaatattcatatactttgaataagtgttggaggttgtgtatttttattagaatggcacgtgaattacgtaatcagagtgtgagacctcaatcatgtgaggaatgcatcttgcattcccttgagcttagaatatataaactgaggttgtataaatttggaaattttagcttgatggaacatgataccgtatgtaacagcccgggggtttatgccaaattagaaattgtttgttatttaac

SEQ ID NO: 25100 - protein, 321 aa, Glycine max
FYFSALLYMASAAGEGRSRVLVIGGTGYIGRFIVAASAREGHPTAVLVRDAAPADPAKAAVLQGFRDAGVTIVKGDMYDHESLVTAIKSADVVISAVGYQQLPDQTLIISAIKEVGHVKRFFPSEYGNDVDRNHAVEPAKTVFGGKARIRRAIEAEGIPYTYVSSNFFAGRFLRSLAQIGIMEPPTEKVLIMGDGNVKGIFAAEEDVGTYTIKAVDDPRTLNKILYLRPRSNTLSHNELVSLWEKKLGKTLERVYLPEDELLNKIQESSAPLNVALAISHSVWLKGDHTNFEIDPSFGVEATELYPDVHYITVDEYLNRFL

SEQ ID NO: 25101 - protein, 313 aa, Glycine max
MASAAGEGRSRVLVIGGTGYIGRFIVAASAREGHPTAVLVRDAAPADPAKAAVLQGFRDAGVTIVKGDMYDHESLVTAIKSADVVISAVGYQQLPDQTLIISAIKEVGHVKRFFPSEYGNDVDRNHAVEPAKTVFGGKARIRRAIEAEGIPYTYVSSNFFAGRFLRSLAQIGIMEPPTEKVLIMGDGNVKGIFAAEEDVGTYTIKAVDDPRTLNKILYLRPRSNTLSHNELVSLWEKKLGKTLERVYLPEDELLNKIQESSAPLNVALAISHSVWLKGDHTNFEIDPSFGVEATELYPDVHYITVDEYLNRFL

SEQ ID NO: 25102 - protein, 245 aa, Glycine max
MYDHESLVTAIKSADVVISAVGYQQLPDQTLIISAIKEVGHVKRFFPSEYGNDVDRNHAVEPAKTVFGGKARIRRAIEAEGIPYTYVSSNFFAGRFLRSLAQIGIMEPPTEKVLIMGDGNVKGIFAAEEDVGTYTIKAVDDPRTLNKILYLRPRSNTLSHNELVSLWEKKLGKTLERVYLPEDELLNKIQESSAPLNVALAISHSVWLKGDHTNFEIDPSFGVEATELYPDVHYITVDEYLNRFL

SEQ ID NO: 25103 - DNA, 1361 bp, Glycine max
agtttatcaagaactcttgttccaccaaccccaaaattgtgaacctttcaaagagacgaagccttcgaatctctctgaaacttttctcttctctttgattcttctctatcagttaaacattagaatgagccgttcacaggatccacacccttcccgatctttcttcccttttggaaatccttttcggatgatatcacctaaaggctctcgcatgtctccacaacttcttgcagtgttgcaagcttttgaggcaacattggcagagaggctgaaaaatcttatgcctaaaagcaaggatgaaatcctcaccttgtcttggatgactttagctatgaagtcactttgtgaaagtcacaatgacatacggacccttatgactgcccttgagcttcctgtgagtgattgggaggacaaatggattgatatgtacttggacataagttcaaagttgctagacatttgcaatgcattcagctctgagctttcacgtctgaaccagggaaaccttcctcttaagtgtgcactgcacaatttagactctgcctcttcaaagcagtatcttcgggcatgttccctacttgatgattggaggcagcatgttagttctaggaaccctagaattgagaaatgtagttctatgttagataatcttgtgggctcacttgatcttcctaaggttaaaaattctgccaaaggaaaggttttgatgcaagctatgtatggagttaaggtggagactgtatttatttgcagggtgtttactgcagcattctctggctcgtcaaagaagttatcagacttgaatgtggccgacatacattcatgggctccagattttagaaggttgcaggatcttgtaaatgaggaaattagagttagattttctggtggtaaatttactgtattgaatgagttggaagcggttgatgcctctgtgaagatattatatcctactatccaagctggtgtagataccgttgagacagaatggcttgtgaagactgttgaggaattacgtgcgggtgccgagaagctttcgcaaggaattgatcttcttgcaaagggagtagatgggtttttttcaagccgttatgactagtcgcgatactttgctcagctctgtgaggtttgataaaactgtaaatgatcgttccccaggccgtaacagagacatgcaggtagttcactaattatgcagtagcctaactctggtaggttttgggggggtgttcctttgtaggattagtagtattttcggtcttataggtgataatagtatttagccgaaatgtatatgagtggggatgttatgtgtaatgtcaaacaattacaaaatgcagatctttgttaaaaaaaaaaag

SEQ ID NO: 25104 - protein, 365 aa, Glycine max
VYQELLFHQPQNCEPFKETKPSNLSETFLFSLILLYQLNIRMSRSQDPHPSRSFFPFGNPFRMISPKGSRMSPQLLAVLQAFEATLAERLKNLMPKSKDEILTLSWMTLAMKSLCESHNDIRTLMTALELPVSDWEDKWIDMYLDISSKLLDICNAFSSELSRLNQGNLPLKCALHNLDSASSKQYLRACSLLDDWRQHVSSRNPRIEKCSSMLDNLVGSLDLPKVKNSAKGKVLMQAMYGVKVETVFICRVFTAAFSGSSKKLSDLNVADIHSWAPDFRRLQDLVNEEIRVRFSGGKFTVLNELEAVDASVKILYPTIQAGVDTVETEWLVKTVEELRAGAEKLSQGIDLLAKGVDGFFSSRYD

SEQ ID NO: 25105 - protein, 324 aa, Glycine max
MSRSQDPHPSRSFFPFGNPFRMISPKGSRMSPQLLAVLQAFEATLAERLKNLMPKSKDEILTLSWMTLAMKSLCESHNDIRTLMTALELPVSDWEDKWIDMYLDISSKLLDICNAFSSELSRLNQGNLPLKCALHNLDSASSKQYLRACSLLDDWRQHVSSRNPRIEKCSSMLDNLVGSLDLPKVKNSAKGKVLMQAMYGVKVETVFICRVFTAAFSGSSKKLSDLNVADIHSWAPDFRRLQDLVNEEIRVRFSGGKFTVLNELEAVDASVKILYPTIQAGVDTVETEWLVKTVEELRAGAEKLSQGIDLLAKGVDGFFSSRYD

SEQ ID NO: 25106 - protein, 303 aa, Glycine max
MISPKGSRMSPQLLAVLQAFEATLAERLKNLMPKSKDEILTLSWMTLAMKSLCESHNDIRTLMTALELPVSDWEDKWIDMYLDISSKLLDICNAFSSELSRLNQGNLPLKCALHNLDSASSKQYLRACSLLDDWRQHVSSRNPRIEKCSSMLDNLVGSLDLPKVKNSAKGKVLMQAMYGVKVETVFICRVFTAAFSGSSKKLSDLNVADIHSWAPDFRRLQDLVNEEIRVRFSGGKFTVLNELEAVDASVKILYPTIQAGVDTVETEWLVKTVEELRAGAEKLSQGIDLLAKGVDGFFSSRYD

SEQ ID NO: 25107 - DNA, 1259 bp, Glycine max
aaagaggtgtccgaatcgaacaggagcaagcaaagtcaaagaaaaagagagaggagagagagaaacaacaatcatcatcggccagaagcgaacacgacagacacatctgagaaaccaaacctgatagagatgtcgagtggaggaaaccttagttgcgtgttggtagctgtggatggcagcgaggaaagcatgaacgcgctgcgttgggcactgaacaacctcaagctccgatcccctgcacccgattccaccgatgctccttccttcaccgtcttccacgtccaatccccgccctccatcgccactggcctcaatcccggtgccatccccttcggtggccccagtgatctcgaagttcctgctttcactgcagccattgaagcgcaccaaaagcgcatcaccaacgccgtactcgatcacgccctcggaatttgctccgaattcaacctcaccagtaaggtcagaacccatgttcttgtaggagatccaaaggagaagatttgtgaagcagttcaggatttgaatgctgatgtgcttgtgatggggtctcgtgcttttggccccattaagaggatgttcctgggaagtgtaagcaactactgcgcccaccattctccatgccctgtcattattatcaaggaaaaggacattgtcaataagagaaactgatgcacttctactatgctaccatgattcttgtctcttgatcagtaggttctttaggtgggttgtcagtgccatatttcagttgctgacgctgcatccttgcttgccaaattaattatgtcgaaggctttttcgtcttgcaatttgcttgctttgttagaccagtgttgtacctcagctttgaagcttgtgtcttttgttgagccaatgctagccagaccctgcttcaagtacgtgttttcactttctgtggacaattctgctgtgtgtgtgaaattcttggagttaaagagtgctttataactgtgctgtcacaacgtcaattgttgtcccaaatggttcaaagagatatttgcctccaggtttgtattcgttctgaatttatacaatgttgtacagaaatgttgcattactattgctccttggtcagagccagttctagttgtgattgtgatatgcaacaaactggccatttgacatttgtcatgtacaaattttcaaattgagaatccagctagtgttggctgcagtgtgtcttactgttgcattattgacagtgtcctgcttaaataaatatttatatgatttatgac

SEQ ID NO: 25108 - protein, 222 aa, Glycine max
KEVSESNRSKQSQRKRERRERNNNHHRPEANTTDTSEKPNLIEMSSGGNLSCVLVAVDGSEESMNALRWALNNLKLRSPAPDSTDAPSFTVFHVQSPPSIATGLNPGAIPFGGPSDLEVPAFTAAIEAHQKRITNAVLDHALGICSEFNLTSKVRTHVLVGDPKEKICEAVQDLNADVLVMGSRAFGPIKRMFLGSVSNYCAHHSPCPVIIIKEKDIVNKRN

SEQ ID NO: 25109 - protein, 179 aa, Glycine max
MSSGGNLSCVLVAVDGSEESMNALRWALNNLKLRSPAPDSTDAPSFTVFHVQSPPSIATGLNPGAIPFGGPSDLEVPAFTAAIEAHQKRITNAVLDHALGICSEFNLTSKVRTHVLVGDPKEKICEAVQDLNADVLVMGSRAFGPIKRMFLGSVSNYCAHHSPCPVIIIKEKDIVNKRN

SEQ ID NO: 25110 - protein, 159 aa, Glycine max
MNALRWALNNLKLRSPAPDSTDAPSFTVFHVQSPPSIATGLNPGAIPFGGPSDLEVPAFTAAIEAHQKRITNAVLDHALGICSEFNLTSKVRTHVLVGDPKEKICEAVQDLNADVLVMGSRAFGPIKRMFLGSVSNYCAHHSPCPVIIIKEKDIVNKRN

SEQ ID NO: 25111 - DNA, 1504 bp, Glycine max
aactaatttttgattttccttgtttatttatcttcttcctcccttgtttgtttgtttctttgtttctttggcttgacaagaagaagatgatgatgatggacaagggggtgttggatgatgtgataagaaggcttctggaagggaaaggagggaaacaggtgcagctctctgagtccgagatccgtcaactctgcgtcaacgccagacaaatcttcctctctcagccaattcttctcgaccttcgtgctcccatccgcgtctgcggttttacggtccatttataaaaaccgtggatgtacttcgtgttctagtgtagataagggattttggctgaggggagtgcattttaggatataaaatccaataatgtcccatcttcaatcccttgttcctaatgttgcagttctcttgcaggtgatatacatggtcagtaccaggacttgctgaggctttttgaatatggtggctaccctcctgcggcaaactacttgtttctgggggattatgtggatagagggaagcaaagtttggagactatatgtttgcttttggcctacaaaataagatatccagacaaaatttatctcttgaggggaaaccatgaagaagcaaagataaaccgtatatatggtttttatgatgaatgtaaaaggaggttcaatgttaggctatggaagatatttacagactgctttaactgtttgccagtggctgcactcattgacgagaaaatactttgtatgcatgggggactctctccagaattacaaaatttagatcaaataagggagattcaaaggcctactgaaattccagataatggtctcctatgtgatctgctttggtctgatcctgatgctagcattgagggctgggcagagagtgaccgaggagtttcatgtacttttggagctgatgtagttgcagagtttttggataaaaatgaccttgatcttgtttgcagagggcatcaggttgtggaggatggatatgagttttttgctaaaagaagattagtcacgatattttctgctccaaattacggtggggaatttgacaatgctggtgcattgttaagcgttgatgattctcttgtatgttcctttgagatattgaaacccgctgatagagcttcaggaagtggttcatcaaaaatgaattttaagaagccacccaaacttggaaagatatagtatttggcaaggattttcggttcaaataggaatccaatccagctaactcaacttgtacggagttgaaattgtcaagtaggagtttgacatgggagagccttccttccactctacgattgcagattgccaatgatactatattgtaaactgaactacccaggcattcttctgtgcaagagcagagattattgctttatacaccagttggttgcttgtgtttggcaaattagcatgtaatttgtgagtgcaaagagatttcatgttaccaaatgcctaaatttctatgtcatttatctgaatgataactgctc

SEQ ID NO: 25112 - protein, 150 aa, Glycine max
MHGGLSPELQNLDQIREIQRPTEIPDNGLLCDLLWSDPDASIEGWAESDRGVSCTFGADVVAEFLDKNDLDLVCRGHQVVEDGYEFFAKRRLVTIFSAPNYGGEFDNAGALLSVDDSLVCSFEILKPADRASGSGSSKMNFKKPPKLGKI

SEQ ID NO: 25113 - protein, 93 aa, Glycine max
LIFDFPCLFIFFLPCLFVSLFLWLDKKKMMMMDKGVLDDVIRRLLEGKGGKQVQLSESEIRQLCVNARQIFLSQPILLDLRAPIRVCGFTVHL

SEQ ID NO: 25114 - DNA, 898 bp, Glycine max
  misc_feature (583)..(583): n is a, c, g, or t
accaaaggcagtagtgtgttcaccgtggaactgttcttctctctcataacatgccctctgcccaggatccattttacgttgtcaaggccgagattcaagattctattgataagctgcaatctacttttcaccaatgggaaagcaagtccggtgctgcggaacaaggacatcttacaaaggaggttcttgctggatgcgaaagcatagagtggcaggtggatgaattggataaggcaattgctatagcatctagagatccttcttggtatgggatagatgaagctgaggtcgaaagccgaaggagatggacaagtaacactcgttctcaggttggcacaatgaagaaagcagtggaatctggcaagggctcaagtaccacaagccatgctagtgttaatgggatgcgccgagaactaatgaggctaccaaattctcatcaaactgatagctctaaccagtatgctgcccgagataatgatgatttcatactatcagaatcagatagacaaacacttcttataaagagacaggatgaggggtgggatgagcttagtgaaagtgtacgaagaatcggaggtgttgnacttacaatacatgatgaactcactgcacaggaaaagattctagatgaacttggttccgagatggacagtacaacaaatcgtcttgattttgtccaaaaaaaagtggcgatggttatgaaaaaggctagtgcaaagggtcagatcatgatgatattgggtttgttggccctgttcatcttcctctttatcttagtattcttcacctagtcattgagatgggaccagtctctgtgctgtttgtacatgaaaagagatctaatatttttttgttcagattcaagagtaataatagacatgcatttaactattcagtt

SEQ ID NO: 25115 - protein, 246 aa, Glycine max
  misc_feature (178)..(178): Xaa can be any naturally occurring amino acid
MPSAQDPFYVVKAEIQDSIDKLQSTFHQWESKSGAAEQGHLTKEVLAGCESIEWQVDELDKAIAIASRDPSWYGIDEAEVESRRRWTSNTRSQVGTMKKAVESGKGSSTTSHASVNGMRRELMRLPNSHQTDSSNQYAARDNDDFILSESDRQTLLIKRQDEGWDELSESVRRIGGVXLTIHDELTAQEKILDELGSEMDSTTNRLDFVQKKVAMVMKKASAKGQIMMILGLLALFIFLFILVFFT

SEQ ID NO: 25116 - protein, 150 aa, Glycine max
  misc_feature (82)..(82): Xaa can be any naturally occurring amino acid
MKKAVESGKGSSTTSHASVNGMRRELMRLPNSHQTDSSNQYAARDNDDFILSESDRQTLLIKRQDEGWDELSESVRRIGGVXLTIHDELTAQEKILDELGSEMDSTTNRLDFVQKKVAMVMKKASAKGQIMMILGLLALFIFLFILVFFT

SEQ ID NO: 25117 - protein, 129 aa, Glycine max
  misc_feature (61)..(61): Xaa can be any naturally occurring amino acid
MRRELMRLPNSHQTDSSNQYAARDNDDFILSESDRQTLLIKRQDEGWDELSESVRRIGGVXLTIHDELTAQEKILDELGSEMDSTTNRLDFVQKKVAMVMKKASAKGQIMMILGLLALFIFLFILVFFT

SEQ ID NO: 25118 - DNA, 1019 bp, Glycine max
aaccaaatgttattccctcctttcttagtctgctgtgttttctctttctagagaatccaagcctaccattgaagtggaattctgtgaggctaagtaaaatggggtaccagccattggaaaagggaaaaccaaaacataagaaggggttatggtcacctgaagaagacaacaaactcagaaaccacatccttaaacatggtcatggctgttggagttctgtccccattaaggcaggcttgcaaaggaatggaaagagctgtagattaaggtggattaactatctaaggccaggattaaagagagggaaattcagcaaacaggaagaggagacaatcctcacccttcaccacatgctaggcaacaagtggtcacggatatcacagcatttgcctggaaggacagacaatgagattaaaaactattggcattcatatttgaaaaagagagtggccaaagctaaggaaatggaatctcataaccaaattaagtatgctagctcaagctcagatactatggactcttcacattctctccaaaatcttgcaactcaatgcccactgaattataacttcaccaaagaggcttctcaaagttccttaccaaaactgttatttgctgagtggctttcactggatcatttaaactctgcaaattcagttgactctttgggtttgaggaatggatttgatcaaaattcatcttttcatgaagctgcaattcatgacatgtcagaggtaccctttggtggagagtataatagatgtgtaagtaacatttcagcccctgagatgttcaattcacagcttaagtatggaaatcaaatggtggaaaatggttacattcattgtatgcctggggttgacttaagtagcaatttcagcataagcaatgatgcaataatgtacatatgagagctaagtttccgggctggtcagcaaggaataatatcattttctaattttatacatactgaaaacaatcaaactttagcaatatatataaaataataattccattgc

SEQ ID NO: 25119 - protein, 302 aa, Glycine max
PNVIPSFLSLLCFLFLENPSLPLKWNSVRLSKMGYQPLEKGKPKHKKGLWSPEEDNKLRNHILKHGHGCWSSVPIKAGLQRNGKSCRLRWINYLRPGLKRGKFSKQEEETILTLHHMLGNKWSRISQHLPGRTDNEIKNYWHSYLKKRVAKAKEMESHNQIKYASSSSDTMDSSHSLQNLATQCPLNYNFTKEASQSSLPKLLFAEWLSLDHLNSANSVDSLGLRNGFDQNSSFHEAAIHDMSEVPFGGEYNRCVSNISAPEMFNSQLKYGNQMVENGYIHCMPGVDLSSNFSISNDAIMYI

SEQ ID NO: 25120 - protein, 270 aa, Glycine max
MGYQPLEKGKPKHKKGLWSPEEDNKLRNHILKHGHGCWSSVPIKAGLQRNGKSCRLRWINYLRPGLKRGKFSKQEEETILTLHHMLGNKWSRISQHLPGRTDNEIKNYWHSYLKKRVAKAKEMESHNQIKYASSSSDTMDSSHSLQNLATQCPLNYNFTKEASQSSLPKLLFAEWLSLDHLNSANSVDSLGLRNGFDQNSSFHEAAIHDMSEVPFGGEYNRCVSNISAPEMFNSQLKYGNQMVENGYIHCMPGVDLSSNFSISNDAIMYI

SEQ ID NO: 25121 - protein, 186 aa, Glycine max
MLGNKWSRISQHLPGRTDNEIKNYWHSYLKKRVAKAKEMESHNQIKYASSSSDTMDSSHSLQNLATQCPLNYNFTKEASQSSLPKLLFAEWLSLDHLNSANSVDSLGLRNGFDQNSSFHEAAIHDMSEVPFGGEYNRCVSNISAPEMFNSQLKYGNQMVENGYIHCMPGVDLSSNFSISNDAIMYI

SEQ ID NO: 25122 - DNA, 1150 bp, Glycine max
atattcatctcagttcaaaggtttgtttctctcctattatcgatttgcctaacttgtattgttttttgtcgaaaccatcacactttacaactcaactattatgattttcctgttgtttatcccttcatcttattcatctttcatggaggaccacaccccatttctctagcactgattaaacaataatctttgatttttttggtcctccggtcatccttgatgtgttcacaggagtggctagtatagaagaaccataagcactgagggaaaaagtgattagtactttagccaacaaattaaaaatggctgtcaccaaggtctacattgtgtattactccttatatggacatgtagacaccatggctagagaagtacacagaggggctgctacagttgaaggtgttgaagcaacactttggagggtacctgagatgctttcggaactaatattggataagttgaaggcccctcctaaaccaaatgatgtaccagacataatgccagaacaatttgtggaggctgatggtttgatatttggttttccttctcgttttgggatgatgccgagccagctcaaggccttctttgatgcaactagtgagctatgggcatcccaagcacttgccggcaaacctgctggaatcttctggagtactggtttttatggtggaggccaagaactatcagcattgacagctataactcaattagctcatcatggtatgctttttgttcctcttggatacacctttggaagtggcatgtttgagatagatgaggtaaaaggaggatctgcatatggtgctggaacttttgcaggagatggatctcgtcaacctacagaactagaactgcagcaggcattttaccagggtaaatatcttgccgaagtaacaaaaaagctgaaaagctaacttctctgcctaacaaatacatgacaggatactatgaactgtgatgtgctacattatctataacatttgattgaagactcgatgattatttttaccggtaagacaagatagaaagacctcatgtggcttttctttttctgggttctgttgttgcaacaatgtatatcttctgttatctctttcagaaaactctcaaattattccaatgaaatgataaacaagatattcagttttcc

SEQ ID NO: 25123 - protein, 203 aa, Glycine max
MAVTKVYIVYYSLYGHVDTMAREVHRGAATVEGVEATLWRVPEMLSELILDKLKAPPKPNDVPDIMPEQFVEADGLIFGFPSRFGMMPSQLKAFFDATSELWASQALAGKPAGIFWSTGFYGGGQELSALTAITQLAHHGMLFVPLGYTFGSGMFEIDEVKGGSAYGAGTFAGDGSRQPTELELQQAFYQGKYLAEVTKKLKS

SEQ ID NO: 25124 - protein, 184 aa, Glycine max
MAREVHRGAATVEGVEATLWRVPEMLSELILDKLKAPPKPNDVPDIMPEQFVEADGLIFGFPSRFGMMPSQLKAFFDATSELWASQALAGKPAGIFWSTGFYGGGQELSALTAITQLAHHGMLFVPLGYTFGSGMFEIDEVKGGSAYGAGTFAGDGSRQPTELELQQAFYQGKYLAEVTKKLKS

SEQ ID NO: 25125 - protein, 160 aa, Glycine max
MLSELILDKLKAPPKPNDVPDIMPEQFVEADGLIFGFPSRFGMMPSQLKAFFDATSELWASQALAGKPAGIFWSTGFYGGGQELSALTAITQLAHHGMLFVPLGYTFGSGMFEIDEVKGGSAYGAGTFAGDGSRQPTELELQQAFYQGKYLAEVTKKLKS

SEQ ID NO: 25126 - DNA, 1220 bp, Glycine max
agacgcgtcttttatcacattgaattcatccttctgtgttctgtttctttccttttcttcttgggcgaaaccctaatctccccccttcacccttcgtacaccgcgtcgcatctacttccatcttctctcagatccaatctccgattcttgcttcactatcacaagcaaacatgtctgcggctttggatatgaccctcgaagatataattaagaacaacaagaaatcttccctcgccaacaccaggggccgaggccgagcctcgggacccggacccgctcgccgcctccccaaccgtgccgccaatcgcgccgcaccgtatgccgctgccaaggcgccggagacagcttggaaacacgatatgtacgcgaaccagccagtggccgcggcgtatccaggtggtcgagcgtcttccatcgaaacagggactaagctctacatttccaatttggattatggcgtttccaatgatgatattaaggagttgtttcttgaagttggcgacgtgaaacggcatactgttcattatgacaggagtgggagatccaagggtacggcagaagtagtcttctcgcgccgagctgatgctgtagctgcagtgaagaggtacaacaatgttcagctggatgggaaaccaatgaaggtagagattgtggggacgaacatcgctacacatgctgcaccacccgctgtgaatggaacttttggaaacccaactggagttcctagaagtggacaagggagaagtgggtcattaggaaggccacgtggtgggagtagaggtcgtggcagcattcaacggggccggggacgtggaagaggaggtcgtgatgaaaaggtatctgctgaagatcttgatgctgatttggagaagtatcatgctgaggctatgcaattaaactgaaggaaacaacgatgttctgttttattgctattacatttgcggttgttagggccatgttgatggaacaccgccgaattatgtatctttatcacagtcgtgcttttcggaaaggaaaaggataacttagagtgaaaacttttacagttgatatatgtagtttgggattctgttatgaaatatttgttttcgttgggtatgactatgaaatgtggctgaagaaaccgaagtctgcttgtattatgcactccggcttcctttcattggatttaatcatttgtttattcaagtattcaacaagtgggtttggaagtgggaacc

SEQ ID NO: 25127 - protein, 243 aa, Glycine max
MSAALDMTLEDIIKNNKKSSLANTRGRGRASGPGPARRLPNRAANRAAPYAAAKAPETAWKHDMYANQPVAAAYPGGRASSIETGTKLYISNLDYGVSNDDIKELFLEVGDVKRHTVHYDRSGRSKGTAEVVFSRRADAVAAVKRYNNVQLDGKPMKVEIVGTNIATHAAPPAVNGTFGNPTGVPRSGQGRSGSLGRPRGGSRGRGSIQRGRGRGRGGRDEKVSAEDLDADLEKYHAEAMQLN

SEQ ID NO: 25128 - protein, 237 aa, Glycine max
MTLEDIIKNNKKSSLANTRGRGRASGPGPARRLPNRAANRAAPYAAAKAPETAWKHDMYANQPVAAAYPGGRASSIETGTKLYISNLDYGVSNDDIKELFLEVGDVKRHTVHYDRSGRSKGTAEVVFSRRADAVAAVKRYNNVQLDGKPMKVEIVGTNIATHAAPPAVNGTFGNPTGVPRSGQGRSGSLGRPRGGSRGRGSIQRGRGRGRGGRDEKVSAEDLDADLEKYHAEAMQLN

SEQ ID NO: 25129 - protein, 180 aa, Glycine max
MYANQPVAAAYPGGRASSIETGTKLYISNLDYGVSNDDIKELFLEVGDVKRHTVHYDRSGRSKGTAEVVFSRRADAVAAVKRYNNVQLDGKPMKVEIVGTNIATHAAPPAVNGTFGNPTGVPRSGQGRSGSLGRPRGGSRGRGSIQRGRGRGRGGRDEKVSAEDLDADLEKYHAEAMQLN

SEQ ID NO: 25130 - DNA, 1073 bp, Glycine max
atcgcaaatttttctttttcttctcccctttagatgagtaacgccacagactccgccggcaaaatcccaccggagacgaggcccgccgagagcgacagtggtggtgatagtgggccccggcccacgatcaagatcaatgttatgcacggatcctctcaacacgagttccacctcccggcccaatcaacttttggggatgttaagaaactccttgttaataaaactggtttagagcctgtagagcaacgacttttcttcagagggatagaaaagggtgataacctacatttgcaccttgaaggtgtaaaggataagtcaaagcttttgcttttggagggcactgctagcaaagagaggaaacttgaggaaaccagaaaacaaaacgtaatgtctaaagcttttgaggctattgctggtgttagagctgaggtggacaagctctcaaatagggtgacttccatagaagtagctattaatggggggaacaaagcatccgagaaagagtttcttgtgctgacagagctgcttatgagtcaattgctgaaactggatggtattgaggctgaaggtgaagcaaagttgcagagaaaagctgaggtgaatcgtgtgcagaaccttgtggataaattagattctctaaaggcaaggaacgccaacccttttagcaacagtagcaatgctgtcaaagtaacaacccaatgggaaacctttgactctggaatggaaagcttggatgctccatccgataacccgtcttccacaaaagtaactcaagaatgggagcggtttgattagctcggaaaccgtttttggaacatctaagttataaatgttgtacaacatcatattactggcccttcatcatattagaggtcttggcacaacgatgttgccttgtgatatggtaggctgaaattttaattgcagaaatgttctctccgctgaggtaaagttgcatatgtttgatctatctcgtgcacttatttttaggcaaaatatgtaaaccaaattgtattcttgttacttgaatatattattgcatcttccgatcatttggtttgtcttctgtttgc

SEQ ID NO: 25131 - protein, 253 aa, Glycine max
MSNATDSAGKIPPETRPAESDSGGDSGPRPTIKINVMHGSSQHEFHLPAQSTFGDVKKLLVNKTGLEPVEQRLFFRGIEKGDNLHLHLEGVKDKSKLLLLEGTASKERKLEETRKQNVMSKAFEAIAGVRAEVDKLSNRVTSIEVAINGGNKASEKEFLVLTELLMSQLLKLDGIEAEGEAKLQRKAEVNRVQNLVDKLDSLKARNANPFSNSSNAVKVTTQWETFDSGMESLDAPSDNPSSTKVTQEWERFD

SEQ ID NO: 25132 - protein, 217 aa, Glycine max
MHGSSQHEFHLPAQSTFGDVKKLLVNKTGLEPVEQRLFFRGIEKGDNLHLHLEGVKDKSKLLLLEGTASKERKLEETRKQNVMSKAFEAIAGVRAEVDKLSNRVTSIEVAINGGNKASEKEFLVLTELLMSQLLKLDGIEAEGEAKLQRKAEVNRVQNLVDKLDSLKARNANPFSNSSNAVKVTTQWETFDSGMESLDAPSDNPSSTKVTQEWERFD

SEQ ID NO: 25133 - protein, 135 aa, Glycine max
MSKAFEAIAGVRAEVDKLSNRVTSIEVAINGGNKASEKEFLVLTELLMSQLLKLDGIEAEGEAKLQRKAEVNRVQNLVDKLDSLKARNANPFSNSSNAVKVTTQWETFDSGMESLDAPSDNPSSTKVTQEWERFD

SEQ ID NO: 25134 - DNA, 1587 bp, Glycine max
agggctcgcagcactgtaacctcacacctctccaaaatccgttccccctttctttcaaacccttttttttttcttccaacaaatcagcgatggcgacgacgtcggtggtgccggcgaatcggcggcgtgcggcggcgaaccccgccgaggatatggacttcgagacgacggagggcgtgaaggccatcgcgagcttcgaggagatggggatcaaggacgatctgctccgcggaatctaccagtacggcttcgagaagccctcagccattcagcagcgggccgtgactccgatcattcagggccgtgacgtcatcgcccaggcccaatccggaacgggcaaaacctccaattgctctcaccgtttgccaggtcgtcgatacctccgtcagagaggttcaggctttaatattgtcaccaacgagggaactggcctcgcaaactgagaaggttatattggctattggggatttcatcaatatacaagctcatgcatgcgttggaggtaaaagtgtgggagaagacataaggaaacttgagtatggagttcatgtggtgtctggaactcctggccgagtttgtgacatgatcaaaaggagaacattacgcacaagggctatcaagatgctagttcttgatgaatctgatgaaatgttgagcagagggtttaaagatcaaatttatgatgtgtatagatatctcccacctgaccttcaggtttgtttgatttctgctacccttcctcatgaaatactggagatgacaaacaagttcatgacagatcctgtaaggatccttgtaaaacgtgatgaattgacattggagggcatcaagcaattttttgttgcggtcgaaagggaggaatggaagtttgataccctgtgtgatctttatgataccctcactatcactcaagctgttatattctgtaatactaagcgaaaggtggactggttaactgaaaaaatgcgtaacaacaatttcactgtctcatcaatgcacggtgacatgcctcagaaagaaagagatgctattatgggagaatttcgtgctggaacaacccgtgtgctaataacaactgacgtttgggcccgtggtcttgatgtacagcaggtttctctagttatcaattatgaccttcccaataatcgtgagctttacattcatcgaattggtcgctctggacgttttggacgaaagggtgttgcaataaattttgtgaagagtgatgacatcaagatcttgagagacattgaacaatactacagtactcagattgatgaaatgccaatgaatgttgctgatcttatataaattgtcacttggtgtgcttgatgaagtgggtttgtcatatcttgtggtagggagtagtgtttgaatgtggtttcttgctatggaatacatttgtgatgctcttgtaaactttgacacttggtcaaattagaatttttaccatagagtgattgactgtaccagaggtagtgtttttctttgctgatgaggttgaaaattgagattaatgtgtaaattttgttgagttgttttatctaatgtattacacttgatattgaatttgtaattttatgcttc

SEQ ID NO: 25135 - protein, 242 aa, Glycine max
MIKRRTLRTRAIKMLVLDESDEMLSRGFKDQIYDVYRYLPPDLQVCLISATLPHEILEMTNKFMTDPVRILVKRDELTLEGIKQFFVAVEREEWKFDTLCDLYDTLTITQAVIFCNTKRKVDWLTEKMRNNNFTVSSMHGDMPQKERDAIMGEFRAGTTRVLITTDVWARGLDVQQVSLVINYDLPNNRELYIHRIGRSGRFGRKGVAINFVKSDDIKILRDIEQYYSTQIDEMPMNVADLI

SEQ ID NO: 25136 - protein, 229 aa, Glycine max
MLVLDESDEMLSRGFKDQIYDVYRYLPPDLQVCLISATLPHEILEMTNKFMTDPVRILVKRDELTLEGIKQFFVAVEREEWKFDTLCDLYDTLTITQAVIFCNTKRKVDWLTEKMRNNNFTVSSMHGDMPQKERDAIMGEFRAGTTRVLITTDVWARGLDVQQVSLVINYDLPNNRELYIHRIGRSGRFGRKGVAINFVKSDDIKILRDIEQYYSTQIDEMPMNVADLI

SEQ ID NO: 25137 - protein, 220 aa, Glycine max
MLSRGFKDQIYDVYRYLPPDLQVCLISATLPHEILEMTNKFMTDPVRILVKRDELTLEGIKQFFVAVEREEWKFDTLCDLYDTLTITQAVIFCNTKRKVDWLTEKMRNNNFTVSSMHGDMPQKERDAIMGEFRAGTTRVLITTDVWARGLDVQQVSLVINYDLPNNRELYIHRIGRSGRFGRKGVAINFVKSDDIKILRDIEQYYSTQIDEMPMNVADLI

SEQ ID NO: 25138 - DNA, 1860 bp, Glycine max
tcttccattcatttgcatctcattctgaatcttgcgccgtttccctctcccactcgccagtgttgcggaattttttagaagtgtgaatgttcgttcatgcatgagcggctcttaaagtttccttgcggattcgattgcgatatattgagactgcgatggcctcagccgtcgtgaatttcttgaacgcgacgttggattgggtgacgtttgcgtcggatggtccttctgcgcgagctgtagttttcggagtccatatcggtggacatttgtttatcgaagtgtttttgctagttgtcatacttttcttgctttcacagaaaagttacaagcctcctaaaaggcctttaacaaataaggaaattgatgagttatgtgacgaatgggttccggaaccccttattccttctcttaataaagagttgcagtatgaaccaccagtgctggagagtgctgctgggccacataccataattaatggcaaagaagttgtcaattttgcttcagcaaactatcttgggtttataggtcatccaaagctacttgactcatgttcttctgctttagcgaaatacggtgttggttcttgtggtccccgtggattttatgggacaattgatgtccaccttgactgtgaagcaagaatagcaaaatttttaggaacccctgaatcaattctgtactcttatggactttccaccatgttcagtgcaattcccgctttctctaaaaaaggagatgtaattgtggcggatgagggagtccgctggggaatacagaatggcctttatctttctagaagcacagtggtgtattttaagcacaatgacatggattctttaagagaaactctagagaacattactgccaaatataagaaggccaagaatttgaggcgttatattgttattgaagctgtctaccagaattctggggaaatagcacccttggacgagatcattaaattgaaggaaaaatatcgctttcgtgttttgctagatgagagcaactcattgggtgtgcttggaagttctggaagaggtctcactgaatactgtggagttccagttgagaagatagacattataactgcttctatgggacatgcattggccacagaaggaggattctgcactggaagtacaagagttatagatcaccaacgattgagtagctctggttatgtcttttctgcttctttgcccccatatcttgcaagtgctgcaattacagctattgatgtcctggaggaaaatcccaatctgataaaaaagctgaagaaaaatattgcttttttaagaaaaggattgtcaaaaataccaggcatcacaattacaagtaatccagagtcacctattgtttatttgagattagagaaatcaagaggttccatgaaagatgacctgcatctgcttgaaaatatcgcggaacgggttttgaaagaagaatctgtatttgtggttgtttccaaaagatcaacattggacaaatgccgtttgcctgtgggaattagattgtttgtttctgctgggcattcagagtctgatctgctcaaggcatctgaatcattgaaaaaggttgtagcatcagtcctgggtggtcagaattgaacgctctacatctttctttttcatctaatgtaccaaaacataagttcgattccatgtgtttaggtgagcaattttgaaatccaggcgatagagaaagtcccgtagttcttaatttgtgtagtattttatgttccagtttagggtaacagtattttgtgcgtgttgctcattggttgtctaaagtagtagaataaggatttaatgtttcttgtcatgagttggggaatatacctatgaattacattccgatatc

SEQ ID NO: 25139 - protein, 483 aa, Glycine max
MASAVVNFLNATLDWVTFASDGPSARAVVFGVHIGGHLFIEVFLLVVILFLLSQKSYKPPKRPLTNKEIDELCDEWVPEPLIPSLNKELQYEPPVLESAAGPHTIINGKEVVNFASANYLGFIGHPKLLDSCSSALAKYGVGSCGPRGFYGTIDVHLDCEARIAKFLGTPESILYSYGLSTMFSAIPAFSKKGDVIVADEGVRWGIQNGLYLSRSTVVYFKHNDMDSLRETLENITAKYKKAKNLRRYIVIEAVYQNSGEIAPLDEIIKLKEKYRFRVLLDESNSLGVLGSSGRGLTEYCGVPVEKIDIITASMGHALATEGGFCTGSTRVIDHQRLSSSGYVFSASLPPYLASAAITAIDVLEENPNLIKKLKKNIAFLRKGLSKIPGITITSNPESPIVYLRLEKSRGSMKDDLHLLENIAERVLKEESVFVVVSKRSTLDKCRLPVGIRLFVSAGHSESDLLKASESLKKVVASVLGGQN

SEQ ID NO: 25140 - protein, 302 aa, Glycine max
MFSAIPAFSKKGDVIVADEGVRWGIQNGLYLSRSTVVYFKHNDMDSLRETLENITAKYKKAKNLRRYIVIEAVYQNSGEIAPLDEIIKLKEKYRFRVLLDESNSLGVLGSSGRGLTEYCGVPVEKIDIITASMGHALATEGGFCTGSTRVIDHQRLSSSGYVFSASLPPYLASAAITAIDVLEENPNLIKKLKKNIAFLRKGLSKIPGITITSNPESPIVYLRLEKSRGSMKDDLHLLENIAERVLKEESVFVVVSKRSTLDKCRLPVGIRLFVSAGHSESDLLKASESLKKVVASVLGGQN

SEQ ID NO: 25141 - protein, 259 aa, Glycine max
MDSLRETLENITAKYKKAKNLRRYIVIEAVYQNSGEIAPLDEIIKLKEKYRFRVLLDESNSLGVLGSSGRGLTEYCGVPVEKIDIITASMGHALATEGGFCTGSTRVIDHQRLSSSGYVFSASLPPYLASAAITAIDVLEENPNLIKKLKKNIAFLRKGLSKIPGITITSNPESPIVYLRLEKSRGSMKDDLHLLENIAERVLKEESVFVVVSKRSTLDKCRLPVGIRLFVSAGHSESDLLKASESLKKVVASVLGGQN

SEQ ID NO: 25142 - DNA, 765 bp, Glycine max
acaatctctcatcccttgtttgtttccatttcttgcttctattatttacttgtttttctctagtattcatggtgctcgctggtaaacttagtactgaacttggggtgaaagcatccgctaccaaatggttcaacctcttaaccacgcaacttcaccatgttcagaacctttgtgaaagagtgcatgaaaccaagctgcatgatggtgatgactggcacggtgttggtaattcggttaaacactggacttatgtcatagacggcaaggtacacacatgtcaggagagtattgaagccattgatgaagagaacaaaacaatcaaattcatgctcttcggtggagatattagtcagcactacaagagctttaagctgatctttgaagtgactgataagaacgatggcggtgctgctgttaaatggactcttgaatatgagaagatcaaagagaatattgatcctccacatggctacatggactactttgacaaatccactaaagagatggatgcttatcttgtcaaggcatagctcctaaaattatcaagaaaataacaacaaaggagtaatggatttggctttgaggatatatatatatatatatatatatatatatatatatatatatatatatatatataagtgttttatctatatagttattgtgatgtttgaaatgtagaataaaattataatatgcgtgtttgcttctgtccatccttcgtttctgtcgaataaatgcaggttggtggattgaagtatatgt

SEQ ID NO: 25143 - protein, 175 aa, Glycine max
NLSSLVCFHFLLLLFTCFSLVFMVLAGKLSTELGVKASATKWFNLLTTQLHHVQNLCERVHETKLHDGDDWHGVGNSVKHWTYVIDGKVHTCQESIEAIDEENKTIKFMLFGGDISQHYKSFKLIFEVTDKNDGGAAVKWTLEYEKIKENIDPPHGYMDYFDKSTKEMDAYLVKA

SEQ ID NO: 25144 - protein, 153 aa, Glycine max
MVLAGKLSTELGVKASATKWFNLLTTQLHHVQNLCERVHETKLHDGDDWHGVGNSVKHWTYVIDGKVHTCQESIEAIDEENKTIKFMLFGGDISQHYKSFKLIFEVTDKNDGGAAVKWTLEYEKIKENIDPPHGYMDYFDKSTKEMDAYLVKA

SEQ ID NO: 25145 - DNA, 1312 bp, Glycine max
acttcatttcactcacccctttaactgccatccattctttctctcttgaggggcaggggtaccacctcaaagaatatcctctttgatccctttctctatttccttttctttattattattatataataacaccctctaaatacttcctttacccctctttctctctctcatcttaaacacaaacaaatatactactacttcaaactttgatatgcaactggcggcagaactccaacgcacccatcaccgccaccaaaggcaaaggcaacaacaggacaccacccccatgtgccgccaaatccagctcactatctccgatcacaccgtcgccggagacgccgtcgctgacgacggcgaggatctcttcattccgcccctcaacttcgccatggttgataatggcattttccgctccggcttccccgaacccgccaacttctccttcctccaaaccctcggccttcgttccatcatatatctgtgtcctgagccgtatccggaggccaacatggagttcctcaagtcaaatgggatcaagctttttcagtttgggattgagggccataaggagccttttgtgaacatcccagaggacacaatccgtgaagcactagaagttgttcttgatgtcaggaaccacccagttataattcactgtaagcggggaaagcaccgaacaggttgcttggtaggatgctatagaaaattgcaaaaatggtgcttgtcatccgtctttgatgaataccaacgctttgcagccgccaaagcaagagtttcagatcagaggttcgtagagttgtttgatatttccagcatgaaacatttgcccatacccttttcatgtttgaagaggtaacatataccaagctatgctgagttgggtttactttctttagtttgtgaaagtgaagccaaggttcttcctttgaataaataggaaaaggtgatgaactccttcaatgcattgcagcggcaaaggaataattcttctcccattttcaaaataagacaagaaaattctaggaatagtagagcattacctgtatttgtatgtgttaaaattctgccctatatttcccttctctccctacaattggcccttagtgtacctcaccaccttttgtcctattttctttctctttatttttatgtttttctttgctgctccccattcatcaacaatgagtgtagatatatcttgattttttctcgaggctcagagaaattcaagaaggctacaaaaatgacttgtttgtctacccaaaatcttggtgggtagtaaagcagaggaacttataaaattttatttgct

SEQ ID NO: 25146 - protein, 214 aa, Glycine max
MQLAAELQRTHHRHQRQRQQQDTTPMCRQIQLTISDHTVAGDAVADDGEDLFIPPLNFAMVDNGIFRSGFPEPANFSFLQTLGLRSIIYLCPEPYPEANMEFLKSNGIKLFQFGIEGHKEPFVNIPEDTIREALEVVLDVRNHPVIIHCKRGKHRTGCLVGCYRKLQKWCLSSVFDEYQRFAAAKARVSDQRFVELFDISSMKHLPIPFSCLKR

SEQ ID NO: 25147 - protein, 189 aa, Glycine max
MCRQIQLTISDHTVAGDAVADDGEDLFIPPLNFAMVDNGIFRSGFPEPANFSFLQTLGLRSIIYLCPEPYPEANMEFLKSNGIKLFQFGIEGHKEPFVNIPEDTIREALEVVLDVRNHPVIIHCKRGKHRTGCLVGCYRKLQKWCLSSVFDEYQRFAAAKARVSDQRFVELFDISSMKHLPIPFSCLKR

SEQ ID NO: 25148 - protein, 155 aa, Glycine max
MVDNGIFRSGFPEPANFSFLQTLGLRSIIYLCPEPYPEANMEFLKSNGIKLFQFGIEGHKEPFVNIPEDTIREALEVVLDVRNHPVIIHCKRGKHRTGCLVGCYRKLQKWCLSSVFDEYQRFAAAKARVSDQRFVELFDISSMKHLPIPFSCLKR

SEQ ID NO: 25149 - DNA, 1292 bp, Glycine max
acatactcatcaggacagattcaagggagatggatgatgaaattgaaaggttcatcaaagtatggatttcagcaatcttatgtctatgttattgttattacatagcttcaagaataccaaagggcttcttgagacttctctccctccttccaattctctacctcttcatcacccttcccttgaaactctcttcacccaccttagttggatacacttccttcttcatttcttggcttggcactttcaagctcttccttttctccttcaaccaaggccctcttgccctatcacccccaaacattgttcaattcatctccattgcttcccttcccatcacccccaaacaaaacccatcaaccaatgaaaaaaacaccaccaacaaacccaaatggcttttgttcctaaaagttcttatttttgtaatgatcttaggtgtttataactacaaagaaaccttgcatcctgatttcttgttagtcatttattgctgccacgtgtaccttgccttagagcttatgttagtccttgttggagccactgttcaaaccctttttggttttgagatagaacctcaattcaacgaaccctacctttgtacatctcttcaagacttttggggtcgtagatggaacctcacggttactcatattctacggcccaccgtatacgaccctatacgccgtatgtctacgagttttgtcggccccttgtgtgccacgtcagctgccatgttggccacgttccttgtgtccgggcttgtgcacgagttattatattattaccttacacgtgtgcctcccacgtgggaggttacgtgtttttttgtgcttcacggtgtgtgtatggtagtggaggtggctgtgaagaaggtggctctccgtcgtgggtggcagctgcaccgtgctgtgtcggggccgctcgtggtggcgcttttggcggtcaccgcgaattggctgttttttcctcaactgttgaggaatggtttggataggaagtccattgaggagtatgctattttggtggattttgttaagtcaaagttaccatttaagaatgtttaacttgctagggcgaacattgttaaaggatatgattgtgagccaaaagtaatgttcactctaaggactaaggatacttaaacattacgtatgtttaacgtgttagggtgcaaaggggctcattttttacttataaaaaataatataactattaaataagacatgttaattttggaaaacaatgagtgtgatcacccaataataaacatctgaagatgtgcaattcaaaagtct

SEQ ID NO: 25150 - protein, 352 aa, Glycine max
ILIRTDSREMDDEIERFIKVWISAILCLCYCYYIASRIPKGFLRLLSLLPILYLFITLPLKLSSPTLVGYTSFFISWLGTFKLFLFSFNQGPLALSPPNIVQFISIASLPITPKQNPSTNEKNTTNKPKWLLFLKVLIFVMILGVYNYKETLHPDFLLVIYCCHVYLALELMLVLVGATVQTLFGFEIEPQFNEPYLCTSLQDFWGRRWNLTVTHILRPTVYDPIRRMSTSFVGPLCATSAAMLATFLVSGLVHELLYYYLTRVPPTWEVTCFFVLHGVCMVVEVAVKKVALRRGWQLHRAVSGPLVVALLAVTANWLFFPQLLRNGLDRKSIEEYAILVDFVKSKLPFKNV

SEQ ID NO: 25151 - protein, 343 aa, Glycine max
MDDEIERFIKVWISAILCLCYCYYIASRIPKGFLRLLSLLPILYLFITLPLKLSSPTLVGYTSFFISWLGTFKLFLFSFNQGPLALSPPNIVQFISIASLPITPKQNPSTNEKNTTNKPKWLLFLKVLIFVMILGVYNYKETLHPDFLLVIYCCHVYLALELMLVLVGATVQTLFGFEIEPQFNEPYLCTSLQDFWGRRWNLTVTHILRPTVYDPIRRMSTSFVGPLCATSAAMLATFLVSGLVHELLYYYLTRVPPTWEVTCFFVLHGVCMVVEVAVKKVALRRGWQLHRAVSGPLVVALLAVTANWLFFPQLLRNGLDRKSIEEYAILVDFVKSKLPFKNV

SEQ ID NO: 25152 - protein, 212 aa, Glycine max
MILGVYNYKETLHPDFLLVIYCCHVYLALELMLVLVGATVQTLFGFEIEPQFNEPYLCTSLQDFWGRRWNLTVTHILRPTVYDPIRRMSTSFVGPLCATSAAMLATFLVSGLVHELLYYYLTRVPPTWEVTCFFVLHGVCMVVEVAVKKVALRRGWQLHRAVSGPLVVALLAVTANWLFFPQLLRNGLDRKSIEEYAILVDFVKSKLPFKNV

SEQ ID NO: 25153 - DNA, 1070 bp, Glycine max
attaaataacccatgtccctgcattagttaaatccttctgctctgcgtcttcttgttcctctcgcccagaatccgagatcaaccctgacccctaaggccaggggtttttctcggcttcttcagattcctgaaatggcgtctgtttcagctttagccaagtacaagctcgtcttcttgggtgaccaatccgtgggcaaaaccagcatcatcactcgcttcatgtacgataaattcgataacacctatcaggctacaattggtattgattttctatcaaaaactatgtatctcgaagatcgaactgttcgactgcagttgtgggatacagctggccaggaaagatttagaagtcttattccaagctacattagggactcatctgtagctgttattgtatatgatgttgcaagccggcagactttcctaaatactgcaaagtggattgaagaggtgcgaacagagagaggcagtgatgtcattattgttcttgttgggaacaaaactgatcttgtcgagaaaagacaagtctctatagaggaaggggaagcaaaagcacgtgagctcaatgtcatgttcattgaaactagtgctaaggctgggtttaatataaaggccctatttcgaaaaattgctgcagcactacctggaatggaaacactatcttctgcaaaacaagaagacatggttgatgtaaacttaaagtctacaaatggcagtgctcagtctcaacctcagtcaagtggatgtgcttgttaagtatactttatcatgtgcggtccacctttttgtgtcatgctttttgttttatgcgggtttttctatagtcttctacagcattatatgaaaagatgaaagaatatataagcggatcagggtaggggttgataaaagttctgtctagacaatttctgttgttagttggttttttgcctataatgtgtactaatgaatttttttttttgaacggcataatgtagtaaaggtacccaacccaaaattgaattgtgttcattgtaccctgtaaaacgtgtgatatgtttaaaatttaacttgttcatctggattgacgt

SEQ ID NO: 25154 - protein, 207 aa, Glycine max
MASVSALAKYKLVFLGDQSVGKTSIITRFMYDKFDNTYQATIGIDFLSKTMYLEDRTVRLQLWDTAGQERFRSLIPSYIRDSSVAVIVYDVASRQTFLNTAKWIEEVRTERGSDVIIVLVGNKTDLVEKRQVSIEEGEAKARELNVMFIETSAKAGFNIKALFRKIAAALPGMETLSSAKQEDMVDVNLKSTNGSAQSQPQSSGCAC

SEQ ID NO: 25155 - protein, 178 aa, Glycine max
MYDKFDNTYQATIGIDFLSKTMYLEDRTVRLQLWDTAGQERFRSLIPSYIRDSSVAVIVYDVASRQTFLNTAKWIEEVRTERGSDVIIVLVGNKTDLVEKRQVSIEEGEAKARELNVMFIETSAKAGFNIKALFRKIAAALPGMETLSSAKQEDMVDVNLKSTNGSAQSQPQSSGCAC

SEQ ID NO: 25156 - protein, 157 aa, Glycine max
MYLEDRTVRLQLWDTAGQERFRSLIPSYIRDSSVAVIVYDVASRQTFLNTAKWIEEVRTERGSDVIIVLVGNKTDLVEKRQVSIEEGEAKARELNVMFIETSAKAGFNIKALFRKIAAALPGMETLSSAKQEDMVDVNLKSTNGSAQSQPQSSGCAC

SEQ ID NO: 25157 - DNA, 1168 bp, Glycine max
aactatcccttcttcctttctctcttctattctcattcgcatttcgcaccaagtcaatggcttccaccaccactctctccttccacttcccatatccaacaacatcgctctcttctcactctcaactttcgccctctccgcaaccttccccattcaaaccctgcaccgttgcttcccgccaaaacctctgcacctccaacaccctctctgtctctgcttccagaaaaaactcaacctctccaatttttctcgctacggcttctggcaaatctgagcctatgctccctcctttcaacgttttgattactggctcaaccaaaggaatagggtatgcgttggcgaaagagtttttaaaagctggtgacaacgtcctgatttgctcaagatcagatgaaagggtaaagactgctgtccagaacttgagagtagaatttggggagcagcatgtgtggggaactaaatgtgatgtaaaaaatgcagaggatgtgaagaatttagtttcatttgctcaagaaaaaatgaaatacattgatatatggataaacaatgctggatcaaatgcatatagctataagccacttgttgaggcttcagatgaagatcttattgaggtggttacaacaaatacacttggcttgatgatatgttgtcgagaggcaatcaagatgatggtgaaccaacctcgtggaggtcatattttcaatatagacggggcaggttcagatggaagaccaactcctaggtttgctgcatatggagcaacaaagagaagtgtggtgcatttaacaaagtcattacaggcagaattgcggatgcaagatgttaaaaacgttgtggtgcataatctttcgccaggaatggttacaacggatcttctcatgtctggtgttaatacaaagcaggcaaagtttttcattaatgtcttggcagaaccagctgaagtggttgcagaatacttagttccaaacattagatctgtccctgcaaatggatcaatgaaaccaacatacattcgattcctcacgggtttgaaagcctattcccagatattttcaagattggcattcggcgcaagaaggaatcgatacattcttgaagattgaactgcataaatatttgtgctatgtgcaacttttatttcttgttttaaatatctattcatcccccc

SEQ ID NO: 25158 - protein, 366 aa, Glycine max
LSLLPFSLLFSFAFRTKSMASTTTLSFHFPYPTTSLSSHSQLSPSPQPSPFKPCTVASRQNLCTSNTLSVSASRKNSTSPIFLATASGKSEPMLPPFNVLITGSTKGIGYALAKEFLKAGDNVLICSRSDERVKTAVQNLRVEFGEQHVWGTKCDVKNAEDVKNLVSFAQEKMKYIDIWINNAGSNAYSYKPLVEASDEDLIEVVTTNTLGLMICCREAIKMMVNQPRGGHIFNIDGAGSDGRPTPRFAAYGATKRSVVHLTKSLQAELRMQDVKNVVVHNLSPGMVTTDLLMSGVNTKQAKFFINVLAEPAEVVAEYLVPNIRSVPANGSMKPTYIRFLTGLKAYSQIFSRLAFGARRNRYILED

SEQ ID NO: 25159 - protein, 348 aa, Glycine max
MASTTTLSFHFPYPTTSLSSHSQLSPSPQPSPFKPCTVASRQNLCTSNTLSVSASRKNSTSPIFLATASGKSEPMLPPFNVLITGSTKGIGYALAKEFLKAGDNVLICSRSDERVKTAVQNLRVEFGEQHVWGTKCDVKNAEDVKNLVSFAQEKMKYIDIWINNAGSNAYSYKPLVEASDEDLIEVVTTNTLGLMICCREAIKMMVNQPRGGHIFNIDGAGSDGRPTPRFAAYGATKRSVVHLTKSLQAELRMQDVKNVVVHNLSPGMVTTDLLMSGVNTKQAKFFINVLAEPAEVVAEYLVPNIRSVPANGSMKPTYIRFLTGLKAYSQIFSRLAFGARRNRYILED

SEQ ID NO: 25160 - protein, 274 aa, Glycine max
MLPPFNVLITGSTKGIGYALAKEFLKAGDNVLICSRSDERVKTAVQNLRVEFGEQHVWGTKCDVKNAEDVKNLVSFAQEKMKYIDIWINNAGSNAYSYKPLVEASDEDLIEVVTTNTLGLMICCREAIKMMVNQPRGGHIFNIDGAGSDGRPTPRFAAYGATKRSVVHLTKSLQAELRMQDVKNVVVHNLSPGMVTTDLLMSGVNTKQAKFFINVLAEPAEVVAEYLVPNIRSVPANGSMKPTYIRFLTGLKAYSQIFSRLAFGARRNRYILED

SEQ ID NO: 25161 - DNA, 1112 bp, Glycine max
aacaacaccgataggaggaattggagaagaaacaggaacagaaaggtttgggaaggaagcagaaatcgggggtggtgtgagagacaagcatggcgacgtgtcttcgccttgggagatttacgactattgattcgctctctctcttcgtttccaccgctagattctccttttcttcatcatcttcgtcgtcgtcctcgtcgtcatcttccggtaagtccaagacggggaagaagctgatggatcgtctttccaccgttatcgacgccgtcaatgatcgcaaactacctcctgagctacgtggccagcgcagcaatgtcaggtcagaaactgacattatcaacgttgttgagcaaagaatatggcataccatggaagaagggaagtttgagaatttgccaggcaaaggcaagccgcttaagctcgacacaaatcctcatgcagatccagctgaagacaccctgtaccgtatcctgtcaaaaaacggatatgcaccggagtgggttgaacttaacaaagagattagatctaaaatatctgaatggaggaagtccttgaagaaagcttgggctactaagtgcagtggagatcactctgagtgggttgaaagttcagaggctttgaaatctcagttacgagaaatcaatgataaggttttccgttataaccttattgtgccttttggtcggcaaatgtttggccttaagtgggagaaagagctaggttacttagaagaaaaatgagaatcattgttgttaaatttgagccagttggttcactatagtagaagattaaaatttgttattttcctgagaaaagtcatgccaggcgactaatcaactaggaactagcttaagttattcagttcaactattgttgattacttttaatttcttagcattatgttactggttatgattcctctttcaggcttattagtatggctatatttatatggttcataacctccgatcatgtacatcccaaggatacaatacaagtaaagatagtgaaaatgtatgtgactcaacaatattagttgtcctgacgattgtattatcagtttttgctttgagacaaattgtagacttcagttttctctttcagtaaaaaat

SEQ ID NO: 25162 - protein, 216 aa, Glycine max
MATCLRLGRFTTIDSLSLFVSTARFSFSSSSSSSSSSSSSGKSKTGKKLMDRLSTVIDAVNDRKLPPELRGQRSNVRSETDIINVVEQRIWHTMEEGKFENLPGKGKPLKLDTNPHADPAEDTLYRILSKNGYAPEWVELNKEIRSKISEWRKSLKKAWATKCSGDHSEWVESSEALKSQLREINDKVFRYNLIVPFGRQMFGLKWEKELGYLEEK

SEQ ID NO: 25163 - protein, 167 aa, Glycine max
MDRLSTVIDAVNDRKLPPELRGQRSNVRSETDIINVVEQRIWHTMEEGKFENLPGKGKPLKLDTNPHADPAEDTLYRILSKNGYAPEWVELNKEIRSKISEWRKSLKKAWATKCSGDHSEWVESSEALKSQLREINDKVFRYNLIVPFGRQMFGLKWEKELGYLEEK

SEQ ID NO: 25164 - protein, 123 aa, Glycine max
MEEGKFENLPGKGKPLKLDTNPHADPAEDTLYRILSKNGYAPEWVELNKEIRSKISEWRKSLKKAWATKCSGDHSEWVESSEALKSQLREINDKVFRYNLIVPFGRQMFGLKWEKELGYLEEK

SEQ ID NO: 25165 - DNA, 1107 bp, Glycine max
atctctcataattgaaactaagctacctaccattctttcccattcctgagtttccattgccgcgacatctgaattcctccttgtcactcataatcaccaaatagaagccataaacaaatgaatgccatagcagcagaacaagtgctggagccatggcacaagctagacgacaaagtcgttttggtgacgggtgcttcctcggggctcgggcgagatttctgcatcgacctcgccaaagctggctgctgtgtcgtcgcggcagctcgtcgcctcgatcgcctcacttccctctgccacgaaatcaaccaccgatggccctcgaacgtcggaatccaccgcgcggtggcggtggagcttgatgtcgccgccgatggccccgccatcgacagggctgtgcagaaggcctgggacgcctttggccgcgttgattccttgattaacaacgctggtgtcagaggaagtgttaaatcacccttgaaattgtctgaagaggaatgggatcatgtcttcaagactaacctaactggttgttggttggtgtcaaaatatgtatgcaaacgcatgtgtgatatccagcttaagggatcaattattaatatttcttcagtttctggtttaaatcgggggcaattgcctggagctgctgcatatgcatcttcgaaggcaggggtaaacatgctgactaaggtcatggctatggaattggggatgcacaaaattagagtaaattccatatcccctggaattttcaaatctgaaataactgaaaatttattacaaaaagattggctgaatgatgtggtcaggaaaataatgcctttgagaagattaggtacttcagatccagcattaacatctctagctcgttatcttattcatgattcttctgagtacgtcacgggcaacaattttattgtcgattatggaggcaccttaccaggtgtaccaatttattcttctctgtaaattttggtacattatgcactaacgaaaagtaatactatgaattattccattacatatcttcaaattagacaatatggagttctgaagtctatgtatatggagaattattgtgaagtggctaccaccttgatcttaccatgt

SEQ ID NO: 25166 - protein, 282 aa, Glycine max
MNAIAAEQVLEPWHKLDDKVVLVTGASSGLGRDFCIDLAKAGCCVVAAARRLDRLTSLCHEINHRWPSNVGIHRAVAVELDVAADGPAIDRAVQKAWDAFGRVDSLINNAGVRGSVKSPLKLSEEEWDHVFKTNLTGCWLVSKYVCKRMCDIQLKGSIINISSVSGLNRGQLPGAAAYASSKAGVNMLTKVMAMELGMHKIRVNSISPGIFKSEITENLLQKDWLNDVVRKIMPLRRLGTSDPALTSLARYLIHDSSEYVTGNNFIVDYGGTLPGVPIYSSL

SEQ ID NO: 25167 - DNA, 1077 bp, Glycine max
agattgaatattgaggaagaggatgattcacagcccaaaaagaaggttcgtttgggggttcctgctacacaatggatttcagtttacaatgcaagactgccaatgaagcaaaggtaccattacaatgtagcggacgcaagattagcacaacatgtggagagagggattgctgatggccttctgattagttgtgtggcttcttgttccaatctctgggcccttattatggatgcaggaactggcttttcaagtcaagtttataagttgtcaccatttttcttacacaaggaatggatcatggaacagtgggagaagaactattacattacttctattgcaggggctaataatgggagctctctcgtggtgatgtcaaaaggcacacagtatacacaacaatcatacaaagtaagtgactcattcccattcaaatggataaacaagaagtggagagaaggttttcatgtgacttcaatggctactgctggaagtcgttggggtgttgttatgtcacgaaatgctggattcagtgatcaggttgttgaacttgattttctctatcctagtgagggaatccacagacgatgggataatggttataggattacagcaacggctgctacatgggatcaatctgctcttatacttagcattcctaggcgcaggccaggagatgaaacccaggaaactctgcgtacatctcaatttccaagcacacatgttaaggaaaaatggtcaaaaaacctttaccttgcttgtttgtgctatgggcgcacagtatgctaatttccttcacaggtcaacgtattgtgtctgaaatttatatattttgtaatggcccaatcaagtataacatagcagagaattgttgtatctttagtattattctctctcccctcccattctattacaagttccttgggggtgggggatgtggcagttaatgtatacagcttggctttatatgttactccattatgtattatatgtaggttttatcatttttttttgtctgattttcaagattgtttccgtgactagtctaataaaaacattgtatggatagttttccttgtg

SEQ ID NO: 25168 - protein, 261 aa, Glycine max
RLNIEEEDDSQPKKKVRLGVPATQWISVYNARLPMKQRYHYNVADARLAQHVERGIADGLLISCVASCSNLWALIMDAGTGFSSQVYKLSPFFLHKEWIMEQWEKNYYITSIAGANNGSSLVVMSKGTQYTQQSYKVSDSFPFKWINKKWREGFHVTSMATAGSRWGVVMSRNAGFSDQVVELDFLYPSEGIHRRWDNGYRITATAATWDQSALILSIPRRRPGDETQETLRTSQFPSTHVKEKWSKNLYLACLCYGRTVC

SEQ ID NO: 25169 - protein, 227 aa, Glycine max
MKQRYHYNVADARLAQHVERGIADGLLISCVASCSNLWALIMDAGTGFSSQVYKLSPFFLHKEWIMEQWEKNYYITSIAGANNGSSLVVMSKGTQYTQQSYKVSDSFPFKWINKKWREGFHVTSMATAGSRWGVVMSRNAGFSDQVVELDFLYPSEGIHRRWDNGYRITATAATWDQSALILSIPRRRPGDETQETLRTSQFPSTHVKEKWSKNLYLACLCYGRTVC

SEQ ID NO: 25170 - protein, 186 aa, Glycine max
MDAGTGFSSQVYKLSPFFLHKEWIMEQWEKNYYITSIAGANNGSSLVVMSKGTQYTQQSYKVSDSFPFKWINKKWREGFHVTSMATAGSRWGVVMSRNAGFSDQVVELDFLYPSEGIHRRWDNGYRITATAATWDQSALILSIPRRRPGDETQETLRTSQFPSTHVKEKWSKNLYLACLCYGRTVC

SEQ ID NO: 25171 - DNA, 1228 bp, Glycine max
aaaaaaaaaaaagcgtaataagaaataacgagagaaaaattctggggtttagaggagaaaaggggagaaagggtgggtattgcttcacacaaacacaacagtgtctgctgcaccttgcaatggtttcgctatcaacatggtttcgctacattgcccacaagctcgaatactccttctccctcagctggaagaactacaaaggaggtcaaattacagacagagaggtacgtgatgttgtttggaaaaacttctttcaaggaaagctgacgtacttgcactggaataaaggagaggagatggcccctactattgatggaaaagcagtaactcttgttcggaaattaccagttgtagacccaacgcgtgtttttgtaggagatgttgtggttgtgaaggaccctgagaagccagataactacctactcagaagattaactgcagttgaaggctatgaaatggtttctactgatgaaaaggatgaagcctttgttctcgagaaggatcaatgctgggtagtggctgaaaatgaaaaattgaaagccaaggaagcgaaggatagccgaacatttggtccagttcagatgacagacattgtaggcagagtcatatattgcctgcgaagtgctgtagaccatggccgggtacaaaacagttatttcggcatgcgaaaggatacaccagtgctggaagtggaacttgatgttgatgagatggcaaagagtcacaaagcctgaaacatttgtcccgagaaacactaactagtttgctttacgcatgccttagtttcttcttgtggattttccttgaagcacagattgaataataaaaaatatgatttttaaattgttgcaatgggatgatggtgttatgtggatgtcctctgcatgctaggcaattggctagctcttcccaagcagaaattggaagcggtctgtgttaaagcttgagttcgacattattgtatgctaagttctagcaaggactcctctgccctttgttctattcatatttggctgtaaaattgaccgagttttggtcatttttgttaatagtcgaggatgatagaaaaaaaggctgcattgttagaaataatagtttcagatattttcattttatgaagacctagtgcctcgactgagtgttcacttcttgccaatttgtctttctagggaacaatcgttgatatctgttctctttagtcagttgagtgaaaaagaacgtttaagtg

SEQ ID NO: 25172 - protein, 243 aa, Glycine max
KKKSVIRNNERKILGFRGEKGRKGGYCFTQTQQCLLHLAMVSLSTWFRYIAHKLEYSFSLSWKNYKGGQITDREVRDVVWKNFFQGKLTYLHWNKGEEMAPTIDGKAVTLVRKLPVVDPTRVFVGDVVVVKDPEKPDNYLLRRLTAVEGYEMVSTDEKDEAFVLEKDQCWVVAENEKLKAKEAKDSRTFGPVQMTDIVGRVIYCLRSAVDHGRVQNSYFGMRKDTPVLEVELDVDEMAKSHKA

SEQ ID NO: 25173 - protein, 204 aa, Glycine max
MVSLSTWFRYIAHKLEYSFSLSWKNYKGGQITDREVRDVVWKNFFQGKLTYLHWNKGEEMAPTIDGKAVTLVRKLPVVDPTRVFVGDVVVVKDPEKPDNYLLRRLTAVEGYEMVSTDEKDEAFVLEKDQCWVVAENEKLKAKEAKDSRTFGPVQMTDIVGRVIYCLRSAVDHGRVQNSYFGMRKDTPVLEVELDVDEMAKSHKA

SEQ ID NO: 25174 - protein, 145 aa, Glycine max
MAPTIDGKAVTLVRKLPVVDPTRVFVGDVVVVKDPEKPDNYLLRRLTAVEGYEMVSTDEKDEAFVLEKDQCWVVAENEKLKAKEAKDSRTFGPVQMTDIVGRVIYCLRSAVDHGRVQNSYFGMRKDTPVLEVELDVDEMAKSHKA

SEQ ID NO: 25175 - DNA, 1314 bp, Glycine max
ttgaagaatggagagattttcttctactttaccctcatgaagcaactattgaaaacatatatcatcattgggagagggtgtgccttgttgacattggagagcaagctgtcattcccgaaggcatcagcaagcacgtgaaccggagcaaatattttcttgctggtggaatagcaggaggtatttctcgtacagcaactgctcctcttgatcgtctgaaggtggtcttacaagttcaaagcgaacctgcttccatcatgccagcagtaacgaagatatggaagcaagatggtctgttaggatttttccgaggtaatggattgaatgttgtgaaggtatcaccagaaagtgccatcaaattttatgcttttgaaatgctgaaaaaagttattggagaggcccacagcaacaagtcagatattggtacagctgggaggcttgttgcaggtggtacggctggtgcaattgcacaggctgctatctatccaatggatctcattaaaactaggttacagacttgtccctctgaaggtggaaaggttcctaagctgggaacacttacaatgaatatatgggttcaagagggacctcgagctttctacagagggcttgttccatctctgcttggcatgattccttatgctgccattgatctcactgcttatgataccatgaaagatatatccaagagatatattcttcaggatagtgaacctggtcctctagtacaactaggatgtgggacaatttctggggctgttggagctacttgtgtctatccattgcaggttattcgaacaagactgcaggcacaaccttccaacacttccgatgcttacaagggaatgtttgatgcctttcggagaacttttcagcttgaaggctttataggtttctacaagggactctttccaaatctcctcaaagttgtgccagctgcaagcattacttatgtggtctatgaaagtttgaagaagactctggatctggattagagtttttatctaccgtacaatcacaagatgttccagacaacaaagaagtcgtttcaagtatgcttagttctaggcacaaccgcacaaggtacttgcagagttgtgaaaattcacattgttagtaaaattcgttcactggatagaccataccacagggttgagcttgattattatttttattgctgaagcaattatgctgatgatactttagtaagtcattaattgctgatggtggcgataagagggctatattagaaatcattcgttgtatatcttaaaacacaattttgtagtcagaagctcaaagtatttccccatgctt

SEQ ID NO: 25176 - protein, 329 aa, Glycine max
EEWRDFLLLYPHEATIENIYHHWERVCLVDIGEQAVIPEGISKHVNRSKYFLAGGIAGGISRTATAPLDRLKVVLQVQSEPASIMPAVTKIWKQDGLLGFFRGNGLNVVKVSPESAIKFYAFEMLKKVIGEAHSNKSDIGTAGRLVAGGTAGAIAQAAIYPMDLIKTRLQTCPSEGGKVPKLGTLTMNIWVQEGPRAFYRGLVPSLLGMIPYAAIDLTAYDTMKDISKRYILQDSEPGPLVQLGCGTISGAVGATCVYPLQVIRTRLQAQPSNTSDAYKGMFDAFRRTFQLEGFIGFYKGLFPNLLKVVPAASITYVVYESLKKTLDLD

SEQ ID NO: 25177 - protein, 245 aa, Glycine max
MPAVTKIWKQDGLLGFFRGNGLNVVKVSPESAIKFYAFEMLKKVIGEAHSNKSDIGTAGRLVAGGTAGAIAQAAIYPMDLIKTRLQTCPSEGGKVPKLGTLTMNIWVQEGPRAFYRGLVPSLLGMIPYAAIDLTAYDTMKDISKRYILQDSEPGPLVQLGCGTISGAVGATCVYPLQVIRTRLQAQPSNTSDAYKGMFDAFRRTFQLEGFIGFYKGLFPNLLKVVPAASITYVVYESLKKTLDLD

SEQ ID NO: 25178 - protein, 206 aa, Glycine max
MLKKVIGEAHSNKSDIGTAGRLVAGGTAGAIAQAAIYPMDLIKTRLQTCPSEGGKVPKLGTLTMNIWVQEGPRAFYRGLVPSLLGMIPYAAIDLTAYDTMKDISKRYILQDSEPGPLVQLGCGTISGAVGATCVYPLQVIRTRLQAQPSNTSDAYKGMFDAFRRTFQLEGFIGFYKGLFPNLLKVVPAASITYVVYESLKKTLDLD

SEQ ID NO: 25179 - DNA, 1204 bp, Glycine max
attggcctttactcatcctagcacccagcaacagatgcttatgtggaaaactacgccaaagacagtattactgttgaaaaagccaggagagcatctcatggaagaagctagagaggttgcttcttttctatattaccaagagaaaatgaatgtttttgtggaacctgatgtgcatgatatatttgctagaattcctgggtttggatttgttcagaccttctatacacaggatacttgtgatctacacgagaaagttgattttgtagcatgtttggggggagatggtgttatactgcatgcttcaaatctgttcagagatgctattccccccattgtgtcatttaaccttggttcccttggttttctgacttctcataacttcgaagacttcaagcaggacttacaacaagttatccatggtaatagtacaagagatggagtgtacatcactctcagaatgcgtctccgatgtgaaatttttcgtaagggtaaagctgtaccagggaaagtatttgatattctcaacgaggttgttgttgatcggggttctaatccgtacctttcaaagatcgaatgttatgaacacggtagacttataaccaaggtacaaggtgatggagtcattgtggccacccctactggaagcactgcctattctacagctgctggaggttccatggtccatccaaacgttccctgcatgctgtttaccccaatctgtccacattcactctcatttagaccagttatacttccagattctgctcaacttgaattaaagattccagaggatgcaagaagcaacacctgggtttcgtttgatggaaagagaagacagcaactttcaagaggagattcagtacgaatatctatgagtcagcatccacttccaacagttaacaagtttgaccaaactggtgattggtttcatagcttgattcgctgcctaaattggaatgaaaggcttgatcaaaaggccttataaagcatatgaaagtgaagaacaaagatgcactattctcctgtactgattatacattaagattgcagaactttgctatagtatattagttataaccaaattctaacattggtttcccaagagaagatagggtttgccaatgtgttttcagtgttattgtggcaagaggctgttgtatatattgacatttaaagctgtaaattgttgatctcagaagcagct

SEQ ID NO: 25180 - protein, 327 aa, Glycine max
LAFTHPSTQQQMLMWKTTPKTVLLLKKPGEHLMEEAREVASFLYYQEKMNVFVEPDVHDIFARIPGFGFVQTFYTQDTCDLHEKVDFVACLGGDGVILHASNLFRDAIPPIVSFNLGSLGFLTSHNFEDFKQDLQQVIHGNSTRDGVYITLRMRLRCEIFRKGKAVPGKVFDILNEVVVDRGSNPYLSKIECYEHGRLITKVQGDGVIVATPTGSTAYSTAAGGSMVHPNVPCMLFTPICPHSLSFRPVILPDSAQLELKIPEDARSNTWVSFDGKRRQQLSRGDSVRISMSQHPLPTVNKFDQTGDWFHSLIRCLNWNERLDQKAL

SEQ ID NO: 25181 - protein, 316 aa, Glycine max
MLMWKTTPKTVLLLKKPGEHLMEEAREVASFLYYQEKMNVFVEPDVHDIFARIPGFGFVQTFYTQDTCDLHEKVDFVACLGGDGVILHASNLFRDAIPPIVSFNLGSLGFLTSHNFEDFKQDLQQVIHGNSTRDGVYITLRMRLRCEIFRKGKAVPGKVFDILNEVVVDRGSNPYLSKIECYEHGRLITKVQGDGVIVATPTGSTAYSTAAGGSMVHPNVPCMLFTPICPHSLSFRPVILPDSAQLELKIPEDARSNTWVSFDGKRRQQLSRGDSVRISMSQHPLPTVNKFDQTGDWFHSLIRCLNWNERLDQKAL

SEQ ID NO: 25182 - protein, 314 aa, Glycine max
MWKTTPKTVLLLKKPGEHLMEEAREVASFLYYQEKMNVFVEPDVHDIFARIPGFGFVQTFYTQDTCDLHEKVDFVACLGGDGVILHASNLFRDAIPPIVSFNLGSLGFLTSHNFEDFKQDLQQVIHGNSTRDGVYITLRMRLRCEIFRKGKAVPGKVFDILNEVVVDRGSNPYLSKIECYEHGRLITKVQGDGVIVATPTGSTAYSTAAGGSMVHPNVPCMLFTPICPHSLSFRPVILPDSAQLELKIPEDARSNTWVSFDGKRRQQLSRGDSVRISMSQHPLPTVNKFDQTGDWFHSLIRCLNWNERLDQKAL

SEQ ID NO: 25183 - DNA, 1844 bp, Glycine max
aattctgtatttgttgactcctttccaaaattaaaagtgtggtatcggcagcatcaagcatgtatagcttcaacactctctggtcttgtccatggaaccccatttcatcagattgttgaggggcttcttaacatgatgttcagaaagattaatagaggaagccagactactattacatctggaagcagtagctcttctggacctgcaaatgaagatgcctctataggtccaaagttgcctgcttgggatattcttgaagccattccctttgtggttgatgctgctcttacagcctgtgctcatggaagactgtctccacgtgagttggcaacagggcttaaagatttagctgattttcttcctgcatctctggcaaccataataagttacttctctgctgaagtaactagaggagtttggaaacctgtatttatgaatggaacagattggcctagccccgctgcgaatctactgaatgttgagggacagatcaggaaaattttggctgcgactggtgtagatgtgcctagccttgcttcaggagacagctgtcccgcaacacttccattgcccttggctgccttcacaagccttaccataacctacaaagttgataaggcatcagagcgttttcttaatttggctggccaaacattggagagcctcgctgcaggttgtccatggccttgcatgccaattgtagcttccttgtggaccctaaaggcaaaacgttggagtgacttccttatcttctcagcatctagaactgtcttcctccacaacagtgatgcagcagttcaacttctaaagagctgcttcacagctacccttggcatgaatagctctcctatctcaagcagtggtggtgttggagccctacttggacatggatttaagtaccacttatgtggagggctttgccctgttgctccaggaattctctatttacgtgcgtatgggtcaatcagagatgttgttttcttgacggaagaaattgtttccatcttgatgcactctgtgagggaaattgtatgcagtggcctgccaagggatcgattggaaaagttgaaagcaaacaaagattgcataaaatatggacaggtttccctcgctgcttcaatgactcgggtgaagcttgctgctgccctcggggcctctttagtatggatatcaggagggttgatgctggttcaattattaataaaagaaactttgccattttggtttatatctgttcagagattagaccaagaagaaaagtctggtggaatggttgcaatgcttggtggatatgcacttgcttactttgcagttctttgtggtgcttttgcttggggggttgattcatcatcatcagcttcaaagcgacgtccgaaggttttaggtacccacatggagtttctggcaagtgcacttgatgataagatatcactaggatgtgattcagctacttggcgtgcctatgtgtcaggttttgtgagcttaatggtaggttgcacacctaactgggtgctggaagttgatgtgcacgtgttgaagagactgagcaatgggttgaggcagttgaacgaagaggagcttgctcttgctttgttgggtgttggtggagtaggtacaatggatgctgcagctgagctcatcatagacactgaaatataaacattttcactattctgagggcacctttgccttttaggatgagttgtacattagttaattttcatgtttataaagttgtgcagcatgttgaattaacagttttgttaaaagtaccacgtattagaatggaaaattttgtatctataacgttcatctaatgttagtaacttggtatatccatcccc

SEQ ID NO: 25184 - protein, 552 aa, Glycine max
NSVFVDSFPKLKVWYRQHQACIASTLSGLVHGTPFHQIVEGLLNMMFRKINRGSQTTITSGSSSSSGPANEDASIGPKLPAWDILEAIPFVVDAALTACAHGRLSPRELATGLKDLADFLPASLATIISYFSAEVTRGVWKPVFMNGTDWPSPAANLLNVEGQIRKILAATGVDVPSLASGDSCPATLPLPLAAFTSLTITYKVDKASERFLNLAGQTLESLAAGCPWPCMPIVASLWTLKAKRWSDFLIFSASRTVFLHNSDAAVQLLKSCFTATLGMNSSPISSSGGVGALLGHGFKYHLCGGLCPVAPGILYLRAYGSIRDVVFLTEEIVSILMHSVREIVCSGLPRDRLEKLKANKDCIKYGQVSLAASMTRVKLAAALGASLVWISGGLMLVQLLIKETLPFWFISVQRLDQEEKSGGMVAMLGGYALAYFAVLCGAFAWGVDSSSSASKRRPKVLGTHMEFLASALDDKISLGCDSATWRAYVSGFVSLMVGCTPNWVLEVDVHVLKRLSNGLRQLNEEELALALLGVGGVGTMDAAAELIIDTEI

SEQ ID NO: 25185 - protein, 508 aa, Glycine max
MMFRKINRGSQTTITSGSSSSSGPANEDASIGPKLPAWDILEAIPFVVDAALTACAHGRLSPRELATGLKDLADFLPASLATIISYFSAEVTRGVWKPVFMNGTDWPSPAANLLNVEGQIRKILAATGVDVPSLASGDSCPATLPLPLAAFTSLTITYKVDKASERFLNLAGQTLESLAAGCPWPCMPIVASLWTLKAKRWSDFLIFSASRTVFLHNSDAAVQLLKSCFTATLGMNSSPISSSGGVGALLGHGFKYHLCGGLCPVAPGILYLRAYGSIRDVVFLTEEIVSILMHSVREIVCSGLPRDRLEKLKANKDCIKYGQVSLAASMTRVKLAAALGASLVWISGGLMLVQLLIKETLPFWFISVQRLDQEEKSGGMVAMLGGYALAYFAVLCGAFAWGVDSSSSASKRRPKVLGTHMEFLASALDDKISLGCDSATWRAYVSGFVSLMVGCTPNWVLEVDVHVLKRLSNGLRQLNEEELALALLGVGGVGTMDAAAELIIDTEI

SEQ ID NO: 25186 - protein, 507 aa, Glycine max
MFRKINRGSQTTITSGSSSSSGPANEDASIGPKLPAWDILEAIPFVVDAALTACAHGRLSPRELATGLKDLADFLPASLATIISYFSAEVTRGVWKPVFMNGTDWPSPAANLLNVEGQIRKILAATGVDVPSLASGDSCPATLPLPLAAFTSLTITYKVDKASERFLNLAGQTLESLAAGCPWPCMPIVASLWTLKAKRWSDFLIFSASRTVFLHNSDAAVQLLKSCFTATLGMNSSPISSSGGVGALLGHGFKYHLCGGLCPVAPGILYLRAYGSIRDVVFLTEEIVSILMHSVREIVCSGLPRDRLEKLKANKDCIKYGQVSLAASMTRVKLAAALGASLVWISGGLMLVQLLIKETLPFWFISVQRLDQEEKSGGMVAMLGGYALAYFAVLCGAFAWGVDSSSSASKRRPKVLGTHMEFLASALDDKISLGCDSATWRAYVSGFVSLMVGCTPNWVLEVDVHVLKRLSNGLRQLNEEELALALLGVGGVGTMDAAAELIIDTEI

SEQ ID NO: 25187 - DNA, 963 bp, Glycine max
attggctccaatacagaatggaatccatccaatgcctgccaacaacctacctatgggatatccagtgctacagcagcctcccatgccagcaacaggtcaacctcatattgactccatgggttgtggtatatcaagttgtcatgtagttaacggagtccctgccccaggaaactttcaccccattcggatgaattctgggaatgatatggtggtggaccacagtgctcccgatatggctcctgttattccaccaaatggtacaatgtcgtctgtctcagaaatgccagtaagtccgacatcagtagcatccagtggtcatttcgccttcagtgcctcagaaatatcaggaatgggcgcagacgcatcagctcttgatacagcatttacatctgatgtggtaagttcagtaggactacagcttgcaccagatggtggaaatggaatttccagatcgctggatcaaattcagtggaattttagcttatctgatctaacggctgatttgccaaacttgggagatctaggagctctgggaaactatcctggttcaccatttttgccatctgattcagacattttgctagaatctcctgatcaacaggatatagtggatgacttctttgttaattctgagcccccatgctctcaatcggatgaggagaaatcttgaggtgaggcgagttgcatgtttcacattaattgttaggttagggaaaaattaggattaataaatgtcatctagcttacatggcatacaggtttactgttacctaagtgtaggcagcagcctgatttaatatcatcaggatgaagatagagaatgtcaattgttccctgtagtagcaaactagcaatcttttgcattcttttaagaaaactattatcaggatgagttgggacattgtttaggatgtaattgatttgatgcatttggattatatatatattgtttggatccttgtc

SEQ ID NO: 25188 - protein, 222 aa, Glycine max
LAPIQNGIHPMPANNLPMGYPVLQQPPMPATGQPHIDSMGCGISSCHVVNGVPAPGNFHPIRMNSGNDMVVDHSAPDMAPVIPPNGTMSSVSEMPVSPTSVASSGHFAFSASEISGMGADASALDTAFTSDVVSSVGLQLAPDGGNGISRSLDQIQWNFSLSDLTADLPNLGDLGALGNYPGSPFLPSDSDILLESPDQQDIVDDFFVNSEPPCSQSDEEKS

SEQ ID NO: 25189 - protein, 212 aa, Glycine max
MPANNLPMGYPVLQQPPMPATGQPHIDSMGCGISSCHVVNGVPAPGNFHPIRMNSGNDMVVDHSAPDMAPVIPPNGTMSSVSEMPVSPTSVASSGHFAFSASEISGMGADASALDTAFTSDVVSSVGLQLAPDGGNGISRSLDQIQWNFSLSDLTADLPNLGDLGALGNYPGSPFLPSDSDILLESPDQQDIVDDFFVNSEPPCSQSDEEKS

SEQ ID NO: 25190 - protein, 205 aa, Glycine max
MGYPVLQQPPMPATGQPHIDSMGCGISSCHVVNGVPAPGNFHPIRMNSGNDMVVDHSAPDMAPVIPPNGTMSSVSEMPVSPTSVASSGHFAFSASEISGMGADASALDTAFTSDVVSSVGLQLAPDGGNGISRSLDQIQWNFSLSDLTADLPNLGDLGALGNYPGSPFLPSDSDILLESPDQQDIVDDFFVNSEPPCSQSDEEKS

SEQ ID NO: 25191 - DNA, 1300 bp, Glycine max
agaatccaagccaatttgcagagtcgagtaaggaaaggaaaaatgaccgatgagcgatatgagaaggctatgtctctcgttactggtgtccttgattatgaacgtttcaaagatgtagacctcgttatagaggcagttattgagaatgtgaagttgaagcagcaaatattttctgacttagagaagtactgtccttcacattgcatccttgctactaacacatctacaattgatcttaatctgattggggagaaaacaaaggctcaagatcgtattgctggtgcacacttctttagtcctgcgcatgtgatgccacttctggaaatagttcgtactcagcacacttcaccacaagttgttgttgacttgctggatgttgggaagaagattaaaaagacaccaatagtcgtcgggaactgtactggctttgcagttaataggatgttctttccatacactcaatcagcactcttttatgttgatcttggtatggatgtttataagattgatcgtgcttgtaccaaatttggaatgcctatgggtcctttcagactggcagatctggttggttttggtgtggctgtggccactggtatgcaataccttgaaaatttcccagagagggtctacaaatcaatgctacttcctctgatgatggaggacaatagggcaggtgaagccacccaaaaaggattttacaagtatgagggcaagaggaaagcgactcctgatcctgaaattatgaaatatattgaaaaatctaggagcatggcaggagttacaccagatcctgagctgatgaagctaagtgagaaagacatagtcgagatggtgtttttcccggtgataaatgaagcctgccgagtccttgatgagggtatcgccgtcaaggcttctgacctagacatcgcttcgatcttcggcatggggttcccaccttataggggaggtgtcatgcactgggcagattccatcggcgcaaagtacatccatggaaagttggaggagtggacaaagcggtatgggggcttcttcaagccctgctcttacctcgctgaaagagctgcaaaagggattcctctgagtgcaccaacaaagaaagttcaggctcggctataagatgatttccttgtggacggaggagactacgttgaataatggattccggtgaagcatttggaatgcgtagagctgtaggctaccactatcacatgcatgtaacgcaatatactactgtgaaaataaagtgcactgcacggcggtttttttatatataaatacaaggatttttttcttgtcg

SEQ ID NO: 25192 - protein, 372 aa, Glycine max
RIQANLQSRVRKGKMTDERYEKAMSLVTGVLDYERFKDVDLVIEAVIENVKLKQQIFSDLEKYCPSHCILATNTSTIDLNLIGEKTKAQDRIAGAHFFSPAHVMPLLEIVRTQHTSPQVVVDLLDVGKKIKKTPIVVGNCTGFAVNRMFFPYTQSALFYVDLGMDVYKIDRACTKFGMPMGPFRLADLVGFGVAVATGMQYLENFPERVYKSMLLPLMMEDNRAGEATQKGFYKYEGKRKATPDPEIMKYIEKSRSMAGVTPDPELMKLSEKDIVEMVFFPVINEACRVLDEGIAVKASDLDIASIFGMGFPPYRGGVMHWADSIGAKYIHGKLEEWTKRYGGFFKPCSYLAERAAKGIPLSAPTKKVQARL

SEQ ID NO: 25193 - protein, 358 aa, Glycine max
MTDERYEKAMSLVTGVLDYERFKDVDLVIEAVIENVKLKQQIFSDLEKYCPSHCILATNTSTIDLNLIGEKTKAQDRIAGAHFFSPAHVMPLLEIVRTQHTSPQVVVDLLDVGKKIKKTPIVVGNCTGFAVNRMFFPYTQSALFYVDLGMDVYKIDRACTKFGMPMGPFRLADLVGFGVAVATGMQYLENFPERVYKSMLLPLMMEDNRAGEATQKGFYKYEGKRKATPDPEIMKYIEKSRSMAGVTPDPELMKLSEKDIVEMVFFPVINEACRVLDEGIAVKASDLDIASIFGMGFPPYRGGVMHWADSIGAKYIHGKLEEWTKRYGGFFKPCSYLAERAAKGIPLSAPTKKVQARL

SEQ ID NO: 25194 - protein, 349 aa, Glycine max
MSLVTGVLDYERFKDVDLVIEAVIENVKLKQQIFSDLEKYCPSHCILATNTSTIDLNLIGEKTKAQDRIAGAHFFSPAHVMPLLEIVRTQHTSPQVVVDLLDVGKKIKKTPIVVGNCTGFAVNRMFFPYTQSALFYVDLGMDVYKIDRACTKFGMPMGPFRLADLVGFGVAVATGMQYLENFPERVYKSMLLPLMMEDNRAGEATQKGFYKYEGKRKATPDPEIMKYIEKSRSMAGVTPDPELMKLSEKDIVEMVFFPVINEACRVLDEGIAVKASDLDIASIFGMGFPPYRGGVMHWADSIGAKYIHGKLEEWTKRYGGFFKPCSYLAERAAKGIPLSAPTKKVQARL

SEQ ID NO: 25195 - DNA, 1224 bp, Glycine max
aaaagtgagaagctttcgcttgttttggtgttccagttccacttagagccatgacagacatctccaagtcccttctctttacctttaccatcatcatcagctttggcttgtgcattctttatgcatctgcagaactccagagatttgcacactcttccaaacatgatggtgctcttagcttcttggtgcttggtgactagggaagaagaggtgcttacaaccaatcactagttgctttccagatgggaaaggttggagagaagcttgatatcgactttgtagtttccactggagacaacttctatgacaatggactgactagtgaccatgacaacgcgtttcaagaatcattcactaaaatttacacagcaaaaagcttgcaaaatcagtggtacagcgtgttaggcaaccacgactataggggtgatgcagaggcccaattgagcccggtccttagagaaattgatagcagatggctttgcttaaggtcctttattgtagattcagagctggttgagattttctttgtagacaccactccttttgttgacgagtacttcactgaaccaccggaacacaagtatgattggcggggcattggcccacaaaaatcttatatttctaacttactcaaggacctagaattggcactgaggggatcaacagcaaaatggaggattgttgttggtcaccatgccattagaagtgttgggcatcatggtgatactcaagaactcataaatcggcctctccctatccttcaggcaaataacgttcacttttacatgaacgggcatgatcattgtcttgagcacattagtgacacggagagccccattcagttcctgactagcggggcagggtcaaaggcttggagaggagacattgaaggaatgaaccgaagaggcgtaaatttcttctatgatggacaaggcttcgtgtcagtgaaattgactcagacggatgccaccattgagttctatgatgtttttggcaacgttttgcacagattgacttcttcaaaacagctacattcttccatgtaaagtttagagctagatactagacattgagattaaatagaccaatccaaattggttgatgaaatttcaaactaatccttgatgtcatgcttgagtatgtacgagaaatgaaaatatgaatgaaggattcttcactgtgattcattcaccgcagtgatgaattgctgtttaaaaagaaaac

SEQ ID NO: 25196 - protein, 267 aa, Glycine max
MGKVGEKLDIDFVVSTGDNFYDNGLTSDHDNAFQESFTKIYTAKSLQNQWYSVLGNHDYRGDAEAQLSPVLREIDSRWLCLRSFIVDSELVEIFFVDTTPFVDEYFTEPPEHKYDWRGIGPQKSYISNLLKDLELALRGSTAKWRIVVGHHAIRSVGHHGDTQELINRPLPILQANNVHFYMNGHDHCLEHISDTESPIQFLTSGAGSKAWRGDIEGMNRRGVNFFYDGQGFVSVKLTQTDATIEFYDVFGNVLHRLTSSKQLHSSM

SEQ ID NO: 25197 - DNA, 1238 bp, Glycine max
tatatgctctgtccaatgtgttctgtggtgtctttcacttttccctttccacagagcaggggtccacttggaattttaatatgtatgaaggatgaaccaataccatggtcatattttaccaacttaggttatattgttgatacatactgttgaggaactgcctgtgcagaattacaattagaagaattgtttatggacatatttgcaattagggagcaaattagcctaattttggaaatttggattaccaagttaatttatgtttaacatattaactactctttgaatttgaacattgattaccgattcttttttcttggcaaattactccctaaattagaaaaaagtttgccagaacttcagtaatgccaactaagcttttatgttataatcttggcttcaactgacttcttttatggaaggaatatcaggttcatatcttttagaaagccctggcgctgataactcatctccaaagttgccaacttcagatacaaatgagggttatgaaatcaaggaggcattgagagcacagatggaagtgcaaagtaaattacatttgcaagtggaggcagagaagcacttgcagattcgccaggatgcagaaaggagatacatggccatgctcgaaagagcttgcaagatgctggctgatcaatttattggtgccacagtcatagacacagacagccaaaagtttcaaggaattggaagcaaagcacctagaggtaccttggttgatcctcttggtttttactccatgccatccactgaggtggctggagtgaatgtcccagaagaagaaataccgctgagtctcccaccccaaagggctgattgttcaaccgaaagttgtttaacctcacatgagagttctggaggattggctttagaaggatctcctggcgagggaaaaaggaggatgcttggcatggactcgatggcagcacctttgatatggagtgaagctaagatgagaactcaagccatcaatgtagcccaaggtaatcttcctcaaggaataactaggtatggcatgtagggatggaaggtctacttgatggtttatcccggcatgatatataaacctttgggctttcattcattcctttttttataggtacttgaactcttcatgtcttgtaagttagtgagacataggtggaatcaattttacccctttgtaaattcaatctactctgtgactttaaaaattgcaaaaaactagctttgactat

SEQ ID NO: 25198 - protein, 208 aa, Glycine max
MEGISGSYLLESPGADNSSPKLPTSDTNEGYEIKEALRAQMEVQSKLHLQVEAEKHLQIRQDAERRYMAMLERACKMLADQFIGATVIDTDSQKFQGIGSKAPRGTLVDPLGFYSMPSTEVAGVNVPEEEIPLSLPPQRADCSTESCLTSHESSGGLALEGSPGEGKRRMLGMDSMAAPLIWSEAKMRTQAINVAQGNLPQGITRYGM

SEQ ID NO: 25199 - protein, 168 aa, Glycine max
MEVQSKLHLQVEAEKHLQIRQDAERRYMAMLERACKMLADQFIGATVIDTDSQKFQGIGSKAPRGTLVDPLGFYSMPSTEVAGVNVPEEEIPLSLPPQRADCSTESCLTSHESSGGLALEGSPGEGKRRMLGMDSMAAPLIWSEAKMRTQAINVAQGNLPQGITRYGM

SEQ ID NO: 25200 - protein, 141 aa, Glycine max
MAMLERACKMLADQFIGATVIDTDSQKFQGIGSKAPRGTLVDPLGFYSMPSTEVAGVNVPEEEIPLSLPPQRADCSTESCLTSHESSGGLALEGSPGEGKRRMLGMDSMAAPLIWSEAKMRTQAINVAQGNLPQGITRYGM

SEQ ID NO: 25201 - DNA, 1361 bp, Glycine max
gatagcgcttacagtaagaggtgagaaagagagacaaatcggcagaagcaaggaggctgagagcgagagagcaactgcacgcactgtaactcctaacttcccagatcgtcttcttcctcttttctctccggtgattgttggaactcagagagcttctttgatggaacaggttagtaaaacgcactgcgttttgaagcttcactttcacttttgagtttcgattctttccctctactctgcgtatgtgtgcgttttgtgaatttctgcagtacgagaaggttgagaagataggcgaaggaacatacggcgtcgtttacaagggtcgcgaccgcgtcaccaacgagaccatcgcgttgaagaagattcgcctcgagcaggaggatgagggggttcccagcaccgccattcgcgagatttctctcttgaaagaaatgcagcacaggaacattgttaggttgcaggatgtagtgcacgatgagaagagtttgtatctggtttttgagtaccttgacttagatctaaagaagcacatggattcatctccagaatttgcaaaagatccacgacaagtaaaaatgttcctgtaccaaattctctgtggcattgcatactgtcattcacatagagttcttcatcgagacttaaaaccacagaatttgttgatagatcgcagcactaatgcactgaaacttgcagattttggattggccagggcttttggaattcctgttaggacatttacacatgaggtggtaacactgtggtacagagctccggaaattttgcttggatcccgtcagtattctaccccagttgatatttggtcagtgggatgcatatttgcagagatggtaaatcaacgaccacttttccctggggactctgagattgatgaattgtttaaaatattcagaatcatgggtacaccaaatgaagatacatggcctggagtgacatcattgccagattttaaatcagcctttcccaaatggcaacctaaggacctgaaaaatgtggttccaaatcttgagccagctggtcttgatcttctttctagcatgctttacttggatcccagcaaaagaattactgctaggagcgctcttgagcatgaatacttcaaagacattaaatttgtaccctgatttcttatcttcaaggctgaggtgtcttattagtatgtgtagcatttatgggttttgactcaaacgcgtgttgtccttgcttttttcttcaatgcttttggaccgaatcatatttcatttatttgttcttacatttttatttagtatgtgtgatcttgttacctatttacccgtttaatgtattagtctcgatgcaatgcaactagcaaatttcag

SEQ ID NO: 25202 - protein, 300 aa, Glycine max
MCAFCEFLQYEKVEKIGEGTYGVVYKGRDRVTNETIALKKIRLEQEDEGVPSTAIREISLLKEMQHRNIVRLQDVVHDEKSLYLVFEYLDLDLKKHMDSSPEFAKDPRQVKMFLYQILCGIAYCHSHRVLHRDLKPQNLLIDRSTNALKLADFGLARAFGIPVRTFTHEVVTLWYRAPEILLGSRQYSTPVDIWSVGCIFAEMVNQRPLFPGDSEIDELFKIFRIMGTPNEDTWPGVTSLPDFKSAFPKWQPKDLKNVVPNLEPAGLDLLSSMLYLDPSKRITARSALEHEYFKDIKFVP

SEQ ID NO: 25203 - protein, 237 aa, Glycine max
MQHRNIVRLQDVVHDEKSLYLVFEYLDLDLKKHMDSSPEFAKDPRQVKMFLYQILCGIAYCHSHRVLHRDLKPQNLLIDRSTNALKLADFGLARAFGIPVRTFTHEVVTLWYRAPEILLGSRQYSTPVDIWSVGCIFAEMVNQRPLFPGDSEIDELFKIFRIMGTPNEDTWPGVTSLPDFKSAFPKWQPKDLKNVVPNLEPAGLDLLSSMLYLDPSKRITARSALEHEYFKDIKFVP

SEQ ID NO: 25204 - protein, 204 aa, Glycine max
MDSSPEFAKDPRQVKMFLYQILCGIAYCHSHRVLHRDLKPQNLLIDRSTNALKLADFGLARAFGIPVRTFTHEVVTLWYRAPEILLGSRQYSTPVDIWSVGCIFAEMVNQRPLFPGDSEIDELFKIFRIMGTPNEDTWPGVTSLPDFKSAFPKWQPKDLKNVVPNLEPAGLDLLSSMLYLDPSKRITARSALEHEYFKDIKFVP

SEQ ID NO: 25205 - DNA, 518 bp, Glycine max
gaaacaggagttatatttggtaacatagtctatgagacatcttctaatgttcttgagagaacagttattgttctaaatgatatccatattgacatcatggactacatttctcctgcatcttgtgccgatgtggcattcagaactatgtgggctgagtttgaggggcaccgcagattcttaggtcaccgcaagacaatcaacccagacaggaaaggacttgttggaattttttatatgctggaaactggagagctagaagaaggaagggaactatcaaatatggtgcagcggatgcacaagaacaggcaaggagctccaaggaaaaggcacggttctctaccgggaattaaaggccgagcacgatttaggactgaagagcccttttatgaaaatccatatcctgagtgtatatgtggttctaaaagcaaacttgatataacatgacgacaaaccaacctgcagttccaatctagaattttcttgaaggaccggttaatctgtaaatttttggttttgat

SEQ ID NO: 25206 - protein, 147 aa, Glycine max
ETGVIFGNIVYETSSNVLERTVIVLNDIHIDIMDYISPASCADVAFRTMWAEFEGHRRFLGHRKTINPDRKGLVGIFYMLETGELEEGRELSNMVQRMHKNRQGAPRKRHGSLPGIKGRARFRTEEPFYENPYPECICGSKSKLDIT

SEQ ID NO: 25207 - protein, 115 aa, Glycine max
MDYISPASCADVAFRTMWAEFEGHRRFLGHRKTINPDRKGLVGIFYMLETGELEEGRELSNMVQRMHKNRQGAPRKRHGSLPGIKGRARFRTEEPFYENPYPECICGSKSKLDIT

SEQ ID NO: 25208 - protein, 99 aa, Glycine max
MWAEFEGHRRFLGHRKTINPDRKGLVGIFYMLETGELEEGRELSNMVQRMHKNRQGAPRKRHGSLPGIKGRARFRTEEPFYENPYPECICGSKSKLDIT

SEQ ID NO: 25209 - DNA, 672 bp, Glycine max
attccaacttatcatactatcacattattatcaaccttataatcttcctcttagcaccaaccatgactacccagtttctcattctctcccttctcatctcatgccacgtcctcactgcaaccctagccgaagaaaccggctttgtaggttcactagaccgcaaggcattaggtctagataaaaaagacaaggtcagtcatttccggttctacttccacgagaggttcaccggaagcaacgccacctcggtcaccgtcgttcctccgctgccccagtacaactccaccaccaacttcgggttggtggggatcaccgacaacgccttgaccgtgggacccgaacccgggtccaaggtggtcggaaagatcgaggggttgtacgcgggcacctcacaatcggagttcaatttattgattgttgtgaattttgccttgaccgaaggaaagtataatggcagcaccatcaccgtggtggggcggaaccgcctctccctcaagattagggagatgcctgtgattggaggaagtggggtttttaaatttgccactgggtatgttgaaaccagcactctctatgttgatgctgataggtctaccattgagtacaacatttatgtttcacattactgatcaatttgtggtaactttatgttacaaaacttcttctatgtac

SEQ ID NO: 25210 - protein, 208 aa, Glycine max
SNLSYYHIIINLIIFLLAPTMTTQFLILSLLISCHVLTATLAEETGFVGSLDRKALGLDKKDKVSHFRFYFHERFTGSNATSVTVVPPLPQYNSTTNFGLVGITDNALTVGPEPGSKVVGKIEGLYAGTSQSEFNLLIVVNFALTEGKYNGSTITVVGRNRLSLKIREMPVIGGSGVFKFATGYVETSTLYVDADRSTIEYNIYVSHY

SEQ ID NO: 25211 - protein, 188 aa, Glycine max
MTTQFLILSLLISCHVLTATLAEETGFVGSLDRKALGLDKKDKVSHFRFYFHERFTGSNATSVTVVPPLPQYNSTTNFGLVGITDNALTVGPEPGSKVVGKIEGLYAGTSQSEFNLLIVVNFALTEGKYNGSTITVVGRNRLSLKIREMPVIGGSGVFKFATGYVETSTLYVDADRSTIEYNIYVSHY

SEQ ID NO: 25212 - DNA, 1365 bp, Glycine max
cattaaaatacgattttcacagctacatggttcgatctatggaagaggaattccaaaggatagttggtgtgagtggtccactctggggatttgttgttgccttcatgcttttcaacattaaaggatctaatctatatttctggatagctatcattcctgtatctcttgtgctcttggtgggaacaaaactgcagcatgttattgcaaccttggcactggagaatgctggaattacagggttcttcacagaagcaaagttgaggcctcgtgatgaacttttctggtttaataaacctgaactattgctatcgttgatccatttcattctcttccagaatgcatttgagctggcttcattcttttggttctgggtatttccttatccattttacatcctagaattagaccatggacatggagtaaaagaaatcatatcgtttaagtttcaactgaattttgattgcttggaaatgaattatccaaaaatgagatggcagttcggatattattcctgctttattaggaatcaccttctcctttatataaggctaatattggggtttgcaggacagtttctttgcagctacagcaccttgccactctatgcacttgttacacagatgggaacaaactataaggcagcattaatcccacagagaataagagaaacaattcatggatggggtaaggcagctaggaggaagagaagacatggcatgttcaccgatgactccaccattcacacagacacaagcactgtcttgtccattgaagaagatgatcaattaattgatactcctgaagtagaattacaacaagtaaaagctgttacagctaccccttctcccattgctaatgaaacttcaagtagggctgttacacccctcctaagaccctctgcctcaatatcttcagtgcaatgcagttccaaagctgaagcaattccaagatgctcctctatgccaagtggaagataaaatgtgaacaatggttggagaccaatgaaactagtcaaatggtacattgataaagatggcttttgtatgattatcaaagatgtataaaatgactacttatagttccctttaaaaaagctttacaaggtaatagtgcttttggacattactaatttatgtgggacaactatcaacggggtgactattgtatcttgatggcaagaagtagaccaagtatattgtaactttcttttttcctttttggatttgaaatagtgtaaattaaagttgattatacatcaaagaaaatggatgtcaacgcagcctgtagaactcctgttgtcaatgcaattttgttgcagtactcaaccggagcagtgatggcataatcttttgattagaatcttat

SEQ ID NO: 25213 - protein, 324 aa, Glycine max
LKYDFHSYMVRSMEEEFQRIVGVSGPLWGFVVAFMLFNIKGSNLYFWIAIIPVSLVLLVGTKLQHVIATLALENAGITGFFTEAKLRPRDELFWFNKPELLLSLIHFILFQNAFELASFFWFWVFPYPFYILELDHGHGVKEIISFKFQLNFDCLEMNYPKMRWQFGYYSCFIRNHLLLYIRLILGFAGQFLCSYSTLPLYALVTQMGTNYKAALIPQRIRETIHGWGKAARRKRRHGMFTDDSTIHTDTSTVLSIEEDDQLIDTPEVELQQVKAVTATPSPIANETSSRAVTPLLRPSASISSVQCSSKAEAIPRCSSMPSGR

SEQ ID NO: 25214 - protein, 316 aa, Glycine max
MVRSMEEEFQRIVGVSGPLWGFVVAFMLFNIKGSNLYFWIAIIPVSLVLLVGTKLQHVIATLALENAGITGFFTEAKLRPRDELFWFNKPELLLSLIHFILFQNAFELASFFWFWVFPYPFYILELDHGHGVKEIISFKFQLNFDCLEMNYPKMRWQFGYYSCFIRNHLLLYIRLILGFAGQFLCSYSTLPLYALVTQMGTNYKAALIPQRIRETIHGWGKAARRKRRHGMFTDDSTIHTDTSTVLSIEEDDQLIDTPEVELQQVKAVTATPSPIANETSSRAVTPLLRPSASISSVQCSSKAEAIPRCSSMPSGR

SEQ ID NO: 25215 - protein, 312 aa, Glycine max
MEEEFQRIVGVSGPLWGFVVAFMLFNIKGSNLYFWIAIIPVSLVLLVGTKLQHVIATLALENAGITGFFTEAKLRPRDELFWFNKPELLLSLIHFILFQNAFELASFFWFWVFPYPFYILELDHGHGVKEIISFKFQLNFDCLEMNYPKMRWQFGYYSCFIRNHLLLYIRLILGFAGQFLCSYSTLPLYALVTQMGTNYKAALIPQRIRETIHGWGKAARRKRRHGMFTDDSTIHTDTSTVLSIEEDDQLIDTPEVELQQVKAVTATPSPIANETSSRAVTPLLRPSASISSVQCSSKAEAIPRCSSMPSGR

SEQ ID NO: 25216 - DNA, 1619 bp, Glycine max
aacaacaaaaaaaagtaaacagaaaaggggttaagcgaggaagactgtgtagaaactagaaaccctagagagagagagagatgagaagaactcttctgagaaatgctactctctacactcgcaaccttctccatcactcggcccctgcattcgacgcttcaactcgtccccaactcagactcttctgctccaatgaaacccccccaccggttccccaaatcgacgacgttgacaacaaagagctgaaagcgcagatcgagagctacttcaagggcgacgagcaggtgcttccgtcgatcatggagacgattctgaagcggaagctgtcgggaaagcacgaggacaccgacgacgagctcatggaggagctccgcatgcgccccctggacgacgttgacgaccgggacttcgagtctgacttcgagaacattcacgataccgacgaggagatcgacgatttgtacaacgccagggacgtggtgatgaagaggatggtgaaggacgagtacttcaacatggatgataaaaagtgggatgacattgttgaggacgggatcaagcacgggcttcttagggacaccaaggagtgcgaggagattctcgaggatatgctcagctgggacaaactcctacctgatgagataaaacagaaggtggaagtaaaatttaatgagctaggggacatgtgtgaaagaggtgaacttgaacctgaagaagcttatgaacagtttaagaagtttgaggatgagattgtggcagaatacctggacaaaatggaaaaggaggaggctccacagtttgatgatactactgtgccggataagaaaaaggacttggatgatccaccgggtgaaggtccaattctgcgctggcaaacccgggtagtctttgctcctggtggtgatgcttggcatccaaagaacaggaaagtaaaactgtctgttactgtgaaggagctagggctttcaaaataccaatttcgccgtctcagggaattggttggaaaacgttatcatccagggagagatgagcttacaataactagtgagaggtttgaacatcgagaagaaaacagaaaggactgcttaaggacccttctccatctcattgaggaggcagggaaagctaataaactagtagatgatgctcgatcctcatacgtaaaagagaggcttcgtgccaatccagctttcatggagaggctgcatgccaagtcaatgaggttgcgagaatctaatcaggttcctgcttgaggttttcagatctgatgtatgaattattgaaattcacctgccataattttttattgctccctggttttttgtatgagtcttatcttgggttccagctgcagaaaacaacctccctgcttagagggtaaggcctcatacatctgatccttcctagaccccacaactgcaggggagactcatgcaccggggtacctcttagtcatatctttcgtatttagtgcttgaataatggataattttttttacctcttgttagatattgtatgctagttgactcaaatgttacatttttgtggagtaacattgatcatagaaaaggccggatgatccccaactgaagcaatggatttcaacattttatattat

SEQ ID NO: 25217 - protein, 390 aa, Glycine max
MRRTLLRNATLYTRNLLHHSAPAFDASTRPQLRLFCSNETPPPVPQIDDVDNKELKAQIESYFKGDEQVLPSIMETILKRKLSGKHEDTDDELMEELRMRPLDDVDDRDFESDFENIHDTDEEIDDLYNARDVVMKRMVKDEYFNMDDKKWDDIVEDGIKHGLLRDTKECEEILEDMLSWDKLLPDEIKQKVEVKFNELGDMCERGELEPEEAYEQFKKFEDEIVAEYLDKMEKEEAPQFDDTTVPDKKKDLDDPPGEGPILRWQTRVVFAPGGDAWHPKNRKVKLSVTVKELGLSKYQFRRLRELVGKRYHPGRDELTITSERFEHREENRKDCLRTLLHLIEEAGKANKLVDDARSSYVKERLRANPAFMERLHAKSMRLRESNQVPA

SEQ ID NO: 25218 - protein, 317 aa, Glycine max
METILKRKLSGKHEDTDDELMEELRMRPLDDVDDRDFESDFENIHDTDEEIDDLYNARDVVMKRMVKDEYFNMDDKKWDDIVEDGIKHGLLRDTKECEEILEDMLSWDKLLPDEIKQKVEVKFNELGDMCERGELEPEEAYEQFKKFEDEIVAEYLDKMEKEEAPQFDDTTVPDKKKDLDDPPGEGPILRWQTRVVFAPGGDAWHPKNRKVKLSVTVKELGLSKYQFRRLRELVGKRYHPGRDELTITSERFEHREENRKDCLRTLLHLIEEAGKANKLVDDARSSYVKERLRANPAFMERLHAKSMRLRESNQVPA

SEQ ID NO: 25219 - protein, 297 aa, Glycine max
MEELRMRPLDDVDDRDFESDFENIHDTDEEIDDLYNARDVVMKRMVKDEYFNMDDKKWDDIVEDGIKHGLLRDTKECEEILEDMLSWDKLLPDEIKQKVEVKFNELGDMCERGELEPEEAYEQFKKFEDEIVAEYLDKMEKEEAPQFDDTTVPDKKKDLDDPPGEGPILRWQTRVVFAPGGDAWHPKNRKVKLSVTVKELGLSKYQFRRLRELVGKRYHPGRDELTITSERFEHREENRKDCLRTLLHLIEEAGKANKLVDDARSSYVKERLRANPAFMERLHAKSMRLRESNQVPA

SEQ ID NO: 25220 - DNA, 988 bp, Glycine max
aatcaatcgatcacggatcgttgatttttagaacaagatcatcatcatagtataaaagctcaaaagctgtttgtgtgtatgttacggttgggccatcttgtccatctatccaaatttccccatcccgcaactaatttatttattatttttcctttatttatcttctttctctggctcgagcatccaaaagggttgttttttttttttataagaagaagaggagagggaagatgatgatgatgacaatggaggggatgatggacaagggggtgttggatgatgtgataagaaggcttctggaagggaaaggagggaaacaggtgcaactctctgagtcggagatccgtcaactctgcgtcaacgccagacaaatcttcctctctcagccaattcttctcgacctccgtgctcccatccgcatctgcggttagccacctctttcccctttataatcacactattttccatatacatatctcatttaccctttatctcctctctcttttttattagcttgcttcttttgtttacgtgattgttgccatatatgtgaccaccgcgatttagatgatcatttggtgagcaagttttttctttttttttttttagataccataagtatcttcgcgggagtcaaatctttctcttgaacgtgacaaaaggatgatttgccttgcttgaaaaggatgatattattttaattatatgtattaaaatcagcgggagatgtctgtttgtttttgtttagaaggtgaaggaaaattgcttacaagctctggagaaagaaaaaaaaaatggaactttggcttttggaatttagaacattggtcaatcaaggaagacaatgataccatgatatgtgccctgtttatttaatgaattattaaatggaaacagacgggaggaaagagatatttgttcacaattgtttgctgaaactgtaatttgatttcatgtgccttttttaaaaaatttgatgtttttctcc

SEQ ID NO: 25221 - protein, 66 aa, Glycine max
MMMMTMEGMMDKGVLDDVIRRLLEGKGGKQVQLSESEIRQLCVNARQIFLSQPILLDLRAPIRICG

SEQ ID NO: 25222 - protein, 65 aa, Glycine max
MMMTMEGMMDKGVLDDVIRRLLEGKGGKQVQLSESEIRQLCVNARQIFLSQPILLDLRAPIRICG

SEQ ID NO: 25223 - protein, 64 aa, Glycine max
MMTMEGMMDKGVLDDVIRRLLEGKGGKQVQLSESEIRQLCVNARQIFLSQPILLDLRAPIRICG

SEQ ID NO: 25224 - DNA, 772 bp, Glycine max
attctccaaccaacggcgacaacaacaaagattctttctagtttcttcctttcctttcctttttcgtcgccaacacggtaaacaaaaccccccaaatttcctcaattagggtttcaatccacattccaattccccaaccctcttcttccccatcctccaaatcccgaaactttccccaactgggtcctcaagtacgccacggcgagccctcgtagctcgcgatctcagaaaccaacgatgccgaaatcctcacgattcctcgtcgtcgcgatcgccgtcgccgcgctctgcgtgatcctccccgtcgcggcggcggcggatctcgaggaccccggcgtgctgcggctgccgtcggacagcctgtgcggcaaaacgacgccgtcttcgtgcccggcaaagtgcttccgcgccgaccccgtttgcggcgcggacggcgtgacgtactggtgcggttgcgcagaggcggcgtgcgcaggcgtggaggttgcgaaattggggttctgtgaagtcgggaatggtggctcggcgccgattcctgggcaagctctgcttttggtgcacattgtttggctcattgtgttggggttctccgtgttgttcggtcttttttagataattgggtttctttatgtatctaccatgatcagagggtgttatggttttggttctttgggattctttgagggttctttttgtaaattgatcaaacggccattcttgtattgtatgtatgattattcttattattgtaatttcacaactttcttgattc

SEQ ID NO: 25225 - protein, 124 aa, Glycine max
MPKSSRFLVVAIAVAALCVILPVAAAADLEDPGVLRLPSDSLCGKTTPSSCPAKCFRADPVCGADGVTYWCGCAEAACAGVEVAKLGFCEVGNGGSAPIPGQALLLVHIVWLIVLGFSVLFGLF

SEQ ID NO: 25226 - DNA, 1443 bp, Glycine max
ttttttttctgcaaacaaatcaaccctcaaatttccttttgcttcctagaaagatttagttcccggaagcttctctctttgcacttgcatgatttgatctccgccgtggattcgtgatggtgattttatgaacttcctcctctgccccctctttccttttctgattatcattatttttatatttaactagagagagagactcatccttccttcgagacatgagatgaggccgatgcaactgccaccgccttccgcttccggggccaaccctgcccctgccaccaccaacaacaacaacaaggagcagcgtccccagcgccgccgcaaggacctcacgctgccgctgccgcagcgagacaccaacttggcggtgccacttcctctgccgccatcgacggcgcctgctgcggcggcgagcggcggagcgagccagcaggcggcgcagcaggtgatccctttctcggagctggagagactgaaccgcatcgggagcgggagcggcgggacggtgtacaaggtggtccaccgcacgagcgggcgcgtgtacgcgctgaaggtgatatacggtcaccacgaggagtcggtgcggcggcagatccaccgggaaatccagatcctccgtgacgtggacgatgcgaacgtggtgaagtgtcacgagatgtacgatcagaacagcgaaatccaggtgctgctggagttcatggacggaggttctctggaggggaaacacatcacgcaggagcagcagctggcagatctgtctcggcagattcttagggggctggcgtacctgcaccggcggcacatcgtccacagggacatcaagccgtcgaatctgcttataaactcgcggaagcaggtgaagatcgctgacttcggggtgggtcggatactgaatcagacgatggatccgtgcaattcgtcggtggggacgatcgcctacatgagtccggagaggatcaatacggacataaacgacgggcaatacgacgcgtacgcaggggacatatggagctttggggttagcatactggagttctacatgggaaggttccccttcgcggttgggaggcagggcgattgggccagtctcatgtgcgccatttgtatgtctcagcctcccgaggctcctccttctgcttcccctcacttcaaggacttcatcttgcgctgtcttcagcgcgatccctctcgccgctggtctgcttccaggttgctcgaacaccccttcattgctccgccgctgcccaaccacaatcagactcctccaaacctccatcagctactccctcctccgccaaggcctcttccctcctagtatgatggatccttctacatgcctattgcctattgcctagctagctagccctgtgtgccgctttattttcattttcattttcattttcatacagaatcaaatcttaatattggattttcagccgt

SEQ ID NO: 25227 - protein, 364 aa, Glycine max
MRPMQLPPPSASGANPAPATTNNNNKEQRPQRRRKDLTLPLPQRDTNLAVPLPLPPSTAPAAAASGGASQQAAQQVIPFSELERLNRIGSGSGGTVYKVVHRTSGRVYALKVIYGHHEESVRRQIHREIQILRDVDDANVVKCHEMYDQNSEIQVLLEFMDGGSLEGKHITQEQQLADLSRQILRGLAYLHRRHIVHRDIKPSNLLINSRKQVKIADFGVGRILNQTMDPCNSSVGTIAYMSPERINTDINDGQYDAYAGDIWSFGVSILEFYMGRFPFAVGRQGDWASLMCAICMSQPPEAPPSASPHFKDFILRCLQRDPSRRWSASRLLEHPFIAPPLPNHNQTPPNLHQLLPPPPRPLPS

SEQ ID NO: 25228 - protein, 361 aa, Glycine max
MQLPPPSASGANPAPATTNNNNKEQRPQRRRKDLTLPLPQRDTNLAVPLPLPPSTAPAAAASGGASQQAAQQVIPFSELERLNRIGSGSGGTVYKVVHRTSGRVYALKVIYGHHEESVRRQIHREIQILRDVDDANVVKCHEMYDQNSEIQVLLEFMDGGSLEGKHITQEQQLADLSRQILRGLAYLHRRHIVHRDIKPSNLLINSRKQVKIADFGVGRILNQTMDPCNSSVGTIAYMSPERINTDINDGQYDAYAGDIWSFGVSILEFYMGRFPFAVGRQGDWASLMCAICMSQPPEAPPSASPHFKDFILRCLQRDPSRRWSASRLLEHPFIAPPLPNHNQTPPNLHQLLPPPPRPLPS

SEQ ID NO: 25229 - protein, 219 aa, Glycine max
MYDQNSEIQVLLEFMDGGSLEGKHITQEQQLADLSRQILRGLAYLHRRHIVHRDIKPSNLLINSRKQVKIADFGVGRILNQTMDPCNSSVGTIAYMSPERINTDINDGQYDAYAGDIWSFGVSILEFYMGRFPFAVGRQGDWASLMCAICMSQPPEAPPSASPHFKDFILRCLQRDPSRRWSASRLLEHPFIAPPLPNHNQTPPNLHQLLPPPPRPLPS

SEQ ID NO: 25230 - DNA, 1061 bp, Glycine max
gaacaaattaagagtaattgtcaccaacatagtaacatttaaccacacctgtggccaaatgacatcctcagttcccttggtctccaccttattgctttgctctattgctcttctctactctgcatcatttggagctgaagcatggacctcgccctacatacccgtctcttccctcatcagcaaaagtctttatgacacatttttccttcacaaagatgacactgcatgccctgccaaagacttctacccctacgacgccttcattcgtgcatccaaatccttccctgcgtttggtaccaccggatgtttagcaacacgcaagcgtgagattgctgcgtttctcgctcagatttcccacgaaaccactggcggctgggccaccgcacccgacggcccatttgcatggggtctctgcttcaaggaagaaattagtcctcagagtaattactgtgattctactaacacccaatggccttgtttcccaggcaaaagctacaagggtcgaggacccattcaactttcttggaactacaactatggtccagcagggaaggctttgggatttgatgggctgaggaacccagagattgtggcgaacaattctgtgatagccttcaaaactgctatgtggttttggatgacagagcaaaagccaaaaccttcatgccacaatgtgatggttgggatatatgtgccgacagaagatgacatagcagcaaaccgaacagcgggttatggtttggtgactaacataatcaatggtggactggaatgtgggattcctggtgatgcaagagtgaatgatcggattgggtttttcgaaaggtatacgaagttgttcaacgtggacactggacctaacttggattgtgcatatcagaaacccttctaactctttcgttatgtttttgttttgtgtttttcttttcctttaatttaatttttttttctctgccaagactttaataatgtattgaaagaaagcaaatactacctgcttcatggaattttcctaatgtactcaaaacagaagttgacaaacaaagttttatattattctt

SEQ ID NO: 25231 - protein, 296 aa, Glycine max
NKLRVIVTNIVTFNHTCGQMTSSVPLVSTLLLCSIALLYSASFGAEAWTSPYIPVSSLISKSLYDTFFLHKDDTACPAKDFYPYDAFIRASKSFPAFGTTGCLATRKREIAAFLAQISHETTGGWATAPDGPFAWGLCFKEEISPQSNYCDSTNTQWPCFPGKSYKGRGPIQLSWNYNYGPAGKALGFDGLRNPEIVANNSVIAFKTAMWFWMTEQKPKPSCHNVMVGIYVPTEDDIAANRTAGYGLVTNIINGGLECGIPGDARVNDRIGFFERYTKLFNVDTGPNLDCAYQKPF

SEQ ID NO: 25232 - protein, 277 aa, Glycine max
MTSSVPLVSTLLLCSIALLYSASFGAEAWTSPYIPVSSLISKSLYDTFFLHKDDTACPAKDFYPYDAFIRASKSFPAFGTTGCLATRKREIAAFLAQISHETTGGWATAPDGPFAWGLCFKEEISPQSNYCDSTNTQWPCFPGKSYKGRGPIQLSWNYNYGPAGKALGFDGLRNPEIVANNSVIAFKTAMWFWMTEQKPKPSCHNVMVGIYVPTEDDIAANRTAGYGLVTNIINGGLECGIPGDARVNDRIGFFERYTKLFNVDTGPNLDCAYQKPF

SEQ ID NO: 25233 - DNA, 1007 bp, Glycine max
aaaggagtccagagtttaggataagagatatgcgccagagttgaagcgagaaggaagggtccgcgcgccatggctggcatcaccacctcccccttcaaactctctcactttccgactctcttctcttcttctgattccaaactcttcggccttcccctctccaatccctattccctcaaattcgacccttcttctctctccactacctctctctcctacgtcaaagcccgctactacggcggcggcggcggccctccccgctcccccaacgactcccgcttccgcgagtcctccgattccgacgacgacgataaagctctcgacctctccactctcaggtcagataccgtgaggcttattgatcagagccagaatatggtcggagtagtgtcaattgatgacgccattcaaatggctgaagatgtcgaacttgacttggtaatattatccccagatgcagatcctcctgttgttagaataatggattacagcaaatatagatatgaacagcaaaagaagaaaagaggacagcagaagaaaagtgctgctaatcggatggatttgaaggagctcaaaatgggatacaacatagatgaacatgattattcagtgcgtttgaaagctgcacagaaatttttgaaagatggcaacaaggttaaggtcatagtaaacctcaagggtcgtgaaaatgaattccggaatatggctattgcgcttattacacgttttcagaatgatgttggggagcttggaatagaggagacaaaaaacttccgtgacagaaatatcttcataattttggttccaaataaagttgctgtgcagaaaactcaagaaccaccaaagaaaagagacaagtcagctgcagatgaagtctccgttagtgcccaagcataaccgcaaacttccacgctagtttctaattgtagaatggatattgtgagtaacttgtattggtccgagttggaaaattttccgagcattatataattgtataattcatgtgt

SEQ ID NO: 25234 - protein, 275 aa, Glycine max
MAGITTSPFKLSHFPTLFSSSDSKLFGLPLSNPYSLKFDPSSLSTTSLSYVKARYYGGGGGPPRSPNDSRFRESSDSDDDDKALDLSTLRSDTVRLIDQSQNMVGVVSIDDAIQMAEDVELDLVILSPDADPPVVRIMDYSKYRYEQQKKKRGQQKKSAANRMDLKELKMGYNIDEHDYSVRLKAAQKFLKDGNKVKVIVNLKGRENEFRNMAIALITRFQNDVGELGIEETKNFRDRNIFIILVPNKVAVQKTQEPPKKRDKSAADEVSVSAQA

SEQ ID NO: 25235 - protein, 173 aa, Glycine max
MVGVVSIDDAIQMAEDVELDLVILSPDADPPVVRIMDYSKYRYEQQKKKRGQQKKSAANRMDLKELKMGYNIDEHDYSVRLKAAQKFLKDGNKVKVIVNLKGRENEFRNMAIALITRFQNDVGELGIEETKNFRDRNIFIILVPNKVAVQKTQEPPKKRDKSAADEVSVSAQA

SEQ ID NO: 25236 - protein, 161 aa, Glycine max
MAEDVELDLVILSPDADPPVVRIMDYSKYRYEQQKKKRGQQKKSAANRMDLKELKMGYNIDEHDYSVRLKAAQKFLKDGNKVKVIVNLKGRENEFRNMAIALITRFQNDVGELGIEETKNFRDRNIFIILVPNKVAVQKTQEPPKKRDKSAADEVSVSAQA

SEQ ID NO: 25237 - DNA, 1195 bp, Glycine max
atcgtcaaggaaaactaagttcttcagtcttgacttgagtgctttgagttcatggatccaatccaacacaagttcgtcaacgttggtgctctcaagctccacgtcgcagaaaccggaaccggtccaaacgccgtcgtattcctgcacggcttcccggagatatggtactcgtggcggcaccagatgatagctctcgccggtgccggattcagagcggtttccttcgattacagaggttacggtctctccgacccgccacccgaacccgataagacctcttggtccgatcttctcagtgatctccttcatattcttgatgctcttgctctttctaaggtgtttcttgttgggaaagactttggagctcgtcctgcatatctattttcaattcttcaccctgaaagggtcttgggagttgtcacgttgggagttccatatgttcccccaggcccctctcagtatcacaaattccttcctgaaggcttctacattttgagatggcaggaacctggaagggcagaagctgattttggacgctttgatgcaaagactgttgtgcgaaatatttacatcctcttctcaagaagtgaaataccaatagctaatgaaaaccaggagatcatggatttggtggaacctgatactccgcttcccacttggttcacagaggaagatcttgcaacatacggagccttgtatgagaaatctggattccaaactgcattgcagattccatataggtcattaggtgaagtgcttagcttgccagatcctgtggttaaagttccggcatttctgataatgggtggcaaggattatgttctgaaatttccagggattgaagatttaacaaagggtgaaaaagcaaaatggtttgttccaaacttggaggttacatttatcccggagggaacccattttgttcaagaacagtttcccgagaaggtgaatcagcttattcttgacttccttgccaagcacacttgatattggactgtcgtcatgaatggtgtatgtggattgtgaactgtgggaaaatcagacaaagtgcagcacaaaatgatcgattgctgaagctaaatgatgcaaagcttgctggtagagctttgttagatgaatttcttgtacaaagaattcgtgaaatatgcgactgagttgtctagctaataaataaataaccggtttcttagttaac

SEQ ID NO: 25238 - protein, 311 aa, Glycine max
MDPIQHKFVNVGALKLHVAETGTGPNAVVFLHGFPEIWYSWRHQMIALAGAGFRAVSFDYRGYGLSDPPPEPDKTSWSDLLSDLLHILDALALSKVFLVGKDFGARPAYLFSILHPERVLGVVTLGVPYVPPGPSQYHKFLPEGFYILRWQEPGRAEADFGRFDAKTVVRNIYILFSRSEIPIANENQEIMDLVEPDTPLPTWFTEEDLATYGALYEKSGFQTALQIPYRSLGEVLSLPDPVVKVPAFLIMGGKDYVLKFPGIEDLTKGEKAKWFVPNLEVTFIPEGTHFVQEQFPEKVNQLILDFLAKHT

SEQ ID NO: 25239 - protein, 267 aa, Glycine max
MIALAGAGFRAVSFDYRGYGLSDPPPEPDKTSWSDLLSDLLHILDALALSKVFLVGKDFGARPAYLFSILHPERVLGVVTLGVPYVPPGPSQYHKFLPEGFYILRWQEPGRAEADFGRFDAKTVVRNIYILFSRSEIPIANENQEIMDLVEPDTPLPTWFTEEDLATYGALYEKSGFQTALQIPYRSLGEVLSLPDPVVKVPAFLIMGGKDYVLKFPGIEDLTKGEKAKWFVPNLEVTFIPEGTHFVQEQFPEKVNQLILDFLAKHT

SEQ ID NO: 25240 - DNA, 1305 bp, Glycine max
tgctcaattcttatcctccttttcagcttcatcagggcaaatggcaccacagtctttttttacacagtctggtcaacacgtgcagcaagatttctcagctgtaaccagtcaacctgcagcacaatccttttcagctcctggtggccaacctctacaacccccaccatcagttcccactagtcaacatgcacagcaaccctttccatctcacactgatcaatctgcacagtcagttagtcatatatatggtggatttccttccctggctgctggctctatgactcaagaagcttcttcagccatgttccctcaatctcaaggtggacatatgaaccagacctatgaacaaggatctatgccacttatccctttacacacggctccccaagcttcaacaggacagagtgcaaactatttgtcttctcaatcccccattgatcaagcatcacagtttaacagtgggaacttgtcgggacagtcatttaaccatcaaccacttggtcaaggagtacatgcttcacagaatgctgtttctcagccacccaaggacaagtttgagacaaaatcgacagtttgggcagacacacttagcagggggttggttaatttgaatatatctggacctaaaataaaccctttagcagatattggagttgactttgatgccattaataggagggaaaagaggatggagaagcccaccacgacaacggtaacgtcaactgtaacaatgggtaaagctatgggatctggttcaggtatgggccgggctggtgtgggtgctcttagacctccaccaaacccgatgatgggtcctggtgttggtatggcacatatgggtatgggaggctatggaggcatgaacgtgcctatgggtatggtgcagatgcagccaccaccttttggatttccgcctgggtccaacatgcctggaaattataactccatgatgagaagaggtggttatcctcaacatccgtacagtggtggtggctaccgatgagatttatagcaatgtcaaagtgtataagattgagcactatacctagataagatcatagcaaggtaaagtagtattagtttatgacgcaattgttttgctacacagtttagagaacggcacggcaatacatctggtctacatcttgcaatcgtatttctaacaatagatgttatccttatacttgtttttttattatgctttccactcatttttataggtgttttgctgtgtaccagtcaccccatcaaataaccttacttgggttattggtttttttttttatagttaatacccccaacgcc

SEQ ID NO: 25241 - protein, 333 aa, Glycine max
AQFLSSFSASSGQMAPQSFFTQSGQHVQQDFSAVTSQPAAQSFSAPGGQPLQPPPSVPTSQHAQQPFPSHTDQSAQSVSHIYGGFPSLAAGSMTQEASSAMFPQSQGGHMNQTYEQGSMPLIPLHTAPQASTGQSANYLSSQSPIDQASQFNSGNLSGQSFNHQPLGQGVHASQNAVSQPPKDKFETKSTVWADTLSRGLVNLNISGPKINPLADIGVDFDAINRREKRMEKPTTTTVTSTVTMGKAMGSGSGMGRAGVGALRPPPNPMMGPGVGMAHMGMGGYGGMNVPMGMVQMQPPPFGFPPGSNMPGNYNSMMRRGGYPQHPYSGGGYR

SEQ ID NO: 25242 - protein, 320 aa, Glycine max
MAPQSFFTQSGQHVQQDFSAVTSQPAAQSFSAPGGQPLQPPPSVPTSQHAQQPFPSHTDQSAQSVSHIYGGFPSLAAGSMTQEASSAMFPQSQGGHMNQTYEQGSMPLIPLHTAPQASTGQSANYLSSQSPIDQASQFNSGNLSGQSFNHQPLGQGVHASQNAVSQPPKDKFETKSTVWADTLSRGLVNLNISGPKINPLADIGVDFDAINRREKRMEKPTTTTVTSTVTMGKAMGSGSGMGRAGVGALRPPPNPMMGPGVGMAHMGMGGYGGMNVPMGMVQMQPPPFGFPPGSNMPGNYNSMMRRGGYPQHPYSGGGYR

SEQ ID NO: 25243 - protein, 241 aa, Glycine max
MTQEASSAMFPQSQGGHMNQTYEQGSMPLIPLHTAPQASTGQSANYLSSQSPIDQASQFNSGNLSGQSFNHQPLGQGVHASQNAVSQPPKDKFETKSTVWADTLSRGLVNLNISGPKINPLADIGVDFDAINRREKRMEKPTTTTVTSTVTMGKAMGSGSGMGRAGVGALRPPPNPMMGPGVGMAHMGMGGYGGMNVPMGMVQMQPPPFGFPPGSNMPGNYNSMMRRGGYPQHPYSGGGYR

SEQ ID NO: 25244 - DNA, 1299 bp, Glycine max
ctcaagatcagatcctcatctaccaccattccaggtgtagccatcaaaacaacgtttgtttaacaaaacccattatcagatcagatccgatcagatcctcttcagattcggatcaccgccgagtccatgagcacgccagcgctttcagggggcacgggcctcttctctggattcacgcgtttatgcaagggccttgcggtggtgcttgtttgcggtcacattgcggttcagtttatcccttcagctgttaactatcttgctcttattcccgccaggacaatcccatttgcctggaatctcattacagctggatatgttgaacaatctatatatggggtagtggtcagcacattaagtctcctgtttattgggaagctgcttgaaccaatatggggctccagggaattctttaaatttatctttgtggttaatcttctaacttcagtatgtttattcatcactgctattgccttatactacattacaaggctggagacttacctttacatgccactttctggatttcatggagttgtatctggtttcttggttggcattaagcaaattataccagatcaagagcttcctttcattaagataaaaacaaagtggttgccatctatcactgtattgctttccattgctattagcttctggacactagaggctacagcatatcttccaaccattatatctggcacgtatataagctggatttatcttagatactggcagaggaaaccagaaactaaacatagaggtgatctgagtgaagattttgctttctccacatttttcccagaatttttaagaccagtcatagaccctatcgcttcaatatttcatcgaatgctctgtggaagatatgatgcttctaatgatggtcaaggcaacagtctggaaagtgagcctttaccaggttcggactcaattgaggcatccaggagacgagaaagaggtgctcgagcactggaagaacgattggctgcagagaggttggctgttgcacgacgtgagttgcaaagagaggctgaggaaaatgtataattccccagcgtttgtaaattttggatcagttcaggcaatatgcacctattaggagtgatattttcagaggtcgtacagtaattagaaattttttgtttaggtcaaggaaaattttaatgtggttttgccatggactatgatctttacaaaaccgaaggtttctctttcttttgtcagataaatatatttgactttcttgtgtactttacacaaatacatagaatctaaagagtttttcagttgttgtctccc

SEQ ID NO: 25245 - protein, 306 aa, Glycine max
MSTPALSGGTGLFSGFTRLCKGLAVVLVCGHIAVQFIPSAVNYLALIPARTIPFAWNLITAGYVEQSIYGVVVSTLSLLFIGKLLEPIWGSREFFKFIFVVNLLTSVCLFITAIALYYITRLETYLYMPLSGFHGVVSGFLVGIKQIIPDQELPFIKIKTKWLPSITVLLSIAISFWTLEATAYLPTIISGTYISWIYLRYWQRKPETKHRGDLSEDFAFSTFFPEFLRPVIDPIASIFHRMLCGRYDASNDGQGNSLESEPLPGSDSIEASRRRERGARALEERLAAERLAVARRELQREAEENV

SEQ ID NO: 25246 - protein, 179 aa, Glycine max
MPLSGFHGVVSGFLVGIKQIIPDQELPFIKIKTKWLPSITVLLSIAISFWTLEATAYLPTIISGTYISWIYLRYWQRKPETKHRGDLSEDFAFSTFFPEFLRPVIDPIASIFHRMLCGRYDASNDGQGNSLESEPLPGSDSIEASRRRERGARALEERLAAERLAVARRELQREAEENV

SEQ ID NO: 25247 - DNA, 1978 bp, Triticum aestivum
acgatcccgtggagccgtggaggaccggtggcgagcgacgcggaagtcgcgaagcgggccggctccacgtctcccgtccgggaacgaatttaagcccgaggggacaagtttccgatcattcttcctcctcctcccctccgtataataagatccatccgtccatcctctaatcccgtagcagccagcgtagcctagccgcccccacctgctcccctctgctccgggatccatccgtccacccaggccgtcgtcgacctagggttttgtgcagaccatggcgcggaagatgctcaaggacggggaggcgcccgccgtcgccgacggcggcggcggcgagggcgaggggagctacgactacgacctcttcgtcatcggcgccggcagcggcggcgtccgcggctcccgcaccgccgcgggattcggggccaaggttgcgatctgcgagctcccgttccaccccatcagctccgagtggctgggaggacacggcggaacgtgcgtcatacgtggctgtgtcccgaagaagattctcgtctacggggcatctttccggggggaattcgatgacgccaagcaattcgggtgggagatcaacggggacatcaactacaactggaaaaagttgctggaaaacaagactcaagaaattgtgagattaaacggagtgtacaagagaatccttggtggttctggcgtgacgatgatcgaaggggcagggagtatagttgatgctcataccgttgaagtcacccagccagatggttcaaagcaaaggcacacgaccaagcacatattgattgcaactggtagccgggcaactctggtcgacattcctggaaaggagctggctattacttcagatgaggctttaagtttggaggagctaccgaaacgtgctgtgattcttggtggcggatatattgctgttgaatttgcttctatctggaaggggttgggtgctgaagtagatctattttataggaaagaacttcctctaaggggttttgatgatgagatgagaacagttgttgcaagtaaccttgaaggaaggggaatccgattgcatccagggacaaatttgaccgagttgagtaaaacagccgatggcattaaagttgtgacagataagggggatgagctcattgcagatgttgttctttttgctacaggtcgtgcgccgaactccaataggctgaacctggaagctgttggtgttgaggttgatcaaataggagccatcaaggttgatgaatactcccgtacatcagttccaagtatatgggctgtgggtgatgtaacaaatcggattaacctaacacctgttgctctgatggaggctacttgcttcgctaaaactgtatttggtggccagacagttaagcctgattataaagatgtaccttgtgctgttttctgcattccaccgctatctgtagtcggtctcagcgaacaagaggctttggcggaagccaagaatgatcttcttgtttacacatcaagtttcaacccaatgaagaacagcatatccaaacgcgtggagaagtctaccatgaaactggtggttgatgctgagaccgataaggttctcggagcagccatgtgtggaccagatgcagctgaaattatgcagggcattgctgttgcgctcaaggctggagctaccaaggcgaccttcgacagcaccgtcggcatccacccttctgcggcggaggagtttgtgacgatgcggaccttgaccaggcgcgtgagcccgccatccaagccaaagacgaacttgtaagcaagttgcctgcaatgttttggaccaaaattatacgggtgtggccacgggaactgtagacacagactcttgtttcagtttgctagccctgctcttggcatttgacctgaaagtgtgatacggtgtatttgatgatgatagaaataagtttctgtggaacagtttgtacagaaaaaaaaaaaaaaaaaagcttatcga

SEQ ID NO: 25248 - protein, 501 aa, Triticum aestivum
MARKMLKDGEAPAVADGGGGEGEGSYDYDLFVIGAGSGGVRGSRTAAGFGAKVAICELPFHPISSEWLGGHGGTCVIRGCVPKKILVYGASFRGEFDDAKQFGWEINGDINYNWKKLLENKTQEIVRLNGVYKRILGGSGVTMIEGAGSIVDAHTVEVTQPDGSKQRHTTKHILIATGSRATLVDIPGKELAITSDEALSLEELPKRAVILGGGYIAVEFASIWKGLGAEVDLFYRKELPLRGFDDEMRTVVASNLEGRGIRLHPGTNLTELSKTADGIKVVTDKGDELIADVVLFATGRAPNSNRLNLEAVGVEVDQIGAIKVDEYSRTSVPSIWAVGDVTNRINLTPVALMEATCFAKTVFGGQTVKPDYKDVPCAVFCIPPLSVVGLSEQEALAEAKNDLLVYTSSFNPMKNSISKRVEKSTMKLVVDAETDKVLGAAMCGPDAAEIMQGIAVALKAGATKATFDSTVGIHPSAAEEFVTMRTLTRRVSPPSKPKTNL

SEQ ID NO: 25249 - protein, 497 aa, Triticum aestivum
MLKDGEAPAVADGGGGEGEGSYDYDLFVIGAGSGGVRGSRTAAGFGAKVAICELPFHPISSEWLGGHGGTCVIRGCVPKKILVYGASFRGEFDDAKQFGWEINGDINYNWKKLLENKTQEIVRLNGVYKRILGGSGVTMIEGAGSIVDAHTVEVTQPDGSKQRHTTKHILIATGSRATLVDIPGKELAITSDEALSLEELPKRAVILGGGYIAVEFASIWKGLGAEVDLFYRKELPLRGFDDEMRTVVASNLEGRGIRLHPGTNLTELSKTADGIKVVTDKGDELIADVVLFATGRAPNSNRLNLEAVGVEVDQIGAIKVDEYSRTSVPSIWAVGDVTNRINLTPVALMEATCFAKTVFGGQTVKPDYKDVPCAVFCIPPLSVVGLSEQEALAEAKNDLLVYTSSFNPMKNSISKRVEKSTMKLVVDAETDKVLGAAMCGPDAAEIMQGIAVALKAGATKATFDSTVGIHPSAAEEFVTMRTLTRRVSPPSKPKTNL

SEQ ID NO: 25250 - protein, 359 aa, Triticum aestivum
MIEGAGSIVDAHTVEVTQPDGSKQRHTTKHILIATGSRATLVDIPGKELAITSDEALSLEELPKRAVILGGGYIAVEFASIWKGLGAEVDLFYRKELPLRGFDDEMRTVVASNLEGRGIRLHPGTNLTELSKTADGIKVVTDKGDELIADVVLFATGRAPNSNRLNLEAVGVEVDQIGAIKVDEYSRTSVPSIWAVGDVTNRINLTPVALMEATCFAKTVFGGQTVKPDYKDVPCAVFCIPPLSVVGLSEQEALAEAKNDLLVYTSSFNPMKNSISKRVEKSTMKLVVDAETDKVLGAAMCGPDAAEIMQGIAVALKAGATKATFDSTVGIHPSAAEEFVTMRTLTRRVSPPSKPKTNL

SEQ ID NO: 25251 - DNA, 582 bp, Triticum aestivum
tcagttgaaatcctccatccaactccaccttgatggctccactgctgttgttgaggatattggacgccagcaactcatctatggccgtagaattcccattcctgagctttttgctagaatagatgcagttgatcccagcactattaggcgtgttgcaaaccgcttcatctttgaccaggatattgccatcgctgccatgggaccaattcagtctcttccagactacaactggttcagacgcaggacctacatgctccgttactagatgattcgaccagcggtgtaccatgtttacagtctgcaaaggcaagatgattgcttgttttggcatcagtatattaaggccacatccacgcacattatgtgccgaagtggaggaattttttgagtctttgttttccttgcccctctcttccttttgcaaacccacaaagctgtcaataatggtaggcaaattcgactgacgtggcttacttgggtggccatccgttgttttacgatgatgatgaatggtcacaatacttttccatcttgtgttcggatattgttgtcttttggccaataatttaaatgaagctgctt

SEQ ID NO: 25252 - protein, 87 aa, Triticum aestivum
QLKSSIQLHLDGSTAVVEDIGRQQLIYGRRIPIPELFARIDAVDPSTIRRVANRFIFDQDIAIAAMGPIQSLPDYNWFRRRTYMLRY

SEQ ID NO: 25253 - protein, 58 aa, Triticum aestivum
MFTVCKGKMIACFGISILRPHPRTLCAEVEEFFESLFSLPLSSFCKPTKLSIMVGKFD

SEQ ID NO: 25254 - protein, 50 aa, Triticum aestivum
MIACFGISILRPHPRTLCAEVEEFFESLFSLPLSSFCKPTKLSIMVGKFD

SEQ ID NO: 25255 - DNA, 1311 bp, Triticum aestivum
  misc_feature (450)..(450): n is a, c, g, or t
  misc_feature (889)..(889): n is a, c, g, or t
  misc_feature (893)..(893): n is a, c, g, or t
  misc_feature (1176)..(1176): n is a, c, g, or t
acacccaccactcctcctgtccaccaccacgctcgttcaccactaccaccagctggcagccatggcggcgagcacgaagaagctctacccgctcctgctcaccctcctactgctcctcaccacagccgccgcggtgcccgccatcgactgcgactgcggcaaccccaaggcccccaagccctcccacccgcccaagaccaagccccccaccaagggccccaagccgggacccaagggccccacctacccgtcgccggcgcccaagggtcacctcccgcacccgccggtcgtcggcccgccgaagggccacgtccctcgcccgccggtcgtcggtcctccgaagggccacgtccctcacccgccggtagtcggacctccgaagggccacgtcccccgcccgccggtctacggtccgcccaagggccccatcacgcgcccgccggtcaccgntcctcccgtcgtcgtcgggccgccggtgacctaccccacgccgccagtgactgccccgccggtcacctaccccgcgccacctgtgaccgcccctccggtcacctacccggcgccaccagtgaccacccctccggtcacctaccccgcgccgccggtgaccaaccccccggtcacgtacccgtcgcctccggtgaacacgccatgccctcctccgcctccggcgacgcccgcggcgcagacgtgcccggtggactcgctgaagatcggcgcgtgcgtggacctgctgggcgggctggtgcacgtgggcctcggcgacccggtggtgaacaagtgctgcccgctgctggaggggctggtggagctggaggcggcggtgtgcctctgcaccaccatccggctcaagctcctcaacatcaacctcgtcctgcccctcgccctncagntcctcctcacctgcggcaagacccctccccccggctacacctgctccatctgatcgagctaagctcggtaagtcggtgcacgtggagatggtggatcatggatggatcgacatgagaggatgtcgaacgtggtcgtagtacgtagcgagcaagaagaagagattgatcgatcagctatgaagggatcgatgattacgcgtttgtttttcttcatttcttgtggtttccttttcgtgtttggttattaggtcaggtctgtgtgctctggtttggccgatgcaanaggtgataatcggtgtgtttactgattaattaattgtgtggtcacagactcacagctgatggccaattggttaagctagcagacactagtactagtaaagattccatgtcctgaaataattcacagagctgttcc

SEQ ID NO: 25256 - protein, 335 aa, Triticum aestivum
  misc_feature (150)..(150): Xaa can be any naturally occurring amino acid
  misc_feature (297)..(298): Xaa can be any naturally occurring amino acid
TPTTPPVHHHARSPLPPAGSHGGEHEEALPAPAHPPTAPHHSRRGARHRLRLRQPQGPQALPPAQDQAPHQGPQAGTQGPHLPVAGAQGSPPAPAGRRPAEGPRPSPAGRRSSEGPRPSPAGSRTSEGPRPPPAGLRSAQGPHHAPAGHXSSRRRRAAGDLPHAASDCPAGHLPRATCDRPSGHLPGATSDHPSGHLPRAAGDQPPGHVPVASGEHAMPSSASGDARGADVPGGLAEDRRVRGPAGRAGARGPRRPGGEQVLPAAGGAGGAGGGGVPLHHHPAQAPQHQPRPAPRPXXPPHLRQDPSPRLHLLHLIELSSVSRCTWRWWIMDGST

SEQ ID NO: 25257 - protein, 314 aa, Triticum aestivum
  misc_feature (150)..(150): Xaa can be any naturally occurring amino acid
  misc_feature (296)..(296): Xaa can be any naturally occurring amino acid
  misc_feature (298)..(298): Xaa can be any naturally occurring amino acid
HPPLLLSTTTLVHHYHQLAAMAASTKKLYPLLLTLLLLLTTAAAVPAIDCDCGNPKAPKPSHPPKTKPPTKGPKPGPKGPTYPSPAPKGHLPHPPVVGPPKGHVPRPPVVGPPKGHVPHPPVVGPPKGHVPRPPVYGPPKGPITRPPVTXPPVVVGPPVTYPTPPVTAPPVTYPAPPVTAPPVTYPAPPVTTPPVTYPAPPVTNPPVTYPSPPVNTPCPPPPPATPAAQTCPVDSLKIGACVDLLGGLVHVGLGDPVVNKCCPLLEGLVELEAAVCLCTTIRLKLLNINLVLPLAXQXLLTCGKTPPPGYTCSI

SEQ ID NO: 25258 - protein, 294 aa, Triticum aestivum
  misc_feature (130)..(130): Xaa can be any naturally occurring amino acid
  misc_feature (276)..(276): Xaa can be any naturally occurring amino acid
  misc_feature (278)..(278): Xaa can be any naturally occurring amino acid
MAASTKKLYPLLLTLLLLLTTAAAVPAIDCDCGNPKAPKPSHPPKTKPPTKGPKPGPKGPTYPSPAPKGHLPHPPVVGPPKGHVPRPPVVGPPKGHVPHPPVVGPPKGHVPRPPVYGPPKGPITRPPVTXPPVVVGPPVTYPTPPVTAPPVTYPAPPVTAPPVTYPAPPVTTPPVTYPAPPVTNPPVTYPSPPVNTPCPPPPPATPAAQTCPVDSLKIGACVDLLGGLVHVGLGDPVVNKCCPLLEGLVELEAAVCLCTTIRLKLLNINLVLPLAXQXLLTCGKTPPPGYTCSI

SEQ ID NO: 25259 - DNA, 1909 bp, Triticum aestivum
agaacatcctaatcgaaaaatccacagcaacagcttcctcttcctcctcagacccaccctcgctacctcctagctgcatctgctgctaagctccgcctccacccgcgcgctgtctgctagctcgtcgcgttgaaggtcgttcaggagcattttgaaggttgaaagtaaccttcggctgttggaagatgtatcgggccaagagagccgcattgtcaccaaaggtgaagcgccgtgtcggcaagtatgagctcggccgcaccatcggggaagggacctttgcaaaggtcaggttcgcaaagaacactgaaactatggagcctgttgctatcaaaatcctcgacaaggagaaggttcagaagctcagattggttgaacagattaggcgcgaaatttgtactatgaagttaataaagcatcctaatgttgttcgactgcacgaggtgatgggaagtaaagcaagaattttcattgttctggaatacattactggaggggaactctttgataccatttataccaatggaaggttgaaagaagaggaggcacgcaaatactttcagcaactgataaatgccgttgactattgccacagcaggggtgtgtatcacagagatttgaagttagaaaatttgttgcttgatgctgctggaaacctcaaagtgtccgacttcggtttaagtgctttaactgagcaagtgaaggctgacgggttgctgcacacaacatgcgggactccgaactatgttgctcctgaggtgattgaggatagaggttatgatggtgcagctgcagatatctggtcttgcggggtaatcctttttattctgcttgccgggtttttacctttcgaggatgaaaacatcatcgccctttataagaagatctcagaagctcaattcacatgtccctcttggttttctactggagctaagaagctgatcaccagaattctggaccctaatcctgcaactcgtatcaccattcctcagatactggaggatccttggttcaaaaagggattcaagccacctgtttttgacgataagtatgaaactagctttgatgatgtctatgctgcatttggagactcagaggaccagcatgtgaaagaggagactgaacataagccaacctcaatgaatgcatttgaactgatttcactgaatcagggactgaatctggacaacttgttcgaggcaaaggaggagcataaaagagagacacgattcacctcgcaatgccctccaaaagaaatcatcagcaagattgcagaagctgcaaggccacttggttttgacattcagaagaaaaactacaagatgcggatggagaacccgaaagcaggtagaaaaggcaatctcaatgttgcaaccgaggtgtttcaagtagctccatccctacatgtggttgagctgaaaaaggcgaagggggatactctggaatttcaaatgttctacagatctctgtcgacccagctcaaggacgtagtttggaagtgcggcggcgaggtagaagataacggcaccgcggcatgaagcacgttttccatgtacatagtccctactgtagttcatatgtgggatggatggcgggtgggctgcggaatgggttgtgcagatcgagttctttcgttggtttgttaatgatgatgatgatgatgaataggctccgatgaaacagcgggcgcgcagcccactgtggaagagcctatctatggcttcgttagtttgcttattattacatattcatggtccagagggagattaaagctagaggcgaaaggccgattgttgtaagattgtattggtaggaggttatattgaacagcgcaatgtgttgaactttgttctctactctacttagcattgtactgtagctatagccggaataataaataaataaaccgctg

SEQ ID NO: 25260 - protein, 449 aa, Triticum aestivum
MYRAKRAALSPKVKRRVGKYELGRTIGEGTFAKVRFAKNTETMEPVAIKILDKEKVQKLRLVEQIRREICTMKLIKHPNVVRLHEVMGSKARIFIVLEYITGGELFDTIYTNGRLKEEEARKYFQQLINAVDYCHSRGVYHRDLKLENLLLDAAGNLKVSDFGLSALTEQVKADGLLHTTCGTPNYVAPEVIEDRGYDGAAADIWSCGVILFILLAGFLPFEDENIIALYKKISEAQFTCPSWFSTGAKKLITRILDPNPATRITIPQILEDPWFKKGFKPPVFDDKYETSFDDVYAAFGDSEDQHVKEETEHKPTSMNAFELISLNQGLNLDNLFEAKEEHKRETRFTSQCPPKEIISKIAEAARPLGFDIQKKNYKMRMENPKAGRKGNLNVATEVFQVAPSLHVVELKKAKGDTLEFQMFYRSLSTQLKDVVWKCGGEVEDNGTAA

SEQ ID NO: 25261 - protein, 407 aa, Triticum aestivum
MEPVAIKILDKEKVQKLRLVEQIRREICTMKLIKHPNVVRLHEVMGSKARIFIVLEYITGGELFDTIYTNGRLKEEEARKYFQQLINAVDYCHSRGVYHRDLKLENLLLDAAGNLKVSDFGLSALTEQVKADGLLHTTCGTPNYVAPEVIEDRGYDGAAADIWSCGVILFILLAGFLPFEDENIIALYKKISEAQFTCPSWFSTGAKKLITRILDPNPATRITIPQILEDPWFKKGFKPPVFDDKYETSFDDVYAAFGDSEDQHVKEETEHKPTSMNAFELISLNQGLNLDNLFEAKEEHKRETRFTSQCPPKEIISKIAEAARPLGFDIQKKNYKMRMENPKAGRKGNLNVATEVFQVAPSLHVVELKKAKGDTLEFQMFYRSLSTQLKDVVWKCGGEVEDNGTAA

SEQ ID NO: 25262 - protein, 378 aa, Triticum aestivum
MKLIKHPNVVRLHEVMGSKARIFIVLEYITGGELFDTIYTNGRLKEEEARKYFQQLINAVDYCHSRGVYHRDLKLENLLLDAAGNLKVSDFGLSALTEQVKADGLLHTTCGTPNYVAPEVIEDRGYDGAAADIWSCGVILFILLAGFLPFEDENIIALYKKISEAQFTCPSWFSTGAKKLITRILDPNPATRITIPQILEDPWFKKGFKPPVFDDKYETSFDDVYAAFGDSEDQHVKEETEHKPTSMNAFELISLNQGLNLDNLFEAKEEHKRETRFTSQCPPKEIISKIAEAARPLGFDIQKKNYKMRMENPKAGRKGNLNVATEVFQVAPSLHVVELKKAKGDTLEFQMFYRSLSTQLKDVVWKCGGEVEDNGTAA

SEQ ID NO: 25263 - DNA, 741 bp, Triticum aestivum
gtctttggtagtaggccctaaaggacttgccttcggtggggaagctgggtttgacacttcttcaggaaagtttaccaagtacactgggtggtttcagtgtaaaccaagcctgaacttcccatgcttcaggctattctggccgacaaaggtgacacccattcaaaagtgtcaggtgtgtatccccttgatgagaagcagaaggcttcggcccgtggctgaatttacccggaagctctcaacgaacgagaacacactgacagttggtggcctgtacaccgtcgaccctcagacagctgtgaaggcaaggctcaacaacactggaaagcttgctgctctcctccagcacgaggttaaaccaaagtcactcttgacgatatctggtgagttcgacaccaaggccttggacagagcacccaagtttgggctgtcactcgcgctcaagccctgatgagatcatacgtggatgatagcgattgaacatcggattctttggttattttttgtgaagctatggccaataatttgttccgcagacatgttctgttaaatctctggaggtttaggtgctctgtgggcaggatccgataggccttcacctggatttttgtccaggcgtttactttttgatgatcgaagtacttccccattgatagatgtatgcagcttgtttctttctactgtgagttccgagtagctttcacggtagtatgttacttgaagaagaagctacacttgattttt

SEQ ID NO: 25264 - protein, 148 aa, Triticum aestivum
SLVVGPKGLAFGGEAGFDTSSGKFTKYTGWFQCKPSLNFPCFRLFWPTKVTPIQKCQVCIPLMRSRRLRPVAEFTRKLSTNENTLTVGGLYTVDPQTAVKARLNNTGKLAALLQHEVKPKSLLTISGEFDTKALDRAPKFGLSLALKP

SEQ ID NO: 25265 - protein, 86 aa, Triticum aestivum
MRSRRLRPVAEFTRKLSTNENTLTVGGLYTVDPQTAVKARLNNTGKLAALLQHEVKPKSLLTISGEFDTKALDRAPKFGLSLALKP

SEQ ID NO: 25266 - DNA, 2043 bp, Triticum aestivum
aaaaagctcgcagtgggcccgccccacatccatcttcctccgctccgctggaaaatacacagacgagatgcgagactagctagggtttacactctacactctcctccgaatcgaatcaaagaagcggcggcactctcctctcctccgctgcggaccaggcggccgcggagctgaatttgttcgatggaggacctaccagaggctctgctgacagagattctcaagaggatcaccaggacaagtgatctcaagtcttttacccttgtgtcaaagcagctctgcaagatagagggggatcaaaggggtgctatccatgttggttccggtgtttgcactgctacaaaagcactggcatcattgtgcgcccggttcccaaatctgcggaaagtggaaatcgattactctggctggatacctggacatggaaagcagctggacaacaaaggcctctctgtgttttcatctcactgttcctcgctgattgacctcaccttaagcttctgctcatgcatcgatgactctgggcttgcttgtttagcttattgcaagacattggtgtctctcaggctcaactccgcaccagaaataacgtcagttgggcttttctcggttgcagttggttgcacaaatctatctgctctccaccttactgattgcgagaacatcgacaatgtagagtggctggaataccttggtaggcatggatcgttagaagagcttgtggtgaagaattgcaaaggaatcaatcatcatgacttcctaaagtttgattctggatggatgaagctccagaagtttgagtttgagaggaaaagagaaagatttgattgtcttccaggtgatgtgatctatgactccttgtacgatgctcacagtatggatgcatatgatttctgctgtgagagcttgaaggatttaaggttggcgcatattaaaacttggcccgaagtaggacttcgtattctcctagggaagtgtaaagcattggagaagctttgccttgagtatgttcatgccctaaatgacaatgacatgattgcattgtctcggagctgcagcaaccttaaaagcatcttacttaggctcaacctgcagcgctactctagtgatgtcagctattgtgaaaccaggacgtcatttactgatgccagcctttacgctctagccctcaactgtcgtatgcttcagatggttgacctcagctttacaggatgttcccctgactggccatcagaaataggattcacacagcagggttttctggtgctcattcggtcctgcccgattcgcgttctcgtgctcaacaacgccaacttctttgatgacgaggggatgaaggccctgtcatcctcaccacatctggagacgctcgagcttatattgtgtcatgcggtaactgatgccgggatgcacttcattgcgcacaccccatgcttgagcaatcttacacttcgggtgtgtcatcacattactgatgttggagtggctgaactggggcgtgcacataagttagagtctttggtcattgagtattgtggtgaggtctctccgcaagctgcgcaggttgttgccaagtcagttcactactccaaggactgttcagatgcccttatgaagagaattggtcttggcatctattgatgaagtggtctccaaaattttcagtatgaatttgctgctcaagccattaagttgttcagtgtgcatcattgcacaaggctctgcatcatccgacctagattcacttgtctggactttctattgccttctacctttactatatgatttttctgtatgacagtctaatgatgatctttggatggcatctggtgaatggtgaatggaactttagtactgtagtaagcaccacttgtgtattactatgaaccgtaattctggttgcttaattcctactctctgtagccgtatcgaaaccggcataagtaggccccaagattcccagtttgtgctgtggggggcactatatgacagtttggtgtacttatttgtattatttaagcaaatgtcatgaactcctttttg

SEQ ID NO: 25267 - protein, 485 aa, Triticum aestivum
MEDLPEALLTEILKRITRTSDLKSFTLVSKQLCKIEGDQRGAIHVGSGVCTATKALASLCARFPNLRKVEIDYSGWIPGHGKQLDNKGLSVFSSHCSSLIDLTLSFCSCIDDSGLACLAYCKTLVSLRLNSAPEITSVGLFSVAVGCTNLSALHLTDCENIDNVEWLEYLGRHGSLEELVVKNCKGINHHDFLKFDSGWMKLQKFEFERKRERFDCLPGDVIYDSLYDAHSMDAYDFCCESLKDLRLAHIKTWPEVGLRILLGKCKALEKLCLEYVHALNDNDMIALSRSCSNLKSILLRLNLQRYSSDVSYCETRTSFTDASLYALALNCRMLQMVDLSFTGCSPDWPSEIGFTQQGFLVLIRSCPIRVLVLNNANFFDDEGMKALSSSPHLETLELILCHAVTDAGMHFIAHTPCLSNLTLRVCHHITDVGVAELGRAHKLESLVIEYCGEVSPQAAQVVAKSVHYSKDCSDALMKRIGLGIY

SEQ ID NO: 25268 - protein, 286 aa, Triticum aestivum
MKLQKFEFERKRERFDCLPGDVIYDSLYDAHSMDAYDFCCESLKDLRLAHIKTWPEVGLRILLGKCKALEKLCLEYVHALNDNDMIALSRSCSNLKSILLRLNLQRYSSDVSYCETRTSFTDASLYALALNCRMLQMVDLSFTGCSPDWPSEIGFTQQGFLVLIRSCPIRVLVLNNANFFDDEGMKALSSSPHLETLELILCHAVTDAGMHFIAHTPCLSNLTLRVCHHITDVGVAELGRAHKLESLVIEYCGEVSPQAAQVVAKSVHYSKDCSDALMKRIGLGIY

SEQ ID NO: 25269 - protein, 254 aa, Triticum aestivum
MDAYDFCCESLKDLRLAHIKTWPEVGLRILLGKCKALEKLCLEYVHALNDNDMIALSRSCSNLKSILLRLNLQRYSSDVSYCETRTSFTDASLYALALNCRMLQMVDLSFTGCSPDWPSEIGFTQQGFLVLIRSCPIRVLVLNNANFFDDEGMKALSSSPHLETLELILCHAVTDAGMHFIAHTPCLSNLTLRVCHHITDVGVAELGRAHKLESLVIEYCGEVSPQAAQVVAKSVHYSKDCSDALMKRIGLGIY

SEQ ID NO: 25270 - DNA, 1436 bp, Triticum aestivum
ggagatgctctgacgtgtgactttaccacagcaagtcggagaatctggttttgactctccctcgccggcggccggcgccgtgctcccgcagcggcgcagcccccgtgtccaaccccaacatctacgccccgttgagtcacgtgccgtgcccgcacgaacacctgctcccatatccctggccgcgctccgcgctaccgcggcgatcgggcgtccactgcccagtcgagcaccttccctcgccgtacgaatatggcccctgttcccgctcctatcgcgcgcctccccctcctccctcgccgtgtccacacccccctccctcatccccgaccgtcagcaccggcggaggcacgacacaccgcgcgcacgagggcgccgcagcggatcggaggagtggatccggggggaagggagacggcgcggggtagcggcacatcactccggagcacggggcgactggcgcggcgggcgccatggctaaaaaggcgcggcatgtgaaccaccctagttgacattttgcttcgcctgatgcgtatccggttgctggattgactcgtacgcttccagggctcggataagggggggttcttcacggagtacggcgaggcgacccgataccaggtcggcgaagtggtcggcaaaggcagctacggcgtcgtggcgtctgccgtcgacacccacaccggcgagagcgtcgccatcaaaaagatcgacgacgtcttcgagcatgtcgccgacgccacccgcattctccgcgagatcaagctgctccgccttctgcgccatccagacatcgtccagatcaagcacatcatgctcccgccgtcgcgccgcgaattccgtgacatctacataatcttcgagctcatggagtccgacctccaccaggtcatcaaggccaacgacgacctcagcccggagcaccatcagttctttttctaccagctgcttcgtgggatgaagtacatacacgctgccaatgtcttccaccgggacctcaagcccaagaacattctagccaatgccgattgcaagctcaagatttgcgacttcggccttgctcgggtttccttcaatgacaccccgtccgcgatattctggacggattatgtagcaacaaggtggtatcgtgctccagaattatgtggctccttcttttcaaagtatactcctgcgattgatatttggagcataggatgtatatttgcagaaatgcttacagggaggccgctctttcctggcaaaaatgtggtacatcaattggatctcatgactgatctactcggcactccttcggcagaatctatttctagggtgagttcaattccccgcttctaaaataaataaatcagttagagacttatctcgtgcgtgatttatttaccaactctttgtgcttgtggttaccatttcctttatcaagatgaaatattcctgcg

SEQ ID NO: 25271 - protein, 174 aa, Triticum aestivum
MLPPSRREFRDIYIIFELMESDLHQVIKANDDLSPEHHQFFFYQLLRGMKYIHAANVFHRDLKPKNILANADCKLKICDFGLARVSFNDTPSAIFWTDYVATRWYRAPELCGSFFSKYTPAIDIWSIGCIFAEMLTGRPLFPGKNVVHQLDLMTDLLGTPSAESISRVSSIPRF

SEQ ID NO: 25272 - protein, 156 aa, Triticum aestivum
MESDLHQVIKANDDLSPEHHQFFFYQLLRGMKYIHAANVFHRDLKPKNILANADCKLKICDFGLARVSFNDTPSAIFWTDYVATRWYRAPELCGSFFSKYTPAIDIWSIGCIFAEMLTGRPLFPGKNVVHQLDLMTDLLGTPSAESISRVSSIPRF

SEQ ID NO: 25273 - protein, 126 aa, Triticum aestivum
MKYIHAANVFHRDLKPKNILANADCKLKICDFGLARVSFNDTPSAIFWTDYVATRWYRAPELCGSFFSKYTPAIDIWSIGCIFAEMLTGRPLFPGKNVVHQLDLMTDLLGTPSAESISRVSSIPRF

SEQ ID NO: 25274 - DNA, 650 bp, Triticum aestivum
attcgcctttccgcatccagttaagtcgcctttcgattcgaacctccccgaaatccgcagcagtcgacaggaggccaaaggcgccgccatggcccgtacgaagcagaccgcccgcaagtccaccggcggcaaggcgccccgcaagcagctcgccaccaaggcggcgaggaagtctgcgccgacgaccggcggagtgaagaagccccaccgctacaggcccgggaccgtggcgctccgggagatccgcaagtaccagaagagcacggagctgctgatccgcaagctgcctttccagcgcctggtccgcgagatcgcgcaggacttcaagacggacctcaggttccagagccacgccgtgctggccctccaggaggcggccgaggcgtacctggtggggctgttcgaggacaccaacctgtgcgccatccacgccaagcgcgttaccattatgcccaaggacatccagctcgcccgccgcatccgtggcgagagggcctaagctgcgccctccgccgacgccgttagtgagttggaatgagttgattctggttgtagtttgttcctaattgccgtgctaggtctctctgcttttgtgtagaagaaatatggttgttggtacaagcaagacgaacttgttatgtgatgatgtt

SEQ ID NO: 25275 - protein, 165 aa, Triticum aestivum
FAFPHPVKSPFDSNLPEIRSSRQEAKGAAMARTKQTARKSTGGKAPRKQLATKAARKSAPTTGGVKKPHRYRPGTVALREIRKYQKSTELLIRKLPFQRLVREIAQDFKTDLRFQSHAVLALQEAAEAYLVGLFEDTNLCAIHAKRVTIMPKDIQLARRIRGERA

SEQ ID NO: 25276 - protein, 136 aa, Triticum aestivum; identical to SEQ ID NO: 8056

SEQ ID NO: 25277 - DNA, 586 bp, Triticum aestivum
ttacttcaagagatacttgcctcacgcgatccgagttactaatgcaaacgatatcgtccctcatctgccaccatacttctcgttcttccctcagaagacctaccatcactttccaagagaggtatgggtccatgatatcgggctcgggagcctggtatacacggttgagcagatctgcgacgactccggcgaagacccggcatgcagcaggtctgtgagcggtaacagcattcaagatcacataacctacctgggcgtgagcatgcacgcggaggcctggagcagctgcaggatcgtcatggactacgccgagctgcggtacaagatggacctccatggaaacgtcgtcttgtcgaagcagcagcagcagcagcagcccggtctgtcggaccagcgaagaagacacagcgcccagtgaaaccaatgtaaaaaagttctgtattatcatagtagcaccacgcacgcaacctatcattcccctctctgcttcattgtttctgcatccagagaggggataacaccaccacgctccacaggaagatgcttgctgtaaatgtttgcttggtaatgtgaagcattttccagt

SEQ ID NO: 25278 - protein, 138 aa, Triticum aestivum
YFKRYLPHAIRVTNANDIVPHLPPYFSFFPQKTYHHFPREVWVHDIGLGSLVYTVEQICDDSGEDPACSRSVSGNSIQDHITYLGVSMHAEAWSSCRIVMDYAELRYKMDLHGNVVLSKQQQQQQPGLSDQRRRHSAQ

SEQ ID NO: 25279 - protein, 71 aa, Triticum aestivum
TSRDTCLTRSELLMQTISSLICHHTSRSSLRRPTITFQERYGSMISGSGAWYTRLSRSATTPAKTRHAAGL

SEQ ID NO: 25280 - protein, 51 aa, Triticum aestivum
MHAEAWSSCRIVMDYAELRYKMDLHGNVVLSKQQQQQQPGLSDQRRRHSAQ

SEQ ID NO: 25281 - DNA, 640 bp, Triticum aestivum
aacgaaagtcgttctacgtacaacaagtgggatggcgtttcccgttgcaccactcaggtgttccccggagcatggaccgccgtcctgttgtcgctcgacagcccggggttctggaacgtgcgcacggagaatctggacacctggtacctcggccaggagacgtacatccgggtggtggatcctgacggaggctacaacgtgaccgagtcggtgttgccggacaacgccctcttctgtggcctcctcagggaaaaacaaaaggctcagaagccacacgggtcaacgtcgagctcggcgtcccccgcgctaaaagagagcggctacctgctggcggtcctggtgtcgctggtcgtgttttcggtcatcggacactgaactgaagtgattgccagctagtggcactagatctgctgctatctgtgagttgttaggaaattggaaatgtaggttgagtttgcggggtgatccgtcgattgggtggagatcctgctgccattatttgcgcatcggcgaattcgtcgaaacttgttaacagagttgtgtgcaagcgtgtcgcattgttcgtgtgtggtacttgctgctgcctgtggccccgcaattgggggcgctgtgccgcctttgaggatgatgatttttagct

SEQ ID NO: 25282 - protein, 124 aa, Triticum aestivum
NESRSTYNKWDGVSRCTTQVFPGAWTAVLLSLDSPGFWNVRTENLDTWYLGQETYIRVVDPDGGYNVTESVLPDNALFCGLLREKQKAQKPHGSTSSSASPALKESGYLLAVLVSLVVFSVIGH

SEQ ID NO: 25283 - protein, 66 aa, Triticum aestivum
TKVVLRTTSGMAFPVAPLRCSPEHGPPSCCRSTARGSGTCARRIWTPGTSARRRTSGWWILTEATT

SEQ ID NO: 25284 - DNA, 836 bp, Triticum aestivum
  misc_feature (144)..(144): n is a, c, g, or t
  misc_feature (496)..(496): n is a, c, g, or t
  misc_feature (498)..(498): n is a, c, g, or t
  misc_feature (584)..(584): n is a, c, g, or t
atgagacgacatccacttgagcaagtaaaccaggtgcggcgcagacgcagagagaaagaaaggaagcaaggggaggaacaggatctaggggctgctatggcgtcggcggcgagcaggaaggcgccgtcgctggtggtggcggcnagcgtgggcgccgtggaggcgctcaaggaccaggcgggcctgtgccgctggggctacccgctccgctcgctctaccgccacgccgccgccgcgcccagggtccgcgccctgtccgcctcgctctccgaggcagcggccgccgcggctccccgaccggcgcctttgtccgcggaggacgcgaagctgcgcaaggcgcaccacctcgtctgctggggccccaactgagctccttctctccgcttcatgtcaccaccggcacatgagcatatataagtagctgatgaatgcctgtgtcaatggtgtcgggattagtaacaaaaggcttgctttgctgtttcgccggagaaagcananccgtcattgtgtgcagcgccggtgaaccgctccggcctcggaggagtaggacggttcatcaacgctgcactcaatggcacctttgngtctcttcctcctcttcgtcttccccagtagtagtgtctggttgcatctggctagcttagcttccgtagacgcaagcaggaatcatggctttagcttttgaggccgggacatcacccattttcttttgtagtagtatgatgaggtgtgcgaggctattacgatggttgtactgcggtggagaactgaccggcgttgttgtactacagatcgtactatgcttatgttgtgacttgtgtcgactactgcccttc

SEQ ID NO: 25285 - protein, 122 aa, Triticum aestivum
  misc_feature (48)..(48): Xaa can be any naturally occurring amino acid
MRRHPLEQVNQVRRRRREKERKQGEEQDLGAAMASAASRKAPSLVVAXSVGAVEALKDQAGLCRWGYPLRSLYRHAAAAPRVRALSASLSEAAAAAAPRPAPLSAEDAKLRKAHHLVCWGPN

SEQ ID NO: 25286 - protein, 90 aa, Triticum aestivum
  misc_feature (16)..(16): Xaa can be any naturally occurring amino acid
MASAASRKAPSLVVAXSVGAVEALKDQAGLCRWGYPLRSLYRHAAAAPRVRALSASLSEAAAAAAPRPAPLSAEDAKLRKAHHLVCWGPN

SEQ ID NO: 25287 - protein, 71 aa, Triticum aestivum
  misc_feature (23)..(24): Xaa can be any naturally occurring amino acid
  misc_feature (52)..(52): Xaa can be any naturally occurring amino acid
MPVSMVSGLVTKGLLCCFAGESXXVIVCSAGEPLRPRRSRTVHQRCTQWHLXVSSSSSSSPVVVSGCIWLA

SEQ ID NO: 25288 - DNA, 705 bp, Triticum aestivum
  misc_feature (587)..(587): n is a, c, g, or t
acatcctaatcgaaaatattataatcaattaagttatttttgacgaggaagccgtcgagtcgaaactgctaagagcgcgggtaaagatgcaacagaagtacgtcgatcagttccacatgttatatgatgacttcaacatcatcaagttgcccttgctcccagaggaggtatgtggtgtgcaagctctacagaacttctccaagcacttcctggcaccgtacgaaccggtgctgagaaggggcagcgtggaggagctagaagagagagtaggcacgctgaaatcagcgctgcaagaagccgagtcggaactagatagagctaggaaagggaagcaggtagcatgagccttcttcagctgtcagaagttgttgcactcggcggacaccagttatagagattttgtttgtcctgcattctccggttgatttcctccatttcttgcttcccttggttgaaaattatagatttgttgttatagtcatgagaagagaagtgtactgtaagcacgcgatatatataggtgtctttttttgcccttgtgttagagggtctgttcgagagttgatgccgctgtttaggagttgttntgggctgagattggaattgattacctagaaacccttgtgcactgctgtagtatctcgttaaacataagtaagcttggaaaatcaataaaggattgctgagagcaacaagttgatggcg

SEQ ID NO: 25289 - protein, 85 aa, Triticum aestivum
MQQKYVDQFHMLYDDFNIIKLPLLPEEVCGVQALQNFSKHFLAPYEPVLRRGSVEELEERVGTLKSALQEAESELDRARKGKQVA

SEQ ID NO: 25290 - protein, 75 aa, Triticum aestivum
MLYDDFNIIKLPLLPEEVCGVQALQNFSKHFLAPYEPVLRRGSVEELEERVGTLKSALQEAESELDRARKGKQVA

SEQ ID NO: 25291 - protein, 48 aa, Triticum aestivum
MWCASSTELLQALPGTVRTGAEKGQRGGARRESRHAEISAARSRVGTR

SEQ ID NO: 25292 - DNA, 569 bp, Triticum aestivum
caccaaaccaatccgaccaaccaagaaacaccgccggccgcaggcaccaagaaccatccatggcgaccctgttctgcgcggccgctgccacctcgtgccgtctcgccttcccgcttgccgcgccggcgccggcgccaggccttggccgcggccgggcccgacgcggcacggtggcggtgcgtgcggaggcagacaccgctgctgctgggaccgggataaacccggccatccggaaggaggaggccaaggtggtcgacaccgtcctggccggggagctctccaagccgctcaccccgtactgccggtgctggagatcgggaacatttccactgtgtgatggaagccatgtgaagcacaacaaagcaacgggtgataatgtagggcccttgcttgttaagaagtagaatgagttatttttcctcaatttgtgttgagtggaataatgtgtatatcgtagttggtataacgtttttctcaaatgtaataatgaagttccatgctgcaacaaccctgttgatcaaaagagcagaattaagagagaaattgccatgctacaaagcaaaataagt

SEQ ID NO: 25293 - protein, 133 aa, Triticum aestivum
PNQSDQPRNTAGRRHQEPSMATLFCAAAATSCRLAFPLAAPAPAPGLGRGRARRGTVAVRAEADTAAAGTGINPAIRKEEAKVVDTVLAGELSKPLTPYCRCWRSGTFPLCDGSHVKHNKATGDNVGPLLVKK

SEQ ID NO: 25294 - protein, 114 aa, Triticum aestivum
MATLFCAAAATSCRLAFPLAAPAPAPGLGRGRARRGTVAVRAEADTAAAGTGINPAIRKEEAKVVDTVLAGELSKPLTPYCRCWRSGTFPLCDGSHVKHNKATGDNVGPLLVKK

SEQ ID NO: 25295 - protein, 111 aa, Triticum aestivum
TKPIRPTKKHRRPQAPRTIHGDPVLRGRCHLVPSRLPACRAGAGARPWPRPGPTRHGGGACGGRHRCCWDRDKPGHPEGGGQGGRHRPGRGALQAAHPVLPVLEIGNISTV

SEQ ID NO: 25296 - DNA, 515 bp, Triticum aestivum
attccataggacccatcggcagagagcgagccattcgaaccacccccgaccccgacccctcctccccaccctctccatcgcccgccgccgccgccgccgccgcccgccatgtggaagcgcgccgcctccctcctcctcgcccgccgcacggccctcgccgcgcagcgcgccccggcgatctcgggatccgccgcgggcgccacccgccgcgcgcccgccttcttctccaccctcgatgcggggcaggcgaggacgcgggtcgaggacgtgatgccgatcgccacggggcacgagcgcgaggagatcgaggccgagctccagggaaagaagcggtttgacatggacgcccccgtcggcccattcggcaccaaggaagatccagctatcattcagtcatactttgacaaaaggattgttggttgccctggcggtgaaggagaggatgagcatgatgttgtgtggttttggttgaagaaaggcgagccacatgaatgcccagtctgcactcagtattt

SEQ ID NO: 25297 - protein, 135 aa, Triticum aestivum
MWKRAASLLLARRTALAAQRAPAISGSAAGATRRAPAFFSTLDAGQARTRVEDVMPIATGHEREEIEAELQGKKRFDMDAPVGPFGTKEDPAIIQSYFDKRIVGCPGGEGEDEHDVVWFWLKKGEPHECPVCTQY

SEQ ID NO: 25298 - protein, 111 aa, Triticum aestivum
SIGPIGRERAIRTTPDPDPSSPPSPSPAAAAAAARHVEARRLPPPRPPHGPRRAARPGDLGIRRGRHPPRARLLLHPRCGAGEDAGRGRDADRHGARARGDRGRAPGKEAV

SEQ ID NO: 25299 - protein, 89 aa, Triticum aestivum
FHRTHRQRASHSNHPRPRPLLPTLSIARRRRRRRPPCGSAPPPSSSPAARPSPRSAPRRSRDPPRAPPAARPPSSPPSMRGRRGRGSRT

SEQ ID NO: 25300 - DNA, 634 bp, Triticum aestivum
  misc_feature (606)..(606): n is a, c, g, or t
acagaactcaaaccccaacgcaagtctcccacctcgcgcgttgcaaccttccccaatccgatctcttgtcgcctccgccgaagccgccatggcgcccaaggccgagaagaagcccgctgcggagaagaagccggtggagacagagaagaagcccaaggccgagaagcgcgtgcccggcaaggacggcggcgccgacaagaagaagaaggccaagaagagcgtcgagacctacaagatctacatcttcaaggtgctcaagcaggtccaccccgacatcggcatctcctccaaggccatgtccatcatgaactccttcatcaacgacatcttcgagaagctcgccggcgagtcggccaagctcgcgcgctacaacaagaagcccaccatcacctcccgggagatccagaccgccgtgcgcctcgtcctccccggcgagctcgccaagcacgccgtctccgagggcaccaaggccgtcaccaagttcacctcctcttagattaccgtcgcctgaatctcttattggctttgttccgaatgttcctatgtcgtcaatcatagggggttatattcccctttacagacagtgtaaaaatgagtcagatttgntaaatcaatgaatcatccagttgttgtt

SEQ ID NO: 25301 - protein, 185 aa, Triticum aestivum
TELKPQRKSPTSRVATFPNPISCRLRRSRHGAQGREEARCGEEAGGDREEAQGREARARQGRRRRQEEEGQEERRDLQDLHLQGAQAGPPRHRHLLQGHVHHELLHQRHLREARRRVGQARALQQEAHHHLPGDPDRRAPRPPRRARQARRLRGHQGRHQVHLLLDYRRLNLLLALFRMFLCRQS

SEQ ID NO: 25302 - protein, 164 aa, Triticum aestivum
QNSNPNASLPPRALQPSPIRSLVASAEAAMAPKAEKKPAAEKKPVETEKKPKAEKRVPGKDGGADKKKKAKKSVETYKIYIFKVLKQVHPDIGISSKAMSIMNSFINDIFEKLAGESAKLARYNKKPTITSREIQTAVRLVLPGELAKHAVSEGTKAVTKFTSS

SEQ ID NO: 25303 - protein, 135 aa, Triticum aestivum
MAPKAEKKPAAEKKPVETEKKPKAEKRVPGKDGGADKKKKAKKSVETYKIYIFKVLKQVHPDIGISSKAMSIMNSFINDIFEKLAGESAKLARYNKKPTITSREIQTAVRLVLPGELAKHAVSEGTKAVTKFTSS

SEQ ID NO: 25304 - DNA, 873 bp, Triticum aestivum
  misc_feature (584)..(584): n is a, c, g, or t
  misc_feature (713)..(713): n is a, c, g, or t
  misc_feature (715)..(715): n is a, c, g, or t
agaccaagaagagcttcagaaacggaaaccgacccaagcgtctcagctcctctgccgcagcggcccgccgcgacgcaagatggggacagacgcccccgcccccgccccggccgcggccgccggagacggcgacgcggcccggaagcggccgggcgggcaggacgcggccgcgggcgccgacagcaagcgccgccgcgcggagcacccctcctccggctcccgcgagcgccacggccagcagccgcagccgcagccgcagcggcagcagaggccggggcgccccggggacgggggcaaggggaagagggagacgatgcgggcgtcgcacatcctgatcaagcacgaggggtcccggcgcaaggcctcgtggcgggaccccgacggcgtcgccatctccgccaccacccgcgacgacgccgccgacctcgcccgcgccctccgcgaccagatcgccgccggggagctccagttcgacgccgccgcccgcgacaactccgactgcaactccgccaagcgcggcggcgacctcggtccattcgagaagggcaagatgcagaagcctttcgagaaggcagtgattgctntgaaggtgggggacatgagcgacgtggttgacactgagagcggggtgcacatcatcctgaggaccgggtgacggcgtccgtggaagctctgtcgatccatatgagattggcttgaaacatcgcgcgttntnttaagcagagaccttttgcttttaacttgcattgtaacagtgctgactgcaaagctactatgggatttggctgtatgccaggattagacgttggtggtgcttgtgttgtctcgataatgttacaacttttgagtgaaattcagttgttattctctttc

SEQ ID NO: 25305 - protein, 217 aa, Triticum aestivum
  misc_feature (195)..(195): Xaa can be any naturally occurring amino acid
DQEELQKRKPTQASQLLCRSGPPRRKMGTDAPAPAPAAAAGDGDAARKRPGGQDAAAGADSKRRRAEHPSSGSRERHGQQPQPQPQRQQRPGRPGDGGKGKRETMRASHILIKHEGSRRKASWRDPDGVAISATTRDDAADLARALRDQIAAGELQFDAAARDNSDCNSAKRGGDLGPFEKGKMQKPFEKAVIAXKVGDMSDVVDTESGVHIILRTG

SEQ ID NO: 25306 - protein, 204 aa, Triticum aestivum
  misc_feature (195)..(195): Xaa can be any naturally occurring amino acid
RPRRASETETDPSVSAPLPQRPAATQDGDRRPRPRPGRGRRRRRRGPEAAGRAGRGRGRRQQAPPRGAPLLRLPRAPRPAAAAAAAAAAEAGAPRGRGQGEEGDDAGVAHPDQARGVPAQGLVAGPRRRRHLRHHPRRRRRPRPRPPRPDRRRGAPVRRRRPRQLRLQLRQARRRPRSIREGQDAEAFREGSDCXEGGGHERRG

SEQ ID NO: 25307 - protein, 191 aa, Triticum aestivum
  misc_feature (169)..(169): Xaa can be any naturally occurring amino acid
MGTDAPAPAPAAAAGDGDAARKRPGGQDAAAGADSKRRRAEHPSSGSRERHGQQPQPQPQRQQRPGRPGDGGKGKRETMRASHILIKHEGSRRKASWRDPDGVAISATTRDDAADLARALRDQIAAGELQFDAAARDNSDCNSAKRGGDLGPFEKGKMQKPFEKAVIAXKVGDMSDVVDTESGVHIILRTG

SEQ ID NO: 25308 - DNA, 999 bp, Triticum aestivum
  misc_feature (505)..(505): n is a, c, g, or t
  misc_feature (507)..(507): n is a, c, g, or t
  misc_feature (523)..(523): n is a, c, g, or t
  misc_feature (530)..(530): n is a, c, g, or t
  misc_feature (535)..(535): n is a, c, g, or t
  misc_feature (561)..(561): n is a, c, g, or t
  misc_feature (580)..(580): n is a, c, g, or t
  misc_feature (583)..(583): n is a, c, g, or t
  misc_feature (591)..(591): n is a, c, g, or t
  misc_feature (615)..(615): n is a, c, g, or t
  misc_feature (624)..(624): n is a, c, g, or t
  misc_feature (662)..(662): n is a, c, g, or t
  misc_feature (669)..(669): n is a, c, g, or t
  misc_feature (675)..(675): n is a, c, g, or t
  misc_feature (683)..(683): n is a, c, g, or t
  misc_feature (701)..(701): n is a, c, g, or t
  misc_feature (743)..(743): n is a, c, g, or t
  misc_feature (750)..(750): n is a, c, g, or t
  misc_feature (762)..(762): n is a, c, g, or t
  misc_feature (792)..(792): n is a, c, g, or t
  misc_feature (821)..(821): n is a, c, g, or t
  misc_feature (869)..(869): n is a, c, g, or t
  misc_feature (872)..(872): n is a, c, g, or t
  misc_feature (958)..(958): n is a, c, g, or t
  misc_feature (964)..(964): n is a, c, g, or t
  misc_feature (968)..(968): n is a, c, g, or t
cttaacatgtgccttttacaggacaagcctcagcccccacctgagggtcgcctccctgatgctaccaagggtaccattctaaccctcacaacatttttctaactatagaaaaggcgtattcactatggaacaaatatttataattaatactgttgtgaaacaattgtaaatggaaatcatgctttgattgcttacttatttccaatatccgtttgctcactatagaaggcttcttccttaaactacgcagttgaaccatattctgtttcacacatatatgaagtattaattatgtagtacatgtatacaatttgcgcagtccagtctatgctagttttcccctttagcaattgtgacatggtgtgtatgtgcatgaaagtaccttttactttcactaatgatttccattccttaccgttcacccaggttctgaccacctaaggcaagtcttcggcaagcagatgggcttgagtgatcaggatattgttgccctctctggtggccncnccctgggaaggtgccncaagganaggtntggttttgagggaccctggacaaggnaccctttgaagtttgaccnctnttacttcncggagcttttgagtggtgacaaanaggggcttnttcagcttccaagtgacaaaaccctgctgactgacccngtctttngccctnttgtgganaaatatgctgcggacganaaggctttctttgaggactacaaggaggcacacctcaggctntccgaantggggtacgctnaagcataaaaggcgtgtctactactgctgntactatgtgcgatcagagtgatcttgttntgcgtctagactaggggtcagtatggaccagcagactgctaagtaatnttntccgtaataatgtccgttggcttgaggccataccttgtacgctgtcagtggtttggtgtgccgttgcactcggttgccttatgccncagatntatngtatgaaatgcagtagtgactttgaatggtg

SEQ ID NO: 25309 - protein, 102 aa, Triticum aestivum
  misc_feature (15)..(16): Xaa can be any naturally occurring amino acid
  misc_feature (21)..(21): Xaa can be any naturally occurring amino acid
  misc_feature (23)..(23): Xaa can be any naturally occurring amino acid
  misc_feature (25)..(25): Xaa can be any naturally occurring amino acid
  misc_feature (34)..(34): Xaa can be any naturally occurring amino acid
  misc_feature (40)..(41): Xaa can be any naturally occurring amino acid
  misc_feature (44)..(44): Xaa can be any naturally occurring amino acid
  misc_feature (52)..(52): Xaa can be any naturally occurring amino acid
  misc_feature (55)..(55): Xaa can be any naturally occurring amino acid
  misc_feature (67)..(67): Xaa can be any naturally occurring amino acid
  misc_feature (70)..(70): Xaa can be any naturally occurring amino acid
  misc_feature (72)..(72): Xaa can be any naturally occurring amino acid
  misc_feature (74)..(74): Xaa can be any naturally occurring amino acid
  misc_feature (80)..(80): Xaa can be any naturally occurring amino acid
  misc_feature (94)..(94): Xaa can be any naturally occurring amino acid
  misc_feature (97)..(97): Xaa can be any naturally occurring amino acid
  misc_feature (101)..(101): Xaa can be any naturally occurring amino acid
MGLSDQDIVALSGGXXLGRCXKXRXGFEGPWTRXPLKFDXXYFXELLSGDKXGLXQLPSDKTLLTDXVFXPXVXKYAADXKAFFEDYKEAHLRXSEXGYAXA

SEQ ID NO: 25310 - DNA, 1159 bp, Triticum aestivum
  misc_feature (698)..(698): n is a, c, g, or t
aaaaagtttgacgccgctcgaatttctcgaatggataacgacgcaatgaatgactgacacgtggatatcccatgcagtatttctcggccaagcctcttctcgcgagtttgagcaaacgcgtgctgagagcggctctcaagacctcggatgagcagctggacaggctgctgttcggcaggcgccaaggccaggaggaggaggagtccatctccatcgtccgcgcgtccgaggagcagctccgcgagctgcgtcgcgaggcgtccgagggcgggcagggccaccactggcctctccccccgttccgcggcgactcgcgcgacacctacaacctcctggagcagcgccccaagatcgccaaccgccacggccgcctctacgaggccgacgcccgcagcttccacgccctcgcccaacacgacgtccgcgtcgccgtcgccaacatcacgccgggatctatgaccgcgccgtacctgaacacgcagtcgttcaagctcgccgtcgtgctggaaggcgagggcgaggtgcagatcgtgtgcccgcaccttgcccgcgacagcgagcgccacaagcaaggcaagcagggcaggtggagcgaggaagaggacgacgcccagcggcagcaacgccgacgcgggtccggctccgagtccgagtcgtcggaggaggagcaggatcagcagaggtacgagacagtccgncgcgcgggtgtcgcgcggctcggcgttcgtggtgccgcccggccaccccggtggtggagatcgcgtcgtcccgcggcagcagcaaccctccaggtggtggtgcttcgagatcaacgccgagcggaacgagagggtgtggctcgccgggaggaacaacgtgatcggcaagctggacaaccccgcccaggagctcacgttcggcaggcccgccagggaggtgcaggaggtgttccgcgccaaggatcagcaggacgagggcttcgtcgccggtcccgagcagcaggagcaggagcgcggggaccgccgccgtggtgaccgcgggcgcggcgacgaagccgtggaggcgttcctgaggatggcgaccgccgcgctctgaaaggccactgttgagtgagtgcgtgagctggagcccgtgccgtttgagagctggacttgtatgtgtgtcttgtaagttcgtcagt

SEQ ID NO: 25311 - protein, 313 aa, Triticum aestivum
  misc_feature (209)..(209): Xaa can be any naturally occurring amino acid
MQYFSAKPLLASLSKRVLRAALKTSDEQLDRLLFGRRQGQEEEESISIVRASEEQLRELRREASEGGQGHHWPLPPFRGDSRDTYNLLEQRPKIANRHGRLYEADARSFHALAQHDVRVAVANITPGSMTAPYLNTQSFKLAVVLEGEGEVQIVCPHLARDSERHKQGKQGRWSEEEDDAQRQQRRRGSGSESESSEEEQDQQRYETVXRAGVARLGVRGAARPPRWWRSRRPAAAATLQVVVLRDQRRAEREGVARREEQRDRQAGQPRPGAHVRQARQGGAGGVPRQGSAGRGLRRRSRAAGAGARGPPPW

SEQ ID NO: 25312 - protein, 185 aa, Triticum aestivum
  misc_feature (81)..(81): Xaa can be any naturally occurring amino acid
MTAPYLNTQSFKLAVVLEGEGEVQIVCPHLARDSERHKQGKQGRWSEEEDDAQRQQRRRGSGSESESSEEEQDQQRYETVXRAGVARLGVRGAARPPRWWRSRRPAAAATLQVVVLRDQRRAEREGVARREEQRDRQAGQPRPGAHVRQARQGGAGGVPRQGSAGRGLRRRSRAAGAGARGPPPW

SEQ ID NO: 25313 - DNA, 575 bp, Triticum aestivum
ccattctctgcctggcactgttggtgctggttatgggatggcatctccagcgagcctggcttcaatgcctgggcctgtacctggtggtccagggatgaatcctgcactgggccaggctttaacagctttcttggccacccaagggggagggttgggtctgaataacatccttggagttggtcctaatagttcaggggtgccaaattcagggtcttctggagctcttggtggtggcggtgtacctggaatgcctggcagttatatgggaggctatgggggtggtggcgggtatggtggtccaccgggaggtccaggaagaaattacatgggtcattagatgattctacgtgttcctgcgccgcacttataaacatgctgttttaggctgcttctcgcaagttgcttactctagcggtcaaagttttcataagaactttgatttcctcaatcctatgttttcaaaattgaacaaatctatgtacaattatttaaattttcgaaaagttactattgtcttgtgaccctattgtaaaagactttctatcgatttaaagcaccgtggaatttttactgcc

SEQ ID NO: 25314 - protein, 111 aa, Triticum aestivum
HSLPGTVGAGYGMASPASLASMPGPVPGGPGMNPALGQALTAFLATQGGGLGLNNILGVGPNSSGVPNSGSSGALGGGGVPGMPGSYMGGYGGGGGYGGPPGGPGRNYMGH

SEQ ID NO: 25315 - protein, 99 aa, Triticum aestivum
MASPASLASMPGPVPGGPGMNPALGQALTAFLATQGGGLGLNNILGVGPNSSGVPNSGSSGALGGGGVPGMPGSYMGGYGGGGGYGGPPGGPGRNYMGH

SEQ ID NO: 25316 - protein, 90 aa, Triticum aestivum
MPGPVPGGPGMNPALGQALTAFLATQGGGLGLNNILGVGPNSSGVPNSGSSGALGGGGVPGMPGSYMGGYGGGGGYGGPPGGPGRNYMGH

SEQ ID NO: 25317 - DNA, 576 bp, Triticum aestivum
gccatgtcactgaatatgggtatgcttgcgtcctatgatcaaagtgttgagctgttcagagacaaattgggtgccggggaatatcagactgttattggagccagtgccatttctggattctgtgcggctgcttgcagtctgccctttgattacgtgaaaacacaaattcagaagatgcaacctgatgccactggcaagtacccatacactgggtctttggactgcgccatgcaaaccttgaagaccggtggcccatttaagttctactccggcttccctgtatattgtgtcaggatcgccccgcatgtcatgatgacgtggctcttcttgaatcaaatccagaagtaccagaagaagatcggcatataagatctccagttggagacaagagtaccaatccttgttcgacacatttaataactttccagcagctttgcactcccgtggttgtttttggtagacagagttttaagcaatttttaccgtagcttacatttgctgtggtactcttgacgttgttacaataatcacataatcacattatttgttgtatttggggcaatttttttggcgggc

SEQ ID NO: 25318 - protein, 122 aa, Triticum aestivum
AMSLNMGMLASYDQSVELFRDKLGAGEYQTVIGASAISGFCAAACSLPFDYVKTQIQKMQPDATGKYPYTGSLDCAMQTLKTGGPFKFYSGFPVYCVRIAPHVMMTWLFLNQIQKYQKKIGI

SEQ ID NO: 25319 - protein, 121 aa, Triticum aestivum
MSLNMGMLASYDQSVELFRDKLGAGEYQTVIGASAISGFCAAACSLPFDYVKTQIQKMQPDATGKYPYTGSLDCAMQTLKTGGPFKFYSGFPVYCVRIAPHVMMTWLFLNQIQKYQKKIGI

SEQ ID NO: 25320 - protein, 117 aa, Triticum aestivum
MGMLASYDQSVELFRDKLGAGEYQTVIGASAISGFCAAACSLPFDYVKTQIQKMQPDATGKYPYTGSLDCAMQTLKTGGPFKFYSGFPVYCVRIAPHVMMTWLFLNQIQKYQKKIGI

SEQ ID NO: 25321 - DNA, 680 bp, Triticum aestivum
atcccatcagaaaaatctccgcgactcctcccatttcctatcactccggcgagcgagcggcagccatggtgattgctccagtcgcgacctactcctcctcccgagcgccaccgccggcgaggagtacggcgtaccgagcgcgcctcgccgccgcctggctctcctcgagggcgtcctccttcgcctcgggcagcgggctcgccgtggcggcggcttccgtggcggtggccgcgcggcccaggcggacgggcgcggggggcggcgcgctcgggtgcaagtgcctgttcgggctcggcgtgccggagatggtcgtcatcgccggcgtcgccgcgctgctgttcgggcccaagcagctccccgagatcggccgcagcgtcggcaagaccgtcaagagcttccagcaggcagccaaggaatttgaaacagaactgaagaaagaacccgaggaaggcggcgaccagcctccacccacaacccccacggcggtcagcagcagcgacgatgaagagaaaagggagctagaggcatcgagtaggaaagagagcacatgaggaccgggccaacgatcgtgaactagaagagtaaagttgtgtatgtaaaaacaccgtgatgttctagcacattgctccctgtttttgttgttcttgcaggccatgcagcagtattatttgtaaccggcc

SEQ ID NO: 25322 - protein, 182 aa, Triticum aestivum
PIRKISATPPISYHSGERAAAMVIAPVATYSSSRAPPPARSTAYRARLAAAWLSSRASSFASGSGLAVAAASVAVAARPRRTGAGGGALGCKCLFGLGVPEMVVIAGVAALLFGPKQLPEIGRSVGKTVKSFQQAAKEFETELKKEPEEGGDQPPPTTPTAVSSSDDEEKRELEASSRKEST

SEQ ID NO: 25323 - protein, 161 aa, Triticum aestivum
MVIAPVATYSSSRAPPPARSTAYRARLAAAWLSSRASSFASGSGLAVAAASVAVAARPRRTGAGGGALGCKCLFGLGVPEMVVIAGVAALLFGPKQLPEIGRSVGKTVKSFQQAAKEFETELKKEPEEGGDQPPPTTPTAVSSSDDEEKRELEASSRKEST

SEQ ID NO: 25324 - protein, 139 aa, Triticum aestivum
SHQKNLRDSSHFLSLRRASGSHGDCSSRDLLLLPSATAGEEYGVPSAPRRRLALLEGVLLRLGQRARRGGGFRGGGRAAQADGRGGRRARVQVPVRARRAGDGRHRRRRRAAVRAQAAPRDRPQRRQDRQELPAGSQGI

SEQ ID NO: 25325 - DNA, 716 bp, Triticum aestivum
ctgaccttgtatcagagaacaaggaaaacgagaagccagctgaatctgaagaagtccccgtggagtttgagatgtctgcccctgtattagaagagcacaaggaagatgagaaggcagctgaatatgaagtagctcccgtggagggtgagaaaagtgaaaacggtatggcagtcgaatccacagtgccacctccagcatcttcagaggaaaagaaagtagaggcagatagcaccatcaatccggcgacccctcctccagtggaggtgaaggcagatgctccagcggcagaggcagcaaaagccacggagaatccagcagacaacaccgtccccaaagaacaatccgccgtgaacgtcgacaacaatggacagattcatccaggtgtttctcccgtgaggtgcatctgaaggtaggttccgtggacgacaggcgaggcgaggcgaaacggggaacaaacctggtctctgtttgctttgagaactgtaagcgtgtttaacctgacagcgcctgtaattgtaggccctttccgcatacttcacagcttgttgtcttatgaggtgctgcagggcagcaggctggcttgtgccgcctcggtcattattatcatttgtaacttgttagagtgcacattaatctcaggaggacatagacataatacttatgctgctgttgttgtaacctgacgacctttatgcctttgccttgtgttgttattc

SEQ ID NO: 25326 - protein, 134 aa, Triticum aestivum
DLVSENKENEKPAESEEVPVEFEMSAPVLEEHKEDEKAAEYEVAPVEGEKSENGMAVESTVPPPASSEEKKVEADSTINPATPPPVEVKADAPAAEAAKATENPADNTVPKEQSAVNVDNNGQIHPGVSPVRCI

SEQ ID NO: 25327 - protein, 111 aa, Triticum aestivum
MSAPVLEEHKEDEKAAEYEVAPVEGEKSENGMAVESTVPPPASSEEKKVEADSTINPATPPPVEVKADAPAAEAAKATENPADNTVPKEQSAVNVDNNGQIHPGVSPVRCI

SEQ ID NO: 25328 - protein, 80 aa, Triticum aestivum
MAVESTVPPPASSEEKKVEADSTINPATPPPVEVKADAPAAEAAKATENPADNTVPKEQSAVNVDNNGQIHPGVSPVRCI

SEQ ID NO: 25329 - DNA, 521 bp, Triticum aestivum
gaaatttcgcaatccccttccttccttccttcctcccactcctggactgacgcagcgagggggagaggtgagggcgagtcgtcgtcggagcagatcgaccggggaggcttcccggcgatggggaacgcgtcgtcgatgctgacgcagtacgacatcgaggaggtgcaggagcactgcagctacctattctcgcagcaggagatcgtgtcgctgtacgagcgattctgccagctcgaccgcagtgccaagggcttcgtcgccgaggacgagttcctctccatcccagagtactccaccaacccgctctcccagaggttgctacgtatggttgatggattgaacttcaaggaatttgtttcttttctctctaccttcagcgcaagggccagccttcagcaaaagattgagtttatatttaaggtgtatgacattgatggcaaggggaaagtaagcttcaaggacctggtagaggttttacgggacctaacgggctcgtccatgtcagagcaacaaagagagca

SEQ ID NO: 25330 - protein, 173 aa, Triticum aestivum
EISQSPSFLPSSHSWTDAARGRGEGESSSEQIDRGGFPAMGNASSMLTQYDIEEVQEHCSYLFSQQEIVSLYERFCQLDRSAKGFVAEDEFLSIPEYSTNPLSQRLLRMVDGLNFKEFVSFLSTFSARASLQQKIEFIFKVYDIDGKGKVSFKDLVEVLRDLTGSSMSEQQRE

SEQ ID NO: 25331 - protein, 134 aa, Triticum aestivum
MGNASSMLTQYDIEEVQEHCSYLFSQQEIVSLYERFCQLDRSAKGFVAEDEFLSIPEYSTNPLSQRLLRMVDGLNFKEFVSFLSTFSARASLQQKIEFIFKVYDIDGKGKVSFKDLVEVLRDLTGSSMSEQQRE

SEQ ID NO: 25332 - protein, 128 aa, Triticum aestivum
MLTQYDIEEVQEHCSYLFSQQEIVSLYERFCQLDRSAKGFVAEDEFLSIPEYSTNPLSQRLLRMVDGLNFKEFVSFLSTFSARASLQQKIEFIFKVYDIDGKGKVSFKDLVEVLRDLTGSSMSEQQRE

SEQ ID NO: 25333 - DNA, 668 bp, Triticum aestivum
  misc_feature (590)..(590): n is a, c, g, or t
  misc_feature (611)..(611): n is a, c, g, or t
  misc_feature (652)..(652): n is a, c, g, or t
ttgtggcatcctgattgcaatacaaacagtatttacataactagcaaccaagacctcattatctcttactgcaaagctgaaccggatgatccatcttcagaggacaatgcctgttctattaacatcagcgagatattgaccgggaaatgtatggccaagataaaggcagggaacctgtgcaaacagaagtcgtcgaagttcctgtgtacgcctctggaggccctcggcgacatcacatctctgtactacgacgaagagcgcgaggagatcatcaccggcaaccatcaaggcctcatccatgtgtggtcaaattaacagcttggtccagtgcaggcaggttacatcaggcaccaggggatcctcgttagtatatttagcttgtagtggcacccgtttagtgggcagcctgacctagccgtgggtatcttttgccgcatcggccttcatgttgggaatgtttgtgtatagtactgtagttcatccatcgccagcctcctagctatttatcagctgccgagttgacatttgtcatgtgttttttgggggatccgtgtagctttaggagatgcttatcataggggtcatcgaanagggaaggtttcgggtgtatngcatgtaagcattattgacctttaagctatttatccgattntgattttggagtgccg

SEQ ID NO: 25334 - protein, 104 aa, Triticum aestivum
LWHPDCNTNSIYITSNQDLIISYCKAEPDDPSSEDNACSINISEILTGKCMAKIKAGNLCKQKSSKFLCTPLEALGDITSLYYDEEREEIITGNHQGLIHVWSN

SEQ ID NO: 25335 - protein, 73 aa, Triticum aestivum
MYGQDKGREPVQTEVVEVPVYASGGPRRHHISVLRRRARGDHHRQPSRPHPCVVKLTAWSSAGRLHQAPGDPR

SEQ ID NO: 25336 - protein, 54 aa, Triticum aestivum
MAKIKAGNLCKQKSSKFLCTPLEALGDITSLYYDEEREEIITGNHQGLIHVWSN

SEQ ID NO: 25337 - DNA, 720 bp, Triticum aestivum
  misc_feature (661)..(661): n is a, c, g, or t
  misc_feature (716)..(716): n is a, c, g, or t
aatcgataaccaaatagagttctacaagcgagagggcttaacccattattcatcagctaagcttcctattacaagcgatgtccctgagggctgtgtaataataagagagcacatacccatcaccaatctcttcacatgcctttggtttaatgaagttgaccgcttcacctcaagagatcagataagcttcagcacagtgagggataaaataaggtcaagagttaattggactgcagacatgttcctggattgtgaaaggcgtgattttgttgttcaggcataccacagagaactcatggagcaaaggctggctgccttacggagccagcctccgccgcctccacctccacctccaccgccccctcccgtggtgcgtgtgcagcaacctcgaaagatgctcccagacagcgcaccaaaggaacctgggagagcttccaagaagccagcagggaggcgctcacggagatcaggctcgaaacggtcccatcgaacgaaagcctccagcgtgaaggaacccattcgactgtaaatctgtccaggcgaaattttgctcccatacaactgaagatcgactcggtttggtttactcctatttaacttgtattcatgttcccctcccaaaggctcggaaattttgtcaggacttgttgatagaggatcncaacaattttttggggtgtaaataaacatttttaaaataaagatgggttcagttntttc

SEQ ID NO: 25338 - protein, 175 aa, Triticum aestivum
IDNQIEFYKREGLTHYSSAKLPITSDVPEGCVIIREHIPITNLFTCLWFNEVDRFTSRDQISFSTVRDKIRSRVNWTADMFLDCERRDFVVQAYHRELMEQRLAALRSQPPPPPPPPPPPPPVVRVQQPRKMLPDSAPKEPGRASKKPAGRRSRRSGSKRSHRTKASSVKEPIRL

SEQ ID NO: 25339 - protein, 96 aa, Triticum aestivum
MFLDCERRDFVVQAYHRELMEQRLAALRSQPPPPPPPPPPPPPVVRVQQPRKMLPDSAPKEPGRASKKPAGRRSRRSGSKRSHRTKASSVKEPIRL

SEQ ID NO: 25340 - DNA, 593 bp, Triticum aestivum
  misc_feature (547)..(547): n is a, c, g, or t
ccacaccggcccagaggactctgcaaaggaatggcgagcccaatggtggcgactccaatccgcctcagcagcctcagatacgcccctccttccccagcacccagaggacgattcgtggcggcgagggtgaaggcggaggcggaggcgatggcgacggagaagctcggcgtcagggtggagcgcaacccggccgagtcccgcctctccgagctcggcgtccgccagtggcccaagtgggggtgcgagaagagcaagttcccgtggacctactcggccaaggagacgtgctacctgctgcaggggaaggtgaaggtgtacccggacggcgaggaggggttcgtggagatcgcggcgggggacctggtggtgttccccaaggggatgagctgcacctgggacgtcgccgaggccgtcgacaagcactacaagttcgagtagcctgcacctacaccgctgcacggccggccgctgtgctgcctgctgccgctactagcactagactgaggtatttgtagccggattatgttgtgctcgagtggatctcttntcttgtggtggaataaaaacgccagattagtggattgtgcttgtcc

SEQ ID NO: 25341 - protein, 170 aa, Triticum aestivum
TPAQRTLQRNGEPNGGDSNPPQQPQIRPSFPSTQRTIRGGEGEGGGGGDGDGEARRQGGAQPGRVPPLRARRPPVAQVGVREEQVPVDLLGQGDVLPAAGEGEGVPGRRGGVRGDRGGGPGGVPQGDELHLGRRRGRRQALQVRVACTYTAARPAAVLPAAATSTRLRYL

SEQ ID NO: 25342 - protein, 145 aa, Triticum aestivum
PHRPRGLCKGMASPMVATPIRLSSLRYAPPSPAPRGRFVAARVKAEAEAMATEKLGVRVERNPAESRLSELGVRQWPKWGCEKSKFPWTYSAKETCYLLQGKVKVYPDGEEGFVEIAAGDLVVFPKGMSCTWDVAEAVDKHYKFE

SEQ ID NO: 25343 - protein, 135 aa, Triticum aestivum
MASPMVATPIRLSSLRYAPPSPAPRGRFVAARVKAEAEAMATEKLGVRVERNPAESRLSELGVRQWPKWGCEKSKFPWTYSAKETCYLLQGKVKVYPDGEEGFVEIAAGDLVVFPKGMSCTWDVAEAVDKHYKFE

SEQ ID NO: 25344 - DNA, 620 bp, Triticum aestivum
  misc_feature (76)..(76): n is a, c, g, or t
tagagcggagcctgtcatcggctgttctgccctcgtctgagggtgcaaacagcggcgccgtgacaaccccttcatnttcagcattggcggtgagagcagcagcccctggcatctccacaggggagcagcgggatgattcagaaaggccggcggcgagagctactaggaccaggagcgtggcagacatggtgcggaagatgccagtggtgtacaccagcgggctccccaacggcgagaggatcgacggcttcctgtaccagtacagcagagctgaggaggtgaggattgtgtgtgtgtgccatggtagcttcctgactccggcggagtttgtggcgcatgctggaggcggcgaagtcgcccacccgatgaggcacatcgtcgtgaaccccccgtcgtcttcgctctagaccggcgcgcgcatgcatgcaggtggtgcaagtgctccgcgtgtggcttcagcagccctaagcttagcttggaactagaaatctcatcgtgagactgcattttatgttttacagactgcacatcacagtacttacttattatcctaaactgaagacatggtgggagatttgctcctacagacaactaaatagcaaacatatgacagattgaac

SEQ ID NO: 25345 - protein, 134 aa, Triticum aestivum
  misc_feature (25)..(25): Xaa can be any naturally occurring amino acid
ERSLSSAVLPSSEGANSGAVTTPSXSALAVRAAAPGISTGEQRDDSERPAARATRTRSVADMVRKMPVVYTSGLPNGERIDGFLYQYSRAEEVRIVCVCHGSFLTPAEFVAHAGGGEVAHPMRHIVVNPPSSSL

SEQ ID NO: 25346 - protein, 73 aa, Triticum aestivum
MVRKMPVVYTSGLPNGERIDGFLYQYSRAEEVRIVCVCHGSFLTPAEFVAHAGGGEVAHPMRHIVVNPPSSSL

SEQ ID NO: 25347 - protein, 69 aa, Triticum aestivum
MPVVYTSGLPNGERIDGFLYQYSRAEEVRIVCVCHGSFLTPAEFVAHAGGGEVAHPMRHIVVNPPSSSL

SEQ ID NO: 25348 - DNA, 660 bp, Triticum aestivum
  misc_feature (584)..(584): n is a, c, g, or t
  misc_feature (623)..(623): n is a, c, g, or t
  misc_feature (650)..(650): n is a, c, g, or t
  misc_feature (657)..(657): n is a, c, g, or t
acacactcccgccttctcaaatcccccatcgcgccaaatctctccgcacctcctccaaccagagccagtcgccatggacgcctctgccaccggcgccgtctccaaggcgaagaagtacgtggtggggcgcaagctcggcggcggccccaggaagaaggcggtggcgcggtccgtcaaggccgggctgcagttccccgtcggccgcatcggccgcttcctcaagaagggccgctacgcgcagcgcgtcggcatgggcgcccccgtctacctcgcctccgtcctggagtacctcgccgccgagcttctggagctcgcagggaacgccgccaaggacaacaagaagtcccgcatcatcccgcgccacctgctgctcgccatccggaacgaccaagagctcggcaagctgctcgccggcgtcaccatcgcgcatggcggcgtgctgcccaacatcaaccccgtgctgctccccaagaagacggccgagaaggaccccaagtcgcccaagaaggcccccaagtcccccaagtcccccaagaaggcttagtcgattactgtccagtgcttcgtagtagaattagtgttcnctgtttgggtaatggtgtcgatgtagtaatgttctgttntgctttaagaaaaatgtcagaaatctntctgacntac

SEQ ID NO: 25349 - protein, 220 aa, Triticum aestivum
  misc_feature (195)..(195): Xaa can be any naturally occurring amino acid
  misc_feature (208)..(208): Xaa can be any naturally occurring amino acid
  misc_feature (217)..(217): Xaa can be any naturally occurring amino acid
  misc_feature (219)..(219): Xaa can be any naturally occurring amino acid
THSRLLKSPIAPNLSAPPPTRASRHGRLCHRRRLQGEEVRGGAQARRRPQEEGGGAVRQGRAAVPRRPHRPLPQEGPLRAARRHGRPRLPRLRPGVPRRRASGARRERRQGQQEVPHHPAPPAARHPERPRARQAARRRHHRAWRRAAQHQPRAAPQEDGREGPQVAQEGPQVPQVPQEGLVDYCPVLRSRISVXCLGNGVDVVMFCXALRKMSEIXLXY

SEQ ID NO: 25350 - protein, 188 aa, Triticum aestivum
TLPPSQIPHRAKSLRTSSNQSQSPWTPLPPAPSPRRRSTWWGASSAAAPGRRRWRGPSRPGCSSPSAASAASSRRAATRSASAWAPPSTSPPSWSTSPPSFWSSQGTPPRTTRSPASSRATCCSPSGTTKSSASCSPASPSRMAACCPTSTPCCSPRRRPRRTPSRPRRPPSPPSPPRRLSRLLSSAS

SEQ ID NO: 25351 - protein, 180 aa, Triticum aestivum
HTPAFSNPPSRQISPHLLQPEPVAMDASATGAVSKAKKYVVGRKLGGGPRKKAVARSVKAGLQFPVGRIGRFLKKGRYAQRVGMGAPVYLASVLEYLAAELLELAGNAAKDNKKSRIIPRHLLLAIRNDQELGKLLAGVTIAHGGVLPNINPVLLPKKTAEKDPKSPKKAPKSPKSPKKA

SEQ ID NO: 25352 - protein, 156 aa, Triticum aestivum
MDASATGAVSKAKKYVVGRKLGGGPRKKAVARSVKAGLQFPVGRIGRFLKKGRYAQRVGMGAPVYLASVLEYLAAELLELAGNAAKDNKKSRIIPRHLLLAIRNDQELGKLLAGVTIAHGGVLPNINPVLLPKKTAEKDPKSPKKAPKSPKSPKKA

SEQ ID NO: 25353 - DNA, 902 bp, Triticum aestivum
aaacctgagacgcgcaaacgccaacctcctccccctccggcccccctcgcgccccagccgccgccgccgtcgccgccgccgactgcagccatgtcgctgatcgcgggtgaggagttccagcacatcctgcgtgtgctcaacaccaacgtcgacggtaagcagaagatcatgttcgcgctcacctccatcaagggtgtgggccgccgcttctccaacatcgtctgcaagaaggccgacgtcgacatgaacaagagggccggagagctttccgcggaggagatggaccgtctgatggcggtggtgcacaacccgcgccagttcaaggtgcccgactggttcctcaacaggaagaaggactacaaggacggcaggttctcccaggtcgtctccaacgccgttgacatgaagctcagggatgaccttgagaggctcaagaagatcaggaaccatcgtggtctgcgtcactactggggcgtgcgtgtccgtggtcagcacaccaagactaccggtaggagaggaaagactgttggtgtctccaagaagcgataagctgcttcacaaagatgctgcatatagctttgcgaaaacgccgaacggcggacgagcactctgtggaccatgtcagcgccgtccgttttctatattgatcagatccctcccggtatttacgggcgctgtcccctgtagatgctcacccacgcttgtatcccggctgccagcgctagctttacctgtcatttaagaacagggcgttagtccagtgtgctgtacagattatgatactagcaacagtcttttacggtcactaaaccaatagtaatcacatgcagatggattttaattagtttattattcggcccgtttcttttgtaaatcgcattatcataagtatttttacggcc

SEQ ID NO: 25354 - protein, 182 aa, Triticum aestivum
KPETRKRQPPPPPAPLAPQPPPPSPPPTAAMSLIAGEEFQHILRVLNTNVDGKQKIMFALTSIKGVGRRFSNIVCKKADVDMNKRAGELSAEEMDRLMAVVHNPRQFKVPDWFLNRKKDYKDGRFSQVVSNAVDMKLRDDLERLKKIRNHRGLRHYWGVRVRGQHTKTTGRRGKTVGVSKKR

SEQ ID NO: 25355 - protein, 152 aa, Triticum aestivum
MSLIAGEEFQHILRVLNTNVDGKQKIMFALTSIKGVGRRFSNIVCKKADVDMNKRAGELSAEEMDRLMAVVHNPRQFKVPDWFLNRKKDYKDGRFSQVVSNAVDMKLRDDLERLKKIRNHRGLRHYWGVRVRGQHTKTTGRRGKTVGVSKKR

SEQ ID NO: 25356 - protein, 126 aa, Triticum aestivum
MFALTSIKGVGRRFSNIVCKKADVDMNKRAGELSAEEMDRLMAVVHNPRQFKVPDWFLNRKKDYKDGRFSQVVSNAVDMKLRDDLERLKKIRNHRGLRHYWGVRVRGQHTKTTGRRGKTVGVSKKR

SEQ ID NO: 25357 - DNA, 813 bp, Triticum aestivum
acatcccaccccccacagccatccgttcacagagtaaccacagccacaccgcaacttcaccttcaccatccatcatcgtcaacgagaagcagcagcacccggccaagagacgagacaacaagtgttgccatggcagcggtggagagcaagagcaggaggttcgcgctggcgtgcggcgtcctcagccagtacgtcaaggcggagcagaagatgtcctccgtcgccgtcgccccgcgcgcgcccccggccaccacgctcagcctcatgcccggcgccgacgtcggccaggagcacgcggccgcggcggccgctgaggaggcgggtcccgccacggccacgccgctcaccatcttctacggcggcagggtggtcgtcttcgaggacttccccgcggacaaggcggccgaggtgatgcgcatggccgcccgccgccggcgtcgagcgcgcggctgtcgtgcccgcccccgccctcctcccggcggacaagacggcgctcgcggacctgcccatcatgcgcaaggcgtcgctgcagaggttcttcgagaagcgcaaggaccgcctcggcgcgcgcgcgccctacgcccgcccggcgccggccgccgcggccatcaaggactcggaggagaagtcggcgtcggcgtcggcgtcgtcctcctcgtggctcgggctggccagcaccgacggcgccttcgccctctgatctgcacggacggacggagcaagacggcttgcccgcttcaagagatcgtttgtagagcacttttaaatgtattctttgcgtaaaaattcgagtagggaaagaaagaaggaagg

SEQ ID NO: 25358 - protein, 260 aa, Triticum aestivum
TSHPPQPSVHRVTTATPQLHLHHPSSSTRSSSTRPRDETTSVAMAAVESKSRRFALACGVLSQYVKAEQKMSSVAVAPRAPPATTLSLMPGADVGQEHAAAAAAEEAGPATATPLTIFYGGRVVVFEDFPADKAAEVMRMAARRRRRARGCRARPRPPPGGQDGARGPAHHAQGVAAEVLREAQGPPRRARALRPPGAGRRGHQGLGGEVGVGVGVVLLVARAGQHRRRLRPLICTDGRSKTACPLQEIVCRALLNVFFA

SEQ ID NO: 25359 - protein, 217 aa, Triticum aestivum
MAAVESKSRRFALACGVLSQYVKAEQKMSSVAVAPRAPPATTLSLMPGADVGQEHAAAAAAEEAGPATATPLTIFYGGRVVVFEDFPADKAAEVMRMAARRRRRARGCRARPRPPPGGQDGARGPAHHAQGVAAEVLREAQGPPRRARALRPPGAGRRGHQGLGGEVGVGVGVVLLVARAGQHRRRLRPLICTDGRSKTACPLQEIVCRALLNVFFA

SEQ ID NO: 25360 - protein, 190 aa, Triticum aestivum
MSSVAVAPRAPPATTLSLMPGADVGQEHAAAAAAEEAGPATATPLTIFYGGRVVVFEDFPADKAAEVMRMAARRRRRARGCRARPRPPPGGQDGARGPAHHAQGVAAEVLREAQGPPRRARALRPPGAGRRGHQGLGGEVGVGVGVVLLVARAGQHRRRLRPLICTDGRSKTACPLQEIVCRALLNVFFA

SEQ ID NO: 25361 - DNA, 685 bp, Triticum aestivum
tgctttttgcagcggagccctatgaagtcattggctttaagataccaagcacagagattgacaaatcaacagacaagtttttctcgtattgggatccggacaagaagtcatacattctgcaactatacttcaagccaagagcaccggagattaacagacaaccagcagctcctggtactgtcccaaatgggacaggaggccctcctggtgctccaccaaggccaccatcccagccacaggctctgccgccacctccaccgaatgcacctatgggaatgccccctaggatcccgccaccaccaatgagcggtcttcaacctccacccccctccgcctccgcttgcaaatggtcctccgcgttcaataccacctccacctccttctggtggtccaatggctaactttactcctggagcacctccgccacgctttccgatgcaaggctaccctggacctcagcagtaggtgatctgagtgtgggcaagagagatcaggctacaaattttgaacacttgctttatccaaaccagtatgtgctacattgttgtctgaaattttactgtataagcagattaaattatttaagtgcgctttcaagcaaagcattttatctgtttgtgtttgtcatctctttgtaacttcgtttttggacgttatccctttggcacacgattgtgtaattgcc

SEQ ID NO: 25362 - protein, 132 aa, Triticum aestivum
LFAAEPYEVIGFKIPSTEIDKSTDKFFSYWDPDKKSYILQLYFKPRAPEINRQPAAPGTVPNGTGGPPGAPPRPPSQPQALPPPPPNAPMGMPPRIPPPPMSGLQPPPPSASACKWSSAFNTTSTSFWWSNG

SEQ ID NO: 25363 - protein, 101 aa, Triticum aestivum
CFLQRSPMKSLALRYQAQRLTNQQTSFSRIGIRTRSHTFCNYTSSQEHRRLTDNQQLLVLSQMGQEALLVLHQGHHPSHRLCRHLHRMHLWECPLGSRHHQ

SEQ ID NO: 25364 - protein, 94 aa, Triticum aestivum
MKSLALRYQAQRLTNQQTSFSRIGIRTRSHTFCNYTSSQEHRRLTDNQQLLVLSQMGQEALLVLHQGHHPSHRLCRHLHRMHLWECPLGSRHHQ

SEQ ID NO: 25365 - DNA, 950 bp, Triticum aestivum
ccatggccttcgagctcgactggcagacggcggcggcggcggcacggagcaccaaggccaagttcgaccagaacttgacgcatcaccagatgccccctccggccctgcaagcctcccacatgcccttcagtcccaggcaccaccaattcatgggcaacggcgatccggggacagcgggaggcccgtcgctgacggtcggcgccggcggcgggggcgggcactggcccctgcctccgcaccaccaataccagccgccgccgcctccgcagcagcagcagcagcagcagcagaggctgcatggctggggcaacgtcgtccccggcacgagctggcagccgccccagccgccgccgcaccaccaggcggggccgccgccgaacaacgctgccgccgccgccgcagcagccgcagcatcatcacgattcccaccctacatcgccacgcaggcgcagagctggctccagaagaacgggttccactcgctggcccgccccacctaggtacccggagaccatccgtcgagagcagccagcgcgcgcgtccatccatccatgatccatccatggcgaaggtcgatcgacaggtgtgtgtgtgttccaccgaaccaggcgaaatcacggaggaacatcaaccattattaccagcagaactgagctgagctgaactgaactgaactgagctgaactgaaacttgatttcttttttcagtttcttgtttttatttcctttgattgattgggcgagcgagatggatttgagaggacggatggcagtcatataaatgcggagttcccaagaagacgagagagattggtcctagctacttactagcttttcactcggaagtttcaactcaagtgtgtgtgtgtgtgtgtgtgtgtatgtggggtggagtatcttttggcgcttttggttcttggccaagagcgatgacttggggtgtccacatc

SEQ ID NO: 25366 - protein, 218 aa, Triticum aestivum
HGLRARLADGGGGGTEHQGQVRPELDASPDAPSGPASLPHALQSQAPPIHGQRRSGDSGRPVADGRRRRRGRALAPASAPPIPAAAASAAAAAAAAEAAWLGQRRPRHELAAAPAAAAPPGGAAAEQRCRRRRSSRSIITIPTLHRHAGAELAPEERVPLAGPPHLGTRRPSVESSQRARPSIHDPSMAKVDRQVCVCSTEPGEITEEHQPLLPAELS

SEQ ID NO: 25367 - protein, 165 aa, Triticum aestivum
MAFELDWQTAAAAARSTKAKFDQNLTHHQMPPPALQASHMPFSPRHHQFMGNGDPGTAGGPSLTVGAGGGGGHWPLPPHHQYQPPPPPQQQQQQQQRLHGWGNVVPGTSWQPPQPPPHHQAGPPPNNAAAAAAAAAASSRFPPYIATQAQSWLQKNGFHSLARPT

SEQ ID NO: 25368 - protein, 136 aa, Triticum aestivum
MPPPALQASHMPFSPRHHQFMGNGDPGTAGGPSLTVGAGGGGGHWPLPPHHQYQPPPPPQQQQQQQQRLHGWGNVVPGTSWQPPQPPPHHQAGPPPNNAAAAAAAAAASSRFPPYIATQAQSWLQKNGFHSLARPT

SEQ ID NO: 25369 - DNA, 407 bp, Triticum aestivum
gaaagggaaacccagacctgtctagaaccgccacctcgccgcgagggaggaaaggaaaaaaaatgctcgcccgcaccctcgtcgcccgcctccgcccccgcctcgccccgtcgctcgtcggcctcggtggccgcgcgtcggcgggcgccgcggccgccaccgacatcgtcgtcgacgaggacgcgccgcggcccctcgggccgcccgtgccggtcggggtcggggccgccgccgccgtcgcggccaccgtgcccaccgtcctgcagccgcgcgtgctcatctacgacggcgtctgccacctctgccaccgcggggtgaagtgggtgttcaggacggacaggcacgccaagatcaggttctgctgcctgcagtccaaggcggcggagccgtacctgcggctggtcggc

SEQ ID NO: 25370 - protein, 135 aa, Triticum aestivum
KGNPDLSRTATSPRGRKGKKMLARTLVARLRPRLAPSLVGLGGRASAGAAAATDIVVDEDAPRPLGPPVPVGVGAAAAVAATVPTVLQPRVLIYDGVCHLCHRGVKWVFRTDRHAKIRFCCLQSKAAEPYLRLVG

SEQ ID NO: 25371 - protein, 115 aa, Triticum aestivum
MLARTLVARLRPRLAPSLVGLGGRASAGAAAATDIVVDEDAPRPLGPPVPVGVGAAAAVAATVPTVLQPRVLIYDGVCHLCHRGVKWVFRTDRHAKIRFCCLQSKAAEPYLRLVG

SEQ ID NO: 25372 - protein, 105 aa, Triticum aestivum
ERETQTCLEPPPRREGGKEKKCSPAPSSPASAPASPRRSSASVAARRRAPRPPPTSSSTRTRRGPSGRPCRSGSGPPPPSRPPCPPSCSRACSSTTASATSATAG

SEQ ID NO: 25373 - DNA, 645 bp, Triticum aestivum
aatggcgatggcgatggccgtgctgctcgtcctcctcctcctggccgggggctccgcggccgcgtcgccgccgccgccgccgtgcagccggtcgtgcgcgacgctcaattgcgactcggtggggatccggtacggcaagttctgcggcgtggggtggagcgggtgcgagggggaggagccctgcgacgacctcgacgcctgctgccgcgaccacgaccactgcgtcgacaagaaaggcctgatgagtatcaaatgccatgagaagttcaaaaactgcatgaggaaagtgaagaaggctggcaaggtcggcttctccaagaaatgcccgtatgaaatggctatggcgacgatgactcagggtatggacatggcgatcatgctcagccagttgggcagccagaagatagagctgtagctttggccttggagaggtacttggcgcattgcttcgttgattgaatattgacttcctttgatgattatactgtaattttacttcaattggtaaaatcacattcttttgggcagccatagagataattttaggttgtggtgctgcttgcagcatatagtatcagatcttctgcctcggcatttttgtaaacaaagttgcaatataattgaatcagaatctcatcattctcc

SEQ ID NO: 25374 - protein, 137 aa, Triticum aestivum
MAMAMAVLLVLLLLAGGSAAASPPPPPCSRSCATLNCDSVGIRYGKFCGVGWSGCEGEEPCDDLDACCRDHDHCVDKKGLMSIKCHEKFKNCMRKVKKAGKVGFSKKCPYEMAMATMTQGMDMAIMLSQLGSQKIEL

SEQ ID NO: 25375 - protein, 135 aa, Triticum aestivum
MAMAVLLVLLLLAGGSAAASPPPPPCSRSCATLNCDSVGIRYGKFCGVGWSGCEGEEPCDDLDACCRDHDHCVDKKGLMSIKCHEKFKNCMRKVKKAGKVGFSKKCPYEMAMATMTQGMDMAIMLSQLGSQKIEL

SEQ ID NO: 25376 - protein, 133 aa, Triticum aestivum
MAVLLVLLLLAGGSAAASPPPPPCSRSCATLNCDSVGIRYGKFCGVGWSGCEGEEPCDDLDACCRDHDHCVDKKGLMSIKCHEKFKNCMRKVKKAGKVGFSKKCPYEMAMATMTQGMDMAIMLSQLGSQKIEL

SEQ ID NO: 25377 - DNA, 586 bp, Triticum aestivum
  misc_feature (57)..(57): n is a, c, g, or t
ggttcatgagatggaaaatggtttccaaatttggtccttcaatgggaagctaatttncaagatttcaaaagatcacttctatcagttccaatggcgcccaaggccaccatcactacttactcctgagaaggaggaggacatctcaaagaacctcaagcggtacagcaagaagtatgaacaagaggatctggatgtgtccaaccaggtgggcgagctagagcgcaagagacggacgcagcttcaagaggaatggcaaggatgggtggccaagtggaagcagctgcacgaggaggagcgatcgtacaggatggaactgagaggcggggaggagagcgacaaggaagaagaggcggagtacaaggagattgaggcggaggagttggttgatgtcacagaagaaattgttgcctttgacctggaccaggagtagtctgctgcacgagtgttcattttctgcctaaatcgctgttgttttgcatgatgcgtgcaagcggataatctgttgatctttctgccagtacacttttcctaaattcacatgtcatgtttatggagaccaaattttgtggtttgaatgttaaccatc

SEQ ID NO: 25378 - protein, 142 aa, Triticum aestivum
  misc_feature (19)..(19): Xaa can be any naturally occurring amino acid
VHEMENGFQIWSFNGKLIXKISKDHFYQFQWRPRPPSLLTPEKEEDISKNLKRYSKKYEQEDLDVSNQVGELERKRRTQLQEEWQGWVAKWKQLHEEERSYRMELRGGEESDKEEEAEYKEIEAEELVDVTEEIVAFDLDQE

SEQ ID NO: 25379 - protein, 139 aa, Triticum aestivum
  misc_feature (16)..(16): Xaa can be any naturally occurring amino acid
MENGFQIWSFNGKLIXKISKDHFYQFQWRPRPPSLLTPEKEEDISKNLKRYSKKYEQEDLDVSNQVGELERKRRTQLQEEWQGWVAKWKQLHEEERSYRMELRGGEESDKEEEAEYKEIEAEELVDVTEEIVAFDLDQE

SEQ ID NO: 25380 - DNA, 610 bp, Triticum aestivum
  misc_feature (63)..(63): n is a, c, g, or t
gcttaaagatggctttgtcgttgccctaaggacaagagataattcgggttttcatgtttcaanagaaagagttgctggtggtggctggtatcttgatgttgtgtcaaatgctacaaagagggatcctgctgctcaattcctaatcacatttaaaaacaaggatacgatgggattgcgatcttttgttgctgggggcaaactattgcagtttaataagaaggcggagctcgtatttgccagtcatgcttttgatgtttgggagagctggacgctggaagggtctttactggagtgctgcaaactggtcaaccacagaaatcctttggctgcattggaggtctatatcgagatcctcgcagcggtgagcgaagaagatggcgtcaccaggtggctcgattgatcaaaataacccatccatctgctttaggagaaccaaagcaactgactcatcagtgttgtattctggctggcctgggggttcactcagttttctttattttcctgccaagtgttaagttttggccattctacctattgcagagaccttgcaaagccactgcgaattgttccatagtttcactgttgtagcctgtacgagtatcaagtgtcg

SEQ ID NO: 25381 - protein, 132 aa, Triticum aestivum
  misc_feature (21)..(21): Xaa can be any naturally occurring amino acid
LKDGFVVALRTRDNSGFHVSXERVAGGGWYLDVVSNATKRDPAAQFLITFKNKDTMGLRSFVAGGKLLQFNKKAELVFASHAFDVWESWTLEGSLLECCKLVNHRNPLAALEVYIEILAAVSEEDGVTRWLD

SEQ ID NO: 25382 - protein, 77 aa, Triticum aestivum
MGLRSFVAGGKLLQFNKKAELVFASHAFDVWESWTLEGSLLECCKLVNHRNPLAALEVYIEILAAVSEEDGVTRWLD

SEQ ID NO: 25383 - DNA, 828 bp, Triticum aestivum
  misc_feature (523)..(523): n is a, c, g, or t
  misc_feature (665)..(665): n is a, c, g, or t
aagcagcatccgtcgccactaattaattgcagctgtagcaccgcccgcctgctccgtgcagcctacaagcaccagcgagaagagtcgaggcgcgcacgtgggtgggtctgcgcgcgccgtccgcctcctccaccaggccgccgtcgccgccgtcgtcgtcctagatccgcagcagtgcgtgccggagggaagcgcgatggccgccggccgtgggctcccgctcctcctcgtcctggccgccctcctggtcgggctcgcctccgcctcccccttcatctccgacggcgtgttccaggccagcgccggatctactacggggaggaccttgctgcaggccaagagggattgtcctgtgaacttcgagttccaaaactacaccgtcatcacaagcaggtgcaaagggccaaaatatcctcctaaagactgctgtgattctttcaaggaatttgcatgcccgtttaataactacatcaatgatgaaagcaatgactgtgcatccacaatgttcagctacatcaacctntatggcaagtacccaccaggcctgtttgcccacgagtgccgagaaggcaagctaggtctttcttgcgaaggcgtcccccagaaagacgttgttgcaagtggtgtccaaagggctcgaagcagctcgcttgctttgattactntcatgtgtggactagtagcattgttcttccagtaggtggtggtgatacctttatttctcccacatttttcaatgatggtgagcctgaatcctctgctgctccttaaggcgctcttgaaatttttcttgttataatattgtgtaattttatgttatgtcagact

SEQ ID NO: 25384 - protein, 167 aa, Triticum aestivum
  misc_feature (109)..(109): Xaa can be any naturally occurring amino acid
  misc_feature (157)..(157): Xaa can be any naturally occurring amino acid
MAAGRGLPLLLVLAALLVGLASASPFISDGVFQASAGSTTGRTLLQAKRDCPVNFEFQNYTVITSRCKGPKYPPKDCCDSFKEFACPFNNYINDESNDCASTMFSYINXYGKYPPGLFAHECREGKLGLSCEGVPQKDVVASGVQRARSSSLALITXMCGLVALFFQ

SEQ ID NO: 25385 - protein, 139 aa, Triticum aestivum
KQHPSPLINCSCSTARLLRAAYKHQREESRRARGWVCARRPPPPPGRRRRRRRPRSAAVRAGGKRDGRRPWAPAPPRPGRPPGRARLRLPLHLRRRVPGQRRIYYGEDLAAGQEGLSCELRVPKLHRHHKQVQRAKISS

SEQ ID NO: 25386 - DNA, 756 bp, Triticum aestivum
aaaacccaatctccgctcgaaagatcaacactgcacctgccttacaatctcccctgctagctctcctttcagtttcgaccgcaatggctgccgcgagaaccattctcctcgccatggccgcgatggccatcctgagcaccacatcggcggcaatctacaacgtcggcgagccaggtggtgcatgggacctcagcaccaactacggcacctgggcgtcctccaggaacttccaccccaacgaccagatcatcttcaaatactctcctcaggctcacgacgtcctcgaggtcagcaaggccgactacgactcctgcagcgccgccagcaccatcgccaccctcaactctgggaatgatgtcgtctccctcactgccaccggcacccgctacttcctctgcggctacccgggccactgtgccgggggaatgaaagtcaagatcgacgtcgtgccaagatcatcctcttcctcgccggccccgtccagcggccccagtgcaagcagtgctcccccgccggcgcctgtcgcagccgccacctctatggaggccacagggtttggcctcaccatcttgcttgccgttgccggtctcatggcttgagtgtgtctctaaaaaagacatagaagtcactattattatcaagcatctgtggtgtacattgtatagtcaagtaattgtatcgtacattgtatgtattcaggcttcacgttttgcatattcattttggaggatgagtaataaagatttttttagtatt

SEQ ID NO: 25387 - protein, 198 aa, Triticum aestivum
NPISARKINTAPALQSPLLALLSVSTAMAAARTILLAMAAMAILSTTSAAIYNVGEPGGAWDLSTNYGTWASSRNFHPNDQIIFKYSPQAHDVLEVSKADYDSCSAASTIATLNSGNDVVSLTATGTRYFLCGYPGHCAGGMKVKIDVVPRSSSSSPAPSSGPSASSAPPPAPVAAATSMEATGFGLTILLAVAGLMA

SEQ ID NO: 25388 - protein, 171 aa, Triticum aestivum
MAAARTILLAMAAMAILSTTSAAIYNVGEPGGAWDLSTNYGTWASSRNFHPNDQIIFKYSPQAHDVLEVSKADYDSCSAASTIATLNSGNDVVSLTATGTRYFLCGYPGHCAGGMKVKIDVVPRSSSSSPAPSSGPSASSAPPPAPVAAATSMEATGFGLTILLAVAGLMA

SEQ ID NO: 25389 - protein, 161 aa, Triticum aestivum
MAAMAILSTTSAAIYNVGEPGGAWDLSTNYGTWASSRNFHPNDQIIFKYSPQAHDVLEVSKADYDSCSAASTIATLNSGNDVVSLTATGTRYFLCGYPGHCAGGMKVKIDVVPRSSSSSPAPSSGPSASSAPPPAPVAAATSMEATGFGLTILLAVAGLMA

SEQ ID NO: 25390 - DNA, 825 bp, Triticum aestivum
tccaaacttgagatgtattcctcagaacattcttgagtaataaagcgtgtgttttagcctcaaaaaaaaaaaaaaaaaaaactgttgcctgctgctgatgctgcttgggttgtgctccgccctgcgctcgcgtgccctcctcctccctctgaccccgccgcctcgtacggccacccttcgccgccggacttggctgcgggccacctcctccttgtcatctccgccgtcgccggagatggaggcgtcggcgtacaagttcgggccctacaggatcgacgcgagggaggtcttccacgccacgcccctctcatacgccatggtcaacctacgccccctcctccctggtcatgtccttgtgtgccccaagcgtgaagtgaaacgctttactgatctaagtactgatgagacaagtgatttatgggtcactgcaaaggaagttggtgtacggcttgagcagtaccacaaagcttcttcgcttacatttgcgattcaggatggtcctcaagctggccaaacagtcccgcacgtccacatccatgtgatccccaggaagaagggagatttcgaaaataatgatgaaatatatgacgcgatagatgtgaaagaaaaagaaatgaaggaaaagcttgatctggatgttgaaagaaaatatagaaccatggaagaaatgagtcatgaggctaacgagtaccgtgctcttttctcctagatgtatttcttacaaaccgttttctaatttttcacttagtgttttcacagaaataaacttctggactgtttgttctgcattgtttttcaagagtagcaatgaatattttattttcc

SEQ ID NO: 25391 - protein, 203 aa, Triticum aestivum
MLLGLCSALRSRALLLPLTPPPRTATLRRRTWLRATSSLSSPPSPEMEASAYKFGPYRIDAREVFHATPLSYAMVNLRPLLPGHVLVCPKREVKRFTDLSTDETSDLWVTAKEVGVRLEQYHKASSLTFAIQDGPQAGQTVPHVHIHVIPRKKGDFENNDEIYDAIDVKEKEMKEKLDLDVERKYRTMEEMSHEANEYRALFS

SEQ ID NO: 25392 - protein, 157 aa, Triticum aestivum
MEASAYKFGPYRIDAREVFHATPLSYAMVNLRPLLPGHVLVCPKREVKRFTDLSTDETSDLWVTAKEVGVRLEQYHKASSLTFAIQDGPQAGQTVPHVHIHVIPRKKGDFENNDEIYDAIDVKEKEMKEKLDLDVERKYRTMEEMSHEANEYRALFS

SEQ ID NO: 25393 - protein, 130 aa, Triticum aestivum
MVNLRPLLPGHVLVCPKREVKRFTDLSTDETSDLWVTAKEVGVRLEQYHKASSLTFAIQDGPQAGQTVPHVHIHVIPRKKGDFENNDEIYDAIDVKEKEMKEKLDLDVERKYRTMEEMSHEANEYRALFS

SEQ ID NO: 25394 - DNA, 978 bp, Triticum aestivum
  misc_feature (532)..(532): n is a, c, g, or t
  misc_feature (697)..(697): n is a, c, g, or t
  misc_feature (770)..(770): n is a, c, g, or t
  misc_feature (957)..(957): n is a, c, g, or t
actgcctccgtctcccctctgctcccaatccatggctgctccgccgcggcgaaaccccaaccacggcggcaagaggaaggacgaggagccgtggctcgcggcgggcatccgcccggccaacttcctcccgggcctggccatcgggttcctcctcggcctcctcctcgacctctcatcctcctggaggccgaggttcagccttccgtctgccccggcgccacggggctccaagcgggcggccgtcggttcgtccaccgccccagcaccaggcgaggagctcaagatggttttagtcgtgcgtcaggatcttaagatgggggctgggaaaatagcgtctcaatgtgcccatgcggcaactggcttgtacgcggatctgttggcaagcaaccgagttcttttgagacaatgggaacagttcggacaagctaagattgttctgacatgcaagaatcaacaggaaatgaacaggataaaggaaactgcagaacaccgaggtatcccaacttatgttgttgcagatgcaggtcgcacncaggtagtggctgggtctaagacagttcttgcagtagggccagggaggaaagcagacatagattcagttaccgggaaattgcgcttactgtgagctgcatctcggacatgaacatccaccatagtcgtcccatcctggaagacgatgtttgttcccgcgcagttnaaggccaggatcccttttgctgtacccattcctcatgcatcgcttgattcttctgacccagctctgcagactntagtgcttggtttaaaatgccaccacctgcgattactttcttttttacctacttgatgatgatgatgatgacgatagtgcaacacagctttgtttttcttttttgtcctttccgcgacaccgaacaagcacttgtaatctcaaactagcttatcttctccccccaagtaaaagtaatggatcgcttncaccgtgtgcgtgtgcccaag

SEQ ID NO: 25395 - protein, 207 aa, Triticum aestivum
  misc_feature (177)..(177): Xaa can be any naturally occurring amino acid
LPPSPLCSQSMAAPPRRNPNHGGKRKDEEPWLAAGIRPANFLPGLAIGFLLGLLLDLSSSWRPRFSLPSAPAPRGSKRAAVGSSTAPAPGEELKMVLVVRQDLKMGAGKIASQCAHAATGLYADLLASNRVLLRQWEQFGQAKIVLTCKNQQEMNRIKETAEHRGIPTYVVADAGRXQVVAGSKTVLAVGPGRKADIDSVTGKLRLL

SEQ ID NO: 25396 - protein, 197 aa, Triticum aestivum
  misc_feature (167)..(167): Xaa can be any naturally occurring amino acid
MAAPPRRNPNHGGKRKDEEPWLAAGIRPANFLPGLAIGFLLGLLLDLSSSWRPRFSLPSAPAPRGSKRAAVGSSTAPAPGEELKMVLVVRQDLKMGAGKIASQCAHAATGLYADLLASNRVLLRQWEQFGQAKIVLTCKNQQEMNRIKETAEHRGIPTYVVADAGRXQVVAGSKTVLAVGPGRKADIDSVTGKLRLL

SEQ ID NO: 25397 - protein, 113 aa, Triticum aestivum
  misc_feature (83)..(83): Xaa can be any naturally occurring amino acid
MVLVVRQDLKMGAGKIASQCAHAATGLYADLLASNRVLLRQWEQFGQAKIVLTCKNQQEMNRIKETAEHRGIPTYVVADAGRXQVVAGSKTVLAVGPGRKADIDSVTGKLRLL

SEQ ID NO: 25398 - DNA, 412 bp, Triticum aestivum
  misc_feature (211)..(211): n is a, c, g, or t
  misc_feature (323)..(323): n is a, c, g, or t
  misc_feature (378)..(378): n is a, c, g, or t
  misc_feature (396)..(397): n is a, c, g, or t
accaaatcccacaagagcaaatcaaacttgtcccccagctcctctcttgccttgtccgatcgacaacagcagccaagcactaactagccgcgcgcagggatggctcgccaaggtatggtcacggcgctgttgctggtggtcctcgccgccggctgctgcgcgtcggcgggcgccgtggcgtacctctccaagctgccggtgaccctcgacntcaccgcctcccccagtcccggccaagttcttcacgccggcgaggacgtgatcacggtgacgtgggccctgaacgcgagccagccggccggcaaggacgccgactacaagancgtgaaggtgagcctctgctacgcgccggtgagccagaaggagcgcgagtggcgnaagacccacgacgacctnnagaaggacaagacct

SEQ ID NO: 25399 - protein, 104 aa, Triticum aestivum
  misc_feature (38)..(38): Xaa can be any naturally occurring amino acid
  misc_feature (75)..(75): Xaa can be any naturally occurring amino acid
  misc_feature (93)..(93): Xaa can be any naturally occurring amino acid
  misc_feature (99)..(100): Xaa can be any naturally occurring amino acid
MARQGMVTALLLVVLAAGCCASAGAVAYLSKLPVTLDXTASPSPGQVLHAGEDVITVTWALNASQPAGKDADYKXVKVSLCYAPVSQKEREWXKTHDDXXKDKT

SEQ ID NO: 25400 - protein, 99 aa, Triticum aestivum
  misc_feature (33)..(33): Xaa can be any naturally occurring amino acid
  misc_feature (70)..(70): Xaa can be any naturally occurring amino acid
  misc_feature (88)..(88): Xaa can be any naturally occurring amino acid
  misc_feature (94)..(95): Xaa can be any naturally occurring amino acid
MVTALLLVVLAAGCCASAGAVAYLSKLPVTLDXTASPSPGQVLHAGEDVITVTWALNASQPAGKDADYKXVKVSLCYAPVSQKEREWXKTHDDXXKDKT

SEQ ID NO: 25401 - protein, 66 aa, Triticum aestivum
PNPTRANQTCPPAPLLPCPIDNSSQALTSRAQGWLAKVWSRRCCWWSSPPAAARRRAPWRTSPSCR

SEQ ID NO: 25402 - DNA, 791 bp, Triticum aestivum
  misc_feature (780)..(780): n is a, c, g, or t
accacacacacacctctggattggctccttggctctagctgcctgctatagagcagtgatctcttagcaccagcaccaccaccagcagcgacggcgagagggcggctgcagttggaccgccggcgagggagctgccatcatcatgcaaggggaccaggcggagaagagggggaaggtgaagaaggggtggctggcggtgcgggtcggccaggcggagcagcagggcgacgggttccggcggttcgtcatccccatcgcctacctctaccacccgctgttccagcggctgctggaggcggctcgggacacgtatggctacaactcgggcggcccgctgtggctgccctgctccgtcgacgaattcctccgcctgcgcgcgctcgtcgaccgggagacggcgcactcgcactcctcctcctcgcaccgcgtgcacgtgcaggccggcggccaccagcagcacggctactccttcgccccgtgcacccgcgccaaggtcacctcctgatccaccgacagaccatcgagccccggcggcccttcgtgcgagcgtgcgcatggcgactgtgggcaccggagctcgcgtgcggggaggagtccatctgtgcaccggagacgattacactacacgtacatagagaggcagagagatacggagatgcttgagaggcagtaggtgattagtctatgatccatattgcctatgatttcggccttgttgttcttctgattcttgcacatgcatgtgtactagattaattaacagaccgatgtataattaanagttgaattcg

SEQ ID NO: 25403 - protein, 120 aa, Triticum aestivum
MQGDQAEKRGKVKKGWLAVRVGQAEQQGDGFRRFVIPIAYLYHPLFQRLLEAARDTYGYNSGGPLWLPCSVDEFLRLRALVDRETAHSHSSSSHRVHVQAGGHQQHGYSFAPCTRAKVTS

SEQ ID NO: 25404 - protein, 107 aa, Triticum aestivum
MATTRAARCGCPAPSTNSSACARSSTGRRRTRTPPPRTACTCRPAATSSTATPSPRAPAPRSPPDPPTDHRAPAALRASVRMATVGTGARVRGGVHLCTGDDYTTRT

SEQ ID NO: 25405 - DNA, 594 bp, Triticum aestivum
  misc_feature (535)..(535): n is a, c, g, or t
ggcccgctttacctccccaacatgaacgtcgccttctgcagcgaccgcccgctttccttcaccgcgccgtcgggccagaccgcctggagctactacaagatcatgatcccgctggccaagctcgccgccgtcgagcccgtcccggccaaggagagcccgccggagaagtacatccacatcgtcaccgtcgactcgcacgacttctggttcatgggcttcgtcagctacgacaaggccgtgccccccctgggcggggccgtctcctcgtcgcagcaccccggcgccgctcccgccgcggcgccggcgccggcccccccctacgagtgattggctgattgccgccgtgttccatgttcgtggctctctgcttttcattgccgtgtgtgtgcgctctgtttttcgggcggatctgtttagtgagtgctctggtgtgtagtggattttcgtgtggttatgtgctgttgtctatacgcttgtgttcttcggagttggacaatgtatttgaaatttgagcatgtttgctagttatccattntatgctgtcaggtttctaacatgacacgtgtgattgataatccaaagttacttatggcg

SEQ ID NO: 25406 - protein, 110 aa, Triticum aestivum
PALPPQHERRLLQRPPAFLHRAVGPDRLELLQDHDPAGQARRRRARPGQGEPAGEVHPHRHRRLARLLVHGLRQLRQGRAPPGRGRLLVAAPRRRSRRGAGAGPPLRVIG

SEQ ID NO: 25407 - protein, 108 aa, Triticum aestivum
GPLYLPNMNVAFCSDRPLSFTAPSGQTAWSYYKIMIPLAKLAAVEPVPAKESPPEKYIHIVTVDSHDFWFMGFVSYDKAVPPLGGAVSSSQHPGAAPAAAPAPAPPYE

SEQ ID NO: 25408 - protein, 101 aa, Triticum aestivum
MNVAFCSDRPLSFTAPSGQTAWSYYKIMIPLAKLAAVEPVPAKESPPEKYIHIVTVDSHDFWFMGFVSYDKAVPPLGGAVSSSQHPGAAPAAAPAPAPPYE

SEQ ID NO: 25409 - DNA, 677 bp, Triticum aestivum
  misc_feature (467)..(467): n is a, c, g, or t
  misc_feature (474)..(474): n is a, c, g, or t
  misc_feature (511)..(511): n is a, c, g, or t
  misc_feature (517)..(517): n is a, c, g, or t
  misc_feature (572)..(572): n is a, c, g, or t
  misc_feature (671)..(671): n is a, c, g, or t
aaaccctcggcgaccttcctcatgcctccagccaaagccaagaaactccggcgggccgcggctgcggccgcccccccagagagctccccggcgccccctccggctgcggcggagacacctcccgcagctgccaccccagagagatccccggcgccccctccggctgtggcggagacccctccggcggccgccaccccagagagatccccggcgccccctccggctgtgcaggagaccactcccgctgccgtcccgccagagacctctccggcgcccgctccggttgtggcggcgacccctcccgagtcgtcggaggctagtgttacggttgcggaggatggtggcgggaaggacaagatggcggtggagatgaggtgattcctggagcggaggaggttgctgctgctgagtagaaaatagaagtcgctattttgctgcttcatatctagaagatgatatatgtgccncctgggngtcgtgaactttgtagtcagttttgatggctgatttnttgagnacttctgtcgacattcctagccagcgttcagttatcttattttgttcgtgttacnttctggatggaggttatgagtttaaaactaaatatttagtttattcctgccgtgtgtgttttatgtttgaatggaacttatgctctgttgttttgttanctgtat

SEQ ID NO: 25410 - protein, 125 aa, Triticum aestivum
KPSATFLMPPAKAKKLRRAAAAAAPPESSPAPPPAAAETPPAAATPERSPAPPPAVAETPPAAATPERSPAPPPAVQETTPAAVPPETSPAPAPVVAATPPESSEASVTVAEDGGGKDKMAVEMR

SEQ ID NO: 25411 - protein, 123 aa, Triticum aestivum
NPRRPSSCLQPKPRNSGGPRLRPPPQRAPRRPLRLRRRHLPQLPPQRDPRRPLRLWRRPLRRPPPQRDPRRPLRLCRRPLPLPSRQRPLRRPLRLWRRPLPSRRRLVLRLRRMVAGRTRWRWR

SEQ ID NO: 25412 - protein, 118 aa, Triticum aestivum
MPPAKAKKLRRAAAAAAPPESSPAPPPAAAETPPAAATPERSPAPPPAVAETPPAAATPERSPAPPPAVQETTPAAVPPETSPAPAPVVAATPPESSEASVTVAEDGGGKDKMAVEMR

SEQ ID NO: 25413 - DNA, 469 bp, Triticum aestivum
gtacagctgatctgcgcaataagaatacaccaacggtgccaacaacaattgcgagagagaagcagtgcaatcctttcttgaggacctcaagtccagagataaagaaaaggctgtccattccagatcatttcgatgatgcacgtgttcttgaagttatccgacgggcgaaggataatttttgactaaccacaaaggaaattctcataaaacgatgacccaaccatctcttcgaaaagaagtagagtggacaaagaaccccgcaagaccacaacagaaggaacgcagggaaggaaatgtgtatagctcgatgttccaaaaatgctttggtgaaaatttgtctagcattgtatgtagcttgcgcagagtgcttgttaatctgatagcagctggtgattcttttgtcgactacaaataaaatgtgtcctgtaatcctctaccctgggagagaaaaaagctagttagctgtttg

SEQ ID NO: 25414 - protein, 67 aa, Triticum aestivum
MTQPSLRKEVEWTKNPARPQQKERREGNVYSSMFQKCFGENLSSIVCSLRRVLVNLIAAGDSFVDYK

SEQ ID NO: 25415 - protein, 59 aa, Triticum aestivum
TADLRNKNTPTVPTTIAREKQCNPFLRTSSPEIKKRLSIPDHFDDARVLEVIRRAKDNF

SEQ ID NO: 25416 - protein, 35 aa, Triticum aestivum
MFQKCFGENLSSIVCSLRRVLVNLIAAGDSFVDYK

SEQ ID NO: 25417 - DNA, 691 bp, Triticum aestivum
caagatggttcctattgcgcagttgcctgtcggcaagaaggcttcgatatcagggcaatcagggaaactctggagatggaaaaggagccaccaccagtggctactgcagttcaagtggaagtggcagaagccctggaaactgtcggaaatgatccgccacagcgacgaaacgatcacgagggccaggcccagaccccagttacttatcactcataaacctcagaaagtgatgtgaaacaggcttctctttttttccggcttcacattgactgacacggttggttcgcggacctacacagctaacaatgcagctaaaggcttgatgggatctccttcgtgcttcgtttttacctagccacgggatcgacaagtatatgttcttcatagggtgacctgtctttgggtgtaaatttcctgtgcctataaagtgagatgtgaatgtagaggtggtggagttagtgagtgagtgagtggccaccattcttcctggaagaagtgagcgcgaggtttcatgttttcagccatccttggtctcactggagagatgccaacagttggtgtgctctttctacataaagatttgcaagaaggatggtggaagttggatgccttgtgcttgtttcctttatagtattattttctgtatgttgtactgaaagtggcaagtcgaatgactctggtttggtttgtt

SEQ ID NO: 25418 - protein, 77 aa, Triticum aestivum
KMVPIAQLPVGKKASISGQSGKLWRWKRSHHQWLLQFKWKWQKPWKLSEMIRHSDETITRARPRPQLLITHKPQKVM

SEQ ID NO: 25419 - protein, 76 aa, Triticum aestivum
MVPIAQLPVGKKASISGQSGKLWRWKRSHHQWLLQFKWKWQKPWKLSEMIRHSDETITRARPRPQLLITHKPQKVM

SEQ ID NO: 25420 - protein, 71 aa, Triticum aestivum
QDGSYCAVACRQEGFDIRAIRETLEMEKEPPPVATAVQVEVAEALETVGNDPPQRRNDHEGQAQTPVTYHS

SEQ ID NO: 25421 - DNA, 1312 bp, Triticum aestivum
aattcggcacgagatctcccccacctctctcccaaagccaagagctcagagaagcaccggccatggagggcaaggaggaggacgtgcgcctgggcgcgaaccgctactcggagcaccagcccatcggcacggcggcgcagggcggcggcgcggacaaaaaggactacaaggagccgcccccggcccccttcttcgaggccggggagctcacctcctggtccttctaccgggccggcatcgccgagttcctggccactttcctcttcctctacatctcggtgctcaccgtgatgggcgtggtgggcaacccgtcggggtccaagtgcggcacggtcggcatccagggcatcgcctggagcttcggcggcatgatcttcgtgctcgtctactgcaccgccggcatctccggcggccacatcaaccccgcggtcaccttcgggctgtttttggcaaggaagctgtcgctcaccagggccgtcttctacatcgtgatgcagtgcctgggggccatatgcggcgccggcgtggtcaaggggttccagaccacgctgtaccagggcaacggcggcggcgccaactccgtcgcgcccgggtacaccaagggggacgggctaggggctgagatcgtcggcacgttcgtgctggtctacaccgtcttttctgccaccgacgccaagcgcagcgccagagactcccacgtccccattttggcgccgcttcccatcgggttcgcggtgttcctggtgcacctggcgacgatccccatcacggggaccggcatcaacccggcgaggtccctcggcgccgccatcatctacaacaagaagcaggcgtgggacgaccactggatcttctgggttggtccgttcatcggtgcggcgctggcggccatctaccacgtggtggtgatcagggccatccccttcaagagccgcgactagtcagccaatcagtctgccgaccatggacgggtggaatcttatcgctgttcatcgtcgatcgatcatgtggtggtggttgcccgtgcgtacgtggctcatttcgcacgctgtaattctctatctaccgtcctctgtccctctcctcggtgtgtgtgcctgccgacagcgtcactgtggcgcacctgttcaagtctgcgagttgtgtactttccctcccttctgtattgtaccgctgcgcacgcgatttaacggagcgtgcatatgtatgtaaattattaattaagaaggaacgtcgatcgagttaattaacgcctggagatgagaataatgtataatcattatgagaataatgtataatcattatgagtccc

SEQ ID NO: 25422 - protein, 312 aa, Triticum aestivum
FGTRSPPPLSQSQELREAPAMEGKEEDVRLGANRYSEHQPIGTAAQGGGADKKDYKEPPPAPFFEAGELTSWSFYRAGIAEFLATFLFLYISVLTVMGVVGNPSGSKCGTVGIQGIAWSFGGMIFVLVYCTAGISGGHINPAVTFGLFLARKLSLTRAVFYIVMQCLGAICGAGVVKGFQTTLYQGNGGGANSVAPGYTKGDGLGAEIVGTFVLVYTVFSATDAKRSARDSHVPILAPLPIGFAVFLVHLATIPITGTGINPARSLGAAIIYNKKQAWDDHWIFWVGPFIGAALAAIYHVVVIRAIPFKSRD

SEQ ID NO: 25423 - protein, 292 aa, Triticum aestivum
MEGKEEDVRLGANRYSEHQPIGTAAQGGGADKKDYKEPPPAPFFEAGELTSWSFYRAGIAEFLATFLFLYISVLTVMGVVGNPSGSKCGTVGIQGIAWSFGGMIFVLVYCTAGISGGHINPAVTFGLFLARKLSLTRAVFYIVMQCLGAICGAGVVKGFQTTLYQGNGGGANSVAPGYTKGDGLGAEIVGTFVLVYTVFSATDAKRSARDSHVPILAPLPIGFAVFLVHLATIPITGTGINPARSLGAAIIYNKKQAWDDHWIFWVGPFIGAALAAIYHVVVIRAIPFKSRD

SEQ ID NO: 25424 - protein, 216 aa, Triticum aestivum
MGVVGNPSGSKCGTVGIQGIAWSFGGMIFVLVYCTAGISGGHINPAVTFGLFLARKLSLTRAVFYIVMQCLGAICGAGVVKGFQTTLYQGNGGGANSVAPGYTKGDGLGAEIVGTFVLVYTVFSATDAKRSARDSHVPILAPLPIGFAVFLVHLATIPITGTGINPARSLGAAIIYNKKQAWDDHWIFWVGPFIGAALAAIYHVVVIRAIPFKSRD

SEQ ID NO: 25425 - DNA, 788 bp, Triticum aestivum
gattattatcctgggtggcgcatattcagttaatggaaatgtcaaccctgcagccgaggcaaatatatttggcgatcctgatgcggctgatacagtttttacctgcggcgcggatattttggccatcggaattaacattacgcaccaagtactcctttctgatgtcgaccggaagaagcttgaacagtctggtagcaagtatgctcgctacttgagcaatatactgggttattattatgattatcacatggacgcctactccataacaggagtatatcttcatgatcccacaactcttcttgccgccgtagatccgtcgctgatgacttacacggaaggagtggtgagggttcagacggatggaatcacaaagggtctcaccgttttcgacaataccaagaaaacgtatggggagataacagcgtggtgtggtaagccgaccgtgaaggttgctgtcacggtcgatgcccccgctgtcgtggagctcattatgcagaggcttctcacggacgactgaaacatttcgtttgcaatgctgcagtcaagattcaagaacatacttgtcaatgttgcattatgtactgtctaccttcgggggctgagatgaaccatgggcctcttcttttgtagttcaacacttgaacatttacacttgtagcacaacacttgaatatttacacttgtagtccaacacttaagcattttacacttcaggcagaaagaccagattatagttcatttttcacttttcagttctcaatgcacatcgtgaataaattgtttggtgt

SEQ ID NO: 25426 - protein, 171 aa, Triticum aestivum
IIILGGAYSVNGNVNPAAEANIFGDPDAADTVFTCGADILAIGINITHQVLLSDVDRKKLEQSGSKYARYLSNILGYYYDYHMDAYSITGVYLHDPTTLLAAVDPSLMTYTEGVVRVQTDGITKGLTVFDNTKKTYGEITAWCGKPTVKVAVTVDAPAVVELIMQRLLTDD

SEQ ID NO: 25427 - protein, 89 aa, Triticum aestivum
MDAYSITGVYLHDPTTLLAAVDPSLMTYTEGVVRVQTDGITKGLTVFDNTKKTYGEITAWCGKPTVKVAVTVDAPAVVELIMQRLLTDD

SEQ ID NO: 25428 - DNA, 731 bp, Triticum aestivum
  misc_feature (83)..(83): n is a, c, g, or t
ctatagtcatgatccatgagaacggagctgctagcattgcggatccttctgctgggaacgcccccgacgacgagttcaggtcncagtacctgcaggattacatcgaggcgaccctcgaatccagcaggaacgggtcgaacgtgcagggctacttcgtgtggtcgtttctggacgtgttcgagtatttgttcggctaccgcatgggcttcggtctctacggcgtcgacttcaactccgaggagaggacgaggtaccagaggcactccgccaagtggttcaccagcttcctccgtggcggcgagctcaggccggtggctctgcccggccaggcctattcccagtgatcttgtcacacttcaagattctgtagcccacgaagaggagaatgtacgaataagcctgggactgggaggatggtggggtgttgtttttggatggaaattgaattttgcttgggcagtagggttcatatataggtctctgcttctctggattgggttgatcctaatatatacgtatgtctatgctgatgtattcatgtatatgcggaaaatagtaatatgtcgatatacaagatgttggatctagtcagcagttcgagatcgaaatcacgtacctgcatttaaatagaacctgcaatgctgcaaaatctcaattttcattcaatagtactccctctgtcaagaaatataagagcgctaaagccaaacttggcaggtctgttgccactc

SEQ ID NO: 25429 - protein, 190 aa, Triticum aestivum
  misc_feature (23)..(23): Xaa can be any naturally occurring amino acid
MRTELLALRILLLGTPPTTSSGXSTCRITSRRPSNPAGTGRTCRATSCGRFWTCSSICSATAWASVSTASTSTPRRGRGTRGTPPSGSPASSVAASSGRWLCPARPIPSDLVTLQDSVAHEEENVRISLGLGGWWGVVFGWKLNFAWAVGFIYRSLLLWIGLILIYTYVYADVFMYMRKIVICRYTRCWI

SEQ ID NO: 25430 - protein, 113 aa, Triticum aestivum
  misc_feature (27)..(27): Xaa can be any naturally occurring amino acid
IVMIHENGAASIADPSAGNAPDDEFRXQYLQDYIEATLESSRNGSNVQGYFVWSFLDVFEYLFGYRMGFGLYGVDFNSEERTRYQRHSAKWFTSFLRGGELRPVALPGQAYSQ

SEQ ID NO: 25431 - protein, 111 aa, Triticum aestivum
  misc_feature (25)..(25): Xaa can be any naturally occurring amino acid
MIHENGAASIADPSAGNAPDDEFRXQYLQDYIEATLESSRNGSNVQGYFVWSFLDVFEYLFGYRMGFGLYGVDFNSEERTRYQRHSAKWFTSFLRGGELRPVALPGQAYSQ

SEQ ID NO: 25432 - DNA, 533 bp, Triticum aestivum
aaggacctctccattgctctgcagaagatgttcagcaccttcaccgcaactgggaatgaggggaagatggttgaggcagtgaacggttcagatgttgttactacttacgaagacaaggatggagactggatgcttgttggagacgtcccatgggagatgtttgttgcttcatgcaaacgcttgaggatcatgaaggggtccgaagccatcggtcttgcaccaagggccaaggacaagtacaagaacaagagctaaagatggggcagtaagaggaagactatgatgccacaaggatggtgttcttgcagtgtgctatggttttttagatatataatgttttcaattattagctggattaaaagaagggagagttgccatgtttaatttgttggtggaccagaagcaataatctatctgtgtgtagctggattggtgttatgtgatgtttcctaccatgtgtcccagaattttcttggtgattttattttactgttgtcaaataagtatgtgtgattggtaagtaaagggcaaca

SEQ ID NO: 25433 - protein, 84 aa, Triticum aestivum
KDLSIALQKMFSTFTATGNEGKMVEAVNGSDVVTTYEDKDGDWMLVGDVPWEMFVASCKRLRIMKGSEAIGLAPRAKDKYKNKS

SEQ ID NO: 25434 - protein, 75 aa, Triticum aestivum
MFSTFTATGNEGKMVEAVNGSDVVTTYEDKDGDWMLVGDVPWEMFVASCKRLRIMKGSEAIGLAPRAKDKYKNKS

SEQ ID NO: 25435 - protein, 62 aa, Triticum aestivum
MVEAVNGSDVVTTYEDKDGDWMLVGDVPWEMFVASCKRLRIMKGSEAIGLAPRAKDKYKNKS

SEQ ID NO: 25436 - DNA, 757 bp, Triticum aestivum
ggaaggcagaggggctccggatagccgatctctacgctaacttgcctgctgctccaaagactaaggacagtagggaggaatctggtaggttctcaggtgttttctcctctagtggttccccacgacatgggatttcaaggagttcaagcagactgtctacgcaagatgatactgatgatgcatatcttccttttgctgtggatgatgtcgatgcacctgattccagacctgggagcagtggtggtaaggaggaccagtcggcttcgtcctcgcataaatcacaagatgctgcggttggctatcttgtccatctgctgaggtctgcacgtccgttgcgagatcctagcaattcatctgttacatcaagggctgaatctaccgaagcaggcaacaccagctcgttcatgtcccgtagaacgtctgatgcattcgaggagcttgaatctttcaaagatataaaggagaacctgctctcccgtagtagatctagaatgcaagattcattcgatagatcctaacttaacggacgaaggctcccaatcagccaatcacacaggatactattacacggtaagatcggtagtccgtattgatgagtgaggatatctccatgagctatgtatataaccatcaactggcacttgttttacggcacctcattctcaaactcaagcagtctcatgatccgcctctgttgatagtgttttgcataaaagcaaaaccgacaggattcttgttgctggaaacccactggtgt

SEQ ID NO: 25437 - protein, 171 aa, Triticum aestivum
KAEGLRIADLYANLPAAPKTKDSREESGRFSGVFSSSGSPRHGISRSSSRLSTQDDTDDAYLPFAVDDVDAPDSRPGSSGGKEDQSASSSHKSQDAAVGYLVHLLRSARPLRDPSNSSVTSRAESTEAGNTSSFMSRRTSDAFEELESFKDIKENLLSRSRSRMQDSFDRS

SEQ ID NO: 25438 - DNA, 496 bp, Triticum aestivum
agtccttttgcgctaaccagccccatcccgtctcccacgctccctgccctacgacgctagaggaggcgacatgtcgtggctgcagtacgcggcgacccggaggcagcgcgccgccacggcctgcctcttcctcaccggcgccgcgctcatcgccgccgccgcgcgcctctcctacgccaacatcgagccccagcgcgccaaggccgcccagcgccgcaaggtcctcgaggacttcatcgcccgcaagcgcgcagccgtggccggacccggagccgaagccggagcaggctcccacccccagccagatgcccccaaaacctagccatgcatcggcgccacgacaccacccgggatcaagcttgaagctatcatccgagcaaaaaggggatcggttttttgtgcaggccctccgtagttgcaagctttcttcagcaaagggggcgattgtaatggccatcgatttctgtagcactgggagatttctttaccctctctg

SEQ ID NO: 25439 - protein, 164 aa, Triticum aestivum
SFCANQPHPVSHAPCPTTLEEATCRGCSTRRPGGSAPPRPASSSPAPRSSPPPRASPTPTSSPSAPRPPSAARSSRTSSPASAQPWPDPEPKPEQAPTPSQMPPKPSHASAPRHHPGSSLKLSSEQKGDRFFVQALRSCKLSSAKGAIVMAIDFCSTGRFLYPL

SEQ ID NO: 25440 - protein, 83 aa, Triticum aestivum
MSWLQYAATRRQRAATACLFLTGAALIAAAARLSYANIEPQRAKAAQRRKVLEDFIARKRAAVAGPGAEAGAGSHPQPDAPKT

SEQ ID NO: 25441 - DNA, 554 bp, Triticum aestivum
gctactaccagacgctgcagcagcagaagggcctgctgtcgtcggaccaggtgctcttcgccgaccgccgctcccgggccaccgtcaaccacttcgcgtccaaccagaccgccttcttcgacgccttcgtcgccgctatggccaagctcggccgcatcggggtcaagaccgccggctccgacgccgagatccgccgggtctgcaccaaggtcaactaacgtggttgcttagctctaagctgccgtggtagtagcaccacacgtacattcagtagagagggtaaaatggatggatggatgggccgatcgattctgtcatgtgtctctcctcttctcttctccctgcccatgcgcgccccatatgctcgcacatgccatattgtcatagccgatttgttccagcccgattcttttcttcaccatgtaataaagcatataaatgccgtgggataggaggcacgcacagttacatccatgtaaatgttacacttggtccggttaatcaacaagtatactatcccatatgaatgaatggagttattttttgaaagtgtc

SEQ ID NO: 25442 - protein, 82 aa, Triticum aestivum
LLPDAAAAEGPAVVGPGALRRPPLPGHRQPLRVQPDRLLRRLRRRYGQARPHRGQDRRLRRRDPPGLHQGQLTWLLSSKLPW

SEQ ID NO: 25443 - protein, 77 aa, Triticum aestivum
MDGPIDSVMCLSSSLLPAHARPICSHMPYCHSRFVPARFFSSPCNKAYKCRGIGGTHSYIHVNVTLGPVNQQVYYPI

SEQ ID NO: 25444 - protein, 76 aa, Triticum aestivum
ATTRRCSSRRACCRRTRCSSPTAAPGPPSTTSRPTRPPSSTPSSPLWPSSAASGSRPPAPTPRSAGSAPRSTNVVA

SEQ ID NO: 25445 - protein, 71 aa, Triticum aestivum
YYQTLQQQKGLLSSDQVLFADRRSRATVNHFASNQTAFFDAFVAAMAKLGRIGVKTAGSDAEIRRVCTKVN

SEQ ID NO: 25446 - DNA, 588 bp, Triticum aestivum
gagcaagctctgcaattgctgcaagggaccttggttggtggtcagaatgtgaggctttcatgggacgaagcccttcaaacaaacaaactcagcctcaggaagccagccagtggggtgcaggtgctgctgctggtgctgctggtggttactatgctggatatggacaaggctacgaggcttatggacaagggtatgcacagcctcaagaccctaacatgtatggttatggagcctatgctggttatcccaactaccaacaaccagcagcggcaccgcagccaccgccaccgcaacagtgagccctcctcgtgggtcgtccagacagatgagaacccctgtttgaaggcactgtcaaggctaatgttgtagcacctgtcgatagagagagacggttcctggactccggattttgattgccccatggcaaggtctattgttatgttattatgcactatattatgatcagctgttgtcggtcccgctgtggtgatcctttggatatgtacttggaaacttagctttgtttcgccgcatgtccttgtctactgttatttaccgttgctatcttctgctgttaaattatatact

SEQ ID NO: 25447 - protein, 122 aa, Triticum aestivum
EQALQLLQGTLVGGQNVRLSWDEALQTNKLSLRKPASGVQVLLLVLLVVTMLDMDKATRLMDKGMHSLKTLTCMVMEPMLVIPTTNNQQRHRSHRHRNSEPSSWVVQTDENPCLKALSRLML

SEQ ID NO: 25448 - protein, 98 aa, Triticum aestivum
ASSAIAARDLGWWSECEAFMGRSPSNKQTQPQEASQWGAGAAAGAAGGYYAGYGQGYEAYGQGYAQPQDPNMYGYGAYAGYPNYQQPAAAPQPPPPQQ

SEQ ID NO: 25449 - protein, 79 aa, Triticum aestivum
MGRSPSNKQTQPQEASQWGAGAAAGAAGGYYAGYGQGYEAYGQGYAQPQDPNMYGYGAYAGYPNYQQPAAAPQPPPPQQ

SEQ ID NO: 25450 - DNA, 640 bp, Triticum aestivum
  misc_feature (601)..(601): n is a, c, g, or t
tgttgttctgtcaggtgcccacgcgctagggaattcacactgcccatctttagagaagaggctacgtaatttcacggctgaagatgacatggaccctaccctggacaagacgtacgcggcagcactaaagcaacagtgcacgagtcccgatgacaacgtgaccgaggtgcaaatggtgcccggtcgctcgtcgactttcgactcgacttactaccgcctcgttaaagagaacaagggccttttccactctgacgaggccttgctgagtaatggtgctacaaaaatgctcgtgtacggttacatgagctcggagaagagattccttaaggactttggggtatctatggtgaacatggggagggctgacgtgctcgccggtagcaagggggagatcaggatgacatgtgccgttctcaactaatacaatctacctagtggttctactgtgtatgtggtgttcaatgttgccaatttgcttttcttcaatagatgtgtaggaactaaagttttgacttcagaattgccagctttactttttgttggcatttatagttctaatgtttatggaatatcataacatctcccataattttttatcatnttcgttacggatctatcgtgaataatattattattcttg

SEQ ID NO: 25451 - protein, 139 aa, Triticum aestivum
VVLSGAHALGNSHCPSLEKRLRNFTAEDDMDPTLDKTYAAALKQQCTSPDDNVTEVQMVPGRSSTFDSTYYRLVKENKGLFHSDEALLSNGATKMLVYGYMSSEKRFLKDFGVSMVNMGRADVLAGSKGEIRMTCAVLN

SEQ ID NO: 25452 - protein, 110 aa, Triticum aestivum
MDPTLDKTYAAALKQQCTSPDDNVTEVQMVPGRSSTFDSTYYRLVKENKGLFHSDEALLSNGATKMLVYGYMSSEKRFLKDFGVSMVNMGRADVLAGSKGEIRMTCAVLN

SEQ ID NO: 25453 - protein, 82 aa, Triticum aestivum
MVPGRSSTFDSTYYRLVKENKGLFHSDEALLSNGATKMLVYGYMSSEKRFLKDFGVSMVNMGRADVLAGSKGEIRMTCAVLN

SEQ ID NO: 25454 - DNA, 632 bp, Triticum aestivum
tcgcgctcccgctggccgctttcgtgaccggatctctgagcggcctcttcggcatcggcggagggctgcttctcaaccctgtcctccttcagatcgggatacccccgcagacggcggcggcgacgtcttcgttcatggtgctgttctgcgcgtccatgtcgatggtccagttcatcctgctgggcatggacgggatcggggaggcctcggtctacgcggggatatgcttcgtcgcctcgatcgccggggtggtcttgatcgagcgggtcgtcaggaagtccgggcgggtgtcgatgatcgtcttcttggtcaccgccatcatggcgctcagcactgtgatcgtcacctgcttcggagccctagatgtctggacgcaatacactggcggagcgtacatggggttcaagctaccttgtacgtagtttacacatgcatatatgagagcatgggtgagaggtgcttagttactaattgcttcttctggcttggcgtttatgtcttttctgaagaaaggttttgttcgtggtgttgctatggctgtttatgggctatatataattttgtgtgaataaatatatgcttctggaatgaagcttacatggcactgtgatcatggacaggccaacagtggt

SEQ ID NO: 25455 - protein, 188 aa, Triticum aestivum
RAPAGRFRDRISERPLRHRRRAASQPCPPSDRDTPADGGGDVFVHGAVLRVHVDGPVHPAGHGRDRGGLGLRGDMLRRLDRRGGLDRAGRQEVRAGVDDRLLGHRHHGAQHCDRHLLRSPRCLDAIHWRSVHGVQATLYVVYTCIYESMGERCLVTNCFFWLGVYVFSEERFCSWCCYGCLWAIYNFV

SEQ ID NO: 25456 - protein, 139 aa, Triticum aestivum
ALPLAAFVTGSLSGLFGIGGGLLLNPVLLQIGIPPQTAAATSSFMVLFCASMSMVQFILLGMDGIGEASVYAGICFVASIAGVVLIERVVRKSGRVSMIVFLVTAIMALSTVIVTCFGALDVWTQYTGGAYMGFKLPCT

SEQ ID NO: 25457 - protein, 114 aa, Triticum aestivum
MLRRLDRRGGLDRAGRQEVRAGVDDRLLGHRHHGAQHCDRHLLRSPRCLDAIHWRSVHGVQATLYVVYTCIYESMGERCLVTNCFFWLGVYVFSEERFCSWCCYGCLWAIYNFV

SEQ ID NO: 25458 - DNA, 485 bp, Triticum aestivum
aaagaaggattgctggttgggatctcttctggtgctgctgcagctgctgcaatcaaggttgctcagaggcctgaaaatgcagggaaactcttgttgttgtgttcccgagcttcggagagcgctacctttcgtcggtgctcttccactccatcaagaaggaggccgagagcatggtggtcgagtgacgctcgggactcgtctcctcaagcgcgcgaagctgttctccgaagccgaatccctccattcataggagccctcttttacaagaaataaatcttcggcgtccctgctagtgttggtctgacatcaaagtcctgtcaagttttaatcccaccttgtgtggcaatggggaatacttttgtgttggccttgtggtgtttagcaatttgaattacctcctgcctgccctgtatattgaactcctcctctgtggtccatatgtcagccagtgtgaaataaagcatcatggtgcccttacatgtctg

SEQ ID NO: 25459 - protein, 90 aa, Triticum aestivum
KEGLLVGISSGAAAAAAIKVAQRPENAGKLLLLCSRASESATFRRCSSTPSRRRPRAWWSSDARDSSPQAREAVLRSRIPPFIGALFYKK

SEQ ID NO: 25460 - protein, 82 aa, Triticum aestivum
KKDCWLGSLLVLLQLLQSRLLRGLKMQGNSCCCVPELRRALPFVGALPLHQEGGREHGGRVTLGTRLLKRAKLFSEAESLHS

SEQ ID NO: 25461 - protein, 57 aa, Triticum aestivum
MQGNSCCCVPELRRALPFVGALPLHQEGGREHGGRVTLGTRLLKRAKLFSEAESLHS

SEQ ID NO: 25462 - DNA, 1106 bp, Triticum aestivum
  misc_feature (1016)..(1016): n is a, c, g, or t
gaggtttgtcaaggaggtctacgagacgctgcgggcgagcccgcagtggaacgagacggctctcatcatcacctatgatgagcatggtggcttctatgaccatgtccccacgcccgtcgtcaaagtgcctcagcctgatgggattattggccctgacccttactacttcaagtttgatcggctcggggcgcgtgcccagcttcctcatctcaccctgggttgagaagggcaccgtgatccatgaaccaaatggtcctgagggaacctcacaatatgagcattcatccatccctgcgacagtaaagaagctatttaatttacgtgctaactacctgacaaagagggattcatgggctgggacctttgagagctacctcaaagtccgaaagacaccaagaactgattgtccagagaaactcccagaggttacaaagtctctgcgaccatttggtgctaatgaagataaatctctatctgagtttcaagtggagttgattcaactcgcctctcagctcaacggtgaccatgtactcaacagctatccggatattggcaagacaatgagtgtaggagaagcaaaccgttacgcagaggatgctgtctccagattcctggaagccggaagaagtgctcttagggcaggcgcaaatgaatctgctctggtgacaatgaggcccgcacttaccagcagagccgcaatgtccactggcttgtcatcagagctttgattggatcgtcgtggatcctatcaacatccgcatcatgatttgggccacatcaaccatagtctggtagcatttatgtaatgggtagatcttacacatggcttttgtacatatataccatgacacttcgtatctgaagctcacttgaccgaatcctcatgatttacgctgagatatcagctcagtagtatcgcccagcattgtaccagatgcatgccaaaatcccctgctggataagctgtagctggtatctggaatctgttgtcgggaaactgtacctattcagctctntactgtacctgcttgtatagcagttgaactgcaacgtaaaggagtattgtaaggattgttggatttggccatctgtaactatttgcatcc

SEQ ID NO: 25463 - protein, 241 aa, Triticum aestivum
GLSRRSTRRCGRARSGTRRLSSSPMMSMVASMTMSPRPSSKCLSLMGLLALTLTTSSLIGSGRVPSFLISPWVEKGTVIHEPNGPEGTSQYEHSSIPATVKKLFNLRANYLTKRDSWAGTFESYLKVRKTPRTDCPEKLPEVTKSLRPFGANEDKSLSEFQVELIQLASQLNGDHVLNSYPDIGKTMSVGEANRYAEDAVSRFLEAGRSALRAGANESALVTMRPALTSRAAMSTGLSSEL

SEQ ID NO: 25464 - protein, 217 aa, Triticum aestivum
MMSMVASMTMSPRPSSKCLSLMGLLALTLTTSSLIGSGRVPSFLISPWVEKGTVIHEPNGPEGTSQYEHSSIPATVKKLFNLRANYLTKRDSWAGTFESYLKVRKTPRTDCPEKLPEVTKSLRPFGANEDKSLSEFQVELIQLASQLNGDHVLNSYPDIGKTMSVGEANRYAEDAVSRFLEAGRSALRAGANESALVTMRPALTSRAAMSTGLSSEL

SEQ ID NO: 25465 - protein, 216 aa, Triticum aestivum
MSMVASMTMSPRPSSKCLSLMGLLALTLTTSSLIGSGRVPSFLISPWVEKGTVIHEPNGPEGTSQYEHSSIPATVKKLFNLRANYLTKRDSWAGTFESYLKVRKTPRTDCPEKLPEVTKSLRPFGANEDKSLSEFQVELIQLASQLNGDHVLNSYPDIGKTMSVGEANRYAEDAVSRFLEAGRSALRAGANESALVTMRPALTSRAAMSTGLSSEL

SEQ ID NO: 25466 - DNA, 615 bp, Triticum aestivum
aaaaatgttccagaggatgttgtgaagaatttctttgagggaatttgtggggaggttgctcgactgaggctgcttggtgattacgtgcatgccacgtgcattgcctttgttgagtttgttcaggcagaaggagcaattttggccctgaactgcagtggcatgcttcttggctcgcttcctgtcagggtgagcccatccaagaccccagtccgcccccgttcgcctcgtgcgatgtcgcactgaatctgtctctcgtctgaagccggcgtccagggcagcaattccgggcaacaaacccctagtcgtggccttagagactgttgcgtcgcggatcagtaactgtcgttgaagagagtgagtgttaccgttttggttatctaggctagaagaaggcccttccttgctgatcagatgagagacccatctgtatgttcttcgctgggagctctattttcacttcttttctttttgctatatccttattaatccgtttgttaattatggatggatgctgtagctgccttcgacaggcactggaacaataatgtctatggcttgtcctatttcgacttgattctcactgatgttgatgtgcgtgtcgcataagattgctgc

SEQ ID NO: 25467 - protein, 80 aa, Triticum aestivum
KNVPEDVVKNFFEGICGEVARLRLLGDYVHATCIAFVEFVQAEGAILALNCSGMLLGSLPVRVSPSKTPVRPRSPRAMSH

SEQ ID NO: 25468 - DNA, 1535 bp, Triticum aestivum
  misc_feature (1470)..(1470): n is a, c, g, or t
  misc_feature (1516)..(1517): n is a, c, g, or t
attcggcacgaggcactgcaaatgggcgaatacgtatctaatgtttctcatgggattgacaccttcagtattagggagccacttggtgtatgtgctgggatatgcccattcaatttccctgccatgattcccctatggatgttccccatagctgttacttgtggcaatacttttgttctaaagccatcagaaaaggatccaggggctgctatgatgcttgcggagctagcgatggaggctggtttaccaaagggtgtgttgaacattgttcatggtacccatgatgttgtcaacaacatttgtgatgacgaggctattaaggcagtatcatttgttggttccaatacagcaggtatgcatatatattctagagcatctgcgagtgggaagcgtgttcagtgtaacatgggtgcaaagaatcatgccattatccttcctgatgctgatcgagatgccacattgaatgcccttattgctgccggttttggtgcagctgggcaaaggtgcatggcattgagcactgctgtttttgttggaggttcagaaccatgggaggatgaactagtcaaacgtgcaagcagccttgtagttaataccggaacagctaatgatgcagatcttggtccagtgatcagtagacaggccaaggaccgcatctgcaagttagtccaaagtggtgctgacagtggtgctcgacttgtgctggatggaagggagattgtggttcctcaatttgaggatggcaactttattggtccaactgtgttggctgatgttaaaagtgatatggagtgttaccaggaggaaatttttggtccagttcttctcttgatgaaggcagagagcctagatgatgccatacaaattgtaaacagaaacaagtatggcaatggggcttccatctttaccacgtctggtgtctcagcaaggaaatttcagacggacattgaagctggccaggtgggtatcaacgtgccgatcccagtacccctgccattcttctccttcacgggcagcaaagcttccttcgcaggagacttgaatttctacggcaaggcgggcgtgcagttcttcacccagatcaagaccatcacgcagcagtggaaggagtcgtctccccagcgcgtttctctctccatgcccacctcacagaagtgaagtcaccggagctaactcatgtaggccttgttcggttgaggtggtttttgaaggggaatggcagggtttgaggggggattagatcccctacaagccaaaatcctctccaatccactccaatccccttgggaggaggattaaacgaacaaggccgtatgtggaaataaacccaggcattgatgtggaatttaagcttcacaggagttgcctttcatcaagggtaactcttgtgatgtctttcattgtgctgccgataataaggaagaaaatcccagattagacgaccgaatcacacacacaggagagcatgtntttgtacagggaccaaatcaatgtgtacacgcaatggctcaatatnncattgtcactgaacttgc

SEQ ID NO: 25469 - protein, 385 aa, Triticum aestivum
IRHEALQMGEYVSNVSHGIDTFSIREPLGVCAGICPFNFPAMIPLWMFPIAVTCGNTFVLKPSEKDPGAAMMLAELAMEAGLPKGVLNIVHGTHDVVNNICDDEAIKAVSFVGSNTAGMHIYSRASASGKRVQCNMGAKNHAIILPDADRDATLNALIAAGFGAAGQRCMALSTAVFVGGSEPWEDELVKRASSLVVNTGTANDADLGPVISRQAKDRICKLVQSGADSGARLVLDGREIVVPQFEDGNFIGPTVLADVKSDMECYQEEIFGPVLLLMKAESLDDAIQIVNRNKYGNGASIFTTSGVSARKFQTDIEAGQVGINVPIPVPLPFFSFTGSKASFAGDLNFYGKAGVQFFTQIKTITQQWKESSPQRVSLSMPTSQK

SEQ ID NO: 25470 - protein, 378 aa, Triticum aestivum
MGEYVSNVSHGIDTFSIREPLGVCAGICPFNFPAMIPLWMFPIAVTCGNTFVLKPSEKDPGAAMMLAELAMEAGLPKGVLNIVHGTHDVVNNICDDEAIKAVSFVGSNTAGMHIYSRASASGKRVQCNMGAKNHAIILPDADRDATLNALIAAGFGAAGQRCMALSTAVFVGGSEPWEDELVKRASSLVVNTGTANDADLGPVISRQAKDRICKLVQSGADSGARLVLDGREIVVPQFEDGNFIGPTVLADVKSDMECYQEEIFGPVLLLMKAESLDDAIQIVNRNKYGNGASIFTTSGVSARKFQTDIEAGQVGINVPIPVPLPFFSFTGSKASFAGDLNFYGKAGVQFFTQIKTITQQWKESSPQRVSLSMPTSQK

SEQ ID NO: 25471 - protein, 344 aa, Triticum aestivum
MIPLWMFPIAVTCGNTFVLKPSEKDPGAAMMLAELAMEAGLPKGVLNIVHGTHDVVNNICDDEAIKAVSFVGSNTAGMHIYSRASASGKRVQCNMGAKNHAIILPDADRDATLNALIAAGFGAAGQRCMALSTAVFVGGSEPWEDELVKRASSLVVNTGTANDADLGPVISRQAKDRICKLVQSGADSGARLVLDGREIVVPQFEDGNFIGPTVLADVKSDMECYQEEIFGPVLLLMKAESLDDAIQIVNRNKYGNGASIFTTSGVSARKFQTDIEAGQVGINVPIPVPLPFFSFTGSKASFAGDLNFYGKAGVQFFTQIKTITQQWKESSPQRVSLSMPTSQK

SEQ ID NO: 25472 - DNA, 800 bp, Triticum aestivum
  misc_feature (83)..(83): n is a, c, g, or t
cctgacatggggcgtgaggcaggcacactccttcctcacattcgccacctccacgccgatgcaatcagcagcggcggcagctntgagagcaccagacagctacttcgaggagctgaagcgggactacggcgcaaagaaagcgctgctggtcgacgggctcaaggccgcgggcttcatcgtctacccgtcaagcggaacctacttcgtgatggtcgaccacaccccgttcgggttcgacaacgacatcgagttctgcgagtacttgatccgcgaggtgggcgtggtggccatcccgccgagcgtgttctacctgaaccccgaggacgggaagaacctggtgaggttcaccttctgcaaggacgacgacacgctgagggccgcggtggaccggatgaaggccaagctcaggaagaagtgattgggggggcggtttcgtgtagctgttgattgattgtttgaataaaggcctgcctgatctgatccgcattccggtgcgatgcatgtaacacttttctggcgacggcggttatctgtatgtcctgtctgtgacacttcatctcttgcgtccttgctattttgtctgtgtaaggcgatggtgattgctcggggcagctgacggtcgcacgagtactagaacttttgccgagcaaacctgcggctcggctgctattagctcgggccttttcacctgtcgtgtcaccactccatcaatcgaagtgatcgcagcagagtgcttgatttgtagcacttgtaaaattctacttcctactaatattattgatctaccaaagcttcagctc

SEQ ID NO: 25473 - protein, 148 aa, Triticum aestivum
  misc_feature (28)..(28): Xaa can be any naturally occurring amino acid
PDMGREAGTLLPHIRHLHADAISSGGSXESTRQLLRGAEAGLRRKESAAGRRAQGRGLHRLPVKRNLLRDGRPHPVRVRQRHRVLRVLDPRGGRGGHPAERVLPEPRGREEPGEVHLLQGRRHAEGRGGPDEGQAQEEVIGGAVSCSC

SEQ ID NO: 25474 - protein, 146 aa, Triticum aestivum
  misc_feature (26)..(26): Xaa can be any naturally occurring amino acid
MGREAGTLLPHIRHLHADAISSGGSXESTRQLLRGAEAGLRRKESAAGRRAQGRGLHRLPVKRNLLRDGRPHPVRVRQRHRVLRVLDPRGGRGGHPAERVLPEPRGREEPGEVHLLQGRRHAEGRGGPDEGQAQEEVIGGAVSCSC

SEQ ID NO: 25475 - protein, 138 aa, Triticum aestivum
  misc_feature (28)..(28): Xaa can be any naturally occurring amino acid
LTWGVRQAHSFLTFATSTPMQSAAAAAXRAPDSYFEELKRDYGAKKALLVDGLKAAGFIVYPSSGTYFVMVDHTPFGFDNDIEFCEYLIREVGVVAIPPSVFYLNPEDGKNLVRFTFCKDDDTLRAAVDRMKAKLRKK

SEQ ID NO: 25476 - DNA, 902 bp, Triticum aestivum
  misc_feature (697)..(697): n is a, c, g, or t
  misc_feature (778)..(778): n is a, c, g, or t
  misc_feature (840)..(840): n is a, c, g, or t
  misc_feature (843)..(843): n is a, c, g, or t
aaaaaaaaacctcgcaaaaccctccgccctccccactccccccgctccctcgccgtacaccaccaccgaagcggagcgcggagcggcgatgtcgacggcggcggctacggtgttccgcgggtgccgggccctcatgtccccggcggcggcggcggcggcaaaggggggcaagaagaccgcatcggcggcggcggcggcggcggcgaaggggggcaagaagcccgcgtcggcggccgcgaagcccaaggcggacaagaagccggtggatccgaacaatctccgcgggatcatgcggccggtgccggtctcggacgccctgcgcaagttcggcggcgccgctcacatctcccgctccggcgtcctcaagatcgtctgggactacatcaaggccaaggacctccagaacccactgaacaagagggagatcatctgtgacgagaagctcaaaaccatctttcctcggagggacacggttcatatgatggaggtcaccaagctcttgtcccctcatttcgtgaagactatctaaggctgtcgagtggggggccaacgcttgtgctttctgcccagggctagcgttggaatggaaggcttcttttgcgatccctgtccaagtcatggttctactaggtagttaagttaatacggagttcagacttcagactttgttcgccatttaagggttgggggttcggtnatgcatgtaagaaggattccctgtgttttgtggttcgttcggtgtttggggaatttgaggatttgccacgcctttaattanactttgaggatttgcccccgtttatcctgtaactgaggatttaccacacatttgctgtaatnttnaggatttgccctctgtacacggtttggatcatttggcagattatagtataaattatgtg

SEQ ID NO: 25477 - protein, 175 aa, Triticum aestivum
KKNLAKPSALPTPPAPSPYTTTEAERGAAMSTAAATVFRGCRALMSPAAAAAAKGGKKTASAAAAAAAKGGKKPASAAAKPKADKKPVDPNNLRGIMRPVPVSDALRKFGGAAHISRSGVLKIVWDYIKAKDLQNPLNKREIICDEKLKTIFPRRDTVHMMEVTKLLSPHFVKTI

SEQ ID NO: 25478 - protein, 146 aa, Triticum aestivum
MSTAAATVFRGCRALMSPAAAAAAKGGKKTASAAAAAAAKGGKKPASAAAKPKADKKPVDPNNLRGIMRPVPVSDALRKFGGAAHISRSGVLKIVWDYIKAKDLQNPLNKREIICDEKLKTIFPRRDTVHMMEVTKLLSPHFVKTI

SEQ ID NO: 25479 - protein, 144 aa, Triticum aestivum
KKKPRKTLRPPHSPRSLAVHHHRSGARSGDVDGGGYGVPRVPGPHVPGGGGGGKGGQEDRIGGGGGGGEGGQEARVGGREAQGGQEAGGSEQSPRDHAAGAGLGRPAQVRRRRSHLPLRRPQDRLGLHQGQGPPEPTEQEGDHL

SEQ ID NO: 25480 - DNA, 367 bp, Triticum aestivum
acctgatccagtttccccatccccgcaccccatccattcggcctgccccgtcaccccgcccccgccgccctagtccggccgctcccgccgcccccggcgccttcggccggccccgtcccgccccgtactccccatcccgccgccggcccccgcccccgtcgcctccgttcggccccataagccccatcccgactccggccgccgccccggtcgcaccgcccccgctgcccccgtctggccactcctgccgcccccgccgcatccgtccggccccgtcctgccccgtacgccccatcccgcagccggccgccgcccccgtcgcctccgttcggccccgtccgcctccatcccaccgccggcccgccgc

SEQ ID NO: 25481 - protein, 121 aa, Triticum aestivum
LIQFPHPRTPSIRPAPSPRPRRPSPAAPAAPGAFGRPRPAPYSPSRRRPPPPSPPFGPISPIPTPAAAPVAPPPLPPSGHSCRPRRIRPAPSCPVRPIPQPAAAPVASVRPRPPPSHRRPA

SEQ ID NO: 25482 - DNA, 464 bp, Triticum aestivum
  misc_feature (101)..(101): n is a, c, g, or t
actgcctcctccctcctcccctctccctccaatgccgccgcccatggcgctctccgtctcggtctcctcctccgccgcggccttcgccccgcgccacggcntcccctccgccacccccgcgcccagccgcctcctccgcgccgcccgcgccttctcgacgggctacgccgcgagcttctacggcggcgcggcgtccgcgacccgcacccgcggccgcgacgacgaggaggtcggggacgaggacgggtcgtcgtcggggttcggcgggatgtcggcctcggaggcggcgatggcgctggaggagcgcgagatgccgccctgcccgcccggcctccgccagtacgagaccatggtcgtgctccgccccgacatgtccgaggaggagcgcctcgccctcatccagcgctacgaggagctgctcgtggctgggggcgccatgtacgtggaggtgttcaacagagggg

SEQ ID NO: 25483 - protein, 154 aa, Triticum aestivum
  misc_feature (34)..(34): Xaa can be any naturally occurring amino acid
LPPPSSPLPPMPPPMALSVSVSSSAAAFAPRHGXPSATPAPSRLLRAARAFSTGYAASFYGGAASATRTRGRDDEEVGDEDGSSSGFGGMSASEAAMALEEREMPPCPPGLRQYETMVVLRPDMSEEERLALIQRYEELLVAGGAMYVEVFNRG

SEQ ID NO: 25484 - protein, 154 aa, Triticum aestivum
  misc_feature (33)..(33): Xaa can be any naturally occurring amino acid
CLLPPPLSLQCRRPWRSPSRSPPPPRPSPRATXSPPPPPRPAASSAPPAPSRRATPRASTAARRPRPAPAAATTRRSGTRTGRRRGSAGCRPRRRRWRWRSARCRPARPASASTRPWSCSAPTCPRRSASPSSSATRSCSWLGAPCTWRCSTEG

SEQ ID NO: 25485 - protein, 154 aa, Triticum aestivum
  misc_feature (34)..(34): Xaa can be any naturally occurring amino acid
TASSLLPSPSNAAAHGALRLGLLLRRGLRPAPRXPLRHPRAQPPPPRRPRLLDGLRRELLRRRGVRDPHPRPRRRGGRGRGRVVVGVRRDVGLGGGDGAGGARDAALPARPPPVRDHGRAPPRHVRGGAPRPHPALRGAARGWGRHVRGGVQQR

SEQ ID NO: 25486 - protein, 144 aa, Triticum aestivum
  misc_feature (24)..(24): Xaa can be any naturally occurring amino acid
MPPPMALSVSVSSSAAAFAPRHGXPSATPAPSRLLRAARAFSTGYAASFYGGAASATRTRGRDDEEVGDEDGSSSGFGGMSASEAAMALEEREMPPCPPGLRQYETMVVLRPDMSEEERLALIQRYEELLVAGGAMYVEVFNRG

SEQ ID NO: 25487 - DNA, 919 bp, Triticum aestivum
  misc_feature (808)..(808): n is a, c, g, or t
ttattctgatgcagcacaggacgggtatcaagaaattccagatgaaagttttgctccagttcgtgctgccccttctgtacaagtcgacgaggcttttgaggtggctcgtaatagcgttgaacttctttccacagtgctatcatcatctccacaaaaagaggctctagaggatgacttgactaccaccctggtccagcaatgccaacagtgtcaatacacgatccagagaatcgttgaaactgcaggtgataatgaggctcaactcttcgaggcgctgagtatccacgatgaactccagaaagttctgtccaagtacgaagacctcaaggagcccatcgtcgcagagcctgagccagaaccagcgatgattccagtcacggtggagcctgaggaatccccacgcgctgttggcaaagacaccccctcgaggaaatcagctgggtccggtggtcgctctagcggcggggatgacttgcttcaggatctcgacgacatgatctttggtaagaaagccggcaccgcctcccagcaggaaaggactccccggaaggagcagaaggacgatttcatcggcttatgatcaacgggtatagatatctgtccggctgaaacttgtcataaaggtgttgcgtgctcagtgcatttccaaaccatgatacaggtttgtgcttgcgcgtctatcttctcctgtatcccggggattgctgcacagtggtagatgtttaacgtcgcattgagtttcatgtgggactccttttctttctgtgattgttatgcgagccaaattattgaaatgctggggctgctntcatgcatcgcatgggtaagtatataagtttgtacatcgcatgggtaagtatataagtatataagacggggtctgctcgttcatcacgatttttgaaatctatatgttttg

SEQ ID NO: 25488 - protein, 192 aa, Triticum aestivum
YSDAAQDGYQEIPDESFAPVRAAPSVQVDEAFEVARNSVELLSTVLSSSPQKEALEDDLTTTLVQQCQQCQYTIQRIVETAGDNEAQLFEALSIHDELQKVLSKYEDLKEPIVAEPEPEPAMIPVTVEPEESPRAVGKDTPSRKSAGSGGRSSGGDDLLQDLDDMIFGKKAGTASQQERTPRKEQKDDFIGL

SEQ ID NO: 25489 - DNA, 725 bp, Triticum aestivum
ctgtgggattgatgggcactgggctcgtgattgcaatgctggcgactggaaaaataagtgctatcactgtggagaaaagggccatatagaaaaaaactgccagaacagtcctaagaatatcaagcggggaagaagctactcacgctccccaccacctcatcgcgaaaggagcctaagcaggagttacagccgatcgccttatccaaggagggatgatcgagctgttggccatgaggaaaggcgaccaaaaagctctagttacagccctaggaggagtgcttcaccttccggtttgaaccgcagcccagcaccaaatggcaagagccacccaccaaaggagcaagctgaagtcaatggttcacataacggtgtgagaggcaacagcctgagtcccgcccgtgatagccgcccagccaccaacagaatgagccctagcccctgggagtgatggcgaatgctgcgcaccaccctcaacttgaactaatcttgttgcatcgtctcttgggccgaactcttatgttggtagactatgttagtatgtttgtcgaacgtcggttcgcgttatgcctcctcgtctaaacctgtccgggtcatgaatttttcatgattgacaaatgttgacgtgtgttatgccgccttgtctgaacctgaaagtctttttgcggttgcgacaatgttatctagacttggctagcatgatcagtgttgtccagacgtcacttgct

SEQ ID NO: 25490 - protein, 148 aa, Triticum aestivum
CGIDGHWARDCNAGDWKNKCYHCGEKGHIEKNCQNSPKNIKRGRSYSRSPPPHRERSLSRSYSRSPYPRRDDRAVGHEERRPKSSSYSPRRSASPSGLNRSPAPNGKSHPPKEQAEVNGSHNGVRGNSLSPARDSRPATNRMSPSPWE

SEQ ID NO: 25491 - DNA, 856 bp, Triticum aestivum
ctcacatactggcagggtgtcctggttttccttgctgccaagtctcgatttatcaagaatgctgaaaaagctgctgatctccagaactatgtattgtgcgttgagatgctcatagcagccattgggcacctatttgcctttccttacaaggagtatgcaggtgcaaatgctcgcccttcgggtggcttcagggaaagccttcttcatgctttaaaattcaacgatttctaccacgacactgttcaccagtttgctcctacctacaacgaatatgtgctgtacaaccacaatgagggagagagtgcaccaacaaagtttccttcagggagcgccgtgccaagtgtccgggatgtggagttggccggcatcaccgtgatgccgccctcaaataatagtccagtgacctcaagcgtgtcatccaaccacgtagaccaggacgagtcaatgaccactccgatcaggaacaaagtggacccgcctggaggaatgtacgacctcacggacctgctcgacgtggacttgtctagctaccccgccaaggttcctgcgatctctgatgtaagaaaacaatgaccaggtgcgacagccaatgtgtctcggtagcgactgggggaaattgtggccttccattttgtcatagataacgctgtaaaaatgtgtgtgtactacttccggttccagcctttccccattgaagaaggggggtttattcatgactgcactgcagctgtgcgcacggcctctctcgccctactcttcgacatagttgttttggtgcgttgtgagctcaaggtgaactgttgtgacatgagactatgaataccatactaatagtttgctgatagcagttttggtg

SEQ ID NO: 25492 - protein, 190 aa, Triticum aestivum
LTYWQGVLVFLAAKSRFIKNAEKAADLQNYVLCVEMLIAAIGHLFAFPYKEYAGANARPSGGFRESLLHALKFNDFYHDTVHQFAPTYNEYVLYNHNEGESAPTKFPSGSAVPSVRDVELAGITVMPPSNNSPVTSSVSSNHVDQDESMTTPIRNKVDPPGGMYDLTDLLDVDLSSYPAKVPAISDVRKQ

SEQ ID NO: 25493 - protein, 155 aa, Triticum aestivum
MLIAAIGHLFAFPYKEYAGANARPSGGFRESLLHALKFNDFYHDTVHQFAPTYNEYVLYNHNEGESAPTKFPSGSAVPSVRDVELAGITVMPPSNNSPVTSSVSSNHVDQDESMTTPIRNKVDPPGGMYDLTDLLDVDLSSYPAKVPAISDVRKQ

SEQ ID NO: 25494 - DNA, 846 bp, Triticum aestivum
tacaggcctgcaccaccaaaaccggagaagcaagctcctgctcctgccctgtctgtggctgttgatcctccaactttcagtcctaatcctgagagcagcaacattcaagacccagaagttgatgcgcttgcggtgtatgtcaaaaatctgcccttacatgccacacctagccaattagaagaggagttcaaaagatttggtactattaaacatgatggtatccaagttagaagccacaagattcaagggttctgctatggcttcatagagtttgaggatgccagctcagttcaaagtgcactagcggcttctcctgtgacgattgatgaccggccatgccacgtcgaagaaaaaagaactcctggttcacgtggtagtagcaggggaaggtttccaccgggtagaggtggtaatttccgaggtgaaggcatgagaggccgtggtagttacactggagggagaggctatggaaggggcgagtacaacaactatcgatctgattttggaggcagaggcggtggtagaggcggctcaggtcgtggaggtgatgttggctaccagcgggttgatcactctggcaccggtggtcgtggtggtgcccgggcagctgcaaagtgagtttggtagctatgcgttggtagaagtttgctatttcattgtcgttgaacgtactaagattcacaaaaatggtgtgtcgtgagctgggttcctgtgcggtcgttgtcagcgtattcaggtcataaattggtgctctccttgttttgtggcaaggaaagcagtggtgatattggttactaattgtagaatattacaatctattcagatgcagtcctagtaagttttggc

SEQ ID NO: 25495 - protein, 205 aa, Triticum aestivum
YRPAPPKPEKQAPAPALSVAVDPPTFSPNPESSNIQDPEVDALAVYVKNLPLHATPSQLEEEFKRFGTIKHDGIQVRSHKIQGFCYGFIEFEDASSVQSALAASPVTIDDRPCHVEEKRTPGSRGSSRGRFPPGRGGNFRGEGMRGRGSYTGGRGYGRGEYNNYRSDFGGRGGGRGGSGRGGDVGYQRVDHSGTGGRGGARAAAK

SEQ ID NO: 25496 - DNA, 1354 bp, Triticum aestivum
aggtgcgtcgtgcccatgcgaaaaagaacaagggaaaatggtcaagttgcagcacgctcaagttgtcacagcctgtagtttggcagcgacgtgcgcgcggaaagcaattgcggcggtcgcatggcgtcatggctcacgcaccgcgggatggagacaacgccgcccgcccgccctccccatctcccgtccacgtacacgtacactagcttagctggatgactgggtgctctgccgaatctacaacaagaagggcgtcatcgagcggtacgacacggcggactccgacgccgccgacgtcaagccggcgccggcgccggctgccaagaactcgcggccgggccagtaccacgctgctgggccggcgatgaaggtcgagctgtccgactacgggttctaccagcagccgtcgccgccggccacggagatgctctgcttcgaccgctccgggtcggcggaccgggactcgaactcgaaccactccatgccgcgcctgcacacggactccagctcctcggagcgcgcgctgtcctcgccgtcgcccgacttcccgagcgacatgactacgcggagagccagcacgccgccggcctcgccggggggtggccgggcgacgactggggcggcgtcatagacgacgacgggttcgtcatcgacggctcgctgattttcgacccgccctcgccgggcgccttcgcccgcgacgccgccgcgttcggcgacatgctcacgtacctgcagaaaccgttctgaatgaaggcagcatccgtcagactcctcctcctcagcagccccccactaacatgttcatcaggtctcgtgtaattcggtttgcaagcttcccaaaccaatgcagattagagaaaacttagtgaggattaacccgcacaaatctgatacccctagatcgatcgatcgatcgggggtcggatgcagagttttcccaaacgtacgtacataccaggtgttagcctcgtcaggttttgggtggcatttgggcgacttggtggtacaagctaggatcgttgtaccatgtgccctgctgcccctgcactttggccgccgcttggacatggcaagcatgcatggtcaggtagccgtcaggtaatatttcgacttttgttgtggtagtacattccaaattagaagtagaggtcgaacaagaaaaagaagctgaagttttgggttcaggagctgtggatcgtgttgtgtagctagtgtagagttggttcgggttattattttcttctcgaaggactttggttcagtgtcgtggcagttggctgacgcttttaggttttgttgtgtcatgtaattgtaattgcgaagatgatgtgatagagtcgctttcagtggc

SEQ ID NO: 25497 - protein, 88 aa, Triticum aestivum
MKVELSDYGFYQQPSPPATEMLCFDRSGSADRDSNSNHSMPRLHTDSSSSERALSSPSPDFPSDMTTRRASTPPASPGGGRATTGAAS

SEQ ID NO: 25498 - protein, 85 aa, Triticum aestivum
MQIRENLVRINPHKSDTPRSIDRSGVGCRVFPNVRTYQVLASSGFGWHLGDLVVQARIVVPCALLPLHFGRRLDMASMHGQVAVR

SEQ ID NO: 25499 - protein, 69 aa, Triticum aestivum
GASCPCEKEQGKMVKLQHAQVVTACSLAATCARKAIAAVAWRHGSRTAGWRQRRPPALPISRPRTRTLA

SEQ ID NO: 25500 - DNA, 727 bp, Triticum aestivum
  misc_feature (499)..(499): n is a, c, g, or t
  misc_feature (629)..(629): n is a, c, g, or t
cacagaagcccgcgtgctccgattaaattatgaggtactttcgtttcttagtactagtcctaacgctcatgagaatatgatgctgcctaaatcagatatgtttgtatttctcaggaaccaagggcctatgataaaccaaagagactacgagcgttggagcataatcaagcgtggttaccaagaaatacgcactggttcttaagaaaaacttggtttgctgccgttacaccaaccgcccctgccgctacaaattaaatgtgcaaattccagaaaaagatgaaccatataccgaagcacgcgcgctccaattgaattatgaggtacttttgtttctaataagtagttctagtgttcatgagattatgatgctgcctaaatcagatatgtttgtatttctcaggaacgaagggcctatgataaaccaaagagactactagcgttggagcataatcaagcgtggttacaaaggcgggaatgaagatggaactttaaggccttntacaatgcaagatgcttagaaaaataaatcagttttttcttaaataacagtgcttatttatatagggtaaacgcttaattgcacccctcctggttcctaagaaaaacttggttataaaaatttgtcgtanccgtaaccctgtgtaccaagttgtgtccaacgaccagcttacagaatctcagccttttgtttacttttggcaagagctcacatcatgtcgtgattggc

SEQ ID NO: 25501 - protein, 66 aa, Triticum aestivum
TEARVLRLNYEVLSFLSTSPNAHENMMLPKSDMFVFLRNQGPMINQRDYERWSIIKRGYQEIRTGS

SEQ ID NO: 25502 - protein, 41 aa, Triticum aestivum
MMLPKSDMFVFLRNQGPMINQRDYERWSIIKRGYQEIRTGS

SEQ ID NO: 25503 - protein, 40 aa, Triticum aestivum
MLPKSDMFVFLRNQGPMINQRDYERWSIIKRGYQEIRTGS

SEQ ID NO: 25504 - DNA, 735 bp, Triticum aestivum
gtttttggatcctatttgtattgagaggatgactcgtaagcataacatcgactctggtcttattgttgagcaggtgtcaaaagaatcacatgctgagaaaattggaattcgcaagggtgatgtcattgaaagttttaatggaaagcacatttctactacaattgagttggaaagcatgttgatagacttatgttgggatcattttgatcaaagaaagaaattgaatgctgaaaaagatgtttcggtgaaaatatttgatgctactaaactttgtccgagaactagaaacttgactgcaattgtatcggattgtggagaggacattgtaaaaggtgcttaccctatcatgggtgaagaagccatgtcagtcttatgattcttggtccttgagctaggcctgaggcacctgcccactgctggccttcatggatgagtcaaccgaattaaccctgcatgctcattgcaaattcattttcggcataatgttttcgttgtgtattcttggaaaaaaaacacttcaaattatgggtgcctttggaccgtagtagcagcttaagcttagagcataacatgcatgttagagcagaacttattattggctcctacttgtttcgagtcttgtgaaactcacatcatgtctgtgtgcaagtgtagcagtcgtggatgatgaattgaactgggcaattatgctggagtgttattggctactaattgctagtaagaatgttattggct

SEQ ID NO: 25505 - protein, 124 aa, Triticum aestivum
FLDPICIERMTRKHNIDSGLIVEQVSKESHAEKIGIRKGDVIESFNGKHISTTIELESMLIDLCWDHFDQRKKLNAEKDVSVKIFDATKLCPRTRNLTAIVSDCGEDIVKGAYPIMGEEAMSVL

SEQ ID NO: 25506 - protein, 115 aa, Triticum aestivum
MTRKHNIDSGLIVEQVSKESHAEKIGIRKGDVIESFNGKHISTTIELESMLIDLCWDHFDQRKKLNAEKDVSVKIFDATKLCPRTRNLTAIVSDCGEDIVKGAYPIMGEEAMSVL

SEQ ID NO: 25507 - protein, 66 aa, Triticum aestivum
MLIDLCWDHFDQRKKLNAEKDVSVKIFDATKLCPRTRNLTAIVSDCGEDIVKGAYPIMGEEAMSVL

SEQ ID NO: 25508 - DNA, 909 bp, Triticum aestivum
catccacctgttcaaccacgccggcgccgacgagaagaggtacatggagtggctgggtgcgcaggcggcgaggtcggtgctgtacgtttcatttgggagcatatggacgtacagcaagaagcaaatggaggagattgcgaacgggctgcggcggtgcgggcggccgtacctgctcgtcgtgcgcaatgacgggcggcaggaggacgtgagccggagcctagacgacctcgtgctagaggggcagggcatggtggtggagtggtgcgaccaacccaaggtcctgtcgcacgcgtccgtgggatgcttcgtcacgcactgcggctggaactcgacgctggaggccatggccctcggcgtgccggtcgtcgccgcgccaagcttgttcgaccagccgacgaacgccttcttgatagaggaggagtgggctgccggcgtcagaggggagcgcaacagcgagggcggcttcaccggggaggagctcgcaaggtgcgtcgagctgctcatgggtcatggcccgagggccattgagatcagggaaagagtggacgctctgaaagggatgacgcgagaggcggcggcttcgggcgggccggcggagcggagcctccgaagctttgtcatggcggccggttcaatcgtcggatgaagtttgcaggaatacaccaccaaatctgtccaaatcgattaagtggatgcatgctggagtggatcagctagctctctcgatcggtcggagttaaacaacatttaataaccgggattgctaaatctcagtcgacttcttggtcgatgatatattcgcaggatcttacggaagatcggtgcgaatttttttaatttttcttttactcatgttatgtcactttctcacgccgtatgcagcaacttaatagtgacacgttaattgct

SEQ ID NO: 25509 - protein, 214 aa, Triticum aestivum
IHLFNHAGADEKRYMEWLGAQAARSVLYVSFGSIWTYSKKQMEEIANGLRRCGRPYLLVVRNDGRQEDVSRSLDDLVLEGQGMVVEWCDQPKVLSHASVGCFVTHCGWNSTLEAMALGVPVVAAPSLFDQPTNAFLIEEEWAAGVRGERNSEGGFTGEELARCVELLMGHGPRAIEIRERVDALKGMTREAAASGGPAERSLRSFVMAAGSIVG

SEQ ID NO: 25510 - protein, 200 aa, Triticum aestivum
MEWLGAQAARSVLYVSFGSIWTYSKKQMEEIANGLRRCGRPYLLVVRNDGRQEDVSRSLDDLVLEGQGMVVEWCDQPKVLSHASVGCFVTHCGWNSTLEAMALGVPVVAAPSLFDQPTNAFLIEEEWAAGVRGERNSEGGFTGEELARCVELLMGHGPRAIEIRERVDALKGMTREAAASGGPAERSLRSFVMAAGSIVG

SEQ ID NO: 25511 - protein, 173 aa, Triticum aestivum
MEEIANGLRRCGRPYLLVVRNDGRQEDVSRSLDDLVLEGQGMVVEWCDQPKVLSHASVGCFVTHCGWNSTLEAMALGVPVVAAPSLFDQPTNAFLIEEEWAAGVRGERNSEGGFTGEELARCVELLMGHGPRAIEIRERVDALKGMTREAAASGGPAERSLRSFVMAAGSIVG

SEQ ID NO: 25512 - DNA, 807 bp, Triticum aestivum
  misc_feature (698)..(698): n is a, c, g, or t
  misc_feature (778)..(778): n is a, c, g, or t
  misc_feature (780)..(780): n is a, c, g, or t
  misc_feature (783)..(784): n is a, c, g, or t
aaaatatctcctctctctccctctctcccttctcatccggctcctcttcttcgtgccgccgcctcctcctcccccacgaccccgcctcatctcctgccgctgcctcctcctcctcccccgcgaccccgcctcatctcctgccgcttcctcctcctctcctttccttgatgtctctagggcgacccccaaccacccaacaccaactccggcggcctcctctccctccagtgccactgctcgaccctctccggcgaccctcaccatccttcctctcgaaaggaagggaagggatggggaggggaggctccagatcgagcggagcgacacccagatccgcagcggcacaggcaccggcgcgccgtcgtccacctggtcctcgaggaaggccatggatggatggaacgatcgatggatgggggcggaaccctagccccacacccacccatggatgacgacggcggcggccttctctcggtgggggtggggagcgaagctttctgatacggtggccctcgacgcccgcgacgggatgcagcacctagacttcaaagcctacttgaatggatatggttcctgagaggccatttcttatgtgcatcaggtcctgaaggtggatgttgcttatttagatatctatgattccaatttattcaaaaggttcatgtcatactggatgttattcattgagtagcttcaancaatatggcatgaacatatttgttttccatttggccaataatgaaatgatctttgtgcatataaaatggttatcgatacnanaanncttggttttaataagcttcttgc

SEQ ID NO: 25513 - protein, 149 aa, Triticum aestivum
NISSLSLSPFSSGSSSSCRRLLLPHDPASSPAAASSSSPATPPHLLPLPPPLLSLMSLGRPPTTQHQLRRPPLPPVPLLDPLRRPSPSFLSKGREGMGRGGSRSSGATPRSAAAQAPARRRPPGPRGRPWMDGTIDGWGRNPSPTPTHG

SEQ ID NO: 25514 - protein, 142 aa, Triticum aestivum
KYLLSLPLSLLIRLLFFVPPPPPPPRPRLISCRCLLLLPRDPASSPAASSSSPFLDVSRATPNHPTPTPAASSPSSATARPSPATLTILPLERKGRDGEGRLQIERSDTQIRSGTGTGAPSSTWSSRKAMDGWNDRWMGAEP

SEQ ID NO: 25515 - protein, 94 aa, Triticum aestivum
MSLGRPPTTQHQLRRPPLPPVPLLDPLRRPSPSFLSKGREGMGRGGSRSSGATPRSAAAQAPARRRPPGPRGRPWMDGTIDGWGRNPSPTPTHG

SEQ ID NO: 25516 - DNA, 664 bp, Triticum aestivum
ggggaggccgacaccctccggcgcgaggacgcgctggcgtacgccggcaggatggaggcgtttgtacgggacgtccgccgcgacctcgcattgcccaacctcctcgtcatccaggttgggatcgcgacggcgcagtggcaggggaataagcaggggaagtggctggacctggtgaggaagcagcagagggcggtgcgggtggcgaacctcaagtacgtggacgccatggggctccccctcgccaacgacatcacgcacctcaccacgcaggcccaggtccggctcggcaagatgctcgccgacgcatacatcgccacgctctgacgatgatccagtacgcaatcagtcggtgtgtgtgcctgcctgcctgattagtagtactagagttcactagaatactatcattgattgattccacggaagagttgatttggtgatgattagttgttgacaagagatgaatagatctgctttggtcaggctccaacgagctcagatcattgctgccattagttgttattggcattgtaggaacaagtgtaacagtctcatcaccagtacgacagacattgccgttttgcggagggaaaatccttggcctttgtgatgtttatctacctgatgaaagtgaaaagaagcctgtttcaacggcacagactttgtt

SEQ ID NO: 25517 - protein, 107 aa, Triticum aestivum
GEADTLRREDALAYAGRMEAFVRDVRRDLALPNLLVIQVGIATAQWQGNKQGKWLDLVRKQQRAVRVANLKYVDAMGLPLANDITHLTTQAQVRLGKMLADAYIATL

SEQ ID NO: 25518 - protein, 90 aa, Triticum aestivum
MEAFVRDVRRDLALPNLLVIQVGIATAQWQGNKQGKWLDLVRKQQRAVRVANLKYVDAMGLPLANDITHLTTQAQVRLGKMLADAYIATL

SEQ ID NO: 25519 - protein, 57 aa, Triticum aestivum
GRPTPSGARTRWRTPAGWRRLYGTSAATSHCPTSSSSRLGSRRRSGRGISRGSGWTW

SEQ ID NO: 25520 - DNA, 705 bp, Triticum aestivum
caacgtctccaacgaggatatcaaggaactgttttctgagatgggtgaaatccagcggtactccattaactatgacaagagtggaagatcaaagggaactgcagaggttgtattttcggcaagatcatctgccgtagctgctcttaagaagtataacaacgtgcatcttgatggcaaacctatgaaaattgaagtcattgggacaaacattgaggcacctgcacccatacctgctattttcgctttggctccatctcctggaaacttcagttttccttccaaaagtggacctggaatgggtgttagcggtcgaggatggtctcgtggtggaggtggcttcagtggtcgcagcggaggtgggttcggtggtcgtggccgagggcgtacggaccgtgagcgagggaagggagggggtcgcatcctggaactttctgctgcagatctcgacgccgacttggacaagtaccactcggctgcaatgcaaatcagctaaatggatctgcattgcattgcgtgtgttcttgtttttctgtagtgatatatggtcctgacctatattaattggataacgatctttatgctaaactggcatggtagaaggtagcattgggtgatgaaaatggaggggaacatgtgaggtgccattccttcatttgcaatatagcaggagggagggaattggtctatttgagatgaaaatttctg

SEQ ID NO: 25521 - protein, 163 aa, Triticum aestivum
NVSNEDIKELFSEMGEIQRYSINYDKSGRSKGTAEVVFSARSSAVAALKKYNNVHLDGKPMKIEVIGTNIEAPAPIPAIFALAPSPGNFSFPSKSGPGMGVSGRGWSRGGGGFSGRSGGGFGGRGRGRTDRERGKGGGRILELSAADLDADLDKYHSAAMQIS

SEQ ID NO: 25522 - protein, 150 aa, Triticum aestivum
MGEIQRYSINYDKSGRSKGTAEVVFSARSSAVAALKKYNNVHLDGKPMKIEVIGTNIEAPAPIPAIFALAPSPGNFSFPSKSGPGMGVSGRGWSRGGGGFSGRSGGGFGGRGRGRTDRERGKGGGRILELSAADLDADLDKYHSAAMQIS

SEQ ID NO: 25523 - protein, 103 aa, Triticum aestivum
MKIEVIGTNIEAPAPIPAIFALAPSPGNFSFPSKSGPGMGVSGRGWSRGGGGFSGRSGGGFGGRGRGRTDRERGKGGGRILELSAADLDADLDKYHSAAMQIS

SEQ ID NO: 25524 - DNA, 749 bp, Triticum aestivum
aagacgatgatggtgtcgctgagagcggtaccaagatgaagcagtacgtgctgacgaagctgaggagctccaaggtgcccgcagaggcgcgggaagtggtggagaggagcgagctgagcgacgacgcgcccgccgcgccgctgcggttccggccgccgctctcgctcgtgttcgcgggcatcagcaagggggacgtgtgcgtggccggagacgcgctgcacccgatgacgccggacctgggccagggcggctgcgcggcgctggaggacggcgtcgtactggccagatgcctcggcgaggccatcctcggtggcgatggcgacggagcgacaggcggcactgagaaggagaggatcgagtcgggcctgcgcaggtacgtcggtatacggcggtggaggagcatcgagctcatcggaacggcctacgttgtcggcttcctgcagcagagtggtaacaggatcatcagctttctgcgggagaaggtgttggctggagtactcgcgggaaggctcgtgaagatgtcggactacgactgcgggaccctgtcaagctagggagtacagtagtactagtacatttgaggcgatcaggatagtcaaagcatctccagccctgaaacagggcaccaaaaggctcggagtaaaaaaaaaaagaaggcaccaaaactgcatcttttggcacgaaaatgttgcgtttccaacagctgcctataacagggcatcaaaatatcaaaagtctcgcattgcatt

SEQ ID NO: 25525 - protein, 183 aa, Triticum aestivum
DDDGVAESGTKMKQYVLTKLRSSKVPAEAREVVERSELSDDAPAAPLRFRPPLSLVFAGISKGDVCVAGDALHPMTPDLGQGGCAALEDGVVLARCLGEAILGGDGDGATGGTEKERIESGLRRYVGIRRWRSIELIGTAYVVGFLQQSGNRIISFLREKVLAGVLAGRLVKMSDYDCGTLSS

SEQ ID NO: 25526 - protein, 172 aa, Triticum aestivum
MKQYVLTKLRSSKVPAEAREVVERSELSDDAPAAPLRFRPPLSLVFAGISKGDVCVAGDALHPMTPDLGQGGCAALEDGVVLARCLGEAILGGDGDGATGGTEKERIESGLRRYVGIRRWRSIELIGTAYVVGFLQQSGNRIISFLREKVLAGVLAGRLVKMSDYDCGTLSS

SEQ ID NO: 25527 - protein, 109 aa, Triticum aestivum
MTPDLGQGGCAALEDGVVLARCLGEAILGGDGDGATGGTEKERIESGLRRYVGIRRWRSIELIGTAYVVGFLQQSGNRIISFLREKVLAGVLAGRLVKMSDYDCGTLSS

SEQ ID NO: 25528 - DNA, 640 bp, Triticum aestivum
ggagtttgttcttgaatgcatcatttgacctctcgctccgtatgcttgcacctcgttgtataatgcatcgagaaggtggcacatttgaggagctgccagcatatgatctgaccatgcaatctaattgtgcagtggtactggatcatggaacagatattttcatctggttgggtgctgaactagcaacccaagaaggacaaactcaagcagctttggcagcatgtcgtacgctggcagaagagctaagtgaactccgttttccagctcccaggatactttcattcagagaagggagctctcaggctagatactttgtctcacgcctgatcccagctcacaaggaccctacttatgagcaggagtcgagatttcctcagctacggacccttgctcctgaactgagggccaggctaaagagcagcttcatccactttgatgactctagcttttgcgagtggatgcgcagcctcaaattggtcccgccggaaccaagctaatgcaaataattggatgagtgcaatcagaaacgattgtggatagccgaggtttggtttcaaacagagttgccaaacgaaatctgaaaactttgcgaggtaacgcctaaggcccaaacacttgtttgggttgatgaagcggcaat

SEQ ID NO: 25529 - protein, 164 aa, Triticum aestivum
SLFLNASFDLSLRMLAPRCIMHREGGTFEELPAYDLTMQSNCAVVLDHGTDIFIWLGAELATQEGQTQAALAACRTLAEELSELRFPAPRILSFREGSSQARYFVSRLIPAHKDPTYEQESRFPQLRTLAPELRARLKSSFIHFDDSSFCEWMRSLKLVPPEPS

SEQ ID NO: 25530 - protein, 151 aa, Triticum aestivum
MLAPRCIMHREGGTFEELPAYDLTMQSNCAVVLDHGTDIFIWLGAELATQEGQTQAALAACRTLAEELSELRFPAPRILSFREGSSQARYFVSRLIPAHKDPTYEQESRFPQLRTLAPELRARLKSSFIHFDDSSFCEWMRSLKLVPPEPS

SEQ ID NO: 25531 - protein, 144 aa, Triticum aestivum
MHREGGTFEELPAYDLTMQSNCAVVLDHGTDIFIWLGAELATQEGQTQAALAACRTLAEELSELRFPAPRILSFREGSSQARYFVSRLIPAHKDPTYEQESRFPQLRTLAPELRARLKSSFIHFDDSSFCEWMRSLKLVPPEPS

SEQ ID NO: 25532 - DNA, 931 bp, Triticum aestivum
aaaaagatatttctaatgtccgtcagatgtttggggaagatgatcaagaaaatctgtacaaccttgttcaggacaaagctacatctggaaagcagggtcttggcatcaaggacctgccgatgaaagttggtggccagcgttggaaggggaacaaaacctctcttggtgatagtgatgaggaaaattcaacccagtctgaattatcagaagtggaagaagatgaagacgaggaagtatctgccagtgatgctaaagtaaatgaagtacatgtgaaaaccataaaagaagtttgtgtggatgctaaacctaaaaccaagttcaagaagctttgcaaaaaaattcttcgtcaggctccatctcagtccatgaaattgaaggagctcaaggaagctgttgaagaacaatcaactattttgtccgacttctcctgtagacgtgaagctctatcattcttgaagaggaagctccagggaagcaagaaatttaatctggagggcaaaagggtgcatcttgtatcatgaagcaaatacgaagcctacgggacacaatatgattttgcgtgtggctcctgcagtcatatatttgtcgattgttgcttcggacgagtatacatacaggctgtgcaccaagtggcacggtatagatgtaaggagtcataggcccttgggacgggggccaaaattttgcaaatctggctagctgctggaaatttgaaagtgtgtgctgagtcatctgtatcgtaatatccatgtagctgatgcgtctataggtgtttgtaatttttttttgttgggtgtagacttgtatttagaggatggttatgcctattgtgcattggctgtctcgggtttagaactcgctcatataagtctccaaactcactttgctccataagtttccacatgcatatgatcatcaactatttttccct

SEQ ID NO: 25533 - protein, 172 aa, Triticum aestivum
KDISNVRQMFGEDDQENLYNLVQDKATSGKQGLGIKDLPMKVGGQRWKGNKTSLGDSDEENSTQSELSEVEEDEDEEVSASDAKVNEVHVKTIKEVCVDAKPKTKFKKLCKKILRQAPSQSMKLKELKEAVEEQSTILSDFSCRREALSFLKRKLQGSKKFNLEGKRVHLVS

SEQ ID NO: 25534 - protein, 164 aa, Triticum aestivum
MFGEDDQENLYNLVQDKATSGKQGLGIKDLPMKVGGQRWKGNKTSLGDSDEENSTQSELSEVEEDEDEEVSASDAKVNEVHVKTIKEVCVDAKPKTKFKKLCKKILRQAPSQSMKLKELKEAVEEQSTILSDFSCRREALSFLKRKLQGSKKFNLEGKRVHLVS

SEQ ID NO: 25535 - protein, 133 aa, Triticum aestivum
MKVGGQRWKGNKTSLGDSDEENSTQSELSEVEEDEDEEVSASDAKVNEVHVKTIKEVCVDAKPKTKFKKLCKKILRQAPSQSMKLKELKEAVEEQSTILSDFSCRREALSFLKRKLQGSKKFNLEGKRVHLVS

SEQ ID NO: 25536 - DNA, 560 bp, Triticum aestivum
  misc_feature (59)..(59): n is a, c, g, or t
ctggctactcaactctctccctcacacccccttctccaccaccggccgccgccgcggcnaggccggcgtggcggcgcgccaccagcacctcccaccacatcaccaccttgcgccatccaccagcgccaccatcttcttctccttccccgaatccaccatcatccatccacaccgccgctaccagcaccacaacgcttccccgcacctcgcgcccctgctgctcctcttcttctcctacgccttgctgttgctcctccacttctcaactcgaaccagctgctcctcctccttcccttgcctcttctcaatctgctgctactactcttctccttacctcactgctgcacttctccttctcctaaccttgctgctgttcttctctgaatcccgtactgctgctgctcctttctccatgccccagttgctgcttcttctttctctaatctcctgctgccatctctcttttcccttttcttctctgaattttctgtagtttgagacgtctagtctgtaacattcagattctaagagtacttgcttcctgtactagttacttctac

SEQ ID NO: 25537 - protein, 163 aa, Triticum aestivum
  misc_feature (20)..(20): Xaa can be any naturally occurring amino acid
WLLNSLPHTPFSTTGRRRGXAGVAARHQHLPPHHHLAPSTSATIFFSFPESTIIHPHRRYQHHNASPHLAPLLLLFFSYALLLLLHFSTRTSCSSSFPCLFSICCYYSSPYLTAALLLLLTLLLFFSESRTAAAPFSMPQLLLLLSLISCCHLSFPFSSLNFL

SEQ ID NO: 25538 - protein, 127 aa, Triticum aestivum
  misc_feature (20)..(20): Xaa can be any naturally occurring amino acid
LATQLSPSHPLLHHRPPPRXGRRGGAPPAPPTTSPPCAIHQRHHLLLLPRIHHHPSTPPLPAPQRFPAPRAPAAPLLLLRLAVAPPLLNSNQLLLLLPLPLLNLLLLLFSLPHCCTSPSPNLAAVLL

SEQ ID NO: 25539 - protein, 119 aa, Triticum aestivum
  misc_feature (19)..(19): Xaa can be any naturally occurring amino acid
GYSTLSLTPPSPPPAAAAXRPAWRRATSTSHHITTLRHPPAPPSSSPSPNPPSSIHTAATSTTTLPRTSRPCCSSSSPTPCCCSSTSQLEPAAPPPSLASSQSAATTLLLTSLLHFSFS

SEQ ID NO: 25540 - DNA, 1440 bp, Triticum aestivum
ccgaaacagatccacctcctcagcgtcgcgtggtgggaagacgagaacctcccaaaggccaaagcccataacccctaacctagggtttcgccgccatgggatccgccgcctccgccgcctccgacgcagcgccgccaccgccttctccagcgcaaccacacggggccgcgccgccgtatggggttgggctcgccggcatcctccctcagaagccggatggggatgataagaaggaggagaaggtggactacctcaacctcccttgccccgtgccgtacgaggagatccagcgcgaggccctcatgtctctgaagcctgaactttttgaaggtttgaggtttgacttcacaaagatgttaacccagaagttcgctcttagccatagtgtccttatgggctccctggaagttccgtctcagtcagctgatgttataaaagtcccaacatcacagtatgaatttggtgccaattttttagatccaaagttaatgcttatcggaaggttgatgactgatggaaggctgaatgctcgtgtgaaatgtgatctgacagagaatctcgcgctgaaaataaatgcacagcttactagtgagcctcattactctcaagggatgttcaactttgactacaagggcacagactatcgagcacagtttcaaattggaaacaatgcgttctatggggcaaattatatccagagtgttacgccaaatttgtcgatgggaacagagatattctggcttggtcagcaaaggaagtcaggaattggatttaattctcgctacaatacagataagatggtgggtactctacaggttgctagcactggtattgttgcgttaagttatgtccagaaagtttctgaaaaggtatctcttgctactgactttatgtataaccacatgtccagagatgtgacttccagcgttggttacgattatatccttaggcagtgccgtctaaggggcaaagttgactcaaatggtgtcgttgctgcatacttggaggagagattgaacatgggtgtcaactttcttctgtctgcagagattgaccatccaaagaagaactacaagtttggttttggaatgactgtaggagagtagatatgctcacagcaattactgtgagaggactacagatgtctcctcagttcgttataagtgcaggtttaccatatggtctcggttcaagtgttcgggacctacagattcgctcctcaagcgttgcaggctttttcggtgtacttgcggttgtctcatttcagctgctttagatagcatgggcatttgggcgtccatgattctttgtttatctaaaacaagctgaaacgttgttgtaataatgttcacttggttgttggagatttttgacccttaggttcccagcaataggcttctgtgaaatgaccgtactccacaagctacagattatacattg

SEQ ID NO: 25541 - protein, 336 aa, Triticum aestivum
MGSAASAASDAAPPPPSPAQPHGAAPPYGVGLAGILPQKPDGDDKKEEKVDYLNLPCPVPYEEIQREALMSLKPELFEGLRFDFTKMLTQKFALSHSVLMGSLEVPSQSADVIKVPTSQYEFGANFLDPKLMLIGRLMTDGRLNARVKCDLTENLALKINAQLTSEPHYSQGMFNFDYKGTDYRAQFQIGNNAFYGANYIQSVTPNLSMGTEIFWLGQQRKSGIGFNSRYNTDKMVGTLQVASTGIVALSYVQKVSEKVSLATDFMYNHMSRDVTSSVGYDYILRQCRLRGKVDSNGVVAAYLEERLNMGVNFLLSAEIDHPKKNYKFGFGMTVGE

SEQ ID NO: 25542 - protein, 267 aa, Triticum aestivum
MSLKPELFEGLRFDFTKMLTQKFALSHSVLMGSLEVPSQSADVIKVPTSQYEFGANFLDPKLMLIGRLMTDGRLNARVKCDLTENLALKINAQLTSEPHYSQGMFNFDYKGTDYRAQFQIGNNAFYGANYIQSVTPNLSMGTEIFWLGQQRKSGIGFNSRYNTDKMVGTLQVASTGIVALSYVQKVSEKVSLATDFMYNHMSRDVTSSVGYDYILRQCRLRGKVDSNGVVAAYLEERLNMGVNFLLSAEIDHPKKNYKFGFGMTVGE

SEQ ID NO: 25543 - protein, 250 aa, Triticum aestivum
MLTQKFALSHSVLMGSLEVPSQSADVIKVPTSQYEFGANFLDPKLMLIGRLMTDGRLNARVKCDLTENLALKINAQLTSEPHYSQGMFNFDYKGTDYRAQFQIGNNAFYGANYIQSVTPNLSMGTEIFWLGQQRKSGIGFNSRYNTDKMVGTLQVASTGIVALSYVQKVSEKVSLATDFMYNHMSRDVTSSVGYDYILRQCRLRGKVDSNGVVAAYLEERLNMGVNFLLSAEIDHPKKNYKFGFGMTVGE

SEQ ID NO: 25544 - DNA, 1849 bp, Triticum aestivum
caaaacataacctcggtaattttgatccggagaaatgaagttgttaaaatacatatgtctgataacttcttcataaatagcattgtatttttatgcaccacagacctaggtggccgacggggtggtctggccgtccggcacacgcctaaacgggtctggcctcacacaaacgcaaaccgcaaagttttatttataagcaggcccttctgagcttgcacgtggacctcacctggtggcactgctactgctgcctcctgcacttggggacaaggcgcagcggagccagcggcggcgtgatcagtcccggcgcctcgttcatgtctagacgtgcctcggcggggatttccccagtcgaagtggcgcacaaggctgcagagcgcgatctccagcaccggcatcgcgaagctgatgccggggcagagccgccggccggcgccgaacgggaggagctggtagtcgttcccccgcaggtccacgccctgcgcgctgccgccgcccaggaatcgctccggccagaactcctccgccgttgctccccacgccgccgggtccctcccgatcgcccacgcgttgacgaagagcgcagtctcagctgggatctcgtagccctgcacgaccgccgcggtcgtcgactggtgcgggatgaggagcggtgccgccgggtggagccggagcacctccttcagcaccgccctgaggtactccatcctgctcaggtcgtcttcctcgatggtcggtttgccttcggtgactcgatctatctcgtcctgcagcttggctattgcccgcgggttcccgacgagctccgccatggcccattccaacgtgaccgatgctgtgtctgtcccgccggctatcatgtccttgatgaggcttttgatgcgatcgttggtgagctcgagtccggcggcgccttcttccctaagccgcagcaggacgtcgaggaagctctcctcccctgcgccgttgtctggcttcttctcaaggtgctctgcgattatctctgataggaacttgtcccactgttcgagctcggcgtcgagcctcttctcgagacccgtcgcccacctaaccaccttcgccgccgcgtcggggagcacgtcacccgcctggagccccgacatgatcgctgcggagttacccaaaagcttttttagcttctcggccgtggcacctgcggcgccggtggtcgcgcgggtgaccaccgcgttgctgtaggcggacaggagctccctcagctccacaatctcacccgcctccgcggcgcggcgcaccccggcgacgagggcggccgcctcggcggcccgcacgggggcgaacgagtcggcacggcgcggggagaggaggtggacgacggccatcttcttgctgcggcgccaggcgtcgccgtagggtgcgaaggagacgttggtggagccgtacgtcagcttgtcggccggcgcgctgggcacgcgggaggcgaaggcgaggtcgtggttcttgtacaggcccgccgccgcggccgccgtggaaaccaccagcgtccgcctgcgcccgagctgcaacagcaggaggccgccatcggtgccgtaccgagcgtgcagctcgcgcaaggagcggtgcgggtggcggccaaggaggtggaggtggccgagcagcggacgcgacggcggcgagggcgggagcttgccacttctgctgcctcgagccttccaaacgacgtagcagaaggtcaagagcaccgcgacgaggacggcgtacggagacatcctccttccgccggaaatgtgttgtccgattcaacggaaaaatgtgttgcctggaactggaaacatatcgtgcggcgttgtgtgcgggtatgcggcgttgt

SEQ ID NO: 25545 - protein, 229 aa, Triticum aestivum
MSRRASAGISPVEVAHKAAERDLQHRHREADAGAEPPAGAEREELVVVPPQVHALRAAAAQESLRPELLRRCSPRRRVPPDRPRVDEERSLSWDLVALHDRRGRRLVRDEERCRRVEPEHLLQHRPEVLHPAQVVFLDGRFAFGDSIYLVLQLGYCPRVPDELRHGPFQRDRCCVCPAGYHVLDEAFDAIVGELESGGAFFPKPQQDVEEALLPCAVVWLLLKVLCDYL

SEQ ID NO: 25546 - protein, 191 aa, Triticum aestivum
MRSGAAGWSRSTSFSTALRYSILLRSSSSMVGLPSVTRSISSCSLAIARGFPTSSAMAHSNVTDAVSVPPAIMSLMRLLMRSLVSSSPAAPSSLSRSRTSRKLSSPAPLSGFFSRCSAIISDRNLSHCSSSASSLFSRPVAHLTTFAAASGSTSPAWSPDMIAAELPKSFFSFSAVAPAAPVVARVTTALL

SEQ ID NO: 25547 - protein, 162 aa, Triticum aestivum
MVGLPSVTRSISSCSLAIARGFPTSSAMAHSNVTDAVSVPPAIMSLMRLLMRSLVSSSPAAPSSLSRSRTSRKLSSPAPLSGFFSRCSAIISDRNLSHCSSSASSLFSRPVAHLTTFAAASGSTSPAWSPDMIAAELPKSFFSFSAVAPAAPVVARVTTALL

SEQ ID NO: 25548 - DNA, 1319 bp, Triticum aestivum
agagtctgacatggatcaacaaagtattgagtcgacaccagattcggagaaggccctatgcctcagggatgaactctcggccttgattgagatgcctacttctggacttgccaaaacagatctgattgcacgagacagggttaatgtgtttgttgcctgggcattactgttatcacaccttcagcgactgccgttatcatccactagtagggcattgctgttatcatatgtacaagataagattagtccgtgcatattggattgcattttccagcatatcccattaaggagtgggagtggcggtggagctagcgccagcgggaagaagaaagatgctgaactggtgcctgaagcaaaagctgccgcggaagcttccaagaatgccatcgtaacatgttcactgctgccgtacgtggaatccctttggcctgttggagttttggagatggcctcactggcagggtcattgtacgggatgatgattagactgctgccttcgtatgtgcgcacatggtttactggcttgagagatcgttcactgtcatcatccatcgagtccttgactagagtatggtgcagtcctccgcttctactagacgagttttgtcaggtgaaggagtctgtttatgctgatgaaacgttctcggtgagcgtgaaccggtcggcgtatgagatcattgctacgtacaagaaggaagaaacagggattgatcttgtgatacggcttccgagctgttaccctctgcggcatgtggaggttgaatgcactagaagcctgggcatcagcgaggtcaagtgcaggaaatggctgctgtcgctgacgtcattcgtgcgcaaccagaacggcgctgttgccgaggcgatccagacctggaagaagaatttcgacaaggagtttgagggggtggaggagtgccccatctgctacagcatcctgcacacaagcaaccacgggctcccgcggctggcgtgcaagacgtgcaagcacaagttccacggcgcctgcctctacaagtggttctccacctccaacaagtccacatgcccgctatgccagaccccgttttagtttagttagcctctagaagcaaatcctttcatgttcacatggttcatgttgtgtcgagttatgcatcaagtttgtttgttgttagctggggatgtatgactttttgtgtgtgagcccagcaaaagaaacaaattttggaacgcagtagggagcatccaaattttgtgcaaatagagggacatgttgtaatcgggaattatgtgagatatgttatagatgaggatgatgaaattacaggagcagtgtagtt

SEQ ID NO: 25549 - protein, 355 aa, Triticum aestivum
ESDMDQQSIESTPDSEKALCLRDELSALIEMPTSGLAKTDLIARDRVNVFVAWALLLSHLQRLPLSSTSRALLLSYVQDKISPCILDCIFQHIPLRSGSGGGASASGKKKDAELVPEAKAAAEASKNAIVTCSLLPYVESLWPVGVLEMASLAGSLYGMMIRLLPSYVRTWFTGLRDRSLSSSIESLTRVWCSPPLLLDEFCQVKESVYADETFSVSVNRSAYEIIATYKKEETGIDLVIRLPSCYPLRHVEVECTRSLGISEVKCRKWLLSLTSFVRNQNGAVAEAIQTWKKNFDKEFEGVEECPICYSILHTSNHGLPRLACKTCKHKFHGACLYKWFSTSNKSTCPLCQTPF

SEQ ID NO: 25550 - protein, 352 aa, Triticum aestivum
MDQQSIESTPDSEKALCLRDELSALIEMPTSGLAKTDLIARDRVNVFVAWALLLSHLQRLPLSSTSRALLLSYVQDKISPCILDCIFQHIPLRSGSGGGASASGKKKDAELVPEAKAAAEASKNAIVTCSLLPYVESLWPVGVLEMASLAGSLYGMMIRLLPSYVRTWFTGLRDRSLSSSIESLTRVWCSPPLLLDEFCQVKESVYADETFSVSVNRSAYEIIATYKKEETGIDLVIRLPSCYPLRHVEVECTRSLGISEVKCRKWLLSLTSFVRNQNGAVAEAIQTWKKNFDKEFEGVEECPICYSILHTSNHGLPRLACKTCKHKFHGACLYKWFSTSNKSTCPLCQTPF

SEQ ID NO: 25551 - protein, 325 aa, Triticum aestivum
MPTSGLAKTDLIARDRVNVFVAWALLLSHLQRLPLSSTSRALLLSYVQDKISPCILDCIFQHIPLRSGSGGGASASGKKKDAELVPEAKAAAEASKNAIVTCSLLPYVESLWPVGVLEMASLAGSLYGMMIRLLPSYVRTWFTGLRDRSLSSSIESLTRVWCSPPLLLDEFCQVKESVYADETFSVSVNRSAYEIIATYKKEETGIDLVIRLPSCYPLRHVEVECTRSLGISEVKCRKWLLSLTSFVRNQNGAVAEAIQTWKKNFDKEFEGVEECPICYSILHTSNHGLPRLACKTCKHKFHGACLYKWFSTSNKSTCPLCQTPF

SEQ ID NO: 25552 - DNA, 1402 bp, Triticum aestivum
  misc_feature (1062)..(1062): n is a, c, g, or t
  misc_feature (1369)..(1369): n is a, c, g, or t
actgatgggttgaagattccaccatcaagatgaccaacgcccagctgcgactctaggcggcgcgaatttctccgacgaggcacgcgtcaggaagctgcggcgaacacttccttggccggaggagggtcgggaagagttattgctagacaaattatggagacacgccctgaacttgccagagaaggtaacacggatttggttactccaataagaatggcggtacgttatggcaagatgcgcgtggtgcgagaattgctgcgacatgatttttccttagggtatgaaatgcacaagaacatctttcctctgcttaattgtgccgcagctggaggtcaggttaatgttgctcaagaaattctcagacattgccctgatgctccttatcgtgaaatagatggtgagactcggacatgccttcatatagctgtattgaacaatcatatcgagttcgttaaatttatcctgagcacaccatatcttcgaaagcttgttaacatgcaagacagcaacagaaaaactgcgttacattacgcagtccaggggtgctatcctaaaataattgctgccttactgtctcatgaggatatagacagagcagtacttgacaacagtgctaaaccaacagcttgggaactgtggatcaatacgtattgcgccaaaagcataaactggaataacgtatggatgcttaagttgaaaggccgtccccaaaataccatgtgtcttcaaaatattcatggtgatgtcaagcaaggagcaattaatgaatcaagcggggtagcaaagtcaccttgcccactgctttcattctgcctgtaagatacaaaggtgatgctggaagcgagggacttgccatgatgtctaggaagattgcatatcaggcattcctgatctcagacgccttagcggcgtgctcctcgtttgctgtcgccttgatatgcacgatccaggacatatcatttactaagaagctcatgtggtttgcttacgtggcttgttcagctagtttatatgcagtaatggtcccgcgtctccactggttgaccatcgcaccatgccttntggtgctttttggcccattcttactaggcagctgggcagatggccgccaaactcttataggttttgatacaatctcgaagcagtggaagtgatgaccctcctcctcctcccggaatctaaacccgaacatgtggacttctatgtgacgtgcacgtgttttacaagtagtgaatttccataagttaacaatatgtatgaatttacgaacttgtgtgatgtgtactagtatgaaacatttgtttatatatgtgtactacttcaaattatgccaatatatgtggactacttcatttgtctatatatgacnacattttttatatatgtgcttcagatttatgcc

SEQ ID NO: 25553 - protein, 221 aa, Triticum aestivum
METRPELAREGNTDLVTPIRMAVRYGKMRVVRELLRHDFSLGYEMHKNIFPLLNCAAAGGQVNVAQEILRHCPDAPYREIDGETRTCLHIAVLNNHIEFVKFILSTPYLRKLVNMQDSNRKTALHYAVQGCYPKIIAALLSHEDIDRAVLDNSAKPTAWELWINTYCAKSINWNNVWMLKLKGRPQNTMCLQNIHGDVKQGAINESSGVAKSPCPLLSFCL

SEQ ID NO: 25554 - protein, 201 aa, Triticum aestivum
MAVRYGKMRVVRELLRHDFSLGYEMHKNIFPLLNCAAAGGQVNVAQEILRHCPDAPYREIDGETRTCLHIAVLNNHIEFVKFILSTPYLRKLVNMQDSNRKTALHYAVQGCYPKIIAALLSHEDIDRAVLDNSAKPTAWELWINTYCAKSINWNNVWMLKLKGRPQNTMCLQNIHGDVKQGAINESSGVAKSPCPLLSFCL

SEQ ID NO: 25555 - protein, 194 aa, Triticum aestivum
MRVVRELLRHDFSLGYEMHKNIFPLLNCAAAGGQVNVAQEILRHCPDAPYREIDGETRTCLHIAVLNNHIEFVKFILSTPYLRKLVNMQDSNRKTALHYAVQGCYPKIIAALLSHEDIDRAVLDNSAKPTAWELWINTYCAKSINWNNVWMLKLKGRPQNTMCLQNIHGDVKQGAINESSGVAKSPCPLLSFCL

SEQ ID NO: 25556 - DNA, 759 bp, Triticum aestivum
  misc_feature (495)..(495): n is a, c, g, or t
  misc_feature (732)..(732): n is a, c, g, or t
cctgctcctgctcaacaggcaccaaacctgcaggctcctcaggctcaggctgcacctctagcaccagtgcagccatctggtggtgtctctgcagggcctaatgcaaatcctctaaaccttttcccgcagggtattccaagtggaggggcaaatgctggtgccggtgtgggtgccggtgctggtgcccttgatgcattgcgacagcttccacagttccaagcactgcttgcattggtccaggctaatccccaaatcctgcagccaatgcttcaagagctggggaaacaaaatccacagatcctgcggttgattcaggaaaatcaggctgagtttctccgcctggtaaatgaaacacctgagagtggtgctggcgggaatatactaggcgcgctagcagctcaaatgccacaggcagttcaagttactccagaagaacgggaggccatccagcggctcgaggggatggggttcaaccgtgagcttgtgttggaggtnttctttgcatgcaacagggatgaagaactggctgccaattatcttttggatcatggccatgagtttgaggaacaacaatagatgttagattggtcttgctgttgaaagacagaaaagtcagtgacagaagcatttcagtttggtgtcgttcttatatcttgctgctgaatatcactgctacttgccattagtgccttgttgctgactttcaatttcttgtatcctggaaatgctttntaagtacataatatcatatgcaaaccc

SEQ ID NO: 25557 - protein, 191 aa, Triticum aestivum
  misc_feature (165)..(165): Xaa can be any naturally occurring amino acid
PAPAQQAPNLQAPQAQAAPLAPVQPSGGVSAGPNANPLNLFPQGIPSGGANAGAGVGAGAGALDALRQLPQFQALLALVQANPQILQPMLQELGKQNPQILRLIQENQAEFLRLVNETPESGAGGNILGALAAQMPQAVQVTPEEREAIQRLEGMGFNRELVLEXFFACNRDEELAANYLLDHGHEFEEQQ

SEQ ID NO: 25558 - protein, 103 aa, Triticum aestivum
  misc_feature (77)..(77): Xaa can be any naturally occurring amino acid
MLQELGKQNPQILRLIQENQAEFLRLVNETPESGAGGNILGALAAQMPQAVQVTPEEREAIQRLEGMGFNRELVLEXFFACNRDEELAANYLLDHGHEFEEQQ

SEQ ID NO: 25559 - DNA, 630 bp, Triticum aestivum
acccacatgtgctactccaacttcaacgacatcatccagtccatcatcaacatggacgctgatgtgatcaccatcgagaactcgcggtccgacgagaagcttctgtccgtcttccgcgagggtgtggtgtacggtgctggcattgacccgggtgtgtacgacatccactcccccaggatcccgtccaaggaggagattgccgaccgtgtcaacaagatgctcgcggtcctggacaccaacatcctgtgggtgaaccctgactgcggtctcaagacccgcaagtacgccgaggtcaagcctgccctcaccaacatggttgaggccgccaagcagatccgtgccgagctcgccaaggcgcagtaagccgtgctcgtatagcagagccccccttttaattgcaaggaggatgtcaccaccatagccgtgtttactttgaataatctgggtctcgtatccacttgttggctaggctagtttgtttctcggcgccatgtgctcatcccttgatttggtggtttttgaggcggtttgtcggtgtgtattgtaaactgagtggcgaattgttcatctaagtcttgagtttgttacgttatgtttcaaattacaaaatttctccagatgttctgcctc
